United States Patent Application Publication US 2008/0113351 A1 - sequence listing, part 19

SEQ ID NO: 454298 - DNA, 19 bp, Mus musculus
  siRNA target sequence for 9530006B08Rik (NM_172683.1,1820-1838).
ccctctactctgaagtaga

SEQ ID NO: 454299 - DNA, 19 bp, Mus musculus
  siRNA target sequence for 9530006B08Rik (NM_172683.1,1821-1839).
cctctactctgaagtagat

SEQ ID NO: 454300 - DNA, 19 bp, Mus musculus
  siRNA target sequence for 9530006B08Rik (NM_172683.1,1864-1882).
gatactcggcatttgcttt

SEQ ID NO: 454301 - DNA, 19 bp, Mus musculus
  siRNA target sequence for 9530006B08Rik (NM_172683.1,1883-1901).
gcccgtattgcctaaaagt

SEQ ID NO: 454302 - DNA, 19 bp, Mus musculus
  siRNA target sequence for 9530006B08Rik (NM_172683.1,1885-1903).
ccgtattgcctaaaagtct

SEQ ID NO: 454303 - DNA, 19 bp, Mus musculus
  siRNA target sequence for 9530006B08Rik (NM_172683.1,1886-1904).
cgtattgcctaaaagtctt

SEQ ID NO: 454304 - DNA, 19 bp, Mus musculus
  siRNA target sequence for 9530006B08Rik (NM_172683.1,1892-1910).
gcctaaaagtcttcaaaaa

SEQ ID NO: 454305 - DNA, 19 bp, Mus musculus
  siRNA target sequence for 9530006B08Rik (NM_172683.1,2037-2055).
cttccgtaagcctaagcaa

SEQ ID NO: 454306 - DNA, 19 bp, Mus musculus
  siRNA target sequence for 9530006B08Rik (NM_172683.1,2210-2228).
cccctgtccagcgcaatat

SEQ ID NO: 454307 - DNA, 19 bp, Mus musculus
  siRNA target sequence for 9530006B08Rik (NM_172683.1,2213-2231).
ctgtccagcgcaatatcca

SEQ ID NO: 454308 - DNA, 19 bp, Mus musculus
  siRNA target sequence for 9530006B08Rik (NM_172683.1,2379-2397).
caatcacatgatcaacaat

SEQ ID NO: 454309 - DNA, 19 bp, Mus musculus
  siRNA target sequence for 9530006B08Rik (NM_172683.1,2407-2425).
cggaaaagtcccaagtatt

SEQ ID NO: 454310 - DNA, 19 bp, Mus musculus
  siRNA target sequence for 9530006B08Rik (NM_172683.1,2466-2484).
ctgcacttcgtgtaccttt

SEQ ID NO: 454311 - DNA, 19 bp, Mus musculus
  siRNA target sequence for 9530006B08Rik (NM_172683.1,2500-2518).
gatgcgatggccaagcatt

SEQ ID NO: 454312 - DNA, 19 bp, Mus musculus
  siRNA target sequence for 9530006B08Rik (NM_172683.1,2504-2522).
cgatggccaagcatttagt

SEQ ID NO: 454313 - DNA, 19 bp, Mus musculus
  siRNA target sequence for 9530006B08Rik (NM_172683.1,2510-2528).
ccaagcatttagtgttcaa

SEQ ID NO: 454314 - DNA, 19 bp, Mus musculus
  siRNA target sequence for 9530006B08Rik (NM_172683.1,2616-2634).
cgactggagcatgaagaat

SEQ ID NO: 454315 - DNA, 19 bp, Mus musculus
  siRNA target sequence for 9530006B08Rik (NM_172683.1,2648-2666).
ctcccctcgtccctaacaa

SEQ ID NO: 454316 - DNA, 19 bp, Mus musculus
  siRNA target sequence for 9530006B08Rik (NM_172683.1,2825-2843).
ggactgagtgtctgaatgt

SEQ ID NO: 454317 - DNA, 19 bp, Mus musculus
  siRNA target sequence for 9530006B08Rik (NM_172683.1,2949-2967).
gcttcgggtagtactgttt

SEQ ID NO: 454318 - DNA, 19 bp, Mus musculus
  siRNA target sequence for 9530006B08Rik (NM_172683.1,2992-3010).
gcggctgaacactttcgaa

SEQ ID NO: 454319 - DNA, 19 bp, Mus musculus
  siRNA target sequence for 9530006B08Rik (NM_172683.1,2993-3011).
cggctgaacactttcgaaa

SEQ ID NO: 454320 - DNA, 19 bp, Mus musculus
  siRNA target sequence for 9530006B08Rik (NM_172683.1,3054-3072).
ctctcagggagagaactta

SEQ ID NO: 454321 - DNA, 19 bp, Mus musculus
  siRNA target sequence for 9530006B08Rik (NM_172683.1,3056-3074).
ctcagggagagaacttaga

SEQ ID NO: 454322 - DNA, 19 bp, Mus musculus
  siRNA target sequence for 9530006B08Rik (NM_172683.1,3066-3084).
gaacttagagggcaaatat

SEQ ID NO: 454323 - DNA, 19 bp, Mus musculus
  siRNA target sequence for 9530006B08Rik (NM_172683.1,3174-3192).
gaaggccaccaaaattgga

SEQ ID NO: 454324 - DNA, 19 bp, Mus musculus
  siRNA target sequence for 9530006B08Rik (NM_172683.1,3299-3317).
cgaagcatgtagcagaaaa

SEQ ID NO: 454325 - DNA, 19 bp, Mus musculus
  siRNA target sequence for 9530006B08Rik (NM_172683.1,3319-3337).
gctggactcttcattgagt

SEQ ID NO: 454326 - DNA, 19 bp, Mus musculus
  siRNA target sequence for 9530006B08Rik (NM_172683.1,3492-3510).
cgtcgtgctggctatccta

SEQ ID NO: 454327 - DNA, 19 bp, Mus musculus
  siRNA target sequence for 9530006B08Rik (NM_172683.1,3557-3575).
cgaatcggttcgctaatgt

SEQ ID NO: 454328 - DNA, 19 bp, Mus musculus
  siRNA target sequence for 9530006B08Rik (NM_172683.1,3641-3659).
ggtcaacccgtgtatggaa

SEQ ID NO: 454329 - DNA, 19 bp, Mus musculus
  siRNA target sequence for 9530006B08Rik (NM_172683.1,3670-3688).
gcttgtcagcacagcaaaa

SEQ ID NO: 454330 - DNA, 19 bp, Mus musculus
  siRNA target sequence for 9530006B08Rik (NM_172683.1,3782-3800).
ccggttgtagctccaaaat

SEQ ID NO: 454331 - DNA, 19 bp, Mus musculus
  siRNA target sequence for 9530006B08Rik (NM_172683.1,3795-3813).
caaaatccagccactagat

SEQ ID NO: 454332 - DNA, 19 bp, Mus musculus
  siRNA target sequence for 9530006B08Rik (NM_172683.1,3880-3898).
gctgacgctgcttgtgatt

SEQ ID NO: 454333 - DNA, 19 bp, Mus musculus
  siRNA target sequence for 9530006B08Rik (NM_172683.1,3885-3903).
cgctgcttgtgattctgat

SEQ ID NO: 454334 - DNA, 19 bp, Mus musculus
  siRNA target sequence for 9530006B08Rik (NM_172683.1,3984-4002).
cttccttgtggctagtgtt

SEQ ID NO: 454335 - DNA, 19 bp, Mus musculus
  siRNA target sequence for 9530006B08Rik (NM_172683.1,4009-4027).
ggtcccgatggcaacgtta

SEQ ID NO: 454336 - DNA, 19 bp, Mus musculus
  siRNA target sequence for 9530006B08Rik (NM_172683.1,4010-4028).
gtcccgatggcaacgttaa

SEQ ID NO: 454337 - DNA, 19 bp, Mus musculus
  siRNA target sequence for 9530006B08Rik (NM_172683.1,4012-4030).
cccgatggcaacgttaact

SEQ ID NO: 454338 - DNA, 19 bp, Mus musculus
  siRNA target sequence for 9530006B08Rik (NM_172683.1,4014-4032).
cgatggcaacgttaactca

SEQ ID NO: 454339 - DNA, 19 bp, Mus musculus
  siRNA target sequence for 9530006B08Rik (NM_172683.1,4080-4098).
ggagcagctcaagctaaat

SEQ ID NO: 454340 - DNA, 19 bp, Mus musculus
  siRNA target sequence for 9530006B08Rik (NM_172683.1,4083-4101).
gcagctcaagctaaatgga

SEQ ID NO: 454341 - DNA, 19 bp, Mus musculus
  siRNA target sequence for 9530006B08Rik (NM_172683.1,4175-4193).
gccttcaccagctttttga

SEQ ID NO: 454342 - DNA, 19 bp, Mus musculus
  siRNA target sequence for 9830141C09Rik (NM_177201.2,354-372).
ggctgctgatattgatctt

SEQ ID NO: 454343 - DNA, 19 bp, Mus musculus
  siRNA target sequence for 9830141C09Rik (NM_177201.2,383-401).
ctaactgtgaggtcttaca

SEQ ID NO: 454344 - DNA, 19 bp, Mus musculus
  siRNA target sequence for 9830141C09Rik (NM_177201.2,396-414).
cttacatggaccttccatt

SEQ ID NO: 454345 - DNA, 19 bp, Mus musculus
  siRNA target sequence for 9830141C09Rik (NM_177201.2,400-418).
catggaccttccattatga

SEQ ID NO: 454346 - DNA, 19 bp, Mus musculus
  siRNA target sequence for 9830141C09Rik (NM_177201.2,437-455).
ccaaaggacatgataatca

SEQ ID NO: 454347 - DNA, 19 bp, Mus musculus
  siRNA target sequence for 9830141C09Rik (NM_177201.2,505-523).
cggggcagaacttttgaca

SEQ ID NO: 454348 - DNA, 19 bp, Mus musculus
  siRNA target sequence for 9830141C09Rik (NM_177201.2,524-542).
gctcagatgaagtgattct

SEQ ID NO: 454349 - DNA, 19 bp, Mus musculus
  siRNA target sequence for 9830141C09Rik (NM_177201.2,666-684).
ggatgtggaacactatgtt

SEQ ID NO: 454350 - DNA, 19 bp, Mus musculus
  siRNA target sequence for 9830141C09Rik (NM_177201.2,749-767).
gtgattttgtcaaatacta

SEQ ID NO: 454351 - DNA, 19 bp, Mus musculus
  siRNA target sequence for 9830141C09Rik (NM_177201.2,790-808).
gtcctcaatgtcattagtt

SEQ ID NO: 454352 - DNA, 19 bp, Mus musculus
  siRNA target sequence for 9830141C09Rik (NM_177201.2,795-813).
caatgtcattagtttggaa

SEQ ID NO: 454353 - DNA, 19 bp, Mus musculus
  siRNA target sequence for 9830141C09Rik (NM_177201.2,818-836).
ccgataccaggctttcaaa

SEQ ID NO: 454354 - DNA, 19 bp, Mus musculus
  siRNA target sequence for 9830141C09Rik (NM_177201.2,942-960).
gagtgtgcgggatagctat

SEQ ID NO: 454355 - DNA, 19 bp, Mus musculus
  siRNA target sequence for 9830141C09Rik (NM_177201.2,1123-1141).
gaaaagtgctacaagtgtt

SEQ ID NO: 454356 - DNA, 19 bp, Mus musculus
  siRNA target sequence for 9830141C09Rik (NM_177201.2,1201-1219).
cccgtggactgcttagcat

SEQ ID NO: 454357 - DNA, 19 bp, Mus musculus
  siRNA target sequence for 9830141C09Rik (NM_177201.2,1216-1234).
gcattcggagggaacttct

SEQ ID NO: 454358 - DNA, 19 bp, Mus musculus
  siRNA target sequence for 9830141C09Rik (NM_177201.2,1217-1235).
cattcggagggaacttctt

SEQ ID NO: 454359 - DNA, 19 bp, Mus musculus
  siRNA target sequence for 9830141C09Rik (NM_177201.2,1257-1275).
gcaactcaaggcttatgaa

SEQ ID NO: 454360 - DNA, 19 bp, Mus musculus
  siRNA target sequence for 9830141C09Rik (NM_177201.2,1258-1276).
caactcaaggcttatgaaa

SEQ ID NO: 454361 - DNA, 19 bp, Mus musculus
  siRNA target sequence for 9830141C09Rik (NM_177201.2,1292-1310).
gcacagcagaccttttcaa

SEQ ID NO: 454362 - DNA, 19 bp, Mus musculus
  siRNA target sequence for 9830141C09Rik (NM_177201.2,1369-1387).
cgaggcttacgagaaaata

SEQ ID NO: 454363 - DNA, 19 bp, Mus musculus
  siRNA target sequence for 9830141C09Rik (NM_177201.2,1505-1523).
ggactgtacagctcattaa

SEQ ID NO: 454364 - DNA, 19 bp, Mus musculus
  siRNA target sequence for 9830141C09Rik (NM_177201.2,1506-1524).
gactgtacagctcattaaa

SEQ ID NO: 454365 - DNA, 19 bp, Mus musculus
  siRNA target sequence for 9830141C09Rik (NM_177201.2,1537-1555).
gagatccgtctggttgaat

SEQ ID NO: 454366 - DNA, 19 bp, Mus musculus
  siRNA target sequence for 9830141C09Rik (NM_177201.2,1543-1561).
cgtctggttgaattcaaca

SEQ ID NO: 454367 - DNA, 19 bp, Mus musculus
  siRNA target sequence for 9830141C09Rik (NM_177201.2,1565-1583).
gtggtaccagcttgaatga

SEQ ID NO: 454368 - DNA, 19 bp, Mus musculus
  siRNA target sequence for 9830141C09Rik (NM_177201.2,1567-1585).
ggtaccagcttgaatgatt

SEQ ID NO: 454369 - DNA, 19 bp, Mus musculus
  siRNA target sequence for 9830141C09Rik (NM_177201.2,1668-1686).
gatgaagagtgtatccaaa

SEQ ID NO: 454370 - DNA, 19 bp, Mus musculus
  siRNA target sequence for 9830141C09Rik (NM_177201.2,1671-1689).
gaagagtgtatccaaatct

SEQ ID NO: 454371 - DNA, 19 bp, Mus musculus
  siRNA target sequence for 9830141C09Rik (NM_177201.2,1690-1708).
cggagagccaaaattgcaa

SEQ ID NO: 454372 - DNA, 19 bp, Mus musculus
  siRNA target sequence for 9830141C09Rik (NM_177201.2,1694-1712).
gagccaaaattgcaaagaa

SEQ ID NO: 454373 - DNA, 19 bp, Mus musculus
  siRNA target sequence for 9830141C09Rik (NM_177201.2,1810-1828).
gaaaaggcgaacctgttaa

SEQ ID NO: 454374 - DNA, 19 bp, Mus musculus
  siRNA target sequence for 9830141C09Rik (NM_177201.2,1815-1833).
ggcgaacctgttaataaga

SEQ ID NO: 454375 - DNA, 19 bp, Mus musculus
  siRNA target sequence for 9830141C09Rik (NM_177201.2,1824-1842).
gttaataagatcaaaattt

SEQ ID NO: 454376 - DNA, 19 bp, Mus musculus
  siRNA target sequence for 9830141C09Rik (NM_177201.2,1985-2003).
gtggagccggtggaattct

SEQ ID NO: 454377 - DNA, 19 bp, Mus musculus
  siRNA target sequence for 9830141C09Rik (NM_177201.2,1988-2006).
gagccggtggaattcttga

SEQ ID NO: 454378 - DNA, 19 bp, Mus musculus
  siRNA target sequence for 9830141C09Rik (NM_177201.2,1992-2010).
cggtggaattcttgatcta

SEQ ID NO: 454379 - DNA, 19 bp, Mus musculus
  siRNA target sequence for 9830141C09Rik (NM_177201.2,2355-2373).
ggatgctgagtatatctat

SEQ ID NO: 454380 - DNA, 19 bp, Mus musculus
  siRNA target sequence for 9830141C09Rik (NM_177201.2,2409-2427).
gaaatctcgacccaagaaa

SEQ ID NO: 454381 - DNA, 19 bp, Mus musculus
  siRNA target sequence for A930001N09Rik (NM_029870.1,408-426).
cttagccaacagttctgat

SEQ ID NO: 454382 - DNA, 19 bp, Mus musculus
  siRNA target sequence for A930001N09Rik (NM_029870.1,419-437).
gttctgatccagatttcat

SEQ ID NO: 454383 - DNA, 19 bp, Mus musculus
  siRNA target sequence for A930001N09Rik (NM_029870.1,422-440).
ctgatccagatttcatgta

SEQ ID NO: 454384 - DNA, 19 bp, Mus musculus
  siRNA target sequence for A930001N09Rik (NM_029870.1,456-474).
gatgaattatcaacagaat

SEQ ID NO: 454385 - DNA, 19 bp, Mus musculus
  siRNA target sequence for A930001N09Rik (NM_029870.1,546-564).
ggacaatgaggatgcttta

SEQ ID NO: 454386 - DNA, 19 bp, Mus musculus
  siRNA target sequence for A930001N09Rik (NM_029870.1,556-574).
gatgctttaacttcaaact

SEQ ID NO: 454387 - DNA, 19 bp, Mus musculus
  siRNA target sequence for A930001N09Rik (NM_029870.1,575-593).
gggaacagtgggatacata

SEQ ID NO: 454388 - DNA, 19 bp, Mus musculus
  siRNA target sequence for A930001N09Rik (NM_029870.1,577-595).
gaacagtgggatacatact

SEQ ID NO: 454389 - DNA, 19 bp, Mus musculus
  siRNA target sequence for A930001N09Rik (NM_029870.1,598-616).
gaagacttaactaagtaca

SEQ ID NO: 454390 - DNA, 19 bp, Mus musculus
  siRNA target sequence for A930001N09Rik (NM_029870.1,622-640).
ctcaccagctgtgacattt

SEQ ID NO: 454391 - DNA, 19 bp, Mus musculus
  siRNA target sequence for A930001N09Rik (NM_029870.1,644-662).
ggacaaaagaggtggatta

SEQ ID NO: 454392 - DNA, 19 bp, Mus musculus
  siRNA target sequence for A930001N09Rik (NM_029870.1,647-665).
caaaagaggtggattacct

SEQ ID NO: 454393 - DNA, 19 bp, Mus musculus
  siRNA target sequence for A930001N09Rik (NM_029870.1,657-675).
ggattacctgggtcttgat

SEQ ID NO: 454394 - DNA, 19 bp, Mus musculus
  siRNA target sequence for A930001N09Rik (NM_029870.1,765-783).
cgattccctttattatcct

SEQ ID NO: 454395 - DNA, 19 bp, Mus musculus
  siRNA target sequence for A930001N09Rik (NM_029870.1,821-839).
cctcctcttttcctagtaa

SEQ ID NO: 454396 - DNA, 19 bp, Mus musculus
  siRNA target sequence for A930001N09Rik (NM_029870.1,822-840).
ctcctcttttcctagtaaa

SEQ ID NO: 454397 - DNA, 19 bp, Mus musculus
  siRNA target sequence for A930001N09Rik (NM_029870.1,963-981).
gaccaacatgtatcataat

SEQ ID NO: 454398 - DNA, 19 bp, Mus musculus
  siRNA target sequence for A930001N09Rik (NM_029870.1,965-983).
ccaacatgtatcataatga

SEQ ID NO: 454399 - DNA, 19 bp, Mus musculus
  siRNA target sequence for A930001N09Rik (NM_029870.1,997-1015).
catgttgaatgtaaagact

SEQ ID NO: 454400 - DNA, 19 bp, Mus musculus
  siRNA target sequence for A930001N09Rik (NM_029870.1,1071-1089).
gagccaggtccacatagat

SEQ ID NO: 454401 - DNA, 19 bp, Mus musculus
  siRNA target sequence for A930001N09Rik (NM_029870.1,1278-1296).
cagcacttctgtttcagat

SEQ ID NO: 454402 - DNA, 19 bp, Mus musculus
  siRNA target sequence for A930001N09Rik (NM_029870.1,1529-1547).
ctgaaccaggttatgaaaa

SEQ ID NO: 454403 - DNA, 19 bp, Mus musculus
  siRNA target sequence for A930001N09Rik (NM_029870.1,1569-1587).
ggagatgacgtccatatct

SEQ ID NO: 454404 - DNA, 19 bp, Mus musculus
  siRNA target sequence for A930001N09Rik (NM_029870.1,1570-1588).
gagatgacgtccatatctt

SEQ ID NO: 454405 - DNA, 19 bp, Mus musculus
  siRNA target sequence for A930001N09Rik (NM_029870.1,1572-1590).
gatgacgtccatatcttct

SEQ ID NO: 454406 - DNA, 19 bp, Mus musculus
  siRNA target sequence for A930001N09Rik (NM_029870.1,1691-1709).
ccttgccaagtaatatgta

SEQ ID NO: 454407 - DNA, 19 bp, Mus musculus
  siRNA target sequence for A930001N09Rik (NM_029870.1,1721-1739).
gcttacatcatgggaaata

SEQ ID NO: 454408 - DNA, 19 bp, Mus musculus
  siRNA target sequence for A930001N09Rik (NM_029870.1,1733-1751).
ggaaatacgcagtgaagaa

SEQ ID NO: 454409 - DNA, 19 bp, Mus musculus
  siRNA target sequence for A930001N09Rik (NM_029870.1,1777-1795).
cttactccaaaccctaaaa

SEQ ID NO: 454410 - DNA, 19 bp, Mus musculus
  siRNA target sequence for A930001N09Rik (NM_029870.1,1781-1799).
ctccaaaccctaaaaaact

SEQ ID NO: 454411 - DNA, 19 bp, Mus musculus
  siRNA target sequence for A930001N09Rik (NM_029870.1,1784-1802).
caaaccctaaaaaactact

SEQ ID NO: 454412 - DNA, 19 bp, Mus musculus
  siRNA target sequence for A930001N09Rik (NM_029870.1,1924-1942).
gcttgtaggctaaagaaga

SEQ ID NO: 454413 - DNA, 19 bp, Mus musculus
  siRNA target sequence for A930001N09Rik (NM_029870.1,1946-1964).
cccagtatgaagctaataa

SEQ ID NO: 454414 - DNA, 19 bp, Mus musculus
  siRNA target sequence for A930001N09Rik (NM_029870.1,1947-1965).
ccagtatgaagctaataaa

SEQ ID NO: 454415 - DNA, 19 bp, Mus musculus
  siRNA target sequence for A930001N09Rik (NM_029870.1,1976-1994).
ggggcctcaacactgaata

SEQ ID NO: 454416 - DNA, 19 bp, Mus musculus
  siRNA target sequence for A930001N09Rik (NM_029870.1,1977-1995).
gggcctcaacactgaatat

SEQ ID NO: 454417 - DNA, 19 bp, Mus musculus
  siRNA target sequence for A930001N09Rik (NM_029870.1,1979-1997).
gcctcaacactgaatatga

SEQ ID NO: 454418 - DNA, 19 bp, Mus musculus
  siRNA target sequence for A930001N09Rik (NM_029870.1,1983-2001).
caacactgaatatgacaat

SEQ ID NO: 454419 - DNA, 19 bp, Mus musculus
  siRNA target sequence for A930001N09Rik (NM_029870.1,1986-2004).
cactgaatatgacaattta

SEQ ID NO: 454420 - DNA, 19 bp, Mus musculus
  siRNA target sequence for A930001N09Rik (NM_029870.1,1996-2014).
gacaatttattgtttgtaa

SEQ ID NO: 454421 - DNA, 19 bp, Mus musculus
  siRNA target sequence for A930001N09Rik (NM_029870.1,2084-2102).
ggcagaagcttgaaatcct

SEQ ID NO: 454422 - DNA, 19 bp, Mus musculus
  siRNA target sequence for A930001N09Rik (NM_029870.1,2091-2109).
gcttgaaatcctcattaaa

SEQ ID NO: 454423 - DNA, 19 bp, Mus musculus
  siRNA target sequence for A930001N09Rik (NM_029870.1,2136-2154).
gcaaacctcagaatttgtt

SEQ ID NO: 454424 - DNA, 19 bp, Mus musculus
  siRNA target sequence for A930001N09Rik (NM_029870.1,2137-2155).
caaacctcagaatttgtta

SEQ ID NO: 454425 - DNA, 19 bp, Mus musculus
  siRNA target sequence for AA409802 (NM_178646.2,216-234).
cgcaaggcctactcaatca

SEQ ID NO: 454426 - DNA, 19 bp, Mus musculus
  siRNA target sequence for AA409802 (NM_178646.2,217-235).
gcaaggcctactcaatcaa

SEQ ID NO: 454427 - DNA, 19 bp, Mus musculus
  siRNA target sequence for AA409802 (NM_178646.2,346-364).
ccaagctgcgctggttttt

SEQ ID NO: 454428 - DNA, 19 bp, Mus musculus
  siRNA target sequence for AA409802 (NM_178646.2,387-405).
ggcacgcagcgcaagaaga

SEQ ID NO: 454429 - DNA, 19 bp, Mus musculus
  siRNA target sequence for AA409802 (NM_178646.2,388-406).
gcacgcagcgcaagaagat

SEQ ID NO: 454430 - DNA, 19 bp, Mus musculus
  siRNA target sequence for AA409802 (NM_178646.2,517-535).
cctttgctcgccagatcta

SEQ ID NO: 454431 - DNA, 19 bp, Mus musculus
  siRNA target sequence for AA409802 (NM_178646.2,602-620).
ctctagccagcgcatctat

SEQ ID NO: 454432 - DNA, 19 bp, Mus musculus
  siRNA target sequence for AA409802 (NM_178646.2,755-773).
gatctacaatgctaacgtt

SEQ ID NO: 454433 - DNA, 19 bp, Mus musculus
  siRNA target sequence for AA409802 (NM_178646.2,771-789).
gttactggtctctattgga

SEQ ID NO: 454434 - DNA, 19 bp, Mus musculus
  siRNA target sequence for AA409802 (NM_178646.2,1043-1061).
ctggttcttcgaggaattt

SEQ ID NO: 454435 - DNA, 19 bp, Mus musculus
  siRNA target sequence for AA409802 (NM_178646.2,1045-1063).
ggttcttcgaggaatttgt

SEQ ID NO: 454436 - DNA, 19 bp, Mus musculus
  siRNA target sequence for AA409802 (NM_178646.2,1251-1269).
gttcgagtgctcttcttat

SEQ ID NO: 454437 - DNA, 19 bp, Mus musculus
  siRNA target sequence for AA409802 (NM_178646.2,1254-1272).
cgagtgctcttcttatcca

SEQ ID NO: 454438 - DNA, 19 bp, Mus musculus
  siRNA target sequence for AA409802 (NM_178646.2,1255-1273).
gagtgctcttcttatccaa

SEQ ID NO: 454439 - DNA, 19 bp, Mus musculus
  siRNA target sequence for AA409802 (NM_178646.2,1637-1655).
gctacacctggatgatgat

SEQ ID NO: 454440 - DNA, 19 bp, Mus musculus
  siRNA target sequence for AA409802 (NM_178646.2,1924-1942).
gggccctcagctgtaactt

SEQ ID NO: 454441 - DNA, 19 bp, Mus musculus
  siRNA target sequence for Acinus (NM_019567.1,291-309).
gttcgatgcccaagtcatt

SEQ ID NO: 454442 - DNA, 19 bp, Mus musculus
  siRNA target sequence for Acinus (NM_019567.1,346-364).
ggtgcaagctggaaacagt

SEQ ID NO: 454443 - DNA, 19 bp, Mus musculus
  siRNA target sequence for Acinus (NM_019567.1,414-432).
ctgccgcgacacagaagaa

SEQ ID NO: 454444 - DNA, 19 bp, Mus musculus
  siRNA target sequence for Acinus (NM_019567.1,469-487).
cctcatccccgacatcaaa

SEQ ID NO: 454445 - DNA, 19 bp, Mus musculus
  siRNA target sequence for Acinus (NM_019567.1,735-753).
ctgtggagcacgaagtaaa

SEQ ID NO: 454446 - DNA, 19 bp, Mus musculus
  siRNA target sequence for Acinus (NM_019567.1,805-823).
gtctggagtttccattaca

SEQ ID NO: 454447 - DNA, 19 bp, Mus musculus
  siRNA target sequence for Acinus (NM_019567.1,863-881).
cccaggggcaagatcagta

SEQ ID NO: 454448 - DNA, 19 bp, Mus musculus
  siRNA target sequence for Acinus (NM_019567.1,902-920).
ctggttcgtcccttcactt

SEQ ID NO: 454449 - DNA, 19 bp, Mus musculus
  siRNA target sequence for Acinus (NM_019567.1,923-941).
ggccagctgaaggaattat

SEQ ID NO: 454450 - DNA, 19 bp, Mus musculus
  siRNA target sequence for Acinus (NM_019567.1,924-942).
gccagctgaaggaattatt

SEQ ID NO: 454451 - DNA, 19 bp, Mus musculus
  siRNA target sequence for Acinus (NM_019567.1,972-990).
ccttctggatagacaagat

SEQ ID NO: 454452 - DNA, 19 bp, Mus musculus
  siRNA target sequence for Acinus (NM_019567.1,976-994).
ctggatagacaagatcaaa

SEQ ID NO: 454453 - DNA, 19 bp, Mus musculus
  siRNA target sequence for Acinus (NM_019567.1,1071-1089).
cccagtccaaccccaaatt

SEQ ID NO: 454454 - DNA, 19 bp, Mus musculus
  siRNA target sequence for Acinus (NM_019567.1,1144-1162).
ggtagatcggccatctgaa

SEQ ID NO: 454455 - DNA, 19 bp, Mus musculus
  siRNA target sequence for Acinus (NM_019567.1,1145-1163).
gtagatcggccatctgaaa

SEQ ID NO: 454456 - DNA, 19 bp, Mus musculus
  siRNA target sequence for Acinus (NM_019567.1,1148-1166).
gatcggccatctgaaacta

SEQ ID NO: 454457 - DNA, 19 bp, Mus musculus
  siRNA target sequence for Acinus (NM_019567.1,1399-1417).
ccggaaagagcgagcaaaa

SEQ ID NO: 454458 - DNA, 19 bp, Mus musculus
  siRNA target sequence for Acinus (NM_019567.1,1400-1418).
cggaaagagcgagcaaaat

SEQ ID NO: 454459 - DNA, 19 bp, Mus musculus
  siRNA target sequence for Acinus (NM_019567.1,1484-1502).
gacctcttccgtaagacta

SEQ ID NO: 454460 - DNA, 19 bp, Mus musculus
  siRNA target sequence for Acinus (NM_019567.1,1534-1552).
gactgagagccaaattgtt

SEQ ID NO: 454461 - DNA, 19 bp, Mus musculus
  siRNA target sequence for Acinus (NM_023190.1,195-213).
ggaattctgagcggtaata

SEQ ID NO: 454462 - DNA, 19 bp, Mus musculus
  siRNA target sequence for Acinus (NM_023190.1,208-226).
gtaatagaggggtagacta

SEQ ID NO: 454463 - DNA, 19 bp, Mus musculus
  siRNA target sequence for Acinus (NM_023190.1,454-472).
ggctcaaaggggctctaat

SEQ ID NO: 454464 - DNA, 19 bp, Mus musculus
  siRNA target sequence for Acinus (NM_023190.1,462-480).
ggggctctaatgctagaaa

SEQ ID NO: 454465 - DNA, 19 bp, Mus musculus
  siRNA target sequence for Acinus (NM_023190.1,507-525).
gctgcattccagccaaatt

SEQ ID NO: 454466 - DNA, 19 bp, Mus musculus
  siRNA target sequence for Acinus (NM_023190.1,740-758).
ggagctcagcacacattca

SEQ ID NO: 454467 - DNA, 19 bp, Mus musculus
  siRNA target sequence for Acinus (NM_023190.1,903-921).
caagagacaccatctagaa

SEQ ID NO: 454468 - DNA, 19 bp, Mus musculus
  siRNA target sequence for Acinus (NM_023190.1,930-948).
gtcagagcagatcgaaatt

SEQ ID NO: 454469 - DNA, 19 bp, Mus musculus
  siRNA target sequence for Acinus (NM_023190.1,932-950).
cagagcagatcgaaattta

SEQ ID NO: 454470 - DNA, 19 bp, Mus musculus
  siRNA target sequence for Acinus (NM_023190.1,934-952).
gagcagatcgaaatttaaa

SEQ ID NO: 454471 - DNA, 19 bp, Mus musculus
  siRNA target sequence for Acinus (NM_023190.1,936-954).
gcagatcgaaatttaaaaa

SEQ ID NO: 454472 - DNA, 19 bp, Mus musculus
  siRNA target sequence for Acinus (NM_023190.1,1122-1140).
gatgagaaacccctaaaca

SEQ ID NO: 454473 - DNA, 19 bp, Mus musculus
  siRNA target sequence for Acinus (NM_023190.1,1169-1187).
gaaaggagggcgagttact

SEQ ID NO: 454474 - DNA, 19 bp, Mus musculus
  siRNA target sequence for Acinus (NM_023190.1,1173-1191).
ggagggcgagttactagat

SEQ ID NO: 454475 - DNA, 19 bp, Mus musculus
  siRNA target sequence for Acinus (NM_023190.1,1438-1456).
caccaactcatatacaact

SEQ ID NO: 454476 - DNA, 19 bp, Mus musculus
  siRNA target sequence for Acinus (NM_023190.1,1491-1509).
ccccctgtcctcattcagt

SEQ ID NO: 454477 - DNA, 19 bp, Mus musculus
  siRNA target sequence for Acinus (NM_023190.1,1563-1581).
cctgcgcagctgctaagaa

SEQ ID NO: 454478 - DNA, 19 bp, Mus musculus
  siRNA target sequence for Acinus (NM_023190.1,1732-1750).
ctcccctccctctaacagt

SEQ ID NO: 454479 - DNA, 19 bp, Mus musculus
  siRNA target sequence for Acinus (NM_023190.1,2435-2453).
gactcatcacactgttgaa

SEQ ID NO: 454480 - DNA, 19 bp, Mus musculus
  siRNA target sequence for Acrbp (NM_016845.1,249-267).
ctcgttcagttggatcaat

SEQ ID NO: 454481 - DNA, 19 bp, Mus musculus
  siRNA target sequence for Acrbp (NM_016845.1,251-269).
cgttcagttggatcaatat

SEQ ID NO: 454482 - DNA, 19 bp, Mus musculus
  siRNA target sequence for Acrbp (NM_016845.1,255-273).
cagttggatcaatatgaaa

SEQ ID NO: 454483 - DNA, 19 bp, Mus musculus
  siRNA target sequence for Acrbp (NM_016845.1,305-323).
ctccgatctcccttatgct

SEQ ID NO: 454484 - DNA, 19 bp, Mus musculus
  siRNA target sequence for Acrbp (NM_016845.1,345-363).
cagtttgctcagtatcgtt

SEQ ID NO: 454485 - DNA, 19 bp, Mus musculus
  siRNA target sequence for Acrbp (NM_016845.1,364-382).
gctccaaccatgtctacta

SEQ ID NO: 454486 - DNA, 19 bp, Mus musculus
  siRNA target sequence for Acrbp (NM_016845.1,365-383).
ctccaaccatgtctactat

SEQ ID NO: 454487 - DNA, 19 bp, Mus musculus
  siRNA target sequence for Acrbp (NM_016845.1,446-464).
ggagtcttcagcagaagtt

SEQ ID NO: 454488 - DNA, 19 bp, Mus musculus
  siRNA target sequence for Acrbp (NM_016845.1,535-553).
ggcctgagcggctcaacaa

SEQ ID NO: 454489 - DNA, 19 bp, Mus musculus
  siRNA target sequence for Acrbp (NM_016845.1,650-668).
gatccaagaacataagcta

SEQ ID NO: 454490 - DNA, 19 bp, Mus musculus
  siRNA target sequence for Acrbp (NM_016845.1,997-1015).
ccctgatggtgctatgcta

SEQ ID NO: 454491 - DNA, 19 bp, Mus musculus
  siRNA target sequence for Acrbp (NM_016845.1,1004-1022).
ggtgctatgctattccatt

SEQ ID NO: 454492 - DNA, 19 bp, Mus musculus
  siRNA target sequence for Acrbp (NM_016845.1,1005-1023).
gtgctatgctattccatta

SEQ ID NO: 454493 - DNA, 19 bp, Mus musculus
  siRNA target sequence for Acrbp (NM_016845.1,1224-1242).
cacaagatacccttcatca

SEQ ID NO: 454494 - DNA, 19 bp, Mus musculus
  siRNA target sequence for Acrbp (NM_016845.1,1283-1301).
ggcgaggatcccagataaa

SEQ ID NO: 454495 - DNA, 19 bp, Mus musculus
  siRNA target sequence for Acrbp (NM_016845.1,1305-1323).
cgatttgctgggctagaaa

SEQ ID NO: 454496 - DNA, 19 bp, Mus musculus
  siRNA target sequence for Acrbp (NM_016845.1,1351-1369).
ggtgcaaccggcttgctat

SEQ ID NO: 454497 - DNA, 19 bp, Mus musculus
  siRNA target sequence for Acrbp (NM_016845.1,1354-1372).
gcaaccggcttgctatgaa

SEQ ID NO: 454498 - DNA, 19 bp, Mus musculus
  siRNA target sequence for Acrbp (NM_016845.1,1447-1465).
ccaagatttgtgacacaaa

SEQ ID NO: 454499 - DNA, 19 bp, Mus musculus
  siRNA target sequence for Acrbp (NM_016845.1,1451-1469).
gatttgtgacacaaactat

SEQ ID NO: 454500 - DNA, 19 bp, Mus musculus
  siRNA target sequence for Acrbp (NM_016845.1,1473-1491).
cagtacccaaactactgtt

SEQ ID NO: 454501 - DNA, 19 bp, Mus musculus
  siRNA target sequence for Adprt1 (NM_007415.2,125-143).
gaaatgcagcgagagtatt

SEQ ID NO: 454502 - DNA, 19 bp, Mus musculus
  siRNA target sequence for Adprt1 (NM_007415.2,505-523).
cacagctgggtatgattga

SEQ ID NO: 454503 - DNA, 19 bp, Mus musculus
  siRNA target sequence for Adprt1 (NM_007415.2,534-552).
catccaacttgctttgtca

SEQ ID NO: 454504 - DNA, 19 bp, Mus musculus
  siRNA target sequence for Adprt1 (NM_007415.2,692-710).
cgaggtggatggaacagat

SEQ ID NO: 454505 - DNA, 19 bp, Mus musculus
  siRNA target sequence for Adprt1 (NM_007415.2,958-976).
caggccagctggtctttaa

SEQ ID NO: 454506 - DNA, 19 bp, Mus musculus
  siRNA target sequence for Adprt1 (NM_007415.2,977-995).
gagcgacgcttattactgt

SEQ ID NO: 454507 - DNA, 19 bp, Mus musculus
  siRNA target sequence for Adprt1 (NM_007415.2,1040-1058).
gaatcctagccgaaaggaa

SEQ ID NO: 454508 - DNA, 19 bp, Mus musculus
  siRNA target sequence for Adprt1 (NM_007415.2,1060-1078).
gggtaactccaaaggaatt

SEQ ID NO: 454509 - DNA, 19 bp, Mus musculus
  siRNA target sequence for Adprt1 (NM_007415.2,1069-1087).
caaaggaattccgagaaat

SEQ ID NO: 454510 - DNA, 19 bp, Mus musculus
  siRNA target sequence for Adprt1 (NM_007415.2,1074-1092).
gaattccgagaaatatcct

SEQ ID NO: 454511 - DNA, 19 bp, Mus musculus
  siRNA target sequence for Adprt1 (NM_007415.2,1221-1239).
gacaagcccctgtctaaca

SEQ ID NO: 454512 - DNA, 19 bp, Mus musculus
  siRNA target sequence for Adprt1 (NM_007415.2,1227-1245).
cccctgtctaacatgaaga

SEQ ID NO: 454513 - DNA, 19 bp, Mus musculus
  siRNA target sequence for Adprt1 (NM_007415.2,1274-1292).
caaggacgaagcaaaagct

SEQ ID NO: 454514 - DNA, 19 bp, Mus musculus
  siRNA target sequence for Adprt1 (NM_007415.2,1280-1298).
cgaagcaaaagctgtgatt

SEQ ID NO: 454515 - DNA, 19 bp, Mus musculus
  siRNA target sequence for Adprt1 (NM_007415.2,1284-1302).
gcaaaagctgtgattgaga

SEQ ID NO: 454516 - DNA, 19 bp, Mus musculus
  siRNA target sequence for Adprt1 (NM_007415.2,1343-1361).
cttgtgtatcagcactaaa

SEQ ID NO: 454517 - DNA, 19 bp, Mus musculus
  siRNA target sequence for Adprt1 (NM_007415.2,1596-1614).
gaggaaggtgtcaacaaat

SEQ ID NO: 454518 - DNA, 19 bp, Mus musculus
  siRNA target sequence for Adprt1 (NM_007415.2,1598-1616).
ggaaggtgtcaacaaatct

SEQ ID NO: 454519 - DNA, 19 bp, Mus musculus
  siRNA target sequence for Adprt1 (NM_007415.2,1615-1633).
ctgaaaagaggatgaaatt

SEQ ID NO: 454520 - DNA, 19 bp, Mus musculus
  siRNA target sequence for Adprt1 (NM_007415.2,1752-1770).
gggacgaactcctattaca

SEQ ID NO: 454521 - DNA, 19 bp, Mus musculus
  siRNA target sequence for Adprt1 (NM_007415.2,1753-1771).
ggacgaactcctattacaa

SEQ ID NO: 454522 - DNA, 19 bp, Mus musculus
  siRNA target sequence for Adprt1 (NM_007415.2,1754-1772).
gacgaactcctattacaaa

SEQ ID NO: 454523 - DNA, 19 bp, Mus musculus
  siRNA target sequence for Adprt1 (NM_007415.2,1756-1774).
cgaactcctattacaaact

SEQ ID NO: 454524 - DNA, 19 bp, Mus musculus
  siRNA target sequence for Adprt1 (NM_007415.2,1840-1858).
cagttatcggcagtaacaa

SEQ ID NO: 454525 - DNA, 19 bp, Mus musculus
  siRNA target sequence for Adprt1 (NM_007415.2,1887-1905).
gctgttgagcacttcatga

SEQ ID NO: 454526 - DNA, 19 bp, Mus musculus
  siRNA target sequence for Adprt1 (NM_007415.2,1888-1906).
ctgttgagcacttcatgaa

SEQ ID NO: 454527 - DNA, 19 bp, Mus musculus
  siRNA target sequence for Adprt1 (NM_007415.2,1898-1916).
cttcatgaagctgtatgaa

SEQ ID NO: 454528 - DNA, 19 bp, Mus musculus
  siRNA target sequence for Adprt1 (NM_007415.2,1938-1956).
cactcgaaaaacttcacaa

SEQ ID NO: 454529 - DNA, 19 bp, Mus musculus
  siRNA target sequence for Adprt1 (NM_007415.2,1942-1960).
cgaaaaacttcacaaagta

SEQ ID NO: 454530 - DNA, 19 bp, Mus musculus
  siRNA target sequence for Adprt1 (NM_007415.2,1943-1961).
gaaaaacttcacaaagtat

SEQ ID NO: 454531 - DNA, 19 bp, Mus musculus
  siRNA target sequence for Adprt1 (NM_007415.2,2070-2088).
gagctcgtggggatgatct

SEQ ID NO: 454532 - DNA, 19 bp, Mus musculus
  siRNA target sequence for Adprt1 (NM_007415.2,2272-2290).
ctctgatcccccatgactt

SEQ ID NO: 454533 - DNA, 19 bp, Mus musculus
  siRNA target sequence for Adprt1 (NM_007415.2,2281-2299).
cccatgactttggaatgaa

SEQ ID NO: 454534 - DNA, 19 bp, Mus musculus
  siRNA target sequence for Adprt1 (NM_007415.2,2369-2387).
catcgaggtggcctatagt

SEQ ID NO: 454535 - DNA, 19 bp, Mus musculus
  siRNA target sequence for Adprt1 (NM_007415.2,2372-2390).
cgaggtggcctatagtctt

SEQ ID NO: 454536 - DNA, 19 bp, Mus musculus
  siRNA target sequence for Adprt1 (NM_007415.2,2433-2451).
gtcaactacgagaaactca

SEQ ID NO: 454537 - DNA, 19 bp, Mus musculus
  siRNA target sequence for Adprt1 (NM_007415.2,2465-2483).
ggtggttgacagagattct

SEQ ID NO: 454538 - DNA, 19 bp, Mus musculus
  siRNA target sequence for Adprt1 (NM_007415.2,2550-2568).
ctggaagtgatcgatatct

SEQ ID NO: 454539 - DNA, 19 bp, Mus musculus
  siRNA target sequence for Adprt1 (NM_007415.2,2553-2571).
gaagtgatcgatatcttca

SEQ ID NO: 454540 - DNA, 19 bp, Mus musculus
  siRNA target sequence for Adprt1 (NM_007415.2,2558-2576).
gatcgatatcttcaagata

SEQ ID NO: 454541 - DNA, 19 bp, Mus musculus
  siRNA target sequence for Adprt1 (NM_007415.2,2753-2771).
cgacatggtgtccaaaagt

SEQ ID NO: 454542 - DNA, 19 bp, Mus musculus
  siRNA target sequence for Adprt1 (NM_007415.2,2797-2815).
gagacccgattggcttaat

SEQ ID NO: 454543 - DNA, 19 bp, Mus musculus
  siRNA target sequence for Adprt1 (NM_007415.2,2829-2847).
gttgcccttggaaacatgt

SEQ ID NO: 454544 - DNA, 19 bp, Mus musculus
  siRNA target sequence for Adprt1 (NM_007415.2,2888-2906).
gggcaagcacagtgtcaaa

SEQ ID NO: 454545 - DNA, 19 bp, Mus musculus
  siRNA target sequence for Adprt1 (NM_007415.2,3004-3022).
cctgcctgctgtataatga

SEQ ID NO: 454546 - DNA, 19 bp, Mus musculus
  siRNA target sequence for Adprt1 (NM_007415.2,3042-3060).
gctcaggtgaatctcaaat

SEQ ID NO: 454547 - DNA, 19 bp, Mus musculus
  siRNA target sequence for Adprt1 (NM_007415.2,3043-3061).
ctcaggtgaatctcaaata

SEQ ID NO: 454548 - DNA, 19 bp, Mus musculus
  siRNA target sequence for Adprtl2 (NM_009632.1,129-147).
gcgcacgtgccagagaaaa

SEQ ID NO: 454549 - DNA, 19 bp, Mus musculus
  siRNA target sequence for Adprtl2 (NM_009632.1,168-186).
ggacgcagacaggacaaaa

SEQ ID NO: 454550 - DNA, 19 bp, Mus musculus
  siRNA target sequence for Adprtl2 (NM_009632.1,261-279).
gggaaaggctcatgtgtat

SEQ ID NO: 454551 - DNA, 19 bp, Mus musculus
  siRNA target sequence for Adprtl2 (NM_009632.1,262-280).
ggaaaggctcatgtgtatt

SEQ ID NO: 454552 - DNA, 19 bp, Mus musculus
  siRNA target sequence for Adprtl2 (NM_009632.1,297-315).
ctatgatgtcatgctaaat

SEQ ID NO: 454553 - DNA, 19 bp, Mus musculus
  siRNA target sequence for Adprtl2 (NM_009632.1,339-357).
caacaagtactaccttatt

SEQ ID NO: 454554 - DNA, 19 bp, Mus musculus
  siRNA target sequence for Adprtl2 (NM_009632.1,433-451).
cacagcttggtgacttgtt

SEQ ID NO: 454555 - DNA, 19 bp, Mus musculus
  siRNA target sequence for Adprtl2 (NM_009632.1,454-472).
ggtgacctcaacaaagcaa

SEQ ID NO: 454556 - DNA, 19 bp, Mus musculus
  siRNA target sequence for Adprtl2 (NM_009632.1,518-536).
gggaggaccgtgagaactt

SEQ ID NO: 454557 - DNA, 19 bp, Mus musculus
  siRNA target sequence for Adprtl2 (NM_009632.1,548-566).
ctggaaaatacgacatgtt

SEQ ID NO: 454558 - DNA, 19 bp, Mus musculus
  siRNA target sequence for Adprtl2 (NM_009632.1,551-569).
gaaaatacgacatgttaca

SEQ ID NO: 454559 - DNA, 19 bp, Mus musculus
  siRNA target sequence for Adprtl2 (NM_009632.1,588-606).
cacgcaggatgaaagtaaa

SEQ ID NO: 454560 - DNA, 19 bp, Mus musculus
  siRNA target sequence for Adprtl2 (NM_009632.1,658-676).
caggagctgctaaagttga

SEQ ID NO: 454561 - DNA, 19 bp, Mus musculus
  siRNA target sequence for Adprtl2 (NM_009632.1,751-769).
ctgacagtggcgcaaatca

SEQ ID NO: 454562 - DNA, 19 bp, Mus musculus
  siRNA target sequence for Adprtl2 (NM_009632.1,776-794).
gttaccagtctctcaagaa

SEQ ID NO: 454563 - DNA, 19 bp, Mus musculus
  siRNA target sequence for Adprtl2 (NM_009632.1,838-856).
gttgaagcgtgcaatgaat

SEQ ID NO: 454564 - DNA, 19 bp, Mus musculus
  siRNA target sequence for Adprtl2 (NM_009632.1,915-933).
gaaggaactgtcagacaaa

SEQ ID NO: 454565 - DNA, 19 bp, Mus musculus
  siRNA target sequence for Adprtl2 (NM_009632.1,948-966).
ggcattgggagacattgaa

SEQ ID NO: 454566 - DNA, 19 bp, Mus musculus
  siRNA target sequence for Adprtl2 (NM_009632.1,960-978).
cattgaaattgcccttaaa

SEQ ID NO: 454567 - DNA, 19 bp, Mus musculus
  siRNA target sequence for Adprtl2 (NM_009632.1,1011-1029).
cccactggaccaacactat

SEQ ID NO: 454568 - DNA, 19 bp, Mus musculus
  siRNA target sequence for Adprtl2 (NM_009632.1,1012-1030).
ccactggaccaacactata

SEQ ID NO: 454569 - DNA, 19 bp, Mus musculus
  siRNA target sequence for Adprtl2 (NM_009632.1,1015-1033).
ctggaccaacactatagaa

SEQ ID NO: 454570 - DNA, 19 bp, Mus musculus
  siRNA target sequence for Adprtl2 (NM_009632.1,1051-1069).
cgtcctctggaccatgaaa

SEQ ID NO: 454571 - DNA, 19 bp, Mus musculus
  siRNA target sequence for Adprtl2 (NM_009632.1,1062-1080).
ccatgaaagtaatgagttt

SEQ ID NO: 454572 - DNA, 19 bp, Mus musculus
  siRNA target sequence for Adprtl2 (NM_009632.1,1063-1081).
catgaaagtaatgagttta

SEQ ID NO: 454573 - DNA, 19 bp, Mus musculus
  siRNA target sequence for Adprtl2 (NM_009632.1,1117-1135).
cctacacacaaggactata

SEQ ID NO: 454574 - DNA, 19 bp, Mus musculus
  siRNA target sequence for Adprtl2 (NM_009632.1,1121-1139).
cacacaaggactatactat

SEQ ID NO: 454575 - DNA, 19 bp, Mus musculus
  siRNA target sequence for Adprtl2 (NM_009632.1,1123-1141).
cacaaggactatactatga

SEQ ID NO: 454576 - DNA, 19 bp, Mus musculus
  siRNA target sequence for Adprtl2 (NM_009632.1,1290-1308).
ggctcccatcacaggttat

SEQ ID NO: 454577 - DNA, 19 bp, Mus musculus
  siRNA target sequence for Adprtl2 (NM_009632.1,1291-1309).
gctcccatcacaggttata

SEQ ID NO: 454578 - DNA, 19 bp, Mus musculus
  siRNA target sequence for Adprtl2 (NM_009632.1,1292-1310).
ctcccatcacaggttatat

SEQ ID NO: 454579 - DNA, 19 bp, Mus musculus
  siRNA target sequence for Adprtl2 (NM_009632.1,1301-1319).
caggttatatgtttggaaa

SEQ ID NO: 454580 - DNA, 19 bp, Mus musculus
  siRNA target sequence for Adprtl2 (NM_009632.1,1343-1361).
cctccaagagtgccaatta

SEQ ID NO: 454581 - DNA, 19 bp, Mus musculus
  siRNA target sequence for Adprtl2 (NM_009632.1,1369-1387).
gcctctcgcctaaagaata

SEQ ID NO: 454582 - DNA, 19 bp, Mus musculus
  siRNA target sequence for Adprtl2 (NM_009632.1,1435-1453).
ctactggaggccaatccta

SEQ ID NO: 454583 - DNA, 19 bp, Mus musculus
  siRNA target sequence for Adprtl2 (NM_009632.1,1565-1583).
caagtgacacaggaattct

SEQ ID NO: 454584 - DNA, 19 bp, Mus musculus
  siRNA target sequence for Adprtl2 (NM_009632.1,1568-1586).
gtgacacaggaattctcaa

SEQ ID NO: 454585 - DNA, 19 bp, Mus musculus
  siRNA target sequence for Adprtl2 (NM_009632.1,1594-1612).
gggtacaccctcaactaca

SEQ ID NO: 454586 - DNA, 19 bp, Mus musculus
  siRNA target sequence for Adprtl2 (NM_009632.1,1601-1619).
ccctcaactacaatgagtt

SEQ ID NO: 454587 - DNA, 19 bp, Mus musculus
  siRNA target sequence for Adprtl2 (NM_009632.1,1641-1659).
ggtccgtatgcgatacctt

SEQ ID NO: 454588 - DNA, 19 bp, Mus musculus
  siRNA target sequence for Adprtl2 (NM_009632.1,1645-1663).
cgtatgcgataccttctaa

SEQ ID NO: 454589 - DNA, 19 bp, Mus musculus
  siRNA target sequence for Adprtl2 (NM_009632.1,1646-1664).
gtatgcgataccttctaaa

SEQ ID NO: 454590 - DNA, 19 bp, Mus musculus
  siRNA target sequence for Adprtl2 (NM_009632.1,1650-1668).
gcgataccttctaaagatt

SEQ ID NO: 454591 - DNA, 19 bp, Mus musculus
  siRNA target sequence for Aebp2 (NM_009637.1,150-168).
ggacatagacagcacaatt

SEQ ID NO: 454592 - DNA, 19 bp, Mus musculus
  siRNA target sequence for Aebp2 (NM_009637.1,151-169).
gacatagacagcacaattt

SEQ ID NO: 454593 - DNA, 19 bp, Mus musculus
  siRNA target sequence for Aebp2 (NM_009637.1,232-250).
cacattgcctataactgtt

SEQ ID NO: 454594 - DNA, 19 bp, Mus musculus
  siRNA target sequence for Aebp2 (NM_009637.1,300-318).
ccacattcgctccatacat

SEQ ID NO: 454595 - DNA, 19 bp, Mus musculus
  siRNA target sequence for Aebp2 (NM_009637.1,331-349).
cgtggaggggtgttcgttt

SEQ ID NO: 454596 - DNA, 19 bp, Mus musculus
  siRNA target sequence for Aebp2 (NM_009637.1,346-364).
gtttgcttgtggaaaggtt

SEQ ID NO: 454597 - DNA, 19 bp, Mus musculus
  siRNA target sequence for Aebp2 (NM_009637.1,438-456).
gcctttcaagtgtgtagtt

SEQ ID NO: 454598 - DNA, 19 bp, Mus musculus
  siRNA target sequence for Aebp2 (NM_009637.1,528-546).
gaactcctcaaaagtttct

SEQ ID NO: 454599 - DNA, 19 bp, Mus musculus
  siRNA target sequence for Aebp2 (NM_009637.1,615-633).
caaaagacggcgctcatta

SEQ ID NO: 454600 - DNA, 19 bp, Mus musculus
  siRNA target sequence for Aebp2 (NM_009637.1,682-700).
catcgagccatctgcttta

SEQ ID NO: 454601 - DNA, 19 bp, Mus musculus
  siRNA target sequence for Aebp2 (NM_009637.1,777-795).
ggaggaatctggaaagata

SEQ ID NO: 454602 - DNA, 19 bp, Mus musculus
  siRNA target sequence for Aebp2 (NM_009637.1,823-841).
gacattctgccagatgtat

SEQ ID NO: 454603 - DNA, 19 bp, Mus musculus
  siRNA target sequence for Aebp2 (NM_009637.1,852-870).
gagtgaacgacatcagtta

SEQ ID NO: 454604 - DNA, 19 bp, Mus musculus
  siRNA target sequence for Aebp2 (NM_009637.1,854-872).
gtgaacgacatcagttaaa

SEQ ID NO: 454605 - DNA, 19 bp, Mus musculus
  siRNA target sequence for Aebp2 (NM_009637.1,859-877).
cgacatcagttaaaaacga

SEQ ID NO: 454606 - DNA, 19 bp, Mus musculus
  siRNA target sequence for Aebp2 (NM_009637.1,867-885).
gttaaaaacgaaagtagtt

SEQ ID NO: 454607 - DNA, 19 bp, Mus musculus
  siRNA target sequence for Aebp2 (NM_009637.1,924-942).
ggacccaaacatttacaga

SEQ ID NO: 454608 - DNA, 19 bp, Mus musculus
  siRNA target sequence for Aebp2 (NM_009637.1,925-943).
gacccaaacatttacagaa

SEQ ID NO: 454609 - DNA, 19 bp, Mus musculus
  siRNA target sequence for Ahr (NM_013464.2,321-339).
cgcaagccggtgcagaaaa

SEQ ID NO: 454610 - DNA, 19 bp, Mus musculus
  siRNA target sequence for Ahr (NM_013464.2,327-345).
ccggtgcagaaaacagtaa

SEQ ID NO: 454611 - DNA, 19 bp, Mus musculus
  siRNA target sequence for Ahr (NM_013464.2,328-346).
cggtgcagaaaacagtaaa

SEQ ID NO: 454612 - DNA, 19 bp, Mus musculus
  siRNA target sequence for Ahr (NM_013464.2,350-368).
catccccgctgaaggaatt

SEQ ID NO: 454613 - DNA, 19 bp, Mus musculus
  siRNA target sequence for Ahr (NM_013464.2,354-372).
cccgctgaaggaattaagt

SEQ ID NO: 454614 - DNA, 19 bp, Mus musculus
  siRNA target sequence for Ahr (NM_013464.2,356-374).
cgctgaaggaattaagtca

SEQ ID NO: 454615 - DNA, 19 bp, Mus musculus
  siRNA target sequence for Ahr (NM_013464.2,398-416).
ccggctgaacacagagtta

SEQ ID NO: 454616 - DNA, 19 bp, Mus musculus
  siRNA target sequence for Ahr (NM_013464.2,438-456).
cccttcccgcaagatgtta

SEQ ID NO: 454617 - DNA, 19 bp, Mus musculus
  siRNA target sequence for Ahr (NM_013464.2,439-457).
ccttcccgcaagatgttat

SEQ ID NO: 454618 - DNA, 19 bp, Mus musculus
  siRNA target sequence for Ahr (NM_013464.2,440-458).
cttcccgcaagatgttatt

SEQ ID NO: 454619 - DNA, 19 bp, Mus musculus
  siRNA target sequence for Ahr (NM_013464.2,517-535).
gcttctttgatgttgcatt

SEQ ID NO: 454620 - DNA, 19 bp, Mus musculus
  siRNA target sequence for Ahr (NM_013464.2,518-536).
cttctttgatgttgcatta

SEQ ID NO: 454621 - DNA, 19 bp, Mus musculus
  siRNA target sequence for Ahr (NM_013464.2,609-627).
caagaaggagagttcttgt

SEQ ID NO: 454622 - DNA, 19 bp, Mus musculus
  siRNA target sequence for Ahr (NM_013464.2,664-682).
cagatgccttggtcttcta

SEQ ID NO: 454623 - DNA, 19 bp, Mus musculus
  siRNA target sequence for Ahr (NM_013464.2,688-706).
cctccactatccaagatta

SEQ ID NO: 454624 - DNA, 19 bp, Mus musculus
  siRNA target sequence for Ahr (NM_013464.2,731-749).
catccatcagagcgtatat

SEQ ID NO: 454625 - DNA, 19 bp, Mus musculus
  siRNA target sequence for Ahr (NM_013464.2,744-762).
gtatatgagctcatccata

SEQ ID NO: 454626 - DNA, 19 bp, Mus musculus
  siRNA target sequence for Ahr (NM_013464.2,852-870).
caggcagcagtctattata

SEQ ID NO: 454627 - DNA, 19 bp, Mus musculus
  siRNA target sequence for Ahr (NM_013464.2,932-950).
gaggtgcctgctggataat

SEQ ID NO: 454628 - DNA, 19 bp, Mus musculus
  siRNA target sequence for Ahr (NM_013464.2,935-953).
gtgcctgctggataattca

SEQ ID NO: 454629 - DNA, 19 bp, Mus musculus
  siRNA target sequence for Ahr (NM_013464.2,983-1001).
gaggttaaagtatcttcat

SEQ ID NO: 454630 - DNA, 19 bp, Mus musculus
  siRNA target sequence for Ahr (NM_013464.2,1081-1099).
caccctccatcctggaaat

SEQ ID NO: 454631 - DNA, 19 bp, Mus musculus
  siRNA target sequence for Ahr (NM_013464.2,1085-1103).
ctccatcctggaaattcga

SEQ ID NO: 454632 - DNA, 19 bp, Mus musculus
  siRNA target sequence for Ahr (NM_013464.2,1091-1109).
cctggaaattcgaaccaaa

SEQ ID NO: 454633 - DNA, 19 bp, Mus musculus
  siRNA target sequence for Ahr (NM_013464.2,1101-1119).
cgaaccaaaaacttcatct

SEQ ID NO: 454634 - DNA, 19 bp, Mus musculus
  siRNA target sequence for Ahr (NM_013464.2,1126-1144).
ccaaacacaagctagactt

SEQ ID NO: 454635 - DNA, 19 bp, Mus musculus
  siRNA target sequence for Ahr (NM_013464.2,1136-1154).
gctagacttcacacctatt

SEQ ID NO: 454636 - DNA, 19 bp, Mus musculus
  siRNA target sequence for Ahr (NM_013464.2,1140-1158).
gacttcacacctattggtt

SEQ ID NO: 454637 - DNA, 19 bp, Mus musculus
  siRNA target sequence for Ahr (NM_013464.2,1216-1234).
gatcggggtaccagttcat

SEQ ID NO: 454638 - DNA, 19 bp, Mus musculus
  siRNA target sequence for Ahr (NM_013464.2,1267-1285).
cccacatccgcatgattaa

SEQ ID NO: 454639 - DNA, 19 bp, Mus musculus
  siRNA target sequence for Ahr (NM_013464.2,1269-1287).
cacatccgcatgattaaga

SEQ ID NO: 454640 - DNA, 19 bp, Mus musculus
  siRNA target sequence for Ahr (NM_013464.2,1271-1289).
catccgcatgattaagact

SEQ ID NO: 454641 - DNA, 19 bp, Mus musculus
  siRNA target sequence for Ahr (NM_013464.2,1293-1311).
gaaagtggcatgacagttt

SEQ ID NO: 454642 - DNA, 19 bp, Mus musculus
  siRNA target sequence for Ahr (NM_013464.2,1314-1332).
cggcttcttgcaaaacaca

SEQ ID NO: 454643 - DNA, 19 bp, Mus musculus
  siRNA target sequence for Ahr (NM_013464.2,1352-1370).
gtccaatgcacgcttgatt

SEQ ID NO: 454644 - DNA, 19 bp, Mus musculus
  siRNA target sequence for Ahr (NM_013464.2,1354-1372).
ccaatgcacgcttgattta

SEQ ID NO: 454645 - DNA, 19 bp, Mus musculus
  siRNA target sequence for Ahr (NM_013464.2,1359-1377).
gcacgcttgatttacagaa

SEQ ID NO: 454646 - DNA, 19 bp, Mus musculus
  siRNA target sequence for Ahr (NM_013464.2,1360-1378).
cacgcttgatttacagaaa

SEQ ID NO: 454647 - DNA, 19 bp, Mus musculus
  siRNA target sequence for Ahr (NM_013464.2,1380-1398).
ggaagaccagattacatca

SEQ ID NO: 454648 - DNA, 19 bp, Mus musculus
  siRNA target sequence for Ahr (NM_013464.2,1381-1399).
gaagaccagattacatcat

SEQ ID NO: 454649 - DNA, 19 bp, Mus musculus
  siRNA target sequence for Ahr (NM_013464.2,1411-1429).
gaccactgacggatgaaga

SEQ ID NO: 454650 - DNA, 19 bp, Mus musculus
  siRNA target sequence for Ahr (NM_013464.2,1459-1477).
cgtcgctgcccttcatgtt

SEQ ID NO: 454651 - DNA, 19 bp, Mus musculus
  siRNA target sequence for Ahr (NM_013464.2,1460-1478).
gtcgctgcccttcatgttt

SEQ ID NO: 454652 - DNA, 19 bp, Mus musculus
  siRNA target sequence for Ahr (NM_013464.2,1483-1501).
ccggagaggctgtgttgta

SEQ ID NO: 454653 - DNA, 19 bp, Mus musculus
  siRNA target sequence for Ahr (NM_013464.2,1513-1531).
gccctttctctcccataat

SEQ ID NO: 454654 - DNA, 19 bp, Mus musculus
  siRNA target sequence for Ahr (NM_013464.2,1539-1557).
ctaccaatacgcaccaaaa

SEQ ID NO: 454655 - DNA, 19 bp, Mus musculus
  siRNA target sequence for Ahr (NM_013464.2,1542-1560).
ccaatacgcaccaaaagca

SEQ ID NO: 454656 - DNA, 19 bp, Mus musculus
  siRNA target sequence for Ahr (NM_013464.2,1543-1561).
caatacgcaccaaaagcaa

SEQ ID NO: 454657 - DNA, 19 bp, Mus musculus
  siRNA target sequence for Ahr (NM_013464.2,1548-1566).
cgcaccaaaagcaacacta

SEQ ID NO: 454658 - DNA, 19 bp, Mus musculus
  siRNA target sequence for Ahr (NM_013464.2,1585-1603).
cccagtcaaccccaagtaa

SEQ ID NO: 454659 - DNA, 19 bp, Mus musculus
  siRNA target sequence for Ahr (NM_013464.2,1589-1607).
gtcaaccccaagtaaggat

SEQ ID NO: 454660 - DNA, 19 bp, Mus musculus
  siRNA target sequence for Ahr (NM_013464.2,1650-1668).
gatgagtccatctatctgt

SEQ ID NO: 454661 - DNA, 19 bp, Mus musculus
  siRNA target sequence for Ahr (NM_013464.2,1688-1706).
gctgttagacagccatttt

SEQ ID NO: 454662 - DNA, 19 bp, Mus musculus
  siRNA target sequence for Ahr (NM_013464.2,1765-1783).
gtgaggctgcgctgaaaca

SEQ ID NO: 454663 - DNA, 19 bp, Mus musculus
  siRNA target sequence for Ahr (NM_013464.2,1839-1857).
gagctctttccggataata

SEQ ID NO: 454664 - DNA, 19 bp, Mus musculus
  siRNA target sequence for Ahr (NM_013464.2,1849-1867).
cggataataaaaataatga

SEQ ID NO: 454665 - DNA, 19 bp, Mus musculus
  siRNA target sequence for Ahr (NM_013464.2,2209-2227).
cgaagcacacgcaaatcaa

SEQ ID NO: 454666 - DNA, 19 bp, Mus musculus
  siRNA target sequence for Ahr (NM_013464.2,2295-2313).
cactatcagctcttttcca

SEQ ID NO: 454667 - DNA, 19 bp, Mus musculus
  siRNA target sequence for Ahr (NM_013464.2,2473-2491).
ccactacttctaatttaga

SEQ ID NO: 454668 - DNA, 19 bp, Mus musculus
  siRNA target sequence for Ahr (NM_013464.2,2474-2492).
cactacttctaatttagat

SEQ ID NO: 454669 - DNA, 19 bp, Mus musculus
  siRNA target sequence for Ahr (NM_013464.2,2558-2576).
cagtcctcaggcatactat

SEQ ID NO: 454670 - DNA, 19 bp, Mus musculus
  siRNA target sequence for Ahr (NM_013464.2,2583-2601).
gccatgtccatgtatcagt

SEQ ID NO: 454671 - DNA, 19 bp, Mus musculus
  siRNA target sequence for Ahr (NM_013464.2,2639-2657).
gcagtacagctctgaaatt

SEQ ID NO: 454672 - DNA, 19 bp, Mus musculus
  siRNA target sequence for Ahr (NM_013464.2,2665-2683).
ctcaggcattcctaagcaa

SEQ ID NO: 454673 - DNA, 19 bp, Mus musculus
  siRNA target sequence for AI427653 (NM_178714.2,462-480).
cgttgtgtctgtcagattt

SEQ ID NO: 454674 - DNA, 19 bp, Mus musculus
  siRNA target sequence for AI427653 (NM_178714.2,560-578).
gctacggctggcagacaat

SEQ ID NO: 454675 - DNA, 19 bp, Mus musculus
  siRNA target sequence for AI427653 (NM_178714.2,561-579).
ctacggctggcagacaatt

SEQ ID NO: 454676 - DNA, 19 bp, Mus musculus
  siRNA target sequence for AI427653 (NM_178714.2,566-584).
gctggcagacaattttgtt

SEQ ID NO: 454677 - DNA, 19 bp, Mus musculus
  siRNA target sequence for AI427653 (NM_178714.2,569-587).
ggcagacaattttgttaca

SEQ ID NO: 454678 - DNA, 19 bp, Mus musculus
  siRNA target sequence for AI427653 (NM_178714.2,582-600).
gttacaaatatcaaaagga

SEQ ID NO: 454679 - DNA, 19 bp, Mus musculus
  siRNA target sequence for AI427653 (NM_178714.2,633-651).
ctgactctatccaggaata

SEQ ID NO: 454680 - DNA, 19 bp, Mus musculus
  siRNA target sequence for AI427653 (NM_178714.2,635-653).
gactctatccaggaataca

SEQ ID NO: 454681 - DNA, 19 bp, Mus musculus
  siRNA target sequence for AI427653 (NM_178714.2,643-661).
ccaggaatacaataagttt

SEQ ID NO: 454682 - DNA, 19 bp, Mus musculus
  siRNA target sequence for AI427653 (NM_178714.2,671-689).
ccatgcttttgctgatcta

SEQ ID NO: 454683 - DNA, 19 bp, Mus musculus
  siRNA target sequence for AI427653 (NM_178714.2,676-694).
cttttgctgatctacgaaa

SEQ ID NO: 454684 - DNA, 19 bp, Mus musculus
  siRNA target sequence for AI427653 (NM_178714.2,681-699).
gctgatctacgaaatttga

SEQ ID NO: 454685 - DNA, 19 bp, Mus musculus
  siRNA target sequence for AI427653 (NM_178714.2,702-720).
gcactgcatttgaatagca

SEQ ID NO: 454686 - DNA, 19 bp, Mus musculus
  siRNA target sequence for AI427653 (NM_178714.2,703-721).
cactgcatttgaatagcaa

SEQ ID NO: 454687 - DNA, 19 bp, Mus musculus
  siRNA target sequence for AI427653 (NM_178714.2,708-726).
catttgaatagcaacagat

SEQ ID NO: 454688 - DNA, 19 bp, Mus musculus
  siRNA target sequence for AI427653 (NM_178714.2,713-731).
gaatagcaacagattgact

SEQ ID NO: 454689 - DNA, 19 bp, Mus musculus
  siRNA target sequence for AI427653 (NM_178714.2,719-737).
caacagattgactaaaatt

SEQ ID NO: 454690 - DNA, 19 bp, Mus musculus
  siRNA target sequence for AI427653 (NM_178714.2,722-740).
cagattgactaaaattaca

SEQ ID NO: 454691 - DNA, 19 bp, Mus musculus
  siRNA target sequence for AI427653 (NM_178714.2,724-742).
gattgactaaaattacaaa

SEQ ID NO: 454692 - DNA, 19 bp, Mus musculus
  siRNA target sequence for AI427653 (NM_178714.2,763-781).
ccaatctccaccatttgat

SEQ ID NO: 454693 - DNA, 19 bp, Mus musculus
  siRNA target sequence for AI427653 (NM_178714.2,774-792).
catttgatattgaacaaca

SEQ ID NO: 454694 - DNA, 19 bp, Mus musculus
  siRNA target sequence for AI427653 (NM_178714.2,815-833).
cacagccttcgatgatgtt

SEQ ID NO: 454695 - DNA, 19 bp, Mus musculus
  siRNA target sequence for AI427653 (NM_178714.2,857-875).
gtcctataataatctagaa

SEQ ID NO: 454696 - DNA, 19 bp, Mus musculus
  siRNA target sequence for AI427653 (NM_178714.2,886-904).
gggatgctgtagagaagat

SEQ ID NO: 454697 - DNA, 19 bp, Mus musculus
  siRNA target sequence for AI427653 (NM_178714.2,910-928).
gcttgcacacccttagttt

SEQ ID NO: 454698 - DNA, 19 bp, Mus musculus
  siRNA target sequence for AI427653 (NM_178714.2,914-932).
gcacacccttagtttggat

SEQ ID NO: 454699 - DNA, 19 bp, Mus musculus
  siRNA target sequence for AI427653 (NM_178714.2,920-938).
ccttagtttggatcacaat

SEQ ID NO: 454700 - DNA, 19 bp, Mus musculus
  siRNA target sequence for AI427653 (NM_178714.2,925-943).
gtttggatcacaatatgat

SEQ ID NO: 454701 - DNA, 19 bp, Mus musculus
  siRNA target sequence for AI427653 (NM_178714.2,983-1001).
gatgactcggctagatgta

SEQ ID NO: 454702 - DNA, 19 bp, Mus musculus
  siRNA target sequence for AI427653 (NM_178714.2,986-1004).
gactcggctagatgtaaca

SEQ ID NO: 454703 - DNA, 19 bp, Mus musculus
  siRNA target sequence for AI427653 (NM_178714.2,990-1008).
cggctagatgtaacatcaa

SEQ ID NO: 454704 - DNA, 19 bp, Mus musculus
  siRNA target sequence for AI427653 (NM_178714.2,992-1010).
gctagatgtaacatcaaat

SEQ ID NO: 454705 - DNA, 19 bp, Mus musculus
  siRNA target sequence for AI427653 (NM_178714.2,993-1011).
ctagatgtaacatcaaata

SEQ ID NO: 454706 - DNA, 19 bp, Mus musculus
  siRNA target sequence for AI427653 (NM_178714.2,1061-1079).
ggccacctcaggaatcata

SEQ ID NO: 454707 - DNA, 19 bp, Mus musculus
  siRNA target sequence for AI427653 (NM_178714.2,1076-1094).
cataagcccatcgactttt

SEQ ID NO: 454708 - DNA, 19 bp, Mus musculus
  siRNA target sequence for AI427653 (NM_178714.2,1081-1099).
gcccatcgacttttgcatt

SEQ ID NO: 454709 - DNA, 19 bp, Mus musculus
  siRNA target sequence for AI427653 (NM_178714.2,1087-1105).
cgacttttgcattgagttt

SEQ ID NO: 454710 - DNA, 19 bp, Mus musculus
  siRNA target sequence for AI427653 (NM_178714.2,1115-1133).
ccccttgcattgcaattgt

SEQ ID NO: 454711 - DNA, 19 bp, Mus musculus
  siRNA target sequence for AI427653 (NM_178714.2,1142-1160).
gtggctgaggcgattgtct

SEQ ID NO: 454712 - DNA, 19 bp, Mus musculus
  siRNA target sequence for AI427653 (NM_178714.2,1151-1169).
gcgattgtctcgagaagat

SEQ ID NO: 454713 - DNA, 19 bp, Mus musculus
  siRNA target sequence for AI427653 (NM_178714.2,1222-1240).
caattcctgaggaagagtt

SEQ ID NO: 454714 - DNA, 19 bp, Mus musculus
  siRNA target sequence for AI427653 (NM_178714.2,1259-1277).
catcactcgtcatacacat

SEQ ID NO: 454715 - DNA, 19 bp, Mus musculus
  siRNA target sequence for AI427653 (NM_178714.2,1264-1282).
ctcgtcatacacatgagat

SEQ ID NO: 454716 - DNA, 19 bp, Mus musculus
  siRNA target sequence for AI427653 (NM_178714.2,1335-1353).
cctgaacctgcgattcatt

SEQ ID NO: 454717 - DNA, 19 bp, Mus musculus
  siRNA target sequence for AI427653 (NM_178714.2,1341-1359).
cctgcgattcattggattt

SEQ ID NO: 454718 - DNA, 19 bp, Mus musculus
  siRNA target sequence for AI427653 (NM_178714.2,1390-1408).
cacgatctctggtgtatga

SEQ ID NO: 454719 - DNA, 19 bp, Mus musculus
  siRNA target sequence for AI427653 (NM_178714.2,1392-1410).
cgatctctggtgtatgata

SEQ ID NO: 454720 - DNA, 19 bp, Mus musculus
  siRNA target sequence for AI427653 (NM_178714.2,1393-1411).
gatctctggtgtatgataa

SEQ ID NO: 454721 - DNA, 19 bp, Mus musculus
  siRNA target sequence for AI427653 (NM_178714.2,1413-1431).
gggacacttgacatcctta

SEQ ID NO: 454722 - DNA, 19 bp, Mus musculus
  siRNA target sequence for AI427653 (NM_178714.2,1415-1433).
gacacttgacatccttata

SEQ ID NO: 454723 - DNA, 19 bp, Mus musculus
  siRNA target sequence for AI427653 (NM_178714.2,1424-1442).
catccttataacaactgta

SEQ ID NO: 454724 - DNA, 19 bp, Mus musculus
  siRNA target sequence for AI427653 (NM_178714.2,1446-1464).
gatacaggagcttttacct

SEQ ID NO: 454725 - DNA, 19 bp, Mus musculus
  siRNA target sequence for AI427653 (NM_178714.2,1481-1499).
ggcaggggaagcaacacaa

SEQ ID NO: 454726 - DNA, 19 bp, Mus musculus
  siRNA target sequence for AI427653 (NM_178714.2,1495-1513).
cacaaaccgtggatcttca

SEQ ID NO: 454727 - DNA, 19 bp, Mus musculus
  siRNA target sequence for AI427653 (NM_178714.2,1501-1519).
ccgtggatcttcacataat

SEQ ID NO: 454728 - DNA, 19 bp, Mus musculus
  siRNA target sequence for AI427653 (NM_178714.2,1502-1520).
cgtggatcttcacataatt

SEQ ID NO: 454729 - DNA, 19 bp, Mus musculus
  siRNA target sequence for AI427653 (NM_178714.2,1524-1542).
ctccctcacctactaaaca

SEQ ID NO: 454730 - DNA, 19 bp, Mus musculus
  siRNA target sequence for AI427653 (NM_178714.2,1541-1559).
cagcaccaatcatatccat

SEQ ID NO: 454731 - DNA, 19 bp, Mus musculus
  siRNA target sequence for AI427653 (NM_178714.2,1609-1627).
cgaatgctagcagtagtaa

SEQ ID NO: 454732 - DNA, 19 bp, Mus musculus
  siRNA target sequence for AI427653 (NM_178714.2,1610-1628).
gaatgctagcagtagtaat

SEQ ID NO: 454733 - DNA, 19 bp, Mus musculus
  siRNA target sequence for AI427653 (NM_178714.2,1624-1642).
gtaatggtgatacaaaaat

SEQ ID NO: 454734 - DNA, 19 bp, Mus musculus
  siRNA target sequence for AI427653 (NM_178714.2,1678-1696).
cgtcaacagcattactaaa

SEQ ID NO: 454735 - DNA, 19 bp, Mus musculus
  siRNA target sequence for AI427653 (NM_178714.2,1721-1739).
cggaatccgtatgtttcaa

SEQ ID NO: 454736 - DNA, 19 bp, Mus musculus
  siRNA target sequence for AI427653 (NM_178714.2,1723-1741).
gaatccgtatgtttcaaat

SEQ ID NO: 454737 - DNA, 19 bp, Mus musculus
  siRNA target sequence for AI427653 (NM_178714.2,1742-1760).
ccagtacaatggtacttat

SEQ ID NO: 454738 - DNA, 19 bp, Mus musculus
  siRNA target sequence for AI427653 (NM_178714.2,1745-1763).
gtacaatggtacttatgat

SEQ ID NO: 454739 - DNA, 19 bp, Mus musculus
  siRNA target sequence for AI427653 (NM_178714.2,1761-1779).
gatgacacccttgtttaca

SEQ ID NO: 454740 - DNA, 19 bp, Mus musculus
  siRNA target sequence for AI427653 (NM_178714.2,1768-1786).
cccttgtttacagaatgat

SEQ ID NO: 454741 - DNA, 19 bp, Mus musculus
  siRNA target sequence for AI427653 (NM_178714.2,1769-1787).
ccttgtttacagaatgata

SEQ ID NO: 454742 - DNA, 19 bp, Mus musculus
  siRNA target sequence for AI427653 (NM_178714.2,1792-1810).
ctacgagcaaaacatttct

SEQ ID NO: 454743 - DNA, 19 bp, Mus musculus
  siRNA target sequence for AI427653 (NM_178714.2,1804-1822).
catttctggtcaataatct

SEQ ID NO: 454744 - DNA, 19 bp, Mus musculus
  siRNA target sequence for AI427653 (NM_178714.2,1904-1922).
gggttgcatccagtttact

SEQ ID NO: 454745 - DNA, 19 bp, Mus musculus
  siRNA target sequence for AI427653 (NM_178714.2,1905-1923).
ggttgcatccagtttacta

SEQ ID NO: 454746 - DNA, 19 bp, Mus musculus
  siRNA target sequence for AI427653 (NM_178714.2,1921-1939).
ctacggaacaggattatgt

SEQ ID NO: 454747 - DNA, 19 bp, Mus musculus
  siRNA target sequence for AI427653 (NM_178714.2,1970-1988).
gggtggcaccatgattatt

SEQ ID NO: 454748 - DNA, 19 bp, Mus musculus
  siRNA target sequence for AI427653 (NM_178714.2,1971-1989).
ggtggcaccatgattatta

SEQ ID NO: 454749 - DNA, 19 bp, Mus musculus
  siRNA target sequence for AI427653 (NM_178714.2,1972-1990).
gtggcaccatgattattat

SEQ ID NO: 454750 - DNA, 19 bp, Mus musculus
  siRNA target sequence for AI427653 (NM_178714.2,1991-2009).
cattggtggaatcattgtt

SEQ ID NO: 454751 - DNA, 19 bp, Mus musculus
  siRNA target sequence for AI427653 (NM_178714.2,2007-2025).
gttgcatccgtgttggttt

SEQ ID NO: 454752 - DNA, 19 bp, Mus musculus
  siRNA target sequence for AI427653 (NM_178714.2,2046-2064).
cggtataaggtttgtaaca

SEQ ID NO: 454753 - DNA, 19 bp, Mus musculus
  siRNA target sequence for AI427653 (NM_178714.2,2086-2104).
cgaaggttagcaacgttta

SEQ ID NO: 454754 - DNA, 19 bp, Mus musculus
  siRNA target sequence for AI427653 (NM_178714.2,2087-2105).
gaaggttagcaacgtttat

SEQ ID NO: 454755 - DNA, 19 bp, Mus musculus
  siRNA target sequence for AI427653 (NM_178714.2,2090-2108).
ggttagcaacgtttattct

SEQ ID NO: 454756 - DNA, 19 bp, Mus musculus
  siRNA target sequence for AI427653 (NM_178714.2,2153-2171).
ccagtccatgtccaaacaa

SEQ ID NO: 454757 - DNA, 19 bp, Mus musculus
  siRNA target sequence for AI427653 (NM_178714.2,2173-2191).
ccatgggccatgaagagaa

SEQ ID NO: 454758 - DNA, 19 bp, Mus musculus
  siRNA target sequence for AI427653 (NM_178714.2,2208-2226).
gttgccagtgacaatgcaa

SEQ ID NO: 454759 - DNA, 19 bp, Mus musculus
  siRNA target sequence for AI427653 (NM_178714.2,2212-2230).
ccagtgacaatgcaattca

SEQ ID NO: 454760 - DNA, 19 bp, Mus musculus
  siRNA target sequence for AI427653 (NM_178714.2,2302-2320).
gtgcgcctgtgtctcaaaa

SEQ ID NO: 454761 - DNA, 19 bp, Mus musculus
  siRNA target sequence for AI427653 (NM_178714.2,2305-2323).
cgcctgtgtctcaaaagca

SEQ ID NO: 454762 - DNA, 19 bp, Mus musculus
  siRNA target sequence for AI427653 (NM_178714.2,2365-2383).
gtgaagctgtcacaaatgt

SEQ ID NO: 454763 - DNA, 19 bp, Mus musculus
  siRNA target sequence for AI427653 (NM_178714.2,2382-2400).
gttgagtcccaaaacacta

SEQ ID NO: 454764 - DNA, 19 bp, Mus musculus
  siRNA target sequence for AI427653 (NM_178714.2,2385-2403).
gagtcccaaaacactaaca

SEQ ID NO: 454765 - DNA, 19 bp, Mus musculus
  siRNA target sequence for AI427653 (NM_178714.2,2543-2561).
ctccctcagtggaggttta

SEQ ID NO: 454766 - DNA, 19 bp, Mus musculus
  siRNA target sequence for AI427653 (NM_178714.2,2565-2583).
gactcttttcactatggta

SEQ ID NO: 454767 - DNA, 19 bp, Mus musculus
  siRNA target sequence for AI427653 (NM_178714.2,2567-2585).
ctcttttcactatggtaat

SEQ ID NO: 454768 - DNA, 19 bp, Mus musculus
  siRNA target sequence for AI427653 (NM_178714.2,2603-2621).
gagaagcatgtctatgaat

SEQ ID NO: 454769 - DNA, 19 bp, Mus musculus
  siRNA target sequence for AI427653 (NM_178714.2,2608-2626).
gcatgtctatgaatgcaat

SEQ ID NO: 454770 - DNA, 19 bp, Mus musculus
  siRNA target sequence for AI481750 (NM_145473.1,352-370).
gcggaccaggacatactca

SEQ ID NO: 454771 - DNA, 19 bp, Mus musculus
  siRNA target sequence for AI481750 (NM_145473.1,473-491).
gacatcttcgtgcatgttt

SEQ ID NO: 454772 - DNA, 19 bp, Mus musculus
  siRNA target sequence for Aire (NM_009646.1,272-290).
gtggggccatcctggattt

SEQ ID NO: 454773 - DNA, 19 bp, Mus musculus
  siRNA target sequence for Aire (NM_009646.1,274-292).
ggggccatcctggatttct

SEQ ID NO: 454774 - DNA, 19 bp, Mus musculus
  siRNA target sequence for Aire (NM_009646.1,351-369).
ggacggcttcccaaaagat

SEQ ID NO: 454775 - DNA, 19 bp, Mus musculus
  siRNA target sequence for Aire (NM_009646.1,523-541).
ggctcccacctgaagacta

SEQ ID NO: 454776 - DNA, 19 bp, Mus musculus
  siRNA target sequence for Aire (NM_009646.1,524-542).
gctcccacctgaagactaa

SEQ ID NO: 454777 - DNA, 19 bp, Mus musculus
  siRNA target sequence for Aire (NM_009646.1,587-605).
ctcttggaaacggaattca

SEQ ID NO: 454778 - DNA, 19 bp, Mus musculus
  siRNA target sequence for Aire (NM_009646.1,673-691).
gccgtggaagggatcctta

SEQ ID NO: 454779 - DNA, 19 bp, Mus musculus
  siRNA target sequence for Aire (NM_009646.1,674-692).
ccgtggaagggatccttat

SEQ ID NO: 454780 - DNA, 19 bp, Mus musculus
  siRNA target sequence for Aire (NM_009646.1,772-790).
gaccccagtggcaatttga

SEQ ID NO: 454781 - DNA, 19 bp, Mus musculus
  siRNA target sequence for Aire (NM_009646.1,775-793).
cccagtggcaatttgaaga

SEQ ID NO: 454782 - DNA, 19 bp, Mus musculus
  siRNA target sequence for Aire (NM_009646.1,840-858).
gggagcccaggtcactata

SEQ ID NO: 454783 - DNA, 19 bp, Mus musculus
  siRNA target sequence for Aire (NM_009646.1,929-947).
cccaggttaaccagaagaa

SEQ ID NO: 454784 - DNA, 19 bp, Mus musculus
  siRNA target sequence for Aire (NM_009646.1,1586-1604).
gtcacgaccctgttctaca

SEQ ID NO: 454785 - DNA, 19 bp, Mus musculus
  siRNA target sequence for Aire (NM_009646.1,1588-1606).
cacgaccctgttctacata

SEQ ID NO: 454786 - DNA, 19 bp, Mus musculus
  siRNA target sequence for Alg1 (NM_145362.1,373-391).
gcatttgtgggagcaaatt

SEQ ID NO: 454787 - DNA, 19 bp, Mus musculus
  siRNA target sequence for Alg1 (NM_145362.1,815-833).
catcctgcttcgagcatta

SEQ ID NO: 454788 - DNA, 19 bp, Mus musculus
  siRNA target sequence for Alg1 (NM_145362.1,818-836).
cctgcttcgagcattagaa

SEQ ID NO: 454789 - DNA, 19 bp, Mus musculus
  siRNA target sequence for Alg1 (NM_145362.1,819-837).
ctgcttcgagcattagaaa

SEQ ID NO: 454790 - DNA, 19 bp, Mus musculus
  siRNA target sequence for Alg1 (NM_145362.1,826-844).
gagcattagaaaagtttga

SEQ ID NO: 454791 - DNA, 19 bp, Mus musculus
  siRNA target sequence for Alg1 (NM_145362.1,878-896).
cctcgtctgtgtgataaca

SEQ ID NO: 454792 - DNA, 19 bp, Mus musculus
  siRNA target sequence for Alg1 (NM_145362.1,1221-1239).
gaccctgctggaaagctaa

SEQ ID NO: 454793 - DNA, 19 bp, Mus musculus
  siRNA target sequence for Alg1 (NM_145362.1,1240-1258).
gccagttccggaagaaact

SEQ ID NO: 454794 - DNA, 19 bp, Mus musculus
  siRNA target sequence for Aplp2 (NM_009691.1,119-137).
ccaccggcaagcttcttgt

SEQ ID NO: 454795 - DNA, 19 bp, Mus musculus
  siRNA target sequence for Aplp2 (NM_009691.1,171-189).
ggctctggctggctacata

SEQ ID NO: 454796 - DNA, 19 bp, Mus musculus
  siRNA target sequence for Aplp2 (NM_009691.1,235-253).
cctcagattgcgatgttct

SEQ ID NO: 454797 - DNA, 19 bp, Mus musculus
  siRNA target sequence for Aplp2 (NM_009691.1,354-372).
gtactgccaggagatatat

SEQ ID NO: 454798 - DNA, 19 bp, Mus musculus
  siRNA target sequence for Aplp2 (NM_009691.1,357-375).
ctgccaggagatatatcca

SEQ ID NO: 454799 - DNA, 19 bp, Mus musculus
  siRNA target sequence for Aplp2 (NM_009691.1,389-407).
caaatgtgatggaagcaaa

SEQ ID NO: 454800 - DNA, 19 bp, Mus musculus
  siRNA target sequence for Aplp2 (NM_009691.1,409-427).
cagccagtcaatattgata

SEQ ID NO: 454801 - DNA, 19 bp, Mus musculus
  siRNA target sequence for Aplp2 (NM_009691.1,459-477).
gagtcacattgttatacca

SEQ ID NO: 454802 - DNA, 19 bp, Mus musculus
  siRNA target sequence for Aplp2 (NM_009691.1,487-505).
cttgtgggtgaatttgtaa

SEQ ID NO: 454803 - DNA, 19 bp, Mus musculus
  siRNA target sequence for Aplp2 (NM_009691.1,580-598).
cgctggcacacgttagtca

SEQ ID NO: 454804 - DNA, 19 bp, Mus musculus
  siRNA target sequence for Aplp2 (NM_009691.1,581-599).
gctggcacacgttagtcaa

SEQ ID NO: 454805 - DNA, 19 bp, Mus musculus
  siRNA target sequence for Aplp2 (NM_009691.1,616-634).
gaggggctgaccttatata

SEQ ID NO: 454806 - DNA, 19 bp, Mus musculus
  siRNA target sequence for Aplp2 (NM_009691.1,673-691).
catggcaccgagtatgtgt

SEQ ID NO: 454807 - DNA, 19 bp, Mus musculus
  siRNA target sequence for Aplp2 (NM_009691.1,693-711).
ctgccctcagacaaagact

SEQ ID NO: 454808 - DNA, 19 bp, Mus musculus
  siRNA target sequence for Aplp2 (NM_009691.1,715-733).
gactcggactcgactatgt

SEQ ID NO: 454809 - DNA, 19 bp, Mus musculus
  siRNA target sequence for Aplp2 (NM_009691.1,723-741).
ctcgactatgtccaaagaa

SEQ ID NO: 454810 - DNA, 19 bp, Mus musculus
  siRNA target sequence for Aplp2 (NM_009691.1,725-743).
cgactatgtccaaagaaga

SEQ ID NO: 454811 - DNA, 19 bp, Mus musculus
  siRNA target sequence for Aplp2 (NM_009691.1,778-796).
gaagactatgatcttgata

SEQ ID NO: 454812 - DNA, 19 bp, Mus musculus
  siRNA target sequence for Aplp2 (NM_009691.1,906-924).
ctactatgacccctttaaa

SEQ ID NO: 454813 - DNA, 19 bp, Mus musculus
  siRNA target sequence for Aplp2 (NM_009691.1,917-935).
cctttaaaggagacgatta

SEQ ID NO: 454814 - DNA, 19 bp, Mus musculus
  siRNA target sequence for Aplp2 (NM_009691.1,965-983).
gcgagggcaccatttcaga

SEQ ID NO: 454815 - DNA, 19 bp, Mus musculus
  siRNA target sequence for Aplp2 (NM_009691.1,980-998).
cagacaaggagattgttca

SEQ ID NO: 454816 - DNA, 19 bp, Mus musculus
  siRNA target sequence for Aplp2 (NM_009691.1,990-1008).
gattgttcacgatgttaaa

SEQ ID NO: 454817 - DNA, 19 bp, Mus musculus
  siRNA target sequence for Aplp2 (NM_009691.1,1017-1035).
gactcccctgccaaccaat

SEQ ID NO: 454818 - DNA, 19 bp, Mus musculus
  siRNA target sequence for Aplp2 (NM_009691.1,1022-1040).
ccctgccaaccaatgatgt

SEQ ID NO: 454819 - DNA, 19 bp, Mus musculus
  siRNA target sequence for Aplp2 (NM_009691.1,1026-1044).
gccaaccaatgatgttgat

SEQ ID NO: 454820 - DNA, 19 bp, Mus musculus
  siRNA target sequence for Aplp2 (NM_009691.1,1028-1046).
caaccaatgatgttgatgt

SEQ ID NO: 454821 - DNA, 19 bp, Mus musculus
  siRNA target sequence for Aplp2 (NM_009691.1,1058-1076).
cctcagcggatgataatga

SEQ ID NO: 454822 - DNA, 19 bp, Mus musculus
  siRNA target sequence for Aplp2 (NM_009691.1,1129-1147).
cgaatggacagggtaaaga

SEQ ID NO: 454823 - DNA, 19 bp, Mus musculus
  siRNA target sequence for Aplp2 (NM_009691.1,1130-1148).
gaatggacagggtaaagaa

SEQ ID NO: 454824 - DNA, 19 bp, Mus musculus
  siRNA target sequence for Aplp2 (NM_009691.1,1215-1233).
gcatttccaagctatggtt

SEQ ID NO: 454825 - DNA, 19 bp, Mus musculus
  siRNA target sequence for Aplp2 (NM_009691.1,1216-1234).
catttccaagctatggtta

SEQ ID NO: 454826 - DNA, 19 bp, Mus musculus
  siRNA target sequence for Aplp2 (NM_009691.1,1226-1244).
ctatggttaaagctttaga

SEQ ID NO: 454827 - DNA, 19 bp, Mus musculus
  siRNA target sequence for Aplp2 (NM_009691.1,1284-1302).
ccatctggcccgagtagaa

SEQ ID NO: 454828 - DNA, 19 bp, Mus musculus
  siRNA target sequence for Aplp2 (NM_009691.1,1322-1340).
gacgcatagctctggaaaa

SEQ ID NO: 454829 - DNA, 19 bp, Mus musculus
  siRNA target sequence for Aplp2 (NM_009691.1,1373-1391).
ggccacatcgcattcttca

SEQ ID NO: 454830 - DNA, 19 bp, Mus musculus
  siRNA target sequence for Aplp2 (NM_009691.1,1407-1425).
cgtccgtgctgagaacaaa

SEQ ID NO: 454831 - DNA, 19 bp, Mus musculus
  siRNA target sequence for Aplp2 (NM_009691.1,1547-1565).
gtctttctcttctgtacaa

SEQ ID NO: 454832 - DNA, 19 bp, Mus musculus
  siRNA target sequence for Aplp2 (NM_009691.1,1560-1578).
gtacaaagttccttatgtt

SEQ ID NO: 454833 - DNA, 19 bp, Mus musculus
  siRNA target sequence for Aplp2 (NM_009691.1,1625-1643).
gagcggatatggaccaatt

SEQ ID NO: 454834 - DNA, 19 bp, Mus musculus
  siRNA target sequence for Aplp2 (NM_009691.1,1736-1754).
catccttgtctgagaatga

SEQ ID NO: 454835 - DNA, 19 bp, Mus musculus
  siRNA target sequence for Aplp2 (NM_009691.1,1807-1825).
gtgattaacagcaagaata

SEQ ID NO: 454836 - DNA, 19 bp, Mus musculus
  siRNA target sequence for Aplp2 (NM_009691.1,1860-1878).
ggatgttaaggaaatgatt

SEQ ID NO: 454837 - DNA, 19 bp, Mus musculus
  siRNA target sequence for Aplp2 (NM_009691.1,1861-1879).
gatgttaaggaaatgattt

SEQ ID NO: 454838 - DNA, 19 bp, Mus musculus
  siRNA target sequence for Aplp2 (NM_009691.1,1917-1935).
ggaatcggtgggaccttta

SEQ ID NO: 454839 - DNA, 19 bp, Mus musculus
  siRNA target sequence for Aplp2 (NM_009691.1,1918-1936).
gaatcggtgggacctttaa

SEQ ID NO: 454840 - DNA, 19 bp, Mus musculus
  siRNA target sequence for Aplp2 (NM_009691.1,1953-1971).
gagcagcaatgcccttatt

SEQ ID NO: 454841 - DNA, 19 bp, Mus musculus
  siRNA target sequence for Aplp2 (NM_009691.1,1999-2017).
gctacggtcatcgttatca

SEQ ID NO: 454842 - DNA, 19 bp, Mus musculus
  siRNA target sequence for Aplp2 (NM_009691.1,2098-2116).
gagcgtcacctgaacaaga

SEQ ID NO: 454843 - DNA, 19 bp, Mus musculus
  siRNA target sequence for Aplp2 (NM_009691.1,2134-2152).
gaaaacccaacctacaaat

SEQ ID NO: 454844 - DNA, 19 bp, Mus musculus
  siRNA target sequence for Aprin (NM_175310.3,167-185).
gaccaacgatgggaaaatt

SEQ ID NO: 454845 - DNA, 19 bp, Mus musculus
  siRNA target sequence for Aprin (NM_175310.3,170-188).
caacgatgggaaaattact

SEQ ID NO: 454846 - DNA, 19 bp, Mus musculus
  siRNA target sequence for Aprin (NM_175310.3,246-264).
cggttaaagatggttgtaa

SEQ ID NO: 454847 - DNA, 19 bp, Mus musculus
  siRNA target sequence for Aprin (NM_175310.3,305-323).
ggaactttatctaaaccta

SEQ ID NO: 454848 - DNA, 19 bp, Mus musculus
  siRNA target sequence for Aprin (NM_175310.3,350-368).
cctcaagcatcctgataaa

SEQ ID NO: 454849 - DNA, 19 bp, Mus musculus
  siRNA target sequence for Aprin (NM_175310.3,388-406).
cttgctgccttgctgatat

SEQ ID NO: 454850 - DNA, 19 bp, Mus musculus
  siRNA target sequence for Aprin (NM_175310.3,399-417).
gctgatattttcaggattt

SEQ ID NO: 454851 - DNA, 19 bp, Mus musculus
  siRNA target sequence for Aprin (NM_175310.3,437-455).
cacgtctcccgataaacta

SEQ ID NO: 454852 - DNA, 19 bp, Mus musculus
  siRNA target sequence for Aprin (NM_175310.3,439-457).
cgtctcccgataaactaaa

SEQ ID NO: 454853 - DNA, 19 bp, Mus musculus
  siRNA target sequence for Aprin (NM_175310.3,442-460).
ctcccgataaactaaagga

SEQ ID NO: 454854 - DNA, 19 bp, Mus musculus
  siRNA target sequence for Aprin (NM_175310.3,444-462).
cccgataaactaaaggata

SEQ ID NO: 454855 - DNA, 19 bp, Mus musculus
  siRNA target sequence for Aprin (NM_175310.3,445-463).
ccgataaactaaaggatat

SEQ ID NO: 454856 - DNA, 19 bp, Mus musculus
  siRNA target sequence for Aprin (NM_175310.3,511-529).
gccctcagtttaataggta

SEQ ID NO: 454857 - DNA, 19 bp, Mus musculus
  siRNA target sequence for Aprin (NM_175310.3,512-530).
ccctcagtttaataggtat

SEQ ID NO: 454858 - DNA, 19 bp, Mus musculus
  siRNA target sequence for Aprin (NM_175310.3,548-566).
cattgcatgggttaaatca

SEQ ID NO: 454859 - DNA, 19 bp, Mus musculus
  siRNA target sequence for Aprin (NM_175310.3,610-628).
ctcaactttacagaacatt

SEQ ID NO: 454860 - DNA, 19 bp, Mus musculus
  siRNA target sequence for Aprin (NM_175310.3,615-633).
ctttacagaacattattct

SEQ ID NO: 454861 - DNA, 19 bp, Mus musculus
  siRNA target sequence for Aprin (NM_175310.3,644-662).
caatggccacaatcagaaa

SEQ ID NO: 454862 - DNA, 19 bp, Mus musculus
  siRNA target sequence for Aprin (NM_175310.3,731-749).
cttagatacagttttagta

SEQ ID NO: 454863 - DNA, 19 bp, Mus musculus
  siRNA target sequence for Aprin (NM_175310.3,753-771).
ctggtacctgcccataaga

SEQ ID NO: 454864 - DNA, 19 bp, Mus musculus
  siRNA target sequence for Aprin (NM_175310.3,759-777).
cctgcccataagaacttaa

SEQ ID NO: 454865 - DNA, 19 bp, Mus musculus
  siRNA target sequence for Aprin (NM_175310.3,815-833).
gaggactgctcaagctatt

SEQ ID NO: 454866 - DNA, 19 bp, Mus musculus
  siRNA target sequence for Aprin (NM_175310.3,817-835).
ggactgctcaagctattga

SEQ ID NO: 454867 - DNA, 19 bp, Mus musculus
  siRNA target sequence for Aprin (NM_175310.3,825-843).
caagctattgaaccatata

SEQ ID NO: 454868 - DNA, 19 bp, Mus musculus
  siRNA target sequence for Aprin (NM_175310.3,828-846).
gctattgaaccatatatta

SEQ ID NO: 454869 - DNA, 19 bp, Mus musculus
  siRNA target sequence for Aprin (NM_175310.3,834-852).
gaaccatatattaccaatt

SEQ ID NO: 454870 - DNA, 19 bp, Mus musculus
  siRNA target sequence for Aprin (NM_175310.3,899-917).
gtctgagcatgtctttgat

SEQ ID NO: 454871 - DNA, 19 bp, Mus musculus
  siRNA target sequence for Aprin (NM_175310.3,966-984).
ctgccccagcttgagttta

SEQ ID NO: 454872 - DNA, 19 bp, Mus musculus
  siRNA target sequence for Aprin (NM_175310.3,968-986).
gccccagcttgagtttaaa

SEQ ID NO: 454873 - DNA, 19 bp, Mus musculus
  siRNA target sequence for Aprin (NM_175310.3,1008-1026).
gaacgcctccaggttgtta

SEQ ID NO: 454874 - DNA, 19 bp, Mus musculus
  siRNA target sequence for Aprin (NM_175310.3,1047-1065).
ggggcaaaggattcagaat

SEQ ID NO: 454875 - DNA, 19 bp, Mus musculus
  siRNA target sequence for Aprin (NM_175310.3,1048-1066).
gggcaaaggattcagaatt

SEQ ID NO: 454876 - DNA, 19 bp, Mus musculus
  siRNA target sequence for Aprin (NM_175310.3,1100-1118).
cctgggcaggtttaatgat

SEQ ID NO: 454877 - DNA, 19 bp, Mus musculus
  siRNA target sequence for Aprin (NM_175310.3,1101-1119).
ctgggcaggtttaatgata

SEQ ID NO: 454878 - DNA, 19 bp, Mus musculus
  siRNA target sequence for Aprin (NM_175310.3,1106-1124).
caggtttaatgatatccat

SEQ ID NO: 454879 - DNA, 19 bp, Mus musculus
  siRNA target sequence for Aprin (NM_175310.3,1135-1153).
gcctggaatgtgtgaaatt

SEQ ID NO: 454880 - DNA, 19 bp, Mus musculus
  siRNA target sequence for Aprin (NM_175310.3,1169-1187).
catgaaccatcctgattta

SEQ ID NO: 454881 - DNA, 19 bp, Mus musculus
  siRNA target sequence for Aprin (NM_175310.3,1172-1190).
gaaccatcctgatttagca

SEQ ID NO: 454882 - DNA, 19 bp, Mus musculus
  siRNA target sequence for Aprin (NM_175310.3,1179-1197).
cctgatttagcaaaggatt

SEQ ID NO: 454883 - DNA, 19 bp, Mus musculus
  siRNA target sequence for Aprin (NM_175310.3,1180-1198).
ctgatttagcaaaggattt

SEQ ID NO: 454884 - DNA, 19 bp, Mus musculus
  siRNA target sequence for Aprin (NM_175310.3,1194-1212).
gatttaacagagtatctta

SEQ ID NO: 454885 - DNA, 19 bp, Mus musculus
  siRNA target sequence for Aprin (NM_175310.3,1227-1245).
gatcctgaggaagctatta

SEQ ID NO: 454886 - DNA, 19 bp, Mus musculus
  siRNA target sequence for Aprin (NM_175310.3,1235-1253).
ggaagctattagacatgat

SEQ ID NO: 454887 - DNA, 19 bp, Mus musculus
  siRNA target sequence for Aprin (NM_175310.3,1240-1258).
ctattagacatgatgttat

SEQ ID NO: 454888 - DNA, 19 bp, Mus musculus
  siRNA target sequence for Aprin (NM_175310.3,1299-1317).
gtcaatgatcacttactca

SEQ ID NO: 454889 - DNA, 19 bp, Mus musculus
  siRNA target sequence for Aprin (NM_175310.3,1348-1366).
ggtggagagtacgtaaaga

SEQ ID NO: 454890 - DNA, 19 bp, Mus musculus
  siRNA target sequence for Aprin (NM_175310.3,1349-1367).
gtggagagtacgtaaagaa

SEQ ID NO: 454891 - DNA, 19 bp, Mus musculus
  siRNA target sequence for Aprin (NM_175310.3,1377-1395).
ggactggcccagatttata

SEQ ID NO: 454892 - DNA, 19 bp, Mus musculus
  siRNA target sequence for Aprin (NM_175310.3,1378-1396).
gactggcccagatttataa

SEQ ID NO: 454893 - DNA, 19 bp, Mus musculus
  siRNA target sequence for Aprin (NM_175310.3,1380-1398).
ctggcccagatttataaga

SEQ ID NO: 454894 - DNA, 19 bp, Mus musculus
  siRNA target sequence for Aprin (NM_175310.3,1388-1406).
gatttataagaaatactct

SEQ ID NO: 454895 - DNA, 19 bp, Mus musculus
  siRNA target sequence for Aprin (NM_175310.3,1463-1481).
gctgctgcatatatactat

SEQ ID NO: 454896 - DNA, 19 bp, Mus musculus
  siRNA target sequence for Aprin (NM_175310.3,1493-1511).
cgacgaccggctacttgtt

SEQ ID NO: 454897 - DNA, 19 bp, Mus musculus
  siRNA target sequence for Aprin (NM_175310.3,1516-1534).
ggatctttgctcagtacat

SEQ ID NO: 454898 - DNA, 19 bp, Mus musculus
  siRNA target sequence for Aprin (NM_175310.3,1529-1547).
gtacatggtccctcacaat

SEQ ID NO: 454899 - DNA, 19 bp, Mus musculus
  siRNA target sequence for Aprin (NM_175310.3,1563-1581).
cggatgaagtgcttgtatt

SEQ ID NO: 454900 - DNA, 19 bp, Mus musculus
  siRNA target sequence for Aprin (NM_175310.3,1589-1607).
cgctacactggacttgaat

SEQ ID NO: 454901 - DNA, 19 bp, Mus musculus
  siRNA target sequence for Aprin (NM_175310.3,1631-1649).
gcggaaatgtcaaaatcta

SEQ ID NO: 454902 - DNA, 19 bp, Mus musculus
  siRNA target sequence for Aprin (NM_175310.3,1633-1651).
ggaaatgtcaaaatctact

SEQ ID NO: 454903 - DNA, 19 bp, Mus musculus
  siRNA target sequence for Aprin (NM_175310.3,1647-1665).
ctactccgacatcaagtaa

SEQ ID NO: 454904 - DNA, 19 bp, Mus musculus
  siRNA target sequence for Aprin (NM_175310.3,1652-1670).
ccgacatcaagtaaaggat

SEQ ID NO: 454905 - DNA, 19 bp, Mus musculus
  siRNA target sequence for Aprin (NM_175310.3,1653-1671).
cgacatcaagtaaaggatt

SEQ ID NO: 454906 - DNA, 19 bp, Mus musculus
  siRNA target sequence for Aprin (NM_175310.3,1710-1728).
gtcaaggccatattttcta

SEQ ID NO: 454907 - DNA, 19 bp, Mus musculus
  siRNA target sequence for Aprin (NM_175310.3,1762-1780).
ctggtaaggcccaagactt

SEQ ID NO: 454908 - DNA, 19 bp, Mus musculus
  siRNA target sequence for Aprin (NM_175310.3,1765-1783).
gtaaggcccaagacttcat

SEQ ID NO: 454909 - DNA, 19 bp, Mus musculus
  siRNA target sequence for Aprin (NM_175310.3,1842-1860).
cttgttagtcccacatgtt

SEQ ID NO: 454910 - DNA, 19 bp, Mus musculus
  siRNA target sequence for Aprin (NM_175310.3,1882-1900).
gtgtgcgtgaaataactaa

SEQ ID NO: 454911 - DNA, 19 bp, Mus musculus
  siRNA target sequence for Aprin (NM_175310.3,1967-1985).
gatagctcctgtacacata

SEQ ID NO: 454912 - DNA, 19 bp, Mus musculus
  siRNA target sequence for Aprin (NM_175310.3,1996-2014).
ccatcagtgctcttatcaa

SEQ ID NO: 454913 - DNA, 19 bp, Mus musculus
  siRNA target sequence for Aprin (NM_175310.3,2060-2078).
gggtgttccaactgatcaa

SEQ ID NO: 454914 - DNA, 19 bp, Mus musculus
  siRNA target sequence for Aprin (NM_175310.3,2208-2226).
gcactacaaattttcaaaa

SEQ ID NO: 454915 - DNA, 19 bp, Mus musculus
  siRNA target sequence for Aprin (NM_175310.3,2250-2268).
gatttccctcacatcagat

SEQ ID NO: 454916 - DNA, 19 bp, Mus musculus
  siRNA target sequence for Aprin (NM_175310.3,2283-2301).
gtactacatcacaaatcca

SEQ ID NO: 454917 - DNA, 19 bp, Mus musculus
  siRNA target sequence for Aprin (NM_175310.3,2311-2329).
cacctcggcaggccaaata

SEQ ID NO: 454918 - DNA, 19 bp, Mus musculus
  siRNA target sequence for Aprin (NM_175310.3,2322-2340).
gccaaatacgccatccatt

SEQ ID NO: 454919 - DNA, 19 bp, Mus musculus
  siRNA target sequence for Aprin (NM_175310.3,2330-2348).
cgccatccattgtattcat

SEQ ID NO: 454920 - DNA, 19 bp, Mus musculus
  siRNA target sequence for Aprin (NM_175310.3,2346-2364).
catgccatattttctagta

SEQ ID NO: 454921 - DNA, 19 bp, Mus musculus
  siRNA target sequence for Aprin (NM_175310.3,2350-2368).
ccatattttctagtaaaga

SEQ ID NO: 454922 - DNA, 19 bp, Mus musculus
  siRNA target sequence for Aprin (NM_175310.3,2447-2465).
ggtcactattggtcatatt

SEQ ID NO: 454923 - DNA, 19 bp, Mus musculus
  siRNA target sequence for Aprin (NM_175310.3,2506-2524).
ctttggtggcaactttcat

SEQ ID NO: 454924 - DNA, 19 bp, Mus musculus
  siRNA target sequence for Aprin (NM_175310.3,2511-2529).
gtggcaactttcattgtga

SEQ ID NO: 454925 - DNA, 19 bp, Mus musculus
  siRNA target sequence for Aprin (NM_175310.3,2547-2565).
gaccggcttccaggaaaaa

SEQ ID NO: 454926 - DNA, 19 bp, Mus musculus
  siRNA target sequence for Aprin (NM_175310.3,2658-2676).
ggaatgaagaataatcaca

SEQ ID NO: 454927 - DNA, 19 bp, Mus musculus
  siRNA target sequence for Aprin (NM_175310.3,2666-2684).
gaataatcacagtaagtca

SEQ ID NO: 454928 - DNA, 19 bp, Mus musculus
  siRNA target sequence for Aprin (NM_175310.3,2693-2711).
caccctcagattactaaca

SEQ ID NO: 454929 - DNA, 19 bp, Mus musculus
  siRNA target sequence for Aprin (NM_175310.3,2824-2842).
cctgttaccacgagatcat

SEQ ID NO: 454930 - DNA, 19 bp, Mus musculus
  siRNA target sequence for Aprin (NM_175310.3,2825-2843).
ctgttaccacgagatcatt

SEQ ID NO: 454931 - DNA, 19 bp, Mus musculus
  siRNA target sequence for Aprin (NM_175310.3,2864-2882).
gtgtgcattagccatcaat

SEQ ID NO: 454932 - DNA, 19 bp, Mus musculus
  siRNA target sequence for Aprin (NM_175310.3,2876-2894).
catcaatgatgagtgttat

SEQ ID NO: 454933 - DNA, 19 bp, Mus musculus
  siRNA target sequence for Aprin (NM_175310.3,2879-2897).
caatgatgagtgttatcaa

SEQ ID NO: 454934 - DNA, 19 bp, Mus musculus
  siRNA target sequence for Aprin (NM_175310.3,2906-2924).
ggtgttcgcccagaaactt

SEQ ID NO: 454935 - DNA, 19 bp, Mus musculus
  siRNA target sequence for Aprin (NM_175310.3,2947-2965).
ggcttccccttgagtacat

SEQ ID NO: 454936 - DNA, 19 bp, Mus musculus
  siRNA target sequence for Aprin (NM_175310.3,3068-3086).
gcagcatgcaagtgttagt

SEQ ID NO: 454937 - DNA, 19 bp, Mus musculus
  siRNA target sequence for Aprin (NM_175310.3,3079-3097).
gtgttagtgaaaaattatt

SEQ ID NO: 454938 - DNA, 19 bp, Mus musculus
  siRNA target sequence for Aprin (NM_175310.3,3081-3099).
gttagtgaaaaattattgt

SEQ ID NO: 454939 - DNA, 19 bp, Mus musculus
  siRNA target sequence for Aprin (NM_175310.3,3100-3118).
ctcttctaccagagtatgt

SEQ ID NO: 454940 - DNA, 19 bp, Mus musculus
  siRNA target sequence for Aprin (NM_175310.3,3109-3127).
cagagtatgttgttccata

SEQ ID NO: 454941 - DNA, 19 bp, Mus musculus
  siRNA target sequence for Aprin (NM_175310.3,3111-3129).
gagtatgttgttccatata

SEQ ID NO: 454942 - DNA, 19 bp, Mus musculus
  siRNA target sequence for Aprin (NM_175310.3,3154-3172).
cagattatgtcaaagtaca

SEQ ID NO: 454943 - DNA, 19 bp, Mus musculus
  siRNA target sequence for Aprin (NM_175310.3,3171-3189).
caggatattgaacaactta

SEQ ID NO: 454944 - DNA, 19 bp, Mus musculus
  siRNA target sequence for Aprin (NM_175310.3,3197-3215).
gaaagaatgcctttggttt

SEQ ID NO: 454945 - DNA, 19 bp, Mus musculus
  siRNA target sequence for Aprin (NM_175310.3,3222-3240).
gagatattgatggctaaaa

SEQ ID NO: 454946 - DNA, 19 bp, Mus musculus
  siRNA target sequence for Aprin (NM_175310.3,3254-3272).
ccatgcatttatcagaaaa

SEQ ID NO: 454947 - DNA, 19 bp, Mus musculus
  siRNA target sequence for Aprin (NM_175310.3,3306-3324).
caaggaccagatgatacaa

SEQ ID NO: 454948 - DNA, 19 bp, Mus musculus
  siRNA target sequence for Aprin (NM_175310.3,3312-3330).
ccagatgatacaaaaatga

SEQ ID NO: 454949 - DNA, 19 bp, Mus musculus
  siRNA target sequence for Aprin (NM_175310.3,3341-3359).
gtacaccgtgtgtgatgtt

SEQ ID NO: 454950 - DNA, 19 bp, Mus musculus
  siRNA target sequence for Aprin (NM_175310.3,3357-3375).
gttgccatgaacatcatca

SEQ ID NO: 454951 - DNA, 19 bp, Mus musculus
  siRNA target sequence for Aprin (NM_175310.3,3360-3378).
gccatgaacatcatcatgt

SEQ ID NO: 454952 - DNA, 19 bp, Mus musculus
  siRNA target sequence for Aprin (NM_175310.3,3423-3441).
ctgccagctcggtttttca

SEQ ID NO: 454953 - DNA, 19 bp, Mus musculus
  siRNA target sequence for Aprin (NM_175310.3,3534-3552).
gttctcggagcagttaata

SEQ ID NO: 454954 - DNA, 19 bp, Mus musculus
  siRNA target sequence for Aprin (NM_175310.3,3546-3564).
gttaataagccactttcat

SEQ ID NO: 454955 - DNA, 19 bp, Mus musculus
  siRNA target sequence for Aprin (NM_175310.3,3578-3596).
gtctcagaccaaatcatca

SEQ ID NO: 454956 - DNA, 19 bp, Mus musculus
  siRNA target sequence for Aprin (NM_175310.3,3582-3600).
cagaccaaatcatcaagaa

SEQ ID NO: 454957 - DNA, 19 bp, Mus musculus
  siRNA target sequence for Aprin (NM_175310.3,3678-3696).
gaaatggatcacagtgaaa

SEQ ID NO: 454958 - DNA, 19 bp, Mus musculus
  siRNA target sequence for Aprin (NM_175310.3,3812-3830).
ccctgaagagaaattaggt

SEQ ID NO: 454959 - DNA, 19 bp, Mus musculus
  siRNA target sequence for Aprin (NM_175310.3,3829-3847).
gtatggatgacctaactaa

SEQ ID NO: 454960 - DNA, 19 bp, Mus musculus
  siRNA target sequence for Aprin (NM_175310.3,3852-3870).
gtacaggaacagaaaccta

SEQ ID NO: 454961 - DNA, 19 bp, Mus musculus
  siRNA target sequence for Aprin (NM_175310.3,4049-4067).
ggaagagcccacaatgaaa

SEQ ID NO: 454962 - DNA, 19 bp, Mus musculus
  siRNA target sequence for Aprin (NM_175310.3,4050-4068).
gaagagcccacaatgaaaa

SEQ ID NO: 454963 - DNA, 19 bp, Mus musculus
  siRNA target sequence for Aprin (NM_175310.3,4053-4071).
gagcccacaatgaaaacat

SEQ ID NO: 454964 - DNA, 19 bp, Mus musculus
  siRNA target sequence for Aprin (NM_175310.3,4173-4191).
cagcaccgcacatcaaaga

SEQ ID NO: 454965 - DNA, 19 bp, Mus musculus
  siRNA target sequence for Aprin (NM_175310.3,4175-4193).
gcaccgcacatcaaagaga

SEQ ID NO: 454966 - DNA, 19 bp, Mus musculus
  siRNA target sequence for Aprin (NM_175310.3,4261-4279).
gacgaggaagaccatcaaa

SEQ ID NO: 454967 - DNA, 19 bp, Mus musculus
  siRNA target sequence for Arfgap1 (NM_145760.2,292-310).
gaaccaggaaagttcttaa

SEQ ID NO: 454968 - DNA, 19 bp, Mus musculus
  siRNA target sequence for Arfgap1 (NM_145760.2,319-337).
gggcacaggatgagaataa

SEQ ID NO: 454969 - DNA, 19 bp, Mus musculus
  siRNA target sequence for Arfgap1 (NM_145760.2,320-338).
ggcacaggatgagaataat

SEQ ID NO: 454970 - DNA, 19 bp, Mus musculus
  siRNA target sequence for Arfgap1 (NM_145760.2,322-340).
cacaggatgagaataatgt

SEQ ID NO: 454971 - DNA, 19 bp, Mus musculus
  siRNA target sequence for Arfgap1 (NM_145760.2,324-342).
caggatgagaataatgttt

SEQ ID NO: 454972 - DNA, 19 bp, Mus musculus
  siRNA target sequence for Arfgap1 (NM_145760.2,371-389).
gtgggtcagcgtgacttat

SEQ ID NO: 454973 - DNA, 19 bp, Mus musculus
  siRNA target sequence for Arfgap1 (NM_145760.2,508-526).
ctggtgggaatgctaagtt

SEQ ID NO: 454974 - DNA, 19 bp, Mus musculus
  siRNA target sequence for Arfgap1 (NM_145760.2,604-622).
cgctcttcagggataaggt

SEQ ID NO: 454975 - DNA, 19 bp, Mus musculus
  siRNA target sequence for Arfgap1 (NM_145760.2,613-631).
gggataaggtggctacttt

SEQ ID NO: 454976 - DNA, 19 bp, Mus musculus
  siRNA target sequence for Arfgap1 (NM_145760.2,625-643).
ctactttggcagaaggtaa

SEQ ID NO: 454977 - DNA, 19 bp, Mus musculus
  siRNA target sequence for Arfgap1 (NM_145760.2,902-920).
ctcgggctggagcagtttt

SEQ ID NO: 454978 - DNA, 19 bp, Mus musculus
  siRNA target sequence for Arfgap1 (NM_145760.2,923-941).
cactggggcgagcaagttt

SEQ ID NO: 454979 - DNA, 19 bp, Mus musculus
  siRNA target sequence for Arfgap1 (NM_145760.2,956-974).
ggagggtgctacaaaattt

SEQ ID NO: 454980 - DNA, 19 bp, Mus musculus
  siRNA target sequence for Arfgap1 (NM_145760.2,1138-1156).
ggcgtgatgtcactacttt

SEQ ID NO: 454981 - DNA, 19 bp, Mus musculus
  siRNA target sequence for Arfgap1 (NM_145760.2,1140-1158).
cgtgatgtcactactttct

SEQ ID NO: 454982 - DNA, 19 bp, Mus musculus
  siRNA target sequence for Arfgap1 (NM_145760.2,1325-1343).
ctgtgcagatgcttcaaca

SEQ ID NO: 454983 - DNA, 19 bp, Mus musculus
  siRNA target sequence for Arfgap1 (NM_145760.2,1384-1402).
gttccgcatccaacaacaa

SEQ ID NO: 454984 - DNA, 19 bp, Mus musculus
  siRNA target sequence for Arfgap3 (NM_025445.2,161-179).
ctaacaaggtgtgttttga

SEQ ID NO: 454985 - DNA, 19 bp, Mus musculus
  siRNA target sequence for Arfgap3 (NM_025445.2,200-218).
gctgggccagcataagcta

SEQ ID NO: 454986 - DNA, 19 bp, Mus musculus
  siRNA target sequence for Arfgap3 (NM_025445.2,201-219).
ctgggccagcataagctat

SEQ ID NO: 454987 - DNA, 19 bp, Mus musculus
  siRNA target sequence for Arfgap3 (NM_025445.2,257-275).
ggtcgctcggggttcactt

SEQ ID NO: 454988 - DNA, 19 bp, Mus musculus
  siRNA target sequence for Arfgap3 (NM_025445.2,262-280).
ctcggggttcacttgagtt

SEQ ID NO: 454989 - DNA, 19 bp, Mus musculus
  siRNA target sequence for Arfgap3 (NM_025445.2,639-657).
ggaaaccactccagaaaaa

SEQ ID NO: 454990 - DNA, 19 bp, Mus musculus
  siRNA target sequence for Arfgap3 (NM_025445.2,721-739).
ccagaggtttcatcgatta

SEQ ID NO: 454991 - DNA, 19 bp, Mus musculus
  siRNA target sequence for Arfgap3 (NM_025445.2,724-742).
gaggtttcatcgattataa

SEQ ID NO: 454992 - DNA, 19 bp, Mus musculus
  siRNA target sequence for Arfgap3 (NM_025445.2,726-744).
ggtttcatcgattataaaa

SEQ ID NO: 454993 - DNA, 19 bp, Mus musculus
  siRNA target sequence for Arfgap3 (NM_025445.2,727-745).
gtttcatcgattataaaaa

SEQ ID NO: 454994 - DNA, 19 bp, Mus musculus
  siRNA target sequence for Arfgap3 (NM_025445.2,747-765).
gaagccaaatcaagcaaaa

SEQ ID NO: 454995 - DNA, 19 bp, Mus musculus
  siRNA target sequence for Arfgap3 (NM_025445.2,797-815).
gagcccagaaactgacaaa

SEQ ID NO: 454996 - DNA, 19 bp, Mus musculus
  siRNA target sequence for Arfgap3 (NM_025445.2,821-839).
ccttcactgagatcgaaaa

SEQ ID NO: 454997 - DNA, 19 bp, Mus musculus
  siRNA target sequence for Arfgap3 (NM_025445.2,894-912).
cccaaaggaggagtctatt

SEQ ID NO: 454998 - DNA, 19 bp, Mus musculus
  siRNA target sequence for Arfgap3 (NM_025445.2,896-914).
caaaggaggagtctattgt

SEQ ID NO: 454999 - DNA, 19 bp, Mus musculus
  siRNA target sequence for Arfgap3 (NM_025445.2,1195-1213).
gacgaccccatggagttaa

SEQ ID NO: 455000 - DNA, 19 bp, Mus musculus
  siRNA target sequence for Arfgap3 (NM_025445.2,1331-1349).
gccggaagccagaatatga

SEQ ID NO: 455001 - DNA, 19 bp, Mus musculus
  siRNA target sequence for Arfgap3 (NM_025445.2,1525-1543).
cagactgcaggaaactaca

SEQ ID NO: 455002 - DNA, 19 bp, Mus musculus
  siRNA target sequence for Arfgap3 (NM_025445.2,1601-1619).
gctccgttgctggaaaact

SEQ ID NO: 455003 - DNA, 19 bp, Mus musculus
  siRNA target sequence for Arfgap3 (NM_025445.2,1602-1620).
ctccgttgctggaaaactt

SEQ ID NO: 455004 - DNA, 19 bp, Mus musculus
  siRNA target sequence for Asb15 (NM_080847.1,209-227).
cgagccaggctatatttca

SEQ ID NO: 455005 - DNA, 19 bp, Mus musculus
  siRNA target sequence for Asb15 (NM_080847.1,210-228).
gagccaggctatatttcat

SEQ ID NO: 455006 - DNA, 19 bp, Mus musculus
  siRNA target sequence for Asb15 (NM_080847.1,306-324).
ccaggagtatgtgcaatat

SEQ ID NO: 455007 - DNA, 19 bp, Mus musculus
  siRNA target sequence for Asb15 (NM_080847.1,411-429).
ggttctggatgcatcctat

SEQ ID NO: 455008 - DNA, 19 bp, Mus musculus
  siRNA target sequence for Asb15 (NM_080847.1,417-435).
ggatgcatcctataagaca

SEQ ID NO: 455009 - DNA, 19 bp, Mus musculus
  siRNA target sequence for Asb15 (NM_080847.1,471-489).
cttgaccctggcagtcaaa

SEQ ID NO: 455010 - DNA, 19 bp, Mus musculus
  siRNA target sequence for Asb15 (NM_080847.1,560-578).
gagagacacctcttctgat

SEQ ID NO: 455011 - DNA, 19 bp, Mus musculus
  siRNA target sequence for Asb15 (NM_080847.1,606-624).
ggtctctgcactgattaaa

SEQ ID NO: 455012 - DNA, 19 bp, Mus musculus
  siRNA target sequence for Asb15 (NM_080847.1,607-625).
gtctctgcactgattaaat

SEQ ID NO: 455013 - DNA, 19 bp, Mus musculus
  siRNA target sequence for Asb15 (NM_080847.1,613-631).
gcactgattaaatacaaca

SEQ ID NO: 455014 - DNA, 19 bp, Mus musculus
  siRNA target sequence for Asb15 (NM_080847.1,672-690).
gcatgaggcagctaagcaa

SEQ ID NO: 455015 - DNA, 19 bp, Mus musculus
  siRNA target sequence for Asb15 (NM_080847.1,687-705).
gcaaggtcgcaaagatatt

SEQ ID NO: 455016 - DNA, 19 bp, Mus musculus
  siRNA target sequence for Asb15 (NM_080847.1,691-709).
ggtcgcaaagatattatca

SEQ ID NO: 455017 - DNA, 19 bp, Mus musculus
  siRNA target sequence for Asb15 (NM_080847.1,791-809).
gccactgtgacgtgttaga

SEQ ID NO: 455018 - DNA, 19 bp, Mus musculus
  siRNA target sequence for Asb15 (NM_080847.1,792-810).
ccactgtgacgtgttagaa

SEQ ID NO: 455019 - DNA, 19 bp, Mus musculus
  siRNA target sequence for Asb15 (NM_080847.1,795-813).
ctgtgacgtgttagaacat

SEQ ID NO: 455020 - DNA, 19 bp, Mus musculus
  siRNA target sequence for Asb15 (NM_080847.1,797-815).
gtgacgtgttagaacatct

SEQ ID NO: 455021 - DNA, 19 bp, Mus musculus
  siRNA target sequence for Asb15 (NM_080847.1,801-819).
cgtgttagaacatcttatt

SEQ ID NO: 455022 - DNA, 19 bp, Mus musculus
  siRNA target sequence for Asb15 (NM_080847.1,857-875).
gggcatctgtgctattcga

SEQ ID NO: 455023 - DNA, 19 bp, Mus musculus
  siRNA target sequence for Asb15 (NM_080847.1,977-995).
ctgcctatgagggacatta

SEQ ID NO: 455024 - DNA, 19 bp, Mus musculus
  siRNA target sequence for Asb15 (NM_080847.1,1029-1047).
caaacatgcaattcagaaa

SEQ ID NO: 455025 - DNA, 19 bp, Mus musculus
  siRNA target sequence for Asb15 (NM_080847.1,1049-1067).
gcggcctcactccaattca

SEQ ID NO: 455026 - DNA, 19 bp, Mus musculus
  siRNA target sequence for Asb15 (NM_080847.1,1051-1069).
ggcctcactccaattcact

SEQ ID NO: 455027 - DNA, 19 bp, Mus musculus
  siRNA target sequence for Asb15 (NM_080847.1,1091-1109).
cccagtgccttgaattgct

SEQ ID NO: 455028 - DNA, 19 bp, Mus musculus
  siRNA target sequence for Asb15 (NM_080847.1,1099-1117).
cttgaattgctcattgaga

SEQ ID NO: 455029 - DNA, 19 bp, Mus musculus
  siRNA target sequence for Asb15 (NM_080847.1,1138-1156).
ctgcttgccgaccacattt

SEQ ID NO: 455030 - DNA, 19 bp, Mus musculus
  siRNA target sequence for Asb15 (NM_080847.1,1152-1170).
catttcccagagttacgat

SEQ ID NO: 455031 - DNA, 19 bp, Mus musculus
  siRNA target sequence for Asb15 (NM_080847.1,1163-1181).
gttacgatgatgagagaaa

SEQ ID NO: 455032 - DNA, 19 bp, Mus musculus
  siRNA target sequence for Asb15 (NM_080847.1,1167-1185).
cgatgatgagagaaagact

SEQ ID NO: 455033 - DNA, 19 bp, Mus musculus
  siRNA target sequence for Asb15 (NM_080847.1,1178-1196).
gaaagactgcgctatactt

SEQ ID NO: 455034 - DNA, 19 bp, Mus musculus
  siRNA target sequence for Asb15 (NM_080847.1,1194-1212).
cttcgccgtctccaataat

SEQ ID NO: 455035 - DNA, 19 bp, Mus musculus
  siRNA target sequence for Asb15 (NM_080847.1,1197-1215).
cgccgtctccaataatgat

SEQ ID NO: 455036 - DNA, 19 bp, Mus musculus
  siRNA target sequence for Asb15 (NM_080847.1,1198-1216).
gccgtctccaataatgata

SEQ ID NO: 455037 - DNA, 19 bp, Mus musculus
  siRNA target sequence for Asb15 (NM_080847.1,1293-1311).
gagggccaatcgacatgaa

SEQ ID NO: 455038 - DNA, 19 bp, Mus musculus
  siRNA target sequence for Asb15 (NM_080847.1,1295-1313).
gggccaatcgacatgaaat

SEQ ID NO: 455039 - DNA, 19 bp, Mus musculus
  siRNA target sequence for Asb15 (NM_080847.1,1298-1316).
ccaatcgacatgaaatcgt

SEQ ID NO: 455040 - DNA, 19 bp, Mus musculus
  siRNA target sequence for Asb15 (NM_080847.1,1336-1354).
ggggctaacgtcaattgtt

SEQ ID NO: 455041 - DNA, 19 bp, Mus musculus
  siRNA target sequence for Asb15 (NM_080847.1,1337-1355).
gggctaacgtcaattgtta

SEQ ID NO: 455042 - DNA, 19 bp, Mus musculus
  siRNA target sequence for Asb15 (NM_080847.1,1338-1356).
ggctaacgtcaattgttat

SEQ ID NO: 455043 - DNA, 19 bp, Mus musculus
  siRNA target sequence for Asb15 (NM_080847.1,1339-1357).
gctaacgtcaattgttatt

SEQ ID NO: 455044 - DNA, 19 bp, Mus musculus
  siRNA target sequence for Asb15 (NM_080847.1,1473-1491).
catgcacggaaacatcttt

SEQ ID NO: 455045 - DNA, 19 bp, Mus musculus
  siRNA target sequence for Asb15 (NM_080847.1,1531-1549).
ctgccagggtggacatcat

SEQ ID NO: 455046 - DNA, 19 bp, Mus musculus
  siRNA target sequence for Asb15 (NM_080847.1,1539-1557).
gtggacatcatgcataata

SEQ ID NO: 455047 - DNA, 19 bp, Mus musculus
  siRNA target sequence for Asb15 (NM_080847.1,1615-1633).
ggcattgtccgcatactga

SEQ ID NO: 455048 - DNA, 19 bp, Mus musculus
  siRNA target sequence for Asb15 (NM_080847.1,1616-1634).
gcattgtccgcatactgat

SEQ ID NO: 455049 - DNA, 19 bp, Mus musculus
  siRNA target sequence for Asb15 (NM_080847.1,1617-1635).
cattgtccgcatactgata

SEQ ID NO: 455050 - DNA, 19 bp, Mus musculus
  siRNA target sequence for Asb15 (NM_080847.1,1621-1639).
gtccgcatactgatagatt

SEQ ID NO: 455051 - DNA, 19 bp, Mus musculus
  siRNA target sequence for Asb15 (NM_080847.1,1624-1642).
cgcatactgatagattaca

SEQ ID NO: 455052 - DNA, 19 bp, Mus musculus
  siRNA target sequence for Asb15 (NM_080847.1,1655-1673).
ctctgtgtgcaaaactgaa

SEQ ID NO: 455053 - DNA, 19 bp, Mus musculus
  siRNA target sequence for Asb15 (NM_080847.1,1681-1699).
ctagaagtacagagagaat

SEQ ID NO: 455054 - DNA, 19 bp, Mus musculus
  siRNA target sequence for Asb15 (NM_080847.1,1701-1719).
gccagaaatacgccaaata

SEQ ID NO: 455055 - DNA, 19 bp, Mus musculus
  siRNA target sequence for Asb15 (NM_080847.1,1702-1720).
ccagaaatacgccaaataa

SEQ ID NO: 455056 - DNA, 19 bp, Mus musculus
  siRNA target sequence for Asb15 (NM_080847.1,1703-1721).
cagaaatacgccaaataat

SEQ ID NO: 455057 - DNA, 19 bp, Mus musculus
  siRNA target sequence for Asb15 (NM_080847.1,1744-1762).
catctgtgccgattaaaaa

SEQ ID NO: 455058 - DNA, 19 bp, Mus musculus
  siRNA target sequence for Asb15 (NM_080847.1,1830-1848).
ggcgatgcgaagatactta

SEQ ID NO: 455059 - DNA, 19 bp, Mus musculus
  siRNA target sequence for Asb15 (NM_080847.1,1831-1849).
gcgatgcgaagatacttat

SEQ ID NO: 455060 - DNA, 19 bp, Mus musculus
  siRNA target sequence for Asb15 (NM_080847.1,1832-1850).
cgatgcgaagatacttatt

SEQ ID NO: 455061 - DNA, 19 bp, Mus musculus
  siRNA target sequence for Asb15 (NM_080847.1,1833-1851).
gatgcgaagatacttatta

SEQ ID NO: 455062 - DNA, 19 bp, Mus musculus
  siRNA target sequence for Ascl1 (NM_008553.2,672-690).
ccaacgacttgaactctat

SEQ ID NO: 455063 - DNA, 19 bp, Mus musculus
  siRNA target sequence for Ascl3 (NM_020051.1,187-205).
ccggtaccggcctcttaca

SEQ ID NO: 455064 - DNA, 19 bp, Mus musculus
  siRNA target sequence for Ascl3 (NM_020051.1,189-207).
ggtaccggcctcttacaca

SEQ ID NO: 455065 - DNA, 19 bp, Mus musculus
  siRNA target sequence for Ascl3 (NM_020051.1,233-251).
ccagcgacaccctgatcat

SEQ ID NO: 455066 - DNA, 19 bp, Mus musculus
  siRNA target sequence for Ascl3 (NM_020051.1,242-260).
ccctgatcatgaacaatta

SEQ ID NO: 455067 - DNA, 19 bp, Mus musculus
  siRNA target sequence for Ascl3 (NM_020051.1,462-480).
cagagctgccatcaaatat

SEQ ID NO: 455068 - DNA, 19 bp, Mus musculus
  siRNA target sequence for Ascl3 (NM_020051.1,464-482).
gagctgccatcaaatatat

SEQ ID NO: 455069 - DNA, 19 bp, Mus musculus
  siRNA target sequence for Ascl3 (NM_020051.1,499-517).
ctcttgtacccggatgaat

SEQ ID NO: 455070 - DNA, 19 bp, Mus musculus
  siRNA target sequence for Ascl3 (NM_020051.1,501-519).
cttgtacccggatgaatct

SEQ ID NO: 455071 - DNA, 19 bp, Mus musculus
  siRNA target sequence for Ash1l (NM_138679.1,554-572).
cagcagtaggcctgatcaa

SEQ ID NO: 455072 - DNA, 19 bp, Mus musculus
  siRNA target sequence for Ash1l (NM_138679.1,557-575).
cagtaggcctgatcaataa

SEQ ID NO: 455073 - DNA, 19 bp, Mus musculus
  siRNA target sequence for Ash1l (NM_138679.1,601-619).
ggcactacagccgtattca

SEQ ID NO: 455074 - DNA, 19 bp, Mus musculus
  siRNA target sequence for Ash1l (NM_138679.1,602-620).
gcactacagccgtattcat

SEQ ID NO: 455075 - DNA, 19 bp, Mus musculus
  siRNA target sequence for Ash1l (NM_138679.1,603-621).
cactacagccgtattcatt

SEQ ID NO: 455076 - DNA, 19 bp, Mus musculus
  siRNA target sequence for Ash1l (NM_138679.1,605-623).
ctacagccgtattcattaa

SEQ ID NO: 455077 - DNA, 19 bp, Mus musculus
  siRNA target sequence for Ash1l (NM_138679.1,690-708).
gaagctaggcattggtatt

SEQ ID NO: 455078 - DNA, 19 bp, Mus musculus
  siRNA target sequence for Ash1l (NM_138679.1,693-711).
gctaggcattggtattgtt

SEQ ID NO: 455079 - DNA, 19 bp, Mus musculus
  siRNA target sequence for Ash1l (NM_138679.1,709-727).
gttccagggctagtgaata

SEQ ID NO: 455080 - DNA, 19 bp, Mus musculus
  siRNA target sequence for Ash1l (NM_138679.1,713-731).
cagggctagtgaataaaga

SEQ ID NO: 455081 - DNA, 19 bp, Mus musculus
  siRNA target sequence for Ash1l (NM_138679.1,715-733).
gggctagtgaataaagagt

SEQ ID NO: 455082 - DNA, 19 bp, Mus musculus
  siRNA target sequence for Ash1l (NM_138679.1,732-750).
gtctggcaagaaattagga

SEQ ID NO: 455083 - DNA, 19 bp, Mus musculus
  siRNA target sequence for Ash1l (NM_138679.1,758-776).
ccgtagttggactggttaa

SEQ ID NO: 455084 - DNA, 19 bp, Mus musculus
  siRNA target sequence for Ash1l (NM_138679.1,792-810).
gaaactgagttctacagtt

SEQ ID NO: 455085 - DNA, 19 bp, Mus musculus
  siRNA target sequence for Ash1l (NM_138679.1,814-832).
ctagtggccaaggatgtta

SEQ ID NO: 455086 - DNA, 19 bp, Mus musculus
  siRNA target sequence for Ash1l (NM_138679.1,854-872).
cagcaatgggattggttaa

SEQ ID NO: 455087 - DNA, 19 bp, Mus musculus
  siRNA target sequence for Ash1l (NM_138679.1,856-874).
gcaatgggattggttaata

SEQ ID NO: 455088 - DNA, 19 bp, Mus musculus
  siRNA target sequence for Ash1l (NM_138679.1,877-895).
gacattggaaagaaattat

SEQ ID NO: 455089 - DNA, 19 bp, Mus musculus
  siRNA target sequence for Ash1l (NM_138679.1,883-901).
ggaaagaaattattaaatt

SEQ ID NO: 455090 - DNA, 19 bp, Mus musculus
  siRNA target sequence for Ash1l (NM_138679.1,935-953).
ccttaaaccttaaatctga

SEQ ID NO: 455091 - DNA, 19 bp, Mus musculus
  siRNA target sequence for Ash1l (NM_138679.1,992-1010).
gtagtgcaaacataagtaa

SEQ ID NO: 455092 - DNA, 19 bp, Mus musculus
  siRNA target sequence for Ash1l (NM_138679.1,995-1013).
gtgcaaacataagtaatca

SEQ ID NO: 455093 - DNA, 19 bp, Mus musculus
  siRNA target sequence for Ash1l (NM_138679.1,998-1016).
caaacataagtaatcatga

SEQ ID NO: 455094 - DNA, 19 bp, Mus musculus
  siRNA target sequence for Ash1l (NM_138679.1,1049-1067).
gtgctaccggcaaagcttt

SEQ ID NO: 455095 - DNA, 19 bp, Mus musculus
  siRNA target sequence for Ash1l (NM_138679.1,1052-1070).
ctaccggcaaagcttttga

SEQ ID NO: 455096 - DNA, 19 bp, Mus musculus
  siRNA target sequence for Ash1l (NM_138679.1,1055-1073).
ccggcaaagcttttgagaa

SEQ ID NO: 455097 - DNA, 19 bp, Mus musculus
  siRNA target sequence for Ash1l (NM_138679.1,1076-1094).
gtgttatgcggcatagtaa

SEQ ID NO: 455098 - DNA, 19 bp, Mus musculus
  siRNA target sequence for Ash1l (NM_138679.1,1085-1103).
ggcatagtaaagaaagcat

SEQ ID NO: 455099 - DNA, 19 bp, Mus musculus
  siRNA target sequence for Ash1l (NM_138679.1,1101-1119).
catgttggaaaaattttca

SEQ ID NO: 455100 - DNA, 19 bp, Mus musculus
  siRNA target sequence for Ash1l (NM_138679.1,1123-1141).
cgaaaagaaattactaatt

SEQ ID NO: 455101 - DNA, 19 bp, Mus musculus
  siRNA target sequence for Ash1l (NM_138679.1,1169-1187).
catgcattcagcaagacaa

SEQ ID NO: 455102 - DNA, 19 bp, Mus musculus
  siRNA target sequence for Ash1l (NM_138679.1,1256-1274).
cttctcctgactttcaaat

SEQ ID NO: 455103 - DNA, 19 bp, Mus musculus
  siRNA target sequence for Ash1l (NM_138679.1,1288-1306).
gatgcctctacagctaaat

SEQ ID NO: 455104 - DNA, 19 bp, Mus musculus
  siRNA target sequence for Ash1l (NM_138679.1,1347-1365).
gtcacctactgtatctgtt

SEQ ID NO: 455105 - DNA, 19 bp, Mus musculus
  siRNA target sequence for Ash1l (NM_138679.1,1411-1429).
ccaaacccattacttttaa

SEQ ID NO: 455106 - DNA, 19 bp, Mus musculus
  siRNA target sequence for Ash1l (NM_138679.1,1520-1538).
gatcattaggtcatagctt

SEQ ID NO: 455107 - DNA, 19 bp, Mus musculus
  siRNA target sequence for Ash1l (NM_138679.1,1531-1549).
catagcttaagtattgagt

SEQ ID NO: 455108 - DNA, 19 bp, Mus musculus
  siRNA target sequence for Ash1l (NM_138679.1,1535-1553).
gcttaagtattgagtgtaa

SEQ ID NO: 455109 - DNA, 19 bp, Mus musculus
  siRNA target sequence for Ash1l (NM_138679.1,1536-1554).
cttaagtattgagtgtaaa

SEQ ID NO: 455110 - DNA, 19 bp, Mus musculus
  siRNA target sequence for Ash1l (NM_138679.1,1597-1615).
gatattcctagaataagtt

SEQ ID NO: 455111 - DNA, 19 bp, Mus musculus
  siRNA target sequence for Ash1l (NM_138679.1,1670-1688).
ctccttccgttgttaattt

SEQ ID NO: 455112 - DNA, 19 bp, Mus musculus
  siRNA target sequence for Ash1l (NM_138679.1,1781-1799).
gtttccagtccaaaccatt

SEQ ID NO: 455113 - DNA, 19 bp, Mus musculus
  siRNA target sequence for Ash1l (NM_138679.1,1851-1869).
cacatgccggtctccaaaa

SEQ ID NO: 455114 - DNA, 19 bp, Mus musculus
  siRNA target sequence for Ash1l (NM_138679.1,1870-1888).
ggactagacttagaaagat

SEQ ID NO: 455115 - DNA, 19 bp, Mus musculus
  siRNA target sequence for Ash1l (NM_138679.1,1917-1935).
ctcactatcaaatagttct

SEQ ID NO: 455116 - DNA, 19 bp, Mus musculus
  siRNA target sequence for Ash1l (NM_138679.1,1934-1952).
ctgagccagcgaagtttat

SEQ ID NO: 455117 - DNA, 19 bp, Mus musculus
  siRNA target sequence for Ash1l (NM_138679.1,1936-1954).
gagccagcgaagtttatga

SEQ ID NO: 455118 - DNA, 19 bp, Mus musculus
  siRNA target sequence for Ash1l (NM_138679.1,1938-1956).
gccagcgaagtttatgaaa

SEQ ID NO: 455119 - DNA, 19 bp, Mus musculus
  siRNA target sequence for Ash1l (NM_138679.1,1942-1960).
gcgaagtttatgaaaacta

SEQ ID NO: 455120 - DNA, 19 bp, Mus musculus
  siRNA target sequence for Ash1l (NM_138679.1,1958-1976).
ctatcggagcatcatcatt

SEQ ID NO: 455121 - DNA, 19 bp, Mus musculus
  siRNA target sequence for Ash1l (NM_138679.1,1970-1988).
catcattcgtcgatcatga

SEQ ID NO: 455122 - DNA, 19 bp, Mus musculus
  siRNA target sequence for Ash1l (NM_138679.1,1973-1991).
cattcgtcgatcatgactt

SEQ ID NO: 455123 - DNA, 19 bp, Mus musculus
  siRNA target sequence for Ash1l (NM_138679.1,1978-1996).
gtcgatcatgacttcctta

SEQ ID NO: 455124 - DNA, 19 bp, Mus musculus
  siRNA target sequence for Ash1l (NM_138679.1,1980-1998).
cgatcatgacttccttaaa

SEQ ID NO: 455125 - DNA, 19 bp, Mus musculus
  siRNA target sequence for Ash1l (NM_138679.1,1999-2017).
cgccgattgccaaagttga

SEQ ID NO: 455126 - DNA, 19 bp, Mus musculus
  siRNA target sequence for Ash1l (NM_138679.1,2002-2020).
cgattgccaaagttgagta

SEQ ID NO: 455127 - DNA, 19 bp, Mus musculus
  siRNA target sequence for Ash1l (NM_138679.1,2007-2025).
gccaaagttgagtaagtct

SEQ ID NO: 455128 - DNA, 19 bp, Mus musculus
  siRNA target sequence for Ash1l (NM_138679.1,2055-2073).
cagcgagaaaccatctcat

SEQ ID NO: 455129 - DNA, 19 bp, Mus musculus
  siRNA target sequence for Ash1l (NM_138679.1,2059-2077).
gagaaaccatctcataagt

SEQ ID NO: 455130 - DNA, 19 bp, Mus musculus
  siRNA target sequence for Ash1l (NM_138679.1,2065-2083).
ccatctcataagtctttta

SEQ ID NO: 455131 - DNA, 19 bp, Mus musculus
  siRNA target sequence for Ash1l (NM_138679.1,2076-2094).
gtcttttattactcacaaa

SEQ ID NO: 455132 - DNA, 19 bp, Mus musculus
  siRNA target sequence for Ash1l (NM_138679.1,2078-2096).
cttttattactcacaaact

SEQ ID NO: 455133 - DNA, 19 bp, Mus musculus
  siRNA target sequence for Ash1l (NM_138679.1,2111-2129).
gtgtcactagcgatctttt

SEQ ID NO: 455134 - DNA, 19 bp, Mus musculus
  siRNA target sequence for Ash1l (NM_138679.1,2121-2139).
cgatcttttgtcggatatt

SEQ ID NO: 455135 - DNA, 19 bp, Mus musculus
  siRNA target sequence for Ash1l (NM_138679.1,2122-2140).
gatcttttgtcggatattt

SEQ ID NO: 455136 - DNA, 19 bp, Mus musculus
  siRNA target sequence for Ash1l (NM_138679.1,2184-2202).
gctagaaggtccacctaaa

SEQ ID NO: 455137 - DNA, 19 bp, Mus musculus
  siRNA target sequence for Ash1l (NM_138679.1,2185-2203).
ctagaaggtccacctaaaa

SEQ ID NO: 455138 - DNA, 19 bp, Mus musculus
  siRNA target sequence for Ash1l (NM_138679.1,2254-2272).
gagcaagaacccccaattt

SEQ ID NO: 455139 - DNA, 19 bp, Mus musculus
  siRNA target sequence for Ash1l (NM_138679.1,2278-2296).
ccagaaattgaaattcctt

SEQ ID NO: 455140 - DNA, 19 bp, Mus musculus
  siRNA target sequence for Ash1l (NM_138679.1,2298-2316).
cttcaagcaaagtttgtct

SEQ ID NO: 455141 - DNA, 19 bp, Mus musculus
  siRNA target sequence for Ash1l (NM_138679.1,2462-2480).
gtagcagtgacttttttga

SEQ ID NO: 455142 - DNA, 19 bp, Mus musculus
  siRNA target sequence for Ash1l (NM_138679.1,2499-2517).
ggacacagacgacttagat

SEQ ID NO: 455143 - DNA, 19 bp, Mus musculus
  siRNA target sequence for Ash1l (NM_138679.1,2528-2546).
ggcaaagtgtctgtagtat

SEQ ID NO: 455144 - DNA, 19 bp, Mus musculus
  siRNA target sequence for Ash1l (NM_138679.1,2530-2548).
caaagtgtctgtagtatga

SEQ ID NO: 455145 - DNA, 19 bp, Mus musculus
  siRNA target sequence for Ash1l (NM_138679.1,2543-2561).
gtatgagtgaccttgagat

SEQ ID NO: 455146 - DNA, 19 bp, Mus musculus
  siRNA target sequence for Ash1l (NM_138679.1,2586-2604).
gcgaaacaatggacaatta

SEQ ID NO: 455147 - DNA, 19 bp, Mus musculus
  siRNA target sequence for Ash1l (NM_138679.1,2670-2688).
gattctttcgagttctgta

SEQ ID NO: 455148 - DNA, 19 bp, Mus musculus
  siRNA target sequence for Ash1l (NM_138679.1,2679-2697).
gagttctgtagaatcaagt

SEQ ID NO: 455149 - DNA, 19 bp, Mus musculus
  siRNA target sequence for Ash1l (NM_138679.1,2681-2699).
gttctgtagaatcaagtaa

SEQ ID NO: 455150 - DNA, 19 bp, Mus musculus
  siRNA target sequence for Ash1l (NM_138679.1,2684-2702).
ctgtagaatcaagtaataa

SEQ ID NO: 455151 - DNA, 19 bp, Mus musculus
  siRNA target sequence for Ash1l (NM_138679.1,2715-2733).
gtccaagcttcacaataca

SEQ ID NO: 455152 - DNA, 19 bp, Mus musculus
  siRNA target sequence for Ash1l (NM_138679.1,2717-2735).
ccaagcttcacaatacagt

SEQ ID NO: 455153 - DNA, 19 bp, Mus musculus
  siRNA target sequence for Ash1l (NM_138679.1,2770-2788).
gggcaacaaatcaatgtca

SEQ ID NO: 455154 - DNA, 19 bp, Mus musculus
  siRNA target sequence for Ash1l (NM_138679.1,2907-2925).
ggcagctgggtcagcatta

SEQ ID NO: 455155 - DNA, 19 bp, Mus musculus
  siRNA target sequence for Ash1l (NM_138679.1,2977-2995).
cttccatcacctatttgct

SEQ ID NO: 455156 - DNA, 19 bp, Mus musculus
  siRNA target sequence for Ash1l (NM_138679.1,3058-3076).
cctagctcagtgccatatt

SEQ ID NO: 455157 - DNA, 19 bp, Mus musculus
  siRNA target sequence for Ash1l (NM_138679.1,3059-3077).
ctagctcagtgccatattt

SEQ ID NO: 455158 - DNA, 19 bp, Mus musculus
  siRNA target sequence for Ash1l (NM_138679.1,3089-3107).
ccagacagggcagtatgat

SEQ ID NO: 455159 - DNA, 19 bp, Mus musculus
  siRNA target sequence for Ash1l (NM_138679.1,3092-3110).
gacagggcagtatgattca

SEQ ID NO: 455160 - DNA, 19 bp, Mus musculus
  siRNA target sequence for Ash1l (NM_138679.1,3094-3112).
cagggcagtatgattcaga

SEQ ID NO: 455161 - DNA, 19 bp, Mus musculus
  siRNA target sequence for Ash1l (NM_138679.1,3219-3237).
cactccttccccagttagt

SEQ ID NO: 455162 - DNA, 19 bp, Mus musculus
  siRNA target sequence for Ash1l (NM_138679.1,3229-3247).
ccagttagtgagtctcata

SEQ ID NO: 455163 - DNA, 19 bp, Mus musculus
  siRNA target sequence for Ash1l (NM_138679.1,3274-3292).
ggcattgggacagataata

SEQ ID NO: 455164 - DNA, 19 bp, Mus musculus
  siRNA target sequence for Ash1l (NM_138679.1,3275-3293).
gcattgggacagataataa

SEQ ID NO: 455165 - DNA, 19 bp, Mus musculus
  siRNA target sequence for Ash1l (NM_138679.1,3276-3294).
cattgggacagataataat

SEQ ID NO: 455166 - DNA, 19 bp, Mus musculus
  siRNA target sequence for Ash1l (NM_138679.1,3280-3298).
gggacagataataatagca

SEQ ID NO: 455167 - DNA, 19 bp, Mus musculus
  siRNA target sequence for Ash1l (NM_138679.1,3302-3320).
cagacagggcagagaagtt

SEQ ID NO: 455168 - DNA, 19 bp, Mus musculus
  siRNA target sequence for Ash1l (NM_138679.1,3304-3322).
gacagggcagagaagtttt

SEQ ID NO: 455169 - DNA, 19 bp, Mus musculus
  siRNA target sequence for Ash1l (NM_138679.1,3306-3324).
cagggcagagaagttttgt

SEQ ID NO: 455170 - DNA, 19 bp, Mus musculus
  siRNA target sequence for Ash1l (NM_138679.1,3387-3405).
cgtcctaaacagtctcaaa

SEQ ID NO: 455171 - DNA, 19 bp, Mus musculus
  siRNA target sequence for Ash1l (NM_138679.1,3431-3449).
gcaggagtcacgattacct

SEQ ID NO: 455172 - DNA, 19 bp, Mus musculus
  siRNA target sequence for Ash1l (NM_138679.1,3442-3460).
gattacctcagctatgaca

SEQ ID NO: 455173 - DNA, 19 bp, Mus musculus
  siRNA target sequence for Ash1l (NM_138679.1,3549-3567).
gctgataagtcgtctaagt

SEQ ID NO: 455174 - DNA, 19 bp, Mus musculus
  siRNA target sequence for Ash1l (NM_138679.1,3608-3626).
gagacctcctgccaactat

SEQ ID NO: 455175 - DNA, 19 bp, Mus musculus
  siRNA target sequence for Ash1l (NM_138679.1,3610-3628).
gacctcctgccaactattt

SEQ ID NO: 455176 - DNA, 19 bp, Mus musculus
  siRNA target sequence for Ash1l (NM_138679.1,3612-3630).
cctcctgccaactattttt

SEQ ID NO: 455177 - DNA, 19 bp, Mus musculus
  siRNA target sequence for Ash1l (NM_138679.1,3615-3633).
cctgccaactatttttcga

SEQ ID NO: 455178 - DNA, 19 bp, Mus musculus
  siRNA target sequence for Ash1l (NM_138679.1,3616-3634).
ctgccaactatttttcgaa

SEQ ID NO: 455179 - DNA, 19 bp, Mus musculus
  siRNA target sequence for Ash1l (NM_138679.1,3620-3638).
caactatttttcgaatcaa

SEQ ID NO: 455180 - DNA, 19 bp, Mus musculus
  siRNA target sequence for Ash1l (NM_138679.1,3651-3669).
ctatacacatccttctttt

SEQ ID NO: 455181 - DNA, 19 bp, Mus musculus
  siRNA target sequence for Ash1l (NM_138679.1,3694-3712).
cggaaacctgacttaaaaa

SEQ ID NO: 455182 - DNA, 19 bp, Mus musculus
  siRNA target sequence for Ash1l (NM_138679.1,3840-3858).
ccttacagctgctccaata

SEQ ID NO: 455183 - DNA, 19 bp, Mus musculus
  siRNA target sequence for Ash1l (NM_138679.1,3854-3872).
caataggattagggtatta

SEQ ID NO: 455184 - DNA, 19 bp, Mus musculus
  siRNA target sequence for Ash1l (NM_138679.1,3859-3877).
ggattagggtattatggaa

SEQ ID NO: 455185 - DNA, 19 bp, Mus musculus
  siRNA target sequence for Ash1l (NM_138679.1,3904-3922).
ccaccatctccttcattca

SEQ ID NO: 455186 - DNA, 19 bp, Mus musculus
  siRNA target sequence for Ash1l (NM_138679.1,3972-3990).
caatcctaccaaatatcat

SEQ ID NO: 455187 - DNA, 19 bp, Mus musculus
  siRNA target sequence for Ash1l (NM_138679.1,3976-3994).
cctaccaaatatcataaga

SEQ ID NO: 455188 - DNA, 19 bp, Mus musculus
  siRNA target sequence for Ash1l (NM_138679.1,3977-3995).
ctaccaaatatcataagaa

SEQ ID NO: 455189 - DNA, 19 bp, Mus musculus
  siRNA target sequence for Ash1l (NM_138679.1,4190-4208).
gatccgtcttggagtcttt

SEQ ID NO: 455190 - DNA, 19 bp, Mus musculus
  siRNA target sequence for Ash1l (NM_138679.1,4193-4211).
ccgtcttggagtctttgaa

SEQ ID NO: 455191 - DNA, 19 bp, Mus musculus
  siRNA target sequence for Ash1l (NM_138679.1,4209-4227).
gaaacgttaccgatttggt

SEQ ID NO: 455192 - DNA, 19 bp, Mus musculus
  siRNA target sequence for Ash1l (NM_138679.1,4220-4238).
gatttggtaaggatactgt

SEQ ID NO: 455193 - DNA, 19 bp, Mus musculus
  siRNA target sequence for Ash1l (NM_138679.1,4240-4258).
ggagatcgatataagcata

SEQ ID NO: 455194 - DNA, 19 bp, Mus musculus
  siRNA target sequence for Ash1l (NM_138679.1,4291-4309).
catctctctccttcaaaga

SEQ ID NO: 455195 - DNA, 19 bp, Mus musculus
  siRNA target sequence for Ash1l (NM_138679.1,4342-4360).
cgagagccttcagaatcaa

SEQ ID NO: 455196 - DNA, 19 bp, Mus musculus
  siRNA target sequence for Ash1l (NM_138679.1,4393-4411).
caaattgactgctcagaaa

SEQ ID NO: 455197 - DNA, 19 bp, Mus musculus
  siRNA target sequence for Ash1l (NM_138679.1,4460-4478).
ccagcagtgatgaacatat

SEQ ID NO: 455198 - DNA, 19 bp, Mus musculus
  siRNA target sequence for Ash1l (NM_138679.1,4463-4481).
gcagtgatgaacatatgaa

SEQ ID NO: 455199 - DNA, 19 bp, Mus musculus
  siRNA target sequence for Ash1l (NM_138679.1,4471-4489).
gaacatatgaaccttttta

SEQ ID NO: 455200 - DNA, 19 bp, Mus musculus
  siRNA target sequence for Ash1l (NM_138679.1,4482-4500).
cctttttacaagtgcaata

SEQ ID NO: 455201 - DNA, 19 bp, Mus musculus
  siRNA target sequence for Ash1l (NM_138679.1,4527-4545).
ctccagttgccggaagaaa

SEQ ID NO: 455202 - DNA, 19 bp, Mus musculus
  siRNA target sequence for Ash1l (NM_138679.1,4529-4547).
ccagttgccggaagaaatt

SEQ ID NO: 455203 - DNA, 19 bp, Mus musculus
  siRNA target sequence for Ash1l (NM_138679.1,4656-4674).
ccagtcagcttccgataaa

SEQ ID NO: 455204 - DNA, 19 bp, Mus musculus
  siRNA target sequence for Ash1l (NM_138679.1,4659-4677).
gtcagcttccgataaacct

SEQ ID NO: 455205 - DNA, 19 bp, Mus musculus
  siRNA target sequence for Ash1l (NM_138679.1,4770-4788).
cagaagtcccagattggtt

SEQ ID NO: 455206 - DNA, 19 bp, Mus musculus
  siRNA target sequence for Ash1l (NM_138679.1,4790-4808).
cttctatggatgattctgt

SEQ ID NO: 455207 - DNA, 19 bp, Mus musculus
  siRNA target sequence for Ash1l (NM_138679.1,4818-4836).
gttgcagcggatagtacat

SEQ ID NO: 455208 - DNA, 19 bp, Mus musculus
  siRNA target sequence for Ash1l (NM_138679.1,4866-4884).
cggtgatgcttccattaca

SEQ ID NO: 455209 - DNA, 19 bp, Mus musculus
  siRNA target sequence for Ash1l (NM_138679.1,4867-4885).
ggtgatgcttccattacaa

SEQ ID NO: 455210 - DNA, 19 bp, Mus musculus
  siRNA target sequence for Ash1l (NM_138679.1,4907-4925).
ccagtccaggccatagcta

SEQ ID NO: 455211 - DNA, 19 bp, Mus musculus
  siRNA target sequence for Ash1l (NM_138679.1,4937-4955).
gagccttaggtaaatcaga

SEQ ID NO: 455212 - DNA, 19 bp, Mus musculus
  siRNA target sequence for Ash1l (NM_138679.1,5002-5020).
ccacttctttctgaaaagt

SEQ ID NO: 455213 - DNA, 19 bp, Mus musculus
  siRNA target sequence for Ash1l (NM_138679.1,5033-5051).
gttccccccatcacatcaa

SEQ ID NO: 455214 - DNA, 19 bp, Mus musculus
  siRNA target sequence for Ash1l (NM_138679.1,5038-5056).
ccccatcacatcaagagaa

SEQ ID NO: 455215 - DNA, 19 bp, Mus musculus
  siRNA target sequence for Ash1l (NM_138679.1,5046-5064).
catcaagagaagtgtagtt

SEQ ID NO: 455216 - DNA, 19 bp, Mus musculus
  siRNA target sequence for Ash1l (NM_138679.1,5054-5072).
gaagtgtagttgaagctat

SEQ ID NO: 455217 - DNA, 19 bp, Mus musculus
  siRNA target sequence for Ash1l (NM_138679.1,5077-5095).
cgccaagctcggaaaatgt

SEQ ID NO: 455218 - DNA, 19 bp, Mus musculus
  siRNA target sequence for Ash1l (NM_138679.1,5083-5101).
gctcggaaaatgtgcaatt

SEQ ID NO: 455219 - DNA, 19 bp, Mus musculus
  siRNA target sequence for Ash1l (NM_138679.1,5084-5102).
ctcggaaaatgtgcaatta

SEQ ID NO: 455220 - DNA, 19 bp, Mus musculus
  siRNA target sequence for Ash1l (NM_138679.1,5377-5395).
ctcacttcagaacataaga

SEQ ID NO: 455221 - DNA, 19 bp, Mus musculus
  siRNA target sequence for Ash1l (NM_138679.1,5398-5416).
ggggtgaagaggaaaaatt

SEQ ID NO: 455222 - DNA, 19 bp, Mus musculus
  siRNA target sequence for Ash1l (NM_138679.1,5408-5426).
ggaaaaattggctgttaga

SEQ ID NO: 455223 - DNA, 19 bp, Mus musculus
  siRNA target sequence for Ash1l (NM_138679.1,5409-5427).
gaaaaattggctgttagaa

SEQ ID NO: 455224 - DNA, 19 bp, Mus musculus
  siRNA target sequence for Ash1l (NM_138679.1,5668-5686).
gacccaaagagccgattaa

SEQ ID NO: 455225 - DNA, 19 bp, Mus musculus
  siRNA target sequence for Ash1l (NM_138679.1,5676-5694).
gagccgattaatccaatta

SEQ ID NO: 455226 - DNA, 19 bp, Mus musculus
  siRNA target sequence for Ash1l (NM_138679.1,5678-5696).
gccgattaatccaattaaa

SEQ ID NO: 455227 - DNA, 19 bp, Mus musculus
  siRNA target sequence for Ash1l (NM_138679.1,5680-5698).
cgattaatccaattaaaga

SEQ ID NO: 455228 - DNA, 19 bp, Mus musculus
  siRNA target sequence for Ash1l (NM_138679.1,5750-5768).
cgcccattcatgttggaaa

SEQ ID NO: 455229 - DNA, 19 bp, Mus musculus
  siRNA target sequence for Ash1l (NM_138679.1,5753-5771).
ccattcatgttggaaagta

SEQ ID NO: 455230 - DNA, 19 bp, Mus musculus
  siRNA target sequence for Ash1l (NM_138679.1,5796-5814).
ccagcttccctatgatatt

SEQ ID NO: 455231 - DNA, 19 bp, Mus musculus
  siRNA target sequence for Ash1l (NM_138679.1,5819-5837).
ggcagtggaaacacaatca

SEQ ID NO: 455232 - DNA, 19 bp, Mus musculus
  siRNA target sequence for Ash1l (NM_138679.1,5830-5848).
cacaatcagctatacaaaa

SEQ ID NO: 455233 - DNA, 19 bp, Mus musculus
  siRNA target sequence for Ash1l (NM_138679.1,5852-5870).
cagatgtccccctgtataa

SEQ ID NO: 455234 - DNA, 19 bp, Mus musculus
  siRNA target sequence for Ash1l (NM_138679.1,5920-5938).
gaggctaccacctgtaatt

SEQ ID NO: 455235 - DNA, 19 bp, Mus musculus
  siRNA target sequence for Ash1l (NM_138679.1,5927-5945).
ccacctgtaattgtaagaa

SEQ ID NO: 455236 - DNA, 19 bp, Mus musculus
  siRNA target sequence for Ash1l (NM_138679.1,5974-5992).
ggggatgactgcctaaata

SEQ ID NO: 455237 - DNA, 19 bp, Mus musculus
  siRNA target sequence for Ash1l (NM_138679.1,5976-5994).
ggatgactgcctaaataga

SEQ ID NO: 455238 - DNA, 19 bp, Mus musculus
  siRNA target sequence for Ash1l (NM_138679.1,5980-5998).
gactgcctaaatagaatga

SEQ ID NO: 455239 - DNA, 19 bp, Mus musculus
  siRNA target sequence for Ash1l (NM_138679.1,5984-6002).
gcctaaatagaatgatctt

SEQ ID NO: 455240 - DNA, 19 bp, Mus musculus
  siRNA target sequence for Ash1l (NM_138679.1,6081-6099).
gtgtctggaacgatttcga

SEQ ID NO: 455241 - DNA, 19 bp, Mus musculus
  siRNA target sequence for Ash1l (NM_138679.1,6092-6110).
gatttcgagctgaggaaaa

SEQ ID NO: 455242 - DNA, 19 bp, Mus musculus
  siRNA target sequence for Ash1l (NM_138679.1,6106-6124).
gaaaaaggttggggaatta

SEQ ID NO: 455243 - DNA, 19 bp, Mus musculus
  siRNA target sequence for Ash1l (NM_138679.1,6117-6135).
gggaattagaaccaaagaa

SEQ ID NO: 455244 - DNA, 19 bp, Mus musculus
  siRNA target sequence for Ash1l (NM_138679.1,6129-6147).
caaagaacccctaaaagct

SEQ ID NO: 455245 - DNA, 19 bp, Mus musculus
  siRNA target sequence for Ash1l (NM_138679.1,6148-6166).
ggccagttcatcattgaat

SEQ ID NO: 455246 - DNA, 19 bp, Mus musculus
  siRNA target sequence for Ash1l (NM_138679.1,6149-6167).
gccagttcatcattgaata

SEQ ID NO: 455247 - DNA, 19 bp, Mus musculus
  siRNA target sequence for Ash1l (NM_138679.1,6178-6196).
gttgtcagcgaacaagaat

SEQ ID NO: 455248 - DNA, 19 bp, Mus musculus
  siRNA target sequence for Ash1l (NM_138679.1,6181-6199).
gtcagcgaacaagaattca

SEQ ID NO: 455249 - DNA, 19 bp, Mus musculus
  siRNA target sequence for Ash1l (NM_138679.1,6263-6281).
gaatggtgattgacagtta

SEQ ID NO: 455250 - DNA, 19 bp, Mus musculus
  siRNA target sequence for Ash1l (NM_138679.1,6339-6357).
gcagaaatggtctgttaat

SEQ ID NO: 455251 - DNA, 19 bp, Mus musculus
  siRNA target sequence for Ash1l (NM_138679.1,6363-6381).
gtaccgtattggactgtat

SEQ ID NO: 455252 - DNA, 19 bp, Mus musculus
  siRNA target sequence for Ash1l (NM_138679.1,6374-6392).
gactgtatgcacttaagga

SEQ ID NO: 455253 - DNA, 19 bp, Mus musculus
  siRNA target sequence for Ash1l (NM_138679.1,6405-6423).
gacagagcttacctatgat

SEQ ID NO: 455254 - DNA, 19 bp, Mus musculus
  siRNA target sequence for Ash1l (NM_138679.1,6407-6425).
cagagcttacctatgatta

SEQ ID NO: 455255 - DNA, 19 bp, Mus musculus
  siRNA target sequence for Ash1l (NM_138679.1,6412-6430).
cttacctatgattacaact

SEQ ID NO: 455256 - DNA, 19 bp, Mus musculus
  siRNA target sequence for Ash1l (NM_138679.1,6426-6444).
caactttcattccttcaat

SEQ ID NO: 455257 - DNA, 19 bp, Mus musculus
  siRNA target sequence for Ash1l (NM_138679.1,6480-6498).
gaagtgtcgaggaatcatt

SEQ ID NO: 455258 - DNA, 19 bp, Mus musculus
  siRNA target sequence for Ash1l (NM_138679.1,6522-6540).
cggactccctagccataaa

SEQ ID NO: 455259 - DNA, 19 bp, Mus musculus
  siRNA target sequence for Ash1l (NM_138679.1,6635-6653).
ctgaagagcccagtgaaaa

SEQ ID NO: 455260 - DNA, 19 bp, Mus musculus
  siRNA target sequence for Ash1l (NM_138679.1,6660-6678).
caccccaacaagattgact

SEQ ID NO: 455261 - DNA, 19 bp, Mus musculus
  siRNA target sequence for Ash1l (NM_138679.1,6671-6689).
gattgactccacagttaca

SEQ ID NO: 455262 - DNA, 19 bp, Mus musculus
  siRNA target sequence for Ash1l (NM_138679.1,6847-6865).
cgggacgacgggaacatta

SEQ ID NO: 455263 - DNA, 19 bp, Mus musculus
  siRNA target sequence for Ash1l (NM_138679.1,6973-6991).
cgcctagcacagatcttca

SEQ ID NO: 455264 - DNA, 19 bp, Mus musculus
  siRNA target sequence for Ash1l (NM_138679.1,6975-6993).
cctagcacagatcttcaaa

SEQ ID NO: 455265 - DNA, 19 bp, Mus musculus
  siRNA target sequence for Ash1l (NM_138679.1,7040-7058).
cccttgcagctccactttt

SEQ ID NO: 455266 - DNA, 19 bp, Mus musculus
  siRNA target sequence for Ash1l (NM_138679.1,7042-7060).
cttgcagctccacttttga

SEQ ID NO: 455267 - DNA, 19 bp, Mus musculus
  siRNA target sequence for Ash1l (NM_138679.1,7143-7161).
cctcattgggtattacaaa

SEQ ID NO: 455268 - DNA, 19 bp, Mus musculus
  siRNA target sequence for Ash1l (NM_138679.1,7256-7274).
gcttacgaaaggcctatta

SEQ ID NO: 455269 - DNA, 19 bp, Mus musculus
  siRNA target sequence for Ash1l (NM_138679.1,7295-7313).
cggctcagatcgatgagat

SEQ ID NO: 455270 - DNA, 19 bp, Mus musculus
  siRNA target sequence for Ash1l (NM_138679.1,7377-7395).
gcacgagaaggatgatgat

SEQ ID NO: 455271 - DNA, 19 bp, Mus musculus
  siRNA target sequence for Ash1l (NM_138679.1,7410-7428).
ctgcggcctctataaagat

SEQ ID NO: 455272 - DNA, 19 bp, Mus musculus
  siRNA target sequence for Ash1l (NM_138679.1,7607-7625).
gtttactccgagatgactt

SEQ ID NO: 455273 - DNA, 19 bp, Mus musculus
  siRNA target sequence for Ash1l (NM_138679.1,7701-7719).
gtcctacagactcttatct

SEQ ID NO: 455274 - DNA, 19 bp, Mus musculus
  siRNA target sequence for Ash1l (NM_138679.1,7703-7721).
cctacagactcttatctca

SEQ ID NO: 455275 - DNA, 19 bp, Mus musculus
  siRNA target sequence for Ash1l (NM_138679.1,7709-7727).
gactcttatctcacattaa

SEQ ID NO: 455276 - DNA, 19 bp, Mus musculus
  siRNA target sequence for Ash1l (NM_138679.1,7718-7736).
ctcacattaaccgagataa

SEQ ID NO: 455277 - DNA, 19 bp, Mus musculus
  siRNA target sequence for Ash1l (NM_138679.1,7722-7740).
cattaaccgagataaactt

SEQ ID NO: 455278 - DNA, 19 bp, Mus musculus
  siRNA target sequence for Ash1l (NM_138679.1,7730-7748).
gagataaacttgacatctt

SEQ ID NO: 455279 - DNA, 19 bp, Mus musculus
  siRNA target sequence for Ash1l (NM_138679.1,7755-7773).
cgagaagctctggaagaat

SEQ ID NO: 455280 - DNA, 19 bp, Mus musculus
  siRNA target sequence for Ash1l (NM_138679.1,7793-7811).
cctttggtcaccattattt

SEQ ID NO: 455281 - DNA, 19 bp, Mus musculus
  siRNA target sequence for Ash1l (NM_138679.1,7841-7859).
cccgtcggttctatcacaa

SEQ ID NO: 455282 - DNA, 19 bp, Mus musculus
  siRNA target sequence for Ash1l (NM_138679.1,7875-7893).
gcccctctatgagatcatt

SEQ ID NO: 455283 - DNA, 19 bp, Mus musculus
  siRNA target sequence for Ash1l (NM_138679.1,7991-8009).
gtgattatcggcttgacaa

SEQ ID NO: 455284 - DNA, 19 bp, Mus musculus
  siRNA target sequence for Ash1l (NM_138679.1,8012-8030).
cagcacaccttttttacaa

SEQ ID NO: 455285 - DNA, 19 bp, Mus musculus
  siRNA target sequence for Ash1l (NM_138679.1,8014-8032).
gcacaccttttttacaaga

SEQ ID NO: 455286 - DNA, 19 bp, Mus musculus
  siRNA target sequence for Ash1l (NM_138679.1,8015-8033).
cacaccttttttacaagat

SEQ ID NO: 455287 - DNA, 19 bp, Mus musculus
  siRNA target sequence for Ash1l (NM_138679.1,8031-8049).
gattcatcggaatcgatat

SEQ ID NO: 455288 - DNA, 19 bp, Mus musculus
  siRNA target sequence for Ash1l (NM_138679.1,8065-8083).
ccctatgcctttgatcatt

SEQ ID NO: 455289 - DNA, 19 bp, Mus musculus
  siRNA target sequence for Ash1l (NM_138679.1,8128-8146).
gtcccagacaactacaaga

SEQ ID NO: 455290 - DNA, 19 bp, Mus musculus
  siRNA target sequence for Ash1l (NM_138679.1,8433-8451).
cctccttgagaaaatacct

SEQ ID NO: 455291 - DNA, 19 bp, Mus musculus
  siRNA target sequence for Ash1l (NM_138679.1,8506-8524).
ctgcgaaggcgcactttgt

SEQ ID NO: 455292 - DNA, 19 bp, Mus musculus
  siRNA target sequence for Ash1l (NM_138679.1,8508-8526).
gcgaaggcgcactttgttt

SEQ ID NO: 455293 - DNA, 19 bp, Mus musculus
  siRNA target sequence for Ash1l (NM_138679.1,8514-8532).
gcgcactttgtttatacca

SEQ ID NO: 455294 - DNA, 19 bp, Mus musculus
  siRNA target sequence for Atf2 (NM_009715.1,475-493).
gccaacaagattcctaaaa

SEQ ID NO: 455295 - DNA, 19 bp, Mus musculus
  siRNA target sequence for Atf2 (NM_009715.1,476-494).
ccaacaagattcctaaaaa

SEQ ID NO: 455296 - DNA, 19 bp, Mus musculus
  siRNA target sequence for Atf2 (NM_009715.1,500-518).
gaagaagtgggtttgttca

SEQ ID NO: 455297 - DNA, 19 bp, Mus musculus
  siRNA target sequence for Atf2 (NM_009715.1,523-541).
gttggcaagtccatttgaa

SEQ ID NO: 455298 - DNA, 19 bp, Mus musculus
  siRNA target sequence for Atf2 (NM_009715.1,557-575).
gcttccgaagatgacatta

SEQ ID NO: 455299 - DNA, 19 bp, Mus musculus
  siRNA target sequence for Atf2 (NM_009715.1,605-623).
gcaacacccatcataagaa

SEQ ID NO: 455300 - DNA, 19 bp, Mus musculus
  siRNA target sequence for Atf2 (NM_009715.1,611-629).
cccatcataagaagcaaaa

SEQ ID NO: 455301 - DNA, 19 bp, Mus musculus
  siRNA target sequence for Atf2 (NM_009715.1,736-754).
gcccacatcagctatcgtt

SEQ ID NO: 455302 - DNA, 19 bp, Mus musculus
  siRNA target sequence for Atf2 (NM_009715.1,751-769).
cgttcgtccagcatcatta

SEQ ID NO: 455303 - DNA, 19 bp, Mus musculus
  siRNA target sequence for Atf2 (NM_009715.1,798-816).
ctgactcaagtgtaattat

SEQ ID NO: 455304 - DNA, 19 bp, Mus musculus
  siRNA target sequence for Atf2 (NM_009715.1,804-822).
caagtgtaattattcaaca

SEQ ID NO: 455305 - DNA, 19 bp, Mus musculus
  siRNA target sequence for Atf2 (NM_009715.1,837-855).
caacctcaagtactgtaat

SEQ ID NO: 455306 - DNA, 19 bp, Mus musculus
  siRNA target sequence for Atf2 (NM_009715.1,870-888).
cctctaacaggccaattgt

SEQ ID NO: 455307 - DNA, 19 bp, Mus musculus
  siRNA target sequence for Atf2 (NM_009715.1,940-958).
catgcccgttgctattcct

SEQ ID NO: 455308 - DNA, 19 bp, Mus musculus
  siRNA target sequence for Atf2 (NM_009715.1,956-974).
cctgcatcaattacaagtt

SEQ ID NO: 455309 - DNA, 19 bp, Mus musculus
  siRNA target sequence for Atf2 (NM_009715.1,1131-1149).
ccaatggtgatactgtaaa

SEQ ID NO: 455310 - DNA, 19 bp, Mus musculus
  siRNA target sequence for Atf2 (NM_009715.1,1132-1150).
caatggtgatactgtaaaa

SEQ ID NO: 455311 - DNA, 19 bp, Mus musculus
  siRNA target sequence for Atf2 (NM_009715.1,1154-1172).
catggcagtggattggtta

SEQ ID NO: 455312 - DNA, 19 bp, Mus musculus
  siRNA target sequence for Atf2 (NM_009715.1,1219-1237).
cacctccactacagaaact

SEQ ID NO: 455313 - DNA, 19 bp, Mus musculus
  siRNA target sequence for Atf2 (NM_009715.1,1333-1351).
gtttctagaacgaaataga

SEQ ID NO: 455314 - DNA, 19 bp, Mus musculus
  siRNA target sequence for Atf2 (NM_009715.1,1458-1476).
ccctgctgagaaatgaagt

SEQ ID NO: 455315 - DNA, 19 bp, Mus musculus
  siRNA target sequence for Atf2 (NM_009715.1,1492-1510).
gcttcttctggctcataaa

SEQ ID NO: 455316 - DNA, 19 bp, Mus musculus
  siRNA target sequence for Atf2 (NM_009715.1,1537-1555).
gaagtctggctatcatact

SEQ ID NO: 455317 - DNA, 19 bp, Mus musculus
  siRNA target sequence for Atf2 (NM_009715.1,1545-1563).
gctatcatactgctgataa

SEQ ID NO: 455318 - DNA, 19 bp, Mus musculus
  siRNA target sequence for Atf2 (NM_009715.1,1572-1590).
gttcagaagacctttctgt

SEQ ID NO: 455319 - DNA, 19 bp, Mus musculus
  siRNA target sequence for Atf2 (NM_009715.1,1591-1609).
gccaagcagtccacataca

SEQ ID NO: 455320 - DNA, 19 bp, Mus musculus
  siRNA target sequence for Atf2 (NM_009715.1,1593-1611).
caagcagtccacatacaga

SEQ ID NO: 455321 - DNA, 19 bp, Mus musculus
  siRNA target sequence for Atf2 (NM_009715.1,1642-1660).
caatggagtcagttcaaca

SEQ ID NO: 455322 - DNA, 19 bp, Mus musculus
  siRNA target sequence for Atf2 (NM_009715.1,1714-1732).
cacggagcctgcactttca

SEQ ID NO: 455323 - DNA, 19 bp, Mus musculus
  siRNA target sequence for Atf3 (NM_007498.2,555-573).
ctgccaagtgtcgaaacaa

SEQ ID NO: 455324 - DNA, 19 bp, Mus musculus
  siRNA target sequence for Atf3 (NM_007498.2,557-575).
gccaagtgtcgaaacaaga

SEQ ID NO: 455325 - DNA, 19 bp, Mus musculus
  siRNA target sequence for Atf3 (NM_007498.2,558-576).
ccaagtgtcgaaacaagaa

SEQ ID NO: 455326 - DNA, 19 bp, Mus musculus
  siRNA target sequence for Atf3 (NM_007498.2,559-577).
caagtgtcgaaacaagaaa

SEQ ID NO: 455327 - DNA, 19 bp, Mus musculus
  siRNA target sequence for Atf4 (NM_009716.1,179-197).
gcgctcttcacgaaatcca

SEQ ID NO: 455328 - DNA, 19 bp, Mus musculus
  siRNA target sequence for Atf4 (NM_009716.1,209-227).
gctgtaacggacaaagata

SEQ ID NO: 455329 - DNA, 19 bp, Mus musculus
  siRNA target sequence for Atf4 (NM_009716.1,224-242).
gataccttcgagttaagca

SEQ ID NO: 455330 - DNA, 19 bp, Mus musculus
  siRNA target sequence for Atf4 (NM_009716.1,256-274).
cagcaaagccccacaacat

SEQ ID NO: 455331 - DNA, 19 bp, Mus musculus
  siRNA target sequence for Atf4 (NM_009716.1,360-378).
gcctaggtctcttagatga

SEQ ID NO: 455332 - DNA, 19 bp, Mus musculus
  siRNA target sequence for Atf4 (NM_009716.1,644-662).
ctagtccaagagactaata

SEQ ID NO: 455333 - DNA, 19 bp, Mus musculus
  siRNA target sequence for Atf4 (NM_009716.1,694-712).
ccatctcccagaaagttta

SEQ ID NO: 455334 - DNA, 19 bp, Mus musculus
  siRNA target sequence for Atf4 (NM_009716.1,724-742).
ccaggttgccccctttaca

SEQ ID NO: 455335 - DNA, 19 bp, Mus musculus
  siRNA target sequence for Atf4 (NM_009716.1,725-743).
caggttgccccctttacat

SEQ ID NO: 455336 - DNA, 19 bp, Mus musculus
  siRNA target sequence for Atf4 (NM_009716.1,789-807).
cagagcattcctttagttt

SEQ ID NO: 455337 - DNA, 19 bp, Mus musculus
  siRNA target sequence for Atf4 (NM_009716.1,860-878).
gctgcttacattactctaa

SEQ ID NO: 455338 - DNA, 19 bp, Mus musculus
  siRNA target sequence for Atf4 (NM_009716.1,861-879).
ctgcttacattactctaat

SEQ ID NO: 455339 - DNA, 19 bp, Mus musculus
  siRNA target sequence for Atf4 (NM_009716.1,875-893).
ctaatccctccatgtgtaa

SEQ ID NO: 455340 - DNA, 19 bp, Mus musculus
  siRNA target sequence for Atf4 (NM_009716.1,1143-1161).
ctaggtaccgccagaagaa

SEQ ID NO: 455341 - DNA, 19 bp, Mus musculus
  siRNA target sequence for Atf4 (NM_009716.1,1179-1197).
ccctcactggcgagtgtaa

SEQ ID NO: 455342 - DNA, 19 bp, Mus musculus
  siRNA target sequence for Atf5 (NM_030693.1,786-804).
ggggattcaggcttgtcaa

SEQ ID NO: 455343 - DNA, 19 bp, Mus musculus
  siRNA target sequence for Atf5 (NM_030693.1,891-909).
cgaggggaccgcaagcaaa

SEQ ID NO: 455344 - DNA, 19 bp, Mus musculus
  siRNA target sequence for Atf5 (NM_030693.1,892-910).
gaggggaccgcaagcaaaa

SEQ ID NO: 455345 - DNA, 19 bp, Mus musculus
  siRNA target sequence for Atf5 (NM_030693.1,894-912).
ggggaccgcaagcaaaaga

SEQ ID NO: 455346 - DNA, 19 bp, Mus musculus
  siRNA target sequence for Atf5 (NM_030693.1,914-932).
gagagaccagaataagtca

SEQ ID NO: 455347 - DNA, 19 bp, Mus musculus
  siRNA target sequence for Atf5 (NM_030693.1,1071-1089).
ctgctaattgaggtgtata

SEQ ID NO: 455348 - DNA, 19 bp, Mus musculus
  siRNA target sequence for Atm (NM_007499.1,44-62).
gagtctagcactcaatgat

SEQ ID NO: 455349 - DNA, 19 bp, Mus musculus
  siRNA target sequence for Atm (NM_007499.1,187-205).
ccaaacaaggaaaatatct

SEQ ID NO: 455350 - DNA, 19 bp, Mus musculus
  siRNA target sequence for Atm (NM_007499.1,341-359).
ggtcagatacttcatcaaa

SEQ ID NO: 455351 - DNA, 19 bp, Mus musculus
  siRNA target sequence for Atm (NM_007499.1,376-394).
cacccaggctaaaatgtca

SEQ ID NO: 455352 - DNA, 19 bp, Mus musculus
  siRNA target sequence for Atm (NM_007499.1,391-409).
gtcaagacctcttgaatta

SEQ ID NO: 455353 - DNA, 19 bp, Mus musculus
  siRNA target sequence for Atm (NM_007499.1,425-443).
gaaagactcatctaatggt

SEQ ID NO: 455354 - DNA, 19 bp, Mus musculus
  siRNA target sequence for Atm (NM_007499.1,433-451).
catctaatggtctaacgta

SEQ ID NO: 455355 - DNA, 19 bp, Mus musculus
  siRNA target sequence for Atm (NM_007499.1,463-481).
gtagcaacatactactcaa

SEQ ID NO: 455356 - DNA, 19 bp, Mus musculus
  siRNA target sequence for Atm (NM_007499.1,525-543).
caacagtggctagaattgt

SEQ ID NO: 455357 - DNA, 19 bp, Mus musculus
  siRNA target sequence for Atm (NM_007499.1,572-590).
gccatcacaggacattaat

SEQ ID NO: 455358 - DNA, 19 bp, Mus musculus
  siRNA target sequence for Atm (NM_007499.1,579-597).
caggacattaatagagttt

SEQ ID NO: 455359 - DNA, 19 bp, Mus musculus
  siRNA target sequence for Atm (NM_007499.1,581-599).
ggacattaatagagtttta

SEQ ID NO: 455360 - DNA, 19 bp, Mus musculus
  siRNA target sequence for Atm (NM_007499.1,594-612).
gttttagtggctagaataa

SEQ ID NO: 455361 - DNA, 19 bp, Mus musculus
  siRNA target sequence for Atm (NM_007499.1,637-655).
gttcacagactgatggatt

SEQ ID NO: 455362 - DNA, 19 bp, Mus musculus
  siRNA target sequence for Atm (NM_007499.1,642-660).
cagactgatggattacctt

SEQ ID NO: 455363 - DNA, 19 bp, Mus musculus
  siRNA target sequence for Atm (NM_007499.1,721-739).
ctggcttaagtcacatctt

SEQ ID NO: 455364 - DNA, 19 bp, Mus musculus
  siRNA target sequence for Atm (NM_007499.1,737-755).
cttagcagcccttaacatt

SEQ ID NO: 455365 - DNA, 19 bp, Mus musculus
  siRNA target sequence for Atm (NM_007499.1,816-834).
cttcctaccttactatata

SEQ ID NO: 455366 - DNA, 19 bp, Mus musculus
  siRNA target sequence for Atm (NM_007499.1,819-837).
cctaccttactatatattt

SEQ ID NO: 455367 - DNA, 19 bp, Mus musculus
  siRNA target sequence for Atm (NM_007499.1,841-859).
ctcaacatagacttaatga

SEQ ID NO: 455368 - DNA, 19 bp, Mus musculus
  siRNA target sequence for Atm (NM_007499.1,885-903).
ctaattcaactgcagattt

SEQ ID NO: 455369 - DNA, 19 bp, Mus musculus
  siRNA target sequence for Atm (NM_007499.1,945-963).
gcttatgaatccatgaaat

SEQ ID NO: 455370 - DNA, 19 bp, Mus musculus
  siRNA target sequence for Atm (NM_007499.1,970-988).
gtatcttgtacaacttata

SEQ ID NO: 455371 - DNA, 19 bp, Mus musculus
  siRNA target sequence for Atm (NM_007499.1,1020-1038).
ggaagccgagggaaatatt

SEQ ID NO: 455372 - DNA, 19 bp, Mus musculus
  siRNA target sequence for Atm (NM_007499.1,1130-1148).
cgtggagatttctcaatct

SEQ ID NO: 455373 - DNA, 19 bp, Mus musculus
  siRNA target sequence for Atm (NM_007499.1,1158-1176).
caaagggaatccactgatt

SEQ ID NO: 455374 - DNA, 19 bp, Mus musculus
  siRNA target sequence for Atm (NM_007499.1,1178-1196).
cagtgtaccttgcaaaaga

SEQ ID NO: 455375 - DNA, 19 bp, Mus musculus
  siRNA target sequence for Atm (NM_007499.1,1241-1259).
gaagtcacagagtgatttt

SEQ ID NO: 455376 - DNA, 19 bp, Mus musculus
  siRNA target sequence for Atm (NM_007499.1,1265-1283).
cgtgccttggctacagatt

SEQ ID NO: 455377 - DNA, 19 bp, Mus musculus
  siRNA target sequence for Atm (NM_007499.1,1278-1296).
cagattacaacccgattaa

SEQ ID NO: 455378 - DNA, 19 bp, Mus musculus
  siRNA target sequence for Atm (NM_007499.1,1280-1298).
gattacaacccgattaata

SEQ ID NO: 455379 - DNA, 19 bp, Mus musculus
  siRNA target sequence for Atm (NM_007499.1,1288-1306).
cccgattaatatcaaaata

SEQ ID NO: 455380 - DNA, 19 bp, Mus musculus
  siRNA target sequence for Atm (NM_007499.1,1289-1307).
ccgattaatatcaaaatat

SEQ ID NO: 455381 - DNA, 19 bp, Mus musculus
  siRNA target sequence for Atm (NM_007499.1,1338-1356).
ccattaatactgatactgt

SEQ ID NO: 455382 - DNA, 19 bp, Mus musculus
  siRNA target sequence for Atm (NM_007499.1,1384-1402).
gagaacgcatcccatatgt

SEQ ID NO: 455383 - DNA, 19 bp, Mus musculus
  siRNA target sequence for Atm (NM_007499.1,1386-1404).
gaacgcatcccatatgtgt

SEQ ID NO: 455384 - DNA, 19 bp, Mus musculus
  siRNA target sequence for Atm (NM_007499.1,1403-1421).
gttacgatgccttaaggaa

SEQ ID NO: 455385 - DNA, 19 bp, Mus musculus
  siRNA target sequence for Atm (NM_007499.1,1511-1529).
ctttcgtggtataagttct

SEQ ID NO: 455386 - DNA, 19 bp, Mus musculus
  siRNA target sequence for Atm (NM_007499.1,1571-1589).
cattcaaggtagtttagtt

SEQ ID NO: 455387 - DNA, 19 bp, Mus musculus
  siRNA target sequence for Atm (NM_007499.1,1579-1597).
gtagtttagttgaacttga

SEQ ID NO: 455388 - DNA, 19 bp, Mus musculus
  siRNA target sequence for Atm (NM_007499.1,1587-1605).
gttgaacttgacagagaat

SEQ ID NO: 455389 - DNA, 19 bp, Mus musculus
  siRNA target sequence for Atm (NM_007499.1,1602-1620).
gaattctggaagttattta

SEQ ID NO: 455390 - DNA, 19 bp, Mus musculus
  siRNA target sequence for Atm (NM_007499.1,1651-1669).
cagtatgctgcttgacttt

SEQ ID NO: 455391 - DNA, 19 bp, Mus musculus
  siRNA target sequence for Atm (NM_007499.1,1860-1878).
gtcgaaaaaattcttgtaa

SEQ ID NO: 455392 - DNA, 19 bp, Mus musculus
  siRNA target sequence for Atm (NM_007499.1,1938-1956).
gaacaacactgcgaagata

SEQ ID NO: 455393 - DNA, 19 bp, Mus musculus
  siRNA target sequence for Atm (NM_007499.1,1995-2013).
cttcagactacttttgaca

SEQ ID NO: 455394 - DNA, 19 bp, Mus musculus
  siRNA target sequence for Atm (NM_007499.1,2012-2030).
caagatggattttttaact

SEQ ID NO: 455395 - DNA, 19 bp, Mus musculus
  siRNA target sequence for Atm (NM_007499.1,2099-2117).
ggaatcattggatcactat

SEQ ID NO: 455396 - DNA, 19 bp, Mus musculus
  siRNA target sequence for Atm (NM_007499.1,2104-2122).
cattggatcactatcttct

SEQ ID NO: 455397 - DNA, 19 bp, Mus musculus
  siRNA target sequence for Atm (NM_007499.1,2138-2156).
gcttttaagtaattactct

SEQ ID NO: 455398 - DNA, 19 bp, Mus musculus
  siRNA target sequence for Atm (NM_007499.1,2139-2157).
cttttaagtaattactctt

SEQ ID NO: 455399 - DNA, 19 bp, Mus musculus
  siRNA target sequence for Atm (NM_007499.1,2184-2202).
gtccggtgttcaagtcttt

SEQ ID NO: 455400 - DNA, 19 bp, Mus musculus
  siRNA target sequence for Atm (NM_007499.1,2188-2206).
ggtgttcaagtcttttggt

SEQ ID NO: 455401 - DNA, 19 bp, Mus musculus
  siRNA target sequence for Atm (NM_007499.1,2231-2249).
catgggtataataactgaa

SEQ ID NO: 455402 - DNA, 19 bp, Mus musculus
  siRNA target sequence for Atm (NM_007499.1,2247-2265).
gaagacgaagcccataaat

SEQ ID NO: 455403 - DNA, 19 bp, Mus musculus
  siRNA target sequence for Atm (NM_007499.1,2252-2270).
cgaagcccataaatcagaa

SEQ ID NO: 455404 - DNA, 19 bp, Mus musculus
  siRNA target sequence for Atm (NM_007499.1,2256-2274).
gcccataaatcagaattat

SEQ ID NO: 455405 - DNA, 19 bp, Mus musculus
  siRNA target sequence for Atm (NM_007499.1,2297-2315).
gcaatgtgcaggagaaagt

SEQ ID NO: 455406 - DNA, 19 bp, Mus musculus
  siRNA target sequence for Atm (NM_007499.1,2298-2316).
caatgtgcaggagaaagta

SEQ ID NO: 455407 - DNA, 19 bp, Mus musculus
  siRNA target sequence for Atm (NM_007499.1,2389-2407).
caagttgcttgtgtataca

SEQ ID NO: 455408 - DNA, 19 bp, Mus musculus
  siRNA target sequence for Atm (NM_007499.1,2410-2428).
ccaagcatacgccaaacaa

SEQ ID NO: 455409 - DNA, 19 bp, Mus musculus
  siRNA target sequence for Atm (NM_007499.1,2414-2432).
gcatacgccaaacaagatt

SEQ ID NO: 455410 - DNA, 19 bp, Mus musculus
  siRNA target sequence for Atm (NM_007499.1,2440-2458).
gctttttcctacgattatt

SEQ ID NO: 455411 - DNA, 19 bp, Mus musculus
  siRNA target sequence for Atm (NM_007499.1,2441-2459).
ctttttcctacgattatta

SEQ ID NO: 455412 - DNA, 19 bp, Mus musculus
  siRNA target sequence for Atm (NM_007499.1,2447-2465).
cctacgattattaacatca

SEQ ID NO: 455413 - DNA, 19 bp, Mus musculus
  siRNA target sequence for Atm (NM_007499.1,2461-2479).
catcaaagcttatgaatga

SEQ ID NO: 455414 - DNA, 19 bp, Mus musculus
  siRNA target sequence for Atm (NM_007499.1,2606-2624).
gtccactggtctttctact

SEQ ID NO: 455415 - DNA, 19 bp, Mus musculus
  siRNA target sequence for Atm (NM_007499.1,2641-2659).
ctgtgagcgatgcaaatga

SEQ ID NO: 455416 - DNA, 19 bp, Mus musculus
  siRNA target sequence for Atm (NM_007499.1,2643-2661).
gtgagcgatgcaaatgatt

SEQ ID NO: 455417 - DNA, 19 bp, Mus musculus
  siRNA target sequence for Atm (NM_007499.1,2645-2663).
gagcgatgcaaatgattat

SEQ ID NO: 455418 - DNA, 19 bp, Mus musculus
  siRNA target sequence for Atm (NM_007499.1,2756-2774).
cttaggccgatctgtaact

SEQ ID NO: 455419 - DNA, 19 bp, Mus musculus
  siRNA target sequence for Atm (NM_007499.1,2834-2852).
gttgcttgattctagcata

SEQ ID NO: 455420 - DNA, 19 bp, Mus musculus
  siRNA target sequence for Atm (NM_007499.1,2845-2863).
ctagcatactcgatctcat

SEQ ID NO: 455421 - DNA, 19 bp, Mus musculus
  siRNA target sequence for Atm (NM_007499.1,2848-2866).
gcatactcgatctcatgaa

SEQ ID NO: 455422 - DNA, 19 bp, Mus musculus
  siRNA target sequence for Atm (NM_007499.1,2873-2891).
ccacctgcatatgtactta

SEQ ID NO: 455423 - DNA, 19 bp, Mus musculus
  siRNA target sequence for Atm (NM_007499.1,2930-2948).
gccaatggaagatgttgtt

SEQ ID NO: 455424 - DNA, 19 bp, Mus musculus
  siRNA target sequence for Atm (NM_007499.1,2994-3012).
gaccaagatgtctgtaaaa

SEQ ID NO: 455425 - DNA, 19 bp, Mus musculus
  siRNA target sequence for Atm (NM_007499.1,2997-3015).
caagatgtctgtaaaacga

SEQ ID NO: 455426 - DNA, 19 bp, Mus musculus
  siRNA target sequence for Atm (NM_007499.1,3003-3021).
gtctgtaaaacgattctaa

SEQ ID NO: 455427 - DNA, 19 bp, Mus musculus
  siRNA target sequence for Atm (NM_007499.1,3007-3025).
gtaaaacgattctaagcaa

SEQ ID NO: 455428 - DNA, 19 bp, Mus musculus
  siRNA target sequence for Atm (NM_007499.1,3114-3132).
ggagcattttggcatttga

SEQ ID NO: 455429 - DNA, 19 bp, Mus musculus
  siRNA target sequence for Atm (NM_007499.1,3157-3175).
ctgtaagaatggcattagt

SEQ ID NO: 455430 - DNA, 19 bp, Mus musculus
  siRNA target sequence for Atm (NM_007499.1,3214-3232).
ccgaatgggcaattcttaa

SEQ ID NO: 455431 - DNA, 19 bp, Mus musculus
  siRNA target sequence for Atm (NM_007499.1,3215-3233).
cgaatgggcaattcttaat

SEQ ID NO: 455432 - DNA, 19 bp, Mus musculus
  siRNA target sequence for Atm (NM_007499.1,3318-3336).
gggtcagtcaacagattat

SEQ ID NO: 455433 - DNA, 19 bp, Mus musculus
  siRNA target sequence for Atm (NM_007499.1,3319-3337).
ggtcagtcaacagattatt

SEQ ID NO: 455434 - DNA, 19 bp, Mus musculus
  siRNA target sequence for Atm (NM_007499.1,3320-3338).
gtcagtcaacagattattt

SEQ ID NO: 455435 - DNA, 19 bp, Mus musculus
  siRNA target sequence for Atm (NM_007499.1,3322-3340).
cagtcaacagattatttca

SEQ ID NO: 455436 - DNA, 19 bp, Mus musculus
  siRNA target sequence for Atm (NM_007499.1,3438-3456).
gggatcagaggactgttat

SEQ ID NO: 455437 - DNA, 19 bp, Mus musculus
  siRNA target sequence for Atm (NM_007499.1,3440-3458).
gatcagaggactgttatgt

SEQ ID NO: 455438 - DNA, 19 bp, Mus musculus
  siRNA target sequence for Atm (NM_007499.1,3448-3466).
gactgttatgtgattctca

SEQ ID NO: 455439 - DNA, 19 bp, Mus musculus
  siRNA target sequence for Atm (NM_007499.1,3499-3517).
gaaaatctgtactactgat

SEQ ID NO: 455440 - DNA, 19 bp, Mus musculus
  siRNA target sequence for Atm (NM_007499.1,3541-3559).
gtagcccagtctgtgaaaa

SEQ ID NO: 455441 - DNA, 19 bp, Mus musculus
  siRNA target sequence for Atm (NM_007499.1,3564-3582).
gctttgtttgctttatgca

SEQ ID NO: 455442 - DNA, 19 bp, Mus musculus
  siRNA target sequence for Atm (NM_007499.1,3599-3617).
cagactagaacctcatctt

SEQ ID NO: 455443 - DNA, 19 bp, Mus musculus
  siRNA target sequence for Atm (NM_007499.1,3601-3619).
gactagaacctcatcttgt

SEQ ID NO: 455444 - DNA, 19 bp, Mus musculus
  siRNA target sequence for Atm (NM_007499.1,3635-3653).
gaaagtctccgaatcgttt

SEQ ID NO: 455445 - DNA, 19 bp, Mus musculus
  siRNA target sequence for Atm (NM_007499.1,3644-3662).
cgaatcgtttggatgtaga

SEQ ID NO: 455446 - DNA, 19 bp, Mus musculus
  siRNA target sequence for Atm (NM_007499.1,3645-3663).
gaatcgtttggatgtagaa

SEQ ID NO: 455447 - DNA, 19 bp, Mus musculus
  siRNA target sequence for Atm (NM_007499.1,3649-3667).
cgtttggatgtagaagttt

SEQ ID NO: 455448 - DNA, 19 bp, Mus musculus
  siRNA target sequence for Atm (NM_007499.1,3650-3668).
gtttggatgtagaagttta

SEQ ID NO: 455449 - DNA, 19 bp, Mus musculus
  siRNA target sequence for Atm (NM_007499.1,3655-3673).
gatgtagaagtttagaaga

SEQ ID NO: 455450 - DNA, 19 bp, Mus musculus
  siRNA target sequence for Atm (NM_007499.1,3658-3676).
gtagaagtttagaagactt

SEQ ID NO: 455451 - DNA, 19 bp, Mus musculus
  siRNA target sequence for Atm (NM_007499.1,3719-3737).
ccttcaagatactgaatat

SEQ ID NO: 455452 - DNA, 19 bp, Mus musculus
  siRNA target sequence for Atm (NM_007499.1,3726-3744).
gatactgaatatagcttat

SEQ ID NO: 455453 - DNA, 19 bp, Mus musculus
  siRNA target sequence for Atm (NM_007499.1,3775-3793).
caagcattgaggatttcta

SEQ ID NO: 455454 - DNA, 19 bp, Mus musculus
  siRNA target sequence for Atm (NM_007499.1,3786-3804).
gatttctatcggtcttgtt

SEQ ID NO: 455455 - DNA, 19 bp, Mus musculus
  siRNA target sequence for Atm (NM_007499.1,3795-3813).
cggtcttgttacaagattt

SEQ ID NO: 455456 - DNA, 19 bp, Mus musculus
  siRNA target sequence for Atm (NM_007499.1,3796-3814).
ggtcttgttacaagatttt

SEQ ID NO: 455457 - DNA, 19 bp, Mus musculus
  siRNA target sequence for Atm (NM_007499.1,3819-3837).
ccacatttggtaatcagaa

SEQ ID NO: 455458 - DNA, 19 bp, Mus musculus
  siRNA target sequence for Atm (NM_007499.1,3851-3869).
ggtgaagtccattgctaat

SEQ ID NO: 455459 - DNA, 19 bp, Mus musculus
  siRNA target sequence for Atm (NM_007499.1,3860-3878).
cattgctaatcagattcaa

SEQ ID NO: 455460 - DNA, 19 bp, Mus musculus
  siRNA target sequence for Atm (NM_007499.1,3864-3882).
gctaatcagattcaaaagt

SEQ ID NO: 455461 - DNA, 19 bp, Mus musculus
  siRNA target sequence for Atm (NM_007499.1,3907-3925).
gctttccgaagattcttgt

SEQ ID NO: 455462 - DNA, 19 bp, Mus musculus
  siRNA target sequence for Atm (NM_007499.1,3926-3944).
gcacatccttccttacttt

SEQ ID NO: 455463 - DNA, 19 bp, Mus musculus
  siRNA target sequence for Atm (NM_007499.1,3993-4011).
gctaccaaggtctacgata

SEQ ID NO: 455464 - DNA, 19 bp, Mus musculus
  siRNA target sequence for Atm (NM_007499.1,3997-4015).
ccaaggtctacgatactct

SEQ ID NO: 455465 - DNA, 19 bp, Mus musculus
  siRNA target sequence for Atm (NM_007499.1,3998-4016).
caaggtctacgatactctt

SEQ ID NO: 455466 - DNA, 19 bp, Mus musculus
  siRNA target sequence for Atm (NM_007499.1,4001-4019).
ggtctacgatactcttaaa

SEQ ID NO: 455467 - DNA, 19 bp, Mus musculus
  siRNA target sequence for Atm (NM_007499.1,4026-4044).
gacttcctaggaaaacaga

SEQ ID NO: 455468 - DNA, 19 bp, Mus musculus
  siRNA target sequence for Atm (NM_007499.1,4043-4061).
gattgaccaagtattcatt

SEQ ID NO: 455469 - DNA, 19 bp, Mus musculus
  siRNA target sequence for Atm (NM_007499.1,4063-4081).
gtaatttgccagagattgt

SEQ ID NO: 455470 - DNA, 19 bp, Mus musculus
  siRNA target sequence for Atm (NM_007499.1,4125-4143).
gactcggacgccagtcaaa

SEQ ID NO: 455471 - DNA, 19 bp, Mus musculus
  siRNA target sequence for Atm (NM_007499.1,4146-4164).
gccaccgccttgtgtgatt

SEQ ID NO: 455472 - DNA, 19 bp, Mus musculus
  siRNA target sequence for Atm (NM_007499.1,4147-4165).
ccaccgccttgtgtgattt

SEQ ID NO: 455473 - DNA, 19 bp, Mus musculus
  siRNA target sequence for Atm (NM_007499.1,4148-4166).
caccgccttgtgtgatttt

SEQ ID NO: 455474 - DNA, 19 bp, Mus musculus
  siRNA target sequence for Atm (NM_007499.1,4185-4203).
gcccccaacccgccatatt

SEQ ID NO: 455475 - DNA, 19 bp, Mus musculus
  siRNA target sequence for Atm (NM_007499.1,4238-4256).
catcagcaactgtcataaa

SEQ ID NO: 455476 - DNA, 19 bp, Mus musculus
  siRNA target sequence for Atm (NM_007499.1,4243-4261).
gcaactgtcataaaaccaa

SEQ ID NO: 455477 - DNA, 19 bp, Mus musculus
  siRNA target sequence for Atm (NM_007499.1,4288-4306).
ctaaaatccccgattccta

SEQ ID NO: 455478 - DNA, 19 bp, Mus musculus
  siRNA target sequence for Atm (NM_007499.1,4295-4313).
ccccgattcctatcagaaa

SEQ ID NO: 455479 - DNA, 19 bp, Mus musculus
  siRNA target sequence for Atm (NM_007499.1,4296-4314).
cccgattcctatcagaaaa

SEQ ID NO: 455480 - DNA, 19 bp, Mus musculus
  siRNA target sequence for Atm (NM_007499.1,4297-4315).
ccgattcctatcagaaaat

SEQ ID NO: 455481 - DNA, 19 bp, Mus musculus
  siRNA target sequence for Atm (NM_007499.1,4298-4316).
cgattcctatcagaaaata

SEQ ID NO: 455482 - DNA, 19 bp, Mus musculus
  siRNA target sequence for Atm (NM_007499.1,4344-4362).
gagacaaataatgtcttta

SEQ ID NO: 455483 - DNA, 19 bp, Mus musculus
  siRNA target sequence for Atm (NM_007499.1,4402-4420).
gtttattactgaaagatat

SEQ ID NO: 455484 - DNA, 19 bp, Mus musculus
  siRNA target sequence for Atm (NM_007499.1,4454-4472).
ccttcgcgatgttatttat

SEQ ID NO: 455485 - DNA, 19 bp, Mus musculus
  siRNA target sequence for Atm (NM_007499.1,4455-4473).
cttcgcgatgttatttata

SEQ ID NO: 455486 - DNA, 19 bp, Mus musculus
  siRNA target sequence for Atm (NM_007499.1,4459-4477).
gcgatgttatttatactct

SEQ ID NO: 455487 - DNA, 19 bp, Mus musculus
  siRNA target sequence for Atm (NM_007499.1,4474-4492).
ctctgattcactacatcaa

SEQ ID NO: 455488 - DNA, 19 bp, Mus musculus
  siRNA target sequence for Atm (NM_007499.1,4518-4536).
gtgtcgttgcgtagctttt

SEQ ID NO: 455489 - DNA, 19 bp, Mus musculus
  siRNA target sequence for Atm (NM_007499.1,4550-4568).
cctattaagtcgagtttgt

SEQ ID NO: 455490 - DNA, 19 bp, Mus musculus
  siRNA target sequence for Atm (NM_007499.1,4567-4585).
gtcatacagctgtaactca

SEQ ID NO: 455491 - DNA, 19 bp, Mus musculus
  siRNA target sequence for Atm (NM_007499.1,4606-4624).
gccatcttcacgttatcgt

SEQ ID NO: 455492 - DNA, 19 bp, Mus musculus
  siRNA target sequence for Atm (NM_007499.1,4607-4625).
ccatcttcacgttatcgtt

SEQ ID NO: 455493 - DNA, 19 bp, Mus musculus
  siRNA target sequence for Atm (NM_007499.1,4617-4635).
gttatcgttggcacactta

SEQ ID NO: 455494 - DNA, 19 bp, Mus musculus
  siRNA target sequence for Atm (NM_007499.1,4676-4694).
ggacctgttgaagtactta

SEQ ID NO: 455495 - DNA, 19 bp, Mus musculus
  siRNA target sequence for Atm (NM_007499.1,4682-4700).
gttgaagtacttagtgata

SEQ ID NO: 455496 - DNA, 19 bp, Mus musculus
  siRNA target sequence for Atm (NM_007499.1,4730-4748).
cacaattaagcttttggat

SEQ ID NO: 455497 - DNA, 19 bp, Mus musculus
  siRNA target sequence for Atm (NM_007499.1,4749-4767).
ccctttcctgaccatgtta

SEQ ID NO: 455498 - DNA, 19 bp, Mus musculus
  siRNA target sequence for Atm (NM_007499.1,4750-4768).
cctttcctgaccatgttat

SEQ ID NO: 455499 - DNA, 19 bp, Mus musculus
  siRNA target sequence for Atm (NM_007499.1,4775-4793).
ggacttgcgtcttactcaa

SEQ ID NO: 455500 - DNA, 19 bp, Mus musculus
  siRNA target sequence for Atm (NM_007499.1,4816-4834).
gacctttttcactcttaga

SEQ ID NO: 455501 - DNA, 19 bp, Mus musculus
  siRNA target sequence for Atm (NM_007499.1,4953-4971).
ctgagagcgtctcaagata

SEQ ID NO: 455502 - DNA, 19 bp, Mus musculus
  siRNA target sequence for Atm (NM_007499.1,5036-5054).
gaaccagactggtgaaaga

SEQ ID NO: 455503 - DNA, 19 bp, Mus musculus
  siRNA target sequence for Atm (NM_007499.1,5078-5096).
gtgtttgggagaaataggt

SEQ ID NO: 455504 - DNA, 19 bp, Mus musculus
  siRNA target sequence for Atm (NM_007499.1,5181-5199).
cttcagtggaccttgataa

SEQ ID NO: 455505 - DNA, 19 bp, Mus musculus
  siRNA target sequence for Atm (NM_007499.1,5287-5305).
caaagattggacatatttt

SEQ ID NO: 455506 - DNA, 19 bp, Mus musculus
  siRNA target sequence for Atm (NM_007499.1,5335-5353).
caatgctgacctatctaca

SEQ ID NO: 455507 - DNA, 19 bp, Mus musculus
  siRNA target sequence for Atm (NM_007499.1,5349-5367).
ctacaaccttttagaacat

SEQ ID NO: 455508 - DNA, 19 bp, Mus musculus
  siRNA target sequence for Atm (NM_007499.1,5362-5380).
gaacatcgaggaaaaagtt

SEQ ID NO: 455509 - DNA, 19 bp, Mus musculus
  siRNA target sequence for Atm (NM_007499.1,5365-5383).
catcgaggaaaaagttttt

SEQ ID NO: 455510 - DNA, 19 bp, Mus musculus
  siRNA target sequence for Atm (NM_007499.1,5368-5386).
cgaggaaaaagtttttaga

SEQ ID NO: 455511 - DNA, 19 bp, Mus musculus
  siRNA target sequence for Atm (NM_007499.1,5385-5403).
gaagtgccccgatctgtta

SEQ ID NO: 455512 - DNA, 19 bp, Mus musculus
  siRNA target sequence for Atm (NM_007499.1,5390-5408).
gccccgatctgttaaagaa

SEQ ID NO: 455513 - DNA, 19 bp, Mus musculus
  siRNA target sequence for Atm (NM_007499.1,5392-5410).
cccgatctgttaaagaaga

SEQ ID NO: 455514 - DNA, 19 bp, Mus musculus
  siRNA target sequence for Atm (NM_007499.1,5393-5411).
ccgatctgttaaagaagat

SEQ ID NO: 455515 - DNA, 19 bp, Mus musculus
  siRNA target sequence for Atm (NM_007499.1,5441-5459).
gtgggttcctcaaagtgaa

SEQ ID NO: 455516 - DNA, 19 bp, Mus musculus
  siRNA target sequence for Atm (NM_007499.1,5444-5462).
ggttcctcaaagtgaaagt

SEQ ID NO: 455517 - DNA, 19 bp, Mus musculus
  siRNA target sequence for Atm (NM_007499.1,5461-5479).
gtcatgacatttggataaa

SEQ ID NO: 455518 - DNA, 19 bp, Mus musculus
  siRNA target sequence for Atm (NM_007499.1,5508-5526).
ggaggcataaacagtgaaa

SEQ ID NO: 455519 - DNA, 19 bp, Mus musculus
  siRNA target sequence for Atm (NM_007499.1,5523-5541).
gaaattctccagttattaa

SEQ ID NO: 455520 - DNA, 19 bp, Mus musculus
  siRNA target sequence for Atm (NM_007499.1,5587-5605).
catacttgatccatgatgt

SEQ ID NO: 455521 - DNA, 19 bp, Mus musculus
  siRNA target sequence for Atm (NM_007499.1,5649-5667).
gcgcacgtccgaggatttt

SEQ ID NO: 455522 - DNA, 19 bp, Mus musculus
  siRNA target sequence for Atm (NM_007499.1,5650-5668).
cgcacgtccgaggattttt

SEQ ID NO: 455523 - DNA, 19 bp, Mus musculus
  siRNA target sequence for Atm (NM_007499.1,5652-5670).
cacgtccgaggatttttca

SEQ ID NO: 455524 - DNA, 19 bp, Mus musculus
  siRNA target sequence for Atm (NM_007499.1,5654-5672).
cgtccgaggatttttcact

SEQ ID NO: 455525 - DNA, 19 bp, Mus musculus
  siRNA target sequence for Atm (NM_007499.1,5655-5673).
gtccgaggatttttcacta

SEQ ID NO: 455526 - DNA, 19 bp, Mus musculus
  siRNA target sequence for Atm (NM_007499.1,5658-5676).
cgaggatttttcactagtt

SEQ ID NO: 455527 - DNA, 19 bp, Mus musculus
  siRNA target sequence for Atm (NM_007499.1,5669-5687).
cactagttgttttaagcat

SEQ ID NO: 455528 - DNA, 19 bp, Mus musculus
  siRNA target sequence for Atm (NM_007499.1,5716-5734).
ctgcaaattcggattcaga

SEQ ID NO: 455529 - DNA, 19 bp, Mus musculus
  siRNA target sequence for Atm (NM_007499.1,5748-5766).
ctccgatgctgtttggata

SEQ ID NO: 455530 - DNA, 19 bp, Mus musculus
  siRNA target sequence for Atm (NM_007499.1,5790-5808).
gctgttgtcgactatctga

SEQ ID NO: 455531 - DNA, 19 bp, Mus musculus
  siRNA target sequence for Atm (NM_007499.1,5924-5942).
gctctacgcagagatctat

SEQ ID NO: 455532 - DNA, 19 bp, Mus musculus
  siRNA target sequence for Atm (NM_007499.1,5925-5943).
ctctacgcagagatctatt

SEQ ID NO: 455533 - DNA, 19 bp, Mus musculus
  siRNA target sequence for Atm (NM_007499.1,5927-5945).
ctacgcagagatctattca

SEQ ID NO: 455534 - DNA, 19 bp, Mus musculus
  siRNA target sequence for Atm (NM_007499.1,5956-5974).
gcacagacgagcaagagaa

SEQ ID NO: 455535 - DNA, 19 bp, Mus musculus
  siRNA target sequence for Atm (NM_007499.1,5963-5981).
cgagcaagagaaaagaagt

SEQ ID NO: 455536 - DNA, 19 bp, Mus musculus
  siRNA target sequence for Atm (NM_007499.1,6063-6081).
caggatcttctcttagaga

SEQ ID NO: 455537 - DNA, 19 bp, Mus musculus
  siRNA target sequence for Atm (NM_007499.1,6080-6098).
gatctacagaagtatagga

SEQ ID NO: 455538 - DNA, 19 bp, Mus musculus
  siRNA target sequence for Atm (NM_007499.1,6124-6142).
gaggagggaaaatgttaca

SEQ ID NO: 455539 - DNA, 19 bp, Mus musculus
  siRNA target sequence for Atm (NM_007499.1,6137-6155).
gttacaaccccttactaga

SEQ ID NO: 455540 - DNA, 19 bp, Mus musculus
  siRNA target sequence for Atm (NM_007499.1,6151-6169).
ctagaatacggacatatga

SEQ ID NO: 455541 - DNA, 19 bp, Mus musculus
  siRNA target sequence for Atm (NM_007499.1,6154-6172).
gaatacggacatatgaaca

SEQ ID NO: 455542 - DNA, 19 bp, Mus musculus
  siRNA target sequence for Atm (NM_007499.1,6186-6204).
gagaaagccttagtaactt

SEQ ID NO: 455543 - DNA, 19 bp, Mus musculus
  siRNA target sequence for Atm (NM_007499.1,6235-6253).
cccgccagtcaggaatcat

SEQ ID NO: 455544 - DNA, 19 bp, Mus musculus
  siRNA target sequence for Atm (NM_007499.1,6450-6468).
gctctgcagtgtctaagaa

SEQ ID NO: 455545 - DNA, 19 bp, Mus musculus
  siRNA target sequence for Atm (NM_007499.1,6479-6497).
ctccacattttatgaaagt

SEQ ID NO: 455546 - DNA, 19 bp, Mus musculus
  siRNA target sequence for Atm (NM_007499.1,6498-6516).
ctccgatatgccagtcttt

SEQ ID NO: 455547 - DNA, 19 bp, Mus musculus
  siRNA target sequence for Atm (NM_007499.1,6501-6519).
cgatatgccagtcttttca

SEQ ID NO: 455548 - DNA, 19 bp, Mus musculus
  siRNA target sequence for Atm (NM_007499.1,6572-6590).
gctgtatcccacacttagt

SEQ ID NO: 455549 - DNA, 19 bp, Mus musculus
  siRNA target sequence for Atm (NM_007499.1,6573-6591).
ctgtatcccacacttagta

SEQ ID NO: 455550 - DNA, 19 bp, Mus musculus
  siRNA target sequence for Atm (NM_007499.1,6575-6593).
gtatcccacacttagtaga

SEQ ID NO: 455551 - DNA, 19 bp, Mus musculus
  siRNA target sequence for Atm (NM_007499.1,6655-6673).
gagagcgctctgaagcata

SEQ ID NO: 455552 - DNA, 19 bp, Mus musculus
  siRNA target sequence for Atm (NM_007499.1,6740-6758).
ggctctgcgcacagtcatt

SEQ ID NO: 455553 - DNA, 19 bp, Mus musculus
  siRNA target sequence for Atm (NM_007499.1,6742-6760).
ctctgcgcacagtcattct

SEQ ID NO: 455554 - DNA, 19 bp, Mus musculus
  siRNA target sequence for Atm (NM_007499.1,6802-6820).
catgctctaaggacattct

SEQ ID NO: 455555 - DNA, 19 bp, Mus musculus
  siRNA target sequence for Atm (NM_007499.1,6849-6867).
ctggctcgaaccttcaaga

SEQ ID NO: 455556 - DNA, 19 bp, Mus musculus
  siRNA target sequence for Atm (NM_007499.1,6852-6870).
gctcgaaccttcaagaaca

SEQ ID NO: 455557 - DNA, 19 bp, Mus musculus
  siRNA target sequence for Atm (NM_007499.1,6879-6897).
cctgaaagagcaatattca

SEQ ID NO: 455558 - DNA, 19 bp, Mus musculus
  siRNA target sequence for Atm (NM_007499.1,6880-6898).
ctgaaagagcaatattcaa

SEQ ID NO: 455559 - DNA, 19 bp, Mus musculus
  siRNA target sequence for Atm (NM_007499.1,6889-6907).
caatattcaaaattaagca

SEQ ID NO: 455560 - DNA, 19 bp, Mus musculus
  siRNA target sequence for Atm (NM_007499.1,7026-7044).
gactccagctttaaagata

SEQ ID NO: 455561 - DNA, 19 bp, Mus musculus
  siRNA target sequence for Atm (NM_007499.1,7053-7071).
gatgcaggtctcaaagtca

SEQ ID NO: 455562 - DNA, 19 bp, Mus musculus
  siRNA target sequence for Atm (NM_007499.1,7056-7074).
gcaggtctcaaagtcatat

SEQ ID NO: 455563 - DNA, 19 bp, Mus musculus
  siRNA target sequence for Atm (NM_007499.1,7106-7124).
gctggcagaaacttgctta

SEQ ID NO: 455564 - DNA, 19 bp, Mus musculus
  siRNA target sequence for Atm (NM_007499.1,7241-7259).
ggcaaggttctctgatact

SEQ ID NO: 455565 - DNA, 19 bp, Mus musculus
  siRNA target sequence for Atm (NM_007499.1,7243-7261).
caaggttctctgatactca

SEQ ID NO: 455566 - DNA, 19 bp, Mus musculus
  siRNA target sequence for Atm (NM_007499.1,7307-7325).
caagcaaactctcttaaaa

SEQ ID NO: 455567 - DNA, 19 bp, Mus musculus
  siRNA target sequence for Atm (NM_007499.1,7372-7390).
ccaacagatacacagtaaa

SEQ ID NO: 455568 - DNA, 19 bp, Mus musculus
  siRNA target sequence for Atm (NM_007499.1,7376-7394).
cagatacacagtaaaggtt

SEQ ID NO: 455569 - DNA, 19 bp, Mus musculus
  siRNA target sequence for Atm (NM_007499.1,7447-7465).
gcaagcgcttcctgtgtaa

SEQ ID NO: 455570 - DNA, 19 bp, Mus musculus
  siRNA target sequence for Atm (NM_007499.1,7448-7466).
caagcgcttcctgtgtaaa

SEQ ID NO: 455571 - DNA, 19 bp, Mus musculus
  siRNA target sequence for Atm (NM_007499.1,7451-7469).
gcgcttcctgtgtaaagca

SEQ ID NO: 455572 - DNA, 19 bp, Mus musculus
  siRNA target sequence for Atm (NM_007499.1,7534-7552).
gctccctctggcttgaaaa

SEQ ID NO: 455573 - DNA, 19 bp, Mus musculus
  siRNA target sequence for Atm (NM_007499.1,7601-7619).
gatttcatcctataagttt

SEQ ID NO: 455574 - DNA, 19 bp, Mus musculus
  siRNA target sequence for Atm (NM_007499.1,7644-7662).
gctcgaatggggaccaaaa

SEQ ID NO: 455575 - DNA, 19 bp, Mus musculus
  siRNA target sequence for Atm (NM_007499.1,7647-7665).
cgaatggggaccaaaatga

SEQ ID NO: 455576 - DNA, 19 bp, Mus musculus
  siRNA target sequence for Atm (NM_007499.1,7664-7682).
gacgggaggcctaggattt

SEQ ID NO: 455577 - DNA, 19 bp, Mus musculus
  siRNA target sequence for Atm (NM_007499.1,7685-7703).
cgaagtcctcaataatcta

SEQ ID NO: 455578 - DNA, 19 bp, Mus musculus
  siRNA target sequence for Atm (NM_007499.1,7686-7704).
gaagtcctcaataatctaa

SEQ ID NO: 455579 - DNA, 19 bp, Mus musculus
  siRNA target sequence for Atm (NM_007499.1,7689-7707).
gtcctcaataatctaatct

SEQ ID NO: 455580 - DNA, 19 bp, Mus musculus
  siRNA target sequence for Atm (NM_007499.1,7691-7709).
cctcaataatctaatctct

SEQ ID NO: 455581 - DNA, 19 bp, Mus musculus
  siRNA target sequence for Atm (NM_007499.1,7692-7710).
ctcaataatctaatctcta

SEQ ID NO: 455582 - DNA, 19 bp, Mus musculus
  siRNA target sequence for Atm (NM_007499.1,7721-7739).
ggatcacccccatcatact

SEQ ID NO: 455583 - DNA, 19 bp, Mus musculus
  siRNA target sequence for Atm (NM_007499.1,7722-7740).
gatcacccccatcatactt

SEQ ID NO: 455584 - DNA, 19 bp, Mus musculus
  siRNA target sequence for Atm (NM_007499.1,7728-7746).
ccccatcatactttgttca

SEQ ID NO: 455585 - DNA, 19 bp, Mus musculus
  siRNA target sequence for Atm (NM_007499.1,7729-7747).
cccatcatactttgttcat

SEQ ID NO: 455586 - DNA, 19 bp, Mus musculus
  siRNA target sequence for Atm (NM_007499.1,7730-7748).
ccatcatactttgttcatt

SEQ ID NO: 455587 - DNA, 19 bp, Mus musculus
  siRNA target sequence for Atm (NM_007499.1,7731-7749).
catcatactttgttcatta

SEQ ID NO: 455588 - DNA, 19 bp, Mus musculus
  siRNA target sequence for Atm (NM_007499.1,7757-7775).
cttagcaaatgcgaacaaa

SEQ ID NO: 455589 - DNA, 19 bp, Mus musculus
  siRNA target sequence for Atm (NM_007499.1,7762-7780).
caaatgcgaacaaagatga

SEQ ID NO: 455590 - DNA, 19 bp, Mus musculus
  siRNA target sequence for Atm (NM_007499.1,7815-7833).
cgaataaccaaaagtacat

SEQ ID NO: 455591 - DNA, 19 bp, Mus musculus
  siRNA target sequence for Atm (NM_007499.1,7823-7841).
caaaagtacatctaaagaa

SEQ ID NO: 455592 - DNA, 19 bp, Mus musculus
  siRNA target sequence for Atm (NM_007499.1,7869-7887).
gaggctgcaaccagaatca

SEQ ID NO: 455593 - DNA, 19 bp, Mus musculus
  siRNA target sequence for Atm (NM_007499.1,8016-8034).
gccaaccagccaatcacta

SEQ ID NO: 455594 - DNA, 19 bp, Mus musculus
  siRNA target sequence for Atm (NM_007499.1,8017-8035).
ccaaccagccaatcactaa

SEQ ID NO: 455595 - DNA, 19 bp, Mus musculus
  siRNA target sequence for Atm (NM_007499.1,8022-8040).
cagccaatcactaaactga

SEQ ID NO: 455596 - DNA, 19 bp, Mus musculus
  siRNA target sequence for Atm (NM_007499.1,8032-8050).
ctaaactgaagaatttaga

SEQ ID NO: 455597 - DNA, 19 bp, Mus musculus
  siRNA target sequence for Atm (NM_007499.1,8061-8079).
gttcccactatggaaatta

SEQ ID NO: 455598 - DNA, 19 bp, Mus musculus
  siRNA target sequence for Atm (NM_007499.1,8065-8083).
ccactatggaaattaaggt

SEQ ID NO: 455599 - DNA, 19 bp, Mus musculus
  siRNA target sequence for Atm (NM_007499.1,8088-8106).
cccacaggagagtatgaaa

SEQ ID NO: 455600 - DNA, 19 bp, Mus musculus
  siRNA target sequence for Atm (NM_007499.1,8090-8108).
cacaggagagtatgaaaat

SEQ ID NO: 455601 - DNA, 19 bp, Mus musculus
  siRNA target sequence for Atm (NM_007499.1,8109-8127).
ctggtgactataaaatcat

SEQ ID NO: 455602 - DNA, 19 bp, Mus musculus
  siRNA target sequence for Atm (NM_007499.1,8112-8130).
gtgactataaaatcattta

SEQ ID NO: 455603 - DNA, 19 bp, Mus musculus
  siRNA target sequence for Atm (NM_007499.1,8144-8162).
cttagctggaggcttaaat

SEQ ID NO: 455604 - DNA, 19 bp, Mus musculus
  siRNA target sequence for Atm (NM_007499.1,8155-8173).
gcttaaatttacccaaaat

SEQ ID NO: 455605 - DNA, 19 bp, Mus musculus
  siRNA target sequence for Atm (NM_007499.1,8167-8185).
ccaaaataatagattgtgt

SEQ ID NO: 455606 - DNA, 19 bp, Mus musculus
  siRNA target sequence for Atm (NM_007499.1,8187-8205).
ggttctgatggcaaggaaa

SEQ ID NO: 455607 - DNA, 19 bp, Mus musculus
  siRNA target sequence for Atm (NM_007499.1,8267-8285).
ccagatgtgcaatacacta

SEQ ID NO: 455608 - DNA, 19 bp, Mus musculus
  siRNA target sequence for Atm (NM_007499.1,8380-8398).
gcacaggaaccgttcctat

SEQ ID NO: 455609 - DNA, 19 bp, Mus musculus
  siRNA target sequence for Atm (NM_007499.1,8381-8399).
cacaggaaccgttcctatt

SEQ ID NO: 455610 - DNA, 19 bp, Mus musculus
  siRNA target sequence for Atm (NM_007499.1,8395-8413).
ctattggtgaatatcttgt

SEQ ID NO: 455611 - DNA, 19 bp, Mus musculus
  siRNA target sequence for Atm (NM_007499.1,8400-8418).
ggtgaatatcttgttaaca

SEQ ID NO: 455612 - DNA, 19 bp, Mus musculus
  siRNA target sequence for Atm (NM_007499.1,8420-8438).
cgaagacggtgcacataga

SEQ ID NO: 455613 - DNA, 19 bp, Mus musculus
  siRNA target sequence for Atm (NM_007499.1,8421-8439).
gaagacggtgcacatagaa

SEQ ID NO: 455614 - DNA, 19 bp, Mus musculus
  siRNA target sequence for Atm (NM_007499.1,8424-8442).
gacggtgcacatagaagat

SEQ ID NO: 455615 - DNA, 19 bp, Mus musculus
  siRNA target sequence for Atm (NM_007499.1,8427-8445).
ggtgcacatagaagataca

SEQ ID NO: 455616 - DNA, 19 bp, Mus musculus
  siRNA target sequence for Atm (NM_007499.1,8440-8458).
gatacaggccaaatgattt

SEQ ID NO: 455617 - DNA, 19 bp, Mus musculus
  siRNA target sequence for Atm (NM_007499.1,8454-8472).
gatttcagtgccaatcagt

SEQ ID NO: 455618 - DNA, 19 bp, Mus musculus
  siRNA target sequence for Atm (NM_007499.1,8523-8541).
gataccttcatgacgattt

SEQ ID NO: 455619 - DNA, 19 bp, Mus musculus
  siRNA target sequence for Atm (NM_007499.1,8612-8630).
gaaacgattggcatataca

SEQ ID NO: 455620 - DNA, 19 bp, Mus musculus
  siRNA target sequence for Atm (NM_007499.1,8631-8649).
cgcagtgtggccacatctt

SEQ ID NO: 455621 - DNA, 19 bp, Mus musculus
  siRNA target sequence for Atm (NM_007499.1,8677-8695).
gcgacaggcacgtacagaa

SEQ ID NO: 455622 - DNA, 19 bp, Mus musculus
  siRNA target sequence for Atm (NM_007499.1,8678-8696).
cgacaggcacgtacagaat

SEQ ID NO: 455623 - DNA, 19 bp, Mus musculus
  siRNA target sequence for Atm (NM_007499.1,8679-8697).
gacaggcacgtacagaata

SEQ ID NO: 455624 - DNA, 19 bp, Mus musculus
  siRNA target sequence for Atm (NM_007499.1,8857-8875).
ggtgctgtgaaaaaacgat

SEQ ID NO: 455625 - DNA, 19 bp, Mus musculus
  siRNA target sequence for Atm (NM_007499.1,8930-8948).
gtacgatccactctttgat

SEQ ID NO: 455626 - DNA, 19 bp, Mus musculus
  siRNA target sequence for Atm (NM_007499.1,8940-8958).
ctctttgattggactatga

SEQ ID NO: 455627 - DNA, 19 bp, Mus musculus
  siRNA target sequence for Atm (NM_007499.1,8951-8969).
gactatgaatcctttaaaa

SEQ ID NO: 455628 - DNA, 19 bp, Mus musculus
  siRNA target sequence for Atm (NM_007499.1,9017-9035).
cacccccaatgcagatgat

SEQ ID NO: 455629 - DNA, 19 bp, Mus musculus
  siRNA target sequence for Atm (NM_007499.1,9043-9061).
gcaaacaaagtcttagtga

SEQ ID NO: 455630 - DNA, 19 bp, Mus musculus
  siRNA target sequence for Atm (NM_007499.1,9058-9076).
gtgatactgaccagagttt

SEQ ID NO: 455631 - DNA, 19 bp, Mus musculus
  siRNA target sequence for Atm (NM_007499.1,9064-9082).
ctgaccagagtttcaacaa

SEQ ID NO: 455632 - DNA, 19 bp, Mus musculus
  siRNA target sequence for Atm (NM_007499.1,9068-9086).
ccagagtttcaacaaagta

SEQ ID NO: 455633 - DNA, 19 bp, Mus musculus
  siRNA target sequence for Atm (NM_007499.1,9159-9177).
ggacaggtgaacttgctta

SEQ ID NO: 455634 - DNA, 19 bp, Mus musculus
  siRNA target sequence for Atm (NM_007499.1,9160-9178).
gacaggtgaacttgcttat

SEQ ID NO: 455635 - DNA, 19 bp, Mus musculus
  siRNA target sequence for Atoh1 (NM_007500.2,724-742).
gaccagctgcgcaacgtta

SEQ ID NO: 455636 - DNA, 19 bp, Mus musculus
  siRNA target sequence for Atoh1 (NM_007500.2,739-757).
gttatcccgtccttcaaca

SEQ ID NO: 455637 - DNA, 19 bp, Mus musculus
  siRNA target sequence for Atoh1 (NM_007500.2,1191-1209).
cagaagtgacggagagttt

SEQ ID NO: 455638 - DNA, 19 bp, Mus musculus
  siRNA target sequence for Atoh1 (NM_007500.2,1212-1230).
cccccactctcattacagt

SEQ ID NO: 455639 - DNA, 19 bp, Mus musculus
  siRNA target sequence for Atrx (NM_009530.1,268-286).
gaagcttcatgacttctta

SEQ ID NO: 455640 - DNA, 19 bp, Mus musculus
  siRNA target sequence for Atrx (NM_009530.1,321-339).
cttctccacgacttgtcat

SEQ ID NO: 455641 - DNA, 19 bp, Mus musculus
  siRNA target sequence for Atrx (NM_009530.1,324-342).
ctccacgacttgtcatgaa

SEQ ID NO: 455642 - DNA, 19 bp, Mus musculus
  siRNA target sequence for Atrx (NM_009530.1,329-347).
cgacttgtcatgaaccaaa

SEQ ID NO: 455643 - DNA, 19 bp, Mus musculus
  siRNA target sequence for Atrx (NM_009530.1,443-461).
ggttcatcaaggtcaaaga

SEQ ID NO: 455644 - DNA, 19 bp, Mus musculus
  siRNA target sequence for Atrx (NM_009530.1,480-498).
caaaatatgtagaatctga

SEQ ID NO: 455645 - DNA, 19 bp, Mus musculus
  siRNA target sequence for Atrx (NM_009530.1,509-527).
cccacggatgagaatgtaa

SEQ ID NO: 455646 - DNA, 19 bp, Mus musculus
  siRNA target sequence for Atrx (NM_009530.1,511-529).
cacggatgagaatgtaaat

SEQ ID NO: 455647 - DNA, 19 bp, Mus musculus
  siRNA target sequence for Atrx (NM_009530.1,571-589).
gcaaagcttgccaaaaggt

SEQ ID NO: 455648 - DNA, 19 bp, Mus musculus
  siRNA target sequence for Atrx (NM_009530.1,572-590).
caaagcttgccaaaaggta

SEQ ID NO: 455649 - DNA, 19 bp, Mus musculus
  siRNA target sequence for Atrx (NM_009530.1,807-825).
gtaagaactgctttaagta

SEQ ID NO: 455650 - DNA, 19 bp, Mus musculus
  siRNA target sequence for Atrx (NM_009530.1,811-829).
gaactgctttaagtattat

SEQ ID NO: 455651 - DNA, 19 bp, Mus musculus
  siRNA target sequence for Atrx (NM_009530.1,846-864).
gccgtgactcagatggaat

SEQ ID NO: 455652 - DNA, 19 bp, Mus musculus
  siRNA target sequence for Atrx (NM_009530.1,887-905).
gcagaaggtgggaacttga

SEQ ID NO: 455653 - DNA, 19 bp, Mus musculus
  siRNA target sequence for Atrx (NM_009530.1,921-939).
gtcataacgccttctgtaa

SEQ ID NO: 455654 - DNA, 19 bp, Mus musculus
  siRNA target sequence for Atrx (NM_009530.1,923-941).
cataacgccttctgtaaga

SEQ ID NO: 455655 - DNA, 19 bp, Mus musculus
  siRNA target sequence for Atrx (NM_009530.1,973-991).
gttgtctacaataatggat

SEQ ID NO: 455656 - DNA, 19 bp, Mus musculus
  siRNA target sequence for Atrx (NM_009530.1,992-1010).
gaaaacaatcagtggtatt

SEQ ID NO: 455657 - DNA, 19 bp, Mus musculus
  siRNA target sequence for Atrx (NM_009530.1,997-1015).
caatcagtggtattgctat

SEQ ID NO: 455658 - DNA, 19 bp, Mus musculus
  siRNA target sequence for Atrx (NM_009530.1,1006-1024).
gtattgctatatttgtcaa

SEQ ID NO: 455659 - DNA, 19 bp, Mus musculus
  siRNA target sequence for Atrx (NM_009530.1,1056-1074).
gcaacagcgtatttgagaa

SEQ ID NO: 455660 - DNA, 19 bp, Mus musculus
  siRNA target sequence for Atrx (NM_009530.1,1063-1081).
cgtatttgagaatttagaa

SEQ ID NO: 455661 - DNA, 19 bp, Mus musculus
  siRNA target sequence for Atrx (NM_009530.1,1143-1161).
gtgaccaaacatccaaatt

SEQ ID NO: 455662 - DNA, 19 bp, Mus musculus
  siRNA target sequence for Atrx (NM_009530.1,1166-1184).
ccaaagaagagtagttcta

SEQ ID NO: 455663 - DNA, 19 bp, Mus musculus
  siRNA target sequence for Atrx (NM_009530.1,1171-1189).
gaagagtagttctagttgt

SEQ ID NO: 455664 - DNA, 19 bp, Mus musculus
  siRNA target sequence for Atrx (NM_009530.1,1265-1283).
gtgcccaaagagatgatta

SEQ ID NO: 455665 - DNA, 19 bp, Mus musculus
  siRNA target sequence for Atrx (NM_009530.1,1304-1322).
gagactacatccaacatga

SEQ ID NO: 455666 - DNA, 19 bp, Mus musculus
  siRNA target sequence for Atrx (NM_009530.1,1372-1390).
gacttctgctatgaagtta

SEQ ID NO: 455667 - DNA, 19 bp, Mus musculus
  siRNA target sequence for Atrx (NM_009530.1,1435-1453).
ggctcatcttgcattagaa

SEQ ID NO: 455668 - DNA, 19 bp, Mus musculus
  siRNA target sequence for Atrx (NM_009530.1,1533-1551).
ctaagtctgaaacaaaatt

SEQ ID NO: 455669 - DNA, 19 bp, Mus musculus
  siRNA target sequence for Atrx (NM_009530.1,1537-1555).
gtctgaaacaaaattagga

SEQ ID NO: 455670 - DNA, 19 bp, Mus musculus
  siRNA target sequence for Atrx (NM_009530.1,1559-1577).
ggggaaaaatcctattcta

SEQ ID NO: 455671 - DNA, 19 bp, Mus musculus
  siRNA target sequence for Atrx (NM_009530.1,1600-1618).
gttagatgctagatcatca

SEQ ID NO: 455672 - DNA, 19 bp, Mus musculus
  siRNA target sequence for Atrx (NM_009530.1,1642-1660).
gcagagagcacacaaaagt

SEQ ID NO: 455673 - DNA, 19 bp, Mus musculus
  siRNA target sequence for Atrx (NM_009530.1,1643-1661).
cagagagcacacaaaagta

SEQ ID NO: 455674 - DNA, 19 bp, Mus musculus
  siRNA target sequence for Atrx (NM_009530.1,1659-1677).
gtactagtggggaacataa

SEQ ID NO: 455675 - DNA, 19 bp, Mus musculus
  siRNA target sequence for Atrx (NM_009530.1,1703-1721).
cagtatgaacccactaaca

SEQ ID NO: 455676 - DNA, 19 bp, Mus musculus
  siRNA target sequence for Atrx (NM_009530.1,1705-1723).
gtatgaacccactaacact

SEQ ID NO: 455677 - DNA, 19 bp, Mus musculus
  siRNA target sequence for Atrx (NM_009530.1,1762-1780).
ctcggttccagaagacatt

SEQ ID NO: 455678 - DNA, 19 bp, Mus musculus
  siRNA target sequence for Atrx (NM_009530.1,1789-1807).
ccttgagagtgctatggaa

SEQ ID NO: 455679 - DNA, 19 bp, Mus musculus
  siRNA target sequence for Atrx (NM_009530.1,1864-1882).
ggagagctcctctgtaaaa

SEQ ID NO: 455680 - DNA, 19 bp, Mus musculus
  siRNA target sequence for Atrx (NM_009530.1,1865-1883).
gagagctcctctgtaaaat

SEQ ID NO: 455681 - DNA, 19 bp, Mus musculus
  siRNA target sequence for Atrx (NM_009530.1,1867-1885).
gagctcctctgtaaaatta

SEQ ID NO: 455682 - DNA, 19 bp, Mus musculus
  siRNA target sequence for Atrx (NM_009530.1,1928-1946).
gtcacagcgaaagtaagaa

SEQ ID NO: 455683 - DNA, 19 bp, Mus musculus
  siRNA target sequence for Atrx (NM_009530.1,2032-2050).
gaatggccgtaaaagttct

SEQ ID NO: 455684 - DNA, 19 bp, Mus musculus
  siRNA target sequence for Atrx (NM_009530.1,2082-2100).
ccagagaggaaattagtga

SEQ ID NO: 455685 - DNA, 19 bp, Mus musculus
  siRNA target sequence for Atrx (NM_009530.1,2083-2101).
cagagaggaaattagtgat

SEQ ID NO: 455686 - DNA, 19 bp, Mus musculus
  siRNA target sequence for Atrx (NM_009530.1,2097-2115).
gtgatcatgaaaacaatgt

SEQ ID NO: 455687 - DNA, 19 bp, Mus musculus
  siRNA target sequence for Atrx (NM_009530.1,2197-2215).
ccctgcaatgtcgaattca

SEQ ID NO: 455688 - DNA, 19 bp, Mus musculus
  siRNA target sequence for Atrx (NM_009530.1,2199-2217).
ctgcaatgtcgaattcaga

SEQ ID NO: 455689 - DNA, 19 bp, Mus musculus
  siRNA target sequence for Atrx (NM_009530.1,2353-2371).
gattggggatcagaattca

SEQ ID NO: 455690 - DNA, 19 bp, Mus musculus
  siRNA target sequence for Atrx (NM_009530.1,2411-2429).
cagatggggcatagttctt

SEQ ID NO: 455691 - DNA, 19 bp, Mus musculus
  siRNA target sequence for Atrx (NM_009530.1,2526-2544).
ggtcagattttgacactaa

SEQ ID NO: 455692 - DNA, 19 bp, Mus musculus
  siRNA target sequence for Atrx (NM_009530.1,2527-2545).
gtcagattttgacactaaa

SEQ ID NO: 455693 - DNA, 19 bp, Mus musculus
  siRNA target sequence for Atrx (NM_009530.1,2529-2547).
cagattttgacactaaaaa

SEQ ID NO: 455694 - DNA, 19 bp, Mus musculus
  siRNA target sequence for Atrx (NM_009530.1,2565-2583).
cctctattatctctaaaaa

SEQ ID NO: 455695 - DNA, 19 bp, Mus musculus
  siRNA target sequence for Atrx (NM_009530.1,2568-2586).
ctattatctctaaaaagaa

SEQ ID NO: 455696 - DNA, 19 bp, Mus musculus
  siRNA target sequence for Atrx (NM_009530.1,2599-2617).
ctcagagtcctctaactat

SEQ ID NO: 455697 - DNA, 19 bp, Mus musculus
  siRNA target sequence for Atrx (NM_009530.1,2603-2621).
gagtcctctaactatgact

SEQ ID NO: 455698 - DNA, 19 bp, Mus musculus
  siRNA target sequence for Atrx (NM_009530.1,2662-2680).
ggctgccagaaaaagtgtt

SEQ ID NO: 455699 - DNA, 19 bp, Mus musculus
  siRNA target sequence for Atrx (NM_009530.1,2724-2742).
gcaaaaaagtagtggataa

SEQ ID NO: 455700 - DNA, 19 bp, Mus musculus
  siRNA target sequence for Atrx (NM_009530.1,2725-2743).
caaaaaagtagtggataat

SEQ ID NO: 455701 - DNA, 19 bp, Mus musculus
  siRNA target sequence for Atrx (NM_009530.1,2750-2768).
catgagagggcgaagacaa

SEQ ID NO: 455702 - DNA, 19 bp, Mus musculus
  siRNA target sequence for Atrx (NM_009530.1,2755-2773).
gagggcgaagacaacacaa

SEQ ID NO: 455703 - DNA, 19 bp, Mus musculus
  siRNA target sequence for Atrx (NM_009530.1,2758-2776).
ggcgaagacaacacaagaa

SEQ ID NO: 455704 - DNA, 19 bp, Mus musculus
  siRNA target sequence for Atrx (NM_009530.1,2833-2851).
catagcaggaggttccatt

SEQ ID NO: 455705 - DNA, 19 bp, Mus musculus
  siRNA target sequence for Atrx (NM_009530.1,2837-2855).
gcaggaggttccattgaga

SEQ ID NO: 455706 - DNA, 19 bp, Mus musculus
  siRNA target sequence for Atrx (NM_009530.1,2878-2896).
ccgagagatgctttgcaaa

SEQ ID NO: 455707 - DNA, 19 bp, Mus musculus
  siRNA target sequence for Atrx (NM_009530.1,2955-2973).
cccctgaagacaaaagagt

SEQ ID NO: 455708 - DNA, 19 bp, Mus musculus
  siRNA target sequence for Atrx (NM_009530.1,3042-3060).
ctgatggcactgatcgatt

SEQ ID NO: 455709 - DNA, 19 bp, Mus musculus
  siRNA target sequence for Atrx (NM_009530.1,3198-3216).
ctgatgggaccgagagatt

SEQ ID NO: 455710 - DNA, 19 bp, Mus musculus
  siRNA target sequence for Atrx (NM_009530.1,3311-3329).
gataaatcatgtgaaaaga

SEQ ID NO: 455711 - DNA, 19 bp, Mus musculus
  siRNA target sequence for Atrx (NM_009530.1,3362-3380).
ccaggaaaaggagatagtt

SEQ ID NO: 455712 - DNA, 19 bp, Mus musculus
  siRNA target sequence for Atrx (NM_009530.1,3476-3494).
gagtgttcatcgtcagata

SEQ ID NO: 455713 - DNA, 19 bp, Mus musculus
  siRNA target sequence for Atrx (NM_009530.1,3478-3496).
gtgttcatcgtcagatact

SEQ ID NO: 455714 - DNA, 19 bp, Mus musculus
  siRNA target sequence for Atrx (NM_009530.1,3489-3507).
cagatactgagaaatcctt

SEQ ID NO: 455715 - DNA, 19 bp, Mus musculus
  siRNA target sequence for Atrx (NM_009530.1,3634-3652).
gggaagctcagaagataat

SEQ ID NO: 455716 - DNA, 19 bp, Mus musculus
  siRNA target sequence for Atrx (NM_009530.1,3636-3654).
gaagctcagaagataataa

SEQ ID NO: 455717 - DNA, 19 bp, Mus musculus
  siRNA target sequence for Atrx (NM_009530.1,3697-3715).
caatacgaaggagaaaaaa

SEQ ID NO: 455718 - DNA, 19 bp, Mus musculus
  siRNA target sequence for Atrx (NM_009530.1,3840-3858).
ccgtgactgaaaatctagt

SEQ ID NO: 455719 - DNA, 19 bp, Mus musculus
  siRNA target sequence for Atrx (NM_009530.1,3862-3880).
gccttcacacactggattt

SEQ ID NO: 455720 - DNA, 19 bp, Mus musculus
  siRNA target sequence for Atrx (NM_009530.1,3893-3911).
ggagatgaagccttatcta

SEQ ID NO: 455721 - DNA, 19 bp, Mus musculus
  siRNA target sequence for Atrx (NM_009530.1,3946-3964).
cgacaatgatcctgaaaat

SEQ ID NO: 455722 - DNA, 19 bp, Mus musculus
  siRNA target sequence for Atrx (NM_009530.1,4021-4039).
ggatgggtcgtcagatgat

SEQ ID NO: 455723 - DNA, 19 bp, Mus musculus
  siRNA target sequence for Atrx (NM_009530.1,4120-4138).
gcagttagccgtgaatcaa

SEQ ID NO: 455724 - DNA, 19 bp, Mus musculus
  siRNA target sequence for Atrx (NM_009530.1,4197-4215).
ggcttttgaggcataaact

SEQ ID NO: 455725 - DNA, 19 bp, Mus musculus
  siRNA target sequence for Atrx (NM_009530.1,4254-4272).
ctaagcctaaagagcataa

SEQ ID NO: 455726 - DNA, 19 bp, Mus musculus
  siRNA target sequence for Atrx (NM_009530.1,4258-4276).
gcctaaagagcataaagaa

SEQ ID NO: 455727 - DNA, 19 bp, Mus musculus
  siRNA target sequence for Atrx (NM_009530.1,4351-4369).
cgaagaagtcagtgaatct

SEQ ID NO: 455728 - DNA, 19 bp, Mus musculus
  siRNA target sequence for Atrx (NM_009530.1,4421-4439).
gaaaatcagcggagttata

SEQ ID NO: 455729 - DNA, 19 bp, Mus musculus
  siRNA target sequence for Atrx (NM_009530.1,4427-4445).
cagcggagttataaacaga

SEQ ID NO: 455730 - DNA, 19 bp, Mus musculus
  siRNA target sequence for Atrx (NM_009530.1,4458-4476).
ggcgcattaaggttcaaga

SEQ ID NO: 455731 - DNA, 19 bp, Mus musculus
  siRNA target sequence for Atrx (NM_009530.1,4748-4766).
gatgcttcacctactaagt

SEQ ID NO: 455732 - DNA, 19 bp, Mus musculus
  siRNA target sequence for Atrx (NM_009530.1,4780-4798).
caaattggttttagatgaa

SEQ ID NO: 455733 - DNA, 19 bp, Mus musculus
  siRNA target sequence for Atrx (NM_009530.1,4817-4835).
ccgttagtgcaggttcata

SEQ ID NO: 455734 - DNA, 19 bp, Mus musculus
  siRNA target sequence for Atrx (NM_009530.1,4819-4837).
gttagtgcaggttcataga

SEQ ID NO: 455735 - DNA, 19 bp, Mus musculus
  siRNA target sequence for Atrx (NM_009530.1,4823-4841).
gtgcaggttcatagaaaca

SEQ ID NO: 455736 - DNA, 19 bp, Mus musculus
  siRNA target sequence for Atrx (NM_009530.1,4871-4889).
gatggtgttcagtttatgt

SEQ ID NO: 455737 - DNA, 19 bp, Mus musculus
  siRNA target sequence for Atrx (NM_009530.1,4978-4996).
cctccaggtggttagtttt

SEQ ID NO: 455738 - DNA, 19 bp, Mus musculus
  siRNA target sequence for Atrx (NM_009530.1,4981-4999).
ccaggtggttagttttctt

SEQ ID NO: 455739 - DNA, 19 bp, Mus musculus
  siRNA target sequence for Atrx (NM_009530.1,5026-5044).
ggatttcagtacagcttta

SEQ ID NO: 455740 - DNA, 19 bp, Mus musculus
  siRNA target sequence for Atrx (NM_009530.1,5045-5063).
gtggtttgtcctcttaaca

SEQ ID NO: 455741 - DNA, 19 bp, Mus musculus
  siRNA target sequence for Atrx (NM_009530.1,5047-5065).
ggtttgtcctcttaacact

SEQ ID NO: 455742 - DNA, 19 bp, Mus musculus
  siRNA target sequence for Atrx (NM_009530.1,5067-5085).
ctttgaattggatgaatga

SEQ ID NO: 455743 - DNA, 19 bp, Mus musculus
  siRNA target sequence for Atrx (NM_009530.1,5095-5113).
gtggcaggagggattaaat

SEQ ID NO: 455744 - DNA, 19 bp, Mus musculus
  siRNA target sequence for Atrx (NM_009530.1,5097-5115).
ggcaggagggattaaatga

SEQ ID NO: 455745 - DNA, 19 bp, Mus musculus
  siRNA target sequence for Atrx (NM_009530.1,5098-5116).
gcaggagggattaaatgat

SEQ ID NO: 455746 - DNA, 19 bp, Mus musculus
  siRNA target sequence for Atrx (NM_009530.1,5129-5147).
gaggtatctgagttagcaa

SEQ ID NO: 455747 - DNA, 19 bp, Mus musculus
  siRNA target sequence for Atrx (NM_009530.1,5159-5177).
cctcaggagagaagttata

SEQ ID NO: 455748 - DNA, 19 bp, Mus musculus
  siRNA target sequence for Atrx (NM_009530.1,5265-5283).
gtcggaaacttaaagacat

SEQ ID NO: 455749 - DNA, 19 bp, Mus musculus
  siRNA target sequence for Atrx (NM_009530.1,5370-5388).
caaaagctatgaactctat

SEQ ID NO: 455750 - DNA, 19 bp, Mus musculus
  siRNA target sequence for Atrx (NM_009530.1,5415-5433).
caggaacaccacttcaaaa

SEQ ID NO: 455751 - DNA, 19 bp, Mus musculus
  siRNA target sequence for Atrx (NM_009530.1,5417-5435).
ggaacaccacttcaaaata

SEQ ID NO: 455752 - DNA, 19 bp, Mus musculus
  siRNA target sequence for Atrx (NM_009530.1,5423-5441).
ccacttcaaaataacctaa

SEQ ID NO: 455753 - DNA, 19 bp, Mus musculus
  siRNA target sequence for Atrx (NM_009530.1,5444-5462).
gaatatcattgcatggtta

SEQ ID NO: 455754 - DNA, 19 bp, Mus musculus
  siRNA target sequence for Atrx (NM_009530.1,5450-5468).
cattgcatggttaacttta

SEQ ID NO: 455755 - DNA, 19 bp, Mus musculus
  siRNA target sequence for Atrx (NM_009530.1,5497-5515).
ggaattcaggaatagattt

SEQ ID NO: 455756 - DNA, 19 bp, Mus musculus
  siRNA target sequence for Atrx (NM_009530.1,5498-5516).
gaattcaggaatagattta

SEQ ID NO: 455757 - DNA, 19 bp, Mus musculus
  siRNA target sequence for Atrx (NM_009530.1,5503-5521).
caggaatagatttataaat

SEQ ID NO: 455758 - DNA, 19 bp, Mus musculus
  siRNA target sequence for Atrx (NM_009530.1,5561-5579).
gatgtgagagtgatgaaaa

SEQ ID NO: 455759 - DNA, 19 bp, Mus musculus
  siRNA target sequence for Atrx (NM_009530.1,5630-5648).
gattacacagcgctaacaa

SEQ ID NO: 455760 - DNA, 19 bp, Mus musculus
  siRNA target sequence for Atrx (NM_009530.1,5637-5655).
cagcgctaacaaagttctt

SEQ ID NO: 455761 - DNA, 19 bp, Mus musculus
  siRNA target sequence for Atrx (NM_009530.1,5658-5676).
ctccaaaacatgagtatgt

SEQ ID NO: 455762 - DNA, 19 bp, Mus musculus
  siRNA target sequence for Atrx (NM_009530.1,5677-5695).
gttagctgtgagaatgact

SEQ ID NO: 455763 - DNA, 19 bp, Mus musculus
  siRNA target sequence for Atrx (NM_009530.1,5702-5720).
cagtgcaagctctatcaat

SEQ ID NO: 455764 - DNA, 19 bp, Mus musculus
  siRNA target sequence for Atrx (NM_009530.1,5706-5724).
gcaagctctatcaatacta

SEQ ID NO: 455765 - DNA, 19 bp, Mus musculus
  siRNA target sequence for Atrx (NM_009530.1,5710-5728).
gctctatcaatactactta

SEQ ID NO: 455766 - DNA, 19 bp, Mus musculus
  siRNA target sequence for Atrx (NM_009530.1,5713-5731).
ctatcaatactacttagat

SEQ ID NO: 455767 - DNA, 19 bp, Mus musculus
  siRNA target sequence for Atrx (NM_009530.1,5722-5740).
ctacttagatcacttaaca

SEQ ID NO: 455768 - DNA, 19 bp, Mus musculus
  siRNA target sequence for Atrx (NM_009530.1,5798-5816).
gatttccaaatgttaagta

SEQ ID NO: 455769 - DNA, 19 bp, Mus musculus
  siRNA target sequence for Atrx (NM_009530.1,5937-5955).
gtttaagctcagatgaaaa

SEQ ID NO: 455770 - DNA, 19 bp, Mus musculus
  siRNA target sequence for Atrx (NM_009530.1,6029-6047).
gtcatcaaagtctggaatt

SEQ ID NO: 455771 - DNA, 19 bp, Mus musculus
  siRNA target sequence for Atrx (NM_009530.1,6031-6049).
catcaaagtctggaattca

SEQ ID NO: 455772 - DNA, 19 bp, Mus musculus
  siRNA target sequence for Atrx (NM_009530.1,6034-6052).
caaagtctggaattcaaga

SEQ ID NO: 455773 - DNA, 19 bp, Mus musculus
  siRNA target sequence for Atrx (NM_009530.1,6115-6133).
gctagatgaaagtaaaact

SEQ ID NO: 455774 - DNA, 19 bp, Mus musculus
  siRNA target sequence for Atrx (NM_009530.1,6116-6134).
ctagatgaaagtaaaacta

SEQ ID NO: 455775 - DNA, 19 bp, Mus musculus
  siRNA target sequence for Atrx (NM_009530.1,6162-6180).
ctccagattggtacaaaga

SEQ ID NO: 455776 - DNA, 19 bp, Mus musculus
  siRNA target sequence for Atrx (NM_009530.1,6164-6182).
ccagattggtacaaagatt

SEQ ID NO: 455777 - DNA, 19 bp, Mus musculus
  siRNA target sequence for Atrx (NM_009530.1,6165-6183).
cagattggtacaaagattt

SEQ ID NO: 455778 - DNA, 19 bp, Mus musculus
  siRNA target sequence for Atrx (NM_009530.1,6271-6289).
ggataaagttcttgttttt

SEQ ID NO: 455779 - DNA, 19 bp, Mus musculus
  siRNA target sequence for Atrx (NM_009530.1,6308-6326).
ctggacttgattgaagatt

SEQ ID NO: 455780 - DNA, 19 bp, Mus musculus
  siRNA target sequence for Atrx (NM_009530.1,6393-6411).
gaaagtggatccgaaatat

SEQ ID NO: 455781 - DNA, 19 bp, Mus musculus
  siRNA target sequence for Atrx (NM_009530.1,6400-6418).
gatccgaaatattgactat

SEQ ID NO: 455782 - DNA, 19 bp, Mus musculus
  siRNA target sequence for Atrx (NM_009530.1,6421-6439).
ccgcttggatggttctact

SEQ ID NO: 455783 - DNA, 19 bp, Mus musculus
  siRNA target sequence for Atrx (NM_009530.1,6422-6440).
cgcttggatggttctacta

SEQ ID NO: 455784 - DNA, 19 bp, Mus musculus
  siRNA target sequence for Atrx (NM_009530.1,6423-6441).
gcttggatggttctactaa

SEQ ID NO: 455785 - DNA, 19 bp, Mus musculus
  siRNA target sequence for Atrx (NM_009530.1,6427-6445).
ggatggttctactaatgca

SEQ ID NO: 455786 - DNA, 19 bp, Mus musculus
  siRNA target sequence for Atrx (NM_009530.1,6457-6475).
gaagtgggctgaagaattt

SEQ ID NO: 455787 - DNA, 19 bp, Mus musculus
  siRNA target sequence for Atrx (NM_009530.1,6491-6509).
gtgagagggcgattgttta

SEQ ID NO: 455788 - DNA, 19 bp, Mus musculus
  siRNA target sequence for Atrx (NM_009530.1,6495-6513).
gagggcgattgtttatcat

SEQ ID NO: 455789 - DNA, 19 bp, Mus musculus
  siRNA target sequence for Atrx (NM_009530.1,6517-6535).
cactaaagcaggatctctt

SEQ ID NO: 455790 - DNA, 19 bp, Mus musculus
  siRNA target sequence for Atrx (NM_009530.1,6524-6542).
gcaggatctcttggaatta

SEQ ID NO: 455791 - DNA, 19 bp, Mus musculus
  siRNA target sequence for Atrx (NM_009530.1,6525-6543).
caggatctcttggaattaa

SEQ ID NO: 455792 - DNA, 19 bp, Mus musculus
  siRNA target sequence for Atrx (NM_009530.1,6528-6546).
gatctcttggaattaacct

SEQ ID NO: 455793 - DNA, 19 bp, Mus musculus
  siRNA target sequence for Atrx (NM_009530.1,6544-6562).
cctggtagctgctaataga

SEQ ID NO: 455794 - DNA, 19 bp, Mus musculus
  siRNA target sequence for Atrx (NM_009530.1,6551-6569).
gctgctaatagagtgatta

SEQ ID NO: 455795 - DNA, 19 bp, Mus musculus
  siRNA target sequence for Atrx (NM_009530.1,6552-6570).
ctgctaatagagtgattat

SEQ ID NO: 455796 - DNA, 19 bp, Mus musculus
  siRNA target sequence for Atrx (NM_009530.1,6633-6651).
gacaaactaagcctgttta

SEQ ID NO: 455797 - DNA, 19 bp, Mus musculus
  siRNA target sequence for Atrx (NM_009530.1,6639-6657).
ctaagcctgtttatgtata

SEQ ID NO: 455798 - DNA, 19 bp, Mus musculus
  siRNA target sequence for Atrx (NM_009530.1,6644-6662).
cctgtttatgtatataggt

SEQ ID NO: 455799 - DNA, 19 bp, Mus musculus
  siRNA target sequence for Atrx (NM_009530.1,6678-6696).
ccatggaagataagattta

SEQ ID NO: 455800 - DNA, 19 bp, Mus musculus
  siRNA target sequence for Atrx (NM_009530.1,6682-6700).
ggaagataagatttatgat

SEQ ID NO: 455801 - DNA, 19 bp, Mus musculus
  siRNA target sequence for Atrx (NM_009530.1,6748-6766).
gcaggttgagcgccatttt

SEQ ID NO: 455802 - DNA, 19 bp, Mus musculus
  siRNA target sequence for Atrx (NM_009530.1,6749-6767).
caggttgagcgccatttta

SEQ ID NO: 455803 - DNA, 19 bp, Mus musculus
  siRNA target sequence for Atrx (NM_009530.1,6752-6770).
gttgagcgccattttacca

SEQ ID NO: 455804 - DNA, 19 bp, Mus musculus
  siRNA target sequence for Atrx (NM_009530.1,6757-6775).
gcgccattttaccatgaat

SEQ ID NO: 455805 - DNA, 19 bp, Mus musculus
  siRNA target sequence for Atrx (NM_009530.1,6772-6790).
gaatgagcttactgaactt

SEQ ID NO: 455806 - DNA, 19 bp, Mus musculus
  siRNA target sequence for Atrx (NM_009530.1,6818-6836).
gacccgaattcagaaaaga

SEQ ID NO: 455807 - DNA, 19 bp, Mus musculus
  siRNA target sequence for Atrx (NM_009530.1,6907-6925).
gcacattgtgggctatcat

SEQ ID NO: 455808 - DNA, 19 bp, Mus musculus
  siRNA target sequence for Atrx (NM_009530.1,6910-6928).
cattgtgggctatcatgaa

SEQ ID NO: 455809 - DNA, 19 bp, Mus musculus
  siRNA target sequence for Atrx (NM_009530.1,6916-6934).
gggctatcatgaacatgat

SEQ ID NO: 455810 - DNA, 19 bp, Mus musculus
  siRNA target sequence for Atrx (NM_009530.1,7022-7040).
ctgaccatgcgtttcaaca

SEQ ID NO: 455811 - DNA, 19 bp, Mus musculus
  siRNA target sequence for Atrx (NM_009530.1,7069-7087).
cactttcacctctcaaact

SEQ ID NO: 455812 - DNA, 19 bp, Mus musculus
  siRNA target sequence for Atrx (NM_009530.1,7077-7095).
cctctcaaactccttatat

SEQ ID NO: 455813 - DNA, 19 bp, Mus musculus
  siRNA target sequence for Atrx (NM_009530.1,7086-7104).
ctccttatattcctttcaa

SEQ ID NO: 455814 - DNA, 19 bp, Mus musculus
  siRNA target sequence for Atrx (NM_009530.1,7112-7130).
gccctgtccgcaatgagta

SEQ ID NO: 455815 - DNA, 19 bp, Mus musculus
  siRNA target sequence for Atrx (NM_009530.1,7141-7159).
ggaggaccttattaatcaa

SEQ ID NO: 455816 - DNA, 19 bp, Mus musculus
  siRNA target sequence for Atrx (NM_009530.1,7161-7179).
gaagagaaaaagttgtaga

SEQ ID NO: 455817 - DNA, 19 bp, Mus musculus
  siRNA target sequence for Atrx (NM_009530.1,7175-7193).
gtagaagccacgaacagta

SEQ ID NO: 455818 - DNA, 19 bp, Mus musculus
  siRNA target sequence for Atrx (NM_009530.1,7204-7222).
gaggattcagcctcttgaa

SEQ ID NO: 455819 - DNA, 19 bp, Mus musculus
  siRNA target sequence for Atrx (NM_009530.1,7206-7224).
ggattcagcctcttgaaga

SEQ ID NO: 455820 - DNA, 19 bp, Mus musculus
  siRNA target sequence for Atrx (NM_009530.1,7274-7292).
gtccaagcactagcattaa

SEQ ID NO: 455821 - DNA, 19 bp, Mus musculus
  siRNA target sequence for Atrx (NM_009530.1,7276-7294).
ccaagcactagcattaagt

SEQ ID NO: 455822 - DNA, 19 bp, Mus musculus
  siRNA target sequence for Atrx (NM_009530.1,7277-7295).
caagcactagcattaagta

SEQ ID NO: 455823 - DNA, 19 bp, Mus musculus
  siRNA target sequence for Atrx (NM_009530.1,7325-7343).
cgaagagaagcaatctaca

SEQ ID NO: 455824 - DNA, 19 bp, Mus musculus
  siRNA target sequence for Atrx (NM_009530.1,7334-7352).
gcaatctacaacgatgtat

SEQ ID NO: 455825 - DNA, 19 bp, Mus musculus
  siRNA target sequence for Atrx (NM_009530.1,7339-7357).
ctacaacgatgtattgaca

SEQ ID NO: 455826 - DNA, 19 bp, Mus musculus
  siRNA target sequence for Atrx (NM_009530.1,7345-7363).
cgatgtattgacaaagcaa

SEQ ID NO: 455827 - DNA, 19 bp, Mus musculus
  siRNA target sequence for Atrx (NM_009530.1,7380-7398).
gtgttcagcgaatacttat

SEQ ID NO: 455828 - DNA, 19 bp, Mus musculus
  siRNA target sequence for Atrx (NM_009530.1,7382-7400).
gttcagcgaatacttatga

SEQ ID NO: 455829 - DNA, 19 bp, Mus musculus
  siRNA target sequence for Atrx (NM_009530.1,7385-7403).
cagcgaatacttatgaata

SEQ ID NO: 455830 - DNA, 19 bp, Mus musculus
  siRNA target sequence for Atrx (NM_009530.1,7387-7405).
gcgaatacttatgaataga

SEQ ID NO: 455831 - DNA, 19 bp, Mus musculus
  siRNA target sequence for Atrx (NM_009530.1,7433-7451).
caacagcaacaattgactt

SEQ ID NO: 455832 - DNA, 19 bp, Mus musculus
  siRNA target sequence for Atrx (NM_009530.1,7515-7533).
ctaactaccagcagattga

SEQ ID NO: 455833 - DNA, 19 bp, Mus musculus
  siRNA target sequence for Atrx (NM_009530.1,7522-7540).
ccagcagattgatatgaga

SEQ ID NO: 455834 - DNA, 19 bp, Mus musculus
  siRNA target sequence for Atrx (NM_009530.1,7603-7621).
cacagtgagaagcaaaaat

SEQ ID NO: 455835 - DNA, 19 bp, Mus musculus
  siRNA target sequence for B230315M08Rik (NM_170758.2,420-438).
caccatgtcaggaagtgta

SEQ ID NO: 455836 - DNA, 19 bp, Mus musculus
  siRNA target sequence for B230315M08Rik (NM_170758.2,450-468).
gagtgtgtcatgtcgatat

SEQ ID NO: 455837 - DNA, 19 bp, Mus musculus
  siRNA target sequence for B230315M08Rik (NM_170758.2,506-524).
gagtgtcacttaagatact

SEQ ID NO: 455838 - DNA, 19 bp, Mus musculus
  siRNA target sequence for B230315M08Rik (NM_170758.2,508-526).
gtgtcacttaagatactat

SEQ ID NO: 455839 - DNA, 19 bp, Mus musculus
  siRNA target sequence for B230315M08Rik (NM_170758.2,839-857).
gccaccgtgaacatgacta

SEQ ID NO: 455840 - DNA, 19 bp, Mus musculus
  siRNA target sequence for B230315M08Rik (NM_170758.2,841-859).
caccgtgaacatgactatt

SEQ ID NO: 455841 - DNA, 19 bp, Mus musculus
  siRNA target sequence for B230315M08Rik (NM_170758.2,1024-1042).
gagtgccagtatgtgaatt

SEQ ID NO: 455842 - DNA, 19 bp, Mus musculus
  siRNA target sequence for B230315M08Rik (NM_170758.2,1092-1110).
ggtagaagtggtggaatat

SEQ ID NO: 455843 - DNA, 19 bp, Mus musculus
  siRNA target sequence for B230315M08Rik (NM_170758.2,1093-1111).
gtagaagtggtggaatata

SEQ ID NO: 455844 - DNA, 19 bp, Mus musculus
  siRNA target sequence for B230315M08Rik (NM_170758.2,1185-1203).
cgccaatggagattctctt

SEQ ID NO: 455845 - DNA, 19 bp, Mus musculus
  siRNA target sequence for B930060C03 (NM_172576.1,530-548).
ccttcatcatttcacaata

SEQ ID NO: 455846 - DNA, 19 bp, Mus musculus
  siRNA target sequence for B930060C03 (NM_172576.1,560-578).
cgcgatcctcaggtatcta

SEQ ID NO: 455847 - DNA, 19 bp, Mus musculus
  siRNA target sequence for B930060C03 (NM_172576.1,561-579).
gcgatcctcaggtatctat

SEQ ID NO: 455848 - DNA, 19 bp, Mus musculus
  siRNA target sequence for B930060C03 (NM_172576.1,562-580).
cgatcctcaggtatctatt

SEQ ID NO: 455849 - DNA, 19 bp, Mus musculus
  siRNA target sequence for B930060C03 (NM_172576.1,563-581).
gatcctcaggtatctatta

SEQ ID NO: 455850 - DNA, 19 bp, Mus musculus
  siRNA target sequence for B930060C03 (NM_172576.1,571-589).
ggtatctattaaaactgaa

SEQ ID NO: 455851 - DNA, 19 bp, Mus musculus
  siRNA target sequence for B930060C03 (NM_172576.1,674-692).
ccaaatcggtggtgctttt

SEQ ID NO: 455852 - DNA, 19 bp, Mus musculus
  siRNA target sequence for B930060C03 (NM_172576.1,680-698).
cggtggtgcttttacagtt

SEQ ID NO: 455853 - DNA, 19 bp, Mus musculus
  siRNA target sequence for B930060C03 (NM_172576.1,685-703).
gtgcttttacagttcttgt

SEQ ID NO: 455854 - DNA, 19 bp, Mus musculus
  siRNA target sequence for B930060C03 (NM_172576.1,748-766).
ccgagaaagcgccttgaaa

SEQ ID NO: 455855 - DNA, 19 bp, Mus musculus
  siRNA target sequence for B930060C03 (NM_172576.1,812-830).
cacttctctgaagagaaat

SEQ ID NO: 455856 - DNA, 19 bp, Mus musculus
  siRNA target sequence for B930060C03 (NM_172576.1,962-980).
gatattgaggacagaatct

SEQ ID NO: 455857 - DNA, 19 bp, Mus musculus
  siRNA target sequence for B930060C03 (NM_172576.1,1046-1064).
gggcgatacgagctgttaa

SEQ ID NO: 455858 - DNA, 19 bp, Mus musculus
  siRNA target sequence for B930060C03 (NM_172576.1,1048-1066).
gcgatacgagctgttaagt

SEQ ID NO: 455859 - DNA, 19 bp, Mus musculus
  siRNA target sequence for B930060C03 (NM_172576.1,1050-1068).
gatacgagctgttaagtga

SEQ ID NO: 455860 - DNA, 19 bp, Mus musculus
  siRNA target sequence for B930060C03 (NM_172576.1,1227-1245).
gcaatgtggttcattatct

SEQ ID NO: 455861 - DNA, 19 bp, Mus musculus
  siRNA target sequence for B930060C03 (NM_172576.1,1316-1334).
gacagcggacgttcttata

SEQ ID NO: 455862 - DNA, 19 bp, Mus musculus
  siRNA target sequence for B930060C03 (NM_172576.1,1318-1336).
cagcggacgttcttataaa

SEQ ID NO: 455863 - DNA, 19 bp, Mus musculus
  siRNA target sequence for B930060C03 (NM_172576.1,1386-1404).
cccaagtgtttctgcattt

SEQ ID NO: 455864 - DNA, 19 bp, Mus musculus
  siRNA target sequence for B930060C03 (NM_172576.1,1387-1405).
ccaagtgtttctgcattta

SEQ ID NO: 455865 - DNA, 19 bp, Mus musculus
  siRNA target sequence for B930060C03 (NM_172576.1,1388-1406).
caagtgtttctgcatttat

SEQ ID NO: 455866 - DNA, 19 bp, Mus musculus
  siRNA target sequence for B930060C03 (NM_172576.1,1431-1449).
ggtctaagtccatactgaa

SEQ ID NO: 455867 - DNA, 19 bp, Mus musculus
  siRNA target sequence for B930060C03 (NM_172576.1,1458-1476).
gcaagatctgccggaaaaa

SEQ ID NO: 455868 - DNA, 19 bp, Mus musculus
  siRNA target sequence for B930060C03 (NM_172576.1,1600-1618).
gcaacgttctagaagactt

SEQ ID NO: 455869 - DNA, 19 bp, Mus musculus
  siRNA target sequence for B930060C03 (NM_172576.1,1797-1815).
gaagaccccaagttagatt

SEQ ID NO: 455870 - DNA, 19 bp, Mus musculus
  siRNA target sequence for B930060C03 (NM_172576.1,1805-1823).
caagttagattgccaatta

SEQ ID NO: 455871 - DNA, 19 bp, Mus musculus
  siRNA target sequence for B930060C03 (NM_172576.1,1808-1826).
gttagattgccaattaaaa

SEQ ID NO: 455872 - DNA, 19 bp, Mus musculus
  siRNA target sequence for B930060C03 (NM_172576.1,1906-1924).
gagcacgcccaaaaacact

SEQ ID NO: 455873 - DNA, 19 bp, Mus musculus
  siRNA target sequence for B930060C03 (NM_172576.1,1913-1931).
cccaaaaacactgctaaat

SEQ ID NO: 455874 - DNA, 19 bp, Mus musculus
  siRNA target sequence for B930060C03 (NM_172576.1,1915-1933).
caaaaacactgctaaatct

SEQ ID NO: 455875 - DNA, 19 bp, Mus musculus
  siRNA target sequence for B930060C03 (NM_172576.1,1926-1944).
ctaaatctgctagcaaaaa

SEQ ID NO: 455876 - DNA, 19 bp, Mus musculus
  siRNA target sequence for B930060C03 (NM_172576.1,2022-2040).
cgagtgcactgcaagatgt

SEQ ID NO: 455877 - DNA, 19 bp, Mus musculus
  siRNA target sequence for B930060C03 (NM_172576.1,2025-2043).
gtgcactgcaagatgtgtt

SEQ ID NO: 455878 - DNA, 19 bp, Mus musculus
  siRNA target sequence for B930060C03 (NM_172576.1,2081-2099).
cggaagggtgctgatcata

SEQ ID NO: 455879 - DNA, 19 bp, Mus musculus
  siRNA target sequence for B930060C03 (NM_172576.1,2135-2153).
gtcagcacctcgagatcaa

SEQ ID NO: 455880 - DNA, 19 bp, Mus musculus
  siRNA target sequence for B930060C03 (NM_172576.1,2148-2166).
gatcaagcaggcagttgat

SEQ ID NO: 455881 - DNA, 19 bp, Mus musculus
  siRNA target sequence for B930060C03 (NM_172576.1,2155-2173).
caggcagttgattccttta

SEQ ID NO: 455882 - DNA, 19 bp, Mus musculus
  siRNA target sequence for B930060C03 (NM_172576.1,2157-2175).
ggcagttgattcctttaaa

SEQ ID NO: 455883 - DNA, 19 bp, Mus musculus
  siRNA target sequence for B930060C03 (NM_172576.1,2161-2179).
gttgattcctttaaatact

SEQ ID NO: 455884 - DNA, 19 bp, Mus musculus
  siRNA target sequence for B930060C03 (NM_172576.1,2198-2216).
cagcatagtgaatctaaga

SEQ ID NO: 455885 - DNA, 19 bp, Mus musculus
  siRNA target sequence for B930060C03 (NM_172576.1,2200-2218).
gcatagtgaatctaagaga

SEQ ID NO: 455886 - DNA, 19 bp, Mus musculus
  siRNA target sequence for B930060C03 (NM_172576.1,2252-2270).
cctgtaccactgaatcgaa

SEQ ID NO: 455887 - DNA, 19 bp, Mus musculus
  siRNA target sequence for B930060C03 (NM_172576.1,2305-2323).
gtctgcttttgaacaactt

SEQ ID NO: 455888 - DNA, 19 bp, Mus musculus
  siRNA target sequence for B930060C03 (NM_172576.1,2333-2351).
ctggtacggcatgatgata

SEQ ID NO: 455889 - DNA, 19 bp, Mus musculus
  siRNA target sequence for B930060C03 (NM_172576.1,2348-2366).
gatagctggccctttttga

SEQ ID NO: 455890 - DNA, 19 bp, Mus musculus
  siRNA target sequence for B930060C03 (NM_172576.1,2387-2405).
gtcccagactactatgaca

SEQ ID NO: 455891 - DNA, 19 bp, Mus musculus
  siRNA target sequence for B930060C03 (NM_172576.1,2391-2409).
cagactactatgacatcat

SEQ ID NO: 455892 - DNA, 19 bp, Mus musculus
  siRNA target sequence for B930060C03 (NM_172576.1,2418-2436).
ccattgccttaaatataat

SEQ ID NO: 455893 - DNA, 19 bp, Mus musculus
  siRNA target sequence for B930060C03 (NM_172576.1,2419-2437).
cattgccttaaatataatt

SEQ ID NO: 455894 - DNA, 19 bp, Mus musculus
  siRNA target sequence for B930060C03 (NM_172576.1,2489-2507).
gatattgagttaatgtttt

SEQ ID NO: 455895 - DNA, 19 bp, Mus musculus
  siRNA target sequence for Banf1 (NM_011793.2,234-252).
gccagtttctggtgctaaa

SEQ ID NO: 455896 - DNA, 19 bp, Mus musculus
  siRNA target sequence for Batf (NM_016767.1,387-405).
gcagctctccgcaaagaga

SEQ ID NO: 455897 - DNA, 19 bp, Mus musculus
  siRNA target sequence for Batf (NM_016767.1,388-406).
cagctctccgcaaagagat

SEQ ID NO: 455898 - DNA, 19 bp, Mus musculus
  siRNA target sequence for Batf (NM_016767.1,423-441).
gagctcaagtacttcacat

SEQ ID NO: 455899 - DNA, 19 bp, Mus musculus
  siRNA target sequence for Baz1b (NM_011714.1,382-400).
ccgcacccgggaagagtat

SEQ ID NO: 455900 - DNA, 19 bp, Mus musculus
  siRNA target sequence for Baz1b (NM_011714.1,384-402).
gcacccgggaagagtatga

SEQ ID NO: 455901 - DNA, 19 bp, Mus musculus
  siRNA target sequence for Baz1b (NM_011714.1,428-446).
cgcatttggacgtgtaaga

SEQ ID NO: 455902 - DNA, 19 bp, Mus musculus
  siRNA target sequence for Baz1b (NM_011714.1,430-448).
catttggacgtgtaagagt

SEQ ID NO: 455903 - DNA, 19 bp, Mus musculus
  siRNA target sequence for Baz1b (NM_011714.1,534-552).
ggtatgagaagcttgtttt

SEQ ID NO: 455904 - DNA, 19 bp, Mus musculus
  siRNA target sequence for Baz1b (NM_011714.1,600-618).
ctgcctggttagagatcat

SEQ ID NO: 455905 - DNA, 19 bp, Mus musculus
  siRNA target sequence for Baz1b (NM_011714.1,674-692).
ctcaaggtgaagatagtga

SEQ ID NO: 455906 - DNA, 19 bp, Mus musculus
  siRNA target sequence for Baz1b (NM_011714.1,682-700).
gaagatagtgaagattcat

SEQ ID NO: 455907 - DNA, 19 bp, Mus musculus
  siRNA target sequence for Baz1b (NM_011714.1,759-777).
ctccgtcaagtgacaaaga

SEQ ID NO: 455908 - DNA, 19 bp, Mus musculus
  siRNA target sequence for Baz1b (NM_011714.1,761-779).
ccgtcaagtgacaaagaaa

SEQ ID NO: 455909 - DNA, 19 bp, Mus musculus
  siRNA target sequence for Baz1b (NM_011714.1,762-780).
cgtcaagtgacaaagaaaa

SEQ ID NO: 455910 - DNA, 19 bp, Mus musculus
  siRNA target sequence for Baz1b (NM_011714.1,868-886).
gcgtaggtctccacgaaaa

SEQ ID NO: 455911 - DNA, 19 bp, Mus musculus
  siRNA target sequence for Baz1b (NM_011714.1,870-888).
gtaggtctccacgaaaact

SEQ ID NO: 455912 - DNA, 19 bp, Mus musculus
  siRNA target sequence for Baz1b (NM_011714.1,881-899).
cgaaaacttcctacttcat

SEQ ID NO: 455913 - DNA, 19 bp, Mus musculus
  siRNA target sequence for Baz1b (NM_011714.1,998-1016).
gcagacagcttgattcgaa

SEQ ID NO: 455914 - DNA, 19 bp, Mus musculus
  siRNA target sequence for Baz1b (NM_011714.1,1036-1054).
ggagatacttcgatacttt

SEQ ID NO: 455915 - DNA, 19 bp, Mus musculus
  siRNA target sequence for Baz1b (NM_011714.1,1037-1055).
gagatacttcgatacttta

SEQ ID NO: 455916 - DNA, 19 bp, Mus musculus
  siRNA target sequence for Baz1b (NM_011714.1,1039-1057).
gatacttcgatactttatt

SEQ ID NO: 455917 - DNA, 19 bp, Mus musculus
  siRNA target sequence for Baz1b (NM_011714.1,1098-1116).
cttgggtggtggaagatga

SEQ ID NO: 455918 - DNA, 19 bp, Mus musculus
  siRNA target sequence for Baz1b (NM_011714.1,1163-1181).
cttgacccatataagtata

SEQ ID NO: 455919 - DNA, 19 bp, Mus musculus
  siRNA target sequence for Baz1b (NM_011714.1,1166-1184).
gacccatataagtatatga

SEQ ID NO: 455920 - DNA, 19 bp, Mus musculus
  siRNA target sequence for Baz1b (NM_011714.1,1168-1186).
cccatataagtatatgact

SEQ ID NO: 455921 - DNA, 19 bp, Mus musculus
  siRNA target sequence for Baz1b (NM_011714.1,1307-1325).
cacttggagaagtcgttaa

SEQ ID NO: 455922 - DNA, 19 bp, Mus musculus
  siRNA target sequence for Baz1b (NM_011714.1,1309-1327).
cttggagaagtcgttaaat

SEQ ID NO: 455923 - DNA, 19 bp, Mus musculus
  siRNA target sequence for Baz1b (NM_011714.1,1328-1346).
ggcccaccactcaaagtaa

SEQ ID NO: 455924 - DNA, 19 bp, Mus musculus
  siRNA target sequence for Baz1b (NM_011714.1,1329-1347).
gcccaccactcaaagtaaa

SEQ ID NO: 455925 - DNA, 19 bp, Mus musculus
  siRNA target sequence for Baz1b (NM_011714.1,1343-1361).
gtaaagaactcaaagaatt

SEQ ID NO: 455926 - DNA, 19 bp, Mus musculus
  siRNA target sequence for Baz1b (NM_011714.1,1384-1402).
ggaaggggtgatgaaaatt

SEQ ID NO: 455927 - DNA, 19 bp, Mus musculus
  siRNA target sequence for Baz1b (NM_011714.1,1540-1558).
cacaggcaactccaaatca

SEQ ID NO: 455928 - DNA, 19 bp, Mus musculus
  siRNA target sequence for Baz1b (NM_011714.1,1620-1638).
ccaaagggactcagaagat

SEQ ID NO: 455929 - DNA, 19 bp, Mus musculus
  siRNA target sequence for Baz1b (NM_011714.1,1669-1687).
gccaaggtcttctggtaaa

SEQ ID NO: 455930 - DNA, 19 bp, Mus musculus
  siRNA target sequence for Baz1b (NM_011714.1,1680-1698).
ctggtaaacctcacaaaca

SEQ ID NO: 455931 - DNA, 19 bp, Mus musculus
  siRNA target sequence for Baz1b (NM_011714.1,1718-1736).
catctgattgcctattaca

SEQ ID NO: 455932 - DNA, 19 bp, Mus musculus
  siRNA target sequence for Baz1b (NM_011714.1,1723-1741).
gattgcctattacaaagaa

SEQ ID NO: 455933 - DNA, 19 bp, Mus musculus
  siRNA target sequence for Baz1b (NM_011714.1,1728-1746).
cctattacaaagaaaataa

SEQ ID NO: 455934 - DNA, 19 bp, Mus musculus
  siRNA target sequence for Baz1b (NM_011714.1,1767-1785).
gtgctctgtcctgtgttat

SEQ ID NO: 455935 - DNA, 19 bp, Mus musculus
  siRNA target sequence for Baz1b (NM_011714.1,1888-1906).
gaggtgggcctctatgtct

SEQ ID NO: 455936 - DNA, 19 bp, Mus musculus
  siRNA target sequence for Baz1b (NM_011714.1,1910-1928).
gagcaacggaaagaatatt

SEQ ID NO: 455937 - DNA, 19 bp, Mus musculus
  siRNA target sequence for Baz1b (NM_011714.1,2134-2152).
gttcctgagctgttactct

SEQ ID NO: 455938 - DNA, 19 bp, Mus musculus
  siRNA target sequence for Baz1b (NM_011714.1,2187-2205).
ctgctgtgtccctaatgga

SEQ ID NO: 455939 - DNA, 19 bp, Mus musculus
  siRNA target sequence for Baz1b (NM_011714.1,2209-2227).
cttgagtgcagataaaggt

SEQ ID NO: 455940 - DNA, 19 bp, Mus musculus
  siRNA target sequence for Baz1b (NM_011714.1,2216-2234).
gcagataaaggtggttttt

SEQ ID NO: 455941 - DNA, 19 bp, Mus musculus
  siRNA target sequence for Baz1b (NM_011714.1,2217-2235).
cagataaaggtggtttttt

SEQ ID NO: 455942 - DNA, 19 bp, Mus musculus
  siRNA target sequence for Baz1b (NM_011714.1,2225-2243).
ggtggttttttgtacttga

SEQ ID NO: 455943 - DNA, 19 bp, Mus musculus
  siRNA target sequence for Baz1b (NM_011714.1,2228-2246).
ggttttttgtacttgaaca

SEQ ID NO: 455944 - DNA, 19 bp, Mus musculus
  siRNA target sequence for Baz1b (NM_011714.1,2260-2278).
cctgctacagaccttactt

SEQ ID NO: 455945 - DNA, 19 bp, Mus musculus
  siRNA target sequence for Baz1b (NM_011714.1,2334-2352).
ccctcaccctgcattctgt

SEQ ID NO: 455946 - DNA, 19 bp, Mus musculus
  siRNA target sequence for Baz1b (NM_011714.1,2436-2454).
ccacaccatttgaggataa

SEQ ID NO: 455947 - DNA, 19 bp, Mus musculus
  siRNA target sequence for Baz1b (NM_011714.1,2437-2455).
cacaccatttgaggataat

SEQ ID NO: 455948 - DNA, 19 bp, Mus musculus
  siRNA target sequence for Baz1b (NM_011714.1,2458-2476).
ggtgcaagacgaatttcta

SEQ ID NO: 455949 - DNA, 19 bp, Mus musculus
  siRNA target sequence for Baz1b (NM_011714.1,2519-2537).
gagaagctacggatattga

SEQ ID NO: 455950 - DNA, 19 bp, Mus musculus
  siRNA target sequence for Baz1b (NM_011714.1,2549-2567).
caccgtatcctcatgacat

SEQ ID NO: 455951 - DNA, 19 bp, Mus musculus
  siRNA target sequence for Baz1b (NM_011714.1,2552-2570).
cgtatcctcatgacatact

SEQ ID NO: 455952 - DNA, 19 bp, Mus musculus
  siRNA target sequence for Baz1b (NM_011714.1,2909-2927).
gaacgaatgcggaaacaca

SEQ ID NO: 455953 - DNA, 19 bp, Mus musculus
  siRNA target sequence for Baz1b (NM_011714.1,2958-2976).
ggattgccaaggcaaaact

SEQ ID NO: 455954 - DNA, 19 bp, Mus musculus
  siRNA target sequence for Baz1b (NM_011714.1,2959-2977).
gattgccaaggcaaaactt

SEQ ID NO: 455955 - DNA, 19 bp, Mus musculus
  siRNA target sequence for Baz1b (NM_011714.1,2983-3001).
gcgcaggacacctattggt

SEQ ID NO: 455956 - DNA, 19 bp, Mus musculus
  siRNA target sequence for Baz1b (NM_011714.1,2999-3017).
ggtacagaccgcaaccata

SEQ ID NO: 455957 - DNA, 19 bp, Mus musculus
  siRNA target sequence for Baz1b (NM_011714.1,3005-3023).
gaccgcaaccataacagat

SEQ ID NO: 455958 - DNA, 19 bp, Mus musculus
  siRNA target sequence for Baz1b (NM_011714.1,3008-3026).
cgcaaccataacagatact

SEQ ID NO: 455959 - DNA, 19 bp, Mus musculus
  siRNA target sequence for Baz1b (NM_011714.1,3070-3088).
ctgggtccataatagcatt

SEQ ID NO: 455960 - DNA, 19 bp, Mus musculus
  siRNA target sequence for Baz1b (NM_011714.1,3074-3092).
gtccataatagcattgact

SEQ ID NO: 455961 - DNA, 19 bp, Mus musculus
  siRNA target sequence for Baz1b (NM_011714.1,3084-3102).
gcattgactaccggtttaa

SEQ ID NO: 455962 - DNA, 19 bp, Mus musculus
  siRNA target sequence for Baz1b (NM_011714.1,3110-3128).
cgcaaagaccacagcaatt

SEQ ID NO: 455963 - DNA, 19 bp, Mus musculus
  siRNA target sequence for Baz1b (NM_011714.1,3123-3141).
gcaatttacctgatgatga

SEQ ID NO: 455964 - DNA, 19 bp, Mus musculus
  siRNA target sequence for Baz1b (NM_011714.1,3242-3260).
caaggacaaaacttatggt

SEQ ID NO: 455965 - DNA, 19 bp, Mus musculus
  siRNA target sequence for Baz1b (NM_011714.1,3426-3444).
gcaaccaggagctcttaaa

SEQ ID NO: 455966 - DNA, 19 bp, Mus musculus
  siRNA target sequence for Baz1b (NM_011714.1,3583-3601).
ccttcaagccagtgtcata

SEQ ID NO: 455967 - DNA, 19 bp, Mus musculus
  siRNA target sequence for Baz1b (NM_011714.1,3584-3602).
cttcaagccagtgtcataa

SEQ ID NO: 455968 - DNA, 19 bp, Mus musculus
  siRNA target sequence for Baz1b (NM_011714.1,3591-3609).
ccagtgtcataaagaaatt

SEQ ID NO: 455969 - DNA, 19 bp, Mus musculus
  siRNA target sequence for Baz1b (NM_011714.1,3774-3792).
ccaggatgcatgttctact

SEQ ID NO: 455970 - DNA, 19 bp, Mus musculus
  siRNA target sequence for Baz1b (NM_011714.1,3775-3793).
caggatgcatgttctactt

SEQ ID NO: 455971 - DNA, 19 bp, Mus musculus
  siRNA target sequence for Baz1b (NM_011714.1,3795-3813).
ggatgctcgatgcatgtat

SEQ ID NO: 455972 - DNA, 19 bp, Mus musculus
  siRNA target sequence for Baz1b (NM_011714.1,3800-3818).
ctcgatgcatgtatcaagt

SEQ ID NO: 455973 - DNA, 19 bp, Mus musculus
  siRNA target sequence for Baz1b (NM_011714.1,3838-3856).
cgctaggtgcaaagtttgt

SEQ ID NO: 455974 - DNA, 19 bp, Mus musculus
  siRNA target sequence for Baz1b (NM_011714.1,3889-3907).
gtgtgacgagtgtaataaa

SEQ ID NO: 455975 - DNA, 19 bp, Mus musculus
  siRNA target sequence for Baz1b (NM_011714.1,4317-4335).
gtgaggatatccttcacaa

SEQ ID NO: 455976 - DNA, 19 bp, Mus musculus
  siRNA target sequence for Baz1b (NM_011714.1,4627-4645).
caggaaacgcaggaagttt

SEQ ID NO: 455977 - DNA, 19 bp, Mus musculus
  siRNA target sequence for Baz1b (NM_011714.1,4706-4724).
ggacggagacagaagaagt

SEQ ID NO: 455978 - DNA, 19 bp, Mus musculus
  siRNA target sequence for Baz2a (NM_054078.1,30-48).
gaatggggatgtgaatgtt

SEQ ID NO: 455979 - DNA, 19 bp, Mus musculus
  siRNA target sequence for Baz2a (NM_054078.1,42-60).
gaatgttaatggcttatct

SEQ ID NO: 455980 - DNA, 19 bp, Mus musculus
  siRNA target sequence for Baz2a (NM_054078.1,53-71).
gcttatctactgtatctca

SEQ ID NO: 455981 - DNA, 19 bp, Mus musculus
  siRNA target sequence for Baz2a (NM_054078.1,64-82).
gtatctcacactactactt

SEQ ID NO: 455982 - DNA, 19 bp, Mus musculus
  siRNA target sequence for Baz2a (NM_054078.1,151-169).
gactgtctttggaactact

SEQ ID NO: 455983 - DNA, 19 bp, Mus musculus
  siRNA target sequence for Baz2a (NM_054078.1,246-264).
cccgctcaacggtatcctt

SEQ ID NO: 455984 - DNA, 19 bp, Mus musculus
  siRNA target sequence for Baz2a (NM_054078.1,325-343).
gagttctgggccaatggta

SEQ ID NO: 455985 - DNA, 19 bp, Mus musculus
  siRNA target sequence for Baz2a (NM_054078.1,359-377).
ggcttaacttcgattcaca

SEQ ID NO: 455986 - DNA, 19 bp, Mus musculus
  siRNA target sequence for Baz2a (NM_054078.1,376-394).
caggaactgtatgattctt

SEQ ID NO: 455987 - DNA, 19 bp, Mus musculus
  siRNA target sequence for Baz2a (NM_054078.1,378-396).
ggaactgtatgattctttt

SEQ ID NO: 455988 - DNA, 19 bp, Mus musculus
  siRNA target sequence for Baz2a (NM_054078.1,422-440).
ccaatggacccccaagttt

SEQ ID NO: 455989 - DNA, 19 bp, Mus musculus
  siRNA target sequence for Baz2a (NM_054078.1,423-441).
caatggacccccaagtttt

SEQ ID NO: 455990 - DNA, 19 bp, Mus musculus
  siRNA target sequence for Baz2a (NM_054078.1,463-481).
ccaatgttggggtctagta

SEQ ID NO: 455991 - DNA, 19 bp, Mus musculus
  siRNA target sequence for Baz2a (NM_054078.1,464-482).
caatgttggggtctagtat

SEQ ID NO: 455992 - DNA, 19 bp, Mus musculus
  siRNA target sequence for Baz2a (NM_054078.1,493-511).
gcaccttcccaggatgtaa

SEQ ID NO: 455993 - DNA, 19 bp, Mus musculus
  siRNA target sequence for Baz2a (NM_054078.1,653-671).
cctctgtggagtctttaca

SEQ ID NO: 455994 - DNA, 19 bp, Mus musculus
  siRNA target sequence for Baz2a (NM_054078.1,702-720).
cacagtgagctgtctagat

SEQ ID NO: 455995 - DNA, 19 bp, Mus musculus
  siRNA target sequence for Baz2a (NM_054078.1,815-833).
gtggcagtctttatggtat

SEQ ID NO: 455996 - DNA, 19 bp, Mus musculus
  siRNA target sequence for Baz2a (NM_054078.1,821-839).
gtctttatggtatagatga

SEQ ID NO: 455997 - DNA, 19 bp, Mus musculus
  siRNA target sequence for Baz2a (NM_054078.1,910-928).
cctgctctcagtaatgcta

SEQ ID NO: 455998 - DNA, 19 bp, Mus musculus
  siRNA target sequence for Baz2a (NM_054078.1,1130-1148).
cacctagtactcaactaca

SEQ ID NO: 455999 - DNA, 19 bp, Mus musculus
  siRNA target sequence for Baz2a (NM_054078.1,1483-1501).
ctgaagagacgtattgcta

SEQ ID NO: 456000 - DNA, 19 bp, Mus musculus
  siRNA target sequence for Baz2a (NM_054078.1,1581-1599).
gggggagacttggtactat

SEQ ID NO: 456001 - DNA, 19 bp, Mus musculus
  siRNA target sequence for Baz2a (NM_054078.1,1703-1721).
gcatgcctgttggagattt

SEQ ID NO: 456002 - DNA, 19 bp, Mus musculus
  siRNA target sequence for Baz2a (NM_054078.1,1814-1832).
gaggccgacctcgaaacaa

SEQ ID NO: 456003 - DNA, 19 bp, Mus musculus
  siRNA target sequence for Baz2a (NM_054078.1,1817-1835).
gccgacctcgaaacaatga

SEQ ID NO: 456004 - DNA, 19 bp, Mus musculus
  siRNA target sequence for Baz2a (NM_054078.1,1879-1897).
ggtcggcctcctaagatca

SEQ ID NO: 456005 - DNA, 19 bp, Mus musculus
  siRNA target sequence for Baz2a (NM_054078.1,1880-1898).
gtcggcctcctaagatcaa

SEQ ID NO: 456006 - DNA, 19 bp, Mus musculus
  siRNA target sequence for Baz2a (NM_054078.1,1882-1900).
cggcctcctaagatcaaaa

SEQ ID NO: 456007 - DNA, 19 bp, Mus musculus
  siRNA target sequence for Baz2a (NM_054078.1,1883-1901).
ggcctcctaagatcaaaat

SEQ ID NO: 456008 - DNA, 19 bp, Mus musculus
  siRNA target sequence for Baz2a (NM_054078.1,1965-1983).
gagtgaggacgataaagca

SEQ ID NO: 456009 - DNA, 19 bp, Mus musculus
  siRNA target sequence for Baz2a (NM_054078.1,2050-2068).
caagggcaggccagaaaca

SEQ ID NO: 456010 - DNA, 19 bp, Mus musculus
  siRNA target sequence for Baz2a (NM_054078.1,2475-2493).
caaagatgttcctagtcta

SEQ ID NO: 456011 - DNA, 19 bp, Mus musculus
  siRNA target sequence for Baz2a (NM_054078.1,2502-2520).
gcaggagggactcttatgt

SEQ ID NO: 456012 - DNA, 19 bp, Mus musculus
  siRNA target sequence for Baz2a (NM_054078.1,2800-2818).
cttaacagctccaccatta

SEQ ID NO: 456013 - DNA, 19 bp, Mus musculus
  siRNA target sequence for Baz2a (NM_054078.1,2855-2873).
ctagctgcaggaagaacaa

SEQ ID NO: 456014 - DNA, 19 bp, Mus musculus
  siRNA target sequence for Baz2a (NM_054078.1,2889-2907).
ccgactccggagactgaaa

SEQ ID NO: 456015 - DNA, 19 bp, Mus musculus
  siRNA target sequence for Baz2a (NM_054078.1,2890-2908).
cgactccggagactgaaaa

SEQ ID NO: 456016 - DNA, 19 bp, Mus musculus
  siRNA target sequence for Baz2a (NM_054078.1,3000-3018).
ggaaaccagtggcatagaa

SEQ ID NO: 456017 - DNA, 19 bp, Mus musculus
  siRNA target sequence for Baz2a (NM_054078.1,3056-3074).
gccgcaggggtcgaaaaga

SEQ ID NO: 456018 - DNA, 19 bp, Mus musculus
  siRNA target sequence for Baz2a (NM_054078.1,3057-3075).
ccgcaggggtcgaaaagaa

SEQ ID NO: 456019 - DNA, 19 bp, Mus musculus
  siRNA target sequence for Baz2a (NM_054078.1,3118-3136).
cgccatatagaaaaactca

SEQ ID NO: 456020 - DNA, 19 bp, Mus musculus
  siRNA target sequence for Baz2a (NM_054078.1,3141-3159).
gcgtcagctcttctttaga

SEQ ID NO: 456021 - DNA, 19 bp, Mus musculus
  siRNA target sequence for Baz2a (NM_054078.1,3142-3160).
cgtcagctcttctttagaa

SEQ ID NO: 456022 - DNA, 19 bp, Mus musculus
  siRNA target sequence for Baz2a (NM_054078.1,3204-3222).
gggtcaagaccgctataga

SEQ ID NO: 456023 - DNA, 19 bp, Mus musculus
  siRNA target sequence for Baz2a (NM_054078.1,3214-3232).
cgctatagacgccattact

SEQ ID NO: 456024 - DNA, 19 bp, Mus musculus
  siRNA target sequence for Baz2a (NM_054078.1,3279-3297).
gagcacagttactgaagat

SEQ ID NO: 456025 - DNA, 19 bp, Mus musculus
  siRNA target sequence for Baz2a (NM_054078.1,3327-3345).
ggaagtagtcacttcaaca

SEQ ID NO: 456026 - DNA, 19 bp, Mus musculus
  siRNA target sequence for Baz2a (NM_054078.1,3355-3373).
gcccgagcctctgtaaaga

SEQ ID NO: 456027 - DNA, 19 bp, Mus musculus
  siRNA target sequence for Baz2a (NM_054078.1,3385-3403).
ggctccaatgcctctactt

SEQ ID NO: 456028 - DNA, 19 bp, Mus musculus
  siRNA target sequence for Baz2a (NM_054078.1,3421-3439).
ggccgacctcgaaaaccta

SEQ ID NO: 456029 - DNA, 19 bp, Mus musculus
  siRNA target sequence for Baz2a (NM_054078.1,3422-3440).
gccgacctcgaaaacctaa

SEQ ID NO: 456030 - DNA, 19 bp, Mus musculus
  siRNA target sequence for Baz2a (NM_054078.1,3473-3491).
ccaccattagggaatgtga

SEQ ID NO: 456031 - DNA, 19 bp, Mus musculus
  siRNA target sequence for Baz2a (NM_054078.1,3474-3492).
caccattagggaatgtgat

SEQ ID NO: 456032 - DNA, 19 bp, Mus musculus
  siRNA target sequence for Baz2a (NM_054078.1,3477-3495).
cattagggaatgtgattca

SEQ ID NO: 456033 - DNA, 19 bp, Mus musculus
  siRNA target sequence for Baz2a (NM_054078.1,3548-3566).
ctacccagccccatcttca

SEQ ID NO: 456034 - DNA, 19 bp, Mus musculus
  siRNA target sequence for Baz2a (NM_054078.1,3637-3655).
cagtctgccttcttgtctt

SEQ ID NO: 456035 - DNA, 19 bp, Mus musculus
  siRNA target sequence for Baz2a (NM_054078.1,4037-4055).
ctgggctggggcaaccaaa

SEQ ID NO: 456036 - DNA, 19 bp, Mus musculus
  siRNA target sequence for Baz2a (NM_054078.1,4067-4085).
gaccccctagcaagttctt

SEQ ID NO: 456037 - DNA, 19 bp, Mus musculus
  siRNA target sequence for Baz2a (NM_054078.1,4090-4108).
caggtggagcagcattact

SEQ ID NO: 456038 - DNA, 19 bp, Mus musculus
  siRNA target sequence for Baz2a (NM_054078.1,4092-4110).
ggtggagcagcattactta

SEQ ID NO: 456039 - DNA, 19 bp, Mus musculus
  siRNA target sequence for Baz2a (NM_054078.1,4093-4111).
gtggagcagcattacttaa

SEQ ID NO: 456040 - DNA, 19 bp, Mus musculus
  siRNA target sequence for Baz2a (NM_054078.1,4261-4279).
gactttttgcaggaagttt

SEQ ID NO: 456041 - DNA, 19 bp, Mus musculus
  siRNA target sequence for Baz2a (NM_054078.1,4290-4308).
cttaactgatcccatcttt

SEQ ID NO: 456042 - DNA, 19 bp, Mus musculus
  siRNA target sequence for Baz2a (NM_054078.1,4564-4582).
cctcagcggcagaacaaca

SEQ ID NO: 456043 - DNA, 19 bp, Mus musculus
  siRNA target sequence for Baz2a (NM_054078.1,4611-4629).
ggctgttctggagcaaaat

SEQ ID NO: 456044 - DNA, 19 bp, Mus musculus
  siRNA target sequence for Baz2a (NM_054078.1,4727-4745).
cctcaactgagatatccta

SEQ ID NO: 456045 - DNA, 19 bp, Mus musculus
  siRNA target sequence for Baz2a (NM_054078.1,4728-4746).
ctcaactgagatatcctat

SEQ ID NO: 456046 - DNA, 19 bp, Mus musculus
  siRNA target sequence for Baz2a (NM_054078.1,4887-4905).
ccggaagggcgataatgat

SEQ ID NO: 456047 - DNA, 19 bp, Mus musculus
  siRNA target sequence for Baz2a (NM_054078.1,4895-4913).
gcgataatgatgagtttct

SEQ ID NO: 456048 - DNA, 19 bp, Mus musculus
  siRNA target sequence for Baz2a (NM_054078.1,4936-4954).
cgaggctgccacatttact

SEQ ID NO: 456049 - DNA, 19 bp, Mus musculus
  siRNA target sequence for Baz2a (NM_054078.1,5046-5064).
gcctggttttccaaaacga

SEQ ID NO: 456050 - DNA, 19 bp, Mus musculus
  siRNA target sequence for Baz2a (NM_054078.1,5068-5086).
cagaagcggaaaagtagtt

SEQ ID NO: 456051 - DNA, 19 bp, Mus musculus
  siRNA target sequence for Baz2a (NM_054078.1,5070-5088).
gaagcggaaaagtagtttt

SEQ ID NO: 456052 - DNA, 19 bp, Mus musculus
  siRNA target sequence for Baz2a (NM_054078.1,5073-5091).
gcggaaaagtagttttcca

SEQ ID NO: 456053 - DNA, 19 bp, Mus musculus
  siRNA target sequence for Baz2a (NM_054078.1,5197-5215).
cggcgacattcgatgagaa

SEQ ID NO: 456054 - DNA, 19 bp, Mus musculus
  siRNA target sequence for Baz2a (NM_054078.1,5321-5339).
gataccgacgtgtcatcaa

SEQ ID NO: 456055 - DNA, 19 bp, Mus musculus
  siRNA target sequence for Baz2a (NM_054078.1,5377-5395).
ctccgtggagggtacacta

SEQ ID NO: 456056 - DNA, 19 bp, Mus musculus
  siRNA target sequence for Baz2a (NM_054078.1,5391-5409).
cactagctcagaagagttt

SEQ ID NO: 456057 - DNA, 19 bp, Mus musculus
  siRNA target sequence for Baz2a (NM_054078.1,5487-5505).
cgtcatgcgacgcttcttt

SEQ ID NO: 456058 - DNA, 19 bp, Mus musculus
  siRNA target sequence for Baz2a (NM_054078.1,5508-5526).
gagccgctgggaggaattt

SEQ ID NO: 456059 - DNA, 19 bp, Mus musculus
  siRNA target sequence for Baz2a (NM_054078.1,5510-5528).
gccgctgggaggaatttta

SEQ ID NO: 456060 - DNA, 19 bp, Mus musculus
  siRNA target sequence for Baz2a (NM_054078.1,5511-5529).
ccgctgggaggaattttat

SEQ ID NO: 456061 - DNA, 19 bp, Mus musculus
  siRNA target sequence for Bbx (NM_027444.1,344-362).
ggacggaaaacgaccaaaa

SEQ ID NO: 456062 - DNA, 19 bp, Mus musculus
  siRNA target sequence for Bbx (NM_027444.1,379-397).
ggcatccgttgctagctaa

SEQ ID NO: 456063 - DNA, 19 bp, Mus musculus
  siRNA target sequence for Bbx (NM_027444.1,532-550).
gagcccggagaccaatgaa

SEQ ID NO: 456064 - DNA, 19 bp, Mus musculus
  siRNA target sequence for Bbx (NM_027444.1,617-635).
ccgaggtgctaccaagata

SEQ ID NO: 456065 - DNA, 19 bp, Mus musculus
  siRNA target sequence for Bbx (NM_027444.1,698-716).
ggagtataaagatgcattt

SEQ ID NO: 456066 - DNA, 19 bp, Mus musculus
  siRNA target sequence for Bbx (NM_027444.1,773-791).
gccaacacccactgtcaat

SEQ ID NO: 456067 - DNA, 19 bp, Mus musculus
  siRNA target sequence for Bbx (NM_027444.1,788-806).
caatccacggaagaaactt

SEQ ID NO: 456068 - DNA, 19 bp, Mus musculus
  siRNA target sequence for Bbx (NM_027444.1,815-833).
cccacctgactcttcaaga

SEQ ID NO: 456069 - DNA, 19 bp, Mus musculus
  siRNA target sequence for Bbx (NM_027444.1,973-991).
ggacttgcaggcctgatat

SEQ ID NO: 456070 - DNA, 19 bp, Mus musculus
  siRNA target sequence for Bbx (NM_027444.1,974-992).
gacttgcaggcctgatatt

SEQ ID NO: 456071 - DNA, 19 bp, Mus musculus
  siRNA target sequence for Bbx (NM_027444.1,983-1001).
gcctgatatttcagaatca

SEQ ID NO: 456072 - DNA, 19 bp, Mus musculus
  siRNA target sequence for Bbx (NM_027444.1,1064-1082).
ccccgatgcgccttcaaaa

SEQ ID NO: 456073 - DNA, 19 bp, Mus musculus
  siRNA target sequence for Bbx (NM_027444.1,1209-1227).
gcatcagagggggtgaaaa

SEQ ID NO: 456074 - DNA, 19 bp, Mus musculus
  siRNA target sequence for Bbx (NM_027444.1,1210-1228).
catcagagggggtgaaaat

SEQ ID NO: 456075 - DNA, 19 bp, Mus musculus
  siRNA target sequence for Bbx (NM_027444.1,1259-1277).
gtcagatggaggaagaatt

SEQ ID NO: 456076 - DNA, 19 bp, Mus musculus
  siRNA target sequence for Bbx (NM_027444.1,1378-1396).
gcaacgtgagagagtctaa

SEQ ID NO: 456077 - DNA, 19 bp, Mus musculus
  siRNA target sequence for Bbx (NM_027444.1,1419-1437).
ctacagatggataatgtca

SEQ ID NO: 456078 - DNA, 19 bp, Mus musculus
  siRNA target sequence for Bbx (NM_027444.1,1479-1497).
ccagaggatgatcagaaat

SEQ ID NO: 456079 - DNA, 19 bp, Mus musculus
  siRNA target sequence for Bbx (NM_027444.1,1525-1543).
ctgccagtagcaagataat

SEQ ID NO: 456080 - DNA, 19 bp, Mus musculus
  siRNA target sequence for Bbx (NM_027444.1,1527-1545).
gccagtagcaagataataa

SEQ ID NO: 456081 - DNA, 19 bp, Mus musculus
  siRNA target sequence for Bbx (NM_027444.1,1528-1546).
ccagtagcaagataataat

SEQ ID NO: 456082 - DNA, 19 bp, Mus musculus
  siRNA target sequence for Bbx (NM_027444.1,1584-1602).
cctcacggaattatgatca

SEQ ID NO: 456083 - DNA, 19 bp, Mus musculus
  siRNA target sequence for Bbx (NM_027444.1,1585-1603).
ctcacggaattatgatcat

SEQ ID NO: 456084 - DNA, 19 bp, Mus musculus
  siRNA target sequence for Bbx (NM_027444.1,1610-1628).
cccaaccacgctaaacaaa

SEQ ID NO: 456085 - DNA, 19 bp, Mus musculus
  siRNA target sequence for Bbx (NM_027444.1,1668-1686).
gatcgacacggaaatgaca

SEQ ID NO: 456086 - DNA, 19 bp, Mus musculus
  siRNA target sequence for Bbx (NM_027444.1,1671-1689).
cgacacggaaatgacaaat

SEQ ID NO: 456087 - DNA, 19 bp, Mus musculus
  siRNA target sequence for Bbx (NM_027444.1,1939-1957).
ctcgacctccagatttcct

SEQ ID NO: 456088 - DNA, 19 bp, Mus musculus
  siRNA target sequence for Bbx (NM_027444.1,1941-1959).
cgacctccagatttcctta

SEQ ID NO: 456089 - DNA, 19 bp, Mus musculus
  siRNA target sequence for Bbx (NM_027444.1,1945-1963).
ctccagatttccttagcat

SEQ ID NO: 456090 - DNA, 19 bp, Mus musculus
  siRNA target sequence for Bbx (NM_027444.1,1991-2009).
ggtgccagagggcataaaa

SEQ ID NO: 456091 - DNA, 19 bp, Mus musculus
  siRNA target sequence for Bbx (NM_027444.1,2069-2087).
gcctgaggatagtgattgt

SEQ ID NO: 456092 - DNA, 19 bp, Mus musculus
  siRNA target sequence for Bbx (NM_027444.1,2071-2089).
ctgaggatagtgattgtca

SEQ ID NO: 456093 - DNA, 19 bp, Mus musculus
  siRNA target sequence for Bbx (NM_027444.1,2177-2195).
cacctctctccgagctaat

SEQ ID NO: 456094 - DNA, 19 bp, Mus musculus
  siRNA target sequence for Bbx (NM_027444.1,2179-2197).
cctctctccgagctaatgt

SEQ ID NO: 456095 - DNA, 19 bp, Mus musculus
  siRNA target sequence for Bbx (NM_027444.1,2180-2198).
ctctctccgagctaatgtt

SEQ ID NO: 456096 - DNA, 19 bp, Mus musculus
  siRNA target sequence for Bbx (NM_027444.1,2227-2245).
gaaactcctctgatcatga

SEQ ID NO: 456097 - DNA, 19 bp, Mus musculus
  siRNA target sequence for Bbx (NM_027444.1,2290-2308).
ccagtgggagcaagaagtt

SEQ ID NO: 456098 - DNA, 19 bp, Mus musculus
  siRNA target sequence for Bbx (NM_027444.1,2293-2311).
gtgggagcaagaagtttaa

SEQ ID NO: 456099 - DNA, 19 bp, Mus musculus
  siRNA target sequence for Bbx (NM_027444.1,2387-2405).
ccctcaatatagtcctatt

SEQ ID NO: 456100 - DNA, 19 bp, Mus musculus
  siRNA target sequence for Bbx (NM_027444.1,2388-2406).
cctcaatatagtcctatta

SEQ ID NO: 456101 - DNA, 19 bp, Mus musculus
  siRNA target sequence for Bbx (NM_027444.1,2391-2409).
caatatagtcctattacat

SEQ ID NO: 456102 - DNA, 19 bp, Mus musculus
  siRNA target sequence for Bbx (NM_027444.1,2412-2430).
gaccggaaatgcgtatcta

SEQ ID NO: 456103 - DNA, 19 bp, Mus musculus
  siRNA target sequence for Bbx (NM_027444.1,2414-2432).
ccggaaatgcgtatctact

SEQ ID NO: 456104 - DNA, 19 bp, Mus musculus
  siRNA target sequence for Bbx (NM_027444.1,2422-2440).
gcgtatctactccaagaaa

SEQ ID NO: 456105 - DNA, 19 bp, Mus musculus
  siRNA target sequence for Bbx (NM_027444.1,2462-2480).
gtcctcagaatcgactaaa

SEQ ID NO: 456106 - DNA, 19 bp, Mus musculus
  siRNA target sequence for Bbx (NM_027444.1,2490-2508).
ggaagtggggataaatggt

SEQ ID NO: 456107 - DNA, 19 bp, Mus musculus
  siRNA target sequence for Bbx (NM_027444.1,2580-2598).
gagcctgcttttaaggtta

SEQ ID NO: 456108 - DNA, 19 bp, Mus musculus
  siRNA target sequence for Bbx (NM_027444.1,2582-2600).
gcctgcttttaaggttaaa

SEQ ID NO: 456109 - DNA, 19 bp, Mus musculus
  siRNA target sequence for Bbx (NM_027444.1,2654-2672).
ggttggcagccaaaagaga

SEQ ID NO: 456110 - DNA, 19 bp, Mus musculus
  siRNA target sequence for Bbx (NM_027444.1,2743-2761).
ctttggatgacaaaccaaa

SEQ ID NO: 456111 - DNA, 19 bp, Mus musculus
  siRNA target sequence for Bbx (NM_027444.1,2798-2816).
gacatactgcggtgacaat

SEQ ID NO: 456112 - DNA, 19 bp, Mus musculus
  siRNA target sequence for Bbx (NM_027444.1,2983-3001).
cgcaggctcctgtacttat

SEQ ID NO: 456113 - DNA, 19 bp, Mus musculus
  siRNA target sequence for Bbx (NM_027444.1,2984-3002).
gcaggctcctgtacttatt

SEQ ID NO: 456114 - DNA, 19 bp, Mus musculus
  siRNA target sequence for Bbx (NM_027444.1,2985-3003).
caggctcctgtacttattt

SEQ ID NO: 456115 - DNA, 19 bp, Mus musculus
  siRNA target sequence for Bbx (NM_027444.1,2987-3005).
ggctcctgtacttatttct

SEQ ID NO: 456116 - DNA, 19 bp, Mus musculus
  siRNA target sequence for Bbx (NM_027444.1,2988-3006).
gctcctgtacttatttctt

SEQ ID NO: 456117 - DNA, 19 bp, Mus musculus
  siRNA target sequence for BC004018 (NM_030562.1,337-355).
cggctcactgacaacttca

SEQ ID NO: 456118 - DNA, 19 bp, Mus musculus
  siRNA target sequence for BC004018 (NM_030562.1,339-357).
gctcactgacaacttcatt

SEQ ID NO: 456119 - DNA, 19 bp, Mus musculus
  siRNA target sequence for BC004018 (NM_030562.1,371-389).
gtcgagacttcgccaatat

SEQ ID NO: 456120 - DNA, 19 bp, Mus musculus
  siRNA target sequence for BC004018 (NM_030562.1,373-391).
cgagacttcgccaatatga

SEQ ID NO: 456121 - DNA, 19 bp, Mus musculus
  siRNA target sequence for BC004018 (NM_030562.1,536-554).
gtaacctccgccacttgat

SEQ ID NO: 456122 - DNA, 19 bp, Mus musculus
  siRNA target sequence for BC004018 (NM_030562.1,549-567).
cttgatcctcggcaacaat

SEQ ID NO: 456123 - DNA, 19 bp, Mus musculus
  siRNA target sequence for BC004018 (NM_030562.1,616-634).
gtggaggacctggatctat

SEQ ID NO: 456124 - DNA, 19 bp, Mus musculus
  siRNA target sequence for BC004018 (NM_030562.1,777-795).
gacctccaaccgtctacat

SEQ ID NO: 456125 - DNA, 19 bp, Mus musculus
  siRNA target sequence for BC004018 (NM_030562.1,779-797).
cctccaaccgtctacataa

SEQ ID NO: 456126 - DNA, 19 bp, Mus musculus
  siRNA target sequence for BC004018 (NM_030562.1,780-798).
ctccaaccgtctacataaa

SEQ ID NO: 456127 - DNA, 19 bp, Mus musculus
  siRNA target sequence for BC004018 (NM_030562.1,782-800).
ccaaccgtctacataaatt

SEQ ID NO: 456128 - DNA, 19 bp, Mus musculus
  siRNA target sequence for BC004018 (NM_030562.1,967-985).
ctcactgaccgctatttct

SEQ ID NO: 456129 - DNA, 19 bp, Mus musculus
  siRNA target sequence for BC004018 (NM_030562.1,993-1011).
cccggaggaggaatttcta

SEQ ID NO: 456130 - DNA, 19 bp, Mus musculus
  siRNA target sequence for BC004018 (NM_030562.1,994-1012).
ccggaggaggaatttctat

SEQ ID NO: 456131 - DNA, 19 bp, Mus musculus
  siRNA target sequence for BC004701 (NM_146235.2,106-124).
cacaactggccgagagtta

SEQ ID NO: 456132 - DNA, 19 bp, Mus musculus
  siRNA target sequence for BC004701 (NM_146235.2,115-133).
ccgagagttacctgagata

SEQ ID NO: 456133 - DNA, 19 bp, Mus musculus
  siRNA target sequence for BC004701 (NM_146235.2,116-134).
cgagagttacctgagatat

SEQ ID NO: 456134 - DNA, 19 bp, Mus musculus
  siRNA target sequence for BC004701 (NM_146235.2,146-164).
caaagaagcagctaagaat

SEQ ID NO: 456135 - DNA, 19 bp, Mus musculus
  siRNA target sequence for BC004701 (NM_146235.2,173-191).
ggaagaatcattgaaactt

SEQ ID NO: 456136 - DNA, 19 bp, Mus musculus
  siRNA target sequence for BC004701 (NM_146235.2,369-387).
gaaggcatcgcttttctct

SEQ ID NO: 456137 - DNA, 19 bp, Mus musculus
  siRNA target sequence for BC004701 (NM_146235.2,386-404).
ctatagcctgtataaggat

SEQ ID NO: 456138 - DNA, 19 bp, Mus musculus
  siRNA target sequence for BC004701 (NM_146235.2,416-434).
gggcatcttagcagatgat

SEQ ID NO: 456139 - DNA, 19 bp, Mus musculus
  siRNA target sequence for BC004701 (NM_146235.2,466-484).
ctttcctgtcaggtatgtt

SEQ ID NO: 456140 - DNA, 19 bp, Mus musculus
  siRNA target sequence for BC004701 (NM_146235.2,470-488).
cctgtcaggtatgtttgat

SEQ ID NO: 456141 - DNA, 19 bp, Mus musculus
  siRNA target sequence for BC004701 (NM_146235.2,518-536).
catgccaaccaatctcatt

SEQ ID NO: 456142 - DNA, 19 bp, Mus musculus
  siRNA target sequence for BC004701 (NM_146235.2,521-539).
gccaaccaatctcattaat

SEQ ID NO: 456143 - DNA, 19 bp, Mus musculus
  siRNA target sequence for BC004701 (NM_146235.2,522-540).
ccaaccaatctcattaata

SEQ ID NO: 456144 - DNA, 19 bp, Mus musculus
  siRNA target sequence for BC004701 (NM_146235.2,625-643).
gcctgacacggattcaaca

SEQ ID NO: 456145 - DNA, 19 bp, Mus musculus
  siRNA target sequence for BC004701 (NM_146235.2,626-644).
cctgacacggattcaacaa

SEQ ID NO: 456146 - DNA, 19 bp, Mus musculus
  siRNA target sequence for BC004701 (NM_146235.2,627-645).
ctgacacggattcaacaaa

SEQ ID NO: 456147 - DNA, 19 bp, Mus musculus
  siRNA target sequence for BC004701 (NM_146235.2,631-649).
cacggattcaacaaaggaa

SEQ ID NO: 456148 - DNA, 19 bp, Mus musculus
  siRNA target sequence for BC004701 (NM_146235.2,657-675).
gtgatcactacctaccaaa

SEQ ID NO: 456149 - DNA, 19 bp, Mus musculus
  siRNA target sequence for BC004701 (NM_146235.2,662-680).
cactacctaccaaatgtta

SEQ ID NO: 456150 - DNA, 19 bp, Mus musculus
  siRNA target sequence for BC004701 (NM_146235.2,664-682).
ctacctaccaaatgttact

SEQ ID NO: 456151 - DNA, 19 bp, Mus musculus
  siRNA target sequence for BC004701 (NM_146235.2,667-685).
cctaccaaatgttactcaa

SEQ ID NO: 456152 - DNA, 19 bp, Mus musculus
  siRNA target sequence for BC004701 (NM_146235.2,695-713).
gcaacttgcaagctttaat

SEQ ID NO: 456153 - DNA, 19 bp, Mus musculus
  siRNA target sequence for BC004701 (NM_146235.2,734-752).
ctacgtcatccttgatgaa

SEQ ID NO: 456154 - DNA, 19 bp, Mus musculus
  siRNA target sequence for BC004701 (NM_146235.2,747-765).
gatgaagcccataagatca

SEQ ID NO: 456155 - DNA, 19 bp, Mus musculus
  siRNA target sequence for BC004701 (NM_146235.2,799-817).
gtgctattcctgcaagtaa

SEQ ID NO: 456156 - DNA, 19 bp, Mus musculus
  siRNA target sequence for BC004701 (NM_146235.2,834-852).
ggtacaccagtccagaata

SEQ ID NO: 456157 - DNA, 19 bp, Mus musculus
  siRNA target sequence for BC004701 (NM_146235.2,835-853).
gtacaccagtccagaataa

SEQ ID NO: 456158 - DNA, 19 bp, Mus musculus
  siRNA target sequence for BC004701 (NM_146235.2,838-856).
caccagtccagaataacct

SEQ ID NO: 456159 - DNA, 19 bp, Mus musculus
  siRNA target sequence for BC004701 (NM_146235.2,896-914).
ctccttgttaggaacatta

SEQ ID NO: 456160 - DNA, 19 bp, Mus musculus
  siRNA target sequence for BC004701 (NM_146235.2,932-950).
gtatgagcatccgattatt

SEQ ID NO: 456161 - DNA, 19 bp, Mus musculus
  siRNA target sequence for BC004701 (NM_146235.2,992-1010).
gggacttaagatatctgaa

SEQ ID NO: 456162 - DNA, 19 bp, Mus musculus
  siRNA target sequence for BC004701 (NM_146235.2,1067-1085).
gacgaaaaaggcagacaat

SEQ ID NO: 456163 - DNA, 19 bp, Mus musculus
  siRNA target sequence for BC004701 (NM_146235.2,1194-1212).
caagaggaaatttatagga

SEQ ID NO: 456164 - DNA, 19 bp, Mus musculus
  siRNA target sequence for BC004701 (NM_146235.2,1210-1228).
ggaagtttgtgtctttaga

SEQ ID NO: 456165 - DNA, 19 bp, Mus musculus
  siRNA target sequence for BC004701 (NM_146235.2,1211-1229).
gaagtttgtgtctttagat

SEQ ID NO: 456166 - DNA, 19 bp, Mus musculus
  siRNA target sequence for BC004701 (NM_146235.2,1230-1248).
cacatcaaggagttgttaa

SEQ ID NO: 456167 - DNA, 19 bp, Mus musculus
  siRNA target sequence for BC004701 (NM_146235.2,1269-1287).
gctgagctgggtgtcttaa

SEQ ID NO: 456168 - DNA, 19 bp, Mus musculus
  siRNA target sequence for BC004701 (NM_146235.2,1270-1288).
ctgagctgggtgtcttaaa

SEQ ID NO: 456169 - DNA, 19 bp, Mus musculus
  siRNA target sequence for BC004701 (NM_146235.2,1327-1345).
cttgccgtttgctgaatct

SEQ ID NO: 456170 - DNA, 19 bp, Mus musculus
  siRNA target sequence for BC004701 (NM_146235.2,1344-1362).
ctaggaactgccacattct

SEQ ID NO: 456171 - DNA, 19 bp, Mus musculus
  siRNA target sequence for BC004701 (NM_146235.2,1413-1431).
gatcacttacctgacaaaa

SEQ ID NO: 456172 - DNA, 19 bp, Mus musculus
  siRNA target sequence for BC004701 (NM_146235.2,1443-1461).
gagtctggaaaaatgatat

SEQ ID NO: 456173 - DNA, 19 bp, Mus musculus
  siRNA target sequence for BC004701 (NM_146235.2,1469-1487).
gtccctgctagaaagactt

SEQ ID NO: 456174 - DNA, 19 bp, Mus musculus
  siRNA target sequence for BC004701 (NM_146235.2,1512-1530).
gtgttttctcagtcgataa

SEQ ID NO: 456175 - DNA, 19 bp, Mus musculus
  siRNA target sequence for BC004701 (NM_146235.2,1521-1539).
cagtcgataaaaattctca

SEQ ID NO: 456176 - DNA, 19 bp, Mus musculus
  siRNA target sequence for BC004701 (NM_146235.2,1525-1543).
cgataaaaattctcaacat

SEQ ID NO: 456177 - DNA, 19 bp, Mus musculus
  siRNA target sequence for BC004701 (NM_146235.2,1562-1580).
gaacaagcactttaagaca

SEQ ID NO: 456178 - DNA, 19 bp, Mus musculus
  siRNA target sequence for BC004701 (NM_146235.2,1584-1602).
cgaattgatggcacagtta

SEQ ID NO: 456179 - DNA, 19 bp, Mus musculus
  siRNA target sequence for BC004701 (NM_146235.2,1593-1611).
ggcacagttactcatcttt

SEQ ID NO: 456180 - DNA, 19 bp, Mus musculus
  siRNA target sequence for BC004701 (NM_146235.2,1641-1659).
cagcaaaataaagaatact

SEQ ID NO: 456181 - DNA, 19 bp, Mus musculus
  siRNA target sequence for BC004701 (NM_146235.2,1643-1661).
gcaaaataaagaatactca

SEQ ID NO: 456182 - DNA, 19 bp, Mus musculus
  siRNA target sequence for BC004701 (NM_146235.2,1686-1704).
ggtggtgttggcctaacat

SEQ ID NO: 456183 - DNA, 19 bp, Mus musculus
  siRNA target sequence for BC004701 (NM_146235.2,1711-1729).
cagcgactagagttgtcat

SEQ ID NO: 456184 - DNA, 19 bp, Mus musculus
  siRNA target sequence for BC004701 (NM_146235.2,1742-1760).
ctggaaccctgcaactgat

SEQ ID NO: 456185 - DNA, 19 bp, Mus musculus
  siRNA target sequence for BC004701 (NM_146235.2,1809-1827).
gtggtttatcgactaatca

SEQ ID NO: 456186 - DNA, 19 bp, Mus musculus
  siRNA target sequence for BC004701 (NM_146235.2,1812-1830).
gtttatcgactaatcactt

SEQ ID NO: 456187 - DNA, 19 bp, Mus musculus
  siRNA target sequence for BC004701 (NM_146235.2,1880-1898).
cttgatcagacaaactact

SEQ ID NO: 456188 - DNA, 19 bp, Mus musculus
  siRNA target sequence for BC004701 (NM_146235.2,1919-1937).
ccgctatttcaccaaacaa

SEQ ID NO: 456189 - DNA, 19 bp, Mus musculus
  siRNA target sequence for BC004701 (NM_146235.2,1921-1939).
gctatttcaccaaacaaga

SEQ ID NO: 456190 - DNA, 19 bp, Mus musculus
  siRNA target sequence for BC004701 (NM_146235.2,1991-2009).
gcagcttcagtgtctacat

SEQ ID NO: 456191 - DNA, 19 bp, Mus musculus
  siRNA target sequence for BC004701 (NM_146235.2,2018-2036).
gcggagatctgatgagaaa

SEQ ID NO: 456192 - DNA, 19 bp, Mus musculus
  siRNA target sequence for BC004701 (NM_146235.2,2080-2098).
gaatctcagaccatgattt

SEQ ID NO: 456193 - DNA, 19 bp, Mus musculus
  siRNA target sequence for BC004701 (NM_146235.2,2107-2125).
cccgtgatctgtctgttaa

SEQ ID NO: 456194 - DNA, 19 bp, Mus musculus
  siRNA target sequence for BC004701 (NM_146235.2,2108-2126).
ccgtgatctgtctgttaaa

SEQ ID NO: 456195 - DNA, 19 bp, Mus musculus
  siRNA target sequence for BC004701 (NM_146235.2,2181-2199).
gctcaattccttgttgaat

SEQ ID NO: 456196 - DNA, 19 bp, Mus musculus
  siRNA target sequence for BC004701 (NM_146235.2,2255-2273).
caaagcacaggaatttcct

SEQ ID NO: 456197 - DNA, 19 bp, Mus musculus
  siRNA target sequence for BC004701 (NM_146235.2,2323-2341).
cttcacgccttctgactaa

SEQ ID NO: 456198 - DNA, 19 bp, Mus musculus
  siRNA target sequence for BC004701 (NM_146235.2,2328-2346).
cgccttctgactaaaccta

SEQ ID NO: 456199 - DNA, 19 bp, Mus musculus
  siRNA target sequence for BC004701 (NM_146235.2,2348-2366).
ccaggtagaggctatcagt

SEQ ID NO: 456200 - DNA, 19 bp, Mus musculus
  siRNA target sequence for BC004701 (NM_146235.2,2349-2367).
caggtagaggctatcagtt

SEQ ID NO: 456201 - DNA, 19 bp, Mus musculus
  siRNA target sequence for BC004701 (NM_146235.2,2355-2373).
gaggctatcagttctcaaa

SEQ ID NO: 456202 - DNA, 19 bp, Mus musculus
  siRNA target sequence for BC004701 (NM_146235.2,2423-2441).
gcactctgaggtacatgat

SEQ ID NO: 456203 - DNA, 19 bp, Mus musculus
  siRNA target sequence for BC004701 (NM_146235.2,2463-2481).
caccacttcaacagtacat

SEQ ID NO: 456204 - DNA, 19 bp, Mus musculus
  siRNA target sequence for BC004701 (NM_146235.2,2465-2483).
ccacttcaacagtacatct

SEQ ID NO: 456205 - DNA, 19 bp, Mus musculus
  siRNA target sequence for BC004701 (NM_146235.2,2509-2527).
cccagggggctgaaagtat

SEQ ID NO: 456206 - DNA, 19 bp, Mus musculus
  siRNA target sequence for BC004701 (NM_146235.2,2510-2528).
ccagggggctgaaagtata

SEQ ID NO: 456207 - DNA, 19 bp, Mus musculus
  siRNA target sequence for BC004701 (NM_146235.2,2520-2538).
gaaagtataggcgaagttt

SEQ ID NO: 456208 - DNA, 19 bp, Mus musculus
  siRNA target sequence for BC004701 (NM_146235.2,2646-2664).
ctgggaagttttcattatt

SEQ ID NO: 456209 - DNA, 19 bp, Mus musculus
  siRNA target sequence for BC004701 (NM_146235.2,2648-2666).
gggaagttttcattattta

SEQ ID NO: 456210 - DNA, 19 bp, Mus musculus
  siRNA target sequence for BC004701 (NM_146235.2,2685-2703).
gccagtcttgggccaaatt

SEQ ID NO: 456211 - DNA, 19 bp, Mus musculus
  siRNA target sequence for BC004701 (NM_146235.2,2686-2704).
ccagtcttgggccaaattt

SEQ ID NO: 456212 - DNA, 19 bp, Mus musculus
  siRNA target sequence for BC004701 (NM_146235.2,2687-2705).
cagtcttgggccaaattta

SEQ ID NO: 456213 - DNA, 19 bp, Mus musculus
  siRNA target sequence for BC004701 (NM_146235.2,2695-2713).
ggccaaatttagatctaca

SEQ ID NO: 456214 - DNA, 19 bp, Mus musculus
  siRNA target sequence for BC004701 (NM_146235.2,2712-2730).
caggatagtgtggttttat

SEQ ID NO: 456215 - DNA, 19 bp, Mus musculus
  siRNA target sequence for BC004701 (NM_146235.2,2735-2753).
ccgcagtcccacagcaaat

SEQ ID NO: 456216 - DNA, 19 bp, Mus musculus
  siRNA target sequence for BC004701 (NM_146235.2,2773-2791).
cagatgtacccatgattga

SEQ ID NO: 456217 - DNA, 19 bp, Mus musculus
  siRNA target sequence for BC004701 (NM_146235.2,2778-2796).
gtacccatgattgaaatat

SEQ ID NO: 456218 - DNA, 19 bp, Mus musculus
  siRNA target sequence for BC004701 (NM_146235.2,2783-2801).
catgattgaaatatctgat

SEQ ID NO: 456219 - DNA, 19 bp, Mus musculus
  siRNA target sequence for BC004701 (NM_146235.2,2932-2950).
ctgcagacactagacaaaa

SEQ ID NO: 456220 - DNA, 19 bp, Mus musculus
  siRNA target sequence for BC004701 (NM_146235.2,2935-2953).
cagacactagacaaaacct

SEQ ID NO: 456221 - DNA, 19 bp, Mus musculus
  siRNA target sequence for BC004701 (NM_146235.2,2960-2978).
caagtttttggaacatgtt

SEQ ID NO: 456222 - DNA, 19 bp, Mus musculus
  siRNA target sequence for BC004701 (NM_146235.2,3022-3040).
caaagtcagcacttactct

SEQ ID NO: 456223 - DNA, 19 bp, Mus musculus
  siRNA target sequence for BC004701 (NM_146235.2,3083-3101).
gattagtgtgaaaaccaaa

SEQ ID NO: 456224 - DNA, 19 bp, Mus musculus
  siRNA target sequence for BC004701 (NM_146235.2,3162-3180).
ggtagtcatacaaattcaa

SEQ ID NO: 456225 - DNA, 19 bp, Mus musculus
  siRNA target sequence for BC004701 (NM_146235.2,3163-3181).
gtagtcatacaaattcaat

SEQ ID NO: 456226 - DNA, 19 bp, Mus musculus
  siRNA target sequence for BC004701 (NM_146235.2,3166-3184).
gtcatacaaattcaattaa

SEQ ID NO: 456227 - DNA, 19 bp, Mus musculus
  siRNA target sequence for BC004701 (NM_146235.2,3203-3221).
ctcatctgtgaaacaattt

SEQ ID NO: 456228 - DNA, 19 bp, Mus musculus
  siRNA target sequence for BC004701 (NM_146235.2,3205-3223).
catctgtgaaacaatttga

SEQ ID NO: 456229 - DNA, 19 bp, Mus musculus
  siRNA target sequence for BC004701 (NM_146235.2,3282-3300).
ccaggtgaagtgaatacgt

SEQ ID NO: 456230 - DNA, 19 bp, Mus musculus
  siRNA target sequence for BC004701 (NM_146235.2,3293-3311).
gaatacgtccttacattct

SEQ ID NO: 456231 - DNA, 19 bp, Mus musculus
  siRNA target sequence for BC004701 (NM_146235.2,3328-3346).
ctaggaggtctctgatcaa

SEQ ID NO: 456232 - DNA, 19 bp, Mus musculus
  siRNA target sequence for BC004701 (NM_146235.2,3331-3349).
ggaggtctctgatcaatgt

SEQ ID NO: 456233 - DNA, 19 bp, Mus musculus
  siRNA target sequence for BC004701 (NM_146235.2,3375-3393).
gaggaaaggcttgataaca

SEQ ID NO: 456234 - DNA, 19 bp, Mus musculus
  siRNA target sequence for BC004701 (NM_146235.2,3613-3631).
cagtggaggctggtaatga

SEQ ID NO: 456235 - DNA, 19 bp, Mus musculus
  siRNA target sequence for BC004701 (NM_146235.2,3617-3635).
ggaggctggtaatgactat

SEQ ID NO: 456236 - DNA, 19 bp, Mus musculus
  siRNA target sequence for BC004701 (NM_146235.2,3695-3713).
caactgcttagttaaagca

SEQ ID NO: 456237 - DNA, 19 bp, Mus musculus
  siRNA target sequence for BC004701 (NM_146235.2,3738-3756).
gaggtcatgctcatgactt

SEQ ID NO: 456238 - DNA, 19 bp, Mus musculus
  siRNA target sequence for BC026432 (NM_146202.1,147-165).
ccccgaagggtctctcaaa

SEQ ID NO: 456239 - DNA, 19 bp, Mus musculus
  siRNA target sequence for BC026432 (NM_146202.1,149-167).
ccgaagggtctctcaaaga

SEQ ID NO: 456240 - DNA, 19 bp, Mus musculus
  siRNA target sequence for BC026432 (NM_146202.1,221-239).
gcaatggggactatgaagt

SEQ ID NO: 456241 - DNA, 19 bp, Mus musculus
  siRNA target sequence for BC026432 (NM_146202.1,222-240).
caatggggactatgaagtt

SEQ ID NO: 456242 - DNA, 19 bp, Mus musculus
  siRNA target sequence for BC026432 (NM_146202.1,415-433).
cagagcccggagtttgaat

SEQ ID NO: 456243 - DNA, 19 bp, Mus musculus
  siRNA target sequence for BC026432 (NM_146202.1,524-542).
gccctgggtacggttcaaa

SEQ ID NO: 456244 - DNA, 19 bp, Mus musculus
  siRNA target sequence for BC026432 (NM_146202.1,526-544).
cctgggtacggttcaaaga

SEQ ID NO: 456245 - DNA, 19 bp, Mus musculus
  siRNA target sequence for BC026432 (NM_146202.1,539-557).
caaagagccccgaatttga

SEQ ID NO: 456246 - DNA, 19 bp, Mus musculus
  siRNA target sequence for BC026432 (NM_146202.1,546-564).
ccccgaatttgaatctcaa

SEQ ID NO: 456247 - DNA, 19 bp, Mus musculus
  siRNA target sequence for BC026432 (NM_146202.1,547-565).
cccgaatttgaatctcaaa

SEQ ID NO: 456248 - DNA, 19 bp, Mus musculus
  siRNA target sequence for BC026432 (NM_146202.1,562-580).
caaagtccagggtatgaat

SEQ ID NO: 456249 - DNA, 19 bp, Mus musculus
  siRNA target sequence for BC026432 (NM_146202.1,613-631).
ggagatggcgttcagaatt

SEQ ID NO: 456250 - DNA, 19 bp, Mus musculus
  siRNA target sequence for BC026432 (NM_146202.1,655-673).
gagtttgaaactcaaagtt

SEQ ID NO: 456251 - DNA, 19 bp, Mus musculus
  siRNA target sequence for BC026432 (NM_146202.1,748-766).
caccccctggattccttta

SEQ ID NO: 456252 - DNA, 19 bp, Mus musculus
  siRNA target sequence for BC026432 (NM_146202.1,797-815).
cgctgcctccatttgacat

SEQ ID NO: 456253 - DNA, 19 bp, Mus musculus
  siRNA target sequence for BC026432 (NM_146202.1,836-854).
ctgcaccccagtttgagat

SEQ ID NO: 456254 - DNA, 19 bp, Mus musculus
  siRNA target sequence for BC026432 (NM_146202.1,855-873).
gctccagaatccactgaat

SEQ ID NO: 456255 - DNA, 19 bp, Mus musculus
  siRNA target sequence for BC026432 (NM_146202.1,931-949).
ggccctcgacctaacatct

SEQ ID NO: 456256 - DNA, 19 bp, Mus musculus
  siRNA target sequence for BC026432 (NM_146202.1,1140-1158).
cgctgatagctcttaccta

SEQ ID NO: 456257 - DNA, 19 bp, Mus musculus
  siRNA target sequence for BC026432 (NM_146202.1,1394-1412).
cccaacggtcagcacttat

SEQ ID NO: 456258 - DNA, 19 bp, Mus musculus
  siRNA target sequence for BC026432 (NM_146202.1,1424-1442).
gcagccacgcccgtgaaaa

SEQ ID NO: 456259 - DNA, 19 bp, Mus musculus
  siRNA target sequence for BC026432 (NM_146202.1,1685-1703).
gtggggagcgaccttataa

SEQ ID NO: 456260 - DNA, 19 bp, Mus musculus
  siRNA target sequence for BC060615 (NM_198423.1,509-527).
gaggcaaccgtcaacgtat

SEQ ID NO: 456261 - DNA, 19 bp, Mus musculus
  siRNA target sequence for BC060615 (NM_198423.1,512-530).
gcaaccgtcaacgtatcta

SEQ ID NO: 456262 - DNA, 19 bp, Mus musculus
  siRNA target sequence for BC060615 (NM_198423.1,549-567).
gcaggaggcggttcttgat

SEQ ID NO: 456263 - DNA, 19 bp, Mus musculus
  siRNA target sequence for BC060615 (NM_198423.1,628-646).
cagaagtcccggtgtctat

SEQ ID NO: 456264 - DNA, 19 bp, Mus musculus
  siRNA target sequence for BC060615 (NM_198423.1,630-648).
gaagtcccggtgtctatat

SEQ ID NO: 456265 - DNA, 19 bp, Mus musculus
  siRNA target sequence for BC060615 (NM_198423.1,633-651).
gtcccggtgtctatatcca

SEQ ID NO: 456266 - DNA, 19 bp, Mus musculus
  siRNA target sequence for BC060615 (NM_198423.1,668-686).
gtgcttcaagcgatgaaga

SEQ ID NO: 456267 - DNA, 19 bp, Mus musculus
  siRNA target sequence for BC060615 (NM_198423.1,731-749).
gccacatagctgtctctaa

SEQ ID NO: 456268 - DNA, 19 bp, Mus musculus
  siRNA target sequence for BC060615 (NM_198423.1,733-751).
cacatagctgtctctaaca

SEQ ID NO: 456269 - DNA, 19 bp, Mus musculus
  siRNA target sequence for BC060615 (NM_198423.1,760-778).
ctgcctccggacttcaaga

SEQ ID NO: 456270 - DNA, 19 bp, Mus musculus
  siRNA target sequence for BC060615 (NM_198423.1,825-843).
ccggaggaccaaaaaagca

SEQ ID NO: 456271 - DNA, 19 bp, Mus musculus
  siRNA target sequence for BC060615 (NM_198423.1,907-925).
ggccctgaaacttctaaga

SEQ ID NO: 456272 - DNA, 19 bp, Mus musculus
  siRNA target sequence for BC060615 (NM_198423.1,1208-1226).
ctacccccgtgtttggtaa

SEQ ID NO: 456273 - DNA, 19 bp, Mus musculus
  siRNA target sequence for BC060615 (NM_198423.1,1385-1403).
gcgagtttctggttaagct

SEQ ID NO: 456274 - DNA, 19 bp, Mus musculus
  siRNA target sequence for BC060615 (NM_198423.1,1417-1435).
gtgacctcccccaaaaaca

SEQ ID NO: 456275 - DNA, 19 bp, Mus musculus
  siRNA target sequence for BC060615 (NM_198423.1,1974-1992).
cagccccagtggtagcaaa

SEQ ID NO: 456276 - DNA, 19 bp, Mus musculus
  siRNA target sequence for BC060615 (NM_198423.1,1978-1996).
cccagtggtagcaaatcca

SEQ ID NO: 456277 - DNA, 19 bp, Mus musculus
  siRNA target sequence for BC060615 (NM_198423.1,1979-1997).
ccagtggtagcaaatccaa

SEQ ID NO: 456278 - DNA, 19 bp, Mus musculus
  siRNA target sequence for BC060615 (NM_198423.1,2056-2074).
cggctgccctccgtagaaa

SEQ ID NO: 456279 - DNA, 19 bp, Mus musculus
  siRNA target sequence for BC060615 (NM_198423.1,2057-2075).
ggctgccctccgtagaaaa

SEQ ID NO: 456280 - DNA, 19 bp, Mus musculus
  siRNA target sequence for BC060615 (NM_198423.1,2157-2175).
ggggaaagccaggaaacta

SEQ ID NO: 456281 - DNA, 19 bp, Mus musculus
  siRNA target sequence for BC060615 (NM_198423.1,2221-2239).
gactgtgcggtcttccttt

SEQ ID NO: 456282 - DNA, 19 bp, Mus musculus
  siRNA target sequence for BC060615 (NM_198423.1,2311-2329).
gtggtgaaggtcaaatggt

SEQ ID NO: 456283 - DNA, 19 bp, Mus musculus
  siRNA target sequence for BC060615 (NM_198423.1,2422-2440).
cagaccatctcccacaaat

SEQ ID NO: 456284 - DNA, 19 bp, Mus musculus
  siRNA target sequence for BC060615 (NM_198423.1,2424-2442).
gaccatctcccacaaatgt

SEQ ID NO: 456285 - DNA, 19 bp, Mus musculus
  siRNA target sequence for BC060615 (NM_198423.1,2451-2469).
gggccgagagcagtatgaa

SEQ ID NO: 456286 - DNA, 19 bp, Mus musculus
  siRNA target sequence for BC060615 (NM_198423.1,2453-2471).
gccgagagcagtatgaaca

SEQ ID NO: 456287 - DNA, 19 bp, Mus musculus
  siRNA target sequence for BC060615 (NM_198423.1,2517-2535).
cttggcaggcacctatgat

SEQ ID NO: 456288 - DNA, 19 bp, Mus musculus
  siRNA target sequence for Bcl6 (NM_009744.2,125-143).
ccggcacgctagtgatgtt

SEQ ID NO: 456289 - DNA, 19 bp, Mus musculus
  siRNA target sequence for Bcl6 (NM_009744.2,127-145).
ggcacgctagtgatgttct

SEQ ID NO: 456290 - DNA, 19 bp, Mus musculus
  siRNA target sequence for Bcl6 (NM_009744.2,128-146).
gcacgctagtgatgttctt

SEQ ID NO: 456291 - DNA, 19 bp, Mus musculus
  siRNA target sequence for Bcl6 (NM_009744.2,138-156).
gatgttcttctcaacctta

SEQ ID NO: 456292 - DNA, 19 bp, Mus musculus
  siRNA target sequence for Bcl6 (NM_009744.2,165-183).
cggagtcgggacatcttga

SEQ ID NO: 456293 - DNA, 19 bp, Mus musculus
  siRNA target sequence for Bcl6 (NM_009744.2,201-219).
gtgagccgtgagcagttta

SEQ ID NO: 456294 - DNA, 19 bp, Mus musculus
  siRNA target sequence for Bcl6 (NM_009744.2,203-221).
gagccgtgagcagtttaga

SEQ ID NO: 456295 - DNA, 19 bp, Mus musculus
  siRNA target sequence for Bcl6 (NM_009744.2,215-233).
gtttagagcccataagaca

SEQ ID NO: 456296 - DNA, 19 bp, Mus musculus
  siRNA target sequence for Bcl6 (NM_009744.2,244-262).
cctgcagcggcctgttcta

SEQ ID NO: 456297 - DNA, 19 bp, Mus musculus
  siRNA target sequence for Bcl6 (NM_009744.2,250-268).
gcggcctgttctacagtat

SEQ ID NO: 456298 - DNA, 19 bp, Mus musculus
  siRNA target sequence for Bcl6 (NM_009744.2,274-292).
ctgaccagttgaaatgcaa

SEQ ID NO: 456299 - DNA, 19 bp, Mus musculus
  siRNA target sequence for Bcl6 (NM_009744.2,289-307).
gcaaccttagtgtaatcaa

SEQ ID NO: 456300 - DNA, 19 bp, Mus musculus
  siRNA target sequence for Bcl6 (NM_009744.2,290-308).
caaccttagtgtaatcaat

SEQ ID NO: 456301 - DNA, 19 bp, Mus musculus
  siRNA target sequence for Bcl6 (NM_009744.2,448-466).
catgcaggaagttcatcaa

SEQ ID NO: 456302 - DNA, 19 bp, Mus musculus
  siRNA target sequence for Bcl6 (NM_009744.2,570-588).
gaggtcgtggagaacaata

SEQ ID NO: 456303 - DNA, 19 bp, Mus musculus
  siRNA target sequence for Bcl6 (NM_009744.2,796-814).
ccaggcaagtccctaatga

SEQ ID NO: 456304 - DNA, 19 bp, Mus musculus
  siRNA target sequence for Bcl6 (NM_009744.2,799-817).
ggcaagtccctaatgagta

SEQ ID NO: 456305 - DNA, 19 bp, Mus musculus
  siRNA target sequence for Bcl6 (NM_009744.2,801-819).
caagtccctaatgagtata

SEQ ID NO: 456306 - DNA, 19 bp, Mus musculus
  siRNA target sequence for Bcl6 (NM_009744.2,893-911).
ggaggctcggagtgacata

SEQ ID NO: 456307 - DNA, 19 bp, Mus musculus
  siRNA target sequence for Bcl6 (NM_009744.2,897-915).
gctcggagtgacatacact

SEQ ID NO: 456308 - DNA, 19 bp, Mus musculus
  siRNA target sequence for Bcl6 (NM_009744.2,898-916).
ctcggagtgacatacacta

SEQ ID NO: 456309 - DNA, 19 bp, Mus musculus
  siRNA target sequence for Bcl6 (NM_009744.2,955-973).
ctcggaatgctccatactt

SEQ ID NO: 456310 - DNA, 19 bp, Mus musculus
  siRNA target sequence for Bcl6 (NM_009744.2,1210-1228).
gcaactggaagaagtataa

SEQ ID NO: 456311 - DNA, 19 bp, Mus musculus
  siRNA target sequence for Bcl6 (NM_009744.2,1216-1234).
ggaagaagtataagttcat

SEQ ID NO: 456312 - DNA, 19 bp, Mus musculus
  siRNA target sequence for Bcl6 (NM_009744.2,1420-1438).
ccagccggctcaataatct

SEQ ID NO: 456313 - DNA, 19 bp, Mus musculus
  siRNA target sequence for Bcl6 (NM_009744.2,1711-1729).
cgcacagtgacaaaccata

SEQ ID NO: 456314 - DNA, 19 bp, Mus musculus
  siRNA target sequence for Bcl6 (NM_009744.2,1715-1733).
cagtgacaaaccatacaaa

SEQ ID NO: 456315 - DNA, 19 bp, Mus musculus
  siRNA target sequence for Bcl6 (NM_009744.2,1859-1877).
gaagacccacactcgaatt

SEQ ID NO: 456316 - DNA, 19 bp, Mus musculus
  siRNA target sequence for Bcl6 (NM_009744.2,1912-1930).
gtggggccaggtttgttca

SEQ ID NO: 456317 - DNA, 19 bp, Mus musculus
  siRNA target sequence for Bcl6 (NM_009744.2,1977-1995).
ccgtacccctgtgaaatct

SEQ ID NO: 456318 - DNA, 19 bp, Mus musculus
  siRNA target sequence for Bcl6 (NM_009744.2,1979-1997).
gtacccctgtgaaatctgt

SEQ ID NO: 456319 - DNA, 19 bp, Mus musculus
  siRNA target sequence for Bcl6 (NM_009744.2,2084-2102).
cctgcactttcgtcacaaa

SEQ ID NO: 456320 - DNA, 19 bp, Mus musculus
  siRNA target sequence for Bcl6 (NM_009744.2,2104-2122).
gccaactgcgacttcattt

SEQ ID NO: 456321 - DNA, 19 bp, Mus musculus
  siRNA target sequence for Bcl6b (NM_007528.1,87-105).
ctccgacgtgcttagcaat

SEQ ID NO: 456322 - DNA, 19 bp, Mus musculus
  siRNA target sequence for Bcl6b (NM_007528.1,93-111).
cgtgcttagcaatctgaat

SEQ ID NO: 456323 - DNA, 19 bp, Mus musculus
  siRNA target sequence for Bcl6b (NM_007528.1,203-221).
gtggcttcttctattcaat

SEQ ID NO: 456324 - DNA, 19 bp, Mus musculus
  siRNA target sequence for Bcl6b (NM_007528.1,239-257).
gactcggggtggatgtact

SEQ ID NO: 456325 - DNA, 19 bp, Mus musculus
  siRNA target sequence for Bcl6b (NM_007528.1,303-321).
ggacttcatgtatacttca

SEQ ID NO: 456326 - DNA, 19 bp, Mus musculus
  siRNA target sequence for Bcl6b (NM_007528.1,358-376).
ctcgcagctgccacctatt

SEQ ID NO: 456327 - DNA, 19 bp, Mus musculus
  siRNA target sequence for Bcl6b (NM_007528.1,765-783).
ccaaagcagactatctcta

SEQ ID NO: 456328 - DNA, 19 bp, Mus musculus
  siRNA target sequence for Bcl6b (NM_007528.1,788-806).
ctaccactgcacgattcaa

SEQ ID NO: 456329 - DNA, 19 bp, Mus musculus
  siRNA target sequence for Bcl6b (NM_007528.1,807-825).
gtgtggagctctagcaaat

SEQ ID NO: 456330 - DNA, 19 bp, Mus musculus
  siRNA target sequence for Bcl6b (NM_007528.1,809-827).
gtggagctctagcaaataa

SEQ ID NO: 456331 - DNA, 19 bp, Mus musculus
  siRNA target sequence for Bcl6b (NM_007528.1,811-829).
ggagctctagcaaataact

SEQ ID NO: 456332 - DNA, 19 bp, Mus musculus
  siRNA target sequence for Bcl6b (NM_007528.1,892-910).
ccgccaggaagtgagtttt

SEQ ID NO: 456333 - DNA, 19 bp, Mus musculus
  siRNA target sequence for Bcl6b (NM_007528.1,893-911).
cgccaggaagtgagttttt

SEQ ID NO: 456334 - DNA, 19 bp, Mus musculus
  siRNA target sequence for Bcl6b (NM_007528.1,1009-1027).
cgatctgccttccgttata

SEQ ID NO: 456335 - DNA, 19 bp, Mus musculus
  siRNA target sequence for Bcl6b (NM_007528.1,1010-1028).
gatctgccttccgttataa

SEQ ID NO: 456336 - DNA, 19 bp, Mus musculus
  siRNA target sequence for Bcl6b (NM_007528.1,1107-1125).
ccgacctgctaacctaaaa

SEQ ID NO: 456337 - DNA, 19 bp, Mus musculus
  siRNA target sequence for Bcl6b (NM_007528.1,1108-1126).
cgacctgctaacctaaaaa

SEQ ID NO: 456338 - DNA, 19 bp, Mus musculus
  siRNA target sequence for Bcl6b (NM_007528.1,1173-1191).
ctgcggctcgcgttttgtt

SEQ ID NO: 456339 - DNA, 19 bp, Mus musculus
  siRNA target sequence for Bcl6b (NM_007528.1,1175-1193).
gcggctcgcgttttgttca

SEQ ID NO: 456340 - DNA, 19 bp, Mus musculus
  siRNA target sequence for Bcl6b (NM_007528.1,1265-1283).
cccgcttccgccatctaca

SEQ ID NO: 456341 - DNA, 19 bp, Mus musculus
  siRNA target sequence for Bcl6b (NM_007528.1,1377-1395).
gctgcatctgcgtcagaaa

SEQ ID NO: 456342 - DNA, 19 bp, Mus musculus
  siRNA target sequence for Bcl6b (NM_007528.1,1399-1417).
ggggcagctaccaacacta

SEQ ID NO: 456343 - DNA, 19 bp, Mus musculus
  siRNA target sequence for Bcl6b (NM_007528.1,1400-1418).
gggcagctaccaacactaa

SEQ ID NO: 456344 - DNA, 19 bp, Mus musculus
  siRNA target sequence for Bcl6b (NM_007528.1,1403-1421).
cagctaccaacactaaagt

SEQ ID NO: 456345 - DNA, 19 bp, Mus musculus
  siRNA target sequence for Bhc80 (NM_138755.1,293-311).
ggctcttaaagtggaaatt

SEQ ID NO: 456346 - DNA, 19 bp, Mus musculus
  siRNA target sequence for Bhc80 (NM_138755.1,395-413).
caaaatcacagctttgagt

SEQ ID NO: 456347 - DNA, 19 bp, Mus musculus
  siRNA target sequence for Bhc80 (NM_138755.1,401-419).
cacagctttgagtgagaaa

SEQ ID NO: 456348 - DNA, 19 bp, Mus musculus
  siRNA target sequence for Bhc80 (NM_138755.1,405-423).
gctttgagtgagaaacaga

SEQ ID NO: 456349 - DNA, 19 bp, Mus musculus
  siRNA target sequence for Bhc80 (NM_138755.1,444-462).
cgcaagaacctgatagtca

SEQ ID NO: 456350 - DNA, 19 bp, Mus musculus
  siRNA target sequence for Bhc80 (NM_138755.1,449-467).
gaacctgatagtcaaacaa

SEQ ID NO: 456351 - DNA, 19 bp, Mus musculus
  siRNA target sequence for Bhc80 (NM_138755.1,495-513).
ccattgtcacagtctgaaa

SEQ ID NO: 456352 - DNA, 19 bp, Mus musculus
  siRNA target sequence for Bhc80 (NM_138755.1,624-642).
gcagcaccgcctagtctaa

SEQ ID NO: 456353 - DNA, 19 bp, Mus musculus
  siRNA target sequence for Bhc80 (NM_138755.1,759-777).
gcccagaataacattccta

SEQ ID NO: 456354 - DNA, 19 bp, Mus musculus
  siRNA target sequence for Bhc80 (NM_138755.1,833-851).
catgctgaccaagtttaca

SEQ ID NO: 456355 - DNA, 19 bp, Mus musculus
  siRNA target sequence for Bhc80 (NM_138755.1,887-905).
ccctgtccgtgttgtcaat

SEQ ID NO: 456356 - DNA, 19 bp, Mus musculus
  siRNA target sequence for Bhc80 (NM_138755.1,916-934).
caaccatagccaaaacgtt

SEQ ID NO: 456357 - DNA, 19 bp, Mus musculus
  siRNA target sequence for Bhc80 (NM_138755.1,998-1016).
gactgtacagcttagcaaa

SEQ ID NO: 456358 - DNA, 19 bp, Mus musculus
  siRNA target sequence for Bhc80 (NM_138755.1,1091-1109).
cccacctgctgcaccaaaa

SEQ ID NO: 456359 - DNA, 19 bp, Mus musculus
  siRNA target sequence for Bhc80 (NM_138755.1,1153-1171).
ctctagggttggtaacaca

SEQ ID NO: 456360 - DNA, 19 bp, Mus musculus
  siRNA target sequence for Bhc80 (NM_138755.1,1168-1186).
cacatgaccatctagaaga

SEQ ID NO: 456361 - DNA, 19 bp, Mus musculus
  siRNA target sequence for Bhc80 (NM_138755.1,1274-1292).
gagtgcagtcacttacctt

SEQ ID NO: 456362 - DNA, 19 bp, Mus musculus
  siRNA target sequence for Bhc80 (NM_138755.1,1276-1294).
gtgcagtcacttaccttaa

SEQ ID NO: 456363 - DNA, 19 bp, Mus musculus
  siRNA target sequence for Bhc80 (NM_138755.1,1278-1296).
gcagtcacttaccttaaca

SEQ ID NO: 456364 - DNA, 19 bp, Mus musculus
  siRNA target sequence for Bhc80 (NM_138755.1,1414-1432).
cgtgttcccgtgtgtatca

SEQ ID NO: 456365 - DNA, 19 bp, Mus musculus
  siRNA target sequence for Bhc80 (NM_138755.1,1417-1435).
gttcccgtgtgtatcatct

SEQ ID NO: 456366 - DNA, 19 bp, Mus musculus
  siRNA target sequence for Bhc80 (NM_138755.1,1495-1513).
gtcaggaccagatgctaaa

SEQ ID NO: 456367 - DNA, 19 bp, Mus musculus
  siRNA target sequence for Bhc80 (NM_138755.1,1684-1702).
gtaaatgtatggagatgaa

SEQ ID NO: 456368 - DNA, 19 bp, Mus musculus
  siRNA target sequence for Bhc80 (NM_138755.1,1900-1918).
gctgcacagcgaactgtaa

SEQ ID NO: 456369 - DNA, 19 bp, Mus musculus
  siRNA target sequence for Bhc80 (NM_138755.1,1919-1937).
ccagggggaagagactaaa

SEQ ID NO: 456370 - DNA, 19 bp, Mus musculus
  siRNA target sequence for Bhc80 (NM_138755.1,1920-1938).
cagggggaagagactaaat

SEQ ID NO: 456371 - DNA, 19 bp, Mus musculus
  siRNA target sequence for Bhlhb2 (NM_011498.2,427-445).
gacagcaaggaaacttaca

SEQ ID NO: 456372 - DNA, 19 bp, Mus musculus
  siRNA target sequence for Bhlhb2 (NM_011498.2,451-469).
ccgcaccggctgattgaga

SEQ ID NO: 456373 - DNA, 19 bp, Mus musculus
  siRNA target sequence for Bhlhb2 (NM_011498.2,452-470).
cgcaccggctgattgagaa

SEQ ID NO: 456374 - DNA, 19 bp, Mus musculus
  siRNA target sequence for Bhlhb2 (NM_011498.2,476-494).
gacgtgaccggattaacga

SEQ ID NO: 456375 - DNA, 19 bp, Mus musculus
  siRNA target sequence for Bhlhb2 (NM_011498.2,525-543).
cgaacatctcaaacttact

SEQ ID NO: 456376 - DNA, 19 bp, Mus musculus
  siRNA target sequence for Bhlhb2 (NM_011498.2,526-544).
gaacatctcaaacttacta

SEQ ID NO: 456377 - DNA, 19 bp, Mus musculus
  siRNA target sequence for Bhlhb3 (NM_024469.1,139-157).
ggactattcctctttgtat

SEQ ID NO: 456378 - DNA, 19 bp, Mus musculus
  siRNA target sequence for Bhlhb3 (NM_024469.1,140-158).
gactattcctctttgtata

SEQ ID NO: 456379 - DNA, 19 bp, Mus musculus
  siRNA target sequence for Bhlhb3 (NM_024469.1,147-165).
cctctttgtatatgtgtaa

SEQ ID NO: 456380 - DNA, 19 bp, Mus musculus
  siRNA target sequence for Bhlhb3 (NM_024469.1,185-203).
cgagacgataccaaggata

SEQ ID NO: 456381 - DNA, 19 bp, Mus musculus
  siRNA target sequence for Bhlhb3 (NM_024469.1,208-226).
caagttaccgcacagatta

SEQ ID NO: 456382 - DNA, 19 bp, Mus musculus
  siRNA target sequence for Bhlhb3 (NM_024469.1,211-229).
gttaccgcacagattaata

SEQ ID NO: 456383 - DNA, 19 bp, Mus musculus
  siRNA target sequence for Bhlhb3 (NM_024469.1,215-233).
ccgcacagattaatagaaa

SEQ ID NO: 456384 - DNA, 19 bp, Mus musculus
  siRNA target sequence for Bhlhb3 (NM_024469.1,216-234).
cgcacagattaatagaaaa

SEQ ID NO: 456385 - DNA, 19 bp, Mus musculus
  siRNA target sequence for Bhlhb3 (NM_024469.1,238-256).
gagacgagaccgaattaat

SEQ ID NO: 456386 - DNA, 19 bp, Mus musculus
  siRNA target sequence for Bhlhb3 (NM_024469.1,242-260).
cgagaccgaattaatgaat

SEQ ID NO: 456387 - DNA, 19 bp, Mus musculus
  siRNA target sequence for Bhlhb3 (NM_024469.1,267-285).
ctcagctgaaagatttact

SEQ ID NO: 456388 - DNA, 19 bp, Mus musculus
  siRNA target sequence for Bhlhb3 (NM_024469.1,284-302).
ctgcccgaacatctgaaat

SEQ ID NO: 456389 - DNA, 19 bp, Mus musculus
  siRNA target sequence for Bhlhb3 (NM_024469.1,287-305).
cccgaacatctgaaattga

SEQ ID NO: 456390 - DNA, 19 bp, Mus musculus
  siRNA target sequence for Bhlhb3 (NM_024469.1,290-308).
gaacatctgaaattgacaa

SEQ ID NO: 456391 - DNA, 19 bp, Mus musculus
  siRNA target sequence for Bhlhb3 (NM_024469.1,329-347).
gcagtagtcttggaattaa

SEQ ID NO: 456392 - DNA, 19 bp, Mus musculus
  siRNA target sequence for Bhlhb3 (NM_024469.1,366-384).
cgctaacagccttaactga

SEQ ID NO: 456393 - DNA, 19 bp, Mus musculus
  siRNA target sequence for Bhlhb3 (NM_024469.1,388-406).
gcagcatcagaagataatt

SEQ ID NO: 456394 - DNA, 19 bp, Mus musculus
  siRNA target sequence for Bhlhb3 (NM_024469.1,419-437).
ggggagcgctctctgaaat

SEQ ID NO: 456395 - DNA, 19 bp, Mus musculus
  siRNA target sequence for Bhlhb3 (NM_024469.1,463-481).
gttccactcggggtttcaa

SEQ ID NO: 456396 - DNA, 19 bp, Mus musculus
  siRNA target sequence for Bhlhb3 (NM_024469.1,489-507).
ccaaagaagtcttgcaata

SEQ ID NO: 456397 - DNA, 19 bp, Mus musculus
  siRNA target sequence for Blm (NM_007550.2,488-506).
ctagtgtgtccgtagtaaa

SEQ ID NO: 456398 - DNA, 19 bp, Mus musculus
  siRNA target sequence for Blm (NM_007550.2,509-527).
cacctgcgttaagtgataa

SEQ ID NO: 456399 - DNA, 19 bp, Mus musculus
  siRNA target sequence for Blm (NM_007550.2,538-556).
gtgtctgaggccttttcat

SEQ ID NO: 456400 - DNA, 19 bp, Mus musculus
  siRNA target sequence for Blm (NM_007550.2,597-615).
gattgaaggcttctttaaa

SEQ ID NO: 456401 - DNA, 19 bp, Mus musculus
  siRNA target sequence for Blm (NM_007550.2,788-806).
gtgactgggctgatatgga

SEQ ID NO: 456402 - DNA, 19 bp, Mus musculus
  siRNA target sequence for Blm (NM_007550.2,823-841).
gcatcagatgcgtttgctt

SEQ ID NO: 456403 - DNA, 19 bp, Mus musculus
  siRNA target sequence for Blm (NM_007550.2,868-886).
gtaagcaccgctcagaaaa

SEQ ID NO: 456404 - DNA, 19 bp, Mus musculus
  siRNA target sequence for Blm (NM_007550.2,872-890).
gcaccgctcagaaaatgaa

SEQ ID NO: 456405 - DNA, 19 bp, Mus musculus
  siRNA target sequence for Blm (NM_007550.2,894-912).
gactaagagaaacttcttt

SEQ ID NO: 456406 - DNA, 19 bp, Mus musculus
  siRNA target sequence for Blm (NM_007550.2,896-914).
ctaagagaaacttctttaa

SEQ ID NO: 456407 - DNA, 19 bp, Mus musculus
  siRNA target sequence for Blm (NM_007550.2,976-994).
ctgcaagtggatttaacga

SEQ ID NO: 456408 - DNA, 19 bp, Mus musculus
  siRNA target sequence for Blm (NM_007550.2,1068-1086).
ctgcattgacaatgattct

SEQ ID NO: 456409 - DNA, 19 bp, Mus musculus
  siRNA target sequence for Blm (NM_007550.2,1096-1114).
gagctcacggagaaagaca

SEQ ID NO: 456410 - DNA, 19 bp, Mus musculus
  siRNA target sequence for Blm (NM_007550.2,1308-1326).
gaaatgttccagtatgtta

SEQ ID NO: 456411 - DNA, 19 bp, Mus musculus
  siRNA target sequence for Blm (NM_007550.2,1488-1506).
ggagcacatctgtaagtta

SEQ ID NO: 456412 - DNA, 19 bp, Mus musculus
  siRNA target sequence for Blm (NM_007550.2,1491-1509).
gcacatctgtaagttagtt

SEQ ID NO: 456413 - DNA, 19 bp, Mus musculus
  siRNA target sequence for Blm (NM_007550.2,1494-1512).
catctgtaagttagttgat

SEQ ID NO: 456414 - DNA, 19 bp, Mus musculus
  siRNA target sequence for Blm (NM_007550.2,1499-1517).
gtaagttagttgatactgt

SEQ ID NO: 456415 - DNA, 19 bp, Mus musculus
  siRNA target sequence for Blm (NM_007550.2,1528-1546).
gaactggaagctttgaatt

SEQ ID NO: 456416 - DNA, 19 bp, Mus musculus
  siRNA target sequence for Blm (NM_007550.2,1551-1569).
gaccgaattgcttcaacaa

SEQ ID NO: 456417 - DNA, 19 bp, Mus musculus
  siRNA target sequence for Blm (NM_007550.2,1561-1579).
cttcaacaacgaaacataa

SEQ ID NO: 456418 - DNA, 19 bp, Mus musculus
  siRNA target sequence for Blm (NM_007550.2,1564-1582).
caacaacgaaacataagga

SEQ ID NO: 456419 - DNA, 19 bp, Mus musculus
  siRNA target sequence for Blm (NM_007550.2,1591-1609).
ctagctgaagcaggtttta

SEQ ID NO: 456420 - DNA, 19 bp, Mus musculus
  siRNA target sequence for Blm (NM_007550.2,1646-1664).
ggcacaggcctgattcact

SEQ ID NO: 456421 - DNA, 19 bp, Mus musculus
  siRNA target sequence for Blm (NM_007550.2,1647-1665).
gcacaggcctgattcactt

SEQ ID NO: 456422 - DNA, 19 bp, Mus musculus
  siRNA target sequence for Blm (NM_007550.2,1652-1670).
ggcctgattcacttgataa

SEQ ID NO: 456423 - DNA, 19 bp, Mus musculus
  siRNA target sequence for Blm (NM_007550.2,1654-1672).
cctgattcacttgataaca

SEQ ID NO: 456424 - DNA, 19 bp, Mus musculus
  siRNA target sequence for Blm (NM_007550.2,1691-1709).
gccctgtggggcatcctaa

SEQ ID NO: 456425 - DNA, 19 bp, Mus musculus
  siRNA target sequence for Blm (NM_007550.2,1692-1710).
ccctgtggggcatcctaat

SEQ ID NO: 456426 - DNA, 19 bp, Mus musculus
  siRNA target sequence for Blm (NM_007550.2,1693-1711).
cctgtggggcatcctaata

SEQ ID NO: 456427 - DNA, 19 bp, Mus musculus
  siRNA target sequence for Blm (NM_007550.2,1694-1712).
ctgtggggcatcctaataa

SEQ ID NO: 456428 - DNA, 19 bp, Mus musculus
  siRNA target sequence for Blm (NM_007550.2,1699-1717).
gggcatcctaataaagagt

SEQ ID NO: 456429 - DNA, 19 bp, Mus musculus
  siRNA target sequence for Blm (NM_007550.2,1705-1723).
cctaataaagagttaaatt

SEQ ID NO: 456430 - DNA, 19 bp, Mus musculus
  siRNA target sequence for Blm (NM_007550.2,1716-1734).
gttaaattctccatacctt

SEQ ID NO: 456431 - DNA, 19 bp, Mus musculus
  siRNA target sequence for Blm (NM_007550.2,1822-1840).
gaaaggccgttattgaatt

SEQ ID NO: 456432 - DNA, 19 bp, Mus musculus
  siRNA target sequence for Blm (NM_007550.2,2000-2018).
gccaggcttcctatgatat

SEQ ID NO: 456433 - DNA, 19 bp, Mus musculus
  siRNA target sequence for Blm (NM_007550.2,2004-2022).
ggcttcctatgatatcgat

SEQ ID NO: 456434 - DNA, 19 bp, Mus musculus
  siRNA target sequence for Blm (NM_007550.2,2005-2023).
gcttcctatgatatcgata

SEQ ID NO: 456435 - DNA, 19 bp, Mus musculus
  siRNA target sequence for Blm (NM_007550.2,2073-2091).
cataatgcacaattttcca

SEQ ID NO: 456436 - DNA, 19 bp, Mus musculus
  siRNA target sequence for Blm (NM_007550.2,2131-2149).
gaaggtgggccagttaaat

SEQ ID NO: 456437 - DNA, 19 bp, Mus musculus
  siRNA target sequence for Blm (NM_007550.2,2152-2170).
ctctcagaaaggatttctt

SEQ ID NO: 456438 - DNA, 19 bp, Mus musculus
  siRNA target sequence for Blm (NM_007550.2,2221-2239).
ctctcagagtcaattcaga

SEQ ID NO: 456439 - DNA, 19 bp, Mus musculus
  siRNA target sequence for Blm (NM_007550.2,2227-2245).
gagtcaattcagaattgct

SEQ ID NO: 456440 - DNA, 19 bp, Mus musculus
  siRNA target sequence for Blm (NM_007550.2,2253-2271).
gctggcccaaaatttatca

SEQ ID NO: 456441 - DNA, 19 bp, Mus musculus
  siRNA target sequence for Blm (NM_007550.2,2254-2272).
ctggcccaaaatttatcat

SEQ ID NO: 456442 - DNA, 19 bp, Mus musculus
  siRNA target sequence for Blm (NM_007550.2,2257-2275).
gcccaaaatttatcatcaa

SEQ ID NO: 456443 - DNA, 19 bp, Mus musculus
  siRNA target sequence for Blm (NM_007550.2,2314-2332).
cctcatacaaaagaaatga

SEQ ID NO: 456444 - DNA, 19 bp, Mus musculus
  siRNA target sequence for Blm (NM_007550.2,2317-2335).
catacaaaagaaatgatga

SEQ ID NO: 456445 - DNA, 19 bp, Mus musculus
  siRNA target sequence for Blm (NM_007550.2,2361-2379).
gcataattttagaactaat

SEQ ID NO: 456446 - DNA, 19 bp, Mus musculus
  siRNA target sequence for Blm (NM_007550.2,2413-2431).
gaagactgctttatcctaa

SEQ ID NO: 456447 - DNA, 19 bp, Mus musculus
  siRNA target sequence for Blm (NM_007550.2,2490-2508).
ggtcacaattgtcatttct

SEQ ID NO: 456448 - DNA, 19 bp, Mus musculus
  siRNA target sequence for Blm (NM_007550.2,2507-2525).
ctcccttgagatcactaat

SEQ ID NO: 456449 - DNA, 19 bp, Mus musculus
  siRNA target sequence for Blm (NM_007550.2,2510-2528).
ccttgagatcactaatagt

SEQ ID NO: 456450 - DNA, 19 bp, Mus musculus
  siRNA target sequence for Blm (NM_007550.2,2516-2534).
gatcactaatagtagatca

SEQ ID NO: 456451 - DNA, 19 bp, Mus musculus
  siRNA target sequence for Blm (NM_007550.2,2519-2537).
cactaatagtagatcaagt

SEQ ID NO: 456452 - DNA, 19 bp, Mus musculus
  siRNA target sequence for Blm (NM_007550.2,2547-2565).
gacttcctttgatattcca

SEQ ID NO: 456453 - DNA, 19 bp, Mus musculus
  siRNA target sequence for Blm (NM_007550.2,2627-2645).
ccaaaaaagacccaatcat

SEQ ID NO: 456454 - DNA, 19 bp, Mus musculus
  siRNA target sequence for Blm (NM_007550.2,2635-2653).
gacccaatcatcaagcttt

SEQ ID NO: 456455 - DNA, 19 bp, Mus musculus
  siRNA target sequence for Blm (NM_007550.2,2638-2656).
ccaatcatcaagcttttgt

SEQ ID NO: 456456 - DNA, 19 bp, Mus musculus
  siRNA target sequence for Blm (NM_007550.2,2639-2657).
caatcatcaagcttttgta

SEQ ID NO: 456457 - DNA, 19 bp, Mus musculus
  siRNA target sequence for Blm (NM_007550.2,2646-2664).
caagcttttgtatgttact

SEQ ID NO: 456458 - DNA, 19 bp, Mus musculus
  siRNA target sequence for Blm (NM_007550.2,2724-2742).
gaagctcttggcacgtttt

SEQ ID NO: 456459 - DNA, 19 bp, Mus musculus
  siRNA target sequence for Blm (NM_007550.2,2733-2751).
ggcacgttttgtcattgat

SEQ ID NO: 456460 - DNA, 19 bp, Mus musculus
  siRNA target sequence for Blm (NM_007550.2,2735-2753).
cacgttttgtcattgatga

SEQ ID NO: 456461 - DNA, 19 bp, Mus musculus
  siRNA target sequence for Blm (NM_007550.2,2788-2806).
cgtcaagattacaaaagga

SEQ ID NO: 456462 - DNA, 19 bp, Mus musculus
  siRNA target sequence for Blm (NM_007550.2,2789-2807).
gtcaagattacaaaaggat

SEQ ID NO: 456463 - DNA, 19 bp, Mus musculus
  siRNA target sequence for Blm (NM_007550.2,2799-2817).
caaaaggatgaatatgctt

SEQ ID NO: 456464 - DNA, 19 bp, Mus musculus
  siRNA target sequence for Blm (NM_007550.2,2908-2926).
ctcagacctcaggtgttta

SEQ ID NO: 456465 - DNA, 19 bp, Mus musculus
  siRNA target sequence for Blm (NM_007550.2,2942-2960).
gacacaatctgaagtacta

SEQ ID NO: 456466 - DNA, 19 bp, Mus musculus
  siRNA target sequence for Blm (NM_007550.2,2969-2987).
ccaagaagcccaaaaaagt

SEQ ID NO: 456467 - DNA, 19 bp, Mus musculus
  siRNA target sequence for Blm (NM_007550.2,2976-2994).
gcccaaaaaagtagcattt

SEQ ID NO: 456468 - DNA, 19 bp, Mus musculus
  siRNA target sequence for Blm (NM_007550.2,3026-3044).
cttatgactcggggataat

SEQ ID NO: 456469 - DNA, 19 bp, Mus musculus
  siRNA target sequence for Blm (NM_007550.2,3031-3049).
gactcggggataatttact

SEQ ID NO: 456470 - DNA, 19 bp, Mus musculus
  siRNA target sequence for Blm (NM_007550.2,3074-3092).
caatggctgacactttaca

SEQ ID NO: 456471 - DNA, 19 bp, Mus musculus
  siRNA target sequence for Blm (NM_007550.2,3178-3196).
gacaactgccaggttatct

SEQ ID NO: 456472 - DNA, 19 bp, Mus musculus
  siRNA target sequence for Blm (NM_007550.2,3180-3198).
caactgccaggttatctgt

SEQ ID NO: 456473 - DNA, 19 bp, Mus musculus
  siRNA target sequence for Blm (NM_007550.2,3189-3207).
ggttatctgtgcgacaatt

SEQ ID NO: 456474 - DNA, 19 bp, Mus musculus
  siRNA target sequence for Blm (NM_007550.2,3199-3217).
gcgacaattgcgtttggaa

SEQ ID NO: 456475 - DNA, 19 bp, Mus musculus
  siRNA target sequence for Blm (NM_007550.2,3200-3218).
cgacaattgcgtttggaat

SEQ ID NO: 456476 - DNA, 19 bp, Mus musculus
  siRNA target sequence for Blm (NM_007550.2,3232-3250).
cctgacgtgcgatttgtga

SEQ ID NO: 456477 - DNA, 19 bp, Mus musculus
  siRNA target sequence for Blm (NM_007550.2,3237-3255).
cgtgcgatttgtgattcat

SEQ ID NO: 456478 - DNA, 19 bp, Mus musculus
  siRNA target sequence for Blm (NM_007550.2,3257-3275).
catctcttcctaaatctat

SEQ ID NO: 456479 - DNA, 19 bp, Mus musculus
  siRNA target sequence for Blm (NM_007550.2,3272-3290).
ctatggagggttattatca

SEQ ID NO: 456480 - DNA, 19 bp, Mus musculus
  siRNA target sequence for Blm (NM_007550.2,3277-3295).
gagggttattatcaagaat

SEQ ID NO: 456481 - DNA, 19 bp, Mus musculus
  siRNA target sequence for Blm (NM_007550.2,3326-3344).
ctcactgcgtgcttttcta

SEQ ID NO: 456482 - DNA, 19 bp, Mus musculus
  siRNA target sequence for Blm (NM_007550.2,3328-3346).
cactgcgtgcttttctata

SEQ ID NO: 456483 - DNA, 19 bp, Mus musculus
  siRNA target sequence for Blm (NM_007550.2,3330-3348).
ctgcgtgcttttctataca

SEQ ID NO: 456484 - DNA, 19 bp, Mus musculus
  siRNA target sequence for Blm (NM_007550.2,3419-3437).
ctcacgtcaataatctata

SEQ ID NO: 456485 - DNA, 19 bp, Mus musculus
  siRNA target sequence for Blm (NM_007550.2,3511-3529).
ggattcaaccctgattttt

SEQ ID NO: 456486 - DNA, 19 bp, Mus musculus
  siRNA target sequence for Blm (NM_007550.2,3556-3574).
gacaattgctgtaaaacaa

SEQ ID NO: 456487 - DNA, 19 bp, Mus musculus
  siRNA target sequence for Blm (NM_007550.2,3563-3581).
gctgtaaaacaaaggatta

SEQ ID NO: 456488 - DNA, 19 bp, Mus musculus
  siRNA target sequence for Blm (NM_007550.2,3566-3584).
gtaaaacaaaggattataa

SEQ ID NO: 456489 - DNA, 19 bp, Mus musculus
  siRNA target sequence for Blm (NM_007550.2,3595-3613).
gtgactgatgacgtgaaaa

SEQ ID NO: 456490 - DNA, 19 bp, Mus musculus
  siRNA target sequence for Blm (NM_007550.2,3597-3615).
gactgatgacgtgaaaaat

SEQ ID NO: 456491 - DNA, 19 bp, Mus musculus
  siRNA target sequence for Blm (NM_007550.2,3604-3622).
gacgtgaaaaatattataa

SEQ ID NO: 456492 - DNA, 19 bp, Mus musculus
  siRNA target sequence for Blm (NM_007550.2,3606-3624).
cgtgaaaaatattataaga

SEQ ID NO: 456493 - DNA, 19 bp, Mus musculus
  siRNA target sequence for Blm (NM_007550.2,3607-3625).
gtgaaaaatattataagat

SEQ ID NO: 456494 - DNA, 19 bp, Mus musculus
  siRNA target sequence for Blm (NM_007550.2,3671-3689).
ctgctggaagatttactct

SEQ ID NO: 456495 - DNA, 19 bp, Mus musculus
  siRNA target sequence for Blm (NM_007550.2,3761-3779).
ctacatattcacgacataa

SEQ ID NO: 456496 - DNA, 19 bp, Mus musculus
  siRNA target sequence for Blm (NM_007550.2,3773-3791).
gacataatgccgaaagact

SEQ ID NO: 456497 - DNA, 19 bp, Mus musculus
  siRNA target sequence for Blm (NM_007550.2,3775-3793).
cataatgccgaaagacttt

SEQ ID NO: 456498 - DNA, 19 bp, Mus musculus
  siRNA target sequence for Blm (NM_007550.2,3853-3871).
caaccaattgcctatgtga

SEQ ID NO: 456499 - DNA, 19 bp, Mus musculus
  siRNA target sequence for Blm (NM_007550.2,3989-4007).
gagaagaggtagttaagaa

SEQ ID NO: 456500 - DNA, 19 bp, Mus musculus
  siRNA target sequence for Blm (NM_007550.2,4005-4023).
gaaatgtcttggagaactt

SEQ ID NO: 456501 - DNA, 19 bp, Mus musculus
  siRNA target sequence for Blm (NM_007550.2,4051-4069).
gtctttggtgtccattact

SEQ ID NO: 456502 - DNA, 19 bp, Mus musculus
  siRNA target sequence for Blm (NM_007550.2,4058-4076).
gtgtccattacttcaatat

SEQ ID NO: 456503 - DNA, 19 bp, Mus musculus
  siRNA target sequence for Blm (NM_007550.2,4095-4113).
caaaaagcttgcagaatct

SEQ ID NO: 456504 - DNA, 19 bp, Mus musculus
  siRNA target sequence for Blm (NM_007550.2,4127-4145).
ctgaggttttgcttcagat

SEQ ID NO: 456505 - DNA, 19 bp, Mus musculus
  siRNA target sequence for Blm (NM_007550.2,4195-4213).
ccagtattacagaagtact

SEQ ID NO: 456506 - DNA, 19 bp, Mus musculus
  siRNA target sequence for Blm (NM_007550.2,4304-4322).
cttctcactactttgcaaa

SEQ ID NO: 456507 - DNA, 19 bp, Mus musculus
  siRNA target sequence for Blm (NM_007550.2,4319-4337).
caaatcaaactagaaatga

SEQ ID NO: 456508 - DNA, 19 bp, Mus musculus
  siRNA target sequence for Blm (NM_007550.2,4439-4457).
cgacttctaaaagtaaatt

SEQ ID NO: 456509 - DNA, 19 bp, Mus musculus
  siRNA target sequence for Blm (NM_007550.2,4492-4510).
gcttctcaggcaacatcat

SEQ ID NO: 456510 - DNA, 19 bp, Mus musculus
  siRNA target sequence for Blm (NM_007550.2,4505-4523).
catcatcagccagtagaaa

SEQ ID NO: 456511 - DNA, 19 bp, Mus musculus
  siRNA target sequence for Blm (NM_007550.2,4517-4535).
gtagaaaactggggattat

SEQ ID NO: 456512 - DNA, 19 bp, Mus musculus
  siRNA target sequence for Blm (NM_007550.2,4563-4581).
gttcctcaggccttcatat

SEQ ID NO: 456513 - DNA, 19 bp, Mus musculus
  siRNA target sequence for Bnc (NM_007562.1,166-184).
gaggatcccccctgtgtat

SEQ ID NO: 456514 - DNA, 19 bp, Mus musculus
  siRNA target sequence for Bnc (NM_007562.1,218-236).
gtggtgttcgatattagca

SEQ ID NO: 456515 - DNA, 19 bp, Mus musculus
  siRNA target sequence for Bnc (NM_007562.1,267-285).
ctgttcgcctgaaaatcct

SEQ ID NO: 456516 - DNA, 19 bp, Mus musculus
  siRNA target sequence for Bnc (NM_007562.1,351-369).
ggacgcttcaggattacat

SEQ ID NO: 456517 - DNA, 19 bp, Mus musculus
  siRNA target sequence for Bnc (NM_007562.1,367-385).
catccgtggatatgtgtta

SEQ ID NO: 456518 - DNA, 19 bp, Mus musculus
  siRNA target sequence for Bnc (NM_007562.1,541-559).
gcccaccacggccaatgta

SEQ ID NO: 456519 - DNA, 19 bp, Mus musculus
  siRNA target sequence for Bnc (NM_007562.1,543-561).
ccaccacggccaatgtaga

SEQ ID NO: 456520 - DNA, 19 bp, Mus musculus
  siRNA target sequence for Bnc (NM_007562.1,546-564).
ccacggccaatgtagacat

SEQ ID NO: 456521 - DNA, 19 bp, Mus musculus
  siRNA target sequence for Bnc (NM_007562.1,644-662).
cacccctttgagaacctta

SEQ ID NO: 456522 - DNA, 19 bp, Mus musculus
  siRNA target sequence for Bnc (NM_007562.1,646-664).
cccctttgagaaccttata

SEQ ID NO: 456523 - DNA, 19 bp, Mus musculus
  siRNA target sequence for Bnc (NM_007562.1,647-665).
ccctttgagaaccttataa

SEQ ID NO: 456524 - DNA, 19 bp, Mus musculus
  siRNA target sequence for Bnc (NM_007562.1,726-744).
ggtcgctgcctgaacagta

SEQ ID NO: 456525 - DNA, 19 bp, Mus musculus
  siRNA target sequence for Bnc (NM_007562.1,729-747).
cgctgcctgaacagtacat

SEQ ID NO: 456526 - DNA, 19 bp, Mus musculus
  siRNA target sequence for Bnc (NM_007562.1,911-929).
gactccagctcatatagca

SEQ ID NO: 456527 - DNA, 19 bp, Mus musculus
  siRNA target sequence for Bnc (NM_007562.1,913-931).
ctccagctcatatagcatt

SEQ ID NO: 456528 - DNA, 19 bp, Mus musculus
  siRNA target sequence for Bnc (NM_007562.1,1026-1044).
cggcgtgcgagaagacatt

SEQ ID NO: 456529 - DNA, 19 bp, Mus musculus
  siRNA target sequence for Bnc (NM_007562.1,1028-1046).
gcgtgcgagaagacattct

SEQ ID NO: 456530 - DNA, 19 bp, Mus musculus
  siRNA target sequence for Bnc (NM_007562.1,1030-1048).
gtgcgagaagacattctat

SEQ ID NO: 456531 - DNA, 19 bp, Mus musculus
  siRNA target sequence for Bnc (NM_007562.1,1032-1050).
gcgagaagacattctatga

SEQ ID NO: 456532 - DNA, 19 bp, Mus musculus
  siRNA target sequence for Bnc (NM_007562.1,1080-1098).
ccgtccacctaaagatcaa

SEQ ID NO: 456533 - DNA, 19 bp, Mus musculus
  siRNA target sequence for Bnc (NM_007562.1,1110-1128).
cgatcgaagggtgtaacat

SEQ ID NO: 456534 - DNA, 19 bp, Mus musculus
  siRNA target sequence for Bnc (NM_007562.1,1261-1279).
caagcgcccaggtttcaca

SEQ ID NO: 456535 - DNA, 19 bp, Mus musculus
  siRNA target sequence for Bnc (NM_007562.1,1340-1358).
ggccaacctgctttctcaa

SEQ ID NO: 456536 - DNA, 19 bp, Mus musculus
  siRNA target sequence for Bnc (NM_007562.1,1354-1372).
ctcaagcattgggcaaaat

SEQ ID NO: 456537 - DNA, 19 bp, Mus musculus
  siRNA target sequence for Bnc (NM_007562.1,1365-1383).
ggcaaaatggtgtgctttt

SEQ ID NO: 456538 - DNA, 19 bp, Mus musculus
  siRNA target sequence for Bnc (NM_007562.1,1376-1394).
gtgcttttccctaatctaa

SEQ ID NO: 456539 - DNA, 19 bp, Mus musculus
  siRNA target sequence for Bnc (NM_007562.1,1379-1397).
cttttccctaatctaaaga

SEQ ID NO: 456540 - DNA, 19 bp, Mus musculus
  siRNA target sequence for Bnc (NM_007562.1,1535-1553).
gatgctcttcccaagaaga

SEQ ID NO: 456541 - DNA, 19 bp, Mus musculus
  siRNA target sequence for Bnc (NM_007562.1,1569-1587).
gtatgcctatcaaaataga

SEQ ID NO: 456542 - DNA, 19 bp, Mus musculus
  siRNA target sequence for Bnc (NM_007562.1,1771-1789).
ccatcttgaatctgtgatt

SEQ ID NO: 456543 - DNA, 19 bp, Mus musculus
  siRNA target sequence for Bnc (NM_007562.1,1901-1919).
ggccacgagcgccatttca

SEQ ID NO: 456544 - DNA, 19 bp, Mus musculus
  siRNA target sequence for Bnc (NM_007562.1,1903-1921).
ccacgagcgccatttcaca

SEQ ID NO: 456545 - DNA, 19 bp, Mus musculus
  siRNA target sequence for Bnc (NM_007562.1,2013-2031).
gggggatggcttttccttt

SEQ ID NO: 456546 - DNA, 19 bp, Mus musculus
  siRNA target sequence for Bnc (NM_007562.1,2145-2163).
gcatgaagacgcatgagaa

SEQ ID NO: 456547 - DNA, 19 bp, Mus musculus
  siRNA target sequence for Bnc (NM_007562.1,2262-2280).
gcctccaccagaaagtact

SEQ ID NO: 456548 - DNA, 19 bp, Mus musculus
  siRNA target sequence for Bnc (NM_007562.1,2266-2284).
ccaccagaaagtactgaat

SEQ ID NO: 456549 - DNA, 19 bp, Mus musculus
  siRNA target sequence for Bnc (NM_007562.1,2325-2343).
cttaccttctgcaagatgt

SEQ ID NO: 456550 - DNA, 19 bp, Mus musculus
  siRNA target sequence for Bnc (NM_007562.1,2434-2452).
ggtttacccaatatctcaa

SEQ ID NO: 456551 - DNA, 19 bp, Mus musculus
  siRNA target sequence for Bnc (NM_007562.1,2711-2729).
ccctctggtttgccaataa

SEQ ID NO: 456552 - DNA, 19 bp, Mus musculus
  siRNA target sequence for Bnc (NM_007562.1,2836-2854).
cacgatgttctcatctgtt

SEQ ID NO: 456553 - DNA, 19 bp, Mus musculus
  siRNA target sequence for Bnc (NM_007562.1,2847-2865).
catctgttcgcagtagaaa

SEQ ID NO: 456554 - DNA, 19 bp, Mus musculus
  siRNA target sequence for Brca1 (NM_009764.2,40-58).
ccgtccaaattcaagaagt

SEQ ID NO: 456555 - DNA, 19 bp, Mus musculus
  siRNA target sequence for Brca1 (NM_009764.2,41-59).
cgtccaaattcaagaagta

SEQ ID NO: 456556 - DNA, 19 bp, Mus musculus
  siRNA target sequence for Brca1 (NM_009764.2,95-113).
gtgtccgatctgtttggaa

SEQ ID NO: 456557 - DNA, 19 bp, Mus musculus
  siRNA target sequence for Brca1 (NM_009764.2,100-118).
cgatctgtttggaactgat

SEQ ID NO: 456558 - DNA, 19 bp, Mus musculus
  siRNA target sequence for Brca1 (NM_009764.2,144-162).
gaccacatattttgcaaat

SEQ ID NO: 456559 - DNA, 19 bp, Mus musculus
  siRNA target sequence for Brca1 (NM_009764.2,166-184).
gtatgctgaaacttcttaa

SEQ ID NO: 456560 - DNA, 19 bp, Mus musculus
  siRNA target sequence for Brca1 (NM_009764.2,210-228).
cctttgtgtaagaatgaga

SEQ ID NO: 456561 - DNA, 19 bp, Mus musculus
  siRNA target sequence for Brca1 (NM_009764.2,211-229).
ctttgtgtaagaatgagat

SEQ ID NO: 456562 - DNA, 19 bp, Mus musculus
  siRNA target sequence for Brca1 (NM_009764.2,246-264).
cagggaagcacaaggttta

SEQ ID NO: 456563 - DNA, 19 bp, Mus musculus
  siRNA target sequence for Brca1 (NM_009764.2,289-307).
gaataatggctgcttttga

SEQ ID NO: 456564 - DNA, 19 bp, Mus musculus
  siRNA target sequence for Brca1 (NM_009764.2,324-342).
cagcttacaaatggtttta

SEQ ID NO: 456565 - DNA, 19 bp, Mus musculus
  siRNA target sequence for Brca1 (NM_009764.2,367-385).
cttgtgagcgtttgaatga

SEQ ID NO: 456566 - DNA, 19 bp, Mus musculus
  siRNA target sequence for Brca1 (NM_009764.2,440-458).
ccaggtcgaacctggaaat

SEQ ID NO: 456567 - DNA, 19 bp, Mus musculus
  siRNA target sequence for Brca1 (NM_009764.2,616-634).
gtgtgagagaccaggaatt

SEQ ID NO: 456568 - DNA, 19 bp, Mus musculus
  siRNA target sequence for Brca1 (NM_009764.2,704-722).
gttttctgagggcataaga

SEQ ID NO: 456569 - DNA, 19 bp, Mus musculus
  siRNA target sequence for Brca1 (NM_009764.2,709-727).
ctgagggcataagaaacat

SEQ ID NO: 456570 - DNA, 19 bp, Mus musculus
  siRNA target sequence for Brca1 (NM_009764.2,765-783).
gagaatcatgcaactgaaa

SEQ ID NO: 456571 - DNA, 19 bp, Mus musculus
  siRNA target sequence for Brca1 (NM_009764.2,870-888).
cctgagaccagcagtttat

SEQ ID NO: 456572 - DNA, 19 bp, Mus musculus
  siRNA target sequence for Brca1 (NM_009764.2,871-889).
ctgagaccagcagtttatt

SEQ ID NO: 456573 - DNA, 19 bp, Mus musculus
  siRNA target sequence for Brca1 (NM_009764.2,920-938).
ggctgaattctgtaataaa

SEQ ID NO: 456574 - DNA, 19 bp, Mus musculus
  siRNA target sequence for Brca1 (NM_009764.2,973-991).
gcagatgggctgcaagtaa

SEQ ID NO: 456575 - DNA, 19 bp, Mus musculus
  siRNA target sequence for Brca1 (NM_009764.2,974-992).
cagatgggctgcaagtaaa

SEQ ID NO: 456576 - DNA, 19 bp, Mus musculus
  siRNA target sequence for Brca1 (NM_009764.2,1046-1064).
cgctgactcccttagtgat

SEQ ID NO: 456577 - DNA, 19 bp, Mus musculus
  siRNA target sequence for Brca1 (NM_009764.2,1047-1065).
gctgactcccttagtgata

SEQ ID NO: 456578 - DNA, 19 bp, Mus musculus
  siRNA target sequence for Brca1 (NM_009764.2,1121-1139).
cgatgttccttggataaca

SEQ ID NO: 456579 - DNA, 19 bp, Mus musculus
  siRNA target sequence for Brca1 (NM_009764.2,1125-1143).
gttccttggataacactaa

SEQ ID NO: 456580 - DNA, 19 bp, Mus musculus
  siRNA target sequence for Brca1 (NM_009764.2,1147-1165).
gcagcgttcagaaagttaa

SEQ ID NO: 456581 - DNA, 19 bp, Mus musculus
  siRNA target sequence for Brca1 (NM_009764.2,1148-1166).
cagcgttcagaaagttaat

SEQ ID NO: 456582 - DNA, 19 bp, Mus musculus
  siRNA target sequence for Brca1 (NM_009764.2,1150-1168).
gcgttcagaaagttaatga

SEQ ID NO: 456583 - DNA, 19 bp, Mus musculus
  siRNA target sequence for Brca1 (NM_009764.2,1177-1195).
ccagaactggtgaaatgtt

SEQ ID NO: 456584 - DNA, 19 bp, Mus musculus
  siRNA target sequence for Brca1 (NM_009764.2,1217-1235).
caggaggcacgagtcaaat

SEQ ID NO: 456585 - DNA, 19 bp, Mus musculus
  siRNA target sequence for Brca1 (NM_009764.2,1220-1238).
gaggcacgagtcaaatgct

SEQ ID NO: 456586 - DNA, 19 bp, Mus musculus
  siRNA target sequence for Brca1 (NM_009764.2,1275-1293).
gatgggggttttagttctt

SEQ ID NO: 456587 - DNA, 19 bp, Mus musculus
  siRNA target sequence for Brca1 (NM_009764.2,1316-1334).
ccccgacccccatcatact

SEQ ID NO: 456588 - DNA, 19 bp, Mus musculus
  siRNA target sequence for Brca1 (NM_009764.2,1317-1335).
cccgacccccatcatactt

SEQ ID NO: 456589 - DNA, 19 bp, Mus musculus
  siRNA target sequence for Brca1 (NM_009764.2,1318-1336).
ccgacccccatcatacttt

SEQ ID NO: 456590 - DNA, 19 bp, Mus musculus
  siRNA target sequence for Brca1 (NM_009764.2,1319-1337).
cgacccccatcatacttta

SEQ ID NO: 456591 - DNA, 19 bp, Mus musculus
  siRNA target sequence for Brca1 (NM_009764.2,1320-1338).
gacccccatcatactttaa

SEQ ID NO: 456592 - DNA, 19 bp, Mus musculus
  siRNA target sequence for Brca1 (NM_009764.2,1323-1341).
ccccatcatactttaatgt

SEQ ID NO: 456593 - DNA, 19 bp, Mus musculus
  siRNA target sequence for Brca1 (NM_009764.2,1326-1344).
catcatactttaatgtgta

SEQ ID NO: 456594 - DNA, 19 bp, Mus musculus
  siRNA target sequence for Brca1 (NM_009764.2,1368-1386).
ccagtagaggataatatca

SEQ ID NO: 456595 - DNA, 19 bp, Mus musculus
  siRNA target sequence for Brca1 (NM_009764.2,1491-1509).
caagagcagcccttcacaa

SEQ ID NO: 456596 - DNA, 19 bp, Mus musculus
  siRNA target sequence for Brca1 (NM_009764.2,1499-1517).
gcccttcacaaataaatta

SEQ ID NO: 456597 - DNA, 19 bp, Mus musculus
  siRNA target sequence for Brca1 (NM_009764.2,1644-1662).
gtgagtactaccagtaact

SEQ ID NO: 456598 - DNA, 19 bp, Mus musculus
  siRNA target sequence for Brca1 (NM_009764.2,1646-1664).
gagtactaccagtaactgt

SEQ ID NO: 456599 - DNA, 19 bp, Mus musculus
  siRNA target sequence for Brca1 (NM_009764.2,1661-1679).
ctgtcaggagaacaaaata

SEQ ID NO: 456600 - DNA, 19 bp, Mus musculus
  siRNA target sequence for Brca1 (NM_009764.2,1684-1702).
gtagtaatctccagaaaga

SEQ ID NO: 456601 - DNA, 19 bp, Mus musculus
  siRNA target sequence for Brca1 (NM_009764.2,1711-1729).
ctcatccaactgaatcatt

SEQ ID NO: 456602 - DNA, 19 bp, Mus musculus
  siRNA target sequence for Brca1 (NM_009764.2,1713-1731).
catccaactgaatcattga

SEQ ID NO: 456603 - DNA, 19 bp, Mus musculus
  siRNA target sequence for Brca1 (NM_009764.2,1752-1770).
gcaggagccaaatctataa

SEQ ID NO: 456604 - DNA, 19 bp, Mus musculus
  siRNA target sequence for Brca1 (NM_009764.2,1755-1773).
ggagccaaatctataagca

SEQ ID NO: 456605 - DNA, 19 bp, Mus musculus
  siRNA target sequence for Brca1 (NM_009764.2,1805-1823).
cgtccacagttcaaaagca

SEQ ID NO: 456606 - DNA, 19 bp, Mus musculus
  siRNA target sequence for Brca1 (NM_009764.2,1872-1890).
ccacttgaaccaatcagta

SEQ ID NO: 456607 - DNA, 19 bp, Mus musculus
  siRNA target sequence for Brca1 (NM_009764.2,1875-1893).
cttgaaccaatcagtagaa

SEQ ID NO: 456608 - DNA, 19 bp, Mus musculus
  siRNA target sequence for Brca1 (NM_009764.2,1912-1930).
gtgctgagcttcaaatcga

SEQ ID NO: 456609 - DNA, 19 bp, Mus musculus
  siRNA target sequence for Brca1 (NM_009764.2,1914-1932).
gctgagcttcaaatcgata

SEQ ID NO: 456610 - DNA, 19 bp, Mus musculus
  siRNA target sequence for Brca1 (NM_009764.2,1917-1935).
gagcttcaaatcgatagtt

SEQ ID NO: 456611 - DNA, 19 bp, Mus musculus
  siRNA target sequence for Brca1 (NM_009764.2,1919-1937).
gcttcaaatcgatagttgt

SEQ ID NO: 456612 - DNA, 19 bp, Mus musculus
  siRNA target sequence for Brca1 (NM_009764.2,2048-2066).
cgagccaaatgaacacata

SEQ ID NO: 456613 - DNA, 19 bp, Mus musculus
  siRNA target sequence for Brca1 (NM_009764.2,2052-2070).
ccaaatgaacacataagga

SEQ ID NO: 456614 - DNA, 19 bp, Mus musculus
  siRNA target sequence for Brca1 (NM_009764.2,2074-2092).
gacgtgccagcgatgcttt

SEQ ID NO: 456615 - DNA, 19 bp, Mus musculus
  siRNA target sequence for Brca1 (NM_009764.2,2114-2132).
caaagctggtttattaact

SEQ ID NO: 456616 - DNA, 19 bp, Mus musculus
  siRNA target sequence for Brca1 (NM_009764.2,2134-2152).
gctgttcaagtcctagaaa

SEQ ID NO: 456617 - DNA, 19 bp, Mus musculus
  siRNA target sequence for Brca1 (NM_009764.2,2190-2208).
ggaacagagcaacttgaaa

SEQ ID NO: 456618 - DNA, 19 bp, Mus musculus
  siRNA target sequence for Brca1 (NM_009764.2,2202-2220).
cttgaaacacgccaaatgt

SEQ ID NO: 456619 - DNA, 19 bp, Mus musculus
  siRNA target sequence for Brca1 (NM_009764.2,2262-2280).
gagcccagtggcaaaacca

SEQ ID NO: 456620 - DNA, 19 bp, Mus musculus
  siRNA target sequence for Brca1 (NM_009764.2,2363-2381).
cgctcacactgtcagatat

SEQ ID NO: 456621 - DNA, 19 bp, Mus musculus
  siRNA target sequence for Brca1 (NM_009764.2,2367-2385).
cacactgtcagatatgcaa

SEQ ID NO: 456622 - DNA, 19 bp, Mus musculus
  siRNA target sequence for Brca1 (NM_009764.2,2389-2407).
caggatccgctcagtgtat

SEQ ID NO: 456623 - DNA, 19 bp, Mus musculus
  siRNA target sequence for Brca1 (NM_009764.2,2391-2409).
ggatccgctcagtgtatga

SEQ ID NO: 456624 - DNA, 19 bp, Mus musculus
  siRNA target sequence for Brca1 (NM_009764.2,2442-2460).
ctcgtccatggctctaaca

SEQ ID NO: 456625 - DNA, 19 bp, Mus musculus
  siRNA target sequence for Brca1 (NM_009764.2,2547-2565).
gaacttgatactcagtatt

SEQ ID NO: 456626 - DNA, 19 bp, Mus musculus
  siRNA target sequence for Brca1 (NM_009764.2,2570-2588).
gaatacatttcaagtttca

SEQ ID NO: 456627 - DNA, 19 bp, Mus musculus
  siRNA target sequence for Brca1 (NM_009764.2,2591-2609).
gcgtcagtcatttgcttta

SEQ ID NO: 456628 - DNA, 19 bp, Mus musculus
  siRNA target sequence for Brca1 (NM_009764.2,2592-2610).
cgtcagtcatttgctttat

SEQ ID NO: 456629 - DNA, 19 bp, Mus musculus
  siRNA target sequence for Brca1 (NM_009764.2,2678-2696).
ggtgacagctaaaggtaaa

SEQ ID NO: 456630 - DNA, 19 bp, Mus musculus
  siRNA target sequence for Brca1 (NM_009764.2,2926-2944).
ctcccatcaggtcatctat

SEQ ID NO: 456631 - DNA, 19 bp, Mus musculus
  siRNA target sequence for Brca1 (NM_009764.2,2933-2951).
caggtcatctataaaaact

SEQ ID NO: 456632 - DNA, 19 bp, Mus musculus
  siRNA target sequence for Brca1 (NM_009764.2,2976-2994).
ggacgatttgagagacata

SEQ ID NO: 456633 - DNA, 19 bp, Mus musculus
  siRNA target sequence for Brca1 (NM_009764.2,2979-2997).
cgatttgagagacatacat

SEQ ID NO: 456634 - DNA, 19 bp, Mus musculus
  siRNA target sequence for Brca1 (NM_009764.2,3048-3066).
cacacagttagcctgaata

SEQ ID NO: 456635 - DNA, 19 bp, Mus musculus
  siRNA target sequence for Brca1 (NM_009764.2,3059-3077).
cctgaataacagaggaaat

SEQ ID NO: 456636 - DNA, 19 bp, Mus musculus
  siRNA target sequence for Brca1 (NM_009764.2,3091-3109).
ccggctcgggcagtattca

SEQ ID NO: 456637 - DNA, 19 bp, Mus musculus
  siRNA target sequence for Brca1 (NM_009764.2,3092-3110).
cggctcgggcagtattcat

SEQ ID NO: 456638 - DNA, 19 bp, Mus musculus
  siRNA target sequence for Brca1 (NM_009764.2,3094-3112).
gctcgggcagtattcatga

SEQ ID NO: 456639 - DNA, 19 bp, Mus musculus
  siRNA target sequence for Brca1 (NM_009764.2,3095-3113).
ctcgggcagtattcatgaa

SEQ ID NO: 456640 - DNA, 19 bp, Mus musculus
  siRNA target sequence for Brca1 (NM_009764.2,3097-3115).
cgggcagtattcatgaagt

SEQ ID NO: 456641 - DNA, 19 bp, Mus musculus
  siRNA target sequence for Brca1 (NM_009764.2,3098-3116).
gggcagtattcatgaagta

SEQ ID NO: 456642 - DNA, 19 bp, Mus musculus
  siRNA target sequence for Brca1 (NM_009764.2,3099-3117).
ggcagtattcatgaagtat

SEQ ID NO: 456643 - DNA, 19 bp, Mus musculus
  siRNA target sequence for Brca1 (NM_009764.2,3173-3191).
gaacactgtgcctccatta

SEQ ID NO: 456644 - DNA, 19 bp, Mus musculus
  siRNA target sequence for Brca1 (NM_009764.2,3176-3194).
cactgtgcctccattagat

SEQ ID NO: 456645 - DNA, 19 bp, Mus musculus
  siRNA target sequence for Brca1 (NM_009764.2,3180-3198).
gtgcctccattagatagta

SEQ ID NO: 456646 - DNA, 19 bp, Mus musculus
  siRNA target sequence for Brca1 (NM_009764.2,3218-3236).
gcaaagtgttcctgtaagt

SEQ ID NO: 456647 - DNA, 19 bp, Mus musculus
  siRNA target sequence for Brca1 (NM_009764.2,3223-3241).
gtgttcctgtaagtgataa

SEQ ID NO: 456648 - DNA, 19 bp, Mus musculus
  siRNA target sequence for Brca1 (NM_009764.2,3225-3243).
gttcctgtaagtgataagt

SEQ ID NO: 456649 - DNA, 19 bp, Mus musculus
  siRNA target sequence for Brca1 (NM_009764.2,3312-3330).
catcttgagcaatctatga

SEQ ID NO: 456650 - DNA, 19 bp, Mus musculus
  siRNA target sequence for Brca1 (NM_009764.2,3522-3540).
cacagagcgtctaggaaat

SEQ ID NO: 456651 - DNA, 19 bp, Mus musculus
  siRNA target sequence for Brca1 (NM_009764.2,3524-3542).
cagagcgtctaggaaatta

SEQ ID NO: 456652 - DNA, 19 bp, Mus musculus
  siRNA target sequence for Brca1 (NM_009764.2,3526-3544).
gagcgtctaggaaattaga

SEQ ID NO: 456653 - DNA, 19 bp, Mus musculus
  siRNA target sequence for Brca1 (NM_009764.2,3528-3546).
gcgtctaggaaattagaat

SEQ ID NO: 456654 - DNA, 19 bp, Mus musculus
  siRNA target sequence for Brca1 (NM_009764.2,3597-3615).
cacttactgagcagaataa

SEQ ID NO: 456655 - DNA, 19 bp, Mus musculus
  siRNA target sequence for Brca1 (NM_009764.2,3706-3724).
gcagcagtgactgcaataa

SEQ ID NO: 456656 - DNA, 19 bp, Mus musculus
  siRNA target sequence for Brca1 (NM_009764.2,3707-3725).
cagcagtgactgcaataat

SEQ ID NO: 456657 - DNA, 19 bp, Mus musculus
  siRNA target sequence for Brca1 (NM_009764.2,3745-3763).
catctcaggagcatcagtt

SEQ ID NO: 456658 - DNA, 19 bp, Mus musculus
  siRNA target sequence for Brca1 (NM_009764.2,3892-3910).
gtgggaatgaggaagcttt

SEQ ID NO: 456659 - DNA, 19 bp, Mus musculus
  siRNA target sequence for Brca1 (NM_009764.2,3912-3930).
ctaagtgacaaggaattga

SEQ ID NO: 456660 - DNA, 19 bp, Mus musculus
  siRNA target sequence for Brca1 (NM_009764.2,3955-3973).
cttgcctagaagaggataa

SEQ ID NO: 456661 - DNA, 19 bp, Mus musculus
  siRNA target sequence for Brca1 (NM_009764.2,3958-3976).
gcctagaagaggataatga

SEQ ID NO: 456662 - DNA, 19 bp, Mus musculus
  siRNA target sequence for Brca1 (NM_009764.2,3975-3993).
gaccaagaagaggatagta

SEQ ID NO: 456663 - DNA, 19 bp, Mus musculus
  siRNA target sequence for Brca1 (NM_009764.2,3977-3995).
ccaagaagaggatagtata

SEQ ID NO: 456664 - DNA, 19 bp, Mus musculus
  siRNA target sequence for Brca1 (NM_009764.2,4016-4034).
cggatacgagagtgaaaca

SEQ ID NO: 456665 - DNA, 19 bp, Mus musculus
  siRNA target sequence for Brca1 (NM_009764.2,4017-4035).
ggatacgagagtgaaacaa

SEQ ID NO: 456666 - DNA, 19 bp, Mus musculus
  siRNA target sequence for Brca1 (NM_009764.2,4018-4036).
gatacgagagtgaaacaaa

SEQ ID NO: 456667 - DNA, 19 bp, Mus musculus
  siRNA target sequence for Brca1 (NM_009764.2,4022-4040).
cgagagtgaaacaaacctt

SEQ ID NO: 456668 - DNA, 19 bp, Mus musculus
  siRNA target sequence for Brca1 (NM_009764.2,4047-4065).
gactgctcgcagagtgata

SEQ ID NO: 456669 - DNA, 19 bp, Mus musculus
  siRNA target sequence for Brca1 (NM_009764.2,4049-4067).
ctgctcgcagagtgatatt

SEQ ID NO: 456670 - DNA, 19 bp, Mus musculus
  siRNA target sequence for Brca1 (NM_009764.2,4241-4259).
gtcaggagcagcaatttta

SEQ ID NO: 456671 - DNA, 19 bp, Mus musculus
  siRNA target sequence for Brca1 (NM_009764.2,4248-4266).
gcagcaattttaacttcaa

SEQ ID NO: 456672 - DNA, 19 bp, Mus musculus
  siRNA target sequence for Brca1 (NM_009764.2,4249-4267).
cagcaattttaacttcaaa

SEQ ID NO: 456673 - DNA, 19 bp, Mus musculus
  siRNA target sequence for Brca1 (NM_009764.2,4280-4298).
gaatcctgtaagccaaaat

SEQ ID NO: 456674 - DNA, 19 bp, Mus musculus
  siRNA target sequence for Brca1 (NM_009764.2,4284-4302).
cctgtaagccaaaatttga

SEQ ID NO: 456675 - DNA, 19 bp, Mus musculus
  siRNA target sequence for Brca1 (NM_009764.2,4304-4322).
gagcgcttgtgatgacaaa

SEQ ID NO: 456676 - DNA, 19 bp, Mus musculus
  siRNA target sequence for Brca1 (NM_009764.2,4306-4324).
gcgcttgtgatgacaaatt

SEQ ID NO: 456677 - DNA, 19 bp, Mus musculus
  siRNA target sequence for Brca1 (NM_009764.2,4309-4327).
cttgtgatgacaaattcca

SEQ ID NO: 456678 - DNA, 19 bp, Mus musculus
  siRNA target sequence for Brca1 (NM_009764.2,4433-4451).
ctgctctaggcatcttcaa

SEQ ID NO: 456679 - DNA, 19 bp, Mus musculus
  siRNA target sequence for Brca1 (NM_009764.2,4505-4523).
gtcatctgagccacacaat

SEQ ID NO: 456680 - DNA, 19 bp, Mus musculus
  siRNA target sequence for Brca1 (NM_009764.2,4589-4607).
cagccttttctctagtaga

SEQ ID NO: 456681 - DNA, 19 bp, Mus musculus
  siRNA target sequence for Brca1 (NM_009764.2,4757-4775).
gataaagccggaattgaca

SEQ ID NO: 456682 - DNA, 19 bp, Mus musculus
  siRNA target sequence for Brca1 (NM_009764.2,4766-4784).
ggaattgacatcttcagaa

SEQ ID NO: 456683 - DNA, 19 bp, Mus musculus
  siRNA target sequence for Brca1 (NM_009764.2,4791-4809).
gcggatagagacatatcca

SEQ ID NO: 456684 - DNA, 19 bp, Mus musculus
  siRNA target sequence for Brca1 (NM_009764.2,4792-4810).
cggatagagacatatccat

SEQ ID NO: 456685 - DNA, 19 bp, Mus musculus
  siRNA target sequence for Brca1 (NM_009764.2,4839-4857).
gtaatgaccgtgcaaaagt

SEQ ID NO: 456686 - DNA, 19 bp, Mus musculus
  siRNA target sequence for Brca1 (NM_009764.2,4899-4917).
gaggagactacacatgtaa

SEQ ID NO: 456687 - DNA, 19 bp, Mus musculus
  siRNA target sequence for Brca1 (NM_009764.2,4902-4920).
gagactacacatgtaatta

SEQ ID NO: 456688 - DNA, 19 bp, Mus musculus
  siRNA target sequence for Brca1 (NM_009764.2,4904-4922).
gactacacatgtaattata

SEQ ID NO: 456689 - DNA, 19 bp, Mus musculus
  siRNA target sequence for Brca1 (NM_009764.2,4945-4963).
gtgagcggacactgaaata

SEQ ID NO: 456690 - DNA, 19 bp, Mus musculus
  siRNA target sequence for Brca1 (NM_009764.2,4947-4965).
gagcggacactgaaatatt

SEQ ID NO: 456691 - DNA, 19 bp, Mus musculus
  siRNA target sequence for Brca1 (NM_009764.2,4949-4967).
gcggacactgaaatatttt

SEQ ID NO: 456692 - DNA, 19 bp, Mus musculus
  siRNA target sequence for Brca1 (NM_009764.2,4980-4998).
ggaggaaagtggatagtta

SEQ ID NO: 456693 - DNA, 19 bp, Mus musculus
  siRNA target sequence for Brca1 (NM_009764.2,4984-5002).
gaaagtggatagttagcta

SEQ ID NO: 456694 - DNA, 19 bp, Mus musculus
  siRNA target sequence for Brca1 (NM_009764.2,4988-5006).
gtggatagttagctattca

SEQ ID NO: 456695 - DNA, 19 bp, Mus musculus
  siRNA target sequence for Brca1 (NM_009764.2,5009-5027).
ggtggtccggtctatccaa

SEQ ID NO: 456696 - DNA, 19 bp, Mus musculus
  siRNA target sequence for Brca1 (NM_009764.2,5018-5036).
gtctatccaagaaagaaga

SEQ ID NO: 456697 - DNA, 19 bp, Mus musculus
  siRNA target sequence for Brca1 (NM_009764.2,5037-5055).
cttctgaatgtgcatgaat

SEQ ID NO: 456698 - DNA, 19 bp, Mus musculus
  siRNA target sequence for Brca1 (NM_009764.2,5138-5156).
gggcctacaggtctattgt

SEQ ID NO: 456699 - DNA, 19 bp, Mus musculus
  siRNA target sequence for Brca1 (NM_009764.2,5139-5157).
ggcctacaggtctattgtt

SEQ ID NO: 456700 - DNA, 19 bp, Mus musculus
  siRNA target sequence for Brca1 (NM_009764.2,5141-5159).
cctacaggtctattgttgt

SEQ ID NO: 456701 - DNA, 19 bp, Mus musculus
  siRNA target sequence for Brca1 (NM_009764.2,5257-5275).
caggtgctcatctagttgt

SEQ ID NO: 456702 - DNA, 19 bp, Mus musculus
  siRNA target sequence for Brca1 (NM_009764.2,5335-5353).
gcaaggcacgtcttgtgat

SEQ ID NO: 456703 - DNA, 19 bp, Mus musculus
  siRNA target sequence for Brca1 (NM_009764.2,5406-5424).
gcctacctggtacagaata

SEQ ID NO: 456704 - DNA, 19 bp, Mus musculus
  siRNA target sequence for Brpf1 (NM_030178.1,196-214).
ggcaactaagccaccatat

SEQ ID NO: 456705 - DNA, 19 bp, Mus musculus
  siRNA target sequence for Brpf1 (NM_030178.1,198-216).
caactaagccaccatatga

SEQ ID NO: 456706 - DNA, 19 bp, Mus musculus
  siRNA target sequence for Brpf1 (NM_030178.1,323-341).
ctgcgcaagcacaaaaaga

SEQ ID NO: 456707 - DNA, 19 bp, Mus musculus
  siRNA target sequence for Brpf1 (NM_030178.1,657-675).
ccagtgctgctcccaaatt

SEQ ID NO: 456708 - DNA, 19 bp, Mus musculus
  siRNA target sequence for Brpf1 (NM_030178.1,745-763).
ccggtacatcgagaaatct

SEQ ID NO: 456709 - DNA, 19 bp, Mus musculus
  siRNA target sequence for Brpf1 (NM_030178.1,844-862).
gaagactgagggtgtaagt

SEQ ID NO: 456710 - DNA, 19 bp, Mus musculus
  siRNA target sequence for Brpf1 (NM_030178.1,869-887).
ccacaagagatctttgagt

SEQ ID NO: 456711 - DNA, 19 bp, Mus musculus
  siRNA target sequence for Brpf1 (NM_030178.1,870-888).
cacaagagatctttgagta

SEQ ID NO: 456712 - DNA, 19 bp, Mus musculus
  siRNA target sequence for Brpf1 (NM_030178.1,916-934).
gtactttgagagtcacaat

SEQ ID NO: 456713 - DNA, 19 bp, Mus musculus
  siRNA target sequence for Brpf1 (NM_030178.1,1294-1312).
gaagctcacctgctacatt

SEQ ID NO: 456714 - DNA, 19 bp, Mus musculus
  siRNA target sequence for Brpf1 (NM_030178.1,1430-1448).
gagacaggtgccaatggta

SEQ ID NO: 456715 - DNA, 19 bp, Mus musculus
  siRNA target sequence for Brpf1 (NM_030178.1,1698-1716).
cgccacacaggctcagtaa

SEQ ID NO: 456716 - DNA, 19 bp, Mus musculus
  siRNA target sequence for Brpf1 (NM_030178.1,1703-1721).
cacaggctcagtaagatca

SEQ ID NO: 456717 - DNA, 19 bp, Mus musculus
  siRNA target sequence for Brpf1 (NM_030178.1,1780-1798).
gactctgaaacgacaatca

SEQ ID NO: 456718 - DNA, 19 bp, Mus musculus
  siRNA target sequence for Brpf1 (NM_030178.1,1969-1987).
gatccgcaagcgagagaaa

SEQ ID NO: 456719 - DNA, 19 bp, Mus musculus
  siRNA target sequence for Brpf1 (NM_030178.1,2198-2216).
gcttaccgctacttgaact

SEQ ID NO: 456720 - DNA, 19 bp, Mus musculus
  siRNA target sequence for Brpf1 (NM_030178.1,2199-2217).
cttaccgctacttgaactt

SEQ ID NO: 456721 - DNA, 19 bp, Mus musculus
  siRNA target sequence for Brpf1 (NM_030178.1,2203-2221).
ccgctacttgaactttgat

SEQ ID NO: 456722 - DNA, 19 bp, Mus musculus
  siRNA target sequence for Brpf1 (NM_030178.1,2253-2271).
gcaactgcctaaagtataa

SEQ ID NO: 456723 - DNA, 19 bp, Mus musculus
  siRNA target sequence for Brpf1 (NM_030178.1,2346-2364).
ggcgacaggcagaaaaaat

SEQ ID NO: 456724 - DNA, 19 bp, Mus musculus
  siRNA target sequence for Brpf1 (NM_030178.1,2357-2375).
gaaaaaatgggcattgact

SEQ ID NO: 456725 - DNA, 19 bp, Mus musculus
  siRNA target sequence for Brpf1 (NM_030178.1,2422-2440).
ctcacaccacactgaagat

SEQ ID NO: 456726 - DNA, 19 bp, Mus musculus
  siRNA target sequence for Brpf1 (NM_030178.1,2557-2575).
ccgctctcggcgtgcaaaa

SEQ ID NO: 456727 - DNA, 19 bp, Mus musculus
  siRNA target sequence for Brpf1 (NM_030178.1,2558-2576).
cgctctcggcgtgcaaaaa

SEQ ID NO: 456728 - DNA, 19 bp, Mus musculus
  siRNA target sequence for Brpf1 (NM_030178.1,2559-2577).
gctctcggcgtgcaaaaat

SEQ ID NO: 456729 - DNA, 19 bp, Mus musculus
  siRNA target sequence for Brpf1 (NM_030178.1,2562-2580).
ctcggcgtgcaaaaatgat

SEQ ID NO: 456730 - DNA, 19 bp, Mus musculus
  siRNA target sequence for Brpf1 (NM_030178.1,2564-2582).
cggcgtgcaaaaatgatca

SEQ ID NO: 456731 - DNA, 19 bp, Mus musculus
  siRNA target sequence for Brpf1 (NM_030178.1,2565-2583).
ggcgtgcaaaaatgatcaa

SEQ ID NO: 456732 - DNA, 19 bp, Mus musculus
  siRNA target sequence for Brpf1 (NM_030178.1,2762-2780).
ggcctgggtcccaacatgt

SEQ ID NO: 456733 - DNA, 19 bp, Mus musculus
  siRNA target sequence for Brpf1 (NM_030178.1,3195-3213).
gcacaactccctcaaaaca

SEQ ID NO: 456734 - DNA, 19 bp, Mus musculus
  siRNA target sequence for Brpf1 (NM_030178.1,3254-3272).
gaagacagtagtgaagata

SEQ ID NO: 456735 - DNA, 19 bp, Mus musculus
  siRNA target sequence for Brpf1 (NM_030178.1,3525-3543).
gccgaggctatccatcata

SEQ ID NO: 456736 - DNA, 19 bp, Mus musculus
  siRNA target sequence for Brpf1 (NM_030178.1,3544-3562).
cccagctctgatcattgat

SEQ ID NO: 456737 - DNA, 19 bp, Mus musculus
  siRNA target sequence for Brpf1 (NM_030178.1,3744-3762).
gtgtgaaccaggatctaga

SEQ ID NO: 456738 - DNA, 19 bp, Mus musculus
  siRNA target sequence for Brpf1 (NM_030178.1,3748-3766).
gaaccaggatctagacaaa

SEQ ID NO: 456739 - DNA, 19 bp, Mus musculus
  siRNA target sequence for Bteb1 (NM_010638.2,684-702).
gggacacctggaaggatta

SEQ ID NO: 456740 - DNA, 19 bp, Mus musculus
  siRNA target sequence for Bteb1 (NM_010638.2,685-703).
ggacacctggaaggattat

SEQ ID NO: 456741 - DNA, 19 bp, Mus musculus
  siRNA target sequence for Bteb1 (NM_010638.2,686-704).
gacacctggaaggattatt

SEQ ID NO: 456742 - DNA, 19 bp, Mus musculus
  siRNA target sequence for Bteb1 (NM_010638.2,729-747).
gcttgttggacctcaacaa

SEQ ID NO: 456743 - DNA, 19 bp, Mus musculus
  siRNA target sequence for Bteb1 (NM_010638.2,730-748).
cttgttggacctcaacaaa

SEQ ID NO: 456744 - DNA, 19 bp, Mus musculus
  siRNA target sequence for Bteb1 (NM_010638.2,793-811).
gagtcccgatgaggatata

SEQ ID NO: 456745 - DNA, 19 bp, Mus musculus
  siRNA target sequence for Bteb1 (NM_010638.2,995-1013).
ggaaaatcctcccatctta

SEQ ID NO: 456746 - DNA, 19 bp, Mus musculus
  siRNA target sequence for Bteb1 (NM_010638.2,1067-1085).
gactgccttaaaaagttct

SEQ ID NO: 456747 - DNA, 19 bp, Mus musculus
  siRNA target sequence for Bteb1 (NM_010638.2,1220-1238).
cccagcatgatcaagagat

SEQ ID NO: 456748 - DNA, 19 bp, Mus musculus
  siRNA target sequence for C130067A03Rik (NM_177239.1,68-86).
gccgggaaatgatgaaagt

SEQ ID NO: 456749 - DNA, 19 bp, Mus musculus
  siRNA target sequence for C130067A03Rik (NM_177239.1,85-103).
gtacagcatcagtttttca

SEQ ID NO: 456750 - DNA, 19 bp, Mus musculus
  siRNA target sequence for C130067A03Rik (NM_177239.1,105-123).
gatcactatcttgattcaa

SEQ ID NO: 456751 - DNA, 19 bp, Mus musculus
  siRNA target sequence for C130067A03Rik (NM_177239.1,190-208).
ctatcattgagaaaatgct

SEQ ID NO: 456752 - DNA, 19 bp, Mus musculus
  siRNA target sequence for C130067A03Rik (NM_177239.1,336-354).
gcaaaaccagccagtcatt

SEQ ID NO: 456753 - DNA, 19 bp, Mus musculus
  siRNA target sequence for C130067A03Rik (NM_177239.1,345-363).
gccagtcattcagtaaagt

SEQ ID NO: 456754 - DNA, 19 bp, Mus musculus
  siRNA target sequence for C130067A03Rik (NM_177239.1,422-440).
gaccaaaatcgcaacacta

SEQ ID NO: 456755 - DNA, 19 bp, Mus musculus
  siRNA target sequence for C130067A03Rik (NM_177239.1,425-443).
caaaatcgcaacactactt

SEQ ID NO: 456756 - DNA, 19 bp, Mus musculus
  siRNA target sequence for C130067A03Rik (NM_177239.1,431-449).
cgcaacactacttaaaagt

SEQ ID NO: 456757 - DNA, 19 bp, Mus musculus
  siRNA target sequence for C130067A03Rik (NM_177239.1,448-466).
gtcgcacagttttacaagt

SEQ ID NO: 456758 - DNA, 19 bp, Mus musculus
  siRNA target sequence for C130067A03Rik (NM_177239.1,477-495).
gccagacagtactttaaaa

SEQ ID NO: 456759 - DNA, 19 bp, Mus musculus
  siRNA target sequence for C130067A03Rik (NM_177239.1,650-668).
gttatctgacgatgaagat

SEQ ID NO: 456760 - DNA, 19 bp, Mus musculus
  siRNA target sequence for C130067A03Rik (NM_177239.1,684-702).
gagctggatgagttgactt

SEQ ID NO: 456761 - DNA, 19 bp, Mus musculus
  siRNA target sequence for C130067A03Rik (NM_177239.1,693-711).
gagttgacttctcaaacat

SEQ ID NO: 456762 - DNA, 19 bp, Mus musculus
  siRNA target sequence for C130067A03Rik (NM_177239.1,747-765).
cctaatagtaaaatgtata

SEQ ID NO: 456763 - DNA, 19 bp, Mus musculus
  siRNA target sequence for C130067A03Rik (NM_177239.1,767-785).
caccaatcaaggagaatta

SEQ ID NO: 456764 - DNA, 19 bp, Mus musculus
  siRNA target sequence for C130067A03Rik (NM_177239.1,789-807).
caagaaggtccattagcta

SEQ ID NO: 456765 - DNA, 19 bp, Mus musculus
  siRNA target sequence for C130067A03Rik (NM_177239.1,792-810).
gaaggtccattagctaaat

SEQ ID NO: 456766 - DNA, 19 bp, Mus musculus
  siRNA target sequence for C130067A03Rik (NM_177239.1,795-813).
ggtccattagctaaatctt

SEQ ID NO: 456767 - DNA, 19 bp, Mus musculus
  siRNA target sequence for C130067A03Rik (NM_177239.1,908-926).
caaaaactcagccgaatta

SEQ ID NO: 456768 - DNA, 19 bp, Mus musculus
  siRNA target sequence for C130067A03Rik (NM_177239.1,916-934).
cagccgaattaaatgagaa

SEQ ID NO: 456769 - DNA, 19 bp, Mus musculus
  siRNA target sequence for C130067A03Rik (NM_177239.1,918-936).
gccgaattaaatgagaaat

SEQ ID NO: 456770 - DNA, 19 bp, Mus musculus
  siRNA target sequence for C130067A03Rik (NM_177239.1,1025-1043).
gcaggactcaagtggaaat

SEQ ID NO: 456771 - DNA, 19 bp, Mus musculus
  siRNA target sequence for C130067A03Rik (NM_177239.1,1063-1081).
gccaaattgaggaggaaaa

SEQ ID NO: 456772 - DNA, 19 bp, Mus musculus
  siRNA target sequence for C130067A03Rik (NM_177239.1,1103-1121).
gccaccagaacaagaagtt

SEQ ID NO: 456773 - DNA, 19 bp, Mus musculus
  siRNA target sequence for C130067A03Rik (NM_177239.1,1157-1175).
gcaagcgattcctgagttt

SEQ ID NO: 456774 - DNA, 19 bp, Mus musculus
  siRNA target sequence for C130067A03Rik (NM_177239.1,1206-1224).
cgctatttgaaaattagaa

SEQ ID NO: 456775 - DNA, 19 bp, Mus musculus
  siRNA target sequence for C230068E13 (NM_172913.1,393-411).
gaaataataactacatgaa

SEQ ID NO: 456776 - DNA, 19 bp, Mus musculus
  siRNA target sequence for C230068E13 (NM_172913.1,421-439).
ggcaaacaacgccttcttt

SEQ ID NO: 456777 - DNA, 19 bp, Mus musculus
  siRNA target sequence for C230068E13 (NM_172913.1,441-459).
ctgccagtgagcagacatt

SEQ ID NO: 456778 - DNA, 19 bp, Mus musculus
  siRNA target sequence for C230068E13 (NM_172913.1,637-655).
cccttccatcacaatctca

SEQ ID NO: 456779 - DNA, 19 bp, Mus musculus
  siRNA target sequence for C230068E13 (NM_172913.1,638-656).
ccttccatcacaatctcaa

SEQ ID NO: 456780 - DNA, 19 bp, Mus musculus
  siRNA target sequence for C230068E13 (NM_172913.1,849-867).
cacagctgggcttgaattt

SEQ ID NO: 456781 - DNA, 19 bp, Mus musculus
  siRNA target sequence for C230068E13 (NM_172913.1,1110-1128).
ctgcaattaagggtcaaaa

SEQ ID NO: 456782 - DNA, 19 bp, Mus musculus
  siRNA target sequence for C230068E13 (NM_172913.1,1192-1210).
ggagcaaaagcaggtatat

SEQ ID NO: 456783 - DNA, 19 bp, Mus musculus
  siRNA target sequence for C230068E13 (NM_172913.1,1429-1447).
gtcactccctaggtcaatt

SEQ ID NO: 456784 - DNA, 19 bp, Mus musculus
  siRNA target sequence for C230068E13 (NM_172913.1,1449-1467).
cccccaaacccttaaccat

SEQ ID NO: 456785 - DNA, 19 bp, Mus musculus
  siRNA target sequence for C230068E13 (NM_172913.1,1513-1531).
caacatgccctcgaacatt

SEQ ID NO: 456786 - DNA, 19 bp, Mus musculus
  siRNA target sequence for C230068E13 (NM_172913.1,1528-1546).
cattggggctccactgata

SEQ ID NO: 456787 - DNA, 19 bp, Mus musculus
  siRNA target sequence for C230068E13 (NM_172913.1,1532-1550).
ggggctccactgataagtt

SEQ ID NO: 456788 - DNA, 19 bp, Mus musculus
  siRNA target sequence for C230068E13 (NM_172913.1,1990-2008).
gactcagactcaagtgtta

SEQ ID NO: 456789 - DNA, 19 bp, Mus musculus
  siRNA target sequence for C230068E13 (NM_172913.1,2005-2023).
gttaccgcaggtcagtatt

SEQ ID NO: 456790 - DNA, 19 bp, Mus musculus
  siRNA target sequence for C430003J21Rik (NM_178744.1,566-584).
gctatcgacgacatctact

SEQ ID NO: 456791 - DNA, 19 bp, Mus musculus
  siRNA target sequence for C430003J21Rik (NM_178744.1,580-598).
ctacttccaagcacacaaa

SEQ ID NO: 456792 - DNA, 19 bp, Mus musculus
  siRNA target sequence for C430003J21Rik (NM_178744.1,611-629).
gcctgtagctcctacttta

SEQ ID NO: 456793 - DNA, 19 bp, Mus musculus
  siRNA target sequence for C430003J21Rik (NM_178744.1,615-633).
gtagctcctactttaggat

SEQ ID NO: 456794 - DNA, 19 bp, Mus musculus
  siRNA target sequence for C430003J21Rik (NM_178744.1,621-639).
cctactttaggatgttttt

SEQ ID NO: 456795 - DNA, 19 bp, Mus musculus
  siRNA target sequence for C430003J21Rik (NM_178744.1,696-714).
ctgagtgctttgatctcat

SEQ ID NO: 456796 - DNA, 19 bp, Mus musculus
  siRNA target sequence for C430003J21Rik (NM_178744.1,759-777).
gtttcgagcagttcaaagt

SEQ ID NO: 456797 - DNA, 19 bp, Mus musculus
  siRNA target sequence for C430003J21Rik (NM_178744.1,832-850).
ggacgcagactgttctagt

SEQ ID NO: 456798 - DNA, 19 bp, Mus musculus
  siRNA target sequence for C430003J21Rik (NM_178744.1,839-857).
gactgttctagttcaaagt

SEQ ID NO: 456799 - DNA, 19 bp, Mus musculus
  siRNA target sequence for C430003J21Rik (NM_178744.1,841-859).
ctgttctagttcaaagtgt

SEQ ID NO: 456800 - DNA, 19 bp, Mus musculus
  siRNA target sequence for C430003J21Rik (NM_178744.1,903-921).
gggtgagaatgtatgaaga

SEQ ID NO: 456801 - DNA, 19 bp, Mus musculus
  siRNA target sequence for C430003J21Rik (NM_178744.1,968-986).
cccagttcaacggtgaata

SEQ ID NO: 456802 - DNA, 19 bp, Mus musculus
  siRNA target sequence for C430003J21Rik (NM_178744.1,1256-1274).
gatggaaaagatagtaaca

SEQ ID NO: 456803 - DNA, 19 bp, Mus musculus
  siRNA target sequence for C430003J21Rik (NM_178744.1,1317-1335).
ctgcacagccggacaaata

SEQ ID NO: 456804 - DNA, 19 bp, Mus musculus
  siRNA target sequence for C430003J21Rik (NM_178744.1,1348-1366).
caaccaggcgcctgatgat

SEQ ID NO: 456805 - DNA, 19 bp, Mus musculus
  siRNA target sequence for C430003J21Rik (NM_178744.1,2386-2404).
ctgttccatttgtgatcaa

SEQ ID NO: 456806 - DNA, 19 bp, Mus musculus
  siRNA target sequence for C430003J21Rik (NM_178744.1,2426-2444).
catgtacggcatatgatct

SEQ ID NO: 456807 - DNA, 19 bp, Mus musculus
  siRNA target sequence for C430003J21Rik (NM_178744.1,2452-2470).
gtctggtggggagactata

SEQ ID NO: 456808 - DNA, 19 bp, Mus musculus
  siRNA target sequence for C430003J21Rik (NM_178744.1,2534-2552).
ctgtacacgtgtggaatat

SEQ ID NO: 456809 - DNA, 19 bp, Mus musculus
  siRNA target sequence for C430003J21Rik (NM_178744.1,2536-2554).
gtacacgtgtggaatatgt

SEQ ID NO: 456810 - DNA, 19 bp, Mus musculus
  siRNA target sequence for C430003J21Rik (NM_178744.1,2578-2596).
ggatatgagatcgcattat

SEQ ID NO: 456811 - DNA, 19 bp, Mus musculus
  siRNA target sequence for C430003J21Rik (NM_178744.1,2579-2597).
gatatgagatcgcattata

SEQ ID NO: 456812 - DNA, 19 bp, Mus musculus
  siRNA target sequence for C430003J21Rik (NM_178744.1,2600-2618).
gccaagcatttgaaaagaa

SEQ ID NO: 456813 - DNA, 19 bp, Mus musculus
  siRNA target sequence for C530025K05Rik (NM_178661.2,452-470).
gagctcctagacgagtttt

SEQ ID NO: 456814 - DNA, 19 bp, Mus musculus
  siRNA target sequence for C530025K05Rik (NM_178661.2,607-625).
ccggactcagtcaccattt

SEQ ID NO: 456815 - DNA, 19 bp, Mus musculus
  siRNA target sequence for C530025K05Rik (NM_178661.2,608-626).
cggactcagtcaccattta

SEQ ID NO: 456816 - DNA, 19 bp, Mus musculus
  siRNA target sequence for C530025K05Rik (NM_178661.2,662-680).
gaggtggagagtgaaaaat

SEQ ID NO: 456817 - DNA, 19 bp, Mus musculus
  siRNA target sequence for C530025K05Rik (NM_178661.2,682-700).
gtacctgtctacagagttt

SEQ ID NO: 456818 - DNA, 19 bp, Mus musculus
  siRNA target sequence for C530025K05Rik (NM_178661.2,809-827).
gagtcccctctggatatga

SEQ ID NO: 456819 - DNA, 19 bp, Mus musculus
  siRNA target sequence for C530025K05Rik (NM_178661.2,855-873).
cgcttattcctaagattaa

SEQ ID NO: 456820 - DNA, 19 bp, Mus musculus
  siRNA target sequence for C530025K05Rik (NM_178661.2,882-900).
cgcacgaagtggatcagtt

SEQ ID NO: 456821 - DNA, 19 bp, Mus musculus
  siRNA target sequence for C530025K05Rik (NM_178661.2,886-904).
cgaagtggatcagttctta

SEQ ID NO: 456822 - DNA, 19 bp, Mus musculus
  siRNA target sequence for C530025K05Rik (NM_178661.2,890-908).
gtggatcagttcttaaact

SEQ ID NO: 456823 - DNA, 19 bp, Mus musculus
  siRNA target sequence for C530025K05Rik (NM_178661.2,893-911).
gatcagttcttaaacttct

SEQ ID NO: 456824 - DNA, 19 bp, Mus musculus
  siRNA target sequence for C530025K05Rik (NM_178661.2,1235-1253).
cggagaaagatcaagaata

SEQ ID NO: 456825 - DNA, 19 bp, Mus musculus
  siRNA target sequence for C530025K05Rik (NM_178661.2,1435-1453).
ctctcgaacctgcaagtta

SEQ ID NO: 456826 - DNA, 19 bp, Mus musculus
  siRNA target sequence for C530025K05Rik (NM_178661.2,1529-1547).
ggctatgggccttatcctt

SEQ ID NO: 456827 - DNA, 19 bp, Mus musculus
  siRNA target sequence for C530025K05Rik (NM_178661.2,1617-1635).
ccaggaacctgctaatcta

SEQ ID NO: 456828 - DNA, 19 bp, Mus musculus
  siRNA target sequence for C730034D20Rik (NM_144814.1,223-241).
ctcggatccctgaattcga

SEQ ID NO: 456829 - DNA, 19 bp, Mus musculus
  siRNA target sequence for C730034D20Rik (NM_144814.1,249-267).
gctaccaagtacacagata

SEQ ID NO: 456830 - DNA, 19 bp, Mus musculus
  siRNA target sequence for C730034D20Rik (NM_144814.1,253-271).
ccaagtacacagataaaga

SEQ ID NO: 456831 - DNA, 19 bp, Mus musculus
  siRNA target sequence for C730034D20Rik (NM_144814.1,311-329).
cccagatgccaaattggat

SEQ ID NO: 456832 - DNA, 19 bp, Mus musculus
  siRNA target sequence for C730034D20Rik (NM_144814.1,315-333).
gatgccaaattggatgaat

SEQ ID NO: 456833 - DNA, 19 bp, Mus musculus
  siRNA target sequence for C730034D20Rik (NM_144814.1,330-348).
gaatatatcgccattgcaa

SEQ ID NO: 456834 - DNA, 19 bp, Mus musculus
  siRNA target sequence for C730034D20Rik (NM_144814.1,353-371).
gaaacatggctacaatgtt

SEQ ID NO: 456835 - DNA, 19 bp, Mus musculus
  siRNA target sequence for C730034D20Rik (NM_144814.1,386-404).
catgttgttctggcataaa

SEQ ID NO: 456836 - DNA, 19 bp, Mus musculus
  siRNA target sequence for C730034D20Rik (NM_144814.1,426-444).
gcggacctccctaacttca

SEQ ID NO: 456837 - DNA, 19 bp, Mus musculus
  siRNA target sequence for C730034D20Rik (NM_144814.1,539-557).
gcttccagataagacaatt

SEQ ID NO: 456838 - DNA, 19 bp, Mus musculus
  siRNA target sequence for C730034D20Rik (NM_144814.1,595-613).
ctcgctcaaggacaagttt

SEQ ID NO: 456839 - DNA, 19 bp, Mus musculus
  siRNA target sequence for C730034D20Rik (NM_144814.1,631-649).
gtaaactagccaatagaca

SEQ ID NO: 456840 - DNA, 19 bp, Mus musculus
  siRNA target sequence for C730034D20Rik (NM_144814.1,685-703).
ctcaccccatggatggaaa

SEQ ID NO: 456841 - DNA, 19 bp, Mus musculus
  siRNA target sequence for C730034D20Rik (NM_144814.1,846-864).
ctcctaagggcatgtatct

SEQ ID NO: 456842 - DNA, 19 bp, Mus musculus
  siRNA target sequence for C79407 (NM_172578.2,330-348).
gcacactcactcctttgaa

SEQ ID NO: 456843 - DNA, 19 bp, Mus musculus
  siRNA target sequence for C79407 (NM_172578.2,341-359).
cctttgaaagatttggtaa

SEQ ID NO: 456844 - DNA, 19 bp, Mus musculus
  siRNA target sequence for C79407 (NM_172578.2,367-385).
gaagtcctctctaaaagtt

SEQ ID NO: 456845 - DNA, 19 bp, Mus musculus
  siRNA target sequence for C79407 (NM_172578.2,430-448).
caataaagatctatttcaa

SEQ ID NO: 456846 - DNA, 19 bp, Mus musculus
  siRNA target sequence for C79407 (NM_172578.2,476-494).
ccaaacagctctcttgata

SEQ ID NO: 456847 - DNA, 19 bp, Mus musculus
  siRNA target sequence for C79407 (NM_172578.2,486-504).
ctcttgatatcagtgttat

SEQ ID NO: 456848 - DNA, 19 bp, Mus musculus
  siRNA target sequence for C79407 (NM_172578.2,509-527).
cccagcatggatagattaa

SEQ ID NO: 456849 - DNA, 19 bp, Mus musculus
  siRNA target sequence for C79407 (NM_172578.2,511-529).
cagcatggatagattaaga

SEQ ID NO: 456850 - DNA, 19 bp, Mus musculus
  siRNA target sequence for C79407 (NM_172578.2,545-563).
gaatcaccaggtaaaatct

SEQ ID NO: 456851 - DNA, 19 bp, Mus musculus
  siRNA target sequence for C79407 (NM_172578.2,687-705).
ctcagttgcaacaaaccta

SEQ ID NO: 456852 - DNA, 19 bp, Mus musculus
  siRNA target sequence for C79407 (NM_172578.2,689-707).
cagttgcaacaaacctata

SEQ ID NO: 456853 - DNA, 19 bp, Mus musculus
  siRNA target sequence for C79407 (NM_172578.2,755-773).
ggagatcctccaattctga

SEQ ID NO: 456854 - DNA, 19 bp, Mus musculus
  siRNA target sequence for C79407 (NM_172578.2,765-783).
caattctgaaccaagaaca

SEQ ID NO: 456855 - DNA, 19 bp, Mus musculus
  siRNA target sequence for C79407 (NM_172578.2,797-815).
gcttcgtgcatttcaaaga

SEQ ID NO: 456856 - DNA, 19 bp, Mus musculus
  siRNA target sequence for C79407 (NM_172578.2,835-853).
gtttggcggacaagttctt

SEQ ID NO: 456857 - DNA, 19 bp, Mus musculus
  siRNA target sequence for C79407 (NM_172578.2,910-928).
gggaggcattgattgtact

SEQ ID NO: 456858 - DNA, 19 bp, Mus musculus
  siRNA target sequence for C79407 (NM_172578.2,920-938).
gattgtacttatgaaaagt

SEQ ID NO: 456859 - DNA, 19 bp, Mus musculus
  siRNA target sequence for C79407 (NM_172578.2,950-968).
gatgttaacaccattagtt

SEQ ID NO: 456860 - DNA, 19 bp, Mus musculus
  siRNA target sequence for C79407 (NM_172578.2,992-1010).
catagccaatctattactt

SEQ ID NO: 456861 - DNA, 19 bp, Mus musculus
  siRNA target sequence for C79407 (NM_172578.2,1075-1093).
gatgtccagaagaactatt

SEQ ID NO: 456862 - DNA, 19 bp, Mus musculus
  siRNA target sequence for C79407 (NM_172578.2,1134-1152).
caagtccaagacctaattt

SEQ ID NO: 456863 - DNA, 19 bp, Mus musculus
  siRNA target sequence for C79407 (NM_172578.2,1140-1158).
caagacctaatttaacact

SEQ ID NO: 456864 - DNA, 19 bp, Mus musculus
  siRNA target sequence for C79407 (NM_172578.2,1157-1175).
ctatctggccggtctcaaa

SEQ ID NO: 456865 - DNA, 19 bp, Mus musculus
  siRNA target sequence for C79407 (NM_172578.2,1161-1179).
ctggccggtctcaaagaaa

SEQ ID NO: 456866 - DNA, 19 bp, Mus musculus
  siRNA target sequence for C79407 (NM_172578.2,1182-1200).
gtacaaagcttgaaactgt

SEQ ID NO: 456867 - DNA, 19 bp, Mus musculus
  siRNA target sequence for C79407 (NM_172578.2,1189-1207).
gcttgaaactgttgtaaaa

SEQ ID NO: 456868 - DNA, 19 bp, Mus musculus
  siRNA target sequence for C79407 (NM_172578.2,1234-1252).
cctacaggaatggatgatt

SEQ ID NO: 456869 - DNA, 19 bp, Mus musculus
  siRNA target sequence for C79407 (NM_172578.2,1275-1293).
ctatatgtgtagaaggaaa

SEQ ID NO: 456870 - DNA, 19 bp, Mus musculus
  siRNA target sequence for C79407 (NM_172578.2,1289-1307).
ggaaagctggtagatatga

SEQ ID NO: 456871 - DNA, 19 bp, Mus musculus
  siRNA target sequence for C79407 (NM_172578.2,1320-1338).
ggcatagcaatgtaattat

SEQ ID NO: 456872 - DNA, 19 bp, Mus musculus
  siRNA target sequence for C79407 (NM_172578.2,1369-1387).
cttatcaggcaacatttat

SEQ ID NO: 456873 - DNA, 19 bp, Mus musculus
  siRNA target sequence for C79407 (NM_172578.2,1376-1394).
ggcaacatttatatcttaa

SEQ ID NO: 456874 - DNA, 19 bp, Mus musculus
  siRNA target sequence for C79407 (NM_172578.2,1436-1454).
ccctgttatctcacaagaa

SEQ ID NO: 456875 - DNA, 19 bp, Mus musculus
  siRNA target sequence for C79407 (NM_172578.2,1511-1529).
caattaagggctgaaaaaa

SEQ ID NO: 456876 - DNA, 19 bp, Mus musculus
  siRNA target sequence for C79407 (NM_172578.2,1629-1647).
gcatcacgtatgaccttaa

SEQ ID NO: 456877 - DNA, 19 bp, Mus musculus
  siRNA target sequence for C79407 (NM_172578.2,1630-1648).
catcacgtatgaccttaat

SEQ ID NO: 456878 - DNA, 19 bp, Mus musculus
  siRNA target sequence for C79407 (NM_172578.2,1633-1651).
cacgtatgaccttaatgat

SEQ ID NO: 456879 - DNA, 19 bp, Mus musculus
  siRNA target sequence for C79407 (NM_172578.2,1635-1653).
cgtatgaccttaatgataa

SEQ ID NO: 456880 - DNA, 19 bp, Mus musculus
  siRNA target sequence for C79407 (NM_172578.2,1640-1658).
gaccttaatgataatagct

SEQ ID NO: 456881 - DNA, 19 bp, Mus musculus
  siRNA target sequence for C79407 (NM_172578.2,1642-1660).
ccttaatgataatagctta

SEQ ID NO: 456882 - DNA, 19 bp, Mus musculus
  siRNA target sequence for C79407 (NM_172578.2,1705-1723).
gcctacctccggcaaagaa

SEQ ID NO: 456883 - DNA, 19 bp, Mus musculus
  siRNA target sequence for C79407 (NM_172578.2,1706-1724).
cctacctccggcaaagaaa

SEQ ID NO: 456884 - DNA, 19 bp, Mus musculus
  siRNA target sequence for C79407 (NM_172578.2,1818-1836).
gtctctctattgaaggaat

SEQ ID NO: 456885 - DNA, 19 bp, Mus musculus
  siRNA target sequence for C79407 (NM_172578.2,1829-1847).
gaaggaatatcggactttt

SEQ ID NO: 456886 - DNA, 19 bp, Mus musculus
  siRNA target sequence for C79407 (NM_172578.2,1832-1850).
ggaatatcggactttttca

SEQ ID NO: 456887 - DNA, 19 bp, Mus musculus
  siRNA target sequence for C79407 (NM_172578.2,1843-1861).
ctttttcaaagcaaagcat

SEQ ID NO: 456888 - DNA, 19 bp, Mus musculus
  siRNA target sequence for C79407 (NM_172578.2,1895-1913).
ccaagttctaccagtaagt

SEQ ID NO: 456889 - DNA, 19 bp, Mus musculus
  siRNA target sequence for C79407 (NM_172578.2,1912-1930).
gtctcaagagacctttgaa

SEQ ID NO: 456890 - DNA, 19 bp, Mus musculus
  siRNA target sequence for C79407 (NM_172578.2,1914-1932).
ctcaagagacctttgaaca

SEQ ID NO: 456891 - DNA, 19 bp, Mus musculus
  siRNA target sequence for C79407 (NM_172578.2,1989-2007).
ctgccagacatattcagat

SEQ ID NO: 456892 - DNA, 19 bp, Mus musculus
  siRNA target sequence for C79407 (NM_172578.2,2013-2031).
gcccgaaaagtaaacaaat

SEQ ID NO: 456893 - DNA, 19 bp, Mus musculus
  siRNA target sequence for C79407 (NM_172578.2,2033-2051).
ctcaccaatgattttatga

SEQ ID NO: 456894 - DNA, 19 bp, Mus musculus
  siRNA target sequence for C79407 (NM_172578.2,2056-2074).
gaacaagttgccctcaaaa

SEQ ID NO: 456895 - DNA, 19 bp, Mus musculus
  siRNA target sequence for C79407 (NM_172578.2,2115-2133).
gccggtcctcatcacattt

SEQ ID NO: 456896 - DNA, 19 bp, Mus musculus
  siRNA target sequence for C79407 (NM_172578.2,2220-2238).
caaaccacatcacaaaaga

SEQ ID NO: 456897 - DNA, 19 bp, Mus musculus
  siRNA target sequence for C79407 (NM_172578.2,2269-2287).
gagagcttgttatatcaca

SEQ ID NO: 456898 - DNA, 19 bp, Mus musculus
  siRNA target sequence for C79407 (NM_172578.2,2293-2311).
gagacctcgatcttgttat

SEQ ID NO: 456899 - DNA, 19 bp, Mus musculus
  siRNA target sequence for C79407 (NM_172578.2,2295-2313).
gacctcgatcttgttatat

SEQ ID NO: 456900 - DNA, 19 bp, Mus musculus
  siRNA target sequence for C79407 (NM_172578.2,2297-2315).
cctcgatcttgttatatca

SEQ ID NO: 456901 - DNA, 19 bp, Mus musculus
  siRNA target sequence for C79407 (NM_172578.2,2328-2346).
ctcgatcttctgctaaaga

SEQ ID NO: 456902 - DNA, 19 bp, Mus musculus
  siRNA target sequence for C79407 (NM_172578.2,2330-2348).
cgatcttctgctaaagagt

SEQ ID NO: 456903 - DNA, 19 bp, Mus musculus
  siRNA target sequence for C79407 (NM_172578.2,2337-2355).
ctgctaaagagtcacatta

SEQ ID NO: 456904 - DNA, 19 bp, Mus musculus
  siRNA target sequence for C79407 (NM_172578.2,2339-2357).
gctaaagagtcacattaca

SEQ ID NO: 456905 - DNA, 19 bp, Mus musculus
  siRNA target sequence for C79407 (NM_172578.2,2340-2358).
ctaaagagtcacattacaa

SEQ ID NO: 456906 - DNA, 19 bp, Mus musculus
  siRNA target sequence for C79407 (NM_172578.2,2409-2427).
ctagcagacagctgttaga

SEQ ID NO: 456907 - DNA, 19 bp, Mus musculus
  siRNA target sequence for C79407 (NM_172578.2,2426-2444).
gaccatctacctggtttaa

SEQ ID NO: 456908 - DNA, 19 bp, Mus musculus
  siRNA target sequence for C79407 (NM_172578.2,2428-2446).
ccatctacctggtttaact

SEQ ID NO: 456909 - DNA, 19 bp, Mus musculus
  siRNA target sequence for C79407 (NM_172578.2,2460-2478).
ggagtgagcaagagttaca

SEQ ID NO: 456910 - DNA, 19 bp, Mus musculus
  siRNA target sequence for C79407 (NM_172578.2,2463-2481).
gtgagcaagagttacagaa

SEQ ID NO: 456911 - DNA, 19 bp, Mus musculus
  siRNA target sequence for C79407 (NM_172578.2,2482-2500).
gctacattgtgcttttaca

SEQ ID NO: 456912 - DNA, 19 bp, Mus musculus
  siRNA target sequence for C79407 (NM_172578.2,2483-2501).
ctacattgtgcttttacat

SEQ ID NO: 456913 - DNA, 19 bp, Mus musculus
  siRNA target sequence for C79407 (NM_172578.2,2513-2531).
cacaaacctggcttttggt

SEQ ID NO: 456914 - DNA, 19 bp, Mus musculus
  siRNA target sequence for C79407 (NM_172578.2,2604-2622).
gccaaggatcccgaaaaca

SEQ ID NO: 456915 - DNA, 19 bp, Mus musculus
  siRNA target sequence for C79407 (NM_172578.2,2605-2623).
ccaaggatcccgaaaacat

SEQ ID NO: 456916 - DNA, 19 bp, Mus musculus
  siRNA target sequence for C79407 (NM_172578.2,2615-2633).
cgaaaacatggctctaaga

SEQ ID NO: 456917 - DNA, 19 bp, Mus musculus
  siRNA target sequence for C79407 (NM_172578.2,2673-2691).
gtgctgatgccaagactat

SEQ ID NO: 456918 - DNA, 19 bp, Mus musculus
  siRNA target sequence for C79407 (NM_172578.2,2675-2693).
gctgatgccaagactatta

SEQ ID NO: 456919 - DNA, 19 bp, Mus musculus
  siRNA target sequence for C79407 (NM_172578.2,2676-2694).
ctgatgccaagactattaa

SEQ ID NO: 456920 - DNA, 19 bp, Mus musculus
  siRNA target sequence for C79407 (NM_172578.2,2678-2696).
gatgccaagactattaaga

SEQ ID NO: 456921 - DNA, 19 bp, Mus musculus
  siRNA target sequence for C79407 (NM_172578.2,2681-2699).
gccaagactattaagataa

SEQ ID NO: 456922 - DNA, 19 bp, Mus musculus
  siRNA target sequence for C79407 (NM_172578.2,2796-2814).
ccttgcagaaacaaagaat

SEQ ID NO: 456923 - DNA, 19 bp, Mus musculus
  siRNA target sequence for C79407 (NM_172578.2,2816-2834).
cagttgccaagttttcaat

SEQ ID NO: 456924 - DNA, 19 bp, Mus musculus
  siRNA target sequence for C79407 (NM_172578.2,2821-2839).
gccaagttttcaatacagt

SEQ ID NO: 456925 - DNA, 19 bp, Mus musculus
  siRNA target sequence for C79407 (NM_172578.2,2879-2897).
gcatctccatcatcaatta

SEQ ID NO: 456926 - DNA, 19 bp, Mus musculus
  siRNA target sequence for C79407 (NM_172578.2,2880-2898).
catctccatcatcaattat

SEQ ID NO: 456927 - DNA, 19 bp, Mus musculus
  siRNA target sequence for C79407 (NM_172578.2,2950-2968).
catgctagccgctatagaa

SEQ ID NO: 456928 - DNA, 19 bp, Mus musculus
  siRNA target sequence for C79407 (NM_172578.2,2958-2976).
ccgctatagaaaggaataa

SEQ ID NO: 456929 - DNA, 19 bp, Mus musculus
  siRNA target sequence for C79407 (NM_172578.2,2966-2984).
gaaaggaataattgtgata

SEQ ID NO: 456930 - DNA, 19 bp, Mus musculus
  siRNA target sequence for C79407 (NM_172578.2,2981-2999).
gatagatatgtttaccaaa

SEQ ID NO: 456931 - DNA, 19 bp, Mus musculus
  siRNA target sequence for C79407 (NM_172578.2,3040-3058).
ccttgtctggggcaacatt

SEQ ID NO: 456932 - DNA, 19 bp, Mus musculus
  siRNA target sequence for C79407 (NM_172578.2,3041-3059).
cttgtctggggcaacatta

SEQ ID NO: 456933 - DNA, 19 bp, Mus musculus
  siRNA target sequence for C79407 (NM_172578.2,3048-3066).
ggggcaacattaggaaaaa

SEQ ID NO: 456934 - DNA, 19 bp, Mus musculus
  siRNA target sequence for C79407 (NM_172578.2,3049-3067).
gggcaacattaggaaaaaa

SEQ ID NO: 456935 - DNA, 19 bp, Mus musculus
  siRNA target sequence for C79407 (NM_172578.2,3102-3120).
cacggaaagccctgtttaa

SEQ ID NO: 456936 - DNA, 19 bp, Mus musculus
  siRNA target sequence for C79407 (NM_172578.2,3104-3122).
cggaaagccctgtttaaca

SEQ ID NO: 456937 - DNA, 19 bp, Mus musculus
  siRNA target sequence for C79407 (NM_172578.2,3110-3128).
gccctgtttaacaaagatt

SEQ ID NO: 456938 - DNA, 19 bp, Mus musculus
  siRNA target sequence for C79407 (NM_172578.2,3139-3157).
cactgatatttcaaagtat

SEQ ID NO: 456939 - DNA, 19 bp, Mus musculus
  siRNA target sequence for Cacna1a (NM_007578.1,112-130).
gacaacgtggtgagaaaat

SEQ ID NO: 456940 - DNA, 19 bp, Mus musculus
  siRNA target sequence for Cacna1a (NM_007578.1,267-285).
cacggaaccatacttcatt

SEQ ID NO: 456941 - DNA, 19 bp, Mus musculus
  siRNA target sequence for Cacna1a (NM_007578.1,480-498).
gtctggaatcccaagttta

SEQ ID NO: 456942 - DNA, 19 bp, Mus musculus
  siRNA target sequence for Cacna1a (NM_007578.1,485-503).
gaatcccaagtttacaagt

SEQ ID NO: 456943 - DNA, 19 bp, Mus musculus
  siRNA target sequence for Cacna1a (NM_007578.1,559-577).
ctgttttttgcaatcctta

SEQ ID NO: 456944 - DNA, 19 bp, Mus musculus
  siRNA target sequence for Cacna1a (NM_007578.1,561-579).
gttttttgcaatccttatt

SEQ ID NO: 456945 - DNA, 19 bp, Mus musculus
  siRNA target sequence for Cacna1a (NM_007578.1,569-587).
caatccttatttttgcaat

SEQ ID NO: 456946 - DNA, 19 bp, Mus musculus
  siRNA target sequence for Cacna1a (NM_007578.1,588-606).
catagggttagaattttat

SEQ ID NO: 456947 - DNA, 19 bp, Mus musculus
  siRNA target sequence for Cacna1a (NM_007578.1,705-723).
ccccaacgggaccaaatgt

SEQ ID NO: 456948 - DNA, 19 bp, Mus musculus
  siRNA target sequence for Cacna1a (NM_007578.1,707-725).
ccaacgggaccaaatgtca

SEQ ID NO: 456949 - DNA, 19 bp, Mus musculus
  siRNA target sequence for Cacna1a (NM_007578.1,782-800).
ctgtgctcactgttttcca

SEQ ID NO: 456950 - DNA, 19 bp, Mus musculus
  siRNA target sequence for Cacna1a (NM_007578.1,972-990).
ggagaaccggagagctttt

SEQ ID NO: 456951 - DNA, 19 bp, Mus musculus
  siRNA target sequence for Cacna1a (NM_007578.1,1018-1036).
gaacgtgagctcaatggat

SEQ ID NO: 456952 - DNA, 19 bp, Mus musculus
  siRNA target sequence for Cacna1a (NM_007578.1,1022-1040).
gtgagctcaatggatacat

SEQ ID NO: 456953 - DNA, 19 bp, Mus musculus
  siRNA target sequence for Cacna1a (NM_007578.1,1038-1056).
catggagtggatctcaaaa

SEQ ID NO: 456954 - DNA, 19 bp, Mus musculus
  siRNA target sequence for Cacna1a (NM_007578.1,1041-1059).
ggagtggatctcaaaagca

SEQ ID NO: 456955 - DNA, 19 bp, Mus musculus
  siRNA target sequence for Cacna1a (NM_007578.1,1098-1116).
gcagaggcacccttttgat

SEQ ID NO: 456956 - DNA, 19 bp, Mus musculus
  siRNA target sequence for Cacna1a (NM_007578.1,1221-1239).
cgccagagccagcatcaaa

SEQ ID NO: 456957 - DNA, 19 bp, Mus musculus
  siRNA target sequence for Cacna1a (NM_007578.1,1248-1266).
gctggagaactcgactttt

SEQ ID NO: 456958 - DNA, 19 bp, Mus musculus
  siRNA target sequence for Cacna1a (NM_007578.1,1249-1267).
ctggagaactcgacttttt

SEQ ID NO: 456959 - DNA, 19 bp, Mus musculus
  siRNA target sequence for Cacna1a (NM_007578.1,1259-1277).
cgactttttttcacaagaa

SEQ ID NO: 456960 - DNA, 19 bp, Mus musculus
  siRNA target sequence for Cacna1a (NM_007578.1,1283-1301).
gaagaatgcgtttctacat

SEQ ID NO: 456961 - DNA, 19 bp, Mus musculus
  siRNA target sequence for Cacna1a (NM_007578.1,1407-1425).
ctccgacttcctctactat

SEQ ID NO: 456962 - DNA, 19 bp, Mus musculus
  siRNA target sequence for Cacna1a (NM_007578.1,1449-1467).
ctttatgtccgaaatgttt

SEQ ID NO: 456963 - DNA, 19 bp, Mus musculus
  siRNA target sequence for Cacna1a (NM_007578.1,1575-1593).
caaacccggtacatccttt

SEQ ID NO: 456964 - DNA, 19 bp, Mus musculus
  siRNA target sequence for Cacna1a (NM_007578.1,1579-1597).
cccggtacatcctttggaa

SEQ ID NO: 456965 - DNA, 19 bp, Mus musculus
  siRNA target sequence for Cacna1a (NM_007578.1,1580-1598).
ccggtacatcctttggaat

SEQ ID NO: 456966 - DNA, 19 bp, Mus musculus
  siRNA target sequence for Cacna1a (NM_007578.1,1619-1637).
ggttattgcgaattttcaa

SEQ ID NO: 456967 - DNA, 19 bp, Mus musculus
  siRNA target sequence for Cacna1a (NM_007578.1,1620-1638).
gttattgcgaattttcaaa

SEQ ID NO: 456968 - DNA, 19 bp, Mus musculus
  siRNA target sequence for Cacna1a (NM_007578.1,1764-1782).
gctgttcggtggccaattt

SEQ ID NO: 456969 - DNA, 19 bp, Mus musculus
  siRNA target sequence for Cacna1a (NM_007578.1,1765-1783).
ctgttcggtggccaattta

SEQ ID NO: 456970 - DNA, 19 bp, Mus musculus
  siRNA target sequence for Cacna1a (NM_007578.1,1767-1785).
gttcggtggccaatttaat

SEQ ID NO: 456971 - DNA, 19 bp, Mus musculus
  siRNA target sequence for Cacna1a (NM_007578.1,1770-1788).
cggtggccaatttaatttt

SEQ ID NO: 456972 - DNA, 19 bp, Mus musculus
  siRNA target sequence for Cacna1a (NM_007578.1,1775-1793).
gccaatttaattttgatga

SEQ ID NO: 456973 - DNA, 19 bp, Mus musculus
  siRNA target sequence for Cacna1a (NM_007578.1,1805-1823).
ccaccaacttcgacacttt

SEQ ID NO: 456974 - DNA, 19 bp, Mus musculus
  siRNA target sequence for Cacna1a (NM_007578.1,1809-1827).
caacttcgacacttttcca

SEQ ID NO: 456975 - DNA, 19 bp, Mus musculus
  siRNA target sequence for Cacna1a (NM_007578.1,1857-1875).
gactggcgaagattggaat

SEQ ID NO: 456976 - DNA, 19 bp, Mus musculus
  siRNA target sequence for Cacna1a (NM_007578.1,2339-2357).
cgcaggagaaccgtaacaa

SEQ ID NO: 456977 - DNA, 19 bp, Mus musculus
  siRNA target sequence for Cacna1a (NM_007578.1,2341-2359).
caggagaaccgtaacaaca

SEQ ID NO: 456978 - DNA, 19 bp, Mus musculus
  siRNA target sequence for Cacna1a (NM_007578.1,2344-2362).
gagaaccgtaacaacaaca

SEQ ID NO: 456979 - DNA, 19 bp, Mus musculus
  siRNA target sequence for Cacna1a (NM_007578.1,2804-2822).
gacaccgacgcagaaaaga

SEQ ID NO: 456980 - DNA, 19 bp, Mus musculus
  siRNA target sequence for Cacna1a (NM_007578.1,3078-3096).
ccgcaggacgcccaacaat

SEQ ID NO: 456981 - DNA, 19 bp, Mus musculus
  siRNA target sequence for Cacna1a (NM_007578.1,3134-3152).
ccgagaacagccttatcgt

SEQ ID NO: 456982 - DNA, 19 bp, Mus musculus
  siRNA target sequence for Cacna1a (NM_007578.1,3250-3268).
cacaccgtggtccaagtaa

SEQ ID NO: 456983 - DNA, 19 bp, Mus musculus
  siRNA target sequence for Cacna1a (NM_007578.1,3254-3272).
ccgtggtccaagtaaacaa

SEQ ID NO: 456984 - DNA, 19 bp, Mus musculus
  siRNA target sequence for Cacna1a (NM_007578.1,3255-3273).
cgtggtccaagtaaacaaa

SEQ ID NO: 456985 - DNA, 19 bp, Mus musculus
  siRNA target sequence for Cacna1a (NM_007578.1,3955-3973).
gactgtcgaggcaagtact

SEQ ID NO: 456986 - DNA, 19 bp, Mus musculus
  siRNA target sequence for Cacna1a (NM_007578.1,4006-4024).
gaccgcgagtggaagaagt

SEQ ID NO: 456987 - DNA, 19 bp, Mus musculus
  siRNA target sequence for Cacna1a (NM_007578.1,4195-4213).
gtagtgtttcccttcttct

SEQ ID NO: 456988 - DNA, 19 bp, Mus musculus
  siRNA target sequence for Cacna1a (NM_007578.1,4366-4384).
cagagcttccagtatcgaa

SEQ ID NO: 456989 - DNA, 19 bp, Mus musculus
  siRNA target sequence for Cacna1a (NM_007578.1,4477-4495).
gcctccgtggcctatgaaa

SEQ ID NO: 456990 - DNA, 19 bp, Mus musculus
  siRNA target sequence for Cacna1a (NM_007578.1,4500-4518).
ccttcgcgtgttcaacatt

SEQ ID NO: 456991 - DNA, 19 bp, Mus musculus
  siRNA target sequence for Cacna1a (NM_007578.1,4543-4561).
gaatgtgtgctcaaagtca

SEQ ID NO: 456992 - DNA, 19 bp, Mus musculus
  siRNA target sequence for Cacna1a (NM_007578.1,4975-4993).
gaagcgtggcacaacatca

SEQ ID NO: 456993 - DNA, 19 bp, Mus musculus
  siRNA target sequence for Cacna1a (NM_007578.1,5062-5080).
gagttcgcgtacttctact

SEQ ID NO: 456994 - DNA, 19 bp, Mus musculus
  siRNA target sequence for Cacna1a (NM_007578.1,5064-5082).
gttcgcgtacttctacttt

SEQ ID NO: 456995 - DNA, 19 bp, Mus musculus
  siRNA target sequence for Cacna1a (NM_007578.1,5068-5086).
gcgtacttctactttgtct

SEQ ID NO: 456996 - DNA, 19 bp, Mus musculus
  siRNA target sequence for Cacna1a (NM_007578.1,5154-5172).
gtacctcacccgagattct

SEQ ID NO: 456997 - DNA, 19 bp, Mus musculus
  siRNA target sequence for Cacna1a (NM_007578.1,5296-5314).
ctcggcttaggcaagaaat

SEQ ID NO: 456998 - DNA, 19 bp, Mus musculus
  siRNA target sequence for Cacna1a (NM_007578.1,5298-5316).
cggcttaggcaagaaatgt

SEQ ID NO: 456999 - DNA, 19 bp, Mus musculus
  siRNA target sequence for Cacna1a (NM_007578.1,5413-5431).
cgaaccgcccttgatatca

SEQ ID NO: 457000 - DNA, 19 bp, Mus musculus
  siRNA target sequence for Cacna1a (NM_007578.1,5414-5432).
gaaccgcccttgatatcaa

SEQ ID NO: 457001 - DNA, 19 bp, Mus musculus
  siRNA target sequence for Cacna1a (NM_007578.1,5417-5435).
ccgcccttgatatcaaaat

SEQ ID NO: 457002 - DNA, 19 bp, Mus musculus
  siRNA target sequence for Cacna1a (NM_007578.1,5418-5436).
cgcccttgatatcaaaatt

SEQ ID NO: 457003 - DNA, 19 bp, Mus musculus
  siRNA target sequence for Cebpa (NM_007678.1,168-186).
cgagcacgagacgtctata

SEQ ID NO: 457004 - DNA, 19 bp, Mus musculus
  siRNA target sequence for Cebpa (NM_007678.1,172-190).
cacgagacgtctatagaca

SEQ ID NO: 457005 - DNA, 19 bp, Mus musculus
  siRNA target sequence for Cebpa (NM_007678.1,464-482).
cgctggtgatcaaacaaga

SEQ ID NO: 457006 - DNA, 19 bp, Mus musculus
  siRNA target sequence for Cebpa (NM_007678.1,814-832).
gcgggcaaagccaagaagt

SEQ ID NO: 457007 - DNA, 19 bp, Mus musculus
  siRNA target sequence for Cebpa (NM_007678.1,891-909).
gcgcaagagccgagataaa

SEQ ID NO: 457008 - DNA, 19 bp, Mus musculus
  siRNA target sequence for Cebpa (NM_007678.1,900-918).
ccgagataaagccaaacaa

SEQ ID NO: 457009 - DNA, 19 bp, Mus musculus
  siRNA target sequence for Cebpa (NM_007678.1,1122-1140).
gagacccagaggatggttt

SEQ ID NO: 457010 - DNA, 19 bp, Mus musculus
  siRNA target sequence for Cebpb (NM_009883.1,768-786).
ctgagcgacgagtacaaga

SEQ ID NO: 457011 - DNA, 19 bp, Mus musculus
  siRNA target sequence for Cebpb (NM_009883.1,934-952).
gcaccctgcggaacttgtt

SEQ ID NO: 457012 - DNA, 19 bp, Mus musculus
  siRNA target sequence for Cebpb (NM_009883.1,937-955).
ccctgcggaacttgttcaa

SEQ ID NO: 457013 - DNA, 19 bp, Mus musculus
  siRNA target sequence for Cebpd (NM_007679.2,777-795).
cctccggcagttcttcaaa

SEQ ID NO: 457014 - DNA, 19 bp, Mus musculus
  siRNA target sequence for Cenpa (NM_007681.1,228-246).
gcagaagacagaaattcat

SEQ ID NO: 457015 - DNA, 19 bp, Mus musculus
  siRNA target sequence for Cenpa (NM_007681.1,347-365).
cgtggtgtggatttttggt

SEQ ID NO: 457016 - DNA, 19 bp, Mus musculus
  siRNA target sequence for Cenpc (NM_007683.1,137-155).
catctggatcatctaaaga

SEQ ID NO: 457017 - DNA, 19 bp, Mus musculus
  siRNA target sequence for Cenpc (NM_007683.1,140-158).
ctggatcatctaaagaact

SEQ ID NO: 457018 - DNA, 19 bp, Mus musculus
  siRNA target sequence for Cenpc (NM_007683.1,188-206).
gcacccaacattcatacaa

SEQ ID NO: 457019 - DNA, 19 bp, Mus musculus
  siRNA target sequence for Cenpc (NM_007683.1,213-231).
gccagaacatgctggaaat

SEQ ID NO: 457020 - DNA, 19 bp, Mus musculus
  siRNA target sequence for Cenpc (NM_007683.1,217-235).
gaacatgctggaaatctta

SEQ ID NO: 457021 - DNA, 19 bp, Mus musculus
  siRNA target sequence for Cenpc (NM_007683.1,224-242).
ctggaaatcttacaagatt

SEQ ID NO: 457022 - DNA, 19 bp, Mus musculus
  siRNA target sequence for Cenpc (NM_007683.1,243-261).
gttttgaagatcagagtaa

SEQ ID NO: 457023 - DNA, 19 bp, Mus musculus
  siRNA target sequence for Cenpc (NM_007683.1,316-334).
gaaagccaattatagtcaa

SEQ ID NO: 457024 - DNA, 19 bp, Mus musculus
  siRNA target sequence for Cenpc (NM_007683.1,469-487).
ccatggtgcgtctgatgaa

SEQ ID NO: 457025 - DNA, 19 bp, Mus musculus
  siRNA target sequence for Cenpc (NM_007683.1,470-488).
catggtgcgtctgatgaat

SEQ ID NO: 457026 - DNA, 19 bp, Mus musculus
  siRNA target sequence for Cenpc (NM_007683.1,532-550).
cgtcaacacgttacagaaa

SEQ ID NO: 457027 - DNA, 19 bp, Mus musculus
  siRNA target sequence for Cenpc (NM_007683.1,605-623).
gataggcaggcttcaaata

SEQ ID NO: 457028 - DNA, 19 bp, Mus musculus
  siRNA target sequence for Cenpc (NM_007683.1,642-660).
ccaggaaaaggttaaactt

SEQ ID NO: 457029 - DNA, 19 bp, Mus musculus
  siRNA target sequence for Cenpc (NM_007683.1,643-661).
caggaaaaggttaaacttt

SEQ ID NO: 457030 - DNA, 19 bp, Mus musculus
  siRNA target sequence for Cenpc (NM_007683.1,645-663).
ggaaaaggttaaactttga

SEQ ID NO: 457031 - DNA, 19 bp, Mus musculus
  siRNA target sequence for Cenpc (NM_007683.1,651-669).
ggttaaactttgaagataa

SEQ ID NO: 457032 - DNA, 19 bp, Mus musculus
  siRNA target sequence for Cenpc (NM_007683.1,710-728).
caagtagaggataacttat

SEQ ID NO: 457033 - DNA, 19 bp, Mus musculus
  siRNA target sequence for Cenpc (NM_007683.1,713-731).
gtagaggataacttatcca

SEQ ID NO: 457034 - DNA, 19 bp, Mus musculus
  siRNA target sequence for Cenpc (NM_007683.1,791-809).
gtccaatcacgttctaaga

SEQ ID NO: 457035 - DNA, 19 bp, Mus musculus
  siRNA target sequence for Cenpc (NM_007683.1,837-855).
ctgtcaagaggaaaagtaa

SEQ ID NO: 457036 - DNA, 19 bp, Mus musculus
  siRNA target sequence for Cenpc (NM_007683.1,906-924).
ctccaagtgacatgaaatt

SEQ ID NO: 457037 - DNA, 19 bp, Mus musculus
  siRNA target sequence for Cenpc (NM_007683.1,947-965).
gatcggtcagatagaagtt

SEQ ID NO: 457038 - DNA, 19 bp, Mus musculus
  siRNA target sequence for Cenpc (NM_007683.1,950-968).
cggtcagatagaagttttt

SEQ ID NO: 457039 - DNA, 19 bp, Mus musculus
  siRNA target sequence for Cenpc (NM_007683.1,952-970).
gtcagatagaagtttttca

SEQ ID NO: 457040 - DNA, 19 bp, Mus musculus
  siRNA target sequence for Cenpc (NM_007683.1,972-990).
gtcgactttgggtgatgat

SEQ ID NO: 457041 - DNA, 19 bp, Mus musculus
  siRNA target sequence for Cenpc (NM_007683.1,977-995).
ctttgggtgatgataccaa

SEQ ID NO: 457042 - DNA, 19 bp, Mus musculus
  siRNA target sequence for Cenpc (NM_007683.1,1044-1062).
cactgcttcaaggtaagaa

SEQ ID NO: 457043 - DNA, 19 bp, Mus musculus
  siRNA target sequence for Cenpc (NM_007683.1,1046-1064).
ctgcttcaaggtaagaagt

SEQ ID NO: 457044 - DNA, 19 bp, Mus musculus
  siRNA target sequence for Cenpc (NM_007683.1,1068-1086).
gagagaaatctcatagttt

SEQ ID NO: 457045 - DNA, 19 bp, Mus musculus
  siRNA target sequence for Cenpc (NM_007683.1,1107-1125).
gaaacacacagtctgataa

SEQ ID NO: 457046 - DNA, 19 bp, Mus musculus
  siRNA target sequence for Cenpc (NM_007683.1,1163-1181).
gaaaacccggcaactactt

SEQ ID NO: 457047 - DNA, 19 bp, Mus musculus
  siRNA target sequence for Cenpc (NM_007683.1,1168-1186).
cccggcaactacttgtaca

SEQ ID NO: 457048 - DNA, 19 bp, Mus musculus
  siRNA target sequence for Cenpc (NM_007683.1,1171-1189).
ggcaactacttgtacagat

SEQ ID NO: 457049 - DNA, 19 bp, Mus musculus
  siRNA target sequence for Cenpc (NM_007683.1,1176-1194).
ctacttgtacagatgagtt

SEQ ID NO: 457050 - DNA, 19 bp, Mus musculus
  siRNA target sequence for Cenpc (NM_007683.1,1448-1466).
cagaagccagctcttgaaa

SEQ ID NO: 457051 - DNA, 19 bp, Mus musculus
  siRNA target sequence for Cenpc (NM_007683.1,1480-1498).
caatagcacccaaaccaat

SEQ ID NO: 457052 - DNA, 19 bp, Mus musculus
  siRNA target sequence for Cenpc (NM_007683.1,1485-1503).
gcacccaaaccaataagga

SEQ ID NO: 457053 - DNA, 19 bp, Mus musculus
  siRNA target sequence for Cenpc (NM_007683.1,1529-1547).
ggtgggtccaagaacaaat

SEQ ID NO: 457054 - DNA, 19 bp, Mus musculus
  siRNA target sequence for Cenpc (NM_007683.1,1530-1548).
gtgggtccaagaacaaatt

SEQ ID NO: 457055 - DNA, 19 bp, Mus musculus
  siRNA target sequence for Cenpc (NM_007683.1,1679-1697).
gtggtatatcccaataaaa

SEQ ID NO: 457056 - DNA, 19 bp, Mus musculus
  siRNA target sequence for Cenpc (NM_007683.1,1705-1723).
gactaagagaaatcatgta

SEQ ID NO: 457057 - DNA, 19 bp, Mus musculus
  siRNA target sequence for Cenpc (NM_007683.1,1861-1879).
gaagccattgaaaatcatt

SEQ ID NO: 457058 - DNA, 19 bp, Mus musculus
  siRNA target sequence for Cenpc (NM_007683.1,1919-1937).
cctaaaagaggctgtaagt

SEQ ID NO: 457059 - DNA, 19 bp, Mus musculus
  siRNA target sequence for Cenpc (NM_007683.1,1926-1944).
gaggctgtaagtatcgaaa

SEQ ID NO: 457060 - DNA, 19 bp, Mus musculus
  siRNA target sequence for Cenpc (NM_007683.1,1929-1947).
gctgtaagtatcgaaacaa

SEQ ID NO: 457061 - DNA, 19 bp, Mus musculus
  siRNA target sequence for Cenpc (NM_007683.1,1930-1948).
ctgtaagtatcgaaacaat

SEQ ID NO: 457062 - DNA, 19 bp, Mus musculus
  siRNA target sequence for Cenpc (NM_007683.1,1932-1950).
gtaagtatcgaaacaatgt

SEQ ID NO: 457063 - DNA, 19 bp, Mus musculus
  siRNA target sequence for Cenpc (NM_007683.1,1940-1958).
cgaaacaatgttatgacat

SEQ ID NO: 457064 - DNA, 19 bp, Mus musculus
  siRNA target sequence for Cenpc (NM_007683.1,1954-1972).
gacatcaccgaatgttcat

SEQ ID NO: 457065 - DNA, 19 bp, Mus musculus
  siRNA target sequence for Cenpc (NM_007683.1,1956-1974).
catcaccgaatgttcattt

SEQ ID NO: 457066 - DNA, 19 bp, Mus musculus
  siRNA target sequence for Cenpc (NM_007683.1,1982-2000).
catactgaggaatatacaa

SEQ ID NO: 457067 - DNA, 19 bp, Mus musculus
  siRNA target sequence for Cenpc (NM_007683.1,2025-2043).
ccaattcagaaatgtctaa

SEQ ID NO: 457068 - DNA, 19 bp, Mus musculus
  siRNA target sequence for Cenpc (NM_007683.1,2067-2085).
gaccttccaggttcaagaa

SEQ ID NO: 457069 - DNA, 19 bp, Mus musculus
  siRNA target sequence for Cenpc (NM_007683.1,2112-2130).
ctgagatgggtgatgaaca

SEQ ID NO: 457070 - DNA, 19 bp, Mus musculus
  siRNA target sequence for Cenpc (NM_007683.1,2137-2155).
gaagagtttgcattttaca

SEQ ID NO: 457071 - DNA, 19 bp, Mus musculus
  siRNA target sequence for Cenpc (NM_007683.1,2157-2175).
caagaagttttaatatggt

SEQ ID NO: 457072 - DNA, 19 bp, Mus musculus
  siRNA target sequence for Cenpc (NM_007683.1,2173-2191).
ggtaccagataaaaaatta

SEQ ID NO: 457073 - DNA, 19 bp, Mus musculus
  siRNA target sequence for Cenpc (NM_007683.1,2209-2227).
gccctccaactcaccaaat

SEQ ID NO: 457074 - DNA, 19 bp, Mus musculus
  siRNA target sequence for Cenpc (NM_007683.1,2223-2241).
caaatgttcgtcgatctaa

SEQ ID NO: 457075 - DNA, 19 bp, Mus musculus
  siRNA target sequence for Cenpc (NM_007683.1,2228-2246).
gttcgtcgatctaatagaa

SEQ ID NO: 457076 - DNA, 19 bp, Mus musculus
  siRNA target sequence for Cenpc (NM_007683.1,2234-2252).
cgatctaatagaatacgtt

SEQ ID NO: 457077 - DNA, 19 bp, Mus musculus
  siRNA target sequence for Cenpc (NM_007683.1,2235-2253).
gatctaatagaatacgttt

SEQ ID NO: 457078 - DNA, 19 bp, Mus musculus
  siRNA target sequence for Cenpc (NM_007683.1,2273-2291).
cgaggggaacgggtagatt

SEQ ID NO: 457079 - DNA, 19 bp, Mus musculus
  siRNA target sequence for Cenpc (NM_007683.1,2277-2295).
gggaacgggtagattatca

SEQ ID NO: 457080 - DNA, 19 bp, Mus musculus
  siRNA target sequence for Cenpc (NM_007683.1,2278-2296).
ggaacgggtagattatcaa

SEQ ID NO: 457081 - DNA, 19 bp, Mus musculus
  siRNA target sequence for Cenpc (NM_007683.1,2282-2300).
cgggtagattatcaagaaa

SEQ ID NO: 457082 - DNA, 19 bp, Mus musculus
  siRNA target sequence for Cenpc (NM_007683.1,2284-2302).
ggtagattatcaagaaagt

SEQ ID NO: 457083 - DNA, 19 bp, Mus musculus
  siRNA target sequence for Cenpc (NM_007683.1,2285-2303).
gtagattatcaagaaagtt

SEQ ID NO: 457084 - DNA, 19 bp, Mus musculus
  siRNA target sequence for Cenpc (NM_007683.1,2301-2319).
gttcgtcgggacaacttgt

SEQ ID NO: 457085 - DNA, 19 bp, Mus musculus
  siRNA target sequence for Cenpc (NM_007683.1,2310-2328).
gacaacttgtgcttgaaat

SEQ ID NO: 457086 - DNA, 19 bp, Mus musculus
  siRNA target sequence for Cenpc (NM_007683.1,2315-2333).
cttgtgcttgaaataatat

SEQ ID NO: 457087 - DNA, 19 bp, Mus musculus
  siRNA target sequence for Cenpc (NM_007683.1,2340-2358).
cttcagtacccacgaaaat

SEQ ID NO: 457088 - DNA, 19 bp, Mus musculus
  siRNA target sequence for Cenpc (NM_007683.1,2374-2392).
cctcggcaaagtcaacaaa

SEQ ID NO: 457089 - DNA, 19 bp, Mus musculus
  siRNA target sequence for Cenpc (NM_007683.1,2375-2393).
ctcggcaaagtcaacaaaa

SEQ ID NO: 457090 - DNA, 19 bp, Mus musculus
  siRNA target sequence for Cenpc (NM_007683.1,2377-2395).
cggcaaagtcaacaaaaaa

SEQ ID NO: 457091 - DNA, 19 bp, Mus musculus
  siRNA target sequence for Cenpc (NM_007683.1,2404-2422).
gaagccgacccatctcaat

SEQ ID NO: 457092 - DNA, 19 bp, Mus musculus
  siRNA target sequence for Cenpc (NM_007683.1,2544-2562).
gagatacataccgcttttt

SEQ ID NO: 457093 - DNA, 19 bp, Mus musculus
  siRNA target sequence for Cenpc (NM_007683.1,2550-2568).
cataccgcttttttgttga

SEQ ID NO: 457094 - DNA, 19 bp, Mus musculus
  siRNA target sequence for Cenpc (NM_007683.1,2599-2617).
ggatacaatatatttttct

SEQ ID NO: 457095 - DNA, 19 bp, Mus musculus
  siRNA target sequence for Cenpc (NM_007683.1,2616-2634).
ctactggaaaattggtttt

SEQ ID NO: 457096 - DNA, 19 bp, Mus musculus
  siRNA target sequence for Cenpc (NM_007683.1,2662-2680).
gcatgttggccaagatata

SEQ ID NO: 457097 - DNA, 19 bp, Mus musculus
  siRNA target sequence for Cenpc (NM_007683.1,2663-2681).
catgttggccaagatatat

SEQ ID NO: 457098 - DNA, 19 bp, Mus musculus
  siRNA target sequence for Cenpc (NM_007683.1,2702-2720).
ggtgaccttttatgtacat

SEQ ID NO: 457099 - DNA, 19 bp, Mus musculus
  siRNA target sequence for Cenpc (NM_007683.1,2745-2763).
ctactggggattcattcta

SEQ ID NO: 457100 - DNA, 19 bp, Mus musculus
  siRNA target sequence for Cenpc (NM_007683.1,2748-2766).
ctggggattcattctatgt

SEQ ID NO: 457101 - DNA, 19 bp, Mus musculus
  siRNA target sequence for Cenpc (NM_007683.1,2761-2779).
ctatgttccttcaggtaat

SEQ ID NO: 457102 - DNA, 19 bp, Mus musculus
  siRNA target sequence for Cenpc (NM_007683.1,2772-2790).
caggtaatcattacaacat

SEQ ID NO: 457103 - DNA, 19 bp, Mus musculus
  siRNA target sequence for Cenpc (NM_007683.1,2774-2792).
ggtaatcattacaacatta

SEQ ID NO: 457104 - DNA, 19 bp, Mus musculus
  siRNA target sequence for Cenpc (NM_007683.1,2775-2793).
gtaatcattacaacattaa

SEQ ID NO: 457105 - DNA, 19 bp, Mus musculus
  siRNA target sequence for Cenpc (NM_007683.1,2803-2821).
gaatgtggaaagtagtctt

SEQ ID NO: 457106 - DNA, 19 bp, Mus musculus
  siRNA target sequence for Cenpc (NM_007683.1,2807-2825).
gtggaaagtagtcttcttt

SEQ ID NO: 457107 - DNA, 19 bp, Mus musculus
  siRNA target sequence for Cenpc (NM_007683.1,2814-2832).
gtagtcttctttttactca

SEQ ID NO: 457108 - DNA, 19 bp, Mus musculus
  siRNA target sequence for Cenpc (NM_007683.1,2819-2837).
cttctttttactcaaataa

SEQ ID NO: 457109 - DNA, 19 bp, Mus musculus
  siRNA target sequence for Centa2 (NM_172133.1,221-239).
cagacatcagcaaagttaa

SEQ ID NO: 457110 - DNA, 19 bp, Mus musculus
  siRNA target sequence for Centa2 (NM_172133.1,303-321).
caacgtgaaagccaagttt

SEQ ID NO: 457111 - DNA, 19 bp, Mus musculus
  siRNA target sequence for Centa2 (NM_172133.1,329-347).
gagtcccagctttctacta

SEQ ID NO: 457112 - DNA, 19 bp, Mus musculus
  siRNA target sequence for Centa2 (NM_172133.1,375-393).
cttaaaggaacaatggatt

SEQ ID NO: 457113 - DNA, 19 bp, Mus musculus
  siRNA target sequence for Centa2 (NM_172133.1,390-408).
gattcgagctaagtatgaa

SEQ ID NO: 457114 - DNA, 19 bp, Mus musculus
  siRNA target sequence for Centa2 (NM_172133.1,415-433).
gagtttacggctattgaca

SEQ ID NO: 457115 - DNA, 19 bp, Mus musculus
  siRNA target sequence for Centa2 (NM_172133.1,417-435).
gtttacggctattgacaaa

SEQ ID NO: 457116 - DNA, 19 bp, Mus musculus
  siRNA target sequence for Centa2 (NM_172133.1,530-548).
gggaaggcctcctgaagta

SEQ ID NO: 457117 - DNA, 19 bp, Mus musculus
  siRNA target sequence for Centa2 (NM_172133.1,532-550).
gaaggcctcctgaagtact

SEQ ID NO: 457118 - DNA, 19 bp, Mus musculus
  siRNA target sequence for Centa2 (NM_172133.1,675-693).
caccaggaacctgtttgtt

SEQ ID NO: 457119 - DNA, 19 bp, Mus musculus
  siRNA target sequence for Centa2 (NM_172133.1,680-698).
ggaacctgtttgtttatca

SEQ ID NO: 457120 - DNA, 19 bp, Mus musculus
  siRNA target sequence for Centa2 (NM_172133.1,813-831).
caggaactacctcaaacaa

SEQ ID NO: 457121 - DNA, 19 bp, Mus musculus
  siRNA target sequence for Centa2 (NM_172133.1,859-877).
catagagaacccttcaaga

SEQ ID NO: 457122 - DNA, 19 bp, Mus musculus
  siRNA target sequence for Centa2 (NM_172133.1,907-925).
cggaggctgctctattata

SEQ ID NO: 457123 - DNA, 19 bp, Mus musculus
  siRNA target sequence for Centa2 (NM_172133.1,911-929).
ggctgctctattataagaa

SEQ ID NO: 457124 - DNA, 19 bp, Mus musculus
  siRNA target sequence for Centa2 (NM_172133.1,957-975).
ggtttttctgggaagcaat

SEQ ID NO: 457125 - DNA, 19 bp, Mus musculus
  siRNA target sequence for Centa2 (NM_172133.1,971-989).
gcaatgagcagggatatga

SEQ ID NO: 457126 - DNA, 19 bp, Mus musculus
  siRNA target sequence for Centa2 (NM_172133.1,1055-1073).
ctccggagcggaaattcat

SEQ ID NO: 457127 - DNA, 19 bp, Mus musculus
  siRNA target sequence for Centa2 (NM_172133.1,1057-1075).
ccggagcggaaattcatct

SEQ ID NO: 457128 - DNA, 19 bp, Mus musculus
  siRNA target sequence for Centa2 (NM_172133.1,1058-1076).
cggagcggaaattcatctt

SEQ ID NO: 457129 - DNA, 19 bp, Mus musculus
  siRNA target sequence for Centb1 (NM_153788.2,206-224).
cggtcaagctagattttga

SEQ ID NO: 457130 - DNA, 19 bp, Mus musculus
  siRNA target sequence for Centb1 (NM_153788.2,249-267).
cttccgagcctcgattgaa

SEQ ID NO: 457131 - DNA, 19 bp, Mus musculus
  siRNA target sequence for Centb1 (NM_153788.2,302-320).
gcctggaaaagctgctaaa

SEQ ID NO: 457132 - DNA, 19 bp, Mus musculus
  siRNA target sequence for Centb1 (NM_153788.2,342-360).
gagcggacagcattacctt

SEQ ID NO: 457133 - DNA, 19 bp, Mus musculus
  siRNA target sequence for Centb1 (NM_153788.2,429-447).
ggcggagtgtctggaaaaa

SEQ ID NO: 457134 - DNA, 19 bp, Mus musculus
  siRNA target sequence for Centb1 (NM_153788.2,430-448).
gcggagtgtctggaaaaat

SEQ ID NO: 457135 - DNA, 19 bp, Mus musculus
  siRNA target sequence for Centb1 (NM_153788.2,431-449).
cggagtgtctggaaaaatt

SEQ ID NO: 457136 - DNA, 19 bp, Mus musculus
  siRNA target sequence for Centb1 (NM_153788.2,489-507).
gcttcttgatgctactcaa

SEQ ID NO: 457137 - DNA, 19 bp, Mus musculus
  siRNA target sequence for Centb1 (NM_153788.2,565-583).
gaggctcgcagggatttct

SEQ ID NO: 457138 - DNA, 19 bp, Mus musculus
  siRNA target sequence for Centb1 (NM_153788.2,699-717).
ccggagtcgggcattagat

SEQ ID NO: 457139 - DNA, 19 bp, Mus musculus
  siRNA target sequence for Centb1 (NM_153788.2,700-718).
cggagtcgggcattagatt

SEQ ID NO: 457140 - DNA, 19 bp, Mus musculus
  siRNA target sequence for Centb1 (NM_153788.2,701-719).
ggagtcgggcattagatta

SEQ ID NO: 457141 - DNA, 19 bp, Mus musculus
  siRNA target sequence for Centb1 (NM_153788.2,702-720).
gagtcgggcattagattat

SEQ ID NO: 457142 - DNA, 19 bp, Mus musculus
  siRNA target sequence for Centb1 (NM_153788.2,790-808).
gaggcccaggccacttatt

SEQ ID NO: 457143 - DNA, 19 bp, Mus musculus
  siRNA target sequence for Centb1 (NM_153788.2,986-1004).
ggcctagtggcttggtaat

SEQ ID NO: 457144 - DNA, 19 bp, Mus musculus
  siRNA target sequence for Centb1 (NM_153788.2,989-1007).
ctagtggcttggtaatgga

SEQ ID NO: 457145 - DNA, 19 bp, Mus musculus
  siRNA target sequence for Centb1 (NM_153788.2,999-1017).
ggtaatggaaggacatctt

SEQ ID NO: 457146 - DNA, 19 bp, Mus musculus
  siRNA target sequence for Centb1 (NM_153788.2,1024-1042).
cgtgccagcaatgcattta

SEQ ID NO: 457147 - DNA, 19 bp, Mus musculus
  siRNA target sequence for Centb1 (NM_153788.2,1025-1043).
gtgccagcaatgcatttaa

SEQ ID NO: 457148 - DNA, 19 bp, Mus musculus
  siRNA target sequence for Centb1 (NM_153788.2,1086-1104).
ggtttaccagaagaaatat

SEQ ID NO: 457149 - DNA, 19 bp, Mus musculus
  siRNA target sequence for Centb1 (NM_153788.2,1167-1185).
ctcagaaaggcgtttctgt

SEQ ID NO: 457150 - DNA, 19 bp, Mus musculus
  siRNA target sequence for Centb1 (NM_153788.2,1178-1196).
gtttctgtttcgaagtagt

SEQ ID NO: 457151 - DNA, 19 bp, Mus musculus
  siRNA target sequence for Centb1 (NM_153788.2,1329-1347).
ccaggtctcaggataccat

SEQ ID NO: 457152 - DNA, 19 bp, Mus musculus
  siRNA target sequence for Centb1 (NM_153788.2,1542-1560).
caggagcctcggagttcat

SEQ ID NO: 457153 - DNA, 19 bp, Mus musculus
  siRNA target sequence for Centb1 (NM_153788.2,1622-1640).
gcgagctggggaatgtcat

SEQ ID NO: 457154 - DNA, 19 bp, Mus musculus
  siRNA target sequence for Centb1 (NM_153788.2,1725-1743).
ctggattcatgccaagtat

SEQ ID NO: 457155 - DNA, 19 bp, Mus musculus
  siRNA target sequence for Centb1 (NM_153788.2,1727-1745).
ggattcatgccaagtatgt

SEQ ID NO: 457156 - DNA, 19 bp, Mus musculus
  siRNA target sequence for Centb1 (NM_153788.2,2069-2087).
gcgagtttctcctccaaaa

SEQ ID NO: 457157 - DNA, 19 bp, Mus musculus
  siRNA target sequence for Centb1 (NM_153788.2,2070-2088).
cgagtttctcctccaaaat

SEQ ID NO: 457158 - DNA, 19 bp, Mus musculus
  siRNA target sequence for Centb1 (NM_153788.2,2219-2237).
gcagggaccctctgactat

SEQ ID NO: 457159 - DNA, 19 bp, Mus musculus
  siRNA target sequence for Centb1 (NM_153788.2,2238-2256).
cgcaatggaaaccactaat

SEQ ID NO: 457160 - DNA, 19 bp, Mus musculus
  siRNA target sequence for Centb1 (NM_153788.2,2275-2293).
ctacgattggcaaagatga

SEQ ID NO: 457161 - DNA, 19 bp, Mus musculus
  siRNA target sequence for Centb1 (NM_153788.2,2370-2388).
gtcggacgacccagagaaa

SEQ ID NO: 457162 - DNA, 19 bp, Mus musculus
  siRNA target sequence for Centb1 (NM_153788.2,2374-2392).
gacgacccagagaaactga

SEQ ID NO: 457163 - DNA, 19 bp, Mus musculus
  siRNA target sequence for Centb1 (NM_153788.2,2402-2420).
gtcacgacctccatactct

SEQ ID NO: 457164 - DNA, 19 bp, Mus musculus
  siRNA target sequence for Centg2 (NM_178119.2,897-915).
ggttcaagaaggagattgt

SEQ ID NO: 457165 - DNA, 19 bp, Mus musculus
  siRNA target sequence for Centg2 (NM_178119.2,987-1005).
gggtggacgcggtcatctt

SEQ ID NO: 457166 - DNA, 19 bp, Mus musculus
  siRNA target sequence for Centg2 (NM_178119.2,988-1006).
ggtggacgcggtcatcttt

SEQ ID NO: 457167 - DNA, 19 bp, Mus musculus
  siRNA target sequence for Centg2 (NM_178119.2,992-1010).
gacgcggtcatctttgtct

SEQ ID NO: 457168 - DNA, 19 bp, Mus musculus
  siRNA target sequence for Centg2 (NM_178119.2,1111-1129).
gacccaggatgccataagt

SEQ ID NO: 457169 - DNA, 19 bp, Mus musculus
  siRNA target sequence for Centg2 (NM_178119.2,1390-1408).
cggaggtgggagtttaagt

SEQ ID NO: 457170 - DNA, 19 bp, Mus musculus
  siRNA target sequence for Centg2 (NM_178119.2,1548-1566).
ggagcgacccagacaaaga

SEQ ID NO: 457171 - DNA, 19 bp, Mus musculus
  siRNA target sequence for Centg2 (NM_178119.2,1650-1668).
gtggcaagtcactgaacaa

SEQ ID NO: 457172 - DNA, 19 bp, Mus musculus
  siRNA target sequence for Centg2 (NM_178119.2,1717-1735).
ctaccaccccagtttacat

SEQ ID NO: 457173 - DNA, 19 bp, Mus musculus
  siRNA target sequence for Centg2 (NM_178119.2,1721-1739).
caccccagtttacatgatt

SEQ ID NO: 457174 - DNA, 19 bp, Mus musculus
  siRNA target sequence for Centg2 (NM_178119.2,1867-1885).
caaggacatgagcagttta

SEQ ID NO: 457175 - DNA, 19 bp, Mus musculus
  siRNA target sequence for Centg2 (NM_178119.2,1871-1889).
gacatgagcagtttacaca

SEQ ID NO: 457176 - DNA, 19 bp, Mus musculus
  siRNA target sequence for Centg2 (NM_178119.2,2027-2045).
gacgctacagtcattgcaa

SEQ ID NO: 457177 - DNA, 19 bp, Mus musculus
  siRNA target sequence for Centg2 (NM_178119.2,2164-2182).
gcaccggaggaagaaaagt

SEQ ID NO: 457178 - DNA, 19 bp, Mus musculus
  siRNA target sequence for Centg2 (NM_178119.2,2361-2379).
gcgagagcagcaagaataa

SEQ ID NO: 457179 - DNA, 19 bp, Mus musculus
  siRNA target sequence for Centg2 (NM_178119.2,2363-2381).
gagagcagcaagaataagt

SEQ ID NO: 457180 - DNA, 19 bp, Mus musculus
  siRNA target sequence for Centg2 (NM_178119.2,2417-2435).
cagtccatccgtaacatga

SEQ ID NO: 457181 - DNA, 19 bp, Mus musculus
  siRNA target sequence for Centg2 (NM_178119.2,2474-2492).
cctaactgggccagtttga

SEQ ID NO: 457182 - DNA, 19 bp, Mus musculus
  siRNA target sequence for Centg2 (NM_178119.2,2475-2493).
ctaactgggccagtttgaa

SEQ ID NO: 457183 - DNA, 19 bp, Mus musculus
  siRNA target sequence for Centg2 (NM_178119.2,2597-2615).
ctgatcaaggtgatgtcat

SEQ ID NO: 457184 - DNA, 19 bp, Mus musculus
  siRNA target sequence for Centg2 (NM_178119.2,3016-3034).
ctccagccaggagtgtatt

SEQ ID NO: 457185 - DNA, 19 bp, Mus musculus
  siRNA target sequence for Centg2 (NM_178119.2,3018-3036).
ccagccaggagtgtattga

SEQ ID NO: 457186 - DNA, 19 bp, Mus musculus
  siRNA target sequence for Centg3 (NM_139153.1,432-450).
cctgtctagtgggaaatca

SEQ ID NO: 457187 - DNA, 19 bp, Mus musculus
  siRNA target sequence for Centg3 (NM_139153.1,452-470).
ccttggttcaccgatatct

SEQ ID NO: 457188 - DNA, 19 bp, Mus musculus
  siRNA target sequence for Centg3 (NM_139153.1,498-516).
ccctgaagggggtcgattt

SEQ ID NO: 457189 - DNA, 19 bp, Mus musculus
  siRNA target sequence for Centg3 (NM_139153.1,499-517).
cctgaagggggtcgattta

SEQ ID NO: 457190 - DNA, 19 bp, Mus musculus
  siRNA target sequence for Centg3 (NM_139153.1,500-518).
ctgaagggggtcgatttaa

SEQ ID NO: 457191 - DNA, 19 bp, Mus musculus
  siRNA target sequence for Centg3 (NM_139153.1,676-694).
cgcctctgcagctttcgaa

SEQ ID NO: 457192 - DNA, 19 bp, Mus musculus
  siRNA target sequence for Centg3 (NM_139153.1,677-695).
gcctctgcagctttcgaaa

SEQ ID NO: 457193 - DNA, 19 bp, Mus musculus
  siRNA target sequence for Centg3 (NM_139153.1,678-696).
cctctgcagctttcgaaat

SEQ ID NO: 457194 - DNA, 19 bp, Mus musculus
  siRNA target sequence for Centg3 (NM_139153.1,804-822).
gcgctgtacctactatgaa

SEQ ID NO: 457195 - DNA, 19 bp, Mus musculus
  siRNA target sequence for Centg3 (NM_139153.1,805-823).
cgctgtacctactatgaaa

SEQ ID NO: 457196 - DNA, 19 bp, Mus musculus
  siRNA target sequence for Centg3 (NM_139153.1,1146-1164).
catcttcacgtctcgaaaa

SEQ ID NO: 457197 - DNA, 19 bp, Mus musculus
  siRNA target sequence for Centg3 (NM_139153.1,1149-1167).
cttcacgtctcgaaaaggt

SEQ ID NO: 457198 - DNA, 19 bp, Mus musculus
  siRNA target sequence for Centg3 (NM_139153.1,1248-1266).
ggggatcctgctgaaaaga

SEQ ID NO: 457199 - DNA, 19 bp, Mus musculus
  siRNA target sequence for Centg3 (NM_139153.1,1318-1336).
gacaacgggttgcttactt

SEQ ID NO: 457200 - DNA, 19 bp, Mus musculus
  siRNA target sequence for Centg3 (NM_139153.1,1348-1366).
ctgcacgattacatgcaaa

SEQ ID NO: 457201 - DNA, 19 bp, Mus musculus
  siRNA target sequence for Centg3 (NM_139153.1,1351-1369).
cacgattacatgcaaaaca

SEQ ID NO: 457202 - DNA, 19 bp, Mus musculus
  siRNA target sequence for Centg3 (NM_139153.1,1483-1501).
gcaatggagcggagtaaca

SEQ ID NO: 457203 - DNA, 19 bp, Mus musculus
  siRNA target sequence for Centg3 (NM_139153.1,1903-1921).
gcagaagagcgggaactat

SEQ ID NO: 457204 - DNA, 19 bp, Mus musculus
  siRNA target sequence for Centg3 (NM_139153.1,2043-2061).
cggcaacagcctctgtatt

SEQ ID NO: 457205 - DNA, 19 bp, Mus musculus
  siRNA target sequence for Centg3 (NM_139153.1,2229-2247).
caacgccttggctaacagt

SEQ ID NO: 457206 - DNA, 19 bp, Mus musculus
  siRNA target sequence for Centg3 (NM_139153.1,2378-2396).
cgctgggacagcagttact

SEQ ID NO: 457207 - DNA, 19 bp, Mus musculus
  siRNA target sequence for Centg3 (NM_139153.1,2742-2760).
ccgcagccctagtatccta

SEQ ID NO: 457208 - DNA, 19 bp, Mus musculus
  siRNA target sequence for Centg3 (NM_139153.1,2743-2761).
cgcagccctagtatcctat

SEQ ID NO: 457209 - DNA, 19 bp, Mus musculus
  siRNA target sequence for Chd1l (NM_026539.1,172-190).
ctagtccagtgcttccatt

SEQ ID NO: 457210 - DNA, 19 bp, Mus musculus
  siRNA target sequence for Chd1l (NM_026539.1,451-469).
ctgacgacatacgagattt

SEQ ID NO: 457211 - DNA, 19 bp, Mus musculus
  siRNA target sequence for Chd1l (NM_026539.1,455-473).
cgacatacgagatttgctt

SEQ ID NO: 457212 - DNA, 19 bp, Mus musculus
  siRNA target sequence for Chd1l (NM_026539.1,462-480).
cgagatttgcttgaaagat

SEQ ID NO: 457213 - DNA, 19 bp, Mus musculus
  siRNA target sequence for Chd1l (NM_026539.1,474-492).
gaaagatgcctcatttcta

SEQ ID NO: 457214 - DNA, 19 bp, Mus musculus
  siRNA target sequence for Chd1l (NM_026539.1,558-576).
gctgcacaggacactttca

SEQ ID NO: 457215 - DNA, 19 bp, Mus musculus
  siRNA target sequence for Chd1l (NM_026539.1,851-869).
ccgctctgcagaaaaagta

SEQ ID NO: 457216 - DNA, 19 bp, Mus musculus
  siRNA target sequence for Chd1l (NM_026539.1,1064-1082).
ggctgctggcgtttctgta

SEQ ID NO: 457217 - DNA, 19 bp, Mus musculus
  siRNA target sequence for Chd1l (NM_026539.1,1065-1083).
gctgctggcgtttctgtat

SEQ ID NO: 457218 - DNA, 19 bp, Mus musculus
  siRNA target sequence for Chd1l (NM_026539.1,1216-1234).
gccattaagaactttggaa

SEQ ID NO: 457219 - DNA, 19 bp, Mus musculus
  siRNA target sequence for Chd1l (NM_026539.1,1274-1292).
gtggagtgggcatgaactt

SEQ ID NO: 457220 - DNA, 19 bp, Mus musculus
  siRNA target sequence for Chd1l (NM_026539.1,1297-1315).
gcggcagacaccgtcattt

SEQ ID NO: 457221 - DNA, 19 bp, Mus musculus
  siRNA target sequence for Chd1l (NM_026539.1,1298-1316).
cggcagacaccgtcatttt

SEQ ID NO: 457222 - DNA, 19 bp, Mus musculus
  siRNA target sequence for Chd1l (NM_026539.1,1326-1344).
cgacttcaaccctcagaat

SEQ ID NO: 457223 - DNA, 19 bp, Mus musculus
  siRNA target sequence for Chd1l (NM_026539.1,1379-1397).
gccagaacaagtctgttaa

SEQ ID NO: 457224 - DNA, 19 bp, Mus musculus
  siRNA target sequence for Chd1l (NM_026539.1,1418-1436).
gcgacaccgtggaagaaat

SEQ ID NO: 457225 - DNA, 19 bp, Mus musculus
  siRNA target sequence for Chd1l (NM_026539.1,1426-1444).
gtggaagaaatcgtgtata

SEQ ID NO: 457226 - DNA, 19 bp, Mus musculus
  siRNA target sequence for Chd1l (NM_026539.1,1540-1558).
cagttaagtgagattctca

SEQ ID NO: 457227 - DNA, 19 bp, Mus musculus
  siRNA target sequence for Chd1l (NM_026539.1,1555-1573).
ctcaaattcggcttggata

SEQ ID NO: 457228 - DNA, 19 bp, Mus musculus
  siRNA target sequence for Chd1l (NM_026539.1,1557-1575).
caaattcggcttggataaa

SEQ ID NO: 457229 - DNA, 19 bp, Mus musculus
  siRNA target sequence for Chd1l (NM_026539.1,1595-1613).
gctccatggaggatataga

SEQ ID NO: 457230 - DNA, 19 bp, Mus musculus
  siRNA target sequence for Chd1l (NM_026539.1,1705-1723).
ccagaggaaggaagtgaat

SEQ ID NO: 457231 - DNA, 19 bp, Mus musculus
  siRNA target sequence for Chd1l (NM_026539.1,1746-1764).
ccacatgtacttgtttgaa

SEQ ID NO: 457232 - DNA, 19 bp, Mus musculus
  siRNA target sequence for Chd1l (NM_026539.1,1758-1776).
gtttgaaggtagagactat

SEQ ID NO: 457233 - DNA, 19 bp, Mus musculus
  siRNA target sequence for Chd1l (NM_026539.1,2151-2169).
cgagctggcttatgaagat

SEQ ID NO: 457234 - DNA, 19 bp, Mus musculus
  siRNA target sequence for Chd1l (NM_026539.1,2173-2191).
gactcaacctccattaact

SEQ ID NO: 457235 - DNA, 19 bp, Mus musculus
  siRNA target sequence for Chd1l (NM_026539.1,2177-2195).
caacctccattaactatgt

SEQ ID NO: 457236 - DNA, 19 bp, Mus musculus
  siRNA target sequence for Chd1l (NM_026539.1,2245-2263).
gtgcactgtgtagatgatt

SEQ ID NO: 457237 - DNA, 19 bp, Mus musculus
  siRNA target sequence for Chd1l (NM_026539.1,2275-2293).
ggcagaggtggcttattca

SEQ ID NO: 457238 - DNA, 19 bp, Mus musculus
  siRNA target sequence for Chd1l (NM_026539.1,2386-2404).
cctatcgacgataaagagt

SEQ ID NO: 457239 - DNA, 19 bp, Mus musculus
  siRNA target sequence for Chd1l (NM_026539.1,2561-2579).
gaattggacatgctacaaa

SEQ ID NO: 457240 - DNA, 19 bp, Mus musculus
  siRNA target sequence for Chd1l (NM_026539.1,2581-2599).
ggttttaactggtatggta

SEQ ID NO: 457241 - DNA, 19 bp, Mus musculus
  siRNA target sequence for Chd1l (NM_026539.1,2606-2624).
gacttatccggaaacattt

SEQ ID NO: 457242 - DNA, 19 bp, Mus musculus
  siRNA target sequence for Chd1l (NM_026539.1,2630-2648).
cacgaggcatcccaactta

SEQ ID NO: 457243 - DNA, 19 bp, Mus musculus
  siRNA target sequence for Chd1l (NM_026539.1,2632-2650).
cgaggcatcccaacttaca

SEQ ID NO: 457244 - DNA, 19 bp, Mus musculus
  siRNA target sequence for Chd1l (NM_026539.1,2633-2651).
gaggcatcccaacttacat

SEQ ID NO: 457245 - DNA, 19 bp, Mus musculus
  siRNA target sequence for Chd1l (NM_026539.1,2635-2653).
ggcatcccaacttacatat

SEQ ID NO: 457246 - DNA, 19 bp, Mus musculus
  siRNA target sequence for Chd1l (NM_026539.1,2636-2654).
gcatcccaacttacatata

SEQ ID NO: 457247 - DNA, 19 bp, Mus musculus
  siRNA target sequence for Chd1l (NM_026539.1,2641-2659).
ccaacttacatatactact

SEQ ID NO: 457248 - DNA, 19 bp, Mus musculus
  siRNA target sequence for Chrac1 (NM_053068.2,169-187).
ccacggagctctttgttca

SEQ ID NO: 457249 - DNA, 19 bp, Mus musculus
  siRNA target sequence for Chrac1 (NM_053068.2,277-295).
cggagacacttcagtttct

SEQ ID NO: 457250 - DNA, 19 bp, Mus musculus
  siRNA target sequence for Chrac1 (NM_053068.2,288-306).
cagtttctcgcagatatat

SEQ ID NO: 457251 - DNA, 19 bp, Mus musculus
  siRNA target sequence for Chrac1 (NM_053068.2,290-308).
gtttctcgcagatatatta

SEQ ID NO: 457252 - DNA, 19 bp, Mus musculus
  siRNA target sequence for Chrac1 (NM_053068.2,294-312).
ctcgcagatatattaccaa

SEQ ID NO: 457253 - DNA, 19 bp, Mus musculus
  siRNA target sequence for Chrac1 (NM_053068.2,324-342).
gctagtaagtacctgaaaa

SEQ ID NO: 457254 - DNA, 19 bp, Mus musculus
  siRNA target sequence for Chtf18 (NM_145409.1,270-288).
gggtcgccaggaaatgtca

SEQ ID NO: 457255 - DNA, 19 bp, Mus musculus
  siRNA target sequence for Chtf18 (NM_145409.1,271-289).
ggtcgccaggaaatgtcaa

SEQ ID NO: 457256 - DNA, 19 bp, Mus musculus
  siRNA target sequence for Chtf18 (NM_145409.1,293-311).
caatactagaaagaatgtt

SEQ ID NO: 457257 - DNA, 19 bp, Mus musculus
  siRNA target sequence for Chtf18 (NM_145409.1,358-376).
ggttggacgtggtgaagaa

SEQ ID NO: 457258 - DNA, 19 bp, Mus musculus
  siRNA target sequence for Chtf18 (NM_145409.1,398-416).
ggaggagctcttatatcca

SEQ ID NO: 457259 - DNA, 19 bp, Mus musculus
  siRNA target sequence for Chtf18 (NM_145409.1,557-575).
gagacggcctcctatctta

SEQ ID NO: 457260 - DNA, 19 bp, Mus musculus
  siRNA target sequence for Chtf18 (NM_145409.1,559-577).
gacggcctcctatcttaga

SEQ ID NO: 457261 - DNA, 19 bp, Mus musculus
  siRNA target sequence for Chtf18 (NM_145409.1,563-581).
gcctcctatcttagaagat

SEQ ID NO: 457262 - DNA, 19 bp, Mus musculus
  siRNA target sequence for Chtf18 (NM_145409.1,564-582).
cctcctatcttagaagatt

SEQ ID NO: 457263 - DNA, 19 bp, Mus musculus
  siRNA target sequence for Chtf18 (NM_145409.1,572-590).
cttagaagattatatcaat

SEQ ID NO: 457264 - DNA, 19 bp, Mus musculus
  siRNA target sequence for Chtf18 (NM_145409.1,607-625).
gagaacgggcctttttggt

SEQ ID NO: 457265 - DNA, 19 bp, Mus musculus
  siRNA target sequence for Chtf18 (NM_145409.1,653-671).
ggtgcagaaccctcttcta

SEQ ID NO: 457266 - DNA, 19 bp, Mus musculus
  siRNA target sequence for Chtf18 (NM_145409.1,656-674).
gcagaaccctcttctagat

SEQ ID NO: 457267 - DNA, 19 bp, Mus musculus
  siRNA target sequence for Chtf18 (NM_145409.1,729-747).
ctgaaggagcaagttgata

SEQ ID NO: 457268 - DNA, 19 bp, Mus musculus
  siRNA target sequence for Chtf18 (NM_145409.1,930-948).
ctgctcagtgacgatttta

SEQ ID NO: 457269 - DNA, 19 bp, Mus musculus
  siRNA target sequence for Chtf18 (NM_145409.1,933-951).
ctcagtgacgattttacca

SEQ ID NO: 457270 - DNA, 19 bp, Mus musculus
  siRNA target sequence for Chtf18 (NM_145409.1,949-967).
ccaaccgctgcctactcaa

SEQ ID NO: 457271 - DNA, 19 bp, Mus musculus
  siRNA target sequence for Chtf18 (NM_145409.1,1225-1243).
ggtattgcgtggtagagat

SEQ ID NO: 457272 - DNA, 19 bp, Mus musculus
  siRNA target sequence for Chtf18 (NM_145409.1,1274-1292).
cttccgtacacgcattgaa

SEQ ID NO: 457273 - DNA, 19 bp, Mus musculus
  siRNA target sequence for Chtf18 (NM_145409.1,1333-1351).
ggcccaactgcctggttat

SEQ ID NO: 457274 - DNA, 19 bp, Mus musculus
  siRNA target sequence for Chtf18 (NM_145409.1,1334-1352).
gcccaactgcctggttatt

SEQ ID NO: 457275 - DNA, 19 bp, Mus musculus
  siRNA target sequence for Chtf18 (NM_145409.1,1336-1354).
ccaactgcctggttattga

SEQ ID NO: 457276 - DNA, 19 bp, Mus musculus
  siRNA target sequence for Chtf18 (NM_145409.1,2031-2049).
cgggactccagcttaagca

SEQ ID NO: 457277 - DNA, 19 bp, Mus musculus
  siRNA target sequence for Chtf18 (NM_145409.1,2308-2326).
cacaggcccttgttctaga

SEQ ID NO: 457278 - DNA, 19 bp, Mus musculus
  siRNA target sequence for Chtf18 (NM_145409.1,2310-2328).
caggcccttgttctagata

SEQ ID NO: 457279 - DNA, 19 bp, Mus musculus
  siRNA target sequence for Chtf18 (NM_145409.1,2312-2330).
ggcccttgttctagatact

SEQ ID NO: 457280 - DNA, 19 bp, Mus musculus
  siRNA target sequence for Chtf18 (NM_145409.1,2314-2332).
cccttgttctagatactct

SEQ ID NO: 457281 - DNA, 19 bp, Mus musculus
  siRNA target sequence for Chtf18 (NM_145409.1,2519-2537).
ctgccgcttccctgaacta

SEQ ID NO: 457282 - DNA, 19 bp, Mus musculus
  siRNA target sequence for Chtf18 (NM_145409.1,2561-2579).
ccaggctaagcagcttatt

SEQ ID NO: 457283 - DNA, 19 bp, Mus musculus
  siRNA target sequence for Chtf18 (NM_145409.1,2564-2582).
ggctaagcagcttattgct

SEQ ID NO: 457284 - DNA, 19 bp, Mus musculus
  siRNA target sequence for Chtf18 (NM_145409.1,2739-2757).
cgcctagaacacatcatga

SEQ ID NO: 457285 - DNA, 19 bp, Mus musculus
  siRNA target sequence for Chtf18 (NM_145409.1,2918-2936).
caacgagggcgtctcaaat

SEQ ID NO: 457286 - DNA, 19 bp, Mus musculus
  siRNA target sequence for Chtf18 (NM_145409.1,2921-2939).
cgagggcgtctcaaatgct

SEQ ID NO: 457287 - DNA, 19 bp, Mus musculus
  siRNA target sequence for Cic (NM_027882.2,100-118).
catgttcgtgtggacaaat

SEQ ID NO: 457288 - DNA, 19 bp, Mus musculus
  siRNA target sequence for Cic (NM_027882.2,386-404).
ggtgtggatcctggtaaaa

SEQ ID NO: 457289 - DNA, 19 bp, Mus musculus
  siRNA target sequence for Cic (NM_027882.2,472-490).
cgagagtgatcatgatgat

SEQ ID NO: 457290 - DNA, 19 bp, Mus musculus
  siRNA target sequence for Cic (NM_027882.2,577-595).
ggaacgagactcatcttct

SEQ ID NO: 457291 - DNA, 19 bp, Mus musculus
  siRNA target sequence for Cic (NM_027882.2,581-599).
cgagactcatcttctgaaa

SEQ ID NO: 457292 - DNA, 19 bp, Mus musculus
  siRNA target sequence for Cic (NM_027882.2,622-640).
gcgggagaaggaccatatt

SEQ ID NO: 457293 - DNA, 19 bp, Mus musculus
  siRNA target sequence for Cic (NM_027882.2,1163-1181).
gaactgacccagatggttt

SEQ ID NO: 457294 - DNA, 19 bp, Mus musculus
  siRNA target sequence for Cic (NM_027882.2,1416-1434).
gcaccaccgacattgatct

SEQ ID NO: 457295 - DNA, 19 bp, Mus musculus
  siRNA target sequence for Cic (NM_027882.2,1419-1437).
ccaccgacattgatctcaa

SEQ ID NO: 457296 - DNA, 19 bp, Mus musculus
  siRNA target sequence for Cic (NM_027882.2,1532-1550).
gtcatccgctcctccttta

SEQ ID NO: 457297 - DNA, 19 bp, Mus musculus
  siRNA target sequence for Cic (NM_027882.2,1837-1855).
caagagacctgaaagtgtt

SEQ ID NO: 457298 - DNA, 19 bp, Mus musculus
  siRNA target sequence for Cic (NM_027882.2,2119-2137).
ggctgaggcatcttcaaat

SEQ ID NO: 457299 - DNA, 19 bp, Mus musculus
  siRNA target sequence for Cic (NM_027882.2,2145-2163).
caggtgccaggactgaaat

SEQ ID NO: 457300 - DNA, 19 bp, Mus musculus
  siRNA target sequence for Cic (NM_027882.2,2193-2211).
ccccaatgggtgtcagttt

SEQ ID NO: 457301 - DNA, 19 bp, Mus musculus
  siRNA target sequence for Cic (NM_027882.2,2196-2214).
caatgggtgtcagtttagt

SEQ ID NO: 457302 - DNA, 19 bp, Mus musculus
  siRNA target sequence for Cic (NM_027882.2,2200-2218).
gggtgtcagtttagtgtat

SEQ ID NO: 457303 - DNA, 19 bp, Mus musculus
  siRNA target sequence for Cic (NM_027882.2,2201-2219).
ggtgtcagtttagtgtatt

SEQ ID NO: 457304 - DNA, 19 bp, Mus musculus
  siRNA target sequence for Cic (NM_027882.2,2208-2226).
gtttagtgtattcagataa

SEQ ID NO: 457305 - DNA, 19 bp, Mus musculus
  siRNA target sequence for Cic (NM_027882.2,2250-2268).
cgccagctccacatttggt

SEQ ID NO: 457306 - DNA, 19 bp, Mus musculus
  siRNA target sequence for Cic (NM_027882.2,2251-2269).
gccagctccacatttggta

SEQ ID NO: 457307 - DNA, 19 bp, Mus musculus
  siRNA target sequence for Cic (NM_027882.2,2358-2376).
cgcctgctgttcagtttat

SEQ ID NO: 457308 - DNA, 19 bp, Mus musculus
  siRNA target sequence for Cic (NM_027882.2,2359-2377).
gcctgctgttcagtttatt

SEQ ID NO: 457309 - DNA, 19 bp, Mus musculus
  siRNA target sequence for Cic (NM_027882.2,2485-2503).
caaggctgggggaatcaca

SEQ ID NO: 457310 - DNA, 19 bp, Mus musculus
  siRNA target sequence for Cic (NM_027882.2,2866-2884).
ggttagctcgcctttctca

SEQ ID NO: 457311 - DNA, 19 bp, Mus musculus
  siRNA target sequence for Cic (NM_027882.2,2881-2899).
ctcagtacctgtccaaaat

SEQ ID NO: 457312 - DNA, 19 bp, Mus musculus
  siRNA target sequence for Cic (NM_027882.2,2905-2923).
ccaacaacctagcaagatt

SEQ ID NO: 457313 - DNA, 19 bp, Mus musculus
  siRNA target sequence for Cic (NM_027882.2,2906-2924).
caacaacctagcaagatta

SEQ ID NO: 457314 - DNA, 19 bp, Mus musculus
  siRNA target sequence for Cic (NM_027882.2,2973-2991).
ccctgagcccagctacaat

SEQ ID NO: 457315 - DNA, 19 bp, Mus musculus
  siRNA target sequence for Cic (NM_027882.2,3039-3057).
caagaatcacctatgtaca

SEQ ID NO: 457316 - DNA, 19 bp, Mus musculus
  siRNA target sequence for Cic (NM_027882.2,3175-3193).
cagtggtcctgcctttgta

SEQ ID NO: 457317 - DNA, 19 bp, Mus musculus
  siRNA target sequence for Cic (NM_027882.2,3177-3195).
gtggtcctgcctttgtaca

SEQ ID NO: 457318 - DNA, 19 bp, Mus musculus
  siRNA target sequence for Cic (NM_027882.2,3593-3611).
cctgtggggtcttttgaat

SEQ ID NO: 457319 - DNA, 19 bp, Mus musculus
  siRNA target sequence for Cic (NM_027882.2,3793-3811).
ggagcgacctggcactaaa

SEQ ID NO: 457320 - DNA, 19 bp, Mus musculus
  siRNA target sequence for Cic (NM_027882.2,3816-3834).
ctgagactgccagcaaatt

SEQ ID NO: 457321 - DNA, 19 bp, Mus musculus
  siRNA target sequence for Cic (NM_027882.2,3995-4013).
cgcaaggaagtcactagtt

SEQ ID NO: 457322 - DNA, 19 bp, Mus musculus
  siRNA target sequence for Cic (NM_027882.2,4196-4214).
ggctcctaccgaaagaaga

SEQ ID NO: 457323 - DNA, 19 bp, Mus musculus
  siRNA target sequence for Cic (NM_027882.2,4400-4418).
gagaaggtgccctactcat

SEQ ID NO: 457324 - DNA, 19 bp, Mus musculus
  siRNA target sequence for Cic (NM_027882.2,4542-4560).
ccaaggtgtgtctgcaatt

SEQ ID NO: 457325 - DNA, 19 bp, Mus musculus
  siRNA target sequence for Cic (NM_027882.2,4569-4587).
gagaggtccgccagaagat

SEQ ID NO: 457326 - DNA, 19 bp, Mus musculus
  siRNA target sequence for Cnbp (NM_013493.1,192-210).
cggggtcgtggaatgagaa

SEQ ID NO: 457327 - DNA, 19 bp, Mus musculus
  siRNA target sequence for Cnbp (NM_013493.1,407-425).
gcaatgctgctacaattgt

SEQ ID NO: 457328 - DNA, 19 bp, Mus musculus
  siRNA target sequence for Cnbp (NM_013493.1,490-508).
gtgaatttggacatattca

SEQ ID NO: 457329 - DNA, 19 bp, Mus musculus
  siRNA target sequence for Cnbp (NM_013493.1,533-551).
ctataggtgtggtgaaact

SEQ ID NO: 457330 - DNA, 19 bp, Mus musculus
  siRNA target sequence for Cnbp (NM_013493.1,552-570).
ggtcatgtagccatcaatt

SEQ ID NO: 457331 - DNA, 19 bp, Mus musculus
  siRNA target sequence for Cnbp (NM_013493.1,555-573).
catgtagccatcaattgca

SEQ ID NO: 457332 - DNA, 19 bp, Mus musculus
  siRNA target sequence for Cnbp (NM_013493.1,574-592).
gcaagacaagtgaagtcaa

SEQ ID NO: 457333 - DNA, 19 bp, Mus musculus
  siRNA target sequence for Cnbp (NM_013493.1,580-598).
caagtgaagtcaactgtta

SEQ ID NO: 457334 - DNA, 19 bp, Mus musculus
  siRNA target sequence for Cnbp (NM_013493.1,625-643).
cacgggaatgcacaattga

SEQ ID NO: 457335 - DNA, 19 bp, Mus musculus
  siRNA target sequence for Copeb (NM_011803.1,199-217).
gatgtgctcccaatgtgta

SEQ ID NO: 457336 - DNA, 19 bp, Mus musculus
  siRNA target sequence for Copeb (NM_011803.1,306-324).
ggagttggaacgctatctt

SEQ ID NO: 457337 - DNA, 19 bp, Mus musculus
  siRNA target sequence for Copeb (NM_011803.1,479-497).
gctttaattataacttaga

SEQ ID NO: 457338 - DNA, 19 bp, Mus musculus
  siRNA target sequence for Copeb (NM_011803.1,559-577).
cccacgaccaaatttacct

SEQ ID NO: 457339 - DNA, 19 bp, Mus musculus
  siRNA target sequence for Copeb (NM_011803.1,616-634).
ctgagttcctccgtcattt

SEQ ID NO: 457340 - DNA, 19 bp, Mus musculus
  siRNA target sequence for Copeb (NM_011803.1,660-678).
gaacagggaatcttctcaa

SEQ ID NO: 457341 - DNA, 19 bp, Mus musculus
  siRNA target sequence for Copeb (NM_011803.1,793-811).
gtacatcggtgccacttta

SEQ ID NO: 457342 - DNA, 19 bp, Mus musculus
  siRNA target sequence for Creb3 (NM_013497.1,159-177).
gtcaggatctgctagcttt

SEQ ID NO: 457343 - DNA, 19 bp, Mus musculus
  siRNA target sequence for Creb3 (NM_013497.1,163-181).
ggatctgctagctttggat

SEQ ID NO: 457344 - DNA, 19 bp, Mus musculus
  siRNA target sequence for Creb3 (NM_013497.1,430-448).
gcacgtctccatagatcta

SEQ ID NO: 457345 - DNA, 19 bp, Mus musculus
  siRNA target sequence for Creb3 (NM_013497.1,434-452).
gtctccatagatctagata

SEQ ID NO: 457346 - DNA, 19 bp, Mus musculus
  siRNA target sequence for Creb3 (NM_013497.1,438-456).
ccatagatctagatactga

SEQ ID NO: 457347 - DNA, 19 bp, Mus musculus
  siRNA target sequence for Creb3 (NM_013497.1,512-530).
gcggaacaggagatgtcta

SEQ ID NO: 457348 - DNA, 19 bp, Mus musculus
  siRNA target sequence for Creb3 (NM_013497.1,635-653).
gtgcggaggaagattcgta

SEQ ID NO: 457349 - DNA, 19 bp, Mus musculus
  siRNA target sequence for Creb3 (NM_013497.1,781-799).
gaatctgtcccttctagat

SEQ ID NO: 457350 - DNA, 19 bp, Mus musculus
  siRNA target sequence for Creb3 (NM_013497.1,850-868).
cagcggcagcacttgtgtt

SEQ ID NO: 457351 - DNA, 19 bp, Mus musculus
  siRNA target sequence for Creb3 (NM_013497.1,899-917).
ctggtacccgctatgtact

SEQ ID NO: 457352 - DNA, 19 bp, Mus musculus
  siRNA target sequence for Creb3 (NM_013497.1,984-1002).
ccagcgaggacgatcatca

SEQ ID NO: 457353 - DNA, 19 bp, Mus musculus
  siRNA target sequence for Creb3 (NM_013497.1,1061-1079).
gacagctcagaacatatgt

SEQ ID NO: 457354 - DNA, 19 bp, Mus musculus
  siRNA target sequence for Creb3 (NM_013497.1,1221-1239).
gcgagggatggcaacctaa

SEQ ID NO: 457355 - DNA, 19 bp, Mus musculus
  siRNA target sequence for Creb3 (NM_013497.1,1245-1263).
gcccttctttggtcatctt

SEQ ID NO: 457356 - DNA, 19 bp, Mus musculus
  siRNA target sequence for Creb3l3 (NM_145365.2,575-593).
ggagcagaaagttctacta

SEQ ID NO: 457357 - DNA, 19 bp, Mus musculus
  siRNA target sequence for Creb3l3 (NM_145365.2,581-599).
gaaagttctactaaattct

SEQ ID NO: 457358 - DNA, 19 bp, Mus musculus
  siRNA target sequence for Creb3l3 (NM_145365.2,1109-1127).
gctgcctctcaccaagtat

SEQ ID NO: 457359 - DNA, 19 bp, Mus musculus
  siRNA target sequence for Creb3l3 (NM_145365.2,1430-1448).
ccctttcaactccaacaaa

SEQ ID NO: 457360 - DNA, 19 bp, Mus musculus
  siRNA target sequence for Creb3l3 (NM_145365.2,1469-1487).
cgtgccagtgcgagtgttt

SEQ ID NO: 457361 - DNA, 19 bp, Mus musculus
  siRNA target sequence for Creb3l3 (NM_145365.2,1470-1488).
gtgccagtgcgagtgtttt

SEQ ID NO: 457362 - DNA, 19 bp, Mus musculus
  siRNA target sequence for Creb3l3 (NM_145365.2,1831-1849).
gtctggtgcaagatgcatt

SEQ ID NO: 457363 - DNA, 19 bp, Mus musculus
  siRNA target sequence for Creb3l4 (NM_030080.1,238-256).
gaacccccagaagatatct

SEQ ID NO: 457364 - DNA, 19 bp, Mus musculus
  siRNA target sequence for Creb3l4 (NM_030080.1,335-353).
gtgaacctgacgatttcct

SEQ ID NO: 457365 - DNA, 19 bp, Mus musculus
  siRNA target sequence for Creb3l4 (NM_030080.1,367-385).
gatcccaatatgatacact

SEQ ID NO: 457366 - DNA, 19 bp, Mus musculus
  siRNA target sequence for Creb3l4 (NM_030080.1,467-485).
ccctctatgaggttgtcta

SEQ ID NO: 457367 - DNA, 19 bp, Mus musculus
  siRNA target sequence for Creb3l4 (NM_030080.1,468-486).
cctctatgaggttgtctat

SEQ ID NO: 457368 - DNA, 19 bp, Mus musculus
  siRNA target sequence for Creb3l4 (NM_030080.1,471-489).
ctatgaggttgtctatgat

SEQ ID NO: 457369 - DNA, 19 bp, Mus musculus
  siRNA target sequence for Creb3l4 (NM_030080.1,530-548).
ccttcggactcatctctat

SEQ ID NO: 457370 - DNA, 19 bp, Mus musculus
  siRNA target sequence for Creb3l4 (NM_030080.1,531-549).
cttcggactcatctctatt

SEQ ID NO: 457371 - DNA, 19 bp, Mus musculus
  siRNA target sequence for Creb3l4 (NM_030080.1,536-554).
gactcatctctattcagat

SEQ ID NO: 457372 - DNA, 19 bp, Mus musculus
  siRNA target sequence for Creb3l4 (NM_030080.1,540-558).
catctctattcagatagat

SEQ ID NO: 457373 - DNA, 19 bp, Mus musculus
  siRNA target sequence for Creb3l4 (NM_030080.1,611-629).
cctccgattcgcatagaca

SEQ ID NO: 457374 - DNA, 19 bp, Mus musculus
  siRNA target sequence for Creb3l4 (NM_030080.1,612-630).
ctccgattcgcatagacat

SEQ ID NO: 457375 - DNA, 19 bp, Mus musculus
  siRNA target sequence for Creb3l4 (NM_030080.1,614-632).
ccgattcgcatagacatat

SEQ ID NO: 457376 - DNA, 19 bp, Mus musculus
  siRNA target sequence for Creb3l4 (NM_030080.1,731-749).
cacaagaagggattactct

SEQ ID NO: 457377 - DNA, 19 bp, Mus musculus
  siRNA target sequence for Creb3l4 (NM_030080.1,846-864).
gcggaagaaagaatactta

SEQ ID NO: 457378 - DNA, 19 bp, Mus musculus
  siRNA target sequence for Creb3l4 (NM_030080.1,888-906).
ggcctgttcggaacagaat

SEQ ID NO: 457379 - DNA, 19 bp, Mus musculus
  siRNA target sequence for Creb3l4 (NM_030080.1,1083-1101).
ctttcagggtcaatcagaa

SEQ ID NO: 457380 - DNA, 19 bp, Mus musculus
  siRNA target sequence for Creb3l4 (NM_030080.1,1103-1121).
ctaggcccgaggattatca

SEQ ID NO: 457381 - DNA, 19 bp, Mus musculus
  siRNA target sequence for Creb3l4 (NM_030080.1,1154-1172).
ctcacgagaacgtaacaga

SEQ ID NO: 457382 - DNA, 19 bp, Mus musculus
  siRNA target sequence for Creb3l4 (NM_030080.1,1295-1313).
ggggaatggtgcatacaga

SEQ ID NO: 457383 - DNA, 19 bp, Mus musculus
  siRNA target sequence for Creb3l4 (NM_030080.1,1296-1314).
gggaatggtgcatacagat

SEQ ID NO: 457384 - DNA, 19 bp, Mus musculus
  siRNA target sequence for Creb5 (NM_172728.1,71-89).
gtcccaggctctctatcat

SEQ ID NO: 457385 - DNA, 19 bp, Mus musculus
  siRNA target sequence for Creb5 (NM_172728.1,73-91).
cccaggctctctatcatct

SEQ ID NO: 457386 - DNA, 19 bp, Mus musculus
  siRNA target sequence for Creb5 (NM_172728.1,171-189).
gatcttctgccgtcttgat

SEQ ID NO: 457387 - DNA, 19 bp, Mus musculus
  siRNA target sequence for Creb5 (NM_172728.1,271-289).
ccaagtccagccaatgcat

SEQ ID NO: 457388 - DNA, 19 bp, Mus musculus
  siRNA target sequence for Creb5 (NM_172728.1,272-290).
caagtccagccaatgcatt

SEQ ID NO: 457389 - DNA, 19 bp, Mus musculus
  siRNA target sequence for Creb5 (NM_172728.1,628-646).
ggtttcaccagctacacaa

SEQ ID NO: 457390 - DNA, 19 bp, Mus musculus
  siRNA target sequence for Creb5 (NM_172728.1,655-673).
gccaacccagacaatacaa

SEQ ID NO: 457391 - DNA, 19 bp, Mus musculus
  siRNA target sequence for Creb5 (NM_172728.1,725-743).
gatgagaggcggaggaaat

SEQ ID NO: 457392 - DNA, 19 bp, Mus musculus
  siRNA target sequence for Creb5 (NM_172728.1,800-818).
gtgatgtcactggaaaaga

SEQ ID NO: 457393 - DNA, 19 bp, Mus musculus
  siRNA target sequence for Creb5 (NM_172728.1,860-878).
gaagtgtccatgttgaaaa

SEQ ID NO: 457394 - DNA, 19 bp, Mus musculus
  siRNA target sequence for Creb5 (NM_172728.1,898-916).
gcagttgttgttaacacat

SEQ ID NO: 457395 - DNA, 19 bp, Mus musculus
  siRNA target sequence for Creb5 (NM_172728.1,899-917).
cagttgttgttaacacata

SEQ ID NO: 457396 - DNA, 19 bp, Mus musculus
  siRNA target sequence for Creb5 (NM_172728.1,901-919).
gttgttgttaacacataaa

SEQ ID NO: 457397 - DNA, 19 bp, Mus musculus
  siRNA target sequence for Creb5 (NM_172728.1,947-965).
gaatcccaagggtatttaa

SEQ ID NO: 457398 - DNA, 19 bp, Mus musculus
  siRNA target sequence for Creb5 (NM_172728.1,1005-1023).
gctctcagcagcaagttat

SEQ ID NO: 457399 - DNA, 19 bp, Mus musculus
  siRNA target sequence for Creb5 (NM_172728.1,1081-1099).
cctcagtcagcttacaact

SEQ ID NO: 457400 - DNA, 19 bp, Mus musculus
  siRNA target sequence for Crebl1 (NM_017406.2,123-141).
gacccgacgcgcttcttca

SEQ ID NO: 457401 - DNA, 19 bp, Mus musculus
  siRNA target sequence for Crebl1 (NM_017406.2,498-516).
ccagcatccccctttgaaa

SEQ ID NO: 457402 - DNA, 19 bp, Mus musculus
  siRNA target sequence for Crebl1 (NM_017406.2,638-656).
cagtcagccttttatagga

SEQ ID NO: 457403 - DNA, 19 bp, Mus musculus
  siRNA target sequence for Crebl1 (NM_017406.2,755-773).
gggtccatcccctgatagt

SEQ ID NO: 457404 - DNA, 19 bp, Mus musculus
  siRNA target sequence for Crebl1 (NM_017406.2,756-774).
ggtccatcccctgatagtt

SEQ ID NO: 457405 - DNA, 19 bp, Mus musculus
  siRNA target sequence for Crebl1 (NM_017406.2,1033-1051).
cgcctgaagtggatgcaaa

SEQ ID NO: 457406 - DNA, 19 bp, Mus musculus
  siRNA target sequence for Crebl1 (NM_017406.2,1062-1080).
cggcagcagcggatgatca

SEQ ID NO: 457407 - DNA, 19 bp, Mus musculus
  siRNA target sequence for Crebl1 (NM_017406.2,1652-1670).
gagaggtcgacggaagata

SEQ ID NO: 457408 - DNA, 19 bp, Mus musculus
  siRNA target sequence for Crebl1 (NM_017406.2,1807-1825).
gctcgcagccggagtttct

SEQ ID NO: 457409 - DNA, 19 bp, Mus musculus
  siRNA target sequence for Crebl1 (NM_017406.2,1808-1826).
ctcgcagccggagtttcta

SEQ ID NO: 457410 - DNA, 19 bp, Mus musculus
  siRNA target sequence for Crebl1 (NM_017406.2,1810-1828).
cgcagccggagtttctaga

SEQ ID NO: 457411 - DNA, 19 bp, Mus musculus
  siRNA target sequence for Crebl1 (NM_017406.2,1841-1859).
gagggaggataccttctat

SEQ ID NO: 457412 - DNA, 19 bp, Mus musculus
  siRNA target sequence for Crebl1 (NM_017406.2,1843-1861).
gggaggataccttctatgt

SEQ ID NO: 457413 - DNA, 19 bp, Mus musculus
  siRNA target sequence for Crebl1 (NM_017406.2,1844-1862).
ggaggataccttctatgtt

SEQ ID NO: 457414 - DNA, 19 bp, Mus musculus
  siRNA target sequence for Crebl1 (NM_017406.2,1894-1912).
cagccatcagccacaacaa

SEQ ID NO: 457415 - DNA, 19 bp, Mus musculus
  siRNA target sequence for Crry (NM_013499.1,939-957).
gggatactgaggacctatt

SEQ ID NO: 457416 - DNA, 19 bp, Mus musculus
  siRNA target sequence for Csda (NM_011733.1,290-308).
cgtcagaaatggatatgga

SEQ ID NO: 457417 - DNA, 19 bp, Mus musculus
  siRNA target sequence for Csda (NM_011733.1,317-335).
ccgaaatgacaccaaagaa

SEQ ID NO: 457418 - DNA, 19 bp, Mus musculus
  siRNA target sequence for Csda (NM_011733.1,355-373).
cggccatcaagaaaaacaa

SEQ ID NO: 457419 - DNA, 19 bp, Mus musculus
  siRNA target sequence for Csda (NM_011733.1,398-416).
gggggatggagaaactgta

SEQ ID NO: 457420 - DNA, 19 bp, Mus musculus
  siRNA target sequence for Csda (NM_011733.1,560-578).
ccgtaatgctggtgagatt

SEQ ID NO: 457421 - DNA, 19 bp, Mus musculus
  siRNA target sequence for Csda (NM_011733.1,716-734).
ccagcaagcggctaatggt

SEQ ID NO: 457422 - DNA, 19 bp, Mus musculus
  siRNA target sequence for Csda (NM_011733.1,764-782).
ccgacgtccctacaactat

SEQ ID NO: 457423 - DNA, 19 bp, Mus musculus
  siRNA target sequence for Csda (NM_011733.1,765-783).
cgacgtccctacaactata

SEQ ID NO: 457424 - DNA, 19 bp, Mus musculus
  siRNA target sequence for Csda (NM_139117.1,596-614).
cggcagcagtgaaggattt

SEQ ID NO: 457425 - DNA, 19 bp, Mus musculus
  siRNA target sequence for Cspg4 (NM_139001.1,91-109).
gccttgttggtcagatcta

SEQ ID NO: 457426 - DNA, 19 bp, Mus musculus
  siRNA target sequence for Cspg4 (NM_139001.1,403-421).
gttgacggagtgttgaaca

SEQ ID NO: 457427 - DNA, 19 bp, Mus musculus
  siRNA target sequence for Cspg4 (NM_139001.1,581-599).
cgctgacctccgatgttca

SEQ ID NO: 457428 - DNA, 19 bp, Mus musculus
  siRNA target sequence for Cspg4 (NM_139001.1,582-600).
gctgacctccgatgttcat

SEQ ID NO: 457429 - DNA, 19 bp, Mus musculus
  siRNA target sequence for Cspg4 (NM_139001.1,585-603).
gacctccgatgttcatgaa

SEQ ID NO: 457430 - DNA, 19 bp, Mus musculus
  siRNA target sequence for Cspg4 (NM_139001.1,765-783).
ggacaagcgtggcaacttt

SEQ ID NO: 457431 - DNA, 19 bp, Mus musculus
  siRNA target sequence for Cspg4 (NM_139001.1,766-784).
gacaagcgtggcaacttta

SEQ ID NO: 457432 - DNA, 19 bp, Mus musculus
  siRNA target sequence for Cspg4 (NM_139001.1,888-906).
cgaggtcagcgtacacata

SEQ ID NO: 457433 - DNA, 19 bp, Mus musculus
  siRNA target sequence for Cspg4 (NM_139001.1,891-909).
ggtcagcgtacacatagat

SEQ ID NO: 457434 - DNA, 19 bp, Mus musculus
  siRNA target sequence for Cspg4 (NM_139001.1,894-912).
cagcgtacacatagatgtt

SEQ ID NO: 457435 - DNA, 19 bp, Mus musculus
  siRNA target sequence for Cspg4 (NM_139001.1,896-914).
gcgtacacatagatgttca

SEQ ID NO: 457436 - DNA, 19 bp, Mus musculus
  siRNA target sequence for Cspg4 (NM_139001.1,910-928).
gttcaccggctggaaatct

SEQ ID NO: 457437 - DNA, 19 bp, Mus musculus
  siRNA target sequence for Cspg4 (NM_139001.1,1086-1104).
ggtaggctgcatagaagat

SEQ ID NO: 457438 - DNA, 19 bp, Mus musculus
  siRNA target sequence for Cspg4 (NM_139001.1,1203-1221).
ggtctatggcccatatgaa

SEQ ID NO: 457439 - DNA, 19 bp, Mus musculus
  siRNA target sequence for Cspg4 (NM_139001.1,1206-1224).
ctatggcccatatgaaact

SEQ ID NO: 457440 - DNA, 19 bp, Mus musculus
  siRNA target sequence for Cspg4 (NM_139001.1,1493-1511).
gagcccaaacccggaaaat

SEQ ID NO: 457441 - DNA, 19 bp, Mus musculus
  siRNA target sequence for Cspg4 (NM_139001.1,1632-1650).
cctgcggaggggccaaatt

SEQ ID NO: 457442 - DNA, 19 bp, Mus musculus
  siRNA target sequence for Cspg4 (NM_139001.1,1633-1651).
ctgcggaggggccaaattt

SEQ ID NO: 457443 - DNA, 19 bp, Mus musculus
  siRNA target sequence for Cspg4 (NM_139001.1,1637-1655).
ggaggggccaaatttacat

SEQ ID NO: 457444 - DNA, 19 bp, Mus musculus
  siRNA target sequence for Cspg4 (NM_139001.1,1684-1702).
gatccacctcgcatcatct

SEQ ID NO: 457445 - DNA, 19 bp, Mus musculus
  siRNA target sequence for Cspg4 (NM_139001.1,1899-1917).
ggtgggcgacatagtctat

SEQ ID NO: 457446 - DNA, 19 bp, Mus musculus
  siRNA target sequence for Cspg4 (NM_139001.1,2008-2026).
gtccggccagccatacaga

SEQ ID NO: 457447 - DNA, 19 bp, Mus musculus
  siRNA target sequence for Cspg4 (NM_139001.1,2140-2158).
gtcactggtaccttgcaat

SEQ ID NO: 457448 - DNA, 19 bp, Mus musculus
  siRNA target sequence for Cspg4 (NM_139001.1,2339-2357).
cactgagcaatctgtcttt

SEQ ID NO: 457449 - DNA, 19 bp, Mus musculus
  siRNA target sequence for Cspg4 (NM_139001.1,2498-2516).
ctcataccttccactatga

SEQ ID NO: 457450 - DNA, 19 bp, Mus musculus
  siRNA target sequence for Cspg4 (NM_139001.1,2500-2518).
cataccttccactatgagt

SEQ ID NO: 457451 - DNA, 19 bp, Mus musculus
  siRNA target sequence for Cspg4 (NM_139001.1,2831-2849).
gcgccagctatctctatga

SEQ ID NO: 457452 - DNA, 19 bp, Mus musculus
  siRNA target sequence for Cspg4 (NM_139001.1,3097-3115).
gcccctgtgcagaccatta

SEQ ID NO: 457453 - DNA, 19 bp, Mus musculus
  siRNA target sequence for Cspg4 (NM_139001.1,3153-3171).
gctgactacagatgatgta

SEQ ID NO: 457454 - DNA, 19 bp, Mus musculus
  siRNA target sequence for Cspg4 (NM_139001.1,3174-3192).
cttcagcgatgctgattca

SEQ ID NO: 457455 - DNA, 19 bp, Mus musculus
  siRNA target sequence for Cspg4 (NM_139001.1,3424-3442).
cttcacgtagccaatagtt

SEQ ID NO: 457456 - DNA, 19 bp, Mus musculus
  siRNA target sequence for Cspg4 (NM_139001.1,3427-3445).
cacgtagccaatagttcta

SEQ ID NO: 457457 - DNA, 19 bp, Mus musculus
  siRNA target sequence for Cspg4 (NM_139001.1,3429-3447).
cgtagccaatagttctagt

SEQ ID NO: 457458 - DNA, 19 bp, Mus musculus
  siRNA target sequence for Cspg4 (NM_139001.1,3710-3728).
ctaacaccttcctacaagt

SEQ ID NO: 457459 - DNA, 19 bp, Mus musculus
  siRNA target sequence for Cspg4 (NM_139001.1,3766-3784).
ctggtgcagcacaaaaaga

SEQ ID NO: 457460 - DNA, 19 bp, Mus musculus
  siRNA target sequence for Cspg4 (NM_139001.1,3769-3787).
gtgcagcacaaaaagatct

SEQ ID NO: 457461 - DNA, 19 bp, Mus musculus
  siRNA target sequence for Cspg4 (NM_139001.1,3853-3871).
ctgcctgccgacatcatgt

SEQ ID NO: 457462 - DNA, 19 bp, Mus musculus
  siRNA target sequence for Cspg4 (NM_139001.1,3856-3874).
cctgccgacatcatgttct

SEQ ID NO: 457463 - DNA, 19 bp, Mus musculus
  siRNA target sequence for Cspg4 (NM_139001.1,4018-4036).
cctggagcctggagtgatt

SEQ ID NO: 457464 - DNA, 19 bp, Mus musculus
  siRNA target sequence for Cspg4 (NM_139001.1,4062-4080).
cctgggtgatcctcttgaa

SEQ ID NO: 457465 - DNA, 19 bp, Mus musculus
  siRNA target sequence for Cspg4 (NM_139001.1,4116-4134).
catccccctggatgttcaa

SEQ ID NO: 457466 - DNA, 19 bp, Mus musculus
  siRNA target sequence for Cspg4 (NM_139001.1,4261-4279).
ctgcagaaggaggatcatt

SEQ ID NO: 457467 - DNA, 19 bp, Mus musculus
  siRNA target sequence for Cspg4 (NM_139001.1,4266-4284).
gaaggaggatcattctcaa

SEQ ID NO: 457468 - DNA, 19 bp, Mus musculus
  siRNA target sequence for Cspg4 (NM_139001.1,4269-4287).
ggaggatcattctcaagat

SEQ ID NO: 457469 - DNA, 19 bp, Mus musculus
  siRNA target sequence for Cspg4 (NM_139001.1,4533-4551).
cctcaggggaacagacaat

SEQ ID NO: 457470 - DNA, 19 bp, Mus musculus
  siRNA target sequence for Cspg4 (NM_139001.1,5118-5136).
cgtgatggtgtctttcgat

SEQ ID NO: 457471 - DNA, 19 bp, Mus musculus
  siRNA target sequence for Cspg4 (NM_139001.1,5159-5177).
gccgtctctggaagaacaa

SEQ ID NO: 457472 - DNA, 19 bp, Mus musculus
  siRNA target sequence for Cspg4 (NM_139001.1,5268-5286).
gcgcagtcggcatgatgta

SEQ ID NO: 457473 - DNA, 19 bp, Mus musculus
  siRNA target sequence for Cspg4 (NM_139001.1,5270-5288).
gcagtcggcatgatgtact

SEQ ID NO: 457474 - DNA, 19 bp, Mus musculus
  siRNA target sequence for Cspg4 (NM_139001.1,5273-5291).
gtcggcatgatgtactctt

SEQ ID NO: 457475 - DNA, 19 bp, Mus musculus
  siRNA target sequence for Cspg4 (NM_139001.1,5360-5378).
cctacttcctgcaatctga

SEQ ID NO: 457476 - DNA, 19 bp, Mus musculus
  siRNA target sequence for Cspg4 (NM_139001.1,5635-5653).
gctccaggggaaattgaat

SEQ ID NO: 457477 - DNA, 19 bp, Mus musculus
  siRNA target sequence for Cspg4 (NM_139001.1,5636-5654).
ctccaggggaaattgaata

SEQ ID NO: 457478 - DNA, 19 bp, Mus musculus
  siRNA target sequence for Cspg4 (NM_139001.1,6098-6116).
cttcctctcaggatcactt

SEQ ID NO: 457479 - DNA, 19 bp, Mus musculus
  siRNA target sequence for Cspg4 (NM_139001.1,6101-6119).
cctctcaggatcacttcaa

SEQ ID NO: 457480 - DNA, 19 bp, Mus musculus
  siRNA target sequence for Cspg4 (NM_139001.1,6102-6120).
ctctcaggatcacttcaaa

SEQ ID NO: 457481 - DNA, 19 bp, Mus musculus
  siRNA target sequence for Cspg4 (NM_139001.1,6104-6122).
ctcaggatcacttcaaagt

SEQ ID NO: 457482 - DNA, 19 bp, Mus musculus
  siRNA target sequence for Cspg4 (NM_139001.1,6108-6126).
ggatcacttcaaagttgta

SEQ ID NO: 457483 - DNA, 19 bp, Mus musculus
  siRNA target sequence for Cspg4 (NM_139001.1,6147-6165).
cgcatcagccaccgtaaat

SEQ ID NO: 457484 - DNA, 19 bp, Mus musculus
  siRNA target sequence for Cspg4 (NM_139001.1,6149-6167).
catcagccaccgtaaatgt

SEQ ID NO: 457485 - DNA, 19 bp, Mus musculus
  siRNA target sequence for Cspg4 (NM_139001.1,6356-6374).
ctaggagcaaccaacttgt

SEQ ID NO: 457486 - DNA, 19 bp, Mus musculus
  siRNA target sequence for Cspg4 (NM_139001.1,6458-6476).
caggtgacagacttactct

SEQ ID NO: 457487 - DNA, 19 bp, Mus musculus
  siRNA target sequence for Cspg4 (NM_139001.1,6585-6603).
ggctgttcgtacagaaaca

SEQ ID NO: 457488 - DNA, 19 bp, Mus musculus
  siRNA target sequence for Cspg4 (NM_139001.1,6781-6799).
ctccgcaaacgcaacaaga

SEQ ID NO: 457489 - DNA, 19 bp, Mus musculus
  siRNA target sequence for Cspg4 (NM_139001.1,6856-6874).
gacacagagacctttcgaa

SEQ ID NO: 457490 - DNA, 19 bp, Mus musculus
  siRNA target sequence for Cspg4 (NM_139001.1,6893-6911).
ctattccactcataactgt

SEQ ID NO: 457491 - DNA, 19 bp, Mus musculus
  siRNA target sequence for Cspg4 (NM_139001.1,6940-6958).
cagcctgacccagaactat

SEQ ID NO: 457492 - DNA, 19 bp, Mus musculus
  siRNA target sequence for Cspg4 (NM_139001.1,6944-6962).
ctgacccagaactattgca

SEQ ID NO: 457493 - DNA, 19 bp, Mus musculus
  siRNA target sequence for Cspg4 (NM_139001.1,6949-6967).
ccagaactattgcagtttt

SEQ ID NO: 457494 - DNA, 19 bp, Mus musculus
  siRNA target sequence for Ctcf (NM_007794.1,476-494).
gtgtacagatggtaatgat

SEQ ID NO: 457495 - DNA, 19 bp, Mus musculus
  siRNA target sequence for Ctcf (NM_007794.1,596-614).
ccttgcaggttgtaaatat

SEQ ID NO: 457496 - DNA, 19 bp, Mus musculus
  siRNA target sequence for Ctcf (NM_007794.1,618-636).
ggaacagcccattaacata

SEQ ID NO: 457497 - DNA, 19 bp, Mus musculus
  siRNA target sequence for Ctcf (NM_007794.1,676-694).
gtacctgttgctactactt

SEQ ID NO: 457498 - DNA, 19 bp, Mus musculus
  siRNA target sequence for Ctcf (NM_007794.1,692-710).
cttcagtagaagaacttca

SEQ ID NO: 457499 - DNA, 19 bp, Mus musculus
  siRNA target sequence for Ctcf (NM_007794.1,711-729).
gggggcttatgagaatgaa

SEQ ID NO: 457500 - DNA, 19 bp, Mus musculus
  siRNA target sequence for Ctcf (NM_007794.1,751-769).
gaaagtgaaccgatgatat

SEQ ID NO: 457501 - DNA, 19 bp, Mus musculus
  siRNA target sequence for Ctcf (NM_007794.1,755-773).
gtgaaccgatgatatgtca

SEQ ID NO: 457502 - DNA, 19 bp, Mus musculus
  siRNA target sequence for Ctcf (NM_007794.1,879-897).
gcaaaaagacccagactat

SEQ ID NO: 457503 - DNA, 19 bp, Mus musculus
  siRNA target sequence for Ctcf (NM_007794.1,933-951).
gagcaaacttcgttacaca

SEQ ID NO: 457504 - DNA, 19 bp, Mus musculus
  siRNA target sequence for Ctcf (NM_007794.1,1031-1049).
cagagaaagtagttggtaa

SEQ ID NO: 457505 - DNA, 19 bp, Mus musculus
  siRNA target sequence for Ctcf (NM_007794.1,1033-1051).
gagaaagtagttggtaata

SEQ ID NO: 457506 - DNA, 19 bp, Mus musculus
  siRNA target sequence for Ctcf (NM_007794.1,1111-1129).
gagctttgcagttacacat

SEQ ID NO: 457507 - DNA, 19 bp, Mus musculus
  siRNA target sequence for Ctcf (NM_007794.1,1224-1242).
gaccctcctgaggaatcat

SEQ ID NO: 457508 - DNA, 19 bp, Mus musculus
  siRNA target sequence for Ctcf (NM_007794.1,1317-1335).
ggtgcggcatcgtcgttat

SEQ ID NO: 457509 - DNA, 19 bp, Mus musculus
  siRNA target sequence for Ctcf (NM_007794.1,1318-1336).
gtgcggcatcgtcgttata

SEQ ID NO: 457510 - DNA, 19 bp, Mus musculus
  siRNA target sequence for Ctcf (NM_007794.1,1320-1338).
gcggcatcgtcgttataaa

SEQ ID NO: 457511 - DNA, 19 bp, Mus musculus
  siRNA target sequence for Ctcf (NM_007794.1,1322-1340).
ggcatcgtcgttataaaca

SEQ ID NO: 457512 - DNA, 19 bp, Mus musculus
  siRNA target sequence for Ctcf (NM_007794.1,1324-1342).
catcgtcgttataaacaca

SEQ ID NO: 457513 - DNA, 19 bp, Mus musculus
  siRNA target sequence for Ctcf (NM_007794.1,1408-1426).
cgacacattcgctctcata

SEQ ID NO: 457514 - DNA, 19 bp, Mus musculus
  siRNA target sequence for Ctcf (NM_007794.1,1438-1456).
ccgttccagtgcagtttgt

SEQ ID NO: 457515 - DNA, 19 bp, Mus musculus
  siRNA target sequence for Ctcf (NM_007794.1,1474-1492).
gacacatacaagctgaaaa

SEQ ID NO: 457516 - DNA, 19 bp, Mus musculus
  siRNA target sequence for Ctcf (NM_007794.1,1641-1659).
catagcccgaaaaagtgat

SEQ ID NO: 457517 - DNA, 19 bp, Mus musculus
  siRNA target sequence for Ctcf (NM_007794.1,1674-1692).
gcgaaagcagcattcctat

SEQ ID NO: 457518 - DNA, 19 bp, Mus musculus
  siRNA target sequence for Ctcf (NM_007794.1,1675-1693).
cgaaagcagcattcctata

SEQ ID NO: 457519 - DNA, 19 bp, Mus musculus
  siRNA target sequence for Ctcf (NM_007794.1,1680-1698).
gcagcattcctatattgaa

SEQ ID NO: 457520 - DNA, 19 bp, Mus musculus
  siRNA target sequence for Ctcf (NM_007794.1,1731-1749).
gtttcatgagcgatatgct

SEQ ID NO: 457521 - DNA, 19 bp, Mus musculus
  siRNA target sequence for Ctcf (NM_007794.1,1750-1768).
ctcatccagcatcaaaaat

SEQ ID NO: 457522 - DNA, 19 bp, Mus musculus
  siRNA target sequence for Ctcf (NM_007794.1,1752-1770).
catccagcatcaaaaatca

SEQ ID NO: 457523 - DNA, 19 bp, Mus musculus
  siRNA target sequence for Ctcf (NM_007794.1,1798-1816).
gaccagtgtgattatgctt

SEQ ID NO: 457524 - DNA, 19 bp, Mus musculus
  siRNA target sequence for Ctcf (NM_007794.1,1820-1838).
gacaggagcggcacatgat

SEQ ID NO: 457525 - DNA, 19 bp, Mus musculus
  siRNA target sequence for Ctcf (NM_007794.1,1822-1840).
caggagcggcacatgatca

SEQ ID NO: 457526 - DNA, 19 bp, Mus musculus
  siRNA target sequence for Ctcf (NM_007794.1,1926-1944).
gcatttcaagcgctatcat

SEQ ID NO: 457527 - DNA, 19 bp, Mus musculus
  siRNA target sequence for Ctcf (NM_007794.1,2017-2035).
gcaagacatgcagataact

SEQ ID NO: 457528 - DNA, 19 bp, Mus musculus
  siRNA target sequence for Ctcf (NM_007794.1,2109-2127).
gatgcgatctaaaaaagaa

SEQ ID NO: 457529 - DNA, 19 bp, Mus musculus
  siRNA target sequence for Ctcf (NM_007794.1,2347-2365).
caggtcgaagatcagaata

SEQ ID NO: 457530 - DNA, 19 bp, Mus musculus
  siRNA target sequence for Ctcf (NM_007794.1,2368-2386).
ggtgcaattgagaacatta

SEQ ID NO: 457531 - DNA, 19 bp, Mus musculus
  siRNA target sequence for Ctcf (NM_007794.1,2369-2387).
gtgcaattgagaacattat

SEQ ID NO: 457532 - DNA, 19 bp, Mus musculus
  siRNA target sequence for Ctcf (NM_181322.2,1018-1036).
gcctccgaagccaacaaaa

SEQ ID NO: 457533 - DNA, 19 bp, Mus musculus
  siRNA target sequence for Ctcf (NM_181322.2,1019-1037).
cctccgaagccaacaaaaa

SEQ ID NO: 457534 - DNA, 19 bp, Mus musculus
  siRNA target sequence for Ctcf (NM_181322.2,1020-1038).
ctccgaagccaacaaaaat

SEQ ID NO: 457535 - DNA, 19 bp, Mus musculus
  siRNA target sequence for Ctcf (NM_181322.2,2334-2352).
caattgagaacattatagt

SEQ ID NO: 457536 - DNA, 19 bp, Mus musculus
  siRNA target sequence for Cyp2c70 (NM_145499.1,108-126).
cactcctttaccaattgtt

SEQ ID NO: 457537 - DNA, 19 bp, Mus musculus
  siRNA target sequence for Cyp2c70 (NM_145499.1,172-190).
ggcatgctagcaaaaaagt

SEQ ID NO: 457538 - DNA, 19 bp, Mus musculus
  siRNA target sequence for Cyp2c70 (NM_145499.1,173-191).
gcatgctagcaaaaaagta

SEQ ID NO: 457539 - DNA, 19 bp, Mus musculus
  siRNA target sequence for Cyp2c70 (NM_145499.1,234-252).
ggtgctgcatggatacaaa

SEQ ID NO: 457540 - DNA, 19 bp, Mus musculus
  siRNA target sequence for Cyp2c70 (NM_145499.1,238-256).
ctgcatggatacaaagcaa

SEQ ID NO: 457541 - DNA, 19 bp, Mus musculus
  siRNA target sequence for Cyp2c70 (NM_145499.1,276-294).
ccagggagatgagttttct

SEQ ID NO: 457542 - DNA, 19 bp, Mus musculus
  siRNA target sequence for Cyp2c70 (NM_145499.1,283-301).
gatgagttttctgataaaa

SEQ ID NO: 457543 - DNA, 19 bp, Mus musculus
  siRNA target sequence for Cyp2c70 (NM_145499.1,428-446).
ctattgaagaccgaattca

SEQ ID NO: 457544 - DNA, 19 bp, Mus musculus
  siRNA target sequence for Cyp2c70 (NM_145499.1,445-463).
caggaggaaatcctttata

SEQ ID NO: 457545 - DNA, 19 bp, Mus musculus
  siRNA target sequence for Cyp2c70 (NM_145499.1,561-579).
gcatcgatttgactacaat

SEQ ID NO: 457546 - DNA, 19 bp, Mus musculus
  siRNA target sequence for Cyp2c70 (NM_145499.1,597-615).
cttcatggagaattttcat

SEQ ID NO: 457547 - DNA, 19 bp, Mus musculus
  siRNA target sequence for Cyp2c70 (NM_145499.1,600-618).
catggagaattttcataga

SEQ ID NO: 457548 - DNA, 19 bp, Mus musculus
  siRNA target sequence for Cyp2c70 (NM_145499.1,661-679).
gcctaccctattttatact

SEQ ID NO: 457549 - DNA, 19 bp, Mus musculus
  siRNA target sequence for Cyp2c70 (NM_145499.1,662-680).
cctaccctattttatacta

SEQ ID NO: 457550 - DNA, 19 bp, Mus musculus
  siRNA target sequence for Cyp2c70 (NM_145499.1,689-707).
gaatccataacagattctt

SEQ ID NO: 457551 - DNA, 19 bp, Mus musculus
  siRNA target sequence for Cyp2c70 (NM_145499.1,715-733).
gtgactcaacagaaaaagt

SEQ ID NO: 457552 - DNA, 19 bp, Mus musculus
  siRNA target sequence for Cyp2c70 (NM_145499.1,745-763).
gaaataaacaggcatcaaa

SEQ ID NO: 457553 - DNA, 19 bp, Mus musculus
  siRNA target sequence for Cyp2c70 (NM_145499.1,799-817).
gactacttcttgattaaaa

SEQ ID NO: 457554 - DNA, 19 bp, Mus musculus
  siRNA target sequence for Cyp2c70 (NM_145499.1,845-863).
ctgaatttactatggataa

SEQ ID NO: 457555 - DNA, 19 bp, Mus musculus
  siRNA target sequence for Cyp2c70 (NM_145499.1,876-894).
cataggtgatctttttgga

SEQ ID NO: 457556 - DNA, 19 bp, Mus musculus
  siRNA target sequence for Cyp2c70 (NM_145499.1,1345-1363).
ctaatcctgaccaacatct

SEQ ID NO: 457557 - DNA, 19 bp, Mus musculus
  siRNA target sequence for Cyp2c70 (NM_145499.1,1355-1373).
ccaacatcttacagcattt

SEQ ID NO: 457558 - DNA, 19 bp, Mus musculus
  siRNA target sequence for D030022P06Rik (NM_178800.1,233-251).
gccacaagaacttgttaga

SEQ ID NO: 457559 - DNA, 19 bp, Mus musculus
  siRNA target sequence for D030022P06Rik (NM_178800.1,394-412).
gtcccaaagtgcttcgaaa

SEQ ID NO: 457560 - DNA, 19 bp, Mus musculus
  siRNA target sequence for D030022P06Rik (NM_178800.1,416-434).
gccaggaaggctagtaact

SEQ ID NO: 457561 - DNA, 19 bp, Mus musculus
  siRNA target sequence for D030022P06Rik (NM_178800.1,532-550).
gcccatcgatccacagtat

SEQ ID NO: 457562 - DNA, 19 bp, Mus musculus
  siRNA target sequence for D030022P06Rik (NM_178800.1,534-552).
ccatcgatccacagtatgt

SEQ ID NO: 457563 - DNA, 19 bp, Mus musculus
  siRNA target sequence for D030022P06Rik (NM_178800.1,627-645).
caatccaccttcatagctt

SEQ ID NO: 457564 - DNA, 19 bp, Mus musculus
  siRNA target sequence for D030022P06Rik (NM_178800.1,638-656).
catagcttgtcgtcacaat

SEQ ID NO: 457565 - DNA, 19 bp, Mus musculus
  siRNA target sequence for D030022P06Rik (NM_178800.1,643-661).
cttgtcgtcacaatgaact

SEQ ID NO: 457566 - DNA, 19 bp, Mus musculus
  siRNA target sequence for D030022P06Rik (NM_178800.1,716-734).
cactccacctgctgtgaaa

SEQ ID NO: 457567 - DNA, 19 bp, Mus musculus
  siRNA target sequence for D030022P06Rik (NM_178800.1,781-799).
ctgggagaggggtagatga

SEQ ID NO: 457568 - DNA, 19 bp, Mus musculus
  siRNA target sequence for D030022P06Rik (NM_178800.1,853-871).
gccctgaaacagtaactgt

SEQ ID NO: 457569 - DNA, 19 bp, Mus musculus
  siRNA target sequence for D030022P06Rik (NM_178800.1,884-902).
cctcaggccccaatttgtt

SEQ ID NO: 457570 - DNA, 19 bp, Mus musculus
  siRNA target sequence for D030022P06Rik (NM_178800.1,942-960).
ccagaacccaccatcctat

SEQ ID NO: 457571 - DNA, 19 bp, Mus musculus
  siRNA target sequence for D030022P06Rik (NM_178800.1,957-975).
ctatcgcctgtggagaaaa

SEQ ID NO: 457572 - DNA, 19 bp, Mus musculus
  siRNA target sequence for D030022P06Rik (NM_178800.1,984-1002).
gggcgtccccctaaagcaa

SEQ ID NO: 457573 - DNA, 19 bp, Mus musculus
  siRNA target sequence for D030022P06Rik (NM_178800.1,1033-1051).
ctccaggaggcggcaattt

SEQ ID NO: 457574 - DNA, 19 bp, Mus musculus
  siRNA target sequence for D030022P06Rik (NM_178800.1,1036-1054).
caggaggcggcaatttaga

SEQ ID NO: 457575 - DNA, 19 bp, Mus musculus
  siRNA target sequence for D030022P06Rik (NM_178800.1,1038-1056).
ggaggcggcaatttagaga

SEQ ID NO: 457576 - DNA, 19 bp, Mus musculus
  siRNA target sequence for D030022P06Rik (NM_178800.1,1131-1149).
gtcactactgtcaccattt

SEQ ID NO: 457577 - DNA, 19 bp, Mus musculus
  siRNA target sequence for D030022P06Rik (NM_178800.1,1232-1250).
ccccgacagctcttctatt

SEQ ID NO: 457578 - DNA, 19 bp, Mus musculus
  siRNA target sequence for D030022P06Rik (NM_178800.1,1234-1252).
ccgacagctcttctattct

SEQ ID NO: 457579 - DNA, 19 bp, Mus musculus
  siRNA target sequence for D030022P06Rik (NM_178800.1,1235-1253).
cgacagctcttctattctt

SEQ ID NO: 457580 - DNA, 19 bp, Mus musculus
  siRNA target sequence for D030022P06Rik (NM_178800.1,1379-1397).
gatgcggggacgaaagagt

SEQ ID NO: 457581 - DNA, 19 bp, Mus musculus
  siRNA target sequence for D030022P06Rik (NM_178800.1,1433-1451).
cctggatttagcagatagt

SEQ ID NO: 457582 - DNA, 19 bp, Mus musculus
  siRNA target sequence for D030022P06Rik (NM_178800.1,1533-1551).
ctagtccccccactagaaa

SEQ ID NO: 457583 - DNA, 19 bp, Mus musculus
  siRNA target sequence for D030022P06Rik (NM_178800.1,1766-1784).
gcgtatcctgcgtagtagt

SEQ ID NO: 457584 - DNA, 19 bp, Mus musculus
  siRNA target sequence for D030022P06Rik (NM_178800.1,1785-1803).
gctcctccccacctatgta

SEQ ID NO: 457585 - DNA, 19 bp, Mus musculus
  siRNA target sequence for D030022P06Rik (NM_178800.1,1796-1814).
cctatgtatccctactatt

SEQ ID NO: 457586 - DNA, 19 bp, Mus musculus
  siRNA target sequence for D030022P06Rik (NM_178800.1,1801-1819).
gtatccctactattagtca

SEQ ID NO: 457587 - DNA, 19 bp, Mus musculus
  siRNA target sequence for D12Wsu95e (NM_198023.1,159-177).
ggcaaggcgcagtcaagaa

SEQ ID NO: 457588 - DNA, 19 bp, Mus musculus
  siRNA target sequence for D12Wsu95e (NM_198023.1,170-188).
gtcaagaacgagacaatct

SEQ ID NO: 457589 - DNA, 19 bp, Mus musculus
  siRNA target sequence for D12Wsu95e (NM_198023.1,209-227).
ctaatcagagtctttctga

SEQ ID NO: 457590 - DNA, 19 bp, Mus musculus
  siRNA target sequence for D12Wsu95e (NM_198023.1,230-248).
caaaactggacgagtacat

SEQ ID NO: 457591 - DNA, 19 bp, Mus musculus
  siRNA target sequence for D12Wsu95e (NM_198023.1,300-318).
gctcttttggcataagcat

SEQ ID NO: 457592 - DNA, 19 bp, Mus musculus
  siRNA target sequence for D12Wsu95e (NM_198023.1,301-319).
ctcttttggcataagcata

SEQ ID NO: 457593 - DNA, 19 bp, Mus musculus
  siRNA target sequence for D12Wsu95e (NM_198023.1,422-440).
ggaaaacttttcataggat

SEQ ID NO: 457594 - DNA, 19 bp, Mus musculus
  siRNA target sequence for D12Wsu95e (NM_198023.1,454-472).
cctgataaatccatagcaa

SEQ ID NO: 457595 - DNA, 19 bp, Mus musculus
  siRNA target sequence for D12Wsu95e (NM_198023.1,533-551).
gccatgctcggaaacagaa

SEQ ID NO: 457596 - DNA, 19 bp, Mus musculus
  siRNA target sequence for D12Wsu95e (NM_198023.1,596-614).
gcagtaatcccgttgacat

SEQ ID NO: 457597 - DNA, 19 bp, Mus musculus
  siRNA target sequence for D12Wsu95e (NM_198023.1,693-711).
cagcacacaagctaaaaat

SEQ ID NO: 457598 - DNA, 19 bp, Mus musculus
  siRNA target sequence for D12Wsu95e (NM_198023.1,728-746).
ctccgaaaggcatgtttct

SEQ ID NO: 457599 - DNA, 19 bp, Mus musculus
  siRNA target sequence for D12Wsu95e (NM_198023.1,730-748).
ccgaaaggcatgtttcttt

SEQ ID NO: 457600 - DNA, 19 bp, Mus musculus
  siRNA target sequence for D12Wsu95e (NM_198023.1,828-846).
ctccatcaaacgacagatt

SEQ ID NO: 457601 - DNA, 19 bp, Mus musculus
  siRNA target sequence for D12Wsu95e (NM_198023.1,861-879).
gacgaacagtgctcttaaa

SEQ ID NO: 457602 - DNA, 19 bp, Mus musculus
  siRNA target sequence for D12Wsu95e (NM_198023.1,863-881).
cgaacagtgctcttaaaga

SEQ ID NO: 457603 - DNA, 19 bp, Mus musculus
  siRNA target sequence for D12Wsu95e (NM_198023.1,909-927).
ccgactcccagaggttatt

SEQ ID NO: 457604 - DNA, 19 bp, Mus musculus
  siRNA target sequence for D12Wsu95e (NM_198023.1,911-929).
gactcccagaggttattca

SEQ ID NO: 457605 - DNA, 19 bp, Mus musculus
  siRNA target sequence for D12Wsu95e (NM_198023.1,1008-1026).
ggcgatctcagatgtgatt

SEQ ID NO: 457606 - DNA, 19 bp, Mus musculus
  siRNA target sequence for D12Wsu95e (NM_198023.1,1028-1046).
ggaacaagtcagttgttca

SEQ ID NO: 457607 - DNA, 19 bp, Mus musculus
  siRNA target sequence for D12Wsu95e (NM_198023.1,1039-1057).
gttgttcaggtgaaaaact

SEQ ID NO: 457608 - DNA, 19 bp, Mus musculus
  siRNA target sequence for D12Wsu95e (NM_198023.1,1042-1060).
gttcaggtgaaaaactttt

SEQ ID NO: 457609 - DNA, 19 bp, Mus musculus
  siRNA target sequence for D12Wsu95e (NM_198023.1,1076-1094).
gccgcttcaacatagatga

SEQ ID NO: 457610 - DNA, 19 bp, Mus musculus
  siRNA target sequence for D12Wsu95e (NM_198023.1,1077-1095).
ccgcttcaacatagatgaa

SEQ ID NO: 457611 - DNA, 19 bp, Mus musculus
  siRNA target sequence for D12Wsu95e (NM_198023.1,1079-1097).
gcttcaacatagatgaagt

SEQ ID NO: 457612 - DNA, 19 bp, Mus musculus
  siRNA target sequence for D130064H19Rik (NM_172593.1,180-198).
gctagttcatgactatgat

SEQ ID NO: 457613 - DNA, 19 bp, Mus musculus
  siRNA target sequence for D130064H19Rik (NM_172593.1,281-299).
ggaacatgccgctagaaga

SEQ ID NO: 457614 - DNA, 19 bp, Mus musculus
  siRNA target sequence for D130064H19Rik (NM_172593.1,306-324).
ggcgttctacggctatgaa

SEQ ID NO: 457615 - DNA, 19 bp, Mus musculus
  siRNA target sequence for D130064H19Rik (NM_172593.1,307-325).
gcgttctacggctatgaat

SEQ ID NO: 457616 - DNA, 19 bp, Mus musculus
  siRNA target sequence for D130064H19Rik (NM_172593.1,315-333).
cggctatgaatctacaatt

SEQ ID NO: 457617 - DNA, 19 bp, Mus musculus
  siRNA target sequence for D130064H19Rik (NM_172593.1,440-458).
gcgatgacgaggaaactca

SEQ ID NO: 457618 - DNA, 19 bp, Mus musculus
  siRNA target sequence for D130064H19Rik (NM_172593.1,523-541).
cctttacgatcaaacacta

SEQ ID NO: 457619 - DNA, 19 bp, Mus musculus
  siRNA target sequence for D130064H19Rik (NM_172593.1,565-583).
gagattgaggacgttgaaa

SEQ ID NO: 457620 - DNA, 19 bp, Mus musculus
  siRNA target sequence for D130064H19Rik (NM_172593.1,592-610).
ggtaactcacctgaagatt

SEQ ID NO: 457621 - DNA, 19 bp, Mus musculus
  siRNA target sequence for D130064H19Rik (NM_172593.1,593-611).
gtaactcacctgaagattt

SEQ ID NO: 457622 - DNA, 19 bp, Mus musculus
  siRNA target sequence for D130064H19Rik (NM_172593.1,680-698).
gtgacgacgagaaagctta

SEQ ID NO: 457623 - DNA, 19 bp, Mus musculus
  siRNA target sequence for D130064H19Rik (NM_172593.1,684-702).
cgacgagaaagcttatgaa

SEQ ID NO: 457624 - DNA, 19 bp, Mus musculus
  siRNA target sequence for D130064H19Rik (NM_172593.1,848-866).
cattatacgaacttctcaa

SEQ ID NO: 457625 - DNA, 19 bp, Mus musculus
  siRNA target sequence for D130064H19Rik (NM_172593.1,862-880).
ctcaagtgtaaccacaata

SEQ ID NO: 457626 - DNA, 19 bp, Mus musculus
  siRNA target sequence for D130064H19Rik (NM_172593.1,864-882).
caagtgtaaccacaatata

SEQ ID NO: 457627 - DNA, 19 bp, Mus musculus
  siRNA target sequence for D130064H19Rik (NM_172593.1,899-917).
ggtactgctgtaatggaaa

SEQ ID NO: 457628 - DNA, 19 bp, Mus musculus
  siRNA target sequence for D130064H19Rik (NM_172593.1,951-969).
ggagtgccgaagctttgaa

SEQ ID NO: 457629 - DNA, 19 bp, Mus musculus
  siRNA target sequence for D130064H19Rik (NM_172593.1,1015-1033).
gataaggtgaggtctagaa

SEQ ID NO: 457630 - DNA, 19 bp, Mus musculus
  siRNA target sequence for D130064H19Rik (NM_172593.1,1046-1064).
gcgtagccttctactacat

SEQ ID NO: 457631 - DNA, 19 bp, Mus musculus
  siRNA target sequence for D130064H19Rik (NM_172593.1,1056-1074).
ctactacatgtggaagaaa

SEQ ID NO: 457632 - DNA, 19 bp, Mus musculus
  siRNA target sequence for D130064H19Rik (NM_172593.1,1071-1089).
gaaatcagaacgctatgat

SEQ ID NO: 457633 - DNA, 19 bp, Mus musculus
  siRNA target sequence for D130064H19Rik (NM_172593.1,1115-1133).
gaaagaaacgctataacca

SEQ ID NO: 457634 - DNA, 19 bp, Mus musculus
  siRNA target sequence for D130064H19Rik (NM_172593.1,1189-1207).
ggtggtaccgtcagttctt

SEQ ID NO: 457635 - DNA, 19 bp, Mus musculus
  siRNA target sequence for D130064H19Rik (NM_172593.1,1205-1223).
cttcagccttaacttgtaa

SEQ ID NO: 457636 - DNA, 19 bp, Mus musculus
  siRNA target sequence for D130064H19Rik (NM_172593.1,1241-1259).
ctgatcagccgctgaacat

SEQ ID NO: 457637 - DNA, 19 bp, Mus musculus
  siRNA target sequence for D130064H19Rik (NM_172593.1,1282-1300).
gacctgacagctttaacca

SEQ ID NO: 457638 - DNA, 19 bp, Mus musculus
  siRNA target sequence for D130064H19Rik (NM_172593.1,1323-1341).
ccccaccgctgtgaattgt

SEQ ID NO: 457639 - DNA, 19 bp, Mus musculus
  siRNA target sequence for D130064H19Rik (NM_172593.1,1376-1394).
ctcgtggacacgtcaatca

SEQ ID NO: 457640 - DNA, 19 bp, Mus musculus
  siRNA target sequence for D130064H19Rik (NM_172593.1,1379-1397).
gtggacacgtcaatcatgt

SEQ ID NO: 457641 - DNA, 19 bp, Mus musculus
  siRNA target sequence for D130064H19Rik (NM_172593.1,1400-1418).
ctgtcgtaacggaagagtt

SEQ ID NO: 457642 - DNA, 19 bp, Mus musculus
  siRNA target sequence for D130064H19Rik (NM_172593.1,1405-1423).
gtaacggaagagttactca

SEQ ID NO: 457643 - DNA, 19 bp, Mus musculus
  siRNA target sequence for D130064H19Rik (NM_172593.1,1431-1449).
cagcaatggtgaaagtgat

SEQ ID NO: 457644 - DNA, 19 bp, Mus musculus
  siRNA target sequence for D130064H19Rik (NM_172593.1,1495-1513).
cccatgtgcagcgaagaat

SEQ ID NO: 457645 - DNA, 19 bp, Mus musculus
  siRNA target sequence for D130064H19Rik (NM_172593.1,1522-1540).
ccagcaaagagattgaaga

SEQ ID NO: 457646 - DNA, 19 bp, Mus musculus
  siRNA target sequence for D130064H19Rik (NM_172593.1,1523-1541).
cagcaaagagattgaagat

SEQ ID NO: 457647 - DNA, 19 bp, Mus musculus
  siRNA target sequence for D130064H19Rik (NM_172593.1,1549-1567).
gctgtccccgaatccttta

SEQ ID NO: 457648 - DNA, 19 bp, Mus musculus
  siRNA target sequence for D130064H19Rik (NM_172593.1,1552-1570).
gtccccgaatcctttatga

SEQ ID NO: 457649 - DNA, 19 bp, Mus musculus
  siRNA target sequence for D130064H19Rik (NM_172593.1,1554-1572).
ccccgaatcctttatgaat

SEQ ID NO: 457650 - DNA, 19 bp, Mus musculus
  siRNA target sequence for D130064H19Rik (NM_172593.1,1681-1699).
gagacaaacggattcatca

SEQ ID NO: 457651 - DNA, 19 bp, Mus musculus
  siRNA target sequence for D130064H19Rik (NM_172593.1,1683-1701).
gacaaacggattcatcaat

SEQ ID NO: 457652 - DNA, 19 bp, Mus musculus
  siRNA target sequence for D19Bwg1357e (NM_177474.2,117-135).
gaacagtgagtctagttct

SEQ ID NO: 457653 - DNA, 19 bp, Mus musculus
  siRNA target sequence for D19Bwg1357e (NM_177474.2,120-138).
cagtgagtctagttcttca

SEQ ID NO: 457654 - DNA, 19 bp, Mus musculus
  siRNA target sequence for D19Bwg1357e (NM_177474.2,122-140).
gtgagtctagttcttcaaa

SEQ ID NO: 457655 - DNA, 19 bp, Mus musculus
  siRNA target sequence for D19Bwg1357e (NM_177474.2,149-167).
caaggaaagctgttaagga

SEQ ID NO: 457656 - DNA, 19 bp, Mus musculus
  siRNA target sequence for D19Bwg1357e (NM_177474.2,173-191).
gacctaaagtcacatctaa

SEQ ID NO: 457657 - DNA, 19 bp, Mus musculus
  siRNA target sequence for D19Bwg1357e (NM_177474.2,176-194).
ctaaagtcacatctaagaa

SEQ ID NO: 457658 - DNA, 19 bp, Mus musculus
  siRNA target sequence for D19Bwg1357e (NM_177474.2,201-219).
gaaaggtgccacaaaacct

SEQ ID NO: 457659 - DNA, 19 bp, Mus musculus
  siRNA target sequence for D19Bwg1357e (NM_177474.2,269-287).
gaccgaaggacaaatttca

SEQ ID NO: 457660 - DNA, 19 bp, Mus musculus
  siRNA target sequence for D19Bwg1357e (NM_177474.2,272-290).
cgaaggacaaatttcagaa

SEQ ID NO: 457661 - DNA, 19 bp, Mus musculus
  siRNA target sequence for D19Bwg1357e (NM_177474.2,305-323).
gcaagaagcggaaattcca

SEQ ID NO: 457662 - DNA, 19 bp, Mus musculus
  siRNA target sequence for D19Bwg1357e (NM_177474.2,363-381).
caagtgggatgacttcaaa

SEQ ID NO: 457663 - DNA, 19 bp, Mus musculus
  siRNA target sequence for D19Bwg1357e (NM_177474.2,445-463).
gttcgagcaaagcacattt

SEQ ID NO: 457664 - DNA, 19 bp, Mus musculus
  siRNA target sequence for D19Bwg1357e (NM_177474.2,505-523).
gtgaagctcatgagtgatt

SEQ ID NO: 457665 - DNA, 19 bp, Mus musculus
  siRNA target sequence for D19Bwg1357e (NM_177474.2,518-536).
gtgatttgcagaagttgat

SEQ ID NO: 457666 - DNA, 19 bp, Mus musculus
  siRNA target sequence for D19Bwg1357e (NM_177474.2,646-664).
caaggcgacttggttgaat

SEQ ID NO: 457667 - DNA, 19 bp, Mus musculus
  siRNA target sequence for D19Bwg1357e (NM_177474.2,649-667).
ggcgacttggttgaattaa

SEQ ID NO: 457668 - DNA, 19 bp, Mus musculus
  siRNA target sequence for D19Bwg1357e (NM_177474.2,724-742).
ccacaagttgcggagataa

SEQ ID NO: 457669 - DNA, 19 bp, Mus musculus
  siRNA target sequence for D19Bwg1357e (NM_177474.2,725-743).
cacaagttgcggagataat

SEQ ID NO: 457670 - DNA, 19 bp, Mus musculus
  siRNA target sequence for D19Bwg1357e (NM_177474.2,730-748).
gttgcggagataatcagaa

SEQ ID NO: 457671 - DNA, 19 bp, Mus musculus
  siRNA target sequence for D19Bwg1357e (NM_177474.2,733-751).
gcggagataatcagaagtt

SEQ ID NO: 457672 - DNA, 19 bp, Mus musculus
  siRNA target sequence for D19Bwg1357e (NM_177474.2,734-752).
cggagataatcagaagttt

SEQ ID NO: 457673 - DNA, 19 bp, Mus musculus
  siRNA target sequence for D19Bwg1357e (NM_177474.2,935-953).
cagcaaagctagagcttat

SEQ ID NO: 457674 - DNA, 19 bp, Mus musculus
  siRNA target sequence for D19Bwg1357e (NM_177474.2,937-955).
gcaaagctagagcttatca

SEQ ID NO: 457675 - DNA, 19 bp, Mus musculus
  siRNA target sequence for D19Bwg1357e (NM_177474.2,938-956).
caaagctagagcttatcat

SEQ ID NO: 457676 - DNA, 19 bp, Mus musculus
  siRNA target sequence for D19Bwg1357e (NM_177474.2,990-1008).
ccaaaaggaagctgtgatt

SEQ ID NO: 457677 - DNA, 19 bp, Mus musculus
  siRNA target sequence for D19Bwg1357e (NM_177474.2,991-1009).
caaaaggaagctgtgatta

SEQ ID NO: 457678 - DNA, 19 bp, Mus musculus
  siRNA target sequence for D19Bwg1357e (NM_177474.2,1011-1029).
gcactcactcgttcataaa

SEQ ID NO: 457679 - DNA, 19 bp, Mus musculus
  siRNA target sequence for D19Bwg1357e (NM_177474.2,1018-1036).
ctcgttcataaagtattct

SEQ ID NO: 457680 - DNA, 19 bp, Mus musculus
  siRNA target sequence for D19Bwg1357e (NM_177474.2,1059-1077).
cccaaaacctcgatcagaa

SEQ ID NO: 457681 - DNA, 19 bp, Mus musculus
  siRNA target sequence for D19Bwg1357e (NM_177474.2,1067-1085).
ctcgatcagaactaattga

SEQ ID NO: 457682 - DNA, 19 bp, Mus musculus
  siRNA target sequence for D19Bwg1357e (NM_177474.2,1249-1267).
ctcctggcagcgtttgact

SEQ ID NO: 457683 - DNA, 19 bp, Mus musculus
  siRNA target sequence for D19Bwg1357e (NM_177474.2,1254-1272).
ggcagcgtttgactgtatt

SEQ ID NO: 457684 - DNA, 19 bp, Mus musculus
  siRNA target sequence for D19Bwg1357e (NM_177474.2,1259-1277).
cgtttgactgtattgatga

SEQ ID NO: 457685 - DNA, 19 bp, Mus musculus
  siRNA target sequence for D19Bwg1357e (NM_177474.2,1264-1282).
gactgtattgatgatacta

SEQ ID NO: 457686 - DNA, 19 bp, Mus musculus
  siRNA target sequence for D19Bwg1357e (NM_177474.2,1290-1308).
gaagcagataatcatatca

SEQ ID NO: 457687 - DNA, 19 bp, Mus musculus
  siRNA target sequence for D19Bwg1357e (NM_177474.2,1293-1311).
gcagataatcatatcagaa

SEQ ID NO: 457688 - DNA, 19 bp, Mus musculus
  siRNA target sequence for D19Bwg1357e (NM_177474.2,1322-1340).
ccttgcccagcatagttaa

SEQ ID NO: 457689 - DNA, 19 bp, Mus musculus
  siRNA target sequence for D19Bwg1357e (NM_177474.2,1323-1341).
cttgcccagcatagttaat

SEQ ID NO: 457690 - DNA, 19 bp, Mus musculus
  siRNA target sequence for D19Bwg1357e (NM_177474.2,1665-1683).
ggacggagagcttcatgtt

SEQ ID NO: 457691 - DNA, 19 bp, Mus musculus
  siRNA target sequence for D19Bwg1357e (NM_177474.2,1702-1720).
catctggttctcaaatggt

SEQ ID NO: 457692 - DNA, 19 bp, Mus musculus
  siRNA target sequence for D19Bwg1357e (NM_177474.2,1707-1725).
ggttctcaaatggttacta

SEQ ID NO: 457693 - DNA, 19 bp, Mus musculus
  siRNA target sequence for D19Bwg1357e (NM_177474.2,1751-1769).
gcggaaaggaaggttgttt

SEQ ID NO: 457694 - DNA, 19 bp, Mus musculus
  siRNA target sequence for D19Bwg1357e (NM_177474.2,1752-1770).
cggaaaggaaggttgtttt

SEQ ID NO: 457695 - DNA, 19 bp, Mus musculus
  siRNA target sequence for D19Bwg1357e (NM_177474.2,1786-1804).
gagcgtgttggtatgaaga

SEQ ID NO: 457696 - DNA, 19 bp, Mus musculus
  siRNA target sequence for D19Bwg1357e (NM_177474.2,1827-1845).
caaccgaggtgccattatt

SEQ ID NO: 457697 - DNA, 19 bp, Mus musculus
  siRNA target sequence for D19Bwg1357e (NM_177474.2,1830-1848).
ccgaggtgccattattctt

SEQ ID NO: 457698 - DNA, 19 bp, Mus musculus
  siRNA target sequence for D19Bwg1357e (NM_177474.2,1831-1849).
cgaggtgccattattcttt

SEQ ID NO: 457699 - DNA, 19 bp, Mus musculus
  siRNA target sequence for D19Bwg1357e (NM_177474.2,1865-1883).
gttgtgaccaagaagttgt

SEQ ID NO: 457700 - DNA, 19 bp, Mus musculus
  siRNA target sequence for D1Pas1 (NM_033077.2,628-646).
cggctcacggtggagtaaa

SEQ ID NO: 457701 - DNA, 19 bp, Mus musculus
  siRNA target sequence for D1Pas1 (NM_033077.2,1042-1060).
cgagctcactcgttacaca

SEQ ID NO: 457702 - DNA, 19 bp, Mus musculus
  siRNA target sequence for D1Pas1 (NM_033077.2,1731-1749).
cagacaagcggtcatttct

SEQ ID NO: 457703 - DNA, 19 bp, Mus musculus
  siRNA target sequence for D1Pas1 (NM_033077.2,1772-1790).
ggcaaggattccctgatat

SEQ ID NO: 457704 - DNA, 19 bp, Mus musculus
  siRNA target sequence for D1Pas1 (NM_033077.2,1773-1791).
gcaaggattccctgatatt

SEQ ID NO: 457705 - DNA, 19 bp, Mus musculus
  siRNA target sequence for D1Pas1 (NM_033077.2,2089-2107).
cttcaacgagaggaacata

SEQ ID NO: 457706 - DNA, 19 bp, Mus musculus
  siRNA target sequence for D1Pas1 (NM_033077.2,2095-2113).
cgagaggaacataaatatt

SEQ ID NO: 457707 - DNA, 19 bp, Mus musculus
  siRNA target sequence for D1Pas1 (NM_033077.2,2216-2234).
cggtccaagagcagattta

SEQ ID NO: 457708 - DNA, 19 bp, Mus musculus
  siRNA target sequence for D1Pas1 (NM_033077.2,2218-2236).
gtccaagagcagatttagt

SEQ ID NO: 457709 - DNA, 19 bp, Mus musculus
  siRNA target sequence for D3Jfr1 (NM_144901.2,508-526).
gtaccccaatggtacttca

SEQ ID NO: 457710 - DNA, 19 bp, Mus musculus
  siRNA target sequence for D3Jfr1 (NM_144901.2,545-563).
ggggttattgaaaaactct

SEQ ID NO: 457711 - DNA, 19 bp, Mus musculus
  siRNA target sequence for D3Jfr1 (NM_144901.2,546-564).
gggttattgaaaaactctt

SEQ ID NO: 457712 - DNA, 19 bp, Mus musculus
  siRNA target sequence for D3Jfr1 (NM_144901.2,565-583).
gacctcttacggattcatt

SEQ ID NO: 457713 - DNA, 19 bp, Mus musculus
  siRNA target sequence for D3Jfr1 (NM_144901.2,567-585).
cctcttacggattcattca

SEQ ID NO: 457714 - DNA, 19 bp, Mus musculus
  siRNA target sequence for D3Jfr1 (NM_144901.2,596-614).
cggcaagctagacttttct

SEQ ID NO: 457715 - DNA, 19 bp, Mus musculus
  siRNA target sequence for D3Jfr1 (NM_144901.2,613-631).
cttccactgttcacaatat

SEQ ID NO: 457716 - DNA, 19 bp, Mus musculus
  siRNA target sequence for D3Jfr1 (NM_144901.2,616-634).
ccactgttcacaatataat

SEQ ID NO: 457717 - DNA, 19 bp, Mus musculus
  siRNA target sequence for D3Jfr1 (NM_144901.2,636-654).
gcaacctccaagacttaaa

SEQ ID NO: 457718 - DNA, 19 bp, Mus musculus
  siRNA target sequence for D3Jfr1 (NM_144901.2,692-710).
cggaggactgggaaaccta

SEQ ID NO: 457719 - DNA, 19 bp, Mus musculus
  siRNA target sequence for D3Jfr1 (NM_144901.2,697-715).
gactgggaaacctattgct

SEQ ID NO: 457720 - DNA, 19 bp, Mus musculus
  siRNA target sequence for D3Jfr1 (NM_144901.2,701-719).
gggaaacctattgctatta

SEQ ID NO: 457721 - DNA, 19 bp, Mus musculus
  siRNA target sequence for D3Jfr1 (NM_144901.2,702-720).
ggaaacctattgctattaa

SEQ ID NO: 457722 - DNA, 19 bp, Mus musculus
  siRNA target sequence for D3Jfr1 (NM_144901.2,708-726).
ctattgctattaaattggt

SEQ ID NO: 457723 - DNA, 19 bp, Mus musculus
  siRNA target sequence for D3Jfr1 (NM_144901.2,714-732).
ctattaaattggtgaagat

SEQ ID NO: 457724 - DNA, 19 bp, Mus musculus
  siRNA target sequence for D3Jfr1 (NM_144901.2,730-748).
gataaaaccagaaatacat

SEQ ID NO: 457725 - DNA, 19 bp, Mus musculus
  siRNA target sequence for D3Jfr1 (NM_144901.2,783-801).
ctgttcctcacaacttaga

SEQ ID NO: 457726 - DNA, 19 bp, Mus musculus
  siRNA target sequence for D3Jfr1 (NM_144901.2,834-852).
caacagggagtgtatgcta

SEQ ID NO: 457727 - DNA, 19 bp, Mus musculus
  siRNA target sequence for D3Jfr1 (NM_144901.2,843-861).
gtgtatgctacgaacgtaa

SEQ ID NO: 457728 - DNA, 19 bp, Mus musculus
  siRNA target sequence for D3Jfr1 (NM_144901.2,854-872).
gaacgtaatggggaagtat

SEQ ID NO: 457729 - DNA, 19 bp, Mus musculus
  siRNA target sequence for D3Jfr1 (NM_144901.2,857-875).
cgtaatggggaagtatttt

SEQ ID NO: 457730 - DNA, 19 bp, Mus musculus
  siRNA target sequence for D3Jfr1 (NM_144901.2,858-876).
gtaatggggaagtatttta

SEQ ID NO: 457731 - DNA, 19 bp, Mus musculus
  siRNA target sequence for D3Jfr1 (NM_144901.2,882-900).
cttacacctctgaagatgt

SEQ ID NO: 457732 - DNA, 19 bp, Mus musculus
  siRNA target sequence for D3Jfr1 (NM_144901.2,940-958).
ctttgtaattgataacaat

SEQ ID NO: 457733 - DNA, 19 bp, Mus musculus
  siRNA target sequence for D3Jfr1 (NM_144901.2,971-989).
gctgtaagtgctcgtaata

SEQ ID NO: 457734 - DNA, 19 bp, Mus musculus
  siRNA target sequence for D3Jfr1 (NM_144901.2,972-990).
ctgtaagtgctcgtaatat

SEQ ID NO: 457735 - DNA, 19 bp, Mus musculus
  siRNA target sequence for D3Jfr1 (NM_144901.2,978-996).
gtgctcgtaatattatgct

SEQ ID NO: 457736 - DNA, 19 bp, Mus musculus
  siRNA target sequence for D3Jfr1 (NM_144901.2,1016-1034).
cgctgtcaaggagtagttt

SEQ ID NO: 457737 - DNA, 19 bp, Mus musculus
  siRNA target sequence for D3Jfr1 (NM_144901.2,1048-1066).
ggcgtttggctttatcgaa

SEQ ID NO: 457738 - DNA, 19 bp, Mus musculus
  siRNA target sequence for D3Jfr1 (NM_144901.2,1049-1067).
gcgtttggctttatcgaaa

SEQ ID NO: 457739 - DNA, 19 bp, Mus musculus
  siRNA target sequence for D3Jfr1 (NM_144901.2,1073-1091).
gatgttgtaaaagagatat

SEQ ID NO: 457740 - DNA, 19 bp, Mus musculus
  siRNA target sequence for D3Jfr1 (NM_144901.2,1087-1105).
gatattctttcactatagt

SEQ ID NO: 457741 - DNA, 19 bp, Mus musculus
  siRNA target sequence for D3Jfr1 (NM_144901.2,1308-1326).
cattgccaggacgaatcaa

SEQ ID NO: 457742 - DNA, 19 bp, Mus musculus
  siRNA target sequence for D3Jfr1 (NM_144901.2,1922-1940).
gataaggttgaatttagta

SEQ ID NO: 457743 - DNA, 19 bp, Mus musculus
  siRNA target sequence for D3Jfr1 (NM_144901.2,1973-1991).
gcaacttgcgtgagacttt

SEQ ID NO: 457744 - DNA, 19 bp, Mus musculus
  siRNA target sequence for D3Jfr1 (NM_144901.2,1974-1992).
caacttgcgtgagactttt

SEQ ID NO: 457745 - DNA, 19 bp, Mus musculus
  siRNA target sequence for D3Jfr1 (NM_144901.2,2084-2102).
gaaatatttttccactata

SEQ ID NO: 457746 - DNA, 19 bp, Mus musculus
  siRNA target sequence for D4Ertd89e (NM_028053.1,352-370).
cccagggttattcatatca

SEQ ID NO: 457747 - DNA, 19 bp, Mus musculus
  siRNA target sequence for D4Ertd89e (NM_028053.1,364-382).
catatcaacctattcagtt

SEQ ID NO: 457748 - DNA, 19 bp, Mus musculus
  siRNA target sequence for D4Ertd89e (NM_028053.1,405-423).
gtgacccggacgtggaaaa

SEQ ID NO: 457749 - DNA, 19 bp, Mus musculus
  siRNA target sequence for D4Ertd89e (NM_028053.1,407-425).
gacccggacgtggaaaata

SEQ ID NO: 457750 - DNA, 19 bp, Mus musculus
  siRNA target sequence for D4Ertd89e (NM_028053.1,409-427).
cccggacgtggaaaatagt

SEQ ID NO: 457751 - DNA, 19 bp, Mus musculus
  siRNA target sequence for D4Ertd89e (NM_028053.1,410-428).
ccggacgtggaaaatagta

SEQ ID NO: 457752 - DNA, 19 bp, Mus musculus
  siRNA target sequence for D4Ertd89e (NM_028053.1,430-448).
gcggagtctcggatgctaa

SEQ ID NO: 457753 - DNA, 19 bp, Mus musculus
  siRNA target sequence for D4Ertd89e (NM_028053.1,431-449).
cggagtctcggatgctaat

SEQ ID NO: 457754 - DNA, 19 bp, Mus musculus
  siRNA target sequence for D4Ertd89e (NM_028053.1,432-450).
ggagtctcggatgctaata

SEQ ID NO: 457755 - DNA, 19 bp, Mus musculus
  siRNA target sequence for D4Ertd89e (NM_028053.1,435-453).
gtctcggatgctaatagct

SEQ ID NO: 457756 - DNA, 19 bp, Mus musculus
  siRNA target sequence for D4Ertd89e (NM_028053.1,437-455).
ctcggatgctaatagctat

SEQ ID NO: 457757 - DNA, 19 bp, Mus musculus
  siRNA target sequence for D4Ertd89e (NM_028053.1,444-462).
gctaatagctattacagaa

SEQ ID NO: 457758 - DNA, 19 bp, Mus musculus
  siRNA target sequence for D4Ertd89e (NM_028053.1,445-463).
ctaatagctattacagaaa

SEQ ID NO: 457759 - DNA, 19 bp, Mus musculus
  siRNA target sequence for D4Ertd89e (NM_028053.1,466-484).
cctggatagtcatgatagt

SEQ ID NO: 457760 - DNA, 19 bp, Mus musculus
  siRNA target sequence for D4Ertd89e (NM_028053.1,467-485).
ctggatagtcatgatagtt

SEQ ID NO: 457761 - DNA, 19 bp, Mus musculus
  siRNA target sequence for D4Ertd89e (NM_028053.1,470-488).
gatagtcatgatagttgtt

SEQ ID NO: 457762 - DNA, 19 bp, Mus musculus
  siRNA target sequence for D4Ertd89e (NM_028053.1,565-583).
gtgatgaatggctgaagat

SEQ ID NO: 457763 - DNA, 19 bp, Mus musculus
  siRNA target sequence for D4Ertd89e (NM_028053.1,567-585).
gatgaatggctgaagatgt

SEQ ID NO: 457764 - DNA, 19 bp, Mus musculus
  siRNA target sequence for D4Ertd89e (NM_028053.1,584-602).
gtccttcccttgcaagata

SEQ ID NO: 457765 - DNA, 19 bp, Mus musculus
  siRNA target sequence for D4Ertd89e (NM_028053.1,604-622).
ccctgctggggtcaattat

SEQ ID NO: 457766 - DNA, 19 bp, Mus musculus
  siRNA target sequence for D4Ertd89e (NM_028053.1,606-624).
ctgctggggtcaattatgt

SEQ ID NO: 457767 - DNA, 19 bp, Mus musculus
  siRNA target sequence for D4Ertd89e (NM_028053.1,609-627).
ctggggtcaattatgttca

SEQ ID NO: 457768 - DNA, 19 bp, Mus musculus
  siRNA target sequence for D4Ertd89e (NM_028053.1,647-665).
cctggcgatctcaaagcat

SEQ ID NO: 457769 - DNA, 19 bp, Mus musculus
  siRNA target sequence for D4Ertd89e (NM_028053.1,652-670).
cgatctcaaagcatgatct

SEQ ID NO: 457770 - DNA, 19 bp, Mus musculus
  siRNA target sequence for D4Ertd89e (NM_028053.1,658-676).
caaagcatgatctcatgtt

SEQ ID NO: 457771 - DNA, 19 bp, Mus musculus
  siRNA target sequence for D4Ertd89e (NM_028053.1,692-710).
cctcgtgaccataaaggta

SEQ ID NO: 457772 - DNA, 19 bp, Mus musculus
  siRNA target sequence for D4Ertd89e (NM_028053.1,713-731).
catgatgatgacaaaggat

SEQ ID NO: 457773 - DNA, 19 bp, Mus musculus
  siRNA target sequence for D630024B06Rik (NM_172598.2,241-259).
caccgaagtctgctttgat

SEQ ID NO: 457774 - DNA, 19 bp, Mus musculus
  siRNA target sequence for D630024B06Rik (NM_172598.2,243-261).
ccgaagtctgctttgatga

SEQ ID NO: 457775 - DNA, 19 bp, Mus musculus
  siRNA target sequence for D630024B06Rik (NM_172598.2,244-262).
cgaagtctgctttgatgat

SEQ ID NO: 457776 - DNA, 19 bp, Mus musculus
  siRNA target sequence for D630024B06Rik (NM_172598.2,245-263).
gaagtctgctttgatgatt

SEQ ID NO: 457777 - DNA, 19 bp, Mus musculus
  siRNA target sequence for D630024B06Rik (NM_172598.2,334-352).
ccctaagtccgttaatgtt

SEQ ID NO: 457778 - DNA, 19 bp, Mus musculus
  siRNA target sequence for D630024B06Rik (NM_172598.2,397-415).
cactgcagtttctaataat

SEQ ID NO: 457779 - DNA, 19 bp, Mus musculus
  siRNA target sequence for D630024B06Rik (NM_172598.2,417-435).
ccgtccaagtctatacatt

SEQ ID NO: 457780 - DNA, 19 bp, Mus musculus
  siRNA target sequence for D630024B06Rik (NM_172598.2,472-490).
cactacaaatgcaaaccat

SEQ ID NO: 457781 - DNA, 19 bp, Mus musculus
  siRNA target sequence for D630024B06Rik (NM_172598.2,483-501).
caaaccatgtggtcttcaa

SEQ ID NO: 457782 - DNA, 19 bp, Mus musculus
  siRNA target sequence for D630024B06Rik (NM_172598.2,522-540).
ctgctgggtcaagtgattt

SEQ ID NO: 457783 - DNA, 19 bp, Mus musculus
  siRNA target sequence for D630024B06Rik (NM_172598.2,534-552).
gtgattttctggtcaaagt

SEQ ID NO: 457784 - DNA, 19 bp, Mus musculus
  siRNA target sequence for D630024B06Rik (NM_172598.2,594-612).
gacatgatgcccctgtttt

SEQ ID NO: 457785 - DNA, 19 bp, Mus musculus
  siRNA target sequence for D630024B06Rik (NM_172598.2,596-614).
catgatgcccctgttttaa

SEQ ID NO: 457786 - DNA, 19 bp, Mus musculus
  siRNA target sequence for D630024B06Rik (NM_172598.2,619-637).
gtcttttgatcctaaggat

SEQ ID NO: 457787 - DNA, 19 bp, Mus musculus
  siRNA target sequence for D630024B06Rik (NM_172598.2,621-639).
cttttgatcctaaggatat

SEQ ID NO: 457788 - DNA, 19 bp, Mus musculus
  siRNA target sequence for D630024B06Rik (NM_172598.2,646-664).
ggcatcggctagttgtgat

SEQ ID NO: 457789 - DNA, 19 bp, Mus musculus
  siRNA target sequence for D630024B06Rik (NM_172598.2,666-684).
gaactgtcagggtatggaa

SEQ ID NO: 457790 - DNA, 19 bp, Mus musculus
  siRNA target sequence for D630024B06Rik (NM_172598.2,669-687).
ctgtcagggtatggaatat

SEQ ID NO: 457791 - DNA, 19 bp, Mus musculus
  siRNA target sequence for D630024B06Rik (NM_172598.2,671-689).
gtcagggtatggaatatat

SEQ ID NO: 457792 - DNA, 19 bp, Mus musculus
  siRNA target sequence for D630024B06Rik (NM_172598.2,673-691).
cagggtatggaatatatct

SEQ ID NO: 457793 - DNA, 19 bp, Mus musculus
  siRNA target sequence for D630024B06Rik (NM_172598.2,675-693).
gggtatggaatatatctga

SEQ ID NO: 457794 - DNA, 19 bp, Mus musculus
  siRNA target sequence for D630024B06Rik (NM_172598.2,676-694).
ggtatggaatatatctgat

SEQ ID NO: 457795 - DNA, 19 bp, Mus musculus
  siRNA target sequence for D630024B06Rik (NM_172598.2,839-857).
gaaacctggagtaatccat

SEQ ID NO: 457796 - DNA, 19 bp, Mus musculus
  siRNA target sequence for D630024B06Rik (NM_172598.2,854-872).
ccattcgatctttcagata

SEQ ID NO: 457797 - DNA, 19 bp, Mus musculus
  siRNA target sequence for D630024B06Rik (NM_172598.2,883-901).
ccagacactcaatatagta

SEQ ID NO: 457798 - DNA, 19 bp, Mus musculus
  siRNA target sequence for D630024B06Rik (NM_172598.2,884-902).
cagacactcaatatagtaa

SEQ ID NO: 457799 - DNA, 19 bp, Mus musculus
  siRNA target sequence for D630024B06Rik (NM_172598.2,909-927).
ctccctgtgggcagtattt

SEQ ID NO: 457800 - DNA, 19 bp, Mus musculus
  siRNA target sequence for D630024B06Rik (NM_172598.2,928-946).
ggctgcaggtgctattaat

SEQ ID NO: 457801 - DNA, 19 bp, Mus musculus
  siRNA target sequence for D630024B06Rik (NM_172598.2,939-957).
ctattaatggcttaattgt

SEQ ID NO: 457802 - DNA, 19 bp, Mus musculus
  siRNA target sequence for D630024B06Rik (NM_172598.2,982-1000).
ctgcatggaaagggtaaaa

SEQ ID NO: 457803 - DNA, 19 bp, Mus musculus
  siRNA target sequence for D630024B06Rik (NM_172598.2,1031-1049).
gcctggcatcccacttgta

SEQ ID NO: 457804 - DNA, 19 bp, Mus musculus
  siRNA target sequence for D630024B06Rik (NM_172598.2,1033-1051).
ctggcatcccacttgtagt

SEQ ID NO: 457805 - DNA, 19 bp, Mus musculus
  siRNA target sequence for D630024B06Rik (NM_172598.2,1042-1060).
cacttgtagtcggatatgt

SEQ ID NO: 457806 - DNA, 19 bp, Mus musculus
  siRNA target sequence for D630024B06Rik (NM_172598.2,1044-1062).
cttgtagtcggatatgtta

SEQ ID NO: 457807 - DNA, 19 bp, Mus musculus
  siRNA target sequence for D630024B06Rik (NM_172598.2,1050-1068).
gtcggatatgttatactga

SEQ ID NO: 457808 - DNA, 19 bp, Mus musculus
  siRNA target sequence for D630024B06Rik (NM_172598.2,1085-1103).
ggagtcctggaaaatgttt

SEQ ID NO: 457809 - DNA, 19 bp, Mus musculus
  siRNA target sequence for D630024B06Rik (NM_172598.2,1115-1133).
ggaaaggtgtcgagcaata

SEQ ID NO: 457810 - DNA, 19 bp, Mus musculus
  siRNA target sequence for D630024B06Rik (NM_172598.2,1125-1143).
cgagcaataagggcattat

SEQ ID NO: 457811 - DNA, 19 bp, Mus musculus
  siRNA target sequence for D630024B06Rik (NM_172598.2,1190-1208).
gacttgggagacgatgaaa

SEQ ID NO: 457812 - DNA, 19 bp, Mus musculus
  siRNA target sequence for D630024B06Rik (NM_172598.2,1201-1219).
cgatgaaaactcagttgat

SEQ ID NO: 457813 - DNA, 19 bp, Mus musculus
  siRNA target sequence for D630024B06Rik (NM_172598.2,1214-1232).
gttgatgttacaatgctaa

SEQ ID NO: 457814 - DNA, 19 bp, Mus musculus
  siRNA target sequence for D630024B06Rik (NM_172598.2,1271-1289).
caggcacgaagtattcaca

SEQ ID NO: 457815 - DNA, 19 bp, Mus musculus
  siRNA target sequence for D630024B06Rik (NM_172598.2,1286-1304).
cacaacctcccccttataa

SEQ ID NO: 457816 - DNA, 19 bp, Mus musculus
  siRNA target sequence for D630024B06Rik (NM_172598.2,1288-1306).
caacctcccccttataaga

SEQ ID NO: 457817 - DNA, 19 bp, Mus musculus
  siRNA target sequence for D630024B06Rik (NM_172598.2,1354-1372).
gcccttccagtcaagttca

SEQ ID NO: 457818 - DNA, 19 bp, Mus musculus
  siRNA target sequence for D630024B06Rik (NM_172598.2,1355-1373).
cccttccagtcaagttcaa

SEQ ID NO: 457819 - DNA, 19 bp, Mus musculus
  siRNA target sequence for D630024B06Rik (NM_172598.2,1382-1400).
catctctctcacagattca

SEQ ID NO: 457820 - DNA, 19 bp, Mus musculus
  siRNA target sequence for D630024B06Rik (NM_172598.2,1407-1425).
ggaactctgttgggattat

SEQ ID NO: 457821 - DNA, 19 bp, Mus musculus
  siRNA target sequence for D630024B06Rik (NM_172598.2,1487-1505).
catcatgcaacacatctat

SEQ ID NO: 457822 - DNA, 19 bp, Mus musculus
  siRNA target sequence for D630024B06Rik (NM_172598.2,1490-1508).
catgcaacacatctattaa

SEQ ID NO: 457823 - DNA, 19 bp, Mus musculus
  siRNA target sequence for D630024B06Rik (NM_172598.2,1595-1613).
cattgcttgcacttcagtt

SEQ ID NO: 457824 - DNA, 19 bp, Mus musculus
  siRNA target sequence for D630024B06Rik (NM_172598.2,1718-1736).
ctccttcgactgttcacta

SEQ ID NO: 457825 - DNA, 19 bp, Mus musculus
  siRNA target sequence for D630024B06Rik (NM_172598.2,1734-1752).
ctattggaggtgttcagaa

SEQ ID NO: 457826 - DNA, 19 bp, Mus musculus
  siRNA target sequence for D630024B06Rik (NM_172598.2,1740-1758).
gaggtgttcagaaagaagt

SEQ ID NO: 457827 - DNA, 19 bp, Mus musculus
  siRNA target sequence for D630024B06Rik (NM_172598.2,1852-1870).
gtgccttggagttcaacta

SEQ ID NO: 457828 - DNA, 19 bp, Mus musculus
  siRNA target sequence for D630024B06Rik (NM_172598.2,1919-1937).
cctctcacacggaaatcct

SEQ ID NO: 457829 - DNA, 19 bp, Mus musculus
  siRNA target sequence for D630024B06Rik (NM_172598.2,1920-1938).
ctctcacacggaaatccta

SEQ ID NO: 457830 - DNA, 19 bp, Mus musculus
  siRNA target sequence for D630024B06Rik (NM_172598.2,1989-2007).
ccgaaggctgtgttcgaat

SEQ ID NO: 457831 - DNA, 19 bp, Mus musculus
  siRNA target sequence for D630024B06Rik (NM_172598.2,1994-2012).
ggctgtgttcgaatgctaa

SEQ ID NO: 457832 - DNA, 19 bp, Mus musculus
  siRNA target sequence for D630024B06Rik (NM_172598.2,1995-2013).
gctgtgttcgaatgctaaa

SEQ ID NO: 457833 - DNA, 19 bp, Mus musculus
  siRNA target sequence for D630024B06Rik (NM_172598.2,2014-2032).
cagaggactcgggaataca

SEQ ID NO: 457834 - DNA, 19 bp, Mus musculus
  siRNA target sequence for D630024B06Rik (NM_172598.2,2035-2053).
gactcctgtatgcaacata

SEQ ID NO: 457835 - DNA, 19 bp, Mus musculus
  siRNA target sequence for D630024B06Rik (NM_172598.2,2040-2058).
ctgtatgcaacataagaga

SEQ ID NO: 457836 - DNA, 19 bp, Mus musculus
  siRNA target sequence for D630024B06Rik (NM_172598.2,2092-2110).
ggttggtatccatgagaat

SEQ ID NO: 457837 - DNA, 19 bp, Mus musculus
  siRNA target sequence for D630024B06Rik (NM_172598.2,2125-2143).
gtgcatcccttgtaaaggt

SEQ ID NO: 457838 - DNA, 19 bp, Mus musculus
  siRNA target sequence for D630024B06Rik (NM_172598.2,2166-2184).
cacgacctgctgtagctat

SEQ ID NO: 457839 - DNA, 19 bp, Mus musculus
  siRNA target sequence for D630024B06Rik (NM_172598.2,2168-2186).
cgacctgctgtagctatat

SEQ ID NO: 457840 - DNA, 19 bp, Mus musculus
  siRNA target sequence for D630024B06Rik (NM_172598.2,2169-2187).
gacctgctgtagctatatt

SEQ ID NO: 457841 - DNA, 19 bp, Mus musculus
  siRNA target sequence for D630024B06Rik (NM_172598.2,2171-2189).
cctgctgtagctatattat

SEQ ID NO: 457842 - DNA, 19 bp, Mus musculus
  siRNA target sequence for D630024B06Rik (NM_172598.2,2174-2192).
gctgtagctatattatctt

SEQ ID NO: 457843 - DNA, 19 bp, Mus musculus
  siRNA target sequence for D630024B06Rik (NM_172598.2,2175-2193).
ctgtagctatattatcttt

SEQ ID NO: 457844 - DNA, 19 bp, Mus musculus
  siRNA target sequence for D630024B06Rik (NM_172598.2,2177-2195).
gtagctatattatctttta

SEQ ID NO: 457845 - DNA, 19 bp, Mus musculus
  siRNA target sequence for D630024B06Rik (NM_172598.2,2228-2246).
ggccaaatggaggaacaat

SEQ ID NO: 457846 - DNA, 19 bp, Mus musculus
  siRNA target sequence for D630024B06Rik (NM_172598.2,2229-2247).
gccaaatggaggaacaatt

SEQ ID NO: 457847 - DNA, 19 bp, Mus musculus
  siRNA target sequence for D630024B06Rik (NM_172598.2,2276-2294).
cttgattacttggctaaaa

SEQ ID NO: 457848 - DNA, 19 bp, Mus musculus
  siRNA target sequence for D630024B06Rik (NM_172598.2,2284-2302).
cttggctaaaaatggttat

SEQ ID NO: 457849 - DNA, 19 bp, Mus musculus
  siRNA target sequence for D630024B06Rik (NM_172598.2,2303-2321).
gattatgaggagagcatta

SEQ ID NO: 457850 - DNA, 19 bp, Mus musculus
  siRNA target sequence for D630024B06Rik (NM_172598.2,2365-2383).
gcttgcgctgtcttgtaaa

SEQ ID NO: 457851 - DNA, 19 bp, Mus musculus
  siRNA target sequence for D630024B06Rik (NM_172598.2,2379-2397).
gtaaactggaacgagaatt

SEQ ID NO: 457852 - DNA, 19 bp, Mus musculus
  siRNA target sequence for D630024B06Rik (NM_172598.2,2408-2426).
gaacttgctgatctaatga

SEQ ID NO: 457853 - DNA, 19 bp, Mus musculus
  siRNA target sequence for D630024B06Rik (NM_172598.2,2427-2445).
ctcaaaatgccgtgcattt

SEQ ID NO: 457854 - DNA, 19 bp, Mus musculus
  siRNA target sequence for D630024B06Rik (NM_172598.2,2436-2454).
ccgtgcatttagccattaa

SEQ ID NO: 457855 - DNA, 19 bp, Mus musculus
  siRNA target sequence for D630024B06Rik (NM_172598.2,2437-2455).
cgtgcatttagccattaaa

SEQ ID NO: 457856 - DNA, 19 bp, Mus musculus
  siRNA target sequence for D630024B06Rik (NM_172598.2,2438-2456).
gtgcatttagccattaaat

SEQ ID NO: 457857 - DNA, 19 bp, Mus musculus
  siRNA target sequence for D630024B06Rik (NM_172598.2,2463-2481).
ctcgctctcggaaattaat

SEQ ID NO: 457858 - DNA, 19 bp, Mus musculus
  siRNA target sequence for D630024B06Rik (NM_172598.2,2465-2483).
cgctctcggaaattaatat

SEQ ID NO: 457859 - DNA, 19 bp, Mus musculus
  siRNA target sequence for D630024B06Rik (NM_172598.2,2466-2484).
gctctcggaaattaatatt

SEQ ID NO: 457860 - DNA, 19 bp, Mus musculus
  siRNA target sequence for D630024B06Rik (NM_172598.2,2702-2720).
gggcagaacttattccaaa

SEQ ID NO: 457861 - DNA, 19 bp, Mus musculus
  siRNA target sequence for D630024B06Rik (NM_172598.2,2733-2751).
ctgatacaccagctcttaa

SEQ ID NO: 457862 - DNA, 19 bp, Mus musculus
  siRNA target sequence for D630024B06Rik (NM_172598.2,2825-2843).
gccgtatcagcgaattcaa

SEQ ID NO: 457863 - DNA, 19 bp, Mus musculus
  siRNA target sequence for D630024B06Rik (NM_172598.2,2827-2845).
cgtatcagcgaattcaaca

SEQ ID NO: 457864 - DNA, 19 bp, Mus musculus
  siRNA target sequence for D630024B06Rik (NM_172598.2,2841-2859).
caacacgctcagctaacat

SEQ ID NO: 457865 - DNA, 19 bp, Mus musculus
  siRNA target sequence for D630024B06Rik (NM_172598.2,2864-2882).
gacagcatgaacaaatcat

SEQ ID NO: 457866 - DNA, 19 bp, Mus musculus
  siRNA target sequence for D630024B06Rik (NM_172598.2,2886-2904).
ggaagtccacttctcttaa

SEQ ID NO: 457867 - DNA, 19 bp, Mus musculus
  siRNA target sequence for D630024B06Rik (NM_172598.2,2887-2905).
gaagtccacttctcttaat

SEQ ID NO: 457868 - DNA, 19 bp, Mus musculus
  siRNA target sequence for D630024B06Rik (NM_172598.2,2890-2908).
gtccacttctcttaatcga

SEQ ID NO: 457869 - DNA, 19 bp, Mus musculus
  siRNA target sequence for D630024B06Rik (NM_172598.2,2892-2910).
ccacttctcttaatcgaat

SEQ ID NO: 457870 - DNA, 19 bp, Mus musculus
  siRNA target sequence for D630024B06Rik (NM_172598.2,2898-2916).
ctcttaatcgaatggaaaa

SEQ ID NO: 457871 - DNA, 19 bp, Mus musculus
  siRNA target sequence for D630024B06Rik (NM_172598.2,2900-2918).
cttaatcgaatggaaaaca

SEQ ID NO: 457872 - DNA, 19 bp, Mus musculus
  siRNA target sequence for D630024B06Rik (NM_172598.2,2906-2924).
cgaatggaaaacaatgaaa

SEQ ID NO: 457873 - DNA, 19 bp, Mus musculus
  siRNA target sequence for D630024B06Rik (NM_172598.2,2973-2991).
catctgcagcatcctattt

SEQ ID NO: 457874 - DNA, 19 bp, Mus musculus
  siRNA target sequence for D630024B06Rik (NM_172598.2,3194-3212).
gaggggatgatacgattta

SEQ ID NO: 457875 - DNA, 19 bp, Mus musculus
  siRNA target sequence for D630024B06Rik (NM_172598.2,3196-3214).
ggggatgatacgatttaga

SEQ ID NO: 457876 - DNA, 19 bp, Mus musculus
  siRNA target sequence for D630024B06Rik (NM_172598.2,3198-3216).
ggatgatacgatttagagt

SEQ ID NO: 457877 - DNA, 19 bp, Mus musculus
  siRNA target sequence for D630024B06Rik (NM_172598.2,3199-3217).
gatgatacgatttagagta

SEQ ID NO: 457878 - DNA, 19 bp, Mus musculus
  siRNA target sequence for D630024B06Rik (NM_172598.2,3234-3252).
ggaaggcatggactaacaa

SEQ ID NO: 457879 - DNA, 19 bp, Mus musculus
  siRNA target sequence for D630024B06Rik (NM_172598.2,3273-3291).
gcgatggagctgaagcaaa

SEQ ID NO: 457880 - DNA, 19 bp, Mus musculus
  siRNA target sequence for D630024B06Rik (NM_172598.2,3376-3394).
gcaaaaggcgttaaatctt

SEQ ID NO: 457881 - DNA, 19 bp, Mus musculus
  siRNA target sequence for D630024B06Rik (NM_172598.2,3395-3413).
cctgctaaccagaaattgt

SEQ ID NO: 457882 - DNA, 19 bp, Mus musculus
  siRNA target sequence for D630024B06Rik (NM_172598.2,3414-3432).
cagcgtttgcatttaagca

SEQ ID NO: 457883 - DNA, 19 bp, Mus musculus
  siRNA target sequence for D930050H05Rik (NM_144876.2,156-174).
gactggaatggatgtaaca

SEQ ID NO: 457884 - DNA, 19 bp, Mus musculus
  siRNA target sequence for D930050H05Rik (NM_144876.2,227-245).
ctgctcgcatgccctatat

SEQ ID NO: 457885 - DNA, 19 bp, Mus musculus
  siRNA target sequence for D930050H05Rik (NM_144876.2,229-247).
gctcgcatgccctatattt

SEQ ID NO: 457886 - DNA, 19 bp, Mus musculus
  siRNA target sequence for D930050H05Rik (NM_144876.2,233-251).
gcatgccctatatttcaga

SEQ ID NO: 457887 - DNA, 19 bp, Mus musculus
  siRNA target sequence for D930050H05Rik (NM_144876.2,311-329).
gtgatgtggtgctagttgt

SEQ ID NO: 457888 - DNA, 19 bp, Mus musculus
  siRNA target sequence for D930050H05Rik (NM_144876.2,325-343).
gttgtgggcgctaagaaga

SEQ ID NO: 457889 - DNA, 19 bp, Mus musculus
  siRNA target sequence for D930050H05Rik (NM_144876.2,328-346).
gtgggcgctaagaagatat

SEQ ID NO: 457890 - DNA, 19 bp, Mus musculus
  siRNA target sequence for D930050H05Rik (NM_144876.2,330-348).
gggcgctaagaagatatat

SEQ ID NO: 457891 - DNA, 19 bp, Mus musculus
  siRNA target sequence for D930050H05Rik (NM_144876.2,419-437).
gccggcagacagaagtagt

SEQ ID NO: 457892 - DNA, 19 bp, Mus musculus
  siRNA target sequence for D930050H05Rik (NM_144876.2,596-614).
gacaattagatccttctaa

SEQ ID NO: 457893 - DNA, 19 bp, Mus musculus
  siRNA target sequence for D930050H05Rik (NM_144876.2,621-639).
gggcattcgggcttttgct

SEQ ID NO: 457894 - DNA, 19 bp, Mus musculus
  siRNA target sequence for D930050H05Rik (NM_144876.2,676-694).
gacaagttcacccaacata

SEQ ID NO: 457895 - DNA, 19 bp, Mus musculus
  siRNA target sequence for D930050H05Rik (NM_144876.2,716-734).
gtgaagaattcatgttact

SEQ ID NO: 457896 - DNA, 19 bp, Mus musculus
  siRNA target sequence for D930050H05Rik (NM_144876.2,744-762).
ccaactcattgacataata

SEQ ID NO: 457897 - DNA, 19 bp, Mus musculus
  siRNA target sequence for D930050H05Rik (NM_144876.2,745-763).
caactcattgacataatat

SEQ ID NO: 457898 - DNA, 19 bp, Mus musculus
  siRNA target sequence for D930050H05Rik (NM_144876.2,748-766).
ctcattgacataatatcta

SEQ ID NO: 457899 - DNA, 19 bp, Mus musculus
  siRNA target sequence for D930050H05Rik (NM_144876.2,777-795).
caatgttcggagtgaagaa

SEQ ID NO: 457900 - DNA, 19 bp, Mus musculus
  siRNA target sequence for D930050H05Rik (NM_144876.2,785-803).
ggagtgaagaacaagtgtt

SEQ ID NO: 457901 - DNA, 19 bp, Mus musculus
  siRNA target sequence for D930050H05Rik (NM_144876.2,816-834).
ggcctgggtcaaatacagt

SEQ ID NO: 457902 - DNA, 19 bp, Mus musculus
  siRNA target sequence for D930050H05Rik (NM_144876.2,818-836).
cctgggtcaaatacagtat

SEQ ID NO: 457903 - DNA, 19 bp, Mus musculus
  siRNA target sequence for D930050H05Rik (NM_144876.2,860-878).
cccaggtgctgcaacatgt

SEQ ID NO: 457904 - DNA, 19 bp, Mus musculus
  siRNA target sequence for D930050H05Rik (NM_144876.2,922-940).
ggctctgaccccctcatta

SEQ ID NO: 457905 - DNA, 19 bp, Mus musculus
  siRNA target sequence for D930050H05Rik (NM_144876.2,923-941).
gctctgaccccctcattaa

SEQ ID NO: 457906 - DNA, 19 bp, Mus musculus
  siRNA target sequence for D930050H05Rik (NM_144876.2,930-948).
ccccctcattaaaagtgat

SEQ ID NO: 457907 - DNA, 19 bp, Mus musculus
  siRNA target sequence for D930050H05Rik (NM_144876.2,967-985).
gtagatgaggctaaaaact

SEQ ID NO: 457908 - DNA, 19 bp, Mus musculus
  siRNA target sequence for D930050H05Rik (NM_144876.2,987-1005).
cctcctgttgcctcaagaa

SEQ ID NO: 457909 - DNA, 19 bp, Mus musculus
  siRNA target sequence for D930050H05Rik (NM_144876.2,998-1016).
ctcaagaacgaccactaat

SEQ ID NO: 457910 - DNA, 19 bp, Mus musculus
  siRNA target sequence for D930050H05Rik (NM_144876.2,1031-1049).
caagaccacggaaacctat

SEQ ID NO: 457911 - DNA, 19 bp, Mus musculus
  siRNA target sequence for D930050H05Rik (NM_144876.2,1052-1070).
gatgcggagaagtactctt

SEQ ID NO: 457912 - DNA, 19 bp, Mus musculus
  siRNA target sequence for D930050H05Rik (NM_144876.2,1123-1141).
gacccccagaccaatgagt

SEQ ID NO: 457913 - DNA, 19 bp, Mus musculus
  siRNA target sequence for D930050H05Rik (NM_144876.2,1134-1152).
caatgagtggcgaatggta

SEQ ID NO: 457914 - DNA, 19 bp, Mus musculus
  siRNA target sequence for D930050H05Rik (NM_144876.2,1142-1160).
ggcgaatggtagcttcaat

SEQ ID NO: 457915 - DNA, 19 bp, Mus musculus
  siRNA target sequence for D930050H05Rik (NM_144876.2,1144-1162).
cgaatggtagcttcaatga

SEQ ID NO: 457916 - DNA, 19 bp, Mus musculus
  siRNA target sequence for D930050H05Rik (NM_144876.2,1150-1168).
gtagcttcaatgagcaaaa

SEQ ID NO: 457917 - DNA, 19 bp, Mus musculus
  siRNA target sequence for D930050H05Rik (NM_144876.2,1224-1242).
ccatgatggatcctcatat

SEQ ID NO: 457918 - DNA, 19 bp, Mus musculus
  siRNA target sequence for D930050H05Rik (NM_144876.2,1228-1246).
gatggatcctcatatctca

SEQ ID NO: 457919 - DNA, 19 bp, Mus musculus
  siRNA target sequence for D930050H05Rik (NM_144876.2,1235-1253).
cctcatatctcaatagtgt

SEQ ID NO: 457920 - DNA, 19 bp, Mus musculus
  siRNA target sequence for D930050H05Rik (NM_144876.2,1243-1261).
ctcaatagtgttgaaagat

SEQ ID NO: 457921 - DNA, 19 bp, Mus musculus
  siRNA target sequence for D930050H05Rik (NM_144876.2,1245-1263).
caatagtgttgaaagatat

SEQ ID NO: 457922 - DNA, 19 bp, Mus musculus
  siRNA target sequence for D930050H05Rik (NM_144876.2,1259-1277).
gatatgaccccaaaactaa

SEQ ID NO: 457923 - DNA, 19 bp, Mus musculus
  siRNA target sequence for D930050H05Rik (NM_144876.2,1264-1282).
gaccccaaaactaaccaat

SEQ ID NO: 457924 - DNA, 19 bp, Mus musculus
  siRNA target sequence for D930050H05Rik (NM_144876.2,1332-1350).
ggcagtccttggaggtttt

SEQ ID NO: 457925 - DNA, 19 bp, Mus musculus
  siRNA target sequence for D930050H05Rik (NM_144876.2,1334-1352).
cagtccttggaggttttct

SEQ ID NO: 457926 - DNA, 19 bp, Mus musculus
  siRNA target sequence for D930050H05Rik (NM_144876.2,1375-1393).
ggtgtctcttgcctcaata

SEQ ID NO: 457927 - DNA, 19 bp, Mus musculus
  siRNA target sequence for D930050H05Rik (NM_144876.2,1380-1398).
ctcttgcctcaatatagtt

SEQ ID NO: 457928 - DNA, 19 bp, Mus musculus
  siRNA target sequence for D930050H05Rik (NM_144876.2,1438-1456).
gcttcaatgagcactagaa

SEQ ID NO: 457929 - DNA, 19 bp, Mus musculus
  siRNA target sequence for D930050H05Rik (NM_144876.2,1476-1494).
cgtgttgggagggttctta

SEQ ID NO: 457930 - DNA, 19 bp, Mus musculus
  siRNA target sequence for D930050H05Rik (NM_144876.2,1516-1534).
ggaacatctccacttaaca

SEQ ID NO: 457931 - DNA, 19 bp, Mus musculus
  siRNA target sequence for D930050H05Rik (NM_144876.2,1583-1601).
ctatggggacccgaagaaa

SEQ ID NO: 457932 - DNA, 19 bp, Mus musculus
  siRNA target sequence for D930050H05Rik (NM_144876.2,1616-1634).
cggtgtaccaggacatgat

SEQ ID NO: 457933 - DNA, 19 bp, Mus musculus
  siRNA target sequence for D930050H05Rik (NM_144876.2,1673-1691).
gcagtgctgagagatacaa

SEQ ID NO: 457934 - DNA, 19 bp, Mus musculus
  siRNA target sequence for D930050H05Rik (NM_144876.2,1685-1703).
gatacaaccccagaactaa

SEQ ID NO: 457935 - DNA, 19 bp, Mus musculus
  siRNA target sequence for D930050H05Rik (NM_144876.2,1714-1732).
cccgtggtggccatgacat

SEQ ID NO: 457936 - DNA, 19 bp, Mus musculus
  siRNA target sequence for D930050H05Rik (NM_144876.2,1789-1807).
ggctttgatggcacaacat

SEQ ID NO: 457937 - DNA, 19 bp, Mus musculus
  siRNA target sequence for D930050H05Rik (NM_144876.2,1840-1858).
gccaatacgtggaggttat

SEQ ID NO: 457938 - DNA, 19 bp, Mus musculus
  siRNA target sequence for D930050H05Rik (NM_144876.2,1841-1859).
ccaatacgtggaggttata

SEQ ID NO: 457939 - DNA, 19 bp, Mus musculus
  siRNA target sequence for D930050H05Rik (NM_144876.2,1854-1872).
gttatacggagggatgaat

SEQ ID NO: 457940 - DNA, 19 bp, Mus musculus
  siRNA target sequence for D930050H05Rik (NM_144876.2,1886-1904).
gaggtggtgtaggagttat

SEQ ID NO: 457941 - DNA, 19 bp, Mus musculus
  siRNA target sequence for D930050H05Rik (NM_144876.2,1888-1906).
ggtggtgtaggagttatta

SEQ ID NO: 457942 - DNA, 19 bp, Mus musculus
  siRNA target sequence for D930050H05Rik (NM_144876.2,1891-1909).
ggtgtaggagttattaaaa

SEQ ID NO: 457943 - DNA, 19 bp, Mus musculus
  siRNA target sequence for Dbp (NM_016974.1,934-952).
cgcgcaggcttgacatcta

SEQ ID NO: 457944 - DNA, 19 bp, Mus musculus
  siRNA target sequence for Dbp (NM_016974.1,1043-1061).
caggccatgagacttttga

SEQ ID NO: 457945 - DNA, 19 bp, Mus musculus
  siRNA target sequence for Dbp (NM_016974.1,1169-1187).
gccggaggtacaagaacaa

SEQ ID NO: 457946 - DNA, 19 bp, Mus musculus
  siRNA target sequence for Dbp (NM_016974.1,1170-1188).
ccggaggtacaagaacaat

SEQ ID NO: 457947 - DNA, 19 bp, Mus musculus
  siRNA target sequence for Dbp (NM_016974.1,1203-1221).
gtcgagagatgcaagaaga

SEQ ID NO: 457948 - DNA, 19 bp, Mus musculus
  siRNA target sequence for Ddb2 (NM_028119.2,217-235).
gtgctcctcaggagcaaaa

SEQ ID NO: 457949 - DNA, 19 bp, Mus musculus
  siRNA target sequence for Ddb2 (NM_028119.2,380-398).
gggatctttaccagcataa

SEQ ID NO: 457950 - DNA, 19 bp, Mus musculus
  siRNA target sequence for Ddb2 (NM_028119.2,557-575).
gctccaaagggggagatat

SEQ ID NO: 457951 - DNA, 19 bp, Mus musculus
  siRNA target sequence for Ddb2 (NM_028119.2,558-576).
ctccaaagggggagatatt

SEQ ID NO: 457952 - DNA, 19 bp, Mus musculus
  siRNA target sequence for Ddb2 (NM_028119.2,601-619).
gacaaacctatcttcctta

SEQ ID NO: 457953 - DNA, 19 bp, Mus musculus
  siRNA target sequence for Ddb2 (NM_028119.2,603-621).
caaacctatcttccttaaa

SEQ ID NO: 457954 - DNA, 19 bp, Mus musculus
  siRNA target sequence for Ddb2 (NM_028119.2,776-794).
ggttttgcagccttgatgt

SEQ ID NO: 457955 - DNA, 19 bp, Mus musculus
  siRNA target sequence for Ddb2 (NM_028119.2,945-963).
cacagcctccatagatcaa

SEQ ID NO: 457956 - DNA, 19 bp, Mus musculus
  siRNA target sequence for Ddb2 (NM_028119.2,950-968).
cctccatagatcaaacagt

SEQ ID NO: 457957 - DNA, 19 bp, Mus musculus
  siRNA target sequence for Ddb2 (NM_028119.2,977-995).
gggacctgcgccaaattaa

SEQ ID NO: 457958 - DNA, 19 bp, Mus musculus
  siRNA target sequence for Ddb2 (NM_028119.2,1039-1057).
gtcaatgcagcttgtttta

SEQ ID NO: 457959 - DNA, 19 bp, Mus musculus
  siRNA target sequence for Ddb2 (NM_028119.2,1080-1098).
gactactgaccagaacaat

SEQ ID NO: 457960 - DNA, 19 bp, Mus musculus
  siRNA target sequence for Ddb2 (NM_028119.2,1082-1100).
ctactgaccagaacaatga

SEQ ID NO: 457961 - DNA, 19 bp, Mus musculus
  siRNA target sequence for Ddb2 (NM_028119.2,1127-1145).
gggatagccccctgaatct

SEQ ID NO: 457962 - DNA, 19 bp, Mus musculus
  siRNA target sequence for Ddb2 (NM_028119.2,1129-1147).
gatagccccctgaatctga

SEQ ID NO: 457963 - DNA, 19 bp, Mus musculus
  siRNA target sequence for Ddb2 (NM_028119.2,1205-1223).
cacggcacaacctcattgt

SEQ ID NO: 457964 - DNA, 19 bp, Mus musculus
  siRNA target sequence for Ddb2 (NM_028119.2,1236-1254).
cccagatcctaatcttaaa

SEQ ID NO: 457965 - DNA, 19 bp, Mus musculus
  siRNA target sequence for Ddb2 (NM_028119.2,1237-1255).
ccagatcctaatcttaaaa

SEQ ID NO: 457966 - DNA, 19 bp, Mus musculus
  siRNA target sequence for Ddb2 (NM_028119.2,1240-1258).
gatcctaatcttaaaagtt

SEQ ID NO: 457967 - DNA, 19 bp, Mus musculus
  siRNA target sequence for Ddb2 (NM_028119.2,1256-1274).
gttgtgttccctatgaact

SEQ ID NO: 457968 - DNA, 19 bp, Mus musculus
  siRNA target sequence for Ddb2 (NM_028119.2,1278-1296).
gacaatagatgtgtttgat

SEQ ID NO: 457969 - DNA, 19 bp, Mus musculus
  siRNA target sequence for Ddb2 (NM_028119.2,1297-1315).
ggaagctcagggaagatga

SEQ ID NO: 457970 - DNA, 19 bp, Mus musculus
  siRNA target sequence for Ddb2 (NM_028119.2,1333-1351).
ccaggatactccggtatta

SEQ ID NO: 457971 - DNA, 19 bp, Mus musculus
  siRNA target sequence for Ddb2 (NM_028119.2,1346-1364).
gtattacttcgctcaatga

SEQ ID NO: 457972 - DNA, 19 bp, Mus musculus
  siRNA target sequence for Ddb2 (NM_028119.2,1391-1409).
cctctactatgggttatca

SEQ ID NO: 457973 - DNA, 19 bp, Mus musculus
  siRNA target sequence for Ddb2 (NM_028119.2,1392-1410).
ctctactatgggttatcat

SEQ ID NO: 457974 - DNA, 19 bp, Mus musculus
  siRNA target sequence for Ddb2 (NM_028119.2,1397-1415).
ctatgggttatcatattct

SEQ ID NO: 457975 - DNA, 19 bp, Mus musculus
  siRNA target sequence for Ddb2 (NM_028119.2,1401-1419).
gggttatcatattctcatt

SEQ ID NO: 457976 - DNA, 19 bp, Mus musculus
  siRNA target sequence for Ddb2 (NM_028119.2,1439-1457).
ggtcacagaaagatcatga

SEQ ID NO: 457977 - DNA, 19 bp, Mus musculus
  siRNA target sequence for Ddef1 (NM_010026.1,87-105).
ccagagattcactatggaa

SEQ ID NO: 457978 - DNA, 19 bp, Mus musculus
  siRNA target sequence for Ddef1 (NM_010026.1,88-106).
cagagattcactatggaat

SEQ ID NO: 457979 - DNA, 19 bp, Mus musculus
  siRNA target sequence for Ddef1 (NM_010026.1,233-251).
gaggctctagaccaagata

SEQ ID NO: 457980 - DNA, 19 bp, Mus musculus
  siRNA target sequence for Ddef1 (NM_010026.1,252-270).
gaacagccctacagaaagt

SEQ ID NO: 457981 - DNA, 19 bp, Mus musculus
  siRNA target sequence for Ddef1 (NM_010026.1,301-319).
cggtcaagatcatgtacaa

SEQ ID NO: 457982 - DNA, 19 bp, Mus musculus
  siRNA target sequence for Ddef1 (NM_010026.1,347-365).
gataagtttggaagtaatt

SEQ ID NO: 457983 - DNA, 19 bp, Mus musculus
  siRNA target sequence for Ddef1 (NM_010026.1,389-407).
cttggcaccgcttttgtca

SEQ ID NO: 457984 - DNA, 19 bp, Mus musculus
  siRNA target sequence for Ddef1 (NM_010026.1,393-411).
gcaccgcttttgtcaagtt

SEQ ID NO: 457985 - DNA, 19 bp, Mus musculus
  siRNA target sequence for Ddef1 (NM_010026.1,394-412).
caccgcttttgtcaagttt

SEQ ID NO: 457986 - DNA, 19 bp, Mus musculus
  siRNA target sequence for Ddef1 (NM_010026.1,433-451).
gtccacgctgctgaaaaat

SEQ ID NO: 457987 - DNA, 19 bp, Mus musculus
  siRNA target sequence for Ddef1 (NM_010026.1,435-453).
ccacgctgctgaaaaatct

SEQ ID NO: 457988 - DNA, 19 bp, Mus musculus
  siRNA target sequence for Ddef1 (NM_010026.1,476-494).
gtgatcttcaccttggatt

SEQ ID NO: 457989 - DNA, 19 bp, Mus musculus
  siRNA target sequence for Ddef1 (NM_010026.1,548-566).
gacaaagcctggaaagatt

SEQ ID NO: 457990 - DNA, 19 bp, Mus musculus
  siRNA target sequence for Ddef1 (NM_010026.1,563-581).
gattatgagacgaagttta

SEQ ID NO: 457991 - DNA, 19 bp, Mus musculus
  siRNA target sequence for Ddef1 (NM_010026.1,569-587).
gagacgaagtttacaaaaa

SEQ ID NO: 457992 - DNA, 19 bp, Mus musculus
  siRNA target sequence for Ddef1 (NM_010026.1,573-591).
cgaagtttacaaaaattga

SEQ ID NO: 457993 - DNA, 19 bp, Mus musculus
  siRNA target sequence for Ddef1 (NM_010026.1,625-643).
gatgatccgaacagagata

SEQ ID NO: 457994 - DNA, 19 bp, Mus musculus
  siRNA target sequence for Ddef1 (NM_010026.1,640-658).
gataacaggcgctgagatt

SEQ ID NO: 457995 - DNA, 19 bp, Mus musculus
  siRNA target sequence for Ddef1 (NM_010026.1,703-721).
gtgtgaatatctcattaaa

SEQ ID NO: 457996 - DNA, 19 bp, Mus musculus
  siRNA target sequence for Ddef1 (NM_010026.1,705-723).
gtgaatatctcattaaagt

SEQ ID NO: 457997 - DNA, 19 bp, Mus musculus
  siRNA target sequence for Ddef1 (NM_010026.1,758-776).
ctgcagaaccttataaagt

SEQ ID NO: 457998 - DNA, 19 bp, Mus musculus
  siRNA target sequence for Ddef1 (NM_010026.1,760-778).
gcagaaccttataaagtat

SEQ ID NO: 457999 - DNA, 19 bp, Mus musculus
  siRNA target sequence for Ddef1 (NM_010026.1,766-784).
ccttataaagtattaccat

SEQ ID NO: 458000 - DNA, 19 bp, Mus musculus
  siRNA target sequence for Ddef1 (NM_010026.1,810-828).
gcttgaaaacggctgataa

SEQ ID NO: 458001 - DNA, 19 bp, Mus musculus
  siRNA target sequence for Ddef1 (NM_010026.1,811-829).
cttgaaaacggctgataaa

SEQ ID NO: 458002 - DNA, 19 bp, Mus musculus
  siRNA target sequence for Ddef1 (NM_010026.1,819-837).
cggctgataaactgaaaca

SEQ ID NO: 458003 - DNA, 19 bp, Mus musculus
  siRNA target sequence for Ddef1 (NM_010026.1,821-839).
gctgataaactgaaacagt

SEQ ID NO: 458004 - DNA, 19 bp, Mus musculus
  siRNA target sequence for Ddef1 (NM_010026.1,911-929).
gcactccgagatctaataa

SEQ ID NO: 458005 - DNA, 19 bp, Mus musculus
  siRNA target sequence for Ddef1 (NM_010026.1,914-932).
ctccgagatctaataaaat

SEQ ID NO: 458006 - DNA, 19 bp, Mus musculus
  siRNA target sequence for Ddef1 (NM_010026.1,940-958).
gcaacttgatccgaaagaa

SEQ ID NO: 458007 - DNA, 19 bp, Mus musculus
  siRNA target sequence for Ddef1 (NM_010026.1,1058-1076).
gagtacggcagtgaaaaga

SEQ ID NO: 458008 - DNA, 19 bp, Mus musculus
  siRNA target sequence for Ddef1 (NM_010026.1,1128-1146).
ggaagtgtgcggtcaagaa

SEQ ID NO: 458009 - DNA, 19 bp, Mus musculus
  siRNA target sequence for Ddef1 (NM_010026.1,1180-1198).
caggcagcctgctaagtta

SEQ ID NO: 458010 - DNA, 19 bp, Mus musculus
  siRNA target sequence for Ddef1 (NM_010026.1,1182-1200).
ggcagcctgctaagttaaa

SEQ ID NO: 458011 - DNA, 19 bp, Mus musculus
  siRNA target sequence for Ddef1 (NM_010026.1,1252-1270).
cctgatatcacataatcga

SEQ ID NO: 458012 - DNA, 19 bp, Mus musculus
  siRNA target sequence for Ddef1 (NM_010026.1,1253-1271).
ctgatatcacataatcgaa

SEQ ID NO: 458013 - DNA, 19 bp, Mus musculus
  siRNA target sequence for Ddef1 (NM_010026.1,1260-1278).
cacataatcgaacatatca

SEQ ID NO: 458014 - DNA, 19 bp, Mus musculus
  siRNA target sequence for Ddef1 (NM_010026.1,1301-1319).
gattatatagcgtggatat

SEQ ID NO: 458015 - DNA, 19 bp, Mus musculus
  siRNA target sequence for Ddef1 (NM_010026.1,1320-1338).
cagtactgacgaatagcaa

SEQ ID NO: 458016 - DNA, 19 bp, Mus musculus
  siRNA target sequence for Ddef1 (NM_010026.1,1413-1431).
ccatcatcgaggatgtaca

SEQ ID NO: 458017 - DNA, 19 bp, Mus musculus
  siRNA target sequence for Ddef1 (NM_010026.1,1501-1519).
gggtattttgacctgtata

SEQ ID NO: 458018 - DNA, 19 bp, Mus musculus
  siRNA target sequence for Ddef1 (NM_010026.1,1503-1521).
gtattttgacctgtataga

SEQ ID NO: 458019 - DNA, 19 bp, Mus musculus
  siRNA target sequence for Ddef1 (NM_010026.1,1520-1538).
gaatgttccggaatccata

SEQ ID NO: 458020 - DNA, 19 bp, Mus musculus
  siRNA target sequence for Ddef1 (NM_010026.1,1540-1558).
ggaaatgggggttcatatt

SEQ ID NO: 458021 - DNA, 19 bp, Mus musculus
  siRNA target sequence for Ddef1 (NM_010026.1,1541-1559).
gaaatgggggttcatattt

SEQ ID NO: 458022 - DNA, 19 bp, Mus musculus
  siRNA target sequence for Ddef1 (NM_010026.1,1572-1590).
ctttggaactagacaaatt

SEQ ID NO: 458023 - DNA, 19 bp, Mus musculus
  siRNA target sequence for Ddef1 (NM_010026.1,1622-1640).
gtaggaaacaatagtttta

SEQ ID NO: 458024 - DNA, 19 bp, Mus musculus
  siRNA target sequence for Ddef1 (NM_010026.1,1681-1699).
gcccaccccttcaagtgat

SEQ ID NO: 458025 - DNA, 19 bp, Mus musculus
  siRNA target sequence for Ddef1 (NM_010026.1,1682-1700).
cccaccccttcaagtgata

SEQ ID NO: 458026 - DNA, 19 bp, Mus musculus
  siRNA target sequence for Ddef1 (NM_010026.1,1683-1701).
ccaccccttcaagtgatat

SEQ ID NO: 458027 - DNA, 19 bp, Mus musculus
  siRNA target sequence for Ddef1 (NM_010026.1,1704-1722).
ccgtgcgtaaagagtacat

SEQ ID NO: 458028 - DNA, 19 bp, Mus musculus
  siRNA target sequence for Ddef1 (NM_010026.1,1717-1735).
gtacatcactgcaaagtat

SEQ ID NO: 458029 - DNA, 19 bp, Mus musculus
  siRNA target sequence for Ddef1 (NM_010026.1,1813-1831).
cagggacttacttgcatta

SEQ ID NO: 458030 - DNA, 19 bp, Mus musculus
  siRNA target sequence for Ddef1 (NM_010026.1,1815-1833).
gggacttacttgcattaat

SEQ ID NO: 458031 - DNA, 19 bp, Mus musculus
  siRNA target sequence for Ddef1 (NM_010026.1,1819-1837).
cttacttgcattaatccaa

SEQ ID NO: 458032 - DNA, 19 bp, Mus musculus
  siRNA target sequence for Ddef1 (NM_010026.1,1996-2014).
gtctgtggggaatacagtt

SEQ ID NO: 458033 - DNA, 19 bp, Mus musculus
  siRNA target sequence for Ddef1 (NM_010026.1,2076-2094).
ccaccgtggacatcgttaa

SEQ ID NO: 458034 - DNA, 19 bp, Mus musculus
  siRNA target sequence for Ddef1 (NM_010026.1,2079-2097).
ccgtggacatcgttaacca

SEQ ID NO: 458035 - DNA, 19 bp, Mus musculus
  siRNA target sequence for Ddef1 (NM_010026.1,2103-2121).
gagaaactgccttggatat

SEQ ID NO: 458036 - DNA, 19 bp, Mus musculus
  siRNA target sequence for Ddef1 (NM_010026.1,2113-2131).
cttggatatagcaaagaga

SEQ ID NO: 458037 - DNA, 19 bp, Mus musculus
  siRNA target sequence for Ddef1 (NM_010026.1,2195-2213).
gtccacgtagagtatgagt

SEQ ID NO: 458038 - DNA, 19 bp, Mus musculus
  siRNA target sequence for Ddef1 (NM_010026.1,2268-2286).
caagcccgatcaaaaagga

SEQ ID NO: 458039 - DNA, 19 bp, Mus musculus
  siRNA target sequence for Ddef1 (NM_010026.1,2420-2438).
gcctctacgagcacagatt

SEQ ID NO: 458040 - DNA, 19 bp, Mus musculus
  siRNA target sequence for Ddef1 (NM_010026.1,2421-2439).
cctctacgagcacagattt

SEQ ID NO: 458041 - DNA, 19 bp, Mus musculus
  siRNA target sequence for Ddef1 (NM_010026.1,2547-2565).
gcagctccaccctatccaa

SEQ ID NO: 458042 - DNA, 19 bp, Mus musculus
  siRNA target sequence for Ddef1 (NM_010026.1,2655-2673).
caattccttggggtaatga

SEQ ID NO: 458043 - DNA, 19 bp, Mus musculus
  siRNA target sequence for Ddef1 (NM_010026.1,2672-2690).
gatgtgggcccatcatctt

SEQ ID NO: 458044 - DNA, 19 bp, Mus musculus
  siRNA target sequence for Ddef1 (NM_010026.1,2681-2699).
ccatcatcttcaagtaaga

SEQ ID NO: 458045 - DNA, 19 bp, Mus musculus
  siRNA target sequence for Ddef1 (NM_010026.1,2691-2709).
caagtaagacggcaaacaa

SEQ ID NO: 458046 - DNA, 19 bp, Mus musculus
  siRNA target sequence for Ddef1 (NM_010026.1,2694-2712).
gtaagacggcaaacaagtt

SEQ ID NO: 458047 - DNA, 19 bp, Mus musculus
  siRNA target sequence for Ddef1 (NM_010026.1,2737-2755).
caccagttctgctaagact

SEQ ID NO: 458048 - DNA, 19 bp, Mus musculus
  siRNA target sequence for Ddef1 (NM_010026.1,2763-2781).
gcccgagagtgcttcctaa

SEQ ID NO: 458049 - DNA, 19 bp, Mus musculus
  siRNA target sequence for Ddef1 (NM_010026.1,2764-2782).
cccgagagtgcttcctaaa

SEQ ID NO: 458050 - DNA, 19 bp, Mus musculus
  siRNA target sequence for Ddef1 (NM_010026.1,2766-2784).
cgagagtgcttcctaaact

SEQ ID NO: 458051 - DNA, 19 bp, Mus musculus
  siRNA target sequence for Ddef1 (NM_010026.1,2767-2785).
gagagtgcttcctaaacta

SEQ ID NO: 458052 - DNA, 19 bp, Mus musculus
  siRNA target sequence for Ddef1 (NM_010026.1,2811-2829).
cggagaccagccatcatct

SEQ ID NO: 458053 - DNA, 19 bp, Mus musculus
  siRNA target sequence for Ddef1 (NM_010026.1,2992-3010).
ccctaagccccaattaggt

SEQ ID NO: 458054 - DNA, 19 bp, Mus musculus
  siRNA target sequence for Ddef1 (NM_010026.1,3174-3192).
gggatctgtctccaaatgt

SEQ ID NO: 458055 - DNA, 19 bp, Mus musculus
  siRNA target sequence for Ddef1 (NM_010026.1,3268-3286).
cgtaccactgccgagaaaa

SEQ ID NO: 458056 - DNA, 19 bp, Mus musculus
  siRNA target sequence for Ddef1 (NM_010026.1,3269-3287).
gtaccactgccgagaaaaa

SEQ ID NO: 458057 - DNA, 19 bp, Mus musculus
  siRNA target sequence for Ddef1 (NM_010026.1,3312-3330).
ggcgggtgaagaccattta

SEQ ID NO: 458058 - DNA, 19 bp, Mus musculus
  siRNA target sequence for Ddef1 (NM_010026.1,3313-3331).
gcgggtgaagaccatttat

SEQ ID NO: 458059 - DNA, 19 bp, Mus musculus
  siRNA target sequence for Ddef1 (NM_010026.1,3350-3368).
gacgacgaactcacattta

SEQ ID NO: 458060 - DNA, 19 bp, Mus musculus
  siRNA target sequence for Ddef1 (NM_010026.1,3352-3370).
cgacgaactcacatttatt

SEQ ID NO: 458061 - DNA, 19 bp, Mus musculus
  siRNA target sequence for Ddef1 (NM_010026.1,3415-3433).
gtggatcgggcatatcgaa

SEQ ID NO: 458062 - DNA, 19 bp, Mus musculus
  siRNA target sequence for Ddit3 (NM_007837.2,279-297).
ctcatccccaggaaacgaa

SEQ ID NO: 458063 - DNA, 19 bp, Mus musculus
  siRNA target sequence for Ddit3 (NM_007837.2,304-322).
gaatcaaaaaccttcacta

SEQ ID NO: 458064 - DNA, 19 bp, Mus musculus
  siRNA target sequence for Ddx20 (NM_017397.2,438-456).
gcgctgcgggctcgattta

SEQ ID NO: 458065 - DNA, 19 bp, Mus musculus
  siRNA target sequence for Ddx20 (NM_017397.2,439-457).
cgctgcgggctcgatttaa

SEQ ID NO: 458066 - DNA, 19 bp, Mus musculus
  siRNA target sequence for Ddx20 (NM_017397.2,440-458).
gctgcgggctcgatttaat

SEQ ID NO: 458067 - DNA, 19 bp, Mus musculus
  siRNA target sequence for Ddx20 (NM_017397.2,441-459).
ctgcgggctcgatttaatt

SEQ ID NO: 458068 - DNA, 19 bp, Mus musculus
  siRNA target sequence for Ddx20 (NM_017397.2,477-495).
cactggaaaaacttgtgta

SEQ ID NO: 458069 - DNA, 19 bp, Mus musculus
  siRNA target sequence for Ddx20 (NM_017397.2,518-536).
ctctgattcttgaaaacta

SEQ ID NO: 458070 - DNA, 19 bp, Mus musculus
  siRNA target sequence for Ddx20 (NM_017397.2,558-576).
ggctcccacaagagaaatt

SEQ ID NO: 458071 - DNA, 19 bp, Mus musculus
  siRNA target sequence for Ddx20 (NM_017397.2,583-601).
cagatacactcggttatca

SEQ ID NO: 458072 - DNA, 19 bp, Mus musculus
  siRNA target sequence for Ddx20 (NM_017397.2,585-603).
gatacactcggttatcaca

SEQ ID NO: 458073 - DNA, 19 bp, Mus musculus
  siRNA target sequence for Ddx20 (NM_017397.2,605-623).
ccattggaataaaaatgga

SEQ ID NO: 458074 - DNA, 19 bp, Mus musculus
  siRNA target sequence for Ddx20 (NM_017397.2,626-644).
gattagaatgtcatgtctt

SEQ ID NO: 458075 - DNA, 19 bp, Mus musculus
  siRNA target sequence for Ddx20 (NM_017397.2,710-728).
ctcctggtagaattaaaca

SEQ ID NO: 458076 - DNA, 19 bp, Mus musculus
  siRNA target sequence for Ddx20 (NM_017397.2,756-774).
gggcagtatccgtctcttt

SEQ ID NO: 458077 - DNA, 19 bp, Mus musculus
  siRNA target sequence for Ddx20 (NM_017397.2,757-775).
ggcagtatccgtctcttta

SEQ ID NO: 458078 - DNA, 19 bp, Mus musculus
  siRNA target sequence for Ddx20 (NM_017397.2,758-776).
gcagtatccgtctctttat

SEQ ID NO: 458079 - DNA, 19 bp, Mus musculus
  siRNA target sequence for Ddx20 (NM_017397.2,761-779).
gtatccgtctctttattct

SEQ ID NO: 458080 - DNA, 19 bp, Mus musculus
  siRNA target sequence for Ddx20 (NM_017397.2,765-783).
ccgtctctttattcttgat

SEQ ID NO: 458081 - DNA, 19 bp, Mus musculus
  siRNA target sequence for Ddx20 (NM_017397.2,817-835).
caggagcaaataaattgga

SEQ ID NO: 458082 - DNA, 19 bp, Mus musculus
  siRNA target sequence for Ddx20 (NM_017397.2,819-837).
ggagcaaataaattggatt

SEQ ID NO: 458083 - DNA, 19 bp, Mus musculus
  siRNA target sequence for Ddx20 (NM_017397.2,820-838).
gagcaaataaattggattt

SEQ ID NO: 458084 - DNA, 19 bp, Mus musculus
  siRNA target sequence for Ddx20 (NM_017397.2,823-841).
caaataaattggatttact

SEQ ID NO: 458085 - DNA, 19 bp, Mus musculus
  siRNA target sequence for Ddx20 (NM_017397.2,834-852).
gatttactcctctttacct

SEQ ID NO: 458086 - DNA, 19 bp, Mus musculus
  siRNA target sequence for Ddx20 (NM_017397.2,851-869).
ctgcgagtaagcagatgtt

SEQ ID NO: 458087 - DNA, 19 bp, Mus musculus
  siRNA target sequence for Ddx20 (NM_017397.2,880-898).
gctacttaccctgaagttt

SEQ ID NO: 458088 - DNA, 19 bp, Mus musculus
  siRNA target sequence for Ddx20 (NM_017397.2,907-925).
gctttgacaaggtatatga

SEQ ID NO: 458089 - DNA, 19 bp, Mus musculus
  siRNA target sequence for Ddx20 (NM_017397.2,928-946).
gatcccacttttgtaagat

SEQ ID NO: 458090 - DNA, 19 bp, Mus musculus
  siRNA target sequence for Ddx20 (NM_017397.2,933-951).
cacttttgtaagattgaat

SEQ ID NO: 458091 - DNA, 19 bp, Mus musculus
  siRNA target sequence for Ddx20 (NM_017397.2,954-972).
cagcgatccaagtctcata

SEQ ID NO: 458092 - DNA, 19 bp, Mus musculus
  siRNA target sequence for Ddx20 (NM_017397.2,958-976).
gatccaagtctcataggtt

SEQ ID NO: 458093 - DNA, 19 bp, Mus musculus
  siRNA target sequence for Ddx20 (NM_017397.2,984-1002).
gtactaccaagttgtcaat

SEQ ID NO: 458094 - DNA, 19 bp, Mus musculus
  siRNA target sequence for Ddx20 (NM_017397.2,987-1005).
ctaccaagttgtcaattct

SEQ ID NO: 458095 - DNA, 19 bp, Mus musculus
  siRNA target sequence for Ddx20 (NM_017397.2,1004-1022).
cttaccctttggctcataa

SEQ ID NO: 458096 - DNA, 19 bp, Mus musculus
  siRNA target sequence for Ddx20 (NM_017397.2,1064-1082).
gtaaagtcccatttaatca

SEQ ID NO: 458097 - DNA, 19 bp, Mus musculus
  siRNA target sequence for Ddx20 (NM_017397.2,1104-1122).
gcacagcagagctcaacat

SEQ ID NO: 458098 - DNA, 19 bp, Mus musculus
  siRNA target sequence for Ddx20 (NM_017397.2,1163-1181).
gcatttcaggtaacatgaa

SEQ ID NO: 458099 - DNA, 19 bp, Mus musculus
  siRNA target sequence for Ddx20 (NM_017397.2,1208-1226).
ctaaactgaagcagtttca

SEQ ID NO: 458100 - DNA, 19 bp, Mus musculus
  siRNA target sequence for Ddx20 (NM_017397.2,1272-1290).
cgcagagaaggtgaatcta

SEQ ID NO: 458101 - DNA, 19 bp, Mus musculus
  siRNA target sequence for Ddx20 (NM_017397.2,1281-1299).
ggtgaatctagttgtaaat

SEQ ID NO: 458102 - DNA, 19 bp, Mus musculus
  siRNA target sequence for Ddx20 (NM_017397.2,1310-1328).
cgttagactgggagactta

SEQ ID NO: 458103 - DNA, 19 bp, Mus musculus
  siRNA target sequence for Ddx20 (NM_017397.2,1344-1362).
cagagctggccgttttggt

SEQ ID NO: 458104 - DNA, 19 bp, Mus musculus
  siRNA target sequence for Ddx20 (NM_017397.2,1349-1367).
ctggccgttttggtacatt

SEQ ID NO: 458105 - DNA, 19 bp, Mus musculus
  siRNA target sequence for Ddx20 (NM_017397.2,1372-1390).
ctgacagtgacctactgtt

SEQ ID NO: 458106 - DNA, 19 bp, Mus musculus
  siRNA target sequence for Ddx20 (NM_017397.2,1513-1531).
gttaaagctgccatgcata

SEQ ID NO: 458107 - DNA, 19 bp, Mus musculus
  siRNA target sequence for Ddx20 (NM_017397.2,1562-1580).
cccccaaaaagcaagttca

SEQ ID NO: 458108 - DNA, 19 bp, Mus musculus
  siRNA target sequence for Ddx20 (NM_017397.2,1563-1581).
ccccaaaaagcaagttcaa

SEQ ID NO: 458109 - DNA, 19 bp, Mus musculus
  siRNA target sequence for Ddx20 (NM_017397.2,1629-1647).
gccttcccctagaaatact

SEQ ID NO: 458110 - DNA, 19 bp, Mus musculus
  siRNA target sequence for Ddx20 (NM_017397.2,1630-1648).
ccttcccctagaaatactt

SEQ ID NO: 458111 - DNA, 19 bp, Mus musculus
  siRNA target sequence for Ddx20 (NM_017397.2,1773-1791).
ggaagagcaagttaagaat

SEQ ID NO: 458112 - DNA, 19 bp, Mus musculus
  siRNA target sequence for Ddx20 (NM_017397.2,1779-1797).
gcaagttaagaattctgtt

SEQ ID NO: 458113 - DNA, 19 bp, Mus musculus
  siRNA target sequence for Ddx20 (NM_017397.2,1855-1873).
cctgggtcactccctaaaa

SEQ ID NO: 458114 - DNA, 19 bp, Mus musculus
  siRNA target sequence for Ddx20 (NM_017397.2,1876-1894).
ccttgtctgtcttctttta

SEQ ID NO: 458115 - DNA, 19 bp, Mus musculus
  siRNA target sequence for Ddx20 (NM_017397.2,1897-1915).
gtccatcagccgtctactt

SEQ ID NO: 458116 - DNA, 19 bp, Mus musculus
  siRNA target sequence for Ddx20 (NM_017397.2,1900-1918).
catcagccgtctactttga

SEQ ID NO: 458117 - DNA, 19 bp, Mus musculus
  siRNA target sequence for Ddx20 (NM_017397.2,1925-1943).
cagaactggtagacgatta

SEQ ID NO: 458118 - DNA, 19 bp, Mus musculus
  siRNA target sequence for Ddx20 (NM_017397.2,1936-1954).
gacgattatgagcactata

SEQ ID NO: 458119 - DNA, 19 bp, Mus musculus
  siRNA target sequence for Ddx20 (NM_017397.2,1938-1956).
cgattatgagcactatatt

SEQ ID NO: 458120 - DNA, 19 bp, Mus musculus
  siRNA target sequence for Ddx20 (NM_017397.2,2037-2055).
ctttgtgagaaatagagtt

SEQ ID NO: 458121 - DNA, 19 bp, Mus musculus
  siRNA target sequence for Ddx20 (NM_017397.2,2144-2162).
cccagagcaaaggtaataa

SEQ ID NO: 458122 - DNA, 19 bp, Mus musculus
  siRNA target sequence for Ddx20 (NM_017397.2,2150-2168).
gcaaaggtaataagtctta

SEQ ID NO: 458123 - DNA, 19 bp, Mus musculus
  siRNA target sequence for Ddx20 (NM_017397.2,2183-2201).
cagacactcagttgaaaga

SEQ ID NO: 458124 - DNA, 19 bp, Mus musculus
  siRNA target sequence for Ddx20 (NM_017397.2,2185-2203).
gacactcagttgaaagaca

SEQ ID NO: 458125 - DNA, 19 bp, Mus musculus
  siRNA target sequence for Ddx20 (NM_017397.2,2234-2252).
ctctggaacaagttcagaa

SEQ ID NO: 458126 - DNA, 19 bp, Mus musculus
  siRNA target sequence for Ddx20 (NM_017397.2,2267-2285).
cgactcaagtggagtatca

SEQ ID NO: 458127 - DNA, 19 bp, Mus musculus
  siRNA target sequence for Ddx20 (NM_017397.2,2270-2288).
ctcaagtggagtatcaaga

SEQ ID NO: 458128 - DNA, 19 bp, Mus musculus
  siRNA target sequence for Ddx20 (NM_017397.2,2361-2379).
cccagcacggcgttcttct

SEQ ID NO: 458129 - DNA, 19 bp, Mus musculus
  siRNA target sequence for Ddx20 (NM_017397.2,2363-2381).
cagcacggcgttcttctta

SEQ ID NO: 458130 - DNA, 19 bp, Mus musculus
  siRNA target sequence for Ddx20 (NM_017397.2,2404-2422).
gaagagagttggtatgact

SEQ ID NO: 458131 - DNA, 19 bp, Mus musculus
  siRNA target sequence for Ddx20 (NM_017397.2,2419-2437).
gactgtcacagggaaacaa

SEQ ID NO: 458132 - DNA, 19 bp, Mus musculus
  siRNA target sequence for Ddx20 (NM_017397.2,2421-2439).
ctgtcacagggaaacaact

SEQ ID NO: 458133 - DNA, 19 bp, Mus musculus
  siRNA target sequence for Ddx20 (NM_017397.2,2440-2458).
gcaagtttttctgatactt

SEQ ID NO: 458134 - DNA, 19 bp, Mus musculus
  siRNA target sequence for Ddx20 (NM_017397.2,2441-2459).
caagtttttctgatactta

SEQ ID NO: 458135 - DNA, 19 bp, Mus musculus
  siRNA target sequence for Ddx20 (NM_017397.2,2450-2468).
ctgatacttaccaggatta

SEQ ID NO: 458136 - DNA, 19 bp, Mus musculus
  siRNA target sequence for Ddx20 (NM_017397.2,2493-2511).
cagggcatggcaagagtat

SEQ ID NO: 458137 - DNA, 19 bp, Mus musculus
  siRNA target sequence for Ddx20 (NM_017397.2,2495-2513).
gggcatggcaagagtatta

SEQ ID NO: 458138 - DNA, 19 bp, Mus musculus
  siRNA target sequence for Ddx20 (NM_017397.2,2496-2514).
ggcatggcaagagtattat

SEQ ID NO: 458139 - DNA, 19 bp, Mus musculus
  siRNA target sequence for Ddx20 (NM_017397.2,2519-2537).
ctgcttcccattcatacta

SEQ ID NO: 458140 - DNA, 19 bp, Mus musculus
  siRNA target sequence for Ddx20 (NM_017397.2,2562-2580).
ctggatggctgcctatcat

SEQ ID NO: 458141 - DNA, 19 bp, Mus musculus
  siRNA target sequence for Ddx20 (NM_017397.2,2573-2591).
cctatcatatgaatacagt

SEQ ID NO: 458142 - DNA, 19 bp, Mus musculus
  siRNA target sequence for Ddx20 (NM_017397.2,2574-2592).
ctatcatatgaatacagtt

SEQ ID NO: 458143 - DNA, 19 bp, Mus musculus
  siRNA target sequence for Ddx20 (NM_017397.2,2604-2622).
gatgatgcgtggtaaccaa

SEQ ID NO: 458144 - DNA, 19 bp, Mus musculus
  siRNA target sequence for Ddx3x (NM_010028.1,172-190).
gcaagcaaagggcgttata

SEQ ID NO: 458145 - DNA, 19 bp, Mus musculus
  siRNA target sequence for Ddx3x (NM_010028.1,173-191).
caagcaaagggcgttatat

SEQ ID NO: 458146 - DNA, 19 bp, Mus musculus
  siRNA target sequence for Ddx3x (NM_010028.1,889-907).
ctggcaccaacgagagaat

SEQ ID NO: 458147 - DNA, 19 bp, Mus musculus
  siRNA target sequence for Ddx3x (NM_010028.1,1075-1093).
gggaagatcgggttagact

SEQ ID NO: 458148 - DNA, 19 bp, Mus musculus
  siRNA target sequence for Ddx3x (NM_010028.1,1076-1094).
ggaagatcgggttagactt

SEQ ID NO: 458149 - DNA, 19 bp, Mus musculus
  siRNA target sequence for Ddx3x (NM_010028.1,1962-1980).
cggcagtcgaggatttggt

SEQ ID NO: 458150 - DNA, 19 bp, Mus musculus
  siRNA target sequence for Deaf1 (NM_016874.1,127-145).
gaggagccggtgttaagca

SEQ ID NO: 458151 - DNA, 19 bp, Mus musculus
  siRNA target sequence for Deaf1 (NM_016874.1,229-247).
gaatctgggcacatggata

SEQ ID NO: 458152 - DNA, 19 bp, Mus musculus
  siRNA target sequence for Deaf1 (NM_016874.1,338-356).
ggtcctctgcagataacgt

SEQ ID NO: 458153 - DNA, 19 bp, Mus musculus
  siRNA target sequence for Deaf1 (NM_016874.1,346-364).
gcagataacgtcttcacaa

SEQ ID NO: 458154 - DNA, 19 bp, Mus musculus
  siRNA target sequence for Deaf1 (NM_016874.1,349-367).
gataacgtcttcacaacat

SEQ ID NO: 458155 - DNA, 19 bp, Mus musculus
  siRNA target sequence for Deaf1 (NM_016874.1,373-391).
gcaaacgcagcatcgatat

SEQ ID NO: 458156 - DNA, 19 bp, Mus musculus
  siRNA target sequence for Deaf1 (NM_016874.1,455-473).
ccacactaatagttgtaca

SEQ ID NO: 458157 - DNA, 19 bp, Mus musculus
  siRNA target sequence for Deaf1 (NM_016874.1,580-598).
ggtggtaccaagtacaact

SEQ ID NO: 458158 - DNA, 19 bp, Mus musculus
  siRNA target sequence for Deaf1 (NM_016874.1,599-617).
gggacccttcggtgtatga

SEQ ID NO: 458159 - DNA, 19 bp, Mus musculus
  siRNA target sequence for Deaf1 (NM_016874.1,601-619).
gacccttcggtgtatgaca

SEQ ID NO: 458160 - DNA, 19 bp, Mus musculus
  siRNA target sequence for Deaf1 (NM_016874.1,631-649).
gtgcgctgtcggaacatca

SEQ ID NO: 458161 - DNA, 19 bp, Mus musculus
  siRNA target sequence for Deaf1 (NM_016874.1,652-670).
ggcacgctctacaagagta

SEQ ID NO: 458162 - DNA, 19 bp, Mus musculus
  siRNA target sequence for Deaf1 (NM_016874.1,720-738).
gtacagcccaactgagttt

SEQ ID NO: 458163 - DNA, 19 bp, Mus musculus
  siRNA target sequence for Deaf1 (NM_016874.1,723-741).
cagcccaactgagtttgaa

SEQ ID NO: 458164 - DNA, 19 bp, Mus musculus
  siRNA target sequence for Deaf1 (NM_016874.1,863-881).
ccgcctgttgtgatgacat

SEQ ID NO: 458165 - DNA, 19 bp, Mus musculus
  siRNA target sequence for Deaf1 (NM_016874.1,902-920).
ggctcttcgtcccttataa

SEQ ID NO: 458166 - DNA, 19 bp, Mus musculus
  siRNA target sequence for Deaf1 (NM_016874.1,1027-1045).
ccctcaggacagatcacta

SEQ ID NO: 458167 - DNA, 19 bp, Mus musculus
  siRNA target sequence for Deaf1 (NM_016874.1,1253-1271).
caacatcacaccccaaaat

SEQ ID NO: 458168 - DNA, 19 bp, Mus musculus
  siRNA target sequence for Deaf1 (NM_016874.1,1256-1274).
catcacaccccaaaattgt

SEQ ID NO: 458169 - DNA, 19 bp, Mus musculus
  siRNA target sequence for Deaf1 (NM_016874.1,1489-1507).
gcgagaatgcaggttgata

SEQ ID NO: 458170 - DNA, 19 bp, Mus musculus
  siRNA target sequence for Deaf1 (NM_016874.1,1493-1511).
gaatgcaggttgatacaga

SEQ ID NO: 458171 - DNA, 19 bp, Mus musculus
  siRNA target sequence for Deaf1 (NM_016874.1,1565-1583).
ccggctgccacaaggttaa

SEQ ID NO: 458172 - DNA, 19 bp, Mus musculus
  siRNA target sequence for Deaf1 (NM_016874.1,1567-1585).
ggctgccacaaggttaact

SEQ ID NO: 458173 - DNA, 19 bp, Mus musculus
  siRNA target sequence for Deaf1 (NM_016874.1,1568-1586).
gctgccacaaggttaacta

SEQ ID NO: 458174 - DNA, 19 bp, Mus musculus
  siRNA target sequence for Dedd (NM_011615.2,207-225).
cgagtgctttccttccttt

SEQ ID NO: 458175 - DNA, 19 bp, Mus musculus
  siRNA target sequence for Dedd (NM_011615.2,306-324).
cgctgtgacgagagtaact

SEQ ID NO: 458176 - DNA, 19 bp, Mus musculus
  siRNA target sequence for Dedd (NM_011615.2,376-394).
cctacgttactctcaagaa

SEQ ID NO: 458177 - DNA, 19 bp, Mus musculus
  siRNA target sequence for Dedd (NM_011615.2,409-427).
gccctgatcttgtagacaa

SEQ ID NO: 458178 - DNA, 19 bp, Mus musculus
  siRNA target sequence for Dedd (NM_011615.2,542-560).
ccccacttcgggttctcaa

SEQ ID NO: 458179 - DNA, 19 bp, Mus musculus
  siRNA target sequence for Dedd (NM_011615.2,543-561).
cccacttcgggttctcaaa

SEQ ID NO: 458180 - DNA, 19 bp, Mus musculus
  siRNA target sequence for Dedd (NM_011615.2,544-562).
ccacttcgggttctcaaat

SEQ ID NO: 458181 - DNA, 19 bp, Mus musculus
  siRNA target sequence for Dedd (NM_011615.2,553-571).
gttctcaaatgtgtagtaa

SEQ ID NO: 458182 - DNA, 19 bp, Mus musculus
  siRNA target sequence for Dedd (NM_011615.2,634-652).
cagacccgaaggaaaagca

SEQ ID NO: 458183 - DNA, 19 bp, Mus musculus
  siRNA target sequence for Dedd (NM_011615.2,706-724).
ctctgcaaggcaatgtctt

SEQ ID NO: 458184 - DNA, 19 bp, Mus musculus
  siRNA target sequence for Dedd (NM_011615.2,714-732).
ggcaatgtcttctccaata

SEQ ID NO: 458185 - DNA, 19 bp, Mus musculus
  siRNA target sequence for Dedd (NM_011615.2,715-733).
gcaatgtcttctccaataa

SEQ ID NO: 458186 - DNA, 19 bp, Mus musculus
  siRNA target sequence for Dedd (NM_011615.2,853-871).
cattctggcgagactacat

SEQ ID NO: 458187 - DNA, 19 bp, Mus musculus
  siRNA target sequence for Dedd (NM_011615.2,857-875).
ctggcgagactacattaat

SEQ ID NO: 458188 - DNA, 19 bp, Mus musculus
  siRNA target sequence for Dedd (NM_011615.2,866-884).
ctacattaatggctcatta

SEQ ID NO: 458189 - DNA, 19 bp, Mus musculus
  siRNA target sequence for Dedd (NM_011615.2,869-887).
cattaatggctcattatta

SEQ ID NO: 458190 - DNA, 19 bp, Mus musculus
  siRNA target sequence for Dedd (NM_011615.2,894-912).
ctgaaaggtgtcttcatca

SEQ ID NO: 458191 - DNA, 19 bp, Mus musculus
  siRNA target sequence for Dek (NM_025900.1,261-279).
gatgcaagtgtcttcctta

SEQ ID NO: 458192 - DNA, 19 bp, Mus musculus
  siRNA target sequence for Dek (NM_025900.1,385-403).
ctacacaaactgctttaca

SEQ ID NO: 458193 - DNA, 19 bp, Mus musculus
  siRNA target sequence for Dek (NM_025900.1,416-434).
cagtgtcctcgttgaagaa

SEQ ID NO: 458194 - DNA, 19 bp, Mus musculus
  siRNA target sequence for Dek (NM_025900.1,473-491).
gcagtacccagtataaaaa

SEQ ID NO: 458195 - DNA, 19 bp, Mus musculus
  siRNA target sequence for Dek (NM_025900.1,504-522).
gttgaaaaagtttcgaaat

SEQ ID NO: 458196 - DNA, 19 bp, Mus musculus
  siRNA target sequence for Dek (NM_025900.1,537-555).
catctgtgaggttcttgat

SEQ ID NO: 458197 - DNA, 19 bp, Mus musculus
  siRNA target sequence for Dek (NM_025900.1,542-560).
gtgaggttcttgatttaga

SEQ ID NO: 458198 - DNA, 19 bp, Mus musculus
  siRNA target sequence for Dek (NM_025900.1,593-611).
ggatcttgaacttcttaat

SEQ ID NO: 458199 - DNA, 19 bp, Mus musculus
  siRNA target sequence for Dek (NM_025900.1,626-644).
ctggcaaaccattaccaaa

SEQ ID NO: 458200 - DNA, 19 bp, Mus musculus
  siRNA target sequence for Dek (NM_025900.1,640-658).
ccaaaatccaaaaaatctt

SEQ ID NO: 458201 - DNA, 19 bp, Mus musculus
  siRNA target sequence for Dek (NM_025900.1,656-674).
cttccagcaaaggtagtaa

SEQ ID NO: 458202 - DNA, 19 bp, Mus musculus
  siRNA target sequence for Dek (NM_025900.1,662-680).
gcaaaggtagtaaaaagga

SEQ ID NO: 458203 - DNA, 19 bp, Mus musculus
  siRNA target sequence for Dek (NM_025900.1,719-737).
ctaaatgccctgaaattct

SEQ ID NO: 458204 - DNA, 19 bp, Mus musculus
  siRNA target sequence for Dek (NM_025900.1,736-754).
ctgtcagatgagtctagta

SEQ ID NO: 458205 - DNA, 19 bp, Mus musculus
  siRNA target sequence for Dek (NM_025900.1,738-756).
gtcagatgagtctagtagt

SEQ ID NO: 458206 - DNA, 19 bp, Mus musculus
  siRNA target sequence for Dek (NM_025900.1,817-835).
gaggagcaaccaccaaaaa

SEQ ID NO: 458207 - DNA, 19 bp, Mus musculus
  siRNA target sequence for Dek (NM_025900.1,868-886).
gctactgctaaaagtaaaa

SEQ ID NO: 458208 - DNA, 19 bp, Mus musculus
  siRNA target sequence for Dek (NM_025900.1,890-908).
ctgtgaagagtgctaatgt

SEQ ID NO: 458209 - DNA, 19 bp, Mus musculus
  siRNA target sequence for Dek (NM_025900.1,926-944).
gtaccaccaagaagaatca

SEQ ID NO: 458210 - DNA, 19 bp, Mus musculus
  siRNA target sequence for Dek (NM_025900.1,985-1003).
gatgatgaacccttaatta

SEQ ID NO: 458211 - DNA, 19 bp, Mus musculus
  siRNA target sequence for Dek (NM_025900.1,988-1006).
gatgaacccttaattaaaa

SEQ ID NO: 458212 - DNA, 19 bp, Mus musculus
  siRNA target sequence for Dek (NM_025900.1,1144-1162).
gagaggaaagatttcatta

SEQ ID NO: 458213 - DNA, 19 bp, Mus musculus
  siRNA target sequence for Dhx9 (NM_007842.1,155-173).
gatgactccagcctatgaa

SEQ ID NO: 458214 - DNA, 19 bp, Mus musculus
  siRNA target sequence for Dhx9 (NM_007842.1,212-230).
gtgtgaggttcgagtagaa

SEQ ID NO: 458215 - DNA, 19 bp, Mus musculus
  siRNA target sequence for Dhx9 (NM_007842.1,251-269).
gggcaattccaccaataaa

SEQ ID NO: 458216 - DNA, 19 bp, Mus musculus
  siRNA target sequence for Dhx9 (NM_007842.1,288-306).
gctgccagagactttgtta

SEQ ID NO: 458217 - DNA, 19 bp, Mus musculus
  siRNA target sequence for Dhx9 (NM_007842.1,293-311).
cagagactttgttaactat

SEQ ID NO: 458218 - DNA, 19 bp, Mus musculus
  siRNA target sequence for Dhx9 (NM_007842.1,308-326).
ctatttggttcgaataaat

SEQ ID NO: 458219 - DNA, 19 bp, Mus musculus
  siRNA target sequence for Dhx9 (NM_007842.1,314-332).
ggttcgaataaatgaagta

SEQ ID NO: 458220 - DNA, 19 bp, Mus musculus
  siRNA target sequence for Dhx9 (NM_007842.1,315-333).
gttcgaataaatgaagtaa

SEQ ID NO: 458221 - DNA, 19 bp, Mus musculus
  siRNA target sequence for Dhx9 (NM_007842.1,381-399).
cttagcgacacctctgata

SEQ ID NO: 458222 - DNA, 19 bp, Mus musculus
  siRNA target sequence for Dhx9 (NM_007842.1,533-551).
ccgaggagccaaccttaaa

SEQ ID NO: 458223 - DNA, 19 bp, Mus musculus
  siRNA target sequence for Dhx9 (NM_007842.1,538-556).
gagccaaccttaaagatta

SEQ ID NO: 458224 - DNA, 19 bp, Mus musculus
  siRNA target sequence for Dhx9 (NM_007842.1,540-558).
gccaaccttaaagattact

SEQ ID NO: 458225 - DNA, 19 bp, Mus musculus
  siRNA target sequence for Dhx9 (NM_007842.1,541-559).
ccaaccttaaagattacta

SEQ ID NO: 458226 - DNA, 19 bp, Mus musculus
  siRNA target sequence for Dhx9 (NM_007842.1,624-642).
gggcttcatggaaattgga

SEQ ID NO: 458227 - DNA, 19 bp, Mus musculus
  siRNA target sequence for Dhx9 (NM_007842.1,640-658).
ggacactggaaaatgctaa

SEQ ID NO: 458228 - DNA, 19 bp, Mus musculus
  siRNA target sequence for Dhx9 (NM_007842.1,734-752).
caacaggagctttattgca

SEQ ID NO: 458229 - DNA, 19 bp, Mus musculus
  siRNA target sequence for Dhx9 (NM_007842.1,788-806).
gattttcgcacgtgaacat

SEQ ID NO: 458230 - DNA, 19 bp, Mus musculus
  siRNA target sequence for Dhx9 (NM_007842.1,885-903).
gcttactctgggcttacaa

SEQ ID NO: 458231 - DNA, 19 bp, Mus musculus
  siRNA target sequence for Dhx9 (NM_007842.1,980-998).
ggttcaagagctagatctt

SEQ ID NO: 458232 - DNA, 19 bp, Mus musculus
  siRNA target sequence for Dhx9 (NM_007842.1,1012-1030).
cacctgttgatccttctat

SEQ ID NO: 458233 - DNA, 19 bp, Mus musculus
  siRNA target sequence for Dhx9 (NM_007842.1,1024-1042).
cttctatgccagttatact

SEQ ID NO: 458234 - DNA, 19 bp, Mus musculus
  siRNA target sequence for Dhx9 (NM_007842.1,1031-1049).
gccagttatacttaacatt

SEQ ID NO: 458235 - DNA, 19 bp, Mus musculus
  siRNA target sequence for Dhx9 (NM_007842.1,1051-1069).
ggaaattggctcattttga

SEQ ID NO: 458236 - DNA, 19 bp, Mus musculus
  siRNA target sequence for Dhx9 (NM_007842.1,1052-1070).
gaaattggctcattttgaa

SEQ ID NO: 458237 - DNA, 19 bp, Mus musculus
  siRNA target sequence for Dhx9 (NM_007842.1,1138-1156).
ggacaagtagcaacattga

SEQ ID NO: 458238 - DNA, 19 bp, Mus musculus
  siRNA target sequence for Dhx9 (NM_007842.1,1139-1157).
gacaagtagcaacattgat

SEQ ID NO: 458239 - DNA, 19 bp, Mus musculus
  siRNA target sequence for Dhx9 (NM_007842.1,1160-1178).
gggaccccttgcttatgct

SEQ ID NO: 458240 - DNA, 19 bp, Mus musculus
  siRNA target sequence for Dhx9 (NM_007842.1,1161-1179).
ggaccccttgcttatgctt

SEQ ID NO: 458241 - DNA, 19 bp, Mus musculus
  siRNA target sequence for Dhx9 (NM_007842.1,1180-1198).
ctacagaacaaataagcat

SEQ ID NO: 458242 - DNA, 19 bp, Mus musculus
  siRNA target sequence for Dhx9 (NM_007842.1,1196-1214).
catggaccttaagaatgaa

SEQ ID NO: 458243 - DNA, 19 bp, Mus musculus
  siRNA target sequence for Dhx9 (NM_007842.1,1226-1244).
gatggaacaagatcataat

SEQ ID NO: 458244 - DNA, 19 bp, Mus musculus
  siRNA target sequence for Dhx9 (NM_007842.1,1229-1247).
ggaacaagatcataattta

SEQ ID NO: 458245 - DNA, 19 bp, Mus musculus
  siRNA target sequence for Dhx9 (NM_007842.1,1307-1325).
ggaagccattagttcaaat

SEQ ID NO: 458246 - DNA, 19 bp, Mus musculus
  siRNA target sequence for Dhx9 (NM_007842.1,1318-1336).
gttcaaattcagttgtgat

SEQ ID NO: 458247 - DNA, 19 bp, Mus musculus
  siRNA target sequence for Dhx9 (NM_007842.1,1321-1339).
caaattcagttgtgattat

SEQ ID NO: 458248 - DNA, 19 bp, Mus musculus
  siRNA target sequence for Dhx9 (NM_007842.1,1369-1387).
cacaagttccacagtacat

SEQ ID NO: 458249 - DNA, 19 bp, Mus musculus
  siRNA target sequence for Dhx9 (NM_007842.1,1371-1389).
caagttccacagtacattt

SEQ ID NO: 458250 - DNA, 19 bp, Mus musculus
  siRNA target sequence for Dhx9 (NM_007842.1,1412-1430).
cagagcagccgaatgcaat

SEQ ID NO: 458251 - DNA, 19 bp, Mus musculus
  siRNA target sequence for Dhx9 (NM_007842.1,1414-1432).
gagcagccgaatgcaatat

SEQ ID NO: 458252 - DNA, 19 bp, Mus musculus
  siRNA target sequence for Dhx9 (NM_007842.1,1472-1490).
ggcagagcgagttgcttat

SEQ ID NO: 458253 - DNA, 19 bp, Mus musculus
  siRNA target sequence for Dhx9 (NM_007842.1,1474-1492).
cagagcgagttgcttatga

SEQ ID NO: 458254 - DNA, 19 bp, Mus musculus
  siRNA target sequence for Dhx9 (NM_007842.1,1476-1494).
gagcgagttgcttatgaga

SEQ ID NO: 458255 - DNA, 19 bp, Mus musculus
  siRNA target sequence for Dhx9 (NM_007842.1,1519-1537).
gtggttacagtgttcgatt

SEQ ID NO: 458256 - DNA, 19 bp, Mus musculus
  siRNA target sequence for Dhx9 (NM_007842.1,1522-1540).
gttacagtgttcgatttga

SEQ ID NO: 458257 - DNA, 19 bp, Mus musculus
  siRNA target sequence for Dhx9 (NM_007842.1,1528-1546).
gtgttcgatttgagtctat

SEQ ID NO: 458258 - DNA, 19 bp, Mus musculus
  siRNA target sequence for Dhx9 (NM_007842.1,1554-1572).
cgccctcatgccagtataa

SEQ ID NO: 458259 - DNA, 19 bp, Mus musculus
  siRNA target sequence for Dhx9 (NM_007842.1,1555-1573).
gccctcatgccagtataat

SEQ ID NO: 458260 - DNA, 19 bp, Mus musculus
  siRNA target sequence for Dhx9 (NM_007842.1,1557-1575).
cctcatgccagtataatgt

SEQ ID NO: 458261 - DNA, 19 bp, Mus musculus
  siRNA target sequence for Dhx9 (NM_007842.1,1558-1576).
ctcatgccagtataatgtt

SEQ ID NO: 458262 - DNA, 19 bp, Mus musculus
  siRNA target sequence for Dhx9 (NM_007842.1,1563-1581).
gccagtataatgttttgta

SEQ ID NO: 458263 - DNA, 19 bp, Mus musculus
  siRNA target sequence for Dhx9 (NM_007842.1,1584-1602).
gtaggtgtgcttctaagaa

SEQ ID NO: 458264 - DNA, 19 bp, Mus musculus
  siRNA target sequence for Dhx9 (NM_007842.1,1613-1631).
cggcattcgaggaatcagt

SEQ ID NO: 458265 - DNA, 19 bp, Mus musculus
  siRNA target sequence for Dhx9 (NM_007842.1,1620-1638).
cgaggaatcagtcatgtta

SEQ ID NO: 458266 - DNA, 19 bp, Mus musculus
  siRNA target sequence for Dhx9 (NM_007842.1,1621-1639).
gaggaatcagtcatgttat

SEQ ID NO: 458267 - DNA, 19 bp, Mus musculus
  siRNA target sequence for Dhx9 (NM_007842.1,1624-1642).
gaatcagtcatgttattgt

SEQ ID NO: 458268 - DNA, 19 bp, Mus musculus
  siRNA target sequence for Dhx9 (NM_007842.1,1653-1671).
catgaaagagatattaata

SEQ ID NO: 458269 - DNA, 19 bp, Mus musculus
  siRNA target sequence for Dhx9 (NM_007842.1,1717-1735).
ctgaagtccgtattgttct

SEQ ID NO: 458270 - DNA, 19 bp, Mus musculus
  siRNA target sequence for Dhx9 (NM_007842.1,1719-1737).
gaagtccgtattgttctta

SEQ ID NO: 458271 - DNA, 19 bp, Mus musculus
  siRNA target sequence for Dhx9 (NM_007842.1,1722-1740).
gtccgtattgttcttatgt

SEQ ID NO: 458272 - DNA, 19 bp, Mus musculus
  siRNA target sequence for Dhx9 (NM_007842.1,1724-1742).
ccgtattgttcttatgtct

SEQ ID NO: 458273 - DNA, 19 bp, Mus musculus
  siRNA target sequence for Dhx9 (NM_007842.1,1756-1774).
ccaccatgttctgtgaata

SEQ ID NO: 458274 - DNA, 19 bp, Mus musculus
  siRNA target sequence for Dhx9 (NM_007842.1,1813-1831).
ctttcccagttcaagagta

SEQ ID NO: 458275 - DNA, 19 bp, Mus musculus
  siRNA target sequence for Dhx9 (NM_007842.1,1819-1837).
cagttcaagagtattttct

SEQ ID NO: 458276 - DNA, 19 bp, Mus musculus
  siRNA target sequence for Dhx9 (NM_007842.1,1926-1944).
gatgcaaattgcaacctaa

SEQ ID NO: 458277 - DNA, 19 bp, Mus musculus
  siRNA target sequence for Dhx9 (NM_007842.1,1955-1973).
cgaatatgggccagaaaca

SEQ ID NO: 458278 - DNA, 19 bp, Mus musculus
  siRNA target sequence for Dhx9 (NM_007842.1,2008-2026).
ctccttttgaacttattga

SEQ ID NO: 458279 - DNA, 19 bp, Mus musculus
  siRNA target sequence for Dhx9 (NM_007842.1,2019-2037).
cttattgaggcgcttctta

SEQ ID NO: 458280 - DNA, 19 bp, Mus musculus
  siRNA target sequence for Dhx9 (NM_007842.1,2025-2043).
gaggcgcttcttaaataca

SEQ ID NO: 458281 - DNA, 19 bp, Mus musculus
  siRNA target sequence for Dhx9 (NM_007842.1,2027-2045).
ggcgcttcttaaatacatt

SEQ ID NO: 458282 - DNA, 19 bp, Mus musculus
  siRNA target sequence for Dhx9 (NM_007842.1,2042-2060).
cattgaaacccttaatgtt

SEQ ID NO: 458283 - DNA, 19 bp, Mus musculus
  siRNA target sequence for Dhx9 (NM_007842.1,2107-2125).
ctatgcaaaagcatttaga

SEQ ID NO: 458284 - DNA, 19 bp, Mus musculus
  siRNA target sequence for Dhx9 (NM_007842.1,2142-2160).
ggaagtcaccggtatcaga

SEQ ID NO: 458285 - DNA, 19 bp, Mus musculus
  siRNA target sequence for Dhx9 (NM_007842.1,2143-2161).
gaagtcaccggtatcagat

SEQ ID NO: 458286 - DNA, 19 bp, Mus musculus
  siRNA target sequence for Dhx9 (NM_007842.1,2146-2164).
gtcaccggtatcagattct

SEQ ID NO: 458287 - DNA, 19 bp, Mus musculus
  siRNA target sequence for Dhx9 (NM_007842.1,2192-2210).
ggaacagcgcaaagtgttt

SEQ ID NO: 458288 - DNA, 19 bp, Mus musculus
  siRNA target sequence for Dhx9 (NM_007842.1,2223-2241).
gatggagtaaccaaggtta

SEQ ID NO: 458289 - DNA, 19 bp, Mus musculus
  siRNA target sequence for Dhx9 (NM_007842.1,2226-2244).
ggagtaaccaaggttattt

SEQ ID NO: 458290 - DNA, 19 bp, Mus musculus
  siRNA target sequence for Dhx9 (NM_007842.1,2259-2277).
gctgaaacaagcattacca

SEQ ID NO: 458291 - DNA, 19 bp, Mus musculus
  siRNA target sequence for Dhx9 (NM_007842.1,2286-2304).
gttgtttacgtcattgact

SEQ ID NO: 458292 - DNA, 19 bp, Mus musculus
  siRNA target sequence for Dhx9 (NM_007842.1,2339-2357).
caacaatatgaccaactat

SEQ ID NO: 458293 - DNA, 19 bp, Mus musculus
  siRNA target sequence for Dhx9 (NM_007842.1,2348-2366).
gaccaactatgctactgta

SEQ ID NO: 458294 - DNA, 19 bp, Mus musculus
  siRNA target sequence for Dhx9 (NM_007842.1,2429-2447).
ctgtttccacctttgtagt

SEQ ID NO: 458295 - DNA, 19 bp, Mus musculus
  siRNA target sequence for Dhx9 (NM_007842.1,2443-2461).
gtagtcgagctcgttttga

SEQ ID NO: 458296 - DNA, 19 bp, Mus musculus
  siRNA target sequence for Dhx9 (NM_007842.1,2492-2510).
gtttagaacaccattgcat

SEQ ID NO: 458297 - DNA, 19 bp, Mus musculus
  siRNA target sequence for Dhx9 (NM_007842.1,2511-2529).
gaaattgctctgagcataa

SEQ ID NO: 458298 - DNA, 19 bp, Mus musculus
  siRNA target sequence for Dhx9 (NM_007842.1,2518-2536).
ctctgagcataaaacttct

SEQ ID NO: 458299 - DNA, 19 bp, Mus musculus
  siRNA target sequence for Dhx9 (NM_007842.1,2561-2579).
ccttgcaaaggcaatcgaa

SEQ ID NO: 458300 - DNA, 19 bp, Mus musculus
  siRNA target sequence for Dhx9 (NM_007842.1,2576-2594).
cgaacctccacctttggat

SEQ ID NO: 458301 - DNA, 19 bp, Mus musculus
  siRNA target sequence for Dhx9 (NM_007842.1,2612-2630).
gcatactctaagagaactt

SEQ ID NO: 458302 - DNA, 19 bp, Mus musculus
  siRNA target sequence for Dhx9 (NM_007842.1,2623-2641).
gagaacttgatgctttaga

SEQ ID NO: 458303 - DNA, 19 bp, Mus musculus
  siRNA target sequence for Dhx9 (NM_007842.1,2668-2686).
gacgaatcctggctaaact

SEQ ID NO: 458304 - DNA, 19 bp, Mus musculus
  siRNA target sequence for Dhx9 (NM_007842.1,2678-2696).
ggctaaactccccattgaa

SEQ ID NO: 458305 - DNA, 19 bp, Mus musculus
  siRNA target sequence for Dhx9 (NM_007842.1,2687-2705).
ccccattgaacctcgtttt

SEQ ID NO: 458306 - DNA, 19 bp, Mus musculus
  siRNA target sequence for Dhx9 (NM_007842.1,2698-2716).
ctcgttttggaaaaatgat

SEQ ID NO: 458307 - DNA, 19 bp, Mus musculus
  siRNA target sequence for Dhx9 (NM_007842.1,2776-2794).
gcttcccagaaccctttat

SEQ ID NO: 458308 - DNA, 19 bp, Mus musculus
  siRNA target sequence for Dhx9 (NM_007842.1,2789-2807).
ctttatcagcgaaggaaaa

SEQ ID NO: 458309 - DNA, 19 bp, Mus musculus
  siRNA target sequence for Dhx9 (NM_007842.1,2815-2833).
gatacatacaccggaattt

SEQ ID NO: 458310 - DNA, 19 bp, Mus musculus
  siRNA target sequence for Dhx9 (NM_007842.1,2954-2972).
ggctacactgagaatgact

SEQ ID NO: 458311 - DNA, 19 bp, Mus musculus
  siRNA target sequence for Dhx9 (NM_007842.1,2971-2989).
cttgggaggccaaagtaca

SEQ ID NO: 458312 - DNA, 19 bp, Mus musculus
  siRNA target sequence for Dhx9 (NM_007842.1,2978-2996).
ggccaaagtacagcttaaa

SEQ ID NO: 458313 - DNA, 19 bp, Mus musculus
  siRNA target sequence for Dhx9 (NM_007842.1,3021-3039).
cccgaagattgtttattga

SEQ ID NO: 458314 - DNA, 19 bp, Mus musculus
  siRNA target sequence for Dhx9 (NM_007842.1,3023-3041).
cgaagattgtttattgaca

SEQ ID NO: 458315 - DNA, 19 bp, Mus musculus
  siRNA target sequence for Dhx9 (NM_007842.1,3052-3070).
ctaacactggaccagataa

SEQ ID NO: 458316 - DNA, 19 bp, Mus musculus
  siRNA target sequence for Dhx9 (NM_007842.1,3058-3076).
ctggaccagataataattt

SEQ ID NO: 458317 - DNA, 19 bp, Mus musculus
  siRNA target sequence for Dhx9 (NM_007842.1,3061-3079).
gaccagataataatttgga

SEQ ID NO: 458318 - DNA, 19 bp, Mus musculus
  siRNA target sequence for Dhx9 (NM_007842.1,3105-3123).
ggtgtgtaccccaatgtat

SEQ ID NO: 458319 - DNA, 19 bp, Mus musculus
  siRNA target sequence for Dhx9 (NM_007842.1,3110-3128).
gtaccccaatgtatgctat

SEQ ID NO: 458320 - DNA, 19 bp, Mus musculus
  siRNA target sequence for Dhx9 (NM_007842.1,3113-3131).
ccccaatgtatgctatcat

SEQ ID NO: 458321 - DNA, 19 bp, Mus musculus
  siRNA target sequence for Dhx9 (NM_007842.1,3114-3132).
cccaatgtatgctatcata

SEQ ID NO: 458322 - DNA, 19 bp, Mus musculus
  siRNA target sequence for Dhx9 (NM_007842.1,3115-3133).
ccaatgtatgctatcataa

SEQ ID NO: 458323 - DNA, 19 bp, Mus musculus
  siRNA target sequence for Dhx9 (NM_007842.1,3163-3181).
ggcgcaatgcacttatcca

SEQ ID NO: 458324 - DNA, 19 bp, Mus musculus
  siRNA target sequence for Dhx9 (NM_007842.1,3202-3220).
ctttcagcagccaagacat

SEQ ID NO: 458325 - DNA, 19 bp, Mus musculus
  siRNA target sequence for Dhx9 (NM_007842.1,3208-3226).
gcagccaagacatgaagta

SEQ ID NO: 458326 - DNA, 19 bp, Mus musculus
  siRNA target sequence for Dhx9 (NM_007842.1,3305-3323).
cttacagctacttctcttt

SEQ ID NO: 458327 - DNA, 19 bp, Mus musculus
  siRNA target sequence for Dhx9 (NM_007842.1,3476-3494).
ccaattggaccctgtaaat

SEQ ID NO: 458328 - DNA, 19 bp, Mus musculus
  siRNA target sequence for Dhx9 (NM_007842.1,3482-3500).
ggaccctgtaaatgaacat

SEQ ID NO: 458329 - DNA, 19 bp, Mus musculus
  siRNA target sequence for Dhx9 (NM_007842.1,3483-3501).
gaccctgtaaatgaacata

SEQ ID NO: 458330 - DNA, 19 bp, Mus musculus
  siRNA target sequence for Dhx9 (NM_007842.1,3538-3556).
ctgctggtatcaaccttat

SEQ ID NO: 458331 - DNA, 19 bp, Mus musculus
  siRNA target sequence for Dhx9 (NM_007842.1,3541-3559).
ctggtatcaaccttatgat

SEQ ID NO: 458332 - DNA, 19 bp, Mus musculus
  siRNA target sequence for Dhx9 (NM_007842.1,3595-3613).
ccaagatggcccgatatga

SEQ ID NO: 458333 - DNA, 19 bp, Mus musculus
  siRNA target sequence for Dhx9 (NM_007842.1,3596-3614).
caagatggcccgatatgat

SEQ ID NO: 458334 - DNA, 19 bp, Mus musculus
  siRNA target sequence for Dhx9 (NM_007842.1,3599-3617).
gatggcccgatatgataat

SEQ ID NO: 458335 - DNA, 19 bp, Mus musculus
  siRNA target sequence for Dhx9 (NM_007842.1,3603-3621).
gcccgatatgataatggaa

SEQ ID NO: 458336 - DNA, 19 bp, Mus musculus
  siRNA target sequence for Dhx9 (NM_007842.1,4008-4026).
ggggaaggttatagtataa

SEQ ID NO: 458337 - DNA, 19 bp, Mus musculus
  siRNA target sequence for Dhx9 (NM_007842.1,4034-4052).
ctcttaccgtgggaattat

SEQ ID NO: 458338 - DNA, 19 bp, Mus musculus
  siRNA target sequence for Dhx9 (NM_007842.1,4181-4199).
ccagcgaaggggttatgga

SEQ ID NO: 458339 - DNA, 19 bp, Mus musculus
  siRNA target sequence for Dhx9 (NM_007842.1,4192-4210).
gttatggaggtggttattt

SEQ ID NO: 458340 - DNA, 19 bp, Mus musculus
  siRNA target sequence for Dmap1 (NM_023178.2,636-654).
gaggtactaccacatttgt

SEQ ID NO: 458341 - DNA, 19 bp, Mus musculus
  siRNA target sequence for Dmap1 (NM_023178.2,683-701).
caggcacagatctcaagat

SEQ ID NO: 458342 - DNA, 19 bp, Mus musculus
  siRNA target sequence for Dmap1 (NM_023178.2,742-760).
cagctagagcggctttaca

SEQ ID NO: 458343 - DNA, 19 bp, Mus musculus
  siRNA target sequence for Dmap1 (NM_023178.2,983-1001).
gcatcaagtttccagattt

SEQ ID NO: 458344 - DNA, 19 bp, Mus musculus
  siRNA target sequence for Dmap1 (NM_023178.2,1138-1156).
gtgcatatgttcaatgagt

SEQ ID NO: 458345 - DNA, 19 bp, Mus musculus
  siRNA target sequence for Dmap1 (NM_023178.2,1160-1178).
ggagcgacctggtgttact

SEQ ID NO: 458346 - DNA, 19 bp, Mus musculus
  siRNA target sequence for Dmap1 (NM_023178.2,1163-1181).
gcgacctggtgttactcta

SEQ ID NO: 458347 - DNA, 19 bp, Mus musculus
  siRNA target sequence for Dmap1 (NM_023178.2,1315-1333).
gagccaacagtgtctgaat

SEQ ID NO: 458348 - DNA, 19 bp, Mus musculus
  siRNA target sequence for Dmap1 (NM_023178.2,1353-1371).
caccaaggataccatcatt

SEQ ID NO: 458349 - DNA, 19 bp, Mus musculus
  siRNA target sequence for Dmap1 (NM_023178.2,1356-1374).
caaggataccatcattgat

SEQ ID NO: 458350 - DNA, 19 bp, Mus musculus
  siRNA target sequence for Dmtf1 (NM_011806.2,263-281).
cagtaacagtagaaactgt

SEQ ID NO: 458351 - DNA, 19 bp, Mus musculus
  siRNA target sequence for Dmtf1 (NM_011806.2,280-298).
gtgaactctgtgacgttta

SEQ ID NO: 458352 - DNA, 19 bp, Mus musculus
  siRNA target sequence for Dmtf1 (NM_011806.2,282-300).
gaactctgtgacgtttact

SEQ ID NO: 458353 - DNA, 19 bp, Mus musculus
  siRNA target sequence for Dmtf1 (NM_011806.2,304-322).
gacacggacgggaatctca

SEQ ID NO: 458354 - DNA, 19 bp, Mus musculus
  siRNA target sequence for Dmtf1 (NM_011806.2,306-324).
cacggacgggaatctcatt

SEQ ID NO: 458355 - DNA, 19 bp, Mus musculus
  siRNA target sequence for Dmtf1 (NM_011806.2,312-330).
cgggaatctcattcttcat

SEQ ID NO: 458356 - DNA, 19 bp, Mus musculus
  siRNA target sequence for Dmtf1 (NM_011806.2,339-357).
gaatgaccctgatgaagta

SEQ ID NO: 458357 - DNA, 19 bp, Mus musculus
  siRNA target sequence for Dmtf1 (NM_011806.2,371-389).
gtactgaacctccacataa

SEQ ID NO: 458358 - DNA, 19 bp, Mus musculus
  siRNA target sequence for Dmtf1 (NM_011806.2,407-425).
ctgaggatgatcaaagcat

SEQ ID NO: 458359 - DNA, 19 bp, Mus musculus
  siRNA target sequence for Dmtf1 (NM_011806.2,411-429).
ggatgatcaaagcattgat

SEQ ID NO: 458360 - DNA, 19 bp, Mus musculus
  siRNA target sequence for Dmtf1 (NM_011806.2,430-448).
gacgctacgccatgcatat

SEQ ID NO: 458361 - DNA, 19 bp, Mus musculus
  siRNA target sequence for Dmtf1 (NM_011806.2,432-450).
cgctacgccatgcatatca

SEQ ID NO: 458362 - DNA, 19 bp, Mus musculus
  siRNA target sequence for Dmtf1 (NM_011806.2,434-452).
ctacgccatgcatatcagt

SEQ ID NO: 458363 - DNA, 19 bp, Mus musculus
  siRNA target sequence for Dmtf1 (NM_011806.2,453-471).
cgtggcactcccactttca

SEQ ID NO: 458364 - DNA, 19 bp, Mus musculus
  siRNA target sequence for Dmtf1 (NM_011806.2,628-646).
caagcgtggtttacaacta

SEQ ID NO: 458365 - DNA, 19 bp, Mus musculus
  siRNA target sequence for Dmtf1 (NM_011806.2,632-650).
cgtggtttacaactaaaga

SEQ ID NO: 458366 - DNA, 19 bp, Mus musculus
  siRNA target sequence for Dmtf1 (NM_011806.2,657-675).
ggattctctcactaacaaa

SEQ ID NO: 458367 - DNA, 19 bp, Mus musculus
  siRNA target sequence for Dmtf1 (NM_011806.2,666-684).
cactaacaaaggacataaa

SEQ ID NO: 458368 - DNA, 19 bp, Mus musculus
  siRNA target sequence for Dmtf1 (NM_011806.2,748-766).
ctgaaggctcgcggaataa

SEQ ID NO: 458369 - DNA, 19 bp, Mus musculus
  siRNA target sequence for Dmtf1 (NM_011806.2,750-768).
gaaggctcgcggaataaaa

SEQ ID NO: 458370 - DNA, 19 bp, Mus musculus
  siRNA target sequence for Dmtf1 (NM_011806.2,753-771).
ggctcgcggaataaaagat

SEQ ID NO: 458371 - DNA, 19 bp, Mus musculus
  siRNA target sequence for Dmtf1 (NM_011806.2,872-890).
gagtgctgcgcatgtatga

SEQ ID NO: 458372 - DNA, 19 bp, Mus musculus
  siRNA target sequence for Dmtf1 (NM_011806.2,1082-1100).
gacttgcagaggtagttca

SEQ ID NO: 458373 - DNA, 19 bp, Mus musculus
  siRNA target sequence for Dmtf1 (NM_011806.2,1087-1105).
gcagaggtagttcatgaat

SEQ ID NO: 458374 - DNA, 19 bp, Mus musculus
  siRNA target sequence for Dmtf1 (NM_011806.2,1090-1108).
gaggtagttcatgaattaa

SEQ ID NO: 458375 - DNA, 19 bp, Mus musculus
  siRNA target sequence for Dmtf1 (NM_011806.2,1269-1287).
caatctcatcctaaggata

SEQ ID NO: 458376 - DNA, 19 bp, Mus musculus
  siRNA target sequence for Dmtf1 (NM_011806.2,1283-1301).
ggatagctgagcttgatgt

SEQ ID NO: 458377 - DNA, 19 bp, Mus musculus
  siRNA target sequence for Dmtf1 (NM_011806.2,1302-1320).
ggccgatgaaaatgacata

SEQ ID NO: 458378 - DNA, 19 bp, Mus musculus
  siRNA target sequence for Dmtf1 (NM_011806.2,1315-1333).
gacataaactgggatcttt

SEQ ID NO: 458379 - DNA, 19 bp, Mus musculus
  siRNA target sequence for Dmtf1 (NM_011806.2,1317-1335).
cataaactgggatctttta

SEQ ID NO: 458380 - DNA, 19 bp, Mus musculus
  siRNA target sequence for Dmtf1 (NM_011806.2,1364-1382).
cacagtggcttcgaagtaa

SEQ ID NO: 458381 - DNA, 19 bp, Mus musculus
  siRNA target sequence for Dmtf1 (NM_011806.2,1366-1384).
cagtggcttcgaagtaaat

SEQ ID NO: 458382 - DNA, 19 bp, Mus musculus
  siRNA target sequence for Dmtf1 (NM_011806.2,1462-1480).
catgagaaccaaaaaaaca

SEQ ID NO: 458383 - DNA, 19 bp, Mus musculus
  siRNA target sequence for Dmtf1 (NM_011806.2,1519-1537).
ccaaacagtaattgcaatt

SEQ ID NO: 458384 - DNA, 19 bp, Mus musculus
  siRNA target sequence for Dmtf1 (NM_011806.2,1541-1559).
gtgtacagcatgttcagat

SEQ ID NO: 458385 - DNA, 19 bp, Mus musculus
  siRNA target sequence for Dmtf1 (NM_011806.2,1569-1587).
ccgcttggaagataataca

SEQ ID NO: 458386 - DNA, 19 bp, Mus musculus
  siRNA target sequence for Dmtf1 (NM_011806.2,1635-1653).
cacccacgtctcttcaaca

SEQ ID NO: 458387 - DNA, 19 bp, Mus musculus
  siRNA target sequence for Dmtf1 (NM_011806.2,1672-1690).
gttgactcagaaacaatca

SEQ ID NO: 458388 - DNA, 19 bp, Mus musculus
  siRNA target sequence for Dmtf1 (NM_011806.2,1700-1718).
gtggaacactacaaacatt

SEQ ID NO: 458389 - DNA, 19 bp, Mus musculus
  siRNA target sequence for Dmtf1 (NM_011806.2,1703-1721).
gaacactacaaacatttga

SEQ ID NO: 458390 - DNA, 19 bp, Mus musculus
  siRNA target sequence for Dmtf1 (NM_011806.2,1706-1724).
cactacaaacatttgagat

SEQ ID NO: 458391 - DNA, 19 bp, Mus musculus
  siRNA target sequence for Dmtf1 (NM_011806.2,1760-1778).
caggcacctaccttcttca

SEQ ID NO: 458392 - DNA, 19 bp, Mus musculus
  siRNA target sequence for Dmtf1 (NM_011806.2,1762-1780).
ggcacctaccttcttcaaa

SEQ ID NO: 458393 - DNA, 19 bp, Mus musculus
  siRNA target sequence for Dmtf1 (NM_011806.2,1803-1821).
cctaacactgaccacaaat

SEQ ID NO: 458394 - DNA, 19 bp, Mus musculus
  siRNA target sequence for Dmtf1 (NM_011806.2,1879-1897).
gctttatccccagaacatt

SEQ ID NO: 458395 - DNA, 19 bp, Mus musculus
  siRNA target sequence for Dmtf1 (NM_011806.2,1886-1904).
ccccagaacatttgttgaa

SEQ ID NO: 458396 - DNA, 19 bp, Mus musculus
  siRNA target sequence for Dmtf1 (NM_011806.2,1899-1917).
gttgaacacaagcgataat

SEQ ID NO: 458397 - DNA, 19 bp, Mus musculus
  siRNA target sequence for Dmtf1 (NM_011806.2,1912-1930).
gataatgtcacggtacaat

SEQ ID NO: 458398 - DNA, 19 bp, Mus musculus
  siRNA target sequence for Dmtf1 (NM_011806.2,1971-1989).
ggacatcacttcttcatta

SEQ ID NO: 458399 - DNA, 19 bp, Mus musculus
  siRNA target sequence for Dmtf1 (NM_011806.2,2006-2024).
cagttgatagtgatcttca

SEQ ID NO: 458400 - DNA, 19 bp, Mus musculus
  siRNA target sequence for Dmtf1 (NM_011806.2,2011-2029).
gatagtgatcttcattcat

SEQ ID NO: 458401 - DNA, 19 bp, Mus musculus
  siRNA target sequence for Dmtf1 (NM_011806.2,2086-2104).
cctcggcctaagatgacta

SEQ ID NO: 458402 - DNA, 19 bp, Mus musculus
  siRNA target sequence for Dmtf1 (NM_011806.2,2087-2105).
ctcggcctaagatgactat

SEQ ID NO: 458403 - DNA, 19 bp, Mus musculus
  siRNA target sequence for Dmtf1 (NM_011806.2,2091-2109).
gcctaagatgactatacaa

SEQ ID NO: 458404 - DNA, 19 bp, Mus musculus
  siRNA target sequence for Dmtf1 (NM_011806.2,2102-2120).
ctatacaaccatcatttaa

SEQ ID NO: 458405 - DNA, 19 bp, Mus musculus
  siRNA target sequence for Dmtf1 (NM_011806.2,2125-2143).
gctcatgtatctaaattca

SEQ ID NO: 458406 - DNA, 19 bp, Mus musculus
  siRNA target sequence for Dmtf1 (NM_011806.2,2135-2153).
ctaaattcagcgaccaaaa

SEQ ID NO: 458407 - DNA, 19 bp, Mus musculus
  siRNA target sequence for Dmtf1 (NM_011806.2,2204-2222).
ccgacactgaccttaagca

SEQ ID NO: 458408 - DNA, 19 bp, Mus musculus
  siRNA target sequence for Dmtf1 (NM_011806.2,2283-2301).
catagtgcaccaagttcat

SEQ ID NO: 458409 - DNA, 19 bp, Mus musculus
  siRNA target sequence for Dmtf1 (NM_011806.2,2311-2329).
gatgatgaaacaatactta

SEQ ID NO: 458410 - DNA, 19 bp, Mus musculus
  siRNA target sequence for Dmtf1 (NM_011806.2,2359-2377).
gcatctgatgttatagata

SEQ ID NO: 458411 - DNA, 19 bp, Mus musculus
  siRNA target sequence for Dmtf1 (NM_011806.2,2393-2411).
ctttgacaacactaacaga

SEQ ID NO: 458412 - DNA, 19 bp, Mus musculus
  siRNA target sequence for Dmtf1 (NM_011806.2,2414-2432).
caatattccagcatcatca

SEQ ID NO: 458413 - DNA, 19 bp, Mus musculus
  siRNA target sequence for Dmtf1 (NM_011806.2,2428-2446).
catcaggaagcatcaaata

SEQ ID NO: 458414 - DNA, 19 bp, Mus musculus
  siRNA target sequence for Dmtf1 (NM_011806.2,2463-2481).
gggcagtcctgtttctgaa

SEQ ID NO: 458415 - DNA, 19 bp, Mus musculus
  siRNA target sequence for Dmtf1 (NM_011806.2,2494-2512).
gttgaggacttagtaaact

SEQ ID NO: 458416 - DNA, 19 bp, Mus musculus
  siRNA target sequence for Dnajc1 (NM_007869.1,144-162).
gcggagacctggagttgtt

SEQ ID NO: 458417 - DNA, 19 bp, Mus musculus
  siRNA target sequence for Dnajc1 (NM_007869.1,246-264).
catatcgtaagctttcact

SEQ ID NO: 458418 - DNA, 19 bp, Mus musculus
  siRNA target sequence for Dnajc1 (NM_007869.1,252-270).
gtaagctttcactaacctt

SEQ ID NO: 458419 - DNA, 19 bp, Mus musculus
  siRNA target sequence for Dnajc1 (NM_007869.1,267-285).
ccttacatccagacaagaa

SEQ ID NO: 458420 - DNA, 19 bp, Mus musculus
  siRNA target sequence for Dnajc1 (NM_007869.1,268-286).
cttacatccagacaagaat

SEQ ID NO: 458421 - DNA, 19 bp, Mus musculus
  siRNA target sequence for Dnajc1 (NM_007869.1,315-333).
gacaattggtggccattta

SEQ ID NO: 458422 - DNA, 19 bp, Mus musculus
  siRNA target sequence for Dnajc1 (NM_007869.1,322-340).
ggtggccatttatgaagtt

SEQ ID NO: 458423 - DNA, 19 bp, Mus musculus
  siRNA target sequence for Dnajc1 (NM_007869.1,326-344).
gccatttatgaagttttaa

SEQ ID NO: 458424 - DNA, 19 bp, Mus musculus
  siRNA target sequence for Dnajc1 (NM_007869.1,357-375).
gaaggcagaggtatgatga

SEQ ID NO: 458425 - DNA, 19 bp, Mus musculus
  siRNA target sequence for Dnajc1 (NM_007869.1,366-384).
ggtatgatgatgttctgat

SEQ ID NO: 458426 - DNA, 19 bp, Mus musculus
  siRNA target sequence for Dnajc1 (NM_007869.1,402-420).
ggcgacagcctgtattcta

SEQ ID NO: 458427 - DNA, 19 bp, Mus musculus
  siRNA target sequence for Dnajc1 (NM_007869.1,404-422).
cgacagcctgtattctact

SEQ ID NO: 458428 - DNA, 19 bp, Mus musculus
  siRNA target sequence for Dnajc1 (NM_007869.1,464-482).
ctcttgttcattattctca

SEQ ID NO: 458429 - DNA, 19 bp, Mus musculus
  siRNA target sequence for Dnajc1 (NM_007869.1,511-529).
catctacctggaaaagcaa

SEQ ID NO: 458430 - DNA, 19 bp, Mus musculus
  siRNA target sequence for Dnajc1 (NM_007869.1,615-633).
ctgaaaagaacgaaagatt

SEQ ID NO: 458431 - DNA, 19 bp, Mus musculus
  siRNA target sequence for Dnajc1 (NM_007869.1,625-643).
cgaaagattgcttataaaa

SEQ ID NO: 458432 - DNA, 19 bp, Mus musculus
  siRNA target sequence for Dnajc1 (NM_007869.1,645-663).
cacaatggcatgatttgct

SEQ ID NO: 458433 - DNA, 19 bp, Mus musculus
  siRNA target sequence for Dnajc1 (NM_007869.1,669-687).
gcaaactggggatttggtt

SEQ ID NO: 458434 - DNA, 19 bp, Mus musculus
  siRNA target sequence for Dnajc1 (NM_007869.1,670-688).
caaactggggatttggttt

SEQ ID NO: 458435 - DNA, 19 bp, Mus musculus
  siRNA target sequence for Dnajc1 (NM_007869.1,684-702).
ggttttgccttacactaaa

SEQ ID NO: 458436 - DNA, 19 bp, Mus musculus
  siRNA target sequence for Dnajc1 (NM_007869.1,705-723).
cattgcctcatctaatcca

SEQ ID NO: 458437 - DNA, 19 bp, Mus musculus
  siRNA target sequence for Dnajc1 (NM_007869.1,731-749).
gggcagttttatgcaaaat

SEQ ID NO: 458438 - DNA, 19 bp, Mus musculus
  siRNA target sequence for Dnajc1 (NM_007869.1,781-799).
cgcactggctagaattgaa

SEQ ID NO: 458439 - DNA, 19 bp, Mus musculus
  siRNA target sequence for Dnajc1 (NM_007869.1,783-801).
cactggctagaattgaaat

SEQ ID NO: 458440 - DNA, 19 bp, Mus musculus
  siRNA target sequence for Dnajc1 (NM_007869.1,862-880).
gtatatgcctttagaaaat

SEQ ID NO: 458441 - DNA, 19 bp, Mus musculus
  siRNA target sequence for Dnajc1 (NM_007869.1,868-886).
gcctttagaaaatacgtat

SEQ ID NO: 458442 - DNA, 19 bp, Mus musculus
  siRNA target sequence for Dnajc1 (NM_007869.1,869-887).
cctttagaaaatacgtata

SEQ ID NO: 458443 - DNA, 19 bp, Mus musculus
  siRNA target sequence for Dnajc1 (NM_007869.1,875-893).
gaaaatacgtatattcagt

SEQ ID NO: 458444 - DNA, 19 bp, Mus musculus
  siRNA target sequence for Dnajc1 (NM_007869.1,882-900).
cgtatattcagtcttatga

SEQ ID NO: 458445 - DNA, 19 bp, Mus musculus
  siRNA target sequence for Dnajc1 (NM_007869.1,1004-1022).
ctcagtcaactgacaagaa

SEQ ID NO: 458446 - DNA, 19 bp, Mus musculus
  siRNA target sequence for Dnajc1 (NM_007869.1,1006-1024).
cagtcaactgacaagaagt

SEQ ID NO: 458447 - DNA, 19 bp, Mus musculus
  siRNA target sequence for Dnajc1 (NM_007869.1,1008-1026).
gtcaactgacaagaagtat

SEQ ID NO: 458448 - DNA, 19 bp, Mus musculus
  siRNA target sequence for Dnajc1 (NM_007869.1,1050-1068).
caggtcgatgggacaagat

SEQ ID NO: 458449 - DNA, 19 bp, Mus musculus
  siRNA target sequence for Dnajc1 (NM_007869.1,1153-1171).
gaccaggctctctgaactt

SEQ ID NO: 458450 - DNA, 19 bp, Mus musculus
  siRNA target sequence for Dnajc1 (NM_007869.1,1155-1173).
ccaggctctctgaacttaa

SEQ ID NO: 458451 - DNA, 19 bp, Mus musculus
  siRNA target sequence for Dnajc1 (NM_007869.1,1401-1419).
ggcaaaaagactttgatat

SEQ ID NO: 458452 - DNA, 19 bp, Mus musculus
  siRNA target sequence for Dnajc1 (NM_007869.1,1402-1420).
gcaaaaagactttgatata

SEQ ID NO: 458453 - DNA, 19 bp, Mus musculus
  siRNA target sequence for Dnajc1 (NM_007869.1,1411-1429).
ctttgatatatcagaacaa

SEQ ID NO: 458454 - DNA, 19 bp, Mus musculus
  siRNA target sequence for Dnajc1 (NM_007869.1,1578-1596).
gtgtcccgtctaagagtaa

SEQ ID NO: 458455 - DNA, 19 bp, Mus musculus
  siRNA target sequence for Dnmt1 (NM_010066.2,152-170).
cgcaggcggctcaaagact

SEQ ID NO: 458456 - DNA, 19 bp, Mus musculus
  siRNA target sequence for Dnmt1 (NM_010066.2,153-171).
gcaggcggctcaaagactt

SEQ ID NO: 458457 - DNA, 19 bp, Mus musculus
  siRNA target sequence for Dnmt1 (NM_010066.2,172-190).
ggaaagagatggcttaaca

SEQ ID NO: 458458 - DNA, 19 bp, Mus musculus
  siRNA target sequence for Dnmt1 (NM_010066.2,264-282).
gtgacttggaaaccaaatt

SEQ ID NO: 458459 - DNA, 19 bp, Mus musculus
  siRNA target sequence for Dnmt1 (NM_010066.2,309-327).
gctacctggctaaagtcaa

SEQ ID NO: 458460 - DNA, 19 bp, Mus musculus
  siRNA target sequence for Dnmt1 (NM_010066.2,328-346).
gtccctcttaaataaggat

SEQ ID NO: 458461 - DNA, 19 bp, Mus musculus
  siRNA target sequence for Dnmt1 (NM_010066.2,431-449).
gaaatggcagactcaaata

SEQ ID NO: 458462 - DNA, 19 bp, Mus musculus
  siRNA target sequence for Dnmt1 (NM_010066.2,656-674).
gagagagaccaggataaga

SEQ ID NO: 458463 - DNA, 19 bp, Mus musculus
  siRNA target sequence for Dnmt1 (NM_010066.2,889-907).
cgaggacggaaaaaaggat

SEQ ID NO: 458464 - DNA, 19 bp, Mus musculus
  siRNA target sequence for Dnmt1 (NM_010066.2,1040-1058).
cgaaaaacgacacgtaaaa

SEQ ID NO: 458465 - DNA, 19 bp, Mus musculus
  siRNA target sequence for Dnmt1 (NM_010066.2,1041-1059).
gaaaaacgacacgtaaaaa

SEQ ID NO: 458466 - DNA, 19 bp, Mus musculus
  siRNA target sequence for Dnmt1 (NM_010066.2,1101-1119).
gaaaagccgctcaaagcaa

SEQ ID NO: 458467 - DNA, 19 bp, Mus musculus
  siRNA target sequence for Dnmt1 (NM_010066.2,1107-1125).
ccgctcaaagcaaaagtgt

SEQ ID NO: 458468 - DNA, 19 bp, Mus musculus
  siRNA target sequence for Dnmt1 (NM_010066.2,1124-1142).
gtgatcccgaagatcaact

SEQ ID NO: 458469 - DNA, 19 bp, Mus musculus
  siRNA target sequence for Dnmt1 (NM_010066.2,1267-1285).
cacctcgacctggtttgat

SEQ ID NO: 458470 - DNA, 19 bp, Mus musculus
  siRNA target sequence for Dnmt1 (NM_010066.2,1273-1291).
gacctggtttgatacttat

SEQ ID NO: 458471 - DNA, 19 bp, Mus musculus
  siRNA target sequence for Dnmt1 (NM_010066.2,1275-1293).
cctggtttgatacttatga

SEQ ID NO: 458472 - DNA, 19 bp, Mus musculus
  siRNA target sequence for Dnmt1 (NM_010066.2,1278-1296).
ggtttgatacttatgaaga

SEQ ID NO: 458473 - DNA, 19 bp, Mus musculus
  siRNA target sequence for Dnmt1 (NM_010066.2,1301-1319).
cccatgcataggttcactt

SEQ ID NO: 458474 - DNA, 19 bp, Mus musculus
  siRNA target sequence for Dnmt1 (NM_010066.2,1365-1383).
ccggtctcattgagaagaa

SEQ ID NO: 458475 - DNA, 19 bp, Mus musculus
  siRNA target sequence for Dnmt1 (NM_010066.2,1401-1419).
ctgggtgtgccaaagcaat

SEQ ID NO: 458476 - DNA, 19 bp, Mus musculus
  siRNA target sequence for Dnmt1 (NM_010066.2,1437-1455).
ctatggaaggtggtattaa

SEQ ID NO: 458477 - DNA, 19 bp, Mus musculus
  siRNA target sequence for Dnmt1 (NM_010066.2,1466-1484).
ctcgggccaatcaatcagt

SEQ ID NO: 458478 - DNA, 19 bp, Mus musculus
  siRNA target sequence for Dnmt1 (NM_010066.2,1533-1551).
ccactgcatttgctgaata

SEQ ID NO: 458479 - DNA, 19 bp, Mus musculus
  siRNA target sequence for Dnmt1 (NM_010066.2,1561-1579).
ggagcccagcaaagagtat

SEQ ID NO: 458480 - DNA, 19 bp, Mus musculus
  siRNA target sequence for Dnmt1 (NM_010066.2,1631-1649).
gttgagttcctgcaaaaca

SEQ ID NO: 458481 - DNA, 19 bp, Mus musculus
  siRNA target sequence for Dnmt1 (NM_010066.2,1697-1715).
gttcctccttctaccatta

SEQ ID NO: 458482 - DNA, 19 bp, Mus musculus
  siRNA target sequence for Dnmt1 (NM_010066.2,2083-2101).
gtgcaaggcgtgcaaagat

SEQ ID NO: 458483 - DNA, 19 bp, Mus musculus
  siRNA target sequence for Dnmt1 (NM_010066.2,2290-2308).
gcagcctatgaagattgaa

SEQ ID NO: 458484 - DNA, 19 bp, Mus musculus
  siRNA target sequence for Dnmt1 (NM_010066.2,2374-2392).
ctcggtcattccagatgat

SEQ ID NO: 458485 - DNA, 19 bp, Mus musculus
  siRNA target sequence for Dnmt1 (NM_010066.2,2534-2552).
gtgggcgagtgcgaaaaca

SEQ ID NO: 458486 - DNA, 19 bp, Mus musculus
  siRNA target sequence for Dnmt1 (NM_010066.2,2590-2608).
ctacaaagccccttctgaa

SEQ ID NO: 458487 - DNA, 19 bp, Mus musculus
  siRNA target sequence for Dnmt1 (NM_010066.2,2658-2676).
ctgaggatggcaagactta

SEQ ID NO: 458488 - DNA, 19 bp, Mus musculus
  siRNA target sequence for Dnmt1 (NM_010066.2,2663-2681).
gatggcaagacttacttct

SEQ ID NO: 458489 - DNA, 19 bp, Mus musculus
  siRNA target sequence for Dnmt1 (NM_010066.2,2698-2716).
ccaggagtacgcaaggttt

SEQ ID NO: 458490 - DNA, 19 bp, Mus musculus
  siRNA target sequence for Dnmt1 (NM_010066.2,2702-2720).
gagtacgcaaggtttgaat

SEQ ID NO: 458491 - DNA, 19 bp, Mus musculus
  siRNA target sequence for Dnmt1 (NM_010066.2,2756-2774).
cacaagttctgcctatctt

SEQ ID NO: 458492 - DNA, 19 bp, Mus musculus
  siRNA target sequence for Dnmt1 (NM_010066.2,2758-2776).
caagttctgcctatcttgt

SEQ ID NO: 458493 - DNA, 19 bp, Mus musculus
  siRNA target sequence for Dnmt1 (NM_010066.2,2811-2829).
ccaaggtcctggaacaaat

SEQ ID NO: 458494 - DNA, 19 bp, Mus musculus
  siRNA target sequence for Dnmt1 (NM_010066.2,2857-2875).
cagttccatcaccaagaat

SEQ ID NO: 458495 - DNA, 19 bp, Mus musculus
  siRNA target sequence for Dnmt1 (NM_010066.2,2922-2940).
cctttactttcaacatcaa

SEQ ID NO: 458496 - DNA, 19 bp, Mus musculus
  siRNA target sequence for Dnmt1 (NM_010066.2,2952-2970).
ccgtgaaacgcccaaagaa

SEQ ID NO: 458497 - DNA, 19 bp, Mus musculus
  siRNA target sequence for Dnmt1 (NM_010066.2,3066-3084).
gcatcggtcggataaaaga

SEQ ID NO: 458498 - DNA, 19 bp, Mus musculus
  siRNA target sequence for Dnmt1 (NM_010066.2,3148-3166).
gttctacaggcctgagaat

SEQ ID NO: 458499 - DNA, 19 bp, Mus musculus
  siRNA target sequence for Dnmt1 (NM_010066.2,3189-3207).
cctatcacactgacatcaa

SEQ ID NO: 458500 - DNA, 19 bp, Mus musculus
  siRNA target sequence for Dnmt1 (NM_010066.2,3296-3314).
gagagcatccaggattatt

SEQ ID NO: 458501 - DNA, 19 bp, Mus musculus
  siRNA target sequence for Dnmt1 (NM_010066.2,3301-3319).
catccaggattattcacaa

SEQ ID NO: 458502 - DNA, 19 bp, Mus musculus
  siRNA target sequence for Dnmt1 (NM_010066.2,3344-3362).
ctcgaggcctacaattcaa

SEQ ID NO: 458503 - DNA, 19 bp, Mus musculus
  siRNA target sequence for Dnmt1 (NM_010066.2,3347-3365).
gaggcctacaattcaaaga

SEQ ID NO: 458504 - DNA, 19 bp, Mus musculus
  siRNA target sequence for Dnmt1 (NM_010066.2,3534-3552).
gagggttatcggaaggatt

SEQ ID NO: 458505 - DNA, 19 bp, Mus musculus
  siRNA target sequence for Dnmt1 (NM_010066.2,3660-3678).
gcaacgtgcttcttaagct

SEQ ID NO: 458506 - DNA, 19 bp, Mus musculus
  siRNA target sequence for Dnmt1 (NM_010066.2,3800-3818).
cgcacttactccaagttca

SEQ ID NO: 458507 - DNA, 19 bp, Mus musculus
  siRNA target sequence for Dnmt1 (NM_010066.2,3801-3819).
gcacttactccaagttcaa

SEQ ID NO: 458508 - DNA, 19 bp, Mus musculus
  siRNA target sequence for Dnmt1 (NM_010066.2,4016-4034).
cgaaggagggccatcatct

SEQ ID NO: 458509 - DNA, 19 bp, Mus musculus
  siRNA target sequence for Dnmt1 (NM_010066.2,4017-4035).
gaaggagggccatcatctt

SEQ ID NO: 458510 - DNA, 19 bp, Mus musculus
  siRNA target sequence for Dnmt1 (NM_010066.2,4113-4131).
gcgttgtggtggatgacaa

SEQ ID NO: 458511 - DNA, 19 bp, Mus musculus
  siRNA target sequence for Dnmt1 (NM_010066.2,4124-4142).
gatgacaagaagtttgtta

SEQ ID NO: 458512 - DNA, 19 bp, Mus musculus
  siRNA target sequence for Dnmt1 (NM_010066.2,4220-4238).
cagaatggagcctcgaatt

SEQ ID NO: 458513 - DNA, 19 bp, Mus musculus
  siRNA target sequence for Dnmt1 (NM_010066.2,4222-4240).
gaatggagcctcgaattct

SEQ ID NO: 458514 - DNA, 19 bp, Mus musculus
  siRNA target sequence for Dnmt1 (NM_010066.2,4396-4414).
gcgtgacctgcccaacata

SEQ ID NO: 458515 - DNA, 19 bp, Mus musculus
  siRNA target sequence for Dnmt1 (NM_010066.2,4398-4416).
gtgacctgcccaacataca

SEQ ID NO: 458516 - DNA, 19 bp, Mus musculus
  siRNA target sequence for Dnmt1 (NM_010066.2,4544-4562).
cctgagtccaggcaattca

SEQ ID NO: 458517 - DNA, 19 bp, Mus musculus
  siRNA target sequence for Dnmt1 (NM_010066.2,4637-4655).
gagtgggatggcttcttca

SEQ ID NO: 458518 - DNA, 19 bp, Mus musculus
  siRNA target sequence for Dnmt1 (NM_010066.2,4804-4822).
ccggcaggtgggtaatgct

SEQ ID NO: 458519 - DNA, 19 bp, Mus musculus
  siRNA target sequence for Dnmt1 (NM_010066.2,4845-4863).
ccattggcctggagattaa

SEQ ID NO: 458520 - DNA, 19 bp, Mus musculus
  siRNA target sequence for Dnmt1 (NM_010066.2,4893-4911).
gcgcatcagctgcagttaa

SEQ ID NO: 458521 - DNA, 19 bp, Mus musculus
  siRNA target sequence for Dnmt1 (NM_010066.2,4894-4912).
cgcatcagctgcagttaaa

SEQ ID NO: 458522 - DNA, 19 bp, Mus musculus
  siRNA target sequence for Dnmt2 (NM_010067.2,128-146).
ctattgatgtgaatactgt

SEQ ID NO: 458523 - DNA, 19 bp, Mus musculus
  siRNA target sequence for Dnmt2 (NM_010067.2,138-156).
gaatactgttgctaatgaa

SEQ ID NO: 458524 - DNA, 19 bp, Mus musculus
  siRNA target sequence for Dnmt2 (NM_010067.2,143-161).
ctgttgctaatgaagtata

SEQ ID NO: 458525 - DNA, 19 bp, Mus musculus
  siRNA target sequence for Dnmt2 (NM_010067.2,145-163).
gttgctaatgaagtataca

SEQ ID NO: 458526 - DNA, 19 bp, Mus musculus
  siRNA target sequence for Dnmt2 (NM_010067.2,165-183).
gcataattttcctcatact

SEQ ID NO: 458527 - DNA, 19 bp, Mus musculus
  siRNA target sequence for Dnmt2 (NM_010067.2,186-204).
cttactgtcaaagacaatt

SEQ ID NO: 458528 - DNA, 19 bp, Mus musculus
  siRNA target sequence for Dnmt2 (NM_010067.2,198-216).
gacaattgaaggtatttca

SEQ ID NO: 458529 - DNA, 19 bp, Mus musculus
  siRNA target sequence for Dnmt2 (NM_010067.2,200-218).
caattgaaggtatttcact

SEQ ID NO: 458530 - DNA, 19 bp, Mus musculus
  siRNA target sequence for Dnmt2 (NM_010067.2,326-344).
gcttcttgtatattctaga

SEQ ID NO: 458531 - DNA, 19 bp, Mus musculus
  siRNA target sequence for Dnmt2 (NM_010067.2,371-389).
ccaagtatattctcttaga

SEQ ID NO: 458532 - DNA, 19 bp, Mus musculus
  siRNA target sequence for Dnmt2 (NM_010067.2,400-418).
ggttttgaagtatcttcta

SEQ ID NO: 458533 - DNA, 19 bp, Mus musculus
  siRNA target sequence for Dnmt2 (NM_010067.2,419-437).
caagagggctgctgataca

SEQ ID NO: 458534 - DNA, 19 bp, Mus musculus
  siRNA target sequence for Dnmt2 (NM_010067.2,425-443).
ggctgctgatacaaacaat

SEQ ID NO: 458535 - DNA, 19 bp, Mus musculus
  siRNA target sequence for Dnmt2 (NM_010067.2,426-444).
gctgctgatacaaacaata

SEQ ID NO: 458536 - DNA, 19 bp, Mus musculus
  siRNA target sequence for Dnmt2 (NM_010067.2,429-447).
gctgatacaaacaatagaa

SEQ ID NO: 458537 - DNA, 19 bp, Mus musculus
  siRNA target sequence for Dnmt2 (NM_010067.2,452-470).
gtggctttcagtatcaaga

SEQ ID NO: 458538 - DNA, 19 bp, Mus musculus
  siRNA target sequence for Dnmt2 (NM_010067.2,455-473).
gctttcagtatcaagagtt

SEQ ID NO: 458539 - DNA, 19 bp, Mus musculus
  siRNA target sequence for Dnmt2 (NM_010067.2,456-474).
ctttcagtatcaagagttt

SEQ ID NO: 458540 - DNA, 19 bp, Mus musculus
  siRNA target sequence for Dnmt2 (NM_010067.2,507-525).
ctcgaggctccgatatttt

SEQ ID NO: 458541 - DNA, 19 bp, Mus musculus
  siRNA target sequence for Dnmt2 (NM_010067.2,509-527).
cgaggctccgatattttct

SEQ ID NO: 458542 - DNA, 19 bp, Mus musculus
  siRNA target sequence for Dnmt2 (NM_010067.2,512-530).
ggctccgatattttctcat

SEQ ID NO: 458543 - DNA, 19 bp, Mus musculus
  siRNA target sequence for Dnmt2 (NM_010067.2,513-531).
gctccgatattttctcatt

SEQ ID NO: 458544 - DNA, 19 bp, Mus musculus
  siRNA target sequence for Dnmt2 (NM_010067.2,517-535).
cgatattttctcattgcaa

SEQ ID NO: 458545 - DNA, 19 bp, Mus musculus
  siRNA target sequence for Dnmt2 (NM_010067.2,565-583).
gcccctggacagatactga

SEQ ID NO: 458546 - DNA, 19 bp, Mus musculus
  siRNA target sequence for Dnmt2 (NM_010067.2,585-603).
ggagtttcctaaaattgta

SEQ ID NO: 458547 - DNA, 19 bp, Mus musculus
  siRNA target sequence for Dnmt2 (NM_010067.2,586-604).
gagtttcctaaaattgtaa

SEQ ID NO: 458548 - DNA, 19 bp, Mus musculus
  siRNA target sequence for Dnmt2 (NM_010067.2,588-606).
gtttcctaaaattgtaact

SEQ ID NO: 458549 - DNA, 19 bp, Mus musculus
  siRNA target sequence for Dnmt2 (NM_010067.2,605-623).
ctgttgagccacaaaaata

SEQ ID NO: 458550 - DNA, 19 bp, Mus musculus
  siRNA target sequence for Dnmt2 (NM_010067.2,852-870).
gctgcgatacgctctctta

SEQ ID NO: 458551 - DNA, 19 bp, Mus musculus
  siRNA target sequence for Dnmt2 (NM_010067.2,855-873).
gcgatacgctctcttacta

SEQ ID NO: 458552 - DNA, 19 bp, Mus musculus
  siRNA target sequence for Dnmt2 (NM_010067.2,857-875).
gatacgctctcttactaga

SEQ ID NO: 458553 - DNA, 19 bp, Mus musculus
  siRNA target sequence for Dnmt2 (NM_010067.2,863-881).
ctctcttactagatatcgt

SEQ ID NO: 458554 - DNA, 19 bp, Mus musculus
  siRNA target sequence for Dnmt2 (NM_010067.2,899-917).
ggtccatgtgctttacgaa

SEQ ID NO: 458555 - DNA, 19 bp, Mus musculus
  siRNA target sequence for Dnmt2 (NM_010067.2,900-918).
gtccatgtgctttacgaaa

SEQ ID NO: 458556 - DNA, 19 bp, Mus musculus
  siRNA target sequence for Dnmt2 (NM_010067.2,920-938).
ggtatgggagttacataga

SEQ ID NO: 458557 - DNA, 19 bp, Mus musculus
  siRNA target sequence for Dnmt2 (NM_010067.2,941-959).
ggacaggctccgtgttaca

SEQ ID NO: 458558 - DNA, 19 bp, Mus musculus
  siRNA target sequence for Dnmt2 (NM_010067.2,965-983).
cagaggatgcgcagattga

SEQ ID NO: 458559 - DNA, 19 bp, Mus musculus
  siRNA target sequence for Dnmt2 (NM_010067.2,969-987).
ggatgcgcagattgagaat

SEQ ID NO: 458560 - DNA, 19 bp, Mus musculus
  siRNA target sequence for Dnmt2 (NM_010067.2,970-988).
gatgcgcagattgagaata

SEQ ID NO: 458561 - DNA, 19 bp, Mus musculus
  siRNA target sequence for Dnmt2 (NM_010067.2,973-991).
gcgcagattgagaatatct

SEQ ID NO: 458562 - DNA, 19 bp, Mus musculus
  siRNA target sequence for Dnmt2 (NM_010067.2,974-992).
cgcagattgagaatatcta

SEQ ID NO: 458563 - DNA, 19 bp, Mus musculus
  siRNA target sequence for Dnmt2 (NM_010067.2,1021-1039).
gaaaagatagctaaattgt

SEQ ID NO: 458564 - DNA, 19 bp, Mus musculus
  siRNA target sequence for Dnmt2 (NM_010067.2,1045-1063).
cttaaactgcgatatttca

SEQ ID NO: 458565 - DNA, 19 bp, Mus musculus
  siRNA target sequence for Dnmt2 (NM_010067.2,1062-1080).
cacaccgaaagaaattgca

SEQ ID NO: 458566 - DNA, 19 bp, Mus musculus
  siRNA target sequence for Dnmt2 (NM_010067.2,1064-1082).
caccgaaagaaattgcaaa

SEQ ID NO: 458567 - DNA, 19 bp, Mus musculus
  siRNA target sequence for Dnmt2 (NM_010067.2,1167-1185).
cgtgcatgtggtagcaaaa

SEQ ID NO: 458568 - DNA, 19 bp, Mus musculus
  siRNA target sequence for Dnmt2 (NM_010067.2,1239-1257).
gatgccgctaattctagat

SEQ ID NO: 458569 - DNA, 19 bp, Mus musculus
  siRNA target sequence for Dnmt2 (NM_010067.2,1242-1260).
gccgctaattctagatagt

SEQ ID NO: 458570 - DNA, 19 bp, Mus musculus
  siRNA target sequence for Dnmt2 (NM_010067.2,1243-1261).
ccgctaattctagatagta

SEQ ID NO: 458571 - DNA, 19 bp, Mus musculus
  siRNA target sequence for Dnmt2 (NM_010067.2,1244-1262).
cgctaattctagatagtaa

SEQ ID NO: 458572 - DNA, 19 bp, Mus musculus
  siRNA target sequence for Dnmt2 (NM_010067.2,1245-1263).
gctaattctagatagtaat

SEQ ID NO: 458573 - DNA, 19 bp, Mus musculus
  siRNA target sequence for Dnmt3a (NM_007872.1,672-690).
caacatcgaatccatgaaa

SEQ ID NO: 458574 - DNA, 19 bp, Mus musculus
  siRNA target sequence for Dnmt3a (NM_007872.1,778-796).
gcaggggacccctactaca

SEQ ID NO: 458575 - DNA, 19 bp, Mus musculus
  siRNA target sequence for Dnmt3a (NM_007872.1,779-797).
caggggacccctactacat

SEQ ID NO: 458576 - DNA, 19 bp, Mus musculus
  siRNA target sequence for Dnmt3a (NM_007872.1,781-799).
ggggacccctactacatca

SEQ ID NO: 458577 - DNA, 19 bp, Mus musculus
  siRNA target sequence for Dnmt3a (NM_007872.1,819-837).
gtggctggcacgttggaaa

SEQ ID NO: 458578 - DNA, 19 bp, Mus musculus
  siRNA target sequence for Dnmt3a (NM_007872.1,857-875).
ccaaggtaattgcagtaat

SEQ ID NO: 458579 - DNA, 19 bp, Mus musculus
  siRNA target sequence for Dnmt3a (NM_007872.1,1014-1032).
ggacaagaatgctaccaaa

SEQ ID NO: 458580 - DNA, 19 bp, Mus musculus
  siRNA target sequence for Dnmt3a (NM_007872.1,1118-1136).
ggtggccaggccgaattgt

SEQ ID NO: 458581 - DNA, 19 bp, Mus musculus
  siRNA target sequence for Dnmt3a (NM_007872.1,1795-1813).
gatgggtaccagtcctatt

SEQ ID NO: 458582 - DNA, 19 bp, Mus musculus
  siRNA target sequence for Dnmt3a (NM_007872.1,1798-1816).
gggtaccagtcctattgca

SEQ ID NO: 458583 - DNA, 19 bp, Mus musculus
  siRNA target sequence for Dnmt3a (NM_007872.1,2009-2027).
cttctcgactccagatgtt

SEQ ID NO: 458584 - DNA, 19 bp, Mus musculus
  siRNA target sequence for Dnmt3a (NM_007872.1,2012-2030).
ctcgactccagatgttctt

SEQ ID NO: 458585 - DNA, 19 bp, Mus musculus
  siRNA target sequence for Dnmt3a (NM_007872.1,2106-2124).
ccgcgtgctgtctctcttt

SEQ ID NO: 458586 - DNA, 19 bp, Mus musculus
  siRNA target sequence for Dnmt3a (NM_007872.1,2119-2137).
ctctttgatgggattgcta

SEQ ID NO: 458587 - DNA, 19 bp, Mus musculus
  siRNA target sequence for Dnmt3a (NM_007872.1,2233-2251).
caccagggaaagatcatgt

SEQ ID NO: 458588 - DNA, 19 bp, Mus musculus
  siRNA target sequence for Dnmt3a (NM_007872.1,2357-2375).
ctgcccgcaagggacttta

SEQ ID NO: 458589 - DNA, 19 bp, Mus musculus
  siRNA target sequence for Dnmt3a (NM_007872.1,2360-2378).
cccgcaagggactttatga

SEQ ID NO: 458590 - DNA, 19 bp, Mus musculus
  siRNA target sequence for Dnmt3a (NM_007872.1,2505-2523).
ggacatctcgcgatttctt

SEQ ID NO: 458591 - DNA, 19 bp, Mus musculus
  siRNA target sequence for Dnmt3a (NM_007872.1,2513-2531).
cgcgatttcttgagtctaa

SEQ ID NO: 458592 - DNA, 19 bp, Mus musculus
  siRNA target sequence for Dnmt3a (NM_007872.1,2528-2546).
ctaaccccgtgatgattga

SEQ ID NO: 458593 - DNA, 19 bp, Mus musculus
  siRNA target sequence for Dnmt3a (NM_007872.1,2624-2642).
ccactgtgaatgataagct

SEQ ID NO: 458594 - DNA, 19 bp, Mus musculus
  siRNA target sequence for Dnmt3a (NM_007872.1,2668-2686).
ggcagaatagccaagttca

SEQ ID NO: 458595 - DNA, 19 bp, Mus musculus
  siRNA target sequence for Dnmt3a (NM_007872.1,2743-2761).
catttccccgtcttcatga

SEQ ID NO: 458596 - DNA, 19 bp, Mus musculus
  siRNA target sequence for Dnmt3a (NM_007872.1,2781-2799).
gtggtgcactgaaatggaa

SEQ ID NO: 458597 - DNA, 19 bp, Mus musculus
  siRNA target sequence for Dnmt3a (NM_007872.1,2910-2928).
cgctccgctgaaggaatat

SEQ ID NO: 458598 - DNA, 19 bp, Mus musculus
  siRNA target sequence for Dnmt3a (NM_007872.1,2916-2934).
gctgaaggaatattttgct

SEQ ID NO: 458599 - DNA, 19 bp, Mus musculus
  siRNA target sequence for Dnmt3b (NM_010068.1,315-333).
ggtatgaggagtgcattat

SEQ ID NO: 458600 - DNA, 19 bp, Mus musculus
  siRNA target sequence for Dnmt3b (NM_010068.1,320-338).
gaggagtgcattatcgtta

SEQ ID NO: 458601 - DNA, 19 bp, Mus musculus
  siRNA target sequence for Dnmt3b (NM_010068.1,542-560).
gatgggaatggctctgata

SEQ ID NO: 458602 - DNA, 19 bp, Mus musculus
  siRNA target sequence for Dnmt3b (NM_010068.1,625-643).
ccgaacccgacatagcaat

SEQ ID NO: 458603 - DNA, 19 bp, Mus musculus
  siRNA target sequence for Dnmt3b (NM_010068.1,838-856).
cgtcagtaccccatcagtt

SEQ ID NO: 458604 - DNA, 19 bp, Mus musculus
  siRNA target sequence for Dnmt3b (NM_010068.1,875-893).
gatcaggagggtatggata

SEQ ID NO: 458605 - DNA, 19 bp, Mus musculus
  siRNA target sequence for Dnmt3b (NM_010068.1,924-942).
gagacagcacagagtatca

SEQ ID NO: 458606 - DNA, 19 bp, Mus musculus
  siRNA target sequence for Dnmt3b (NM_010068.1,971-989).
ctcgtgtggggaaagatca

SEQ ID NO: 458607 - DNA, 19 bp, Mus musculus
  siRNA target sequence for Dnmt3b (NM_010068.1,1078-1096).
gtttggtgatggcaagttt

SEQ ID NO: 458608 - DNA, 19 bp, Mus musculus
  siRNA target sequence for Dnmt3b (NM_010068.1,1133-1151).
ctgttcagccagcacttta

SEQ ID NO: 458609 - DNA, 19 bp, Mus musculus
  siRNA target sequence for Dnmt3b (NM_010068.1,1135-1153).
gttcagccagcactttaat

SEQ ID NO: 458610 - DNA, 19 bp, Mus musculus
  siRNA target sequence for Dnmt3b (NM_010068.1,2084-2102).
ggccagatcaaatatgtca

SEQ ID NO: 458611 - DNA, 19 bp, Mus musculus
  siRNA target sequence for Dnmt3b (NM_010068.1,2085-2103).
gccagatcaaatatgtcaa

SEQ ID NO: 458612 - DNA, 19 bp, Mus musculus
  siRNA target sequence for Dnmt3b (NM_010068.1,2201-2219).
cctgcccgcaaaggtttat

SEQ ID NO: 458613 - DNA, 19 bp, Mus musculus
  siRNA target sequence for Dnmt3b (NM_010068.1,2202-2220).
ctgcccgcaaaggtttata

SEQ ID NO: 458614 - DNA, 19 bp, Mus musculus
  siRNA target sequence for Dnmt3b (NM_010068.1,2205-2223).
cccgcaaaggtttatatga

SEQ ID NO: 458615 - DNA, 19 bp, Mus musculus
  siRNA target sequence for Dnmt3b (NM_010068.1,2286-2304).
gcgacaaccgtccattctt

SEQ ID NO: 458616 - DNA, 19 bp, Mus musculus
  siRNA target sequence for Dnmt3b (NM_010068.1,2288-2306).
gacaaccgtccattcttct

SEQ ID NO: 458617 - DNA, 19 bp, Mus musculus
  siRNA target sequence for Dnmt3b (NM_010068.1,2321-2339).
gttgtggccatgaaagtga

SEQ ID NO: 458618 - DNA, 19 bp, Mus musculus
  siRNA target sequence for Dntt (NM_009345.1,122-140).
cttccacgccttatgacat

SEQ ID NO: 458619 - DNA, 19 bp, Mus musculus
  siRNA target sequence for Dntt (NM_009345.1,338-356).
gctccgagctcgaactctt

SEQ ID NO: 458620 - DNA, 19 bp, Mus musculus
  siRNA target sequence for Dntt (NM_009345.1,365-383).
cctggctcatcgaatgcat

SEQ ID NO: 458621 - DNA, 19 bp, Mus musculus
  siRNA target sequence for Dntt (NM_009345.1,416-434).
gacatcagcttgttgtgaa

SEQ ID NO: 458622 - DNA, 19 bp, Mus musculus
  siRNA target sequence for Dntt (NM_009345.1,418-436).
catcagcttgttgtgaata

SEQ ID NO: 458623 - DNA, 19 bp, Mus musculus
  siRNA target sequence for Dntt (NM_009345.1,459-477).
cccaggctcccagaatgtt

SEQ ID NO: 458624 - DNA, 19 bp, Mus musculus
  siRNA target sequence for Dntt (NM_009345.1,492-510).
gaagaagatctcccaatat

SEQ ID NO: 458625 - DNA, 19 bp, Mus musculus
  siRNA target sequence for Dntt (NM_009345.1,516-534).
ccagcgaagaaccacatta

SEQ ID NO: 458626 - DNA, 19 bp, Mus musculus
  siRNA target sequence for Dntt (NM_009345.1,520-538).
cgaagaaccacattaaaca

SEQ ID NO: 458627 - DNA, 19 bp, Mus musculus
  siRNA target sequence for Dntt (NM_009345.1,557-575).
cggatgcccttgatatcct

SEQ ID NO: 458628 - DNA, 19 bp, Mus musculus
  siRNA target sequence for Dntt (NM_009345.1,629-647).
gagcgtcctctgtactgaa

SEQ ID NO: 458629 - DNA, 19 bp, Mus musculus
  siRNA target sequence for Dntt (NM_009345.1,631-649).
gcgtcctctgtactgaaat

SEQ ID NO: 458630 - DNA, 19 bp, Mus musculus
  siRNA target sequence for Dntt (NM_009345.1,633-651).
gtcctctgtactgaaatct

SEQ ID NO: 458631 - DNA, 19 bp, Mus musculus
  siRNA target sequence for Dntt (NM_009345.1,719-737).
gtatcatagagggaattat

SEQ ID NO: 458632 - DNA, 19 bp, Mus musculus
  siRNA target sequence for Dntt (NM_009345.1,778-796).
gatgagcgatataaatcct

SEQ ID NO: 458633 - DNA, 19 bp, Mus musculus
  siRNA target sequence for Dntt (NM_009345.1,849-867).
gttcaggatgggtttcaga

SEQ ID NO: 458634 - DNA, 19 bp, Mus musculus
  siRNA target sequence for Dntt (NM_009345.1,979-997).
gctgtcagcatgctagtta

SEQ ID NO: 458635 - DNA, 19 bp, Mus musculus
  siRNA target sequence for Dntt (NM_009345.1,980-998).
ctgtcagcatgctagttaa

SEQ ID NO: 458636 - DNA, 19 bp, Mus musculus
  siRNA target sequence for Dntt (NM_009345.1,1002-1020).
ggcggttgtgacatttctt

SEQ ID NO: 458637 - DNA, 19 bp, Mus musculus
  siRNA target sequence for Dntt (NM_009345.1,1049-1067).
ggttccgcaggggtaagat

SEQ ID NO: 458638 - DNA, 19 bp, Mus musculus
  siRNA target sequence for Dntt (NM_009345.1,1162-1180).
cagcaggggttgcttttgt

SEQ ID NO: 458639 - DNA, 19 bp, Mus musculus
  siRNA target sequence for Dntt (NM_009345.1,1188-1206).
catcttagagtcaaccttt

SEQ ID NO: 458640 - DNA, 19 bp, Mus musculus
  siRNA target sequence for Dntt (NM_009345.1,1243-1261).
ctcgaccatttccagaaat

SEQ ID NO: 458641 - DNA, 19 bp, Mus musculus
  siRNA target sequence for Dntt (NM_009345.1,1246-1264).
gaccatttccagaaatgct

SEQ ID NO: 458642 - DNA, 19 bp, Mus musculus
  siRNA target sequence for Dntt (NM_009345.1,1335-1353).
gaaggccatccgtgtagat

SEQ ID NO: 458643 - DNA, 19 bp, Mus musculus
  siRNA target sequence for Dntt (NM_009345.1,1506-1524).
cacgatttcacctttggat

SEQ ID NO: 458644 - DNA, 19 bp, Mus musculus
  siRNA target sequence for Dntt (NM_009345.1,1526-1544).
ggaaagtgtcaaaactaca

SEQ ID NO: 458645 - DNA, 19 bp, Mus musculus
  siRNA target sequence for Dntt (NM_009345.1,1550-1568).
ccttgagggtgtttcttga

SEQ ID NO: 458646 - DNA, 19 bp, Mus musculus
  siRNA target sequence for Dntt (NM_009345.1,1602-1620).
gggactggactacattgaa

SEQ ID NO: 458647 - DNA, 19 bp, Mus musculus
  siRNA target sequence for Dpf2 (NM_011262.1,85-103).
cttggcgagcaatactaca

SEQ ID NO: 458648 - DNA, 19 bp, Mus musculus
  siRNA target sequence for Dpf2 (NM_011262.1,89-107).
gcgagcaatactacaaaga

SEQ ID NO: 458649 - DNA, 19 bp, Mus musculus
  siRNA target sequence for Dpf2 (NM_011262.1,190-208).
ggagtagcccagagcaatt

SEQ ID NO: 458650 - DNA, 19 bp, Mus musculus
  siRNA target sequence for Dpf2 (NM_011262.1,250-268).
gcctctggacagttatact

SEQ ID NO: 458651 - DNA, 19 bp, Mus musculus
  siRNA target sequence for Dpf2 (NM_011262.1,316-334).
gaggatcccaggctttctt

SEQ ID NO: 458652 - DNA, 19 bp, Mus musculus
  siRNA target sequence for Dpf2 (NM_011262.1,327-345).
gctttctttcccatcgatt

SEQ ID NO: 458653 - DNA, 19 bp, Mus musculus
  siRNA target sequence for Dpf2 (NM_011262.1,328-346).
ctttctttcccatcgatta

SEQ ID NO: 458654 - DNA, 19 bp, Mus musculus
  siRNA target sequence for Dpf2 (NM_011262.1,509-527).
cacggaagcggatcattga

SEQ ID NO: 458655 - DNA, 19 bp, Mus musculus
  siRNA target sequence for Dpf2 (NM_011262.1,850-868).
gccctgcctaacaactact

SEQ ID NO: 458656 - DNA, 19 bp, Mus musculus
  siRNA target sequence for Dpf3 (NM_058212.1,32-50).
cgcttggggaccagttcta

SEQ ID NO: 458657 - DNA, 19 bp, Mus musculus
  siRNA target sequence for Dpf3 (NM_058212.1,34-52).
cttggggaccagttctaca

SEQ ID NO: 458658 - DNA, 19 bp, Mus musculus
  siRNA target sequence for Dpf3 (NM_058212.1,260-278).
caccagaggacccaaaact

SEQ ID NO: 458659 - DNA, 19 bp, Mus musculus
  siRNA target sequence for Dpf3 (NM_058212.1,312-330).
cctgaagaaagatggattt

SEQ ID NO: 458660 - DNA, 19 bp, Mus musculus
  siRNA target sequence for Dpf3 (NM_058212.1,490-508).
gttcccaagcgcaagaaca

SEQ ID NO: 458661 - DNA, 19 bp, Mus musculus
  siRNA target sequence for Dpf3 (NM_058212.1,605-623).
gtggcaagcgctacaagaa

SEQ ID NO: 458662 - DNA, 19 bp, Mus musculus
  siRNA target sequence for Dpf3 (NM_058212.1,639-657).
ctaccactacgctcatact

SEQ ID NO: 458663 - DNA, 19 bp, Mus musculus
  siRNA target sequence for Dpf3 (NM_058212.1,756-774).
cgggacagtcattcctaat

SEQ ID NO: 458664 - DNA, 19 bp, Mus musculus
  siRNA target sequence for Dpf3 (NM_058212.1,757-775).
gggacagtcattcctaata

SEQ ID NO: 458665 - DNA, 19 bp, Mus musculus
  siRNA target sequence for Dpf3 (NM_058212.1,761-779).
cagtcattcctaataacta

SEQ ID NO: 458666 - DNA, 19 bp, Mus musculus
  siRNA target sequence for Dpf3 (NM_058212.1,763-781).
gtcattcctaataactact

SEQ ID NO: 458667 - DNA, 19 bp, Mus musculus
  siRNA target sequence for Dpf3 (NM_058212.1,919-937).
cgtaccacggaggacttat

SEQ ID NO: 458668 - DNA, 19 bp, Mus musculus
  siRNA target sequence for Dpf3 (NM_058212.1,920-938).
gtaccacggaggacttatt

SEQ ID NO: 458669 - DNA, 19 bp, Mus musculus
  siRNA target sequence for Dpf3 (NM_058212.1,939-957).
cggttccacgtcagaaagt

SEQ ID NO: 458670 - DNA, 19 bp, Mus musculus
  siRNA target sequence for Dpf3 (NM_058212.1,941-959).
gttccacgtcagaaagtga

SEQ ID NO: 458671 - DNA, 19 bp, Mus musculus
  siRNA target sequence for Dpf3 (NM_058212.1,952-970).
gaaagtgacacctcaactt

SEQ ID NO: 458672 - DNA, 19 bp, Mus musculus
  siRNA target sequence for Dpf3 (NM_058212.1,956-974).
gtgacacctcaactttcta

SEQ ID NO: 458673 - DNA, 19 bp, Mus musculus
  siRNA target sequence for Dr1 (NM_026106.3,707-725).
ctggcaacgacgatgatct

SEQ ID NO: 458674 - DNA, 19 bp, Mus musculus
  siRNA target sequence for Dr1 (NM_026106.3,739-757).
gctgctataaataagatga

SEQ ID NO: 458675 - DNA, 19 bp, Mus musculus
  siRNA target sequence for Dr1 (NM_026106.3,742-760).
gctataaataagatgatca

SEQ ID NO: 458676 - DNA, 19 bp, Mus musculus
  siRNA target sequence for Dr1 (NM_026106.3,743-761).
ctataaataagatgatcaa

SEQ ID NO: 458677 - DNA, 19 bp, Mus musculus
  siRNA target sequence for Dr1 (NM_026106.3,759-777).
caaagagactcttcctaat

SEQ ID NO: 458678 - DNA, 19 bp, Mus musculus
  siRNA target sequence for Dr1 (NM_026106.3,797-815).
cccgagagctggtagtgaa

SEQ ID NO: 458679 - DNA, 19 bp, Mus musculus
  siRNA target sequence for Dr1 (NM_026106.3,818-836).
gctgcacggaattcattca

SEQ ID NO: 458680 - DNA, 19 bp, Mus musculus
  siRNA target sequence for Dr1 (NM_026106.3,824-842).
cggaattcattcaccttat

SEQ ID NO: 458681 - DNA, 19 bp, Mus musculus
  siRNA target sequence for Dr1 (NM_026106.3,825-843).
ggaattcattcaccttata

SEQ ID NO: 458682 - DNA, 19 bp, Mus musculus
  siRNA target sequence for Dr1 (NM_026106.3,826-844).
gaattcattcaccttatat

SEQ ID NO: 458683 - DNA, 19 bp, Mus musculus
  siRNA target sequence for Dr1 (NM_026106.3,850-868).
gaagccaacgagatttgta

SEQ ID NO: 458684 - DNA, 19 bp, Mus musculus
  siRNA target sequence for Dr1 (NM_026106.3,853-871).
gccaacgagatttgtaaca

SEQ ID NO: 458685 - DNA, 19 bp, Mus musculus
  siRNA target sequence for Dr1 (NM_026106.3,854-872).
ccaacgagatttgtaacaa

SEQ ID NO: 458686 - DNA, 19 bp, Mus musculus
  siRNA target sequence for Dr1 (NM_026106.3,928-946).
ggctttggctcttacatca

SEQ ID NO: 458687 - DNA, 19 bp, Mus musculus
  siRNA target sequence for Dr1 (NM_026106.3,942-960).
catcagtgaagtaaaagaa

SEQ ID NO: 458688 - DNA, 19 bp, Mus musculus
  siRNA target sequence for Dr1 (NM_026106.3,1003-1021).
gccagttctcgtttggaaa

SEQ ID NO: 458689 - DNA, 19 bp, Mus musculus
  siRNA target sequence for Dr1 (NM_026106.3,1004-1022).
ccagttctcgtttggaaaa

SEQ ID NO: 458690 - DNA, 19 bp, Mus musculus
  siRNA target sequence for Dr1 (NM_026106.3,1029-1047).
cattcctgaagaggaatta

SEQ ID NO: 458691 - DNA, 19 bp, Mus musculus
  siRNA target sequence for Dr1 (NM_026106.3,1176-1194).
cactcaagcaggatcttca

SEQ ID NO: 458692 - DNA, 19 bp, Mus musculus
  siRNA target sequence for Drap1 (NM_024176.1,378-396).
ctcgaaatgccaaaaccat

SEQ ID NO: 458693 - DNA, 19 bp, Mus musculus
  siRNA target sequence for DXBwg1396e (NM_029836.1,412-430).
ggaaacgctcccatcttca

SEQ ID NO: 458694 - DNA, 19 bp, Mus musculus
  siRNA target sequence for DXBwg1396e (NM_029836.1,444-462).
gaagcctggcaattgactt

SEQ ID NO: 458695 - DNA, 19 bp, Mus musculus
  siRNA target sequence for DXBwg1396e (NM_029836.1,499-517).
cctagaaacctgtagctta

SEQ ID NO: 458696 - DNA, 19 bp, Mus musculus
  siRNA target sequence for DXBwg1396e (NM_029836.1,709-727).
ggccctggagagcattcaa

SEQ ID NO: 458697 - DNA, 19 bp, Mus musculus
  siRNA target sequence for DXBwg1396e (NM_029836.1,710-728).
gccctggagagcattcaaa

SEQ ID NO: 458698 - DNA, 19 bp, Mus musculus
  siRNA target sequence for DXBwg1396e (NM_029836.1,711-729).
ccctggagagcattcaaat

SEQ ID NO: 458699 - DNA, 19 bp, Mus musculus
  siRNA target sequence for DXBwg1396e (NM_029836.1,773-791).
cgtctcaagcgcaaattca

SEQ ID NO: 458700 - DNA, 19 bp, Mus musculus
  siRNA target sequence for DXBwg1396e (NM_029836.1,774-792).
gtctcaagcgcaaattcat

SEQ ID NO: 458701 - DNA, 19 bp, Mus musculus
  siRNA target sequence for DXBwg1396e (NM_029836.1,875-893).
caccccagaatttcaatct

SEQ ID NO: 458702 - DNA, 19 bp, Mus musculus
  siRNA target sequence for DXBwg1396e (NM_029836.1,878-896).
cccagaatttcaatcttga

SEQ ID NO: 458703 - DNA, 19 bp, Mus musculus
  siRNA target sequence for DXBwg1396e (NM_029836.1,914-932).
gacattttccgctacttga

SEQ ID NO: 458704 - DNA, 19 bp, Mus musculus
  siRNA target sequence for DXBwg1396e (NM_029836.1,922-940).
ccgctacttgaccaatctt

SEQ ID NO: 458705 - DNA, 19 bp, Mus musculus
  siRNA target sequence for DXBwg1396e (NM_029836.1,924-942).
gctacttgaccaatcttca

SEQ ID NO: 458706 - DNA, 19 bp, Mus musculus
  siRNA target sequence for DXBwg1396e (NM_029836.1,1055-1073).
ggccggttggtgtctcatt

SEQ ID NO: 458707 - DNA, 19 bp, Mus musculus
  siRNA target sequence for DXBwg1396e (NM_029836.1,1057-1075).
ccggttggtgtctcattct

SEQ ID NO: 458708 - DNA, 19 bp, Mus musculus
  siRNA target sequence for DXBwg1396e (NM_029836.1,1058-1076).
cggttggtgtctcattcta

SEQ ID NO: 458709 - DNA, 19 bp, Mus musculus
  siRNA target sequence for DXBwg1396e (NM_029836.1,1070-1088).
cattctaccccaatacgtt

SEQ ID NO: 458710 - DNA, 19 bp, Mus musculus
  siRNA target sequence for DXBwg1396e (NM_029836.1,1102-1120).
ggaaccccaggcctataat

SEQ ID NO: 458711 - DNA, 19 bp, Mus musculus
  siRNA target sequence for DXBwg1396e (NM_029836.1,1229-1247).
ccagtacgctactatatga

SEQ ID NO: 458712 - DNA, 19 bp, Mus musculus
  siRNA target sequence for DXBwg1396e (NM_029836.1,1250-1268).
cgaggtggctacagatcaa

SEQ ID NO: 458713 - DNA, 19 bp, Mus musculus
  siRNA target sequence for DXBwg1396e (NM_029836.1,1292-1310).
gaaagagccaagaatcaat

SEQ ID NO: 458714 - DNA, 19 bp, Mus musculus
  siRNA target sequence for DXBwg1396e (NM_029836.1,1296-1314).
gagccaagaatcaatatga

SEQ ID NO: 458715 - DNA, 19 bp, Mus musculus
  siRNA target sequence for DXBwg1396e (NM_029836.1,1334-1352).
gctcatgaccattatgcaa

SEQ ID NO: 458716 - DNA, 19 bp, Mus musculus
  siRNA target sequence for DXBwg1396e (NM_029836.1,1364-1382).
ctcagtgacatctcagaaa

SEQ ID NO: 458717 - DNA, 19 bp, Mus musculus
  siRNA target sequence for DXBwg1396e (NM_029836.1,1368-1386).
gtgacatctcagaaattga

SEQ ID NO: 458718 - DNA, 19 bp, Mus musculus
  siRNA target sequence for DXBwg1396e (NM_029836.1,1407-1425).
ccattcacgacatcaagat

SEQ ID NO: 458719 - DNA, 19 bp, Mus musculus
  siRNA target sequence for DXBwg1396e (NM_029836.1,1450-1468).
ctacttcgagactactgat

SEQ ID NO: 458720 - DNA, 19 bp, Mus musculus
  siRNA target sequence for DXBwg1396e (NM_029836.1,1453-1471).
cttcgagactactgataat

SEQ ID NO: 458721 - DNA, 19 bp, Mus musculus
  siRNA target sequence for DXBwg1396e (NM_029836.1,1561-1579).
gagcgttgccgcaaatcca

SEQ ID NO: 458722 - DNA, 19 bp, Mus musculus
  siRNA target sequence for DXBwg1396e (NM_029836.1,1673-1691).
gacaaccagcaggttacta

SEQ ID NO: 458723 - DNA, 19 bp, Mus musculus
  siRNA target sequence for DXBwg1396e (NM_029836.1,1675-1693).
caaccagcaggttactaat

SEQ ID NO: 458724 - DNA, 19 bp, Mus musculus
  siRNA target sequence for DXBwg1396e (NM_029836.1,1822-1840).
cagggacattagatactat

SEQ ID NO: 458725 - DNA, 19 bp, Mus musculus
  siRNA target sequence for DXBwg1396e (NM_029836.1,1824-1842).
gggacattagatactataa

SEQ ID NO: 458726 - DNA, 19 bp, Mus musculus
  siRNA target sequence for DXBwg1396e (NM_029836.1,1826-1844).
gacattagatactataaga

SEQ ID NO: 458727 - DNA, 19 bp, Mus musculus
  siRNA target sequence for DXBwg1396e (NM_029836.1,2005-2023).
ctatggggaggaaagaagt

SEQ ID NO: 458728 - DNA, 19 bp, Mus musculus
  siRNA target sequence for DXBwg1396e (NM_029836.1,2029-2047).
gaactccgaagattctgat

SEQ ID NO: 458729 - DNA, 19 bp, Mus musculus
  siRNA target sequence for DXBwg1396e (NM_029836.1,2032-2050).
ctccgaagattctgatatt

SEQ ID NO: 458730 - DNA, 19 bp, Mus musculus
  siRNA target sequence for DXBwg1396e (NM_029836.1,2059-2077).
gctgccggtcccaaaagct

SEQ ID NO: 458731 - DNA, 19 bp, Mus musculus
  siRNA target sequence for DXBwg1396e (NM_029836.1,2060-2078).
ctgccggtcccaaaagctt

SEQ ID NO: 458732 - DNA, 19 bp, Mus musculus
  siRNA target sequence for E030006K04Rik (NM_139206.1,213-231).
gggtttcctggattctcat

SEQ ID NO: 458733 - DNA, 19 bp, Mus musculus
  siRNA target sequence for E030006K04Rik (NM_139206.1,222-240).
ggattctcatctggataat

SEQ ID NO: 458734 - DNA, 19 bp, Mus musculus
  siRNA target sequence for E030006K04Rik (NM_139206.1,227-245).
ctcatctggataataccat

SEQ ID NO: 458735 - DNA, 19 bp, Mus musculus
  siRNA target sequence for E030006K04Rik (NM_139206.1,347-365).
ctggactgagcccaatctt

SEQ ID NO: 458736 - DNA, 19 bp, Mus musculus
  siRNA target sequence for E030006K04Rik (NM_139206.1,349-367).
ggactgagcccaatcttct

SEQ ID NO: 458737 - DNA, 19 bp, Mus musculus
  siRNA target sequence for E030006K04Rik (NM_139206.1,443-461).
cttcagtcccgaataccat

SEQ ID NO: 458738 - DNA, 19 bp, Mus musculus
  siRNA target sequence for E030006K04Rik (NM_139206.1,452-470).
cgaataccatggagatgat

SEQ ID NO: 458739 - DNA, 19 bp, Mus musculus
  siRNA target sequence for E030006K04Rik (NM_139206.1,584-602).
caggcacagtgcacatcat

SEQ ID NO: 458740 - DNA, 19 bp, Mus musculus
  siRNA target sequence for E030006K04Rik (NM_139206.1,889-907).
cctcagggaaactatgtgt

SEQ ID NO: 458741 - DNA, 19 bp, Mus musculus
  siRNA target sequence for E030006K04Rik (NM_139206.1,890-908).
ctcagggaaactatgtgtt

SEQ ID NO: 458742 - DNA, 19 bp, Mus musculus
  siRNA target sequence for E030006K04Rik (NM_139206.1,934-952).
ggaaggagtctaatgtact

SEQ ID NO: 458743 - DNA, 19 bp, Mus musculus
  siRNA target sequence for E030006K04Rik (NM_139206.1,935-953).
gaaggagtctaatgtactt

SEQ ID NO: 458744 - DNA, 19 bp, Mus musculus
  siRNA target sequence for E030006K04Rik (NM_139206.1,1049-1067).
ccggccagagagtatttgt

SEQ ID NO: 458745 - DNA, 19 bp, Mus musculus
  siRNA target sequence for E030006K04Rik (NM_139206.1,1051-1069).
ggccagagagtatttgtgt

SEQ ID NO: 458746 - DNA, 19 bp, Mus musculus
  siRNA target sequence for E030006K04Rik (NM_139206.1,1183-1201).
cgcacgggcacgttagagt

SEQ ID NO: 458747 - DNA, 19 bp, Mus musculus
  siRNA target sequence for E030006K04Rik (NM_139206.1,1184-1202).
gcacgggcacgttagagtt

SEQ ID NO: 458748 - DNA, 19 bp, Mus musculus
  siRNA target sequence for E030006K04Rik (NM_139206.1,1290-1308).
cgggatctgcttcattgaa

SEQ ID NO: 458749 - DNA, 19 bp, Mus musculus
  siRNA target sequence for E030006K04Rik (NM_139206.1,1292-1310).
ggatctgcttcattgaact

SEQ ID NO: 458750 - DNA, 19 bp, Mus musculus
  siRNA target sequence for E030006K04Rik (NM_139206.1,1637-1655).
cgagtgtctggagtaatga

SEQ ID NO: 458751 - DNA, 19 bp, Mus musculus
  siRNA target sequence for E030006K04Rik (NM_139206.1,1759-1777).
cctcgaggagagttcatct

SEQ ID NO: 458752 - DNA, 19 bp, Mus musculus
  siRNA target sequence for E030006K04Rik (NM_139206.1,1816-1834).
cctcggcatccagatcata

SEQ ID NO: 458753 - DNA, 19 bp, Mus musculus
  siRNA target sequence for E030006K04Rik (NM_139206.1,1951-1969).
ctcaatggcagcttgctta

SEQ ID NO: 458754 - DNA, 19 bp, Mus musculus
  siRNA target sequence for E030006K04Rik (NM_139206.1,2011-2029).
gtagtgcctgccacttaca

SEQ ID NO: 458755 - DNA, 19 bp, Mus musculus
  siRNA target sequence for E030006K04Rik (NM_139206.1,2186-2204).
cccaggatattgtatgtct

SEQ ID NO: 458756 - DNA, 19 bp, Mus musculus
  siRNA target sequence for E030006K04Rik (NM_139206.1,2242-2260).
gacaggttccccttttcct

SEQ ID NO: 458757 - DNA, 19 bp, Mus musculus
  siRNA target sequence for E030006K04Rik (NM_139206.1,2244-2262).
caggttccccttttccttt

SEQ ID NO: 458758 - DNA, 19 bp, Mus musculus
  siRNA target sequence for E030006K04Rik (NM_139206.1,2535-2553).
ggacatggtgcatttacga

SEQ ID NO: 458759 - DNA, 19 bp, Mus musculus
  siRNA target sequence for E030006K04Rik (NM_139206.1,2585-2603).
ctgacactccagacaaaaa

SEQ ID NO: 458760 - DNA, 19 bp, Mus musculus
  siRNA target sequence for E030006K04Rik (NM_139206.1,2651-2669).
gggaaggcaggctagactt

SEQ ID NO: 458761 - DNA, 19 bp, Mus musculus
  siRNA target sequence for E030006K04Rik (NM_139206.1,2744-2762).
ggggagacatccctatcat

SEQ ID NO: 458762 - DNA, 19 bp, Mus musculus
  siRNA target sequence for E030006K04Rik (NM_139206.1,2745-2763).
gggagacatccctatcatt

SEQ ID NO: 458763 - DNA, 19 bp, Mus musculus
  siRNA target sequence for E030006K04Rik (NM_139206.1,2770-2788).
gcttgcatcagttttgtca

SEQ ID NO: 458764 - DNA, 19 bp, Mus musculus
  siRNA target sequence for E030006K04Rik (NM_139206.1,2850-2868).
gcgactcttggctgagttt

SEQ ID NO: 458765 - DNA, 19 bp, Mus musculus
  siRNA target sequence for E030006K04Rik (NM_139206.1,2851-2869).
cgactcttggctgagttta

SEQ ID NO: 458766 - DNA, 19 bp, Mus musculus
  siRNA target sequence for E030006K04Rik (NM_139206.1,2878-2896).
gcccggtcagtgaagctta

SEQ ID NO: 458767 - DNA, 19 bp, Mus musculus
  siRNA target sequence for E030006K04Rik (NM_139206.1,2897-2915).
gaccacgggaacactttgt

SEQ ID NO: 458768 - DNA, 19 bp, Mus musculus
  siRNA target sequence for E030006K04Rik (NM_139206.1,2900-2918).
cacgggaacactttgtaga

SEQ ID NO: 458769 - DNA, 19 bp, Mus musculus
  siRNA target sequence for E030006K04Rik (NM_139206.1,2910-2928).
ctttgtagaagatgttact

SEQ ID NO: 458770 - DNA, 19 bp, Mus musculus
  siRNA target sequence for E030006K04Rik (NM_139206.1,3121-3139).
cagaagtgtgcgtctctaa

SEQ ID NO: 458771 - DNA, 19 bp, Mus musculus
  siRNA target sequence for E030006K04Rik (NM_139206.1,3155-3173).
ggaacctggccctactgtt

SEQ ID NO: 458772 - DNA, 19 bp, Mus musculus
  siRNA target sequence for E030006K04Rik (NM_139206.1,3156-3174).
gaacctggccctactgttt

SEQ ID NO: 458773 - DNA, 19 bp, Mus musculus
  siRNA target sequence for E030006K04Rik (NM_139206.1,3294-3312).
cttggaggtcagtctcatt

SEQ ID NO: 458774 - DNA, 19 bp, Mus musculus
  siRNA target sequence for E030006K04Rik (NM_139206.1,3298-3316).
gaggtcagtctcattacca

SEQ ID NO: 458775 - DNA, 19 bp, Mus musculus
  siRNA target sequence for E030006K04Rik (NM_139206.1,3352-3370).
ctcatcatggaggtttaca

SEQ ID NO: 458776 - DNA, 19 bp, Mus musculus
  siRNA target sequence for E030006K04Rik (NM_139206.1,3393-3411).
ctgtgtcaccctaaaggta

SEQ ID NO: 458777 - DNA, 19 bp, Mus musculus
  siRNA target sequence for E030006K04Rik (NM_139206.1,3529-3547).
ccactgcaccccaaagaaa

SEQ ID NO: 458778 - DNA, 19 bp, Mus musculus
  siRNA target sequence for E030006K04Rik (NM_139206.1,3837-3855).
gggaatccgcaagaagtta

SEQ ID NO: 458779 - DNA, 19 bp, Mus musculus
  siRNA target sequence for E030006K04Rik (NM_139206.1,3838-3856).
ggaatccgcaagaagttaa

SEQ ID NO: 458780 - DNA, 19 bp, Mus musculus
  siRNA target sequence for E030006K04Rik (NM_139206.1,3839-3857).
gaatccgcaagaagttaaa

SEQ ID NO: 458781 - DNA, 19 bp, Mus musculus
  siRNA target sequence for E030006K04Rik (NM_139206.1,3843-3861).
ccgcaagaagttaaaacct

SEQ ID NO: 458782 - DNA, 19 bp, Mus musculus
  siRNA target sequence for E030006K04Rik (NM_139206.1,3872-3890).
ggggtttcacattaatatt

SEQ ID NO: 458783 - DNA, 19 bp, Mus musculus
  siRNA target sequence for E030006K04Rik (NM_139206.1,3875-3893).
gtttcacattaatattgga

SEQ ID NO: 458784 - DNA, 19 bp, Mus musculus
  siRNA target sequence for E030006K04Rik (NM_139206.1,3944-3962).
ggaccacaagcatccttaa

SEQ ID NO: 458785 - DNA, 19 bp, Mus musculus
  siRNA target sequence for E030006K04Rik (NM_139206.1,3945-3963).
gaccacaagcatccttaaa

SEQ ID NO: 458786 - DNA, 19 bp, Mus musculus
  siRNA target sequence for E030006K04Rik (NM_139206.1,3978-3996).
ccaacagtccgtggtttta

SEQ ID NO: 458787 - DNA, 19 bp, Mus musculus
  siRNA target sequence for E030006K04Rik (NM_139206.1,4103-4121).
ccctgcggcgactacacaa

SEQ ID NO: 458788 - DNA, 19 bp, Mus musculus
  siRNA target sequence for E030006K04Rik (NM_139206.1,4127-4145).
ggaccttatccatgttctt

SEQ ID NO: 458789 - DNA, 19 bp, Mus musculus
  siRNA target sequence for E030006K04Rik (NM_139206.1,4128-4146).
gaccttatccatgttcttt

SEQ ID NO: 458790 - DNA, 19 bp, Mus musculus
  siRNA target sequence for E130113K22Rik (NM_178718.2,819-837).
gcattccggagcagtacat

SEQ ID NO: 458791 - DNA, 19 bp, Mus musculus
  siRNA target sequence for E130113K22Rik (NM_178718.2,873-891).
ggagtgcaaaatatcgtta

SEQ ID NO: 458792 - DNA, 19 bp, Mus musculus
  siRNA target sequence for E130113K22Rik (NM_178718.2,874-892).
gagtgcaaaatatcgttat

SEQ ID NO: 458793 - DNA, 19 bp, Mus musculus
  siRNA target sequence for E130113K22Rik (NM_178718.2,876-894).
gtgcaaaatatcgttatga

SEQ ID NO: 458794 - DNA, 19 bp, Mus musculus
  siRNA target sequence for E130113K22Rik (NM_178718.2,898-916).
ggagtggttgaataatgga

SEQ ID NO: 458795 - DNA, 19 bp, Mus musculus
  siRNA target sequence for E130113K22Rik (NM_178718.2,918-936).
gaatgtatgggttatcttt

SEQ ID NO: 458796 - DNA, 19 bp, Mus musculus
  siRNA target sequence for E130113K22Rik (NM_178718.2,1028-1046).
catggattacagcttaaga

SEQ ID NO: 458797 - DNA, 19 bp, Mus musculus
  siRNA target sequence for E130113K22Rik (NM_178718.2,1039-1057).
gcttaagattggaatacta

SEQ ID NO: 458798 - DNA, 19 bp, Mus musculus
  siRNA target sequence for E130113K22Rik (NM_178718.2,1040-1058).
cttaagattggaatactaa

SEQ ID NO: 458799 - DNA, 19 bp, Mus musculus
  siRNA target sequence for E130113K22Rik (NM_178718.2,1045-1063).
gattggaatactaaagaat

SEQ ID NO: 458800 - DNA, 19 bp, Mus musculus
  siRNA target sequence for E130113K22Rik (NM_178718.2,1222-1240).
ggaagaaacttacataaca

SEQ ID NO: 458801 - DNA, 19 bp, Mus musculus
  siRNA target sequence for E130113K22Rik (NM_178718.2,1223-1241).
gaagaaacttacataacaa

SEQ ID NO: 458802 - DNA, 19 bp, Mus musculus
  siRNA target sequence for E130113K22Rik (NM_178718.2,1305-1323).
gaagctcagatgatgatga

SEQ ID NO: 458803 - DNA, 19 bp, Mus musculus
  siRNA target sequence for E130113K22Rik (NM_178718.2,1351-1369).
gctccgtgtgccagataaa

SEQ ID NO: 458804 - DNA, 19 bp, Mus musculus
  siRNA target sequence for E130113K22Rik (NM_178718.2,1467-1485).
caggagactcgcatcttca

SEQ ID NO: 458805 - DNA, 19 bp, Mus musculus
  siRNA target sequence for E130113K22Rik (NM_178718.2,1499-1517).
ctcctcacgcacatagaaa

SEQ ID NO: 458806 - DNA, 19 bp, Mus musculus
  siRNA target sequence for E130113K22Rik (NM_178718.2,1543-1561).
gatggacctcatagaaaaa

SEQ ID NO: 458807 - DNA, 19 bp, Mus musculus
  siRNA target sequence for E130113K22Rik (NM_178718.2,1546-1564).
ggacctcatagaaaaagaa

SEQ ID NO: 458808 - DNA, 19 bp, Mus musculus
  siRNA target sequence for E130113K22Rik (NM_178718.2,1625-1643).
gcaagactgccccaactta

SEQ ID NO: 458809 - DNA, 19 bp, Mus musculus
  siRNA target sequence for E130113K22Rik (NM_178718.2,1626-1644).
caagactgccccaacttaa

SEQ ID NO: 458810 - DNA, 19 bp, Mus musculus
  siRNA target sequence for E130113K22Rik (NM_178718.2,1637-1655).
caacttaaacgtcacttaa

SEQ ID NO: 458811 - DNA, 19 bp, Mus musculus
  siRNA target sequence for E130113K22Rik (NM_178718.2,1672-1690).
cgtgggcaaagtacaacaa

SEQ ID NO: 458812 - DNA, 19 bp, Mus musculus
  siRNA target sequence for E130113K22Rik (NM_178718.2,1678-1696).
caaagtacaacaaattgca

SEQ ID NO: 458813 - DNA, 19 bp, Mus musculus
  siRNA target sequence for E130113K22Rik (NM_178718.2,1694-1712).
gcaactctttgctctgtat

SEQ ID NO: 458814 - DNA, 19 bp, Mus musculus
  siRNA target sequence for E130317O14Rik (NM_144922.1,273-291).
ggttacctgggcacaacaa

SEQ ID NO: 458815 - DNA, 19 bp, Mus musculus
  siRNA target sequence for E130317O14Rik (NM_144922.1,392-410).
ccggacggacattatgtca

SEQ ID NO: 458816 - DNA, 19 bp, Mus musculus
  siRNA target sequence for E130317O14Rik (NM_144922.1,393-411).
cggacggacattatgtcat

SEQ ID NO: 458817 - DNA, 19 bp, Mus musculus
  siRNA target sequence for E130317O14Rik (NM_144922.1,407-425).
gtcatggacaatattacca

SEQ ID NO: 458818 - DNA, 19 bp, Mus musculus
  siRNA target sequence for E130317O14Rik (NM_144922.1,518-536).
gtatatcacccagaattga

SEQ ID NO: 458819 - DNA, 19 bp, Mus musculus
  siRNA target sequence for E130317O14Rik (NM_144922.1,600-618).
cagacagaccacaattcca

SEQ ID NO: 458820 - DNA, 19 bp, Mus musculus
  siRNA target sequence for E130317O14Rik (NM_144922.1,609-627).
cacaattccagaatcgaaa

SEQ ID NO: 458821 - DNA, 19 bp, Mus musculus
  siRNA target sequence for E130317O14Rik (NM_144922.1,746-764).
gccattgacacatataact

SEQ ID NO: 458822 - DNA, 19 bp, Mus musculus
  siRNA target sequence for E130317O14Rik (NM_144922.1,794-812).
cggagtagtggctatccat

SEQ ID NO: 458823 - DNA, 19 bp, Mus musculus
  siRNA target sequence for E130317O14Rik (NM_144922.1,795-813).
ggagtagtggctatccatt

SEQ ID NO: 458824 - DNA, 19 bp, Mus musculus
  siRNA target sequence for E130317O14Rik (NM_144922.1,816-834).
cgattgagggctttgcata

SEQ ID NO: 458825 - DNA, 19 bp, Mus musculus
  siRNA target sequence for E130317O14Rik (NM_144922.1,999-1017).
gtgaagagcctttttccta

SEQ ID NO: 458826 - DNA, 19 bp, Mus musculus
  siRNA target sequence for E130317O14Rik (NM_144922.1,1061-1079).
gaaaactacggagacaaat

SEQ ID NO: 458827 - DNA, 19 bp, Mus musculus
  siRNA target sequence for E130317O14Rik (NM_144922.1,1130-1148).
gatgtggagctttctttta

SEQ ID NO: 458828 - DNA, 19 bp, Mus musculus
  siRNA target sequence for E130317O14Rik (NM_144922.1,1133-1151).
gtggagctttcttttacca

SEQ ID NO: 458829 - DNA, 19 bp, Mus musculus
  siRNA target sequence for E130317O14Rik (NM_144922.1,1414-1432).
gaccacgtgggccatcaaa

SEQ ID NO: 458830 - DNA, 19 bp, Mus musculus
  siRNA target sequence for E130317O14Rik (NM_144922.1,1416-1434).
ccacgtgggccatcaaaca

SEQ ID NO: 458831 - DNA, 19 bp, Mus musculus
  siRNA target sequence for E130317O14Rik (NM_144922.1,1449-1467).
cttccaagaagtacaacat

SEQ ID NO: 458832 - DNA, 19 bp, Mus musculus
  siRNA target sequence for E130317O14Rik (NM_144922.1,1462-1480).
caacattctgggtaccaat

SEQ ID NO: 458833 - DNA, 19 bp, Mus musculus
  siRNA target sequence for E130317O14Rik (NM_144922.1,1476-1494).
ccaatgccatcatggataa

SEQ ID NO: 458834 - DNA, 19 bp, Mus musculus
  siRNA target sequence for E130317O14Rik (NM_144922.1,1513-1531).
gcggaggcagcggaactat

SEQ ID NO: 458835 - DNA, 19 bp, Mus musculus
  siRNA target sequence for E130317O14Rik (NM_144922.1,1572-1590).
gcctcaaccgtcttattca

SEQ ID NO: 458836 - DNA, 19 bp, Mus musculus
  siRNA target sequence for E130317O14Rik (NM_144922.1,1574-1592).
ctcaaccgtcttattcaga

SEQ ID NO: 458837 - DNA, 19 bp, Mus musculus
  siRNA target sequence for E130317O14Rik (NM_144922.1,1599-1617).
cccgaaagaagcgaaacta

SEQ ID NO: 458838 - DNA, 19 bp, Mus musculus
  siRNA target sequence for E130317O14Rik (NM_144922.1,1600-1618).
ccgaaagaagcgaaactat

SEQ ID NO: 458839 - DNA, 19 bp, Mus musculus
  siRNA target sequence for E130317O14Rik (NM_144922.1,1601-1619).
cgaaagaagcgaaactata

SEQ ID NO: 458840 - DNA, 19 bp, Mus musculus
  siRNA target sequence for E130317O14Rik (NM_144922.1,1611-1629).
gaaactatatcctagatca

SEQ ID NO: 458841 - DNA, 19 bp, Mus musculus
  siRNA target sequence for E130317O14Rik (NM_144922.1,1621-1639).
cctagatcagaccaatgtt

SEQ ID NO: 458842 - DNA, 19 bp, Mus musculus
  siRNA target sequence for E130317O14Rik (NM_144922.1,1622-1640).
ctagatcagaccaatgttt

SEQ ID NO: 458843 - DNA, 19 bp, Mus musculus
  siRNA target sequence for E130317O14Rik (NM_144922.1,1724-1742).
ctcaaagaccgcacagtaa

SEQ ID NO: 458844 - DNA, 19 bp, Mus musculus
  siRNA target sequence for E130317O14Rik (NM_144922.1,1773-1791).
cagatcacgcagtcttaga

SEQ ID NO: 458845 - DNA, 19 bp, Mus musculus
  siRNA target sequence for E130317O14Rik (NM_144922.1,1775-1793).
gatcacgcagtcttagaaa

SEQ ID NO: 458846 - DNA, 19 bp, Mus musculus
  siRNA target sequence for E130317O14Rik (NM_144922.1,1834-1852).
ggatgaggttctgttcatt

SEQ ID NO: 458847 - DNA, 19 bp, Mus musculus
  siRNA target sequence for E130317O14Rik (NM_144922.1,1925-1943).
cctgagaagcgctttgaca

SEQ ID NO: 458848 - DNA, 19 bp, Mus musculus
  siRNA target sequence for E130317O14Rik (NM_144922.1,1982-2000).
ggtttccagcggtatgaca

SEQ ID NO: 458849 - DNA, 19 bp, Mus musculus
  siRNA target sequence for E130317O14Rik (NM_144922.1,1983-2001).
gtttccagcggtatgacaa

SEQ ID NO: 458850 - DNA, 19 bp, Mus musculus
  siRNA target sequence for E130317O14Rik (NM_144922.1,2108-2126).
ggtggtggctacaaccaaa

SEQ ID NO: 458851 - DNA, 19 bp, Mus musculus
  siRNA target sequence for E130317O14Rik (NM_144922.1,2109-2127).
gtggtggctacaaccaaaa

SEQ ID NO: 458852 - DNA, 19 bp, Mus musculus
  siRNA target sequence for E130317O14Rik (NM_144922.1,2123-2141).
caaaaccgctggggtaata

SEQ ID NO: 458853 - DNA, 19 bp, Mus musculus
  siRNA target sequence for E130317O14Rik (NM_144922.1,2129-2147).
cgctggggtaataacaaca

SEQ ID NO: 458854 - DNA, 19 bp, Mus musculus
  siRNA target sequence for E130317O14Rik (NM_144922.1,2327-2345).
ggctccagcgccaatacca

SEQ ID NO: 458855 - DNA, 19 bp, Mus musculus
  siRNA target sequence for E130317O14Rik (NM_144922.1,2494-2512).
caatcctgccccctataca

SEQ ID NO: 458856 - DNA, 19 bp, Mus musculus
  siRNA target sequence for E130317O14Rik (NM_144922.1,2550-2568).
ccagctataaccagtatca

SEQ ID NO: 458857 - DNA, 19 bp, Mus musculus
  siRNA target sequence for E130317O14Rik (NM_144922.1,2581-2599).
gcagtggagccagtactat

SEQ ID NO: 458858 - DNA, 19 bp, Mus musculus
  siRNA target sequence for E130317O14Rik (NM_178089.2,1061-1079).
gctttgcggtactggaatt

SEQ ID NO: 458859 - DNA, 19 bp, Mus musculus
  siRNA target sequence for Ebf1 (NM_007897.1,317-335).
ggttcgtggagaaggaaaa

SEQ ID NO: 458860 - DNA, 19 bp, Mus musculus
  siRNA target sequence for Ebf1 (NM_007897.1,345-363).
cagcgaaaagaccaataat

SEQ ID NO: 458861 - DNA, 19 bp, Mus musculus
  siRNA target sequence for Ebf1 (NM_007897.1,435-453).
catcgactccatgacaaaa

SEQ ID NO: 458862 - DNA, 19 bp, Mus musculus
  siRNA target sequence for Ebf1 (NM_007897.1,449-467).
caaaacaagccatagtgta

SEQ ID NO: 458863 - DNA, 19 bp, Mus musculus
  siRNA target sequence for Ebf1 (NM_007897.1,488-506).
ctgaaatgtgccgagtatt

SEQ ID NO: 458864 - DNA, 19 bp, Mus musculus
  siRNA target sequence for Ebf1 (NM_007897.1,575-593).
cctcagatccagtgataat

SEQ ID NO: 458865 - DNA, 19 bp, Mus musculus
  siRNA target sequence for Ebf1 (NM_007897.1,578-596).
cagatccagtgataattga

SEQ ID NO: 458866 - DNA, 19 bp, Mus musculus
  siRNA target sequence for Ebf1 (NM_007897.1,599-617).
ggttcttcctgaagttttt

SEQ ID NO: 458867 - DNA, 19 bp, Mus musculus
  siRNA target sequence for Ebf1 (NM_007897.1,718-736).
gtcctggcagtctctgata

SEQ ID NO: 458868 - DNA, 19 bp, Mus musculus
  siRNA target sequence for Ebf1 (NM_007897.1,724-742).
gcagtctctgataacatgt

SEQ ID NO: 458869 - DNA, 19 bp, Mus musculus
  siRNA target sequence for Ebf1 (NM_007897.1,795-813).
ggaaggtacgccctcttat

SEQ ID NO: 458870 - DNA, 19 bp, Mus musculus
  siRNA target sequence for Ebf1 (NM_007897.1,872-890).
gaggcgcgactgtgatcat

SEQ ID NO: 458871 - DNA, 19 bp, Mus musculus
  siRNA target sequence for Ebf1 (NM_007897.1,874-892).
ggcgcgactgtgatcatca

SEQ ID NO: 458872 - DNA, 19 bp, Mus musculus
  siRNA target sequence for Ebf1 (NM_007897.1,875-893).
gcgcgactgtgatcatcat

SEQ ID NO: 458873 - DNA, 19 bp, Mus musculus
  siRNA target sequence for Ebf1 (NM_007897.1,876-894).
cgcgactgtgatcatcata

SEQ ID NO: 458874 - DNA, 19 bp, Mus musculus
  siRNA target sequence for Ebf1 (NM_007897.1,945-963).
ctggagtgagttgataact

SEQ ID NO: 458875 - DNA, 19 bp, Mus musculus
  siRNA target sequence for Ebf1 (NM_007897.1,1018-1036).
gtcacactgtcgtacaagt

SEQ ID NO: 458876 - DNA, 19 bp, Mus musculus
  siRNA target sequence for Ebf1 (NM_007897.1,1054-1072).
gggacaccaggcagattca

SEQ ID NO: 458877 - DNA, 19 bp, Mus musculus
  siRNA target sequence for Ebf1 (NM_007897.1,1058-1076).
caccaggcagattcatcta

SEQ ID NO: 458878 - DNA, 19 bp, Mus musculus
  siRNA target sequence for Ebf1 (NM_007897.1,1160-1178).
gcttgccaaaggaagtgat

SEQ ID NO: 458879 - DNA, 19 bp, Mus musculus
  siRNA target sequence for Ebf1 (NM_007897.1,1166-1184).
caaaggaagtgatccttaa

SEQ ID NO: 458880 - DNA, 19 bp, Mus musculus
  siRNA target sequence for Ebf1 (NM_007897.1,1471-1489).
ccacagcaaaccaactata

SEQ ID NO: 458881 - DNA, 19 bp, Mus musculus
  siRNA target sequence for Ebf1 (NM_007897.1,1476-1494).
gcaaaccaactataactca

SEQ ID NO: 458882 - DNA, 19 bp, Mus musculus
  siRNA target sequence for Ebf1 (NM_007897.1,1779-1797).
cagcctgcaagcgatatct

SEQ ID NO: 458883 - DNA, 19 bp, Mus musculus
  siRNA target sequence for Ebf1 (NM_007897.1,1790-1808).
cgatatctggcatgattgt

SEQ ID NO: 458884 - DNA, 19 bp, Mus musculus
  siRNA target sequence for Ebf2 (NM_010095.2,1025-1043).
ctgggtgccgagatggatt

SEQ ID NO: 458885 - DNA, 19 bp, Mus musculus
  siRNA target sequence for Ebf2 (NM_010095.2,1287-1305).
gtactcactacaagttaca

SEQ ID NO: 458886 - DNA, 19 bp, Mus musculus
  siRNA target sequence for Ebf2 (NM_010095.2,1452-1470).
gtcgatgctgtgagaagaa

SEQ ID NO: 458887 - DNA, 19 bp, Mus musculus
  siRNA target sequence for Ebf2 (NM_010095.2,1497-1515).
cttcagacccggtcatcat

SEQ ID NO: 458888 - DNA, 19 bp, Mus musculus
  siRNA target sequence for Ebf2 (NM_010095.2,1549-1567).
caatcagaattgtttgaaa

SEQ ID NO: 458889 - DNA, 19 bp, Mus musculus
  siRNA target sequence for Ebf2 (NM_010095.2,1606-1624).
cgtgttgtccacaacagta

SEQ ID NO: 458890 - DNA, 19 bp, Mus musculus
  siRNA target sequence for Ebf2 (NM_010095.2,1663-1681).
gtttgttcataacaattct

SEQ ID NO: 458891 - DNA, 19 bp, Mus musculus
  siRNA target sequence for Ebf2 (NM_010095.2,1786-1804).
catcattggtgacaacttt

SEQ ID NO: 458892 - DNA, 19 bp, Mus musculus
  siRNA target sequence for Ebf2 (NM_010095.2,1814-1832).
ctccaggttgtgtttggta

SEQ ID NO: 458893 - DNA, 19 bp, Mus musculus
  siRNA target sequence for Ebf2 (NM_010095.2,1907-1925).
gttgtggaagtgacactat

SEQ ID NO: 458894 - DNA, 19 bp, Mus musculus
  siRNA target sequence for Ebf2 (NM_010095.2,1910-1928).
gtggaagtgacactatctt

SEQ ID NO: 458895 - DNA, 19 bp, Mus musculus
  siRNA target sequence for Ebf2 (NM_010095.2,2110-2128).
ctacggcacaccacacaat

SEQ ID NO: 458896 - DNA, 19 bp, Mus musculus
  siRNA target sequence for Ebf2 (NM_010095.2,2113-2131).
cggcacaccacacaataat

SEQ ID NO: 458897 - DNA, 19 bp, Mus musculus
  siRNA target sequence for Ebf2 (NM_010095.2,2115-2133).
gcacaccacacaataatca

SEQ ID NO: 458898 - DNA, 19 bp, Mus musculus
  siRNA target sequence for Ebf2 (NM_010095.2,2226-2244).
cagctcacagcggtatgat

SEQ ID NO: 458899 - DNA, 19 bp, Mus musculus
  siRNA target sequence for Ebf2 (NM_010095.2,2235-2253).
gcggtatgatgggtatcaa

SEQ ID NO: 458900 - DNA, 19 bp, Mus musculus
  siRNA target sequence for Ebf2 (NM_010095.2,2267-2285).
cagctcggcgtcagcattt

SEQ ID NO: 458901 - DNA, 19 bp, Mus musculus
  siRNA target sequence for Ebf2 (NM_010095.2,2269-2287).
gctcggcgtcagcatttca

SEQ ID NO: 458902 - DNA, 19 bp, Mus musculus
  siRNA target sequence for Ebf2 (NM_010095.2,2288-2306).
gagtccacacaaggaaata

SEQ ID NO: 458903 - DNA, 19 bp, Mus musculus
  siRNA target sequence for Ebf2 (NM_010095.2,2364-2382).
ccacgcctcagcaatctaa

SEQ ID NO: 458904 - DNA, 19 bp, Mus musculus
  siRNA target sequence for Ebf2 (NM_010095.2,2365-2383).
cacgcctcagcaatctaat

SEQ ID NO: 458905 - DNA, 19 bp, Mus musculus
  siRNA target sequence for Ebf2 (NM_010095.2,2367-2385).
cgcctcagcaatctaatta

SEQ ID NO: 458906 - DNA, 19 bp, Mus musculus
  siRNA target sequence for Ebf2 (NM_010095.2,2369-2387).
cctcagcaatctaattaca

SEQ ID NO: 458907 - DNA, 19 bp, Mus musculus
  siRNA target sequence for Ebf2 (NM_010095.2,2412-2430).
gctacagcaatgttcctat

SEQ ID NO: 458908 - DNA, 19 bp, Mus musculus
  siRNA target sequence for Ebf2 (NM_010095.2,2479-2497).
cacgggctccccatatgga

SEQ ID NO: 458909 - DNA, 19 bp, Mus musculus
  siRNA target sequence for Ebf2 (NM_010095.2,2484-2502).
gctccccatatggaatcat

SEQ ID NO: 458910 - DNA, 19 bp, Mus musculus
  siRNA target sequence for Ebf2 (NM_010095.2,2548-2566).
cccgttctcctcttcagtt

SEQ ID NO: 458911 - DNA, 19 bp, Mus musculus
  siRNA target sequence for Ebf2 (NM_010095.2,2549-2567).
ccgttctcctcttcagttt

SEQ ID NO: 458912 - DNA, 19 bp, Mus musculus
  siRNA target sequence for Ebf2 (NM_010095.2,2551-2569).
gttctcctcttcagttttt

SEQ ID NO: 458913 - DNA, 19 bp, Mus musculus
  siRNA target sequence for Ebf3 (NM_010096.1,253-271).
caacctccggaaatccaat

SEQ ID NO: 458914 - DNA, 19 bp, Mus musculus
  siRNA target sequence for Ebf3 (NM_010096.1,311-329).
cagccggtggagatcgaaa

SEQ ID NO: 458915 - DNA, 19 bp, Mus musculus
  siRNA target sequence for Ebf3 (NM_010096.1,333-351).
ccgcttttgtggactttgt

SEQ ID NO: 458916 - DNA, 19 bp, Mus musculus
  siRNA target sequence for Ebf3 (NM_010096.1,365-383).
gagccgaacaacgagaaaa

SEQ ID NO: 458917 - DNA, 19 bp, Mus musculus
  siRNA target sequence for Ebf3 (NM_010096.1,368-386).
ccgaacaacgagaaaacca

SEQ ID NO: 458918 - DNA, 19 bp, Mus musculus
  siRNA target sequence for Ebf3 (NM_010096.1,369-387).
cgaacaacgagaaaaccaa

SEQ ID NO: 458919 - DNA, 19 bp, Mus musculus
  siRNA target sequence for Ebf3 (NM_010096.1,451-469).
gtatgtccgcctcatagat

SEQ ID NO: 458920 - DNA, 19 bp, Mus musculus
  siRNA target sequence for Ebf3 (NM_010096.1,574-592).
gaagagttgtggcaataga

SEQ ID NO: 458921 - DNA, 19 bp, Mus musculus
  siRNA target sequence for Ebf3 (NM_010096.1,600-618).
caccctcagaccctgtaat

SEQ ID NO: 458922 - DNA, 19 bp, Mus musculus
  siRNA target sequence for Ebf3 (NM_010096.1,602-620).
ccctcagaccctgtaatca

SEQ ID NO: 458923 - DNA, 19 bp, Mus musculus
  siRNA target sequence for Ebf3 (NM_010096.1,603-621).
cctcagaccctgtaatcat

SEQ ID NO: 458924 - DNA, 19 bp, Mus musculus
  siRNA target sequence for Ebf3 (NM_010096.1,604-622).
ctcagaccctgtaatcatt

SEQ ID NO: 458925 - DNA, 19 bp, Mus musculus
  siRNA target sequence for Ebf3 (NM_010096.1,606-624).
cagaccctgtaatcattga

SEQ ID NO: 458926 - DNA, 19 bp, Mus musculus
  siRNA target sequence for Ebf3 (NM_010096.1,608-626).
gaccctgtaatcattgaca

SEQ ID NO: 458927 - DNA, 19 bp, Mus musculus
  siRNA target sequence for Ebf3 (NM_010096.1,824-842).
gaagccactccgtgtatca

SEQ ID NO: 458928 - DNA, 19 bp, Mus musculus
  siRNA target sequence for Ebf3 (NM_010096.1,877-895).
gggtgccactgtgatcata

SEQ ID NO: 458929 - DNA, 19 bp, Mus musculus
  siRNA target sequence for Ebf3 (NM_010096.1,878-896).
ggtgccactgtgatcataa

SEQ ID NO: 458930 - DNA, 19 bp, Mus musculus
  siRNA target sequence for Ebf3 (NM_010096.1,879-897).
gtgccactgtgatcataat

SEQ ID NO: 458931 - DNA, 19 bp, Mus musculus
  siRNA target sequence for Ebf3 (NM_010096.1,907-925).
cttctttgacggtctacaa

SEQ ID NO: 458932 - DNA, 19 bp, Mus musculus
  siRNA target sequence for Ebf3 (NM_010096.1,926-944).
gttgtgttcggaactatgt

SEQ ID NO: 458933 - DNA, 19 bp, Mus musculus
  siRNA target sequence for Ebf3 (NM_010096.1,1120-1138).
gaggttgcagaaagtgata

SEQ ID NO: 458934 - DNA, 19 bp, Mus musculus
  siRNA target sequence for Ebf3 (NM_010096.1,1165-1183).
gttacccaaggaagtgtta

SEQ ID NO: 458935 - DNA, 19 bp, Mus musculus
  siRNA target sequence for Ebf3 (NM_010096.1,1201-1219).
ccttgtggaagccttgtat

SEQ ID NO: 458936 - DNA, 19 bp, Mus musculus
  siRNA target sequence for Ebf3 (NM_010096.1,1287-1305).
gcgttccccgcaatcacaa

SEQ ID NO: 458937 - DNA, 19 bp, Mus musculus
  siRNA target sequence for Ebf3 (NM_010096.1,1369-1387).
cagccagctagccgttaat

SEQ ID NO: 458938 - DNA, 19 bp, Mus musculus
  siRNA target sequence for Ebf3 (NM_010096.1,1371-1389).
gccagctagccgttaatgt

SEQ ID NO: 458939 - DNA, 19 bp, Mus musculus
  siRNA target sequence for Ebf3 (NM_010096.1,1420-1438).
cggctacagtcgcaataca

SEQ ID NO: 458940 - DNA, 19 bp, Mus musculus
  siRNA target sequence for Ebf3 (NM_010096.1,1421-1439).
ggctacagtcgcaatacaa

SEQ ID NO: 458941 - DNA, 19 bp, Mus musculus
  siRNA target sequence for Ebf3 (NM_010096.1,1478-1496).
ccccagcagtccaattaca

SEQ ID NO: 458942 - DNA, 19 bp, Mus musculus
  siRNA target sequence for Ebf3 (NM_010096.1,1559-1577).
ggctcgcctggatttctta

SEQ ID NO: 458943 - DNA, 19 bp, Mus musculus
  siRNA target sequence for Ebf3 (NM_010096.1,1560-1578).
gctcgcctggatttcttaa

SEQ ID NO: 458944 - DNA, 19 bp, Mus musculus
  siRNA target sequence for Ebf3 (NM_010096.1,1594-1612).
ctctccctacggcatgaaa

SEQ ID NO: 458945 - DNA, 19 bp, Mus musculus
  siRNA target sequence for Ebf3 (NM_010096.1,1596-1614).
ctccctacggcatgaaaca

SEQ ID NO: 458946 - DNA, 19 bp, Mus musculus
  siRNA target sequence for Ebf3 (NM_010096.1,1598-1616).
ccctacggcatgaaacaga

SEQ ID NO: 458947 - DNA, 19 bp, Mus musculus
  siRNA target sequence for Ebf3 (NM_010096.1,1599-1617).
cctacggcatgaaacagaa

SEQ ID NO: 458948 - DNA, 19 bp, Mus musculus
  siRNA target sequence for Ebf3 (NM_010096.1,1683-1701).
ggaacggactgcaagctat

SEQ ID NO: 458949 - DNA, 19 bp, Mus musculus
  siRNA target sequence for Ebf3 (NM_010096.1,1687-1705).
cggactgcaagctatgtct

SEQ ID NO: 458950 - DNA, 19 bp, Mus musculus
  siRNA target sequence for Ebf4 (NM_152993.1,103-121).
gcggtgggctccatctgaa

SEQ ID NO: 458951 - DNA, 19 bp, Mus musculus
  siRNA target sequence for Ebf4 (NM_152993.1,104-122).
cggtgggctccatctgaaa

SEQ ID NO: 458952 - DNA, 19 bp, Mus musculus
  siRNA target sequence for Ebf4 (NM_152993.1,882-900).
ggaggcgccaccgtcatta

SEQ ID NO: 458953 - DNA, 19 bp, Mus musculus
  siRNA target sequence for Ebf4 (NM_152993.1,883-901).
gaggcgccaccgtcattat

SEQ ID NO: 458954 - DNA, 19 bp, Mus musculus
  siRNA target sequence for Ebf4 (NM_152993.1,886-904).
gcgccaccgtcattatcat

SEQ ID NO: 458955 - DNA, 19 bp, Mus musculus
  siRNA target sequence for Ebf4 (NM_152993.1,1127-1145).
gaggctccagaaagttatt

SEQ ID NO: 458956 - DNA, 19 bp, Mus musculus
  siRNA target sequence for Ece2 (NM_139293.1,162-180).
gcttcgggatgaagaatca

SEQ ID NO: 458957 - DNA, 19 bp, Mus musculus
  siRNA target sequence for Ece2 (NM_139293.1,511-529).
cgctggaacaccttcaaca

SEQ ID NO: 458958 - DNA, 19 bp, Mus musculus
  siRNA target sequence for Ece2 (NM_139293.1,568-586).
cttgagaacaccactttca

SEQ ID NO: 458959 - DNA, 19 bp, Mus musculus
  siRNA target sequence for Ece2 (NM_139293.1,608-626).
ggaagactcggagtttcta

SEQ ID NO: 458960 - DNA, 19 bp, Mus musculus
  siRNA target sequence for Ece2 (NM_139293.1,696-714).
gatcggtggttggaacata

SEQ ID NO: 458961 - DNA, 19 bp, Mus musculus
  siRNA target sequence for Ece2 (NM_139293.1,798-816).
ctacgtcagtgctgattct

SEQ ID NO: 458962 - DNA, 19 bp, Mus musculus
  siRNA target sequence for Ece2 (NM_139293.1,802-820).
gtcagtgctgattctaaga

SEQ ID NO: 458963 - DNA, 19 bp, Mus musculus
  siRNA target sequence for Ece2 (NM_139293.1,804-822).
cagtgctgattctaagagt

SEQ ID NO: 458964 - DNA, 19 bp, Mus musculus
  siRNA target sequence for Ece2 (NM_139293.1,808-826).
gctgattctaagagttcta

SEQ ID NO: 458965 - DNA, 19 bp, Mus musculus
  siRNA target sequence for Ece2 (NM_139293.1,872-890).
ctcgagattactacctaaa

SEQ ID NO: 458966 - DNA, 19 bp, Mus musculus
  siRNA target sequence for Ece2 (NM_139293.1,874-892).
cgagattactacctaaata

SEQ ID NO: 458967 - DNA, 19 bp, Mus musculus
  siRNA target sequence for Ece2 (NM_139293.1,1049-1067).
ggcgtgatgaggagaagat

SEQ ID NO: 458968 - DNA, 19 bp, Mus musculus
  siRNA target sequence for Ece2 (NM_139293.1,1051-1069).
cgtgatgaggagaagatct

SEQ ID NO: 458969 - DNA, 19 bp, Mus musculus
  siRNA target sequence for Ece2 (NM_139293.1,1057-1075).
gaggagaagatctatcaca

SEQ ID NO: 458970 - DNA, 19 bp, Mus musculus
  siRNA target sequence for Ece2 (NM_139293.1,1183-1201).
gtgtatgggactgagtatt

SEQ ID NO: 458971 - DNA, 19 bp, Mus musculus
  siRNA target sequence for Ece2 (NM_139293.1,1185-1203).
gtatgggactgagtattta

SEQ ID NO: 458972 - DNA, 19 bp, Mus musculus
  siRNA target sequence for Ece2 (NM_139293.1,1218-1236).
gctcatcaaccgtactgaa

SEQ ID NO: 458973 - DNA, 19 bp, Mus musculus
  siRNA target sequence for Ece2 (NM_139293.1,1339-1357).
ctctacggtaccaagaagt

SEQ ID NO: 458974 - DNA, 19 bp, Mus musculus
  siRNA target sequence for Ece2 (NM_139293.1,1442-1460).
catttgaccgacaaagcaa

SEQ ID NO: 458975 - DNA, 19 bp, Mus musculus
  siRNA target sequence for Ece2 (NM_139293.1,1447-1465).
gaccgacaaagcaaggaaa

SEQ ID NO: 458976 - DNA, 19 bp, Mus musculus
  siRNA target sequence for Ece2 (NM_139293.1,1467-1485).
cgccgaggggatgatcaat

SEQ ID NO: 458977 - DNA, 19 bp, Mus musculus
  siRNA target sequence for Ece2 (NM_139293.1,1471-1489).
gaggggatgatcaatgaaa

SEQ ID NO: 458978 - DNA, 19 bp, Mus musculus
  siRNA target sequence for Ece2 (NM_139293.1,1563-1581).
gaaagcagatgccatctat

SEQ ID NO: 458979 - DNA, 19 bp, Mus musculus
  siRNA target sequence for Ece2 (NM_139293.1,1655-1673).
ctgaagattcttttttcca

SEQ ID NO: 458980 - DNA, 19 bp, Mus musculus
  siRNA target sequence for Ece2 (NM_139293.1,1672-1690).
caaaacatgttgaatctgt

SEQ ID NO: 458981 - DNA, 19 bp, Mus musculus
  siRNA target sequence for Ece2 (NM_139293.1,1790-1808).
caaccaagaatgaaatcgt

SEQ ID NO: 458982 - DNA, 19 bp, Mus musculus
  siRNA target sequence for Ece2 (NM_139293.1,1924-1942).
caagggcgtgagtatgaca

SEQ ID NO: 458983 - DNA, 19 bp, Mus musculus
  siRNA target sequence for Ece2 (NM_139293.1,1928-1946).
ggcgtgagtatgacaaaga

SEQ ID NO: 458984 - DNA, 19 bp, Mus musculus
  siRNA target sequence for Ece2 (NM_139293.1,1929-1947).
gcgtgagtatgacaaagaa

SEQ ID NO: 458985 - DNA, 19 bp, Mus musculus
  siRNA target sequence for Ece2 (NM_139293.1,2006-2024).
cctgcatggaagaacagta

SEQ ID NO: 458986 - DNA, 19 bp, Mus musculus
  siRNA target sequence for Ece2 (NM_139293.1,2065-2083).
cagaccctgggggaaaaca

SEQ ID NO: 458987 - DNA, 19 bp, Mus musculus
  siRNA target sequence for Ece2 (NM_139293.1,2076-2094).
ggaaaacatcgccgataat

SEQ ID NO: 458988 - DNA, 19 bp, Mus musculus
  siRNA target sequence for Ece2 (NM_139293.1,2100-2118).
ccttaaggctgcttacaat

SEQ ID NO: 458989 - DNA, 19 bp, Mus musculus
  siRNA target sequence for Edf1 (NM_021519.1,387-405).
gacgggccattccgaataa

SEQ ID NO: 458990 - DNA, 19 bp, Mus musculus
  siRNA target sequence for Edf1 (NM_021519.1,390-408).
gggccattccgaataacca

SEQ ID NO: 458991 - DNA, 19 bp, Mus musculus
  siRNA target sequence for Edr1 (NM_007905.1,165-183).
cctaatgcggctcaatatt

SEQ ID NO: 458992 - DNA, 19 bp, Mus musculus
  siRNA target sequence for Edr1 (NM_007905.1,166-184).
ctaatgcggctcaatattt

SEQ ID NO: 458993 - DNA, 19 bp, Mus musculus
  siRNA target sequence for Edr1 (NM_007905.1,484-502).
cacagctgggcaacctatt

SEQ ID NO: 458994 - DNA, 19 bp, Mus musculus
  siRNA target sequence for Edr1 (NM_007905.1,493-511).
gcaacctattgcaggttaa

SEQ ID NO: 458995 - DNA, 19 bp, Mus musculus
  siRNA target sequence for Edr1 (NM_007905.1,773-791).
cgtggcacaggcttcttct

SEQ ID NO: 458996 - DNA, 19 bp, Mus musculus
  siRNA target sequence for Edr1 (NM_007905.1,806-824).
gtcactcaaccttagtcaa

SEQ ID NO: 458997 - DNA, 19 bp, Mus musculus
  siRNA target sequence for Edr1 (NM_007905.1,884-902).
ggcgcctgggggtttaggt

SEQ ID NO: 458998 - DNA, 19 bp, Mus musculus
  siRNA target sequence for Edr1 (NM_007905.1,908-926).
gccttcttcaggattgact

SEQ ID NO: 458999 - DNA, 19 bp, Mus musculus
  siRNA target sequence for Edr1 (NM_007905.1,1424-1442).
cccaccttcccaatcacaa

SEQ ID NO: 459000 - DNA, 19 bp, Mus musculus
  siRNA target sequence for Edr1 (NM_007905.1,1546-1564).
ctcctgtagcgcctatcaa

SEQ ID NO: 459001 - DNA, 19 bp, Mus musculus
  siRNA target sequence for Edr1 (NM_007905.1,1704-1722).
cctactccccgtggaataa

SEQ ID NO: 459002 - DNA, 19 bp, Mus musculus
  siRNA target sequence for Edr1 (NM_007905.1,2063-2081).
ggtaatagaggagaagaat

SEQ ID NO: 459003 - DNA, 19 bp, Mus musculus
  siRNA target sequence for Edr1 (NM_007905.1,2106-2124).
gtggccagtttgaatgcta

SEQ ID NO: 459004 - DNA, 19 bp, Mus musculus
  siRNA target sequence for Edr1 (NM_007905.1,2111-2129).
cagtttgaatgctaatcct

SEQ ID NO: 459005 - DNA, 19 bp, Mus musculus
  siRNA target sequence for Edr1 (NM_007905.1,2128-2146).
ctccaaacagtgatctagt

SEQ ID NO: 459006 - DNA, 19 bp, Mus musculus
  siRNA target sequence for Edr1 (NM_007905.1,2358-2376).
ccgaccgggctgaatgaga

SEQ ID NO: 459007 - DNA, 19 bp, Mus musculus
  siRNA target sequence for Edr1 (NM_007905.1,2405-2423).
cagcccctctgtagagtta

SEQ ID NO: 459008 - DNA, 19 bp, Mus musculus
  siRNA target sequence for Edr1 (NM_007905.1,2407-2425).
gcccctctgtagagttaga

SEQ ID NO: 459009 - DNA, 19 bp, Mus musculus
  siRNA target sequence for Edr1 (NM_007905.1,2410-2428).
cctctgtagagttagagaa

SEQ ID NO: 459010 - DNA, 19 bp, Mus musculus
  siRNA target sequence for Edr1 (NM_007905.1,2830-2848).
gcatcaatcccgtgttctt

SEQ ID NO: 459011 - DNA, 19 bp, Mus musculus
  siRNA target sequence for Edr1 (NM_007905.1,2840-2858).
cgtgttcttgtccagtaat

SEQ ID NO: 459012 - DNA, 19 bp, Mus musculus
  siRNA target sequence for Edr1 (NM_007905.1,2843-2861).
gttcttgtccagtaatcct

SEQ ID NO: 459013 - DNA, 19 bp, Mus musculus
  siRNA target sequence for Edr1 (NM_007905.1,2877-2895).
gaggaggtctacgagttta

SEQ ID NO: 459014 - DNA, 19 bp, Mus musculus
  siRNA target sequence for Edr1 (NM_007905.1,2879-2897).
ggaggtctacgagtttatt

SEQ ID NO: 459015 - DNA, 19 bp, Mus musculus
  siRNA target sequence for Edr1 (NM_007905.1,2956-2974).
gacaggcccttttattact

SEQ ID NO: 459016 - DNA, 19 bp, Mus musculus
  siRNA target sequence for Edr1 (NM_007905.1,2960-2978).
ggcccttttattacttaaa

SEQ ID NO: 459017 - DNA, 19 bp, Mus musculus
  siRNA target sequence for Edr1 (NM_007905.1,2999-3017).
catgaacatcaaattaggt

SEQ ID NO: 459018 - DNA, 19 bp, Mus musculus
  siRNA target sequence for Egr2 (NM_010118.1,405-423).
gcgggagatggcatgatca

SEQ ID NO: 459019 - DNA, 19 bp, Mus musculus
  siRNA target sequence for Egr2 (NM_010118.1,408-426).
ggagatggcatgatcaaca

SEQ ID NO: 459020 - DNA, 19 bp, Mus musculus
  siRNA target sequence for Egr2 (NM_010118.1,409-427).
gagatggcatgatcaacat

SEQ ID NO: 459021 - DNA, 19 bp, Mus musculus
  siRNA target sequence for Egr2 (NM_010118.1,415-433).
gcatgatcaacattgacat

SEQ ID NO: 459022 - DNA, 19 bp, Mus musculus
  siRNA target sequence for Egr2 (NM_010118.1,484-502).
ccatctctgcacctagaaa

SEQ ID NO: 459023 - DNA, 19 bp, Mus musculus
  siRNA target sequence for Egr2 (NM_010118.1,573-591).
ggtatcatcaatattgtga

SEQ ID NO: 459024 - DNA, 19 bp, Mus musculus
  siRNA target sequence for Egr2 (NM_010118.1,769-787).
gctgtacaggagatctcta

SEQ ID NO: 459025 - DNA, 19 bp, Mus musculus
  siRNA target sequence for Egr2 (NM_010118.1,913-931).
cagactatcctggattttt

SEQ ID NO: 459026 - DNA, 19 bp, Mus musculus
  siRNA target sequence for Egr2 (NM_010118.1,1037-1055).
ctctaccatccgtaatttt

SEQ ID NO: 459027 - DNA, 19 bp, Mus musculus
  siRNA target sequence for Egr2 (NM_010118.1,1042-1060).
ccatccgtaattttactct

SEQ ID NO: 459028 - DNA, 19 bp, Mus musculus
  siRNA target sequence for Egr2 (NM_010118.1,1146-1164).
gtgactgccaccccttata

SEQ ID NO: 459029 - DNA, 19 bp, Mus musculus
  siRNA target sequence for Egr2 (NM_010118.1,1148-1166).
gactgccaccccttataat

SEQ ID NO: 459030 - DNA, 19 bp, Mus musculus
  siRNA target sequence for Egr3 (NM_018781.1,39-57).
gagcagtttgctaaatcaa

SEQ ID NO: 459031 - DNA, 19 bp, Mus musculus
  siRNA target sequence for Egr3 (NM_018781.1,41-59).
gcagtttgctaaatcaatt

SEQ ID NO: 459032 - DNA, 19 bp, Mus musculus
  siRNA target sequence for Egr3 (NM_018781.1,55-73).
caattgcctgacaatctgt

SEQ ID NO: 459033 - DNA, 19 bp, Mus musculus
  siRNA target sequence for Egr3 (NM_018781.1,121-139).
gactcggtagcccattaca

SEQ ID NO: 459034 - DNA, 19 bp, Mus musculus
  siRNA target sequence for Egr3 (NM_018781.1,123-141).
ctcggtagcccattacaat

SEQ ID NO: 459035 - DNA, 19 bp, Mus musculus
  siRNA target sequence for Egr3 (NM_018781.1,125-143).
cggtagcccattacaatca

SEQ ID NO: 459036 - DNA, 19 bp, Mus musculus
  siRNA target sequence for Egr3 (NM_018781.1,127-145).
gtagcccattacaatcaga

SEQ ID NO: 459037 - DNA, 19 bp, Mus musculus
  siRNA target sequence for Egr3 (NM_018781.1,290-308).
ggtgccaggacaacatcat

SEQ ID NO: 459038 - DNA, 19 bp, Mus musculus
  siRNA target sequence for Egr3 (NM_018781.1,291-309).
gtgccaggacaacatcatt

SEQ ID NO: 459039 - DNA, 19 bp, Mus musculus
  siRNA target sequence for Egr3 (NM_018781.1,427-445).
gcgctgcctccttattcca

SEQ ID NO: 459040 - DNA, 19 bp, Mus musculus
  siRNA target sequence for Egr3 (NM_018781.1,428-446).
cgctgcctccttattccaa

SEQ ID NO: 459041 - DNA, 19 bp, Mus musculus
  siRNA target sequence for Egr3 (NM_018781.1,443-461).
ccaactgcggcgatctcta

SEQ ID NO: 459042 - DNA, 19 bp, Mus musculus
  siRNA target sequence for Egr3 (NM_018781.1,509-527).
cctattccccccaggatta

SEQ ID NO: 459043 - DNA, 19 bp, Mus musculus
  siRNA target sequence for Egr3 (NM_018781.1,566-584).
ccatgattcctgactacaa

SEQ ID NO: 459044 - DNA, 19 bp, Mus musculus
  siRNA target sequence for Egr3 (NM_018781.1,610-628).
ggctccattccggaacata

SEQ ID NO: 459045 - DNA, 19 bp, Mus musculus
  siRNA target sequence for Egr3 (NM_018781.1,611-629).
gctccattccggaacataa

SEQ ID NO: 459046 - DNA, 19 bp, Mus musculus
  siRNA target sequence for Egr3 (NM_018781.1,658-676).
gtcaacccaccccctatta

SEQ ID NO: 459047 - DNA, 19 bp, Mus musculus
  siRNA target sequence for Egr3 (NM_018781.1,687-705).
gaccatcaaggccttcaaa

SEQ ID NO: 459048 - DNA, 19 bp, Mus musculus
  siRNA target sequence for Egr4 (NM_020596.1,272-290).
cctggaggcgacttcttga

SEQ ID NO: 459049 - DNA, 19 bp, Mus musculus
  siRNA target sequence for Egr4 (NM_020596.1,940-958).
gttggccccaggtgactta

SEQ ID NO: 459050 - DNA, 19 bp, Mus musculus
  siRNA target sequence for Egr4 (NM_020596.1,1465-1483).
gcgcagtgacgagaagaaa

SEQ ID NO: 459051 - DNA, 19 bp, Mus musculus
  siRNA target sequence for Egr4 (NM_020596.1,1491-1509).
gcaaggtgcacctaaagca

SEQ ID NO: 459052 - DNA, 19 bp, Mus musculus
  siRNA target sequence for Eif4a2 (NM_013506.1,43-61).
ggtggctccgcggattaca

SEQ ID NO: 459053 - DNA, 19 bp, Mus musculus
  siRNA target sequence for Eif4a2 (NM_013506.1,44-62).
gtggctccgcggattacaa

SEQ ID NO: 459054 - DNA, 19 bp, Mus musculus
  siRNA target sequence for Eif4a2 (NM_013506.1,54-72).
ggattacaacagagaacat

SEQ ID NO: 459055 - DNA, 19 bp, Mus musculus
  siRNA target sequence for Eif4a2 (NM_013506.1,113-131).
gcaactggaatgaaattgt

SEQ ID NO: 459056 - DNA, 19 bp, Mus musculus
  siRNA target sequence for Eif4a2 (NM_013506.1,117-135).
ctggaatgaaattgttgat

SEQ ID NO: 459057 - DNA, 19 bp, Mus musculus
  siRNA target sequence for Eif4a2 (NM_013506.1,130-148).
gttgataactttgatgata

SEQ ID NO: 459058 - DNA, 19 bp, Mus musculus
  siRNA target sequence for Eif4a2 (NM_013506.1,138-156).
ctttgatgatatgaattta

SEQ ID NO: 459059 - DNA, 19 bp, Mus musculus
  siRNA target sequence for Eif4a2 (NM_013506.1,169-187).
cttcgaggcatctatgcat

SEQ ID NO: 459060 - DNA, 19 bp, Mus musculus
  siRNA target sequence for Eif4a2 (NM_013506.1,223-241).
gctattatcccttgtatta

SEQ ID NO: 459061 - DNA, 19 bp, Mus musculus
  siRNA target sequence for Eif4a2 (NM_013506.1,224-242).
ctattatcccttgtattaa

SEQ ID NO: 459062 - DNA, 19 bp, Mus musculus
  siRNA target sequence for Eif4a2 (NM_013506.1,236-254).
gtattaaagggtatgatgt

SEQ ID NO: 459063 - DNA, 19 bp, Mus musculus
  siRNA target sequence for Eif4a2 (NM_013506.1,285-303).
gacagccacatttgctatt

SEQ ID NO: 459064 - DNA, 19 bp, Mus musculus
  siRNA target sequence for Eif4a2 (NM_013506.1,336-354).
ggagacccaagcactagta

SEQ ID NO: 459065 - DNA, 19 bp, Mus musculus
  siRNA target sequence for Eif4a2 (NM_013506.1,337-355).
gagacccaagcactagtat

SEQ ID NO: 459066 - DNA, 19 bp, Mus musculus
  siRNA target sequence for Eif4a2 (NM_013506.1,379-397).
caacagatccaaaaggtaa

SEQ ID NO: 459067 - DNA, 19 bp, Mus musculus
  siRNA target sequence for Eif4a2 (NM_013506.1,437-455).
cttgcattggaggaacaaa

SEQ ID NO: 459068 - DNA, 19 bp, Mus musculus
  siRNA target sequence for Eif4a2 (NM_013506.1,441-459).
cattggaggaacaaatgtt

SEQ ID NO: 459069 - DNA, 19 bp, Mus musculus
  siRNA target sequence for Eif4a2 (NM_013506.1,446-464).
gaggaacaaatgttcgaaa

SEQ ID NO: 459070 - DNA, 19 bp, Mus musculus
  siRNA target sequence for Eif4a2 (NM_013506.1,515-533).
cagggagagtgtttgatat

SEQ ID NO: 459071 - DNA, 19 bp, Mus musculus
  siRNA target sequence for Eif4a2 (NM_013506.1,534-552).
gctaaacagaagatacctt

SEQ ID NO: 459072 - DNA, 19 bp, Mus musculus
  siRNA target sequence for Eif4a2 (NM_013506.1,1152-1170).
ggctataaactttgttact

SEQ ID NO: 459073 - DNA, 19 bp, Mus musculus
  siRNA target sequence for Eif4a2 (NM_013506.1,1203-1221).
gactttctacaatactaca

SEQ ID NO: 459074 - DNA, 19 bp, Mus musculus
  siRNA target sequence for Ep400 (NM_029337.1,2249-2267).
ggacggttctcaggataaa

SEQ ID NO: 459075 - DNA, 19 bp, Mus musculus
  siRNA target sequence for Ep400 (NM_029337.1,2297-2315).
gatccatcagcgaatagca

SEQ ID NO: 459076 - DNA, 19 bp, Mus musculus
  siRNA target sequence for Ep400 (NM_029337.1,2307-2325).
cgaatagcagatttaagga

SEQ ID NO: 459077 - DNA, 19 bp, Mus musculus
  siRNA target sequence for Ep400 (NM_029337.1,2369-2387).
ggccccacgcccgaaatct

SEQ ID NO: 459078 - DNA, 19 bp, Mus musculus
  siRNA target sequence for Ep400 (NM_029337.1,2570-2588).
cactactgccagagaaata

SEQ ID NO: 459079 - DNA, 19 bp, Mus musculus
  siRNA target sequence for Ep400 (NM_029337.1,2610-2628).
gaacaggttgtggaaataa

SEQ ID NO: 459080 - DNA, 19 bp, Mus musculus
  siRNA target sequence for Ep400 (NM_029337.1,2615-2633).
ggttgtggaaataaaatta

SEQ ID NO: 459081 - DNA, 19 bp, Mus musculus
  siRNA target sequence for Ep400 (NM_029337.1,2694-2712).
ggtaaagagtccagattaa

SEQ ID NO: 459082 - DNA, 19 bp, Mus musculus
  siRNA target sequence for Ep400 (NM_029337.1,2751-2769).
ggaatatctggaaggaaaa

SEQ ID NO: 459083 - DNA, 19 bp, Mus musculus
  siRNA target sequence for Ep400 (NM_029337.1,2839-2857).
cacacgaagggcttgtaga

SEQ ID NO: 459084 - DNA, 19 bp, Mus musculus
  siRNA target sequence for Ep400 (NM_029337.1,3443-3461).
gtgtcctggcctcaaaact

SEQ ID NO: 459085 - DNA, 19 bp, Mus musculus
  siRNA target sequence for Ep400 (NM_029337.1,3450-3468).
ggcctcaaaactctttctt

SEQ ID NO: 459086 - DNA, 19 bp, Mus musculus
  siRNA target sequence for Ep400 (NM_029337.1,3511-3529).
ggaccgagcccaataactt

SEQ ID NO: 459087 - DNA, 19 bp, Mus musculus
  siRNA target sequence for Ep400 (NM_029337.1,3538-3556).
gcatcacgtcctataagca

SEQ ID NO: 459088 - DNA, 19 bp, Mus musculus
  siRNA target sequence for Ep400 (NM_029337.1,3601-3619).
gccttgttgttgacgaaat

SEQ ID NO: 459089 - DNA, 19 bp, Mus musculus
  siRNA target sequence for Ep400 (NM_029337.1,3804-3822).
gaggaaaaccaggattact

SEQ ID NO: 459090 - DNA, 19 bp, Mus musculus
  siRNA target sequence for Ep400 (NM_029337.1,3806-3824).
ggaaaaccaggattactat

SEQ ID NO: 459091 - DNA, 19 bp, Mus musculus
  siRNA target sequence for Ep400 (NM_029337.1,3825-3843).
cacaaaatggtcataaggt

SEQ ID NO: 459092 - DNA, 19 bp, Mus musculus
  siRNA target sequence for Ep400 (NM_029337.1,3827-3845).
caaaatggtcataaggtta

SEQ ID NO: 459093 - DNA, 19 bp, Mus musculus
  siRNA target sequence for Ep400 (NM_029337.1,3851-3869).
ggtcacacagccatttatt

SEQ ID NO: 459094 - DNA, 19 bp, Mus musculus
  siRNA target sequence for Ep400 (NM_029337.1,3946-3964).
gtcgtcagaaggccttata

SEQ ID NO: 459095 - DNA, 19 bp, Mus musculus
  siRNA target sequence for Ep400 (NM_029337.1,3958-3976).
ccttatatgaggatgtcat

SEQ ID NO: 459096 - DNA, 19 bp, Mus musculus
  siRNA target sequence for Ep400 (NM_029337.1,4061-4079).
caaccatcctggactagta

SEQ ID NO: 459097 - DNA, 19 bp, Mus musculus
  siRNA target sequence for Ep400 (NM_029337.1,4113-4131).
ggctctctgcagtataagt

SEQ ID NO: 459098 - DNA, 19 bp, Mus musculus
  siRNA target sequence for Ep400 (NM_029337.1,4175-4193).
ggaaaccgacctttctata

SEQ ID NO: 459099 - DNA, 19 bp, Mus musculus
  siRNA target sequence for Ep400 (NM_029337.1,4176-4194).
gaaaccgacctttctatat

SEQ ID NO: 459100 - DNA, 19 bp, Mus musculus
  siRNA target sequence for Ep400 (NM_029337.1,4181-4199).
cgacctttctatatttgat

SEQ ID NO: 459101 - DNA, 19 bp, Mus musculus
  siRNA target sequence for Ep400 (NM_029337.1,4236-4254).
gctgaattactgtgtaaga

SEQ ID NO: 459102 - DNA, 19 bp, Mus musculus
  siRNA target sequence for Ep400 (NM_029337.1,4475-4493).
gccgattgctactttctct

SEQ ID NO: 459103 - DNA, 19 bp, Mus musculus
  siRNA target sequence for Ep400 (NM_029337.1,4496-4514).
caacccagatacaaaaggt

SEQ ID NO: 459104 - DNA, 19 bp, Mus musculus
  siRNA target sequence for Ep400 (NM_029337.1,4507-4525).
caaaaggtggggaagtagt

SEQ ID NO: 459105 - DNA, 19 bp, Mus musculus
  siRNA target sequence for Ep400 (NM_029337.1,4512-4530).
ggtggggaagtagtgaaaa

SEQ ID NO: 459106 - DNA, 19 bp, Mus musculus
  siRNA target sequence for Ep400 (NM_029337.1,4513-4531).
gtggggaagtagtgaaaat

SEQ ID NO: 459107 - DNA, 19 bp, Mus musculus
  siRNA target sequence for Ep400 (NM_029337.1,4517-4535).
ggaagtagtgaaaatagct

SEQ ID NO: 459108 - DNA, 19 bp, Mus musculus
  siRNA target sequence for Ep400 (NM_029337.1,4667-4685).
gcagctgcaaggtagtgta

SEQ ID NO: 459109 - DNA, 19 bp, Mus musculus
  siRNA target sequence for Ep400 (NM_029337.1,4959-4977).
cggttggatcagattcatt

SEQ ID NO: 459110 - DNA, 19 bp, Mus musculus
  siRNA target sequence for Ep400 (NM_029337.1,4960-4978).
ggttggatcagattcattt

SEQ ID NO: 459111 - DNA, 19 bp, Mus musculus
  siRNA target sequence for Ep400 (NM_029337.1,5071-5089).
gctggtctttggatagcaa

SEQ ID NO: 459112 - DNA, 19 bp, Mus musculus
  siRNA target sequence for Ep400 (NM_029337.1,5101-5119).
gtcctaaaggagtaaacta

SEQ ID NO: 459113 - DNA, 19 bp, Mus musculus
  siRNA target sequence for Ep400 (NM_029337.1,5142-5160).
gaaggtgatctgattttga

SEQ ID NO: 459114 - DNA, 19 bp, Mus musculus
  siRNA target sequence for Ep400 (NM_029337.1,5328-5346).
cggcagctgcaacaactaa

SEQ ID NO: 459115 - DNA, 19 bp, Mus musculus
  siRNA target sequence for Ep400 (NM_029337.1,5402-5420).
gaagttagaagctttagca

SEQ ID NO: 459116 - DNA, 19 bp, Mus musculus
  siRNA target sequence for Ep400 (NM_029337.1,5449-5467).
gacgtcgggtactgatttt

SEQ ID NO: 459117 - DNA, 19 bp, Mus musculus
  siRNA target sequence for Ep400 (NM_029337.1,5451-5469).
cgtcgggtactgattttat

SEQ ID NO: 459118 - DNA, 19 bp, Mus musculus
  siRNA target sequence for Ep400 (NM_029337.1,5455-5473).
gggtactgattttatctca

SEQ ID NO: 459119 - DNA, 19 bp, Mus musculus
  siRNA target sequence for Ep400 (NM_029337.1,5470-5488).
ctcagatggttcttatgct

SEQ ID NO: 459120 - DNA, 19 bp, Mus musculus
  siRNA target sequence for Ep400 (NM_029337.1,5513-5531).
cttccattatctcacttat

SEQ ID NO: 459121 - DNA, 19 bp, Mus musculus
  siRNA target sequence for Ep400 (NM_029337.1,5525-5543).
cacttatgtacggattgat

SEQ ID NO: 459122 - DNA, 19 bp, Mus musculus
  siRNA target sequence for Ep400 (NM_029337.1,5632-5650).
gtcgtgccactggcataaa

SEQ ID NO: 459123 - DNA, 19 bp, Mus musculus
  siRNA target sequence for Ep400 (NM_029337.1,5776-5794).
gtggcaattctattgaaga

SEQ ID NO: 459124 - DNA, 19 bp, Mus musculus
  siRNA target sequence for Ep400 (NM_029337.1,5838-5856).
gctgctcaaggaaatgact

SEQ ID NO: 459125 - DNA, 19 bp, Mus musculus
  siRNA target sequence for Ep400 (NM_029337.1,5841-5859).
gctcaaggaaatgactatt

SEQ ID NO: 459126 - DNA, 19 bp, Mus musculus
  siRNA target sequence for Ep400 (NM_029337.1,5909-5927).
ctcacctatggatgatact

SEQ ID NO: 459127 - DNA, 19 bp, Mus musculus
  siRNA target sequence for Ep400 (NM_029337.1,5974-5992).
catctgtcagtgaaactat

SEQ ID NO: 459128 - DNA, 19 bp, Mus musculus
  siRNA target sequence for Ep400 (NM_029337.1,6176-6194).
ggaacagcttactccaatt

SEQ ID NO: 459129 - DNA, 19 bp, Mus musculus
  siRNA target sequence for Ep400 (NM_029337.1,6180-6198).
cagcttactccaattgaaa

SEQ ID NO: 459130 - DNA, 19 bp, Mus musculus
  siRNA target sequence for Ep400 (NM_029337.1,6227-6245).
ccatacgaccactgaacaa

SEQ ID NO: 459131 - DNA, 19 bp, Mus musculus
  siRNA target sequence for Ep400 (NM_029337.1,6381-6399).
cgggaggacgcctatacta

SEQ ID NO: 459132 - DNA, 19 bp, Mus musculus
  siRNA target sequence for Ep400 (NM_029337.1,6382-6400).
gggaggacgcctatactat

SEQ ID NO: 459133 - DNA, 19 bp, Mus musculus
  siRNA target sequence for Ep400 (NM_029337.1,6397-6415).
ctatggagtatgtctatga

SEQ ID NO: 459134 - DNA, 19 bp, Mus musculus
  siRNA target sequence for Ep400 (NM_029337.1,6466-6484).
ctcctcaggatgacaatga

SEQ ID NO: 459135 - DNA, 19 bp, Mus musculus
  siRNA target sequence for Ep400 (NM_029337.1,6474-6492).
gatgacaatgatatctaca

SEQ ID NO: 459136 - DNA, 19 bp, Mus musculus
  siRNA target sequence for Ep400 (NM_029337.1,6667-6685).
gggcaacacctggtatgtt

SEQ ID NO: 459137 - DNA, 19 bp, Mus musculus
  siRNA target sequence for Ep400 (NM_029337.1,6669-6687).
gcaacacctggtatgttga

SEQ ID NO: 459138 - DNA, 19 bp, Mus musculus
  siRNA target sequence for Ep400 (NM_029337.1,6670-6688).
caacacctggtatgttgaa

SEQ ID NO: 459139 - DNA, 19 bp, Mus musculus
  siRNA target sequence for Ep400 (NM_029337.1,6832-6850).
ccttgctacaggctgtaaa

SEQ ID NO: 459140 - DNA, 19 bp, Mus musculus
  siRNA target sequence for Ep400 (NM_029337.1,6911-6929).
ggaccttgtcagtgatgtt

SEQ ID NO: 459141 - DNA, 19 bp, Mus musculus
  siRNA target sequence for Ep400 (NM_029337.1,6965-6983).
gcagtgccggaatcgttat

SEQ ID NO: 459142 - DNA, 19 bp, Mus musculus
  siRNA target sequence for Ep400 (NM_029337.1,6979-6997).
gttatgagaacgtcatcat

SEQ ID NO: 459143 - DNA, 19 bp, Mus musculus
  siRNA target sequence for Ep400 (NM_029337.1,7010-7028).
ggggaagagtaagaacaat

SEQ ID NO: 459144 - DNA, 19 bp, Mus musculus
  siRNA target sequence for Ep400 (NM_029337.1,7035-7053).
ctccgcacaagccagattt

SEQ ID NO: 459145 - DNA, 19 bp, Mus musculus
  siRNA target sequence for Ep400 (NM_029337.1,7037-7055).
ccgcacaagccagatttat

SEQ ID NO: 459146 - DNA, 19 bp, Mus musculus
  siRNA target sequence for Ep400 (NM_029337.1,7204-7222).
cagaaagtggaatcaacta

SEQ ID NO: 459147 - DNA, 19 bp, Mus musculus
  siRNA target sequence for Ep400 (NM_029337.1,7210-7228).
gtggaatcaactatgacaa

SEQ ID NO: 459148 - DNA, 19 bp, Mus musculus
  siRNA target sequence for Ep400 (NM_029337.1,7231-7249).
cgctgcctcccattcaagt

SEQ ID NO: 459149 - DNA, 19 bp, Mus musculus
  siRNA target sequence for Ep400 (NM_029337.1,7259-7277).
ccgtgcagagcgaattgca

SEQ ID NO: 459150 - DNA, 19 bp, Mus musculus
  siRNA target sequence for Ep400 (NM_029337.1,7260-7278).
cgtgcagagcgaattgcaa

SEQ ID NO: 459151 - DNA, 19 bp, Mus musculus
  siRNA target sequence for Ep400 (NM_029337.1,7264-7282).
cagagcgaattgcaaaaga

SEQ ID NO: 459152 - DNA, 19 bp, Mus musculus
  siRNA target sequence for Ep400 (NM_029337.1,7266-7284).
gagcgaattgcaaaagaga

SEQ ID NO: 459153 - DNA, 19 bp, Mus musculus
  siRNA target sequence for Ep400 (NM_029337.1,7581-7599).
gtgctggcaggaaccatta

SEQ ID NO: 459154 - DNA, 19 bp, Mus musculus
  siRNA target sequence for Ep400 (NM_029337.1,7583-7601).
gctggcaggaaccattaaa

SEQ ID NO: 459155 - DNA, 19 bp, Mus musculus
  siRNA target sequence for Ep400 (NM_029337.1,7584-7602).
ctggcaggaaccattaaaa

SEQ ID NO: 459156 - DNA, 19 bp, Mus musculus
  siRNA target sequence for Ep400 (NM_029337.1,7586-7604).
ggcaggaaccattaaaaca

SEQ ID NO: 459157 - DNA, 19 bp, Mus musculus
  siRNA target sequence for Ep400 (NM_029337.1,7587-7605).
gcaggaaccattaaaacat

SEQ ID NO: 459158 - DNA, 19 bp, Mus musculus
  siRNA target sequence for Ep400 (NM_029337.1,7625-7643).
ccctacagggactgtaagt

SEQ ID NO: 459159 - DNA, 19 bp, Mus musculus
  siRNA target sequence for Ep400 (NM_029337.1,7636-7654).
ctgtaagtggaaatgtgat

SEQ ID NO: 459160 - DNA, 19 bp, Mus musculus
  siRNA target sequence for Ep400 (NM_029337.1,7683-7701).
gctactttccagtccatta

SEQ ID NO: 459161 - DNA, 19 bp, Mus musculus
  siRNA target sequence for Ep400 (NM_029337.1,7684-7702).
ctactttccagtccattaa

SEQ ID NO: 459162 - DNA, 19 bp, Mus musculus
  siRNA target sequence for Ep400 (NM_029337.1,7913-7931).
gactccaacccgttcctta

SEQ ID NO: 459163 - DNA, 19 bp, Mus musculus
  siRNA target sequence for Ep400 (NM_029337.1,7917-7935).
ccaacccgttccttagtaa

SEQ ID NO: 459164 - DNA, 19 bp, Mus musculus
  siRNA target sequence for Ep400 (NM_029337.1,8130-8148).
ggaccggaacacatcatca

SEQ ID NO: 459165 - DNA, 19 bp, Mus musculus
  siRNA target sequence for Ep400 (NM_029337.1,8131-8149).
gaccggaacacatcatcaa

SEQ ID NO: 459166 - DNA, 19 bp, Mus musculus
  siRNA target sequence for Ep400 (NM_029337.1,8133-8151).
ccggaacacatcatcaaga

SEQ ID NO: 459167 - DNA, 19 bp, Mus musculus
  siRNA target sequence for Ep400 (NM_029337.1,8385-8403).
gcacaagggcagatgcaaa

SEQ ID NO: 459168 - DNA, 19 bp, Mus musculus
  siRNA target sequence for Ep400 (NM_029337.1,8717-8735).
gcagaaggtcgcttatgct

SEQ ID NO: 459169 - DNA, 19 bp, Mus musculus
  siRNA target sequence for Ep400 (NM_029337.1,8844-8862).
caagttgtgcagcaacaaa

SEQ ID NO: 459170 - DNA, 19 bp, Mus musculus
  siRNA target sequence for Ep400 (NM_029337.1,8863-8881).
cacctgtggccagtataca

SEQ ID NO: 459171 - DNA, 19 bp, Mus musculus
  siRNA target sequence for Ep400 (NM_029337.1,8866-8884).
ctgtggccagtatacaaca

SEQ ID NO: 459172 - DNA, 19 bp, Mus musculus
  siRNA target sequence for Ep400 (NM_029337.1,8950-8968).
ggcaacaggtacagatgat

SEQ ID NO: 459173 - DNA, 19 bp, Mus musculus
  siRNA target sequence for Ep400 (NM_029337.1,9113-9131).
gccaaagttgcaaatgaga

SEQ ID NO: 459174 - DNA, 19 bp, Mus musculus
  siRNA target sequence for Ercc2 (NM_007949.2,209-227).
gctggaggtgaccaaactt

SEQ ID NO: 459175 - DNA, 19 bp, Mus musculus
  siRNA target sequence for Ercc2 (NM_007949.2,210-228).
ctggaggtgaccaaactta

SEQ ID NO: 459176 - DNA, 19 bp, Mus musculus
  siRNA target sequence for Ercc2 (NM_007949.2,213-231).
gaggtgaccaaacttatct

SEQ ID NO: 459177 - DNA, 19 bp, Mus musculus
  siRNA target sequence for Ercc2 (NM_007949.2,216-234).
gtgaccaaacttatctact

SEQ ID NO: 459178 - DNA, 19 bp, Mus musculus
  siRNA target sequence for Ercc2 (NM_007949.2,244-262).
ccgtgccagagattgagaa

SEQ ID NO: 459179 - DNA, 19 bp, Mus musculus
  siRNA target sequence for Ercc2 (NM_007949.2,475-493).
ctcactgccgcttctatga

SEQ ID NO: 459180 - DNA, 19 bp, Mus musculus
  siRNA target sequence for Ercc2 (NM_007949.2,481-499).
gccgcttctatgaggaatt

SEQ ID NO: 459181 - DNA, 19 bp, Mus musculus
  siRNA target sequence for Ercc2 (NM_007949.2,482-500).
ccgcttctatgaggaattt

SEQ ID NO: 459182 - DNA, 19 bp, Mus musculus
  siRNA target sequence for Ercc2 (NM_007949.2,484-502).
gcttctatgaggaatttga

SEQ ID NO: 459183 - DNA, 19 bp, Mus musculus
  siRNA target sequence for Ercc2 (NM_007949.2,525-543).
ctccctgcgggcatctaca

SEQ ID NO: 459184 - DNA, 19 bp, Mus musculus
  siRNA target sequence for Ercc2 (NM_007949.2,668-686).
cgcagacctggtatccaaa

SEQ ID NO: 459185 - DNA, 19 bp, Mus musculus
  siRNA target sequence for Ercc2 (NM_007949.2,724-742).
ctcacaacatcgacaatgt

SEQ ID NO: 459186 - DNA, 19 bp, Mus musculus
  siRNA target sequence for Ercc2 (NM_007949.2,726-744).
cacaacatcgacaatgtct

SEQ ID NO: 459187 - DNA, 19 bp, Mus musculus
  siRNA target sequence for Ercc2 (NM_007949.2,788-806).
ccgttgccagagcaactta

SEQ ID NO: 459188 - DNA, 19 bp, Mus musculus
  siRNA target sequence for Ercc2 (NM_007949.2,1204-1222).
cgctcacactccttgctaa

SEQ ID NO: 459189 - DNA, 19 bp, Mus musculus
  siRNA target sequence for Ercc2 (NM_007949.2,1248-1266).
gccaagggcttcaccatta

SEQ ID NO: 459190 - DNA, 19 bp, Mus musculus
  siRNA target sequence for Ercc2 (NM_007949.2,1249-1267).
ccaagggcttcaccattat

SEQ ID NO: 459191 - DNA, 19 bp, Mus musculus
  siRNA target sequence for Ercc2 (NM_007949.2,1253-1271).
gggcttcaccattatcatt

SEQ ID NO: 459192 - DNA, 19 bp, Mus musculus
  siRNA target sequence for Ercc2 (NM_007949.2,1255-1273).
gcttcaccattatcattga

SEQ ID NO: 459193 - DNA, 19 bp, Mus musculus
  siRNA target sequence for Ercc2 (NM_007949.2,1484-1502).
cctctgcccgatgatcatt

SEQ ID NO: 459194 - DNA, 19 bp, Mus musculus
  siRNA target sequence for Ercc2 (NM_007949.2,1812-1830).
gtggctcggggcaaagtat

SEQ ID NO: 459195 - DNA, 19 bp, Mus musculus
  siRNA target sequence for Ercc2 (NM_007949.2,1814-1832).
ggctcggggcaaagtatca

SEQ ID NO: 459196 - DNA, 19 bp, Mus musculus
  siRNA target sequence for Ercc2 (NM_007949.2,1827-1845).
gtatcagaagggattgact

SEQ ID NO: 459197 - DNA, 19 bp, Mus musculus
  siRNA target sequence for Ercc2 (NM_007949.2,1861-1879).
gacgggctgtgatcatgtt

SEQ ID NO: 459198 - DNA, 19 bp, Mus musculus
  siRNA target sequence for Ercc2 (NM_007949.2,1881-1899).
ggagttccctatgtctata

SEQ ID NO: 459199 - DNA, 19 bp, Mus musculus
  siRNA target sequence for Ercc2 (NM_007949.2,1900-1918).
cccagagccgaattctcaa

SEQ ID NO: 459200 - DNA, 19 bp, Mus musculus
  siRNA target sequence for Ercc2 (NM_007949.2,2157-2175).
gtacaggtcgccaagtact

SEQ ID NO: 459201 - DNA, 19 bp, Mus musculus
  siRNA target sequence for Ercc3 (NM_133658.1,79-97).
cgagtggaccgcgacaaaa

SEQ ID NO: 459202 - DNA, 19 bp, Mus musculus
  siRNA target sequence for Ercc3 (NM_133658.1,80-98).
gagtggaccgcgacaaaaa

SEQ ID NO: 459203 - DNA, 19 bp, Mus musculus
  siRNA target sequence for Ercc3 (NM_133658.1,82-100).
gtggaccgcgacaaaaaga

SEQ ID NO: 459204 - DNA, 19 bp, Mus musculus
  siRNA target sequence for Ercc3 (NM_133658.1,84-102).
ggaccgcgacaaaaagaaa

SEQ ID NO: 459205 - DNA, 19 bp, Mus musculus
  siRNA target sequence for Ercc3 (NM_133658.1,88-106).
cgcgacaaaaagaaatcca

SEQ ID NO: 459206 - DNA, 19 bp, Mus musculus
  siRNA target sequence for Ercc3 (NM_133658.1,89-107).
gcgacaaaaagaaatccaa

SEQ ID NO: 459207 - DNA, 19 bp, Mus musculus
  siRNA target sequence for Ercc3 (NM_133658.1,299-317).
ctcctgatggccacatttt

SEQ ID NO: 459208 - DNA, 19 bp, Mus musculus
  siRNA target sequence for Ercc3 (NM_133658.1,456-474).
gcaaaccagtgacattact

SEQ ID NO: 459209 - DNA, 19 bp, Mus musculus
  siRNA target sequence for Ercc3 (NM_133658.1,481-499).
ctcagaaagctcagtaaga

SEQ ID NO: 459210 - DNA, 19 bp, Mus musculus
  siRNA target sequence for Ercc3 (NM_133658.1,579-597).
caacaggtactttgttgaa

SEQ ID NO: 459211 - DNA, 19 bp, Mus musculus
  siRNA target sequence for Ercc3 (NM_133658.1,582-600).
caggtactttgttgaaagt

SEQ ID NO: 459212 - DNA, 19 bp, Mus musculus
  siRNA target sequence for Ercc3 (NM_133658.1,602-620).
cccaccctgatgttatcca

SEQ ID NO: 459213 - DNA, 19 bp, Mus musculus
  siRNA target sequence for Ercc3 (NM_133658.1,674-692).
gcgaggccaccgaactcat

SEQ ID NO: 459214 - DNA, 19 bp, Mus musculus
  siRNA target sequence for Ercc3 (NM_133658.1,699-717).
gacttttacaagcaaatct

SEQ ID NO: 459215 - DNA, 19 bp, Mus musculus
  siRNA target sequence for Ercc3 (NM_133658.1,710-728).
gcaaatctgctatttctaa

SEQ ID NO: 459216 - DNA, 19 bp, Mus musculus
  siRNA target sequence for Ercc3 (NM_133658.1,866-884).
cagtgtcctttgaagttaa

SEQ ID NO: 459217 - DNA, 19 bp, Mus musculus
  siRNA target sequence for Ercc3 (NM_133658.1,913-931).
cgctgcatctgcttagagt

SEQ ID NO: 459218 - DNA, 19 bp, Mus musculus
  siRNA target sequence for Ercc3 (NM_133658.1,933-951).
cccgctgctggcagagtat

SEQ ID NO: 459219 - DNA, 19 bp, Mus musculus
  siRNA target sequence for Ercc3 (NM_133658.1,968-986).
ctctcaatcctgacatcaa

SEQ ID NO: 459220 - DNA, 19 bp, Mus musculus
  siRNA target sequence for Ercc3 (NM_133658.1,972-990).
caatcctgacatcaacatt

SEQ ID NO: 459221 - DNA, 19 bp, Mus musculus
  siRNA target sequence for Ercc3 (NM_133658.1,1067-1085).
gctcaggagtcattgttct

SEQ ID NO: 459222 - DNA, 19 bp, Mus musculus
  siRNA target sequence for Ercc3 (NM_133658.1,1445-1463).
cgcactgtaagcttggttt

SEQ ID NO: 459223 - DNA, 19 bp, Mus musculus
  siRNA target sequence for Ercc3 (NM_133658.1,1477-1495).
gtccgggaagatgacaaaa

SEQ ID NO: 459224 - DNA, 19 bp, Mus musculus
  siRNA target sequence for Ercc3 (NM_133658.1,1614-1632).
cgagttctaccgagagtat

SEQ ID NO: 459225 - DNA, 19 bp, Mus musculus
  siRNA target sequence for Ercc3 (NM_133658.1,1625-1643).
gagagtatgtggcaatcaa

SEQ ID NO: 459226 - DNA, 19 bp, Mus musculus
  siRNA target sequence for Ercc3 (NM_133658.1,1627-1645).
gagtatgtggcaatcaaaa

SEQ ID NO: 459227 - DNA, 19 bp, Mus musculus
  siRNA target sequence for Ercc3 (NM_133658.1,1659-1677).
cctgttgtacaccatgaat

SEQ ID NO: 459228 - DNA, 19 bp, Mus musculus
  siRNA target sequence for Ercc3 (NM_133658.1,1668-1686).
caccatgaatcccaacaaa

SEQ ID NO: 459229 - DNA, 19 bp, Mus musculus
  siRNA target sequence for Ercc3 (NM_133658.1,1674-1692).
gaatcccaacaaattcaga

SEQ ID NO: 459230 - DNA, 19 bp, Mus musculus
  siRNA target sequence for Ercc3 (NM_133658.1,1694-1712).
cctgccagtttctgatcaa

SEQ ID NO: 459231 - DNA, 19 bp, Mus musculus
  siRNA target sequence for Ercc3 (NM_133658.1,1697-1715).
gccagtttctgatcaagtt

SEQ ID NO: 459232 - DNA, 19 bp, Mus musculus
  siRNA target sequence for Ercc3 (NM_133658.1,1698-1716).
ccagtttctgatcaagttt

SEQ ID NO: 459233 - DNA, 19 bp, Mus musculus
  siRNA target sequence for Ercc3 (NM_133658.1,1701-1719).
gtttctgatcaagtttcat

SEQ ID NO: 459234 - DNA, 19 bp, Mus musculus
  siRNA target sequence for Ercc3 (NM_133658.1,1725-1743).
gaggaatgacaagattatt

SEQ ID NO: 459235 - DNA, 19 bp, Mus musculus
  siRNA target sequence for Ercc3 (NM_133658.1,1744-1762).
gtctttgctgacaacgtat

SEQ ID NO: 459236 - DNA, 19 bp, Mus musculus
  siRNA target sequence for Ercc3 (NM_133658.1,1786-1804).
cggctgaacaaaccttata

SEQ ID NO: 459237 - DNA, 19 bp, Mus musculus
  siRNA target sequence for Ercc3 (NM_133658.1,1789-1807).
ctgaacaaaccttatatct

SEQ ID NO: 459238 - DNA, 19 bp, Mus musculus
  siRNA target sequence for Ercc3 (NM_133658.1,1817-1835).
cgtcccagggagaacgtat

SEQ ID NO: 459239 - DNA, 19 bp, Mus musculus
  siRNA target sequence for Ercc3 (NM_133658.1,1826-1844).
gagaacgtatgcagattct

SEQ ID NO: 459240 - DNA, 19 bp, Mus musculus
  siRNA target sequence for Ercc3 (NM_133658.1,1893-1911).
ggttggtgacacatccttt

SEQ ID NO: 459241 - DNA, 19 bp, Mus musculus
  siRNA target sequence for Ercc3 (NM_133658.1,1992-2010).
ggtactcagagccaagaaa

SEQ ID NO: 459242 - DNA, 19 bp, Mus musculus
  siRNA target sequence for Ercc3 (NM_133658.1,2012-2030).
ggatggtcgcagaggaata

SEQ ID NO: 459243 - DNA, 19 bp, Mus musculus
  siRNA target sequence for Ercc3 (NM_133658.1,2088-2106).
caagcgacagagattccta

SEQ ID NO: 459244 - DNA, 19 bp, Mus musculus
  siRNA target sequence for Ercc3 (NM_133658.1,2123-2141).
gctttaaggtaatcacaaa

SEQ ID NO: 459245 - DNA, 19 bp, Mus musculus
  siRNA target sequence for Ercc3 (NM_133658.1,2257-2275).
ggagagtttggctctagat

SEQ ID NO: 459246 - DNA, 19 bp, Mus musculus
  siRNA target sequence for Ercc3 (NM_133658.1,2324-2342).
cagacgacaccgtgtacat

SEQ ID NO: 459247 - DNA, 19 bp, Mus musculus
  siRNA target sequence for Ercc3 (NM_133658.1,2380-2398).
cacgtgcacccgcttttca

SEQ ID NO: 459248 - DNA, 19 bp, Mus musculus
  siRNA target sequence for Ercc3 (NM_133658.1,2382-2400).
cgtgcacccgcttttcaaa

SEQ ID NO: 459249 - DNA, 19 bp, Mus musculus
  siRNA target sequence for Ern1 (NM_023913.2,210-228).
gcctgagaccttgttgttt

SEQ ID NO: 459250 - DNA, 19 bp, Mus musculus
  siRNA target sequence for Ern1 (NM_023913.2,278-296).
ccatcaagtggactttaaa

SEQ ID NO: 459251 - DNA, 19 bp, Mus musculus
  siRNA target sequence for Ern1 (NM_023913.2,285-303).
gtggactttaaaagaagat

SEQ ID NO: 459252 - DNA, 19 bp, Mus musculus
  siRNA target sequence for Ern1 (NM_023913.2,345-363).
cctcccagatcccaatgat

SEQ ID NO: 459253 - DNA, 19 bp, Mus musculus
  siRNA target sequence for Ern1 (NM_023913.2,396-414).
cgaaggcctgacgaaactt

SEQ ID NO: 459254 - DNA, 19 bp, Mus musculus
  siRNA target sequence for Ern1 (NM_023913.2,407-425).
cgaaacttccctttaccat

SEQ ID NO: 459255 - DNA, 19 bp, Mus musculus
  siRNA target sequence for Ern1 (NM_023913.2,447-465).
cccatgccgaagttcagat

SEQ ID NO: 459256 - DNA, 19 bp, Mus musculus
  siRNA target sequence for Ern1 (NM_023913.2,571-589).
ccatcaacttcccttctat

SEQ ID NO: 459257 - DNA, 19 bp, Mus musculus
  siRNA target sequence for Ern1 (NM_023913.2,648-666).
ctggaatgccacctatttt

SEQ ID NO: 459258 - DNA, 19 bp, Mus musculus
  siRNA target sequence for Ern1 (NM_023913.2,694-712).
gacgtggactacaagatgt

SEQ ID NO: 459259 - DNA, 19 bp, Mus musculus
  siRNA target sequence for Ern1 (NM_023913.2,772-790).
gtcctgtggatccaaaact

SEQ ID NO: 459260 - DNA, 19 bp, Mus musculus
  siRNA target sequence for Ern1 (NM_023913.2,868-886).
gagactctacgctacttga

SEQ ID NO: 459261 - DNA, 19 bp, Mus musculus
  siRNA target sequence for Ern1 (NM_023913.2,963-981).
gctaacgcctactctgtat

SEQ ID NO: 459262 - DNA, 19 bp, Mus musculus
  siRNA target sequence for Ern1 (NM_023913.2,1180-1198).
ctgaactacttgaggaatt

SEQ ID NO: 459263 - DNA, 19 bp, Mus musculus
  siRNA target sequence for Ern1 (NM_023913.2,1194-1212).
gaattactggcttctcata

SEQ ID NO: 459264 - DNA, 19 bp, Mus musculus
  siRNA target sequence for Ern1 (NM_023913.2,1275-1293).
gcccaaacatcgagaaaat

SEQ ID NO: 459265 - DNA, 19 bp, Mus musculus
  siRNA target sequence for Ern1 (NM_023913.2,1277-1295).
ccaaacatcgagaaaatgt

SEQ ID NO: 459266 - DNA, 19 bp, Mus musculus
  siRNA target sequence for Ern1 (NM_023913.2,1319-1337).
ggagctttgaggaagttat

SEQ ID NO: 459267 - DNA, 19 bp, Mus musculus
  siRNA target sequence for Ern1 (NM_023913.2,1329-1347).
ggaagttatcaacatagtt

SEQ ID NO: 459268 - DNA, 19 bp, Mus musculus
  siRNA target sequence for Ern1 (NM_023913.2,1498-1516).
gtggcgttcatcatcactt

SEQ ID NO: 459269 - DNA, 19 bp, Mus musculus
  siRNA target sequence for Ern1 (NM_023913.2,1812-1830).
gattgttgggaaaatttca

SEQ ID NO: 459270 - DNA, 19 bp, Mus musculus
  siRNA target sequence for Ern1 (NM_023913.2,1816-1834).
gttgggaaaatttcattct

SEQ ID NO: 459271 - DNA, 19 bp, Mus musculus
  siRNA target sequence for Ern1 (NM_023913.2,1859-1877).
gagctgagggcacaattgt

SEQ ID NO: 459272 - DNA, 19 bp, Mus musculus
  siRNA target sequence for Ern1 (NM_023913.2,1862-1880).
ctgagggcacaattgtata

SEQ ID NO: 459273 - DNA, 19 bp, Mus musculus
  siRNA target sequence for Ern1 (NM_023913.2,1866-1884).
gggcacaattgtatacaaa

SEQ ID NO: 459274 - DNA, 19 bp, Mus musculus
  siRNA target sequence for Ern1 (NM_023913.2,1924-1942).
ctccctgagtgttttagct

SEQ ID NO: 459275 - DNA, 19 bp, Mus musculus
  siRNA target sequence for Ern1 (NM_023913.2,1926-1944).
ccctgagtgttttagcttt

SEQ ID NO: 459276 - DNA, 19 bp, Mus musculus
  siRNA target sequence for Ern1 (NM_023913.2,1976-1994).
cagacgagcacccaaatgt

SEQ ID NO: 459277 - DNA, 19 bp, Mus musculus
  siRNA target sequence for Ern1 (NM_023913.2,1978-1996).
gacgagcacccaaatgtga

SEQ ID NO: 459278 - DNA, 19 bp, Mus musculus
  siRNA target sequence for Ern1 (NM_023913.2,1993-2011).
gtgatccgctacttttgca

SEQ ID NO: 459279 - DNA, 19 bp, Mus musculus
  siRNA target sequence for Ern1 (NM_023913.2,2022-2040).
ccggcagttccagtacatt

SEQ ID NO: 459280 - DNA, 19 bp, Mus musculus
  siRNA target sequence for Ern1 (NM_023913.2,2026-2044).
cagttccagtacattgcta

SEQ ID NO: 459281 - DNA, 19 bp, Mus musculus
  siRNA target sequence for Ern1 (NM_023913.2,2054-2072).
gtgcagccaccctacaaga

SEQ ID NO: 459282 - DNA, 19 bp, Mus musculus
  siRNA target sequence for Ern1 (NM_023913.2,2057-2075).
cagccaccctacaagagta

SEQ ID NO: 459283 - DNA, 19 bp, Mus musculus
  siRNA target sequence for Ern1 (NM_023913.2,2154-2172).
cctgcattctctcaacatt

SEQ ID NO: 459284 - DNA, 19 bp, Mus musculus
  siRNA target sequence for Ern1 (NM_023913.2,2398-2416).
gcaggctgtgtcttttact

SEQ ID NO: 459285 - DNA, 19 bp, Mus musculus
  siRNA target sequence for Ern1 (NM_023913.2,2399-2417).
caggctgtgtcttttacta

SEQ ID NO: 459286 - DNA, 19 bp, Mus musculus
  siRNA target sequence for Ern1 (NM_023913.2,2405-2423).
gtgtcttttactatgtcat

SEQ ID NO: 459287 - DNA, 19 bp, Mus musculus
  siRNA target sequence for Ern1 (NM_023913.2,2437-2455).
catccttttggcaaatcct

SEQ ID NO: 459288 - DNA, 19 bp, Mus musculus
  siRNA target sequence for Ern1 (NM_023913.2,2527-2545).
gtcattgctcgtgaattga

SEQ ID NO: 459289 - DNA, 19 bp, Mus musculus
  siRNA target sequence for Ern1 (NM_023913.2,2529-2547).
cattgctcgtgaattgata

SEQ ID NO: 459290 - DNA, 19 bp, Mus musculus
  siRNA target sequence for Ern1 (NM_023913.2,2533-2551).
gctcgtgaattgatagaga

SEQ ID NO: 459291 - DNA, 19 bp, Mus musculus
  siRNA target sequence for Ern1 (NM_023913.2,2534-2552).
ctcgtgaattgatagagaa

SEQ ID NO: 459292 - DNA, 19 bp, Mus musculus
  siRNA target sequence for Ern1 (NM_023913.2,2536-2554).
cgtgaattgatagagaaaa

SEQ ID NO: 459293 - DNA, 19 bp, Mus musculus
  siRNA target sequence for Ern1 (NM_023913.2,2653-2671).
gtaagtgaccgaatagaaa

SEQ ID NO: 459294 - DNA, 19 bp, Mus musculus
  siRNA target sequence for Ern1 (NM_023913.2,2657-2675).
gtgaccgaatagaaaagga

SEQ ID NO: 459295 - DNA, 19 bp, Mus musculus
  siRNA target sequence for Ern1 (NM_023913.2,2679-2697).
cttggacggtccaatcgta

SEQ ID NO: 459296 - DNA, 19 bp, Mus musculus
  siRNA target sequence for Ern1 (NM_023913.2,2737-2755).
gactggcgggagaacatca

SEQ ID NO: 459297 - DNA, 19 bp, Mus musculus
  siRNA target sequence for Ern1 (NM_023913.2,2773-2791).
gatctgcgcaaattcagaa

SEQ ID NO: 459298 - DNA, 19 bp, Mus musculus
  siRNA target sequence for Ern1 (NM_023913.2,2888-2906).
gctccatcccggatgactt

SEQ ID NO: 459299 - DNA, 19 bp, Mus musculus
  siRNA target sequence for Ern1 (NM_023913.2,2891-2909).
ccatcccggatgactttgt

SEQ ID NO: 459300 - DNA, 19 bp, Mus musculus
  siRNA target sequence for Ern1 (NM_023913.2,2986-3004).
ctctttcagacctactact

SEQ ID NO: 459301 - DNA, 19 bp, Mus musculus
  siRNA target sequence for Exo1 (NM_012012.2,145-163).
ggggattcaagggttactt

SEQ ID NO: 459302 - DNA, 19 bp, Mus musculus
  siRNA target sequence for Exo1 (NM_012012.2,188-206).
cctgtcaacgtgaagaagt

SEQ ID NO: 459303 - DNA, 19 bp, Mus musculus
  siRNA target sequence for Exo1 (NM_012012.2,189-207).
ctgtcaacgtgaagaagta

SEQ ID NO: 459304 - DNA, 19 bp, Mus musculus
  siRNA target sequence for Exo1 (NM_012012.2,283-301).
caaaggggaacctacagat

SEQ ID NO: 459305 - DNA, 19 bp, Mus musculus
  siRNA target sequence for Exo1 (NM_012012.2,288-306).
gggaacctacagataggta

SEQ ID NO: 459306 - DNA, 19 bp, Mus musculus
  siRNA target sequence for Exo1 (NM_012012.2,289-307).
ggaacctacagataggtat

SEQ ID NO: 459307 - DNA, 19 bp, Mus musculus
  siRNA target sequence for Exo1 (NM_012012.2,297-315).
cagataggtatgtaggatt

SEQ ID NO: 459308 - DNA, 19 bp, Mus musculus
  siRNA target sequence for Exo1 (NM_012012.2,318-336).
gtatgaagtttgttaatat

SEQ ID NO: 459309 - DNA, 19 bp, Mus musculus
  siRNA target sequence for Exo1 (NM_012012.2,351-369).
gggtcaagccgattctcat

SEQ ID NO: 459310 - DNA, 19 bp, Mus musculus
  siRNA target sequence for Exo1 (NM_012012.2,352-370).
ggtcaagccgattctcata

SEQ ID NO: 459311 - DNA, 19 bp, Mus musculus
  siRNA target sequence for Exo1 (NM_012012.2,353-371).
gtcaagccgattctcatat

SEQ ID NO: 459312 - DNA, 19 bp, Mus musculus
  siRNA target sequence for Exo1 (NM_012012.2,355-373).
caagccgattctcatattt

SEQ ID NO: 459313 - DNA, 19 bp, Mus musculus
  siRNA target sequence for Exo1 (NM_012012.2,367-385).
catatttgacggatgtact

SEQ ID NO: 459314 - DNA, 19 bp, Mus musculus
  siRNA target sequence for Exo1 (NM_012012.2,381-399).
gtactctaccttctaaaaa

SEQ ID NO: 459315 - DNA, 19 bp, Mus musculus
  siRNA target sequence for Exo1 (NM_012012.2,384-402).
ctctaccttctaaaaagga

SEQ ID NO: 459316 - DNA, 19 bp, Mus musculus
  siRNA target sequence for Exo1 (NM_012012.2,420-438).
gagagagacgacaaagcaa

SEQ ID NO: 459317 - DNA, 19 bp, Mus musculus
  siRNA target sequence for Exo1 (NM_012012.2,428-446).
cgacaaagcaaccttctta

SEQ ID NO: 459318 - DNA, 19 bp, Mus musculus
  siRNA target sequence for Exo1 (NM_012012.2,500-518).
gctcgctctatcaacatca

SEQ ID NO: 459319 - DNA, 19 bp, Mus musculus
  siRNA target sequence for Exo1 (NM_012012.2,523-541).
cgccatggcccacaaagta

SEQ ID NO: 459320 - DNA, 19 bp, Mus musculus
  siRNA target sequence for Exo1 (NM_012012.2,524-542).
gccatggcccacaaagtaa

SEQ ID NO: 459321 - DNA, 19 bp, Mus musculus
  siRNA target sequence for Exo1 (NM_012012.2,525-543).
ccatggcccacaaagtaat

SEQ ID NO: 459322 - DNA, 19 bp, Mus musculus
  siRNA target sequence for Exo1 (NM_012012.2,526-544).
catggcccacaaagtaata

SEQ ID NO: 459323 - DNA, 19 bp, Mus musculus
  siRNA target sequence for Exo1 (NM_012012.2,529-547).
ggcccacaaagtaataaaa

SEQ ID NO: 459324 - DNA, 19 bp, Mus musculus
  siRNA target sequence for Exo1 (NM_012012.2,599-617).
gctcagttggcctacctta

SEQ ID NO: 459325 - DNA, 19 bp, Mus musculus
  siRNA target sequence for Exo1 (NM_012012.2,600-618).
ctcagttggcctaccttaa

SEQ ID NO: 459326 - DNA, 19 bp, Mus musculus
  siRNA target sequence for Exo1 (NM_012012.2,602-620).
cagttggcctaccttaaca

SEQ ID NO: 459327 - DNA, 19 bp, Mus musculus
  siRNA target sequence for Exo1 (NM_012012.2,665-683).
ctcgcatttggctgtaaga

SEQ ID NO: 459328 - DNA, 19 bp, Mus musculus
  siRNA target sequence for Exo1 (NM_012012.2,674-692).
ggctgtaagaaggtgattt

SEQ ID NO: 459329 - DNA, 19 bp, Mus musculus
  siRNA target sequence for Exo1 (NM_012012.2,675-693).
gctgtaagaaggtgatttt

SEQ ID NO: 459330 - DNA, 19 bp, Mus musculus
  siRNA target sequence for Exo1 (NM_012012.2,755-773).
cagcttggggatgtattca

SEQ ID NO: 459331 - DNA, 19 bp, Mus musculus
  siRNA target sequence for Exo1 (NM_012012.2,876-894).
ccaataaccccgatatcgt

SEQ ID NO: 459332 - DNA, 19 bp, Mus musculus
  siRNA target sequence for Exo1 (NM_012012.2,884-902).
cccgatatcgtgaaggtta

SEQ ID NO: 459333 - DNA, 19 bp, Mus musculus
  siRNA target sequence for Exo1 (NM_012012.2,885-903).
ccgatatcgtgaaggttat

SEQ ID NO: 459334 - DNA, 19 bp, Mus musculus
  siRNA target sequence for Exo1 (NM_012012.2,916-934).
gcattatctcaggatgaat

SEQ ID NO: 459335 - DNA, 19 bp, Mus musculus
  siRNA target sequence for Exo1 (NM_012012.2,939-957).
cggtgcccgaggattacat

SEQ ID NO: 459336 - DNA, 19 bp, Mus musculus
  siRNA target sequence for Exo1 (NM_012012.2,941-959).
gtgcccgaggattacatca

SEQ ID NO: 459337 - DNA, 19 bp, Mus musculus
  siRNA target sequence for Exo1 (NM_012012.2,949-967).
ggattacatcacaggattt

SEQ ID NO: 459338 - DNA, 19 bp, Mus musculus
  siRNA target sequence for Exo1 (NM_012012.2,950-968).
gattacatcacaggattta

SEQ ID NO: 459339 - DNA, 19 bp, Mus musculus
  siRNA target sequence for Exo1 (NM_012012.2,955-973).
catcacaggatttattcgt

SEQ ID NO: 459340 - DNA, 19 bp, Mus musculus
  siRNA target sequence for Exo1 (NM_012012.2,1001-1019).
gtgttcgaccccatccaaa

SEQ ID NO: 459341 - DNA, 19 bp, Mus musculus
  siRNA target sequence for Exo1 (NM_012012.2,1041-1059).
cctacggagatgacgttaa

SEQ ID NO: 459342 - DNA, 19 bp, Mus musculus
  siRNA target sequence for Exo1 (NM_012012.2,1112-1130).
cagatcgcccttggaaata

SEQ ID NO: 459343 - DNA, 19 bp, Mus musculus
  siRNA target sequence for Exo1 (NM_012012.2,1117-1135).
cgcccttggaaatagagat

SEQ ID NO: 459344 - DNA, 19 bp, Mus musculus
  siRNA target sequence for Exo1 (NM_012012.2,1120-1138).
ccttggaaatagagatgta

SEQ ID NO: 459345 - DNA, 19 bp, Mus musculus
  siRNA target sequence for Exo1 (NM_012012.2,1232-1250).
cctggtaccaacagcattt

SEQ ID NO: 459346 - DNA, 19 bp, Mus musculus
  siRNA target sequence for Exo1 (NM_012012.2,1245-1263).
gcatttggcacaagaatta

SEQ ID NO: 459347 - DNA, 19 bp, Mus musculus
  siRNA target sequence for Exo1 (NM_012012.2,1258-1276).
gaattattgtcctagactt

SEQ ID NO: 459348 - DNA, 19 bp, Mus musculus
  siRNA target sequence for Exo1 (NM_012012.2,1324-1342).
cactttgggccttaaacaa

SEQ ID NO: 459349 - DNA, 19 bp, Mus musculus
  siRNA target sequence for Exo1 (NM_012012.2,1326-1344).
ctttgggccttaaacaagt

SEQ ID NO: 459350 - DNA, 19 bp, Mus musculus
  siRNA target sequence for Exo1 (NM_012012.2,1331-1349).
ggccttaaacaagtgatta

SEQ ID NO: 459351 - DNA, 19 bp, Mus musculus
  siRNA target sequence for Exo1 (NM_012012.2,1333-1351).
ccttaaacaagtgattagt

SEQ ID NO: 459352 - DNA, 19 bp, Mus musculus
  siRNA target sequence for Exo1 (NM_012012.2,1334-1352).
cttaaacaagtgattagta

SEQ ID NO: 459353 - DNA, 19 bp, Mus musculus
  siRNA target sequence for Exo1 (NM_012012.2,1378-1396).
gtcttgtgtgttgaaaaga

SEQ ID NO: 459354 - DNA, 19 bp, Mus musculus
  siRNA target sequence for Exo1 (NM_012012.2,1435-1453).
ccagtattcgtcagtttca

SEQ ID NO: 459355 - DNA, 19 bp, Mus musculus
  siRNA target sequence for Exo1 (NM_012012.2,1436-1454).
cagtattcgtcagtttcaa

SEQ ID NO: 459356 - DNA, 19 bp, Mus musculus
  siRNA target sequence for Exo1 (NM_012012.2,1484-1502).
ggcacatcacctaactctt

SEQ ID NO: 459357 - DNA, 19 bp, Mus musculus
  siRNA target sequence for Exo1 (NM_012012.2,1553-1571).
gcacacaccccgtctaaga

SEQ ID NO: 459358 - DNA, 19 bp, Mus musculus
  siRNA target sequence for Exo1 (NM_012012.2,1556-1574).
cacaccccgtctaagatga

SEQ ID NO: 459359 - DNA, 19 bp, Mus musculus
  siRNA target sequence for Exo1 (NM_012012.2,1563-1581).
cgtctaagatgaggaataa

SEQ ID NO: 459360 - DNA, 19 bp, Mus musculus
  siRNA target sequence for Exo1 (NM_012012.2,1676-1694).
gacaatttcataccaaaaa

SEQ ID NO: 459361 - DNA, 19 bp, Mus musculus
  siRNA target sequence for Exo1 (NM_012012.2,1701-1719).
gcggccagcctctaaatga

SEQ ID NO: 459362 - DNA, 19 bp, Mus musculus
  siRNA target sequence for Exo1 (NM_012012.2,1789-1807).
caagccggttgatgcaaat

SEQ ID NO: 459363 - DNA, 19 bp, Mus musculus
  siRNA target sequence for Exo1 (NM_012012.2,1803-1821).
caaatgggacgcacaatct

SEQ ID NO: 459364 - DNA, 19 bp, Mus musculus
  siRNA target sequence for Exo1 (NM_012012.2,1952-1970).
ggcactctcagggaatttt

SEQ ID NO: 459365 - DNA, 19 bp, Mus musculus
  siRNA target sequence for Exo1 (NM_012012.2,2067-2085).
ctgacaggtgcgactcaaa

SEQ ID NO: 459366 - DNA, 19 bp, Mus musculus
  siRNA target sequence for Exo1 (NM_012012.2,2069-2087).
gacaggtgcgactcaaaga

SEQ ID NO: 459367 - DNA, 19 bp, Mus musculus
  siRNA target sequence for Exo1 (NM_012012.2,2220-2238).
cagaggagtcggattgtaa

SEQ ID NO: 459368 - DNA, 19 bp, Mus musculus
  siRNA target sequence for Exo1 (NM_012012.2,2222-2240).
gaggagtcggattgtaaca

SEQ ID NO: 459369 - DNA, 19 bp, Mus musculus
  siRNA target sequence for Exo1 (NM_012012.2,2224-2242).
ggagtcggattgtaacaat

SEQ ID NO: 459370 - DNA, 19 bp, Mus musculus
  siRNA target sequence for Exo1 (NM_012012.2,2225-2243).
gagtcggattgtaacaata

SEQ ID NO: 459371 - DNA, 19 bp, Mus musculus
  siRNA target sequence for Exo1 (NM_012012.2,2230-2248).
ggattgtaacaataagtca

SEQ ID NO: 459372 - DNA, 19 bp, Mus musculus
  siRNA target sequence for Exo1 (NM_012012.2,2239-2257).
caataagtcacttgataat

SEQ ID NO: 459373 - DNA, 19 bp, Mus musculus
  siRNA target sequence for Exo1 (NM_012012.2,2278-2296).
gcaacacttacctcacttt

SEQ ID NO: 459374 - DNA, 19 bp, Mus musculus
  siRNA target sequence for Exo1 (NM_012012.2,2279-2297).
caacacttacctcactttt

SEQ ID NO: 459375 - DNA, 19 bp, Mus musculus
  siRNA target sequence for Exo1 (NM_012012.2,2333-2351).
gggctctgtaggtctagtt

SEQ ID NO: 459376 - DNA, 19 bp, Mus musculus
  siRNA target sequence for Exo1 (NM_012012.2,2471-2489).
ggcctacagacgaagatca

SEQ ID NO: 459377 - DNA, 19 bp, Mus musculus
  siRNA target sequence for Exo1 (NM_012012.2,2491-2509).
cgagctctggaaaaacttt

SEQ ID NO: 459378 - DNA, 19 bp, Mus musculus
  siRNA target sequence for Exo1 (NM_012012.2,2597-2615).
gaagatgagatctttaaca

SEQ ID NO: 459379 - DNA, 19 bp, Mus musculus
  siRNA target sequence for Exo1 (NM_012012.2,2630-2648).
cgcgctcagagagcaatat

SEQ ID NO: 459380 - DNA, 19 bp, Mus musculus
  siRNA target sequence for Exo1 (NM_012012.2,2631-2649).
gcgctcagagagcaatatt

SEQ ID NO: 459381 - DNA, 19 bp, Mus musculus
  siRNA target sequence for Exo1 (NM_012012.2,2632-2650).
cgctcagagagcaatattt

SEQ ID NO: 459382 - DNA, 19 bp, Mus musculus
  siRNA target sequence for Exo1 (NM_012012.2,2636-2654).
cagagagcaatatttcact

SEQ ID NO: 459383 - DNA, 19 bp, Mus musculus
  siRNA target sequence for Ezh1 (NM_007970.1,137-155).
ccccaacttccaaatgcat

SEQ ID NO: 459384 - DNA, 19 bp, Mus musculus
  siRNA target sequence for Ezh1 (NM_007970.1,143-161).
cttccaaatgcatcacata

SEQ ID NO: 459385 - DNA, 19 bp, Mus musculus
  siRNA target sequence for Ezh1 (NM_007970.1,228-246).
gggagcaaaggctctgtat

SEQ ID NO: 459386 - DNA, 19 bp, Mus musculus
  siRNA target sequence for Ezh1 (NM_007970.1,239-257).
ctctgtatgtggcaaattt

SEQ ID NO: 459387 - DNA, 19 bp, Mus musculus
  siRNA target sequence for Ezh1 (NM_007970.1,278-296).
cccaaatcctcaatgaaga

SEQ ID NO: 459388 - DNA, 19 bp, Mus musculus
  siRNA target sequence for Ezh1 (NM_007970.1,346-364).
gggcacccttttctgaaaa

SEQ ID NO: 459389 - DNA, 19 bp, Mus musculus
  siRNA target sequence for Ezh1 (NM_007970.1,368-386).
gtaccatagagagcatttt

SEQ ID NO: 459390 - DNA, 19 bp, Mus musculus
  siRNA target sequence for Ezh1 (NM_007970.1,392-410).
ggttcgacagccaggatat

SEQ ID NO: 459391 - DNA, 19 bp, Mus musculus
  siRNA target sequence for Ezh1 (NM_007970.1,437-455).
cactggttcccatcatgta

SEQ ID NO: 459392 - DNA, 19 bp, Mus musculus
  siRNA target sequence for Ezh1 (NM_007970.1,466-484).
cctctccagcagaatttca

SEQ ID NO: 459393 - DNA, 19 bp, Mus musculus
  siRNA target sequence for Ezh1 (NM_007970.1,496-514).
gagacggttttgtgcaata

SEQ ID NO: 459394 - DNA, 19 bp, Mus musculus
  siRNA target sequence for Ezh1 (NM_007970.1,567-585).
gctgatcaataactatgat

SEQ ID NO: 459395 - DNA, 19 bp, Mus musculus
  siRNA target sequence for Ezh1 (NM_007970.1,588-606).
caaagtccacggtgaagaa

SEQ ID NO: 459396 - DNA, 19 bp, Mus musculus
  siRNA target sequence for Ezh1 (NM_007970.1,630-648).
gatcagcgatgctgtgttt

SEQ ID NO: 459397 - DNA, 19 bp, Mus musculus
  siRNA target sequence for Ezh1 (NM_007970.1,708-726).
cccctccgatggaaagcaa

SEQ ID NO: 459398 - DNA, 19 bp, Mus musculus
  siRNA target sequence for Ezh1 (NM_007970.1,741-759).
ggacctgccggtaacaaga

SEQ ID NO: 459399 - DNA, 19 bp, Mus musculus
  siRNA target sequence for Ezh1 (NM_007970.1,742-760).
gacctgccggtaacaagaa

SEQ ID NO: 459400 - DNA, 19 bp, Mus musculus
  siRNA target sequence for Ezh1 (NM_007970.1,744-762).
cctgccggtaacaagaaaa

SEQ ID NO: 459401 - DNA, 19 bp, Mus musculus
  siRNA target sequence for Ezh1 (NM_007970.1,780-798).
cgaaggcaacaaaaagagt

SEQ ID NO: 459402 - DNA, 19 bp, Mus musculus
  siRNA target sequence for Ezh1 (NM_007970.1,781-799).
gaaggcaacaaaaagagtt

SEQ ID NO: 459403 - DNA, 19 bp, Mus musculus
  siRNA target sequence for Ezh1 (NM_007970.1,795-813).
gagttccaagaaacagttt

SEQ ID NO: 459404 - DNA, 19 bp, Mus musculus
  siRNA target sequence for Ezh1 (NM_007970.1,834-852).
cgccattgcgtccatgttt

SEQ ID NO: 459405 - DNA, 19 bp, Mus musculus
  siRNA target sequence for Ezh1 (NM_007970.1,843-861).
gtccatgtttcctgagaat

SEQ ID NO: 459406 - DNA, 19 bp, Mus musculus
  siRNA target sequence for Ezh1 (NM_007970.1,863-881).
gtgtccctgacgacatgaa

SEQ ID NO: 459407 - DNA, 19 bp, Mus musculus
  siRNA target sequence for Ezh1 (NM_007970.1,1056-1074).
ccacgccaccccaaatgta

SEQ ID NO: 459408 - DNA, 19 bp, Mus musculus
  siRNA target sequence for Ezh1 (NM_007970.1,1057-1075).
cacgccaccccaaatgtat

SEQ ID NO: 459409 - DNA, 19 bp, Mus musculus
  siRNA target sequence for Ezh1 (NM_007970.1,1061-1079).
ccaccccaaatgtatataa

SEQ ID NO: 459410 - DNA, 19 bp, Mus musculus
  siRNA target sequence for Ezh1 (NM_007970.1,1228-1246).
gcttcctgctccaatgcat

SEQ ID NO: 459411 - DNA, 19 bp, Mus musculus
  siRNA target sequence for Ezh1 (NM_007970.1,1253-1271).
ctgctatggctgaaactaa

SEQ ID NO: 459412 - DNA, 19 bp, Mus musculus
  siRNA target sequence for Ezh1 (NM_007970.1,1422-1440).
gaccggagccgaagaatct

SEQ ID NO: 459413 - DNA, 19 bp, Mus musculus
  siRNA target sequence for Ezh1 (NM_007970.1,1424-1442).
ccggagccgaagaatctct

SEQ ID NO: 459414 - DNA, 19 bp, Mus musculus
  siRNA target sequence for Ezh1 (NM_007970.1,1425-1443).
cggagccgaagaatctctt

SEQ ID NO: 459415 - DNA, 19 bp, Mus musculus
  siRNA target sequence for Ezh1 (NM_007970.1,1450-1468).
gtcttccacggcacctatt

SEQ ID NO: 459416 - DNA, 19 bp, Mus musculus
  siRNA target sequence for Ezh1 (NM_007970.1,1456-1474).
cacggcacctatttcaaca

SEQ ID NO: 459417 - DNA, 19 bp, Mus musculus
  siRNA target sequence for Ezh1 (NM_007970.1,1460-1478).
gcacctatttcaacaactt

SEQ ID NO: 459418 - DNA, 19 bp, Mus musculus
  siRNA target sequence for Ezh1 (NM_007970.1,1470-1488).
caacaacttctgctcaata

SEQ ID NO: 459419 - DNA, 19 bp, Mus musculus
  siRNA target sequence for Ezh1 (NM_007970.1,1530-1548).
gtttgcagtcaaagaatca

SEQ ID NO: 459420 - DNA, 19 bp, Mus musculus
  siRNA target sequence for Ezh1 (NM_007970.1,1737-1755).
gacccagaacttttgtgaa

SEQ ID NO: 459421 - DNA, 19 bp, Mus musculus
  siRNA target sequence for Ezh1 (NM_007970.1,1795-1813).
cctggttgtcgctgtaaga

SEQ ID NO: 459422 - DNA, 19 bp, Mus musculus
  siRNA target sequence for Ezh1 (NM_007970.1,1990-2008).
ggatggggcaccttcatca

SEQ ID NO: 459423 - DNA, 19 bp, Mus musculus
  siRNA target sequence for Ezh1 (NM_007970.1,1991-2009).
gatggggcaccttcatcaa

SEQ ID NO: 459424 - DNA, 19 bp, Mus musculus
  siRNA target sequence for Ezh1 (NM_007970.1,2081-2099).
gtcgagggaaggtctatga

SEQ ID NO: 459425 - DNA, 19 bp, Mus musculus
  siRNA target sequence for Ezh1 (NM_007970.1,2086-2104).
gggaaggtctatgataaat

SEQ ID NO: 459426 - DNA, 19 bp, Mus musculus
  siRNA target sequence for Ezh1 (NM_007970.1,2087-2105).
ggaaggtctatgataaata

SEQ ID NO: 459427 - DNA, 19 bp, Mus musculus
  siRNA target sequence for Ezh1 (NM_007970.1,2121-2139).
cttcaacctcaacaatgat

SEQ ID NO: 459428 - DNA, 19 bp, Mus musculus
  siRNA target sequence for Ezh1 (NM_007970.1,2149-2167).
gatgctacccggaaaggaa

SEQ ID NO: 459429 - DNA, 19 bp, Mus musculus
  siRNA target sequence for Ezh1 (NM_007970.1,2153-2171).
ctacccggaaaggaaacaa

SEQ ID NO: 459430 - DNA, 19 bp, Mus musculus
  siRNA target sequence for Ezh1 (NM_007970.1,2207-2225).
gttatgccaaagtggttat

SEQ ID NO: 459431 - DNA, 19 bp, Mus musculus
  siRNA target sequence for Ezh1 (NM_007970.1,2279-2297).
gcgaagagctcttctttga

SEQ ID NO: 459432 - DNA, 19 bp, Mus musculus
  siRNA target sequence for Ezh2 (NM_007971.1,159-177).
gagaagggaccggtttgtt

SEQ ID NO: 459433 - DNA, 19 bp, Mus musculus
  siRNA target sequence for Ezh2 (NM_007971.1,175-193).
gttggcggaagcgtgtaaa

SEQ ID NO: 459434 - DNA, 19 bp, Mus musculus
  siRNA target sequence for Ezh2 (NM_007971.1,179-197).
gcggaagcgtgtaaaatca

SEQ ID NO: 459435 - DNA, 19 bp, Mus musculus
  siRNA target sequence for Ezh2 (NM_007971.1,246-264).
gtaaagactatgtttagtt

SEQ ID NO: 459436 - DNA, 19 bp, Mus musculus
  siRNA target sequence for Ezh2 (NM_007971.1,251-269).
gactatgtttagttccaat

SEQ ID NO: 459437 - DNA, 19 bp, Mus musculus
  siRNA target sequence for Ezh2 (NM_007971.1,262-280).
gttccaatcgtcagaaaat

SEQ ID NO: 459438 - DNA, 19 bp, Mus musculus
  siRNA target sequence for Ezh2 (NM_007971.1,392-410).
cagtgacttggattttcca

SEQ ID NO: 459439 - DNA, 19 bp, Mus musculus
  siRNA target sequence for Ezh2 (NM_007971.1,412-430).
cacaagtcatcccgttaaa

SEQ ID NO: 459440 - DNA, 19 bp, Mus musculus
  siRNA target sequence for Ezh2 (NM_007971.1,414-432).
caagtcatcccgttaaaga

SEQ ID NO: 459441 - DNA, 19 bp, Mus musculus
  siRNA target sequence for Ezh2 (NM_007971.1,444-462).
gtcgcctcggtgcctataa

SEQ ID NO: 459442 - DNA, 19 bp, Mus musculus
  siRNA target sequence for Ezh2 (NM_007971.1,447-465).
gcctcggtgcctataatgt

SEQ ID NO: 459443 - DNA, 19 bp, Mus musculus
  siRNA target sequence for Ezh2 (NM_007971.1,467-485).
ctcttggtcgcccttacaa

SEQ ID NO: 459444 - DNA, 19 bp, Mus musculus
  siRNA target sequence for Ezh2 (NM_007971.1,469-487).
cttggtcgcccttacaaca

SEQ ID NO: 459445 - DNA, 19 bp, Mus musculus
  siRNA target sequence for Ezh2 (NM_007971.1,472-490).
ggtcgcccttacaacagaa

SEQ ID NO: 459446 - DNA, 19 bp, Mus musculus
  siRNA target sequence for Ezh2 (NM_007971.1,473-491).
gtcgcccttacaacagaat

SEQ ID NO: 459447 - DNA, 19 bp, Mus musculus
  siRNA target sequence for Ezh2 (NM_007971.1,475-493).
cgcccttacaacagaattt

SEQ ID NO: 459448 - DNA, 19 bp, Mus musculus
  siRNA target sequence for Ezh2 (NM_007971.1,476-494).
gcccttacaacagaatttt

SEQ ID NO: 459449 - DNA, 19 bp, Mus musculus
  siRNA target sequence for Ezh2 (NM_007971.1,497-515).
ggtggaagacgaaactgtt

SEQ ID NO: 459450 - DNA, 19 bp, Mus musculus
  siRNA target sequence for Ezh2 (NM_007971.1,500-518).
ggaagacgaaactgtttta

SEQ ID NO: 459451 - DNA, 19 bp, Mus musculus
  siRNA target sequence for Ezh2 (NM_007971.1,513-531).
gttttacataacattcctt

SEQ ID NO: 459452 - DNA, 19 bp, Mus musculus
  siRNA target sequence for Ezh2 (NM_007971.1,744-762).
gaggataatcgagatgata

SEQ ID NO: 459453 - DNA, 19 bp, Mus musculus
  siRNA target sequence for Ezh2 (NM_007971.1,746-764).
ggataatcgagatgataaa

SEQ ID NO: 459454 - DNA, 19 bp, Mus musculus
  siRNA target sequence for Ezh2 (NM_007971.1,753-771).
cgagatgataaagaaactt

SEQ ID NO: 459455 - DNA, 19 bp, Mus musculus
  siRNA target sequence for Ezh2 (NM_007971.1,769-787).
cttgcccacctcggaaatt

SEQ ID NO: 459456 - DNA, 19 bp, Mus musculus
  siRNA target sequence for Ezh2 (NM_007971.1,773-791).
cccacctcggaaatttcct

SEQ ID NO: 459457 - DNA, 19 bp, Mus musculus
  siRNA target sequence for Ezh2 (NM_007971.1,807-825).
gaagccatttcctcaatgt

SEQ ID NO: 459458 - DNA, 19 bp, Mus musculus
  siRNA target sequence for Ezh2 (NM_007971.1,817-835).
cctcaatgtttccagataa

SEQ ID NO: 459459 - DNA, 19 bp, Mus musculus
  siRNA target sequence for Ezh2 (NM_007971.1,841-859).
ccgcagaagaactgaaaga

SEQ ID NO: 459460 - DNA, 19 bp, Mus musculus
  siRNA target sequence for Ezh2 (NM_007971.1,957-975).
gagcaaagcttgcattcat

SEQ ID NO: 459461 - DNA, 19 bp, Mus musculus
  siRNA target sequence for Ezh2 (NM_007971.1,959-977).
gcaaagcttgcattcattt

SEQ ID NO: 459462 - DNA, 19 bp, Mus musculus
  siRNA target sequence for Ezh2 (NM_007971.1,986-1004).
cttctgtcgacgatgtttt

SEQ ID NO: 459463 - DNA, 19 bp, Mus musculus
  siRNA target sequence for Ezh2 (NM_007971.1,991-1009).
gtcgacgatgttttaagta

SEQ ID NO: 459464 - DNA, 19 bp, Mus musculus
  siRNA target sequence for Ezh2 (NM_007971.1,994-1012).
gacgatgttttaagtatga

SEQ ID NO: 459465 - DNA, 19 bp, Mus musculus
  siRNA target sequence for Ezh2 (NM_007971.1,1035-1053).
gcaacacccaacacatata

SEQ ID NO: 459466 - DNA, 19 bp, Mus musculus
  siRNA target sequence for Ezh2 (NM_007971.1,1036-1054).
caacacccaacacatataa

SEQ ID NO: 459467 - DNA, 19 bp, Mus musculus
  siRNA target sequence for Ezh2 (NM_007971.1,1090-1108).
cttgtggaccacagtgtta

SEQ ID NO: 459468 - DNA, 19 bp, Mus musculus
  siRNA target sequence for Ezh2 (NM_007971.1,1200-1218).
ggaagacttccgaataaca

SEQ ID NO: 459469 - DNA, 19 bp, Mus musculus
  siRNA target sequence for Ezh2 (NM_007971.1,1371-1389).
cggtgtcaaacaccaataa

SEQ ID NO: 459470 - DNA, 19 bp, Mus musculus
  siRNA target sequence for Ezh2 (NM_007971.1,1372-1390).
ggtgtcaaacaccaataaa

SEQ ID NO: 459471 - DNA, 19 bp, Mus musculus
  siRNA target sequence for Ezh2 (NM_007971.1,1375-1393).
gtcaaacaccaataaagat

SEQ ID NO: 459472 - DNA, 19 bp, Mus musculus
  siRNA target sequence for Ezh2 (NM_007971.1,1391-1409).
gatgaagccaaatattgaa

SEQ ID NO: 459473 - DNA, 19 bp, Mus musculus
  siRNA target sequence for Ezh2 (NM_007971.1,1456-1474).
gagtcctcattggtactta

SEQ ID NO: 459474 - DNA, 19 bp, Mus musculus
  siRNA target sequence for Ezh2 (NM_007971.1,1458-1476).
gtcctcattggtacttact

SEQ ID NO: 459475 - DNA, 19 bp, Mus musculus
  siRNA target sequence for Ezh2 (NM_007971.1,1467-1485).
ggtacttactacgataact

SEQ ID NO: 459476 - DNA, 19 bp, Mus musculus
  siRNA target sequence for Ezh2 (NM_007971.1,1468-1486).
gtacttactacgataactt

SEQ ID NO: 459477 - DNA, 19 bp, Mus musculus
  siRNA target sequence for Ezh2 (NM_007971.1,1519-1537).
catgtagacaggtgtatga

SEQ ID NO: 459478 - DNA, 19 bp, Mus musculus
  siRNA target sequence for Ezh2 (NM_007971.1,1522-1540).
gtagacaggtgtatgagtt

SEQ ID NO: 459479 - DNA, 19 bp, Mus musculus
  siRNA target sequence for Ezh2 (NM_007971.1,1668-1686).
ggctcctctaaccatgttt

SEQ ID NO: 459480 - DNA, 19 bp, Mus musculus
  siRNA target sequence for Ezh2 (NM_007971.1,1669-1687).
gctcctctaaccatgttta

SEQ ID NO: 459481 - DNA, 19 bp, Mus musculus
  siRNA target sequence for Ezh2 (NM_007971.1,1672-1690).
cctctaaccatgtttacaa

SEQ ID NO: 459482 - DNA, 19 bp, Mus musculus
  siRNA target sequence for Ezh2 (NM_007971.1,1675-1693).
ctaaccatgtttacaacta

SEQ ID NO: 459483 - DNA, 19 bp, Mus musculus
  siRNA target sequence for Ezh2 (NM_007971.1,1743-1761).
gtgatagcacaaaattttt

SEQ ID NO: 459484 - DNA, 19 bp, Mus musculus
  siRNA target sequence for Ezh2 (NM_007971.1,1745-1763).
gatagcacaaaatttttgt

SEQ ID NO: 459485 - DNA, 19 bp, Mus musculus
  siRNA target sequence for Ezh2 (NM_007971.1,1764-1782).
gaaaagttttgtcaatgta

SEQ ID NO: 459486 - DNA, 19 bp, Mus musculus
  siRNA target sequence for Ezh2 (NM_007971.1,1780-1798).
gtagttcagagtgtcaaaa

SEQ ID NO: 459487 - DNA, 19 bp, Mus musculus
  siRNA target sequence for Ezh2 (NM_007971.1,1827-1845).
caatgcaacaccaaacagt

SEQ ID NO: 459488 - DNA, 19 bp, Mus musculus
  siRNA target sequence for Ezh2 (NM_007971.1,1906-1924).
ctgaccattgggacagtaa

SEQ ID NO: 459489 - DNA, 19 bp, Mus musculus
  siRNA target sequence for Ezh2 (NM_007971.1,1908-1926).
gaccattgggacagtaaaa

SEQ ID NO: 459490 - DNA, 19 bp, Mus musculus
  siRNA target sequence for Ezh2 (NM_007971.1,1929-1947).
gtatcctgtaagaactgta

SEQ ID NO: 459491 - DNA, 19 bp, Mus musculus
  siRNA target sequence for Ezh2 (NM_007971.1,1960-1978).
gctctaaaaagcacttact

SEQ ID NO: 459492 - DNA, 19 bp, Mus musculus
  siRNA target sequence for Ezh2 (NM_007971.1,1998-2016).
gcaggctggggcatcttta

SEQ ID NO: 459493 - DNA, 19 bp, Mus musculus
  siRNA target sequence for Ezh2 (NM_007971.1,2005-2023).
ggggcatctttatcaaaga

SEQ ID NO: 459494 - DNA, 19 bp, Mus musculus
  siRNA target sequence for Ezh2 (NM_007971.1,2025-2043).
cctgtacagaaaaatgaat

SEQ ID NO: 459495 - DNA, 19 bp, Mus musculus
  siRNA target sequence for Ezh2 (NM_007971.1,2040-2058).
gaattcatctcagaatact

SEQ ID NO: 459496 - DNA, 19 bp, Mus musculus
  siRNA target sequence for Ezh2 (NM_007971.1,2052-2070).
gaatactgtggggagatta

SEQ ID NO: 459497 - DNA, 19 bp, Mus musculus
  siRNA target sequence for Ezh2 (NM_007971.1,2057-2075).
ctgtggggagattatttct

SEQ ID NO: 459498 - DNA, 19 bp, Mus musculus
  siRNA target sequence for Ezh2 (NM_007971.1,2132-2150).
gttcaacttgaacaatgat

SEQ ID NO: 459499 - DNA, 19 bp, Mus musculus
  siRNA target sequence for Ezh2 (NM_007971.1,2167-2185).
cccgaaagggcaacaaaat

SEQ ID NO: 459500 - DNA, 19 bp, Mus musculus
  siRNA target sequence for Ezh2 (NM_007971.1,2168-2186).
ccgaaagggcaacaaaatt

SEQ ID NO: 459501 - DNA, 19 bp, Mus musculus
  siRNA target sequence for Ezh2 (NM_007971.1,2174-2192).
gggcaacaaaattcgtttt

SEQ ID NO: 459502 - DNA, 19 bp, Mus musculus
  siRNA target sequence for Ezh2 (NM_007971.1,2180-2198).
caaaattcgttttgctaat

SEQ ID NO: 459503 - DNA, 19 bp, Mus musculus
  siRNA target sequence for Ezh2 (NM_007971.1,2212-2230).
caaactgctatgcaaaagt

SEQ ID NO: 459504 - DNA, 19 bp, Mus musculus
  siRNA target sequence for Ezh2 (NM_007971.1,2218-2236).
gctatgcaaaagttatgat

SEQ ID NO: 459505 - DNA, 19 bp, Mus musculus
  siRNA target sequence for Ezh2 (NM_007971.1,2223-2241).
gcaaaagttatgatggtta

SEQ ID NO: 459506 - DNA, 19 bp, Mus musculus
  siRNA target sequence for Ezh2 (NM_007971.1,2224-2242).
caaaagttatgatggttaa

SEQ ID NO: 459507 - DNA, 19 bp, Mus musculus
  siRNA target sequence for Ezh2 (NM_007971.1,2249-2267).
ccacaggataggcatcttt

SEQ ID NO: 459508 - DNA, 19 bp, Mus musculus
  siRNA target sequence for Ezh2 (NM_007971.1,2254-2272).
ggataggcatctttgctaa

SEQ ID NO: 459509 - DNA, 19 bp, Mus musculus
  siRNA target sequence for Ezh2 (NM_007971.1,2347-2365).
gcatcgaacgagaaatgga

SEQ ID NO: 459510 - DNA, 19 bp, Mus musculus
  siRNA target sequence for Fen1 (NM_007999.1,115-133).
cggccttgccaaactaatt

SEQ ID NO: 459511 - DNA, 19 bp, Mus musculus
  siRNA target sequence for Fen1 (NM_007999.1,118-136).
ccttgccaaactaattgct

SEQ ID NO: 459512 - DNA, 19 bp, Mus musculus
  siRNA target sequence for Fen1 (NM_007999.1,158-176).
cgtgagaatgacatcaaga

SEQ ID NO: 459513 - DNA, 19 bp, Mus musculus
  siRNA target sequence for Fen1 (NM_007999.1,337-355).
gcctgtgtacgtctttgat

SEQ ID NO: 459514 - DNA, 19 bp, Mus musculus
  siRNA target sequence for Fen1 (NM_007999.1,496-514).
caccaagcaacacaatgat

SEQ ID NO: 459515 - DNA, 19 bp, Mus musculus
  siRNA target sequence for Fen1 (NM_007999.1,538-556).
catgggcatcccttacctt

SEQ ID NO: 459516 - DNA, 19 bp, Mus musculus
  siRNA target sequence for Fen1 (NM_007999.1,596-614).
gcaaaggctggcaaagtct

SEQ ID NO: 459517 - DNA, 19 bp, Mus musculus
  siRNA target sequence for Fen1 (NM_007999.1,661-679).
cgtgctaatgcgacactta

SEQ ID NO: 459518 - DNA, 19 bp, Mus musculus
  siRNA target sequence for Fen1 (NM_007999.1,664-682).
gctaatgcgacacttaact

SEQ ID NO: 459519 - DNA, 19 bp, Mus musculus
  siRNA target sequence for Fen1 (NM_007999.1,839-857).
gatctcatccagaaacata

SEQ ID NO: 459520 - DNA, 19 bp, Mus musculus
  siRNA target sequence for Fen1 (NM_007999.1,988-1006).
gtggagcgagccaaatgaa

SEQ ID NO: 459521 - DNA, 19 bp, Mus musculus
  siRNA target sequence for Fen1 (NM_007999.1,990-1008).
ggagcgagccaaatgaaga

SEQ ID NO: 459522 - DNA, 19 bp, Mus musculus
  siRNA target sequence for Fen1 (NM_007999.1,991-1009).
gagcgagccaaatgaagaa

SEQ ID NO: 459523 - DNA, 19 bp, Mus musculus
  siRNA target sequence for Fen1 (NM_007999.1,993-1011).
gcgagccaaatgaagaaga

SEQ ID NO: 459524 - DNA, 19 bp, Mus musculus
  siRNA target sequence for Fen1 (NM_007999.1,1010-1028).
gagttggtcaaatttatgt

SEQ ID NO: 459525 - DNA, 19 bp, Mus musculus
  siRNA target sequence for Fen1 (NM_007999.1,1012-1030).
gttggtcaaatttatgtgt

SEQ ID NO: 459526 - DNA, 19 bp, Mus musculus
  siRNA target sequence for Fen1 (NM_007999.1,1068-1086).
gggtcaagcggctgagtaa

SEQ ID NO: 459527 - DNA, 19 bp, Mus musculus
  siRNA target sequence for Fen1 (NM_007999.1,1070-1088).
gtcaagcggctgagtaaga

SEQ ID NO: 459528 - DNA, 19 bp, Mus musculus
  siRNA target sequence for Fen1 (NM_007999.1,1109-1127).
ggacgcctcgatgatttct

SEQ ID NO: 459529 - DNA, 19 bp, Mus musculus
  siRNA target sequence for Fen1 (NM_007999.1,1110-1128).
gacgcctcgatgatttctt

SEQ ID NO: 459530 - DNA, 19 bp, Mus musculus
  siRNA target sequence for Fen1 (NM_007999.1,1112-1130).
cgcctcgatgatttcttca

SEQ ID NO: 459531 - DNA, 19 bp, Mus musculus
  siRNA target sequence for Fen1 (NM_007999.1,1113-1131).
gcctcgatgatttcttcaa

SEQ ID NO: 459532 - DNA, 19 bp, Mus musculus
  siRNA target sequence for Fos (NM_010234.2,269-287).
gtcaacacacaggactttt

SEQ ID NO: 459533 - DNA, 19 bp, Mus musculus
  siRNA target sequence for Fos (NM_010234.2,301-319).
cgtctctagtgccaacttt

SEQ ID NO: 459534 - DNA, 19 bp, Mus musculus
  siRNA target sequence for Fos (NM_010234.2,302-320).
gtctctagtgccaacttta

SEQ ID NO: 459535 - DNA, 19 bp, Mus musculus
  siRNA target sequence for Fos (NM_010234.2,566-584).
cgaagggaacggaataaga

SEQ ID NO: 459536 - DNA, 19 bp, Mus musculus
  siRNA target sequence for Fos (NM_010234.2,634-652).
ccaagcggagacagatcaa

SEQ ID NO: 459537 - DNA, 19 bp, Mus musculus
  siRNA target sequence for Fos (NM_010234.2,791-809).
gtggcctccctggatttga

SEQ ID NO: 459538 - DNA, 19 bp, Mus musculus
  siRNA target sequence for Fos (NM_010234.2,1049-1067).
gagcctctgcacagcaatt

SEQ ID NO: 459539 - DNA, 19 bp, Mus musculus
  siRNA target sequence for Fosb (NM_008036.1,1386-1404).
caaccagccaggatcttca

SEQ ID NO: 459540 - DNA, 19 bp, Mus musculus
  siRNA target sequence for Fosb (NM_008036.1,1634-1652).
ccccgagaagagacactta

SEQ ID NO: 459541 - DNA, 19 bp, Mus musculus
  siRNA target sequence for Fosb (NM_008036.1,1746-1764).
gacttcaggcggaaactga

SEQ ID NO: 459542 - DNA, 19 bp, Mus musculus
  siRNA target sequence for Fosb (NM_008036.1,1801-1819).
gatcgccgagctgcaaaaa

SEQ ID NO: 459543 - DNA, 19 bp, Mus musculus
  siRNA target sequence for Fosb (NM_008036.1,1919-1937).
gatttgccagggtcaacat

SEQ ID NO: 459544 - DNA, 19 bp, Mus musculus
  siRNA target sequence for Fosb (NM_008036.1,1930-1948).
gtcaacatccgctaaggaa

SEQ ID NO: 459545 - DNA, 19 bp, Mus musculus
  siRNA target sequence for Fosb (NM_008036.1,2029-2047).
gacggcttctctctttaca

SEQ ID NO: 459546 - DNA, 19 bp, Mus musculus
  siRNA target sequence for Fosb (NM_008036.1,2087-2105).
gttagcccttcgtacactt

SEQ ID NO: 459547 - DNA, 19 bp, Mus musculus
  siRNA target sequence for Fosl1 (NM_010235.1,657-675).
cggagaccgacaaattgga

SEQ ID NO: 459548 - DNA, 19 bp, Mus musculus
  siRNA target sequence for Fosl1 (NM_010235.1,667-685).
caaattggaggatgagaaa

SEQ ID NO: 459549 - DNA, 19 bp, Mus musculus
  siRNA target sequence for Fosl1 (NM_010235.1,994-1012).
ctccgctcaccgaaagagt

SEQ ID NO: 459550 - DNA, 19 bp, Mus musculus
  siRNA target sequence for Fosl2 (NM_008037.3,179-197).
ggattatcccgggaacttt

SEQ ID NO: 459551 - DNA, 19 bp, Mus musculus
  siRNA target sequence for Fosl2 (NM_008037.3,270-288).
cagaagttccgggtagata

SEQ ID NO: 459552 - DNA, 19 bp, Mus musculus
  siRNA target sequence for Fosl2 (NM_008037.3,306-324).
gccttcatccccacaatca

SEQ ID NO: 459553 - DNA, 19 bp, Mus musculus
  siRNA target sequence for Fosl2 (NM_008037.3,1124-1142).
gaactcccccacacttcta

SEQ ID NO: 459554 - DNA, 19 bp, Mus musculus
  siRNA target sequence for Fus (NM_139149.1,864-882).
ctaggcgagaatgttacaa

SEQ ID NO: 459555 - DNA, 19 bp, Mus musculus
  siRNA target sequence for Fus (NM_139149.1,868-886).
gcgagaatgttacaattga

SEQ ID NO: 459556 - DNA, 19 bp, Mus musculus
  siRNA target sequence for Fus (NM_139149.1,905-923).
caagcagattggaattatt

SEQ ID NO: 459557 - DNA, 19 bp, Mus musculus
  siRNA target sequence for Fus (NM_139149.1,1375-1393).
ctcatatggggggaaacta

SEQ ID NO: 459558 - DNA, 19 bp, Mus musculus
  siRNA target sequence for Fus (NM_139149.1,1548-1566).
cgcagggagaggccatatt

SEQ ID NO: 459559 - DNA, 19 bp, Mus musculus
  siRNA target sequence for G22p1 (NM_010247.1,196-214).
gagtgggagtcctactaca

SEQ ID NO: 459560 - DNA, 19 bp, Mus musculus
  siRNA target sequence for G22p1 (NM_010247.1,201-219).
ggagtcctactacaaaact

SEQ ID NO: 459561 - DNA, 19 bp, Mus musculus
  siRNA target sequence for G22p1 (NM_010247.1,254-272).
ccgacacaggtggagaata

SEQ ID NO: 459562 - DNA, 19 bp, Mus musculus
  siRNA target sequence for G22p1 (NM_010247.1,260-278).
caggtggagaatataaata

SEQ ID NO: 459563 - DNA, 19 bp, Mus musculus
  siRNA target sequence for G22p1 (NM_010247.1,330-348).
cgaatctcagggtgaagat

SEQ ID NO: 459564 - DNA, 19 bp, Mus musculus
  siRNA target sequence for G22p1 (NM_010247.1,349-367).
gaactcacaccttttgata

SEQ ID NO: 459565 - DNA, 19 bp, Mus musculus
  siRNA target sequence for G22p1 (NM_010247.1,393-411).
gtacaccagtaagatcata

SEQ ID NO: 459566 - DNA, 19 bp, Mus musculus
  siRNA target sequence for G22p1 (NM_010247.1,444-462).
ctatggaaccgagaaagat

SEQ ID NO: 459567 - DNA, 19 bp, Mus musculus
  siRNA target sequence for G22p1 (NM_010247.1,449-467).
gaaccgagaaagataaaaa

SEQ ID NO: 459568 - DNA, 19 bp, Mus musculus
  siRNA target sequence for G22p1 (NM_010247.1,532-550).
ctagagctcgaccagttta

SEQ ID NO: 459569 - DNA, 19 bp, Mus musculus
  siRNA target sequence for G22p1 (NM_010247.1,595-613).
gggtctgactactctttga

SEQ ID NO: 459570 - DNA, 19 bp, Mus musculus
  siRNA target sequence for G22p1 (NM_010247.1,943-961).
cgagttctgtccaggttaa

SEQ ID NO: 459571 - DNA, 19 bp, Mus musculus
  siRNA target sequence for G22p1 (NM_010247.1,949-967).
ctgtccaggttaaagttta

SEQ ID NO: 459572 - DNA, 19 bp, Mus musculus
  siRNA target sequence for G22p1 (NM_010247.1,974-992).
gtgaagacgtagtactcat

SEQ ID NO: 459573 - DNA, 19 bp, Mus musculus
  siRNA target sequence for G22p1 (NM_010247.1,1047-1065).
ctatcgggaaacaaatgaa

SEQ ID NO: 459574 - DNA, 19 bp, Mus musculus
  siRNA target sequence for G22p1 (NM_010247.1,1130-1148).
ccaagcggtctctgactta

SEQ ID NO: 459575 - DNA, 19 bp, Mus musculus
  siRNA target sequence for G22p1 (NM_010247.1,1395-1413).
gaacgtctccccgtatttt

SEQ ID NO: 459576 - DNA, 19 bp, Mus musculus
  siRNA target sequence for G22p1 (NM_010247.1,1512-1530).
gcggaaggtgccctttact

SEQ ID NO: 459577 - DNA, 19 bp, Mus musculus
  siRNA target sequence for G22p1 (NM_010247.1,1604-1622).
ggagcgacagttttgagaa

SEQ ID NO: 459578 - DNA, 19 bp, Mus musculus
  siRNA target sequence for G22p1 (NM_010247.1,1742-1760).
ccctggcagatgagtttaa

SEQ ID NO: 459579 - DNA, 19 bp, Mus musculus
  siRNA target sequence for G22p1 (NM_010247.1,1755-1773).
gtttaaagaacttgtctat

SEQ ID NO: 459580 - DNA, 19 bp, Mus musculus
  siRNA target sequence for G22p1 (NM_010247.1,1768-1786).
gtctatcctccaggttata

SEQ ID NO: 459581 - DNA, 19 bp, Mus musculus
  siRNA target sequence for G22p1 (NM_010247.1,1845-1863).
gcccaaggtagagttatca

SEQ ID NO: 459582 - DNA, 19 bp, Mus musculus
  siRNA target sequence for G22p1 (NM_010247.1,1872-1890).
gctgaaggcccattttcgt

SEQ ID NO: 459583 - DNA, 19 bp, Mus musculus
  siRNA target sequence for G22p1 (NM_010247.1,1922-1940).
cactgaaggacatatgcaa

SEQ ID NO: 459584 - DNA, 19 bp, Mus musculus
  siRNA target sequence for G22p1 (NM_010247.1,1941-1959).
ggctcatgggcttaagagt

SEQ ID NO: 459585 - DNA, 19 bp, Mus musculus
  siRNA target sequence for G22p1 (NM_010247.1,1980-1998).
gctagatgctcttatcaga

SEQ ID NO: 459586 - DNA, 19 bp, Mus musculus
  siRNA target sequence for Gcm1 (NM_008103.1,265-283).
gagctgggacattaacgat

SEQ ID NO: 459587 - DNA, 19 bp, Mus musculus
  siRNA target sequence for Gcm1 (NM_008103.1,270-288).
gggacattaacgatgtgaa

SEQ ID NO: 459588 - DNA, 19 bp, Mus musculus
  siRNA target sequence for Gcm1 (NM_008103.1,333-351).
cggactcctacgtgaaaca

SEQ ID NO: 459589 - DNA, 19 bp, Mus musculus
  siRNA target sequence for Gcm1 (NM_008103.1,339-357).
cctacgtgaaacacatcta

SEQ ID NO: 459590 - DNA, 19 bp, Mus musculus
  siRNA target sequence for Gcm1 (NM_008103.1,640-658).
cgacggacgcttcatcttt

SEQ ID NO: 459591 - DNA, 19 bp, Mus musculus
  siRNA target sequence for Gcm1 (NM_008103.1,641-659).
gacggacgcttcatctttt

SEQ ID NO: 459592 - DNA, 19 bp, Mus musculus
  siRNA target sequence for Gcm1 (NM_008103.1,645-663).
gacgcttcatctttttcca

SEQ ID NO: 459593 - DNA, 19 bp, Mus musculus
  siRNA target sequence for Gcm1 (NM_008103.1,666-684).
ccaaaggcgagcatgatca

SEQ ID NO: 459594 - DNA, 19 bp, Mus musculus
  siRNA target sequence for Gcm1 (NM_008103.1,667-685).
caaaggcgagcatgatcat

SEQ ID NO: 459595 - DNA, 19 bp, Mus musculus
  siRNA target sequence for Gcm1 (NM_008103.1,814-832).
gagtcagggaagtttacct

SEQ ID NO: 459596 - DNA, 19 bp, Mus musculus
  siRNA target sequence for Gcm1 (NM_008103.1,821-839).
ggaagtttacctttaactt

SEQ ID NO: 459597 - DNA, 19 bp, Mus musculus
  siRNA target sequence for Gcm1 (NM_008103.1,879-897).
gcacacctttaatagctaa

SEQ ID NO: 459598 - DNA, 19 bp, Mus musculus
  siRNA target sequence for Gcm1 (NM_008103.1,980-998).
ccaacttccaccttagatt

SEQ ID NO: 459599 - DNA, 19 bp, Mus musculus
  siRNA target sequence for Gcm1 (NM_008103.1,1189-1207).
ctggccctacgactacttt

SEQ ID NO: 459600 - DNA, 19 bp, Mus musculus
  siRNA target sequence for Gcm1 (NM_008103.1,1305-1323).
gtgagccttacgaagagaa

SEQ ID NO: 459601 - DNA, 19 bp, Mus musculus
  siRNA target sequence for Gcm1 (NM_008103.1,1309-1327).
gccttacgaagagaaagta

SEQ ID NO: 459602 - DNA, 19 bp, Mus musculus
  siRNA target sequence for Gcm1 (NM_008103.1,1441-1459).
gagcaacaggtgggatttt

SEQ ID NO: 459603 - DNA, 19 bp, Mus musculus
  siRNA target sequence for Gcm1 (NM_008103.1,1443-1461).
gcaacaggtgggattttga

SEQ ID NO: 459604 - DNA, 19 bp, Mus musculus
  siRNA target sequence for Gcm1 (NM_008103.1,1471-1489).
ggcatgcatgggcttagat

SEQ ID NO: 459605 - DNA, 19 bp, Mus musculus
  siRNA target sequence for Gcm1 (NM_008103.1,1473-1491).
catgcatgggcttagatca

SEQ ID NO: 459606 - DNA, 19 bp, Mus musculus
  siRNA target sequence for Gcm1 (NM_008103.1,1476-1494).
gcatgggcttagatcactt

SEQ ID NO: 459607 - DNA, 19 bp, Mus musculus
  siRNA target sequence for Gcm2 (NM_008104.1,371-389).
ggctacgtgcgcttcatct

SEQ ID NO: 459608 - DNA, 19 bp, Mus musculus
  siRNA target sequence for Gcm2 (NM_008104.1,372-390).
gctacgtgcgcttcatcta

SEQ ID NO: 459609 - DNA, 19 bp, Mus musculus
  siRNA target sequence for Gcm2 (NM_008104.1,569-587).
cggctgaagcaacaaaaga

SEQ ID NO: 459610 - DNA, 19 bp, Mus musculus
  siRNA target sequence for Gcm2 (NM_008104.1,671-689).
cttgatggcaatgcaattt

SEQ ID NO: 459611 - DNA, 19 bp, Mus musculus
  siRNA target sequence for Gcm2 (NM_008104.1,697-715).
ggccaaaggagttcatgat

SEQ ID NO: 459612 - DNA, 19 bp, Mus musculus
  siRNA target sequence for Gcm2 (NM_008104.1,878-896).
cccacagaactatttgata

SEQ ID NO: 459613 - DNA, 19 bp, Mus musculus
  siRNA target sequence for Gcm2 (NM_008104.1,1009-1027).
gccctttcagaaatatcca

SEQ ID NO: 459614 - DNA, 19 bp, Mus musculus
  siRNA target sequence for Gcm2 (NM_008104.1,1063-1081).
ctatgagttggcaagttct

SEQ ID NO: 459615 - DNA, 19 bp, Mus musculus
  siRNA target sequence for Gcm2 (NM_008104.1,1091-1109).
ggttcgagtccatattcca

SEQ ID NO: 459616 - DNA, 19 bp, Mus musculus
  siRNA target sequence for Gcm2 (NM_008104.1,1100-1118).
ccatattccaccctgtata

SEQ ID NO: 459617 - DNA, 19 bp, Mus musculus
  siRNA target sequence for Gcm2 (NM_008104.1,1138-1156).
cgatgacccagattggatt

SEQ ID NO: 459618 - DNA, 19 bp, Mus musculus
  siRNA target sequence for Gcm2 (NM_008104.1,1148-1166).
gattggattcctctaaact

SEQ ID NO: 459619 - DNA, 19 bp, Mus musculus
  siRNA target sequence for Gcm2 (NM_008104.1,1202-1220).
gagagaaccttggatttca

SEQ ID NO: 459620 - DNA, 19 bp, Mus musculus
  siRNA target sequence for Gcm2 (NM_008104.1,1213-1231).
ggatttcacagctaggtat

SEQ ID NO: 459621 - DNA, 19 bp, Mus musculus
  siRNA target sequence for Gcm2 (NM_008104.1,1479-1497).
cctatgcctcggaaaacct

SEQ ID NO: 459622 - DNA, 19 bp, Mus musculus
  siRNA target sequence for Gcm2 (NM_008104.1,1606-1624).
cagacccactctggatttt

SEQ ID NO: 459623 - DNA, 19 bp, Mus musculus
  siRNA target sequence for Gcm2 (NM_008104.1,1692-1710).
gctctgtgatgggttactt

SEQ ID NO: 459624 - DNA, 19 bp, Mus musculus
  siRNA target sequence for Gfi1 (NM_010278.1,636-654).
gtgcaggcgagtcgaaaat

SEQ ID NO: 459625 - DNA, 19 bp, Mus musculus
  siRNA target sequence for Gfi1 (NM_010278.1,860-878).
cctttcaagccctatgcat

SEQ ID NO: 459626 - DNA, 19 bp, Mus musculus
  siRNA target sequence for Gfi1 (NM_010278.1,1430-1448).
caggaacgcagctttgact

SEQ ID NO: 459627 - DNA, 19 bp, Mus musculus
  siRNA target sequence for Gfi1 (NM_010278.1,1437-1455).
gcagctttgactgtaagat

SEQ ID NO: 459628 - DNA, 19 bp, Mus musculus
  siRNA target sequence for Gfi1 (NM_010278.1,1491-1509).
ccacacatctgctcattca

SEQ ID NO: 459629 - DNA, 19 bp, Mus musculus
  siRNA target sequence for Git2 (NM_019834.2,181-199).
ccttcctgggcgtcagtaa

SEQ ID NO: 459630 - DNA, 19 bp, Mus musculus
  siRNA target sequence for Git2 (NM_019834.2,268-286).
gtgaggcatcttaaacaca

SEQ ID NO: 459631 - DNA, 19 bp, Mus musculus
  siRNA target sequence for Git2 (NM_019834.2,330-348).
caacaatggtgctaactct

SEQ ID NO: 459632 - DNA, 19 bp, Mus musculus
  siRNA target sequence for Git2 (NM_019834.2,333-351).
caatggtgctaactctata

SEQ ID NO: 459633 - DNA, 19 bp, Mus musculus
  siRNA target sequence for Git2 (NM_019834.2,370-388).
gaccctgcctctatcatga

SEQ ID NO: 459634 - DNA, 19 bp, Mus musculus
  siRNA target sequence for Git2 (NM_019834.2,427-445).
cccaataaagcagaattca

SEQ ID NO: 459635 - DNA, 19 bp, Mus musculus
  siRNA target sequence for Git2 (NM_019834.2,504-522).
cagcgtgacggccaaagat

SEQ ID NO: 459636 - DNA, 19 bp, Mus musculus
  siRNA target sequence for Git2 (NM_019834.2,506-524).
gcgtgacggccaaagatct

SEQ ID NO: 459637 - DNA, 19 bp, Mus musculus
  siRNA target sequence for Git2 (NM_019834.2,512-530).
cggccaaagatctcagtaa

SEQ ID NO: 459638 - DNA, 19 bp, Mus musculus
  siRNA target sequence for Git2 (NM_019834.2,650-668).
ccaaagcaggacagatctt

SEQ ID NO: 459639 - DNA, 19 bp, Mus musculus
  siRNA target sequence for Git2 (NM_019834.2,651-669).
caaagcaggacagatctta

SEQ ID NO: 459640 - DNA, 19 bp, Mus musculus
  siRNA target sequence for Git2 (NM_019834.2,771-789).
ggcagaacgcctcatagaa

SEQ ID NO: 459641 - DNA, 19 bp, Mus musculus
  siRNA target sequence for Git2 (NM_019834.2,772-790).
gcagaacgcctcatagaaa

SEQ ID NO: 459642 - DNA, 19 bp, Mus musculus
  siRNA target sequence for Git2 (NM_019834.2,773-791).
cagaacgcctcatagaaat

SEQ ID NO: 459643 - DNA, 19 bp, Mus musculus
  siRNA target sequence for Git2 (NM_019834.2,778-796).
cgcctcatagaaatacagt

SEQ ID NO: 459644 - DNA, 19 bp, Mus musculus
  siRNA target sequence for Git2 (NM_019834.2,854-872).
gcggacagcactttctaat

SEQ ID NO: 459645 - DNA, 19 bp, Mus musculus
  siRNA target sequence for Git2 (NM_019834.2,855-873).
cggacagcactttctaatt

SEQ ID NO: 459646 - DNA, 19 bp, Mus musculus
  siRNA target sequence for Git2 (NM_019834.2,1210-1228).
ctgtccaggtcaaaagaca

SEQ ID NO: 459647 - DNA, 19 bp, Mus musculus
  siRNA target sequence for Git2 (NM_019834.2,1284-1302).
caacgaccagccagactat

SEQ ID NO: 459648 - DNA, 19 bp, Mus musculus
  siRNA target sequence for Git2 (NM_019834.2,1359-1377).
ccggcagaagcttcaaact

SEQ ID NO: 459649 - DNA, 19 bp, Mus musculus
  siRNA target sequence for Git2 (NM_019834.2,1378-1396).
ctccagagtgagaactcaa

SEQ ID NO: 459650 - DNA, 19 bp, Mus musculus
  siRNA target sequence for Git2 (NM_019834.2,1584-1602).
gagccggacgagacttcaa

SEQ ID NO: 459651 - DNA, 19 bp, Mus musculus
  siRNA target sequence for Git2 (NM_019834.2,1643-1661).
gcaccccggagagtgatta

SEQ ID NO: 459652 - DNA, 19 bp, Mus musculus
  siRNA target sequence for Git2 (NM_019834.2,1644-1662).
caccccggagagtgattat

SEQ ID NO: 459653 - DNA, 19 bp, Mus musculus
  siRNA target sequence for Git2 (NM_019834.2,1648-1666).
ccggagagtgattatgaca

SEQ ID NO: 459654 - DNA, 19 bp, Mus musculus
  siRNA target sequence for Git2 (NM_019834.2,1649-1667).
cggagagtgattatgacaa

SEQ ID NO: 459655 - DNA, 19 bp, Mus musculus
  siRNA target sequence for Git2 (NM_019834.2,1736-1754).
ggcaaggtgatggcttatt

SEQ ID NO: 459656 - DNA, 19 bp, Mus musculus
  siRNA target sequence for Git2 (NM_019834.2,1878-1896).
caagcatgacagctatatt

SEQ ID NO: 459657 - DNA, 19 bp, Mus musculus
  siRNA target sequence for Git2 (NM_019834.2,1937-1955).
cagccctgttccccaaaaa

SEQ ID NO: 459658 - DNA, 19 bp, Mus musculus
  siRNA target sequence for Gli (NM_010296.1,176-194).
gactccaccacaagtcaat

SEQ ID NO: 459659 - DNA, 19 bp, Mus musculus
  siRNA target sequence for Gli (NM_010296.1,183-201).
ccacaagtcaatagctata

SEQ ID NO: 459660 - DNA, 19 bp, Mus musculus
  siRNA target sequence for Gli (NM_010296.1,283-301).
gccaccaagccaactttat

SEQ ID NO: 459661 - DNA, 19 bp, Mus musculus
  siRNA target sequence for Gli (NM_010296.1,347-365).
cactgaaggatctctcttt

SEQ ID NO: 459662 - DNA, 19 bp, Mus musculus
  siRNA target sequence for Gli (NM_010296.1,382-400).
ctcggagttcagtcaaatt

SEQ ID NO: 459663 - DNA, 19 bp, Mus musculus
  siRNA target sequence for Gli (NM_010296.1,384-402).
cggagttcagtcaaattaa

SEQ ID NO: 459664 - DNA, 19 bp, Mus musculus
  siRNA target sequence for Gli (NM_010296.1,386-404).
gagttcagtcaaattaaca

SEQ ID NO: 459665 - DNA, 19 bp, Mus musculus
  siRNA target sequence for Gli (NM_010296.1,500-518).
caactctcgctgtacatct

SEQ ID NO: 459666 - DNA, 19 bp, Mus musculus
  siRNA target sequence for Gli (NM_010296.1,534-552).
ggccatctctccattggta

SEQ ID NO: 459667 - DNA, 19 bp, Mus musculus
  siRNA target sequence for Gli (NM_010296.1,579-597).
cctcagatgagtcatcaaa

SEQ ID NO: 459668 - DNA, 19 bp, Mus musculus
  siRNA target sequence for Gli (NM_010296.1,580-598).
ctcagatgagtcatcaaaa

SEQ ID NO: 459669 - DNA, 19 bp, Mus musculus
  siRNA target sequence for Gli (NM_010296.1,646-664).
ctactcggggttcaatgat

SEQ ID NO: 459670 - DNA, 19 bp, Mus musculus
  siRNA target sequence for Gli (NM_010296.1,954-972).
cacggggagcggaaggaat

SEQ ID NO: 459671 - DNA, 19 bp, Mus musculus
  siRNA target sequence for Gli (NM_010296.1,1089-1107).
ggctgtcggaagtcctatt

SEQ ID NO: 459672 - DNA, 19 bp, Mus musculus
  siRNA target sequence for Gli (NM_010296.1,1091-1109).
ctgtcggaagtcctattca

SEQ ID NO: 459673 - DNA, 19 bp, Mus musculus
  siRNA target sequence for Gli (NM_010296.1,1702-1720).
ggtctcggggtctcaaact

SEQ ID NO: 459674 - DNA, 19 bp, Mus musculus
  siRNA target sequence for Gli (NM_010296.1,1808-1826).
catgagctctgcttacaca

SEQ ID NO: 459675 - DNA, 19 bp, Mus musculus
  siRNA target sequence for Gli (NM_010296.1,1925-1943).
catgctccgtgccagatat

SEQ ID NO: 459676 - DNA, 19 bp, Mus musculus
  siRNA target sequence for Gli (NM_010296.1,1929-1947).
ctccgtgccagatatgctt

SEQ ID NO: 459677 - DNA, 19 bp, Mus musculus
  siRNA target sequence for Gli (NM_010296.1,2035-2053).
ccgagtacccgggatacaa

SEQ ID NO: 459678 - DNA, 19 bp, Mus musculus
  siRNA target sequence for Gli (NM_010296.1,2313-2331).
ctgaacccatacatggatt

SEQ ID NO: 459679 - DNA, 19 bp, Mus musculus
  siRNA target sequence for Gli (NM_010296.1,2319-2337).
ccatacatggatttttcct

SEQ ID NO: 459680 - DNA, 19 bp, Mus musculus
  siRNA target sequence for Gli (NM_010296.1,2328-2346).
gatttttcctccactgata

SEQ ID NO: 459681 - DNA, 19 bp, Mus musculus
  siRNA target sequence for Gli (NM_010296.1,2374-2392).
cggcagctgagccttatga

SEQ ID NO: 459682 - DNA, 19 bp, Mus musculus
  siRNA target sequence for Gli (NM_010296.1,2375-2393).
ggcagctgagccttatgaa

SEQ ID NO: 459683 - DNA, 19 bp, Mus musculus
  siRNA target sequence for Gli (NM_010296.1,2520-2538).
ggggtgtaccctagcaata

SEQ ID NO: 459684 - DNA, 19 bp, Mus musculus
  siRNA target sequence for Gli (NM_010296.1,2521-2539).
gggtgtaccctagcaataa

SEQ ID NO: 459685 - DNA, 19 bp, Mus musculus
  siRNA target sequence for Gli (NM_010296.1,2594-2612).
gcaggtaaaaccagaacaa

SEQ ID NO: 459686 - DNA, 19 bp, Mus musculus
  siRNA target sequence for Gli (NM_010296.1,2849-2867).
gctggtgtgtaattacgtt

SEQ ID NO: 459687 - DNA, 19 bp, Mus musculus
  siRNA target sequence for Gli (NM_010296.1,3066-3084).
ccttcaccctgccatgaaa

SEQ ID NO: 459688 - DNA, 19 bp, Mus musculus
  siRNA target sequence for Gli (NM_010296.1,3070-3088).
caccctgccatgaaacttt

SEQ ID NO: 459689 - DNA, 19 bp, Mus musculus
  siRNA target sequence for Gli (NM_010296.1,3362-3380).
gcaaggggacagctctaaa

SEQ ID NO: 459690 - DNA, 19 bp, Mus musculus
  siRNA target sequence for Gli (NM_010296.1,3451-3469).
ctggagagacacaattcct

SEQ ID NO: 459691 - DNA, 19 bp, Mus musculus
  siRNA target sequence for Gli3 (NM_008130.1,276-294).
ctctagtaccacttccaat

SEQ ID NO: 459692 - DNA, 19 bp, Mus musculus
  siRNA target sequence for Gli3 (NM_008130.1,369-387).
gggtctcaacaaaatcagt

SEQ ID NO: 459693 - DNA, 19 bp, Mus musculus
  siRNA target sequence for Gli3 (NM_008130.1,393-411).
gccctcgacgtctagtgat

SEQ ID NO: 459694 - DNA, 19 bp, Mus musculus
  siRNA target sequence for Gli3 (NM_008130.1,417-435).
ggcctcgctgatcaagaaa

SEQ ID NO: 459695 - DNA, 19 bp, Mus musculus
  siRNA target sequence for Gli3 (NM_008130.1,595-613).
catgagggccgttaccatt

SEQ ID NO: 459696 - DNA, 19 bp, Mus musculus
  siRNA target sequence for Gli3 (NM_008130.1,600-618).
gggccgttaccattatgat

SEQ ID NO: 459697 - DNA, 19 bp, Mus musculus
  siRNA target sequence for Gli3 (NM_008130.1,645-663).
gccttctgccttatctagt

SEQ ID NO: 459698 - DNA, 19 bp, Mus musculus
  siRNA target sequence for Gli3 (NM_008130.1,676-694).
ccagacttgcccttcatta

SEQ ID NO: 459699 - DNA, 19 bp, Mus musculus
  siRNA target sequence for Gli3 (NM_008130.1,679-697).
gacttgcccttcattagga

SEQ ID NO: 459700 - DNA, 19 bp, Mus musculus
  siRNA target sequence for Gli3 (NM_008130.1,802-820).
ccatccctctccatgatct

SEQ ID NO: 459701 - DNA, 19 bp, Mus musculus
  siRNA target sequence for Gli3 (NM_008130.1,865-883).
gtcagccctgcggaatact

SEQ ID NO: 459702 - DNA, 19 bp, Mus musculus
  siRNA target sequence for Gli3 (NM_008130.1,869-887).
gccctgcggaatactatca

SEQ ID NO: 459703 - DNA, 19 bp, Mus musculus
  siRNA target sequence for Gli3 (NM_008130.1,909-927).
ccagcgcagcccttatgca

SEQ ID NO: 459704 - DNA, 19 bp, Mus musculus
  siRNA target sequence for Gli3 (NM_008130.1,955-973).
ggtgcaggggccatccata

SEQ ID NO: 459705 - DNA, 19 bp, Mus musculus
  siRNA target sequence for Gli3 (NM_008130.1,956-974).
gtgcaggggccatccatat

SEQ ID NO: 459706 - DNA, 19 bp, Mus musculus
  siRNA target sequence for Gli3 (NM_008130.1,959-977).
caggggccatccatatgga

SEQ ID NO: 459707 - DNA, 19 bp, Mus musculus
  siRNA target sequence for Gli3 (NM_008130.1,1083-1101).
cgaccttcagaccatgata

SEQ ID NO: 459708 - DNA, 19 bp, Mus musculus
  siRNA target sequence for Gli3 (NM_008130.1,1111-1129).
cctaactccttggttacaa

SEQ ID NO: 459709 - DNA, 19 bp, Mus musculus
  siRNA target sequence for Gli3 (NM_008130.1,1112-1130).
ctaactccttggttacaat

SEQ ID NO: 459710 - DNA, 19 bp, Mus musculus
  siRNA target sequence for Gli3 (NM_008130.1,1355-1373).
ggattccgacagttctgaa

SEQ ID NO: 459711 - DNA, 19 bp, Mus musculus
  siRNA target sequence for Gli3 (NM_008130.1,1713-1731).
gtgccgctggcttgattgt

SEQ ID NO: 459712 - DNA, 19 bp, Mus musculus
  siRNA target sequence for Gli3 (NM_008130.1,1716-1734).
ccgctggcttgattgttca

SEQ ID NO: 459713 - DNA, 19 bp, Mus musculus
  siRNA target sequence for Gli3 (NM_008130.1,1767-1785).
gttggtagtgcatatgaga

SEQ ID NO: 459714 - DNA, 19 bp, Mus musculus
  siRNA target sequence for Gli3 (NM_008130.1,1838-1856).
cctactcaagactcgaaaa

SEQ ID NO: 459715 - DNA, 19 bp, Mus musculus
  siRNA target sequence for Gli3 (NM_008130.1,1948-1966).
cgggccaagcaccaaaaca

SEQ ID NO: 459716 - DNA, 19 bp, Mus musculus
  siRNA target sequence for Gli3 (NM_008130.1,1977-1995).
caatgagaaaccgtatgta

SEQ ID NO: 459717 - DNA, 19 bp, Mus musculus
  siRNA target sequence for Gli3 (NM_008130.1,2068-2086).
ggccctgaggctcatgtta

SEQ ID NO: 459718 - DNA, 19 bp, Mus musculus
  siRNA target sequence for Gli3 (NM_008130.1,2322-2340).
gtcccccatcagcaactat

SEQ ID NO: 459719 - DNA, 19 bp, Mus musculus
  siRNA target sequence for Gli3 (NM_008130.1,2327-2345).
ccatcagcaactattccaa

SEQ ID NO: 459720 - DNA, 19 bp, Mus musculus
  siRNA target sequence for Gli3 (NM_008130.1,2367-2385).
gactgatggaggtagtgta

SEQ ID NO: 459721 - DNA, 19 bp, Mus musculus
  siRNA target sequence for Gli3 (NM_008130.1,2476-2494).
ccggcagggaccaaatgga

SEQ ID NO: 459722 - DNA, 19 bp, Mus musculus
  siRNA target sequence for Gli3 (NM_008130.1,2493-2511).
gatggagcacatcaaactt

SEQ ID NO: 459723 - DNA, 19 bp, Mus musculus
  siRNA target sequence for Gli3 (NM_008130.1,2497-2515).
gagcacatcaaacttgaaa

SEQ ID NO: 459724 - DNA, 19 bp, Mus musculus
  siRNA target sequence for Gli3 (NM_008130.1,2581-2599).
gtatctcctctcataggaa

SEQ ID NO: 459725 - DNA, 19 bp, Mus musculus
  siRNA target sequence for Gli3 (NM_008130.1,2602-2620).
ggcacacagtccaataaca

SEQ ID NO: 459726 - DNA, 19 bp, Mus musculus
  siRNA target sequence for Gli3 (NM_008130.1,2603-2621).
gcacacagtccaataacaa

SEQ ID NO: 459727 - DNA, 19 bp, Mus musculus
  siRNA target sequence for Gli3 (NM_008130.1,2608-2626).
cagtccaataacaactata

SEQ ID NO: 459728 - DNA, 19 bp, Mus musculus
  siRNA target sequence for Gli3 (NM_008130.1,2821-2839).
gggcgaccccagaatgtga

SEQ ID NO: 459729 - DNA, 19 bp, Mus musculus
  siRNA target sequence for Gli3 (NM_008130.1,3200-3218).
ggacagtctcggagaacat

SEQ ID NO: 459730 - DNA, 19 bp, Mus musculus
  siRNA target sequence for Gli3 (NM_008130.1,3238-3256).
cgcttcagcagcctcaata

SEQ ID NO: 459731 - DNA, 19 bp, Mus musculus
  siRNA target sequence for Gli3 (NM_008130.1,3249-3267).
cctcaatagctttaatcct

SEQ ID NO: 459732 - DNA, 19 bp, Mus musculus
  siRNA target sequence for Gli3 (NM_008130.1,3257-3275).
gctttaatcctccaaattt

SEQ ID NO: 459733 - DNA, 19 bp, Mus musculus
  siRNA target sequence for Gli3 (NM_008130.1,3296-3314).
gtagcttagtgctgcaaaa

SEQ ID NO: 459734 - DNA, 19 bp, Mus musculus
  siRNA target sequence for Gli3 (NM_008130.1,3299-3317).
gcttagtgctgcaaaatta

SEQ ID NO: 459735 - DNA, 19 bp, Mus musculus
  siRNA target sequence for Gli3 (NM_008130.1,3454-3472).
gatgtggtacagtatttaa

SEQ ID NO: 459736 - DNA, 19 bp, Mus musculus
  siRNA target sequence for Gli3 (NM_008130.1,3457-3475).
gtggtacagtatttaaatt

SEQ ID NO: 459737 - DNA, 19 bp, Mus musculus
  siRNA target sequence for Gli3 (NM_008130.1,3570-3588).
gctgccagacagtcatgtt

SEQ ID NO: 459738 - DNA, 19 bp, Mus musculus
  siRNA target sequence for Gli3 (NM_008130.1,3621-3639).
ctctgagggcagtaaaact

SEQ ID NO: 459739 - DNA, 19 bp, Mus musculus
  siRNA target sequence for Gli3 (NM_008130.1,3663-3681).
ggtcagttctggaacttct

SEQ ID NO: 459740 - DNA, 19 bp, Mus musculus
  siRNA target sequence for Gli3 (NM_008130.1,3737-3755).
ggggttttgggctatacaa

SEQ ID NO: 459741 - DNA, 19 bp, Mus musculus
  siRNA target sequence for Gli3 (NM_008130.1,3739-3757).
ggttttgggctatacaaca

SEQ ID NO: 459742 - DNA, 19 bp, Mus musculus
  siRNA target sequence for Gli3 (NM_008130.1,3740-3758).
gttttgggctatacaacaa

SEQ ID NO: 459743 - DNA, 19 bp, Mus musculus
  siRNA target sequence for Gli3 (NM_008130.1,3746-3764).
ggctatacaacaatatggt

SEQ ID NO: 459744 - DNA, 19 bp, Mus musculus
  siRNA target sequence for Gli3 (NM_008130.1,3766-3784).
gtacacccacataatctgt

SEQ ID NO: 459745 - DNA, 19 bp, Mus musculus
  siRNA target sequence for Gli3 (NM_008130.1,3800-3818).
gcccagctgggggatatca

SEQ ID NO: 459746 - DNA, 19 bp, Mus musculus
  siRNA target sequence for Gli3 (NM_008130.1,3831-3849).
gaatagcagtacctacaat

SEQ ID NO: 459747 - DNA, 19 bp, Mus musculus
  siRNA target sequence for Gli3 (NM_008130.1,3883-3901).
ggacttggcaccaatggaa

SEQ ID NO: 459748 - DNA, 19 bp, Mus musculus
  siRNA target sequence for Gli3 (NM_008130.1,3884-3902).
gacttggcaccaatggaaa

SEQ ID NO: 459749 - DNA, 19 bp, Mus musculus
  siRNA target sequence for Gli3 (NM_008130.1,4065-4083).
cctgtccgtggcaccaaat

SEQ ID NO: 459750 - DNA, 19 bp, Mus musculus
  siRNA target sequence for Gli3 (NM_008130.1,4070-4088).
ccgtggcaccaaatgagtt

SEQ ID NO: 459751 - DNA, 19 bp, Mus musculus
  siRNA target sequence for Gli3 (NM_008130.1,4071-4089).
cgtggcaccaaatgagtta

SEQ ID NO: 459752 - DNA, 19 bp, Mus musculus
  siRNA target sequence for Gli3 (NM_008130.1,4219-4237).
gttggtgctacctcacata

SEQ ID NO: 459753 - DNA, 19 bp, Mus musculus
  siRNA target sequence for Gli3 (NM_008130.1,4222-4240).
ggtgctacctcacatatca

SEQ ID NO: 459754 - DNA, 19 bp, Mus musculus
  siRNA target sequence for Gli3 (NM_008130.1,4223-4241).
gtgctacctcacatatcaa

SEQ ID NO: 459755 - DNA, 19 bp, Mus musculus
  siRNA target sequence for Gli3 (NM_008130.1,4229-4247).
cctcacatatcaacatcta

SEQ ID NO: 459756 - DNA, 19 bp, Mus musculus
  siRNA target sequence for Gli3 (NM_008130.1,4475-4493).
gctctaccgtgcagaatta

SEQ ID NO: 459757 - DNA, 19 bp, Mus musculus
  siRNA target sequence for Gli3 (NM_008130.1,4476-4494).
ctctaccgtgcagaattat

SEQ ID NO: 459758 - DNA, 19 bp, Mus musculus
  siRNA target sequence for Gli3 (NM_008130.1,4598-4616).
ctgaaaactctgagttact

SEQ ID NO: 459759 - DNA, 19 bp, Mus musculus
  siRNA target sequence for Gli3 (NM_008130.1,4624-4642).
ggtgctaaccaggtaacaa

SEQ ID NO: 459760 - DNA, 19 bp, Mus musculus
  siRNA target sequence for Gli3 (NM_008130.1,4719-4737).
ccataccagcctaatgtca

SEQ ID NO: 459761 - DNA, 19 bp, Mus musculus
  siRNA target sequence for Gli3 (NM_008130.1,4748-4766).
gcccaagtattattcagaa

SEQ ID NO: 459762 - DNA, 19 bp, Mus musculus
  siRNA target sequence for Gli3 (NM_008130.1,4849-4867).
ggctatcggggatatgagt

SEQ ID NO: 459763 - DNA, 19 bp, Mus musculus
  siRNA target sequence for Gli3 (NM_008130.1,4850-4868).
gctatcggggatatgagtt

SEQ ID NO: 459764 - DNA, 19 bp, Mus musculus
  siRNA target sequence for Gli3 (NM_008130.1,4929-4947).
gcaaggaggaccacaaaca

SEQ ID NO: 459765 - DNA, 19 bp, Mus musculus
  siRNA target sequence for Gli5 (NM_031184.1,147-165).
ccggcatcatgctttgcat

SEQ ID NO: 459766 - DNA, 19 bp, Mus musculus
  siRNA target sequence for Gli5 (NM_031184.1,258-276).
ggtggacggacgcttttct

SEQ ID NO: 459767 - DNA, 19 bp, Mus musculus
  siRNA target sequence for Gli5 (NM_031184.1,408-426).
gccacttcgctatttggat

SEQ ID NO: 459768 - DNA, 19 bp, Mus musculus
  siRNA target sequence for Gli5 (NM_031184.1,563-581).
gtcgatgggccaagtgtaa

SEQ ID NO: 459769 - DNA, 19 bp, Mus musculus
  siRNA target sequence for Gli5 (NM_031184.1,758-776).
gatgccccacctgtaacaa

SEQ ID NO: 459770 - DNA, 19 bp, Mus musculus
  siRNA target sequence for Gli5 (NM_031184.1,905-923).
gtacccactacgtagacaa

SEQ ID NO: 459771 - DNA, 19 bp, Mus musculus
  siRNA target sequence for Gli5 (NM_031184.1,1078-1096).
gacagtggctcctatgtca

SEQ ID NO: 459772 - DNA, 19 bp, Mus musculus
  siRNA target sequence for Gli5 (NM_031184.1,1119-1137).
gaaccctgctgcccttttt

SEQ ID NO: 459773 - DNA, 19 bp, Mus musculus
  siRNA target sequence for Gli6 (NM_147221.1,830-848).
gtgcctcctcagatatcaa

SEQ ID NO: 459774 - DNA, 19 bp, Mus musculus
  siRNA target sequence for Gli6 (NM_147221.1,874-892).
gctctagttagctgtgtaa

SEQ ID NO: 459775 - DNA, 19 bp, Mus musculus
  siRNA target sequence for Gli6 (NM_147221.1,875-893).
ctctagttagctgtgtaaa

SEQ ID NO: 459776 - DNA, 19 bp, Mus musculus
  siRNA target sequence for Gli6 (NM_147221.1,1030-1048).
gagcccatggacgagtttt

SEQ ID NO: 459777 - DNA, 19 bp, Mus musculus
  siRNA target sequence for Gli6 (NM_147221.1,1034-1052).
ccatggacgagttttcaga

SEQ ID NO: 459778 - DNA, 19 bp, Mus musculus
  siRNA target sequence for Gli6 (NM_147221.1,1041-1059).
cgagttttcagagcttttt

SEQ ID NO: 459779 - DNA, 19 bp, Mus musculus
  siRNA target sequence for Gli6 (NM_147221.1,1383-1401).
gttcgaaggctgcagtaaa

SEQ ID NO: 459780 - DNA, 19 bp, Mus musculus
  siRNA target sequence for Gli6 (NM_147221.1,1539-1557).
cgacacgaagccatatgct

SEQ ID NO: 459781 - DNA, 19 bp, Mus musculus
  siRNA target sequence for Gli6 (NM_147221.1,1540-1558).
gacacgaagccatatgctt

SEQ ID NO: 459782 - DNA, 19 bp, Mus musculus
  siRNA target sequence for Gli6 (NM_147221.1,1802-1820).
gctccgtcaccccacaaaa

SEQ ID NO: 459783 - DNA, 19 bp, Mus musculus
  siRNA target sequence for Gli6 (NM_147221.1,2038-2056).
gggggacagtcattctcta

SEQ ID NO: 459784 - DNA, 19 bp, Mus musculus
  siRNA target sequence for Gli6 (NM_147221.1,2216-2234).
gtgatgcccacggtttcaa

SEQ ID NO: 459785 - DNA, 19 bp, Mus musculus
  siRNA target sequence for Gmeb2 (NM_198169.1,216-234).
gtgaagacagtgcttgtaa

SEQ ID NO: 459786 - DNA, 19 bp, Mus musculus
  siRNA target sequence for Gmeb2 (NM_198169.1,218-236).
gaagacagtgcttgtaaca

SEQ ID NO: 459787 - DNA, 19 bp, Mus musculus
  siRNA target sequence for Gmeb2 (NM_198169.1,247-265).
ctcctcatgggggtgattt

SEQ ID NO: 459788 - DNA, 19 bp, Mus musculus
  siRNA target sequence for Gmeb2 (NM_198169.1,258-276).
ggtgatttgacagaagata

SEQ ID NO: 459789 - DNA, 19 bp, Mus musculus
  siRNA target sequence for Gmeb2 (NM_198169.1,261-279).
gatttgacagaagataaca

SEQ ID NO: 459790 - DNA, 19 bp, Mus musculus
  siRNA target sequence for Gmeb2 (NM_198169.1,461-479).
catcaatgtgaaatgtgtt

SEQ ID NO: 459791 - DNA, 19 bp, Mus musculus
  siRNA target sequence for Gmeb2 (NM_198169.1,519-537).
cacctggcagggaaatcta

SEQ ID NO: 459792 - DNA, 19 bp, Mus musculus
  siRNA target sequence for Gmeb2 (NM_198169.1,535-553).
ctaccttgaaggattggaa

SEQ ID NO: 459793 - DNA, 19 bp, Mus musculus
  siRNA target sequence for Gmeb2 (NM_198169.1,554-572).
gagagccatccggatgaat

SEQ ID NO: 459794 - DNA, 19 bp, Mus musculus
  siRNA target sequence for Gmeb2 (NM_198169.1,601-619).
ctggagagctagacttcta

SEQ ID NO: 459795 - DNA, 19 bp, Mus musculus
  siRNA target sequence for Gmeb2 (NM_198169.1,808-826).
ccattggagatgacacatt

SEQ ID NO: 459796 - DNA, 19 bp, Mus musculus
  siRNA target sequence for Gmeb2 (NM_198169.1,853-871).
cgggcttactggatgaagt

SEQ ID NO: 459797 - DNA, 19 bp, Mus musculus
  siRNA target sequence for Gmeb2 (NM_198169.1,857-875).
cttactggatgaagtcata

SEQ ID NO: 459798 - DNA, 19 bp, Mus musculus
  siRNA target sequence for Gmeb2 (NM_198169.1,957-975).
gctgtcctcctcaacaaca

SEQ ID NO: 459799 - DNA, 19 bp, Mus musculus
  siRNA target sequence for Gmeb2 (NM_198169.1,971-989).
caacatcgtgcaaaacttt

SEQ ID NO: 459800 - DNA, 19 bp, Mus musculus
  siRNA target sequence for Gmeb2 (NM_198169.1,1162-1180).
cgctgaccccggttccatt

SEQ ID NO: 459801 - DNA, 19 bp, Mus musculus
  siRNA target sequence for Gmeb2 (NM_198169.1,1257-1275).
cagtctgcacagattgctt

SEQ ID NO: 459802 - DNA, 19 bp, Mus musculus
  siRNA target sequence for Gmeb2 (NM_198169.1,1313-1331).
gccactgggcaaagtagta

SEQ ID NO: 459803 - DNA, 19 bp, Mus musculus
  siRNA target sequence for Gmeb2 (NM_198169.1,1314-1332).
ccactgggcaaagtagtat

SEQ ID NO: 459804 - DNA, 19 bp, Mus musculus
  siRNA target sequence for Gmeb2 (NM_198169.1,1317-1335).
ctgggcaaagtagtatcta

SEQ ID NO: 459805 - DNA, 19 bp, Mus musculus
  siRNA target sequence for Gmeb2 (NM_198169.1,1319-1337).
gggcaaagtagtatctaca

SEQ ID NO: 459806 - DNA, 19 bp, Mus musculus
  siRNA target sequence for Gmeb2 (NM_198169.1,1611-1629).
gcaggcagcaccattgtga

SEQ ID NO: 459807 - DNA, 19 bp, Mus musculus
  siRNA target sequence for Gmeb2 (NM_198169.1,1615-1633).
gcagcaccattgtgacaat

SEQ ID NO: 459808 - DNA, 19 bp, Mus musculus
  siRNA target sequence for Gtf2i (NM_010365.1,110-128).
ccttgcctgccgaagatga

SEQ ID NO: 459809 - DNA, 19 bp, Mus musculus
  siRNA target sequence for Gtf2i (NM_010365.1,240-258).
gaccgacgtgtttgttgtt

SEQ ID NO: 459810 - DNA, 19 bp, Mus musculus
  siRNA target sequence for Gtf2i (NM_010365.1,274-292).
cgtgcttttgtcaatacca

SEQ ID NO: 459811 - DNA, 19 bp, Mus musculus
  siRNA target sequence for Gtf2i (NM_010365.1,283-301).
gtcaataccagaaaagatt

SEQ ID NO: 459812 - DNA, 19 bp, Mus musculus
  siRNA target sequence for Gtf2i (NM_010365.1,349-367).
gccgagatgcataagatga

SEQ ID NO: 459813 - DNA, 19 bp, Mus musculus
  siRNA target sequence for Gtf2i (NM_010365.1,350-368).
ccgagatgcataagatgaa

SEQ ID NO: 459814 - DNA, 19 bp, Mus musculus
  siRNA target sequence for Gtf2i (NM_010365.1,351-369).
cgagatgcataagatgaaa

SEQ ID NO: 459815 - DNA, 19 bp, Mus musculus
  siRNA target sequence for Gtf2i (NM_010365.1,404-422).
ctgtagaaattgaaacact

SEQ ID NO: 459816 - DNA, 19 bp, Mus musculus
  siRNA target sequence for Gtf2i (NM_010365.1,583-601).
gacctcgcaaccttgaagt

SEQ ID NO: 459817 - DNA, 19 bp, Mus musculus
  siRNA target sequence for Gtf2i (NM_010365.1,589-607).
gcaaccttgaagtggattt

SEQ ID NO: 459818 - DNA, 19 bp, Mus musculus
  siRNA target sequence for Gtf2i (NM_010365.1,590-608).
caaccttgaagtggatttt

SEQ ID NO: 459819 - DNA, 19 bp, Mus musculus
  siRNA target sequence for Gtf2i (NM_010365.1,714-732).
gtctcctagtggaagttgt

SEQ ID NO: 459820 - DNA, 19 bp, Mus musculus
  siRNA target sequence for Gtf2i (NM_010365.1,728-746).
gttgtggccccatcaaagt

SEQ ID NO: 459821 - DNA, 19 bp, Mus musculus
  siRNA target sequence for Gtf2i (NM_010365.1,770-788).
ctggcatttctctggaaat

SEQ ID NO: 459822 - DNA, 19 bp, Mus musculus
  siRNA target sequence for Gtf2i (NM_010365.1,820-838).
gaccctgattactatcagt

SEQ ID NO: 459823 - DNA, 19 bp, Mus musculus
  siRNA target sequence for Gtf2i (NM_010365.1,822-840).
ccctgattactatcagtat

SEQ ID NO: 459824 - DNA, 19 bp, Mus musculus
  siRNA target sequence for Gtf2i (NM_010365.1,823-841).
cctgattactatcagtata

SEQ ID NO: 459825 - DNA, 19 bp, Mus musculus
  siRNA target sequence for Gtf2i (NM_010365.1,824-842).
ctgattactatcagtataa

SEQ ID NO: 459826 - DNA, 19 bp, Mus musculus
  siRNA target sequence for Gtf2i (NM_010365.1,826-844).
gattactatcagtataaca

SEQ ID NO: 459827 - DNA, 19 bp, Mus musculus
  siRNA target sequence for Gtf2i (NM_010365.1,938-956).
gtgaggaccccgaagttga

SEQ ID NO: 459828 - DNA, 19 bp, Mus musculus
  siRNA target sequence for Gtf2i (NM_010365.1,1101-1119).
cactgacctacggaaacaa

SEQ ID NO: 459829 - DNA, 19 bp, Mus musculus
  siRNA target sequence for Gtf2i (NM_010365.1,1103-1121).
ctgacctacggaaacaagt

SEQ ID NO: 459830 - DNA, 19 bp, Mus musculus
  siRNA target sequence for Gtf2i (NM_010365.1,1178-1196).
cgatcccgtaccctctttt

SEQ ID NO: 459831 - DNA, 19 bp, Mus musculus
  siRNA target sequence for Gtf2i (NM_010365.1,1200-1218).
gtcccatgttgaagatctt

SEQ ID NO: 459832 - DNA, 19 bp, Mus musculus
  siRNA target sequence for Gtf2i (NM_010365.1,1276-1294).
cctcgccttgagaggatat

SEQ ID NO: 459833 - DNA, 19 bp, Mus musculus
  siRNA target sequence for Gtf2i (NM_010365.1,1277-1295).
ctcgccttgagaggatatt

SEQ ID NO: 459834 - DNA, 19 bp, Mus musculus
  siRNA target sequence for Gtf2i (NM_010365.1,1280-1298).
gccttgagaggatattgct

SEQ ID NO: 459835 - DNA, 19 bp, Mus musculus
  siRNA target sequence for Gtf2i (NM_010365.1,1310-1328).
ggatccgcttcgtgattaa

SEQ ID NO: 459836 - DNA, 19 bp, Mus musculus
  siRNA target sequence for Gtf2i (NM_010365.1,1314-1332).
ccgcttcgtgattaagaaa

SEQ ID NO: 459837 - DNA, 19 bp, Mus musculus
  siRNA target sequence for Gtf2i (NM_010365.1,1316-1334).
gcttcgtgattaagaaaca

SEQ ID NO: 459838 - DNA, 19 bp, Mus musculus
  siRNA target sequence for Gtf2i (NM_010365.1,1317-1335).
cttcgtgattaagaaacat

SEQ ID NO: 459839 - DNA, 19 bp, Mus musculus
  siRNA target sequence for Gtf2i (NM_010365.1,1333-1351).
catgagcttctgaactcaa

SEQ ID NO: 459840 - DNA, 19 bp, Mus musculus
  siRNA target sequence for Gtf2i (NM_010365.1,1344-1362).
gaactcaacacgagaagat

SEQ ID NO: 459841 - DNA, 19 bp, Mus musculus
  siRNA target sequence for Gtf2i (NM_010365.1,1347-1365).
ctcaacacgagaagattta

SEQ ID NO: 459842 - DNA, 19 bp, Mus musculus
  siRNA target sequence for Gtf2i (NM_010365.1,1349-1367).
caacacgagaagatttaca

SEQ ID NO: 459843 - DNA, 19 bp, Mus musculus
  siRNA target sequence for Gtf2i (NM_010365.1,1379-1397).
cagcctcaggagtgaaaga

SEQ ID NO: 459844 - DNA, 19 bp, Mus musculus
  siRNA target sequence for Gtf2i (NM_010365.1,1491-1509).
ggctgtaccgtaccaaaaa

SEQ ID NO: 459845 - DNA, 19 bp, Mus musculus
  siRNA target sequence for Gtf2i (NM_010365.1,1492-1510).
gctgtaccgtaccaaaaat

SEQ ID NO: 459846 - DNA, 19 bp, Mus musculus
  siRNA target sequence for Gtf2i (NM_010365.1,1493-1511).
ctgtaccgtaccaaaaatt

SEQ ID NO: 459847 - DNA, 19 bp, Mus musculus
  siRNA target sequence for Gtf2i (NM_010365.1,1518-1536).
ccatcccaatgatctctat

SEQ ID NO: 459848 - DNA, 19 bp, Mus musculus
  siRNA target sequence for Gtf2i (NM_010365.1,1571-1589).
gcccctcgtggtatggaat

SEQ ID NO: 459849 - DNA, 19 bp, Mus musculus
  siRNA target sequence for Gtf2i (NM_010365.1,1591-1609).
ccaagactggaaaaaatca

SEQ ID NO: 459850 - DNA, 19 bp, Mus musculus
  siRNA target sequence for Gtf2i (NM_010365.1,1611-1629).
ccaagtgggcaatcgaatt

SEQ ID NO: 459851 - DNA, 19 bp, Mus musculus
  siRNA target sequence for Gtf2i (NM_010365.1,1612-1630).
caagtgggcaatcgaatta

SEQ ID NO: 459852 - DNA, 19 bp, Mus musculus
  siRNA target sequence for Gtf2i (NM_010365.1,1615-1633).
gtgggcaatcgaattaaat

SEQ ID NO: 459853 - DNA, 19 bp, Mus musculus
  siRNA target sequence for Gtf2i (NM_010365.1,1617-1635).
gggcaatcgaattaaattt

SEQ ID NO: 459854 - DNA, 19 bp, Mus musculus
  siRNA target sequence for Gtf2i (NM_010365.1,1619-1637).
gcaatcgaattaaatttgt

SEQ ID NO: 459855 - DNA, 19 bp, Mus musculus
  siRNA target sequence for Gtf2i (NM_010365.1,1750-1768).
gtggaagagatctttaatt

SEQ ID NO: 459856 - DNA, 19 bp, Mus musculus
  siRNA target sequence for Gtf2i (NM_010365.1,1924-1942).
gtccgtggcagcaataaga

SEQ ID NO: 459857 - DNA, 19 bp, Mus musculus
  siRNA target sequence for Gtf2i (NM_010365.1,1927-1945).
cgtggcagcaataagatca

SEQ ID NO: 459858 - DNA, 19 bp, Mus musculus
  siRNA target sequence for Gtf2i (NM_010365.1,1928-1946).
gtggcagcaataagatcaa

SEQ ID NO: 459859 - DNA, 19 bp, Mus musculus
  siRNA target sequence for Gtf2i (NM_010365.1,1930-1948).
ggcagcaataagatcaagt

SEQ ID NO: 459860 - DNA, 19 bp, Mus musculus
  siRNA target sequence for Gtf2i (NM_010365.1,1931-1949).
gcagcaataagatcaagtt

SEQ ID NO: 459861 - DNA, 19 bp, Mus musculus
  siRNA target sequence for Gtf2i (NM_010365.1,1934-1952).
gcaataagatcaagtttgt

SEQ ID NO: 459862 - DNA, 19 bp, Mus musculus
  siRNA target sequence for Gtf2i (NM_010365.1,1935-1953).
caataagatcaagtttgtt

SEQ ID NO: 459863 - DNA, 19 bp, Mus musculus
  siRNA target sequence for Gtf2i (NM_010365.1,1990-2008).
cctgggatggctagcaaaa

SEQ ID NO: 459864 - DNA, 19 bp, Mus musculus
  siRNA target sequence for Gtf2i (NM_010365.1,1993-2011).
gggatggctagcaaaatca

SEQ ID NO: 459865 - DNA, 19 bp, Mus musculus
  siRNA target sequence for Gtf2i (NM_010365.1,1994-2012).
ggatggctagcaaaatcaa

SEQ ID NO: 459866 - DNA, 19 bp, Mus musculus
  siRNA target sequence for Gtf2i (NM_010365.1,2000-2018).
ctagcaaaatcaacactaa

SEQ ID NO: 459867 - DNA, 19 bp, Mus musculus
  siRNA target sequence for Gtf2i (NM_010365.1,2061-2079).
ctccaaggttcctgaaatt

SEQ ID NO: 459868 - DNA, 19 bp, Mus musculus
  siRNA target sequence for Gtf2i (NM_010365.1,2063-2081).
ccaaggttcctgaaattga

SEQ ID NO: 459869 - DNA, 19 bp, Mus musculus
  siRNA target sequence for Gtf2i (NM_010365.1,2141-2159).
cccagaccaatggttcaaa

SEQ ID NO: 459870 - DNA, 19 bp, Mus musculus
  siRNA target sequence for Gtf2i (NM_010365.1,2142-2160).
ccagaccaatggttcaaat

SEQ ID NO: 459871 - DNA, 19 bp, Mus musculus
  siRNA target sequence for Gtf2i (NM_010365.1,2367-2385).
ccgaaggccgtccacattt

SEQ ID NO: 459872 - DNA, 19 bp, Mus musculus
  siRNA target sequence for Gtf2i (NM_010365.1,2412-2430).
ccggaacaaggccaagata

SEQ ID NO: 459873 - DNA, 19 bp, Mus musculus
  siRNA target sequence for Gtf2i (NM_010365.1,2433-2451).
gttcatcattaaaaaacct

SEQ ID NO: 459874 - DNA, 19 bp, Mus musculus
  siRNA target sequence for Gtf2i (NM_010365.1,2457-2475).
gttcgagacggccatcaaa

SEQ ID NO: 459875 - DNA, 19 bp, Mus musculus
  siRNA target sequence for Gtf2i (NM_010365.1,2514-2532).
ctcatcacccaacgttaat

SEQ ID NO: 459876 - DNA, 19 bp, Mus musculus
  siRNA target sequence for Gtf2i (NM_010365.1,2576-2594).
caattccagatgacgataa

SEQ ID NO: 459877 - DNA, 19 bp, Mus musculus
  siRNA target sequence for Gtf2i (NM_010365.1,2599-2617).
cgactgtccaaagttgaaa

SEQ ID NO: 459878 - DNA, 19 bp, Mus musculus
  siRNA target sequence for Gtf2i (NM_010365.1,2660-2678).
ggaagtttggtgaagctat

SEQ ID NO: 459879 - DNA, 19 bp, Mus musculus
  siRNA target sequence for Gtf2i (NM_010365.1,2861-2879).
caggacttgtgattaataa

SEQ ID NO: 459880 - DNA, 19 bp, Mus musculus
  siRNA target sequence for Gtf2i (NM_010365.1,2908-2926).
ggccctgtgatacaagaat

SEQ ID NO: 459881 - DNA, 19 bp, Mus musculus
  siRNA target sequence for Gtf2i (NM_010365.1,2910-2928).
ccctgtgatacaagaatca

SEQ ID NO: 459882 - DNA, 19 bp, Mus musculus
  siRNA target sequence for Gtf2i (NM_010365.1,2943-2961).
gttggaagtcccagtaaca

SEQ ID NO: 459883 - DNA, 19 bp, Mus musculus
  siRNA target sequence for Gtf2i (NM_010365.1,2946-2964).
ggaagtcccagtaacagaa

SEQ ID NO: 459884 - DNA, 19 bp, Mus musculus
  siRNA target sequence for Gtf3a (NM_025652.1,689-707).
catgagagaagcccataaa

SEQ ID NO: 459885 - DNA, 19 bp, Mus musculus
  siRNA target sequence for Gtf3a (NM_025652.1,710-728).
ggacataacctgcaatgta

SEQ ID NO: 459886 - DNA, 19 bp, Mus musculus
  siRNA target sequence for Gtf3a (NM_025652.1,713-731).
cataacctgcaatgtatgt

SEQ ID NO: 459887 - DNA, 19 bp, Mus musculus
  siRNA target sequence for Gtf3a (NM_025652.1,726-744).
gtatgtcagaggatgttca

SEQ ID NO: 459888 - DNA, 19 bp, Mus musculus
  siRNA target sequence for Gtf3a (NM_025652.1,832-850).
cctacacaaccgtgttcaa

SEQ ID NO: 459889 - DNA, 19 bp, Mus musculus
  siRNA target sequence for Gtf3a (NM_025652.1,882-900).
gaaaagcgcccatttgtgt

SEQ ID NO: 459890 - DNA, 19 bp, Mus musculus
  siRNA target sequence for H1f0 (NM_008197.2,328-346).
ggaccaccccaagtattca

SEQ ID NO: 459891 - DNA, 19 bp, Mus musculus
  siRNA target sequence for H1f0 (NM_008197.2,336-354).
ccaagtattcagacatgat

SEQ ID NO: 459892 - DNA, 19 bp, Mus musculus
  siRNA target sequence for H1f0 (NM_008197.2,396-414).
cgcgccagtccatccaaaa

SEQ ID NO: 459893 - DNA, 19 bp, Mus musculus
  siRNA target sequence for H1f0 (NM_008197.2,399-417).
gccagtccatccaaaagta

SEQ ID NO: 459894 - DNA, 19 bp, Mus musculus
  siRNA target sequence for H1f0 (NM_008197.2,400-418).
ccagtccatccaaaagtat

SEQ ID NO: 459895 - DNA, 19 bp, Mus musculus
  siRNA target sequence for H1f0 (NM_008197.2,401-419).
cagtccatccaaaagtata

SEQ ID NO: 459896 - DNA, 19 bp, Mus musculus
  siRNA target sequence for H1f0 (NM_008197.2,405-423).
ccatccaaaagtatatcaa

SEQ ID NO: 459897 - DNA, 19 bp, Mus musculus
  siRNA target sequence for H1f0 (NM_008197.2,551-569).
ggcgatgagcccaaaaggt

SEQ ID NO: 459898 - DNA, 19 bp, Mus musculus
  siRNA target sequence for H1f0 (NM_008197.2,567-585).
ggtcggtggctttcaagaa

SEQ ID NO: 459899 - DNA, 19 bp, Mus musculus
  siRNA target sequence for H1foo (NM_138311.1,291-309).
gacaccacccgtttcaagt

SEQ ID NO: 459900 - DNA, 19 bp, Mus musculus
  siRNA target sequence for H1foo (NM_138311.1,301-319).
gtttcaagtacctgttgaa

SEQ ID NO: 459901 - DNA, 19 bp, Mus musculus
  siRNA target sequence for H1foo (NM_138311.1,389-407).
cactggcagcttcaaacta

SEQ ID NO: 459902 - DNA, 19 bp, Mus musculus
  siRNA target sequence for H1foo (NM_138311.1,476-494).
gacaggctccaagaaatct

SEQ ID NO: 459903 - DNA, 19 bp, Mus musculus
  siRNA target sequence for H1foo (NM_138311.1,623-641).
cagaaaggctcccctaaaa

SEQ ID NO: 459904 - DNA, 19 bp, Mus musculus
  siRNA target sequence for H1foo (NM_138311.1,625-643).
gaaaggctcccctaaaaca

SEQ ID NO: 459905 - DNA, 19 bp, Mus musculus
  siRNA target sequence for H1foo (NM_138311.1,762-780).
gccagcaaggtccagaata

SEQ ID NO: 459906 - DNA, 19 bp, Mus musculus
  siRNA target sequence for H1foo (NM_138311.1,884-902).
ccaggacataggacacaaa

SEQ ID NO: 459907 - DNA, 19 bp, Mus musculus
  siRNA target sequence for Hand1 (NM_008213.1,373-391).
gggcagctacgcacatcat

SEQ ID NO: 459908 - DNA, 19 bp, Mus musculus
  siRNA target sequence for Hand1 (NM_008213.1,375-393).
gcagctacgcacatcatca

SEQ ID NO: 459909 - DNA, 19 bp, Mus musculus
  siRNA target sequence for Hand1 (NM_008213.1,630-648).
gccgcctgcccaaacgaaa

SEQ ID NO: 459910 - DNA, 19 bp, Mus musculus
  siRNA target sequence for Hand1 (NM_008213.1,631-649).
ccgcctgcccaaacgaaaa

SEQ ID NO: 459911 - DNA, 19 bp, Mus musculus
  siRNA target sequence for Hand1 (NM_008213.1,783-801).
gttacatcgcctacttgat

SEQ ID NO: 459912 - DNA, 19 bp, Mus musculus
  siRNA target sequence for Hand1 (NM_008213.1,990-1008).
gggcgctggagctaaacca

SEQ ID NO: 459913 - DNA, 19 bp, Mus musculus
  siRNA target sequence for Hand2 (NM_010402.2,227-245).
cctggaccactcccattat

SEQ ID NO: 459914 - DNA, 19 bp, Mus musculus
  siRNA target sequence for Hbp1 (NM_153198.1,249-267).
ctacccaatctgccatata

SEQ ID NO: 459915 - DNA, 19 bp, Mus musculus
  siRNA target sequence for Hbp1 (NM_153198.1,260-278).
gccatataccagctaagtt

SEQ ID NO: 459916 - DNA, 19 bp, Mus musculus
  siRNA target sequence for Hbp1 (NM_153198.1,262-280).
catataccagctaagttca

SEQ ID NO: 459917 - DNA, 19 bp, Mus musculus
  siRNA target sequence for Hbp1 (NM_153198.1,269-287).
cagctaagttcagatgtat

SEQ ID NO: 459918 - DNA, 19 bp, Mus musculus
  siRNA target sequence for Hbp1 (NM_153198.1,271-289).
gctaagttcagatgtatct

SEQ ID NO: 459919 - DNA, 19 bp, Mus musculus
  siRNA target sequence for Hbp1 (NM_153198.1,279-297).
cagatgtatctcatcaaga

SEQ ID NO: 459920 - DNA, 19 bp, Mus musculus
  siRNA target sequence for Hbp1 (NM_153198.1,318-336).
gccagaatacctcagatat

SEQ ID NO: 459921 - DNA, 19 bp, Mus musculus
  siRNA target sequence for Hbp1 (NM_153198.1,373-391).
gctaacagagttagcaaat

SEQ ID NO: 459922 - DNA, 19 bp, Mus musculus
  siRNA target sequence for Hbp1 (NM_153198.1,374-392).
ctaacagagttagcaaata

SEQ ID NO: 459923 - DNA, 19 bp, Mus musculus
  siRNA target sequence for Hbp1 (NM_153198.1,422-440).
cagtgctcattttataaca

SEQ ID NO: 459924 - DNA, 19 bp, Mus musculus
  siRNA target sequence for Hbp1 (NM_153198.1,444-462).
catctcctgtacacatcat

SEQ ID NO: 459925 - DNA, 19 bp, Mus musculus
  siRNA target sequence for Hbp1 (NM_153198.1,449-467).
cctgtacacatcatagcta

SEQ ID NO: 459926 - DNA, 19 bp, Mus musculus
  siRNA target sequence for Hbp1 (NM_153198.1,457-475).
catcatagctactagcaaa

SEQ ID NO: 459927 - DNA, 19 bp, Mus musculus
  siRNA target sequence for Hbp1 (NM_153198.1,460-478).
catagctactagcaaaagt

SEQ ID NO: 459928 - DNA, 19 bp, Mus musculus
  siRNA target sequence for Hbp1 (NM_153198.1,471-489).
gcaaaagtttacattccta

SEQ ID NO: 459929 - DNA, 19 bp, Mus musculus
  siRNA target sequence for Hbp1 (NM_153198.1,472-490).
caaaagtttacattcctat

SEQ ID NO: 459930 - DNA, 19 bp, Mus musculus
  siRNA target sequence for Hbp1 (NM_153198.1,699-717).
cgcggctgtgcttccataa

SEQ ID NO: 459931 - DNA, 19 bp, Mus musculus
  siRNA target sequence for Hbp1 (NM_153198.1,759-777).
gagccgccagctgtgataa

SEQ ID NO: 459932 - DNA, 19 bp, Mus musculus
  siRNA target sequence for Hbp1 (NM_153198.1,762-780).
ccgccagctgtgataatga

SEQ ID NO: 459933 - DNA, 19 bp, Mus musculus
  siRNA target sequence for Hbp1 (NM_153198.1,815-833).
gggtctgatggtctaaagt

SEQ ID NO: 459934 - DNA, 19 bp, Mus musculus
  siRNA target sequence for Hbp1 (NM_153198.1,816-834).
ggtctgatggtctaaagtt

SEQ ID NO: 459935 - DNA, 19 bp, Mus musculus
  siRNA target sequence for Hbp1 (NM_153198.1,819-837).
ctgatggtctaaagttgtt

SEQ ID NO: 459936 - DNA, 19 bp, Mus musculus
  siRNA target sequence for Hbp1 (NM_153198.1,821-839).
gatggtctaaagttgttat

SEQ ID NO: 459937 - DNA, 19 bp, Mus musculus
  siRNA target sequence for Hbp1 (NM_153198.1,866-884).
gagtctgtactgaagttga

SEQ ID NO: 459938 - DNA, 19 bp, Mus musculus
  siRNA target sequence for Hbp1 (NM_153198.1,870-888).
ctgtactgaagttgacatt

SEQ ID NO: 459939 - DNA, 19 bp, Mus musculus
  siRNA target sequence for Hbp1 (NM_153198.1,940-958).
ccaccctttctatgttaaa

SEQ ID NO: 459940 - DNA, 19 bp, Mus musculus
  siRNA target sequence for Hbp1 (NM_153198.1,941-959).
caccctttctatgttaaaa

SEQ ID NO: 459941 - DNA, 19 bp, Mus musculus
  siRNA target sequence for Hbp1 (NM_153198.1,1003-1021).
gcatggcattccatgttgt

SEQ ID NO: 459942 - DNA, 19 bp, Mus musculus
  siRNA target sequence for Hbp1 (NM_153198.1,1007-1025).
ggcattccatgttgtgaaa

SEQ ID NO: 459943 - DNA, 19 bp, Mus musculus
  siRNA target sequence for Hbp1 (NM_153198.1,1056-1074).
gacaccctgatgccattaa

SEQ ID NO: 459944 - DNA, 19 bp, Mus musculus
  siRNA target sequence for Hbp1 (NM_153198.1,1058-1076).
caccctgatgccattaatt

SEQ ID NO: 459945 - DNA, 19 bp, Mus musculus
  siRNA target sequence for Hbp1 (NM_153198.1,1062-1080).
ctgatgccattaatttcga

SEQ ID NO: 459946 - DNA, 19 bp, Mus musculus
  siRNA target sequence for Hbp1 (NM_153198.1,1069-1087).
cattaatttcgatgattca

SEQ ID NO: 459947 - DNA, 19 bp, Mus musculus
  siRNA target sequence for Hbp1 (NM_153198.1,1132-1150).
ctcttctgcggtctatgtt

SEQ ID NO: 459948 - DNA, 19 bp, Mus musculus
  siRNA target sequence for Hbp1 (NM_153198.1,1134-1152).
cttctgcggtctatgtttt

SEQ ID NO: 459949 - DNA, 19 bp, Mus musculus
  siRNA target sequence for Hbp1 (NM_153198.1,1225-1243).
gggatctgaattcagtaaa

SEQ ID NO: 459950 - DNA, 19 bp, Mus musculus
  siRNA target sequence for Hbp1 (NM_153198.1,1268-1286).
cagctctcttctagttctt

SEQ ID NO: 459951 - DNA, 19 bp, Mus musculus
  siRNA target sequence for Hbp1 (NM_153198.1,1329-1347).
gtgccacttctcctaataa

SEQ ID NO: 459952 - DNA, 19 bp, Mus musculus
  siRNA target sequence for Hbp1 (NM_153198.1,1331-1349).
gccacttctcctaataagt

SEQ ID NO: 459953 - DNA, 19 bp, Mus musculus
  siRNA target sequence for Hbp1 (NM_153198.1,1384-1402).
caaaaaatacagagttgaa

SEQ ID NO: 459954 - DNA, 19 bp, Mus musculus
  siRNA target sequence for Hbp1 (NM_153198.1,1411-1429).
gatgtatccagggaaagat

SEQ ID NO: 459955 - DNA, 19 bp, Mus musculus
  siRNA target sequence for Hbp1 (NM_153198.1,1451-1469).
cttggtgacaggtggaaaa

SEQ ID NO: 459956 - DNA, 19 bp, Mus musculus
  siRNA target sequence for Hbp1 (NM_153198.1,1488-1506).
ggaggatgtacacattaga

SEQ ID NO: 459957 - DNA, 19 bp, Mus musculus
  siRNA target sequence for Hes1 (NM_008235.2,241-259).
gctgatataatggagaaaa

SEQ ID NO: 459958 - DNA, 19 bp, Mus musculus
  siRNA target sequence for Hes1 (NM_008235.2,302-320).
cgacaccggacaaaccaaa

SEQ ID NO: 459959 - DNA, 19 bp, Mus musculus
  siRNA target sequence for Hes1 (NM_008235.2,323-341).
cggcctctgagcacagaaa

SEQ ID NO: 459960 - DNA, 19 bp, Mus musculus
  siRNA target sequence for Hes1 (NM_008235.2,368-386).
ggcgaagggcaagaataaa

SEQ ID NO: 459961 - DNA, 19 bp, Mus musculus
  siRNA target sequence for Hes1 (NM_008235.2,375-393).
ggcaagaataaatgaaagt

SEQ ID NO: 459962 - DNA, 19 bp, Mus musculus
  siRNA target sequence for Hes1 (NM_008235.2,420-438).
ggatgcacttaagaaagat

SEQ ID NO: 459963 - DNA, 19 bp, Mus musculus
  siRNA target sequence for Hes1 (NM_008235.2,421-439).
gatgcacttaagaaagata

SEQ ID NO: 459964 - DNA, 19 bp, Mus musculus
  siRNA target sequence for Hes1 (NM_008235.2,909-927).
ggctcctgacggccaattt

SEQ ID NO: 459965 - DNA, 19 bp, Mus musculus
  siRNA target sequence for Hes1 (NM_008235.2,920-938).
gccaatttgcctttctcat

SEQ ID NO: 459966 - DNA, 19 bp, Mus musculus
  siRNA target sequence for Hes2 (NM_008236.1,3-21).
gaggctgcccagaagagtt

SEQ ID NO: 459967 - DNA, 19 bp, Mus musculus
  siRNA target sequence for Hes3 (NM_008237.1,65-83).
gacactactcacatcagat

SEQ ID NO: 459968 - DNA, 19 bp, Mus musculus
  siRNA target sequence for Hes3 (NM_008237.1,76-94).
catcagatacggaaacgaa

SEQ ID NO: 459969 - DNA, 19 bp, Mus musculus
  siRNA target sequence for Hes3 (NM_008237.1,121-139).
ctgagtgttaagtacatga

SEQ ID NO: 459970 - DNA, 19 bp, Mus musculus
  siRNA target sequence for Hes5 (NM_010419.2,268-286).
ccgtcagctacctgaaaca

SEQ ID NO: 459971 - DNA, 19 bp, Mus musculus
  siRNA target sequence for Hes5 (NM_010419.2,270-288).
gtcagctacctgaaacaca

SEQ ID NO: 459972 - DNA, 19 bp, Mus musculus
  siRNA target sequence for Hey1 (NM_010423.1,190-208).
gcgcggacgagaatggaaa

SEQ ID NO: 459973 - DNA, 19 bp, Mus musculus
  siRNA target sequence for Hey1 (NM_010423.1,193-211).
cggacgagaatggaaactt

SEQ ID NO: 459974 - DNA, 19 bp, Mus musculus
  siRNA target sequence for Hey1 (NM_010423.1,241-259).
cgacatcgtcccaggtttt

SEQ ID NO: 459975 - DNA, 19 bp, Mus musculus
  siRNA target sequence for Hey1 (NM_010423.1,252-270).
caggttttggccaggaaaa

SEQ ID NO: 459976 - DNA, 19 bp, Mus musculus
  siRNA target sequence for Hey1 (NM_010423.1,295-313).
gccgacgagaccgaatcaa

SEQ ID NO: 459977 - DNA, 19 bp, Mus musculus
  siRNA target sequence for Hey1 (NM_010423.1,296-314).
ccgacgagaccgaatcaat

SEQ ID NO: 459978 - DNA, 19 bp, Mus musculus
  siRNA target sequence for Hey1 (NM_010423.1,297-315).
cgacgagaccgaatcaata

SEQ ID NO: 459979 - DNA, 19 bp, Mus musculus
  siRNA target sequence for Hey1 (NM_010423.1,511-529).
ccgaagttgcccgttatct

SEQ ID NO: 459980 - DNA, 19 bp, Mus musculus
  siRNA target sequence for Hey1 (NM_010423.1,513-531).
gaagttgcccgttatctga

SEQ ID NO: 459981 - DNA, 19 bp, Mus musculus
  siRNA target sequence for Hey1 (NM_010423.1,521-539).
ccgttatctgagcatcatt

SEQ ID NO: 459982 - DNA, 19 bp, Mus musculus
  siRNA target sequence for Hey1 (NM_010423.1,574-592).
gcctggtctcccatctcaa

SEQ ID NO: 459983 - DNA, 19 bp, Mus musculus
  siRNA target sequence for Hey2 (NM_013904.1,192-210).
cgtggggagcgagaacaat

SEQ ID NO: 459984 - DNA, 19 bp, Mus musculus
  siRNA target sequence for Hey2 (NM_013904.1,285-303).
gaaaaggagagggatcata

SEQ ID NO: 459985 - DNA, 19 bp, Mus musculus
  siRNA target sequence for Hey2 (NM_013904.1,311-329).
ggcgtcgggatcgaataaa

SEQ ID NO: 459986 - DNA, 19 bp, Mus musculus
  siRNA target sequence for Hey2 (NM_013904.1,312-330).
gcgtcgggatcgaataaat

SEQ ID NO: 459987 - DNA, 19 bp, Mus musculus
  siRNA target sequence for Hey2 (NM_013904.1,313-331).
cgtcgggatcgaataaata

SEQ ID NO: 459988 - DNA, 19 bp, Mus musculus
  siRNA target sequence for Hey2 (NM_013904.1,314-332).
gtcgggatcgaataaataa

SEQ ID NO: 459989 - DNA, 19 bp, Mus musculus
  siRNA target sequence for Hey2 (NM_013904.1,316-334).
cgggatcgaataaataaca

SEQ ID NO: 459990 - DNA, 19 bp, Mus musculus
  siRNA target sequence for Hey2 (NM_013904.1,318-336).
ggatcgaataaataacagt

SEQ ID NO: 459991 - DNA, 19 bp, Mus musculus
  siRNA target sequence for Hey2 (NM_013904.1,333-351).
cagtttatctgaattgaga

SEQ ID NO: 459992 - DNA, 19 bp, Mus musculus
  siRNA target sequence for Hey2 (NM_013904.1,393-411).
gttagaaaaggctgaaata

SEQ ID NO: 459993 - DNA, 19 bp, Mus musculus
  siRNA target sequence for Hey2 (NM_013904.1,403-421).
gctgaaatattgcaaatga

SEQ ID NO: 459994 - DNA, 19 bp, Mus musculus
  siRNA target sequence for Hey2 (NM_013904.1,484-502).
cttgccacagacttcatga

SEQ ID NO: 459995 - DNA, 19 bp, Mus musculus
  siRNA target sequence for Hey2 (NM_013904.1,529-547).
gaagtggctaggtacctaa

SEQ ID NO: 459996 - DNA, 19 bp, Mus musculus
  siRNA target sequence for Hey2 (NM_013904.1,825-843).
gtttgcccatgcagattct

SEQ ID NO: 459997 - DNA, 19 bp, Mus musculus
  siRNA target sequence for Hey2 (NM_013904.1,1097-1115).
gcactgggacaaacaataa

SEQ ID NO: 459998 - DNA, 19 bp, Mus musculus
  siRNA target sequence for Hey2 (NM_013904.1,1098-1116).
cactgggacaaacaataaa

SEQ ID NO: 459999 - DNA, 19 bp, Mus musculus
  siRNA target sequence for Heyl (NM_013905.2,76-94).
ggtcaagagaacgatctta

SEQ ID NO: 460000 - DNA, 19 bp, Mus musculus
  siRNA target sequence for Heyl (NM_013905.2,178-196).
cgcagagaccgcatcaaca

SEQ ID NO: 460001 - DNA, 19 bp, Mus musculus
  siRNA target sequence for Heyl (NM_013905.2,320-338).
gtggcacagggttctttga

SEQ ID NO: 460002 - DNA, 19 bp, Mus musculus
  siRNA target sequence for Heyl (NM_013905.2,387-405).
cctcactgaggtcataaga

SEQ ID NO: 460003 - DNA, 19 bp, Mus musculus
  siRNA target sequence for Heyl (NM_013905.2,388-406).
ctcactgaggtcataagat

SEQ ID NO: 460004 - DNA, 19 bp, Mus musculus
  siRNA target sequence for Heyl (NM_013905.2,622-640).
gtcctccccagcatctctt

SEQ ID NO: 460005 - DNA, 19 bp, Mus musculus
  siRNA target sequence for Hic1 (NM_010430.1,30-48).
gcttaagagttcctcattt

SEQ ID NO: 460006 - DNA, 19 bp, Mus musculus
  siRNA target sequence for Hic1 (NM_010430.1,72-90).
cccgaattggcgcgatata

SEQ ID NO: 460007 - DNA, 19 bp, Mus musculus
  siRNA target sequence for Hic1 (NM_010430.1,73-91).
ccgaattggcgcgatataa

SEQ ID NO: 460008 - DNA, 19 bp, Mus musculus
  siRNA target sequence for Hic1 (NM_010430.1,75-93).
gaattggcgcgatataaca

SEQ ID NO: 460009 - DNA, 19 bp, Mus musculus
  siRNA target sequence for Hic1 (NM_010430.1,80-98).
ggcgcgatataacatataa

SEQ ID NO: 460010 - DNA, 19 bp, Mus musculus
  siRNA target sequence for Hic1 (NM_010430.1,81-99).
gcgcgatataacatataaa

SEQ ID NO: 460011 - DNA, 19 bp, Mus musculus
  siRNA target sequence for Hic1 (NM_010430.1,82-100).
cgcgatataacatataaat

SEQ ID NO: 460012 - DNA, 19 bp, Mus musculus
  siRNA target sequence for Hic1 (NM_010430.1,121-139).
cacaaaacccccaggttta

SEQ ID NO: 460013 - DNA, 19 bp, Mus musculus
  siRNA target sequence for Hic1 (NM_010430.1,1115-1133).
cccactgcgctgagctata

SEQ ID NO: 460014 - DNA, 19 bp, Mus musculus
  siRNA target sequence for Hic1 (NM_010430.1,1116-1134).
ccactgcgctgagctatat

SEQ ID NO: 460015 - DNA, 19 bp, Mus musculus
  siRNA target sequence for Hic1 (NM_010430.1,1241-1259).
ccgagcgaccgcttagtga

SEQ ID NO: 460016 - DNA, 19 bp, Mus musculus
  siRNA target sequence for Hic1 (NM_010430.1,1482-1500).
gccaggcctgggtagttat

SEQ ID NO: 460017 - DNA, 19 bp, Mus musculus
  siRNA target sequence for Hic1 (NM_010430.1,1493-1511).
gtagttatggcgatgaact

SEQ ID NO: 460018 - DNA, 19 bp, Mus musculus
  siRNA target sequence for Hic1 (NM_010430.1,1648-1666).
gcagacggcgacgactata

SEQ ID NO: 460019 - DNA, 19 bp, Mus musculus
  siRNA target sequence for Hic1 (NM_010430.1,1649-1667).
cagacggcgacgactataa

SEQ ID NO: 460020 - DNA, 19 bp, Mus musculus
  siRNA target sequence for Hic1 (NM_010430.1,1740-1758).
cccgcacttggcttatggt

SEQ ID NO: 460021 - DNA, 19 bp, Mus musculus
  siRNA target sequence for Hic1 (NM_010430.1,1860-1878).
ggaagaagaggcgttatat

SEQ ID NO: 460022 - DNA, 19 bp, Mus musculus
  siRNA target sequence for Hic1 (NM_010430.1,2087-2105).
gtaccatctgcggaaagaa

SEQ ID NO: 460023 - DNA, 19 bp, Mus musculus
  siRNA target sequence for Hic1 (NM_010430.1,2259-2277).
ggtgtgcggtggcaagttt

SEQ ID NO: 460024 - DNA, 19 bp, Mus musculus
  siRNA target sequence for Hic1 (NM_010430.1,2409-2427).
cttccctgagggtgtcttt

SEQ ID NO: 460025 - DNA, 19 bp, Mus musculus
  siRNA target sequence for Hic1 (NM_010430.1,2548-2566).
ctctacccgctggctaaat

SEQ ID NO: 460026 - DNA, 19 bp, Mus musculus
  siRNA target sequence for Hic1 (NM_010430.1,2553-2571).
cccgctggctaaattcact

SEQ ID NO: 460027 - DNA, 19 bp, Mus musculus
  siRNA target sequence for Hic2 (NM_178922.2,225-243).
gctagcagcatctacttca

SEQ ID NO: 460028 - DNA, 19 bp, Mus musculus
  siRNA target sequence for Hic2 (NM_178922.2,226-244).
ctagcagcatctacttcaa

SEQ ID NO: 460029 - DNA, 19 bp, Mus musculus
  siRNA target sequence for Hic2 (NM_178922.2,429-447).
ctctgtcgccgcaaactga

SEQ ID NO: 460030 - DNA, 19 bp, Mus musculus
  siRNA target sequence for Hic2 (NM_178922.2,539-557).
catccaggctcgatttcca

SEQ ID NO: 460031 - DNA, 19 bp, Mus musculus
  siRNA target sequence for Hic2 (NM_178922.2,550-568).
gatttccagggcttgtaga

SEQ ID NO: 460032 - DNA, 19 bp, Mus musculus
  siRNA target sequence for Hic2 (NM_178922.2,610-628).
ccaaaggctcagatgatga

SEQ ID NO: 460033 - DNA, 19 bp, Mus musculus
  siRNA target sequence for Hic2 (NM_178922.2,890-908).
cctgcctgtcggcaatagt

SEQ ID NO: 460034 - DNA, 19 bp, Mus musculus
  siRNA target sequence for Hic2 (NM_178922.2,899-917).
cggcaatagtgcctcattt

SEQ ID NO: 460035 - DNA, 19 bp, Mus musculus
  siRNA target sequence for Hic2 (NM_178922.2,901-919).
gcaatagtgcctcatttgt

SEQ ID NO: 460036 - DNA, 19 bp, Mus musculus
  siRNA target sequence for Hic2 (NM_178922.2,1024-1042).
ggcattcagcccgcaaaaa

SEQ ID NO: 460037 - DNA, 19 bp, Mus musculus
  siRNA target sequence for Hic2 (NM_178922.2,1025-1043).
gcattcagcccgcaaaaaa

SEQ ID NO: 460038 - DNA, 19 bp, Mus musculus
  siRNA target sequence for Hic2 (NM_178922.2,1033-1051).
cccgcaaaaaagattggaa

SEQ ID NO: 460039 - DNA, 19 bp, Mus musculus
  siRNA target sequence for Hic2 (NM_178922.2,1067-1085).
ggctgggtccccctttgat

SEQ ID NO: 460040 - DNA, 19 bp, Mus musculus
  siRNA target sequence for Hic2 (NM_178922.2,1068-1086).
gctgggtccccctttgata

SEQ ID NO: 460041 - DNA, 19 bp, Mus musculus
  siRNA target sequence for Hic2 (NM_178922.2,1346-1364).
gtcatatggggacaatgtt

SEQ ID NO: 460042 - DNA, 19 bp, Mus musculus
  siRNA target sequence for Hic2 (NM_178922.2,1348-1366).
catatggggacaatgttta

SEQ ID NO: 460043 - DNA, 19 bp, Mus musculus
  siRNA target sequence for Hic2 (NM_178922.2,1635-1653).
ccgttcccctgcaacattt

SEQ ID NO: 460044 - DNA, 19 bp, Mus musculus
  siRNA target sequence for Hic2 (NM_178922.2,1637-1655).
gttcccctgcaacatttgt

SEQ ID NO: 460045 - DNA, 19 bp, Mus musculus
  siRNA target sequence for Hils1 (NM_018792.1,274-292).
ccagagtgagagtcaaact

SEQ ID NO: 460046 - DNA, 19 bp, Mus musculus
  siRNA target sequence for Hils1 (NM_018792.1,326-344).
cccaccatgtcgtatgtga

SEQ ID NO: 460047 - DNA, 19 bp, Mus musculus
  siRNA target sequence for Hils1 (NM_018792.1,327-345).
ccaccatgtcgtatgtgat

SEQ ID NO: 460048 - DNA, 19 bp, Mus musculus
  siRNA target sequence for Hils1 (NM_018792.1,328-346).
caccatgtcgtatgtgatt

SEQ ID NO: 460049 - DNA, 19 bp, Mus musculus
  siRNA target sequence for Hils1 (NM_018792.1,359-377).
gctgacaagcgggtacata

SEQ ID NO: 460050 - DNA, 19 bp, Mus musculus
  siRNA target sequence for Hils1 (NM_018792.1,360-378).
ctgacaagcgggtacataa

SEQ ID NO: 460051 - DNA, 19 bp, Mus musculus
  siRNA target sequence for Hils1 (NM_018792.1,362-380).
gacaagcgggtacataatt

SEQ ID NO: 460052 - DNA, 19 bp, Mus musculus
  siRNA target sequence for Hils1 (NM_018792.1,364-382).
caagcgggtacataattgt

SEQ ID NO: 460053 - DNA, 19 bp, Mus musculus
  siRNA target sequence for Hils1 (NM_018792.1,457-475).
gcgtgtgctccagaatcta

SEQ ID NO: 460054 - DNA, 19 bp, Mus musculus
  siRNA target sequence for Hils1 (NM_018792.1,466-484).
ccagaatctactcgataaa

SEQ ID NO: 460055 - DNA, 19 bp, Mus musculus
  siRNA target sequence for Hils1 (NM_018792.1,476-494).
ctcgataaaggcatgatca

SEQ ID NO: 460056 - DNA, 19 bp, Mus musculus
  siRNA target sequence for Hils1 (NM_018792.1,638-656).
ccatgccaattgctactaa

SEQ ID NO: 460057 - DNA, 19 bp, Mus musculus
  siRNA target sequence for Hils1 (NM_018792.1,712-730).
caaccgccattgccattat

SEQ ID NO: 460058 - DNA, 19 bp, Mus musculus
  siRNA target sequence for Hist1h1b (NM_020034.1,305-323).
ctggttccttcaagcttaa

SEQ ID NO: 460059 - DNA, 19 bp, Mus musculus
  siRNA target sequence for Hist1h1c (NM_015786.1,314-332).
gcatcctggtgcaaaccaa

SEQ ID NO: 460060 - DNA, 19 bp, Mus musculus
  siRNA target sequence for Hist1h1c (NM_015786.1,533-551).
cggctgtgaccaagaaagt

SEQ ID NO: 460061 - DNA, 19 bp, Mus musculus
  siRNA target sequence for Hist1h1c (NM_015786.1,594-612).
ggtcaagagcgcgtctaaa

SEQ ID NO: 460062 - DNA, 19 bp, Mus musculus
  siRNA target sequence for Hist1h1d (NM_145713.2,654-672).
gcttccaagcctaaagctt

SEQ ID NO: 460063 - DNA, 19 bp, Mus musculus
  siRNA target sequence for Hist1h1d (NM_145713.2,658-676).
ccaagcctaaagcttctaa

SEQ ID NO: 460064 - DNA, 19 bp, Mus musculus
  siRNA target sequence for Hist1h1e (NM_015787.1,151-169).
ggcgcgaagcgcaaaacct

SEQ ID NO: 460065 - DNA, 19 bp, Mus musculus
  siRNA target sequence for Hist1h1e (NM_015787.1,408-426).
ggctaagcccaaagcaaaa

SEQ ID NO: 460066 - DNA, 19 bp, Mus musculus
  siRNA target sequence for Hist1h1e (NM_015787.1,649-667).
cctaaagcggccaaaccaa

SEQ ID NO: 460067 - DNA, 19 bp, Mus musculus
  siRNA target sequence for Hist1h1e (NM_015787.1,650-668).
ctaaagcggccaaaccaaa

SEQ ID NO: 460068 - DNA, 19 bp, Mus musculus
  siRNA target sequence for Hist1h1e (NM_015787.1,684-702).
ggcagctaagccaaagaaa

SEQ ID NO: 460069 - DNA, 19 bp, Mus musculus
  siRNA target sequence for Hist1h1t (NM_010377.1,106-124).
ggagaaaccttcatctaaa

SEQ ID NO: 460070 - DNA, 19 bp, Mus musculus
  siRNA target sequence for Hist1h1t (NM_010377.1,120-138).
ctaaaaggcgagggaaaaa

SEQ ID NO: 460071 - DNA, 19 bp, Mus musculus
  siRNA target sequence for Hist1h1t (NM_010377.1,164-182).
cctcggggtttctcagttt

SEQ ID NO: 460072 - DNA, 19 bp, Mus musculus
  siRNA target sequence for Hist1h1t (NM_010377.1,168-186).
ggggtttctcagtttccaa

SEQ ID NO: 460073 - DNA, 19 bp, Mus musculus
  siRNA target sequence for Hist1h1t (NM_010377.1,517-535).
ggctacgcccacaaaagct

SEQ ID NO: 460074 - DNA, 19 bp, Mus musculus
  siRNA target sequence for Hist1h1t (NM_010377.1,518-536).
gctacgcccacaaaagctt

SEQ ID NO: 460075 - DNA, 19 bp, Mus musculus
  siRNA target sequence for Hist1h1t (NM_010377.1,568-586).
gggcgtgcagcaacgtaaa

SEQ ID NO: 460076 - DNA, 19 bp, Mus musculus
  siRNA target sequence for Hist1h1t (NM_010377.1,569-587).
ggcgtgcagcaacgtaaaa

SEQ ID NO: 460077 - DNA, 19 bp, Mus musculus
  siRNA target sequence for Hist1h1t (NM_010377.1,604-622).
ggcagcaaaccccaattct

SEQ ID NO: 460078 - DNA, 19 bp, Mus musculus
  siRNA target sequence for Hist2h2bb (NM_175666.1,49-67).
gcctgaactggccaaatct

SEQ ID NO: 460079 - DNA, 19 bp, Mus musculus
  siRNA target sequence for Hist2h2bb (NM_175666.1,106-124).
caaggcgcaaaagaaagat

SEQ ID NO: 460080 - DNA, 19 bp, Mus musculus
  siRNA target sequence for Hist2h2bb (NM_175666.1,301-319).
caagcggtctacaatcaca

SEQ ID NO: 460081 - DNA, 19 bp, Mus musculus
  siRNA target sequence for Hist2h2bb (NM_175666.1,336-354).
cgtcggtgcgccttctact

SEQ ID NO: 460082 - DNA, 19 bp, Mus musculus
  siRNA target sequence for Hivep1 (NM_007772.1,203-221).
ggaatcctcttcagacaaa

SEQ ID NO: 460083 - DNA, 19 bp, Mus musculus
  siRNA target sequence for Hivep1 (NM_007772.1,310-328).
caggggaggcaatttacca

SEQ ID NO: 460084 - DNA, 19 bp, Mus musculus
  siRNA target sequence for Hivep1 (NM_007772.1,317-335).
ggcaatttaccaagcaaaa

SEQ ID NO: 460085 - DNA, 19 bp, Mus musculus
  siRNA target sequence for Hivep1 (NM_007772.1,318-336).
gcaatttaccaagcaaaat

SEQ ID NO: 460086 - DNA, 19 bp, Mus musculus
  siRNA target sequence for Hivep1 (NM_007772.1,519-537).
gactgacaatagtgaatgt

SEQ ID NO: 460087 - DNA, 19 bp, Mus musculus
  siRNA target sequence for Hivep1 (NM_007772.1,578-596).
gtaccgcgttcgatgtctt

SEQ ID NO: 460088 - DNA, 19 bp, Mus musculus
  siRNA target sequence for Hivep1 (NM_007772.1,581-599).
ccgcgttcgatgtcttact

SEQ ID NO: 460089 - DNA, 19 bp, Mus musculus
  siRNA target sequence for Hivep1 (NM_007772.1,583-601).
gcgttcgatgtcttactga

SEQ ID NO: 460090 - DNA, 19 bp, Mus musculus
  siRNA target sequence for Hivep1 (NM_007772.1,584-602).
cgttcgatgtcttactgaa

SEQ ID NO: 460091 - DNA, 19 bp, Mus musculus
  siRNA target sequence for Hivep1 (NM_007772.1,585-603).
gttcgatgtcttactgaaa

SEQ ID NO: 460092 - DNA, 19 bp, Mus musculus
  siRNA target sequence for Hivep1 (NM_007772.1,589-607).
gatgtcttactgaaagcaa

SEQ ID NO: 460093 - DNA, 19 bp, Mus musculus
  siRNA target sequence for Hivep1 (NM_007772.1,619-637).
ctgagcaccttgtcacaaa

SEQ ID NO: 460094 - DNA, 19 bp, Mus musculus
  siRNA target sequence for Hivep1 (NM_007772.1,640-658).
ggctcatcttgtgcaatta

SEQ ID NO: 460095 - DNA, 19 bp, Mus musculus
  siRNA target sequence for Hivep1 (NM_007772.1,641-659).
gctcatcttgtgcaattaa

SEQ ID NO: 460096 - DNA, 19 bp, Mus musculus
  siRNA target sequence for Hivep1 (NM_007772.1,686-704).
ctgtaagatccccttctaa

SEQ ID NO: 460097 - DNA, 19 bp, Mus musculus
  siRNA target sequence for Hivep1 (NM_007772.1,692-710).
gatccccttctaaattaaa

SEQ ID NO: 460098 - DNA, 19 bp, Mus musculus
  siRNA target sequence for Hivep1 (NM_007772.1,695-713).
ccccttctaaattaaagaa

SEQ ID NO: 460099 - DNA, 19 bp, Mus musculus
  siRNA target sequence for Hivep1 (NM_007772.1,782-800).
cctcgtacccagtacatgt

SEQ ID NO: 460100 - DNA, 19 bp, Mus musculus
  siRNA target sequence for Hivep1 (NM_007772.1,868-886).
caccttgttcccaaactta

SEQ ID NO: 460101 - DNA, 19 bp, Mus musculus
  siRNA target sequence for Hivep1 (NM_007772.1,878-896).
ccaaacttagccaacagaa

SEQ ID NO: 460102 - DNA, 19 bp, Mus musculus
  siRNA target sequence for Hivep1 (NM_007772.1,950-968).
cccttgagagcactaaact

SEQ ID NO: 460103 - DNA, 19 bp, Mus musculus
  siRNA target sequence for Hivep1 (NM_007772.1,951-969).
ccttgagagcactaaactt

SEQ ID NO: 460104 - DNA, 19 bp, Mus musculus
  siRNA target sequence for Hivep1 (NM_007772.1,967-985).
cttgagccgatctataata

SEQ ID NO: 460105 - DNA, 19 bp, Mus musculus
  siRNA target sequence for Hivep1 (NM_007772.1,1045-1063).
ccacaccagcaaatggatt

SEQ ID NO: 460106 - DNA, 19 bp, Mus musculus
  siRNA target sequence for Hivep1 (NM_007772.1,1066-1084).
gtgtcacctttgtcagtaa

SEQ ID NO: 460107 - DNA, 19 bp, Mus musculus
  siRNA target sequence for Hivep1 (NM_007772.1,1145-1163).
ctgttgtcagtcaaagtgt

SEQ ID NO: 460108 - DNA, 19 bp, Mus musculus
  siRNA target sequence for Hivep1 (NM_007772.1,1257-1275).
cagcgtgcttttaaagcat

SEQ ID NO: 460109 - DNA, 19 bp, Mus musculus
  siRNA target sequence for Hivep1 (NM_007772.1,1259-1277).
gcgtgcttttaaagcatat

SEQ ID NO: 460110 - DNA, 19 bp, Mus musculus
  siRNA target sequence for Hivep1 (NM_007772.1,1328-1346).
catttaagactaaaagtaa

SEQ ID NO: 460111 - DNA, 19 bp, Mus musculus
  siRNA target sequence for Hivep1 (NM_007772.1,1348-1366).
ctgtataagcacaagaagt

SEQ ID NO: 460112 - DNA, 19 bp, Mus musculus
  siRNA target sequence for Hivep1 (NM_007772.1,1383-1401).
caaactgggccttgtctta

SEQ ID NO: 460113 - DNA, 19 bp, Mus musculus
  siRNA target sequence for Hivep1 (NM_007772.1,1439-1457).
gccccaaagcacttagtgt

SEQ ID NO: 460114 - DNA, 19 bp, Mus musculus
  siRNA target sequence for Hivep1 (NM_007772.1,1448-1466).
cacttagtgtccattcaga

SEQ ID NO: 460115 - DNA, 19 bp, Mus musculus
  siRNA target sequence for Hivep1 (NM_007772.1,1454-1472).
gtgtccattcagacattga

SEQ ID NO: 460116 - DNA, 19 bp, Mus musculus
  siRNA target sequence for Hivep1 (NM_007772.1,1556-1574).
caatgaagacggtatcgaa

SEQ ID NO: 460117 - DNA, 19 bp, Mus musculus
  siRNA target sequence for Hivep1 (NM_007772.1,1567-1585).
gtatcgaatcccgaatctt

SEQ ID NO: 460118 - DNA, 19 bp, Mus musculus
  siRNA target sequence for Hivep1 (NM_007772.1,1577-1595).
ccgaatctttacccaaatt

SEQ ID NO: 460119 - DNA, 19 bp, Mus musculus
  siRNA target sequence for Hivep1 (NM_007772.1,1579-1597).
gaatctttacccaaattga

SEQ ID NO: 460120 - DNA, 19 bp, Mus musculus
  siRNA target sequence for Hivep1 (NM_007772.1,1596-1614).
gataccaagcaattcagat

SEQ ID NO: 460121 - DNA, 19 bp, Mus musculus
  siRNA target sequence for Hivep1 (NM_007772.1,1601-1619).
caagcaattcagatcatgt

SEQ ID NO: 460122 - DNA, 19 bp, Mus musculus
  siRNA target sequence for Hivep1 (NM_007772.1,1668-1686).
gacagagttaccaaaggtt

SEQ ID NO: 460123 - DNA, 19 bp, Mus musculus
  siRNA target sequence for Hivep1 (NM_007772.1,1782-1800).
ccttcatgttgcaagcata

SEQ ID NO: 460124 - DNA, 19 bp, Mus musculus
  siRNA target sequence for Hivep1 (NM_007772.1,1786-1804).
catgttgcaagcatactgt

SEQ ID NO: 460125 - DNA, 19 bp, Mus musculus
  siRNA target sequence for Hivep1 (NM_007772.1,1792-1810).
gcaagcatactgtcacatt

SEQ ID NO: 460126 - DNA, 19 bp, Mus musculus
  siRNA target sequence for Hivep1 (NM_007772.1,2019-2037).
gtccgagagtgctgatcaa

SEQ ID NO: 460127 - DNA, 19 bp, Mus musculus
  siRNA target sequence for Hivep1 (NM_007772.1,2054-2072).
ctccgtttgccagaacttt

SEQ ID NO: 460128 - DNA, 19 bp, Mus musculus
  siRNA target sequence for Hivep1 (NM_007772.1,2112-2130).
cccagggcctcgaatcagt

SEQ ID NO: 460129 - DNA, 19 bp, Mus musculus
  siRNA target sequence for Hivep1 (NM_007772.1,2194-2212).
ccacccttggccaccaaaa

SEQ ID NO: 460130 - DNA, 19 bp, Mus musculus
  siRNA target sequence for Hivep1 (NM_007772.1,2235-2253).
gctgatctcagacaatgaa

SEQ ID NO: 460131 - DNA, 19 bp, Mus musculus
  siRNA target sequence for Hivep1 (NM_007772.1,2357-2375).
ccttccagtttgacctaaa

SEQ ID NO: 460132 - DNA, 19 bp, Mus musculus
  siRNA target sequence for Hivep1 (NM_007772.1,2358-2376).
cttccagtttgacctaaaa

SEQ ID NO: 460133 - DNA, 19 bp, Mus musculus
  siRNA target sequence for Hivep1 (NM_007772.1,2377-2395).
ccgatgggacggagaacaa

SEQ ID NO: 460134 - DNA, 19 bp, Mus musculus
  siRNA target sequence for Hivep1 (NM_007772.1,2397-2415).
ctccagctctgatatacca

SEQ ID NO: 460135 - DNA, 19 bp, Mus musculus
  siRNA target sequence for Hivep1 (NM_007772.1,2399-2417).
ccagctctgatataccaaa

SEQ ID NO: 460136 - DNA, 19 bp, Mus musculus
  siRNA target sequence for Hivep1 (NM_007772.1,2429-2447).
ccccaactgagaagtcaaa

SEQ ID NO: 460137 - DNA, 19 bp, Mus musculus
  siRNA target sequence for Hivep1 (NM_007772.1,2511-2529).
gccaaccacgggctattca

SEQ ID NO: 460138 - DNA, 19 bp, Mus musculus
  siRNA target sequence for Hivep1 (NM_007772.1,2530-2548).
gcaatccctgcaaatataa

SEQ ID NO: 460139 - DNA, 19 bp, Mus musculus
  siRNA target sequence for Hivep1 (NM_007772.1,2531-2549).
caatccctgcaaatataat

SEQ ID NO: 460140 - DNA, 19 bp, Mus musculus
  siRNA target sequence for Hivep1 (NM_007772.1,2576-2594).
gccagtcatttgatgataa

SEQ ID NO: 460141 - DNA, 19 bp, Mus musculus
  siRNA target sequence for Hivep1 (NM_007772.1,2577-2595).
ccagtcatttgatgataaa

SEQ ID NO: 460142 - DNA, 19 bp, Mus musculus
  siRNA target sequence for Hivep1 (NM_007772.1,2578-2596).
cagtcatttgatgataaaa

SEQ ID NO: 460143 - DNA, 19 bp, Mus musculus
  siRNA target sequence for Hivep1 (NM_007772.1,2580-2598).
gtcatttgatgataaaatt

SEQ ID NO: 460144 - DNA, 19 bp, Mus musculus
  siRNA target sequence for Hivep1 (NM_007772.1,2600-2618).
gcaccttgtatgatgatgt

SEQ ID NO: 460145 - DNA, 19 bp, Mus musculus
  siRNA target sequence for Hivep1 (NM_007772.1,2810-2828).
cccctcacctagagaagaa

SEQ ID NO: 460146 - DNA, 19 bp, Mus musculus
  siRNA target sequence for Hivep1 (NM_007772.1,2843-2861).
gacgaggaaccatgtttga

SEQ ID NO: 460147 - DNA, 19 bp, Mus musculus
  siRNA target sequence for Hivep1 (NM_007772.1,2845-2863).
cgaggaaccatgtttgagt

SEQ ID NO: 460148 - DNA, 19 bp, Mus musculus
  siRNA target sequence for Hivep1 (NM_007772.1,2862-2880).
gtgtgaaacctgtcgaaat

SEQ ID NO: 460149 - DNA, 19 bp, Mus musculus
  siRNA target sequence for Hivep1 (NM_007772.1,2934-2952).
gttacatgggcccaaaaca

SEQ ID NO: 460150 - DNA, 19 bp, Mus musculus
  siRNA target sequence for Hivep1 (NM_007772.1,3051-3069).
gcagacaccccagataaga

SEQ ID NO: 460151 - DNA, 19 bp, Mus musculus
  siRNA target sequence for Hivep1 (NM_007772.1,3392-3410).
ggcccaattcatttgacaa

SEQ ID NO: 460152 - DNA, 19 bp, Mus musculus
  siRNA target sequence for Hivep1 (NM_007772.1,3479-3497).
ccctgaaagtgataggaat

SEQ ID NO: 460153 - DNA, 19 bp, Mus musculus
  siRNA target sequence for Hivep1 (NM_007772.1,3538-3556).
cagacagcactgtcacata

SEQ ID NO: 460154 - DNA, 19 bp, Mus musculus
  siRNA target sequence for Hivep1 (NM_007772.1,3595-3613).
ccaagtgagcggtatgtgt

SEQ ID NO: 460155 - DNA, 19 bp, Mus musculus
  siRNA target sequence for Hivep1 (NM_007772.1,3596-3614).
caagtgagcggtatgtgtt

SEQ ID NO: 460156 - DNA, 19 bp, Mus musculus
  siRNA target sequence for Hivep1 (NM_007772.1,3745-3763).
cagcgtagtgaaaccttat

SEQ ID NO: 460157 - DNA, 19 bp, Mus musculus
  siRNA target sequence for Hivep1 (NM_007772.1,3747-3765).
gcgtagtgaaaccttatca

SEQ ID NO: 460158 - DNA, 19 bp, Mus musculus
  siRNA target sequence for Hivep1 (NM_007772.1,3748-3766).
cgtagtgaaaccttatcaa

SEQ ID NO: 460159 - DNA, 19 bp, Mus musculus
  siRNA target sequence for Hivep1 (NM_007772.1,3804-3822).
gcttcggctggctgagata

SEQ ID NO: 460160 - DNA, 19 bp, Mus musculus
  siRNA target sequence for Hivep1 (NM_007772.1,3914-3932).
cctccctagacctagaaga

SEQ ID NO: 460161 - DNA, 19 bp, Mus musculus
  siRNA target sequence for Hivep1 (NM_007772.1,3919-3937).
ctagacctagaagacattt

SEQ ID NO: 460162 - DNA, 19 bp, Mus musculus
  siRNA target sequence for Hivep1 (NM_007772.1,4054-4072).
gcatcagagcagatcagtt

SEQ ID NO: 460163 - DNA, 19 bp, Mus musculus
  siRNA target sequence for Hivep1 (NM_007772.1,4146-4164).
cgtggtgccagcacttgtt

SEQ ID NO: 460164 - DNA, 19 bp, Mus musculus
  siRNA target sequence for Hivep1 (NM_007772.1,4149-4167).
ggtgccagcacttgttgaa

SEQ ID NO: 460165 - DNA, 19 bp, Mus musculus
  siRNA target sequence for Hivep1 (NM_007772.1,4150-4168).
gtgccagcacttgttgaat

SEQ ID NO: 460166 - DNA, 19 bp, Mus musculus
  siRNA target sequence for Hivep1 (NM_007772.1,4152-4170).
gccagcacttgttgaatca

SEQ ID NO: 460167 - DNA, 19 bp, Mus musculus
  siRNA target sequence for Hivep1 (NM_007772.1,4154-4172).
cagcacttgttgaatcaca

SEQ ID NO: 460168 - DNA, 19 bp, Mus musculus
  siRNA target sequence for Hivep1 (NM_007772.1,4208-4226).
cacacgtgccccttctaga

SEQ ID NO: 460169 - DNA, 19 bp, Mus musculus
  siRNA target sequence for Hivep1 (NM_007772.1,4240-4258).
cccctgattcggcaaatat

SEQ ID NO: 460170 - DNA, 19 bp, Mus musculus
  siRNA target sequence for Hivep1 (NM_007772.1,4242-4260).
cctgattcggcaaatatct

SEQ ID NO: 460171 - DNA, 19 bp, Mus musculus
  siRNA target sequence for Hivep1 (NM_007772.1,4243-4261).
ctgattcggcaaatatctt

SEQ ID NO: 460172 - DNA, 19 bp, Mus musculus
  siRNA target sequence for Hivep1 (NM_007772.1,4245-4263).
gattcggcaaatatcttta

SEQ ID NO: 460173 - DNA, 19 bp, Mus musculus
  siRNA target sequence for Hivep1 (NM_007772.1,4307-4325).
ctctccaaaccattgttct

SEQ ID NO: 460174 - DNA, 19 bp, Mus musculus
  siRNA target sequence for Hivep1 (NM_007772.1,4426-4444).
gatcttcaggcagaaattt

SEQ ID NO: 460175 - DNA, 19 bp, Mus musculus
  siRNA target sequence for Hivep1 (NM_007772.1,4429-4447).
cttcaggcagaaatttcaa

SEQ ID NO: 460176 - DNA, 19 bp, Mus musculus
  siRNA target sequence for Hivep1 (NM_007772.1,4452-4470).
cagctctacggacacattt

SEQ ID NO: 460177 - DNA, 19 bp, Mus musculus
  siRNA target sequence for Hivep1 (NM_007772.1,4455-4473).
ctctacggacacatttcct

SEQ ID NO: 460178 - DNA, 19 bp, Mus musculus
  siRNA target sequence for Hivep1 (NM_007772.1,4464-4482).
cacatttcctcctcaacaa

SEQ ID NO: 460179 - DNA, 19 bp, Mus musculus
  siRNA target sequence for Hivep1 (NM_007772.1,4489-4507).
ggtgcccatttattaaaca

SEQ ID NO: 460180 - DNA, 19 bp, Mus musculus
  siRNA target sequence for Hivep1 (NM_007772.1,4511-4529).
ccaatacatcccttagtca

SEQ ID NO: 460181 - DNA, 19 bp, Mus musculus
  siRNA target sequence for Hivep1 (NM_007772.1,4517-4535).
catcccttagtcaccaaaa

SEQ ID NO: 460182 - DNA, 19 bp, Mus musculus
  siRNA target sequence for Hivep1 (NM_007772.1,4608-4626).
gacaggggagggtagcttt

SEQ ID NO: 460183 - DNA, 19 bp, Mus musculus
  siRNA target sequence for Hivep1 (NM_007772.1,4689-4707).
gcgttcttcacctaatcaa

SEQ ID NO: 460184 - DNA, 19 bp, Mus musculus
  siRNA target sequence for Hivep1 (NM_007772.1,4691-4709).
gttcttcacctaatcaagt

SEQ ID NO: 460185 - DNA, 19 bp, Mus musculus
  siRNA target sequence for Hivep1 (NM_007772.1,4888-4906).
gtgacagtggactgtttca

SEQ ID NO: 460186 - DNA, 19 bp, Mus musculus
  siRNA target sequence for Hivep1 (NM_007772.1,4959-4977).
gccaatttgccaaactaat

SEQ ID NO: 460187 - DNA, 19 bp, Mus musculus
  siRNA target sequence for Hivep1 (NM_007772.1,4961-4979).
caatttgccaaactaatca

SEQ ID NO: 460188 - DNA, 19 bp, Mus musculus
  siRNA target sequence for Hivep1 (NM_007772.1,4967-4985).
gccaaactaatcaaagtct

SEQ ID NO: 460189 - DNA, 19 bp, Mus musculus
  siRNA target sequence for Hivep1 (NM_007772.1,4990-5008).
ccagtcagcgaagaacaaa

SEQ ID NO: 460190 - DNA, 19 bp, Mus musculus
  siRNA target sequence for Hivep1 (NM_007772.1,4993-5011).
gtcagcgaagaacaaaatt

SEQ ID NO: 460191 - DNA, 19 bp, Mus musculus
  siRNA target sequence for Hivep1 (NM_007772.1,4997-5015).
gcgaagaacaaaattccat

SEQ ID NO: 460192 - DNA, 19 bp, Mus musculus
  siRNA target sequence for Hivep1 (NM_007772.1,5018-5036).
caaaatcacagaactatct

SEQ ID NO: 460193 - DNA, 19 bp, Mus musculus
  siRNA target sequence for Hivep1 (NM_007772.1,5123-5141).
cctcgccgacagttcagaa

SEQ ID NO: 460194 - DNA, 19 bp, Mus musculus
  siRNA target sequence for Hivep1 (NM_007772.1,5206-5224).
ccagcaaatagtttagaca

SEQ ID NO: 460195 - DNA, 19 bp, Mus musculus
  siRNA target sequence for Hivep1 (NM_007772.1,5207-5225).
cagcaaatagtttagacat

SEQ ID NO: 460196 - DNA, 19 bp, Mus musculus
  siRNA target sequence for Hivep1 (NM_007772.1,5260-5278).
gagaacggagctgtttgta

SEQ ID NO: 460197 - DNA, 19 bp, Mus musculus
  siRNA target sequence for Hivep1 (NM_007772.1,5432-5450).
gcaacaaggctgctaattt

SEQ ID NO: 460198 - DNA, 19 bp, Mus musculus
  siRNA target sequence for Hivep1 (NM_007772.1,5457-5475).
ggttttaccaactgatagt

SEQ ID NO: 460199 - DNA, 19 bp, Mus musculus
  siRNA target sequence for Hivep1 (NM_007772.1,5614-5632).
cctttgaagtctatagaca

SEQ ID NO: 460200 - DNA, 19 bp, Mus musculus
  siRNA target sequence for Hivep1 (NM_007772.1,5648-5666).
ggtcgccaggggttagaca

SEQ ID NO: 460201 - DNA, 19 bp, Mus musculus
  siRNA target sequence for Hivep1 (NM_007772.1,5649-5667).
gtcgccaggggttagacat

SEQ ID NO: 460202 - DNA, 19 bp, Mus musculus
  siRNA target sequence for Hivep1 (NM_007772.1,5652-5670).
gccaggggttagacatgaa

SEQ ID NO: 460203 - DNA, 19 bp, Mus musculus
  siRNA target sequence for Hivep1 (NM_007772.1,5654-5672).
caggggttagacatgaaga

SEQ ID NO: 460204 - DNA, 19 bp, Mus musculus
  siRNA target sequence for Hivep1 (NM_007772.1,5739-5757).
cactcaacagccgtcattt

SEQ ID NO: 460205 - DNA, 19 bp, Mus musculus
  siRNA target sequence for Hivep1 (NM_007772.1,5766-5784).
caagactgcaactagcttt

SEQ ID NO: 460206 - DNA, 19 bp, Mus musculus
  siRNA target sequence for Hivep1 (NM_007772.1,5769-5787).
gactgcaactagctttaca

SEQ ID NO: 460207 - DNA, 19 bp, Mus musculus
  siRNA target sequence for Hivep1 (NM_007772.1,5951-5969).
cactgtattgccaagcaat

SEQ ID NO: 460208 - DNA, 19 bp, Mus musculus
  siRNA target sequence for Hivep1 (NM_007772.1,5953-5971).
ctgtattgccaagcaataa

SEQ ID NO: 460209 - DNA, 19 bp, Mus musculus
  siRNA target sequence for Hivep1 (NM_007772.1,5966-5984).
caataaccacccattcaaa

SEQ ID NO: 460210 - DNA, 19 bp, Mus musculus
  siRNA target sequence for Hivep1 (NM_007772.1,5972-5990).
ccacccattcaaaatcaga

SEQ ID NO: 460211 - DNA, 19 bp, Mus musculus
  siRNA target sequence for Hivep1 (NM_007772.1,5975-5993).
cccattcaaaatcagattt

SEQ ID NO: 460212 - DNA, 19 bp, Mus musculus
  siRNA target sequence for Hivep1 (NM_007772.1,6160-6178).
gacggaggatacaagtcaa

SEQ ID NO: 460213 - DNA, 19 bp, Mus musculus
  siRNA target sequence for Hivep1 (NM_007772.1,6162-6180).
cggaggatacaagtcaaat

SEQ ID NO: 460214 - DNA, 19 bp, Mus musculus
  siRNA target sequence for Hivep1 (NM_007772.1,6468-6486).
cgagcggtctggatatgat

SEQ ID NO: 460215 - DNA, 19 bp, Mus musculus
  siRNA target sequence for Hivep1 (NM_007772.1,6471-6489).
gcggtctggatatgatctt

SEQ ID NO: 460216 - DNA, 19 bp, Mus musculus
  siRNA target sequence for Hivep1 (NM_007772.1,6473-6491).
ggtctggatatgatcttga

SEQ ID NO: 460217 - DNA, 19 bp, Mus musculus
  siRNA target sequence for Hivep1 (NM_007772.1,6669-6687).
cttctcaggggtacataca

SEQ ID NO: 460218 - DNA, 19 bp, Mus musculus
  siRNA target sequence for Hivep1 (NM_007772.1,6993-7011).
gccggctgccaggatttct

SEQ ID NO: 460219 - DNA, 19 bp, Mus musculus
  siRNA target sequence for Hivep1 (NM_007772.1,6994-7012).
ccggctgccaggatttctt

SEQ ID NO: 460220 - DNA, 19 bp, Mus musculus
  siRNA target sequence for Hivep1 (NM_007772.1,7088-7106).
ccccgcagacacatctgtt

SEQ ID NO: 460221 - DNA, 19 bp, Mus musculus
  siRNA target sequence for Hivep1 (NM_007772.1,7248-7266).
ccccgctgtgagtgttatt

SEQ ID NO: 460222 - DNA, 19 bp, Mus musculus
  siRNA target sequence for Hivep1 (NM_007772.1,7250-7268).
ccgctgtgagtgttattca

SEQ ID NO: 460223 - DNA, 19 bp, Mus musculus
  siRNA target sequence for Hivep1 (NM_007772.1,7252-7270).
gctgtgagtgttattcaca

SEQ ID NO: 460224 - DNA, 19 bp, Mus musculus
  siRNA target sequence for Hivep1 (NM_007772.1,7350-7368).
cagtgttgtgccctgtatt

SEQ ID NO: 460225 - DNA, 19 bp, Mus musculus
  siRNA target sequence for Hivep1 (NM_007772.1,7523-7541).
cagtggggctccaggtttt

SEQ ID NO: 460226 - DNA, 19 bp, Mus musculus
  siRNA target sequence for Hivep1 (NM_007772.1,7571-7589).
ccccaccggcacacattca

SEQ ID NO: 460227 - DNA, 19 bp, Mus musculus
  siRNA target sequence for Hivep1 (NM_007772.1,7806-7824).
ccacgcaaggcctgaagat

SEQ ID NO: 460228 - DNA, 19 bp, Mus musculus
  siRNA target sequence for Hivep1 (NM_007772.1,7807-7825).
cacgcaaggcctgaagatt

SEQ ID NO: 460229 - DNA, 19 bp, Mus musculus
  siRNA target sequence for Hivep1 (NM_007772.1,7809-7827).
cgcaaggcctgaagattca

SEQ ID NO: 460230 - DNA, 19 bp, Mus musculus
  siRNA target sequence for Hivep1 (NM_007772.1,7816-7834).
cctgaagattcaaccaaaa

SEQ ID NO: 460231 - DNA, 19 bp, Mus musculus
  siRNA target sequence for Hivep1 (NM_007772.1,7817-7835).
ctgaagattcaaccaaaat

SEQ ID NO: 460232 - DNA, 19 bp, Mus musculus
  siRNA target sequence for Hivep1 (NM_007772.1,7853-7871).
cctctgcgggtcatgtgtt

SEQ ID NO: 460233 - DNA, 19 bp, Mus musculus
  siRNA target sequence for Hivep1 (NM_007772.1,7904-7922).
cacccacaccggaagcttt

SEQ ID NO: 460234 - DNA, 19 bp, Mus musculus
  siRNA target sequence for Hivep1 (NM_007772.1,7907-7925).
ccacaccggaagctttaca

SEQ ID NO: 460235 - DNA, 19 bp, Mus musculus
  siRNA target sequence for Hivep1 (NM_007772.1,7910-7928).
caccggaagctttacagaa

SEQ ID NO: 460236 - DNA, 19 bp, Mus musculus
  siRNA target sequence for Hivep1 (NM_007772.1,7913-7931).
cggaagctttacagaaagt

SEQ ID NO: 460237 - DNA, 19 bp, Mus musculus
  siRNA target sequence for Hivep1 (NM_007772.1,7997-8015).
ggcagcccattgtacactt

SEQ ID NO: 460238 - DNA, 19 bp, Mus musculus
  siRNA target sequence for Hivep1 (NM_007772.1,8040-8058).
cgaggacaggcttgtcata

SEQ ID NO: 460239 - DNA, 19 bp, Mus musculus
  siRNA target sequence for Hlf (NM_172563.2,637-655).
cctgaagacgcatttagta

SEQ ID NO: 460240 - DNA, 19 bp, Mus musculus
  siRNA target sequence for Hlf (NM_172563.2,638-656).
ctgaagacgcatttagtaa

SEQ ID NO: 460241 - DNA, 19 bp, Mus musculus
  siRNA target sequence for Hlf (NM_172563.2,645-663).
cgcatttagtaaagaaaaa

SEQ ID NO: 460242 - DNA, 19 bp, Mus musculus
  siRNA target sequence for Hlf (NM_172563.2,754-772).
ccctatgacggagatactt

SEQ ID NO: 460243 - DNA, 19 bp, Mus musculus
  siRNA target sequence for Hlf (NM_172563.2,755-773).
cctatgacggagatacttt

SEQ ID NO: 460244 - DNA, 19 bp, Mus musculus
  siRNA target sequence for Hlf (NM_172563.2,770-788).
ctttccagctggaatacat

SEQ ID NO: 460245 - DNA, 19 bp, Mus musculus
  siRNA target sequence for Hlf (NM_172563.2,993-1011).
gccagcaaaccgcaataca

SEQ ID NO: 460246 - DNA, 19 bp, Mus musculus
  siRNA target sequence for Hlf (NM_172563.2,1041-1059).
ggtaccagtcgggtatgaa

SEQ ID NO: 460247 - DNA, 19 bp, Mus musculus
  siRNA target sequence for Hlf (NM_172563.2,1217-1235).
gggcgaggcgcagaaagaa

SEQ ID NO: 460248 - DNA, 19 bp, Mus musculus
  siRNA target sequence for Hlf (NM_172563.2,1219-1237).
gcgaggcgcagaaagaaca

SEQ ID NO: 460249 - DNA, 19 bp, Mus musculus
  siRNA target sequence for Hmg20a (NM_025812.2,279-297).
ggcttccaatgctgtagaa

SEQ ID NO: 460250 - DNA, 19 bp, Mus musculus
  siRNA target sequence for Hmg20a (NM_025812.2,402-420).
cccccttacaggatatgtt

SEQ ID NO: 460251 - DNA, 19 bp, Mus musculus
  siRNA target sequence for Hmg20a (NM_025812.2,426-444).
catgaacgagcgtagagaa

SEQ ID NO: 460252 - DNA, 19 bp, Mus musculus
  siRNA target sequence for Hmg20a (NM_025812.2,500-518).
gcaatgagtggagtaaact

SEQ ID NO: 460253 - DNA, 19 bp, Mus musculus
  siRNA target sequence for Hmg20a (NM_025812.2,560-578).
gagataaggagcgttacat

SEQ ID NO: 460254 - DNA, 19 bp, Mus musculus
  siRNA target sequence for Hmg20a (NM_025812.2,562-580).
gataaggagcgttacatga

SEQ ID NO: 460255 - DNA, 19 bp, Mus musculus
  siRNA target sequence for Hmg20a (NM_025812.2,610-628).
gcctacaaggtcttcagta

SEQ ID NO: 460256 - DNA, 19 bp, Mus musculus
  siRNA target sequence for Hmg20a (NM_025812.2,642-660).
ccgtcagaaaggcaaatct

SEQ ID NO: 460257 - DNA, 19 bp, Mus musculus
  siRNA target sequence for Hmg20a (NM_025812.2,678-696).
ccgacaggccactcatgat

SEQ ID NO: 460258 - DNA, 19 bp, Mus musculus
  siRNA target sequence for Hmg20a (NM_025812.2,680-698).
gacaggccactcatgatca

SEQ ID NO: 460259 - DNA, 19 bp, Mus musculus
  siRNA target sequence for Hmg20a (NM_025812.2,720-738).
ggaacgctctgtttttgat

SEQ ID NO: 460260 - DNA, 19 bp, Mus musculus
  siRNA target sequence for Hmg20a (NM_025812.2,721-739).
gaacgctctgtttttgata

SEQ ID NO: 460261 - DNA, 19 bp, Mus musculus
  siRNA target sequence for Hmg20a (NM_025812.2,730-748).
gtttttgatatccctatat

SEQ ID NO: 460262 - DNA, 19 bp, Mus musculus
  siRNA target sequence for Hmg20a (NM_025812.2,743-761).
ctatatttaccgaagaatt

SEQ ID NO: 460263 - DNA, 19 bp, Mus musculus
  siRNA target sequence for Hmg20a (NM_025812.2,792-810).
gctccgccagcttcgtaaa

SEQ ID NO: 460264 - DNA, 19 bp, Mus musculus
  siRNA target sequence for Hmg20a (NM_025812.2,793-811).
ctccgccagcttcgtaaat

SEQ ID NO: 460265 - DNA, 19 bp, Mus musculus
  siRNA target sequence for Hmg20a (NM_025812.2,833-851).
ggaacgcagccctacagaa

SEQ ID NO: 460266 - DNA, 19 bp, Mus musculus
  siRNA target sequence for Hmg20a (NM_025812.2,1097-1115).
cagtccgagaggttgtgaa

SEQ ID NO: 460267 - DNA, 19 bp, Mus musculus
  siRNA target sequence for Hmga1 (NM_016660.1,419-437).
ggggcagacccaagaaact

SEQ ID NO: 460268 - DNA, 19 bp, Mus musculus
  siRNA target sequence for Hmga2 (NM_010441.1,1142-1160).
ggaaatggccacaacaagt

SEQ ID NO: 460269 - DNA, 19 bp, Mus musculus
  siRNA target sequence for Hmga2 (NM_010441.1,1151-1169).
cacaacaagtcgttcagaa

SEQ ID NO: 460270 - DNA, 19 bp, Mus musculus
  siRNA target sequence for Hmgb2l1 (NM_178017.1,200-218).
gccgaagccaacgagaaaa

SEQ ID NO: 460271 - DNA, 19 bp, Mus musculus
  siRNA target sequence for Hmgb2l1 (NM_178017.1,352-370).
cactcccctgacgattact

SEQ ID NO: 460272 - DNA, 19 bp, Mus musculus
  siRNA target sequence for Hmgb2l1 (NM_178017.1,379-397).
gacatttcgactttggaat

SEQ ID NO: 460273 - DNA, 19 bp, Mus musculus
  siRNA target sequence for Hmgb2l1 (NM_178017.1,607-625).
gacagcaatgcccacaaat

SEQ ID NO: 460274 - DNA, 19 bp, Mus musculus
  siRNA target sequence for Hmgb2l1 (NM_178017.1,676-694).
gagccagatggcttaaaga

SEQ ID NO: 460275 - DNA, 19 bp, Mus musculus
  siRNA target sequence for Hmgb2l1 (NM_178017.1,680-698).
cagatggcttaaagatgaa

SEQ ID NO: 460276 - DNA, 19 bp, Mus musculus
  siRNA target sequence for Hmgb2l1 (NM_178017.1,686-704).
gcttaaagatgaaactcat

SEQ ID NO: 460277 - DNA, 19 bp, Mus musculus
  siRNA target sequence for Hmgb2l1 (NM_178017.1,783-801).
gaagccctcgaagaaacta

SEQ ID NO: 460278 - DNA, 19 bp, Mus musculus
  siRNA target sequence for Hmgb2l1 (NM_178017.1,807-825).
ggacgagcaaggtgcttta

SEQ ID NO: 460279 - DNA, 19 bp, Mus musculus
  siRNA target sequence for Hmgb2l1 (NM_178017.1,974-992).
cagggcttgacccaattct

SEQ ID NO: 460280 - DNA, 19 bp, Mus musculus
  siRNA target sequence for Hmgb2l1 (NM_178017.1,977-995).
ggcttgacccaattctagt

SEQ ID NO: 460281 - DNA, 19 bp, Mus musculus
  siRNA target sequence for Hmgb2l1 (NM_178017.1,978-996).
gcttgacccaattctagta

SEQ ID NO: 460282 - DNA, 19 bp, Mus musculus
  siRNA target sequence for Hmgb2l1 (NM_178017.1,1042-1060).
gtgatagatgactcttaca

SEQ ID NO: 460283 - DNA, 19 bp, Mus musculus
  siRNA target sequence for Hmgb2l1 (NM_178017.1,1135-1153).
cactcccggaccaagagaa

SEQ ID NO: 460284 - DNA, 19 bp, Mus musculus
  siRNA target sequence for Hmgb2l1 (NM_178017.1,1356-1374).
ggagtaccgggtaaccatt

SEQ ID NO: 460285 - DNA, 19 bp, Mus musculus
  siRNA target sequence for Hmgb2l1 (NM_178017.1,1377-1395).
ggctgaccatccaggtata

SEQ ID NO: 460286 - DNA, 19 bp, Mus musculus
  siRNA target sequence for Hmgb2l1 (NM_178017.1,1381-1399).
gaccatccaggtatagatt

SEQ ID NO: 460287 - DNA, 19 bp, Mus musculus
  siRNA target sequence for Hmgb2l1 (NM_178017.1,1383-1401).
ccatccaggtatagatttt

SEQ ID NO: 460288 - DNA, 19 bp, Mus musculus
  siRNA target sequence for Hmgb2l1 (NM_178017.1,1396-1414).
gattttggggaacttagta

SEQ ID NO: 460289 - DNA, 19 bp, Mus musculus
  siRNA target sequence for Hmgb2l1 (NM_178017.1,1582-1600).
gtactgtcaccccaaaaga

SEQ ID NO: 460290 - DNA, 19 bp, Mus musculus
  siRNA target sequence for Hmgb2l1 (NM_178017.1,1766-1784).
cagtgctcctagattccat

SEQ ID NO: 460291 - DNA, 19 bp, Mus musculus
  siRNA target sequence for Hmgb2l1 (NM_178017.1,1773-1791).
cctagattccattatctgt

SEQ ID NO: 460292 - DNA, 19 bp, Mus musculus
  siRNA target sequence for Hmgb2l1 (NM_178017.1,1847-1865).
ctaaacaggtcttgtcaaa

SEQ ID NO: 460293 - DNA, 19 bp, Mus musculus
  siRNA target sequence for Hmgb2l1 (NM_178017.1,1862-1880).
caaacacgctggacaacat

SEQ ID NO: 460294 - DNA, 19 bp, Mus musculus
  siRNA target sequence for Hmgb2l1 (NM_178017.1,1868-1886).
cgctggacaacattgcata

SEQ ID NO: 460295 - DNA, 19 bp, Mus musculus
  siRNA target sequence for Hnrpab (NM_010448.2,419-437).
gaggacgcgggaaaaatgt

SEQ ID NO: 460296 - DNA, 19 bp, Mus musculus
  siRNA target sequence for Hnrpab (NM_010448.2,481-499).
ggattattttactaagttt

SEQ ID NO: 460297 - DNA, 19 bp, Mus musculus
  siRNA target sequence for Hnrpab (NM_010448.2,503-521).
gaggttgttgactgtacaa

SEQ ID NO: 460298 - DNA, 19 bp, Mus musculus
  siRNA target sequence for Hnrpab (NM_010448.2,505-523).
ggttgttgactgtacaata

SEQ ID NO: 460299 - DNA, 19 bp, Mus musculus
  siRNA target sequence for Hnrpab (NM_010448.2,506-524).
gttgttgactgtacaataa

SEQ ID NO: 460300 - DNA, 19 bp, Mus musculus
  siRNA target sequence for Hnrpab (NM_010448.2,535-553).
caacactggacgatcaaga

SEQ ID NO: 460301 - DNA, 19 bp, Mus musculus
  siRNA target sequence for Hnrpab (NM_010448.2,633-651).
gtgtcattgaccctaaaaa

SEQ ID NO: 460302 - DNA, 19 bp, Mus musculus
  siRNA target sequence for Hnrpab (NM_010448.2,763-781).
ggccattgagcttccaata

SEQ ID NO: 460303 - DNA, 19 bp, Mus musculus
  siRNA target sequence for Hnrpab (NM_010448.2,765-783).
ccattgagcttccaataga

SEQ ID NO: 460304 - DNA, 19 bp, Mus musculus
  siRNA target sequence for Hnrpab (NM_010448.2,766-784).
cattgagcttccaatagat

SEQ ID NO: 460305 - DNA, 19 bp, Mus musculus
  siRNA target sequence for Hnrpab (NM_010448.2,776-794).
ccaatagatcccaagttga

SEQ ID NO: 460306 - DNA, 19 bp, Mus musculus
  siRNA target sequence for Hnrpab (NM_010448.2,990-1008).
gaggtcagggtagtacaaa

SEQ ID NO: 460307 - DNA, 19 bp, Mus musculus
  siRNA target sequence for Hnrpab (NM_010448.2,992-1010).
ggtcagggtagtacaaatt

SEQ ID NO: 460308 - DNA, 19 bp, Mus musculus
  siRNA target sequence for Hnrpab (NM_010448.2,993-1011).
gtcagggtagtacaaatta

SEQ ID NO: 460309 - DNA, 19 bp, Mus musculus
  siRNA target sequence for Hnrpab (NM_010448.2,1026-1044).
gacgtggtggtcatcagaa

SEQ ID NO: 460310 - DNA, 19 bp, Mus musculus
  siRNA target sequence for Hnrpab (NM_010448.2,1029-1047).
gtggtggtcatcagaataa

SEQ ID NO: 460311 - DNA, 19 bp, Mus musculus
  siRNA target sequence for Hnrpab (NM_010448.2,1031-1049).
ggtggtcatcagaataact

SEQ ID NO: 460312 - DNA, 19 bp, Mus musculus
  siRNA target sequence for Hnrpab (NM_010448.2,1035-1053).
gtcatcagaataactacaa

SEQ ID NO: 460313 - DNA, 19 bp, Mus musculus
  siRNA target sequence for Hnrpd (NM_007516.1,272-290).
gaggatgaaggccattcaa

SEQ ID NO: 460314 - DNA, 19 bp, Mus musculus
  siRNA target sequence for Hnrpd (NM_007516.1,394-412).
ctacttttccaaatttggt

SEQ ID NO: 460315 - DNA, 19 bp, Mus musculus
  siRNA target sequence for Hnrpd (NM_007516.1,424-442).
ctgcactctgaagttagat

SEQ ID NO: 460316 - DNA, 19 bp, Mus musculus
  siRNA target sequence for Hnrpd (NM_007516.1,433-451).
gaagttagatcctatcaca

SEQ ID NO: 460317 - DNA, 19 bp, Mus musculus
  siRNA target sequence for Hnrpd (NM_007516.1,492-510).
cggagagtgtagataaggt

SEQ ID NO: 460318 - DNA, 19 bp, Mus musculus
  siRNA target sequence for Hnrpd (NM_007516.1,515-533).
gatcagaaagaacataaat

SEQ ID NO: 460319 - DNA, 19 bp, Mus musculus
  siRNA target sequence for Hnrpd (NM_007516.1,541-559).
gaaagtcattgatcctaaa

SEQ ID NO: 460320 - DNA, 19 bp, Mus musculus
  siRNA target sequence for Hnrpd (NM_007516.1,719-737).
gggttctgttttattacct

SEQ ID NO: 460321 - DNA, 19 bp, Mus musculus
  siRNA target sequence for Hnrpd (NM_007516.1,781-799).
ccacaatgttggtcttagt

SEQ ID NO: 460322 - DNA, 19 bp, Mus musculus
  siRNA target sequence for Hnrpd (NM_007516.1,782-800).
cacaatgttggtcttagta

SEQ ID NO: 460323 - DNA, 19 bp, Mus musculus
  siRNA target sequence for Hnrpd (NM_007516.1,784-802).
caatgttggtcttagtaaa

SEQ ID NO: 460324 - DNA, 19 bp, Mus musculus
  siRNA target sequence for Hnrpd (NM_007516.1,932-950).
gcgaggtggacatcaaaat

SEQ ID NO: 460325 - DNA, 19 bp, Mus musculus
  siRNA target sequence for Hnrpk (NM_025279.1,182-200).
ccccaacaccgaaaccaat

SEQ ID NO: 460326 - DNA, 19 bp, Mus musculus
  siRNA target sequence for Hnrpk (NM_025279.1,190-208).
ccgaaaccaatggtgaatt

SEQ ID NO: 460327 - DNA, 19 bp, Mus musculus
  siRNA target sequence for Hnrpk (NM_025279.1,191-209).
cgaaaccaatggtgaattt

SEQ ID NO: 460328 - DNA, 19 bp, Mus musculus
  siRNA target sequence for Hnrpk (NM_025279.1,1341-1359).
gatttggctggatctatta

SEQ ID NO: 460329 - DNA, 19 bp, Mus musculus
  siRNA target sequence for Hnrpk (NM_025279.1,1371-1389).
ggtcagcggattaaacaaa

SEQ ID NO: 460330 - DNA, 19 bp, Mus musculus
  siRNA target sequence for Hnrpk (NM_025279.1,1376-1394).
gcggattaaacaaattcgt

SEQ ID NO: 460331 - DNA, 19 bp, Mus musculus
  siRNA target sequence for Hnrpk (NM_025279.1,1520-1538).
gcagtattctggaaagttt

SEQ ID NO: 460332 - DNA, 19 bp, Mus musculus
  siRNA target sequence for Hnrpu (NM_016805.1,159-177).
gagttcttcgcctgttaat

SEQ ID NO: 460333 - DNA, 19 bp, Mus musculus
  siRNA target sequence for Hnrpu (NM_016805.1,164-182).
cttcgcctgttaatgtcaa

SEQ ID NO: 460334 - DNA, 19 bp, Mus musculus
  siRNA target sequence for Hnrpu (NM_016805.1,167-185).
cgcctgttaatgtcaagaa

SEQ ID NO: 460335 - DNA, 19 bp, Mus musculus
  siRNA target sequence for Hnrpu (NM_016805.1,242-260).
gcctcaaggccgatctcat

SEQ ID NO: 460336 - DNA, 19 bp, Mus musculus
  siRNA target sequence for Hnrpu (NM_016805.1,767-785).
gaggagacggcaaaacaga

SEQ ID NO: 460337 - DNA, 19 bp, Mus musculus
  siRNA target sequence for Hnrpu (NM_016805.1,838-856).
ggccgagggtattttgagt

SEQ ID NO: 460338 - DNA, 19 bp, Mus musculus
  siRNA target sequence for Hnrpu (NM_016805.1,839-857).
gccgagggtattttgagta

SEQ ID NO: 460339 - DNA, 19 bp, Mus musculus
  siRNA target sequence for Hnrpu (NM_016805.1,899-917).
cacctgttgaagaagaaga

SEQ ID NO: 460340 - DNA, 19 bp, Mus musculus
  siRNA target sequence for Hnrpu (NM_016805.1,933-951).
cacagtggtttgtcttgat

SEQ ID NO: 460341 - DNA, 19 bp, Mus musculus
  siRNA target sequence for Hnrpu (NM_016805.1,1007-1025).
cccttactatggagagttt

SEQ ID NO: 460342 - DNA, 19 bp, Mus musculus
  siRNA target sequence for Hnrpu (NM_016805.1,1052-1070).
cttcctacggtgtgtcaaa

SEQ ID NO: 460343 - DNA, 19 bp, Mus musculus
  siRNA target sequence for Hnrpu (NM_016805.1,1111-1129).
ccagtaagacacttatata

SEQ ID NO: 460344 - DNA, 19 bp, Mus musculus
  siRNA target sequence for Hnrpu (NM_016805.1,1114-1132).
gtaagacacttatatacaa

SEQ ID NO: 460345 - DNA, 19 bp, Mus musculus
  siRNA target sequence for Hnrpu (NM_016805.1,1118-1136).
gacacttatatacaaaaga

SEQ ID NO: 460346 - DNA, 19 bp, Mus musculus
  siRNA target sequence for Hnrpu (NM_016805.1,1156-1174).
cggattggctggtcactaa

SEQ ID NO: 460347 - DNA, 19 bp, Mus musculus
  siRNA target sequence for Hnrpu (NM_016805.1,1291-1309).
gtgattacatgctttgcta

SEQ ID NO: 460348 - DNA, 19 bp, Mus musculus
  siRNA target sequence for Hnrpu (NM_016805.1,1360-1378).
cttggtgttgcctttaaga

SEQ ID NO: 460349 - DNA, 19 bp, Mus musculus
  siRNA target sequence for Hnrpu (NM_016805.1,1377-1395).
gatcagtaaggaagttctt

SEQ ID NO: 460350 - DNA, 19 bp, Mus musculus
  siRNA target sequence for Hnrpu (NM_016805.1,1406-1424).
cactattcccacatgttct

SEQ ID NO: 460351 - DNA, 19 bp, Mus musculus
  siRNA target sequence for Hnrpu (NM_016805.1,1429-1447).
cataactgtgcagttgaat

SEQ ID NO: 460352 - DNA, 19 bp, Mus musculus
  siRNA target sequence for Hnrpu (NM_016805.1,1436-1454).
gtgcagttgaatttaattt

SEQ ID NO: 460353 - DNA, 19 bp, Mus musculus
  siRNA target sequence for Hnrpu (NM_016805.1,1610-1628).
ctacctgggttactaaaca

SEQ ID NO: 460354 - DNA, 19 bp, Mus musculus
  siRNA target sequence for Hnrpu (NM_016805.1,1653-1671).
caacattcttggaacaaat

SEQ ID NO: 460355 - DNA, 19 bp, Mus musculus
  siRNA target sequence for Hnrpu (NM_016805.1,1761-1779).
gtgtcttggcaagtttatt

SEQ ID NO: 460356 - DNA, 19 bp, Mus musculus
  siRNA target sequence for Hnrpu (NM_016805.1,1791-1809).
ccgtaagaagcgaaatttt

SEQ ID NO: 460357 - DNA, 19 bp, Mus musculus
  siRNA target sequence for Hnrpu (NM_016805.1,1792-1810).
cgtaagaagcgaaatttta

SEQ ID NO: 460358 - DNA, 19 bp, Mus musculus
  siRNA target sequence for Hnrpu (NM_016805.1,1953-1971).
gaaggacctaccagaacat

SEQ ID NO: 460359 - DNA, 19 bp, Mus musculus
  siRNA target sequence for Hnrpu (NM_016805.1,2070-2088).
gcttttggagcaatataaa

SEQ ID NO: 460360 - DNA, 19 bp, Mus musculus
  siRNA target sequence for Hnrpu (NM_016805.1,2134-2152).
ggctcaaagaaaagcaata

SEQ ID NO: 460361 - DNA, 19 bp, Mus musculus
  siRNA target sequence for Hnrpu (NM_016805.1,2198-2216).
gaggccgtggaggattcaa

SEQ ID NO: 460362 - DNA, 19 bp, Mus musculus
  siRNA target sequence for Hnrpu (NM_016805.1,2200-2218).
ggccgtggaggattcaata

SEQ ID NO: 460363 - DNA, 19 bp, Mus musculus
  siRNA target sequence for Hnrpu (NM_016805.1,2201-2219).
gccgtggaggattcaatat

SEQ ID NO: 460364 - DNA, 19 bp, Mus musculus
  siRNA target sequence for Hnrpu (NM_016805.1,2252-2270).
ggaatcgtggtggatataa

SEQ ID NO: 460365 - DNA, 19 bp, Mus musculus
  siRNA target sequence for Hnrpu (NM_016805.1,2253-2271).
gaatcgtggtggatataat

SEQ ID NO: 460366 - DNA, 19 bp, Mus musculus
  siRNA target sequence for Hnrpu (NM_016805.1,2257-2275).
cgtggtggatataatagga

SEQ ID NO: 460367 - DNA, 19 bp, Mus musculus
  siRNA target sequence for Hnrpu (NM_016805.1,2315-2333).
gtggaattggctatccata

SEQ ID NO: 460368 - DNA, 19 bp, Mus musculus
  siRNA target sequence for Hnrpu (NM_016805.1,2356-2374).
ggccgaggtggttactcaa

SEQ ID NO: 460369 - DNA, 19 bp, Mus musculus
  siRNA target sequence for Hnrpu (NM_016805.1,2357-2375).
gccgaggtggttactcaaa

SEQ ID NO: 460370 - DNA, 19 bp, Mus musculus
  siRNA target sequence for Hnrpu (NM_016805.1,2359-2377).
cgaggtggttactcaaaca

SEQ ID NO: 460371 - DNA, 19 bp, Mus musculus
  siRNA target sequence for Hnrpu (NM_016805.1,2452-2470).
cgtggctacaaaaatcaat

SEQ ID NO: 460372 - DNA, 19 bp, Mus musculus
  siRNA target sequence for Hnrpu (NM_016805.1,2456-2474).
gctacaaaaatcaatctca

SEQ ID NO: 460373 - DNA, 19 bp, Mus musculus
  siRNA target sequence for Hnrpu (NM_016805.1,2529-2547).
gcattatcaccaaggatat

SEQ ID NO: 460374 - DNA, 19 bp, Mus musculus
  siRNA target sequence for Hp1bp3 (NM_010470.1,204-222).
gtgaactcatccatcctaa

SEQ ID NO: 460375 - DNA, 19 bp, Mus musculus
  siRNA target sequence for Hp1bp3 (NM_010470.1,223-241).
ggcactcccacttatagta

SEQ ID NO: 460376 - DNA, 19 bp, Mus musculus
  siRNA target sequence for Hp1bp3 (NM_010470.1,305-323).
cgtcgagccgtgaattcta

SEQ ID NO: 460377 - DNA, 19 bp, Mus musculus
  siRNA target sequence for Hp1bp3 (NM_010470.1,664-682).
caagatggacgcaatctta

SEQ ID NO: 460378 - DNA, 19 bp, Mus musculus
  siRNA target sequence for Hp1bp3 (NM_010470.1,723-741).
cggtggttgcgattcgaaa

SEQ ID NO: 460379 - DNA, 19 bp, Mus musculus
  siRNA target sequence for Hp1bp3 (NM_010470.1,728-746).
gttgcgattcgaaagtaca

SEQ ID NO: 460380 - DNA, 19 bp, Mus musculus
  siRNA target sequence for Hp1bp3 (NM_010470.1,731-749).
gcgattcgaaagtacatca

SEQ ID NO: 460381 - DNA, 19 bp, Mus musculus
  siRNA target sequence for Hp1bp3 (NM_010470.1,732-750).
cgattcgaaagtacatcat

SEQ ID NO: 460382 - DNA, 19 bp, Mus musculus
  siRNA target sequence for Hp1bp3 (NM_010470.1,733-751).
gattcgaaagtacatcatt

SEQ ID NO: 460383 - DNA, 19 bp, Mus musculus
  siRNA target sequence for Hp1bp3 (NM_010470.1,737-755).
cgaaagtacatcattcata

SEQ ID NO: 460384 - DNA, 19 bp, Mus musculus
  siRNA target sequence for Hp1bp3 (NM_010470.1,872-890).
gttgtggtccagaaatcaa

SEQ ID NO: 460385 - DNA, 19 bp, Mus musculus
  siRNA target sequence for Hp1bp3 (NM_010470.1,935-953).
gatccagaaccacaagtaa

SEQ ID NO: 460386 - DNA, 19 bp, Mus musculus
  siRNA target sequence for Hp1bp3 (NM_010470.1,965-983).
gttctcccgttggctttta

SEQ ID NO: 460387 - DNA, 19 bp, Mus musculus
  siRNA target sequence for Hp1bp3 (NM_010470.1,984-1002).
ctcggctctgtgaacctaa

SEQ ID NO: 460388 - DNA, 19 bp, Mus musculus
  siRNA target sequence for Hp1bp3 (NM_010470.1,987-1005).
ggctctgtgaacctaaaga

SEQ ID NO: 460389 - DNA, 19 bp, Mus musculus
  siRNA target sequence for Hp1bp3 (NM_010470.1,1027-1045).
gaaatacgtgtctcagtat

SEQ ID NO: 460390 - DNA, 19 bp, Mus musculus
  siRNA target sequence for Hp1bp3 (NM_010470.1,1141-1159).
gggtgcttcggggacattt

SEQ ID NO: 460391 - DNA, 19 bp, Mus musculus
  siRNA target sequence for Hp1bp3 (NM_010470.1,1193-1211).
ggtggaagcctgatggaat

SEQ ID NO: 460392 - DNA, 19 bp, Mus musculus
  siRNA target sequence for Hp1bp3 (NM_010470.1,1194-1212).
gtggaagcctgatggaata

SEQ ID NO: 460393 - DNA, 19 bp, Mus musculus
  siRNA target sequence for Hp1bp3 (NM_010470.1,1263-1281).
ccactgctctgaagaagta

SEQ ID NO: 460394 - DNA, 19 bp, Mus musculus
  siRNA target sequence for Hp1bp3 (NM_010470.1,1299-1317).
caggggccaactctaacta

SEQ ID NO: 460395 - DNA, 19 bp, Mus musculus
  siRNA target sequence for Hp1bp3 (NM_010470.1,1311-1329).
ctaactatcagatgcattt

SEQ ID NO: 460396 - DNA, 19 bp, Mus musculus
  siRNA target sequence for Hp1bp3 (NM_010470.1,1430-1448).
cctagcccaggagttctat

SEQ ID NO: 460397 - DNA, 19 bp, Mus musculus
  siRNA target sequence for Hp1bp3 (NM_010470.1,1431-1449).
ctagcccaggagttctatt

SEQ ID NO: 460398 - DNA, 19 bp, Mus musculus
  siRNA target sequence for Hp1bp3 (NM_010470.1,1495-1513).
cgatgacgatgaatcatca

SEQ ID NO: 460399 - DNA, 19 bp, Mus musculus
  siRNA target sequence for Hp1bp3 (NM_010470.1,1657-1675).
gaggccgctgcctaagaaa

SEQ ID NO: 460400 - DNA, 19 bp, Mus musculus
  siRNA target sequence for Hp1bp3 (NM_010470.1,1814-1832).
gccatgaagaagtctttca

SEQ ID NO: 460401 - DNA, 19 bp, Mus musculus
  siRNA target sequence for hr (NM_021877.2,827-845).
gaacctgctcccttttgga

SEQ ID NO: 460402 - DNA, 19 bp, Mus musculus
  siRNA target sequence for hr (NM_021877.2,1132-1150).
gctggagaccaagattcta

SEQ ID NO: 460403 - DNA, 19 bp, Mus musculus
  siRNA target sequence for hr (NM_021877.2,1207-1225).
gcccccagagcgtccatat

SEQ ID NO: 460404 - DNA, 19 bp, Mus musculus
  siRNA target sequence for hr (NM_021877.2,1209-1227).
ccccagagcgtccatatga

SEQ ID NO: 460405 - DNA, 19 bp, Mus musculus
  siRNA target sequence for hr (NM_021877.2,1211-1229).
ccagagcgtccatatgact

SEQ ID NO: 460406 - DNA, 19 bp, Mus musculus
  siRNA target sequence for hr (NM_021877.2,1241-1259).
ccaaacccatgggtatact

SEQ ID NO: 460407 - DNA, 19 bp, Mus musculus
  siRNA target sequence for hr (NM_021877.2,1260-1278).
ctgggagccagccaaaagt

SEQ ID NO: 460408 - DNA, 19 bp, Mus musculus
  siRNA target sequence for hr (NM_021877.2,1399-1417).
ccagcaagcctgtgaatca

SEQ ID NO: 460409 - DNA, 19 bp, Mus musculus
  siRNA target sequence for hr (NM_021877.2,1700-1718).
cttggcccttgtaggaaat

SEQ ID NO: 460410 - DNA, 19 bp, Mus musculus
  siRNA target sequence for hr (NM_021877.2,1754-1772).
ggggaatccagtgaagaaa

SEQ ID NO: 460411 - DNA, 19 bp, Mus musculus
  siRNA target sequence for hr (NM_021877.2,1811-1829).
cacaccaagctgaaaaaga

SEQ ID NO: 460412 - DNA, 19 bp, Mus musculus
  siRNA target sequence for hr (NM_021877.2,1839-1857).
cacgccactcggaacagtt

SEQ ID NO: 460413 - DNA, 19 bp, Mus musculus
  siRNA target sequence for hr (NM_021877.2,1842-1860).
gccactcggaacagtttga

SEQ ID NO: 460414 - DNA, 19 bp, Mus musculus
  siRNA target sequence for hr (NM_021877.2,1844-1862).
cactcggaacagtttgagt

SEQ ID NO: 460415 - DNA, 19 bp, Mus musculus
  siRNA target sequence for hr (NM_021877.2,2029-2047).
gacaccggagacaatcata

SEQ ID NO: 460416 - DNA, 19 bp, Mus musculus
  siRNA target sequence for hr (NM_021877.2,2215-2233).
cggccactcccagaaatca

SEQ ID NO: 460417 - DNA, 19 bp, Mus musculus
  siRNA target sequence for hr (NM_021877.2,2489-2507).
caccacggactcttcaaca

SEQ ID NO: 460418 - DNA, 19 bp, Mus musculus
  siRNA target sequence for hr (NM_021877.2,2564-2582).
gccggtgctggaaagaaca

SEQ ID NO: 460419 - DNA, 19 bp, Mus musculus
  siRNA target sequence for hr (NM_021877.2,2717-2735).
gtctgggccaagtttgaca

SEQ ID NO: 460420 - DNA, 19 bp, Mus musculus
  siRNA target sequence for hr (NM_021877.2,2967-2985).
cctctactgctgtcaaact

SEQ ID NO: 460421 - DNA, 19 bp, Mus musculus
  siRNA target sequence for hr (NM_021877.2,2993-3011).
gggcatgaccggattcaca

SEQ ID NO: 460422 - DNA, 19 bp, Mus musculus
  siRNA target sequence for hr (NM_021877.2,2994-3012).
ggcatgaccggattcacat

SEQ ID NO: 460423 - DNA, 19 bp, Mus musculus
  siRNA target sequence for hr (NM_021877.2,3045-3063).
gtgatgaccgcattaccaa

SEQ ID NO: 460424 - DNA, 19 bp, Mus musculus
  siRNA target sequence for hr (NM_021877.2,3064-3082).
catcctggacagcattatt

SEQ ID NO: 460425 - DNA, 19 bp, Mus musculus
  siRNA target sequence for hr (NM_021877.2,3278-3296).
ggccagcccgtgttagtgt

SEQ ID NO: 460426 - DNA, 19 bp, Mus musculus
  siRNA target sequence for hr (NM_021877.2,3305-3323).
cagaagacattgagactta

SEQ ID NO: 460427 - DNA, 19 bp, Mus musculus
  siRNA target sequence for hr (NM_021877.2,3444-3462).
ctgagacacgtccaaagtt

SEQ ID NO: 460428 - DNA, 19 bp, Mus musculus
  siRNA target sequence for hr (NM_021877.2,3448-3466).
gacacgtccaaagttagat

SEQ ID NO: 460429 - DNA, 19 bp, Mus musculus
  siRNA target sequence for hr (NM_021877.2,3450-3468).
cacgtccaaagttagatga

SEQ ID NO: 460430 - DNA, 19 bp, Mus musculus
  siRNA target sequence for hr (NM_021877.2,3701-3719).
gtgtctgacctaatcagta

SEQ ID NO: 460431 - DNA, 19 bp, Mus musculus
  siRNA target sequence for hr (NM_021877.2,3751-3769).
ctggtatcgagcacagaaa

SEQ ID NO: 460432 - DNA, 19 bp, Mus musculus
  siRNA target sequence for hr (NM_021877.2,3753-3771).
ggtatcgagcacagaaaga

SEQ ID NO: 460433 - DNA, 19 bp, Mus musculus
  siRNA target sequence for hr (NM_021877.2,3754-3772).
gtatcgagcacagaaagat

SEQ ID NO: 460434 - DNA, 19 bp, Mus musculus
  siRNA target sequence for hr (NM_021877.2,3955-3973).
gcgccgacggctaagagaa

SEQ ID NO: 460435 - DNA, 19 bp, Mus musculus
  siRNA target sequence for hr (NM_021877.2,4058-4076).
ggcctggtgagcacaatca

SEQ ID NO: 460436 - DNA, 19 bp, Mus musculus
  siRNA target sequence for hr (NM_021877.2,4153-4171).
ccctgaccaccgtatgctt

SEQ ID NO: 460437 - DNA, 19 bp, Mus musculus
  siRNA target sequence for hr (NM_021877.2,4155-4173).
ctgaccaccgtatgcttta

SEQ ID NO: 460438 - DNA, 19 bp, Mus musculus
  siRNA target sequence for hr (NM_021877.2,4222-4240).
ggcgttacaggaagctaaa

SEQ ID NO: 460439 - DNA, 19 bp, Mus musculus
  siRNA target sequence for hr (NM_021877.2,4223-4241).
gcgttacaggaagctaaat

SEQ ID NO: 460440 - DNA, 19 bp, Mus musculus
  siRNA target sequence for Hrb (NM_010472.1,312-330).
cgcacaaccgcaagtgttt

SEQ ID NO: 460441 - DNA, 19 bp, Mus musculus
  siRNA target sequence for Hrb (NM_010472.1,350-368).
cccacctacgtgaacatga

SEQ ID NO: 460442 - DNA, 19 bp, Mus musculus
  siRNA target sequence for Hrb (NM_010472.1,402-420).
gcagcctgagagggttaaa

SEQ ID NO: 460443 - DNA, 19 bp, Mus musculus
  siRNA target sequence for Hrb (NM_010472.1,406-424).
cctgagagggttaaatcca

SEQ ID NO: 460444 - DNA, 19 bp, Mus musculus
  siRNA target sequence for Hrb (NM_010472.1,425-443).
cctcacagggtgaaatcta

SEQ ID NO: 460445 - DNA, 19 bp, Mus musculus
  siRNA target sequence for Hrb (NM_010472.1,426-444).
ctcacagggtgaaatctat

SEQ ID NO: 460446 - DNA, 19 bp, Mus musculus
  siRNA target sequence for Hrb (NM_010472.1,428-446).
cacagggtgaaatctatct

SEQ ID NO: 460447 - DNA, 19 bp, Mus musculus
  siRNA target sequence for Hrb (NM_010472.1,456-474).
catttacacaacaggaaat

SEQ ID NO: 460448 - DNA, 19 bp, Mus musculus
  siRNA target sequence for Hrb (NM_010472.1,514-532).
gatatggctaggattattt

SEQ ID NO: 460449 - DNA, 19 bp, Mus musculus
  siRNA target sequence for Hrb (NM_010472.1,519-537).
ggctaggattatttgatga

SEQ ID NO: 460450 - DNA, 19 bp, Mus musculus
  siRNA target sequence for Hrb (NM_010472.1,564-582).
gggatccacaaaaagtgaa

SEQ ID NO: 460451 - DNA, 19 bp, Mus musculus
  siRNA target sequence for Hrb (NM_010472.1,565-583).
ggatccacaaaaagtgaaa

SEQ ID NO: 460452 - DNA, 19 bp, Mus musculus
  siRNA target sequence for Hrb (NM_010472.1,655-673).
ggttcatgcgtctatttca

SEQ ID NO: 460453 - DNA, 19 bp, Mus musculus
  siRNA target sequence for Hrb (NM_010472.1,744-762).
cacccgcactgcacctaaa

SEQ ID NO: 460454 - DNA, 19 bp, Mus musculus
  siRNA target sequence for Hrb (NM_010472.1,746-764).
cccgcactgcacctaaata

SEQ ID NO: 460455 - DNA, 19 bp, Mus musculus
  siRNA target sequence for Hrb (NM_010472.1,890-908).
gctacagccaattttgcta

SEQ ID NO: 460456 - DNA, 19 bp, Mus musculus
  siRNA target sequence for Hrb (NM_010472.1,891-909).
ctacagccaattttgctaa

SEQ ID NO: 460457 - DNA, 19 bp, Mus musculus
  siRNA target sequence for Hrb (NM_010472.1,905-923).
gctaactttgcacacttta

SEQ ID NO: 460458 - DNA, 19 bp, Mus musculus
  siRNA target sequence for Hrb (NM_010472.1,947-965).
gcaaatgcagattttgcaa

SEQ ID NO: 460459 - DNA, 19 bp, Mus musculus
  siRNA target sequence for Hrb (NM_010472.1,985-1003).
gtctagtggttcgagtaat

SEQ ID NO: 460460 - DNA, 19 bp, Mus musculus
  siRNA target sequence for Hrb (NM_010472.1,987-1005).
ctagtggttcgagtaattt

SEQ ID NO: 460461 - DNA, 19 bp, Mus musculus
  siRNA target sequence for Hrb (NM_010472.1,1064-1082).
gctggatcagtaaatgcta

SEQ ID NO: 460462 - DNA, 19 bp, Mus musculus
  siRNA target sequence for Hrb (NM_010472.1,1067-1085).
ggatcagtaaatgctaatt

SEQ ID NO: 460463 - DNA, 19 bp, Mus musculus
  siRNA target sequence for Hrb (NM_010472.1,1114-1132).
ctccagtgctgattttgga

SEQ ID NO: 460464 - DNA, 19 bp, Mus musculus
  siRNA target sequence for Hrb (NM_010472.1,1124-1142).
gattttggaaccttcagta

SEQ ID NO: 460465 - DNA, 19 bp, Mus musculus
  siRNA target sequence for Hrb (NM_010472.1,1161-1179).
cagcatcaactgttagtaa

SEQ ID NO: 460466 - DNA, 19 bp, Mus musculus
  siRNA target sequence for Hrb (NM_010472.1,1164-1182).
catcaactgttagtaaagt

SEQ ID NO: 460467 - DNA, 19 bp, Mus musculus
  siRNA target sequence for Hrb (NM_010472.1,1224-1242).
cggcacttgctaatttaga

SEQ ID NO: 460468 - DNA, 19 bp, Mus musculus
  siRNA target sequence for Hrb (NM_010472.1,1226-1244).
gcacttgctaatttagaca

SEQ ID NO: 460469 - DNA, 19 bp, Mus musculus
  siRNA target sequence for Hrb (NM_010472.1,1227-1245).
cacttgctaatttagacaa

SEQ ID NO: 460470 - DNA, 19 bp, Mus musculus
  siRNA target sequence for Hrb (NM_010472.1,1420-1438).
gtacacgcccaccagtaat

SEQ ID NO: 460471 - DNA, 19 bp, Mus musculus
  siRNA target sequence for Hrb (NM_010472.1,1423-1441).
cacgcccaccagtaatgct

SEQ ID NO: 460472 - DNA, 19 bp, Mus musculus
  siRNA target sequence for Hrb (NM_010472.1,1522-1540).
ggctacgccttctacgaat

SEQ ID NO: 460473 - DNA, 19 bp, Mus musculus
  siRNA target sequence for Hrb (NM_010472.1,1527-1545).
cgccttctacgaatccatt

SEQ ID NO: 460474 - DNA, 19 bp, Mus musculus
  siRNA target sequence for Hrb (NM_010472.1,1528-1546).
gccttctacgaatccattt

SEQ ID NO: 460475 - DNA, 19 bp, Mus musculus
  siRNA target sequence for Hrb (NM_010472.1,1530-1548).
cttctacgaatccatttgt

SEQ ID NO: 460476 - DNA, 19 bp, Mus musculus
  siRNA target sequence for Hrb (NM_010472.1,1575-1593).
cgtctacaaacccatttca

SEQ ID NO: 460477 - DNA, 19 bp, Mus musculus
  siRNA target sequence for Hrb (NM_010472.1,1623-1641).
cctttggcaccgcatctat

SEQ ID NO: 460478 - DNA, 19 bp, Mus musculus
  siRNA target sequence for Hrb (NM_010472.1,1661-1679).
ggcactcctgcccagtata

SEQ ID NO: 460479 - DNA, 19 bp, Mus musculus
  siRNA target sequence for Hrb (NM_010472.1,1761-1779).
ctcaacagcccaatggttt

SEQ ID NO: 460480 - DNA, 19 bp, Mus musculus
  siRNA target sequence for Hrb (NM_010472.1,1780-1798).
cgccacgtttggacaaaca

SEQ ID NO: 460481 - DNA, 19 bp, Mus musculus
  siRNA target sequence for Hrb (NM_010472.1,1782-1800).
ccacgtttggacaaacaaa

SEQ ID NO: 460482 - DNA, 19 bp, Mus musculus
  siRNA target sequence for Hrb (NM_010472.1,1832-1850).
gctgctggagtgtctagta

SEQ ID NO: 460483 - DNA, 19 bp, Mus musculus
  siRNA target sequence for Hrb (NM_010472.1,1838-1856).
ggagtgtctagtaatcctt

SEQ ID NO: 460484 - DNA, 19 bp, Mus musculus
  siRNA target sequence for Hrbl (NM_145566.1,352-370).
cctcatcgagtcaagtcaa

SEQ ID NO: 460485 - DNA, 19 bp, Mus musculus
  siRNA target sequence for Hrbl (NM_145566.1,353-371).
ctcatcgagtcaagtcaat

SEQ ID NO: 460486 - DNA, 19 bp, Mus musculus
  siRNA target sequence for Hrbl (NM_145566.1,408-426).
cctccaatctcgtggaaat

SEQ ID NO: 460487 - DNA, 19 bp, Mus musculus
  siRNA target sequence for Hrbl (NM_145566.1,444-462).
ctggctcggtctttttgat

SEQ ID NO: 460488 - DNA, 19 bp, Mus musculus
  siRNA target sequence for Hrbl (NM_145566.1,860-878).
caggctttggaggtaagta

SEQ ID NO: 460489 - DNA, 19 bp, Mus musculus
  siRNA target sequence for Hrbl (NM_145566.1,862-880).
ggctttggaggtaagtact

SEQ ID NO: 460490 - DNA, 19 bp, Mus musculus
  siRNA target sequence for Hrbl (NM_145566.1,863-881).
gctttggaggtaagtacta

SEQ ID NO: 460491 - DNA, 19 bp, Mus musculus
  siRNA target sequence for Hrbl (NM_145566.1,897-915).
ccgtctccgccgtatctgt

SEQ ID NO: 460492 - DNA, 19 bp, Mus musculus
  siRNA target sequence for Hrbl (NM_145566.1,899-917).
gtctccgccgtatctgtat

SEQ ID NO: 460493 - DNA, 19 bp, Mus musculus
  siRNA target sequence for Hrbl (NM_145566.1,901-919).
ctccgccgtatctgtatta

SEQ ID NO: 460494 - DNA, 19 bp, Mus musculus
  siRNA target sequence for Hrbl (NM_145566.1,903-921).
ccgccgtatctgtattact

SEQ ID NO: 460495 - DNA, 19 bp, Mus musculus
  siRNA target sequence for Hrbl (NM_178162.2,1032-1050).
ggtctccctggcagtgttt

SEQ ID NO: 460496 - DNA, 19 bp, Mus musculus
  siRNA target sequence for Hrbl (NM_178162.2,1331-1349).
gcagaatggatcttccttt

SEQ ID NO: 460497 - DNA, 19 bp, Mus musculus
  siRNA target sequence for Hrbl (NM_178162.2,1392-1410).
cagccggctgggatctcta

SEQ ID NO: 460498 - DNA, 19 bp, Mus musculus
  siRNA target sequence for Hrbl (NM_178162.2,1456-1474).
caaccacaaacccattctt

SEQ ID NO: 460499 - DNA, 19 bp, Mus musculus
  siRNA target sequence for Ighmbp2 (NM_009212.1,365-383).
gcttcacctctggtgatat

SEQ ID NO: 460500 - DNA, 19 bp, Mus musculus
  siRNA target sequence for Ighmbp2 (NM_009212.1,385-403).
gtgggtctgtatgatacta

SEQ ID NO: 460501 - DNA, 19 bp, Mus musculus
  siRNA target sequence for Ighmbp2 (NM_009212.1,387-405).
gggtctgtatgatactaat

SEQ ID NO: 460502 - DNA, 19 bp, Mus musculus
  siRNA target sequence for Ighmbp2 (NM_009212.1,389-407).
gtctgtatgatactaatga

SEQ ID NO: 460503 - DNA, 19 bp, Mus musculus
  siRNA target sequence for Ighmbp2 (NM_009212.1,438-456).
ccgaatcacccaaaaatca

SEQ ID NO: 460504 - DNA, 19 bp, Mus musculus
  siRNA target sequence for Ighmbp2 (NM_009212.1,549-567).
ctacaaacgcctgaaaaaa

SEQ ID NO: 460505 - DNA, 19 bp, Mus musculus
  siRNA target sequence for Ighmbp2 (NM_009212.1,665-683).
ccccactctctttctacaa

SEQ ID NO: 460506 - DNA, 19 bp, Mus musculus
  siRNA target sequence for Ighmbp2 (NM_009212.1,667-685).
ccactctctttctacaaca

SEQ ID NO: 460507 - DNA, 19 bp, Mus musculus
  siRNA target sequence for Ighmbp2 (NM_009212.1,785-803).
ctgtggtggaaataatcct

SEQ ID NO: 460508 - DNA, 19 bp, Mus musculus
  siRNA target sequence for Ighmbp2 (NM_009212.1,809-827).
ctgtgaagcaaggcttaaa

SEQ ID NO: 460509 - DNA, 19 bp, Mus musculus
  siRNA target sequence for Ighmbp2 (NM_009212.1,1060-1078).
gagaaaggtaattttcgaa

SEQ ID NO: 460510 - DNA, 19 bp, Mus musculus
  siRNA target sequence for Ighmbp2 (NM_009212.1,1424-1442).
ggatgctgacggtacagta

SEQ ID NO: 460511 - DNA, 19 bp, Mus musculus
  siRNA target sequence for Ighmbp2 (NM_009212.1,1786-1804).
cctgagctggagattaagt

SEQ ID NO: 460512 - DNA, 19 bp, Mus musculus
  siRNA target sequence for Ighmbp2 (NM_009212.1,1794-1812).
ggagattaagtctgttgat

SEQ ID NO: 460513 - DNA, 19 bp, Mus musculus
  siRNA target sequence for Ighmbp2 (NM_009212.1,1868-1886).
ggaaaggtgaagttggttt

SEQ ID NO: 460514 - DNA, 19 bp, Mus musculus
  siRNA target sequence for Ighmbp2 (NM_009212.1,1869-1887).
gaaaggtgaagttggtttt

SEQ ID NO: 460515 - DNA, 19 bp, Mus musculus
  siRNA target sequence for Ighmbp2 (NM_009212.1,1892-1910).
ctgaggacaggcggattaa

SEQ ID NO: 460516 - DNA, 19 bp, Mus musculus
  siRNA target sequence for Ighmbp2 (NM_009212.1,1896-1914).
ggacaggcggattaatgtt

SEQ ID NO: 460517 - DNA, 19 bp, Mus musculus
  siRNA target sequence for Ighmbp2 (NM_009212.1,2022-2040).
ggtacgcacagcctttgaa

SEQ ID NO: 460518 - DNA, 19 bp, Mus musculus
  siRNA target sequence for Ighmbp2 (NM_009212.1,2023-2041).
gtacgcacagcctttgaat

SEQ ID NO: 460519 - DNA, 19 bp, Mus musculus
  siRNA target sequence for Ighmbp2 (NM_009212.1,2172-2190).
cagagcagcccctagacat

SEQ ID NO: 460520 - DNA, 19 bp, Mus musculus
  siRNA target sequence for Ighmbp2 (NM_009212.1,2284-2302).
gaccggacagagcacttta

SEQ ID NO: 460521 - DNA, 19 bp, Mus musculus
  siRNA target sequence for Ighmbp2 (NM_009212.1,2295-2313).
gcactttagggctacgatt

SEQ ID NO: 460522 - DNA, 19 bp, Mus musculus
  siRNA target sequence for Ilf3 (NM_010561.1,206-224).
cattgtatcatcatcactt

SEQ ID NO: 460523 - DNA, 19 bp, Mus musculus
  siRNA target sequence for Ilf3 (NM_010561.1,214-232).
catcatcacttcatcacaa

SEQ ID NO: 460524 - DNA, 19 bp, Mus musculus
  siRNA target sequence for Ilf3 (NM_010561.1,242-260).
ggcgtcccatgagaatttt

SEQ ID NO: 460525 - DNA, 19 bp, Mus musculus
  siRNA target sequence for Ilf3 (NM_010561.1,243-261).
gcgtcccatgagaattttt

SEQ ID NO: 460526 - DNA, 19 bp, Mus musculus
  siRNA target sequence for Ilf3 (NM_010561.1,245-263).
gtcccatgagaatttttgt

SEQ ID NO: 460527 - DNA, 19 bp, Mus musculus
  siRNA target sequence for Ilf3 (NM_010561.1,639-657).
catccagctcactactgta

SEQ ID NO: 460528 - DNA, 19 bp, Mus musculus
  siRNA target sequence for Ilf3 (NM_010561.1,691-709).
gatgatgctgcgattgtga

SEQ ID NO: 460529 - DNA, 19 bp, Mus musculus
  siRNA target sequence for Ilf3 (NM_010561.1,697-715).
gctgcgattgtgataaaaa

SEQ ID NO: 460530 - DNA, 19 bp, Mus musculus
  siRNA target sequence for Ilf3 (NM_010561.1,698-716).
ctgcgattgtgataaaaaa

SEQ ID NO: 460531 - DNA, 19 bp, Mus musculus
  siRNA target sequence for Ilf3 (NM_010561.1,934-952).
gtcctaagggacttgtgta

SEQ ID NO: 460532 - DNA, 19 bp, Mus musculus
  siRNA target sequence for Ilf3 (NM_010561.1,1075-1093).
ctggcatccggcatcgtaa

SEQ ID NO: 460533 - DNA, 19 bp, Mus musculus
  siRNA target sequence for Ilf3 (NM_010561.1,1110-1128).
catttatgacccttgtgaa

SEQ ID NO: 460534 - DNA, 19 bp, Mus musculus
  siRNA target sequence for Ilf3 (NM_010561.1,1163-1181).
gacagcaacgggaagatat

SEQ ID NO: 460535 - DNA, 19 bp, Mus musculus
  siRNA target sequence for Ilf3 (NM_010561.1,1165-1183).
cagcaacgggaagatatca

SEQ ID NO: 460536 - DNA, 19 bp, Mus musculus
  siRNA target sequence for Ilf3 (NM_010561.1,1217-1235).
cctttggtcaactccataa

SEQ ID NO: 460537 - DNA, 19 bp, Mus musculus
  siRNA target sequence for Ilf3 (NM_010561.1,1223-1241).
gtcaactccataaagtact

SEQ ID NO: 460538 - DNA, 19 bp, Mus musculus
  siRNA target sequence for Ilf3 (NM_010561.1,1297-1315).
gtggactacactgttcaaa

SEQ ID NO: 460539 - DNA, 19 bp, Mus musculus
  siRNA target sequence for Ilf3 (NM_010561.1,1321-1339).
cccagcaccacctatgcta

SEQ ID NO: 460540 - DNA, 19 bp, Mus musculus
  siRNA target sequence for Ilf3 (NM_010561.1,1322-1340).
ccagcaccacctatgctat

SEQ ID NO: 460541 - DNA, 19 bp, Mus musculus
  siRNA target sequence for Ilf3 (NM_010561.1,1347-1365).
catgaaacgccctatggaa

SEQ ID NO: 460542 - DNA, 19 bp, Mus musculus
  siRNA target sequence for Ilf3 (NM_010561.1,1430-1448).
ctgatcctcctcaagctat

SEQ ID NO: 460543 - DNA, 19 bp, Mus musculus
  siRNA target sequence for Ilf3 (NM_010561.1,1549-1567).
gaggtagacggcagtaact

SEQ ID NO: 460544 - DNA, 19 bp, Mus musculus
  siRNA target sequence for Ilf3 (NM_010561.1,1593-1611).
gactgccaagcttcatgta

SEQ ID NO: 460545 - DNA, 19 bp, Mus musculus
  siRNA target sequence for Ilf3 (NM_010561.1,1784-1802).
ctgagcagggaccgatttt

SEQ ID NO: 460546 - DNA, 19 bp, Mus musculus
  siRNA target sequence for Ilf3 (NM_010561.1,1786-1804).
gagcagggaccgattttga

SEQ ID NO: 460547 - DNA, 19 bp, Mus musculus
  siRNA target sequence for Ilf3 (NM_010561.1,1788-1806).
gcagggaccgattttgact

SEQ ID NO: 460548 - DNA, 19 bp, Mus musculus
  siRNA target sequence for Ilf3 (NM_010561.1,1789-1807).
cagggaccgattttgacta

SEQ ID NO: 460549 - DNA, 19 bp, Mus musculus
  siRNA target sequence for Ilf3 (NM_010561.1,1847-1865).
gacgtggcctcaaatatga

SEQ ID NO: 460550 - DNA, 19 bp, Mus musculus
  siRNA target sequence for Ilf3 (NM_010561.1,1887-1905).
cagccacgacaaaaggttt

SEQ ID NO: 460551 - DNA, 19 bp, Mus musculus
  siRNA target sequence for Ilf3 (NM_010561.1,1939-1957).
caaggtgctggttcaaaca

SEQ ID NO: 460552 - DNA, 19 bp, Mus musculus
  siRNA target sequence for Ilf3 (NM_010561.1,1942-1960).
ggtgctggttcaaacaaaa

SEQ ID NO: 460553 - DNA, 19 bp, Mus musculus
  siRNA target sequence for Ilf3 (NM_010561.1,1979-1997).
ctgcacttgccgcattaga

SEQ ID NO: 460554 - DNA, 19 bp, Mus musculus
  siRNA target sequence for Ilf3 (NM_010561.1,1987-2005).
gccgcattagaaaaacttt

SEQ ID NO: 460555 - DNA, 19 bp, Mus musculus
  siRNA target sequence for Ilf3 (NM_010561.1,1988-2006).
ccgcattagaaaaactttt

SEQ ID NO: 460556 - DNA, 19 bp, Mus musculus
  siRNA target sequence for Ilf3 (NM_010561.1,2064-2082).
ccgaggtggacccaaattt

SEQ ID NO: 460557 - DNA, 19 bp, Mus musculus
  siRNA target sequence for Ilf3 (NM_010561.1,2091-2109).
gccacacaaccctggtttt

SEQ ID NO: 460558 - DNA, 19 bp, Mus musculus
  siRNA target sequence for Ilf3 (NM_010561.1,2115-2133).
gggaggccccatgcataat

SEQ ID NO: 460559 - DNA, 19 bp, Mus musculus
  siRNA target sequence for Ilf3 (NM_010561.1,2117-2135).
gaggccccatgcataatga

SEQ ID NO: 460560 - DNA, 19 bp, Mus musculus
  siRNA target sequence for Ilf3 (NM_010561.1,2241-2259).
gaatgctggtgctggatat

SEQ ID NO: 460561 - DNA, 19 bp, Mus musculus
  siRNA target sequence for Ilf3 (NM_010561.1,2294-2312).
caggctacagtcagttcta

SEQ ID NO: 460562 - DNA, 19 bp, Mus musculus
  siRNA target sequence for Ilf3 (NM_010561.1,2296-2314).
ggctacagtcagttctaca

SEQ ID NO: 460563 - DNA, 19 bp, Mus musculus
  siRNA target sequence for Ilf3 (NM_010561.1,2395-2413).
caaggagacagctacaact

SEQ ID NO: 460564 - DNA, 19 bp, Mus musculus
  siRNA target sequence for Ilf3 (NM_010561.1,2597-2615).
cctcctactccaactctta

SEQ ID NO: 460565 - DNA, 19 bp, Mus musculus
  siRNA target sequence for Ilf3 (NM_010561.1,2651-2669).
gctacgacagcaaattcaa

SEQ ID NO: 460566 - DNA, 19 bp, Mus musculus
  siRNA target sequence for Ilf3 (NM_010561.1,2719-2737).
gggtcatcgtcctacaaca

SEQ ID NO: 460567 - DNA, 19 bp, Mus musculus
  siRNA target sequence for Ing1 (NM_011919.3,873-891).
gatccacctggtgaactat

SEQ ID NO: 460568 - DNA, 19 bp, Mus musculus
  siRNA target sequence for Ing1 (NM_011919.3,963-981).
gatcgacgccaaataccaa

SEQ ID NO: 460569 - DNA, 19 bp, Mus musculus
  siRNA target sequence for Ing1 (NM_011919.3,1296-1314).
caggaggcagcgaaacaat

SEQ ID NO: 460570 - DNA, 19 bp, Mus musculus
  siRNA target sequence for Ing1 (NM_011919.3,1298-1316).
ggaggcagcgaaacaatga

SEQ ID NO: 460571 - DNA, 19 bp, Mus musculus
  siRNA target sequence for Ing1 (NM_011919.3,1302-1320).
gcagcgaaacaatgagaat

SEQ ID NO: 460572 - DNA, 19 bp, Mus musculus
  siRNA target sequence for Ing1 (NM_011919.3,1565-1583).
gcgtggggctcaaccataa

SEQ ID NO: 460573 - DNA, 19 bp, Mus musculus
  siRNA target sequence for Ing1 (NM_011919.3,1569-1587).
ggggctcaaccataaacca

SEQ ID NO: 460574 - DNA, 19 bp, Mus musculus
  siRNA target sequence for Ing1 (NM_011919.3,1570-1588).
gggctcaaccataaaccaa

SEQ ID NO: 460575 - DNA, 19 bp, Mus musculus
  siRNA target sequence for Ing1 (NM_011919.3,1571-1589).
ggctcaaccataaaccaaa

SEQ ID NO: 460576 - DNA, 19 bp, Mus musculus
  siRNA target sequence for Ing1l (NM_023503.2,628-646).
gcgggagctggacaacaaa

SEQ ID NO: 460577 - DNA, 19 bp, Mus musculus
  siRNA target sequence for Ing1l (NM_023503.2,701-719).
gatgattccaaccagaaaa

SEQ ID NO: 460578 - DNA, 19 bp, Mus musculus
  siRNA target sequence for Ing1l (NM_023503.2,737-755).
ctccagagagcgttaatca

SEQ ID NO: 460579 - DNA, 19 bp, Mus musculus
  siRNA target sequence for Ing1l (NM_023503.2,739-757).
ccagagagcgttaatcaat

SEQ ID NO: 460580 - DNA, 19 bp, Mus musculus
  siRNA target sequence for Ing1l (NM_023503.2,740-758).
cagagagcgttaatcaata

SEQ ID NO: 460581 - DNA, 19 bp, Mus musculus
  siRNA target sequence for Ing1l (NM_023503.2,795-813).
cccagatgctcgaattggt

SEQ ID NO: 460582 - DNA, 19 bp, Mus musculus
  siRNA target sequence for Ing1l (NM_023503.2,815-833).
gagaaccgagcgagacaaa

SEQ ID NO: 460583 - DNA, 19 bp, Mus musculus
  siRNA target sequence for Ing1l (NM_023503.2,914-932).
ccggaaagatcttctagaa

SEQ ID NO: 460584 - DNA, 19 bp, Mus musculus
  siRNA target sequence for Ing1l (NM_023503.2,965-983).
gacttatgtcacatgacaa

SEQ ID NO: 460585 - DNA, 19 bp, Mus musculus
  siRNA target sequence for Ing1l (NM_023503.2,1004-1022).
gatcaaccaccgaaagaaa

SEQ ID NO: 460586 - DNA, 19 bp, Mus musculus
  siRNA target sequence for Ing1l (NM_023503.2,1156-1174).
gataggctgtgacaatgaa

SEQ ID NO: 460587 - DNA, 19 bp, Mus musculus
  siRNA target sequence for Ing1l (NM_023503.2,1172-1190).
gaacagtgtcccattgaat

SEQ ID NO: 460588 - DNA, 19 bp, Mus musculus
  siRNA target sequence for Ing1l (NM_023503.2,1226-1244).
cccaaggggaaatggtatt

SEQ ID NO: 460589 - DNA, 19 bp, Mus musculus
  siRNA target sequence for Ing1l (NM_023503.2,1280-1298).
gacaaaagtaccgaaaaga

SEQ ID NO: 460590 - DNA, 19 bp, Mus musculus
  siRNA target sequence for Ing3 (NM_023626.3,219-237).
gaatgcaatggatcaacta

SEQ ID NO: 460591 - DNA, 19 bp, Mus musculus
  siRNA target sequence for Ing3 (NM_023626.3,253-271).
gagttctttatgaatgcaa

SEQ ID NO: 460592 - DNA, 19 bp, Mus musculus
  siRNA target sequence for Ing3 (NM_023626.3,361-379).
cagttggcaaaccagattt

SEQ ID NO: 460593 - DNA, 19 bp, Mus musculus
  siRNA target sequence for Ing3 (NM_023626.3,363-381).
gttggcaaaccagatttat

SEQ ID NO: 460594 - DNA, 19 bp, Mus musculus
  siRNA target sequence for Ing3 (NM_023626.3,366-384).
ggcaaaccagatttatgat

SEQ ID NO: 460595 - DNA, 19 bp, Mus musculus
  siRNA target sequence for Ing3 (NM_023626.3,388-406).
gtagatcgccacttgagaa

SEQ ID NO: 460596 - DNA, 19 bp, Mus musculus
  siRNA target sequence for Ing3 (NM_023626.3,417-435).
ggaactggccaagtttaaa

SEQ ID NO: 460597 - DNA, 19 bp, Mus musculus
  siRNA target sequence for Ing3 (NM_023626.3,418-436).
gaactggccaagtttaaaa

SEQ ID NO: 460598 - DNA, 19 bp, Mus musculus
  siRNA target sequence for Ing3 (NM_023626.3,438-456).
ggagctggaagccgataat

SEQ ID NO: 460599 - DNA, 19 bp, Mus musculus
  siRNA target sequence for Ing3 (NM_023626.3,441-459).
gctggaagccgataatgct

SEQ ID NO: 460600 - DNA, 19 bp, Mus musculus
  siRNA target sequence for Ing3 (NM_023626.3,448-466).
gccgataatgctggaatta

SEQ ID NO: 460601 - DNA, 19 bp, Mus musculus
  siRNA target sequence for Ing3 (NM_023626.3,461-479).
gaattacagaaatactaga

SEQ ID NO: 460602 - DNA, 19 bp, Mus musculus
  siRNA target sequence for Ing3 (NM_023626.3,480-498).
gaggcgatctttggaatta

SEQ ID NO: 460603 - DNA, 19 bp, Mus musculus
  siRNA target sequence for Ing3 (NM_023626.3,482-500).
ggcgatctttggaattaga

SEQ ID NO: 460604 - DNA, 19 bp, Mus musculus
  siRNA target sequence for Ing3 (NM_023626.3,483-501).
gcgatctttggaattagat

SEQ ID NO: 460605 - DNA, 19 bp, Mus musculus
  siRNA target sequence for Ing3 (NM_023626.3,506-524).
cttcgcagccagtgaacaa

SEQ ID NO: 460606 - DNA, 19 bp, Mus musculus
  siRNA target sequence for Ing3 (NM_023626.3,509-527).
cgcagccagtgaacaatca

SEQ ID NO: 460607 - DNA, 19 bp, Mus musculus
  siRNA target sequence for Ing3 (NM_023626.3,522-540).
caatcaccacgctcattca

SEQ ID NO: 460608 - DNA, 19 bp, Mus musculus
  siRNA target sequence for Ing3 (NM_023626.3,526-544).
caccacgctcattcacata

SEQ ID NO: 460609 - DNA, 19 bp, Mus musculus
  siRNA target sequence for Ing3 (NM_023626.3,547-565).
cccgtggaaaaaaggaaat

SEQ ID NO: 460610 - DNA, 19 bp, Mus musculus
  siRNA target sequence for Ing3 (NM_023626.3,672-690).
gctgggttgtcggaacaat

SEQ ID NO: 460611 - DNA, 19 bp, Mus musculus
  siRNA target sequence for Ing3 (NM_023626.3,673-691).
ctgggttgtcggaacaata

SEQ ID NO: 460612 - DNA, 19 bp, Mus musculus
  siRNA target sequence for Ing3 (NM_023626.3,675-693).
gggttgtcggaacaataat

SEQ ID NO: 460613 - DNA, 19 bp, Mus musculus
  siRNA target sequence for Ing3 (NM_023626.3,676-694).
ggttgtcggaacaataatt

SEQ ID NO: 460614 - DNA, 19 bp, Mus musculus
  siRNA target sequence for Ing3 (NM_023626.3,700-718).
gcttcctgcaacaatgctt

SEQ ID NO: 460615 - DNA, 19 bp, Mus musculus
  siRNA target sequence for Ing3 (NM_023626.3,740-758).
ccctggcctcctataacat

SEQ ID NO: 460616 - DNA, 19 bp, Mus musculus
  siRNA target sequence for Ing3 (NM_023626.3,741-759).
cctggcctcctataacatt

SEQ ID NO: 460617 - DNA, 19 bp, Mus musculus
  siRNA target sequence for Ing3 (NM_023626.3,745-763).
gcctcctataacattggtt

SEQ ID NO: 460618 - DNA, 19 bp, Mus musculus
  siRNA target sequence for Ing3 (NM_023626.3,749-767).
cctataacattggttcatt

SEQ ID NO: 460619 - DNA, 19 bp, Mus musculus
  siRNA target sequence for Ing3 (NM_023626.3,750-768).
ctataacattggttcatta

SEQ ID NO: 460620 - DNA, 19 bp, Mus musculus
  siRNA target sequence for Ing3 (NM_023626.3,824-842).
cgacagcacagatgaaaga

SEQ ID NO: 460621 - DNA, 19 bp, Mus musculus
  siRNA target sequence for Ing3 (NM_023626.3,846-864).
gcgaagaacatcgagttta

SEQ ID NO: 460622 - DNA, 19 bp, Mus musculus
  siRNA target sequence for Ing3 (NM_023626.3,868-886).
gccagttacgaagcattta

SEQ ID NO: 460623 - DNA, 19 bp, Mus musculus
  siRNA target sequence for Ing3 (NM_023626.3,869-887).
ccagttacgaagcatttaa

SEQ ID NO: 460624 - DNA, 19 bp, Mus musculus
  siRNA target sequence for Ing3 (NM_023626.3,872-890).
gttacgaagcatttaagaa

SEQ ID NO: 460625 - DNA, 19 bp, Mus musculus
  siRNA target sequence for Ing3 (NM_023626.3,876-894).
cgaagcatttaagaacaat

SEQ ID NO: 460626 - DNA, 19 bp, Mus musculus
  siRNA target sequence for Ing3 (NM_023626.3,1110-1128).
gtcttcaactgtagtacaa

SEQ ID NO: 460627 - DNA, 19 bp, Mus musculus
  siRNA target sequence for Ing3 (NM_023626.3,1115-1133).
caactgtagtacaagaagt

SEQ ID NO: 460628 - DNA, 19 bp, Mus musculus
  siRNA target sequence for Ing3 (NM_023626.3,1187-1205).
ggacttacgacccaaatga

SEQ ID NO: 460629 - DNA, 19 bp, Mus musculus
  siRNA target sequence for Ing3 (NM_023626.3,1188-1206).
gacttacgacccaaatgaa

SEQ ID NO: 460630 - DNA, 19 bp, Mus musculus
  siRNA target sequence for Ing3 (NM_023626.3,1211-1229).
ggtattgcatctgtaatca

SEQ ID NO: 460631 - DNA, 19 bp, Mus musculus
  siRNA target sequence for Ing3 (NM_023626.3,1221-1239).
ctgtaatcaggtatcctat

SEQ ID NO: 460632 - DNA, 19 bp, Mus musculus
  siRNA target sequence for Ing3 (NM_023626.3,1248-1266).
ggtgggatgtgataaccaa

SEQ ID NO: 460633 - DNA, 19 bp, Mus musculus
  siRNA target sequence for Ing3 (NM_023626.3,1264-1282).
caagattgtccaatagagt

SEQ ID NO: 460634 - DNA, 19 bp, Mus musculus
  siRNA target sequence for Ing4 (NM_133345.1,25-43).
ggatgtatttggaacatta

SEQ ID NO: 460635 - DNA, 19 bp, Mus musculus
  siRNA target sequence for Ing4 (NM_133345.1,57-75).
gaaaacctcccgtttgaat

SEQ ID NO: 460636 - DNA, 19 bp, Mus musculus
  siRNA target sequence for Ing4 (NM_133345.1,63-81).
ctcccgtttgaattacaga

SEQ ID NO: 460637 - DNA, 19 bp, Mus musculus
  siRNA target sequence for Ing4 (NM_133345.1,67-85).
cgtttgaattacagagaaa

SEQ ID NO: 460638 - DNA, 19 bp, Mus musculus
  siRNA target sequence for Ing4 (NM_133345.1,150-168).
gccactgaatatatgagta

SEQ ID NO: 460639 - DNA, 19 bp, Mus musculus
  siRNA target sequence for Ing4 (NM_133345.1,280-298).
cctatgagatggtagacaa

SEQ ID NO: 460640 - DNA, 19 bp, Mus musculus
  siRNA target sequence for Ing4 (NM_133345.1,281-299).
ctatgagatggtagacaaa

SEQ ID NO: 460641 - DNA, 19 bp, Mus musculus
  siRNA target sequence for Ing4 (NM_133345.1,359-377).
gatcgagtccagtgactat

SEQ ID NO: 460642 - DNA, 19 bp, Mus musculus
  siRNA target sequence for Ing4 (NM_133345.1,441-459).
cgttccaaagggaaaaact

SEQ ID NO: 460643 - DNA, 19 bp, Mus musculus
  siRNA target sequence for Ing4 (NM_133345.1,588-606).
cccaacgaacccacatatt

SEQ ID NO: 460644 - DNA, 19 bp, Mus musculus
  siRNA target sequence for Ing5 (NM_025454.1,400-418).
gagcacggagcttgaaaaa

SEQ ID NO: 460645 - DNA, 19 bp, Mus musculus
  siRNA target sequence for Ing5 (NM_025454.1,508-526).
gcgggtctgagtttactga

SEQ ID NO: 460646 - DNA, 19 bp, Mus musculus
  siRNA target sequence for Ing5 (NM_025454.1,576-594).
ccgaatgagcctacatact

SEQ ID NO: 460647 - DNA, 19 bp, Mus musculus
  siRNA target sequence for Ing5 (NM_025454.1,642-660).
ccagattgtcccattgagt

SEQ ID NO: 460648 - DNA, 19 bp, Mus musculus
  siRNA target sequence for Ing5 (NM_025454.1,710-728).
gttttgtccacgatgtgtt

SEQ ID NO: 460649 - DNA, 19 bp, Mus musculus
  siRNA target sequence for Ing5 (NM_025454.1,718-736).
cacgatgtgttcaggaaaa

SEQ ID NO: 460650 - DNA, 19 bp, Mus musculus
  siRNA target sequence for Ing5 (NM_025454.1,720-738).
cgatgtgttcaggaaaaga

SEQ ID NO: 460651 - DNA, 19 bp, Mus musculus
  siRNA target sequence for Jade1 (NM_172303.3,403-421).
cgttaggctacgtcgatat

SEQ ID NO: 460652 - DNA, 19 bp, Mus musculus
  siRNA target sequence for Jade1 (NM_172303.3,445-463).
gtcggtatgacctcaatga

SEQ ID NO: 460653 - DNA, 19 bp, Mus musculus
  siRNA target sequence for Jade1 (NM_172303.3,447-465).
cggtatgacctcaatgata

SEQ ID NO: 460654 - DNA, 19 bp, Mus musculus
  siRNA target sequence for Jade1 (NM_172303.3,448-466).
ggtatgacctcaatgatat

SEQ ID NO: 460655 - DNA, 19 bp, Mus musculus
  siRNA target sequence for Jade1 (NM_172303.3,476-494).
gtggctggaagtaaccaat

SEQ ID NO: 460656 - DNA, 19 bp, Mus musculus
  siRNA target sequence for Jade1 (NM_172303.3,528-546).
gacgagtacaccatggaaa

SEQ ID NO: 460657 - DNA, 19 bp, Mus musculus
  siRNA target sequence for Jade1 (NM_172303.3,564-582).
gaacagcgatgctatgaca

SEQ ID NO: 460658 - DNA, 19 bp, Mus musculus
  siRNA target sequence for Jade1 (NM_172303.3,567-585).
cagcgatgctatgacaata

SEQ ID NO: 460659 - DNA, 19 bp, Mus musculus
  siRNA target sequence for Jade1 (NM_172303.3,570-588).
cgatgctatgacaatatga

SEQ ID NO: 460660 - DNA, 19 bp, Mus musculus
  siRNA target sequence for Jade1 (NM_172303.3,571-589).
gatgctatgacaatatgaa

SEQ ID NO: 460661 - DNA, 19 bp, Mus musculus
  siRNA target sequence for Jade1 (NM_172303.3,574-592).
gctatgacaatatgaatca

SEQ ID NO: 460662 - DNA, 19 bp, Mus musculus
  siRNA target sequence for Jade1 (NM_172303.3,575-593).
ctatgacaatatgaatcat

SEQ ID NO: 460663 - DNA, 19 bp, Mus musculus
  siRNA target sequence for Jade1 (NM_172303.3,613-631).
gcttggggattgaatacga

SEQ ID NO: 460664 - DNA, 19 bp, Mus musculus
  siRNA target sequence for Jade1 (NM_172303.3,786-804).
ggagttcagccaaaatgtt

SEQ ID NO: 460665 - DNA, 19 bp, Mus musculus
  siRNA target sequence for Jade1 (NM_172303.3,917-935).
gatggagcccatcacaaaa

SEQ ID NO: 460666 - DNA, 19 bp, Mus musculus
  siRNA target sequence for Jade1 (NM_172303.3,921-939).
gagcccatcacaaaagtgt

SEQ ID NO: 460667 - DNA, 19 bp, Mus musculus
  siRNA target sequence for Jade1 (NM_172303.3,1040-1058).
ccacgtgacttgtgctttt

SEQ ID NO: 460668 - DNA, 19 bp, Mus musculus
  siRNA target sequence for Jade1 (NM_172303.3,1068-1086).
ctggagatgaagaccatat

SEQ ID NO: 460669 - DNA, 19 bp, Mus musculus
  siRNA target sequence for Jade1 (NM_172303.3,1079-1097).
gaccatattggcagagaat

SEQ ID NO: 460670 - DNA, 19 bp, Mus musculus
  siRNA target sequence for Jade1 (NM_172303.3,1081-1099).
ccatattggcagagaatga

SEQ ID NO: 460671 - DNA, 19 bp, Mus musculus
  siRNA target sequence for Jade1 (NM_172303.3,1305-1323).
gagttctacacctttgtca

SEQ ID NO: 460672 - DNA, 19 bp, Mus musculus
  siRNA target sequence for Jade1 (NM_172303.3,1423-1441).
ccctcatcaccccaaagaa

SEQ ID NO: 460673 - DNA, 19 bp, Mus musculus
  siRNA target sequence for Jade1 (NM_172303.3,1473-1491).
caggatgtcttgtttagga

SEQ ID NO: 460674 - DNA, 19 bp, Mus musculus
  siRNA target sequence for Jade1 (NM_172303.3,1531-1549).
gggttcggaacctcactta

SEQ ID NO: 460675 - DNA, 19 bp, Mus musculus
  siRNA target sequence for Jade1 (NM_172303.3,1556-1574).
gacccgcagggaaaagatt

SEQ ID NO: 460676 - DNA, 19 bp, Mus musculus
  siRNA target sequence for Jade1 (NM_172303.3,1558-1576).
cccgcagggaaaagattaa

SEQ ID NO: 460677 - DNA, 19 bp, Mus musculus
  siRNA target sequence for Jade1 (NM_172303.3,1559-1577).
ccgcagggaaaagattaaa

SEQ ID NO: 460678 - DNA, 19 bp, Mus musculus
  siRNA target sequence for Jade1 (NM_172303.3,1669-1687).
cctccgcactggagaacat

SEQ ID NO: 460679 - DNA, 19 bp, Mus musculus
  siRNA target sequence for Jade1 (NM_172303.3,1756-1774).
cattcttcaggaaacaaat

SEQ ID NO: 460680 - DNA, 19 bp, Mus musculus
  siRNA target sequence for Jade1 (NM_172303.3,1788-1806).
gttcatccactgaaaaagt

SEQ ID NO: 460681 - DNA, 19 bp, Mus musculus
  siRNA target sequence for Jade1 (NM_172303.3,1799-1817).
gaaaaagtcccataaacga

SEQ ID NO: 460682 - DNA, 19 bp, Mus musculus
  siRNA target sequence for Jade1 (NM_172303.3,1815-1833).
cgagatgcagtgcagaata

SEQ ID NO: 460683 - DNA, 19 bp, Mus musculus
  siRNA target sequence for Jade1 (NM_172303.3,1818-1836).
gatgcagtgcagaatagtt

SEQ ID NO: 460684 - DNA, 19 bp, Mus musculus
  siRNA target sequence for Jade1 (NM_172303.3,1849-1867).
gcaagacctcgcataagca

SEQ ID NO: 460685 - DNA, 19 bp, Mus musculus
  siRNA target sequence for Jade1 (NM_172303.3,1912-1930).
gcttgctgagcttagaaaa

SEQ ID NO: 460686 - DNA, 19 bp, Mus musculus
  siRNA target sequence for Jade1 (NM_172303.3,1941-1959).
gaagcacgtctcctatcat

SEQ ID NO: 460687 - DNA, 19 bp, Mus musculus
  siRNA target sequence for Jade1 (NM_172303.3,2005-2023).
gaagagacaatcgttttca

SEQ ID NO: 460688 - DNA, 19 bp, Mus musculus
  siRNA target sequence for Jade1 (NM_172303.3,2012-2030).
caatcgttttcattgtgat

SEQ ID NO: 460689 - DNA, 19 bp, Mus musculus
  siRNA target sequence for Jade1 (NM_172303.3,2031-2049).
ctcgttaaaggagacttaa

SEQ ID NO: 460690 - DNA, 19 bp, Mus musculus
  siRNA target sequence for Jade1 (NM_172303.3,2040-2058).
ggagacttaaaggacaaat

SEQ ID NO: 460691 - DNA, 19 bp, Mus musculus
  siRNA target sequence for Jade1 (NM_172303.3,2202-2220).
ctagtcaaagtgcctataa

SEQ ID NO: 460692 - DNA, 19 bp, Mus musculus
  siRNA target sequence for Jade1 (NM_172303.3,2247-2265).
ggaggattccggattccaa

SEQ ID NO: 460693 - DNA, 19 bp, Mus musculus
  siRNA target sequence for Jade1 (NM_172303.3,2248-2266).
gaggattccggattccaaa

SEQ ID NO: 460694 - DNA, 19 bp, Mus musculus
  siRNA target sequence for Jrk (NM_008415.3,600-618).
gctctgatgcaggagtata

SEQ ID NO: 460695 - DNA, 19 bp, Mus musculus
  siRNA target sequence for Jrk (NM_008415.3,750-768).
gaccgggtgctctatgagt

SEQ ID NO: 460696 - DNA, 19 bp, Mus musculus
  siRNA target sequence for Jrk (NM_008415.3,808-826).
gccctatgctcatcgaaaa

SEQ ID NO: 460697 - DNA, 19 bp, Mus musculus
  siRNA target sequence for Jrk (NM_008415.3,902-920).
ggccaggcatggcattaaa

SEQ ID NO: 460698 - DNA, 19 bp, Mus musculus
  siRNA target sequence for Jrk (NM_008415.3,903-921).
gccaggcatggcattaaaa

SEQ ID NO: 460699 - DNA, 19 bp, Mus musculus
  siRNA target sequence for Jrk (NM_008415.3,1093-1111).
ggactgtgccccacttcaa

SEQ ID NO: 460700 - DNA, 19 bp, Mus musculus
  siRNA target sequence for Jrk (NM_008415.3,1096-1114).
ctgtgccccacttcaaaca

SEQ ID NO: 460701 - DNA, 19 bp, Mus musculus
  siRNA target sequence for Jrk (NM_008415.3,1317-1335).
gtgagagagcactttagaa

SEQ ID NO: 460702 - DNA, 19 bp, Mus musculus
  siRNA target sequence for Jrk (NM_008415.3,1542-1560).
cccacccgccacaacataa

SEQ ID NO: 460703 - DNA, 19 bp, Mus musculus
  siRNA target sequence for Jrk (NM_008415.3,1543-1561).
ccacccgccacaacataaa

SEQ ID NO: 460704 - DNA, 19 bp, Mus musculus
  siRNA target sequence for Jrk (NM_008415.3,1544-1562).
cacccgccacaacataaat

SEQ ID NO: 460705 - DNA, 19 bp, Mus musculus
  siRNA target sequence for Jrk (NM_008415.3,1546-1564).
cccgccacaacataaatga

SEQ ID NO: 460706 - DNA, 19 bp, Mus musculus
  siRNA target sequence for Jrk (NM_008415.3,1722-1740).
cacatccttgggcttgtaa

SEQ ID NO: 460707 - DNA, 19 bp, Mus musculus
  siRNA target sequence for Jrk (NM_008415.3,1724-1742).
catccttgggcttgtaaaa

SEQ ID NO: 460708 - DNA, 19 bp, Mus musculus
  siRNA target sequence for Jrk (NM_008415.3,1804-1822).
cagggagggacatagatga

SEQ ID NO: 460709 - DNA, 19 bp, Mus musculus
  siRNA target sequence for Jrk (NM_008415.3,1953-1971).
gagcggcagccgtgtttca

SEQ ID NO: 460710 - DNA, 19 bp, Mus musculus
  siRNA target sequence for Jundm2 (NM_030887.2,342-360).
cgctgacatccgcaacatt

SEQ ID NO: 460711 - DNA, 19 bp, Mus musculus
  siRNA target sequence for Jundm2 (NM_030887.2,354-372).
caacattggggcgatgatt

SEQ ID NO: 460712 - DNA, 19 bp, Mus musculus
  siRNA target sequence for Jundm2 (NM_030887.2,490-508).
gccagatgccggaacaaga

SEQ ID NO: 460713 - DNA, 19 bp, Mus musculus
  siRNA target sequence for Jundm2 (NM_030887.2,491-509).
ccagatgccggaacaagaa

SEQ ID NO: 460714 - DNA, 19 bp, Mus musculus
  siRNA target sequence for Jundm2 (NM_030887.2,494-512).
gatgccggaacaagaagaa

SEQ ID NO: 460715 - DNA, 19 bp, Mus musculus
  siRNA target sequence for Kcnma1 (NM_010610.1,399-417).
ctcgtcaaacccaatagaa

SEQ ID NO: 460716 - DNA, 19 bp, Mus musculus
  siRNA target sequence for Kcnma1 (NM_010610.1,432-450).
ctacaaagatttcacatta

SEQ ID NO: 460717 - DNA, 19 bp, Mus musculus
  siRNA target sequence for Kcnma1 (NM_010610.1,528-546).
gttctggctggaagtgaat

SEQ ID NO: 460718 - DNA, 19 bp, Mus musculus
  siRNA target sequence for Kcnma1 (NM_010610.1,537-555).
ggaagtgaattcagtagta

SEQ ID NO: 460719 - DNA, 19 bp, Mus musculus
  siRNA target sequence for Kcnma1 (NM_010610.1,605-623).
gttggcttggcttgagatt

SEQ ID NO: 460720 - DNA, 19 bp, Mus musculus
  siRNA target sequence for Kcnma1 (NM_010610.1,631-649).
gctctcagactgatacagt

SEQ ID NO: 460721 - DNA, 19 bp, Mus musculus
  siRNA target sequence for Kcnma1 (NM_010610.1,632-650).
ctctcagactgatacagtt

SEQ ID NO: 460722 - DNA, 19 bp, Mus musculus
  siRNA target sequence for Kcnma1 (NM_010610.1,636-654).
cagactgatacagttttca

SEQ ID NO: 460723 - DNA, 19 bp, Mus musculus
  siRNA target sequence for Kcnma1 (NM_010610.1,638-656).
gactgatacagttttcaga

SEQ ID NO: 460724 - DNA, 19 bp, Mus musculus
  siRNA target sequence for Kcnma1 (NM_010610.1,642-660).
gatacagttttcagagatt

SEQ ID NO: 460725 - DNA, 19 bp, Mus musculus
  siRNA target sequence for Kcnma1 (NM_010610.1,655-673).
gagattttgcagtttctga

SEQ ID NO: 460726 - DNA, 19 bp, Mus musculus
  siRNA target sequence for Kcnma1 (NM_010610.1,663-681).
gcagtttctgaatatcctt

SEQ ID NO: 460727 - DNA, 19 bp, Mus musculus
  siRNA target sequence for Kcnma1 (NM_010610.1,706-724).
gtgaatctgctctccatat

SEQ ID NO: 460728 - DNA, 19 bp, Mus musculus
  siRNA target sequence for Kcnma1 (NM_010610.1,759-777).
ccacttggtggagaattca

SEQ ID NO: 460729 - DNA, 19 bp, Mus musculus
  siRNA target sequence for Kcnma1 (NM_010610.1,822-840).
ctgggaatgtgtctactta

SEQ ID NO: 460730 - DNA, 19 bp, Mus musculus
  siRNA target sequence for Kcnma1 (NM_010610.1,824-842).
gggaatgtgtctacttact

SEQ ID NO: 460731 - DNA, 19 bp, Mus musculus
  siRNA target sequence for Kcnma1 (NM_010610.1,826-844).
gaatgtgtctacttactca

SEQ ID NO: 460732 - DNA, 19 bp, Mus musculus
  siRNA target sequence for Kcnma1 (NM_010610.1,841-859).
ctcatggtcacaatgtcta

SEQ ID NO: 460733 - DNA, 19 bp, Mus musculus
  siRNA target sequence for Kcnma1 (NM_010610.1,864-882).
gggttatggggacgtttat

SEQ ID NO: 460734 - DNA, 19 bp, Mus musculus
  siRNA target sequence for Kcnma1 (NM_010610.1,871-889).
ggggacgtttatgcaaaaa

SEQ ID NO: 460735 - DNA, 19 bp, Mus musculus
  siRNA target sequence for Kcnma1 (NM_010610.1,874-892).
gacgtttatgcaaaaacca

SEQ ID NO: 460736 - DNA, 19 bp, Mus musculus
  siRNA target sequence for Kcnma1 (NM_010610.1,893-911).
cacttggacgcctcttcat

SEQ ID NO: 460737 - DNA, 19 bp, Mus musculus
  siRNA target sequence for Kcnma1 (NM_010610.1,947-965).
ccagctacgtccctgaaat

SEQ ID NO: 460738 - DNA, 19 bp, Mus musculus
  siRNA target sequence for Kcnma1 (NM_010610.1,950-968).
gctacgtccctgaaatcat

SEQ ID NO: 460739 - DNA, 19 bp, Mus musculus
  siRNA target sequence for Kcnma1 (NM_010610.1,951-969).
ctacgtccctgaaatcata

SEQ ID NO: 460740 - DNA, 19 bp, Mus musculus
  siRNA target sequence for Kcnma1 (NM_010610.1,1010-1028).
gcgcggttagtggaagaaa

SEQ ID NO: 460741 - DNA, 19 bp, Mus musculus
  siRNA target sequence for Kcnma1 (NM_010610.1,1019-1037).
gtggaagaaagcacattgt

SEQ ID NO: 460742 - DNA, 19 bp, Mus musculus
  siRNA target sequence for Kcnma1 (NM_010610.1,1111-1129).
gtcaacgtggagattgtct

SEQ ID NO: 460743 - DNA, 19 bp, Mus musculus
  siRNA target sequence for Kcnma1 (NM_010610.1,1116-1134).
cgtggagattgtctttctt

SEQ ID NO: 460744 - DNA, 19 bp, Mus musculus
  siRNA target sequence for Kcnma1 (NM_010610.1,1158-1176).
gcttgaggctctgttcaaa

SEQ ID NO: 460745 - DNA, 19 bp, Mus musculus
  siRNA target sequence for Kcnma1 (NM_010610.1,1168-1186).
ctgttcaaacggcatttca

SEQ ID NO: 460746 - DNA, 19 bp, Mus musculus
  siRNA target sequence for Kcnma1 (NM_010610.1,1170-1188).
gttcaaacggcatttcact

SEQ ID NO: 460747 - DNA, 19 bp, Mus musculus
  siRNA target sequence for Kcnma1 (NM_010610.1,1187-1205).
ctcaggtggagttttatca

SEQ ID NO: 460748 - DNA, 19 bp, Mus musculus
  siRNA target sequence for Kcnma1 (NM_010610.1,1215-1233).
cctcaatccacatgatctt

SEQ ID NO: 460749 - DNA, 19 bp, Mus musculus
  siRNA target sequence for Kcnma1 (NM_010610.1,1234-1252).
gccagagtcaagatagagt

SEQ ID NO: 460750 - DNA, 19 bp, Mus musculus
  siRNA target sequence for Kcnma1 (NM_010610.1,1435-1453).
gagggtgatgacgcaatat

SEQ ID NO: 460751 - DNA, 19 bp, Mus musculus
  siRNA target sequence for Kcnma1 (NM_010610.1,1522-1540).
gccaatctcttctctatga

SEQ ID NO: 460752 - DNA, 19 bp, Mus musculus
  siRNA target sequence for Kcnma1 (NM_010610.1,1533-1551).
ctctatgaggtcattcata

SEQ ID NO: 460753 - DNA, 19 bp, Mus musculus
  siRNA target sequence for Kcnma1 (NM_010610.1,1564-1582).
gacacatggcagaaatact

SEQ ID NO: 460754 - DNA, 19 bp, Mus musculus
  siRNA target sequence for Kcnma1 (NM_010610.1,1587-1605).
ggaaggagtctccaatgaa

SEQ ID NO: 460755 - DNA, 19 bp, Mus musculus
  siRNA target sequence for Kcnma1 (NM_010610.1,1588-1606).
gaaggagtctccaatgaaa

SEQ ID NO: 460756 - DNA, 19 bp, Mus musculus
  siRNA target sequence for Kcnma1 (NM_010610.1,1592-1610).
gagtctccaatgaaatgta

SEQ ID NO: 460757 - DNA, 19 bp, Mus musculus
  siRNA target sequence for Kcnma1 (NM_010610.1,1680-1698).
gcttaagctcctgatgata

SEQ ID NO: 460758 - DNA, 19 bp, Mus musculus
  siRNA target sequence for Kcnma1 (NM_010610.1,1747-1765).
cctgggaaccaccttaaga

SEQ ID NO: 460759 - DNA, 19 bp, Mus musculus
  siRNA target sequence for Kcnma1 (NM_010610.1,1748-1766).
ctgggaaccaccttaagat

SEQ ID NO: 460760 - DNA, 19 bp, Mus musculus
  siRNA target sequence for Kcnma1 (NM_010610.1,1764-1782).
gatccaagaaggtacttta

SEQ ID NO: 460761 - DNA, 19 bp, Mus musculus
  siRNA target sequence for Kcnma1 (NM_010610.1,1835-1853).
gcaaggcctgtcatgatga

SEQ ID NO: 460762 - DNA, 19 bp, Mus musculus
  siRNA target sequence for Kcnma1 (NM_010610.1,1897-1915).
cccaagatgtccatctaca

SEQ ID NO: 460763 - DNA, 19 bp, Mus musculus
  siRNA target sequence for Kcnma1 (NM_010610.1,2163-2181).
gaggcatgaccccttgtta

SEQ ID NO: 460764 - DNA, 19 bp, Mus musculus
  siRNA target sequence for Kcnma1 (NM_010610.1,2166-2184).
gcatgaccccttgttaatt

SEQ ID NO: 460765 - DNA, 19 bp, Mus musculus
  siRNA target sequence for Kcnma1 (NM_010610.1,2186-2204).
ctggcaatgatcagattga

SEQ ID NO: 460766 - DNA, 19 bp, Mus musculus
  siRNA target sequence for Kcnma1 (NM_010610.1,2188-2206).
ggcaatgatcagattgaca

SEQ ID NO: 460767 - DNA, 19 bp, Mus musculus
  siRNA target sequence for Kcnma1 (NM_010610.1,2189-2207).
gcaatgatcagattgacaa

SEQ ID NO: 460768 - DNA, 19 bp, Mus musculus
  siRNA target sequence for Kcnma1 (NM_010610.1,2283-2301).
catcttgactcgaagtgaa

SEQ ID NO: 460769 - DNA, 19 bp, Mus musculus
  siRNA target sequence for Kcnma1 (NM_010610.1,2398-2416).
cgtgctagcaactttcact

SEQ ID NO: 460770 - DNA, 19 bp, Mus musculus
  siRNA target sequence for Kcnma1 (NM_010610.1,2511-2529).
gcctggtacaccattaagt

SEQ ID NO: 460771 - DNA, 19 bp, Mus musculus
  siRNA target sequence for Kcnma1 (NM_010610.1,2522-2540).
cattaagtcgggctgattt

SEQ ID NO: 460772 - DNA, 19 bp, Mus musculus
  siRNA target sequence for Kcnma1 (NM_010610.1,2564-2582).
gtgacatgtgcgttatcct

SEQ ID NO: 460773 - DNA, 19 bp, Mus musculus
  siRNA target sequence for Kcnma1 (NM_010610.1,2585-2603).
cagccaatcagaataatat

SEQ ID NO: 460774 - DNA, 19 bp, Mus musculus
  siRNA target sequence for Kcnma1 (NM_010610.1,2588-2606).
ccaatcagaataatattga

SEQ ID NO: 460775 - DNA, 19 bp, Mus musculus
  siRNA target sequence for Kcnma1 (NM_010610.1,2593-2611).
cagaataatattgatgata

SEQ ID NO: 460776 - DNA, 19 bp, Mus musculus
  siRNA target sequence for Kcnma1 (NM_010610.1,2641-2659).
gcgtcactcaacatcaaat

SEQ ID NO: 460777 - DNA, 19 bp, Mus musculus
  siRNA target sequence for Kcnma1 (NM_010610.1,2643-2661).
gtcactcaacatcaaatct

SEQ ID NO: 460778 - DNA, 19 bp, Mus musculus
  siRNA target sequence for Kcnma1 (NM_010610.1,2645-2663).
cactcaacatcaaatctat

SEQ ID NO: 460779 - DNA, 19 bp, Mus musculus
  siRNA target sequence for Kcnma1 (NM_010610.1,2655-2673).
caaatctatgcagtttgat

SEQ ID NO: 460780 - DNA, 19 bp, Mus musculus
  siRNA target sequence for Kcnma1 (NM_010610.1,2683-2701).
ggggtcttgcaggctaatt

SEQ ID NO: 460781 - DNA, 19 bp, Mus musculus
  siRNA target sequence for Kcnma1 (NM_010610.1,2770-2788).
cgccagccgtccatcacaa

SEQ ID NO: 460782 - DNA, 19 bp, Mus musculus
  siRNA target sequence for Kcnma1 (NM_010610.1,2784-2802).
cacaactggggtcaacatt

SEQ ID NO: 460783 - DNA, 19 bp, Mus musculus
  siRNA target sequence for Kcnma1 (NM_010610.1,2811-2829).
cacggaactcgtgaatgat

SEQ ID NO: 460784 - DNA, 19 bp, Mus musculus
  siRNA target sequence for Kcnma1 (NM_010610.1,2820-2838).
cgtgaatgataccaatgtt

SEQ ID NO: 460785 - DNA, 19 bp, Mus musculus
  siRNA target sequence for Kcnma1 (NM_010610.1,2941-2959).
ctcatgagcgcgacatact

SEQ ID NO: 460786 - DNA, 19 bp, Mus musculus
  siRNA target sequence for Kcnma1 (NM_010610.1,2948-2966).
gcgcgacatacttcaatga

SEQ ID NO: 460787 - DNA, 19 bp, Mus musculus
  siRNA target sequence for Kcnma1 (NM_010610.1,2967-2985).
caatatcctcaccctaata

SEQ ID NO: 460788 - DNA, 19 bp, Mus musculus
  siRNA target sequence for Kcnma1 (NM_010610.1,3018-3036).
gctcgaggctctaatagct

SEQ ID NO: 460789 - DNA, 19 bp, Mus musculus
  siRNA target sequence for Kcnma1 (NM_010610.1,3108-3126).
ccagttagccctgttagat

SEQ ID NO: 460790 - DNA, 19 bp, Mus musculus
  siRNA target sequence for Kcnma1 (NM_010610.1,3177-3195).
caaagctctgaaaacatat

SEQ ID NO: 460791 - DNA, 19 bp, Mus musculus
  siRNA target sequence for Kcnma1 (NM_010610.1,3181-3199).
gctctgaaaacatataata

SEQ ID NO: 460792 - DNA, 19 bp, Mus musculus
  siRNA target sequence for Kcnma1 (NM_010610.1,3186-3204).
gaaaacatataatatgctt

SEQ ID NO: 460793 - DNA, 19 bp, Mus musculus
  siRNA target sequence for Kcnma1 (NM_010610.1,3245-3263).
cccccagccagtgtacaaa

SEQ ID NO: 460794 - DNA, 19 bp, Mus musculus
  siRNA target sequence for Kcnma1 (NM_010610.1,3247-3265).
cccagccagtgtacaaaaa

SEQ ID NO: 460795 - DNA, 19 bp, Mus musculus
  siRNA target sequence for Kcnma1 (NM_010610.1,3429-3447).
catcccgtccacagcaaat

SEQ ID NO: 460796 - DNA, 19 bp, Mus musculus
  siRNA target sequence for Kcnma1 (NM_010610.1,3470-3488).
gggagtcccgcgacaaaca

SEQ ID NO: 460797 - DNA, 19 bp, Mus musculus
  siRNA target sequence for Kcnma1 (NM_010610.1,3472-3490).
gagtcccgcgacaaacaga

SEQ ID NO: 460798 - DNA, 19 bp, Mus musculus
  siRNA target sequence for Kiaa0298-hp (NM_181853.1,431-449).
gcgagacgtgcgatgtact

SEQ ID NO: 460799 - DNA, 19 bp, Mus musculus
  siRNA target sequence for Kiaa0298-hp (NM_181853.1,547-565).
caggtggcacataagaaat

SEQ ID NO: 460800 - DNA, 19 bp, Mus musculus
  siRNA target sequence for Kiaa0298-hp (NM_181853.1,578-596).
catctgcaaagcaaatcga

SEQ ID NO: 460801 - DNA, 19 bp, Mus musculus
  siRNA target sequence for Kiaa0298-hp (NM_181853.1,588-606).
gcaaatcgaggacagaatt

SEQ ID NO: 460802 - DNA, 19 bp, Mus musculus
  siRNA target sequence for Kiaa0298-hp (NM_181853.1,667-685).
ctcatgaacgagttgaaca

SEQ ID NO: 460803 - DNA, 19 bp, Mus musculus
  siRNA target sequence for Kiaa0298-hp (NM_181853.1,709-727).
gagcttgagggcatcacta

SEQ ID NO: 460804 - DNA, 19 bp, Mus musculus
  siRNA target sequence for Kiaa0298-hp (NM_181853.1,777-795).
caaccggcagtttgaacat

SEQ ID NO: 460805 - DNA, 19 bp, Mus musculus
  siRNA target sequence for Kiaa0298-hp (NM_181853.1,889-907).
ctggagacgagatgtaaca

SEQ ID NO: 460806 - DNA, 19 bp, Mus musculus
  siRNA target sequence for Kiaa0298-hp (NM_181853.1,891-909).
ggagacgagatgtaacaca

SEQ ID NO: 460807 - DNA, 19 bp, Mus musculus
  siRNA target sequence for Kiaa0298-hp (NM_181853.1,916-934).
ggctctccttggagtatca

SEQ ID NO: 460808 - DNA, 19 bp, Mus musculus
  siRNA target sequence for Kiaa0298-hp (NM_181853.1,920-938).
ctccttggagtatcagatt

SEQ ID NO: 460809 - DNA, 19 bp, Mus musculus
  siRNA target sequence for Kiaa0298-hp (NM_181853.1,922-940).
ccttggagtatcagattca

SEQ ID NO: 460810 - DNA, 19 bp, Mus musculus
  siRNA target sequence for Kiaa0298-hp (NM_181853.1,1034-1052).
cctcttatgggagtttaca

SEQ ID NO: 460811 - DNA, 19 bp, Mus musculus
  siRNA target sequence for Kiaa0298-hp (NM_181853.1,1276-1294).
gggtcactgcagtgttcta

SEQ ID NO: 460812 - DNA, 19 bp, Mus musculus
  siRNA target sequence for Kiaa0298-hp (NM_181853.1,1331-1349).
ctcatccacccaaactgat

SEQ ID NO: 460813 - DNA, 19 bp, Mus musculus
  siRNA target sequence for Kiaa0298-hp (NM_181853.1,1493-1511).
caccctccatccaagttca

SEQ ID NO: 460814 - DNA, 19 bp, Mus musculus
  siRNA target sequence for Kiaa0298-hp (NM_181853.1,1928-1946).
cagctctacctgttgacaa

SEQ ID NO: 460815 - DNA, 19 bp, Mus musculus
  siRNA target sequence for Kiaa0298-hp (NM_181853.1,2022-2040).
ccagcactcttctccaaat

SEQ ID NO: 460816 - DNA, 19 bp, Mus musculus
  siRNA target sequence for Kiaa0298-hp (NM_181853.1,2069-2087).
gcatcatgggcttttccaa

SEQ ID NO: 460817 - DNA, 19 bp, Mus musculus
  siRNA target sequence for Kiaa0298-hp (NM_181853.1,2092-2110).
gtggagatggagttgtcat

SEQ ID NO: 460818 - DNA, 19 bp, Mus musculus
  siRNA target sequence for Kiaa0298-hp (NM_181853.1,2199-2217).
gagtggcccaccacaaact

SEQ ID NO: 460819 - DNA, 19 bp, Mus musculus
  siRNA target sequence for Kiaa0298-hp (NM_181853.1,2223-2241).
cagcctgatgagtgtttca

SEQ ID NO: 460820 - DNA, 19 bp, Mus musculus
  siRNA target sequence for Kiaa0298-hp (NM_181853.1,2225-2243).
gcctgatgagtgtttcaaa

SEQ ID NO: 460821 - DNA, 19 bp, Mus musculus
  siRNA target sequence for Kiaa0298-hp (NM_181853.1,2277-2295).
gcagcccgtgccaaacctt

SEQ ID NO: 460822 - DNA, 19 bp, Mus musculus
  siRNA target sequence for Kiaa0298-hp (NM_181853.1,2354-2372).
caggcctggcaagtaatca

SEQ ID NO: 460823 - DNA, 19 bp, Mus musculus
  siRNA target sequence for Kiaa0298-hp (NM_181853.1,2356-2374).
ggcctggcaagtaatcact

SEQ ID NO: 460824 - DNA, 19 bp, Mus musculus
  siRNA target sequence for Kiaa0298-hp (NM_181853.1,2559-2577).
gaatgccttgtgtaaggta

SEQ ID NO: 460825 - DNA, 19 bp, Mus musculus
  siRNA target sequence for Kiaa0298-hp (NM_181853.1,2642-2660).
ccactgctctgcaacagta

SEQ ID NO: 460826 - DNA, 19 bp, Mus musculus
  siRNA target sequence for Kiaa0298-hp (NM_181853.1,2653-2671).
caacagtaccggaatccaa

SEQ ID NO: 460827 - DNA, 19 bp, Mus musculus
  siRNA target sequence for Kiaa0298-hp (NM_181853.1,2698-2716).
gccctagagctggatacaa

SEQ ID NO: 460828 - DNA, 19 bp, Mus musculus
  siRNA target sequence for Kiaa0298-hp (NM_181853.1,2771-2789).
gactggagcggctcaagat

SEQ ID NO: 460829 - DNA, 19 bp, Mus musculus
  siRNA target sequence for Kiaa0298-hp (NM_181853.1,3138-3156).
ccgctgccccaaagtgtat

SEQ ID NO: 460830 - DNA, 19 bp, Mus musculus
  siRNA target sequence for Kiaa0298-hp (NM_181853.1,3140-3158).
gctgccccaaagtgtatca

SEQ ID NO: 460831 - DNA, 19 bp, Mus musculus
  siRNA target sequence for Kiaa0298-hp (NM_181853.1,3393-3411).
ccctctggccaggcattat

SEQ ID NO: 460832 - DNA, 19 bp, Mus musculus
  siRNA target sequence for Kiaa0298-hp (NM_181853.1,3394-3412).
cctctggccaggcattatt

SEQ ID NO: 460833 - DNA, 19 bp, Mus musculus
  siRNA target sequence for Kiaa0298-hp (NM_181853.1,3395-3413).
ctctggccaggcattatta

SEQ ID NO: 460834 - DNA, 19 bp, Mus musculus
  siRNA target sequence for Kiaa0298-hp (NM_181853.1,3428-3446).
ggcccatggacctgtcaat

SEQ ID NO: 460835 - DNA, 19 bp, Mus musculus
  siRNA target sequence for Kiaa0298-hp (NM_181853.1,3430-3448).
cccatggacctgtcaatca

SEQ ID NO: 460836 - DNA, 19 bp, Mus musculus
  siRNA target sequence for Kiaa0298-hp (NM_181853.1,3431-3449).
ccatggacctgtcaatcat

SEQ ID NO: 460837 - DNA, 19 bp, Mus musculus
  siRNA target sequence for Kiaa0298-hp (NM_181853.1,3471-3489).
ggacccagctcattacact

SEQ ID NO: 460838 - DNA, 19 bp, Mus musculus
  siRNA target sequence for Kiaa0298-hp (NM_181853.1,3472-3490).
gacccagctcattacacta

SEQ ID NO: 460839 - DNA, 19 bp, Mus musculus
  siRNA target sequence for Kiaa0298-hp (NM_181853.1,3509-3527).
cagatgtacgcctcatgtt

SEQ ID NO: 460840 - DNA, 19 bp, Mus musculus
  siRNA target sequence for Kiaa0298-hp (NM_181853.1,3534-3552).
ctgtgctaagttcaattat

SEQ ID NO: 460841 - DNA, 19 bp, Mus musculus
  siRNA target sequence for Kiaa0298-hp (NM_181853.1,3615-3633).
ggagatctacccagacaaa

SEQ ID NO: 460842 - DNA, 19 bp, Mus musculus
  siRNA target sequence for Kiaa0298-hp (NM_181853.1,3616-3634).
gagatctacccagacaaat

SEQ ID NO: 460843 - DNA, 19 bp, Mus musculus
  siRNA target sequence for Kiaa0298-hp (NM_181853.1,3621-3639).
ctacccagacaaatgcttt

SEQ ID NO: 460844 - DNA, 19 bp, Mus musculus
  siRNA target sequence for Kif22 (NM_145588.1,234-252).
ctaactggaagaaatacca

SEQ ID NO: 460845 - DNA, 19 bp, Mus musculus
  siRNA target sequence for Kif22 (NM_145588.1,256-274).
gacgctcaaatatcagttt

SEQ ID NO: 460846 - DNA, 19 bp, Mus musculus
  siRNA target sequence for Kif22 (NM_145588.1,258-276).
cgctcaaatatcagtttga

SEQ ID NO: 460847 - DNA, 19 bp, Mus musculus
  siRNA target sequence for Kif22 (NM_145588.1,541-559).
ctaccaggaaaaggtatta

SEQ ID NO: 460848 - DNA, 19 bp, Mus musculus
  siRNA target sequence for Kif22 (NM_145588.1,795-813).
gccagcgggaaggaaaact

SEQ ID NO: 460849 - DNA, 19 bp, Mus musculus
  siRNA target sequence for Kif22 (NM_145588.1,797-815).
cagcgggaaggaaaactct

SEQ ID NO: 460850 - DNA, 19 bp, Mus musculus
  siRNA target sequence for Kif22 (NM_145588.1,866-884).
ggcattcggctcaaagaga

SEQ ID NO: 460851 - DNA, 19 bp, Mus musculus
  siRNA target sequence for Kif22 (NM_145588.1,881-899).
gagagcggagccatcaaca

SEQ ID NO: 460852 - DNA, 19 bp, Mus musculus
  siRNA target sequence for Kif22 (NM_145588.1,944-962).
ggcctccctcgcataccat

SEQ ID NO: 460853 - DNA, 19 bp, Mus musculus
  siRNA target sequence for Kif22 (NM_145588.1,945-963).
gcctccctcgcataccata

SEQ ID NO: 460854 - DNA, 19 bp, Mus musculus
  siRNA target sequence for Kif22 (NM_145588.1,1068-1086).
caatttcagcattgaactt

SEQ ID NO: 460855 - DNA, 19 bp, Mus musculus
  siRNA target sequence for Kif22 (NM_145588.1,1115-1133).
cggcctttcaccaatgaga

SEQ ID NO: 460856 - DNA, 19 bp, Mus musculus
  siRNA target sequence for Kif22 (NM_145588.1,1188-1206).
gcccgtcagaggcaaagaa

SEQ ID NO: 460857 - DNA, 19 bp, Mus musculus
  siRNA target sequence for Kif22 (NM_145588.1,1216-1234).
ccctgaagaagaatcaact

SEQ ID NO: 460858 - DNA, 19 bp, Mus musculus
  siRNA target sequence for Kif22 (NM_145588.1,1264-1282).
gtctgcctcccagaaacta

SEQ ID NO: 460859 - DNA, 19 bp, Mus musculus
  siRNA target sequence for Kif22 (NM_145588.1,1294-1312).
gaagctaagcaatatggat

SEQ ID NO: 460860 - DNA, 19 bp, Mus musculus
  siRNA target sequence for Kif22 (NM_145588.1,1373-1391).
gggacccccctactgaata

SEQ ID NO: 460861 - DNA, 19 bp, Mus musculus
  siRNA target sequence for Kif22 (NM_145588.1,1392-1410).
ccccaaagcgagaacgaat

SEQ ID NO: 460862 - DNA, 19 bp, Mus musculus
  siRNA target sequence for Kif22 (NM_145588.1,1406-1424).
cgaatggtgctcatgaaga

SEQ ID NO: 460863 - DNA, 19 bp, Mus musculus
  siRNA target sequence for Kif22 (NM_145588.1,1455-1473).
ggcttaagatgaagcaaaa

SEQ ID NO: 460864 - DNA, 19 bp, Mus musculus
  siRNA target sequence for Kif22 (NM_145588.1,1546-1564).
ccagccgcctgcctcttat

SEQ ID NO: 460865 - DNA, 19 bp, Mus musculus
  siRNA target sequence for Kif22 (NM_145588.1,1630-1648).
gcgagagtcctcaaaccaa

SEQ ID NO: 460866 - DNA, 19 bp, Mus musculus
  siRNA target sequence for Kif22 (NM_145588.1,1632-1650).
gagagtcctcaaaccaaat

SEQ ID NO: 460867 - DNA, 19 bp, Mus musculus
  siRNA target sequence for Kif22 (NM_145588.1,1760-1778).
gcacatgggcgcaaaaaat

SEQ ID NO: 460868 - DNA, 19 bp, Mus musculus
  siRNA target sequence for Kif22 (NM_145588.1,1761-1779).
cacatgggcgcaaaaaatt

SEQ ID NO: 460869 - DNA, 19 bp, Mus musculus
  siRNA target sequence for Kif22 (NM_145588.1,1763-1781).
catgggcgcaaaaaattat

SEQ ID NO: 460870 - DNA, 19 bp, Mus musculus
  siRNA target sequence for Kif4 (NM_008446.1,784-802).
ccctcgtctcgaaagagat

SEQ ID NO: 460871 - DNA, 19 bp, Mus musculus
  siRNA target sequence for Kif4 (NM_008446.1,785-803).
cctcgtctcgaaagagatt

SEQ ID NO: 460872 - DNA, 19 bp, Mus musculus
  siRNA target sequence for Kif4 (NM_008446.1,786-804).
ctcgtctcgaaagagatta

SEQ ID NO: 460873 - DNA, 19 bp, Mus musculus
  siRNA target sequence for Kif4 (NM_008446.1,912-930).
caggaagaggtctttaata

SEQ ID NO: 460874 - DNA, 19 bp, Mus musculus
  siRNA target sequence for Kif4 (NM_008446.1,914-932).
ggaagaggtctttaataca

SEQ ID NO: 460875 - DNA, 19 bp, Mus musculus
  siRNA target sequence for Kif4 (NM_008446.1,933-951).
gcagtagctccactcataa

SEQ ID NO: 460876 - DNA, 19 bp, Mus musculus
  siRNA target sequence for Kif4 (NM_008446.1,934-952).
cagtagctccactcataaa

SEQ ID NO: 460877 - DNA, 19 bp, Mus musculus
  siRNA target sequence for Kif4 (NM_008446.1,945-963).
ctcataaaaggcgtgttta

SEQ ID NO: 460878 - DNA, 19 bp, Mus musculus
  siRNA target sequence for Kif4 (NM_008446.1,955-973).
gcgtgtttaaaggatacaa

SEQ ID NO: 460879 - DNA, 19 bp, Mus musculus
  siRNA target sequence for Kif4 (NM_008446.1,1006-1024).
ctggaaaaacgtattcaat

SEQ ID NO: 460880 - DNA, 19 bp, Mus musculus
  siRNA target sequence for Kif4 (NM_008446.1,1058-1076).
ctcagccattggggttatt

SEQ ID NO: 460881 - DNA, 19 bp, Mus musculus
  siRNA target sequence for Kif4 (NM_008446.1,1120-1138).
gtgacttcgaatttactct

SEQ ID NO: 460882 - DNA, 19 bp, Mus musculus
  siRNA target sequence for Kif4 (NM_008446.1,1128-1146).
gaatttactctgaaagtgt

SEQ ID NO: 460883 - DNA, 19 bp, Mus musculus
  siRNA target sequence for Kif4 (NM_008446.1,1197-1215).
cgtgagaaagctactcaaa

SEQ ID NO: 460884 - DNA, 19 bp, Mus musculus
  siRNA target sequence for Kif4 (NM_008446.1,1233-1251).
cctaaggaaggcataaaga

SEQ ID NO: 460885 - DNA, 19 bp, Mus musculus
  siRNA target sequence for Kif4 (NM_008446.1,1305-1323).
ctagagcagggtaacaact

SEQ ID NO: 460886 - DNA, 19 bp, Mus musculus
  siRNA target sequence for Kif4 (NM_008446.1,1355-1373).
ccagtcatctcgatctcat

SEQ ID NO: 460887 - DNA, 19 bp, Mus musculus
  siRNA target sequence for Kif4 (NM_008446.1,1371-1389).
catgccatctttacaatct

SEQ ID NO: 460888 - DNA, 19 bp, Mus musculus
  siRNA target sequence for Kif4 (NM_008446.1,1435-1453).
ccaagctgcatcttgtaga

SEQ ID NO: 460889 - DNA, 19 bp, Mus musculus
  siRNA target sequence for Kif4 (NM_008446.1,1452-1470).
gacctcgctggatcagaaa

SEQ ID NO: 460890 - DNA, 19 bp, Mus musculus
  siRNA target sequence for Kif4 (NM_008446.1,1454-1472).
cctcgctggatcagaaaga

SEQ ID NO: 460891 - DNA, 19 bp, Mus musculus
  siRNA target sequence for Kif4 (NM_008446.1,1500-1518).
cgactgagagagggtatta

SEQ ID NO: 460892 - DNA, 19 bp, Mus musculus
  siRNA target sequence for Kif4 (NM_008446.1,1511-1529).
gggtattaatattaatcga

SEQ ID NO: 460893 - DNA, 19 bp, Mus musculus
  siRNA target sequence for Kif4 (NM_008446.1,1681-1699).
ctgattccaatctagaaga

SEQ ID NO: 460894 - DNA, 19 bp, Mus musculus
  siRNA target sequence for Kif4 (NM_008446.1,1770-1788).
ccccaggcagctgaactaa

SEQ ID NO: 460895 - DNA, 19 bp, Mus musculus
  siRNA target sequence for Kif4 (NM_008446.1,1771-1789).
cccaggcagctgaactaaa

SEQ ID NO: 460896 - DNA, 19 bp, Mus musculus
  siRNA target sequence for Kif4 (NM_008446.1,1772-1790).
ccaggcagctgaactaaat

SEQ ID NO: 460897 - DNA, 19 bp, Mus musculus
  siRNA target sequence for Kif4 (NM_008446.1,1850-1868).
cttgcctggagatataaat

SEQ ID NO: 460898 - DNA, 19 bp, Mus musculus
  siRNA target sequence for Kif4 (NM_008446.1,2048-2066).
gcggcatgcggcctgtaaa

SEQ ID NO: 460899 - DNA, 19 bp, Mus musculus
  siRNA target sequence for Kif4 (NM_008446.1,2134-2152).
gcaacctacaacaagtgat

SEQ ID NO: 460900 - DNA, 19 bp, Mus musculus
  siRNA target sequence for Kif4 (NM_008446.1,2135-2153).
caacctacaacaagtgatt

SEQ ID NO: 460901 - DNA, 19 bp, Mus musculus
  siRNA target sequence for Kif4 (NM_008446.1,2186-2204).
gactgcaaccattgatact

SEQ ID NO: 460902 - DNA, 19 bp, Mus musculus
  siRNA target sequence for Kif4 (NM_008446.1,2248-2266).
gcaggtcttctgatgtttt

SEQ ID NO: 460903 - DNA, 19 bp, Mus musculus
  siRNA target sequence for Kif4 (NM_008446.1,2307-2325).
gagctgattgagttgaata

SEQ ID NO: 460904 - DNA, 19 bp, Mus musculus
  siRNA target sequence for Kif4 (NM_008446.1,2312-2330).
gattgagttgaataaagca

SEQ ID NO: 460905 - DNA, 19 bp, Mus musculus
  siRNA target sequence for Kif4 (NM_008446.1,2396-2414).
gttccagtaccaggataat

SEQ ID NO: 460906 - DNA, 19 bp, Mus musculus
  siRNA target sequence for Kif4 (NM_008446.1,2399-2417).
ccagtaccaggataatatt

SEQ ID NO: 460907 - DNA, 19 bp, Mus musculus
  siRNA target sequence for Kif4 (NM_008446.1,2400-2418).
cagtaccaggataatatta

SEQ ID NO: 460908 - DNA, 19 bp, Mus musculus
  siRNA target sequence for Kif4 (NM_008446.1,2516-2534).
gagtgagcgccgtcgtaaa

SEQ ID NO: 460909 - DNA, 19 bp, Mus musculus
  siRNA target sequence for Kif4 (NM_008446.1,2646-2664).
caggagattcggatgatga

SEQ ID NO: 460910 - DNA, 19 bp, Mus musculus
  siRNA target sequence for Kif4 (NM_008446.1,2681-2699).
gttaatgcgtcaaatgaaa

SEQ ID NO: 460911 - DNA, 19 bp, Mus musculus
  siRNA target sequence for Kif4 (NM_008446.1,2768-2786).
ggatcgtaaaaggcaatat

SEQ ID NO: 460912 - DNA, 19 bp, Mus musculus
  siRNA target sequence for Kif4 (NM_008446.1,2863-2881).
ccaacaaacgtcttaagga

SEQ ID NO: 460913 - DNA, 19 bp, Mus musculus
  siRNA target sequence for Kif4 (NM_008446.1,2864-2882).
caacaaacgtcttaaggat

SEQ ID NO: 460914 - DNA, 19 bp, Mus musculus
  siRNA target sequence for Kif4 (NM_008446.1,2950-2968).
ctgcagctagaatgaagaa

SEQ ID NO: 460915 - DNA, 19 bp, Mus musculus
  siRNA target sequence for Kif4 (NM_008446.1,2952-2970).
gcagctagaatgaagaatt

SEQ ID NO: 460916 - DNA, 19 bp, Mus musculus
  siRNA target sequence for Kif4 (NM_008446.1,3031-3049).
gccttcttgaagagagaaa

SEQ ID NO: 460917 - DNA, 19 bp, Mus musculus
  siRNA target sequence for Kif4 (NM_008446.1,3068-3086).
ggcacaactcaaagagaaa

SEQ ID NO: 460918 - DNA, 19 bp, Mus musculus
  siRNA target sequence for Kif4 (NM_008446.1,3097-3115).
gagagaacccacctcttaa

SEQ ID NO: 460919 - DNA, 19 bp, Mus musculus
  siRNA target sequence for Kif4 (NM_008446.1,3117-3135).
ctccgaaggcgcacatttt

SEQ ID NO: 460920 - DNA, 19 bp, Mus musculus
  siRNA target sequence for Kif4 (NM_008446.1,3120-3138).
cgaaggcgcacattttcct

SEQ ID NO: 460921 - DNA, 19 bp, Mus musculus
  siRNA target sequence for Kif4 (NM_008446.1,3130-3148).
cattttcctacgatgaaat

SEQ ID NO: 460922 - DNA, 19 bp, Mus musculus
  siRNA target sequence for Kif4 (NM_008446.1,3351-3369).
gagctcgtctcctccaaaa

SEQ ID NO: 460923 - DNA, 19 bp, Mus musculus
  siRNA target sequence for Kif4 (NM_008446.1,3353-3371).
gctcgtctcctccaaaata

SEQ ID NO: 460924 - DNA, 19 bp, Mus musculus
  siRNA target sequence for Kif4 (NM_008446.1,3406-3424).
gcaaggccagctgtattga

SEQ ID NO: 460925 - DNA, 19 bp, Mus musculus
  siRNA target sequence for Kif4 (NM_008446.1,3446-3464).
ggagcaaaatcattttgct

SEQ ID NO: 460926 - DNA, 19 bp, Mus musculus
  siRNA target sequence for Kif4 (NM_008446.1,3456-3474).
cattttgctaagatagaga

SEQ ID NO: 460927 - DNA, 19 bp, Mus musculus
  siRNA target sequence for Kif4 (NM_008446.1,3608-3626).
gctgctgagcacactaaaa

SEQ ID NO: 460928 - DNA, 19 bp, Mus musculus
  siRNA target sequence for Kif4 (NM_008446.1,3609-3627).
ctgctgagcacactaaaat

SEQ ID NO: 460929 - DNA, 19 bp, Mus musculus
  siRNA target sequence for Kif4 (NM_008446.1,3678-3696).
cagcttctccaagaaaaca

SEQ ID NO: 460930 - DNA, 19 bp, Mus musculus
  siRNA target sequence for Kif4 (NM_008446.1,3680-3698).
gcttctccaagaaaacagt

SEQ ID NO: 460931 - DNA, 19 bp, Mus musculus
  siRNA target sequence for Kif4 (NM_008446.1,3747-3765).
ccccatctcacaagaaata

SEQ ID NO: 460932 - DNA, 19 bp, Mus musculus
  siRNA target sequence for Kif4 (NM_008446.1,3801-3819).
ccacctaagcccaaacctt

SEQ ID NO: 460933 - DNA, 19 bp, Mus musculus
  siRNA target sequence for Kif4 (NM_008446.1,3811-3829).
ccaaaccttgccgcattaa

SEQ ID NO: 460934 - DNA, 19 bp, Mus musculus
  siRNA target sequence for Kif4 (NM_008446.1,3816-3834).
ccttgccgcattaaggaaa

SEQ ID NO: 460935 - DNA, 19 bp, Mus musculus
  siRNA target sequence for Kif4 (NM_008446.1,3817-3835).
cttgccgcattaaggaaaa

SEQ ID NO: 460936 - DNA, 19 bp, Mus musculus
  siRNA target sequence for Kif4 (NM_008446.1,3940-3958).
ggatcccaacaaaactagt

SEQ ID NO: 460937 - DNA, 19 bp, Mus musculus
  siRNA target sequence for Kif4 (NM_008446.1,4034-4052).
gcaaaagtcagactgtaat

SEQ ID NO: 460938 - DNA, 19 bp, Mus musculus
  siRNA target sequence for Kif4 (NM_008446.1,4081-4099).
gtcgcaaccgccatcagaa

SEQ ID NO: 460939 - DNA, 19 bp, Mus musculus
  siRNA target sequence for Kif4 (NM_008446.1,4124-4142).
gctaaaccaagattctgaa

SEQ ID NO: 460940 - DNA, 19 bp, Mus musculus
  siRNA target sequence for Kif4 (NM_008446.1,4296-4314).
cacccagaactgaagtcta

SEQ ID NO: 460941 - DNA, 19 bp, Mus musculus
  siRNA target sequence for Kif4 (NM_008446.1,4298-4316).
cccagaactgaagtctata

SEQ ID NO: 460942 - DNA, 19 bp, Mus musculus
  siRNA target sequence for Klf1 (NM_010635.1,120-138).
gtcttaccctccatcagta

SEQ ID NO: 460943 - DNA, 19 bp, Mus musculus
  siRNA target sequence for Klf1 (NM_010635.1,315-333).
gcgtgggacccggatcttt

SEQ ID NO: 460944 - DNA, 19 bp, Mus musculus
  siRNA target sequence for Klf1 (NM_010635.1,316-334).
cgtgggacccggatctttt

SEQ ID NO: 460945 - DNA, 19 bp, Mus musculus
  siRNA target sequence for Klf1 (NM_010635.1,319-337).
gggacccggatcttttcct

SEQ ID NO: 460946 - DNA, 19 bp, Mus musculus
  siRNA target sequence for Klf1 (NM_010635.1,320-338).
ggacccggatcttttcctt

SEQ ID NO: 460947 - DNA, 19 bp, Mus musculus
  siRNA target sequence for Klf1 (NM_010635.1,321-339).
gacccggatcttttcctta

SEQ ID NO: 460948 - DNA, 19 bp, Mus musculus
  siRNA target sequence for Klf1 (NM_010635.1,324-342).
ccggatcttttccttacaa

SEQ ID NO: 460949 - DNA, 19 bp, Mus musculus
  siRNA target sequence for Klf1 (NM_010635.1,325-343).
cggatcttttccttacaaa

SEQ ID NO: 460950 - DNA, 19 bp, Mus musculus
  siRNA target sequence for Klf1 (NM_010635.1,1115-1133).
cctctgcccacgtgctttt

SEQ ID NO: 460951 - DNA, 19 bp, Mus musculus
  siRNA target sequence for Klf12 (NM_010636.1,61-79).
ccttgagaacagaatgcta

SEQ ID NO: 460952 - DNA, 19 bp, Mus musculus
  siRNA target sequence for Klf12 (NM_010636.1,62-80).
cttgagaacagaatgctaa

SEQ ID NO: 460953 - DNA, 19 bp, Mus musculus
  siRNA target sequence for Klf12 (NM_010636.1,95-113).
ccggcagtcagagtcaaaa

SEQ ID NO: 460954 - DNA, 19 bp, Mus musculus
  siRNA target sequence for Klf12 (NM_010636.1,114-132).
ccgagcttgtggaatctga

SEQ ID NO: 460955 - DNA, 19 bp, Mus musculus
  siRNA target sequence for Klf12 (NM_010636.1,115-133).
cgagcttgtggaatctgaa

SEQ ID NO: 460956 - DNA, 19 bp, Mus musculus
  siRNA target sequence for Klf12 (NM_010636.1,141-159).
ctccaaacgtccacaacta

SEQ ID NO: 460957 - DNA, 19 bp, Mus musculus
  siRNA target sequence for Klf12 (NM_010636.1,173-191).
gctgtccccctcttgctaa

SEQ ID NO: 460958 - DNA, 19 bp, Mus musculus
  siRNA target sequence for Klf12 (NM_010636.1,176-194).
gtccccctcttgctaaata

SEQ ID NO: 460959 - DNA, 19 bp, Mus musculus
  siRNA target sequence for Klf12 (NM_010636.1,217-235).
ggactcactgcctgtagat

SEQ ID NO: 460960 - DNA, 19 bp, Mus musculus
  siRNA target sequence for Klf12 (NM_010636.1,222-240).
cactgcctgtagatcactt

SEQ ID NO: 460961 - DNA, 19 bp, Mus musculus
  siRNA target sequence for Klf12 (NM_010636.1,254-272).
gagccagtggacttgtcaa

SEQ ID NO: 460962 - DNA, 19 bp, Mus musculus
  siRNA target sequence for Klf12 (NM_010636.1,258-276).
cagtggacttgtcaatcaa

SEQ ID NO: 460963 - DNA, 19 bp, Mus musculus
  siRNA target sequence for Klf12 (NM_010636.1,525-543).
ccagtcccatgaacttaca

SEQ ID NO: 460964 - DNA, 19 bp, Mus musculus
  siRNA target sequence for Klf12 (NM_010636.1,531-549).
ccatgaacttacagtctaa

SEQ ID NO: 460965 - DNA, 19 bp, Mus musculus
  siRNA target sequence for Klf12 (NM_010636.1,621-639).
cacctggaaatgtgaacaa

SEQ ID NO: 460966 - DNA, 19 bp, Mus musculus
  siRNA target sequence for Klf12 (NM_010636.1,634-652).
gaacaacactattgttgta

SEQ ID NO: 460967 - DNA, 19 bp, Mus musculus
  siRNA target sequence for Klf12 (NM_010636.1,752-770).
ccaaatgtgaccttagata

SEQ ID NO: 460968 - DNA, 19 bp, Mus musculus
  siRNA target sequence for Klf12 (NM_010636.1,760-778).
gaccttagatagcgttaat

SEQ ID NO: 460969 - DNA, 19 bp, Mus musculus
  siRNA target sequence for Klf12 (NM_010636.1,763-781).
cttagatagcgttaatgaa

SEQ ID NO: 460970 - DNA, 19 bp, Mus musculus
  siRNA target sequence for Klf12 (NM_010636.1,786-804).
gatccacggccctttccat

SEQ ID NO: 460971 - DNA, 19 bp, Mus musculus
  siRNA target sequence for Klf12 (NM_010636.1,844-862).
cagggtccgaggaaatcga

SEQ ID NO: 460972 - DNA, 19 bp, Mus musculus
  siRNA target sequence for Klf12 (NM_010636.1,846-864).
gggtccgaggaaatcgaat

SEQ ID NO: 460973 - DNA, 19 bp, Mus musculus
  siRNA target sequence for Klf12 (NM_010636.1,850-868).
ccgaggaaatcgaatgaat

SEQ ID NO: 460974 - DNA, 19 bp, Mus musculus
  siRNA target sequence for Klf12 (NM_010636.1,851-869).
cgaggaaatcgaatgaata

SEQ ID NO: 460975 - DNA, 19 bp, Mus musculus
  siRNA target sequence for Klf12 (NM_010636.1,852-870).
gaggaaatcgaatgaataa

SEQ ID NO: 460976 - DNA, 19 bp, Mus musculus
  siRNA target sequence for Klf12 (NM_010636.1,855-873).
gaaatcgaatgaataacca

SEQ ID NO: 460977 - DNA, 19 bp, Mus musculus
  siRNA target sequence for Klf12 (NM_010636.1,877-895).
gtttgcttgttcaatctca

SEQ ID NO: 460978 - DNA, 19 bp, Mus musculus
  siRNA target sequence for Klf12 (NM_010636.1,888-906).
caatctcaccatttagcat

SEQ ID NO: 460979 - DNA, 19 bp, Mus musculus
  siRNA target sequence for Klf12 (NM_010636.1,976-994).
cttcgaagggtgcaacaaa

SEQ ID NO: 460980 - DNA, 19 bp, Mus musculus
  siRNA target sequence for Klf12 (NM_010636.1,980-998).
gaagggtgcaacaaagtct

SEQ ID NO: 460981 - DNA, 19 bp, Mus musculus
  siRNA target sequence for Klf12 (NM_010636.1,983-1001).
gggtgcaacaaagtctata

SEQ ID NO: 460982 - DNA, 19 bp, Mus musculus
  siRNA target sequence for Klf12 (NM_010636.1,985-1003).
gtgcaacaaagtctataca

SEQ ID NO: 460983 - DNA, 19 bp, Mus musculus
  siRNA target sequence for Klf12 (NM_010636.1,987-1005).
gcaacaaagtctatacaaa

SEQ ID NO: 460984 - DNA, 19 bp, Mus musculus
  siRNA target sequence for Klf12 (NM_010636.1,991-1009).
caaagtctatacaaaaagt

SEQ ID NO: 460985 - DNA, 19 bp, Mus musculus
  siRNA target sequence for Klf15 (NM_023184.2,211-229).
ggcagccataccacatgtt

SEQ ID NO: 460986 - DNA, 19 bp, Mus musculus
  siRNA target sequence for Klf15 (NM_023184.2,346-364).
gcagcatcttggatttcct

SEQ ID NO: 460987 - DNA, 19 bp, Mus musculus
  siRNA target sequence for Klf15 (NM_023184.2,465-483).
gtgaaggaggaacatttct

SEQ ID NO: 460988 - DNA, 19 bp, Mus musculus
  siRNA target sequence for Klf15 (NM_023184.2,538-556).
ctaccctggaggagattga

SEQ ID NO: 460989 - DNA, 19 bp, Mus musculus
  siRNA target sequence for Klf15 (NM_023184.2,921-939).
gtaccatcctccaacttga

SEQ ID NO: 460990 - DNA, 19 bp, Mus musculus
  siRNA target sequence for Klf15 (NM_023184.2,976-994).
ccattgccgccaaacctat

SEQ ID NO: 460991 - DNA, 19 bp, Mus musculus
  siRNA target sequence for Klf15 (NM_023184.2,977-995).
cattgccgccaaacctatt

SEQ ID NO: 460992 - DNA, 19 bp, Mus musculus
  siRNA target sequence for Klf15 (NM_023184.2,1055-1073).
gaacccagcagcagaactt

SEQ ID NO: 460993 - DNA, 19 bp, Mus musculus
  siRNA target sequence for Klf15 (NM_023184.2,1212-1230).
cgctcagatgagttgtcaa

SEQ ID NO: 460994 - DNA, 19 bp, Mus musculus
  siRNA target sequence for Klf15 (NM_023184.2,1270-1288).
gtcccgtgtgcgagaagaa

SEQ ID NO: 460995 - DNA, 19 bp, Mus musculus
  siRNA target sequence for Klf15 (NM_023184.2,1273-1291).
ccgtgtgcgagaagaaatt

SEQ ID NO: 460996 - DNA, 19 bp, Mus musculus
  siRNA target sequence for Klf2 (NM_008452.1,50-68).
cgctcagcgagcctatctt

SEQ ID NO: 460997 - DNA, 19 bp, Mus musculus
  siRNA target sequence for Klf2 (NM_008452.1,149-167).
gcacggatgaggacctaaa

SEQ ID NO: 460998 - DNA, 19 bp, Mus musculus
  siRNA target sequence for Klf2 (NM_008452.1,692-710).
gcgccttcggtcttttcga

SEQ ID NO: 460999 - DNA, 19 bp, Mus musculus
  siRNA target sequence for Klf3 (NM_008453.2,362-380).
gtgtccttcccgtcgaatt

SEQ ID NO: 461000 - DNA, 19 bp, Mus musculus
  siRNA target sequence for Klf3 (NM_008453.2,366-384).
ccttcccgtcgaattacat

SEQ ID NO: 461001 - DNA, 19 bp, Mus musculus
  siRNA target sequence for Klf3 (NM_008453.2,370-388).
cccgtcgaattacatagaa

SEQ ID NO: 461002 - DNA, 19 bp, Mus musculus
  siRNA target sequence for Klf3 (NM_008453.2,371-389).
ccgtcgaattacatagaat

SEQ ID NO: 461003 - DNA, 19 bp, Mus musculus
  siRNA target sequence for Klf3 (NM_008453.2,375-393).
cgaattacatagaatcgat

SEQ ID NO: 461004 - DNA, 19 bp, Mus musculus
  siRNA target sequence for Klf3 (NM_008453.2,426-444).
caccgttgcctgataagtt

SEQ ID NO: 461005 - DNA, 19 bp, Mus musculus
  siRNA target sequence for Klf3 (NM_008453.2,428-446).
ccgttgcctgataagttct

SEQ ID NO: 461006 - DNA, 19 bp, Mus musculus
  siRNA target sequence for Klf3 (NM_008453.2,429-447).
cgttgcctgataagttctt

SEQ ID NO: 461007 - DNA, 19 bp, Mus musculus
  siRNA target sequence for Klf3 (NM_008453.2,600-618).
cctccagtccgcccattaa

SEQ ID NO: 461008 - DNA, 19 bp, Mus musculus
  siRNA target sequence for Klf3 (NM_008453.2,603-621).
ccagtccgcccattaagaa

SEQ ID NO: 461009 - DNA, 19 bp, Mus musculus
  siRNA target sequence for Klf3 (NM_008453.2,752-770).
gtccagcccgttcctttta

SEQ ID NO: 461010 - DNA, 19 bp, Mus musculus
  siRNA target sequence for Klf3 (NM_008453.2,757-775).
gcccgttccttttatgtat

SEQ ID NO: 461011 - DNA, 19 bp, Mus musculus
  siRNA target sequence for Klf3 (NM_008453.2,758-776).
cccgttccttttatgtata

SEQ ID NO: 461012 - DNA, 19 bp, Mus musculus
  siRNA target sequence for Klf3 (NM_008453.2,840-858).
gcatgccagtacctgtaat

SEQ ID NO: 461013 - DNA, 19 bp, Mus musculus
  siRNA target sequence for Klf3 (NM_008453.2,841-859).
catgccagtacctgtaatt

SEQ ID NO: 461014 - DNA, 19 bp, Mus musculus
  siRNA target sequence for Klf3 (NM_008453.2,845-863).
ccagtacctgtaattgaat

SEQ ID NO: 461015 - DNA, 19 bp, Mus musculus
  siRNA target sequence for Klf3 (NM_008453.2,848-866).
gtacctgtaattgaatcat

SEQ ID NO: 461016 - DNA, 19 bp, Mus musculus
  siRNA target sequence for Klf3 (NM_008453.2,852-870).
ctgtaattgaatcatatga

SEQ ID NO: 461017 - DNA, 19 bp, Mus musculus
  siRNA target sequence for Klf3 (NM_008453.2,854-872).
gtaattgaatcatatgaga

SEQ ID NO: 461018 - DNA, 19 bp, Mus musculus
  siRNA target sequence for Klf3 (NM_008453.2,918-936).
cacagaggactgactatta

SEQ ID NO: 461019 - DNA, 19 bp, Mus musculus
  siRNA target sequence for Klf3 (NM_008453.2,1104-1122).
gcaataaggtctacactaa

SEQ ID NO: 461020 - DNA, 19 bp, Mus musculus
  siRNA target sequence for Klf3 (NM_008453.2,1204-1222).
gttcgctcggtctgatgaa

SEQ ID NO: 461021 - DNA, 19 bp, Mus musculus
  siRNA target sequence for Klf3 (NM_008453.2,1244-1262).
cacactgggatcaaacctt

SEQ ID NO: 461022 - DNA, 19 bp, Mus musculus
  siRNA target sequence for Klf4 (NM_010637.1,901-919).
ggacctagactttatcctt

SEQ ID NO: 461023 - DNA, 19 bp, Mus musculus
  siRNA target sequence for Klf4 (NM_010637.1,902-920).
gacctagactttatccttt

SEQ ID NO: 461024 - DNA, 19 bp, Mus musculus
  siRNA target sequence for Klf4 (NM_010637.1,1102-1120).
cctctacagccgagaatct

SEQ ID NO: 461025 - DNA, 19 bp, Mus musculus
  siRNA target sequence for Klf4 (NM_010637.1,1206-1224).
cggagttggacccagtata

SEQ ID NO: 461026 - DNA, 19 bp, Mus musculus
  siRNA target sequence for Klf4 (NM_010637.1,1208-1226).
gagttggacccagtataca

SEQ ID NO: 461027 - DNA, 19 bp, Mus musculus
  siRNA target sequence for Klf4 (NM_010637.1,1210-1228).
gttggacccagtatacatt

SEQ ID NO: 461028 - DNA, 19 bp, Mus musculus
  siRNA target sequence for Klf4 (NM_010637.1,1326-1344).
cggtcatcagtgttagcaa

SEQ ID NO: 461029 - DNA, 19 bp, Mus musculus
  siRNA target sequence for Klf4 (NM_010637.1,1327-1345).
ggtcatcagtgttagcaaa

SEQ ID NO: 461030 - DNA, 19 bp, Mus musculus
  siRNA target sequence for Klf4 (NM_010637.1,1402-1420).
gcgcatgtgccccaagatt

SEQ ID NO: 461031 - DNA, 19 bp, Mus musculus
  siRNA target sequence for Klf4 (NM_010637.1,1404-1422).
gcatgtgccccaagattaa

SEQ ID NO: 461032 - DNA, 19 bp, Mus musculus
  siRNA target sequence for Klf4 (NM_010637.1,1408-1426).
gtgccccaagattaagcaa

SEQ ID NO: 461033 - DNA, 19 bp, Mus musculus
  siRNA target sequence for Klf4 (NM_010637.1,1692-1710).
cctctctccattatcaaga

SEQ ID NO: 461034 - DNA, 19 bp, Mus musculus
  siRNA target sequence for Klf4 (NM_010637.1,1792-1810).
cacccacacttgtgactat

SEQ ID NO: 461035 - DNA, 19 bp, Mus musculus
  siRNA target sequence for Klf4 (NM_010637.1,1814-1832).
ggctgtggcaaaacctata

SEQ ID NO: 461036 - DNA, 19 bp, Mus musculus
  siRNA target sequence for Klf4 (NM_010637.1,1828-1846).
ctataccaagagttctcat

SEQ ID NO: 461037 - DNA, 19 bp, Mus musculus
  siRNA target sequence for Klf5 (NM_009769.2,572-590).
ccctccagttccgataatt

SEQ ID NO: 461038 - DNA, 19 bp, Mus musculus
  siRNA target sequence for Klf5 (NM_009769.2,573-591).
cctccagttccgataattt

SEQ ID NO: 461039 - DNA, 19 bp, Mus musculus
  siRNA target sequence for Klf5 (NM_009769.2,577-595).
cagttccgataatttcaga

SEQ ID NO: 461040 - DNA, 19 bp, Mus musculus
  siRNA target sequence for Klf5 (NM_009769.2,583-601).
cgataatttcagagcataa

SEQ ID NO: 461041 - DNA, 19 bp, Mus musculus
  siRNA target sequence for Klf5 (NM_009769.2,584-602).
gataatttcagagcataaa

SEQ ID NO: 461042 - DNA, 19 bp, Mus musculus
  siRNA target sequence for Klf5 (NM_009769.2,625-643).
cagtggtagaccagttctt

SEQ ID NO: 461043 - DNA, 19 bp, Mus musculus
  siRNA target sequence for Klf5 (NM_009769.2,627-645).
gtggtagaccagttcttca

SEQ ID NO: 461044 - DNA, 19 bp, Mus musculus
  siRNA target sequence for Klf5 (NM_009769.2,663-681).
ccttacagcatcaacatga

SEQ ID NO: 461045 - DNA, 19 bp, Mus musculus
  siRNA target sequence for Klf5 (NM_009769.2,739-757).
catgcgtaacacagatcaa

SEQ ID NO: 461046 - DNA, 19 bp, Mus musculus
  siRNA target sequence for Klf5 (NM_009769.2,831-849).
gctctccccgagttcacta

SEQ ID NO: 461047 - DNA, 19 bp, Mus musculus
  siRNA target sequence for Klf5 (NM_009769.2,834-852).
ctccccgagttcactagta

SEQ ID NO: 461048 - DNA, 19 bp, Mus musculus
  siRNA target sequence for Klf5 (NM_009769.2,837-855).
cccgagttcactagtatct

SEQ ID NO: 461049 - DNA, 19 bp, Mus musculus
  siRNA target sequence for Klf5 (NM_009769.2,838-856).
ccgagttcactagtatctt

SEQ ID NO: 461050 - DNA, 19 bp, Mus musculus
  siRNA target sequence for Klf5 (NM_009769.2,880-898).
caccacaggaggtgaacaa

SEQ ID NO: 461051 - DNA, 19 bp, Mus musculus
  siRNA target sequence for Klf5 (NM_009769.2,885-903).
caggaggtgaacaatatct

SEQ ID NO: 461052 - DNA, 19 bp, Mus musculus
  siRNA target sequence for Klf5 (NM_009769.2,888-906).
gaggtgaacaatatcttca

SEQ ID NO: 461053 - DNA, 19 bp, Mus musculus
  siRNA target sequence for Klf5 (NM_009769.2,922-940).
ctataccagatcttcatct

SEQ ID NO: 461054 - DNA, 19 bp, Mus musculus
  siRNA target sequence for Klf5 (NM_009769.2,966-984).
ctgtaccagctgttgaata

SEQ ID NO: 461055 - DNA, 19 bp, Mus musculus
  siRNA target sequence for Klf5 (NM_009769.2,968-986).
gtaccagctgttgaataca

SEQ ID NO: 461056 - DNA, 19 bp, Mus musculus
  siRNA target sequence for Klf5 (NM_009769.2,1012-1030).
caaaccagacggcagtaat

SEQ ID NO: 461057 - DNA, 19 bp, Mus musculus
  siRNA target sequence for Klf5 (NM_009769.2,1086-1104).
cagacgtcaatgaaacagt

SEQ ID NO: 461058 - DNA, 19 bp, Mus musculus
  siRNA target sequence for Klf5 (NM_009769.2,1133-1151).
catgccaagtcagtttctt

SEQ ID NO: 461059 - DNA, 19 bp, Mus musculus
  siRNA target sequence for Klf5 (NM_009769.2,1249-1267).
cgtcctatgccgctacaat

SEQ ID NO: 461060 - DNA, 19 bp, Mus musculus
  siRNA target sequence for Klf5 (NM_009769.2,1250-1268).
gtcctatgccgctacaatt

SEQ ID NO: 461061 - DNA, 19 bp, Mus musculus
  siRNA target sequence for Klf5 (NM_009769.2,1253-1271).
ctatgccgctacaattgct

SEQ ID NO: 461062 - DNA, 19 bp, Mus musculus
  siRNA target sequence for Klf5 (NM_009769.2,1259-1277).
cgctacaattgcttccaaa

SEQ ID NO: 461063 - DNA, 19 bp, Mus musculus
  siRNA target sequence for Klf5 (NM_009769.2,1281-1299).
gcgattcacaacccaaatt

SEQ ID NO: 461064 - DNA, 19 bp, Mus musculus
  siRNA target sequence for Klf5 (NM_009769.2,1282-1300).
cgattcacaacccaaattt

SEQ ID NO: 461065 - DNA, 19 bp, Mus musculus
  siRNA target sequence for Klf5 (NM_009769.2,1283-1301).
gattcacaacccaaattta

SEQ ID NO: 461066 - DNA, 19 bp, Mus musculus
  siRNA target sequence for Klf5 (NM_009769.2,1335-1353).
ccacctgtcagatacaaca

SEQ ID NO: 461067 - DNA, 19 bp, Mus musculus
  siRNA target sequence for Klf5 (NM_009769.2,1388-1406).
ccacttctgcgattataat

SEQ ID NO: 461068 - DNA, 19 bp, Mus musculus
  siRNA target sequence for Klf5 (NM_009769.2,1391-1409).
cttctgcgattataatggt

SEQ ID NO: 461069 - DNA, 19 bp, Mus musculus
  siRNA target sequence for Klf5 (NM_009769.2,1426-1444).
caaagtcgtctcacttaaa

SEQ ID NO: 461070 - DNA, 19 bp, Mus musculus
  siRNA target sequence for Klf5 (NM_009769.2,1446-1464).
gctcacctgaggactcata

SEQ ID NO: 461071 - DNA, 19 bp, Mus musculus
  siRNA target sequence for Klf7 (NM_033563.2,392-410).
gacgtgttggctagttata

SEQ ID NO: 461072 - DNA, 19 bp, Mus musculus
  siRNA target sequence for Klf7 (NM_033563.2,394-412).
cgtgttggctagttatagt

SEQ ID NO: 461073 - DNA, 19 bp, Mus musculus
  siRNA target sequence for Klf7 (NM_033563.2,395-413).
gtgttggctagttatagta

SEQ ID NO: 461074 - DNA, 19 bp, Mus musculus
  siRNA target sequence for Klf7 (NM_033563.2,397-415).
gttggctagttatagtata

SEQ ID NO: 461075 - DNA, 19 bp, Mus musculus
  siRNA target sequence for Klf7 (NM_033563.2,1014-1032).
catgccctgaaaacaagaa

SEQ ID NO: 461076 - DNA, 19 bp, Mus musculus
  siRNA target sequence for Klf7 (NM_033563.2,1057-1075).
cgggtgccggaaagtttat

SEQ ID NO: 461077 - DNA, 19 bp, Mus musculus
  siRNA target sequence for Klf7 (NM_033563.2,1060-1078).
gtgccggaaagtttataca

SEQ ID NO: 461078 - DNA, 19 bp, Mus musculus
  siRNA target sequence for Klf7 (NM_033563.2,1062-1080).
gccggaaagtttatacaaa

SEQ ID NO: 461079 - DNA, 19 bp, Mus musculus
  siRNA target sequence for Klf7 (NM_033563.2,1063-1081).
ccggaaagtttatacaaaa

SEQ ID NO: 461080 - DNA, 19 bp, Mus musculus
  siRNA target sequence for Klf7 (NM_033563.2,1064-1082).
cggaaagtttatacaaaaa

SEQ ID NO: 461081 - DNA, 19 bp, Mus musculus
  siRNA target sequence for Klf7 (NM_033563.2,1206-1224).
caggtgcaaagccctttaa

SEQ ID NO: 461082 - DNA, 19 bp, Mus musculus
  siRNA target sequence for Klf7 (NM_033563.2,1262-1280).
catcttgcgctccatatga

SEQ ID NO: 461083 - DNA, 19 bp, Mus musculus
  siRNA target sequence for Klf7 (NM_033563.2,1265-1283).
cttgcgctccatatgaaga

SEQ ID NO: 461084 - DNA, 19 bp, Mus musculus
  siRNA target sequence for Klf7 (NM_033563.2,1274-1292).
catatgaagagacatatct

SEQ ID NO: 461085 - DNA, 19 bp, Mus musculus
  siRNA target sequence for Klhl10 (NM_025727.1,222-240).
ctgcgacgtggtcatcaaa

SEQ ID NO: 461086 - DNA, 19 bp, Mus musculus
  siRNA target sequence for Klhl10 (NM_025727.1,297-315).
ctttagagctttgtttaca

SEQ ID NO: 461087 - DNA, 19 bp, Mus musculus
  siRNA target sequence for Klhl10 (NM_025727.1,368-386).
ccgacatgatgaagctaat

SEQ ID NO: 461088 - DNA, 19 bp, Mus musculus
  siRNA target sequence for Klhl10 (NM_025727.1,378-396).
gaagctaattattgagtat

SEQ ID NO: 461089 - DNA, 19 bp, Mus musculus
  siRNA target sequence for Klhl10 (NM_025727.1,414-432).
gcctatcacccctgacaat

SEQ ID NO: 461090 - DNA, 19 bp, Mus musculus
  siRNA target sequence for Klhl10 (NM_025727.1,447-465).
ggccgctgctgatcagttt

SEQ ID NO: 461091 - DNA, 19 bp, Mus musculus
  siRNA target sequence for Klhl10 (NM_025727.1,448-466).
gccgctgctgatcagttta

SEQ ID NO: 461092 - DNA, 19 bp, Mus musculus
  siRNA target sequence for Klhl10 (NM_025727.1,451-469).
gctgctgatcagtttaaca

SEQ ID NO: 461093 - DNA, 19 bp, Mus musculus
  siRNA target sequence for Klhl10 (NM_025727.1,452-470).
ctgctgatcagtttaacat

SEQ ID NO: 461094 - DNA, 19 bp, Mus musculus
  siRNA target sequence for Klhl10 (NM_025727.1,455-473).
ctgatcagtttaacatcat

SEQ ID NO: 461095 - DNA, 19 bp, Mus musculus
  siRNA target sequence for Klhl10 (NM_025727.1,542-560).
gcaagttcacggactacta

SEQ ID NO: 461096 - DNA, 19 bp, Mus musculus
  siRNA target sequence for Klhl10 (NM_025727.1,624-642).
gaaagtctcggcagagttt

SEQ ID NO: 461097 - DNA, 19 bp, Mus musculus
  siRNA target sequence for Klhl10 (NM_025727.1,713-731).
cagtattcgaggccatttt

SEQ ID NO: 461098 - DNA, 19 bp, Mus musculus
  siRNA target sequence for Klhl10 (NM_025727.1,811-829).
catgctgagtacttcatga

SEQ ID NO: 461099 - DNA, 19 bp, Mus musculus
  siRNA target sequence for Klhl10 (NM_025727.1,828-846).
gaataatgttaagatgaat

SEQ ID NO: 461100 - DNA, 19 bp, Mus musculus
  siRNA target sequence for Klhl10 (NM_025727.1,840-858).
gatgaatgactatgtcaaa

SEQ ID NO: 461101 - DNA, 19 bp, Mus musculus
  siRNA target sequence for Klhl10 (NM_025727.1,891-909).
cgccctaaaggctatgtat

SEQ ID NO: 461102 - DNA, 19 bp, Mus musculus
  siRNA target sequence for Klhl10 (NM_025727.1,902-920).
ctatgtatgacctgaacat

SEQ ID NO: 461103 - DNA, 19 bp, Mus musculus
  siRNA target sequence for Klhl10 (NM_025727.1,1052-1070).
cagacagatgggtgaatgt

SEQ ID NO: 461104 - DNA, 19 bp, Mus musculus
  siRNA target sequence for Klhl10 (NM_025727.1,1054-1072).
gacagatgggtgaatgtca

SEQ ID NO: 461105 - DNA, 19 bp, Mus musculus
  siRNA target sequence for Klhl10 (NM_025727.1,1071-1089).
cacgtgtgaggaagaaagt

SEQ ID NO: 461106 - DNA, 19 bp, Mus musculus
  siRNA target sequence for Klhl10 (NM_025727.1,1104-1122).
cggggcagcctacttgaaa

SEQ ID NO: 461107 - DNA, 19 bp, Mus musculus
  siRNA target sequence for Klhl10 (NM_025727.1,1145-1163).
ggtttgatagcgtagacta

SEQ ID NO: 461108 - DNA, 19 bp, Mus musculus
  siRNA target sequence for Klhl10 (NM_025727.1,1155-1173).
cgtagactacttcaatagt

SEQ ID NO: 461109 - DNA, 19 bp, Mus musculus
  siRNA target sequence for Klhl10 (NM_025727.1,1224-1242).
gcactctagacgttgctat

SEQ ID NO: 461110 - DNA, 19 bp, Mus musculus
  siRNA target sequence for Klhl10 (NM_025727.1,1249-1267).
gtgacagtcctcagcaatt

SEQ ID NO: 461111 - DNA, 19 bp, Mus musculus
  siRNA target sequence for Klhl10 (NM_025727.1,1253-1271).
cagtcctcagcaatttcat

SEQ ID NO: 461112 - DNA, 19 bp, Mus musculus
  siRNA target sequence for Klhl10 (NM_025727.1,1257-1275).
cctcagcaatttcatctat

SEQ ID NO: 461113 - DNA, 19 bp, Mus musculus
  siRNA target sequence for Klhl10 (NM_025727.1,1386-1404).
gagcgccacaacactctat

SEQ ID NO: 461114 - DNA, 19 bp, Mus musculus
  siRNA target sequence for Klhl10 (NM_025727.1,1401-1419).
ctatgggaaggtctacata

SEQ ID NO: 461115 - DNA, 19 bp, Mus musculus
  siRNA target sequence for Klhl10 (NM_025727.1,1426-1444).
gggtttaacggaaacgaat

SEQ ID NO: 461116 - DNA, 19 bp, Mus musculus
  siRNA target sequence for Klhl10 (NM_025727.1,1435-1453).
ggaaacgaatgcctgttta

SEQ ID NO: 461117 - DNA, 19 bp, Mus musculus
  siRNA target sequence for Klhl10 (NM_025727.1,1517-1535).
ggagtggaataggtgtaat

SEQ ID NO: 461118 - DNA, 19 bp, Mus musculus
  siRNA target sequence for Klhl10 (NM_025727.1,1518-1536).
gagtggaataggtgtaatt

SEQ ID NO: 461119 - DNA, 19 bp, Mus musculus
  siRNA target sequence for Klhl10 (NM_025727.1,1523-1541).
gaataggtgtaattgctta

SEQ ID NO: 461120 - DNA, 19 bp, Mus musculus
  siRNA target sequence for Klhl10 (NM_025727.1,1537-1555).
gcttacggggaacatgtat

SEQ ID NO: 461121 - DNA, 19 bp, Mus musculus
  siRNA target sequence for Klhl10 (NM_025727.1,1538-1556).
cttacggggaacatgtata

SEQ ID NO: 461122 - DNA, 19 bp, Mus musculus
  siRNA target sequence for Klhl10 (NM_025727.1,1630-1648).
cgcacgatccccactatgt

SEQ ID NO: 461123 - DNA, 19 bp, Mus musculus
  siRNA target sequence for Klhl10 (NM_025727.1,1631-1649).
gcacgatccccactatgtt

SEQ ID NO: 461124 - DNA, 19 bp, Mus musculus
  siRNA target sequence for Klhl10 (NM_025727.1,1634-1652).
cgatccccactatgtttaa

SEQ ID NO: 461125 - DNA, 19 bp, Mus musculus
  siRNA target sequence for Klhl10 (NM_025727.1,1647-1665).
gtttaaccctcgtagcaat

SEQ ID NO: 461126 - DNA, 19 bp, Mus musculus
  siRNA target sequence for Klhl10 (NM_025727.1,1708-1726).
ggctttaatggctttacca

SEQ ID NO: 461127 - DNA, 19 bp, Mus musculus
  siRNA target sequence for Klhl10 (NM_025727.1,1769-1787).
ggtatgacgctcatgacat

SEQ ID NO: 461128 - DNA, 19 bp, Mus musculus
  siRNA target sequence for Klhl10 (NM_025727.1,1853-1871).
cagctagacgggacaactt

SEQ ID NO: 461129 - DNA, 19 bp, Mus musculus
  siRNA target sequence for Klhl10 (NM_025727.1,1882-1900).
gcactgcgagatgaagtaa

SEQ ID NO: 461130 - DNA, 19 bp, Mus musculus
  siRNA target sequence for Klhl10 (NM_025727.1,1883-1901).
cactgcgagatgaagtaaa

SEQ ID NO: 461131 - DNA, 19 bp, Mus musculus
  siRNA target sequence for Klhl10 (NM_025727.1,1885-1903).
ctgcgagatgaagtaaagt

SEQ ID NO: 461132 - DNA, 19 bp, Mus musculus
  siRNA target sequence for Klhl10 (NM_025727.1,1887-1905).
gcgagatgaagtaaagtat

SEQ ID NO: 461133 - DNA, 19 bp, Mus musculus
  siRNA target sequence for Ldb1 (NM_010697.1,679-697).
ccatgtacccacctacata

SEQ ID NO: 461134 - DNA, 19 bp, Mus musculus
  siRNA target sequence for Ldb1 (NM_010697.1,716-734).
gaggcacacaccatatggt

SEQ ID NO: 461135 - DNA, 19 bp, Mus musculus
  siRNA target sequence for Ldb1 (NM_010697.1,718-736).
ggcacacaccatatggtaa

SEQ ID NO: 461136 - DNA, 19 bp, Mus musculus
  siRNA target sequence for Ldb1 (NM_010697.1,722-740).
cacaccatatggtaaccaa

SEQ ID NO: 461137 - DNA, 19 bp, Mus musculus
  siRNA target sequence for Ldb1 (NM_010697.1,732-750).
ggtaaccaaaccgactata

SEQ ID NO: 461138 - DNA, 19 bp, Mus musculus
  siRNA target sequence for Ldb1 (NM_010697.1,737-755).
ccaaaccgactatagaata

SEQ ID NO: 461139 - DNA, 19 bp, Mus musculus
  siRNA target sequence for Ldb1 (NM_010697.1,738-756).
caaaccgactatagaatat

SEQ ID NO: 461140 - DNA, 19 bp, Mus musculus
  siRNA target sequence for Ldb1 (NM_010697.1,742-760).
ccgactatagaatatttga

SEQ ID NO: 461141 - DNA, 19 bp, Mus musculus
  siRNA target sequence for Ldb1 (NM_010697.1,751-769).
gaatatttgagcttaacaa

SEQ ID NO: 461142 - DNA, 19 bp, Mus musculus
  siRNA target sequence for Ldb1 (NM_010697.1,817-835).
ctttcacaactgagttctt

SEQ ID NO: 461143 - DNA, 19 bp, Mus musculus
  siRNA target sequence for Ldb1 (NM_010697.1,876-894).
gatggaccaaagagatata

SEQ ID NO: 461144 - DNA, 19 bp, Mus musculus
  siRNA target sequence for Ldb1 (NM_010697.1,879-897).
ggaccaaagagatatacca

SEQ ID NO: 461145 - DNA, 19 bp, Mus musculus
  siRNA target sequence for Ldb1 (NM_010697.1,880-898).
gaccaaagagatataccat

SEQ ID NO: 461146 - DNA, 19 bp, Mus musculus
  siRNA target sequence for Ldb1 (NM_010697.1,918-936).
cgctacttccgaagcattt

SEQ ID NO: 461147 - DNA, 19 bp, Mus musculus
  siRNA target sequence for Ldb1 (NM_010697.1,919-937).
gctacttccgaagcatttt

SEQ ID NO: 461148 - DNA, 19 bp, Mus musculus
  siRNA target sequence for Ldb1 (NM_010697.1,946-964).
gtgccacagagctgtacta

SEQ ID NO: 461149 - DNA, 19 bp, Mus musculus
  siRNA target sequence for Ldb1 (NM_010697.1,1043-1061).
gcacggcaaacccatgttt

SEQ ID NO: 461150 - DNA, 19 bp, Mus musculus
  siRNA target sequence for Ldb1 (NM_010697.1,1044-1062).
cacggcaaacccatgttta

SEQ ID NO: 461151 - DNA, 19 bp, Mus musculus
  siRNA target sequence for Ldb1 (NM_010697.1,1084-1102).
ggttgtacctggagttcat

SEQ ID NO: 461152 - DNA, 19 bp, Mus musculus
  siRNA target sequence for Ldb1 (NM_010697.1,1110-1128).
gacatgatgcggataaaga

SEQ ID NO: 461153 - DNA, 19 bp, Mus musculus
  siRNA target sequence for Ldb1 (NM_010697.1,1158-1176).
gagctcatccccagaagta

SEQ ID NO: 461154 - DNA, 19 bp, Mus musculus
  siRNA target sequence for Ldb1 (NM_010697.1,1236-1254).
cggtgtgggctgtccaatt

SEQ ID NO: 461155 - DNA, 19 bp, Mus musculus
  siRNA target sequence for Ldb1 (NM_010697.1,1249-1267).
ccaattccactctcaacta

SEQ ID NO: 461156 - DNA, 19 bp, Mus musculus
  siRNA target sequence for Ldb1 (NM_010697.1,1268-1286).
cctccgactctgtgtgata

SEQ ID NO: 461157 - DNA, 19 bp, Mus musculus
  siRNA target sequence for Ldb1 (NM_010697.1,1271-1289).
ccgactctgtgtgatacta

SEQ ID NO: 461158 - DNA, 19 bp, Mus musculus
  siRNA target sequence for Ldb1 (NM_010697.1,1273-1291).
gactctgtgtgatactaga

SEQ ID NO: 461159 - DNA, 19 bp, Mus musculus
  siRNA target sequence for Ldb1 (NM_010697.1,1659-1677).
gacgacgaggacagcttta

SEQ ID NO: 461160 - DNA, 19 bp, Mus musculus
  siRNA target sequence for Ldb1 (NM_010697.1,1662-1680).
gacgaggacagctttaaca

SEQ ID NO: 461161 - DNA, 19 bp, Mus musculus
  siRNA target sequence for Ldb2 (NM_010698.2,158-176).
catgaccccttctattctt

SEQ ID NO: 461162 - DNA, 19 bp, Mus musculus
  siRNA target sequence for Ldb2 (NM_010698.2,179-197).
cctttcggcccattttata

SEQ ID NO: 461163 - DNA, 19 bp, Mus musculus
  siRNA target sequence for Ldb2 (NM_010698.2,227-245).
gagtaccgaatctatgaga

SEQ ID NO: 461164 - DNA, 19 bp, Mus musculus
  siRNA target sequence for Ldb2 (NM_010698.2,233-251).
cgaatctatgagatgaaca

SEQ ID NO: 461165 - DNA, 19 bp, Mus musculus
  siRNA target sequence for Ldb2 (NM_010698.2,296-314).
gatgcgtttgccactgaat

SEQ ID NO: 461166 - DNA, 19 bp, Mus musculus
  siRNA target sequence for Ldb2 (NM_010698.2,299-317).
gcgtttgccactgaatttt

SEQ ID NO: 461167 - DNA, 19 bp, Mus musculus
  siRNA target sequence for Ldb2 (NM_010698.2,300-318).
cgtttgccactgaattttt

SEQ ID NO: 461168 - DNA, 19 bp, Mus musculus
  siRNA target sequence for Ldb2 (NM_010698.2,320-338).
gaagatgatgccacattaa

SEQ ID NO: 461169 - DNA, 19 bp, Mus musculus
  siRNA target sequence for Ldb2 (NM_010698.2,326-344).
gatgccacattaacacttt

SEQ ID NO: 461170 - DNA, 19 bp, Mus musculus
  siRNA target sequence for Ldb2 (NM_010698.2,331-349).
cacattaacactttcattt

SEQ ID NO: 461171 - DNA, 19 bp, Mus musculus
  siRNA target sequence for Ldb2 (NM_010698.2,361-379).
cggaccaaagcgatacact

SEQ ID NO: 461172 - DNA, 19 bp, Mus musculus
  siRNA target sequence for Ldb2 (NM_010698.2,362-380).
ggaccaaagcgatacacta

SEQ ID NO: 461173 - DNA, 19 bp, Mus musculus
  siRNA target sequence for Ldb2 (NM_010698.2,363-381).
gaccaaagcgatacactat

SEQ ID NO: 461174 - DNA, 19 bp, Mus musculus
  siRNA target sequence for Ldb2 (NM_010698.2,390-408).
ccctcattccccgttattt

SEQ ID NO: 461175 - DNA, 19 bp, Mus musculus
  siRNA target sequence for Ldb2 (NM_010698.2,429-447).
gggtgacagacctgtacta

SEQ ID NO: 461176 - DNA, 19 bp, Mus musculus
  siRNA target sequence for Ldb2 (NM_010698.2,431-449).
gtgacagacctgtactaca

SEQ ID NO: 461177 - DNA, 19 bp, Mus musculus
  siRNA target sequence for Ldb2 (NM_010698.2,437-455).
gacctgtactacatcctta

SEQ ID NO: 461178 - DNA, 19 bp, Mus musculus
  siRNA target sequence for Ldb2 (NM_010698.2,439-457).
cctgtactacatccttaaa

SEQ ID NO: 461179 - DNA, 19 bp, Mus musculus
  siRNA target sequence for Ldb2 (NM_010698.2,527-545).
catgggaagcccatgttta

SEQ ID NO: 461180 - DNA, 19 bp, Mus musculus
  siRNA target sequence for Ldb2 (NM_010698.2,531-549).
ggaagcccatgtttaccaa

SEQ ID NO: 461181 - DNA, 19 bp, Mus musculus
  siRNA target sequence for Ldb2 (NM_010698.2,590-608).
gatgacctcatgagaataa

SEQ ID NO: 461182 - DNA, 19 bp, Mus musculus
  siRNA target sequence for Ldb2 (NM_010698.2,613-631).
gtggcactttaccattaga

SEQ ID NO: 461183 - DNA, 19 bp, Mus musculus
  siRNA target sequence for Ldb2 (NM_010698.2,732-750).
caaacttcaccctcaacta

SEQ ID NO: 461184 - DNA, 19 bp, Mus musculus
  siRNA target sequence for Ldb2 (NM_010698.2,751-769).
cctcaggttgtgtgtaata

SEQ ID NO: 461185 - DNA, 19 bp, Mus musculus
  siRNA target sequence for Ldb2 (NM_010698.2,1087-1105).
ggacgaaaggctaatcact

SEQ ID NO: 461186 - DNA, 19 bp, Mus musculus
  siRNA target sequence for Ldb2 (NM_010698.2,1088-1106).
gacgaaaggctaatcacta

SEQ ID NO: 461187 - DNA, 19 bp, Mus musculus
  siRNA target sequence for Ldb2 (NM_010698.2,1091-1109).
gaaaggctaatcactagat

SEQ ID NO: 461188 - DNA, 19 bp, Mus musculus
  siRNA target sequence for Ldb2 (NM_010698.2,1095-1113).
ggctaatcactagattaga

SEQ ID NO: 461189 - DNA, 19 bp, Mus musculus
  siRNA target sequence for Ldb2 (NM_010698.2,1189-1207).
cagcccgtggaacagtaaa

SEQ ID NO: 461190 - DNA, 19 bp, Mus musculus
  siRNA target sequence for Ldb2 (NM_010698.2,1214-1232).
gccacgcaagagaccaaat

SEQ ID NO: 461191 - DNA, 19 bp, Mus musculus
  siRNA target sequence for Lig3 (NM_010716.1,183-201).
gctgggctgccataagtca

SEQ ID NO: 461192 - DNA, 19 bp, Mus musculus
  siRNA target sequence for Lig3 (NM_010716.1,207-225).
gccagtggtcggaaacaaa

SEQ ID NO: 461193 - DNA, 19 bp, Mus musculus
  siRNA target sequence for Lig3 (NM_010716.1,208-226).
ccagtggtcggaaacaaat

SEQ ID NO: 461194 - DNA, 19 bp, Mus musculus
  siRNA target sequence for Lig3 (NM_010716.1,299-317).
cgtgccacccaccttactt

SEQ ID NO: 461195 - DNA, 19 bp, Mus musculus
  siRNA target sequence for Lig3 (NM_010716.1,302-320).
gccacccaccttactttct

SEQ ID NO: 461196 - DNA, 19 bp, Mus musculus
  siRNA target sequence for Lig3 (NM_010716.1,408-426).
ctggatgcaagaaatgcaa

SEQ ID NO: 461197 - DNA, 19 bp, Mus musculus
  siRNA target sequence for Lig3 (NM_010716.1,485-503).
gagtctgggggtgatatga

SEQ ID NO: 461198 - DNA, 19 bp, Mus musculus
  siRNA target sequence for Lig3 (NM_010716.1,487-505).
gtctgggggtgatatgaaa

SEQ ID NO: 461199 - DNA, 19 bp, Mus musculus
  siRNA target sequence for Lig3 (NM_010716.1,489-507).
ctgggggtgatatgaaaga

SEQ ID NO: 461200 - DNA, 19 bp, Mus musculus
  siRNA target sequence for Lig3 (NM_010716.1,491-509).
gggggtgatatgaaagagt

SEQ ID NO: 461201 - DNA, 19 bp, Mus musculus
  siRNA target sequence for Lig3 (NM_010716.1,514-532).
ccacattaagtgcatgttt

SEQ ID NO: 461202 - DNA, 19 bp, Mus musculus
  siRNA target sequence for Lig3 (NM_010716.1,628-646).
gataagccagcatattgca

SEQ ID NO: 461203 - DNA, 19 bp, Mus musculus
  siRNA target sequence for Lig3 (NM_010716.1,734-752).
gtgaaaggtgcttcgttta

SEQ ID NO: 461204 - DNA, 19 bp, Mus musculus
  siRNA target sequence for Lig3 (NM_010716.1,843-861).
cgagtctgtctgcaagtaa

SEQ ID NO: 461205 - DNA, 19 bp, Mus musculus
  siRNA target sequence for Lig3 (NM_010716.1,912-930).
gcgccatggtggctgaaaa

SEQ ID NO: 461206 - DNA, 19 bp, Mus musculus
  siRNA target sequence for Lig3 (NM_010716.1,913-931).
cgccatggtggctgaaaat

SEQ ID NO: 461207 - DNA, 19 bp, Mus musculus
  siRNA target sequence for Lig3 (NM_010716.1,923-941).
gctgaaaatcctagctata

SEQ ID NO: 461208 - DNA, 19 bp, Mus musculus
  siRNA target sequence for Lig3 (NM_010716.1,926-944).
gaaaatcctagctataaca

SEQ ID NO: 461209 - DNA, 19 bp, Mus musculus
  siRNA target sequence for Lig3 (NM_010716.1,951-969).
cccagatcatccatgactt

SEQ ID NO: 461210 - DNA, 19 bp, Mus musculus
  siRNA target sequence for Lig3 (NM_010716.1,1005-1023).
gctttcacggtgatgtgta

SEQ ID NO: 461211 - DNA, 19 bp, Mus musculus
  siRNA target sequence for Lig3 (NM_010716.1,1016-1034).
gatgtgtacctgacagtta

SEQ ID NO: 461212 - DNA, 19 bp, Mus musculus
  siRNA target sequence for Lig3 (NM_010716.1,1049-1067).
ggtgtcatcaagagtgttt

SEQ ID NO: 461213 - DNA, 19 bp, Mus musculus
  siRNA target sequence for Lig3 (NM_010716.1,1052-1070).
gtcatcaagagtgtttaca

SEQ ID NO: 461214 - DNA, 19 bp, Mus musculus
  siRNA target sequence for Lig3 (NM_010716.1,1062-1080).
gtgtttacaacttgaatga

SEQ ID NO: 461215 - DNA, 19 bp, Mus musculus
  siRNA target sequence for Lig3 (NM_010716.1,1097-1115).
ctttttagccgaattttta

SEQ ID NO: 461216 - DNA, 19 bp, Mus musculus
  siRNA target sequence for Lig3 (NM_010716.1,1168-1186).
gacgatcagaatcttcttt

SEQ ID NO: 461217 - DNA, 19 bp, Mus musculus
  siRNA target sequence for Lig3 (NM_010716.1,1170-1188).
cgatcagaatcttctttga

SEQ ID NO: 461218 - DNA, 19 bp, Mus musculus
  siRNA target sequence for Lig3 (NM_010716.1,1350-1368).
ggctgatcaaacatgatct

SEQ ID NO: 461219 - DNA, 19 bp, Mus musculus
  siRNA target sequence for Lig3 (NM_010716.1,1372-1390).
gatgaactcgggtgcaaaa

SEQ ID NO: 461220 - DNA, 19 bp, Mus musculus
  siRNA target sequence for Lig3 (NM_010716.1,1383-1401).
gtgcaaaacacgtgttaga

SEQ ID NO: 461221 - DNA, 19 bp, Mus musculus
  siRNA target sequence for Lig3 (NM_010716.1,1404-1422).
cccttgaccccaatgctta

SEQ ID NO: 461222 - DNA, 19 bp, Mus musculus
  siRNA target sequence for Lig3 (NM_010716.1,1405-1423).
ccttgaccccaatgcttat

SEQ ID NO: 461223 - DNA, 19 bp, Mus musculus
  siRNA target sequence for Lig3 (NM_010716.1,1462-1480).
ggagcgagtccttcacaat

SEQ ID NO: 461224 - DNA, 19 bp, Mus musculus
  siRNA target sequence for Lig3 (NM_010716.1,1562-1580).
ctggctgaggcctgcaaat

SEQ ID NO: 461225 - DNA, 19 bp, Mus musculus
  siRNA target sequence for Lig3 (NM_010716.1,1565-1583).
gctgaggcctgcaaatcca

SEQ ID NO: 461226 - DNA, 19 bp, Mus musculus
  siRNA target sequence for Lig3 (NM_010716.1,1571-1589).
gcctgcaaatccattgaat

SEQ ID NO: 461227 - DNA, 19 bp, Mus musculus
  siRNA target sequence for Lig3 (NM_010716.1,1573-1591).
ctgcaaatccattgaatat

SEQ ID NO: 461228 - DNA, 19 bp, Mus musculus
  siRNA target sequence for Lig3 (NM_010716.1,1646-1664).
cgagtccaggtgcataaga

SEQ ID NO: 461229 - DNA, 19 bp, Mus musculus
  siRNA target sequence for Lig3 (NM_010716.1,1738-1756).
ctatatacccaaagctttt

SEQ ID NO: 461230 - DNA, 19 bp, Mus musculus
  siRNA target sequence for Lig3 (NM_010716.1,1760-1778).
gggggtcaaagcatgatct

SEQ ID NO: 461231 - DNA, 19 bp, Mus musculus
  siRNA target sequence for Lig3 (NM_010716.1,1785-1803).
ccgaggtactcctgattga

SEQ ID NO: 461232 - DNA, 19 bp, Mus musculus
  siRNA target sequence for Lig3 (NM_010716.1,1787-1805).
gaggtactcctgattgaca

SEQ ID NO: 461233 - DNA, 19 bp, Mus musculus
  siRNA target sequence for Lig3 (NM_010716.1,1939-1957).
ctgtgagcgacggaagttt

SEQ ID NO: 461234 - DNA, 19 bp, Mus musculus
  siRNA target sequence for Lig3 (NM_010716.1,1941-1959).
gtgagcgacggaagtttct

SEQ ID NO: 461235 - DNA, 19 bp, Mus musculus
  siRNA target sequence for Lig3 (NM_010716.1,1947-1965).
gacggaagtttcttcatga

SEQ ID NO: 461236 - DNA, 19 bp, Mus musculus
  siRNA target sequence for Lig3 (NM_010716.1,1982-2000).
cgtaaccggatcatgttct

SEQ ID NO: 461237 - DNA, 19 bp, Mus musculus
  siRNA target sequence for Lig3 (NM_010716.1,1988-2006).
cggatcatgttctcagaaa

SEQ ID NO: 461238 - DNA, 19 bp, Mus musculus
  siRNA target sequence for Lig3 (NM_010716.1,2028-2046).
cagacctggctgacatgat

SEQ ID NO: 461239 - DNA, 19 bp, Mus musculus
  siRNA target sequence for Lig3 (NM_010716.1,2089-2107).
ggatgtgaagggtacatat

SEQ ID NO: 461240 - DNA, 19 bp, Mus musculus
  siRNA target sequence for Lig3 (NM_010716.1,2119-2137).
gcggcactggctgaaagtt

SEQ ID NO: 461241 - DNA, 19 bp, Mus musculus
  siRNA target sequence for Lig3 (NM_010716.1,2120-2138).
cggcactggctgaaagtta

SEQ ID NO: 461242 - DNA, 19 bp, Mus musculus
  siRNA target sequence for Lig3 (NM_010716.1,2364-2382).
gcaaggatcctagtaagat

SEQ ID NO: 461243 - DNA, 19 bp, Mus musculus
  siRNA target sequence for Lig3 (NM_010716.1,2395-2413).
gaagatcaacaagatctat

SEQ ID NO: 461244 - DNA, 19 bp, Mus musculus
  siRNA target sequence for Lig3 (NM_010716.1,2401-2419).
caacaagatctattatcct

SEQ ID NO: 461245 - DNA, 19 bp, Mus musculus
  siRNA target sequence for Lig3 (NM_010716.1,2407-2425).
gatctattatcctgacttt

SEQ ID NO: 461246 - DNA, 19 bp, Mus musculus
  siRNA target sequence for Lig3 (NM_010716.1,2546-2564).
gacgacaaggactggaaat

SEQ ID NO: 461247 - DNA, 19 bp, Mus musculus
  siRNA target sequence for Lig3 (NM_010716.1,2548-2566).
cgacaaggactggaaatct

SEQ ID NO: 461248 - DNA, 19 bp, Mus musculus
  siRNA target sequence for Lig3 (NM_010716.1,2789-2807).
ggcatcaaaccgattccaa

SEQ ID NO: 461249 - DNA, 19 bp, Mus musculus
  siRNA target sequence for Lig3 (NM_010716.1,2790-2808).
gcatcaaaccgattccaaa

SEQ ID NO: 461250 - DNA, 19 bp, Mus musculus
  siRNA target sequence for Lig3 (NM_010716.1,2976-2994).
gtctcaaacgctactttgt

SEQ ID NO: 461251 - DNA, 19 bp, Mus musculus
  siRNA target sequence for Lig3 (NM_010716.1,3011-3029).
ctggtacaggaatttgaca

SEQ ID NO: 461252 - DNA, 19 bp, Mus musculus
  siRNA target sequence for Lin28 (NM_145833.1,377-395).
ccaagggtctggaatccat

SEQ ID NO: 461253 - DNA, 19 bp, Mus musculus
  siRNA target sequence for Lin28 (NM_145833.1,462-480).
gcagaagcgaagatccaaa

SEQ ID NO: 461254 - DNA, 19 bp, Mus musculus
  siRNA target sequence for Lin28 (NM_145833.1,481-499).
ggagacaggtgctacaact

SEQ ID NO: 461255 - DNA, 19 bp, Mus musculus
  siRNA target sequence for Lin28 (NM_145833.1,566-584).
gccaaagcatcaaccatat

SEQ ID NO: 461256 - DNA, 19 bp, Mus musculus
  siRNA target sequence for LOC223773 (NM_181412.2,2490-2508).
cttgaccttcagccatatt

SEQ ID NO: 461257 - DNA, 19 bp, Mus musculus
  siRNA target sequence for LOC223773 (NM_181412.2,2503-2521).
catattcccttgtagacaa

SEQ ID NO: 461258 - DNA, 19 bp, Mus musculus
  siRNA target sequence for Ly108 (NM_030710.1,249-267).
cggctcagggagtgaagtt

SEQ ID NO: 461259 - DNA, 19 bp, Mus musculus
  siRNA target sequence for Ly108 (NM_030710.1,344-362).
cagggaagatagccaatat

SEQ ID NO: 461260 - DNA, 19 bp, Mus musculus
  siRNA target sequence for Ly108 (NM_030710.1,363-381).
catcatctggaattatgaa

SEQ ID NO: 461261 - DNA, 19 bp, Mus musculus
  siRNA target sequence for Ly108 (NM_030710.1,397-415).
gtcactgccctcgttatca

SEQ ID NO: 461262 - DNA, 19 bp, Mus musculus
  siRNA target sequence for Ly108 (NM_030710.1,403-421).
gccctcgttatcaacctaa

SEQ ID NO: 461263 - DNA, 19 bp, Mus musculus
  siRNA target sequence for Ly108 (NM_030710.1,406-424).
ctcgttatcaacctaagta

SEQ ID NO: 461264 - DNA, 19 bp, Mus musculus
  siRNA target sequence for Ly108 (NM_030710.1,408-426).
cgttatcaacctaagtaat

SEQ ID NO: 461265 - DNA, 19 bp, Mus musculus
  siRNA target sequence for Ly108 (NM_030710.1,417-435).
cctaagtaatcctgaaagt

SEQ ID NO: 461266 - DNA, 19 bp, Mus musculus
  siRNA target sequence for Ly108 (NM_030710.1,428-446).
ctgaaagtccacaaatcat

SEQ ID NO: 461267 - DNA, 19 bp, Mus musculus
  siRNA target sequence for Ly108 (NM_030710.1,732-750).
ctctttaggaggaccaaat

SEQ ID NO: 461268 - DNA, 19 bp, Mus musculus
  siRNA target sequence for Ly108 (NM_030710.1,742-760).
ggaccaaatgtcactatct

SEQ ID NO: 461269 - DNA, 19 bp, Mus musculus
  siRNA target sequence for Ly108 (NM_030710.1,853-871).
ctctgcaaaggggttctaa

SEQ ID NO: 461270 - DNA, 19 bp, Mus musculus
  siRNA target sequence for Ly108 (NM_030710.1,855-873).
ctgcaaaggggttctaact

SEQ ID NO: 461271 - DNA, 19 bp, Mus musculus
  siRNA target sequence for Ly108 (NM_030710.1,858-876).
caaaggggttctaactaat

SEQ ID NO: 461272 - DNA, 19 bp, Mus musculus
  siRNA target sequence for Ly108 (NM_030710.1,881-899).
cctggaatgcagtatggtt

SEQ ID NO: 461273 - DNA, 19 bp, Mus musculus
  siRNA target sequence for Ly108 (NM_030710.1,892-910).
gtatggtttatgactacaa

SEQ ID NO: 461274 - DNA, 19 bp, Mus musculus
  siRNA target sequence for Ly108 (NM_030710.1,945-963).
gtgctggagcatacatgtt

SEQ ID NO: 461275 - DNA, 19 bp, Mus musculus
  siRNA target sequence for Ly108 (NM_030710.1,950-968).
ggagcatacatgtttggaa

SEQ ID NO: 461276 - DNA, 19 bp, Mus musculus
  siRNA target sequence for Ly108 (NM_030710.1,1067-1085).
ctcgtccaatgcaggaaat

SEQ ID NO: 461277 - DNA, 19 bp, Mus musculus
  siRNA target sequence for Ly108 (NM_030710.1,1069-1087).
cgtccaatgcaggaaatga

SEQ ID NO: 461278 - DNA, 19 bp, Mus musculus
  siRNA target sequence for Ly108 (NM_030710.1,1073-1091).
caatgcaggaaatgaaaat

SEQ ID NO: 461279 - DNA, 19 bp, Mus musculus
  siRNA target sequence for Ly108 (NM_030710.1,1111-1129).
gactccatgacaatttact

SEQ ID NO: 461280 - DNA, 19 bp, Mus musculus
  siRNA target sequence for Ly108 (NM_030710.1,1119-1137).
gacaatttactccatagtt

SEQ ID NO: 461281 - DNA, 19 bp, Mus musculus
  siRNA target sequence for Ly108 (NM_030710.1,1121-1139).
caatttactccatagttaa

SEQ ID NO: 461282 - DNA, 19 bp, Mus musculus
  siRNA target sequence for Lyar (NM_025281.1,163-181).
gtggtgaatccgtgaagaa

SEQ ID NO: 461283 - DNA, 19 bp, Mus musculus
  siRNA target sequence for Lyar (NM_025281.1,165-183).
ggtgaatccgtgaagaaaa

SEQ ID NO: 461284 - DNA, 19 bp, Mus musculus
  siRNA target sequence for Lyar (NM_025281.1,166-184).
gtgaatccgtgaagaaaat

SEQ ID NO: 461285 - DNA, 19 bp, Mus musculus
  siRNA target sequence for Lyar (NM_025281.1,172-190).
ccgtgaagaaaatacaagt

SEQ ID NO: 461286 - DNA, 19 bp, Mus musculus
  siRNA target sequence for Lyar (NM_025281.1,411-429).
cccaaggtgcgagaacttt

SEQ ID NO: 461287 - DNA, 19 bp, Mus musculus
  siRNA target sequence for Lyar (NM_025281.1,412-430).
ccaaggtgcgagaactttt

SEQ ID NO: 461288 - DNA, 19 bp, Mus musculus
  siRNA target sequence for Lyar (NM_025281.1,435-453).
caaatcagtgcttttgata

SEQ ID NO: 461289 - DNA, 19 bp, Mus musculus
  siRNA target sequence for Lyar (NM_025281.1,461-479).
cagaaaaaaggcgaagttt

SEQ ID NO: 461290 - DNA, 19 bp, Mus musculus
  siRNA target sequence for Lyar (NM_025281.1,463-481).
gaaaaaaggcgaagtttca

SEQ ID NO: 461291 - DNA, 19 bp, Mus musculus
  siRNA target sequence for Lyar (NM_025281.1,612-630).
gcagagatgccgatcacta

SEQ ID NO: 461292 - DNA, 19 bp, Mus musculus
  siRNA target sequence for Lyar (NM_025281.1,613-631).
cagagatgccgatcactaa

SEQ ID NO: 461293 - DNA, 19 bp, Mus musculus
  siRNA target sequence for Lyar (NM_025281.1,617-635).
gatgccgatcactaaagtt

SEQ ID NO: 461294 - DNA, 19 bp, Mus musculus
  siRNA target sequence for Lyar (NM_025281.1,669-687).
caaaccgaggcgaagaaga

SEQ ID NO: 461295 - DNA, 19 bp, Mus musculus
  siRNA target sequence for Lyar (NM_025281.1,673-691).
ccgaggcgaagaagaataa

SEQ ID NO: 461296 - DNA, 19 bp, Mus musculus
  siRNA target sequence for Lyar (NM_025281.1,677-695).
ggcgaagaagaataaaaga

SEQ ID NO: 461297 - DNA, 19 bp, Mus musculus
  siRNA target sequence for Lyar (NM_025281.1,994-1012).
gagctgagtctggttacaa

SEQ ID NO: 461298 - DNA, 19 bp, Mus musculus
  siRNA target sequence for Lyar (NM_025281.1,997-1015).
ctgagtctggttacaagaa

SEQ ID NO: 461299 - DNA, 19 bp, Mus musculus
  siRNA target sequence for Lyar (NM_025281.1,1064-1082).
ccacgaggctccatcgaaa

SEQ ID NO: 461300 - DNA, 19 bp, Mus musculus
  siRNA target sequence for Lyar (NM_025281.1,1068-1086).
gaggctccatcgaaaggta

SEQ ID NO: 461301 - DNA, 19 bp, Mus musculus
  siRNA target sequence for Lyar (NM_025281.1,1070-1088).
ggctccatcgaaaggtaaa

SEQ ID NO: 461302 - DNA, 19 bp, Mus musculus
  siRNA target sequence for Lyar (NM_025281.1,1071-1089).
gctccatcgaaaggtaaat

SEQ ID NO: 461303 - DNA, 19 bp, Mus musculus
  siRNA target sequence for Lyar (NM_025281.1,1072-1090).
ctccatcgaaaggtaaatt

SEQ ID NO: 461304 - DNA, 19 bp, Mus musculus
  siRNA target sequence for Lyar (NM_025281.1,1074-1092).
ccatcgaaaggtaaattca

SEQ ID NO: 461305 - DNA, 19 bp, Mus musculus
  siRNA target sequence for Lyar (NM_025281.1,1075-1093).
catcgaaaggtaaattcaa

SEQ ID NO: 461306 - DNA, 19 bp, Mus musculus
  siRNA target sequence for Lyar (NM_025281.1,1105-1123).
ccattaaggctgttttgaa

SEQ ID NO: 461307 - DNA, 19 bp, Mus musculus
  siRNA target sequence for Lyar (NM_025281.1,1106-1124).
cattaaggctgttttgaaa

SEQ ID NO: 461308 - DNA, 19 bp, Mus musculus
  siRNA target sequence for Lyar (NM_025281.1,1128-1146).
gctccagacaacgagatat

SEQ ID NO: 461309 - DNA, 19 bp, Mus musculus
  siRNA target sequence for Lyar (NM_025281.1,1255-1273).
ggaaccccacctttaaggt

SEQ ID NO: 461310 - DNA, 19 bp, Mus musculus
  siRNA target sequence for Lyl1 (NM_008535.1,754-772).
cctaccctggctgtacatt

SEQ ID NO: 461311 - DNA, 19 bp, Mus musculus
  siRNA target sequence for Lyl1 (NM_008535.1,854-872).
gcagaccaagccatagtga

SEQ ID NO: 461312 - DNA, 19 bp, Mus musculus
  siRNA target sequence for Lyl1 (NM_008535.1,944-962).
ggcggcagcagcacgttaa

SEQ ID NO: 461313 - DNA, 19 bp, Mus musculus
  siRNA target sequence for Lyl1 (NM_008535.1,1038-1056).
gcgcctggccatgaagtat

SEQ ID NO: 461314 - DNA, 19 bp, Mus musculus
  siRNA target sequence for Lyl1 (NM_008535.1,1041-1059).
cctggccatgaagtatata

SEQ ID NO: 461315 - DNA, 19 bp, Mus musculus
  siRNA target sequence for Mad (NM_010751.1,208-226).
caccagtagcagatcaact

SEQ ID NO: 461316 - DNA, 19 bp, Mus musculus
  siRNA target sequence for Mad (NM_010751.1,216-234).
gcagatcaactcacaatga

SEQ ID NO: 461317 - DNA, 19 bp, Mus musculus
  siRNA target sequence for Mad (NM_010751.1,217-235).
cagatcaactcacaatgaa

SEQ ID NO: 461318 - DNA, 19 bp, Mus musculus
  siRNA target sequence for Mad (NM_010751.1,277-295).
gaagctaaagggattggta

SEQ ID NO: 461319 - DNA, 19 bp, Mus musculus
  siRNA target sequence for Mad4 (NM_010753.2,304-322).
cttcacacaacgaactaga

SEQ ID NO: 461320 - DNA, 19 bp, Mus musculus
  siRNA target sequence for Mad4 (NM_010753.2,327-345).
cacagacgagctaaactca

SEQ ID NO: 461321 - DNA, 19 bp, Mus musculus
  siRNA target sequence for Mad4 (NM_010753.2,337-355).
ctaaactcaggctctactt

SEQ ID NO: 461322 - DNA, 19 bp, Mus musculus
  siRNA target sequence for Mad4 (NM_010753.2,498-516).
cgggaacatcgcttcctaa

SEQ ID NO: 461323 - DNA, 19 bp, Mus musculus
  siRNA target sequence for Mad4 (NM_010753.2,499-517).
gggaacatcgcttcctaaa

SEQ ID NO: 461324 - DNA, 19 bp, Mus musculus
  siRNA target sequence for Madh4 (NM_008540.2,443-461).
ggacaatatgtctataaca

SEQ ID NO: 461325 - DNA, 19 bp, Mus musculus
  siRNA target sequence for Madh4 (NM_008540.2,446-464).
caatatgtctataacaaat

SEQ ID NO: 461326 - DNA, 19 bp, Mus musculus
  siRNA target sequence for Madh4 (NM_008540.2,493-511).
gcattgtacatagtttgat

SEQ ID NO: 461327 - DNA, 19 bp, Mus musculus
  siRNA target sequence for Madh4 (NM_008540.2,501-519).
catagtttgatgtgtcata

SEQ ID NO: 461328 - DNA, 19 bp, Mus musculus
  siRNA target sequence for Madh4 (NM_008540.2,659-677).
catacagagaacattggat

SEQ ID NO: 461329 - DNA, 19 bp, Mus musculus
  siRNA target sequence for Madh4 (NM_008540.2,736-754).
ggaggtggcctgatctaca

SEQ ID NO: 461330 - DNA, 19 bp, Mus musculus
  siRNA target sequence for Madh4 (NM_008540.2,743-761).
gcctgatctacacaagaat

SEQ ID NO: 461331 - DNA, 19 bp, Mus musculus
  siRNA target sequence for Madh4 (NM_008540.2,784-802).
gtcagtatgcgtttgactt

SEQ ID NO: 461332 - DNA, 19 bp, Mus musculus
  siRNA target sequence for Madh4 (NM_008540.2,786-804).
cagtatgcgtttgacttaa

SEQ ID NO: 461333 - DNA, 19 bp, Mus musculus
  siRNA target sequence for Madh4 (NM_008540.2,788-806).
gtatgcgtttgacttaaaa

SEQ ID NO: 461334 - DNA, 19 bp, Mus musculus
  siRNA target sequence for Madh4 (NM_008540.2,820-838).
gtgtgaatccatatcacta

SEQ ID NO: 461335 - DNA, 19 bp, Mus musculus
  siRNA target sequence for Madh4 (NM_008540.2,845-863).
ggttgtctcacctggaatt

SEQ ID NO: 461336 - DNA, 19 bp, Mus musculus
  siRNA target sequence for Madh4 (NM_008540.2,874-892).
gattaacactgcagagtaa

SEQ ID NO: 461337 - DNA, 19 bp, Mus musculus
  siRNA target sequence for Madh4 (NM_008540.2,889-907).
gtaatgctccaagtatgtt

SEQ ID NO: 461338 - DNA, 19 bp, Mus musculus
  siRNA target sequence for Madh4 (NM_008540.2,894-912).
gctccaagtatgttagtga

SEQ ID NO: 461339 - DNA, 19 bp, Mus musculus
  siRNA target sequence for Madh4 (NM_008540.2,895-913).
ctccaagtatgttagtgaa

SEQ ID NO: 461340 - DNA, 19 bp, Mus musculus
  siRNA target sequence for Madh4 (NM_008540.2,920-938).
gtacgttcacgactttgaa

SEQ ID NO: 461341 - DNA, 19 bp, Mus musculus
  siRNA target sequence for Madh4 (NM_008540.2,955-973).
ccactgaaggacattcgat

SEQ ID NO: 461342 - DNA, 19 bp, Mus musculus
  siRNA target sequence for Madh4 (NM_008540.2,956-974).
cactgaaggacattcgatt

SEQ ID NO: 461343 - DNA, 19 bp, Mus musculus
  siRNA target sequence for Madh4 (NM_008540.2,960-978).
gaaggacattcgattcaaa

SEQ ID NO: 461344 - DNA, 19 bp, Mus musculus
  siRNA target sequence for Madh4 (NM_008540.2,983-1001).
ccaacacccgccaagtaat

SEQ ID NO: 461345 - DNA, 19 bp, Mus musculus
  siRNA target sequence for Madh4 (NM_008540.2,1176-1194).
ggacagcagcagaatggat

SEQ ID NO: 461346 - DNA, 19 bp, Mus musculus
  siRNA target sequence for Madh4 (NM_008540.2,1206-1224).
ccagctacttaccatcata

SEQ ID NO: 461347 - DNA, 19 bp, Mus musculus
  siRNA target sequence for Madh4 (NM_008540.2,1323-1341).
ccccatcctggacattact

SEQ ID NO: 461348 - DNA, 19 bp, Mus musculus
  siRNA target sequence for Madh4 (NM_008540.2,1405-1423).
ggtgctccattgcttactt

SEQ ID NO: 461349 - DNA, 19 bp, Mus musculus
  siRNA target sequence for Madh4 (NM_008540.2,1437-1455).
caggtaggagagacgttta

SEQ ID NO: 461350 - DNA, 19 bp, Mus musculus
  siRNA target sequence for Madh4 (NM_008540.2,1645-1663).
gtgaccacgcggtctttgt

SEQ ID NO: 461351 - DNA, 19 bp, Mus musculus
  siRNA target sequence for Madh4 (NM_008540.2,1704-1722).
ggcgacgctgttcataaga

SEQ ID NO: 461352 - DNA, 19 bp, Mus musculus
  siRNA target sequence for Madh4 (NM_008540.2,1705-1723).
gcgacgctgttcataagat

SEQ ID NO: 461353 - DNA, 19 bp, Mus musculus
  siRNA target sequence for Madh4 (NM_008540.2,1724-1742).
ctacccaagcgcgtatata

SEQ ID NO: 461354 - DNA, 19 bp, Mus musculus
  siRNA target sequence for Madh4 (NM_008540.2,1729-1747).
caagcgcgtatataaaggt

SEQ ID NO: 461355 - DNA, 19 bp, Mus musculus
  siRNA target sequence for Madh4 (NM_008540.2,1735-1753).
cgtatataaaggtctttga

SEQ ID NO: 461356 - DNA, 19 bp, Mus musculus
  siRNA target sequence for Madh4 (NM_008540.2,1923-1941).
cggcgattgtgcattctca

SEQ ID NO: 461357 - DNA, 19 bp, Mus musculus
  siRNA target sequence for Madh4 (NM_008540.2,2074-2092).
cggacccacagcctttaga

SEQ ID NO: 461358 - DNA, 19 bp, Mus musculus
  siRNA target sequence for Mafb (NM_010658.2,606-624).
gcaactaccagcagatgaa

SEQ ID NO: 461359 - DNA, 19 bp, Mus musculus
  siRNA target sequence for Mafb (NM_010658.2,1091-1109).
gcccagtcgtgcaggtata

SEQ ID NO: 461360 - DNA, 19 bp, Mus musculus
  siRNA target sequence for Mafb (NM_010658.2,1092-1110).
cccagtcgtgcaggtataa

SEQ ID NO: 461361 - DNA, 19 bp, Mus musculus
  siRNA target sequence for Mafb (NM_010658.2,1093-1111).
ccagtcgtgcaggtataaa

SEQ ID NO: 461362 - DNA, 19 bp, Mus musculus
  siRNA target sequence for Maff (NM_010755.2,117-135).
ggatcccttatctagcaaa

SEQ ID NO: 461363 - DNA, 19 bp, Mus musculus
  siRNA target sequence for Mafg (NM_010756.3,217-235).
gacgacccccaataaagga

SEQ ID NO: 461364 - DNA, 19 bp, Mus musculus
  siRNA target sequence for Mafg (NM_010756.3,653-671).
gccaccagcgtcatcacaa

SEQ ID NO: 461365 - DNA, 19 bp, Mus musculus
  siRNA target sequence for Mafg (NM_010756.3,658-676).
cagcgtcatcacaatagta

SEQ ID NO: 461366 - DNA, 19 bp, Mus musculus
  siRNA target sequence for Mbd1 (NM_013594.1,224-242).
cgccgagagtcctttcgaa

SEQ ID NO: 461367 - DNA, 19 bp, Mus musculus
  siRNA target sequence for Mbd1 (NM_013594.1,260-278).
ggacgctcagacatctatt

SEQ ID NO: 461368 - DNA, 19 bp, Mus musculus
  siRNA target sequence for Mbd1 (NM_013594.1,261-279).
gacgctcagacatctatta

SEQ ID NO: 461369 - DNA, 19 bp, Mus musculus
  siRNA target sequence for Mbd1 (NM_013594.1,347-365).
gatcttaccctgtttgact

SEQ ID NO: 461370 - DNA, 19 bp, Mus musculus
  siRNA target sequence for Mbd1 (NM_013594.1,543-561).
ctctagcttcactatctgt

SEQ ID NO: 461371 - DNA, 19 bp, Mus musculus
  siRNA target sequence for Mbd1 (NM_013594.1,662-680).
gtcaaaaggcagagactta

SEQ ID NO: 461372 - DNA, 19 bp, Mus musculus
  siRNA target sequence for Mbd1 (NM_013594.1,724-742).
ccgcgaacagagaatgttt

SEQ ID NO: 461373 - DNA, 19 bp, Mus musculus
  siRNA target sequence for Mbd1 (NM_013594.1,725-743).
cgcgaacagagaatgttta

SEQ ID NO: 461374 - DNA, 19 bp, Mus musculus
  siRNA target sequence for Mbd1 (NM_013594.1,726-744).
gcgaacagagaatgtttaa

SEQ ID NO: 461375 - DNA, 19 bp, Mus musculus
  siRNA target sequence for Mbd1 (NM_013594.1,833-851).
gtggcctcagggctttact

SEQ ID NO: 461376 - DNA, 19 bp, Mus musculus
  siRNA target sequence for Mbd1 (NM_013594.1,867-885).
gacgatgcctgcggattat

SEQ ID NO: 461377 - DNA, 19 bp, Mus musculus
  siRNA target sequence for Mbd1 (NM_013594.1,870-888).
gatgcctgcggattatgga

SEQ ID NO: 461378 - DNA, 19 bp, Mus musculus
  siRNA target sequence for Mbd1 (NM_013594.1,1012-1030).
ctgtttttggggtaaacgt

SEQ ID NO: 461379 - DNA, 19 bp, Mus musculus
  siRNA target sequence for Mbd1 (NM_013594.1,1021-1039).
gggtaaacgtgattctagt

SEQ ID NO: 461380 - DNA, 19 bp, Mus musculus
  siRNA target sequence for Mbd1 (NM_013594.1,1022-1040).
ggtaaacgtgattctagta

SEQ ID NO: 461381 - DNA, 19 bp, Mus musculus
  siRNA target sequence for Mbd1 (NM_013594.1,1023-1041).
gtaaacgtgattctagtaa

SEQ ID NO: 461382 - DNA, 19 bp, Mus musculus
  siRNA target sequence for Mbd1 (NM_013594.1,1155-1173).
catcacctgctgagttcat

SEQ ID NO: 461383 - DNA, 19 bp, Mus musculus
  siRNA target sequence for Mbd1 (NM_013594.1,1158-1176).
cacctgctgagttcatcta

SEQ ID NO: 461384 - DNA, 19 bp, Mus musculus
  siRNA target sequence for Mbd1 (NM_013594.1,1163-1181).
gctgagttcatctattact

SEQ ID NO: 461385 - DNA, 19 bp, Mus musculus
  siRNA target sequence for Mbd1 (NM_013594.1,1296-1314).
gctgcgacaagcccaaatt

SEQ ID NO: 461386 - DNA, 19 bp, Mus musculus
  siRNA target sequence for Mbd1 (NM_013594.1,1419-1437).
caggattgcgtccatatca

SEQ ID NO: 461387 - DNA, 19 bp, Mus musculus
  siRNA target sequence for Mbd1 (NM_013594.1,1946-1964).
ccagtgatcacggagattt

SEQ ID NO: 461388 - DNA, 19 bp, Mus musculus
  siRNA target sequence for Mbd1 (NM_013594.1,1947-1965).
cagtgatcacggagatttt

SEQ ID NO: 461389 - DNA, 19 bp, Mus musculus
  siRNA target sequence for Mbd1 (NM_013594.1,2010-2028).
caaggctacataaactgtt

SEQ ID NO: 461390 - DNA, 19 bp, Mus musculus
  siRNA target sequence for Mbd2 (NM_010773.1,753-771).
ctggcaagagcgatgtcta

SEQ ID NO: 461391 - DNA, 19 bp, Mus musculus
  siRNA target sequence for Mbd2 (NM_010773.1,788-806).
ggtaagaagttcagaagta

SEQ ID NO: 461392 - DNA, 19 bp, Mus musculus
  siRNA target sequence for Mbd2 (NM_010773.1,842-860).
gaccttagcagttttgact

SEQ ID NO: 461393 - DNA, 19 bp, Mus musculus
  siRNA target sequence for Mbd2 (NM_010773.1,870-888).
gcaagatgatgcctagtaa

SEQ ID NO: 461394 - DNA, 19 bp, Mus musculus
  siRNA target sequence for Mbd2 (NM_010773.1,882-900).
ctagtaaattacagaagaa

SEQ ID NO: 461395 - DNA, 19 bp, Mus musculus
  siRNA target sequence for Mbd2 (NM_010773.1,947-965).
ccagacctgaacacaacat

SEQ ID NO: 461396 - DNA, 19 bp, Mus musculus
  siRNA target sequence for Mbd2 (NM_010773.1,960-978).
caacattgccaattagaca

SEQ ID NO: 461397 - DNA, 19 bp, Mus musculus
  siRNA target sequence for Mbd2 (NM_010773.1,977-995).
caaactgcatcaattttca

SEQ ID NO: 461398 - DNA, 19 bp, Mus musculus
  siRNA target sequence for Mbd2 (NM_010773.1,998-1016).
caaccagtaaccaaattca

SEQ ID NO: 461399 - DNA, 19 bp, Mus musculus
  siRNA target sequence for Mbd2 (NM_010773.1,1017-1035).
cgaaccacccgagcaataa

SEQ ID NO: 461400 - DNA, 19 bp, Mus musculus
  siRNA target sequence for Mbd2 (NM_010773.1,1048-1066).
cccccagcggatgaatgaa

SEQ ID NO: 461401 - DNA, 19 bp, Mus musculus
  siRNA target sequence for Mbd2 (NM_010773.1,1050-1068).
cccagcggatgaatgaaca

SEQ ID NO: 461402 - DNA, 19 bp, Mus musculus
  siRNA target sequence for Mbd2 (NM_010773.1,1051-1069).
ccagcggatgaatgaacaa

SEQ ID NO: 461403 - DNA, 19 bp, Mus musculus
  siRNA target sequence for Mbd2 (NM_010773.1,1067-1085).
caaccacgtcagcttttct

SEQ ID NO: 461404 - DNA, 19 bp, Mus musculus
  siRNA target sequence for Mbd2 (NM_010773.1,1106-1124).
cttagcgcatcagatgtaa

SEQ ID NO: 461405 - DNA, 19 bp, Mus musculus
  siRNA target sequence for Mbd2 (NM_010773.1,1111-1129).
cgcatcagatgtaacagaa

SEQ ID NO: 461406 - DNA, 19 bp, Mus musculus
  siRNA target sequence for Mbd2 (NM_010773.1,1121-1139).
gtaacagaacaaattataa

SEQ ID NO: 461407 - DNA, 19 bp, Mus musculus
  siRNA target sequence for Mbd2 (NM_010773.1,1144-1162).
catggagctacctaaaggt

SEQ ID NO: 461408 - DNA, 19 bp, Mus musculus
  siRNA target sequence for Mbd2 (NM_010773.1,1150-1168).
gctacctaaaggtcttcaa

SEQ ID NO: 461409 - DNA, 19 bp, Mus musculus
  siRNA target sequence for Mbd2 (NM_010773.1,1366-1384).
ccaacaagtacgcaagaaa

SEQ ID NO: 461410 - DNA, 19 bp, Mus musculus
  siRNA target sequence for Mbd3 (NM_013595.1,289-307).
gctgggaaagggaagaagt

SEQ ID NO: 461411 - DNA, 19 bp, Mus musculus
  siRNA target sequence for Mbd3 (NM_013595.1,338-356).
cagggatgtcttttactat

SEQ ID NO: 461412 - DNA, 19 bp, Mus musculus
  siRNA target sequence for Mbd3 (NM_013595.1,483-501).
cagcgtgtgcgctatgatt

SEQ ID NO: 461413 - DNA, 19 bp, Mus musculus
  siRNA target sequence for Mbd3 (NM_013595.1,485-503).
gcgtgtgcgctatgattct

SEQ ID NO: 461414 - DNA, 19 bp, Mus musculus
  siRNA target sequence for Mbd3 (NM_013595.1,486-504).
cgtgtgcgctatgattctt

SEQ ID NO: 461415 - DNA, 19 bp, Mus musculus
  siRNA target sequence for Mbd3 (NM_013595.1,555-573).
cagactgcatccatcttca

SEQ ID NO: 461416 - DNA, 19 bp, Mus musculus
  siRNA target sequence for Mbd3 (NM_013595.1,671-689).
gaagctaagtggattgagt

SEQ ID NO: 461417 - DNA, 19 bp, Mus musculus
  siRNA target sequence for Mbd3 (NM_013595.1,681-699).
ggattgagtgcctttgaca

SEQ ID NO: 461418 - DNA, 19 bp, Mus musculus
  siRNA target sequence for Mbd3 (NM_013595.1,682-700).
gattgagtgcctttgacat

SEQ ID NO: 461419 - DNA, 19 bp, Mus musculus
  siRNA target sequence for Mcm2 (NM_008564.1,181-199).
gagacctccccccatttga

SEQ ID NO: 461420 - DNA, 19 bp, Mus musculus
  siRNA target sequence for Mcm2 (NM_008564.1,551-569).
gatcgagagtattgagaat

SEQ ID NO: 461421 - DNA, 19 bp, Mus musculus
  siRNA target sequence for Mcm2 (NM_008564.1,730-748).
gtgagagtttggtggtaaa

SEQ ID NO: 461422 - DNA, 19 bp, Mus musculus
  siRNA target sequence for Mcm2 (NM_008564.1,732-750).
gagagtttggtggtaaatt

SEQ ID NO: 461423 - DNA, 19 bp, Mus musculus
  siRNA target sequence for Mcm2 (NM_008564.1,734-752).
gagtttggtggtaaattat

SEQ ID NO: 461424 - DNA, 19 bp, Mus musculus
  siRNA target sequence for Mcm2 (NM_008564.1,736-754).
gtttggtggtaaattatga

SEQ ID NO: 461425 - DNA, 19 bp, Mus musculus
  siRNA target sequence for Mcm2 (NM_008564.1,808-826).
ctgagttgctgcagatctt

SEQ ID NO: 461426 - DNA, 19 bp, Mus musculus
  siRNA target sequence for Mcm2 (NM_008564.1,854-872).
ggccatgtaccctaaatat

SEQ ID NO: 461427 - DNA, 19 bp, Mus musculus
  siRNA target sequence for Mcm2 (NM_008564.1,856-874).
ccatgtaccctaaatatga

SEQ ID NO: 461428 - DNA, 19 bp, Mus musculus
  siRNA target sequence for Mcm2 (NM_008564.1,1289-1307).
gctgaccggcatttaccat

SEQ ID NO: 461429 - DNA, 19 bp, Mus musculus
  siRNA target sequence for Mcm2 (NM_008564.1,1290-1308).
ctgaccggcatttaccata

SEQ ID NO: 461430 - DNA, 19 bp, Mus musculus
  siRNA target sequence for Mcm2 (NM_008564.1,1292-1310).
gaccggcatttaccataat

SEQ ID NO: 461431 - DNA, 19 bp, Mus musculus
  siRNA target sequence for Mcm2 (NM_008564.1,1294-1312).
ccggcatttaccataataa

SEQ ID NO: 461432 - DNA, 19 bp, Mus musculus
  siRNA target sequence for Mcm2 (NM_008564.1,1296-1314).
ggcatttaccataataact

SEQ ID NO: 461433 - DNA, 19 bp, Mus musculus
  siRNA target sequence for Mcm2 (NM_008564.1,1297-1315).
gcatttaccataataacta

SEQ ID NO: 461434 - DNA, 19 bp, Mus musculus
  siRNA target sequence for Mcm2 (NM_008564.1,1337-1355).
caacggctttccagtcttt

SEQ ID NO: 461435 - DNA, 19 bp, Mus musculus
  siRNA target sequence for Mcm2 (NM_008564.1,1586-1604).
ggttcgaggtgacattaat

SEQ ID NO: 461436 - DNA, 19 bp, Mus musculus
  siRNA target sequence for Mcm2 (NM_008564.1,2126-2144).
ggatgaagggttgactaat

SEQ ID NO: 461437 - DNA, 19 bp, Mus musculus
  siRNA target sequence for Mcm2 (NM_008564.1,2202-2220).
gaggtgctgaagaagtata

SEQ ID NO: 461438 - DNA, 19 bp, Mus musculus
  siRNA target sequence for Mcm2 (NM_008564.1,2484-2502).
cggagtatgcgcaagactt

SEQ ID NO: 461439 - DNA, 19 bp, Mus musculus
  siRNA target sequence for Mcm2 (NM_008564.1,2485-2503).
ggagtatgcgcaagacttt

SEQ ID NO: 461440 - DNA, 19 bp, Mus musculus
  siRNA target sequence for Mcm2 (NM_008564.1,2522-2540).
ccggcgagataacaatgat

SEQ ID NO: 461441 - DNA, 19 bp, Mus musculus
  siRNA target sequence for Mcm2 (NM_008564.1,2524-2542).
ggcgagataacaatgatct

SEQ ID NO: 461442 - DNA, 19 bp, Mus musculus
  siRNA target sequence for Mcm2 (NM_008564.1,2615-2633).
ggacaccattgaaatacct

SEQ ID NO: 461443 - DNA, 19 bp, Mus musculus
  siRNA target sequence for Mcm2 (NM_008564.1,2656-2674).
ccaggcagatcaatattca

SEQ ID NO: 461444 - DNA, 19 bp, Mus musculus
  siRNA target sequence for Mcm2 (NM_008564.1,2659-2677).
ggcagatcaatattcacaa

SEQ ID NO: 461445 - DNA, 19 bp, Mus musculus
  siRNA target sequence for Mcm2 (NM_008564.1,2693-2711).
cgacagcgacctcttcaaa

SEQ ID NO: 461446 - DNA, 19 bp, Mus musculus
  siRNA target sequence for Mcm2 (NM_008564.1,2694-2712).
gacagcgacctcttcaaat

SEQ ID NO: 461447 - DNA, 19 bp, Mus musculus
  siRNA target sequence for Mcm2 (NM_008564.1,2698-2716).
gcgacctcttcaaattcaa

SEQ ID NO: 461448 - DNA, 19 bp, Mus musculus
  siRNA target sequence for Mcm2 (NM_008564.1,2730-2748).
gacctgaaacgcaaactga

SEQ ID NO: 461449 - DNA, 19 bp, Mus musculus
  siRNA target sequence for Mcm3 (NM_008563.1,16-34).
cagtagtgctggatgatgt

SEQ ID NO: 461450 - DNA, 19 bp, Mus musculus
  siRNA target sequence for Mcm3 (NM_008563.1,135-153).
cagtatcggctgattgtca

SEQ ID NO: 461451 - DNA, 19 bp, Mus musculus
  siRNA target sequence for Mcm3 (NM_008563.1,274-292).
cctacgccaagcagtatga

SEQ ID NO: 461452 - DNA, 19 bp, Mus musculus
  siRNA target sequence for Mcm3 (NM_008563.1,285-303).
cagtatgaggagttctaca

SEQ ID NO: 461453 - DNA, 19 bp, Mus musculus
  siRNA target sequence for Mcm3 (NM_008563.1,287-305).
gtatgaggagttctacata

SEQ ID NO: 461454 - DNA, 19 bp, Mus musculus
  siRNA target sequence for Mcm3 (NM_008563.1,387-405).
gaaggcattgttactaaat

SEQ ID NO: 461455 - DNA, 19 bp, Mus musculus
  siRNA target sequence for Mcm3 (NM_008563.1,390-408).
ggcattgttactaaatgct

SEQ ID NO: 461456 - DNA, 19 bp, Mus musculus
  siRNA target sequence for Mcm3 (NM_008563.1,509-527).
cccatccagttctgtttat

SEQ ID NO: 461457 - DNA, 19 bp, Mus musculus
  siRNA target sequence for Mcm3 (NM_008563.1,650-668).
ctccgtggacgtcattcta

SEQ ID NO: 461458 - DNA, 19 bp, Mus musculus
  siRNA target sequence for Mcm3 (NM_008563.1,652-670).
ccgtggacgtcattctaga

SEQ ID NO: 461459 - DNA, 19 bp, Mus musculus
  siRNA target sequence for Mcm3 (NM_008563.1,671-689).
cgatgacctggtggataaa

SEQ ID NO: 461460 - DNA, 19 bp, Mus musculus
  siRNA target sequence for Mcm3 (NM_008563.1,803-821).
gcagatgagtaaggatatt

SEQ ID NO: 461461 - DNA, 19 bp, Mus musculus
  siRNA target sequence for Mcm3 (NM_008563.1,829-847).
cattctctgcggacgatat

SEQ ID NO: 461462 - DNA, 19 bp, Mus musculus
  siRNA target sequence for Mcm3 (NM_008563.1,840-858).
gacgatatagccaagatca

SEQ ID NO: 461463 - DNA, 19 bp, Mus musculus
  siRNA target sequence for Mcm3 (NM_008563.1,843-861).
gatatagccaagatcaaga

SEQ ID NO: 461464 - DNA, 19 bp, Mus musculus
  siRNA target sequence for Mcm3 (NM_008563.1,874-892).
ctcgttccaaggatgtctt

SEQ ID NO: 461465 - DNA, 19 bp, Mus musculus
  siRNA target sequence for Mcm3 (NM_008563.1,931-949).
ggcatgactatgtcaagaa

SEQ ID NO: 461466 - DNA, 19 bp, Mus musculus
  siRNA target sequence for Mcm3 (NM_008563.1,976-994).
gggtggagcgggaacttga

SEQ ID NO: 461467 - DNA, 19 bp, Mus musculus
  siRNA target sequence for Mcm3 (NM_008563.1,1010-1028).
ccgtggagacatcaatatt

SEQ ID NO: 461468 - DNA, 19 bp, Mus musculus
  siRNA target sequence for Mcm3 (NM_008563.1,1022-1040).
caatattcttctaataggt

SEQ ID NO: 461469 - DNA, 19 bp, Mus musculus
  siRNA target sequence for Mcm3 (NM_008563.1,1211-1229).
ccgtggagtggtttgcatt

SEQ ID NO: 461470 - DNA, 19 bp, Mus musculus
  siRNA target sequence for Mcm3 (NM_008563.1,1290-1308).
ggtcgagtgaccattgcaa

SEQ ID NO: 461471 - DNA, 19 bp, Mus musculus
  siRNA target sequence for Mcm3 (NM_008563.1,1291-1309).
gtcgagtgaccattgcaaa

SEQ ID NO: 461472 - DNA, 19 bp, Mus musculus
  siRNA target sequence for Mcm3 (NM_008563.1,1374-1392).
ggcaggtatgatcagtata

SEQ ID NO: 461473 - DNA, 19 bp, Mus musculus
  siRNA target sequence for Mcm3 (NM_008563.1,1375-1393).
gcaggtatgatcagtataa

SEQ ID NO: 461474 - DNA, 19 bp, Mus musculus
  siRNA target sequence for Mcm3 (NM_008563.1,1438-1456).
gatttgacctgctcttcat

SEQ ID NO: 461475 - DNA, 19 bp, Mus musculus
  siRNA target sequence for Mcm3 (NM_008563.1,1509-1527).
cttaggatgcaccaataca

SEQ ID NO: 461476 - DNA, 19 bp, Mus musculus
  siRNA target sequence for Mcm3 (NM_008563.1,1567-1585).
gtagttcagtggatatcct

SEQ ID NO: 461477 - DNA, 19 bp, Mus musculus
  siRNA target sequence for Mcm3 (NM_008563.1,1589-1607).
cacagacgatcctgacttt

SEQ ID NO: 461478 - DNA, 19 bp, Mus musculus
  siRNA target sequence for Mcm3 (NM_008563.1,1622-1640).
gcaagatacccgcatttat

SEQ ID NO: 461479 - DNA, 19 bp, Mus musculus
  siRNA target sequence for Mcm3 (NM_008563.1,1626-1644).
gatacccgcatttatgaga

SEQ ID NO: 461480 - DNA, 19 bp, Mus musculus
  siRNA target sequence for Mcm3 (NM_008563.1,1688-1706).
gatggtgagcgcagctttt

SEQ ID NO: 461481 - DNA, 19 bp, Mus musculus
  siRNA target sequence for Mcm3 (NM_008563.1,1692-1710).
gtgagcgcagcttttatga

SEQ ID NO: 461482 - DNA, 19 bp, Mus musculus
  siRNA target sequence for Mcm3 (NM_008563.1,1696-1714).
gcgcagcttttatgaagaa

SEQ ID NO: 461483 - DNA, 19 bp, Mus musculus
  siRNA target sequence for Mcm3 (NM_008563.1,1757-1775).
ggagtcagcagcctacatt

SEQ ID NO: 461484 - DNA, 19 bp, Mus musculus
  siRNA target sequence for Mcm3 (NM_008563.1,1768-1786).
cctacattgcagaagaata

SEQ ID NO: 461485 - DNA, 19 bp, Mus musculus
  siRNA target sequence for Mcm3 (NM_008563.1,1829-1847).
ccggacatctccagttaca

SEQ ID NO: 461486 - DNA, 19 bp, Mus musculus
  siRNA target sequence for Mcm3 (NM_008563.1,1950-1968).
gttcagtatgcttatttca

SEQ ID NO: 461487 - DNA, 19 bp, Mus musculus
  siRNA target sequence for Mcm3 (NM_008563.1,2170-2188).
ctgacgattcccaagagaa

SEQ ID NO: 461488 - DNA, 19 bp, Mus musculus
  siRNA target sequence for Mcm3 (NM_008563.1,2181-2199).
caagagaagaccgatgatt

SEQ ID NO: 461489 - DNA, 19 bp, Mus musculus
  siRNA target sequence for Mcm3 (NM_008563.1,2329-2347).
ccatcaaccggaatagaga

SEQ ID NO: 461490 - DNA, 19 bp, Mus musculus
  siRNA target sequence for Mcm3 (NM_008563.1,2330-2348).
catcaaccggaatagagaa

SEQ ID NO: 461491 - DNA, 19 bp, Mus musculus
  siRNA target sequence for Mcm3 (NM_008563.1,2421-2439).
gagggcatcgtcttcctta

SEQ ID NO: 461492 - DNA, 19 bp, Mus musculus
  siRNA target sequence for Mcm4 (NM_008565.2,651-669).
gcaacatgtaaagagaatt

SEQ ID NO: 461493 - DNA, 19 bp, Mus musculus
  siRNA target sequence for Mcm4 (NM_008565.2,892-910).
ctgtcaatgagatcttctt

SEQ ID NO: 461494 - DNA, 19 bp, Mus musculus
  siRNA target sequence for Mcm4 (NM_008565.2,1121-1139).
gatagatcgaggcagaatt

SEQ ID NO: 461495 - DNA, 19 bp, Mus musculus
  siRNA target sequence for Mcm4 (NM_008565.2,1194-1212).
cacaaccgatcattcttct

SEQ ID NO: 461496 - DNA, 19 bp, Mus musculus
  siRNA target sequence for Mcm4 (NM_008565.2,1294-1312).
cccacaatgaccttgttga

SEQ ID NO: 461497 - DNA, 19 bp, Mus musculus
  siRNA target sequence for Mcm4 (NM_008565.2,1340-1358).
cgtcacaggcatatatcga

SEQ ID NO: 461498 - DNA, 19 bp, Mus musculus
  siRNA target sequence for Mcm4 (NM_008565.2,1502-1520).
gaaacgtgtgaaattgctt

SEQ ID NO: 461499 - DNA, 19 bp, Mus musculus
  siRNA target sequence for Mcm4 (NM_008565.2,1797-1815).
ggcctcaccgcctatgtga

SEQ ID NO: 461500 - DNA, 19 bp, Mus musculus
  siRNA target sequence for Mcm4 (NM_008565.2,1802-1820).
caccgcctatgtgatgaaa

SEQ ID NO: 461501 - DNA, 19 bp, Mus musculus
  siRNA target sequence for Mcm4 (NM_008565.2,1804-1822).
ccgcctatgtgatgaaaga

SEQ ID NO: 461502 - DNA, 19 bp, Mus musculus
  siRNA target sequence for Mcm4 (NM_008565.2,2036-2054).
gtctcagtggaatcctaaa

SEQ ID NO: 461503 - DNA, 19 bp, Mus musculus
  siRNA target sequence for Mcm4 (NM_008565.2,2038-2056).
ctcagtggaatcctaaaaa

SEQ ID NO: 461504 - DNA, 19 bp, Mus musculus
  siRNA target sequence for Mcm4 (NM_008565.2,2076-2094).
caactaccgcacacattgt

SEQ ID NO: 461505 - DNA, 19 bp, Mus musculus
  siRNA target sequence for Mcm4 (NM_008565.2,2079-2097).
ctaccgcacacattgttgt

SEQ ID NO: 461506 - DNA, 19 bp, Mus musculus
  siRNA target sequence for Mcm4 (NM_008565.2,2082-2100).
ccgcacacattgttgtcaa

SEQ ID NO: 461507 - DNA, 19 bp, Mus musculus
  siRNA target sequence for Mcm4 (NM_008565.2,2131-2149).
ctcaggatgaggcatatga

SEQ ID NO: 461508 - DNA, 19 bp, Mus musculus
  siRNA target sequence for Mcm4 (NM_008565.2,2166-2184).
cacctggtttcattgtact

SEQ ID NO: 461509 - DNA, 19 bp, Mus musculus
  siRNA target sequence for Mcm4 (NM_008565.2,2176-2194).
cattgtactaccaaagtga

SEQ ID NO: 461510 - DNA, 19 bp, Mus musculus
  siRNA target sequence for Mcm4 (NM_008565.2,2365-2383).
ctcgacagctagagtcatt

SEQ ID NO: 461511 - DNA, 19 bp, Mus musculus
  siRNA target sequence for Mcm4 (NM_008565.2,2707-2725).
gagctttggctgatgatga

SEQ ID NO: 461512 - DNA, 19 bp, Mus musculus
  siRNA target sequence for Mcm5 (NM_008566.1,256-274).
gaactcaagcggcattaca

SEQ ID NO: 461513 - DNA, 19 bp, Mus musculus
  siRNA target sequence for Mcm5 (NM_008566.1,336-354).
ggctgaccacttgcataaa

SEQ ID NO: 461514 - DNA, 19 bp, Mus musculus
  siRNA target sequence for Mcm5 (NM_008566.1,338-356).
ctgaccacttgcataaaca

SEQ ID NO: 461515 - DNA, 19 bp, Mus musculus
  siRNA target sequence for Mcm5 (NM_008566.1,488-506).
cgagcattcggattctgaa

SEQ ID NO: 461516 - DNA, 19 bp, Mus musculus
  siRNA target sequence for Mcm5 (NM_008566.1,534-552).
gatccctggcatcatcatt

SEQ ID NO: 461517 - DNA, 19 bp, Mus musculus
  siRNA target sequence for Mcm5 (NM_008566.1,662-680).
ccaggaagtgcaatatgga

SEQ ID NO: 461518 - DNA, 19 bp, Mus musculus
  siRNA target sequence for Mcm5 (NM_008566.1,701-719).
gcccactggatccatactt

SEQ ID NO: 461519 - DNA, 19 bp, Mus musculus
  siRNA target sequence for Mcm5 (NM_008566.1,704-722).
cactggatccatacttcat

SEQ ID NO: 461520 - DNA, 19 bp, Mus musculus
  siRNA target sequence for Mcm5 (NM_008566.1,1190-1208).
ctcgccgaggtgatatcaa

SEQ ID NO: 461521 - DNA, 19 bp, Mus musculus
  siRNA target sequence for Mcm5 (NM_008566.1,1192-1210).
cgccgaggtgatatcaact

SEQ ID NO: 461522 - DNA, 19 bp, Mus musculus
  siRNA target sequence for Mcm5 (NM_008566.1,1345-1363).
ccctcatctcgaaacttca

SEQ ID NO: 461523 - DNA, 19 bp, Mus musculus
  siRNA target sequence for Mcm5 (NM_008566.1,1346-1364).
cctcatctcgaaacttcat

SEQ ID NO: 461524 - DNA, 19 bp, Mus musculus
  siRNA target sequence for Mcm5 (NM_008566.1,1349-1367).
catctcgaaacttcatcat

SEQ ID NO: 461525 - DNA, 19 bp, Mus musculus
  siRNA target sequence for Mcm5 (NM_008566.1,1559-1577).
gccgatgggatgagacaaa

SEQ ID NO: 461526 - DNA, 19 bp, Mus musculus
  siRNA target sequence for Mcm5 (NM_008566.1,1560-1578).
ccgatgggatgagacaaaa

SEQ ID NO: 461527 - DNA, 19 bp, Mus musculus
  siRNA target sequence for Mcm5 (NM_008566.1,1574-1592).
caaaaggggaggacaatat

SEQ ID NO: 461528 - DNA, 19 bp, Mus musculus
  siRNA target sequence for Mcm5 (NM_008566.1,1579-1597).
ggggaggacaatattgact

SEQ ID NO: 461529 - DNA, 19 bp, Mus musculus
  siRNA target sequence for Mcm5 (NM_008566.1,1580-1598).
gggaggacaatattgactt

SEQ ID NO: 461530 - DNA, 19 bp, Mus musculus
  siRNA target sequence for Mcm5 (NM_008566.1,1616-1634).
cccgatttgatatgatctt

SEQ ID NO: 461531 - DNA, 19 bp, Mus musculus
  siRNA target sequence for Mcm5 (NM_008566.1,1618-1636).
cgatttgatatgatcttca

SEQ ID NO: 461532 - DNA, 19 bp, Mus musculus
  siRNA target sequence for Mcm5 (NM_008566.1,1619-1637).
gatttgatatgatcttcat

SEQ ID NO: 461533 - DNA, 19 bp, Mus musculus
  siRNA target sequence for Mcm5 (NM_008566.1,1668-1686).
catgatgctagccaaacat

SEQ ID NO: 461534 - DNA, 19 bp, Mus musculus
  siRNA target sequence for Mcm5 (NM_008566.1,1939-1957).
gctgaggccctcagtaaga

SEQ ID NO: 461535 - DNA, 19 bp, Mus musculus
  siRNA target sequence for Mcm5 (NM_008566.1,1946-1964).
ccctcagtaagatgaaact

SEQ ID NO: 461536 - DNA, 19 bp, Mus musculus
  siRNA target sequence for Mcm5 (NM_008566.1,2167-2185).
caggacttcaccaaacaga

SEQ ID NO: 461537 - DNA, 19 bp, Mus musculus
  siRNA target sequence for Mcm6 (NM_008567.1,149-167).
gacgaggtggccgagaaat

SEQ ID NO: 461538 - DNA, 19 bp, Mus musculus
  siRNA target sequence for Mcm6 (NM_008567.1,205-223).
gggtagtgatggagaaatt

SEQ ID NO: 461539 - DNA, 19 bp, Mus musculus
  siRNA target sequence for Mcm6 (NM_008567.1,235-253).
gtttgcagaggagctaatt

SEQ ID NO: 461540 - DNA, 19 bp, Mus musculus
  siRNA target sequence for Mcm6 (NM_008567.1,299-317).
caatttaaccaacaacttt

SEQ ID NO: 461541 - DNA, 19 bp, Mus musculus
  siRNA target sequence for Mcm6 (NM_008567.1,325-343).
cattcaggaagagttctat

SEQ ID NO: 461542 - DNA, 19 bp, Mus musculus
  siRNA target sequence for Mcm6 (NM_008567.1,400-418).
gatcccttttgctaaggat

SEQ ID NO: 461543 - DNA, 19 bp, Mus musculus
  siRNA target sequence for Mcm6 (NM_008567.1,403-421).
cccttttgctaaggatttt

SEQ ID NO: 461544 - DNA, 19 bp, Mus musculus
  siRNA target sequence for Mcm6 (NM_008567.1,487-505).
gctgctcacccgaatcagt

SEQ ID NO: 461545 - DNA, 19 bp, Mus musculus
  siRNA target sequence for Mcm6 (NM_008567.1,562-580).
gtgccttgactgtcaaaca

SEQ ID NO: 461546 - DNA, 19 bp, Mus musculus
  siRNA target sequence for Mcm6 (NM_008567.1,569-587).
gactgtcaaacagtgatta

SEQ ID NO: 461547 - DNA, 19 bp, Mus musculus
  siRNA target sequence for Mcm6 (NM_008567.1,573-591).
gtcaaacagtgattaagga

SEQ ID NO: 461548 - DNA, 19 bp, Mus musculus
  siRNA target sequence for Mcm6 (NM_008567.1,592-610).
cgtagagcagcagttcaaa

SEQ ID NO: 461549 - DNA, 19 bp, Mus musculus
  siRNA target sequence for Mcm6 (NM_008567.1,596-614).
gagcagcagttcaaataca

SEQ ID NO: 461550 - DNA, 19 bp, Mus musculus
  siRNA target sequence for Mcm6 (NM_008567.1,598-616).
gcagcagttcaaatacaca

SEQ ID NO: 461551 - DNA, 19 bp, Mus musculus
  siRNA target sequence for Mcm6 (NM_008567.1,622-640).
gaatatctgccgaaatcca

SEQ ID NO: 461552 - DNA, 19 bp, Mus musculus
  siRNA target sequence for Mcm6 (NM_008567.1,660-678).
ggttccttctagacactaa

SEQ ID NO: 461553 - DNA, 19 bp, Mus musculus
  siRNA target sequence for Mcm6 (NM_008567.1,661-679).
gttccttctagacactaat

SEQ ID NO: 461554 - DNA, 19 bp, Mus musculus
  siRNA target sequence for Mcm6 (NM_008567.1,673-691).
cactaataaatcaagattt

SEQ ID NO: 461555 - DNA, 19 bp, Mus musculus
  siRNA target sequence for Mcm6 (NM_008567.1,747-765).
gtattccccggagtttaga

SEQ ID NO: 461556 - DNA, 19 bp, Mus musculus
  siRNA target sequence for Mcm6 (NM_008567.1,756-774).
ggagtttagaggttatcct

SEQ ID NO: 461557 - DNA, 19 bp, Mus musculus
  siRNA target sequence for Mcm6 (NM_008567.1,823-841).
cacaggggcactgattgtt

SEQ ID NO: 461558 - DNA, 19 bp, Mus musculus
  siRNA target sequence for Mcm6 (NM_008567.1,845-863).
cctgatgtctccaagctta

SEQ ID NO: 461559 - DNA, 19 bp, Mus musculus
  siRNA target sequence for Mcm6 (NM_008567.1,875-893).
gcacgtgcagagactaact

SEQ ID NO: 461560 - DNA, 19 bp, Mus musculus
  siRNA target sequence for Mcm6 (NM_008567.1,956-974).
gtcagagatctgtcataca

SEQ ID NO: 461561 - DNA, 19 bp, Mus musculus
  siRNA target sequence for Mcm6 (NM_008567.1,1053-1071).
ccgctgagagcattaagaa

SEQ ID NO: 461562 - DNA, 19 bp, Mus musculus
  siRNA target sequence for Mcm6 (NM_008567.1,1146-1164).
cgagcctcttccctactat

SEQ ID NO: 461563 - DNA, 19 bp, Mus musculus
  siRNA target sequence for Mcm6 (NM_008567.1,1150-1168).
cctcttccctactatacat

SEQ ID NO: 461564 - DNA, 19 bp, Mus musculus
  siRNA target sequence for Mcm6 (NM_008567.1,1161-1179).
ctatacatggcaatgatga

SEQ ID NO: 461565 - DNA, 19 bp, Mus musculus
  siRNA target sequence for Mcm6 (NM_008567.1,1166-1184).
catggcaatgatgaagtaa

SEQ ID NO: 461566 - DNA, 19 bp, Mus musculus
  siRNA target sequence for Mcm6 (NM_008567.1,1188-1206).
gcggtgtcttactgatgtt

SEQ ID NO: 461567 - DNA, 19 bp, Mus musculus
  siRNA target sequence for Mcm6 (NM_008567.1,1190-1208).
ggtgtcttactgatgttgt

SEQ ID NO: 461568 - DNA, 19 bp, Mus musculus
  siRNA target sequence for Mcm6 (NM_008567.1,1211-1229).
ggtggtgttcctaagacaa

SEQ ID NO: 461569 - DNA, 19 bp, Mus musculus
  siRNA target sequence for Mcm6 (NM_008567.1,1243-1261).
ctctcttcgtggggatata

SEQ ID NO: 461570 - DNA, 19 bp, Mus musculus
  siRNA target sequence for Mcm6 (NM_008567.1,1245-1263).
ctcttcgtggggatataaa

SEQ ID NO: 461571 - DNA, 19 bp, Mus musculus
  siRNA target sequence for Mcm6 (NM_008567.1,1250-1268).
cgtggggatataaatgttt

SEQ ID NO: 461572 - DNA, 19 bp, Mus musculus
  siRNA target sequence for Mcm6 (NM_008567.1,1254-1272).
gggatataaatgtttgcat

SEQ ID NO: 461573 - DNA, 19 bp, Mus musculus
  siRNA target sequence for Mcm6 (NM_008567.1,1290-1308).
cagctaagagccaatttct

SEQ ID NO: 461574 - DNA, 19 bp, Mus musculus
  siRNA target sequence for Mcm6 (NM_008567.1,1292-1310).
gctaagagccaatttctca

SEQ ID NO: 461575 - DNA, 19 bp, Mus musculus
  siRNA target sequence for Mcm6 (NM_008567.1,1293-1311).
ctaagagccaatttctcaa

SEQ ID NO: 461576 - DNA, 19 bp, Mus musculus
  siRNA target sequence for Mcm6 (NM_008567.1,1363-1381).
cagcgctgccggcttaaca

SEQ ID NO: 461577 - DNA, 19 bp, Mus musculus
  siRNA target sequence for Mcm6 (NM_008567.1,1403-1421).
gaatctcacgaatttgtca

SEQ ID NO: 461578 - DNA, 19 bp, Mus musculus
  siRNA target sequence for Mcm6 (NM_008567.1,1434-1452).
cgttgatgctggctgataa

SEQ ID NO: 461579 - DNA, 19 bp, Mus musculus
  siRNA target sequence for Mcm6 (NM_008567.1,1438-1456).
gatgctggctgataatggt

SEQ ID NO: 461580 - DNA, 19 bp, Mus musculus
  siRNA target sequence for Mcm6 (NM_008567.1,1492-1510).
gcgggaccaagttgctatt

SEQ ID NO: 461581 - DNA, 19 bp, Mus musculus
  siRNA target sequence for Mcm6 (NM_008567.1,1576-1594).
caggacatccattttagct

SEQ ID NO: 461582 - DNA, 19 bp, Mus musculus
  siRNA target sequence for Mcm6 (NM_008567.1,1607-1625).
gtcagcggacactatgaca

SEQ ID NO: 461583 - DNA, 19 bp, Mus musculus
  siRNA target sequence for Mcm6 (NM_008567.1,1613-1631).
ggacactatgacagatcaa

SEQ ID NO: 461584 - DNA, 19 bp, Mus musculus
  siRNA target sequence for Mcm6 (NM_008567.1,1616-1634).
cactatgacagatcaaaat

SEQ ID NO: 461585 - DNA, 19 bp, Mus musculus
  siRNA target sequence for Mcm6 (NM_008567.1,1655-1673).
ctgtcagcgcccatcatgt

SEQ ID NO: 461586 - DNA, 19 bp, Mus musculus
  siRNA target sequence for Mcm6 (NM_008567.1,1710-1728).
gcaatgaggtgacagatta

SEQ ID NO: 461587 - DNA, 19 bp, Mus musculus
  siRNA target sequence for Mcm6 (NM_008567.1,1742-1760).
cgcatagtagacttgcatt

SEQ ID NO: 461588 - DNA, 19 bp, Mus musculus
  siRNA target sequence for Mcm6 (NM_008567.1,1748-1766).
gtagacttgcattcaagaa

SEQ ID NO: 461589 - DNA, 19 bp, Mus musculus
  siRNA target sequence for Mcm6 (NM_008567.1,1753-1771).
cttgcattcaagaattgaa

SEQ ID NO: 461590 - DNA, 19 bp, Mus musculus
  siRNA target sequence for Mcm6 (NM_008567.1,1820-1838).
ctctttgcccgacagttta

SEQ ID NO: 461591 - DNA, 19 bp, Mus musculus
  siRNA target sequence for Mcm6 (NM_008567.1,1963-1981).
gatccgactctcagaatca

SEQ ID NO: 461592 - DNA, 19 bp, Mus musculus
  siRNA target sequence for Mcm6 (NM_008567.1,2005-2023).
cgaggttcagcctaaacat

SEQ ID NO: 461593 - DNA, 19 bp, Mus musculus
  siRNA target sequence for Mcm6 (NM_008567.1,2024-2042).
gtgaaggaagcttttcgat

SEQ ID NO: 461594 - DNA, 19 bp, Mus musculus
  siRNA target sequence for Mcm6 (NM_008567.1,2026-2044).
gaaggaagcttttcgatta

SEQ ID NO: 461595 - DNA, 19 bp, Mus musculus
  siRNA target sequence for Mcm6 (NM_008567.1,2030-2048).
gaagcttttcgattactga

SEQ ID NO: 461596 - DNA, 19 bp, Mus musculus
  siRNA target sequence for Mcm6 (NM_008567.1,2073-2091).
cgcctgatgtcaatctaga

SEQ ID NO: 461597 - DNA, 19 bp, Mus musculus
  siRNA target sequence for Mcm6 (NM_008567.1,2074-2092).
gcctgatgtcaatctagat

SEQ ID NO: 461598 - DNA, 19 bp, Mus musculus
  siRNA target sequence for Mcm6 (NM_008567.1,2076-2094).
ctgatgtcaatctagatca

SEQ ID NO: 461599 - DNA, 19 bp, Mus musculus
  siRNA target sequence for Mcm6 (NM_008567.1,2159-2177).
cctgcccctgtgaataggt

SEQ ID NO: 461600 - DNA, 19 bp, Mus musculus
  siRNA target sequence for Mcm6 (NM_008567.1,2179-2197).
caacggctccagtgaagat

SEQ ID NO: 461601 - DNA, 19 bp, Mus musculus
  siRNA target sequence for Mcm6 (NM_008567.1,2232-2250).
ggctgggctttgctgaata

SEQ ID NO: 461602 - DNA, 19 bp, Mus musculus
  siRNA target sequence for Mcm6 (NM_008567.1,2306-2324).
gacgagtcggcactaaaga

SEQ ID NO: 461603 - DNA, 19 bp, Mus musculus
  siRNA target sequence for Mcm6 (NM_008567.1,2308-2326).
cgagtcggcactaaagaga

SEQ ID NO: 461604 - DNA, 19 bp, Mus musculus
  siRNA target sequence for Mcm6 (NM_008567.1,2309-2327).
gagtcggcactaaagagaa

SEQ ID NO: 461605 - DNA, 19 bp, Mus musculus
  siRNA target sequence for Mcm6 (NM_008567.1,2344-2362).
gtacctgaaggaaatcgaa

SEQ ID NO: 461606 - DNA, 19 bp, Mus musculus
  siRNA target sequence for Mcm6 (NM_008567.1,2353-2371).
ggaaatcgaatcagagata

SEQ ID NO: 461607 - DNA, 19 bp, Mus musculus
  siRNA target sequence for Mcm6 (NM_008567.1,2384-2402).
gagctcataaataaaaaga

SEQ ID NO: 461608 - DNA, 19 bp, Mus musculus
  siRNA target sequence for Mcm6 (NM_008567.1,2407-2425).
cattgagaaggttgttcat

SEQ ID NO: 461609 - DNA, 19 bp, Mus musculus
  siRNA target sequence for Mcm6 (NM_008567.1,2437-2455).
ctacgatcacgttctgatt

SEQ ID NO: 461610 - DNA, 19 bp, Mus musculus
  siRNA target sequence for Mcm6 (NM_008567.1,2525-2543).
gtagtcaaccctaactact

SEQ ID NO: 461611 - DNA, 19 bp, Mus musculus
  siRNA target sequence for Mcm6 (NM_008567.1,2535-2553).
ctaactacttgcttgaaga

SEQ ID NO: 461612 - DNA, 19 bp, Mus musculus
  siRNA target sequence for Mcm7 (NM_008568.1,1202-1220).
cctcaaggcatgaagatca

SEQ ID NO: 461613 - DNA, 19 bp, Mus musculus
  siRNA target sequence for Mcm7 (NM_008568.1,1252-1270).
ccctggtgtggccaaatct

SEQ ID NO: 461614 - DNA, 19 bp, Mus musculus
  siRNA target sequence for Mcm7 (NM_008568.1,1301-1319).
ccgcgaagtcagtacacaa

SEQ ID NO: 461615 - DNA, 19 bp, Mus musculus
  siRNA target sequence for Mcm7 (NM_008568.1,1574-1592).
cctgcctacggccgatata

SEQ ID NO: 461616 - DNA, 19 bp, Mus musculus
  siRNA target sequence for Mcm7 (NM_008568.1,1575-1593).
ctgcctacggccgatataa

SEQ ID NO: 461617 - DNA, 19 bp, Mus musculus
  siRNA target sequence for Mcm7 (NM_008568.1,1744-1762).
gccccctgcccaatttgaa

SEQ ID NO: 461618 - DNA, 19 bp, Mus musculus
  siRNA target sequence for Mcm7 (NM_008568.1,1768-1786).
ggacatgaaacttatgaga

SEQ ID NO: 461619 - DNA, 19 bp, Mus musculus
  siRNA target sequence for Mcm7 (NM_008568.1,1843-1861).
ctacatcaccgcagcatat

SEQ ID NO: 461620 - DNA, 19 bp, Mus musculus
  siRNA target sequence for Mcm7 (NM_008568.1,1894-1912).
ggatgccacctatacttct

SEQ ID NO: 461621 - DNA, 19 bp, Mus musculus
  siRNA target sequence for Mcm7 (NM_008568.1,1959-1977).
gacttcggatggtagacat

SEQ ID NO: 461622 - DNA, 19 bp, Mus musculus
  siRNA target sequence for Mcm7 (NM_008568.1,1994-2012).
gtaaatgaagccataaggt

SEQ ID NO: 461623 - DNA, 19 bp, Mus musculus
  siRNA target sequence for Mcm7 (NM_008568.1,2071-2089).
gaggccagcagatgtgata

SEQ ID NO: 461624 - DNA, 19 bp, Mus musculus
  siRNA target sequence for Mcm7 (NM_008568.1,2073-2091).
ggccagcagatgtgatatt

SEQ ID NO: 461625 - DNA, 19 bp, Mus musculus
  siRNA target sequence for Mcm7 (NM_008568.1,2122-2140).
gcggagtgtccacttttct

SEQ ID NO: 461626 - DNA, 19 bp, Mus musculus
  siRNA target sequence for Mcm7 (NM_008568.1,2124-2142).
ggagtgtccacttttctga

SEQ ID NO: 461627 - DNA, 19 bp, Mus musculus
  siRNA target sequence for Mcm7 (NM_008568.1,2222-2240).
gtctggcaggttaatactt

SEQ ID NO: 461628 - DNA, 19 bp, Mus musculus
  siRNA target sequence for Mcm7 (NM_008568.1,2224-2242).
ctggcaggttaatacttct

SEQ ID NO: 461629 - DNA, 19 bp, Mus musculus
  siRNA target sequence for Mecp2 (NM_010788.1,448-466).
gtgaccggggacctatgta

SEQ ID NO: 461630 - DNA, 19 bp, Mus musculus
  siRNA target sequence for Mecp2 (NM_010788.1,452-470).
ccggggacctatgtatgat

SEQ ID NO: 461631 - DNA, 19 bp, Mus musculus
  siRNA target sequence for Mecp2 (NM_010788.1,489-507).
ggttggacacgaaagctta

SEQ ID NO: 461632 - DNA, 19 bp, Mus musculus
  siRNA target sequence for Mecp2 (NM_010788.1,490-508).
gttggacacgaaagcttaa

SEQ ID NO: 461633 - DNA, 19 bp, Mus musculus
  siRNA target sequence for Mecp2 (NM_010788.1,529-547).
ctgctggaaagtatgatgt

SEQ ID NO: 461634 - DNA, 19 bp, Mus musculus
  siRNA target sequence for Mecp2 (NM_010788.1,531-549).
gctggaaagtatgatgtat

SEQ ID NO: 461635 - DNA, 19 bp, Mus musculus
  siRNA target sequence for Mecp2 (NM_010788.1,534-552).
ggaaagtatgatgtatatt

SEQ ID NO: 461636 - DNA, 19 bp, Mus musculus
  siRNA target sequence for Mecp2 (NM_010788.1,581-599).
ctctaaagtagaattgatt

SEQ ID NO: 461637 - DNA, 19 bp, Mus musculus
  siRNA target sequence for Mecp2 (NM_010788.1,835-853).
ggaaacttgttgtcaagat

SEQ ID NO: 461638 - DNA, 19 bp, Mus musculus
  siRNA target sequence for Mecp2 (NM_010788.1,911-929).
ccaggtcatggtgatcaaa

SEQ ID NO: 461639 - DNA, 19 bp, Mus musculus
  siRNA target sequence for Mecp2 (NM_010788.1,976-994).
ctaagaaacggggtagaaa

SEQ ID NO: 461640 - DNA, 19 bp, Mus musculus
  siRNA target sequence for Mecp2 (NM_010788.1,1043-1061).
cgtgaaggagtcttccata

SEQ ID NO: 461641 - DNA, 19 bp, Mus musculus
  siRNA target sequence for Mecp2 (NM_010788.1,1078-1096).
ctgtgctccccatcaagaa

SEQ ID NO: 461642 - DNA, 19 bp, Mus musculus
  siRNA target sequence for Mecp2 (NM_010788.1,1157-1175).
gtccacccttggtgagaaa

SEQ ID NO: 461643 - DNA, 19 bp, Mus musculus
  siRNA target sequence for Mecp2 (NM_010788.1,1204-1222).
gccctgggcgtaaaagcaa

SEQ ID NO: 461644 - DNA, 19 bp, Mus musculus
  siRNA target sequence for Mecp2 (NM_010788.1,1614-1632).
cccgtgaccgagagagtta

SEQ ID NO: 461645 - DNA, 19 bp, Mus musculus
  siRNA target sequence for Mela (NM_008581.1,280-298).
gagtacaacgctctcaaaa

SEQ ID NO: 461646 - DNA, 19 bp, Mus musculus
  siRNA target sequence for Mela (NM_008581.1,330-348).
ccctaattgtccttctgat

SEQ ID NO: 461647 - DNA, 19 bp, Mus musculus
  siRNA target sequence for Mela (NM_008581.1,406-424).
ctcctgggaagtgactaat

SEQ ID NO: 461648 - DNA, 19 bp, Mus musculus
  siRNA target sequence for Mela (NM_008581.1,528-546).
cctattggggcctagaata

SEQ ID NO: 461649 - DNA, 19 bp, Mus musculus
  siRNA target sequence for Mela (NM_008581.1,529-547).
ctattggggcctagaatat

SEQ ID NO: 461650 - DNA, 19 bp, Mus musculus
  siRNA target sequence for Mela (NM_008581.1,631-649).
ggagcccctgacttcatat

SEQ ID NO: 461651 - DNA, 19 bp, Mus musculus
  siRNA target sequence for Mela (NM_008581.1,632-650).
gagcccctgacttcatata

SEQ ID NO: 461652 - DNA, 19 bp, Mus musculus
  siRNA target sequence for Mela (NM_008581.1,634-652).
gcccctgacttcatatact

SEQ ID NO: 461653 - DNA, 19 bp, Mus musculus
  siRNA target sequence for Mela (NM_008581.1,666-684).
cggcctggaacagacttaa

SEQ ID NO: 461654 - DNA, 19 bp, Mus musculus
  siRNA target sequence for Mela (NM_008581.1,670-688).
ctggaacagacttaagtta

SEQ ID NO: 461655 - DNA, 19 bp, Mus musculus
  siRNA target sequence for Mela (NM_008581.1,673-691).
gaacagacttaagttatct

SEQ ID NO: 461656 - DNA, 19 bp, Mus musculus
  siRNA target sequence for Mela (NM_008581.1,676-694).
cagacttaagttatctaaa

SEQ ID NO: 461657 - DNA, 19 bp, Mus musculus
  siRNA target sequence for Mela (NM_008581.1,680-698).
cttaagttatctaaagtga

SEQ ID NO: 461658 - DNA, 19 bp, Mus musculus
  siRNA target sequence for Mela (NM_008581.1,765-783).
gtggtggtccagaatcctt

SEQ ID NO: 461659 - DNA, 19 bp, Mus musculus
  siRNA target sequence for Mela (NM_008581.1,856-874).
cacagtaagcaacaatcta

SEQ ID NO: 461660 - DNA, 19 bp, Mus musculus
  siRNA target sequence for Mela (NM_008581.1,886-904).
ggcaaccccagtatgcaaa

SEQ ID NO: 461661 - DNA, 19 bp, Mus musculus
  siRNA target sequence for Mela (NM_008581.1,935-953).
cggttcacgagctttggaa

SEQ ID NO: 461662 - DNA, 19 bp, Mus musculus
  siRNA target sequence for Mela (NM_008581.1,936-954).
ggttcacgagctttggaaa

SEQ ID NO: 461663 - DNA, 19 bp, Mus musculus
  siRNA target sequence for Mela (NM_008581.1,937-955).
gttcacgagctttggaaaa

SEQ ID NO: 461664 - DNA, 19 bp, Mus musculus
  siRNA target sequence for Mela (NM_008581.1,1034-1052).
gggatccgacttaaaatta

SEQ ID NO: 461665 - DNA, 19 bp, Mus musculus
  siRNA target sequence for Mela (NM_008581.1,1036-1054).
gatccgacttaaaattaca

SEQ ID NO: 461666 - DNA, 19 bp, Mus musculus
  siRNA target sequence for Mela (NM_008581.1,1194-1212).
cgccagcgggagtcgaaaa

SEQ ID NO: 461667 - DNA, 19 bp, Mus musculus
  siRNA target sequence for Mela (NM_008581.1,1203-1221).
gagtcgaaaaccgattgtt

SEQ ID NO: 461668 - DNA, 19 bp, Mus musculus
  siRNA target sequence for Mela (NM_008581.1,1205-1223).
gtcgaaaaccgattgttaa

SEQ ID NO: 461669 - DNA, 19 bp, Mus musculus
  siRNA target sequence for Mela (NM_008581.1,1207-1225).
cgaaaaccgattgttaaat

SEQ ID NO: 461670 - DNA, 19 bp, Mus musculus
  siRNA target sequence for Mela (NM_008581.1,1213-1231).
ccgattgttaaatctagta

SEQ ID NO: 461671 - DNA, 19 bp, Mus musculus
  siRNA target sequence for Mela (NM_008581.1,1214-1232).
cgattgttaaatctagtaa

SEQ ID NO: 461672 - DNA, 19 bp, Mus musculus
  siRNA target sequence for Mela (NM_008581.1,1219-1237).
gttaaatctagtaaaagga

SEQ ID NO: 461673 - DNA, 19 bp, Mus musculus
  siRNA target sequence for Mela (NM_008581.1,1342-1360).
ctactccaaccatacttct

SEQ ID NO: 461674 - DNA, 19 bp, Mus musculus
  siRNA target sequence for Mela (NM_008581.1,1379-1397).
gtggcctctcaacacaaat

SEQ ID NO: 461675 - DNA, 19 bp, Mus musculus
  siRNA target sequence for Mela (NM_008581.1,1382-1400).
gcctctcaacacaaattga

SEQ ID NO: 461676 - DNA, 19 bp, Mus musculus
  siRNA target sequence for Mela (NM_008581.1,1453-1471).
ccatcaagtcttgtgtaat

SEQ ID NO: 461677 - DNA, 19 bp, Mus musculus
  siRNA target sequence for Mela (NM_008581.1,1454-1472).
catcaagtcttgtgtaata

SEQ ID NO: 461678 - DNA, 19 bp, Mus musculus
  siRNA target sequence for Mela (NM_008581.1,1457-1475).
caagtcttgtgtaatacca

SEQ ID NO: 461679 - DNA, 19 bp, Mus musculus
  siRNA target sequence for Mela (NM_008581.1,1544-1562).
ggactcactccctgtatct

SEQ ID NO: 461680 - DNA, 19 bp, Mus musculus
  siRNA target sequence for Mela (NM_008581.1,1635-1653).
cccctagttatgtttacca

SEQ ID NO: 461681 - DNA, 19 bp, Mus musculus
  siRNA target sequence for Mela (NM_008581.1,1641-1659).
gttatgtttaccaccaatt

SEQ ID NO: 461682 - DNA, 19 bp, Mus musculus
  siRNA target sequence for Mela (NM_008581.1,1646-1664).
gtttaccaccaatttgaaa

SEQ ID NO: 461683 - DNA, 19 bp, Mus musculus
  siRNA target sequence for Mela (NM_008581.1,1661-1679).
gaaagacgagccaaatata

SEQ ID NO: 461684 - DNA, 19 bp, Mus musculus
  siRNA target sequence for Mela (NM_008581.1,1697-1715).
ctaactctggccctactat

SEQ ID NO: 461685 - DNA, 19 bp, Mus musculus
  siRNA target sequence for Mela (NM_008581.1,1809-1827).
ccatgcacgatgaccttaa

SEQ ID NO: 461686 - DNA, 19 bp, Mus musculus
  siRNA target sequence for Mela (NM_008581.1,1810-1828).
catgcacgatgaccttaaa

SEQ ID NO: 461687 - DNA, 19 bp, Mus musculus
  siRNA target sequence for Mela (NM_008581.1,1813-1831).
gcacgatgaccttaaagaa

SEQ ID NO: 461688 - DNA, 19 bp, Mus musculus
  siRNA target sequence for Mela (NM_008581.1,1816-1834).
cgatgaccttaaagaagtt

SEQ ID NO: 461689 - DNA, 19 bp, Mus musculus
  siRNA target sequence for Mela (NM_008581.1,1832-1850).
gttgaaaagtccatcacta

SEQ ID NO: 461690 - DNA, 19 bp, Mus musculus
  siRNA target sequence for Mela (NM_008581.1,1872-1890).
ccttgtccgaagtagtgtt

SEQ ID NO: 461691 - DNA, 19 bp, Mus musculus
  siRNA target sequence for Mela (NM_008581.1,1873-1891).
cttgtccgaagtagtgtta

SEQ ID NO: 461692 - DNA, 19 bp, Mus musculus
  siRNA target sequence for Mela (NM_008581.1,1883-1901).
gtagtgttacagaatcgta

SEQ ID NO: 461693 - DNA, 19 bp, Mus musculus
  siRNA target sequence for Mela (NM_008581.1,1975-1993).
cgaccacacaggattggta

SEQ ID NO: 461694 - DNA, 19 bp, Mus musculus
  siRNA target sequence for Mela (NM_008581.1,1986-2004).
gattggtacgggatagcat

SEQ ID NO: 461695 - DNA, 19 bp, Mus musculus
  siRNA target sequence for Mela (NM_008581.1,1996-2014).
ggatagcatggccaaactt

SEQ ID NO: 461696 - DNA, 19 bp, Mus musculus
  siRNA target sequence for Mela (NM_008581.1,1997-2015).
gatagcatggccaaactta

SEQ ID NO: 461697 - DNA, 19 bp, Mus musculus
  siRNA target sequence for Mela (NM_008581.1,2005-2023).
ggccaaacttagagaaaga

SEQ ID NO: 461698 - DNA, 19 bp, Mus musculus
  siRNA target sequence for Mela (NM_008581.1,2129-2147).
ctgataatcctcttgttaa

SEQ ID NO: 461699 - DNA, 19 bp, Mus musculus
  siRNA target sequence for Mela (NM_008581.1,2221-2239).
cctggttctgactcaacaa

SEQ ID NO: 461700 - DNA, 19 bp, Mus musculus
  siRNA target sequence for Mela (NM_008581.1,2224-2242).
ggttctgactcaacaatat

SEQ ID NO: 461701 - DNA, 19 bp, Mus musculus
  siRNA target sequence for Mela (NM_008581.1,2230-2248).
gactcaacaatatcatcaa

SEQ ID NO: 461702 - DNA, 19 bp, Mus musculus
  siRNA target sequence for Mela (NM_008581.1,2234-2252).
caacaatatcatcaactta

SEQ ID NO: 461703 - DNA, 19 bp, Mus musculus
  siRNA target sequence for Mitf (NM_008601.1,220-238).
caggtaaagcagtaccttt

SEQ ID NO: 461704 - DNA, 19 bp, Mus musculus
  siRNA target sequence for Mitf (NM_008601.1,231-249).
gtacctttctaccacttta

SEQ ID NO: 461705 - DNA, 19 bp, Mus musculus
  siRNA target sequence for Mitf (NM_008601.1,239-257).
ctaccactttagcaaataa

SEQ ID NO: 461706 - DNA, 19 bp, Mus musculus
  siRNA target sequence for Mitf (NM_008601.1,243-261).
cactttagcaaataaacat

SEQ ID NO: 461707 - DNA, 19 bp, Mus musculus
  siRNA target sequence for Mitf (NM_008601.1,428-446).
gtgagtgcccaggtatgaa

SEQ ID NO: 461708 - DNA, 19 bp, Mus musculus
  siRNA target sequence for Mitf (NM_008601.1,430-448).
gagtgcccaggtatgaaca

SEQ ID NO: 461709 - DNA, 19 bp, Mus musculus
  siRNA target sequence for Mitf (NM_008601.1,468-486).
catgcagatggatgatgta

SEQ ID NO: 461710 - DNA, 19 bp, Mus musculus
  siRNA target sequence for Mitf (NM_008601.1,484-502).
gtaattgatgacatcatca

SEQ ID NO: 461711 - DNA, 19 bp, Mus musculus
  siRNA target sequence for Mitf (NM_008601.1,507-525).
ggaatcaagttataatgaa

SEQ ID NO: 461712 - DNA, 19 bp, Mus musculus
  siRNA target sequence for Mitf (NM_008601.1,575-593).
ccgtctctggaaacttgat

SEQ ID NO: 461713 - DNA, 19 bp, Mus musculus
  siRNA target sequence for Mitf (NM_008601.1,678-696).
ggagctcacagcgtgtatt

SEQ ID NO: 461714 - DNA, 19 bp, Mus musculus
  siRNA target sequence for Mitf (NM_008601.1,679-697).
gagctcacagcgtgtattt

SEQ ID NO: 461715 - DNA, 19 bp, Mus musculus
  siRNA target sequence for Mitf (NM_008601.1,747-765).
ggacaatcacaacttgatt

SEQ ID NO: 461716 - DNA, 19 bp, Mus musculus
  siRNA target sequence for Mitf (NM_008601.1,759-777).
cttgattgaacgaagaaga

SEQ ID NO: 461717 - DNA, 19 bp, Mus musculus
  siRNA target sequence for Mitf (NM_008601.1,769-787).
cgaagaagaagatttaaca

SEQ ID NO: 461718 - DNA, 19 bp, Mus musculus
  siRNA target sequence for Mitf (NM_008601.1,770-788).
gaagaagaagatttaacat

SEQ ID NO: 461719 - DNA, 19 bp, Mus musculus
  siRNA target sequence for Mitf (NM_008601.1,1057-1075).
ctggtgaatcggatcatca

SEQ ID NO: 461720 - DNA, 19 bp, Mus musculus
  siRNA target sequence for Mitf (NM_008601.1,1162-1180).
gacggtaccatcaccttta

SEQ ID NO: 461721 - DNA, 19 bp, Mus musculus
  siRNA target sequence for Mitf (NM_008601.1,1241-1259).
gctccaacttggaagacat

SEQ ID NO: 461722 - DNA, 19 bp, Mus musculus
  siRNA target sequence for Mitf (NM_008601.1,1353-1371).
cagtatgagcgcagaagaa

SEQ ID NO: 461723 - DNA, 19 bp, Mus musculus
  siRNA target sequence for Miz1 (NM_008602.2,204-222).
ggagttgaggaatatggtt

SEQ ID NO: 461724 - DNA, 19 bp, Mus musculus
  siRNA target sequence for Miz1 (NM_008602.2,210-228).
gaggaatatggtttctagt

SEQ ID NO: 461725 - DNA, 19 bp, Mus musculus
  siRNA target sequence for Miz1 (NM_008602.2,239-257).
ctgagttacaagtgttact

SEQ ID NO: 461726 - DNA, 19 bp, Mus musculus
  siRNA target sequence for Miz1 (NM_008602.2,260-278).
gctttgctggacggaataa

SEQ ID NO: 461727 - DNA, 19 bp, Mus musculus
  siRNA target sequence for Miz1 (NM_008602.2,261-279).
ctttgctggacggaataaa

SEQ ID NO: 461728 - DNA, 19 bp, Mus musculus
  siRNA target sequence for Miz1 (NM_008602.2,301-319).
ctgatgagggcgttgcatt

SEQ ID NO: 461729 - DNA, 19 bp, Mus musculus
  siRNA target sequence for Miz1 (NM_008602.2,303-321).
gatgagggcgttgcattta

SEQ ID NO: 461730 - DNA, 19 bp, Mus musculus
  siRNA target sequence for Miz1 (NM_008602.2,310-328).
gcgttgcatttattgaaga

SEQ ID NO: 461731 - DNA, 19 bp, Mus musculus
  siRNA target sequence for Miz1 (NM_008602.2,335-353).
gcagccctgcggttcagat

SEQ ID NO: 461732 - DNA, 19 bp, Mus musculus
  siRNA target sequence for Miz1 (NM_008602.2,339-357).
ccctgcggttcagattaaa

SEQ ID NO: 461733 - DNA, 19 bp, Mus musculus
  siRNA target sequence for Miz1 (NM_008602.2,340-358).
cctgcggttcagattaaaa

SEQ ID NO: 461734 - DNA, 19 bp, Mus musculus
  siRNA target sequence for Miz1 (NM_008602.2,341-359).
ctgcggttcagattaaaat

SEQ ID NO: 461735 - DNA, 19 bp, Mus musculus
  siRNA target sequence for Miz1 (NM_008602.2,351-369).
gattaaaattcgagaatta

SEQ ID NO: 461736 - DNA, 19 bp, Mus musculus
  siRNA target sequence for Miz1 (NM_008602.2,412-430).
ctttccacaatcaaatcat

SEQ ID NO: 461737 - DNA, 19 bp, Mus musculus
  siRNA target sequence for Miz1 (NM_008602.2,497-515).
cgttgccttcgacttcaat

SEQ ID NO: 461738 - DNA, 19 bp, Mus musculus
  siRNA target sequence for Miz1 (NM_008602.2,501-519).
gccttcgacttcaattaca

SEQ ID NO: 461739 - DNA, 19 bp, Mus musculus
  siRNA target sequence for Miz1 (NM_008602.2,566-584).
ctaagcccacctttgagat

SEQ ID NO: 461740 - DNA, 19 bp, Mus musculus
  siRNA target sequence for Miz1 (NM_008602.2,616-634).
catcctgatgtgcagttaa

SEQ ID NO: 461741 - DNA, 19 bp, Mus musculus
  siRNA target sequence for Miz1 (NM_008602.2,619-637).
cctgatgtgcagttaaaaa

SEQ ID NO: 461742 - DNA, 19 bp, Mus musculus
  siRNA target sequence for Miz1 (NM_008602.2,669-687).
catcaagcccacgagttta

SEQ ID NO: 461743 - DNA, 19 bp, Mus musculus
  siRNA target sequence for Miz1 (NM_008602.2,672-690).
caagcccacgagtttagtt

SEQ ID NO: 461744 - DNA, 19 bp, Mus musculus
  siRNA target sequence for Miz1 (NM_008602.2,675-693).
gcccacgagtttagttcaa

SEQ ID NO: 461745 - DNA, 19 bp, Mus musculus
  siRNA target sequence for Miz1 (NM_008602.2,676-694).
cccacgagtttagttcaaa

SEQ ID NO: 461746 - DNA, 19 bp, Mus musculus
  siRNA target sequence for Miz1 (NM_008602.2,764-782).
gtatttcaagggacttttt

SEQ ID NO: 461747 - DNA, 19 bp, Mus musculus
  siRNA target sequence for Miz1 (NM_008602.2,849-867).
ccctcaagaagataactat

SEQ ID NO: 461748 - DNA, 19 bp, Mus musculus
  siRNA target sequence for Miz1 (NM_008602.2,859-877).
gataactatcccaatagtt

SEQ ID NO: 461749 - DNA, 19 bp, Mus musculus
  siRNA target sequence for Miz1 (NM_008602.2,864-882).
ctatcccaatagtttgtgt

SEQ ID NO: 461750 - DNA, 19 bp, Mus musculus
  siRNA target sequence for Miz1 (NM_008602.2,868-886).
cccaatagtttgtgtataa

SEQ ID NO: 461751 - DNA, 19 bp, Mus musculus
  siRNA target sequence for Miz1 (NM_008602.2,870-888).
caatagtttgtgtataaaa

SEQ ID NO: 461752 - DNA, 19 bp, Mus musculus
  siRNA target sequence for Miz1 (NM_008602.2,918-936).
ctatgcgccaccacctaaa

SEQ ID NO: 461753 - DNA, 19 bp, Mus musculus
  siRNA target sequence for Miz1 (NM_008602.2,969-987).
cctgaacattacgtcttta

SEQ ID NO: 461754 - DNA, 19 bp, Mus musculus
  siRNA target sequence for Miz1 (NM_008602.2,972-990).
gaacattacgtctttagtt

SEQ ID NO: 461755 - DNA, 19 bp, Mus musculus
  siRNA target sequence for Miz1 (NM_008602.2,1001-1019).
cagctgtgccaaatcagat

SEQ ID NO: 461756 - DNA, 19 bp, Mus musculus
  siRNA target sequence for Miz1 (NM_008602.2,1003-1021).
gctgtgccaaatcagattt

SEQ ID NO: 461757 - DNA, 19 bp, Mus musculus
  siRNA target sequence for Miz1 (NM_008602.2,1006-1024).
gtgccaaatcagatttcta

SEQ ID NO: 461758 - DNA, 19 bp, Mus musculus
  siRNA target sequence for Miz1 (NM_008602.2,1083-1101).
gcttacatcagccatgtta

SEQ ID NO: 461759 - DNA, 19 bp, Mus musculus
  siRNA target sequence for Miz1 (NM_008602.2,1095-1113).
catgttattacagagatta

SEQ ID NO: 461760 - DNA, 19 bp, Mus musculus
  siRNA target sequence for Miz1 (NM_008602.2,1119-1137).
gaaaggtattagaaatcct

SEQ ID NO: 461761 - DNA, 19 bp, Mus musculus
  siRNA target sequence for Miz1 (NM_008602.2,1141-1159).
cattccagagcactaatta

SEQ ID NO: 461762 - DNA, 19 bp, Mus musculus
  siRNA target sequence for Miz1 (NM_008602.2,1174-1192).
gcagaccctgatagtgaaa

SEQ ID NO: 461763 - DNA, 19 bp, Mus musculus
  siRNA target sequence for Miz1 (NM_008602.2,1207-1225).
cttcgagtgtccttgatgt

SEQ ID NO: 461764 - DNA, 19 bp, Mus musculus
  siRNA target sequence for Miz1 (NM_008602.2,1218-1236).
cttgatgtgccctttagga

SEQ ID NO: 461765 - DNA, 19 bp, Mus musculus
  siRNA target sequence for Miz1 (NM_008602.2,1221-1239).
gatgtgccctttaggaaaa

SEQ ID NO: 461766 - DNA, 19 bp, Mus musculus
  siRNA target sequence for Miz1 (NM_008602.2,1367-1385).
cctatgagagtctgatact

SEQ ID NO: 461767 - DNA, 19 bp, Mus musculus
  siRNA target sequence for Miz1 (NM_008602.2,1368-1386).
ctatgagagtctgatacta

SEQ ID NO: 461768 - DNA, 19 bp, Mus musculus
  siRNA target sequence for Miz1 (NM_008602.2,1461-1479).
gtgtcccatgagacctaaa

SEQ ID NO: 461769 - DNA, 19 bp, Mus musculus
  siRNA target sequence for Miz1 (NM_008602.2,1466-1484).
ccatgagacctaaaaaaga

SEQ ID NO: 461770 - DNA, 19 bp, Mus musculus
  siRNA target sequence for Miz1 (NM_008602.2,1507-1525).
ccctgtacaaaagtagaaa

SEQ ID NO: 461771 - DNA, 19 bp, Mus musculus
  siRNA target sequence for Miz1 (NM_008602.2,1536-1554).
ctttagtaaaccttgttca

SEQ ID NO: 461772 - DNA, 19 bp, Mus musculus
  siRNA target sequence for Miz1 (NM_008602.2,1584-1602).
gaagatagatgttattgat

SEQ ID NO: 461773 - DNA, 19 bp, Mus musculus
  siRNA target sequence for Miz1 (NM_008602.2,1636-1654).
gaccctcccgccaaaagga

SEQ ID NO: 461774 - DNA, 19 bp, Mus musculus
  siRNA target sequence for Miz1 (NM_008602.2,1688-1706).
caaccaaaggggttctcat

SEQ ID NO: 461775 - DNA, 19 bp, Mus musculus
  siRNA target sequence for Miz1 (NM_008602.2,1731-1749).
gcccagtgtgacttcagtt

SEQ ID NO: 461776 - DNA, 19 bp, Mus musculus
  siRNA target sequence for Miz1 (NM_008602.2,1759-1777).
gctattccaccttcattaa

SEQ ID NO: 461777 - DNA, 19 bp, Mus musculus
  siRNA target sequence for Miz1 (NM_008602.2,1778-1796).
cagactactcagtaccatt

SEQ ID NO: 461778 - DNA, 19 bp, Mus musculus
  siRNA target sequence for Miz1 (NM_008602.2,1880-1898).
gtcctcctatgtttttgga

SEQ ID NO: 461779 - DNA, 19 bp, Mus musculus
  siRNA target sequence for Miz1 (NM_008602.2,1962-1980).
cagtactcacgttagttca

SEQ ID NO: 461780 - DNA, 19 bp, Mus musculus
  siRNA target sequence for Miz1 (NM_008602.2,1996-2014).
gagacaggggtcataacca

SEQ ID NO: 461781 - DNA, 19 bp, Mus musculus
  siRNA target sequence for Mkl1 (NM_153049.1,102-120).
gatcatgccgcctttgaaa

SEQ ID NO: 461782 - DNA, 19 bp, Mus musculus
  siRNA target sequence for Mkl1 (NM_153049.1,163-181).
gccaggaccgaggactatt

SEQ ID NO: 461783 - DNA, 19 bp, Mus musculus
  siRNA target sequence for Mkl1 (NM_153049.1,414-432).
ggtaaattacccaaaggta

SEQ ID NO: 461784 - DNA, 19 bp, Mus musculus
  siRNA target sequence for Mkl1 (NM_153049.1,555-573).
cagtgccacctccatatca

SEQ ID NO: 461785 - DNA, 19 bp, Mus musculus
  siRNA target sequence for Mkl1 (NM_153049.1,673-691).
ccaagcctagccaatggaa

SEQ ID NO: 461786 - DNA, 19 bp, Mus musculus
  siRNA target sequence for Mkl1 (NM_153049.1,747-765).
gtctgccagcgagaaatca

SEQ ID NO: 461787 - DNA, 19 bp, Mus musculus
  siRNA target sequence for Mkl1 (NM_153049.1,1221-1239).
caagacagagctgatagaa

SEQ ID NO: 461788 - DNA, 19 bp, Mus musculus
  siRNA target sequence for Mkl1 (NM_153049.1,1362-1380).
cacagggtcagctcttgta

SEQ ID NO: 461789 - DNA, 19 bp, Mus musculus
  siRNA target sequence for Mkl1 (NM_153049.1,1428-1446).
caatggcatggtgaagttt

SEQ ID NO: 461790 - DNA, 19 bp, Mus musculus
  siRNA target sequence for Mkl1 (NM_153049.1,1503-1521).
cagcacgggtgatgagaat

SEQ ID NO: 461791 - DNA, 19 bp, Mus musculus
  siRNA target sequence for Mkl1 (NM_153049.1,1624-1642).
gctgcgtcctgctgtctaa

SEQ ID NO: 461792 - DNA, 19 bp, Mus musculus
  siRNA target sequence for Mkl1 (NM_153049.1,2104-2122).
ctcactgtgaccaataaga

SEQ ID NO: 461793 - DNA, 19 bp, Mus musculus
  siRNA target sequence for Mkl1 (NM_153049.1,2337-2355).
gcacatggatgatctgttt

SEQ ID NO: 461794 - DNA, 19 bp, Mus musculus
  siRNA target sequence for Mkl1 (NM_153049.1,2410-2428).
ctaccaggcaaggaaaagt

SEQ ID NO: 461795 - DNA, 19 bp, Mus musculus
  siRNA target sequence for Mkl1 (NM_153049.1,2677-2695).
cccatggacacctctgaat

SEQ ID NO: 461796 - DNA, 19 bp, Mus musculus
  siRNA target sequence for Mkl1 (NM_153049.1,2678-2696).
ccatggacacctctgaatt

SEQ ID NO: 461797 - DNA, 19 bp, Mus musculus
  siRNA target sequence for Mllt10 (NM_010804.1,212-230).
gacgaggtctcccatagta

SEQ ID NO: 461798 - DNA, 19 bp, Mus musculus
  siRNA target sequence for Mllt10 (NM_010804.1,215-233).
gaggtctcccatagtatga

SEQ ID NO: 461799 - DNA, 19 bp, Mus musculus
  siRNA target sequence for Mllt10 (NM_010804.1,343-361).
ctatggcattgttcaagta

SEQ ID NO: 461800 - DNA, 19 bp, Mus musculus
  siRNA target sequence for Mllt10 (NM_010804.1,362-380).
cctactggaccgtggtttt

SEQ ID NO: 461801 - DNA, 19 bp, Mus musculus
  siRNA target sequence for Mllt10 (NM_010804.1,371-389).
ccgtggttttgtaggaaat

SEQ ID NO: 461802 - DNA, 19 bp, Mus musculus
  siRNA target sequence for Mllt10 (NM_010804.1,436-454).
ccataaagatggagcttta

SEQ ID NO: 461803 - DNA, 19 bp, Mus musculus
  siRNA target sequence for Mllt10 (NM_010804.1,487-505).
ggtttgtgccctctatatt

SEQ ID NO: 461804 - DNA, 19 bp, Mus musculus
  siRNA target sequence for Mllt10 (NM_010804.1,511-529).
ggtacaatttgccaatgtt

SEQ ID NO: 461805 - DNA, 19 bp, Mus musculus
  siRNA target sequence for Mllt10 (NM_010804.1,515-533).
caatttgccaatgtttcta

SEQ ID NO: 461806 - DNA, 19 bp, Mus musculus
  siRNA target sequence for Mllt10 (NM_010804.1,539-557).
gagccaatcgttttacagt

SEQ ID NO: 461807 - DNA, 19 bp, Mus musculus
  siRNA target sequence for Mllt10 (NM_010804.1,560-578).
gtcccacatgatcgttata

SEQ ID NO: 461808 - DNA, 19 bp, Mus musculus
  siRNA target sequence for Mllt10 (NM_010804.1,562-580).
cccacatgatcgttataat

SEQ ID NO: 461809 - DNA, 19 bp, Mus musculus
  siRNA target sequence for Mllt10 (NM_010804.1,563-581).
ccacatgatcgttataata

SEQ ID NO: 461810 - DNA, 19 bp, Mus musculus
  siRNA target sequence for Mllt10 (NM_010804.1,564-582).
cacatgatcgttataataa

SEQ ID NO: 461811 - DNA, 19 bp, Mus musculus
  siRNA target sequence for Mllt10 (NM_010804.1,569-587).
gatcgttataataagactt

SEQ ID NO: 461812 - DNA, 19 bp, Mus musculus
  siRNA target sequence for Mllt10 (NM_010804.1,633-651).
gtgcttgcatgacatgtaa

SEQ ID NO: 461813 - DNA, 19 bp, Mus musculus
  siRNA target sequence for Mllt10 (NM_010804.1,635-653).
gcttgcatgacatgtaata

SEQ ID NO: 461814 - DNA, 19 bp, Mus musculus
  siRNA target sequence for Mllt10 (NM_010804.1,636-654).
cttgcatgacatgtaataa

SEQ ID NO: 461815 - DNA, 19 bp, Mus musculus
  siRNA target sequence for Mllt10 (NM_010804.1,639-657).
gcatgacatgtaataaaca

SEQ ID NO: 461816 - DNA, 19 bp, Mus musculus
  siRNA target sequence for Mllt10 (NM_010804.1,723-741).
ggaatggcgcagacaatgt

SEQ ID NO: 461817 - DNA, 19 bp, Mus musculus
  siRNA target sequence for Mllt10 (NM_010804.1,724-742).
gaatggcgcagacaatgtt

SEQ ID NO: 461818 - DNA, 19 bp, Mus musculus
  siRNA target sequence for Mllt10 (NM_010804.1,728-746).
ggcgcagacaatgttcaat

SEQ ID NO: 461819 - DNA, 19 bp, Mus musculus
  siRNA target sequence for Mllt10 (NM_010804.1,729-747).
gcgcagacaatgttcaata

SEQ ID NO: 461820 - DNA, 19 bp, Mus musculus
  siRNA target sequence for Mllt10 (NM_010804.1,731-749).
gcagacaatgttcaatact

SEQ ID NO: 461821 - DNA, 19 bp, Mus musculus
  siRNA target sequence for Mllt10 (NM_010804.1,743-761).
caatactgtggctactgta

SEQ ID NO: 461822 - DNA, 19 bp, Mus musculus
  siRNA target sequence for Mllt10 (NM_010804.1,807-825).
ggtcatatgagcaaagttt

SEQ ID NO: 461823 - DNA, 19 bp, Mus musculus
  siRNA target sequence for Mllt10 (NM_010804.1,808-826).
gtcatatgagcaaagttta

SEQ ID NO: 461824 - DNA, 19 bp, Mus musculus
  siRNA target sequence for Mllt10 (NM_010804.1,959-977).
gttactacagaaaaaactt

SEQ ID NO: 461825 - DNA, 19 bp, Mus musculus
  siRNA target sequence for Mllt10 (NM_010804.1,999-1017).
ccatatctggatcattgaa

SEQ ID NO: 461826 - DNA, 19 bp, Mus musculus
  siRNA target sequence for Mllt10 (NM_010804.1,1028-1046).
gatactgcagcaagattta

SEQ ID NO: 461827 - DNA, 19 bp, Mus musculus
  siRNA target sequence for Mllt10 (NM_010804.1,1080-1098).
cctctagtggaaaagatgt

SEQ ID NO: 461828 - DNA, 19 bp, Mus musculus
  siRNA target sequence for Mllt10 (NM_010804.1,1242-1260).
gaactccaggcagtgtaaa

SEQ ID NO: 461829 - DNA, 19 bp, Mus musculus
  siRNA target sequence for Mllt10 (NM_010804.1,1324-1342).
gcgaagtgacagttacact

SEQ ID NO: 461830 - DNA, 19 bp, Mus musculus
  siRNA target sequence for Mllt10 (NM_010804.1,1359-1377).
catcaaccaaagatgtaca

SEQ ID NO: 461831 - DNA, 19 bp, Mus musculus
  siRNA target sequence for Mllt10 (NM_010804.1,1397-1415).
caggaagcggcagtaaaca

SEQ ID NO: 461832 - DNA, 19 bp, Mus musculus
  siRNA target sequence for Mllt10 (NM_010804.1,1406-1424).
gcagtaaacagttttagct

SEQ ID NO: 461833 - DNA, 19 bp, Mus musculus
  siRNA target sequence for Mllt10 (NM_010804.1,1414-1432).
cagttttagctctttagtt

SEQ ID NO: 461834 - DNA, 19 bp, Mus musculus
  siRNA target sequence for Mllt10 (NM_010804.1,1440-1458).
ctgtgacctcgactgttat

SEQ ID NO: 461835 - DNA, 19 bp, Mus musculus
  siRNA target sequence for Mllt10 (NM_010804.1,1444-1462).
gacctcgactgttatttca

SEQ ID NO: 461836 - DNA, 19 bp, Mus musculus
  siRNA target sequence for Mllt10 (NM_010804.1,1446-1464).
cctcgactgttatttcaca

SEQ ID NO: 461837 - DNA, 19 bp, Mus musculus
  siRNA target sequence for Mllt10 (NM_010804.1,1465-1483).
gcctaaaagctttgacaat

SEQ ID NO: 461838 - DNA, 19 bp, Mus musculus
  siRNA target sequence for Mllt10 (NM_010804.1,1536-1554).
ctcagacttctggtataga

SEQ ID NO: 461839 - DNA, 19 bp, Mus musculus
  siRNA target sequence for Mllt10 (NM_010804.1,1542-1560).
cttctggtatagaagaaga

SEQ ID NO: 461840 - DNA, 19 bp, Mus musculus
  siRNA target sequence for Mllt10 (NM_010804.1,1697-1715).
gctgcaggaagtgtaacaa

SEQ ID NO: 461841 - DNA, 19 bp, Mus musculus
  siRNA target sequence for Mllt10 (NM_010804.1,1713-1731).
caagctctagtcttcagaa

SEQ ID NO: 461842 - DNA, 19 bp, Mus musculus
  siRNA target sequence for Mllt10 (NM_010804.1,1790-1808).
gttggctcagaaatttcca

SEQ ID NO: 461843 - DNA, 19 bp, Mus musculus
  siRNA target sequence for Mllt10 (NM_010804.1,1807-1825).
catgcagtatcgacatgat

SEQ ID NO: 461844 - DNA, 19 bp, Mus musculus
  siRNA target sequence for Mllt10 (NM_010804.1,1851-1869).
cagagttgctgaatgcaat

SEQ ID NO: 461845 - DNA, 19 bp, Mus musculus
  siRNA target sequence for Mllt10 (NM_010804.1,1866-1884).
caatacacaatggtattta

SEQ ID NO: 461846 - DNA, 19 bp, Mus musculus
  siRNA target sequence for Mllt10 (NM_010804.1,1871-1889).
cacaatggtatttataaca

SEQ ID NO: 461847 - DNA, 19 bp, Mus musculus
  siRNA target sequence for Mllt10 (NM_010804.1,1898-1916).
gtagccgtatcctttccaa

SEQ ID NO: 461848 - DNA, 19 bp, Mus musculus
  siRNA target sequence for Mllt10 (NM_010804.1,2099-2117).
catatgtatggcagtagat

SEQ ID NO: 461849 - DNA, 19 bp, Mus musculus
  siRNA target sequence for Mllt10 (NM_010804.1,2104-2122).
gtatggcagtagattaaat

SEQ ID NO: 461850 - DNA, 19 bp, Mus musculus
  siRNA target sequence for Mllt10 (NM_010804.1,2144-2162).
ctcatagctcagtctgaaa

SEQ ID NO: 461851 - DNA, 19 bp, Mus musculus
  siRNA target sequence for Mllt10 (NM_010804.1,2164-2182).
cagccaaacagatcaagat

SEQ ID NO: 461852 - DNA, 19 bp, Mus musculus
  siRNA target sequence for Mllt10 (NM_010804.1,2250-2268).
cccctgtgagcaacttaca

SEQ ID NO: 461853 - DNA, 19 bp, Mus musculus
  siRNA target sequence for Mllt10 (NM_010804.1,2364-2382).
gacagcagtttttactaga

SEQ ID NO: 461854 - DNA, 19 bp, Mus musculus
  siRNA target sequence for Mllt10 (NM_010804.1,2394-2412).
ctggtgacattctaggaat

SEQ ID NO: 461855 - DNA, 19 bp, Mus musculus
  siRNA target sequence for Mllt10 (NM_010804.1,2405-2423).
ctaggaatgttaaagtcat

SEQ ID NO: 461856 - DNA, 19 bp, Mus musculus
  siRNA target sequence for Mllt10 (NM_010804.1,2489-2507).
gaacgtcttcagttgttga

SEQ ID NO: 461857 - DNA, 19 bp, Mus musculus
  siRNA target sequence for Mllt10 (NM_010804.1,2616-2634).
gcagtaagagcccacatat

SEQ ID NO: 461858 - DNA, 19 bp, Mus musculus
  siRNA target sequence for Mllt10 (NM_010804.1,2641-2659).
cagctttttacctgacaat

SEQ ID NO: 461859 - DNA, 19 bp, Mus musculus
  siRNA target sequence for Mllt10 (NM_010804.1,2644-2662).
ctttttacctgacaattct

SEQ ID NO: 461860 - DNA, 19 bp, Mus musculus
  siRNA target sequence for Mllt10 (NM_010804.1,2862-2880).
ccgcagtgggtggaataat

SEQ ID NO: 461861 - DNA, 19 bp, Mus musculus
  siRNA target sequence for Mllt10 (NM_010804.1,2863-2881).
cgcagtgggtggaataatt

SEQ ID NO: 461862 - DNA, 19 bp, Mus musculus
  siRNA target sequence for Mllt10 (NM_010804.1,3003-3021).
ctaatgcagcgcatccaat

SEQ ID NO: 461863 - DNA, 19 bp, Mus musculus
  siRNA target sequence for Mllt10 (NM_010804.1,3329-3347).
cagaaggtcacaagactta

SEQ ID NO: 461864 - DNA, 19 bp, Mus musculus
  siRNA target sequence for Mllt10 (NM_010804.1,3331-3349).
gaaggtcacaagacttagt

SEQ ID NO: 461865 - DNA, 19 bp, Mus musculus
  siRNA target sequence for Mllt10 (NM_010804.1,3334-3352).
ggtcacaagacttagtgat

SEQ ID NO: 461866 - DNA, 19 bp, Mus musculus
  siRNA target sequence for Mllt6 (NM_139311.1,323-341).
ggaggctgctgcgtatgtt

SEQ ID NO: 461867 - DNA, 19 bp, Mus musculus
  siRNA target sequence for Mllt6 (NM_139311.1,406-424).
cgtccaccaagcttgctat

SEQ ID NO: 461868 - DNA, 19 bp, Mus musculus
  siRNA target sequence for Mllt6 (NM_139311.1,631-649).
gcagtacgtgcctcatgat

SEQ ID NO: 461869 - DNA, 19 bp, Mus musculus
  siRNA target sequence for Mllt6 (NM_139311.1,642-660).
ctcatgatcgcttcaacaa

SEQ ID NO: 461870 - DNA, 19 bp, Mus musculus
  siRNA target sequence for Mllt6 (NM_139311.1,644-662).
catgatcgcttcaacaaga

SEQ ID NO: 461871 - DNA, 19 bp, Mus musculus
  siRNA target sequence for Mllt6 (NM_139311.1,1081-1099).
ggacaaagaacgccttaaa

SEQ ID NO: 461872 - DNA, 19 bp, Mus musculus
  siRNA target sequence for Mllt6 (NM_139311.1,1238-1256).
gactcaaaggggagaaagt

SEQ ID NO: 461873 - DNA, 19 bp, Mus musculus
  siRNA target sequence for Mllt6 (NM_139311.1,1263-1281).
gccatagcctgagtcataa

SEQ ID NO: 461874 - DNA, 19 bp, Mus musculus
  siRNA target sequence for Mllt6 (NM_139311.1,1273-1291).
gagtcataaggacaagaaa

SEQ ID NO: 461875 - DNA, 19 bp, Mus musculus
  siRNA target sequence for Mllt6 (NM_139311.1,1447-1465).
cctctttgaacagaaagtt

SEQ ID NO: 461876 - DNA, 19 bp, Mus musculus
  siRNA target sequence for Mllt6 (NM_139311.1,1534-1552).
cccttcacctggagactat

SEQ ID NO: 461877 - DNA, 19 bp, Mus musculus
  siRNA target sequence for Mllt6 (NM_139311.1,1549-1567).
ctataagtctccccatatt

SEQ ID NO: 461878 - DNA, 19 bp, Mus musculus
  siRNA target sequence for Mllt6 (NM_139311.1,1910-1928).
ctgggggcaggcatctata

SEQ ID NO: 461879 - DNA, 19 bp, Mus musculus
  siRNA target sequence for Mllt6 (NM_139311.1,1919-1937).
ggcatctataccagtaata

SEQ ID NO: 461880 - DNA, 19 bp, Mus musculus
  siRNA target sequence for Mllt6 (NM_139311.1,1920-1938).
gcatctataccagtaataa

SEQ ID NO: 461881 - DNA, 19 bp, Mus musculus
  siRNA target sequence for Mllt6 (NM_139311.1,1924-1942).
ctataccagtaataaggat

SEQ ID NO: 461882 - DNA, 19 bp, Mus musculus
  siRNA target sequence for Mllt6 (NM_139311.1,2134-2152).
cccttcatcccacatcttt

SEQ ID NO: 461883 - DNA, 19 bp, Mus musculus
  siRNA target sequence for Mllt6 (NM_139311.1,2157-2175).
cccccatgggcactgttaa

SEQ ID NO: 461884 - DNA, 19 bp, Mus musculus
  siRNA target sequence for Mllt6 (NM_139311.1,2328-2346).
gtgcgggtggccagttaga

SEQ ID NO: 461885 - DNA, 19 bp, Mus musculus
  siRNA target sequence for Mllt6 (NM_139311.1,2330-2348).
gcgggtggccagttagact

SEQ ID NO: 461886 - DNA, 19 bp, Mus musculus
  siRNA target sequence for Mllt6 (NM_139311.1,2403-2421).
gagaggctggtgtcaacat

SEQ ID NO: 461887 - DNA, 19 bp, Mus musculus
  siRNA target sequence for Mllt6 (NM_139311.1,2959-2977).
gcttctgggagggttgaat

SEQ ID NO: 461888 - DNA, 19 bp, Mus musculus
  siRNA target sequence for Mllt6 (NM_139311.1,3159-3177).
ctgtggtctaccagatgat

SEQ ID NO: 461889 - DNA, 19 bp, Mus musculus
  siRNA target sequence for Mllt6 (NM_139311.1,3361-3379).
gggcagcaatacaagtcta

SEQ ID NO: 461890 - DNA, 19 bp, Mus musculus
  siRNA target sequence for Mllt6 (NM_139311.1,3362-3380).
ggcagcaatacaagtctaa

SEQ ID NO: 461891 - DNA, 19 bp, Mus musculus
  siRNA target sequence for Mllt6 (NM_139311.1,3363-3381).
gcagcaatacaagtctaat

SEQ ID NO: 461892 - DNA, 19 bp, Mus musculus
  siRNA target sequence for Mnt (NM_010813.2,669-687).
gactgtcattcctattcct

SEQ ID NO: 461893 - DNA, 19 bp, Mus musculus
  siRNA target sequence for Mnt (NM_010813.2,788-806).
cccctggactcagcattaa

SEQ ID NO: 461894 - DNA, 19 bp, Mus musculus
  siRNA target sequence for Mnt (NM_010813.2,995-1013).
cgcttgggaccctgaagtt

SEQ ID NO: 461895 - DNA, 19 bp, Mus musculus
  siRNA target sequence for Mnt (NM_010813.2,1073-1091).
ccagagaagtccacaacaa

SEQ ID NO: 461896 - DNA, 19 bp, Mus musculus
  siRNA target sequence for Mnt (NM_010813.2,1111-1129).
gcccatctgaaggaatgtt

SEQ ID NO: 461897 - DNA, 19 bp, Mus musculus
  siRNA target sequence for Mnt (NM_010813.2,1112-1130).
cccatctgaaggaatgttt

SEQ ID NO: 461898 - DNA, 19 bp, Mus musculus
  siRNA target sequence for Mnt (NM_010813.2,1164-1182).
cgacaagaagacttcgaat

SEQ ID NO: 461899 - DNA, 19 bp, Mus musculus
  siRNA target sequence for Mpg (NM_010822.2,105-123).
caccgagcagcctccattt

SEQ ID NO: 461900 - DNA, 19 bp, Mus musculus
  siRNA target sequence for Mpg (NM_010822.2,107-125).
ccgagcagcctccatttct

SEQ ID NO: 461901 - DNA, 19 bp, Mus musculus
  siRNA target sequence for Mpg (NM_010822.2,164-182).
ccctagtgaccggatatca

SEQ ID NO: 461902 - DNA, 19 bp, Mus musculus
  siRNA target sequence for Mpg (NM_010822.2,165-183).
cctagtgaccggatatcat

SEQ ID NO: 461903 - DNA, 19 bp, Mus musculus
  siRNA target sequence for Mpg (NM_010822.2,213-231).
ccgaaagattgggcaaaaa

SEQ ID NO: 461904 - DNA, 19 bp, Mus musculus
  siRNA target sequence for Mpg (NM_010822.2,343-361).
cggctaggaccagagtttt

SEQ ID NO: 461905 - DNA, 19 bp, Mus musculus
  siRNA target sequence for Mpg (NM_010822.2,345-363).
gctaggaccagagtttttt

SEQ ID NO: 461906 - DNA, 19 bp, Mus musculus
  siRNA target sequence for Mpg (NM_010822.2,378-396).
caccctagcccgtgcattt

SEQ ID NO: 461907 - DNA, 19 bp, Mus musculus
  siRNA target sequence for Mpg (NM_010822.2,523-541).
cggaaccgtggcatgttca

SEQ ID NO: 461908 - DNA, 19 bp, Mus musculus
  siRNA target sequence for Mpg (NM_010822.2,524-542).
ggaaccgtggcatgttcat

SEQ ID NO: 461909 - DNA, 19 bp, Mus musculus
  siRNA target sequence for Mpg (NM_010822.2,547-565).
cctgggaccctgtatgtgt

SEQ ID NO: 461910 - DNA, 19 bp, Mus musculus
  siRNA target sequence for Mpg (NM_010822.2,548-566).
ctgggaccctgtatgtgta

SEQ ID NO: 461911 - DNA, 19 bp, Mus musculus
  siRNA target sequence for Mpg (NM_010822.2,568-586).
ctcatctatggcatgtact

SEQ ID NO: 461912 - DNA, 19 bp, Mus musculus
  siRNA target sequence for Mpg (NM_010822.2,591-609).
cttgaatgtctctagtcaa

SEQ ID NO: 461913 - DNA, 19 bp, Mus musculus
  siRNA target sequence for Mpg (NM_010822.2,616-634).
ggggcttgtgtcttgctaa

SEQ ID NO: 461914 - DNA, 19 bp, Mus musculus
  siRNA target sequence for Mpg (NM_010822.2,665-683).
ccatgcggcagcttcgtaa

SEQ ID NO: 461915 - DNA, 19 bp, Mus musculus
  siRNA target sequence for Mpg (NM_010822.2,679-697).
cgtaactccctccgaaaaa

SEQ ID NO: 461916 - DNA, 19 bp, Mus musculus
  siRNA target sequence for Mpg (NM_010822.2,865-883).
gcagcagcccgtataggta

SEQ ID NO: 461917 - DNA, 19 bp, Mus musculus
  siRNA target sequence for Mpg (NM_010822.2,866-884).
cagcagcccgtataggtat

SEQ ID NO: 461918 - DNA, 19 bp, Mus musculus
  siRNA target sequence for Mpg (NM_010822.2,1001-1019).
gctctgaggggcttttaat

SEQ ID NO: 461919 - DNA, 19 bp, Mus musculus
  siRNA target sequence for Mpg (NM_010822.2,1004-1022).
ctgaggggcttttaattgt

SEQ ID NO: 461920 - DNA, 19 bp, Mus musculus
  siRNA target sequence for Mrtf-B (NM_153588.1,26-44).
cacaaggcttcccagaaat

SEQ ID NO: 461921 - DNA, 19 bp, Mus musculus
  siRNA target sequence for Mrtf-B (NM_153588.1,33-51).
cttcccagaaattttaact

SEQ ID NO: 461922 - DNA, 19 bp, Mus musculus
  siRNA target sequence for Mrtf-B (NM_153588.1,147-165).
gaggacaagagaacaacta

SEQ ID NO: 461923 - DNA, 19 bp, Mus musculus
  siRNA target sequence for Mrtf-B (NM_153588.1,149-167).
ggacaagagaacaactagt

SEQ ID NO: 461924 - DNA, 19 bp, Mus musculus
  siRNA target sequence for Mrtf-B (NM_153588.1,195-213).
gagtccagcagcattccat

SEQ ID NO: 461925 - DNA, 19 bp, Mus musculus
  siRNA target sequence for Mrtf-B (NM_153588.1,235-253).
cgagccagaactgagaatt

SEQ ID NO: 461926 - DNA, 19 bp, Mus musculus
  siRNA target sequence for Mrtf-B (NM_153588.1,303-321).
gatgcatattttagaagaa

SEQ ID NO: 461927 - DNA, 19 bp, Mus musculus
  siRNA target sequence for Mrtf-B (NM_153588.1,461-479).
gtgtcaaggaagcgattat

SEQ ID NO: 461928 - DNA, 19 bp, Mus musculus
  siRNA target sequence for Mrtf-B (NM_153588.1,465-483).
caaggaagcgattataggt

SEQ ID NO: 461929 - DNA, 19 bp, Mus musculus
  siRNA target sequence for Mrtf-B (NM_153588.1,509-527).
ctcatggcgagttctcatt

SEQ ID NO: 461930 - DNA, 19 bp, Mus musculus
  siRNA target sequence for Mrtf-B (NM_153588.1,515-533).
gcgagttctcatttgatga

SEQ ID NO: 461931 - DNA, 19 bp, Mus musculus
  siRNA target sequence for Mrtf-B (NM_153588.1,516-534).
cgagttctcatttgatgaa

SEQ ID NO: 461932 - DNA, 19 bp, Mus musculus
  siRNA target sequence for Mrtf-B (NM_153588.1,519-537).
gttctcatttgatgaagat

SEQ ID NO: 461933 - DNA, 19 bp, Mus musculus
  siRNA target sequence for Mrtf-B (NM_153588.1,601-619).
cccagtgagccaaaagtca

SEQ ID NO: 461934 - DNA, 19 bp, Mus musculus
  siRNA target sequence for Mrtf-B (NM_153588.1,693-711).
cttgaaaacccctctaact

SEQ ID NO: 461935 - DNA, 19 bp, Mus musculus
  siRNA target sequence for Mrtf-B (NM_153588.1,742-760).
cccgtgctccctacaaaca

SEQ ID NO: 461936 - DNA, 19 bp, Mus musculus
  siRNA target sequence for Mrtf-B (NM_153588.1,744-762).
cgtgctccctacaaacact

SEQ ID NO: 461937 - DNA, 19 bp, Mus musculus
  siRNA target sequence for Mrtf-B (NM_153588.1,784-802).
ccaatgctggtgaagcaaa

SEQ ID NO: 461938 - DNA, 19 bp, Mus musculus
  siRNA target sequence for Mrtf-B (NM_153588.1,822-840).
cgacaaacaccgtagcaaa

SEQ ID NO: 461939 - DNA, 19 bp, Mus musculus
  siRNA target sequence for Mrtf-B (NM_153588.1,825-843).
caaacaccgtagcaaaaaa

SEQ ID NO: 461940 - DNA, 19 bp, Mus musculus
  siRNA target sequence for Mrtf-B (NM_153588.1,829-847).
caccgtagcaaaaaatgca

SEQ ID NO: 461941 - DNA, 19 bp, Mus musculus
  siRNA target sequence for Mrtf-B (NM_153588.1,831-849).
ccgtagcaaaaaatgcaaa

SEQ ID NO: 461942 - DNA, 19 bp, Mus musculus
  siRNA target sequence for Mrtf-B (NM_153588.1,854-872).
cgaaaccgcgagtgaagaa

SEQ ID NO: 461943 - DNA, 19 bp, Mus musculus
  siRNA target sequence for Mrtf-B (NM_153588.1,859-877).
ccgcgagtgaagaagctta

SEQ ID NO: 461944 - DNA, 19 bp, Mus musculus
  siRNA target sequence for Mrtf-B (NM_153588.1,860-878).
cgcgagtgaagaagcttaa

SEQ ID NO: 461945 - DNA, 19 bp, Mus musculus
  siRNA target sequence for Mrtf-B (NM_153588.1,862-880).
cgagtgaagaagcttaagt

SEQ ID NO: 461946 - DNA, 19 bp, Mus musculus
  siRNA target sequence for Mrtf-B (NM_153588.1,1045-1063).
ctacctgcacccatcaaaa

SEQ ID NO: 461947 - DNA, 19 bp, Mus musculus
  siRNA target sequence for Mrtf-B (NM_153588.1,1350-1368).
cacaacactgcataatgct

SEQ ID NO: 461948 - DNA, 19 bp, Mus musculus
  siRNA target sequence for Mrtf-B (NM_153588.1,1421-1439).
gcagtgtgccccatgttga

SEQ ID NO: 461949 - DNA, 19 bp, Mus musculus
  siRNA target sequence for Mrtf-B (NM_153588.1,1424-1442).
gtgtgccccatgttgaaaa

SEQ ID NO: 461950 - DNA, 19 bp, Mus musculus
  siRNA target sequence for Mrtf-B (NM_153588.1,1557-1575).
ccagttgttgtgttcatct

SEQ ID NO: 461951 - DNA, 19 bp, Mus musculus
  siRNA target sequence for Mrtf-B (NM_153588.1,1807-1825).
cccccacatccctttaata

SEQ ID NO: 461952 - DNA, 19 bp, Mus musculus
  siRNA target sequence for Mrtf-B (NM_153588.1,2032-2050).
gtctcgcagttctacctta

SEQ ID NO: 461953 - DNA, 19 bp, Mus musculus
  siRNA target sequence for Mrtf-B (NM_153588.1,2139-2157).
ccagggctcaaatgttact

SEQ ID NO: 461954 - DNA, 19 bp, Mus musculus
  siRNA target sequence for Mrtf-B (NM_153588.1,2140-2158).
cagggctcaaatgttactt

SEQ ID NO: 461955 - DNA, 19 bp, Mus musculus
  siRNA target sequence for Mrtf-B (NM_153588.1,2142-2160).
gggctcaaatgttacttca

SEQ ID NO: 461956 - DNA, 19 bp, Mus musculus
  siRNA target sequence for Mrtf-B (NM_153588.1,2341-2359).
gtcagaaaggtcttcacaa

SEQ ID NO: 461957 - DNA, 19 bp, Mus musculus
  siRNA target sequence for Mrtf-B (NM_153588.1,2436-2454).
ctctaaccctgctcttcaa

SEQ ID NO: 461958 - DNA, 19 bp, Mus musculus
  siRNA target sequence for Mrtf-B (NM_153588.1,2525-2543).
caccccagcagtttgttgt

SEQ ID NO: 461959 - DNA, 19 bp, Mus musculus
  siRNA target sequence for Mrtf-B (NM_153588.1,2528-2546).
cccagcagtttgttgttca

SEQ ID NO: 461960 - DNA, 19 bp, Mus musculus
  siRNA target sequence for Mrtf-B (NM_153588.1,2539-2557).
gttgttcagcactctttgt

SEQ ID NO: 461961 - DNA, 19 bp, Mus musculus
  siRNA target sequence for Mrtf-B (NM_153588.1,2564-2582).
ccccaatcacgaagacaaa

SEQ ID NO: 461962 - DNA, 19 bp, Mus musculus
  siRNA target sequence for Mrtf-B (NM_153588.1,2565-2583).
cccaatcacgaagacaaaa

SEQ ID NO: 461963 - DNA, 19 bp, Mus musculus
  siRNA target sequence for Mrtf-B (NM_153588.1,2567-2585).
caatcacgaagacaaaaga

SEQ ID NO: 461964 - DNA, 19 bp, Mus musculus
  siRNA target sequence for Mrtf-B (NM_153588.1,2685-2703).
cgacatcctcataaagagt

SEQ ID NO: 461965 - DNA, 19 bp, Mus musculus
  siRNA target sequence for Mrtf-B (NM_153588.1,2694-2712).
cataaagagtggagagatt

SEQ ID NO: 461966 - DNA, 19 bp, Mus musculus
  siRNA target sequence for Mrtf-B (NM_153588.1,2707-2725).
gagatttccttcccaataa

SEQ ID NO: 461967 - DNA, 19 bp, Mus musculus
  siRNA target sequence for Mrtf-B (NM_153588.1,2775-2793).
caccacaatgccagtcaat

SEQ ID NO: 461968 - DNA, 19 bp, Mus musculus
  siRNA target sequence for Mrtf-B (NM_153588.1,2940-2958).
gcagaacagcagtgaagat

SEQ ID NO: 461969 - DNA, 19 bp, Mus musculus
  siRNA target sequence for Mrtf-B (NM_153588.1,2951-2969).
gtgaagatagagagtcttt

SEQ ID NO: 461970 - DNA, 19 bp, Mus musculus
  siRNA target sequence for Mrtf-B (NM_153588.1,3117-3135).
catggagtggctagacatt

SEQ ID NO: 461971 - DNA, 19 bp, Mus musculus
  siRNA target sequence for Mrtf-B (NM_153588.1,3121-3139).
gagtggctagacattacca

SEQ ID NO: 461972 - DNA, 19 bp, Mus musculus
  siRNA target sequence for Msc (NM_010827.1,333-351).
ggctcgcccagcgacattt

SEQ ID NO: 461973 - DNA, 19 bp, Mus musculus
  siRNA target sequence for Mtf2 (NM_013827.1,42-60).
caatgaaatggttatatgt

SEQ ID NO: 461974 - DNA, 19 bp, Mus musculus
  siRNA target sequence for Mtf2 (NM_013827.1,46-64).
gaaatggttatatgtgata

SEQ ID NO: 461975 - DNA, 19 bp, Mus musculus
  siRNA target sequence for Mtf2 (NM_013827.1,66-84).
gtgtggtcaaggatatcat

SEQ ID NO: 461976 - DNA, 19 bp, Mus musculus
  siRNA target sequence for Mtf2 (NM_013827.1,90-108).
gtgtcacacacctcatatt

SEQ ID NO: 461977 - DNA, 19 bp, Mus musculus
  siRNA target sequence for Mtf2 (NM_013827.1,94-112).
cacacacctcatattgact

SEQ ID NO: 461978 - DNA, 19 bp, Mus musculus
  siRNA target sequence for Mtf2 (NM_013827.1,111-129).
ctcgagtgtgattgattca

SEQ ID NO: 461979 - DNA, 19 bp, Mus musculus
  siRNA target sequence for Mtf2 (NM_013827.1,113-131).
cgagtgtgattgattcaga

SEQ ID NO: 461980 - DNA, 19 bp, Mus musculus
  siRNA target sequence for Mtf2 (NM_013827.1,148-166).
cgacagtgcgtttttgcaa

SEQ ID NO: 461981 - DNA, 19 bp, Mus musculus
  siRNA target sequence for Mtf2 (NM_013827.1,153-171).
gtgcgtttttgcaacaact

SEQ ID NO: 461982 - DNA, 19 bp, Mus musculus
  siRNA target sequence for Mtf2 (NM_013827.1,179-197).
ggggtggtgcgcttaagaa

SEQ ID NO: 461983 - DNA, 19 bp, Mus musculus
  siRNA target sequence for Mtf2 (NM_013827.1,180-198).
gggtggtgcgcttaagaaa

SEQ ID NO: 461984 - DNA, 19 bp, Mus musculus
  siRNA target sequence for Mtf2 (NM_013827.1,209-227).
ccaaagcattgcaagtcat

SEQ ID NO: 461985 - DNA, 19 bp, Mus musculus
  siRNA target sequence for Mtf2 (NM_013827.1,231-249).
gcagacattaccctatagt

SEQ ID NO: 461986 - DNA, 19 bp, Mus musculus
  siRNA target sequence for Mtf2 (NM_013827.1,268-286).
gatgcaggccataaaacca

SEQ ID NO: 461987 - DNA, 19 bp, Mus musculus
  siRNA target sequence for Mtf2 (NM_013827.1,292-310).
ccagagtgctactgctatt

SEQ ID NO: 461988 - DNA, 19 bp, Mus musculus
  siRNA target sequence for Mtf2 (NM_013827.1,317-335).
gccctggagactggtattt

SEQ ID NO: 461989 - DNA, 19 bp, Mus musculus
  siRNA target sequence for Mtf2 (NM_013827.1,322-340).
ggagactggtatttaaaga

SEQ ID NO: 461990 - DNA, 19 bp, Mus musculus
  siRNA target sequence for Mtf2 (NM_013827.1,323-341).
gagactggtatttaaagat

SEQ ID NO: 461991 - DNA, 19 bp, Mus musculus
  siRNA target sequence for Mtf2 (NM_013827.1,415-433).
ggagataggttttatacat

SEQ ID NO: 461992 - DNA, 19 bp, Mus musculus
  siRNA target sequence for Mtf2 (NM_013827.1,452-470).
gttctggaccagaatacct

SEQ ID NO: 461993 - DNA, 19 bp, Mus musculus
  siRNA target sequence for Mtf2 (NM_013827.1,481-499).
ccgttacagtgggtagata

SEQ ID NO: 461994 - DNA, 19 bp, Mus musculus
  siRNA target sequence for Mtf2 (NM_013827.1,482-500).
cgttacagtgggtagatat

SEQ ID NO: 461995 - DNA, 19 bp, Mus musculus
  siRNA target sequence for Mtf2 (NM_013827.1,483-501).
gttacagtgggtagatata

SEQ ID NO: 461996 - DNA, 19 bp, Mus musculus
  siRNA target sequence for Mtf2 (NM_013827.1,502-520).
gcacacctatgcctttaca

SEQ ID NO: 461997 - DNA, 19 bp, Mus musculus
  siRNA target sequence for Mtf2 (NM_013827.1,512-530).
gcctttacaacctaagtgt

SEQ ID NO: 461998 - DNA, 19 bp, Mus musculus
  siRNA target sequence for Mtf2 (NM_013827.1,513-531).
cctttacaacctaagtgtt

SEQ ID NO: 461999 - DNA, 19 bp, Mus musculus
  siRNA target sequence for Mtf2 (NM_013827.1,556-574).
gaacttgagcttatgacat

SEQ ID NO: 462000 - DNA, 19 bp, Mus musculus
  siRNA target sequence for Mtf2 (NM_013827.1,559-577).
cttgagcttatgacataca

SEQ ID NO: 462001 - DNA, 19 bp, Mus musculus
  siRNA target sequence for Mtf2 (NM_013827.1,562-580).
gagcttatgacatacatta

SEQ ID NO: 462002 - DNA, 19 bp, Mus musculus
  siRNA target sequence for Mtf2 (NM_013827.1,564-582).
gcttatgacatacattaat

SEQ ID NO: 462003 - DNA, 19 bp, Mus musculus
  siRNA target sequence for Mtf2 (NM_013827.1,619-637).
gacacacccaaatctgaaa

SEQ ID NO: 462004 - DNA, 19 bp, Mus musculus
  siRNA target sequence for Mtf2 (NM_013827.1,626-644).
ccaaatctgaaagatatga

SEQ ID NO: 462005 - DNA, 19 bp, Mus musculus
  siRNA target sequence for Mtf2 (NM_013827.1,655-673).
gaggcattaaatgattaca

SEQ ID NO: 462006 - DNA, 19 bp, Mus musculus
  siRNA target sequence for Mtf2 (NM_013827.1,658-676).
gcattaaatgattacaaga

SEQ ID NO: 462007 - DNA, 19 bp, Mus musculus
  siRNA target sequence for Mtf2 (NM_013827.1,667-685).
gattacaagaccatgttta

SEQ ID NO: 462008 - DNA, 19 bp, Mus musculus
  siRNA target sequence for Mtf2 (NM_013827.1,720-738).
gtttgggttgcgaattcgt

SEQ ID NO: 462009 - DNA, 19 bp, Mus musculus
  siRNA target sequence for Mtf2 (NM_013827.1,825-843).
ggcatccaaacctacatct

SEQ ID NO: 462010 - DNA, 19 bp, Mus musculus
  siRNA target sequence for Mtf2 (NM_013827.1,901-919).
cgtcctcctggcccatata

SEQ ID NO: 462011 - DNA, 19 bp, Mus musculus
  siRNA target sequence for Mtf2 (NM_013827.1,904-922).
cctcctggcccatatacaa

SEQ ID NO: 462012 - DNA, 19 bp, Mus musculus
  siRNA target sequence for Mtf2 (NM_013827.1,907-925).
cctggcccatatacaagaa

SEQ ID NO: 462013 - DNA, 19 bp, Mus musculus
  siRNA target sequence for Mtf2 (NM_013827.1,908-926).
ctggcccatatacaagaaa

SEQ ID NO: 462014 - DNA, 19 bp, Mus musculus
  siRNA target sequence for Mutyh (NM_133250.1,218-236).
gctggtatgaccaagagaa

SEQ ID NO: 462015 - DNA, 19 bp, Mus musculus
  siRNA target sequence for Mutyh (NM_133250.1,241-259).
gacctcccttggagaaact

SEQ ID NO: 462016 - DNA, 19 bp, Mus musculus
  siRNA target sequence for Mutyh (NM_133250.1,340-358).
gccacagtgatcgactatt

SEQ ID NO: 462017 - DNA, 19 bp, Mus musculus
  siRNA target sequence for Mutyh (NM_133250.1,342-360).
cacagtgatcgactattat

SEQ ID NO: 462018 - DNA, 19 bp, Mus musculus
  siRNA target sequence for Mutyh (NM_133250.1,613-631).
gtggtggatgggaacgttt

SEQ ID NO: 462019 - DNA, 19 bp, Mus musculus
  siRNA target sequence for Mutyh (NM_133250.1,615-633).
ggtggatgggaacgtttta

SEQ ID NO: 462020 - DNA, 19 bp, Mus musculus
  siRNA target sequence for Mutyh (NM_133250.1,734-752).
ggcctggggacttcaatca

SEQ ID NO: 462021 - DNA, 19 bp, Mus musculus
  siRNA target sequence for Mutyh (NM_133250.1,735-753).
gcctggggacttcaatcaa

SEQ ID NO: 462022 - DNA, 19 bp, Mus musculus
  siRNA target sequence for Mutyh (NM_133250.1,873-891).
gccaggccgtcctgacata

SEQ ID NO: 462023 - DNA, 19 bp, Mus musculus
  siRNA target sequence for Mutyh (NM_133250.1,875-893).
caggccgtcctgacataga

SEQ ID NO: 462024 - DNA, 19 bp, Mus musculus
  siRNA target sequence for Mutyh (NM_133250.1,1226-1244).
gggaggttatccacatctt

SEQ ID NO: 462025 - DNA, 19 bp, Mus musculus
  siRNA target sequence for Mutyh (NM_133250.1,1251-1269).
catcaaactgacgtatcaa

SEQ ID NO: 462026 - DNA, 19 bp, Mus musculus
  siRNA target sequence for Mutyh (NM_133250.1,1254-1272).
caaactgacgtatcaagta

SEQ ID NO: 462027 - DNA, 19 bp, Mus musculus
  siRNA target sequence for Mutyh (NM_133250.1,1360-1378).
gtgtctactgccatgaaaa

SEQ ID NO: 462028 - DNA, 19 bp, Mus musculus
  siRNA target sequence for Mutyh (NM_133250.1,1412-1430).
ggacccgcaagggttcaaa

SEQ ID NO: 462029 - DNA, 19 bp, Mus musculus
  siRNA target sequence for Mutyh (NM_133250.1,1413-1431).
gacccgcaagggttcaaaa

SEQ ID NO: 462030 - DNA, 19 bp, Mus musculus
  siRNA target sequence for Mutyh (NM_133250.1,1522-1540).
gacaaacccaacagtacta

SEQ ID NO: 462031 - DNA, 19 bp, Mus musculus
  siRNA target sequence for Mxi1 (NM_010847.1,223-241).
gatctacacacaatgagtt

SEQ ID NO: 462032 - DNA, 19 bp, Mus musculus
  siRNA target sequence for Myb (NM_010848.2,277-295).
ccccgacacagcatctaca

SEQ ID NO: 462033 - DNA, 19 bp, Mus musculus
  siRNA target sequence for Myb (NM_010848.2,280-298).
cgacacagcatctacagta

SEQ ID NO: 462034 - DNA, 19 bp, Mus musculus
  siRNA target sequence for Myb (NM_010848.2,369-387).
gcgtcacttggggaaaact

SEQ ID NO: 462035 - DNA, 19 bp, Mus musculus
  siRNA target sequence for Myb (NM_010848.2,370-388).
cgtcacttggggaaaacta

SEQ ID NO: 462036 - DNA, 19 bp, Mus musculus
  siRNA target sequence for Myb (NM_033597.1,585-603).
cactcaactgcccaatgaa

SEQ ID NO: 462037 - DNA, 19 bp, Mus musculus
  siRNA target sequence for Myb (NM_033597.1,587-605).
ctcaactgcccaatgaagt

SEQ ID NO: 462038 - DNA, 19 bp, Mus musculus
  siRNA target sequence for Myb (NM_033597.1,1636-1654).
gtttatagattctgattct

SEQ ID NO: 462039 - DNA, 19 bp, Mus musculus
  siRNA target sequence for Myb (NM_033597.1,1664-1682).
gatctcagcagttttgaat

SEQ ID NO: 462040 - DNA, 19 bp, Mus musculus
  siRNA target sequence for Myb (NM_033597.1,1872-1890).
ggctggtcgtcctacgaaa

SEQ ID NO: 462041 - DNA, 19 bp, Mus musculus
  siRNA target sequence for Myb (NM_033597.1,1873-1891).
gctggtcgtcctacgaaaa

SEQ ID NO: 462042 - DNA, 19 bp, Mus musculus
  siRNA target sequence for Myb (NM_033597.1,1874-1892).
ctggtcgtcctacgaaaaa

SEQ ID NO: 462043 - DNA, 19 bp, Mus musculus
  siRNA target sequence for Myb (NM_033597.1,2003-2021).
ccctcgcagttcttgaaca

SEQ ID NO: 462044 - DNA, 19 bp, Mus musculus
  siRNA target sequence for Mybl1 (NM_008651.1,30-48).
ggatgatgaccttcaatat

SEQ ID NO: 462045 - DNA, 19 bp, Mus musculus
  siRNA target sequence for Mybl1 (NM_008651.1,39-57).
ccttcaatatgctgatcat

SEQ ID NO: 462046 - DNA, 19 bp, Mus musculus
  siRNA target sequence for Mybl1 (NM_008651.1,43-61).
caatatgctgatcatgatt

SEQ ID NO: 462047 - DNA, 19 bp, Mus musculus
  siRNA target sequence for Mybl1 (NM_008651.1,116-134).
caagagatgaggatgacaa

SEQ ID NO: 462048 - DNA, 19 bp, Mus musculus
  siRNA target sequence for Mybl1 (NM_008651.1,154-172).
caacacggaactgatgatt

SEQ ID NO: 462049 - DNA, 19 bp, Mus musculus
  siRNA target sequence for Mybl1 (NM_008651.1,169-187).
gattggactctaattgcta

SEQ ID NO: 462050 - DNA, 19 bp, Mus musculus
  siRNA target sequence for Mybl1 (NM_008651.1,174-192).
gactctaattgctagtcat

SEQ ID NO: 462051 - DNA, 19 bp, Mus musculus
  siRNA target sequence for Mybl1 (NM_008651.1,223-241).
catcgatggcagaaggttt

SEQ ID NO: 462052 - DNA, 19 bp, Mus musculus
  siRNA target sequence for Mybl1 (NM_008651.1,261-279).
gggtccttggactaaggaa

SEQ ID NO: 462053 - DNA, 19 bp, Mus musculus
  siRNA target sequence for Mybl1 (NM_008651.1,288-306).
gagggttattgaattagtt

SEQ ID NO: 462054 - DNA, 19 bp, Mus musculus
  siRNA target sequence for Mybl1 (NM_008651.1,290-308).
gggttattgaattagttca

SEQ ID NO: 462055 - DNA, 19 bp, Mus musculus
  siRNA target sequence for Mybl1 (NM_008651.1,318-336).
gccaaaaaggtggtcttta

SEQ ID NO: 462056 - DNA, 19 bp, Mus musculus
  siRNA target sequence for Mybl1 (NM_008651.1,319-337).
ccaaaaaggtggtctttaa

SEQ ID NO: 462057 - DNA, 19 bp, Mus musculus
  siRNA target sequence for Mybl1 (NM_008651.1,320-338).
caaaaaggtggtctttaat

SEQ ID NO: 462058 - DNA, 19 bp, Mus musculus
  siRNA target sequence for Mybl1 (NM_008651.1,326-344).
ggtggtctttaattgcaaa

SEQ ID NO: 462059 - DNA, 19 bp, Mus musculus
  siRNA target sequence for Mybl1 (NM_008651.1,327-345).
gtggtctttaattgcaaaa

SEQ ID NO: 462060 - DNA, 19 bp, Mus musculus
  siRNA target sequence for Mybl1 (NM_008651.1,329-347).
ggtctttaattgcaaaaca

SEQ ID NO: 462061 - DNA, 19 bp, Mus musculus
  siRNA target sequence for Mybl1 (NM_008651.1,478-496).
cgttgggccgagattgcta

SEQ ID NO: 462062 - DNA, 19 bp, Mus musculus
  siRNA target sequence for Mybl1 (NM_008651.1,479-497).
gttgggccgagattgctaa

SEQ ID NO: 462063 - DNA, 19 bp, Mus musculus
  siRNA target sequence for Mybl1 (NM_008651.1,485-503).
ccgagattgctaagttact

SEQ ID NO: 462064 - DNA, 19 bp, Mus musculus
  siRNA target sequence for Mybl1 (NM_008651.1,486-504).
cgagattgctaagttactt

SEQ ID NO: 462065 - DNA, 19 bp, Mus musculus
  siRNA target sequence for Mybl1 (NM_008651.1,564-582).
ggaacaggagggctattta

SEQ ID NO: 462066 - DNA, 19 bp, Mus musculus
  siRNA target sequence for Mybl1 (NM_008651.1,599-617).
cagagcggtcttcatcaaa

SEQ ID NO: 462067 - DNA, 19 bp, Mus musculus
  siRNA target sequence for Mybl1 (NM_008651.1,603-621).
gcggtcttcatcaaaactt

SEQ ID NO: 462068 - DNA, 19 bp, Mus musculus
  siRNA target sequence for Mybl1 (NM_008651.1,605-623).
ggtcttcatcaaaacttca

SEQ ID NO: 462069 - DNA, 19 bp, Mus musculus
  siRNA target sequence for Mybl1 (NM_008651.1,635-653).
gtgcgactatggaccattt

SEQ ID NO: 462070 - DNA, 19 bp, Mus musculus
  siRNA target sequence for Mybl1 (NM_008651.1,638-656).
cgactatggaccatttgca

SEQ ID NO: 462071 - DNA, 19 bp, Mus musculus
  siRNA target sequence for Mybl1 (NM_008651.1,639-657).
gactatggaccatttgcaa

SEQ ID NO: 462072 - DNA, 19 bp, Mus musculus
  siRNA target sequence for Mybl1 (NM_008651.1,659-677).
cccagaatcagttttacat

SEQ ID NO: 462073 - DNA, 19 bp, Mus musculus
  siRNA target sequence for Mybl1 (NM_008651.1,660-678).
ccagaatcagttttacatt

SEQ ID NO: 462074 - DNA, 19 bp, Mus musculus
  siRNA target sequence for Mybl1 (NM_008651.1,710-728).
cgcctgatggcaattgtgt

SEQ ID NO: 462075 - DNA, 19 bp, Mus musculus
  siRNA target sequence for Mybl1 (NM_008651.1,711-729).
gcctgatggcaattgtgtt

SEQ ID NO: 462076 - DNA, 19 bp, Mus musculus
  siRNA target sequence for Mybl1 (NM_008651.1,720-738).
caattgtgttgaacatgtt

SEQ ID NO: 462077 - DNA, 19 bp, Mus musculus
  siRNA target sequence for Mybl1 (NM_008651.1,805-823).
gagctcgagttgcttctta

SEQ ID NO: 462078 - DNA, 19 bp, Mus musculus
  siRNA target sequence for Mybl1 (NM_008651.1,810-828).
cgagttgcttcttatgtca

SEQ ID NO: 462079 - DNA, 19 bp, Mus musculus
  siRNA target sequence for Mybl1 (NM_008651.1,829-847).
gccgagaatgaagttagaa

SEQ ID NO: 462080 - DNA, 19 bp, Mus musculus
  siRNA target sequence for Mybl1 (NM_008651.1,865-883).
caacctggaagcttttcta

SEQ ID NO: 462081 - DNA, 19 bp, Mus musculus
  siRNA target sequence for Mybl1 (NM_008651.1,903-921).
catggatgatagtatgtct

SEQ ID NO: 462082 - DNA, 19 bp, Mus musculus
  siRNA target sequence for Mybl1 (NM_008651.1,907-925).
gatgatagtatgtctaaca

SEQ ID NO: 462083 - DNA, 19 bp, Mus musculus
  siRNA target sequence for Mybl1 (NM_008651.1,918-936).
gtctaacacactgaataat

SEQ ID NO: 462084 - DNA, 19 bp, Mus musculus
  siRNA target sequence for Mybl1 (NM_008651.1,997-1015).
cagaattcacccacaaagt

SEQ ID NO: 462085 - DNA, 19 bp, Mus musculus
  siRNA target sequence for Mybl1 (NM_008651.1,1105-1123).
gtagcatggagtgatgtta

SEQ ID NO: 462086 - DNA, 19 bp, Mus musculus
  siRNA target sequence for Mybl1 (NM_008651.1,1164-1182).
gtctactccagttaaatta

SEQ ID NO: 462087 - DNA, 19 bp, Mus musculus
  siRNA target sequence for Mybl1 (NM_008651.1,1166-1184).
ctactccagttaaattaat

SEQ ID NO: 462088 - DNA, 19 bp, Mus musculus
  siRNA target sequence for Mybl1 (NM_008651.1,1207-1225).
gccatggaatgccagttta

SEQ ID NO: 462089 - DNA, 19 bp, Mus musculus
  siRNA target sequence for Mybl1 (NM_008651.1,1208-1226).
ccatggaatgccagtttaa

SEQ ID NO: 462090 - DNA, 19 bp, Mus musculus
  siRNA target sequence for Mybl1 (NM_008651.1,1221-1239).
gtttaacgtcagtcttgta

SEQ ID NO: 462091 - DNA, 19 bp, Mus musculus
  siRNA target sequence for Mybl1 (NM_008651.1,1227-1245).
cgtcagtcttgtacttgaa

SEQ ID NO: 462092 - DNA, 19 bp, Mus musculus
  siRNA target sequence for Mybl1 (NM_008651.1,1507-1525).
gaaaacccttcctttacat

SEQ ID NO: 462093 - DNA, 19 bp, Mus musculus
  siRNA target sequence for Mybl1 (NM_008651.1,1580-1598).
caacccccaaagatcaaaa

SEQ ID NO: 462094 - DNA, 19 bp, Mus musculus
  siRNA target sequence for Mybl1 (NM_008651.1,1583-1601).
cccccaaagatcaaaaaga

SEQ ID NO: 462095 - DNA, 19 bp, Mus musculus
  siRNA target sequence for Mybl1 (NM_008651.1,1621-1639).
cctactattagaagatcta

SEQ ID NO: 462096 - DNA, 19 bp, Mus musculus
  siRNA target sequence for Mybl1 (NM_008651.1,1644-1662).
gggcaccacaccaagaact

SEQ ID NO: 462097 - DNA, 19 bp, Mus musculus
  siRNA target sequence for Mybl1 (NM_008651.1,1731-1749).
gccacttgcctttttggaa

SEQ ID NO: 462098 - DNA, 19 bp, Mus musculus
  siRNA target sequence for Mybl1 (NM_008651.1,1753-1771).
gacattcgagaagttttaa

SEQ ID NO: 462099 - DNA, 19 bp, Mus musculus
  siRNA target sequence for Mybl1 (NM_008651.1,1810-1828).
gatgaacctgcttataaaa

SEQ ID NO: 462100 - DNA, 19 bp, Mus musculus
  siRNA target sequence for Mybl1 (NM_008651.1,1853-1871).
ctgtgaagaaggtcagaaa

SEQ ID NO: 462101 - DNA, 19 bp, Mus musculus
  siRNA target sequence for Mybl1 (NM_008651.1,1910-1928).
ggactcaactgctaactga

SEQ ID NO: 462102 - DNA, 19 bp, Mus musculus
  siRNA target sequence for Mybl1 (NM_008651.1,1945-1963).
cagtcagaaaatattctta

SEQ ID NO: 462103 - DNA, 19 bp, Mus musculus
  siRNA target sequence for Mybl1 (NM_008651.1,1947-1965).
gtcagaaaatattcttaca

SEQ ID NO: 462104 - DNA, 19 bp, Mus musculus
  siRNA target sequence for Mybl1 (NM_008651.1,1960-1978).
cttacaacatctttattaa

SEQ ID NO: 462105 - DNA, 19 bp, Mus musculus
  siRNA target sequence for Mybl1 (NM_008651.1,1970-1988).
ctttattaatgataccatt

SEQ ID NO: 462106 - DNA, 19 bp, Mus musculus
  siRNA target sequence for Mybl1 (NM_008651.1,1985-2003).
cattattggaaatacatga

SEQ ID NO: 462107 - DNA, 19 bp, Mus musculus
  siRNA target sequence for Mybl1 (NM_008651.1,2002-2020).
gacaataggtgcaacttga

SEQ ID NO: 462108 - DNA, 19 bp, Mus musculus
  siRNA target sequence for Mybl1 (NM_008651.1,2012-2030).
gcaacttgactcctgaaaa

SEQ ID NO: 462109 - DNA, 19 bp, Mus musculus
  siRNA target sequence for Mybl1 (NM_008651.1,2023-2041).
cctgaaaaacaagatataa

SEQ ID NO: 462110 - DNA, 19 bp, Mus musculus
  siRNA target sequence for Mybl1 (NM_008651.1,2048-2066).
ccaacaaaacatatacact

SEQ ID NO: 462111 - DNA, 19 bp, Mus musculus
  siRNA target sequence for Mybl1 (NM_008651.1,2081-2099).
caaaccctaacccttgtaa

SEQ ID NO: 462112 - DNA, 19 bp, Mus musculus
  siRNA target sequence for Mybl1 (NM_008651.1,2085-2103).
ccctaacccttgtaaagct

SEQ ID NO: 462113 - DNA, 19 bp, Mus musculus
  siRNA target sequence for Mybl1 (NM_008651.1,2120-2138).
gtcttcagtcaaattgtga

SEQ ID NO: 462114 - DNA, 19 bp, Mus musculus
  siRNA target sequence for Mybl1 (NM_008651.1,2122-2140).
cttcagtcaaattgtgaat

SEQ ID NO: 462115 - DNA, 19 bp, Mus musculus
  siRNA target sequence for Mybl1 (NM_008651.1,2165-2183).
cagaagaccaacttatcat

SEQ ID NO: 462116 - DNA, 19 bp, Mus musculus
  siRNA target sequence for Mybl1 (NM_008651.1,2191-2209).
caagcgagaagatatctga

SEQ ID NO: 462117 - DNA, 19 bp, Mus musculus
  siRNA target sequence for Mybl1 (NM_008651.1,2198-2216).
gaagatatctgagtactta

SEQ ID NO: 462118 - DNA, 19 bp, Mus musculus
  siRNA target sequence for Mybl2 (NM_008652.2,215-233).
cgaggatctggatgagtta

SEQ ID NO: 462119 - DNA, 19 bp, Mus musculus
  siRNA target sequence for Mybl2 (NM_008652.2,273-291).
gacaacagatgtaaggtta

SEQ ID NO: 462120 - DNA, 19 bp, Mus musculus
  siRNA target sequence for Mybl2 (NM_008652.2,275-293).
caacagatgtaaggttaaa

SEQ ID NO: 462121 - DNA, 19 bp, Mus musculus
  siRNA target sequence for Mybl2 (NM_008652.2,359-377).
gttcttggccagtcacttt

SEQ ID NO: 462122 - DNA, 19 bp, Mus musculus
  siRNA target sequence for Mybl2 (NM_008652.2,410-428).
gtggctgagggttttgaat

SEQ ID NO: 462123 - DNA, 19 bp, Mus musculus
  siRNA target sequence for Mybl2 (NM_008652.2,465-483).
gatcaaaaggtcattgagt

SEQ ID NO: 462124 - DNA, 19 bp, Mus musculus
  siRNA target sequence for Mybl2 (NM_008652.2,719-737).
ctggaactccactatcaaa

SEQ ID NO: 462125 - DNA, 19 bp, Mus musculus
  siRNA target sequence for Mybl2 (NM_008652.2,875-893).
gccgctggtgccctctatt

SEQ ID NO: 462126 - DNA, 19 bp, Mus musculus
  siRNA target sequence for Mybl2 (NM_008652.2,879-897).
ctggtgccctctattgtga

SEQ ID NO: 462127 - DNA, 19 bp, Mus musculus
  siRNA target sequence for Mybl2 (NM_008652.2,934-952).
ctacttctgctaaagaact

SEQ ID NO: 462128 - DNA, 19 bp, Mus musculus
  siRNA target sequence for Mybl2 (NM_008652.2,1012-1030).
ctctcaagcgtgaatacca

SEQ ID NO: 462129 - DNA, 19 bp, Mus musculus
  siRNA target sequence for Mybl2 (NM_008652.2,1156-1174).
cttggtgcgacctgagtaa

SEQ ID NO: 462130 - DNA, 19 bp, Mus musculus
  siRNA target sequence for Mybl2 (NM_008652.2,1159-1177).
ggtgcgacctgagtaaatt

SEQ ID NO: 462131 - DNA, 19 bp, Mus musculus
  siRNA target sequence for Mybl2 (NM_008652.2,1160-1178).
gtgcgacctgagtaaattt

SEQ ID NO: 462132 - DNA, 19 bp, Mus musculus
  siRNA target sequence for Mybl2 (NM_008652.2,1162-1180).
gcgacctgagtaaatttga

SEQ ID NO: 462133 - DNA, 19 bp, Mus musculus
  siRNA target sequence for Mybl2 (NM_008652.2,1318-1336).
gccttgatggccacactat

SEQ ID NO: 462134 - DNA, 19 bp, Mus musculus
  siRNA target sequence for Mybl2 (NM_008652.2,1319-1337).
ccttgatggccacactatt

SEQ ID NO: 462135 - DNA, 19 bp, Mus musculus
  siRNA target sequence for Mybl2 (NM_008652.2,1320-1338).
cttgatggccacactattt

SEQ ID NO: 462136 - DNA, 19 bp, Mus musculus
  siRNA target sequence for Mybl2 (NM_008652.2,1667-1685).
cctgcacagggataagaca

SEQ ID NO: 462137 - DNA, 19 bp, Mus musculus
  siRNA target sequence for Myf5 (NM_008656.3,234-252).
ccccttctgagtacttcta

SEQ ID NO: 462138 - DNA, 19 bp, Mus musculus
  siRNA target sequence for Myf5 (NM_008656.3,235-253).
cccttctgagtacttctat

SEQ ID NO: 462139 - DNA, 19 bp, Mus musculus
  siRNA target sequence for Myf5 (NM_008656.3,295-313).
ccagtttgagccaagagta

SEQ ID NO: 462140 - DNA, 19 bp, Mus musculus
  siRNA target sequence for Myf5 (NM_008656.3,698-716).
gacggcatgcctgaatgta

SEQ ID NO: 462141 - DNA, 19 bp, Mus musculus
  siRNA target sequence for Myf5 (NM_008656.3,701-719).
ggcatgcctgaatgtaaca

SEQ ID NO: 462142 - DNA, 19 bp, Mus musculus
  siRNA target sequence for Myf5 (NM_008656.3,723-741).
ctgtctggtcccgaaagaa

SEQ ID NO: 462143 - DNA, 19 bp, Mus musculus
  siRNA target sequence for Myf5 (NM_008656.3,725-743).
gtctggtcccgaaagaaca

SEQ ID NO: 462144 - DNA, 19 bp, Mus musculus
  siRNA target sequence for Myf5 (NM_008656.3,763-781).
ctgtcctgatgtatcaaat

SEQ ID NO: 462145 - DNA, 19 bp, Mus musculus
  siRNA target sequence for Myf5 (NM_008656.3,953-971).
cttatctatcacgtattat

SEQ ID NO: 462146 - DNA, 19 bp, Mus musculus
  siRNA target sequence for Myf6 (NM_008657.1,28-46).
gatgatggacctttttgaa

SEQ ID NO: 462147 - DNA, 19 bp, Mus musculus
  siRNA target sequence for Myf6 (NM_008657.1,55-73).
ctatttcttctacttagat

SEQ ID NO: 462148 - DNA, 19 bp, Mus musculus
  siRNA target sequence for Myf6 (NM_008657.1,150-168).
ccccttgccaggaccaaat

SEQ ID NO: 462149 - DNA, 19 bp, Mus musculus
  siRNA target sequence for Myf6 (NM_008657.1,326-344).
cgcgaaaggaggagactaa

SEQ ID NO: 462150 - DNA, 19 bp, Mus musculus
  siRNA target sequence for Myf6 (NM_008657.1,327-345).
gcgaaaggaggagactaaa

SEQ ID NO: 462151 - DNA, 19 bp, Mus musculus
  siRNA target sequence for Myf6 (NM_008657.1,587-605).
ccaagtgtttcggatcatt

SEQ ID NO: 462152 - DNA, 19 bp, Mus musculus
  siRNA target sequence for Myf6 (NM_008657.1,616-634).
cgtgataactgctaaggaa

SEQ ID NO: 462153 - DNA, 19 bp, Mus musculus
  siRNA target sequence for Myf6 (NM_008657.1,688-706).
catcgtggacagtatttct

SEQ ID NO: 462154 - DNA, 19 bp, Mus musculus
  siRNA target sequence for Myf6 (NM_008657.1,691-709).
cgtggacagtatttcttca

SEQ ID NO: 462155 - DNA, 19 bp, Mus musculus
  siRNA target sequence for Myod1 (NM_010866.1,211-229).
cactccgggacatagactt

SEQ ID NO: 462156 - DNA, 19 bp, Mus musculus
  siRNA target sequence for Myod1 (NM_010866.1,304-322).
cagacctgcgcttttttga

SEQ ID NO: 462157 - DNA, 19 bp, Mus musculus
  siRNA target sequence for Myod1 (NM_010866.1,808-826).
ctgatggcatgatggatta

SEQ ID NO: 462158 - DNA, 19 bp, Mus musculus
  siRNA target sequence for Myod1 (NM_010866.1,982-1000).
ctgcgcctgcgctgctttt

SEQ ID NO: 462159 - DNA, 19 bp, Mus musculus
  siRNA target sequence for Myod1 (NM_010866.1,1117-1135).
caaaccccaatgcgattta

SEQ ID NO: 462160 - DNA, 19 bp, Mus musculus
  siRNA target sequence for Myog (NM_031189.1,56-74).
gagacatccccctatttct

SEQ ID NO: 462161 - DNA, 19 bp, Mus musculus
  siRNA target sequence for Myog (NM_031189.1,414-432).
gcgccatccagtacattga

SEQ ID NO: 462162 - DNA, 19 bp, Mus musculus
  siRNA target sequence for Myog (NM_031189.1,509-527).
cccatggtgcccagtgaat

SEQ ID NO: 462163 - DNA, 19 bp, Mus musculus
  siRNA target sequence for Myog (NM_031189.1,618-636).
ctacagacgcccacaatct

SEQ ID NO: 462164 - DNA, 19 bp, Mus musculus
  siRNA target sequence for Myog (NM_031189.1,663-681).
gcatcacggtggaggatat

SEQ ID NO: 462165 - DNA, 19 bp, Mus musculus
  siRNA target sequence for Myst4 (NM_017479.1,351-369).
cttgcaaacccactttaca

SEQ ID NO: 462166 - DNA, 19 bp, Mus musculus
  siRNA target sequence for Myst4 (NM_017479.1,509-527).
ggatggctccgttctcaaa

SEQ ID NO: 462167 - DNA, 19 bp, Mus musculus
  siRNA target sequence for Myst4 (NM_017479.1,513-531).
ggctccgttctcaaagtca

SEQ ID NO: 462168 - DNA, 19 bp, Mus musculus
  siRNA target sequence for Myst4 (NM_017479.1,536-554).
caaaggccttgcttcatat

SEQ ID NO: 462169 - DNA, 19 bp, Mus musculus
  siRNA target sequence for Myst4 (NM_017479.1,541-559).
gccttgcttcatataagga

SEQ ID NO: 462170 - DNA, 19 bp, Mus musculus
  siRNA target sequence for Myst4 (NM_017479.1,564-582).
gacaatcctgggcgttttt

SEQ ID NO: 462171 - DNA, 19 bp, Mus musculus
  siRNA target sequence for Myst4 (NM_017479.1,626-644).
caaaggaccgccgtgtaat

SEQ ID NO: 462172 - DNA, 19 bp, Mus musculus
  siRNA target sequence for Myst4 (NM_017479.1,631-649).
gaccgccgtgtaatgatct

SEQ ID NO: 462173 - DNA, 19 bp, Mus musculus
  siRNA target sequence for Myst4 (NM_017479.1,812-830).
caagcgtgctgtgaacaat

SEQ ID NO: 462174 - DNA, 19 bp, Mus musculus
  siRNA target sequence for Myst4 (NM_017479.1,969-987).
cgtgccgatcccattccaa

SEQ ID NO: 462175 - DNA, 19 bp, Mus musculus
  siRNA target sequence for Myst4 (NM_017479.1,972-990).
gccgatcccattccaatat

SEQ ID NO: 462176 - DNA, 19 bp, Mus musculus
  siRNA target sequence for Myst4 (NM_017479.1,974-992).
cgatcccattccaatatgt

SEQ ID NO: 462177 - DNA, 19 bp, Mus musculus
  siRNA target sequence for Myst4 (NM_017479.1,984-1002).
ccaatatgtagcttctgtt

SEQ ID NO: 462178 - DNA, 19 bp, Mus musculus
  siRNA target sequence for Myst4 (NM_017479.1,1004-1022).
ggggactaaagagtcaaat

SEQ ID NO: 462179 - DNA, 19 bp, Mus musculus
  siRNA target sequence for Myst4 (NM_017479.1,1007-1025).
gactaaagagtcaaatcgt

SEQ ID NO: 462180 - DNA, 19 bp, Mus musculus
  siRNA target sequence for Myst4 (NM_017479.1,1080-1098).
ccatcctgtctgaagtttt

SEQ ID NO: 462181 - DNA, 19 bp, Mus musculus
  siRNA target sequence for Myst4 (NM_017479.1,1102-1120).
ctgagttaaccgcaaatgt

SEQ ID NO: 462182 - DNA, 19 bp, Mus musculus
  siRNA target sequence for Myst4 (NM_017479.1,1104-1122).
gagttaaccgcaaatgtga

SEQ ID NO: 462183 - DNA, 19 bp, Mus musculus
  siRNA target sequence for Myst4 (NM_017479.1,1168-1186).
gtcgagtccagggcaaaaa

SEQ ID NO: 462184 - DNA, 19 bp, Mus musculus
  siRNA target sequence for Myst4 (NM_017479.1,1216-1234).
gtgatagaggattccatat

SEQ ID NO: 462185 - DNA, 19 bp, Mus musculus
  siRNA target sequence for Myst4 (NM_017479.1,1290-1308).
gtctgcagaccaaagaaaa

SEQ ID NO: 462186 - DNA, 19 bp, Mus musculus
  siRNA target sequence for Myst4 (NM_017479.1,1315-1333).
gaaaactacttcatgagaa

SEQ ID NO: 462187 - DNA, 19 bp, Mus musculus
  siRNA target sequence for Myst4 (NM_017479.1,1366-1384).
ccattggacgaccgaaaaa

SEQ ID NO: 462188 - DNA, 19 bp, Mus musculus
  siRNA target sequence for Myst4 (NM_017479.1,1367-1385).
cattggacgaccgaaaaat

SEQ ID NO: 462189 - DNA, 19 bp, Mus musculus
  siRNA target sequence for Myst4 (NM_017479.1,1371-1389).
ggacgaccgaaaaataaat

SEQ ID NO: 462190 - DNA, 19 bp, Mus musculus
  siRNA target sequence for Myst4 (NM_017479.1,1372-1390).
gacgaccgaaaaataaatt

SEQ ID NO: 462191 - DNA, 19 bp, Mus musculus
  siRNA target sequence for Myst4 (NM_017479.1,1374-1392).
cgaccgaaaaataaattaa

SEQ ID NO: 462192 - DNA, 19 bp, Mus musculus
  siRNA target sequence for Myst4 (NM_017479.1,1375-1393).
gaccgaaaaataaattaaa

SEQ ID NO: 462193 - DNA, 19 bp, Mus musculus
  siRNA target sequence for Myst4 (NM_017479.1,1395-1413).
caacgattgttgtctgtaa

SEQ ID NO: 462194 - DNA, 19 bp, Mus musculus
  siRNA target sequence for Myst4 (NM_017479.1,1406-1424).
gtctgtaaccagtgatgaa

SEQ ID NO: 462195 - DNA, 19 bp, Mus musculus
  siRNA target sequence for Myst4 (NM_017479.1,1450-1468).
gggggtcacctgatactga

SEQ ID NO: 462196 - DNA, 19 bp, Mus musculus
  siRNA target sequence for Myst4 (NM_017479.1,1451-1469).
ggggtcacctgatactgat

SEQ ID NO: 462197 - DNA, 19 bp, Mus musculus
  siRNA target sequence for Myst4 (NM_017479.1,1452-1470).
gggtcacctgatactgata

SEQ ID NO: 462198 - DNA, 19 bp, Mus musculus
  siRNA target sequence for Myst4 (NM_017479.1,1453-1471).
ggtcacctgatactgatat

SEQ ID NO: 462199 - DNA, 19 bp, Mus musculus
  siRNA target sequence for Myst4 (NM_017479.1,1456-1474).
cacctgatactgatattaa

SEQ ID NO: 462200 - DNA, 19 bp, Mus musculus
  siRNA target sequence for Myst4 (NM_017479.1,1458-1476).
cctgatactgatattaaaa

SEQ ID NO: 462201 - DNA, 19 bp, Mus musculus
  siRNA target sequence for Myst4 (NM_017479.1,1618-1636).
gtcggtacccctcagtaat

SEQ ID NO: 462202 - DNA, 19 bp, Mus musculus
  siRNA target sequence for Myst4 (NM_017479.1,1621-1639).
ggtacccctcagtaataga

SEQ ID NO: 462203 - DNA, 19 bp, Mus musculus
  siRNA target sequence for Myst4 (NM_017479.1,1675-1693).
cgccttacccacaggaata

SEQ ID NO: 462204 - DNA, 19 bp, Mus musculus
  siRNA target sequence for Myst4 (NM_017479.1,1688-1706).
ggaatatgcaagattacca

SEQ ID NO: 462205 - DNA, 19 bp, Mus musculus
  siRNA target sequence for Myst4 (NM_017479.1,1695-1713).
gcaagattaccaaagcttt

SEQ ID NO: 462206 - DNA, 19 bp, Mus musculus
  siRNA target sequence for Myst4 (NM_017479.1,1696-1714).
caagattaccaaagcttta

SEQ ID NO: 462207 - DNA, 19 bp, Mus musculus
  siRNA target sequence for Myst4 (NM_017479.1,1699-1717).
gattaccaaagctttacct

SEQ ID NO: 462208 - DNA, 19 bp, Mus musculus
  siRNA target sequence for Myst4 (NM_017479.1,1718-1736).
gtgtgaattctgtcttaaa

SEQ ID NO: 462209 - DNA, 19 bp, Mus musculus
  siRNA target sequence for Myst4 (NM_017479.1,1761-1779).
ctaagacactcaaagaagt

SEQ ID NO: 462210 - DNA, 19 bp, Mus musculus
  siRNA target sequence for Myst4 (NM_017479.1,1929-1947).
gttgagccattcctttttt

SEQ ID NO: 462211 - DNA, 19 bp, Mus musculus
  siRNA target sequence for Myst4 (NM_017479.1,2009-2027).
gctctgccagcagaagtat

SEQ ID NO: 462212 - DNA, 19 bp, Mus musculus
  siRNA target sequence for Myst4 (NM_017479.1,2070-2088).
ggatttggacgctttctca

SEQ ID NO: 462213 - DNA, 19 bp, Mus musculus
  siRNA target sequence for Myst4 (NM_017479.1,2071-2089).
gatttggacgctttctcat

SEQ ID NO: 462214 - DNA, 19 bp, Mus musculus
  siRNA target sequence for Myst4 (NM_017479.1,2076-2094).
ggacgctttctcattgatt

SEQ ID NO: 462215 - DNA, 19 bp, Mus musculus
  siRNA target sequence for Myst4 (NM_017479.1,2079-2097).
cgctttctcattgatttca

SEQ ID NO: 462216 - DNA, 19 bp, Mus musculus
  siRNA target sequence for Myst4 (NM_017479.1,2325-2343).
ggcaggtttgtcatcatta

SEQ ID NO: 462217 - DNA, 19 bp, Mus musculus
  siRNA target sequence for Myst4 (NM_017479.1,2327-2345).
caggtttgtcatcattaga

SEQ ID NO: 462218 - DNA, 19 bp, Mus musculus
  siRNA target sequence for Myst4 (NM_017479.1,2389-2407).
gttcccgacccaatgaact

SEQ ID NO: 462219 - DNA, 19 bp, Mus musculus
  siRNA target sequence for Myst4 (NM_017479.1,2392-2410).
cccgacccaatgaacttga

SEQ ID NO: 462220 - DNA, 19 bp, Mus musculus
  siRNA target sequence for Myst4 (NM_017479.1,2406-2424).
cttgatccggagagtctaa

SEQ ID NO: 462221 - DNA, 19 bp, Mus musculus
  siRNA target sequence for Myst4 (NM_017479.1,2409-2427).
gatccggagagtctaagat

SEQ ID NO: 462222 - DNA, 19 bp, Mus musculus
  siRNA target sequence for Myst4 (NM_017479.1,2431-2449).
ccccaatgttaatttctaa

SEQ ID NO: 462223 - DNA, 19 bp, Mus musculus
  siRNA target sequence for Myst4 (NM_017479.1,2566-2584).
ggcaatcgtctgcaaaagt

SEQ ID NO: 462224 - DNA, 19 bp, Mus musculus
  siRNA target sequence for Myst4 (NM_017479.1,2567-2585).
gcaatcgtctgcaaaagta

SEQ ID NO: 462225 - DNA, 19 bp, Mus musculus
  siRNA target sequence for Myst4 (NM_017479.1,2635-2653).
gggagcgaggacagttgtt

SEQ ID NO: 462226 - DNA, 19 bp, Mus musculus
  siRNA target sequence for Myst4 (NM_017479.1,2636-2654).
ggagcgaggacagttgtta

SEQ ID NO: 462227 - DNA, 19 bp, Mus musculus
  siRNA target sequence for Myst4 (NM_017479.1,2752-2770).
ctccccctcggttgactaa

SEQ ID NO: 462228 - DNA, 19 bp, Mus musculus
  siRNA target sequence for Myst4 (NM_017479.1,2816-2834).
gaagaaaaggggtcgtaaa

SEQ ID NO: 462229 - DNA, 19 bp, Mus musculus
  siRNA target sequence for Myst4 (NM_017479.1,2881-2899).
cgacagaagtgctcaatga

SEQ ID NO: 462230 - DNA, 19 bp, Mus musculus
  siRNA target sequence for Myst4 (NM_017479.1,3048-3066).
ggggaagacaatcatttct

SEQ ID NO: 462231 - DNA, 19 bp, Mus musculus
  siRNA target sequence for Myst4 (NM_017479.1,3071-3089).
gaccgctgccctttgtaga

SEQ ID NO: 462232 - DNA, 19 bp, Mus musculus
  siRNA target sequence for Myst4 (NM_017479.1,3073-3091).
ccgctgccctttgtagaaa

SEQ ID NO: 462233 - DNA, 19 bp, Mus musculus
  siRNA target sequence for Myst4 (NM_017479.1,3414-3432).
cccgtgagtccacataaat

SEQ ID NO: 462234 - DNA, 19 bp, Mus musculus
  siRNA target sequence for Myst4 (NM_017479.1,3416-3434).
cgtgagtccacataaatca

SEQ ID NO: 462235 - DNA, 19 bp, Mus musculus
  siRNA target sequence for Myst4 (NM_017479.1,3555-3573).
gacctagatggtgctaaaa

SEQ ID NO: 462236 - DNA, 19 bp, Mus musculus
  siRNA target sequence for Myst4 (NM_017479.1,3557-3575).
cctagatggtgctaaaagt

SEQ ID NO: 462237 - DNA, 19 bp, Mus musculus
  siRNA target sequence for Myst4 (NM_017479.1,3558-3576).
ctagatggtgctaaaagta

SEQ ID NO: 462238 - DNA, 19 bp, Mus musculus
  siRNA target sequence for Myst4 (NM_017479.1,3846-3864).
ggtgttgatctcacaatgt

SEQ ID NO: 462239 - DNA, 19 bp, Mus musculus
  siRNA target sequence for Myst4 (NM_017479.1,3857-3875).
cacaatgtcctgtaacagt

SEQ ID NO: 462240 - DNA, 19 bp, Mus musculus
  siRNA target sequence for Myst4 (NM_017479.1,4008-4026).
gccgctgtggaaattgact

SEQ ID NO: 462241 - DNA, 19 bp, Mus musculus
  siRNA target sequence for Myst4 (NM_017479.1,4269-4287).
cctgccctagagaatagct

SEQ ID NO: 462242 - DNA, 19 bp, Mus musculus
  siRNA target sequence for Myst4 (NM_017479.1,4397-4415).
cgttgacagcggattcagt

SEQ ID NO: 462243 - DNA, 19 bp, Mus musculus
  siRNA target sequence for Myst4 (NM_017479.1,4478-4496).
catgggaggcagtatctgt

SEQ ID NO: 462244 - DNA, 19 bp, Mus musculus
  siRNA target sequence for Myst4 (NM_017479.1,4780-4798).
ccaacattggcttatatga

SEQ ID NO: 462245 - DNA, 19 bp, Mus musculus
  siRNA target sequence for Myst4 (NM_017479.1,4799-4817).
gcgaatgggtcaaagtgat

SEQ ID NO: 462246 - DNA, 19 bp, Mus musculus
  siRNA target sequence for Myst4 (NM_017479.1,4800-4818).
cgaatgggtcaaagtgatt

SEQ ID NO: 462247 - DNA, 19 bp, Mus musculus
  siRNA target sequence for Myst4 (NM_017479.1,4869-4887).
ctgcagcagttaactaata

SEQ ID NO: 462248 - DNA, 19 bp, Mus musculus
  siRNA target sequence for Myst4 (NM_017479.1,4871-4889).
gcagcagttaactaataca

SEQ ID NO: 462249 - DNA, 19 bp, Mus musculus
  siRNA target sequence for Myst4 (NM_017479.1,4882-4900).
ctaatacacttattgatca

SEQ ID NO: 462250 - DNA, 19 bp, Mus musculus
  siRNA target sequence for Myst4 (NM_017479.1,4888-4906).
cacttattgatcattcatt

SEQ ID NO: 462251 - DNA, 19 bp, Mus musculus
  siRNA target sequence for Myst4 (NM_017479.1,4941-4959).
gcaaacagtgcctctttgt

SEQ ID NO: 462252 - DNA, 19 bp, Mus musculus
  siRNA target sequence for Myst4 (NM_017479.1,4952-4970).
ctctttgtccacaccatta

SEQ ID NO: 462253 - DNA, 19 bp, Mus musculus
  siRNA target sequence for Myst4 (NM_017479.1,4961-4979).
cacaccattaagtaacaca

SEQ ID NO: 462254 - DNA, 19 bp, Mus musculus
  siRNA target sequence for Myst4 (NM_017479.1,5108-5126).
catggctgcatcaaatatt

SEQ ID NO: 462255 - DNA, 19 bp, Mus musculus
  siRNA target sequence for Myst4 (NM_017479.1,5172-5190).
ggccacgtctccatgagaa

SEQ ID NO: 462256 - DNA, 19 bp, Mus musculus
  siRNA target sequence for Myst4 (NM_017479.1,5346-5364).
gtcaactcggtgaacatga

SEQ ID NO: 462257 - DNA, 19 bp, Mus musculus
  siRNA target sequence for Myst4 (NM_017479.1,5353-5371).
cggtgaacatgaacatgaa

SEQ ID NO: 462258 - DNA, 19 bp, Mus musculus
  siRNA target sequence for Myst4 (NM_017479.1,5434-5452).
gcaaccacggctatatgaa

SEQ ID NO: 462259 - DNA, 19 bp, Mus musculus
  siRNA target sequence for Myst4 (NM_017479.1,5435-5453).
caaccacggctatatgaat

SEQ ID NO: 462260 - DNA, 19 bp, Mus musculus
  siRNA target sequence for Myst4 (NM_017479.1,5568-5586).
caccacggctacatgaaca

SEQ ID NO: 462261 - DNA, 19 bp, Mus musculus
  siRNA target sequence for N28178 (NM_172690.1,364-382).
ggaagctggacgatgacaa

SEQ ID NO: 462262 - DNA, 19 bp, Mus musculus
  siRNA target sequence for N28178 (NM_172690.1,365-383).
gaagctggacgatgacaaa

SEQ ID NO: 462263 - DNA, 19 bp, Mus musculus
  siRNA target sequence for N28178 (NM_172690.1,378-396).
gacaaacctccagatatct

SEQ ID NO: 462264 - DNA, 19 bp, Mus musculus
  siRNA target sequence for N28178 (NM_172690.1,653-671).
gacctttcagcggtgtaaa

SEQ ID NO: 462265 - DNA, 19 bp, Mus musculus
  siRNA target sequence for N28178 (NM_172690.1,655-673).
cctttcagcggtgtaaagt

SEQ ID NO: 462266 - DNA, 19 bp, Mus musculus
  siRNA target sequence for N28178 (NM_172690.1,828-846).
gagtggtccgacttcttgt

SEQ ID NO: 462267 - DNA, 19 bp, Mus musculus
  siRNA target sequence for N28178 (NM_172690.1,996-1014).
cggcattcttggttctgta

SEQ ID NO: 462268 - DNA, 19 bp, Mus musculus
  siRNA target sequence for N28178 (NM_172690.1,1055-1073).
ccatgttgggcctatagca

SEQ ID NO: 462269 - DNA, 19 bp, Mus musculus
  siRNA target sequence for N28178 (NM_172690.1,1156-1174).
ggcccaccttcctaagaga

SEQ ID NO: 462270 - DNA, 19 bp, Mus musculus
  siRNA target sequence for N28178 (NM_172690.1,1171-1189).
gagagaacgtcatctacat

SEQ ID NO: 462271 - DNA, 19 bp, Mus musculus
  siRNA target sequence for N28178 (NM_172690.1,1173-1191).
gagaacgtcatctacatct

SEQ ID NO: 462272 - DNA, 19 bp, Mus musculus
  siRNA target sequence for Nap1l1 (NM_015781.2,691-709).
cgacattgacaacaaagaa

SEQ ID NO: 462273 - DNA, 19 bp, Mus musculus
  siRNA target sequence for Nap1l1 (NM_015781.2,714-732).
ctgaacttgatcaagattt

SEQ ID NO: 462274 - DNA, 19 bp, Mus musculus
  siRNA target sequence for Nap1l1 (NM_015781.2,765-783).
cgggtgaagaaacaaaaat

SEQ ID NO: 462275 - DNA, 19 bp, Mus musculus
  siRNA target sequence for Nap1l1 (NM_015781.2,868-886).
cacaccaacaggatacatt

SEQ ID NO: 462276 - DNA, 19 bp, Mus musculus
  siRNA target sequence for Nap1l1 (NM_015781.2,872-890).
ccaacaggatacattgaaa

SEQ ID NO: 462277 - DNA, 19 bp, Mus musculus
  siRNA target sequence for Nap1l1 (NM_015781.2,892-910).
cttgcctaaggtagtcaaa

SEQ ID NO: 462278 - DNA, 19 bp, Mus musculus
  siRNA target sequence for Nap1l1 (NM_015781.2,895-913).
gcctaaggtagtcaaaaga

SEQ ID NO: 462279 - DNA, 19 bp, Mus musculus
  siRNA target sequence for Nap1l1 (NM_015781.2,955-973).
gatagaagccaaattctat

SEQ ID NO: 462280 - DNA, 19 bp, Mus musculus
  siRNA target sequence for Nap1l1 (NM_015781.2,1012-1030).
ctatcagcctttatttgat

SEQ ID NO: 462281 - DNA, 19 bp, Mus musculus
  siRNA target sequence for Nap1l1 (NM_015781.2,1033-1051).
gcgatttgagatcattaat

SEQ ID NO: 462282 - DNA, 19 bp, Mus musculus
  siRNA target sequence for Nap1l1 (NM_015781.2,1176-1194).
cgaaaggaattcctgaatt

SEQ ID NO: 462283 - DNA, 19 bp, Mus musculus
  siRNA target sequence for Nap1l1 (NM_015781.2,1234-1252).
catggttcaggaacatgat

SEQ ID NO: 462284 - DNA, 19 bp, Mus musculus
  siRNA target sequence for Nap1l1 (NM_015781.2,1267-1285).
gcacttgaaagatattaaa

SEQ ID NO: 462285 - DNA, 19 bp, Mus musculus
  siRNA target sequence for Nap1l1 (NM_015781.2,1305-1323).
gccagcctatgagttttgt

SEQ ID NO: 462286 - DNA, 19 bp, Mus musculus
  siRNA target sequence for Nap1l1 (NM_015781.2,1309-1327).
gcctatgagttttgtctta

SEQ ID NO: 462287 - DNA, 19 bp, Mus musculus
  siRNA target sequence for Nap1l1 (NM_015781.2,1367-1385).
gtgttaacaaagacttaca

SEQ ID NO: 462288 - DNA, 19 bp, Mus musculus
  siRNA target sequence for Nap1l1 (NM_015781.2,1391-1409).
cggtcagagccagatgatt

SEQ ID NO: 462289 - DNA, 19 bp, Mus musculus
  siRNA target sequence for Nap1l1 (NM_015781.2,1449-1467).
gtacagggtgccagataga

SEQ ID NO: 462290 - DNA, 19 bp, Mus musculus
  siRNA target sequence for Nap1l1 (NM_015781.2,1456-1474).
gtgccagatagattggaaa

SEQ ID NO: 462291 - DNA, 19 bp, Mus musculus
  siRNA target sequence for Nap1l1 (NM_015781.2,1458-1476).
gccagatagattggaaaaa

SEQ ID NO: 462292 - DNA, 19 bp, Mus musculus
  siRNA target sequence for Nap1l1 (NM_015781.2,1462-1480).
gatagattggaaaaaagga

SEQ ID NO: 462293 - DNA, 19 bp, Mus musculus
  siRNA target sequence for Nap1l1 (NM_015781.2,1536-1554).
cagttcgtactgtgactaa

SEQ ID NO: 462294 - DNA, 19 bp, Mus musculus
  siRNA target sequence for Nap1l1 (NM_015781.2,1563-1581).
ccaatgattctttctttaa

SEQ ID NO: 462295 - DNA, 19 bp, Mus musculus
  siRNA target sequence for Nap1l1 (NM_015781.2,1681-1699).
gcgcataatcccaagatca

SEQ ID NO: 462296 - DNA, 19 bp, Mus musculus
  siRNA target sequence for Nap1l1 (NM_015781.2,1798-1816).
ggaaaacgatccagactat

SEQ ID NO: 462297 - DNA, 19 bp, Mus musculus
  siRNA target sequence for Nap1l2 (NM_008671.1,335-353).
ctgaatcagtcgaccataa

SEQ ID NO: 462298 - DNA, 19 bp, Mus musculus
  siRNA target sequence for Nap1l2 (NM_008671.1,582-600).
ctcagaccgtccaaaagga

SEQ ID NO: 462299 - DNA, 19 bp, Mus musculus
  siRNA target sequence for Nap1l2 (NM_008671.1,598-616).
ggacttatcggttatcttt

SEQ ID NO: 462300 - DNA, 19 bp, Mus musculus
  siRNA target sequence for Nap1l2 (NM_008671.1,599-617).
gacttatcggttatctttt

SEQ ID NO: 462301 - DNA, 19 bp, Mus musculus
  siRNA target sequence for Nap1l2 (NM_008671.1,619-637).
gataccgatttcgttgaaa

SEQ ID NO: 462302 - DNA, 19 bp, Mus musculus
  siRNA target sequence for Nap1l2 (NM_008671.1,623-641).
ccgatttcgttgaaagtct

SEQ ID NO: 462303 - DNA, 19 bp, Mus musculus
  siRNA target sequence for Nap1l2 (NM_008671.1,638-656).
gtctcccagtgaaagttaa

SEQ ID NO: 462304 - DNA, 19 bp, Mus musculus
  siRNA target sequence for Nap1l2 (NM_008671.1,659-677).
gccgagtgctagctcttaa

SEQ ID NO: 462305 - DNA, 19 bp, Mus musculus
  siRNA target sequence for Nap1l2 (NM_008671.1,660-678).
ccgagtgctagctcttaaa

SEQ ID NO: 462306 - DNA, 19 bp, Mus musculus
  siRNA target sequence for Nap1l2 (NM_008671.1,661-679).
cgagtgctagctcttaaaa

SEQ ID NO: 462307 - DNA, 19 bp, Mus musculus
  siRNA target sequence for Nap1l2 (NM_008671.1,711-729).
caaattcctgagggaattt

SEQ ID NO: 462308 - DNA, 19 bp, Mus musculus
  siRNA target sequence for Nap1l2 (NM_008671.1,723-741).
ggaatttcatgacattgaa

SEQ ID NO: 462309 - DNA, 19 bp, Mus musculus
  siRNA target sequence for Nap1l2 (NM_008671.1,762-780).
ccaacccttactagaaaaa

SEQ ID NO: 462310 - DNA, 19 bp, Mus musculus
  siRNA target sequence for Nap1l2 (NM_008671.1,817-835).
gaagaggaatgtgagtata

SEQ ID NO: 462311 - DNA, 19 bp, Mus musculus
  siRNA target sequence for Nap1l2 (NM_008671.1,820-838).
gaggaatgtgagtataaat

SEQ ID NO: 462312 - DNA, 19 bp, Mus musculus
  siRNA target sequence for Nap1l2 (NM_008671.1,839-857).
cggactgtgaggactattt

SEQ ID NO: 462313 - DNA, 19 bp, Mus musculus
  siRNA target sequence for Nap1l2 (NM_008671.1,901-919).
gacggtatggtgcatgaat

SEQ ID NO: 462314 - DNA, 19 bp, Mus musculus
  siRNA target sequence for Nap1l2 (NM_008671.1,905-923).
gtatggtgcatgaatacgt

SEQ ID NO: 462315 - DNA, 19 bp, Mus musculus
  siRNA target sequence for Nap1l2 (NM_008671.1,937-955).
ggttatgaggactgttatt

SEQ ID NO: 462316 - DNA, 19 bp, Mus musculus
  siRNA target sequence for Nap1l2 (NM_008671.1,943-961).
gaggactgttattatgatt

SEQ ID NO: 462317 - DNA, 19 bp, Mus musculus
  siRNA target sequence for Nap1l2 (NM_008671.1,1010-1028).
ccggaggagaagaggttaa

SEQ ID NO: 462318 - DNA, 19 bp, Mus musculus
  siRNA target sequence for Nap1l2 (NM_008671.1,1013-1031).
gaggagaagaggttaacga

SEQ ID NO: 462319 - DNA, 19 bp, Mus musculus
  siRNA target sequence for Nap1l2 (NM_008671.1,1045-1063).
gggattccggatttttggt

SEQ ID NO: 462320 - DNA, 19 bp, Mus musculus
  siRNA target sequence for Nap1l2 (NM_008671.1,1087-1105).
gcactcactcctatgatta

SEQ ID NO: 462321 - DNA, 19 bp, Mus musculus
  siRNA target sequence for Nap1l2 (NM_008671.1,1088-1106).
cactcactcctatgattaa

SEQ ID NO: 462322 - DNA, 19 bp, Mus musculus
  siRNA target sequence for Nap1l2 (NM_008671.1,1090-1108).
ctcactcctatgattaaga

SEQ ID NO: 462323 - DNA, 19 bp, Mus musculus
  siRNA target sequence for Nap1l2 (NM_008671.1,1094-1112).
ctcctatgattaagaaata

SEQ ID NO: 462324 - DNA, 19 bp, Mus musculus
  siRNA target sequence for Nap1l2 (NM_008671.1,1097-1115).
ctatgattaagaaatatga

SEQ ID NO: 462325 - DNA, 19 bp, Mus musculus
  siRNA target sequence for Nap1l2 (NM_008671.1,1131-1149).
gctgctgacagatattaaa

SEQ ID NO: 462326 - DNA, 19 bp, Mus musculus
  siRNA target sequence for Nap1l2 (NM_008671.1,1198-1216).
cacttcaagcccaatgaat

SEQ ID NO: 462327 - DNA, 19 bp, Mus musculus
  siRNA target sequence for Nap1l2 (NM_008671.1,1314-1332).
cactggctgcgacatagat

SEQ ID NO: 462328 - DNA, 19 bp, Mus musculus
  siRNA target sequence for Nap1l2 (NM_008671.1,1334-1352).
ggaacgaagggaagaatgt

SEQ ID NO: 462329 - DNA, 19 bp, Mus musculus
  siRNA target sequence for Nap1l2 (NM_008671.1,1457-1475).
ctcatgggatcagcttaaa

SEQ ID NO: 462330 - DNA, 19 bp, Mus musculus
  siRNA target sequence for Nap1l2 (NM_008671.1,1510-1528).
cataatctgcgtacttaca

SEQ ID NO: 462331 - DNA, 19 bp, Mus musculus
  siRNA target sequence for Nap1l2 (NM_008671.1,1534-1552).
ccaagatcagtgttatttt

SEQ ID NO: 462332 - DNA, 19 bp, Mus musculus
  siRNA target sequence for Nap1l2 (NM_008671.1,1554-1572).
ctcaggagatgcacttgaa

SEQ ID NO: 462333 - DNA, 19 bp, Mus musculus
  siRNA target sequence for Nap1l2 (NM_008671.1,1585-1603).
ggtgtagttagggaagtta

SEQ ID NO: 462334 - DNA, 19 bp, Mus musculus
  siRNA target sequence for Nap1l2 (NM_008671.1,1596-1614).
ggaagttaatgacgaaata

SEQ ID NO: 462335 - DNA, 19 bp, Mus musculus
  siRNA target sequence for Nap1l2 (NM_008671.1,1597-1615).
gaagttaatgacgaaatat

SEQ ID NO: 462336 - DNA, 19 bp, Mus musculus
  siRNA target sequence for Nap1l3 (NM_138742.1,371-389).
cagaagcggatcctaaaat

SEQ ID NO: 462337 - DNA, 19 bp, Mus musculus
  siRNA target sequence for Nap1l3 (NM_138742.1,477-495).
ctctagcagtaccaatagt

SEQ ID NO: 462338 - DNA, 19 bp, Mus musculus
  siRNA target sequence for Nap1l3 (NM_138742.1,616-634).
catttgaaccgaaagaaga

SEQ ID NO: 462339 - DNA, 19 bp, Mus musculus
  siRNA target sequence for Nap1l3 (NM_138742.1,667-685).
cgtccctccgggaaacttt

SEQ ID NO: 462340 - DNA, 19 bp, Mus musculus
  siRNA target sequence for Nap1l3 (NM_138742.1,668-686).
gtccctccgggaaactttt

SEQ ID NO: 462341 - DNA, 19 bp, Mus musculus
  siRNA target sequence for Nap1l3 (NM_138742.1,676-694).
gggaaacttttcttggata

SEQ ID NO: 462342 - DNA, 19 bp, Mus musculus
  siRNA target sequence for Nap1l3 (NM_138742.1,697-715).
ctgccccaagccgtaagaa

SEQ ID NO: 462343 - DNA, 19 bp, Mus musculus
  siRNA target sequence for Nap1l3 (NM_138742.1,699-717).
gccccaagccgtaagaaat

SEQ ID NO: 462344 - DNA, 19 bp, Mus musculus
  siRNA target sequence for Nap1l3 (NM_138742.1,719-737).
gggtgcaggcactcagaaa

SEQ ID NO: 462345 - DNA, 19 bp, Mus musculus
  siRNA target sequence for Nap1l3 (NM_138742.1,720-738).
ggtgcaggcactcagaaat

SEQ ID NO: 462346 - DNA, 19 bp, Mus musculus
  siRNA target sequence for Nap1l3 (NM_138742.1,721-739).
gtgcaggcactcagaaata

SEQ ID NO: 462347 - DNA, 19 bp, Mus musculus
  siRNA target sequence for Nap1l3 (NM_138742.1,728-746).
cactcagaaatattcagaa

SEQ ID NO: 462348 - DNA, 19 bp, Mus musculus
  siRNA target sequence for Nap1l3 (NM_138742.1,771-789).
gttcttaagggcaattcat

SEQ ID NO: 462349 - DNA, 19 bp, Mus musculus
  siRNA target sequence for Nap1l3 (NM_138742.1,774-792).
cttaagggcaattcatgat

SEQ ID NO: 462350 - DNA, 19 bp, Mus musculus
  siRNA target sequence for Nap1l3 (NM_138742.1,779-797).
gggcaattcatgatcttga

SEQ ID NO: 462351 - DNA, 19 bp, Mus musculus
  siRNA target sequence for Nap1l3 (NM_138742.1,816-834).
caataagcctctatatgat

SEQ ID NO: 462352 - DNA, 19 bp, Mus musculus
  siRNA target sequence for Nap1l3 (NM_138742.1,837-855).
gcgttttcagatcataaat

SEQ ID NO: 462353 - DNA, 19 bp, Mus musculus
  siRNA target sequence for Nap1l3 (NM_138742.1,890-908).
ggaattcagaagaagagtt

SEQ ID NO: 462354 - DNA, 19 bp, Mus musculus
  siRNA target sequence for Nap1l3 (NM_138742.1,1189-1207).
gcagactctacggattgta

SEQ ID NO: 462355 - DNA, 19 bp, Mus musculus
  siRNA target sequence for Nap1l3 (NM_138742.1,1190-1208).
cagactctacggattgtat

SEQ ID NO: 462356 - DNA, 19 bp, Mus musculus
  siRNA target sequence for Nap1l3 (NM_138742.1,1194-1212).
ctctacggattgtatagat

SEQ ID NO: 462357 - DNA, 19 bp, Mus musculus
  siRNA target sequence for Nap1l3 (NM_138742.1,1196-1214).
ctacggattgtatagatat

SEQ ID NO: 462358 - DNA, 19 bp, Mus musculus
  siRNA target sequence for Nap1l3 (NM_138742.1,1371-1389).
ggctcgaaagggaaaacct

SEQ ID NO: 462359 - DNA, 19 bp, Mus musculus
  siRNA target sequence for Nap1l3 (NM_138742.1,1372-1390).
gctcgaaagggaaaaccta

SEQ ID NO: 462360 - DNA, 19 bp, Mus musculus
  siRNA target sequence for Nap1l3 (NM_138742.1,1373-1391).
ctcgaaagggaaaacctaa

SEQ ID NO: 462361 - DNA, 19 bp, Mus musculus
  siRNA target sequence for Nap1l3 (NM_138742.1,1452-1470).
gcttgggcctatgattcaa

SEQ ID NO: 462362 - DNA, 19 bp, Mus musculus
  siRNA target sequence for Nap1l3 (NM_138742.1,1453-1471).
cttgggcctatgattcaaa

SEQ ID NO: 462363 - DNA, 19 bp, Mus musculus
  siRNA target sequence for Nap1l3 (NM_138742.1,1456-1474).
gggcctatgattcaaaagt

SEQ ID NO: 462364 - DNA, 19 bp, Mus musculus
  siRNA target sequence for Nap1l3 (NM_138742.1,1485-1503).
cattttgaagttcttatct

SEQ ID NO: 462365 - DNA, 19 bp, Mus musculus
  siRNA target sequence for Nap1l3 (NM_138742.1,1533-1551).
ccagcctattggttacact

SEQ ID NO: 462366 - DNA, 19 bp, Mus musculus
  siRNA target sequence for Nap1l3 (NM_138742.1,1534-1552).
cagcctattggttacactt

SEQ ID NO: 462367 - DNA, 19 bp, Mus musculus
  siRNA target sequence for Nap1l3 (NM_138742.1,1536-1554).
gcctattggttacactttt

SEQ ID NO: 462368 - DNA, 19 bp, Mus musculus
  siRNA target sequence for Nap1l3 (NM_138742.1,1571-1589).
ctaacccatacttcagaaa

SEQ ID NO: 462369 - DNA, 19 bp, Mus musculus
  siRNA target sequence for Nap1l3 (NM_138742.1,1599-1617).
gatgaagacatacataata

SEQ ID NO: 462370 - DNA, 19 bp, Mus musculus
  siRNA target sequence for Nap1l3 (NM_138742.1,1619-1637).
ggtcaaaaccagatcacta

SEQ ID NO: 462371 - DNA, 19 bp, Mus musculus
  siRNA target sequence for Nap1l3 (NM_138742.1,1655-1673).
ggggatgggaaattgaaga

SEQ ID NO: 462372 - DNA, 19 bp, Mus musculus
  siRNA target sequence for Nap1l3 (NM_138742.1,1695-1713).
ctggagacgaggaaaagat

SEQ ID NO: 462373 - DNA, 19 bp, Mus musculus
  siRNA target sequence for Nap1l3 (NM_138742.1,1731-1749).
ccggagtcgccctggtatt

SEQ ID NO: 462374 - DNA, 19 bp, Mus musculus
  siRNA target sequence for Nap1l3 (NM_138742.1,1732-1750).
cggagtcgccctggtatta

SEQ ID NO: 462375 - DNA, 19 bp, Mus musculus
  siRNA target sequence for Nap1l3 (NM_138742.1,1734-1752).
gagtcgccctggtattaca

SEQ ID NO: 462376 - DNA, 19 bp, Mus musculus
  siRNA target sequence for Nap1l3 (NM_138742.1,1770-1788).
gccaagagtggttcctaat

SEQ ID NO: 462377 - DNA, 19 bp, Mus musculus
  siRNA target sequence for Nap1l3 (NM_138742.1,1783-1801).
cctaatgcatccttcttca

SEQ ID NO: 462378 - DNA, 19 bp, Mus musculus
  siRNA target sequence for Nap1l3 (NM_138742.1,1789-1807).
gcatccttcttcaatttct

SEQ ID NO: 462379 - DNA, 19 bp, Mus musculus
  siRNA target sequence for Nap1l3 (NM_138742.1,1875-1893).
ctttgagattggtcaaatt

SEQ ID NO: 462380 - DNA, 19 bp, Mus musculus
  siRNA target sequence for Nap1l3 (NM_138742.1,1881-1899).
gattggtcaaattttgcat

SEQ ID NO: 462381 - DNA, 19 bp, Mus musculus
  siRNA target sequence for Nap1l3 (NM_138742.1,1885-1903).
ggtcaaattttgcatgata

SEQ ID NO: 462382 - DNA, 19 bp, Mus musculus
  siRNA target sequence for Nap1l3 (NM_138742.1,1906-1924).
gtcatcttgaagtcaatct

SEQ ID NO: 462383 - DNA, 19 bp, Mus musculus
  siRNA target sequence for Nap1l3 (NM_138742.1,1959-1977).
ccatgacttcagggattat

SEQ ID NO: 462384 - DNA, 19 bp, Mus musculus
  siRNA target sequence for Nap1l3 (NM_138742.1,1963-1981).
gacttcagggattatggaa

SEQ ID NO: 462385 - DNA, 19 bp, Mus musculus
  siRNA target sequence for Nap1l3 (NM_138742.1,1979-1997).
gaaataggaagtactacaa

SEQ ID NO: 462386 - DNA, 19 bp, Mus musculus
  siRNA target sequence for Nap1l4 (NM_008672.1,118-136).
gctaaaaatgccagtaata

SEQ ID NO: 462387 - DNA, 19 bp, Mus musculus
  siRNA target sequence for Nap1l4 (NM_008672.1,210-228).
ctctcacactccttctagt

SEQ ID NO: 462388 - DNA, 19 bp, Mus musculus
  siRNA target sequence for Nap1l4 (NM_008672.1,214-232).
cacactccttctagttaca

SEQ ID NO: 462389 - DNA, 19 bp, Mus musculus
  siRNA target sequence for Nap1l4 (NM_008672.1,231-249).
catagaaactttacctaaa

SEQ ID NO: 462390 - DNA, 19 bp, Mus musculus
  siRNA target sequence for Nap1l4 (NM_008672.1,296-314).
gtgcgcacatagaagctaa

SEQ ID NO: 462391 - DNA, 19 bp, Mus musculus
  siRNA target sequence for Nap1l4 (NM_008672.1,301-319).
cacatagaagctaagttct

SEQ ID NO: 462392 - DNA, 19 bp, Mus musculus
  siRNA target sequence for Nap1l4 (NM_008672.1,356-374).
ccttgtaccagcctctatt

SEQ ID NO: 462393 - DNA, 19 bp, Mus musculus
  siRNA target sequence for Nap1l4 (NM_008672.1,653-671).
cagaccctggacaacctat

SEQ ID NO: 462394 - DNA, 19 bp, Mus musculus
  siRNA target sequence for Nap1l4 (NM_008672.1,727-745).
ctgacgaaaacgtacaaga

SEQ ID NO: 462395 - DNA, 19 bp, Mus musculus
  siRNA target sequence for Nap1l4 (NM_008672.1,731-749).
cgaaaacgtacaagatgaa

SEQ ID NO: 462396 - DNA, 19 bp, Mus musculus
  siRNA target sequence for Nap1l4 (NM_008672.1,762-780).
caaggccgacccgttttct

SEQ ID NO: 462397 - DNA, 19 bp, Mus musculus
  siRNA target sequence for Nap1l4 (NM_008672.1,802-820).
gactgtgatgggtgtacaa

SEQ ID NO: 462398 - DNA, 19 bp, Mus musculus
  siRNA target sequence for Nap1l4 (NM_008672.1,804-822).
ctgtgatgggtgtacaata

SEQ ID NO: 462399 - DNA, 19 bp, Mus musculus
  siRNA target sequence for Nap1l4 (NM_008672.1,806-824).
gtgatgggtgtacaataga

SEQ ID NO: 462400 - DNA, 19 bp, Mus musculus
  siRNA target sequence for Nap1l4 (NM_008672.1,808-826).
gatgggtgtacaatagact

SEQ ID NO: 462401 - DNA, 19 bp, Mus musculus
  siRNA target sequence for Nap1l4 (NM_008672.1,920-938).
ccaatgagtccttcttcaa

SEQ ID NO: 462402 - DNA, 19 bp, Mus musculus
  siRNA target sequence for Ncor1 (NM_011308.1,178-196).
cttcgcactcggttcagta

SEQ ID NO: 462403 - DNA, 19 bp, Mus musculus
  siRNA target sequence for Ncor1 (NM_011308.1,529-547).
ggtcttctgccaatgctaa

SEQ ID NO: 462404 - DNA, 19 bp, Mus musculus
  siRNA target sequence for Ncor1 (NM_011308.1,556-574).
cggcatttggagtcaaaca

SEQ ID NO: 462405 - DNA, 19 bp, Mus musculus
  siRNA target sequence for Ncor1 (NM_011308.1,607-625).
catgcggagatgatcagaa

SEQ ID NO: 462406 - DNA, 19 bp, Mus musculus
  siRNA target sequence for Ncor1 (NM_011308.1,973-991).
ggaaaaaactcattttatt

SEQ ID NO: 462407 - DNA, 19 bp, Mus musculus
  siRNA target sequence for Ncor1 (NM_011308.1,1124-1142).
caaaacaagggaatactat

SEQ ID NO: 462408 - DNA, 19 bp, Mus musculus
  siRNA target sequence for Ncor1 (NM_011308.1,1148-1166).
gcagtttccagaaattcga

SEQ ID NO: 462409 - DNA, 19 bp, Mus musculus
  siRNA target sequence for Ncor1 (NM_011308.1,1149-1167).
cagtttccagaaattcgaa

SEQ ID NO: 462410 - DNA, 19 bp, Mus musculus
  siRNA target sequence for Ncor1 (NM_011308.1,1237-1255).
ctaggagtgagcatgagat

SEQ ID NO: 462411 - DNA, 19 bp, Mus musculus
  siRNA target sequence for Ncor1 (NM_011308.1,1253-1271).
gatttctgaaattattgat

SEQ ID NO: 462412 - DNA, 19 bp, Mus musculus
  siRNA target sequence for Ncor1 (NM_011308.1,1307-1325).
gcgtcagctttctgtgatt

SEQ ID NO: 462413 - DNA, 19 bp, Mus musculus
  siRNA target sequence for Ncor1 (NM_011308.1,1318-1336).
ctgtgattccacctatgat

SEQ ID NO: 462414 - DNA, 19 bp, Mus musculus
  siRNA target sequence for Ncor1 (NM_011308.1,1320-1338).
gtgattccacctatgatgt

SEQ ID NO: 462415 - DNA, 19 bp, Mus musculus
  siRNA target sequence for Ncor1 (NM_011308.1,1347-1365).
gaacaaagaagggtcaaat

SEQ ID NO: 462416 - DNA, 19 bp, Mus musculus
  siRNA target sequence for Ncor1 (NM_011308.1,1357-1375).
gggtcaaattcatcaatat

SEQ ID NO: 462417 - DNA, 19 bp, Mus musculus
  siRNA target sequence for Ncor1 (NM_011308.1,1392-1410).
gatccaatgaaggtttata

SEQ ID NO: 462418 - DNA, 19 bp, Mus musculus
  siRNA target sequence for Ncor1 (NM_011308.1,1483-1501).
caaaaaactttggactaat

SEQ ID NO: 462419 - DNA, 19 bp, Mus musculus
  siRNA target sequence for Ncor1 (NM_011308.1,1523-1541).
gagtgttcctgattgtgtt

SEQ ID NO: 462420 - DNA, 19 bp, Mus musculus
  siRNA target sequence for Ncor1 (NM_011308.1,1580-1598).
ggccctcgtgagaaggaat

SEQ ID NO: 462421 - DNA, 19 bp, Mus musculus
  siRNA target sequence for Ncor1 (NM_011308.1,1581-1599).
gccctcgtgagaaggaatt

SEQ ID NO: 462422 - DNA, 19 bp, Mus musculus
  siRNA target sequence for Ncor1 (NM_011308.1,1582-1600).
ccctcgtgagaaggaatta

SEQ ID NO: 462423 - DNA, 19 bp, Mus musculus
  siRNA target sequence for Ncor1 (NM_011308.1,1583-1601).
cctcgtgagaaggaattat

SEQ ID NO: 462424 - DNA, 19 bp, Mus musculus
  siRNA target sequence for Ncor1 (NM_011308.1,1586-1604).
cgtgagaaggaattatgga

SEQ ID NO: 462425 - DNA, 19 bp, Mus musculus
  siRNA target sequence for Ncor1 (NM_011308.1,1633-1651).
cccgtccctcacaagaaga

SEQ ID NO: 462426 - DNA, 19 bp, Mus musculus
  siRNA target sequence for Ncor1 (NM_011308.1,1635-1653).
cgtccctcacaagaagaaa

SEQ ID NO: 462427 - DNA, 19 bp, Mus musculus
  siRNA target sequence for Ncor1 (NM_011308.1,1869-1887).
gtcaccaggtcgatgacaa

SEQ ID NO: 462428 - DNA, 19 bp, Mus musculus
  siRNA target sequence for Ncor1 (NM_011308.1,1874-1892).
caggtcgatgacaagtgaa

SEQ ID NO: 462429 - DNA, 19 bp, Mus musculus
  siRNA target sequence for Ncor1 (NM_011308.1,1977-1995).
cctgttgagacttcaagat

SEQ ID NO: 462430 - DNA, 19 bp, Mus musculus
  siRNA target sequence for Ncor1 (NM_011308.1,2053-2071).
gggcagccattgctaaaat

SEQ ID NO: 462431 - DNA, 19 bp, Mus musculus
  siRNA target sequence for Ncor1 (NM_011308.1,2056-2074).
cagccattgctaaaatggt

SEQ ID NO: 462432 - DNA, 19 bp, Mus musculus
  siRNA target sequence for Ncor1 (NM_011308.1,2065-2083).
ctaaaatggtgggaactaa

SEQ ID NO: 462433 - DNA, 19 bp, Mus musculus
  siRNA target sequence for Ncor1 (NM_011308.1,2091-2109).
gcccagtgcaaaaacttct

SEQ ID NO: 462434 - DNA, 19 bp, Mus musculus
  siRNA target sequence for Ncor1 (NM_011308.1,2094-2112).
cagtgcaaaaacttctatt

SEQ ID NO: 462435 - DNA, 19 bp, Mus musculus
  siRNA target sequence for Ncor1 (NM_011308.1,2108-2126).
ctattttaactataaaaga

SEQ ID NO: 462436 - DNA, 19 bp, Mus musculus
  siRNA target sequence for Ncor1 (NM_011308.1,2125-2143).
gacggcataatcttgacaa

SEQ ID NO: 462437 - DNA, 19 bp, Mus musculus
  siRNA target sequence for Ncor1 (NM_011308.1,2130-2148).
cataatcttgacaaccttt

SEQ ID NO: 462438 - DNA, 19 bp, Mus musculus
  siRNA target sequence for Ncor1 (NM_011308.1,2292-2310).
gaaggtgctgaaaatagtt

SEQ ID NO: 462439 - DNA, 19 bp, Mus musculus
  siRNA target sequence for Ncor1 (NM_011308.1,2330-2348).
ctctccttcaccagttgaa

SEQ ID NO: 462440 - DNA, 19 bp, Mus musculus
  siRNA target sequence for Ncor1 (NM_011308.1,2639-2657).
gcaggtaccagaaaatact

SEQ ID NO: 462441 - DNA, 19 bp, Mus musculus
  siRNA target sequence for Ncor1 (NM_011308.1,2714-2732).
gacagaggctagagatgaa

SEQ ID NO: 462442 - DNA, 19 bp, Mus musculus
  siRNA target sequence for Ncor1 (NM_011308.1,2880-2898).
cctcctggatctatcctaa

SEQ ID NO: 462443 - DNA, 19 bp, Mus musculus
  siRNA target sequence for Ncor1 (NM_011308.1,2881-2899).
ctcctggatctatcctaat

SEQ ID NO: 462444 - DNA, 19 bp, Mus musculus
  siRNA target sequence for Ncor1 (NM_011308.1,2883-2901).
cctggatctatcctaatct

SEQ ID NO: 462445 - DNA, 19 bp, Mus musculus
  siRNA target sequence for Ncor1 (NM_011308.1,2886-2904).
ggatctatcctaatctcat

SEQ ID NO: 462446 - DNA, 19 bp, Mus musculus
  siRNA target sequence for Ncor1 (NM_011308.1,2895-2913).
ctaatctcatcccctatta

SEQ ID NO: 462447 - DNA, 19 bp, Mus musculus
  siRNA target sequence for Ncor1 (NM_011308.1,2900-2918).
ctcatcccctattaaacca

SEQ ID NO: 462448 - DNA, 19 bp, Mus musculus
  siRNA target sequence for Ncor1 (NM_011308.1,2902-2920).
catcccctattaaaccaaa

SEQ ID NO: 462449 - DNA, 19 bp, Mus musculus
  siRNA target sequence for Ncor1 (NM_011308.1,2977-2995).
cttgcactccatgtaatat

SEQ ID NO: 462450 - DNA, 19 bp, Mus musculus
  siRNA target sequence for Ncor1 (NM_011308.1,2981-2999).
cactccatgtaatatacca

SEQ ID NO: 462451 - DNA, 19 bp, Mus musculus
  siRNA target sequence for Ncor1 (NM_011308.1,3027-3045).
ctttaccaacggcacatta

SEQ ID NO: 462452 - DNA, 19 bp, Mus musculus
  siRNA target sequence for Ncor1 (NM_011308.1,3178-3196).
ctgctccgcatcaagtgat

SEQ ID NO: 462453 - DNA, 19 bp, Mus musculus
  siRNA target sequence for Ncor1 (NM_011308.1,3180-3198).
gctccgcatcaagtgataa

SEQ ID NO: 462454 - DNA, 19 bp, Mus musculus
  siRNA target sequence for Ncor1 (NM_011308.1,3183-3201).
ccgcatcaagtgataacta

SEQ ID NO: 462455 - DNA, 19 bp, Mus musculus
  siRNA target sequence for Ncor1 (NM_011308.1,3184-3202).
cgcatcaagtgataactaa

SEQ ID NO: 462456 - DNA, 19 bp, Mus musculus
  siRNA target sequence for Ncor1 (NM_011308.1,3257-3275).
cctcatcccatcatctaaa

SEQ ID NO: 462457 - DNA, 19 bp, Mus musculus
  siRNA target sequence for Ncor1 (NM_011308.1,3341-3359).
cacttacttgtcttctcat

SEQ ID NO: 462458 - DNA, 19 bp, Mus musculus
  siRNA target sequence for Ncor1 (NM_011308.1,3447-3465).
gctcctttgacctacatca

SEQ ID NO: 462459 - DNA, 19 bp, Mus musculus
  siRNA target sequence for Ncor1 (NM_011308.1,3499-3517).
cacaacctgagggtttatt

SEQ ID NO: 462460 - DNA, 19 bp, Mus musculus
  siRNA target sequence for Ncor1 (NM_011308.1,3790-3808).
gcaaaagtggacatatctt

SEQ ID NO: 462461 - DNA, 19 bp, Mus musculus
  siRNA target sequence for Ncor1 (NM_011308.1,3796-3814).
gtggacatatcttatcata

SEQ ID NO: 462462 - DNA, 19 bp, Mus musculus
  siRNA target sequence for Ncor1 (NM_011308.1,3799-3817).
gacatatcttatcatatga

SEQ ID NO: 462463 - DNA, 19 bp, Mus musculus
  siRNA target sequence for Ncor1 (NM_011308.1,3842-3860).
gactcggagtccaagaaca

SEQ ID NO: 462464 - DNA, 19 bp, Mus musculus
  siRNA target sequence for Ncor1 (NM_011308.1,3951-3969).
cctttagagggtctgatat

SEQ ID NO: 462465 - DNA, 19 bp, Mus musculus
  siRNA target sequence for Ncor1 (NM_011308.1,3985-4003).
gggggagccctcattctga

SEQ ID NO: 462466 - DNA, 19 bp, Mus musculus
  siRNA target sequence for Ncor1 (NM_011308.1,3994-4012).
ctcattctgacctcaaaga

SEQ ID NO: 462467 - DNA, 19 bp, Mus musculus
  siRNA target sequence for Ncor1 (NM_011308.1,4070-4088).
ctttgaggacggccttaaa

SEQ ID NO: 462468 - DNA, 19 bp, Mus musculus
  siRNA target sequence for Ncor1 (NM_011308.1,4117-4135).
ctcccatccgagcatttga

SEQ ID NO: 462469 - DNA, 19 bp, Mus musculus
  siRNA target sequence for Ncor1 (NM_011308.1,4153-4171).
gaaaaccatacgatggtat

SEQ ID NO: 462470 - DNA, 19 bp, Mus musculus
  siRNA target sequence for Ncor1 (NM_011308.1,4168-4186).
gtatcaccaccatcaaaga

SEQ ID NO: 462471 - DNA, 19 bp, Mus musculus
  siRNA target sequence for Ncor1 (NM_011308.1,4206-4224).
gaaatcccacggcaagata

SEQ ID NO: 462472 - DNA, 19 bp, Mus musculus
  siRNA target sequence for Ncor1 (NM_011308.1,4211-4229).
cccacggcaagatattcta

SEQ ID NO: 462473 - DNA, 19 bp, Mus musculus
  siRNA target sequence for Ncor1 (NM_011308.1,4212-4230).
ccacggcaagatattctaa

SEQ ID NO: 462474 - DNA, 19 bp, Mus musculus
  siRNA target sequence for Ncor1 (NM_011308.1,4265-4283).
gagcacgaggccaataatt

SEQ ID NO: 462475 - DNA, 19 bp, Mus musculus
  siRNA target sequence for Ncor1 (NM_011308.1,4267-4285).
gcacgaggccaataattga

SEQ ID NO: 462476 - DNA, 19 bp, Mus musculus
  siRNA target sequence for Ncor1 (NM_011308.1,4301-4319).
gggcacaccaataaaattt

SEQ ID NO: 462477 - DNA, 19 bp, Mus musculus
  siRNA target sequence for Ncor1 (NM_011308.1,4322-4340).
caacaactcaggtcaatca

SEQ ID NO: 462478 - DNA, 19 bp, Mus musculus
  siRNA target sequence for Ncor1 (NM_011308.1,4333-4351).
gtcaatcagctatcaaaca

SEQ ID NO: 462479 - DNA, 19 bp, Mus musculus
  siRNA target sequence for Ncor1 (NM_011308.1,4350-4368).
cacaatgtgaagtccttaa

SEQ ID NO: 462480 - DNA, 19 bp, Mus musculus
  siRNA target sequence for Ncor1 (NM_011308.1,4370-4388).
cacagggcctagcaaacta

SEQ ID NO: 462481 - DNA, 19 bp, Mus musculus
  siRNA target sequence for Ncor1 (NM_011308.1,4418-4436).
gaacataaaagtagtagaa

SEQ ID NO: 462482 - DNA, 19 bp, Mus musculus
  siRNA target sequence for Ncor1 (NM_011308.1,4624-4642).
gaggctcccccatgatgaa

SEQ ID NO: 462483 - DNA, 19 bp, Mus musculus
  siRNA target sequence for Ncor1 (NM_011308.1,4626-4644).
ggctcccccatgatgaaca

SEQ ID NO: 462484 - DNA, 19 bp, Mus musculus
  siRNA target sequence for Ncor1 (NM_011308.1,4637-4655).
gatgaacagaacttctgat

SEQ ID NO: 462485 - DNA, 19 bp, Mus musculus
  siRNA target sequence for Ncor1 (NM_011308.1,4667-4685).
caagtctgccagtcatgaa

SEQ ID NO: 462486 - DNA, 19 bp, Mus musculus
  siRNA target sequence for Ncor1 (NM_011308.1,4763-4781).
gagtcacagcccatttgat

SEQ ID NO: 462487 - DNA, 19 bp, Mus musculus
  siRNA target sequence for Ncor1 (NM_011308.1,4798-4816).
gcgctgcaggagaggttta

SEQ ID NO: 462488 - DNA, 19 bp, Mus musculus
  siRNA target sequence for Ncor1 (NM_011308.1,4799-4817).
cgctgcaggagaggtttat

SEQ ID NO: 462489 - DNA, 19 bp, Mus musculus
  siRNA target sequence for Ncor1 (NM_011308.1,4845-4863).
ccagctatgccctttcaca

SEQ ID NO: 462490 - DNA, 19 bp, Mus musculus
  siRNA target sequence for Ncor1 (NM_011308.1,4856-4874).
ctttcacagggctttggat

SEQ ID NO: 462491 - DNA, 19 bp, Mus musculus
  siRNA target sequence for Ncor1 (NM_011308.1,4943-4961).
ctatgcaatggagaataca

SEQ ID NO: 462492 - DNA, 19 bp, Mus musculus
  siRNA target sequence for Ncor1 (NM_011308.1,4965-4983).
cagacaatcctcaacgatt

SEQ ID NO: 462493 - DNA, 19 bp, Mus musculus
  siRNA target sequence for Ncor1 (NM_011308.1,4969-4987).
caatcctcaacgattacat

SEQ ID NO: 462494 - DNA, 19 bp, Mus musculus
  siRNA target sequence for Ncor1 (NM_011308.1,4974-4992).
ctcaacgattacattacct

SEQ ID NO: 462495 - DNA, 19 bp, Mus musculus
  siRNA target sequence for Ncor1 (NM_011308.1,5074-5092).
cagctacaagaggaatcat

SEQ ID NO: 462496 - DNA, 19 bp, Mus musculus
  siRNA target sequence for Ncor1 (NM_011308.1,5101-5119).
ccaatatgcctccaacaat

SEQ ID NO: 462497 - DNA, 19 bp, Mus musculus
  siRNA target sequence for Ncor1 (NM_011308.1,5159-5177).
ggacaggatcacgtatatt

SEQ ID NO: 462498 - DNA, 19 bp, Mus musculus
  siRNA target sequence for Ncor1 (NM_011308.1,5178-5196).
cctggtacacaggttactt

SEQ ID NO: 462499 - DNA, 19 bp, Mus musculus
  siRNA target sequence for Ncor1 (NM_011308.1,5179-5197).
ctggtacacaggttacttt

SEQ ID NO: 462500 - DNA, 19 bp, Mus musculus
  siRNA target sequence for Ncor1 (NM_011308.1,5375-5393).
cctacgaccaggttcagaa

SEQ ID NO: 462501 - DNA, 19 bp, Mus musculus
  siRNA target sequence for Ncor1 (NM_011308.1,5497-5515).
ccaatggaaccagtgtaat

SEQ ID NO: 462502 - DNA, 19 bp, Mus musculus
  siRNA target sequence for Ncor1 (NM_011308.1,5592-5610).
ccagcctcccgttacaaca

SEQ ID NO: 462503 - DNA, 19 bp, Mus musculus
  siRNA target sequence for Ncor1 (NM_011308.1,5655-5673).
gcaccccagatggatgttt

SEQ ID NO: 462504 - DNA, 19 bp, Mus musculus
  siRNA target sequence for Ncor1 (NM_011308.1,5659-5677).
cccagatggatgtttccaa

SEQ ID NO: 462505 - DNA, 19 bp, Mus musculus
  siRNA target sequence for Ncor1 (NM_011308.1,5729-5747).
caggtcagcagcagttagt

SEQ ID NO: 462506 - DNA, 19 bp, Mus musculus
  siRNA target sequence for Ncor1 (NM_011308.1,5799-5817).
cagtgtgtgtgcacttctt

SEQ ID NO: 462507 - DNA, 19 bp, Mus musculus
  siRNA target sequence for Ncor1 (NM_011308.1,5847-5865).
catgcctcagtagtgtatt

SEQ ID NO: 462508 - DNA, 19 bp, Mus musculus
  siRNA target sequence for Ncor1 (NM_011308.1,5851-5869).
cctcagtagtgtattctga

SEQ ID NO: 462509 - DNA, 19 bp, Mus musculus
  siRNA target sequence for Ncor1 (NM_011308.1,5886-5904).
gggcctcctccaaaatcca

SEQ ID NO: 462510 - DNA, 19 bp, Mus musculus
  siRNA target sequence for Ncor1 (NM_011308.1,5969-5987).
gatcatcacccggcaaatt

SEQ ID NO: 462511 - DNA, 19 bp, Mus musculus
  siRNA target sequence for Ncor1 (NM_011308.1,6059-6077).
gtatgaaacggctagtgat

SEQ ID NO: 462512 - DNA, 19 bp, Mus musculus
  siRNA target sequence for Ncor1 (NM_011308.1,6149-6167).
catggttaaggcaaatcaa

SEQ ID NO: 462513 - DNA, 19 bp, Mus musculus
  siRNA target sequence for Ncor1 (NM_011308.1,6179-6197).
gtccactcgacagtatgaa

SEQ ID NO: 462514 - DNA, 19 bp, Mus musculus
  siRNA target sequence for Ncor1 (NM_011308.1,6195-6213).
gaaggtccactgcatcatt

SEQ ID NO: 462515 - DNA, 19 bp, Mus musculus
  siRNA target sequence for Ncor1 (NM_011308.1,6432-6450).
cctgtaagaactaaaacct

SEQ ID NO: 462516 - DNA, 19 bp, Mus musculus
  siRNA target sequence for Ncor1 (NM_011308.1,6511-6529).
gagtctctccagaaaatct

SEQ ID NO: 462517 - DNA, 19 bp, Mus musculus
  siRNA target sequence for Ncor1 (NM_011308.1,6565-6583).
ctccagagaggagtcatat

SEQ ID NO: 462518 - DNA, 19 bp, Mus musculus
  siRNA target sequence for Ncor1 (NM_011308.1,6705-6723).
cgatcaccaggaagtataa

SEQ ID NO: 462519 - DNA, 19 bp, Mus musculus
  siRNA target sequence for Ncor1 (NM_011308.1,6724-6742).
gctacttgccttcattctt

SEQ ID NO: 462520 - DNA, 19 bp, Mus musculus
  siRNA target sequence for Ncor1 (NM_011308.1,6816-6834).
ggtggaggtgactctgata

SEQ ID NO: 462521 - DNA, 19 bp, Mus musculus
  siRNA target sequence for Ncor1 (NM_011308.1,6853-6871).
gaacagagatcttcaatct

SEQ ID NO: 462522 - DNA, 19 bp, Mus musculus
  siRNA target sequence for Ncor1 (NM_011308.1,6891-6909).
ggtgcagtgagctcaagaa

SEQ ID NO: 462523 - DNA, 19 bp, Mus musculus
  siRNA target sequence for Ncor1 (NM_011308.1,6945-6963).
ctagaagacatcatcagaa

SEQ ID NO: 462524 - DNA, 19 bp, Mus musculus
  siRNA target sequence for Ncor1 (NM_011308.1,6965-6983).
ggctctcatgggaagtttt

SEQ ID NO: 462525 - DNA, 19 bp, Mus musculus
  siRNA target sequence for Ncor1 (NM_011308.1,6967-6985).
ctctcatgggaagttttga

SEQ ID NO: 462526 - DNA, 19 bp, Mus musculus
  siRNA target sequence for Ncor1 (NM_011308.1,7018-7036).
cccatcctgtgggcattat

SEQ ID NO: 462527 - DNA, 19 bp, Mus musculus
  siRNA target sequence for Ncor1 (NM_011308.1,7105-7123).
ctcatgcaggagtatgcaa

SEQ ID NO: 462528 - DNA, 19 bp, Mus musculus
  siRNA target sequence for Ncor1 (NM_011308.1,7110-7128).
gcaggagtatgcaaaccaa

SEQ ID NO: 462529 - DNA, 19 bp, Mus musculus
  siRNA target sequence for Ncor1 (NM_011308.1,7144-7162).
caaacagcaggaagtctaa

SEQ ID NO: 462530 - DNA, 19 bp, Mus musculus
  siRNA target sequence for Ncor1 (NM_011308.1,7154-7172).
gaagtctaaatctcctatt

SEQ ID NO: 462531 - DNA, 19 bp, Mus musculus
  siRNA target sequence for Ncor1 (NM_011308.1,7157-7175).
gtctaaatctcctattcct

SEQ ID NO: 462532 - DNA, 19 bp, Mus musculus
  siRNA target sequence for Ncor1 (NM_011308.1,7168-7186).
ctattcctgggcaaagcta

SEQ ID NO: 462533 - DNA, 19 bp, Mus musculus
  siRNA target sequence for Ncor1 (NM_011308.1,7437-7455).
ctctcagcgcagtatgaga

SEQ ID NO: 462534 - DNA, 19 bp, Mus musculus
  siRNA target sequence for Ncor2 (NM_011424.1,551-569).
ggtctgaagaccttaccaa

SEQ ID NO: 462535 - DNA, 19 bp, Mus musculus
  siRNA target sequence for Ncor2 (NM_011424.1,833-851).
gaagcctggtccagatcat

SEQ ID NO: 462536 - DNA, 19 bp, Mus musculus
  siRNA target sequence for Ncor2 (NM_011424.1,950-968).
cacgccagtaccatgaaaa

SEQ ID NO: 462537 - DNA, 19 bp, Mus musculus
  siRNA target sequence for Ncor2 (NM_011424.1,952-970).
cgccagtaccatgaaaaca

SEQ ID NO: 462538 - DNA, 19 bp, Mus musculus
  siRNA target sequence for Ncor2 (NM_011424.1,953-971).
gccagtaccatgaaaacat

SEQ ID NO: 462539 - DNA, 19 bp, Mus musculus
  siRNA target sequence for Ncor2 (NM_011424.1,1151-1169).
gggagtactacgagaaaca

SEQ ID NO: 462540 - DNA, 19 bp, Mus musculus
  siRNA target sequence for Ncor2 (NM_011424.1,1153-1171).
gagtactacgagaaacagt

SEQ ID NO: 462541 - DNA, 19 bp, Mus musculus
  siRNA target sequence for Ncor2 (NM_011424.1,1842-1860).
ctccaaaggccgcaaaact

SEQ ID NO: 462542 - DNA, 19 bp, Mus musculus
  siRNA target sequence for Ncor2 (NM_011424.1,1988-2006).
gctggactgaggaagagat

SEQ ID NO: 462543 - DNA, 19 bp, Mus musculus
  siRNA target sequence for Ncor2 (NM_011424.1,2083-2101).
gtgtcccagtgtaagaact

SEQ ID NO: 462544 - DNA, 19 bp, Mus musculus
  siRNA target sequence for Ncor2 (NM_011424.1,2243-2261).
ccgctgaggacgaagagat

SEQ ID NO: 462545 - DNA, 19 bp, Mus musculus
  siRNA target sequence for Ncor2 (NM_011424.1,3344-3362).
ctccacgggaggtgatcaa

SEQ ID NO: 462546 - DNA, 19 bp, Mus musculus
  siRNA target sequence for Ncor2 (NM_011424.1,3346-3364).
ccacgggaggtgatcaaga

SEQ ID NO: 462547 - DNA, 19 bp, Mus musculus
  siRNA target sequence for Ncor2 (NM_011424.1,3349-3367).
cgggaggtgatcaagactt

SEQ ID NO: 462548 - DNA, 19 bp, Mus musculus
  siRNA target sequence for Ncor2 (NM_011424.1,3455-3473).
cacgtccccccatctctaa

SEQ ID NO: 462549 - DNA, 19 bp, Mus musculus
  siRNA target sequence for Ncor2 (NM_011424.1,3746-3764).
ccgcagacgtcctctacaa

SEQ ID NO: 462550 - DNA, 19 bp, Mus musculus
  siRNA target sequence for Ncor2 (NM_011424.1,3870-3888).
ccacgtcctatcctatgaa

SEQ ID NO: 462551 - DNA, 19 bp, Mus musculus
  siRNA target sequence for Ncor2 (NM_011424.1,3964-3982).
cctaaacgcacctatgaca

SEQ ID NO: 462552 - DNA, 19 bp, Mus musculus
  siRNA target sequence for Ncor2 (NM_011424.1,3965-3983).
ctaaacgcacctatgacat

SEQ ID NO: 462553 - DNA, 19 bp, Mus musculus
  siRNA target sequence for Ncor2 (NM_011424.1,4134-4152).
ggcgcaggaggactactta

SEQ ID NO: 462554 - DNA, 19 bp, Mus musculus
  siRNA target sequence for Ncor2 (NM_011424.1,4157-4175).
gggaggccaagctcttgaa

SEQ ID NO: 462555 - DNA, 19 bp, Mus musculus
  siRNA target sequence for Ncor2 (NM_011424.1,4507-4525).
ctgcacccgctggacataa

SEQ ID NO: 462556 - DNA, 19 bp, Mus musculus
  siRNA target sequence for Ncor2 (NM_011424.1,4658-4676).
ggcaaagcccactgactta

SEQ ID NO: 462557 - DNA, 19 bp, Mus musculus
  siRNA target sequence for Ncor2 (NM_011424.1,4792-4810).
gaccggaagctgacatcta

SEQ ID NO: 462558 - DNA, 19 bp, Mus musculus
  siRNA target sequence for Ncor2 (NM_011424.1,5204-5222).
cctcgctggccctcaatta

SEQ ID NO: 462559 - DNA, 19 bp, Mus musculus
  siRNA target sequence for Ncor2 (NM_011424.1,5228-5246).
ctggcccaagaggcattat

SEQ ID NO: 462560 - DNA, 19 bp, Mus musculus
  siRNA target sequence for Ncor2 (NM_011424.1,5231-5249).
gcccaagaggcattatcga

SEQ ID NO: 462561 - DNA, 19 bp, Mus musculus
  siRNA target sequence for Ncor2 (NM_011424.1,5393-5411).
gccccactcacctagctaa

SEQ ID NO: 462562 - DNA, 19 bp, Mus musculus
  siRNA target sequence for Ncor2 (NM_011424.1,5394-5412).
ccccactcacctagctaaa

SEQ ID NO: 462563 - DNA, 19 bp, Mus musculus
  siRNA target sequence for Ncor2 (NM_011424.1,5397-5415).
cactcacctagctaaacca

SEQ ID NO: 462564 - DNA, 19 bp, Mus musculus
  siRNA target sequence for Ncor2 (NM_011424.1,6057-6075).
ccgagaaaagactcaaagt

SEQ ID NO: 462565 - DNA, 19 bp, Mus musculus
  siRNA target sequence for Ncor2 (NM_011424.1,6357-6375).
gactgccccaggcatcaaa

SEQ ID NO: 462566 - DNA, 19 bp, Mus musculus
  siRNA target sequence for Ncor2 (NM_011424.1,6920-6938).
ggacggaaatcttcaacat

SEQ ID NO: 462567 - DNA, 19 bp, Mus musculus
  siRNA target sequence for Ncor2 (NM_011424.1,6958-6976).
ggccttatgacctgtagaa

SEQ ID NO: 462568 - DNA, 19 bp, Mus musculus
  siRNA target sequence for Ncor2 (NM_011424.1,7011-7029).
ggggctagaggccattatt

SEQ ID NO: 462569 - DNA, 19 bp, Mus musculus
  siRNA target sequence for Ncor2 (NM_011424.1,7012-7030).
gggctagaggccattatta

SEQ ID NO: 462570 - DNA, 19 bp, Mus musculus
  siRNA target sequence for Ncor2 (NM_011424.1,7035-7053).
ggcactcatgggtaaatat

SEQ ID NO: 462571 - DNA, 19 bp, Mus musculus
  siRNA target sequence for Ncor2 (NM_011424.1,7380-7398).
cccctacaaccctttgatt

SEQ ID NO: 462572 - DNA, 19 bp, Mus musculus
  siRNA target sequence for Ncor2 (NM_011424.1,7381-7399).
ccctacaaccctttgatta

SEQ ID NO: 462573 - DNA, 19 bp, Mus musculus
  siRNA target sequence for Ndn (NM_010882.2,86-104).
cctgagcgaccctaacttt

SEQ ID NO: 462574 - DNA, 19 bp, Mus musculus
  siRNA target sequence for Ndn (NM_010882.2,264-282).
gaagatgttgaccctaaaa

SEQ ID NO: 462575 - DNA, 19 bp, Mus musculus
  siRNA target sequence for Ndn (NM_010882.2,459-477).
gtcatgggcagctacaaga

SEQ ID NO: 462576 - DNA, 19 bp, Mus musculus
  siRNA target sequence for Ndn (NM_010882.2,660-678).
ctgagcctcatctatgtga

SEQ ID NO: 462577 - DNA, 19 bp, Mus musculus
  siRNA target sequence for Ndn (NM_010882.2,761-779).
cggagacgtgaggaagata

SEQ ID NO: 462578 - DNA, 19 bp, Mus musculus
  siRNA target sequence for Ndn (NM_010882.2,763-781).
gagacgtgaggaagataat

SEQ ID NO: 462579 - DNA, 19 bp, Mus musculus
  siRNA target sequence for Ndn (NM_010882.2,765-783).
gacgtgaggaagataatca

SEQ ID NO: 462580 - DNA, 19 bp, Mus musculus
  siRNA target sequence for Neud4 (NM_013874.1,107-125).
cccttggcgaggacttcta

SEQ ID NO: 462581 - DNA, 19 bp, Mus musculus
  siRNA target sequence for Neud4 (NM_013874.1,278-296).
cgggacagatctacactta

SEQ ID NO: 462582 - DNA, 19 bp, Mus musculus
  siRNA target sequence for Neud4 (NM_013874.1,778-796).
cctttccaccggaaaaaca

SEQ ID NO: 462583 - DNA, 19 bp, Mus musculus
  siRNA target sequence for Neud4 (NM_013874.1,779-797).
ctttccaccggaaaaacaa

SEQ ID NO: 462584 - DNA, 19 bp, Mus musculus
  siRNA target sequence for Neud4 (NM_013874.1,798-816).
ccataaacagttttacaaa

SEQ ID NO: 462585 - DNA, 19 bp, Mus musculus
  siRNA target sequence for Neud4 (NM_013874.1,977-995).
gacatccctcgtgtttaca

SEQ ID NO: 462586 - DNA, 19 bp, Mus musculus
  siRNA target sequence for Neud4 (NM_013874.1,1070-1088).
gtggcacctcggagaatga

SEQ ID NO: 462587 - DNA, 19 bp, Mus musculus
  siRNA target sequence for Neud4 (NM_013874.1,1195-1213).
ctccggcacttgaaggaaa

SEQ ID NO: 462588 - DNA, 19 bp, Mus musculus
  siRNA target sequence for Neurod1 (NM_010894.1,221-239).
cgagcttgaagccatgaat

SEQ ID NO: 462589 - DNA, 19 bp, Mus musculus
  siRNA target sequence for Neurod1 (NM_010894.1,346-364).
gacggggtcccaaaaagaa

SEQ ID NO: 462590 - DNA, 19 bp, Mus musculus
  siRNA target sequence for Neurod1 (NM_010894.1,381-399).
cgcctagaacgttttaaat

SEQ ID NO: 462591 - DNA, 19 bp, Mus musculus
  siRNA target sequence for Neurod1 (NM_010894.1,382-400).
gcctagaacgttttaaatt

SEQ ID NO: 462592 - DNA, 19 bp, Mus musculus
  siRNA target sequence for Neurod1 (NM_010894.1,383-401).
cctagaacgttttaaatta

SEQ ID NO: 462593 - DNA, 19 bp, Mus musculus
  siRNA target sequence for Neurod1 (NM_010894.1,384-402).
ctagaacgttttaaattaa

SEQ ID NO: 462594 - DNA, 19 bp, Mus musculus
  siRNA target sequence for Neurod1 (NM_010894.1,963-981).
ccatccgccgagtttgaaa

SEQ ID NO: 462595 - DNA, 19 bp, Mus musculus
  siRNA target sequence for Neurod1 (NM_010894.1,964-982).
catccgccgagtttgaaaa

SEQ ID NO: 462596 - DNA, 19 bp, Mus musculus
  siRNA target sequence for Neurod1 (NM_010894.1,967-985).
ccgccgagtttgaaaaaaa

SEQ ID NO: 462597 - DNA, 19 bp, Mus musculus
  siRNA target sequence for Neurod1 (NM_010894.1,968-986).
cgccgagtttgaaaaaaat

SEQ ID NO: 462598 - DNA, 19 bp, Mus musculus
  siRNA target sequence for Neurod1 (NM_010894.1,969-987).
gccgagtttgaaaaaaatt

SEQ ID NO: 462599 - DNA, 19 bp, Mus musculus
  siRNA target sequence for Neurod1 (NM_010894.1,1030-1048).
cccaaagccacggatcaat

SEQ ID NO: 462600 - DNA, 19 bp, Mus musculus
  siRNA target sequence for Neurod1 (NM_010894.1,1078-1096).
gcgagatccccatagacaa

SEQ ID NO: 462601 - DNA, 19 bp, Mus musculus
  siRNA target sequence for Neurod1 (NM_010894.1,1082-1100).
gatccccatagacaacatt

SEQ ID NO: 462602 - DNA, 19 bp, Mus musculus
  siRNA target sequence for Neurod1 (NM_010894.1,1086-1104).
cccatagacaacattatgt

SEQ ID NO: 462603 - DNA, 19 bp, Mus musculus
  siRNA target sequence for Neurod1 (NM_010894.1,1136-1154).
catgagtgcccagcttaat

SEQ ID NO: 462604 - DNA, 19 bp, Mus musculus
  siRNA target sequence for Neurod2 (NM_010895.2,548-566).
ccgaagaaacgcaagatga

SEQ ID NO: 462605 - DNA, 19 bp, Mus musculus
  siRNA target sequence for Neurod2 (NM_010895.2,744-762).
gggctctctcggagatctt

SEQ ID NO: 462606 - DNA, 19 bp, Mus musculus
  siRNA target sequence for Neurod2 (NM_010895.2,1086-1104).
gcgctagcccggactacaa

SEQ ID NO: 462607 - DNA, 19 bp, Mus musculus
  siRNA target sequence for Neurod2 (NM_010895.2,1287-1305).
gcgtccactccgagaatct

SEQ ID NO: 462608 - DNA, 19 bp, Mus musculus
  siRNA target sequence for Neurod2 (NM_010895.2,1289-1307).
gtccactccgagaatctct

SEQ ID NO: 462609 - DNA, 19 bp, Mus musculus
  siRNA target sequence for Neurod2 (NM_010895.2,1296-1314).
ccgagaatctcttgtctta

SEQ ID NO: 462610 - DNA, 19 bp, Mus musculus
  siRNA target sequence for Neurod2 (NM_010895.2,1300-1318).
gaatctcttgtcttacgat

SEQ ID NO: 462611 - DNA, 19 bp, Mus musculus
  siRNA target sequence for Neurod2 (NM_010895.2,1352-1370).
gaggagctcaacgcatttt

SEQ ID NO: 462612 - DNA, 19 bp, Mus musculus
  siRNA target sequence for Neurod2 (NM_010895.2,1357-1375).
gctcaacgcatttttccat

SEQ ID NO: 462613 - DNA, 19 bp, Mus musculus
  siRNA target sequence for Neurod4 (NM_007501.2,117-135).
gagctggtcaacacacaat

SEQ ID NO: 462614 - DNA, 19 bp, Mus musculus
  siRNA target sequence for Neurod4 (NM_007501.2,153-171).
ctgagctctcaaaatgaga

SEQ ID NO: 462615 - DNA, 19 bp, Mus musculus
  siRNA target sequence for Neurod4 (NM_007501.2,185-203).
gagaagaccgggctcttat

SEQ ID NO: 462616 - DNA, 19 bp, Mus musculus
  siRNA target sequence for Neurod4 (NM_007501.2,190-208).
gaccgggctcttatggaat

SEQ ID NO: 462617 - DNA, 19 bp, Mus musculus
  siRNA target sequence for Neurod4 (NM_007501.2,204-222).
ggaatgctcggaaccttaa

SEQ ID NO: 462618 - DNA, 19 bp, Mus musculus
  siRNA target sequence for Neurod4 (NM_007501.2,209-227).
gctcggaaccttaactgaa

SEQ ID NO: 462619 - DNA, 19 bp, Mus musculus
  siRNA target sequence for Neurod4 (NM_007501.2,270-288).
ggagataaacctaaaagaa

SEQ ID NO: 462620 - DNA, 19 bp, Mus musculus
  siRNA target sequence for Neurod4 (NM_007501.2,318-336).
gctcgccttgaaagattca

SEQ ID NO: 462621 - DNA, 19 bp, Mus musculus
  siRNA target sequence for Neurod4 (NM_007501.2,389-407).
gaatgatgccttggataat

SEQ ID NO: 462622 - DNA, 19 bp, Mus musculus
  siRNA target sequence for Neurod4 (NM_007501.2,393-411).
gatgccttggataatctta

SEQ ID NO: 462623 - DNA, 19 bp, Mus musculus
  siRNA target sequence for Neurod4 (NM_007501.2,417-435).
gtcatgccatgttactcta

SEQ ID NO: 462624 - DNA, 19 bp, Mus musculus
  siRNA target sequence for Neurod4 (NM_007501.2,419-437).
catgccatgttactctaaa

SEQ ID NO: 462625 - DNA, 19 bp, Mus musculus
  siRNA target sequence for Neurod4 (NM_007501.2,431-449).
ctctaaaactcaaaagctt

SEQ ID NO: 462626 - DNA, 19 bp, Mus musculus
  siRNA target sequence for Neurod4 (NM_007501.2,468-486).
cgactggcaaggaactaca

SEQ ID NO: 462627 - DNA, 19 bp, Mus musculus
  siRNA target sequence for Neurod4 (NM_007501.2,469-487).
gactggcaaggaactacat

SEQ ID NO: 462628 - DNA, 19 bp, Mus musculus
  siRNA target sequence for Neurod4 (NM_007501.2,512-530).
gactggtcagacacttgaa

SEQ ID NO: 462629 - DNA, 19 bp, Mus musculus
  siRNA target sequence for Neurod4 (NM_007501.2,532-550).
ggaagggatttgtagagat

SEQ ID NO: 462630 - DNA, 19 bp, Mus musculus
  siRNA target sequence for Neurod4 (NM_007501.2,537-555).
ggatttgtagagatgctat

SEQ ID NO: 462631 - DNA, 19 bp, Mus musculus
  siRNA target sequence for Neurod4 (NM_007501.2,603-621).
caactggggcctcaatcta

SEQ ID NO: 462632 - DNA, 19 bp, Mus musculus
  siRNA target sequence for Neurod4 (NM_007501.2,635-653).
gcatgaggaaaaatcttca

SEQ ID NO: 462633 - DNA, 19 bp, Mus musculus
  siRNA target sequence for Neurod4 (NM_007501.2,636-654).
catgaggaaaaatcttcaa

SEQ ID NO: 462634 - DNA, 19 bp, Mus musculus
  siRNA target sequence for Neurod4 (NM_007501.2,652-670).
caatttgtgactctactat

SEQ ID NO: 462635 - DNA, 19 bp, Mus musculus
  siRNA target sequence for Neurod4 (NM_007501.2,678-696).
cacagcttcaactatcagt

SEQ ID NO: 462636 - DNA, 19 bp, Mus musculus
  siRNA target sequence for Neurod4 (NM_007501.2,704-722).
gctccccagccctccttat

SEQ ID NO: 462637 - DNA, 19 bp, Mus musculus
  siRNA target sequence for Neurod4 (NM_007501.2,715-733).
ctccttatggccatatgga

SEQ ID NO: 462638 - DNA, 19 bp, Mus musculus
  siRNA target sequence for Neurod4 (NM_007501.2,736-754).
cacattctctccatctcaa

SEQ ID NO: 462639 - DNA, 19 bp, Mus musculus
  siRNA target sequence for Neurod4 (NM_007501.2,756-774).
cctcaaccatttaagagtt

SEQ ID NO: 462640 - DNA, 19 bp, Mus musculus
  siRNA target sequence for Neurod4 (NM_007501.2,881-899).
cggctcccctgatttggaa

SEQ ID NO: 462641 - DNA, 19 bp, Mus musculus
  siRNA target sequence for Neurod4 (NM_007501.2,889-907).
ctgatttggaaaaatccta

SEQ ID NO: 462642 - DNA, 19 bp, Mus musculus
  siRNA target sequence for Neurod4 (NM_007501.2,908-926).
caatttcatgccacattat

SEQ ID NO: 462643 - DNA, 19 bp, Mus musculus
  siRNA target sequence for Neurod4 (NM_007501.2,980-998).
cactccccgctatgatgtt

SEQ ID NO: 462644 - DNA, 19 bp, Mus musculus
  siRNA target sequence for Neurod4 (NM_007501.2,1002-1020).
gtagacctgagctatgatt

SEQ ID NO: 462645 - DNA, 19 bp, Mus musculus
  siRNA target sequence for Neurod4 (NM_007501.2,1022-1040).
ctactcccaccatagcatt

SEQ ID NO: 462646 - DNA, 19 bp, Mus musculus
  siRNA target sequence for Neurod4 (NM_007501.2,1041-1059).
ggaactcagctcaatacga

SEQ ID NO: 462647 - DNA, 19 bp, Mus musculus
  siRNA target sequence for Neurod4 (NM_007501.2,1042-1060).
gaactcagctcaatacgat

SEQ ID NO: 462648 - DNA, 19 bp, Mus musculus
  siRNA target sequence for Neurod4 (NM_007501.2,1047-1065).
cagctcaatacgatcttct

SEQ ID NO: 462649 - DNA, 19 bp, Mus musculus
  siRNA target sequence for Neurod6 (NM_009717.1,208-226).
ccagaaacaaattaagaaa

SEQ ID NO: 462650 - DNA, 19 bp, Mus musculus
  siRNA target sequence for Neurod6 (NM_009717.1,234-252).
gctttccaaaacaagttgt

SEQ ID NO: 462651 - DNA, 19 bp, Mus musculus
  siRNA target sequence for Neurod6 (NM_009717.1,390-408).
gactggaaagggtcaagtt

SEQ ID NO: 462652 - DNA, 19 bp, Mus musculus
  siRNA target sequence for Neurod6 (NM_009717.1,485-503).
gtggtcccctgttactcta

SEQ ID NO: 462653 - DNA, 19 bp, Mus musculus
  siRNA target sequence for Neurod6 (NM_009717.1,487-505).
ggtcccctgttactctaaa

SEQ ID NO: 462654 - DNA, 19 bp, Mus musculus
  siRNA target sequence for Neurod6 (NM_009717.1,488-506).
gtcccctgttactctaaaa

SEQ ID NO: 462655 - DNA, 19 bp, Mus musculus
  siRNA target sequence for Neurod6 (NM_009717.1,520-538).
caaaatagaaactttacga

SEQ ID NO: 462656 - DNA, 19 bp, Mus musculus
  siRNA target sequence for Neurod6 (NM_009717.1,531-549).
ctttacgactggccaaaaa

SEQ ID NO: 462657 - DNA, 19 bp, Mus musculus
  siRNA target sequence for Neurod6 (NM_009717.1,536-554).
cgactggccaaaaattaca

SEQ ID NO: 462658 - DNA, 19 bp, Mus musculus
  siRNA target sequence for Neurod6 (NM_009717.1,537-555).
gactggccaaaaattacat

SEQ ID NO: 462659 - DNA, 19 bp, Mus musculus
  siRNA target sequence for Neurod6 (NM_009717.1,553-571).
catctgggcactttctgaa

SEQ ID NO: 462660 - DNA, 19 bp, Mus musculus
  siRNA target sequence for Neurod6 (NM_009717.1,556-574).
ctgggcactttctgaaatt

SEQ ID NO: 462661 - DNA, 19 bp, Mus musculus
  siRNA target sequence for Neurod6 (NM_009717.1,602-620).
ctcacgttcgtccaaaact

SEQ ID NO: 462662 - DNA, 19 bp, Mus musculus
  siRNA target sequence for Neurod6 (NM_009717.1,604-622).
cacgttcgtccaaaactta

SEQ ID NO: 462663 - DNA, 19 bp, Mus musculus
  siRNA target sequence for Neurod6 (NM_009717.1,671-689).
cagctcaacgccagaagtt

SEQ ID NO: 462664 - DNA, 19 bp, Mus musculus
  siRNA target sequence for Neurod6 (NM_009717.1,732-750).
caccctactccacattcta

SEQ ID NO: 462665 - DNA, 19 bp, Mus musculus
  siRNA target sequence for Neurod6 (NM_009717.1,788-806).
gggcatgggactcttgata

SEQ ID NO: 462666 - DNA, 19 bp, Mus musculus
  siRNA target sequence for Neurod6 (NM_009717.1,789-807).
ggcatgggactcttgataa

SEQ ID NO: 462667 - DNA, 19 bp, Mus musculus
  siRNA target sequence for Neurod6 (NM_009717.1,795-813).
ggactcttgataattccaa

SEQ ID NO: 462668 - DNA, 19 bp, Mus musculus
  siRNA target sequence for Neurod6 (NM_009717.1,814-832).
gtccatgaaaccctacaat

SEQ ID NO: 462669 - DNA, 19 bp, Mus musculus
  siRNA target sequence for Neurod6 (NM_009717.1,816-834).
ccatgaaaccctacaatta

SEQ ID NO: 462670 - DNA, 19 bp, Mus musculus
  siRNA target sequence for Neurod6 (NM_009717.1,837-855).
gcagtgcatatgaatcctt

SEQ ID NO: 462671 - DNA, 19 bp, Mus musculus
  siRNA target sequence for Neurod6 (NM_009717.1,848-866).
gaatccttctatgaaagta

SEQ ID NO: 462672 - DNA, 19 bp, Mus musculus
  siRNA target sequence for Neurod6 (NM_009717.1,911-929).
cctcccccaattaactata

SEQ ID NO: 462673 - DNA, 19 bp, Mus musculus
  siRNA target sequence for Neurod6 (NM_009717.1,912-930).
ctcccccaattaactataa

SEQ ID NO: 462674 - DNA, 19 bp, Mus musculus
  siRNA target sequence for Neurod6 (NM_009717.1,1066-1084).
cttcccttacgacttacat

SEQ ID NO: 462675 - DNA, 19 bp, Mus musculus
  siRNA target sequence for Neurod6 (NM_009717.1,1102-1120).
cactatgcaagatgaatta

SEQ ID NO: 462676 - DNA, 19 bp, Mus musculus
  siRNA target sequence for Neurog1 (NM_010896.1,703-721).
cacacgacgccctgtttca

SEQ ID NO: 462677 - DNA, 19 bp, Mus musculus
  siRNA target sequence for Neurog2 (NM_009718.2,986-1004).
cccatacagctgcacttta

SEQ ID NO: 462678 - DNA, 19 bp, Mus musculus
  siRNA target sequence for Neurog2 (NM_009718.2,1051-1069).
ctccggagaagcatcgtta

SEQ ID NO: 462679 - DNA, 19 bp, Mus musculus
  siRNA target sequence for Neurog2 (NM_009718.2,1084-1102).
ccctcgccagggactgtat

SEQ ID NO: 462680 - DNA, 19 bp, Mus musculus
  siRNA target sequence for Neurog2 (NM_009718.2,1086-1104).
ctcgccagggactgtatct

SEQ ID NO: 462681 - DNA, 19 bp, Mus musculus
  siRNA target sequence for Nfe2 (NM_008685.2,447-465).
gttccaagtgagacatctt

SEQ ID NO: 462682 - DNA, 19 bp, Mus musculus
  siRNA target sequence for Nfe2 (NM_008685.2,499-517).
cactgccacctccaacata

SEQ ID NO: 462683 - DNA, 19 bp, Mus musculus
  siRNA target sequence for Nfe2 (NM_008685.2,514-532).
catattgcccctgttcaat

SEQ ID NO: 462684 - DNA, 19 bp, Mus musculus
  siRNA target sequence for Nfe2 (NM_008685.2,610-628).
catactcctatggtaatgt

SEQ ID NO: 462685 - DNA, 19 bp, Mus musculus
  siRNA target sequence for Nfe2 (NM_008685.2,760-778).
caggattatccctcaacta

SEQ ID NO: 462686 - DNA, 19 bp, Mus musculus
  siRNA target sequence for Nfe2 (NM_008685.2,832-850).
gcgagtacgcggacatgta

SEQ ID NO: 462687 - DNA, 19 bp, Mus musculus
  siRNA target sequence for Nfe2 (NM_008685.2,858-876).
gagtatccttactcactta

SEQ ID NO: 462688 - DNA, 19 bp, Mus musculus
  siRNA target sequence for Nfe2 (NM_008685.2,869-887).
ctcacttatgcccaattct

SEQ ID NO: 462689 - DNA, 19 bp, Mus musculus
  siRNA target sequence for Nfe2 (NM_008685.2,871-889).
cacttatgcccaattcttt

SEQ ID NO: 462690 - DNA, 19 bp, Mus musculus
  siRNA target sequence for Nfe2 (NM_008685.2,890-908).
ggcccatcccaactatact

SEQ ID NO: 462691 - DNA, 19 bp, Mus musculus
  siRNA target sequence for Nfe2 (NM_008685.2,892-910).
cccatcccaactatactct

SEQ ID NO: 462692 - DNA, 19 bp, Mus musculus
  siRNA target sequence for Nfe2 (NM_008685.2,1035-1053).
cctacggacaagatagtta

SEQ ID NO: 462693 - DNA, 19 bp, Mus musculus
  siRNA target sequence for Nfe2 (NM_008685.2,1036-1054).
ctacggacaagatagttaa

SEQ ID NO: 462694 - DNA, 19 bp, Mus musculus
  siRNA target sequence for Nfe2 (NM_008685.2,1039-1057).
cggacaagatagttaactt

SEQ ID NO: 462695 - DNA, 19 bp, Mus musculus
  siRNA target sequence for Nfe2 (NM_008685.2,1055-1073).
cttgccggtagatgacttt

SEQ ID NO: 462696 - DNA, 19 bp, Mus musculus
  siRNA target sequence for Nfe2 (NM_008685.2,1060-1078).
cggtagatgactttaatga

SEQ ID NO: 462697 - DNA, 19 bp, Mus musculus
  siRNA target sequence for Nfe2 (NM_008685.2,1106-1124).
gagccagctggctctagtt

SEQ ID NO: 462698 - DNA, 19 bp, Mus musculus
  siRNA target sequence for Nfe2 (NM_008685.2,1134-1152).
cgtcgacggggcaagaaca

SEQ ID NO: 462699 - DNA, 19 bp, Mus musculus
  siRNA target sequence for Nfe2 (NM_008685.2,1135-1153).
gtcgacggggcaagaacaa

SEQ ID NO: 462700 - DNA, 19 bp, Mus musculus
  siRNA target sequence for Nfe2 (NM_008685.2,1302-1320).
gcagagctgtaccatgata

SEQ ID NO: 462701 - DNA, 19 bp, Mus musculus
  siRNA target sequence for Nfe2 (NM_008685.2,1326-1344).
cagcatcttcgggatgaat

SEQ ID NO: 462702 - DNA, 19 bp, Mus musculus
  siRNA target sequence for Nfe2 (NM_008685.2,1354-1372).
gttactcaccagaggaata

SEQ ID NO: 462703 - DNA, 19 bp, Mus musculus
  siRNA target sequence for Nfe2 (NM_008685.2,1358-1376).
ctcaccagaggaatatgta

SEQ ID NO: 462704 - DNA, 19 bp, Mus musculus
  siRNA target sequence for Nfe2 (NM_008685.2,1360-1378).
caccagaggaatatgtact

SEQ ID NO: 462705 - DNA, 19 bp, Mus musculus
  siRNA target sequence for Nfe2 (NM_008685.2,1409-1427).
ggtaccccgtggaaccaaa

SEQ ID NO: 462706 - DNA, 19 bp, Mus musculus
  siRNA target sequence for Nfe2 (NM_008685.2,1410-1428).
gtaccccgtggaaccaaaa

SEQ ID NO: 462707 - DNA, 19 bp, Mus musculus
  siRNA target sequence for Nfe2l1 (NM_008686.2,251-269).
gctttctctgaagaaatat

SEQ ID NO: 462708 - DNA, 19 bp, Mus musculus
  siRNA target sequence for Nfe2l1 (NM_008686.2,321-339).
cgggtggacgtggatactt

SEQ ID NO: 462709 - DNA, 19 bp, Mus musculus
  siRNA target sequence for Nfe2l1 (NM_008686.2,322-340).
gggtggacgtggatactta

SEQ ID NO: 462710 - DNA, 19 bp, Mus musculus
  siRNA target sequence for Nfe2l1 (NM_008686.2,358-376).
cccctctccgggagatcat

SEQ ID NO: 462711 - DNA, 19 bp, Mus musculus
  siRNA target sequence for Nfe2l1 (NM_008686.2,657-675).
gacaacggggtgagagaaa

SEQ ID NO: 462712 - DNA, 19 bp, Mus musculus
  siRNA target sequence for Nfe2l1 (NM_008686.2,759-777).
gatatagatctgattgaca

SEQ ID NO: 462713 - DNA, 19 bp, Mus musculus
  siRNA target sequence for Nfe2l1 (NM_008686.2,779-797).
cctttggcgacaggatatt

SEQ ID NO: 462714 - DNA, 19 bp, Mus musculus
  siRNA target sequence for Nfe2l1 (NM_008686.2,784-802).
ggcgacaggatattgatct

SEQ ID NO: 462715 - DNA, 19 bp, Mus musculus
  siRNA target sequence for Nfe2l1 (NM_008686.2,806-824).
ggctgggcgtgaggttttt

SEQ ID NO: 462716 - DNA, 19 bp, Mus musculus
  siRNA target sequence for Nfe2l1 (NM_008686.2,810-828).
gggcgtgaggtttttgact

SEQ ID NO: 462717 - DNA, 19 bp, Mus musculus
  siRNA target sequence for Nfe2l1 (NM_008686.2,811-829).
ggcgtgaggtttttgacta

SEQ ID NO: 462718 - DNA, 19 bp, Mus musculus
  siRNA target sequence for Nfe2l1 (NM_008686.2,925-943).
cccgagacctgctagtaga

SEQ ID NO: 462719 - DNA, 19 bp, Mus musculus
  siRNA target sequence for Nfe2l1 (NM_008686.2,1134-1152).
gctatggaagtaaatacat

SEQ ID NO: 462720 - DNA, 19 bp, Mus musculus
  siRNA target sequence for Nfe2l1 (NM_008686.2,1223-1241).
cactcccatcaatcagaat

SEQ ID NO: 462721 - DNA, 19 bp, Mus musculus
  siRNA target sequence for Nfe2l1 (NM_008686.2,1480-1498).
gcctgttagacgaagctat

SEQ ID NO: 462722 - DNA, 19 bp, Mus musculus
  siRNA target sequence for Nfe2l1 (NM_008686.2,1782-1800).
ggctaccagccggaatact

SEQ ID NO: 462723 - DNA, 19 bp, Mus musculus
  siRNA target sequence for Nfe2l1 (NM_008686.2,1791-1809).
ccggaatactccaagttct

SEQ ID NO: 462724 - DNA, 19 bp, Mus musculus
  siRNA target sequence for Nfe2l1 (NM_008686.2,1841-1859).
ctcttgccttccctactta

SEQ ID NO: 462725 - DNA, 19 bp, Mus musculus
  siRNA target sequence for Nfe2l1 (NM_008686.2,1843-1861).
cttgccttccctacttaga

SEQ ID NO: 462726 - DNA, 19 bp, Mus musculus
  siRNA target sequence for Nfe2l1 (NM_008686.2,1862-1880).
gcatgtgggccacaatcat

SEQ ID NO: 462727 - DNA, 19 bp, Mus musculus
  siRNA target sequence for Nfe2l1 (NM_008686.2,1866-1884).
gtgggccacaatcatacat

SEQ ID NO: 462728 - DNA, 19 bp, Mus musculus
  siRNA target sequence for Nfe2l1 (NM_008686.2,1869-1887).
ggccacaatcatacataca

SEQ ID NO: 462729 - DNA, 19 bp, Mus musculus
  siRNA target sequence for Nfe2l1 (NM_008686.2,1870-1888).
gccacaatcatacatacaa

SEQ ID NO: 462730 - DNA, 19 bp, Mus musculus
  siRNA target sequence for Nfe2l1 (NM_008686.2,2026-2044).
cattcaccaatgacaagat

SEQ ID NO: 462731 - DNA, 19 bp, Mus musculus
  siRNA target sequence for Nfe2l1 (NM_008686.2,2045-2063).
catcaacctgcctgtagaa

SEQ ID NO: 462732 - DNA, 19 bp, Mus musculus
  siRNA target sequence for Nfe2l1 (NM_008686.2,2048-2066).
caacctgcctgtagaagaa

SEQ ID NO: 462733 - DNA, 19 bp, Mus musculus
  siRNA target sequence for Nfe2l1 (NM_008686.2,2054-2072).
gcctgtagaagaattcaat

SEQ ID NO: 462734 - DNA, 19 bp, Mus musculus
  siRNA target sequence for Nfe2l1 (NM_008686.2,2239-2257).
gattgcttcgagaaaaggt

SEQ ID NO: 462735 - DNA, 19 bp, Mus musculus
  siRNA target sequence for Nfe2l1 (NM_008686.2,2288-2306).
gcagaaggtccaaagctta

SEQ ID NO: 462736 - DNA, 19 bp, Mus musculus
  siRNA target sequence for Nfe2l1 (NM_008686.2,2289-2307).
cagaaggtccaaagcttat

SEQ ID NO: 462737 - DNA, 19 bp, Mus musculus
  siRNA target sequence for Nfe2l2 (NM_010902.2,212-230).
cccagcaggacatggattt

SEQ ID NO: 462738 - DNA, 19 bp, Mus musculus
  siRNA target sequence for Nfe2l2 (NM_010902.2,245-263).
ggaggcaagacatagatct

SEQ ID NO: 462739 - DNA, 19 bp, Mus musculus
  siRNA target sequence for Nfe2l2 (NM_010902.2,246-264).
gaggcaagacatagatctt

SEQ ID NO: 462740 - DNA, 19 bp, Mus musculus
  siRNA target sequence for Nfe2l2 (NM_010902.2,255-273).
catagatcttggagtaagt

SEQ ID NO: 462741 - DNA, 19 bp, Mus musculus
  siRNA target sequence for Nfe2l2 (NM_010902.2,266-284).
gagtaagtcgagaagtgtt

SEQ ID NO: 462742 - DNA, 19 bp, Mus musculus
  siRNA target sequence for Nfe2l2 (NM_010902.2,272-290).
gtcgagaagtgtttgactt

SEQ ID NO: 462743 - DNA, 19 bp, Mus musculus
  siRNA target sequence for Nfe2l2 (NM_010902.2,416-434).
gagaattcctcccaattca

SEQ ID NO: 462744 - DNA, 19 bp, Mus musculus
  siRNA target sequence for Nfe2l2 (NM_010902.2,597-615).
cagccacgctgaaagttca

SEQ ID NO: 462745 - DNA, 19 bp, Mus musculus
  siRNA target sequence for Nfe2l2 (NM_010902.2,663-681).
ggcagccatgactgattta

SEQ ID NO: 462746 - DNA, 19 bp, Mus musculus
  siRNA target sequence for Nfe2l2 (NM_010902.2,664-682).
gcagccatgactgatttaa

SEQ ID NO: 462747 - DNA, 19 bp, Mus musculus
  siRNA target sequence for Nfe2l2 (NM_010902.2,667-685).
gccatgactgatttaagca

SEQ ID NO: 462748 - DNA, 19 bp, Mus musculus
  siRNA target sequence for Nfe2l2 (NM_010902.2,709-727).
gtttggcaggagctatttt

SEQ ID NO: 462749 - DNA, 19 bp, Mus musculus
  siRNA target sequence for Nfe2l2 (NM_010902.2,714-732).
gcaggagctattttccatt

SEQ ID NO: 462750 - DNA, 19 bp, Mus musculus
  siRNA target sequence for Nfe2l2 (NM_010902.2,733-751).
cccgaattacagtgtctta

SEQ ID NO: 462751 - DNA, 19 bp, Mus musculus
  siRNA target sequence for Nfe2l2 (NM_010902.2,734-752).
ccgaattacagtgtcttaa

SEQ ID NO: 462752 - DNA, 19 bp, Mus musculus
  siRNA target sequence for Nfe2l2 (NM_010902.2,735-753).
cgaattacagtgtcttaat

SEQ ID NO: 462753 - DNA, 19 bp, Mus musculus
  siRNA target sequence for Nfe2l2 (NM_010902.2,736-754).
gaattacagtgtcttaata

SEQ ID NO: 462754 - DNA, 19 bp, Mus musculus
  siRNA target sequence for Nfe2l2 (NM_010902.2,746-764).
gtcttaataccgaaaacaa

SEQ ID NO: 462755 - DNA, 19 bp, Mus musculus
  siRNA target sequence for Nfe2l2 (NM_010902.2,845-863).
cgatctcctcgctggaaaa

SEQ ID NO: 462756 - DNA, 19 bp, Mus musculus
  siRNA target sequence for Nfe2l2 (NM_010902.2,872-890).
gcaactgtggtccacattt

SEQ ID NO: 462757 - DNA, 19 bp, Mus musculus
  siRNA target sequence for Nfe2l2 (NM_010902.2,921-939).
catcctctccactgatgat

SEQ ID NO: 462758 - DNA, 19 bp, Mus musculus
  siRNA target sequence for Nfe2l2 (NM_010902.2,970-988).
cccaccttaaacacagatt

SEQ ID NO: 462759 - DNA, 19 bp, Mus musculus
  siRNA target sequence for Nfe2l2 (NM_010902.2,1083-1101).
cctggacgggactattgaa

SEQ ID NO: 462760 - DNA, 19 bp, Mus musculus
  siRNA target sequence for Nfe2l2 (NM_010902.2,1106-1124).
gtgacctgtcactgtgtaa

SEQ ID NO: 462761 - DNA, 19 bp, Mus musculus
  siRNA target sequence for Nfe2l2 (NM_010902.2,1143-1161).
cgctgaaggcacaatggaa

SEQ ID NO: 462762 - DNA, 19 bp, Mus musculus
  siRNA target sequence for Nfe2l2 (NM_010902.2,1144-1162).
gctgaaggcacaatggaat

SEQ ID NO: 462763 - DNA, 19 bp, Mus musculus
  siRNA target sequence for Nfe2l2 (NM_010902.2,1145-1163).
ctgaaggcacaatggaatt

SEQ ID NO: 462764 - DNA, 19 bp, Mus musculus
  siRNA target sequence for Nfe2l2 (NM_010902.2,1224-1242).
ctccgtggagtcttccatt

SEQ ID NO: 462765 - DNA, 19 bp, Mus musculus
  siRNA target sequence for Nfe2l2 (NM_010902.2,1226-1244).
ccgtggagtcttccattta

SEQ ID NO: 462766 - DNA, 19 bp, Mus musculus
  siRNA target sequence for Nfe2l2 (NM_010902.2,1298-1316).
cccctggaagtgtcaaaca

SEQ ID NO: 462767 - DNA, 19 bp, Mus musculus
  siRNA target sequence for Nfe2l2 (NM_010902.2,1402-1420).
cgtgaatcccaatgtgaaa

SEQ ID NO: 462768 - DNA, 19 bp, Mus musculus
  siRNA target sequence for Nfe2l2 (NM_010902.2,1405-1423).
gaatcccaatgtgaaaata

SEQ ID NO: 462769 - DNA, 19 bp, Mus musculus
  siRNA target sequence for Nfe2l2 (NM_010902.2,1549-1567).
ccattccctgtcgaaaaaa

SEQ ID NO: 462770 - DNA, 19 bp, Mus musculus
  siRNA target sequence for Nfe2l2 (NM_010902.2,1550-1568).
cattccctgtcgaaaaaat

SEQ ID NO: 462771 - DNA, 19 bp, Mus musculus
  siRNA target sequence for Nfe2l2 (NM_010902.2,1556-1574).
ctgtcgaaaaaatcattaa

SEQ ID NO: 462772 - DNA, 19 bp, Mus musculus
  siRNA target sequence for Nfe2l2 (NM_010902.2,1569-1587).
cattaacctccctgttgat

SEQ ID NO: 462773 - DNA, 19 bp, Mus musculus
  siRNA target sequence for Nfe2l2 (NM_010902.2,1578-1596).
ccctgttgatgacttcaat

SEQ ID NO: 462774 - DNA, 19 bp, Mus musculus
  siRNA target sequence for Nfe2l2 (NM_010902.2,1608-1626).
caaggagcaattcaatgaa

SEQ ID NO: 462775 - DNA, 19 bp, Mus musculus
  siRNA target sequence for Nfe2l2 (NM_010902.2,1635-1653).
cgcattgatccgagatata

SEQ ID NO: 462776 - DNA, 19 bp, Mus musculus
  siRNA target sequence for Nfe2l2 (NM_010902.2,1654-1672).
cgcaggagaggtaagaata

SEQ ID NO: 462777 - DNA, 19 bp, Mus musculus
  siRNA target sequence for Nfe2l2 (NM_010902.2,1681-1699).
gcccagaactgtaggaaaa

SEQ ID NO: 462778 - DNA, 19 bp, Mus musculus
  siRNA target sequence for Nfe2l2 (NM_010902.2,1815-1833).
gcggctcagcaccttgtat

SEQ ID NO: 462779 - DNA, 19 bp, Mus musculus
  siRNA target sequence for Nfe2l2 (NM_010902.2,1823-1841).
gcaccttgtatcttgaagt

SEQ ID NO: 462780 - DNA, 19 bp, Mus musculus
  siRNA target sequence for Nfe2l2 (NM_010902.2,1874-1892).
cttactctcccagtgaata

SEQ ID NO: 462781 - DNA, 19 bp, Mus musculus
  siRNA target sequence for Nfe2l3 (NM_010903.1,277-295).
ctgcaactcacgattctgt

SEQ ID NO: 462782 - DNA, 19 bp, Mus musculus
  siRNA target sequence for Nfe2l3 (NM_010903.1,747-765).
gaacgggatgctaagagaa

SEQ ID NO: 462783 - DNA, 19 bp, Mus musculus
  siRNA target sequence for Nfe2l3 (NM_010903.1,817-835).
gtgtcagcccaggcaaaat

SEQ ID NO: 462784 - DNA, 19 bp, Mus musculus
  siRNA target sequence for Nfe2l3 (NM_010903.1,914-932).
ggaacgagagccatctaca

SEQ ID NO: 462785 - DNA, 19 bp, Mus musculus
  siRNA target sequence for Nfe2l3 (NM_010903.1,915-933).
gaacgagagccatctacat

SEQ ID NO: 462786 - DNA, 19 bp, Mus musculus
  siRNA target sequence for Nfe2l3 (NM_010903.1,983-1001).
cacagcctgaacattctct

SEQ ID NO: 462787 - DNA, 19 bp, Mus musculus
  siRNA target sequence for Nfe2l3 (NM_010903.1,1021-1039).
gacattccaccttttctga

SEQ ID NO: 462788 - DNA, 19 bp, Mus musculus
  siRNA target sequence for Nfe2l3 (NM_010903.1,1040-1058).
gcagtgtctgtgaaagtgt

SEQ ID NO: 462789 - DNA, 19 bp, Mus musculus
  siRNA target sequence for Nfe2l3 (NM_010903.1,1067-1085).
cagcacagaacataaattt

SEQ ID NO: 462790 - DNA, 19 bp, Mus musculus
  siRNA target sequence for Nfe2l3 (NM_010903.1,1094-1112).
ctataagccatgatgtcaa

SEQ ID NO: 462791 - DNA, 19 bp, Mus musculus
  siRNA target sequence for Nfe2l3 (NM_010903.1,1129-1147).
ctgttgtaccccaacaaca

SEQ ID NO: 462792 - DNA, 19 bp, Mus musculus
  siRNA target sequence for Nfe2l3 (NM_010903.1,1173-1191).
gtcttcacaggcacaagaa

SEQ ID NO: 462793 - DNA, 19 bp, Mus musculus
  siRNA target sequence for Nfe2l3 (NM_010903.1,1203-1221).
gttaaatcctcatacaaat

SEQ ID NO: 462794 - DNA, 19 bp, Mus musculus
  siRNA target sequence for Nfe2l3 (NM_010903.1,1252-1270).
ccaccgtttgacaatcaaa

SEQ ID NO: 462795 - DNA, 19 bp, Mus musculus
  siRNA target sequence for Nfe2l3 (NM_010903.1,1255-1273).
ccgtttgacaatcaaatga

SEQ ID NO: 462796 - DNA, 19 bp, Mus musculus
  siRNA target sequence for Nfe2l3 (NM_010903.1,1297-1315).
ctgtatgacctggattcaa

SEQ ID NO: 462797 - DNA, 19 bp, Mus musculus
  siRNA target sequence for Nfe2l3 (NM_010903.1,1299-1317).
gtatgacctggattcaaat

SEQ ID NO: 462798 - DNA, 19 bp, Mus musculus
  siRNA target sequence for Nfe2l3 (NM_010903.1,1313-1331).
caaatatatttgatggaat

SEQ ID NO: 462799 - DNA, 19 bp, Mus musculus
  siRNA target sequence for Nfe2l3 (NM_010903.1,1324-1342).
gatggaataaacctaatgt

SEQ ID NO: 462800 - DNA, 19 bp, Mus musculus
  siRNA target sequence for Nfe2l3 (NM_010903.1,1359-1377).
cagtccattggaagtttct

SEQ ID NO: 462801 - DNA, 19 bp, Mus musculus
  siRNA target sequence for Nfe2l3 (NM_010903.1,1361-1379).
gtccattggaagtttctca

SEQ ID NO: 462802 - DNA, 19 bp, Mus musculus
  siRNA target sequence for Nfe2l3 (NM_010903.1,1394-1412).
cagattccgggctctcatt

SEQ ID NO: 462803 - DNA, 19 bp, Mus musculus
  siRNA target sequence for Nfe2l3 (NM_010903.1,1401-1419).
cgggctctcattaaattca

SEQ ID NO: 462804 - DNA, 19 bp, Mus musculus
  siRNA target sequence for Nfe2l3 (NM_010903.1,1402-1420).
gggctctcattaaattcaa

SEQ ID NO: 462805 - DNA, 19 bp, Mus musculus
  siRNA target sequence for Nfe2l3 (NM_010903.1,1404-1422).
gctctcattaaattcaagt

SEQ ID NO: 462806 - DNA, 19 bp, Mus musculus
  siRNA target sequence for Nfe2l3 (NM_010903.1,1442-1460).
caaattcttaccgtattta

SEQ ID NO: 462807 - DNA, 19 bp, Mus musculus
  siRNA target sequence for Nfe2l3 (NM_010903.1,1465-1483).
gggactgtaggttacaata

SEQ ID NO: 462808 - DNA, 19 bp, Mus musculus
  siRNA target sequence for Nfe2l3 (NM_010903.1,1494-1512).
gtctctttgtcatgattta

SEQ ID NO: 462809 - DNA, 19 bp, Mus musculus
  siRNA target sequence for Nfe2l3 (NM_010903.1,1540-1558).
ccccataaacattgtcata

SEQ ID NO: 462810 - DNA, 19 bp, Mus musculus
  siRNA target sequence for Nfe2l3 (NM_010903.1,1571-1589).
ctatagctggctttcatgt

SEQ ID NO: 462811 - DNA, 19 bp, Mus musculus
  siRNA target sequence for Nfe2l3 (NM_010903.1,1697-1715).
ccagtggatgccttgataa

SEQ ID NO: 462812 - DNA, 19 bp, Mus musculus
  siRNA target sequence for Nfe2l3 (NM_010903.1,1707-1725).
ccttgataacccagataga

SEQ ID NO: 462813 - DNA, 19 bp, Mus musculus
  siRNA target sequence for Nfe2l3 (NM_010903.1,1711-1729).
gataacccagatagaaact

SEQ ID NO: 462814 - DNA, 19 bp, Mus musculus
  siRNA target sequence for Nfe2l3 (NM_010903.1,1793-1811).
gtatgcctgttgactcttt

SEQ ID NO: 462815 - DNA, 19 bp, Mus musculus
  siRNA target sequence for Nfe2l3 (NM_010903.1,1806-1824).
ctctttcaacagcatgtta

SEQ ID NO: 462816 - DNA, 19 bp, Mus musculus
  siRNA target sequence for Nfe2l3 (NM_010903.1,1817-1835).
gcatgttaagcagatacta

SEQ ID NO: 462817 - DNA, 19 bp, Mus musculus
  siRNA target sequence for Nfe2l3 (NM_010903.1,1874-1892).
ggcgaagaggaaaaaataa

SEQ ID NO: 462818 - DNA, 19 bp, Mus musculus
  siRNA target sequence for Nfe2l3 (NM_010903.1,1903-1921).
cagaactgccgtaaacgta

SEQ ID NO: 462819 - DNA, 19 bp, Mus musculus
  siRNA target sequence for Nfe2l3 (NM_010903.1,1905-1923).
gaactgccgtaaacgtaaa

SEQ ID NO: 462820 - DNA, 19 bp, Mus musculus
  siRNA target sequence for Nfe2l3 (NM_010903.1,1908-1926).
ctgccgtaaacgtaaacta

SEQ ID NO: 462821 - DNA, 19 bp, Mus musculus
  siRNA target sequence for Nfe2l3 (NM_010903.1,1910-1928).
gccgtaaacgtaaactaga

SEQ ID NO: 462822 - DNA, 19 bp, Mus musculus
  siRNA target sequence for Nfe2l3 (NM_010903.1,1913-1931).
gtaaacgtaaactagacat

SEQ ID NO: 462823 - DNA, 19 bp, Mus musculus
  siRNA target sequence for Nfe2l3 (NM_010903.1,1918-1936).
cgtaaactagacatcattt

SEQ ID NO: 462824 - DNA, 19 bp, Mus musculus
  siRNA target sequence for Nfe2l3 (NM_010903.1,1938-1956).
gaatctagaggatgatata

SEQ ID NO: 462825 - DNA, 19 bp, Mus musculus
  siRNA target sequence for Nfe2l3 (NM_010903.1,1942-1960).
ctagaggatgatatatgta

SEQ ID NO: 462826 - DNA, 19 bp, Mus musculus
  siRNA target sequence for Nfe2l3 (NM_010903.1,1958-1976).
gtaacttgcaagcaaagaa

SEQ ID NO: 462827 - DNA, 19 bp, Mus musculus
  siRNA target sequence for Nfe2l3 (NM_010903.1,2000-2018).
ctcaatgtagcaaagctat

SEQ ID NO: 462828 - DNA, 19 bp, Mus musculus
  siRNA target sequence for Nfe2l3 (NM_010903.1,2009-2027).
gcaaagctattgacataat

SEQ ID NO: 462829 - DNA, 19 bp, Mus musculus
  siRNA target sequence for Nfe2l3 (NM_010903.1,2052-2070).
ccaggatgtttttaataga

SEQ ID NO: 462830 - DNA, 19 bp, Mus musculus
  siRNA target sequence for Nfe2l3 (NM_010903.1,2055-2073).
ggatgtttttaatagatta

SEQ ID NO: 462831 - DNA, 19 bp, Mus musculus
  siRNA target sequence for Nfe2l3 (NM_010903.1,2086-2104).
ggtaggccagtcaatccaa

SEQ ID NO: 462832 - DNA, 19 bp, Mus musculus
  siRNA target sequence for Nfe2l3 (NM_010903.1,2105-2123).
gccaatatgcacttcagta

SEQ ID NO: 462833 - DNA, 19 bp, Mus musculus
  siRNA target sequence for Nfil3 (NM_017373.2,361-379).
gagaaaacgggaattcatt

SEQ ID NO: 462834 - DNA, 19 bp, Mus musculus
  siRNA target sequence for Nfil3 (NM_017373.2,376-394).
cattccggacgagaagaaa

SEQ ID NO: 462835 - DNA, 19 bp, Mus musculus
  siRNA target sequence for Nfil3 (NM_017373.2,408-426).
gggagaaacggcggaaaaa

SEQ ID NO: 462836 - DNA, 19 bp, Mus musculus
  siRNA target sequence for Nfil3 (NM_017373.2,427-445).
caacgaagctgccaaaaga

SEQ ID NO: 462837 - DNA, 19 bp, Mus musculus
  siRNA target sequence for Nfil3 (NM_017373.2,430-448).
cgaagctgccaaaagatct

SEQ ID NO: 462838 - DNA, 19 bp, Mus musculus
  siRNA target sequence for Nfil3 (NM_017373.2,530-548).
gagctgctctccctgaaat

SEQ ID NO: 462839 - DNA, 19 bp, Mus musculus
  siRNA target sequence for Nfil3 (NM_017373.2,573-591).
cggcgtatgcccaagaaat

SEQ ID NO: 462840 - DNA, 19 bp, Mus musculus
  siRNA target sequence for Nfil3 (NM_017373.2,576-594).
cgtatgcccaagaaatcca

SEQ ID NO: 462841 - DNA, 19 bp, Mus musculus
  siRNA target sequence for Nfil3 (NM_017373.2,1197-1215).
ctttggacagcgagtttga

SEQ ID NO: 462842 - DNA, 19 bp, Mus musculus
  siRNA target sequence for Nfil3 (NM_017373.2,1243-1261).
cgatgcgatcgccaaaaga

SEQ ID NO: 462843 - DNA, 19 bp, Mus musculus
  siRNA target sequence for Nfil3 (NM_017373.2,1247-1265).
gcgatcgccaaaagacatt

SEQ ID NO: 462844 - DNA, 19 bp, Mus musculus
  siRNA target sequence for Nfil3 (NM_017373.2,1248-1266).
cgatcgccaaaagacattt

SEQ ID NO: 462845 - DNA, 19 bp, Mus musculus
  siRNA target sequence for Nfil3 (NM_017373.2,1249-1267).
gatcgccaaaagacatttt

SEQ ID NO: 462846 - DNA, 19 bp, Mus musculus
  siRNA target sequence for Nfil3 (NM_017373.2,1327-1345).
gcaggtgacgaacattcaa

SEQ ID NO: 462847 - DNA, 19 bp, Mus musculus
  siRNA target sequence for Nfil3 (NM_017373.2,1330-1348).
ggtgacgaacattcaagat

SEQ ID NO: 462848 - DNA, 19 bp, Mus musculus
  siRNA target sequence for Nfil3 (NM_017373.2,1331-1349).
gtgacgaacattcaagatt

SEQ ID NO: 462849 - DNA, 19 bp, Mus musculus
  siRNA target sequence for Nfil3 (NM_017373.2,1362-1380).
cggaacactggcatcacaa

SEQ ID NO: 462850 - DNA, 19 bp, Mus musculus
  siRNA target sequence for Nfil3 (NM_017373.2,1436-1454).
gacggtggctataaggttt

SEQ ID NO: 462851 - DNA, 19 bp, Mus musculus
  siRNA target sequence for Nfil3 (NM_017373.2,1455-1473).
ccgaagctgagaatttgta

SEQ ID NO: 462852 - DNA, 19 bp, Mus musculus
  siRNA target sequence for Nfil3 (NM_017373.2,1456-1474).
cgaagctgagaatttgtat

SEQ ID NO: 462853 - DNA, 19 bp, Mus musculus
  siRNA target sequence for Nfil3 (NM_017373.2,1480-1498).
gcagggaatagcaaactta

SEQ ID NO: 462854 - DNA, 19 bp, Mus musculus
  siRNA target sequence for Nfil3 (NM_017373.2,1481-1499).
cagggaatagcaaacttat

SEQ ID NO: 462855 - DNA, 19 bp, Mus musculus
  siRNA target sequence for Nfil3 (NM_017373.2,1483-1501).
gggaatagcaaacttatct

SEQ ID NO: 462856 - DNA, 19 bp, Mus musculus
  siRNA target sequence for Nfil3 (NM_017373.2,1508-1526).
gtggtctcgctcaagagat

SEQ ID NO: 462857 - DNA, 19 bp, Mus musculus
  siRNA target sequence for Nfyb (NM_010914.1,245-263).
ctcccagctagggatttct

SEQ ID NO: 462858 - DNA, 19 bp, Mus musculus
  siRNA target sequence for Nfyb (NM_010914.1,269-287).
ctacatcggaggaagtcat

SEQ ID NO: 462859 - DNA, 19 bp, Mus musculus
  siRNA target sequence for Nfyb (NM_010914.1,272-290).
catcggaggaagtcattat

SEQ ID NO: 462860 - DNA, 19 bp, Mus musculus
  siRNA target sequence for Nfyb (NM_010914.1,276-294).
ggaggaagtcattatgtga

SEQ ID NO: 462861 - DNA, 19 bp, Mus musculus
  siRNA target sequence for Nfyb (NM_010914.1,293-311).
gatccagccccatgatgat

SEQ ID NO: 462862 - DNA, 19 bp, Mus musculus
  siRNA target sequence for Nfyb (NM_010914.1,317-335).
ggacagcatgaatgatcat

SEQ ID NO: 462863 - DNA, 19 bp, Mus musculus
  siRNA target sequence for Nfyb (NM_010914.1,365-383).
cagagaacaagatatttat

SEQ ID NO: 462864 - DNA, 19 bp, Mus musculus
  siRNA target sequence for Nfyb (NM_010914.1,394-412).
caaatgtggctaggataat

SEQ ID NO: 462865 - DNA, 19 bp, Mus musculus
  siRNA target sequence for Nfyb (NM_010914.1,399-417).
gtggctaggataatgaaaa

SEQ ID NO: 462866 - DNA, 19 bp, Mus musculus
  siRNA target sequence for Nfyb (NM_010914.1,401-419).
ggctaggataatgaaaaat

SEQ ID NO: 462867 - DNA, 19 bp, Mus musculus
  siRNA target sequence for Nfyb (NM_010914.1,477-495).
gtgagtgaatttataagct

SEQ ID NO: 462868 - DNA, 19 bp, Mus musculus
  siRNA target sequence for Nfyb (NM_010914.1,544-562).
caatcaatggggaggatat

SEQ ID NO: 462869 - DNA, 19 bp, Mus musculus
  siRNA target sequence for Nfyb (NM_010914.1,704-722).
cacggaagaggcattcact

SEQ ID NO: 462870 - DNA, 19 bp, Mus musculus
  siRNA target sequence for Nfyb (NM_010914.1,756-774).
ggtcaacagcaaaacgtta

SEQ ID NO: 462871 - DNA, 19 bp, Mus musculus
  siRNA target sequence for Nfyb (NM_010914.1,757-775).
gtcaacagcaaaacgttat

SEQ ID NO: 462872 - DNA, 19 bp, Mus musculus
  siRNA target sequence for Nfyb (NM_010914.1,765-783).
caaaacgttatggtttaca

SEQ ID NO: 462873 - DNA, 19 bp, Mus musculus
  siRNA target sequence for Nfyb (NM_010914.1,784-802).
caacgtcttaccaacagat

SEQ ID NO: 462874 - DNA, 19 bp, Mus musculus
  siRNA target sequence for Nhlh2 (NM_178777.2,2384-2402).
ccgagctccgcaaactact

SEQ ID NO: 462875 - DNA, 19 bp, Mus musculus
  siRNA target sequence for Nhlh2 (NM_178777.2,2385-2403).
cgagctccgcaaactacta

SEQ ID NO: 462876 - DNA, 19 bp, Mus musculus
  siRNA target sequence for Np95 (NM_010931.2,170-188).
ggatccaggttcgaactat

SEQ ID NO: 462877 - DNA, 19 bp, Mus musculus
  siRNA target sequence for Np95 (NM_010931.2,174-192).
ccaggttcgaactatggat

SEQ ID NO: 462878 - DNA, 19 bp, Mus musculus
  siRNA target sequence for Np95 (NM_010931.2,330-348).
ccacacactcttcgattat

SEQ ID NO: 462879 - DNA, 19 bp, Mus musculus
  siRNA target sequence for Np95 (NM_010931.2,333-351).
cacactcttcgattatgat

SEQ ID NO: 462880 - DNA, 19 bp, Mus musculus
  siRNA target sequence for Np95 (NM_010931.2,542-560).
cggacctggggctgtacaa

SEQ ID NO: 462881 - DNA, 19 bp, Mus musculus
  siRNA target sequence for Np95 (NM_010931.2,551-569).
ggctgtacaaggtcaatga

SEQ ID NO: 462882 - DNA, 19 bp, Mus musculus
  siRNA target sequence for Np95 (NM_010931.2,553-571).
ctgtacaaggtcaatgagt

SEQ ID NO: 462883 - DNA, 19 bp, Mus musculus
  siRNA target sequence for Np95 (NM_010931.2,577-595).
gacgtgcgtgacaatatct

SEQ ID NO: 462884 - DNA, 19 bp, Mus musculus
  siRNA target sequence for Np95 (NM_010931.2,775-793).
gctcgcactgtgataccat

SEQ ID NO: 462885 - DNA, 19 bp, Mus musculus
  siRNA target sequence for Np95 (NM_010931.2,858-876).
cggcttctggtatgatgtt

SEQ ID NO: 462886 - DNA, 19 bp, Mus musculus
  siRNA target sequence for Np95 (NM_010931.2,902-920).
ggacggcacgtgagctata

SEQ ID NO: 462887 - DNA, 19 bp, Mus musculus
  siRNA target sequence for Np95 (NM_010931.2,923-941).
gcaacatcaggctcttgaa

SEQ ID NO: 462888 - DNA, 19 bp, Mus musculus
  siRNA target sequence for Np95 (NM_010931.2,924-942).
caacatcaggctcttgaat

SEQ ID NO: 462889 - DNA, 19 bp, Mus musculus
  siRNA target sequence for Np95 (NM_010931.2,943-961).
gactctcagctcaacaact

SEQ ID NO: 462890 - DNA, 19 bp, Mus musculus
  siRNA target sequence for Npas1 (NM_008718.1,86-104).
gtggccgaggtgaagtcaa

SEQ ID NO: 462891 - DNA, 19 bp, Mus musculus
  siRNA target sequence for Npas1 (NM_008718.1,228-246).
gcgacgcgggaaggaaaat

SEQ ID NO: 462892 - DNA, 19 bp, Mus musculus
  siRNA target sequence for Npas1 (NM_008718.1,503-521).
gcttcgtgttcgctttgaa

SEQ ID NO: 462893 - DNA, 19 bp, Mus musculus
  siRNA target sequence for Npas1 (NM_008718.1,732-750).
ggtggacacccctgagatt

SEQ ID NO: 462894 - DNA, 19 bp, Mus musculus
  siRNA target sequence for Npas1 (NM_008718.1,789-807).
ccaagagcggtccttcttt

SEQ ID NO: 462895 - DNA, 19 bp, Mus musculus
  siRNA target sequence for Npas1 (NM_008718.1,830-848).
ccaagaggggcctgaatgt

SEQ ID NO: 462896 - DNA, 19 bp, Mus musculus
  siRNA target sequence for Npas1 (NM_008718.1,834-852).
gaggggcctgaatgtcaaa

SEQ ID NO: 462897 - DNA, 19 bp, Mus musculus
  siRNA target sequence for Npas1 (NM_008718.1,857-875).
cggggtacaaggtcattca

SEQ ID NO: 462898 - DNA, 19 bp, Mus musculus
  siRNA target sequence for Npas1 (NM_008718.1,858-876).
ggggtacaaggtcattcat

SEQ ID NO: 462899 - DNA, 19 bp, Mus musculus
  siRNA target sequence for Npas1 (NM_008718.1,1022-1040).
gcagagttagcgaccatat

SEQ ID NO: 462900 - DNA, 19 bp, Mus musculus
  siRNA target sequence for Npas1 (NM_008718.1,1074-1092).
ctgctaccagtttgttcat

SEQ ID NO: 462901 - DNA, 19 bp, Mus musculus
  siRNA target sequence for Npas1 (NM_008718.1,1446-1464).
ccgaggcaaacgcatcaaa

SEQ ID NO: 462902 - DNA, 19 bp, Mus musculus
  siRNA target sequence for Npas1 (NM_008718.1,1537-1555).
ccacctcggccagaattca

SEQ ID NO: 462903 - DNA, 19 bp, Mus musculus
  siRNA target sequence for Npas1 (NM_008718.1,1597-1615).
ctgccgtggggcttgacaa

SEQ ID NO: 462904 - DNA, 19 bp, Mus musculus
  siRNA target sequence for Npas1 (NM_008718.1,1712-1730).
cggagttgagcctgatgta

SEQ ID NO: 462905 - DNA, 19 bp, Mus musculus
  siRNA target sequence for Nrf1 (NM_010938.2,304-322).
cggagtgacccaaactgaa

SEQ ID NO: 462906 - DNA, 19 bp, Mus musculus
  siRNA target sequence for Nrf1 (NM_010938.2,384-402).
cgtacactgagcacagtat

SEQ ID NO: 462907 - DNA, 19 bp, Mus musculus
  siRNA target sequence for Nrf1 (NM_010938.2,388-406).
cactgagcacagtatgcta

SEQ ID NO: 462908 - DNA, 19 bp, Mus musculus
  siRNA target sequence for Nrf1 (NM_010938.2,433-451).
ccccgaggacacttcttat

SEQ ID NO: 462909 - DNA, 19 bp, Mus musculus
  siRNA target sequence for Nrf1 (NM_010938.2,564-582).
ggaaacggcctcatgtgtt

SEQ ID NO: 462910 - DNA, 19 bp, Mus musculus
  siRNA target sequence for Nrf1 (NM_010938.2,565-583).
gaaacggcctcatgtgttt

SEQ ID NO: 462911 - DNA, 19 bp, Mus musculus
  siRNA target sequence for Nrf1 (NM_010938.2,620-638).
cgtttgcttcggaaactca

SEQ ID NO: 462912 - DNA, 19 bp, Mus musculus
  siRNA target sequence for Nrf1 (NM_010938.2,639-657).
gagccacgttggatgagta

SEQ ID NO: 462913 - DNA, 19 bp, Mus musculus
  siRNA target sequence for Nrf1 (NM_010938.2,670-688).
gggacagcaagcgattgta

SEQ ID NO: 462914 - DNA, 19 bp, Mus musculus
  siRNA target sequence for Nrf1 (NM_010938.2,672-690).
gacagcaagcgattgtact

SEQ ID NO: 462915 - DNA, 19 bp, Mus musculus
  siRNA target sequence for Nrf1 (NM_010938.2,755-773).
gtggtgcgaaagtacaaga

SEQ ID NO: 462916 - DNA, 19 bp, Mus musculus
  siRNA target sequence for Nrf1 (NM_010938.2,821-839).
gcgccacaggaggttaatt

SEQ ID NO: 462917 - DNA, 19 bp, Mus musculus
  siRNA target sequence for Nrf1 (NM_010938.2,899-917).
gctcagcttcgggcattta

SEQ ID NO: 462918 - DNA, 19 bp, Mus musculus
  siRNA target sequence for Nrf1 (NM_010938.2,900-918).
ctcagcttcgggcatttat

SEQ ID NO: 462919 - DNA, 19 bp, Mus musculus
  siRNA target sequence for Nrf1 (NM_010938.2,923-941).
gagatgctcaagtattcca

SEQ ID NO: 462920 - DNA, 19 bp, Mus musculus
  siRNA target sequence for Nrf1 (NM_010938.2,1072-1090).
ggcattacggaccatagtt

SEQ ID NO: 462921 - DNA, 19 bp, Mus musculus
  siRNA target sequence for Nrf1 (NM_010938.2,1073-1091).
gcattacggaccatagtta

SEQ ID NO: 462922 - DNA, 19 bp, Mus musculus
  siRNA target sequence for Nrf1 (NM_010938.2,1074-1092).
cattacggaccatagttaa

SEQ ID NO: 462923 - DNA, 19 bp, Mus musculus
  siRNA target sequence for Nrf1 (NM_010938.2,1079-1097).
cggaccatagttaaaaatt

SEQ ID NO: 462924 - DNA, 19 bp, Mus musculus
  siRNA target sequence for Nrf1 (NM_010938.2,1083-1101).
ccatagttaaaaattgcta

SEQ ID NO: 462925 - DNA, 19 bp, Mus musculus
  siRNA target sequence for Nrf1 (NM_010938.2,1084-1102).
catagttaaaaattgctat

SEQ ID NO: 462926 - DNA, 19 bp, Mus musculus
  siRNA target sequence for Nrf1 (NM_010938.2,1117-1135).
ggaggatcttttatatgct

SEQ ID NO: 462927 - DNA, 19 bp, Mus musculus
  siRNA target sequence for Nrf1 (NM_010938.2,1168-1186).
caccacacacagtatagct

SEQ ID NO: 462928 - DNA, 19 bp, Mus musculus
  siRNA target sequence for Nrf1 (NM_010938.2,1197-1215).
catcacagaccgtagtaca

SEQ ID NO: 462929 - DNA, 19 bp, Mus musculus
  siRNA target sequence for Nrf1 (NM_010938.2,1352-1370).
ggagaggtggaacaaaact

SEQ ID NO: 462930 - DNA, 19 bp, Mus musculus
  siRNA target sequence for Nrf1 (NM_010938.2,1377-1395).
cgttacagggcggtgaaat

SEQ ID NO: 462931 - DNA, 19 bp, Mus musculus
  siRNA target sequence for Nrf1 (NM_010938.2,1620-1638).
ctggagtccaagatgctaa

SEQ ID NO: 462932 - DNA, 19 bp, Mus musculus
  siRNA target sequence for Nrl (NM_008736.1,333-351).
ggcctggaggagctatatt

SEQ ID NO: 462933 - DNA, 19 bp, Mus musculus
  siRNA target sequence for Nrl (NM_008736.1,456-474).
gggcctcttggctactatt

SEQ ID NO: 462934 - DNA, 19 bp, Mus musculus
  siRNA target sequence for Nrl (NM_008736.1,458-476).
gcctcttggctactattca

SEQ ID NO: 462935 - DNA, 19 bp, Mus musculus
  siRNA target sequence for Nrl (NM_008736.1,759-777).
cgcgagcgcgacctctata

SEQ ID NO: 462936 - DNA, 19 bp, Mus musculus
  siRNA target sequence for Nrl (NM_008736.1,760-778).
gcgagcgcgacctctataa

SEQ ID NO: 462937 - DNA, 19 bp, Mus musculus
  siRNA target sequence for Nsd1 (NM_008739.1,1195-1213).
cggtaatggtcaatccaat

SEQ ID NO: 462938 - DNA, 19 bp, Mus musculus
  siRNA target sequence for Nsd1 (NM_008739.1,1196-1214).
ggtaatggtcaatccaatt

SEQ ID NO: 462939 - DNA, 19 bp, Mus musculus
  siRNA target sequence for Nsd1 (NM_008739.1,1197-1215).
gtaatggtcaatccaattt

SEQ ID NO: 462940 - DNA, 19 bp, Mus musculus
  siRNA target sequence for Nsd1 (NM_008739.1,1203-1221).
gtcaatccaatttttctga

SEQ ID NO: 462941 - DNA, 19 bp, Mus musculus
  siRNA target sequence for Nsd1 (NM_008739.1,1223-1241).
ccacttaatgggtgtacta

SEQ ID NO: 462942 - DNA, 19 bp, Mus musculus
  siRNA target sequence for Nsd1 (NM_008739.1,1224-1242).
cacttaatgggtgtactat

SEQ ID NO: 462943 - DNA, 19 bp, Mus musculus
  siRNA target sequence for Nsd1 (NM_008739.1,1331-1349).
gatttggcctccatgatca

SEQ ID NO: 462944 - DNA, 19 bp, Mus musculus
  siRNA target sequence for Nsd1 (NM_008739.1,1336-1354).
ggcctccatgatcaatgta

SEQ ID NO: 462945 - DNA, 19 bp, Mus musculus
  siRNA target sequence for Nsd1 (NM_008739.1,1338-1356).
cctccatgatcaatgtaga

SEQ ID NO: 462946 - DNA, 19 bp, Mus musculus
  siRNA target sequence for Nsd1 (NM_008739.1,1339-1357).
ctccatgatcaatgtagaa

SEQ ID NO: 462947 - DNA, 19 bp, Mus musculus
  siRNA target sequence for Nsd1 (NM_008739.1,1341-1359).
ccatgatcaatgtagaata

SEQ ID NO: 462948 - DNA, 19 bp, Mus musculus
  siRNA target sequence for Nsd1 (NM_008739.1,1342-1360).
catgatcaatgtagaatat

SEQ ID NO: 462949 - DNA, 19 bp, Mus musculus
  siRNA target sequence for Nsd1 (NM_008739.1,1380-1398).
gatcagaatcctttcaaga

SEQ ID NO: 462950 - DNA, 19 bp, Mus musculus
  siRNA target sequence for Nsd1 (NM_008739.1,1419-1437).
gagctcagtcgccaattgt

SEQ ID NO: 462951 - DNA, 19 bp, Mus musculus
  siRNA target sequence for Nsd1 (NM_008739.1,1421-1439).
gctcagtcgccaattgttt

SEQ ID NO: 462952 - DNA, 19 bp, Mus musculus
  siRNA target sequence for Nsd1 (NM_008739.1,1484-1502).
caggagcccacttgtaata

SEQ ID NO: 462953 - DNA, 19 bp, Mus musculus
  siRNA target sequence for Nsd1 (NM_008739.1,1487-1505).
gagcccacttgtaataact

SEQ ID NO: 462954 - DNA, 19 bp, Mus musculus
  siRNA target sequence for Nsd1 (NM_008739.1,1509-1527).
ccgaactccagttaagagt

SEQ ID NO: 462955 - DNA, 19 bp, Mus musculus
  siRNA target sequence for Nsd1 (NM_008739.1,1510-1528).
cgaactccagttaagagta

SEQ ID NO: 462956 - DNA, 19 bp, Mus musculus
  siRNA target sequence for Nsd1 (NM_008739.1,1511-1529).
gaactccagttaagagtaa

SEQ ID NO: 462957 - DNA, 19 bp, Mus musculus
  siRNA target sequence for Nsd1 (NM_008739.1,1514-1532).
ctccagttaagagtaacaa

SEQ ID NO: 462958 - DNA, 19 bp, Mus musculus
  siRNA target sequence for Nsd1 (NM_008739.1,1624-1642).
cacagaggatgagagtata

SEQ ID NO: 462959 - DNA, 19 bp, Mus musculus
  siRNA target sequence for Nsd1 (NM_008739.1,1636-1654).
gagtatagaggagatcttt

SEQ ID NO: 462960 - DNA, 19 bp, Mus musculus
  siRNA target sequence for Nsd1 (NM_008739.1,1669-1687).
caatgccacctgcaattat

SEQ ID NO: 462961 - DNA, 19 bp, Mus musculus
  siRNA target sequence for Nsd1 (NM_008739.1,1717-1735).
ggccatgggaagtgaacaa

SEQ ID NO: 462962 - DNA, 19 bp, Mus musculus
  siRNA target sequence for Nsd1 (NM_008739.1,1719-1737).
ccatgggaagtgaacaaga

SEQ ID NO: 462963 - DNA, 19 bp, Mus musculus
  siRNA target sequence for Nsd1 (NM_008739.1,1764-1782).
cagtggaacggccattctt

SEQ ID NO: 462964 - DNA, 19 bp, Mus musculus
  siRNA target sequence for Nsd1 (NM_008739.1,1783-1801).
gccgctagctcctcaaact

SEQ ID NO: 462965 - DNA, 19 bp, Mus musculus
  siRNA target sequence for Nsd1 (NM_008739.1,1793-1811).
cctcaaactgaaaaacaga

SEQ ID NO: 462966 - DNA, 19 bp, Mus musculus
  siRNA target sequence for Nsd1 (NM_008739.1,1837-1855).
cggaagcaatgaaaagaca

SEQ ID NO: 462967 - DNA, 19 bp, Mus musculus
  siRNA target sequence for Nsd1 (NM_008739.1,1890-1908).
cgaacgttaccgtagaaga

SEQ ID NO: 462968 - DNA, 19 bp, Mus musculus
  siRNA target sequence for Nsd1 (NM_008739.1,1899-1917).
ccgtagaagagcaatttaa

SEQ ID NO: 462969 - DNA, 19 bp, Mus musculus
  siRNA target sequence for Nsd1 (NM_008739.1,1909-1927).
gcaatttaactcaataaat

SEQ ID NO: 462970 - DNA, 19 bp, Mus musculus
  siRNA target sequence for Nsd1 (NM_008739.1,2070-2088).
gtcttgccgagcaatatga

SEQ ID NO: 462971 - DNA, 19 bp, Mus musculus
  siRNA target sequence for Nsd1 (NM_008739.1,2160-2178).
catttgaggactgtacaaa

SEQ ID NO: 462972 - DNA, 19 bp, Mus musculus
  siRNA target sequence for Nsd1 (NM_008739.1,2175-2193).
caaacgatcctgattcaga

SEQ ID NO: 462973 - DNA, 19 bp, Mus musculus
  siRNA target sequence for Nsd1 (NM_008739.1,2190-2208).
cagaacacctgttgcttaa

SEQ ID NO: 462974 - DNA, 19 bp, Mus musculus
  siRNA target sequence for Nsd1 (NM_008739.1,2204-2222).
cttaatggctgcttgaagt

SEQ ID NO: 462975 - DNA, 19 bp, Mus musculus
  siRNA target sequence for Nsd1 (NM_008739.1,2273-2291).
gccaagtctcgagttagaa

SEQ ID NO: 462976 - DNA, 19 bp, Mus musculus
  siRNA target sequence for Nsd1 (NM_008739.1,2285-2303).
gttagaaaaagctctgata

SEQ ID NO: 462977 - DNA, 19 bp, Mus musculus
  siRNA target sequence for Nsd1 (NM_008739.1,2330-2348).
gatctggtgccatttgaat

SEQ ID NO: 462978 - DNA, 19 bp, Mus musculus
  siRNA target sequence for Nsd1 (NM_008739.1,2340-2358).
catttgaatcacgtaaaga

SEQ ID NO: 462979 - DNA, 19 bp, Mus musculus
  siRNA target sequence for Nsd1 (NM_008739.1,2387-2405).
cttggcctagactttatct

SEQ ID NO: 462980 - DNA, 19 bp, Mus musculus
  siRNA target sequence for Nsd1 (NM_008739.1,2406-2424).
ctgggggtgtatctgataa

SEQ ID NO: 462981 - DNA, 19 bp, Mus musculus
  siRNA target sequence for Nsd1 (NM_008739.1,2522-2540).
gctaagacagactttgaga

SEQ ID NO: 462982 - DNA, 19 bp, Mus musculus
  siRNA target sequence for Nsd1 (NM_008739.1,2541-2559).
ctccagattgcgattcctt

SEQ ID NO: 462983 - DNA, 19 bp, Mus musculus
  siRNA target sequence for Nsd1 (NM_008739.1,2543-2561).
ccagattgcgattccttat

SEQ ID NO: 462984 - DNA, 19 bp, Mus musculus
  siRNA target sequence for Nsd1 (NM_008739.1,2573-2591).
gagagtgctttaatctcta

SEQ ID NO: 462985 - DNA, 19 bp, Mus musculus
  siRNA target sequence for Nsd1 (NM_008739.1,2575-2593).
gagtgctttaatctctaaa

SEQ ID NO: 462986 - DNA, 19 bp, Mus musculus
  siRNA target sequence for Nsd1 (NM_008739.1,2577-2595).
gtgctttaatctctaaaca

SEQ ID NO: 462987 - DNA, 19 bp, Mus musculus
  siRNA target sequence for Nsd1 (NM_008739.1,2629-2647).
ggtctgcagctcaaaagta

SEQ ID NO: 462988 - DNA, 19 bp, Mus musculus
  siRNA target sequence for Nsd1 (NM_008739.1,2813-2831).
gctttatcggtgcacaaaa

SEQ ID NO: 462989 - DNA, 19 bp, Mus musculus
  siRNA target sequence for Nsd1 (NM_008739.1,2814-2832).
ctttatcggtgcacaaaaa

SEQ ID NO: 462990 - DNA, 19 bp, Mus musculus
  siRNA target sequence for Nsd1 (NM_008739.1,2821-2839).
ggtgcacaaaaatgaaaca

SEQ ID NO: 462991 - DNA, 19 bp, Mus musculus
  siRNA target sequence for Nsd1 (NM_008739.1,2959-2977).
gttgtctcaggtcaatctt

SEQ ID NO: 462992 - DNA, 19 bp, Mus musculus
  siRNA target sequence for Nsd1 (NM_008739.1,2968-2986).
ggtcaatctttctgatctt

SEQ ID NO: 462993 - DNA, 19 bp, Mus musculus
  siRNA target sequence for Nsd1 (NM_008739.1,3011-3029).
ccccaaccagaatttagga

SEQ ID NO: 462994 - DNA, 19 bp, Mus musculus
  siRNA target sequence for Nsd1 (NM_008739.1,3012-3030).
cccaaccagaatttaggaa

SEQ ID NO: 462995 - DNA, 19 bp, Mus musculus
  siRNA target sequence for Nsd1 (NM_008739.1,3035-3053).
ggtctcactacaaaattca

SEQ ID NO: 462996 - DNA, 19 bp, Mus musculus
  siRNA target sequence for Nsd1 (NM_008739.1,3057-3075).
cgccaccaggcattcgtaa

SEQ ID NO: 462997 - DNA, 19 bp, Mus musculus
  siRNA target sequence for Nsd1 (NM_008739.1,3058-3076).
gccaccaggcattcgtaat

SEQ ID NO: 462998 - DNA, 19 bp, Mus musculus
  siRNA target sequence for Nsd1 (NM_008739.1,3063-3081).
caggcattcgtaatgaaaa

SEQ ID NO: 462999 - DNA, 19 bp, Mus musculus
  siRNA target sequence for Nsd1 (NM_008739.1,3067-3085).
cattcgtaatgaaaatcca

SEQ ID NO: 463000 - DNA, 19 bp, Mus musculus
  siRNA target sequence for Nsd1 (NM_008739.1,3099-3117).
ggcttgcaaatcaaactct

SEQ ID NO: 463001 - DNA, 19 bp, Mus musculus
  siRNA target sequence for Nsd1 (NM_008739.1,3100-3118).
gcttgcaaatcaaactcta

SEQ ID NO: 463002 - DNA, 19 bp, Mus musculus
  siRNA target sequence for Nsd1 (NM_008739.1,3139-3157).
gcccaagtttcgtagtata

SEQ ID NO: 463003 - DNA, 19 bp, Mus musculus
  siRNA target sequence for Nsd1 (NM_008739.1,3153-3171).
gtataaaatgcaagcataa

SEQ ID NO: 463004 - DNA, 19 bp, Mus musculus
  siRNA target sequence for Nsd1 (NM_008739.1,3204-3222).
caagtgaggacctcagttt

SEQ ID NO: 463005 - DNA, 19 bp, Mus musculus
  siRNA target sequence for Nsd1 (NM_008739.1,3223-3241).
gaaatgctgttcttctgat

SEQ ID NO: 463006 - DNA, 19 bp, Mus musculus
  siRNA target sequence for Nsd1 (NM_008739.1,3250-3268).
ctctcctttggccaatata

SEQ ID NO: 463007 - DNA, 19 bp, Mus musculus
  siRNA target sequence for Nsd1 (NM_008739.1,3259-3277).
ggccaatatatccaaaagt

SEQ ID NO: 463008 - DNA, 19 bp, Mus musculus
  siRNA target sequence for Nsd1 (NM_008739.1,3291-3309).
ggctaaaactactgaacaa

SEQ ID NO: 463009 - DNA, 19 bp, Mus musculus
  siRNA target sequence for Nsd1 (NM_008739.1,3293-3311).
ctaaaactactgaacaata

SEQ ID NO: 463010 - DNA, 19 bp, Mus musculus
  siRNA target sequence for Nsd1 (NM_008739.1,3319-3337).
gaaaaccagagattctagt

SEQ ID NO: 463011 - DNA, 19 bp, Mus musculus
  siRNA target sequence for Nsd1 (NM_008739.1,3353-3371).
gtggtgaagcacgttcttt

SEQ ID NO: 463012 - DNA, 19 bp, Mus musculus
  siRNA target sequence for Nsd1 (NM_008739.1,3383-3401).
gagctctcgtacagatcat

SEQ ID NO: 463013 - DNA, 19 bp, Mus musculus
  siRNA target sequence for Nsd1 (NM_008739.1,3385-3403).
gctctcgtacagatcatta

SEQ ID NO: 463014 - DNA, 19 bp, Mus musculus
  siRNA target sequence for Nsd1 (NM_008739.1,3388-3406).
ctcgtacagatcattaagt

SEQ ID NO: 463015 - DNA, 19 bp, Mus musculus
  siRNA target sequence for Nsd1 (NM_008739.1,3426-3444).
gaacggcaaaggcatcaaa

SEQ ID NO: 463016 - DNA, 19 bp, Mus musculus
  siRNA target sequence for Nsd1 (NM_008739.1,3437-3455).
gcatcaaagccattactgt

SEQ ID NO: 463017 - DNA, 19 bp, Mus musculus
  siRNA target sequence for Nsd1 (NM_008739.1,3462-3480).
ctgcttctagtcagaatca

SEQ ID NO: 463018 - DNA, 19 bp, Mus musculus
  siRNA target sequence for Nsd1 (NM_008739.1,3465-3483).
cttctagtcagaatcatat

SEQ ID NO: 463019 - DNA, 19 bp, Mus musculus
  siRNA target sequence for Nsd1 (NM_008739.1,3471-3489).
gtcagaatcatataccaat

SEQ ID NO: 463020 - DNA, 19 bp, Mus musculus
  siRNA target sequence for Nsd1 (NM_008739.1,3475-3493).
gaatcatataccaattgaa

SEQ ID NO: 463021 - DNA, 19 bp, Mus musculus
  siRNA target sequence for Nsd1 (NM_008739.1,3486-3504).
caattgaaccagattacaa

SEQ ID NO: 463022 - DNA, 19 bp, Mus musculus
  siRNA target sequence for Nsd1 (NM_008739.1,3552-3570).
caaaggagcagcggttaat

SEQ ID NO: 463023 - DNA, 19 bp, Mus musculus
  siRNA target sequence for Nsd1 (NM_008739.1,3564-3582).
ggttaatgactgctcaaaa

SEQ ID NO: 463024 - DNA, 19 bp, Mus musculus
  siRNA target sequence for Nsd1 (NM_008739.1,3565-3583).
gttaatgactgctcaaaat

SEQ ID NO: 463025 - DNA, 19 bp, Mus musculus
  siRNA target sequence for Nsd1 (NM_008739.1,3605-3623).
gatcgtggggactgttctt

SEQ ID NO: 463026 - DNA, 19 bp, Mus musculus
  siRNA target sequence for Nsd1 (NM_008739.1,3633-3651).
ctgtagggacatcaaaagt

SEQ ID NO: 463027 - DNA, 19 bp, Mus musculus
  siRNA target sequence for Nsd1 (NM_008739.1,3775-3793).
cagcttagcttctgacaaa

SEQ ID NO: 463028 - DNA, 19 bp, Mus musculus
  siRNA target sequence for Nsd1 (NM_008739.1,3799-3817).
gctccctgcttgtggtaaa

SEQ ID NO: 463029 - DNA, 19 bp, Mus musculus
  siRNA target sequence for Nsd1 (NM_008739.1,3812-3830).
ggtaaaattcgctctaact

SEQ ID NO: 463030 - DNA, 19 bp, Mus musculus
  siRNA target sequence for Nsd1 (NM_008739.1,3870-3888).
ccaagttgagagaaaccat

SEQ ID NO: 463031 - DNA, 19 bp, Mus musculus
  siRNA target sequence for Nsd1 (NM_008739.1,3871-3889).
caagttgagagaaaccatt

SEQ ID NO: 463032 - DNA, 19 bp, Mus musculus
  siRNA target sequence for Nsd1 (NM_008739.1,3874-3892).
gttgagagaaaccatttca

SEQ ID NO: 463033 - DNA, 19 bp, Mus musculus
  siRNA target sequence for Nsd1 (NM_008739.1,3893-3911).
gcccagatggtaaaacctt

SEQ ID NO: 463034 - DNA, 19 bp, Mus musculus
  siRNA target sequence for Nsd1 (NM_008739.1,3973-3991).
gacacttgctgctaacaga

SEQ ID NO: 463035 - DNA, 19 bp, Mus musculus
  siRNA target sequence for Nsd1 (NM_008739.1,4078-4096).
ggaccttttaagaaatgaa

SEQ ID NO: 463036 - DNA, 19 bp, Mus musculus
  siRNA target sequence for Nsd1 (NM_008739.1,4124-4142).
gatagcaaggctaaacaat

SEQ ID NO: 463037 - DNA, 19 bp, Mus musculus
  siRNA target sequence for Nsd1 (NM_008739.1,4139-4157).
caatcggaccctgataaaa

SEQ ID NO: 463038 - DNA, 19 bp, Mus musculus
  siRNA target sequence for Nsd1 (NM_008739.1,4143-4161).
cggaccctgataaaaatct

SEQ ID NO: 463039 - DNA, 19 bp, Mus musculus
  siRNA target sequence for Nsd1 (NM_008739.1,4172-4190).
ccttcttttgagaacagaa

SEQ ID NO: 463040 - DNA, 19 bp, Mus musculus
  siRNA target sequence for Nsd1 (NM_008739.1,4199-4217).
gagttgggctctgaaatga

SEQ ID NO: 463041 - DNA, 19 bp, Mus musculus
  siRNA target sequence for Nsd1 (NM_008739.1,4269-4287).
ggtggcagcgattaaacca

SEQ ID NO: 463042 - DNA, 19 bp, Mus musculus
  siRNA target sequence for Nsd1 (NM_008739.1,4303-4321).
cggaaagcgtgctaacaga

SEQ ID NO: 463043 - DNA, 19 bp, Mus musculus
  siRNA target sequence for Nsd1 (NM_008739.1,4304-4322).
ggaaagcgtgctaacagat

SEQ ID NO: 463044 - DNA, 19 bp, Mus musculus
  siRNA target sequence for Nsd1 (NM_008739.1,4305-4323).
gaaagcgtgctaacagatt

SEQ ID NO: 463045 - DNA, 19 bp, Mus musculus
  siRNA target sequence for Nsd1 (NM_008739.1,4339-4357).
ctcggagggtgcttttgga

SEQ ID NO: 463046 - DNA, 19 bp, Mus musculus
  siRNA target sequence for Nsd1 (NM_008739.1,4392-4410).
gggaagactacttagaaca

SEQ ID NO: 463047 - DNA, 19 bp, Mus musculus
  siRNA target sequence for Nsd1 (NM_008739.1,4393-4411).
ggaagactacttagaacaa

SEQ ID NO: 463048 - DNA, 19 bp, Mus musculus
  siRNA target sequence for Nsd1 (NM_008739.1,4413-4431).
gagctcctcctacaagtaa

SEQ ID NO: 463049 - DNA, 19 bp, Mus musculus
  siRNA target sequence for Nsd1 (NM_008739.1,4484-4502).
gcgcctcggctgaatgttt

SEQ ID NO: 463050 - DNA, 19 bp, Mus musculus
  siRNA target sequence for Nsd1 (NM_008739.1,4486-4504).
gcctcggctgaatgtttgt

SEQ ID NO: 463051 - DNA, 19 bp, Mus musculus
  siRNA target sequence for Nsd1 (NM_008739.1,4545-4563).
caggaattcccagtttgat

SEQ ID NO: 463052 - DNA, 19 bp, Mus musculus
  siRNA target sequence for Nsd1 (NM_008739.1,4590-4608).
ctattcggtcagagaagaa

SEQ ID NO: 463053 - DNA, 19 bp, Mus musculus
  siRNA target sequence for Nsd1 (NM_008739.1,4699-4717).
ggaacaagtgcataaggta

SEQ ID NO: 463054 - DNA, 19 bp, Mus musculus
  siRNA target sequence for Nsd1 (NM_008739.1,4700-4718).
gaacaagtgcataaggtaa

SEQ ID NO: 463055 - DNA, 19 bp, Mus musculus
  siRNA target sequence for Nsd1 (NM_008739.1,4741-4759).
ccttcttgcccgatgtcaa

SEQ ID NO: 463056 - DNA, 19 bp, Mus musculus
  siRNA target sequence for Nsd1 (NM_008739.1,4789-4807).
gaattctttgatttcaact

SEQ ID NO: 463057 - DNA, 19 bp, Mus musculus
  siRNA target sequence for Nsd1 (NM_008739.1,4959-4977).
ctgaggaattgctcgttaa

SEQ ID NO: 463058 - DNA, 19 bp, Mus musculus
  siRNA target sequence for Nsd1 (NM_008739.1,4961-4979).
gaggaattgctcgttaaga

SEQ ID NO: 463059 - DNA, 19 bp, Mus musculus
  siRNA target sequence for Nsd1 (NM_008739.1,4963-4981).
ggaattgctcgttaagaca

SEQ ID NO: 463060 - DNA, 19 bp, Mus musculus
  siRNA target sequence for Nsd1 (NM_008739.1,5016-5034).
caactaagaaacttcttga

SEQ ID NO: 463061 - DNA, 19 bp, Mus musculus
  siRNA target sequence for Nsd1 (NM_008739.1,5023-5041).
gaaacttcttgaatctaat

SEQ ID NO: 463062 - DNA, 19 bp, Mus musculus
  siRNA target sequence for Nsd1 (NM_008739.1,5042-5060).
gatttagaccctggattta

SEQ ID NO: 463063 - DNA, 19 bp, Mus musculus
  siRNA target sequence for Nsd1 (NM_008739.1,5107-5125).
cagtcgctcgggaaatggt

SEQ ID NO: 463064 - DNA, 19 bp, Mus musculus
  siRNA target sequence for Nsd1 (NM_008739.1,5109-5127).
gtcgctcgggaaatggtat

SEQ ID NO: 463065 - DNA, 19 bp, Mus musculus
  siRNA target sequence for Nsd1 (NM_008739.1,5112-5130).
gctcgggaaatggtattgt

SEQ ID NO: 463066 - DNA, 19 bp, Mus musculus
  siRNA target sequence for Nsd1 (NM_008739.1,5113-5131).
ctcgggaaatggtattgtt

SEQ ID NO: 463067 - DNA, 19 bp, Mus musculus
  siRNA target sequence for Nsd1 (NM_008739.1,5136-5154).
cacgggctacatctcattt

SEQ ID NO: 463068 - DNA, 19 bp, Mus musculus
  siRNA target sequence for Nsd1 (NM_008739.1,5138-5156).
cgggctacatctcatttga

SEQ ID NO: 463069 - DNA, 19 bp, Mus musculus
  siRNA target sequence for Nsd1 (NM_008739.1,5139-5157).
gggctacatctcatttgaa

SEQ ID NO: 463070 - DNA, 19 bp, Mus musculus
  siRNA target sequence for Nsd1 (NM_008739.1,5172-5190).
gcactaccaagatctttga

SEQ ID NO: 463071 - DNA, 19 bp, Mus musculus
  siRNA target sequence for Nsd1 (NM_008739.1,5229-5247).
ccagagtgcactataaaaa

SEQ ID NO: 463072 - DNA, 19 bp, Mus musculus
  siRNA target sequence for Nsd1 (NM_008739.1,5232-5250).
gagtgcactataaaaaagt

SEQ ID NO: 463073 - DNA, 19 bp, Mus musculus
  siRNA target sequence for Nsd1 (NM_008739.1,5363-5381).
gggatgtctgcatccaaaa

SEQ ID NO: 463074 - DNA, 19 bp, Mus musculus
  siRNA target sequence for Nsd1 (NM_008739.1,5364-5382).
ggatgtctgcatccaaaaa

SEQ ID NO: 463075 - DNA, 19 bp, Mus musculus
  siRNA target sequence for Nsd1 (NM_008739.1,5409-5427).
cggcactcaaggagaatgt

SEQ ID NO: 463076 - DNA, 19 bp, Mus musculus
  siRNA target sequence for Nsd1 (NM_008739.1,5518-5536).
gatgcctcgagggaaattt

SEQ ID NO: 463077 - DNA, 19 bp, Mus musculus
  siRNA target sequence for Nsd1 (NM_008739.1,5548-5566).
gtgtcacacaggaatccat

SEQ ID NO: 463078 - DNA, 19 bp, Mus musculus
  siRNA target sequence for Nsd1 (NM_008739.1,5559-5577).
gaatccatacctgttttgt

SEQ ID NO: 463079 - DNA, 19 bp, Mus musculus
  siRNA target sequence for Nsd1 (NM_008739.1,5608-5626).
gtgccttctacccttatgt

SEQ ID NO: 463080 - DNA, 19 bp, Mus musculus
  siRNA target sequence for Nsd1 (NM_008739.1,5619-5637).
ccttatgtgggaaatttta

SEQ ID NO: 463081 - DNA, 19 bp, Mus musculus
  siRNA target sequence for Nsd1 (NM_008739.1,5695-5713).
gtgccccctccacatttgt

SEQ ID NO: 463082 - DNA, 19 bp, Mus musculus
  siRNA target sequence for Nsd1 (NM_008739.1,5697-5715).
gccccctccacatttgtat

SEQ ID NO: 463083 - DNA, 19 bp, Mus musculus
  siRNA target sequence for Nsd1 (NM_008739.1,5702-5720).
ctccacatttgtataacct

SEQ ID NO: 463084 - DNA, 19 bp, Mus musculus
  siRNA target sequence for Nsd1 (NM_008739.1,5729-5747).
gctaatccagccaatgtat

SEQ ID NO: 463085 - DNA, 19 bp, Mus musculus
  siRNA target sequence for Nsd1 (NM_008739.1,5739-5757).
ccaatgtatctgcttctaa

SEQ ID NO: 463086 - DNA, 19 bp, Mus musculus
  siRNA target sequence for Nsd1 (NM_008739.1,5797-5815).
ccatgctaatgacttttgt

SEQ ID NO: 463087 - DNA, 19 bp, Mus musculus
  siRNA target sequence for Nsd1 (NM_008739.1,5837-5855).
cttgcatctaatagtatca

SEQ ID NO: 463088 - DNA, 19 bp, Mus musculus
  siRNA target sequence for Nsd1 (NM_008739.1,5850-5868).
gtatcatctgccctaatca

SEQ ID NO: 463089 - DNA, 19 bp, Mus musculus
  siRNA target sequence for Nsd1 (NM_008739.1,5891-5909).
cgaaatcatgagcatgtta

SEQ ID NO: 463090 - DNA, 19 bp, Mus musculus
  siRNA target sequence for Nsd1 (NM_008739.1,5892-5910).
gaaatcatgagcatgttaa

SEQ ID NO: 463091 - DNA, 19 bp, Mus musculus
  siRNA target sequence for Nsd1 (NM_008739.1,5981-5999).
catcgagaatgcctaaata

SEQ ID NO: 463092 - DNA, 19 bp, Mus musculus
  siRNA target sequence for Nsd1 (NM_008739.1,5987-6005).
gaatgcctaaatatcgata

SEQ ID NO: 463093 - DNA, 19 bp, Mus musculus
  siRNA target sequence for Nsd1 (NM_008739.1,6001-6019).
cgatatccctgaaggaaat

SEQ ID NO: 463094 - DNA, 19 bp, Mus musculus
  siRNA target sequence for Nsd1 (NM_008739.1,6054-6072).
cacactacagggagattgt

SEQ ID NO: 463095 - DNA, 19 bp, Mus musculus
  siRNA target sequence for Nsd1 (NM_008739.1,6067-6085).
gattgtctgggtaaaagtt

SEQ ID NO: 463096 - DNA, 19 bp, Mus musculus
  siRNA target sequence for Nsd1 (NM_008739.1,6125-6143).
cgagctgttccctctaaca

SEQ ID NO: 463097 - DNA, 19 bp, Mus musculus
  siRNA target sequence for Nsd1 (NM_008739.1,6126-6144).
gagctgttccctctaacat

SEQ ID NO: 463098 - DNA, 19 bp, Mus musculus
  siRNA target sequence for Nsd1 (NM_008739.1,6131-6149).
gttccctctaacattgata

SEQ ID NO: 463099 - DNA, 19 bp, Mus musculus
  siRNA target sequence for Nsd1 (NM_008739.1,6222-6240).
ctcgagtcttcccttacat

SEQ ID NO: 463100 - DNA, 19 bp, Mus musculus
  siRNA target sequence for Nsd1 (NM_008739.1,6262-6280).
ggataagatgggaaaagga

SEQ ID NO: 463101 - DNA, 19 bp, Mus musculus
  siRNA target sequence for Nsd1 (NM_008739.1,6320-6338).
gcaagatttgaagagttaa

SEQ ID NO: 463102 - DNA, 19 bp, Mus musculus
  siRNA target sequence for Nsd1 (NM_008739.1,6334-6352).
gttaaaagctcgaaaagaa

SEQ ID NO: 463103 - DNA, 19 bp, Mus musculus
  siRNA target sequence for Nsd1 (NM_008739.1,6388-6406).
gaagccgccaccttacaaa

SEQ ID NO: 463104 - DNA, 19 bp, Mus musculus
  siRNA target sequence for Nsd1 (NM_008739.1,6391-6409).
gccgccaccttacaaacat

SEQ ID NO: 463105 - DNA, 19 bp, Mus musculus
  siRNA target sequence for Nsd1 (NM_008739.1,6392-6410).
ccgccaccttacaaacata

SEQ ID NO: 463106 - DNA, 19 bp, Mus musculus
  siRNA target sequence for Nsd1 (NM_008739.1,6393-6411).
cgccaccttacaaacatat

SEQ ID NO: 463107 - DNA, 19 bp, Mus musculus
  siRNA target sequence for Nsd1 (NM_008739.1,6394-6412).
gccaccttacaaacatata

SEQ ID NO: 463108 - DNA, 19 bp, Mus musculus
  siRNA target sequence for Nsd1 (NM_008739.1,6395-6413).
ccaccttacaaacatataa

SEQ ID NO: 463109 - DNA, 19 bp, Mus musculus
  siRNA target sequence for Nsd1 (NM_008739.1,6431-6449).
ggcagggtacagatcttca

SEQ ID NO: 463110 - DNA, 19 bp, Mus musculus
  siRNA target sequence for Nsd1 (NM_008739.1,6464-6482).
gaaattccccgttgcaatt

SEQ ID NO: 463111 - DNA, 19 bp, Mus musculus
  siRNA target sequence for Nsd1 (NM_008739.1,6472-6490).
ccgttgcaattgtaaagct

SEQ ID NO: 463112 - DNA, 19 bp, Mus musculus
  siRNA target sequence for Nsd1 (NM_008739.1,6473-6491).
cgttgcaattgtaaagcta

SEQ ID NO: 463113 - DNA, 19 bp, Mus musculus
  siRNA target sequence for Nsd1 (NM_008739.1,6478-6496).
caattgtaaagctactgat

SEQ ID NO: 463114 - DNA, 19 bp, Mus musculus
  siRNA target sequence for Nsd1 (NM_008739.1,6533-6551).
cggatgctgctctatgagt

SEQ ID NO: 463115 - DNA, 19 bp, Mus musculus
  siRNA target sequence for Nsd1 (NM_008739.1,6607-6625).
gcgccagtatccagatgtt

SEQ ID NO: 463116 - DNA, 19 bp, Mus musculus
  siRNA target sequence for Nsd1 (NM_008739.1,6613-6631).
gtatccagatgttgaaatt

SEQ ID NO: 463117 - DNA, 19 bp, Mus musculus
  siRNA target sequence for Nsd1 (NM_008739.1,6651-6669).
gctggggtctccgaacaaa

SEQ ID NO: 463118 - DNA, 19 bp, Mus musculus
  siRNA target sequence for Nsd1 (NM_008739.1,6652-6670).
ctggggtctccgaacaaaa

SEQ ID NO: 463119 - DNA, 19 bp, Mus musculus
  siRNA target sequence for Nsd1 (NM_008739.1,6661-6679).
ccgaacaaaaacggatatt

SEQ ID NO: 463120 - DNA, 19 bp, Mus musculus
  siRNA target sequence for Nsd1 (NM_008739.1,6662-6680).
cgaacaaaaacggatatta

SEQ ID NO: 463121 - DNA, 19 bp, Mus musculus
  siRNA target sequence for Nsd1 (NM_008739.1,6709-6727).
gggtgagctaatagatgaa

SEQ ID NO: 463122 - DNA, 19 bp, Mus musculus
  siRNA target sequence for Nsd1 (NM_008739.1,6758-6776).
caagagcacgacatcacta

SEQ ID NO: 463123 - DNA, 19 bp, Mus musculus
  siRNA target sequence for Nsd1 (NM_008739.1,6761-6779).
gagcacgacatcactaatt

SEQ ID NO: 463124 - DNA, 19 bp, Mus musculus
  siRNA target sequence for Nsd1 (NM_008739.1,6766-6784).
cgacatcactaatttctat

SEQ ID NO: 463125 - DNA, 19 bp, Mus musculus
  siRNA target sequence for Nsd1 (NM_008739.1,6787-6805).
gctcacgctagataaagat

SEQ ID NO: 463126 - DNA, 19 bp, Mus musculus
  siRNA target sequence for Nsd1 (NM_008739.1,6835-6853).
ctacgcacgcttcatgaat

SEQ ID NO: 463127 - DNA, 19 bp, Mus musculus
  siRNA target sequence for Nsd1 (NM_008739.1,6856-6874).
ctgctgccagcctaattgt

SEQ ID NO: 463128 - DNA, 19 bp, Mus musculus
  siRNA target sequence for Nsd1 (NM_008739.1,6907-6925).
ccgtgttggtctttttgct

SEQ ID NO: 463129 - DNA, 19 bp, Mus musculus
  siRNA target sequence for Nsd1 (NM_008739.1,6950-6968).
gaacttaccttcaattaca

SEQ ID NO: 463130 - DNA, 19 bp, Mus musculus
  siRNA target sequence for Nsd1 (NM_008739.1,7138-7156).
ggaaagagaggatgaatgt

SEQ ID NO: 463131 - DNA, 19 bp, Mus musculus
  siRNA target sequence for Nsd1 (NM_008739.1,7349-7367).
catcgagaagggatgcttt

SEQ ID NO: 463132 - DNA, 19 bp, Mus musculus
  siRNA target sequence for Nsd1 (NM_008739.1,7382-7400).
gatgggcgtctgtcttgta

SEQ ID NO: 463133 - DNA, 19 bp, Mus musculus
  siRNA target sequence for Nsd1 (NM_008739.1,7387-7405).
gcgtctgtcttgtactgaa

SEQ ID NO: 463134 - DNA, 19 bp, Mus musculus
  siRNA target sequence for Nsd1 (NM_008739.1,7440-7458).
gggagatccgtgagtatgt

SEQ ID NO: 463135 - DNA, 19 bp, Mus musculus
  siRNA target sequence for Nsd1 (NM_008739.1,7654-7672).
ctctagttcccacctttta

SEQ ID NO: 463136 - DNA, 19 bp, Mus musculus
  siRNA target sequence for Nsd1 (NM_008739.1,7662-7680).
cccaccttttagataggat

SEQ ID NO: 463137 - DNA, 19 bp, Mus musculus
  siRNA target sequence for Nsd1 (NM_008739.1,7691-7709).
gctgggtcagggaccaaat

SEQ ID NO: 463138 - DNA, 19 bp, Mus musculus
  siRNA target sequence for Nsd1 (NM_008739.1,7841-7859).
ctggaaagacctctaagaa

SEQ ID NO: 463139 - DNA, 19 bp, Mus musculus
  siRNA target sequence for Nsd1 (NM_008739.1,7844-7862).
gaaagacctctaagaatga

SEQ ID NO: 463140 - DNA, 19 bp, Mus musculus
  siRNA target sequence for Nsd1 (NM_008739.1,7869-7887).
ccaggctggataaatccat

SEQ ID NO: 463141 - DNA, 19 bp, Mus musculus
  siRNA target sequence for Nsd1 (NM_008739.1,7966-7984).
gctgctaaccactaacagt

SEQ ID NO: 463142 - DNA, 19 bp, Mus musculus
  siRNA target sequence for Nsd1 (NM_008739.1,7986-8004).
ccaaaccccagatttctga

SEQ ID NO: 463143 - DNA, 19 bp, Mus musculus
  siRNA target sequence for Nsd1 (NM_008739.1,8080-8098).
ccagtctctggtagctaaa

SEQ ID NO: 463144 - DNA, 19 bp, Mus musculus
  siRNA target sequence for Nsd1 (NM_008739.1,8295-8313).
cacgagctacggagaagat

SEQ ID NO: 463145 - DNA, 19 bp, Mus musculus
  siRNA target sequence for Nsd1 (NM_008739.1,8297-8315).
cgagctacggagaagatca

SEQ ID NO: 463146 - DNA, 19 bp, Mus musculus
  siRNA target sequence for Nsd1 (NM_008739.1,8332-8350).
ccagccctcgggaaaagta

SEQ ID NO: 463147 - DNA, 19 bp, Mus musculus
  siRNA target sequence for Nsd1 (NM_008739.1,8418-8436).
cttcggccaaggctttttt

SEQ ID NO: 463148 - DNA, 19 bp, Mus musculus
  siRNA target sequence for Nsd1 (NM_008739.1,8421-8439).
cggccaaggcttttttata

SEQ ID NO: 463149 - DNA, 19 bp, Mus musculus
  siRNA target sequence for Nsd1 (NM_008739.1,8528-8546).
caggtgaaacagctatcta

SEQ ID NO: 463150 - DNA, 19 bp, Mus musculus
  siRNA target sequence for Nsd1 (NM_008739.1,8604-8622).
ccctccccaatgaagaaaa

SEQ ID NO: 463151 - DNA, 19 bp, Mus musculus
  siRNA target sequence for Nsd1 (NM_008739.1,8679-8697).
cagggctttggcctatagt

SEQ ID NO: 463152 - DNA, 19 bp, Mus musculus
  siRNA target sequence for Nsd1 (NM_008739.1,8732-8750).
gctgggggcacacaaactt

SEQ ID NO: 463153 - DNA, 19 bp, Mus musculus
  siRNA target sequence for Nsd1 (NM_008739.1,8805-8823).
caattcaagctcttaacca

SEQ ID NO: 463154 - DNA, 19 bp, Mus musculus
  siRNA target sequence for Nthl1 (NM_008743.1,295-313).
gccaacatccgcatcatga

SEQ ID NO: 463155 - DNA, 19 bp, Mus musculus
  siRNA target sequence for Nthl1 (NM_008743.1,444-462).
cacagcaggtgctatgcaa

SEQ ID NO: 463156 - DNA, 19 bp, Mus musculus
  siRNA target sequence for Nthl1 (NM_008743.1,518-536).
cgctaggcagactcatcta

SEQ ID NO: 463157 - DNA, 19 bp, Mus musculus
  siRNA target sequence for Nthl1 (NM_008743.1,554-572).
ggaacaaggtaaaatacat

SEQ ID NO: 463158 - DNA, 19 bp, Mus musculus
  siRNA target sequence for Nthl1 (NM_008743.1,688-706).
gtggcctgggggaccatat

SEQ ID NO: 463159 - DNA, 19 bp, Mus musculus
  siRNA target sequence for Nthl1 (NM_008743.1,690-708).
ggcctgggggaccatatca

SEQ ID NO: 463160 - DNA, 19 bp, Mus musculus
  siRNA target sequence for Nucb (NM_008749.1,149-167).
cggacacgggcctgtacta

SEQ ID NO: 463161 - DNA, 19 bp, Mus musculus
  siRNA target sequence for Nucb (NM_008749.1,243-261).
cgctgaggacattaagagt

SEQ ID NO: 463162 - DNA, 19 bp, Mus musculus
  siRNA target sequence for Nucb (NM_008749.1,655-673).
cgggaacaccccaaagtca

SEQ ID NO: 463163 - DNA, 19 bp, Mus musculus
  siRNA target sequence for Nucb (NM_008749.1,683-701).
gcagccaagcccagttgaa

SEQ ID NO: 463164 - DNA, 19 bp, Mus musculus
  siRNA target sequence for Nucb (NM_008749.1,782-800).
gtgatggtgtcctagatga

SEQ ID NO: 463165 - DNA, 19 bp, Mus musculus
  siRNA target sequence for Nucb (NM_008749.1,840-858).
ggtgtatgacccgaagaat

SEQ ID NO: 463166 - DNA, 19 bp, Mus musculus
  siRNA target sequence for Nucb2 (NM_016773.1,295-313).
ggaggatcatccaagtaca

SEQ ID NO: 463167 - DNA, 19 bp, Mus musculus
  siRNA target sequence for Nucb2 (NM_016773.1,298-316).
ggatcatccaagtacagta

SEQ ID NO: 463168 - DNA, 19 bp, Mus musculus
  siRNA target sequence for Nucb2 (NM_016773.1,353-371).
ggaagctgttcctatcgat

SEQ ID NO: 463169 - DNA, 19 bp, Mus musculus
  siRNA target sequence for Nucb2 (NM_016773.1,436-454).
ctggactttattatgatga

SEQ ID NO: 463170 - DNA, 19 bp, Mus musculus
  siRNA target sequence for Nucb2 (NM_016773.1,439-457).
gactttattatgatgaata

SEQ ID NO: 463171 - DNA, 19 bp, Mus musculus
  siRNA target sequence for Nucb2 (NM_016773.1,519-537).
gcagacatagaggagataa

SEQ ID NO: 463172 - DNA, 19 bp, Mus musculus
  siRNA target sequence for Nucb2 (NM_016773.1,522-540).
gacatagaggagataagga

SEQ ID NO: 463173 - DNA, 19 bp, Mus musculus
  siRNA target sequence for Nucb2 (NM_016773.1,563-581).
ggacttagtaagtcacaaa

SEQ ID NO: 463174 - DNA, 19 bp, Mus musculus
  siRNA target sequence for Nucb2 (NM_016773.1,631-649).
ggatgctcatcaaagctaa

SEQ ID NO: 463175 - DNA, 19 bp, Mus musculus
  siRNA target sequence for Nucb2 (NM_016773.1,716-734).
ccaccagaatcctaacaca

SEQ ID NO: 463176 - DNA, 19 bp, Mus musculus
  siRNA target sequence for Nucb2 (NM_016773.1,717-735).
caccagaatcctaacacat

SEQ ID NO: 463177 - DNA, 19 bp, Mus musculus
  siRNA target sequence for Nucb2 (NM_016773.1,719-737).
ccagaatcctaacacattt

SEQ ID NO: 463178 - DNA, 19 bp, Mus musculus
  siRNA target sequence for Nucb2 (NM_016773.1,722-740).
gaatcctaacacatttgaa

SEQ ID NO: 463179 - DNA, 19 bp, Mus musculus
  siRNA target sequence for Nucb2 (NM_016773.1,775-793).
ccgcggatctggagcaata

SEQ ID NO: 463180 - DNA, 19 bp, Mus musculus
  siRNA target sequence for Nucb2 (NM_016773.1,799-817).
ggactcggcatgaagagtt

SEQ ID NO: 463181 - DNA, 19 bp, Mus musculus
  siRNA target sequence for Nucb2 (NM_016773.1,800-818).
gactcggcatgaagagttt

SEQ ID NO: 463182 - DNA, 19 bp, Mus musculus
  siRNA target sequence for Nucb2 (NM_016773.1,843-861).
cacgagcggagagagtatt

SEQ ID NO: 463183 - DNA, 19 bp, Mus musculus
  siRNA target sequence for Nucb2 (NM_016773.1,845-863).
cgagcggagagagtattta

SEQ ID NO: 463184 - DNA, 19 bp, Mus musculus
  siRNA target sequence for Nucb2 (NM_016773.1,846-864).
gagcggagagagtatttaa

SEQ ID NO: 463185 - DNA, 19 bp, Mus musculus
  siRNA target sequence for Nucb2 (NM_016773.1,929-947).
cgaagaccaccccaaagtt

SEQ ID NO: 463186 - DNA, 19 bp, Mus musculus
  siRNA target sequence for Nucb2 (NM_016773.1,930-948).
gaagaccaccccaaagtta

SEQ ID NO: 463187 - DNA, 19 bp, Mus musculus
  siRNA target sequence for Nucb2 (NM_016773.1,935-953).
ccaccccaaagttaatcat

SEQ ID NO: 463188 - DNA, 19 bp, Mus musculus
  siRNA target sequence for Nucb2 (NM_016773.1,955-973).
ccggaagcaaagatcaact

SEQ ID NO: 463189 - DNA, 19 bp, Mus musculus
  siRNA target sequence for Nucb2 (NM_016773.1,956-974).
cggaagcaaagatcaacta

SEQ ID NO: 463190 - DNA, 19 bp, Mus musculus
  siRNA target sequence for Nucb2 (NM_016773.1,957-975).
ggaagcaaagatcaactaa

SEQ ID NO: 463191 - DNA, 19 bp, Mus musculus
  siRNA target sequence for Nucb2 (NM_016773.1,999-1017).
ggattggaccctaatgact

SEQ ID NO: 463192 - DNA, 19 bp, Mus musculus
  siRNA target sequence for Nucb2 (NM_016773.1,1014-1032).
gactttgaccccaagacat

SEQ ID NO: 463193 - DNA, 19 bp, Mus musculus
  siRNA target sequence for Nucb2 (NM_016773.1,1030-1048).
catttttcaaattacatga

SEQ ID NO: 463194 - DNA, 19 bp, Mus musculus
  siRNA target sequence for Nucb2 (NM_016773.1,1118-1136).
gtataacccacaaaatgca

SEQ ID NO: 463195 - DNA, 19 bp, Mus musculus
  siRNA target sequence for Nucb2 (NM_016773.1,1142-1160).
cgatatgatagaaatggaa

SEQ ID NO: 463196 - DNA, 19 bp, Mus musculus
  siRNA target sequence for Nucb2 (NM_016773.1,1187-1205).
cgtcatgagtgagattgat

SEQ ID NO: 463197 - DNA, 19 bp, Mus musculus
  siRNA target sequence for Nucb2 (NM_016773.1,1188-1206).
gtcatgagtgagattgata

SEQ ID NO: 463198 - DNA, 19 bp, Mus musculus
  siRNA target sequence for Nucb2 (NM_016773.1,1195-1213).
gtgagattgataacaacaa

SEQ ID NO: 463199 - DNA, 19 bp, Mus musculus
  siRNA target sequence for Nucb2 (NM_016773.1,1293-1311).
ctggaccagcaacagttat

SEQ ID NO: 463200 - DNA, 19 bp, Mus musculus
  siRNA target sequence for Nucb2 (NM_016773.1,1313-1331).
caccgaggacgagcttaaa

SEQ ID NO: 463201 - DNA, 19 bp, Mus musculus
  siRNA target sequence for Nucb2 (NM_016773.1,1322-1340).
cgagcttaaagagtatgaa

SEQ ID NO: 463202 - DNA, 19 bp, Mus musculus
  siRNA target sequence for Ogg1 (NM_010957.2,314-332).
gcgtctggacttggtttta

SEQ ID NO: 463203 - DNA, 19 bp, Mus musculus
  siRNA target sequence for Ogg1 (NM_010957.2,580-598).
gagtggcccagaaattcca

SEQ ID NO: 463204 - DNA, 19 bp, Mus musculus
  siRNA target sequence for Ogg1 (NM_010957.2,665-683).
caacattgctcgcattact

SEQ ID NO: 463205 - DNA, 19 bp, Mus musculus
  siRNA target sequence for Ogg1 (NM_010957.2,710-728).
ctttggacctcgactcatt

SEQ ID NO: 463206 - DNA, 19 bp, Mus musculus
  siRNA target sequence for Ogg1 (NM_010957.2,721-739).
gactcattcagcttgatga

SEQ ID NO: 463207 - DNA, 19 bp, Mus musculus
  siRNA target sequence for Ogg1 (NM_010957.2,821-839).
gtaccgtgcccgctatgta

SEQ ID NO: 463208 - DNA, 19 bp, Mus musculus
  siRNA target sequence for Ogg1 (NM_010957.2,901-919).
gagtggccccttatgaaga

SEQ ID NO: 463209 - DNA, 19 bp, Mus musculus
  siRNA target sequence for Ogg1 (NM_010957.2,966-984).
gctgactgcatctgcttaa

SEQ ID NO: 463210 - DNA, 19 bp, Mus musculus
  siRNA target sequence for Ogg1 (NM_010957.2,967-985).
ctgactgcatctgcttaat

SEQ ID NO: 463211 - DNA, 19 bp, Mus musculus
  siRNA target sequence for Ogg1 (NM_010957.2,979-997).
gcttaatggcccttgacaa

SEQ ID NO: 463212 - DNA, 19 bp, Mus musculus
  siRNA target sequence for Ogg1 (NM_010957.2,980-998).
cttaatggcccttgacaaa

SEQ ID NO: 463213 - DNA, 19 bp, Mus musculus
  siRNA target sequence for Ogg1 (NM_010957.2,1011-1029).
cccgtggatgtccatgtat

SEQ ID NO: 463214 - DNA, 19 bp, Mus musculus
  siRNA target sequence for Ogg1 (NM_010957.2,1127-1145).
gaatctgtggggaccttat

SEQ ID NO: 463215 - DNA, 19 bp, Mus musculus
  siRNA target sequence for Olig1 (NM_016968.2,432-450).
gacgcgctgcgcgaagtta

SEQ ID NO: 463216 - DNA, 19 bp, Mus musculus
  siRNA target sequence for Olig1 (NM_016968.2,436-454).
cgctgcgcgaagttatcct

SEQ ID NO: 463217 - DNA, 19 bp, Mus musculus
  siRNA target sequence for Olig1 (NM_016968.2,437-455).
gctgcgcgaagttatccta

SEQ ID NO: 463218 - DNA, 19 bp, Mus musculus
  siRNA target sequence for Olig2 (NM_016967.1,44-62).
cagaacccgatgatctttt

SEQ ID NO: 463219 - DNA, 19 bp, Mus musculus
  siRNA target sequence for Olig2 (NM_016967.1,217-235).
ggtggcttcaagtcatctt

SEQ ID NO: 463220 - DNA, 19 bp, Mus musculus
  siRNA target sequence for Olig2 (NM_016967.1,359-377).
gcatgcacgacctcaacat

SEQ ID NO: 463221 - DNA, 19 bp, Mus musculus
  siRNA target sequence for Olig2 (NM_016967.1,457-475).
ctgctggcgcgaaactaca

SEQ ID NO: 463222 - DNA, 19 bp, Mus musculus
  siRNA target sequence for Olig2 (NM_016967.1,512-530).
gactggtgagcgagatcta

SEQ ID NO: 463223 - DNA, 19 bp, Mus musculus
  siRNA target sequence for Orc1l (NM_011015.1,144-162).
gcagaagaccagacaaact

SEQ ID NO: 463224 - DNA, 19 bp, Mus musculus
  siRNA target sequence for Orc1l (NM_011015.1,150-168).
gaccagacaaactttctca

SEQ ID NO: 463225 - DNA, 19 bp, Mus musculus
  siRNA target sequence for Orc1l (NM_011015.1,179-197).
ggccattgccgaatcgaaa

SEQ ID NO: 463226 - DNA, 19 bp, Mus musculus
  siRNA target sequence for Orc1l (NM_011015.1,180-198).
gccattgccgaatcgaaaa

SEQ ID NO: 463227 - DNA, 19 bp, Mus musculus
  siRNA target sequence for Orc1l (NM_011015.1,182-200).
cattgccgaatcgaaaaca

SEQ ID NO: 463228 - DNA, 19 bp, Mus musculus
  siRNA target sequence for Orc1l (NM_011015.1,193-211).
cgaaaacagttccaacaaa

SEQ ID NO: 463229 - DNA, 19 bp, Mus musculus
  siRNA target sequence for Orc1l (NM_011015.1,199-217).
cagttccaacaaatgtaca

SEQ ID NO: 463230 - DNA, 19 bp, Mus musculus
  siRNA target sequence for Orc1l (NM_011015.1,313-331).
gtggctaaactgattgaat

SEQ ID NO: 463231 - DNA, 19 bp, Mus musculus
  siRNA target sequence for Orc1l (NM_011015.1,381-399).
gtggtttgtcagattcctt

SEQ ID NO: 463232 - DNA, 19 bp, Mus musculus
  siRNA target sequence for Orc1l (NM_011015.1,475-493).
gactgggataacaagatta

SEQ ID NO: 463233 - DNA, 19 bp, Mus musculus
  siRNA target sequence for Orc1l (NM_011015.1,477-495).
ctgggataacaagattaat

SEQ ID NO: 463234 - DNA, 19 bp, Mus musculus
  siRNA target sequence for Orc1l (NM_011015.1,479-497).
gggataacaagattaatgt

SEQ ID NO: 463235 - DNA, 19 bp, Mus musculus
  siRNA target sequence for Orc1l (NM_011015.1,888-906).
gtgtgactccttggattat

SEQ ID NO: 463236 - DNA, 19 bp, Mus musculus
  siRNA target sequence for Orc1l (NM_011015.1,998-1016).
ctttggaaactcgagttaa

SEQ ID NO: 463237 - DNA, 19 bp, Mus musculus
  siRNA target sequence for Orc1l (NM_011015.1,1033-1051).
cctttttgtgccaaaagta

SEQ ID NO: 463238 - DNA, 19 bp, Mus musculus
  siRNA target sequence for Orc1l (NM_011015.1,1234-1252).
cgtgtccatagaaagagtt

SEQ ID NO: 463239 - DNA, 19 bp, Mus musculus
  siRNA target sequence for Orc1l (NM_011015.1,1781-1799).
cagaaccccaccaagtcta

SEQ ID NO: 463240 - DNA, 19 bp, Mus musculus
  siRNA target sequence for Orc1l (NM_011015.1,2334-2352).
gttctcctcgtcatatatt

SEQ ID NO: 463241 - DNA, 19 bp, Mus musculus
  siRNA target sequence for Orc1l (NM_011015.1,2337-2355).
ctcctcgtcatatattact

SEQ ID NO: 463242 - DNA, 19 bp, Mus musculus
  siRNA target sequence for Orc1l (NM_011015.1,2586-2604).
ccttcgagtgagactcaat

SEQ ID NO: 463243 - DNA, 19 bp, Mus musculus
  siRNA target sequence for Orc1l (NM_011015.1,2619-2637).
cgtgctgtttgctctcaaa

SEQ ID NO: 463244 - DNA, 19 bp, Mus musculus
  siRNA target sequence for Orc1l (NM_011015.1,2622-2640).
gctgtttgctctcaaagaa

SEQ ID NO: 463245 - DNA, 19 bp, Mus musculus
  siRNA target sequence for Orc3l (NM_015824.2,127-145).
gtgccaatagaggattatt

SEQ ID NO: 463246 - DNA, 19 bp, Mus musculus
  siRNA target sequence for Orc3l (NM_015824.2,129-147).
gccaatagaggattatttt

SEQ ID NO: 463247 - DNA, 19 bp, Mus musculus
  siRNA target sequence for Orc3l (NM_015824.2,174-192).
cagtaaacttcgatttgaa

SEQ ID NO: 463248 - DNA, 19 bp, Mus musculus
  siRNA target sequence for Orc3l (NM_015824.2,184-202).
cgatttgaaacatatagct

SEQ ID NO: 463249 - DNA, 19 bp, Mus musculus
  siRNA target sequence for Orc3l (NM_015824.2,185-203).
gatttgaaacatatagctt

SEQ ID NO: 463250 - DNA, 19 bp, Mus musculus
  siRNA target sequence for Orc3l (NM_015824.2,209-227).
ggcaacggatgaaatctga

SEQ ID NO: 463251 - DNA, 19 bp, Mus musculus
  siRNA target sequence for Orc3l (NM_015824.2,210-228).
gcaacggatgaaatctgaa

SEQ ID NO: 463252 - DNA, 19 bp, Mus musculus
  siRNA target sequence for Orc3l (NM_015824.2,211-229).
caacggatgaaatctgaaa

SEQ ID NO: 463253 - DNA, 19 bp, Mus musculus
  siRNA target sequence for Orc3l (NM_015824.2,333-351).
ctctcaaatgaaattcaga

SEQ ID NO: 463254 - DNA, 19 bp, Mus musculus
  siRNA target sequence for Orc3l (NM_015824.2,390-408).
cacggatcatgatgtgata

SEQ ID NO: 463255 - DNA, 19 bp, Mus musculus
  siRNA target sequence for Orc3l (NM_015824.2,405-423).
gatactcagaagtctaaca

SEQ ID NO: 463256 - DNA, 19 bp, Mus musculus
  siRNA target sequence for Orc3l (NM_015824.2,422-440).
cagagacccttcagaataa

SEQ ID NO: 463257 - DNA, 19 bp, Mus musculus
  siRNA target sequence for Orc3l (NM_015824.2,474-492).
ggattgtcccgatgtgaaa

SEQ ID NO: 463258 - DNA, 19 bp, Mus musculus
  siRNA target sequence for Orc3l (NM_015824.2,482-500).
ccgatgtgaaacatttttt

SEQ ID NO: 463259 - DNA, 19 bp, Mus musculus
  siRNA target sequence for Orc3l (NM_015824.2,582-600).
gacaaattattcaatggat

SEQ ID NO: 463260 - DNA, 19 bp, Mus musculus
  siRNA target sequence for Orc3l (NM_015824.2,638-656).
cagaccacaaagtgacaat

SEQ ID NO: 463261 - DNA, 19 bp, Mus musculus
  siRNA target sequence for Orc3l (NM_015824.2,689-707).
cccctcctgtggtgcttat

SEQ ID NO: 463262 - DNA, 19 bp, Mus musculus
  siRNA target sequence for Orc3l (NM_015824.2,692-710).
ctcctgtggtgcttatctt

SEQ ID NO: 463263 - DNA, 19 bp, Mus musculus
  siRNA target sequence for Orc3l (NM_015824.2,745-763).
caagacttcataactatca

SEQ ID NO: 463264 - DNA, 19 bp, Mus musculus
  siRNA target sequence for Orc3l (NM_015824.2,777-795).
gcatgagtttccgctaatt

SEQ ID NO: 463265 - DNA, 19 bp, Mus musculus
  siRNA target sequence for Orc3l (NM_015824.2,834-852).
ccgactgcttcctcattca

SEQ ID NO: 463266 - DNA, 19 bp, Mus musculus
  siRNA target sequence for Orc3l (NM_015824.2,919-937).
cttgataagctacttctta

SEQ ID NO: 463267 - DNA, 19 bp, Mus musculus
  siRNA target sequence for Orc3l (NM_015824.2,941-959).
ctcagtttccctttaaact

SEQ ID NO: 463268 - DNA, 19 bp, Mus musculus
  siRNA target sequence for Orc3l (NM_015824.2,984-1002).
gaccaacatctttttgtat

SEQ ID NO: 463269 - DNA, 19 bp, Mus musculus
  siRNA target sequence for Orc3l (NM_015824.2,986-1004).
ccaacatctttttgtatca

SEQ ID NO: 463270 - DNA, 19 bp, Mus musculus
  siRNA target sequence for Orc3l (NM_015824.2,999-1017).
gtatcatgatttctcaatt

SEQ ID NO: 463271 - DNA, 19 bp, Mus musculus
  siRNA target sequence for Orc3l (NM_015824.2,1026-1044).
catcaaaggaattaagctt

SEQ ID NO: 463272 - DNA, 19 bp, Mus musculus
  siRNA target sequence for Orc3l (NM_015824.2,1042-1060).
ctttctctactagaacatt

SEQ ID NO: 463273 - DNA, 19 bp, Mus musculus
  siRNA target sequence for Orc3l (NM_015824.2,1123-1141).
gttttctcagttagtcaat

SEQ ID NO: 463274 - DNA, 19 bp, Mus musculus
  siRNA target sequence for Orc3l (NM_015824.2,1156-1174).
cgccttccttcatttagga

SEQ ID NO: 463275 - DNA, 19 bp, Mus musculus
  siRNA target sequence for Orc3l (NM_015824.2,1210-1228).
gcactgctgacaaatgaga

SEQ ID NO: 463276 - DNA, 19 bp, Mus musculus
  siRNA target sequence for Orc3l (NM_015824.2,1230-1248).
cttcttaaaggagaaaact

SEQ ID NO: 463277 - DNA, 19 bp, Mus musculus
  siRNA target sequence for Orc3l (NM_015824.2,1264-1282).
gacctgcatgtttaccata

SEQ ID NO: 463278 - DNA, 19 bp, Mus musculus
  siRNA target sequence for Orc3l (NM_015824.2,1267-1285).
ctgcatgtttaccatatca

SEQ ID NO: 463279 - DNA, 19 bp, Mus musculus
  siRNA target sequence for Orc3l (NM_015824.2,1269-1287).
gcatgtttaccatatcaat

SEQ ID NO: 463280 - DNA, 19 bp, Mus musculus
  siRNA target sequence for Orc3l (NM_015824.2,1297-1315).
gtcttgagatgtcttcata

SEQ ID NO: 463281 - DNA, 19 bp, Mus musculus
  siRNA target sequence for Orc3l (NM_015824.2,1299-1317).
cttgagatgtcttcataat

SEQ ID NO: 463282 - DNA, 19 bp, Mus musculus
  siRNA target sequence for Orc3l (NM_015824.2,1341-1359).
cccactgggtcgacagatt

SEQ ID NO: 463283 - DNA, 19 bp, Mus musculus
  siRNA target sequence for Orc3l (NM_015824.2,1342-1360).
ccactgggtcgacagatta

SEQ ID NO: 463284 - DNA, 19 bp, Mus musculus
  siRNA target sequence for Orc3l (NM_015824.2,1363-1381).
gagctgtattgcacatgtt

SEQ ID NO: 463285 - DNA, 19 bp, Mus musculus
  siRNA target sequence for Orc3l (NM_015824.2,1365-1383).
gctgtattgcacatgttta

SEQ ID NO: 463286 - DNA, 19 bp, Mus musculus
  siRNA target sequence for Orc3l (NM_015824.2,1397-1415).
gggattcggaggagtacaa

SEQ ID NO: 463287 - DNA, 19 bp, Mus musculus
  siRNA target sequence for Orc3l (NM_015824.2,1399-1417).
gattcggaggagtacaagt

SEQ ID NO: 463288 - DNA, 19 bp, Mus musculus
  siRNA target sequence for Orc3l (NM_015824.2,1464-1482).
catacttcagcgctgtatt

SEQ ID NO: 463289 - DNA, 19 bp, Mus musculus
  siRNA target sequence for Orc3l (NM_015824.2,1641-1659).
ccttcagaagtccttacta

SEQ ID NO: 463290 - DNA, 19 bp, Mus musculus
  siRNA target sequence for Orc3l (NM_015824.2,1725-1743).
gaacttcatcgacaactta

SEQ ID NO: 463291 - DNA, 19 bp, Mus musculus
  siRNA target sequence for Orc3l (NM_015824.2,1783-1801).
catgaggtagtgtacttca

SEQ ID NO: 463292 - DNA, 19 bp, Mus musculus
  siRNA target sequence for Orc3l (NM_015824.2,1814-1832).
cactccgtgagcacttaaa

SEQ ID NO: 463293 - DNA, 19 bp, Mus musculus
  siRNA target sequence for Orc3l (NM_015824.2,1818-1836).
ccgtgagcacttaaatgct

SEQ ID NO: 463294 - DNA, 19 bp, Mus musculus
  siRNA target sequence for Orc3l (NM_015824.2,1862-1880).
cactcaacaacccatacta

SEQ ID NO: 463295 - DNA, 19 bp, Mus musculus
  siRNA target sequence for Orc3l (NM_015824.2,1864-1882).
ctcaacaacccatactatt

SEQ ID NO: 463296 - DNA, 19 bp, Mus musculus
  siRNA target sequence for Orc3l (NM_015824.2,1927-1945).
cctgacatctgcatagcat

SEQ ID NO: 463297 - DNA, 19 bp, Mus musculus
  siRNA target sequence for Orc3l (NM_015824.2,1928-1946).
ctgacatctgcatagcata

SEQ ID NO: 463298 - DNA, 19 bp, Mus musculus
  siRNA target sequence for Orc3l (NM_015824.2,1932-1950).
catctgcatagcatacaaa

SEQ ID NO: 463299 - DNA, 19 bp, Mus musculus
  siRNA target sequence for Orc3l (NM_015824.2,2093-2111).
gagctgtttctgaattaga

SEQ ID NO: 463300 - DNA, 19 bp, Mus musculus
  siRNA target sequence for Orc3l (NM_015824.2,2110-2128).
gaacttttaggctttataa

SEQ ID NO: 463301 - DNA, 19 bp, Mus musculus
  siRNA target sequence for Orc3l (NM_015824.2,2121-2139).
ctttataaaacctacgaaa

SEQ ID NO: 463302 - DNA, 19 bp, Mus musculus
  siRNA target sequence for Orc4l (NM_011958.2,188-206).
ggtacaaagaattttacgt

SEQ ID NO: 463303 - DNA, 19 bp, Mus musculus
  siRNA target sequence for Orc4l (NM_011958.2,196-214).
gaattttacgtgaaagatt

SEQ ID NO: 463304 - DNA, 19 bp, Mus musculus
  siRNA target sequence for Orc4l (NM_011958.2,246-264).
ggagtgcaagtacaataca

SEQ ID NO: 463305 - DNA, 19 bp, Mus musculus
  siRNA target sequence for Orc4l (NM_011958.2,247-265).
gagtgcaagtacaatacaa

SEQ ID NO: 463306 - DNA, 19 bp, Mus musculus
  siRNA target sequence for Orc4l (NM_011958.2,255-273).
gtacaatacaagcatttga

SEQ ID NO: 463307 - DNA, 19 bp, Mus musculus
  siRNA target sequence for Orc4l (NM_011958.2,295-313).
ctatctatggagaaagcaa

SEQ ID NO: 463308 - DNA, 19 bp, Mus musculus
  siRNA target sequence for Orc4l (NM_011958.2,408-426).
gtgatacaagttcacttaa

SEQ ID NO: 463309 - DNA, 19 bp, Mus musculus
  siRNA target sequence for Orc4l (NM_011958.2,621-639).
gctcatcagaaaaatcaaa

SEQ ID NO: 463310 - DNA, 19 bp, Mus musculus
  siRNA target sequence for Orc4l (NM_011958.2,680-698).
gacaccagtagcagttatt

SEQ ID NO: 463311 - DNA, 19 bp, Mus musculus
  siRNA target sequence for Orc4l (NM_011958.2,693-711).
gttattggacttacatgta

SEQ ID NO: 463312 - DNA, 19 bp, Mus musculus
  siRNA target sequence for Orc4l (NM_011958.2,702-720).
cttacatgtagattggata

SEQ ID NO: 463313 - DNA, 19 bp, Mus musculus
  siRNA target sequence for Orc4l (NM_011958.2,706-724).
catgtagattggatatttt

SEQ ID NO: 463314 - DNA, 19 bp, Mus musculus
  siRNA target sequence for Orc4l (NM_011958.2,760-778).
ctcaccggcagatacattt

SEQ ID NO: 463315 - DNA, 19 bp, Mus musculus
  siRNA target sequence for Orc4l (NM_011958.2,762-780).
caccggcagatacatttaa

SEQ ID NO: 463316 - DNA, 19 bp, Mus musculus
  siRNA target sequence for Orc4l (NM_011958.2,765-783).
cggcagatacatttaatga

SEQ ID NO: 463317 - DNA, 19 bp, Mus musculus
  siRNA target sequence for Orc4l (NM_011958.2,848-866).
cccagataaggcttttgct

SEQ ID NO: 463318 - DNA, 19 bp, Mus musculus
  siRNA target sequence for Orc4l (NM_011958.2,869-887).
gagatggaatgagaatgtt

SEQ ID NO: 463319 - DNA, 19 bp, Mus musculus
  siRNA target sequence for Orc4l (NM_011958.2,914-932).
gcttgaagtcctacagaaa

SEQ ID NO: 463320 - DNA, 19 bp, Mus musculus
  siRNA target sequence for Orc4l (NM_011958.2,947-965).
caaaaacttgcagtcatta

SEQ ID NO: 463321 - DNA, 19 bp, Mus musculus
  siRNA target sequence for Orc4l (NM_011958.2,957-975).
cagtcattacacatgctat

SEQ ID NO: 463322 - DNA, 19 bp, Mus musculus
  siRNA target sequence for Orc4l (NM_011958.2,961-979).
cattacacatgctattgat

SEQ ID NO: 463323 - DNA, 19 bp, Mus musculus
  siRNA target sequence for Orc4l (NM_011958.2,1000-1018).
ccgtatcacacccatttat

SEQ ID NO: 463324 - DNA, 19 bp, Mus musculus
  siRNA target sequence for Orc4l (NM_011958.2,1066-1084).
ctaaggcgaatattgtaca

SEQ ID NO: 463325 - DNA, 19 bp, Mus musculus
  siRNA target sequence for Orc4l (NM_011958.2,1100-1118).
ggaaatctgtcttataata

SEQ ID NO: 463326 - DNA, 19 bp, Mus musculus
  siRNA target sequence for Orc4l (NM_011958.2,1108-1126).
gtcttataatagcaatgaa

SEQ ID NO: 463327 - DNA, 19 bp, Mus musculus
  siRNA target sequence for Orc4l (NM_011958.2,1151-1169).
ggagccctttaattttcaa

SEQ ID NO: 463328 - DNA, 19 bp, Mus musculus
  siRNA target sequence for Orc4l (NM_011958.2,1167-1185).
caaatggtgtataatgaat

SEQ ID NO: 463329 - DNA, 19 bp, Mus musculus
  siRNA target sequence for Orc4l (NM_011958.2,1210-1228).
cccattctgtttataactt

SEQ ID NO: 463330 - DNA, 19 bp, Mus musculus
  siRNA target sequence for Orc4l (NM_011958.2,1289-1307).
cgtggaaagaacttcagta

SEQ ID NO: 463331 - DNA, 19 bp, Mus musculus
  siRNA target sequence for Orc4l (NM_011958.2,1325-1343).
ccagctagtgaaactactt

SEQ ID NO: 463332 - DNA, 19 bp, Mus musculus
  siRNA target sequence for Orc4l (NM_011958.2,1326-1344).
cagctagtgaaactacttt

SEQ ID NO: 463333 - DNA, 19 bp, Mus musculus
  siRNA target sequence for Orc4l (NM_011958.2,1332-1350).
gtgaaactacttttggata

SEQ ID NO: 463334 - DNA, 19 bp, Mus musculus
  siRNA target sequence for Orc4l (NM_011958.2,1334-1352).
gaaactacttttggataat

SEQ ID NO: 463335 - DNA, 19 bp, Mus musculus
  siRNA target sequence for Orc4l (NM_011958.2,1385-1403).
caactgccctacagatgtt

SEQ ID NO: 463336 - DNA, 19 bp, Mus musculus
  siRNA target sequence for Orc6l (NM_019716.1,320-338).
ccccttggatagagcatat

SEQ ID NO: 463337 - DNA, 19 bp, Mus musculus
  siRNA target sequence for Orc6l (NM_019716.1,321-339).
cccttggatagagcatatt

SEQ ID NO: 463338 - DNA, 19 bp, Mus musculus
  siRNA target sequence for Orc6l (NM_019716.1,322-340).
ccttggatagagcatattt

SEQ ID NO: 463339 - DNA, 19 bp, Mus musculus
  siRNA target sequence for Orc6l (NM_019716.1,371-389).
gtatcagagctgtcttaaa

SEQ ID NO: 463340 - DNA, 19 bp, Mus musculus
  siRNA target sequence for Orc6l (NM_019716.1,379-397).
gctgtcttaaatcttttga

SEQ ID NO: 463341 - DNA, 19 bp, Mus musculus
  siRNA target sequence for Orc6l (NM_019716.1,396-414).
gagtgtttactaggattaa

SEQ ID NO: 463342 - DNA, 19 bp, Mus musculus
  siRNA target sequence for Orc6l (NM_019716.1,398-416).
gtgtttactaggattaaat

SEQ ID NO: 463343 - DNA, 19 bp, Mus musculus
  siRNA target sequence for Orc6l (NM_019716.1,433-451).
gagacctagctgtacagtt

SEQ ID NO: 463344 - DNA, 19 bp, Mus musculus
  siRNA target sequence for Orc6l (NM_019716.1,810-828).
gtaatagaaacccttcata

SEQ ID NO: 463345 - DNA, 19 bp, Mus musculus
  siRNA target sequence for Ovol1 (NM_019935.2,284-302).
gcgcgttcctggtgaagaa

SEQ ID NO: 463346 - DNA, 19 bp, Mus musculus
  siRNA target sequence for Ovol1 (NM_019935.2,469-487).
cttcgagactccagctata

SEQ ID NO: 463347 - DNA, 19 bp, Mus musculus
  siRNA target sequence for Ovol1 (NM_019935.2,600-618).
cttgggggacagtccaaat

SEQ ID NO: 463348 - DNA, 19 bp, Mus musculus
  siRNA target sequence for Ovol1 (NM_019935.2,603-621).
gggggacagtccaaatgga

SEQ ID NO: 463349 - DNA, 19 bp, Mus musculus
  siRNA target sequence for Ovol1 (NM_019935.2,613-631).
ccaaatggagaccttttta

SEQ ID NO: 463350 - DNA, 19 bp, Mus musculus
  siRNA target sequence for Ovol1 (NM_019935.2,871-889).
gtgcagcagaagtatgcat

SEQ ID NO: 463351 - DNA, 19 bp, Mus musculus
  siRNA target sequence for P42pop (NM_145579.1,348-366).
gacagcatcgccaccaaaa

SEQ ID NO: 463352 - DNA, 19 bp, Mus musculus
  siRNA target sequence for P42pop (NM_145579.1,508-526).
ctgcggaggaggagactat

SEQ ID NO: 463353 - DNA, 19 bp, Mus musculus
  siRNA target sequence for P42pop (NM_145579.1,614-632).
ggcttcgaccgctagtaca

SEQ ID NO: 463354 - DNA, 19 bp, Mus musculus
  siRNA target sequence for P42pop (NM_145579.1,628-646).
gtacacaacggtatgtgtt

SEQ ID NO: 463355 - DNA, 19 bp, Mus musculus
  siRNA target sequence for P42pop (NM_145579.1,948-966).
caggagactgccaatgcta

SEQ ID NO: 463356 - DNA, 19 bp, Mus musculus
  siRNA target sequence for P42pop (NM_145579.1,1195-1213).
cagcgaggggagtgatcat

SEQ ID NO: 463357 - DNA, 19 bp, Mus musculus
  siRNA target sequence for Pax1 (NM_008780.1,355-373).
cgaccctgtgacatcagta

SEQ ID NO: 463358 - DNA, 19 bp, Mus musculus
  siRNA target sequence for Pax1 (NM_008780.1,479-497).
ccacccccaatgtagtgaa

SEQ ID NO: 463359 - DNA, 19 bp, Mus musculus
  siRNA target sequence for Pax1 (NM_008780.1,498-516).
gcacatccgggactacaaa

SEQ ID NO: 463360 - DNA, 19 bp, Mus musculus
  siRNA target sequence for Pax1 (NM_008780.1,614-632).
gtcgcatcctgcgaaataa

SEQ ID NO: 463361 - DNA, 19 bp, Mus musculus
  siRNA target sequence for Pax1 (NM_008780.1,656-674).
ggccatacgaagcaagtaa

SEQ ID NO: 463362 - DNA, 19 bp, Mus musculus
  siRNA target sequence for Pax1 (NM_008780.1,694-712).
gcactgccctacaatcata

SEQ ID NO: 463363 - DNA, 19 bp, Mus musculus
  siRNA target sequence for Pax1 (NM_008780.1,818-836).
ggccctccgcacattcagt

SEQ ID NO: 463364 - DNA, 19 bp, Mus musculus
  siRNA target sequence for Pax1 (NM_008780.1,847-865).
ctgggcatccggacgttta

SEQ ID NO: 463365 - DNA, 19 bp, Mus musculus
  siRNA target sequence for Pax1 (NM_008780.1,1001-1019).
cagacattaaatatactca

SEQ ID NO: 463366 - DNA, 19 bp, Mus musculus
  siRNA target sequence for Pax1 (NM_008780.1,1105-1123).
ccagcagccggctacctat

SEQ ID NO: 463367 - DNA, 19 bp, Mus musculus
  siRNA target sequence for Pax1 (NM_008780.1,1278-1296).
ggatgcactcggtagctta

SEQ ID NO: 463368 - DNA, 19 bp, Mus musculus
  siRNA target sequence for Pax5 (NM_008782.1,275-293).
ggtgattggaggatccaaa

SEQ ID NO: 463369 - DNA, 19 bp, Mus musculus
  siRNA target sequence for Pax5 (NM_008782.1,443-461).
gatcattcggacaaaagta

SEQ ID NO: 463370 - DNA, 19 bp, Mus musculus
  siRNA target sequence for Pax5 (NM_008782.1,622-640).
gcaagagggatgaaggtat

SEQ ID NO: 463371 - DNA, 19 bp, Mus musculus
  siRNA target sequence for Pax5 (NM_008782.1,1037-1055).
ggtgcctgggagtgaattt

SEQ ID NO: 463372 - DNA, 19 bp, Mus musculus
  siRNA target sequence for Pax5 (NM_008782.1,1038-1056).
gtgcctgggagtgaatttt

SEQ ID NO: 463373 - DNA, 19 bp, Mus musculus
  siRNA target sequence for Pax5 (NM_008782.1,1040-1058).
gcctgggagtgaattttct

SEQ ID NO: 463374 - DNA, 19 bp, Mus musculus
  siRNA target sequence for Pax5 (NM_008782.1,1082-1100).
gtattcttcctacaatgat

SEQ ID NO: 463375 - DNA, 19 bp, Mus musculus
  siRNA target sequence for Pax5 (NM_008782.1,1128-1146).
cttggctccccatactatt

SEQ ID NO: 463376 - DNA, 19 bp, Mus musculus
  siRNA target sequence for Pax5 (NM_008782.1,1131-1149).
ggctccccatactattaca

SEQ ID NO: 463377 - DNA, 19 bp, Mus musculus
  siRNA target sequence for Pax8 (NM_011040.2,192-210).
ccatggagggctgaatcaa

SEQ ID NO: 463378 - DNA, 19 bp, Mus musculus
  siRNA target sequence for Pax8 (NM_011040.2,286-304).
ggcgtgaggccctgtgata

SEQ ID NO: 463379 - DNA, 19 bp, Mus musculus
  siRNA target sequence for Pax8 (NM_011040.2,375-393).
catccggcctggagtgata

SEQ ID NO: 463380 - DNA, 19 bp, Mus musculus
  siRNA target sequence for Pax8 (NM_011040.2,674-692).
caccccagtcggattcctt

SEQ ID NO: 463381 - DNA, 19 bp, Mus musculus
  siRNA target sequence for Pax8 (NM_011040.2,711-729).
caacgggctcctaggaatt

SEQ ID NO: 463382 - DNA, 19 bp, Mus musculus
  siRNA target sequence for Pax8 (NM_011040.2,714-732).
cgggctcctaggaattgct

SEQ ID NO: 463383 - DNA, 19 bp, Mus musculus
  siRNA target sequence for Pax8 (NM_011040.2,731-749).
ctcagcctggcaatgacaa

SEQ ID NO: 463384 - DNA, 19 bp, Mus musculus
  siRNA target sequence for Pax8 (NM_011040.2,739-757).
ggcaatgacaacaagagaa

SEQ ID NO: 463385 - DNA, 19 bp, Mus musculus
  siRNA target sequence for Pax8 (NM_011040.2,740-758).
gcaatgacaacaagagaaa

SEQ ID NO: 463386 - DNA, 19 bp, Mus musculus
  siRNA target sequence for Pax8 (NM_011040.2,884-902).
cgtttgagcggcagcatta

SEQ ID NO: 463387 - DNA, 19 bp, Mus musculus
  siRNA target sequence for Pax8 (NM_011040.2,1059-1077).
ggtggcagatcctcattca

SEQ ID NO: 463388 - DNA, 19 bp, Mus musculus
  siRNA target sequence for Pax8 (NM_011040.2,1197-1215).
ctcggtcccacccttcaat

SEQ ID NO: 463389 - DNA, 19 bp, Mus musculus
  siRNA target sequence for Pax8 (NM_011040.2,1458-1476).
gctgagttctccatattat

SEQ ID NO: 463390 - DNA, 19 bp, Mus musculus
  siRNA target sequence for Pax9 (NM_011041.1,271-289).
ggcttcgcatcgtggaatt

SEQ ID NO: 463391 - DNA, 19 bp, Mus musculus
  siRNA target sequence for Pax9 (NM_011041.1,272-290).
gcttcgcatcgtggaatta

SEQ ID NO: 463392 - DNA, 19 bp, Mus musculus
  siRNA target sequence for Pax9 (NM_011041.1,374-392).
caacgagaccggttcgatt

SEQ ID NO: 463393 - DNA, 19 bp, Mus musculus
  siRNA target sequence for Pax9 (NM_011041.1,435-453).
cctactgtggtgaaacaca

SEQ ID NO: 463394 - DNA, 19 bp, Mus musculus
  siRNA target sequence for Pax9 (NM_011041.1,436-454).
ctactgtggtgaaacacat

SEQ ID NO: 463395 - DNA, 19 bp, Mus musculus
  siRNA target sequence for Pax9 (NM_011041.1,556-574).
gttccatcagccgtattct

SEQ ID NO: 463396 - DNA, 19 bp, Mus musculus
  siRNA target sequence for Pax9 (NM_011041.1,567-585).
cgtattctgcgcaacaaga

SEQ ID NO: 463397 - DNA, 19 bp, Mus musculus
  siRNA target sequence for Pax9 (NM_011041.1,568-586).
gtattctgcgcaacaagat

SEQ ID NO: 463398 - DNA, 19 bp, Mus musculus
  siRNA target sequence for Pax9 (NM_011041.1,909-927).
ccgcacgcagtgaatggat

SEQ ID NO: 463399 - DNA, 19 bp, Mus musculus
  siRNA target sequence for Pax9 (NM_011041.1,910-928).
cgcacgcagtgaatggatt

SEQ ID NO: 463400 - DNA, 19 bp, Mus musculus
  siRNA target sequence for Pax9 (NM_011041.1,1130-1148).
cccccacaactgtgacatt

SEQ ID NO: 463401 - DNA, 19 bp, Mus musculus
  siRNA target sequence for Pax9 (NM_011041.1,1150-1168).
ccgcatcgctggctttcaa

SEQ ID NO: 463402 - DNA, 19 bp, Mus musculus
  siRNA target sequence for Pcbp2 (NM_011042.1,349-367).
gtggtgcacgtatcaacat

SEQ ID NO: 463403 - DNA, 19 bp, Mus musculus
  siRNA target sequence for Pcbp2 (NM_011042.1,351-369).
ggtgcacgtatcaacatct

SEQ ID NO: 463404 - DNA, 19 bp, Mus musculus
  siRNA target sequence for Pcbp2 (NM_011042.1,384-402).
cctgagagaattatcactt

SEQ ID NO: 463405 - DNA, 19 bp, Mus musculus
  siRNA target sequence for Pcbp2 (NM_011042.1,411-429).
ccgactaatgccatcttca

SEQ ID NO: 463406 - DNA, 19 bp, Mus musculus
  siRNA target sequence for Pcbp2 (NM_011042.1,412-430).
cgactaatgccatcttcaa

SEQ ID NO: 463407 - DNA, 19 bp, Mus musculus
  siRNA target sequence for Pcbp2 (NM_011042.1,413-431).
gactaatgccatcttcaaa

SEQ ID NO: 463408 - DNA, 19 bp, Mus musculus
  siRNA target sequence for Pcbp2 (NM_011042.1,439-457).
ctatgatcattgacaaact

SEQ ID NO: 463409 - DNA, 19 bp, Mus musculus
  siRNA target sequence for Pcbp2 (NM_011042.1,465-483).
gacataagcagctctatga

SEQ ID NO: 463410 - DNA, 19 bp, Mus musculus
  siRNA target sequence for Pcbp2 (NM_011042.1,476-494).
ctctatgaccaatagtaca

SEQ ID NO: 463411 - DNA, 19 bp, Mus musculus
  siRNA target sequence for Pcbp2 (NM_011042.1,541-559).
gtcagtgtggctctcttat

SEQ ID NO: 463412 - DNA, 19 bp, Mus musculus
  siRNA target sequence for Pcbp2 (NM_011042.1,545-563).
gtgtggctctcttattgga

SEQ ID NO: 463413 - DNA, 19 bp, Mus musculus
  siRNA target sequence for Pcbp2 (NM_011042.1,885-903).
cctctagaggcctatacca

SEQ ID NO: 463414 - DNA, 19 bp, Mus musculus
  siRNA target sequence for Pcbp2 (NM_011042.1,886-904).
ctctagaggcctataccat

SEQ ID NO: 463415 - DNA, 19 bp, Mus musculus
  siRNA target sequence for Pcbp2 (NM_011042.1,957-975).
gcaatgcaacagtctcatt

SEQ ID NO: 463416 - DNA, 19 bp, Mus musculus
  siRNA target sequence for Pcbp2 (NM_011042.1,1020-1038).
gcatctgctcaaactactt

SEQ ID NO: 463417 - DNA, 19 bp, Mus musculus
  siRNA target sequence for Pcbp2 (NM_011042.1,1052-1070).
cattccaaatgatttgatt

SEQ ID NO: 463418 - DNA, 19 bp, Mus musculus
  siRNA target sequence for Pcbp2 (NM_011042.1,1062-1080).
gatttgattggctgcataa

SEQ ID NO: 463419 - DNA, 19 bp, Mus musculus
  siRNA target sequence for Pcbp2 (NM_011042.1,1165-1183).
ctgatcggcaggttaccat

SEQ ID NO: 463420 - DNA, 19 bp, Mus musculus
  siRNA target sequence for Pcbp3 (NM_021568.1,488-506).
gtggcgccaggatcaacat

SEQ ID NO: 463421 - DNA, 19 bp, Mus musculus
  siRNA target sequence for Pcbp3 (NM_021568.1,519-537).
ctgcccagagagaatcgtt

SEQ ID NO: 463422 - DNA, 19 bp, Mus musculus
  siRNA target sequence for Pcbp3 (NM_021568.1,551-569).
caactgacgccatcttcaa

SEQ ID NO: 463423 - DNA, 19 bp, Mus musculus
  siRNA target sequence for Pcbp3 (NM_021568.1,577-595).
gctatgatcgcgtacaagt

SEQ ID NO: 463424 - DNA, 19 bp, Mus musculus
  siRNA target sequence for Pcbp3 (NM_021568.1,578-596).
ctatgatcgcgtacaagtt

SEQ ID NO: 463425 - DNA, 19 bp, Mus musculus
  siRNA target sequence for Pcbp3 (NM_021568.1,598-616).
gaggaggacatcattaatt

SEQ ID NO: 463426 - DNA, 19 bp, Mus musculus
  siRNA target sequence for Pcbp3 (NM_021568.1,787-805).
gagcgggcagtgactatct

SEQ ID NO: 463427 - DNA, 19 bp, Mus musculus
  siRNA target sequence for Pcbp3 (NM_021568.1,789-807).
gcgggcagtgactatctca

SEQ ID NO: 463428 - DNA, 19 bp, Mus musculus
  siRNA target sequence for Pcbp3 (NM_021568.1,932-950).
gtggtcaggcctacacaat

SEQ ID NO: 463429 - DNA, 19 bp, Mus musculus
  siRNA target sequence for Pcbp3 (NM_021568.1,1052-1070).
ctttccccggagaaaagct

SEQ ID NO: 463430 - DNA, 19 bp, Mus musculus
  siRNA target sequence for Pcbp3 (NM_021568.1,1082-1100).
cctccgaagaagctcaaaa

SEQ ID NO: 463431 - DNA, 19 bp, Mus musculus
  siRNA target sequence for Pcbp3 (NM_021568.1,1083-1101).
ctccgaagaagctcaaaat

SEQ ID NO: 463432 - DNA, 19 bp, Mus musculus
  siRNA target sequence for Pcbp3 (NM_021568.1,1085-1103).
ccgaagaagctcaaaatct

SEQ ID NO: 463433 - DNA, 19 bp, Mus musculus
  siRNA target sequence for Pcbp3 (NM_021568.1,1160-1178).
ccattcccaatgatcttat

SEQ ID NO: 463434 - DNA, 19 bp, Mus musculus
  siRNA target sequence for Pcbp3 (NM_021568.1,1161-1179).
cattcccaatgatcttata

SEQ ID NO: 463435 - DNA, 19 bp, Mus musculus
  siRNA target sequence for Pcbp3 (NM_021568.1,1171-1189).
gatcttataggctgcataa

SEQ ID NO: 463436 - DNA, 19 bp, Mus musculus
  siRNA target sequence for Pcbp3 (NM_021568.1,1192-1210).
ggacgccaaggcaccaaaa

SEQ ID NO: 463437 - DNA, 19 bp, Mus musculus
  siRNA target sequence for Pcbp3 (NM_021568.1,1193-1211).
gacgccaaggcaccaaaat

SEQ ID NO: 463438 - DNA, 19 bp, Mus musculus
  siRNA target sequence for Pcbp4 (NM_021567.2,403-421).
ccacgcggtctccatgatt

SEQ ID NO: 463439 - DNA, 19 bp, Mus musculus
  siRNA target sequence for Pcbp4 (NM_021567.2,599-617).
ggggacctgctcccaaatt

SEQ ID NO: 463440 - DNA, 19 bp, Mus musculus
  siRNA target sequence for Pcbp4 (NM_021567.2,602-620).
gacctgctcccaaattcca

SEQ ID NO: 463441 - DNA, 19 bp, Mus musculus
  siRNA target sequence for Pcbp4 (NM_021567.2,1109-1127).
ctagagacggccaagtcta

SEQ ID NO: 463442 - DNA, 19 bp, Mus musculus
  siRNA target sequence for Pcbp4 (NM_021567.2,1367-1385).
gctgaacggcagaaattct

SEQ ID NO: 463443 - DNA, 19 bp, Mus musculus
  siRNA target sequence for Pcna (NM_011045.1,305-323).
ccgaaggcttcgacacata

SEQ ID NO: 463444 - DNA, 19 bp, Mus musculus
  siRNA target sequence for Pcna (NM_011045.1,365-383).
gcatgtccaaaattctaaa

SEQ ID NO: 463445 - DNA, 19 bp, Mus musculus
  siRNA target sequence for Pcna (NM_011045.1,437-455).
ccttagcactagtattcga

SEQ ID NO: 463446 - DNA, 19 bp, Mus musculus
  siRNA target sequence for Pcna (NM_011045.1,438-456).
cttagcactagtattcgaa

SEQ ID NO: 463447 - DNA, 19 bp, Mus musculus
  siRNA target sequence for Pcna (NM_011045.1,492-510).
gaagttaatggacttagat

SEQ ID NO: 463448 - DNA, 19 bp, Mus musculus
  siRNA target sequence for Pcna (NM_011045.1,535-553).
caggagtacagctgtgtaa

SEQ ID NO: 463449 - DNA, 19 bp, Mus musculus
  siRNA target sequence for Pcna (NM_011045.1,537-555).
ggagtacagctgtgtaata

SEQ ID NO: 463450 - DNA, 19 bp, Mus musculus
  siRNA target sequence for Pcna (NM_011045.1,538-556).
gagtacagctgtgtaataa

SEQ ID NO: 463451 - DNA, 19 bp, Mus musculus
  siRNA target sequence for Pcna (NM_011045.1,558-576).
gatgccgtcgggtgaattt

SEQ ID NO: 463452 - DNA, 19 bp, Mus musculus
  siRNA target sequence for Pcna (NM_011045.1,561-579).
gccgtcgggtgaatttgca

SEQ ID NO: 463453 - DNA, 19 bp, Mus musculus
  siRNA target sequence for Pcna (NM_011045.1,671-689).
gcaatgggaacattaagtt

SEQ ID NO: 463454 - DNA, 19 bp, Mus musculus
  siRNA target sequence for Pcna (NM_011045.1,687-705).
gttgtcacaaacaagtaat

SEQ ID NO: 463455 - DNA, 19 bp, Mus musculus
  siRNA target sequence for Pcna (NM_011045.1,725-743).
cggtaaccatagagatgaa

SEQ ID NO: 463456 - DNA, 19 bp, Mus musculus
  siRNA target sequence for Pcna (NM_011045.1,726-744).
ggtaaccatagagatgaat

SEQ ID NO: 463457 - DNA, 19 bp, Mus musculus
  siRNA target sequence for Pdcd2 (NM_008799.1,282-300).
ggcctgcgagtttttcgta

SEQ ID NO: 463458 - DNA, 19 bp, Mus musculus
  siRNA target sequence for Pdcd2 (NM_008799.1,283-301).
gcctgcgagtttttcgtaa

SEQ ID NO: 463459 - DNA, 19 bp, Mus musculus
  siRNA target sequence for Pdcd2 (NM_008799.1,284-302).
cctgcgagtttttcgtaat

SEQ ID NO: 463460 - DNA, 19 bp, Mus musculus
  siRNA target sequence for Pdcd2 (NM_008799.1,310-328).
caaggaacaacgcattcta

SEQ ID NO: 463461 - DNA, 19 bp, Mus musculus
  siRNA target sequence for Pdcd2 (NM_008799.1,332-350).
ctatgagcccccttctgaa

SEQ ID NO: 463462 - DNA, 19 bp, Mus musculus
  siRNA target sequence for Pdcd2 (NM_008799.1,358-376).
ctttgggtacggaatgtgt

SEQ ID NO: 463463 - DNA, 19 bp, Mus musculus
  siRNA target sequence for Pdcd2 (NM_008799.1,477-495).
gagcatcagacattagact

SEQ ID NO: 463464 - DNA, 19 bp, Mus musculus
  siRNA target sequence for Pdcd2 (NM_008799.1,520-538).
gtacacagtcagacaaaat

SEQ ID NO: 463465 - DNA, 19 bp, Mus musculus
  siRNA target sequence for Pdcd2 (NM_008799.1,635-653).
ggattattctgaagttaca

SEQ ID NO: 463466 - DNA, 19 bp, Mus musculus
  siRNA target sequence for Pdcd2 (NM_008799.1,849-867).
ccgtgtggtgccaagagaa

SEQ ID NO: 463467 - DNA, 19 bp, Mus musculus
  siRNA target sequence for Pdcd2 (NM_008799.1,850-868).
cgtgtggtgccaagagaat

SEQ ID NO: 463468 - DNA, 19 bp, Mus musculus
  siRNA target sequence for Pdcd2 (NM_008799.1,851-869).
gtgtggtgccaagagaata

SEQ ID NO: 463469 - DNA, 19 bp, Mus musculus
  siRNA target sequence for Pdcd2 (NM_008799.1,988-1006).
gcggctacacagaagaatt

SEQ ID NO: 463470 - DNA, 19 bp, Mus musculus
  siRNA target sequence for Pdcd2 (NM_008799.1,989-1007).
cggctacacagaagaattt

SEQ ID NO: 463471 - DNA, 19 bp, Mus musculus
  siRNA target sequence for Pdcd2 (NM_008799.1,1016-1034).
gcaggatgtgacagataca

SEQ ID NO: 463472 - DNA, 19 bp, Mus musculus
  siRNA target sequence for Phf1 (NM_009343.1,344-362).
ctgatgggctgctgtactt

SEQ ID NO: 463473 - DNA, 19 bp, Mus musculus
  siRNA target sequence for Phf1 (NM_009343.1,357-375).
gtacttgggtaccatcaaa

SEQ ID NO: 463474 - DNA, 19 bp, Mus musculus
  siRNA target sequence for Phf1 (NM_009343.1,433-451).
ctggttctatggaaggata

SEQ ID NO: 463475 - DNA, 19 bp, Mus musculus
  siRNA target sequence for Phf1 (NM_009343.1,436-454).
gttctatggaaggatatca

SEQ ID NO: 463476 - DNA, 19 bp, Mus musculus
  siRNA target sequence for Phf1 (NM_009343.1,543-561).
gaagtgtcgccatgcttat

SEQ ID NO: 463477 - DNA, 19 bp, Mus musculus
  siRNA target sequence for Phf1 (NM_009343.1,628-646).
cgccagtgtgtctttgcaa

SEQ ID NO: 463478 - DNA, 19 bp, Mus musculus
  siRNA target sequence for Phf1 (NM_009343.1,629-647).
gccagtgtgtctttgcaat

SEQ ID NO: 463479 - DNA, 19 bp, Mus musculus
  siRNA target sequence for Phf1 (NM_009343.1,716-734).
ccctgccatacggattaaa

SEQ ID NO: 463480 - DNA, 19 bp, Mus musculus
  siRNA target sequence for Phf1 (NM_009343.1,717-735).
cctgccatacggattaaaa

SEQ ID NO: 463481 - DNA, 19 bp, Mus musculus
  siRNA target sequence for Phf1 (NM_009343.1,891-909).
ctacggagacagattctat

SEQ ID NO: 463482 - DNA, 19 bp, Mus musculus
  siRNA target sequence for Phf1 (NM_009343.1,1007-1025).
gcgtttgctgtaagaagaa

SEQ ID NO: 463483 - DNA, 19 bp, Mus musculus
  siRNA target sequence for Phf1 (NM_009343.1,1151-1169).
gccacaaggaccgtttcat

SEQ ID NO: 463484 - DNA, 19 bp, Mus musculus
  siRNA target sequence for Phf1 (NM_009343.1,1152-1170).
ccacaaggaccgtttcatt

SEQ ID NO: 463485 - DNA, 19 bp, Mus musculus
  siRNA target sequence for Phf1 (NM_009343.1,1153-1171).
cacaaggaccgtttcattt

SEQ ID NO: 463486 - DNA, 19 bp, Mus musculus
  siRNA target sequence for Phf1 (NM_009343.1,1191-1209).
gcgaaaatgtctttttggt

SEQ ID NO: 463487 - DNA, 19 bp, Mus musculus
  siRNA target sequence for Phf1 (NM_009343.1,1306-1324).
cgtcccctggggaaacgat

SEQ ID NO: 463488 - DNA, 19 bp, Mus musculus
  siRNA target sequence for Phf1 (NM_009343.1,1856-1874).
ctgtgcagtacctagttga

SEQ ID NO: 463489 - DNA, 19 bp, Mus musculus
  siRNA target sequence for Phf12 (NM_174852.2,155-173).
ggctgatggagcaaatcca

SEQ ID NO: 463490 - DNA, 19 bp, Mus musculus
  siRNA target sequence for Phf12 (NM_174852.2,404-422).
gtactgtccgccgaaagaa

SEQ ID NO: 463491 - DNA, 19 bp, Mus musculus
  siRNA target sequence for Phf12 (NM_174852.2,866-884).
ggacacagcatgagttaga

SEQ ID NO: 463492 - DNA, 19 bp, Mus musculus
  siRNA target sequence for Phf12 (NM_174852.2,873-891).
gcatgagttagaccataat

SEQ ID NO: 463493 - DNA, 19 bp, Mus musculus
  siRNA target sequence for Phf12 (NM_174852.2,901-919).
cccttgccggtcaaagtct

SEQ ID NO: 463494 - DNA, 19 bp, Mus musculus
  siRNA target sequence for Phf12 (NM_174852.2,910-928).
gtcaaagtctgcttcacat

SEQ ID NO: 463495 - DNA, 19 bp, Mus musculus
  siRNA target sequence for Phf12 (NM_174852.2,916-934).
gtctgcttcacatgtaaca

SEQ ID NO: 463496 - DNA, 19 bp, Mus musculus
  siRNA target sequence for Phf12 (NM_174852.2,974-992).
gcccgcttctgtttcacat

SEQ ID NO: 463497 - DNA, 19 bp, Mus musculus
  siRNA target sequence for Phf12 (NM_174852.2,1037-1055).
ggatgtgtccgaatcacat

SEQ ID NO: 463498 - DNA, 19 bp, Mus musculus
  siRNA target sequence for Phf12 (NM_174852.2,1046-1064).
cgaatcacatcgaacatgt

SEQ ID NO: 463499 - DNA, 19 bp, Mus musculus
  siRNA target sequence for Phf12 (NM_174852.2,1125-1143).
ggacaccatttcacaacat

SEQ ID NO: 463500 - DNA, 19 bp, Mus musculus
  siRNA target sequence for Phf12 (NM_174852.2,1136-1154).
cacaacatgttgtcaaagt

SEQ ID NO: 463501 - DNA, 19 bp, Mus musculus
  siRNA target sequence for Phf12 (NM_174852.2,1233-1251).
ggttcctgatgctataaaa

SEQ ID NO: 463502 - DNA, 19 bp, Mus musculus
  siRNA target sequence for Phf12 (NM_174852.2,1234-1252).
gttcctgatgctataaaat

SEQ ID NO: 463503 - DNA, 19 bp, Mus musculus
  siRNA target sequence for Phf12 (NM_174852.2,1337-1355).
cacaaacgcaccttttgaa

SEQ ID NO: 463504 - DNA, 19 bp, Mus musculus
  siRNA target sequence for Phf12 (NM_174852.2,1339-1357).
caaacgcaccttttgaact

SEQ ID NO: 463505 - DNA, 19 bp, Mus musculus
  siRNA target sequence for Phf12 (NM_174852.2,1389-1407).
ggagtggctctgtagtgtt

SEQ ID NO: 463506 - DNA, 19 bp, Mus musculus
  siRNA target sequence for Phf12 (NM_174852.2,1411-1429).
gcgctccagtgcagcatat

SEQ ID NO: 463507 - DNA, 19 bp, Mus musculus
  siRNA target sequence for Phf12 (NM_174852.2,1412-1430).
cgctccagtgcagcatatt

SEQ ID NO: 463508 - DNA, 19 bp, Mus musculus
  siRNA target sequence for Phf12 (NM_174852.2,1416-1434).
ccagtgcagcatattgaaa

SEQ ID NO: 463509 - DNA, 19 bp, Mus musculus
  siRNA target sequence for Phf12 (NM_174852.2,1510-1528).
gtgactgacagctcaatca

SEQ ID NO: 463510 - DNA, 19 bp, Mus musculus
  siRNA target sequence for Phf12 (NM_174852.2,1594-1612).
gcagtgagcacccaaaatt

SEQ ID NO: 463511 - DNA, 19 bp, Mus musculus
  siRNA target sequence for Phf12 (NM_174852.2,1717-1735).
ccggtgaacacagagataa

SEQ ID NO: 463512 - DNA, 19 bp, Mus musculus
  siRNA target sequence for Phf12 (NM_174852.2,1718-1736).
cggtgaacacagagataaa

SEQ ID NO: 463513 - DNA, 19 bp, Mus musculus
  siRNA target sequence for Phf12 (NM_174852.2,1800-1818).
cgccaacacccctttacca

SEQ ID NO: 463514 - DNA, 19 bp, Mus musculus
  siRNA target sequence for Phf12 (NM_174852.2,1881-1899).
gaaccacgtcggcatcatt

SEQ ID NO: 463515 - DNA, 19 bp, Mus musculus
  siRNA target sequence for Phf12 (NM_174852.2,1885-1903).
cacgtcggcatcattgtga

SEQ ID NO: 463516 - DNA, 19 bp, Mus musculus
  siRNA target sequence for Phf12 (NM_174852.2,2004-2022).
gaacaccagcactttgcat

SEQ ID NO: 463517 - DNA, 19 bp, Mus musculus
  siRNA target sequence for Phf12 (NM_174852.2,2120-2138).
ctgcaggagacagtatctt

SEQ ID NO: 463518 - DNA, 19 bp, Mus musculus
  siRNA target sequence for Phf12 (NM_174852.2,2144-2162).
caggtgccaaccaacgatt

SEQ ID NO: 463519 - DNA, 19 bp, Mus musculus
  siRNA target sequence for Phf12 (NM_174852.2,2203-2221).
ggcacgttatccataggaa

SEQ ID NO: 463520 - DNA, 19 bp, Mus musculus
  siRNA target sequence for Phf12 (NM_174852.2,2282-2300).
cacttcgagcatttatgga

SEQ ID NO: 463521 - DNA, 19 bp, Mus musculus
  siRNA target sequence for Phf12 (NM_174852.2,2288-2306).
gagcatttatggatgtcaa

SEQ ID NO: 463522 - DNA, 19 bp, Mus musculus
  siRNA target sequence for Phf12 (NM_174852.2,2307-2325).
cggagaaatcgagataaat

SEQ ID NO: 463523 - DNA, 19 bp, Mus musculus
  siRNA target sequence for Phf12 (NM_174852.2,2308-2326).
ggagaaatcgagataaata

SEQ ID NO: 463524 - DNA, 19 bp, Mus musculus
  siRNA target sequence for Phf12 (NM_174852.2,2309-2327).
gagaaatcgagataaatat

SEQ ID NO: 463525 - DNA, 19 bp, Mus musculus
  siRNA target sequence for Phf12 (NM_174852.2,2311-2329).
gaaatcgagataaatatgt

SEQ ID NO: 463526 - DNA, 19 bp, Mus musculus
  siRNA target sequence for Phf12 (NM_174852.2,2357-2375).
ccttgcagagagtacatca

SEQ ID NO: 463527 - DNA, 19 bp, Mus musculus
  siRNA target sequence for Phf12 (NM_174852.2,2528-2546).
gctatcgaaccctctacat

SEQ ID NO: 463528 - DNA, 19 bp, Mus musculus
  siRNA target sequence for Phf12 (NM_174852.2,2598-2616).
ctacgtgtccgggaaacat

SEQ ID NO: 463529 - DNA, 19 bp, Mus musculus
  siRNA target sequence for Phf12 (NM_174852.2,2621-2639).
gcatattctacgatgagaa

SEQ ID NO: 463530 - DNA, 19 bp, Mus musculus
  siRNA target sequence for Phf12 (NM_174852.2,2622-2640).
catattctacgatgagaat

SEQ ID NO: 463531 - DNA, 19 bp, Mus musculus
  siRNA target sequence for Phf12 (NM_174852.2,2632-2650).
gatgagaataccaaacatt

SEQ ID NO: 463532 - DNA, 19 bp, Mus musculus
  siRNA target sequence for Phf12 (NM_174852.2,2678-2696).
ggacaacggtggacaatgt

SEQ ID NO: 463533 - DNA, 19 bp, Mus musculus
  siRNA target sequence for Phf12 (NM_174852.2,2688-2706).
ggacaatgtgctgtattca

SEQ ID NO: 463534 - DNA, 19 bp, Mus musculus
  siRNA target sequence for Phf12 (NM_174852.2,2745-2763).
cagtattgttgccaaagta

SEQ ID NO: 463535 - DNA, 19 bp, Mus musculus
  siRNA target sequence for Phf12 (NM_174852.2,2818-2836).
gaggcagccatgatgagtt

SEQ ID NO: 463536 - DNA, 19 bp, Mus musculus
  siRNA target sequence for Phf12 (NM_174852.2,2854-2872).
cagcggagaccctgcaatt

SEQ ID NO: 463537 - DNA, 19 bp, Mus musculus
  siRNA target sequence for Phf12 (NM_174852.2,2938-2956).
caccatggcagctacatca

SEQ ID NO: 463538 - DNA, 19 bp, Mus musculus
  siRNA target sequence for Phf13 (NM_172705.1,376-394).
gatcaggtcacagaaataa

SEQ ID NO: 463539 - DNA, 19 bp, Mus musculus
  siRNA target sequence for Phf13 (NM_172705.1,619-637).
gtcccggaagtttttgtct

SEQ ID NO: 463540 - DNA, 19 bp, Mus musculus
  siRNA target sequence for Phf13 (NM_172705.1,649-667).
cgggactccaagtttgata

SEQ ID NO: 463541 - DNA, 19 bp, Mus musculus
  siRNA target sequence for Phf13 (NM_172705.1,650-668).
gggactccaagtttgatat

SEQ ID NO: 463542 - DNA, 19 bp, Mus musculus
  siRNA target sequence for Phf13 (NM_172705.1,695-713).
gctcccggaagctgtttct

SEQ ID NO: 463543 - DNA, 19 bp, Mus musculus
  siRNA target sequence for Phf2 (NM_011078.2,499-517).
ccttgtccccaagaaagat

SEQ ID NO: 463544 - DNA, 19 bp, Mus musculus
  siRNA target sequence for Phf2 (NM_011078.2,558-576).
gtgatgtggagaactatgt

SEQ ID NO: 463545 - DNA, 19 bp, Mus musculus
  siRNA target sequence for Phf2 (NM_011078.2,644-662).
gaattcgtggactattact

SEQ ID NO: 463546 - DNA, 19 bp, Mus musculus
  siRNA target sequence for Phf2 (NM_011078.2,650-668).
gtggactattactatagca

SEQ ID NO: 463547 - DNA, 19 bp, Mus musculus
  siRNA target sequence for Phf2 (NM_011078.2,737-755).
gagccacctgacattgtga

SEQ ID NO: 463548 - DNA, 19 bp, Mus musculus
  siRNA target sequence for Phf2 (NM_011078.2,744-762).
ctgacattgtgaagaaact

SEQ ID NO: 463549 - DNA, 19 bp, Mus musculus
  siRNA target sequence for Phf2 (NM_011078.2,746-764).
gacattgtgaagaaactat

SEQ ID NO: 463550 - DNA, 19 bp, Mus musculus
  siRNA target sequence for Phf2 (NM_011078.2,1010-1028).
caggtggacaggtgctata

SEQ ID NO: 463551 - DNA, 19 bp, Mus musculus
  siRNA target sequence for Phf2 (NM_011078.2,1012-1030).
ggtggacaggtgctataaa

SEQ ID NO: 463552 - DNA, 19 bp, Mus musculus
  siRNA target sequence for Phf2 (NM_011078.2,1016-1034).
gacaggtgctataaatgca

SEQ ID NO: 463553 - DNA, 19 bp, Mus musculus
  siRNA target sequence for Phf2 (NM_011078.2,1237-1255).
gggaaagcacctattggaa

SEQ ID NO: 463554 - DNA, 19 bp, Mus musculus
  siRNA target sequence for Phf2 (NM_011078.2,1246-1264).
cctattggaagcgttcaaa

SEQ ID NO: 463555 - DNA, 19 bp, Mus musculus
  siRNA target sequence for Phf2 (NM_011078.2,1288-1306).
gctgcccccacacttagtt

SEQ ID NO: 463556 - DNA, 19 bp, Mus musculus
  siRNA target sequence for Phf2 (NM_011078.2,1291-1309).
gcccccacacttagttcaa

SEQ ID NO: 463557 - DNA, 19 bp, Mus musculus
  siRNA target sequence for Phf2 (NM_011078.2,1307-1325).
caaggagctaaaattctca

SEQ ID NO: 463558 - DNA, 19 bp, Mus musculus
  siRNA target sequence for Phf2 (NM_011078.2,1580-1598).
gtgtccaaaaaaaagactt

SEQ ID NO: 463559 - DNA, 19 bp, Mus musculus
  siRNA target sequence for Phf2 (NM_011078.2,1612-1630).
gatgcccaagccatccaaa

SEQ ID NO: 463560 - DNA, 19 bp, Mus musculus
  siRNA target sequence for Phf2 (NM_011078.2,1615-1633).
gcccaagccatccaaaatt

SEQ ID NO: 463561 - DNA, 19 bp, Mus musculus
  siRNA target sequence for Phf2 (NM_011078.2,1845-1863).
cagtccacacgcagaatga

SEQ ID NO: 463562 - DNA, 19 bp, Mus musculus
  siRNA target sequence for Phf2 (NM_011078.2,1847-1865).
gtccacacgcagaatgaca

SEQ ID NO: 463563 - DNA, 19 bp, Mus musculus
  siRNA target sequence for Phf2 (NM_011078.2,1938-1956).
ctgactcgttactgaagat

SEQ ID NO: 463564 - DNA, 19 bp, Mus musculus
  siRNA target sequence for Phf2 (NM_011078.2,2119-2137).
gcccgtgcgcgatgagtat

SEQ ID NO: 463565 - DNA, 19 bp, Mus musculus
  siRNA target sequence for Phf2 (NM_011078.2,2121-2139).
ccgtgcgcgatgagtatga

SEQ ID NO: 463566 - DNA, 19 bp, Mus musculus
  siRNA target sequence for Phf2 (NM_011078.2,2123-2141).
gtgcgcgatgagtatgagt

SEQ ID NO: 463567 - DNA, 19 bp, Mus musculus
  siRNA target sequence for Phf2 (NM_011078.2,2129-2147).
gatgagtatgagtacgtat

SEQ ID NO: 463568 - DNA, 19 bp, Mus musculus
  siRNA target sequence for Phf2 (NM_011078.2,2134-2152).
gtatgagtacgtatcagat

SEQ ID NO: 463569 - DNA, 19 bp, Mus musculus
  siRNA target sequence for Phf2 (NM_011078.2,2211-2229).
gggacttgtccttcttgtt

SEQ ID NO: 463570 - DNA, 19 bp, Mus musculus
  siRNA target sequence for Phf2 (NM_011078.2,2212-2230).
ggacttgtccttcttgtta

SEQ ID NO: 463571 - DNA, 19 bp, Mus musculus
  siRNA target sequence for Phf2 (NM_011078.2,2220-2238).
ccttcttgttagacaagaa

SEQ ID NO: 463572 - DNA, 19 bp, Mus musculus
  siRNA target sequence for Phf2 (NM_011078.2,2348-2366).
ggcagaaatgccaaagtga

SEQ ID NO: 463573 - DNA, 19 bp, Mus musculus
  siRNA target sequence for Phf2 (NM_011078.2,2587-2605).
ccatggtgcccggaagatt

SEQ ID NO: 463574 - DNA, 19 bp, Mus musculus
  siRNA target sequence for Phf2 (NM_011078.2,2753-2771).
gataaccccgtcttcaagt

SEQ ID NO: 463575 - DNA, 19 bp, Mus musculus
  siRNA target sequence for Phf2 (NM_011078.2,3182-3200).
ctggctgaccacgaatata

SEQ ID NO: 463576 - DNA, 19 bp, Mus musculus
  siRNA target sequence for Phf2 (NM_011078.2,3184-3202).
ggctgaccacgaatataca

SEQ ID NO: 463577 - DNA, 19 bp, Mus musculus
  siRNA target sequence for Phf2 (NM_011078.2,3311-3329).
gctgccaaaggaaaacgta

SEQ ID NO: 463578 - DNA, 19 bp, Mus musculus
  siRNA target sequence for Phtf (NM_013629.1,793-811).
cttgttcgagtggtgtttt

SEQ ID NO: 463579 - DNA, 19 bp, Mus musculus
  siRNA target sequence for Pias1 (NM_019663.2,13-31).
gcggacagtgcggaactaa

SEQ ID NO: 463580 - DNA, 19 bp, Mus musculus
  siRNA target sequence for Pias1 (NM_019663.2,14-32).
cggacagtgcggaactaaa

SEQ ID NO: 463581 - DNA, 19 bp, Mus musculus
  siRNA target sequence for Pias1 (NM_019663.2,18-36).
cagtgcggaactaaagcaa

SEQ ID NO: 463582 - DNA, 19 bp, Mus musculus
  siRNA target sequence for Pias1 (NM_019663.2,20-38).
gtgcggaactaaagcaaat

SEQ ID NO: 463583 - DNA, 19 bp, Mus musculus
  siRNA target sequence for Pias1 (NM_019663.2,23-41).
cggaactaaagcaaatggt

SEQ ID NO: 463584 - DNA, 19 bp, Mus musculus
  siRNA target sequence for Pias1 (NM_019663.2,45-63).
gagccttagagtttctgaa

SEQ ID NO: 463585 - DNA, 19 bp, Mus musculus
  siRNA target sequence for Pias1 (NM_019663.2,104-122).
gacgcaaacacgaacttct

SEQ ID NO: 463586 - DNA, 19 bp, Mus musculus
  siRNA target sequence for Pias1 (NM_019663.2,106-124).
cgcaaacacgaacttctta

SEQ ID NO: 463587 - DNA, 19 bp, Mus musculus
  siRNA target sequence for Pias1 (NM_019663.2,158-176).
gtcctgctgtacaaatgaa

SEQ ID NO: 463588 - DNA, 19 bp, Mus musculus
  siRNA target sequence for Pias1 (NM_019663.2,199-217).
cggttccctcagaaaatta

SEQ ID NO: 463589 - DNA, 19 bp, Mus musculus
  siRNA target sequence for Pias1 (NM_019663.2,221-239).
cgcctgcggacttgtctat

SEQ ID NO: 463590 - DNA, 19 bp, Mus musculus
  siRNA target sequence for Pias1 (NM_019663.2,400-418).
ccagtccacccggacataa

SEQ ID NO: 463591 - DNA, 19 bp, Mus musculus
  siRNA target sequence for Pias1 (NM_019663.2,565-583).
gatatttctgggaccaaat

SEQ ID NO: 463592 - DNA, 19 bp, Mus musculus
  siRNA target sequence for Pias1 (NM_019663.2,591-609).
cacagtgcaggtccaatta

SEQ ID NO: 463593 - DNA, 19 bp, Mus musculus
  siRNA target sequence for Pias1 (NM_019663.2,595-613).
gtgcaggtccaattaaggt

SEQ ID NO: 463594 - DNA, 19 bp, Mus musculus
  siRNA target sequence for Pias1 (NM_019663.2,597-615).
gcaggtccaattaaggttt

SEQ ID NO: 463595 - DNA, 19 bp, Mus musculus
  siRNA target sequence for Pias1 (NM_019663.2,598-616).
caggtccaattaaggtttt

SEQ ID NO: 463596 - DNA, 19 bp, Mus musculus
  siRNA target sequence for Pias1 (NM_019663.2,600-618).
ggtccaattaaggttttgt

SEQ ID NO: 463597 - DNA, 19 bp, Mus musculus
  siRNA target sequence for Pias1 (NM_019663.2,603-621).
ccaattaaggttttgttta

SEQ ID NO: 463598 - DNA, 19 bp, Mus musculus
  siRNA target sequence for Pias1 (NM_019663.2,663-681).
cctttgtgtaaaagtgaat

SEQ ID NO: 463599 - DNA, 19 bp, Mus musculus
  siRNA target sequence for Pias1 (NM_019663.2,741-759).
gcgacctagccgaccaatt

SEQ ID NO: 463600 - DNA, 19 bp, Mus musculus
  siRNA target sequence for Pias1 (NM_019663.2,742-760).
cgacctagccgaccaatta

SEQ ID NO: 463601 - DNA, 19 bp, Mus musculus
  siRNA target sequence for Pias1 (NM_019663.2,743-761).
gacctagccgaccaattaa

SEQ ID NO: 463602 - DNA, 19 bp, Mus musculus
  siRNA target sequence for Pias1 (NM_019663.2,745-763).
cctagccgaccaattaata

SEQ ID NO: 463603 - DNA, 19 bp, Mus musculus
  siRNA target sequence for Pias1 (NM_019663.2,746-764).
ctagccgaccaattaatat

SEQ ID NO: 463604 - DNA, 19 bp, Mus musculus
  siRNA target sequence for Pias1 (NM_019663.2,783-801).
gtccacgacagtaccaaat

SEQ ID NO: 463605 - DNA, 19 bp, Mus musculus
  siRNA target sequence for Pias1 (NM_019663.2,788-806).
cgacagtaccaaataccat

SEQ ID NO: 463606 - DNA, 19 bp, Mus musculus
  siRNA target sequence for Pias1 (NM_019663.2,839-857).
cctattccatggcagtata

SEQ ID NO: 463607 - DNA, 19 bp, Mus musculus
  siRNA target sequence for Pias1 (NM_019663.2,846-864).
catggcagtatatcttgta

SEQ ID NO: 463608 - DNA, 19 bp, Mus musculus
  siRNA target sequence for Pias1 (NM_019663.2,853-871).
gtatatcttgtaaaacagt

SEQ ID NO: 463609 - DNA, 19 bp, Mus musculus
  siRNA target sequence for Pias1 (NM_019663.2,870-888).
gttgtcctcaacagttctt

SEQ ID NO: 463610 - DNA, 19 bp, Mus musculus
  siRNA target sequence for Pias1 (NM_019663.2,918-936).
gaatccggatcattctaga

SEQ ID NO: 463611 - DNA, 19 bp, Mus musculus
  siRNA target sequence for Pias1 (NM_019663.2,925-943).
gatcattctagagctttaa

SEQ ID NO: 463612 - DNA, 19 bp, Mus musculus
  siRNA target sequence for Pias1 (NM_019663.2,928-946).
cattctagagctttaatta

SEQ ID NO: 463613 - DNA, 19 bp, Mus musculus
  siRNA target sequence for Pias1 (NM_019663.2,1061-1079).
gctcccaccttcagtgttt

SEQ ID NO: 463614 - DNA, 19 bp, Mus musculus
  siRNA target sequence for Pias1 (NM_019663.2,1126-1144).
gtttgtcctgtctgtgata

SEQ ID NO: 463615 - DNA, 19 bp, Mus musculus
  siRNA target sequence for Pias1 (NM_019663.2,1154-1172).
catatgaacaccttattat

SEQ ID NO: 463616 - DNA, 19 bp, Mus musculus
  siRNA target sequence for Pias1 (NM_019663.2,1174-1192).
gacgggttgtttatggaaa

SEQ ID NO: 463617 - DNA, 19 bp, Mus musculus
  siRNA target sequence for Pias1 (NM_019663.2,1176-1194).
cgggttgtttatggaaatt

SEQ ID NO: 463618 - DNA, 19 bp, Mus musculus
  siRNA target sequence for Pias1 (NM_019663.2,1208-1226).
cagactgtgacgagataca

SEQ ID NO: 463619 - DNA, 19 bp, Mus musculus
  siRNA target sequence for Pias1 (NM_019663.2,1210-1228).
gactgtgacgagatacagt

SEQ ID NO: 463620 - DNA, 19 bp, Mus musculus
  siRNA target sequence for Pias1 (NM_019663.2,1290-1308).
ctcctacaatggagttgat

SEQ ID NO: 463621 - DNA, 19 bp, Mus musculus
  siRNA target sequence for Pias1 (NM_019663.2,1347-1365).
ccacaaccagtcctcaaat

SEQ ID NO: 463622 - DNA, 19 bp, Mus musculus
  siRNA target sequence for Pias1 (NM_019663.2,1348-1366).
cacaaccagtcctcaaata

SEQ ID NO: 463623 - DNA, 19 bp, Mus musculus
  siRNA target sequence for Pias1 (NM_019663.2,1383-1401).
ggtcattgacctaaccatt

SEQ ID NO: 463624 - DNA, 19 bp, Mus musculus
  siRNA target sequence for Pias1 (NM_019663.2,1465-1483).
cctacgtcaccactaagta

SEQ ID NO: 463625 - DNA, 19 bp, Mus musculus
  siRNA target sequence for Pias1 (NM_019663.2,1466-1484).
ctacgtcaccactaagtaa

SEQ ID NO: 463626 - DNA, 19 bp, Mus musculus
  siRNA target sequence for Pias1 (NM_019663.2,1469-1487).
cgtcaccactaagtaataa

SEQ ID NO: 463627 - DNA, 19 bp, Mus musculus
  siRNA target sequence for Pias1 (NM_019663.2,1549-1567).
gtagatacaagctacatca

SEQ ID NO: 463628 - DNA, 19 bp, Mus musculus
  siRNA target sequence for Pias1 (NM_019663.2,1610-1628).
cgcctatgccttatgactt

SEQ ID NO: 463629 - DNA, 19 bp, Mus musculus
  siRNA target sequence for Pias1 (NM_019663.2,1619-1637).
cttatgacttacaaggatt

SEQ ID NO: 463630 - DNA, 19 bp, Mus musculus
  siRNA target sequence for Pias1 (NM_019663.2,1624-1642).
gacttacaaggattagatt

SEQ ID NO: 463631 - DNA, 19 bp, Mus musculus
  siRNA target sequence for Pias1 (NM_019663.2,1661-1679).
gagacaatcagcattacaa

SEQ ID NO: 463632 - DNA, 19 bp, Mus musculus
  siRNA target sequence for Pias1 (NM_019663.2,1663-1681).
gacaatcagcattacaaca

SEQ ID NO: 463633 - DNA, 19 bp, Mus musculus
  siRNA target sequence for Pias1 (NM_019663.2,1923-1941).
gtccatctttggcatcata

SEQ ID NO: 463634 - DNA, 19 bp, Mus musculus
  siRNA target sequence for Pias1 (NM_019663.2,1933-1951).
ggcatcataccagacatta

SEQ ID NO: 463635 - DNA, 19 bp, Mus musculus
  siRNA target sequence for Pias3 (NM_018812.1,128-146).
gcgtccagatgaagatcaa

SEQ ID NO: 463636 - DNA, 19 bp, Mus musculus
  siRNA target sequence for Pias3 (NM_018812.1,260-278).
cactgcccttctatgaagt

SEQ ID NO: 463637 - DNA, 19 bp, Mus musculus
  siRNA target sequence for Pias3 (NM_018812.1,417-435).
gtgtgattacaccatacaa

SEQ ID NO: 463638 - DNA, 19 bp, Mus musculus
  siRNA target sequence for Pias3 (NM_018812.1,498-516).
cctctttgttaaggttaat

SEQ ID NO: 463639 - DNA, 19 bp, Mus musculus
  siRNA target sequence for Pias3 (NM_018812.1,580-598).
cccagccgtccgatcaaca

SEQ ID NO: 463640 - DNA, 19 bp, Mus musculus
  siRNA target sequence for Pias3 (NM_018812.1,581-599).
ccagccgtccgatcaacat

SEQ ID NO: 463641 - DNA, 19 bp, Mus musculus
  siRNA target sequence for Pias3 (NM_018812.1,661-679).
gagtttggacggaattact

SEQ ID NO: 463642 - DNA, 19 bp, Mus musculus
  siRNA target sequence for Pias3 (NM_018812.1,896-914).
gtgcccatctgcagagttt

SEQ ID NO: 463643 - DNA, 19 bp, Mus musculus
  siRNA target sequence for Pias3 (NM_018812.1,900-918).
ccatctgcagagtttcgat

SEQ ID NO: 463644 - DNA, 19 bp, Mus musculus
  siRNA target sequence for Pias3 (NM_018812.1,915-933).
cgatgctgccctttatcta

SEQ ID NO: 463645 - DNA, 19 bp, Mus musculus
  siRNA target sequence for Pias3 (NM_018812.1,988-1006).
ccctatgagtcgctgatta

SEQ ID NO: 463646 - DNA, 19 bp, Mus musculus
  siRNA target sequence for Pias3 (NM_018812.1,989-1007).
cctatgagtcgctgattat

SEQ ID NO: 463647 - DNA, 19 bp, Mus musculus
  siRNA target sequence for Pias3 (NM_018812.1,990-1008).
ctatgagtcgctgattatt

SEQ ID NO: 463648 - DNA, 19 bp, Mus musculus
  siRNA target sequence for Pias3 (NM_018812.1,998-1016).
cgctgattattgatggttt

SEQ ID NO: 463649 - DNA, 19 bp, Mus musculus
  siRNA target sequence for Pias3 (NM_018812.1,999-1017).
gctgattattgatggttta

SEQ ID NO: 463650 - DNA, 19 bp, Mus musculus
  siRNA target sequence for Pias3 (NM_018812.1,1000-1018).
ctgattattgatggtttat

SEQ ID NO: 463651 - DNA, 19 bp, Mus musculus
  siRNA target sequence for Pias3 (NM_018812.1,1040-1058).
gttcggattgtgatgagat

SEQ ID NO: 463652 - DNA, 19 bp, Mus musculus
  siRNA target sequence for Pias3 (NM_018812.1,1049-1067).
gtgatgagatccagttcat

SEQ ID NO: 463653 - DNA, 19 bp, Mus musculus
  siRNA target sequence for Pias3 (NM_018812.1,1199-1217).
gggtcgaagtcattgactt

SEQ ID NO: 463654 - DNA, 19 bp, Mus musculus
  siRNA target sequence for Pias3 (NM_018812.1,1221-1239).
catcgaaagctcatcagat

SEQ ID NO: 463655 - DNA, 19 bp, Mus musculus
  siRNA target sequence for Pias3 (NM_018812.1,1446-1464).
ccaaggtttagatttattt

SEQ ID NO: 463656 - DNA, 19 bp, Mus musculus
  siRNA target sequence for Pias3 (NM_018812.1,1702-1720).
ccttcaggtccctctttga

SEQ ID NO: 463657 - DNA, 19 bp, Mus musculus
  siRNA target sequence for Pias3 (NM_018812.1,1729-1747).
cggtcagacgtcatttcct

SEQ ID NO: 463658 - DNA, 19 bp, Mus musculus
  siRNA target sequence for Pias3 (NM_018812.1,1730-1748).
ggtcagacgtcatttcctt

SEQ ID NO: 463659 - DNA, 19 bp, Mus musculus
  siRNA target sequence for Pias3 (NM_146135.1,802-820).
cccaacaccatcgtagtta

SEQ ID NO: 463660 - DNA, 19 bp, Mus musculus
  siRNA target sequence for Pias3 (NM_146135.1,803-821).
ccaacaccatcgtagttaa

SEQ ID NO: 463661 - DNA, 19 bp, Mus musculus
  siRNA target sequence for Pias3 (NM_146135.1,804-822).
caacaccatcgtagttaat

SEQ ID NO: 463662 - DNA, 19 bp, Mus musculus
  siRNA target sequence for Pias3 (NM_146135.1,1565-1583).
ctagtctcccgctacatga

SEQ ID NO: 463663 - DNA, 19 bp, Mus musculus
  siRNA target sequence for Pias3 (NM_146135.1,1568-1586).
gtctcccgctacatgagta

SEQ ID NO: 463664 - DNA, 19 bp, Mus musculus
  siRNA target sequence for Pias3 (NM_146135.1,1659-1677).
gcactacggcccttcagtt

SEQ ID NO: 463665 - DNA, 19 bp, Mus musculus
  siRNA target sequence for Piasy (NM_021501.1,247-265).
gatgagcttccgagtatca

SEQ ID NO: 463666 - DNA, 19 bp, Mus musculus
  siRNA target sequence for Piasy (NM_021501.1,368-386).
gagcttttcaagaagatca

SEQ ID NO: 463667 - DNA, 19 bp, Mus musculus
  siRNA target sequence for Piasy (NM_021501.1,518-536).
gtgctgtacgggaagtact

SEQ ID NO: 463668 - DNA, 19 bp, Mus musculus
  siRNA target sequence for Piasy (NM_021501.1,521-539).
ctgtacgggaagtacttga

SEQ ID NO: 463669 - DNA, 19 bp, Mus musculus
  siRNA target sequence for Piasy (NM_021501.1,576-594).
cggaggtacgcctggttaa

SEQ ID NO: 463670 - DNA, 19 bp, Mus musculus
  siRNA target sequence for Piasy (NM_021501.1,590-608).
gttaagctccccttcttca

SEQ ID NO: 463671 - DNA, 19 bp, Mus musculus
  siRNA target sequence for Piasy (NM_021501.1,733-751).
gctgcagcctggagtgaaa

SEQ ID NO: 463672 - DNA, 19 bp, Mus musculus
  siRNA target sequence for Piasy (NM_021501.1,795-813).
gtccgcaggaggaccaata

SEQ ID NO: 463673 - DNA, 19 bp, Mus musculus
  siRNA target sequence for Piasy (NM_021501.1,922-940).
ccttacccacctcatgtat

SEQ ID NO: 463674 - DNA, 19 bp, Mus musculus
  siRNA target sequence for Piasy (NM_021501.1,949-967).
ggccaccaaccgcattact

SEQ ID NO: 463675 - DNA, 19 bp, Mus musculus
  siRNA target sequence for Piasy (NM_021501.1,993-1011).
gctactctgtggctttgta

SEQ ID NO: 463676 - DNA, 19 bp, Mus musculus
  siRNA target sequence for Piasy (NM_021501.1,1623-1641).
cgtcgtcctcggaagatga

SEQ ID NO: 463677 - DNA, 19 bp, Mus musculus
  siRNA target sequence for Piasy (NM_021501.1,1624-1642).
gtcgtcctcggaagatgaa

SEQ ID NO: 463678 - DNA, 19 bp, Mus musculus
  siRNA target sequence for Pml (NM_008884.2,148-166).
ccatacaggaggaatttca

SEQ ID NO: 463679 - DNA, 19 bp, Mus musculus
  siRNA target sequence for Pml (NM_008884.2,507-525).
gctgatctccgcgacaatt

SEQ ID NO: 463680 - DNA, 19 bp, Mus musculus
  siRNA target sequence for Pml (NM_008884.2,547-565).
gtacgcgcaagtccaatat

SEQ ID NO: 463681 - DNA, 19 bp, Mus musculus
  siRNA target sequence for Pml (NM_008884.2,550-568).
cgcgcaagtccaatatctt

SEQ ID NO: 463682 - DNA, 19 bp, Mus musculus
  siRNA target sequence for Pml (NM_008884.2,552-570).
cgcaagtccaatatcttct

SEQ ID NO: 463683 - DNA, 19 bp, Mus musculus
  siRNA target sequence for Pml (NM_008884.2,674-692).
ccatctccattgcgatatt

SEQ ID NO: 463684 - DNA, 19 bp, Mus musculus
  siRNA target sequence for Pml (NM_008884.2,785-803).
gatgtgctcagctatagga

SEQ ID NO: 463685 - DNA, 19 bp, Mus musculus
  siRNA target sequence for Pml (NM_008884.2,812-830).
ccacgcacgcgcagacatt

SEQ ID NO: 463686 - DNA, 19 bp, Mus musculus
  siRNA target sequence for Pml (NM_008884.2,923-941).
gcgcgactaccaggaaata

SEQ ID NO: 463687 - DNA, 19 bp, Mus musculus
  siRNA target sequence for Pml (NM_008884.2,926-944).
cgactaccaggaaatagct

SEQ ID NO: 463688 - DNA, 19 bp, Mus musculus
  siRNA target sequence for Pml (NM_008884.2,1171-1189).
gcatcacccagaggataaa

SEQ ID NO: 463689 - DNA, 19 bp, Mus musculus
  siRNA target sequence for Pml (NM_008884.2,1175-1193).
cacccagaggataaatgca

SEQ ID NO: 463690 - DNA, 19 bp, Mus musculus
  siRNA target sequence for Pml (NM_008884.2,1474-1492).
gcaccgtccctgaaaaaaa

SEQ ID NO: 463691 - DNA, 19 bp, Mus musculus
  siRNA target sequence for Pml (NM_008884.2,1685-1703).
cgccgaaccccacttagaa

SEQ ID NO: 463692 - DNA, 19 bp, Mus musculus
  siRNA target sequence for Pml (NM_008884.2,1687-1705).
ccgaaccccacttagaaga

SEQ ID NO: 463693 - DNA, 19 bp, Mus musculus
  siRNA target sequence for Pml (NM_008884.2,1896-1914).
cccatcttggcgtgttcta

SEQ ID NO: 463694 - DNA, 19 bp, Mus musculus
  siRNA target sequence for Pml (NM_008884.2,2041-2059).
gcgctagcagcttcaaact

SEQ ID NO: 463695 - DNA, 19 bp, Mus musculus
  siRNA target sequence for Pml (NM_008884.2,2042-2060).
cgctagcagcttcaaactt

SEQ ID NO: 463696 - DNA, 19 bp, Mus musculus
  siRNA target sequence for Pml (NM_008884.2,2077-2095).
cctacctggcgagaaacat

SEQ ID NO: 463697 - DNA, 19 bp, Mus musculus
  siRNA target sequence for Pml (NM_008884.2,2173-2191).
cgctggcccagcatatcta

SEQ ID NO: 463698 - DNA, 19 bp, Mus musculus
  siRNA target sequence for Pml (NM_008884.2,2181-2199).
cagcatatctactccttta

SEQ ID NO: 463699 - DNA, 19 bp, Mus musculus
  siRNA target sequence for Pml (NM_008884.2,2183-2201).
gcatatctactcctttagt

SEQ ID NO: 463700 - DNA, 19 bp, Mus musculus
  siRNA target sequence for Pml (NM_178087.2,1485-1503).
ccagtgtatgccttttcaa

SEQ ID NO: 463701 - DNA, 19 bp, Mus musculus
  siRNA target sequence for Pml (NM_178087.2,1490-1508).
gtatgccttttcaatgcaa

SEQ ID NO: 463702 - DNA, 19 bp, Mus musculus
  siRNA target sequence for Pml (NM_178087.2,2537-2555).
ctttgtagagttactgaat

SEQ ID NO: 463703 - DNA, 19 bp, Mus musculus
  siRNA target sequence for Pml (NM_178087.2,2541-2559).
gtagagttactgaatgcat

SEQ ID NO: 463704 - DNA, 19 bp, Mus musculus
  siRNA target sequence for Pms1 (NM_153556.1,140-158).
gttgcctgcagcaacagtt

SEQ ID NO: 463705 - DNA, 19 bp, Mus musculus
  siRNA target sequence for Pms1 (NM_153556.1,190-208).
cagtggtcagcgttgtgaa

SEQ ID NO: 463706 - DNA, 19 bp, Mus musculus
  siRNA target sequence for Pms1 (NM_153556.1,274-292).
gatttgataaaattgagat

SEQ ID NO: 463707 - DNA, 19 bp, Mus musculus
  siRNA target sequence for Pms1 (NM_153556.1,310-328).
gcatcaaggctgtagatgt

SEQ ID NO: 463708 - DNA, 19 bp, Mus musculus
  siRNA target sequence for Pms1 (NM_153556.1,381-399).
cttggaaatctgacaactt

SEQ ID NO: 463709 - DNA, 19 bp, Mus musculus
  siRNA target sequence for Pms1 (NM_153556.1,422-440).
ggggtcaatatgtaatgtt

SEQ ID NO: 463710 - DNA, 19 bp, Mus musculus
  siRNA target sequence for Pms1 (NM_153556.1,438-456).
gttgcggaggtggtagtta

SEQ ID NO: 463711 - DNA, 19 bp, Mus musculus
  siRNA target sequence for Pms1 (NM_153556.1,443-461).
ggaggtggtagttacaaca

SEQ ID NO: 463712 - DNA, 19 bp, Mus musculus
  siRNA target sequence for Pms1 (NM_153556.1,444-462).
gaggtggtagttacaacaa

SEQ ID NO: 463713 - DNA, 19 bp, Mus musculus
  siRNA target sequence for Pms1 (NM_153556.1,504-522).
ggcagtggccacatacttt

SEQ ID NO: 463714 - DNA, 19 bp, Mus musculus
  siRNA target sequence for Pms1 (NM_153556.1,506-524).
cagtggccacatactttct

SEQ ID NO: 463715 - DNA, 19 bp, Mus musculus
  siRNA target sequence for Pms1 (NM_153556.1,543-561).
ggtcaaggtacaactgtaa

SEQ ID NO: 463716 - DNA, 19 bp, Mus musculus
  siRNA target sequence for Pms1 (NM_153556.1,747-765).
cacaggatggctctaatgt

SEQ ID NO: 463717 - DNA, 19 bp, Mus musculus
  siRNA target sequence for Pms1 (NM_153556.1,783-801).
gtcatgggcaacatggaat

SEQ ID NO: 463718 - DNA, 19 bp, Mus musculus
  siRNA target sequence for Pms1 (NM_153556.1,788-806).
gggcaacatggaatctgtt

SEQ ID NO: 463719 - DNA, 19 bp, Mus musculus
  siRNA target sequence for Pms1 (NM_153556.1,817-835).
gtgaacagtcgcagattta

SEQ ID NO: 463720 - DNA, 19 bp, Mus musculus
  siRNA target sequence for Pms1 (NM_153556.1,822-840).
cagtcgcagatttacctaa

SEQ ID NO: 463721 - DNA, 19 bp, Mus musculus
  siRNA target sequence for Pms1 (NM_153556.1,869-887).
ccacaattccacaagtctt

SEQ ID NO: 463722 - DNA, 19 bp, Mus musculus
  siRNA target sequence for Pms1 (NM_153556.1,892-910).
ccccagagagaagtttcat

SEQ ID NO: 463723 - DNA, 19 bp, Mus musculus
  siRNA target sequence for Pms1 (NM_153556.1,922-940).
gtcggccagtacatcaaaa

SEQ ID NO: 463724 - DNA, 19 bp, Mus musculus
  siRNA target sequence for Pms1 (NM_153556.1,925-943).
ggccagtacatcaaaaaga

SEQ ID NO: 463725 - DNA, 19 bp, Mus musculus
  siRNA target sequence for Pms1 (NM_153556.1,926-944).
gccagtacatcaaaaagat

SEQ ID NO: 463726 - DNA, 19 bp, Mus musculus
  siRNA target sequence for Pms1 (NM_153556.1,933-951).
catcaaaaagatatactaa

SEQ ID NO: 463727 - DNA, 19 bp, Mus musculus
  siRNA target sequence for Pms1 (NM_153556.1,953-971).
gttaattcgacgctattat

SEQ ID NO: 463728 - DNA, 19 bp, Mus musculus
  siRNA target sequence for Pms1 (NM_153556.1,961-979).
gacgctattataatctgaa

SEQ ID NO: 463729 - DNA, 19 bp, Mus musculus
  siRNA target sequence for Pms1 (NM_153556.1,997-1015).
cccgcttgtatcccatttt

SEQ ID NO: 463730 - DNA, 19 bp, Mus musculus
  siRNA target sequence for Pms1 (NM_153556.1,1036-1054).
catcagctgaggtggatat

SEQ ID NO: 463731 - DNA, 19 bp, Mus musculus
  siRNA target sequence for Pms1 (NM_153556.1,1042-1060).
ctgaggtggatataaatct

SEQ ID NO: 463732 - DNA, 19 bp, Mus musculus
  siRNA target sequence for Pms1 (NM_153556.1,1075-1093).
gtcaagtgttattacagaa

SEQ ID NO: 463733 - DNA, 19 bp, Mus musculus
  siRNA target sequence for Pms1 (NM_153556.1,1077-1095).
caagtgttattacagaata

SEQ ID NO: 463734 - DNA, 19 bp, Mus musculus
  siRNA target sequence for Pms1 (NM_153556.1,1116-1134).
cttgaaaatctgatgatga

SEQ ID NO: 463735 - DNA, 19 bp, Mus musculus
  siRNA target sequence for Pms1 (NM_153556.1,1198-1216).
ccaacatggttgttagtca

SEQ ID NO: 463736 - DNA, 19 bp, Mus musculus
  siRNA target sequence for Pms1 (NM_153556.1,1199-1217).
caacatggttgttagtcaa

SEQ ID NO: 463737 - DNA, 19 bp, Mus musculus
  siRNA target sequence for Pms1 (NM_153556.1,1213-1231).
gtcaaacagccgaaacaga

SEQ ID NO: 463738 - DNA, 19 bp, Mus musculus
  siRNA target sequence for Pms1 (NM_153556.1,1222-1240).
ccgaaacagatgtgctttt

SEQ ID NO: 463739 - DNA, 19 bp, Mus musculus
  siRNA target sequence for Pms1 (NM_153556.1,1223-1241).
cgaaacagatgtgcttttt

SEQ ID NO: 463740 - DNA, 19 bp, Mus musculus
  siRNA target sequence for Pms1 (NM_153556.1,1279-1297).
ctgatacttcggctattca

SEQ ID NO: 463741 - DNA, 19 bp, Mus musculus
  siRNA target sequence for Pms1 (NM_153556.1,1318-1336).
gaaaaaacattgatcatca

SEQ ID NO: 463742 - DNA, 19 bp, Mus musculus
  siRNA target sequence for Pms1 (NM_153556.1,1377-1395).
cattttagtggtgacatta

SEQ ID NO: 463743 - DNA, 19 bp, Mus musculus
  siRNA target sequence for Pms1 (NM_153556.1,1419-1437).
cctatgaataatttatcat

SEQ ID NO: 463744 - DNA, 19 bp, Mus musculus
  siRNA target sequence for Pms1 (NM_153556.1,1438-1456).
cagagactaatcagagtaa

SEQ ID NO: 463745 - DNA, 19 bp, Mus musculus
  siRNA target sequence for Pms1 (NM_153556.1,1468-1486).
ctcattctgtaggttctat

SEQ ID NO: 463746 - DNA, 19 bp, Mus musculus
  siRNA target sequence for Pms1 (NM_153556.1,1503-1521).
gaaaatggcaggaatggta

SEQ ID NO: 463747 - DNA, 19 bp, Mus musculus
  siRNA target sequence for Pms1 (NM_153556.1,1562-1580).
gaaagctctggaaatctgt

SEQ ID NO: 463748 - DNA, 19 bp, Mus musculus
  siRNA target sequence for Pms1 (NM_153556.1,1584-1602).
gacgattggagcaaaggaa

SEQ ID NO: 463749 - DNA, 19 bp, Mus musculus
  siRNA target sequence for Pms1 (NM_153556.1,1586-1604).
cgattggagcaaaggaaat

SEQ ID NO: 463750 - DNA, 19 bp, Mus musculus
  siRNA target sequence for Pms1 (NM_153556.1,1600-1618).
gaaatttgtgtaattcaat

SEQ ID NO: 463751 - DNA, 19 bp, Mus musculus
  siRNA target sequence for Pms1 (NM_153556.1,1615-1633).
caatgggagagaatatcga

SEQ ID NO: 463752 - DNA, 19 bp, Mus musculus
  siRNA target sequence for Pms1 (NM_153556.1,1625-1643).
gaatatcgaacctgtgaaa

SEQ ID NO: 463753 - DNA, 19 bp, Mus musculus
  siRNA target sequence for Pms1 (NM_153556.1,1631-1649).
cgaacctgtgaaaatttta

SEQ ID NO: 463754 - DNA, 19 bp, Mus musculus
  siRNA target sequence for Pms1 (NM_153556.1,1732-1750).
gcagaacatcagatgtaat

SEQ ID NO: 463755 - DNA, 19 bp, Mus musculus
  siRNA target sequence for Pms1 (NM_153556.1,1767-1785).
cggcttacagcctatgact

SEQ ID NO: 463756 - DNA, 19 bp, Mus musculus
  siRNA target sequence for Pms1 (NM_153556.1,1768-1786).
ggcttacagcctatgactt

SEQ ID NO: 463757 - DNA, 19 bp, Mus musculus
  siRNA target sequence for Pms1 (NM_153556.1,1769-1787).
gcttacagcctatgactta

SEQ ID NO: 463758 - DNA, 19 bp, Mus musculus
  siRNA target sequence for Pms1 (NM_153556.1,1770-1788).
cttacagcctatgacttaa

SEQ ID NO: 463759 - DNA, 19 bp, Mus musculus
  siRNA target sequence for Pms1 (NM_153556.1,1776-1794).
gcctatgacttaattagca

SEQ ID NO: 463760 - DNA, 19 bp, Mus musculus
  siRNA target sequence for Pms1 (NM_153556.1,1890-1908).
gatgcgacagaacaaatca

SEQ ID NO: 463761 - DNA, 19 bp, Mus musculus
  siRNA target sequence for Pms1 (NM_153556.1,1952-1970).
cgaggaaaaggctaaaaaa

SEQ ID NO: 463762 - DNA, 19 bp, Mus musculus
  siRNA target sequence for Pms1 (NM_153556.1,1971-1989).
gacttggaacgatacaata

SEQ ID NO: 463763 - DNA, 19 bp, Mus musculus
  siRNA target sequence for Pms1 (NM_153556.1,1976-1994).
ggaacgatacaataaccaa

SEQ ID NO: 463764 - DNA, 19 bp, Mus musculus
  siRNA target sequence for Pms1 (NM_153556.1,1977-1995).
gaacgatacaataaccaaa

SEQ ID NO: 463765 - DNA, 19 bp, Mus musculus
  siRNA target sequence for Pms1 (NM_153556.1,1980-1998).
cgatacaataaccaaatga

SEQ ID NO: 463766 - DNA, 19 bp, Mus musculus
  siRNA target sequence for Pms1 (NM_153556.1,2013-2031).
caggagacacaagtatcat

SEQ ID NO: 463767 - DNA, 19 bp, Mus musculus
  siRNA target sequence for Pms1 (NM_153556.1,2069-2087).
gggctggacacagaaacat

SEQ ID NO: 463768 - DNA, 19 bp, Mus musculus
  siRNA target sequence for Pms1 (NM_153556.1,2129-2147).
ctttcagtcccagaatgaa

SEQ ID NO: 463769 - DNA, 19 bp, Mus musculus
  siRNA target sequence for Pms1 (NM_153556.1,2308-2326).
gagccgatgtcatgttact

SEQ ID NO: 463770 - DNA, 19 bp, Mus musculus
  siRNA target sequence for Pms1 (NM_153556.1,2310-2328).
gccgatgtcatgttactga

SEQ ID NO: 463771 - DNA, 19 bp, Mus musculus
  siRNA target sequence for Pms1 (NM_153556.1,2311-2329).
ccgatgtcatgttactgaa

SEQ ID NO: 463772 - DNA, 19 bp, Mus musculus
  siRNA target sequence for Pms1 (NM_153556.1,2350-2368).
ccctgctatttaaaagact

SEQ ID NO: 463773 - DNA, 19 bp, Mus musculus
  siRNA target sequence for Pms1 (NM_153556.1,2351-2369).
cctgctatttaaaagactt

SEQ ID NO: 463774 - DNA, 19 bp, Mus musculus
  siRNA target sequence for Pms1 (NM_153556.1,2398-2416).
cactggaaaagccaattat

SEQ ID NO: 463775 - DNA, 19 bp, Mus musculus
  siRNA target sequence for Pms1 (NM_153556.1,2430-2448).
cttcttaatgggtctcatt

SEQ ID NO: 463776 - DNA, 19 bp, Mus musculus
  siRNA target sequence for Pms1 (NM_153556.1,2443-2461).
ctcattatctagaggtttt

SEQ ID NO: 463777 - DNA, 19 bp, Mus musculus
  siRNA target sequence for Pms1 (NM_153556.1,2451-2469).
ctagaggttttatataaaa

SEQ ID NO: 463778 - DNA, 19 bp, Mus musculus
  siRNA target sequence for Pms1 (NM_153556.1,2516-2534).
ccctcgtcttacagcaaat

SEQ ID NO: 463779 - DNA, 19 bp, Mus musculus
  siRNA target sequence for Pms1 (NM_153556.1,2529-2547).
gcaaatggcttcaagatca

SEQ ID NO: 463780 - DNA, 19 bp, Mus musculus
  siRNA target sequence for Pms1 (NM_153556.1,2566-2584).
ccagtactgagaactactt

SEQ ID NO: 463781 - DNA, 19 bp, Mus musculus
  siRNA target sequence for Pms1 (NM_153556.1,2602-2620).
ctcagtgtctcccattcta

SEQ ID NO: 463782 - DNA, 19 bp, Mus musculus
  siRNA target sequence for Pms1 (NM_153556.1,2614-2632).
cattctatggaataatgga

SEQ ID NO: 463783 - DNA, 19 bp, Mus musculus
  siRNA target sequence for Pms1 (NM_153556.1,2646-2664).
cttaatgctatagtaaaca

SEQ ID NO: 463784 - DNA, 19 bp, Mus musculus
  siRNA target sequence for Pms1 (NM_153556.1,2675-2693).
ggagatttatgaatgtaga

SEQ ID NO: 463785 - DNA, 19 bp, Mus musculus
  siRNA target sequence for Pms1 (NM_153556.1,2689-2707).
gtagacctcgaaaagtaat

SEQ ID NO: 463786 - DNA, 19 bp, Mus musculus
  siRNA target sequence for Pms1 (NM_153556.1,2694-2712).
cctcgaaaagtaataaatt

SEQ ID NO: 463787 - DNA, 19 bp, Mus musculus
  siRNA target sequence for Pms1 (NM_153556.1,2695-2713).
ctcgaaaagtaataaatta

SEQ ID NO: 463788 - DNA, 19 bp, Mus musculus
  siRNA target sequence for Pms1 (NM_153556.1,2748-2766).
ctacccatgtacttaccaa

SEQ ID NO: 463789 - DNA, 19 bp, Mus musculus
  siRNA target sequence for Pms1 (NM_153556.1,2767-2785).
gagaggatgtccaagatct

SEQ ID NO: 463790 - DNA, 19 bp, Mus musculus
  siRNA target sequence for Pms1 (NM_153556.1,2772-2790).
gatgtccaagatcttatct

SEQ ID NO: 463791 - DNA, 19 bp, Mus musculus
  siRNA target sequence for Pms1 (NM_153556.1,2775-2793).
gtccaagatcttatctata

SEQ ID NO: 463792 - DNA, 19 bp, Mus musculus
  siRNA target sequence for Pms1 (NM_153556.1,2801-2819).
gcaccagttcggaaaagaa

SEQ ID NO: 463793 - DNA, 19 bp, Mus musculus
  siRNA target sequence for Pogk (NM_175170.2,563-581).
catgggtaccagctctatt

SEQ ID NO: 463794 - DNA, 19 bp, Mus musculus
  siRNA target sequence for Pogk (NM_175170.2,644-662).
ccctctaccgggaagtcat

SEQ ID NO: 463795 - DNA, 19 bp, Mus musculus
  siRNA target sequence for Pogk (NM_175170.2,655-673).
gaagtcatgaggatgaatt

SEQ ID NO: 463796 - DNA, 19 bp, Mus musculus
  siRNA target sequence for Pogk (NM_175170.2,840-858).
gaatgccacctcccatttt

SEQ ID NO: 463797 - DNA, 19 bp, Mus musculus
  siRNA target sequence for Pogk (NM_175170.2,931-949).
gagggctaccccttctata

SEQ ID NO: 463798 - DNA, 19 bp, Mus musculus
  siRNA target sequence for Pogk (NM_175170.2,987-1005).
cgacttggcgagcaagttt

SEQ ID NO: 463799 - DNA, 19 bp, Mus musculus
  siRNA target sequence for Pogk (NM_175170.2,1069-1087).
gccgagagcaccaacaact

SEQ ID NO: 463800 - DNA, 19 bp, Mus musculus
  siRNA target sequence for Pogk (NM_175170.2,1102-1120).
cagtttggggtgttggaaa

SEQ ID NO: 463801 - DNA, 19 bp, Mus musculus
  siRNA target sequence for Pogk (NM_175170.2,1129-1147).
cgagactggcgcaaagtga

SEQ ID NO: 463802 - DNA, 19 bp, Mus musculus
  siRNA target sequence for Pogk (NM_175170.2,1228-1246).
cgagtggctgagtatgtca

SEQ ID NO: 463803 - DNA, 19 bp, Mus musculus
  siRNA target sequence for Pogk (NM_175170.2,1260-1278).
caaaggggaccctatcact

SEQ ID NO: 463804 - DNA, 19 bp, Mus musculus
  siRNA target sequence for Pogk (NM_175170.2,1281-1299).
ggaggcaatgcagttgaaa

SEQ ID NO: 463805 - DNA, 19 bp, Mus musculus
  siRNA target sequence for Pogk (NM_175170.2,1306-1324).
gaaatcgcccaggaaatga

SEQ ID NO: 463806 - DNA, 19 bp, Mus musculus
  siRNA target sequence for Pogk (NM_175170.2,1357-1375).
ggctggtgtcgaagaatga

SEQ ID NO: 463807 - DNA, 19 bp, Mus musculus
  siRNA target sequence for Pogk (NM_175170.2,1429-1447).
gccgaggacctgactgaaa

SEQ ID NO: 463808 - DNA, 19 bp, Mus musculus
  siRNA target sequence for Pogk (NM_175170.2,1484-1502).
gcaggacacacgactatga

SEQ ID NO: 463809 - DNA, 19 bp, Mus musculus
  siRNA target sequence for Pogk (NM_175170.2,1485-1503).
caggacacacgactatgaa

SEQ ID NO: 463810 - DNA, 19 bp, Mus musculus
  siRNA target sequence for Pogk (NM_175170.2,1487-1505).
ggacacacgactatgaagt

SEQ ID NO: 463811 - DNA, 19 bp, Mus musculus
  siRNA target sequence for Pogk (NM_175170.2,1530-1548).
gacgcccatctgcttagaa

SEQ ID NO: 463812 - DNA, 19 bp, Mus musculus
  siRNA target sequence for Pogk (NM_175170.2,1532-1550).
cgcccatctgcttagaagt

SEQ ID NO: 463813 - DNA, 19 bp, Mus musculus
  siRNA target sequence for Pogk (NM_175170.2,1556-1574).
ctagagtgactgttgacaa

SEQ ID NO: 463814 - DNA, 19 bp, Mus musculus
  siRNA target sequence for Pogk (NM_175170.2,1665-1683).
gttaccaccgtacatcatt

SEQ ID NO: 463815 - DNA, 19 bp, Mus musculus
  siRNA target sequence for Pogk (NM_175170.2,1669-1687).
ccaccgtacatcattttga

SEQ ID NO: 463816 - DNA, 19 bp, Mus musculus
  siRNA target sequence for Pogk (NM_175170.2,1698-1716).
catcccccctgggaagttt

SEQ ID NO: 463817 - DNA, 19 bp, Mus musculus
  siRNA target sequence for Pogk (NM_175170.2,2036-2054).
gccccactggaaatgctaa

SEQ ID NO: 463818 - DNA, 19 bp, Mus musculus
  siRNA target sequence for Pogk (NM_175170.2,2039-2057).
ccactggaaatgctaagaa

SEQ ID NO: 463819 - DNA, 19 bp, Mus musculus
  siRNA target sequence for Pogk (NM_175170.2,2095-2113).
gcatggaacagcatctcaa

SEQ ID NO: 463820 - DNA, 19 bp, Mus musculus
  siRNA target sequence for Pogk (NM_175170.2,2105-2123).
gcatctcaagtgaatcaat

SEQ ID NO: 463821 - DNA, 19 bp, Mus musculus
  siRNA target sequence for Pogk (NM_175170.2,2106-2124).
catctcaagtgaatcaatt

SEQ ID NO: 463822 - DNA, 19 bp, Mus musculus
  siRNA target sequence for Pogk (NM_175170.2,2196-2214).
gggcgagttgcccaaagaa

SEQ ID NO: 463823 - DNA, 19 bp, Mus musculus
  siRNA target sequence for Pogk (NM_175170.2,2207-2225).
ccaaagaaccgccaaaaga

SEQ ID NO: 463824 - DNA, 19 bp, Mus musculus
  siRNA target sequence for Pola1 (NM_008892.1,56-74).
gcacgaagaggactgtaaa

SEQ ID NO: 463825 - DNA, 19 bp, Mus musculus
  siRNA target sequence for Pola1 (NM_008892.1,118-136).
cccgagctcggcgagaaaa

SEQ ID NO: 463826 - DNA, 19 bp, Mus musculus
  siRNA target sequence for Pola1 (NM_008892.1,120-138).
cgagctcggcgagaaaaga

SEQ ID NO: 463827 - DNA, 19 bp, Mus musculus
  siRNA target sequence for Pola1 (NM_008892.1,121-139).
gagctcggcgagaaaagaa

SEQ ID NO: 463828 - DNA, 19 bp, Mus musculus
  siRNA target sequence for Pola1 (NM_008892.1,123-141).
gctcggcgagaaaagaaat

SEQ ID NO: 463829 - DNA, 19 bp, Mus musculus
  siRNA target sequence for Pola1 (NM_008892.1,126-144).
cggcgagaaaagaaatcaa

SEQ ID NO: 463830 - DNA, 19 bp, Mus musculus
  siRNA target sequence for Pola1 (NM_008892.1,127-145).
ggcgagaaaagaaatcaaa

SEQ ID NO: 463831 - DNA, 19 bp, Mus musculus
  siRNA target sequence for Pola1 (NM_008892.1,184-202).
ctaaagctggggagaagta

SEQ ID NO: 463832 - DNA, 19 bp, Mus musculus
  siRNA target sequence for Pola1 (NM_008892.1,189-207).
gctggggagaagtataaat

SEQ ID NO: 463833 - DNA, 19 bp, Mus musculus
  siRNA target sequence for Pola1 (NM_008892.1,190-208).
ctggggagaagtataaata

SEQ ID NO: 463834 - DNA, 19 bp, Mus musculus
  siRNA target sequence for Pola1 (NM_008892.1,193-211).
gggagaagtataaatacga

SEQ ID NO: 463835 - DNA, 19 bp, Mus musculus
  siRNA target sequence for Pola1 (NM_008892.1,194-212).
ggagaagtataaatacgaa

SEQ ID NO: 463836 - DNA, 19 bp, Mus musculus
  siRNA target sequence for Pola1 (NM_008892.1,221-239).
cctcacaagtgtttatgaa

SEQ ID NO: 463837 - DNA, 19 bp, Mus musculus
  siRNA target sequence for Pola1 (NM_008892.1,444-462).
gtgacaaaaccaaacaata

SEQ ID NO: 463838 - DNA, 19 bp, Mus musculus
  siRNA target sequence for Pola1 (NM_008892.1,563-581).
cactgagacagctcaaata

SEQ ID NO: 463839 - DNA, 19 bp, Mus musculus
  siRNA target sequence for Pola1 (NM_008892.1,588-606).
ccacctgtattgataccaa

SEQ ID NO: 463840 - DNA, 19 bp, Mus musculus
  siRNA target sequence for Pola1 (NM_008892.1,701-719).
gaatgagcctctgttaact

SEQ ID NO: 463841 - DNA, 19 bp, Mus musculus
  siRNA target sequence for Pola1 (NM_008892.1,764-782).
gccagaatgtccagaagat

SEQ ID NO: 463842 - DNA, 19 bp, Mus musculus
  siRNA target sequence for Pola1 (NM_008892.1,860-878).
gcctgtgactgctaagact

SEQ ID NO: 463843 - DNA, 19 bp, Mus musculus
  siRNA target sequence for Pola1 (NM_008892.1,930-948).
gagaggggaaccacatctt

SEQ ID NO: 463844 - DNA, 19 bp, Mus musculus
  siRNA target sequence for Pola1 (NM_008892.1,934-952).
ggggaaccacatcttactt

SEQ ID NO: 463845 - DNA, 19 bp, Mus musculus
  siRNA target sequence for Pola1 (NM_008892.1,937-955).
gaaccacatcttacttaga

SEQ ID NO: 463846 - DNA, 19 bp, Mus musculus
  siRNA target sequence for Pola1 (NM_008892.1,974-992).
ctcttgttgggacattgat

SEQ ID NO: 463847 - DNA, 19 bp, Mus musculus
  siRNA target sequence for Pola1 (NM_008892.1,976-994).
cttgttgggacattgatca

SEQ ID NO: 463848 - DNA, 19 bp, Mus musculus
  siRNA target sequence for Pola1 (NM_008892.1,1006-1024).
gcatacctcaggaagttca

SEQ ID NO: 463849 - DNA, 19 bp, Mus musculus
  siRNA target sequence for Pola1 (NM_008892.1,1007-1025).
catacctcaggaagttcaa

SEQ ID NO: 463850 - DNA, 19 bp, Mus musculus
  siRNA target sequence for Pola1 (NM_008892.1,1034-1052).
cagtaatctcccattggta

SEQ ID NO: 463851 - DNA, 19 bp, Mus musculus
  siRNA target sequence for Pola1 (NM_008892.1,1036-1054).
gtaatctcccattggtaaa

SEQ ID NO: 463852 - DNA, 19 bp, Mus musculus
  siRNA target sequence for Pola1 (NM_008892.1,1143-1161).
ggcaaagtgtggattgaat

SEQ ID NO: 463853 - DNA, 19 bp, Mus musculus
  siRNA target sequence for Pola1 (NM_008892.1,1224-1242).
cttccccgtgaaatgaaat

SEQ ID NO: 463854 - DNA, 19 bp, Mus musculus
  siRNA target sequence for Pola1 (NM_008892.1,1228-1246).
cccgtgaaatgaaatttga

SEQ ID NO: 463855 - DNA, 19 bp, Mus musculus
  siRNA target sequence for Pola1 (NM_008892.1,1238-1256).
gaaatttgacctaaacaca

SEQ ID NO: 463856 - DNA, 19 bp, Mus musculus
  siRNA target sequence for Pola1 (NM_008892.1,1267-1285).
cagcaattccagttacaat

SEQ ID NO: 463857 - DNA, 19 bp, Mus musculus
  siRNA target sequence for Pola1 (NM_008892.1,1269-1287).
gcaattccagttacaatga

SEQ ID NO: 463858 - DNA, 19 bp, Mus musculus
  siRNA target sequence for Pola1 (NM_008892.1,1270-1288).
caattccagttacaatgaa

SEQ ID NO: 463859 - DNA, 19 bp, Mus musculus
  siRNA target sequence for Pola1 (NM_008892.1,1355-1373).
gatagtggaaaagaactat

SEQ ID NO: 463860 - DNA, 19 bp, Mus musculus
  siRNA target sequence for Pola1 (NM_008892.1,1359-1377).
gtggaaaagaactatgctt

SEQ ID NO: 463861 - DNA, 19 bp, Mus musculus
  siRNA target sequence for Pola1 (NM_008892.1,1498-1516).
cgtctagcttggaactgtt

SEQ ID NO: 463862 - DNA, 19 bp, Mus musculus
  siRNA target sequence for Pola1 (NM_008892.1,1504-1522).
gcttggaactgttcttgat

SEQ ID NO: 463863 - DNA, 19 bp, Mus musculus
  siRNA target sequence for Pola1 (NM_008892.1,1509-1527).
gaactgttcttgatgaata

SEQ ID NO: 463864 - DNA, 19 bp, Mus musculus
  siRNA target sequence for Pola1 (NM_008892.1,1512-1530).
ctgttcttgatgaatagga

SEQ ID NO: 463865 - DNA, 19 bp, Mus musculus
  siRNA target sequence for Pola1 (NM_008892.1,1540-1558).
gaccttgttggcttgaagt

SEQ ID NO: 463866 - DNA, 19 bp, Mus musculus
  siRNA target sequence for Pola1 (NM_008892.1,1543-1561).
cttgttggcttgaagtaaa

SEQ ID NO: 463867 - DNA, 19 bp, Mus musculus
  siRNA target sequence for Pola1 (NM_008892.1,1550-1568).
gcttgaagtaaaaaatcca

SEQ ID NO: 463868 - DNA, 19 bp, Mus musculus
  siRNA target sequence for Pola1 (NM_008892.1,1574-1592).
cttgaatcagccaatcagt

SEQ ID NO: 463869 - DNA, 19 bp, Mus musculus
  siRNA target sequence for Pola1 (NM_008892.1,1583-1601).
gccaatcagttggtgtaaa

SEQ ID NO: 463870 - DNA, 19 bp, Mus musculus
  siRNA target sequence for Pola1 (NM_008892.1,1623-1641).
ccagacctggtgaatgtaa

SEQ ID NO: 463871 - DNA, 19 bp, Mus musculus
  siRNA target sequence for Pola1 (NM_008892.1,1624-1642).
cagacctggtgaatgtaat

SEQ ID NO: 463872 - DNA, 19 bp, Mus musculus
  siRNA target sequence for Pola1 (NM_008892.1,1745-1763).
ggttcatcacagttttgca

SEQ ID NO: 463873 - DNA, 19 bp, Mus musculus
  siRNA target sequence for Pola1 (NM_008892.1,1746-1764).
gttcatcacagttttgcat

SEQ ID NO: 463874 - DNA, 19 bp, Mus musculus
  siRNA target sequence for Pola1 (NM_008892.1,1752-1770).
cacagttttgcattagata

SEQ ID NO: 463875 - DNA, 19 bp, Mus musculus
  siRNA target sequence for Pola1 (NM_008892.1,1805-1823).
ctgtgttgtgtctaaacca

SEQ ID NO: 463876 - DNA, 19 bp, Mus musculus
  siRNA target sequence for Pola1 (NM_008892.1,1816-1834).
ctaaaccaaaggactgtat

SEQ ID NO: 463877 - DNA, 19 bp, Mus musculus
  siRNA target sequence for Pola1 (NM_008892.1,1854-1872).
gaagtgatttcgaaaaaga

SEQ ID NO: 463878 - DNA, 19 bp, Mus musculus
  siRNA target sequence for Pola1 (NM_008892.1,1886-1904).
gatcgctgcaacagaaaga

SEQ ID NO: 463879 - DNA, 19 bp, Mus musculus
  siRNA target sequence for Pola1 (NM_008892.1,1899-1917).
gaaagaaccttgataggat

SEQ ID NO: 463880 - DNA, 19 bp, Mus musculus
  siRNA target sequence for Pola1 (NM_008892.1,1937-1955).
caaaattgaccctgacatt

SEQ ID NO: 463881 - DNA, 19 bp, Mus musculus
  siRNA target sequence for Pola1 (NM_008892.1,1959-1977).
gtgggtcataatatttgta

SEQ ID NO: 463882 - DNA, 19 bp, Mus musculus
  siRNA target sequence for Pola1 (NM_008892.1,1961-1979).
gggtcataatatttgtagt

SEQ ID NO: 463883 - DNA, 19 bp, Mus musculus
  siRNA target sequence for Pola1 (NM_008892.1,1962-1980).
ggtcataatatttgtagtt

SEQ ID NO: 463884 - DNA, 19 bp, Mus musculus
  siRNA target sequence for Pola1 (NM_008892.1,1963-1981).
gtcataatatttgtagttt

SEQ ID NO: 463885 - DNA, 19 bp, Mus musculus
  siRNA target sequence for Pola1 (NM_008892.1,2056-2074).
gatccaacatgccaaaact

SEQ ID NO: 463886 - DNA, 19 bp, Mus musculus
  siRNA target sequence for Pola1 (NM_008892.1,2143-2161).
cagcaaaagaattgattca

SEQ ID NO: 463887 - DNA, 19 bp, Mus musculus
  siRNA target sequence for Pola1 (NM_008892.1,2160-2178).
cattgtaaaagctaccatt

SEQ ID NO: 463888 - DNA, 19 bp, Mus musculus
  siRNA target sequence for Pola1 (NM_008892.1,2171-2189).
ctaccatttgtctgaactt

SEQ ID NO: 463889 - DNA, 19 bp, Mus musculus
  siRNA target sequence for Pola1 (NM_008892.1,2241-2259).
cgaaacatgtatagtgaat

SEQ ID NO: 463890 - DNA, 19 bp, Mus musculus
  siRNA target sequence for Pola1 (NM_008892.1,2249-2267).
gtatagtgaatcttcttat

SEQ ID NO: 463891 - DNA, 19 bp, Mus musculus
  siRNA target sequence for Pola1 (NM_008892.1,2293-2311).
ggaaagatgccagattcat

SEQ ID NO: 463892 - DNA, 19 bp, Mus musculus
  siRNA target sequence for Pola1 (NM_008892.1,2294-2312).
gaaagatgccagattcatt

SEQ ID NO: 463893 - DNA, 19 bp, Mus musculus
  siRNA target sequence for Pola1 (NM_008892.1,2305-2323).
gattcattttgcagatcat

SEQ ID NO: 463894 - DNA, 19 bp, Mus musculus
  siRNA target sequence for Pola1 (NM_008892.1,2318-2336).
gatcatgtgtgagctaaat

SEQ ID NO: 463895 - DNA, 19 bp, Mus musculus
  siRNA target sequence for Pola1 (NM_008892.1,2321-2339).
catgtgtgagctaaatgtt

SEQ ID NO: 463896 - DNA, 19 bp, Mus musculus
  siRNA target sequence for Pola1 (NM_008892.1,2324-2342).
gtgtgagctaaatgttctt

SEQ ID NO: 463897 - DNA, 19 bp, Mus musculus
  siRNA target sequence for Pola1 (NM_008892.1,2369-2387).
cgctgggaacattatgtct

SEQ ID NO: 463898 - DNA, 19 bp, Mus musculus
  siRNA target sequence for Pola1 (NM_008892.1,2404-2422).
gacgatctgagcgaaatga

SEQ ID NO: 463899 - DNA, 19 bp, Mus musculus
  siRNA target sequence for Pola1 (NM_008892.1,2406-2424).
cgatctgagcgaaatgagt

SEQ ID NO: 463900 - DNA, 19 bp, Mus musculus
  siRNA target sequence for Pola1 (NM_008892.1,2407-2425).
gatctgagcgaaatgagtt

SEQ ID NO: 463901 - DNA, 19 bp, Mus musculus
  siRNA target sequence for Pola1 (NM_008892.1,2412-2430).
gagcgaaatgagtttttgt

SEQ ID NO: 463902 - DNA, 19 bp, Mus musculus
  siRNA target sequence for Pola1 (NM_008892.1,2530-2548).
gggacaccaataaatacaa

SEQ ID NO: 463903 - DNA, 19 bp, Mus musculus
  siRNA target sequence for Pola1 (NM_008892.1,2532-2550).
gacaccaataaatacaaga

SEQ ID NO: 463904 - DNA, 19 bp, Mus musculus
  siRNA target sequence for Pola1 (NM_008892.1,2554-2572).
ggcgtaagaaagcaactta

SEQ ID NO: 463905 - DNA, 19 bp, Mus musculus
  siRNA target sequence for Pola1 (NM_008892.1,2604-2622).
ggtttttatgacaagttca

SEQ ID NO: 463906 - DNA, 19 bp, Mus musculus
  siRNA target sequence for Pola1 (NM_008892.1,2761-2779).
cagatccaaacttagagat

SEQ ID NO: 463907 - DNA, 19 bp, Mus musculus
  siRNA target sequence for Pola1 (NM_008892.1,3002-3020).
gattttgatgcatacgaaa

SEQ ID NO: 463908 - DNA, 19 bp, Mus musculus
  siRNA target sequence for Pola1 (NM_008892.1,3058-3076).
gagacacagattcaattat

SEQ ID NO: 463909 - DNA, 19 bp, Mus musculus
  siRNA target sequence for Pola1 (NM_008892.1,3060-3078).
gacacagattcaattatga

SEQ ID NO: 463910 - DNA, 19 bp, Mus musculus
  siRNA target sequence for Pola1 (NM_008892.1,3062-3080).
cacagattcaattatgata

SEQ ID NO: 463911 - DNA, 19 bp, Mus musculus
  siRNA target sequence for Pola1 (NM_008892.1,3091-3109).
gcaccaacctggaagaagt

SEQ ID NO: 463912 - DNA, 19 bp, Mus musculus
  siRNA target sequence for Pola1 (NM_008892.1,3119-3137).
gggaaacaaggtaaaaagt

SEQ ID NO: 463913 - DNA, 19 bp, Mus musculus
  siRNA target sequence for Pola1 (NM_008892.1,3136-3154).
gtgaagtgaataaattgta

SEQ ID NO: 463914 - DNA, 19 bp, Mus musculus
  siRNA target sequence for Pola1 (NM_008892.1,3241-3259).
caacatcagatgggaatta

SEQ ID NO: 463915 - DNA, 19 bp, Mus musculus
  siRNA target sequence for Pola1 (NM_008892.1,3244-3262).
catcagatgggaattacat

SEQ ID NO: 463916 - DNA, 19 bp, Mus musculus
  siRNA target sequence for Pola1 (NM_008892.1,3249-3267).
gatgggaattacattacca

SEQ ID NO: 463917 - DNA, 19 bp, Mus musculus
  siRNA target sequence for Pola1 (NM_008892.1,3273-3291).
gagctgaaaggattagata

SEQ ID NO: 463918 - DNA, 19 bp, Mus musculus
  siRNA target sequence for Pola1 (NM_008892.1,3275-3293).
gctgaaaggattagatata

SEQ ID NO: 463919 - DNA, 19 bp, Mus musculus
  siRNA target sequence for Pola1 (NM_008892.1,3278-3296).
gaaaggattagatatagtt

SEQ ID NO: 463920 - DNA, 19 bp, Mus musculus
  siRNA target sequence for Pola1 (NM_008892.1,3282-3300).
ggattagatatagttagaa

SEQ ID NO: 463921 - DNA, 19 bp, Mus musculus
  siRNA target sequence for Pola1 (NM_008892.1,3398-3416).
gaggttaatagaaattgga

SEQ ID NO: 463922 - DNA, 19 bp, Mus musculus
  siRNA target sequence for Pola1 (NM_008892.1,3440-3458).
cccagtgagccagtttgaa

SEQ ID NO: 463923 - DNA, 19 bp, Mus musculus
  siRNA target sequence for Pola1 (NM_008892.1,3448-3466).
gccagtttgaaattaacaa

SEQ ID NO: 463924 - DNA, 19 bp, Mus musculus
  siRNA target sequence for Pola1 (NM_008892.1,3464-3482).
caaggcattgacaaaggat

SEQ ID NO: 463925 - DNA, 19 bp, Mus musculus
  siRNA target sequence for Pola1 (NM_008892.1,3475-3493).
caaaggatccccaggatta

SEQ ID NO: 463926 - DNA, 19 bp, Mus musculus
  siRNA target sequence for Pola1 (NM_008892.1,3485-3503).
ccaggattaccctgataga

SEQ ID NO: 463927 - DNA, 19 bp, Mus musculus
  siRNA target sequence for Pola1 (NM_008892.1,3486-3504).
caggattaccctgatagaa

SEQ ID NO: 463928 - DNA, 19 bp, Mus musculus
  siRNA target sequence for Pola1 (NM_008892.1,3488-3506).
ggattaccctgatagaaaa

SEQ ID NO: 463929 - DNA, 19 bp, Mus musculus
  siRNA target sequence for Pola1 (NM_008892.1,3494-3512).
ccctgatagaaaaagctta

SEQ ID NO: 463930 - DNA, 19 bp, Mus musculus
  siRNA target sequence for Pola1 (NM_008892.1,3508-3526).
gcttacctcatgtacatgt

SEQ ID NO: 463931 - DNA, 19 bp, Mus musculus
  siRNA target sequence for Pola1 (NM_008892.1,3522-3540).
catgttgcactgtggataa

SEQ ID NO: 463932 - DNA, 19 bp, Mus musculus
  siRNA target sequence for Pola1 (NM_008892.1,3573-3591).
gatacggtgtcctatgtta

SEQ ID NO: 463933 - DNA, 19 bp, Mus musculus
  siRNA target sequence for Pola1 (NM_008892.1,3578-3596).
ggtgtcctatgttatttgt

SEQ ID NO: 463934 - DNA, 19 bp, Mus musculus
  siRNA target sequence for Pola1 (NM_008892.1,3631-3649).
cctatgccccagaacaatt

SEQ ID NO: 463935 - DNA, 19 bp, Mus musculus
  siRNA target sequence for Pola1 (NM_008892.1,3640-3658).
cagaacaattgcagaaact

SEQ ID NO: 463936 - DNA, 19 bp, Mus musculus
  siRNA target sequence for Pola1 (NM_008892.1,3721-3739).
ggatctgtgagccaataga

SEQ ID NO: 463937 - DNA, 19 bp, Mus musculus
  siRNA target sequence for Pola1 (NM_008892.1,3727-3745).
gtgagccaatagatggaat

SEQ ID NO: 463938 - DNA, 19 bp, Mus musculus
  siRNA target sequence for Pola1 (NM_008892.1,3731-3749).
gccaatagatggaattgat

SEQ ID NO: 463939 - DNA, 19 bp, Mus musculus
  siRNA target sequence for Pola1 (NM_008892.1,3774-3792).
ggacttgactccactcaat

SEQ ID NO: 463940 - DNA, 19 bp, Mus musculus
  siRNA target sequence for Pola1 (NM_008892.1,3785-3803).
cactcaatttagagttcat

SEQ ID NO: 463941 - DNA, 19 bp, Mus musculus
  siRNA target sequence for Pola1 (NM_008892.1,3855-3873).
ctaactgatgaagagaaat

SEQ ID NO: 463942 - DNA, 19 bp, Mus musculus
  siRNA target sequence for Pola1 (NM_008892.1,3906-3924).
ccttcatgtggaactgaaa

SEQ ID NO: 463943 - DNA, 19 bp, Mus musculus
  siRNA target sequence for Pola1 (NM_008892.1,3966-3984).
gaacccagtttgtatcgtt

SEQ ID NO: 463944 - DNA, 19 bp, Mus musculus
  siRNA target sequence for Pola1 (NM_008892.1,3977-3995).
gtatcgttgcagtaatgtt

SEQ ID NO: 463945 - DNA, 19 bp, Mus musculus
  siRNA target sequence for Pola1 (NM_008892.1,3981-3999).
cgttgcagtaatgttgatt

SEQ ID NO: 463946 - DNA, 19 bp, Mus musculus
  siRNA target sequence for Pola1 (NM_008892.1,4026-4044).
gtacagctgagcaacaaat

SEQ ID NO: 463947 - DNA, 19 bp, Mus musculus
  siRNA target sequence for Pola1 (NM_008892.1,4053-4071).
gacattagacggtgcatta

SEQ ID NO: 463948 - DNA, 19 bp, Mus musculus
  siRNA target sequence for Pola1 (NM_008892.1,4055-4073).
cattagacggtgcattaaa

SEQ ID NO: 463949 - DNA, 19 bp, Mus musculus
  siRNA target sequence for Pola1 (NM_008892.1,4060-4078).
gacggtgcattaaaaagta

SEQ ID NO: 463950 - DNA, 19 bp, Mus musculus
  siRNA target sequence for Pola1 (NM_008892.1,4062-4080).
cggtgcattaaaaagtact

SEQ ID NO: 463951 - DNA, 19 bp, Mus musculus
  siRNA target sequence for Pola1 (NM_008892.1,4063-4081).
ggtgcattaaaaagtacta

SEQ ID NO: 463952 - DNA, 19 bp, Mus musculus
  siRNA target sequence for Pola1 (NM_008892.1,4079-4097).
ctatgatggctggttgata

SEQ ID NO: 463953 - DNA, 19 bp, Mus musculus
  siRNA target sequence for Pola1 (NM_008892.1,4128-4146).
cgacgtcttccccttcatt

SEQ ID NO: 463954 - DNA, 19 bp, Mus musculus
  siRNA target sequence for Pola1 (NM_008892.1,4129-4147).
gacgtcttccccttcattt

SEQ ID NO: 463955 - DNA, 19 bp, Mus musculus
  siRNA target sequence for Pola1 (NM_008892.1,4235-4253).
cttttaccggtacattttt

SEQ ID NO: 463956 - DNA, 19 bp, Mus musculus
  siRNA target sequence for Pola1 (NM_008892.1,4258-4276).
cggactgtgcactggaaaa

SEQ ID NO: 463957 - DNA, 19 bp, Mus musculus
  siRNA target sequence for Pola1 (NM_008892.1,4271-4289).
ggaaaaacttactgaacat

SEQ ID NO: 463958 - DNA, 19 bp, Mus musculus
  siRNA target sequence for Pola1 (NM_008892.1,4408-4426).
gcaagctcttcgccaatta

SEQ ID NO: 463959 - DNA, 19 bp, Mus musculus
  siRNA target sequence for Polb (NM_011130.1,97-115).
cgtggaactcgcaaacttt

SEQ ID NO: 463960 - DNA, 19 bp, Mus musculus
  siRNA target sequence for Polb (NM_011130.1,129-147).
gccaggcgatccacaagta

SEQ ID NO: 463961 - DNA, 19 bp, Mus musculus
  siRNA target sequence for Polb (NM_011130.1,131-149).
caggcgatccacaagtaca

SEQ ID NO: 463962 - DNA, 19 bp, Mus musculus
  siRNA target sequence for Polb (NM_011130.1,133-151).
ggcgatccacaagtacaat

SEQ ID NO: 463963 - DNA, 19 bp, Mus musculus
  siRNA target sequence for Polb (NM_011130.1,145-163).
gtacaatgcgtacagaaaa

SEQ ID NO: 463964 - DNA, 19 bp, Mus musculus
  siRNA target sequence for Polb (NM_011130.1,228-246).
caggagtaggaacaaaaat

SEQ ID NO: 463965 - DNA, 19 bp, Mus musculus
  siRNA target sequence for Polb (NM_011130.1,248-266).
gctgaaaagattgatgaat

SEQ ID NO: 463966 - DNA, 19 bp, Mus musculus
  siRNA target sequence for Polb (NM_011130.1,295-313).
ggaaaagattcgtcaagat

SEQ ID NO: 463967 - DNA, 19 bp, Mus musculus
  siRNA target sequence for Polb (NM_011130.1,321-339).
gttcatccatcaatttcct

SEQ ID NO: 463968 - DNA, 19 bp, Mus musculus
  siRNA target sequence for Polb (NM_011130.1,379-397).
gtttgtagatgaaggaatt

SEQ ID NO: 463969 - DNA, 19 bp, Mus musculus
  siRNA target sequence for Polb (NM_011130.1,436-454).
gaaccatcatcaacgaatt

SEQ ID NO: 463970 - DNA, 19 bp, Mus musculus
  siRNA target sequence for Polb (NM_011130.1,446-464).
caacgaattgggctgaaat

SEQ ID NO: 463971 - DNA, 19 bp, Mus musculus
  siRNA target sequence for Polb (NM_011130.1,449-467).
cgaattgggctgaaatatt

SEQ ID NO: 463972 - DNA, 19 bp, Mus musculus
  siRNA target sequence for Polb (NM_011130.1,514-532).
gcaggatattgtacttaat

SEQ ID NO: 463973 - DNA, 19 bp, Mus musculus
  siRNA target sequence for Polb (NM_011130.1,623-641).
ctgacccacccaaacttca

SEQ ID NO: 463974 - DNA, 19 bp, Mus musculus
  siRNA target sequence for Polb (NM_011130.1,632-650).
ccaaacttcacgtcagaat

SEQ ID NO: 463975 - DNA, 19 bp, Mus musculus
  siRNA target sequence for Polb (NM_011130.1,651-669).
ccagcaaacagccaaagtt

SEQ ID NO: 463976 - DNA, 19 bp, Mus musculus
  siRNA target sequence for Polb (NM_011130.1,791-809).
ccacacaggagaatcgata

SEQ ID NO: 463977 - DNA, 19 bp, Mus musculus
  siRNA target sequence for Polb (NM_011130.1,794-812).
cacaggagaatcgatatca

SEQ ID NO: 463978 - DNA, 19 bp, Mus musculus
  siRNA target sequence for Polb (NM_011130.1,813-831).
ggttgatccccaaagatca

SEQ ID NO: 463979 - DNA, 19 bp, Mus musculus
  siRNA target sequence for Polb (NM_011130.1,821-839).
cccaaagatcagtactact

SEQ ID NO: 463980 - DNA, 19 bp, Mus musculus
  siRNA target sequence for Polb (NM_011130.1,856-874).
cactgggagtgacatcttt

SEQ ID NO: 463981 - DNA, 19 bp, Mus musculus
  siRNA target sequence for Polb (NM_011130.1,860-878).
gggagtgacatctttaata

SEQ ID NO: 463982 - DNA, 19 bp, Mus musculus
  siRNA target sequence for Polb (NM_011130.1,866-884).
gacatctttaataagaaca

SEQ ID NO: 463983 - DNA, 19 bp, Mus musculus
  siRNA target sequence for Polb (NM_011130.1,899-917).
ctggaaaagggcttcacaa

SEQ ID NO: 463984 - DNA, 19 bp, Mus musculus
  siRNA target sequence for Polb (NM_011130.1,902-920).
gaaaagggcttcacaatca

SEQ ID NO: 463985 - DNA, 19 bp, Mus musculus
  siRNA target sequence for Polb (NM_011130.1,908-926).
ggcttcacaatcaatgagt

SEQ ID NO: 463986 - DNA, 19 bp, Mus musculus
  siRNA target sequence for Polb (NM_011130.1,909-927).
gcttcacaatcaatgagta

SEQ ID NO: 463987 - DNA, 19 bp, Mus musculus
  siRNA target sequence for Polb (NM_011130.1,1022-1040).
cgggagcccaaggatagaa

SEQ ID NO: 463988 - DNA, 19 bp, Mus musculus
  siRNA target sequence for Polb (NM_011130.1,1027-1045).
gcccaaggatagaagtgaa

SEQ ID NO: 463989 - DNA, 19 bp, Mus musculus
  siRNA target sequence for Pold1 (NM_011131.2,263-281).
gttttccactgcagacatt

SEQ ID NO: 463990 - DNA, 19 bp, Mus musculus
  siRNA target sequence for Pold1 (NM_011131.2,325-343).
gcacggagcccctcatctt

SEQ ID NO: 463991 - DNA, 19 bp, Mus musculus
  siRNA target sequence for Pold1 (NM_011131.2,635-653).
ctcccgtgagagcatgttt

SEQ ID NO: 463992 - DNA, 19 bp, Mus musculus
  siRNA target sequence for Pold1 (NM_011131.2,793-811).
ccaacgtggactttgagat

SEQ ID NO: 463993 - DNA, 19 bp, Mus musculus
  siRNA target sequence for Pold1 (NM_011131.2,1053-1071).
cccgtgatccagatctgtt

SEQ ID NO: 463994 - DNA, 19 bp, Mus musculus
  siRNA target sequence for Pold1 (NM_011131.2,1090-1108).
gggagccggagccattctt

SEQ ID NO: 463995 - DNA, 19 bp, Mus musculus
  siRNA target sequence for Pold1 (NM_011131.2,1230-1248).
gtgatcaccggctacaaca

SEQ ID NO: 463996 - DNA, 19 bp, Mus musculus
  siRNA target sequence for Pold1 (NM_011131.2,1232-1250).
gatcaccggctacaacatt

SEQ ID NO: 463997 - DNA, 19 bp, Mus musculus
  siRNA target sequence for Pold1 (NM_011131.2,1282-1300).
gggcacaggccctaaaggt

SEQ ID NO: 463998 - DNA, 19 bp, Mus musculus
  siRNA target sequence for Pold1 (NM_011131.2,1350-1368).
cgtgactcctccttccaat

SEQ ID NO: 463999 - DNA, 19 bp, Mus musculus
  siRNA target sequence for Pold1 (NM_011131.2,1353-1371).
gactcctccttccaatcaa

SEQ ID NO: 464000 - DNA, 19 bp, Mus musculus
  siRNA target sequence for Pold1 (NM_011131.2,1413-1431).
ggtcgcgttcagatggata

SEQ ID NO: 464001 - DNA, 19 bp, Mus musculus
  siRNA target sequence for Pold1 (NM_011131.2,1414-1432).
gtcgcgttcagatggatat

SEQ ID NO: 464002 - DNA, 19 bp, Mus musculus
  siRNA target sequence for Pold1 (NM_011131.2,1417-1435).
gcgttcagatggatatgct

SEQ ID NO: 464003 - DNA, 19 bp, Mus musculus
  siRNA target sequence for Pold1 (NM_011131.2,1474-1492).
cgctcaacgctgtgagttt

SEQ ID NO: 464004 - DNA, 19 bp, Mus musculus
  siRNA target sequence for Pold1 (NM_011131.2,1521-1539).
gttcagcacagcatcatca

SEQ ID NO: 464005 - DNA, 19 bp, Mus musculus
  siRNA target sequence for Pold1 (NM_011131.2,1799-1817).
cacgggagccacagtcatt

SEQ ID NO: 464006 - DNA, 19 bp, Mus musculus
  siRNA target sequence for Pold1 (NM_011131.2,1801-1819).
cgggagccacagtcattga

SEQ ID NO: 464007 - DNA, 19 bp, Mus musculus
  siRNA target sequence for Pold1 (NM_011131.2,1820-1838).
gcccctcaaagggtactat

SEQ ID NO: 464008 - DNA, 19 bp, Mus musculus
  siRNA target sequence for Pold1 (NM_011131.2,1822-1840).
ccctcaaagggtactatga

SEQ ID NO: 464009 - DNA, 19 bp, Mus musculus
  siRNA target sequence for Pold1 (NM_011131.2,2026-2044).
cccagatcctggagaatct

SEQ ID NO: 464010 - DNA, 19 bp, Mus musculus
  siRNA target sequence for Pold1 (NM_011131.2,2124-2142).
caactggcactaaaagtga

SEQ ID NO: 464011 - DNA, 19 bp, Mus musculus
  siRNA target sequence for Pold1 (NM_011131.2,2141-2159).
gagtgccaactccgtatat

SEQ ID NO: 464012 - DNA, 19 bp, Mus musculus
  siRNA target sequence for Pold1 (NM_011131.2,2430-2448).
ctggagttcgagaaggttt

SEQ ID NO: 464013 - DNA, 19 bp, Mus musculus
  siRNA target sequence for Pold1 (NM_011131.2,2670-2688).
ctgtgcaaccgcatagaca

SEQ ID NO: 464014 - DNA, 19 bp, Mus musculus
  siRNA target sequence for Pold1 (NM_011131.2,2814-2832).
gaccgagtcccctatgtga

SEQ ID NO: 464015 - DNA, 19 bp, Mus musculus
  siRNA target sequence for Pold1 (NM_011131.2,2872-2890).
cggaggaccccctgtttgt

SEQ ID NO: 464016 - DNA, 19 bp, Mus musculus
  siRNA target sequence for Pold1 (NM_011131.2,2948-2966).
gccgctcttgcgcatcttt

SEQ ID NO: 464017 - DNA, 19 bp, Mus musculus
  siRNA target sequence for Pold1 (NM_011131.2,2950-2968).
cgctcttgcgcatctttga

SEQ ID NO: 464018 - DNA, 19 bp, Mus musculus
  siRNA target sequence for Pold1 (NM_011131.2,3097-3115).
gctgccgctccgtaatcga

SEQ ID NO: 464019 - DNA, 19 bp, Mus musculus
  siRNA target sequence for Pold1 (NM_011131.2,3120-3138).
caaggagccgtgtgtaagt

SEQ ID NO: 464020 - DNA, 19 bp, Mus musculus
  siRNA target sequence for Pold1 (NM_011131.2,3151-3169).
gggagtcggagctctatca

SEQ ID NO: 464021 - DNA, 19 bp, Mus musculus
  siRNA target sequence for Pold1 (NM_011131.2,3252-3270).
catgaggacgtcatctgta

SEQ ID NO: 464022 - DNA, 19 bp, Mus musculus
  siRNA target sequence for Pole (NM_011132.1,135-153).
cttacggtttggtttcgaa

SEQ ID NO: 464023 - DNA, 19 bp, Mus musculus
  siRNA target sequence for Pole (NM_011132.1,198-216).
gcaccctactgagatctta

SEQ ID NO: 464024 - DNA, 19 bp, Mus musculus
  siRNA target sequence for Pole (NM_011132.1,201-219).
ccctactgagatcttagat

SEQ ID NO: 464025 - DNA, 19 bp, Mus musculus
  siRNA target sequence for Pole (NM_011132.1,220-238).
gaagacaaacgcttagtca

SEQ ID NO: 464026 - DNA, 19 bp, Mus musculus
  siRNA target sequence for Pole (NM_011132.1,235-253).
gtcagcgcggtggattact

SEQ ID NO: 464027 - DNA, 19 bp, Mus musculus
  siRNA target sequence for Pole (NM_011132.1,239-257).
gcgcggtggattactactt

SEQ ID NO: 464028 - DNA, 19 bp, Mus musculus
  siRNA target sequence for Pole (NM_011132.1,241-259).
gcggtggattactacttca

SEQ ID NO: 464029 - DNA, 19 bp, Mus musculus
  siRNA target sequence for Pole (NM_011132.1,295-313).
ccctatatgccgtatttct

SEQ ID NO: 464030 - DNA, 19 bp, Mus musculus
  siRNA target sequence for Pole (NM_011132.1,330-348).
gggttgtgatcgagaagtt

SEQ ID NO: 464031 - DNA, 19 bp, Mus musculus
  siRNA target sequence for Pole (NM_011132.1,331-349).
ggttgtgatcgagaagttt

SEQ ID NO: 464032 - DNA, 19 bp, Mus musculus
  siRNA target sequence for Pole (NM_011132.1,337-355).
gatcgagaagtttcatctt

SEQ ID NO: 464033 - DNA, 19 bp, Mus musculus
  siRNA target sequence for Pole (NM_011132.1,537-555).
gcaggaccatgctagtgat

SEQ ID NO: 464034 - DNA, 19 bp, Mus musculus
  siRNA target sequence for Pole (NM_011132.1,544-562).
catgctagtgatgagtata

SEQ ID NO: 464035 - DNA, 19 bp, Mus musculus
  siRNA target sequence for Pole (NM_011132.1,551-569).
gtgatgagtatacaacaat

SEQ ID NO: 464036 - DNA, 19 bp, Mus musculus
  siRNA target sequence for Pole (NM_011132.1,566-584).
caatgctctccagtattct

SEQ ID NO: 464037 - DNA, 19 bp, Mus musculus
  siRNA target sequence for Pole (NM_011132.1,585-603).
gcaaggtggcagtgtaatt

SEQ ID NO: 464038 - DNA, 19 bp, Mus musculus
  siRNA target sequence for Pole (NM_011132.1,586-604).
caaggtggcagtgtaatta

SEQ ID NO: 464039 - DNA, 19 bp, Mus musculus
  siRNA target sequence for Pole (NM_011132.1,610-628).
gaggacgaaacctctaaga

SEQ ID NO: 464040 - DNA, 19 bp, Mus musculus
  siRNA target sequence for Pole (NM_011132.1,613-631).
gacgaaacctctaagaaga

SEQ ID NO: 464041 - DNA, 19 bp, Mus musculus
  siRNA target sequence for Pole (NM_011132.1,615-633).
cgaaacctctaagaagata

SEQ ID NO: 464042 - DNA, 19 bp, Mus musculus
  siRNA target sequence for Pole (NM_011132.1,660-678).
catgcgagagtatgatgtt

SEQ ID NO: 464043 - DNA, 19 bp, Mus musculus
  siRNA target sequence for Pole (NM_011132.1,699-717).
cattgacctcagaatccat

SEQ ID NO: 464044 - DNA, 19 bp, Mus musculus
  siRNA target sequence for Pole (NM_011132.1,721-739).
gcccactggtacaatgtta

SEQ ID NO: 464045 - DNA, 19 bp, Mus musculus
  siRNA target sequence for Pole (NM_011132.1,724-742).
cactggtacaatgttagat

SEQ ID NO: 464046 - DNA, 19 bp, Mus musculus
  siRNA target sequence for Pole (NM_011132.1,729-747).
gtacaatgttagatttcga

SEQ ID NO: 464047 - DNA, 19 bp, Mus musculus
  siRNA target sequence for Pole (NM_011132.1,740-758).
gatttcgaggaaatgcttt

SEQ ID NO: 464048 - DNA, 19 bp, Mus musculus
  siRNA target sequence for Pole (NM_011132.1,771-789).
cacccgacgagatgatctt

SEQ ID NO: 464049 - DNA, 19 bp, Mus musculus
  siRNA target sequence for Pole (NM_011132.1,773-791).
cccgacgagatgatcttgt

SEQ ID NO: 464050 - DNA, 19 bp, Mus musculus
  siRNA target sequence for Pole (NM_011132.1,774-792).
ccgacgagatgatcttgtt

SEQ ID NO: 464051 - DNA, 19 bp, Mus musculus
  siRNA target sequence for Pole (NM_011132.1,776-794).
gacgagatgatcttgttga

SEQ ID NO: 464052 - DNA, 19 bp, Mus musculus
  siRNA target sequence for Pole (NM_011132.1,882-900).
gatgatctcctatatgatt

SEQ ID NO: 464053 - DNA, 19 bp, Mus musculus
  siRNA target sequence for Pole (NM_011132.1,885-903).
gatctcctatatgattgat

SEQ ID NO: 464054 - DNA, 19 bp, Mus musculus
  siRNA target sequence for Pole (NM_011132.1,969-987).
ccctaagccagaatatgaa

SEQ ID NO: 464055 - DNA, 19 bp, Mus musculus
  siRNA target sequence for Pole (NM_011132.1,989-1007).
ggcccttttgtgtcttcaa

SEQ ID NO: 464056 - DNA, 19 bp, Mus musculus
  siRNA target sequence for Pole (NM_011132.1,990-1008).
gcccttttgtgtcttcaat

SEQ ID NO: 464057 - DNA, 19 bp, Mus musculus
  siRNA target sequence for Pole (NM_011132.1,1057-1075).
gaaaccaaacctaccatta

SEQ ID NO: 464058 - DNA, 19 bp, Mus musculus
  siRNA target sequence for Pole (NM_011132.1,1061-1079).
ccaaacctaccattatggt

SEQ ID NO: 464059 - DNA, 19 bp, Mus musculus
  siRNA target sequence for Pole (NM_011132.1,1173-1191).
ggatagccagggggaatat

SEQ ID NO: 464060 - DNA, 19 bp, Mus musculus
  siRNA target sequence for Pole (NM_011132.1,1174-1192).
gatagccagggggaatata

SEQ ID NO: 464061 - DNA, 19 bp, Mus musculus
  siRNA target sequence for Pole (NM_011132.1,1229-1247).
gggtgaagagggacagtta

SEQ ID NO: 464062 - DNA, 19 bp, Mus musculus
  siRNA target sequence for Pole (NM_011132.1,1255-1273).
gtgggcagtcataatctca

SEQ ID NO: 464063 - DNA, 19 bp, Mus musculus
  siRNA target sequence for Pole (NM_011132.1,1357-1375).
cagactctggccacttact

SEQ ID NO: 464064 - DNA, 19 bp, Mus musculus
  siRNA target sequence for Pole (NM_011132.1,1359-1377).
gactctggccacttactca

SEQ ID NO: 464065 - DNA, 19 bp, Mus musculus
  siRNA target sequence for Pole (NM_011132.1,1384-1402).
gatgctgtggctacttact

SEQ ID NO: 464066 - DNA, 19 bp, Mus musculus
  siRNA target sequence for Pole (NM_011132.1,1397-1415).
cttactacctgtacatgaa

SEQ ID NO: 464067 - DNA, 19 bp, Mus musculus
  siRNA target sequence for Pole (NM_011132.1,1525-1543).
gctttccatgccaacatta

SEQ ID NO: 464068 - DNA, 19 bp, Mus musculus
  siRNA target sequence for Pole (NM_011132.1,1526-1544).
ctttccatgccaacattat

SEQ ID NO: 464069 - DNA, 19 bp, Mus musculus
  siRNA target sequence for Pole (NM_011132.1,1648-1666).
ggtgtcttcagaagtgata

SEQ ID NO: 464070 - DNA, 19 bp, Mus musculus
  siRNA target sequence for Pole (NM_011132.1,1671-1689).
ctgccggtttaggatgaat

SEQ ID NO: 464071 - DNA, 19 bp, Mus musculus
  siRNA target sequence for Pole (NM_011132.1,1691-1709).
ctgcagcctttgatttcct

SEQ ID NO: 464072 - DNA, 19 bp, Mus musculus
  siRNA target sequence for Pole (NM_011132.1,1714-1732).
caacgagtcgagaagacta

SEQ ID NO: 464073 - DNA, 19 bp, Mus musculus
  siRNA target sequence for Pole (NM_011132.1,1770-1788).
ggaacaagccaccaacttt

SEQ ID NO: 464074 - DNA, 19 bp, Mus musculus
  siRNA target sequence for Pole (NM_011132.1,1795-1813).
gtgtgtgagcagattaaga

SEQ ID NO: 464075 - DNA, 19 bp, Mus musculus
  siRNA target sequence for Pole (NM_011132.1,1815-1833).
caagctcacctccctaaaa

SEQ ID NO: 464076 - DNA, 19 bp, Mus musculus
  siRNA target sequence for Pole (NM_011132.1,1847-1865).
gaattgaatgtcctctaat

SEQ ID NO: 464077 - DNA, 19 bp, Mus musculus
  siRNA target sequence for Pole (NM_011132.1,1859-1877).
ctctaatctaccatctaga

SEQ ID NO: 464078 - DNA, 19 bp, Mus musculus
  siRNA target sequence for Pole (NM_011132.1,1885-1903).
gccatgtatcctaacataa

SEQ ID NO: 464079 - DNA, 19 bp, Mus musculus
  siRNA target sequence for Pole (NM_011132.1,1886-1904).
ccatgtatcctaacataat

SEQ ID NO: 464080 - DNA, 19 bp, Mus musculus
  siRNA target sequence for Pole (NM_011132.1,2033-2051).
ccagtcgcagtgaatacca

SEQ ID NO: 464081 - DNA, 19 bp, Mus musculus
  siRNA target sequence for Pole (NM_011132.1,2034-2052).
cagtcgcagtgaataccat

SEQ ID NO: 464082 - DNA, 19 bp, Mus musculus
  siRNA target sequence for Pole (NM_011132.1,2067-2085).
gctggagtcggagaagttt

SEQ ID NO: 464083 - DNA, 19 bp, Mus musculus
  siRNA target sequence for Pole (NM_011132.1,2180-2198).
gccggaaagcctataagaa

SEQ ID NO: 464084 - DNA, 19 bp, Mus musculus
  siRNA target sequence for Pole (NM_011132.1,2214-2232).
ggtagaagaacgtctaact

SEQ ID NO: 464085 - DNA, 19 bp, Mus musculus
  siRNA target sequence for Pole (NM_011132.1,2215-2233).
gtagaagaacgtctaacta

SEQ ID NO: 464086 - DNA, 19 bp, Mus musculus
  siRNA target sequence for Pole (NM_011132.1,2238-2256).
ctgccagcgggaaaactca

SEQ ID NO: 464087 - DNA, 19 bp, Mus musculus
  siRNA target sequence for Pole (NM_011132.1,2371-2389).
gtgaagcgctgcaagaaca

SEQ ID NO: 464088 - DNA, 19 bp, Mus musculus
  siRNA target sequence for Pole (NM_011132.1,2467-2485).
ggagctcgctggtattcca

SEQ ID NO: 464089 - DNA, 19 bp, Mus musculus
  siRNA target sequence for Pole (NM_011132.1,2556-2574).
gatcgggaggcctttagaa

SEQ ID NO: 464090 - DNA, 19 bp, Mus musculus
  siRNA target sequence for Pole (NM_011132.1,2561-2579).
ggaggcctttagaattgga

SEQ ID NO: 464091 - DNA, 19 bp, Mus musculus
  siRNA target sequence for Pole (NM_011132.1,2578-2596).
gacacggacggaatatggt

SEQ ID NO: 464092 - DNA, 19 bp, Mus musculus
  siRNA target sequence for Pole (NM_011132.1,2597-2615).
gcgtcctacccaatagctt

SEQ ID NO: 464093 - DNA, 19 bp, Mus musculus
  siRNA target sequence for Pole (NM_011132.1,2598-2616).
cgtcctacccaatagcttt

SEQ ID NO: 464094 - DNA, 19 bp, Mus musculus
  siRNA target sequence for Pole (NM_011132.1,2607-2625).
caatagctttcctgaaaat

SEQ ID NO: 464095 - DNA, 19 bp, Mus musculus
  siRNA target sequence for Pole (NM_011132.1,2620-2638).
gaaaattttgtcatcaaga

SEQ ID NO: 464096 - DNA, 19 bp, Mus musculus
  siRNA target sequence for Pole (NM_011132.1,2677-2695).
cctggtgccatgttgaaca

SEQ ID NO: 464097 - DNA, 19 bp, Mus musculus
  siRNA target sequence for Pole (NM_011132.1,2701-2719).
gtcaaggaaggctttacca

SEQ ID NO: 464098 - DNA, 19 bp, Mus musculus
  siRNA target sequence for Pole (NM_011132.1,2722-2740).
caccagtaccaggaactaa

SEQ ID NO: 464099 - DNA, 19 bp, Mus musculus
  siRNA target sequence for Pole (NM_011132.1,2724-2742).
ccagtaccaggaactaaca

SEQ ID NO: 464100 - DNA, 19 bp, Mus musculus
  siRNA target sequence for Pole (NM_011132.1,2770-2788).
cactctgagaatagtatct

SEQ ID NO: 464101 - DNA, 19 bp, Mus musculus
  siRNA target sequence for Pole (NM_011132.1,2772-2790).
ctctgagaatagtatcttt

SEQ ID NO: 464102 - DNA, 19 bp, Mus musculus
  siRNA target sequence for Pole (NM_011132.1,2804-2822).
gaccataccttgctatgat

SEQ ID NO: 464103 - DNA, 19 bp, Mus musculus
  siRNA target sequence for Pole (NM_011132.1,2864-2882).
gatatgctgtgttcaatga

SEQ ID NO: 464104 - DNA, 19 bp, Mus musculus
  siRNA target sequence for Pole (NM_011132.1,2932-2950).
gagttgcagctgattaaaa

SEQ ID NO: 464105 - DNA, 19 bp, Mus musculus
  siRNA target sequence for Pole (NM_011132.1,3029-3047).
ctgactactggctagatgt

SEQ ID NO: 464106 - DNA, 19 bp, Mus musculus
  siRNA target sequence for Pole (NM_011132.1,3051-3069).
ctatagcaaggctgctaat

SEQ ID NO: 464107 - DNA, 19 bp, Mus musculus
  siRNA target sequence for Pole (NM_011132.1,3065-3083).
ctaatatgcccgattctga

SEQ ID NO: 464108 - DNA, 19 bp, Mus musculus
  siRNA target sequence for Pole (NM_011132.1,3072-3090).
gcccgattctgaattgttt

SEQ ID NO: 464109 - DNA, 19 bp, Mus musculus
  siRNA target sequence for Pole (NM_011132.1,3119-3137).
ctcggaagctggaagatta

SEQ ID NO: 464110 - DNA, 19 bp, Mus musculus
  siRNA target sequence for Pole (NM_011132.1,3218-3236).
gactgagctgccgctatat

SEQ ID NO: 464111 - DNA, 19 bp, Mus musculus
  siRNA target sequence for Pole (NM_011132.1,3220-3238).
ctgagctgccgctatatca

SEQ ID NO: 464112 - DNA, 19 bp, Mus musculus
  siRNA target sequence for Pole (NM_011132.1,3328-3346).
ctccggaaatggctaaaga

SEQ ID NO: 464113 - DNA, 19 bp, Mus musculus
  siRNA target sequence for Pole (NM_011132.1,3330-3348).
ccggaaatggctaaagagt

SEQ ID NO: 464114 - DNA, 19 bp, Mus musculus
  siRNA target sequence for Pole (NM_011132.1,3331-3349).
cggaaatggctaaagagtt

SEQ ID NO: 464115 - DNA, 19 bp, Mus musculus
  siRNA target sequence for Pole (NM_011132.1,3353-3371).
cacttcaagactttgatat

SEQ ID NO: 464116 - DNA, 19 bp, Mus musculus
  siRNA target sequence for Pole (NM_011132.1,3363-3381).
ctttgatattcggacaatt

SEQ ID NO: 464117 - DNA, 19 bp, Mus musculus
  siRNA target sequence for Pole (NM_011132.1,3382-3400).
ctggactgggactactaca

SEQ ID NO: 464118 - DNA, 19 bp, Mus musculus
  siRNA target sequence for Pole (NM_011132.1,3384-3402).
ggactgggactactacata

SEQ ID NO: 464119 - DNA, 19 bp, Mus musculus
  siRNA target sequence for Pole (NM_011132.1,3470-3488).
cagttccacgtgtcaaaca

SEQ ID NO: 464120 - DNA, 19 bp, Mus musculus
  siRNA target sequence for Pole (NM_011132.1,3511-3529).
ctactagagaagaatgata

SEQ ID NO: 464121 - DNA, 19 bp, Mus musculus
  siRNA target sequence for Pole (NM_011132.1,3671-3689).
cagtcccagttgctactaa

SEQ ID NO: 464122 - DNA, 19 bp, Mus musculus
  siRNA target sequence for Pole (NM_011132.1,3717-3735).
ggagtctcaggatattgca

SEQ ID NO: 464123 - DNA, 19 bp, Mus musculus
  siRNA target sequence for Pole (NM_011132.1,3979-3997).
gaccttccatggcagataa

SEQ ID NO: 464124 - DNA, 19 bp, Mus musculus
  siRNA target sequence for Pole (NM_011132.1,4032-4050).
ccggctgtgggctatcatt

SEQ ID NO: 464125 - DNA, 19 bp, Mus musculus
  siRNA target sequence for Pole (NM_011132.1,4079-4097).
gtatccctcgagtattcta

SEQ ID NO: 464126 - DNA, 19 bp, Mus musculus
  siRNA target sequence for Pole (NM_011132.1,4083-4101).
ccctcgagtattctatgta

SEQ ID NO: 464127 - DNA, 19 bp, Mus musculus
  siRNA target sequence for Pole (NM_011132.1,4084-4102).
cctcgagtattctatgtaa

SEQ ID NO: 464128 - DNA, 19 bp, Mus musculus
  siRNA target sequence for Pole (NM_011132.1,4085-4103).
ctcgagtattctatgtaaa

SEQ ID NO: 464129 - DNA, 19 bp, Mus musculus
  siRNA target sequence for Pole (NM_011132.1,4169-4187).
ccaacattgtctacaatct

SEQ ID NO: 464130 - DNA, 19 bp, Mus musculus
  siRNA target sequence for Pole (NM_011132.1,4177-4195).
gtctacaatctctatgagt

SEQ ID NO: 464131 - DNA, 19 bp, Mus musculus
  siRNA target sequence for Pole (NM_011132.1,4179-4197).
ctacaatctctatgagtat

SEQ ID NO: 464132 - DNA, 19 bp, Mus musculus
  siRNA target sequence for Pole (NM_011132.1,4199-4217).
cagtaccagaggacatgta

SEQ ID NO: 464133 - DNA, 19 bp, Mus musculus
  siRNA target sequence for Pole (NM_011132.1,4281-4299).
gacacaggtcccattgtta

SEQ ID NO: 464134 - DNA, 19 bp, Mus musculus
  siRNA target sequence for Pole (NM_011132.1,4366-4384).
ggctgggaagctgaaactt

SEQ ID NO: 464135 - DNA, 19 bp, Mus musculus
  siRNA target sequence for Pole (NM_011132.1,4441-4459).
gggagtatccgccatatct

SEQ ID NO: 464136 - DNA, 19 bp, Mus musculus
  siRNA target sequence for Pole (NM_011132.1,4442-4460).
ggagtatccgccatatcta

SEQ ID NO: 464137 - DNA, 19 bp, Mus musculus
  siRNA target sequence for Pole (NM_011132.1,4518-4536).
gcgaagagcatctgtgttt

SEQ ID NO: 464138 - DNA, 19 bp, Mus musculus
  siRNA target sequence for Pole (NM_011132.1,4643-4661).
caaaacacacctttgaagt

SEQ ID NO: 464139 - DNA, 19 bp, Mus musculus
  siRNA target sequence for Pole (NM_011132.1,4788-4806).
cagtgagattccagtctta

SEQ ID NO: 464140 - DNA, 19 bp, Mus musculus
  siRNA target sequence for Pole (NM_011132.1,4831-4849).
cgagtggctgacaagatca

SEQ ID NO: 464141 - DNA, 19 bp, Mus musculus
  siRNA target sequence for Pole (NM_011132.1,4896-4914).
ccggcactacctcaattta

SEQ ID NO: 464142 - DNA, 19 bp, Mus musculus
  siRNA target sequence for Pole (NM_011132.1,4898-4916).
ggcactacctcaatttaga

SEQ ID NO: 464143 - DNA, 19 bp, Mus musculus
  siRNA target sequence for Pole (NM_011132.1,4970-4988).
gaaacctgccggaagacat

SEQ ID NO: 464144 - DNA, 19 bp, Mus musculus
  siRNA target sequence for Pole (NM_011132.1,5001-5019).
ctcagacctcttttttgca

SEQ ID NO: 464145 - DNA, 19 bp, Mus musculus
  siRNA target sequence for Pole (NM_011132.1,5395-5413).
gttggctgggtaaaggaaa

SEQ ID NO: 464146 - DNA, 19 bp, Mus musculus
  siRNA target sequence for Pole (NM_011132.1,5417-5435).
cacagtaccacaacatcta

SEQ ID NO: 464147 - DNA, 19 bp, Mus musculus
  siRNA target sequence for Pole (NM_011132.1,5512-5530).
cggacgctgcacaacatga

SEQ ID NO: 464148 - DNA, 19 bp, Mus musculus
  siRNA target sequence for Pole (NM_011132.1,5513-5531).
ggacgctgcacaacatgat

SEQ ID NO: 464149 - DNA, 19 bp, Mus musculus
  siRNA target sequence for Pole (NM_011132.1,5516-5534).
cgctgcacaacatgatgaa

SEQ ID NO: 464150 - DNA, 19 bp, Mus musculus
  siRNA target sequence for Pole (NM_011132.1,5586-5604).
cgtctatgccaacttcaat

SEQ ID NO: 464151 - DNA, 19 bp, Mus musculus
  siRNA target sequence for Pole (NM_011132.1,5595-5613).
caacttcaatcgcatcatt

SEQ ID NO: 464152 - DNA, 19 bp, Mus musculus
  siRNA target sequence for Pole (NM_011132.1,5621-5639).
caaagaagcgccgaataga

SEQ ID NO: 464153 - DNA, 19 bp, Mus musculus
  siRNA target sequence for Pole (NM_011132.1,5645-5663).
cccttgcctatgtggaata

SEQ ID NO: 464154 - DNA, 19 bp, Mus musculus
  siRNA target sequence for Pole (NM_011132.1,5669-5687).
ccaacagcatccattctaa

SEQ ID NO: 464155 - DNA, 19 bp, Mus musculus
  siRNA target sequence for Pole (NM_011132.1,5670-5688).
caacagcatccattctaaa

SEQ ID NO: 464156 - DNA, 19 bp, Mus musculus
  siRNA target sequence for Pole (NM_011132.1,5675-5693).
gcatccattctaaagagat

SEQ ID NO: 464157 - DNA, 19 bp, Mus musculus
  siRNA target sequence for Pole (NM_011132.1,5757-5775).
caactatggtggaatcaaa

SEQ ID NO: 464158 - DNA, 19 bp, Mus musculus
  siRNA target sequence for Pole (NM_011132.1,5930-5948).
ggaacattctacagttctt

SEQ ID NO: 464159 - DNA, 19 bp, Mus musculus
  siRNA target sequence for Pole (NM_011132.1,5973-5991).
ctacttcctcatgattgtt

SEQ ID NO: 464160 - DNA, 19 bp, Mus musculus
  siRNA target sequence for Pole (NM_011132.1,6174-6192).
gagcttcttcaccattact

SEQ ID NO: 464161 - DNA, 19 bp, Mus musculus
  siRNA target sequence for Pole (NM_011132.1,6293-6311).
ctctggagttcatcaaata

SEQ ID NO: 464162 - DNA, 19 bp, Mus musculus
  siRNA target sequence for Pole (NM_011132.1,6322-6340).
gtactatctctggatacaa

SEQ ID NO: 464163 - DNA, 19 bp, Mus musculus
  siRNA target sequence for Pole (NM_011132.1,6325-6343).
ctatctctggatacaaaca

SEQ ID NO: 464164 - DNA, 19 bp, Mus musculus
  siRNA target sequence for Pole (NM_011132.1,6347-6365).
caaatcaggtgaataagct

SEQ ID NO: 464165 - DNA, 19 bp, Mus musculus
  siRNA target sequence for Pole (NM_011132.1,6388-6406).
gtagacgttggtgaattct

SEQ ID NO: 464166 - DNA, 19 bp, Mus musculus
  siRNA target sequence for Pole (NM_011132.1,6657-6675).
caagtgccgtggtatgaaa

SEQ ID NO: 464167 - DNA, 19 bp, Mus musculus
  siRNA target sequence for Pole (NM_011132.1,6704-6722).
gcgcaggggactttactct

SEQ ID NO: 464168 - DNA, 19 bp, Mus musculus
  siRNA target sequence for Pole2 (NM_011133.1,53-71).
gcacggtctcagctttcaa

SEQ ID NO: 464169 - DNA, 19 bp, Mus musculus
  siRNA target sequence for Pole2 (NM_011133.1,124-142).
ctccagtctgtcactgaat

SEQ ID NO: 464170 - DNA, 19 bp, Mus musculus
  siRNA target sequence for Pole2 (NM_011133.1,168-186).
gatcatcgatgcagttgaa

SEQ ID NO: 464171 - DNA, 19 bp, Mus musculus
  siRNA target sequence for Pole2 (NM_011133.1,194-212).
ccttgtcctcgaacatgat

SEQ ID NO: 464172 - DNA, 19 bp, Mus musculus
  siRNA target sequence for Pole2 (NM_011133.1,246-264).
gtgcagtcagtctatggat

SEQ ID NO: 464173 - DNA, 19 bp, Mus musculus
  siRNA target sequence for Pole2 (NM_011133.1,304-322).
gatattccacgttttatat

SEQ ID NO: 464174 - DNA, 19 bp, Mus musculus
  siRNA target sequence for Pole2 (NM_011133.1,367-385).
catgctgcaccaaccttat

SEQ ID NO: 464175 - DNA, 19 bp, Mus musculus
  siRNA target sequence for Pole2 (NM_011133.1,402-420).
caaagccgagctgtatctt

SEQ ID NO: 464176 - DNA, 19 bp, Mus musculus
  siRNA target sequence for Pole2 (NM_011133.1,418-436).
cttgaacgctataccattt

SEQ ID NO: 464177 - DNA, 19 bp, Mus musculus
  siRNA target sequence for Pole2 (NM_011133.1,484-502).
ggctcacaccttgaagaaa

SEQ ID NO: 464178 - DNA, 19 bp, Mus musculus
  siRNA target sequence for Pole2 (NM_011133.1,486-504).
ctcacaccttgaagaaagt

SEQ ID NO: 464179 - DNA, 19 bp, Mus musculus
  siRNA target sequence for Pole2 (NM_011133.1,513-531).
gttccagcttaaaactata

SEQ ID NO: 464180 - DNA, 19 bp, Mus musculus
  siRNA target sequence for Pole2 (NM_011133.1,516-534).
ccagcttaaaactatagaa

SEQ ID NO: 464181 - DNA, 19 bp, Mus musculus
  siRNA target sequence for Pole2 (NM_011133.1,543-561).
gggtagcacaagcaaagtt

SEQ ID NO: 464182 - DNA, 19 bp, Mus musculus
  siRNA target sequence for Pole2 (NM_011133.1,626-644).
ctactggaacagtacaact

SEQ ID NO: 464183 - DNA, 19 bp, Mus musculus
  siRNA target sequence for Pole2 (NM_011133.1,699-717).
cctggcagaaggttggttt

SEQ ID NO: 464184 - DNA, 19 bp, Mus musculus
  siRNA target sequence for Pole2 (NM_011133.1,710-728).
gttggtttgaagatcaagt

SEQ ID NO: 464185 - DNA, 19 bp, Mus musculus
  siRNA target sequence for Pole2 (NM_011133.1,774-792).
caccacaagggcgtactat

SEQ ID NO: 464186 - DNA, 19 bp, Mus musculus
  siRNA target sequence for Pole2 (NM_011133.1,782-800).
gggcgtactatggaaatat

SEQ ID NO: 464187 - DNA, 19 bp, Mus musculus
  siRNA target sequence for Pole2 (NM_011133.1,783-801).
ggcgtactatggaaatatt

SEQ ID NO: 464188 - DNA, 19 bp, Mus musculus
  siRNA target sequence for Pole2 (NM_011133.1,785-803).
cgtactatggaaatattaa

SEQ ID NO: 464189 - DNA, 19 bp, Mus musculus
  siRNA target sequence for Pole2 (NM_011133.1,786-804).
gtactatggaaatattaat

SEQ ID NO: 464190 - DNA, 19 bp, Mus musculus
  siRNA target sequence for Pole2 (NM_011133.1,811-829).
ggagggccttctaatgcat

SEQ ID NO: 464191 - DNA, 19 bp, Mus musculus
  siRNA target sequence for Pole2 (NM_011133.1,826-844).
gcatcagtgaagacgtata

SEQ ID NO: 464192 - DNA, 19 bp, Mus musculus
  siRNA target sequence for Pole2 (NM_011133.1,870-888).
gaacaaggacgccatgttt

SEQ ID NO: 464193 - DNA, 19 bp, Mus musculus
  siRNA target sequence for Pole2 (NM_011133.1,936-954).
gtttcatgtaatgttttct

SEQ ID NO: 464194 - DNA, 19 bp, Mus musculus
  siRNA target sequence for Pole2 (NM_011133.1,1013-1031).
catatggaaaaaatcaagt

SEQ ID NO: 464195 - DNA, 19 bp, Mus musculus
  siRNA target sequence for Pole2 (NM_011133.1,1068-1086).
cataatttgtgaatatcca

SEQ ID NO: 464196 - DNA, 19 bp, Mus musculus
  siRNA target sequence for Pole2 (NM_011133.1,1096-1114).
caaagtagccgttttgtgt

SEQ ID NO: 464197 - DNA, 19 bp, Mus musculus
  siRNA target sequence for Pole2 (NM_011133.1,1163-1181).
cgccactcgctgaaagcat

SEQ ID NO: 464198 - DNA, 19 bp, Mus musculus
  siRNA target sequence for Pole2 (NM_011133.1,1204-1222).
gttccgttttcagttttca

SEQ ID NO: 464199 - DNA, 19 bp, Mus musculus
  siRNA target sequence for Pole2 (NM_011133.1,1216-1234).
gttttcacgactaatcctt

SEQ ID NO: 464200 - DNA, 19 bp, Mus musculus
  siRNA target sequence for Pole2 (NM_011133.1,1226-1244).
ctaatccttgcagaattca

SEQ ID NO: 464201 - DNA, 19 bp, Mus musculus
  siRNA target sequence for Pole2 (NM_011133.1,1250-1268).
gtacacaagaaataattat

SEQ ID NO: 464202 - DNA, 19 bp, Mus musculus
  siRNA target sequence for Pole2 (NM_011133.1,1272-1290).
ccgtgaagacttagtgaat

SEQ ID NO: 464203 - DNA, 19 bp, Mus musculus
  siRNA target sequence for Pole2 (NM_011133.1,1276-1294).
gaagacttagtgaataaaa

SEQ ID NO: 464204 - DNA, 19 bp, Mus musculus
  siRNA target sequence for Pole2 (NM_011133.1,1285-1303).
gtgaataaaatgtgtagaa

SEQ ID NO: 464205 - DNA, 19 bp, Mus musculus
  siRNA target sequence for Pole2 (NM_011133.1,1350-1368).
cgtaaagaccatcttatct

SEQ ID NO: 464206 - DNA, 19 bp, Mus musculus
  siRNA target sequence for Pole2 (NM_011133.1,1384-1402).
cctctccctctttacgtat

SEQ ID NO: 464207 - DNA, 19 bp, Mus musculus
  siRNA target sequence for Pole2 (NM_011133.1,1406-1424).
ccgtccactgggcatatga

SEQ ID NO: 464208 - DNA, 19 bp, Mus musculus
  siRNA target sequence for Pole2 (NM_011133.1,1407-1425).
cgtccactgggcatatgat

SEQ ID NO: 464209 - DNA, 19 bp, Mus musculus
  siRNA target sequence for Pole2 (NM_011133.1,1408-1426).
gtccactgggcatatgatt

SEQ ID NO: 464210 - DNA, 19 bp, Mus musculus
  siRNA target sequence for Pole2 (NM_011133.1,1541-1559).
gtggatttgcattcaaagt

SEQ ID NO: 464211 - DNA, 19 bp, Mus musculus
  siRNA target sequence for Pole3 (NM_021498.2,140-158).
ccagtgtcttcgttttgta

SEQ ID NO: 464212 - DNA, 19 bp, Mus musculus
  siRNA target sequence for Pole3 (NM_021498.2,161-179).
ccacatcctgtgccaataa

SEQ ID NO: 464213 - DNA, 19 bp, Mus musculus
  siRNA target sequence for Pole3 (NM_021498.2,173-191).
ccaataacttcgcaatgaa

SEQ ID NO: 464214 - DNA, 19 bp, Mus musculus
  siRNA target sequence for Pole3 (NM_021498.2,246-264).
ggaattccagcgattcata

SEQ ID NO: 464215 - DNA, 19 bp, Mus musculus
  siRNA target sequence for Pole3 (NM_021498.2,247-265).
gaattccagcgattcataa

SEQ ID NO: 464216 - DNA, 19 bp, Mus musculus
  siRNA target sequence for Polg (NM_017462.1,917-935).
ggtggaagagcgttactct

SEQ ID NO: 464217 - DNA, 19 bp, Mus musculus
  siRNA target sequence for Polg (NM_017462.1,1069-1087).
gggaacagtatctgattca

SEQ ID NO: 464218 - DNA, 19 bp, Mus musculus
  siRNA target sequence for Polg (NM_017462.1,1324-1342).
ggggacctcccttagagaa

SEQ ID NO: 464219 - DNA, 19 bp, Mus musculus
  siRNA target sequence for Polg (NM_017462.1,1841-1859).
gcttcagcgaagtgtaaca

SEQ ID NO: 464220 - DNA, 19 bp, Mus musculus
  siRNA target sequence for Polg (NM_017462.1,1952-1970).
gctctgccctcgactagat

SEQ ID NO: 464221 - DNA, 19 bp, Mus musculus
  siRNA target sequence for Polg (NM_017462.1,2038-2056).
cactgacctgggatggttt

SEQ ID NO: 464222 - DNA, 19 bp, Mus musculus
  siRNA target sequence for Polg (NM_017462.1,2099-2117).
gcctgggcgtcgggataat

SEQ ID NO: 464223 - DNA, 19 bp, Mus musculus
  siRNA target sequence for Polg (NM_017462.1,2101-2119).
ctgggcgtcgggataatct

SEQ ID NO: 464224 - DNA, 19 bp, Mus musculus
  siRNA target sequence for Polg (NM_017462.1,2103-2121).
gggcgtcgggataatctga

SEQ ID NO: 464225 - DNA, 19 bp, Mus musculus
  siRNA target sequence for Polg (NM_017462.1,2249-2267).
cctggctgaggagttctta

SEQ ID NO: 464226 - DNA, 19 bp, Mus musculus
  siRNA target sequence for Polg (NM_017462.1,2354-2372).
gctgagccaacctctagtt

SEQ ID NO: 464227 - DNA, 19 bp, Mus musculus
  siRNA target sequence for Polg (NM_017462.1,2417-2435).
ccatggcaacggaccttat

SEQ ID NO: 464228 - DNA, 19 bp, Mus musculus
  siRNA target sequence for Polg (NM_017462.1,2418-2436).
catggcaacggaccttata

SEQ ID NO: 464229 - DNA, 19 bp, Mus musculus
  siRNA target sequence for Polg (NM_017462.1,2422-2440).
gcaacggaccttataatga

SEQ ID NO: 464230 - DNA, 19 bp, Mus musculus
  siRNA target sequence for Polg (NM_017462.1,2423-2441).
caacggaccttataatgat

SEQ ID NO: 464231 - DNA, 19 bp, Mus musculus
  siRNA target sequence for Polg (NM_017462.1,2428-2446).
gaccttataatgatgtgaa

SEQ ID NO: 464232 - DNA, 19 bp, Mus musculus
  siRNA target sequence for Polg (NM_017462.1,2430-2448).
ccttataatgatgtgaata

SEQ ID NO: 464233 - DNA, 19 bp, Mus musculus
  siRNA target sequence for Polg (NM_017462.1,2452-2470).
ctggttgctggtttttcaa

SEQ ID NO: 464234 - DNA, 19 bp, Mus musculus
  siRNA target sequence for Polg (NM_017462.1,2478-2496).
cacaaggacggtaacaact

SEQ ID NO: 464235 - DNA, 19 bp, Mus musculus
  siRNA target sequence for Polg (NM_017462.1,2581-2599).
ggcctcgtgccctggaaat

SEQ ID NO: 464236 - DNA, 19 bp, Mus musculus
  siRNA target sequence for Polg (NM_017462.1,2583-2601).
cctcgtgccctggaaataa

SEQ ID NO: 464237 - DNA, 19 bp, Mus musculus
  siRNA target sequence for Polg (NM_017462.1,2584-2602).
ctcgtgccctggaaataaa

SEQ ID NO: 464238 - DNA, 19 bp, Mus musculus
  siRNA target sequence for Polg (NM_017462.1,2621-2639).
gaggaatgctcataaacgt

SEQ ID NO: 464239 - DNA, 19 bp, Mus musculus
  siRNA target sequence for Polg (NM_017462.1,2623-2641).
ggaatgctcataaacgtat

SEQ ID NO: 464240 - DNA, 19 bp, Mus musculus
  siRNA target sequence for Polg (NM_017462.1,2628-2646).
gctcataaacgtatcagtt

SEQ ID NO: 464241 - DNA, 19 bp, Mus musculus
  siRNA target sequence for Polg (NM_017462.1,2792-2810).
gtggctcactgccagtaat

SEQ ID NO: 464242 - DNA, 19 bp, Mus musculus
  siRNA target sequence for Polg (NM_017462.1,2906-2924).
gtggatcgcagctgtactt

SEQ ID NO: 464243 - DNA, 19 bp, Mus musculus
  siRNA target sequence for Polg (NM_017462.1,3045-3063).
cgagagcatgccaaaatct

SEQ ID NO: 464244 - DNA, 19 bp, Mus musculus
  siRNA target sequence for Polg (NM_017462.1,3046-3064).
gagagcatgccaaaatctt

SEQ ID NO: 464245 - DNA, 19 bp, Mus musculus
  siRNA target sequence for Polg (NM_017462.1,3051-3069).
catgccaaaatcttcaact

SEQ ID NO: 464246 - DNA, 19 bp, Mus musculus
  siRNA target sequence for Polg (NM_017462.1,3109-3127).
gcctactgatgcagttcaa

SEQ ID NO: 464247 - DNA, 19 bp, Mus musculus
  siRNA target sequence for Polg (NM_017462.1,3271-3289).
gctgggtctccctacaaga

SEQ ID NO: 464248 - DNA, 19 bp, Mus musculus
  siRNA target sequence for Polg (NM_017462.1,3272-3290).
ctgggtctccctacaagat

SEQ ID NO: 464249 - DNA, 19 bp, Mus musculus
  siRNA target sequence for Polg (NM_017462.1,3274-3292).
gggtctccctacaagatct

SEQ ID NO: 464250 - DNA, 19 bp, Mus musculus
  siRNA target sequence for Polg (NM_017462.1,3373-3391).
gcacagagtcagaaatgtt

SEQ ID NO: 464251 - DNA, 19 bp, Mus musculus
  siRNA target sequence for Polg (NM_017462.1,3378-3396).
gagtcagaaatgtttaata

SEQ ID NO: 464252 - DNA, 19 bp, Mus musculus
  siRNA target sequence for Polg (NM_017462.1,3382-3400).
cagaaatgtttaataagct

SEQ ID NO: 464253 - DNA, 19 bp, Mus musculus
  siRNA target sequence for Polg (NM_017462.1,3480-3498).
gtccagggagagtttataa

SEQ ID NO: 464254 - DNA, 19 bp, Mus musculus
  siRNA target sequence for Polg (NM_017462.1,3692-3710).
cctgaccaggtgcatgttt

SEQ ID NO: 464255 - DNA, 19 bp, Mus musculus
  siRNA target sequence for Polg (NM_017462.1,3700-3718).
ggtgcatgtttgcctataa

SEQ ID NO: 464256 - DNA, 19 bp, Mus musculus
  siRNA target sequence for Polg (NM_017462.1,3739-3757).
cccagtcagtcgccttttt

SEQ ID NO: 464257 - DNA, 19 bp, Mus musculus
  siRNA target sequence for Polg (NM_017462.1,3860-3878).
gggtgaagcactggatatt

SEQ ID NO: 464258 - DNA, 19 bp, Mus musculus
  siRNA target sequence for Polg2 (NM_015810.1,221-239).
gacctttgggtgtagagtt

SEQ ID NO: 464259 - DNA, 19 bp, Mus musculus
  siRNA target sequence for Polg2 (NM_015810.1,230-248).
gtgtagagttacgaaagaa

SEQ ID NO: 464260 - DNA, 19 bp, Mus musculus
  siRNA target sequence for Polg2 (NM_015810.1,426-444).
ggcatttcttgagaactta

SEQ ID NO: 464261 - DNA, 19 bp, Mus musculus
  siRNA target sequence for Polg2 (NM_015810.1,427-445).
gcatttcttgagaacttat

SEQ ID NO: 464262 - DNA, 19 bp, Mus musculus
  siRNA target sequence for Polg2 (NM_015810.1,563-581).
gtttccatcctgtttcgaa

SEQ ID NO: 464263 - DNA, 19 bp, Mus musculus
  siRNA target sequence for Polg2 (NM_015810.1,722-740).
ctatgagtccctctaactt

SEQ ID NO: 464264 - DNA, 19 bp, Mus musculus
  siRNA target sequence for Polg2 (NM_015810.1,738-756).
cttcagcagcgctgattgt

SEQ ID NO: 464265 - DNA, 19 bp, Mus musculus
  siRNA target sequence for Polg2 (NM_015810.1,749-767).
ctgattgtcaggatgaatt

SEQ ID NO: 464266 - DNA, 19 bp, Mus musculus
  siRNA target sequence for Polg2 (NM_015810.1,772-790).
cgcaagggaagcaaacttt

SEQ ID NO: 464267 - DNA, 19 bp, Mus musculus
  siRNA target sequence for Polg2 (NM_015810.1,833-851).
ggaacctaggagatcaaga

SEQ ID NO: 464268 - DNA, 19 bp, Mus musculus
  siRNA target sequence for Polg2 (NM_015810.1,834-852).
gaacctaggagatcaagaa

SEQ ID NO: 464269 - DNA, 19 bp, Mus musculus
  siRNA target sequence for Polg2 (NM_015810.1,893-911).
gtcgagatgggcggaaaaa

SEQ ID NO: 464270 - DNA, 19 bp, Mus musculus
  siRNA target sequence for Polg2 (NM_015810.1,919-937).
ccttgcgttctgtctgtaa

SEQ ID NO: 464271 - DNA, 19 bp, Mus musculus
  siRNA target sequence for Polg2 (NM_015810.1,961-979).
ctggcttacctctacgatt

SEQ ID NO: 464272 - DNA, 19 bp, Mus musculus
  siRNA target sequence for Polg2 (NM_015810.1,965-983).
cttacctctacgattcctt

SEQ ID NO: 464273 - DNA, 19 bp, Mus musculus
  siRNA target sequence for Polg2 (NM_015810.1,1026-1044).
gagaaaggtgcttaaactt

SEQ ID NO: 464274 - DNA, 19 bp, Mus musculus
  siRNA target sequence for Polg2 (NM_015810.1,1048-1066).
ccttgtttagcccctatta

SEQ ID NO: 464275 - DNA, 19 bp, Mus musculus
  siRNA target sequence for Polg2 (NM_015810.1,1049-1067).
cttgtttagcccctattaa

SEQ ID NO: 464276 - DNA, 19 bp, Mus musculus
  siRNA target sequence for Polg2 (NM_015810.1,1114-1132).
gtttgtcaagggctactta

SEQ ID NO: 464277 - DNA, 19 bp, Mus musculus
  siRNA target sequence for Polg2 (NM_015810.1,1118-1136).
gtcaagggctacttaatga

SEQ ID NO: 464278 - DNA, 19 bp, Mus musculus
  siRNA target sequence for Polg2 (NM_015810.1,1181-1199).
ctgtccattcctcattaga

SEQ ID NO: 464279 - DNA, 19 bp, Mus musculus
  siRNA target sequence for Polg2 (NM_015810.1,1356-1374).
cctagcgtcagctagcaat

SEQ ID NO: 464280 - DNA, 19 bp, Mus musculus
  siRNA target sequence for Polg2 (NM_015810.1,1360-1378).
gcgtcagctagcaatgtgt

SEQ ID NO: 464281 - DNA, 19 bp, Mus musculus
  siRNA target sequence for Poll (NM_020032.1,116-134).
caagcggaagaaaagtcat

SEQ ID NO: 464282 - DNA, 19 bp, Mus musculus
  siRNA target sequence for Poll (NM_020032.1,208-226).
ccctgagagcccacattat

SEQ ID NO: 464283 - DNA, 19 bp, Mus musculus
  siRNA target sequence for Poll (NM_020032.1,562-580).
ccaggaccaccctttctct

SEQ ID NO: 464284 - DNA, 19 bp, Mus musculus
  siRNA target sequence for Poll (NM_020032.1,610-628).
ctcccccaacggcagaaaa

SEQ ID NO: 464285 - DNA, 19 bp, Mus musculus
  siRNA target sequence for Poll (NM_020032.1,705-723).
gatctgcaagccttgatca

SEQ ID NO: 464286 - DNA, 19 bp, Mus musculus
  siRNA target sequence for Poll (NM_020032.1,811-829).
cgagccagaaggcaactaa

SEQ ID NO: 464287 - DNA, 19 bp, Mus musculus
  siRNA target sequence for Poll (NM_020032.1,816-834).
cagaaggcaactaactaca

SEQ ID NO: 464288 - DNA, 19 bp, Mus musculus
  siRNA target sequence for Poll (NM_020032.1,818-836).
gaaggcaactaactacaat

SEQ ID NO: 464289 - DNA, 19 bp, Mus musculus
  siRNA target sequence for Poll (NM_020032.1,1145-1163).
cttccgaaacctagaagat

SEQ ID NO: 464290 - DNA, 19 bp, Mus musculus
  siRNA target sequence for Poll (NM_020032.1,1265-1283).
gcagacggtccggatatca

SEQ ID NO: 464291 - DNA, 19 bp, Mus musculus
  siRNA target sequence for Poll (NM_020032.1,1351-1369).
gcggggatgtggatgtact

SEQ ID NO: 464292 - DNA, 19 bp, Mus musculus
  siRNA target sequence for Poll (NM_020032.1,1354-1372).
gggatgtggatgtactcat

SEQ ID NO: 464293 - DNA, 19 bp, Mus musculus
  siRNA target sequence for Poll (NM_020032.1,1556-1574).
ggtaccctactgtgagttt

SEQ ID NO: 464294 - DNA, 19 bp, Mus musculus
  siRNA target sequence for Polm (NM_017401.1,307-325).
ctagatattagctggttta

SEQ ID NO: 464295 - DNA, 19 bp, Mus musculus
  siRNA target sequence for Polm (NM_017401.1,449-467).
cacctctcacacaccataa

SEQ ID NO: 464296 - DNA, 19 bp, Mus musculus
  siRNA target sequence for Polm (NM_017401.1,451-469).
cctctcacacaccataaca

SEQ ID NO: 464297 - DNA, 19 bp, Mus musculus
  siRNA target sequence for Polm (NM_017401.1,606-624).
gcatgggctgccctacttt

SEQ ID NO: 464298 - DNA, 19 bp, Mus musculus
  siRNA target sequence for Polm (NM_017401.1,657-675).
gctggagcatggaacatgt

SEQ ID NO: 464299 - DNA, 19 bp, Mus musculus
  siRNA target sequence for Polm (NM_017401.1,674-692).
gtgaagaagtgaaacaagt

SEQ ID NO: 464300 - DNA, 19 bp, Mus musculus
  siRNA target sequence for Polm (NM_017401.1,842-860).
cagggctccaatattacca

SEQ ID NO: 464301 - DNA, 19 bp, Mus musculus
  siRNA target sequence for Polm (NM_017401.1,972-990).
ccgaagggggaagttacaa

SEQ ID NO: 464302 - DNA, 19 bp, Mus musculus
  siRNA target sequence for Polm (NM_017401.1,984-1002).
gttacaaggccatgatgta

SEQ ID NO: 464303 - DNA, 19 bp, Mus musculus
  siRNA target sequence for Polm (NM_017401.1,1256-1274).
ctgtgagggtagatcttgt

SEQ ID NO: 464304 - DNA, 19 bp, Mus musculus
  siRNA target sequence for Polm (NM_017401.1,1410-1428).
gcagaagagagttttccat

SEQ ID NO: 464305 - DNA, 19 bp, Mus musculus
  siRNA target sequence for Polq (NM_029977.1,177-195).
gggagatggtgatagcttt

SEQ ID NO: 464306 - DNA, 19 bp, Mus musculus
  siRNA target sequence for Polq (NM_029977.1,282-300).
caagcgaagagtttctgat

SEQ ID NO: 464307 - DNA, 19 bp, Mus musculus
  siRNA target sequence for Polq (NM_029977.1,357-375).
gaaataccatagttttggt

SEQ ID NO: 464308 - DNA, 19 bp, Mus musculus
  siRNA target sequence for Polq (NM_029977.1,363-381).
ccatagttttggtgtaaga

SEQ ID NO: 464309 - DNA, 19 bp, Mus musculus
  siRNA target sequence for Polq (NM_029977.1,474-492).
gactcttgttgcagagtta

SEQ ID NO: 464310 - DNA, 19 bp, Mus musculus
  siRNA target sequence for Polq (NM_029977.1,478-496).
cttgttgcagagttactta

SEQ ID NO: 464311 - DNA, 19 bp, Mus musculus
  siRNA target sequence for Polq (NM_029977.1,520-538).
cggaagaaagcgttgttta

SEQ ID NO: 464312 - DNA, 19 bp, Mus musculus
  siRNA target sequence for Polq (NM_029977.1,521-539).
ggaagaaagcgttgtttat

SEQ ID NO: 464313 - DNA, 19 bp, Mus musculus
  siRNA target sequence for Polq (NM_029977.1,670-688).
gctgtttgcactattgaga

SEQ ID NO: 464314 - DNA, 19 bp, Mus musculus
  siRNA target sequence for Polq (NM_029977.1,825-843).
ctacgtcactcgtaaatca

SEQ ID NO: 464315 - DNA, 19 bp, Mus musculus
  siRNA target sequence for Polq (NM_029977.1,867-885).
cagcactctgtctaatgct

SEQ ID NO: 464316 - DNA, 19 bp, Mus musculus
  siRNA target sequence for Polq (NM_029977.1,903-921).
gagtgctactcttcctaat

SEQ ID NO: 464317 - DNA, 19 bp, Mus musculus
  siRNA target sequence for Polq (NM_029977.1,905-923).
gtgctactcttcctaattt

SEQ ID NO: 464318 - DNA, 19 bp, Mus musculus
  siRNA target sequence for Polq (NM_029977.1,945-963).
gaatgctgaactttaccat

SEQ ID NO: 464319 - DNA, 19 bp, Mus musculus
  siRNA target sequence for Polq (NM_029977.1,974-992).
gccctgtaccacttttgga

SEQ ID NO: 464320 - DNA, 19 bp, Mus musculus
  siRNA target sequence for Polq (NM_029977.1,976-994).
cctgtaccacttttggaat

SEQ ID NO: 464321 - DNA, 19 bp, Mus musculus
  siRNA target sequence for Polq (NM_029977.1,979-997).
gtaccacttttggaatcaa

SEQ ID NO: 464322 - DNA, 19 bp, Mus musculus
  siRNA target sequence for Polq (NM_029977.1,1035-1053).
gcttgtgagagaatttcaa

SEQ ID NO: 464323 - DNA, 19 bp, Mus musculus
  siRNA target sequence for Polq (NM_029977.1,1078-1096).
gaagaccacattgttagtt

SEQ ID NO: 464324 - DNA, 19 bp, Mus musculus
  siRNA target sequence for Polq (NM_029977.1,1090-1108).
gttagtttatgctatgaga

SEQ ID NO: 464325 - DNA, 19 bp, Mus musculus
  siRNA target sequence for Polq (NM_029977.1,1107-1125).
gaccattcaggataaccat

SEQ ID NO: 464326 - DNA, 19 bp, Mus musculus
  siRNA target sequence for Polq (NM_029977.1,1122-1140).
ccattcagtattaatcttt

SEQ ID NO: 464327 - DNA, 19 bp, Mus musculus
  siRNA target sequence for Polq (NM_029977.1,1123-1141).
cattcagtattaatctttt

SEQ ID NO: 464328 - DNA, 19 bp, Mus musculus
  siRNA target sequence for Polq (NM_029977.1,1160-1178).
gtgagaaggtagcagatat

SEQ ID NO: 464329 - DNA, 19 bp, Mus musculus
  siRNA target sequence for Polq (NM_029977.1,1164-1182).
gaaggtagcagatatcatt

SEQ ID NO: 464330 - DNA, 19 bp, Mus musculus
  siRNA target sequence for Polq (NM_029977.1,1184-1202).
cccgagagttttacaatct

SEQ ID NO: 464331 - DNA, 19 bp, Mus musculus
  siRNA target sequence for Polq (NM_029977.1,1210-1228).
caacctgaggggttggtaa

SEQ ID NO: 464332 - DNA, 19 bp, Mus musculus
  siRNA target sequence for Polq (NM_029977.1,1213-1231).
cctgaggggttggtaaaat

SEQ ID NO: 464333 - DNA, 19 bp, Mus musculus
  siRNA target sequence for Polq (NM_029977.1,1218-1236).
ggggttggtaaaatcatct

SEQ ID NO: 464334 - DNA, 19 bp, Mus musculus
  siRNA target sequence for Polq (NM_029977.1,1247-1265).
cagtgattctagaccaaaa

SEQ ID NO: 464335 - DNA, 19 bp, Mus musculus
  siRNA target sequence for Polq (NM_029977.1,1310-1328).
gactagactctgtgttgaa

SEQ ID NO: 464336 - DNA, 19 bp, Mus musculus
  siRNA target sequence for Polq (NM_029977.1,1400-1418).
gagccttccgtcaaggttt

SEQ ID NO: 464337 - DNA, 19 bp, Mus musculus
  siRNA target sequence for Polq (NM_029977.1,1403-1421).
ccttccgtcaaggtttcat

SEQ ID NO: 464338 - DNA, 19 bp, Mus musculus
  siRNA target sequence for Polq (NM_029977.1,1404-1422).
cttccgtcaaggtttcatt

SEQ ID NO: 464339 - DNA, 19 bp, Mus musculus
  siRNA target sequence for Polq (NM_029977.1,1435-1453).
gcaacgtctactctttctt

SEQ ID NO: 464340 - DNA, 19 bp, Mus musculus
  siRNA target sequence for Polq (NM_029977.1,1468-1486).
cctgctcgtcgggtgatta

SEQ ID NO: 464341 - DNA, 19 bp, Mus musculus
  siRNA target sequence for Polq (NM_029977.1,1469-1487).
ctgctcgtcgggtgattat

SEQ ID NO: 464342 - DNA, 19 bp, Mus musculus
  siRNA target sequence for Polq (NM_029977.1,1482-1500).
gattattcgcactccaatt

SEQ ID NO: 464343 - DNA, 19 bp, Mus musculus
  siRNA target sequence for Polq (NM_029977.1,1570-1588).
gacacaatgggtgaaagta

SEQ ID NO: 464344 - DNA, 19 bp, Mus musculus
  siRNA target sequence for Polq (NM_029977.1,1579-1597).
ggtgaaagtatcctagttt

SEQ ID NO: 464345 - DNA, 19 bp, Mus musculus
  siRNA target sequence for Polq (NM_029977.1,1694-1712).
gcatgatacgagctattct

SEQ ID NO: 464346 - DNA, 19 bp, Mus musculus
  siRNA target sequence for Polq (NM_029977.1,1702-1720).
cgagctattctggagataa

SEQ ID NO: 464347 - DNA, 19 bp, Mus musculus
  siRNA target sequence for Polq (NM_029977.1,1706-1724).
ctattctggagataatcgt

SEQ ID NO: 464348 - DNA, 19 bp, Mus musculus
  siRNA target sequence for Polq (NM_029977.1,1734-1752).
ggccagtacgtcacaagat

SEQ ID NO: 464349 - DNA, 19 bp, Mus musculus
  siRNA target sequence for Polq (NM_029977.1,1735-1753).
gccagtacgtcacaagata

SEQ ID NO: 464350 - DNA, 19 bp, Mus musculus
  siRNA target sequence for Polq (NM_029977.1,1736-1754).
ccagtacgtcacaagatat

SEQ ID NO: 464351 - DNA, 19 bp, Mus musculus
  siRNA target sequence for Polq (NM_029977.1,1863-1881).
gacgtggctgttagaaaat

SEQ ID NO: 464352 - DNA, 19 bp, Mus musculus
  siRNA target sequence for Polq (NM_029977.1,1865-1883).
cgtggctgttagaaaatga

SEQ ID NO: 464353 - DNA, 19 bp, Mus musculus
  siRNA target sequence for Polq (NM_029977.1,1926-1944).
ggtgtatcacccaacacat

SEQ ID NO: 464354 - DNA, 19 bp, Mus musculus
  siRNA target sequence for Polq (NM_029977.1,1929-1947).
gtatcacccaacacatctt

SEQ ID NO: 464355 - DNA, 19 bp, Mus musculus
  siRNA target sequence for Polq (NM_029977.1,1978-1996).
ccaactgatacccttgata

SEQ ID NO: 464356 - DNA, 19 bp, Mus musculus
  siRNA target sequence for Polq (NM_029977.1,1979-1997).
caactgatacccttgatat

SEQ ID NO: 464357 - DNA, 19 bp, Mus musculus
  siRNA target sequence for Polq (NM_029977.1,1982-2000).
ctgatacccttgatatttt

SEQ ID NO: 464358 - DNA, 19 bp, Mus musculus
  siRNA target sequence for Polq (NM_029977.1,2076-2094).
gtttgaagattggattagt

SEQ ID NO: 464359 - DNA, 19 bp, Mus musculus
  siRNA target sequence for Polq (NM_029977.1,2083-2101).
gattggattagtattgatt

SEQ ID NO: 464360 - DNA, 19 bp, Mus musculus
  siRNA target sequence for Polq (NM_029977.1,2098-2116).
gattggtaccgatttttct

SEQ ID NO: 464361 - DNA, 19 bp, Mus musculus
  siRNA target sequence for Polq (NM_029977.1,2103-2121).
gtaccgatttttctgttta

SEQ ID NO: 464362 - DNA, 19 bp, Mus musculus
  siRNA target sequence for Polq (NM_029977.1,2184-2202).
cttggctcgatgtgtgaaa

SEQ ID NO: 464363 - DNA, 19 bp, Mus musculus
  siRNA target sequence for Polq (NM_029977.1,2239-2257).
cagatggccatccataaaa

SEQ ID NO: 464364 - DNA, 19 bp, Mus musculus
  siRNA target sequence for Polq (NM_029977.1,2244-2262).
ggccatccataaaaggttt

SEQ ID NO: 464365 - DNA, 19 bp, Mus musculus
  siRNA target sequence for Polq (NM_029977.1,2245-2263).
gccatccataaaaggtttt

SEQ ID NO: 464366 - DNA, 19 bp, Mus musculus
  siRNA target sequence for Polq (NM_029977.1,2246-2264).
ccatccataaaaggttttt

SEQ ID NO: 464367 - DNA, 19 bp, Mus musculus
  siRNA target sequence for Polq (NM_029977.1,2310-2328).
ggacattaatcagaagtat

SEQ ID NO: 464368 - DNA, 19 bp, Mus musculus
  siRNA target sequence for Polq (NM_029977.1,2322-2340).
gaagtatggatgtaatcgt

SEQ ID NO: 464369 - DNA, 19 bp, Mus musculus
  siRNA target sequence for Polq (NM_029977.1,2333-2351).
gtaatcgtggacagattca

SEQ ID NO: 464370 - DNA, 19 bp, Mus musculus
  siRNA target sequence for Polq (NM_029977.1,2372-2390).
ctgtctatgcaggaatgat

SEQ ID NO: 464371 - DNA, 19 bp, Mus musculus
  siRNA target sequence for Polq (NM_029977.1,2374-2392).
gtctatgcaggaatgatta

SEQ ID NO: 464372 - DNA, 19 bp, Mus musculus
  siRNA target sequence for Polq (NM_029977.1,2383-2401).
ggaatgattacggtgtttt

SEQ ID NO: 464373 - DNA, 19 bp, Mus musculus
  siRNA target sequence for Polq (NM_029977.1,2408-2426).
gcctgggctggcacaacat

SEQ ID NO: 464374 - DNA, 19 bp, Mus musculus
  siRNA target sequence for Polq (NM_029977.1,2665-2683).
gaagaacggcggagtatga

SEQ ID NO: 464375 - DNA, 19 bp, Mus musculus
  siRNA target sequence for Polq (NM_029977.1,2668-2686).
gaacggcggagtatgagaa

SEQ ID NO: 464376 - DNA, 19 bp, Mus musculus
  siRNA target sequence for Polq (NM_029977.1,2671-2689).
cggcggagtatgagaacta

SEQ ID NO: 464377 - DNA, 19 bp, Mus musculus
  siRNA target sequence for Polq (NM_029977.1,2672-2690).
ggcggagtatgagaactat

SEQ ID NO: 464378 - DNA, 19 bp, Mus musculus
  siRNA target sequence for Polq (NM_029977.1,2673-2691).
gcggagtatgagaactatt

SEQ ID NO: 464379 - DNA, 19 bp, Mus musculus
  siRNA target sequence for Polq (NM_029977.1,2674-2692).
cggagtatgagaactattt

SEQ ID NO: 464380 - DNA, 19 bp, Mus musculus
  siRNA target sequence for Polq (NM_029977.1,2697-2715).
gactggcaagggcttatct

SEQ ID NO: 464381 - DNA, 19 bp, Mus musculus
  siRNA target sequence for Polq (NM_029977.1,2840-2858).
gcacgtcagaagtaaagga

SEQ ID NO: 464382 - DNA, 19 bp, Mus musculus
  siRNA target sequence for Polq (NM_029977.1,2864-2882).
cgttcaaatcccagactaa

SEQ ID NO: 464383 - DNA, 19 bp, Mus musculus
  siRNA target sequence for Polq (NM_029977.1,2874-2892).
ccagactaagagttctcat

SEQ ID NO: 464384 - DNA, 19 bp, Mus musculus
  siRNA target sequence for Polq (NM_029977.1,2877-2895).
gactaagagttctcataaa

SEQ ID NO: 464385 - DNA, 19 bp, Mus musculus
  siRNA target sequence for Polq (NM_029977.1,2883-2901).
gagttctcataaaaggtta

SEQ ID NO: 464386 - DNA, 19 bp, Mus musculus
  siRNA target sequence for Polq (NM_029977.1,2927-2945).
gagcaagtgggtctaatga

SEQ ID NO: 464387 - DNA, 19 bp, Mus musculus
  siRNA target sequence for Polq (NM_029977.1,2929-2947).
gcaagtgggtctaatgaca

SEQ ID NO: 464388 - DNA, 19 bp, Mus musculus
  siRNA target sequence for Polq (NM_029977.1,2963-2981).
cagagcgaggcatagatga

SEQ ID NO: 464389 - DNA, 19 bp, Mus musculus
  siRNA target sequence for Polq (NM_029977.1,2995-3013).
gcagactctctctgtaagt

SEQ ID NO: 464390 - DNA, 19 bp, Mus musculus
  siRNA target sequence for Polq (NM_029977.1,3008-3026).
gtaagttccagggcaattt

SEQ ID NO: 464391 - DNA, 19 bp, Mus musculus
  siRNA target sequence for Polq (NM_029977.1,3031-3049).
ccccagacaccctccattt

SEQ ID NO: 464392 - DNA, 19 bp, Mus musculus
  siRNA target sequence for Polq (NM_029977.1,3033-3051).
ccagacaccctccatttgt

SEQ ID NO: 464393 - DNA, 19 bp, Mus musculus
  siRNA target sequence for Polq (NM_029977.1,3036-3054).
gacaccctccatttgtaca

SEQ ID NO: 464394 - DNA, 19 bp, Mus musculus
  siRNA target sequence for Polq (NM_029977.1,3055-3073).
gcaagaaaacggacttctt

SEQ ID NO: 464395 - DNA, 19 bp, Mus musculus
  siRNA target sequence for Polq (NM_029977.1,3077-3095).
gtataaacaaagaaatgct

SEQ ID NO: 464396 - DNA, 19 bp, Mus musculus
  siRNA target sequence for Polq (NM_029977.1,3125-3143).
gcactaaggaagttcttca

SEQ ID NO: 464397 - DNA, 19 bp, Mus musculus
  siRNA target sequence for Polq (NM_029977.1,3193-3211).
gagcaagtgaacaacactt

SEQ ID NO: 464398 - DNA, 19 bp, Mus musculus
  siRNA target sequence for Polq (NM_029977.1,3279-3297).
gatgcatagaggtgattta

SEQ ID NO: 464399 - DNA, 19 bp, Mus musculus
  siRNA target sequence for Polq (NM_029977.1,3298-3316).
cagggacagactatgtgta

SEQ ID NO: 464400 - DNA, 19 bp, Mus musculus
  siRNA target sequence for Polq (NM_029977.1,3301-3319).
ggacagactatgtgtacat

SEQ ID NO: 464401 - DNA, 19 bp, Mus musculus
  siRNA target sequence for Polq (NM_029977.1,3312-3330).
gtgtacatctgctctatgt

SEQ ID NO: 464402 - DNA, 19 bp, Mus musculus
  siRNA target sequence for Polq (NM_029977.1,3377-3395).
gtccagggctatttgcaaa

SEQ ID NO: 464403 - DNA, 19 bp, Mus musculus
  siRNA target sequence for Polq (NM_029977.1,3380-3398).
cagggctatttgcaaaaca

SEQ ID NO: 464404 - DNA, 19 bp, Mus musculus
  siRNA target sequence for Polq (NM_029977.1,3432-3450).
gccctcactccctttacaa

SEQ ID NO: 464405 - DNA, 19 bp, Mus musculus
  siRNA target sequence for Polq (NM_029977.1,3635-3653).
gccagtacctggaatacca

SEQ ID NO: 464406 - DNA, 19 bp, Mus musculus
  siRNA target sequence for Polq (NM_029977.1,3677-3695).
gcaccagacagaagacatt

SEQ ID NO: 464407 - DNA, 19 bp, Mus musculus
  siRNA target sequence for Polq (NM_029977.1,3703-3721).
ggacaagctggtagtagtt

SEQ ID NO: 464408 - DNA, 19 bp, Mus musculus
  siRNA target sequence for Polq (NM_029977.1,3704-3722).
gacaagctggtagtagtta

SEQ ID NO: 464409 - DNA, 19 bp, Mus musculus
  siRNA target sequence for Polq (NM_029977.1,3742-3760).
gatgctgcacccatcaaat

SEQ ID NO: 464410 - DNA, 19 bp, Mus musculus
  siRNA target sequence for Polq (NM_029977.1,3752-3770).
ccatcaaatgtgaacgtat

SEQ ID NO: 464411 - DNA, 19 bp, Mus musculus
  siRNA target sequence for Polq (NM_029977.1,3761-3779).
gtgaacgtatgaagcttaa

SEQ ID NO: 464412 - DNA, 19 bp, Mus musculus
  siRNA target sequence for Polq (NM_029977.1,3763-3781).
gaacgtatgaagcttaata

SEQ ID NO: 464413 - DNA, 19 bp, Mus musculus
  siRNA target sequence for Polq (NM_029977.1,3766-3784).
cgtatgaagcttaatagca

SEQ ID NO: 464414 - DNA, 19 bp, Mus musculus
  siRNA target sequence for Polq (NM_029977.1,3767-3785).
gtatgaagcttaatagcaa

SEQ ID NO: 464415 - DNA, 19 bp, Mus musculus
  siRNA target sequence for Polq (NM_029977.1,3782-3800).
gcaaagaccgcgactcaaa

SEQ ID NO: 464416 - DNA, 19 bp, Mus musculus
  siRNA target sequence for Polq (NM_029977.1,3787-3805).
gaccgcgactcaaatcctt

SEQ ID NO: 464417 - DNA, 19 bp, Mus musculus
  siRNA target sequence for Polq (NM_029977.1,3813-3831).
ggcattgggaagttacaca

SEQ ID NO: 464418 - DNA, 19 bp, Mus musculus
  siRNA target sequence for Polq (NM_029977.1,3926-3944).
caggtgctcatgcaacaaa

SEQ ID NO: 464419 - DNA, 19 bp, Mus musculus
  siRNA target sequence for Polq (NM_029977.1,3928-3946).
ggtgctcatgcaacaaata

SEQ ID NO: 464420 - DNA, 19 bp, Mus musculus
  siRNA target sequence for Polq (NM_029977.1,3931-3949).
gctcatgcaacaaatagaa

SEQ ID NO: 464421 - DNA, 19 bp, Mus musculus
  siRNA target sequence for Polq (NM_029977.1,3983-4001).
gtgactttggagatagctt

SEQ ID NO: 464422 - DNA, 19 bp, Mus musculus
  siRNA target sequence for Polq (NM_029977.1,3994-4012).
gatagcttagacttggata

SEQ ID NO: 464423 - DNA, 19 bp, Mus musculus
  siRNA target sequence for Polq (NM_029977.1,4035-4053).
gcagatggcaactgaaaat

SEQ ID NO: 464424 - DNA, 19 bp, Mus musculus
  siRNA target sequence for Polq (NM_029977.1,4036-4054).
cagatggcaactgaaaata

SEQ ID NO: 464425 - DNA, 19 bp, Mus musculus
  siRNA target sequence for Polq (NM_029977.1,4064-4082).
gagcaaaagcagtagtgat

SEQ ID NO: 464426 - DNA, 19 bp, Mus musculus
  siRNA target sequence for Polq (NM_029977.1,4094-4112).
gttccgccatgcagaacaa

SEQ ID NO: 464427 - DNA, 19 bp, Mus musculus
  siRNA target sequence for Polq (NM_029977.1,4284-4302).
gaatgagcattctgttact

SEQ ID NO: 464428 - DNA, 19 bp, Mus musculus
  siRNA target sequence for Polq (NM_029977.1,4366-4384).
ccgctggctcctcaaatga

SEQ ID NO: 464429 - DNA, 19 bp, Mus musculus
  siRNA target sequence for Polq (NM_029977.1,4368-4386).
gctggctcctcaaatgaga

SEQ ID NO: 464430 - DNA, 19 bp, Mus musculus
  siRNA target sequence for Polq (NM_029977.1,4416-4434).
gcctgaaaccagtttgaat

SEQ ID NO: 464431 - DNA, 19 bp, Mus musculus
  siRNA target sequence for Polq (NM_029977.1,4417-4435).
cctgaaaccagtttgaata

SEQ ID NO: 464432 - DNA, 19 bp, Mus musculus
  siRNA target sequence for Polq (NM_029977.1,4437-4455).
gagtgatagtatactattt

SEQ ID NO: 464433 - DNA, 19 bp, Mus musculus
  siRNA target sequence for Polq (NM_029977.1,4439-4457).
gtgatagtatactatttga

SEQ ID NO: 464434 - DNA, 19 bp, Mus musculus
  siRNA target sequence for Polq (NM_029977.1,4441-4459).
gatagtatactatttgaca

SEQ ID NO: 464435 - DNA, 19 bp, Mus musculus
  siRNA target sequence for Polq (NM_029977.1,4486-4504).
ggacagtcacctgatataa

SEQ ID NO: 464436 - DNA, 19 bp, Mus musculus
  siRNA target sequence for Polq (NM_029977.1,4487-4505).
gacagtcacctgatataaa

SEQ ID NO: 464437 - DNA, 19 bp, Mus musculus
  siRNA target sequence for Polq (NM_029977.1,4528-4546).
gaaatgacaccaaaccatt

SEQ ID NO: 464438 - DNA, 19 bp, Mus musculus
  siRNA target sequence for Polq (NM_029977.1,4631-4649).
gtctcagtggtgaatctat

SEQ ID NO: 464439 - DNA, 19 bp, Mus musculus
  siRNA target sequence for Polq (NM_029977.1,4633-4651).
ctcagtggtgaatctatta

SEQ ID NO: 464440 - DNA, 19 bp, Mus musculus
  siRNA target sequence for Polq (NM_029977.1,4637-4655).
gtggtgaatctattatatt

SEQ ID NO: 464441 - DNA, 19 bp, Mus musculus
  siRNA target sequence for Polq (NM_029977.1,4706-4724).
catttcatgtgcaagagaa

SEQ ID NO: 464442 - DNA, 19 bp, Mus musculus
  siRNA target sequence for Polq (NM_029977.1,4877-4895).
ggtcaggagcatcatttaa

SEQ ID NO: 464443 - DNA, 19 bp, Mus musculus
  siRNA target sequence for Polq (NM_029977.1,4882-4900).
ggagcatcatttaacttaa

SEQ ID NO: 464444 - DNA, 19 bp, Mus musculus
  siRNA target sequence for Polq (NM_029977.1,4956-4974).
gcccaagatgatacatgta

SEQ ID NO: 464445 - DNA, 19 bp, Mus musculus
  siRNA target sequence for Polq (NM_029977.1,4957-4975).
cccaagatgatacatgtaa

SEQ ID NO: 464446 - DNA, 19 bp, Mus musculus
  siRNA target sequence for Polq (NM_029977.1,4958-4976).
ccaagatgatacatgtaaa

SEQ ID NO: 464447 - DNA, 19 bp, Mus musculus
  siRNA target sequence for Polq (NM_029977.1,5060-5078).
cagttttccccagtaatga

SEQ ID NO: 464448 - DNA, 19 bp, Mus musculus
  siRNA target sequence for Polq (NM_029977.1,5067-5085).
ccccagtaatgaagttaaa

SEQ ID NO: 464449 - DNA, 19 bp, Mus musculus
  siRNA target sequence for Polq (NM_029977.1,5069-5087).
ccagtaatgaagttaaaaa

SEQ ID NO: 464450 - DNA, 19 bp, Mus musculus
  siRNA target sequence for Polq (NM_029977.1,5135-5153).
ctcccttgcctcgtaaaga

SEQ ID NO: 464451 - DNA, 19 bp, Mus musculus
  siRNA target sequence for Polq (NM_029977.1,5139-5157).
cttgcctcgtaaagaaagt

SEQ ID NO: 464452 - DNA, 19 bp, Mus musculus
  siRNA target sequence for Polq (NM_029977.1,5238-5256).
cggaacatctgtaaaacgt

SEQ ID NO: 464453 - DNA, 19 bp, Mus musculus
  siRNA target sequence for Polq (NM_029977.1,5303-5321).
gctcaccttcagacaatca

SEQ ID NO: 464454 - DNA, 19 bp, Mus musculus
  siRNA target sequence for Polq (NM_029977.1,5306-5324).
caccttcagacaatcaaaa

SEQ ID NO: 464455 - DNA, 19 bp, Mus musculus
  siRNA target sequence for Polq (NM_029977.1,5361-5379).
ggactatgatggttctgtt

SEQ ID NO: 464456 - DNA, 19 bp, Mus musculus
  siRNA target sequence for Polq (NM_029977.1,5377-5395).
gttgcagacacaagttttt

SEQ ID NO: 464457 - DNA, 19 bp, Mus musculus
  siRNA target sequence for Polq (NM_029977.1,5466-5484).
cgtagcgagtgatcagatt

SEQ ID NO: 464458 - DNA, 19 bp, Mus musculus
  siRNA target sequence for Polq (NM_029977.1,5470-5488).
gcgagtgatcagattctct

SEQ ID NO: 464459 - DNA, 19 bp, Mus musculus
  siRNA target sequence for Polq (NM_029977.1,5471-5489).
cgagtgatcagattctctt

SEQ ID NO: 464460 - DNA, 19 bp, Mus musculus
  siRNA target sequence for Polq (NM_029977.1,5476-5494).
gatcagattctctttcaga

SEQ ID NO: 464461 - DNA, 19 bp, Mus musculus
  siRNA target sequence for Polq (NM_029977.1,5516-5534).
gccaaaagcgcttttccat

SEQ ID NO: 464462 - DNA, 19 bp, Mus musculus
  siRNA target sequence for Polq (NM_029977.1,5582-5600).
ctaccataggtggaaagtt

SEQ ID NO: 464463 - DNA, 19 bp, Mus musculus
  siRNA target sequence for Polq (NM_029977.1,5593-5611).
ggaaagttgaagcaagtta

SEQ ID NO: 464464 - DNA, 19 bp, Mus musculus
  siRNA target sequence for Polq (NM_029977.1,5702-5720).
gtgcaaaggatgcctatta

SEQ ID NO: 464465 - DNA, 19 bp, Mus musculus
  siRNA target sequence for Polq (NM_029977.1,5705-5723).
caaaggatgcctattattt

SEQ ID NO: 464466 - DNA, 19 bp, Mus musculus
  siRNA target sequence for Polq (NM_029977.1,5709-5727).
ggatgcctattatttgtca

SEQ ID NO: 464467 - DNA, 19 bp, Mus musculus
  siRNA target sequence for Polq (NM_029977.1,5779-5797).
cctctggacgcaacactaa

SEQ ID NO: 464468 - DNA, 19 bp, Mus musculus
  siRNA target sequence for Polq (NM_029977.1,5859-5877).
gtctgttgtcacctatgat

SEQ ID NO: 464469 - DNA, 19 bp, Mus musculus
  siRNA target sequence for Polq (NM_029977.1,5875-5893).
gatttcatccagacctata

SEQ ID NO: 464470 - DNA, 19 bp, Mus musculus
  siRNA target sequence for Polq (NM_029977.1,5921-5939).
ccctggagcccagttatga

SEQ ID NO: 464471 - DNA, 19 bp, Mus musculus
  siRNA target sequence for Polq (NM_029977.1,5962-5980).
cttctcgacccagattcta

SEQ ID NO: 464472 - DNA, 19 bp, Mus musculus
  siRNA target sequence for Polq (NM_029977.1,5985-6003).
gccaactcttcatagcata

SEQ ID NO: 464473 - DNA, 19 bp, Mus musculus
  siRNA target sequence for Polq (NM_029977.1,6124-6142).
gagtctgttctcatcttca

SEQ ID NO: 464474 - DNA, 19 bp, Mus musculus
  siRNA target sequence for Polq (NM_029977.1,6231-6249).
ggccttgctagaactaaat

SEQ ID NO: 464475 - DNA, 19 bp, Mus musculus
  siRNA target sequence for Polq (NM_029977.1,6237-6255).
gctagaactaaatggaatt

SEQ ID NO: 464476 - DNA, 19 bp, Mus musculus
  siRNA target sequence for Polq (NM_029977.1,6373-6391).
gacatcgcacaggttttat

SEQ ID NO: 464477 - DNA, 19 bp, Mus musculus
  siRNA target sequence for Polq (NM_029977.1,6410-6428).
caccgaatggagagatgaa

SEQ ID NO: 464478 - DNA, 19 bp, Mus musculus
  siRNA target sequence for Polq (NM_029977.1,6432-6450).
gcaaggcagcaaaaagact

SEQ ID NO: 464479 - DNA, 19 bp, Mus musculus
  siRNA target sequence for Polq (NM_029977.1,6475-6493).
gagagtggccgcagaatga

SEQ ID NO: 464480 - DNA, 19 bp, Mus musculus
  siRNA target sequence for Polq (NM_029977.1,6507-6525).
gttcagcactagtaaggat

SEQ ID NO: 464481 - DNA, 19 bp, Mus musculus
  siRNA target sequence for Polq (NM_029977.1,6510-6528).
cagcactagtaaggatatt

SEQ ID NO: 464482 - DNA, 19 bp, Mus musculus
  siRNA target sequence for Polq (NM_029977.1,6512-6530).
gcactagtaaggatatttt

SEQ ID NO: 464483 - DNA, 19 bp, Mus musculus
  siRNA target sequence for Polq (NM_029977.1,6515-6533).
ctagtaaggatattttaaa

SEQ ID NO: 464484 - DNA, 19 bp, Mus musculus
  siRNA target sequence for Polq (NM_029977.1,6543-6561).
gggcttgcatcctttacca

SEQ ID NO: 464485 - DNA, 19 bp, Mus musculus
  siRNA target sequence for Polq (NM_029977.1,6554-6572).
ctttaccaggcctgatact

SEQ ID NO: 464486 - DNA, 19 bp, Mus musculus
  siRNA target sequence for Polq (NM_029977.1,6579-6597).
gagaagaatcagtaatgct

SEQ ID NO: 464487 - DNA, 19 bp, Mus musculus
  siRNA target sequence for Polq (NM_029977.1,6691-6709).
gctacaggacggataacct

SEQ ID NO: 464488 - DNA, 19 bp, Mus musculus
  siRNA target sequence for Polq (NM_029977.1,6692-6710).
ctacaggacggataacctt

SEQ ID NO: 464489 - DNA, 19 bp, Mus musculus
  siRNA target sequence for Polq (NM_029977.1,6698-6716).
gacggataacctttacaga

SEQ ID NO: 464490 - DNA, 19 bp, Mus musculus
  siRNA target sequence for Polq (NM_029977.1,6707-6725).
cctttacagaacccaatat

SEQ ID NO: 464491 - DNA, 19 bp, Mus musculus
  siRNA target sequence for Polq (NM_029977.1,6735-6753).
gccaagagattttgagatt

SEQ ID NO: 464492 - DNA, 19 bp, Mus musculus
  siRNA target sequence for Polq (NM_029977.1,6817-6835).
gcaataggacaagataaga

SEQ ID NO: 464493 - DNA, 19 bp, Mus musculus
  siRNA target sequence for Polq (NM_029977.1,6824-6842).
gacaagataagaaggttta

SEQ ID NO: 464494 - DNA, 19 bp, Mus musculus
  siRNA target sequence for Polq (NM_029977.1,6889-6907).
gatagaggggtgccatttt

SEQ ID NO: 464495 - DNA, 19 bp, Mus musculus
  siRNA target sequence for Polq (NM_029977.1,6893-6911).
gaggggtgccattttcagt

SEQ ID NO: 464496 - DNA, 19 bp, Mus musculus
  siRNA target sequence for Polq (NM_029977.1,7007-7025).
gtgactgtcgtctcattca

SEQ ID NO: 464497 - DNA, 19 bp, Mus musculus
  siRNA target sequence for Polq (NM_029977.1,7013-7031).
gtcgtctcattcaagtctt

SEQ ID NO: 464498 - DNA, 19 bp, Mus musculus
  siRNA target sequence for Polq (NM_029977.1,7063-7081).
gctgccgagtggaagatga

SEQ ID NO: 464499 - DNA, 19 bp, Mus musculus
  siRNA target sequence for Polq (NM_029977.1,7117-7135).
cacgcaaagcagatttgct

SEQ ID NO: 464500 - DNA, 19 bp, Mus musculus
  siRNA target sequence for Polq (NM_029977.1,7128-7146).
gatttgctatggaattata

SEQ ID NO: 464501 - DNA, 19 bp, Mus musculus
  siRNA target sequence for Polq (NM_029977.1,7155-7173).
gggagctaaatctttagga

SEQ ID NO: 464502 - DNA, 19 bp, Mus musculus
  siRNA target sequence for Polq (NM_029977.1,7176-7194).
gcagatgggcattaaagaa

SEQ ID NO: 464503 - DNA, 19 bp, Mus musculus
  siRNA target sequence for Polq (NM_029977.1,7220-7238).
ctttcaagtccagatataa

SEQ ID NO: 464504 - DNA, 19 bp, Mus musculus
  siRNA target sequence for Polq (NM_029977.1,7229-7247).
ccagatataaagggattaa

SEQ ID NO: 464505 - DNA, 19 bp, Mus musculus
  siRNA target sequence for Polq (NM_029977.1,7232-7250).
gatataaagggattaatca

SEQ ID NO: 464506 - DNA, 19 bp, Mus musculus
  siRNA target sequence for Polq (NM_029977.1,7240-7258).
gggattaatcatttcatga

SEQ ID NO: 464507 - DNA, 19 bp, Mus musculus
  siRNA target sequence for Polq (NM_029977.1,7319-7337).
gatatttgccaggaatcaa

SEQ ID NO: 464508 - DNA, 19 bp, Mus musculus
  siRNA target sequence for Polq (NM_029977.1,7339-7357).
gacgacaatccttatcata

SEQ ID NO: 464509 - DNA, 19 bp, Mus musculus
  siRNA target sequence for Polq (NM_029977.1,7341-7359).
cgacaatccttatcataaa

SEQ ID NO: 464510 - DNA, 19 bp, Mus musculus
  siRNA target sequence for Polq (NM_029977.1,7369-7387).
gaacgtcaggccatcaaca

SEQ ID NO: 464511 - DNA, 19 bp, Mus musculus
  siRNA target sequence for Polq (NM_029977.1,7372-7390).
cgtcaggccatcaacacaa

SEQ ID NO: 464512 - DNA, 19 bp, Mus musculus
  siRNA target sequence for Polq (NM_029977.1,7398-7416).
gggatcagctgctgatata

SEQ ID NO: 464513 - DNA, 19 bp, Mus musculus
  siRNA target sequence for Polq (NM_029977.1,7400-7418).
gatcagctgctgatatagt

SEQ ID NO: 464514 - DNA, 19 bp, Mus musculus
  siRNA target sequence for Polq (NM_029977.1,7406-7424).
ctgctgatatagtcaaaat

SEQ ID NO: 464515 - DNA, 19 bp, Mus musculus
  siRNA target sequence for Polq (NM_029977.1,7417-7435).
gtcaaaatagccacagtta

SEQ ID NO: 464516 - DNA, 19 bp, Mus musculus
  siRNA target sequence for Polq (NM_029977.1,7419-7437).
caaaatagccacagttaat

SEQ ID NO: 464517 - DNA, 19 bp, Mus musculus
  siRNA target sequence for Polq (NM_029977.1,7432-7450).
gttaatattcagaagcaat

SEQ ID NO: 464518 - DNA, 19 bp, Mus musculus
  siRNA target sequence for Polq (NM_029977.1,7458-7476).
cttccgttcaaccttcaaa

SEQ ID NO: 464519 - DNA, 19 bp, Mus musculus
  siRNA target sequence for Polq (NM_029977.1,7536-7554).
gaaacttaaagggatgttt

SEQ ID NO: 464520 - DNA, 19 bp, Mus musculus
  siRNA target sequence for Polq (NM_029977.1,7559-7577).
ccatgagaggaggattctt

SEQ ID NO: 464521 - DNA, 19 bp, Mus musculus
  siRNA target sequence for Polq (NM_029977.1,7588-7606).
cttcacgacgagcttttat

SEQ ID NO: 464522 - DNA, 19 bp, Mus musculus
  siRNA target sequence for Polq (NM_029977.1,7648-7666).
gtcaagaatgaaatggaat

SEQ ID NO: 464523 - DNA, 19 bp, Mus musculus
  siRNA target sequence for Polr2a (NM_009089.1,40-58).
ccgctgcgcaccatcaaga

SEQ ID NO: 464524 - DNA, 19 bp, Mus musculus
  siRNA target sequence for Polr2a (NM_009089.1,76-94).
ctgagtccggatgaattga

SEQ ID NO: 464525 - DNA, 19 bp, Mus musculus
  siRNA target sequence for Polr2a (NM_009089.1,110-128).
cagagggtggtatcaaata

SEQ ID NO: 464526 - DNA, 19 bp, Mus musculus
  siRNA target sequence for Polr2a (NM_009089.1,144-162).
gggaggtcgccccaaactt

SEQ ID NO: 464527 - DNA, 19 bp, Mus musculus
  siRNA target sequence for Polr2a (NM_009089.1,179-197).
cacggcagggggtgattga

SEQ ID NO: 464528 - DNA, 19 bp, Mus musculus
  siRNA target sequence for Polr2a (NM_009089.1,250-268).
cactttggccacatcgaat

SEQ ID NO: 464529 - DNA, 19 bp, Mus musculus
  siRNA target sequence for Polr2a (NM_009089.1,341-359).
gctccaaactgcttgtaga

SEQ ID NO: 464530 - DNA, 19 bp, Mus musculus
  siRNA target sequence for Polr2a (NM_009089.1,342-360).
ctccaaactgcttgtagat

SEQ ID NO: 464531 - DNA, 19 bp, Mus musculus
  siRNA target sequence for Polr2a (NM_009089.1,362-380).
ctaataacccgaagattaa

SEQ ID NO: 464532 - DNA, 19 bp, Mus musculus
  siRNA target sequence for Polr2a (NM_009089.1,419-437).
ggcttacgcatgtctatga

SEQ ID NO: 464533 - DNA, 19 bp, Mus musculus
  siRNA target sequence for Polr2a (NM_009089.1,653-671).
cagaacgagtgcatgaaat

SEQ ID NO: 464534 - DNA, 19 bp, Mus musculus
  siRNA target sequence for Polr2a (NM_009089.1,655-673).
gaacgagtgcatgaaatct

SEQ ID NO: 464535 - DNA, 19 bp, Mus musculus
  siRNA target sequence for Polr2a (NM_009089.1,658-676).
cgagtgcatgaaatcttca

SEQ ID NO: 464536 - DNA, 19 bp, Mus musculus
  siRNA target sequence for Polr2a (NM_009089.1,686-704).
cagatgaggagtgttttgt

SEQ ID NO: 464537 - DNA, 19 bp, Mus musculus
  siRNA target sequence for Polr2a (NM_009089.1,731-749).
ggcctgagtggatgattgt

SEQ ID NO: 464538 - DNA, 19 bp, Mus musculus
  siRNA target sequence for Polr2a (NM_009089.1,1045-1063).
cgggttcgagggaatctaa

SEQ ID NO: 464539 - DNA, 19 bp, Mus musculus
  siRNA target sequence for Polr2a (NM_009089.1,1101-1119).
cacccctgaccctaaccta

SEQ ID NO: 464540 - DNA, 19 bp, Mus musculus
  siRNA target sequence for Polr2a (NM_009089.1,1176-1194).
gattgtcacacccttcaat

SEQ ID NO: 464541 - DNA, 19 bp, Mus musculus
  siRNA target sequence for Polr2a (NM_009089.1,1200-1218).
cagacttcaggaattagta

SEQ ID NO: 464542 - DNA, 19 bp, Mus musculus
  siRNA target sequence for Polr2a (NM_009089.1,1240-1258).
ccaggagccaagtacatca

SEQ ID NO: 464543 - DNA, 19 bp, Mus musculus
  siRNA target sequence for Polr2a (NM_009089.1,1241-1259).
caggagccaagtacatcat

SEQ ID NO: 464544 - DNA, 19 bp, Mus musculus
  siRNA target sequence for Polr2a (NM_009089.1,1251-1269).
gtacatcatccgcgataat

SEQ ID NO: 464545 - DNA, 19 bp, Mus musculus
  siRNA target sequence for Polr2a (NM_009089.1,1262-1280).
gcgataatggcgatcgaat

SEQ ID NO: 464546 - DNA, 19 bp, Mus musculus
  siRNA target sequence for Polr2a (NM_009089.1,1263-1281).
cgataatggcgatcgaatt

SEQ ID NO: 464547 - DNA, 19 bp, Mus musculus
  siRNA target sequence for Polr2a (NM_009089.1,1357-1375).
ggggacattgttatcttca

SEQ ID NO: 464548 - DNA, 19 bp, Mus musculus
  siRNA target sequence for Polr2a (NM_009089.1,1359-1377).
ggacattgttatcttcaat

SEQ ID NO: 464549 - DNA, 19 bp, Mus musculus
  siRNA target sequence for Polr2a (NM_009089.1,1437-1455).
gtctacttttcggttgaat

SEQ ID NO: 464550 - DNA, 19 bp, Mus musculus
  siRNA target sequence for Polr2a (NM_009089.1,1460-1478).
gtgtgacaactccatacaa

SEQ ID NO: 464551 - DNA, 19 bp, Mus musculus
  siRNA target sequence for Polr2a (NM_009089.1,1493-1511).
gagatgagatgaatttgca

SEQ ID NO: 464552 - DNA, 19 bp, Mus musculus
  siRNA target sequence for Polr2a (NM_009089.1,1556-1574).
ctatggtgcctcgaatgat

SEQ ID NO: 464553 - DNA, 19 bp, Mus musculus
  siRNA target sequence for Polr2a (NM_009089.1,1561-1579).
gtgcctcgaatgattgtca

SEQ ID NO: 464554 - DNA, 19 bp, Mus musculus
  siRNA target sequence for Polr2a (NM_009089.1,1629-1647).
ggcagtacgcaaattcact

SEQ ID NO: 464555 - DNA, 19 bp, Mus musculus
  siRNA target sequence for Polr2a (NM_009089.1,1630-1648).
gcagtacgcaaattcacta

SEQ ID NO: 464556 - DNA, 19 bp, Mus musculus
  siRNA target sequence for Polr2a (NM_009089.1,1631-1649).
cagtacgcaaattcactaa

SEQ ID NO: 464557 - DNA, 19 bp, Mus musculus
  siRNA target sequence for Polr2a (NM_009089.1,1633-1651).
gtacgcaaattcactaaga

SEQ ID NO: 464558 - DNA, 19 bp, Mus musculus
  siRNA target sequence for Polr2a (NM_009089.1,1678-1696).
gtcatgaacctcttaatgt

SEQ ID NO: 464559 - DNA, 19 bp, Mus musculus
  siRNA target sequence for Polr2a (NM_009089.1,1680-1698).
catgaacctcttaatgttt

SEQ ID NO: 464560 - DNA, 19 bp, Mus musculus
  siRNA target sequence for Polr2a (NM_009089.1,1785-1803).
catacctggacacatcaat

SEQ ID NO: 464561 - DNA, 19 bp, Mus musculus
  siRNA target sequence for Polr2a (NM_009089.1,1789-1807).
cctggacacatcaattgta

SEQ ID NO: 464562 - DNA, 19 bp, Mus musculus
  siRNA target sequence for Polr2a (NM_009089.1,1818-1836).
cagcacccatcctgatgat

SEQ ID NO: 464563 - DNA, 19 bp, Mus musculus
  siRNA target sequence for Polr2a (NM_009089.1,1868-1886).
ctggggacaccaaagttgt

SEQ ID NO: 464564 - DNA, 19 bp, Mus musculus
  siRNA target sequence for Polr2a (NM_009089.1,1871-1889).
gggacaccaaagttgtagt

SEQ ID NO: 464565 - DNA, 19 bp, Mus musculus
  siRNA target sequence for Polr2a (NM_009089.1,2112-2130).
cactattaagaaagctaaa

SEQ ID NO: 464566 - DNA, 19 bp, Mus musculus
  siRNA target sequence for Polr2a (NM_009089.1,2137-2155).
gtaatagaggtcattgaga

SEQ ID NO: 464567 - DNA, 19 bp, Mus musculus
  siRNA target sequence for Polr2a (NM_009089.1,2193-2211).
cacattgcgtcagacattt

SEQ ID NO: 464568 - DNA, 19 bp, Mus musculus
  siRNA target sequence for Polr2a (NM_009089.1,2199-2217).
gcgtcagacatttgagaat

SEQ ID NO: 464569 - DNA, 19 bp, Mus musculus
  siRNA target sequence for Polr2a (NM_009089.1,2214-2232).
gaatcaagtgaatcgtatt

SEQ ID NO: 464570 - DNA, 19 bp, Mus musculus
  siRNA target sequence for Polr2a (NM_009089.1,2218-2236).
caagtgaatcgtattctca

SEQ ID NO: 464571 - DNA, 19 bp, Mus musculus
  siRNA target sequence for Polr2a (NM_009089.1,2223-2241).
gaatcgtattctcaatgat

SEQ ID NO: 464572 - DNA, 19 bp, Mus musculus
  siRNA target sequence for Polr2a (NM_009089.1,2235-2253).
caatgatgctcgagacaaa

SEQ ID NO: 464573 - DNA, 19 bp, Mus musculus
  siRNA target sequence for Polr2a (NM_009089.1,2269-2287).
cagaaatccctctctgaat

SEQ ID NO: 464574 - DNA, 19 bp, Mus musculus
  siRNA target sequence for Polr2a (NM_009089.1,2385-2403).
caagcggatcccatttgga

SEQ ID NO: 464575 - DNA, 19 bp, Mus musculus
  siRNA target sequence for Polr2a (NM_009089.1,2390-2408).
ggatcccatttggattcaa

SEQ ID NO: 464576 - DNA, 19 bp, Mus musculus
  siRNA target sequence for Polr2a (NM_009089.1,2413-2431).
cggactcttcctcacttta

SEQ ID NO: 464577 - DNA, 19 bp, Mus musculus
  siRNA target sequence for Polr2a (NM_009089.1,2427-2445).
ctttatcaaggatgattat

SEQ ID NO: 464578 - DNA, 19 bp, Mus musculus
  siRNA target sequence for Polr2a (NM_009089.1,2454-2472).
gagccgaggctttgtagaa

SEQ ID NO: 464579 - DNA, 19 bp, Mus musculus
  siRNA target sequence for Polr2a (NM_009089.1,2458-2476).
cgaggctttgtagaaaatt

SEQ ID NO: 464580 - DNA, 19 bp, Mus musculus
  siRNA target sequence for Polr2a (NM_009089.1,2461-2479).
ggctttgtagaaaattcat

SEQ ID NO: 464581 - DNA, 19 bp, Mus musculus
  siRNA target sequence for Polr2a (NM_009089.1,2530-2548).
cgagaaggtctcattgaca

SEQ ID NO: 464582 - DNA, 19 bp, Mus musculus
  siRNA target sequence for Polr2a (NM_009089.1,2564-2582).
ctgagactgggtatattca

SEQ ID NO: 464583 - DNA, 19 bp, Mus musculus
  siRNA target sequence for Polr2a (NM_009089.1,2581-2599).
cagcgaaggctgataaagt

SEQ ID NO: 464584 - DNA, 19 bp, Mus musculus
  siRNA target sequence for Polr2a (NM_009089.1,2607-2625).
gtcggtgatggtgaaatat

SEQ ID NO: 464585 - DNA, 19 bp, Mus musculus
  siRNA target sequence for Polr2a (NM_009089.1,2609-2627).
cggtgatggtgaaatatga

SEQ ID NO: 464586 - DNA, 19 bp, Mus musculus
  siRNA target sequence for Polr2a (NM_009089.1,2610-2628).
ggtgatggtgaaatatgat

SEQ ID NO: 464587 - DNA, 19 bp, Mus musculus
  siRNA target sequence for Polr2a (NM_009089.1,2723-2741).
cacttaaaccttctaataa

SEQ ID NO: 464588 - DNA, 19 bp, Mus musculus
  siRNA target sequence for Polr2a (NM_009089.1,2754-2772).
gaagttccgttttgattat

SEQ ID NO: 464589 - DNA, 19 bp, Mus musculus
  siRNA target sequence for Polr2a (NM_009089.1,2760-2778).
ccgttttgattataccaat

SEQ ID NO: 464590 - DNA, 19 bp, Mus musculus
  siRNA target sequence for Polr2a (NM_009089.1,2826-2844).
gctgagcaatgcccatata

SEQ ID NO: 464591 - DNA, 19 bp, Mus musculus
  siRNA target sequence for Polr2a (NM_009089.1,2831-2849).
gcaatgcccatatacagaa

SEQ ID NO: 464592 - DNA, 19 bp, Mus musculus
  siRNA target sequence for Polr2a (NM_009089.1,2853-2871).
gctggaacgggaatttgaa

SEQ ID NO: 464593 - DNA, 19 bp, Mus musculus
  siRNA target sequence for Polr2a (NM_009089.1,2931-2949).
ggtcctcccttgtaacctt

SEQ ID NO: 464594 - DNA, 19 bp, Mus musculus
  siRNA target sequence for Polr2a (NM_009089.1,2963-2981).
ggaatgctcagaaaatctt

SEQ ID NO: 464595 - DNA, 19 bp, Mus musculus
  siRNA target sequence for Polr2a (NM_009089.1,3028-3046).
gtagagggagtcaaagaat

SEQ ID NO: 464596 - DNA, 19 bp, Mus musculus
  siRNA target sequence for Polr2a (NM_009089.1,3050-3068).
gcaagaagttggtaattgt

SEQ ID NO: 464597 - DNA, 19 bp, Mus musculus
  siRNA target sequence for Polr2a (NM_009089.1,3054-3072).
gaagttggtaattgtgaat

SEQ ID NO: 464598 - DNA, 19 bp, Mus musculus
  siRNA target sequence for Polr2a (NM_009089.1,3109-3127).
gccacattgctcttcaaca

SEQ ID NO: 464599 - DNA, 19 bp, Mus musculus
  siRNA target sequence for Polr2a (NM_009089.1,3200-3218).
ggctgcttggggagataga

SEQ ID NO: 464600 - DNA, 19 bp, Mus musculus
  siRNA target sequence for Polr2a (NM_009089.1,3211-3229).
gagatagagtccaagttca

SEQ ID NO: 464601 - DNA, 19 bp, Mus musculus
  siRNA target sequence for Polr2a (NM_009089.1,3242-3260).
cccatcctggagaaatggt

SEQ ID NO: 464602 - DNA, 19 bp, Mus musculus
  siRNA target sequence for Polr2a (NM_009089.1,3321-3339).
ccactatgctggtgtatct

SEQ ID NO: 464603 - DNA, 19 bp, Mus musculus
  siRNA target sequence for Polr2a (NM_009089.1,3359-3377).
gtgtgcctcgacttaagga

SEQ ID NO: 464604 - DNA, 19 bp, Mus musculus
  siRNA target sequence for Polr2a (NM_009089.1,3365-3383).
ctcgacttaaggagcttat

SEQ ID NO: 464605 - DNA, 19 bp, Mus musculus
  siRNA target sequence for Polr2a (NM_009089.1,3367-3385).
cgacttaaggagcttatca

SEQ ID NO: 464606 - DNA, 19 bp, Mus musculus
  siRNA target sequence for Polr2a (NM_009089.1,3472-3490).
ctttgccgcttggaacata

SEQ ID NO: 464607 - DNA, 19 bp, Mus musculus
  siRNA target sequence for Polr2a (NM_009089.1,3477-3495).
ccgcttggaacatacaaca

SEQ ID NO: 464608 - DNA, 19 bp, Mus musculus
  siRNA target sequence for Polr2a (NM_009089.1,3478-3496).
cgcttggaacatacaacat

SEQ ID NO: 464609 - DNA, 19 bp, Mus musculus
  siRNA target sequence for Polr2a (NM_009089.1,3479-3497).
gcttggaacatacaacatt

SEQ ID NO: 464610 - DNA, 19 bp, Mus musculus
  siRNA target sequence for Polr2a (NM_009089.1,3511-3529).
gccaatacagccatctact

SEQ ID NO: 464611 - DNA, 19 bp, Mus musculus
  siRNA target sequence for Polr2a (NM_009089.1,3575-3593).
gggtgaatgtgtactatga

SEQ ID NO: 464612 - DNA, 19 bp, Mus musculus
  siRNA target sequence for Polr2a (NM_009089.1,3665-3683).
ctgaccggaagcttaccat

SEQ ID NO: 464613 - DNA, 19 bp, Mus musculus
  siRNA target sequence for Polr2a (NM_009089.1,3675-3693).
gcttaccatggaacagatt

SEQ ID NO: 464614 - DNA, 19 bp, Mus musculus
  siRNA target sequence for Polr2a (NM_009089.1,3709-3727).
gcaggttttggcgatgatt

SEQ ID NO: 464615 - DNA, 19 bp, Mus musculus
  siRNA target sequence for Polr2a (NM_009089.1,3734-3752).
gtatcttcaacgatgataa

SEQ ID NO: 464616 - DNA, 19 bp, Mus musculus
  siRNA target sequence for Polr2a (NM_009089.1,3772-3790).
cgaatccgcatcatgaaca

SEQ ID NO: 464617 - DNA, 19 bp, Mus musculus
  siRNA target sequence for Polr2a (NM_009089.1,3869-3887).
ccaacatgctgacagatat

SEQ ID NO: 464618 - DNA, 19 bp, Mus musculus
  siRNA target sequence for Polr2a (NM_009089.1,4065-4083).
gcgcaccacgtccaatgat

SEQ ID NO: 464619 - DNA, 19 bp, Mus musculus
  siRNA target sequence for Polr2a (NM_009089.1,4066-4084).
cgcaccacgtccaatgata

SEQ ID NO: 464620 - DNA, 19 bp, Mus musculus
  siRNA target sequence for Polr2a (NM_009089.1,4067-4085).
gcaccacgtccaatgatat

SEQ ID NO: 464621 - DNA, 19 bp, Mus musculus
  siRNA target sequence for Polr2a (NM_009089.1,4068-4086).
caccacgtccaatgatatt

SEQ ID NO: 464622 - DNA, 19 bp, Mus musculus
  siRNA target sequence for Polr2a (NM_009089.1,4070-4088).
ccacgtccaatgatattgt

SEQ ID NO: 464623 - DNA, 19 bp, Mus musculus
  siRNA target sequence for Polr2a (NM_009089.1,4196-4214).
cgctcctgtgtgacactat

SEQ ID NO: 464624 - DNA, 19 bp, Mus musculus
  siRNA target sequence for Polr2a (NM_009089.1,4201-4219).
ctgtgtgacactatgacat

SEQ ID NO: 464625 - DNA, 19 bp, Mus musculus
  siRNA target sequence for Polr2a (NM_009089.1,4217-4235).
catgccgtggccacttgat

SEQ ID NO: 464626 - DNA, 19 bp, Mus musculus
  siRNA target sequence for Polr2a (NM_009089.1,4269-4287).
cactggaccgctcatgaaa

SEQ ID NO: 464627 - DNA, 19 bp, Mus musculus
  siRNA target sequence for Polr2a (NM_009089.1,4273-4291).
ggaccgctcatgaaatgct

SEQ ID NO: 464628 - DNA, 19 bp, Mus musculus
  siRNA target sequence for Polr2a (NM_009089.1,4304-4322).
cggtggatgtccttatgga

SEQ ID NO: 464629 - DNA, 19 bp, Mus musculus
  siRNA target sequence for Polr2a (NM_009089.1,4356-4374).
gggagtctctgagaatatt

SEQ ID NO: 464630 - DNA, 19 bp, Mus musculus
  siRNA target sequence for Polr2a (NM_009089.1,4439-4457).
gcaaatacggcatggaaat

SEQ ID NO: 464631 - DNA, 19 bp, Mus musculus
  siRNA target sequence for Polr2a (NM_009089.1,4613-4631).
gaccctcaagcccatacat

SEQ ID NO: 464632 - DNA, 19 bp, Mus musculus
  siRNA target sequence for Polr2a (NM_009089.1,5113-5131).
cccaccagccctaactatt

SEQ ID NO: 464633 - DNA, 19 bp, Mus musculus
  siRNA target sequence for Polr2a (NM_009089.1,5187-5205).
cagttactcacctacaagt

SEQ ID NO: 464634 - DNA, 19 bp, Mus musculus
  siRNA target sequence for Polr2a (NM_009089.1,5218-5236).
cccaccagccctaattaca

SEQ ID NO: 464635 - DNA, 19 bp, Mus musculus
  siRNA target sequence for Polr2a (NM_009089.1,5304-5322).
ctccagcccacgatataca

SEQ ID NO: 464636 - DNA, 19 bp, Mus musculus
  siRNA target sequence for Polr2a (NM_009089.1,5397-5415).
caagtacaccccaactagt

SEQ ID NO: 464637 - DNA, 19 bp, Mus musculus
  siRNA target sequence for Polr2a (NM_009089.1,5468-5486).
cacctacaagccctaaata

SEQ ID NO: 464638 - DNA, 19 bp, Mus musculus
  siRNA target sequence for Polr2a (NM_009089.1,5470-5488).
cctacaagccctaaatatt

SEQ ID NO: 464639 - DNA, 19 bp, Mus musculus
  siRNA target sequence for Polr2a (NM_009089.1,5554-5572).
ccaacctccccgacatact

SEQ ID NO: 464640 - DNA, 19 bp, Mus musculus
  siRNA target sequence for Polr2b (NM_153798.1,208-226).
gatcagttcttactttgat

SEQ ID NO: 464641 - DNA, 19 bp, Mus musculus
  siRNA target sequence for Polr2b (NM_153798.1,258-276).
cctttgatgagtttattca

SEQ ID NO: 464642 - DNA, 19 bp, Mus musculus
  siRNA target sequence for Polr2b (NM_153798.1,277-295).
gatgtctgttcaaagaatt

SEQ ID NO: 464643 - DNA, 19 bp, Mus musculus
  siRNA target sequence for Polr2b (NM_153798.1,340-358).
cgccagtggagaagttgaa

SEQ ID NO: 464644 - DNA, 19 bp, Mus musculus
  siRNA target sequence for Polr2b (NM_153798.1,356-374).
gaagagccgccaagatatt

SEQ ID NO: 464645 - DNA, 19 bp, Mus musculus
  siRNA target sequence for Polr2b (NM_153798.1,362-380).
ccgccaagatatttactga

SEQ ID NO: 464646 - DNA, 19 bp, Mus musculus
  siRNA target sequence for Polr2b (NM_153798.1,397-415).
cctctccaaacctactcat

SEQ ID NO: 464647 - DNA, 19 bp, Mus musculus
  siRNA target sequence for Polr2b (NM_153798.1,429-447).
gtgccccttcgccaatgat

SEQ ID NO: 464648 - DNA, 19 bp, Mus musculus
  siRNA target sequence for Polr2b (NM_153798.1,438-456).
cgccaatgatgccaaatga

SEQ ID NO: 464649 - DNA, 19 bp, Mus musculus
  siRNA target sequence for Polr2b (NM_153798.1,458-476).
gccaggttaagaaatctca

SEQ ID NO: 464650 - DNA, 19 bp, Mus musculus
  siRNA target sequence for Polr2b (NM_153798.1,486-504).
ctccgctttacgttgacat

SEQ ID NO: 464651 - DNA, 19 bp, Mus musculus
  siRNA target sequence for Polr2b (NM_153798.1,488-506).
ccgctttacgttgacataa

SEQ ID NO: 464652 - DNA, 19 bp, Mus musculus
  siRNA target sequence for Polr2b (NM_153798.1,491-509).
ctttacgttgacataacaa

SEQ ID NO: 464653 - DNA, 19 bp, Mus musculus
  siRNA target sequence for Polr2b (NM_153798.1,496-514).
cgttgacataacaaagaca

SEQ ID NO: 464654 - DNA, 19 bp, Mus musculus
  siRNA target sequence for Polr2b (NM_153798.1,546-564).
ctcagcaccagaaaacgtt

SEQ ID NO: 464655 - DNA, 19 bp, Mus musculus
  siRNA target sequence for Polr2b (NM_153798.1,550-568).
gcaccagaaaacgttcata

SEQ ID NO: 464656 - DNA, 19 bp, Mus musculus
  siRNA target sequence for Polr2b (NM_153798.1,570-588).
ggaaaattccaattatgct

SEQ ID NO: 464657 - DNA, 19 bp, Mus musculus
  siRNA target sequence for Polr2b (NM_153798.1,595-613).
cacctactgcctgttaaat

SEQ ID NO: 464658 - DNA, 19 bp, Mus musculus
  siRNA target sequence for Polr2b (NM_153798.1,604-622).
cctgttaaatggcttaaca

SEQ ID NO: 464659 - DNA, 19 bp, Mus musculus
  siRNA target sequence for Polr2b (NM_153798.1,658-676).
ggatcccggtggctatttt

SEQ ID NO: 464660 - DNA, 19 bp, Mus musculus
  siRNA target sequence for Polr2b (NM_153798.1,662-680).
cccggtggctattttatta

SEQ ID NO: 464661 - DNA, 19 bp, Mus musculus
  siRNA target sequence for Polr2b (NM_153798.1,663-681).
ccggtggctattttattat

SEQ ID NO: 464662 - DNA, 19 bp, Mus musculus
  siRNA target sequence for Polr2b (NM_153798.1,785-803).
cgctcatgcctggagaatt

SEQ ID NO: 464663 - DNA, 19 bp, Mus musculus
  siRNA target sequence for Polr2b (NM_153798.1,807-825).
cccgacccaccagtactat

SEQ ID NO: 464664 - DNA, 19 bp, Mus musculus
  siRNA target sequence for Polr2b (NM_153798.1,808-826).
ccgacccaccagtactata

SEQ ID NO: 464665 - DNA, 19 bp, Mus musculus
  siRNA target sequence for Polr2b (NM_153798.1,809-827).
cgacccaccagtactatat

SEQ ID NO: 464666 - DNA, 19 bp, Mus musculus
  siRNA target sequence for Polr2b (NM_153798.1,819-837).
gtactatatgggttagcat

SEQ ID NO: 464667 - DNA, 19 bp, Mus musculus
  siRNA target sequence for Polr2b (NM_153798.1,883-901).
gcgcatcgtggcaacgtta

SEQ ID NO: 464668 - DNA, 19 bp, Mus musculus
  siRNA target sequence for Polr2b (NM_153798.1,893-911).
gcaacgttaccatacatca

SEQ ID NO: 464669 - DNA, 19 bp, Mus musculus
  siRNA target sequence for Polr2b (NM_153798.1,894-912).
caacgttaccatacatcaa

SEQ ID NO: 464670 - DNA, 19 bp, Mus musculus
  siRNA target sequence for Polr2b (NM_153798.1,947-965).
ctaggctttgtgtctgata

SEQ ID NO: 464671 - DNA, 19 bp, Mus musculus
  siRNA target sequence for Polr2b (NM_153798.1,952-970).
ctttgtgtctgatagagat

SEQ ID NO: 464672 - DNA, 19 bp, Mus musculus
  siRNA target sequence for Polr2b (NM_153798.1,1001-1019).
gatccagagatgatggaaa

SEQ ID NO: 464673 - DNA, 19 bp, Mus musculus
  siRNA target sequence for Polr2b (NM_153798.1,1012-1030).
gatggaaatggttaaacca

SEQ ID NO: 464674 - DNA, 19 bp, Mus musculus
  siRNA target sequence for Polr2b (NM_153798.1,1061-1079).
cagaatgttgccttaaact

SEQ ID NO: 464675 - DNA, 19 bp, Mus musculus
  siRNA target sequence for Polr2b (NM_153798.1,1097-1115).
gcaaagcctggtgttacta

SEQ ID NO: 464676 - DNA, 19 bp, Mus musculus
  siRNA target sequence for Polr2b (NM_153798.1,1169-1187).
cacgttggtgtcagtgatt

SEQ ID NO: 464677 - DNA, 19 bp, Mus musculus
  siRNA target sequence for Polr2b (NM_153798.1,1280-1298).
cactatggcaacaagagat

SEQ ID NO: 464678 - DNA, 19 bp, Mus musculus
  siRNA target sequence for Polr2b (NM_153798.1,1312-1330).
gcctctgcttgcattctta

SEQ ID NO: 464679 - DNA, 19 bp, Mus musculus
  siRNA target sequence for Polr2b (NM_153798.1,1368-1386).
gaatctatgcgcagaagtt

SEQ ID NO: 464680 - DNA, 19 bp, Mus musculus
  siRNA target sequence for Polr2b (NM_153798.1,1372-1390).
ctatgcgcagaagtttatt

SEQ ID NO: 464681 - DNA, 19 bp, Mus musculus
  siRNA target sequence for Polr2b (NM_153798.1,1394-1412).
cgcgggaaggattttaact

SEQ ID NO: 464682 - DNA, 19 bp, Mus musculus
  siRNA target sequence for Polr2b (NM_153798.1,1395-1413).
gcgggaaggattttaactt

SEQ ID NO: 464683 - DNA, 19 bp, Mus musculus
  siRNA target sequence for Polr2b (NM_153798.1,1398-1416).
ggaaggattttaacttaga

SEQ ID NO: 464684 - DNA, 19 bp, Mus musculus
  siRNA target sequence for Polr2b (NM_153798.1,1445-1463).
gatgggctaaaatactctt

SEQ ID NO: 464685 - DNA, 19 bp, Mus musculus
  siRNA target sequence for Polr2b (NM_153798.1,1486-1504).
ccagaagaaagctcatcaa

SEQ ID NO: 464686 - DNA, 19 bp, Mus musculus
  siRNA target sequence for Polr2b (NM_153798.1,1514-1532).
ggagtatcccaggtattga

SEQ ID NO: 464687 - DNA, 19 bp, Mus musculus
  siRNA target sequence for Polr2b (NM_153798.1,1537-1555).
cctgacgtttgcatctact

SEQ ID NO: 464688 - DNA, 19 bp, Mus musculus
  siRNA target sequence for Polr2b (NM_153798.1,1540-1558).
gacgtttgcatctactctt

SEQ ID NO: 464689 - DNA, 19 bp, Mus musculus
  siRNA target sequence for Polr2b (NM_153798.1,1560-1578).
ctcacctgcgtcgtctaaa

SEQ ID NO: 464690 - DNA, 19 bp, Mus musculus
  siRNA target sequence for Polr2b (NM_153798.1,1562-1580).
cacctgcgtcgtctaaact

SEQ ID NO: 464691 - DNA, 19 bp, Mus musculus
  siRNA target sequence for Polr2b (NM_153798.1,1564-1582).
cctgcgtcgtctaaactct

SEQ ID NO: 464692 - DNA, 19 bp, Mus musculus
  siRNA target sequence for Polr2b (NM_153798.1,1612-1630).
gcccagacagttgcataat

SEQ ID NO: 464693 - DNA, 19 bp, Mus musculus
  siRNA target sequence for Polr2b (NM_153798.1,1679-1697).
gtagggcttgtgaagaatt

SEQ ID NO: 464694 - DNA, 19 bp, Mus musculus
  siRNA target sequence for Polr2b (NM_153798.1,1700-1718).
gccctgatggcttatattt

SEQ ID NO: 464695 - DNA, 19 bp, Mus musculus
  siRNA target sequence for Polr2b (NM_153798.1,1705-1723).
gatggcttatatttcagtt

SEQ ID NO: 464696 - DNA, 19 bp, Mus musculus
  siRNA target sequence for Polr2b (NM_153798.1,1733-1751).
ccctctccaattttggaat

SEQ ID NO: 464697 - DNA, 19 bp, Mus musculus
  siRNA target sequence for Polr2b (NM_153798.1,1765-1783).
gagcatggaaaatttagaa

SEQ ID NO: 464698 - DNA, 19 bp, Mus musculus
  siRNA target sequence for Polr2b (NM_153798.1,1805-1823).
gctgatgcaaccaagattt

SEQ ID NO: 464699 - DNA, 19 bp, Mus musculus
  siRNA target sequence for Polr2b (NM_153798.1,1806-1824).
ctgatgcaaccaagatttt

SEQ ID NO: 464700 - DNA, 19 bp, Mus musculus
  siRNA target sequence for Polr2b (NM_153798.1,1812-1830).
caaccaagatttttgttaa

SEQ ID NO: 464701 - DNA, 19 bp, Mus musculus
  siRNA target sequence for Polr2b (NM_153798.1,1834-1852).
ctgctgggttggaatccat

SEQ ID NO: 464702 - DNA, 19 bp, Mus musculus
  siRNA target sequence for Polr2b (NM_153798.1,1836-1854).
gctgggttggaatccataa

SEQ ID NO: 464703 - DNA, 19 bp, Mus musculus
  siRNA target sequence for Polr2b (NM_153798.1,1837-1855).
ctgggttggaatccataaa

SEQ ID NO: 464704 - DNA, 19 bp, Mus musculus
  siRNA target sequence for Polr2b (NM_153798.1,1839-1857).
gggttggaatccataaaga

SEQ ID NO: 464705 - DNA, 19 bp, Mus musculus
  siRNA target sequence for Polr2b (NM_153798.1,1873-1891).
gaacacgctaaggaagtta

SEQ ID NO: 464706 - DNA, 19 bp, Mus musculus
  siRNA target sequence for Polr2b (NM_153798.1,1898-1916).
cagatggacatcattgtat

SEQ ID NO: 464707 - DNA, 19 bp, Mus musculus
  siRNA target sequence for Polr2b (NM_153798.1,1909-1927).
cattgtatccgaagtttct

SEQ ID NO: 464708 - DNA, 19 bp, Mus musculus
  siRNA target sequence for Polr2b (NM_153798.1,1913-1931).
gtatccgaagtttctatga

SEQ ID NO: 464709 - DNA, 19 bp, Mus musculus
  siRNA target sequence for Polr2b (NM_153798.1,1948-1966).
gcgggagattcggatctat

SEQ ID NO: 464710 - DNA, 19 bp, Mus musculus
  siRNA target sequence for Polr2b (NM_153798.1,1949-1967).
cgggagattcggatctata

SEQ ID NO: 464711 - DNA, 19 bp, Mus musculus
  siRNA target sequence for Polr2b (NM_153798.1,1951-1969).
ggagattcggatctataca

SEQ ID NO: 464712 - DNA, 19 bp, Mus musculus
  siRNA target sequence for Polr2b (NM_153798.1,1954-1972).
gattcggatctatacagat

SEQ ID NO: 464713 - DNA, 19 bp, Mus musculus
  siRNA target sequence for Polr2b (NM_153798.1,1970-1988).
gatgcaggccgtatttgta

SEQ ID NO: 464714 - DNA, 19 bp, Mus musculus
  siRNA target sequence for Polr2b (NM_153798.1,1986-2004).
gtagaccccttctgattgt

SEQ ID NO: 464715 - DNA, 19 bp, Mus musculus
  siRNA target sequence for Polr2b (NM_153798.1,2034-2052).
gacacattgaccagttgaa

SEQ ID NO: 464716 - DNA, 19 bp, Mus musculus
  siRNA target sequence for Polr2b (NM_153798.1,2047-2065).
gttgaaagagagagaatat

SEQ ID NO: 464717 - DNA, 19 bp, Mus musculus
  siRNA target sequence for Polr2b (NM_153798.1,2054-2072).
gagagagaatataacaact

SEQ ID NO: 464718 - DNA, 19 bp, Mus musculus
  siRNA target sequence for Polr2b (NM_153798.1,2060-2078).
gaatataacaactacagtt

SEQ ID NO: 464719 - DNA, 19 bp, Mus musculus
  siRNA target sequence for Polr2b (NM_153798.1,2094-2112).
ccagtggggtagtagagta

SEQ ID NO: 464720 - DNA, 19 bp, Mus musculus
  siRNA target sequence for Polr2b (NM_153798.1,2095-2113).
cagtggggtagtagagtat

SEQ ID NO: 464721 - DNA, 19 bp, Mus musculus
  siRNA target sequence for Polr2b (NM_153798.1,2137-2155).
cgtgatgcttgcaatgact

SEQ ID NO: 464722 - DNA, 19 bp, Mus musculus
  siRNA target sequence for Polr2b (NM_153798.1,2212-2230).
gattcacccatcaatgatt

SEQ ID NO: 464723 - DNA, 19 bp, Mus musculus
  siRNA target sequence for Polr2b (NM_153798.1,2234-2252).
ggagtctgtgcatctatta

SEQ ID NO: 464724 - DNA, 19 bp, Mus musculus
  siRNA target sequence for Polr2b (NM_153798.1,2241-2259).
gtgcatctattattccttt

SEQ ID NO: 464725 - DNA, 19 bp, Mus musculus
  siRNA target sequence for Polr2b (NM_153798.1,2311-2329).
gcaggctatgggagtttat

SEQ ID NO: 464726 - DNA, 19 bp, Mus musculus
  siRNA target sequence for Polr2b (NM_153798.1,2312-2330).
caggctatgggagtttata

SEQ ID NO: 464727 - DNA, 19 bp, Mus musculus
  siRNA target sequence for Polr2b (NM_153798.1,2315-2333).
gctatgggagtttatatca

SEQ ID NO: 464728 - DNA, 19 bp, Mus musculus
  siRNA target sequence for Polr2b (NM_153798.1,2362-2380).
ggcccatgttctctactat

SEQ ID NO: 464729 - DNA, 19 bp, Mus musculus
  siRNA target sequence for Polr2b (NM_153798.1,2398-2416).
gactacacggtctatggaa

SEQ ID NO: 464730 - DNA, 19 bp, Mus musculus
  siRNA target sequence for Polr2b (NM_153798.1,2400-2418).
ctacacggtctatggaata

SEQ ID NO: 464731 - DNA, 19 bp, Mus musculus
  siRNA target sequence for Polr2b (NM_153798.1,2403-2421).
cacggtctatggaatatct

SEQ ID NO: 464732 - DNA, 19 bp, Mus musculus
  siRNA target sequence for Polr2b (NM_153798.1,2413-2431).
ggaatatctacgattcaga

SEQ ID NO: 464733 - DNA, 19 bp, Mus musculus
  siRNA target sequence for Polr2b (NM_153798.1,2435-2453).
ctgccagcaggaatcaact

SEQ ID NO: 464734 - DNA, 19 bp, Mus musculus
  siRNA target sequence for Polr2b (NM_153798.1,2442-2460).
caggaatcaactcaattgt

SEQ ID NO: 464735 - DNA, 19 bp, Mus musculus
  siRNA target sequence for Polr2b (NM_153798.1,2469-2487).
catcctacacgggctataa

SEQ ID NO: 464736 - DNA, 19 bp, Mus musculus
  siRNA target sequence for Polr2b (NM_153798.1,2472-2490).
cctacacgggctataatca

SEQ ID NO: 464737 - DNA, 19 bp, Mus musculus
  siRNA target sequence for Polr2b (NM_153798.1,2473-2491).
ctacacgggctataatcaa

SEQ ID NO: 464738 - DNA, 19 bp, Mus musculus
  siRNA target sequence for Polr2b (NM_153798.1,2478-2496).
cgggctataatcaagaaga

SEQ ID NO: 464739 - DNA, 19 bp, Mus musculus
  siRNA target sequence for Polr2b (NM_153798.1,2489-2507).
caagaagactctgttatca

SEQ ID NO: 464740 - DNA, 19 bp, Mus musculus
  siRNA target sequence for Polr2b (NM_153798.1,2520-2538).
ctgtggatcgaggcttttt

SEQ ID NO: 464741 - DNA, 19 bp, Mus musculus
  siRNA target sequence for Polr2b (NM_153798.1,2544-2562).
ctgttttctaccgatcata

SEQ ID NO: 464742 - DNA, 19 bp, Mus musculus
  siRNA target sequence for Polr2b (NM_153798.1,2546-2564).
gttttctaccgatcataca

SEQ ID NO: 464743 - DNA, 19 bp, Mus musculus
  siRNA target sequence for Polr2b (NM_153798.1,2554-2572).
ccgatcatacaaagaacaa

SEQ ID NO: 464744 - DNA, 19 bp, Mus musculus
  siRNA target sequence for Polr2b (NM_153798.1,2563-2581).
caaagaacaagagtctaaa

SEQ ID NO: 464745 - DNA, 19 bp, Mus musculus
  siRNA target sequence for Polr2b (NM_153798.1,2575-2593).
gtctaaaaagggatttgat

SEQ ID NO: 464746 - DNA, 19 bp, Mus musculus
  siRNA target sequence for Polr2b (NM_153798.1,2641-2659).
gaggcatgccatctatgaa

SEQ ID NO: 464747 - DNA, 19 bp, Mus musculus
  siRNA target sequence for Polr2b (NM_153798.1,2703-2721).
ccggagatgacgttattat

SEQ ID NO: 464748 - DNA, 19 bp, Mus musculus
  siRNA target sequence for Polr2b (NM_153798.1,2800-2818).
cactttcctcagaactagt

SEQ ID NO: 464749 - DNA, 19 bp, Mus musculus
  siRNA target sequence for Polr2b (NM_153798.1,2860-2878).
ggaaggatataaattttgt

SEQ ID NO: 464750 - DNA, 19 bp, Mus musculus
  siRNA target sequence for Polr2b (NM_153798.1,2886-2904).
gggtgcgctctgttagaat

SEQ ID NO: 464751 - DNA, 19 bp, Mus musculus
  siRNA target sequence for Polr2b (NM_153798.1,2887-2905).
ggtgcgctctgttagaatt

SEQ ID NO: 464752 - DNA, 19 bp, Mus musculus
  siRNA target sequence for Polr2b (NM_153798.1,2948-2966).
ggaacttgtggtattcagt

SEQ ID NO: 464753 - DNA, 19 bp, Mus musculus
  siRNA target sequence for Polr2b (NM_153798.1,2989-3007).
cacttgcgaaggcataact

SEQ ID NO: 464754 - DNA, 19 bp, Mus musculus
  siRNA target sequence for Polr2b (NM_153798.1,3037-3055).
cccctcccggatgacaatt

SEQ ID NO: 464755 - DNA, 19 bp, Mus musculus
  siRNA target sequence for Polr2b (NM_153798.1,3057-3075).
gtcacttgatcgaatgtct

SEQ ID NO: 464756 - DNA, 19 bp, Mus musculus
  siRNA target sequence for Polr2b (NM_153798.1,3090-3108).
ctgccaacaagggtgaaat

SEQ ID NO: 464757 - DNA, 19 bp, Mus musculus
  siRNA target sequence for Polr2b (NM_153798.1,3110-3128).
ggtgacgctactccattta

SEQ ID NO: 464758 - DNA, 19 bp, Mus musculus
  siRNA target sequence for Polr2b (NM_153798.1,3115-3133).
cgctactccatttaatgat

SEQ ID NO: 464759 - DNA, 19 bp, Mus musculus
  siRNA target sequence for Polr2b (NM_153798.1,3139-3157).
caatgtgcagaagatttct

SEQ ID NO: 464760 - DNA, 19 bp, Mus musculus
  siRNA target sequence for Polr2b (NM_153798.1,3193-3211).
gaacgaggtgctctacaat

SEQ ID NO: 464761 - DNA, 19 bp, Mus musculus
  siRNA target sequence for Polr2b (NM_153798.1,3217-3235).
cactggacgaaaaatcaca

SEQ ID NO: 464762 - DNA, 19 bp, Mus musculus
  siRNA target sequence for Polr2b (NM_153798.1,3308-3326).
gctaggggacccattcaga

SEQ ID NO: 464763 - DNA, 19 bp, Mus musculus
  siRNA target sequence for Polr2b (NM_153798.1,3309-3327).
ctaggggacccattcagat

SEQ ID NO: 464764 - DNA, 19 bp, Mus musculus
  siRNA target sequence for Polr2b (NM_153798.1,3313-3331).
gggacccattcagattctt

SEQ ID NO: 464765 - DNA, 19 bp, Mus musculus
  siRNA target sequence for Polr2b (NM_153798.1,3314-3332).
ggacccattcagattctta

SEQ ID NO: 464766 - DNA, 19 bp, Mus musculus
  siRNA target sequence for Polr2b (NM_153798.1,3315-3333).
gacccattcagattcttaa

SEQ ID NO: 464767 - DNA, 19 bp, Mus musculus
  siRNA target sequence for Polr2b (NM_153798.1,3369-3387).
gcctgcgcttcggagaaat

SEQ ID NO: 464768 - DNA, 19 bp, Mus musculus
  siRNA target sequence for Polr2b (NM_153798.1,3373-3391).
gcgcttcggagaaatggaa

SEQ ID NO: 464769 - DNA, 19 bp, Mus musculus
  siRNA target sequence for Polr2b (NM_153798.1,3477-3495).
gtaatctttgtggaataat

SEQ ID NO: 464770 - DNA, 19 bp, Mus musculus
  siRNA target sequence for Polr2b (NM_153798.1,3488-3506).
ggaataatggcaattgcta

SEQ ID NO: 464771 - DNA, 19 bp, Mus musculus
  siRNA target sequence for Polr2b (NM_153798.1,3503-3521).
gctaacacgaggactcata

SEQ ID NO: 464772 - DNA, 19 bp, Mus musculus
  siRNA target sequence for Polr2b (NM_153798.1,3508-3526).
cacgaggactcatacatat

SEQ ID NO: 464773 - DNA, 19 bp, Mus musculus
  siRNA target sequence for Polr2b (NM_153798.1,3510-3528).
cgaggactcatacatatga

SEQ ID NO: 464774 - DNA, 19 bp, Mus musculus
  siRNA target sequence for Polr2b (NM_153798.1,3531-3549).
gcaggggatgccgcaataa

SEQ ID NO: 464775 - DNA, 19 bp, Mus musculus
  siRNA target sequence for Polr2b (NM_153798.1,3542-3560).
cgcaataaaacccagattt

SEQ ID NO: 464776 - DNA, 19 bp, Mus musculus
  siRNA target sequence for Polr2b (NM_153798.1,3618-3636).
gcatcgcaccacgaatgat

SEQ ID NO: 464777 - DNA, 19 bp, Mus musculus
  siRNA target sequence for Polr2b (NM_153798.1,3626-3644).
ccacgaatgatgagtgttt

SEQ ID NO: 464778 - DNA, 19 bp, Mus musculus
  siRNA target sequence for Polr2j (NM_011293.1,52-70).
cttcgagggcgagaagaaa

SEQ ID NO: 464779 - DNA, 19 bp, Mus musculus
  siRNA target sequence for Polr2j (NM_011293.1,56-74).
gagggcgagaagaaaatca

SEQ ID NO: 464780 - DNA, 19 bp, Mus musculus
  siRNA target sequence for Polr2j (NM_011293.1,98-116).
cccaacgcctgcttgttca

SEQ ID NO: 464781 - DNA, 19 bp, Mus musculus
  siRNA target sequence for Polr2j (NM_011293.1,134-152).
cacactctggggaacatca

SEQ ID NO: 464782 - DNA, 19 bp, Mus musculus
  siRNA target sequence for Polr2j (NM_011293.1,136-154).
cactctggggaacatcatt

SEQ ID NO: 464783 - DNA, 19 bp, Mus musculus
  siRNA target sequence for Polr2j (NM_011293.1,138-156).
ctctggggaacatcattaa

SEQ ID NO: 464784 - DNA, 19 bp, Mus musculus
  siRNA target sequence for Pot1 (NM_133931.2,399-417).
caacagctccctatacata

SEQ ID NO: 464785 - DNA, 19 bp, Mus musculus
  siRNA target sequence for Pot1 (NM_133931.2,444-462).
gtacaattgccaatgtcta

SEQ ID NO: 464786 - DNA, 19 bp, Mus musculus
  siRNA target sequence for Pot1 (NM_133931.2,478-496).
ctttaagcctccgtatgtt

SEQ ID NO: 464787 - DNA, 19 bp, Mus musculus
  siRNA target sequence for Pot1 (NM_133931.2,484-502).
gcctccgtatgttagcaaa

SEQ ID NO: 464788 - DNA, 19 bp, Mus musculus
  siRNA target sequence for Pot1 (NM_133931.2,565-583).
gctctttagtggaaactat

SEQ ID NO: 464789 - DNA, 19 bp, Mus musculus
  siRNA target sequence for Pot1 (NM_133931.2,812-830).
cacatctcggcgtcttcaa

SEQ ID NO: 464790 - DNA, 19 bp, Mus musculus
  siRNA target sequence for Pot1 (NM_133931.2,814-832).
catctcggcgtcttcaact

SEQ ID NO: 464791 - DNA, 19 bp, Mus musculus
  siRNA target sequence for Pot1 (NM_133931.2,819-837).
cggcgtcttcaactttagt

SEQ ID NO: 464792 - DNA, 19 bp, Mus musculus
  siRNA target sequence for Pot1 (NM_133931.2,907-925).
ggattccacagcatttctt

SEQ ID NO: 464793 - DNA, 19 bp, Mus musculus
  siRNA target sequence for Pot1 (NM_133931.2,915-933).
cagcatttcttctaaaggt

SEQ ID NO: 464794 - DNA, 19 bp, Mus musculus
  siRNA target sequence for Pot1 (NM_133931.2,967-985).
gagagtctccacacaagat

SEQ ID NO: 464795 - DNA, 19 bp, Mus musculus
  siRNA target sequence for Pot1 (NM_133931.2,969-987).
gagtctccacacaagatct

SEQ ID NO: 464796 - DNA, 19 bp, Mus musculus
  siRNA target sequence for Pot1 (NM_133931.2,971-989).
gtctccacacaagatctaa

SEQ ID NO: 464797 - DNA, 19 bp, Mus musculus
  siRNA target sequence for Pot1 (NM_133931.2,973-991).
ctccacacaagatctaact

SEQ ID NO: 464798 - DNA, 19 bp, Mus musculus
  siRNA target sequence for Pot1 (NM_133931.2,975-993).
ccacacaagatctaacttt

SEQ ID NO: 464799 - DNA, 19 bp, Mus musculus
  siRNA target sequence for Pot1 (NM_133931.2,976-994).
cacacaagatctaactttt

SEQ ID NO: 464800 - DNA, 19 bp, Mus musculus
  siRNA target sequence for Pot1 (NM_133931.2,1040-1058).
gacattctagtctacgata

SEQ ID NO: 464801 - DNA, 19 bp, Mus musculus
  siRNA target sequence for Pot1 (NM_133931.2,1081-1099).
catcgaggttggatgcttt

SEQ ID NO: 464802 - DNA, 19 bp, Mus musculus
  siRNA target sequence for Pot1 (NM_133931.2,1084-1102).
cgaggttggatgctttcta

SEQ ID NO: 464803 - DNA, 19 bp, Mus musculus
  siRNA target sequence for Pot1 (NM_133931.2,1085-1103).
gaggttggatgctttctaa

SEQ ID NO: 464804 - DNA, 19 bp, Mus musculus
  siRNA target sequence for Pot1 (NM_133931.2,1150-1168).
cagcagttctgaatcatta

SEQ ID NO: 464805 - DNA, 19 bp, Mus musculus
  siRNA target sequence for Pot1 (NM_133931.2,1189-1207).
cggagggaccagttatggt

SEQ ID NO: 464806 - DNA, 19 bp, Mus musculus
  siRNA target sequence for Pot1 (NM_133931.2,1328-1346).
gacagctctgcactatcaa

SEQ ID NO: 464807 - DNA, 19 bp, Mus musculus
  siRNA target sequence for Pot1 (NM_133931.2,1359-1377).
gtgcagtatcaccttatga

SEQ ID NO: 464808 - DNA, 19 bp, Mus musculus
  siRNA target sequence for Pot1 (NM_133931.2,1362-1380).
cagtatcaccttatgaaga

SEQ ID NO: 464809 - DNA, 19 bp, Mus musculus
  siRNA target sequence for Pot1 (NM_133931.2,1397-1415).
gtctctgctacaatactta

SEQ ID NO: 464810 - DNA, 19 bp, Mus musculus
  siRNA target sequence for Pot1 (NM_133931.2,1401-1419).
ctgctacaatacttaccaa

SEQ ID NO: 464811 - DNA, 19 bp, Mus musculus
  siRNA target sequence for Pot1 (NM_133931.2,1412-1430).
cttaccaatcaccaacatt

SEQ ID NO: 464812 - DNA, 19 bp, Mus musculus
  siRNA target sequence for Pot1 (NM_133931.2,1453-1471).
catcttgacgcaaaaagct

SEQ ID NO: 464813 - DNA, 19 bp, Mus musculus
  siRNA target sequence for Pot1 (NM_133931.2,1548-1566).
gtcctaaatgtcattcagt

SEQ ID NO: 464814 - DNA, 19 bp, Mus musculus
  siRNA target sequence for Pot1 (NM_133931.2,1557-1575).
gtcattcagtacaagaagt

SEQ ID NO: 464815 - DNA, 19 bp, Mus musculus
  siRNA target sequence for Pot1 (NM_133931.2,1648-1666).
gacatcattgtattattca

SEQ ID NO: 464816 - DNA, 19 bp, Mus musculus
  siRNA target sequence for Pot1 (NM_133931.2,1732-1750).
cattctccctgcttcaagt

SEQ ID NO: 464817 - DNA, 19 bp, Mus musculus
  siRNA target sequence for Pot1 (NM_133931.2,1736-1754).
ctccctgcttcaagtgaat

SEQ ID NO: 464818 - DNA, 19 bp, Mus musculus
  siRNA target sequence for Pot1 (NM_133931.2,1742-1760).
gcttcaagtgaatgtctaa

SEQ ID NO: 464819 - DNA, 19 bp, Mus musculus
  siRNA target sequence for Pot1 (NM_133931.2,1779-1797).
ggctctgcgaagtctctaa

SEQ ID NO: 464820 - DNA, 19 bp, Mus musculus
  siRNA target sequence for Pot1 (NM_133931.2,1780-1798).
gctctgcgaagtctctaaa

SEQ ID NO: 464821 - DNA, 19 bp, Mus musculus
  siRNA target sequence for Pot1 (NM_133931.2,1888-1906).
gggaaaggtgcatcactat

SEQ ID NO: 464822 - DNA, 19 bp, Mus musculus
  siRNA target sequence for Pot1 (NM_133931.2,1920-1938).
gctcaagcttgaaacctat

SEQ ID NO: 464823 - DNA, 19 bp, Mus musculus
  siRNA target sequence for Pot1 (NM_133931.2,1921-1939).
ctcaagcttgaaacctata

SEQ ID NO: 464824 - DNA, 19 bp, Mus musculus
  siRNA target sequence for Pot1 (NM_133931.2,1923-1941).
caagcttgaaacctataca

SEQ ID NO: 464825 - DNA, 19 bp, Mus musculus
  siRNA target sequence for Pot1 (NM_133931.2,1926-1944).
gcttgaaacctatacaaaa

SEQ ID NO: 464826 - DNA, 19 bp, Mus musculus
  siRNA target sequence for Pot1 (NM_133931.2,1927-1945).
cttgaaacctatacaaaat

SEQ ID NO: 464827 - DNA, 19 bp, Mus musculus
  siRNA target sequence for Pot1 (NM_133931.2,1946-1964).
ctaaactcccgttttcata

SEQ ID NO: 464828 - DNA, 19 bp, Mus musculus
  siRNA target sequence for Pot1 (NM_133931.2,1951-1969).
ctcccgttttcataaagga

SEQ ID NO: 464829 - DNA, 19 bp, Mus musculus
  siRNA target sequence for Pot1 (NM_133931.2,2009-2027).
gtgccgctgcagtatgtgt

SEQ ID NO: 464830 - DNA, 19 bp, Mus musculus
  siRNA target sequence for Pot1 (NM_133931.2,2058-2076).
caggggtgttggaagctta

SEQ ID NO: 464831 - DNA, 19 bp, Mus musculus
  siRNA target sequence for Pot1 (NM_133931.2,2069-2087).
gaagcttacctcaaggatt

SEQ ID NO: 464832 - DNA, 19 bp, Mus musculus
  siRNA target sequence for Pot1 (NM_133931.2,2134-2152).
cgaccttcagagaagtcta

SEQ ID NO: 464833 - DNA, 19 bp, Mus musculus
  siRNA target sequence for Pot1 (NM_133931.2,2153-2171).
gaaacgatcatggatatga

SEQ ID NO: 464834 - DNA, 19 bp, Mus musculus
  siRNA target sequence for Pot1 (NM_133931.2,2170-2188).
gatatgtcccccaggaata

SEQ ID NO: 464835 - DNA, 19 bp, Mus musculus
  siRNA target sequence for Pot1 (NM_133931.2,2258-2276).
cgaatttgctaccagattt

SEQ ID NO: 464836 - DNA, 19 bp, Mus musculus
  siRNA target sequence for Pot1 (NM_133931.2,2272-2290).
gatttttgatactacagtt

SEQ ID NO: 464837 - DNA, 19 bp, Mus musculus
  siRNA target sequence for Ppfibp2 (NM_008905.1,201-219).
gatcattgcaggcactaaa

SEQ ID NO: 464838 - DNA, 19 bp, Mus musculus
  siRNA target sequence for Ppfibp2 (NM_008905.1,291-309).
gcctgtgctccatctcatt

SEQ ID NO: 464839 - DNA, 19 bp, Mus musculus
  siRNA target sequence for Ppfibp2 (NM_008905.1,384-402).
cccaacagctacctacata

SEQ ID NO: 464840 - DNA, 19 bp, Mus musculus
  siRNA target sequence for Ppfibp2 (NM_008905.1,385-403).
ccaacagctacctacataa

SEQ ID NO: 464841 - DNA, 19 bp, Mus musculus
  siRNA target sequence for Ppfibp2 (NM_008905.1,441-459).
ccacggtgctgctagtaat

SEQ ID NO: 464842 - DNA, 19 bp, Mus musculus
  siRNA target sequence for Ppfibp2 (NM_008905.1,444-462).
cggtgctgctagtaatgaa

SEQ ID NO: 464843 - DNA, 19 bp, Mus musculus
  siRNA target sequence for Ppfibp2 (NM_008905.1,449-467).
ctgctagtaatgaaaccta

SEQ ID NO: 464844 - DNA, 19 bp, Mus musculus
  siRNA target sequence for Ppfibp2 (NM_008905.1,482-500).
cacggctagaaggagataa

SEQ ID NO: 464845 - DNA, 19 bp, Mus musculus
  siRNA target sequence for Ppfibp2 (NM_008905.1,662-680).
cccagaagttggatctgat

SEQ ID NO: 464846 - DNA, 19 bp, Mus musculus
  siRNA target sequence for Ppfibp2 (NM_008905.1,781-799).
cttaagcacctcaaaatca

SEQ ID NO: 464847 - DNA, 19 bp, Mus musculus
  siRNA target sequence for Ppfibp2 (NM_008905.1,962-980).
cagagcgagatcaagaaat

SEQ ID NO: 464848 - DNA, 19 bp, Mus musculus
  siRNA target sequence for Ppfibp2 (NM_008905.1,1055-1073).
cagggctgttgaacaagta

SEQ ID NO: 464849 - DNA, 19 bp, Mus musculus
  siRNA target sequence for Ppfibp2 (NM_008905.1,1079-1097).
gggtaaaggagattgtgat

SEQ ID NO: 464850 - DNA, 19 bp, Mus musculus
  siRNA target sequence for Ppfibp2 (NM_008905.1,1121-1139).
gaaccctctccatcaatga

SEQ ID NO: 464851 - DNA, 19 bp, Mus musculus
  siRNA target sequence for Ppfibp2 (NM_008905.1,1150-1168).
gagggaagcttccgaaaat

SEQ ID NO: 464852 - DNA, 19 bp, Mus musculus
  siRNA target sequence for Ppfibp2 (NM_008905.1,1200-1218).
cccgaagcaagagatatca

SEQ ID NO: 464853 - DNA, 19 bp, Mus musculus
  siRNA target sequence for Ppfibp2 (NM_008905.1,1298-1316).
cctgcagtctagaagactt

SEQ ID NO: 464854 - DNA, 19 bp, Mus musculus
  siRNA target sequence for Ppfibp2 (NM_008905.1,1321-1339).
cgtgaatctggggataagt

SEQ ID NO: 464855 - DNA, 19 bp, Mus musculus
  siRNA target sequence for Ppfibp2 (NM_008905.1,1404-1422).
gaaataccccacattacct

SEQ ID NO: 464856 - DNA, 19 bp, Mus musculus
  siRNA target sequence for Ppfibp2 (NM_008905.1,1570-1588).
ggctgggaagatatagtct

SEQ ID NO: 464857 - DNA, 19 bp, Mus musculus
  siRNA target sequence for Ppfibp2 (NM_008905.1,1649-1667).
ggagccccaaaggcattaa

SEQ ID NO: 464858 - DNA, 19 bp, Mus musculus
  siRNA target sequence for Ppfibp2 (NM_008905.1,1691-1709).
gaactcagtctggaaactt

SEQ ID NO: 464859 - DNA, 19 bp, Mus musculus
  siRNA target sequence for Ppfibp2 (NM_008905.1,1765-1783).
gcgggaccaaggctttcta

SEQ ID NO: 464860 - DNA, 19 bp, Mus musculus
  siRNA target sequence for Ppfibp2 (NM_008905.1,1792-1810).
gacaccaagggacagaaat

SEQ ID NO: 464861 - DNA, 19 bp, Mus musculus
  siRNA target sequence for Ppfibp2 (NM_008905.1,1794-1812).
caccaagggacagaaatgt

SEQ ID NO: 464862 - DNA, 19 bp, Mus musculus
  siRNA target sequence for Ppfibp2 (NM_008905.1,1842-1860).
cacagaacgcgtatgtaca

SEQ ID NO: 464863 - DNA, 19 bp, Mus musculus
  siRNA target sequence for Ppfibp2 (NM_008905.1,1856-1874).
gtacatggatggaggattt

SEQ ID NO: 464864 - DNA, 19 bp, Mus musculus
  siRNA target sequence for Ppfibp2 (NM_008905.1,1876-1894).
ggcctgggtcagtatgtga

SEQ ID NO: 464865 - DNA, 19 bp, Mus musculus
  siRNA target sequence for Ppfibp2 (NM_008905.1,1877-1895).
gcctgggtcagtatgtgat

SEQ ID NO: 464866 - DNA, 19 bp, Mus musculus
  siRNA target sequence for Ppfibp2 (NM_008905.1,1881-1899).
gggtcagtatgtgatcttt

SEQ ID NO: 464867 - DNA, 19 bp, Mus musculus
  siRNA target sequence for Ppfibp2 (NM_008905.1,1911-1929).
ggtgacatctggacataca

SEQ ID NO: 464868 - DNA, 19 bp, Mus musculus
  siRNA target sequence for Ppfibp2 (NM_008905.1,1914-1932).
gacatctggacatacacta

SEQ ID NO: 464869 - DNA, 19 bp, Mus musculus
  siRNA target sequence for Ppfibp2 (NM_008905.1,2002-2020).
gttttagcagtgaaagcta

SEQ ID NO: 464870 - DNA, 19 bp, Mus musculus
  siRNA target sequence for Ppfibp2 (NM_008905.1,2070-2088).
gacacggtggcttgatgat

SEQ ID NO: 464871 - DNA, 19 bp, Mus musculus
  siRNA target sequence for Ppfibp2 (NM_008905.1,2072-2090).
cacggtggcttgatgatat

SEQ ID NO: 464872 - DNA, 19 bp, Mus musculus
  siRNA target sequence for Ppfibp2 (NM_008905.1,2139-2157).
gcgaatgctgcaataccta

SEQ ID NO: 464873 - DNA, 19 bp, Mus musculus
  siRNA target sequence for Ppfibp2 (NM_008905.1,2140-2158).
cgaatgctgcaatacctaa

SEQ ID NO: 464874 - DNA, 19 bp, Mus musculus
  siRNA target sequence for Ppfibp2 (NM_008905.1,2170-2188).
ctactcttcttaaaagtca

SEQ ID NO: 464875 - DNA, 19 bp, Mus musculus
  siRNA target sequence for Ppfibp2 (NM_008905.1,2222-2240).
ctattcacgtgctacatgt

SEQ ID NO: 464876 - DNA, 19 bp, Mus musculus
  siRNA target sequence for Ppfibp2 (NM_008905.1,2230-2248).
gtgctacatgtcaacaagt

SEQ ID NO: 464877 - DNA, 19 bp, Mus musculus
  siRNA target sequence for Ppfibp2 (NM_008905.1,2436-2454).
ggacaccctggctatgctt

SEQ ID NO: 464878 - DNA, 19 bp, Mus musculus
  siRNA target sequence for Ppfibp2 (NM_008905.1,2443-2461).
ctggctatgcttcttaaca

SEQ ID NO: 464879 - DNA, 19 bp, Mus musculus
  siRNA target sequence for Ppfibp2 (NM_008905.1,2592-2610).
caaagttcggcctaggaaa

SEQ ID NO: 464880 - DNA, 19 bp, Mus musculus
  siRNA target sequence for Ppfibp2 (NM_008905.1,2656-2674).
gaatctacagattacattt

SEQ ID NO: 464881 - DNA, 19 bp, Mus musculus
  siRNA target sequence for Ppfibp2 (NM_008905.1,2772-2790).
ggaccaggtgggacagata

SEQ ID NO: 464882 - DNA, 19 bp, Mus musculus
  siRNA target sequence for Ppfibp2 (NM_008905.1,2773-2791).
gaccaggtgggacagataa

SEQ ID NO: 464883 - DNA, 19 bp, Mus musculus
  siRNA target sequence for Prdm1 (NM_007548.1,282-300).
gccaaaggctgcattttaa

SEQ ID NO: 464884 - DNA, 19 bp, Mus musculus
  siRNA target sequence for Prdm1 (NM_007548.1,311-329).
cttcaaggcagtctacttt

SEQ ID NO: 464885 - DNA, 19 bp, Mus musculus
  siRNA target sequence for Prdm1 (NM_007548.1,340-358).
ggactcttactcaactgta

SEQ ID NO: 464886 - DNA, 19 bp, Mus musculus
  siRNA target sequence for Prdm1 (NM_007548.1,359-377).
caagctgcccccaagtcta

SEQ ID NO: 464887 - DNA, 19 bp, Mus musculus
  siRNA target sequence for Prdm1 (NM_007548.1,381-399).
ccggctccgtgaagtttca

SEQ ID NO: 464888 - DNA, 19 bp, Mus musculus
  siRNA target sequence for Prdm1 (NM_007548.1,382-400).
cggctccgtgaagtttcaa

SEQ ID NO: 464889 - DNA, 19 bp, Mus musculus
  siRNA target sequence for Prdm1 (NM_007548.1,436-454).
ggaggacgctgatatgact

SEQ ID NO: 464890 - DNA, 19 bp, Mus musculus
  siRNA target sequence for Prdm1 (NM_007548.1,437-455).
gaggacgctgatatgactt

SEQ ID NO: 464891 - DNA, 19 bp, Mus musculus
  siRNA target sequence for Prdm1 (NM_007548.1,440-458).
gacgctgatatgactttgt

SEQ ID NO: 464892 - DNA, 19 bp, Mus musculus
  siRNA target sequence for Prdm1 (NM_007548.1,523-541).
cgctgacgggggtacttct

SEQ ID NO: 464893 - DNA, 19 bp, Mus musculus
  siRNA target sequence for Prdm1 (NM_007548.1,567-585).
ggaacctgcttttcaagta

SEQ ID NO: 464894 - DNA, 19 bp, Mus musculus
  siRNA target sequence for Prdm1 (NM_007548.1,568-586).
gaacctgcttttcaagtat

SEQ ID NO: 464895 - DNA, 19 bp, Mus musculus
  siRNA target sequence for Prdm1 (NM_007548.1,608-626).
gttattggcgtggtaagta

SEQ ID NO: 464896 - DNA, 19 bp, Mus musculus
  siRNA target sequence for Prdm1 (NM_007548.1,619-637).
ggtaagtaaggagtacata

SEQ ID NO: 464897 - DNA, 19 bp, Mus musculus
  siRNA target sequence for Prdm1 (NM_007548.1,660-678).
ccctcatcggtgaagtcta

SEQ ID NO: 464898 - DNA, 19 bp, Mus musculus
  siRNA target sequence for Prdm1 (NM_007548.1,667-685).
cggtgaagtctacactaat

SEQ ID NO: 464899 - DNA, 19 bp, Mus musculus
  siRNA target sequence for Prdm1 (NM_007548.1,669-687).
gtgaagtctacactaatga

SEQ ID NO: 464900 - DNA, 19 bp, Mus musculus
  siRNA target sequence for Prdm1 (NM_007548.1,700-718).
gaatgccaacaggaagtat

SEQ ID NO: 464901 - DNA, 19 bp, Mus musculus
  siRNA target sequence for Prdm1 (NM_007548.1,851-869).
gggatgaacatctacttct

SEQ ID NO: 464902 - DNA, 19 bp, Mus musculus
  siRNA target sequence for Prdm1 (NM_007548.1,852-870).
ggatgaacatctacttcta

SEQ ID NO: 464903 - DNA, 19 bp, Mus musculus
  siRNA target sequence for Prdm1 (NM_007548.1,891-909).
ccaaccaggaacttcttgt

SEQ ID NO: 464904 - DNA, 19 bp, Mus musculus
  siRNA target sequence for Prdm1 (NM_007548.1,937-955).
gctccactacccttatcct

SEQ ID NO: 464905 - DNA, 19 bp, Mus musculus
  siRNA target sequence for Prdm1 (NM_007548.1,1003-1021).
gcaatacagtagtgagaaa

SEQ ID NO: 464906 - DNA, 19 bp, Mus musculus
  siRNA target sequence for Prdm1 (NM_007548.1,1004-1022).
caatacagtagtgagaaaa

SEQ ID NO: 464907 - DNA, 19 bp, Mus musculus
  siRNA target sequence for Prdm1 (NM_007548.1,1060-1078).
cagcgtgaaagaaattcta

SEQ ID NO: 464908 - DNA, 19 bp, Mus musculus
  siRNA target sequence for Prdm1 (NM_007548.1,1062-1080).
gcgtgaaagaaattctaaa

SEQ ID NO: 464909 - DNA, 19 bp, Mus musculus
  siRNA target sequence for Prdm1 (NM_007548.1,1111-1129).
catctaccgttccaacatt

SEQ ID NO: 464910 - DNA, 19 bp, Mus musculus
  siRNA target sequence for Prdm1 (NM_007548.1,1195-1213).
ctaccctcgggtggtttat

SEQ ID NO: 464911 - DNA, 19 bp, Mus musculus
  siRNA target sequence for Prdm1 (NM_007548.1,1198-1216).
ccctcgggtggtttatcct

SEQ ID NO: 464912 - DNA, 19 bp, Mus musculus
  siRNA target sequence for Prdm1 (NM_007548.1,1199-1217).
cctcgggtggtttatccta

SEQ ID NO: 464913 - DNA, 19 bp, Mus musculus
  siRNA target sequence for Prdm1 (NM_007548.1,1200-1218).
ctcgggtggtttatcctat

SEQ ID NO: 464914 - DNA, 19 bp, Mus musculus
  siRNA target sequence for Prdm1 (NM_007548.1,1229-1247).
ctgccagaagactttttga

SEQ ID NO: 464915 - DNA, 19 bp, Mus musculus
  siRNA target sequence for Prdm1 (NM_007548.1,1270-1288).
ggagagacccacctacata

SEQ ID NO: 464916 - DNA, 19 bp, Mus musculus
  siRNA target sequence for Prdm1 (NM_007548.1,1271-1289).
gagagacccacctacataa

SEQ ID NO: 464917 - DNA, 19 bp, Mus musculus
  siRNA target sequence for Prdm1 (NM_007548.1,1273-1291).
gagacccacctacataact

SEQ ID NO: 464918 - DNA, 19 bp, Mus musculus
  siRNA target sequence for Prdm1 (NM_007548.1,1430-1448).
gactcctactcctacttga

SEQ ID NO: 464919 - DNA, 19 bp, Mus musculus
  siRNA target sequence for Prdm1 (NM_007548.1,1432-1450).
ctcctactcctacttgaat

SEQ ID NO: 464920 - DNA, 19 bp, Mus musculus
  siRNA target sequence for Prdm1 (NM_007548.1,1435-1453).
ctactcctacttgaatgtt

SEQ ID NO: 464921 - DNA, 19 bp, Mus musculus
  siRNA target sequence for Prdm1 (NM_007548.1,1517-1535).
gctttcattccttcttaca

SEQ ID NO: 464922 - DNA, 19 bp, Mus musculus
  siRNA target sequence for Prdm1 (NM_007548.1,1561-1579).
gccaccgtacggcattagt

SEQ ID NO: 464923 - DNA, 19 bp, Mus musculus
  siRNA target sequence for Prdm1 (NM_007548.1,1562-1580).
ccaccgtacggcattagtt

SEQ ID NO: 464924 - DNA, 19 bp, Mus musculus
  siRNA target sequence for Prdm1 (NM_007548.1,1567-1585).
gtacggcattagttccaat

SEQ ID NO: 464925 - DNA, 19 bp, Mus musculus
  siRNA target sequence for Prdm1 (NM_007548.1,1895-1913).
gtggtacaacccaaagcta

SEQ ID NO: 464926 - DNA, 19 bp, Mus musculus
  siRNA target sequence for Prdm1 (NM_007548.1,1939-1957).
cactgacggagccatgaat

SEQ ID NO: 464927 - DNA, 19 bp, Mus musculus
  siRNA target sequence for Prdm1 (NM_007548.1,1941-1959).
ctgacggagccatgaatct

SEQ ID NO: 464928 - DNA, 19 bp, Mus musculus
  siRNA target sequence for Prdm1 (NM_007548.1,1949-1967).
gccatgaatctcattaaaa

SEQ ID NO: 464929 - DNA, 19 bp, Mus musculus
  siRNA target sequence for Prdm1 (NM_007548.1,1950-1968).
ccatgaatctcattaaaaa

SEQ ID NO: 464930 - DNA, 19 bp, Mus musculus
  siRNA target sequence for Prdm1 (NM_007548.1,2020-2038).
gaatggcaagatcaagtat

SEQ ID NO: 464931 - DNA, 19 bp, Mus musculus
  siRNA target sequence for Prdm1 (NM_007548.1,2106-2124).
gtggagaacggcctttcaa

SEQ ID NO: 464932 - DNA, 19 bp, Mus musculus
  siRNA target sequence for Prdm1 (NM_007548.1,2136-2154).
gcaacaagggttttactca

SEQ ID NO: 464933 - DNA, 19 bp, Mus musculus
  siRNA target sequence for Prdm1 (NM_007548.1,2216-2234).
gtctgccacaagagattta

SEQ ID NO: 464934 - DNA, 19 bp, Mus musculus
  siRNA target sequence for Prdm1 (NM_007548.1,2235-2253).
gcagcacaagcaatctcaa

SEQ ID NO: 464935 - DNA, 19 bp, Mus musculus
  siRNA target sequence for Prdm1 (NM_007548.1,2482-2500).
gacccgaatcaatgaagaa

SEQ ID NO: 464936 - DNA, 19 bp, Mus musculus
  siRNA target sequence for Prdm1 (NM_007548.1,2622-2640).
ccagtctgaaagtgtcttt

SEQ ID NO: 464937 - DNA, 19 bp, Mus musculus
  siRNA target sequence for Prdm1 (NM_007548.1,2675-2693).
gggtgcagcctctatgagt

SEQ ID NO: 464938 - DNA, 19 bp, Mus musculus
  siRNA target sequence for Prdm1 (NM_007548.1,2755-2773).
ggtcaaacaagaaacagtt

SEQ ID NO: 464939 - DNA, 19 bp, Mus musculus
  siRNA target sequence for Preb (NM_016703.1,362-380).
ggcgcttgctggtgacatt

SEQ ID NO: 464940 - DNA, 19 bp, Mus musculus
  siRNA target sequence for Preb (NM_016703.1,364-382).
cgcttgctggtgacattct

SEQ ID NO: 464941 - DNA, 19 bp, Mus musculus
  siRNA target sequence for Preb (NM_016703.1,515-533).
gaaatcgggagcacaagtt

SEQ ID NO: 464942 - DNA, 19 bp, Mus musculus
  siRNA target sequence for Preb (NM_016703.1,546-564).
gaactcaaagtaaagaatt

SEQ ID NO: 464943 - DNA, 19 bp, Mus musculus
  siRNA target sequence for Preb (NM_016703.1,769-787).
cagtgggctgggactttaa

SEQ ID NO: 464944 - DNA, 19 bp, Mus musculus
  siRNA target sequence for Preb (NM_016703.1,824-842).
gctacagtggcaagagaat

SEQ ID NO: 464945 - DNA, 19 bp, Mus musculus
  siRNA target sequence for Preb (NM_016703.1,843-861).
ggaccagcctcttctaata

SEQ ID NO: 464946 - DNA, 19 bp, Mus musculus
  siRNA target sequence for Preb (NM_016703.1,1104-1122).
gtcgccatctacatagctt

SEQ ID NO: 464947 - DNA, 19 bp, Mus musculus
  siRNA target sequence for Preb (NM_016703.1,1131-1149).
cagcgcctgtattatgtga

SEQ ID NO: 464948 - DNA, 19 bp, Mus musculus
  siRNA target sequence for Preb (NM_016703.1,1323-1341).
ctgtgtgtcggccttatta

SEQ ID NO: 464949 - DNA, 19 bp, Mus musculus
  siRNA target sequence for Preb (NM_016703.1,1327-1345).
gtgtcggccttattattgt

SEQ ID NO: 464950 - DNA, 19 bp, Mus musculus
  siRNA target sequence for Preb (NM_016703.1,1329-1347).
gtcggccttattattgtga

SEQ ID NO: 464951 - DNA, 19 bp, Mus musculus
  siRNA target sequence for Prim2 (NM_008922.1,183-201).
ggcgggtgaccagagaaat

SEQ ID NO: 464952 - DNA, 19 bp, Mus musculus
  siRNA target sequence for Prim2 (NM_008922.1,237-255).
gccgcctactgaaaacata

SEQ ID NO: 464953 - DNA, 19 bp, Mus musculus
  siRNA target sequence for Prim2 (NM_008922.1,238-256).
ccgcctactgaaaacatat

SEQ ID NO: 464954 - DNA, 19 bp, Mus musculus
  siRNA target sequence for Prim2 (NM_008922.1,257-275).
cgttgacggagtttgaaaa

SEQ ID NO: 464955 - DNA, 19 bp, Mus musculus
  siRNA target sequence for Prim2 (NM_008922.1,288-306).
cagagttaaattgcttaaa

SEQ ID NO: 464956 - DNA, 19 bp, Mus musculus
  siRNA target sequence for Prim2 (NM_008922.1,292-310).
gttaaattgcttaaagcaa

SEQ ID NO: 464957 - DNA, 19 bp, Mus musculus
  siRNA target sequence for Prim2 (NM_008922.1,319-337).
ctcggtgtgagctatgtga

SEQ ID NO: 464958 - DNA, 19 bp, Mus musculus
  siRNA target sequence for Prim2 (NM_008922.1,321-339).
cggtgtgagctatgtgaaa

SEQ ID NO: 464959 - DNA, 19 bp, Mus musculus
  siRNA target sequence for Prim2 (NM_008922.1,334-352).
gtgaaaggaaccgaacaat

SEQ ID NO: 464960 - DNA, 19 bp, Mus musculus
  siRNA target sequence for Prim2 (NM_008922.1,344-362).
ccgaacaataccagagtaa

SEQ ID NO: 464961 - DNA, 19 bp, Mus musculus
  siRNA target sequence for Prim2 (NM_008922.1,345-363).
cgaacaataccagagtaaa

SEQ ID NO: 464962 - DNA, 19 bp, Mus musculus
  siRNA target sequence for Prim2 (NM_008922.1,346-364).
gaacaataccagagtaaat

SEQ ID NO: 464963 - DNA, 19 bp, Mus musculus
  siRNA target sequence for Prim2 (NM_008922.1,379-397).
cgaaagctcaagttttcct

SEQ ID NO: 464964 - DNA, 19 bp, Mus musculus
  siRNA target sequence for Prim2 (NM_008922.1,380-398).
gaaagctcaagttttccta

SEQ ID NO: 464965 - DNA, 19 bp, Mus musculus
  siRNA target sequence for Prim2 (NM_008922.1,439-457).
gaccacatctcccacttta

SEQ ID NO: 464966 - DNA, 19 bp, Mus musculus
  siRNA target sequence for Prim2 (NM_008922.1,444-462).
catctcccactttatccta

SEQ ID NO: 464967 - DNA, 19 bp, Mus musculus
  siRNA target sequence for Prim2 (NM_008922.1,477-495).
ccagtcggaagatcttaga

SEQ ID NO: 464968 - DNA, 19 bp, Mus musculus
  siRNA target sequence for Prim2 (NM_008922.1,487-505).
gatcttagacgatggttta

SEQ ID NO: 464969 - DNA, 19 bp, Mus musculus
  siRNA target sequence for Prim2 (NM_008922.1,520-538).
gatctgcttcggtttcgat

SEQ ID NO: 464970 - DNA, 19 bp, Mus musculus
  siRNA target sequence for Prim2 (NM_008922.1,529-547).
cggtttcgattcagtattt

SEQ ID NO: 464971 - DNA, 19 bp, Mus musculus
  siRNA target sequence for Prim2 (NM_008922.1,569-587).
gtttcttgaaggatagtca

SEQ ID NO: 464972 - DNA, 19 bp, Mus musculus
  siRNA target sequence for Prim2 (NM_008922.1,579-597).
ggatagtcatttgcatttt

SEQ ID NO: 464973 - DNA, 19 bp, Mus musculus
  siRNA target sequence for Prim2 (NM_008922.1,591-609).
gcattttgaggctatcagt

SEQ ID NO: 464974 - DNA, 19 bp, Mus musculus
  siRNA target sequence for Prim2 (NM_008922.1,623-641).
cccttcgggaacaggatat

SEQ ID NO: 464975 - DNA, 19 bp, Mus musculus
  siRNA target sequence for Prim2 (NM_008922.1,625-643).
cttcgggaacaggatatca

SEQ ID NO: 464976 - DNA, 19 bp, Mus musculus
  siRNA target sequence for Prim2 (NM_008922.1,659-677).
gcctaagtgggatcaagtt

SEQ ID NO: 464977 - DNA, 19 bp, Mus musculus
  siRNA target sequence for Prim2 (NM_008922.1,679-697).
gagtcagagtcagtttata

SEQ ID NO: 464978 - DNA, 19 bp, Mus musculus
  siRNA target sequence for Prim2 (NM_008922.1,683-701).
cagagtcagtttataaggt

SEQ ID NO: 464979 - DNA, 19 bp, Mus musculus
  siRNA target sequence for Prim2 (NM_008922.1,731-749).
gaggaaggaaagtctactt

SEQ ID NO: 464980 - DNA, 19 bp, Mus musculus
  siRNA target sequence for Prim2 (NM_008922.1,764-782).
cttatgtgccacttaagga

SEQ ID NO: 464981 - DNA, 19 bp, Mus musculus
  siRNA target sequence for Prim2 (NM_008922.1,898-916).
cacctcagtcattcttaca

SEQ ID NO: 464982 - DNA, 19 bp, Mus musculus
  siRNA target sequence for Prim2 (NM_008922.1,945-963).
caccggcaagatttcctta

SEQ ID NO: 464983 - DNA, 19 bp, Mus musculus
  siRNA target sequence for Prim2 (NM_008922.1,948-966).
cggcaagatttccttagat

SEQ ID NO: 464984 - DNA, 19 bp, Mus musculus
  siRNA target sequence for Prim2 (NM_008922.1,950-968).
gcaagatttccttagatca

SEQ ID NO: 464985 - DNA, 19 bp, Mus musculus
  siRNA target sequence for Prim2 (NM_008922.1,973-991).
gattcgctgtctacaaaat

SEQ ID NO: 464986 - DNA, 19 bp, Mus musculus
  siRNA target sequence for Prim2 (NM_008922.1,977-995).
cgctgtctacaaaatcctt

SEQ ID NO: 464987 - DNA, 19 bp, Mus musculus
  siRNA target sequence for Prim2 (NM_008922.1,1125-1143).
gaagcaggagtttatcaga

SEQ ID NO: 464988 - DNA, 19 bp, Mus musculus
  siRNA target sequence for Prim2 (NM_008922.1,1152-1170).
ggacccagacaagtttgat

SEQ ID NO: 464989 - DNA, 19 bp, Mus musculus
  siRNA target sequence for Prim2 (NM_008922.1,1164-1182).
gtttgataaaggttactct

SEQ ID NO: 464990 - DNA, 19 bp, Mus musculus
  siRNA target sequence for Prim2 (NM_008922.1,1168-1186).
gataaaggttactcttaca

SEQ ID NO: 464991 - DNA, 19 bp, Mus musculus
  siRNA target sequence for Prim2 (NM_008922.1,1194-1212).
gcatagcttcggaaaggaa

SEQ ID NO: 464992 - DNA, 19 bp, Mus musculus
  siRNA target sequence for Prim2 (NM_008922.1,1213-1231).
ggcaagaggacagactata

SEQ ID NO: 464993 - DNA, 19 bp, Mus musculus
  siRNA target sequence for Prim2 (NM_008922.1,1225-1243).
gactatacgcctttcagtt

SEQ ID NO: 464994 - DNA, 19 bp, Mus musculus
  siRNA target sequence for Prim2 (NM_008922.1,1241-1259).
gttgcatgaagattatcct

SEQ ID NO: 464995 - DNA, 19 bp, Mus musculus
  siRNA target sequence for Prim2 (NM_008922.1,1271-1289).
caggccaaggggattatca

SEQ ID NO: 464996 - DNA, 19 bp, Mus musculus
  siRNA target sequence for Prim2 (NM_008922.1,1361-1379).
cggggatcagccagatttt

SEQ ID NO: 464997 - DNA, 19 bp, Mus musculus
  siRNA target sequence for Prim2 (NM_008922.1,1370-1388).
gccagattttggatttggt

SEQ ID NO: 464998 - DNA, 19 bp, Mus musculus
  siRNA target sequence for Prim2 (NM_008922.1,1408-1426).
gtagcctgtcagaagtact

SEQ ID NO: 464999 - DNA, 19 bp, Mus musculus
  siRNA target sequence for Prim2 (NM_008922.1,1425-1443).
cttcgagatgacacataat

SEQ ID NO: 465000 - DNA, 19 bp, Mus musculus
  siRNA target sequence for Prim2 (NM_008922.1,1447-1465).
gacgattgtggcttttctt

SEQ ID NO: 465001 - DNA, 19 bp, Mus musculus
  siRNA target sequence for Prim2 (NM_008922.1,1471-1489).
catccaaatcagttctttt

SEQ ID NO: 465002 - DNA, 19 bp, Mus musculus
  siRNA target sequence for Prim2 (NM_008922.1,1492-1510).
gagagccagcgcatcctaa

SEQ ID NO: 465003 - DNA, 19 bp, Mus musculus
  siRNA target sequence for Prim2 (NM_008922.1,1506-1524).
cctaactggtggcaaagat

SEQ ID NO: 465004 - DNA, 19 bp, Mus musculus
  siRNA target sequence for Prim2 (NM_008922.1,1507-1525).
ctaactggtggcaaagata

SEQ ID NO: 465005 - DNA, 19 bp, Mus musculus
  siRNA target sequence for Prim2 (NM_008922.1,1642-1660).
gggctggaagagtactttt

SEQ ID NO: 465006 - DNA, 19 bp, Mus musculus
  siRNA target sequence for Prm1 (NM_013637.2,105-123).
cgatgctgccgcagcaaaa

SEQ ID NO: 465007 - DNA, 19 bp, Mus musculus
  siRNA target sequence for Prm1 (NM_013637.2,216-234).
cgctcatacaccataaggt

SEQ ID NO: 465008 - DNA, 19 bp, Mus musculus
  siRNA target sequence for Prm3 (NM_013638.1,101-119).
cctgtgtgagtcaagacaa

SEQ ID NO: 465009 - DNA, 19 bp, Mus musculus
  siRNA target sequence for Prm3 (NM_013638.1,104-122).
gtgtgagtcaagacaactt

SEQ ID NO: 465010 - DNA, 19 bp, Mus musculus
  siRNA target sequence for Prm3 (NM_013638.1,231-249).
gctggagcccgaaaagcaa

SEQ ID NO: 465011 - DNA, 19 bp, Mus musculus
  siRNA target sequence for Prox1 (NM_008937.2,534-552).
ggttgacattggagtgaaa

SEQ ID NO: 465012 - DNA, 19 bp, Mus musculus
  siRNA target sequence for Prox1 (NM_008937.2,535-553).
gttgacattggagtgaaaa

SEQ ID NO: 465013 - DNA, 19 bp, Mus musculus
  siRNA target sequence for Prox1 (NM_008937.2,538-556).
gacattggagtgaaaagga

SEQ ID NO: 465014 - DNA, 19 bp, Mus musculus
  siRNA target sequence for Prox1 (NM_008937.2,564-582).
gacagcatctgcatttttt

SEQ ID NO: 465015 - DNA, 19 bp, Mus musculus
  siRNA target sequence for Prox1 (NM_008937.2,569-587).
catctgcattttttgctaa

SEQ ID NO: 465016 - DNA, 19 bp, Mus musculus
  siRNA target sequence for Prox1 (NM_008937.2,584-602).
ctaaggcaagggcaacatt

SEQ ID NO: 465017 - DNA, 19 bp, Mus musculus
  siRNA target sequence for Prox1 (NM_008937.2,633-651).
gcaggatgttgaatattct

SEQ ID NO: 465018 - DNA, 19 bp, Mus musculus
  siRNA target sequence for Prox1 (NM_008937.2,705-723).
gagggcgaactcgtatgaa

SEQ ID NO: 465019 - DNA, 19 bp, Mus musculus
  siRNA target sequence for Prox1 (NM_008937.2,707-725).
gggcgaactcgtatgaaga

SEQ ID NO: 465020 - DNA, 19 bp, Mus musculus
  siRNA target sequence for Prox1 (NM_008937.2,708-726).
ggcgaactcgtatgaagat

SEQ ID NO: 465021 - DNA, 19 bp, Mus musculus
  siRNA target sequence for Prox1 (NM_008937.2,742-760).
ccaggagcaactataattt

SEQ ID NO: 465022 - DNA, 19 bp, Mus musculus
  siRNA target sequence for Prox1 (NM_008937.2,798-816).
caccgagcccagtttccaa

SEQ ID NO: 465023 - DNA, 19 bp, Mus musculus
  siRNA target sequence for Prox1 (NM_008937.2,833-851).
gcacaggctccgaagtaca

SEQ ID NO: 465024 - DNA, 19 bp, Mus musculus
  siRNA target sequence for Prox1 (NM_008937.2,847-865).
gtacatcaggaggatatat

SEQ ID NO: 465025 - DNA, 19 bp, Mus musculus
  siRNA target sequence for Prox1 (NM_008937.2,850-868).
catcaggaggatatatgta

SEQ ID NO: 465026 - DNA, 19 bp, Mus musculus
  siRNA target sequence for Prox1 (NM_008937.2,908-926).
cttttggcaggcctactat

SEQ ID NO: 465027 - DNA, 19 bp, Mus musculus
  siRNA target sequence for Prox1 (NM_008937.2,1026-1044).
ggcattaaggggcaatgaa

SEQ ID NO: 465028 - DNA, 19 bp, Mus musculus
  siRNA target sequence for Prox1 (NM_008937.2,1027-1045).
gcattaaggggcaatgaaa

SEQ ID NO: 465029 - DNA, 19 bp, Mus musculus
  siRNA target sequence for Prox1 (NM_008937.2,1028-1046).
cattaaggggcaatgaaaa

SEQ ID NO: 465030 - DNA, 19 bp, Mus musculus
  siRNA target sequence for Prox1 (NM_008937.2,1072-1090).
gtgagtccccgagaaagtt

SEQ ID NO: 465031 - DNA, 19 bp, Mus musculus
  siRNA target sequence for Prox1 (NM_008937.2,1661-1679).
cagtcaacggggaaaacca

SEQ ID NO: 465032 - DNA, 19 bp, Mus musculus
  siRNA target sequence for Prox1 (NM_008937.2,1698-1716).
ccagcgcctgcaatgcttt

SEQ ID NO: 465033 - DNA, 19 bp, Mus musculus
  siRNA target sequence for Prox1 (NM_008937.2,1801-1819).
ctggtggtccgaaaaaact

SEQ ID NO: 465034 - DNA, 19 bp, Mus musculus
  siRNA target sequence for Prox1 (NM_008937.2,1803-1821).
ggtggtccgaaaaaactca

SEQ ID NO: 465035 - DNA, 19 bp, Mus musculus
  siRNA target sequence for Prox1 (NM_008937.2,1804-1822).
gtggtccgaaaaaactcat

SEQ ID NO: 465036 - DNA, 19 bp, Mus musculus
  siRNA target sequence for Prox1 (NM_008937.2,2031-2049).
gactcgggacacaacaagt

SEQ ID NO: 465037 - DNA, 19 bp, Mus musculus
  siRNA target sequence for Prox1 (NM_008937.2,2117-2135).
ccgcagaaggactctcttt

SEQ ID NO: 465038 - DNA, 19 bp, Mus musculus
  siRNA target sequence for Prox1 (NM_008937.2,2128-2146).
ctctctttgtcactcataa

SEQ ID NO: 465039 - DNA, 19 bp, Mus musculus
  siRNA target sequence for Prox1 (NM_008937.2,2148-2166).
gtctgagtgtggagatctt

SEQ ID NO: 465040 - DNA, 19 bp, Mus musculus
  siRNA target sequence for Prox1 (NM_008937.2,2158-2176).
ggagatcttcaagatatgt

SEQ ID NO: 465041 - DNA, 19 bp, Mus musculus
  siRNA target sequence for Prox1 (NM_008937.2,2175-2193).
gtccgacatctcaccttat

SEQ ID NO: 465042 - DNA, 19 bp, Mus musculus
  siRNA target sequence for Prox1 (NM_008937.2,2178-2196).
cgacatctcaccttattca

SEQ ID NO: 465043 - DNA, 19 bp, Mus musculus
  siRNA target sequence for Prox1 (NM_008937.2,2222-2240).
cacccaatcacttgaaaaa

SEQ ID NO: 465044 - DNA, 19 bp, Mus musculus
  siRNA target sequence for Prox1 (NM_008937.2,2241-2259).
ggcaaaactcatgttcttt

SEQ ID NO: 465045 - DNA, 19 bp, Mus musculus
  siRNA target sequence for Prox1 (NM_008937.2,2305-2323).
gacgtgaagttcaacagat

SEQ ID NO: 465046 - DNA, 19 bp, Mus musculus
  siRNA target sequence for Prox1 (NM_008937.2,2397-2415).
gcgtcaagccatcaatgat

SEQ ID NO: 465047 - DNA, 19 bp, Mus musculus
  siRNA target sequence for Prox1 (NM_008937.2,2471-2489).
ccctcaacatgcactacaa

SEQ ID NO: 465048 - DNA, 19 bp, Mus musculus
  siRNA target sequence for Prox1 (NM_008937.2,2487-2505).
caacaaagcaaatgacttt

SEQ ID NO: 465049 - DNA, 19 bp, Mus musculus
  siRNA target sequence for Prox1 (NM_008937.2,2543-2561).
cgttacgggagtttttcaa

SEQ ID NO: 465050 - DNA, 19 bp, Mus musculus
  siRNA target sequence for Prox1 (NM_008937.2,2544-2562).
gttacgggagtttttcaat

SEQ ID NO: 465051 - DNA, 19 bp, Mus musculus
  siRNA target sequence for Prox1 (NM_008937.2,2625-2643).
caagctggatagtgaagtt

SEQ ID NO: 465052 - DNA, 19 bp, Mus musculus
  siRNA target sequence for Prox1 (NM_008937.2,2660-2678).
cccctaactgcctacaaga

SEQ ID NO: 465053 - DNA, 19 bp, Mus musculus
  siRNA target sequence for Ptges2 (NM_133783.1,324-342).
ctgtaccagtacaagacat

SEQ ID NO: 465054 - DNA, 19 bp, Mus musculus
  siRNA target sequence for Ptges2 (NM_133783.1,560-578).
ggaagaggtcatcacttat

SEQ ID NO: 465055 - DNA, 19 bp, Mus musculus
  siRNA target sequence for Ptges2 (NM_133783.1,561-579).
gaagaggtcatcacttatt

SEQ ID NO: 465056 - DNA, 19 bp, Mus musculus
  siRNA target sequence for Ptges2 (NM_133783.1,615-633).
gaggtgaccgagttttgca

SEQ ID NO: 465057 - DNA, 19 bp, Mus musculus
  siRNA target sequence for Ptges2 (NM_133783.1,622-640).
ccgagttttgcaacaagta

SEQ ID NO: 465058 - DNA, 19 bp, Mus musculus
  siRNA target sequence for Ptges2 (NM_133783.1,624-642).
gagttttgcaacaagtact

SEQ ID NO: 465059 - DNA, 19 bp, Mus musculus
  siRNA target sequence for Ptges2 (NM_133783.1,788-806).
ggcttccttcgactacatt

SEQ ID NO: 465060 - DNA, 19 bp, Mus musculus
  siRNA target sequence for Ptges2 (NM_133783.1,970-988).
gtaaagaccggccattcat

SEQ ID NO: 465061 - DNA, 19 bp, Mus musculus
  siRNA target sequence for Ptges2 (NM_133783.1,1132-1150).
ccccctcggtgcatcatgt

SEQ ID NO: 465062 - DNA, 19 bp, Mus musculus
  siRNA target sequence for Ptges2 (NM_133783.1,1135-1153).
cctcggtgcatcatgtcaa

SEQ ID NO: 465063 - DNA, 19 bp, Mus musculus
  siRNA target sequence for Pura (NM_008989.1,789-807).
ggcgctggcggcaacaaga

SEQ ID NO: 465064 - DNA, 19 bp, Mus musculus
  siRNA target sequence for Pura (NM_008989.1,1215-1233).
gatgtgggttccaacaagt

SEQ ID NO: 465065 - DNA, 19 bp, Mus musculus
  siRNA target sequence for Purb (NM_011221.1,773-791).
gacgtcggctgcaacaagt

SEQ ID NO: 465066 - DNA, 19 bp, Mus musculus
  siRNA target sequence for Purb (NM_011221.1,888-906).
gtcggtatgcagatgaaat

SEQ ID NO: 465067 - DNA, 19 bp, Mus musculus
  siRNA target sequence for Purb (NM_011221.1,922-940).
gcgacagagggataagctt

SEQ ID NO: 465068 - DNA, 19 bp, Mus musculus
  siRNA target sequence for Purb (NM_011221.1,923-941).
cgacagagggataagcttt

SEQ ID NO: 465069 - DNA, 19 bp, Mus musculus
  siRNA target sequence for Purb (NM_011221.1,924-942).
gacagagggataagcttta

SEQ ID NO: 465070 - DNA, 19 bp, Mus musculus
  siRNA target sequence for Rab1 (NM_008996.2,34-52).
cagcatgaatcccgaatat

SEQ ID NO: 465071 - DNA, 19 bp, Mus musculus
  siRNA target sequence for Rab1 (NM_008996.2,103-121).
ctgccttctccttaggttt

SEQ ID NO: 465072 - DNA, 19 bp, Mus musculus
  siRNA target sequence for Rab1 (NM_008996.2,118-136).
gtttgcagatgatacgtat

SEQ ID NO: 465073 - DNA, 19 bp, Mus musculus
  siRNA target sequence for Rab1 (NM_008996.2,175-193).
gatacgaactatagagtta

SEQ ID NO: 465074 - DNA, 19 bp, Mus musculus
  siRNA target sequence for Rab1 (NM_008996.2,286-304).
catcatagttgtgtatgat

SEQ ID NO: 465075 - DNA, 19 bp, Mus musculus
  siRNA target sequence for Rab1 (NM_008996.2,311-329).
gatcaggagtccttcaata

SEQ ID NO: 465076 - DNA, 19 bp, Mus musculus
  siRNA target sequence for Rab1 (NM_008996.2,316-334).
ggagtccttcaataacgtt

SEQ ID NO: 465077 - DNA, 19 bp, Mus musculus
  siRNA target sequence for Rab1 (NM_008996.2,317-335).
gagtccttcaataacgtta

SEQ ID NO: 465078 - DNA, 19 bp, Mus musculus
  siRNA target sequence for Rab1 (NM_008996.2,319-337).
gtccttcaataacgttaaa

SEQ ID NO: 465079 - DNA, 19 bp, Mus musculus
  siRNA target sequence for Rab1 (NM_008996.2,385-403).
gttgttggtagggaacaaa

SEQ ID NO: 465080 - DNA, 19 bp, Mus musculus
  siRNA target sequence for Rab1 (NM_008996.2,436-454).
cacaacagcaaaggaattt

SEQ ID NO: 465081 - DNA, 19 bp, Mus musculus
  siRNA target sequence for Rab1 (NM_008996.2,496-514).
gaacgcaacgaatgtagaa

SEQ ID NO: 465082 - DNA, 19 bp, Mus musculus
  siRNA target sequence for Rab1 (NM_008996.2,504-522).
cgaatgtagaacagtcttt

SEQ ID NO: 465083 - DNA, 19 bp, Mus musculus
  siRNA target sequence for Rab1 (NM_008996.2,581-599).
gccgagaagtccaatgtta

SEQ ID NO: 465084 - DNA, 19 bp, Mus musculus
  siRNA target sequence for Rab13 (NM_026677.1,141-159).
gcaagacttgtctgatcat

SEQ ID NO: 465085 - DNA, 19 bp, Mus musculus
  siRNA target sequence for Rab13 (NM_026677.1,276-294).
ctggccaagaacgattcaa

SEQ ID NO: 465086 - DNA, 19 bp, Mus musculus
  siRNA target sequence for Rab13 (NM_026677.1,278-296).
ggccaagaacgattcaaga

SEQ ID NO: 465087 - DNA, 19 bp, Mus musculus
  siRNA target sequence for Rab13 (NM_026677.1,281-299).
caagaacgattcaagacaa

SEQ ID NO: 465088 - DNA, 19 bp, Mus musculus
  siRNA target sequence for Rab13 (NM_026677.1,297-315).
caataactaccgcctatta

SEQ ID NO: 465089 - DNA, 19 bp, Mus musculus
  siRNA target sequence for Rab13 (NM_026677.1,328-346).
gggcattatcctcgtatat

SEQ ID NO: 465090 - DNA, 19 bp, Mus musculus
  siRNA target sequence for Rab13 (NM_026677.1,330-348).
gcattatcctcgtatatga

SEQ ID NO: 465091 - DNA, 19 bp, Mus musculus
  siRNA target sequence for Rab13 (NM_026677.1,347-365).
gacatcacagatgagaaat

SEQ ID NO: 465092 - DNA, 19 bp, Mus musculus
  siRNA target sequence for Rab13 (NM_026677.1,361-379).
gaaatccttcgagaatatt

SEQ ID NO: 465093 - DNA, 19 bp, Mus musculus
  siRNA target sequence for Rab13 (NM_026677.1,508-526).
gcacagaatccgatttttt

SEQ ID NO: 465094 - DNA, 19 bp, Mus musculus
  siRNA target sequence for Rab13 (NM_026677.1,612-630).
gatcgggaaccaacagtaa

SEQ ID NO: 465095 - DNA, 19 bp, Mus musculus
  siRNA target sequence for Rab15 (NM_134050.2,324-342).
caccatcggtgttgacttt

SEQ ID NO: 465096 - DNA, 19 bp, Mus musculus
  siRNA target sequence for Rab15 (NM_134050.2,361-379).
gtagacggcatcaaagtga

SEQ ID NO: 465097 - DNA, 19 bp, Mus musculus
  siRNA target sequence for Rab15 (NM_134050.2,413-431).
ggtaccagactatcacaaa

SEQ ID NO: 465098 - DNA, 19 bp, Mus musculus
  siRNA target sequence for Rab15 (NM_134050.2,442-460).
cggcgagcccagggaatat

SEQ ID NO: 465099 - DNA, 19 bp, Mus musculus
  siRNA target sequence for Rab15 (NM_134050.2,445-463).
cgagcccagggaatatttt

SEQ ID NO: 465100 - DNA, 19 bp, Mus musculus
  siRNA target sequence for Rab15 (NM_134050.2,491-509).
cctatcagcatatcatgaa

SEQ ID NO: 465101 - DNA, 19 bp, Mus musculus
  siRNA target sequence for Rab2 (NM_021518.2,737-755).
gaaggggtctttgacatta

SEQ ID NO: 465102 - DNA, 19 bp, Mus musculus
  siRNA target sequence for Rab2 (NM_021518.2,761-779).
gaggcaaacggcattaaaa

SEQ ID NO: 465103 - DNA, 19 bp, Mus musculus
  siRNA target sequence for Rab25 (NM_016899.2,210-228).
ggaatcgaacagatgaaga

SEQ ID NO: 465104 - DNA, 19 bp, Mus musculus
  siRNA target sequence for Rab25 (NM_016899.2,296-314).
cggttcacccgcaatgagt

SEQ ID NO: 465105 - DNA, 19 bp, Mus musculus
  siRNA target sequence for Rab25 (NM_016899.2,297-315).
ggttcacccgcaatgagtt

SEQ ID NO: 465106 - DNA, 19 bp, Mus musculus
  siRNA target sequence for Rab25 (NM_016899.2,354-372).
ccacccgcactgtaatgct

SEQ ID NO: 465107 - DNA, 19 bp, Mus musculus
  siRNA target sequence for Rab25 (NM_016899.2,465-483).
gggcactcctggtatttga

SEQ ID NO: 465108 - DNA, 19 bp, Mus musculus
  siRNA target sequence for Rab25 (NM_016899.2,546-564).
ccgaagccacgattgttgt

SEQ ID NO: 465109 - DNA, 19 bp, Mus musculus
  siRNA target sequence for Rab25 (NM_016899.2,568-586).
gctcgtggggaacaaaagt

SEQ ID NO: 465110 - DNA, 19 bp, Mus musculus
  siRNA target sequence for Rab25 (NM_016899.2,673-691).
cctcgactccaccaatgtt

SEQ ID NO: 465111 - DNA, 19 bp, Mus musculus
  siRNA target sequence for Rab25 (NM_016899.2,708-726).
ctgtcctcaaagagatctt

SEQ ID NO: 465112 - DNA, 19 bp, Mus musculus
  siRNA target sequence for Rab37 (NM_021411.2,146-164).
gtttcctgatccaattcaa

SEQ ID NO: 465113 - DNA, 19 bp, Mus musculus
  siRNA target sequence for Rab37 (NM_021411.2,196-214).
gccaccgtcggcatagact

SEQ ID NO: 465114 - DNA, 19 bp, Mus musculus
  siRNA target sequence for Rab37 (NM_021411.2,293-311).
gcagtgtgacccatgctta

SEQ ID NO: 465115 - DNA, 19 bp, Mus musculus
  siRNA target sequence for Rab37 (NM_021411.2,412-430).
cagagagacgtggtgatta

SEQ ID NO: 465116 - DNA, 19 bp, Mus musculus
  siRNA target sequence for Rab37 (NM_021411.2,416-434).
gagacgtggtgattatgct

SEQ ID NO: 465117 - DNA, 19 bp, Mus musculus
  siRNA target sequence for Rab37 (NM_021411.2,503-521).
gggaatatggtgttccttt

SEQ ID NO: 465118 - DNA, 19 bp, Mus musculus
  siRNA target sequence for Rabgef1 (NM_019983.2,242-260).
ccgaacgcaggggaattca

SEQ ID NO: 465119 - DNA, 19 bp, Mus musculus
  siRNA target sequence for Rabgef1 (NM_019983.2,243-261).
cgaacgcaggggaattcat

SEQ ID NO: 465120 - DNA, 19 bp, Mus musculus
  siRNA target sequence for Rabgef1 (NM_019983.2,681-699).
gacaggccaagaagtctat

SEQ ID NO: 465121 - DNA, 19 bp, Mus musculus
  siRNA target sequence for Rabgef1 (NM_019983.2,686-704).
gccaagaagtctataaaca

SEQ ID NO: 465122 - DNA, 19 bp, Mus musculus
  siRNA target sequence for Rabgef1 (NM_019983.2,688-706).
caagaagtctataaacaga

SEQ ID NO: 465123 - DNA, 19 bp, Mus musculus
  siRNA target sequence for Rabgef1 (NM_019983.2,720-738).
ggaagcaatgccttataaa

SEQ ID NO: 465124 - DNA, 19 bp, Mus musculus
  siRNA target sequence for Rabgef1 (NM_019983.2,729-747).
gccttataaaagggattta

SEQ ID NO: 465125 - DNA, 19 bp, Mus musculus
  siRNA target sequence for Rabgef1 (NM_019983.2,786-804).
ccaaaatgtggctgaaaga

SEQ ID NO: 465126 - DNA, 19 bp, Mus musculus
  siRNA target sequence for Rabgef1 (NM_019983.2,870-888).
catcatgacgcgtctctat

SEQ ID NO: 465127 - DNA, 19 bp, Mus musculus
  siRNA target sequence for Rabgef1 (NM_019983.2,873-891).
catgacgcgtctctataaa

SEQ ID NO: 465128 - DNA, 19 bp, Mus musculus
  siRNA target sequence for Rabgef1 (NM_019983.2,876-894).
gacgcgtctctataaattt

SEQ ID NO: 465129 - DNA, 19 bp, Mus musculus
  siRNA target sequence for Rabgef1 (NM_019983.2,880-898).
cgtctctataaatttgtgt

SEQ ID NO: 465130 - DNA, 19 bp, Mus musculus
  siRNA target sequence for Rabgef1 (NM_019983.2,1040-1058).
cgatcacagacatcattga

SEQ ID NO: 465131 - DNA, 19 bp, Mus musculus
  siRNA target sequence for Rabgef1 (NM_019983.2,1154-1172).
cagcctctgccgatgactt

SEQ ID NO: 465132 - DNA, 19 bp, Mus musculus
  siRNA target sequence for Rabgef1 (NM_019983.2,1276-1294).
ggcgaggatggctactact

SEQ ID NO: 465133 - DNA, 19 bp, Mus musculus
  siRNA target sequence for Rabgef1 (NM_019983.2,1310-1328).
gtgctgtggctttcattga

SEQ ID NO: 465134 - DNA, 19 bp, Mus musculus
  siRNA target sequence for Rabgef1 (NM_019983.2,1366-1384).
gattttgaccggtacatgt

SEQ ID NO: 465135 - DNA, 19 bp, Mus musculus
  siRNA target sequence for Rabgef1 (NM_019983.2,1444-1462).
ggtgtgaagcaaatgtata

SEQ ID NO: 465136 - DNA, 19 bp, Mus musculus
  siRNA target sequence for Rabgef1 (NM_019983.2,1445-1463).
gtgtgaagcaaatgtataa

SEQ ID NO: 465137 - DNA, 19 bp, Mus musculus
  siRNA target sequence for Rabgef1 (NM_019983.2,1509-1527).
catgaacgaagccaagaaa

SEQ ID NO: 465138 - DNA, 19 bp, Mus musculus
  siRNA target sequence for Rabgef1 (NM_019983.2,1512-1530).
gaacgaagccaagaaactt

SEQ ID NO: 465139 - DNA, 19 bp, Mus musculus
  siRNA target sequence for Rabgef1 (NM_019983.2,1515-1533).
cgaagccaagaaacttgaa

SEQ ID NO: 465140 - DNA, 19 bp, Mus musculus
  siRNA target sequence for Rabgef1 (NM_019983.2,1524-1542).
gaaacttgaaaaagactta

SEQ ID NO: 465141 - DNA, 19 bp, Mus musculus
  siRNA target sequence for Rabgef1 (NM_019983.2,1569-1587).
ggaagttcaagacattgtt

SEQ ID NO: 465142 - DNA, 19 bp, Mus musculus
  siRNA target sequence for Rabl3 (NM_026297.1,75-93).
cttcactcgtccatcttct

SEQ ID NO: 465143 - DNA, 19 bp, Mus musculus
  siRNA target sequence for Rabl3 (NM_026297.1,94-112).
gtgccacaatcaagtgtta

SEQ ID NO: 465144 - DNA, 19 bp, Mus musculus
  siRNA target sequence for Rabl3 (NM_026297.1,136-154).
ctgctcggtggatatcaga

SEQ ID NO: 465145 - DNA, 19 bp, Mus musculus
  siRNA target sequence for Rabl3 (NM_026297.1,177-195).
cccctgaagagaagacata

SEQ ID NO: 465146 - DNA, 19 bp, Mus musculus
  siRNA target sequence for Rabl3 (NM_026297.1,190-208).
gacatactatatagaacta

SEQ ID NO: 465147 - DNA, 19 bp, Mus musculus
  siRNA target sequence for Rabl3 (NM_026297.1,252-270).
gcacaagagcggtgttcta

SEQ ID NO: 465148 - DNA, 19 bp, Mus musculus
  siRNA target sequence for Rabl3 (NM_026297.1,263-281).
gtgttctacaactctgtaa

SEQ ID NO: 465149 - DNA, 19 bp, Mus musculus
  siRNA target sequence for Rabl3 (NM_026297.1,276-294).
ctgtaaacggcatcatttt

SEQ ID NO: 465150 - DNA, 19 bp, Mus musculus
  siRNA target sequence for Rabl3 (NM_026297.1,283-301).
cggcatcattttagtacat

SEQ ID NO: 465151 - DNA, 19 bp, Mus musculus
  siRNA target sequence for Rabl3 (NM_026297.1,285-303).
gcatcattttagtacatga

SEQ ID NO: 465152 - DNA, 19 bp, Mus musculus
  siRNA target sequence for Rabl3 (NM_026297.1,299-317).
catgacttaacaaataaga

SEQ ID NO: 465153 - DNA, 19 bp, Mus musculus
  siRNA target sequence for Rabl3 (NM_026297.1,302-320).
gacttaacaaataagaagt

SEQ ID NO: 465154 - DNA, 19 bp, Mus musculus
  siRNA target sequence for Rabl3 (NM_026297.1,319-337).
gtcatctcaaaacttatat

SEQ ID NO: 465155 - DNA, 19 bp, Mus musculus
  siRNA target sequence for Rabl3 (NM_026297.1,339-357).
gctggtcattggaagttct

SEQ ID NO: 465156 - DNA, 19 bp, Mus musculus
  siRNA target sequence for Rabl3 (NM_026297.1,342-360).
ggtcattggaagttctcaa

SEQ ID NO: 465157 - DNA, 19 bp, Mus musculus
  siRNA target sequence for Rabl3 (NM_026297.1,343-361).
gtcattggaagttctcaat

SEQ ID NO: 465158 - DNA, 19 bp, Mus musculus
  siRNA target sequence for Rad17 (NM_011233.1,137-155).
cagcctttgatgactttga

SEQ ID NO: 465159 - DNA, 19 bp, Mus musculus
  siRNA target sequence for Rad17 (NM_011233.1,177-195).
catcactgcgtcatcttta

SEQ ID NO: 465160 - DNA, 19 bp, Mus musculus
  siRNA target sequence for Rad17 (NM_011233.1,180-198).
cactgcgtcatctttaact

SEQ ID NO: 465161 - DNA, 19 bp, Mus musculus
  siRNA target sequence for Rad17 (NM_011233.1,182-200).
ctgcgtcatctttaacttt

SEQ ID NO: 465162 - DNA, 19 bp, Mus musculus
  siRNA target sequence for Rad17 (NM_011233.1,184-202).
gcgtcatctttaactttca

SEQ ID NO: 465163 - DNA, 19 bp, Mus musculus
  siRNA target sequence for Rad17 (NM_011233.1,232-250).
ccctccacattagaaagta

SEQ ID NO: 465164 - DNA, 19 bp, Mus musculus
  siRNA target sequence for Rad17 (NM_011233.1,252-270).
cagattgtcggctagaaaa

SEQ ID NO: 465165 - DNA, 19 bp, Mus musculus
  siRNA target sequence for Rad17 (NM_011233.1,272-290).
gaggaaggctctctttaga

SEQ ID NO: 465166 - DNA, 19 bp, Mus musculus
  siRNA target sequence for Rad17 (NM_011233.1,294-312).
gactcatggtctagaaact

SEQ ID NO: 465167 - DNA, 19 bp, Mus musculus
  siRNA target sequence for Rad17 (NM_011233.1,298-316).
catggtctagaaacttcaa

SEQ ID NO: 465168 - DNA, 19 bp, Mus musculus
  siRNA target sequence for Rad17 (NM_011233.1,339-357).
gccgtgggtggataaatat

SEQ ID NO: 465169 - DNA, 19 bp, Mus musculus
  siRNA target sequence for Rad17 (NM_011233.1,340-358).
ccgtgggtggataaatata

SEQ ID NO: 465170 - DNA, 19 bp, Mus musculus
  siRNA target sequence for Rad17 (NM_011233.1,341-359).
cgtgggtggataaatataa

SEQ ID NO: 465171 - DNA, 19 bp, Mus musculus
  siRNA target sequence for Rad17 (NM_011233.1,342-360).
gtgggtggataaatataaa

SEQ ID NO: 465172 - DNA, 19 bp, Mus musculus
  siRNA target sequence for Rad17 (NM_011233.1,379-397).
cttgctgttcataaaaaga

SEQ ID NO: 465173 - DNA, 19 bp, Mus musculus
  siRNA target sequence for Rad17 (NM_011233.1,406-424).
gaggtcgaaacctggttaa

SEQ ID NO: 465174 - DNA, 19 bp, Mus musculus
  siRNA target sequence for Rad17 (NM_011233.1,408-426).
ggtcgaaacctggttaaaa

SEQ ID NO: 465175 - DNA, 19 bp, Mus musculus
  siRNA target sequence for Rad17 (NM_011233.1,411-429).
cgaaacctggttaaaagct

SEQ ID NO: 465176 - DNA, 19 bp, Mus musculus
  siRNA target sequence for Rad17 (NM_011233.1,428-446).
ctcaagtcttagaagtgaa

SEQ ID NO: 465177 - DNA, 19 bp, Mus musculus
  siRNA target sequence for Rad17 (NM_011233.1,454-472).
cagggtgggtctgttttat

SEQ ID NO: 465178 - DNA, 19 bp, Mus musculus
  siRNA target sequence for Rad17 (NM_011233.1,490-508).
ggatgtggaaagacaacta

SEQ ID NO: 465179 - DNA, 19 bp, Mus musculus
  siRNA target sequence for Rad17 (NM_011233.1,535-553).
gggatccaagtacaagaat

SEQ ID NO: 465180 - DNA, 19 bp, Mus musculus
  siRNA target sequence for Rad17 (NM_011233.1,547-565).
caagaatgggttaatccta

SEQ ID NO: 465181 - DNA, 19 bp, Mus musculus
  siRNA target sequence for Rad17 (NM_011233.1,550-568).
gaatgggttaatcctattt

SEQ ID NO: 465182 - DNA, 19 bp, Mus musculus
  siRNA target sequence for Rad17 (NM_011233.1,574-592).
gacttccaaaaagatgatt

SEQ ID NO: 465183 - DNA, 19 bp, Mus musculus
  siRNA target sequence for Rad17 (NM_011233.1,589-607).
gattacaaggagttactta

SEQ ID NO: 465184 - DNA, 19 bp, Mus musculus
  siRNA target sequence for Rad17 (NM_011233.1,598-616).
gagttacttagtttagaat

SEQ ID NO: 465185 - DNA, 19 bp, Mus musculus
  siRNA target sequence for Rad17 (NM_011233.1,604-622).
cttagtttagaatcaaact

SEQ ID NO: 465186 - DNA, 19 bp, Mus musculus
  siRNA target sequence for Rad17 (NM_011233.1,624-642).
ctctgtagttccataccaa

SEQ ID NO: 465187 - DNA, 19 bp, Mus musculus
  siRNA target sequence for Rad17 (NM_011233.1,653-671).
cagtcttcaatgactttct

SEQ ID NO: 465188 - DNA, 19 bp, Mus musculus
  siRNA target sequence for Rad17 (NM_011233.1,660-678).
caatgactttctattaaga

SEQ ID NO: 465189 - DNA, 19 bp, Mus musculus
  siRNA target sequence for Rad17 (NM_011233.1,712-730).
gacgatctgacaactgata

SEQ ID NO: 465190 - DNA, 19 bp, Mus musculus
  siRNA target sequence for Rad17 (NM_011233.1,718-736).
ctgacaactgataagaaga

SEQ ID NO: 465191 - DNA, 19 bp, Mus musculus
  siRNA target sequence for Rad17 (NM_011233.1,722-740).
caactgataagaagatcat

SEQ ID NO: 465192 - DNA, 19 bp, Mus musculus
  siRNA target sequence for Rad17 (NM_011233.1,751-769).
gagttacctaaccagtttt

SEQ ID NO: 465193 - DNA, 19 bp, Mus musculus
  siRNA target sequence for Rad17 (NM_011233.1,753-771).
gttacctaaccagttttat

SEQ ID NO: 465194 - DNA, 19 bp, Mus musculus
  siRNA target sequence for Rad17 (NM_011233.1,773-791).
gagaccctaacgctttaca

SEQ ID NO: 465195 - DNA, 19 bp, Mus musculus
  siRNA target sequence for Rad17 (NM_011233.1,779-797).
ctaacgctttacatgagat

SEQ ID NO: 465196 - DNA, 19 bp, Mus musculus
  siRNA target sequence for Rad17 (NM_011233.1,783-801).
cgctttacatgagattcta

SEQ ID NO: 465197 - DNA, 19 bp, Mus musculus
  siRNA target sequence for Rad17 (NM_011233.1,821-839).
gccggtgtcctcttgtatt

SEQ ID NO: 465198 - DNA, 19 bp, Mus musculus
  siRNA target sequence for Rad17 (NM_011233.1,852-870).
cagtgtcagtggagacaat

SEQ ID NO: 465199 - DNA, 19 bp, Mus musculus
  siRNA target sequence for Rad17 (NM_011233.1,938-956).
ctgtggcaccaacaattat

SEQ ID NO: 465200 - DNA, 19 bp, Mus musculus
  siRNA target sequence for Rad17 (NM_011233.1,940-958).
gtggcaccaacaattatga

SEQ ID NO: 465201 - DNA, 19 bp, Mus musculus
  siRNA target sequence for Rad17 (NM_011233.1,944-962).
caccaacaattatgatgaa

SEQ ID NO: 465202 - DNA, 19 bp, Mus musculus
  siRNA target sequence for Rad17 (NM_011233.1,957-975).
gatgaaatttcttaatcga

SEQ ID NO: 465203 - DNA, 19 bp, Mus musculus
  siRNA target sequence for Rad17 (NM_011233.1,992-1010).
ctagtaagaatggagaaaa

SEQ ID NO: 465204 - DNA, 19 bp, Mus musculus
  siRNA target sequence for Rad17 (NM_011233.1,1044-1062).
gctctgtcaaggatgttct

SEQ ID NO: 465205 - DNA, 19 bp, Mus musculus
  siRNA target sequence for Rad17 (NM_011233.1,1054-1072).
ggatgttctggtgatatca

SEQ ID NO: 465206 - DNA, 19 bp, Mus musculus
  siRNA target sequence for Rad17 (NM_011233.1,1066-1084).
gatatcagaagtgcaataa

SEQ ID NO: 465207 - DNA, 19 bp, Mus musculus
  siRNA target sequence for Rad17 (NM_011233.1,1090-1108).
ctgcagttctcgtcttcaa

SEQ ID NO: 465208 - DNA, 19 bp, Mus musculus
  siRNA target sequence for Rad17 (NM_011233.1,1092-1110).
gcagttctcgtcttcaaaa

SEQ ID NO: 465209 - DNA, 19 bp, Mus musculus
  siRNA target sequence for Rad17 (NM_011233.1,1095-1113).
gttctcgtcttcaaaagga

SEQ ID NO: 465210 - DNA, 19 bp, Mus musculus
  siRNA target sequence for Rad17 (NM_011233.1,1157-1175).
cggatgctgccatatcaaa

SEQ ID NO: 465211 - DNA, 19 bp, Mus musculus
  siRNA target sequence for Rad17 (NM_011233.1,1268-1286).
ctttggggaagattctgta

SEQ ID NO: 465212 - DNA, 19 bp, Mus musculus
  siRNA target sequence for Rad17 (NM_011233.1,1275-1293).
gaagattctgtactgtaaa

SEQ ID NO: 465213 - DNA, 19 bp, Mus musculus
  siRNA target sequence for Rad17 (NM_011233.1,1298-1316).
cgcctttaacagagttaga

SEQ ID NO: 465214 - DNA, 19 bp, Mus musculus
  siRNA target sequence for Rad17 (NM_011233.1,1347-1365).
gcacgaccgggacacttta

SEQ ID NO: 465215 - DNA, 19 bp, Mus musculus
  siRNA target sequence for Rad17 (NM_011233.1,1350-1368).
cgaccgggacactttactt

SEQ ID NO: 465216 - DNA, 19 bp, Mus musculus
  siRNA target sequence for Rad17 (NM_011233.1,1353-1371).
ccgggacactttacttgtt

SEQ ID NO: 465217 - DNA, 19 bp, Mus musculus
  siRNA target sequence for Rad17 (NM_011233.1,1355-1373).
gggacactttacttgttca

SEQ ID NO: 465218 - DNA, 19 bp, Mus musculus
  siRNA target sequence for Rad17 (NM_011233.1,1404-1422).
gccaggagacttttttaat

SEQ ID NO: 465219 - DNA, 19 bp, Mus musculus
  siRNA target sequence for Rad17 (NM_011233.1,1428-1446).
ccttcaccaaaactacata

SEQ ID NO: 465220 - DNA, 19 bp, Mus musculus
  siRNA target sequence for Rad17 (NM_011233.1,1509-1527).
cctcggtggtgattggaat

SEQ ID NO: 465221 - DNA, 19 bp, Mus musculus
  siRNA target sequence for Rad17 (NM_011233.1,1533-1551).
ctcgttactcagggaatat

SEQ ID NO: 465222 - DNA, 19 bp, Mus musculus
  siRNA target sequence for Rad17 (NM_011233.1,1540-1558).
ctcagggaatatagtacat

SEQ ID NO: 465223 - DNA, 19 bp, Mus musculus
  siRNA target sequence for Rad17 (NM_011233.1,1765-1783).
gctcttctgaccattccaa

SEQ ID NO: 465224 - DNA, 19 bp, Mus musculus
  siRNA target sequence for Rad17 (NM_011233.1,1775-1793).
ccattccaatgcgaaataa

SEQ ID NO: 465225 - DNA, 19 bp, Mus musculus
  siRNA target sequence for Rad17 (NM_011233.1,1776-1794).
cattccaatgcgaaataaa

SEQ ID NO: 465226 - DNA, 19 bp, Mus musculus
  siRNA target sequence for Rad17 (NM_011233.1,1785-1803).
gcgaaataaagctcagatt

SEQ ID NO: 465227 - DNA, 19 bp, Mus musculus
  siRNA target sequence for Rad18 (NM_021385.1,76-94).
gggatttgctttgagtatt

SEQ ID NO: 465228 - DNA, 19 bp, Mus musculus
  siRNA target sequence for Rad18 (NM_021385.1,116-134).
cccagtgctctcacaacta

SEQ ID NO: 465229 - DNA, 19 bp, Mus musculus
  siRNA target sequence for Rad18 (NM_021385.1,120-138).
gtgctctcacaactattgt

SEQ ID NO: 465230 - DNA, 19 bp, Mus musculus
  siRNA target sequence for Rad18 (NM_021385.1,123-141).
ctctcacaactattgttca

SEQ ID NO: 465231 - DNA, 19 bp, Mus musculus
  siRNA target sequence for Rad18 (NM_021385.1,140-158).
cactctgtataagaaagtt

SEQ ID NO: 465232 - DNA, 19 bp, Mus musculus
  siRNA target sequence for Rad18 (NM_021385.1,205-223).
gagccagacctgagaaata

SEQ ID NO: 465233 - DNA, 19 bp, Mus musculus
  siRNA target sequence for Rad18 (NM_021385.1,207-225).
gccagacctgagaaataat

SEQ ID NO: 465234 - DNA, 19 bp, Mus musculus
  siRNA target sequence for Rad18 (NM_021385.1,218-236).
gaaataatcgcctcttaga

SEQ ID NO: 465235 - DNA, 19 bp, Mus musculus
  siRNA target sequence for Rad18 (NM_021385.1,231-249).
cttagatgaactggtaaaa

SEQ ID NO: 465236 - DNA, 19 bp, Mus musculus
  siRNA target sequence for Rad18 (NM_021385.1,271-289).
cacctgttgcagtttgctt

SEQ ID NO: 465237 - DNA, 19 bp, Mus musculus
  siRNA target sequence for Rad18 (NM_021385.1,384-402).
ggcgaacaggttaatggat

SEQ ID NO: 465238 - DNA, 19 bp, Mus musculus
  siRNA target sequence for Rad18 (NM_021385.1,385-403).
gcgaacaggttaatggata

SEQ ID NO: 465239 - DNA, 19 bp, Mus musculus
  siRNA target sequence for Rad18 (NM_021385.1,405-423).
gttcctgattagagaaact

SEQ ID NO: 465240 - DNA, 19 bp, Mus musculus
  siRNA target sequence for Rad18 (NM_021385.1,418-436).
gaaactggtgactgtgtat

SEQ ID NO: 465241 - DNA, 19 bp, Mus musculus
  siRNA target sequence for Rad18 (NM_021385.1,422-440).
ctggtgactgtgtatttga

SEQ ID NO: 465242 - DNA, 19 bp, Mus musculus
  siRNA target sequence for Rad18 (NM_021385.1,540-558).
ggggctctcggatgctaat

SEQ ID NO: 465243 - DNA, 19 bp, Mus musculus
  siRNA target sequence for Rad18 (NM_021385.1,543-561).
gctctcggatgctaatggt

SEQ ID NO: 465244 - DNA, 19 bp, Mus musculus
  siRNA target sequence for Rad18 (NM_021385.1,562-580).
cctgtgactccctctacat

SEQ ID NO: 465245 - DNA, 19 bp, Mus musculus
  siRNA target sequence for Rad18 (NM_021385.1,571-589).
ccctctacatccactatga

SEQ ID NO: 465246 - DNA, 19 bp, Mus musculus
  siRNA target sequence for Rad18 (NM_021385.1,573-591).
ctctacatccactatgaaa

SEQ ID NO: 465247 - DNA, 19 bp, Mus musculus
  siRNA target sequence for Rad18 (NM_021385.1,629-647).
gcattccagaaaatcatat

SEQ ID NO: 465248 - DNA, 19 bp, Mus musculus
  siRNA target sequence for Rad18 (NM_021385.1,700-718).
cgaagttctgctcacaaaa

SEQ ID NO: 465249 - DNA, 19 bp, Mus musculus
  siRNA target sequence for Rad18 (NM_021385.1,720-738).
gaagccgttgcccaaaact

SEQ ID NO: 465250 - DNA, 19 bp, Mus musculus
  siRNA target sequence for Rad18 (NM_021385.1,723-741).
gccgttgcccaaaactgta

SEQ ID NO: 465251 - DNA, 19 bp, Mus musculus
  siRNA target sequence for Rad18 (NM_021385.1,724-742).
ccgttgcccaaaactgtat

SEQ ID NO: 465252 - DNA, 19 bp, Mus musculus
  siRNA target sequence for Rad18 (NM_021385.1,725-743).
cgttgcccaaaactgtata

SEQ ID NO: 465253 - DNA, 19 bp, Mus musculus
  siRNA target sequence for Rad18 (NM_021385.1,726-744).
gttgcccaaaactgtatat

SEQ ID NO: 465254 - DNA, 19 bp, Mus musculus
  siRNA target sequence for Rad18 (NM_021385.1,940-958).
cttgaagcaagtaaactca

SEQ ID NO: 465255 - DNA, 19 bp, Mus musculus
  siRNA target sequence for Rad18 (NM_021385.1,946-964).
gcaagtaaactcaatgaaa

SEQ ID NO: 465256 - DNA, 19 bp, Mus musculus
  siRNA target sequence for Rad18 (NM_021385.1,947-965).
caagtaaactcaatgaaaa

SEQ ID NO: 465257 - DNA, 19 bp, Mus musculus
  siRNA target sequence for Rad18 (NM_021385.1,1012-1030).
gttcacagtgaatatcgta

SEQ ID NO: 465258 - DNA, 19 bp, Mus musculus
  siRNA target sequence for Rad18 (NM_021385.1,1015-1033).
cacagtgaatatcgtaaaa

SEQ ID NO: 465259 - DNA, 19 bp, Mus musculus
  siRNA target sequence for Rad18 (NM_021385.1,1019-1037).
gtgaatatcgtaaaaagca

SEQ ID NO: 465260 - DNA, 19 bp, Mus musculus
  siRNA target sequence for Rad18 (NM_021385.1,1105-1123).
caagctgcagcgatgagaa

SEQ ID NO: 465261 - DNA, 19 bp, Mus musculus
  siRNA target sequence for Rad18 (NM_021385.1,1250-1268).
cactgccgtctgagtgtat

SEQ ID NO: 465262 - DNA, 19 bp, Mus musculus
  siRNA target sequence for Rad18 (NM_021385.1,1265-1283).
gtatcgcacaagaagataa

SEQ ID NO: 465263 - DNA, 19 bp, Mus musculus
  siRNA target sequence for Rad18 (NM_021385.1,1363-1381).
gagaggccggatgattctt

SEQ ID NO: 465264 - DNA, 19 bp, Mus musculus
  siRNA target sequence for Rad18 (NM_021385.1,1365-1383).
gaggccggatgattcttct

SEQ ID NO: 465265 - DNA, 19 bp, Mus musculus
  siRNA target sequence for Rad18 (NM_021385.1,1372-1390).
gatgattcttctagttgta

SEQ ID NO: 465266 - DNA, 19 bp, Mus musculus
  siRNA target sequence for Rad18 (NM_021385.1,1382-1400).
ctagttgtactgatattct

SEQ ID NO: 465267 - DNA, 19 bp, Mus musculus
  siRNA target sequence for Rad18 (NM_021385.1,1385-1403).
gttgtactgatattctttt

SEQ ID NO: 465268 - DNA, 19 bp, Mus musculus
  siRNA target sequence for Rad18 (NM_021385.1,1471-1489).
cgcactagagccagtgaat

SEQ ID NO: 465269 - DNA, 19 bp, Mus musculus
  siRNA target sequence for Rad18 (NM_021385.1,1481-1499).
ccagtgaatgtgttgagat

SEQ ID NO: 465270 - DNA, 19 bp, Mus musculus
  siRNA target sequence for Rad18 (NM_021385.1,1482-1500).
cagtgaatgtgttgagatt

SEQ ID NO: 465271 - DNA, 19 bp, Mus musculus
  siRNA target sequence for Rad18 (NM_021385.1,1505-1523).
caagaaacaagcggaataa

SEQ ID NO: 465272 - DNA, 19 bp, Mus musculus
  siRNA target sequence for Rad54l (NM_009015.2,689-707).
ggacagtaactcctaagaa

SEQ ID NO: 465273 - DNA, 19 bp, Mus musculus
  siRNA target sequence for Rad54l (NM_009015.2,690-708).
gacagtaactcctaagaaa

SEQ ID NO: 465274 - DNA, 19 bp, Mus musculus
  siRNA target sequence for Rad54l (NM_009015.2,767-785).
ccttgactcagctactcaa

SEQ ID NO: 465275 - DNA, 19 bp, Mus musculus
  siRNA target sequence for Rad54l (NM_009015.2,801-819).
ggatagcagtcaacatgaa

SEQ ID NO: 465276 - DNA, 19 bp, Mus musculus
  siRNA target sequence for Rad54l (NM_009015.2,855-873).
ggtccccatcccaaattat

SEQ ID NO: 465277 - DNA, 19 bp, Mus musculus
  siRNA target sequence for Rad54l (NM_009015.2,858-876).
ccccatcccaaattatcaa

SEQ ID NO: 465278 - DNA, 19 bp, Mus musculus
  siRNA target sequence for Rad54l (NM_009015.2,892-910).
cgtgcattgggcctgaaaa

SEQ ID NO: 465279 - DNA, 19 bp, Mus musculus
  siRNA target sequence for Rad54l (NM_009015.2,953-971).
gtgccttggttctctatga

SEQ ID NO: 465280 - DNA, 19 bp, Mus musculus
  siRNA target sequence for Rad54l (NM_009015.2,986-1004).
gcgcccatgaccaactgaa

SEQ ID NO: 465281 - DNA, 19 bp, Mus musculus
  siRNA target sequence for Rad54l (NM_009015.2,1000-1018).
ctgaagcttgacaaggaaa

SEQ ID NO: 465282 - DNA, 19 bp, Mus musculus
  siRNA target sequence for Rad54l (NM_009015.2,1036-1054).
gttgttgatcctattctca

SEQ ID NO: 465283 - DNA, 19 bp, Mus musculus
  siRNA target sequence for Rad54l (NM_009015.2,1045-1063).
cctattctcagtaaggtat

SEQ ID NO: 465284 - DNA, 19 bp, Mus musculus
  siRNA target sequence for Rad54l (NM_009015.2,1046-1064).
ctattctcagtaaggtatt

SEQ ID NO: 465285 - DNA, 19 bp, Mus musculus
  siRNA target sequence for Rad54l (NM_009015.2,1110-1128).
caccagtcgtcgaattcct

SEQ ID NO: 465286 - DNA, 19 bp, Mus musculus
  siRNA target sequence for Rad54l (NM_009015.2,1175-1193).
cactgcagtgcatcacatt

SEQ ID NO: 465287 - DNA, 19 bp, Mus musculus
  siRNA target sequence for Rad54l (NM_009015.2,1177-1195).
ctgcagtgcatcacattga

SEQ ID NO: 465288 - DNA, 19 bp, Mus musculus
  siRNA target sequence for Rad54l (NM_009015.2,1180-1198).
cagtgcatcacattgatgt

SEQ ID NO: 465289 - DNA, 19 bp, Mus musculus
  siRNA target sequence for Rad54l (NM_009015.2,1211-1229).
gccagagcccagaatgcaa

SEQ ID NO: 465290 - DNA, 19 bp, Mus musculus
  siRNA target sequence for Rad54l (NM_009015.2,1220-1238).
cagaatgcaagccagaaat

SEQ ID NO: 465291 - DNA, 19 bp, Mus musculus
  siRNA target sequence for Rad54l (NM_009015.2,1305-1323).
gcttggagggaggattcaa

SEQ ID NO: 465292 - DNA, 19 bp, Mus musculus
  siRNA target sequence for Rad54l (NM_009015.2,1343-1361).
gctcgaaggacgagataga

SEQ ID NO: 465293 - DNA, 19 bp, Mus musculus
  siRNA target sequence for Rad54l (NM_009015.2,1417-1435).
ctcatcatttcctatgaga

SEQ ID NO: 465294 - DNA, 19 bp, Mus musculus
  siRNA target sequence for Rad54l (NM_009015.2,1444-1462).
ctgcatgttggagttctta

SEQ ID NO: 465295 - DNA, 19 bp, Mus musculus
  siRNA target sequence for Rad54l (NM_009015.2,1498-1516).
ggccacaggctaaagaact

SEQ ID NO: 465296 - DNA, 19 bp, Mus musculus
  siRNA target sequence for Rad54l (NM_009015.2,1577-1595).
ccgggacccccatccaaaa

SEQ ID NO: 465297 - DNA, 19 bp, Mus musculus
  siRNA target sequence for Rad54l (NM_009015.2,1578-1596).
cgggacccccatccaaaat

SEQ ID NO: 465298 - DNA, 19 bp, Mus musculus
  siRNA target sequence for Rad54l (NM_009015.2,1580-1598).
ggacccccatccaaaatga

SEQ ID NO: 465299 - DNA, 19 bp, Mus musculus
  siRNA target sequence for Rad54l (NM_009015.2,1581-1599).
gacccccatccaaaatgat

SEQ ID NO: 465300 - DNA, 19 bp, Mus musculus
  siRNA target sequence for Rad54l (NM_009015.2,1614-1632).
cagcttggtgcactttgta

SEQ ID NO: 465301 - DNA, 19 bp, Mus musculus
  siRNA target sequence for Rad54l (NM_009015.2,1672-1690).
cattttgagttgccaattt

SEQ ID NO: 465302 - DNA, 19 bp, Mus musculus
  siRNA target sequence for Rad54l (NM_009015.2,1678-1696).
gagttgccaattttgaaga

SEQ ID NO: 465303 - DNA, 19 bp, Mus musculus
  siRNA target sequence for Rad54l (NM_009015.2,1751-1769).
gggagctcatcggtattgt

SEQ ID NO: 465304 - DNA, 19 bp, Mus musculus
  siRNA target sequence for Rad54l (NM_009015.2,1753-1771).
gagctcatcggtattgtga

SEQ ID NO: 465305 - DNA, 19 bp, Mus musculus
  siRNA target sequence for Rad54l (NM_009015.2,1787-1805).
ggagaacatctgatatcct

SEQ ID NO: 465306 - DNA, 19 bp, Mus musculus
  siRNA target sequence for Rad54l (NM_009015.2,1796-1814).
ctgatatcctctctaagta

SEQ ID NO: 465307 - DNA, 19 bp, Mus musculus
  siRNA target sequence for Rad54l (NM_009015.2,1812-1830).
gtatctgcccgtgaagatt

SEQ ID NO: 465308 - DNA, 19 bp, Mus musculus
  siRNA target sequence for Rad54l (NM_009015.2,1831-1849).
gagcaggtggtttgttgta

SEQ ID NO: 465309 - DNA, 19 bp, Mus musculus
  siRNA target sequence for Rad54l (NM_009015.2,1851-1869).
gctgacaccccttcaaact

SEQ ID NO: 465310 - DNA, 19 bp, Mus musculus
  siRNA target sequence for Rad54l (NM_009015.2,1859-1877).
cccttcaaactgagctata

SEQ ID NO: 465311 - DNA, 19 bp, Mus musculus
  siRNA target sequence for Rad54l (NM_009015.2,1976-1994).
gtaatcatccagctctaat

SEQ ID NO: 465312 - DNA, 19 bp, Mus musculus
  siRNA target sequence for Rad54l (NM_009015.2,2049-2067).
cccacctggttataactct

SEQ ID NO: 465313 - DNA, 19 bp, Mus musculus
  siRNA target sequence for Rad54l (NM_009015.2,2051-2069).
cacctggttataactctaa

SEQ ID NO: 465314 - DNA, 19 bp, Mus musculus
  siRNA target sequence for Rad54l (NM_009015.2,2081-2099).
cacagttgtcaggtaagat

SEQ ID NO: 465315 - DNA, 19 bp, Mus musculus
  siRNA target sequence for Rad54l (NM_009015.2,2165-2183).
ctaattatactcagacatt

SEQ ID NO: 465316 - DNA, 19 bp, Mus musculus
  siRNA target sequence for Rad54l (NM_009015.2,2206-2224).
cgggttcgaaggtacttgt

SEQ ID NO: 465317 - DNA, 19 bp, Mus musculus
  siRNA target sequence for Rad54l (NM_009015.2,2236-2254).
gatggcacgatgtccatta

SEQ ID NO: 465318 - DNA, 19 bp, Mus musculus
  siRNA target sequence for Rad54l (NM_009015.2,2239-2257).
ggcacgatgtccattaaga

SEQ ID NO: 465319 - DNA, 19 bp, Mus musculus
  siRNA target sequence for Rad54l (NM_009015.2,2240-2258).
gcacgatgtccattaagaa

SEQ ID NO: 465320 - DNA, 19 bp, Mus musculus
  siRNA target sequence for Rad54l (NM_009015.2,2289-2307).
cccatcgagccctgatttt

SEQ ID NO: 465321 - DNA, 19 bp, Mus musculus
  siRNA target sequence for Rad54l (NM_009015.2,2291-2309).
catcgagccctgattttgt

SEQ ID NO: 465322 - DNA, 19 bp, Mus musculus
  siRNA target sequence for Rad54l (NM_009015.2,2333-2351).
ggggctgtggtcttaacct

SEQ ID NO: 465323 - DNA, 19 bp, Mus musculus
  siRNA target sequence for Rad54l (NM_009015.2,2360-2378).
ctaaccgactggtcatgtt

SEQ ID NO: 465324 - DNA, 19 bp, Mus musculus
  siRNA target sequence for Rad54l (NM_009015.2,2388-2406).
ctggaatccagccaatgat

SEQ ID NO: 465325 - DNA, 19 bp, Mus musculus
  siRNA target sequence for Rad54l (NM_009015.2,2429-2447).
ggcgtgatggtcaaaagaa

SEQ ID NO: 465326 - DNA, 19 bp, Mus musculus
  siRNA target sequence for Rad54l (NM_009015.2,2557-2575).
gatgtggagcgccactttt

SEQ ID NO: 465327 - DNA, 19 bp, Mus musculus
  siRNA target sequence for Rad54l (NM_009015.2,2562-2580).
ggagcgccacttttctctt

SEQ ID NO: 465328 - DNA, 19 bp, Mus musculus
  siRNA target sequence for Rad54l (NM_009015.2,2584-2602).
gagcttaaagagctgttta

SEQ ID NO: 465329 - DNA, 19 bp, Mus musculus
  siRNA target sequence for Rad54l (NM_009015.2,2624-2642).
gtgacacacatgacagatt

SEQ ID NO: 465330 - DNA, 19 bp, Mus musculus
  siRNA target sequence for Rad54l (NM_009015.2,2628-2646).
cacacatgacagattgcat

SEQ ID NO: 465331 - DNA, 19 bp, Mus musculus
  siRNA target sequence for Rag1 (NM_009019.1,129-147).
gttctgcacccgatgaaat

SEQ ID NO: 465332 - DNA, 19 bp, Mus musculus
  siRNA target sequence for Rag1 (NM_009019.1,132-150).
ctgcacccgatgaaattca

SEQ ID NO: 465333 - DNA, 19 bp, Mus musculus
  siRNA target sequence for Rag1 (NM_009019.1,135-153).
cacccgatgaaattcaaca

SEQ ID NO: 465334 - DNA, 19 bp, Mus musculus
  siRNA target sequence for Rag1 (NM_009019.1,171-189).
ccgagtggaaatttaagct

SEQ ID NO: 465335 - DNA, 19 bp, Mus musculus
  siRNA target sequence for Rag1 (NM_009019.1,190-208).
gtttagggtgagatccttt

SEQ ID NO: 465336 - DNA, 19 bp, Mus musculus
  siRNA target sequence for Rag1 (NM_009019.1,195-213).
gggtgagatcctttgaaaa

SEQ ID NO: 465337 - DNA, 19 bp, Mus musculus
  siRNA target sequence for Rag1 (NM_009019.1,297-315).
ctggtggtcagaactcaat

SEQ ID NO: 465338 - DNA, 19 bp, Mus musculus
  siRNA target sequence for Rag1 (NM_009019.1,300-318).
gtggtcagaactcaattct

SEQ ID NO: 465339 - DNA, 19 bp, Mus musculus
  siRNA target sequence for Rag1 (NM_009019.1,319-337).
gactcaacgagcactgaaa

SEQ ID NO: 465340 - DNA, 19 bp, Mus musculus
  siRNA target sequence for Rag1 (NM_009019.1,321-339).
ctcaacgagcactgaaact

SEQ ID NO: 465341 - DNA, 19 bp, Mus musculus
  siRNA target sequence for Rag1 (NM_009019.1,332-350).
ctgaaactccatcctaaat

SEQ ID NO: 465342 - DNA, 19 bp, Mus musculus
  siRNA target sequence for Rag1 (NM_009019.1,334-352).
gaaactccatcctaaattt

SEQ ID NO: 465343 - DNA, 19 bp, Mus musculus
  siRNA target sequence for Rag1 (NM_009019.1,341-359).
catcctaaattttcaaaga

SEQ ID NO: 465344 - DNA, 19 bp, Mus musculus
  siRNA target sequence for Rag1 (NM_009019.1,426-444).
gcatctgtgggaatcgttt

SEQ ID NO: 465345 - DNA, 19 bp, Mus musculus
  siRNA target sequence for Rag1 (NM_009019.1,660-678).
cccacagtcaggtctactt

SEQ ID NO: 465346 - DNA, 19 bp, Mus musculus
  siRNA target sequence for Rag1 (NM_009019.1,824-842).
cgggaccgtcgcaagagaa

SEQ ID NO: 465347 - DNA, 19 bp, Mus musculus
  siRNA target sequence for Rag1 (NM_009019.1,928-946).
ggacttcccagcacacttt

SEQ ID NO: 465348 - DNA, 19 bp, Mus musculus
  siRNA target sequence for Rag1 (NM_009019.1,935-953).
ccagcacactttgtgaaat

SEQ ID NO: 465349 - DNA, 19 bp, Mus musculus
  siRNA target sequence for Rag1 (NM_009019.1,939-957).
cacactttgtgaaatccat

SEQ ID NO: 465350 - DNA, 19 bp, Mus musculus
  siRNA target sequence for Rag1 (NM_009019.1,964-982).
ccagatatgcgaacacatt

SEQ ID NO: 465351 - DNA, 19 bp, Mus musculus
  siRNA target sequence for Rag1 (NM_009019.1,1033-1051).
cattctcagatgtctcaaa

SEQ ID NO: 465352 - DNA, 19 bp, Mus musculus
  siRNA target sequence for Rag1 (NM_009019.1,1037-1055).
ctcagatgtctcaaagtca

SEQ ID NO: 465353 - DNA, 19 bp, Mus musculus
  siRNA target sequence for Rag1 (NM_009019.1,1122-1140).
cctttctgaacatcttgaa

SEQ ID NO: 465354 - DNA, 19 bp, Mus musculus
  siRNA target sequence for Rag1 (NM_009019.1,1213-1231).
gtcaagccacaaagaatct

SEQ ID NO: 465355 - DNA, 19 bp, Mus musculus
  siRNA target sequence for Rag1 (NM_009019.1,1215-1233).
caagccacaaagaatctaa

SEQ ID NO: 465356 - DNA, 19 bp, Mus musculus
  siRNA target sequence for Rag1 (NM_009019.1,1218-1236).
gccacaaagaatctaaaga

SEQ ID NO: 465357 - DNA, 19 bp, Mus musculus
  siRNA target sequence for Rag1 (NM_009019.1,1235-1253).
gagactttggtgcatatca

SEQ ID NO: 465358 - DNA, 19 bp, Mus musculus
  siRNA target sequence for Rag1 (NM_009019.1,1237-1255).
gactttggtgcatatcaat

SEQ ID NO: 465359 - DNA, 19 bp, Mus musculus
  siRNA target sequence for Rag1 (NM_009019.1,1239-1257).
ctttggtgcatatcaataa

SEQ ID NO: 465360 - DNA, 19 bp, Mus musculus
  siRNA target sequence for Rag1 (NM_009019.1,1293-1311).
cgagaagggcgcagaaaca

SEQ ID NO: 465361 - DNA, 19 bp, Mus musculus
  siRNA target sequence for Rag1 (NM_009019.1,1294-1312).
gagaagggcgcagaaacat

SEQ ID NO: 465362 - DNA, 19 bp, Mus musculus
  siRNA target sequence for Rag1 (NM_009019.1,1324-1342).
gctcaagattcaagtcaaa

SEQ ID NO: 465363 - DNA, 19 bp, Mus musculus
  siRNA target sequence for Rag1 (NM_009019.1,1431-1449).
ggcaagctgatgaattaga

SEQ ID NO: 465364 - DNA, 19 bp, Mus musculus
  siRNA target sequence for Rag1 (NM_009019.1,1495-1513).
cttggccatccgtgtcaat

SEQ ID NO: 465365 - DNA, 19 bp, Mus musculus
  siRNA target sequence for Rag1 (NM_009019.1,1522-1540).
cagctgtagccaataccat

SEQ ID NO: 465366 - DNA, 19 bp, Mus musculus
  siRNA target sequence for Rag1 (NM_009019.1,1524-1542).
gctgtagccaataccataa

SEQ ID NO: 465367 - DNA, 19 bp, Mus musculus
  siRNA target sequence for Rag1 (NM_009019.1,1527-1545).
gtagccaataccataagat

SEQ ID NO: 465368 - DNA, 19 bp, Mus musculus
  siRNA target sequence for Rag1 (NM_009019.1,1650-1668).
ggcagcccccactgaagaa

SEQ ID NO: 465369 - DNA, 19 bp, Mus musculus
  siRNA target sequence for Rag1 (NM_009019.1,1651-1669).
gcagcccccactgaagaat

SEQ ID NO: 465370 - DNA, 19 bp, Mus musculus
  siRNA target sequence for Rag1 (NM_009019.1,1680-1698).
gaactgatgttggaattat

SEQ ID NO: 465371 - DNA, 19 bp, Mus musculus
  siRNA target sequence for Rag1 (NM_009019.1,1683-1701).
ctgatgttggaattattga

SEQ ID NO: 465372 - DNA, 19 bp, Mus musculus
  siRNA target sequence for Rag1 (NM_009019.1,1730-1748).
gatgagtacccagtagata

SEQ ID NO: 465373 - DNA, 19 bp, Mus musculus
  siRNA target sequence for Rag1 (NM_009019.1,1735-1753).
gtacccagtagataccatt

SEQ ID NO: 465374 - DNA, 19 bp, Mus musculus
  siRNA target sequence for Rag1 (NM_009019.1,1824-1842).
gcatgagatcccaagatct

SEQ ID NO: 465375 - DNA, 19 bp, Mus musculus
  siRNA target sequence for Rag1 (NM_009019.1,1828-1846).
gagatcccaagatcttgat

SEQ ID NO: 465376 - DNA, 19 bp, Mus musculus
  siRNA target sequence for Rag1 (NM_009019.1,1941-1959).
cagaaaaggccgttcgttt

SEQ ID NO: 465377 - DNA, 19 bp, Mus musculus
  siRNA target sequence for Rag1 (NM_009019.1,1949-1967).
gccgttcgtttctctttca

SEQ ID NO: 465378 - DNA, 19 bp, Mus musculus
  siRNA target sequence for Rag1 (NM_009019.1,2049-2067).
gcaagccgttgtgtcttat

SEQ ID NO: 465379 - DNA, 19 bp, Mus musculus
  siRNA target sequence for Rag1 (NM_009019.1,2092-2110).
gacccttactgctattcta

SEQ ID NO: 465380 - DNA, 19 bp, Mus musculus
  siRNA target sequence for Rag1 (NM_009019.1,2135-2153).
gccatgaagagcagtgaat

SEQ ID NO: 465381 - DNA, 19 bp, Mus musculus
  siRNA target sequence for Rag1 (NM_009019.1,2177-2195).
cccaggacttttaaattca

SEQ ID NO: 465382 - DNA, 19 bp, Mus musculus
  siRNA target sequence for Rag1 (NM_009019.1,2200-2218).
caggggcactggatacgat

SEQ ID NO: 465383 - DNA, 19 bp, Mus musculus
  siRNA target sequence for Rag1 (NM_009019.1,2206-2224).
cactggatacgatgaaaaa

SEQ ID NO: 465384 - DNA, 19 bp, Mus musculus
  siRNA target sequence for Rag1 (NM_009019.1,2299-2317).
ggaagcctctcagaatctt

SEQ ID NO: 465385 - DNA, 19 bp, Mus musculus
  siRNA target sequence for Rag1 (NM_009019.1,2315-2333).
cttgtcttccactccataa

SEQ ID NO: 465386 - DNA, 19 bp, Mus musculus
  siRNA target sequence for Rag1 (NM_009019.1,2318-2336).
gtcttccactccataacca

SEQ ID NO: 465387 - DNA, 19 bp, Mus musculus
  siRNA target sequence for Rag1 (NM_009019.1,2374-2392).
gcggtccaatccgtatcat

SEQ ID NO: 465388 - DNA, 19 bp, Mus musculus
  siRNA target sequence for Rag1 (NM_009019.1,2376-2394).
ggtccaatccgtatcatga

SEQ ID NO: 465389 - DNA, 19 bp, Mus musculus
  siRNA target sequence for Rag1 (NM_009019.1,2449-2467).
cgagacagtcccttccata

SEQ ID NO: 465390 - DNA, 19 bp, Mus musculus
  siRNA target sequence for Rag1 (NM_009019.1,2452-2470).
gacagtcccttccatagat

SEQ ID NO: 465391 - DNA, 19 bp, Mus musculus
  siRNA target sequence for Rag1 (NM_009019.1,2499-2517).
ctgaattctataagatttt

SEQ ID NO: 465392 - DNA, 19 bp, Mus musculus
  siRNA target sequence for Rag1 (NM_009019.1,2527-2545).
gataggggaagtgtataaa

SEQ ID NO: 465393 - DNA, 19 bp, Mus musculus
  siRNA target sequence for Rag1 (NM_009019.1,2586-2604).
ccacgctggacaaacatct

SEQ ID NO: 465394 - DNA, 19 bp, Mus musculus
  siRNA target sequence for Rag1 (NM_009019.1,2605-2623).
ccggaaaaggatgaactta

SEQ ID NO: 465395 - DNA, 19 bp, Mus musculus
  siRNA target sequence for Rag1 (NM_009019.1,2606-2624).
cggaaaaggatgaacttaa

SEQ ID NO: 465396 - DNA, 19 bp, Mus musculus
  siRNA target sequence for Rag1 (NM_009019.1,2613-2631).
ggatgaacttaaaaccaat

SEQ ID NO: 465397 - DNA, 19 bp, Mus musculus
  siRNA target sequence for Rag1 (NM_009019.1,2684-2702).
gacgcagtttgtgagttaa

SEQ ID NO: 465398 - DNA, 19 bp, Mus musculus
  siRNA target sequence for Rag1 (NM_009019.1,2686-2704).
cgcagtttgtgagttaatt

SEQ ID NO: 465399 - DNA, 19 bp, Mus musculus
  siRNA target sequence for Rag1 (NM_009019.1,2733-2751).
gggagctcatggaccttta

SEQ ID NO: 465400 - DNA, 19 bp, Mus musculus
  siRNA target sequence for Rag1 (NM_009019.1,2765-2783).
cccgtgtggcgctcttcat

SEQ ID NO: 465401 - DNA, 19 bp, Mus musculus
  siRNA target sequence for Rag1 (NM_009019.1,2778-2796).
cttcatgtcccgctaaaga

SEQ ID NO: 465402 - DNA, 19 bp, Mus musculus
  siRNA target sequence for Rag1 (NM_009019.1,2810-2828).
ctctgtcagtacagtttca

SEQ ID NO: 465403 - DNA, 19 bp, Mus musculus
  siRNA target sequence for Rag1 (NM_009019.1,2882-2900).
ggcaaaatcaccaattact

SEQ ID NO: 465404 - DNA, 19 bp, Mus musculus
  siRNA target sequence for Rag1 (NM_009019.1,2883-2901).
gcaaaatcaccaattactt

SEQ ID NO: 465405 - DNA, 19 bp, Mus musculus
  siRNA target sequence for Rag1 (NM_009019.1,2921-2939).
gtccctgaaattattgaaa

SEQ ID NO: 465406 - DNA, 19 bp, Mus musculus
  siRNA target sequence for Rag1 (NM_009019.1,2973-2991).
gaaatgaatcgggtaacaa

SEQ ID NO: 465407 - DNA, 19 bp, Mus musculus
  siRNA target sequence for Rag1 (NM_009019.1,2983-3001).
gggtaacaagctgtttaga

SEQ ID NO: 465408 - DNA, 19 bp, Mus musculus
  siRNA target sequence for Rag1 (NM_009019.1,3046-3064).
ggaagatgtcctgaaacat

SEQ ID NO: 465409 - DNA, 19 bp, Mus musculus
  siRNA target sequence for Rag1 (NM_009019.1,3110-3128).
cataacgcgttaaaaagct

SEQ ID NO: 465410 - DNA, 19 bp, Mus musculus
  siRNA target sequence for Rag1 (NM_009019.1,3131-3149).
gggtttaccatgaactcaa

SEQ ID NO: 465411 - DNA, 19 bp, Mus musculus
  siRNA target sequence for Rag1 (NM_009019.1,3132-3150).
ggtttaccatgaactcaaa

SEQ ID NO: 465412 - DNA, 19 bp, Mus musculus
  siRNA target sequence for Rag1 (NM_009019.1,3188-3206).
ctggaaagccaagattcaa

SEQ ID NO: 465413 - DNA, 19 bp, Mus musculus
  siRNA target sequence for Rag1 (NM_009019.1,3197-3215).
caagattcaatggagtttt

SEQ ID NO: 465414 - DNA, 19 bp, Mus musculus
  siRNA target sequence for Rag2 (NM_009020.2,228-246).
gtaacagtgggtcataaca

SEQ ID NO: 465415 - DNA, 19 bp, Mus musculus
  siRNA target sequence for Rag2 (NM_009020.2,238-256).
gtcataacatagccttaat

SEQ ID NO: 465416 - DNA, 19 bp, Mus musculus
  siRNA target sequence for Rag2 (NM_009020.2,264-282).
ggcttctcacttatgaatt

SEQ ID NO: 465417 - DNA, 19 bp, Mus musculus
  siRNA target sequence for Rag2 (NM_009020.2,265-283).
gcttctcacttatgaattt

SEQ ID NO: 465418 - DNA, 19 bp, Mus musculus
  siRNA target sequence for Rag2 (NM_009020.2,285-303).
gatggccaagttttcttct

SEQ ID NO: 465419 - DNA, 19 bp, Mus musculus
  siRNA target sequence for Rag2 (NM_009020.2,390-408).
gcaatcttctctaaagatt

SEQ ID NO: 465420 - DNA, 19 bp, Mus musculus
  siRNA target sequence for Rag2 (NM_009020.2,436-454).
cagctacttgctcatacaa

SEQ ID NO: 465421 - DNA, 19 bp, Mus musculus
  siRNA target sequence for Rag2 (NM_009020.2,465-483).
gactctgacaagcatcaat

SEQ ID NO: 465422 - DNA, 19 bp, Mus musculus
  siRNA target sequence for Rag2 (NM_009020.2,467-485).
ctctgacaagcatcaatat

SEQ ID NO: 465423 - DNA, 19 bp, Mus musculus
  siRNA target sequence for Rag2 (NM_009020.2,471-489).
gacaagcatcaatatatca

SEQ ID NO: 465424 - DNA, 19 bp, Mus musculus
  siRNA target sequence for Rag2 (NM_009020.2,473-491).
caagcatcaatatatcatt

SEQ ID NO: 465425 - DNA, 19 bp, Mus musculus
  siRNA target sequence for Rag2 (NM_009020.2,518-536).
gctttccgataagatttat

SEQ ID NO: 465426 - DNA, 19 bp, Mus musculus
  siRNA target sequence for Rag2 (NM_009020.2,519-537).
ctttccgataagatttata

SEQ ID NO: 465427 - DNA, 19 bp, Mus musculus
  siRNA target sequence for Rag2 (NM_009020.2,523-541).
ccgataagatttatatcat

SEQ ID NO: 465428 - DNA, 19 bp, Mus musculus
  siRNA target sequence for Rag2 (NM_009020.2,525-543).
gataagatttatatcatgt

SEQ ID NO: 465429 - DNA, 19 bp, Mus musculus
  siRNA target sequence for Rag2 (NM_009020.2,542-560).
gtctgtcgcttgcaagaat

SEQ ID NO: 465430 - DNA, 19 bp, Mus musculus
  siRNA target sequence for Rag2 (NM_009020.2,546-564).
gtcgcttgcaagaataaca

SEQ ID NO: 465431 - DNA, 19 bp, Mus musculus
  siRNA target sequence for Rag2 (NM_009020.2,548-566).
cgcttgcaagaataacaaa

SEQ ID NO: 465432 - DNA, 19 bp, Mus musculus
  siRNA target sequence for Rag2 (NM_009020.2,579-597).
cgttgcacagagaaagact

SEQ ID NO: 465433 - DNA, 19 bp, Mus musculus
  siRNA target sequence for Rag2 (NM_009020.2,583-601).
gcacagagaaagacttagt

SEQ ID NO: 465434 - DNA, 19 bp, Mus musculus
  siRNA target sequence for Rag2 (NM_009020.2,584-602).
cacagagaaagacttagta

SEQ ID NO: 465435 - DNA, 19 bp, Mus musculus
  siRNA target sequence for Rag2 (NM_009020.2,619-637).
ccagatacggccattccat

SEQ ID NO: 465436 - DNA, 19 bp, Mus musculus
  siRNA target sequence for Rag2 (NM_009020.2,620-638).
cagatacggccattccatt

SEQ ID NO: 465437 - DNA, 19 bp, Mus musculus
  siRNA target sequence for Rag2 (NM_009020.2,635-653).
cattgacgtggtgtatagt

SEQ ID NO: 465438 - DNA, 19 bp, Mus musculus
  siRNA target sequence for Rag2 (NM_009020.2,718-736).
cagaaaaatggaatagtgt

SEQ ID NO: 465439 - DNA, 19 bp, Mus musculus
  siRNA target sequence for Rag2 (NM_009020.2,751-769).
cccatgttttcttgataga

SEQ ID NO: 465440 - DNA, 19 bp, Mus musculus
  siRNA target sequence for Rag2 (NM_009020.2,753-771).
catgttttcttgatagatt

SEQ ID NO: 465441 - DNA, 19 bp, Mus musculus
  siRNA target sequence for Rag2 (NM_009020.2,780-798).
gggtgtgctacatcatata

SEQ ID NO: 465442 - DNA, 19 bp, Mus musculus
  siRNA target sequence for Rag2 (NM_009020.2,845-863).
cagaaacgataccgtttat

SEQ ID NO: 465443 - DNA, 19 bp, Mus musculus
  siRNA target sequence for Rag2 (NM_009020.2,847-865).
gaaacgataccgtttatat

SEQ ID NO: 465444 - DNA, 19 bp, Mus musculus
  siRNA target sequence for Rag2 (NM_009020.2,878-896).
ctcacttgccagtaatata

SEQ ID NO: 465445 - DNA, 19 bp, Mus musculus
  siRNA target sequence for Rag2 (NM_009020.2,897-915).
cgccctgctaacttgtata

SEQ ID NO: 465446 - DNA, 19 bp, Mus musculus
  siRNA target sequence for Rag2 (NM_009020.2,899-917).
ccctgctaacttgtataga

SEQ ID NO: 465447 - DNA, 19 bp, Mus musculus
  siRNA target sequence for Rag2 (NM_009020.2,900-918).
cctgctaacttgtatagaa

SEQ ID NO: 465448 - DNA, 19 bp, Mus musculus
  siRNA target sequence for Rag2 (NM_009020.2,903-921).
gctaacttgtatagaataa

SEQ ID NO: 465449 - DNA, 19 bp, Mus musculus
  siRNA target sequence for Rag2 (NM_009020.2,965-983).
cttgccaggaggaatctct

SEQ ID NO: 465450 - DNA, 19 bp, Mus musculus
  siRNA target sequence for Rag2 (NM_009020.2,1039-1057).
gttatcagctggaaaatca

SEQ ID NO: 465451 - DNA, 19 bp, Mus musculus
  siRNA target sequence for Rag2 (NM_009020.2,1089-1107).
ggggacaacacgattgaaa

SEQ ID NO: 465452 - DNA, 19 bp, Mus musculus
  siRNA target sequence for Rag2 (NM_009020.2,1090-1108).
gggacaacacgattgaaat

SEQ ID NO: 465453 - DNA, 19 bp, Mus musculus
  siRNA target sequence for Rag2 (NM_009020.2,1094-1112).
caacacgattgaaatcagt

SEQ ID NO: 465454 - DNA, 19 bp, Mus musculus
  siRNA target sequence for Rag2 (NM_009020.2,1133-1151).
gacctcagatattaagcat

SEQ ID NO: 465455 - DNA, 19 bp, Mus musculus
  siRNA target sequence for Rag2 (NM_009020.2,1138-1156).
cagatattaagcatagcaa

SEQ ID NO: 465456 - DNA, 19 bp, Mus musculus
  siRNA target sequence for Rag2 (NM_009020.2,1200-1218).
ggcataccaggagacaata

SEQ ID NO: 465457 - DNA, 19 bp, Mus musculus
  siRNA target sequence for Rag2 (NM_009020.2,1201-1219).
gcataccaggagacaataa

SEQ ID NO: 465458 - DNA, 19 bp, Mus musculus
  siRNA target sequence for Rag2 (NM_009020.2,1214-1232).
caataagcaggctatgtca

SEQ ID NO: 465459 - DNA, 19 bp, Mus musculus
  siRNA target sequence for Rag2 (NM_009020.2,1225-1243).
ctatgtcagaagcattcta

SEQ ID NO: 465460 - DNA, 19 bp, Mus musculus
  siRNA target sequence for Rag2 (NM_009020.2,1236-1254).
gcattctatttctatactt

SEQ ID NO: 465461 - DNA, 19 bp, Mus musculus
  siRNA target sequence for Rag2 (NM_009020.2,1415-1433).
ctacaatgaagatgatgaa

SEQ ID NO: 465462 - DNA, 19 bp, Mus musculus
  siRNA target sequence for Rag2 (NM_009020.2,1431-1449).
gaagatgacgagtctgtaa

SEQ ID NO: 465463 - DNA, 19 bp, Mus musculus
  siRNA target sequence for Rag2 (NM_009020.2,1446-1464).
gtaaccggctactggataa

SEQ ID NO: 465464 - DNA, 19 bp, Mus musculus
  siRNA target sequence for Rag2 (NM_009020.2,1471-1489).
gccctacttgtgatgttga

SEQ ID NO: 465465 - DNA, 19 bp, Mus musculus
  siRNA target sequence for Rag2 (NM_009020.2,1477-1495).
cttgtgatgttgacatcaa

SEQ ID NO: 465466 - DNA, 19 bp, Mus musculus
  siRNA target sequence for Rag2 (NM_009020.2,1482-1500).
gatgttgacatcaatacct

SEQ ID NO: 465467 - DNA, 19 bp, Mus musculus
  siRNA target sequence for Rag2 (NM_009020.2,1499-1517).
ctgggttccgttctattca

SEQ ID NO: 465468 - DNA, 19 bp, Mus musculus
  siRNA target sequence for Rag2 (NM_009020.2,1538-1556).
catgatctattgttctcat

SEQ ID NO: 465469 - DNA, 19 bp, Mus musculus
  siRNA target sequence for Rag2 (NM_009020.2,1575-1593).
catgcccagtgcatggatt

SEQ ID NO: 465470 - DNA, 19 bp, Mus musculus
  siRNA target sequence for Rag2 (NM_009020.2,1579-1597).
cccagtgcatggatttgga

SEQ ID NO: 465471 - DNA, 19 bp, Mus musculus
  siRNA target sequence for Rag2 (NM_009020.2,1623-1641).
gaaggaagcaacaagtatt

SEQ ID NO: 465472 - DNA, 19 bp, Mus musculus
  siRNA target sequence for Rag2 (NM_009020.2,1630-1648).
gcaacaagtattattgcaa

SEQ ID NO: 465473 - DNA, 19 bp, Mus musculus
  siRNA target sequence for Rag2 (NM_009020.2,1631-1649).
caacaagtattattgcaat

SEQ ID NO: 465474 - DNA, 19 bp, Mus musculus
  siRNA target sequence for Rag2 (NM_009020.2,1761-1779).
gccaagaaatccttcctta

SEQ ID NO: 465475 - DNA, 19 bp, Mus musculus
  siRNA target sequence for Rag2 (NM_009020.2,1772-1790).
cttccttagaagactgttt

SEQ ID NO: 465476 - DNA, 19 bp, Mus musculus
  siRNA target sequence for Rag2 (NM_009020.2,1775-1793).
ccttagaagactgtttgat

SEQ ID NO: 465477 - DNA, 19 bp, Mus musculus
  siRNA target sequence for Rag2 (NM_009020.2,1776-1794).
cttagaagactgtttgatt

SEQ ID NO: 465478 - DNA, 19 bp, Mus musculus
  siRNA target sequence for Rai1 (NM_009021.1,379-397).
catcgcgcctggagaacta

SEQ ID NO: 465479 - DNA, 19 bp, Mus musculus
  siRNA target sequence for Rai1 (NM_009021.1,444-462).
ctggccaaggactactaca

SEQ ID NO: 465480 - DNA, 19 bp, Mus musculus
  siRNA target sequence for Rai1 (NM_009021.1,1066-1084).
ggcaacgggtccagaatct

SEQ ID NO: 465481 - DNA, 19 bp, Mus musculus
  siRNA target sequence for Rai1 (NM_009021.1,1067-1085).
gcaacgggtccagaatctt

SEQ ID NO: 465482 - DNA, 19 bp, Mus musculus
  siRNA target sequence for Rai1 (NM_009021.1,1308-1326).
ggtcgctccccttcctata

SEQ ID NO: 465483 - DNA, 19 bp, Mus musculus
  siRNA target sequence for Rai1 (NM_009021.1,1417-1435).
cagaccacagccactttat

SEQ ID NO: 465484 - DNA, 19 bp, Mus musculus
  siRNA target sequence for Rai1 (NM_009021.1,2203-2221).
gcctggacactgtagcaaa

SEQ ID NO: 465485 - DNA, 19 bp, Mus musculus
  siRNA target sequence for Rai1 (NM_009021.1,2207-2225).
ggacactgtagcaaagact

SEQ ID NO: 465486 - DNA, 19 bp, Mus musculus
  siRNA target sequence for Rai1 (NM_009021.1,2381-2399).
cggcaccaagcctttgcta

SEQ ID NO: 465487 - DNA, 19 bp, Mus musculus
  siRNA target sequence for Rai1 (NM_009021.1,2671-2689).
cactgtccggggacttcaa

SEQ ID NO: 465488 - DNA, 19 bp, Mus musculus
  siRNA target sequence for Rai1 (NM_009021.1,3049-3067).
ctgtgggtgcccaatcaaa

SEQ ID NO: 465489 - DNA, 19 bp, Mus musculus
  siRNA target sequence for Rai1 (NM_009021.1,3053-3071).
gggtgcccaatcaaaggtt

SEQ ID NO: 465490 - DNA, 19 bp, Mus musculus
  siRNA target sequence for Rai1 (NM_009021.1,3068-3086).
ggttcagagctggtttgaa

SEQ ID NO: 465491 - DNA, 19 bp, Mus musculus
  siRNA target sequence for Rai1 (NM_009021.1,3069-3087).
gttcagagctggtttgaat

SEQ ID NO: 465492 - DNA, 19 bp, Mus musculus
  siRNA target sequence for Rai1 (NM_009021.1,3072-3090).
cagagctggtttgaatctt

SEQ ID NO: 465493 - DNA, 19 bp, Mus musculus
  siRNA target sequence for Rai1 (NM_009021.1,3405-3423).
gaagggctccccagaatgt

SEQ ID NO: 465494 - DNA, 19 bp, Mus musculus
  siRNA target sequence for Rai1 (NM_009021.1,3408-3426).
gggctccccagaatgtgta

SEQ ID NO: 465495 - DNA, 19 bp, Mus musculus
  siRNA target sequence for Rai1 (NM_009021.1,3542-3560).
caagcgggtcggaaaacca

SEQ ID NO: 465496 - DNA, 19 bp, Mus musculus
  siRNA target sequence for Rai1 (NM_009021.1,3788-3806).
ccctgctaacaaccattta

SEQ ID NO: 465497 - DNA, 19 bp, Mus musculus
  siRNA target sequence for Rai1 (NM_009021.1,3882-3900).
ggtacaggaaacaagcttt

SEQ ID NO: 465498 - DNA, 19 bp, Mus musculus
  siRNA target sequence for Rai1 (NM_009021.1,3974-3992).
catcctgagaagcaacaat

SEQ ID NO: 465499 - DNA, 19 bp, Mus musculus
  siRNA target sequence for Rai1 (NM_009021.1,4128-4146).
gcatgcatggggttgtcta

SEQ ID NO: 465500 - DNA, 19 bp, Mus musculus
  siRNA target sequence for Rai1 (NM_009021.1,4211-4229).
caagctggaggccatagta

SEQ ID NO: 465501 - DNA, 19 bp, Mus musculus
  siRNA target sequence for Rai1 (NM_009021.1,4240-4258).
cctcacctgggctcaagaa

SEQ ID NO: 465502 - DNA, 19 bp, Mus musculus
  siRNA target sequence for Rai1 (NM_009021.1,4424-4442).
cagcaggtccctaaaaggt

SEQ ID NO: 465503 - DNA, 19 bp, Mus musculus
  siRNA target sequence for Rai1 (NM_009021.1,4426-4444).
gcaggtccctaaaaggtaa

SEQ ID NO: 465504 - DNA, 19 bp, Mus musculus
  siRNA target sequence for Rai1 (NM_009021.1,4427-4445).
caggtccctaaaaggtaaa

SEQ ID NO: 465505 - DNA, 19 bp, Mus musculus
  siRNA target sequence for Rai1 (NM_009021.1,4432-4450).
ccctaaaaggtaaactctt

SEQ ID NO: 465506 - DNA, 19 bp, Mus musculus
  siRNA target sequence for Rai1 (NM_009021.1,4440-4458).
ggtaaactcttgaacagta

SEQ ID NO: 465507 - DNA, 19 bp, Mus musculus
  siRNA target sequence for Rai1 (NM_009021.1,4441-4459).
gtaaactcttgaacagtaa

SEQ ID NO: 465508 - DNA, 19 bp, Mus musculus
  siRNA target sequence for Rai1 (NM_009021.1,4511-4529).
ggagaccctgccatcacta

SEQ ID NO: 465509 - DNA, 19 bp, Mus musculus
  siRNA target sequence for Rai1 (NM_009021.1,4536-4554).
gcccgagcaccgaagaaaa

SEQ ID NO: 465510 - DNA, 19 bp, Mus musculus
  siRNA target sequence for Rai1 (NM_009021.1,4931-4949).
gcctgaaatccgactcaaa

SEQ ID NO: 465511 - DNA, 19 bp, Mus musculus
  siRNA target sequence for Rai1 (NM_009021.1,4933-4951).
ctgaaatccgactcaaata

SEQ ID NO: 465512 - DNA, 19 bp, Mus musculus
  siRNA target sequence for Rai1 (NM_009021.1,4935-4953).
gaaatccgactcaaataca

SEQ ID NO: 465513 - DNA, 19 bp, Mus musculus
  siRNA target sequence for Rai1 (NM_009021.1,4941-4959).
cgactcaaatacatttcct

SEQ ID NO: 465514 - DNA, 19 bp, Mus musculus
  siRNA target sequence for Rai1 (NM_009021.1,5028-5046).
gatgcttacaccaccatat

SEQ ID NO: 465515 - DNA, 19 bp, Mus musculus
  siRNA target sequence for Rai1 (NM_009021.1,5340-5358).
cactgcctccccaaaaaga

SEQ ID NO: 465516 - DNA, 19 bp, Mus musculus
  siRNA target sequence for Rai1 (NM_009021.1,5589-5607).
cggctgcagagttgctatt

SEQ ID NO: 465517 - DNA, 19 bp, Mus musculus
  siRNA target sequence for Rai1 (NM_009021.1,5654-5672).
caagagccgcaaacatgaa

SEQ ID NO: 465518 - DNA, 19 bp, Mus musculus
  siRNA target sequence for Rbbp6 (NM_011247.1,615-633).
gatgagatctcccatatca

SEQ ID NO: 465519 - DNA, 19 bp, Mus musculus
  siRNA target sequence for Rbbp6 (NM_011247.1,688-706).
ccctctatatcttcattaa

SEQ ID NO: 465520 - DNA, 19 bp, Mus musculus
  siRNA target sequence for Rbbp6 (NM_011247.1,690-708).
ctctatatcttcattaact

SEQ ID NO: 465521 - DNA, 19 bp, Mus musculus
  siRNA target sequence for Rbbp6 (NM_011247.1,1242-1260).
gcctcctccccatacactt

SEQ ID NO: 465522 - DNA, 19 bp, Mus musculus
  siRNA target sequence for Rbbp6 (NM_011247.1,1655-1673).
gaggcaagagccgcaatta

SEQ ID NO: 465523 - DNA, 19 bp, Mus musculus
  siRNA target sequence for Rbbp6 (NM_011247.1,1814-1832).
cagagcgtgagtattttaa

SEQ ID NO: 465524 - DNA, 19 bp, Mus musculus
  siRNA target sequence for Rbbp6 (NM_011247.1,1816-1834).
gagcgtgagtattttaata

SEQ ID NO: 465525 - DNA, 19 bp, Mus musculus
  siRNA target sequence for Rbbp6 (NM_011247.1,1818-1836).
gcgtgagtattttaataga

SEQ ID NO: 465526 - DNA, 19 bp, Mus musculus
  siRNA target sequence for Rbbp6 (NM_011247.1,1822-1840).
gagtattttaatagataca

SEQ ID NO: 465527 - DNA, 19 bp, Mus musculus
  siRNA target sequence for Rbbp6 (NM_011247.1,1883-1901).
ggagtgtcgactttagaga

SEQ ID NO: 465528 - DNA, 19 bp, Mus musculus
  siRNA target sequence for Rbbp6 (NM_011247.1,1952-1970).
ggtatgagaagtactacaa

SEQ ID NO: 465529 - DNA, 19 bp, Mus musculus
  siRNA target sequence for Rbbp6 (NM_011247.1,2342-2360).
cagggattgatgaaacgaa

SEQ ID NO: 465530 - DNA, 19 bp, Mus musculus
  siRNA target sequence for Rbbp6 (NM_011247.1,2350-2368).
gatgaaacgaagacagata

SEQ ID NO: 465531 - DNA, 19 bp, Mus musculus
  siRNA target sequence for Rbbp6 (NM_011247.1,2420-2438).
caatggacgcagaatcgat

SEQ ID NO: 465532 - DNA, 19 bp, Mus musculus
  siRNA target sequence for Rbbp6 (NM_011247.1,2425-2443).
gacgcagaatcgatcactt

SEQ ID NO: 465533 - DNA, 19 bp, Mus musculus
  siRNA target sequence for Rbbp6 (NM_011247.1,2428-2446).
gcagaatcgatcactttca

SEQ ID NO: 465534 - DNA, 19 bp, Mus musculus
  siRNA target sequence for Rbbp6 (NM_011247.1,2431-2449).
gaatcgatcactttcaagt

SEQ ID NO: 465535 - DNA, 19 bp, Mus musculus
  siRNA target sequence for Rbbp6 (NM_011247.1,2439-2457).
cactttcaagtcagtatct

SEQ ID NO: 465536 - DNA, 19 bp, Mus musculus
  siRNA target sequence for Rbbp6 (NM_011247.1,2441-2459).
ctttcaagtcagtatctga

SEQ ID NO: 465537 - DNA, 19 bp, Mus musculus
  siRNA target sequence for Rbbp6 (NM_011247.1,2502-2520).
caagaccaaacggaaaagt

SEQ ID NO: 465538 - DNA, 19 bp, Mus musculus
  siRNA target sequence for Rbbp6 (NM_011247.1,2613-2631).
gtctgagccgccactcaaa

SEQ ID NO: 465539 - DNA, 19 bp, Mus musculus
  siRNA target sequence for Rbbp6 (NM_011247.1,2615-2633).
ctgagccgccactcaaaaa

SEQ ID NO: 465540 - DNA, 19 bp, Mus musculus
  siRNA target sequence for Rbbp6 (NM_011247.1,2644-2662).
gaggctacaaagattgact

SEQ ID NO: 465541 - DNA, 19 bp, Mus musculus
  siRNA target sequence for Rbbp6 (NM_011247.1,2651-2669).
caaagattgactctgtaaa

SEQ ID NO: 465542 - DNA, 19 bp, Mus musculus
  siRNA target sequence for Rbbp6 (NM_011247.1,2655-2673).
gattgactctgtaaaacct

SEQ ID NO: 465543 - DNA, 19 bp, Mus musculus
  siRNA target sequence for Rbbp6 (NM_011247.1,2713-2731).
cctagaaaagcccattcta

SEQ ID NO: 465544 - DNA, 19 bp, Mus musculus
  siRNA target sequence for Rbbp6 (NM_011247.1,3034-3052).
gaaaaggacaagattgcat

SEQ ID NO: 465545 - DNA, 19 bp, Mus musculus
  siRNA target sequence for Rbbp6 (NM_011247.1,3250-3268).
gattacaccagtacaagtt

SEQ ID NO: 465546 - DNA, 19 bp, Mus musculus
  siRNA target sequence for Rbbp6 (NM_011247.1,3255-3273).
caccagtacaagttcaact

SEQ ID NO: 465547 - DNA, 19 bp, Mus musculus
  siRNA target sequence for Rbbp6 (NM_011247.1,3279-3297).
cagtcctgtgaggaaatct

SEQ ID NO: 465548 - DNA, 19 bp, Mus musculus
  siRNA target sequence for Rbbp6 (NM_011247.1,3319-3337).
cgaacagtcattaaaacta

SEQ ID NO: 465549 - DNA, 19 bp, Mus musculus
  siRNA target sequence for Rbbp6 (NM_011247.1,3360-3378).
cacagctcctgctgaagat

SEQ ID NO: 465550 - DNA, 19 bp, Mus musculus
  siRNA target sequence for Rbbp6 (NM_011247.1,3367-3385).
cctgctgaagatgttataa

SEQ ID NO: 465551 - DNA, 19 bp, Mus musculus
  siRNA target sequence for Rbbp6 (NM_011247.1,3368-3386).
ctgctgaagatgttataat

SEQ ID NO: 465552 - DNA, 19 bp, Mus musculus
  siRNA target sequence for Rbbp6 (NM_011247.1,3370-3388).
gctgaagatgttataatta

SEQ ID NO: 465553 - DNA, 19 bp, Mus musculus
  siRNA target sequence for Rbbp6 (NM_011247.1,3373-3391).
gaagatgttataattatga

SEQ ID NO: 465554 - DNA, 19 bp, Mus musculus
  siRNA target sequence for Rbbp6 (NM_011247.1,3478-3496).
gggaaaccatcgagtatta

SEQ ID NO: 465555 - DNA, 19 bp, Mus musculus
  siRNA target sequence for Rbbp6 (NM_011247.1,3488-3506).
cgagtattataaaaaatgt

SEQ ID NO: 465556 - DNA, 19 bp, Mus musculus
  siRNA target sequence for Rbbp6 (NM_011247.1,3755-3773).
gtgagcagggacattttaa

SEQ ID NO: 465557 - DNA, 19 bp, Mus musculus
  siRNA target sequence for Rbbp6 (NM_011247.1,3757-3775).
gagcagggacattttaaga

SEQ ID NO: 465558 - DNA, 19 bp, Mus musculus
  siRNA target sequence for Rbbp6 (NM_011247.1,3759-3777).
gcagggacattttaagact

SEQ ID NO: 465559 - DNA, 19 bp, Mus musculus
  siRNA target sequence for Rbbp6 (NM_011247.1,3879-3897).
ctacgacagcagggattat

SEQ ID NO: 465560 - DNA, 19 bp, Mus musculus
  siRNA target sequence for Rbbp6 (NM_011247.1,3914-3932).
gagacgagagaggtgaatt

SEQ ID NO: 465561 - DNA, 19 bp, Mus musculus
  siRNA target sequence for Rbbp6 (NM_011247.1,3918-3936).
cgagagaggtgaattagca

SEQ ID NO: 465562 - DNA, 19 bp, Mus musculus
  siRNA target sequence for Rbbp6 (NM_011247.1,3919-3937).
gagagaggtgaattagcaa

SEQ ID NO: 465563 - DNA, 19 bp, Mus musculus
  siRNA target sequence for Rbbp6 (NM_011247.1,4081-4099).
cataaagccccctacgaaa

SEQ ID NO: 465564 - DNA, 19 bp, Mus musculus
  siRNA target sequence for Rbl2 (NM_011250.2,174-192).
ggtccccgagccatcagat

SEQ ID NO: 465565 - DNA, 19 bp, Mus musculus
  siRNA target sequence for Rbl2 (NM_011250.2,305-323).
gaccttcattggttagcat

SEQ ID NO: 465566 - DNA, 19 bp, Mus musculus
  siRNA target sequence for Rbl2 (NM_011250.2,315-333).
ggttagcatgtgccttata

SEQ ID NO: 465567 - DNA, 19 bp, Mus musculus
  siRNA target sequence for Rbl2 (NM_011250.2,372-390).
ggaccgctgaaggaaacta

SEQ ID NO: 465568 - DNA, 19 bp, Mus musculus
  siRNA target sequence for Rbl2 (NM_011250.2,375-393).
ccgctgaaggaaactatgt

SEQ ID NO: 465569 - DNA, 19 bp, Mus musculus
  siRNA target sequence for Rbl2 (NM_011250.2,376-394).
cgctgaaggaaactatgta

SEQ ID NO: 465570 - DNA, 19 bp, Mus musculus
  siRNA target sequence for Rbl2 (NM_011250.2,380-398).
gaaggaaactatgtatctt

SEQ ID NO: 465571 - DNA, 19 bp, Mus musculus
  siRNA target sequence for Rbl2 (NM_011250.2,420-438).
cggagcagagcctaattga

SEQ ID NO: 465572 - DNA, 19 bp, Mus musculus
  siRNA target sequence for Rbl2 (NM_011250.2,422-440).
gagcagagcctaattgaat

SEQ ID NO: 465573 - DNA, 19 bp, Mus musculus
  siRNA target sequence for Rbl2 (NM_011250.2,474-492).
caaatctgcccccacattt

SEQ ID NO: 465574 - DNA, 19 bp, Mus musculus
  siRNA target sequence for Rbl2 (NM_011250.2,493-511).
ccgagaacgtactgaaaga

SEQ ID NO: 465575 - DNA, 19 bp, Mus musculus
  siRNA target sequence for Rbl2 (NM_011250.2,646-664).
cacatcagaaattttccat

SEQ ID NO: 465576 - DNA, 19 bp, Mus musculus
  siRNA target sequence for Rbl2 (NM_011250.2,695-713).
gggaacttccccatgatta

SEQ ID NO: 465577 - DNA, 19 bp, Mus musculus
  siRNA target sequence for Rbl2 (NM_011250.2,705-723).
ccatgattagcgatgatct

SEQ ID NO: 465578 - DNA, 19 bp, Mus musculus
  siRNA target sequence for Rbl2 (NM_011250.2,716-734).
gatgatctggtcaattcct

SEQ ID NO: 465579 - DNA, 19 bp, Mus musculus
  siRNA target sequence for Rbl2 (NM_011250.2,743-761).
ctgctgtgcgcattagatt

SEQ ID NO: 465580 - DNA, 19 bp, Mus musculus
  siRNA target sequence for Rbl2 (NM_011250.2,745-763).
gctgtgcgcattagattta

SEQ ID NO: 465581 - DNA, 19 bp, Mus musculus
  siRNA target sequence for Rbl2 (NM_011250.2,750-768).
gcgcattagatttagtcta

SEQ ID NO: 465582 - DNA, 19 bp, Mus musculus
  siRNA target sequence for Rbl2 (NM_011250.2,751-769).
cgcattagatttagtctat

SEQ ID NO: 465583 - DNA, 19 bp, Mus musculus
  siRNA target sequence for Rbl2 (NM_011250.2,784-802).
gtgttctaaccgtaaagaa

SEQ ID NO: 465584 - DNA, 19 bp, Mus musculus
  siRNA target sequence for Rbl2 (NM_011250.2,786-804).
gttctaaccgtaaagaact

SEQ ID NO: 465585 - DNA, 19 bp, Mus musculus
  siRNA target sequence for Rbl2 (NM_011250.2,789-807).
ctaaccgtaaagaacttgt

SEQ ID NO: 465586 - DNA, 19 bp, Mus musculus
  siRNA target sequence for Rbl2 (NM_011250.2,840-858).
gtcaccccaaggactctaa

SEQ ID NO: 465587 - DNA, 19 bp, Mus musculus
  siRNA target sequence for Rbl2 (NM_011250.2,956-974).
ccctatattaggaaactgt

SEQ ID NO: 465588 - DNA, 19 bp, Mus musculus
  siRNA target sequence for Rbl2 (NM_011250.2,957-975).
cctatattaggaaactgtt

SEQ ID NO: 465589 - DNA, 19 bp, Mus musculus
  siRNA target sequence for Rbl2 (NM_011250.2,1021-1039).
cctggagcccggaaacttt

SEQ ID NO: 465590 - DNA, 19 bp, Mus musculus
  siRNA target sequence for Rbl2 (NM_011250.2,1045-1063).
gagttttaaggccgttaat

SEQ ID NO: 465591 - DNA, 19 bp, Mus musculus
  siRNA target sequence for Rbl2 (NM_011250.2,1056-1074).
ccgttaataaggcatatga

SEQ ID NO: 465592 - DNA, 19 bp, Mus musculus
  siRNA target sequence for Rbl2 (NM_011250.2,1057-1075).
cgttaataaggcatatgaa

SEQ ID NO: 465593 - DNA, 19 bp, Mus musculus
  siRNA target sequence for Rbl2 (NM_011250.2,1234-1252).
caagtctaaagcacttaga

SEQ ID NO: 465594 - DNA, 19 bp, Mus musculus
  siRNA target sequence for Rbl2 (NM_011250.2,1267-1285).
gactggcgtgaggtatgtt

SEQ ID NO: 465595 - DNA, 19 bp, Mus musculus
  siRNA target sequence for Rbl2 (NM_011250.2,1430-1448).
gctatcgctgacagattga

SEQ ID NO: 465596 - DNA, 19 bp, Mus musculus
  siRNA target sequence for Rbl2 (NM_011250.2,1431-1449).
ctatcgctgacagattgaa

SEQ ID NO: 465597 - DNA, 19 bp, Mus musculus
  siRNA target sequence for Rbl2 (NM_011250.2,1435-1453).
cgctgacagattgaaagaa

SEQ ID NO: 465598 - DNA, 19 bp, Mus musculus
  siRNA target sequence for Rbl2 (NM_011250.2,1483-1501).
gccagatgagaattttagt

SEQ ID NO: 465599 - DNA, 19 bp, Mus musculus
  siRNA target sequence for Rbl2 (NM_011250.2,1514-1532).
gaaattgccaacaaacatt

SEQ ID NO: 465600 - DNA, 19 bp, Mus musculus
  siRNA target sequence for Rbl2 (NM_011250.2,1520-1538).
gccaacaaacattttcgtt

SEQ ID NO: 465601 - DNA, 19 bp, Mus musculus
  siRNA target sequence for Rbl2 (NM_011250.2,1521-1539).
ccaacaaacattttcgttt

SEQ ID NO: 465602 - DNA, 19 bp, Mus musculus
  siRNA target sequence for Rbl2 (NM_011250.2,1525-1543).
caaacattttcgttttgca

SEQ ID NO: 465603 - DNA, 19 bp, Mus musculus
  siRNA target sequence for Rbl2 (NM_011250.2,1542-1560).
cagaaatgctctactataa

SEQ ID NO: 465604 - DNA, 19 bp, Mus musculus
  siRNA target sequence for Rbl2 (NM_011250.2,1549-1567).
gctctactataaagtatta

SEQ ID NO: 465605 - DNA, 19 bp, Mus musculus
  siRNA target sequence for Rbl2 (NM_011250.2,1574-1592).
gttattgagcaagaacaaa

SEQ ID NO: 465606 - DNA, 19 bp, Mus musculus
  siRNA target sequence for Rbl2 (NM_011250.2,1596-1614).
gattgggagacatggattt

SEQ ID NO: 465607 - DNA, 19 bp, Mus musculus
  siRNA target sequence for Rbl2 (NM_011250.2,1805-1823).
gtcaaacacctcaatcaga

SEQ ID NO: 465608 - DNA, 19 bp, Mus musculus
  siRNA target sequence for Rbl2 (NM_011250.2,1940-1958).
ctagagagaacagatgaaa

SEQ ID NO: 465609 - DNA, 19 bp, Mus musculus
  siRNA target sequence for Rbl2 (NM_011250.2,1947-1965).
gaacagatgaaatttacat

SEQ ID NO: 465610 - DNA, 19 bp, Mus musculus
  siRNA target sequence for Rbl2 (NM_011250.2,2019-2037).
gaggacttggaagaagtat

SEQ ID NO: 465611 - DNA, 19 bp, Mus musculus
  siRNA target sequence for Rbl2 (NM_011250.2,2024-2042).
cttggaagaagtataacgt

SEQ ID NO: 465612 - DNA, 19 bp, Mus musculus
  siRNA target sequence for Rbl2 (NM_011250.2,2040-2058).
cgtctccaaccacattgta

SEQ ID NO: 465613 - DNA, 19 bp, Mus musculus
  siRNA target sequence for Rbl2 (NM_011250.2,2091-2109).
ctagaaggcggctattcga

SEQ ID NO: 465614 - DNA, 19 bp, Mus musculus
  siRNA target sequence for Rbl2 (NM_011250.2,2097-2115).
ggcggctattcgagaatga

SEQ ID NO: 465615 - DNA, 19 bp, Mus musculus
  siRNA target sequence for Rbl2 (NM_011250.2,2098-2116).
gcggctattcgagaatgat

SEQ ID NO: 465616 - DNA, 19 bp, Mus musculus
  siRNA target sequence for Rbl2 (NM_011250.2,2099-2117).
cggctattcgagaatgata

SEQ ID NO: 465617 - DNA, 19 bp, Mus musculus
  siRNA target sequence for Rbl2 (NM_011250.2,2101-2119).
gctattcgagaatgatagt

SEQ ID NO: 465618 - DNA, 19 bp, Mus musculus
  siRNA target sequence for Rbl2 (NM_011250.2,2265-2283).
ccaacaatggacaaacagt

SEQ ID NO: 465619 - DNA, 19 bp, Mus musculus
  siRNA target sequence for Rbl2 (NM_011250.2,2468-2486).
gtggccattcaacagattt

SEQ ID NO: 465620 - DNA, 19 bp, Mus musculus
  siRNA target sequence for Rbl2 (NM_011250.2,2557-2575).
ctccttagcgctcttcttt

SEQ ID NO: 465621 - DNA, 19 bp, Mus musculus
  siRNA target sequence for Rbl2 (NM_011250.2,2560-2578).
cttagcgctcttctttaga

SEQ ID NO: 465622 - DNA, 19 bp, Mus musculus
  siRNA target sequence for Rbl2 (NM_011250.2,2600-2618).
gtccgccttcgagatcttt

SEQ ID NO: 465623 - DNA, 19 bp, Mus musculus
  siRNA target sequence for Rbl2 (NM_011250.2,2606-2624).
cttcgagatctttgtataa

SEQ ID NO: 465624 - DNA, 19 bp, Mus musculus
  siRNA target sequence for Rbl2 (NM_011250.2,2687-2705).
cagtgcaccgaacttatga

SEQ ID NO: 465625 - DNA, 19 bp, Mus musculus
  siRNA target sequence for Rbl2 (NM_011250.2,2822-2840).
cggagccaggtgtacagaa

SEQ ID NO: 465626 - DNA, 19 bp, Mus musculus
  siRNA target sequence for Rbl2 (NM_011250.2,2833-2851).
gtacagaagtgtcttgata

SEQ ID NO: 465627 - DNA, 19 bp, Mus musculus
  siRNA target sequence for Rbl2 (NM_011250.2,2836-2854).
cagaagtgtcttgataaaa

SEQ ID NO: 465628 - DNA, 19 bp, Mus musculus
  siRNA target sequence for Rbl2 (NM_011250.2,2845-2863).
cttgataaaagggaaaaga

SEQ ID NO: 465629 - DNA, 19 bp, Mus musculus
  siRNA target sequence for Rbl2 (NM_011250.2,3057-3075).
gagacctcattcagttcta

SEQ ID NO: 465630 - DNA, 19 bp, Mus musculus
  siRNA target sequence for Rbl2 (NM_011250.2,3101-3119).
caagcgtttgccatgaagt

SEQ ID NO: 465631 - DNA, 19 bp, Mus musculus
  siRNA target sequence for Rbl2 (NM_011250.2,3104-3122).
gcgtttgccatgaagtact

SEQ ID NO: 465632 - DNA, 19 bp, Mus musculus
  siRNA target sequence for Rbl2 (NM_011250.2,3161-3179).
ccctatccatttgtaagaa

SEQ ID NO: 465633 - DNA, 19 bp, Mus musculus
  siRNA target sequence for Rbl2 (NM_011250.2,3186-3204).
cccctcgccgagtacagtt

SEQ ID NO: 465634 - DNA, 19 bp, Mus musculus
  siRNA target sequence for Rbl2 (NM_011250.2,3187-3205).
ccctcgccgagtacagtta

SEQ ID NO: 465635 - DNA, 19 bp, Mus musculus
  siRNA target sequence for Rbl2 (NM_011250.2,3192-3210).
gccgagtacagttatctca

SEQ ID NO: 465636 - DNA, 19 bp, Mus musculus
  siRNA target sequence for Rbl2 (NM_011250.2,3193-3211).
ccgagtacagttatctcaa

SEQ ID NO: 465637 - DNA, 19 bp, Mus musculus
  siRNA target sequence for Rbl2 (NM_011250.2,3194-3212).
cgagtacagttatctcaaa

SEQ ID NO: 465638 - DNA, 19 bp, Mus musculus
  siRNA target sequence for Rbl2 (NM_011250.2,3209-3227).
caaagtcatcctatctaca

SEQ ID NO: 465639 - DNA, 19 bp, Mus musculus
  siRNA target sequence for Rbl2 (NM_011250.2,3336-3354).
caggagagactccaactaa

SEQ ID NO: 465640 - DNA, 19 bp, Mus musculus
  siRNA target sequence for Rbl2 (NM_011250.2,3338-3356).
ggagagactccaactaaaa

SEQ ID NO: 465641 - DNA, 19 bp, Mus musculus
  siRNA target sequence for Rbl2 (NM_011250.2,3370-3388).
cttggacgacggaagtgaa

SEQ ID NO: 465642 - DNA, 19 bp, Mus musculus
  siRNA target sequence for Rbl2 (NM_011250.2,3373-3391).
ggacgacggaagtgaatca

SEQ ID NO: 465643 - DNA, 19 bp, Mus musculus
  siRNA target sequence for Rbl2 (NM_011250.2,3415-3433).
gaatcactctgctctgtta

SEQ ID NO: 465644 - DNA, 19 bp, Mus musculus
  siRNA target sequence for Rbpsuh (NM_009035.1,181-199).
gggaagctatgcgaaatta

SEQ ID NO: 465645 - DNA, 19 bp, Mus musculus
  siRNA target sequence for Rbpsuh (NM_009035.1,182-200).
ggaagctatgcgaaattat

SEQ ID NO: 465646 - DNA, 19 bp, Mus musculus
  siRNA target sequence for Rbpsuh (NM_009035.1,183-201).
gaagctatgcgaaattatt

SEQ ID NO: 465647 - DNA, 19 bp, Mus musculus
  siRNA target sequence for Rbpsuh (NM_009035.1,186-204).
gctatgcgaaattatttaa

SEQ ID NO: 465648 - DNA, 19 bp, Mus musculus
  siRNA target sequence for Rbpsuh (NM_009035.1,187-205).
ctatgcgaaattatttaaa

SEQ ID NO: 465649 - DNA, 19 bp, Mus musculus
  siRNA target sequence for Rbpsuh (NM_009035.1,230-248).
cattcttcatgcaaaagtt

SEQ ID NO: 465650 - DNA, 19 bp, Mus musculus
  siRNA target sequence for Rbpsuh (NM_009035.1,264-282).
ggaaatgaaaaacgatttt

SEQ ID NO: 465651 - DNA, 19 bp, Mus musculus
  siRNA target sequence for Rbpsuh (NM_009035.1,373-391).
ctcaaccctgtgcgtttat

SEQ ID NO: 465652 - DNA, 19 bp, Mus musculus
  siRNA target sequence for Rbpsuh (NM_009035.1,379-397).
cctgtgcgtttattggaat

SEQ ID NO: 465653 - DNA, 19 bp, Mus musculus
  siRNA target sequence for Rbpsuh (NM_009035.1,384-402).
gcgtttattggaataggaa

SEQ ID NO: 465654 - DNA, 19 bp, Mus musculus
  siRNA target sequence for Rbpsuh (NM_009035.1,385-403).
cgtttattggaataggaaa

SEQ ID NO: 465655 - DNA, 19 bp, Mus musculus
  siRNA target sequence for Rbpsuh (NM_009035.1,454-472).
cagccaaaacattgtacat

SEQ ID NO: 465656 - DNA, 19 bp, Mus musculus
  siRNA target sequence for Rbpsuh (NM_009035.1,483-501).
gacaagagaaaacatttca

SEQ ID NO: 465657 - DNA, 19 bp, Mus musculus
  siRNA target sequence for Rbpsuh (NM_009035.1,637-655).
cgaaggtggcactgttcaa

SEQ ID NO: 465658 - DNA, 19 bp, Mus musculus
  siRNA target sequence for Rbpsuh (NM_009035.1,638-656).
gaaggtggcactgttcaat

SEQ ID NO: 465659 - DNA, 19 bp, Mus musculus
  siRNA target sequence for Rbpsuh (NM_009035.1,660-678).
cttcggtcccagacagtta

SEQ ID NO: 465660 - DNA, 19 bp, Mus musculus
  siRNA target sequence for Rbpsuh (NM_009035.1,663-681).
cggtcccagacagttagta

SEQ ID NO: 465661 - DNA, 19 bp, Mus musculus
  siRNA target sequence for Rbpsuh (NM_009035.1,683-701).
caggtacctgcatgtagaa

SEQ ID NO: 465662 - DNA, 19 bp, Mus musculus
  siRNA target sequence for Rbpsuhl (NM_009036.1,529-547).
gccggactccagggaattt

SEQ ID NO: 465663 - DNA, 19 bp, Mus musculus
  siRNA target sequence for Rbpsuhl (NM_009036.1,532-550).
ggactccagggaatttggt

SEQ ID NO: 465664 - DNA, 19 bp, Mus musculus
  siRNA target sequence for Rbpsuhl (NM_009036.1,533-551).
gactccagggaatttggtt

SEQ ID NO: 465665 - DNA, 19 bp, Mus musculus
  siRNA target sequence for Rbpsuhl (NM_009036.1,694-712).
gcagtcgctgaaaaacaca

SEQ ID NO: 465666 - DNA, 19 bp, Mus musculus
  siRNA target sequence for Rbpsuhl (NM_009036.1,936-954).
ctgtcacaggcattacact

SEQ ID NO: 465667 - DNA, 19 bp, Mus musculus
  siRNA target sequence for Rbpsuhl (NM_009036.1,951-969).
cactgccgcctatgatcat

SEQ ID NO: 465668 - DNA, 19 bp, Mus musculus
  siRNA target sequence for Rbpsuhl (NM_009036.1,960-978).
ctatgatcatccgaaaagt

SEQ ID NO: 465669 - DNA, 19 bp, Mus musculus
  siRNA target sequence for Rbpsuhl (NM_009036.1,1303-1321).
ggagctgcacggagaaaat

SEQ ID NO: 465670 - DNA, 19 bp, Mus musculus
  siRNA target sequence for Rbpsuhl (NM_009036.1,1304-1322).
gagctgcacggagaaaatt

SEQ ID NO: 465671 - DNA, 19 bp, Mus musculus
  siRNA target sequence for Rcor (NM_054048.1,16-34).
gatccgagttggaaccaat

SEQ ID NO: 465672 - DNA, 19 bp, Mus musculus
  siRNA target sequence for Rcor (NM_054048.1,21-39).
gagttggaaccaattacca

SEQ ID NO: 465673 - DNA, 19 bp, Mus musculus
  siRNA target sequence for Rcor (NM_054048.1,30-48).
ccaattaccaagcagtaat

SEQ ID NO: 465674 - DNA, 19 bp, Mus musculus
  siRNA target sequence for Rcor (NM_054048.1,31-49).
caattaccaagcagtaatt

SEQ ID NO: 465675 - DNA, 19 bp, Mus musculus
  siRNA target sequence for Rcor (NM_054048.1,118-136).
ccccaaccactgtgtatca

SEQ ID NO: 465676 - DNA, 19 bp, Mus musculus
  siRNA target sequence for Rcor (NM_054048.1,120-138).
ccaaccactgtgtatcaga

SEQ ID NO: 465677 - DNA, 19 bp, Mus musculus
  siRNA target sequence for Rcor (NM_054048.1,121-139).
caaccactgtgtatcagat

SEQ ID NO: 465678 - DNA, 19 bp, Mus musculus
  siRNA target sequence for Rcor (NM_054048.1,146-164).
cttgacaagtacattgcaa

SEQ ID NO: 465679 - DNA, 19 bp, Mus musculus
  siRNA target sequence for Rcor (NM_054048.1,384-402).
gcctggtgaagtattacta

SEQ ID NO: 465680 - DNA, 19 bp, Mus musculus
  siRNA target sequence for Rcor (NM_054048.1,415-433).
gacccgaagtcgaactagt

SEQ ID NO: 465681 - DNA, 19 bp, Mus musculus
  siRNA target sequence for Rcor (NM_054048.1,562-580).
gccatccagacctctgaat

SEQ ID NO: 465682 - DNA, 19 bp, Mus musculus
  siRNA target sequence for Rcor (NM_054048.1,607-625).
ggttcagatatctcagtat

SEQ ID NO: 465683 - DNA, 19 bp, Mus musculus
  siRNA target sequence for Rcor (NM_054048.1,851-869).
gctaataccaagttcaact

SEQ ID NO: 465684 - DNA, 19 bp, Mus musculus
  siRNA target sequence for Rcor (NM_054048.1,889-907).
gcaacttctagctgttcaa

SEQ ID NO: 465685 - DNA, 19 bp, Mus musculus
  siRNA target sequence for Rcor (NM_054048.1,899-917).
gctgttcaagctattcgta

SEQ ID NO: 465686 - DNA, 19 bp, Mus musculus
  siRNA target sequence for Rcor (NM_054048.1,914-932).
cgtagatacggcaaagact

SEQ ID NO: 465687 - DNA, 19 bp, Mus musculus
  siRNA target sequence for Rcor (NM_054048.1,915-933).
gtagatacggcaaagactt

SEQ ID NO: 465688 - DNA, 19 bp, Mus musculus
  siRNA target sequence for Rcor (NM_054048.1,1130-1148).
gatgatgaggtccagatta

SEQ ID NO: 465689 - DNA, 19 bp, Mus musculus
  siRNA target sequence for Recc1 (NM_011258.1,82-100).
ggacattcggaaattcttt

SEQ ID NO: 465690 - DNA, 19 bp, Mus musculus
  siRNA target sequence for Recc1 (NM_011258.1,126-144).
ctgtaaacgagacagtaaa

SEQ ID NO: 465691 - DNA, 19 bp, Mus musculus
  siRNA target sequence for Recc1 (NM_011258.1,134-152).
gagacagtaaagaatgaga

SEQ ID NO: 465692 - DNA, 19 bp, Mus musculus
  siRNA target sequence for Recc1 (NM_011258.1,200-218).
gaggccaaggtcaataact

SEQ ID NO: 465693 - DNA, 19 bp, Mus musculus
  siRNA target sequence for Recc1 (NM_011258.1,227-245).
gaggacgcctccaaaccaa

SEQ ID NO: 465694 - DNA, 19 bp, Mus musculus
  siRNA target sequence for Recc1 (NM_011258.1,455-473).
gagaatggagtatctacaa

SEQ ID NO: 465695 - DNA, 19 bp, Mus musculus
  siRNA target sequence for Recc1 (NM_011258.1,461-479).
ggagtatctacaaatagtt

SEQ ID NO: 465696 - DNA, 19 bp, Mus musculus
  siRNA target sequence for Recc1 (NM_011258.1,477-495).
gttaccttggaacatcaaa

SEQ ID NO: 465697 - DNA, 19 bp, Mus musculus
  siRNA target sequence for Recc1 (NM_011258.1,509-527).
gaagaaaacgttaagacta

SEQ ID NO: 465698 - DNA, 19 bp, Mus musculus
  siRNA target sequence for Recc1 (NM_011258.1,512-530).
gaaaacgttaagactaaga

SEQ ID NO: 465699 - DNA, 19 bp, Mus musculus
  siRNA target sequence for Recc1 (NM_011258.1,532-550).
caagccgttatctccaata

SEQ ID NO: 465700 - DNA, 19 bp, Mus musculus
  siRNA target sequence for Recc1 (NM_011258.1,564-582).
cgtcagtgctcgactattt

SEQ ID NO: 465701 - DNA, 19 bp, Mus musculus
  siRNA target sequence for Recc1 (NM_011258.1,565-583).
gtcagtgctcgactatttt

SEQ ID NO: 465702 - DNA, 19 bp, Mus musculus
  siRNA target sequence for Recc1 (NM_011258.1,569-587).
gtgctcgactattttggaa

SEQ ID NO: 465703 - DNA, 19 bp, Mus musculus
  siRNA target sequence for Recc1 (NM_011258.1,574-592).
cgactattttggaactgaa

SEQ ID NO: 465704 - DNA, 19 bp, Mus musculus
  siRNA target sequence for Recc1 (NM_011258.1,575-593).
gactattttggaactgaaa

SEQ ID NO: 465705 - DNA, 19 bp, Mus musculus
  siRNA target sequence for Recc1 (NM_011258.1,658-676).
ggattccagattaaatgat

SEQ ID NO: 465706 - DNA, 19 bp, Mus musculus
  siRNA target sequence for Recc1 (NM_011258.1,726-744).
ggcagttgcatgaagatga

SEQ ID NO: 465707 - DNA, 19 bp, Mus musculus
  siRNA target sequence for Recc1 (NM_011258.1,756-774).
gaacactggccttattgga

SEQ ID NO: 465708 - DNA, 19 bp, Mus musculus
  siRNA target sequence for Recc1 (NM_011258.1,834-852).
catctgtccaagatgattt

SEQ ID NO: 465709 - DNA, 19 bp, Mus musculus
  siRNA target sequence for Recc1 (NM_011258.1,839-857).
gtccaagatgatttaagca

SEQ ID NO: 465710 - DNA, 19 bp, Mus musculus
  siRNA target sequence for Recc1 (NM_011258.1,879-897).
ctaataaagccgagctttt

SEQ ID NO: 465711 - DNA, 19 bp, Mus musculus
  siRNA target sequence for Recc1 (NM_011258.1,937-955).
caaggggagggcttcagaa

SEQ ID NO: 465712 - DNA, 19 bp, Mus musculus
  siRNA target sequence for Recc1 (NM_011258.1,1019-1037).
gccaaactggcgcttatga

SEQ ID NO: 465713 - DNA, 19 bp, Mus musculus
  siRNA target sequence for Recc1 (NM_011258.1,1025-1043).
ctggcgcttatgaaagcaa

SEQ ID NO: 465714 - DNA, 19 bp, Mus musculus
  siRNA target sequence for Recc1 (NM_011258.1,1187-1205).
gaaaagaagcgcactaatt

SEQ ID NO: 465715 - DNA, 19 bp, Mus musculus
  siRNA target sequence for Recc1 (NM_011258.1,1192-1210).
gaagcgcactaattatcaa

SEQ ID NO: 465716 - DNA, 19 bp, Mus musculus
  siRNA target sequence for Recc1 (NM_011258.1,1197-1215).
gcactaattatcaagctta

SEQ ID NO: 465717 - DNA, 19 bp, Mus musculus
  siRNA target sequence for Recc1 (NM_011258.1,1198-1216).
cactaattatcaagcttat

SEQ ID NO: 465718 - DNA, 19 bp, Mus musculus
  siRNA target sequence for Recc1 (NM_011258.1,1211-1229).
gcttatcgaagctacttga

SEQ ID NO: 465719 - DNA, 19 bp, Mus musculus
  siRNA target sequence for Recc1 (NM_011258.1,1212-1230).
cttatcgaagctacttgaa

SEQ ID NO: 465720 - DNA, 19 bp, Mus musculus
  siRNA target sequence for Recc1 (NM_011258.1,1292-1310).
gaaggcctgacgtttgtga

SEQ ID NO: 465721 - DNA, 19 bp, Mus musculus
  siRNA target sequence for Recc1 (NM_011258.1,1351-1369).
gtctctaattgaacgttat

SEQ ID NO: 465722 - DNA, 19 bp, Mus musculus
  siRNA target sequence for Recc1 (NM_011258.1,1364-1382).
cgttatggggggaaagtaa

SEQ ID NO: 465723 - DNA, 19 bp, Mus musculus
  siRNA target sequence for Recc1 (NM_011258.1,1461-1479).
ctctgggaacaaaaatcct

SEQ ID NO: 465724 - DNA, 19 bp, Mus musculus
  siRNA target sequence for Recc1 (NM_011258.1,1470-1488).
caaaaatcctcgatgaaga

SEQ ID NO: 465725 - DNA, 19 bp, Mus musculus
  siRNA target sequence for Recc1 (NM_011258.1,1489-1507).
cggcctgttggatctgatt

SEQ ID NO: 465726 - DNA, 19 bp, Mus musculus
  siRNA target sequence for Recc1 (NM_011258.1,1493-1511).
ctgttggatctgattcgaa

SEQ ID NO: 465727 - DNA, 19 bp, Mus musculus
  siRNA target sequence for Recc1 (NM_011258.1,1582-1600).
ggagcgaacaccccaaaaa

SEQ ID NO: 465728 - DNA, 19 bp, Mus musculus
  siRNA target sequence for Recc1 (NM_011258.1,1583-1601).
gagcgaacaccccaaaaaa

SEQ ID NO: 465729 - DNA, 19 bp, Mus musculus
  siRNA target sequence for Recc1 (NM_011258.1,1590-1608).
caccccaaaaaaatgatca

SEQ ID NO: 465730 - DNA, 19 bp, Mus musculus
  siRNA target sequence for Recc1 (NM_011258.1,1722-1740).
caaggggcctggatgtcaa

SEQ ID NO: 465731 - DNA, 19 bp, Mus musculus
  siRNA target sequence for Recc1 (NM_011258.1,1779-1797).
gtctgctctgggtggataa

SEQ ID NO: 465732 - DNA, 19 bp, Mus musculus
  siRNA target sequence for Recc1 (NM_011258.1,1781-1799).
ctgctctgggtggataagt

SEQ ID NO: 465733 - DNA, 19 bp, Mus musculus
  siRNA target sequence for Recc1 (NM_011258.1,1846-1864).
gagctgtgccaacaaatta

SEQ ID NO: 465734 - DNA, 19 bp, Mus musculus
  siRNA target sequence for Recc1 (NM_011258.1,1865-1883).
ctacgttggctcagaaact

SEQ ID NO: 465735 - DNA, 19 bp, Mus musculus
  siRNA target sequence for Recc1 (NM_011258.1,1930-1948).
caaacttgccagcaaagat

SEQ ID NO: 465736 - DNA, 19 bp, Mus musculus
  siRNA target sequence for Recc1 (NM_011258.1,2029-2047).
ggaattgggctacagttat

SEQ ID NO: 465737 - DNA, 19 bp, Mus musculus
  siRNA target sequence for Recc1 (NM_011258.1,2050-2068).
ggaactaaatgcaagtgat

SEQ ID NO: 465738 - DNA, 19 bp, Mus musculus
  siRNA target sequence for Recc1 (NM_011258.1,2051-2069).
gaactaaatgcaagtgata

SEQ ID NO: 465739 - DNA, 19 bp, Mus musculus
  siRNA target sequence for Recc1 (NM_011258.1,2064-2082).
gtgatactcggagtaagaa

SEQ ID NO: 465740 - DNA, 19 bp, Mus musculus
  siRNA target sequence for Recc1 (NM_011258.1,2094-2112).
cagttgttgctgaatcctt

SEQ ID NO: 465741 - DNA, 19 bp, Mus musculus
  siRNA target sequence for Recc1 (NM_011258.1,2169-2187).
cgaggcacgccctcatcat

SEQ ID NO: 465742 - DNA, 19 bp, Mus musculus
  siRNA target sequence for Recc1 (NM_011258.1,2226-2244).
gtggaattcaggagctaat

SEQ ID NO: 465743 - DNA, 19 bp, Mus musculus
  siRNA target sequence for Recc1 (NM_011258.1,2237-2255).
gagctaataggcctgataa

SEQ ID NO: 465744 - DNA, 19 bp, Mus musculus
  siRNA target sequence for Recc1 (NM_011258.1,2246-2264).
ggcctgataaagcatacta

SEQ ID NO: 465745 - DNA, 19 bp, Mus musculus
  siRNA target sequence for Recc1 (NM_011258.1,2248-2266).
cctgataaagcatactaaa

SEQ ID NO: 465746 - DNA, 19 bp, Mus musculus
  siRNA target sequence for Recc1 (NM_011258.1,2275-2293).
catttgtatgtgcaatgat

SEQ ID NO: 465747 - DNA, 19 bp, Mus musculus
  siRNA target sequence for Recc1 (NM_011258.1,2280-2298).
gtatgtgcaatgatagaaa

SEQ ID NO: 465748 - DNA, 19 bp, Mus musculus
  siRNA target sequence for Recc1 (NM_011258.1,2305-2323).
caaaattcgctcattggtt

SEQ ID NO: 465749 - DNA, 19 bp, Mus musculus
  siRNA target sequence for Recc1 (NM_011258.1,2312-2330).
cgctcattggttcattatt

SEQ ID NO: 465750 - DNA, 19 bp, Mus musculus
  siRNA target sequence for Recc1 (NM_011258.1,2314-2332).
ctcattggttcattattgt

SEQ ID NO: 465751 - DNA, 19 bp, Mus musculus
  siRNA target sequence for Recc1 (NM_011258.1,2316-2334).
cattggttcattattgttt

SEQ ID NO: 465752 - DNA, 19 bp, Mus musculus
  siRNA target sequence for Recc1 (NM_011258.1,2347-2365).
ccaaagacctcgagttgaa

SEQ ID NO: 465753 - DNA, 19 bp, Mus musculus
  siRNA target sequence for Recc1 (NM_011258.1,2352-2370).
gacctcgagttgaacagat

SEQ ID NO: 465754 - DNA, 19 bp, Mus musculus
  siRNA target sequence for Recc1 (NM_011258.1,2354-2372).
cctcgagttgaacagatta

SEQ ID NO: 465755 - DNA, 19 bp, Mus musculus
  siRNA target sequence for Recc1 (NM_011258.1,2374-2392).
gagtgcaatgctgtctatt

SEQ ID NO: 465756 - DNA, 19 bp, Mus musculus
  siRNA target sequence for Recc1 (NM_011258.1,2379-2397).
caatgctgtctattgcatt

SEQ ID NO: 465757 - DNA, 19 bp, Mus musculus
  siRNA target sequence for Recc1 (NM_011258.1,2416-2434).
cccccctccagctatgaat

SEQ ID NO: 465758 - DNA, 19 bp, Mus musculus
  siRNA target sequence for Recc1 (NM_011258.1,2419-2437).
ccctccagctatgaatgaa

SEQ ID NO: 465759 - DNA, 19 bp, Mus musculus
  siRNA target sequence for Recc1 (NM_011258.1,2420-2438).
cctccagctatgaatgaaa

SEQ ID NO: 465760 - DNA, 19 bp, Mus musculus
  siRNA target sequence for Recc1 (NM_011258.1,2421-2439).
ctccagctatgaatgaaat

SEQ ID NO: 465761 - DNA, 19 bp, Mus musculus
  siRNA target sequence for Recc1 (NM_011258.1,2462-2480).
gtcagacaggttttacaca

SEQ ID NO: 465762 - DNA, 19 bp, Mus musculus
  siRNA target sequence for Recc1 (NM_011258.1,2579-2597).
gatgtcactcggaaagtgt

SEQ ID NO: 465763 - DNA, 19 bp, Mus musculus
  siRNA target sequence for Recc1 (NM_011258.1,2763-2781).
cagcagatagcatatgtga

SEQ ID NO: 465764 - DNA, 19 bp, Mus musculus
  siRNA target sequence for Recc1 (NM_011258.1,2801-2819).
cagatccggagtaagcaaa

SEQ ID NO: 465765 - DNA, 19 bp, Mus musculus
  siRNA target sequence for Recc1 (NM_011258.1,2833-2851).
gcccacccaggccatctat

SEQ ID NO: 465766 - DNA, 19 bp, Mus musculus
  siRNA target sequence for Recc1 (NM_011258.1,2931-2949).
cgtctacgggcaaacatga

SEQ ID NO: 465767 - DNA, 19 bp, Mus musculus
  siRNA target sequence for Recc1 (NM_011258.1,2932-2950).
gtctacgggcaaacatgat

SEQ ID NO: 465768 - DNA, 19 bp, Mus musculus
  siRNA target sequence for Recc1 (NM_011258.1,2941-2959).
caaacatgatcggattgtt

SEQ ID NO: 465769 - DNA, 19 bp, Mus musculus
  siRNA target sequence for Recc1 (NM_011258.1,2974-2992).
gcacatgagtcttagaact

SEQ ID NO: 465770 - DNA, 19 bp, Mus musculus
  siRNA target sequence for Recc1 (NM_011258.1,3034-3052).
catcagagacgcacttgta

SEQ ID NO: 465771 - DNA, 19 bp, Mus musculus
  siRNA target sequence for Recc1 (NM_011258.1,3109-3127).
cacatactatctgatgaaa

SEQ ID NO: 465772 - DNA, 19 bp, Mus musculus
  siRNA target sequence for Recc1 (NM_011258.1,3137-3155).
gagaacatcatggaagtta

SEQ ID NO: 465773 - DNA, 19 bp, Mus musculus
  siRNA target sequence for Recc1 (NM_011258.1,3214-3232).
cttcacaagagcctacaat

SEQ ID NO: 465774 - DNA, 19 bp, Mus musculus
  siRNA target sequence for Recc1 (NM_011258.1,3219-3237).
caagagcctacaataagga

SEQ ID NO: 465775 - DNA, 19 bp, Mus musculus
  siRNA target sequence for Recc1 (NM_011258.1,3371-3389).
gagactgacgccatgatca

SEQ ID NO: 465776 - DNA, 19 bp, Mus musculus
  siRNA target sequence for Recc1 (NM_011258.1,3377-3395).
gacgccatgatcaagaaaa

SEQ ID NO: 465777 - DNA, 19 bp, Mus musculus
  siRNA target sequence for Recc1 (NM_011258.1,3397-3415).
gacaagatcttcaaaacct

SEQ ID NO: 465778 - DNA, 19 bp, Mus musculus
  siRNA target sequence for Recql (NM_023042.1,108-126).
gagcttcatgccattgaca

SEQ ID NO: 465779 - DNA, 19 bp, Mus musculus
  siRNA target sequence for Recql (NM_023042.1,178-196).
cagtcctgacagggaaaat

SEQ ID NO: 465780 - DNA, 19 bp, Mus musculus
  siRNA target sequence for Recql (NM_023042.1,258-276).
gcttggaataaagaagatt

SEQ ID NO: 465781 - DNA, 19 bp, Mus musculus
  siRNA target sequence for Recql (NM_023042.1,279-297).
ccatggttcggaaaggtaa

SEQ ID NO: 465782 - DNA, 19 bp, Mus musculus
  siRNA target sequence for Recql (NM_023042.1,283-301).
ggttcggaaaggtaaaaga

SEQ ID NO: 465783 - DNA, 19 bp, Mus musculus
  siRNA target sequence for Recql (NM_023042.1,303-321).
gtgctgcaaaatgttttta

SEQ ID NO: 465784 - DNA, 19 bp, Mus musculus
  siRNA target sequence for Recql (NM_023042.1,305-323).
gctgcaaaatgtttttaaa

SEQ ID NO: 465785 - DNA, 19 bp, Mus musculus
  siRNA target sequence for Recql (NM_023042.1,348-366).
ctggaaaccatcaatgtca

SEQ ID NO: 465786 - DNA, 19 bp, Mus musculus
  siRNA target sequence for Recql (NM_023042.1,409-427).
gagggaagagcttatgcta

SEQ ID NO: 465787 - DNA, 19 bp, Mus musculus
  siRNA target sequence for Recql (NM_023042.1,441-459).
ctgtgctcagacggtttta

SEQ ID NO: 465788 - DNA, 19 bp, Mus musculus
  siRNA target sequence for Recql (NM_023042.1,443-461).
gtgctcagacggttttaca

SEQ ID NO: 465789 - DNA, 19 bp, Mus musculus
  siRNA target sequence for Recql (NM_023042.1,445-463).
gctcagacggttttacact

SEQ ID NO: 465790 - DNA, 19 bp, Mus musculus
  siRNA target sequence for Recql (NM_023042.1,446-464).
ctcagacggttttacactt

SEQ ID NO: 465791 - DNA, 19 bp, Mus musculus
  siRNA target sequence for Recql (NM_023042.1,472-490).
gcccactcatctctcttat

SEQ ID NO: 465792 - DNA, 19 bp, Mus musculus
  siRNA target sequence for Recql (NM_023042.1,475-493).
cactcatctctcttatgga

SEQ ID NO: 465793 - DNA, 19 bp, Mus musculus
  siRNA target sequence for Recql (NM_023042.1,522-540).
ggaatttcagctactatgt

SEQ ID NO: 465794 - DNA, 19 bp, Mus musculus
  siRNA target sequence for Recql (NM_023042.1,553-571).
gctctaaggaacatgtaaa

SEQ ID NO: 465795 - DNA, 19 bp, Mus musculus
  siRNA target sequence for Recql (NM_023042.1,554-572).
ctctaaggaacatgtaaaa

SEQ ID NO: 465796 - DNA, 19 bp, Mus musculus
  siRNA target sequence for Recql (NM_023042.1,574-592).
gggtgcacgctgaaatggt

SEQ ID NO: 465797 - DNA, 19 bp, Mus musculus
  siRNA target sequence for Recql (NM_023042.1,579-597).
cacgctgaaatggtgaata

SEQ ID NO: 465798 - DNA, 19 bp, Mus musculus
  siRNA target sequence for Recql (NM_023042.1,605-623).
ccagttaaagctgatttat

SEQ ID NO: 465799 - DNA, 19 bp, Mus musculus
  siRNA target sequence for Recql (NM_023042.1,886-904).
cttttacagcgtctttcaa

SEQ ID NO: 465800 - DNA, 19 bp, Mus musculus
  siRNA target sequence for Recql (NM_023042.1,898-916).
ctttcaaccggccaaatct

SEQ ID NO: 465801 - DNA, 19 bp, Mus musculus
  siRNA target sequence for Recql (NM_023042.1,902-920).
caaccggccaaatcttttt

SEQ ID NO: 465802 - DNA, 19 bp, Mus musculus
  siRNA target sequence for Recql (NM_023042.1,905-923).
ccggccaaatcttttttat

SEQ ID NO: 465803 - DNA, 19 bp, Mus musculus
  siRNA target sequence for Recql (NM_023042.1,907-925).
ggccaaatcttttttatga

SEQ ID NO: 465804 - DNA, 19 bp, Mus musculus
  siRNA target sequence for Recql (NM_023042.1,963-981).
gaggacattgtcaagctaa

SEQ ID NO: 465805 - DNA, 19 bp, Mus musculus
  siRNA target sequence for Recql (NM_023042.1,965-983).
ggacattgtcaagctaatt

SEQ ID NO: 465806 - DNA, 19 bp, Mus musculus
  siRNA target sequence for Recql (NM_023042.1,999-1017).
ggacaatcaggaatcatat

SEQ ID NO: 465807 - DNA, 19 bp, Mus musculus
  siRNA target sequence for Recql (NM_023042.1,1002-1020).
caatcaggaatcatatact

SEQ ID NO: 465808 - DNA, 19 bp, Mus musculus
  siRNA target sequence for Recql (NM_023042.1,1087-1105).
cttaccatgccaatatgga

SEQ ID NO: 465809 - DNA, 19 bp, Mus musculus
  siRNA target sequence for Recql (NM_023042.1,1200-1218).
ccagacgtgaggtttgtca

SEQ ID NO: 465810 - DNA, 19 bp, Mus musculus
  siRNA target sequence for Recql (NM_023042.1,1201-1219).
cagacgtgaggtttgtcat

SEQ ID NO: 465811 - DNA, 19 bp, Mus musculus
  siRNA target sequence for Recql (NM_023042.1,1215-1233).
gtcatccatcattcaatga

SEQ ID NO: 465812 - DNA, 19 bp, Mus musculus
  siRNA target sequence for Recql (NM_023042.1,1234-1252).
gcaaatccatggagaatta

SEQ ID NO: 465813 - DNA, 19 bp, Mus musculus
  siRNA target sequence for Recql (NM_023042.1,1240-1258).
ccatggagaattactatca

SEQ ID NO: 465814 - DNA, 19 bp, Mus musculus
  siRNA target sequence for Recql (NM_023042.1,1288-1306).
cgagagcagactgtattct

SEQ ID NO: 465815 - DNA, 19 bp, Mus musculus
  siRNA target sequence for Recql (NM_023042.1,1294-1312).
cagactgtattctgtatta

SEQ ID NO: 465816 - DNA, 19 bp, Mus musculus
  siRNA target sequence for Recql (NM_023042.1,1412-1430).
caagtgtcgccgtgtgtta

SEQ ID NO: 465817 - DNA, 19 bp, Mus musculus
  siRNA target sequence for Recql (NM_023042.1,1415-1433).
gtgtcgccgtgtgttaata

SEQ ID NO: 465818 - DNA, 19 bp, Mus musculus
  siRNA target sequence for Recql (NM_023042.1,1435-1453).
cacagcattttgatgaagt

SEQ ID NO: 465819 - DNA, 19 bp, Mus musculus
  siRNA target sequence for Recql (NM_023042.1,1460-1478).
cgcagatgcctgtaacaaa

SEQ ID NO: 465820 - DNA, 19 bp, Mus musculus
  siRNA target sequence for Recql (NM_023042.1,1461-1479).
gcagatgcctgtaacaaaa

SEQ ID NO: 465821 - DNA, 19 bp, Mus musculus
  siRNA target sequence for Recql (NM_023042.1,1492-1510).
gctgtaaagacgtttcgtt

SEQ ID NO: 465822 - DNA, 19 bp, Mus musculus
  siRNA target sequence for Recql (NM_023042.1,1493-1511).
ctgtaaagacgtttcgttt

SEQ ID NO: 465823 - DNA, 19 bp, Mus musculus
  siRNA target sequence for Recql (NM_023042.1,1533-1551).
cactgccgggacctgataa

SEQ ID NO: 465824 - DNA, 19 bp, Mus musculus
  siRNA target sequence for Recql (NM_023042.1,1537-1555).
gccgggacctgataaagat

SEQ ID NO: 465825 - DNA, 19 bp, Mus musculus
  siRNA target sequence for Recql (NM_023042.1,1565-1583).
ggctgaaggcctgaatgaa

SEQ ID NO: 465826 - DNA, 19 bp, Mus musculus
  siRNA target sequence for Recql (NM_023042.1,1566-1584).
gctgaaggcctgaatgaaa

SEQ ID NO: 465827 - DNA, 19 bp, Mus musculus
  siRNA target sequence for Recql (NM_023042.1,1808-1826).
ccatgctgtcactatgcaa

SEQ ID NO: 465828 - DNA, 19 bp, Mus musculus
  siRNA target sequence for Recql (NM_023042.1,1873-1891).
ctcgtcaggtggaacaagt

SEQ ID NO: 465829 - DNA, 19 bp, Mus musculus
  siRNA target sequence for Recql (NM_023042.1,1920-1938).
ggtaactcccagaagtcta

SEQ ID NO: 465830 - DNA, 19 bp, Mus musculus
  siRNA target sequence for Recql (NM_023042.1,1921-1939).
gtaactcccagaagtctaa

SEQ ID NO: 465831 - DNA, 19 bp, Mus musculus
  siRNA target sequence for Recql (NM_023042.1,1950-1968).
cagccatctggctctaaga

SEQ ID NO: 465832 - DNA, 19 bp, Mus musculus
  siRNA target sequence for Recql (NM_023042.1,1967-1985).
gaacgcaggcgctaagaaa

SEQ ID NO: 465833 - DNA, 19 bp, Mus musculus
  siRNA target sequence for Recql (NM_023042.1,1970-1988).
cgcaggcgctaagaaaaga

SEQ ID NO: 465834 - DNA, 19 bp, Mus musculus
  siRNA target sequence for Recql (NM_023042.1,1972-1990).
caggcgctaagaaaagaaa

SEQ ID NO: 465835 - DNA, 19 bp, Mus musculus
  siRNA target sequence for Rem2 (NM_080726.2,504-522).
caaaaagatggcgtcttta

SEQ ID NO: 465836 - DNA, 19 bp, Mus musculus
  siRNA target sequence for Rem2 (NM_080726.2,736-754).
cgggggatgcctttctcat

SEQ ID NO: 465837 - DNA, 19 bp, Mus musculus
  siRNA target sequence for Rem2 (NM_080726.2,771-789).
gatcgacgaagcttctcta

SEQ ID NO: 465838 - DNA, 19 bp, Mus musculus
  siRNA target sequence for Rem2 (NM_080726.2,775-793).
gacgaagcttctctaaagt

SEQ ID NO: 465839 - DNA, 19 bp, Mus musculus
  siRNA target sequence for Rem2 (NM_080726.2,846-864).
gtcatccttgttggaaata

SEQ ID NO: 465840 - DNA, 19 bp, Mus musculus
  siRNA target sequence for Rem2 (NM_080726.2,880-898).
gctcccgggaggtatcact

SEQ ID NO: 465841 - DNA, 19 bp, Mus musculus
  siRNA target sequence for Rem2 (NM_080726.2,1140-1158).
cgcaacgctaagttcttca

SEQ ID NO: 465842 - DNA, 19 bp, Mus musculus
  siRNA target sequence for Rev3l (NM_011264.1,335-353).
gtgactgccgactactaca

SEQ ID NO: 465843 - DNA, 19 bp, Mus musculus
  siRNA target sequence for Rev3l (NM_011264.1,463-481).
gacatgtcttcatctacat

SEQ ID NO: 465844 - DNA, 19 bp, Mus musculus
  siRNA target sequence for Rev3l (NM_011264.1,496-514).
cctctatgtgccatacgat

SEQ ID NO: 465845 - DNA, 19 bp, Mus musculus
  siRNA target sequence for Rev3l (NM_011264.1,505-523).
gccatacgatggttatgga

SEQ ID NO: 465846 - DNA, 19 bp, Mus musculus
  siRNA target sequence for Rev3l (NM_011264.1,561-579).
gtatcgacagagcacttaa

SEQ ID NO: 465847 - DNA, 19 bp, Mus musculus
  siRNA target sequence for Rev3l (NM_011264.1,611-629).
cagcatgtgttcaaagtgt

SEQ ID NO: 465848 - DNA, 19 bp, Mus musculus
  siRNA target sequence for Rev3l (NM_011264.1,622-640).
caaagtgtcattagtatca

SEQ ID NO: 465849 - DNA, 19 bp, Mus musculus
  siRNA target sequence for Rev3l (NM_011264.1,675-693).
gacactttatgaagatcta

SEQ ID NO: 465850 - DNA, 19 bp, Mus musculus
  siRNA target sequence for Rev3l (NM_011264.1,715-733).
gaaaaggatatgtgaactt

SEQ ID NO: 465851 - DNA, 19 bp, Mus musculus
  siRNA target sequence for Rev3l (NM_011264.1,737-755).
caaagcggagccataatga

SEQ ID NO: 465852 - DNA, 19 bp, Mus musculus
  siRNA target sequence for Rev3l (NM_011264.1,741-759).
gcggagccataatgaataa

SEQ ID NO: 465853 - DNA, 19 bp, Mus musculus
  siRNA target sequence for Rev3l (NM_011264.1,743-761).
ggagccataatgaataaat

SEQ ID NO: 465854 - DNA, 19 bp, Mus musculus
  siRNA target sequence for Rev3l (NM_011264.1,746-764).
gccataatgaataaatgtt

SEQ ID NO: 465855 - DNA, 19 bp, Mus musculus
  siRNA target sequence for Rev3l (NM_011264.1,769-787).
gcctcatgaagcgcatatt

SEQ ID NO: 465856 - DNA, 19 bp, Mus musculus
  siRNA target sequence for Rev3l (NM_011264.1,802-820).
gctcttcattgactacaat

SEQ ID NO: 465857 - DNA, 19 bp, Mus musculus
  siRNA target sequence for Rev3l (NM_011264.1,812-830).
gactacaatctttatggaa

SEQ ID NO: 465858 - DNA, 19 bp, Mus musculus
  siRNA target sequence for Rev3l (NM_011264.1,817-835).
caatctttatggaatgaat

SEQ ID NO: 465859 - DNA, 19 bp, Mus musculus
  siRNA target sequence for Rev3l (NM_011264.1,828-846).
gaatgaatttaataaacct

SEQ ID NO: 465860 - DNA, 19 bp, Mus musculus
  siRNA target sequence for Rev3l (NM_011264.1,854-872).
gtcaagttccgaaaagcaa

SEQ ID NO: 465861 - DNA, 19 bp, Mus musculus
  siRNA target sequence for Rev3l (NM_011264.1,862-880).
ccgaaaagcaagaaggaaa

SEQ ID NO: 465862 - DNA, 19 bp, Mus musculus
  siRNA target sequence for Rev3l (NM_011264.1,893-911).
catgcaactggattattca

SEQ ID NO: 465863 - DNA, 19 bp, Mus musculus
  siRNA target sequence for Rev3l (NM_011264.1,902-920).
ggattattcaagcatcaat

SEQ ID NO: 465864 - DNA, 19 bp, Mus musculus
  siRNA target sequence for Rev3l (NM_011264.1,913-931).
gcatcaattgtcaggaaat

SEQ ID NO: 465865 - DNA, 19 bp, Mus musculus
  siRNA target sequence for Rev3l (NM_011264.1,935-953).
cctgctggcactttattta

SEQ ID NO: 465866 - DNA, 19 bp, Mus musculus
  siRNA target sequence for Rev3l (NM_011264.1,938-956).
gctggcactttatttaggt

SEQ ID NO: 465867 - DNA, 19 bp, Mus musculus
  siRNA target sequence for Rev3l (NM_011264.1,1006-1024).
cctgagtacatgtgaacta

SEQ ID NO: 465868 - DNA, 19 bp, Mus musculus
  siRNA target sequence for Rev3l (NM_011264.1,1009-1027).
gagtacatgtgaactagaa

SEQ ID NO: 465869 - DNA, 19 bp, Mus musculus
  siRNA target sequence for Rev3l (NM_011264.1,1011-1029).
gtacatgtgaactagaagt

SEQ ID NO: 465870 - DNA, 19 bp, Mus musculus
  siRNA target sequence for Rev3l (NM_011264.1,1036-1054).
cgtagctgctgacatctta

SEQ ID NO: 465871 - DNA, 19 bp, Mus musculus
  siRNA target sequence for Rev3l (NM_011264.1,1118-1136).
gaaaaacagcggagaagaa

SEQ ID NO: 465872 - DNA, 19 bp, Mus musculus
  siRNA target sequence for Rev3l (NM_011264.1,1140-1158).
ggaacgaaagctctcaaat

SEQ ID NO: 465873 - DNA, 19 bp, Mus musculus
  siRNA target sequence for Rev3l (NM_011264.1,1163-1181).
cagcccgagtcacaagatt

SEQ ID NO: 465874 - DNA, 19 bp, Mus musculus
  siRNA target sequence for Rev3l (NM_011264.1,1238-1256).
gttctcaaacagaatgatt

SEQ ID NO: 465875 - DNA, 19 bp, Mus musculus
  siRNA target sequence for Rev3l (NM_011264.1,1253-1271).
gatttctcagtaacattat

SEQ ID NO: 465876 - DNA, 19 bp, Mus musculus
  siRNA target sequence for Rev3l (NM_011264.1,1290-1308).
gcaatggatcccaagagtt

SEQ ID NO: 465877 - DNA, 19 bp, Mus musculus
  siRNA target sequence for Rev3l (NM_011264.1,1304-1322).
gagttctctgctgagttaa

SEQ ID NO: 465878 - DNA, 19 bp, Mus musculus
  siRNA target sequence for Rev3l (NM_011264.1,1313-1331).
gctgagttaacattacact

SEQ ID NO: 465879 - DNA, 19 bp, Mus musculus
  siRNA target sequence for Rev3l (NM_011264.1,1358-1376).
ccgtgttcaccagctaata

SEQ ID NO: 465880 - DNA, 19 bp, Mus musculus
  siRNA target sequence for Rev3l (NM_011264.1,1359-1377).
cgtgttcaccagctaatat

SEQ ID NO: 465881 - DNA, 19 bp, Mus musculus
  siRNA target sequence for Rev3l (NM_011264.1,1362-1380).
gttcaccagctaatatgat

SEQ ID NO: 465882 - DNA, 19 bp, Mus musculus
  siRNA target sequence for Rev3l (NM_011264.1,1400-1418).
gatttgagcaaaggtaata

SEQ ID NO: 465883 - DNA, 19 bp, Mus musculus
  siRNA target sequence for Rev3l (NM_011264.1,1413-1431).
gtaatactaaacataaagt

SEQ ID NO: 465884 - DNA, 19 bp, Mus musculus
  siRNA target sequence for Rev3l (NM_011264.1,1430-1448).
gtagaagaagcacttatta

SEQ ID NO: 465885 - DNA, 19 bp, Mus musculus
  siRNA target sequence for Rev3l (NM_011264.1,1590-1608).
gatatcaaggagaaaagaa

SEQ ID NO: 465886 - DNA, 19 bp, Mus musculus
  siRNA target sequence for Rev3l (NM_011264.1,1606-1624).
gaataggatgccattacca

SEQ ID NO: 465887 - DNA, 19 bp, Mus musculus
  siRNA target sequence for Rev3l (NM_011264.1,1797-1815).
gttctaccgaagaagatga

SEQ ID NO: 465888 - DNA, 19 bp, Mus musculus
  siRNA target sequence for Rev3l (NM_011264.1,1837-1855).
ggagtggaccgataatagt

SEQ ID NO: 465889 - DNA, 19 bp, Mus musculus
  siRNA target sequence for Rev3l (NM_011264.1,1838-1856).
gagtggaccgataatagtt

SEQ ID NO: 465890 - DNA, 19 bp, Mus musculus
  siRNA target sequence for Rev3l (NM_011264.1,1843-1861).
gaccgataatagtttgctt

SEQ ID NO: 465891 - DNA, 19 bp, Mus musculus
  siRNA target sequence for Rev3l (NM_011264.1,1845-1863).
ccgataatagtttgctttt

SEQ ID NO: 465892 - DNA, 19 bp, Mus musculus
  siRNA target sequence for Rev3l (NM_011264.1,1892-1910).
ggaactgcagatgaaaata

SEQ ID NO: 465893 - DNA, 19 bp, Mus musculus
  siRNA target sequence for Rev3l (NM_011264.1,1911-1929).
gtgacaatccattaaacaa

SEQ ID NO: 465894 - DNA, 19 bp, Mus musculus
  siRNA target sequence for Rev3l (NM_011264.1,1962-1980).
caacgagcaagctatcagt

SEQ ID NO: 465895 - DNA, 19 bp, Mus musculus
  siRNA target sequence for Rev3l (NM_011264.1,1999-2017).
caaagatgctgctacatta

SEQ ID NO: 465896 - DNA, 19 bp, Mus musculus
  siRNA target sequence for Rev3l (NM_011264.1,2022-2040).
ctccgtcttctgctaagat

SEQ ID NO: 465897 - DNA, 19 bp, Mus musculus
  siRNA target sequence for Rev3l (NM_011264.1,2024-2042).
ccgtcttctgctaagatta

SEQ ID NO: 465898 - DNA, 19 bp, Mus musculus
  siRNA target sequence for Rev3l (NM_011264.1,2028-2046).
cttctgctaagattacctt

SEQ ID NO: 465899 - DNA, 19 bp, Mus musculus
  siRNA target sequence for Rev3l (NM_011264.1,2066-2084).
gccctttcttcccatgttt

SEQ ID NO: 465900 - DNA, 19 bp, Mus musculus
  siRNA target sequence for Rev3l (NM_011264.1,2110-2128).
cctttcacaaccaaacagt

SEQ ID NO: 465901 - DNA, 19 bp, Mus musculus
  siRNA target sequence for Rev3l (NM_011264.1,2172-2190).
gtacttactccatgaagta

SEQ ID NO: 465902 - DNA, 19 bp, Mus musculus
  siRNA target sequence for Rev3l (NM_011264.1,2197-2215).
ctctttaagtagtactgtt

SEQ ID NO: 465903 - DNA, 19 bp, Mus musculus
  siRNA target sequence for Rev3l (NM_011264.1,2205-2223).
gtagtactgttcattcaga

SEQ ID NO: 465904 - DNA, 19 bp, Mus musculus
  siRNA target sequence for Rev3l (NM_011264.1,2231-2249).
cacaaagagatttgtaaga

SEQ ID NO: 465905 - DNA, 19 bp, Mus musculus
  siRNA target sequence for Rev3l (NM_011264.1,2233-2251).
caaagagatttgtaagaaa

SEQ ID NO: 465906 - DNA, 19 bp, Mus musculus
  siRNA target sequence for Rev3l (NM_011264.1,2264-2282).
ccggtatcttcctgtgaaa

SEQ ID NO: 465907 - DNA, 19 bp, Mus musculus
  siRNA target sequence for Rev3l (NM_011264.1,2267-2285).
gtatcttcctgtgaaagta

SEQ ID NO: 465908 - DNA, 19 bp, Mus musculus
  siRNA target sequence for Rev3l (NM_011264.1,2277-2295).
gtgaaagtagtgtttttga

SEQ ID NO: 465909 - DNA, 19 bp, Mus musculus
  siRNA target sequence for Rev3l (NM_011264.1,2325-2343).
gacaagtaccaagtagaaa

SEQ ID NO: 465910 - DNA, 19 bp, Mus musculus
  siRNA target sequence for Rev3l (NM_011264.1,2327-2345).
caagtaccaagtagaaagt

SEQ ID NO: 465911 - DNA, 19 bp, Mus musculus
  siRNA target sequence for Rev3l (NM_011264.1,2347-2365).
ctcgaacatgagaaagatt

SEQ ID NO: 465912 - DNA, 19 bp, Mus musculus
  siRNA target sequence for Rev3l (NM_011264.1,2371-2389).
ggatgcctcttgcatacat

SEQ ID NO: 465913 - DNA, 19 bp, Mus musculus
  siRNA target sequence for Rev3l (NM_011264.1,2397-2415).
gtcacattagtgagactat

SEQ ID NO: 465914 - DNA, 19 bp, Mus musculus
  siRNA target sequence for Rev3l (NM_011264.1,2441-2459).
gctgacttaaatcattcaa

SEQ ID NO: 465915 - DNA, 19 bp, Mus musculus
  siRNA target sequence for Rev3l (NM_011264.1,2446-2464).
cttaaatcattcaaaacgt

SEQ ID NO: 465916 - DNA, 19 bp, Mus musculus
  siRNA target sequence for Rev3l (NM_011264.1,2611-2629).
gagtggactaaacaaactt

SEQ ID NO: 465917 - DNA, 19 bp, Mus musculus
  siRNA target sequence for Rev3l (NM_011264.1,2615-2633).
ggactaaacaaacttaaaa

SEQ ID NO: 465918 - DNA, 19 bp, Mus musculus
  siRNA target sequence for Rev3l (NM_011264.1,2635-2653).
cagatacgaagaattccaa

SEQ ID NO: 465919 - DNA, 19 bp, Mus musculus
  siRNA target sequence for Rev3l (NM_011264.1,2682-2700).
gccagcaagcagcacatta

SEQ ID NO: 465920 - DNA, 19 bp, Mus musculus
  siRNA target sequence for Rev3l (NM_011264.1,2683-2701).
ccagcaagcagcacattat

SEQ ID NO: 465921 - DNA, 19 bp, Mus musculus
  siRNA target sequence for Rev3l (NM_011264.1,2687-2705).
caagcagcacattatatgt

SEQ ID NO: 465922 - DNA, 19 bp, Mus musculus
  siRNA target sequence for Rev3l (NM_011264.1,2737-2755).
cactaggccacagaaactt

SEQ ID NO: 465923 - DNA, 19 bp, Mus musculus
  siRNA target sequence for Rev3l (NM_011264.1,2762-2780).
gtcacatacaaattacaat

SEQ ID NO: 465924 - DNA, 19 bp, Mus musculus
  siRNA target sequence for Rev3l (NM_011264.1,2777-2795).
caatctggcaataaacctt

SEQ ID NO: 465925 - DNA, 19 bp, Mus musculus
  siRNA target sequence for Rev3l (NM_011264.1,2883-2901).
gtacacataacgatctgta

SEQ ID NO: 465926 - DNA, 19 bp, Mus musculus
  siRNA target sequence for Rev3l (NM_011264.1,2904-2922).
ctggtgcttccgaaaagga

SEQ ID NO: 465927 - DNA, 19 bp, Mus musculus
  siRNA target sequence for Rev3l (NM_011264.1,2913-2931).
ccgaaaaggagaatggatt

SEQ ID NO: 465928 - DNA, 19 bp, Mus musculus
  siRNA target sequence for Rev3l (NM_011264.1,2932-2950).
gagtagtgactcagctaaa

SEQ ID NO: 465929 - DNA, 19 bp, Mus musculus
  siRNA target sequence for Rev3l (NM_011264.1,2941-2959).
ctcagctaaagctactcat

SEQ ID NO: 465930 - DNA, 19 bp, Mus musculus
  siRNA target sequence for Rev3l (NM_011264.1,2962-2980).
gacctttgaaaataaacca

SEQ ID NO: 465931 - DNA, 19 bp, Mus musculus
  siRNA target sequence for Rev3l (NM_011264.1,2982-3000).
ctacagaacattttataga

SEQ ID NO: 465932 - DNA, 19 bp, Mus musculus
  siRNA target sequence for Rev3l (NM_011264.1,3034-3052).
gcagtcttttggactatat

SEQ ID NO: 465933 - DNA, 19 bp, Mus musculus
  siRNA target sequence for Rev3l (NM_011264.1,3037-3055).
gtcttttggactatatgga

SEQ ID NO: 465934 - DNA, 19 bp, Mus musculus
  siRNA target sequence for Rev3l (NM_011264.1,3039-3057).
cttttggactatatggaaa

SEQ ID NO: 465935 - DNA, 19 bp, Mus musculus
  siRNA target sequence for Rev3l (NM_011264.1,3074-3092).
gccaaacgcaaggtgaatt

SEQ ID NO: 465936 - DNA, 19 bp, Mus musculus
  siRNA target sequence for Rev3l (NM_011264.1,3075-3093).
ccaaacgcaaggtgaatta

SEQ ID NO: 465937 - DNA, 19 bp, Mus musculus
  siRNA target sequence for Rev3l (NM_011264.1,3076-3094).
caaacgcaaggtgaattat

SEQ ID NO: 465938 - DNA, 19 bp, Mus musculus
  siRNA target sequence for Rev3l (NM_011264.1,3080-3098).
cgcaaggtgaattatgaaa

SEQ ID NO: 465939 - DNA, 19 bp, Mus musculus
  siRNA target sequence for Rev3l (NM_011264.1,3157-3175).
catggaaatcggtgaaaat

SEQ ID NO: 465940 - DNA, 19 bp, Mus musculus
  siRNA target sequence for Rev3l (NM_011264.1,3160-3178).
ggaaatcggtgaaaattta

SEQ ID NO: 465941 - DNA, 19 bp, Mus musculus
  siRNA target sequence for Rev3l (NM_011264.1,3188-3206).
ctcaaatcccgaaaacgaa

SEQ ID NO: 465942 - DNA, 19 bp, Mus musculus
  siRNA target sequence for Rev3l (NM_011264.1,3228-3246).
cccctgtcattataaagta

SEQ ID NO: 465943 - DNA, 19 bp, Mus musculus
  siRNA target sequence for Rev3l (NM_011264.1,3284-3302).
cttgtgaaactaggtaaaa

SEQ ID NO: 465944 - DNA, 19 bp, Mus musculus
  siRNA target sequence for Rev3l (NM_011264.1,3400-3418).
ctcccctgcaaccaaatat

SEQ ID NO: 465945 - DNA, 19 bp, Mus musculus
  siRNA target sequence for Rev3l (NM_011264.1,3496-3514).
gcaacacagaacaaacagt

SEQ ID NO: 465946 - DNA, 19 bp, Mus musculus
  siRNA target sequence for Rev3l (NM_011264.1,3572-3590).
cctccctccccatcataca

SEQ ID NO: 465947 - DNA, 19 bp, Mus musculus
  siRNA target sequence for Rev3l (NM_011264.1,3605-3623).
gactgtgacttgagttata

SEQ ID NO: 465948 - DNA, 19 bp, Mus musculus
  siRNA target sequence for Rev3l (NM_011264.1,3609-3627).
gtgacttgagttatagtga

SEQ ID NO: 465949 - DNA, 19 bp, Mus musculus
  siRNA target sequence for Rev3l (NM_011264.1,3738-3756).
ctgcagaaaaggaatcgat

SEQ ID NO: 465950 - DNA, 19 bp, Mus musculus
  siRNA target sequence for Rev3l (NM_011264.1,3767-3785).
ggtcctaatgtatataaca

SEQ ID NO: 465951 - DNA, 19 bp, Mus musculus
  siRNA target sequence for Rev3l (NM_011264.1,3800-3818).
cctcgggtaggaaaagcta

SEQ ID NO: 465952 - DNA, 19 bp, Mus musculus
  siRNA target sequence for Rev3l (NM_011264.1,3835-3853).
ggttaagaagtcaaaagca

SEQ ID NO: 465953 - DNA, 19 bp, Mus musculus
  siRNA target sequence for Rev3l (NM_011264.1,3860-3878).
gctaactcctctgtagtta

SEQ ID NO: 465954 - DNA, 19 bp, Mus musculus
  siRNA target sequence for Rev3l (NM_011264.1,3897-3915).
ggaatcagacaactaaact

SEQ ID NO: 465955 - DNA, 19 bp, Mus musculus
  siRNA target sequence for Rev3l (NM_011264.1,3979-3997).
gtcaaggaaacatgcaata

SEQ ID NO: 465956 - DNA, 19 bp, Mus musculus
  siRNA target sequence for Rev3l (NM_011264.1,3993-4011).
caatacctgcggacgaaaa

SEQ ID NO: 465957 - DNA, 19 bp, Mus musculus
  siRNA target sequence for Rev3l (NM_011264.1,3998-4016).
cctgcggacgaaaagatga

SEQ ID NO: 465958 - DNA, 19 bp, Mus musculus
  siRNA target sequence for Rev3l (NM_011264.1,3999-4017).
ctgcggacgaaaagatgaa

SEQ ID NO: 465959 - DNA, 19 bp, Mus musculus
  siRNA target sequence for Rev3l (NM_011264.1,4082-4100).
ggcgctcaagcactttcta

SEQ ID NO: 465960 - DNA, 19 bp, Mus musculus
  siRNA target sequence for Rev3l (NM_011264.1,4083-4101).
gcgctcaagcactttctaa

SEQ ID NO: 465961 - DNA, 19 bp, Mus musculus
  siRNA target sequence for Rev3l (NM_011264.1,4154-4172).
gcccaacccactggaatta

SEQ ID NO: 465962 - DNA, 19 bp, Mus musculus
  siRNA target sequence for Rev3l (NM_011264.1,4156-4174).
ccaacccactggaattagt

SEQ ID NO: 465963 - DNA, 19 bp, Mus musculus
  siRNA target sequence for Rev3l (NM_011264.1,4178-4196).
caacagcggctgtctaact

SEQ ID NO: 465964 - DNA, 19 bp, Mus musculus
  siRNA target sequence for Rev3l (NM_011264.1,4218-4236).
gcaagaagtctgtagattt

SEQ ID NO: 465965 - DNA, 19 bp, Mus musculus
  siRNA target sequence for Rev3l (NM_011264.1,4246-4264).
ccccagttcgagagatgat

SEQ ID NO: 465966 - DNA, 19 bp, Mus musculus
  siRNA target sequence for Rev3l (NM_011264.1,4247-4265).
cccagttcgagagatgatt

SEQ ID NO: 465967 - DNA, 19 bp, Mus musculus
  siRNA target sequence for Rev3l (NM_011264.1,4249-4267).
cagttcgagagatgattca

SEQ ID NO: 465968 - DNA, 19 bp, Mus musculus
  siRNA target sequence for Rev3l (NM_011264.1,4322-4340).
cagagatctcataatcaaa

SEQ ID NO: 465969 - DNA, 19 bp, Mus musculus
  siRNA target sequence for Rev3l (NM_011264.1,4368-4386).
ccttgattcaaaaaagcat

SEQ ID NO: 465970 - DNA, 19 bp, Mus musculus
  siRNA target sequence for Rev3l (NM_011264.1,4369-4387).
cttgattcaaaaaagcata

SEQ ID NO: 465971 - DNA, 19 bp, Mus musculus
  siRNA target sequence for Rev3l (NM_011264.1,4372-4390).
gattcaaaaaagcatattt

SEQ ID NO: 465972 - DNA, 19 bp, Mus musculus
  siRNA target sequence for Rev3l (NM_011264.1,4423-4441).
gagtacacaggtatgttca

SEQ ID NO: 465973 - DNA, 19 bp, Mus musculus
  siRNA target sequence for Rev3l (NM_011264.1,4430-4448).
caggtatgttcaggtataa

SEQ ID NO: 465974 - DNA, 19 bp, Mus musculus
  siRNA target sequence for Rev3l (NM_011264.1,4432-4450).
ggtatgttcaggtataata

SEQ ID NO: 465975 - DNA, 19 bp, Mus musculus
  siRNA target sequence for Rev3l (NM_011264.1,4433-4451).
gtatgttcaggtataatat

SEQ ID NO: 465976 - DNA, 19 bp, Mus musculus
  siRNA target sequence for Rev3l (NM_011264.1,4495-4513).
gtcatctatgggaaagtta

SEQ ID NO: 465977 - DNA, 19 bp, Mus musculus
  siRNA target sequence for Rev3l (NM_011264.1,4497-4515).
catctatgggaaagttaaa

SEQ ID NO: 465978 - DNA, 19 bp, Mus musculus
  siRNA target sequence for Rev3l (NM_011264.1,4524-4542).
gcagttccctagaatcaaa

SEQ ID NO: 465979 - DNA, 19 bp, Mus musculus
  siRNA target sequence for Rev3l (NM_011264.1,4605-4623).
gtgtgtcagaacaatcaaa

SEQ ID NO: 465980 - DNA, 19 bp, Mus musculus
  siRNA target sequence for Rev3l (NM_011264.1,4663-4681).
ggagagccagacacctaat

SEQ ID NO: 465981 - DNA, 19 bp, Mus musculus
  siRNA target sequence for Rev3l (NM_011264.1,4664-4682).
gagagccagacacctaatt

SEQ ID NO: 465982 - DNA, 19 bp, Mus musculus
  siRNA target sequence for Rev3l (NM_011264.1,4669-4687).
ccagacacctaattgtttt

SEQ ID NO: 465983 - DNA, 19 bp, Mus musculus
  siRNA target sequence for Rev3l (NM_011264.1,4706-4724).
cccatcaaacaaatagcat

SEQ ID NO: 465984 - DNA, 19 bp, Mus musculus
  siRNA target sequence for Rev3l (NM_011264.1,4742-4760).
ggctttattttagatatgt

SEQ ID NO: 465985 - DNA, 19 bp, Mus musculus
  siRNA target sequence for Rev3l (NM_011264.1,4823-4841).
gcgctgtctcaatgtaaga

SEQ ID NO: 465986 - DNA, 19 bp, Mus musculus
  siRNA target sequence for Rev3l (NM_011264.1,4884-4902).
ctgggctagctgttctaaa

SEQ ID NO: 465987 - DNA, 19 bp, Mus musculus
  siRNA target sequence for Rev3l (NM_011264.1,4927-4945).
gaaagcacaaagtacaaat

SEQ ID NO: 465988 - DNA, 19 bp, Mus musculus
  siRNA target sequence for Rev3l (NM_011264.1,4938-4956).
gtacaaatgtcgtacaaga

SEQ ID NO: 465989 - DNA, 19 bp, Mus musculus
  siRNA target sequence for Rev3l (NM_011264.1,4965-4983).
ctactcatcagccagataa

SEQ ID NO: 465990 - DNA, 19 bp, Mus musculus
  siRNA target sequence for Rev3l (NM_011264.1,5003-5021).
gagcataagaaagcaaata

SEQ ID NO: 465991 - DNA, 19 bp, Mus musculus
  siRNA target sequence for Rev3l (NM_011264.1,5091-5109).
cccccagacgtctaaaagt

SEQ ID NO: 465992 - DNA, 19 bp, Mus musculus
  siRNA target sequence for Rev3l (NM_011264.1,5094-5112).
ccagacgtctaaaagtaga

SEQ ID NO: 465993 - DNA, 19 bp, Mus musculus
  siRNA target sequence for Rev3l (NM_011264.1,5131-5149).
ctctggccacttggataat

SEQ ID NO: 465994 - DNA, 19 bp, Mus musculus
  siRNA target sequence for Rev3l (NM_011264.1,5224-5242).
gtctcctgaacataattat

SEQ ID NO: 465995 - DNA, 19 bp, Mus musculus
  siRNA target sequence for Rev3l (NM_011264.1,5226-5244).
ctcctgaacataattataa

SEQ ID NO: 465996 - DNA, 19 bp, Mus musculus
  siRNA target sequence for Rev3l (NM_011264.1,5264-5282).
ggccagactggattttgta

SEQ ID NO: 465997 - DNA, 19 bp, Mus musculus
  siRNA target sequence for Rev3l (NM_011264.1,5290-5308).
ctctggtagtcagtttgtt

SEQ ID NO: 465998 - DNA, 19 bp, Mus musculus
  siRNA target sequence for Rev3l (NM_011264.1,5306-5324).
gttccagctgatcagaatt

SEQ ID NO: 465999 - DNA, 19 bp, Mus musculus
  siRNA target sequence for Rev3l (NM_011264.1,5345-5363).
gatgctgttcaggatcttt

SEQ ID NO: 466000 - DNA, 19 bp, Mus musculus
  siRNA target sequence for Rev3l (NM_011264.1,5366-5384).
ccaggacaagctatagaca

SEQ ID NO: 466001 - DNA, 19 bp, Mus musculus
  siRNA target sequence for Rev3l (NM_011264.1,5402-5420).
cacgacagacagagttgta

SEQ ID NO: 466002 - DNA, 19 bp, Mus musculus
  siRNA target sequence for Rev3l (NM_011264.1,5481-5499).
ccgaactttttgagaaagt

SEQ ID NO: 466003 - DNA, 19 bp, Mus musculus
  siRNA target sequence for Rev3l (NM_011264.1,5501-5519).
gctatggataacaatgaga

SEQ ID NO: 466004 - DNA, 19 bp, Mus musculus
  siRNA target sequence for Rev3l (NM_011264.1,5528-5546).
cacagccagtggaaaaata

SEQ ID NO: 466005 - DNA, 19 bp, Mus musculus
  siRNA target sequence for Rev3l (NM_011264.1,5532-5550).
gccagtggaaaaatagctt

SEQ ID NO: 466006 - DNA, 19 bp, Mus musculus
  siRNA target sequence for Rev3l (NM_011264.1,5556-5574).
ctctgacatctcattctaa

SEQ ID NO: 466007 - DNA, 19 bp, Mus musculus
  siRNA target sequence for Rev3l (NM_011264.1,5558-5576).
ctgacatctcattctaact

SEQ ID NO: 466008 - DNA, 19 bp, Mus musculus
  siRNA target sequence for Rev3l (NM_011264.1,5675-5693).
ctcccacaggcaaacagtt

SEQ ID NO: 466009 - DNA, 19 bp, Mus musculus
  siRNA target sequence for Rev3l (NM_011264.1,5738-5756).
ctccactctgctaatacct

SEQ ID NO: 466010 - DNA, 19 bp, Mus musculus
  siRNA target sequence for Rev3l (NM_011264.1,5755-5773).
ctcttttactaccatactt

SEQ ID NO: 466011 - DNA, 19 bp, Mus musculus
  siRNA target sequence for Rev3l (NM_011264.1,5778-5796).
cccctgatggggaacttgt

SEQ ID NO: 466012 - DNA, 19 bp, Mus musculus
  siRNA target sequence for Rev3l (NM_011264.1,5805-5823).
cttcggaagatttagaatt

SEQ ID NO: 466013 - DNA, 19 bp, Mus musculus
  siRNA target sequence for Rev3l (NM_011264.1,5809-5827).
ggaagatttagaattgtat

SEQ ID NO: 466014 - DNA, 19 bp, Mus musculus
  siRNA target sequence for Rev3l (NM_011264.1,5851-5869).
gacaccaactcctgatagt

SEQ ID NO: 466015 - DNA, 19 bp, Mus musculus
  siRNA target sequence for Rev3l (NM_011264.1,5886-5904).
gttctcccttacagtctaa

SEQ ID NO: 466016 - DNA, 19 bp, Mus musculus
  siRNA target sequence for Rev3l (NM_011264.1,5889-5907).
ctcccttacagtctaaaaa

SEQ ID NO: 466017 - DNA, 19 bp, Mus musculus
  siRNA target sequence for Rev3l (NM_011264.1,5919-5937).
ctcctcgaactgctcatat

SEQ ID NO: 466018 - DNA, 19 bp, Mus musculus
  siRNA target sequence for Rev3l (NM_011264.1,5922-5940).
ctcgaactgctcatattct

SEQ ID NO: 466019 - DNA, 19 bp, Mus musculus
  siRNA target sequence for Rev3l (NM_011264.1,5924-5942).
cgaactgctcatattctga

SEQ ID NO: 466020 - DNA, 19 bp, Mus musculus
  siRNA target sequence for Rev3l (NM_011264.1,5925-5943).
gaactgctcatattctgaa

SEQ ID NO: 466021 - DNA, 19 bp, Mus musculus
  siRNA target sequence for Rev3l (NM_011264.1,5980-5998).
ggcaactttgctagatcat

SEQ ID NO: 466022 - DNA, 19 bp, Mus musculus
  siRNA target sequence for Rev3l (NM_011264.1,5985-6003).
ctttgctagatcatgatct

SEQ ID NO: 466023 - DNA, 19 bp, Mus musculus
  siRNA target sequence for Rev3l (NM_011264.1,5989-6007).
gctagatcatgatctttca

SEQ ID NO: 466024 - DNA, 19 bp, Mus musculus
  siRNA target sequence for Rev3l (NM_011264.1,5999-6017).
gatctttcagaagctatat

SEQ ID NO: 466025 - DNA, 19 bp, Mus musculus
  siRNA target sequence for Rev3l (NM_011264.1,6012-6030).
ctatatatcaggaaccatt

SEQ ID NO: 466026 - DNA, 19 bp, Mus musculus
  siRNA target sequence for Rev3l (NM_011264.1,6022-6040).
ggaaccattttgcagtaat

SEQ ID NO: 466027 - DNA, 19 bp, Mus musculus
  siRNA target sequence for Rev3l (NM_011264.1,6107-6125).
ccaaacgacctgattgaat

SEQ ID NO: 466028 - DNA, 19 bp, Mus musculus
  siRNA target sequence for Rev3l (NM_011264.1,6108-6126).
caaacgacctgattgaatt

SEQ ID NO: 466029 - DNA, 19 bp, Mus musculus
  siRNA target sequence for Rev3l (NM_011264.1,6201-6219).
cagggtccccacttcgtaa

SEQ ID NO: 466030 - DNA, 19 bp, Mus musculus
  siRNA target sequence for Rev3l (NM_011264.1,6235-6253).
caataaagagtcaagtaat

SEQ ID NO: 466031 - DNA, 19 bp, Mus musculus
  siRNA target sequence for Rev3l (NM_011264.1,6246-6264).
caagtaatagccataagat

SEQ ID NO: 466032 - DNA, 19 bp, Mus musculus
  siRNA target sequence for Rev3l (NM_011264.1,6255-6273).
gccataagatggtagaaga

SEQ ID NO: 466033 - DNA, 19 bp, Mus musculus
  siRNA target sequence for Rev3l (NM_011264.1,6256-6274).
ccataagatggtagaagat

SEQ ID NO: 466034 - DNA, 19 bp, Mus musculus
  siRNA target sequence for Rev3l (NM_011264.1,6371-6389).
ctccctaaaaccgagttaa

SEQ ID NO: 466035 - DNA, 19 bp, Mus musculus
  siRNA target sequence for Rev3l (NM_011264.1,6385-6403).
gttaactccagtgacaaaa

SEQ ID NO: 466036 - DNA, 19 bp, Mus musculus
  siRNA target sequence for Rev3l (NM_011264.1,6397-6415).
gacaaaatctgctgaaaat

SEQ ID NO: 466037 - DNA, 19 bp, Mus musculus
  siRNA target sequence for Rev3l (NM_011264.1,6399-6417).
caaaatctgctgaaaatgt

SEQ ID NO: 466038 - DNA, 19 bp, Mus musculus
  siRNA target sequence for Rev3l (NM_011264.1,6418-6436).
cagcccttcacttaatcca

SEQ ID NO: 466039 - DNA, 19 bp, Mus musculus
  siRNA target sequence for Rev3l (NM_011264.1,6512-6530).
gaagtcagtaagtctcaaa

SEQ ID NO: 466040 - DNA, 19 bp, Mus musculus
  siRNA target sequence for Rev3l (NM_011264.1,6517-6535).
cagtaagtctcaaattgct

SEQ ID NO: 466041 - DNA, 19 bp, Mus musculus
  siRNA target sequence for Rev3l (NM_011264.1,6519-6537).
gtaagtctcaaattgcttt

SEQ ID NO: 466042 - DNA, 19 bp, Mus musculus
  siRNA target sequence for Rev3l (NM_011264.1,6533-6551).
gctttgcaaacatcaacta

SEQ ID NO: 466043 - DNA, 19 bp, Mus musculus
  siRNA target sequence for Rev3l (NM_011264.1,6611-6629).
gatgataatgataactgtt

SEQ ID NO: 466044 - DNA, 19 bp, Mus musculus
  siRNA target sequence for Rev3l (NM_011264.1,6690-6708).
cagacttcagatcattaaa

SEQ ID NO: 466045 - DNA, 19 bp, Mus musculus
  siRNA target sequence for Rev3l (NM_011264.1,6709-6727).
cggggatgacagacattca

SEQ ID NO: 466046 - DNA, 19 bp, Mus musculus
  siRNA target sequence for Rev3l (NM_011264.1,6747-6765).
gctccctagctgttgagaa

SEQ ID NO: 466047 - DNA, 19 bp, Mus musculus
  siRNA target sequence for Rev3l (NM_011264.1,6756-6774).
ctgttgagaacttcttaaa

SEQ ID NO: 466048 - DNA, 19 bp, Mus musculus
  siRNA target sequence for Rev3l (NM_011264.1,6785-6803).
gatggtatccaaaaaagct

SEQ ID NO: 466049 - DNA, 19 bp, Mus musculus
  siRNA target sequence for Rev3l (NM_011264.1,6816-6834).
cgtgggagcctcaagtgat

SEQ ID NO: 466050 - DNA, 19 bp, Mus musculus
  siRNA target sequence for Rev3l (NM_011264.1,6942-6960).
gccttagccctttatctgt

SEQ ID NO: 466051 - DNA, 19 bp, Mus musculus
  siRNA target sequence for Rev3l (NM_011264.1,6972-6990).
cccagaagttgtataataa

SEQ ID NO: 466052 - DNA, 19 bp, Mus musculus
  siRNA target sequence for Rev3l (NM_011264.1,7049-7067).
cagtttgcggcagtaaata

SEQ ID NO: 466053 - DNA, 19 bp, Mus musculus
  siRNA target sequence for Rev3l (NM_011264.1,7094-7112).
gatggaccgtccttaaaca

SEQ ID NO: 466054 - DNA, 19 bp, Mus musculus
  siRNA target sequence for Rev3l (NM_011264.1,7097-7115).
ggaccgtccttaaacaata

SEQ ID NO: 466055 - DNA, 19 bp, Mus musculus
  siRNA target sequence for Rev3l (NM_011264.1,7100-7118).
ccgtccttaaacaatacct

SEQ ID NO: 466056 - DNA, 19 bp, Mus musculus
  siRNA target sequence for Rev3l (NM_011264.1,7101-7119).
cgtccttaaacaataccta

SEQ ID NO: 466057 - DNA, 19 bp, Mus musculus
  siRNA target sequence for Rev3l (NM_011264.1,7111-7129).
caatacctacggtttcaaa

SEQ ID NO: 466058 - DNA, 19 bp, Mus musculus
  siRNA target sequence for Rev3l (NM_011264.1,7161-7179).
ctttacacgagatacaaaa

SEQ ID NO: 466059 - DNA, 19 bp, Mus musculus
  siRNA target sequence for Rev3l (NM_011264.1,7166-7184).
cacgagatacaaaatctga

SEQ ID NO: 466060 - DNA, 19 bp, Mus musculus
  siRNA target sequence for Rev3l (NM_011264.1,7311-7329).
cagaactcacgggtgtaat

SEQ ID NO: 466061 - DNA, 19 bp, Mus musculus
  siRNA target sequence for Rev3l (NM_011264.1,7316-7334).
ctcacgggtgtaatcgtaa

SEQ ID NO: 466062 - DNA, 19 bp, Mus musculus
  siRNA target sequence for Rev3l (NM_011264.1,7320-7338).
cgggtgtaatcgtaattga

SEQ ID NO: 466063 - DNA, 19 bp, Mus musculus
  siRNA target sequence for Rev3l (NM_011264.1,7321-7339).
gggtgtaatcgtaattgat

SEQ ID NO: 466064 - DNA, 19 bp, Mus musculus
  siRNA target sequence for Rev3l (NM_011264.1,7322-7340).
ggtgtaatcgtaattgata

SEQ ID NO: 466065 - DNA, 19 bp, Mus musculus
  siRNA target sequence for Rev3l (NM_011264.1,7350-7368).
cagtcacccatcaagatat

SEQ ID NO: 466066 - DNA, 19 bp, Mus musculus
  siRNA target sequence for Rev3l (NM_011264.1,7352-7370).
gtcacccatcaagatatta

SEQ ID NO: 466067 - DNA, 19 bp, Mus musculus
  siRNA target sequence for Rev3l (NM_011264.1,7376-7394).
cagaccccgttacttatca

SEQ ID NO: 466068 - DNA, 19 bp, Mus musculus
  siRNA target sequence for Rev3l (NM_011264.1,7378-7396).
gaccccgttacttatcaga

SEQ ID NO: 466069 - DNA, 19 bp, Mus musculus
  siRNA target sequence for Rev3l (NM_011264.1,7401-7419).
gaattacaggattagaagt

SEQ ID NO: 466070 - DNA, 19 bp, Mus musculus
  siRNA target sequence for Rev3l (NM_011264.1,7407-7425).
caggattagaagtaaccta

SEQ ID NO: 466071 - DNA, 19 bp, Mus musculus
  siRNA target sequence for Rev3l (NM_011264.1,7422-7440).
cctacgctgctgatgagaa

SEQ ID NO: 466072 - DNA, 19 bp, Mus musculus
  siRNA target sequence for Rev3l (NM_011264.1,7442-7460).
gctctctttcaggagatta

SEQ ID NO: 466073 - DNA, 19 bp, Mus musculus
  siRNA target sequence for Rev3l (NM_011264.1,7453-7471).
ggagattacaaatataata

SEQ ID NO: 466074 - DNA, 19 bp, Mus musculus
  siRNA target sequence for Rev3l (NM_011264.1,7474-7492).
gaggtatgaccctgacatt

SEQ ID NO: 466075 - DNA, 19 bp, Mus musculus
  siRNA target sequence for Rev3l (NM_011264.1,7476-7494).
ggtatgaccctgacattct

SEQ ID NO: 466076 - DNA, 19 bp, Mus musculus
  siRNA target sequence for Rev3l (NM_011264.1,7550-7568).
gctctgagcgtggacttat

SEQ ID NO: 466077 - DNA, 19 bp, Mus musculus
  siRNA target sequence for Rev3l (NM_011264.1,7581-7599).
ctcgagtgccggatgacaa

SEQ ID NO: 466078 - DNA, 19 bp, Mus musculus
  siRNA target sequence for Rev3l (NM_011264.1,7583-7601).
cgagtgccggatgacaaaa

SEQ ID NO: 466079 - DNA, 19 bp, Mus musculus
  siRNA target sequence for Rev3l (NM_011264.1,7584-7602).
gagtgccggatgacaaaat

SEQ ID NO: 466080 - DNA, 19 bp, Mus musculus
  siRNA target sequence for Rev3l (NM_011264.1,7628-7646).
gatgactatggatcagata

SEQ ID NO: 466081 - DNA, 19 bp, Mus musculus
  siRNA target sequence for Rev3l (NM_011264.1,7631-7649).
gactatggatcagatacaa

SEQ ID NO: 466082 - DNA, 19 bp, Mus musculus
  siRNA target sequence for Rev3l (NM_011264.1,7643-7661).
gatacaatgagtgaaatca

SEQ ID NO: 466083 - DNA, 19 bp, Mus musculus
  siRNA target sequence for Rev3l (NM_011264.1,7682-7700).
ctgaacctttggagaataa

SEQ ID NO: 466084 - DNA, 19 bp, Mus musculus
  siRNA target sequence for Rev3l (NM_011264.1,7792-7810).
cttgtcggactggtttgat

SEQ ID NO: 466085 - DNA, 19 bp, Mus musculus
  siRNA target sequence for Rev3l (NM_011264.1,7795-7813).
gtcggactggtttgataat

SEQ ID NO: 466086 - DNA, 19 bp, Mus musculus
  siRNA target sequence for Rev3l (NM_011264.1,7830-7848).
gatggaaaatggttgatca

SEQ ID NO: 466087 - DNA, 19 bp, Mus musculus
  siRNA target sequence for Rev3l (NM_011264.1,7855-7873).
cagccgtgtccgtggaaat

SEQ ID NO: 466088 - DNA, 19 bp, Mus musculus
  siRNA target sequence for Rev3l (NM_011264.1,7866-7884).
gtggaaatctccagatgtt

SEQ ID NO: 466089 - DNA, 19 bp, Mus musculus
  siRNA target sequence for Rev3l (NM_011264.1,7869-7887).
gaaatctccagatgttaga

SEQ ID NO: 466090 - DNA, 19 bp, Mus musculus
  siRNA target sequence for Rev3l (NM_011264.1,7942-7960).
gtttttacatgtattaaca

SEQ ID NO: 466091 - DNA, 19 bp, Mus musculus
  siRNA target sequence for Rev3l (NM_011264.1,8005-8023).
caaaccaatgaactatatt

SEQ ID NO: 466092 - DNA, 19 bp, Mus musculus
  siRNA target sequence for Rev3l (NM_011264.1,8069-8087).
cagtgtgttcccctcatta

SEQ ID NO: 466093 - DNA, 19 bp, Mus musculus
  siRNA target sequence for Rev3l (NM_011264.1,8092-8110).
gcctgagtctcgtttctat

SEQ ID NO: 466094 - DNA, 19 bp, Mus musculus
  siRNA target sequence for Rev3l (NM_011264.1,8093-8111).
cctgagtctcgtttctata

SEQ ID NO: 466095 - DNA, 19 bp, Mus musculus
  siRNA target sequence for Rev3l (NM_011264.1,8096-8114).
gagtctcgtttctatagca

SEQ ID NO: 466096 - DNA, 19 bp, Mus musculus
  siRNA target sequence for Rev3l (NM_011264.1,8140-8158).
gtcactatatccttcaatt

SEQ ID NO: 466097 - DNA, 19 bp, Mus musculus
  siRNA target sequence for Rev3l (NM_011264.1,8142-8160).
cactatatccttcaattgt

SEQ ID NO: 466098 - DNA, 19 bp, Mus musculus
  siRNA target sequence for Rev3l (NM_011264.1,8151-8169).
cttcaattgtgatagcata

SEQ ID NO: 466099 - DNA, 19 bp, Mus musculus
  siRNA target sequence for Rev3l (NM_011264.1,8159-8177).
gtgatagcatataactact

SEQ ID NO: 466100 - DNA, 19 bp, Mus musculus
  siRNA target sequence for Rev3l (NM_011264.1,8187-8205).
cttgccttggccatgtaga

SEQ ID NO: 466101 - DNA, 19 bp, Mus musculus
  siRNA target sequence for Rev3l (NM_011264.1,8238-8256).
gctgtacctctctaagagt

SEQ ID NO: 466102 - DNA, 19 bp, Mus musculus
  siRNA target sequence for Rev3l (NM_011264.1,8239-8257).
ctgtacctctctaagagta

SEQ ID NO: 466103 - DNA, 19 bp, Mus musculus
  siRNA target sequence for Rev3l (NM_011264.1,8253-8271).
gagtacctccagatttact

SEQ ID NO: 466104 - DNA, 19 bp, Mus musculus
  siRNA target sequence for Rev3l (NM_011264.1,8255-8273).
gtacctccagatttacttt

SEQ ID NO: 466105 - DNA, 19 bp, Mus musculus
  siRNA target sequence for Rev3l (NM_011264.1,8259-8277).
ctccagatttactttatca

SEQ ID NO: 466106 - DNA, 19 bp, Mus musculus
  siRNA target sequence for Rev3l (NM_011264.1,8264-8282).
gatttactttatcaaatta

SEQ ID NO: 466107 - DNA, 19 bp, Mus musculus
  siRNA target sequence for Rev3l (NM_011264.1,8301-8319).
cccccaatggagtagcttt

SEQ ID NO: 466108 - DNA, 19 bp, Mus musculus
  siRNA target sequence for Rev3l (NM_011264.1,8440-8458).
gctcaatgcccgtcaacta

SEQ ID NO: 466109 - DNA, 19 bp, Mus musculus
  siRNA target sequence for Rev3l (NM_011264.1,8460-8478).
gactaaagctgatagcaaa

SEQ ID NO: 466110 - DNA, 19 bp, Mus musculus
  siRNA target sequence for Rev3l (NM_011264.1,8489-8507).
ggctatacggctgctaatt

SEQ ID NO: 466111 - DNA, 19 bp, Mus musculus
  siRNA target sequence for Rev3l (NM_011264.1,8490-8508).
gctatacggctgctaattt

SEQ ID NO: 466112 - DNA, 19 bp, Mus musculus
  siRNA target sequence for Rev3l (NM_011264.1,8491-8509).
ctatacggctgctaatttt

SEQ ID NO: 466113 - DNA, 19 bp, Mus musculus
  siRNA target sequence for Rev3l (NM_011264.1,8538-8556).
gtgatagcattgttcacaa

SEQ ID NO: 466114 - DNA, 19 bp, Mus musculus
  siRNA target sequence for Rev3l (NM_011264.1,8566-8584).
gaccttggaacgagcaatt

SEQ ID NO: 466115 - DNA, 19 bp, Mus musculus
  siRNA target sequence for Rev3l (NM_011264.1,8568-8586).
ccttggaacgagcaattaa

SEQ ID NO: 466116 - DNA, 19 bp, Mus musculus
  siRNA target sequence for Rev3l (NM_011264.1,8569-8587).
cttggaacgagcaattaaa

SEQ ID NO: 466117 - DNA, 19 bp, Mus musculus
  siRNA target sequence for Rev3l (NM_011264.1,8610-8628).
ggggtgctagggttgttta

SEQ ID NO: 466118 - DNA, 19 bp, Mus musculus
  siRNA target sequence for Rev3l (NM_011264.1,8611-8629).
gggtgctagggttgtttat

SEQ ID NO: 466119 - DNA, 19 bp, Mus musculus
  siRNA target sequence for Rev3l (NM_011264.1,8620-8638).
ggttgtttatggtgatact

SEQ ID NO: 466120 - DNA, 19 bp, Mus musculus
  siRNA target sequence for Rev3l (NM_011264.1,8637-8655).
ctgacagtatgtttgtact

SEQ ID NO: 466121 - DNA, 19 bp, Mus musculus
  siRNA target sequence for Rev3l (NM_011264.1,8689-8707).
gattggtcaagaaattgct

SEQ ID NO: 466122 - DNA, 19 bp, Mus musculus
  siRNA target sequence for Rev3l (NM_011264.1,8759-8777).
gtgtatttgccctgtgttt

SEQ ID NO: 466123 - DNA, 19 bp, Mus musculus
  siRNA target sequence for Rev3l (NM_011264.1,8793-8811).
gatatgtgggctacatgta

SEQ ID NO: 466124 - DNA, 19 bp, Mus musculus
  siRNA target sequence for Rev3l (NM_011264.1,8881-8899).
ccctgctgtctctaagata

SEQ ID NO: 466125 - DNA, 19 bp, Mus musculus
  siRNA target sequence for Rev3l (NM_011264.1,8896-8914).
gatacttgagcgttctcta

SEQ ID NO: 466126 - DNA, 19 bp, Mus musculus
  siRNA target sequence for Rev3l (NM_011264.1,8921-8939).
ctgttcgaaacaagagata

SEQ ID NO: 466127 - DNA, 19 bp, Mus musculus
  siRNA target sequence for Rev3l (NM_011264.1,8923-8941).
gttcgaaacaagagatatt

SEQ ID NO: 466128 - DNA, 19 bp, Mus musculus
  siRNA target sequence for Rev3l (NM_011264.1,8926-8944).
cgaaacaagagatattagt

SEQ ID NO: 466129 - DNA, 19 bp, Mus musculus
  siRNA target sequence for Rev3l (NM_011264.1,8943-8961).
gtctaattaaacagtatgt

SEQ ID NO: 466130 - DNA, 19 bp, Mus musculus
  siRNA target sequence for Rev3l (NM_011264.1,8967-8985).
gacaatgtatgaaacttgt

SEQ ID NO: 466131 - DNA, 19 bp, Mus musculus
  siRNA target sequence for Rev3l (NM_011264.1,8996-9014).
gccagcatccaagatttta

SEQ ID NO: 466132 - DNA, 19 bp, Mus musculus
  siRNA target sequence for Rev3l (NM_011264.1,8997-9015).
ccagcatccaagattttat

SEQ ID NO: 466133 - DNA, 19 bp, Mus musculus
  siRNA target sequence for Rev3l (NM_011264.1,9000-9018).
gcatccaagattttatctt

SEQ ID NO: 466134 - DNA, 19 bp, Mus musculus
  siRNA target sequence for Rev3l (NM_011264.1,9028-9046).
gtacagaggaagtttttct

SEQ ID NO: 466135 - DNA, 19 bp, Mus musculus
  siRNA target sequence for Rev3l (NM_011264.1,9063-9081).
gtgttccagcccttgaact

SEQ ID NO: 466136 - DNA, 19 bp, Mus musculus
  siRNA target sequence for Rev3l (NM_011264.1,9088-9106).
gaaaatgcttgcttatgat

SEQ ID NO: 466137 - DNA, 19 bp, Mus musculus
  siRNA target sequence for Rev3l (NM_011264.1,9129-9147).
gagaacgagtgccatatgt

SEQ ID NO: 466138 - DNA, 19 bp, Mus musculus
  siRNA target sequence for Rev3l (NM_011264.1,9131-9149).
gaacgagtgccatatgtca

SEQ ID NO: 466139 - DNA, 19 bp, Mus musculus
  siRNA target sequence for Rev3l (NM_011264.1,9165-9183).
ctggactaccccttatcca

SEQ ID NO: 466140 - DNA, 19 bp, Mus musculus
  siRNA target sequence for Rev3l (NM_011264.1,9173-9191).
ccccttatccagttgataa

SEQ ID NO: 466141 - DNA, 19 bp, Mus musculus
  siRNA target sequence for Rev3l (NM_011264.1,9288-9306).
ctcttattggtattgatgt

SEQ ID NO: 466142 - DNA, 19 bp, Mus musculus
  siRNA target sequence for Rev3l (NM_011264.1,9313-9331).
ctggtatcaagaattacca

SEQ ID NO: 466143 - DNA, 19 bp, Mus musculus
  siRNA target sequence for Rev3l (NM_011264.1,9329-9347).
ccaaggatccagaaagcta

SEQ ID NO: 466144 - DNA, 19 bp, Mus musculus
  siRNA target sequence for Rev3l (NM_011264.1,9374-9392).
gggcggaaaggcactatct

SEQ ID NO: 466145 - DNA, 19 bp, Mus musculus
  siRNA target sequence for Rev3l (NM_011264.1,9383-9401).
ggcactatctctcagtatt

SEQ ID NO: 466146 - DNA, 19 bp, Mus musculus
  siRNA target sequence for Rev3l (NM_011264.1,9384-9402).
gcactatctctcagtattt

SEQ ID NO: 466147 - DNA, 19 bp, Mus musculus
  siRNA target sequence for Rev3l (NM_011264.1,9436-9454).
gactcagcatggtatctgt

SEQ ID NO: 466148 - DNA, 19 bp, Mus musculus
  siRNA target sequence for Rev3l (NM_011264.1,9440-9458).
cagcatggtatctgtagta

SEQ ID NO: 466149 - DNA, 19 bp, Mus musculus
  siRNA target sequence for Rev3l (NM_011264.1,9443-9461).
catggtatctgtagtaaat

SEQ ID NO: 466150 - DNA, 19 bp, Mus musculus
  siRNA target sequence for Rev3l (NM_011264.1,9490-9508).
catcctcaaccaagaaatt

SEQ ID NO: 466151 - DNA, 19 bp, Mus musculus
  siRNA target sequence for Rev3l (NM_011264.1,9510-9528).
gagaattggagcgtaaaca

SEQ ID NO: 466152 - DNA, 19 bp, Mus musculus
  siRNA target sequence for Rev3l (NM_011264.1,9522-9540).
gtaaacaggagcagcttat

SEQ ID NO: 466153 - DNA, 19 bp, Mus musculus
  siRNA target sequence for Rev3l (NM_011264.1,9564-9582).
gttcctttgaccgacatat

SEQ ID NO: 466154 - DNA, 19 bp, Mus musculus
  siRNA target sequence for Rev3l (NM_011264.1,9575-9593).
cgacatatcccgtgtgttt

SEQ ID NO: 466155 - DNA, 19 bp, Mus musculus
  siRNA target sequence for Rev3l (NM_011264.1,9605-9623).
ccggtacttttcaaactct

SEQ ID NO: 466156 - DNA, 19 bp, Mus musculus
  siRNA target sequence for Rev3l (NM_011264.1,9624-9642).
cacgagtaaacagagaatt

SEQ ID NO: 466157 - DNA, 19 bp, Mus musculus
  siRNA target sequence for Rev3l (NM_011264.1,9629-9647).
gtaaacagagaattatcca

SEQ ID NO: 466158 - DNA, 19 bp, Mus musculus
  siRNA target sequence for Rev3l (NM_011264.1,9652-9670).
cccgtacctgcgacagtta

SEQ ID NO: 466159 - DNA, 19 bp, Mus musculus
  siRNA target sequence for Rev3l (NM_011264.1,9654-9672).
cgtacctgcgacagttact

SEQ ID NO: 466160 - DNA, 19 bp, Mus musculus
  siRNA target sequence for Rfc4 (NM_145480.1,145-163).
ggagaaaccaagaaagtca

SEQ ID NO: 466161 - DNA, 19 bp, Mus musculus
  siRNA target sequence for Rfc4 (NM_145480.1,263-281).
ctgaccttcctaatctctt

SEQ ID NO: 466162 - DNA, 19 bp, Mus musculus
  siRNA target sequence for Rfc4 (NM_145480.1,342-360).
ctttgggcctgaactcttt

SEQ ID NO: 466163 - DNA, 19 bp, Mus musculus
  siRNA target sequence for Rfc4 (NM_145480.1,378-396).
gttaaatgcatctgatgaa

SEQ ID NO: 466164 - DNA, 19 bp, Mus musculus
  siRNA target sequence for Rfc4 (NM_145480.1,389-407).
ctgatgaacgtggaataca

SEQ ID NO: 466165 - DNA, 19 bp, Mus musculus
  siRNA target sequence for Rfc4 (NM_145480.1,409-427).
gtagtccgagagaaagtga

SEQ ID NO: 466166 - DNA, 19 bp, Mus musculus
  siRNA target sequence for Rfc4 (NM_145480.1,412-430).
gtccgagagaaagtgaaaa

SEQ ID NO: 466167 - DNA, 19 bp, Mus musculus
  siRNA target sequence for Rfc4 (NM_145480.1,414-432).
ccgagagaaagtgaaaaat

SEQ ID NO: 466168 - DNA, 19 bp, Mus musculus
  siRNA target sequence for Rfc4 (NM_145480.1,479-497).
gtcctccctttaagattgt

SEQ ID NO: 466169 - DNA, 19 bp, Mus musculus
  siRNA target sequence for Rfc4 (NM_145480.1,481-499).
cctccctttaagattgtaa

SEQ ID NO: 466170 - DNA, 19 bp, Mus musculus
  siRNA target sequence for Rfc4 (NM_145480.1,482-500).
ctccctttaagattgtaat

SEQ ID NO: 466171 - DNA, 19 bp, Mus musculus
  siRNA target sequence for Rfc4 (NM_145480.1,548-566).
ggcgtaccatggaaaaaga

SEQ ID NO: 466172 - DNA, 19 bp, Mus musculus
  siRNA target sequence for Rfc4 (NM_145480.1,589-607).
ctcatctgtaactatgtca

SEQ ID NO: 466173 - DNA, 19 bp, Mus musculus
  siRNA target sequence for Rfc4 (NM_145480.1,600-618).
ctatgtcagtcgaataatt

SEQ ID NO: 466174 - DNA, 19 bp, Mus musculus
  siRNA target sequence for Rfc4 (NM_145480.1,619-637).
gaacccctcacttctagat

SEQ ID NO: 466175 - DNA, 19 bp, Mus musculus
  siRNA target sequence for Rfc4 (NM_145480.1,622-640).
cccctcacttctagatgtt

SEQ ID NO: 466176 - DNA, 19 bp, Mus musculus
  siRNA target sequence for Rfc4 (NM_145480.1,657-675).
gcctctgtcagataagatt

SEQ ID NO: 466177 - DNA, 19 bp, Mus musculus
  siRNA target sequence for Rfc4 (NM_145480.1,681-699).
ggagcgattactggatatt

SEQ ID NO: 466178 - DNA, 19 bp, Mus musculus
  siRNA target sequence for Rfc4 (NM_145480.1,732-750).
ggaaatagcgtatcttgtt

SEQ ID NO: 466179 - DNA, 19 bp, Mus musculus
  siRNA target sequence for Rfc4 (NM_145480.1,733-751).
gaaatagcgtatcttgtta

SEQ ID NO: 466180 - DNA, 19 bp, Mus musculus
  siRNA target sequence for Rfc4 (NM_145480.1,739-757).
gcgtatcttgttaagatat

SEQ ID NO: 466181 - DNA, 19 bp, Mus musculus
  siRNA target sequence for Rfc4 (NM_145480.1,753-771).
gatatcagaaggagattta

SEQ ID NO: 466182 - DNA, 19 bp, Mus musculus
  siRNA target sequence for Rfc4 (NM_145480.1,795-813).
gagtgccactcgactaaca

SEQ ID NO: 466183 - DNA, 19 bp, Mus musculus
  siRNA target sequence for Rfc4 (NM_145480.1,872-890).
caaccattgatggaatatt

SEQ ID NO: 466184 - DNA, 19 bp, Mus musculus
  siRNA target sequence for Rfc4 (NM_145480.1,933-951).
ggtaaagaacctcatagat

SEQ ID NO: 466185 - DNA, 19 bp, Mus musculus
  siRNA target sequence for Rfc4 (NM_145480.1,972-990).
gcttgtcaatcaacttcat

SEQ ID NO: 466186 - DNA, 19 bp, Mus musculus
  siRNA target sequence for Rfc4 (NM_145480.1,982-1000).
caacttcatgatgcaatta

SEQ ID NO: 466187 - DNA, 19 bp, Mus musculus
  siRNA target sequence for Rfc4 (NM_145480.1,1021-1039).
gataaacacaagtccatta

SEQ ID NO: 466188 - DNA, 19 bp, Mus musculus
  siRNA target sequence for Rfx1 (NM_009055.2,228-246).
ggcaacacagtcctatgtt

SEQ ID NO: 466189 - DNA, 19 bp, Mus musculus
  siRNA target sequence for Rfx1 (NM_009055.2,229-247).
gcaacacagtcctatgtta

SEQ ID NO: 466190 - DNA, 19 bp, Mus musculus
  siRNA target sequence for Rfx1 (NM_009055.2,1054-1072).
cctgtcccacacgtgtatt

SEQ ID NO: 466191 - DNA, 19 bp, Mus musculus
  siRNA target sequence for Rfx1 (NM_009055.2,1150-1168).
ccggagacgcctatctaca

SEQ ID NO: 466192 - DNA, 19 bp, Mus musculus
  siRNA target sequence for Rfx1 (NM_009055.2,1257-1275).
cggctcagtgcccatgtat

SEQ ID NO: 466193 - DNA, 19 bp, Mus musculus
  siRNA target sequence for Rfx1 (NM_009055.2,2056-2074).
cagttcacactggtagaaa

SEQ ID NO: 466194 - DNA, 19 bp, Mus musculus
  siRNA target sequence for Rfx1 (NM_009055.2,2256-2274).
gatcctcatccctgatgtt

SEQ ID NO: 466195 - DNA, 19 bp, Mus musculus
  siRNA target sequence for Rfx1 (NM_009055.2,2301-2319).
ccaagcaatccggaacttt

SEQ ID NO: 466196 - DNA, 19 bp, Mus musculus
  siRNA target sequence for Rfx1 (NM_009055.2,2931-2949).
cttggaccctgacaaagat

SEQ ID NO: 466197 - DNA, 19 bp, Mus musculus
  siRNA target sequence for Rfx1 (NM_009055.2,2934-2952).
ggaccctgacaaagatgaa

SEQ ID NO: 466198 - DNA, 19 bp, Mus musculus
  siRNA target sequence for Rfx2 (NM_009056.1,379-397).
ccagcagcgcagcatctta

SEQ ID NO: 466199 - DNA, 19 bp, Mus musculus
  siRNA target sequence for Rfx2 (NM_009056.1,382-400).
gcagcgcagcatcttactt

SEQ ID NO: 466200 - DNA, 19 bp, Mus musculus
  siRNA target sequence for Rfx2 (NM_009056.1,383-401).
cagcgcagcatcttacttt

SEQ ID NO: 466201 - DNA, 19 bp, Mus musculus
  siRNA target sequence for Rfx2 (NM_009056.1,385-403).
gcgcagcatcttactttga

SEQ ID NO: 466202 - DNA, 19 bp, Mus musculus
  siRNA target sequence for Rfx2 (NM_009056.1,387-405).
gcagcatcttactttgaga

SEQ ID NO: 466203 - DNA, 19 bp, Mus musculus
  siRNA target sequence for Rfx2 (NM_009056.1,715-733).
catcctttggcaaactcat

SEQ ID NO: 466204 - DNA, 19 bp, Mus musculus
  siRNA target sequence for Rfx2 (NM_009056.1,1076-1094).
gagcgtcacccttcatgat

SEQ ID NO: 466205 - DNA, 19 bp, Mus musculus
  siRNA target sequence for Rfx2 (NM_009056.1,1124-1142).
gcactgtgaggctacctta

SEQ ID NO: 466206 - DNA, 19 bp, Mus musculus
  siRNA target sequence for Rfx2 (NM_009056.1,1138-1156).
ccttagatgtcgtcatgaa

SEQ ID NO: 466207 - DNA, 19 bp, Mus musculus
  siRNA target sequence for Rfx2 (NM_009056.1,1496-1514).
caaggtgggtgttgtaagt

SEQ ID NO: 466208 - DNA, 19 bp, Mus musculus
  siRNA target sequence for Rfx2 (NM_009056.1,1999-2017).
ccgtcatgggcgagttcaa

SEQ ID NO: 466209 - DNA, 19 bp, Mus musculus
  siRNA target sequence for Rfx3 (NM_011265.2,365-383).
gtgatactgtctataccaa

SEQ ID NO: 466210 - DNA, 19 bp, Mus musculus
  siRNA target sequence for Rfx3 (NM_011265.2,385-403).
ggagcaatccgaacaacaa

SEQ ID NO: 466211 - DNA, 19 bp, Mus musculus
  siRNA target sequence for Rfx3 (NM_011265.2,426-444).
gatgtacagccaaaacact

SEQ ID NO: 466212 - DNA, 19 bp, Mus musculus
  siRNA target sequence for Rfx3 (NM_011265.2,564-582).
cagctcgggaggaacctat

SEQ ID NO: 466213 - DNA, 19 bp, Mus musculus
  siRNA target sequence for Rfx3 (NM_011265.2,566-584).
gctcgggaggaacctattt

SEQ ID NO: 466214 - DNA, 19 bp, Mus musculus
  siRNA target sequence for Rfx3 (NM_011265.2,569-587).
cgggaggaacctatttgat

SEQ ID NO: 466215 - DNA, 19 bp, Mus musculus
  siRNA target sequence for Rfx3 (NM_011265.2,579-597).
ctatttgatcggcaattca

SEQ ID NO: 466216 - DNA, 19 bp, Mus musculus
  siRNA target sequence for Rfx3 (NM_011265.2,638-656).
cctccccagcaacaattga

SEQ ID NO: 466217 - DNA, 19 bp, Mus musculus
  siRNA target sequence for Rfx3 (NM_011265.2,639-657).
ctccccagcaacaattgaa

SEQ ID NO: 466218 - DNA, 19 bp, Mus musculus
  siRNA target sequence for Rfx3 (NM_011265.2,662-680).
cgattgagacgctgcaaaa

SEQ ID NO: 466219 - DNA, 19 bp, Mus musculus
  siRNA target sequence for Rfx3 (NM_011265.2,776-794).
cgaggagcacgctgtacaa

SEQ ID NO: 466220 - DNA, 19 bp, Mus musculus
  siRNA target sequence for Rfx3 (NM_011265.2,843-861).
cgcctctttcggaaaacta

SEQ ID NO: 466221 - DNA, 19 bp, Mus musculus
  siRNA target sequence for Rfx3 (NM_011265.2,844-862).
gcctctttcggaaaactaa

SEQ ID NO: 466222 - DNA, 19 bp, Mus musculus
  siRNA target sequence for Rfx3 (NM_011265.2,845-863).
cctctttcggaaaactaat

SEQ ID NO: 466223 - DNA, 19 bp, Mus musculus
  siRNA target sequence for Rfx3 (NM_011265.2,846-864).
ctctttcggaaaactaata

SEQ ID NO: 466224 - DNA, 19 bp, Mus musculus
  siRNA target sequence for Rfx3 (NM_011265.2,882-900).
gctacgaactaggagatta

SEQ ID NO: 466225 - DNA, 19 bp, Mus musculus
  siRNA target sequence for Rfx3 (NM_011265.2,1009-1027).
cccatgcaacagaagcaaa

SEQ ID NO: 466226 - DNA, 19 bp, Mus musculus
  siRNA target sequence for Rfx3 (NM_011265.2,1127-1145).
gtcaacatcatcaacagtt

SEQ ID NO: 466227 - DNA, 19 bp, Mus musculus
  siRNA target sequence for Rfx3 (NM_011265.2,1200-1218).
gccagatggtactaccttt

SEQ ID NO: 466228 - DNA, 19 bp, Mus musculus
  siRNA target sequence for Rfx3 (NM_011265.2,1208-1226).
gtactacctttgaggatat

SEQ ID NO: 466229 - DNA, 19 bp, Mus musculus
  siRNA target sequence for Rfx3 (NM_011265.2,1265-1283).
caatactggacgttgttgt

SEQ ID NO: 466230 - DNA, 19 bp, Mus musculus
  siRNA target sequence for Rfx3 (NM_011265.2,1365-1383).
catcacggaatcaagcaat

SEQ ID NO: 466231 - DNA, 19 bp, Mus musculus
  siRNA target sequence for Rfx3 (NM_011265.2,1400-1418).
gtcgacttccgaaagcaaa

SEQ ID NO: 466232 - DNA, 19 bp, Mus musculus
  siRNA target sequence for Rfx3 (NM_011265.2,1441-1459).
gagtctatcctgaaatgga

SEQ ID NO: 466233 - DNA, 19 bp, Mus musculus
  siRNA target sequence for Rfx3 (NM_011265.2,1490-1508).
ctttggtggagattctcat

SEQ ID NO: 466234 - DNA, 19 bp, Mus musculus
  siRNA target sequence for Rfx3 (NM_011265.2,1516-1534).
gtccttagacccattccta

SEQ ID NO: 466235 - DNA, 19 bp, Mus musculus
  siRNA target sequence for Rfx3 (NM_011265.2,1542-1560).
gacccaagccattcgaaat

SEQ ID NO: 466236 - DNA, 19 bp, Mus musculus
  siRNA target sequence for Rfx3 (NM_011265.2,1629-1647).
caaggttgccgctgtaagt

SEQ ID NO: 466237 - DNA, 19 bp, Mus musculus
  siRNA target sequence for Rfx3 (NM_011265.2,1659-1677).
gactctgcgaagatacaca

SEQ ID NO: 466238 - DNA, 19 bp, Mus musculus
  siRNA target sequence for Rfx3 (NM_011265.2,1831-1849).
ctagaaacagacttcaaga

SEQ ID NO: 466239 - DNA, 19 bp, Mus musculus
  siRNA target sequence for Rfx3 (NM_011265.2,1886-1904).
ctgcttggctggacaatgt

SEQ ID NO: 466240 - DNA, 19 bp, Mus musculus
  siRNA target sequence for Rfx3 (NM_011265.2,1889-1907).
cttggctggacaatgtgat

SEQ ID NO: 466241 - DNA, 19 bp, Mus musculus
  siRNA target sequence for Rfx3 (NM_011265.2,1999-2017).
gttatccgggacttaacct

SEQ ID NO: 466242 - DNA, 19 bp, Mus musculus
  siRNA target sequence for Rfx3 (NM_011265.2,2073-2091).
gtacatgttctacttagta

SEQ ID NO: 466243 - DNA, 19 bp, Mus musculus
  siRNA target sequence for Rfx3 (NM_011265.2,2139-2157).
gggtgagtttggcgattta

SEQ ID NO: 466244 - DNA, 19 bp, Mus musculus
  siRNA target sequence for Rfx3 (NM_011265.2,2140-2158).
ggtgagtttggcgatttaa

SEQ ID NO: 466245 - DNA, 19 bp, Mus musculus
  siRNA target sequence for Rfx3 (NM_011265.2,2151-2169).
cgatttaaatgctgtatct

SEQ ID NO: 466246 - DNA, 19 bp, Mus musculus
  siRNA target sequence for Rfx3 (NM_011265.2,2162-2180).
ctgtatctcccggaaatct

SEQ ID NO: 466247 - DNA, 19 bp, Mus musculus
  siRNA target sequence for Rfx3 (NM_011265.2,2172-2190).
cggaaatctggataaagat

SEQ ID NO: 466248 - DNA, 19 bp, Mus musculus
  siRNA target sequence for Rfx3 (NM_011265.2,2195-2213).
gcagcgaagtcgaaagtga

SEQ ID NO: 466249 - DNA, 19 bp, Mus musculus
  siRNA target sequence for Rfx3 (NM_011265.2,2356-2374).
gagcacatcgtcacaagta

SEQ ID NO: 466250 - DNA, 19 bp, Mus musculus
  siRNA target sequence for Rfx3 (NM_011265.2,2358-2376).
gcacatcgtcacaagtaca

SEQ ID NO: 466251 - DNA, 19 bp, Mus musculus
  siRNA target sequence for Rfx5 (NM_017395.1,97-115).
ctccgaggtaccatttcca

SEQ ID NO: 466252 - DNA, 19 bp, Mus musculus
  siRNA target sequence for Rfx5 (NM_017395.1,334-352).
gtctatgatgcctatcgaa

SEQ ID NO: 466253 - DNA, 19 bp, Mus musculus
  siRNA target sequence for Rfx5 (NM_017395.1,394-412).
gccaacttcggtaaaatca

SEQ ID NO: 466254 - DNA, 19 bp, Mus musculus
  siRNA target sequence for Rfx5 (NM_017395.1,395-413).
ccaacttcggtaaaatcat

SEQ ID NO: 466255 - DNA, 19 bp, Mus musculus
  siRNA target sequence for Rfx5 (NM_017395.1,460-478).
ggccagtccaaatattgct

SEQ ID NO: 466256 - DNA, 19 bp, Mus musculus
  siRNA target sequence for Rfx5 (NM_017395.1,494-512).
ggaagaccttggtatccat

SEQ ID NO: 466257 - DNA, 19 bp, Mus musculus
  siRNA target sequence for Rfx5 (NM_017395.1,531-549).
cgacttgaagggatctgaa

SEQ ID NO: 466258 - DNA, 19 bp, Mus musculus
  siRNA target sequence for Rfx5 (NM_017395.1,578-596).
cagcacctcgggatgaact

SEQ ID NO: 466259 - DNA, 19 bp, Mus musculus
  siRNA target sequence for Rfx5 (NM_017395.1,771-789).
ccctcgagaacggtcatta

SEQ ID NO: 466260 - DNA, 19 bp, Mus musculus
  siRNA target sequence for Rfx5 (NM_017395.1,772-790).
cctcgagaacggtcattat

SEQ ID NO: 466261 - DNA, 19 bp, Mus musculus
  siRNA target sequence for Rfx5 (NM_017395.1,775-793).
cgagaacggtcattatgta

SEQ ID NO: 466262 - DNA, 19 bp, Mus musculus
  siRNA target sequence for Rfx5 (NM_017395.1,778-796).
gaacggtcattatgtaagt

SEQ ID NO: 466263 - DNA, 19 bp, Mus musculus
  siRNA target sequence for Rfx5 (NM_017395.1,949-967).
gccagtaagccacaagtta

SEQ ID NO: 466264 - DNA, 19 bp, Mus musculus
  siRNA target sequence for Rfx5 (NM_017395.1,1004-1022).
gagcaccacgatcacttat

SEQ ID NO: 466265 - DNA, 19 bp, Mus musculus
  siRNA target sequence for Rfx5 (NM_017395.1,1006-1024).
gcaccacgatcacttatca

SEQ ID NO: 466266 - DNA, 19 bp, Mus musculus
  siRNA target sequence for Rfx5 (NM_017395.1,1099-1117).
cccatcatcaacatgatct

SEQ ID NO: 466267 - DNA, 19 bp, Mus musculus
  siRNA target sequence for Rfx5 (NM_017395.1,1368-1386).
cagggaggtaggcataagt

SEQ ID NO: 466268 - DNA, 19 bp, Mus musculus
  siRNA target sequence for Rfx5 (NM_017395.1,1371-1389).
ggaggtaggcataagtagt

SEQ ID NO: 466269 - DNA, 19 bp, Mus musculus
  siRNA target sequence for Rfx5 (NM_017395.1,1374-1392).
ggtaggcataagtagtgat

SEQ ID NO: 466270 - DNA, 19 bp, Mus musculus
  siRNA target sequence for Rfx5 (NM_017395.1,1405-1423).
gacaagggtatcaaaagga

SEQ ID NO: 466271 - DNA, 19 bp, Mus musculus
  siRNA target sequence for Rfx5 (NM_017395.1,1454-1472).
ggcaggacccaccagttaa

SEQ ID NO: 466272 - DNA, 19 bp, Mus musculus
  siRNA target sequence for Rfx5 (NM_017395.1,1455-1473).
gcaggacccaccagttaaa

SEQ ID NO: 466273 - DNA, 19 bp, Mus musculus
  siRNA target sequence for Rfx5 (NM_017395.1,1483-1501).
cacgaaacacaggatacta

SEQ ID NO: 466274 - DNA, 19 bp, Mus musculus
  siRNA target sequence for Rfx5 (NM_017395.1,1494-1512).
ggatactacagtaagtgaa

SEQ ID NO: 466275 - DNA, 19 bp, Mus musculus
  siRNA target sequence for Rfx5 (NM_017395.1,1629-1647).
ggagacatggggctcaaaa

SEQ ID NO: 466276 - DNA, 19 bp, Mus musculus
  siRNA target sequence for Rfx5 (NM_017395.1,1630-1648).
gagacatggggctcaaaaa

SEQ ID NO: 466277 - DNA, 19 bp, Mus musculus
  siRNA target sequence for Rfx5 (NM_017395.1,1632-1650).
gacatggggctcaaaaaga

SEQ ID NO: 466278 - DNA, 19 bp, Mus musculus
  siRNA target sequence for Rfx5 (NM_017395.1,1814-1832).
cttcaaaagtgagtgttat

SEQ ID NO: 466279 - DNA, 19 bp, Mus musculus
  siRNA target sequence for Rfx5 (NM_017395.1,1817-1835).
caaaagtgagtgttatcaa

SEQ ID NO: 466280 - DNA, 19 bp, Mus musculus
  siRNA target sequence for Rfx5 (NM_017395.1,1852-1870).
gaggctcttcagttggtaa

SEQ ID NO: 466281 - DNA, 19 bp, Mus musculus
  siRNA target sequence for Rfx5 (NM_017395.1,1908-1926).
gttaaagggtcgtgtactt

SEQ ID NO: 466282 - DNA, 19 bp, Mus musculus
  siRNA target sequence for Rfx5 (NM_017395.1,1914-1932).
gggtcgtgtacttcaaagt

SEQ ID NO: 466283 - DNA, 19 bp, Mus musculus
  siRNA target sequence for Rfx5 (NM_017395.1,1915-1933).
ggtcgtgtacttcaaagtt

SEQ ID NO: 466284 - DNA, 19 bp, Mus musculus
  siRNA target sequence for Rfxank (NM_011266.1,509-527).
gccaactgaaggatcatct

SEQ ID NO: 466285 - DNA, 19 bp, Mus musculus
  siRNA target sequence for Rfxank (NM_011266.1,563-581).
ctggaaacaacctgatcaa

SEQ ID NO: 466286 - DNA, 19 bp, Mus musculus
  siRNA target sequence for Rfxank (NM_011266.1,620-638).
cctcagcctttggagaaat

SEQ ID NO: 466287 - DNA, 19 bp, Mus musculus
  siRNA target sequence for Rfxap (NM_133231.1,469-487).
caccgcaacaagatgtaca

SEQ ID NO: 466288 - DNA, 19 bp, Mus musculus
  siRNA target sequence for Rfxap (NM_133231.1,551-569).
gcacaggcaacgtcaaact

SEQ ID NO: 466289 - DNA, 19 bp, Mus musculus
  siRNA target sequence for Rfxap (NM_133231.1,588-606).
catactctccattgtcaaa

SEQ ID NO: 466290 - DNA, 19 bp, Mus musculus
  siRNA target sequence for Rfxap (NM_133231.1,697-715).
ccagaagttgtccagtttt

SEQ ID NO: 466291 - DNA, 19 bp, Mus musculus
  siRNA target sequence for Rfxap (NM_133231.1,698-716).
cagaagttgtccagttttt

SEQ ID NO: 466292 - DNA, 19 bp, Mus musculus
  siRNA target sequence for Rfxap (NM_133231.1,733-751).
ctactaaatcagcaagttt

SEQ ID NO: 466293 - DNA, 19 bp, Mus musculus
  siRNA target sequence for Rfxdc1 (NM_177306.2,516-534).
catcaatgggaactttgaa

SEQ ID NO: 466294 - DNA, 19 bp, Mus musculus
  siRNA target sequence for Rfxdc1 (NM_177306.2,628-646).
gtctgtgactcaattcttt

SEQ ID NO: 466295 - DNA, 19 bp, Mus musculus
  siRNA target sequence for Rfxdc1 (NM_177306.2,630-648).
ctgtgactcaattctttat

SEQ ID NO: 466296 - DNA, 19 bp, Mus musculus
  siRNA target sequence for Rfxdc1 (NM_177306.2,636-654).
ctcaattctttataaggtt

SEQ ID NO: 466297 - DNA, 19 bp, Mus musculus
  siRNA target sequence for Rfxdc1 (NM_177306.2,705-723).
gttagcagatataagaaat

SEQ ID NO: 466298 - DNA, 19 bp, Mus musculus
  siRNA target sequence for Rfxdc1 (NM_177306.2,738-756).
ggaacagtgggttgtttca

SEQ ID NO: 466299 - DNA, 19 bp, Mus musculus
  siRNA target sequence for Rfxdc1 (NM_177306.2,771-789).
gccagaagccctcattgat

SEQ ID NO: 466300 - DNA, 19 bp, Mus musculus
  siRNA target sequence for Rfxdc1 (NM_177306.2,775-793).
gaagccctcattgataaga

SEQ ID NO: 466301 - DNA, 19 bp, Mus musculus
  siRNA target sequence for Rfxdc1 (NM_177306.2,778-796).
gccctcattgataagaaaa

SEQ ID NO: 466302 - DNA, 19 bp, Mus musculus
  siRNA target sequence for Rfxdc1 (NM_177306.2,800-818).
ccattttgcgaagatttgt

SEQ ID NO: 466303 - DNA, 19 bp, Mus musculus
  siRNA target sequence for Rfxdc1 (NM_177306.2,801-819).
cattttgcgaagatttgta

SEQ ID NO: 466304 - DNA, 19 bp, Mus musculus
  siRNA target sequence for Rfxdc1 (NM_177306.2,892-910).
gtggtgaatgccatggtat

SEQ ID NO: 466305 - DNA, 19 bp, Mus musculus
  siRNA target sequence for Rfxdc1 (NM_177306.2,902-920).
ccatggtatctgatattga

SEQ ID NO: 466306 - DNA, 19 bp, Mus musculus
  siRNA target sequence for Rfxdc1 (NM_177306.2,903-921).
catggtatctgatattgaa

SEQ ID NO: 466307 - DNA, 19 bp, Mus musculus
  siRNA target sequence for Rfxdc1 (NM_177306.2,947-965).
ctcaggctcttcttaccat

SEQ ID NO: 466308 - DNA, 19 bp, Mus musculus
  siRNA target sequence for Rfxdc1 (NM_177306.2,952-970).
gctcttcttaccatatcca

SEQ ID NO: 466309 - DNA, 19 bp, Mus musculus
  siRNA target sequence for Rfxdc1 (NM_177306.2,1023-1041).
gttccaagaactgaaagat

SEQ ID NO: 466310 - DNA, 19 bp, Mus musculus
  siRNA target sequence for Rfxdc1 (NM_177306.2,1042-1060).
ctccttaagaagaatgcta

SEQ ID NO: 466311 - DNA, 19 bp, Mus musculus
  siRNA target sequence for Rfxdc1 (NM_177306.2,1061-1079).
cagtggaggcatttattga

SEQ ID NO: 466312 - DNA, 19 bp, Mus musculus
  siRNA target sequence for Rfxdc1 (NM_177306.2,1063-1081).
gtggaggcatttattgaat

SEQ ID NO: 466313 - DNA, 19 bp, Mus musculus
  siRNA target sequence for Rfxdc1 (NM_177306.2,1095-1113).
ggtagagcagagagttatt

SEQ ID NO: 466314 - DNA, 19 bp, Mus musculus
  siRNA target sequence for Rfxdc1 (NM_177306.2,1096-1114).
gtagagcagagagttatta

SEQ ID NO: 466315 - DNA, 19 bp, Mus musculus
  siRNA target sequence for Rfxdc1 (NM_177306.2,1122-1140).
caaacaaaatggaagatct

SEQ ID NO: 466316 - DNA, 19 bp, Mus musculus
  siRNA target sequence for Rfxdc1 (NM_177306.2,1165-1183).
ctgctcaaatggagctttt

SEQ ID NO: 466317 - DNA, 19 bp, Mus musculus
  siRNA target sequence for Rfxdc1 (NM_177306.2,1170-1188).
caaatggagcttttttggt

SEQ ID NO: 466318 - DNA, 19 bp, Mus musculus
  siRNA target sequence for Rfxdc1 (NM_177306.2,1201-1219).
cataatcttaccttgaaca

SEQ ID NO: 466319 - DNA, 19 bp, Mus musculus
  siRNA target sequence for Rfxdc1 (NM_177306.2,1215-1233).
gaacaacgcatcaagtttt

SEQ ID NO: 466320 - DNA, 19 bp, Mus musculus
  siRNA target sequence for Rfxdc1 (NM_177306.2,1242-1260).
ccatctgatccgaatgctt

SEQ ID NO: 466321 - DNA, 19 bp, Mus musculus
  siRNA target sequence for Rfxdc1 (NM_177306.2,1287-1305).
ggagactcaatttaacaat

SEQ ID NO: 466322 - DNA, 19 bp, Mus musculus
  siRNA target sequence for Rfxdc1 (NM_177306.2,1326-1344).
gaatttattggacaagtat

SEQ ID NO: 466323 - DNA, 19 bp, Mus musculus
  siRNA target sequence for Rfxdc1 (NM_177306.2,1350-1368).
gaactcggatgcgagtaaa

SEQ ID NO: 466324 - DNA, 19 bp, Mus musculus
  siRNA target sequence for Rfxdc1 (NM_177306.2,1353-1371).
ctcggatgcgagtaaagct

SEQ ID NO: 466325 - DNA, 19 bp, Mus musculus
  siRNA target sequence for Rfxdc1 (NM_177306.2,1532-1550).
caactgaggacactgataa

SEQ ID NO: 466326 - DNA, 19 bp, Mus musculus
  siRNA target sequence for Rfxdc1 (NM_177306.2,1556-1574).
cactcccaggtcaaataga

SEQ ID NO: 466327 - DNA, 19 bp, Mus musculus
  siRNA target sequence for Rfxdc1 (NM_177306.2,1565-1583).
gtcaaatagagctttcaca

SEQ ID NO: 466328 - DNA, 19 bp, Mus musculus
  siRNA target sequence for Rfxdc1 (NM_177306.2,1703-1721).
caacacattgctcaacata

SEQ ID NO: 466329 - DNA, 19 bp, Mus musculus
  siRNA target sequence for Rfxdc1 (NM_177306.2,1715-1733).
caacatatgcagaaccaat

SEQ ID NO: 466330 - DNA, 19 bp, Mus musculus
  siRNA target sequence for Rfxdc1 (NM_177306.2,1723-1741).
gcagaaccaatttatccta

SEQ ID NO: 466331 - DNA, 19 bp, Mus musculus
  siRNA target sequence for Rfxdc1 (NM_177306.2,1751-1769).
cagccaaccacgactttta

SEQ ID NO: 466332 - DNA, 19 bp, Mus musculus
  siRNA target sequence for Rfxdc1 (NM_177306.2,1781-1799).
ctaactatcagactatgtt

SEQ ID NO: 466333 - DNA, 19 bp, Mus musculus
  siRNA target sequence for Rfxdc1 (NM_177306.2,1910-1928).
gtgctgggtctccatataa

SEQ ID NO: 466334 - DNA, 19 bp, Mus musculus
  siRNA target sequence for Rfxdc1 (NM_177306.2,1915-1933).
gggtctccatataattgta

SEQ ID NO: 466335 - DNA, 19 bp, Mus musculus
  siRNA target sequence for Rfxdc1 (NM_177306.2,2010-2028).
caatttccttagtaatgca

SEQ ID NO: 466336 - DNA, 19 bp, Mus musculus
  siRNA target sequence for Rfxdc1 (NM_177306.2,2071-2089).
cccaatggatactatggaa

SEQ ID NO: 466337 - DNA, 19 bp, Mus musculus
  siRNA target sequence for Rfxdc1 (NM_177306.2,2072-2090).
ccaatggatactatggaaa

SEQ ID NO: 466338 - DNA, 19 bp, Mus musculus
  siRNA target sequence for Rfxdc1 (NM_177306.2,2077-2095).
ggatactatggaaacaata

SEQ ID NO: 466339 - DNA, 19 bp, Mus musculus
  siRNA target sequence for Rfxdc1 (NM_177306.2,2078-2096).
gatactatggaaacaatat

SEQ ID NO: 466340 - DNA, 19 bp, Mus musculus
  siRNA target sequence for Rfxdc1 (NM_177306.2,2086-2104).
ggaaacaatataaactact

SEQ ID NO: 466341 - DNA, 19 bp, Mus musculus
  siRNA target sequence for Rfxdc1 (NM_177306.2,2126-2144).
cgatggtgaaccaacatgt

SEQ ID NO: 466342 - DNA, 19 bp, Mus musculus
  siRNA target sequence for Rfxdc1 (NM_177306.2,2127-2145).
gatggtgaaccaacatgtt

SEQ ID NO: 466343 - DNA, 19 bp, Mus musculus
  siRNA target sequence for Rfxdc1 (NM_177306.2,2130-2148).
ggtgaaccaacatgtttca

SEQ ID NO: 466344 - DNA, 19 bp, Mus musculus
  siRNA target sequence for Rfxdc1 (NM_177306.2,2170-2188).
ctgcctccctacagtgata

SEQ ID NO: 466345 - DNA, 19 bp, Mus musculus
  siRNA target sequence for Rfxdc1 (NM_177306.2,2172-2190).
gcctccctacagtgatatt

SEQ ID NO: 466346 - DNA, 19 bp, Mus musculus
  siRNA target sequence for Rfxdc1 (NM_177306.2,2174-2192).
ctccctacagtgatattca

SEQ ID NO: 466347 - DNA, 19 bp, Mus musculus
  siRNA target sequence for Rfxdc1 (NM_177306.2,2177-2195).
cctacagtgatattcatga

SEQ ID NO: 466348 - DNA, 19 bp, Mus musculus
  siRNA target sequence for Rfxdc1 (NM_177306.2,2178-2196).
ctacagtgatattcatgat

SEQ ID NO: 466349 - DNA, 19 bp, Mus musculus
  siRNA target sequence for Rfxdc1 (NM_177306.2,2191-2209).
catgatccacttaacattt

SEQ ID NO: 466350 - DNA, 19 bp, Mus musculus
  siRNA target sequence for Rfxdc1 (NM_177306.2,2229-2247).
gcagaacaactcgttttat

SEQ ID NO: 466351 - DNA, 19 bp, Mus musculus
  siRNA target sequence for Rfxdc1 (NM_177306.2,2232-2250).
gaacaactcgttttatgca

SEQ ID NO: 466352 - DNA, 19 bp, Mus musculus
  siRNA target sequence for Rfxdc1 (NM_177306.2,2240-2258).
cgttttatgcagacacatt

SEQ ID NO: 466353 - DNA, 19 bp, Mus musculus
  siRNA target sequence for Rfxdc1 (NM_177306.2,2353-2371).
cagtatccagtgcaagata

SEQ ID NO: 466354 - DNA, 19 bp, Mus musculus
  siRNA target sequence for Rfxdc1 (NM_177306.2,2355-2373).
gtatccagtgcaagatagt

SEQ ID NO: 466355 - DNA, 19 bp, Mus musculus
  siRNA target sequence for Rfxdc1 (NM_177306.2,2423-2441).
ccatcaacaccgtgtttat

SEQ ID NO: 466356 - DNA, 19 bp, Mus musculus
  siRNA target sequence for Rnf141 (NM_025999.1,165-183).
cgagaaagtggctccttaa

SEQ ID NO: 466357 - DNA, 19 bp, Mus musculus
  siRNA target sequence for Rnf141 (NM_025999.1,168-186).
gaaagtggctccttaactt

SEQ ID NO: 466358 - DNA, 19 bp, Mus musculus
  siRNA target sequence for Rnf141 (NM_025999.1,210-228).
gctgaactcaatgatgtaa

SEQ ID NO: 466359 - DNA, 19 bp, Mus musculus
  siRNA target sequence for Rnf141 (NM_025999.1,298-316).
ccttctggaaagtagttgt

SEQ ID NO: 466360 - DNA, 19 bp, Mus musculus
  siRNA target sequence for Rnf141 (NM_025999.1,320-338).
ggtggtctgtaccaagatt

SEQ ID NO: 466361 - DNA, 19 bp, Mus musculus
  siRNA target sequence for Rnf141 (NM_025999.1,321-339).
gtggtctgtaccaagatta

SEQ ID NO: 466362 - DNA, 19 bp, Mus musculus
  siRNA target sequence for Rnf141 (NM_025999.1,360-378).
gaagcatcgcggatcatga

SEQ ID NO: 466363 - DNA, 19 bp, Mus musculus
  siRNA target sequence for Rnf141 (NM_025999.1,363-381).
gcatcgcggatcatgaatt

SEQ ID NO: 466364 - DNA, 19 bp, Mus musculus
  siRNA target sequence for Rnf141 (NM_025999.1,364-382).
catcgcggatcatgaattt

SEQ ID NO: 466365 - DNA, 19 bp, Mus musculus
  siRNA target sequence for Rnf141 (NM_025999.1,367-385).
cgcggatcatgaatttgta

SEQ ID NO: 466366 - DNA, 19 bp, Mus musculus
  siRNA target sequence for Rnf141 (NM_025999.1,389-407).
gtttattcagctctataaa

SEQ ID NO: 466367 - DNA, 19 bp, Mus musculus
  siRNA target sequence for Rnf141 (NM_025999.1,474-492).
ccatcctcggtcacatctt

SEQ ID NO: 466368 - DNA, 19 bp, Mus musculus
  siRNA target sequence for Rnf141 (NM_025999.1,534-552).
gatgaggaggagtgttgta

SEQ ID NO: 466369 - DNA, 19 bp, Mus musculus
  siRNA target sequence for Rnf141 (NM_025999.1,719-737).
catggctaactatattctt

SEQ ID NO: 466370 - DNA, 19 bp, Mus musculus
  siRNA target sequence for Rnf34 (NM_030564.1,108-126).
gaaggcgggtgctacttct

SEQ ID NO: 466371 - DNA, 19 bp, Mus musculus
  siRNA target sequence for Rnf34 (NM_030564.1,112-130).
gcgggtgctacttctatgt

SEQ ID NO: 466372 - DNA, 19 bp, Mus musculus
  siRNA target sequence for Rnf34 (NM_030564.1,143-161).
gtgggctgctgaatgaagt

SEQ ID NO: 466373 - DNA, 19 bp, Mus musculus
  siRNA target sequence for Rnf34 (NM_030564.1,146-164).
ggctgctgaatgaagtcat

SEQ ID NO: 466374 - DNA, 19 bp, Mus musculus
  siRNA target sequence for Rnf34 (NM_030564.1,266-284).
ctactgaaggacccaatat

SEQ ID NO: 466375 - DNA, 19 bp, Mus musculus
  siRNA target sequence for Rnf34 (NM_030564.1,275-293).
gacccaatatagtttgcaa

SEQ ID NO: 466376 - DNA, 19 bp, Mus musculus
  siRNA target sequence for Rnf34 (NM_030564.1,299-317).
gtgggctttcgttttcagt

SEQ ID NO: 466377 - DNA, 19 bp, Mus musculus
  siRNA target sequence for Rnf34 (NM_030564.1,341-359).
gtgactgcaagaaggattt

SEQ ID NO: 466378 - DNA, 19 bp, Mus musculus
  siRNA target sequence for Rnf34 (NM_030564.1,385-403).
gaaaacctccgcagatgtt

SEQ ID NO: 466379 - DNA, 19 bp, Mus musculus
  siRNA target sequence for Rnf34 (NM_030564.1,390-408).
cctccgcagatgttctact

SEQ ID NO: 466380 - DNA, 19 bp, Mus musculus
  siRNA target sequence for Rnf34 (NM_030564.1,391-409).
ctccgcagatgttctactt

SEQ ID NO: 466381 - DNA, 19 bp, Mus musculus
  siRNA target sequence for Rnf34 (NM_030564.1,393-411).
ccgcagatgttctacttgt

SEQ ID NO: 466382 - DNA, 19 bp, Mus musculus
  siRNA target sequence for Rnf34 (NM_030564.1,443-461).
ctcagttgatgcgactaaa

SEQ ID NO: 466383 - DNA, 19 bp, Mus musculus
  siRNA target sequence for Rnf34 (NM_030564.1,515-533).
gtcgtgagaaggaagactt

SEQ ID NO: 466384 - DNA, 19 bp, Mus musculus
  siRNA target sequence for Rnf34 (NM_030564.1,583-601).
gactcaagtagcctgaatt

SEQ ID NO: 466385 - DNA, 19 bp, Mus musculus
  siRNA target sequence for Rnf34 (NM_030564.1,608-626).
ggtcccagacttctagttt

SEQ ID NO: 466386 - DNA, 19 bp, Mus musculus
  siRNA target sequence for Rnf34 (NM_030564.1,738-756).
ggtacaaagtgaaatagct

SEQ ID NO: 466387 - DNA, 19 bp, Mus musculus
  siRNA target sequence for Rnf34 (NM_030564.1,739-757).
gtacaaagtgaaatagctt

SEQ ID NO: 466388 - DNA, 19 bp, Mus musculus
  siRNA target sequence for Rnf34 (NM_030564.1,1161-1179).
gtgtggcaagcgaatgagt

SEQ ID NO: 466389 - DNA, 19 bp, Mus musculus
  siRNA target sequence for Rnps1 (NM_009070.1,207-225).
gagcttgctaggagtcaaa

SEQ ID NO: 466390 - DNA, 19 bp, Mus musculus
  siRNA target sequence for Rnps1 (NM_009070.1,1091-1109).
cgataagcagggacattga

SEQ ID NO: 466391 - DNA, 19 bp, Mus musculus
  siRNA target sequence for Rnps1 (NM_009070.1,1097-1115).
gcagggacattgattcgta

SEQ ID NO: 466392 - DNA, 19 bp, Mus musculus
  siRNA target sequence for Rnps1 (NM_009070.1,1108-1126).
gattcgtacctctgtaact

SEQ ID NO: 466393 - DNA, 19 bp, Mus musculus
  siRNA target sequence for Rnps1 (NM_009070.1,1113-1131).
gtacctctgtaacttatgt

SEQ ID NO: 466394 - DNA, 19 bp, Mus musculus
  siRNA target sequence for Rnps1 (NM_009070.1,1200-1218).
ggtacagcagttgagatat

SEQ ID NO: 466395 - DNA, 19 bp, Mus musculus
  siRNA target sequence for Rnps1 (NM_009070.1,1239-1257).
ggcttgtagagctactgtt

SEQ ID NO: 466396 - DNA, 19 bp, Mus musculus
  siRNA target sequence for Rpo1-1 (NM_009085.1,136-154).
cgtggttctcggagagttt

SEQ ID NO: 466397 - DNA, 19 bp, Mus musculus
  siRNA target sequence for Rpo1-1 (NM_009085.1,177-195).
cggactttcccggtaacta

SEQ ID NO: 466398 - DNA, 19 bp, Mus musculus
  siRNA target sequence for Rpo1-1 (NM_009085.1,189-207).
gtaactacgccggttatga

SEQ ID NO: 466399 - DNA, 19 bp, Mus musculus
  siRNA target sequence for Rpo1-1 (NM_009085.1,193-211).
ctacgccggttatgatgat

SEQ ID NO: 466400 - DNA, 19 bp, Mus musculus
  siRNA target sequence for Rpo1-1 (NM_009085.1,250-268).
gggcgtggtgcaaatggat

SEQ ID NO: 466401 - DNA, 19 bp, Mus musculus
  siRNA target sequence for Rpo1-1 (NM_009085.1,326-344).
cggagaatcctgttagcta

SEQ ID NO: 466402 - DNA, 19 bp, Mus musculus
  siRNA target sequence for Rpo1-1 (NM_009085.1,445-463).
cgctgatcctcgtctcttt

SEQ ID NO: 466403 - DNA, 19 bp, Mus musculus
  siRNA target sequence for Rpo1-1 (NM_009085.1,447-465).
ctgatcctcgtctctttga

SEQ ID NO: 466404 - DNA, 19 bp, Mus musculus
  siRNA target sequence for Rpo1-1 (NM_009085.1,449-467).
gatcctcgtctctttgaat

SEQ ID NO: 466405 - DNA, 19 bp, Mus musculus
  siRNA target sequence for Rpo1-1 (NM_009085.1,572-590).
cccaatgaactctatgtca

SEQ ID NO: 466406 - DNA, 19 bp, Mus musculus
  siRNA target sequence for Rpo1-1 (NM_009085.1,573-591).
ccaatgaactctatgtcaa

SEQ ID NO: 466407 - DNA, 19 bp, Mus musculus
  siRNA target sequence for Rpo1-1 (NM_009085.1,599-617).
gtctacaccaggcatatga

SEQ ID NO: 466408 - DNA, 19 bp, Mus musculus
  siRNA target sequence for Rpo1-1 (NM_009085.1,621-639).
gggtccccttgggaaatca

SEQ ID NO: 466409 - DNA, 19 bp, Mus musculus
  siRNA target sequence for Rpo1-1 (NM_009085.1,633-651).
gaaatcaggctgatgtctt

SEQ ID NO: 466410 - DNA, 19 bp, Mus musculus
  siRNA target sequence for Rpo1-1 (NM_009085.1,713-731).
caggaaattgacttgatga

SEQ ID NO: 466411 - DNA, 19 bp, Mus musculus
  siRNA target sequence for Rpo1-1 (NM_009085.1,851-869).
gagctgagccagtgtttct

SEQ ID NO: 466412 - DNA, 19 bp, Mus musculus
  siRNA target sequence for Rpo1-1 (NM_009085.1,1004-1022).
cgggaccattatatctttt

SEQ ID NO: 466413 - DNA, 19 bp, Mus musculus
  siRNA target sequence for Rpo1-2 (NM_009086.1,232-250).
ggccatacctccctttgaa

SEQ ID NO: 466414 - DNA, 19 bp, Mus musculus
  siRNA target sequence for Rpo1-2 (NM_009086.1,233-251).
gccatacctccctttgaat

SEQ ID NO: 466415 - DNA, 19 bp, Mus musculus
  siRNA target sequence for Rpo1-2 (NM_009086.1,234-252).
ccatacctccctttgaatt

SEQ ID NO: 466416 - DNA, 19 bp, Mus musculus
  siRNA target sequence for Rpo1-2 (NM_009086.1,235-253).
catacctccctttgaattt

SEQ ID NO: 466417 - DNA, 19 bp, Mus musculus
  siRNA target sequence for Rpo1-2 (NM_009086.1,259-277).
caaagatgagcgcatatct

SEQ ID NO: 466418 - DNA, 19 bp, Mus musculus
  siRNA target sequence for Rpo1-2 (NM_009086.1,268-286).
gcgcatatctcttaccatt

SEQ ID NO: 466419 - DNA, 19 bp, Mus musculus
  siRNA target sequence for Rpo1-2 (NM_009086.1,327-345).
ccatctgcaaagatctcaa

SEQ ID NO: 466420 - DNA, 19 bp, Mus musculus
  siRNA target sequence for Rpo1-2 (NM_009086.1,333-351).
gcaaagatctcaacgttta

SEQ ID NO: 466421 - DNA, 19 bp, Mus musculus
  siRNA target sequence for Rpo1-2 (NM_009086.1,334-352).
caaagatctcaacgtttat

SEQ ID NO: 466422 - DNA, 19 bp, Mus musculus
  siRNA target sequence for Rpo1-2 (NM_009086.1,432-450).
ccaaagggatcattaaaca

SEQ ID NO: 466423 - DNA, 19 bp, Mus musculus
  siRNA target sequence for Rpo1-2 (NM_009086.1,481-499).
gtccaagctttgcaactta

SEQ ID NO: 466424 - DNA, 19 bp, Mus musculus
  siRNA target sequence for Rpo1-2 (NM_009086.1,510-528).
ctcctcgagtcctcattga

SEQ ID NO: 466425 - DNA, 19 bp, Mus musculus
  siRNA target sequence for Rpo1-2 (NM_009086.1,547-565).
ggaaatgggcggttatttt

SEQ ID NO: 466426 - DNA, 19 bp, Mus musculus
  siRNA target sequence for Rpo1-2 (NM_009086.1,548-566).
gaaatgggcggttatttta

SEQ ID NO: 466427 - DNA, 19 bp, Mus musculus
  siRNA target sequence for Rpo1-2 (NM_009086.1,554-572).
ggcggttattttataatca

SEQ ID NO: 466428 - DNA, 19 bp, Mus musculus
  siRNA target sequence for Rpo1-2 (NM_009086.1,634-652).
ggtaaggccgaaatggaaa

SEQ ID NO: 466429 - DNA, 19 bp, Mus musculus
  siRNA target sequence for Rpo1-2 (NM_009086.1,743-761).
gagaacggcacggttatgt

SEQ ID NO: 466430 - DNA, 19 bp, Mus musculus
  siRNA target sequence for Rpo1-2 (NM_009086.1,745-763).
gaacggcacggttatgtta

SEQ ID NO: 466431 - DNA, 19 bp, Mus musculus
  siRNA target sequence for Rpo1-2 (NM_009086.1,753-771).
cggttatgttaaactttat

SEQ ID NO: 466432 - DNA, 19 bp, Mus musculus
  siRNA target sequence for Rpo1-2 (NM_009086.1,834-852).
ctgattatcagattttcca

SEQ ID NO: 466433 - DNA, 19 bp, Mus musculus
  siRNA target sequence for Rpo1-2 (NM_009086.1,907-925).
gatgctgcggattgtcata

SEQ ID NO: 466434 - DNA, 19 bp, Mus musculus
  siRNA target sequence for Rpo1-2 (NM_009086.1,942-960).
cacagaagcaggttcttaa

SEQ ID NO: 466435 - DNA, 19 bp, Mus musculus
  siRNA target sequence for Rpo1-2 (NM_009086.1,1026-1044).
ccgagttcctgcttaacca

SEQ ID NO: 466436 - DNA, 19 bp, Mus musculus
  siRNA target sequence for Rpo1-2 (NM_009086.1,1230-1248).
ggctagtgtctattaaaat

SEQ ID NO: 466437 - DNA, 19 bp, Mus musculus
  siRNA target sequence for Rpo1-2 (NM_009086.1,1274-1292).
gccaatgtttccataaaca

SEQ ID NO: 466438 - DNA, 19 bp, Mus musculus
  siRNA target sequence for Rpo1-2 (NM_009086.1,1284-1302).
ccataaacaacgaaaattt

SEQ ID NO: 466439 - DNA, 19 bp, Mus musculus
  siRNA target sequence for Rpo1-2 (NM_009086.1,1366-1384).
gaatctgcgttctaaaaca

SEQ ID NO: 466440 - DNA, 19 bp, Mus musculus
  siRNA target sequence for Rpo1-2 (NM_009086.1,1601-1619).
gccgtgtgtgaggttgtta

SEQ ID NO: 466441 - DNA, 19 bp, Mus musculus
  siRNA target sequence for Rpo1-2 (NM_009086.1,1759-1777).
ggaccttgctcctgaagtt

SEQ ID NO: 466442 - DNA, 19 bp, Mus musculus
  siRNA target sequence for Rpo1-2 (NM_009086.1,1978-1996).
catgaacgtcgccatcttt

SEQ ID NO: 466443 - DNA, 19 bp, Mus musculus
  siRNA target sequence for Rpo1-2 (NM_009086.1,2058-2076).
gcgtgatcgccaacttcat

SEQ ID NO: 466444 - DNA, 19 bp, Mus musculus
  siRNA target sequence for Rpo1-2 (NM_009086.1,2145-2163).
gctttccgctgctcactta

SEQ ID NO: 466445 - DNA, 19 bp, Mus musculus
  siRNA target sequence for Rpo1-2 (NM_009086.1,2151-2169).
cgctgctcacttaccaaaa

SEQ ID NO: 466446 - DNA, 19 bp, Mus musculus
  siRNA target sequence for Rpo1-2 (NM_009086.1,2165-2183).
caaaaccgatcagataata

SEQ ID NO: 466447 - DNA, 19 bp, Mus musculus
  siRNA target sequence for Rpo1-2 (NM_009086.1,2171-2189).
cgatcagataataaactct

SEQ ID NO: 466448 - DNA, 19 bp, Mus musculus
  siRNA target sequence for Rpo1-2 (NM_009086.1,2172-2190).
gatcagataataaactcta

SEQ ID NO: 466449 - DNA, 19 bp, Mus musculus
  siRNA target sequence for Rpo1-2 (NM_009086.1,2221-2239).
gagaccgtgcatgtatgat

SEQ ID NO: 466450 - DNA, 19 bp, Mus musculus
  siRNA target sequence for Rpo1-2 (NM_009086.1,2223-2241).
gaccgtgcatgtatgattt

SEQ ID NO: 466451 - DNA, 19 bp, Mus musculus
  siRNA target sequence for Rpo1-2 (NM_009086.1,2225-2243).
ccgtgcatgtatgatttct

SEQ ID NO: 466452 - DNA, 19 bp, Mus musculus
  siRNA target sequence for Rpo1-2 (NM_009086.1,2226-2244).
cgtgcatgtatgatttcta

SEQ ID NO: 466453 - DNA, 19 bp, Mus musculus
  siRNA target sequence for Rpo1-2 (NM_009086.1,2229-2247).
gcatgtatgatttctatga

SEQ ID NO: 466454 - DNA, 19 bp, Mus musculus
  siRNA target sequence for Rpo1-2 (NM_009086.1,2242-2260).
ctatgacatggacaactat

SEQ ID NO: 466455 - DNA, 19 bp, Mus musculus
  siRNA target sequence for Rpo1-2 (NM_009086.1,2361-2379).
ctcatggaagcgtctacaa

SEQ ID NO: 466456 - DNA, 19 bp, Mus musculus
  siRNA target sequence for Rpo1-2 (NM_009086.1,2363-2381).
catggaagcgtctacaagt

SEQ ID NO: 466457 - DNA, 19 bp, Mus musculus
  siRNA target sequence for Rpo1-2 (NM_009086.1,2393-2411).
gacctctcagagaagttta

SEQ ID NO: 466458 - DNA, 19 bp, Mus musculus
  siRNA target sequence for Rpo1-2 (NM_009086.1,2556-2574).
gggaaggcttcgtggttta

SEQ ID NO: 466459 - DNA, 19 bp, Mus musculus
  siRNA target sequence for Rpo1-2 (NM_009086.1,2558-2576).
gaaggcttcgtggtttact

SEQ ID NO: 466460 - DNA, 19 bp, Mus musculus
  siRNA target sequence for Rpo1-2 (NM_009086.1,2561-2579).
ggcttcgtggtttactaca

SEQ ID NO: 466461 - DNA, 19 bp, Mus musculus
  siRNA target sequence for Rpo1-2 (NM_009086.1,2562-2580).
gcttcgtggtttactacaa

SEQ ID NO: 466462 - DNA, 19 bp, Mus musculus
  siRNA target sequence for Rpo1-2 (NM_009086.1,2567-2585).
gtggtttactacaagagta

SEQ ID NO: 466463 - DNA, 19 bp, Mus musculus
  siRNA target sequence for Rpo1-2 (NM_009086.1,2569-2587).
ggtttactacaagagtaaa

SEQ ID NO: 466464 - DNA, 19 bp, Mus musculus
  siRNA target sequence for Rpo1-2 (NM_009086.1,2637-2655).
gtgggaagttcaagtgtat

SEQ ID NO: 466465 - DNA, 19 bp, Mus musculus
  siRNA target sequence for Rpo1-2 (NM_009086.1,2639-2657).
gggaagttcaagtgtatct

SEQ ID NO: 466466 - DNA, 19 bp, Mus musculus
  siRNA target sequence for Rpo1-2 (NM_009086.1,2684-2702).
ccaaccattggagataagt

SEQ ID NO: 466467 - DNA, 19 bp, Mus musculus
  siRNA target sequence for Rpo1-2 (NM_009086.1,2685-2703).
caaccattggagataagtt

SEQ ID NO: 466468 - DNA, 19 bp, Mus musculus
  siRNA target sequence for Rpo1-2 (NM_009086.1,2778-2796).
gcatgatgccggacattct

SEQ ID NO: 466469 - DNA, 19 bp, Mus musculus
  siRNA target sequence for Rpo1-2 (NM_009086.1,2785-2803).
gccggacattctgtttaat

SEQ ID NO: 466470 - DNA, 19 bp, Mus musculus
  siRNA target sequence for Rpo1-2 (NM_009086.1,2820-2838).
cccgtatgaccataggtat

SEQ ID NO: 466471 - DNA, 19 bp, Mus musculus
  siRNA target sequence for Rpo1-2 (NM_009086.1,2823-2841).
gtatgaccataggtatgtt

SEQ ID NO: 466472 - DNA, 19 bp, Mus musculus
  siRNA target sequence for Rpo1-2 (NM_009086.1,2829-2847).
ccataggtatgttaatcga

SEQ ID NO: 466473 - DNA, 19 bp, Mus musculus
  siRNA target sequence for Rpo1-2 (NM_009086.1,2891-2909).
gatgctacacccttcatct

SEQ ID NO: 466474 - DNA, 19 bp, Mus musculus
  siRNA target sequence for Rpo1-2 (NM_009086.1,3031-3049).
cttcattggtgtggtttat

SEQ ID NO: 466475 - DNA, 19 bp, Mus musculus
  siRNA target sequence for Rpo1-2 (NM_009086.1,3127-3145).
gcccctcgggggacgaaat

SEQ ID NO: 466476 - DNA, 19 bp, Mus musculus
  siRNA target sequence for Rpo1-2 (NM_009086.1,3129-3147).
ccctcgggggacgaaatgt

SEQ ID NO: 466477 - DNA, 19 bp, Mus musculus
  siRNA target sequence for Rpo1-2 (NM_009086.1,3130-3148).
cctcgggggacgaaatgtt

SEQ ID NO: 466478 - DNA, 19 bp, Mus musculus
  siRNA target sequence for Rpo1-2 (NM_009086.1,3201-3219).
gtacgtctttccttcttca

SEQ ID NO: 466479 - DNA, 19 bp, Mus musculus
  siRNA target sequence for Rpo1-2 (NM_009086.1,3215-3233).
cttcatgaccggcttttca

SEQ ID NO: 466480 - DNA, 19 bp, Mus musculus
  siRNA target sequence for Rpo1-2 (NM_009086.1,3218-3236).
catgaccggcttttcaact

SEQ ID NO: 466481 - DNA, 19 bp, Mus musculus
  siRNA target sequence for Rpo1-2 (NM_009086.1,3269-3287).
gagtgtggcagtttgcttt

SEQ ID NO: 466482 - DNA, 19 bp, Mus musculus
  siRNA target sequence for Rpo1-2 (NM_009086.1,3321-3339).
ctgcgatgcgcaacagaaa

SEQ ID NO: 466483 - DNA, 19 bp, Mus musculus
  siRNA target sequence for Rpo1-2 (NM_009086.1,3323-3341).
gcgatgcgcaacagaaagt

SEQ ID NO: 466484 - DNA, 19 bp, Mus musculus
  siRNA target sequence for Rpo1-2 (NM_009086.1,3324-3342).
cgatgcgcaacagaaagta

SEQ ID NO: 466485 - DNA, 19 bp, Mus musculus
  siRNA target sequence for Rpo1-4 (NM_009088.2,541-559).
gatccttccgccttcgaaa

SEQ ID NO: 466486 - DNA, 19 bp, Mus musculus
  siRNA target sequence for Rpo1-4 (NM_009088.2,545-563).
cttccgccttcgaaattca

SEQ ID NO: 466487 - DNA, 19 bp, Mus musculus
  siRNA target sequence for Rpo1-4 (NM_009088.2,548-566).
ccgccttcgaaattcaaga

SEQ ID NO: 466488 - DNA, 19 bp, Mus musculus
  siRNA target sequence for Rpo1-4 (NM_009088.2,549-567).
cgccttcgaaattcaagaa

SEQ ID NO: 466489 - DNA, 19 bp, Mus musculus
  siRNA target sequence for Rpo1-4 (NM_009088.2,645-663).
cgagagcagaagcaaactt

SEQ ID NO: 466490 - DNA, 19 bp, Mus musculus
  siRNA target sequence for Rpo1-4 (NM_009088.2,722-740).
gacggtcggtggttcgaaa

SEQ ID NO: 466491 - DNA, 19 bp, Mus musculus
  siRNA target sequence for Rpo1-4 (NM_009088.2,733-751).
gttcgaaaggagcacaata

SEQ ID NO: 466492 - DNA, 19 bp, Mus musculus
  siRNA target sequence for Rpo1-4 (NM_009088.2,736-754).
cgaaaggagcacaatagta

SEQ ID NO: 466493 - DNA, 19 bp, Mus musculus
  siRNA target sequence for Rpo1-4 (NM_009088.2,737-755).
gaaaggagcacaatagtaa

SEQ ID NO: 466494 - DNA, 19 bp, Mus musculus
  siRNA target sequence for Rpo1-4 (NM_009088.2,741-759).
ggagcacaatagtaaacta

SEQ ID NO: 466495 - DNA, 19 bp, Mus musculus
  siRNA target sequence for Rpo1-4 (NM_009088.2,742-760).
gagcacaatagtaaactaa

SEQ ID NO: 466496 - DNA, 19 bp, Mus musculus
  siRNA target sequence for Rpo1-4 (NM_009088.2,773-791).
cagccacggtgcacaagaa

SEQ ID NO: 466497 - DNA, 19 bp, Mus musculus
  siRNA target sequence for Rpo1-4 (NM_009088.2,777-795).
cacggtgcacaagaaatca

SEQ ID NO: 466498 - DNA, 19 bp, Mus musculus
  siRNA target sequence for Rpo1-4 (NM_009088.2,779-797).
cggtgcacaagaaatcaga

SEQ ID NO: 466499 - DNA, 19 bp, Mus musculus
  siRNA target sequence for Rpo1-4 (NM_009088.2,832-850).
gaagctccaggaattgaca

SEQ ID NO: 466500 - DNA, 19 bp, Mus musculus
  siRNA target sequence for Rpo1-4 (NM_009088.2,884-902).
caagcagcgcccaagaaca

SEQ ID NO: 466501 - DNA, 19 bp, Mus musculus
  siRNA target sequence for Rpo1-4 (NM_009088.2,890-908).
gcgcccaagaacacctttt

SEQ ID NO: 466502 - DNA, 19 bp, Mus musculus
  siRNA target sequence for Rpo1-4 (NM_009088.2,901-919).
caccttttcgccatttgga

SEQ ID NO: 466503 - DNA, 19 bp, Mus musculus
  siRNA target sequence for Rpo1-4 (NM_009088.2,925-943).
gaaggattctttctgaatt

SEQ ID NO: 466504 - DNA, 19 bp, Mus musculus
  siRNA target sequence for Rpo1-4 (NM_009088.2,983-1001).
gtttcaaccccagtatgtt

SEQ ID NO: 466505 - DNA, 19 bp, Mus musculus
  siRNA target sequence for Rpo1-4 (NM_009088.2,990-1008).
ccccagtatgttctttcta

SEQ ID NO: 466506 - DNA, 19 bp, Mus musculus
  siRNA target sequence for Rpo1-4 (NM_009088.2,999-1017).
gttctttctagacttcata

SEQ ID NO: 466507 - DNA, 19 bp, Mus musculus
  siRNA target sequence for Rpo1-4 (NM_009088.2,1057-1075).
ggtgaccagatgttcacta

SEQ ID NO: 466508 - DNA, 19 bp, Mus musculus
  siRNA target sequence for Rpo1-4 (NM_009088.2,1058-1076).
gtgaccagatgttcactaa

SEQ ID NO: 466509 - DNA, 19 bp, Mus musculus
  siRNA target sequence for Rpo1-4 (NM_009088.2,1178-1196).
cagaactcaccatagacaa

SEQ ID NO: 466510 - DNA, 19 bp, Mus musculus
  siRNA target sequence for Rpo1-4 (NM_009088.2,1250-1268).
gcccgtctctcacagataa

SEQ ID NO: 466511 - DNA, 19 bp, Mus musculus
  siRNA target sequence for Rpo1-4 (NM_009088.2,1251-1269).
cccgtctctcacagataaa

SEQ ID NO: 466512 - DNA, 19 bp, Mus musculus
  siRNA target sequence for Rpo1-4 (NM_009088.2,1253-1271).
cgtctctcacagataaact

SEQ ID NO: 466513 - DNA, 19 bp, Mus musculus
  siRNA target sequence for Rpo1-4 (NM_009088.2,1254-1272).
gtctctcacagataaactt

SEQ ID NO: 466514 - DNA, 19 bp, Mus musculus
  siRNA target sequence for Rpo1-4 (NM_009088.2,1256-1274).
ctctcacagataaacttta

SEQ ID NO: 466515 - DNA, 19 bp, Mus musculus
  siRNA target sequence for Rpo1-4 (NM_009088.2,1298-1316).
gccacgtcaatattgtgtt

SEQ ID NO: 466516 - DNA, 19 bp, Mus musculus
  siRNA target sequence for Rpo1-4 (NM_009088.2,1299-1317).
ccacgtcaatattgtgttt

SEQ ID NO: 466517 - DNA, 19 bp, Mus musculus
  siRNA target sequence for Rpo1-4 (NM_009088.2,1450-1468).
ccagacatgtacatcaaca

SEQ ID NO: 466518 - DNA, 19 bp, Mus musculus
  siRNA target sequence for Rpo1-4 (NM_009088.2,1551-1569).
gagacaggcagtcatcaat

SEQ ID NO: 466519 - DNA, 19 bp, Mus musculus
  siRNA target sequence for Rpo1-4 (NM_009088.2,1589-1607).
gagcctccatggtcatcaa

SEQ ID NO: 466520 - DNA, 19 bp, Mus musculus
  siRNA target sequence for Rpo1-4 (NM_009088.2,1706-1724).
ctcaggggacaaaagttgt

SEQ ID NO: 466521 - DNA, 19 bp, Mus musculus
  siRNA target sequence for Rpo1-4 (NM_009088.2,1723-1741).
gtgtgccggcatgtgaaaa

SEQ ID NO: 466522 - DNA, 19 bp, Mus musculus
  siRNA target sequence for Rpo1-4 (NM_009088.2,1725-1743).
gtgccggcatgtgaaaaat

SEQ ID NO: 466523 - DNA, 19 bp, Mus musculus
  siRNA target sequence for Rpo1-4 (NM_009088.2,1860-1878).
ggcctacaatgctgacttt

SEQ ID NO: 466524 - DNA, 19 bp, Mus musculus
  siRNA target sequence for Rpo1-4 (NM_009088.2,1950-1968).
cactgatcagcagtatctt

SEQ ID NO: 466525 - DNA, 19 bp, Mus musculus
  siRNA target sequence for Rpo1-4 (NM_009088.2,1994-2012).
caggactgatccaagatca

SEQ ID NO: 466526 - DNA, 19 bp, Mus musculus
  siRNA target sequence for Rpo1-4 (NM_009088.2,2017-2035).
gtttcaggtgcaaacatga

SEQ ID NO: 466527 - DNA, 19 bp, Mus musculus
  siRNA target sequence for Rpo1-4 (NM_009088.2,2034-2052).
gaccattcggggatgcttt

SEQ ID NO: 466528 - DNA, 19 bp, Mus musculus
  siRNA target sequence for Rpo1-4 (NM_009088.2,2085-2103).
ccgagggctcacagacaaa

SEQ ID NO: 466529 - DNA, 19 bp, Mus musculus
  siRNA target sequence for Rpo1-4 (NM_009088.2,2173-2191).
gtgtcgaccctcctcataa

SEQ ID NO: 466530 - DNA, 19 bp, Mus musculus
  siRNA target sequence for Rpo1-4 (NM_009088.2,2177-2195).
cgaccctcctcataaacat

SEQ ID NO: 466531 - DNA, 19 bp, Mus musculus
  siRNA target sequence for Rpo1-4 (NM_009088.2,2178-2196).
gaccctcctcataaacata

SEQ ID NO: 466532 - DNA, 19 bp, Mus musculus
  siRNA target sequence for Rpo1-4 (NM_009088.2,2180-2198).
ccctcctcataaacataat

SEQ ID NO: 466533 - DNA, 19 bp, Mus musculus
  siRNA target sequence for Rpo1-4 (NM_009088.2,2181-2199).
cctcctcataaacataatt

SEQ ID NO: 466534 - DNA, 19 bp, Mus musculus
  siRNA target sequence for Rpo1-4 (NM_009088.2,2309-2327).
gtgagtcccaggtgatcat

SEQ ID NO: 466535 - DNA, 19 bp, Mus musculus
  siRNA target sequence for Rpo1-4 (NM_009088.2,2355-2373).
gctggacaaggcacactat

SEQ ID NO: 466536 - DNA, 19 bp, Mus musculus
  siRNA target sequence for Rpo1-4 (NM_009088.2,2400-2418).
ctgctgctatgagatctat

SEQ ID NO: 466537 - DNA, 19 bp, Mus musculus
  siRNA target sequence for Rpo1-4 (NM_009088.2,2470-2488).
gcctacctccagctctata

SEQ ID NO: 466538 - DNA, 19 bp, Mus musculus
  siRNA target sequence for Rpo1-4 (NM_009088.2,2472-2490).
ctacctccagctctataga

SEQ ID NO: 466539 - DNA, 19 bp, Mus musculus
  siRNA target sequence for Rpo1-4 (NM_009088.2,2610-2628).
gccagaaactgcatcatgt

SEQ ID NO: 466540 - DNA, 19 bp, Mus musculus
  siRNA target sequence for Rpo1-4 (NM_009088.2,2676-2694).
gagggattttaacatgatt

SEQ ID NO: 466541 - DNA, 19 bp, Mus musculus
  siRNA target sequence for Rpo1-4 (NM_009088.2,2722-2740).
cattacagcaatgagatta

SEQ ID NO: 466542 - DNA, 19 bp, Mus musculus
  siRNA target sequence for Rpo1-4 (NM_009088.2,2771-2789).
gacagttccccgaaaacaa

SEQ ID NO: 466543 - DNA, 19 bp, Mus musculus
  siRNA target sequence for Rpo1-4 (NM_009088.2,2828-2846).
ccgtgaacacgatgcaaat

SEQ ID NO: 466544 - DNA, 19 bp, Mus musculus
  siRNA target sequence for Rpo1-4 (NM_009088.2,2853-2871).
cctgctgggccaaattgaa

SEQ ID NO: 466545 - DNA, 19 bp, Mus musculus
  siRNA target sequence for Rpo1-4 (NM_009088.2,2859-2877).
gggccaaattgaattggaa

SEQ ID NO: 466546 - DNA, 19 bp, Mus musculus
  siRNA target sequence for Rpo1-4 (NM_009088.2,2958-2976).
ctttgtcactggaaggttt

SEQ ID NO: 466547 - DNA, 19 bp, Mus musculus
  siRNA target sequence for Rpo1-4 (NM_009088.2,3456-3474).
cgagacccagcagatgtta

SEQ ID NO: 466548 - DNA, 19 bp, Mus musculus
  siRNA target sequence for Rpo1-4 (NM_009088.2,3565-3583).
ccagacatctactttgcat

SEQ ID NO: 466549 - DNA, 19 bp, Mus musculus
  siRNA target sequence for Rpo1-4 (NM_009088.2,3678-3696).
cgacaggctgagaacctta

SEQ ID NO: 466550 - DNA, 19 bp, Mus musculus
  siRNA target sequence for Rpo1-4 (NM_009088.2,3832-3850).
gtcaccctgggcattccaa

SEQ ID NO: 466551 - DNA, 19 bp, Mus musculus
  siRNA target sequence for Rpo1-4 (NM_009088.2,3836-3854).
ccctgggcattccaagatt

SEQ ID NO: 466552 - DNA, 19 bp, Mus musculus
  siRNA target sequence for Rpo1-4 (NM_009088.2,3851-3869).
gattgagggagattctcat

SEQ ID NO: 466553 - DNA, 19 bp, Mus musculus
  siRNA target sequence for Rpo1-4 (NM_009088.2,4028-4046).
gagaaaaacggaataagtt

SEQ ID NO: 466554 - DNA, 19 bp, Mus musculus
  siRNA target sequence for Rpo1-4 (NM_009088.2,4159-4177).
ctaatggaagctatcaaaa

SEQ ID NO: 466555 - DNA, 19 bp, Mus musculus
  siRNA target sequence for Rpo1-4 (NM_009088.2,4560-4578).
gggagctgaggccataaaa

SEQ ID NO: 466556 - DNA, 19 bp, Mus musculus
  siRNA target sequence for Rpo1-4 (NM_009088.2,4618-4636).
gaggactaccagtatgaca

SEQ ID NO: 466557 - DNA, 19 bp, Mus musculus
  siRNA target sequence for Rpo1-4 (NM_009088.2,4671-4689).
gctcccactgatgaagatt

SEQ ID NO: 466558 - DNA, 19 bp, Mus musculus
  siRNA target sequence for Rpo1-4 (NM_009088.2,4777-4795).
gaaacgaccaacagtaaga

SEQ ID NO: 466559 - DNA, 19 bp, Mus musculus
  siRNA target sequence for Rpo1-4 (NM_009088.2,4784-4802).
ccaacagtaagaatgagaa

SEQ ID NO: 466560 - DNA, 19 bp, Mus musculus
  siRNA target sequence for Rpo1-4 (NM_009088.2,4876-4894).
cgcctctactccaatgaca

SEQ ID NO: 466561 - DNA, 19 bp, Mus musculus
  siRNA target sequence for Rpo1-4 (NM_009088.2,4899-4917).
cgccatggccaatacttat

SEQ ID NO: 466562 - DNA, 19 bp, Mus musculus
  siRNA target sequence for Rpo1-4 (NM_009088.2,4928-4946).
ctgcgttgcgggtgataga

SEQ ID NO: 466563 - DNA, 19 bp, Mus musculus
  siRNA target sequence for Rpo1-4 (NM_009088.2,4931-4949).
cgttgcgggtgatagagaa

SEQ ID NO: 466564 - DNA, 19 bp, Mus musculus
  siRNA target sequence for Rpo1-4 (NM_009088.2,4941-4959).
gatagagaaggagattaaa

SEQ ID NO: 466565 - DNA, 19 bp, Mus musculus
  siRNA target sequence for Rpo1-4 (NM_009088.2,4974-4992).
gtatggcattgcagttgat

SEQ ID NO: 466566 - DNA, 19 bp, Mus musculus
  siRNA target sequence for Rpo1-4 (NM_009088.2,5008-5026).
ctggtggctgattacatgt

SEQ ID NO: 466567 - DNA, 19 bp, Mus musculus
  siRNA target sequence for Rpo1-4 (NM_009088.2,5037-5055).
ggtttataagccactcaat

SEQ ID NO: 466568 - DNA, 19 bp, Mus musculus
  siRNA target sequence for Rpo1-4 (NM_009088.2,5083-5101).
cctttgcagcagatgacat

SEQ ID NO: 466569 - DNA, 19 bp, Mus musculus
  siRNA target sequence for Rpo2tc1 (NM_011294.2,114-132).
gcgaagttgaaaaaaagtt

SEQ ID NO: 466570 - DNA, 19 bp, Mus musculus
  siRNA target sequence for Rpo2tc1 (NM_011294.2,274-292).
cagtgttcgggacttcaaa

SEQ ID NO: 466571 - DNA, 19 bp, Mus musculus
  siRNA target sequence for Rpo2tc1 (NM_011294.2,278-296).
gttcgggacttcaaaggaa

SEQ ID NO: 466572 - DNA, 19 bp, Mus musculus
  siRNA target sequence for Rpo2tc1 (NM_011294.2,302-320).
ctaattgatattagagaat

SEQ ID NO: 466573 - DNA, 19 bp, Mus musculus
  siRNA target sequence for Rtn1 (NM_153457.4,342-360).
cctcccgtcgccatggaaa

SEQ ID NO: 466574 - DNA, 19 bp, Mus musculus
  siRNA target sequence for Rtn1 (NM_153457.4,429-447).
ggggaaggggcatgttaca

SEQ ID NO: 466575 - DNA, 19 bp, Mus musculus
  siRNA target sequence for Rtn1 (NM_153457.4,609-627).
ggcttattgagttctgatt

SEQ ID NO: 466576 - DNA, 19 bp, Mus musculus
  siRNA target sequence for Rtn1 (NM_153457.4,617-635).
gagttctgattctggaata

SEQ ID NO: 466577 - DNA, 19 bp, Mus musculus
  siRNA target sequence for Rtn1 (NM_153457.4,622-640).
ctgattctggaatagagat

SEQ ID NO: 466578 - DNA, 19 bp, Mus musculus
  siRNA target sequence for Rtn1 (NM_153457.4,698-716).
gaaggcagaagcctacaaa

SEQ ID NO: 466579 - DNA, 19 bp, Mus musculus
  siRNA target sequence for Rtn1 (NM_153457.4,708-726).
gcctacaaatacattgaca

SEQ ID NO: 466580 - DNA, 19 bp, Mus musculus
  siRNA target sequence for Rtn1 (NM_153457.4,765-783).
caccctgggctagaagata

SEQ ID NO: 466581 - DNA, 19 bp, Mus musculus
  siRNA target sequence for Rtn1 (NM_153457.4,771-789).
gggctagaagataaagact

SEQ ID NO: 466582 - DNA, 19 bp, Mus musculus
  siRNA target sequence for Rtn1 (NM_153457.4,881-899).
caaggaccacttattcgaa

SEQ ID NO: 466583 - DNA, 19 bp, Mus musculus
  siRNA target sequence for Rtn1 (NM_153457.4,885-903).
gaccacttattcgaagaat

SEQ ID NO: 466584 - DNA, 19 bp, Mus musculus
  siRNA target sequence for Rtn1 (NM_153457.4,887-905).
ccacttattcgaagaatct

SEQ ID NO: 466585 - DNA, 19 bp, Mus musculus
  siRNA target sequence for Rtn1 (NM_153457.4,888-906).
cacttattcgaagaatcta

SEQ ID NO: 466586 - DNA, 19 bp, Mus musculus
  siRNA target sequence for Rtn1 (NM_153457.4,904-922).
ctacctttgctccttacat

SEQ ID NO: 466587 - DNA, 19 bp, Mus musculus
  siRNA target sequence for Rtn1 (NM_153457.4,908-926).
ctttgctccttacatagat

SEQ ID NO: 466588 - DNA, 19 bp, Mus musculus
  siRNA target sequence for Rtn1 (NM_153457.4,995-1013).
cgaacctcctcttatgact

SEQ ID NO: 466589 - DNA, 19 bp, Mus musculus
  siRNA target sequence for Rtn1 (NM_153457.4,1012-1030).
ctgccacacaagagacaat

SEQ ID NO: 466590 - DNA, 19 bp, Mus musculus
  siRNA target sequence for Rtn1 (NM_153457.4,1184-1202).
ctccgaggatgagttgatt

SEQ ID NO: 466591 - DNA, 19 bp, Mus musculus
  siRNA target sequence for Rtn1 (NM_153457.4,1196-1214).
gttgattgctgccattaaa

SEQ ID NO: 466592 - DNA, 19 bp, Mus musculus
  siRNA target sequence for Rtn1 (NM_153457.4,1219-1237).
caaaggggttatcatatga

SEQ ID NO: 466593 - DNA, 19 bp, Mus musculus
  siRNA target sequence for Rtn1 (NM_153457.4,1352-1370).
gtccggagactcagaaatt

SEQ ID NO: 466594 - DNA, 19 bp, Mus musculus
  siRNA target sequence for Rtn1 (NM_153457.4,1354-1372).
ccggagactcagaaattga

SEQ ID NO: 466595 - DNA, 19 bp, Mus musculus
  siRNA target sequence for Rtn1 (NM_153457.4,1835-1853).
cacggccaccgaaattcct

SEQ ID NO: 466596 - DNA, 19 bp, Mus musculus
  siRNA target sequence for Rtn1 (NM_153457.4,1895-1913).
caacaagcaaaaagctatt

SEQ ID NO: 466597 - DNA, 19 bp, Mus musculus
  siRNA target sequence for Rtn1 (NM_153457.4,2063-2081).
ctacaagtccgttctacaa

SEQ ID NO: 466598 - DNA, 19 bp, Mus musculus
  siRNA target sequence for Rtn1 (NM_153457.4,2238-2256).
ctggtggattccttaaaat

SEQ ID NO: 466599 - DNA, 19 bp, Mus musculus
  siRNA target sequence for Rtn1 (NM_153457.4,2243-2261).
ggattccttaaaatttgca

SEQ ID NO: 466600 - DNA, 19 bp, Mus musculus
  siRNA target sequence for Rtn1 (NM_153457.4,2324-2342).
ggctgtggtttcgatgttt

SEQ ID NO: 466601 - DNA, 19 bp, Mus musculus
  siRNA target sequence for Rtn1 (NM_153457.4,2325-2343).
gctgtggtttcgatgttta

SEQ ID NO: 466602 - DNA, 19 bp, Mus musculus
  siRNA target sequence for Rtn1 (NM_153457.4,2330-2348).
ggtttcgatgtttactcta

SEQ ID NO: 466603 - DNA, 19 bp, Mus musculus
  siRNA target sequence for Rtn1 (NM_153457.4,2346-2364).
ctacctgttgtgtacgtta

SEQ ID NO: 466604 - DNA, 19 bp, Mus musculus
  siRNA target sequence for Rtn1 (NM_153457.4,2350-2368).
ctgttgtgtacgttaagca

SEQ ID NO: 466605 - DNA, 19 bp, Mus musculus
  siRNA target sequence for Rtn1 (NM_153457.4,2397-2415).
cttgtgaggactcacataa

SEQ ID NO: 466606 - DNA, 19 bp, Mus musculus
  siRNA target sequence for Rtn1 (NM_153457.4,2400-2418).
gtgaggactcacataaaca

SEQ ID NO: 466607 - DNA, 19 bp, Mus musculus
  siRNA target sequence for Rtn1 (NM_153457.4,2427-2445).
gcaaagatccaggctaaaa

SEQ ID NO: 466608 - DNA, 19 bp, Mus musculus
  siRNA target sequence for Runx1 (NM_009821.1,1892-1910).
gcaggcaacgatgaaaact

SEQ ID NO: 466609 - DNA, 19 bp, Mus musculus
  siRNA target sequence for Runx1 (NM_009821.1,1912-1930).
ctcggcagaactgagaaat

SEQ ID NO: 466610 - DNA, 19 bp, Mus musculus
  siRNA target sequence for Runx1 (NM_009821.1,2056-2074).
ctaccatagagccatcaaa

SEQ ID NO: 466611 - DNA, 19 bp, Mus musculus
  siRNA target sequence for Runx1 (NM_009821.1,2191-2209).
cccagcgacacccatttca

SEQ ID NO: 466612 - DNA, 19 bp, Mus musculus
  siRNA target sequence for Runx1 (NM_009821.1,2496-2514).
cgccctcctaccatctata

SEQ ID NO: 466613 - DNA, 19 bp, Mus musculus
  siRNA target sequence for Runx1 (NM_009821.1,2498-2516).
ccctcctaccatctatact

SEQ ID NO: 466614 - DNA, 19 bp, Mus musculus
  siRNA target sequence for Runx1 (NM_009821.1,2499-2517).
cctcctaccatctatacta

SEQ ID NO: 466615 - DNA, 19 bp, Mus musculus
  siRNA target sequence for Runx2 (NM_009820.1,3-21).
gcttcattcgcctcacaaa

SEQ ID NO: 466616 - DNA, 19 bp, Mus musculus
  siRNA target sequence for Runx2 (NM_009820.1,72-90).
gaaggctctggcgtttaaa

SEQ ID NO: 466617 - DNA, 19 bp, Mus musculus
  siRNA target sequence for Runx2 (NM_009820.1,76-94).
gctctggcgtttaaatggt

SEQ ID NO: 466618 - DNA, 19 bp, Mus musculus
  siRNA target sequence for Runx2 (NM_009820.1,82-100).
gcgtttaaatggttaatct

SEQ ID NO: 466619 - DNA, 19 bp, Mus musculus
  siRNA target sequence for Runx2 (NM_009820.1,122-140).
cgagaccaaccgagtcatt

SEQ ID NO: 466620 - DNA, 19 bp, Mus musculus
  siRNA target sequence for Runx2 (NM_009820.1,123-141).
gagaccaaccgagtcattt

SEQ ID NO: 466621 - DNA, 19 bp, Mus musculus
  siRNA target sequence for Runx2 (NM_009820.1,199-217).
gggactatggcgtcaaaca

SEQ ID NO: 466622 - DNA, 19 bp, Mus musculus
  siRNA target sequence for Runx2 (NM_009820.1,524-542).
gcaccatggtggagatcat

SEQ ID NO: 466623 - DNA, 19 bp, Mus musculus
  siRNA target sequence for Runx2 (NM_009820.1,731-749).
gaaatgcctccgctgttat

SEQ ID NO: 466624 - DNA, 19 bp, Mus musculus
  siRNA target sequence for Runx2 (NM_009820.1,736-754).
gcctccgctgttatgaaaa

SEQ ID NO: 466625 - DNA, 19 bp, Mus musculus
  siRNA target sequence for Runx2 (NM_009820.1,737-755).
cctccgctgttatgaaaaa

SEQ ID NO: 466626 - DNA, 19 bp, Mus musculus
  siRNA target sequence for Runx2 (NM_009820.1,767-785).
ggttcaacgatctgagatt

SEQ ID NO: 466627 - DNA, 19 bp, Mus musculus
  siRNA target sequence for Runx2 (NM_009820.1,768-786).
gttcaacgatctgagattt

SEQ ID NO: 466628 - DNA, 19 bp, Mus musculus
  siRNA target sequence for Runx2 (NM_009820.1,921-939).
gaagcttgatgactctaaa

SEQ ID NO: 466629 - DNA, 19 bp, Mus musculus
  siRNA target sequence for Runx2 (NM_009820.1,924-942).
gcttgatgactctaaacct

SEQ ID NO: 466630 - DNA, 19 bp, Mus musculus
  siRNA target sequence for Runx2 (NM_009820.1,931-949).
gactctaaacctagtttgt

SEQ ID NO: 466631 - DNA, 19 bp, Mus musculus
  siRNA target sequence for Runx2 (NM_009820.1,953-971).
ctgatcgcctcagtgattt

SEQ ID NO: 466632 - DNA, 19 bp, Mus musculus
  siRNA target sequence for Runx2 (NM_009820.1,1067-1085).
gacagagtcagattacaga

SEQ ID NO: 466633 - DNA, 19 bp, Mus musculus
  siRNA target sequence for Runx2 (NM_009820.1,1225-1243).
gacgtgcccaggcgtattt

SEQ ID NO: 466634 - DNA, 19 bp, Mus musculus
  siRNA target sequence for Runx2 (NM_009820.1,1227-1245).
cgtgcccaggcgtatttca

SEQ ID NO: 466635 - DNA, 19 bp, Mus musculus
  siRNA target sequence for Runx2 (NM_009820.1,1233-1251).
caggcgtatttcagatgat

SEQ ID NO: 466636 - DNA, 19 bp, Mus musculus
  siRNA target sequence for Runx2 (NM_009820.1,1344-1362).
caggcagttcccaagcatt

SEQ ID NO: 466637 - DNA, 19 bp, Mus musculus
  siRNA target sequence for Runx2 (NM_009820.1,1347-1365).
gcagttcccaagcatttca

SEQ ID NO: 466638 - DNA, 19 bp, Mus musculus
  siRNA target sequence for Runx2 (NM_009820.1,1547-1565).
gcactccatatctctacta

SEQ ID NO: 466639 - DNA, 19 bp, Mus musculus
  siRNA target sequence for Runx2 (NM_009820.1,1548-1566).
cactccatatctctactat

SEQ ID NO: 466640 - DNA, 19 bp, Mus musculus
  siRNA target sequence for Runx2 (NM_009820.1,1552-1570).
ccatatctctactatggta

SEQ ID NO: 466641 - DNA, 19 bp, Mus musculus
  siRNA target sequence for Runx2 (NM_009820.1,1574-1592).
cgtcagcatcctatcagtt

SEQ ID NO: 466642 - DNA, 19 bp, Mus musculus
  siRNA target sequence for Runx2 (NM_009820.1,1584-1602).
ctatcagttcccaatggta

SEQ ID NO: 466643 - DNA, 19 bp, Mus musculus
  siRNA target sequence for Runx2 (NM_009820.1,1656-1674).
gaatggcagcacgctatta

SEQ ID NO: 466644 - DNA, 19 bp, Mus musculus
  siRNA target sequence for Runx2 (NM_009820.1,1662-1680).
cagcacgctattaaatcca

SEQ ID NO: 466645 - DNA, 19 bp, Mus musculus
  siRNA target sequence for Runx2 (NM_009820.1,1664-1682).
gcacgctattaaatccaaa

SEQ ID NO: 466646 - DNA, 19 bp, Mus musculus
  siRNA target sequence for Runx2 (NM_009820.1,1667-1685).
cgctattaaatccaaattt

SEQ ID NO: 466647 - DNA, 19 bp, Mus musculus
  siRNA target sequence for Runx2 (NM_009820.1,1727-1745).
gcagttccccaactgtttt

SEQ ID NO: 466648 - DNA, 19 bp, Mus musculus
  siRNA target sequence for Sall1 (NM_021390.1,16-34).
caagcgaagcctcaacatt

SEQ ID NO: 466649 - DNA, 19 bp, Mus musculus
  siRNA target sequence for Sall1 (NM_021390.1,21-39).
gaagcctcaacatttccaa

SEQ ID NO: 466650 - DNA, 19 bp, Mus musculus
  siRNA target sequence for Sall1 (NM_021390.1,137-155).
gccggtgctgcgctgaatt

SEQ ID NO: 466651 - DNA, 19 bp, Mus musculus
  siRNA target sequence for Sall1 (NM_021390.1,143-161).
gctgcgctgaattctttga

SEQ ID NO: 466652 - DNA, 19 bp, Mus musculus
  siRNA target sequence for Sall1 (NM_021390.1,144-162).
ctgcgctgaattctttgaa

SEQ ID NO: 466653 - DNA, 19 bp, Mus musculus
  siRNA target sequence for Sall1 (NM_021390.1,146-164).
gcgctgaattctttgaatt

SEQ ID NO: 466654 - DNA, 19 bp, Mus musculus
  siRNA target sequence for Sall1 (NM_021390.1,147-165).
cgctgaattctttgaatta

SEQ ID NO: 466655 - DNA, 19 bp, Mus musculus
  siRNA target sequence for Sall1 (NM_021390.1,172-190).
cttctgctccataaaaaga

SEQ ID NO: 466656 - DNA, 19 bp, Mus musculus
  siRNA target sequence for Sall1 (NM_021390.1,327-345).
ctgcagcgacctttcagaa

SEQ ID NO: 466657 - DNA, 19 bp, Mus musculus
  siRNA target sequence for Sall1 (NM_021390.1,502-520).
ggtacctcagcgatcacaa

SEQ ID NO: 466658 - DNA, 19 bp, Mus musculus
  siRNA target sequence for Sall1 (NM_021390.1,557-575).
gcaacttctcggtgatcaa

SEQ ID NO: 466659 - DNA, 19 bp, Mus musculus
  siRNA target sequence for Sall1 (NM_021390.1,664-682).
ggcaagctgctcatctcaa

SEQ ID NO: 466660 - DNA, 19 bp, Mus musculus
  siRNA target sequence for Sall1 (NM_021390.1,732-750).
gcagctcatagagcaaata

SEQ ID NO: 466661 - DNA, 19 bp, Mus musculus
  siRNA target sequence for Sall1 (NM_021390.1,735-753).
gctcatagagcaaatacgt

SEQ ID NO: 466662 - DNA, 19 bp, Mus musculus
  siRNA target sequence for Sall1 (NM_021390.1,810-828).
cccgtctcaaggtacttta

SEQ ID NO: 466663 - DNA, 19 bp, Mus musculus
  siRNA target sequence for Sall1 (NM_021390.1,813-831).
gtctcaaggtactttacga

SEQ ID NO: 466664 - DNA, 19 bp, Mus musculus
  siRNA target sequence for Sall1 (NM_021390.1,882-900).
ggcggtggcagctggatta

SEQ ID NO: 466665 - DNA, 19 bp, Mus musculus
  siRNA target sequence for Sall1 (NM_021390.1,1018-1036).
cccaacatgagcatagtga

SEQ ID NO: 466666 - DNA, 19 bp, Mus musculus
  siRNA target sequence for Sall1 (NM_021390.1,1129-1147).
ccagcattcgcaataagca

SEQ ID NO: 466667 - DNA, 19 bp, Mus musculus
  siRNA target sequence for Sall1 (NM_021390.1,1190-1208).
ccccagctaacgctgtttt

SEQ ID NO: 466668 - DNA, 19 bp, Mus musculus
  siRNA target sequence for Sall1 (NM_021390.1,1235-1253).
caaccgcagaagatttgaa

SEQ ID NO: 466669 - DNA, 19 bp, Mus musculus
  siRNA target sequence for Sall1 (NM_021390.1,1308-1326).
ctttgaagcgaaaagtact

SEQ ID NO: 466670 - DNA, 19 bp, Mus musculus
  siRNA target sequence for Sall1 (NM_021390.1,1328-1346).
cagacgaggcgttctttaa

SEQ ID NO: 466671 - DNA, 19 bp, Mus musculus
  siRNA target sequence for Sall1 (NM_021390.1,1463-1481).
ctactaagggcaatctgaa

SEQ ID NO: 466672 - DNA, 19 bp, Mus musculus
  siRNA target sequence for Sall1 (NM_021390.1,1661-1679).
cttccgtcggcctaccatt

SEQ ID NO: 466673 - DNA, 19 bp, Mus musculus
  siRNA target sequence for Sall1 (NM_021390.1,1697-1715).
gcctcacgcccttcatcaa

SEQ ID NO: 466674 - DNA, 19 bp, Mus musculus
  siRNA target sequence for Sall1 (NM_021390.1,1762-1780).
ccccaaggctcagtcaaaa

SEQ ID NO: 466675 - DNA, 19 bp, Mus musculus
  siRNA target sequence for Sall1 (NM_021390.1,1795-1813).
cctgatttggccacaagaa

SEQ ID NO: 466676 - DNA, 19 bp, Mus musculus
  siRNA target sequence for Sall1 (NM_021390.1,1796-1814).
ctgatttggccacaagaaa

SEQ ID NO: 466677 - DNA, 19 bp, Mus musculus
  siRNA target sequence for Sall1 (NM_021390.1,1906-1924).
ccgacagcgggcaacagta

SEQ ID NO: 466678 - DNA, 19 bp, Mus musculus
  siRNA target sequence for Sall1 (NM_021390.1,2101-2119).
gccacggatcccaatgagt

SEQ ID NO: 466679 - DNA, 19 bp, Mus musculus
  siRNA target sequence for Sall1 (NM_021390.1,2105-2123).
cggatcccaatgagtgtat

SEQ ID NO: 466680 - DNA, 19 bp, Mus musculus
  siRNA target sequence for Sall1 (NM_021390.1,2107-2125).
gatcccaatgagtgtatca

SEQ ID NO: 466681 - DNA, 19 bp, Mus musculus
  siRNA target sequence for Sall1 (NM_021390.1,2334-2352).
ggtcctccagcagcatatt

SEQ ID NO: 466682 - DNA, 19 bp, Mus musculus
  siRNA target sequence for Sall1 (NM_021390.1,2338-2356).
ctccagcagcatattcgta

SEQ ID NO: 466683 - DNA, 19 bp, Mus musculus
  siRNA target sequence for Sall1 (NM_021390.1,2384-2402).
ccccagtccctgacaacta

SEQ ID NO: 466684 - DNA, 19 bp, Mus musculus
  siRNA target sequence for Sall1 (NM_021390.1,2428-2446).
ggctcctttgatgagaaaa

SEQ ID NO: 466685 - DNA, 19 bp, Mus musculus
  siRNA target sequence for Sall1 (NM_021390.1,2582-2600).
gcatcgctgctctggaaaa

SEQ ID NO: 466686 - DNA, 19 bp, Mus musculus
  siRNA target sequence for Sall1 (NM_021390.1,2583-2601).
catcgctgctctggaaaat

SEQ ID NO: 466687 - DNA, 19 bp, Mus musculus
  siRNA target sequence for Sall1 (NM_021390.1,2792-2810).
ccaacagcacccaagaatt

SEQ ID NO: 466688 - DNA, 19 bp, Mus musculus
  siRNA target sequence for Sall1 (NM_021390.1,2862-2880).
gttcgccaatggtctatct

SEQ ID NO: 466689 - DNA, 19 bp, Mus musculus
  siRNA target sequence for Sall1 (NM_021390.1,2907-2925).
ggacttgacttctagtcat

SEQ ID NO: 466690 - DNA, 19 bp, Mus musculus
  siRNA target sequence for Sall1 (NM_021390.1,2975-2993).
gagaccggggtaaatttaa

SEQ ID NO: 466691 - DNA, 19 bp, Mus musculus
  siRNA target sequence for Sall1 (NM_021390.1,2980-2998).
cggggtaaatttaaaaaca

SEQ ID NO: 466692 - DNA, 19 bp, Mus musculus
  siRNA target sequence for Sall1 (NM_021390.1,2997-3015).
cactgcttgcgacatttgt

SEQ ID NO: 466693 - DNA, 19 bp, Mus musculus
  siRNA target sequence for Sall1 (NM_021390.1,3038-3056).
gtgccttggacattcacta

SEQ ID NO: 466694 - DNA, 19 bp, Mus musculus
  siRNA target sequence for Sall1 (NM_021390.1,3069-3087).
caaagagagaccgttcatt

SEQ ID NO: 466695 - DNA, 19 bp, Mus musculus
  siRNA target sequence for Sall1 (NM_021390.1,3079-3097).
ccgttcatttgcacagttt

SEQ ID NO: 466696 - DNA, 19 bp, Mus musculus
  siRNA target sequence for Sall1 (NM_021390.1,3084-3102).
catttgcacagtttgcaat

SEQ ID NO: 466697 - DNA, 19 bp, Mus musculus
  siRNA target sequence for Sall1 (NM_021390.1,3236-3254).
cgctgtcatctctcatcaa

SEQ ID NO: 466698 - DNA, 19 bp, Mus musculus
  siRNA target sequence for Sall1 (NM_021390.1,3240-3258).
gtcatctctcatcaaaaca

SEQ ID NO: 466699 - DNA, 19 bp, Mus musculus
  siRNA target sequence for Sall1 (NM_021390.1,3389-3407).
ccaaacagcactattgtaa

SEQ ID NO: 466700 - DNA, 19 bp, Mus musculus
  siRNA target sequence for Sall1 (NM_021390.1,3480-3498).
ctttgcttgcactatctgt

SEQ ID NO: 466701 - DNA, 19 bp, Mus musculus
  siRNA target sequence for Sall1 (NM_021390.1,3592-3610).
gtggatggccccatgacat

SEQ ID NO: 466702 - DNA, 19 bp, Mus musculus
  siRNA target sequence for Sall1 (NM_021390.1,3594-3612).
ggatggccccatgacattt

SEQ ID NO: 466703 - DNA, 19 bp, Mus musculus
  siRNA target sequence for Sall1 (NM_021390.1,3682-3700).
gatccgtccagcttttgga

SEQ ID NO: 466704 - DNA, 19 bp, Mus musculus
  siRNA target sequence for Sall1 (NM_021390.1,3693-3711).
cttttggaaccagtataca

SEQ ID NO: 466705 - DNA, 19 bp, Mus musculus
  siRNA target sequence for Sall1 (NM_021390.1,3771-3789).
cggcatccctccaattcct

SEQ ID NO: 466706 - DNA, 19 bp, Mus musculus
  siRNA target sequence for Sall2 (NM_015772.1,696-714).
ccaaatgctgcgcacaatt

SEQ ID NO: 466707 - DNA, 19 bp, Mus musculus
  siRNA target sequence for Sall2 (NM_015772.1,717-735).
ctgacccgaccgaattcct

SEQ ID NO: 466708 - DNA, 19 bp, Mus musculus
  siRNA target sequence for Sall2 (NM_015772.1,734-752).
ctcgctcaccagaactcat

SEQ ID NO: 466709 - DNA, 19 bp, Mus musculus
  siRNA target sequence for Sall2 (NM_015772.1,759-777).
ctgacccaccggtaatggt

SEQ ID NO: 466710 - DNA, 19 bp, Mus musculus
  siRNA target sequence for Sall2 (NM_015772.1,769-787).
ggtaatggtgataattgga

SEQ ID NO: 466711 - DNA, 19 bp, Mus musculus
  siRNA target sequence for Sall2 (NM_015772.1,932-950).
cggaggggagaggaatctt

SEQ ID NO: 466712 - DNA, 19 bp, Mus musculus
  siRNA target sequence for Sall2 (NM_015772.1,1103-1121).
ggcagtggccacttgaaca

SEQ ID NO: 466713 - DNA, 19 bp, Mus musculus
  siRNA target sequence for Sall2 (NM_015772.1,1105-1123).
cagtggccacttgaacatt

SEQ ID NO: 466714 - DNA, 19 bp, Mus musculus
  siRNA target sequence for Sall2 (NM_015772.1,1620-1638).
ggctcctgaagccaaagaa

SEQ ID NO: 466715 - DNA, 19 bp, Mus musculus
  siRNA target sequence for Sall2 (NM_015772.1,1688-1706).
cccggtggaaggcacaaat

SEQ ID NO: 466716 - DNA, 19 bp, Mus musculus
  siRNA target sequence for Sall2 (NM_015772.1,1707-1725).
gccgcttttgtgcaaaagt

SEQ ID NO: 466717 - DNA, 19 bp, Mus musculus
  siRNA target sequence for Sall2 (NM_015772.1,1708-1726).
ccgcttttgtgcaaaagta

SEQ ID NO: 466718 - DNA, 19 bp, Mus musculus
  siRNA target sequence for Sall2 (NM_015772.1,1709-1727).
cgcttttgtgcaaaagtat

SEQ ID NO: 466719 - DNA, 19 bp, Mus musculus
  siRNA target sequence for Sall2 (NM_015772.1,1818-1836).
ctcggggcaacctcaaagt

SEQ ID NO: 466720 - DNA, 19 bp, Mus musculus
  siRNA target sequence for Sall2 (NM_015772.1,1823-1841).
ggcaacctcaaagtacatt

SEQ ID NO: 466721 - DNA, 19 bp, Mus musculus
  siRNA target sequence for Sall2 (NM_015772.1,1930-1948).
gctgccttacggaatgtct

SEQ ID NO: 466722 - DNA, 19 bp, Mus musculus
  siRNA target sequence for Sall2 (NM_015772.1,2093-2111).
gggctccctactttcaaca

SEQ ID NO: 466723 - DNA, 19 bp, Mus musculus
  siRNA target sequence for Sall2 (NM_015772.1,2094-2112).
ggctccctactttcaacaa

SEQ ID NO: 466724 - DNA, 19 bp, Mus musculus
  siRNA target sequence for Sall2 (NM_015772.1,2096-2114).
ctccctactttcaacaagt

SEQ ID NO: 466725 - DNA, 19 bp, Mus musculus
  siRNA target sequence for Sall2 (NM_015772.1,2129-2147).
gcagtggaacccaagagta

SEQ ID NO: 466726 - DNA, 19 bp, Mus musculus
  siRNA target sequence for Sall2 (NM_015772.1,2264-2282).
gcactgcttactaatcact

SEQ ID NO: 466727 - DNA, 19 bp, Mus musculus
  siRNA target sequence for Sall2 (NM_015772.1,2298-2316).
gtttccccttcccttatgt

SEQ ID NO: 466728 - DNA, 19 bp, Mus musculus
  siRNA target sequence for Sall2 (NM_015772.1,2511-2529).
gggctctacgcctgcatta

SEQ ID NO: 466729 - DNA, 19 bp, Mus musculus
  siRNA target sequence for Sall2 (NM_015772.1,2512-2530).
ggctctacgcctgcattat

SEQ ID NO: 466730 - DNA, 19 bp, Mus musculus
  siRNA target sequence for Sall2 (NM_015772.1,2595-2613).
gcaatttgcgcgcacattt

SEQ ID NO: 466731 - DNA, 19 bp, Mus musculus
  siRNA target sequence for Sall2 (NM_015772.1,2650-2668).
gaactcctgccccatttgt

SEQ ID NO: 466732 - DNA, 19 bp, Mus musculus
  siRNA target sequence for Sall2 (NM_015772.1,2671-2689).
gaagaagttcactaatgct

SEQ ID NO: 466733 - DNA, 19 bp, Mus musculus
  siRNA target sequence for Sall2 (NM_015772.1,2742-2760).
ggggttccgcactttctga

SEQ ID NO: 466734 - DNA, 19 bp, Mus musculus
  siRNA target sequence for Sall2 (NM_015772.1,2743-2761).
gggttccgcactttctgaa

SEQ ID NO: 466735 - DNA, 19 bp, Mus musculus
  siRNA target sequence for Sall2 (NM_015772.1,2903-2921).
gacgtgacagatgaagatt

SEQ ID NO: 466736 - DNA, 19 bp, Mus musculus
  siRNA target sequence for Sall2 (NM_015772.1,2950-2968).
gggagagaaggccatatca

SEQ ID NO: 466737 - DNA, 19 bp, Mus musculus
  siRNA target sequence for Sall2 (NM_015772.1,3049-3067).
gatggacagtaatgagaaa

SEQ ID NO: 466738 - DNA, 19 bp, Mus musculus
  siRNA target sequence for Sall2 (NM_015772.1,3500-3518).
cagaatattgctactcttt

SEQ ID NO: 466739 - DNA, 19 bp, Mus musculus
  siRNA target sequence for Sall2 (NM_015772.1,3562-3580).
ctccccattccctcgaaaa

SEQ ID NO: 466740 - DNA, 19 bp, Mus musculus
  siRNA target sequence for Sall2 (NM_015772.1,3564-3582).
ccccattccctcgaaaaga

SEQ ID NO: 466741 - DNA, 19 bp, Mus musculus
  siRNA target sequence for Sall2 (NM_015772.1,3565-3583).
cccattccctcgaaaagat

SEQ ID NO: 466742 - DNA, 19 bp, Mus musculus
  siRNA target sequence for Sept9 (NM_017380.1,455-473).
cgatcacccacgatattga

SEQ ID NO: 466743 - DNA, 19 bp, Mus musculus
  siRNA target sequence for Sept9 (NM_017380.1,456-474).
gatcacccacgatattgaa

SEQ ID NO: 466744 - DNA, 19 bp, Mus musculus
  siRNA target sequence for Sept9 (NM_017380.1,557-575).
ccattatgaagttcatcaa

SEQ ID NO: 466745 - DNA, 19 bp, Mus musculus
  siRNA target sequence for Sept9 (NM_017380.1,558-576).
cattatgaagttcatcaat

SEQ ID NO: 466746 - DNA, 19 bp, Mus musculus
  siRNA target sequence for Sept9 (NM_017380.1,567-585).
gttcatcaatgaccaatat

SEQ ID NO: 466747 - DNA, 19 bp, Mus musculus
  siRNA target sequence for Sept9 (NM_017380.1,694-712).
cccctggacattgaattca

SEQ ID NO: 466748 - DNA, 19 bp, Mus musculus
  siRNA target sequence for Sept9 (NM_017380.1,695-713).
ccctggacattgaattcat

SEQ ID NO: 466749 - DNA, 19 bp, Mus musculus
  siRNA target sequence for Sept9 (NM_017380.1,877-895).
cggctggtgaacgaaaagt

SEQ ID NO: 466750 - DNA, 19 bp, Mus musculus
  siRNA target sequence for Sept9 (NM_017380.1,878-896).
ggctggtgaacgaaaagtt

SEQ ID NO: 466751 - DNA, 19 bp, Mus musculus
  siRNA target sequence for Sept9 (NM_017380.1,924-942).
gggcagcgaccatgagtat

SEQ ID NO: 466752 - DNA, 19 bp, Mus musculus
  siRNA target sequence for Sept9 (NM_017380.1,926-944).
gcagcgaccatgagtatca

SEQ ID NO: 466753 - DNA, 19 bp, Mus musculus
  siRNA target sequence for Sept9 (NM_017380.1,927-945).
cagcgaccatgagtatcaa

SEQ ID NO: 466754 - DNA, 19 bp, Mus musculus
  siRNA target sequence for Sept9 (NM_017380.1,929-947).
gcgaccatgagtatcaagt

SEQ ID NO: 466755 - DNA, 19 bp, Mus musculus
  siRNA target sequence for Sept9 (NM_017380.1,978-996).
caagtggggcactatcgaa

SEQ ID NO: 466756 - DNA, 19 bp, Mus musculus
  siRNA target sequence for Sept9 (NM_017380.1,983-1001).
ggggcactatcgaagttga

SEQ ID NO: 466757 - DNA, 19 bp, Mus musculus
  siRNA target sequence for Sept9 (NM_017380.1,986-1004).
gcactatcgaagttgagaa

SEQ ID NO: 466758 - DNA, 19 bp, Mus musculus
  siRNA target sequence for Sept9 (NM_017380.1,987-1005).
cactatcgaagttgagaat

SEQ ID NO: 466759 - DNA, 19 bp, Mus musculus
  siRNA target sequence for Sept9 (NM_017380.1,1030-1048).
ctgcgggatctccttatca

SEQ ID NO: 466760 - DNA, 19 bp, Mus musculus
  siRNA target sequence for Sept9 (NM_017380.1,1049-1067).
ggacgcacatgcaaaacat

SEQ ID NO: 466761 - DNA, 19 bp, Mus musculus
  siRNA target sequence for Sept9 (NM_017380.1,1095-1113).
cgaagcctaccgagtgaaa

SEQ ID NO: 466762 - DNA, 19 bp, Mus musculus
  siRNA target sequence for Setdb1 (NM_018877.1,574-592).
gaaaatcagctcaagatgt

SEQ ID NO: 466763 - DNA, 19 bp, Mus musculus
  siRNA target sequence for Setdb1 (NM_018877.1,626-644).
cagttctcaagatctacat

SEQ ID NO: 466764 - DNA, 19 bp, Mus musculus
  siRNA target sequence for Setdb1 (NM_018877.1,684-702).
gatggggacctgatagtca

SEQ ID NO: 466765 - DNA, 19 bp, Mus musculus
  siRNA target sequence for Setdb1 (NM_018877.1,740-758).
gcacaaaggcacccttatt

SEQ ID NO: 466766 - DNA, 19 bp, Mus musculus
  siRNA target sequence for Setdb1 (NM_018877.1,767-785).
gactgttgggctaggaaaa

SEQ ID NO: 466767 - DNA, 19 bp, Mus musculus
  siRNA target sequence for Setdb1 (NM_018877.1,888-906).
cgagtggtggccaagtaca

SEQ ID NO: 466768 - DNA, 19 bp, Mus musculus
  siRNA target sequence for Setdb1 (NM_018877.1,952-970).
cccctaacgtcaagaacaa

SEQ ID NO: 466769 - DNA, 19 bp, Mus musculus
  siRNA target sequence for Setdb1 (NM_018877.1,1016-1034).
cactcagtcagagctttat

SEQ ID NO: 466770 - DNA, 19 bp, Mus musculus
  siRNA target sequence for Setdb1 (NM_018877.1,1037-1055).
catttgccgaccactaaaa

SEQ ID NO: 466771 - DNA, 19 bp, Mus musculus
  siRNA target sequence for Setdb1 (NM_018877.1,1043-1061).
ccgaccactaaaaaagact

SEQ ID NO: 466772 - DNA, 19 bp, Mus musculus
  siRNA target sequence for Setdb1 (NM_018877.1,1044-1062).
cgaccactaaaaaagactt

SEQ ID NO: 466773 - DNA, 19 bp, Mus musculus
  siRNA target sequence for Setdb1 (NM_018877.1,1097-1115).
catagaggaatatatcact

SEQ ID NO: 466774 - DNA, 19 bp, Mus musculus
  siRNA target sequence for Setdb1 (NM_018877.1,1187-1205).
gtggaagtctcgagttgaa

SEQ ID NO: 466775 - DNA, 19 bp, Mus musculus
  siRNA target sequence for Setdb1 (NM_018877.1,1189-1207).
ggaagtctcgagttgaaga

SEQ ID NO: 466776 - DNA, 19 bp, Mus musculus
  siRNA target sequence for Setdb1 (NM_018877.1,1281-1299).
cgcctggaacctatgttta

SEQ ID NO: 466777 - DNA, 19 bp, Mus musculus
  siRNA target sequence for Setdb1 (NM_018877.1,1284-1302).
ctggaacctatgtttagta

SEQ ID NO: 466778 - DNA, 19 bp, Mus musculus
  siRNA target sequence for Setdb1 (NM_018877.1,1287-1305).
gaacctatgtttagtatga

SEQ ID NO: 466779 - DNA, 19 bp, Mus musculus
  siRNA target sequence for Setdb1 (NM_018877.1,1350-1368).
ctcagaacccgtcctaata

SEQ ID NO: 466780 - DNA, 19 bp, Mus musculus
  siRNA target sequence for Setdb1 (NM_018877.1,1382-1400).
gagcaaaggtcctgttgtt

SEQ ID NO: 466781 - DNA, 19 bp, Mus musculus
  siRNA target sequence for Setdb1 (NM_018877.1,1401-1419).
cagtatacacaggatctaa

SEQ ID NO: 466782 - DNA, 19 bp, Mus musculus
  siRNA target sequence for Setdb1 (NM_018877.1,1403-1421).
gtatacacaggatctaact

SEQ ID NO: 466783 - DNA, 19 bp, Mus musculus
  siRNA target sequence for Setdb1 (NM_018877.1,1423-1441).
gtactggaatccagtttaa

SEQ ID NO: 466784 - DNA, 19 bp, Mus musculus
  siRNA target sequence for Setdb1 (NM_018877.1,1451-1469).
gcccctacagcctatagct

SEQ ID NO: 466785 - DNA, 19 bp, Mus musculus
  siRNA target sequence for Setdb1 (NM_018877.1,1540-1558).
cacaatcacggaaacaagt

SEQ ID NO: 466786 - DNA, 19 bp, Mus musculus
  siRNA target sequence for Setdb1 (NM_018877.1,1651-1669).
ggaaacttgggataaacca

SEQ ID NO: 466787 - DNA, 19 bp, Mus musculus
  siRNA target sequence for Setdb1 (NM_018877.1,1849-1867).
cccccatggagaagctttt

SEQ ID NO: 466788 - DNA, 19 bp, Mus musculus
  siRNA target sequence for Setdb1 (NM_018877.1,1905-1923).
cggatcagacccatgagaa

SEQ ID NO: 466789 - DNA, 19 bp, Mus musculus
  siRNA target sequence for Setdb1 (NM_018877.1,1910-1928).
cagacccatgagaaacgaa

SEQ ID NO: 466790 - DNA, 19 bp, Mus musculus
  siRNA target sequence for Setdb1 (NM_018877.1,1915-1933).
ccatgagaaacgaacagta

SEQ ID NO: 466791 - DNA, 19 bp, Mus musculus
  siRNA target sequence for Setdb1 (NM_018877.1,1937-1955).
gggcaagaaccctctatta

SEQ ID NO: 466792 - DNA, 19 bp, Mus musculus
  siRNA target sequence for Setdb1 (NM_018877.1,1939-1957).
gcaagaaccctctattagt

SEQ ID NO: 466793 - DNA, 19 bp, Mus musculus
  siRNA target sequence for Setdb1 (NM_018877.1,1940-1958).
caagaaccctctattagtt

SEQ ID NO: 466794 - DNA, 19 bp, Mus musculus
  siRNA target sequence for Setdb1 (NM_018877.1,1956-1974).
gttccacttctgtatgact

SEQ ID NO: 466795 - DNA, 19 bp, Mus musculus
  siRNA target sequence for Setdb1 (NM_018877.1,1987-2005).
cagcacggcgcagagttaa

SEQ ID NO: 466796 - DNA, 19 bp, Mus musculus
  siRNA target sequence for Setdb1 (NM_018877.1,2016-2034).
ggctttcatgtaatctata

SEQ ID NO: 466797 - DNA, 19 bp, Mus musculus
  siRNA target sequence for Setdb1 (NM_018877.1,2072-2090).
gatagagcgctaccttttt

SEQ ID NO: 466798 - DNA, 19 bp, Mus musculus
  siRNA target sequence for Setdb1 (NM_018877.1,2076-2094).
gagcgctacctttttgaga

SEQ ID NO: 466799 - DNA, 19 bp, Mus musculus
  siRNA target sequence for Setdb1 (NM_018877.1,2126-2144).
ctgtttggatccatatgtt

SEQ ID NO: 466800 - DNA, 19 bp, Mus musculus
  siRNA target sequence for Setdb1 (NM_018877.1,2128-2146).
gtttggatccatatgttct

SEQ ID NO: 466801 - DNA, 19 bp, Mus musculus
  siRNA target sequence for Setdb1 (NM_018877.1,2142-2160).
gttcttgttgacagaaagt

SEQ ID NO: 466802 - DNA, 19 bp, Mus musculus
  siRNA target sequence for Setdb1 (NM_018877.1,2155-2173).
gaaagtttcaaccctttaa

SEQ ID NO: 466803 - DNA, 19 bp, Mus musculus
  siRNA target sequence for Setdb1 (NM_018877.1,2166-2184).
ccctttaagcctttttact

SEQ ID NO: 466804 - DNA, 19 bp, Mus musculus
  siRNA target sequence for Setdb1 (NM_018877.1,2176-2194).
ctttttactatattttgga

SEQ ID NO: 466805 - DNA, 19 bp, Mus musculus
  siRNA target sequence for Setdb1 (NM_018877.1,2225-2243).
gtcctgtgttaatgagatt

SEQ ID NO: 466806 - DNA, 19 bp, Mus musculus
  siRNA target sequence for Setdb1 (NM_018877.1,2297-2315).
gggtgttttcattaacaca

SEQ ID NO: 466807 - DNA, 19 bp, Mus musculus
  siRNA target sequence for Setdb1 (NM_018877.1,2348-2366).
ggatgggtgtcgggataaa

SEQ ID NO: 466808 - DNA, 19 bp, Mus musculus
  siRNA target sequence for Setdb1 (NM_018877.1,2349-2367).
gatgggtgtcgggataaat

SEQ ID NO: 466809 - DNA, 19 bp, Mus musculus
  siRNA target sequence for Setdb1 (NM_018877.1,2352-2370).
gggtgtcgggataaatcca

SEQ ID NO: 466810 - DNA, 19 bp, Mus musculus
  siRNA target sequence for Setdb1 (NM_018877.1,2353-2371).
ggtgtcgggataaatccaa

SEQ ID NO: 466811 - DNA, 19 bp, Mus musculus
  siRNA target sequence for Setdb1 (NM_018877.1,2354-2372).
gtgtcgggataaatccaaa

SEQ ID NO: 466812 - DNA, 19 bp, Mus musculus
  siRNA target sequence for Setdb1 (NM_018877.1,2423-2441).
ccaagtcaaccctaactct

SEQ ID NO: 466813 - DNA, 19 bp, Mus musculus
  siRNA target sequence for Setdb1 (NM_018877.1,2443-2461).
gctaccagtataaaagact

SEQ ID NO: 466814 - DNA, 19 bp, Mus musculus
  siRNA target sequence for Setdb1 (NM_018877.1,2479-2497).
caggggtttatgagtgtaa

SEQ ID NO: 466815 - DNA, 19 bp, Mus musculus
  siRNA target sequence for Setdb1 (NM_018877.1,2481-2499).
ggggtttatgagtgtaaca

SEQ ID NO: 466816 - DNA, 19 bp, Mus musculus
  siRNA target sequence for Setdb1 (NM_018877.1,2482-2500).
gggtttatgagtgtaacaa

SEQ ID NO: 466817 - DNA, 19 bp, Mus musculus
  siRNA target sequence for Setdb1 (NM_018877.1,2559-2577).
gttcgactacagctgttta

SEQ ID NO: 466818 - DNA, 19 bp, Mus musculus
  siRNA target sequence for Setdb1 (NM_018877.1,2562-2580).
cgactacagctgtttaaga

SEQ ID NO: 466819 - DNA, 19 bp, Mus musculus
  siRNA target sequence for Setdb1 (NM_018877.1,2787-2805).
gacagcagtggggtagata

SEQ ID NO: 466820 - DNA, 19 bp, Mus musculus
  siRNA target sequence for Setdb1 (NM_018877.1,2791-2809).
gcagtggggtagatatgaa

SEQ ID NO: 466821 - DNA, 19 bp, Mus musculus
  siRNA target sequence for Setdb1 (NM_018877.1,2913-2931).
gtgtggcgtagctatgcta

SEQ ID NO: 466822 - DNA, 19 bp, Mus musculus
  siRNA target sequence for Setdb1 (NM_018877.1,3010-3028).
ggcctccacatgttcctat

SEQ ID NO: 466823 - DNA, 19 bp, Mus musculus
  siRNA target sequence for Setdb1 (NM_018877.1,3093-3111).
gtggcctcgtggttgagtt

SEQ ID NO: 466824 - DNA, 19 bp, Mus musculus
  siRNA target sequence for Setdb1 (NM_018877.1,3098-3116).
ctcgtggttgagttgcaat

SEQ ID NO: 466825 - DNA, 19 bp, Mus musculus
  siRNA target sequence for Setdb1 (NM_018877.1,3103-3121).
ggttgagttgcaatagtgt

SEQ ID NO: 466826 - DNA, 19 bp, Mus musculus
  siRNA target sequence for Setdb1 (NM_018877.1,3153-3171).
cgttcttccttcaagacta

SEQ ID NO: 466827 - DNA, 19 bp, Mus musculus
  siRNA target sequence for Setdb1 (NM_018877.1,3285-3303).
cctgagaaccgaaacaaga

SEQ ID NO: 466828 - DNA, 19 bp, Mus musculus
  siRNA target sequence for Setdb1 (NM_018877.1,3299-3317).
caagatgccagtagttact

SEQ ID NO: 466829 - DNA, 19 bp, Mus musculus
  siRNA target sequence for Setdb1 (NM_018877.1,3302-3320).
gatgccagtagttactgaa

SEQ ID NO: 466830 - DNA, 19 bp, Mus musculus
  siRNA target sequence for Setdb1 (NM_018877.1,3405-3423).
cagcgagttgtgacttcta

SEQ ID NO: 466831 - DNA, 19 bp, Mus musculus
  siRNA target sequence for Setdb1 (NM_018877.1,3524-3542).
cacagctgttgatagtgat

SEQ ID NO: 466832 - DNA, 19 bp, Mus musculus
  siRNA target sequence for Setdb1 (NM_018877.1,3565-3583).
gctctgacggtgatgactt

SEQ ID NO: 466833 - DNA, 19 bp, Mus musculus
  siRNA target sequence for Setdb1 (NM_018877.1,3566-3584).
ctctgacggtgatgacttt

SEQ ID NO: 466834 - DNA, 19 bp, Mus musculus
  siRNA target sequence for Setdb1 (NM_018877.1,3641-3659).
ccgaggctttgctcttaaa

SEQ ID NO: 466835 - DNA, 19 bp, Mus musculus
  siRNA target sequence for Setdb1 (NM_018877.1,3642-3660).
cgaggctttgctcttaaat

SEQ ID NO: 466836 - DNA, 19 bp, Mus musculus
  siRNA target sequence for Setdb1 (NM_018877.1,3645-3663).
ggctttgctcttaaatcaa

SEQ ID NO: 466837 - DNA, 19 bp, Mus musculus
  siRNA target sequence for Setdb1 (NM_018877.1,3664-3682).
cccatggtattgccattaa

SEQ ID NO: 466838 - DNA, 19 bp, Mus musculus
  siRNA target sequence for Setdb1 (NM_018877.1,3669-3687).
ggtattgccattaaatcaa

SEQ ID NO: 466839 - DNA, 19 bp, Mus musculus
  siRNA target sequence for Setdb1 (NM_018877.1,3718-3736).
gtgcaccagttcgtaagaa

SEQ ID NO: 466840 - DNA, 19 bp, Mus musculus
  siRNA target sequence for Setdb1 (NM_018877.1,3720-3738).
gcaccagttcgtaagaaca

SEQ ID NO: 466841 - DNA, 19 bp, Mus musculus
  siRNA target sequence for Setdb1 (NM_018877.1,3737-3755).
cacacgccagttctatgat

SEQ ID NO: 466842 - DNA, 19 bp, Mus musculus
  siRNA target sequence for Setdb1 (NM_018877.1,3764-3782).
gtcttgctacatcattgat

SEQ ID NO: 466843 - DNA, 19 bp, Mus musculus
  siRNA target sequence for Setdb1 (NM_018877.1,3804-3822).
ggccgctacctcaatcaca

SEQ ID NO: 466844 - DNA, 19 bp, Mus musculus
  siRNA target sequence for Setdb1 (NM_018877.1,3930-3948).
ctcacttgggactacaact

SEQ ID NO: 466845 - DNA, 19 bp, Mus musculus
  siRNA target sequence for Sf3b2 (NM_030109.1,188-206).
ggagtcgcgaggagttagt

SEQ ID NO: 466846 - DNA, 19 bp, Mus musculus
  siRNA target sequence for Sf3b2 (NM_030109.1,189-207).
gagtcgcgaggagttagta

SEQ ID NO: 466847 - DNA, 19 bp, Mus musculus
  siRNA target sequence for Sf3b2 (NM_030109.1,191-209).
gtcgcgaggagttagtaga

SEQ ID NO: 466848 - DNA, 19 bp, Mus musculus
  siRNA target sequence for Sf3b2 (NM_030109.1,249-267).
gaatcgaccagttttgaga

SEQ ID NO: 466849 - DNA, 19 bp, Mus musculus
  siRNA target sequence for Sf3b2 (NM_030109.1,546-564).
caagcaggcagctgtgtta

SEQ ID NO: 466850 - DNA, 19 bp, Mus musculus
  siRNA target sequence for Sf3b2 (NM_030109.1,812-830).
cccaggctttggaaaagat

SEQ ID NO: 466851 - DNA, 19 bp, Mus musculus
  siRNA target sequence for Sf3b2 (NM_030109.1,813-831).
ccaggctttggaaaagatt

SEQ ID NO: 466852 - DNA, 19 bp, Mus musculus
  siRNA target sequence for Sf3b2 (NM_030109.1,940-958).
gaggacacggtgtccatat

SEQ ID NO: 466853 - DNA, 19 bp, Mus musculus
  siRNA target sequence for Sf3b2 (NM_030109.1,943-961).
gacacggtgtccatatcca

SEQ ID NO: 466854 - DNA, 19 bp, Mus musculus
  siRNA target sequence for Sf3b2 (NM_030109.1,945-963).
cacggtgtccatatccaaa

SEQ ID NO: 466855 - DNA, 19 bp, Mus musculus
  siRNA target sequence for Sf3b2 (NM_030109.1,947-965).
cggtgtccatatccaaaaa

SEQ ID NO: 466856 - DNA, 19 bp, Mus musculus
  siRNA target sequence for Sf3b2 (NM_030109.1,1121-1139).
ccgaggagcctgagatcta

SEQ ID NO: 466857 - DNA, 19 bp, Mus musculus
  siRNA target sequence for Sf3b2 (NM_030109.1,1342-1360).
cctaaactgtcgaagaaga

SEQ ID NO: 466858 - DNA, 19 bp, Mus musculus
  siRNA target sequence for Sf3b2 (NM_030109.1,1343-1361).
ctaaactgtcgaagaagaa

SEQ ID NO: 466859 - DNA, 19 bp, Mus musculus
  siRNA target sequence for Sf3b2 (NM_030109.1,1359-1377).
gaagttgcgccgaatgaat

SEQ ID NO: 466860 - DNA, 19 bp, Mus musculus
  siRNA target sequence for Sf3b2 (NM_030109.1,1365-1383).
gcgccgaatgaatcgtttt

SEQ ID NO: 466861 - DNA, 19 bp, Mus musculus
  siRNA target sequence for Sf3b2 (NM_030109.1,1366-1384).
cgccgaatgaatcgtttta

SEQ ID NO: 466862 - DNA, 19 bp, Mus musculus
  siRNA target sequence for Sf3b2 (NM_030109.1,1368-1386).
ccgaatgaatcgttttact

SEQ ID NO: 466863 - DNA, 19 bp, Mus musculus
  siRNA target sequence for Sf3b2 (NM_030109.1,1504-1522).
ccacgccactggtgtttta

SEQ ID NO: 466864 - DNA, 19 bp, Mus musculus
  siRNA target sequence for Sf3b2 (NM_030109.1,1540-1558).
ggcaaacggggcattgaga

SEQ ID NO: 466865 - DNA, 19 bp, Mus musculus
  siRNA target sequence for Sf3b2 (NM_030109.1,1592-1610).
gcacaggcattcaggaaat

SEQ ID NO: 466866 - DNA, 19 bp, Mus musculus
  siRNA target sequence for Sf3b2 (NM_030109.1,1687-1705).
gggaagatcgacattgact

SEQ ID NO: 466867 - DNA, 19 bp, Mus musculus
  siRNA target sequence for Sf3b2 (NM_030109.1,1688-1706).
ggaagatcgacattgacta

SEQ ID NO: 466868 - DNA, 19 bp, Mus musculus
  siRNA target sequence for Sf3b2 (NM_030109.1,1738-1756).
cagaccaagccgaaactca

SEQ ID NO: 466869 - DNA, 19 bp, Mus musculus
  siRNA target sequence for Sf3b2 (NM_030109.1,1757-1775).
ccatccatggggaccttta

SEQ ID NO: 466870 - DNA, 19 bp, Mus musculus
  siRNA target sequence for Sf3b2 (NM_030109.1,1758-1776).
catccatggggacctttat

SEQ ID NO: 466871 - DNA, 19 bp, Mus musculus
  siRNA target sequence for Sf3b2 (NM_030109.1,1761-1779).
ccatggggacctttattat

SEQ ID NO: 466872 - DNA, 19 bp, Mus musculus
  siRNA target sequence for Sf3b2 (NM_030109.1,1818-1836).
gcctggagatttatctgat

SEQ ID NO: 466873 - DNA, 19 bp, Mus musculus
  siRNA target sequence for Sf3b2 (NM_030109.1,1840-1858).
ctaaggatttccttaggaa

SEQ ID NO: 466874 - DNA, 19 bp, Mus musculus
  siRNA target sequence for Sf3b2 (NM_030109.1,1934-1952).
cctacccaaacctgaaaat

SEQ ID NO: 466875 - DNA, 19 bp, Mus musculus
  siRNA target sequence for Sf3b2 (NM_030109.1,2241-2259).
cactcccggaggattctca

SEQ ID NO: 466876 - DNA, 19 bp, Mus musculus
  siRNA target sequence for Sf3b2 (NM_030109.1,2277-2295).
ggagacccctgaactcatt

SEQ ID NO: 466877 - DNA, 19 bp, Mus musculus
  siRNA target sequence for Sf3b2 (NM_030109.1,2336-2354).
gtgagacacctcagttatt

SEQ ID NO: 466878 - DNA, 19 bp, Mus musculus
  siRNA target sequence for Sf3b2 (NM_030109.1,2344-2362).
cctcagttattcactgtat

SEQ ID NO: 466879 - DNA, 19 bp, Mus musculus
  siRNA target sequence for Sf3b2 (NM_030109.1,2550-2568).
ggagcagcaggcacaagta

SEQ ID NO: 466880 - DNA, 19 bp, Mus musculus
  siRNA target sequence for Sf3b2 (NM_030109.1,2606-2624).
ctgctaagcagaagcaaaa

SEQ ID NO: 466881 - DNA, 19 bp, Mus musculus
  siRNA target sequence for Sf3b2 (NM_030109.1,2652-2670).
ccgtgggggcagcaagaaa

SEQ ID NO: 466882 - DNA, 19 bp, Mus musculus
  siRNA target sequence for Sfrs2 (NM_011358.1,269-287).
gcgtcggcgacgtgtacat

SEQ ID NO: 466883 - DNA, 19 bp, Mus musculus
  siRNA target sequence for Sfrs2 (NM_011358.1,270-288).
cgtcggcgacgtgtacatt

SEQ ID NO: 466884 - DNA, 19 bp, Mus musculus
  siRNA target sequence for Shprh (NM_172937.2,515-533).
cagtcagttcctgatctat

SEQ ID NO: 466885 - DNA, 19 bp, Mus musculus
  siRNA target sequence for Shprh (NM_172937.2,530-548).
ctatgttcattcagaatgt

SEQ ID NO: 466886 - DNA, 19 bp, Mus musculus
  siRNA target sequence for Shprh (NM_172937.2,582-600).
ggatcagccggtgtttgta

SEQ ID NO: 466887 - DNA, 19 bp, Mus musculus
  siRNA target sequence for Shprh (NM_172937.2,670-688).
gaagaggaataaaactcta

SEQ ID NO: 466888 - DNA, 19 bp, Mus musculus
  siRNA target sequence for Shprh (NM_172937.2,697-715).
cagacggcactcacacaat

SEQ ID NO: 466889 - DNA, 19 bp, Mus musculus
  siRNA target sequence for Shprh (NM_172937.2,699-717).
gacggcactcacacaatca

SEQ ID NO: 466890 - DNA, 19 bp, Mus musculus
  siRNA target sequence for Shprh (NM_172937.2,716-734).
caaggttggaatttacatt

SEQ ID NO: 466891 - DNA, 19 bp, Mus musculus
  siRNA target sequence for Shprh (NM_172937.2,737-755).
ggaagctggcctaacaaga

SEQ ID NO: 466892 - DNA, 19 bp, Mus musculus
  siRNA target sequence for Shprh (NM_172937.2,745-763).
gcctaacaagactagactt

SEQ ID NO: 466893 - DNA, 19 bp, Mus musculus
  siRNA target sequence for Shprh (NM_172937.2,812-830).
gagagtgatggaaaagtta

SEQ ID NO: 466894 - DNA, 19 bp, Mus musculus
  siRNA target sequence for Shprh (NM_172937.2,816-834).
gtgatggaaaagttacata

SEQ ID NO: 466895 - DNA, 19 bp, Mus musculus
  siRNA target sequence for Shprh (NM_172937.2,887-905).
gcccgagggtcaggatatt

SEQ ID NO: 466896 - DNA, 19 bp, Mus musculus
  siRNA target sequence for Shprh (NM_172937.2,890-908).
cgagggtcaggatattgat

SEQ ID NO: 466897 - DNA, 19 bp, Mus musculus
  siRNA target sequence for Shprh (NM_172937.2,1054-1072).
gcgctcctcctgctgataa

SEQ ID NO: 466898 - DNA, 19 bp, Mus musculus
  siRNA target sequence for Shprh (NM_172937.2,1056-1074).
gctcctcctgctgataact

SEQ ID NO: 466899 - DNA, 19 bp, Mus musculus
  siRNA target sequence for Shprh (NM_172937.2,1085-1103).
cttatggcgagaaattgtt

SEQ ID NO: 466900 - DNA, 19 bp, Mus musculus
  siRNA target sequence for Shprh (NM_172937.2,1105-1123).
cacctgatggcttgaaact

SEQ ID NO: 466901 - DNA, 19 bp, Mus musculus
  siRNA target sequence for Shprh (NM_172937.2,1113-1131).
ggcttgaaactctactata

SEQ ID NO: 466902 - DNA, 19 bp, Mus musculus
  siRNA target sequence for Shprh (NM_172937.2,1114-1132).
gcttgaaactctactataa

SEQ ID NO: 466903 - DNA, 19 bp, Mus musculus
  siRNA target sequence for Shprh (NM_172937.2,1115-1133).
cttgaaactctactataat

SEQ ID NO: 466904 - DNA, 19 bp, Mus musculus
  siRNA target sequence for Shprh (NM_172937.2,1118-1136).
gaaactctactataatcca

SEQ ID NO: 466905 - DNA, 19 bp, Mus musculus
  siRNA target sequence for Shprh (NM_172937.2,1122-1140).
ctctactataatccatata

SEQ ID NO: 466906 - DNA, 19 bp, Mus musculus
  siRNA target sequence for Shprh (NM_172937.2,1124-1142).
ctactataatccatataca

SEQ ID NO: 466907 - DNA, 19 bp, Mus musculus
  siRNA target sequence for Shprh (NM_172937.2,1144-1162).
gctgcatcattcgagattt

SEQ ID NO: 466908 - DNA, 19 bp, Mus musculus
  siRNA target sequence for Shprh (NM_172937.2,1294-1312).
ctgagggaaaagtggtaaa

SEQ ID NO: 466909 - DNA, 19 bp, Mus musculus
  siRNA target sequence for Shprh (NM_172937.2,1488-1506).
gtcagctccatattcagat

SEQ ID NO: 466910 - DNA, 19 bp, Mus musculus
  siRNA target sequence for Shprh (NM_172937.2,1669-1687).
ggagtccaaggaaaattga

SEQ ID NO: 466911 - DNA, 19 bp, Mus musculus
  siRNA target sequence for Shprh (NM_172937.2,1726-1744).
ctgagtacctgccatcaaa

SEQ ID NO: 466912 - DNA, 19 bp, Mus musculus
  siRNA target sequence for Shprh (NM_172937.2,1728-1746).
gagtacctgccatcaaaca

SEQ ID NO: 466913 - DNA, 19 bp, Mus musculus
  siRNA target sequence for Shprh (NM_172937.2,1736-1754).
gccatcaaacacttctgat

SEQ ID NO: 466914 - DNA, 19 bp, Mus musculus
  siRNA target sequence for Shprh (NM_172937.2,1758-1776).
gatgagccttactattatt

SEQ ID NO: 466915 - DNA, 19 bp, Mus musculus
  siRNA target sequence for Shprh (NM_172937.2,1763-1781).
gccttactattattactgt

SEQ ID NO: 466916 - DNA, 19 bp, Mus musculus
  siRNA target sequence for Shprh (NM_172937.2,1764-1782).
ccttactattattactgta

SEQ ID NO: 466917 - DNA, 19 bp, Mus musculus
  siRNA target sequence for Shprh (NM_172937.2,1789-1807).
gaaaaagccggagtaagtt

SEQ ID NO: 466918 - DNA, 19 bp, Mus musculus
  siRNA target sequence for Shprh (NM_172937.2,1795-1813).
gccggagtaagttgaagaa

SEQ ID NO: 466919 - DNA, 19 bp, Mus musculus
  siRNA target sequence for Shprh (NM_172937.2,1814-1832).
gcctgctttactaactaaa

SEQ ID NO: 466920 - DNA, 19 bp, Mus musculus
  siRNA target sequence for Shprh (NM_172937.2,1815-1833).
cctgctttactaactaaaa

SEQ ID NO: 466921 - DNA, 19 bp, Mus musculus
  siRNA target sequence for Shprh (NM_172937.2,1892-1910).
ctgtgcaagtactgatgtt

SEQ ID NO: 466922 - DNA, 19 bp, Mus musculus
  siRNA target sequence for Shprh (NM_172937.2,1894-1912).
gtgcaagtactgatgttca

SEQ ID NO: 466923 - DNA, 19 bp, Mus musculus
  siRNA target sequence for Shprh (NM_172937.2,1998-2016).
gagttggcacagtctaaca

SEQ ID NO: 466924 - DNA, 19 bp, Mus musculus
  siRNA target sequence for Shprh (NM_172937.2,2004-2022).
gcacagtctaacacttcaa

SEQ ID NO: 466925 - DNA, 19 bp, Mus musculus
  siRNA target sequence for Shprh (NM_172937.2,2026-2044).
cttgtgaaacctctgatta

SEQ ID NO: 466926 - DNA, 19 bp, Mus musculus
  siRNA target sequence for Shprh (NM_172937.2,2120-2138).
gtggcagcatgcaaagtgt

SEQ ID NO: 466927 - DNA, 19 bp, Mus musculus
  siRNA target sequence for Shprh (NM_172937.2,2126-2144).
gcatgcaaagtgtgtgaat

SEQ ID NO: 466928 - DNA, 19 bp, Mus musculus
  siRNA target sequence for Shprh (NM_172937.2,2127-2145).
catgcaaagtgtgtgaatt

SEQ ID NO: 466929 - DNA, 19 bp, Mus musculus
  siRNA target sequence for Shprh (NM_172937.2,2199-2217).
gcgatggagccagtatcaa

SEQ ID NO: 466930 - DNA, 19 bp, Mus musculus
  siRNA target sequence for Shprh (NM_172937.2,2256-2274).
caccagtgggtggatgaaa

SEQ ID NO: 466931 - DNA, 19 bp, Mus musculus
  siRNA target sequence for Shprh (NM_172937.2,2280-2298).
cggcacgtgaggtcatcat

SEQ ID NO: 466932 - DNA, 19 bp, Mus musculus
  siRNA target sequence for Shprh (NM_172937.2,2282-2300).
gcacgtgaggtcatcatct

SEQ ID NO: 466933 - DNA, 19 bp, Mus musculus
  siRNA target sequence for Shprh (NM_172937.2,2303-2321).
ccgagttctggtatatcaa

SEQ ID NO: 466934 - DNA, 19 bp, Mus musculus
  siRNA target sequence for Shprh (NM_172937.2,2362-2380).
cagaacaagatatagttat

SEQ ID NO: 466935 - DNA, 19 bp, Mus musculus
  siRNA target sequence for Shprh (NM_172937.2,2364-2382).
gaacaagatatagttatca

SEQ ID NO: 466936 - DNA, 19 bp, Mus musculus
  siRNA target sequence for Shprh (NM_172937.2,2397-2415).
cttcgttcagaactaaact

SEQ ID NO: 466937 - DNA, 19 bp, Mus musculus
  siRNA target sequence for Shprh (NM_172937.2,2401-2419).
gttcagaactaaactatgt

SEQ ID NO: 466938 - DNA, 19 bp, Mus musculus
  siRNA target sequence for Shprh (NM_172937.2,2420-2438).
caatatcccacatagcaat

SEQ ID NO: 466939 - DNA, 19 bp, Mus musculus
  siRNA target sequence for Shprh (NM_172937.2,2461-2479).
ggaaccagaagcgctatat

SEQ ID NO: 466940 - DNA, 19 bp, Mus musculus
  siRNA target sequence for Shprh (NM_172937.2,2515-2533).
ggaggatctgccttgatga

SEQ ID NO: 466941 - DNA, 19 bp, Mus musculus
  siRNA target sequence for Shprh (NM_172937.2,2516-2534).
gaggatctgccttgatgaa

SEQ ID NO: 466942 - DNA, 19 bp, Mus musculus
  siRNA target sequence for Shprh (NM_172937.2,2543-2561).
ggtcgagtgtcctacagta

SEQ ID NO: 466943 - DNA, 19 bp, Mus musculus
  siRNA target sequence for Shprh (NM_172937.2,2544-2562).
gtcgagtgtcctacagtaa

SEQ ID NO: 466944 - DNA, 19 bp, Mus musculus
  siRNA target sequence for Shprh (NM_172937.2,2546-2564).
cgagtgtcctacagtaaaa

SEQ ID NO: 466945 - DNA, 19 bp, Mus musculus
  siRNA target sequence for Shprh (NM_172937.2,2582-2600).
gcgtttgagcgggattaat

SEQ ID NO: 466946 - DNA, 19 bp, Mus musculus
  siRNA target sequence for Shprh (NM_172937.2,2630-2648).
gagaggattggaagatctt

SEQ ID NO: 466947 - DNA, 19 bp, Mus musculus
  siRNA target sequence for Shprh (NM_172937.2,2660-2678).
ggtctttcttggaattgaa

SEQ ID NO: 466948 - DNA, 19 bp, Mus musculus
  siRNA target sequence for Shprh (NM_172937.2,2679-2697).
ccttattgtgtcaaacact

SEQ ID NO: 466949 - DNA, 19 bp, Mus musculus
  siRNA target sequence for Shprh (NM_172937.2,2698-2716).
ggtggattcggcttctcta

SEQ ID NO: 466950 - DNA, 19 bp, Mus musculus
  siRNA target sequence for Shprh (NM_172937.2,2699-2717).
gtggattcggcttctctat

SEQ ID NO: 466951 - DNA, 19 bp, Mus musculus
  siRNA target sequence for Shprh (NM_172937.2,2702-2720).
gattcggcttctctatcat

SEQ ID NO: 466952 - DNA, 19 bp, Mus musculus
  siRNA target sequence for Shprh (NM_172937.2,2744-2762).
gcacctgtacagttttatt

SEQ ID NO: 466953 - DNA, 19 bp, Mus musculus
  siRNA target sequence for Shprh (NM_172937.2,2753-2771).
cagttttattgccaagata

SEQ ID NO: 466954 - DNA, 19 bp, Mus musculus
  siRNA target sequence for Shprh (NM_172937.2,2776-2794).
ggaggtctgcaaagaaaga

SEQ ID NO: 466955 - DNA, 19 bp, Mus musculus
  siRNA target sequence for Shprh (NM_172937.2,2779-2797).
ggtctgcaaagaaagatgt

SEQ ID NO: 466956 - DNA, 19 bp, Mus musculus
  siRNA target sequence for Shprh (NM_172937.2,2818-2836).
cacctcagactgaagaaat

SEQ ID NO: 466957 - DNA, 19 bp, Mus musculus
  siRNA target sequence for Shprh (NM_172937.2,2856-2874).
ccggtggagaggcatttct

SEQ ID NO: 466958 - DNA, 19 bp, Mus musculus
  siRNA target sequence for Shprh (NM_172937.2,2857-2875).
cggtggagaggcatttcta

SEQ ID NO: 466959 - DNA, 19 bp, Mus musculus
  siRNA target sequence for Shprh (NM_172937.2,2858-2876).
ggtggagaggcatttctat

SEQ ID NO: 466960 - DNA, 19 bp, Mus musculus
  siRNA target sequence for Shprh (NM_172937.2,3030-3048).
gctgttcgtggggaattct

SEQ ID NO: 466961 - DNA, 19 bp, Mus musculus
  siRNA target sequence for Shprh (NM_172937.2,3031-3049).
ctgttcgtggggaattctt

SEQ ID NO: 466962 - DNA, 19 bp, Mus musculus
  siRNA target sequence for Shprh (NM_172937.2,3129-3147).
gcccaccgacaactagttt

SEQ ID NO: 466963 - DNA, 19 bp, Mus musculus
  siRNA target sequence for Shprh (NM_172937.2,3131-3149).
ccaccgacaactagtttgt

SEQ ID NO: 466964 - DNA, 19 bp, Mus musculus
  siRNA target sequence for Shprh (NM_172937.2,3159-3177).
ggcttagcaggcattcaca

SEQ ID NO: 466965 - DNA, 19 bp, Mus musculus
  siRNA target sequence for Shprh (NM_172937.2,3165-3183).
gcaggcattcacatcatta

SEQ ID NO: 466966 - DNA, 19 bp, Mus musculus
  siRNA target sequence for Shprh (NM_172937.2,3166-3184).
caggcattcacatcattaa

SEQ ID NO: 466967 - DNA, 19 bp, Mus musculus
  siRNA target sequence for Shprh (NM_172937.2,3212-3230).
ctacagagaagtattacgt

SEQ ID NO: 466968 - DNA, 19 bp, Mus musculus
  siRNA target sequence for Shprh (NM_172937.2,3240-3258).
gagcacaaaggaaaactca

SEQ ID NO: 466969 - DNA, 19 bp, Mus musculus
  siRNA target sequence for Shprh (NM_172937.2,3281-3299).
gcatgccacacataactta

SEQ ID NO: 466970 - DNA, 19 bp, Mus musculus
  siRNA target sequence for Shprh (NM_172937.2,3282-3300).
catgccacacataacttaa

SEQ ID NO: 466971 - DNA, 19 bp, Mus musculus
  siRNA target sequence for Shprh (NM_172937.2,3375-3393).
cagctgcgagagcactata

SEQ ID NO: 466972 - DNA, 19 bp, Mus musculus
  siRNA target sequence for Shprh (NM_172937.2,3378-3396).
ctgcgagagcactatatga

SEQ ID NO: 466973 - DNA, 19 bp, Mus musculus
  siRNA target sequence for Shprh (NM_172937.2,3380-3398).
gcgagagcactatatgagt

SEQ ID NO: 466974 - DNA, 19 bp, Mus musculus
  siRNA target sequence for Shprh (NM_172937.2,3381-3399).
cgagagcactatatgagta

SEQ ID NO: 466975 - DNA, 19 bp, Mus musculus
  siRNA target sequence for Shprh (NM_172937.2,3382-3400).
gagagcactatatgagtaa

SEQ ID NO: 466976 - DNA, 19 bp, Mus musculus
  siRNA target sequence for Shprh (NM_172937.2,3384-3402).
gagcactatatgagtaagt

SEQ ID NO: 466977 - DNA, 19 bp, Mus musculus
  siRNA target sequence for Shprh (NM_172937.2,3386-3404).
gcactatatgagtaagtgt

SEQ ID NO: 466978 - DNA, 19 bp, Mus musculus
  siRNA target sequence for Shprh (NM_172937.2,3418-3436).
ccgaagcccagcaagcttt

SEQ ID NO: 466979 - DNA, 19 bp, Mus musculus
  siRNA target sequence for Shprh (NM_172937.2,3441-3459).
cctgtgcagcagtccatta

SEQ ID NO: 466980 - DNA, 19 bp, Mus musculus
  siRNA target sequence for Shprh (NM_172937.2,3492-3510).
ccttggtggctgaatgtaa

SEQ ID NO: 466981 - DNA, 19 bp, Mus musculus
  siRNA target sequence for Shprh (NM_172937.2,3493-3511).
cttggtggctgaatgtaat

SEQ ID NO: 466982 - DNA, 19 bp, Mus musculus
  siRNA target sequence for Shprh (NM_172937.2,3496-3514).
ggtggctgaatgtaatcca

SEQ ID NO: 466983 - DNA, 19 bp, Mus musculus
  siRNA target sequence for Shprh (NM_172937.2,3517-3535).
gagcaatggaattttctgt

SEQ ID NO: 466984 - DNA, 19 bp, Mus musculus
  siRNA target sequence for Shprh (NM_172937.2,3552-3570).
cagcgggtgcgaaatgaaa

SEQ ID NO: 466985 - DNA, 19 bp, Mus musculus
  siRNA target sequence for Shprh (NM_172937.2,3555-3573).
cgggtgcgaaatgaaataa

SEQ ID NO: 466986 - DNA, 19 bp, Mus musculus
  siRNA target sequence for Shprh (NM_172937.2,3558-3576).
gtgcgaaatgaaataagca

SEQ ID NO: 466987 - DNA, 19 bp, Mus musculus
  siRNA target sequence for Shprh (NM_172937.2,3567-3585).
gaaataagcagtaactaca

SEQ ID NO: 466988 - DNA, 19 bp, Mus musculus
  siRNA target sequence for Shprh (NM_172937.2,3631-3649).
gcagaggtcttcagttctt

SEQ ID NO: 466989 - DNA, 19 bp, Mus musculus
  siRNA target sequence for Shprh (NM_172937.2,3636-3654).
ggtcttcagttcttactta

SEQ ID NO: 466990 - DNA, 19 bp, Mus musculus
  siRNA target sequence for Shprh (NM_172937.2,3644-3662).
gttcttacttacaacacaa

SEQ ID NO: 466991 - DNA, 19 bp, Mus musculus
  siRNA target sequence for Shprh (NM_172937.2,3727-3745).
catcccgggaggtgattga

SEQ ID NO: 466992 - DNA, 19 bp, Mus musculus
  siRNA target sequence for Shprh (NM_172937.2,3786-3804).
ctcaactgctgcgtctttt

SEQ ID NO: 466993 - DNA, 19 bp, Mus musculus
  siRNA target sequence for Shprh (NM_172937.2,3788-3806).
caactgctgcgtcttttgt

SEQ ID NO: 466994 - DNA, 19 bp, Mus musculus
  siRNA target sequence for Shprh (NM_172937.2,3828-3846).
gagtatgaatcaaagctat

SEQ ID NO: 466995 - DNA, 19 bp, Mus musculus
  siRNA target sequence for Shprh (NM_172937.2,3830-3848).
gtatgaatcaaagctattt

SEQ ID NO: 466996 - DNA, 19 bp, Mus musculus
  siRNA target sequence for Shprh (NM_172937.2,3865-3883).
gccagactgcaatctttga

SEQ ID NO: 466997 - DNA, 19 bp, Mus musculus
  siRNA target sequence for Shprh (NM_172937.2,3866-3884).
ccagactgcaatctttgaa

SEQ ID NO: 466998 - DNA, 19 bp, Mus musculus
  siRNA target sequence for Shprh (NM_172937.2,3873-3891).
gcaatctttgaagaaatga

SEQ ID NO: 466999 - DNA, 19 bp, Mus musculus
  siRNA target sequence for Shprh (NM_172937.2,3903-3921).
gaaggacttgtagatgata

SEQ ID NO: 467000 - DNA, 19 bp, Mus musculus
  siRNA target sequence for Shprh (NM_172937.2,3958-3976).
gtgagacggagcgatctat

SEQ ID NO: 467001 - DNA, 19 bp, Mus musculus
  siRNA target sequence for Shprh (NM_172937.2,3962-3980).
gacggagcgatctatgaaa

SEQ ID NO: 467002 - DNA, 19 bp, Mus musculus
  siRNA target sequence for Shprh (NM_172937.2,3966-3984).
gagcgatctatgaaagcaa

SEQ ID NO: 467003 - DNA, 19 bp, Mus musculus
  siRNA target sequence for Shprh (NM_172937.2,3969-3987).
cgatctatgaaagcaatat

SEQ ID NO: 467004 - DNA, 19 bp, Mus musculus
  siRNA target sequence for Shprh (NM_172937.2,4000-4018).
gatcacataggtttgatgt

SEQ ID NO: 467005 - DNA, 19 bp, Mus musculus
  siRNA target sequence for Shprh (NM_172937.2,4005-4023).
cataggtttgatgttgaat

SEQ ID NO: 467006 - DNA, 19 bp, Mus musculus
  siRNA target sequence for Shprh (NM_172937.2,4100-4118).
gatgactctgagaaatcgt

SEQ ID NO: 467007 - DNA, 19 bp, Mus musculus
  siRNA target sequence for Shprh (NM_172937.2,4117-4135).
gtgtatctgctgttgatga

SEQ ID NO: 467008 - DNA, 19 bp, Mus musculus
  siRNA target sequence for Shprh (NM_172937.2,4145-4163).
ggctacagagcgactaaga

SEQ ID NO: 467009 - DNA, 19 bp, Mus musculus
  siRNA target sequence for Shprh (NM_172937.2,4195-4213).
cacccgtccatcacatcat

SEQ ID NO: 467010 - DNA, 19 bp, Mus musculus
  siRNA target sequence for Shprh (NM_172937.2,4198-4216).
ccgtccatcacatcattga

SEQ ID NO: 467011 - DNA, 19 bp, Mus musculus
  siRNA target sequence for Shprh (NM_172937.2,4199-4217).
cgtccatcacatcattgaa

SEQ ID NO: 467012 - DNA, 19 bp, Mus musculus
  siRNA target sequence for Shprh (NM_172937.2,4219-4237).
cacacgaggttgaacagaa

SEQ ID NO: 467013 - DNA, 19 bp, Mus musculus
  siRNA target sequence for Shprh (NM_172937.2,4224-4242).
gaggttgaacagaatcgta

SEQ ID NO: 467014 - DNA, 19 bp, Mus musculus
  siRNA target sequence for Shprh (NM_172937.2,4226-4244).
ggttgaacagaatcgtata

SEQ ID NO: 467015 - DNA, 19 bp, Mus musculus
  siRNA target sequence for Shprh (NM_172937.2,4227-4245).
gttgaacagaatcgtataa

SEQ ID NO: 467016 - DNA, 19 bp, Mus musculus
  siRNA target sequence for Shprh (NM_172937.2,4381-4399).
ctcgacagctgggaaaaca

SEQ ID NO: 467017 - DNA, 19 bp, Mus musculus
  siRNA target sequence for Shprh (NM_172937.2,4418-4436).
cggacactgcttctgtaat

SEQ ID NO: 467018 - DNA, 19 bp, Mus musculus
  siRNA target sequence for Shprh (NM_172937.2,4437-4455).
gaatgcacttcgattataa

SEQ ID NO: 467019 - DNA, 19 bp, Mus musculus
  siRNA target sequence for Shprh (NM_172937.2,4441-4459).
gcacttcgattataattga

SEQ ID NO: 467020 - DNA, 19 bp, Mus musculus
  siRNA target sequence for Shprh (NM_172937.2,4442-4460).
cacttcgattataattgaa

SEQ ID NO: 467021 - DNA, 19 bp, Mus musculus
  siRNA target sequence for Shprh (NM_172937.2,4447-4465).
cgattataattgaacagta

SEQ ID NO: 467022 - DNA, 19 bp, Mus musculus
  siRNA target sequence for Shprh (NM_172937.2,4479-4497).
catcgaagttccatcaagt

SEQ ID NO: 467023 - DNA, 19 bp, Mus musculus
  siRNA target sequence for Shprh (NM_172937.2,4516-4534).
ccacatcacacaaagaagt

SEQ ID NO: 467024 - DNA, 19 bp, Mus musculus
  siRNA target sequence for Shprh (NM_172937.2,4561-4579).
caaaccaagaggatgatat

SEQ ID NO: 467025 - DNA, 19 bp, Mus musculus
  siRNA target sequence for Shprh (NM_172937.2,4589-4607).
gggtagccattctacaaaa

SEQ ID NO: 467026 - DNA, 19 bp, Mus musculus
  siRNA target sequence for Shprh (NM_172937.2,4591-4609).
gtagccattctacaaaagt

SEQ ID NO: 467027 - DNA, 19 bp, Mus musculus
  siRNA target sequence for Shprh (NM_172937.2,4619-4637).
ggtcagaactctgatgaaa

SEQ ID NO: 467028 - DNA, 19 bp, Mus musculus
  siRNA target sequence for Shprh (NM_172937.2,4620-4638).
gtcagaactctgatgaaaa

SEQ ID NO: 467029 - DNA, 19 bp, Mus musculus
  siRNA target sequence for Shprh (NM_172937.2,4622-4640).
cagaactctgatgaaaata

SEQ ID NO: 467030 - DNA, 19 bp, Mus musculus
  siRNA target sequence for Shprh (NM_172937.2,4657-4675).
gggccaaagcgctcgtttt

SEQ ID NO: 467031 - DNA, 19 bp, Mus musculus
  siRNA target sequence for Shprh (NM_172937.2,4659-4677).
gccaaagcgctcgttttct

SEQ ID NO: 467032 - DNA, 19 bp, Mus musculus
  siRNA target sequence for Shprh (NM_172937.2,4661-4679).
caaagcgctcgttttctca

SEQ ID NO: 467033 - DNA, 19 bp, Mus musculus
  siRNA target sequence for Shprh (NM_172937.2,4676-4694).
ctcaacgtggcaagatgta

SEQ ID NO: 467034 - DNA, 19 bp, Mus musculus
  siRNA target sequence for Shprh (NM_172937.2,4681-4699).
cgtggcaagatgtattaga

SEQ ID NO: 467035 - DNA, 19 bp, Mus musculus
  siRNA target sequence for Shprh (NM_172937.2,4682-4700).
gtggcaagatgtattagat

SEQ ID NO: 467036 - DNA, 19 bp, Mus musculus
  siRNA target sequence for Shprh (NM_172937.2,4720-4738).
cggacaacaacatggaatt

SEQ ID NO: 467037 - DNA, 19 bp, Mus musculus
  siRNA target sequence for Shprh (NM_172937.2,4741-4759).
cacaaatcagtcgcattaa

SEQ ID NO: 467038 - DNA, 19 bp, Mus musculus
  siRNA target sequence for Shprh (NM_172937.2,4743-4761).
caaatcagtcgcattaaga

SEQ ID NO: 467039 - DNA, 19 bp, Mus musculus
  siRNA target sequence for Shprh (NM_172937.2,4772-4790).
gaacctctcagcgtttaaa

SEQ ID NO: 467040 - DNA, 19 bp, Mus musculus
  siRNA target sequence for Shprh (NM_172937.2,4778-4796).
ctcagcgtttaaatacgat

SEQ ID NO: 467041 - DNA, 19 bp, Mus musculus
  siRNA target sequence for Shprh (NM_172937.2,4793-4811).
cgatccccacatcaatatt

SEQ ID NO: 467042 - DNA, 19 bp, Mus musculus
  siRNA target sequence for Shprh (NM_172937.2,4823-4841).
cctgcacacaggctctaat

SEQ ID NO: 467043 - DNA, 19 bp, Mus musculus
  siRNA target sequence for Shprh (NM_172937.2,4827-4845).
cacacaggctctaatggat

SEQ ID NO: 467044 - DNA, 19 bp, Mus musculus
  siRNA target sequence for Shprh (NM_172937.2,4922-4940).
gagagtgcaccgaattgga

SEQ ID NO: 467045 - DNA, 19 bp, Mus musculus
  siRNA target sequence for Sim2 (NM_011377.1,1143-1161).
gcagactctagatggattt

SEQ ID NO: 467046 - DNA, 19 bp, Mus musculus
  siRNA target sequence for Sim2 (NM_011377.1,1148-1166).
ctctagatggatttgtgtt

SEQ ID NO: 467047 - DNA, 19 bp, Mus musculus
  siRNA target sequence for Sim2 (NM_011377.1,1180-1198).
gatggcaaaatcatgtata

SEQ ID NO: 467048 - DNA, 19 bp, Mus musculus
  siRNA target sequence for Sim2 (NM_011377.1,1206-1224).
gaccgcttctgtccattta

SEQ ID NO: 467049 - DNA, 19 bp, Mus musculus
  siRNA target sequence for Sim2 (NM_011377.1,1242-1260).
gctcacaggcaacagtatt

SEQ ID NO: 467050 - DNA, 19 bp, Mus musculus
  siRNA target sequence for Sim2 (NM_011377.1,1243-1261).
ctcacaggcaacagtattt

SEQ ID NO: 467051 - DNA, 19 bp, Mus musculus
  siRNA target sequence for Sim2 (NM_011377.1,1245-1263).
cacaggcaacagtatttat

SEQ ID NO: 467052 - DNA, 19 bp, Mus musculus
  siRNA target sequence for Sim2 (NM_011377.1,1249-1267).
ggcaacagtatttatgaat

SEQ ID NO: 467053 - DNA, 19 bp, Mus musculus
  siRNA target sequence for Sim2 (NM_011377.1,1361-1379).
ggtctttctttcttcgaat

SEQ ID NO: 467054 - DNA, 19 bp, Mus musculus
  siRNA target sequence for Sim2 (NM_011377.1,1383-1401).
gtgcgtcttggcaaaacga

SEQ ID NO: 467055 - DNA, 19 bp, Mus musculus
  siRNA target sequence for Sim2 (NM_011377.1,1385-1403).
gcgtcttggcaaaacgaaa

SEQ ID NO: 467056 - DNA, 19 bp, Mus musculus
  siRNA target sequence for Sim2 (NM_011377.1,1442-1460).
gcagcggctacctaaagat

SEQ ID NO: 467057 - DNA, 19 bp, Mus musculus
  siRNA target sequence for Sim2 (NM_011377.1,1657-1675).
ccacaagacctgatcgaaa

SEQ ID NO: 467058 - DNA, 19 bp, Mus musculus
  siRNA target sequence for Sim2 (NM_011377.1,1750-1768).
ggccaggtcaccaccaaat

SEQ ID NO: 467059 - DNA, 19 bp, Mus musculus
  siRNA target sequence for Sim2 (NM_011377.1,1753-1771).
caggtcaccaccaaatact

SEQ ID NO: 467060 - DNA, 19 bp, Mus musculus
  siRNA target sequence for Sim2 (NM_011377.1,1859-1877).
gcatcgtgagtgtcaatta

SEQ ID NO: 467061 - DNA, 19 bp, Mus musculus
  siRNA target sequence for Sim2 (NM_011377.1,1863-1881).
cgtgagtgtcaattatgtt

SEQ ID NO: 467062 - DNA, 19 bp, Mus musculus
  siRNA target sequence for Sim2 (NM_011377.1,1924-1942).
caggtatccacctctaagt

SEQ ID NO: 467063 - DNA, 19 bp, Mus musculus
  siRNA target sequence for Sim2 (NM_011377.1,1996-2014).
gctaaacccaaaaacacaa

SEQ ID NO: 467064 - DNA, 19 bp, Mus musculus
  siRNA target sequence for Sim2 (NM_011377.1,2155-2173).
cagaagccagcgaccttat

SEQ ID NO: 467065 - DNA, 19 bp, Mus musculus
  siRNA target sequence for Sim2 (NM_011377.1,2157-2175).
gaagccagcgaccttatat

SEQ ID NO: 467066 - DNA, 19 bp, Mus musculus
  siRNA target sequence for Sim2 (NM_011377.1,2191-2209).
ctccccttctcctaccatt

SEQ ID NO: 467067 - DNA, 19 bp, Mus musculus
  siRNA target sequence for Sim2 (NM_011377.1,2379-2397).
cacgtcatcgccagctaaa

SEQ ID NO: 467068 - DNA, 19 bp, Mus musculus
  siRNA target sequence for Sim2 (NM_011377.1,2381-2399).
cgtcatcgccagctaaaaa

SEQ ID NO: 467069 - DNA, 19 bp, Mus musculus
  siRNA target sequence for Sim2 (NM_011377.1,2384-2402).
catcgccagctaaaaacct

SEQ ID NO: 467070 - DNA, 19 bp, Mus musculus
  siRNA target sequence for Sim2 (NM_011377.1,2438-2456).
gtcttgtgccaaactatga

SEQ ID NO: 467071 - DNA, 19 bp, Mus musculus
  siRNA target sequence for Sim2 (NM_011377.1,2578-2596).
gggagagcccgctgtatgt

SEQ ID NO: 467072 - DNA, 19 bp, Mus musculus
  siRNA target sequence for Sim2 (NM_011377.1,2913-2931).
ggaggggcgaactgtatat

SEQ ID NO: 467073 - DNA, 19 bp, Mus musculus
  siRNA target sequence for Sim2 (NM_011377.1,2916-2934).
ggggcgaactgtatatgca

SEQ ID NO: 467074 - DNA, 19 bp, Mus musculus
  siRNA target sequence for Sim2 (NM_011377.1,2924-2942).
ctgtatatgcacgatataa

SEQ ID NO: 467075 - DNA, 19 bp, Mus musculus
  siRNA target sequence for Sim2 (NM_011377.1,2926-2944).
gtatatgcacgatataaat

SEQ ID NO: 467076 - DNA, 19 bp, Mus musculus
  siRNA target sequence for Sim2 (NM_011377.1,2932-2950).
gcacgatataaattaattt

SEQ ID NO: 467077 - DNA, 19 bp, Mus musculus
  siRNA target sequence for Sim2 (NM_011377.1,2979-2997).
ccgcagccgacttttagat

SEQ ID NO: 467078 - DNA, 19 bp, Mus musculus
  siRNA target sequence for Sim2 (NM_011377.1,2980-2998).
cgcagccgacttttagatt

SEQ ID NO: 467079 - DNA, 19 bp, Mus musculus
  siRNA target sequence for Sim2 (NM_011377.1,2981-2999).
gcagccgacttttagattt

SEQ ID NO: 467080 - DNA, 19 bp, Mus musculus
  siRNA target sequence for Sim2 (NM_011377.1,2982-3000).
cagccgacttttagatttt

SEQ ID NO: 467081 - DNA, 19 bp, Mus musculus
  siRNA target sequence for Sirt1 (NM_019812.1,469-487).
ccgatggactcctcactaa

SEQ ID NO: 467082 - DNA, 19 bp, Mus musculus
  siRNA target sequence for Sirt1 (NM_019812.1,470-488).
cgatggactcctcactaat

SEQ ID NO: 467083 - DNA, 19 bp, Mus musculus
  siRNA target sequence for Sirt1 (NM_019812.1,563-581).
gcggataggtccatatact

SEQ ID NO: 467084 - DNA, 19 bp, Mus musculus
  siRNA target sequence for Sirt1 (NM_019812.1,564-582).
cggataggtccatatactt

SEQ ID NO: 467085 - DNA, 19 bp, Mus musculus
  siRNA target sequence for Sirt1 (NM_019812.1,565-583).
ggataggtccatatacttt

SEQ ID NO: 467086 - DNA, 19 bp, Mus musculus
  siRNA target sequence for Sirt1 (NM_019812.1,566-584).
gataggtccatatactttt

SEQ ID NO: 467087 - DNA, 19 bp, Mus musculus
  siRNA target sequence for Sirt1 (NM_019812.1,607-625).
gcaccgatcctcgaacaat

SEQ ID NO: 467088 - DNA, 19 bp, Mus musculus
  siRNA target sequence for Sirt1 (NM_019812.1,608-626).
caccgatcctcgaacaatt

SEQ ID NO: 467089 - DNA, 19 bp, Mus musculus
  siRNA target sequence for Sirt1 (NM_019812.1,610-628).
ccgatcctcgaacaattct

SEQ ID NO: 467090 - DNA, 19 bp, Mus musculus
  siRNA target sequence for Sirt1 (NM_019812.1,611-629).
cgatcctcgaacaattctt

SEQ ID NO: 467091 - DNA, 19 bp, Mus musculus
  siRNA target sequence for Sirt1 (NM_019812.1,612-630).
gatcctcgaacaattctta

SEQ ID NO: 467092 - DNA, 19 bp, Mus musculus
  siRNA target sequence for Sirt1 (NM_019812.1,658-676).
cacctgagctggatgatat

SEQ ID NO: 467093 - DNA, 19 bp, Mus musculus
  siRNA target sequence for Sirt1 (NM_019812.1,679-697).
cgctgtggcagattgttat

SEQ ID NO: 467094 - DNA, 19 bp, Mus musculus
  siRNA target sequence for Sirt1 (NM_019812.1,683-701).
gtggcagattgttattaat

SEQ ID NO: 467095 - DNA, 19 bp, Mus musculus
  siRNA target sequence for Sirt1 (NM_019812.1,689-707).
gattgttattaatatcctt

SEQ ID NO: 467096 - DNA, 19 bp, Mus musculus
  siRNA target sequence for Sirt1 (NM_019812.1,714-732).
ccaccaaagcggaaaaaaa

SEQ ID NO: 467097 - DNA, 19 bp, Mus musculus
  siRNA target sequence for Sirt1 (NM_019812.1,776-794).
ggagtgtaaaaagataata

SEQ ID NO: 467098 - DNA, 19 bp, Mus musculus
  siRNA target sequence for Sirt1 (NM_019812.1,844-862).
gatcaagagacggtatcta

SEQ ID NO: 467099 - DNA, 19 bp, Mus musculus
  siRNA target sequence for Sirt1 (NM_019812.1,899-917).
ccctcaagccatgtttgat

SEQ ID NO: 467100 - DNA, 19 bp, Mus musculus
  siRNA target sequence for Sirt1 (NM_019812.1,901-919).
ctcaagccatgtttgatat

SEQ ID NO: 467101 - DNA, 19 bp, Mus musculus
  siRNA target sequence for Sirt1 (NM_019812.1,939-957).
ccaagaccattcttcaagt

SEQ ID NO: 467102 - DNA, 19 bp, Mus musculus
  siRNA target sequence for Sirt1 (NM_019812.1,945-963).
ccattcttcaagtttgcaa

SEQ ID NO: 467103 - DNA, 19 bp, Mus musculus
  siRNA target sequence for Sirt1 (NM_019812.1,1129-1147).
catcttgcctgatttgtaa

SEQ ID NO: 467104 - DNA, 19 bp, Mus musculus
  siRNA target sequence for Sirt1 (NM_019812.1,1430-1448).
gcctcatctacattttgat

SEQ ID NO: 467105 - DNA, 19 bp, Mus musculus
  siRNA target sequence for Sirt1 (NM_019812.1,1462-1480).
gagactgcgatgttataat

SEQ ID NO: 467106 - DNA, 19 bp, Mus musculus
  siRNA target sequence for Sirt1 (NM_019812.1,1464-1482).
gactgcgatgttataatta

SEQ ID NO: 467107 - DNA, 19 bp, Mus musculus
  siRNA target sequence for Sirt1 (NM_019812.1,1466-1484).
ctgcgatgttataattaat

SEQ ID NO: 467108 - DNA, 19 bp, Mus musculus
  siRNA target sequence for Sirt1 (NM_019812.1,1468-1486).
gcgatgttataattaatga

SEQ ID NO: 467109 - DNA, 19 bp, Mus musculus
  siRNA target sequence for Sirt1 (NM_019812.1,1470-1488).
gatgttataattaatgagt

SEQ ID NO: 467110 - DNA, 19 bp, Mus musculus
  siRNA target sequence for Sirt1 (NM_019812.1,1580-1598).
ggaattggttcatttatca

SEQ ID NO: 467111 - DNA, 19 bp, Mus musculus
  siRNA target sequence for Sirt1 (NM_019812.1,1689-1707).
gtagaccaagcaacaaaca

SEQ ID NO: 467112 - DNA, 19 bp, Mus musculus
  siRNA target sequence for Sirt1 (NM_019812.1,1692-1710).
gaccaagcaacaaacaaca

SEQ ID NO: 467113 - DNA, 19 bp, Mus musculus
  siRNA target sequence for Sirt1 (NM_019812.1,1834-1852).
gtactgcagacaaaaatga

SEQ ID NO: 467114 - DNA, 19 bp, Mus musculus
  siRNA target sequence for Sirt1 (NM_019812.1,1903-1921).
caaaggagcagattagtaa

SEQ ID NO: 467115 - DNA, 19 bp, Mus musculus
  siRNA target sequence for Sirt1 (NM_019812.1,1922-1940).
gcggcttgagggtaatcaa

SEQ ID NO: 467116 - DNA, 19 bp, Mus musculus
  siRNA target sequence for Sirt1 (NM_019812.1,1923-1941).
cggcttgagggtaatcaat

SEQ ID NO: 467117 - DNA, 19 bp, Mus musculus
  siRNA target sequence for Sirt1 (NM_019812.1,1924-1942).
ggcttgagggtaatcaata

SEQ ID NO: 467118 - DNA, 19 bp, Mus musculus
  siRNA target sequence for Sirt1 (NM_019812.1,1933-1951).
gtaatcaatacctgtttgt

SEQ ID NO: 467119 - DNA, 19 bp, Mus musculus
  siRNA target sequence for Sirt1 (NM_019812.1,1946-1964).
gtttgtaccaccaaatcgt

SEQ ID NO: 467120 - DNA, 19 bp, Mus musculus
  siRNA target sequence for Sirt1 (NM_019812.1,1953-1971).
ccaccaaatcgttacatat

SEQ ID NO: 467121 - DNA, 19 bp, Mus musculus
  siRNA target sequence for Sirt1 (NM_019812.1,1954-1972).
caccaaatcgttacatatt

SEQ ID NO: 467122 - DNA, 19 bp, Mus musculus
  siRNA target sequence for Sirt1 (NM_019812.1,1974-1992).
cacggtgctgaggtatact

SEQ ID NO: 467123 - DNA, 19 bp, Mus musculus
  siRNA target sequence for Sirt1 (NM_019812.1,1976-1994).
cggtgctgaggtatactca

SEQ ID NO: 467124 - DNA, 19 bp, Mus musculus
  siRNA target sequence for Sirt1 (NM_019812.1,2007-2025).
gacgtcttgtcctctagtt

SEQ ID NO: 467125 - DNA, 19 bp, Mus musculus
  siRNA target sequence for Sirt2 (NM_022432.2,331-349).
gccgcaaggtcatctgttt

SEQ ID NO: 467126 - DNA, 19 bp, Mus musculus
  siRNA target sequence for Sirt2 (NM_022432.2,403-421).
ccactggcctctatgcaaa

SEQ ID NO: 467127 - DNA, 19 bp, Mus musculus
  siRNA target sequence for Sirt2 (NM_022432.2,538-556).
caaccatctgccactactt

SEQ ID NO: 467128 - DNA, 19 bp, Mus musculus
  siRNA target sequence for Sirt2 (NM_022432.2,541-559).
ccatctgccactacttcat

SEQ ID NO: 467129 - DNA, 19 bp, Mus musculus
  siRNA target sequence for Sirt2 (NM_022432.2,592-610).
gctgctacacgcagaacat

SEQ ID NO: 467130 - DNA, 19 bp, Mus musculus
  siRNA target sequence for Sirt2 (NM_022432.2,663-681).
cacggcaccttctacacat

SEQ ID NO: 467131 - DNA, 19 bp, Mus musculus
  siRNA target sequence for Sirt2 (NM_022432.2,697-715).
cctcctgcagaaaagaata

SEQ ID NO: 467132 - DNA, 19 bp, Mus musculus
  siRNA target sequence for Sirt2 (NM_022432.2,716-734).
cacgatgggctggatgaaa

SEQ ID NO: 467133 - DNA, 19 bp, Mus musculus
  siRNA target sequence for Sirt2 (NM_022432.2,819-837).
cttccaccgcgcttcttct

SEQ ID NO: 467134 - DNA, 19 bp, Mus musculus
  siRNA target sequence for Sirt3 (NM_022433.1,474-492).
cactacaggcccaatgtca

SEQ ID NO: 467135 - DNA, 19 bp, Mus musculus
  siRNA target sequence for Sirt3 (NM_022433.1,530-548).
gcttctgcggctctataca

SEQ ID NO: 467136 - DNA, 19 bp, Mus musculus
  siRNA target sequence for Sirt3 (NM_022433.1,538-556).
ggctctatacacagaacat

SEQ ID NO: 467137 - DNA, 19 bp, Mus musculus
  siRNA target sequence for Sirt3 (NM_022433.1,606-624).
gcccacgggacctttgtaa

SEQ ID NO: 467138 - DNA, 19 bp, Mus musculus
  siRNA target sequence for Sirt3 (NM_022433.1,608-626).
ccacgggacctttgtaaca

SEQ ID NO: 467139 - DNA, 19 bp, Mus musculus
  siRNA target sequence for Sirt3 (NM_022433.1,713-731).
ctgtactggcgttgtgaaa

SEQ ID NO: 467140 - DNA, 19 bp, Mus musculus
  siRNA target sequence for Sirt3 (NM_022433.1,766-784).
caaggttcctactccatat

SEQ ID NO: 467141 - DNA, 19 bp, Mus musculus
  siRNA target sequence for Sirt3 (NM_022433.1,881-899).
gccccgactgctcatcaat

SEQ ID NO: 467142 - DNA, 19 bp, Mus musculus
  siRNA target sequence for Sirt3 (NM_022433.1,928-946).
gtcctcgaaggaaagatgt

SEQ ID NO: 467143 - DNA, 19 bp, Mus musculus
  siRNA target sequence for Sirt3 (NM_022433.1,950-968).
ccagctaggggatgtagtt

SEQ ID NO: 467144 - DNA, 19 bp, Mus musculus
  siRNA target sequence for Sirt3 (NM_022433.1,995-1013).
cctggggtggacacaagaa

SEQ ID NO: 467145 - DNA, 19 bp, Mus musculus
  siRNA target sequence for Sirt3 (NM_022433.1,1008-1026).
caagaactgctggatctta

SEQ ID NO: 467146 - DNA, 19 bp, Mus musculus
  siRNA target sequence for Sirt7 (NM_153056.1,448-466).
gagcatcacccgtttgcat

SEQ ID NO: 467147 - DNA, 19 bp, Mus musculus
  siRNA target sequence for Sirt7 (NM_153056.1,551-569).
gagctccatgggaatatgt

SEQ ID NO: 467148 - DNA, 19 bp, Mus musculus
  siRNA target sequence for Sirt7 (NM_153056.1,592-610).
catccctaacagagagtat

SEQ ID NO: 467149 - DNA, 19 bp, Mus musculus
  siRNA target sequence for Sirt7 (NM_153056.1,595-613).
ccctaacagagagtatgta

SEQ ID NO: 467150 - DNA, 19 bp, Mus musculus
  siRNA target sequence for Sirt7 (NM_153056.1,760-778).
gaccgaggctgctagcaaa

SEQ ID NO: 467151 - DNA, 19 bp, Mus musculus
  siRNA target sequence for Sirt7 (NM_153056.1,804-822).
ccagcttgaaggtactaaa

SEQ ID NO: 467152 - DNA, 19 bp, Mus musculus
  siRNA target sequence for Sirt7 (NM_153056.1,861-879).
gccgtcgacccaaactcta

SEQ ID NO: 467153 - DNA, 19 bp, Mus musculus
  siRNA target sequence for Sirt7 (NM_153056.1,864-882).
gtcgacccaaactctacat

SEQ ID NO: 467154 - DNA, 19 bp, Mus musculus
  siRNA target sequence for Sirt7 (NM_153056.1,936-954).
ggaagtgtgatgatgtcat

SEQ ID NO: 467155 - DNA, 19 bp, Mus musculus
  siRNA target sequence for Sirt7 (NM_153056.1,955-973).
gcaactcctcatgaatgaa

SEQ ID NO: 467156 - DNA, 19 bp, Mus musculus
  siRNA target sequence for Sirt7 (NM_153056.1,1172-1190).
gccaagcgtgcaaaaagga

SEQ ID NO: 467157 - DNA, 19 bp, Mus musculus
  siRNA target sequence for Sirt7 (NM_153056.1,1173-1191).
ccaagcgtgcaaaaaggaa

SEQ ID NO: 467158 - DNA, 19 bp, Mus musculus
  siRNA target sequence for Smap1 (NM_028534.1,258-276).
cgatgggcttcctggaata

SEQ ID NO: 467159 - DNA, 19 bp, Mus musculus
  siRNA target sequence for Smap1 (NM_028534.1,282-300).
gtgtttatttgcatcagat

SEQ ID NO: 467160 - DNA, 19 bp, Mus musculus
  siRNA target sequence for Smap1 (NM_028534.1,393-411).
caagatatgggaaatacta

SEQ ID NO: 467161 - DNA, 19 bp, Mus musculus
  siRNA target sequence for Smap1 (NM_028534.1,434-452).
caatcttccagagaacttt

SEQ ID NO: 467162 - DNA, 19 bp, Mus musculus
  siRNA target sequence for Smap1 (NM_028534.1,468-486).
gatcaagcagtagagtttt

SEQ ID NO: 467163 - DNA, 19 bp, Mus musculus
  siRNA target sequence for Smap1 (NM_028534.1,480-498).
gagtttttcatcagagata

SEQ ID NO: 467164 - DNA, 19 bp, Mus musculus
  siRNA target sequence for Smap1 (NM_028534.1,488-506).
catcagagataaatatgaa

SEQ ID NO: 467165 - DNA, 19 bp, Mus musculus
  siRNA target sequence for Smap1 (NM_028534.1,531-549).
gcaatagctatcacaaata

SEQ ID NO: 467166 - DNA, 19 bp, Mus musculus
  siRNA target sequence for Smap1 (NM_028534.1,602-620).
gcctgcaaaaccactaaca

SEQ ID NO: 467167 - DNA, 19 bp, Mus musculus
  siRNA target sequence for Smap1 (NM_028534.1,695-713).
gcccactattgatcttcta

SEQ ID NO: 467168 - DNA, 19 bp, Mus musculus
  siRNA target sequence for Smap1 (NM_028534.1,735-753).
gcacccgtgaccaatggaa

SEQ ID NO: 467169 - DNA, 19 bp, Mus musculus
  siRNA target sequence for Smap1 (NM_028534.1,736-754).
cacccgtgaccaatggaaa

SEQ ID NO: 467170 - DNA, 19 bp, Mus musculus
  siRNA target sequence for Smap1 (NM_028534.1,769-787).
cagccctgagtgatgatct

SEQ ID NO: 467171 - DNA, 19 bp, Mus musculus
  siRNA target sequence for Smap1 (NM_028534.1,791-809).
catttttggaccaatgatt

SEQ ID NO: 467172 - DNA, 19 bp, Mus musculus
  siRNA target sequence for Smap1 (NM_028534.1,878-896).
cctgtctaccgttacatct

SEQ ID NO: 467173 - DNA, 19 bp, Mus musculus
  siRNA target sequence for Smap1 (NM_028534.1,909-927).
ctgtttactgagcaaacta

SEQ ID NO: 467174 - DNA, 19 bp, Mus musculus
  siRNA target sequence for Smap1 (NM_028534.1,911-929).
gtttactgagcaaactaca

SEQ ID NO: 467175 - DNA, 19 bp, Mus musculus
  siRNA target sequence for Smap1 (NM_028534.1,1019-1037).
gtttatgggacccacaaat

SEQ ID NO: 467176 - DNA, 19 bp, Mus musculus
  siRNA target sequence for Smap1 (NM_028534.1,1025-1043).
gggacccacaaatatacca

SEQ ID NO: 467177 - DNA, 19 bp, Mus musculus
  siRNA target sequence for Smap1 (NM_028534.1,1026-1044).
ggacccacaaatataccat

SEQ ID NO: 467178 - DNA, 19 bp, Mus musculus
  siRNA target sequence for Smap1 (NM_028534.1,1029-1047).
cccacaaatataccattta

SEQ ID NO: 467179 - DNA, 19 bp, Mus musculus
  siRNA target sequence for Smap1 (NM_028534.1,1102-1120).
ctgcagctcccggtcttat

SEQ ID NO: 467180 - DNA, 19 bp, Mus musculus
  siRNA target sequence for Smap1 (NM_028534.1,1107-1125).
gctcccggtcttataggaa

SEQ ID NO: 467181 - DNA, 19 bp, Mus musculus
  siRNA target sequence for Smap1 (NM_028534.1,1108-1126).
ctcccggtcttataggaaa

SEQ ID NO: 467182 - DNA, 19 bp, Mus musculus
  siRNA target sequence for Smap1 (NM_028534.1,1110-1128).
cccggtcttataggaaata

SEQ ID NO: 467183 - DNA, 19 bp, Mus musculus
  siRNA target sequence for Smap1 (NM_028534.1,1111-1129).
ccggtcttataggaaatat

SEQ ID NO: 467184 - DNA, 19 bp, Mus musculus
  siRNA target sequence for Smap1 (NM_028534.1,1240-1258).
gaggaatggtgggacaaat

SEQ ID NO: 467185 - DNA, 19 bp, Mus musculus
  siRNA target sequence for Smap1 (NM_028534.1,1260-1278).
ggtgcaccacagagtaagt

SEQ ID NO: 467186 - DNA, 19 bp, Mus musculus
  siRNA target sequence for Smarca1 (NM_053123.3,179-197).
ccacagtcgtggttgtaga

SEQ ID NO: 467187 - DNA, 19 bp, Mus musculus
  siRNA target sequence for Smarca1 (NM_053123.3,318-336).
caaacttgctgctaaagct

SEQ ID NO: 467188 - DNA, 19 bp, Mus musculus
  siRNA target sequence for Smarca1 (NM_053123.3,329-347).
ctaaagcttccaaatctga

SEQ ID NO: 467189 - DNA, 19 bp, Mus musculus
  siRNA target sequence for Smarca1 (NM_053123.3,381-399).
ggtaaatatgcccttgaaa

SEQ ID NO: 467190 - DNA, 19 bp, Mus musculus
  siRNA target sequence for Smarca1 (NM_053123.3,400-418).
gcagaccgcgcaaagagat

SEQ ID NO: 467191 - DNA, 19 bp, Mus musculus
  siRNA target sequence for Smarca1 (NM_053123.3,401-419).
cagaccgcgcaaagagatt

SEQ ID NO: 467192 - DNA, 19 bp, Mus musculus
  siRNA target sequence for Smarca1 (NM_053123.3,407-425).
gcgcaaagagatttgagtt

SEQ ID NO: 467193 - DNA, 19 bp, Mus musculus
  siRNA target sequence for Smarca1 (NM_053123.3,430-448).
ctgaagcagacggaacttt

SEQ ID NO: 467194 - DNA, 19 bp, Mus musculus
  siRNA target sequence for Smarca1 (NM_053123.3,485-503).
caacatctcctctcaacat

SEQ ID NO: 467195 - DNA, 19 bp, Mus musculus
  siRNA target sequence for Smarca1 (NM_053123.3,511-529).
gctcgtcctcgagtaaaga

SEQ ID NO: 467196 - DNA, 19 bp, Mus musculus
  siRNA target sequence for Smarca1 (NM_053123.3,512-530).
ctcgtcctcgagtaaagaa

SEQ ID NO: 467197 - DNA, 19 bp, Mus musculus
  siRNA target sequence for Smarca1 (NM_053123.3,515-533).
gtcctcgagtaaagaaaga

SEQ ID NO: 467198 - DNA, 19 bp, Mus musculus
  siRNA target sequence for Smarca1 (NM_053123.3,518-536).
ctcgagtaaagaaagatga

SEQ ID NO: 467199 - DNA, 19 bp, Mus musculus
  siRNA target sequence for Smarca1 (NM_053123.3,549-567).
gatttccgttggagactat

SEQ ID NO: 467200 - DNA, 19 bp, Mus musculus
  siRNA target sequence for Smarca1 (NM_053123.3,570-588).
ccacaggcgtacagaacaa

SEQ ID NO: 467201 - DNA, 19 bp, Mus musculus
  siRNA target sequence for Smarca1 (NM_053123.3,573-591).
caggcgtacagaacaagaa

SEQ ID NO: 467202 - DNA, 19 bp, Mus musculus
  siRNA target sequence for Smarca1 (NM_053123.3,575-593).
ggcgtacagaacaagaaga

SEQ ID NO: 467203 - DNA, 19 bp, Mus musculus
  siRNA target sequence for Smarca1 (NM_053123.3,615-633).
gagtaggaaaacatcgaat

SEQ ID NO: 467204 - DNA, 19 bp, Mus musculus
  siRNA target sequence for Smarca1 (NM_053123.3,629-647).
cgaatgtgtgtgtcagatt

SEQ ID NO: 467205 - DNA, 19 bp, Mus musculus
  siRNA target sequence for Smarca1 (NM_053123.3,648-666).
cgaggtctccccttcctat

SEQ ID NO: 467206 - DNA, 19 bp, Mus musculus
  siRNA target sequence for Smarca1 (NM_053123.3,673-691).
ggaggaccgctgagagatt

SEQ ID NO: 467207 - DNA, 19 bp, Mus musculus
  siRNA target sequence for Smarca1 (NM_053123.3,674-692).
gaggaccgctgagagatta

SEQ ID NO: 467208 - DNA, 19 bp, Mus musculus
  siRNA target sequence for Smarca1 (NM_053123.3,677-695).
gaccgctgagagattatca

SEQ ID NO: 467209 - DNA, 19 bp, Mus musculus
  siRNA target sequence for Smarca1 (NM_053123.3,680-698).
cgctgagagattatcagat

SEQ ID NO: 467210 - DNA, 19 bp, Mus musculus
  siRNA target sequence for Smarca1 (NM_053123.3,726-744).
gtatgaaaatggagtcaat

SEQ ID NO: 467211 - DNA, 19 bp, Mus musculus
  siRNA target sequence for Smarca1 (NM_053123.3,773-791).
ggaagactttacaaaccat

SEQ ID NO: 467212 - DNA, 19 bp, Mus musculus
  siRNA target sequence for Smarca1 (NM_053123.3,774-792).
gaagactttacaaaccatt

SEQ ID NO: 467213 - DNA, 19 bp, Mus musculus
  siRNA target sequence for Smarca1 (NM_053123.3,830-848).
ctggaccccacatggtttt

SEQ ID NO: 467214 - DNA, 19 bp, Mus musculus
  siRNA target sequence for Smarca1 (NM_053123.3,833-851).
gaccccacatggttttagt

SEQ ID NO: 467215 - DNA, 19 bp, Mus musculus
  siRNA target sequence for Smarca1 (NM_053123.3,853-871).
cccaagtctactttacata

SEQ ID NO: 467216 - DNA, 19 bp, Mus musculus
  siRNA target sequence for Smarca1 (NM_053123.3,854-872).
ccaagtctactttacataa

SEQ ID NO: 467217 - DNA, 19 bp, Mus musculus
  siRNA target sequence for Smarca1 (NM_053123.3,876-894).
gatgaatgaatttaaacga

SEQ ID NO: 467218 - DNA, 19 bp, Mus musculus
  siRNA target sequence for Smarca1 (NM_053123.3,901-919).
ccatctctccgtgttattt

SEQ ID NO: 467219 - DNA, 19 bp, Mus musculus
  siRNA target sequence for Smarca1 (NM_053123.3,909-927).
ccgtgttatttgtttcgtt

SEQ ID NO: 467220 - DNA, 19 bp, Mus musculus
  siRNA target sequence for Smarca1 (NM_053123.3,937-955).
gatgtgagagcagctttta

SEQ ID NO: 467221 - DNA, 19 bp, Mus musculus
  siRNA target sequence for Smarca1 (NM_053123.3,942-960).
gagagcagcttttattcgt

SEQ ID NO: 467222 - DNA, 19 bp, Mus musculus
  siRNA target sequence for Smarca1 (NM_053123.3,950-968).
cttttattcgtgatgaaat

SEQ ID NO: 467223 - DNA, 19 bp, Mus musculus
  siRNA target sequence for Smarca1 (NM_053123.3,992-1010).
gcgtgacttcttatgagat

SEQ ID NO: 467224 - DNA, 19 bp, Mus musculus
  siRNA target sequence for Smarca1 (NM_053123.3,1001-1019).
cttatgagatggtaattaa

SEQ ID NO: 467225 - DNA, 19 bp, Mus musculus
  siRNA target sequence for Smarca1 (NM_053123.3,1041-1059).
gtttcactggcgatactta

SEQ ID NO: 467226 - DNA, 19 bp, Mus musculus
  siRNA target sequence for Smarca1 (NM_053123.3,1045-1063).
cactggcgatacttagtca

SEQ ID NO: 467227 - DNA, 19 bp, Mus musculus
  siRNA target sequence for Smarca1 (NM_053123.3,1117-1135).
cgtgagttcaagtcaacta

SEQ ID NO: 467228 - DNA, 19 bp, Mus musculus
  siRNA target sequence for Smarca1 (NM_053123.3,1118-1136).
gtgagttcaagtcaactaa

SEQ ID NO: 467229 - DNA, 19 bp, Mus musculus
  siRNA target sequence for Smarca1 (NM_053123.3,1128-1146).
gtcaactaatcgcttactt

SEQ ID NO: 467230 - DNA, 19 bp, Mus musculus
  siRNA target sequence for Smarca1 (NM_053123.3,1130-1148).
caactaatcgcttacttct

SEQ ID NO: 467231 - DNA, 19 bp, Mus musculus
  siRNA target sequence for Smarca1 (NM_053123.3,1182-1200).
gctctgggcattacttaat

SEQ ID NO: 467232 - DNA, 19 bp, Mus musculus
  siRNA target sequence for Smarca1 (NM_053123.3,1183-1201).
ctctgggcattacttaatt

SEQ ID NO: 467233 - DNA, 19 bp, Mus musculus
  siRNA target sequence for Smarca1 (NM_053123.3,1244-1262).
cttggtttgacactaaaaa

SEQ ID NO: 467234 - DNA, 19 bp, Mus musculus
  siRNA target sequence for Smarca1 (NM_053123.3,1328-1346).
ggataaaaaccgatgtaga

SEQ ID NO: 467235 - DNA, 19 bp, Mus musculus
  siRNA target sequence for Smarca1 (NM_053123.3,1354-1372).
ctgcctcctaagaaggaaa

SEQ ID NO: 467236 - DNA, 19 bp, Mus musculus
  siRNA target sequence for Smarca1 (NM_053123.3,1402-1420).
caacgagaatggtatacaa

SEQ ID NO: 467237 - DNA, 19 bp, Mus musculus
  siRNA target sequence for Smarca1 (NM_053123.3,1405-1423).
cgagaatggtatacaaaaa

SEQ ID NO: 467238 - DNA, 19 bp, Mus musculus
  siRNA target sequence for Smarca1 (NM_053123.3,1412-1430).
ggtatacaaaaattctgat

SEQ ID NO: 467239 - DNA, 19 bp, Mus musculus
  siRNA target sequence for Smarca1 (NM_053123.3,1470-1488).
caagatgcgactcttgaat

SEQ ID NO: 467240 - DNA, 19 bp, Mus musculus
  siRNA target sequence for Smarca1 (NM_053123.3,1473-1491).
gatgcgactcttgaatatt

SEQ ID NO: 467241 - DNA, 19 bp, Mus musculus
  siRNA target sequence for Smarca1 (NM_053123.3,1477-1495).
cgactcttgaatattctga

SEQ ID NO: 467242 - DNA, 19 bp, Mus musculus
  siRNA target sequence for Smarca1 (NM_053123.3,1478-1496).
gactcttgaatattctgat

SEQ ID NO: 467243 - DNA, 19 bp, Mus musculus
  siRNA target sequence for Smarca1 (NM_053123.3,1503-1521).
ccgaaagtgttgtaatcat

SEQ ID NO: 467244 - DNA, 19 bp, Mus musculus
  siRNA target sequence for Smarca1 (NM_053123.3,1543-1561).
gagcctggtccaccttata

SEQ ID NO: 467245 - DNA, 19 bp, Mus musculus
  siRNA target sequence for Smarca1 (NM_053123.3,1546-1564).
cctggtccaccttatacga

SEQ ID NO: 467246 - DNA, 19 bp, Mus musculus
  siRNA target sequence for Smarca1 (NM_053123.3,1572-1590).
gcacattgtcggcaatagt

SEQ ID NO: 467247 - DNA, 19 bp, Mus musculus
  siRNA target sequence for Smarca1 (NM_053123.3,1579-1597).
gtcggcaatagtggtaaaa

SEQ ID NO: 467248 - DNA, 19 bp, Mus musculus
  siRNA target sequence for Smarca1 (NM_053123.3,1583-1601).
gcaatagtggtaaaatggt

SEQ ID NO: 467249 - DNA, 19 bp, Mus musculus
  siRNA target sequence for Smarca1 (NM_053123.3,1599-1617).
ggtcgctctggataagcta

SEQ ID NO: 467250 - DNA, 19 bp, Mus musculus
  siRNA target sequence for Smarca1 (NM_053123.3,1600-1618).
gtcgctctggataagctat

SEQ ID NO: 467251 - DNA, 19 bp, Mus musculus
  siRNA target sequence for Smarca1 (NM_053123.3,1662-1680).
ccagatgactcgactgtta

SEQ ID NO: 467252 - DNA, 19 bp, Mus musculus
  siRNA target sequence for Smarca1 (NM_053123.3,1668-1686).
gactcgactgttagacatt

SEQ ID NO: 467253 - DNA, 19 bp, Mus musculus
  siRNA target sequence for Smarca1 (NM_053123.3,1700-1718).
gtatgtggcgtggttatga

SEQ ID NO: 467254 - DNA, 19 bp, Mus musculus
  siRNA target sequence for Smarca1 (NM_053123.3,1704-1722).
gtggcgtggttatgagtat

SEQ ID NO: 467255 - DNA, 19 bp, Mus musculus
  siRNA target sequence for Smarca1 (NM_053123.3,1707-1725).
gcgtggttatgagtattct

SEQ ID NO: 467256 - DNA, 19 bp, Mus musculus
  siRNA target sequence for Smarca1 (NM_053123.3,1774-1792).
gccttcaatgctccaaata

SEQ ID NO: 467257 - DNA, 19 bp, Mus musculus
  siRNA target sequence for Smarca1 (NM_053123.3,1828-1846).
ggaggactcggaattaact

SEQ ID NO: 467258 - DNA, 19 bp, Mus musculus
  siRNA target sequence for Smarca1 (NM_053123.3,1829-1847).
gaggactcggaattaactt

SEQ ID NO: 467259 - DNA, 19 bp, Mus musculus
  siRNA target sequence for Smarca1 (NM_053123.3,1855-1873).
gctgatgtggtcatcctat

SEQ ID NO: 467260 - DNA, 19 bp, Mus musculus
  siRNA target sequence for Smarca1 (NM_053123.3,1886-1904).
ggaatccacaggttgattt

SEQ ID NO: 467261 - DNA, 19 bp, Mus musculus
  siRNA target sequence for Smarca1 (NM_053123.3,1951-1969).
cgagtcttccgtctcatta

SEQ ID NO: 467262 - DNA, 19 bp, Mus musculus
  siRNA target sequence for Smarca1 (NM_053123.3,2010-2028).
gataaaactgagacttgat

SEQ ID NO: 467263 - DNA, 19 bp, Mus musculus
  siRNA target sequence for Smarca1 (NM_053123.3,2053-2071).
ctcattgaccaacaatcta

SEQ ID NO: 467264 - DNA, 19 bp, Mus musculus
  siRNA target sequence for Smarca1 (NM_053123.3,2106-2124).
ccgtcatggagctacacat

SEQ ID NO: 467265 - DNA, 19 bp, Mus musculus
  siRNA target sequence for Smarca1 (NM_053123.3,2235-2253).
gtcatctctaagaaatttt

SEQ ID NO: 467266 - DNA, 19 bp, Mus musculus
  siRNA target sequence for Smarca1 (NM_053123.3,2240-2258).
ctctaagaaattttagaat

SEQ ID NO: 467267 - DNA, 19 bp, Mus musculus
  siRNA target sequence for Smarca1 (NM_053123.3,2334-2352).
gattgaacctcctaaacga

SEQ ID NO: 467268 - DNA, 19 bp, Mus musculus
  siRNA target sequence for Smarca1 (NM_053123.3,2385-2403).
ctttagagaggctttacgt

SEQ ID NO: 467269 - DNA, 19 bp, Mus musculus
  siRNA target sequence for Smarca1 (NM_053123.3,2402-2420).
gtgtcagcgagccaaagat

SEQ ID NO: 467270 - DNA, 19 bp, Mus musculus
  siRNA target sequence for Smarca1 (NM_053123.3,2448-2466).
gccaaatgttcaagatttt

SEQ ID NO: 467271 - DNA, 19 bp, Mus musculus
  siRNA target sequence for Smarca1 (NM_053123.3,2512-2530).
ctttattatcggaagacta

SEQ ID NO: 467272 - DNA, 19 bp, Mus musculus
  siRNA target sequence for Smarca1 (NM_053123.3,2559-2577).
gatccccaacccagctata

SEQ ID NO: 467273 - DNA, 19 bp, Mus musculus
  siRNA target sequence for Smarca1 (NM_053123.3,2562-2580).
ccccaacccagctatagct

SEQ ID NO: 467274 - DNA, 19 bp, Mus musculus
  siRNA target sequence for Smarca1 (NM_053123.3,2568-2586).
cccagctatagctcaaaga

SEQ ID NO: 467275 - DNA, 19 bp, Mus musculus
  siRNA target sequence for Smarca1 (NM_053123.3,2676-2694).
ctggactaagcgagatttt

SEQ ID NO: 467276 - DNA, 19 bp, Mus musculus
  siRNA target sequence for Smarca1 (NM_053123.3,2721-2739).
gtatgggagagatgacatt

SEQ ID NO: 467277 - DNA, 19 bp, Mus musculus
  siRNA target sequence for Smarca1 (NM_053123.3,2778-2796).
ggaggtcatggagtattca

SEQ ID NO: 467278 - DNA, 19 bp, Mus musculus
  siRNA target sequence for Smarca1 (NM_053123.3,2807-2825).
gggaacgctgcaatgaatt

SEQ ID NO: 467279 - DNA, 19 bp, Mus musculus
  siRNA target sequence for Smarca1 (NM_053123.3,2808-2826).
ggaacgctgcaatgaatta

SEQ ID NO: 467280 - DNA, 19 bp, Mus musculus
  siRNA target sequence for Smarca1 (NM_053123.3,2878-2896).
cagcgaaggatcagtatta

SEQ ID NO: 467281 - DNA, 19 bp, Mus musculus
  siRNA target sequence for Smarca1 (NM_053123.3,2881-2899).
cgaaggatcagtattaaga

SEQ ID NO: 467282 - DNA, 19 bp, Mus musculus
  siRNA target sequence for Smarca1 (NM_053123.3,2911-2929).
gccaaaattgcaagataca

SEQ ID NO: 467283 - DNA, 19 bp, Mus musculus
  siRNA target sequence for Smarca1 (NM_053123.3,2924-2942).
gatacaaggctccatttca

SEQ ID NO: 467284 - DNA, 19 bp, Mus musculus
  siRNA target sequence for Smarca1 (NM_053123.3,2941-2959).
catcagttgcgtattcagt

SEQ ID NO: 467285 - DNA, 19 bp, Mus musculus
  siRNA target sequence for Smarca1 (NM_053123.3,2958-2976).
gtatggaaccagtaaagga

SEQ ID NO: 467286 - DNA, 19 bp, Mus musculus
  siRNA target sequence for Smarca1 (NM_053123.3,2963-2981).
gaaccagtaaaggaaagaa

SEQ ID NO: 467287 - DNA, 19 bp, Mus musculus
  siRNA target sequence for Smarca1 (NM_053123.3,3076-3094).
cggaatgctccccagttta

SEQ ID NO: 467288 - DNA, 19 bp, Mus musculus
  siRNA target sequence for Smarca1 (NM_053123.3,3078-3096).
gaatgctccccagtttaga

SEQ ID NO: 467289 - DNA, 19 bp, Mus musculus
  siRNA target sequence for Smarca1 (NM_053123.3,3116-3134).
cgagaactgccatggaatt

SEQ ID NO: 467290 - DNA, 19 bp, Mus musculus
  siRNA target sequence for Smarca1 (NM_053123.3,3117-3135).
gagaactgccatggaattt

SEQ ID NO: 467291 - DNA, 19 bp, Mus musculus
  siRNA target sequence for Smarca1 (NM_053123.3,3119-3137).
gaactgccatggaatttca

SEQ ID NO: 467292 - DNA, 19 bp, Mus musculus
  siRNA target sequence for Smarca1 (NM_053123.3,3140-3158).
gacgctgtaatactttgat

SEQ ID NO: 467293 - DNA, 19 bp, Mus musculus
  siRNA target sequence for Smarca1 (NM_053123.3,3142-3160).
cgctgtaatactttgattt

SEQ ID NO: 467294 - DNA, 19 bp, Mus musculus
  siRNA target sequence for Smarca1 (NM_053123.3,3144-3162).
ctgtaatactttgatttca

SEQ ID NO: 467295 - DNA, 19 bp, Mus musculus
  siRNA target sequence for Smarca1 (NM_053123.3,3213-3231).
gaagaaacgggcaactaaa

SEQ ID NO: 467296 - DNA, 19 bp, Mus musculus
  siRNA target sequence for Smarca1 (NM_053123.3,3216-3234).
gaaacgggcaactaaaact

SEQ ID NO: 467297 - DNA, 19 bp, Mus musculus
  siRNA target sequence for Smarca1 (NM_053123.3,3227-3245).
ctaaaactccaatggtaaa

SEQ ID NO: 467298 - DNA, 19 bp, Mus musculus
  siRNA target sequence for Smarca3 (NM_009210.1,54-72).
gtatggatcacacgaaaat

SEQ ID NO: 467299 - DNA, 19 bp, Mus musculus
  siRNA target sequence for Smarca3 (NM_009210.1,82-100).
ctttcatactcaactttct

SEQ ID NO: 467300 - DNA, 19 bp, Mus musculus
  siRNA target sequence for Smarca3 (NM_009210.1,92-110).
caactttcttgccacattt

SEQ ID NO: 467301 - DNA, 19 bp, Mus musculus
  siRNA target sequence for Smarca3 (NM_009210.1,102-120).
gccacattttgaattccaa

SEQ ID NO: 467302 - DNA, 19 bp, Mus musculus
  siRNA target sequence for Smarca3 (NM_009210.1,202-220).
gttggactacgctattaca

SEQ ID NO: 467303 - DNA, 19 bp, Mus musculus
  siRNA target sequence for Smarca3 (NM_009210.1,213-231).
ctattacacaggagttgta

SEQ ID NO: 467304 - DNA, 19 bp, Mus musculus
  siRNA target sequence for Smarca3 (NM_009210.1,219-237).
cacaggagttgtaaataat

SEQ ID NO: 467305 - DNA, 19 bp, Mus musculus
  siRNA target sequence for Smarca3 (NM_009210.1,221-239).
caggagttgtaaataataa

SEQ ID NO: 467306 - DNA, 19 bp, Mus musculus
  siRNA target sequence for Smarca3 (NM_009210.1,264-282).
gcctaataatccctatgat

SEQ ID NO: 467307 - DNA, 19 bp, Mus musculus
  siRNA target sequence for Smarca3 (NM_009210.1,274-292).
ccctatgataagaatgcta

SEQ ID NO: 467308 - DNA, 19 bp, Mus musculus
  siRNA target sequence for Smarca3 (NM_009210.1,403-421).
ccttttggtgcaagtaata

SEQ ID NO: 467309 - DNA, 19 bp, Mus musculus
  siRNA target sequence for Smarca3 (NM_009210.1,624-642).
ccagctcaaaacggaattt

SEQ ID NO: 467310 - DNA, 19 bp, Mus musculus
  siRNA target sequence for Smarca3 (NM_009210.1,628-646).
ctcaaaacggaatttgaca

SEQ ID NO: 467311 - DNA, 19 bp, Mus musculus
  siRNA target sequence for Smarca3 (NM_009210.1,630-648).
caaaacggaatttgacaaa

SEQ ID NO: 467312 - DNA, 19 bp, Mus musculus
  siRNA target sequence for Smarca3 (NM_009210.1,635-653).
cggaatttgacaaattatt

SEQ ID NO: 467313 - DNA, 19 bp, Mus musculus
  siRNA target sequence for Smarca3 (NM_009210.1,791-809).
gggaacagcgcaatgactt

SEQ ID NO: 467314 - DNA, 19 bp, Mus musculus
  siRNA target sequence for Smarca3 (NM_009210.1,792-810).
ggaacagcgcaatgactta

SEQ ID NO: 467315 - DNA, 19 bp, Mus musculus
  siRNA target sequence for Smarca3 (NM_009210.1,793-811).
gaacagcgcaatgacttat

SEQ ID NO: 467316 - DNA, 19 bp, Mus musculus
  siRNA target sequence for Smarca3 (NM_009210.1,799-817).
cgcaatgacttatattata

SEQ ID NO: 467317 - DNA, 19 bp, Mus musculus
  siRNA target sequence for Smarca3 (NM_009210.1,800-818).
gcaatgacttatattataa

SEQ ID NO: 467318 - DNA, 19 bp, Mus musculus
  siRNA target sequence for Smarca3 (NM_009210.1,869-887).
gaattttagcggatgatat

SEQ ID NO: 467319 - DNA, 19 bp, Mus musculus
  siRNA target sequence for Smarca3 (NM_009210.1,888-906).
gggtttgggcaaaactctt

SEQ ID NO: 467320 - DNA, 19 bp, Mus musculus
  siRNA target sequence for Smarca3 (NM_009210.1,889-907).
ggtttgggcaaaactctta

SEQ ID NO: 467321 - DNA, 19 bp, Mus musculus
  siRNA target sequence for Smarca3 (NM_009210.1,944-962).
gcaggcctcttctcagtaa

SEQ ID NO: 467322 - DNA, 19 bp, Mus musculus
  siRNA target sequence for Smarca3 (NM_009210.1,979-997).
catccaggaaaggaataca

SEQ ID NO: 467323 - DNA, 19 bp, Mus musculus
  siRNA target sequence for Smarca3 (NM_009210.1,1093-1111).
ggaactccggagaagagta

SEQ ID NO: 467324 - DNA, 19 bp, Mus musculus
  siRNA target sequence for Smarca3 (NM_009210.1,1208-1226).
gcgaactgccccagaaaat

SEQ ID NO: 467325 - DNA, 19 bp, Mus musculus
  siRNA target sequence for Smarca3 (NM_009210.1,1232-1250).
gcaagctgaaaaatgtaca

SEQ ID NO: 467326 - DNA, 19 bp, Mus musculus
  siRNA target sequence for Smarca3 (NM_009210.1,1236-1254).
gctgaaaaatgtacagtta

SEQ ID NO: 467327 - DNA, 19 bp, Mus musculus
  siRNA target sequence for Smarca3 (NM_009210.1,1251-1269).
gttaaatactaaaagtaga

SEQ ID NO: 467328 - DNA, 19 bp, Mus musculus
  siRNA target sequence for Smarca3 (NM_009210.1,1268-1286).
gagtaaaaggatcatctaa

SEQ ID NO: 467329 - DNA, 19 bp, Mus musculus
  siRNA target sequence for Smarca3 (NM_009210.1,1325-1343).
cctctgcaacacaaaggaa

SEQ ID NO: 467330 - DNA, 19 bp, Mus musculus
  siRNA target sequence for Smarca3 (NM_009210.1,2753-2771).
ctcgagtgttcttaatgga

SEQ ID NO: 467331 - DNA, 19 bp, Mus musculus
  siRNA target sequence for Smarca4 (NM_011417.1,489-507).
ccatggaccagcattctca

SEQ ID NO: 467332 - DNA, 19 bp, Mus musculus
  siRNA target sequence for Smarca4 (NM_011417.1,635-653).
gccttgggacagcaaaaca

SEQ ID NO: 467333 - DNA, 19 bp, Mus musculus
  siRNA target sequence for Smarca4 (NM_011417.1,637-655).
cttgggacagcaaaacaga

SEQ ID NO: 467334 - DNA, 19 bp, Mus musculus
  siRNA target sequence for Smarca4 (NM_011417.1,657-675).
gcccaaccccatttaacca

SEQ ID NO: 467335 - DNA, 19 bp, Mus musculus
  siRNA target sequence for Smarca4 (NM_011417.1,882-900).
gaccagcccctccaaatta

SEQ ID NO: 467336 - DNA, 19 bp, Mus musculus
  siRNA target sequence for Smarca4 (NM_011417.1,887-905).
gcccctccaaattacagta

SEQ ID NO: 467337 - DNA, 19 bp, Mus musculus
  siRNA target sequence for Smarca4 (NM_011417.1,1281-1299).
ctcgaatcgcacacagaat

SEQ ID NO: 467338 - DNA, 19 bp, Mus musculus
  siRNA target sequence for Smarca4 (NM_011417.1,1337-1355).
gaccttcgaaccaaagcaa

SEQ ID NO: 467339 - DNA, 19 bp, Mus musculus
  siRNA target sequence for Smarca4 (NM_011417.1,1371-1389).
cccttaggttgctgaactt

SEQ ID NO: 467340 - DNA, 19 bp, Mus musculus
  siRNA target sequence for Smarca4 (NM_011417.1,1740-1758).
ggcttatggctgaagatga

SEQ ID NO: 467341 - DNA, 19 bp, Mus musculus
  siRNA target sequence for Smarca4 (NM_011417.1,1760-1778).
gagggctaccgcaaactca

SEQ ID NO: 467342 - DNA, 19 bp, Mus musculus
  siRNA target sequence for Smarca4 (NM_011417.1,1762-1780).
gggctaccgcaaactcatt

SEQ ID NO: 467343 - DNA, 19 bp, Mus musculus
  siRNA target sequence for Smarca4 (NM_011417.1,1764-1782).
gctaccgcaaactcattga

SEQ ID NO: 467344 - DNA, 19 bp, Mus musculus
  siRNA target sequence for Smarca4 (NM_011417.1,2254-2272).
ggtggacgcccgacacatt

SEQ ID NO: 467345 - DNA, 19 bp, Mus musculus
  siRNA target sequence for Smarca4 (NM_011417.1,2255-2273).
gtggacgcccgacacatta

SEQ ID NO: 467346 - DNA, 19 bp, Mus musculus
  siRNA target sequence for Smarca4 (NM_011417.1,2257-2275).
ggacgcccgacacattatt

SEQ ID NO: 467347 - DNA, 19 bp, Mus musculus
  siRNA target sequence for Smarca4 (NM_011417.1,2261-2279).
gcccgacacattattgaga

SEQ ID NO: 467348 - DNA, 19 bp, Mus musculus
  siRNA target sequence for Smarca4 (NM_011417.1,2262-2280).
cccgacacattattgagaa

SEQ ID NO: 467349 - DNA, 19 bp, Mus musculus
  siRNA target sequence for Smarca4 (NM_011417.1,2328-2346).
ctcgtggcctgcagtctta

SEQ ID NO: 467350 - DNA, 19 bp, Mus musculus
  siRNA target sequence for Smarca4 (NM_011417.1,2366-2384).
gtcacagagagagtagata

SEQ ID NO: 467351 - DNA, 19 bp, Mus musculus
  siRNA target sequence for Smarca4 (NM_011417.1,2370-2388).
cagagagagtagataagca

SEQ ID NO: 467352 - DNA, 19 bp, Mus musculus
  siRNA target sequence for Smarca4 (NM_011417.1,2445-2463).
ggctggtgtccctgtacaa

SEQ ID NO: 467353 - DNA, 19 bp, Mus musculus
  siRNA target sequence for Smarca4 (NM_011417.1,2599-2617).
gtcaaactgggcgtatgaa

SEQ ID NO: 467354 - DNA, 19 bp, Mus musculus
  siRNA target sequence for Smarca4 (NM_011417.1,2601-2619).
caaactgggcgtatgaatt

SEQ ID NO: 467355 - DNA, 19 bp, Mus musculus
  siRNA target sequence for Smarca4 (NM_011417.1,2670-2688).
ctgcaaggcgagcttttgt

SEQ ID NO: 467356 - DNA, 19 bp, Mus musculus
  siRNA target sequence for Smarca4 (NM_011417.1,2696-2714).
cttcgcagtgggaagttca

SEQ ID NO: 467357 - DNA, 19 bp, Mus musculus
  siRNA target sequence for Smarca4 (NM_011417.1,2706-2724).
ggaagttcaacgtcttact

SEQ ID NO: 467358 - DNA, 19 bp, Mus musculus
  siRNA target sequence for Smarca4 (NM_011417.1,2719-2737).
cttactgaccacctatgaa

SEQ ID NO: 467359 - DNA, 19 bp, Mus musculus
  siRNA target sequence for Smarca4 (NM_011417.1,2735-2753).
gaatatatcatcaaagaca

SEQ ID NO: 467360 - DNA, 19 bp, Mus musculus
  siRNA target sequence for Smarca4 (NM_011417.1,2773-2791).
ccgctggaagtacatgatt

SEQ ID NO: 467361 - DNA, 19 bp, Mus musculus
  siRNA target sequence for Smarca4 (NM_011417.1,2833-2851).
gacgcaggtccttaacaca

SEQ ID NO: 467362 - DNA, 19 bp, Mus musculus
  siRNA target sequence for Smarca4 (NM_011417.1,2936-2954).
ctgctccccactatcttca

SEQ ID NO: 467363 - DNA, 19 bp, Mus musculus
  siRNA target sequence for Smarca4 (NM_011417.1,2968-2986).
cttcgaacagtggttcaat

SEQ ID NO: 467364 - DNA, 19 bp, Mus musculus
  siRNA target sequence for Smarca4 (NM_011417.1,3029-3047).
gaggagactatcctcatta

SEQ ID NO: 467365 - DNA, 19 bp, Mus musculus
  siRNA target sequence for Smarca4 (NM_011417.1,3031-3049).
ggagactatcctcattatt

SEQ ID NO: 467366 - DNA, 19 bp, Mus musculus
  siRNA target sequence for Smarca4 (NM_011417.1,3034-3052).
gactatcctcattattcgt

SEQ ID NO: 467367 - DNA, 19 bp, Mus musculus
  siRNA target sequence for Smarca4 (NM_011417.1,3051-3069).
gtcgcctacacaaagttct

SEQ ID NO: 467368 - DNA, 19 bp, Mus musculus
  siRNA target sequence for Smarca4 (NM_011417.1,3118-3136).
ccctgagaaggtagagtat

SEQ ID NO: 467369 - DNA, 19 bp, Mus musculus
  siRNA target sequence for Smarca4 (NM_011417.1,3127-3145).
ggtagagtatgtcatcaaa

SEQ ID NO: 467370 - DNA, 19 bp, Mus musculus
  siRNA target sequence for Smarca4 (NM_011417.1,3128-3146).
gtagagtatgtcatcaaat

SEQ ID NO: 467371 - DNA, 19 bp, Mus musculus
  siRNA target sequence for Smarca4 (NM_011417.1,3253-3271).
gacactgatgaacactatt

SEQ ID NO: 467372 - DNA, 19 bp, Mus musculus
  siRNA target sequence for Smarca4 (NM_011417.1,3259-3277).
gatgaacactattatgcaa

SEQ ID NO: 467373 - DNA, 19 bp, Mus musculus
  siRNA target sequence for Smarca4 (NM_011417.1,3382-3400).
ccgtgcctcagggaaattt

SEQ ID NO: 467374 - DNA, 19 bp, Mus musculus
  siRNA target sequence for Smarca4 (NM_011417.1,3390-3408).
cagggaaatttgaacttct

SEQ ID NO: 467375 - DNA, 19 bp, Mus musculus
  siRNA target sequence for Smarca4 (NM_011417.1,3428-3446).
ctccgtgcaacgaaccata

SEQ ID NO: 467376 - DNA, 19 bp, Mus musculus
  siRNA target sequence for Smarca4 (NM_011417.1,3430-3448).
ccgtgcaacgaaccataaa

SEQ ID NO: 467377 - DNA, 19 bp, Mus musculus
  siRNA target sequence for Smarca4 (NM_011417.1,3432-3450).
gtgcaacgaaccataaagt

SEQ ID NO: 467378 - DNA, 19 bp, Mus musculus
  siRNA target sequence for Smarca4 (NM_011417.1,3504-3522).
cataccgtggcttcaaata

SEQ ID NO: 467379 - DNA, 19 bp, Mus musculus
  siRNA target sequence for Smarca4 (NM_011417.1,3568-3586).
gttgaaaacctttaatgaa

SEQ ID NO: 467380 - DNA, 19 bp, Mus musculus
  siRNA target sequence for Smarca4 (NM_011417.1,3590-3608).
ggctctgagtatttcattt

SEQ ID NO: 467381 - DNA, 19 bp, Mus musculus
  siRNA target sequence for Smarca4 (NM_011417.1,3656-3674).
gctgacactgtgatcatct

SEQ ID NO: 467382 - DNA, 19 bp, Mus musculus
  siRNA target sequence for Smarca4 (NM_011417.1,3657-3675).
ctgacactgtgatcatctt

SEQ ID NO: 467383 - DNA, 19 bp, Mus musculus
  siRNA target sequence for Smarca4 (NM_011417.1,3742-3760).
gaatgaggtgcgtgttctt

SEQ ID NO: 467384 - DNA, 19 bp, Mus musculus
  siRNA target sequence for Smarca4 (NM_011417.1,3799-3817).
ggctgctgccaaatacaaa

SEQ ID NO: 467385 - DNA, 19 bp, Mus musculus
  siRNA target sequence for Smarca4 (NM_011417.1,3803-3821).
gctgccaaatacaaactca

SEQ ID NO: 467386 - DNA, 19 bp, Mus musculus
  siRNA target sequence for Smarca4 (NM_011417.1,4082-4100).
ctcccatcctggatcatca

SEQ ID NO: 467387 - DNA, 19 bp, Mus musculus
  siRNA target sequence for Smarca5 (NM_053124.2,2693-2711).
ctccgcgtttatttgaatt

SEQ ID NO: 467388 - DNA, 19 bp, Mus musculus
  siRNA target sequence for Smarca5 (NM_053124.2,2696-2714).
cgcgtttatttgaattact

SEQ ID NO: 467389 - DNA, 19 bp, Mus musculus
  siRNA target sequence for Smarcal1 (NM_018817.1,293-311).
cgtcgagctgagaagttgt

SEQ ID NO: 467390 - DNA, 19 bp, Mus musculus
  siRNA target sequence for Smarcal1 (NM_018817.1,442-460).
gaatctcagtaattcattt

SEQ ID NO: 467391 - DNA, 19 bp, Mus musculus
  siRNA target sequence for Smarcal1 (NM_018817.1,446-464).
ctcagtaattcatttccta

SEQ ID NO: 467392 - DNA, 19 bp, Mus musculus
  siRNA target sequence for Smarcal1 (NM_018817.1,605-623).
cttttgggttataaatcca

SEQ ID NO: 467393 - DNA, 19 bp, Mus musculus
  siRNA target sequence for Smarcal1 (NM_018817.1,741-759).
cggacagcttttatgtgtt

SEQ ID NO: 467394 - DNA, 19 bp, Mus musculus
  siRNA target sequence for Smarcal1 (NM_018817.1,786-804).
ggagacccccaaacatact

SEQ ID NO: 467395 - DNA, 19 bp, Mus musculus
  siRNA target sequence for Smarcal1 (NM_018817.1,833-851).
ctacggggagcgtgcataa

SEQ ID NO: 467396 - DNA, 19 bp, Mus musculus
  siRNA target sequence for Smarcal1 (NM_018817.1,836-854).
cggggagcgtgcataaaga

SEQ ID NO: 467397 - DNA, 19 bp, Mus musculus
  siRNA target sequence for Smarcal1 (NM_018817.1,838-856).
gggagcgtgcataaagact

SEQ ID NO: 467398 - DNA, 19 bp, Mus musculus
  siRNA target sequence for Smarcal1 (NM_018817.1,860-878).
gatcgcttccgggtaaaga

SEQ ID NO: 467399 - DNA, 19 bp, Mus musculus
  siRNA target sequence for Smarcal1 (NM_018817.1,893-911).
gagctcattgccgtgttta

SEQ ID NO: 467400 - DNA, 19 bp, Mus musculus
  siRNA target sequence for Smarcal1 (NM_018817.1,896-914).
ctcattgccgtgtttaagt

SEQ ID NO: 467401 - DNA, 19 bp, Mus musculus
  siRNA target sequence for Smarcal1 (NM_018817.1,919-937).
gcccagcagacactatgat

SEQ ID NO: 467402 - DNA, 19 bp, Mus musculus
  siRNA target sequence for Smarcal1 (NM_018817.1,971-989).
gactacagagccttgatga

SEQ ID NO: 467403 - DNA, 19 bp, Mus musculus
  siRNA target sequence for Smarcal1 (NM_018817.1,1157-1175).
gcggtgattggcctgttta

SEQ ID NO: 467404 - DNA, 19 bp, Mus musculus
  siRNA target sequence for Smarcal1 (NM_018817.1,1183-1201).
ggagtccaggagttacgat

SEQ ID NO: 467405 - DNA, 19 bp, Mus musculus
  siRNA target sequence for Smarcal1 (NM_018817.1,1188-1206).
ccaggagttacgatatcaa

SEQ ID NO: 467406 - DNA, 19 bp, Mus musculus
  siRNA target sequence for Smarcal1 (NM_018817.1,1231-1249).
ggaagagcacaataaacta

SEQ ID NO: 467407 - DNA, 19 bp, Mus musculus
  siRNA target sequence for Smarcal1 (NM_018817.1,1232-1250).
gaagagcacaataaactaa

SEQ ID NO: 467408 - DNA, 19 bp, Mus musculus
  siRNA target sequence for Smarcal1 (NM_018817.1,1254-1272).
caaggtcacgtgaactgaa

SEQ ID NO: 467409 - DNA, 19 bp, Mus musculus
  siRNA target sequence for Smarcal1 (NM_018817.1,1433-1451).
gttagctttgccatatcaa

SEQ ID NO: 467410 - DNA, 19 bp, Mus musculus
  siRNA target sequence for Smarcal1 (NM_018817.1,1520-1538).
gctttttaccgaaaggaat

SEQ ID NO: 467411 - DNA, 19 bp, Mus musculus
  siRNA target sequence for Smarcal1 (NM_018817.1,1613-1631).
cttagcccagagaacatca

SEQ ID NO: 467412 - DNA, 19 bp, Mus musculus
  siRNA target sequence for Smarcal1 (NM_018817.1,1705-1723).
gttggagaggcagctaaaa

SEQ ID NO: 467413 - DNA, 19 bp, Mus musculus
  siRNA target sequence for Smarcal1 (NM_018817.1,1727-1745).
cctttcaaagtcgtcatta

SEQ ID NO: 467414 - DNA, 19 bp, Mus musculus
  siRNA target sequence for Smarcal1 (NM_018817.1,1728-1746).
ctttcaaagtcgtcattat

SEQ ID NO: 467415 - DNA, 19 bp, Mus musculus
  siRNA target sequence for Smarcal1 (NM_018817.1,1732-1750).
caaagtcgtcattattgat

SEQ ID NO: 467416 - DNA, 19 bp, Mus musculus
  siRNA target sequence for Smarcal1 (NM_018817.1,1736-1754).
gtcgtcattattgatgaat

SEQ ID NO: 467417 - DNA, 19 bp, Mus musculus
  siRNA target sequence for Smarcal1 (NM_018817.1,1738-1756).
cgtcattattgatgaatca

SEQ ID NO: 467418 - DNA, 19 bp, Mus musculus
  siRNA target sequence for Smarcal1 (NM_018817.1,1755-1773).
cacacttcctcaagaacat

SEQ ID NO: 467419 - DNA, 19 bp, Mus musculus
  siRNA target sequence for Smarcal1 (NM_018817.1,1757-1775).
cacttcctcaagaacataa

SEQ ID NO: 467420 - DNA, 19 bp, Mus musculus
  siRNA target sequence for Smarcal1 (NM_018817.1,1793-1811).
gcagctgtgcctatcctaa

SEQ ID NO: 467421 - DNA, 19 bp, Mus musculus
  siRNA target sequence for Smarcal1 (NM_018817.1,2231-2249).
ccatgtgtcgtcgagtata

SEQ ID NO: 467422 - DNA, 19 bp, Mus musculus
  siRNA target sequence for Smarcal1 (NM_018817.1,2232-2250).
catgtgtcgtcgagtatat

SEQ ID NO: 467423 - DNA, 19 bp, Mus musculus
  siRNA target sequence for Smarcal1 (NM_018817.1,2235-2253).
gtgtcgtcgagtatatcct

SEQ ID NO: 467424 - DNA, 19 bp, Mus musculus
  siRNA target sequence for Smarcal1 (NM_018817.1,2266-2284).
cagcggacgagagaagttt

SEQ ID NO: 467425 - DNA, 19 bp, Mus musculus
  siRNA target sequence for Smarcal1 (NM_018817.1,2269-2287).
cggacgagagaagtttcta

SEQ ID NO: 467426 - DNA, 19 bp, Mus musculus
  siRNA target sequence for Smarcal1 (NM_018817.1,2271-2289).
gacgagagaagtttctagt

SEQ ID NO: 467427 - DNA, 19 bp, Mus musculus
  siRNA target sequence for Smarcal1 (NM_018817.1,2274-2292).
gagagaagtttctagtgtt

SEQ ID NO: 467428 - DNA, 19 bp, Mus musculus
  siRNA target sequence for Smarcal1 (NM_018817.1,2340-2358).
ggaagaacgttcaacacat

SEQ ID NO: 467429 - DNA, 19 bp, Mus musculus
  siRNA target sequence for Smarcal1 (NM_018817.1,2620-2638).
ctacctttggcctctgatt

SEQ ID NO: 467430 - DNA, 19 bp, Mus musculus
  siRNA target sequence for Smarcal1 (NM_018817.1,2628-2646).
ggcctctgattcaagagaa

SEQ ID NO: 467431 - DNA, 19 bp, Mus musculus
  siRNA target sequence for Smarcal1 (NM_018817.1,2631-2649).
ctctgattcaagagaagat

SEQ ID NO: 467432 - DNA, 19 bp, Mus musculus
  siRNA target sequence for Smarcal1 (NM_018817.1,2669-2687).
gggctttctgagaccaatt

SEQ ID NO: 467433 - DNA, 19 bp, Mus musculus
  siRNA target sequence for Smarcal1 (NM_018817.1,2670-2688).
ggctttctgagaccaattt

SEQ ID NO: 467434 - DNA, 19 bp, Mus musculus
  siRNA target sequence for Smarcal1 (NM_018817.1,2781-2799).
gaaatgacatggaattcct

SEQ ID NO: 467435 - DNA, 19 bp, Mus musculus
  siRNA target sequence for Smarcal1 (NM_018817.1,2927-2945).
gataattgggacagctttt

SEQ ID NO: 467436 - DNA, 19 bp, Mus musculus
  siRNA target sequence for Smarce1 (NM_020618.2,179-197).
catctcgcctacaacaact

SEQ ID NO: 467437 - DNA, 19 bp, Mus musculus
  siRNA target sequence for Smarce1 (NM_020618.2,182-200).
ctcgcctacaacaactaca

SEQ ID NO: 467438 - DNA, 19 bp, Mus musculus
  siRNA target sequence for Smc1l2 (NM_080470.1,39-57).
ctgctcgtggagaatttca

SEQ ID NO: 467439 - DNA, 19 bp, Mus musculus
  siRNA target sequence for Smc1l2 (NM_080470.1,78-96).
gtcatcggccctttcaaga

SEQ ID NO: 467440 - DNA, 19 bp, Mus musculus
  siRNA target sequence for Smc1l2 (NM_080470.1,95-113).
gaggttcacctgcatcatt

SEQ ID NO: 467441 - DNA, 19 bp, Mus musculus
  siRNA target sequence for Smc1l2 (NM_080470.1,117-135).
cccaacggctccggaaaat

SEQ ID NO: 467442 - DNA, 19 bp, Mus musculus
  siRNA target sequence for Smc1l2 (NM_080470.1,119-137).
caacggctccggaaaatct

SEQ ID NO: 467443 - DNA, 19 bp, Mus musculus
  siRNA target sequence for Smc1l2 (NM_080470.1,125-143).
ctccggaaaatctaatgta

SEQ ID NO: 467444 - DNA, 19 bp, Mus musculus
  siRNA target sequence for Smc1l2 (NM_080470.1,141-159).
gtaatggatgcacttagtt

SEQ ID NO: 467445 - DNA, 19 bp, Mus musculus
  siRNA target sequence for Smc1l2 (NM_080470.1,178-196).
caactaatttaagagtaaa

SEQ ID NO: 467446 - DNA, 19 bp, Mus musculus
  siRNA target sequence for Smc1l2 (NM_080470.1,252-270).
gcaagtgtgacaattatat

SEQ ID NO: 467447 - DNA, 19 bp, Mus musculus
  siRNA target sequence for Smc1l2 (NM_080470.1,321-339).
gggtgctcagaatatcatt

SEQ ID NO: 467448 - DNA, 19 bp, Mus musculus
  siRNA target sequence for Smc1l2 (NM_080470.1,322-340).
ggtgctcagaatatcattt

SEQ ID NO: 467449 - DNA, 19 bp, Mus musculus
  siRNA target sequence for Smc1l2 (NM_080470.1,353-371).
cgtgagtcgttctgtgtat

SEQ ID NO: 467450 - DNA, 19 bp, Mus musculus
  siRNA target sequence for Smc1l2 (NM_080470.1,372-390).
gtagcccagttggaaaaca

SEQ ID NO: 467451 - DNA, 19 bp, Mus musculus
  siRNA target sequence for Smc1l2 (NM_080470.1,389-407).
cataggcataatagtcaaa

SEQ ID NO: 467452 - DNA, 19 bp, Mus musculus
  siRNA target sequence for Smc1l2 (NM_080470.1,408-426).
gcacagaactgtctagttt

SEQ ID NO: 467453 - DNA, 19 bp, Mus musculus
  siRNA target sequence for Smc1l2 (NM_080470.1,431-449).
gggaactgtagagtcaata

SEQ ID NO: 467454 - DNA, 19 bp, Mus musculus
  siRNA target sequence for Smc1l2 (NM_080470.1,432-450).
ggaactgtagagtcaatat

SEQ ID NO: 467455 - DNA, 19 bp, Mus musculus
  siRNA target sequence for Smc1l2 (NM_080470.1,441-459).
gagtcaatatccatgaaaa

SEQ ID NO: 467456 - DNA, 19 bp, Mus musculus
  siRNA target sequence for Smc1l2 (NM_080470.1,558-576).
gaagatgcacaatttcatt

SEQ ID NO: 467457 - DNA, 19 bp, Mus musculus
  siRNA target sequence for Smc1l2 (NM_080470.1,561-579).
gatgcacaatttcatttta

SEQ ID NO: 467458 - DNA, 19 bp, Mus musculus
  siRNA target sequence for Smc1l2 (NM_080470.1,603-621).
gaacggaagcatgcaaaaa

SEQ ID NO: 467459 - DNA, 19 bp, Mus musculus
  siRNA target sequence for Smc1l2 (NM_080470.1,607-625).
ggaagcatgcaaaaataga

SEQ ID NO: 467460 - DNA, 19 bp, Mus musculus
  siRNA target sequence for Smc1l2 (NM_080470.1,648-666).
caaaatctccttgaagaat

SEQ ID NO: 467461 - DNA, 19 bp, Mus musculus
  siRNA target sequence for Smc1l2 (NM_080470.1,689-707).
gatgcttttccaactatat

SEQ ID NO: 467462 - DNA, 19 bp, Mus musculus
  siRNA target sequence for Smc1l2 (NM_080470.1,755-773).
ggacgggaatttaagtgtt

SEQ ID NO: 467463 - DNA, 19 bp, Mus musculus
  siRNA target sequence for Smc1l2 (NM_080470.1,758-776).
cgggaatttaagtgttgta

SEQ ID NO: 467464 - DNA, 19 bp, Mus musculus
  siRNA target sequence for Smc1l2 (NM_080470.1,771-789).
gttgtaaaagacactcttt

SEQ ID NO: 467465 - DNA, 19 bp, Mus musculus
  siRNA target sequence for Smc1l2 (NM_080470.1,962-980).
gtctaagaaattgataaca

SEQ ID NO: 467466 - DNA, 19 bp, Mus musculus
  siRNA target sequence for Smc1l2 (NM_080470.1,964-982).
ctaagaaattgataacaga

SEQ ID NO: 467467 - DNA, 19 bp, Mus musculus
  siRNA target sequence for Smc1l2 (NM_080470.1,983-1001).
caatgaaaaacaatgttct

SEQ ID NO: 467468 - DNA, 19 bp, Mus musculus
  siRNA target sequence for Smc1l2 (NM_080470.1,1033-1051).
cagaactggctgatttgga

SEQ ID NO: 467469 - DNA, 19 bp, Mus musculus
  siRNA target sequence for Smc1l2 (NM_080470.1,1035-1053).
gaactggctgatttggata

SEQ ID NO: 467470 - DNA, 19 bp, Mus musculus
  siRNA target sequence for Smc1l2 (NM_080470.1,1049-1067).
ggatagagcatggaaaagt

SEQ ID NO: 467471 - DNA, 19 bp, Mus musculus
  siRNA target sequence for Smc1l2 (NM_080470.1,1050-1068).
gatagagcatggaaaagtt

SEQ ID NO: 467472 - DNA, 19 bp, Mus musculus
  siRNA target sequence for Smc1l2 (NM_080470.1,1105-1123).
ggcgagatattgaattgga

SEQ ID NO: 467473 - DNA, 19 bp, Mus musculus
  siRNA target sequence for Smc1l2 (NM_080470.1,1106-1124).
gcgagatattgaattggaa

SEQ ID NO: 467474 - DNA, 19 bp, Mus musculus
  siRNA target sequence for Smc1l2 (NM_080470.1,1129-1147).
gccagctggatcgttacaa

SEQ ID NO: 467475 - DNA, 19 bp, Mus musculus
  siRNA target sequence for Smc1l2 (NM_080470.1,1130-1148).
ccagctggatcgttacaaa

SEQ ID NO: 467476 - DNA, 19 bp, Mus musculus
  siRNA target sequence for Smc1l2 (NM_080470.1,1141-1159).
gttacaaactgcttaagga

SEQ ID NO: 467477 - DNA, 19 bp, Mus musculus
  siRNA target sequence for Smc1l2 (NM_080470.1,1166-1184).
cagacggaaggttggtata

SEQ ID NO: 467478 - DNA, 19 bp, Mus musculus
  siRNA target sequence for Smc1l2 (NM_080470.1,1168-1186).
gacggaaggttggtataat

SEQ ID NO: 467479 - DNA, 19 bp, Mus musculus
  siRNA target sequence for Smc1l2 (NM_080470.1,1170-1188).
cggaaggttggtataatga

SEQ ID NO: 467480 - DNA, 19 bp, Mus musculus
  siRNA target sequence for Smc1l2 (NM_080470.1,1172-1190).
gaaggttggtataatgaca

SEQ ID NO: 467481 - DNA, 19 bp, Mus musculus
  siRNA target sequence for Smc1l2 (NM_080470.1,1180-1198).
gtataatgacacaacaact

SEQ ID NO: 467482 - DNA, 19 bp, Mus musculus
  siRNA target sequence for Smc1l2 (NM_080470.1,1268-1286).
cactcagggaaatctaaaa

SEQ ID NO: 467483 - DNA, 19 bp, Mus musculus
  siRNA target sequence for Smc1l2 (NM_080470.1,1272-1290).
cagggaaatctaaaacaga

SEQ ID NO: 467484 - DNA, 19 bp, Mus musculus
  siRNA target sequence for Smc1l2 (NM_080470.1,1358-1376).
ggattgcttggaagataaa

SEQ ID NO: 467485 - DNA, 19 bp, Mus musculus
  siRNA target sequence for Smc1l2 (NM_080470.1,1359-1377).
gattgcttggaagataaaa

SEQ ID NO: 467486 - DNA, 19 bp, Mus musculus
  siRNA target sequence for Smc1l2 (NM_080470.1,1404-1422).
gaaattgaaaatacgaaat

SEQ ID NO: 467487 - DNA, 19 bp, Mus musculus
  siRNA target sequence for Smc1l2 (NM_080470.1,1423-1441).
caagaatgtctgaagttaa

SEQ ID NO: 467488 - DNA, 19 bp, Mus musculus
  siRNA target sequence for Smc1l2 (NM_080470.1,1426-1444).
gaatgtctgaagttaatga

SEQ ID NO: 467489 - DNA, 19 bp, Mus musculus
  siRNA target sequence for Smc1l2 (NM_080470.1,1443-1461).
gaagaattgagtcttatta

SEQ ID NO: 467490 - DNA, 19 bp, Mus musculus
  siRNA target sequence for Smc1l2 (NM_080470.1,1473-1491).
cagaatgctggaattgata

SEQ ID NO: 467491 - DNA, 19 bp, Mus musculus
  siRNA target sequence for Smc1l2 (NM_080470.1,1546-1564).
gactttacccagattctgt

SEQ ID NO: 467492 - DNA, 19 bp, Mus musculus
  siRNA target sequence for Smc1l2 (NM_080470.1,1554-1572).
ccagattctgtgtttggaa

SEQ ID NO: 467493 - DNA, 19 bp, Mus musculus
  siRNA target sequence for Smc1l2 (NM_080470.1,1588-1606).
gtcatcctattcataagaa

SEQ ID NO: 467494 - DNA, 19 bp, Mus musculus
  siRNA target sequence for Smc1l2 (NM_080470.1,1656-1674).
gttgtagcctcagaaaaga

SEQ ID NO: 467495 - DNA, 19 bp, Mus musculus
  siRNA target sequence for Smc1l2 (NM_080470.1,1668-1686).
gaaaagatagcgaaagatt

SEQ ID NO: 467496 - DNA, 19 bp, Mus musculus
  siRNA target sequence for Smc1l2 (NM_080470.1,1677-1695).
gcgaaagattgtattcgat

SEQ ID NO: 467497 - DNA, 19 bp, Mus musculus
  siRNA target sequence for Smc1l2 (NM_080470.1,1678-1696).
cgaaagattgtattcgatt

SEQ ID NO: 467498 - DNA, 19 bp, Mus musculus
  siRNA target sequence for Smc1l2 (NM_080470.1,1724-1742).
gacattccttgctctagat

SEQ ID NO: 467499 - DNA, 19 bp, Mus musculus
  siRNA target sequence for Smc1l2 (NM_080470.1,1726-1744).
cattccttgctctagatta

SEQ ID NO: 467500 - DNA, 19 bp, Mus musculus
  siRNA target sequence for Smc1l2 (NM_080470.1,1730-1748).
ccttgctctagattacctt

SEQ ID NO: 467501 - DNA, 19 bp, Mus musculus
  siRNA target sequence for Smc1l2 (NM_080470.1,1734-1752).
gctctagattaccttgata

SEQ ID NO: 467502 - DNA, 19 bp, Mus musculus
  siRNA target sequence for Smc1l2 (NM_080470.1,1737-1755).
ctagattaccttgatatca

SEQ ID NO: 467503 - DNA, 19 bp, Mus musculus
  siRNA target sequence for Smc1l2 (NM_080470.1,1767-1785).
gaacgactaagggaaatta

SEQ ID NO: 467504 - DNA, 19 bp, Mus musculus
  siRNA target sequence for Smc1l2 (NM_080470.1,1796-1814).
gatgatgatcgatgttata

SEQ ID NO: 467505 - DNA, 19 bp, Mus musculus
  siRNA target sequence for Smc1l2 (NM_080470.1,1890-1908).
gaagcaagacatattgcat

SEQ ID NO: 467506 - DNA, 19 bp, Mus musculus
  siRNA target sequence for Smc1l2 (NM_080470.1,1928-1946).
gaaggcagtagcacttgat

SEQ ID NO: 467507 - DNA, 19 bp, Mus musculus
  siRNA target sequence for Smc1l2 (NM_080470.1,1981-1999).
gagggtcaagtgacttaaa

SEQ ID NO: 467508 - DNA, 19 bp, Mus musculus
  siRNA target sequence for Smc1l2 (NM_080470.1,1984-2002).
ggtcaagtgacttaaagca

SEQ ID NO: 467509 - DNA, 19 bp, Mus musculus
  siRNA target sequence for Smc1l2 (NM_080470.1,2015-2033).
ctgggatgagaaagagtta

SEQ ID NO: 467510 - DNA, 19 bp, Mus musculus
  siRNA target sequence for Smc1l2 (NM_080470.1,2017-2035).
gggatgagaaagagttaca

SEQ ID NO: 467511 - DNA, 19 bp, Mus musculus
  siRNA target sequence for Smc1l2 (NM_080470.1,2067-2085).
caagagctaaaggagttaa

SEQ ID NO: 467512 - DNA, 19 bp, Mus musculus
  siRNA target sequence for Smc1l2 (NM_080470.1,2117-2135).
gcaaatacagactttagta

SEQ ID NO: 467513 - DNA, 19 bp, Mus musculus
  siRNA target sequence for Smc1l2 (NM_080470.1,2143-2161).
ccaatacacgactcaaata

SEQ ID NO: 467514 - DNA, 19 bp, Mus musculus
  siRNA target sequence for Smc1l2 (NM_080470.1,2144-2162).
caatacacgactcaaatat

SEQ ID NO: 467515 - DNA, 19 bp, Mus musculus
  siRNA target sequence for Smc1l2 (NM_080470.1,2151-2169).
cgactcaaatattcacaaa

SEQ ID NO: 467516 - DNA, 19 bp, Mus musculus
  siRNA target sequence for Smc1l2 (NM_080470.1,2192-2210).
gaagcaccttgctacattt

SEQ ID NO: 467517 - DNA, 19 bp, Mus musculus
  siRNA target sequence for Smc1l2 (NM_080470.1,2236-2254).
gtgaattactgaatattga

SEQ ID NO: 467518 - DNA, 19 bp, Mus musculus
  siRNA target sequence for Smc1l2 (NM_080470.1,2238-2256).
gaattactgaatattgatt

SEQ ID NO: 467519 - DNA, 19 bp, Mus musculus
  siRNA target sequence for Smc1l2 (NM_080470.1,2266-2284).
ctatgttgagtgaaggaat

SEQ ID NO: 467520 - DNA, 19 bp, Mus musculus
  siRNA target sequence for Smc1l2 (NM_080470.1,2331-2349).
gaggtagaagatgacatat

SEQ ID NO: 467521 - DNA, 19 bp, Mus musculus
  siRNA target sequence for Smc1l2 (NM_080470.1,2387-2405).
ccgtgaatttgagaataaa

SEQ ID NO: 467522 - DNA, 19 bp, Mus musculus
  siRNA target sequence for Smc1l2 (NM_080470.1,2430-2448).
gatcaaaaaagattagagt

SEQ ID NO: 467523 - DNA, 19 bp, Mus musculus
  siRNA target sequence for Smc1l2 (NM_080470.1,2457-2475).
caaaaaactcggcttaata

SEQ ID NO: 467524 - DNA, 19 bp, Mus musculus
  siRNA target sequence for Smc1l2 (NM_080470.1,2480-2498).
gctcgaatatagtcgaaat

SEQ ID NO: 467525 - DNA, 19 bp, Mus musculus
  siRNA target sequence for Smc1l2 (NM_080470.1,2552-2570).
gggcaaagaagatattgat

SEQ ID NO: 467526 - DNA, 19 bp, Mus musculus
  siRNA target sequence for Smc1l2 (NM_080470.1,2553-2571).
ggcaaagaagatattgata

SEQ ID NO: 467527 - DNA, 19 bp, Mus musculus
  siRNA target sequence for Smc1l2 (NM_080470.1,2559-2577).
gaagatattgataacctaa

SEQ ID NO: 467528 - DNA, 19 bp, Mus musculus
  siRNA target sequence for Smc1l2 (NM_080470.1,2621-2639).
ggtgaagcaagagcaaatt

SEQ ID NO: 467529 - DNA, 19 bp, Mus musculus
  siRNA target sequence for Smc1l2 (NM_080470.1,2622-2640).
gtgaagcaagagcaaatta

SEQ ID NO: 467530 - DNA, 19 bp, Mus musculus
  siRNA target sequence for Smc1l2 (NM_080470.1,2660-2678).
gagttccaacattgaaaaa

SEQ ID NO: 467531 - DNA, 19 bp, Mus musculus
  siRNA target sequence for Smc1l2 (NM_080470.1,2673-2691).
gaaaaaattcacatacaaa

SEQ ID NO: 467532 - DNA, 19 bp, Mus musculus
  siRNA target sequence for Smc1l2 (NM_080470.1,2708-2726).
gaaggttttggctgttgat

SEQ ID NO: 467533 - DNA, 19 bp, Mus musculus
  siRNA target sequence for Smc1l2 (NM_080470.1,2804-2822).
cttgctgctagattgcaaa

SEQ ID NO: 467534 - DNA, 19 bp, Mus musculus
  siRNA target sequence for Smc1l2 (NM_080470.1,2807-2825).
gctgctagattgcaaagtt

SEQ ID NO: 467535 - DNA, 19 bp, Mus musculus
  siRNA target sequence for Smc1l2 (NM_080470.1,2823-2841).
gttcaagacattgacataa

SEQ ID NO: 467536 - DNA, 19 bp, Mus musculus
  siRNA target sequence for Smc1l2 (NM_080470.1,2906-2924).
ggcaacagctgatatctat

SEQ ID NO: 467537 - DNA, 19 bp, Mus musculus
  siRNA target sequence for Smc1l2 (NM_080470.1,2908-2926).
caacagctgatatctatga

SEQ ID NO: 467538 - DNA, 19 bp, Mus musculus
  siRNA target sequence for Smc1l2 (NM_080470.1,2969-2987).
ggatttaaaggctctacaa

SEQ ID NO: 467539 - DNA, 19 bp, Mus musculus
  siRNA target sequence for Smc1l2 (NM_080470.1,2980-2998).
ctctacaatcagataagga

SEQ ID NO: 467540 - DNA, 19 bp, Mus musculus
  siRNA target sequence for Smc1l2 (NM_080470.1,3033-3051).
gtagcatcccaagaaaaca

SEQ ID NO: 467541 - DNA, 19 bp, Mus musculus
  siRNA target sequence for Smc1l2 (NM_080470.1,3080-3098).
gcgagcacaggagaactta

SEQ ID NO: 467542 - DNA, 19 bp, Mus musculus
  siRNA target sequence for Smc1l2 (NM_080470.1,3101-3119).
gactgtcagagacaagttt

SEQ ID NO: 467543 - DNA, 19 bp, Mus musculus
  siRNA target sequence for Smc1l2 (NM_080470.1,3103-3121).
ctgtcagagacaagtttca

SEQ ID NO: 467544 - DNA, 19 bp, Mus musculus
  siRNA target sequence for Smc1l2 (NM_080470.1,3120-3138).
caagaatctgcagatgttt

SEQ ID NO: 467545 - DNA, 19 bp, Mus musculus
  siRNA target sequence for Smc1l2 (NM_080470.1,3196-3214).
gacggaggtacgatgcttt

SEQ ID NO: 467546 - DNA, 19 bp, Mus musculus
  siRNA target sequence for Smc1l2 (NM_080470.1,3200-3218).
gaggtacgatgctttcagt

SEQ ID NO: 467547 - DNA, 19 bp, Mus musculus
  siRNA target sequence for Smc1l2 (NM_080470.1,3206-3224).
cgatgctttcagtcaatgt

SEQ ID NO: 467548 - DNA, 19 bp, Mus musculus
  siRNA target sequence for Smc1l2 (NM_080470.1,3211-3229).
ctttcagtcaatgttttga

SEQ ID NO: 467549 - DNA, 19 bp, Mus musculus
  siRNA target sequence for Smc1l2 (NM_080470.1,3233-3251).
catctcagtctcaattgat

SEQ ID NO: 467550 - DNA, 19 bp, Mus musculus
  siRNA target sequence for Smc1l2 (NM_080470.1,3236-3254).
ctcagtctcaattgatcaa

SEQ ID NO: 467551 - DNA, 19 bp, Mus musculus
  siRNA target sequence for Smc1l2 (NM_080470.1,3238-3256).
cagtctcaattgatcaaat

SEQ ID NO: 467552 - DNA, 19 bp, Mus musculus
  siRNA target sequence for Smc1l2 (NM_080470.1,3240-3258).
gtctcaattgatcaaatct

SEQ ID NO: 467553 - DNA, 19 bp, Mus musculus
  siRNA target sequence for Smc1l2 (NM_080470.1,3244-3262).
caattgatcaaatctacaa

SEQ ID NO: 467554 - DNA, 19 bp, Mus musculus
  siRNA target sequence for Smc1l2 (NM_080470.1,3311-3329).
ccctgaagaaccttactta

SEQ ID NO: 467555 - DNA, 19 bp, Mus musculus
  siRNA target sequence for Smc1l2 (NM_080470.1,3321-3339).
ccttacttagatggaatta

SEQ ID NO: 467556 - DNA, 19 bp, Mus musculus
  siRNA target sequence for Smc1l2 (NM_080470.1,3330-3348).
gatggaattagctacaact

SEQ ID NO: 467557 - DNA, 19 bp, Mus musculus
  siRNA target sequence for Smc1l2 (NM_080470.1,3389-3407).
gtcagggggagaaaagtgt

SEQ ID NO: 467558 - DNA, 19 bp, Mus musculus
  siRNA target sequence for Smc1l2 (NM_080470.1,3457-3475).
cattctttgtattagatga

SEQ ID NO: 467559 - DNA, 19 bp, Mus musculus
  siRNA target sequence for Smc1l2 (NM_080470.1,3461-3479).
ctttgtattagatgaagta

SEQ ID NO: 467560 - DNA, 19 bp, Mus musculus
  siRNA target sequence for Smc1l2 (NM_080470.1,3486-3504).
gccctggacaatactaaca

SEQ ID NO: 467561 - DNA, 19 bp, Mus musculus
  siRNA target sequence for Smc1l2 (NM_080470.1,3488-3506).
cctggacaatactaacatt

SEQ ID NO: 467562 - DNA, 19 bp, Mus musculus
  siRNA target sequence for Smc1l2 (NM_080470.1,3507-3525).
ggcaaagtctcaagttaca

SEQ ID NO: 467563 - DNA, 19 bp, Mus musculus
  siRNA target sequence for Smc1l2 (NM_080470.1,3543-3561).
gaacagtttcagatgataa

SEQ ID NO: 467564 - DNA, 19 bp, Mus musculus
  siRNA target sequence for Smc1l2 (NM_080470.1,3719-3737).
cagagtaccacgagtatca

SEQ ID NO: 467565 - DNA, 19 bp, Mus musculus
  siRNA target sequence for Smc1l2 (NM_080470.1,3723-3741).
gtaccacgagtatcaatgt

SEQ ID NO: 467566 - DNA, 19 bp, Mus musculus
  siRNA target sequence for Smyd1 (NM_009762.1,132-150).
gggctgcggatgtcatctt

SEQ ID NO: 467567 - DNA, 19 bp, Mus musculus
  siRNA target sequence for Smyd1 (NM_009762.1,133-151).
ggctgcggatgtcatcttt

SEQ ID NO: 467568 - DNA, 19 bp, Mus musculus
  siRNA target sequence for Smyd1 (NM_009762.1,176-194).
gtttttgacagcctcatta

SEQ ID NO: 467569 - DNA, 19 bp, Mus musculus
  siRNA target sequence for Smyd1 (NM_009762.1,290-308).
gatgcttggctgaatcaca

SEQ ID NO: 467570 - DNA, 19 bp, Mus musculus
  siRNA target sequence for Smyd1 (NM_009762.1,314-332).
gagtgcgctgccatcaaga

SEQ ID NO: 467571 - DNA, 19 bp, Mus musculus
  siRNA target sequence for Smyd1 (NM_009762.1,316-334).
gtgcgctgccatcaagaaa

SEQ ID NO: 467572 - DNA, 19 bp, Mus musculus
  siRNA target sequence for Smyd1 (NM_009762.1,318-336).
gcgctgccatcaagaaata

SEQ ID NO: 467573 - DNA, 19 bp, Mus musculus
  siRNA target sequence for Smyd1 (NM_009762.1,427-445).
ggtgtccgtggatgactta

SEQ ID NO: 467574 - DNA, 19 bp, Mus musculus
  siRNA target sequence for Smyd1 (NM_009762.1,544-562).
cagcatgcagtatatctca

SEQ ID NO: 467575 - DNA, 19 bp, Mus musculus
  siRNA target sequence for Smyd1 (NM_009762.1,580-598).
caactgcaacggtttcact

SEQ ID NO: 467576 - DNA, 19 bp, Mus musculus
  siRNA target sequence for Smyd1 (NM_009762.1,653-671).
ggcctggtgaaccatgatt

SEQ ID NO: 467577 - DNA, 19 bp, Mus musculus
  siRNA target sequence for Smyd1 (NM_009762.1,678-696).
caaactgcactgtcatatt

SEQ ID NO: 467578 - DNA, 19 bp, Mus musculus
  siRNA target sequence for Smyd1 (NM_009762.1,684-702).
gcactgtcatattcaacaa

SEQ ID NO: 467579 - DNA, 19 bp, Mus musculus
  siRNA target sequence for Smyd1 (NM_009762.1,800-818).
cggcagctgaagaaacagt

SEQ ID NO: 467580 - DNA, 19 bp, Mus musculus
  siRNA target sequence for Smyd1 (NM_009762.1,966-984).
ctcgctccgagggtttgta

SEQ ID NO: 467581 - DNA, 19 bp, Mus musculus
  siRNA target sequence for Smyd1 (NM_009762.1,969-987).
gctccgagggtttgtatca

SEQ ID NO: 467582 - DNA, 19 bp, Mus musculus
  siRNA target sequence for Smyd1 (NM_009762.1,1141-1159).
ggttgatggctacatgaaa

SEQ ID NO: 467583 - DNA, 19 bp, Mus musculus
  siRNA target sequence for Smyd1 (NM_009762.1,1260-1278).
gcaaagcctatgctattct

SEQ ID NO: 467584 - DNA, 19 bp, Mus musculus
  siRNA target sequence for Smyd1 (NM_009762.1,1301-1319).
caccctatcaccaaagact

SEQ ID NO: 467585 - DNA, 19 bp, Mus musculus
  siRNA target sequence for Smyd1 (NM_009762.1,1303-1321).
ccctatcaccaaagactta

SEQ ID NO: 467586 - DNA, 19 bp, Mus musculus
  siRNA target sequence for Smyd1 (NM_009762.1,1356-1374).
gtatgttccgccaaaacga

SEQ ID NO: 467587 - DNA, 19 bp, Mus musculus
  siRNA target sequence for Smyd1 (NM_009762.1,1429-1447).
catggctgagcctagcaat

SEQ ID NO: 467588 - DNA, 19 bp, Mus musculus
  siRNA target sequence for Smyd1 (NM_009762.1,1458-1476).
ccgctctgttccataagaa

SEQ ID NO: 467589 - DNA, 19 bp, Mus musculus
  siRNA target sequence for Snai1 (NM_011427.2,505-523).
ccccagtcgcggaagatct

SEQ ID NO: 467590 - DNA, 19 bp, Mus musculus
  siRNA target sequence for Snai1 (NM_011427.2,506-524).
cccagtcgcggaagatctt

SEQ ID NO: 467591 - DNA, 19 bp, Mus musculus
  siRNA target sequence for Snai1 (NM_011427.2,508-526).
cagtcgcggaagatcttca

SEQ ID NO: 467592 - DNA, 19 bp, Mus musculus
  siRNA target sequence for Snai1 (NM_011427.2,699-717).
ctgcaaccgtgcttttgct

SEQ ID NO: 467593 - DNA, 19 bp, Mus musculus
  siRNA target sequence for Snai1 (NM_011427.2,751-769).
cactcggatgtgaagagat

SEQ ID NO: 467594 - DNA, 19 bp, Mus musculus
  siRNA target sequence for Snai2 (NM_011415.1,55-73).
cttcctggtcaagaaacat

SEQ ID NO: 467595 - DNA, 19 bp, Mus musculus
  siRNA target sequence for Snai2 (NM_011415.1,133-151).
cccatatctctatgaaagt

SEQ ID NO: 467596 - DNA, 19 bp, Mus musculus
  siRNA target sequence for Snai2 (NM_011415.1,134-152).
ccatatctctatgaaagtt

SEQ ID NO: 467597 - DNA, 19 bp, Mus musculus
  siRNA target sequence for Snai2 (NM_011415.1,135-153).
catatctctatgaaagtta

SEQ ID NO: 467598 - DNA, 19 bp, Mus musculus
  siRNA target sequence for Snai2 (NM_011415.1,155-173).
cctatacctgtcataccaa

SEQ ID NO: 467599 - DNA, 19 bp, Mus musculus
  siRNA target sequence for Snai2 (NM_011415.1,156-174).
ctatacctgtcataccaaa

SEQ ID NO: 467600 - DNA, 19 bp, Mus musculus
  siRNA target sequence for Snai2 (NM_011415.1,194-212).
ggagcatacagccctatta

SEQ ID NO: 467601 - DNA, 19 bp, Mus musculus
  siRNA target sequence for Snai2 (NM_011415.1,198-216).
catacagccctattactgt

SEQ ID NO: 467602 - DNA, 19 bp, Mus musculus
  siRNA target sequence for Snai2 (NM_011415.1,351-369).
cagaaagtcccattagtga

SEQ ID NO: 467603 - DNA, 19 bp, Mus musculus
  siRNA target sequence for Snai2 (NM_011415.1,412-430).
catcgaagctgagaagttt

SEQ ID NO: 467604 - DNA, 19 bp, Mus musculus
  siRNA target sequence for Snai2 (NM_011415.1,424-442).
gaagtttcagtgcaattta

SEQ ID NO: 467605 - DNA, 19 bp, Mus musculus
  siRNA target sequence for Snai2 (NM_011415.1,503-521).
gcccagtctaggaaatcgt

SEQ ID NO: 467606 - DNA, 19 bp, Mus musculus
  siRNA target sequence for Snai2 (NM_011415.1,643-661).
gcttcaaggacacattaga

SEQ ID NO: 467607 - DNA, 19 bp, Mus musculus
  siRNA target sequence for Snai2 (NM_011415.1,697-715).
ctgcaatagggcttttgca

SEQ ID NO: 467608 - DNA, 19 bp, Mus musculus
  siRNA target sequence for Snai2 (NM_011415.1,742-760).
gcagacccactctgatgta

SEQ ID NO: 467609 - DNA, 19 bp, Mus musculus
  siRNA target sequence for Snai2 (NM_011415.1,743-761).
cagacccactctgatgtaa

SEQ ID NO: 467610 - DNA, 19 bp, Mus musculus
  siRNA target sequence for Snai2 (NM_011415.1,801-819).
gaatgtcgcttctgcataa

SEQ ID NO: 467611 - DNA, 19 bp, Mus musculus
  siRNA target sequence for Snai2 (NM_011415.1,807-825).
cgcttctgcataaacatga

SEQ ID NO: 467612 - DNA, 19 bp, Mus musculus
  siRNA target sequence for Son (NM_019973.1,36-54).
ccgacatcgagcaggtttt

SEQ ID NO: 467613 - DNA, 19 bp, Mus musculus
  siRNA target sequence for Son (NM_019973.1,38-56).
gacatcgagcaggttttca

SEQ ID NO: 467614 - DNA, 19 bp, Mus musculus
  siRNA target sequence for Son (NM_019973.1,72-90).
gtaaattccgggaaataca

SEQ ID NO: 467615 - DNA, 19 bp, Mus musculus
  siRNA target sequence for Son (NM_019973.1,127-145).
gaatggtgaaacaaatcca

SEQ ID NO: 467616 - DNA, 19 bp, Mus musculus
  siRNA target sequence for Son (NM_019973.1,192-210).
gtctcccaaatgaagaaat

SEQ ID NO: 467617 - DNA, 19 bp, Mus musculus
  siRNA target sequence for Son (NM_019973.1,261-279).
ggtacaagcccgacttgaa

SEQ ID NO: 467618 - DNA, 19 bp, Mus musculus
  siRNA target sequence for Son (NM_019973.1,283-301).
ggcctccagaaaaagtaga

SEQ ID NO: 467619 - DNA, 19 bp, Mus musculus
  siRNA target sequence for Son (NM_019973.1,284-302).
gcctccagaaaaagtagat

SEQ ID NO: 467620 - DNA, 19 bp, Mus musculus
  siRNA target sequence for Son (NM_019973.1,303-321).
gcgtatctgtgcaaacaga

SEQ ID NO: 467621 - DNA, 19 bp, Mus musculus
  siRNA target sequence for Son (NM_019973.1,318-336).
cagatcctactgatgaagt

SEQ ID NO: 467622 - DNA, 19 bp, Mus musculus
  siRNA target sequence for Son (NM_019973.1,329-347).
gatgaagtgcccaccaaaa

SEQ ID NO: 467623 - DNA, 19 bp, Mus musculus
  siRNA target sequence for Son (NM_019973.1,439-457).
gtccaagctgaaatctcat

SEQ ID NO: 467624 - DNA, 19 bp, Mus musculus
  siRNA target sequence for Son (NM_019973.1,442-460).
caagctgaaatctcatcat

SEQ ID NO: 467625 - DNA, 19 bp, Mus musculus
  siRNA target sequence for Son (NM_019973.1,445-463).
gctgaaatctcatcatgat

SEQ ID NO: 467626 - DNA, 19 bp, Mus musculus
  siRNA target sequence for Son (NM_019973.1,458-476).
catgatgggaatctagaat

SEQ ID NO: 467627 - DNA, 19 bp, Mus musculus
  siRNA target sequence for Son (NM_019973.1,464-482).
gggaatctagaatctgatt

SEQ ID NO: 467628 - DNA, 19 bp, Mus musculus
  siRNA target sequence for Son (NM_019973.1,537-555).
gagcgtttggcttatctga

SEQ ID NO: 467629 - DNA, 19 bp, Mus musculus
  siRNA target sequence for Son (NM_019973.1,714-732).
gtatgctggaaccatcaat

SEQ ID NO: 467630 - DNA, 19 bp, Mus musculus
  siRNA target sequence for Son (NM_019973.1,718-736).
gctggaaccatcaatgaca

SEQ ID NO: 467631 - DNA, 19 bp, Mus musculus
  siRNA target sequence for Son (NM_019973.1,719-737).
ctggaaccatcaatgacaa

SEQ ID NO: 467632 - DNA, 19 bp, Mus musculus
  siRNA target sequence for Son (NM_019973.1,722-740).
gaaccatcaatgacaaaga

SEQ ID NO: 467633 - DNA, 19 bp, Mus musculus
  siRNA target sequence for Son (NM_019973.1,797-815).
cctgagcccgttgtaacaa

SEQ ID NO: 467634 - DNA, 19 bp, Mus musculus
  siRNA target sequence for Son (NM_019973.1,798-816).
ctgagcccgttgtaacaat

SEQ ID NO: 467635 - DNA, 19 bp, Mus musculus
  siRNA target sequence for Son (NM_019973.1,800-818).
gagcccgttgtaacaatgt

SEQ ID NO: 467636 - DNA, 19 bp, Mus musculus
  siRNA target sequence for Son (NM_019973.1,890-908).
gtagagcttcccatagcaa

SEQ ID NO: 467637 - DNA, 19 bp, Mus musculus
  siRNA target sequence for Son (NM_019973.1,926-944).
gaaaccctcacgatagtgt

SEQ ID NO: 467638 - DNA, 19 bp, Mus musculus
  siRNA target sequence for Son (NM_019973.1,978-996).
gcccatcaacaatggattt

SEQ ID NO: 467639 - DNA, 19 bp, Mus musculus
  siRNA target sequence for Son (NM_019973.1,979-997).
cccatcaacaatggatttt

SEQ ID NO: 467640 - DNA, 19 bp, Mus musculus
  siRNA target sequence for Son (NM_019973.1,1011-1029).
caactgacgtgcaaagatt

SEQ ID NO: 467641 - DNA, 19 bp, Mus musculus
  siRNA target sequence for Son (NM_019973.1,1466-1484).
gtgtcggcagcgatagagt

SEQ ID NO: 467642 - DNA, 19 bp, Mus musculus
  siRNA target sequence for Son (NM_019973.1,1497-1515).
ctgcagtaacagtagcaat

SEQ ID NO: 467643 - DNA, 19 bp, Mus musculus
  siRNA target sequence for Son (NM_019973.1,1556-1574).
cagcctgtggcgatgacaa

SEQ ID NO: 467644 - DNA, 19 bp, Mus musculus
  siRNA target sequence for Son (NM_019973.1,1890-1908).
caacgggggtgctagagtt

SEQ ID NO: 467645 - DNA, 19 bp, Mus musculus
  siRNA target sequence for Son (NM_019973.1,2046-2064).
cgacagcgctggaatccta

SEQ ID NO: 467646 - DNA, 19 bp, Mus musculus
  siRNA target sequence for Son (NM_019973.1,2047-2065).
gacagcgctggaatcctat

SEQ ID NO: 467647 - DNA, 19 bp, Mus musculus
  siRNA target sequence for Son (NM_019973.1,2051-2069).
gcgctggaatcctataata

SEQ ID NO: 467648 - DNA, 19 bp, Mus musculus
  siRNA target sequence for Son (NM_019973.1,2098-2116).
ggtgggggagacttctgta

SEQ ID NO: 467649 - DNA, 19 bp, Mus musculus
  siRNA target sequence for Son (NM_019973.1,2153-2171).
catatgctagcttctaaca

SEQ ID NO: 467650 - DNA, 19 bp, Mus musculus
  siRNA target sequence for Son (NM_019973.1,2173-2191).
catggagacccatatgtta

SEQ ID NO: 467651 - DNA, 19 bp, Mus musculus
  siRNA target sequence for Son (NM_019973.1,2182-2200).
ccatatgttagcatccaat

SEQ ID NO: 467652 - DNA, 19 bp, Mus musculus
  siRNA target sequence for Son (NM_019973.1,2222-2240).
gcatccaacactatggatt

SEQ ID NO: 467653 - DNA, 19 bp, Mus musculus
  siRNA target sequence for Son (NM_019973.1,2226-2244).
ccaacactatggattctca

SEQ ID NO: 467654 - DNA, 19 bp, Mus musculus
  siRNA target sequence for Son (NM_019973.1,2592-2610).
cccaggattctgctatgat

SEQ ID NO: 467655 - DNA, 19 bp, Mus musculus
  siRNA target sequence for Son (NM_019973.1,2647-2665).
ggatccttacagattagct

SEQ ID NO: 467656 - DNA, 19 bp, Mus musculus
  siRNA target sequence for Son (NM_019973.1,2663-2681).
gctcaggatccctataggt

SEQ ID NO: 467657 - DNA, 19 bp, Mus musculus
  siRNA target sequence for Son (NM_019973.1,2700-2718).
ggttaggccatgatgctta

SEQ ID NO: 467658 - DNA, 19 bp, Mus musculus
  siRNA target sequence for Son (NM_019973.1,2727-2745).
gacaagacccttatagatt

SEQ ID NO: 467659 - DNA, 19 bp, Mus musculus
  siRNA target sequence for Son (NM_019973.1,2852-2870).
gcacctagacccttgatgt

SEQ ID NO: 467660 - DNA, 19 bp, Mus musculus
  siRNA target sequence for Son (NM_019973.1,2853-2871).
cacctagacccttgatgtt

SEQ ID NO: 467661 - DNA, 19 bp, Mus musculus
  siRNA target sequence for Son (NM_019973.1,2873-2891).
gcatctagacgttctatga

SEQ ID NO: 467662 - DNA, 19 bp, Mus musculus
  siRNA target sequence for Son (NM_019973.1,2877-2895).
ctagacgttctatgatgat

SEQ ID NO: 467663 - DNA, 19 bp, Mus musculus
  siRNA target sequence for Son (NM_019973.1,2909-2927).
gaacgttccatgatgtcat

SEQ ID NO: 467664 - DNA, 19 bp, Mus musculus
  siRNA target sequence for Son (NM_019973.1,3152-3170).
ggtgccgaccggtctatga

SEQ ID NO: 467665 - DNA, 19 bp, Mus musculus
  siRNA target sequence for Son (NM_019973.1,3153-3171).
gtgccgaccggtctatgat

SEQ ID NO: 467666 - DNA, 19 bp, Mus musculus
  siRNA target sequence for Son (NM_019973.1,3185-3203).
gcagctgaccggtctatga

SEQ ID NO: 467667 - DNA, 19 bp, Mus musculus
  siRNA target sequence for Son (NM_019973.1,3186-3204).
cagctgaccggtctatgat

SEQ ID NO: 467668 - DNA, 19 bp, Mus musculus
  siRNA target sequence for Son (NM_019973.1,3218-3236).
gcagctgatcgatcaatga

SEQ ID NO: 467669 - DNA, 19 bp, Mus musculus
  siRNA target sequence for Son (NM_019973.1,3243-3261).
cttacactgatcgatcaat

SEQ ID NO: 467670 - DNA, 19 bp, Mus musculus
  siRNA target sequence for Son (NM_019973.1,3267-3285).
ctatggcagctgattctta

SEQ ID NO: 467671 - DNA, 19 bp, Mus musculus
  siRNA target sequence for Son (NM_019973.1,3271-3289).
ggcagctgattcttacact

SEQ ID NO: 467672 - DNA, 19 bp, Mus musculus
  siRNA target sequence for Son (NM_019973.1,3376-3394).
cgaggaaccaccaatgaca

SEQ ID NO: 467673 - DNA, 19 bp, Mus musculus
  siRNA target sequence for Son (NM_019973.1,3419-3437).
ccagagggtccagcattat

SEQ ID NO: 467674 - DNA, 19 bp, Mus musculus
  siRNA target sequence for Son (NM_019973.1,3422-3440).
gagggtccagcattatcaa

SEQ ID NO: 467675 - DNA, 19 bp, Mus musculus
  siRNA target sequence for Son (NM_019973.1,3523-3541).
gcctcctgtgagtcaaagt

SEQ ID NO: 467676 - DNA, 19 bp, Mus musculus
  siRNA target sequence for Son (NM_019973.1,3534-3552).
gtcaaagtgagatttcaga

SEQ ID NO: 467677 - DNA, 19 bp, Mus musculus
  siRNA target sequence for Son (NM_019973.1,3560-3578).
gcagtacctgctaattatt

SEQ ID NO: 467678 - DNA, 19 bp, Mus musculus
  siRNA target sequence for Son (NM_019973.1,3563-3581).
gtacctgctaattattcaa

SEQ ID NO: 467679 - DNA, 19 bp, Mus musculus
  siRNA target sequence for Son (NM_019973.1,3566-3584).
cctgctaattattcaatgt

SEQ ID NO: 467680 - DNA, 19 bp, Mus musculus
  siRNA target sequence for Son (NM_019973.1,3593-3611).
gaaacttcaatgttagcat

SEQ ID NO: 467681 - DNA, 19 bp, Mus musculus
  siRNA target sequence for Son (NM_019973.1,3650-3668).
cccgagtcttcagttacat

SEQ ID NO: 467682 - DNA, 19 bp, Mus musculus
  siRNA target sequence for Son (NM_019973.1,3713-3731).
ccagagagaccgatgactt

SEQ ID NO: 467683 - DNA, 19 bp, Mus musculus
  siRNA target sequence for Son (NM_019973.1,3714-3732).
cagagagaccgatgactta

SEQ ID NO: 467684 - DNA, 19 bp, Mus musculus
  siRNA target sequence for Son (NM_019973.1,3716-3734).
gagagaccgatgacttaca

SEQ ID NO: 467685 - DNA, 19 bp, Mus musculus
  siRNA target sequence for Son (NM_019973.1,3758-3776).
gtcgagccagctgtgttaa

SEQ ID NO: 467686 - DNA, 19 bp, Mus musculus
  siRNA target sequence for Son (NM_019973.1,3802-3820).
gacatcagaaacatatgat

SEQ ID NO: 467687 - DNA, 19 bp, Mus musculus
  siRNA target sequence for Son (NM_019973.1,3807-3825).
cagaaacatatgattccat

SEQ ID NO: 467688 - DNA, 19 bp, Mus musculus
  siRNA target sequence for Son (NM_019973.1,3842-3860).
gctatctcagaggtaacta

SEQ ID NO: 467689 - DNA, 19 bp, Mus musculus
  siRNA target sequence for Son (NM_019973.1,3843-3861).
ctatctcagaggtaactat

SEQ ID NO: 467690 - DNA, 19 bp, Mus musculus
  siRNA target sequence for Son (NM_019973.1,3847-3865).
ctcagaggtaactatgtca

SEQ ID NO: 467691 - DNA, 19 bp, Mus musculus
  siRNA target sequence for Son (NM_019973.1,3935-3953).
ccagcaccttctactatga

SEQ ID NO: 467692 - DNA, 19 bp, Mus musculus
  siRNA target sequence for Son (NM_019973.1,4124-4142).
ccagaactttgctccttat

SEQ ID NO: 467693 - DNA, 19 bp, Mus musculus
  siRNA target sequence for Son (NM_019973.1,4239-4257).
cttctgtgcctattttgga

SEQ ID NO: 467694 - DNA, 19 bp, Mus musculus
  siRNA target sequence for Son (NM_019973.1,4269-4287).
cagtccttcaacctgttat

SEQ ID NO: 467695 - DNA, 19 bp, Mus musculus
  siRNA target sequence for Son (NM_019973.1,4271-4289).
gtccttcaacctgttatga

SEQ ID NO: 467696 - DNA, 19 bp, Mus musculus
  siRNA target sequence for Son (NM_019973.1,4336-4354).
gtcagaacctgctgtcata

SEQ ID NO: 467697 - DNA, 19 bp, Mus musculus
  siRNA target sequence for Son (NM_019973.1,4338-4356).
cagaacctgctgtcatagt

SEQ ID NO: 467698 - DNA, 19 bp, Mus musculus
  siRNA target sequence for Son (NM_019973.1,4340-4358).
gaacctgctgtcatagtct

SEQ ID NO: 467699 - DNA, 19 bp, Mus musculus
  siRNA target sequence for Son (NM_019973.1,4357-4375).
ctcagagcacacgcaaata

SEQ ID NO: 467700 - DNA, 19 bp, Mus musculus
  siRNA target sequence for Son (NM_019973.1,4415-4433).
gtggactctagtgttatgt

SEQ ID NO: 467701 - DNA, 19 bp, Mus musculus
  siRNA target sequence for Son (NM_019973.1,4417-4435).
ggactctagtgttatgtca

SEQ ID NO: 467702 - DNA, 19 bp, Mus musculus
  siRNA target sequence for Son (NM_019973.1,4418-4436).
gactctagtgttatgtcat

SEQ ID NO: 467703 - DNA, 19 bp, Mus musculus
  siRNA target sequence for Son (NM_019973.1,4437-4455).
cacagattatgaaaggaat

SEQ ID NO: 467704 - DNA, 19 bp, Mus musculus
  siRNA target sequence for Son (NM_019973.1,4536-4554).
gtgatggaggacacttgaa

SEQ ID NO: 467705 - DNA, 19 bp, Mus musculus
  siRNA target sequence for Son (NM_019973.1,4538-4556).
gatggaggacacttgaaaa

SEQ ID NO: 467706 - DNA, 19 bp, Mus musculus
  siRNA target sequence for Son (NM_019973.1,4687-4705).
gaaaattttgcctattagt

SEQ ID NO: 467707 - DNA, 19 bp, Mus musculus
  siRNA target sequence for Son (NM_019973.1,4710-4728).
ctaaggaaatcacagaatt

SEQ ID NO: 467708 - DNA, 19 bp, Mus musculus
  siRNA target sequence for Son (NM_019973.1,4744-4762).
cgtcagcgaagctgacata

SEQ ID NO: 467709 - DNA, 19 bp, Mus musculus
  siRNA target sequence for Son (NM_019973.1,4798-4816).
ggatacagtaggaactagt

SEQ ID NO: 467710 - DNA, 19 bp, Mus musculus
  siRNA target sequence for Son (NM_019973.1,4799-4817).
gatacagtaggaactagta

SEQ ID NO: 467711 - DNA, 19 bp, Mus musculus
  siRNA target sequence for Son (NM_019973.1,4845-4863).
cactcatttcagagagtaa

SEQ ID NO: 467712 - DNA, 19 bp, Mus musculus
  siRNA target sequence for Son (NM_019973.1,4860-4878).
gtaaatatgatgttgaagt

SEQ ID NO: 467713 - DNA, 19 bp, Mus musculus
  siRNA target sequence for Son (NM_019973.1,4957-4975).
gggacctttgcctgctaaa

SEQ ID NO: 467714 - DNA, 19 bp, Mus musculus
  siRNA target sequence for Son (NM_019973.1,4961-4979).
cctttgcctgctaaagaca

SEQ ID NO: 467715 - DNA, 19 bp, Mus musculus
  siRNA target sequence for Son (NM_019973.1,4966-4984).
gcctgctaaagacattcat

SEQ ID NO: 467716 - DNA, 19 bp, Mus musculus
  siRNA target sequence for Son (NM_019973.1,4985-5003).
cttgatttgccatcaacta

SEQ ID NO: 467717 - DNA, 19 bp, Mus musculus
  siRNA target sequence for Son (NM_019973.1,4988-5006).
gatttgccatcaactaatt

SEQ ID NO: 467718 - DNA, 19 bp, Mus musculus
  siRNA target sequence for Son (NM_019973.1,4993-5011).
gccatcaactaattttgtt

SEQ ID NO: 467719 - DNA, 19 bp, Mus musculus
  siRNA target sequence for Son (NM_019973.1,5021-5039).
gtagaagactcgttaccta

SEQ ID NO: 467720 - DNA, 19 bp, Mus musculus
  siRNA target sequence for Son (NM_019973.1,5150-5168).
gccagcattgatgaaatta

SEQ ID NO: 467721 - DNA, 19 bp, Mus musculus
  siRNA target sequence for Son (NM_019973.1,5151-5169).
ccagcattgatgaaattaa

SEQ ID NO: 467722 - DNA, 19 bp, Mus musculus
  siRNA target sequence for Son (NM_019973.1,5152-5170).
cagcattgatgaaattaat

SEQ ID NO: 467723 - DNA, 19 bp, Mus musculus
  siRNA target sequence for Son (NM_019973.1,5203-5221).
ggacatggagcgtcttaca

SEQ ID NO: 467724 - DNA, 19 bp, Mus musculus
  siRNA target sequence for Son (NM_019973.1,5204-5222).
gacatggagcgtcttacaa

SEQ ID NO: 467725 - DNA, 19 bp, Mus musculus
  siRNA target sequence for Son (NM_019973.1,5289-5307).
gtccagttgtaattagcat

SEQ ID NO: 467726 - DNA, 19 bp, Mus musculus
  siRNA target sequence for Son (NM_019973.1,5464-5482).
gcgttccaagtcttctgaa

SEQ ID NO: 467727 - DNA, 19 bp, Mus musculus
  siRNA target sequence for Son (NM_019973.1,5469-5487).
ccaagtcttctgaacataa

SEQ ID NO: 467728 - DNA, 19 bp, Mus musculus
  siRNA target sequence for Son (NM_019973.1,5503-5521).
cagtgagtcgcgttctaga

SEQ ID NO: 467729 - DNA, 19 bp, Mus musculus
  siRNA target sequence for Son (NM_019973.1,5533-5551).
gtcgtccaagtccaaatct

SEQ ID NO: 467730 - DNA, 19 bp, Mus musculus
  siRNA target sequence for Son (NM_019973.1,5535-5553).
cgtccaagtccaaatctca

SEQ ID NO: 467731 - DNA, 19 bp, Mus musculus
  siRNA target sequence for Son (NM_019973.1,5596-5614).
gaggagtagccgatcaaga

SEQ ID NO: 467732 - DNA, 19 bp, Mus musculus
  siRNA target sequence for Son (NM_019973.1,5599-5617).
gagtagccgatcaagatct

SEQ ID NO: 467733 - DNA, 19 bp, Mus musculus
  siRNA target sequence for Son (NM_019973.1,5601-5619).
gtagccgatcaagatctaa

SEQ ID NO: 467734 - DNA, 19 bp, Mus musculus
  siRNA target sequence for Son (NM_019973.1,5605-5623).
ccgatcaagatctaagtct

SEQ ID NO: 467735 - DNA, 19 bp, Mus musculus
  siRNA target sequence for Son (NM_019973.1,5631-5649).
gacggtctgtatcaaaaga

SEQ ID NO: 467736 - DNA, 19 bp, Mus musculus
  siRNA target sequence for Son (NM_019973.1,5945-5963).
cccagccgtcggagaagat

SEQ ID NO: 467737 - DNA, 19 bp, Mus musculus
  siRNA target sequence for Son (NM_019973.1,5994-6012).
gtatatcaccggtcagatt

SEQ ID NO: 467738 - DNA, 19 bp, Mus musculus
  siRNA target sequence for Son (NM_019973.1,6007-6025).
cagattaaggcgatcaaga

SEQ ID NO: 467739 - DNA, 19 bp, Mus musculus
  siRNA target sequence for Son (NM_019973.1,6034-6052).
gagaagaaggtttagtaga

SEQ ID NO: 467740 - DNA, 19 bp, Mus musculus
  siRNA target sequence for Son (NM_019973.1,6056-6074).
cccattcggcggaaaagat

SEQ ID NO: 467741 - DNA, 19 bp, Mus musculus
  siRNA target sequence for Son (NM_019973.1,6099-6117).
cgcccaaacgtctaacaga

SEQ ID NO: 467742 - DNA, 19 bp, Mus musculus
  siRNA target sequence for Son (NM_019973.1,6101-6119).
cccaaacgtctaacagatt

SEQ ID NO: 467743 - DNA, 19 bp, Mus musculus
  siRNA target sequence for Son (NM_019973.1,6107-6125).
cgtctaacagatttggata

SEQ ID NO: 467744 - DNA, 19 bp, Mus musculus
  siRNA target sequence for Son (NM_019973.1,6121-6139).
ggataaggctcaattactt

SEQ ID NO: 467745 - DNA, 19 bp, Mus musculus
  siRNA target sequence for Son (NM_019973.1,6127-6145).
ggctcaattacttgaaata

SEQ ID NO: 467746 - DNA, 19 bp, Mus musculus
  siRNA target sequence for Son (NM_019973.1,6137-6155).
cttgaaatagccaaagcta

SEQ ID NO: 467747 - DNA, 19 bp, Mus musculus
  siRNA target sequence for Son (NM_019973.1,6188-6206).
cctttaccaccaaacctaa

SEQ ID NO: 467748 - DNA, 19 bp, Mus musculus
  siRNA target sequence for Son (NM_019973.1,6250-6268).
gtctggaggagctaccata

SEQ ID NO: 467749 - DNA, 19 bp, Mus musculus
  siRNA target sequence for Son (NM_019973.1,6258-6276).
gagctaccatagaagaact

SEQ ID NO: 467750 - DNA, 19 bp, Mus musculus
  siRNA target sequence for Son (NM_019973.1,6260-6278).
gctaccatagaagaactaa

SEQ ID NO: 467751 - DNA, 19 bp, Mus musculus
  siRNA target sequence for Son (NM_178880.3,6380-6398).
catcatccctttaaactca

SEQ ID NO: 467752 - DNA, 19 bp, Mus musculus
  siRNA target sequence for Son (NM_178880.3,6406-6424).
caagcccatttttttcaat

SEQ ID NO: 467753 - DNA, 19 bp, Mus musculus
  siRNA target sequence for Son (NM_178880.3,6410-6428).
cccatttttttcaatttga

SEQ ID NO: 467754 - DNA, 19 bp, Mus musculus
  siRNA target sequence for Son (NM_178880.3,6455-6473).
ccgaaaagccaagtaacat

SEQ ID NO: 467755 - DNA, 19 bp, Mus musculus
  siRNA target sequence for Son (NM_178880.3,6493-6511).
gtcatccggatctcaacat

SEQ ID NO: 467756 - DNA, 19 bp, Mus musculus
  siRNA target sequence for Son (NM_178880.3,6501-6519).
gatctcaacatcggaaaaa

SEQ ID NO: 467757 - DNA, 19 bp, Mus musculus
  siRNA target sequence for Son (NM_178880.3,6504-6522).
ctcaacatcggaaaaagga

SEQ ID NO: 467758 - DNA, 19 bp, Mus musculus
  siRNA target sequence for Son (NM_178880.3,6520-6538).
ggaagcggatagtgtttat

SEQ ID NO: 467759 - DNA, 19 bp, Mus musculus
  siRNA target sequence for Son (NM_178880.3,6546-6564).
gggttccagtcgagaaaaa

SEQ ID NO: 467760 - DNA, 19 bp, Mus musculus
  siRNA target sequence for Son (NM_178880.3,6547-6565).
ggttccagtcgagaaaaat

SEQ ID NO: 467761 - DNA, 19 bp, Mus musculus
  siRNA target sequence for Son (NM_178880.3,6556-6574).
cgagaaaaatggtgaagaa

SEQ ID NO: 467762 - DNA, 19 bp, Mus musculus
  siRNA target sequence for Son (NM_178880.3,6617-6635).
gagcctgtggacatttcaa

SEQ ID NO: 467763 - DNA, 19 bp, Mus musculus
  siRNA target sequence for Son (NM_178880.3,6695-6713).
gaagccatgagtatgttaa

SEQ ID NO: 467764 - DNA, 19 bp, Mus musculus
  siRNA target sequence for Son (NM_178880.3,6737-6755).
gcctgggctcagttgaatt

SEQ ID NO: 467765 - DNA, 19 bp, Mus musculus
  siRNA target sequence for Son (NM_178880.3,6741-6759).
gggctcagttgaattctat

SEQ ID NO: 467766 - DNA, 19 bp, Mus musculus
  siRNA target sequence for Son (NM_178880.3,6828-6846).
cccaagcctggattaaaaa

SEQ ID NO: 467767 - DNA, 19 bp, Mus musculus
  siRNA target sequence for Son (NM_178880.3,6958-6976).
ggaacccatccttgttgat

SEQ ID NO: 467768 - DNA, 19 bp, Mus musculus
  siRNA target sequence for Son (NM_178880.3,7086-7104).
ccttgatggaaatctgtaa

SEQ ID NO: 467769 - DNA, 19 bp, Mus musculus
  siRNA target sequence for Son (NM_178880.3,7087-7105).
cttgatggaaatctgtaat

SEQ ID NO: 467770 - DNA, 19 bp, Mus musculus
  siRNA target sequence for Son (NM_178880.3,7093-7111).
ggaaatctgtaataagaga

SEQ ID NO: 467771 - DNA, 19 bp, Mus musculus
  siRNA target sequence for Son (NM_178880.3,7113-7131).
ggtggcaaccacctgaatt

SEQ ID NO: 467772 - DNA, 19 bp, Mus musculus
  siRNA target sequence for Son (NM_178880.3,7154-7172).
cctgaccatcgcaaacatt

SEQ ID NO: 467773 - DNA, 19 bp, Mus musculus
  siRNA target sequence for Son (NM_178880.3,7155-7173).
ctgaccatcgcaaacattt

SEQ ID NO: 467774 - DNA, 19 bp, Mus musculus
  siRNA target sequence for Son (NM_178880.3,7163-7181).
cgcaaacatttcctcttta

SEQ ID NO: 467775 - DNA, 19 bp, Mus musculus
  siRNA target sequence for Son (NM_178880.3,7174-7192).
cctctttagggtattgaga

SEQ ID NO: 467776 - DNA, 19 bp, Mus musculus
  siRNA target sequence for Son (NM_178880.3,7175-7193).
ctctttagggtattgagaa

SEQ ID NO: 467777 - DNA, 19 bp, Mus musculus
  siRNA target sequence for Son (NM_178880.3,7177-7195).
ctttagggtattgagaaat

SEQ ID NO: 467778 - DNA, 19 bp, Mus musculus
  siRNA target sequence for Son (NM_178880.3,7202-7220).
ccttaccagcccaattgta

SEQ ID NO: 467779 - DNA, 19 bp, Mus musculus
  siRNA target sequence for Son (NM_178880.3,7203-7221).
cttaccagcccaattgtat

SEQ ID NO: 467780 - DNA, 19 bp, Mus musculus
  siRNA target sequence for Sos1 (NM_009231.1,101-119).
cagctgccttacgagtttt

SEQ ID NO: 467781 - DNA, 19 bp, Mus musculus
  siRNA target sequence for Sos1 (NM_009231.1,104-122).
ctgccttacgagtttttca

SEQ ID NO: 467782 - DNA, 19 bp, Mus musculus
  siRNA target sequence for Sos1 (NM_009231.1,155-173).
ctggtgcctgcgctgaaaa

SEQ ID NO: 467783 - DNA, 19 bp, Mus musculus
  siRNA target sequence for Sos1 (NM_009231.1,160-178).
gcctgcgctgaaaaaggtt

SEQ ID NO: 467784 - DNA, 19 bp, Mus musculus
  siRNA target sequence for Sos1 (NM_009231.1,193-211).
ccctactcttgagtctaat

SEQ ID NO: 467785 - DNA, 19 bp, Mus musculus
  siRNA target sequence for Sos1 (NM_009231.1,301-319).
ggaacgtgttcaaaagagt

SEQ ID NO: 467786 - DNA, 19 bp, Mus musculus
  siRNA target sequence for Sos1 (NM_009231.1,316-334).
gagttttcctcatccaatt

SEQ ID NO: 467787 - DNA, 19 bp, Mus musculus
  siRNA target sequence for Sos1 (NM_009231.1,378-396).
ggaagagacgaaatccttt

SEQ ID NO: 467788 - DNA, 19 bp, Mus musculus
  siRNA target sequence for Sos1 (NM_009231.1,403-421).
gccagcagaaagaattcat

SEQ ID NO: 467789 - DNA, 19 bp, Mus musculus
  siRNA target sequence for Sos1 (NM_009231.1,407-425).
gcagaaagaattcatcatt

SEQ ID NO: 467790 - DNA, 19 bp, Mus musculus
  siRNA target sequence for Sos1 (NM_009231.1,432-450).
gggaggtcctcggttataa

SEQ ID NO: 467791 - DNA, 19 bp, Mus musculus
  siRNA target sequence for Sos1 (NM_009231.1,433-451).
ggaggtcctcggttataaa

SEQ ID NO: 467792 - DNA, 19 bp, Mus musculus
  siRNA target sequence for Sos1 (NM_009231.1,436-454).
ggtcctcggttataaaatt

SEQ ID NO: 467793 - DNA, 19 bp, Mus musculus
  siRNA target sequence for Sos1 (NM_009231.1,458-476).
caccaggtttctgtttaca

SEQ ID NO: 467794 - DNA, 19 bp, Mus musculus
  siRNA target sequence for Sos1 (NM_009231.1,460-478).
ccaggtttctgtttacata

SEQ ID NO: 467795 - DNA, 19 bp, Mus musculus
  siRNA target sequence for Sos1 (NM_009231.1,518-536).
ctcgtggggaattatgtaa

SEQ ID NO: 467796 - DNA, 19 bp, Mus musculus
  siRNA target sequence for Sos1 (NM_009231.1,520-538).
cgtggggaattatgtaaga

SEQ ID NO: 467797 - DNA, 19 bp, Mus musculus
  siRNA target sequence for Sos1 (NM_009231.1,521-539).
gtggggaattatgtaagaa

SEQ ID NO: 467798 - DNA, 19 bp, Mus musculus
  siRNA target sequence for Sos1 (NM_009231.1,537-555).
gaaatatacggcattatga

SEQ ID NO: 467799 - DNA, 19 bp, Mus musculus
  siRNA target sequence for Sos1 (NM_009231.1,545-563).
cggcattatgaaattacaa

SEQ ID NO: 467800 - DNA, 19 bp, Mus musculus
  siRNA target sequence for Sos1 (NM_009231.1,598-616).
ggtattgatggatatgttt

SEQ ID NO: 467801 - DNA, 19 bp, Mus musculus
  siRNA target sequence for Sos1 (NM_009231.1,604-622).
gatggatatgtttcatcaa

SEQ ID NO: 467802 - DNA, 19 bp, Mus musculus
  siRNA target sequence for Sos1 (NM_009231.1,607-625).
ggatatgtttcatcaagat

SEQ ID NO: 467803 - DNA, 19 bp, Mus musculus
  siRNA target sequence for Sos1 (NM_009231.1,672-690).
cctcaggagaacaaactta

SEQ ID NO: 467804 - DNA, 19 bp, Mus musculus
  siRNA target sequence for Sos1 (NM_009231.1,678-696).
gagaacaaacttattatga

SEQ ID NO: 467805 - DNA, 19 bp, Mus musculus
  siRNA target sequence for Sos1 (NM_009231.1,719-737).
gaaattcgacagtatataa

SEQ ID NO: 467806 - DNA, 19 bp, Mus musculus
  siRNA target sequence for Sos1 (NM_009231.1,779-797).
gtctctaattccaaattgt

SEQ ID NO: 467807 - DNA, 19 bp, Mus musculus
  siRNA target sequence for Sos1 (NM_009231.1,820-838).
catattcagtcgtatagta

SEQ ID NO: 467808 - DNA, 19 bp, Mus musculus
  siRNA target sequence for Sos1 (NM_009231.1,826-844).
cagtcgtatagtagatata

SEQ ID NO: 467809 - DNA, 19 bp, Mus musculus
  siRNA target sequence for Sos1 (NM_009231.1,831-849).
gtatagtagatatacatga

SEQ ID NO: 467810 - DNA, 19 bp, Mus musculus
  siRNA target sequence for Sos1 (NM_009231.1,845-863).
catgaacttagtgtaaagt

SEQ ID NO: 467811 - DNA, 19 bp, Mus musculus
  siRNA target sequence for Sos1 (NM_009231.1,868-886).
gggccatatagaagatact

SEQ ID NO: 467812 - DNA, 19 bp, Mus musculus
  siRNA target sequence for Sos1 (NM_009231.1,870-888).
gccatatagaagatactgt

SEQ ID NO: 467813 - DNA, 19 bp, Mus musculus
  siRNA target sequence for Sos1 (NM_009231.1,959-977).
gcatttgacccgtatgagt

SEQ ID NO: 467814 - DNA, 19 bp, Mus musculus
  siRNA target sequence for Sos1 (NM_009231.1,967-985).
cccgtatgagtcatatgct

SEQ ID NO: 467815 - DNA, 19 bp, Mus musculus
  siRNA target sequence for Sos1 (NM_009231.1,976-994).
gtcatatgctcgggatatt

SEQ ID NO: 467816 - DNA, 19 bp, Mus musculus
  siRNA target sequence for Sos1 (NM_009231.1,978-996).
catatgctcgggatatttt

SEQ ID NO: 467817 - DNA, 19 bp, Mus musculus
  siRNA target sequence for Sos1 (NM_009231.1,1003-1021).
cggattccatggccatttt

SEQ ID NO: 467818 - DNA, 19 bp, Mus musculus
  siRNA target sequence for Sos1 (NM_009231.1,1041-1059).
ctggggcagcactttattt

SEQ ID NO: 467819 - DNA, 19 bp, Mus musculus
  siRNA target sequence for Sos1 (NM_009231.1,1044-1062).
gggcagcactttatttgca

SEQ ID NO: 467820 - DNA, 19 bp, Mus musculus
  siRNA target sequence for Sos1 (NM_009231.1,1066-1084).
cataggcgaaggcttcaaa

SEQ ID NO: 467821 - DNA, 19 bp, Mus musculus
  siRNA target sequence for Sos1 (NM_009231.1,1132-1150).
ccactgtctgcattacttt

SEQ ID NO: 467822 - DNA, 19 bp, Mus musculus
  siRNA target sequence for Sos1 (NM_009231.1,1162-1180).
gcagttagaagaaaagagt

SEQ ID NO: 467823 - DNA, 19 bp, Mus musculus
  siRNA target sequence for Sos1 (NM_009231.1,1237-1255).
ccaaagtggcatggaaaaa

SEQ ID NO: 467824 - DNA, 19 bp, Mus musculus
  siRNA target sequence for Sos1 (NM_009231.1,1238-1256).
caaagtggcatggaaaaaa

SEQ ID NO: 467825 - DNA, 19 bp, Mus musculus
  siRNA target sequence for Sos1 (NM_009231.1,1244-1262).
ggcatggaaaaaatttgct

SEQ ID NO: 467826 - DNA, 19 bp, Mus musculus
  siRNA target sequence for Sos1 (NM_009231.1,1260-1278).
gctccaaaagtcttgcaaa

SEQ ID NO: 467827 - DNA, 19 bp, Mus musculus
  siRNA target sequence for Sos1 (NM_009231.1,1261-1279).
ctccaaaagtcttgcaaaa

SEQ ID NO: 467828 - DNA, 19 bp, Mus musculus
  siRNA target sequence for Sos1 (NM_009231.1,1264-1282).
caaaagtcttgcaaaacga

SEQ ID NO: 467829 - DNA, 19 bp, Mus musculus
  siRNA target sequence for Sos1 (NM_009231.1,1271-1289).
cttgcaaaacgaagactaa

SEQ ID NO: 467830 - DNA, 19 bp, Mus musculus
  siRNA target sequence for Sos1 (NM_009231.1,1275-1293).
caaaacgaagactaagtga

SEQ ID NO: 467831 - DNA, 19 bp, Mus musculus
  siRNA target sequence for Sos1 (NM_009231.1,1357-1375).
cgagatccagaagaacatt

SEQ ID NO: 467832 - DNA, 19 bp, Mus musculus
  siRNA target sequence for Sos1 (NM_009231.1,1420-1438).
cataatggaaggaactctt

SEQ ID NO: 467833 - DNA, 19 bp, Mus musculus
  siRNA target sequence for Sos1 (NM_009231.1,1533-1551).
gtgctagcagtgcagaata

SEQ ID NO: 467834 - DNA, 19 bp, Mus musculus
  siRNA target sequence for Sos1 (NM_009231.1,1547-1565).
gaataccggcttaaagaaa

SEQ ID NO: 467835 - DNA, 19 bp, Mus musculus
  siRNA target sequence for Sos1 (NM_009231.1,1552-1570).
ccggcttaaagaaaagttt

SEQ ID NO: 467836 - DNA, 19 bp, Mus musculus
  siRNA target sequence for Sos1 (NM_009231.1,1553-1571).
cggcttaaagaaaagtttt

SEQ ID NO: 467837 - DNA, 19 bp, Mus musculus
  siRNA target sequence for Sos1 (NM_009231.1,1567-1585).
gttttttatgcgaaaggta

SEQ ID NO: 467838 - DNA, 19 bp, Mus musculus
  siRNA target sequence for Sos1 (NM_009231.1,1576-1594).
gcgaaaggtacagattaat

SEQ ID NO: 467839 - DNA, 19 bp, Mus musculus
  siRNA target sequence for Sos1 (NM_009231.1,1578-1596).
gaaaggtacagattaatga

SEQ ID NO: 467840 - DNA, 19 bp, Mus musculus
  siRNA target sequence for Sos1 (NM_009231.1,1646-1664).
gatggcaatagtgttatat

SEQ ID NO: 467841 - DNA, 19 bp, Mus musculus
  siRNA target sequence for Sos1 (NM_009231.1,1649-1667).
ggcaatagtgttatatttt

SEQ ID NO: 467842 - DNA, 19 bp, Mus musculus
  siRNA target sequence for Sos1 (NM_009231.1,1837-1855).
ggagaatattctattcgaa

SEQ ID NO: 467843 - DNA, 19 bp, Mus musculus
  siRNA target sequence for Sos1 (NM_009231.1,1904-1922).
gtgcttaagctcattgaga

SEQ ID NO: 467844 - DNA, 19 bp, Mus musculus
  siRNA target sequence for Sos1 (NM_009231.1,1958-1976).
gttcggacgtttcttacaa

SEQ ID NO: 467845 - DNA, 19 bp, Mus musculus
  siRNA target sequence for Sos1 (NM_009231.1,1961-1979).
cggacgtttcttacaacat

SEQ ID NO: 467846 - DNA, 19 bp, Mus musculus
  siRNA target sequence for Sos1 (NM_009231.1,1962-1980).
ggacgtttcttacaacata

SEQ ID NO: 467847 - DNA, 19 bp, Mus musculus
  siRNA target sequence for Sos1 (NM_009231.1,2011-2029).
gagtcttctgatagaaaga

SEQ ID NO: 467848 - DNA, 19 bp, Mus musculus
  siRNA target sequence for Sos1 (NM_009231.1,2061-2079).
ctgatcgcatagctataga

SEQ ID NO: 467849 - DNA, 19 bp, Mus musculus
  siRNA target sequence for Sos1 (NM_009231.1,2063-2081).
gatcgcatagctatagaga

SEQ ID NO: 467850 - DNA, 19 bp, Mus musculus
  siRNA target sequence for Sos1 (NM_009231.1,2141-2159).
gtgcagttgagggtgttaa

SEQ ID NO: 467851 - DNA, 19 bp, Mus musculus
  siRNA target sequence for Sos1 (NM_009231.1,2143-2161).
gcagttgagggtgttaaat

SEQ ID NO: 467852 - DNA, 19 bp, Mus musculus
  siRNA target sequence for Sos1 (NM_009231.1,2247-2265).
cagtaagaggtaaagcaat

SEQ ID NO: 467853 - DNA, 19 bp, Mus musculus
  siRNA target sequence for Sos1 (NM_009231.1,2274-2292).
gggtcgaatccatcactaa

SEQ ID NO: 467854 - DNA, 19 bp, Mus musculus
  siRNA target sequence for Sos1 (NM_009231.1,2279-2297).
gaatccatcactaagataa

SEQ ID NO: 467855 - DNA, 19 bp, Mus musculus
  siRNA target sequence for Sos1 (NM_009231.1,2327-2345).
ggcccaggtcataacatta

SEQ ID NO: 467856 - DNA, 19 bp, Mus musculus
  siRNA target sequence for Sos1 (NM_009231.1,2329-2347).
cccaggtcataacattaca

SEQ ID NO: 467857 - DNA, 19 bp, Mus musculus
  siRNA target sequence for Sos1 (NM_009231.1,2330-2348).
ccaggtcataacattacat

SEQ ID NO: 467858 - DNA, 19 bp, Mus musculus
  siRNA target sequence for Sos1 (NM_009231.1,2369-2387).
gttgagtggcacataagca

SEQ ID NO: 467859 - DNA, 19 bp, Mus musculus
  siRNA target sequence for Sos1 (NM_009231.1,2385-2403).
gcagacctgggcacataga

SEQ ID NO: 467860 - DNA, 19 bp, Mus musculus
  siRNA target sequence for Sos1 (NM_009231.1,2452-2470).
cactttacttgaatcagat

SEQ ID NO: 467861 - DNA, 19 bp, Mus musculus
  siRNA target sequence for Sos1 (NM_009231.1,2581-2599).
cactttgtggtttgagaaa

SEQ ID NO: 467862 - DNA, 19 bp, Mus musculus
  siRNA target sequence for Sos1 (NM_009231.1,2627-2645).
gaaagagtagctgtagtaa

SEQ ID NO: 467863 - DNA, 19 bp, Mus musculus
  siRNA target sequence for Sos1 (NM_009231.1,2646-2664).
gtcggataattgagattct

SEQ ID NO: 467864 - DNA, 19 bp, Mus musculus
  siRNA target sequence for Sos1 (NM_009231.1,2650-2668).
gataattgagattctacaa

SEQ ID NO: 467865 - DNA, 19 bp, Mus musculus
  siRNA target sequence for Sos1 (NM_009231.1,2725-2743).
ctcgtcacctgtttacaga

SEQ ID NO: 467866 - DNA, 19 bp, Mus musculus
  siRNA target sequence for Sos1 (NM_009231.1,2749-2767).
ccacacatttgagcaaata

SEQ ID NO: 467867 - DNA, 19 bp, Mus musculus
  siRNA target sequence for Sos1 (NM_009231.1,2816-2834).
gatcactataagaaatatt

SEQ ID NO: 467868 - DNA, 19 bp, Mus musculus
  siRNA target sequence for Sos1 (NM_009231.1,2836-2854).
ggcaaaactcaggtctatt

SEQ ID NO: 467869 - DNA, 19 bp, Mus musculus
  siRNA target sequence for Sos1 (NM_009231.1,2837-2855).
gcaaaactcaggtctatta

SEQ ID NO: 467870 - DNA, 19 bp, Mus musculus
  siRNA target sequence for Sos1 (NM_009231.1,2838-2856).
caaaactcaggtctattaa

SEQ ID NO: 467871 - DNA, 19 bp, Mus musculus
  siRNA target sequence for Sos1 (NM_009231.1,2937-2955).
gacacgggaaagagcttat

SEQ ID NO: 467872 - DNA, 19 bp, Mus musculus
  siRNA target sequence for Sos1 (NM_009231.1,2939-2957).
cacgggaaagagcttatta

SEQ ID NO: 467873 - DNA, 19 bp, Mus musculus
  siRNA target sequence for Sos1 (NM_009231.1,2942-2960).
gggaaagagcttattaact

SEQ ID NO: 467874 - DNA, 19 bp, Mus musculus
  siRNA target sequence for Sos1 (NM_009231.1,2943-2961).
ggaaagagcttattaactt

SEQ ID NO: 467875 - DNA, 19 bp, Mus musculus
  siRNA target sequence for Sos1 (NM_009231.1,3035-3053).
gtggagccggacatcaaga

SEQ ID NO: 467876 - DNA, 19 bp, Mus musculus
  siRNA target sequence for Sos1 (NM_009231.1,3046-3064).
catcaagaggttctttgaa

SEQ ID NO: 467877 - DNA, 19 bp, Mus musculus
  siRNA target sequence for Sos1 (NM_009231.1,3161-3179).
ccgagattcccaaaaaaat

SEQ ID NO: 467878 - DNA, 19 bp, Mus musculus
  siRNA target sequence for Sos1 (NM_009231.1,3162-3180).
cgagattcccaaaaaaata

SEQ ID NO: 467879 - DNA, 19 bp, Mus musculus
  siRNA target sequence for Sos1 (NM_009231.1,3181-3199).
cagctatcccctaaaatct

SEQ ID NO: 467880 - DNA, 19 bp, Mus musculus
  siRNA target sequence for Sos1 (NM_009231.1,3201-3219).
ctggtgttcgtccatcaaa

SEQ ID NO: 467881 - DNA, 19 bp, Mus musculus
  siRNA target sequence for Sos1 (NM_009231.1,3206-3224).
gttcgtccatcaaatccaa

SEQ ID NO: 467882 - DNA, 19 bp, Mus musculus
  siRNA target sequence for Sos1 (NM_009231.1,3373-3391).
ctccagcaacacagatgtt

SEQ ID NO: 467883 - DNA, 19 bp, Mus musculus
  siRNA target sequence for Sos1 (NM_009231.1,3389-3407).
gtttgcagcgtgttcgatt

SEQ ID NO: 467884 - DNA, 19 bp, Mus musculus
  siRNA target sequence for Sos1 (NM_009231.1,3393-3411).
gcagcgtgttcgattctga

SEQ ID NO: 467885 - DNA, 19 bp, Mus musculus
  siRNA target sequence for Sos1 (NM_009231.1,3418-3436).
ggcaagcccttttcattca

SEQ ID NO: 467886 - DNA, 19 bp, Mus musculus
  siRNA target sequence for Sos1 (NM_009231.1,3419-3437).
gcaagcccttttcattcaa

SEQ ID NO: 467887 - DNA, 19 bp, Mus musculus
  siRNA target sequence for Sos1 (NM_009231.1,3424-3442).
cccttttcattcaagatct

SEQ ID NO: 467888 - DNA, 19 bp, Mus musculus
  siRNA target sequence for Sos1 (NM_009231.1,3443-3461).
gcttcagtctcatctataa

SEQ ID NO: 467889 - DNA, 19 bp, Mus musculus
  siRNA target sequence for Sos1 (NM_009231.1,3447-3465).
cagtctcatctataagttt

SEQ ID NO: 467890 - DNA, 19 bp, Mus musculus
  siRNA target sequence for Sos1 (NM_009231.1,3449-3467).
gtctcatctataagtttat

SEQ ID NO: 467891 - DNA, 19 bp, Mus musculus
  siRNA target sequence for Sos1 (NM_009231.1,3453-3471).
catctataagtttatccaa

SEQ ID NO: 467892 - DNA, 19 bp, Mus musculus
  siRNA target sequence for Sos1 (NM_009231.1,3468-3486).
ccaagggcactgatgaagt

SEQ ID NO: 467893 - DNA, 19 bp, Mus musculus
  siRNA target sequence for Sos1 (NM_009231.1,3548-3566).
ccatccaagattatgtcta

SEQ ID NO: 467894 - DNA, 19 bp, Mus musculus
  siRNA target sequence for Sos1 (NM_009231.1,3627-3645).
cacgctattcaatatcaga

SEQ ID NO: 467895 - DNA, 19 bp, Mus musculus
  siRNA target sequence for Sos1 (NM_009231.1,3709-3727).
gacacctgatgttttctca

SEQ ID NO: 467896 - DNA, 19 bp, Mus musculus
  siRNA target sequence for Sos1 (NM_009231.1,3724-3742).
ctcaagctcaccattacat

SEQ ID NO: 467897 - DNA, 19 bp, Mus musculus
  siRNA target sequence for Sos1 (NM_009231.1,3726-3744).
caagctcaccattacatct

SEQ ID NO: 467898 - DNA, 19 bp, Mus musculus
  siRNA target sequence for Sos1 (NM_009231.1,3750-3768).
ctcctcctttgggcaaaaa

SEQ ID NO: 467899 - DNA, 19 bp, Mus musculus
  siRNA target sequence for Sos1 (NM_009231.1,3760-3778).
gggcaaaaagagtgatcat

SEQ ID NO: 467900 - DNA, 19 bp, Mus musculus
  siRNA target sequence for Sos1 (NM_009231.1,3955-3973).
caaactccctccaaaaact

SEQ ID NO: 467901 - DNA, 19 bp, Mus musculus
  siRNA target sequence for Sox11 (NM_009234.1,419-437).
cggcgtcgggccacatcaa

SEQ ID NO: 467902 - DNA, 19 bp, Mus musculus
  siRNA target sequence for Sox11 (NM_009234.1,1239-1257).
gttcgacctgagcttgaat

SEQ ID NO: 467903 - DNA, 19 bp, Mus musculus
  siRNA target sequence for Sox11 (NM_009234.1,1322-1340).
ccctgtcgctggtggataa

SEQ ID NO: 467904 - DNA, 19 bp, Mus musculus
  siRNA target sequence for Sox11 (NM_009234.1,1456-1474).
gacctggtgttcacgtatt

SEQ ID NO: 467905 - DNA, 19 bp, Mus musculus
  siRNA target sequence for Sox13 (NM_011439.1,233-251).
ggacttcaaccgcaactta

SEQ ID NO: 467906 - DNA, 19 bp, Mus musculus
  siRNA target sequence for Sox13 (NM_011439.1,244-262).
gcaacttacaggaagttgt

SEQ ID NO: 467907 - DNA, 19 bp, Mus musculus
  siRNA target sequence for Sox13 (NM_011439.1,658-676).
cccagctggctttacctat

SEQ ID NO: 467908 - DNA, 19 bp, Mus musculus
  siRNA target sequence for Sox13 (NM_011439.1,1365-1383).
cggcagcacctggagaaat

SEQ ID NO: 467909 - DNA, 19 bp, Mus musculus
  siRNA target sequence for Sox13 (NM_011439.1,1575-1593).
gcacaggtgagctcagata

SEQ ID NO: 467910 - DNA, 19 bp, Mus musculus
  siRNA target sequence for Sox13 (NM_011439.1,1576-1594).
cacaggtgagctcagatat

SEQ ID NO: 467911 - DNA, 19 bp, Mus musculus
  siRNA target sequence for Sox13 (NM_011439.1,2275-2293).
gccacctgggttactttga

SEQ ID NO: 467912 - DNA, 19 bp, Mus musculus
  siRNA target sequence for Sox13 (NM_011439.1,2276-2294).
ccacctgggttactttgaa

SEQ ID NO: 467913 - DNA, 19 bp, Mus musculus
  siRNA target sequence for Sox13 (NM_011439.1,2366-2384).
ggcccacacatgttcatca

SEQ ID NO: 467914 - DNA, 19 bp, Mus musculus
  siRNA target sequence for Sox13 (NM_011439.1,2706-2724).
gttcccacggagccatttt

SEQ ID NO: 467915 - DNA, 19 bp, Mus musculus
  siRNA target sequence for Sox13 (NM_011439.1,2795-2813).
cgcagtcatgaggatcttt

SEQ ID NO: 467916 - DNA, 19 bp, Mus musculus
  siRNA target sequence for Sox13 (NM_011439.1,2796-2814).
gcagtcatgaggatctttt

SEQ ID NO: 467917 - DNA, 19 bp, Mus musculus
  siRNA target sequence for Sox13 (NM_011439.1,2797-2815).
cagtcatgaggatcttttt

SEQ ID NO: 467918 - DNA, 19 bp, Mus musculus
  siRNA target sequence for Sox13 (NM_011439.1,2934-2952).
cccaaggaaatcattagca

SEQ ID NO: 467919 - DNA, 19 bp, Mus musculus
  siRNA target sequence for Sox17 (NM_011441.2,1194-1212).
gccccctcggggatgtaaa

SEQ ID NO: 467920 - DNA, 19 bp, Mus musculus
  siRNA target sequence for Sox17 (NM_011441.2,1950-1968).
gcgctctgcacctgtacta

SEQ ID NO: 467921 - DNA, 19 bp, Mus musculus
  siRNA target sequence for Sox17 (NM_011441.2,2173-2191).
ggaccgcacggaattcgaa

SEQ ID NO: 467922 - DNA, 19 bp, Mus musculus
  siRNA target sequence for Sox17 (NM_011441.2,2178-2196).
gcacggaattcgaacagta

SEQ ID NO: 467923 - DNA, 19 bp, Mus musculus
  siRNA target sequence for Sox17 (NM_011441.2,2179-2197).
cacggaattcgaacagtat

SEQ ID NO: 467924 - DNA, 19 bp, Mus musculus
  siRNA target sequence for Sox17 (NM_011441.2,2181-2199).
cggaattcgaacagtatct

SEQ ID NO: 467925 - DNA, 19 bp, Mus musculus
  siRNA target sequence for Sox17 (NM_011441.2,2304-2322).
ctagctcagcggtctacta

SEQ ID NO: 467926 - DNA, 19 bp, Mus musculus
  siRNA target sequence for Sox17 (NM_011441.2,2310-2328).
cagcggtctactattgcaa

SEQ ID NO: 467927 - DNA, 19 bp, Mus musculus
  siRNA target sequence for Sox18 (NM_009236.1,373-391).
gcgactggcgcaacaaaat

SEQ ID NO: 467928 - DNA, 19 bp, Mus musculus
  siRNA target sequence for Sox18 (NM_009236.1,900-918).
cactcgcaggtctctacta

SEQ ID NO: 467929 - DNA, 19 bp, Mus musculus
  siRNA target sequence for Sox18 (NM_009236.1,1041-1059).
ccgaatttgaccagtatct

SEQ ID NO: 467930 - DNA, 19 bp, Mus musculus
  siRNA target sequence for Sox18 (NM_009236.1,1181-1199).
gctagcagcgcggtctatt

SEQ ID NO: 467931 - DNA, 19 bp, Mus musculus
  siRNA target sequence for Sox18 (NM_009236.1,1182-1200).
ctagcagcgcggtctatta

SEQ ID NO: 467932 - DNA, 19 bp, Mus musculus
  siRNA target sequence for Sox3 (NM_009237.1,1087-1105).
gggactgcggtcaatggaa

SEQ ID NO: 467933 - DNA, 19 bp, Mus musculus
  siRNA target sequence for Sox30 (NM_173384.1,255-273).
gacgcctgctgcaagtgaa

SEQ ID NO: 467934 - DNA, 19 bp, Mus musculus
  siRNA target sequence for Sox30 (NM_173384.1,628-646).
ccgaagcgatgagaagaaa

SEQ ID NO: 467935 - DNA, 19 bp, Mus musculus
  siRNA target sequence for Sox30 (NM_173384.1,832-850).
ccagccgcctagtgctttt

SEQ ID NO: 467936 - DNA, 19 bp, Mus musculus
  siRNA target sequence for Sox30 (NM_173384.1,868-886).
cctaaggttccctttgaca

SEQ ID NO: 467937 - DNA, 19 bp, Mus musculus
  siRNA target sequence for Sox30 (NM_173384.1,906-924).
gagcccgtatccagtttca

SEQ ID NO: 467938 - DNA, 19 bp, Mus musculus
  siRNA target sequence for Sox30 (NM_173384.1,930-948).
ctccgccttctgagttgat

SEQ ID NO: 467939 - DNA, 19 bp, Mus musculus
  siRNA target sequence for Sox30 (NM_173384.1,968-986).
ctgacaccagtgcctatta

SEQ ID NO: 467940 - DNA, 19 bp, Mus musculus
  siRNA target sequence for Sox30 (NM_173384.1,972-990).
caccagtgcctattaaaat

SEQ ID NO: 467941 - DNA, 19 bp, Mus musculus
  siRNA target sequence for Sox30 (NM_173384.1,975-993).
cagtgcctattaaaatgca

SEQ ID NO: 467942 - DNA, 19 bp, Mus musculus
  siRNA target sequence for Sox30 (NM_173384.1,997-1015).
cttgctggagccttctgta

SEQ ID NO: 467943 - DNA, 19 bp, Mus musculus
  siRNA target sequence for Sox30 (NM_173384.1,1001-1019).
ctggagccttctgtaaaaa

SEQ ID NO: 467944 - DNA, 19 bp, Mus musculus
  siRNA target sequence for Sox30 (NM_173384.1,1051-1069).
gccctcagatgcaggaata

SEQ ID NO: 467945 - DNA, 19 bp, Mus musculus
  siRNA target sequence for Sox30 (NM_173384.1,1071-1089).
ctgatactcccttcagtaa

SEQ ID NO: 467946 - DNA, 19 bp, Mus musculus
  siRNA target sequence for Sox30 (NM_173384.1,1155-1173).
cagcactagccaaagctaa

SEQ ID NO: 467947 - DNA, 19 bp, Mus musculus
  siRNA target sequence for Sox30 (NM_173384.1,1219-1237).
gtggaacaaacttagtgaa

SEQ ID NO: 467948 - DNA, 19 bp, Mus musculus
  siRNA target sequence for Sox30 (NM_173384.1,1229-1247).
cttagtgaagaacaaaaga

SEQ ID NO: 467949 - DNA, 19 bp, Mus musculus
  siRNA target sequence for Sox30 (NM_173384.1,1246-1264).
gaaaccttattatgatgaa

SEQ ID NO: 467950 - DNA, 19 bp, Mus musculus
  siRNA target sequence for Sox30 (NM_173384.1,1345-1363).
ccctctaagtgtttccaat

SEQ ID NO: 467951 - DNA, 19 bp, Mus musculus
  siRNA target sequence for Sox30 (NM_173384.1,1349-1367).
ctaagtgtttccaatgtat

SEQ ID NO: 467952 - DNA, 19 bp, Mus musculus
  siRNA target sequence for Sox30 (NM_173384.1,1371-1389).
ctggtaccacacagaatat

SEQ ID NO: 467953 - DNA, 19 bp, Mus musculus
  siRNA target sequence for Sox30 (NM_173384.1,1374-1392).
gtaccacacagaatattat

SEQ ID NO: 467954 - DNA, 19 bp, Mus musculus
  siRNA target sequence for Sox30 (NM_173384.1,1382-1400).
cagaatattatctctacaa

SEQ ID NO: 467955 - DNA, 19 bp, Mus musculus
  siRNA target sequence for Sox30 (NM_173384.1,1384-1402).
gaatattatctctacaaat

SEQ ID NO: 467956 - DNA, 19 bp, Mus musculus
  siRNA target sequence for Sox30 (NM_173384.1,1395-1413).
ctacaaatcctacaacaat

SEQ ID NO: 467957 - DNA, 19 bp, Mus musculus
  siRNA target sequence for Sox30 (NM_173384.1,1398-1416).
caaatcctacaacaattta

SEQ ID NO: 467958 - DNA, 19 bp, Mus musculus
  siRNA target sequence for Sox30 (NM_173384.1,1403-1421).
cctacaacaatttatcctt

SEQ ID NO: 467959 - DNA, 19 bp, Mus musculus
  siRNA target sequence for Sox30 (NM_173384.1,1404-1422).
ctacaacaatttatcctta

SEQ ID NO: 467960 - DNA, 19 bp, Mus musculus
  siRNA target sequence for Sox30 (NM_173384.1,1532-1550).
ccaagtcccatcacacttt

SEQ ID NO: 467961 - DNA, 19 bp, Mus musculus
  siRNA target sequence for Sox30 (NM_173384.1,1621-1639).
cccacctcagcgcttttct

SEQ ID NO: 467962 - DNA, 19 bp, Mus musculus
  siRNA target sequence for Sox30 (NM_173384.1,1638-1656).
ctgggccttcccaaactga

SEQ ID NO: 467963 - DNA, 19 bp, Mus musculus
  siRNA target sequence for Sox30 (NM_173384.1,1642-1660).
gccttcccaaactgacatt

SEQ ID NO: 467964 - DNA, 19 bp, Mus musculus
  siRNA target sequence for Sox30 (NM_173384.1,1754-1772).
gcccatgccagatttgcaa

SEQ ID NO: 467965 - DNA, 19 bp, Mus musculus
  siRNA target sequence for Sox30 (NM_173384.1,1891-1909).
ccatccagccacactgttt

SEQ ID NO: 467966 - DNA, 19 bp, Mus musculus
  siRNA target sequence for Sox30 (NM_173384.1,1997-2015).
cctccctttggctatggaa

SEQ ID NO: 467967 - DNA, 19 bp, Mus musculus
  siRNA target sequence for Sox30 (NM_173384.1,1998-2016).
ctccctttggctatggaaa

SEQ ID NO: 467968 - DNA, 19 bp, Mus musculus
  siRNA target sequence for Sox30 (NM_173384.1,2006-2024).
ggctatggaaattttccaa

SEQ ID NO: 467969 - DNA, 19 bp, Mus musculus
  siRNA target sequence for Sox30 (NM_173384.1,2025-2043).
gttcaatgccagaatgtct

SEQ ID NO: 467970 - DNA, 19 bp, Mus musculus
  siRNA target sequence for Sox30 (NM_173384.1,2077-2095).
ggctatcttttcagcttta

SEQ ID NO: 467971 - DNA, 19 bp, Mus musculus
  siRNA target sequence for Sox30 (NM_173384.1,2104-2122).
ctatcctttcagagactat

SEQ ID NO: 467972 - DNA, 19 bp, Mus musculus
  siRNA target sequence for Sox30 (NM_173384.1,2199-2217).
gccacggtggggaagagta

SEQ ID NO: 467973 - DNA, 19 bp, Mus musculus
  siRNA target sequence for Sox30 (NM_173384.1,2294-2312).
gtccagcaagtcaatgtca

SEQ ID NO: 467974 - DNA, 19 bp, Mus musculus
  siRNA target sequence for Sox30 (NM_173384.1,2336-2354).
gaaaaagtgctcaggaatt

SEQ ID NO: 467975 - DNA, 19 bp, Mus musculus
  siRNA target sequence for Sox4 (NM_009238.1,817-835).
cgcccagtggccacatcaa

SEQ ID NO: 467976 - DNA, 19 bp, Mus musculus
  siRNA target sequence for Sox4 (NM_009238.1,1778-1796).
gaaccccagctcaaacttt

SEQ ID NO: 467977 - DNA, 19 bp, Mus musculus
  siRNA target sequence for Sox4 (NM_009238.1,1842-1860).
cgggacctggattttaact

SEQ ID NO: 467978 - DNA, 19 bp, Mus musculus
  siRNA target sequence for Sox5 (NM_011444.1,363-381).
ctgtgcagcacaacacaat

SEQ ID NO: 467979 - DNA, 19 bp, Mus musculus
  siRNA target sequence for Sox5 (NM_011444.1,593-611).
gacactcccagtattgaaa

SEQ ID NO: 467980 - DNA, 19 bp, Mus musculus
  siRNA target sequence for Sox5 (NM_011444.1,711-729).
ggcagctcatgggtatgat

SEQ ID NO: 467981 - DNA, 19 bp, Mus musculus
  siRNA target sequence for Sox5 (NM_011444.1,715-733).
gctcatgggtatgatcaat

SEQ ID NO: 467982 - DNA, 19 bp, Mus musculus
  siRNA target sequence for Sox5 (NM_011444.1,770-788).
cacgatgagcagaagaagt

SEQ ID NO: 467983 - DNA, 19 bp, Mus musculus
  siRNA target sequence for Sox5 (NM_011444.1,787-805).
gttggctgcatctcagata

SEQ ID NO: 467984 - DNA, 19 bp, Mus musculus
  siRNA target sequence for Sox5 (NM_011444.1,930-948).
gtcagctgccgccattgat

SEQ ID NO: 467985 - DNA, 19 bp, Mus musculus
  siRNA target sequence for Sox5 (NM_011444.1,934-952).
gctgccgccattgatgatt

SEQ ID NO: 467986 - DNA, 19 bp, Mus musculus
  siRNA target sequence for Sox5 (NM_011444.1,1257-1275).
gtccaccacccaaaagcaa

SEQ ID NO: 467987 - DNA, 19 bp, Mus musculus
  siRNA target sequence for Sox5 (NM_011444.1,1286-1304).
gcccagccactgaacctat

SEQ ID NO: 467988 - DNA, 19 bp, Mus musculus
  siRNA target sequence for Sox5 (NM_011444.1,1318-1336).
gacctctgatggcaaatca

SEQ ID NO: 467989 - DNA, 19 bp, Mus musculus
  siRNA target sequence for Sox5 (NM_011444.1,1409-1427).
gtcccggcagcattagcta

SEQ ID NO: 467990 - DNA, 19 bp, Mus musculus
  siRNA target sequence for Sox5 (NM_011444.1,1446-1464).
gcacaataggctatttaaa

SEQ ID NO: 467991 - DNA, 19 bp, Mus musculus
  siRNA target sequence for Sox5 (NM_011444.1,1449-1467).
caataggctatttaaatga

SEQ ID NO: 467992 - DNA, 19 bp, Mus musculus
  siRNA target sequence for Sox5 (NM_011444.1,1581-1599).
gcaactgccggacagaaaa

SEQ ID NO: 467993 - DNA, 19 bp, Mus musculus
  siRNA target sequence for Sox5 (NM_011444.1,1631-1649).
cagttggcagttaaacaga

SEQ ID NO: 467994 - DNA, 19 bp, Mus musculus
  siRNA target sequence for Sox5 (NM_011444.1,1636-1654).
ggcagttaaacagaatgaa

SEQ ID NO: 467995 - DNA, 19 bp, Mus musculus
  siRNA target sequence for Sox5 (NM_011444.1,1659-1677).
ggaaatttagccatggaat

SEQ ID NO: 467996 - DNA, 19 bp, Mus musculus
  siRNA target sequence for Sox5 (NM_011444.1,1668-1686).
gccatggaatgatggattt

SEQ ID NO: 467997 - DNA, 19 bp, Mus musculus
  siRNA target sequence for Sox5 (NM_011444.1,1673-1691).
ggaatgatggatttcaata

SEQ ID NO: 467998 - DNA, 19 bp, Mus musculus
  siRNA target sequence for Sox5 (NM_011444.1,1674-1692).
gaatgatggatttcaatat

SEQ ID NO: 467999 - DNA, 19 bp, Mus musculus
  siRNA target sequence for Sox5 (NM_011444.1,1718-1736).
ggagtctcagagtcaagaa

SEQ ID NO: 468000 - DNA, 19 bp, Mus musculus
  siRNA target sequence for Sox5 (NM_011444.1,1847-1865).
cccgacatgcacaattcca

SEQ ID NO: 468001 - DNA, 19 bp, Mus musculus
  siRNA target sequence for Sox5 (NM_011444.1,1848-1866).
ccgacatgcacaattccaa

SEQ ID NO: 468002 - DNA, 19 bp, Mus musculus
  siRNA target sequence for Sox5 (NM_011444.1,1899-1917).
ctatgaccaacctagagaa

SEQ ID NO: 468003 - DNA, 19 bp, Mus musculus
  siRNA target sequence for Sox5 (NM_011444.1,2299-2317).
ggacatcaacggagagatt

SEQ ID NO: 468004 - DNA, 19 bp, Mus musculus
  siRNA target sequence for Sox5 (NM_011444.1,2364-2382).
ggagtgacagcgaaaacca

SEQ ID NO: 468005 - DNA, 19 bp, Mus musculus
  siRNA target sequence for Sox6 (NM_011445.1,969-987).
ccgctcatgatcccaattt

SEQ ID NO: 468006 - DNA, 19 bp, Mus musculus
  siRNA target sequence for Sox6 (NM_011445.1,1040-1058).
cctcttcccccctggaata

SEQ ID NO: 468007 - DNA, 19 bp, Mus musculus
  siRNA target sequence for Sox6 (NM_011445.1,1043-1061).
cttcccccctggaataaca

SEQ ID NO: 468008 - DNA, 19 bp, Mus musculus
  siRNA target sequence for Sox6 (NM_011445.1,1047-1065).
ccccctggaataacataca

SEQ ID NO: 468009 - DNA, 19 bp, Mus musculus
  siRNA target sequence for Sox6 (NM_011445.1,1079-1097).
ctaccccgtacagttcatt

SEQ ID NO: 468010 - DNA, 19 bp, Mus musculus
  siRNA target sequence for Sox6 (NM_011445.1,1089-1107).
cagttcattccgtcaacaa

SEQ ID NO: 468011 - DNA, 19 bp, Mus musculus
  siRNA target sequence for Sox6 (NM_011445.1,1161-1179).
gtttcccacccacaaatta

SEQ ID NO: 468012 - DNA, 19 bp, Mus musculus
  siRNA target sequence for Sox6 (NM_011445.1,1186-1204).
ggctaaagggcataagtga

SEQ ID NO: 468013 - DNA, 19 bp, Mus musculus
  siRNA target sequence for Sox6 (NM_011445.1,1240-1258).
gtggtggccactcttacaa

SEQ ID NO: 468014 - DNA, 19 bp, Mus musculus
  siRNA target sequence for Sox6 (NM_011445.1,1399-1417).
ggaccagccctgtaactca

SEQ ID NO: 468015 - DNA, 19 bp, Mus musculus
  siRNA target sequence for Sox6 (NM_011445.1,1400-1418).
gaccagccctgtaactcaa

SEQ ID NO: 468016 - DNA, 19 bp, Mus musculus
  siRNA target sequence for Sox6 (NM_011445.1,1597-1615).
gatcctctctagatatact

SEQ ID NO: 468017 - DNA, 19 bp, Mus musculus
  siRNA target sequence for Sox6 (NM_011445.1,1921-1939).
gctctgcagctaaactaca

SEQ ID NO: 468018 - DNA, 19 bp, Mus musculus
  siRNA target sequence for Sox6 (NM_011445.1,1929-1947).
gctaaactacagcagtatt

SEQ ID NO: 468019 - DNA, 19 bp, Mus musculus
  siRNA target sequence for Sox6 (NM_011445.1,2017-2035).
gcagcgaaccccacatcaa

SEQ ID NO: 468020 - DNA, 19 bp, Mus musculus
  siRNA target sequence for Sox6 (NM_011445.1,2116-2134).
ccaacattagcaaaatctt

SEQ ID NO: 468021 - DNA, 19 bp, Mus musculus
  siRNA target sequence for Sox6 (NM_011445.1,2117-2135).
caacattagcaaaatctta

SEQ ID NO: 468022 - DNA, 19 bp, Mus musculus
  siRNA target sequence for Sox6 (NM_011445.1,2165-2183).
ggagaagcaaccttactat

SEQ ID NO: 468023 - DNA, 19 bp, Mus musculus
  siRNA target sequence for Sox6 (NM_011445.1,2171-2189).
gcaaccttactatgaagaa

SEQ ID NO: 468024 - DNA, 19 bp, Mus musculus
  siRNA target sequence for Sox6 (NM_011445.1,2293-2311).
gggagtacaagcaactgat

SEQ ID NO: 468025 - DNA, 19 bp, Mus musculus
  siRNA target sequence for Sox6 (NM_011445.1,2380-2398).
caggaacaggtgttgtgta

SEQ ID NO: 468026 - DNA, 19 bp, Mus musculus
  siRNA target sequence for Sox6 (NM_011445.1,2394-2412).
gtgtatcctggtgctatta

SEQ ID NO: 468027 - DNA, 19 bp, Mus musculus
  siRNA target sequence for Sox6 (NM_011445.1,2396-2414).
gtatcctggtgctattact

SEQ ID NO: 468028 - DNA, 19 bp, Mus musculus
  siRNA target sequence for Sox6 (NM_011445.1,2503-2521).
gcacgtatggtatgaagat

SEQ ID NO: 468029 - DNA, 19 bp, Mus musculus
  siRNA target sequence for Sox6 (NM_011445.1,2537-2555).
ggctgggaacgacatgatt

SEQ ID NO: 468030 - DNA, 19 bp, Mus musculus
  siRNA target sequence for Sox6 (NM_011445.1,2538-2556).
gctgggaacgacatgatta

SEQ ID NO: 468031 - DNA, 19 bp, Mus musculus
  siRNA target sequence for Sox6 (NM_011445.1,2539-2557).
ctgggaacgacatgattaa

SEQ ID NO: 468032 - DNA, 19 bp, Mus musculus
  siRNA target sequence for Sox7 (NM_011446.1,476-494).
gaacacgctgcctgagaaa

SEQ ID NO: 468033 - DNA, 19 bp, Mus musculus
  siRNA target sequence for Sox7 (NM_011446.1,787-805).
gccaccctctaggttcttt

SEQ ID NO: 468034 - DNA, 19 bp, Mus musculus
  siRNA target sequence for Sox7 (NM_011446.1,788-806).
ccaccctctaggttcttta

SEQ ID NO: 468035 - DNA, 19 bp, Mus musculus
  siRNA target sequence for Sox7 (NM_011446.1,816-834).
caatccccaggggtttcta

SEQ ID NO: 468036 - DNA, 19 bp, Mus musculus
  siRNA target sequence for Sox7 (NM_011446.1,820-838).
ccccaggggtttctatgat

SEQ ID NO: 468037 - DNA, 19 bp, Mus musculus
  siRNA target sequence for Sox7 (NM_011446.1,859-877).
ccccatctccagcctatta

SEQ ID NO: 468038 - DNA, 19 bp, Mus musculus
  siRNA target sequence for Sox7 (NM_011446.1,861-879).
ccatctccagcctattact

SEQ ID NO: 468039 - DNA, 19 bp, Mus musculus
  siRNA target sequence for Sox7 (NM_011446.1,1002-1020).
gacatggatcgcaatgaat

SEQ ID NO: 468040 - DNA, 19 bp, Mus musculus
  siRNA target sequence for Sox7 (NM_011446.1,1004-1022).
catggatcgcaatgaattt

SEQ ID NO: 468041 - DNA, 19 bp, Mus musculus
  siRNA target sequence for Sox7 (NM_011446.1,1152-1170).
gatgccacggccacgtatt

SEQ ID NO: 468042 - DNA, 19 bp, Mus musculus
  siRNA target sequence for Sox7 (NM_011446.1,1155-1173).
gccacggccacgtattaca

SEQ ID NO: 468043 - DNA, 19 bp, Mus musculus
  siRNA target sequence for Sox7 (NM_011446.1,1156-1174).
ccacggccacgtattacaa

SEQ ID NO: 468044 - DNA, 19 bp, Mus musculus
  siRNA target sequence for Sox8 (NM_011447.1,379-397).
gtgcttaagggttatgact

SEQ ID NO: 468045 - DNA, 19 bp, Mus musculus
  siRNA target sequence for Sox8 (NM_011447.1,743-761).
ctggtggtcccatgtacaa

SEQ ID NO: 468046 - DNA, 19 bp, Mus musculus
  siRNA target sequence for Sox8 (NM_011447.1,862-880).
caccaggcgagcaatggaa

SEQ ID NO: 468047 - DNA, 19 bp, Mus musculus
  siRNA target sequence for Sox8 (NM_011447.1,969-987).
cagcagcgaggttatcagt

SEQ ID NO: 468048 - DNA, 19 bp, Mus musculus
  siRNA target sequence for Sox8 (NM_011447.1,971-989).
gcagcgaggttatcagtaa

SEQ ID NO: 468049 - DNA, 19 bp, Mus musculus
  siRNA target sequence for Sox8 (NM_011447.1,974-992).
gcgaggttatcagtaacat

SEQ ID NO: 468050 - DNA, 19 bp, Mus musculus
  siRNA target sequence for Sox8 (NM_011447.1,979-997).
gttatcagtaacatggata

SEQ ID NO: 468051 - DNA, 19 bp, Mus musculus
  siRNA target sequence for Sox8 (NM_011447.1,998-1016).
ccttcgatgtccatgaatt

SEQ ID NO: 468052 - DNA, 19 bp, Mus musculus
  siRNA target sequence for Sox8 (NM_011447.1,999-1017).
cttcgatgtccatgaattt

SEQ ID NO: 468053 - DNA, 19 bp, Mus musculus
  siRNA target sequence for Sox8 (NM_011447.1,1199-1217).
cccttcggccacagatcaa

SEQ ID NO: 468054 - DNA, 19 bp, Mus musculus
  siRNA target sequence for Sox8 (NM_011447.1,1201-1219).
cttcggccacagatcaaga

SEQ ID NO: 468055 - DNA, 19 bp, Mus musculus
  siRNA target sequence for Sox8 (NM_011447.1,1429-1447).
caatacccttacttccatt

SEQ ID NO: 468056 - DNA, 19 bp, Mus musculus
  siRNA target sequence for Sox9 (NM_011448.2,950-968).
cacatctctcctaatgcta

SEQ ID NO: 468057 - DNA, 19 bp, Mus musculus
  siRNA target sequence for Sox9 (NM_011448.2,957-975).
ctcctaatgctatcttcaa

SEQ ID NO: 468058 - DNA, 19 bp, Mus musculus
  siRNA target sequence for Sox9 (NM_011448.2,1201-1219).
cgacgtcatctccaacatt

SEQ ID NO: 468059 - DNA, 19 bp, Mus musculus
  siRNA target sequence for Sox9 (NM_011448.2,1224-1242).
ccttcgacgtcaatgagtt

SEQ ID NO: 468060 - DNA, 19 bp, Mus musculus
  siRNA target sequence for Sox9 (NM_011448.2,1225-1243).
cttcgacgtcaatgagttt

SEQ ID NO: 468061 - DNA, 19 bp, Mus musculus
  siRNA target sequence for Sox9 (NM_011448.2,1530-1548).
cccagcgaacgcacatcaa

SEQ ID NO: 468062 - DNA, 19 bp, Mus musculus
  siRNA target sequence for Sox9 (NM_011448.2,1746-1764).
ccaccttcacttacatgaa

SEQ ID NO: 468063 - DNA, 19 bp, Mus musculus
  siRNA target sequence for Sp100 (NM_013673.1,494-512).
ctcccagctaagtcttgaa

SEQ ID NO: 468064 - DNA, 19 bp, Mus musculus
  siRNA target sequence for Sp100 (NM_013673.1,520-538).
ctggtgccagctattctca

SEQ ID NO: 468065 - DNA, 19 bp, Mus musculus
  siRNA target sequence for Sp100 (NM_013673.1,545-563).
cccgaatgggtcatcctta

SEQ ID NO: 468066 - DNA, 19 bp, Mus musculus
  siRNA target sequence for Sp100 (NM_013673.1,584-602).
ctggagaagtaatgataga

SEQ ID NO: 468067 - DNA, 19 bp, Mus musculus
  siRNA target sequence for Sp100 (NM_013673.1,687-705).
caagtccaactgaataaca

SEQ ID NO: 468068 - DNA, 19 bp, Mus musculus
  siRNA target sequence for Sp100 (NM_013673.1,728-746).
cagcctattgcctcagaat

SEQ ID NO: 468069 - DNA, 19 bp, Mus musculus
  siRNA target sequence for Sp100 (NM_013673.1,730-748).
gcctattgcctcagaatga

SEQ ID NO: 468070 - DNA, 19 bp, Mus musculus
  siRNA target sequence for Sp100 (NM_013673.1,731-749).
cctattgcctcagaatgaa

SEQ ID NO: 468071 - DNA, 19 bp, Mus musculus
  siRNA target sequence for Sp100 (NM_013673.1,754-772).
gagctgtgcaactcaacta

SEQ ID NO: 468072 - DNA, 19 bp, Mus musculus
  siRNA target sequence for Sp100 (NM_013673.1,770-788).
ctatgaactccagattaat

SEQ ID NO: 468073 - DNA, 19 bp, Mus musculus
  siRNA target sequence for Sp100 (NM_013673.1,798-816).
gtgcaactggtagatgtaa

SEQ ID NO: 468074 - DNA, 19 bp, Mus musculus
  siRNA target sequence for Sp100 (NM_013673.1,919-937).
ctgataatggagagaactt

SEQ ID NO: 468075 - DNA, 19 bp, Mus musculus
  siRNA target sequence for Sp100 (NM_013673.1,1032-1050).
gacactgagagctctatca

SEQ ID NO: 468076 - DNA, 19 bp, Mus musculus
  siRNA target sequence for Sp100 (NM_013673.1,1036-1054).
ctgagagctctatcatcat

SEQ ID NO: 468077 - DNA, 19 bp, Mus musculus
  siRNA target sequence for Sp100 (NM_013673.1,1093-1111).
gacttggaagctacttaat

SEQ ID NO: 468078 - DNA, 19 bp, Mus musculus
  siRNA target sequence for Sp100 (NM_013673.1,1106-1124).
cttaatacggaacatcaaa

SEQ ID NO: 468079 - DNA, 19 bp, Mus musculus
  siRNA target sequence for Sp100 (NM_013673.1,1161-1179).
gcaagaagtgccaatcctt

SEQ ID NO: 468080 - DNA, 19 bp, Mus musculus
  siRNA target sequence for Sp100 (NM_013673.1,1310-1328).
catctatgtgaggagtata

SEQ ID NO: 468081 - DNA, 19 bp, Mus musculus
  siRNA target sequence for Sp100 (NM_013673.1,1333-1351).
gcaagacagggcggttatt

SEQ ID NO: 468082 - DNA, 19 bp, Mus musculus
  siRNA target sequence for Sp100 (NM_013673.1,1337-1355).
gacagggcggttattcact

SEQ ID NO: 468083 - DNA, 19 bp, Mus musculus
  siRNA target sequence for Sp100 (NM_013673.1,1432-1450).
ccctgagagaactgataca

SEQ ID NO: 468084 - DNA, 19 bp, Mus musculus
  siRNA target sequence for Sp100 (NM_013673.1,1445-1463).
gatacagaaaggagtacta

SEQ ID NO: 468085 - DNA, 19 bp, Mus musculus
  siRNA target sequence for Sp100 (NM_013673.1,1497-1515).
cgaaacccaaggcaaacaa

SEQ ID NO: 468086 - DNA, 19 bp, Mus musculus
  siRNA target sequence for Sp4 (NM_009239.1,211-229).
gccagagaataacaataaa

SEQ ID NO: 468087 - DNA, 19 bp, Mus musculus
  siRNA target sequence for Sp4 (NM_009239.1,330-348).
ctggacaacagcagattat

SEQ ID NO: 468088 - DNA, 19 bp, Mus musculus
  siRNA target sequence for Sp4 (NM_009239.1,332-350).
ggacaacagcagattatta

SEQ ID NO: 468089 - DNA, 19 bp, Mus musculus
  siRNA target sequence for Sp4 (NM_009239.1,333-351).
gacaacagcagattattat

SEQ ID NO: 468090 - DNA, 19 bp, Mus musculus
  siRNA target sequence for Sp4 (NM_009239.1,366-384).
gattggtgcaacttcagaa

SEQ ID NO: 468091 - DNA, 19 bp, Mus musculus
  siRNA target sequence for Sp4 (NM_009239.1,426-444).
gaaacgcttggcaacttgt

SEQ ID NO: 468092 - DNA, 19 bp, Mus musculus
  siRNA target sequence for Sp4 (NM_009239.1,507-525).
gttcttccagcagtaataa

SEQ ID NO: 468093 - DNA, 19 bp, Mus musculus
  siRNA target sequence for Sp4 (NM_009239.1,528-546).
ggagttcctctcctacaaa

SEQ ID NO: 468094 - DNA, 19 bp, Mus musculus
  siRNA target sequence for Sp4 (NM_009239.1,529-547).
gagttcctctcctacaaaa

SEQ ID NO: 468095 - DNA, 19 bp, Mus musculus
  siRNA target sequence for Sp4 (NM_009239.1,563-581).
ccttccacccctaatcaat

SEQ ID NO: 468096 - DNA, 19 bp, Mus musculus
  siRNA target sequence for Sp4 (NM_009239.1,564-582).
cttccacccctaatcaatt

SEQ ID NO: 468097 - DNA, 19 bp, Mus musculus
  siRNA target sequence for Sp4 (NM_009239.1,567-585).
ccacccctaatcaatttca

SEQ ID NO: 468098 - DNA, 19 bp, Mus musculus
  siRNA target sequence for Sp4 (NM_009239.1,568-586).
cacccctaatcaatttcaa

SEQ ID NO: 468099 - DNA, 19 bp, Mus musculus
  siRNA target sequence for Sp4 (NM_009239.1,570-588).
cccctaatcaatttcaagt

SEQ ID NO: 468100 - DNA, 19 bp, Mus musculus
  siRNA target sequence for Sp4 (NM_009239.1,573-591).
ctaatcaatttcaagtcat

SEQ ID NO: 468101 - DNA, 19 bp, Mus musculus
  siRNA target sequence for Sp4 (NM_009239.1,606-624).
caagcggtagtgtacagta

SEQ ID NO: 468102 - DNA, 19 bp, Mus musculus
  siRNA target sequence for Sp4 (NM_009239.1,838-856).
cgtttcaataccattgcaa

SEQ ID NO: 468103 - DNA, 19 bp, Mus musculus
  siRNA target sequence for Sp4 (NM_009239.1,873-891).
gtactcaggctcaagttgt

SEQ ID NO: 468104 - DNA, 19 bp, Mus musculus
  siRNA target sequence for Sp4 (NM_009239.1,878-896).
caggctcaagttgtaacaa

SEQ ID NO: 468105 - DNA, 19 bp, Mus musculus
  siRNA target sequence for Sp4 (NM_009239.1,894-912).
caaccctaccaattaacat

SEQ ID NO: 468106 - DNA, 19 bp, Mus musculus
  siRNA target sequence for Sp4 (NM_009239.1,977-995).
gtcggccagcctactacta

SEQ ID NO: 468107 - DNA, 19 bp, Mus musculus
  siRNA target sequence for Sp4 (NM_009239.1,979-997).
cggccagcctactactact

SEQ ID NO: 468108 - DNA, 19 bp, Mus musculus
  siRNA target sequence for Sp4 (NM_009239.1,1014-1032).
ccaatgggaatcagttagt

SEQ ID NO: 468109 - DNA, 19 bp, Mus musculus
  siRNA target sequence for Sp4 (NM_009239.1,1015-1033).
caatgggaatcagttagtt

SEQ ID NO: 468110 - DNA, 19 bp, Mus musculus
  siRNA target sequence for Sp4 (NM_009239.1,1019-1037).
gggaatcagttagtttcta

SEQ ID NO: 468111 - DNA, 19 bp, Mus musculus
  siRNA target sequence for Sp4 (NM_009239.1,1053-1071).
ctgctcccgccagtactat

SEQ ID NO: 468112 - DNA, 19 bp, Mus musculus
  siRNA target sequence for Sp4 (NM_009239.1,1126-1144).
gacgagcagtgacacatta

SEQ ID NO: 468113 - DNA, 19 bp, Mus musculus
  siRNA target sequence for Sp4 (NM_009239.1,1128-1146).
cgagcagtgacacattagt

SEQ ID NO: 468114 - DNA, 19 bp, Mus musculus
  siRNA target sequence for Sp4 (NM_009239.1,1265-1283).
cagtccaacggaattcaga

SEQ ID NO: 468115 - DNA, 19 bp, Mus musculus
  siRNA target sequence for Sp4 (NM_009239.1,1267-1285).
gtccaacggaattcagaat

SEQ ID NO: 468116 - DNA, 19 bp, Mus musculus
  siRNA target sequence for Sp4 (NM_009239.1,1297-1315).
gtcaaattcccttcaacaa

SEQ ID NO: 468117 - DNA, 19 bp, Mus musculus
  siRNA target sequence for Sp4 (NM_009239.1,1335-1353).
ctatcctgcagcaaatcca

SEQ ID NO: 468118 - DNA, 19 bp, Mus musculus
  siRNA target sequence for Sp4 (NM_009239.1,1386-1404).
ctatcccaccacagtcatt

SEQ ID NO: 468119 - DNA, 19 bp, Mus musculus
  siRNA target sequence for Sp4 (NM_009239.1,1411-1429).
ccagtcagggcagacaatt

SEQ ID NO: 468120 - DNA, 19 bp, Mus musculus
  siRNA target sequence for Sp4 (NM_009239.1,1481-1499).
ccgactcaggtacttatca

SEQ ID NO: 468121 - DNA, 19 bp, Mus musculus
  siRNA target sequence for Sp4 (NM_009239.1,1546-1564).
ccaggtccagaatattcaa

SEQ ID NO: 468122 - DNA, 19 bp, Mus musculus
  siRNA target sequence for Sp4 (NM_009239.1,1553-1571).
cagaatattcaaagtcttt

SEQ ID NO: 468123 - DNA, 19 bp, Mus musculus
  siRNA target sequence for Sp4 (NM_009239.1,1555-1573).
gaatattcaaagtctttca

SEQ ID NO: 468124 - DNA, 19 bp, Mus musculus
  siRNA target sequence for Sp4 (NM_009239.1,1595-1613).
gggttatcccagcagttaa

SEQ ID NO: 468125 - DNA, 19 bp, Mus musculus
  siRNA target sequence for Sp4 (NM_009239.1,1677-1695).
ctggtgccccaataacttt

SEQ ID NO: 468126 - DNA, 19 bp, Mus musculus
  siRNA target sequence for Sp4 (NM_009239.1,1680-1698).
gtgccccaataactttgaa

SEQ ID NO: 468127 - DNA, 19 bp, Mus musculus
  siRNA target sequence for Sp4 (NM_009239.1,1682-1700).
gccccaataactttgaata

SEQ ID NO: 468128 - DNA, 19 bp, Mus musculus
  siRNA target sequence for Sp4 (NM_009239.1,1753-1771).
gggtgctgcgggtgttcaa

SEQ ID NO: 468129 - DNA, 19 bp, Mus musculus
  siRNA target sequence for Sp4 (NM_009239.1,1758-1776).
ctgcgggtgttcaagttca

SEQ ID NO: 468130 - DNA, 19 bp, Mus musculus
  siRNA target sequence for Sp4 (NM_009239.1,1778-1796).
ggagttccagtaacaatca

SEQ ID NO: 468131 - DNA, 19 bp, Mus musculus
  siRNA target sequence for Sp4 (NM_009239.1,1840-1858).
ccaacaagctactatagct

SEQ ID NO: 468132 - DNA, 19 bp, Mus musculus
  siRNA target sequence for Sp4 (NM_009239.1,1882-1900).
gattgctaatgcgacaata

SEQ ID NO: 468133 - DNA, 19 bp, Mus musculus
  siRNA target sequence for Sp4 (NM_009239.1,1894-1912).
gacaataggtgctgttagt

SEQ ID NO: 468134 - DNA, 19 bp, Mus musculus
  siRNA target sequence for Sp4 (NM_009239.1,2293-2311).
cctatccaagcatgtcaaa

SEQ ID NO: 468135 - DNA, 19 bp, Mus musculus
  siRNA target sequence for Sp4 (NM_009239.1,2366-2384).
gaactggactcatctgtta

SEQ ID NO: 468136 - DNA, 19 bp, Mus musculus
  siRNA target sequence for Sp4 (NM_009239.1,2396-2414).
ggctctccacggattgtca

SEQ ID NO: 468137 - DNA, 19 bp, Mus musculus
  siRNA target sequence for Sp4 (NM_009239.1,2420-2438).
gccgccatttcccaagatt

SEQ ID NO: 468138 - DNA, 19 bp, Mus musculus
  siRNA target sequence for Sp4 (NM_009239.1,2424-2442).
ccatttcccaagattcgaa

SEQ ID NO: 468139 - DNA, 19 bp, Mus musculus
  siRNA target sequence for Sp4 (NM_009239.1,2447-2465).
gcaactcccaatgtttcaa

SEQ ID NO: 468140 - DNA, 19 bp, Mus musculus
  siRNA target sequence for Sp4 (NM_009239.1,2451-2469).
ctcccaatgtttcaacaaa

SEQ ID NO: 468141 - DNA, 19 bp, Mus musculus
  siRNA target sequence for Sp4 (NM_009239.1,2453-2471).
cccaatgtttcaacaaaca

SEQ ID NO: 468142 - DNA, 19 bp, Mus musculus
  siRNA target sequence for Sp5 (NM_022435.2,533-551).
ggttcaccctccagacttt

SEQ ID NO: 468143 - DNA, 19 bp, Mus musculus
  siRNA target sequence for Sp5 (NM_022435.2,620-638).
gggctgacgccgcagaaaa

SEQ ID NO: 468144 - DNA, 19 bp, Mus musculus
  siRNA target sequence for Sp5 (NM_022435.2,1205-1223).
gcggaaccgggcaaaaaga

SEQ ID NO: 468145 - DNA, 19 bp, Mus musculus
  siRNA target sequence for Sp6 (NM_031183.1,832-850).
cccgatgggggcaagaaga

SEQ ID NO: 468146 - DNA, 19 bp, Mus musculus
  siRNA target sequence for Sp6 (NM_031183.1,833-851).
ccgatgggggcaagaagaa

SEQ ID NO: 468147 - DNA, 19 bp, Mus musculus
  siRNA target sequence for Sp6 (NM_031183.1,896-914).
ctaagacgtcgcatctgaa

SEQ ID NO: 468148 - DNA, 19 bp, Mus musculus
  siRNA target sequence for Sp7 (NM_130458.1,193-211).
cctctgcgggactcaacaa

SEQ ID NO: 468149 - DNA, 19 bp, Mus musculus
  siRNA target sequence for Sp7 (NM_130458.1,454-472).
ctgcctagtgtctacactt

SEQ ID NO: 468150 - DNA, 19 bp, Mus musculus
  siRNA target sequence for Sp7 (NM_130458.1,759-777).
cctaccccaagatgtctat

SEQ ID NO: 468151 - DNA, 19 bp, Mus musculus
  siRNA target sequence for Sp7 (NM_130458.1,760-778).
ctaccccaagatgtctata

SEQ ID NO: 468152 - DNA, 19 bp, Mus musculus
  siRNA target sequence for Sp7 (NM_130458.1,783-801).
caaggcggttggcaatagt

SEQ ID NO: 468153 - DNA, 19 bp, Mus musculus
  siRNA target sequence for Sp7 (NM_130458.1,1274-1292).
gcagcgtcggggaagaaga

SEQ ID NO: 468154 - DNA, 19 bp, Mus musculus
  siRNA target sequence for Sp8 (NM_177082.3,376-394).
ctggtgtccgactctttta

SEQ ID NO: 468155 - DNA, 19 bp, Mus musculus
  siRNA target sequence for Sp8 (NM_177082.3,379-397).
gtgtccgactcttttagct

SEQ ID NO: 468156 - DNA, 19 bp, Mus musculus
  siRNA target sequence for Sp8 (NM_177082.3,601-619).
catcagccagtgtttatct

SEQ ID NO: 468157 - DNA, 19 bp, Mus musculus
  siRNA target sequence for Sp8 (NM_177082.3,871-889).
ccgctgggaggctacaact

SEQ ID NO: 468158 - DNA, 19 bp, Mus musculus
  siRNA target sequence for Sp8 (NM_177082.3,880-898).
ggctacaactcggattatt

SEQ ID NO: 468159 - DNA, 19 bp, Mus musculus
  siRNA target sequence for Sp8 (NM_177082.3,906-924).
gagccactccgcattcagt

SEQ ID NO: 468160 - DNA, 19 bp, Mus musculus
  siRNA target sequence for Spg3a (NM_178628.3,357-375).
cgaccattcctttgagtta

SEQ ID NO: 468161 - DNA, 19 bp, Mus musculus
  siRNA target sequence for Spg3a (NM_178628.3,504-522).
gtacaaccaggaatctgtt

SEQ ID NO: 468162 - DNA, 19 bp, Mus musculus
  siRNA target sequence for Spg3a (NM_178628.3,523-541).
gattgggttggagattaca

SEQ ID NO: 468163 - DNA, 19 bp, Mus musculus
  siRNA target sequence for Spg3a (NM_178628.3,527-545).
gggttggagattacaatga

SEQ ID NO: 468164 - DNA, 19 bp, Mus musculus
  siRNA target sequence for Spg3a (NM_178628.3,528-546).
ggttggagattacaatgaa

SEQ ID NO: 468165 - DNA, 19 bp, Mus musculus
  siRNA target sequence for Spg3a (NM_178628.3,613-631).
gaagttttcctcatcaata

SEQ ID NO: 468166 - DNA, 19 bp, Mus musculus
  siRNA target sequence for Spg3a (NM_178628.3,633-651).
gcttgatggtaaaaaggtt

SEQ ID NO: 468167 - DNA, 19 bp, Mus musculus
  siRNA target sequence for Spg3a (NM_178628.3,652-670).
gcagtgttactgatggata

SEQ ID NO: 468168 - DNA, 19 bp, Mus musculus
  siRNA target sequence for Spg3a (NM_178628.3,704-722).
gagattcggccacagtatt

SEQ ID NO: 468169 - DNA, 19 bp, Mus musculus
  siRNA target sequence for Spg3a (NM_178628.3,724-742).
gcgcttagcacaatgataa

SEQ ID NO: 468170 - DNA, 19 bp, Mus musculus
  siRNA target sequence for Spg3a (NM_178628.3,732-750).
cacaatgataagctcaata

SEQ ID NO: 468171 - DNA, 19 bp, Mus musculus
  siRNA target sequence for Spg3a (NM_178628.3,746-764).
caatacaggtctacaactt

SEQ ID NO: 468172 - DNA, 19 bp, Mus musculus
  siRNA target sequence for Spg3a (NM_178628.3,825-843).
gttggcaatggaagaaaca

SEQ ID NO: 468173 - DNA, 19 bp, Mus musculus
  siRNA target sequence for Spg3a (NM_178628.3,853-871).
ccttttcagagtctgatat

SEQ ID NO: 468174 - DNA, 19 bp, Mus musculus
  siRNA target sequence for Spg3a (NM_178628.3,887-905).
ggagtttcccatacgaatt

SEQ ID NO: 468175 - DNA, 19 bp, Mus musculus
  siRNA target sequence for Spg3a (NM_178628.3,888-906).
gagtttcccatacgaattt

SEQ ID NO: 468176 - DNA, 19 bp, Mus musculus
  siRNA target sequence for Spg3a (NM_178628.3,894-912).
cccatacgaattttcatat

SEQ ID NO: 468177 - DNA, 19 bp, Mus musculus
  siRNA target sequence for Spg3a (NM_178628.3,926-944).
gcgccaagttcttggaaaa

SEQ ID NO: 468178 - DNA, 19 bp, Mus musculus
  siRNA target sequence for Spg3a (NM_178628.3,1040-1058).
ctcatcctggcttaaaagt

SEQ ID NO: 468179 - DNA, 19 bp, Mus musculus
  siRNA target sequence for Spg3a (NM_178628.3,1059-1077).
cgctaccaacccaaacttt

SEQ ID NO: 468180 - DNA, 19 bp, Mus musculus
  siRNA target sequence for Spg3a (NM_178628.3,1146-1164).
gagtcctgagcgtctagat

SEQ ID NO: 468181 - DNA, 19 bp, Mus musculus
  siRNA target sequence for Spg3a (NM_178628.3,1150-1168).
cctgagcgtctagatatta

SEQ ID NO: 468182 - DNA, 19 bp, Mus musculus
  siRNA target sequence for Spg3a (NM_178628.3,1156-1174).
cgtctagatattaaagaga

SEQ ID NO: 468183 - DNA, 19 bp, Mus musculus
  siRNA target sequence for Spg3a (NM_178628.3,1157-1175).
gtctagatattaaagagat

SEQ ID NO: 468184 - DNA, 19 bp, Mus musculus
  siRNA target sequence for Spg3a (NM_178628.3,1257-1275).
gcatcccaagtccatgtta

SEQ ID NO: 468185 - DNA, 19 bp, Mus musculus
  siRNA target sequence for Spg3a (NM_178628.3,1281-1299).
cacagcagaagctaacaat

SEQ ID NO: 468186 - DNA, 19 bp, Mus musculus
  siRNA target sequence for Spg3a (NM_178628.3,1357-1375).
ggtggtgataaaccatttt

SEQ ID NO: 468187 - DNA, 19 bp, Mus musculus
  siRNA target sequence for Spg3a (NM_178628.3,1358-1376).
gtggtgataaaccattttt

SEQ ID NO: 468188 - DNA, 19 bp, Mus musculus
  siRNA target sequence for Spg3a (NM_178628.3,1382-1400).
ctaacgacctgcaaagcaa

SEQ ID NO: 468189 - DNA, 19 bp, Mus musculus
  siRNA target sequence for Spg3a (NM_178628.3,1499-1517).
gtgaaatagatgaactcta

SEQ ID NO: 468190 - DNA, 19 bp, Mus musculus
  siRNA target sequence for Spg3a (NM_178628.3,1577-1595).
ccacactgttcgttgtcat

SEQ ID NO: 468191 - DNA, 19 bp, Mus musculus
  siRNA target sequence for Spg3a (NM_178628.3,1636-1654).
ggtttggacatcatagcta

SEQ ID NO: 468192 - DNA, 19 bp, Mus musculus
  siRNA target sequence for Spg3a (NM_178628.3,1713-1731).
ccgctactctggcgaatat

SEQ ID NO: 468193 - DNA, 19 bp, Mus musculus
  siRNA target sequence for Spg3a (NM_178628.3,1716-1734).
ctactctggcgaatatcga

SEQ ID NO: 468194 - DNA, 19 bp, Mus musculus
  siRNA target sequence for Spg3a (NM_178628.3,1733-1751).
gagagctgggtgctgtaat

SEQ ID NO: 468195 - DNA, 19 bp, Mus musculus
  siRNA target sequence for Spg3a (NM_178628.3,1776-1794).
ggaccagggaagcacaaat

SEQ ID NO: 468196 - DNA, 19 bp, Mus musculus
  siRNA target sequence for Spg3a (NM_178628.3,1787-1805).
gcacaaatgaggcgttata

SEQ ID NO: 468197 - DNA, 19 bp, Mus musculus
  siRNA target sequence for Spg3a (NM_178628.3,1790-1808).
caaatgaggcgttatacaa

SEQ ID NO: 468198 - DNA, 19 bp, Mus musculus
  siRNA target sequence for Spg3a (NM_178628.3,1795-1813).
gaggcgttatacaagcttt

SEQ ID NO: 468199 - DNA, 19 bp, Mus musculus
  siRNA target sequence for Spg3a (NM_178628.3,1800-1818).
gttatacaagctttacagt

SEQ ID NO: 468200 - DNA, 19 bp, Mus musculus
  siRNA target sequence for Spo11 (NM_012046.1,166-184).
ccgcgtggcctctagttct

SEQ ID NO: 468201 - DNA, 19 bp, Mus musculus
  siRNA target sequence for Spo11 (NM_012046.1,215-233).
caagacataatcaaaagct

SEQ ID NO: 468202 - DNA, 19 bp, Mus musculus
  siRNA target sequence for Spo11 (NM_012046.1,231-249).
gcttggcaagaaatgaagt

SEQ ID NO: 468203 - DNA, 19 bp, Mus musculus
  siRNA target sequence for Spo11 (NM_012046.1,251-269).
cctgccttcacaatagaca

SEQ ID NO: 468204 - DNA, 19 bp, Mus musculus
  siRNA target sequence for Spo11 (NM_012046.1,252-270).
ctgccttcacaatagacaa

SEQ ID NO: 468205 - DNA, 19 bp, Mus musculus
  siRNA target sequence for Spo11 (NM_012046.1,273-291).
gatcgagctgggaaaacat

SEQ ID NO: 468206 - DNA, 19 bp, Mus musculus
  siRNA target sequence for Spo11 (NM_012046.1,282-300).
gggaaaacataatgtttga

SEQ ID NO: 468207 - DNA, 19 bp, Mus musculus
  siRNA target sequence for Spo11 (NM_012046.1,326-344).
cctcagtgtaccacaagaa

SEQ ID NO: 468208 - DNA, 19 bp, Mus musculus
  siRNA target sequence for Spo11 (NM_012046.1,349-367).
cagaagcgattcaccaaaa

SEQ ID NO: 468209 - DNA, 19 bp, Mus musculus
  siRNA target sequence for Spo11 (NM_012046.1,356-374).
gattcaccaaaatcagtta

SEQ ID NO: 468210 - DNA, 19 bp, Mus musculus
  siRNA target sequence for Spo11 (NM_012046.1,398-416).
gtattgtccatgatttata

SEQ ID NO: 468211 - DNA, 19 bp, Mus musculus
  siRNA target sequence for Spo11 (NM_012046.1,405-423).
ccatgatttataaattaat

SEQ ID NO: 468212 - DNA, 19 bp, Mus musculus
  siRNA target sequence for Spo11 (NM_012046.1,425-443).
cagagcgacacttatgcaa

SEQ ID NO: 468213 - DNA, 19 bp, Mus musculus
  siRNA target sequence for Spo11 (NM_012046.1,440-458).
gcaaccaagagagacatat

SEQ ID NO: 468214 - DNA, 19 bp, Mus musculus
  siRNA target sequence for Spo11 (NM_012046.1,444-462).
ccaagagagacatatacta

SEQ ID NO: 468215 - DNA, 19 bp, Mus musculus
  siRNA target sequence for Spo11 (NM_012046.1,551-569).
ctgcacgtgctatctactt

SEQ ID NO: 468216 - DNA, 19 bp, Mus musculus
  siRNA target sequence for Spo11 (NM_012046.1,564-582).
ctacttccaagggattgat

SEQ ID NO: 468217 - DNA, 19 bp, Mus musculus
  siRNA target sequence for Spo11 (NM_012046.1,654-672).
ctgtgccgactaacattca

SEQ ID NO: 468218 - DNA, 19 bp, Mus musculus
  siRNA target sequence for Spo11 (NM_012046.1,660-678).
cgactaacattcaaggaat

SEQ ID NO: 468219 - DNA, 19 bp, Mus musculus
  siRNA target sequence for Spo11 (NM_012046.1,688-706).
gatcacagatgcgaagttt

SEQ ID NO: 468220 - DNA, 19 bp, Mus musculus
  siRNA target sequence for Spo11 (NM_012046.1,695-713).
gatgcgaagtttctgttaa

SEQ ID NO: 468221 - DNA, 19 bp, Mus musculus
  siRNA target sequence for Spo11 (NM_012046.1,718-736).
cgagaaggatgcaacattt

SEQ ID NO: 468222 - DNA, 19 bp, Mus musculus
  siRNA target sequence for Spo11 (NM_012046.1,743-761).
ctcctggacgacaacttct

SEQ ID NO: 468223 - DNA, 19 bp, Mus musculus
  siRNA target sequence for Spo11 (NM_012046.1,887-905).
ccctacggcatcgagataa

SEQ ID NO: 468224 - DNA, 19 bp, Mus musculus
  siRNA target sequence for Spo11 (NM_012046.1,888-906).
cctacggcatcgagataat

SEQ ID NO: 468225 - DNA, 19 bp, Mus musculus
  siRNA target sequence for Spo11 (NM_012046.1,898-916).
cgagataatgtgcatctat

SEQ ID NO: 468226 - DNA, 19 bp, Mus musculus
  siRNA target sequence for Spo11 (NM_012046.1,924-942).
gatccatgtccatgtcttt

SEQ ID NO: 468227 - DNA, 19 bp, Mus musculus
  siRNA target sequence for Spo11 (NM_012046.1,937-955).
gtcttttgaagctcacaat

SEQ ID NO: 468228 - DNA, 19 bp, Mus musculus
  siRNA target sequence for Spo11 (NM_012046.1,939-957).
cttttgaagctcacaatct

SEQ ID NO: 468229 - DNA, 19 bp, Mus musculus
  siRNA target sequence for Spo11 (NM_012046.1,998-1016).
gatatccagaggttaaata

SEQ ID NO: 468230 - DNA, 19 bp, Mus musculus
  siRNA target sequence for Spo11 (NM_012046.1,1003-1021).
ccagaggttaaatatacct

SEQ ID NO: 468231 - DNA, 19 bp, Mus musculus
  siRNA target sequence for Spo11 (NM_012046.1,1029-1047).
gtttgatcccactgacaaa

SEQ ID NO: 468232 - DNA, 19 bp, Mus musculus
  siRNA target sequence for Spo11 (NM_012046.1,1044-1062).
caaagcatgaccagatgaa

SEQ ID NO: 468233 - DNA, 19 bp, Mus musculus
  siRNA target sequence for Spo11 (NM_012046.1,1189-1207).
cctgtccagagtgtactta

SEQ ID NO: 468234 - DNA, 19 bp, Mus musculus
  siRNA target sequence for Srfcp (NM_145136.1,11-29).
ccgtgaaagaggctataaa

SEQ ID NO: 468235 - DNA, 19 bp, Mus musculus
  siRNA target sequence for Srfcp (NM_145136.1,15-33).
gaaagaggctataaaaggt

SEQ ID NO: 468236 - DNA, 19 bp, Mus musculus
  siRNA target sequence for Srfcp (NM_145136.1,50-68).
ccaaggcagcagatgcatt

SEQ ID NO: 468237 - DNA, 19 bp, Mus musculus
  siRNA target sequence for Srfcp (NM_145136.1,341-359).
gtaagaaccgccacaaaaa

SEQ ID NO: 468238 - DNA, 19 bp, Mus musculus
  siRNA target sequence for Srfcp (NM_145136.1,634-652).
gccagaaatccgaatcctt

SEQ ID NO: 468239 - DNA, 19 bp, Mus musculus
  siRNA target sequence for Srfcp (NM_145136.1,675-693).
ccctctatcccctgtcaaa

SEQ ID NO: 468240 - DNA, 19 bp, Mus musculus
  siRNA target sequence for Srfcp (NM_145136.1,677-695).
ctctatcccctgtcaaaaa

SEQ ID NO: 468241 - DNA, 19 bp, Mus musculus
  siRNA target sequence for Srfcp (NM_145136.1,679-697).
ctatcccctgtcaaaaata

SEQ ID NO: 468242 - DNA, 19 bp, Mus musculus
  siRNA target sequence for Srfcp (NM_145136.1,683-701).
cccctgtcaaaaatagcat

SEQ ID NO: 468243 - DNA, 19 bp, Mus musculus
  siRNA target sequence for Srfcp (NM_145136.1,706-724).
ggacaaactggtgtttctt

SEQ ID NO: 468244 - DNA, 19 bp, Mus musculus
  siRNA target sequence for Srfcp (NM_145136.1,746-764).
cacccaacctggatgatct

SEQ ID NO: 468245 - DNA, 19 bp, Mus musculus
  siRNA target sequence for Srfcp (NM_145136.1,1480-1498).
ctctcgtccacgtttctca

SEQ ID NO: 468246 - DNA, 19 bp, Mus musculus
  siRNA target sequence for Srfcp (NM_145136.1,1567-1585).
ccatcacccaacaaccatt

SEQ ID NO: 468247 - DNA, 19 bp, Mus musculus
  siRNA target sequence for Srfcp (NM_145136.1,1571-1589).
cacccaacaaccattactt

SEQ ID NO: 468248 - DNA, 19 bp, Mus musculus
  siRNA target sequence for Srfcp (NM_145136.1,1785-1803).
caaaagcccaagtattcat

SEQ ID NO: 468249 - DNA, 19 bp, Mus musculus
  siRNA target sequence for Srfcp (NM_145136.1,1793-1811).
caagtattcatccaaagat

SEQ ID NO: 468250 - DNA, 19 bp, Mus musculus
  siRNA target sequence for Srfcp (NM_145136.1,1812-1830).
gactggtttacaatcttct

SEQ ID NO: 468251 - DNA, 19 bp, Mus musculus
  siRNA target sequence for Srfcp (NM_145136.1,1833-1851).
caaggtggggccaacgttt

SEQ ID NO: 468252 - DNA, 19 bp, Mus musculus
  siRNA target sequence for Srfcp (NM_145136.1,1837-1855).
gtggggccaacgttttcaa

SEQ ID NO: 468253 - DNA, 19 bp, Mus musculus
  siRNA target sequence for Srfcp (NM_145136.1,1839-1857).
ggggccaacgttttcaatt

SEQ ID NO: 468254 - DNA, 19 bp, Mus musculus
  siRNA target sequence for Srfcp (NM_145136.1,1842-1860).
gccaacgttttcaattcca

SEQ ID NO: 468255 - DNA, 19 bp, Mus musculus
  siRNA target sequence for Srfcp (NM_145136.1,1843-1861).
ccaacgttttcaattccat

SEQ ID NO: 468256 - DNA, 19 bp, Mus musculus
  siRNA target sequence for Srfcp (NM_145136.1,1858-1876).
ccatccccaactttttcta

SEQ ID NO: 468257 - DNA, 19 bp, Mus musculus
  siRNA target sequence for Srfcp (NM_145136.1,1863-1881).
cccaactttttctaagtca

SEQ ID NO: 468258 - DNA, 19 bp, Mus musculus
  siRNA target sequence for Srfcp (NM_145136.1,1878-1896).
gtcaagttcagcagtttca

SEQ ID NO: 468259 - DNA, 19 bp, Mus musculus
  siRNA target sequence for Srfcp (NM_145136.1,1905-1923).
ccagcccccatcctatgaa

SEQ ID NO: 468260 - DNA, 19 bp, Mus musculus
  siRNA target sequence for Srfcp (NM_145136.1,1908-1926).
gcccccatcctatgaagat

SEQ ID NO: 468261 - DNA, 19 bp, Mus musculus
  siRNA target sequence for Srfcp (NM_145136.1,1974-1992).
ggatgtcctcattgaaagt

SEQ ID NO: 468262 - DNA, 19 bp, Mus musculus
  siRNA target sequence for Srfcp (NM_145136.1,2011-2029).
gccagggaagatcattcat

SEQ ID NO: 468263 - DNA, 19 bp, Mus musculus
  siRNA target sequence for Srfcp (NM_145136.1,2016-2034).
ggaagatcattcatgtctt

SEQ ID NO: 468264 - DNA, 19 bp, Mus musculus
  siRNA target sequence for Srfcp (NM_145136.1,2203-2221).
ggaaaggtgagcgatgtta

SEQ ID NO: 468265 - DNA, 19 bp, Mus musculus
  siRNA target sequence for Srfcp (NM_145136.1,2215-2233).
gatgttaccctcctcaaaa

SEQ ID NO: 468266 - DNA, 19 bp, Mus musculus
  siRNA target sequence for Srfcp (NM_145136.1,2240-2258).
gcgaggagcctccttttga

SEQ ID NO: 468267 - DNA, 19 bp, Mus musculus
  siRNA target sequence for Srfcp (NM_145136.1,2401-2419).
gaatctccttgggaaacaa

SEQ ID NO: 468268 - DNA, 19 bp, Mus musculus
  siRNA target sequence for Srfcp (NM_145136.1,2407-2425).
ccttgggaaacaatggaat

SEQ ID NO: 468269 - DNA, 19 bp, Mus musculus
  siRNA target sequence for Srfcp (NM_145136.1,2455-2473).
ccaggcttcagcaacctta

SEQ ID NO: 468270 - DNA, 19 bp, Mus musculus
  siRNA target sequence for Srfcp (NM_145136.1,2489-2507).
gcattttcaacatcgattt

SEQ ID NO: 468271 - DNA, 19 bp, Mus musculus
  siRNA target sequence for Srfcp (NM_145136.1,2511-2529).
ggatgttacagatcttaat

SEQ ID NO: 468272 - DNA, 19 bp, Mus musculus
  siRNA target sequence for Srfcp (NM_145136.1,2540-2558).
ctatggatctccacttaca

SEQ ID NO: 468273 - DNA, 19 bp, Mus musculus
  siRNA target sequence for Srfcp (NM_146386.1,279-297).
cactctttgctgattagaa

SEQ ID NO: 468274 - DNA, 19 bp, Mus musculus
  siRNA target sequence for Srfcp (NM_146386.1,299-317).
gaagttccgatcagtctta

SEQ ID NO: 468275 - DNA, 19 bp, Mus musculus
  siRNA target sequence for Srfcp (NM_146386.1,305-323).
ccgatcagtcttacagtta

SEQ ID NO: 468276 - DNA, 19 bp, Mus musculus
  siRNA target sequence for Srfcp (NM_146386.1,402-420).
catgacccgagaaaacaat

SEQ ID NO: 468277 - DNA, 19 bp, Mus musculus
  siRNA target sequence for Srfcp (NM_146386.1,407-425).
cccgagaaaacaattggat

SEQ ID NO: 468278 - DNA, 19 bp, Mus musculus
  siRNA target sequence for Srfcp (NM_146386.1,408-426).
ccgagaaaacaattggata

SEQ ID NO: 468279 - DNA, 19 bp, Mus musculus
  siRNA target sequence for Srfcp (NM_146386.1,477-495).
cgtgccagcctggttacta

SEQ ID NO: 468280 - DNA, 19 bp, Mus musculus
  siRNA target sequence for Srfcp (NM_146386.1,2300-2318).
cgcacagatgactggttta

SEQ ID NO: 468281 - DNA, 19 bp, Mus musculus
  siRNA target sequence for Srisnf2l (NM_030730.1,658-676).
gttcctacctgaggaaatt

SEQ ID NO: 468282 - DNA, 19 bp, Mus musculus
  siRNA target sequence for Srisnf2l (NM_030730.1,718-736).
cttagcccaggaagtcatt

SEQ ID NO: 468283 - DNA, 19 bp, Mus musculus
  siRNA target sequence for Srisnf2l (NM_030730.1,774-792).
gtagtcgagacgaggtaat

SEQ ID NO: 468284 - DNA, 19 bp, Mus musculus
  siRNA target sequence for Srisnf2l (NM_030730.1,777-795).
gtcgagacgaggtaattga

SEQ ID NO: 468285 - DNA, 19 bp, Mus musculus
  siRNA target sequence for Srisnf2l (NM_030730.1,1016-1034).
ggtgggatccggttcctat

SEQ ID NO: 468286 - DNA, 19 bp, Mus musculus
  siRNA target sequence for Srisnf2l (NM_030730.1,1017-1035).
gtgggatccggttcctata

SEQ ID NO: 468287 - DNA, 19 bp, Mus musculus
  siRNA target sequence for Srisnf2l (NM_030730.1,1021-1039).
gatccggttcctatatgat

SEQ ID NO: 468288 - DNA, 19 bp, Mus musculus
  siRNA target sequence for Srisnf2l (NM_030730.1,1026-1044).
ggttcctatatgataacct

SEQ ID NO: 468289 - DNA, 19 bp, Mus musculus
  siRNA target sequence for Srisnf2l (NM_030730.1,1027-1045).
gttcctatatgataaccta

SEQ ID NO: 468290 - DNA, 19 bp, Mus musculus
  siRNA target sequence for Srisnf2l (NM_030730.1,1126-1144).
gcaagtgatctccttcatt

SEQ ID NO: 468291 - DNA, 19 bp, Mus musculus
  siRNA target sequence for Srisnf2l (NM_030730.1,1215-1233).
ggttggcagagttcaacat

SEQ ID NO: 468292 - DNA, 19 bp, Mus musculus
  siRNA target sequence for Srisnf2l (NM_030730.1,1264-1282).
cgacagcaagcctgaagaa

SEQ ID NO: 468293 - DNA, 19 bp, Mus musculus
  siRNA target sequence for Srisnf2l (NM_030730.1,1283-1301).
gtccagcctcggttcttta

SEQ ID NO: 468294 - DNA, 19 bp, Mus musculus
  siRNA target sequence for Srisnf2l (NM_030730.1,1290-1308).
ctcggttctttaaagttca

SEQ ID NO: 468295 - DNA, 19 bp, Mus musculus
  siRNA target sequence for Srisnf2l (NM_030730.1,1292-1310).
cggttctttaaagttcata

SEQ ID NO: 468296 - DNA, 19 bp, Mus musculus
  siRNA target sequence for Srisnf2l (NM_030730.1,1293-1311).
ggttctttaaagttcatat

SEQ ID NO: 468297 - DNA, 19 bp, Mus musculus
  siRNA target sequence for Srisnf2l (NM_030730.1,1333-1351).
ggtggcatcccgtgctaaa

SEQ ID NO: 468298 - DNA, 19 bp, Mus musculus
  siRNA target sequence for Srisnf2l (NM_030730.1,1356-1374).
cggctgattgggtttcaga

SEQ ID NO: 468299 - DNA, 19 bp, Mus musculus
  siRNA target sequence for Srisnf2l (NM_030730.1,1438-1456).
cacaagtaggccgaagaaa

SEQ ID NO: 468300 - DNA, 19 bp, Mus musculus
  siRNA target sequence for Srisnf2l (NM_030730.1,1467-1485).
gctctcatcccgtcatcat

SEQ ID NO: 468301 - DNA, 19 bp, Mus musculus
  siRNA target sequence for Srisnf2l (NM_030730.1,1470-1488).
ctcatcccgtcatcattga

SEQ ID NO: 468302 - DNA, 19 bp, Mus musculus
  siRNA target sequence for Srisnf2l (NM_030730.1,1513-1531).
ggagttccggagagagttt

SEQ ID NO: 468303 - DNA, 19 bp, Mus musculus
  siRNA target sequence for Srisnf2l (NM_030730.1,1576-1594).
cgagggacaccgcatcaaa

SEQ ID NO: 468304 - DNA, 19 bp, Mus musculus
  siRNA target sequence for Srisnf2l (NM_030730.1,1577-1595).
gagggacaccgcatcaaaa

SEQ ID NO: 468305 - DNA, 19 bp, Mus musculus
  siRNA target sequence for Srisnf2l (NM_030730.1,1579-1597).
gggacaccgcatcaaaaat

SEQ ID NO: 468306 - DNA, 19 bp, Mus musculus
  siRNA target sequence for Srisnf2l (NM_030730.1,1580-1598).
ggacaccgcatcaaaaatt

SEQ ID NO: 468307 - DNA, 19 bp, Mus musculus
  siRNA target sequence for Srisnf2l (NM_030730.1,1611-1629).
cctcacaggctctgaagaa

SEQ ID NO: 468308 - DNA, 19 bp, Mus musculus
  siRNA target sequence for Srisnf2l (NM_030730.1,1619-1637).
gctctgaagaacatacgtt

SEQ ID NO: 468309 - DNA, 19 bp, Mus musculus
  siRNA target sequence for Srisnf2l (NM_030730.1,1659-1677).
ctggctaccctctacagaa

SEQ ID NO: 468310 - DNA, 19 bp, Mus musculus
  siRNA target sequence for Srisnf2l (NM_030730.1,1730-1748).
ggtactcgtcaggagttta

SEQ ID NO: 468311 - DNA, 19 bp, Mus musculus
  siRNA target sequence for Srisnf2l (NM_030730.1,1741-1759).
ggagtttagcaacatgttt

SEQ ID NO: 468312 - DNA, 19 bp, Mus musculus
  siRNA target sequence for Srisnf2l (NM_030730.1,1756-1774).
gtttgaacgccctatccta

SEQ ID NO: 468313 - DNA, 19 bp, Mus musculus
  siRNA target sequence for Srisnf2l (NM_030730.1,1820-1838).
cgctaccggagccatgttt

SEQ ID NO: 468314 - DNA, 19 bp, Mus musculus
  siRNA target sequence for Srisnf2l (NM_030730.1,1875-1893).
gccacactgtgttgaagat

SEQ ID NO: 468315 - DNA, 19 bp, Mus musculus
  siRNA target sequence for Srisnf2l (NM_030730.1,1940-1958).
cagatccagcgagatttgt

SEQ ID NO: 468316 - DNA, 19 bp, Mus musculus
  siRNA target sequence for Srisnf2l (NM_030730.1,1949-1967).
cgagatttgtacacacaat

SEQ ID NO: 468317 - DNA, 19 bp, Mus musculus
  siRNA target sequence for Srisnf2l (NM_030730.1,1950-1968).
gagatttgtacacacaatt

SEQ ID NO: 468318 - DNA, 19 bp, Mus musculus
  siRNA target sequence for Srisnf2l (NM_030730.1,1952-1970).
gatttgtacacacaattca

SEQ ID NO: 468319 - DNA, 19 bp, Mus musculus
  siRNA target sequence for Srisnf2l (NM_030730.1,2113-2131).
cctagatgtggaagaactt

SEQ ID NO: 468320 - DNA, 19 bp, Mus musculus
  siRNA target sequence for Srisnf2l (NM_030730.1,2266-2284).
ggaacggggcaataacatt

SEQ ID NO: 468321 - DNA, 19 bp, Mus musculus
  siRNA target sequence for Srisnf2l (NM_030730.1,2270-2288).
cggggcaataacattgtta

SEQ ID NO: 468322 - DNA, 19 bp, Mus musculus
  siRNA target sequence for Srisnf2l (NM_030730.1,2274-2292).
gcaataacattgttacata

SEQ ID NO: 468323 - DNA, 19 bp, Mus musculus
  siRNA target sequence for Srisnf2l (NM_030730.1,2305-2323).
ggagcttctgactaattat

SEQ ID NO: 468324 - DNA, 19 bp, Mus musculus
  siRNA target sequence for Srisnf2l (NM_030730.1,2309-2327).
cttctgactaattatcaga

SEQ ID NO: 468325 - DNA, 19 bp, Mus musculus
  siRNA target sequence for Srisnf2l (NM_030730.1,2395-2413).
cggggacaagattcttgta

SEQ ID NO: 468326 - DNA, 19 bp, Mus musculus
  siRNA target sequence for Srisnf2l (NM_030730.1,2396-2414).
ggggacaagattcttgtat

SEQ ID NO: 468327 - DNA, 19 bp, Mus musculus
  siRNA target sequence for Srisnf2l (NM_030730.1,2397-2415).
gggacaagattcttgtatt

SEQ ID NO: 468328 - DNA, 19 bp, Mus musculus
  siRNA target sequence for Srisnf2l (NM_030730.1,2399-2417).
gacaagattcttgtattta

SEQ ID NO: 468329 - DNA, 19 bp, Mus musculus
  siRNA target sequence for Srisnf2l (NM_030730.1,2505-2523).
cacagaagtgggttcgaaa

SEQ ID NO: 468330 - DNA, 19 bp, Mus musculus
  siRNA target sequence for Srisnf2l (NM_030730.1,2570-2588).
gagcggctcattaatcagt

SEQ ID NO: 468331 - DNA, 19 bp, Mus musculus
  siRNA target sequence for Srisnf2l (NM_030730.1,2643-2661).
gatgcttgggggtgaatct

SEQ ID NO: 468332 - DNA, 19 bp, Mus musculus
  siRNA target sequence for Srisnf2l (NM_030730.1,2646-2664).
gcttgggggtgaatctgat

SEQ ID NO: 468333 - DNA, 19 bp, Mus musculus
  siRNA target sequence for Srisnf2l (NM_030730.1,2647-2665).
cttgggggtgaatctgatt

SEQ ID NO: 468334 - DNA, 19 bp, Mus musculus
  siRNA target sequence for Srisnf2l (NM_030730.1,2670-2688).
ccaatcgagtggtggtatt

SEQ ID NO: 468335 - DNA, 19 bp, Mus musculus
  siRNA target sequence for Srisnf2l (NM_030730.1,2774-2792).
cgactcgtggctgattata

SEQ ID NO: 468336 - DNA, 19 bp, Mus musculus
  siRNA target sequence for Srisnf2l (NM_030730.1,2779-2797).
cgtggctgattatactctt

SEQ ID NO: 468337 - DNA, 19 bp, Mus musculus
  siRNA target sequence for Srisnf2l (NM_030730.1,2846-2864).
cgggtagtggatgatctaa

SEQ ID NO: 468338 - DNA, 19 bp, Mus musculus
  siRNA target sequence for Srisnf2l (NM_030730.1,2924-2942).
gagccagctccccaaacat

SEQ ID NO: 468339 - DNA, 19 bp, Mus musculus
  siRNA target sequence for Srisnf2l (NM_030730.1,2933-2951).
ccccaaacatctttggata

SEQ ID NO: 468340 - DNA, 19 bp, Mus musculus
  siRNA target sequence for Srisnf2l (NM_030730.1,3021-3039).
cttttgagcacgagtcatt

SEQ ID NO: 468341 - DNA, 19 bp, Mus musculus
  siRNA target sequence for Srisnf2l (NM_030730.1,3040-3058).
gctcctcaaccgaaaagat

SEQ ID NO: 468342 - DNA, 19 bp, Mus musculus
  siRNA target sequence for Srisnf2l (NM_030730.1,3109-3127).
ggacaaacgcacatcagta

SEQ ID NO: 468343 - DNA, 19 bp, Mus musculus
  siRNA target sequence for Srisnf2l (NM_030730.1,3398-3416).
gtggttaccacgacagata

SEQ ID NO: 468344 - DNA, 19 bp, Mus musculus
  siRNA target sequence for Srisnf2l (NM_030730.1,3405-3423).
ccacgacagatattgttat

SEQ ID NO: 468345 - DNA, 19 bp, Mus musculus
  siRNA target sequence for Srisnf2l (NM_030730.1,3446-3464).
gatgttcaggcaagaatca

SEQ ID NO: 468346 - DNA, 19 bp, Mus musculus
  siRNA target sequence for Srisnf2l (NM_030730.1,3494-3512).
gggacgaaagggacataca

SEQ ID NO: 468347 - DNA, 19 bp, Mus musculus
  siRNA target sequence for Srisnf2l (NM_030730.1,3495-3513).
ggacgaaagggacatacat

SEQ ID NO: 468348 - DNA, 19 bp, Mus musculus
  siRNA target sequence for Srisnf2l (NM_030730.1,3696-3714).
ctgacagcccagaaatcat

SEQ ID NO: 468349 - DNA, 19 bp, Mus musculus
  siRNA target sequence for Srisnf2l (NM_030730.1,3866-3884).
gggggtcattgcctcaata

SEQ ID NO: 468350 - DNA, 19 bp, Mus musculus
  siRNA target sequence for Srisnf2l (NM_030730.1,3868-3886).
gggtcattgcctcaatagt

SEQ ID NO: 468351 - DNA, 19 bp, Mus musculus
  siRNA target sequence for Srisnf2l (NM_030730.1,3869-3887).
ggtcattgcctcaatagtt

SEQ ID NO: 468352 - DNA, 19 bp, Mus musculus
  siRNA target sequence for Srisnf2l (NM_030730.1,3923-3941).
cacccagtgctggacttaa

SEQ ID NO: 468353 - DNA, 19 bp, Mus musculus
  siRNA target sequence for Srisnf2l (NM_030730.1,3942-3960).
ggggccataagcgaaagtt

SEQ ID NO: 468354 - DNA, 19 bp, Mus musculus
  siRNA target sequence for Srisnf2l (NM_030730.1,4027-4045).
cgtgcagccctatgaacat

SEQ ID NO: 468355 - DNA, 19 bp, Mus musculus
  siRNA target sequence for Srisnf2l (NM_030730.1,4055-4073).
gtctctggcgggtttgcaa

SEQ ID NO: 468356 - DNA, 19 bp, Mus musculus
  siRNA target sequence for Srisnf2l (NM_030730.1,4075-4093).
gccgcctgtctccttaaat

SEQ ID NO: 468357 - DNA, 19 bp, Mus musculus
  siRNA target sequence for Srisnf2l (NM_030730.1,4078-4096).
gcctgtctccttaaatcat

SEQ ID NO: 468358 - DNA, 19 bp, Mus musculus
  siRNA target sequence for Srisnf2l (NM_030730.1,4330-4348).
ctattcactcccattctca

SEQ ID NO: 468359 - DNA, 19 bp, Mus musculus
  siRNA target sequence for Srisnf2l (NM_030730.1,4360-4378).
gtccgagcccaggatgttt

SEQ ID NO: 468360 - DNA, 19 bp, Mus musculus
  siRNA target sequence for Srisnf2l (NM_030730.1,4530-4548).
ggttcagctccaatgatga

SEQ ID NO: 468361 - DNA, 19 bp, Mus musculus
  siRNA target sequence for Ssrp1 (NM_182990.1,218-236).
ggtgaaagggtccatgaat

SEQ ID NO: 468362 - DNA, 19 bp, Mus musculus
  siRNA target sequence for Ssrp1 (NM_182990.1,221-239).
gaaagggtccatgaatgat

SEQ ID NO: 468363 - DNA, 19 bp, Mus musculus
  siRNA target sequence for Ssrp1 (NM_182990.1,256-274).
gccgtcagggtatcatctt

SEQ ID NO: 468364 - DNA, 19 bp, Mus musculus
  siRNA target sequence for Ssrp1 (NM_182990.1,257-275).
ccgtcagggtatcatcttt

SEQ ID NO: 468365 - DNA, 19 bp, Mus musculus
  siRNA target sequence for Ssrp1 (NM_182990.1,258-276).
cgtcagggtatcatcttta

SEQ ID NO: 468366 - DNA, 19 bp, Mus musculus
  siRNA target sequence for Ssrp1 (NM_182990.1,259-277).
gtcagggtatcatctttaa

SEQ ID NO: 468367 - DNA, 19 bp, Mus musculus
  siRNA target sequence for Ssrp1 (NM_182990.1,289-307).
cgggcaaagtggacaacat

SEQ ID NO: 468368 - DNA, 19 bp, Mus musculus
  siRNA target sequence for Ssrp1 (NM_182990.1,335-353).
ctggcgtcgggtagcatta

SEQ ID NO: 468369 - DNA, 19 bp, Mus musculus
  siRNA target sequence for Ssrp1 (NM_182990.1,361-379).
ggcttaaactgctcacaaa

SEQ ID NO: 468370 - DNA, 19 bp, Mus musculus
  siRNA target sequence for Ssrp1 (NM_182990.1,376-394).
caaagaatgggcatgtcta

SEQ ID NO: 468371 - DNA, 19 bp, Mus musculus
  siRNA target sequence for Ssrp1 (NM_182990.1,411-429).
cgcgaatcggagtttgaga

SEQ ID NO: 468372 - DNA, 19 bp, Mus musculus
  siRNA target sequence for Ssrp1 (NM_182990.1,412-430).
gcgaatcggagtttgagaa

SEQ ID NO: 468373 - DNA, 19 bp, Mus musculus
  siRNA target sequence for Ssrp1 (NM_182990.1,413-431).
cgaatcggagtttgagaaa

SEQ ID NO: 468374 - DNA, 19 bp, Mus musculus
  siRNA target sequence for Ssrp1 (NM_182990.1,436-454).
ctgacttcttcaaaactca

SEQ ID NO: 468375 - DNA, 19 bp, Mus musculus
  siRNA target sequence for Ssrp1 (NM_182990.1,593-611).
gtgtaccacaggcaagaat

SEQ ID NO: 468376 - DNA, 19 bp, Mus musculus
  siRNA target sequence for Ssrp1 (NM_182990.1,662-680).
ggaggtgcgcttctatgtt

SEQ ID NO: 468377 - DNA, 19 bp, Mus musculus
  siRNA target sequence for Ssrp1 (NM_182990.1,724-742).
cccagaatgttctgtcaaa

SEQ ID NO: 468378 - DNA, 19 bp, Mus musculus
  siRNA target sequence for Ssrp1 (NM_182990.1,786-804).
cgggagctgcagtgtttga

SEQ ID NO: 468379 - DNA, 19 bp, Mus musculus
  siRNA target sequence for Ssrp1 (NM_182990.1,807-825).
cctcgcggtcgatacgata

SEQ ID NO: 468380 - DNA, 19 bp, Mus musculus
  siRNA target sequence for Ssrp1 (NM_182990.1,808-826).
ctcgcggtcgatacgatat

SEQ ID NO: 468381 - DNA, 19 bp, Mus musculus
  siRNA target sequence for Ssrp1 (NM_182990.1,827-845).
ccggatctaccctaccttt

SEQ ID NO: 468382 - DNA, 19 bp, Mus musculus
  siRNA target sequence for Ssrp1 (NM_182990.1,859-877).
gcaagacctttgactacaa

SEQ ID NO: 468383 - DNA, 19 bp, Mus musculus
  siRNA target sequence for Ssrp1 (NM_182990.1,878-896).
gatcccctatactacagtt

SEQ ID NO: 468384 - DNA, 19 bp, Mus musculus
  siRNA target sequence for Ssrp1 (NM_182990.1,924-942).
gatcagagacagatgttct

SEQ ID NO: 468385 - DNA, 19 bp, Mus musculus
  siRNA target sequence for Ssrp1 (NM_182990.1,1118-1136).
ggtcagtcgggtcatgaaa

SEQ ID NO: 468386 - DNA, 19 bp, Mus musculus
  siRNA target sequence for Ssrp1 (NM_182990.1,1198-1216).
gtattacctgctcctataa

SEQ ID NO: 468387 - DNA, 19 bp, Mus musculus
  siRNA target sequence for Ssrp1 (NM_182990.1,1252-1270).
gcttcatctacgtgcataa

SEQ ID NO: 468388 - DNA, 19 bp, Mus musculus
  siRNA target sequence for Ssrp1 (NM_182990.1,1338-1356).
cgttccttcgactttgaga

SEQ ID NO: 468389 - DNA, 19 bp, Mus musculus
  siRNA target sequence for Ssrp1 (NM_182990.1,1339-1357).
gttccttcgactttgagat

SEQ ID NO: 468390 - DNA, 19 bp, Mus musculus
  siRNA target sequence for Ssrp1 (NM_182990.1,1368-1386).
caaggcactcagtatacct

SEQ ID NO: 468391 - DNA, 19 bp, Mus musculus
  siRNA target sequence for Ssrp1 (NM_182990.1,1437-1455).
gcgaaaaagctcaacatca

SEQ ID NO: 468392 - DNA, 19 bp, Mus musculus
  siRNA target sequence for Ssrp1 (NM_182990.1,1454-1472).
caagaacagaggactgaaa

SEQ ID NO: 468393 - DNA, 19 bp, Mus musculus
  siRNA target sequence for Ssrp1 (NM_182990.1,1484-1502).
cccaggctatgacgattat

SEQ ID NO: 468394 - DNA, 19 bp, Mus musculus
  siRNA target sequence for Ssrp1 (NM_182990.1,1838-1856).
gtacatgctgtggcttaat

SEQ ID NO: 468395 - DNA, 19 bp, Mus musculus
  siRNA target sequence for Ssrp1 (NM_182990.1,1841-1859).
catgctgtggcttaatgca

SEQ ID NO: 468396 - DNA, 19 bp, Mus musculus
  siRNA target sequence for Ssrp1 (NM_182990.1,1857-1875).
gcaagccgcgagaagatca

SEQ ID NO: 468397 - DNA, 19 bp, Mus musculus
  siRNA target sequence for Ssrp1 (NM_182990.1,1858-1876).
caagccgcgagaagatcaa

SEQ ID NO: 468398 - DNA, 19 bp, Mus musculus
  siRNA target sequence for Ssrp1 (NM_182990.1,1884-1902).
catcctggcatcagtatca

SEQ ID NO: 468399 - DNA, 19 bp, Mus musculus
  siRNA target sequence for Ssrp1 (NM_182990.1,1892-1910).
catcagtatcacagatctt

SEQ ID NO: 468400 - DNA, 19 bp, Mus musculus
  siRNA target sequence for Ssrp1 (NM_182990.1,1987-2005).
ctaggagggagtatgagaa

SEQ ID NO: 468401 - DNA, 19 bp, Mus musculus
  siRNA target sequence for Ssrp1 (NM_182990.1,2003-2021).
gaaagccatgaaagagtat

SEQ ID NO: 468402 - DNA, 19 bp, Mus musculus
  siRNA target sequence for Ssrp1 (NM_182990.1,2130-2148).
ggctcgtcatccaagtctt

SEQ ID NO: 468403 - DNA, 19 bp, Mus musculus
  siRNA target sequence for Stk2 (NM_009289.1,261-279).
cctgaaccccgaagagttt

SEQ ID NO: 468404 - DNA, 19 bp, Mus musculus
  siRNA target sequence for Stk2 (NM_009289.1,262-280).
ctgaaccccgaagagtttt

SEQ ID NO: 468405 - DNA, 19 bp, Mus musculus
  siRNA target sequence for Stk2 (NM_009289.1,271-289).
gaagagttttgggagatta

SEQ ID NO: 468406 - DNA, 19 bp, Mus musculus
  siRNA target sequence for Stk2 (NM_009289.1,324-342).
ctataaggcccagaataaa

SEQ ID NO: 468407 - DNA, 19 bp, Mus musculus
  siRNA target sequence for Stk2 (NM_009289.1,359-377).
ctgctgcaaaggtgattga

SEQ ID NO: 468408 - DNA, 19 bp, Mus musculus
  siRNA target sequence for Stk2 (NM_009289.1,369-387).
ggtgattgacaccaaatct

SEQ ID NO: 468409 - DNA, 19 bp, Mus musculus
  siRNA target sequence for Stk2 (NM_009289.1,372-390).
gattgacaccaaatctgaa

SEQ ID NO: 468410 - DNA, 19 bp, Mus musculus
  siRNA target sequence for Stk2 (NM_009289.1,396-414).
gcttgaagattatatggtt

SEQ ID NO: 468411 - DNA, 19 bp, Mus musculus
  siRNA target sequence for Stk2 (NM_009289.1,411-429).
ggttgagattgacatatta

SEQ ID NO: 468412 - DNA, 19 bp, Mus musculus
  siRNA target sequence for Stk2 (NM_009289.1,415-433).
gagattgacatattagcat

SEQ ID NO: 468413 - DNA, 19 bp, Mus musculus
  siRNA target sequence for Stk2 (NM_009289.1,423-441).
catattagcatcttgtgat

SEQ ID NO: 468414 - DNA, 19 bp, Mus musculus
  siRNA target sequence for Stk2 (NM_009289.1,450-468).
catcgtcaagcttctagat

SEQ ID NO: 468415 - DNA, 19 bp, Mus musculus
  siRNA target sequence for Stk2 (NM_009289.1,459-477).
gcttctagatgccttctat

SEQ ID NO: 468416 - DNA, 19 bp, Mus musculus
  siRNA target sequence for Stk2 (NM_009289.1,544-562).
gaacttgagagaccattaa

SEQ ID NO: 468417 - DNA, 19 bp, Mus musculus
  siRNA target sequence for Stk2 (NM_009289.1,603-621).
ggcattgaattacttacat

SEQ ID NO: 468418 - DNA, 19 bp, Mus musculus
  siRNA target sequence for Stk2 (NM_009289.1,609-627).
gaattacttacatgacaat

SEQ ID NO: 468419 - DNA, 19 bp, Mus musculus
  siRNA target sequence for Stk2 (NM_009289.1,784-802).
gtcatgtgtgagacatcaa

SEQ ID NO: 468420 - DNA, 19 bp, Mus musculus
  siRNA target sequence for Stk2 (NM_009289.1,807-825).
cagaccttatgactacaaa

SEQ ID NO: 468421 - DNA, 19 bp, Mus musculus
  siRNA target sequence for Stk2 (NM_009289.1,836-854).
ggtccctgggtattacttt

SEQ ID NO: 468422 - DNA, 19 bp, Mus musculus
  siRNA target sequence for Stk2 (NM_009289.1,837-855).
gtccctgggtattacttta

SEQ ID NO: 468423 - DNA, 19 bp, Mus musculus
  siRNA target sequence for Stk2 (NM_009289.1,840-858).
cctgggtattactttaata

SEQ ID NO: 468424 - DNA, 19 bp, Mus musculus
  siRNA target sequence for Stk2 (NM_009289.1,843-861).
gggtattactttaatagaa

SEQ ID NO: 468425 - DNA, 19 bp, Mus musculus
  siRNA target sequence for Stk2 (NM_009289.1,844-862).
ggtattactttaatagaaa

SEQ ID NO: 468426 - DNA, 19 bp, Mus musculus
  siRNA target sequence for Stk2 (NM_009289.1,870-888).
gatagagccacctcatcat

SEQ ID NO: 468427 - DNA, 19 bp, Mus musculus
  siRNA target sequence for Stk2 (NM_009289.1,876-894).
gccacctcatcatgagtta

SEQ ID NO: 468428 - DNA, 19 bp, Mus musculus
  siRNA target sequence for Stk2 (NM_009289.1,877-895).
ccacctcatcatgagttaa

SEQ ID NO: 468429 - DNA, 19 bp, Mus musculus
  siRNA target sequence for Stk2 (NM_009289.1,878-896).
cacctcatcatgagttaaa

SEQ ID NO: 468430 - DNA, 19 bp, Mus musculus
  siRNA target sequence for Stk2 (NM_009289.1,906-924).
cgtgctgctgaaaattgca

SEQ ID NO: 468431 - DNA, 19 bp, Mus musculus
  siRNA target sequence for Stk2 (NM_009289.1,907-925).
gtgctgctgaaaattgcaa

SEQ ID NO: 468432 - DNA, 19 bp, Mus musculus
  siRNA target sequence for Stk2 (NM_009289.1,909-927).
gctgctgaaaattgcaaaa

SEQ ID NO: 468433 - DNA, 19 bp, Mus musculus
  siRNA target sequence for Stk2 (NM_009289.1,946-964).
gcacagccatcaaaatggt

SEQ ID NO: 468434 - DNA, 19 bp, Mus musculus
  siRNA target sequence for Stk2 (NM_009289.1,1098-1116).
ggcaaaggctgaagtaaca

SEQ ID NO: 468435 - DNA, 19 bp, Mus musculus
  siRNA target sequence for Stk2 (NM_009289.1,1164-1182).
gaatgctctgccaatacct

SEQ ID NO: 468436 - DNA, 19 bp, Mus musculus
  siRNA target sequence for Stk2 (NM_009289.1,1171-1189).
ctgccaatacctgcaaata

SEQ ID NO: 468437 - DNA, 19 bp, Mus musculus
  siRNA target sequence for Stk2 (NM_009289.1,1413-1431).
ccaaacagtaggaatccat

SEQ ID NO: 468438 - DNA, 19 bp, Mus musculus
  siRNA target sequence for Stk2 (NM_009289.1,1418-1436).
cagtaggaatccatgagaa

SEQ ID NO: 468439 - DNA, 19 bp, Mus musculus
  siRNA target sequence for Stk2 (NM_009289.1,1496-1514).
ctgtggatgttaattcagt

SEQ ID NO: 468440 - DNA, 19 bp, Mus musculus
  siRNA target sequence for Stk2 (NM_009289.1,1538-1556).
gagtaactttagaaacgaa

SEQ ID NO: 468441 - DNA, 19 bp, Mus musculus
  siRNA target sequence for Stk2 (NM_009289.1,1612-1630).
gagagtaaacttatacaat

SEQ ID NO: 468442 - DNA, 19 bp, Mus musculus
  siRNA target sequence for Stk2 (NM_009289.1,1614-1632).
gagtaaacttatacaatct

SEQ ID NO: 468443 - DNA, 19 bp, Mus musculus
  siRNA target sequence for Stk2 (NM_009289.1,1661-1679).
caatggacttagtttctca

SEQ ID NO: 468444 - DNA, 19 bp, Mus musculus
  siRNA target sequence for Stk2 (NM_009289.1,1710-1728).
ggcagttgacaatgaagtt

SEQ ID NO: 468445 - DNA, 19 bp, Mus musculus
  siRNA target sequence for Stk2 (NM_009289.1,1729-1747).
gggcttacaaaggaagaaa

SEQ ID NO: 468446 - DNA, 19 bp, Mus musculus
  siRNA target sequence for Stk2 (NM_009289.1,1777-1795).
gctcaaaaagttataacca

SEQ ID NO: 468447 - DNA, 19 bp, Mus musculus
  siRNA target sequence for Stk2 (NM_009289.1,2026-2044).
gctgagggacagttaacca

SEQ ID NO: 468448 - DNA, 19 bp, Mus musculus
  siRNA target sequence for Stk2 (NM_009289.1,2127-2145).
ggagctagagagacttgta

SEQ ID NO: 468449 - DNA, 19 bp, Mus musculus
  siRNA target sequence for Stk2 (NM_009289.1,2191-2209).
gctgctactgaggtagatt

SEQ ID NO: 468450 - DNA, 19 bp, Mus musculus
  siRNA target sequence for Stk2 (NM_009289.1,2192-2210).
ctgctactgaggtagattt

SEQ ID NO: 468451 - DNA, 19 bp, Mus musculus
  siRNA target sequence for Stk2 (NM_009289.1,2232-2250).
gaaagtgcccgttaaagca

SEQ ID NO: 468452 - DNA, 19 bp, Mus musculus
  siRNA target sequence for Stk2 (NM_009289.1,2296-2314).
gtcttaatacccagtatta

SEQ ID NO: 468453 - DNA, 19 bp, Mus musculus
  siRNA target sequence for Stk2 (NM_009289.1,2309-2327).
gtattaatattaattctga

SEQ ID NO: 468454 - DNA, 19 bp, Mus musculus
  siRNA target sequence for Stk2 (NM_009289.1,2352-2370).
gggtgctttgccaaaacct

SEQ ID NO: 468455 - DNA, 19 bp, Mus musculus
  siRNA target sequence for Stk2 (NM_009289.1,2361-2379).
gccaaaacctgaaaccata

SEQ ID NO: 468456 - DNA, 19 bp, Mus musculus
  siRNA target sequence for Stk2 (NM_009289.1,2431-2449).
gggtccactgtggagaata

SEQ ID NO: 468457 - DNA, 19 bp, Mus musculus
  siRNA target sequence for Stk2 (NM_009289.1,2461-2479).
ctgaacttgtccatctcta

SEQ ID NO: 468458 - DNA, 19 bp, Mus musculus
  siRNA target sequence for Stk2 (NM_009289.1,2553-2571).
gaaaacacgcaagtttatt

SEQ ID NO: 468459 - DNA, 19 bp, Mus musculus
  siRNA target sequence for Stk2 (NM_009289.1,2595-2613).
gacgacatcgaagatagtt

SEQ ID NO: 468460 - DNA, 19 bp, Mus musculus
  siRNA target sequence for Stk2 (NM_009289.1,2598-2616).
gacatcgaagatagttaca

SEQ ID NO: 468461 - DNA, 19 bp, Mus musculus
  siRNA target sequence for Stk2 (NM_009289.1,2600-2618).
catcgaagatagttacaga

SEQ ID NO: 468462 - DNA, 19 bp, Mus musculus
  siRNA target sequence for Stk2 (NM_009289.1,2635-2653).
gaggaactgcgctttctca

SEQ ID NO: 468463 - DNA, 19 bp, Mus musculus
  siRNA target sequence for Stk2 (NM_009289.1,2778-2796).
gagtaagaagcgacaatat

SEQ ID NO: 468464 - DNA, 19 bp, Mus musculus
  siRNA target sequence for Stk2 (NM_009289.1,2780-2798).
gtaagaagcgacaatatga

SEQ ID NO: 468465 - DNA, 19 bp, Mus musculus
  siRNA target sequence for Stk2 (NM_009289.1,2837-2855).
caattgaacggctagaaca

SEQ ID NO: 468466 - DNA, 19 bp, Mus musculus
  siRNA target sequence for Stk2 (NM_009289.1,2947-2965).
cgcaagaaggaggttatga

SEQ ID NO: 468467 - DNA, 19 bp, Mus musculus
  siRNA target sequence for Stk2 (NM_009289.1,3043-3061).
cacgctcaggaacaagaat

SEQ ID NO: 468468 - DNA, 19 bp, Mus musculus
  siRNA target sequence for Stk2 (NM_009289.1,3045-3063).
cgctcaggaacaagaattt

SEQ ID NO: 468469 - DNA, 19 bp, Mus musculus
  siRNA target sequence for Stk2 (NM_009289.1,3084-3102).
gttagatggttctctgaaa

SEQ ID NO: 468470 - DNA, 19 bp, Mus musculus
  siRNA target sequence for Stk2 (NM_009289.1,3091-3109).
ggttctctgaaaaagatta

SEQ ID NO: 468471 - DNA, 19 bp, Mus musculus
  siRNA target sequence for Stk2 (NM_009289.1,3123-3141).
ggcagagttggccaatatt

SEQ ID NO: 468472 - DNA, 19 bp, Mus musculus
  siRNA target sequence for Stk2 (NM_009289.1,3125-3143).
cagagttggccaatattga

SEQ ID NO: 468473 - DNA, 19 bp, Mus musculus
  siRNA target sequence for Stk2 (NM_009289.1,3127-3145).
gagttggccaatattgaga

SEQ ID NO: 468474 - DNA, 19 bp, Mus musculus
  siRNA target sequence for Stk2 (NM_009289.1,3142-3160).
gagagagaatgcctgaata

SEQ ID NO: 468475 - DNA, 19 bp, Mus musculus
  siRNA target sequence for Stk2 (NM_009289.1,3146-3164).
gagaatgcctgaataacaa

SEQ ID NO: 468476 - DNA, 19 bp, Mus musculus
  siRNA target sequence for Stk2 (NM_009289.1,3181-3199).
gctcgagaagccgcaattt

SEQ ID NO: 468477 - DNA, 19 bp, Mus musculus
  siRNA target sequence for Stk2 (NM_009289.1,3204-3222).
gcttgaagagcgacattta

SEQ ID NO: 468478 - DNA, 19 bp, Mus musculus
  siRNA target sequence for Stk2 (NM_009289.1,3250-3268).
cagcttaaagatcagtatt

SEQ ID NO: 468479 - DNA, 19 bp, Mus musculus
  siRNA target sequence for Stk2 (NM_009289.1,3326-3344).
gctacaatcaacgacttat

SEQ ID NO: 468480 - DNA, 19 bp, Mus musculus
  siRNA target sequence for Stk2 (NM_009289.1,3327-3345).
ctacaatcaacgacttatt

SEQ ID NO: 468481 - DNA, 19 bp, Mus musculus
  siRNA target sequence for Stk2 (NM_009289.1,3330-3348).
caatcaacgacttattgaa

SEQ ID NO: 468482 - DNA, 19 bp, Mus musculus
  siRNA target sequence for Stk2 (NM_009289.1,3380-3398).
cgagactgcccaagattca

SEQ ID NO: 468483 - DNA, 19 bp, Mus musculus
  siRNA target sequence for Stk2 (NM_009289.1,3381-3399).
gagactgcccaagattcaa

SEQ ID NO: 468484 - DNA, 19 bp, Mus musculus
  siRNA target sequence for Stk2 (NM_009289.1,3385-3403).
ctgcccaagattcaaagaa

SEQ ID NO: 468485 - DNA, 19 bp, Mus musculus
  siRNA target sequence for Stk2 (NM_009289.1,3414-3432).
gacacgaatggccatgttt

SEQ ID NO: 468486 - DNA, 19 bp, Mus musculus
  siRNA target sequence for Stk2 (NM_009289.1,3416-3434).
cacgaatggccatgtttaa

SEQ ID NO: 468487 - DNA, 19 bp, Mus musculus
  siRNA target sequence for Stk2 (NM_009289.1,3418-3436).
cgaatggccatgtttaaaa

SEQ ID NO: 468488 - DNA, 19 bp, Mus musculus
  siRNA target sequence for Stk2 (NM_009289.1,3423-3441).
ggccatgtttaaaaaaagt

SEQ ID NO: 468489 - DNA, 19 bp, Mus musculus
  siRNA target sequence for Stk2 (NM_009289.1,3424-3442).
gccatgtttaaaaaaagtt

SEQ ID NO: 468490 - DNA, 19 bp, Mus musculus
  siRNA target sequence for Stk2 (NM_009289.1,3478-3496).
cgtgaaaaaattaaacagt

SEQ ID NO: 468491 - DNA, 19 bp, Mus musculus
  siRNA target sequence for Stk2 (NM_009289.1,3533-3551).
gaatggctcagcatcaaaa

SEQ ID NO: 468492 - DNA, 19 bp, Mus musculus
  siRNA target sequence for Stk2 (NM_009289.1,3537-3555).
ggctcagcatcaaaaacat

SEQ ID NO: 468493 - DNA, 19 bp, Mus musculus
  siRNA target sequence for Stk2 (NM_009289.1,3539-3557).
ctcagcatcaaaaacatga

SEQ ID NO: 468494 - DNA, 19 bp, Mus musculus
  siRNA target sequence for Stk2 (NM_009289.1,3560-3578).
gccaaatgcgggatcttca

SEQ ID NO: 468495 - DNA, 19 bp, Mus musculus
  siRNA target sequence for Stk2 (NM_009289.1,3633-3651).
ccacctgttggttgaacat

SEQ ID NO: 468496 - DNA, 19 bp, Mus musculus
  siRNA target sequence for Stk2 (NM_009289.1,3796-3814).
ggggagtccgaatgtctta

SEQ ID NO: 468497 - DNA, 19 bp, Mus musculus
  siRNA target sequence for Stk2 (NM_009289.1,3797-3815).
gggagtccgaatgtcttaa

SEQ ID NO: 468498 - DNA, 19 bp, Mus musculus
  siRNA target sequence for Stk2 (NM_009289.1,3798-3816).
ggagtccgaatgtcttaat

SEQ ID NO: 468499 - DNA, 19 bp, Mus musculus
  siRNA target sequence for Stk2 (NM_009289.1,3801-3819).
gtccgaatgtcttaatcca

SEQ ID NO: 468500 - DNA, 19 bp, Mus musculus
  siRNA target sequence for Stk2 (NM_009289.1,3823-3841).
gcacagagccggatctcta

SEQ ID NO: 468501 - DNA, 19 bp, Mus musculus
  siRNA target sequence for Stk2 (NM_009289.1,3824-3842).
cacagagccggatctctaa

SEQ ID NO: 468502 - DNA, 19 bp, Mus musculus
  siRNA target sequence for Stk2 (NM_009289.1,3826-3844).
cagagccggatctctaaat

SEQ ID NO: 468503 - DNA, 19 bp, Mus musculus
  siRNA target sequence for Stk2 (NM_009289.1,3830-3848).
gccggatctctaaattcta

SEQ ID NO: 468504 - DNA, 19 bp, Mus musculus
  siRNA target sequence for Stk2 (NM_009289.1,3849-3867).
ccctattcccaccttacat

SEQ ID NO: 468505 - DNA, 19 bp, Mus musculus
  siRNA target sequence for Stk2 (NM_009289.1,3850-3868).
cctattcccaccttacatt

SEQ ID NO: 468506 - DNA, 19 bp, Mus musculus
  siRNA target sequence for Swap70 (NM_009302.2,249-267).
cagggctacatgccatatt

SEQ ID NO: 468507 - DNA, 19 bp, Mus musculus
  siRNA target sequence for Swap70 (NM_009302.2,251-269).
gggctacatgccatattta

SEQ ID NO: 468508 - DNA, 19 bp, Mus musculus
  siRNA target sequence for Swap70 (NM_009302.2,261-279).
ccatatttaaacaagttca

SEQ ID NO: 468509 - DNA, 19 bp, Mus musculus
  siRNA target sequence for Swap70 (NM_009302.2,431-449).
ggacaagtatccactaatt

SEQ ID NO: 468510 - DNA, 19 bp, Mus musculus
  siRNA target sequence for Swap70 (NM_009302.2,432-450).
gacaagtatccactaatta

SEQ ID NO: 468511 - DNA, 19 bp, Mus musculus
  siRNA target sequence for Swap70 (NM_009302.2,453-471).
gtgccagaagagattgaat

SEQ ID NO: 468512 - DNA, 19 bp, Mus musculus
  siRNA target sequence for Swap70 (NM_009302.2,508-526).
gttggcaacaagaacaatt

SEQ ID NO: 468513 - DNA, 19 bp, Mus musculus
  siRNA target sequence for Swap70 (NM_009302.2,577-595).
gggaacttattgagctaat

SEQ ID NO: 468514 - DNA, 19 bp, Mus musculus
  siRNA target sequence for Swap70 (NM_009302.2,578-596).
ggaacttattgagctaatt

SEQ ID NO: 468515 - DNA, 19 bp, Mus musculus
  siRNA target sequence for Swap70 (NM_009302.2,597-615).
gggaatggacagtttagca

SEQ ID NO: 468516 - DNA, 19 bp, Mus musculus
  siRNA target sequence for Swap70 (NM_009302.2,624-642).
gaccgtcagaccgtatcta

SEQ ID NO: 468517 - DNA, 19 bp, Mus musculus
  siRNA target sequence for Swap70 (NM_009302.2,634-652).
ccgtatctatggccattaa

SEQ ID NO: 468518 - DNA, 19 bp, Mus musculus
  siRNA target sequence for Swap70 (NM_009302.2,711-729).
ggtcacaaacggaaaaact

SEQ ID NO: 468519 - DNA, 19 bp, Mus musculus
  siRNA target sequence for Swap70 (NM_009302.2,731-749).
gactgagcgctggtttgta

SEQ ID NO: 468520 - DNA, 19 bp, Mus musculus
  siRNA target sequence for Swap70 (NM_009302.2,733-751).
ctgagcgctggtttgtatt

SEQ ID NO: 468521 - DNA, 19 bp, Mus musculus
  siRNA target sequence for Swap70 (NM_009302.2,839-857).
gtctctgcctgacaaagat

SEQ ID NO: 468522 - DNA, 19 bp, Mus musculus
  siRNA target sequence for Swap70 (NM_009302.2,863-881).
gaaatgtctttttctaata

SEQ ID NO: 468523 - DNA, 19 bp, Mus musculus
  siRNA target sequence for Swap70 (NM_009302.2,891-909).
gataagacctttgaaatca

SEQ ID NO: 468524 - DNA, 19 bp, Mus musculus
  siRNA target sequence for Swap70 (NM_009302.2,903-921).
gaaatcagtgcctcagata

SEQ ID NO: 468525 - DNA, 19 bp, Mus musculus
  siRNA target sequence for Swap70 (NM_009302.2,926-944).
gaagaaacaagaatggatt

SEQ ID NO: 468526 - DNA, 19 bp, Mus musculus
  siRNA target sequence for Swap70 (NM_009302.2,1080-1098).
ctccaagccgccaatgaaa

SEQ ID NO: 468527 - DNA, 19 bp, Mus musculus
  siRNA target sequence for Swap70 (NM_009302.2,1083-1101).
caagccgccaatgaaaaca

SEQ ID NO: 468528 - DNA, 19 bp, Mus musculus
  siRNA target sequence for Swap70 (NM_009302.2,1153-1171).
gtgcggcagacgaggaaaa

SEQ ID NO: 468529 - DNA, 19 bp, Mus musculus
  siRNA target sequence for Swap70 (NM_009302.2,1314-1332).
ctggaagacatgtacctaa

SEQ ID NO: 468530 - DNA, 19 bp, Mus musculus
  siRNA target sequence for Swap70 (NM_009302.2,1623-1641).
gagatggcaacacatatga

SEQ ID NO: 468531 - DNA, 19 bp, Mus musculus
  siRNA target sequence for Swap70 (NM_009302.2,1678-1696).
gattaatacgattgataga

SEQ ID NO: 468532 - DNA, 19 bp, Mus musculus
  siRNA target sequence for Tada2l (NM_172562.1,122-140).
gaccgtttgggttccttta

SEQ ID NO: 468533 - DNA, 19 bp, Mus musculus
  siRNA target sequence for Tada2l (NM_172562.1,125-143).
cgtttgggttcctttagca

SEQ ID NO: 468534 - DNA, 19 bp, Mus musculus
  siRNA target sequence for Tada2l (NM_172562.1,183-201).
cctacctcacggaacctta

SEQ ID NO: 468535 - DNA, 19 bp, Mus musculus
  siRNA target sequence for Tada2l (NM_172562.1,187-205).
cctcacggaaccttacatt

SEQ ID NO: 468536 - DNA, 19 bp, Mus musculus
  siRNA target sequence for Tada2l (NM_172562.1,188-206).
ctcacggaaccttacatta

SEQ ID NO: 468537 - DNA, 19 bp, Mus musculus
  siRNA target sequence for Tada2l (NM_172562.1,190-208).
cacggaaccttacattaaa

SEQ ID NO: 468538 - DNA, 19 bp, Mus musculus
  siRNA target sequence for Tada2l (NM_172562.1,193-211).
ggaaccttacattaaatgt

SEQ ID NO: 468539 - DNA, 19 bp, Mus musculus
  siRNA target sequence for Tada2l (NM_172562.1,250-268).
gtgtttcactcgaggattt

SEQ ID NO: 468540 - DNA, 19 bp, Mus musculus
  siRNA target sequence for Tada2l (NM_172562.1,252-270).
gtttcactcgaggatttga

SEQ ID NO: 468541 - DNA, 19 bp, Mus musculus
  siRNA target sequence for Tada2l (NM_172562.1,258-276).
ctcgaggatttgagtacaa

SEQ ID NO: 468542 - DNA, 19 bp, Mus musculus
  siRNA target sequence for Tada2l (NM_172562.1,260-278).
cgaggatttgagtacaaga

SEQ ID NO: 468543 - DNA, 19 bp, Mus musculus
  siRNA target sequence for Tada2l (NM_172562.1,264-282).
gatttgagtacaagaaaca

SEQ ID NO: 468544 - DNA, 19 bp, Mus musculus
  siRNA target sequence for Tada2l (NM_172562.1,293-311).
cacacttacgaaataatga

SEQ ID NO: 468545 - DNA, 19 bp, Mus musculus
  siRNA target sequence for Tada2l (NM_172562.1,419-437).
caaatgtgcaccaaaacca

SEQ ID NO: 468546 - DNA, 19 bp, Mus musculus
  siRNA target sequence for Tada2l (NM_172562.1,536-554).
gccgacacagccattccat

SEQ ID NO: 468547 - DNA, 19 bp, Mus musculus
  siRNA target sequence for Tada2l (NM_172562.1,537-555).
ccgacacagccattccatt

SEQ ID NO: 468548 - DNA, 19 bp, Mus musculus
  siRNA target sequence for Tada2l (NM_172562.1,649-667).
ggagtttgacaattatgca

SEQ ID NO: 468549 - DNA, 19 bp, Mus musculus
  siRNA target sequence for Tada2l (NM_172562.1,674-692).
gacttaagagacattgatt

SEQ ID NO: 468550 - DNA, 19 bp, Mus musculus
  siRNA target sequence for Tada2l (NM_172562.1,735-753).
ctgtggtggatatctatca

SEQ ID NO: 468551 - DNA, 19 bp, Mus musculus
  siRNA target sequence for Tada2l (NM_172562.1,795-813).
gagatcacggattagtcaa

SEQ ID NO: 468552 - DNA, 19 bp, Mus musculus
  siRNA target sequence for Tada2l (NM_172562.1,800-818).
cacggattagtcaacctta

SEQ ID NO: 468553 - DNA, 19 bp, Mus musculus
  siRNA target sequence for Tada2l (NM_172562.1,804-822).
gattagtcaaccttaggaa

SEQ ID NO: 468554 - DNA, 19 bp, Mus musculus
  siRNA target sequence for Tada2l (NM_172562.1,853-871).
ggaggtccaagacctttat

SEQ ID NO: 468555 - DNA, 19 bp, Mus musculus
  siRNA target sequence for Tada2l (NM_172562.1,906-924).
ccgtggagcacgacaagtt

SEQ ID NO: 468556 - DNA, 19 bp, Mus musculus
  siRNA target sequence for Tada2l (NM_172562.1,908-926).
gtggagcacgacaagttca

SEQ ID NO: 468557 - DNA, 19 bp, Mus musculus
  siRNA target sequence for Tada2l (NM_172562.1,910-928).
ggagcacgacaagttcatt

SEQ ID NO: 468558 - DNA, 19 bp, Mus musculus
  siRNA target sequence for Tada2l (NM_172562.1,913-931).
gcacgacaagttcattgaa

SEQ ID NO: 468559 - DNA, 19 bp, Mus musculus
  siRNA target sequence for Tada2l (NM_172562.1,933-951).
gccatgcattggaatttga

SEQ ID NO: 468560 - DNA, 19 bp, Mus musculus
  siRNA target sequence for Tada2l (NM_172562.1,934-952).
ccatgcattggaatttgaa

SEQ ID NO: 468561 - DNA, 19 bp, Mus musculus
  siRNA target sequence for Tada2l (NM_172562.1,997-1015).
cattaccaatttttgtagt

SEQ ID NO: 468562 - DNA, 19 bp, Mus musculus
  siRNA target sequence for Tada2l (NM_172562.1,1014-1032).
gtgccaggacatatgatca

SEQ ID NO: 468563 - DNA, 19 bp, Mus musculus
  siRNA target sequence for Tada2l (NM_172562.1,1023-1041).
catatgatcacctgaagaa

SEQ ID NO: 468564 - DNA, 19 bp, Mus musculus
  siRNA target sequence for Tada2l (NM_172562.1,1080-1098).
cagaagttctccagtacat

SEQ ID NO: 468565 - DNA, 19 bp, Mus musculus
  siRNA target sequence for Tada2l (NM_172562.1,1133-1151).
cggcaggctgacattgatt

SEQ ID NO: 468566 - DNA, 19 bp, Mus musculus
  siRNA target sequence for Tada2l (NM_172562.1,1135-1153).
gcaggctgacattgattct

SEQ ID NO: 468567 - DNA, 19 bp, Mus musculus
  siRNA target sequence for Tada2l (NM_172562.1,1233-1251).
gtacagagaaactcaatga

SEQ ID NO: 468568 - DNA, 19 bp, Mus musculus
  siRNA target sequence for Tada2l (NM_172562.1,1297-1315).
ctacttggaatataagtct

SEQ ID NO: 468569 - DNA, 19 bp, Mus musculus
  siRNA target sequence for Tada2l (NM_172562.1,1378-1396).
caagatagacgtgaacaaa

SEQ ID NO: 468570 - DNA, 19 bp, Mus musculus
  siRNA target sequence for Taf11 (NM_026836.1,185-203).
gagacgcggacttgaaaga

SEQ ID NO: 468571 - DNA, 19 bp, Mus musculus
  siRNA target sequence for Taf11 (NM_026836.1,237-255).
ggatgtctcagatgtaaca

SEQ ID NO: 468572 - DNA, 19 bp, Mus musculus
  siRNA target sequence for Taf11 (NM_026836.1,256-274).
gcagccgagagggaaaact

SEQ ID NO: 468573 - DNA, 19 bp, Mus musculus
  siRNA target sequence for Taf11 (NM_026836.1,268-286).
gaaaactcgtccttactta

SEQ ID NO: 468574 - DNA, 19 bp, Mus musculus
  siRNA target sequence for Taf11 (NM_026836.1,408-426).
gaaccgttatgaaatgtat

SEQ ID NO: 468575 - DNA, 19 bp, Mus musculus
  siRNA target sequence for Taf11 (NM_026836.1,511-529).
gccatgtctggcatttcta

SEQ ID NO: 468576 - DNA, 19 bp, Mus musculus
  siRNA target sequence for Taf11 (NM_026836.1,562-580).
ctggacgtgtgtgagaaat

SEQ ID NO: 468577 - DNA, 19 bp, Mus musculus
  siRNA target sequence for Taf11 (NM_026836.1,622-640).
gccgtccggaggttgaagt

SEQ ID NO: 468578 - DNA, 19 bp, Mus musculus
  siRNA target sequence for Taf11 (NM_026836.1,646-664).
gggcaaatccccaactcaa

SEQ ID NO: 468579 - DNA, 19 bp, Mus musculus
  siRNA target sequence for Taf11 (NM_026836.1,647-665).
ggcaaatccccaactcaaa

SEQ ID NO: 468580 - DNA, 19 bp, Mus musculus
  siRNA target sequence for Taf12 (NM_025579.1,173-191).
ggcccttcagcgctaatca

SEQ ID NO: 468581 - DNA, 19 bp, Mus musculus
  siRNA target sequence for Taf12 (NM_025579.1,174-192).
gcccttcagcgctaatcaa

SEQ ID NO: 468582 - DNA, 19 bp, Mus musculus
  siRNA target sequence for Taf12 (NM_025579.1,303-321).
gtcgtctcagccctgaaaa

SEQ ID NO: 468583 - DNA, 19 bp, Mus musculus
  siRNA target sequence for Taf12 (NM_025579.1,306-324).
gtctcagccctgaaaacaa

SEQ ID NO: 468584 - DNA, 19 bp, Mus musculus
  siRNA target sequence for Taf12 (NM_025579.1,326-344).
caggtattgaccaagaaga

SEQ ID NO: 468585 - DNA, 19 bp, Mus musculus
  siRNA target sequence for Taf12 (NM_025579.1,329-347).
gtattgaccaagaagaaat

SEQ ID NO: 468586 - DNA, 19 bp, Mus musculus
  siRNA target sequence for Taf12 (NM_025579.1,355-373).
cctagtaagagaagtagat

SEQ ID NO: 468587 - DNA, 19 bp, Mus musculus
  siRNA target sequence for Taf12 (NM_025579.1,412-430).
gctacagatcgctgatgat

SEQ ID NO: 468588 - DNA, 19 bp, Mus musculus
  siRNA target sequence for Taf12 (NM_025579.1,486-504).
gcaccctagaggtaaaaga

SEQ ID NO: 468589 - DNA, 19 bp, Mus musculus
  siRNA target sequence for Taf12 (NM_025579.1,562-580).
ggaaatccgaccctacaaa

SEQ ID NO: 468590 - DNA, 19 bp, Mus musculus
  siRNA target sequence for Taf12 (NM_025579.1,563-581).
gaaatccgaccctacaaaa

SEQ ID NO: 468591 - DNA, 19 bp, Mus musculus
  siRNA target sequence for Taf6 (NM_009315.1,216-234).
gtgacattgactatgcatt

SEQ ID NO: 468592 - DNA, 19 bp, Mus musculus
  siRNA target sequence for Taf6 (NM_009315.1,244-262).
gaatgtggagccactgtat

SEQ ID NO: 468593 - DNA, 19 bp, Mus musculus
  siRNA target sequence for Taf6 (NM_009315.1,315-333).
gggagctgtacttctatga

SEQ ID NO: 468594 - DNA, 19 bp, Mus musculus
  siRNA target sequence for Taf6 (NM_009315.1,316-334).
ggagctgtacttctatgaa

SEQ ID NO: 468595 - DNA, 19 bp, Mus musculus
  siRNA target sequence for Taf6 (NM_009315.1,350-368).
ctgagtgacatcatcaaca

SEQ ID NO: 468596 - DNA, 19 bp, Mus musculus
  siRNA target sequence for Taf6 (NM_009315.1,436-454).
gccagctataccagagaat

SEQ ID NO: 468597 - DNA, 19 bp, Mus musculus
  siRNA target sequence for Taf6 (NM_009315.1,805-823).
gggggtccgtgtgaatgta

SEQ ID NO: 468598 - DNA, 19 bp, Mus musculus
  siRNA target sequence for Taf6 (NM_009315.1,815-833).
gtgaatgtagttcagaata

SEQ ID NO: 468599 - DNA, 19 bp, Mus musculus
  siRNA target sequence for Taf6 (NM_009315.1,880-898).
ggacaaccccacactgtat

SEQ ID NO: 468600 - DNA, 19 bp, Mus musculus
  siRNA target sequence for Taf6 (NM_009315.1,883-901).
caaccccacactgtatcta

SEQ ID NO: 468601 - DNA, 19 bp, Mus musculus
  siRNA target sequence for Taf6 (NM_009315.1,932-950).
gtaatgacctgcattgtga

SEQ ID NO: 468602 - DNA, 19 bp, Mus musculus
  siRNA target sequence for Taf6 (NM_009315.1,1013-1031).
cgtctagtggcccaaatct

SEQ ID NO: 468603 - DNA, 19 bp, Mus musculus
  siRNA target sequence for Taf6 (NM_009315.1,1016-1034).
ctagtggcccaaatctgta

SEQ ID NO: 468604 - DNA, 19 bp, Mus musculus
  siRNA target sequence for Taf6 (NM_009315.1,1021-1039).
ggcccaaatctgtaagcat

SEQ ID NO: 468605 - DNA, 19 bp, Mus musculus
  siRNA target sequence for Taf6 (NM_009315.1,1022-1040).
gcccaaatctgtaagcatt

SEQ ID NO: 468606 - DNA, 19 bp, Mus musculus
  siRNA target sequence for Taf6 (NM_009315.1,1023-1041).
cccaaatctgtaagcattt

SEQ ID NO: 468607 - DNA, 19 bp, Mus musculus
  siRNA target sequence for Taf6 (NM_009315.1,1060-1078).
catccaatcccgaatcact

SEQ ID NO: 468608 - DNA, 19 bp, Mus musculus
  siRNA target sequence for Taf6 (NM_009315.1,1064-1082).
caatcccgaatcactaaga

SEQ ID NO: 468609 - DNA, 19 bp, Mus musculus
  siRNA target sequence for Taf6 (NM_009315.1,1070-1088).
cgaatcactaagaccttta

SEQ ID NO: 468610 - DNA, 19 bp, Mus musculus
  siRNA target sequence for Taf6 (NM_009315.1,1152-1170).
cagagctgggacatgatgt

SEQ ID NO: 468611 - DNA, 19 bp, Mus musculus
  siRNA target sequence for Taf6 (NM_009315.1,1249-1267).
caacatcgaccgtattgga

SEQ ID NO: 468612 - DNA, 19 bp, Mus musculus
  siRNA target sequence for Taf6 (NM_009315.1,1324-1342).
gcgccctccacctgacaat

SEQ ID NO: 468613 - DNA, 19 bp, Mus musculus
  siRNA target sequence for Taf6 (NM_009315.1,1512-1530).
ctcgcacgcctggcttatt

SEQ ID NO: 468614 - DNA, 19 bp, Mus musculus
  siRNA target sequence for Taf6 (NM_009315.1,1514-1532).
cgcacgcctggcttattga

SEQ ID NO: 468615 - DNA, 19 bp, Mus musculus
  siRNA target sequence for Taf6 (NM_009315.1,1694-1712).
ggctcaggctctactacta

SEQ ID NO: 468616 - DNA, 19 bp, Mus musculus
  siRNA target sequence for Taf6l (NM_146092.1,256-274).
ccgagaggccacacagaat

SEQ ID NO: 468617 - DNA, 19 bp, Mus musculus
  siRNA target sequence for Taf6l (NM_146092.1,267-285).
cacagaatagctctcaatt

SEQ ID NO: 468618 - DNA, 19 bp, Mus musculus
  siRNA target sequence for Taf6l (NM_146092.1,721-739).
ggtcagtggggtaaaatct

SEQ ID NO: 468619 - DNA, 19 bp, Mus musculus
  siRNA target sequence for Taf6l (NM_146092.1,724-742).
cagtggggtaaaatctgta

SEQ ID NO: 468620 - DNA, 19 bp, Mus musculus
  siRNA target sequence for Taf6l (NM_146092.1,744-762).
gccacgacctggaacaact

SEQ ID NO: 468621 - DNA, 19 bp, Mus musculus
  siRNA target sequence for Taf6l (NM_146092.1,841-859).
gggcagcgtgctttactgt

SEQ ID NO: 468622 - DNA, 19 bp, Mus musculus
  siRNA target sequence for Taf6l (NM_146092.1,928-946).
ccttctactcagtcacata

SEQ ID NO: 468623 - DNA, 19 bp, Mus musculus
  siRNA target sequence for Taf6l (NM_146092.1,932-950).
ctactcagtcacatattct

SEQ ID NO: 468624 - DNA, 19 bp, Mus musculus
  siRNA target sequence for Taf6l (NM_146092.1,1116-1134).
ccacttactggacaaactt

SEQ ID NO: 468625 - DNA, 19 bp, Mus musculus
  siRNA target sequence for Taf6l (NM_146092.1,1148-1166).
gatgactattccgtatcta

SEQ ID NO: 468626 - DNA, 19 bp, Mus musculus
  siRNA target sequence for Taf6l (NM_146092.1,1181-1199).
gcggacgggcacaaagtgt

SEQ ID NO: 468627 - DNA, 19 bp, Mus musculus
  siRNA target sequence for Taf6l (NM_146092.1,1182-1200).
cggacgggcacaaagtgta

SEQ ID NO: 468628 - DNA, 19 bp, Mus musculus
  siRNA target sequence for Taf6l (NM_146092.1,1183-1201).
ggacgggcacaaagtgtat

SEQ ID NO: 468629 - DNA, 19 bp, Mus musculus
  siRNA target sequence for Taf6l (NM_146092.1,1217-1235).
gccgtagaacgactattga

SEQ ID NO: 468630 - DNA, 19 bp, Mus musculus
  siRNA target sequence for Taf6l (NM_146092.1,1218-1236).
ccgtagaacgactattgaa

SEQ ID NO: 468631 - DNA, 19 bp, Mus musculus
  siRNA target sequence for Taf6l (NM_146092.1,1220-1238).
gtagaacgactattgaaga

SEQ ID NO: 468632 - DNA, 19 bp, Mus musculus
  siRNA target sequence for Taf6l (NM_146092.1,1351-1369).
cagctccgaaacaggtttt

SEQ ID NO: 468633 - DNA, 19 bp, Mus musculus
  siRNA target sequence for Taf6l (NM_146092.1,1521-1539).
gaccacccggagacaagaa

SEQ ID NO: 468634 - DNA, 19 bp, Mus musculus
  siRNA target sequence for Taf6l (NM_146092.1,1557-1575).
cggattcggtgcggaaaat

SEQ ID NO: 468635 - DNA, 19 bp, Mus musculus
  siRNA target sequence for Taf6l (NM_146092.1,1776-1794).
ccccacacttccggtttat

SEQ ID NO: 468636 - DNA, 19 bp, Mus musculus
  siRNA target sequence for Taf6l (NM_146092.1,1777-1795).
cccacacttccggtttata

SEQ ID NO: 468637 - DNA, 19 bp, Mus musculus
  siRNA target sequence for Taf6l (NM_146092.1,1778-1796).
ccacacttccggtttataa

SEQ ID NO: 468638 - DNA, 19 bp, Mus musculus
  siRNA target sequence for Taf6l (NM_146092.1,1779-1797).
cacacttccggtttataat

SEQ ID NO: 468639 - DNA, 19 bp, Mus musculus
  siRNA target sequence for Taf9 (NM_027139.3,418-436).
gccgtgctgaccagtcttt

SEQ ID NO: 468640 - DNA, 19 bp, Mus musculus
  siRNA target sequence for Taf9 (NM_027139.3,468-486).
gatattgcacgacaaagaa

SEQ ID NO: 468641 - DNA, 19 bp, Mus musculus
  siRNA target sequence for Taf9 (NM_027139.3,474-492).
gcacgacaaagaaatcaaa

SEQ ID NO: 468642 - DNA, 19 bp, Mus musculus
  siRNA target sequence for Taf9 (NM_027139.3,514-532).
catattcaggtcctagatt

SEQ ID NO: 468643 - DNA, 19 bp, Mus musculus
  siRNA target sequence for Taf9 (NM_027139.3,571-589).
ggcttaagtctttacagaa

SEQ ID NO: 468644 - DNA, 19 bp, Mus musculus
  siRNA target sequence for Taf9 (NM_027139.3,600-618).
gctcctgcaggaagaataa

SEQ ID NO: 468645 - DNA, 19 bp, Mus musculus
  siRNA target sequence for Taf9 (NM_027139.3,604-622).
ctgcaggaagaataacagt

SEQ ID NO: 468646 - DNA, 19 bp, Mus musculus
  siRNA target sequence for Taf9 (NM_027139.3,629-647).
gttaagtgttggttcagtt

SEQ ID NO: 468647 - DNA, 19 bp, Mus musculus
  siRNA target sequence for Taf9 (NM_027139.3,694-712).
ccatgtctgtttcaactaa

SEQ ID NO: 468648 - DNA, 19 bp, Mus musculus
  siRNA target sequence for Taf9 (NM_027139.3,695-713).
catgtctgtttcaactaaa

SEQ ID NO: 468649 - DNA, 19 bp, Mus musculus
  siRNA target sequence for Taf9 (NM_027139.3,805-823).
catcaacagttcagaatgt

SEQ ID NO: 468650 - DNA, 19 bp, Mus musculus
  siRNA target sequence for Taf9 (NM_027139.3,847-865).
ggtccaaaaacattcttat

SEQ ID NO: 468651 - DNA, 19 bp, Mus musculus
  siRNA target sequence for Taf9 (NM_027139.3,848-866).
gtccaaaaacattcttatt

SEQ ID NO: 468652 - DNA, 19 bp, Mus musculus
  siRNA target sequence for Taf9 (NM_027139.3,857-875).
cattcttattactactaat

SEQ ID NO: 468653 - DNA, 19 bp, Mus musculus
  siRNA target sequence for Taf9 (NM_027139.3,868-886).
ctactaatatggtatcaca

SEQ ID NO: 468654 - DNA, 19 bp, Mus musculus
  siRNA target sequence for Taf9 (NM_027139.3,963-981).
gatgactatgataatatgt

SEQ ID NO: 468655 - DNA, 19 bp, Mus musculus
  siRNA target sequence for Tal1 (NM_011527.1,346-364).
ggtgccgcgagggacttaa

SEQ ID NO: 468656 - DNA, 19 bp, Mus musculus
  siRNA target sequence for Tal1 (NM_011527.1,347-365).
gtgccgcgagggacttaaa

SEQ ID NO: 468657 - DNA, 19 bp, Mus musculus
  siRNA target sequence for Tal1 (NM_011527.1,647-665).
ggaggccctccccatatga

SEQ ID NO: 468658 - DNA, 19 bp, Mus musculus
  siRNA target sequence for Tal1 (NM_011527.1,650-668).
ggccctccccatatgagat

SEQ ID NO: 468659 - DNA, 19 bp, Mus musculus
  siRNA target sequence for Tal1 (NM_011527.1,683-701).
gtcctcacaccaaagtagt

SEQ ID NO: 468660 - DNA, 19 bp, Mus musculus
  siRNA target sequence for Tal1 (NM_011527.1,855-873).
cctggccaagttactcaat

SEQ ID NO: 468661 - DNA, 19 bp, Mus musculus
  siRNA target sequence for Tal1 (NM_011527.1,1028-1046).
cagccagcccggacagtta

SEQ ID NO: 468662 - DNA, 19 bp, Mus musculus
  siRNA target sequence for Tal1 (NM_011527.1,1030-1048).
gccagcccggacagttaca

SEQ ID NO: 468663 - DNA, 19 bp, Mus musculus
  siRNA target sequence for Tal2 (NM_009317.2,219-237).
gcaatgaggtatatcaact

SEQ ID NO: 468664 - DNA, 19 bp, Mus musculus
  siRNA target sequence for Tal2 (NM_009317.2,220-238).
caatgaggtatatcaactt

SEQ ID NO: 468665 - DNA, 19 bp, Mus musculus
  siRNA target sequence for Tal2 (NM_009317.2,284-302).
cgctgctcagggaaacatt

SEQ ID NO: 468666 - DNA, 19 bp, Mus musculus
  siRNA target sequence for Tal2 (NM_009317.2,286-304).
ctgctcagggaaacattct

SEQ ID NO: 468667 - DNA, 19 bp, Mus musculus
  siRNA target sequence for Tardbp (NM_145556.2,133-151).
gaacgatgaacccattgaa

SEQ ID NO: 468668 - DNA, 19 bp, Mus musculus
  siRNA target sequence for Tardbp (NM_145556.2,136-154).
cgatgaacccattgaaata

SEQ ID NO: 468669 - DNA, 19 bp, Mus musculus
  siRNA target sequence for Tardbp (NM_145556.2,176-194).
gtgttgctgtccacagtta

SEQ ID NO: 468670 - DNA, 19 bp, Mus musculus
  siRNA target sequence for Tardbp (NM_145556.2,236-254).
cccgtgtctcagtgtatga

SEQ ID NO: 468671 - DNA, 19 bp, Mus musculus
  siRNA target sequence for Tardbp (NM_145556.2,332-350).
cccaaagataacaaaagga

SEQ ID NO: 468672 - DNA, 19 bp, Mus musculus
  siRNA target sequence for Tardbp (NM_145556.2,477-495).
cttttggagaggttcttat

SEQ ID NO: 468673 - DNA, 19 bp, Mus musculus
  siRNA target sequence for Tardbp (NM_145556.2,496-514).
ggttcaggtcaagaaagat

SEQ ID NO: 468674 - DNA, 19 bp, Mus musculus
  siRNA target sequence for Tardbp (NM_145556.2,500-518).
caggtcaagaaagatctta

SEQ ID NO: 468675 - DNA, 19 bp, Mus musculus
  siRNA target sequence for Tardbp (NM_145556.2,537-555).
ggtttggctttgttcgatt

SEQ ID NO: 468676 - DNA, 19 bp, Mus musculus
  siRNA target sequence for Tardbp (NM_145556.2,543-561).
gctttgttcgatttacaga

SEQ ID NO: 468677 - DNA, 19 bp, Mus musculus
  siRNA target sequence for Tardbp (NM_145556.2,544-562).
ctttgttcgatttacagaa

SEQ ID NO: 468678 - DNA, 19 bp, Mus musculus
  siRNA target sequence for Tardbp (NM_145556.2,551-569).
cgatttacagaatatgaaa

SEQ ID NO: 468679 - DNA, 19 bp, Mus musculus
  siRNA target sequence for Tardbp (NM_145556.2,571-589).
ccaagtgaaagtaatgtca

SEQ ID NO: 468680 - DNA, 19 bp, Mus musculus
  siRNA target sequence for Tardbp (NM_145556.2,586-604).
gtcacaacgacatatgata

SEQ ID NO: 468681 - DNA, 19 bp, Mus musculus
  siRNA target sequence for Tardbp (NM_145556.2,588-606).
cacaacgacatatgataga

SEQ ID NO: 468682 - DNA, 19 bp, Mus musculus
  siRNA target sequence for Tardbp (NM_145556.2,649-667).
cccagacgagcctttgaga

SEQ ID NO: 468683 - DNA, 19 bp, Mus musculus
  siRNA target sequence for Tardbp (NM_145556.2,679-697).
gtttgttggacgttgtaca

SEQ ID NO: 468684 - DNA, 19 bp, Mus musculus
  siRNA target sequence for Tardbp (NM_145556.2,799-817).
ctttgcagatgataaggtt

SEQ ID NO: 468685 - DNA, 19 bp, Mus musculus
  siRNA target sequence for Tardbp (NM_145556.2,814-832).
ggttgcccagtctctttgt

SEQ ID NO: 468686 - DNA, 19 bp, Mus musculus
  siRNA target sequence for Tardbp (NM_145556.2,833-851).
ggagaggatttgatcatta

SEQ ID NO: 468687 - DNA, 19 bp, Mus musculus
  siRNA target sequence for Tardbp (NM_145556.2,834-852).
gagaggatttgatcattaa

SEQ ID NO: 468688 - DNA, 19 bp, Mus musculus
  siRNA target sequence for Tardbp (NM_145556.2,839-857).
gatttgatcattaaaggaa

SEQ ID NO: 468689 - DNA, 19 bp, Mus musculus
  siRNA target sequence for Tardbp (NM_145556.2,859-877).
cagcgtgcatatatccaat

SEQ ID NO: 468690 - DNA, 19 bp, Mus musculus
  siRNA target sequence for Tardbp (NM_145556.2,878-896).
gctgaacctaagcataata

SEQ ID NO: 468691 - DNA, 19 bp, Mus musculus
  siRNA target sequence for Tardbp (NM_145556.2,881-899).
gaacctaagcataatagca

SEQ ID NO: 468692 - DNA, 19 bp, Mus musculus
  siRNA target sequence for Tardbp (NM_145556.2,990-1008).
ctggcttgggaaataacca

SEQ ID NO: 468693 - DNA, 19 bp, Mus musculus
  siRNA target sequence for Tardbp (NM_145556.2,1021-1039).
gggtggagggatgaacttt

SEQ ID NO: 468694 - DNA, 19 bp, Mus musculus
  siRNA target sequence for Tardbp (NM_145556.2,1143-1161).
gcccatctgggaataacca

SEQ ID NO: 468695 - DNA, 19 bp, Mus musculus
  siRNA target sequence for Tardbp (NM_145556.2,1144-1162).
cccatctgggaataaccaa

SEQ ID NO: 468696 - DNA, 19 bp, Mus musculus
  siRNA target sequence for Tardbp (NM_145556.2,1196-1214).
gcttttggttctggaaata

SEQ ID NO: 468697 - DNA, 19 bp, Mus musculus
  siRNA target sequence for Tardbp (NM_145556.2,1203-1221).
gttctggaaataattccta

SEQ ID NO: 468698 - DNA, 19 bp, Mus musculus
  siRNA target sequence for Tardbp (NM_145556.2,1251-1269).
gttgggggtcagcatcaaa

SEQ ID NO: 468699 - DNA, 19 bp, Mus musculus
  siRNA target sequence for Tardbp (NM_145556.2,1255-1273).
ggggtcagcatcaaatgca

SEQ ID NO: 468700 - DNA, 19 bp, Mus musculus
  siRNA target sequence for Tbp (NM_013684.1,57-75).
cgccatgactcctggaatt

SEQ ID NO: 468701 - DNA, 19 bp, Mus musculus
  siRNA target sequence for Tbp (NM_013684.1,77-95).
ccatctttagtccaatgat

SEQ ID NO: 468702 - DNA, 19 bp, Mus musculus
  siRNA target sequence for Tbp (NM_013684.1,284-302).
gccagaccccacaactctt

SEQ ID NO: 468703 - DNA, 19 bp, Mus musculus
  siRNA target sequence for Tbp (NM_013684.1,293-311).
cacaactcttccattctca

SEQ ID NO: 468704 - DNA, 19 bp, Mus musculus
  siRNA target sequence for Tbp (NM_013684.1,404-422).
ctgagagctctggaattgt

SEQ ID NO: 468705 - DNA, 19 bp, Mus musculus
  siRNA target sequence for Tbp (NM_013684.1,421-439).
gtaccgcagcttcaaaata

SEQ ID NO: 468706 - DNA, 19 bp, Mus musculus
  siRNA target sequence for Tbp (NM_013684.1,427-445).
cagcttcaaaatattgtat

SEQ ID NO: 468707 - DNA, 19 bp, Mus musculus
  siRNA target sequence for Tbp (NM_013684.1,450-468).
cgtgaatcttggctgtaaa

SEQ ID NO: 468708 - DNA, 19 bp, Mus musculus
  siRNA target sequence for Tbp (NM_013684.1,461-479).
gctgtaaacttgacctaaa

SEQ ID NO: 468709 - DNA, 19 bp, Mus musculus
  siRNA target sequence for Tbp (NM_013684.1,559-577).
cggacaactgcgttgattt

SEQ ID NO: 468710 - DNA, 19 bp, Mus musculus
  siRNA target sequence for Tbp (NM_013684.1,607-625).
gccaagagtgaagaacaat

SEQ ID NO: 468711 - DNA, 19 bp, Mus musculus
  siRNA target sequence for Tbp (NM_013684.1,671-689).
gcttcccagctaagttctt

SEQ ID NO: 468712 - DNA, 19 bp, Mus musculus
  siRNA target sequence for Tbp (NM_013684.1,672-690).
cttcccagctaagttctta

SEQ ID NO: 468713 - DNA, 19 bp, Mus musculus
  siRNA target sequence for Tbp (NM_013684.1,676-694).
ccagctaagttcttagact

SEQ ID NO: 468714 - DNA, 19 bp, Mus musculus
  siRNA target sequence for Tbp (NM_013684.1,677-695).
cagctaagttcttagactt

SEQ ID NO: 468715 - DNA, 19 bp, Mus musculus
  siRNA target sequence for Tbp (NM_013684.1,680-698).
ctaagttcttagacttcaa

SEQ ID NO: 468716 - DNA, 19 bp, Mus musculus
  siRNA target sequence for Tbp (NM_013684.1,779-797).
gtagctatgagccagaatt

SEQ ID NO: 468717 - DNA, 19 bp, Mus musculus
  siRNA target sequence for Tbp (NM_013684.1,783-801).
ctatgagccagaattattt

SEQ ID NO: 468718 - DNA, 19 bp, Mus musculus
  siRNA target sequence for Tbp (NM_013684.1,802-820).
cctggattaatctacagaa

SEQ ID NO: 468719 - DNA, 19 bp, Mus musculus
  siRNA target sequence for Tbp (NM_013684.1,803-821).
ctggattaatctacagaat

SEQ ID NO: 468720 - DNA, 19 bp, Mus musculus
  siRNA target sequence for Tbp (NM_013684.1,806-824).
gattaatctacagaatgat

SEQ ID NO: 468721 - DNA, 19 bp, Mus musculus
  siRNA target sequence for Tbp (NM_013684.1,822-840).
gatcaaacccagaattgtt

SEQ ID NO: 468722 - DNA, 19 bp, Mus musculus
  siRNA target sequence for Tbpl1 (NM_011603.2,402-420).
ctttggagggagcaaatgt

SEQ ID NO: 468723 - DNA, 19 bp, Mus musculus
  siRNA target sequence for Tbpl1 (NM_011603.2,406-424).
ggagggagcaaatgtaatt

SEQ ID NO: 468724 - DNA, 19 bp, Mus musculus
  siRNA target sequence for Tbpl1 (NM_011603.2,409-427).
gggagcaaatgtaatttat

SEQ ID NO: 468725 - DNA, 19 bp, Mus musculus
  siRNA target sequence for Tbpl1 (NM_011603.2,434-452).
gatgttgggaaagtattaa

SEQ ID NO: 468726 - DNA, 19 bp, Mus musculus
  siRNA target sequence for Tbpl1 (NM_011603.2,457-475).
gcttagaaaacctagaatt

SEQ ID NO: 468727 - DNA, 19 bp, Mus musculus
  siRNA target sequence for Tbpl1 (NM_011603.2,468-486).
ctagaattacagctacaat

SEQ ID NO: 468728 - DNA, 19 bp, Mus musculus
  siRNA target sequence for Tbpl1 (NM_011603.2,489-507).
ggtcctcaggaaaaattat

SEQ ID NO: 468729 - DNA, 19 bp, Mus musculus
  siRNA target sequence for Tbpl1 (NM_011603.2,511-529).
cactggagcaacaagtgaa

SEQ ID NO: 468730 - DNA, 19 bp, Mus musculus
  siRNA target sequence for Tbpl1 (NM_011603.2,561-579).
cccgtagtctgcagaaact

SEQ ID NO: 468731 - DNA, 19 bp, Mus musculus
  siRNA target sequence for Tbpl1 (NM_011603.2,562-580).
ccgtagtctgcagaaacta

SEQ ID NO: 468732 - DNA, 19 bp, Mus musculus
  siRNA target sequence for Tbpl1 (NM_011603.2,590-608).
gtcatcttcacagatttta

SEQ ID NO: 468733 - DNA, 19 bp, Mus musculus
  siRNA target sequence for Tbpl1 (NM_011603.2,620-638).
gttttggcagtgtgtaaca

SEQ ID NO: 468734 - DNA, 19 bp, Mus musculus
  siRNA target sequence for Tbpl1 (NM_011603.2,633-651).
gtaacatgccctttgagat

SEQ ID NO: 468735 - DNA, 19 bp, Mus musculus
  siRNA target sequence for Tbpl1 (NM_011603.2,649-667).
gatccgtttgccagaattt

SEQ ID NO: 468736 - DNA, 19 bp, Mus musculus
  siRNA target sequence for Tbpl1 (NM_011603.2,652-670).
ccgtttgccagaatttaca

SEQ ID NO: 468737 - DNA, 19 bp, Mus musculus
  siRNA target sequence for Tbpl1 (NM_011603.2,653-671).
cgtttgccagaatttacaa

SEQ ID NO: 468738 - DNA, 19 bp, Mus musculus
  siRNA target sequence for Tbpl1 (NM_011603.2,654-672).
gtttgccagaatttacaaa

SEQ ID NO: 468739 - DNA, 19 bp, Mus musculus
  siRNA target sequence for Tbpl1 (NM_011603.2,717-735).
ccgtgtgctatcggataaa

SEQ ID NO: 468740 - DNA, 19 bp, Mus musculus
  siRNA target sequence for Tbpl1 (NM_011603.2,736-754).
gtctctaagagctacatta

SEQ ID NO: 468741 - DNA, 19 bp, Mus musculus
  siRNA target sequence for Tbpl1 (NM_011603.2,782-800).
gtgacagggcccaatgtaa

SEQ ID NO: 468742 - DNA, 19 bp, Mus musculus
  siRNA target sequence for Tbpl1 (NM_011603.2,813-831).
ctgccgtggaacagatcta

SEQ ID NO: 468743 - DNA, 19 bp, Mus musculus
  siRNA target sequence for Tbpl1 (NM_011603.2,829-847).
ctacccgttcgtgtttgaa

SEQ ID NO: 468744 - DNA, 19 bp, Mus musculus
  siRNA target sequence for Tcf12 (NM_011544.1,157-175).
gttaatagtgggaaaacga

SEQ ID NO: 468745 - DNA, 19 bp, Mus musculus
  siRNA target sequence for Tcf12 (NM_011544.1,204-222).
cagcgggtcaggtatggat

SEQ ID NO: 468746 - DNA, 19 bp, Mus musculus
  siRNA target sequence for Tcf12 (NM_011544.1,225-243).
gcgtggaggaacaacatct

SEQ ID NO: 468747 - DNA, 19 bp, Mus musculus
  siRNA target sequence for Tcf12 (NM_011544.1,226-244).
cgtggaggaacaacatctt

SEQ ID NO: 468748 - DNA, 19 bp, Mus musculus
  siRNA target sequence for Tcf12 (NM_011544.1,262-280).
ccaagcccctcctatgatt

SEQ ID NO: 468749 - DNA, 19 bp, Mus musculus
  siRNA target sequence for Tcf12 (NM_011544.1,270-288).
ctcctatgattcatctaga

SEQ ID NO: 468750 - DNA, 19 bp, Mus musculus
  siRNA target sequence for Tcf12 (NM_011544.1,277-295).
gattcatctagaggtttta

SEQ ID NO: 468751 - DNA, 19 bp, Mus musculus
  siRNA target sequence for Tcf12 (NM_011544.1,321-339).
cttgaatgacagtcgatta

SEQ ID NO: 468752 - DNA, 19 bp, Mus musculus
  siRNA target sequence for Tcf12 (NM_011544.1,324-342).
gaatgacagtcgattagga

SEQ ID NO: 468753 - DNA, 19 bp, Mus musculus
  siRNA target sequence for Tcf12 (NM_011544.1,361-379).
ccaacacctttcatgaact

SEQ ID NO: 468754 - DNA, 19 bp, Mus musculus
  siRNA target sequence for Tcf12 (NM_011544.1,523-541).
ggaacaccatactactcat

SEQ ID NO: 468755 - DNA, 19 bp, Mus musculus
  siRNA target sequence for Tcf12 (NM_011544.1,524-542).
gaacaccatactactcatt

SEQ ID NO: 468756 - DNA, 19 bp, Mus musculus
  siRNA target sequence for Tcf12 (NM_011544.1,566-584).
gaccgctccatgattctgt

SEQ ID NO: 468757 - DNA, 19 bp, Mus musculus
  siRNA target sequence for Tcf12 (NM_011544.1,631-649).
ggcctaccttcttctgtat

SEQ ID NO: 468758 - DNA, 19 bp, Mus musculus
  siRNA target sequence for Tcf12 (NM_011544.1,632-650).
gcctaccttcttctgtata

SEQ ID NO: 468759 - DNA, 19 bp, Mus musculus
  siRNA target sequence for Tcf12 (NM_011544.1,661-679).
ccaaattctgacgatttca

SEQ ID NO: 468760 - DNA, 19 bp, Mus musculus
  siRNA target sequence for Tcf12 (NM_011544.1,662-680).
caaattctgacgatttcaa

SEQ ID NO: 468761 - DNA, 19 bp, Mus musculus
  siRNA target sequence for Tcf12 (NM_011544.1,672-690).
cgatttcaaccgtgaatct

SEQ ID NO: 468762 - DNA, 19 bp, Mus musculus
  siRNA target sequence for Tcf12 (NM_011544.1,726-744).
gttcgctagcactttcttt

SEQ ID NO: 468763 - DNA, 19 bp, Mus musculus
  siRNA target sequence for Tcf12 (NM_011544.1,774-792).
cctttggagttcatcgaat

SEQ ID NO: 468764 - DNA, 19 bp, Mus musculus
  siRNA target sequence for Tcf12 (NM_011544.1,798-816).
gagccagcctggttttggt

SEQ ID NO: 468765 - DNA, 19 bp, Mus musculus
  siRNA target sequence for Tcf12 (NM_011544.1,910-928).
gtgtcaccaacagacataa

SEQ ID NO: 468766 - DNA, 19 bp, Mus musculus
  siRNA target sequence for Tcf12 (NM_011544.1,972-990).
cagcagctcaccatatgtt

SEQ ID NO: 468767 - DNA, 19 bp, Mus musculus
  siRNA target sequence for Tcf12 (NM_011544.1,1009-1027).
cccatcaatggatcagata

SEQ ID NO: 468768 - DNA, 19 bp, Mus musculus
  siRNA target sequence for Tcf12 (NM_011544.1,1085-1103).
ggaaggccttggcatctat

SEQ ID NO: 468769 - DNA, 19 bp, Mus musculus
  siRNA target sequence for Tcf12 (NM_011544.1,1086-1104).
gaaggccttggcatctatt

SEQ ID NO: 468770 - DNA, 19 bp, Mus musculus
  siRNA target sequence for Tcf12 (NM_011544.1,1090-1108).
gccttggcatctatttatt

SEQ ID NO: 468771 - DNA, 19 bp, Mus musculus
  siRNA target sequence for Tcf12 (NM_011544.1,1116-1134).
ccacacaagcagtagtttt

SEQ ID NO: 468772 - DNA, 19 bp, Mus musculus
  siRNA target sequence for Tcf12 (NM_011544.1,1119-1137).
cacaagcagtagttttcca

SEQ ID NO: 468773 - DNA, 19 bp, Mus musculus
  siRNA target sequence for Tcf12 (NM_011544.1,1220-1238).
catctccaagctatgaaaa

SEQ ID NO: 468774 - DNA, 19 bp, Mus musculus
  siRNA target sequence for Tcf12 (NM_011544.1,1241-1259).
cacttcactccctgaaaaa

SEQ ID NO: 468775 - DNA, 19 bp, Mus musculus
  siRNA target sequence for Tcf12 (NM_011544.1,1367-1385).
ctatccatgtgctacgaaa

SEQ ID NO: 468776 - DNA, 19 bp, Mus musculus
  siRNA target sequence for Tcf12 (NM_011544.1,1443-1461).
gctgggaccatcccataat

SEQ ID NO: 468777 - DNA, 19 bp, Mus musculus
  siRNA target sequence for Tcf12 (NM_011544.1,1446-1464).
gggaccatcccataatgca

SEQ ID NO: 468778 - DNA, 19 bp, Mus musculus
  siRNA target sequence for Tcf12 (NM_011544.1,1447-1465).
ggaccatcccataatgcat

SEQ ID NO: 468779 - DNA, 19 bp, Mus musculus
  siRNA target sequence for Tcf12 (NM_011544.1,1496-1514).
gatccagccttgttacaaa

SEQ ID NO: 468780 - DNA, 19 bp, Mus musculus
  siRNA target sequence for Tcf12 (NM_011544.1,1500-1518).
cagccttgttacaaatagt

SEQ ID NO: 468781 - DNA, 19 bp, Mus musculus
  siRNA target sequence for Tcf12 (NM_011544.1,1537-1555).
ggaacacatcgggaagatt

SEQ ID NO: 468782 - DNA, 19 bp, Mus musculus
  siRNA target sequence for Tcf12 (NM_011544.1,1541-1559).
cacatcgggaagattcagt

SEQ ID NO: 468783 - DNA, 19 bp, Mus musculus
  siRNA target sequence for Tcf12 (NM_011544.1,1560-1578).
cagtctcaatggcaatcat

SEQ ID NO: 468784 - DNA, 19 bp, Mus musculus
  siRNA target sequence for Tcf12 (NM_011544.1,1648-1666).
ggtggtgtacaaaatcagt

SEQ ID NO: 468785 - DNA, 19 bp, Mus musculus
  siRNA target sequence for Tcf12 (NM_011544.1,1675-1693).
gttgttccaacagaaatca

SEQ ID NO: 468786 - DNA, 19 bp, Mus musculus
  siRNA target sequence for Tcf12 (NM_011544.1,1736-1754).
cttcatcagatgacatgaa

SEQ ID NO: 468787 - DNA, 19 bp, Mus musculus
  siRNA target sequence for Tcf12 (NM_011544.1,1780-1798).
gacatcaaggtctcatcta

SEQ ID NO: 468788 - DNA, 19 bp, Mus musculus
  siRNA target sequence for Tcf12 (NM_011544.1,1808-1826).
caagcagtaccaatgaaga

SEQ ID NO: 468789 - DNA, 19 bp, Mus musculus
  siRNA target sequence for Tcf12 (NM_011544.1,1899-1917).
cctgcgcgtgcgggatatt

SEQ ID NO: 468790 - DNA, 19 bp, Mus musculus
  siRNA target sequence for Tcf12 (NM_011544.1,1932-1950).
ggagcttggccgaatgtgt

SEQ ID NO: 468791 - DNA, 19 bp, Mus musculus
  siRNA target sequence for Tcf12 (NM_011544.1,1942-1960).
cgaatgtgtcagcttcatt

SEQ ID NO: 468792 - DNA, 19 bp, Mus musculus
  siRNA target sequence for Tcf12 (NM_011544.1,1943-1961).
gaatgtgtcagcttcattt

SEQ ID NO: 468793 - DNA, 19 bp, Mus musculus
  siRNA target sequence for Tcf12 (NM_011544.1,1976-1994).
ctcagacaaaacttctcat

SEQ ID NO: 468794 - DNA, 19 bp, Mus musculus
  siRNA target sequence for Tcf12 (NM_011544.1,1982-2000).
caaaacttctcattcttca

SEQ ID NO: 468795 - DNA, 19 bp, Mus musculus
  siRNA target sequence for Tcf20 (NM_013836.2,251-269).
cagctcatcccgcatagaa

SEQ ID NO: 468796 - DNA, 19 bp, Mus musculus
  siRNA target sequence for Tcf20 (NM_013836.2,253-271).
gctcatcccgcatagaaga

SEQ ID NO: 468797 - DNA, 19 bp, Mus musculus
  siRNA target sequence for Tcf20 (NM_013836.2,256-274).
catcccgcatagaagagtt

SEQ ID NO: 468798 - DNA, 19 bp, Mus musculus
  siRNA target sequence for Tcf20 (NM_013836.2,288-306).
gcccagatgttccagaatt

SEQ ID NO: 468799 - DNA, 19 bp, Mus musculus
  siRNA target sequence for Tcf20 (NM_013836.2,3175-3193).
cagcagcccatgattccat

SEQ ID NO: 468800 - DNA, 19 bp, Mus musculus
  siRNA target sequence for Tcf20 (NM_013836.2,3177-3195).
gcagcccatgattccattt

SEQ ID NO: 468801 - DNA, 19 bp, Mus musculus
  siRNA target sequence for Tcf20 (NM_013836.2,3255-3273).
ggtagccgggagactatga

SEQ ID NO: 468802 - DNA, 19 bp, Mus musculus
  siRNA target sequence for Tcf20 (NM_013836.2,3349-3367).
ggggagaccctcatcacat

SEQ ID NO: 468803 - DNA, 19 bp, Mus musculus
  siRNA target sequence for Tcf20 (NM_013836.2,3395-3413).
ggccaataggagttcttta

SEQ ID NO: 468804 - DNA, 19 bp, Mus musculus
  siRNA target sequence for Tcf20 (NM_013836.2,3397-3415).
ccaataggagttctttaca

SEQ ID NO: 468805 - DNA, 19 bp, Mus musculus
  siRNA target sequence for Tcf20 (NM_013836.2,3467-3485).
caccagggctcatgcttat

SEQ ID NO: 468806 - DNA, 19 bp, Mus musculus
  siRNA target sequence for Tcf20 (NM_013836.2,3480-3498).
gcttatggggaccctaata

SEQ ID NO: 468807 - DNA, 19 bp, Mus musculus
  siRNA target sequence for Tcf20 (NM_013836.2,3491-3509).
ccctaataccggtttgaat

SEQ ID NO: 468808 - DNA, 19 bp, Mus musculus
  siRNA target sequence for Tcf20 (NM_013836.2,3492-3510).
cctaataccggtttgaatt

SEQ ID NO: 468809 - DNA, 19 bp, Mus musculus
  siRNA target sequence for Tcf20 (NM_013836.2,3512-3530).
ccagctccattataagaga

SEQ ID NO: 468810 - DNA, 19 bp, Mus musculus
  siRNA target sequence for Tcf20 (NM_013836.2,3663-3681).
gtacggagccccctgaaaa

SEQ ID NO: 468811 - DNA, 19 bp, Mus musculus
  siRNA target sequence for Tcf20 (NM_013836.2,3686-3704).
caaagacggaatgatgtat

SEQ ID NO: 468812 - DNA, 19 bp, Mus musculus
  siRNA target sequence for Tcf20 (NM_013836.2,3712-3730).
cagtaggtacgtatcatga

SEQ ID NO: 468813 - DNA, 19 bp, Mus musculus
  siRNA target sequence for Tcf20 (NM_013836.2,3803-3821).
gcacagctctcagaagtta

SEQ ID NO: 468814 - DNA, 19 bp, Mus musculus
  siRNA target sequence for Tcf20 (NM_013836.2,3873-3891).
ggtcctccaggaatgtcta

SEQ ID NO: 468815 - DNA, 19 bp, Mus musculus
  siRNA target sequence for Tcf20 (NM_013836.2,3874-3892).
gtcctccaggaatgtctaa

SEQ ID NO: 468816 - DNA, 19 bp, Mus musculus
  siRNA target sequence for Tcf20 (NM_013836.2,3998-4016).
ggatcattcttctcaaaat

SEQ ID NO: 468817 - DNA, 19 bp, Mus musculus
  siRNA target sequence for Tcf20 (NM_013836.2,4002-4020).
cattcttctcaaaatcctt

SEQ ID NO: 468818 - DNA, 19 bp, Mus musculus
  siRNA target sequence for Tcf20 (NM_013836.2,4033-4051).
ggcgggttcgttcttttat

SEQ ID NO: 468819 - DNA, 19 bp, Mus musculus
  siRNA target sequence for Tcf20 (NM_013836.2,4035-4053).
cgggttcgttcttttatct

SEQ ID NO: 468820 - DNA, 19 bp, Mus musculus
  siRNA target sequence for Tcf20 (NM_013836.2,4055-4073).
ccctattcccagtaagaga

SEQ ID NO: 468821 - DNA, 19 bp, Mus musculus
  siRNA target sequence for Tcf20 (NM_013836.2,4094-4112).
cagtaacgctgatgataaa

SEQ ID NO: 468822 - DNA, 19 bp, Mus musculus
  siRNA target sequence for Tcf20 (NM_013836.2,4137-4155).
gaaggtgccgataaagcat

SEQ ID NO: 468823 - DNA, 19 bp, Mus musculus
  siRNA target sequence for Tcf20 (NM_013836.2,4141-4159).
gtgccgataaagcatacaa

SEQ ID NO: 468824 - DNA, 19 bp, Mus musculus
  siRNA target sequence for Tcf20 (NM_013836.2,4143-4161).
gccgataaagcatacaatt

SEQ ID NO: 468825 - DNA, 19 bp, Mus musculus
  siRNA target sequence for Tcf20 (NM_013836.2,4146-4164).
gataaagcatacaattcct

SEQ ID NO: 468826 - DNA, 19 bp, Mus musculus
  siRNA target sequence for Tcf20 (NM_013836.2,4183-4201).
gtcaggatatcaagtctat

SEQ ID NO: 468827 - DNA, 19 bp, Mus musculus
  siRNA target sequence for Tcf20 (NM_013836.2,4187-4205).
ggatatcaagtctattcct

SEQ ID NO: 468828 - DNA, 19 bp, Mus musculus
  siRNA target sequence for Tcf20 (NM_013836.2,4216-4234).
cctccaaggaccttccaaa

SEQ ID NO: 468829 - DNA, 19 bp, Mus musculus
  siRNA target sequence for Tcf20 (NM_013836.2,4276-4294).
ctgctaagaccaaaatact

SEQ ID NO: 468830 - DNA, 19 bp, Mus musculus
  siRNA target sequence for Tcf20 (NM_013836.2,4302-4320).
cggaagggacggggattaa

SEQ ID NO: 468831 - DNA, 19 bp, Mus musculus
  siRNA target sequence for Tcf20 (NM_013836.2,4409-4427).
cacactggatgatatacta

SEQ ID NO: 468832 - DNA, 19 bp, Mus musculus
  siRNA target sequence for Tcf20 (NM_013836.2,4416-4434).
gatgatatactatctctaa

SEQ ID NO: 468833 - DNA, 19 bp, Mus musculus
  siRNA target sequence for Tcf20 (NM_013836.2,4512-4530).
gacctagtcagtgtaacta

SEQ ID NO: 468834 - DNA, 19 bp, Mus musculus
  siRNA target sequence for Tcf20 (NM_013836.2,4647-4665).
ccctctggtactatgacat

SEQ ID NO: 468835 - DNA, 19 bp, Mus musculus
  siRNA target sequence for Tcf20 (NM_013836.2,4720-4738).
gtggggcagcaccactaat

SEQ ID NO: 468836 - DNA, 19 bp, Mus musculus
  siRNA target sequence for Tcf20 (NM_013836.2,4722-4740).
ggggcagcaccactaatct

SEQ ID NO: 468837 - DNA, 19 bp, Mus musculus
  siRNA target sequence for Tcf20 (NM_013836.2,4723-4741).
gggcagcaccactaatctt

SEQ ID NO: 468838 - DNA, 19 bp, Mus musculus
  siRNA target sequence for Tcf20 (NM_013836.2,4724-4742).
ggcagcaccactaatcttt

SEQ ID NO: 468839 - DNA, 19 bp, Mus musculus
  siRNA target sequence for Tcf20 (NM_013836.2,4814-4832).
gaacgatacagtcatgatt

SEQ ID NO: 468840 - DNA, 19 bp, Mus musculus
  siRNA target sequence for Tcf20 (NM_013836.2,4826-4844).
catgatttcacccaaacaa

SEQ ID NO: 468841 - DNA, 19 bp, Mus musculus
  siRNA target sequence for Tcf20 (NM_013836.2,4896-4914).
ccaatcggtagtgtcaata

SEQ ID NO: 468842 - DNA, 19 bp, Mus musculus
  siRNA target sequence for Tcf20 (NM_013836.2,4901-4919).
cggtagtgtcaataagcaa

SEQ ID NO: 468843 - DNA, 19 bp, Mus musculus
  siRNA target sequence for Tcf20 (NM_013836.2,4902-4920).
ggtagtgtcaataagcaaa

SEQ ID NO: 468844 - DNA, 19 bp, Mus musculus
  siRNA target sequence for Tcf20 (NM_013836.2,5126-5144).
gccactagataaaactgat

SEQ ID NO: 468845 - DNA, 19 bp, Mus musculus
  siRNA target sequence for Tcf20 (NM_013836.2,5145-5163).
gccaagaacaagtcttttt

SEQ ID NO: 468846 - DNA, 19 bp, Mus musculus
  siRNA target sequence for Tcf20 (NM_013836.2,5349-5367).
gtaacagagtcttctgtta

SEQ ID NO: 468847 - DNA, 19 bp, Mus musculus
  siRNA target sequence for Tcf20 (NM_013836.2,5681-5699).
gctcccttgtaaaaaagca

SEQ ID NO: 468848 - DNA, 19 bp, Mus musculus
  siRNA target sequence for Tcf20 (NM_013836.2,5802-5820).
cctcttgacagcaacgaat

SEQ ID NO: 468849 - DNA, 19 bp, Mus musculus
  siRNA target sequence for Tcf20 (NM_013836.2,5803-5821).
ctcttgacagcaacgaatt

SEQ ID NO: 468850 - DNA, 19 bp, Mus musculus
  siRNA target sequence for Tcf20 (NM_013836.2,5805-5823).
cttgacagcaacgaatttt

SEQ ID NO: 468851 - DNA, 19 bp, Mus musculus
  siRNA target sequence for Tcf21 (NM_011545.1,236-254).
gctccctcagcgatgtaga

SEQ ID NO: 468852 - DNA, 19 bp, Mus musculus
  siRNA target sequence for Tcf21 (NM_011545.1,239-257).
ccctcagcgatgtagaaga

SEQ ID NO: 468853 - DNA, 19 bp, Mus musculus
  siRNA target sequence for Tcf21 (NM_011545.1,642-660).
gtacgagaacggttacatt

SEQ ID NO: 468854 - DNA, 19 bp, Mus musculus
  siRNA target sequence for Tcf21 (NM_011545.1,738-756).
ccgcttgtgtggaactaca

SEQ ID NO: 468855 - DNA, 19 bp, Mus musculus
  siRNA target sequence for Tcf3 (NM_009332.1,317-335).
ccccaggatggcgcttttt

SEQ ID NO: 468856 - DNA, 19 bp, Mus musculus
  siRNA target sequence for Tcf3 (NM_009332.1,320-338).
caggatggcgcttttttta

SEQ ID NO: 468857 - DNA, 19 bp, Mus musculus
  siRNA target sequence for Tcf3 (NM_009332.1,358-376).
gtaccccttcctgatgatt

SEQ ID NO: 468858 - DNA, 19 bp, Mus musculus
  siRNA target sequence for Tcf3 (NM_009332.1,429-447).
cgcgcacctacctacagat

SEQ ID NO: 468859 - DNA, 19 bp, Mus musculus
  siRNA target sequence for Tcf3 (NM_009332.1,678-696).
ctgagctgtcaccgtatta

SEQ ID NO: 468860 - DNA, 19 bp, Mus musculus
  siRNA target sequence for Tcf3 (NM_009332.1,987-1005).
ccccagttacggtgaagaa

SEQ ID NO: 468861 - DNA, 19 bp, Mus musculus
  siRNA target sequence for Tcf3 (NM_009332.1,1113-1131).
cagccattaaccaaatcct

SEQ ID NO: 468862 - DNA, 19 bp, Mus musculus
  siRNA target sequence for Tcf3 (NM_009332.1,1293-1311).
cacagtctcagcagcaaat

SEQ ID NO: 468863 - DNA, 19 bp, Mus musculus
  siRNA target sequence for Tcf3 (NM_009332.1,1297-1315).
gtctcagcagcaaatccaa

SEQ ID NO: 468864 - DNA, 19 bp, Mus musculus
  siRNA target sequence for Tcf3 (NM_009332.1,1342-1360).
gagcaagaagccatgcatt

SEQ ID NO: 468865 - DNA, 19 bp, Mus musculus
  siRNA target sequence for Tcf4 (NM_013685.1,799-817).
ctctccaccttttgtcaat

SEQ ID NO: 468866 - DNA, 19 bp, Mus musculus
  siRNA target sequence for Tcf4 (NM_013685.1,812-830).
gtcaattccagaatacaaa

SEQ ID NO: 468867 - DNA, 19 bp, Mus musculus
  siRNA target sequence for Tcf4 (NM_013685.1,843-861).
ggggctcatactcatctta

SEQ ID NO: 468868 - DNA, 19 bp, Mus musculus
  siRNA target sequence for Tcf4 (NM_013685.1,844-862).
gggctcatactcatcttat

SEQ ID NO: 468869 - DNA, 19 bp, Mus musculus
  siRNA target sequence for Tcf4 (NM_013685.1,954-972).
ctggctcccagtactatca

SEQ ID NO: 468870 - DNA, 19 bp, Mus musculus
  siRNA target sequence for Tcf4 (NM_013685.1,956-974).
ggctcccagtactatcagt

SEQ ID NO: 468871 - DNA, 19 bp, Mus musculus
  siRNA target sequence for Tcf4 (NM_013685.1,957-975).
gctcccagtactatcagta

SEQ ID NO: 468872 - DNA, 19 bp, Mus musculus
  siRNA target sequence for Tcf4 (NM_013685.1,958-976).
ctcccagtactatcagtat

SEQ ID NO: 468873 - DNA, 19 bp, Mus musculus
  siRNA target sequence for Tcf4 (NM_013685.1,962-980).
cagtactatcagtattcaa

SEQ ID NO: 468874 - DNA, 19 bp, Mus musculus
  siRNA target sequence for Tcf4 (NM_013685.1,967-985).
ctatcagtattcaagcaat

SEQ ID NO: 468875 - DNA, 19 bp, Mus musculus
  siRNA target sequence for Tcf4 (NM_013685.1,1112-1130).
gactcgccaggctatcctt

SEQ ID NO: 468876 - DNA, 19 bp, Mus musculus
  siRNA target sequence for Tcf4 (NM_013685.1,1207-1225).
ctcctccagcgggatgaat

SEQ ID NO: 468877 - DNA, 19 bp, Mus musculus
  siRNA target sequence for Tcf4 (NM_013685.1,1209-1227).
cctccagcgggatgaatca

SEQ ID NO: 468878 - DNA, 19 bp, Mus musculus
  siRNA target sequence for Tcf4 (NM_013685.1,1243-1261).
gatgctgggcaattcttct

SEQ ID NO: 468879 - DNA, 19 bp, Mus musculus
  siRNA target sequence for Tcf4 (NM_013685.1,1304-1322).
gaacgtttgagctatccat

SEQ ID NO: 468880 - DNA, 19 bp, Mus musculus
  siRNA target sequence for Tcf4 (NM_013685.1,1422-1440).
ccaacggaacagacagtat

SEQ ID NO: 468881 - DNA, 19 bp, Mus musculus
  siRNA target sequence for Tcf4 (NM_013685.1,1502-1520).
gccctagcttcgatctatt

SEQ ID NO: 468882 - DNA, 19 bp, Mus musculus
  siRNA target sequence for Tcf4 (NM_013685.1,1504-1522).
cctagcttcgatctattct

SEQ ID NO: 468883 - DNA, 19 bp, Mus musculus
  siRNA target sequence for Tcf4 (NM_013685.1,1523-1541).
cctgaccacacgaacaaca

SEQ ID NO: 468884 - DNA, 19 bp, Mus musculus
  siRNA target sequence for Tcf4 (NM_013685.1,1529-1547).
cacacgaacaacagctttt

SEQ ID NO: 468885 - DNA, 19 bp, Mus musculus
  siRNA target sequence for Tcf4 (NM_013685.1,1629-1647).
cctcgtcatctcccaatta

SEQ ID NO: 468886 - DNA, 19 bp, Mus musculus
  siRNA target sequence for Tcf4 (NM_013685.1,1630-1648).
ctcgtcatctcccaattat

SEQ ID NO: 468887 - DNA, 19 bp, Mus musculus
  siRNA target sequence for Tcf4 (NM_013685.1,1632-1650).
cgtcatctcccaattatga

SEQ ID NO: 468888 - DNA, 19 bp, Mus musculus
  siRNA target sequence for Tcf4 (NM_013685.1,1633-1651).
gtcatctcccaattatgaa

SEQ ID NO: 468889 - DNA, 19 bp, Mus musculus
  siRNA target sequence for Tcf4 (NM_013685.1,1825-1843).
ctcagggtacggaactagt

SEQ ID NO: 468890 - DNA, 19 bp, Mus musculus
  siRNA target sequence for Tcf4 (NM_013685.1,1936-1954).
ggttccggtcccacaactt

SEQ ID NO: 468891 - DNA, 19 bp, Mus musculus
  siRNA target sequence for Tcf4 (NM_013685.1,1968-1986).
caacttcccctgacttgaa

SEQ ID NO: 468892 - DNA, 19 bp, Mus musculus
  siRNA target sequence for Tcf4 (NM_013685.1,2048-2066).
ggtagctctgagatcaaat

SEQ ID NO: 468893 - DNA, 19 bp, Mus musculus
  siRNA target sequence for Tcf4 (NM_013685.1,2089-2107).
cctgcaagacacaaaatct

SEQ ID NO: 468894 - DNA, 19 bp, Mus musculus
  siRNA target sequence for Tcf4 (NM_013685.1,2090-2108).
ctgcaagacacaaaatctt

SEQ ID NO: 468895 - DNA, 19 bp, Mus musculus
  siRNA target sequence for Tcf4 (NM_013685.1,2092-2110).
gcaagacacaaaatcttct

SEQ ID NO: 468896 - DNA, 19 bp, Mus musculus
  siRNA target sequence for Tcf4 (NM_013685.1,2131-2149).
cgacaagaaggatatcaaa

SEQ ID NO: 468897 - DNA, 19 bp, Mus musculus
  siRNA target sequence for Tcf4 (NM_013685.1,2134-2152).
caagaaggatatcaaatca

SEQ ID NO: 468898 - DNA, 19 bp, Mus musculus
  siRNA target sequence for Tcf4 (NM_013685.1,2160-2178).
ggtcaagatctagcaataa

SEQ ID NO: 468899 - DNA, 19 bp, Mus musculus
  siRNA target sequence for Tcf4 (NM_013685.1,2163-2181).
caagatctagcaataacga

SEQ ID NO: 468900 - DNA, 19 bp, Mus musculus
  siRNA target sequence for Tcf4 (NM_013685.1,2256-2274).
gcctgagggtccgagatat

SEQ ID NO: 468901 - DNA, 19 bp, Mus musculus
  siRNA target sequence for Tcf4 (NM_013685.1,2258-2276).
ctgagggtccgagatatca

SEQ ID NO: 468902 - DNA, 19 bp, Mus musculus
  siRNA target sequence for Tcf7 (NM_009331.2,190-208).
ccactctacgaacatttca

SEQ ID NO: 468903 - DNA, 19 bp, Mus musculus
  siRNA target sequence for Tcf7 (NM_009331.2,281-299).
ccgatctctctggatttta

SEQ ID NO: 468904 - DNA, 19 bp, Mus musculus
  siRNA target sequence for Tcf7 (NM_009331.2,375-393).
cccttcctgcggatataga

SEQ ID NO: 468905 - DNA, 19 bp, Mus musculus
  siRNA target sequence for Tcf7 (NM_009331.2,377-395).
cttcctgcggatatagaca

SEQ ID NO: 468906 - DNA, 19 bp, Mus musculus
  siRNA target sequence for Tcf7 (NM_009331.2,622-640).
ctcaatgcgttcatgcttt

SEQ ID NO: 468907 - DNA, 19 bp, Mus musculus
  siRNA target sequence for Tcf7 (NM_009331.2,628-646).
gcgttcatgctttacatga

SEQ ID NO: 468908 - DNA, 19 bp, Mus musculus
  siRNA target sequence for Tcf7 (NM_009331.2,720-738).
caggtggcatgcactatct

SEQ ID NO: 468909 - DNA, 19 bp, Mus musculus
  siRNA target sequence for Tcf7 (NM_009331.2,846-864).
gcggtcaagggaaaaacat

SEQ ID NO: 468910 - DNA, 19 bp, Mus musculus
  siRNA target sequence for Tcf7 (NM_009331.2,851-869).
caagggaaaaacatcaaga

SEQ ID NO: 468911 - DNA, 19 bp, Mus musculus
  siRNA target sequence for Tcf7 (NM_009331.2,890-908).
gaaatgcattcggtactta

SEQ ID NO: 468912 - DNA, 19 bp, Mus musculus
  siRNA target sequence for Tcf7l2 (NM_009333.2,159-177).
cgagctgatctccttcaaa

SEQ ID NO: 468913 - DNA, 19 bp, Mus musculus
  siRNA target sequence for Tcf7l2 (NM_009333.2,196-214).
gagaagaactcggaaaact

SEQ ID NO: 468914 - DNA, 19 bp, Mus musculus
  siRNA target sequence for Tcf7l2 (NM_009333.2,216-234).
ctcggcggaaagggattta

SEQ ID NO: 468915 - DNA, 19 bp, Mus musculus
  siRNA target sequence for Tcf7l2 (NM_009333.2,227-245).
gggatttagccgatgtcaa

SEQ ID NO: 468916 - DNA, 19 bp, Mus musculus
  siRNA target sequence for Tcf7l2 (NM_009333.2,316-334).
ccgcctcgctccgaaagtt

SEQ ID NO: 468917 - DNA, 19 bp, Mus musculus
  siRNA target sequence for Tcf7l2 (NM_009333.2,317-335).
cgcctcgctccgaaagttt

SEQ ID NO: 468918 - DNA, 19 bp, Mus musculus
  siRNA target sequence for Tcf7l2 (NM_009333.2,326-344).
ccgaaagtttccgagataa

SEQ ID NO: 468919 - DNA, 19 bp, Mus musculus
  siRNA target sequence for Tcf7l2 (NM_009333.2,327-345).
cgaaagtttccgagataaa

SEQ ID NO: 468920 - DNA, 19 bp, Mus musculus
  siRNA target sequence for Tcf7l2 (NM_009333.2,328-346).
gaaagtttccgagataaat

SEQ ID NO: 468921 - DNA, 19 bp, Mus musculus
  siRNA target sequence for Tcf7l2 (NM_009333.2,413-431).
ccggctaccccttcatcat

SEQ ID NO: 468922 - DNA, 19 bp, Mus musculus
  siRNA target sequence for Tcf7l2 (NM_009333.2,581-599).
cagcacacatcgtttcgaa

SEQ ID NO: 468923 - DNA, 19 bp, Mus musculus
  siRNA target sequence for Tcf7l2 (NM_009333.2,588-606).
catcgtttcgaacaaagta

SEQ ID NO: 468924 - DNA, 19 bp, Mus musculus
  siRNA target sequence for Tcf7l2 (NM_009333.2,651-669).
catcacgtacagcaatgaa

SEQ ID NO: 468925 - DNA, 19 bp, Mus musculus
  siRNA target sequence for Tcf7l2 (NM_009333.2,656-674).
cgtacagcaatgaacactt

SEQ ID NO: 468926 - DNA, 19 bp, Mus musculus
  siRNA target sequence for Tcf7l2 (NM_009333.2,742-760).
ccgcaccctccagatatct

SEQ ID NO: 468927 - DNA, 19 bp, Mus musculus
  siRNA target sequence for Tcf7l2 (NM_009333.2,804-822).
ccatccgctaggatggtta

SEQ ID NO: 468928 - DNA, 19 bp, Mus musculus
  siRNA target sequence for Tcf7l2 (NM_009333.2,855-873).
cacgacaggaggattcaga

SEQ ID NO: 468929 - DNA, 19 bp, Mus musculus
  siRNA target sequence for Tcf7l2 (NM_009333.2,898-916).
gtcaacgcatctatgtcta

SEQ ID NO: 468930 - DNA, 19 bp, Mus musculus
  siRNA target sequence for Tcf7l2 (NM_009333.2,1147-1165).
gtggccgaatgcacattga

SEQ ID NO: 468931 - DNA, 19 bp, Mus musculus
  siRNA target sequence for Tcf7l2 (NM_009333.2,1151-1169).
ccgaatgcacattgaaaga

SEQ ID NO: 468932 - DNA, 19 bp, Mus musculus
  siRNA target sequence for Tcf7l2 (NM_009333.2,1153-1171).
gaatgcacattgaaagaga

SEQ ID NO: 468933 - DNA, 19 bp, Mus musculus
  siRNA target sequence for Tcf7l2 (NM_009333.2,1293-1311).
gtctgcacgggataactat

SEQ ID NO: 468934 - DNA, 19 bp, Mus musculus
  siRNA target sequence for Tcf7l2 (NM_009333.2,1424-1442).
gtgcgttcgctacatacaa

SEQ ID NO: 468935 - DNA, 19 bp, Mus musculus
  siRNA target sequence for Tcfe3 (NM_172472.1,389-407).
ctgcgtcagcagcttatga

SEQ ID NO: 468936 - DNA, 19 bp, Mus musculus
  siRNA target sequence for Tcfe3 (NM_172472.1,630-648).
ggcagcaggtcaaacagta

SEQ ID NO: 468937 - DNA, 19 bp, Mus musculus
  siRNA target sequence for Tcfe3 (NM_172472.1,826-844).
gccggtgtctggaaatcta

SEQ ID NO: 468938 - DNA, 19 bp, Mus musculus
  siRNA target sequence for Tcfe3 (NM_172472.1,828-846).
cggtgtctggaaatctact

SEQ ID NO: 468939 - DNA, 19 bp, Mus musculus
  siRNA target sequence for Tcfe3 (NM_172472.1,834-852).
ctggaaatctacttgatgt

SEQ ID NO: 468940 - DNA, 19 bp, Mus musculus
  siRNA target sequence for Tcfe3 (NM_172472.1,881-899).
gctatcaccgtcagcaatt

SEQ ID NO: 468941 - DNA, 19 bp, Mus musculus
  siRNA target sequence for Tcfe3 (NM_172472.1,908-926).
gctgagctgcctaacatca

SEQ ID NO: 468942 - DNA, 19 bp, Mus musculus
  siRNA target sequence for Tcfe3 (NM_172472.1,1004-1022).
cgacgcaggcgattcaaca

SEQ ID NO: 468943 - DNA, 19 bp, Mus musculus
  siRNA target sequence for Tcfe3 (NM_172472.1,1005-1023).
gacgcaggcgattcaacat

SEQ ID NO: 468944 - DNA, 19 bp, Mus musculus
  siRNA target sequence for Tcfe3 (NM_172472.1,1007-1025).
cgcaggcgattcaacatta

SEQ ID NO: 468945 - DNA, 19 bp, Mus musculus
  siRNA target sequence for Tcfe3 (NM_172472.1,1008-1026).
gcaggcgattcaacattaa

SEQ ID NO: 468946 - DNA, 19 bp, Mus musculus
  siRNA target sequence for Tcfe3 (NM_172472.1,1011-1029).
ggcgattcaacattaacga

SEQ ID NO: 468947 - DNA, 19 bp, Mus musculus
  siRNA target sequence for Tcfe3 (NM_172472.1,1012-1030).
gcgattcaacattaacgat

SEQ ID NO: 468948 - DNA, 19 bp, Mus musculus
  siRNA target sequence for Tcfe3 (NM_172472.1,1013-1031).
cgattcaacattaacgata

SEQ ID NO: 468949 - DNA, 19 bp, Mus musculus
  siRNA target sequence for Tcfe3 (NM_172472.1,1021-1039).
cattaacgataggatcaaa

SEQ ID NO: 468950 - DNA, 19 bp, Mus musculus
  siRNA target sequence for Tcfe3 (NM_172472.1,1494-1512).
ggctagaggacattctgat

SEQ ID NO: 468951 - DNA, 19 bp, Mus musculus
  siRNA target sequence for Tcfeb (NM_011549.2,131-149).
cacaatgggagcaaccata

SEQ ID NO: 468952 - DNA, 19 bp, Mus musculus
  siRNA target sequence for Tcfl1 (NM_009336.1,407-425).
ctgacagccgcaagtctat

SEQ ID NO: 468953 - DNA, 19 bp, Mus musculus
  siRNA target sequence for Tcfl1 (NM_009336.1,565-583).
gaagagctcaacttacgtt

SEQ ID NO: 468954 - DNA, 19 bp, Mus musculus
  siRNA target sequence for Tcfl1 (NM_009336.1,602-620).
ggctggaggctgacaaaaa

SEQ ID NO: 468955 - DNA, 19 bp, Mus musculus
  siRNA target sequence for Tcfl1 (NM_009336.1,843-861).
cagtgatgatgcaacgttt

SEQ ID NO: 468956 - DNA, 19 bp, Mus musculus
  siRNA target sequence for Tcfl1 (NM_009336.1,923-941).
cccaccgtccagctttgta

SEQ ID NO: 468957 - DNA, 19 bp, Mus musculus
  siRNA target sequence for Tcfl1 (NM_009336.1,939-957).
gtaccgggaccctgttaca

SEQ ID NO: 468958 - DNA, 19 bp, Mus musculus
  siRNA target sequence for Tcfl1 (NM_009336.1,974-992).
ctgctagagccttcaagat

SEQ ID NO: 468959 - DNA, 19 bp, Mus musculus
  siRNA target sequence for Tcfl1 (NM_009336.1,976-994).
gctagagccttcaagatca

SEQ ID NO: 468960 - DNA, 19 bp, Mus musculus
  siRNA target sequence for Tcfl1 (NM_009336.1,997-1015).
cgtgaggcgtacaagaagt

SEQ ID NO: 468961 - DNA, 19 bp, Mus musculus
  siRNA target sequence for Tcfl1 (NM_009336.1,1106-1124).
ccttgcgtcagaagattgt

SEQ ID NO: 468962 - DNA, 19 bp, Mus musculus
  siRNA target sequence for Tcfl1 (NM_009336.1,1114-1132).
cagaagattgtcatcaaat

SEQ ID NO: 468963 - DNA, 19 bp, Mus musculus
  siRNA target sequence for Tcfl4 (NM_011550.2,250-268).
ggatcctgggctttttgta

SEQ ID NO: 468964 - DNA, 19 bp, Mus musculus
  siRNA target sequence for Tcfl4 (NM_011550.2,290-308).
gtagtgtccagagctaata

SEQ ID NO: 468965 - DNA, 19 bp, Mus musculus
  siRNA target sequence for Tcfl4 (NM_011550.2,629-647).
gtcacagccttgaagataa

SEQ ID NO: 468966 - DNA, 19 bp, Mus musculus
  siRNA target sequence for Tcfl4 (NM_011550.2,636-654).
ccttgaagataatgaaagt

SEQ ID NO: 468967 - DNA, 19 bp, Mus musculus
  siRNA target sequence for Tcfl4 (NM_011550.2,759-777).
ccctcttccagtctttcaa

SEQ ID NO: 468968 - DNA, 19 bp, Mus musculus
  siRNA target sequence for Tcfl4 (NM_011550.2,858-876).
ctctacgagagattgtgat

SEQ ID NO: 468969 - DNA, 19 bp, Mus musculus
  siRNA target sequence for Tcfl4 (NM_011550.2,879-897).
gtgtccttcatcagttgaa

SEQ ID NO: 468970 - DNA, 19 bp, Mus musculus
  siRNA target sequence for Terf1 (NM_009352.2,63-81).
cgtgagggctggacagatt

SEQ ID NO: 468971 - DNA, 19 bp, Mus musculus
  siRNA target sequence for Terf1 (NM_009352.2,288-306).
gacagcgccgaggctatta

SEQ ID NO: 468972 - DNA, 19 bp, Mus musculus
  siRNA target sequence for Terf1 (NM_009352.2,290-308).
cagcgccgaggctattatt

SEQ ID NO: 468973 - DNA, 19 bp, Mus musculus
  siRNA target sequence for Terf1 (NM_009352.2,292-310).
gcgccgaggctattattca

SEQ ID NO: 468974 - DNA, 19 bp, Mus musculus
  siRNA target sequence for Terf1 (NM_009352.2,293-311).
cgccgaggctattattcat

SEQ ID NO: 468975 - DNA, 19 bp, Mus musculus
  siRNA target sequence for Terf1 (NM_009352.2,309-327).
catggactacacagactta

SEQ ID NO: 468976 - DNA, 19 bp, Mus musculus
  siRNA target sequence for Terf1 (NM_009352.2,322-340).
gacttacagcttaccaatt

SEQ ID NO: 468977 - DNA, 19 bp, Mus musculus
  siRNA target sequence for Terf1 (NM_009352.2,331-349).
cttaccaattgaaaactgt

SEQ ID NO: 468978 - DNA, 19 bp, Mus musculus
  siRNA target sequence for Terf1 (NM_009352.2,389-407).
ggcccttgatgcacagttt

SEQ ID NO: 468979 - DNA, 19 bp, Mus musculus
  siRNA target sequence for Terf1 (NM_009352.2,408-426).
gaagttgatgagcgtatta

SEQ ID NO: 468980 - DNA, 19 bp, Mus musculus
  siRNA target sequence for Terf1 (NM_009352.2,434-452).
ggaatcagccctgatgatt

SEQ ID NO: 468981 - DNA, 19 bp, Mus musculus
  siRNA target sequence for Terf1 (NM_009352.2,435-453).
gaatcagccctgatgattt

SEQ ID NO: 468982 - DNA, 19 bp, Mus musculus
  siRNA target sequence for Terf1 (NM_009352.2,454-472).
ggaactcaattgaaaagga

SEQ ID NO: 468983 - DNA, 19 bp, Mus musculus
  siRNA target sequence for Terf1 (NM_009352.2,455-473).
gaactcaattgaaaaggaa

SEQ ID NO: 468984 - DNA, 19 bp, Mus musculus
  siRNA target sequence for Terf1 (NM_009352.2,483-501).
ctgcatgacgaaataaaga

SEQ ID NO: 468985 - DNA, 19 bp, Mus musculus
  siRNA target sequence for Terf1 (NM_009352.2,485-503).
gcatgacgaaataaagaat

SEQ ID NO: 468986 - DNA, 19 bp, Mus musculus
  siRNA target sequence for Terf1 (NM_009352.2,486-504).
catgacgaaataaagaatt

SEQ ID NO: 468987 - DNA, 19 bp, Mus musculus
  siRNA target sequence for Terf1 (NM_009352.2,605-623).
gcctttagaaaggaagtta

SEQ ID NO: 468988 - DNA, 19 bp, Mus musculus
  siRNA target sequence for Terf1 (NM_009352.2,607-625).
ctttagaaaggaagttact

SEQ ID NO: 468989 - DNA, 19 bp, Mus musculus
  siRNA target sequence for Terf1 (NM_009352.2,682-700).
gctgcatgatggagaaaat

SEQ ID NO: 468990 - DNA, 19 bp, Mus musculus
  siRNA target sequence for Terf1 (NM_009352.2,683-701).
ctgcatgatggagaaaatt

SEQ ID NO: 468991 - DNA, 19 bp, Mus musculus
  siRNA target sequence for Terf1 (NM_009352.2,685-703).
gcatgatggagaaaattca

SEQ ID NO: 468992 - DNA, 19 bp, Mus musculus
  siRNA target sequence for Terf1 (NM_009352.2,713-731).
gggtgatgtgttaagtgaa

SEQ ID NO: 468993 - DNA, 19 bp, Mus musculus
  siRNA target sequence for Terf1 (NM_009352.2,714-732).
ggtgatgtgttaagtgaaa

SEQ ID NO: 468994 - DNA, 19 bp, Mus musculus
  siRNA target sequence for Terf1 (NM_009352.2,736-754).
catcaacttttctaatgaa

SEQ ID NO: 468995 - DNA, 19 bp, Mus musculus
  siRNA target sequence for Terf1 (NM_009352.2,763-781).
caaaagtagtggaaaatga

SEQ ID NO: 468996 - DNA, 19 bp, Mus musculus
  siRNA target sequence for Terf1 (NM_009352.2,900-918).
cccttagtggatacagtat

SEQ ID NO: 468997 - DNA, 19 bp, Mus musculus
  siRNA target sequence for Terf1 (NM_009352.2,908-926).
ggatacagtatcctcaata

SEQ ID NO: 468998 - DNA, 19 bp, Mus musculus
  siRNA target sequence for Terf1 (NM_009352.2,909-927).
gatacagtatcctcaataa

SEQ ID NO: 468999 - DNA, 19 bp, Mus musculus
  siRNA target sequence for Terf1 (NM_009352.2,922-940).
caataaggtctcacaagaa

SEQ ID NO: 469000 - DNA, 19 bp, Mus musculus
  siRNA target sequence for Terf1 (NM_009352.2,941-959).
cgccttatcgcagttaaaa

SEQ ID NO: 469001 - DNA, 19 bp, Mus musculus
  siRNA target sequence for Terf1 (NM_009352.2,962-980).
cagacgtgctccatcagat

SEQ ID NO: 469002 - DNA, 19 bp, Mus musculus
  siRNA target sequence for Terf1 (NM_009352.2,966-984).
cgtgctccatcagatttca

SEQ ID NO: 469003 - DNA, 19 bp, Mus musculus
  siRNA target sequence for Terf1 (NM_009352.2,969-987).
gctccatcagatttcagta

SEQ ID NO: 469004 - DNA, 19 bp, Mus musculus
  siRNA target sequence for Terf1 (NM_009352.2,1048-1066).
ccagtggaaggaatagatt

SEQ ID NO: 469005 - DNA, 19 bp, Mus musculus
  siRNA target sequence for Terf1 (NM_009352.2,1214-1232).
gttcaacaaccgaacaagt

SEQ ID NO: 469006 - DNA, 19 bp, Mus musculus
  siRNA target sequence for Terf1 (NM_009352.2,1245-1263).
gatagatggagaacaatga

SEQ ID NO: 469007 - DNA, 19 bp, Mus musculus
  siRNA target sequence for Terf2 (NM_009353.1,229-247).
gggtgctcaagttctattt

SEQ ID NO: 469008 - DNA, 19 bp, Mus musculus
  siRNA target sequence for Terf2 (NM_009353.1,380-398).
gtgtctgtcgcgcattgaa

SEQ ID NO: 469009 - DNA, 19 bp, Mus musculus
  siRNA target sequence for Terf2 (NM_009353.1,382-400).
gtctgtcgcgcattgaaga

SEQ ID NO: 469010 - DNA, 19 bp, Mus musculus
  siRNA target sequence for Terf2 (NM_009353.1,448-466).
ccttggaatcagctatcaa

SEQ ID NO: 469011 - DNA, 19 bp, Mus musculus
  siRNA target sequence for Terf2 (NM_009353.1,449-467).
cttggaatcagctatcaat

SEQ ID NO: 469012 - DNA, 19 bp, Mus musculus
  siRNA target sequence for Terf2 (NM_009353.1,512-530).
ggttgaatccagcagaaaa

SEQ ID NO: 469013 - DNA, 19 bp, Mus musculus
  siRNA target sequence for Terf2 (NM_009353.1,539-557).
ggaggctgctgtcattatt

SEQ ID NO: 469014 - DNA, 19 bp, Mus musculus
  siRNA target sequence for Terf2 (NM_009353.1,540-558).
gaggctgctgtcattattt

SEQ ID NO: 469015 - DNA, 19 bp, Mus musculus
  siRNA target sequence for Terf2 (NM_009353.1,542-560).
ggctgctgtcattatttgt

SEQ ID NO: 469016 - DNA, 19 bp, Mus musculus
  siRNA target sequence for Terf2 (NM_009353.1,773-791).
cctcacgatggctaaaaaa

SEQ ID NO: 469017 - DNA, 19 bp, Mus musculus
  siRNA target sequence for Terf2 (NM_009353.1,776-794).
cacgatggctaaaaaagct

SEQ ID NO: 469018 - DNA, 19 bp, Mus musculus
  siRNA target sequence for Terf2 (NM_009353.1,804-822).
gaatcagctgcttcaagta

SEQ ID NO: 469019 - DNA, 19 bp, Mus musculus
  siRNA target sequence for Terf2 (NM_009353.1,808-826).
cagctgcttcaagtacaat

SEQ ID NO: 469020 - DNA, 19 bp, Mus musculus
  siRNA target sequence for Terf2 (NM_009353.1,1291-1309).
gccctaacgggcttgaaga

SEQ ID NO: 469021 - DNA, 19 bp, Mus musculus
  siRNA target sequence for Terf2 (NM_009353.1,1292-1310).
ccctaacgggcttgaagaa

SEQ ID NO: 469022 - DNA, 19 bp, Mus musculus
  siRNA target sequence for Terf2 (NM_009353.1,1293-1311).
cctaacgggcttgaagaaa

SEQ ID NO: 469023 - DNA, 19 bp, Mus musculus
  siRNA target sequence for Terf2 (NM_009353.1,1365-1383).
gacaggtcatccagtttaa

SEQ ID NO: 469024 - DNA, 19 bp, Mus musculus
  siRNA target sequence for Terf2 (NM_009353.1,1493-1511).
ccgaacagctgtgatgatt

SEQ ID NO: 469025 - DNA, 19 bp, Mus musculus
  siRNA target sequence for Terf2 (NM_009353.1,1494-1512).
cgaacagctgtgatgatta

SEQ ID NO: 469026 - DNA, 19 bp, Mus musculus
  siRNA target sequence for Terf2 (NM_009353.1,1517-1535).
ccgctggcggaccatgaaa

SEQ ID NO: 469027 - DNA, 19 bp, Mus musculus
  siRNA target sequence for Terf2 (NM_009353.1,1518-1536).
cgctggcggaccatgaaaa

SEQ ID NO: 469028 - DNA, 19 bp, Mus musculus
  siRNA target sequence for Terf2 (NM_009353.1,1520-1538).
ctggcggaccatgaaaaaa

SEQ ID NO: 469029 - DNA, 19 bp, Mus musculus
  siRNA target sequence for Terf2 (NM_009353.1,1522-1540).
ggcggaccatgaaaaaact

SEQ ID NO: 469030 - DNA, 19 bp, Mus musculus
  siRNA target sequence for Terf2 (NM_009353.1,1523-1541).
gcggaccatgaaaaaactt

SEQ ID NO: 469031 - DNA, 19 bp, Mus musculus
  siRNA target sequence for Tert (NM_009354.1,164-182).
gatctaccgcactttggtt

SEQ ID NO: 469032 - DNA, 19 bp, Mus musculus
  siRNA target sequence for Tert (NM_009354.1,223-241).
cacctgccgacctttcctt

SEQ ID NO: 469033 - DNA, 19 bp, Mus musculus
  siRNA target sequence for Tert (NM_009354.1,328-346).
gctttgagctgcttaacga

SEQ ID NO: 469034 - DNA, 19 bp, Mus musculus
  siRNA target sequence for Tert (NM_009354.1,360-378).
cctcccatggccttcacta

SEQ ID NO: 469035 - DNA, 19 bp, Mus musculus
  siRNA target sequence for Tert (NM_009354.1,615-633).
cgacccgtgggcaggaatt

SEQ ID NO: 469036 - DNA, 19 bp, Mus musculus
  siRNA target sequence for Tert (NM_009354.1,616-634).
gacccgtgggcaggaattt

SEQ ID NO: 469037 - DNA, 19 bp, Mus musculus
  siRNA target sequence for Tert (NM_009354.1,620-638).
cgtgggcaggaatttcact

SEQ ID NO: 469038 - DNA, 19 bp, Mus musculus
  siRNA target sequence for Tert (NM_009354.1,635-653).
cactaaccttaggttctta

SEQ ID NO: 469039 - DNA, 19 bp, Mus musculus
  siRNA target sequence for Tert (NM_009354.1,637-655).
ctaaccttaggttcttaca

SEQ ID NO: 469040 - DNA, 19 bp, Mus musculus
  siRNA target sequence for Tert (NM_009354.1,646-664).
ggttcttacaacagatcaa

SEQ ID NO: 469041 - DNA, 19 bp, Mus musculus
  siRNA target sequence for Tert (NM_009354.1,705-723).
ccatctcgaggtacaaaga

SEQ ID NO: 469042 - DNA, 19 bp, Mus musculus
  siRNA target sequence for Tert (NM_009354.1,748-766).
gtgtgccttcagctaagaa

SEQ ID NO: 469043 - DNA, 19 bp, Mus musculus
  siRNA target sequence for Tert (NM_009354.1,934-952).
ggtcggtgtgctgtaaaca

SEQ ID NO: 469044 - DNA, 19 bp, Mus musculus
  siRNA target sequence for Tert (NM_009354.1,937-955).
cggtgtgctgtaaacacaa

SEQ ID NO: 469045 - DNA, 19 bp, Mus musculus
  siRNA target sequence for Tert (NM_009354.1,1241-1259).
ccatgcagagtgccaatat

SEQ ID NO: 469046 - DNA, 19 bp, Mus musculus
  siRNA target sequence for Tert (NM_009354.1,1286-1304).
gtttcgaacagcaaaccaa

SEQ ID NO: 469047 - DNA, 19 bp, Mus musculus
  siRNA target sequence for Tert (NM_009354.1,1332-1350).
ccaccgcacctcatggatt

SEQ ID NO: 469048 - DNA, 19 bp, Mus musculus
  siRNA target sequence for Tert (NM_009354.1,1333-1351).
caccgcacctcatggattt

SEQ ID NO: 469049 - DNA, 19 bp, Mus musculus
  siRNA target sequence for Tert (NM_009354.1,1375-1393).
ggcaggtatatggttttct

SEQ ID NO: 469050 - DNA, 19 bp, Mus musculus
  siRNA target sequence for Tert (NM_009354.1,1432-1450).
ggggtaccaggcacaatga

SEQ ID NO: 469051 - DNA, 19 bp, Mus musculus
  siRNA target sequence for Tert (NM_009354.1,1455-1473).
cgcttctttaagaacttaa

SEQ ID NO: 469052 - DNA, 19 bp, Mus musculus
  siRNA target sequence for Tert (NM_009354.1,1491-1509).
gggaaatacggcaagctat

SEQ ID NO: 469053 - DNA, 19 bp, Mus musculus
  siRNA target sequence for Tert (NM_009354.1,1664-1682).
gctgcttaggtcattcttt

SEQ ID NO: 469054 - DNA, 19 bp, Mus musculus
  siRNA target sequence for Tert (NM_009354.1,1994-2012).
caactatgagcggacaaaa

SEQ ID NO: 469055 - DNA, 19 bp, Mus musculus
  siRNA target sequence for Tert (NM_009354.1,1997-2015).
ctatgagcggacaaaacat

SEQ ID NO: 469056 - DNA, 19 bp, Mus musculus
  siRNA target sequence for Tert (NM_009354.1,2008-2026).
caaaacatcctcaccttat

SEQ ID NO: 469057 - DNA, 19 bp, Mus musculus
  siRNA target sequence for Tert (NM_009354.1,2032-2050).
cttctgtactgggtatgaa

SEQ ID NO: 469058 - DNA, 19 bp, Mus musculus
  siRNA target sequence for Tert (NM_009354.1,2043-2061).
ggtatgaatgacatctaca

SEQ ID NO: 469059 - DNA, 19 bp, Mus musculus
  siRNA target sequence for Tert (NM_009354.1,2107-2125).
cacccaggatgtactttgt

SEQ ID NO: 469060 - DNA, 19 bp, Mus musculus
  siRNA target sequence for Tert (NM_009354.1,2235-2253).
gcagtggtccggagagata

SEQ ID NO: 469061 - DNA, 19 bp, Mus musculus
  siRNA target sequence for Tert (NM_009354.1,2410-2428).
gcagcagcagcctgtttga

SEQ ID NO: 469062 - DNA, 19 bp, Mus musculus
  siRNA target sequence for Tert (NM_009354.1,2448-2466).
cgtcacagtgtcgtaaaga

SEQ ID NO: 469063 - DNA, 19 bp, Mus musculus
  siRNA target sequence for Tert (NM_009354.1,2449-2467).
gtcacagtgtcgtaaagat

SEQ ID NO: 469064 - DNA, 19 bp, Mus musculus
  siRNA target sequence for Tert (NM_009354.1,2582-2600).
gcgggatgggttgctttta

SEQ ID NO: 469065 - DNA, 19 bp, Mus musculus
  siRNA target sequence for Tert (NM_009354.1,2586-2604).
gatgggttgcttttacgtt

SEQ ID NO: 469066 - DNA, 19 bp, Mus musculus
  siRNA target sequence for Tert (NM_009354.1,2590-2608).
ggttgcttttacgttttgt

SEQ ID NO: 469067 - DNA, 19 bp, Mus musculus
  siRNA target sequence for Tert (NM_009354.1,2594-2612).
gcttttacgttttgttgat

SEQ ID NO: 469068 - DNA, 19 bp, Mus musculus
  siRNA target sequence for Tert (NM_009354.1,2634-2652).
cacttggaccaagcaaaaa

SEQ ID NO: 469069 - DNA, 19 bp, Mus musculus
  siRNA target sequence for Tert (NM_009354.1,2685-2703).
gagtatgggtgcatgataa

SEQ ID NO: 469070 - DNA, 19 bp, Mus musculus
  siRNA target sequence for Tert (NM_009354.1,2948-2966).
gaagtgtcacggtctattt

SEQ ID NO: 469071 - DNA, 19 bp, Mus musculus
  siRNA target sequence for Tert (NM_009354.1,2951-2969).
gtgtcacggtctatttcta

SEQ ID NO: 469072 - DNA, 19 bp, Mus musculus
  siRNA target sequence for Tert (NM_009354.1,2953-2971).
gtcacggtctatttctaga

SEQ ID NO: 469073 - DNA, 19 bp, Mus musculus
  siRNA target sequence for Tert (NM_009354.1,2995-3013).
cagtctgcatcaatatata

SEQ ID NO: 469074 - DNA, 19 bp, Mus musculus
  siRNA target sequence for Tert (NM_009354.1,2997-3015).
gtctgcatcaatatataca

SEQ ID NO: 469075 - DNA, 19 bp, Mus musculus
  siRNA target sequence for Tert (NM_009354.1,3041-3059).
gttccatgcatgtgtgatt

SEQ ID NO: 469076 - DNA, 19 bp, Mus musculus
  siRNA target sequence for Tert (NM_009354.1,3085-3103).
ggaagaacctcacattctt

SEQ ID NO: 469077 - DNA, 19 bp, Mus musculus
  siRNA target sequence for Tert (NM_009354.1,3249-3267).
gctcattctgtcatctaca

SEQ ID NO: 469078 - DNA, 19 bp, Mus musculus
  siRNA target sequence for Tert (NM_009354.1,3327-3345).
gcgacaatgaccatcctta

SEQ ID NO: 469079 - DNA, 19 bp, Mus musculus
  siRNA target sequence for Tert (NM_009354.1,3328-3346).
cgacaatgaccatccttaa

SEQ ID NO: 469080 - DNA, 19 bp, Mus musculus
  siRNA target sequence for Tert (NM_009354.1,3329-3347).
gacaatgaccatccttaaa

SEQ ID NO: 469081 - DNA, 19 bp, Mus musculus
  siRNA target sequence for Tex27 (NM_148926.1,142-160).
ggtccagcaagactatgaa

SEQ ID NO: 469082 - DNA, 19 bp, Mus musculus
  siRNA target sequence for Tex27 (NM_148926.1,194-212).
gaaacaaccagatgatgat

SEQ ID NO: 469083 - DNA, 19 bp, Mus musculus
  siRNA target sequence for Tex27 (NM_148926.1,210-228).
gattccaccccaagtacaa

SEQ ID NO: 469084 - DNA, 19 bp, Mus musculus
  siRNA target sequence for Tex27 (NM_148926.1,229-247).
gtaacagccaatcagattt

SEQ ID NO: 469085 - DNA, 19 bp, Mus musculus
  siRNA target sequence for Tex27 (NM_148926.1,322-340).
cgctcccgacagaactgaa

SEQ ID NO: 469086 - DNA, 19 bp, Mus musculus
  siRNA target sequence for Tex27 (NM_148926.1,326-344).
cccgacagaactgaatgta

SEQ ID NO: 469087 - DNA, 19 bp, Mus musculus
  siRNA target sequence for Tex27 (NM_148926.1,349-367).
caccgagtacagaggaata

SEQ ID NO: 469088 - DNA, 19 bp, Mus musculus
  siRNA target sequence for Tex27 (NM_148926.1,351-369).
ccgagtacagaggaatatt

SEQ ID NO: 469089 - DNA, 19 bp, Mus musculus
  siRNA target sequence for Tex27 (NM_148926.1,353-371).
gagtacagaggaatattca

SEQ ID NO: 469090 - DNA, 19 bp, Mus musculus
  siRNA target sequence for Tex27 (NM_148926.1,398-416).
gaagcgaccgcgactagta

SEQ ID NO: 469091 - DNA, 19 bp, Mus musculus
  siRNA target sequence for Tex27 (NM_148926.1,403-421).
gaccgcgactagtagagaa

SEQ ID NO: 469092 - DNA, 19 bp, Mus musculus
  siRNA target sequence for Tex27 (NM_148926.1,535-553).
gctacgtgttctgtatgtt

SEQ ID NO: 469093 - DNA, 19 bp, Mus musculus
  siRNA target sequence for Tex27 (NM_148926.1,536-554).
ctacgtgttctgtatgtta

SEQ ID NO: 469094 - DNA, 19 bp, Mus musculus
  siRNA target sequence for Tfam (NM_009360.2,122-140).
gaatgtggagcgtgctaaa

SEQ ID NO: 469095 - DNA, 19 bp, Mus musculus
  siRNA target sequence for Tfam (NM_009360.2,126-144).
gtggagcgtgctaaaagca

SEQ ID NO: 469096 - DNA, 19 bp, Mus musculus
  siRNA target sequence for Tfam (NM_009360.2,187-205).
cgcatcccctcgtctatca

SEQ ID NO: 469097 - DNA, 19 bp, Mus musculus
  siRNA target sequence for Tfam (NM_009360.2,189-207).
catcccctcgtctatcagt

SEQ ID NO: 469098 - DNA, 19 bp, Mus musculus
  siRNA target sequence for Tfam (NM_009360.2,211-229).
gtctgtattccgaagtgtt

SEQ ID NO: 469099 - DNA, 19 bp, Mus musculus
  siRNA target sequence for Tfam (NM_009360.2,236-254).
gcatgggtagctatccaaa

SEQ ID NO: 469100 - DNA, 19 bp, Mus musculus
  siRNA target sequence for Tfam (NM_009360.2,264-282).
gagttcataccttcgattt

SEQ ID NO: 469101 - DNA, 19 bp, Mus musculus
  siRNA target sequence for Tfam (NM_009360.2,287-305).
cagaacagctacccaaatt

SEQ ID NO: 469102 - DNA, 19 bp, Mus musculus
  siRNA target sequence for Tfam (NM_009360.2,289-307).
gaacagctacccaaattta

SEQ ID NO: 469103 - DNA, 19 bp, Mus musculus
  siRNA target sequence for Tfam (NM_009360.2,311-329).
ctaaacacccagatgcaaa

SEQ ID NO: 469104 - DNA, 19 bp, Mus musculus
  siRNA target sequence for Tfam (NM_009360.2,316-334).
cacccagatgcaaaacttt

SEQ ID NO: 469105 - DNA, 19 bp, Mus musculus
  siRNA target sequence for Tfam (NM_009360.2,502-520).
cggcagagacggttaaaaa

SEQ ID NO: 469106 - DNA, 19 bp, Mus musculus
  siRNA target sequence for Tfam (NM_009360.2,503-521).
ggcagagacggttaaaaaa

SEQ ID NO: 469107 - DNA, 19 bp, Mus musculus
  siRNA target sequence for Tfam (NM_009360.2,572-590).
gacctcgttcagcatataa

SEQ ID NO: 469108 - DNA, 19 bp, Mus musculus
  siRNA target sequence for Tfam (NM_009360.2,574-592).
cctcgttcagcatataaca

SEQ ID NO: 469109 - DNA, 19 bp, Mus musculus
  siRNA target sequence for Tfam (NM_009360.2,575-593).
ctcgttcagcatataacat

SEQ ID NO: 469110 - DNA, 19 bp, Mus musculus
  siRNA target sequence for Tfam (NM_009360.2,628-646).
gattcggctcagggaaaat

SEQ ID NO: 469111 - DNA, 19 bp, Mus musculus
  siRNA target sequence for Tfam (NM_009360.2,725-743).
ggattcgttacgacaatga

SEQ ID NO: 469112 - DNA, 19 bp, Mus musculus
  siRNA target sequence for Tfam (NM_009360.2,726-744).
gattcgttacgacaatgaa

SEQ ID NO: 469113 - DNA, 19 bp, Mus musculus
  siRNA target sequence for Tfam (NM_009360.2,730-748).
cgttacgacaatgaaatga

SEQ ID NO: 469114 - DNA, 19 bp, Mus musculus
  siRNA target sequence for Tfam (NM_009360.2,731-749).
gttacgacaatgaaatgaa

SEQ ID NO: 469115 - DNA, 19 bp, Mus musculus
  siRNA target sequence for Tfam (NM_009360.2,792-810).
catccgtcgaagtgtgaaa

SEQ ID NO: 469116 - DNA, 19 bp, Mus musculus
  siRNA target sequence for Tfam (NM_009360.2,796-814).
cgtcgaagtgtgaaacgat

SEQ ID NO: 469117 - DNA, 19 bp, Mus musculus
  siRNA target sequence for Thap1 (NM_199042.1,321-339).
ctcgccccagcctttgtaa

SEQ ID NO: 469118 - DNA, 19 bp, Mus musculus
  siRNA target sequence for Thap1 (NM_199042.1,347-365).
gaggcagctgttaaaagga

SEQ ID NO: 469119 - DNA, 19 bp, Mus musculus
  siRNA target sequence for Thap1 (NM_199042.1,349-367).
ggcagctgttaaaaggaaa

SEQ ID NO: 469120 - DNA, 19 bp, Mus musculus
  siRNA target sequence for Thap1 (NM_199042.1,438-456).
gcaacaacaagctactgaa

SEQ ID NO: 469121 - DNA, 19 bp, Mus musculus
  siRNA target sequence for Thap1 (NM_199042.1,463-481).
cgctgtgcccacaatattt

SEQ ID NO: 469122 - DNA, 19 bp, Mus musculus
  siRNA target sequence for Thap1 (NM_199042.1,465-483).
ctgtgcccacaatatttct

SEQ ID NO: 469123 - DNA, 19 bp, Mus musculus
  siRNA target sequence for Thap1 (NM_199042.1,467-485).
gtgcccacaatatttctct

SEQ ID NO: 469124 - DNA, 19 bp, Mus musculus
  siRNA target sequence for Thap1 (NM_199042.1,469-487).
gcccacaatatttctctat

SEQ ID NO: 469125 - DNA, 19 bp, Mus musculus
  siRNA target sequence for Thap1 (NM_199042.1,470-488).
cccacaatatttctctata

SEQ ID NO: 469126 - DNA, 19 bp, Mus musculus
  siRNA target sequence for Thap1 (NM_199042.1,471-489).
ccacaatatttctctatat

SEQ ID NO: 469127 - DNA, 19 bp, Mus musculus
  siRNA target sequence for Thap1 (NM_199042.1,474-492).
caatatttctctatatcga

SEQ ID NO: 469128 - DNA, 19 bp, Mus musculus
  siRNA target sequence for Thap1 (NM_199042.1,570-588).
ctgctattgggctgctaat

SEQ ID NO: 469129 - DNA, 19 bp, Mus musculus
  siRNA target sequence for Thap1 (NM_199042.1,608-626).
gataacctgtcggttttct

SEQ ID NO: 469130 - DNA, 19 bp, Mus musculus
  siRNA target sequence for Thap1 (NM_199042.1,819-837).
gctacgtgatcctaccaaa

SEQ ID NO: 469131 - DNA, 19 bp, Mus musculus
  siRNA target sequence for Thap1 (NM_199042.1,820-838).
ctacgtgatcctaccaaat

SEQ ID NO: 469132 - DNA, 19 bp, Mus musculus
  siRNA target sequence for Thap11 (NM_021513.1,241-259).
gttccgggctgctacaaca

SEQ ID NO: 469133 - DNA, 19 bp, Mus musculus
  siRNA target sequence for Thap11 (NM_021513.1,244-262).
ccgggctgctacaacaatt

SEQ ID NO: 469134 - DNA, 19 bp, Mus musculus
  siRNA target sequence for Thap11 (NM_021513.1,246-264).
gggctgctacaacaattca

SEQ ID NO: 469135 - DNA, 19 bp, Mus musculus
  siRNA target sequence for Thap11 (NM_021513.1,439-457).
gtgcgcgttcccaccattt

SEQ ID NO: 469136 - DNA, 19 bp, Mus musculus
  siRNA target sequence for Thap11 (NM_021513.1,461-479).
cgctgcgtggcgtcaatga

SEQ ID NO: 469137 - DNA, 19 bp, Mus musculus
  siRNA target sequence for Thap11 (NM_021513.1,471-489).
cgtcaatgagcgcaaagta

SEQ ID NO: 469138 - DNA, 19 bp, Mus musculus
  siRNA target sequence for Thap11 (NM_021513.1,728-746).
ctccctcgggagatgatgt

SEQ ID NO: 469139 - DNA, 19 bp, Mus musculus
  siRNA target sequence for Thap11 (NM_021513.1,731-749).
cctcgggagatgatgtgaa

SEQ ID NO: 469140 - DNA, 19 bp, Mus musculus
  siRNA target sequence for Thap11 (NM_021513.1,1062-1080).
caagctccgtgaagaactt

SEQ ID NO: 469141 - DNA, 19 bp, Mus musculus
  siRNA target sequence for Tieg1 (NM_013692.1,145-163).
cttcggaggggaaaatgga

SEQ ID NO: 469142 - DNA, 19 bp, Mus musculus
  siRNA target sequence for Tieg1 (NM_013692.1,152-170).
ggggaaaatggaactaatt

SEQ ID NO: 469143 - DNA, 19 bp, Mus musculus
  siRNA target sequence for Tieg1 (NM_013692.1,259-277).
gcgactggaagtctcattt

SEQ ID NO: 469144 - DNA, 19 bp, Mus musculus
  siRNA target sequence for Tieg1 (NM_013692.1,303-321).
gtcacaccagtgtctgata

SEQ ID NO: 469145 - DNA, 19 bp, Mus musculus
  siRNA target sequence for Tieg1 (NM_013692.1,457-475).
ctggccacttcaaatcttt

SEQ ID NO: 469146 - DNA, 19 bp, Mus musculus
  siRNA target sequence for Tieg1 (NM_013692.1,459-477).
ggccacttcaaatctttct

SEQ ID NO: 469147 - DNA, 19 bp, Mus musculus
  siRNA target sequence for Tieg1 (NM_013692.1,631-649).
cagctagcatcctcaacta

SEQ ID NO: 469148 - DNA, 19 bp, Mus musculus
  siRNA target sequence for Tieg1 (NM_013692.1,642-660).
ctcaactatcaggacaatt

SEQ ID NO: 469149 - DNA, 19 bp, Mus musculus
  siRNA target sequence for Tieg1 (NM_013692.1,644-662).
caactatcaggacaattct

SEQ ID NO: 469150 - DNA, 19 bp, Mus musculus
  siRNA target sequence for Tieg1 (NM_013692.1,673-691).
gaacccacggaaatgttga

SEQ ID NO: 469151 - DNA, 19 bp, Mus musculus
  siRNA target sequence for Tieg1 (NM_013692.1,692-710).
ggctactcgaaagaacata

SEQ ID NO: 469152 - DNA, 19 bp, Mus musculus
  siRNA target sequence for Tieg1 (NM_013692.1,784-802).
gcgctgcactatatgactt

SEQ ID NO: 469153 - DNA, 19 bp, Mus musculus
  siRNA target sequence for Tieg1 (NM_013692.1,942-960).
ccccttcctgccaacaact

SEQ ID NO: 469154 - DNA, 19 bp, Mus musculus
  siRNA target sequence for Tieg1 (NM_013692.1,951-969).
gccaacaactctcttgtta

SEQ ID NO: 469155 - DNA, 19 bp, Mus musculus
  siRNA target sequence for Tieg1 (NM_013692.1,1177-1195).
gggtcactcctcagattga

SEQ ID NO: 469156 - DNA, 19 bp, Mus musculus
  siRNA target sequence for Tieg1 (NM_013692.1,1179-1197).
gtcactcctcagattgact

SEQ ID NO: 469157 - DNA, 19 bp, Mus musculus
  siRNA target sequence for Tieg1 (NM_013692.1,1196-1214).
ctcgtccagagtaagaagt

SEQ ID NO: 469158 - DNA, 19 bp, Mus musculus
  siRNA target sequence for Tieg1 (NM_013692.1,1233-1251).
gggtgtggcaagacttact

SEQ ID NO: 469159 - DNA, 19 bp, Mus musculus
  siRNA target sequence for Tieg1 (NM_013692.1,1237-1255).
gtggcaagacttactttaa

SEQ ID NO: 469160 - DNA, 19 bp, Mus musculus
  siRNA target sequence for Tieg1 (NM_013692.1,1429-1447).
ggagcgaccatttaaccaa

SEQ ID NO: 469161 - DNA, 19 bp, Mus musculus
  siRNA target sequence for Tieg1 (NM_013692.1,1496-1514).
ggaagttagcaagttaaat

SEQ ID NO: 469162 - DNA, 19 bp, Mus musculus
  siRNA target sequence for Timeless (NM_011589.1,149-167).
gatgaactgtgaacttcta

SEQ ID NO: 469163 - DNA, 19 bp, Mus musculus
  siRNA target sequence for Timeless (NM_011589.1,228-246).
ctggagagtgtgaaggatt

SEQ ID NO: 469164 - DNA, 19 bp, Mus musculus
  siRNA target sequence for Timeless (NM_011589.1,448-466).
gtgtacggcaccattttct

SEQ ID NO: 469165 - DNA, 19 bp, Mus musculus
  siRNA target sequence for Timeless (NM_011589.1,479-497).
gtacctgcaagcctacaaa

SEQ ID NO: 469166 - DNA, 19 bp, Mus musculus
  siRNA target sequence for Timeless (NM_011589.1,539-557).
gaccttgtatgaattgcta

SEQ ID NO: 469167 - DNA, 19 bp, Mus musculus
  siRNA target sequence for Timeless (NM_011589.1,569-587).
ggaggatcggcaagaagaa

SEQ ID NO: 469168 - DNA, 19 bp, Mus musculus
  siRNA target sequence for Timeless (NM_011589.1,611-629).
ccttctgctggtcagaaat

SEQ ID NO: 469169 - DNA, 19 bp, Mus musculus
  siRNA target sequence for Timeless (NM_011589.1,656-674).
gcaggagaagagtatcgat

SEQ ID NO: 469170 - DNA, 19 bp, Mus musculus
  siRNA target sequence for Timeless (NM_011589.1,662-680).
gaagagtatcgatgatgat

SEQ ID NO: 469171 - DNA, 19 bp, Mus musculus
  siRNA target sequence for Timeless (NM_011589.1,874-892).
gcacggatgtggcagaatt

SEQ ID NO: 469172 - DNA, 19 bp, Mus musculus
  siRNA target sequence for Timeless (NM_011589.1,877-895).
cggatgtggcagaattgga

SEQ ID NO: 469173 - DNA, 19 bp, Mus musculus
  siRNA target sequence for Timeless (NM_011589.1,986-1004).
ccaggggttgaaatctatt

SEQ ID NO: 469174 - DNA, 19 bp, Mus musculus
  siRNA target sequence for Timeless (NM_011589.1,1248-1266).
cagcatgacgagacttact

SEQ ID NO: 469175 - DNA, 19 bp, Mus musculus
  siRNA target sequence for Timeless (NM_011589.1,1254-1272).
gacgagacttactacatgt

SEQ ID NO: 469176 - DNA, 19 bp, Mus musculus
  siRNA target sequence for Timeless (NM_011589.1,1273-1291).
gggcaatggctttcttcat

SEQ ID NO: 469177 - DNA, 19 bp, Mus musculus
  siRNA target sequence for Timeless (NM_011589.1,1340-1358).
cctcagtatccgtaccttt

SEQ ID NO: 469178 - DNA, 19 bp, Mus musculus
  siRNA target sequence for Timeless (NM_011589.1,1381-1399).
ccaactactacgagatgat

SEQ ID NO: 469179 - DNA, 19 bp, Mus musculus
  siRNA target sequence for Timeless (NM_011589.1,1519-1537).
gggagagcagtcgtatcat

SEQ ID NO: 469180 - DNA, 19 bp, Mus musculus
  siRNA target sequence for Timeless (NM_011589.1,1521-1539).
gagagcagtcgtatcatca

SEQ ID NO: 469181 - DNA, 19 bp, Mus musculus
  siRNA target sequence for Timeless (NM_011589.1,1523-1541).
gagcagtcgtatcatcaaa

SEQ ID NO: 469182 - DNA, 19 bp, Mus musculus
  siRNA target sequence for Timeless (NM_011589.1,1525-1543).
gcagtcgtatcatcaaaaa

SEQ ID NO: 469183 - DNA, 19 bp, Mus musculus
  siRNA target sequence for Timeless (NM_011589.1,1528-1546).
gtcgtatcatcaaaaacaa

SEQ ID NO: 469184 - DNA, 19 bp, Mus musculus
  siRNA target sequence for Timeless (NM_011589.1,1559-1577).
gatggagtaccgagaacta

SEQ ID NO: 469185 - DNA, 19 bp, Mus musculus
  siRNA target sequence for Timeless (NM_011589.1,1585-1603).
cgctctttcgaaagtttga

SEQ ID NO: 469186 - DNA, 19 bp, Mus musculus
  siRNA target sequence for Timeless (NM_011589.1,1586-1604).
gctctttcgaaagtttgat

SEQ ID NO: 469187 - DNA, 19 bp, Mus musculus
  siRNA target sequence for Timeless (NM_011589.1,1598-1616).
gtttgatgagagataccat

SEQ ID NO: 469188 - DNA, 19 bp, Mus musculus
  siRNA target sequence for Timeless (NM_011589.1,2833-2851).
gggactctgatgatgttct

SEQ ID NO: 469189 - DNA, 19 bp, Mus musculus
  siRNA target sequence for Timeless (NM_011589.1,2834-2852).
ggactctgatgatgttctt

SEQ ID NO: 469190 - DNA, 19 bp, Mus musculus
  siRNA target sequence for Timeless (NM_011589.1,2844-2862).
gatgttcttggtcaaatca

SEQ ID NO: 469191 - DNA, 19 bp, Mus musculus
  siRNA target sequence for Timeless (NM_011589.1,2847-2865).
gttcttggtcaaatcatga

SEQ ID NO: 469192 - DNA, 19 bp, Mus musculus
  siRNA target sequence for Timeless (NM_011589.1,2853-2871).
ggtcaaatcatgaagaata

SEQ ID NO: 469193 - DNA, 19 bp, Mus musculus
  siRNA target sequence for Timeless (NM_011589.1,2854-2872).
gtcaaatcatgaagaatat

SEQ ID NO: 469194 - DNA, 19 bp, Mus musculus
  siRNA target sequence for Timeless (NM_011589.1,2893-2911).
ctcgagtagtggacaaact

SEQ ID NO: 469195 - DNA, 19 bp, Mus musculus
  siRNA target sequence for Timeless (NM_011589.1,2895-2913).
cgagtagtggacaaactgt

SEQ ID NO: 469196 - DNA, 19 bp, Mus musculus
  siRNA target sequence for Timeless (NM_011589.1,2896-2914).
gagtagtggacaaactgtt

SEQ ID NO: 469197 - DNA, 19 bp, Mus musculus
  siRNA target sequence for Timeless (NM_011589.1,2932-2950).
ctgagcggaggcagctata

SEQ ID NO: 469198 - DNA, 19 bp, Mus musculus
  siRNA target sequence for Timeless (NM_011589.1,2937-2955).
cggaggcagctatacaaga

SEQ ID NO: 469199 - DNA, 19 bp, Mus musculus
  siRNA target sequence for Timeless (NM_011589.1,2938-2956).
ggaggcagctatacaagaa

SEQ ID NO: 469200 - DNA, 19 bp, Mus musculus
  siRNA target sequence for Timeless (NM_011589.1,3286-3304).
caatggagaacgaacagtt

SEQ ID NO: 469201 - DNA, 19 bp, Mus musculus
  siRNA target sequence for Timeless (NM_011589.1,3400-3418).
ggagggtggctgcttcttt

SEQ ID NO: 469202 - DNA, 19 bp, Mus musculus
  siRNA target sequence for Timeless (NM_011589.1,3692-3710).
gaagaaacggtttcagatt

SEQ ID NO: 469203 - DNA, 19 bp, Mus musculus
  siRNA target sequence for Tnfaip3 (NM_009397.2,246-264).
cttcctcaggctttgtatt

SEQ ID NO: 469204 - DNA, 19 bp, Mus musculus
  siRNA target sequence for Tnfaip3 (NM_009397.2,325-343).
ctaccaatgggatcatcta

SEQ ID NO: 469205 - DNA, 19 bp, Mus musculus
  siRNA target sequence for Tnfaip3 (NM_009397.2,328-346).
ccaatgggatcatctatca

SEQ ID NO: 469206 - DNA, 19 bp, Mus musculus
  siRNA target sequence for Tnfaip3 (NM_009397.2,333-351).
gggatcatctatcacttta

SEQ ID NO: 469207 - DNA, 19 bp, Mus musculus
  siRNA target sequence for Tnfaip3 (NM_009397.2,334-352).
ggatcatctatcactttaa

SEQ ID NO: 469208 - DNA, 19 bp, Mus musculus
  siRNA target sequence for Tnfaip3 (NM_009397.2,335-353).
gatcatctatcactttaaa

SEQ ID NO: 469209 - DNA, 19 bp, Mus musculus
  siRNA target sequence for Tnfaip3 (NM_009397.2,364-382).
gatacacgctggagatgtt

SEQ ID NO: 469210 - DNA, 19 bp, Mus musculus
  siRNA target sequence for Tnfaip3 (NM_009397.2,403-421).
cacagttccgagagatcat

SEQ ID NO: 469211 - DNA, 19 bp, Mus musculus
  siRNA target sequence for Tnfaip3 (NM_009397.2,549-567).
gcagcttgtcagtacatgt

SEQ ID NO: 469212 - DNA, 19 bp, Mus musculus
  siRNA target sequence for Tnfaip3 (NM_009397.2,626-644).
gacagacactcggaacttt

SEQ ID NO: 469213 - DNA, 19 bp, Mus musculus
  siRNA target sequence for Tnfaip3 (NM_009397.2,628-646).
cagacactcggaactttaa

SEQ ID NO: 469214 - DNA, 19 bp, Mus musculus
  siRNA target sequence for Tnfaip3 (NM_009397.2,630-648).
gacactcggaactttaaat

SEQ ID NO: 469215 - DNA, 19 bp, Mus musculus
  siRNA target sequence for Tnfaip3 (NM_009397.2,652-670).
gctggcagctggaatctct

SEQ ID NO: 469216 - DNA, 19 bp, Mus musculus
  siRNA target sequence for Tnfaip3 (NM_009397.2,733-751).
gggacaacttggtcaaaat

SEQ ID NO: 469217 - DNA, 19 bp, Mus musculus
  siRNA target sequence for Tnfaip3 (NM_009397.2,775-793).
cccgaagtggacttcagta

SEQ ID NO: 469218 - DNA, 19 bp, Mus musculus
  siRNA target sequence for Tnfaip3 (NM_009397.2,778-796).
gaagtggacttcagtacaa

SEQ ID NO: 469219 - DNA, 19 bp, Mus musculus
  siRNA target sequence for Tnfaip3 (NM_009397.2,864-882).
gacaaaatgctaagaagtt

SEQ ID NO: 469220 - DNA, 19 bp, Mus musculus
  siRNA target sequence for Tnfaip3 (NM_009397.2,943-961).
ggcctgcccaggagtgtta

SEQ ID NO: 469221 - DNA, 19 bp, Mus musculus
  siRNA target sequence for Tnfaip3 (NM_009397.2,1022-1040).
ggacagtggacctgaactt

SEQ ID NO: 469222 - DNA, 19 bp, Mus musculus
  siRNA target sequence for Tnfaip3 (NM_009397.2,1041-1059).
cgcgctgttccacttgtta

SEQ ID NO: 469223 - DNA, 19 bp, Mus musculus
  siRNA target sequence for Tnfaip3 (NM_009397.2,1042-1060).
gcgctgttccacttgttaa

SEQ ID NO: 469224 - DNA, 19 bp, Mus musculus
  siRNA target sequence for Tnfaip3 (NM_009397.2,1069-1087).
ggggtaggtttgaagactt

SEQ ID NO: 469225 - DNA, 19 bp, Mus musculus
  siRNA target sequence for Tnfaip3 (NM_009397.2,1070-1088).
gggtaggtttgaagactta

SEQ ID NO: 469226 - DNA, 19 bp, Mus musculus
  siRNA target sequence for Tnfaip3 (NM_009397.2,1189-1207).
gcacgactcacctgatcaa

SEQ ID NO: 469227 - DNA, 19 bp, Mus musculus
  siRNA target sequence for Tnfaip3 (NM_009397.2,1199-1217).
cctgatcaacgctgcaaaa

SEQ ID NO: 469228 - DNA, 19 bp, Mus musculus
  siRNA target sequence for Tnfaip3 (NM_009397.2,1200-1218).
ctgatcaacgctgcaaaat

SEQ ID NO: 469229 - DNA, 19 bp, Mus musculus
  siRNA target sequence for Tnfaip3 (NM_009397.2,1272-1290).
cttgttcagcacgaataca

SEQ ID NO: 469230 - DNA, 19 bp, Mus musculus
  siRNA target sequence for Tnfaip3 (NM_009397.2,1278-1296).
cagcacgaatacaagaaat

SEQ ID NO: 469231 - DNA, 19 bp, Mus musculus
  siRNA target sequence for Tnfaip3 (NM_009397.2,1365-1383).
cagctatcactcatggata

SEQ ID NO: 469232 - DNA, 19 bp, Mus musculus
  siRNA target sequence for Tnfaip3 (NM_009397.2,1368-1386).
ctatcactcatggatataa

SEQ ID NO: 469233 - DNA, 19 bp, Mus musculus
  siRNA target sequence for Tnfaip3 (NM_009397.2,1396-1414).
cacccaactgtcctttctt

SEQ ID NO: 469234 - DNA, 19 bp, Mus musculus
  siRNA target sequence for Tnfaip3 (NM_009397.2,1647-1665).
cctgggtgcccttttactt

SEQ ID NO: 469235 - DNA, 19 bp, Mus musculus
  siRNA target sequence for Tnfaip3 (NM_009397.2,1648-1666).
ctgggtgcccttttacttt

SEQ ID NO: 469236 - DNA, 19 bp, Mus musculus
  siRNA target sequence for Tnfaip3 (NM_009397.2,1650-1668).
gggtgcccttttactttga

SEQ ID NO: 469237 - DNA, 19 bp, Mus musculus
  siRNA target sequence for Tnfaip3 (NM_009397.2,1651-1669).
ggtgcccttttactttgaa

SEQ ID NO: 469238 - DNA, 19 bp, Mus musculus
  siRNA target sequence for Tnfaip3 (NM_009397.2,1663-1681).
ctttgaatgtgcagcataa

SEQ ID NO: 469239 - DNA, 19 bp, Mus musculus
  siRNA target sequence for Tnfaip3 (NM_009397.2,1667-1685).
gaatgtgcagcataatgga

SEQ ID NO: 469240 - DNA, 19 bp, Mus musculus
  siRNA target sequence for Tnfaip3 (NM_009397.2,1884-1902).
ccctcacaactcatccaaa

SEQ ID NO: 469241 - DNA, 19 bp, Mus musculus
  siRNA target sequence for Tnfaip3 (NM_009397.2,1888-1906).
cacaactcatccaaagtct

SEQ ID NO: 469242 - DNA, 19 bp, Mus musculus
  siRNA target sequence for Tnfaip3 (NM_009397.2,1923-1941).
caccggactggaaatgtct

SEQ ID NO: 469243 - DNA, 19 bp, Mus musculus
  siRNA target sequence for Tnfaip3 (NM_009397.2,2048-2066).
gggcttttgcactctatgt

SEQ ID NO: 469244 - DNA, 19 bp, Mus musculus
  siRNA target sequence for Tnfaip3 (NM_009397.2,2049-2067).
ggcttttgcactctatgtt

SEQ ID NO: 469245 - DNA, 19 bp, Mus musculus
  siRNA target sequence for Tnfaip3 (NM_009397.2,2050-2068).
gcttttgcactctatgttt

SEQ ID NO: 469246 - DNA, 19 bp, Mus musculus
  siRNA target sequence for Tnfaip3 (NM_009397.2,2059-2077).
ctctatgtttcatcgaata

SEQ ID NO: 469247 - DNA, 19 bp, Mus musculus
  siRNA target sequence for Tnfaip3 (NM_009397.2,2061-2079).
ctatgtttcatcgaataca

SEQ ID NO: 469248 - DNA, 19 bp, Mus musculus
  siRNA target sequence for Tnfaip3 (NM_009397.2,2180-2198).
cggaagcaccatgtttgaa

SEQ ID NO: 469249 - DNA, 19 bp, Mus musculus
  siRNA target sequence for Tnfaip3 (NM_009397.2,2199-2217).
gggtactgtcagaagtgtt

SEQ ID NO: 469250 - DNA, 19 bp, Mus musculus
  siRNA target sequence for Tnfaip3 (NM_009397.2,2200-2218).
ggtactgtcagaagtgttt

SEQ ID NO: 469251 - DNA, 19 bp, Mus musculus
  siRNA target sequence for Tnfaip3 (NM_009397.2,2534-2552).
ccagttcaagcagatgtat

SEQ ID NO: 469252 - DNA, 19 bp, Mus musculus
  siRNA target sequence for Tnp1 (NM_009407.1,14-32).
cgaccagccgcaagctaaa

SEQ ID NO: 469253 - DNA, 19 bp, Mus musculus
  siRNA target sequence for Tnp1 (NM_009407.1,18-36).
cagccgcaagctaaagact

SEQ ID NO: 469254 - DNA, 19 bp, Mus musculus
  siRNA target sequence for Tnp1 (NM_009407.1,109-127).
cggaagagcgtcctgaaaa

SEQ ID NO: 469255 - DNA, 19 bp, Mus musculus
  siRNA target sequence for Tnp1 (NM_009407.1,111-129).
gaagagcgtcctgaaaagt

SEQ ID NO: 469256 - DNA, 19 bp, Mus musculus
  siRNA target sequence for Tnp2 (NM_013694.3,294-312).
gggagctgccccaagaaca

SEQ ID NO: 469257 - DNA, 19 bp, Mus musculus
  siRNA target sequence for Tnp2 (NM_013694.3,391-409).
gctcagggcgaagatacaa

SEQ ID NO: 469258 - DNA, 19 bp, Mus musculus
  siRNA target sequence for Tnrc11 (NM_021521.1,227-245).
gatctcagagtgctattaa

SEQ ID NO: 469259 - DNA, 19 bp, Mus musculus
  siRNA target sequence for Tnrc11 (NM_021521.1,284-302).
cacacctagccaaaaaggt

SEQ ID NO: 469260 - DNA, 19 bp, Mus musculus
  siRNA target sequence for Tnrc11 (NM_021521.1,334-352).
gggtatttggccaaataca

SEQ ID NO: 469261 - DNA, 19 bp, Mus musculus
  siRNA target sequence for Tnrc11 (NM_021521.1,407-425).
cagcaatgtctgagactaa

SEQ ID NO: 469262 - DNA, 19 bp, Mus musculus
  siRNA target sequence for Tnrc11 (NM_021521.1,458-476).
ctgaatggactcaaatcat

SEQ ID NO: 469263 - DNA, 19 bp, Mus musculus
  siRNA target sequence for Tnrc11 (NM_021521.1,464-482).
ggactcaaatcatcacaaa

SEQ ID NO: 469264 - DNA, 19 bp, Mus musculus
  siRNA target sequence for Tnrc11 (NM_021521.1,545-563).
gaggctgtggttctactat

SEQ ID NO: 469265 - DNA, 19 bp, Mus musculus
  siRNA target sequence for Tnrc11 (NM_021521.1,597-615).
caggcagtgggattacaat

SEQ ID NO: 469266 - DNA, 19 bp, Mus musculus
  siRNA target sequence for Tnrc11 (NM_021521.1,616-634).
gagaagctcgccttgttca

SEQ ID NO: 469267 - DNA, 19 bp, Mus musculus
  siRNA target sequence for Tnrc11 (NM_021521.1,621-639).
gctcgccttgttcatgttt

SEQ ID NO: 469268 - DNA, 19 bp, Mus musculus
  siRNA target sequence for Tnrc11 (NM_021521.1,793-811).
cgccttgcctacttctgta

SEQ ID NO: 469269 - DNA, 19 bp, Mus musculus
  siRNA target sequence for Tnrc11 (NM_021521.1,848-866).
gccactcatctcatgtcat

SEQ ID NO: 469270 - DNA, 19 bp, Mus musculus
  siRNA target sequence for Tnrc11 (NM_021521.1,1036-1054).
ctagtttggcactactcat

SEQ ID NO: 469271 - DNA, 19 bp, Mus musculus
  siRNA target sequence for Tnrc11 (NM_021521.1,1039-1057).
gtttggcactactcattga

SEQ ID NO: 469272 - DNA, 19 bp, Mus musculus
  siRNA target sequence for Tnrc11 (NM_021521.1,1045-1063).
cactactcattgactgata

SEQ ID NO: 469273 - DNA, 19 bp, Mus musculus
  siRNA target sequence for Tnrc11 (NM_021521.1,1122-1140).
catgccagagggtaacagt

SEQ ID NO: 469274 - DNA, 19 bp, Mus musculus
  siRNA target sequence for Tnrc11 (NM_021521.1,1131-1149).
gggtaacagtgcctttact

SEQ ID NO: 469275 - DNA, 19 bp, Mus musculus
  siRNA target sequence for Tnrc11 (NM_021521.1,1150-1168).
cagcaggtccgtgcaaaat

SEQ ID NO: 469276 - DNA, 19 bp, Mus musculus
  siRNA target sequence for Tnrc11 (NM_021521.1,1152-1170).
gcaggtccgtgcaaaatta

SEQ ID NO: 469277 - DNA, 19 bp, Mus musculus
  siRNA target sequence for Tnrc11 (NM_021521.1,1155-1173).
ggtccgtgcaaaattacga

SEQ ID NO: 469278 - DNA, 19 bp, Mus musculus
  siRNA target sequence for Tnrc11 (NM_021521.1,1172-1190).
gagagatcgaacaacagat

SEQ ID NO: 469279 - DNA, 19 bp, Mus musculus
  siRNA target sequence for Tnrc11 (NM_021521.1,1267-1285).
ggacgggtgctccatactt

SEQ ID NO: 469280 - DNA, 19 bp, Mus musculus
  siRNA target sequence for Tnrc11 (NM_021521.1,1268-1286).
gacgggtgctccatacttt

SEQ ID NO: 469281 - DNA, 19 bp, Mus musculus
  siRNA target sequence for Tnrc11 (NM_021521.1,1271-1289).
gggtgctccatactttaga

SEQ ID NO: 469282 - DNA, 19 bp, Mus musculus
  siRNA target sequence for Tnrc11 (NM_021521.1,1272-1290).
ggtgctccatactttagaa

SEQ ID NO: 469283 - DNA, 19 bp, Mus musculus
  siRNA target sequence for Tnrc11 (NM_021521.1,1311-1329).
cgagcgctctgactttagt

SEQ ID NO: 469284 - DNA, 19 bp, Mus musculus
  siRNA target sequence for Tnrc11 (NM_021521.1,1312-1330).
gagcgctctgactttagta

SEQ ID NO: 469285 - DNA, 19 bp, Mus musculus
  siRNA target sequence for Tnrc11 (NM_021521.1,1339-1357).
gactccctttgtaatcgaa

SEQ ID NO: 469286 - DNA, 19 bp, Mus musculus
  siRNA target sequence for Tnrc11 (NM_021521.1,1349-1367).
gtaatcgaatctttggatt

SEQ ID NO: 469287 - DNA, 19 bp, Mus musculus
  siRNA target sequence for Tnrc11 (NM_021521.1,1376-1394).
gtaaggatggtcatgagat

SEQ ID NO: 469288 - DNA, 19 bp, Mus musculus
  siRNA target sequence for Tnrc11 (NM_021521.1,1381-1399).
gatggtcatgagatttcct

SEQ ID NO: 469289 - DNA, 19 bp, Mus musculus
  siRNA target sequence for Tnrc11 (NM_021521.1,1405-1423).
gatgatgctgtggtatcat

SEQ ID NO: 469290 - DNA, 19 bp, Mus musculus
  siRNA target sequence for Tnrc11 (NM_021521.1,1408-1426).
gatgctgtggtatcattat

SEQ ID NO: 469291 - DNA, 19 bp, Mus musculus
  siRNA target sequence for Tnrc11 (NM_021521.1,1589-1607).
ctagtgcacccattttcca

SEQ ID NO: 469292 - DNA, 19 bp, Mus musculus
  siRNA target sequence for Tnrc11 (NM_021521.1,1650-1668).
gactgatccccgaagtgaa

SEQ ID NO: 469293 - DNA, 19 bp, Mus musculus
  siRNA target sequence for Tnrc11 (NM_021521.1,1666-1684).
gaaagtgagcgagtagaat

SEQ ID NO: 469294 - DNA, 19 bp, Mus musculus
  siRNA target sequence for Tnrc11 (NM_021521.1,1670-1688).
gtgagcgagtagaattctt

SEQ ID NO: 469295 - DNA, 19 bp, Mus musculus
  siRNA target sequence for Tnrc11 (NM_021521.1,1675-1693).
cgagtagaattctttaact

SEQ ID NO: 469296 - DNA, 19 bp, Mus musculus
  siRNA target sequence for Tnrc11 (NM_021521.1,1676-1694).
gagtagaattctttaactt

SEQ ID NO: 469297 - DNA, 19 bp, Mus musculus
  siRNA target sequence for Tnrc11 (NM_021521.1,1729-1747).
gtcttctcccataatatgt

SEQ ID NO: 469298 - DNA, 19 bp, Mus musculus
  siRNA target sequence for Tnrc11 (NM_021521.1,1805-1823).
ctccctctccctttgatga

SEQ ID NO: 469299 - DNA, 19 bp, Mus musculus
  siRNA target sequence for Tnrc11 (NM_021521.1,1885-1903).
ccagggctctctgaatcta

SEQ ID NO: 469300 - DNA, 19 bp, Mus musculus
  siRNA target sequence for Tnrc11 (NM_021521.1,1886-1904).
cagggctctctgaatctat

SEQ ID NO: 469301 - DNA, 19 bp, Mus musculus
  siRNA target sequence for Tnrc11 (NM_021521.1,1945-1963).
gaaaagcctgatttctcat

SEQ ID NO: 469302 - DNA, 19 bp, Mus musculus
  siRNA target sequence for Tnrc11 (NM_021521.1,2163-2181).
gcggttggtcgtactgttt

SEQ ID NO: 469303 - DNA, 19 bp, Mus musculus
  siRNA target sequence for Tnrc11 (NM_021521.1,2210-2228).
gccatgccatcaagaagat

SEQ ID NO: 469304 - DNA, 19 bp, Mus musculus
  siRNA target sequence for Tnrc11 (NM_021521.1,2212-2230).
catgccatcaagaagatta

SEQ ID NO: 469305 - DNA, 19 bp, Mus musculus
  siRNA target sequence for Tnrc11 (NM_021521.1,2535-2553).
cttcgacctcatggaatat

SEQ ID NO: 469306 - DNA, 19 bp, Mus musculus
  siRNA target sequence for Tnrc11 (NM_021521.1,2619-2637).
ggcggagctccttctcaaa

SEQ ID NO: 469307 - DNA, 19 bp, Mus musculus
  siRNA target sequence for Tnrc11 (NM_021521.1,2620-2638).
gcggagctccttctcaaat

SEQ ID NO: 469308 - DNA, 19 bp, Mus musculus
  siRNA target sequence for Tnrc11 (NM_021521.1,2623-2641).
gagctccttctcaaatcgt

SEQ ID NO: 469309 - DNA, 19 bp, Mus musculus
  siRNA target sequence for Tnrc11 (NM_021521.1,2688-2706).
ggctgtccttcgacactat

SEQ ID NO: 469310 - DNA, 19 bp, Mus musculus
  siRNA target sequence for Tnrc11 (NM_021521.1,2690-2708).
ctgtccttcgacactatca

SEQ ID NO: 469311 - DNA, 19 bp, Mus musculus
  siRNA target sequence for Tnrc11 (NM_021521.1,2711-2729).
cctgcctcatcctcaatca

SEQ ID NO: 469312 - DNA, 19 bp, Mus musculus
  siRNA target sequence for Tnrc11 (NM_021521.1,2733-2751).
ccagatggcgcaagtgttt

SEQ ID NO: 469313 - DNA, 19 bp, Mus musculus
  siRNA target sequence for Tnrc11 (NM_021521.1,2765-2783).
gcgtggtgaaacatggaat

SEQ ID NO: 469314 - DNA, 19 bp, Mus musculus
  siRNA target sequence for Tnrc11 (NM_021521.1,2816-2834).
gtatccttgcttatctcta

SEQ ID NO: 469315 - DNA, 19 bp, Mus musculus
  siRNA target sequence for Tnrc11 (NM_021521.1,2931-2949).
ggagccatcggaatccaat

SEQ ID NO: 469316 - DNA, 19 bp, Mus musculus
  siRNA target sequence for Tnrc11 (NM_021521.1,2932-2950).
gagccatcggaatccaata

SEQ ID NO: 469317 - DNA, 19 bp, Mus musculus
  siRNA target sequence for Tnrc11 (NM_021521.1,2954-2972).
gctgggcaccggagttcat

SEQ ID NO: 469318 - DNA, 19 bp, Mus musculus
  siRNA target sequence for Tnrc11 (NM_021521.1,2957-2975).
gggcaccggagttcatgat

SEQ ID NO: 469319 - DNA, 19 bp, Mus musculus
  siRNA target sequence for Tnrc11 (NM_021521.1,2958-2976).
ggcaccggagttcatgatt

SEQ ID NO: 469320 - DNA, 19 bp, Mus musculus
  siRNA target sequence for Tnrc11 (NM_021521.1,2962-2980).
ccggagttcatgattgaca

SEQ ID NO: 469321 - DNA, 19 bp, Mus musculus
  siRNA target sequence for Tnrc11 (NM_021521.1,3019-3037).
gggctcggcaagagtctta

SEQ ID NO: 469322 - DNA, 19 bp, Mus musculus
  siRNA target sequence for Tnrc11 (NM_021521.1,3021-3039).
gctcggcaagagtcttagt

SEQ ID NO: 469323 - DNA, 19 bp, Mus musculus
  siRNA target sequence for Tnrc11 (NM_021521.1,3046-3064).
cctgctaaccgctatagct

SEQ ID NO: 469324 - DNA, 19 bp, Mus musculus
  siRNA target sequence for Tnrc11 (NM_021521.1,3047-3065).
ctgctaaccgctatagctt

SEQ ID NO: 469325 - DNA, 19 bp, Mus musculus
  siRNA target sequence for Tnrc11 (NM_021521.1,3109-3127).
cctgatagggtaaatgaca

SEQ ID NO: 469326 - DNA, 19 bp, Mus musculus
  siRNA target sequence for Tnrc11 (NM_021521.1,3145-3163).
gagctgaccggctattgca

SEQ ID NO: 469327 - DNA, 19 bp, Mus musculus
  siRNA target sequence for Tnrc11 (NM_021521.1,3178-3196).
gagtggctaggagtactta

SEQ ID NO: 469328 - DNA, 19 bp, Mus musculus
  siRNA target sequence for Tnrc11 (NM_021521.1,3204-3222).
gtgctgctcctcgaacaat

SEQ ID NO: 469329 - DNA, 19 bp, Mus musculus
  siRNA target sequence for Tnrc11 (NM_021521.1,3225-3243).
cacttgtggtttcaatgat

SEQ ID NO: 469330 - DNA, 19 bp, Mus musculus
  siRNA target sequence for Tnrc11 (NM_021521.1,3259-3277).
gacgtcagtgatttgtctt

SEQ ID NO: 469331 - DNA, 19 bp, Mus musculus
  siRNA target sequence for Tnrc11 (NM_021521.1,3309-3327).
cctcatcgcccgtcaatgt

SEQ ID NO: 469332 - DNA, 19 bp, Mus musculus
  siRNA target sequence for Tnrc11 (NM_021521.1,3310-3328).
ctcatcgcccgtcaatgtt

SEQ ID NO: 469333 - DNA, 19 bp, Mus musculus
  siRNA target sequence for Tnrc11 (NM_021521.1,3372-3390).
cctcaatgctgcttgtagt

SEQ ID NO: 469334 - DNA, 19 bp, Mus musculus
  siRNA target sequence for Tnrc11 (NM_021521.1,3406-3424).
ccaggagccaggcttactt

SEQ ID NO: 469335 - DNA, 19 bp, Mus musculus
  siRNA target sequence for Tnrc11 (NM_021521.1,3433-3451).
ctcctccacctgttcaaga

SEQ ID NO: 469336 - DNA, 19 bp, Mus musculus
  siRNA target sequence for Tnrc11 (NM_021521.1,3447-3465).
caagacgccacaactcaat

SEQ ID NO: 469337 - DNA, 19 bp, Mus musculus
  siRNA target sequence for Tnrc11 (NM_021521.1,3597-3615).
cggagatgcggagctaaaa

SEQ ID NO: 469338 - DNA, 19 bp, Mus musculus
  siRNA target sequence for Tnrc11 (NM_021521.1,3601-3619).
gatgcggagctaaaaggtt

SEQ ID NO: 469339 - DNA, 19 bp, Mus musculus
  siRNA target sequence for Tnrc11 (NM_021521.1,3784-3802).
ggagaacgttgccttaagt

SEQ ID NO: 469340 - DNA, 19 bp, Mus musculus
  siRNA target sequence for Tnrc11 (NM_021521.1,3809-3827).
gtgaggatagcaatgatct

SEQ ID NO: 469341 - DNA, 19 bp, Mus musculus
  siRNA target sequence for Tnrc11 (NM_021521.1,3813-3831).
ggatagcaatgatctacaa

SEQ ID NO: 469342 - DNA, 19 bp, Mus musculus
  siRNA target sequence for Tnrc11 (NM_021521.1,3859-3877).
cagcgcctcatgcaactta

SEQ ID NO: 469343 - DNA, 19 bp, Mus musculus
  siRNA target sequence for Tnrc11 (NM_021521.1,3862-3880).
cgcctcatgcaacttatct

SEQ ID NO: 469344 - DNA, 19 bp, Mus musculus
  siRNA target sequence for Tnrc11 (NM_021521.1,3924-3942).
ccagcggcagcgcattaaa

SEQ ID NO: 469345 - DNA, 19 bp, Mus musculus
  siRNA target sequence for Tnrc11 (NM_021521.1,3927-3945).
gcggcagcgcattaaacgt

SEQ ID NO: 469346 - DNA, 19 bp, Mus musculus
  siRNA target sequence for Tnrc11 (NM_021521.1,3928-3946).
cggcagcgcattaaacgta

SEQ ID NO: 469347 - DNA, 19 bp, Mus musculus
  siRNA target sequence for Tnrc11 (NM_021521.1,3929-3947).
ggcagcgcattaaacgtat

SEQ ID NO: 469348 - DNA, 19 bp, Mus musculus
  siRNA target sequence for Tnrc11 (NM_021521.1,3930-3948).
gcagcgcattaaacgtatt

SEQ ID NO: 469349 - DNA, 19 bp, Mus musculus
  siRNA target sequence for Tnrc11 (NM_021521.1,3934-3952).
cgcattaaacgtattctca

SEQ ID NO: 469350 - DNA, 19 bp, Mus musculus
  siRNA target sequence for Tnrc11 (NM_021521.1,3935-3953).
gcattaaacgtattctcaa

SEQ ID NO: 469351 - DNA, 19 bp, Mus musculus
  siRNA target sequence for Tnrc11 (NM_021521.1,4061-4079).
ccacaatcgaggttttcca

SEQ ID NO: 469352 - DNA, 19 bp, Mus musculus
  siRNA target sequence for Tnrc11 (NM_021521.1,4062-4080).
cacaatcgaggttttccaa

SEQ ID NO: 469353 - DNA, 19 bp, Mus musculus
  siRNA target sequence for Tnrc11 (NM_021521.1,4087-4105).
gcagagacggggtcatctt

SEQ ID NO: 469354 - DNA, 19 bp, Mus musculus
  siRNA target sequence for Tnrc11 (NM_021521.1,4224-4242).
ccagggccatgtattaaaa

SEQ ID NO: 469355 - DNA, 19 bp, Mus musculus
  siRNA target sequence for Tnrc11 (NM_021521.1,4227-4245).
gggccatgtattaaaagct

SEQ ID NO: 469356 - DNA, 19 bp, Mus musculus
  siRNA target sequence for Tnrc11 (NM_021521.1,4421-4439).
gccaggtgcaccagattgt

SEQ ID NO: 469357 - DNA, 19 bp, Mus musculus
  siRNA target sequence for Tnrc11 (NM_021521.1,4426-4444).
gtgcaccagattgtgatta

SEQ ID NO: 469358 - DNA, 19 bp, Mus musculus
  siRNA target sequence for Tnrc11 (NM_021521.1,4429-4447).
caccagattgtgattaatt

SEQ ID NO: 469359 - DNA, 19 bp, Mus musculus
  siRNA target sequence for Tnrc11 (NM_021521.1,4449-4467).
gcgagaaaaccagtactta

SEQ ID NO: 469360 - DNA, 19 bp, Mus musculus
  siRNA target sequence for Tnrc11 (NM_021521.1,4461-4479).
gtacttagatgattgcaaa

SEQ ID NO: 469361 - DNA, 19 bp, Mus musculus
  siRNA target sequence for Tnrc11 (NM_021521.1,4475-4493).
gcaaaccaaagcagctaat

SEQ ID NO: 469362 - DNA, 19 bp, Mus musculus
  siRNA target sequence for Tnrc11 (NM_021521.1,4617-4635).
ggacatgcagtctaacaat

SEQ ID NO: 469363 - DNA, 19 bp, Mus musculus
  siRNA target sequence for Tnrc11 (NM_021521.1,4728-4746).
ggaaaacaagcgtgcatat

SEQ ID NO: 469364 - DNA, 19 bp, Mus musculus
  siRNA target sequence for Tnrc11 (NM_021521.1,4729-4747).
gaaaacaagcgtgcatata

SEQ ID NO: 469365 - DNA, 19 bp, Mus musculus
  siRNA target sequence for Tnrc11 (NM_021521.1,4836-4854).
gcagaaccgagatgtcata

SEQ ID NO: 469366 - DNA, 19 bp, Mus musculus
  siRNA target sequence for Tnrc11 (NM_021521.1,4837-4855).
cagaaccgagatgtcataa

SEQ ID NO: 469367 - DNA, 19 bp, Mus musculus
  siRNA target sequence for Tnrc11 (NM_021521.1,4863-4881).
gccacagggctcccttatt

SEQ ID NO: 469368 - DNA, 19 bp, Mus musculus
  siRNA target sequence for Tnrc11 (NM_021521.1,4865-4883).
cacagggctcccttattga

SEQ ID NO: 469369 - DNA, 19 bp, Mus musculus
  siRNA target sequence for Tnrc11 (NM_021521.1,4906-4924).
ggcttcgattccatcttca

SEQ ID NO: 469370 - DNA, 19 bp, Mus musculus
  siRNA target sequence for Tnrc11 (NM_021521.1,4907-4925).
gcttcgattccatcttcaa

SEQ ID NO: 469371 - DNA, 19 bp, Mus musculus
  siRNA target sequence for Tnrc11 (NM_021521.1,4930-4948).
gagggtctacaagtttcta

SEQ ID NO: 469372 - DNA, 19 bp, Mus musculus
  siRNA target sequence for Tnrc11 (NM_021521.1,4942-4960).
gtttctaccaaacaaaaga

SEQ ID NO: 469373 - DNA, 19 bp, Mus musculus
  siRNA target sequence for Tnrc11 (NM_021521.1,5073-5091).
gcggctgttgctctatcat

SEQ ID NO: 469374 - DNA, 19 bp, Mus musculus
  siRNA target sequence for Tnrc11 (NM_021521.1,5074-5092).
cggctgttgctctatcata

SEQ ID NO: 469375 - DNA, 19 bp, Mus musculus
  siRNA target sequence for Tnrc11 (NM_021521.1,5105-5123).
ctcgacccagagcctatta

SEQ ID NO: 469376 - DNA, 19 bp, Mus musculus
  siRNA target sequence for Tnrc11 (NM_021521.1,5243-5261).
gcactgaggagcgcaaaaa

SEQ ID NO: 469377 - DNA, 19 bp, Mus musculus
  siRNA target sequence for Tnrc11 (NM_021521.1,5248-5266).
gaggagcgcaaaaagaagt

SEQ ID NO: 469378 - DNA, 19 bp, Mus musculus
  siRNA target sequence for Tnrc11 (NM_021521.1,5367-5385).
ccttctacaccatgcaaat

SEQ ID NO: 469379 - DNA, 19 bp, Mus musculus
  siRNA target sequence for Tnrc11 (NM_021521.1,5393-5411).
ctatatcccaccttagcta

SEQ ID NO: 469380 - DNA, 19 bp, Mus musculus
  siRNA target sequence for Tnrc11 (NM_021521.1,5429-5447).
gcctgtatacccaaaacca

SEQ ID NO: 469381 - DNA, 19 bp, Mus musculus
  siRNA target sequence for Tnrc11 (NM_021521.1,5490-5508).
cgtgcgattaccaatgcaa

SEQ ID NO: 469382 - DNA, 19 bp, Mus musculus
  siRNA target sequence for Tnrc11 (NM_021521.1,5491-5509).
gtgcgattaccaatgcaaa

SEQ ID NO: 469383 - DNA, 19 bp, Mus musculus
  siRNA target sequence for Tnrc11 (NM_021521.1,5514-5532).
gccaactcgaccaacttat

SEQ ID NO: 469384 - DNA, 19 bp, Mus musculus
  siRNA target sequence for Tnrc11 (NM_021521.1,5539-5557).
gtgctgcctacaactatgt

SEQ ID NO: 469385 - DNA, 19 bp, Mus musculus
  siRNA target sequence for Tnrc11 (NM_021521.1,5571-5589).
cctagaaccctcttcttat

SEQ ID NO: 469386 - DNA, 19 bp, Mus musculus
  siRNA target sequence for Tnrc11 (NM_021521.1,5585-5603).
cttataagacatctgtata

SEQ ID NO: 469387 - DNA, 19 bp, Mus musculus
  siRNA target sequence for Tnrc11 (NM_021521.1,5704-5722).
cctagttcttcctatggtt

SEQ ID NO: 469388 - DNA, 19 bp, Mus musculus
  siRNA target sequence for Tnrc11 (NM_021521.1,5705-5723).
ctagttcttcctatggttt

SEQ ID NO: 469389 - DNA, 19 bp, Mus musculus
  siRNA target sequence for Tnrc11 (NM_021521.1,5754-5772).
ccagggctatacatcctat

SEQ ID NO: 469390 - DNA, 19 bp, Mus musculus
  siRNA target sequence for Tnrc11 (NM_021521.1,5758-5776).
ggctatacatcctatgttt

SEQ ID NO: 469391 - DNA, 19 bp, Mus musculus
  siRNA target sequence for Tnrc11 (NM_021521.1,5891-5909).
ccactcaaaggttttcaca

SEQ ID NO: 469392 - DNA, 19 bp, Mus musculus
  siRNA target sequence for Tnrc11 (NM_021521.1,5973-5991).
ggcaggcgtccgttcaact

SEQ ID NO: 469393 - DNA, 19 bp, Mus musculus
  siRNA target sequence for Tnrc11 (NM_021521.1,5974-5992).
gcaggcgtccgttcaactt

SEQ ID NO: 469394 - DNA, 19 bp, Mus musculus
  siRNA target sequence for Tnrc11 (NM_021521.1,6387-6405).
cagcaccaacatatttgga

SEQ ID NO: 469395 - DNA, 19 bp, Mus musculus
  siRNA target sequence for Top1 (NM_009408.1,10-28).
gaccatctccacaacgatt

SEQ ID NO: 469396 - DNA, 19 bp, Mus musculus
  siRNA target sequence for Top1 (NM_009408.1,41-59).
cggatttccgattgaatga

SEQ ID NO: 469397 - DNA, 19 bp, Mus musculus
  siRNA target sequence for Top1 (NM_009408.1,42-60).
ggatttccgattgaatgat

SEQ ID NO: 469398 - DNA, 19 bp, Mus musculus
  siRNA target sequence for Top1 (NM_009408.1,43-61).
gatttccgattgaatgatt

SEQ ID NO: 469399 - DNA, 19 bp, Mus musculus
  siRNA target sequence for Top1 (NM_009408.1,92-110).
gagaacaccggcataagga

SEQ ID NO: 469400 - DNA, 19 bp, Mus musculus
  siRNA target sequence for Top1 (NM_009408.1,112-130).
cacaagaaggataaggata

SEQ ID NO: 469401 - DNA, 19 bp, Mus musculus
  siRNA target sequence for Top1 (NM_009408.1,135-153).
ccgggaaaagtctaagcat

SEQ ID NO: 469402 - DNA, 19 bp, Mus musculus
  siRNA target sequence for Top1 (NM_009408.1,136-154).
cgggaaaagtctaagcata

SEQ ID NO: 469403 - DNA, 19 bp, Mus musculus
  siRNA target sequence for Top1 (NM_009408.1,220-238).
ggcagctcagaaaaacata

SEQ ID NO: 469404 - DNA, 19 bp, Mus musculus
  siRNA target sequence for Top1 (NM_009408.1,336-354).
ctctagtccgccacgaatt

SEQ ID NO: 469405 - DNA, 19 bp, Mus musculus
  siRNA target sequence for Top1 (NM_009408.1,338-356).
ctagtccgccacgaattaa

SEQ ID NO: 469406 - DNA, 19 bp, Mus musculus
  siRNA target sequence for Top1 (NM_009408.1,341-359).
gtccgccacgaattaaaga

SEQ ID NO: 469407 - DNA, 19 bp, Mus musculus
  siRNA target sequence for Top1 (NM_009408.1,344-362).
cgccacgaattaaagatga

SEQ ID NO: 469408 - DNA, 19 bp, Mus musculus
  siRNA target sequence for Top1 (NM_009408.1,436-454).
gatgctgattataaaccta

SEQ ID NO: 469409 - DNA, 19 bp, Mus musculus
  siRNA target sequence for Top1 (NM_009408.1,617-635).
ggtgggaagaagaacgtta

SEQ ID NO: 469410 - DNA, 19 bp, Mus musculus
  siRNA target sequence for Top1 (NM_009408.1,653-671).
ggaaattcctagagcataa

SEQ ID NO: 469411 - DNA, 19 bp, Mus musculus
  siRNA target sequence for Top1 (NM_009408.1,706-724).
ccagagagtgtcaagtttt

SEQ ID NO: 469412 - DNA, 19 bp, Mus musculus
  siRNA target sequence for Top1 (NM_009408.1,709-727).
gagagtgtcaagttttact

SEQ ID NO: 469413 - DNA, 19 bp, Mus musculus
  siRNA target sequence for Top1 (NM_009408.1,744-762).
gaagctgagtcctaaagca

SEQ ID NO: 469414 - DNA, 19 bp, Mus musculus
  siRNA target sequence for Top1 (NM_009408.1,792-810).
gcttgaccacgaatatact

SEQ ID NO: 469415 - DNA, 19 bp, Mus musculus
  siRNA target sequence for Top1 (NM_009408.1,796-814).
gaccacgaatatactacta

SEQ ID NO: 469416 - DNA, 19 bp, Mus musculus
  siRNA target sequence for Top1 (NM_009408.1,801-819).
cgaatatactactaaggaa

SEQ ID NO: 469417 - DNA, 19 bp, Mus musculus
  siRNA target sequence for Top1 (NM_009408.1,802-820).
gaatatactactaaggaaa

SEQ ID NO: 469418 - DNA, 19 bp, Mus musculus
  siRNA target sequence for Top1 (NM_009408.1,881-899).
cgattaccaacctaagcaa

SEQ ID NO: 469419 - DNA, 19 bp, Mus musculus
  siRNA target sequence for Top1 (NM_009408.1,882-900).
gattaccaacctaagcaaa

SEQ ID NO: 469420 - DNA, 19 bp, Mus musculus
  siRNA target sequence for Top1 (NM_009408.1,892-910).
ctaagcaaatgcgacttta

SEQ ID NO: 469421 - DNA, 19 bp, Mus musculus
  siRNA target sequence for Top1 (NM_009408.1,896-914).
gcaaatgcgactttacaca

SEQ ID NO: 469422 - DNA, 19 bp, Mus musculus
  siRNA target sequence for Top1 (NM_009408.1,1048-1066).
cggattgccaacttcaaga

SEQ ID NO: 469423 - DNA, 19 bp, Mus musculus
  siRNA target sequence for Top1 (NM_009408.1,1050-1068).
gattgccaacttcaagata

SEQ ID NO: 469424 - DNA, 19 bp, Mus musculus
  siRNA target sequence for Top1 (NM_009408.1,1216-1234).
cgacatgataacaaggtta

SEQ ID NO: 469425 - DNA, 19 bp, Mus musculus
  siRNA target sequence for Top1 (NM_009408.1,1243-1261).
gtctcctggacagagaata

SEQ ID NO: 469426 - DNA, 19 bp, Mus musculus
  siRNA target sequence for Top1 (NM_009408.1,1264-1282).
caaggttctatcaaatata

SEQ ID NO: 469427 - DNA, 19 bp, Mus musculus
  siRNA target sequence for Top1 (NM_009408.1,1366-1384).
gacaagatccgaaatcagt

SEQ ID NO: 469428 - DNA, 19 bp, Mus musculus
  siRNA target sequence for Top1 (NM_009408.1,1368-1386).
caagatccgaaatcagtat

SEQ ID NO: 469429 - DNA, 19 bp, Mus musculus
  siRNA target sequence for Top1 (NM_009408.1,1429-1447).
gctgtagcactgtacttca

SEQ ID NO: 469430 - DNA, 19 bp, Mus musculus
  siRNA target sequence for Top1 (NM_009408.1,1430-1448).
ctgtagcactgtacttcat

SEQ ID NO: 469431 - DNA, 19 bp, Mus musculus
  siRNA target sequence for Top1 (NM_009408.1,1435-1453).
gcactgtacttcattgata

SEQ ID NO: 469432 - DNA, 19 bp, Mus musculus
  siRNA target sequence for Top1 (NM_009408.1,1436-1454).
cactgtacttcattgataa

SEQ ID NO: 469433 - DNA, 19 bp, Mus musculus
  siRNA target sequence for Top1 (NM_009408.1,1520-1538).
cacttagagtggaacacat

SEQ ID NO: 469434 - DNA, 19 bp, Mus musculus
  siRNA target sequence for Top1 (NM_009408.1,1599-1617).
ggactcaatcagatactat

SEQ ID NO: 469435 - DNA, 19 bp, Mus musculus
  siRNA target sequence for Top1 (NM_009408.1,1628-1646).
cagttgagaaacgagtttt

SEQ ID NO: 469436 - DNA, 19 bp, Mus musculus
  siRNA target sequence for Top1 (NM_009408.1,1630-1648).
gttgagaaacgagttttta

SEQ ID NO: 469437 - DNA, 19 bp, Mus musculus
  siRNA target sequence for Top1 (NM_009408.1,1693-1711).
ctttttgatcgacttaata

SEQ ID NO: 469438 - DNA, 19 bp, Mus musculus
  siRNA target sequence for Top1 (NM_009408.1,1703-1721).
gacttaatactggtattct

SEQ ID NO: 469439 - DNA, 19 bp, Mus musculus
  siRNA target sequence for Top1 (NM_009408.1,1705-1723).
cttaatactggtattctaa

SEQ ID NO: 469440 - DNA, 19 bp, Mus musculus
  siRNA target sequence for Top1 (NM_009408.1,1712-1730).
ctggtattctaaataaaca

SEQ ID NO: 469441 - DNA, 19 bp, Mus musculus
  siRNA target sequence for Top1 (NM_009408.1,1833-1851).
gaatgtaccagcgaagatt

SEQ ID NO: 469442 - DNA, 19 bp, Mus musculus
  siRNA target sequence for Top1 (NM_009408.1,1837-1855).
gtaccagcgaagattctat

SEQ ID NO: 469443 - DNA, 19 bp, Mus musculus
  siRNA target sequence for Top1 (NM_009408.1,1841-1859).
cagcgaagattctatctta

SEQ ID NO: 469444 - DNA, 19 bp, Mus musculus
  siRNA target sequence for Top1 (NM_009408.1,1843-1861).
gcgaagattctatcttata

SEQ ID NO: 469445 - DNA, 19 bp, Mus musculus
  siRNA target sequence for Top1 (NM_009408.1,1869-1887).
caatcgagctgttgcaatt

SEQ ID NO: 469446 - DNA, 19 bp, Mus musculus
  siRNA target sequence for Top1 (NM_009408.1,1924-1942).
gagaagtcaatgatgaact

SEQ ID NO: 469447 - DNA, 19 bp, Mus musculus
  siRNA target sequence for Top1 (NM_009408.1,1941-1959).
cttgcagtctaagattgat

SEQ ID NO: 469448 - DNA, 19 bp, Mus musculus
  siRNA target sequence for Top1 (NM_009408.1,1953-1971).
gattgatgccaagaaagat

SEQ ID NO: 469449 - DNA, 19 bp, Mus musculus
  siRNA target sequence for Top1 (NM_009408.1,2097-2115).
gatgaagctggaagttcaa

SEQ ID NO: 469450 - DNA, 19 bp, Mus musculus
  siRNA target sequence for Top1 (NM_009408.1,2125-2143).
cgagaggagaacaaacaaa

SEQ ID NO: 469451 - DNA, 19 bp, Mus musculus
  siRNA target sequence for Top1 (NM_009408.1,2153-2171).
ggacctccaaactcaatta

SEQ ID NO: 469452 - DNA, 19 bp, Mus musculus
  siRNA target sequence for Top1 (NM_009408.1,2154-2172).
gacctccaaactcaattat

SEQ ID NO: 469453 - DNA, 19 bp, Mus musculus
  siRNA target sequence for Top1 (NM_009408.1,2191-2209).
gtggcttggtgcaaaaagt

SEQ ID NO: 469454 - DNA, 19 bp, Mus musculus
  siRNA target sequence for Top1 (NM_009408.1,2210-2228).
ggggggtcccaattgagaa

SEQ ID NO: 469455 - DNA, 19 bp, Mus musculus
  siRNA target sequence for Top1 (NM_009408.1,2245-2263).
cagagggagaagtttgctt

SEQ ID NO: 469456 - DNA, 19 bp, Mus musculus
  siRNA target sequence for Top2a (NM_011623.1,63-81).
cgctgcagcctgtaaatga

SEQ ID NO: 469457 - DNA, 19 bp, Mus musculus
  siRNA target sequence for Top2a (NM_011623.1,64-82).
gctgcagcctgtaaatgaa

SEQ ID NO: 469458 - DNA, 19 bp, Mus musculus
  siRNA target sequence for Top2a (NM_011623.1,132-150).
ctattgaaagaatctatca

SEQ ID NO: 469459 - DNA, 19 bp, Mus musculus
  siRNA target sequence for Top2a (NM_011623.1,159-177).
cacaactggaacatatact

SEQ ID NO: 469460 - DNA, 19 bp, Mus musculus
  siRNA target sequence for Top2a (NM_011623.1,223-241).
gcaaatgtgggtttacgat

SEQ ID NO: 469461 - DNA, 19 bp, Mus musculus
  siRNA target sequence for Top2a (NM_011623.1,242-260).
gaagatgttggcattaact

SEQ ID NO: 469462 - DNA, 19 bp, Mus musculus
  siRNA target sequence for Top2a (NM_011623.1,245-263).
gatgttggcattaactaca

SEQ ID NO: 469463 - DNA, 19 bp, Mus musculus
  siRNA target sequence for Top2a (NM_011623.1,259-277).
ctacagggaagtcactttt

SEQ ID NO: 469464 - DNA, 19 bp, Mus musculus
  siRNA target sequence for Top2a (NM_011623.1,281-299).
cctggtttgtataaaatct

SEQ ID NO: 469465 - DNA, 19 bp, Mus musculus
  siRNA target sequence for Top2a (NM_011623.1,282-300).
ctggtttgtataaaatctt

SEQ ID NO: 469466 - DNA, 19 bp, Mus musculus
  siRNA target sequence for Top2a (NM_011623.1,298-316).
ctttgatgagattctagtt

SEQ ID NO: 469467 - DNA, 19 bp, Mus musculus
  siRNA target sequence for Top2a (NM_011623.1,354-372).
cttgtattagagtcacaat

SEQ ID NO: 469468 - DNA, 19 bp, Mus musculus
  siRNA target sequence for Top2a (NM_011623.1,542-560).
ggagctaaactgtgtaaca

SEQ ID NO: 469469 - DNA, 19 bp, Mus musculus
  siRNA target sequence for Top2a (NM_011623.1,559-577).
catattcagcaccaaattt

SEQ ID NO: 469470 - DNA, 19 bp, Mus musculus
  siRNA target sequence for Top2a (NM_011623.1,620-638).
cagacgtggatggataaca

SEQ ID NO: 469471 - DNA, 19 bp, Mus musculus
  siRNA target sequence for Top2a (NM_011623.1,668-686).
ccctttagtggagaagatt

SEQ ID NO: 469472 - DNA, 19 bp, Mus musculus
  siRNA target sequence for Top2a (NM_011623.1,669-687).
cctttagtggagaagatta

SEQ ID NO: 469473 - DNA, 19 bp, Mus musculus
  siRNA target sequence for Top2a (NM_011623.1,735-753).
gcctggacaaagatattgt

SEQ ID NO: 469474 - DNA, 19 bp, Mus musculus
  siRNA target sequence for Top2a (NM_011623.1,736-754).
cctggacaaagatattgtt

SEQ ID NO: 469475 - DNA, 19 bp, Mus musculus
  siRNA target sequence for Top2a (NM_011623.1,760-778).
gatggtcagaagagcatat

SEQ ID NO: 469476 - DNA, 19 bp, Mus musculus
  siRNA target sequence for Top2a (NM_011623.1,792-810).
ccactaaagatgtcaaagt

SEQ ID NO: 469477 - DNA, 19 bp, Mus musculus
  siRNA target sequence for Top2a (NM_011623.1,800-818).
gatgtcaaagtctttctta

SEQ ID NO: 469478 - DNA, 19 bp, Mus musculus
  siRNA target sequence for Top2a (NM_011623.1,848-866).
cgcagttacgtggatttgt

SEQ ID NO: 469479 - DNA, 19 bp, Mus musculus
  siRNA target sequence for Top2a (NM_011623.1,849-867).
gcagttacgtggatttgta

SEQ ID NO: 469480 - DNA, 19 bp, Mus musculus
  siRNA target sequence for Top2a (NM_011623.1,850-868).
cagttacgtggatttgtat

SEQ ID NO: 469481 - DNA, 19 bp, Mus musculus
  siRNA target sequence for Top2a (NM_011623.1,852-870).
gttacgtggatttgtattt

SEQ ID NO: 469482 - DNA, 19 bp, Mus musculus
  siRNA target sequence for Top2a (NM_011623.1,1055-1073).
ctcgttgatgtggtgaaaa

SEQ ID NO: 469483 - DNA, 19 bp, Mus musculus
  siRNA target sequence for Top2a (NM_011623.1,1104-1122).
ctcatcaggtgaaaaatca

SEQ ID NO: 469484 - DNA, 19 bp, Mus musculus
  siRNA target sequence for Top2a (NM_011623.1,1201-1219).
caagagctttggatcaaca

SEQ ID NO: 469485 - DNA, 19 bp, Mus musculus
  siRNA target sequence for Top2a (NM_011623.1,1204-1222).
gagctttggatcaacatgt

SEQ ID NO: 469486 - DNA, 19 bp, Mus musculus
  siRNA target sequence for Top2a (NM_011623.1,1211-1229).
ggatcaacatgtcaattaa

SEQ ID NO: 469487 - DNA, 19 bp, Mus musculus
  siRNA target sequence for Top2a (NM_011623.1,1218-1236).
catgtcaattaagtgaaaa

SEQ ID NO: 469488 - DNA, 19 bp, Mus musculus
  siRNA target sequence for Top2a (NM_011623.1,1223-1241).
caattaagtgaaaagttca

SEQ ID NO: 469489 - DNA, 19 bp, Mus musculus
  siRNA target sequence for Top2a (NM_011623.1,1240-1258).
catcaaagctgcaattggt

SEQ ID NO: 469490 - DNA, 19 bp, Mus musculus
  siRNA target sequence for Top2a (NM_011623.1,1268-1286).
gtggaaagcatactaaact

SEQ ID NO: 469491 - DNA, 19 bp, Mus musculus
  siRNA target sequence for Top2a (NM_011623.1,1280-1298).
ctaaactgggtgaagttca

SEQ ID NO: 469492 - DNA, 19 bp, Mus musculus
  siRNA target sequence for Top2a (NM_011623.1,1294-1312).
gttcaaggctcaaatccaa

SEQ ID NO: 469493 - DNA, 19 bp, Mus musculus
  siRNA target sequence for Top2a (NM_011623.1,1385-1403).
gcagggagccgaaactcta

SEQ ID NO: 469494 - DNA, 19 bp, Mus musculus
  siRNA target sequence for Top2a (NM_011623.1,1390-1408).
gagccgaaactctactgaa

SEQ ID NO: 469495 - DNA, 19 bp, Mus musculus
  siRNA target sequence for Top2a (NM_011623.1,1401-1419).
ctactgaatgcacacttat

SEQ ID NO: 469496 - DNA, 19 bp, Mus musculus
  siRNA target sequence for Top2a (NM_011623.1,1429-1447).
gggagactcagcaaaaact

SEQ ID NO: 469497 - DNA, 19 bp, Mus musculus
  siRNA target sequence for Top2a (NM_011623.1,1469-1487).
gtggttggaagagacaaat

SEQ ID NO: 469498 - DNA, 19 bp, Mus musculus
  siRNA target sequence for Top2a (NM_011623.1,1500-1518).
ctcttagaggaaagatact

SEQ ID NO: 469499 - DNA, 19 bp, Mus musculus
  siRNA target sequence for Top2a (NM_011623.1,1502-1520).
cttagaggaaagatactca

SEQ ID NO: 469500 - DNA, 19 bp, Mus musculus
  siRNA target sequence for Top2a (NM_011623.1,1562-1580).
gaaattaacaatatcatca

SEQ ID NO: 469501 - DNA, 19 bp, Mus musculus
  siRNA target sequence for Top2a (NM_011623.1,1589-1607).
ggtctccagtacaagaaaa

SEQ ID NO: 469502 - DNA, 19 bp, Mus musculus
  siRNA target sequence for Top2a (NM_011623.1,1626-1644).
cattgaaaactcttcgtta

SEQ ID NO: 469503 - DNA, 19 bp, Mus musculus
  siRNA target sequence for Top2a (NM_011623.1,1637-1655).
cttcgttatgggaagatca

SEQ ID NO: 469504 - DNA, 19 bp, Mus musculus
  siRNA target sequence for Top2a (NM_011623.1,1741-1759).
gcgacatcgttttctagaa

SEQ ID NO: 469505 - DNA, 19 bp, Mus musculus
  siRNA target sequence for Top2a (NM_011623.1,1824-1842).
ccgagtttgaagaatggaa

SEQ ID NO: 469506 - DNA, 19 bp, Mus musculus
  siRNA target sequence for Top2a (NM_011623.1,1825-1843).
cgagtttgaagaatggaaa

SEQ ID NO: 469507 - DNA, 19 bp, Mus musculus
  siRNA target sequence for Top2a (NM_011623.1,1845-1863).
gttcgactccgaatcataa

SEQ ID NO: 469508 - DNA, 19 bp, Mus musculus
  siRNA target sequence for Top2a (NM_011623.1,1848-1866).
cgactccgaatcataaaaa

SEQ ID NO: 469509 - DNA, 19 bp, Mus musculus
  siRNA target sequence for Top2a (NM_011623.1,1944-1962).
gacatcgtattcagttcaa

SEQ ID NO: 469510 - DNA, 19 bp, Mus musculus
  siRNA target sequence for Top2a (NM_011623.1,2024-2042).
gatcgaaaggaatggttaa

SEQ ID NO: 469511 - DNA, 19 bp, Mus musculus
  siRNA target sequence for Top2a (NM_011623.1,2028-2046).
gaaaggaatggttaactaa

SEQ ID NO: 469512 - DNA, 19 bp, Mus musculus
  siRNA target sequence for Top2a (NM_011623.1,2032-2050).
ggaatggttaactaatttt

SEQ ID NO: 469513 - DNA, 19 bp, Mus musculus
  siRNA target sequence for Top2a (NM_011623.1,2033-2051).
gaatggttaactaatttta

SEQ ID NO: 469514 - DNA, 19 bp, Mus musculus
  siRNA target sequence for Top2a (NM_011623.1,2115-2133).
cttcgtacctgacctataa

SEQ ID NO: 469515 - DNA, 19 bp, Mus musculus
  siRNA target sequence for Top2a (NM_011623.1,2118-2136).
cgtacctgacctataatga

SEQ ID NO: 469516 - DNA, 19 bp, Mus musculus
  siRNA target sequence for Top2a (NM_011623.1,2125-2143).
gacctataatgacttcata

SEQ ID NO: 469517 - DNA, 19 bp, Mus musculus
  siRNA target sequence for Top2a (NM_011623.1,2127-2145).
cctataatgacttcataaa

SEQ ID NO: 469518 - DNA, 19 bp, Mus musculus
  siRNA target sequence for Top2a (NM_011623.1,2196-2214).
ccatggtagacggtttgaa

SEQ ID NO: 469519 - DNA, 19 bp, Mus musculus
  siRNA target sequence for Top2a (NM_011623.1,2299-2317).
ggcagaaatgtcctcttat

SEQ ID NO: 469520 - DNA, 19 bp, Mus musculus
  siRNA target sequence for Top2a (NM_011623.1,2325-2343).
gtgagatgtcactgatgat

SEQ ID NO: 469521 - DNA, 19 bp, Mus musculus
  siRNA target sequence for Top2a (NM_011623.1,2447-2465).
gctagtcctaggtacatct

SEQ ID NO: 469522 - DNA, 19 bp, Mus musculus
  siRNA target sequence for Top2a (NM_011623.1,2453-2471).
cctaggtacatctttacaa

SEQ ID NO: 469523 - DNA, 19 bp, Mus musculus
  siRNA target sequence for Top2a (NM_011623.1,2480-2498).
cctttggctcggttgttgt

SEQ ID NO: 469524 - DNA, 19 bp, Mus musculus
  siRNA target sequence for Top2a (NM_011623.1,2481-2499).
ctttggctcggttgttgtt

SEQ ID NO: 469525 - DNA, 19 bp, Mus musculus
  siRNA target sequence for Top2a (NM_011623.1,2505-2523).
caaaagatgatcacacatt

SEQ ID NO: 469526 - DNA, 19 bp, Mus musculus
  siRNA target sequence for Top2a (NM_011623.1,2516-2534).
cacacattacggtttctat

SEQ ID NO: 469527 - DNA, 19 bp, Mus musculus
  siRNA target sequence for Top2a (NM_011623.1,2550-2568).
gtgttgagcctgaatggta

SEQ ID NO: 469528 - DNA, 19 bp, Mus musculus
  siRNA target sequence for Top2a (NM_011623.1,2584-2602).
catggtgctgataaatggt

SEQ ID NO: 469529 - DNA, 19 bp, Mus musculus
  siRNA target sequence for Top2a (NM_011623.1,2651-2669).
gtgcgtgaagttgtgaata

SEQ ID NO: 469530 - DNA, 19 bp, Mus musculus
  siRNA target sequence for Top2a (NM_011623.1,2653-2671).
gcgtgaagttgtgaataat

SEQ ID NO: 469531 - DNA, 19 bp, Mus musculus
  siRNA target sequence for Top2a (NM_011623.1,2654-2672).
cgtgaagttgtgaataata

SEQ ID NO: 469532 - DNA, 19 bp, Mus musculus
  siRNA target sequence for Top2a (NM_011623.1,2705-2723).
cccatgctcccaagttata

SEQ ID NO: 469533 - DNA, 19 bp, Mus musculus
  siRNA target sequence for Top2a (NM_011623.1,2706-2724).
ccatgctcccaagttataa

SEQ ID NO: 469534 - DNA, 19 bp, Mus musculus
  siRNA target sequence for Top2a (NM_011623.1,2710-2728).
gctcccaagttataagaat

SEQ ID NO: 469535 - DNA, 19 bp, Mus musculus
  siRNA target sequence for Top2a (NM_011623.1,2711-2729).
ctcccaagttataagaatt

SEQ ID NO: 469536 - DNA, 19 bp, Mus musculus
  siRNA target sequence for Top2a (NM_011623.1,2747-2765).
gaactggcttcaaatcagt

SEQ ID NO: 469537 - DNA, 19 bp, Mus musculus
  siRNA target sequence for Top2a (NM_011623.1,2867-2885).
gaacccatgttgaatggaa

SEQ ID NO: 469538 - DNA, 19 bp, Mus musculus
  siRNA target sequence for Top2a (NM_011623.1,2890-2908).
gaagacaccctctctaata

SEQ ID NO: 469539 - DNA, 19 bp, Mus musculus
  siRNA target sequence for Top2a (NM_011623.1,2895-2913).
caccctctctaataacaga

SEQ ID NO: 469540 - DNA, 19 bp, Mus musculus
  siRNA target sequence for Top2a (NM_011623.1,2899-2917).
ctctctaataacagactat

SEQ ID NO: 469541 - DNA, 19 bp, Mus musculus
  siRNA target sequence for Top2a (NM_011623.1,2910-2928).
cagactatagggaatacca

SEQ ID NO: 469542 - DNA, 19 bp, Mus musculus
  siRNA target sequence for Top2a (NM_011623.1,2912-2930).
gactatagggaataccata

SEQ ID NO: 469543 - DNA, 19 bp, Mus musculus
  siRNA target sequence for Top2a (NM_011623.1,2938-2956).
cactgtgaagtttgtcata

SEQ ID NO: 469544 - DNA, 19 bp, Mus musculus
  siRNA target sequence for Top2a (NM_011623.1,2942-2960).
gtgaagtttgtcataaaga

SEQ ID NO: 469545 - DNA, 19 bp, Mus musculus
  siRNA target sequence for Top2a (NM_011623.1,2989-3007).
gagagtcggcctacacaaa

SEQ ID NO: 469546 - DNA, 19 bp, Mus musculus
  siRNA target sequence for Top2a (NM_011623.1,2991-3009).
gagtcggcctacacaaagt

SEQ ID NO: 469547 - DNA, 19 bp, Mus musculus
  siRNA target sequence for Top2a (NM_011623.1,2993-3011).
gtcggcctacacaaagtct

SEQ ID NO: 469548 - DNA, 19 bp, Mus musculus
  siRNA target sequence for Top2a (NM_011623.1,3037-3055).
caactctatggtgcttttt

SEQ ID NO: 469549 - DNA, 19 bp, Mus musculus
  siRNA target sequence for Top2a (NM_011623.1,3056-3074).
gaccatgtaggttgcttaa

SEQ ID NO: 469550 - DNA, 19 bp, Mus musculus
  siRNA target sequence for Top2a (NM_011623.1,3059-3077).
catgtaggttgcttaaaga

SEQ ID NO: 469551 - DNA, 19 bp, Mus musculus
  siRNA target sequence for Top2a (NM_011623.1,3085-3103).
cactgtgttggatattcta

SEQ ID NO: 469552 - DNA, 19 bp, Mus musculus
  siRNA target sequence for Top2a (NM_011623.1,3118-3136).
gctcaggcttaaatattat

SEQ ID NO: 469553 - DNA, 19 bp, Mus musculus
  siRNA target sequence for Top2a (NM_011623.1,3121-3139).
caggcttaaatattatgga

SEQ ID NO: 469554 - DNA, 19 bp, Mus musculus
  siRNA target sequence for Top2a (NM_011623.1,3180-3198).
cttctaaactgaataatca

SEQ ID NO: 469555 - DNA, 19 bp, Mus musculus
  siRNA target sequence for Top2a (NM_011623.1,3200-3218).
gctcgctttatattagaga

SEQ ID NO: 469556 - DNA, 19 bp, Mus musculus
  siRNA target sequence for Top2a (NM_011623.1,3201-3219).
ctcgctttatattagagaa

SEQ ID NO: 469557 - DNA, 19 bp, Mus musculus
  siRNA target sequence for Top2a (NM_011623.1,3228-3246).
gcaaaatagtcattgaaaa

SEQ ID NO: 469558 - DNA, 19 bp, Mus musculus
  siRNA target sequence for Top2a (NM_011623.1,3401-3419).
gctgggccgaccttcaact

SEQ ID NO: 469559 - DNA, 19 bp, Mus musculus
  siRNA target sequence for Top2a (NM_011623.1,3402-3420).
ctgggccgaccttcaacta

SEQ ID NO: 469560 - DNA, 19 bp, Mus musculus
  siRNA target sequence for Top2a (NM_011623.1,3497-3515).
caagagctcaacacattaa

SEQ ID NO: 469561 - DNA, 19 bp, Mus musculus
  siRNA target sequence for Top2a (NM_011623.1,3734-3752).
gcagagaagaaaattagga

SEQ ID NO: 469562 - DNA, 19 bp, Mus musculus
  siRNA target sequence for Top2a (NM_011623.1,3810-3828).
gaagcctccggcaacgaat

SEQ ID NO: 469563 - DNA, 19 bp, Mus musculus
  siRNA target sequence for Top2a (NM_011623.1,3813-3831).
gcctccggcaacgaataga

SEQ ID NO: 469564 - DNA, 19 bp, Mus musculus
  siRNA target sequence for Top2a (NM_011623.1,3878-3896).
ccgtttaagcctgtcaaaa

SEQ ID NO: 469565 - DNA, 19 bp, Mus musculus
  siRNA target sequence for Top2a (NM_011623.1,3879-3897).
cgtttaagcctgtcaaaaa

SEQ ID NO: 469566 - DNA, 19 bp, Mus musculus
  siRNA target sequence for Top2a (NM_011623.1,3931-3949).
gtcagacgtgagcagtaat

SEQ ID NO: 469567 - DNA, 19 bp, Mus musculus
  siRNA target sequence for Top2a (NM_011623.1,3933-3951).
cagacgtgagcagtaatga

SEQ ID NO: 469568 - DNA, 19 bp, Mus musculus
  siRNA target sequence for Top2a (NM_011623.1,3935-3953).
gacgtgagcagtaatgaaa

SEQ ID NO: 469569 - DNA, 19 bp, Mus musculus
  siRNA target sequence for Top2a (NM_011623.1,3937-3955).
cgtgagcagtaatgaaagt

SEQ ID NO: 469570 - DNA, 19 bp, Mus musculus
  siRNA target sequence for Top2a (NM_011623.1,4009-4027).
caaattcacagtggattta

SEQ ID NO: 469571 - DNA, 19 bp, Mus musculus
  siRNA target sequence for Top2a (NM_011623.1,4159-4177).
ctccatgtcggtagttgat

SEQ ID NO: 469572 - DNA, 19 bp, Mus musculus
  siRNA target sequence for Top2a (NM_011623.1,4161-4179).
ccatgtcggtagttgatct

SEQ ID NO: 469573 - DNA, 19 bp, Mus musculus
  siRNA target sequence for Top2a (NM_011623.1,4162-4180).
catgtcggtagttgatctt

SEQ ID NO: 469574 - DNA, 19 bp, Mus musculus
  siRNA target sequence for Top2a (NM_011623.1,4165-4183).
gtcggtagttgatcttgaa

SEQ ID NO: 469575 - DNA, 19 bp, Mus musculus
  siRNA target sequence for Top2a (NM_011623.1,4168-4186).
ggtagttgatcttgaaagt

SEQ ID NO: 469576 - DNA, 19 bp, Mus musculus
  siRNA target sequence for Top2a (NM_011623.1,4253-4271).
cagtcaaagccatccaaaa

SEQ ID NO: 469577 - DNA, 19 bp, Mus musculus
  siRNA target sequence for Top2a (NM_011623.1,4346-4364).
gcgccaaagggaaccaaat

SEQ ID NO: 469578 - DNA, 19 bp, Mus musculus
  siRNA target sequence for Top2a (NM_011623.1,4474-4492).
gagagcaatttctaaaggt

SEQ ID NO: 469579 - DNA, 19 bp, Mus musculus
  siRNA target sequence for Top2a (NM_011623.1,4580-4598).
gcgaggaagccaattaagt

SEQ ID NO: 469580 - DNA, 19 bp, Mus musculus
  siRNA target sequence for Top2a (NM_011623.1,4581-4599).
cgaggaagccaattaagta

SEQ ID NO: 469581 - DNA, 19 bp, Mus musculus
  siRNA target sequence for Top2b (NM_009409.2,517-535).
gggtgaacaatgctacaaa

SEQ ID NO: 469582 - DNA, 19 bp, Mus musculus
  siRNA target sequence for Top2b (NM_009409.2,529-547).
ctacaaaaaaggaagagtt

SEQ ID NO: 469583 - DNA, 19 bp, Mus musculus
  siRNA target sequence for Top2b (NM_009409.2,567-585).
gactctactaagaagttgt

SEQ ID NO: 469584 - DNA, 19 bp, Mus musculus
  siRNA target sequence for Top2b (NM_009409.2,639-657).
cctgatacatacattggat

SEQ ID NO: 469585 - DNA, 19 bp, Mus musculus
  siRNA target sequence for Top2b (NM_009409.2,735-753).
ccaggcttatacaagatct

SEQ ID NO: 469586 - DNA, 19 bp, Mus musculus
  siRNA target sequence for Top2b (NM_009409.2,811-829).
gtattaaggtttctattga

SEQ ID NO: 469587 - DNA, 19 bp, Mus musculus
  siRNA target sequence for Top2b (NM_009409.2,823-841).
ctattgatcctgaatctaa

SEQ ID NO: 469588 - DNA, 19 bp, Mus musculus
  siRNA target sequence for Top2b (NM_009409.2,828-846).
gatcctgaatctaatatta

SEQ ID NO: 469589 - DNA, 19 bp, Mus musculus
  siRNA target sequence for Top2b (NM_009409.2,834-852).
gaatctaatattataagca

SEQ ID NO: 469590 - DNA, 19 bp, Mus musculus
  siRNA target sequence for Top2b (NM_009409.2,871-889).
gcattccagtagtagaaca

SEQ ID NO: 469591 - DNA, 19 bp, Mus musculus
  siRNA target sequence for Top2b (NM_009409.2,877-895).
cagtagtagaacacaaagt

SEQ ID NO: 469592 - DNA, 19 bp, Mus musculus
  siRNA target sequence for Top2b (NM_009409.2,932-950).
gcttttaacatcgagtaat

SEQ ID NO: 469593 - DNA, 19 bp, Mus musculus
  siRNA target sequence for Top2b (NM_009409.2,976-994).
caggaggccgtaatggtta

SEQ ID NO: 469594 - DNA, 19 bp, Mus musculus
  siRNA target sequence for Top2b (NM_009409.2,996-1014).
ggtgcaaagctttgtaata

SEQ ID NO: 469595 - DNA, 19 bp, Mus musculus
  siRNA target sequence for Top2b (NM_009409.2,1009-1027).
gtaatatttttagtacaaa

SEQ ID NO: 469596 - DNA, 19 bp, Mus musculus
  siRNA target sequence for Top2b (NM_009409.2,1038-1056).
gaaacggcttgcaaagaat

SEQ ID NO: 469597 - DNA, 19 bp, Mus musculus
  siRNA target sequence for Top2b (NM_009409.2,1042-1060).
cggcttgcaaagaatacaa

SEQ ID NO: 469598 - DNA, 19 bp, Mus musculus
  siRNA target sequence for Top2b (NM_009409.2,1043-1061).
ggcttgcaaagaatacaaa

SEQ ID NO: 469599 - DNA, 19 bp, Mus musculus
  siRNA target sequence for Top2b (NM_009409.2,1074-1092).
cagacatggatgaataata

SEQ ID NO: 469600 - DNA, 19 bp, Mus musculus
  siRNA target sequence for Top2b (NM_009409.2,1137-1155).
gattatacatgcataacat

SEQ ID NO: 469601 - DNA, 19 bp, Mus musculus
  siRNA target sequence for Top2b (NM_009409.2,1160-1178).
gccagatctatccaaattt

SEQ ID NO: 469602 - DNA, 19 bp, Mus musculus
  siRNA target sequence for Top2b (NM_009409.2,1164-1182).
gatctatccaaatttaaga

SEQ ID NO: 469603 - DNA, 19 bp, Mus musculus
  siRNA target sequence for Top2b (NM_009409.2,1283-1301).
gttgcctgtaaatggattt

SEQ ID NO: 469604 - DNA, 19 bp, Mus musculus
  siRNA target sequence for Top2b (NM_009409.2,1297-1315).
gatttcgcagctatgtaga

SEQ ID NO: 469605 - DNA, 19 bp, Mus musculus
  siRNA target sequence for Top2b (NM_009409.2,1304-1322).
cagctatgtagacctttat

SEQ ID NO: 469606 - DNA, 19 bp, Mus musculus
  siRNA target sequence for Top2b (NM_009409.2,1306-1324).
gctatgtagacctttatgt

SEQ ID NO: 469607 - DNA, 19 bp, Mus musculus
  siRNA target sequence for Top2b (NM_009409.2,1347-1365).
ggggtggctctcaaagtta

SEQ ID NO: 469608 - DNA, 19 bp, Mus musculus
  siRNA target sequence for Top2b (NM_009409.2,1349-1367).
ggtggctctcaaagttatt

SEQ ID NO: 469609 - DNA, 19 bp, Mus musculus
  siRNA target sequence for Top2b (NM_009409.2,1352-1370).
ggctctcaaagttattcat

SEQ ID NO: 469610 - DNA, 19 bp, Mus musculus
  siRNA target sequence for Top2b (NM_009409.2,1371-1389).
gaacttgcaaatgaaagat

SEQ ID NO: 469611 - DNA, 19 bp, Mus musculus
  siRNA target sequence for Top2b (NM_009409.2,1390-1408).
gggatgtttgtctaacctt

SEQ ID NO: 469612 - DNA, 19 bp, Mus musculus
  siRNA target sequence for Top2b (NM_009409.2,1399-1417).
gtctaaccttgagtgaaaa

SEQ ID NO: 469613 - DNA, 19 bp, Mus musculus
  siRNA target sequence for Top2b (NM_009409.2,1471-1489).
ggcatgtggattatgtagt

SEQ ID NO: 469614 - DNA, 19 bp, Mus musculus
  siRNA target sequence for Top2b (NM_009409.2,1472-1490).
gcatgtggattatgtagta

SEQ ID NO: 469615 - DNA, 19 bp, Mus musculus
  siRNA target sequence for Top2b (NM_009409.2,1478-1496).
ggattatgtagtagatcaa

SEQ ID NO: 469616 - DNA, 19 bp, Mus musculus
  siRNA target sequence for Top2b (NM_009409.2,1485-1503).
gtagtagatcaagttgtta

SEQ ID NO: 469617 - DNA, 19 bp, Mus musculus
  siRNA target sequence for Top2b (NM_009409.2,1488-1506).
gtagatcaagttgttagta

SEQ ID NO: 469618 - DNA, 19 bp, Mus musculus
  siRNA target sequence for Top2b (NM_009409.2,1494-1512).
caagttgttagtaaactga

SEQ ID NO: 469619 - DNA, 19 bp, Mus musculus
  siRNA target sequence for Top2b (NM_009409.2,1504-1522).
gtaaactgattgaagtagt

SEQ ID NO: 469620 - DNA, 19 bp, Mus musculus
  siRNA target sequence for Top2b (NM_009409.2,1509-1527).
ctgattgaagtagttaaga

SEQ ID NO: 469621 - DNA, 19 bp, Mus musculus
  siRNA target sequence for Top2b (NM_009409.2,1542-1560).
ggtgtatcagtgaaaccat

SEQ ID NO: 469622 - DNA, 19 bp, Mus musculus
  siRNA target sequence for Top2b (NM_009409.2,1645-1663).
ctctgcagcccaaaagttt

SEQ ID NO: 469623 - DNA, 19 bp, Mus musculus
  siRNA target sequence for Top2b (NM_009409.2,1706-1724).
ctctaattgtggcattgta

SEQ ID NO: 469624 - DNA, 19 bp, Mus musculus
  siRNA target sequence for Top2b (NM_009409.2,1708-1726).
ctaattgtggcattgtaga

SEQ ID NO: 469625 - DNA, 19 bp, Mus musculus
  siRNA target sequence for Top2b (NM_009409.2,1717-1735).
gcattgtagaaagcatatt

SEQ ID NO: 469626 - DNA, 19 bp, Mus musculus
  siRNA target sequence for Top2b (NM_009409.2,1783-1801).
catcagtaaagtacagtaa

SEQ ID NO: 469627 - DNA, 19 bp, Mus musculus
  siRNA target sequence for Top2b (NM_009409.2,1786-1804).
cagtaaagtacagtaaaat

SEQ ID NO: 469628 - DNA, 19 bp, Mus musculus
  siRNA target sequence for Top2b (NM_009409.2,1836-1854).
gatgctggtggcaaacatt

SEQ ID NO: 469629 - DNA, 19 bp, Mus musculus
  siRNA target sequence for Top2b (NM_009409.2,1883-1901).
gggggactccgccaaatct

SEQ ID NO: 469630 - DNA, 19 bp, Mus musculus
  siRNA target sequence for Top2b (NM_009409.2,1885-1903).
gggactccgccaaatctct

SEQ ID NO: 469631 - DNA, 19 bp, Mus musculus
  siRNA target sequence for Top2b (NM_009409.2,1886-1904).
ggactccgccaaatctcta

SEQ ID NO: 469632 - DNA, 19 bp, Mus musculus
  siRNA target sequence for Top2b (NM_009409.2,1895-1913).
caaatctctagctgtatct

SEQ ID NO: 469633 - DNA, 19 bp, Mus musculus
  siRNA target sequence for Top2b (NM_009409.2,1914-1932).
ggattaggtgtgattggta

SEQ ID NO: 469634 - DNA, 19 bp, Mus musculus
  siRNA target sequence for Top2b (NM_009409.2,1925-1943).
gattggtagggacagatat

SEQ ID NO: 469635 - DNA, 19 bp, Mus musculus
  siRNA target sequence for Top2b (NM_009409.2,1952-1970).
cccactcaggggtaaaatt

SEQ ID NO: 469636 - DNA, 19 bp, Mus musculus
  siRNA target sequence for Top2b (NM_009409.2,1954-1972).
cactcaggggtaaaattct

SEQ ID NO: 469637 - DNA, 19 bp, Mus musculus
  siRNA target sequence for Top2b (NM_009409.2,1956-1974).
ctcaggggtaaaattctca

SEQ ID NO: 469638 - DNA, 19 bp, Mus musculus
  siRNA target sequence for Top2b (NM_009409.2,1961-1979).
gggtaaaattctcaatgta

SEQ ID NO: 469639 - DNA, 19 bp, Mus musculus
  siRNA target sequence for Top2b (NM_009409.2,2013-2031).
gcagagataaataatatta

SEQ ID NO: 469640 - DNA, 19 bp, Mus musculus
  siRNA target sequence for Top2b (NM_009409.2,2040-2058).
gttggtttgcaatacaaga

SEQ ID NO: 469641 - DNA, 19 bp, Mus musculus
  siRNA target sequence for Top2b (NM_009409.2,2080-2098).
ctctgaaaactttacgtta

SEQ ID NO: 469642 - DNA, 19 bp, Mus musculus
  siRNA target sequence for Top2b (NM_009409.2,2084-2102).
gaaaactttacgttatgga

SEQ ID NO: 469643 - DNA, 19 bp, Mus musculus
  siRNA target sequence for Top2b (NM_009409.2,2089-2107).
ctttacgttatggaaagat

SEQ ID NO: 469644 - DNA, 19 bp, Mus musculus
  siRNA target sequence for Top2b (NM_009409.2,2188-2206).
cacttttgaagcatggttt

SEQ ID NO: 469645 - DNA, 19 bp, Mus musculus
  siRNA target sequence for Top2b (NM_009409.2,2255-2273).
ggaactttccttttatagt

SEQ ID NO: 469646 - DNA, 19 bp, Mus musculus
  siRNA target sequence for Top2b (NM_009409.2,2272-2290).
gtattcctgaatttgatga

SEQ ID NO: 469647 - DNA, 19 bp, Mus musculus
  siRNA target sequence for Top2b (NM_009409.2,2319-2337).
gcctggaaaataaagtact

SEQ ID NO: 469648 - DNA, 19 bp, Mus musculus
  siRNA target sequence for Top2b (NM_009409.2,2323-2341).
ggaaaataaagtactacaa

SEQ ID NO: 469649 - DNA, 19 bp, Mus musculus
  siRNA target sequence for Top2b (NM_009409.2,2333-2351).
gtactacaaaggattaggt

SEQ ID NO: 469650 - DNA, 19 bp, Mus musculus
  siRNA target sequence for Top2b (NM_009409.2,2350-2368).
gtaccagtaccgctaaaga

SEQ ID NO: 469651 - DNA, 19 bp, Mus musculus
  siRNA target sequence for Top2b (NM_009409.2,2356-2374).
gtaccgctaaagaagcaaa

SEQ ID NO: 469652 - DNA, 19 bp, Mus musculus
  siRNA target sequence for Top2b (NM_009409.2,2444-2462).
catcaccttggcatttagt

SEQ ID NO: 469653 - DNA, 19 bp, Mus musculus
  siRNA target sequence for Top2b (NM_009409.2,2449-2467).
ccttggcatttagtaagaa

SEQ ID NO: 469654 - DNA, 19 bp, Mus musculus
  siRNA target sequence for Top2b (NM_009409.2,2482-2500).
gaaaagagtggttaaccaa

SEQ ID NO: 469655 - DNA, 19 bp, Mus musculus
  siRNA target sequence for Top2b (NM_009409.2,2487-2505).
gagtggttaaccaacttta

SEQ ID NO: 469656 - DNA, 19 bp, Mus musculus
  siRNA target sequence for Top2b (NM_009409.2,2535-2553).
ggcctaccagagcaatttt

SEQ ID NO: 469657 - DNA, 19 bp, Mus musculus
  siRNA target sequence for Top2b (NM_009409.2,2536-2554).
gcctaccagagcaattttt

SEQ ID NO: 469658 - DNA, 19 bp, Mus musculus
  siRNA target sequence for Top2b (NM_009409.2,2537-2555).
cctaccagagcaattttta

SEQ ID NO: 469659 - DNA, 19 bp, Mus musculus
  siRNA target sequence for Top2b (NM_009409.2,2538-2556).
ctaccagagcaatttttat

SEQ ID NO: 469660 - DNA, 19 bp, Mus musculus
  siRNA target sequence for Top2b (NM_009409.2,2544-2562).
gagcaatttttatatggta

SEQ ID NO: 469661 - DNA, 19 bp, Mus musculus
  siRNA target sequence for Top2b (NM_009409.2,2559-2577).
ggtacagcaacaaagcatt

SEQ ID NO: 469662 - DNA, 19 bp, Mus musculus
  siRNA target sequence for Top2b (NM_009409.2,2565-2583).
gcaacaaagcatttgacat

SEQ ID NO: 469663 - DNA, 19 bp, Mus musculus
  siRNA target sequence for Top2b (NM_009409.2,2574-2592).
catttgacatacaatgatt

SEQ ID NO: 469664 - DNA, 19 bp, Mus musculus
  siRNA target sequence for Top2b (NM_009409.2,2626-2644).
cggacaatgagagatctat

SEQ ID NO: 469665 - DNA, 19 bp, Mus musculus
  siRNA target sequence for Top2b (NM_009409.2,2666-2684).
caagccaggtcaacgaaaa

SEQ ID NO: 469666 - DNA, 19 bp, Mus musculus
  siRNA target sequence for Top2b (NM_009409.2,2669-2687).
gccaggtcaacgaaaagtt

SEQ ID NO: 469667 - DNA, 19 bp, Mus musculus
  siRNA target sequence for Top2b (NM_009409.2,2670-2688).
ccaggtcaacgaaaagttt

SEQ ID NO: 469668 - DNA, 19 bp, Mus musculus
  siRNA target sequence for Top2b (NM_009409.2,2671-2689).
caggtcaacgaaaagtttt

SEQ ID NO: 469669 - DNA, 19 bp, Mus musculus
  siRNA target sequence for Top2b (NM_009409.2,2673-2691).
ggtcaacgaaaagttttgt

SEQ ID NO: 469670 - DNA, 19 bp, Mus musculus
  siRNA target sequence for Top2b (NM_009409.2,2679-2697).
cgaaaagttttgtttacct

SEQ ID NO: 469671 - DNA, 19 bp, Mus musculus
  siRNA target sequence for Top2b (NM_009409.2,2696-2714).
ctgtttcaagaggaatgat

SEQ ID NO: 469672 - DNA, 19 bp, Mus musculus
  siRNA target sequence for Top2b (NM_009409.2,2702-2720).
caagaggaatgataaacgt

SEQ ID NO: 469673 - DNA, 19 bp, Mus musculus
  siRNA target sequence for Top2b (NM_009409.2,2829-2847).
ggcagtaataacattaact

SEQ ID NO: 469674 - DNA, 19 bp, Mus musculus
  siRNA target sequence for Top2b (NM_009409.2,2901-2919).
gcaagccctcgttatattt

SEQ ID NO: 469675 - DNA, 19 bp, Mus musculus
  siRNA target sequence for Top2b (NM_009409.2,2906-2924).
ccctcgttatattttcaca

SEQ ID NO: 469676 - DNA, 19 bp, Mus musculus
  siRNA target sequence for Top2b (NM_009409.2,2907-2925).
cctcgttatattttcacaa

SEQ ID NO: 469677 - DNA, 19 bp, Mus musculus
  siRNA target sequence for Top2b (NM_009409.2,2910-2928).
cgttatattttcacaatgt

SEQ ID NO: 469678 - DNA, 19 bp, Mus musculus
  siRNA target sequence for Top2b (NM_009409.2,2935-2953).
ctctggcaagacttctttt

SEQ ID NO: 469679 - DNA, 19 bp, Mus musculus
  siRNA target sequence for Top2b (NM_009409.2,3035-3053).
ccccatggttttgattaat

SEQ ID NO: 469680 - DNA, 19 bp, Mus musculus
  siRNA target sequence for Top2b (NM_009409.2,3038-3056).
catggttttgattaatggt

SEQ ID NO: 469681 - DNA, 19 bp, Mus musculus
  siRNA target sequence for Top2b (NM_009409.2,3071-3089).
gactggatgggcttgtaaa

SEQ ID NO: 469682 - DNA, 19 bp, Mus musculus
  siRNA target sequence for Top2b (NM_009409.2,3085-3103).
gtaaactgcccaactatga

SEQ ID NO: 469683 - DNA, 19 bp, Mus musculus
  siRNA target sequence for Top2b (NM_009409.2,3130-3148).
ggcggatgctagaaggttt

SEQ ID NO: 469684 - DNA, 19 bp, Mus musculus
  siRNA target sequence for Top2b (NM_009409.2,3159-3177).
cccatgcttccaaactata

SEQ ID NO: 469685 - DNA, 19 bp, Mus musculus
  siRNA target sequence for Top2b (NM_009409.2,3160-3178).
ccatgcttccaaactataa

SEQ ID NO: 469686 - DNA, 19 bp, Mus musculus
  siRNA target sequence for Top2b (NM_009409.2,3165-3183).
cttccaaactataagaact

SEQ ID NO: 469687 - DNA, 19 bp, Mus musculus
  siRNA target sequence for Top2b (NM_009409.2,3169-3187).
caaactataagaacttcaa

SEQ ID NO: 469688 - DNA, 19 bp, Mus musculus
  siRNA target sequence for Top2b (NM_009409.2,3222-3240).
gctgttagtggtgagatat

SEQ ID NO: 469689 - DNA, 19 bp, Mus musculus
  siRNA target sequence for Top2b (NM_009409.2,3273-3291).
gaacttccagttagaacat

SEQ ID NO: 469690 - DNA, 19 bp, Mus musculus
  siRNA target sequence for Top2b (NM_009409.2,3314-3332).
ggtcctagaacctatgctt

SEQ ID NO: 469691 - DNA, 19 bp, Mus musculus
  siRNA target sequence for Top2b (NM_009409.2,3315-3333).
gtcctagaacctatgctta

SEQ ID NO: 469692 - DNA, 19 bp, Mus musculus
  siRNA target sequence for Top2b (NM_009409.2,3321-3339).
gaacctatgcttaatggaa

SEQ ID NO: 469693 - DNA, 19 bp, Mus musculus
  siRNA target sequence for Top2b (NM_009409.2,3349-3367).
caccggcactgatttctga

SEQ ID NO: 469694 - DNA, 19 bp, Mus musculus
  siRNA target sequence for Top2b (NM_009409.2,3351-3369).
ccggcactgatttctgatt

SEQ ID NO: 469695 - DNA, 19 bp, Mus musculus
  siRNA target sequence for Top2b (NM_009409.2,3354-3372).
gcactgatttctgattaca

SEQ ID NO: 469696 - DNA, 19 bp, Mus musculus
  siRNA target sequence for Top2b (NM_009409.2,3355-3373).
cactgatttctgattacaa

SEQ ID NO: 469697 - DNA, 19 bp, Mus musculus
  siRNA target sequence for Top2b (NM_009409.2,3447-3465).
gctggcctgcataaagttt

SEQ ID NO: 469698 - DNA, 19 bp, Mus musculus
  siRNA target sequence for Top2b (NM_009409.2,3448-3466).
ctggcctgcataaagtttt

SEQ ID NO: 469699 - DNA, 19 bp, Mus musculus
  siRNA target sequence for Top2b (NM_009409.2,3481-3499).
ctcttacttgcaattccat

SEQ ID NO: 469700 - DNA, 19 bp, Mus musculus
  siRNA target sequence for Top2b (NM_009409.2,3518-3536).
gggttgtctgaagaagtat

SEQ ID NO: 469701 - DNA, 19 bp, Mus musculus
  siRNA target sequence for Top2b (NM_009409.2,3566-3584).
ctttgatttacggttaagt

SEQ ID NO: 469702 - DNA, 19 bp, Mus musculus
  siRNA target sequence for Top2b (NM_009409.2,3570-3588).
gatttacggttaagttatt

SEQ ID NO: 469703 - DNA, 19 bp, Mus musculus
  siRNA target sequence for Top2b (NM_009409.2,3576-3594).
cggttaagttattatggtt

SEQ ID NO: 469704 - DNA, 19 bp, Mus musculus
  siRNA target sequence for Top2b (NM_009409.2,3577-3595).
ggttaagttattatggttt

SEQ ID NO: 469705 - DNA, 19 bp, Mus musculus
  siRNA target sequence for Top2b (NM_009409.2,3627-3645).
gcagaatctacaaagctta

SEQ ID NO: 469706 - DNA, 19 bp, Mus musculus
  siRNA target sequence for Top2b (NM_009409.2,3628-3646).
cagaatctacaaagcttaa

SEQ ID NO: 469707 - DNA, 19 bp, Mus musculus
  siRNA target sequence for Top2b (NM_009409.2,3630-3648).
gaatctacaaagcttaata

SEQ ID NO: 469708 - DNA, 19 bp, Mus musculus
  siRNA target sequence for Top2b (NM_009409.2,3634-3652).
ctacaaagcttaataatca

SEQ ID NO: 469709 - DNA, 19 bp, Mus musculus
  siRNA target sequence for Top2b (NM_009409.2,3654-3672).
gcccgtttcattttagaga

SEQ ID NO: 469710 - DNA, 19 bp, Mus musculus
  siRNA target sequence for Top2b (NM_009409.2,3674-3692).
gatacaggggaaaattact

SEQ ID NO: 469711 - DNA, 19 bp, Mus musculus
  siRNA target sequence for Top2b (NM_009409.2,3681-3699).
gggaaaattactatagaga

SEQ ID NO: 469712 - DNA, 19 bp, Mus musculus
  siRNA target sequence for Top2b (NM_009409.2,3703-3721).
ggtcaaagaaagatttgat

SEQ ID NO: 469713 - DNA, 19 bp, Mus musculus
  siRNA target sequence for Top2b (NM_009409.2,3728-3746).
gttagtccagagaggttat

SEQ ID NO: 469714 - DNA, 19 bp, Mus musculus
  siRNA target sequence for Top2b (NM_009409.2,3732-3750).
gtccagagaggttatgaat

SEQ ID NO: 469715 - DNA, 19 bp, Mus musculus
  siRNA target sequence for Top2b (NM_009409.2,3734-3752).
ccagagaggttatgaatct

SEQ ID NO: 469716 - DNA, 19 bp, Mus musculus
  siRNA target sequence for Top2b (NM_009409.2,3800-3818).
ggaagattcacaaaaccaa

SEQ ID NO: 469717 - DNA, 19 bp, Mus musculus
  siRNA target sequence for Top2b (NM_009409.2,3822-3840).
gatgacagttcctctgatt

SEQ ID NO: 469718 - DNA, 19 bp, Mus musculus
  siRNA target sequence for Top2b (NM_009409.2,3850-3868).
cttcaggccctgattttaa

SEQ ID NO: 469719 - DNA, 19 bp, Mus musculus
  siRNA target sequence for Top2b (NM_009409.2,3853-3871).
caggccctgattttaatta

SEQ ID NO: 469720 - DNA, 19 bp, Mus musculus
  siRNA target sequence for Top2b (NM_009409.2,3940-3958).
cgaaagggcgagaggttaa

SEQ ID NO: 469721 - DNA, 19 bp, Mus musculus
  siRNA target sequence for Top2b (NM_009409.2,3976-3994).
ctccttcagatctttggaa

SEQ ID NO: 469722 - DNA, 19 bp, Mus musculus
  siRNA target sequence for Top2b (NM_009409.2,4038-4056).
gcacaagagcgggaagata

SEQ ID NO: 469723 - DNA, 19 bp, Mus musculus
  siRNA target sequence for Top2b (NM_009409.2,4039-4057).
cacaagagcgggaagatat

SEQ ID NO: 469724 - DNA, 19 bp, Mus musculus
  siRNA target sequence for Top2b (NM_009409.2,4095-4113).
gtcggcaaacccaaagtaa

SEQ ID NO: 469725 - DNA, 19 bp, Mus musculus
  siRNA target sequence for Top2b (NM_009409.2,4147-4165).
cttacgggagaagaattgt

SEQ ID NO: 469726 - DNA, 19 bp, Mus musculus
  siRNA target sequence for Top2b (NM_009409.2,4313-4331).
cccatctgctcctgtaaat

SEQ ID NO: 469727 - DNA, 19 bp, Mus musculus
  siRNA target sequence for Top2b (NM_009409.2,4314-4332).
ccatctgctcctgtaaata

SEQ ID NO: 469728 - DNA, 19 bp, Mus musculus
  siRNA target sequence for Top2b (NM_009409.2,4336-4354).
gccccaaacccaaaagaga

SEQ ID NO: 469729 - DNA, 19 bp, Mus musculus
  siRNA target sequence for Top2b (NM_009409.2,4408-4426).
ctaatgcgaagaaagtgaa

SEQ ID NO: 469730 - DNA, 19 bp, Mus musculus
  siRNA target sequence for Top2b (NM_009409.2,4433-4451).
gaatccttggtcagatgat

SEQ ID NO: 469731 - DNA, 19 bp, Mus musculus
  siRNA target sequence for Top2b (NM_009409.2,4533-4551).
gaaagacctaagtacactt

SEQ ID NO: 469732 - DNA, 19 bp, Mus musculus
  siRNA target sequence for Top2b (NM_009409.2,4537-4555).
gacctaagtacacttttga

SEQ ID NO: 469733 - DNA, 19 bp, Mus musculus
  siRNA target sequence for Top2b (NM_009409.2,4539-4557).
cctaagtacacttttgatt

SEQ ID NO: 469734 - DNA, 19 bp, Mus musculus
  siRNA target sequence for Top2b (NM_009409.2,4540-4558).
ctaagtacacttttgattt

SEQ ID NO: 469735 - DNA, 19 bp, Mus musculus
  siRNA target sequence for Top2b (NM_009409.2,4585-4603).
ctgctgctgatgacagtaa

SEQ ID NO: 469736 - DNA, 19 bp, Mus musculus
  siRNA target sequence for Top2b (NM_009409.2,4614-4632).
gaactgaaagttaaagcat

SEQ ID NO: 469737 - DNA, 19 bp, Mus musculus
  siRNA target sequence for Top2b (NM_009409.2,4630-4648).
catctcccataacaaatga

SEQ ID NO: 469738 - DNA, 19 bp, Mus musculus
  siRNA target sequence for Top2b (NM_009409.2,4669-4687).
cttcagatggcttagataa

SEQ ID NO: 469739 - DNA, 19 bp, Mus musculus
  siRNA target sequence for Top2b (NM_009409.2,4672-4690).
cagatggcttagataaaga

SEQ ID NO: 469740 - DNA, 19 bp, Mus musculus
  siRNA target sequence for Top2b (NM_009409.2,4678-4696).
gcttagataaagatgagta

SEQ ID NO: 469741 - DNA, 19 bp, Mus musculus
  siRNA target sequence for Top2b (NM_009409.2,4679-4697).
cttagataaagatgagtat

SEQ ID NO: 469742 - DNA, 19 bp, Mus musculus
  siRNA target sequence for Top2b (NM_009409.2,4758-4776).
caggattttggaaatcttt

SEQ ID NO: 469743 - DNA, 19 bp, Mus musculus
  siRNA target sequence for Top2b (NM_009409.2,4839-4857).
gaagataccgcttctgttt

SEQ ID NO: 469744 - DNA, 19 bp, Mus musculus
  siRNA target sequence for Top2b (NM_009409.2,4872-4890).
ggtctgaagcaaacagata

SEQ ID NO: 469745 - DNA, 19 bp, Mus musculus
  siRNA target sequence for Top2b (NM_009409.2,4885-4903).
cagataaacttccaagtaa

SEQ ID NO: 469746 - DNA, 19 bp, Mus musculus
  siRNA target sequence for Top2b (NM_009409.2,4922-4940).
gggtaaaccaccttcagat

SEQ ID NO: 469747 - DNA, 19 bp, Mus musculus
  siRNA target sequence for Top2b (NM_009409.2,4923-4941).
ggtaaaccaccttcagata

SEQ ID NO: 469748 - DNA, 19 bp, Mus musculus
  siRNA target sequence for Top2b (NM_009409.2,4954-4972).
ctaagagagcccctaaaca

SEQ ID NO: 469749 - DNA, 19 bp, Mus musculus
  siRNA target sequence for Top2b (NM_009409.2,5055-5073).
ggccgaggggcaaagaaaa

SEQ ID NO: 469750 - DNA, 19 bp, Mus musculus
  siRNA target sequence for Top2b (NM_009409.2,5080-5098).
catcaggctcagaaaatga

SEQ ID NO: 469751 - DNA, 19 bp, Mus musculus
  siRNA target sequence for Top2b (NM_009409.2,5231-5249).
gactggtcgggctaggaaa

SEQ ID NO: 469752 - DNA, 19 bp, Mus musculus
  siRNA target sequence for Top2b (NM_009409.2,5236-5254).
gtcgggctaggaaagaagt

SEQ ID NO: 469753 - DNA, 19 bp, Mus musculus
  siRNA target sequence for Top2b (NM_009409.2,5238-5256).
cgggctaggaaagaagtaa

SEQ ID NO: 469754 - DNA, 19 bp, Mus musculus
  siRNA target sequence for Top2b (NM_009409.2,5240-5258).
ggctaggaaagaagtaaaa

SEQ ID NO: 469755 - DNA, 19 bp, Mus musculus
  siRNA target sequence for Top2b (NM_009409.2,5241-5259).
gctaggaaagaagtaaaat

SEQ ID NO: 469756 - DNA, 19 bp, Mus musculus
  siRNA target sequence for Top3a (NM_009410.1,355-373).
ccgaggagtgcgaaaagtt

SEQ ID NO: 469757 - DNA, 19 bp, Mus musculus
  siRNA target sequence for Top3a (NM_009410.1,357-375).
gaggagtgcgaaaagttct

SEQ ID NO: 469758 - DNA, 19 bp, Mus musculus
  siRNA target sequence for Top3a (NM_009410.1,433-451).
gcgtatgaggcggaaagaa

SEQ ID NO: 469759 - DNA, 19 bp, Mus musculus
  siRNA target sequence for Top3a (NM_009410.1,449-467).
gaaggcctttctaaattca

SEQ ID NO: 469760 - DNA, 19 bp, Mus musculus
  siRNA target sequence for Top3a (NM_009410.1,472-490).
gatttatgaatttgactat

SEQ ID NO: 469761 - DNA, 19 bp, Mus musculus
  siRNA target sequence for Top3a (NM_009410.1,496-514).
gtatggccagaatgttact

SEQ ID NO: 469762 - DNA, 19 bp, Mus musculus
  siRNA target sequence for Top3a (NM_009410.1,500-518).
ggccagaatgttactatga

SEQ ID NO: 469763 - DNA, 19 bp, Mus musculus
  siRNA target sequence for Top3a (NM_009410.1,509-527).
gttactatgataatgactt

SEQ ID NO: 469764 - DNA, 19 bp, Mus musculus
  siRNA target sequence for Top3a (NM_009410.1,630-648).
gcccagaaaattttataga

SEQ ID NO: 469765 - DNA, 19 bp, Mus musculus
  siRNA target sequence for Top3a (NM_009410.1,665-683).
gaacgagagacacatcatt

SEQ ID NO: 469766 - DNA, 19 bp, Mus musculus
  siRNA target sequence for Top3a (NM_009410.1,725-743).
gagaacatcggctttgaga

SEQ ID NO: 469767 - DNA, 19 bp, Mus musculus
  siRNA target sequence for Top3a (NM_009410.1,727-745).
gaacatcggctttgagatt

SEQ ID NO: 469768 - DNA, 19 bp, Mus musculus
  siRNA target sequence for Top3a (NM_009410.1,751-769).
cgtatgcaaggctgtaaaa

SEQ ID NO: 469769 - DNA, 19 bp, Mus musculus
  siRNA target sequence for Top3a (NM_009410.1,760-778).
ggctgtaaaacccaatcta

SEQ ID NO: 469770 - DNA, 19 bp, Mus musculus
  siRNA target sequence for Top3a (NM_009410.1,825-843).
gaacagcctgtgaaaacct

SEQ ID NO: 469771 - DNA, 19 bp, Mus musculus
  siRNA target sequence for Top3a (NM_009410.1,831-849).
cctgtgaaaacctaactga

SEQ ID NO: 469772 - DNA, 19 bp, Mus musculus
  siRNA target sequence for Top3a (NM_009410.1,1056-1074).
cagaagtcttccacaaaat

SEQ ID NO: 469773 - DNA, 19 bp, Mus musculus
  siRNA target sequence for Top3a (NM_009410.1,1063-1081).
cttccacaaaattaaagta

SEQ ID NO: 469774 - DNA, 19 bp, Mus musculus
  siRNA target sequence for Top3a (NM_009410.1,1100-1118).
gggaccgtagagttcaact

SEQ ID NO: 469775 - DNA, 19 bp, Mus musculus
  siRNA target sequence for Top3a (NM_009410.1,1109-1127).
gagttcaactggaaacgat

SEQ ID NO: 469776 - DNA, 19 bp, Mus musculus
  siRNA target sequence for Top3a (NM_009410.1,1125-1143).
gataccgtctctttaacca

SEQ ID NO: 469777 - DNA, 19 bp, Mus musculus
  siRNA target sequence for Top3a (NM_009410.1,1146-1164).
cagcttgtcttgtccttta

SEQ ID NO: 469778 - DNA, 19 bp, Mus musculus
  siRNA target sequence for Top3a (NM_009410.1,1315-1333).
cgcggaaaagctctataca

SEQ ID NO: 469779 - DNA, 19 bp, Mus musculus
  siRNA target sequence for Top3a (NM_009410.1,1317-1335).
cggaaaagctctatacaca

SEQ ID NO: 469780 - DNA, 19 bp, Mus musculus
  siRNA target sequence for Top3a (NM_009410.1,1318-1336).
ggaaaagctctatacacaa

SEQ ID NO: 469781 - DNA, 19 bp, Mus musculus
  siRNA target sequence for Top3a (NM_009410.1,1483-1501).
cgggagcaagtctgatcaa

SEQ ID NO: 469782 - DNA, 19 bp, Mus musculus
  siRNA target sequence for Top3a (NM_009410.1,1511-1529).
cccattcaccccaccaaat

SEQ ID NO: 469783 - DNA, 19 bp, Mus musculus
  siRNA target sequence for Top3a (NM_009410.1,1558-1576).
gcgactgtacgagttcatt

SEQ ID NO: 469784 - DNA, 19 bp, Mus musculus
  siRNA target sequence for Top3a (NM_009410.1,1560-1578).
gactgtacgagttcattgt

SEQ ID NO: 469785 - DNA, 19 bp, Mus musculus
  siRNA target sequence for Top3a (NM_009410.1,1663-1681).
ggcccacgggctcatcatt

SEQ ID NO: 469786 - DNA, 19 bp, Mus musculus
  siRNA target sequence for Top3a (NM_009410.1,1665-1683).
cccacgggctcatcattct

SEQ ID NO: 469787 - DNA, 19 bp, Mus musculus
  siRNA target sequence for Top3a (NM_009410.1,1689-1707).
gtaactacctagatgtgta

SEQ ID NO: 469788 - DNA, 19 bp, Mus musculus
  siRNA target sequence for Top3a (NM_009410.1,1732-1750).
gctcctccccgtctatgaa

SEQ ID NO: 469789 - DNA, 19 bp, Mus musculus
  siRNA target sequence for Top3a (NM_009410.1,1735-1753).
cctccccgtctatgaacaa

SEQ ID NO: 469790 - DNA, 19 bp, Mus musculus
  siRNA target sequence for Top3a (NM_009410.1,1861-1879).
cggtactgatgcaactcat

SEQ ID NO: 469791 - DNA, 19 bp, Mus musculus
  siRNA target sequence for Top3a (NM_009410.1,1897-1915).
catcaaagcccggatgtat

SEQ ID NO: 469792 - DNA, 19 bp, Mus musculus
  siRNA target sequence for Top3a (NM_009410.1,1957-1975).
gggcatgggacttgtagaa

SEQ ID NO: 469793 - DNA, 19 bp, Mus musculus
  siRNA target sequence for Top3a (NM_009410.1,1967-1985).
cttgtagaaggttacgatt

SEQ ID NO: 469794 - DNA, 19 bp, Mus musculus
  siRNA target sequence for Top3a (NM_009410.1,2066-2084).
gataagtttcaagttctaa

SEQ ID NO: 469795 - DNA, 19 bp, Mus musculus
  siRNA target sequence for Top3a (NM_009410.1,2124-2142).
cagtggcgaaggcaaagaa

SEQ ID NO: 469796 - DNA, 19 bp, Mus musculus
  siRNA target sequence for Top3a (NM_009410.1,2232-2250).
ggaagtgcccacagtgtaa

SEQ ID NO: 469797 - DNA, 19 bp, Mus musculus
  siRNA target sequence for Top3a (NM_009410.1,2241-2259).
cacagtgtaacaaggatat

SEQ ID NO: 469798 - DNA, 19 bp, Mus musculus
  siRNA target sequence for Top3a (NM_009410.1,2399-2417).
cctgtgtacaggttgaagt

SEQ ID NO: 469799 - DNA, 19 bp, Mus musculus
  siRNA target sequence for Top3a (NM_009410.1,2400-2418).
ctgtgtacaggttgaagtt

SEQ ID NO: 469800 - DNA, 19 bp, Mus musculus
  siRNA target sequence for Top3a (NM_009410.1,2407-2425).
caggttgaagttgaagttt

SEQ ID NO: 469801 - DNA, 19 bp, Mus musculus
  siRNA target sequence for Top3a (NM_009410.1,2506-2524).
cttcggcctgcgatttcca

SEQ ID NO: 469802 - DNA, 19 bp, Mus musculus
  siRNA target sequence for Top3a (NM_009410.1,2618-2636).
cctctggttaacagacata

SEQ ID NO: 469803 - DNA, 19 bp, Mus musculus
  siRNA target sequence for Top3a (NM_009410.1,2621-2639).
ctggttaacagacatacta

SEQ ID NO: 469804 - DNA, 19 bp, Mus musculus
  siRNA target sequence for Top3a (NM_009410.1,2623-2641).
ggttaacagacatactaga

SEQ ID NO: 469805 - DNA, 19 bp, Mus musculus
  siRNA target sequence for Top3a (NM_009410.1,2631-2649).
gacatactagaccttcaaa

SEQ ID NO: 469806 - DNA, 19 bp, Mus musculus
  siRNA target sequence for Top3a (NM_009410.1,2633-2651).
catactagaccttcaaaga

SEQ ID NO: 469807 - DNA, 19 bp, Mus musculus
  siRNA target sequence for Top3a (NM_009410.1,3056-3074).
cagtgtggcttctttcagt

SEQ ID NO: 469808 - DNA, 19 bp, Mus musculus
  siRNA target sequence for Top3a (NM_009410.1,3091-3109).
ggccccaggaagttttgca

SEQ ID NO: 469809 - DNA, 19 bp, Mus musculus
  siRNA target sequence for Top3a (NM_009410.1,3242-3260).
ggacacacccgaacctttt

SEQ ID NO: 469810 - DNA, 19 bp, Mus musculus
  siRNA target sequence for Top3b (NM_011624.2,341-359).
ctctcccgaggaaacatgt

SEQ ID NO: 469811 - DNA, 19 bp, Mus musculus
  siRNA target sequence for Top3b (NM_011624.2,384-402).
catgttcagtgcacaagta

SEQ ID NO: 469812 - DNA, 19 bp, Mus musculus
  siRNA target sequence for Top3b (NM_011624.2,420-438).
gccaacctgtccacttcaa

SEQ ID NO: 469813 - DNA, 19 bp, Mus musculus
  siRNA target sequence for Top3b (NM_011624.2,447-465).
ctgtctgcggtcatgtgat

SEQ ID NO: 469814 - DNA, 19 bp, Mus musculus
  siRNA target sequence for Top3b (NM_011624.2,479-497).
ctggggaagtacaacaagt

SEQ ID NO: 469815 - DNA, 19 bp, Mus musculus
  siRNA target sequence for Top3b (NM_011624.2,600-618).
gaggctgtgactatgttgt

SEQ ID NO: 469816 - DNA, 19 bp, Mus musculus
  siRNA target sequence for Top3b (NM_011624.2,675-693).
ccgttctgcctgtcatgaa

SEQ ID NO: 469817 - DNA, 19 bp, Mus musculus
  siRNA target sequence for Top3b (NM_011624.2,677-695).
gttctgcctgtcatgaata

SEQ ID NO: 469818 - DNA, 19 bp, Mus musculus
  siRNA target sequence for Top3b (NM_011624.2,783-801).
gcgagccagaccacaatga

SEQ ID NO: 469819 - DNA, 19 bp, Mus musculus
  siRNA target sequence for Top3b (NM_011624.2,851-869).
gcattcactaggtttcaaa

SEQ ID NO: 469820 - DNA, 19 bp, Mus musculus
  siRNA target sequence for Top3b (NM_011624.2,858-876).
ctaggtttcaaacaaagta

SEQ ID NO: 469821 - DNA, 19 bp, Mus musculus
  siRNA target sequence for Top3b (NM_011624.2,943-961).
cctgggattctgtgtagaa

SEQ ID NO: 469822 - DNA, 19 bp, Mus musculus
  siRNA target sequence for Top3b (NM_011624.2,952-970).
ctgtgtagaaagacatgat

SEQ ID NO: 469823 - DNA, 19 bp, Mus musculus
  siRNA target sequence for Top3b (NM_011624.2,1012-1030).
ggccaaggttcatacagat

SEQ ID NO: 469824 - DNA, 19 bp, Mus musculus
  siRNA target sequence for Top3b (NM_011624.2,1013-1031).
gccaaggttcatacagata

SEQ ID NO: 469825 - DNA, 19 bp, Mus musculus
  siRNA target sequence for Top3b (NM_011624.2,1056-1074).
gggaccgtgttagagtttt

SEQ ID NO: 469826 - DNA, 19 bp, Mus musculus
  siRNA target sequence for Top3b (NM_011624.2,1080-1098).
gggagattgcacagatgtt

SEQ ID NO: 469827 - DNA, 19 bp, Mus musculus
  siRNA target sequence for Top3b (NM_011624.2,1082-1100).
gagattgcacagatgtttt

SEQ ID NO: 469828 - DNA, 19 bp, Mus musculus
  siRNA target sequence for Top3b (NM_011624.2,1232-1250).
ccacagcacgccatgcaaa

SEQ ID NO: 469829 - DNA, 19 bp, Mus musculus
  siRNA target sequence for Top3b (NM_011624.2,1237-1255).
gcacgccatgcaaatagct

SEQ ID NO: 469830 - DNA, 19 bp, Mus musculus
  siRNA target sequence for Top3b (NM_011624.2,1247-1265).
caaatagctgagagattat

SEQ ID NO: 469831 - DNA, 19 bp, Mus musculus
  siRNA target sequence for Top3b (NM_011624.2,1306-1324).
ccactatcccgagaacttt

SEQ ID NO: 469832 - DNA, 19 bp, Mus musculus
  siRNA target sequence for Top3b (NM_011624.2,1375-1393).
ctcggtaaagcagttgtta

SEQ ID NO: 469833 - DNA, 19 bp, Mus musculus
  siRNA target sequence for Top3b (NM_011624.2,1411-1429).
ccctcggaaaggtcatgat

SEQ ID NO: 469834 - DNA, 19 bp, Mus musculus
  siRNA target sequence for Top3b (NM_011624.2,1445-1463).
ccaatcacacctatgaagt

SEQ ID NO: 469835 - DNA, 19 bp, Mus musculus
  siRNA target sequence for Top3b (NM_011624.2,1464-1482).
cggctacagaggctgaatt

SEQ ID NO: 469836 - DNA, 19 bp, Mus musculus
  siRNA target sequence for Top3b (NM_011624.2,1465-1483).
ggctacagaggctgaatta

SEQ ID NO: 469837 - DNA, 19 bp, Mus musculus
  siRNA target sequence for Top3b (NM_011624.2,1497-1515).
ggagactctacgagtatat

SEQ ID NO: 469838 - DNA, 19 bp, Mus musculus
  siRNA target sequence for Top3b (NM_011624.2,1542-1560).
gccatgactgcaagtatct

SEQ ID NO: 469839 - DNA, 19 bp, Mus musculus
  siRNA target sequence for Top3b (NM_011624.2,1581-1599).
ggatcgggcctgaacactt

SEQ ID NO: 469840 - DNA, 19 bp, Mus musculus
  siRNA target sequence for Top3b (NM_011624.2,1582-1600).
gatcgggcctgaacacttt

SEQ ID NO: 469841 - DNA, 19 bp, Mus musculus
  siRNA target sequence for Top3b (NM_011624.2,1585-1603).
cgggcctgaacactttaca

SEQ ID NO: 469842 - DNA, 19 bp, Mus musculus
  siRNA target sequence for Top3b (NM_011624.2,1689-1707).
gccagaagggtgatacctt

SEQ ID NO: 469843 - DNA, 19 bp, Mus musculus
  siRNA target sequence for Top3b (NM_011624.2,1743-1761).
cgagcccaccggactatct

SEQ ID NO: 469844 - DNA, 19 bp, Mus musculus
  siRNA target sequence for Top3b (NM_011624.2,1818-1836).
gtatccctgtgcacatcaa

SEQ ID NO: 469845 - DNA, 19 bp, Mus musculus
  siRNA target sequence for Top3b (NM_011624.2,1823-1841).
cctgtgcacatcaacaata

SEQ ID NO: 469846 - DNA, 19 bp, Mus musculus
  siRNA target sequence for Top3b (NM_011624.2,1843-1861).
ctgccagcgcaactatgtt

SEQ ID NO: 469847 - DNA, 19 bp, Mus musculus
  siRNA target sequence for Top3b (NM_011624.2,1846-1864).
ccagcgcaactatgttact

SEQ ID NO: 469848 - DNA, 19 bp, Mus musculus
  siRNA target sequence for Top3b (NM_011624.2,1891-1909).
caccaaccttggcatagtt

SEQ ID NO: 469849 - DNA, 19 bp, Mus musculus
  siRNA target sequence for Top3b (NM_011624.2,1975-1993).
gaagcagctgaatcttatt

SEQ ID NO: 469850 - DNA, 19 bp, Mus musculus
  siRNA target sequence for Top3b (NM_011624.2,2027-2045).
ggccataccctggatatct

SEQ ID NO: 469851 - DNA, 19 bp, Mus musculus
  siRNA target sequence for Top3b (NM_011624.2,2030-2048).
cataccctggatatcttca

SEQ ID NO: 469852 - DNA, 19 bp, Mus musculus
  siRNA target sequence for Top3b (NM_011624.2,2059-2077).
ccactacttcgttgattct

SEQ ID NO: 469853 - DNA, 19 bp, Mus musculus
  siRNA target sequence for Top3b (NM_011624.2,2062-2080).
ctacttcgttgattctatt

SEQ ID NO: 469854 - DNA, 19 bp, Mus musculus
  siRNA target sequence for Top3b (NM_011624.2,2065-2083).
cttcgttgattctattgct

SEQ ID NO: 469855 - DNA, 19 bp, Mus musculus
  siRNA target sequence for Top3b (NM_011624.2,2082-2100).
ctggcatggacgagttgat

SEQ ID NO: 469856 - DNA, 19 bp, Mus musculus
  siRNA target sequence for Top3b (NM_011624.2,2151-2169).
gtgggaagtgccatcgatt

SEQ ID NO: 469857 - DNA, 19 bp, Mus musculus
  siRNA target sequence for Top3b (NM_011624.2,2154-2172).
ggaagtgccatcgatttat

SEQ ID NO: 469858 - DNA, 19 bp, Mus musculus
  siRNA target sequence for Top3b (NM_011624.2,2160-2178).
gccatcgatttatgaagta

SEQ ID NO: 469859 - DNA, 19 bp, Mus musculus
  siRNA target sequence for Top3b (NM_011624.2,2247-2265).
gtaccatcaagctctacaa

SEQ ID NO: 469860 - DNA, 19 bp, Mus musculus
  siRNA target sequence for Top3b (NM_011624.2,2269-2287).
gctgcggtgcccattggat

SEQ ID NO: 469861 - DNA, 19 bp, Mus musculus
  siRNA target sequence for Top3b (NM_011624.2,2274-2292).
ggtgcccattggatgactt

SEQ ID NO: 469862 - DNA, 19 bp, Mus musculus
  siRNA target sequence for Top3b (NM_011624.2,2339-2357).
ctatgtccctactgctata

SEQ ID NO: 469863 - DNA, 19 bp, Mus musculus
  siRNA target sequence for Top3b (NM_011624.2,2366-2384).
cccttccgagacatgaaga

SEQ ID NO: 469864 - DNA, 19 bp, Mus musculus
  siRNA target sequence for Top3b (NM_011624.2,2607-2625).
ctgccttgctcgatgtaga

SEQ ID NO: 469865 - DNA, 19 bp, Mus musculus
  siRNA target sequence for Top3b (NM_011624.2,2615-2633).
ctcgatgtagacttcaaca

SEQ ID NO: 469866 - DNA, 19 bp, Mus musculus
  siRNA target sequence for Tox (NM_145711.2,238-256).
ggacgtaagattttatcct

SEQ ID NO: 469867 - DNA, 19 bp, Mus musculus
  siRNA target sequence for Tox (NM_145711.2,322-340).
ctactattgcaacaagttt

SEQ ID NO: 469868 - DNA, 19 bp, Mus musculus
  siRNA target sequence for Tox (NM_145711.2,341-359).
gacggggagaacatgtata

SEQ ID NO: 469869 - DNA, 19 bp, Mus musculus
  siRNA target sequence for Tox (NM_145711.2,525-543).
gtcaccccatgaatcacaa

SEQ ID NO: 469870 - DNA, 19 bp, Mus musculus
  siRNA target sequence for Tox (NM_145711.2,555-573).
cgttccatccacaaaccat

SEQ ID NO: 469871 - DNA, 19 bp, Mus musculus
  siRNA target sequence for Tox (NM_145711.2,814-832).
gaacatgggaggaaccaat

SEQ ID NO: 469872 - DNA, 19 bp, Mus musculus
  siRNA target sequence for Tox (NM_145711.2,916-934).
ggatgcctccaagatcaat

SEQ ID NO: 469873 - DNA, 19 bp, Mus musculus
  siRNA target sequence for Tox (NM_145711.2,955-973).
ctctgatatggggaaaaaa

SEQ ID NO: 469874 - DNA, 19 bp, Mus musculus
  siRNA target sequence for Tox (NM_145711.2,1081-1099).
gaatccaaatgctactttt

SEQ ID NO: 469875 - DNA, 19 bp, Mus musculus
  siRNA target sequence for Tox (NM_145711.2,1095-1113).
cttttggtgaagtatcgaa

SEQ ID NO: 469876 - DNA, 19 bp, Mus musculus
  siRNA target sequence for Tox (NM_145711.2,1148-1166).
gaacagaaacaggtctata

SEQ ID NO: 469877 - DNA, 19 bp, Mus musculus
  siRNA target sequence for Tox (NM_145711.2,1243-1261).
ctacactgatcctgttgat

SEQ ID NO: 469878 - DNA, 19 bp, Mus musculus
  siRNA target sequence for Tox (NM_145711.2,1253-1271).
cctgttgatgttaagacat

SEQ ID NO: 469879 - DNA, 19 bp, Mus musculus
  siRNA target sequence for Tox (NM_145711.2,1363-1381).
ccaacaaccaggaatgact

SEQ ID NO: 469880 - DNA, 19 bp, Mus musculus
  siRNA target sequence for Tox (NM_145711.2,1405-1423).
gagcctccccagaaacata

SEQ ID NO: 469881 - DNA, 19 bp, Mus musculus
  siRNA target sequence for Tox (NM_145711.2,1425-1443).
cacctaagcccaataacca

SEQ ID NO: 469882 - DNA, 19 bp, Mus musculus
  siRNA target sequence for Tox (NM_145711.2,1428-1446).
ctaagcccaataaccaaat

SEQ ID NO: 469883 - DNA, 19 bp, Mus musculus
  siRNA target sequence for Tox (NM_145711.2,1592-1610).
gtccagactgccttacact

SEQ ID NO: 469884 - DNA, 19 bp, Mus musculus
  siRNA target sequence for Tox (NM_145711.2,1624-1642).
gcaaggatttactcttcaa

SEQ ID NO: 469885 - DNA, 19 bp, Mus musculus
  siRNA target sequence for Tox (NM_145711.2,1635-1653).
ctcttcaacccgactatca

SEQ ID NO: 469886 - DNA, 19 bp, Mus musculus
  siRNA target sequence for Tox (NM_145711.2,1643-1661).
cccgactatcagactatta

SEQ ID NO: 469887 - DNA, 19 bp, Mus musculus
  siRNA target sequence for Tox (NM_145711.2,1644-1662).
ccgactatcagactattat

SEQ ID NO: 469888 - DNA, 19 bp, Mus musculus
  siRNA target sequence for Tox (NM_145711.2,1674-1692).
ctacagctgcacaagttgt

SEQ ID NO: 469889 - DNA, 19 bp, Mus musculus
  siRNA target sequence for Tox (NM_145711.2,1791-1809).
gggacaaagcgctgtatct

SEQ ID NO: 469890 - DNA, 19 bp, Mus musculus
  siRNA target sequence for Tox (NM_145711.2,1793-1811).
gacaaagcgctgtatctca

SEQ ID NO: 469891 - DNA, 19 bp, Mus musculus
  siRNA target sequence for Trerf1 (NM_172622.1,161-179).
gtggtgagaacctcttcta

SEQ ID NO: 469892 - DNA, 19 bp, Mus musculus
  siRNA target sequence for Trerf1 (NM_172622.1,222-240).
ctatgggaatacaatctct

SEQ ID NO: 469893 - DNA, 19 bp, Mus musculus
  siRNA target sequence for Trerf1 (NM_172622.1,279-297).
gcctcacttccctcaagat

SEQ ID NO: 469894 - DNA, 19 bp, Mus musculus
  siRNA target sequence for Trerf1 (NM_172622.1,421-439).
gccaactcaaacatgatgt

SEQ ID NO: 469895 - DNA, 19 bp, Mus musculus
  siRNA target sequence for Trerf1 (NM_172622.1,463-481).
cccgctgatggctaccaat

SEQ ID NO: 469896 - DNA, 19 bp, Mus musculus
  siRNA target sequence for Trerf1 (NM_172622.1,464-482).
ccgctgatggctaccaata

SEQ ID NO: 469897 - DNA, 19 bp, Mus musculus
  siRNA target sequence for Trerf1 (NM_172622.1,469-487).
gatggctaccaatacactt

SEQ ID NO: 469898 - DNA, 19 bp, Mus musculus
  siRNA target sequence for Trerf1 (NM_172622.1,472-490).
ggctaccaatacacttatt

SEQ ID NO: 469899 - DNA, 19 bp, Mus musculus
  siRNA target sequence for Trerf1 (NM_172622.1,549-567).
ctctttcacccaggtattt

SEQ ID NO: 469900 - DNA, 19 bp, Mus musculus
  siRNA target sequence for Trerf1 (NM_172622.1,582-600).
gcggattcaggtcaacaat

SEQ ID NO: 469901 - DNA, 19 bp, Mus musculus
  siRNA target sequence for Trerf1 (NM_172622.1,583-601).
cggattcaggtcaacaata

SEQ ID NO: 469902 - DNA, 19 bp, Mus musculus
  siRNA target sequence for Trerf1 (NM_172622.1,584-602).
ggattcaggtcaacaatat

SEQ ID NO: 469903 - DNA, 19 bp, Mus musculus
  siRNA target sequence for Trerf1 (NM_172622.1,801-819).
ccaagggcacctgtattat

SEQ ID NO: 469904 - DNA, 19 bp, Mus musculus
  siRNA target sequence for Trerf1 (NM_172622.1,805-823).
gggcacctgtattatgact

SEQ ID NO: 469905 - DNA, 19 bp, Mus musculus
  siRNA target sequence for Trerf1 (NM_172622.1,806-824).
ggcacctgtattatgacta

SEQ ID NO: 469906 - DNA, 19 bp, Mus musculus
  siRNA target sequence for Trerf1 (NM_172622.1,885-903).
gctgtccggccatatgcaa

SEQ ID NO: 469907 - DNA, 19 bp, Mus musculus
  siRNA target sequence for Trerf1 (NM_172622.1,890-908).
ccggccatatgcaacaatt

SEQ ID NO: 469908 - DNA, 19 bp, Mus musculus
  siRNA target sequence for Trerf1 (NM_172622.1,1321-1339).
gacggtcagctgaagacat

SEQ ID NO: 469909 - DNA, 19 bp, Mus musculus
  siRNA target sequence for Trerf1 (NM_172622.1,1323-1341).
cggtcagctgaagacatat

SEQ ID NO: 469910 - DNA, 19 bp, Mus musculus
  siRNA target sequence for Trerf1 (NM_172622.1,1327-1345).
cagctgaagacatattcta

SEQ ID NO: 469911 - DNA, 19 bp, Mus musculus
  siRNA target sequence for Trerf1 (NM_172622.1,1414-1432).
gatccagccagctcagaaa

SEQ ID NO: 469912 - DNA, 19 bp, Mus musculus
  siRNA target sequence for Trerf1 (NM_172622.1,1417-1435).
ccagccagctcagaaatga

SEQ ID NO: 469913 - DNA, 19 bp, Mus musculus
  siRNA target sequence for Trerf1 (NM_172622.1,1434-1452).
gactcgggtcactagtact

SEQ ID NO: 469914 - DNA, 19 bp, Mus musculus
  siRNA target sequence for Trerf1 (NM_172622.1,1605-1623).
ccaaaccaaaggagtgttt

SEQ ID NO: 469915 - DNA, 19 bp, Mus musculus
  siRNA target sequence for Trerf1 (NM_172622.1,1616-1634).
gagtgtttggggaacagtt

SEQ ID NO: 469916 - DNA, 19 bp, Mus musculus
  siRNA target sequence for Trerf1 (NM_172622.1,2464-2482).
gttgaaccacgcatcaaca

SEQ ID NO: 469917 - DNA, 19 bp, Mus musculus
  siRNA target sequence for Trerf1 (NM_172622.1,2552-2570).
gggccacactggtatggaa

SEQ ID NO: 469918 - DNA, 19 bp, Mus musculus
  siRNA target sequence for Trerf1 (NM_172622.1,2611-2629).
gtggagaatcttctgaatt

SEQ ID NO: 469919 - DNA, 19 bp, Mus musculus
  siRNA target sequence for Trerf1 (NM_172622.1,2614-2632).
gagaatcttctgaatttgt

SEQ ID NO: 469920 - DNA, 19 bp, Mus musculus
  siRNA target sequence for Trerf1 (NM_172622.1,2740-2758).
cggaagccagtcaggttaa

SEQ ID NO: 469921 - DNA, 19 bp, Mus musculus
  siRNA target sequence for Trerf1 (NM_172622.1,2745-2763).
gccagtcaggttaaaatgt

SEQ ID NO: 469922 - DNA, 19 bp, Mus musculus
  siRNA target sequence for Trerf1 (NM_172622.1,2747-2765).
cagtcaggttaaaatgtca

SEQ ID NO: 469923 - DNA, 19 bp, Mus musculus
  siRNA target sequence for Trerf1 (NM_172622.1,2762-2780).
gtcatcctttagcaaatta

SEQ ID NO: 469924 - DNA, 19 bp, Mus musculus
  siRNA target sequence for Trerf1 (NM_172622.1,2802-2820).
gtggacatccctagaaaga

SEQ ID NO: 469925 - DNA, 19 bp, Mus musculus
  siRNA target sequence for Trerf1 (NM_172622.1,2810-2828).
ccctagaaagaaaactgtt

SEQ ID NO: 469926 - DNA, 19 bp, Mus musculus
  siRNA target sequence for Trerf1 (NM_172622.1,2846-2864).
cttacagcaaagactttat

SEQ ID NO: 469927 - DNA, 19 bp, Mus musculus
  siRNA target sequence for Trerf1 (NM_172622.1,2963-2981).
cacgcctggcggaaatcat

SEQ ID NO: 469928 - DNA, 19 bp, Mus musculus
  siRNA target sequence for Trerf1 (NM_172622.1,2966-2984).
gcctggcggaaatcattga

SEQ ID NO: 469929 - DNA, 19 bp, Mus musculus
  siRNA target sequence for Trerf1 (NM_172622.1,3414-3432).
ggtcttctttaagatcaaa

SEQ ID NO: 469930 - DNA, 19 bp, Mus musculus
  siRNA target sequence for Trerf1 (NM_172622.1,3435-3453).
ccggaatgcgcacatgaaa

SEQ ID NO: 469931 - DNA, 19 bp, Mus musculus
  siRNA target sequence for Trerf1 (NM_172622.1,3436-3454).
cggaatgcgcacatgaaaa

SEQ ID NO: 469932 - DNA, 19 bp, Mus musculus
  siRNA target sequence for Trerf1 (NM_172622.1,3685-3703).
ctcttggacgaccaagatt

SEQ ID NO: 469933 - DNA, 19 bp, Mus musculus
  siRNA target sequence for Trerf1 (NM_172622.1,3696-3714).
ccaagattcggttttgctt

SEQ ID NO: 469934 - DNA, 19 bp, Mus musculus
  siRNA target sequence for Trim21 (NM_009277.2,193-211).
catggtggagcctatgagt

SEQ ID NO: 469935 - DNA, 19 bp, Mus musculus
  siRNA target sequence for Trim21 (NM_009277.2,200-218).
gagcctatgagtatcgaat

SEQ ID NO: 469936 - DNA, 19 bp, Mus musculus
  siRNA target sequence for Trim21 (NM_009277.2,234-252).
gcaaggaatgcatttttga

SEQ ID NO: 469937 - DNA, 19 bp, Mus musculus
  siRNA target sequence for Trim21 (NM_009277.2,235-253).
caaggaatgcatttttgaa

SEQ ID NO: 469938 - DNA, 19 bp, Mus musculus
  siRNA target sequence for Trim21 (NM_009277.2,238-256).
ggaatgcatttttgaagtt

SEQ ID NO: 469939 - DNA, 19 bp, Mus musculus
  siRNA target sequence for Trim21 (NM_009277.2,282-300).
ccgagtgccggcaacagtt

SEQ ID NO: 469940 - DNA, 19 bp, Mus musculus
  siRNA target sequence for Trim21 (NM_009277.2,283-301).
cgagtgccggcaacagttt

SEQ ID NO: 469941 - DNA, 19 bp, Mus musculus
  siRNA target sequence for Trim21 (NM_009277.2,313-331).
cctcaggcccaatagacat

SEQ ID NO: 469942 - DNA, 19 bp, Mus musculus
  siRNA target sequence for Trim21 (NM_009277.2,314-332).
ctcaggcccaatagacata

SEQ ID NO: 469943 - DNA, 19 bp, Mus musculus
  siRNA target sequence for Trim21 (NM_009277.2,316-334).
caggcccaatagacatata

SEQ ID NO: 469944 - DNA, 19 bp, Mus musculus
  siRNA target sequence for Trim21 (NM_009277.2,340-358).
catggtggaaaaccttaaa

SEQ ID NO: 469945 - DNA, 19 bp, Mus musculus
  siRNA target sequence for Trim21 (NM_009277.2,344-362).
gtggaaaaccttaaacaga

SEQ ID NO: 469946 - DNA, 19 bp, Mus musculus
  siRNA target sequence for Trim21 (NM_009277.2,548-566).
gtggctttagaaaaactga

SEQ ID NO: 469947 - DNA, 19 bp, Mus musculus
  siRNA target sequence for Trim21 (NM_009277.2,602-620).
gatctcacgatgcaaagaa

SEQ ID NO: 469948 - DNA, 19 bp, Mus musculus
  siRNA target sequence for Trim21 (NM_009277.2,666-684).
cagagttcgcacttcagaa

SEQ ID NO: 469949 - DNA, 19 bp, Mus musculus
  siRNA target sequence for Trim21 (NM_009277.2,898-916).
gaacctggacacgttagat

SEQ ID NO: 469950 - DNA, 19 bp, Mus musculus
  siRNA target sequence for Trim21 (NM_009277.2,901-919).
cctggacacgttagatatt

SEQ ID NO: 469951 - DNA, 19 bp, Mus musculus
  siRNA target sequence for Trim21 (NM_009277.2,920-938).
gacgccccagacctaacaa

SEQ ID NO: 469952 - DNA, 19 bp, Mus musculus
  siRNA target sequence for Trim21 (NM_009277.2,981-999).
gttgggttcatattactct

SEQ ID NO: 469953 - DNA, 19 bp, Mus musculus
  siRNA target sequence for Trim21 (NM_009277.2,1004-1022).
cgcaacaccgccaactcat

SEQ ID NO: 469954 - DNA, 19 bp, Mus musculus
  siRNA target sequence for Trim21 (NM_009277.2,1014-1032).
ccaactcatggctcatcat

SEQ ID NO: 469955 - DNA, 19 bp, Mus musculus
  siRNA target sequence for Trim21 (NM_009277.2,1020-1038).
catggctcatcatctcaaa

SEQ ID NO: 469956 - DNA, 19 bp, Mus musculus
  siRNA target sequence for Trim21 (NM_009277.2,1024-1042).
gctcatcatctcaaaggat

SEQ ID NO: 469957 - DNA, 19 bp, Mus musculus
  siRNA target sequence for Trim21 (NM_009277.2,1221-1239).
ggaaagggcagttttcact

SEQ ID NO: 469958 - DNA, 19 bp, Mus musculus
  siRNA target sequence for Trim21 (NM_009277.2,1253-1271).
ggcttctggaccatttggt

SEQ ID NO: 469959 - DNA, 19 bp, Mus musculus
  siRNA target sequence for Trim21 (NM_009277.2,1255-1273).
cttctggaccatttggtta

SEQ ID NO: 469960 - DNA, 19 bp, Mus musculus
  siRNA target sequence for Trim21 (NM_009277.2,1312-1330).
caccctccacattcaagta

SEQ ID NO: 469961 - DNA, 19 bp, Mus musculus
  siRNA target sequence for Trim21 (NM_009277.2,1373-1391).
gttgtctccttctacaaca

SEQ ID NO: 469962 - DNA, 19 bp, Mus musculus
  siRNA target sequence for Trim21 (NM_009277.2,1376-1394).
gtctccttctacaacataa

SEQ ID NO: 469963 - DNA, 19 bp, Mus musculus
  siRNA target sequence for Trim21 (NM_009277.2,1419-1437).
ccttctcggagtgtgtttt

SEQ ID NO: 469964 - DNA, 19 bp, Mus musculus
  siRNA target sequence for Trim21 (NM_009277.2,1488-1506).
gaaatgcagcgcctctaaa

SEQ ID NO: 469965 - DNA, 19 bp, Mus musculus
  siRNA target sequence for Trim24 (NM_145076.1,657-675).
cacccaagttggagtcatt

SEQ ID NO: 469966 - DNA, 19 bp, Mus musculus
  siRNA target sequence for Trim24 (NM_145076.1,661-679).
caagttggagtcattcgat

SEQ ID NO: 469967 - DNA, 19 bp, Mus musculus
  siRNA target sequence for Trim24 (NM_145076.1,710-728).
gacacatcatagacaactt

SEQ ID NO: 469968 - DNA, 19 bp, Mus musculus
  siRNA target sequence for Trim24 (NM_145076.1,714-732).
catcatagacaactttttt

SEQ ID NO: 469969 - DNA, 19 bp, Mus musculus
  siRNA target sequence for Trim24 (NM_145076.1,754-772).
cctagtagtacagtagaaa

SEQ ID NO: 469970 - DNA, 19 bp, Mus musculus
  siRNA target sequence for Trim24 (NM_145076.1,755-773).
ctagtagtacagtagaaaa

SEQ ID NO: 469971 - DNA, 19 bp, Mus musculus
  siRNA target sequence for Trim24 (NM_145076.1,774-792).
gtctaatcaggtatgtaca

SEQ ID NO: 469972 - DNA, 19 bp, Mus musculus
  siRNA target sequence for Trim24 (NM_145076.1,841-859).
gaatggctctgcaagacat

SEQ ID NO: 469973 - DNA, 19 bp, Mus musculus
  siRNA target sequence for Trim24 (NM_145076.1,845-863).
ggctctgcaagacatgtat

SEQ ID NO: 469974 - DNA, 19 bp, Mus musculus
  siRNA target sequence for Trim24 (NM_145076.1,846-864).
gctctgcaagacatgtatt

SEQ ID NO: 469975 - DNA, 19 bp, Mus musculus
  siRNA target sequence for Trim24 (NM_145076.1,847-865).
ctctgcaagacatgtatta

SEQ ID NO: 469976 - DNA, 19 bp, Mus musculus
  siRNA target sequence for Trim24 (NM_145076.1,874-892).
cagagggtgaagttcacaa

SEQ ID NO: 469977 - DNA, 19 bp, Mus musculus
  siRNA target sequence for Trim24 (NM_145076.1,948-966).
cagtcagcgaccagtgttt

SEQ ID NO: 469978 - DNA, 19 bp, Mus musculus
  siRNA target sequence for Trim24 (NM_145076.1,993-1011).
gaaactttactgtgaaaca

SEQ ID NO: 469979 - DNA, 19 bp, Mus musculus
  siRNA target sequence for Trim24 (NM_145076.1,1006-1024).
gaaacatgtgataaactga

SEQ ID NO: 469980 - DNA, 19 bp, Mus musculus
  siRNA target sequence for Trim24 (NM_145076.1,1062-1080).
caggtatcaatttatagaa

SEQ ID NO: 469981 - DNA, 19 bp, Mus musculus
  siRNA target sequence for Trim24 (NM_145076.1,1092-1110).
gaatcaaaaagtgatcata

SEQ ID NO: 469982 - DNA, 19 bp, Mus musculus
  siRNA target sequence for Trim24 (NM_145076.1,1096-1114).
caaaaagtgatcatagata

SEQ ID NO: 469983 - DNA, 19 bp, Mus musculus
  siRNA target sequence for Trim24 (NM_145076.1,1102-1120).
gtgatcatagatactctaa

SEQ ID NO: 469984 - DNA, 19 bp, Mus musculus
  siRNA target sequence for Trim24 (NM_145076.1,1168-1186).
cagatccaaaataggataa

SEQ ID NO: 469985 - DNA, 19 bp, Mus musculus
  siRNA target sequence for Trim24 (NM_145076.1,1170-1188).
gatccaaaataggataatt

SEQ ID NO: 469986 - DNA, 19 bp, Mus musculus
  siRNA target sequence for Trim24 (NM_145076.1,1212-1230).
ggtggaacaggatattaaa

SEQ ID NO: 469987 - DNA, 19 bp, Mus musculus
  siRNA target sequence for Trim24 (NM_145076.1,1309-1327).
gaccatcgaatgaaactca

SEQ ID NO: 469988 - DNA, 19 bp, Mus musculus
  siRNA target sequence for Trim24 (NM_145076.1,1342-1360).
gaagtggctgggctttcta

SEQ ID NO: 469989 - DNA, 19 bp, Mus musculus
  siRNA target sequence for Trim24 (NM_145076.1,1352-1370).
ggctttctaagcagttaga

SEQ ID NO: 469990 - DNA, 19 bp, Mus musculus
  siRNA target sequence for Trim24 (NM_145076.1,1369-1387).
gagcacgtcatgcattttt

SEQ ID NO: 469991 - DNA, 19 bp, Mus musculus
  siRNA target sequence for Trim24 (NM_145076.1,1371-1389).
gcacgtcatgcatttttct

SEQ ID NO: 469992 - DNA, 19 bp, Mus musculus
  siRNA target sequence for Trim24 (NM_145076.1,1372-1390).
cacgtcatgcatttttcta

SEQ ID NO: 469993 - DNA, 19 bp, Mus musculus
  siRNA target sequence for Trim24 (NM_145076.1,1375-1393).
gtcatgcatttttctaaat

SEQ ID NO: 469994 - DNA, 19 bp, Mus musculus
  siRNA target sequence for Trim24 (NM_145076.1,1431-1449).
cagcaagcggctgattaca

SEQ ID NO: 469995 - DNA, 19 bp, Mus musculus
  siRNA target sequence for Trim24 (NM_145076.1,1433-1451).
gcaagcggctgattacata

SEQ ID NO: 469996 - DNA, 19 bp, Mus musculus
  siRNA target sequence for Trim24 (NM_145076.1,1554-1572).
caacttgggttctttagta

SEQ ID NO: 469997 - DNA, 19 bp, Mus musculus
  siRNA target sequence for Trim24 (NM_145076.1,1570-1588).
gtaatcgaggataaagaga

SEQ ID NO: 469998 - DNA, 19 bp, Mus musculus
  siRNA target sequence for Trim24 (NM_145076.1,1638-1656).
gccaccaggtggtttacct

SEQ ID NO: 469999 - DNA, 19 bp, Mus musculus
  siRNA target sequence for Trim24 (NM_145076.1,1639-1657).
ccaccaggtggtttacctt

SEQ ID NO: 470000 - DNA, 19 bp, Mus musculus
  siRNA target sequence for Trim24 (NM_145076.1,1686-1704).
gatcagcctagctcagtta

SEQ ID NO: 470001 - DNA, 19 bp, Mus musculus
  siRNA target sequence for Trim24 (NM_145076.1,1701-1719).
gttacgactccagcatatt

SEQ ID NO: 470002 - DNA, 19 bp, Mus musculus
  siRNA target sequence for Trim24 (NM_145076.1,1775-1793).
gtttaccaaaccctagaat

SEQ ID NO: 470003 - DNA, 19 bp, Mus musculus
  siRNA target sequence for Trim24 (NM_145076.1,1834-1852).
ccgccaccacgcttaataa

SEQ ID NO: 470004 - DNA, 19 bp, Mus musculus
  siRNA target sequence for Trim24 (NM_145076.1,1835-1853).
cgccaccacgcttaataaa

SEQ ID NO: 470005 - DNA, 19 bp, Mus musculus
  siRNA target sequence for Trim24 (NM_145076.1,1837-1855).
ccaccacgcttaataaact

SEQ ID NO: 470006 - DNA, 19 bp, Mus musculus
  siRNA target sequence for Trim24 (NM_145076.1,1838-1856).
caccacgcttaataaactt

SEQ ID NO: 470007 - DNA, 19 bp, Mus musculus
  siRNA target sequence for Trim24 (NM_145076.1,1841-1859).
cacgcttaataaactttca

SEQ ID NO: 470008 - DNA, 19 bp, Mus musculus
  siRNA target sequence for Trim24 (NM_145076.1,1843-1861).
cgcttaataaactttcaga

SEQ ID NO: 470009 - DNA, 19 bp, Mus musculus
  siRNA target sequence for Trim24 (NM_145076.1,1845-1863).
cttaataaactttcagaat

SEQ ID NO: 470010 - DNA, 19 bp, Mus musculus
  siRNA target sequence for Trim24 (NM_145076.1,1986-2004).
ggctcaacaggccataaaa

SEQ ID NO: 470011 - DNA, 19 bp, Mus musculus
  siRNA target sequence for Trim24 (NM_145076.1,1988-2006).
ctcaacaggccataaaaca

SEQ ID NO: 470012 - DNA, 19 bp, Mus musculus
  siRNA target sequence for Trim24 (NM_145076.1,1990-2008).
caacaggccataaaacagt

SEQ ID NO: 470013 - DNA, 19 bp, Mus musculus
  siRNA target sequence for Trim24 (NM_145076.1,2065-2083).
ccgtccagccccacaatca

SEQ ID NO: 470014 - DNA, 19 bp, Mus musculus
  siRNA target sequence for Trim24 (NM_145076.1,2067-2085).
gtccagccccacaatcaca

SEQ ID NO: 470015 - DNA, 19 bp, Mus musculus
  siRNA target sequence for Trim24 (NM_145076.1,2095-2113).
gggtacgatggaaaagctt

SEQ ID NO: 470016 - DNA, 19 bp, Mus musculus
  siRNA target sequence for Trim24 (NM_145076.1,2096-2114).
ggtacgatggaaaagcttt

SEQ ID NO: 470017 - DNA, 19 bp, Mus musculus
  siRNA target sequence for Trim24 (NM_145076.1,2117-2135).
gttcacccatgattgatct

SEQ ID NO: 470018 - DNA, 19 bp, Mus musculus
  siRNA target sequence for Trim24 (NM_145076.1,2143-2161).
ccggtgggagggtcttaca

SEQ ID NO: 470019 - DNA, 19 bp, Mus musculus
  siRNA target sequence for Trim24 (NM_145076.1,2144-2162).
cggtgggagggtcttacaa

SEQ ID NO: 470020 - DNA, 19 bp, Mus musculus
  siRNA target sequence for Trim24 (NM_145076.1,2179-2197).
gatattgattgttcaagta

SEQ ID NO: 470021 - DNA, 19 bp, Mus musculus
  siRNA target sequence for Trim24 (NM_145076.1,2189-2207).
gttcaagtactataatgtt

SEQ ID NO: 470022 - DNA, 19 bp, Mus musculus
  siRNA target sequence for Trim24 (NM_145076.1,2198-2216).
ctataatgttggacaacat

SEQ ID NO: 470023 - DNA, 19 bp, Mus musculus
  siRNA target sequence for Trim24 (NM_145076.1,2208-2226).
ggacaacattgcaaggaaa

SEQ ID NO: 470024 - DNA, 19 bp, Mus musculus
  siRNA target sequence for Trim24 (NM_145076.1,2251-2269).
ccgaggcctccgtcaaaca

SEQ ID NO: 470025 - DNA, 19 bp, Mus musculus
  siRNA target sequence for Trim24 (NM_145076.1,2337-2355).
cgtccatcccccaatacgt

SEQ ID NO: 470026 - DNA, 19 bp, Mus musculus
  siRNA target sequence for Trim24 (NM_145076.1,2410-2428).
ccagcaggagctgattcta

SEQ ID NO: 470027 - DNA, 19 bp, Mus musculus
  siRNA target sequence for Trim24 (NM_145076.1,2448-2466).
catgctggagccaattcga

SEQ ID NO: 470028 - DNA, 19 bp, Mus musculus
  siRNA target sequence for Trim24 (NM_145076.1,2452-2470).
ctggagccaattcgaataa

SEQ ID NO: 470029 - DNA, 19 bp, Mus musculus
  siRNA target sequence for Trim24 (NM_145076.1,2454-2472).
ggagccaattcgaataaaa

SEQ ID NO: 470030 - DNA, 19 bp, Mus musculus
  siRNA target sequence for Trim24 (NM_145076.1,2488-2506).
ccacctgaaaattatgatt

SEQ ID NO: 470031 - DNA, 19 bp, Mus musculus
  siRNA target sequence for Trim24 (NM_145076.1,2542-2560).
gaatctagacctcaaaata

SEQ ID NO: 470032 - DNA, 19 bp, Mus musculus
  siRNA target sequence for Trim24 (NM_145076.1,2546-2564).
ctagacctcaaaatactaa

SEQ ID NO: 470033 - DNA, 19 bp, Mus musculus
  siRNA target sequence for Trim24 (NM_145076.1,2549-2567).
gacctcaaaatactaacta

SEQ ID NO: 470034 - DNA, 19 bp, Mus musculus
  siRNA target sequence for Trim24 (NM_145076.1,2581-2599).
cttacctccctcctcttaa

SEQ ID NO: 470035 - DNA, 19 bp, Mus musculus
  siRNA target sequence for Trim24 (NM_145076.1,2623-2641).
gaggaaaccgtgttacgat

SEQ ID NO: 470036 - DNA, 19 bp, Mus musculus
  siRNA target sequence for Trim24 (NM_145076.1,2817-2835).
cctatgctgtgagaaatgt

SEQ ID NO: 470037 - DNA, 19 bp, Mus musculus
  siRNA target sequence for Trim24 (NM_145076.1,2823-2841).
ctgtgagaaatgtcctaaa

SEQ ID NO: 470038 - DNA, 19 bp, Mus musculus
  siRNA target sequence for Trim24 (NM_145076.1,2827-2845).
gagaaatgtcctaaagtat

SEQ ID NO: 470039 - DNA, 19 bp, Mus musculus
  siRNA target sequence for Trim24 (NM_145076.1,2924-2942).
ctaagccagaggttgacta

SEQ ID NO: 470040 - DNA, 19 bp, Mus musculus
  siRNA target sequence for Trim24 (NM_145076.1,2986-3004).
gaaggccttactaagttaa

SEQ ID NO: 470041 - DNA, 19 bp, Mus musculus
  siRNA target sequence for Trim24 (NM_145076.1,2996-3014).
ctaagttaacgccaataga

SEQ ID NO: 470042 - DNA, 19 bp, Mus musculus
  siRNA target sequence for Trim24 (NM_145076.1,3000-3018).
gttaacgccaatagacaaa

SEQ ID NO: 470043 - DNA, 19 bp, Mus musculus
  siRNA target sequence for Trim24 (NM_145076.1,3026-3044).
gtgaacgcctacttctgtt

SEQ ID NO: 470044 - DNA, 19 bp, Mus musculus
  siRNA target sequence for Trim24 (NM_145076.1,3089-3107).
ctctaactgtgcctgatta

SEQ ID NO: 470045 - DNA, 19 bp, Mus musculus
  siRNA target sequence for Trim24 (NM_145076.1,3091-3109).
ctaactgtgcctgattatt

SEQ ID NO: 470046 - DNA, 19 bp, Mus musculus
  siRNA target sequence for Trim24 (NM_145076.1,3135-3153).
cttgtcaaccatcaagaaa

SEQ ID NO: 470047 - DNA, 19 bp, Mus musculus
  siRNA target sequence for Trim24 (NM_145076.1,3157-3175).
cttcaggaggattattgca

SEQ ID NO: 470048 - DNA, 19 bp, Mus musculus
  siRNA target sequence for Trim24 (NM_145076.1,3165-3183).
ggattattgcatgtataca

SEQ ID NO: 470049 - DNA, 19 bp, Mus musculus
  siRNA target sequence for Trim24 (NM_145076.1,3259-3277).
gtagccaatgctggtataa

SEQ ID NO: 470050 - DNA, 19 bp, Mus musculus
  siRNA target sequence for Trim24 (NM_145076.1,3313-3331).
ctttatccagaaaaaaggt

SEQ ID NO: 470051 - DNA, 19 bp, Mus musculus
  siRNA target sequence for Trim24 (NM_145076.1,3329-3347).
ggtttcctaaggtagaatt

SEQ ID NO: 470052 - DNA, 19 bp, Mus musculus
  siRNA target sequence for Trim24 (NM_145076.1,3355-3373).
gaagcagaagactgtaagt

SEQ ID NO: 470053 - DNA, 19 bp, Mus musculus
  siRNA target sequence for Trim24 (NM_145076.1,3436-3454).
gatcgccagctgcttaagt

SEQ ID NO: 470054 - DNA, 19 bp, Mus musculus
  siRNA target sequence for Trim27 (NM_009054.1,33-51).
cctacttcagcctaagcta

SEQ ID NO: 470055 - DNA, 19 bp, Mus musculus
  siRNA target sequence for Trim27 (NM_009054.1,225-243).
ccgtgtgccttcagtactt

SEQ ID NO: 470056 - DNA, 19 bp, Mus musculus
  siRNA target sequence for Trim27 (NM_009054.1,794-812).
ctcgacttggccatctata

SEQ ID NO: 470057 - DNA, 19 bp, Mus musculus
  siRNA target sequence for Trim27 (NM_009054.1,797-815).
gacttggccatctataaca

SEQ ID NO: 470058 - DNA, 19 bp, Mus musculus
  siRNA target sequence for Trim27 (NM_009054.1,903-921).
ccacgcgggagctcttaca

SEQ ID NO: 470059 - DNA, 19 bp, Mus musculus
  siRNA target sequence for Trim27 (NM_009054.1,976-994).
gatcacacccccagatcta

SEQ ID NO: 470060 - DNA, 19 bp, Mus musculus
  siRNA target sequence for Trim27 (NM_009054.1,984-1002).
ccccagatctacaagagaa

SEQ ID NO: 470061 - DNA, 19 bp, Mus musculus
  siRNA target sequence for Trim27 (NM_009054.1,1007-1025).
catatttttgcccaaaaat

SEQ ID NO: 470062 - DNA, 19 bp, Mus musculus
  siRNA target sequence for Trim27 (NM_009054.1,1158-1176).
gtctgattctttctgataa

SEQ ID NO: 470063 - DNA, 19 bp, Mus musculus
  siRNA target sequence for Trim27 (NM_009054.1,1181-1199).
cggcaagtacggtacagtt

SEQ ID NO: 470064 - DNA, 19 bp, Mus musculus
  siRNA target sequence for Trim27 (NM_009054.1,1182-1200).
ggcaagtacggtacagtta

SEQ ID NO: 470065 - DNA, 19 bp, Mus musculus
  siRNA target sequence for Trim27 (NM_009054.1,1222-1240).
caaccctgagcgattcaat

SEQ ID NO: 470066 - DNA, 19 bp, Mus musculus
  siRNA target sequence for Trim27 (NM_009054.1,1227-1245).
ctgagcgattcaatctgtt

SEQ ID NO: 470067 - DNA, 19 bp, Mus musculus
  siRNA target sequence for Trim27 (NM_009054.1,1408-1426).
gtggtatgggaaagaatat

SEQ ID NO: 470068 - DNA, 19 bp, Mus musculus
  siRNA target sequence for Trim27 (NM_009054.1,1421-1439).
gaatattgggctcttacat

SEQ ID NO: 470069 - DNA, 19 bp, Mus musculus
  siRNA target sequence for Trim27 (NM_009054.1,1509-1527).
gtgaggtttccttctacaa

SEQ ID NO: 470070 - DNA, 19 bp, Mus musculus
  siRNA target sequence for Trim27 (NM_009054.1,1535-1553).
gagagatgccataccttta

SEQ ID NO: 470071 - DNA, 19 bp, Mus musculus
  siRNA target sequence for Trim27 (NM_009054.1,1537-1555).
gagatgccatacctttact

SEQ ID NO: 470072 - DNA, 19 bp, Mus musculus
  siRNA target sequence for Trim27 (NM_009054.1,1539-1557).
gatgccatacctttacttt

SEQ ID NO: 470073 - DNA, 19 bp, Mus musculus
  siRNA target sequence for Trim27 (NM_009054.1,1636-1654).
gatcatctgccctatgagt

SEQ ID NO: 470074 - DNA, 19 bp, Mus musculus
  siRNA target sequence for Trim27 (NM_009054.1,1645-1663).
ccctatgagtgggattgat

SEQ ID NO: 470075 - DNA, 19 bp, Mus musculus
  siRNA target sequence for Trim28 (NM_011588.1,945-963).
catcgtggagaattatttt

SEQ ID NO: 470076 - DNA, 19 bp, Mus musculus
  siRNA target sequence for Trim28 (NM_011588.1,1039-1057).
gccccagccactagctatt

SEQ ID NO: 470077 - DNA, 19 bp, Mus musculus
  siRNA target sequence for Trim28 (NM_011588.1,1043-1061).
cagccactagctattgtgt

SEQ ID NO: 470078 - DNA, 19 bp, Mus musculus
  siRNA target sequence for Trim28 (NM_011588.1,1100-1118).
ctcaccagcgggtgaaata

SEQ ID NO: 470079 - DNA, 19 bp, Mus musculus
  siRNA target sequence for Trim28 (NM_011588.1,1102-1120).
caccagcgggtgaaataca

SEQ ID NO: 470080 - DNA, 19 bp, Mus musculus
  siRNA target sequence for Trim28 (NM_011588.1,1143-1161).
cacaggacctgctaagact

SEQ ID NO: 470081 - DNA, 19 bp, Mus musculus
  siRNA target sequence for Trim28 (NM_011588.1,1173-1191).
gcgaacagtctactgtaat

SEQ ID NO: 470082 - DNA, 19 bp, Mus musculus
  siRNA target sequence for Trim28 (NM_011588.1,1175-1193).
gaacagtctactgtaatgt

SEQ ID NO: 470083 - DNA, 19 bp, Mus musculus
  siRNA target sequence for Trim28 (NM_011588.1,1304-1322).
cagtgaggaaccaacgtaa

SEQ ID NO: 470084 - DNA, 19 bp, Mus musculus
  siRNA target sequence for Trim28 (NM_011588.1,1310-1328).
ggaaccaacgtaaactctt

SEQ ID NO: 470085 - DNA, 19 bp, Mus musculus
  siRNA target sequence for Trim28 (NM_011588.1,1639-1657).
gctctcttgctctctaaga

SEQ ID NO: 470086 - DNA, 19 bp, Mus musculus
  siRNA target sequence for Trim28 (NM_011588.1,1917-1935).
gtcagatgatccctattca

SEQ ID NO: 470087 - DNA, 19 bp, Mus musculus
  siRNA target sequence for Trim28 (NM_011588.1,2060-2078).
gccagccaccagtcttcaa

SEQ ID NO: 470088 - DNA, 19 bp, Mus musculus
  siRNA target sequence for Trim28 (NM_011588.1,2099-2117).
ctgaggactacaatctgat

SEQ ID NO: 470089 - DNA, 19 bp, Mus musculus
  siRNA target sequence for Trim28 (NM_011588.1,2103-2121).
ggactacaatctgattgtt

SEQ ID NO: 470090 - DNA, 19 bp, Mus musculus
  siRNA target sequence for Trim28 (NM_011588.1,2104-2122).
gactacaatctgattgtta

SEQ ID NO: 470091 - DNA, 19 bp, Mus musculus
  siRNA target sequence for Trim28 (NM_011588.1,2475-2493).
gtgtaaccagtgcgaattt

SEQ ID NO: 470092 - DNA, 19 bp, Mus musculus
  siRNA target sequence for Trim28 (NM_011588.1,2627-2645).
ctggtgtggtagctaaact

SEQ ID NO: 470093 - DNA, 19 bp, Mus musculus
  siRNA target sequence for Trim28 (NM_011588.1,2725-2743).
ctggctaccgactctacat

SEQ ID NO: 470094 - DNA, 19 bp, Mus musculus
  siRNA target sequence for Trim28 (NM_011588.1,2728-2746).
gctaccgactctacattct

SEQ ID NO: 470095 - DNA, 19 bp, Mus musculus
  siRNA target sequence for Trim28 (NM_011588.1,2858-2876).
gcatgttcaaacagttcaa

SEQ ID NO: 470096 - DNA, 19 bp, Mus musculus
  siRNA target sequence for Trim28 (NM_011588.1,2916-2934).
cggcttgcagcgcttcttt

SEQ ID NO: 470097 - DNA, 19 bp, Mus musculus
  siRNA target sequence for Trim28 (NM_011588.1,2931-2949).
ctttgagacacgcatgaat

SEQ ID NO: 470098 - DNA, 19 bp, Mus musculus
  siRNA target sequence for Trim28 (NM_011588.1,3010-3028).
cccagtgctggcctaagtt

SEQ ID NO: 470099 - DNA, 19 bp, Mus musculus
  siRNA target sequence for Trim30 (NM_009099.1,886-904).
gctgcagggtgcaaattgt

SEQ ID NO: 470100 - DNA, 19 bp, Mus musculus
  siRNA target sequence for Trim30 (NM_009099.1,996-1014).
gcatgctgcaagtgtatca

SEQ ID NO: 470101 - DNA, 19 bp, Mus musculus
  siRNA target sequence for Trim30 (NM_009099.1,997-1015).
catgctgcaagtgtatcaa

SEQ ID NO: 470102 - DNA, 19 bp, Mus musculus
  siRNA target sequence for Tsn (NM_011650.2,123-141).
catccgagaggaaatacga

SEQ ID NO: 470103 - DNA, 19 bp, Mus musculus
  siRNA target sequence for Tsn (NM_011650.2,128-146).
gagaggaaatacgaaaagt

SEQ ID NO: 470104 - DNA, 19 bp, Mus musculus
  siRNA target sequence for Tsn (NM_011650.2,132-150).
ggaaatacgaaaagttgta

SEQ ID NO: 470105 - DNA, 19 bp, Mus musculus
  siRNA target sequence for Tsn (NM_011650.2,140-158).
gaaaagttgtacagagttt

SEQ ID NO: 470106 - DNA, 19 bp, Mus musculus
  siRNA target sequence for Tsn (NM_011650.2,163-181).
caaactgctcgagagattt

SEQ ID NO: 470107 - DNA, 19 bp, Mus musculus
  siRNA target sequence for Tsn (NM_011650.2,240-258).
cttgaaagcgagagaacat

SEQ ID NO: 470108 - DNA, 19 bp, Mus musculus
  siRNA target sequence for Tsn (NM_011650.2,304-322).
cccgctgagcagtattaca

SEQ ID NO: 470109 - DNA, 19 bp, Mus musculus
  siRNA target sequence for Tsn (NM_011650.2,312-330).
gcagtattacaggtttcat

SEQ ID NO: 470110 - DNA, 19 bp, Mus musculus
  siRNA target sequence for Tsn (NM_011650.2,408-426).
gacccgagaggctgttaca

SEQ ID NO: 470111 - DNA, 19 bp, Mus musculus
  siRNA target sequence for Tsn (NM_011650.2,568-586).
cttcacatttctactttca

SEQ ID NO: 470112 - DNA, 19 bp, Mus musculus
  siRNA target sequence for Tsn (NM_011650.2,571-589).
cacatttctactttcatca

SEQ ID NO: 470113 - DNA, 19 bp, Mus musculus
  siRNA target sequence for Tsn (NM_011650.2,602-620).
ctggttttcgtcttctcaa

SEQ ID NO: 470114 - DNA, 19 bp, Mus musculus
  siRNA target sequence for Tsn (NM_011650.2,646-664).
cgctacgacggcttgaagt

SEQ ID NO: 470115 - DNA, 19 bp, Mus musculus
  siRNA target sequence for Tsn (NM_011650.2,656-674).
gcttgaagtacgatgtgaa

SEQ ID NO: 470116 - DNA, 19 bp, Mus musculus
  siRNA target sequence for Tsn (NM_011650.2,663-681).
gtacgatgtgaagaaagta

SEQ ID NO: 470117 - DNA, 19 bp, Mus musculus
  siRNA target sequence for Tsn (NM_011650.2,704-722).
ccatccgaggcttcaataa

SEQ ID NO: 470118 - DNA, 19 bp, Mus musculus
  siRNA target sequence for Tsn (NM_011650.2,733-751).
gcggcttgtggtgaaaaat

SEQ ID NO: 470119 - DNA, 19 bp, Mus musculus
  siRNA target sequence for Tspyl (NM_009433.2,293-311).
gttcgtgacaccgaaatat

SEQ ID NO: 470120 - DNA, 19 bp, Mus musculus
  siRNA target sequence for Tspyl (NM_009433.2,384-402).
gcggctgcagcggaaaagt

SEQ ID NO: 470121 - DNA, 19 bp, Mus musculus
  siRNA target sequence for Tspyl (NM_009433.2,386-404).
ggctgcagcggaaaagtca

SEQ ID NO: 470122 - DNA, 19 bp, Mus musculus
  siRNA target sequence for Tspyl (NM_009433.2,526-544).
ggcacctgggcatagatct

SEQ ID NO: 470123 - DNA, 19 bp, Mus musculus
  siRNA target sequence for Tspyl (NM_009433.2,527-545).
gcacctgggcatagatctt

SEQ ID NO: 470124 - DNA, 19 bp, Mus musculus
  siRNA target sequence for Tspyl (NM_009433.2,575-593).
ggaactggacactgtgaat

SEQ ID NO: 470125 - DNA, 19 bp, Mus musculus
  siRNA target sequence for Tspyl (NM_009433.2,660-678).
gaacggaggaactacatca

SEQ ID NO: 470126 - DNA, 19 bp, Mus musculus
  siRNA target sequence for Tspyl (NM_009433.2,664-682).
ggaggaactacatcattca

SEQ ID NO: 470127 - DNA, 19 bp, Mus musculus
  siRNA target sequence for Tspyl (NM_009433.2,726-744).
cagttgtccgccatgatta

SEQ ID NO: 470128 - DNA, 19 bp, Mus musculus
  siRNA target sequence for Tspyl (NM_009433.2,750-768).
cgggatgcagagatgttaa

SEQ ID NO: 470129 - DNA, 19 bp, Mus musculus
  siRNA target sequence for Tspyl (NM_009433.2,759-777).
gagatgttaaggtacgtaa

SEQ ID NO: 470130 - DNA, 19 bp, Mus musculus
  siRNA target sequence for Tspyl (NM_009433.2,817-835).
gctgcaaattcaagttctt

SEQ ID NO: 470131 - DNA, 19 bp, Mus musculus
  siRNA target sequence for Tspyl (NM_009433.2,840-858).
cgaagaaacccctacttca

SEQ ID NO: 470132 - DNA, 19 bp, Mus musculus
  siRNA target sequence for Tspyl (NM_009433.2,859-877).
gaaacaagctgattgtcaa

SEQ ID NO: 470133 - DNA, 19 bp, Mus musculus
  siRNA target sequence for Tspyl (NM_009433.2,869-887).
gattgtcaaggaatatgaa

SEQ ID NO: 470134 - DNA, 19 bp, Mus musculus
  siRNA target sequence for Tspyl (NM_009433.2,879-897).
gaatatgaagtgagatcat

SEQ ID NO: 470135 - DNA, 19 bp, Mus musculus
  siRNA target sequence for Tspyl (NM_009433.2,959-977).
cttcattcgcagaaaccaa

SEQ ID NO: 470136 - DNA, 19 bp, Mus musculus
  siRNA target sequence for Tspyl (NM_009433.2,1068-1086).
ccaaacccactgcaatact

SEQ ID NO: 470137 - DNA, 19 bp, Mus musculus
  siRNA target sequence for Tspyl (NM_009433.2,1069-1087).
caaacccactgcaatacta

SEQ ID NO: 470138 - DNA, 19 bp, Mus musculus
  siRNA target sequence for Tspyl (NM_009433.2,1113-1131).
ccccgacgtcgcccaataa

SEQ ID NO: 470139 - DNA, 19 bp, Mus musculus
  siRNA target sequence for Ubtf (NM_011551.2,112-130).
gctggtcccaggaagatat

SEQ ID NO: 470140 - DNA, 19 bp, Mus musculus
  siRNA target sequence for Ubtf (NM_011551.2,115-133).
ggtcccaggaagatatgct

SEQ ID NO: 470141 - DNA, 19 bp, Mus musculus
  siRNA target sequence for Ubtf (NM_011551.2,214-232).
gggaaaaagttgcgtttaa

SEQ ID NO: 470142 - DNA, 19 bp, Mus musculus
  siRNA target sequence for Ubtf (NM_011551.2,234-252).
gatttttcaggagatatgt

SEQ ID NO: 470143 - DNA, 19 bp, Mus musculus
  siRNA target sequence for Ubtf (NM_011551.2,258-276).
ctcaaatgggtggagattt

SEQ ID NO: 470144 - DNA, 19 bp, Mus musculus
  siRNA target sequence for Ubtf (NM_011551.2,321-339).
gatgctcaggaacatgtta

SEQ ID NO: 470145 - DNA, 19 bp, Mus musculus
  siRNA target sequence for Ubtf (NM_011551.2,325-343).
ctcaggaacatgttaaaaa

SEQ ID NO: 470146 - DNA, 19 bp, Mus musculus
  siRNA target sequence for Ubtf (NM_011551.2,368-386).
gaaacacccggattttcca

SEQ ID NO: 470147 - DNA, 19 bp, Mus musculus
  siRNA target sequence for Ubtf (NM_011551.2,667-685).
ggtacacccacgagaagaa

SEQ ID NO: 470148 - DNA, 19 bp, Mus musculus
  siRNA target sequence for Ubtf (NM_011551.2,822-840).
gagattatgcgggactata

SEQ ID NO: 470149 - DNA, 19 bp, Mus musculus
  siRNA target sequence for Ubtf (NM_011551.2,849-867).
caccctgagctgaacatca

SEQ ID NO: 470150 - DNA, 19 bp, Mus musculus
  siRNA target sequence for Ubtf (NM_011551.2,1075-1093).
cctatcacaagaaatgtga

SEQ ID NO: 470151 - DNA, 19 bp, Mus musculus
  siRNA target sequence for Ubtf (NM_011551.2,1532-1550).
gagtgtcatcggagactat

SEQ ID NO: 470152 - DNA, 19 bp, Mus musculus
  siRNA target sequence for Ubtf (NM_011551.2,1534-1552).
gtgtcatcggagactatct

SEQ ID NO: 470153 - DNA, 19 bp, Mus musculus
  siRNA target sequence for Ubtf (NM_011551.2,1571-1589).
ccgggtgaaagccttgaaa

SEQ ID NO: 470154 - DNA, 19 bp, Mus musculus
  siRNA target sequence for Ubtf (NM_011551.2,1659-1677).
gaccaaaaacgatatgaga

SEQ ID NO: 470155 - DNA, 19 bp, Mus musculus
  siRNA target sequence for Ubtf (NM_011551.2,1668-1686).
cgatatgagagagagttaa

SEQ ID NO: 470156 - DNA, 19 bp, Mus musculus
  siRNA target sequence for Ubtf (NM_011551.2,1799-1817).
gtccaatggggagctaaat

SEQ ID NO: 470157 - DNA, 19 bp, Mus musculus
  siRNA target sequence for Ubtf (NM_011551.2,1801-1819).
ccaatggggagctaaatca

SEQ ID NO: 470158 - DNA, 19 bp, Mus musculus
  siRNA target sequence for Ubtf (NM_011551.2,1879-1897).
gccagaaggagcactataa

SEQ ID NO: 470159 - DNA, 19 bp, Mus musculus
  siRNA target sequence for Ubtf (NM_011551.2,1970-1988).
ggaccgcgcagcatacaaa

SEQ ID NO: 470160 - DNA, 19 bp, Mus musculus
  siRNA target sequence for Ubtf (NM_011551.2,1973-1991).
ccgcgcagcatacaaagaa

SEQ ID NO: 470161 - DNA, 19 bp, Mus musculus
  siRNA target sequence for Ubtf (NM_011551.2,1974-1992).
cgcgcagcatacaaagaat

SEQ ID NO: 470162 - DNA, 19 bp, Mus musculus
  siRNA target sequence for Ubtf (NM_011551.2,1975-1993).
gcgcagcatacaaagaata

SEQ ID NO: 470163 - DNA, 19 bp, Mus musculus
  siRNA target sequence for Ubtf (NM_011551.2,1999-2017).
ccaataaacgtaagaacat

SEQ ID NO: 470164 - DNA, 19 bp, Mus musculus
  siRNA target sequence for Usf1 (NM_009480.1,365-383).
ccagtcagctgccactttt

SEQ ID NO: 470165 - DNA, 19 bp, Mus musculus
  siRNA target sequence for Usf1 (NM_009480.1,592-610).
ctgagacacattatacata

SEQ ID NO: 470166 - DNA, 19 bp, Mus musculus
  siRNA target sequence for Usf1 (NM_009480.1,594-612).
gagacacattatacatatt

SEQ ID NO: 470167 - DNA, 19 bp, Mus musculus
  siRNA target sequence for Usf1 (NM_009480.1,727-745).
caggtcaattctttgtgat

SEQ ID NO: 470168 - DNA, 19 bp, Mus musculus
  siRNA target sequence for Usf1 (NM_009480.1,730-748).
gtcaattctttgtgatgat

SEQ ID NO: 470169 - DNA, 19 bp, Mus musculus
  siRNA target sequence for Usf1 (NM_009480.1,743-761).
gatgatgtcaccacaagaa

SEQ ID NO: 470170 - DNA, 19 bp, Mus musculus
  siRNA target sequence for Usf1 (NM_009480.1,795-813).
cccaggacccacccttatt

SEQ ID NO: 470171 - DNA, 19 bp, Mus musculus
  siRNA target sequence for Usf1 (NM_009480.1,857-875).
gagggctcaacataacgaa

SEQ ID NO: 470172 - DNA, 19 bp, Mus musculus
  siRNA target sequence for Usf1 (NM_009480.1,1156-1174).
gactcgaggtcgtcatcaa

SEQ ID NO: 470173 - DNA, 19 bp, Mus musculus
  siRNA target sequence for Usf1 (NM_009480.1,1158-1176).
ctcgaggtcgtcatcaaga

SEQ ID NO: 470174 - DNA, 19 bp, Mus musculus
  siRNA target sequence for Usf1 (NM_009480.1,1160-1178).
cgaggtcgtcatcaagaat

SEQ ID NO: 470175 - DNA, 19 bp, Mus musculus
  siRNA target sequence for Wbscr14 (NM_021455.2,27-45).
cggatctatccgtgaactt

SEQ ID NO: 470176 - DNA, 19 bp, Mus musculus
  siRNA target sequence for Wbscr14 (NM_021455.2,388-406).
ctggagagcctggtacatt

SEQ ID NO: 470177 - DNA, 19 bp, Mus musculus
  siRNA target sequence for Wbscr14 (NM_021455.2,497-515).
gtcatcctggagggtaatt

SEQ ID NO: 470178 - DNA, 19 bp, Mus musculus
  siRNA target sequence for Wbscr14 (NM_021455.2,559-577).
gtggagaatctactacaaa

SEQ ID NO: 470179 - DNA, 19 bp, Mus musculus
  siRNA target sequence for Wbscr14 (NM_021455.2,882-900).
ccagcctagatgacttcat

SEQ ID NO: 470180 - DNA, 19 bp, Mus musculus
  siRNA target sequence for Wbscr14 (NM_021455.2,909-927).
cagatttcttcaccaatta

SEQ ID NO: 470181 - DNA, 19 bp, Mus musculus
  siRNA target sequence for Wbscr14 (NM_021455.2,1200-1218).
cgacccctctccttccatt

SEQ ID NO: 470182 - DNA, 19 bp, Mus musculus
  siRNA target sequence for Wbscr14 (NM_021455.2,1607-1625).
gacaacaacccctgtctta

SEQ ID NO: 470183 - DNA, 19 bp, Mus musculus
  siRNA target sequence for Wbscr14 (NM_021455.2,1609-1627).
caacaacccctgtcttaca

SEQ ID NO: 470184 - DNA, 19 bp, Mus musculus
  siRNA target sequence for Wbscr14 (NM_021455.2,1708-1726).
cccgcaggatacagtttct

SEQ ID NO: 470185 - DNA, 19 bp, Mus musculus
  siRNA target sequence for Wbscr14 (NM_021455.2,1710-1728).
cgcaggatacagtttctga

SEQ ID NO: 470186 - DNA, 19 bp, Mus musculus
  siRNA target sequence for Wbscr14 (NM_021455.2,1734-1752).
cccgtgcccgtgccttttt

SEQ ID NO: 470187 - DNA, 19 bp, Mus musculus
  siRNA target sequence for Wbscr14 (NM_021455.2,1870-1888).
cagtgagcggcgactatca

SEQ ID NO: 470188 - DNA, 19 bp, Mus musculus
  siRNA target sequence for Wbscr14 (NM_021455.2,1967-1985).
cgtgtagacaacaacaaga

SEQ ID NO: 470189 - DNA, 19 bp, Mus musculus
  siRNA target sequence for Wbscr14 (NM_021455.2,1968-1986).
gtgtagacaacaacaagat

SEQ ID NO: 470190 - DNA, 19 bp, Mus musculus
  siRNA target sequence for Wbscr14 (NM_021455.2,1987-2005).
ggagaaccgacgtatcaca

SEQ ID NO: 470191 - DNA, 19 bp, Mus musculus
  siRNA target sequence for Wbscr14 (NM_021455.2,2020-2038).
gcagaagaggcggttcaat

SEQ ID NO: 470192 - DNA, 19 bp, Mus musculus
  siRNA target sequence for Wbscr14 (NM_021455.2,2023-2041).
gaagaggcggttcaatatt

SEQ ID NO: 470193 - DNA, 19 bp, Mus musculus
  siRNA target sequence for Wbscr14 (NM_021455.2,2028-2046).
ggcggttcaatattaagct

SEQ ID NO: 470194 - DNA, 19 bp, Mus musculus
  siRNA target sequence for Wbscr14 (NM_021455.2,2029-2047).
gcggttcaatattaagcta

SEQ ID NO: 470195 - DNA, 19 bp, Mus musculus
  siRNA target sequence for Wbscr14 (NM_021455.2,2191-2209).
gcagctgcgggatgaaata

SEQ ID NO: 470196 - DNA, 19 bp, Mus musculus
  siRNA target sequence for Wbscr14 (NM_021455.2,2362-2380).
catcctcatccgaccttta

SEQ ID NO: 470197 - DNA, 19 bp, Mus musculus
  siRNA target sequence for Wbscr14 (NM_021455.2,2365-2383).
cctcatccgacctttattt

SEQ ID NO: 470198 - DNA, 19 bp, Mus musculus
  siRNA target sequence for Wbscr14 (NM_021455.2,2368-2386).
catccgacctttatttgaa

SEQ ID NO: 470199 - DNA, 19 bp, Mus musculus
  siRNA target sequence for Wbscr14 (NM_021455.2,2373-2391).
gacctttatttgaatcctt

SEQ ID NO: 470200 - DNA, 19 bp, Mus musculus
  siRNA target sequence for Wbscr14 (NM_021455.2,2480-2498).
cggccaactgtcctgaatt

SEQ ID NO: 470201 - DNA, 19 bp, Mus musculus
  siRNA target sequence for Wrn (NM_011721.2,270-288).
gtctatgcagagtcaaaga

SEQ ID NO: 470202 - DNA, 19 bp, Mus musculus
  siRNA target sequence for Wrn (NM_011721.2,312-330).
cgttcagaagagtgttctt

SEQ ID NO: 470203 - DNA, 19 bp, Mus musculus
  siRNA target sequence for Wrn (NM_011721.2,362-380).
gatccattgtttacagtta

SEQ ID NO: 470204 - DNA, 19 bp, Mus musculus
  siRNA target sequence for Wrn (NM_011721.2,365-383).
ccattgtttacagttatga

SEQ ID NO: 470205 - DNA, 19 bp, Mus musculus
  siRNA target sequence for Wrn (NM_011721.2,375-393).
cagttatgaagctagtgat

SEQ ID NO: 470206 - DNA, 19 bp, Mus musculus
  siRNA target sequence for Wrn (NM_011721.2,445-463).
gtgggatttgacatggaat

SEQ ID NO: 470207 - DNA, 19 bp, Mus musculus
  siRNA target sequence for Wrn (NM_011721.2,565-583).
gttttcccccagggattaa

SEQ ID NO: 470208 - DNA, 19 bp, Mus musculus
  siRNA target sequence for Wrn (NM_011721.2,576-594).
gggattaaaaatgttacta

SEQ ID NO: 470209 - DNA, 19 bp, Mus musculus
  siRNA target sequence for Wrn (NM_011721.2,656-674).
gtgattttgacgtcaagtt

SEQ ID NO: 470210 - DNA, 19 bp, Mus musculus
  siRNA target sequence for Wrn (NM_011721.2,666-684).
cgtcaagttggagagtttt

SEQ ID NO: 470211 - DNA, 19 bp, Mus musculus
  siRNA target sequence for Wrn (NM_011721.2,693-711).
gacggatgttgccaatgaa

SEQ ID NO: 470212 - DNA, 19 bp, Mus musculus
  siRNA target sequence for Wrn (NM_011721.2,695-713).
cggatgttgccaatgaaaa

SEQ ID NO: 470213 - DNA, 19 bp, Mus musculus
  siRNA target sequence for Wrn (NM_011721.2,759-777).
cgtcttagggaaacaactt

SEQ ID NO: 470214 - DNA, 19 bp, Mus musculus
  siRNA target sequence for Wrn (NM_011721.2,798-816).
ctgcagcaattggagtaat

SEQ ID NO: 470215 - DNA, 19 bp, Mus musculus
  siRNA target sequence for Wrn (NM_011721.2,800-818).
gcagcaattggagtaattt

SEQ ID NO: 470216 - DNA, 19 bp, Mus musculus
  siRNA target sequence for Wrn (NM_011721.2,859-877).
gcttatgctggtcttatca

SEQ ID NO: 470217 - DNA, 19 bp, Mus musculus
  siRNA target sequence for Wrn (NM_011721.2,860-878).
cttatgctggtcttatcat

SEQ ID NO: 470218 - DNA, 19 bp, Mus musculus
  siRNA target sequence for Wrn (NM_011721.2,868-886).
ggtcttatcatctatcaaa

SEQ ID NO: 470219 - DNA, 19 bp, Mus musculus
  siRNA target sequence for Wrn (NM_011721.2,869-887).
gtcttatcatctatcaaaa

SEQ ID NO: 470220 - DNA, 19 bp, Mus musculus
  siRNA target sequence for Wrn (NM_011721.2,1015-1033).
cctgtcacttgcagaaatt

SEQ ID NO: 470221 - DNA, 19 bp, Mus musculus
  siRNA target sequence for Wrn (NM_011721.2,1016-1034).
ctgtcacttgcagaaattt

SEQ ID NO: 470222 - DNA, 19 bp, Mus musculus
  siRNA target sequence for Wrn (NM_011721.2,1020-1038).
cacttgcagaaatttggaa

SEQ ID NO: 470223 - DNA, 19 bp, Mus musculus
  siRNA target sequence for Wrn (NM_011721.2,1025-1043).
gcagaaatttggaaactct

SEQ ID NO: 470224 - DNA, 19 bp, Mus musculus
  siRNA target sequence for Wrn (NM_011721.2,1049-1067).
gggttcctgtaatattgaa

SEQ ID NO: 470225 - DNA, 19 bp, Mus musculus
  siRNA target sequence for Wrn (NM_011721.2,1220-1238).
gtacttttgctaaaattaa

SEQ ID NO: 470226 - DNA, 19 bp, Mus musculus
  siRNA target sequence for Wrn (NM_011721.2,1256-1274).
cagaacttgacagtttagt

SEQ ID NO: 470227 - DNA, 19 bp, Mus musculus
  siRNA target sequence for Wrn (NM_011721.2,1258-1276).
gaacttgacagtttagtga

SEQ ID NO: 470228 - DNA, 19 bp, Mus musculus
  siRNA target sequence for Wrn (NM_011721.2,1282-1300).
gaggaggttgatgtattta

SEQ ID NO: 470229 - DNA, 19 bp, Mus musculus
  siRNA target sequence for Wrn (NM_011721.2,1371-1389).
ggaaagaacttgtgtgatt

SEQ ID NO: 470230 - DNA, 19 bp, Mus musculus
  siRNA target sequence for Wrn (NM_011721.2,1379-1397).
cttgtgtgattcctagtat

SEQ ID NO: 470231 - DNA, 19 bp, Mus musculus
  siRNA target sequence for Wrn (NM_011721.2,1422-1440).
ggaacagcaagctaaagaa

SEQ ID NO: 470232 - DNA, 19 bp, Mus musculus
  siRNA target sequence for Wrn (NM_011721.2,1464-1482).
ccaactttctgagcattta

SEQ ID NO: 470233 - DNA, 19 bp, Mus musculus
  siRNA target sequence for Wrn (NM_011721.2,1498-1516).
gagaatgactcctcctata

SEQ ID NO: 470234 - DNA, 19 bp, Mus musculus
  siRNA target sequence for Wrn (NM_011721.2,1500-1518).
gaatgactcctcctatata

SEQ ID NO: 470235 - DNA, 19 bp, Mus musculus
  siRNA target sequence for Wrn (NM_011721.2,1506-1524).
ctcctcctatataattgaa

SEQ ID NO: 470236 - DNA, 19 bp, Mus musculus
  siRNA target sequence for Wrn (NM_011721.2,1511-1529).
cctatataattgaaagtga

SEQ ID NO: 470237 - DNA, 19 bp, Mus musculus
  siRNA target sequence for Wrn (NM_011721.2,1608-1626).
gttggaaatgggaaccaat

SEQ ID NO: 470238 - DNA, 19 bp, Mus musculus
  siRNA target sequence for Wrn (NM_011721.2,1710-1728).
ggaacccaacgcaaagcaa

SEQ ID NO: 470239 - DNA, 19 bp, Mus musculus
  siRNA target sequence for Wrn (NM_011721.2,1752-1770).
cggacacagcagttttaaa

SEQ ID NO: 470240 - DNA, 19 bp, Mus musculus
  siRNA target sequence for Wrn (NM_011721.2,1771-1789).
ccggttcagtggaaagtca

SEQ ID NO: 470241 - DNA, 19 bp, Mus musculus
  siRNA target sequence for Wrn (NM_011721.2,1772-1790).
cggttcagtggaaagtcat

SEQ ID NO: 470242 - DNA, 19 bp, Mus musculus
  siRNA target sequence for Wrn (NM_011721.2,1777-1795).
cagtggaaagtcatccatt

SEQ ID NO: 470243 - DNA, 19 bp, Mus musculus
  siRNA target sequence for Wrn (NM_011721.2,1863-1881).
ccagtatccgcctgtttat

SEQ ID NO: 470244 - DNA, 19 bp, Mus musculus
  siRNA target sequence for Wrn (NM_011721.2,1864-1882).
cagtatccgcctgtttata

SEQ ID NO: 470245 - DNA, 19 bp, Mus musculus
  siRNA target sequence for Wrn (NM_011721.2,1866-1884).
gtatccgcctgtttataca

SEQ ID NO: 470246 - DNA, 19 bp, Mus musculus
  siRNA target sequence for Wrn (NM_011721.2,1885-1903).
ggcaagattggcattgtca

SEQ ID NO: 470247 - DNA, 19 bp, Mus musculus
  siRNA target sequence for Wrn (NM_011721.2,1887-1905).
caagattggcattgtcatt

SEQ ID NO: 470248 - DNA, 19 bp, Mus musculus
  siRNA target sequence for Wrn (NM_011721.2,1907-1925).
cacctctcatttccttaat

SEQ ID NO: 470249 - DNA, 19 bp, Mus musculus
  siRNA target sequence for Wrn (NM_011721.2,2021-2039).
gcaaatatagggtcatcta

SEQ ID NO: 470250 - DNA, 19 bp, Mus musculus
  siRNA target sequence for Wrn (NM_011721.2,2060-2078).
ctggtaacttggatctact

SEQ ID NO: 470251 - DNA, 19 bp, Mus musculus
  siRNA target sequence for Wrn (NM_011721.2,2141-2159).
cagagtggggccatgattt

SEQ ID NO: 470252 - DNA, 19 bp, Mus musculus
  siRNA target sequence for Wrn (NM_011721.2,2151-2169).
ccatgatttcagaagttca

SEQ ID NO: 470253 - DNA, 19 bp, Mus musculus
  siRNA target sequence for Wrn (NM_011721.2,2174-2192).
ggatgctgggctctcttaa

SEQ ID NO: 470254 - DNA, 19 bp, Mus musculus
  siRNA target sequence for Wrn (NM_011721.2,2175-2193).
gatgctgggctctcttaaa

SEQ ID NO: 470255 - DNA, 19 bp, Mus musculus
  siRNA target sequence for Wrn (NM_011721.2,2178-2196).
gctgggctctcttaaaaca

SEQ ID NO: 470256 - DNA, 19 bp, Mus musculus
  siRNA target sequence for Wrn (NM_011721.2,2306-2324).
gatttgatcggccaaatct

SEQ ID NO: 470257 - DNA, 19 bp, Mus musculus
  siRNA target sequence for Wrn (NM_011721.2,2316-2334).
gccaaatctgtacttagaa

SEQ ID NO: 470258 - DNA, 19 bp, Mus musculus
  siRNA target sequence for Wrn (NM_011721.2,2396-2414).
gttctgcctgggaatttga

SEQ ID NO: 470259 - DNA, 19 bp, Mus musculus
  siRNA target sequence for Wrn (NM_011721.2,2430-2448).
ctattgtccttcgagaaaa

SEQ ID NO: 470260 - DNA, 19 bp, Mus musculus
  siRNA target sequence for Wrn (NM_011721.2,2506-2524).
cacgctggcatgaaaatta

SEQ ID NO: 470261 - DNA, 19 bp, Mus musculus
  siRNA target sequence for Wrn (NM_011721.2,2571-2589).
gtgtgttgtagctactgta

SEQ ID NO: 470262 - DNA, 19 bp, Mus musculus
  siRNA target sequence for Wrn (NM_011721.2,2614-2632).
gctgacattcgcaaagtta

SEQ ID NO: 470263 - DNA, 19 bp, Mus musculus
  siRNA target sequence for Wrn (NM_011721.2,2615-2633).
ctgacattcgcaaagttat

SEQ ID NO: 470264 - DNA, 19 bp, Mus musculus
  siRNA target sequence for Wrn (NM_011721.2,2619-2637).
cattcgcaaagttattcat

SEQ ID NO: 470265 - DNA, 19 bp, Mus musculus
  siRNA target sequence for Wrn (NM_011721.2,2642-2660).
gtgcgcctaaggaaatgga

SEQ ID NO: 470266 - DNA, 19 bp, Mus musculus
  siRNA target sequence for Wrn (NM_011721.2,2664-2682).
ctattaccaggaaattggt

SEQ ID NO: 470267 - DNA, 19 bp, Mus musculus
  siRNA target sequence for Wrn (NM_011721.2,2731-2749).
ccagcagactttaacacat

SEQ ID NO: 470268 - DNA, 19 bp, Mus musculus
  siRNA target sequence for Wrn (NM_011721.2,2747-2765).
catccaggaatctccttat

SEQ ID NO: 470269 - DNA, 19 bp, Mus musculus
  siRNA target sequence for Wrn (NM_011721.2,2750-2768).
ccaggaatctccttattga

SEQ ID NO: 470270 - DNA, 19 bp, Mus musculus
  siRNA target sequence for Wrn (NM_011721.2,2754-2772).
gaatctccttattgagatt

SEQ ID NO: 470271 - DNA, 19 bp, Mus musculus
  siRNA target sequence for Wrn (NM_011721.2,2779-2797).
gaaaagttccggttatata

SEQ ID NO: 470272 - DNA, 19 bp, Mus musculus
  siRNA target sequence for Wrn (NM_011721.2,2784-2802).
gttccggttatataaatta

SEQ ID NO: 470273 - DNA, 19 bp, Mus musculus
  siRNA target sequence for Wrn (NM_011721.2,2846-2864).
gtaggcgacgaatcatctt

SEQ ID NO: 470274 - DNA, 19 bp, Mus musculus
  siRNA target sequence for Wrn (NM_011721.2,2939-2957).
gcaggcccaggctgaatca

SEQ ID NO: 470275 - DNA, 19 bp, Mus musculus
  siRNA target sequence for Wrn (NM_011721.2,2940-2958).
caggcccaggctgaatcat

SEQ ID NO: 470276 - DNA, 19 bp, Mus musculus
  siRNA target sequence for Wrn (NM_011721.2,2982-3000).
ggacgcatcccaagacttt

SEQ ID NO: 470277 - DNA, 19 bp, Mus musculus
  siRNA target sequence for Wrn (NM_011721.2,3062-3080).
ggattccgatcttatttct

SEQ ID NO: 470278 - DNA, 19 bp, Mus musculus
  siRNA target sequence for Wrn (NM_011721.2,3095-3113).
ctcagcgtcttcctgataa

SEQ ID NO: 470279 - DNA, 19 bp, Mus musculus
  siRNA target sequence for Wrn (NM_011721.2,3097-3115).
cagcgtcttcctgataaat

SEQ ID NO: 470280 - DNA, 19 bp, Mus musculus
  siRNA target sequence for Wrn (NM_011721.2,3099-3117).
gcgtcttcctgataaatat

SEQ ID NO: 470281 - DNA, 19 bp, Mus musculus
  siRNA target sequence for Wrn (NM_011721.2,3305-3323).
gccttctccttcaagctaa

SEQ ID NO: 470282 - DNA, 19 bp, Mus musculus
  siRNA target sequence for Wrn (NM_011721.2,3346-3364).
gttctgctaccaagttcta

SEQ ID NO: 470283 - DNA, 19 bp, Mus musculus
  siRNA target sequence for Wrn (NM_011721.2,3351-3369).
gctaccaagttctaatcct

SEQ ID NO: 470284 - DNA, 19 bp, Mus musculus
  siRNA target sequence for Wrn (NM_011721.2,3384-3402).
gacgcaacattcctctaat

SEQ ID NO: 470285 - DNA, 19 bp, Mus musculus
  siRNA target sequence for Wrn (NM_011721.2,3386-3404).
cgcaacattcctctaatca

SEQ ID NO: 470286 - DNA, 19 bp, Mus musculus
  siRNA target sequence for Wrn (NM_011721.2,3387-3405).
gcaacattcctctaatcaa

SEQ ID NO: 470287 - DNA, 19 bp, Mus musculus
  siRNA target sequence for Wrn (NM_011721.2,3403-3421).
caaaacccagctggattaa

SEQ ID NO: 470288 - DNA, 19 bp, Mus musculus
  siRNA target sequence for Wrn (NM_011721.2,3422-3440).
ctaccaagcagtctaattt

SEQ ID NO: 470289 - DNA, 19 bp, Mus musculus
  siRNA target sequence for Wrn (NM_011721.2,3442-3460).
gagagaacgcattcttaca

SEQ ID NO: 470290 - DNA, 19 bp, Mus musculus
  siRNA target sequence for Wrn (NM_011721.2,3484-3502).
gggactaacattcctaaaa

SEQ ID NO: 470291 - DNA, 19 bp, Mus musculus
  siRNA target sequence for Wrn (NM_011721.2,3486-3504).
gactaacattcctaaaaaa

SEQ ID NO: 470292 - DNA, 19 bp, Mus musculus
  siRNA target sequence for Wrn (NM_011721.2,3517-3535).
ccgtcaccaggaacatctt

SEQ ID NO: 470293 - DNA, 19 bp, Mus musculus
  siRNA target sequence for Wrn (NM_011721.2,3576-3594).
cgctcggactgggctatat

SEQ ID NO: 470294 - DNA, 19 bp, Mus musculus
  siRNA target sequence for Wrn (NM_011721.2,3636-3654).
ggatgtacctccagctatt

SEQ ID NO: 470295 - DNA, 19 bp, Mus musculus
  siRNA target sequence for Wrn (NM_011721.2,3678-3696).
ggacatggctaaaatgaga

SEQ ID NO: 470296 - DNA, 19 bp, Mus musculus
  siRNA target sequence for Wrn (NM_011721.2,3697-3715).
ccgactactgttgaaaaca

SEQ ID NO: 470297 - DNA, 19 bp, Mus musculus
  siRNA target sequence for Wrn (NM_011721.2,3780-3798).
caaacatttctgtcaagta

SEQ ID NO: 470298 - DNA, 19 bp, Mus musculus
  siRNA target sequence for Wrn (NM_011721.2,3784-3802).
catttctgtcaagtaacta

SEQ ID NO: 470299 - DNA, 19 bp, Mus musculus
  siRNA target sequence for Wrn (NM_011721.2,3901-3919).
gccgtcacatacactctat

SEQ ID NO: 470300 - DNA, 19 bp, Mus musculus
  siRNA target sequence for Wrn (NM_011721.2,3902-3920).
ccgtcacatacactctatt

SEQ ID NO: 470301 - DNA, 19 bp, Mus musculus
  siRNA target sequence for Wrn (NM_011721.2,4013-4031).
ccggctaccccctggatat

SEQ ID NO: 470302 - DNA, 19 bp, Mus musculus
  siRNA target sequence for Wrn (NM_011721.2,4016-4034).
gctaccccctggatatgga

SEQ ID NO: 470303 - DNA, 19 bp, Mus musculus
  siRNA target sequence for Wrn (NM_011721.2,4052-4070).
cagagacttggaagattat

SEQ ID NO: 470304 - DNA, 19 bp, Mus musculus
  siRNA target sequence for Wrn (NM_011721.2,4084-4102).
cgaaaccctcccatcaact

SEQ ID NO: 470305 - DNA, 19 bp, Mus musculus
  siRNA target sequence for Wrn (NM_011721.2,4090-4108).
cctcccatcaactcagata

SEQ ID NO: 470306 - DNA, 19 bp, Mus musculus
  siRNA target sequence for Wrn (NM_011721.2,4091-4109).
ctcccatcaactcagatat

SEQ ID NO: 470307 - DNA, 19 bp, Mus musculus
  siRNA target sequence for Wrn (NM_011721.2,4095-4113).
catcaactcagatatgtat

SEQ ID NO: 470308 - DNA, 19 bp, Mus musculus
  siRNA target sequence for Wrn (NM_011721.2,4167-4185).
ccacatggcgattgagatt

SEQ ID NO: 470309 - DNA, 19 bp, Mus musculus
  siRNA target sequence for Wrn (NM_011721.2,4170-4188).
catggcgattgagattctt

SEQ ID NO: 470310 - DNA, 19 bp, Mus musculus
  siRNA target sequence for Wrn (NM_011721.2,4303-4321).
gagaccaaggcatcatctt

SEQ ID NO: 470311 - DNA, 19 bp, Mus musculus
  siRNA target sequence for Wrn (NM_011721.2,4345-4363).
gagtggtttgccaaaggaa

SEQ ID NO: 470312 - DNA, 19 bp, Mus musculus
  siRNA target sequence for Wrn (NM_011721.2,4347-4365).
gtggtttgccaaaggaaat

SEQ ID NO: 470313 - DNA, 19 bp, Mus musculus
  siRNA target sequence for Wrn (NM_011721.2,4378-4396).
gataccggcagctcatcat

SEQ ID NO: 470314 - DNA, 19 bp, Mus musculus
  siRNA target sequence for Wrn (NM_011721.2,4382-4400).
ccggcagctcatcatcaat

SEQ ID NO: 470315 - DNA, 19 bp, Mus musculus
  siRNA target sequence for Wrnip1 (NM_030215.2,1010-1028).
caccttggctcacatcata

SEQ ID NO: 470316 - DNA, 19 bp, Mus musculus
  siRNA target sequence for Wrnip1 (NM_030215.2,1043-1061).
gaagcacagcataaggttt

SEQ ID NO: 470317 - DNA, 19 bp, Mus musculus
  siRNA target sequence for Wrnip1 (NM_030215.2,1051-1069).
gcataaggtttgtgacatt

SEQ ID NO: 470318 - DNA, 19 bp, Mus musculus
  siRNA target sequence for Wrnip1 (NM_030215.2,1052-1070).
cataaggtttgtgacatta

SEQ ID NO: 470319 - DNA, 19 bp, Mus musculus
  siRNA target sequence for Wrnip1 (NM_030215.2,1078-1096).
caaatgccaagacaaatga

SEQ ID NO: 470320 - DNA, 19 bp, Mus musculus
  siRNA target sequence for Wrnip1 (NM_030215.2,1095-1113).
gatgtgcgagatgtcataa

SEQ ID NO: 470321 - DNA, 19 bp, Mus musculus
  siRNA target sequence for Wrnip1 (NM_030215.2,1147-1165).
ggaaaaccatcctttttat

SEQ ID NO: 470322 - DNA, 19 bp, Mus musculus
  siRNA target sequence for Wrnip1 (NM_030215.2,1157-1175).
cctttttattgatgagatt

SEQ ID NO: 470323 - DNA, 19 bp, Mus musculus
  siRNA target sequence for Wrnip1 (NM_030215.2,1170-1188).
gagattcatcgcttcaata

SEQ ID NO: 470324 - DNA, 19 bp, Mus musculus
  siRNA target sequence for Wrnip1 (NM_030215.2,1172-1190).
gattcatcgcttcaataaa

SEQ ID NO: 470325 - DNA, 19 bp, Mus musculus
  siRNA target sequence for Wrnip1 (NM_030215.2,1218-1236).
gtggagtgcgggacaatca

SEQ ID NO: 470326 - DNA, 19 bp, Mus musculus
  siRNA target sequence for Wrnip1 (NM_030215.2,1303-1321).
gggtaattgttcttgagaa

SEQ ID NO: 470327 - DNA, 19 bp, Mus musculus
  siRNA target sequence for Wrnip1 (NM_030215.2,1334-1352).
ggcaatggtgacgatttta

SEQ ID NO: 470328 - DNA, 19 bp, Mus musculus
  siRNA target sequence for Wrnip1 (NM_030215.2,1335-1353).
gcaatggtgacgattttaa

SEQ ID NO: 470329 - DNA, 19 bp, Mus musculus
  siRNA target sequence for Wrnip1 (NM_030215.2,1574-1592).
gaagagcggtcaaacctat

SEQ ID NO: 470330 - DNA, 19 bp, Mus musculus
  siRNA target sequence for Wrnip1 (NM_030215.2,1594-1612).
ctcctagtcgagttctgat

SEQ ID NO: 470331 - DNA, 19 bp, Mus musculus
  siRNA target sequence for Wrnip1 (NM_030215.2,1638-1656).
ctacagcggtcccacattt

SEQ ID NO: 470332 - DNA, 19 bp, Mus musculus
  siRNA target sequence for Wrnip1 (NM_030215.2,1641-1659).
cagcggtcccacattttat

SEQ ID NO: 470333 - DNA, 19 bp, Mus musculus
  siRNA target sequence for Wrnip1 (NM_030215.2,1643-1661).
gcggtcccacattttatat

SEQ ID NO: 470334 - DNA, 19 bp, Mus musculus
  siRNA target sequence for Wrnip1 (NM_030215.2,1967-1985).
cagtgcctataacaatgta

SEQ ID NO: 470335 - DNA, 19 bp, Mus musculus
  siRNA target sequence for Wrnip1 (NM_030215.2,2053-2071).
ccaggctgatgaaggattt

SEQ ID NO: 470336 - DNA, 19 bp, Mus musculus
  siRNA target sequence for Wrnip1 (NM_030215.2,2080-2098).
gcaaagggtacaagtacaa

SEQ ID NO: 470337 - DNA, 19 bp, Mus musculus
  siRNA target sequence for Xbp1 (NM_013842.2,70-88).
ccccaaagtgctactctta

SEQ ID NO: 470338 - DNA, 19 bp, Mus musculus
  siRNA target sequence for Xbp1 (NM_013842.2,71-89).
cccaaagtgctactcttat

SEQ ID NO: 470339 - DNA, 19 bp, Mus musculus
  siRNA target sequence for Xbp1 (NM_013842.2,73-91).
caaagtgctactcttatct

SEQ ID NO: 470340 - DNA, 19 bp, Mus musculus
  siRNA target sequence for Xbp1 (NM_013842.2,226-244).
gctgcggaggaaactgaaa

SEQ ID NO: 470341 - DNA, 19 bp, Mus musculus
  siRNA target sequence for Xbp1 (NM_013842.2,260-278).
cagactgctcgagatagaa

SEQ ID NO: 470342 - DNA, 19 bp, Mus musculus
  siRNA target sequence for Xbp1 (NM_013842.2,389-407).
gttgagaaccaggagttaa

SEQ ID NO: 470343 - DNA, 19 bp, Mus musculus
  siRNA target sequence for Xbp1 (NM_013842.2,505-523).
cgcagcactcagactatgt

SEQ ID NO: 470344 - DNA, 19 bp, Mus musculus
  siRNA target sequence for Xbp1 (NM_013842.2,642-660).
gttggaccctgtcatgttt

SEQ ID NO: 470345 - DNA, 19 bp, Mus musculus
  siRNA target sequence for Xrcc5 (NM_009533.1,104-122).
gtgaagaatctccaattga

SEQ ID NO: 470346 - DNA, 19 bp, Mus musculus
  siRNA target sequence for Xrcc5 (NM_009533.1,113-131).
ctccaattgaacaagcaaa

SEQ ID NO: 470347 - DNA, 19 bp, Mus musculus
  siRNA target sequence for Xrcc5 (NM_009533.1,151-169).
gtccaacgacaggtatttt

SEQ ID NO: 470348 - DNA, 19 bp, Mus musculus
  siRNA target sequence for Xrcc5 (NM_009533.1,205-223).
ggcacagatggcactgata

SEQ ID NO: 470349 - DNA, 19 bp, Mus musculus
  siRNA target sequence for Xrcc5 (NM_009533.1,241-259).
gaccagtatcagaacatca

SEQ ID NO: 470350 - DNA, 19 bp, Mus musculus
  siRNA target sequence for Xrcc5 (NM_009533.1,273-291).
cctgatgctaccagatttt

SEQ ID NO: 470351 - DNA, 19 bp, Mus musculus
  siRNA target sequence for Xrcc5 (NM_009533.1,349-367).
ctggacgccctgattgtgt

SEQ ID NO: 470352 - DNA, 19 bp, Mus musculus
  siRNA target sequence for Xrcc5 (NM_009533.1,378-396).
gattcagcgtgaaaccata

SEQ ID NO: 470353 - DNA, 19 bp, Mus musculus
  siRNA target sequence for Xrcc5 (NM_009533.1,410-428).
ggaagaagcatattgaagt

SEQ ID NO: 470354 - DNA, 19 bp, Mus musculus
  siRNA target sequence for Xrcc5 (NM_009533.1,459-477).
ggaccaactggacgttata

SEQ ID NO: 470355 - DNA, 19 bp, Mus musculus
  siRNA target sequence for Xrcc5 (NM_009533.1,460-478).
gaccaactggacgttataa

SEQ ID NO: 470356 - DNA, 19 bp, Mus musculus
  siRNA target sequence for Xrcc5 (NM_009533.1,462-480).
ccaactggacgttataatt

SEQ ID NO: 470357 - DNA, 19 bp, Mus musculus
  siRNA target sequence for Xrcc5 (NM_009533.1,463-481).
caactggacgttataattt

SEQ ID NO: 470358 - DNA, 19 bp, Mus musculus
  siRNA target sequence for Xrcc5 (NM_009533.1,469-487).
gacgttataatttgtaact

SEQ ID NO: 470359 - DNA, 19 bp, Mus musculus
  siRNA target sequence for Xrcc5 (NM_009533.1,524-542).
cttttccaatcgacaagaa

SEQ ID NO: 470360 - DNA, 19 bp, Mus musculus
  siRNA target sequence for Xrcc5 (NM_009533.1,605-623).
ctcaaaaaggacttactga

SEQ ID NO: 470361 - DNA, 19 bp, Mus musculus
  siRNA target sequence for Xrcc5 (NM_009533.1,657-675).
ggtgatgctgtccttagaa

SEQ ID NO: 470362 - DNA, 19 bp, Mus musculus
  siRNA target sequence for Xrcc5 (NM_009533.1,679-697).
gaagacgggctggatgaaa

SEQ ID NO: 470363 - DNA, 19 bp, Mus musculus
  siRNA target sequence for Xrcc5 (NM_009533.1,682-700).
gacgggctggatgaaattt

SEQ ID NO: 470364 - DNA, 19 bp, Mus musculus
  siRNA target sequence for Xrcc5 (NM_009533.1,684-702).
cgggctggatgaaatttat

SEQ ID NO: 470365 - DNA, 19 bp, Mus musculus
  siRNA target sequence for Xrcc5 (NM_009533.1,721-739).
cgacaactgtgcgtcttta

SEQ ID NO: 470366 - DNA, 19 bp, Mus musculus
  siRNA target sequence for Xrcc5 (NM_009533.1,722-740).
gacaactgtgcgtctttaa

SEQ ID NO: 470367 - DNA, 19 bp, Mus musculus
  siRNA target sequence for Xrcc5 (NM_009533.1,787-805).
ggccccaacttgtctataa

SEQ ID NO: 470368 - DNA, 19 bp, Mus musculus
  siRNA target sequence for Xrcc5 (NM_009533.1,788-806).
gccccaacttgtctataaa

SEQ ID NO: 470369 - DNA, 19 bp, Mus musculus
  siRNA target sequence for Xrcc5 (NM_009533.1,865-883).
gacgcaagaacgctaaaga

SEQ ID NO: 470370 - DNA, 19 bp, Mus musculus
  siRNA target sequence for Xrcc5 (NM_009533.1,905-923).
ctgtttattgcctaaatga

SEQ ID NO: 470371 - DNA, 19 bp, Mus musculus
  siRNA target sequence for Xrcc5 (NM_009533.1,914-932).
gcctaaatgacgatgatga

SEQ ID NO: 470372 - DNA, 19 bp, Mus musculus
  siRNA target sequence for Xrcc5 (NM_009533.1,944-962).
ccaaagaggacactattca

SEQ ID NO: 470373 - DNA, 19 bp, Mus musculus
  siRNA target sequence for Xrcc5 (NM_009533.1,945-963).
caaagaggacactattcaa

SEQ ID NO: 470374 - DNA, 19 bp, Mus musculus
  siRNA target sequence for Xrcc5 (NM_009533.1,966-984).
gtaccgctacggaagtgat

SEQ ID NO: 470375 - DNA, 19 bp, Mus musculus
  siRNA target sequence for Xrcc5 (NM_009533.1,970-988).
cgctacggaagtgatatca

SEQ ID NO: 470376 - DNA, 19 bp, Mus musculus
  siRNA target sequence for Xrcc5 (NM_009533.1,971-989).
gctacggaagtgatatcat

SEQ ID NO: 470377 - DNA, 19 bp, Mus musculus
  siRNA target sequence for Xrcc5 (NM_009533.1,982-1000).
gatatcattcctttttcta

SEQ ID NO: 470378 - DNA, 19 bp, Mus musculus
  siRNA target sequence for Xrcc5 (NM_009533.1,1073-1091).
ctcaggttcatagaagatt

SEQ ID NO: 470379 - DNA, 19 bp, Mus musculus
  siRNA target sequence for Xrcc5 (NM_009533.1,1075-1093).
caggttcatagaagattct

SEQ ID NO: 470380 - DNA, 19 bp, Mus musculus
  siRNA target sequence for Xrcc5 (NM_009533.1,1092-1110).
cttcatgggacatcaagtt

SEQ ID NO: 470381 - DNA, 19 bp, Mus musculus
  siRNA target sequence for Xrcc5 (NM_009533.1,1100-1118).
gacatcaagttctaaaggt

SEQ ID NO: 470382 - DNA, 19 bp, Mus musculus
  siRNA target sequence for Xrcc5 (NM_009533.1,1116-1134).
ggtctttgcagcaaaggat

SEQ ID NO: 470383 - DNA, 19 bp, Mus musculus
  siRNA target sequence for Xrcc5 (NM_009533.1,1171-1189).
catgctttggatgagttaa

SEQ ID NO: 470384 - DNA, 19 bp, Mus musculus
  siRNA target sequence for Xrcc5 (NM_009533.1,1197-1215).
cgccatcgtccgatatgct

SEQ ID NO: 470385 - DNA, 19 bp, Mus musculus
  siRNA target sequence for Xrcc5 (NM_009533.1,1198-1216).
gccatcgtccgatatgctt

SEQ ID NO: 470386 - DNA, 19 bp, Mus musculus
  siRNA target sequence for Xrcc5 (NM_009533.1,1199-1217).
ccatcgtccgatatgctta

SEQ ID NO: 470387 - DNA, 19 bp, Mus musculus
  siRNA target sequence for Xrcc5 (NM_009533.1,1200-1218).
catcgtccgatatgcttat

SEQ ID NO: 470388 - DNA, 19 bp, Mus musculus
  siRNA target sequence for Xrcc5 (NM_009533.1,1204-1222).
gtccgatatgcttatgaca

SEQ ID NO: 470389 - DNA, 19 bp, Mus musculus
  siRNA target sequence for Xrcc5 (NM_009533.1,1206-1224).
ccgatatgcttatgacaaa

SEQ ID NO: 470390 - DNA, 19 bp, Mus musculus
  siRNA target sequence for Xrcc5 (NM_009533.1,1207-1225).
cgatatgcttatgacaaaa

SEQ ID NO: 470391 - DNA, 19 bp, Mus musculus
  siRNA target sequence for Xrcc5 (NM_009533.1,1312-1330).
gacttgcggcaatacatgt

SEQ ID NO: 470392 - DNA, 19 bp, Mus musculus
  siRNA target sequence for Xrcc5 (NM_009533.1,1314-1332).
cttgcggcaatacatgttt

SEQ ID NO: 470393 - DNA, 19 bp, Mus musculus
  siRNA target sequence for Xrcc5 (NM_009533.1,1334-1352).
cctcgctgaaaaacaataa

SEQ ID NO: 470394 - DNA, 19 bp, Mus musculus
  siRNA target sequence for Xrcc5 (NM_009533.1,1373-1391).
cccagctgagcgctattga

SEQ ID NO: 470395 - DNA, 19 bp, Mus musculus
  siRNA target sequence for Xrcc5 (NM_009533.1,1374-1392).
ccagctgagcgctattgat

SEQ ID NO: 470396 - DNA, 19 bp, Mus musculus
  siRNA target sequence for Xrcc5 (NM_009533.1,1377-1395).
gctgagcgctattgatgat

SEQ ID NO: 470397 - DNA, 19 bp, Mus musculus
  siRNA target sequence for Xrcc5 (NM_009533.1,1382-1400).
gcgctattgatgatctgat

SEQ ID NO: 470398 - DNA, 19 bp, Mus musculus
  siRNA target sequence for Xrcc5 (NM_009533.1,1383-1401).
cgctattgatgatctgatt

SEQ ID NO: 470399 - DNA, 19 bp, Mus musculus
  siRNA target sequence for Xrcc5 (NM_009533.1,1481-1499).
ctgaatttcagcgattgta

SEQ ID NO: 470400 - DNA, 19 bp, Mus musculus
  siRNA target sequence for Xrcc5 (NM_009533.1,1546-1564).
ccgattcagcagcacattt

SEQ ID NO: 470401 - DNA, 19 bp, Mus musculus
  siRNA target sequence for Xrcc5 (NM_009533.1,1547-1565).
cgattcagcagcacatttt

SEQ ID NO: 470402 - DNA, 19 bp, Mus musculus
  siRNA target sequence for Xrcc5 (NM_009533.1,1552-1570).
cagcagcacattttgaata

SEQ ID NO: 470403 - DNA, 19 bp, Mus musculus
  siRNA target sequence for Xrcc5 (NM_009533.1,1683-1701).
ggacgttttccaagacaat

SEQ ID NO: 470404 - DNA, 19 bp, Mus musculus
  siRNA target sequence for Xrcc5 (NM_009533.1,1686-1704).
cgttttccaagacaatcat

SEQ ID NO: 470405 - DNA, 19 bp, Mus musculus
  siRNA target sequence for Xrcc5 (NM_009533.1,1715-1733).
ccgctgctaaaaaatataa

SEQ ID NO: 470406 - DNA, 19 bp, Mus musculus
  siRNA target sequence for Xrcc5 (NM_009533.1,1771-1789).
ctggcagaagggaacatca

SEQ ID NO: 470407 - DNA, 19 bp, Mus musculus
  siRNA target sequence for Xrcc5 (NM_009533.1,1791-1809).
caaggttggaagtgtgaat

SEQ ID NO: 470408 - DNA, 19 bp, Mus musculus
  siRNA target sequence for Xrcc5 (NM_009533.1,1821-1839).
cttccgtttcctagtaaga

SEQ ID NO: 470409 - DNA, 19 bp, Mus musculus
  siRNA target sequence for Xrcc5 (NM_009533.1,1861-1879).
gaagcgagtctccagttaa

SEQ ID NO: 470410 - DNA, 19 bp, Mus musculus
  siRNA target sequence for Xrcc5 (NM_009533.1,1883-1901).
gtcacatcgaacaattttt

SEQ ID NO: 470411 - DNA, 19 bp, Mus musculus
  siRNA target sequence for Xrcc5 (NM_009533.1,1887-1905).
catcgaacaatttttggat

SEQ ID NO: 470412 - DNA, 19 bp, Mus musculus
  siRNA target sequence for Xrcc5 (NM_009533.1,1981-1999).
gaagaacagcgcttcaaca

SEQ ID NO: 470413 - DNA, 19 bp, Mus musculus
  siRNA target sequence for Xrcc5 (NM_009533.1,2103-2121).
cccaggaagctctatcaca

SEQ ID NO: 470414 - DNA, 19 bp, Mus musculus
  siRNA target sequence for Ybx2 (NM_016875.1,267-285).
gccggtgctggcaatccaa

SEQ ID NO: 470415 - DNA, 19 bp, Mus musculus
  siRNA target sequence for Ybx2 (NM_016875.1,317-335).
ggaatggttacggattcat

SEQ ID NO: 470416 - DNA, 19 bp, Mus musculus
  siRNA target sequence for Ybx2 (NM_016875.1,519-537).
ccgctatgcccctaatcga

SEQ ID NO: 470417 - DNA, 19 bp, Mus musculus
  siRNA target sequence for Ybx2 (NM_016875.1,682-700).
ccacccttcttctatcgaa

SEQ ID NO: 470418 - DNA, 19 bp, Mus musculus
  siRNA target sequence for Ybx2 (NM_016875.1,785-803).
cattggagggtgatcaaca

SEQ ID NO: 470419 - DNA, 19 bp, Mus musculus
  siRNA target sequence for Zf (NM_145151.1,281-299).
gtcttaatcggctcaagaa

SEQ ID NO: 470420 - DNA, 19 bp, Mus musculus
  siRNA target sequence for Zf (NM_145151.1,283-301).
cttaatcggctcaagaaga

SEQ ID NO: 470421 - DNA, 19 bp, Mus musculus
  siRNA target sequence for Zf (NM_145151.1,666-684).
ggcgtcgtcgtctcttaaa

SEQ ID NO: 470422 - DNA, 19 bp, Mus musculus
  siRNA target sequence for Zf (NM_145151.1,667-685).
gcgtcgtcgtctcttaaaa

SEQ ID NO: 470423 - DNA, 19 bp, Mus musculus
  siRNA target sequence for Zf (NM_145151.1,668-686).
cgtcgtcgtctcttaaaat

SEQ ID NO: 470424 - DNA, 19 bp, Mus musculus
  siRNA target sequence for Zfp1 (NM_011742.1,357-375).
ccctcgcagaggattctgt

SEQ ID NO: 470425 - DNA, 19 bp, Mus musculus
  siRNA target sequence for Zfp1 (NM_011742.1,361-379).
cgcagaggattctgtacat

SEQ ID NO: 470426 - DNA, 19 bp, Mus musculus
  siRNA target sequence for Zfp1 (NM_011742.1,503-521).
ccaaccaccaactgaagaa

SEQ ID NO: 470427 - DNA, 19 bp, Mus musculus
  siRNA target sequence for Zfp1 (NM_011742.1,529-547).
gtcgttttggaaagacatt

SEQ ID NO: 470428 - DNA, 19 bp, Mus musculus
  siRNA target sequence for Zfp1 (NM_011742.1,531-549).
cgttttggaaagacattaa

SEQ ID NO: 470429 - DNA, 19 bp, Mus musculus
  siRNA target sequence for Zfp1 (NM_011742.1,582-600).
gttccctataaatatgatt

SEQ ID NO: 470430 - DNA, 19 bp, Mus musculus
  siRNA target sequence for Zfp1 (NM_011742.1,585-603).
ccctataaatatgatttat

SEQ ID NO: 470431 - DNA, 19 bp, Mus musculus
  siRNA target sequence for Zfp1 (NM_011742.1,586-604).
cctataaatatgatttata

SEQ ID NO: 470432 - DNA, 19 bp, Mus musculus
  siRNA target sequence for Zfp1 (NM_011742.1,617-635).
gaagtacaattcagactta

SEQ ID NO: 470433 - DNA, 19 bp, Mus musculus
  siRNA target sequence for Zfp1 (NM_011742.1,630-648).
gacttacttagcagtagaa

SEQ ID NO: 470434 - DNA, 19 bp, Mus musculus
  siRNA target sequence for Zfp1 (NM_011742.1,641-659).
cagtagaaactgtgtaaga

SEQ ID NO: 470435 - DNA, 19 bp, Mus musculus
  siRNA target sequence for Zfp1 (NM_011742.1,701-719).
gtacctgaagcaagagaaa

SEQ ID NO: 470436 - DNA, 19 bp, Mus musculus
  siRNA target sequence for Zfp1 (NM_011742.1,721-739).
cccacgctggactggaata

SEQ ID NO: 470437 - DNA, 19 bp, Mus musculus
  siRNA target sequence for Zfp1 (NM_011742.1,725-743).
cgctggactggaatactca

SEQ ID NO: 470438 - DNA, 19 bp, Mus musculus
  siRNA target sequence for Zfp1 (NM_011742.1,774-792).
cataaggatgccatcttta

SEQ ID NO: 470439 - DNA, 19 bp, Mus musculus
  siRNA target sequence for Zfp1 (NM_011742.1,1054-1072).
gagcgcacatggagaagaa

SEQ ID NO: 470440 - DNA, 19 bp, Mus musculus
  siRNA target sequence for Zfp1 (NM_011742.1,1100-1118).
gacattcgctcagaagttt

SEQ ID NO: 470441 - DNA, 19 bp, Mus musculus
  siRNA target sequence for Zfp1 (NM_011742.1,1102-1120).
cattcgctcagaagtttga

SEQ ID NO: 470442 - DNA, 19 bp, Mus musculus
  siRNA target sequence for Zfp1 (NM_011742.1,1177-1195).
gcgcaaaaaccttctttaa

SEQ ID NO: 470443 - DNA, 19 bp, Mus musculus
  siRNA target sequence for Zfp1 (NM_011742.1,1179-1197).
gcaaaaaccttctttaaga

SEQ ID NO: 470444 - DNA, 19 bp, Mus musculus
  siRNA target sequence for Zfp1 (NM_011742.1,1523-1541).
gtcaggccagaattcttca

SEQ ID NO: 470445 - DNA, 19 bp, Mus musculus
  siRNA target sequence for Zfp100 (NM_009541.1,385-403).
gtgcacctagacatcagta

SEQ ID NO: 470446 - DNA, 19 bp, Mus musculus
  siRNA target sequence for Zfp100 (NM_009541.1,387-405).
gcacctagacatcagtaat

SEQ ID NO: 470447 - DNA, 19 bp, Mus musculus
  siRNA target sequence for Zfp100 (NM_009541.1,714-732).
gggtggccaggcagaaagt

SEQ ID NO: 470448 - DNA, 19 bp, Mus musculus
  siRNA target sequence for Zfp100 (NM_009541.1,988-1006).
gagtctgccggcacagatt

SEQ ID NO: 470449 - DNA, 19 bp, Mus musculus
  siRNA target sequence for Zfp100 (NM_009541.1,1127-1145).
cgcacacagggaacttcaa

SEQ ID NO: 470450 - DNA, 19 bp, Mus musculus
  siRNA target sequence for Zfp100 (NM_009541.1,1167-1185).
gggggagaaacctttctca

SEQ ID NO: 470451 - DNA, 19 bp, Mus musculus
  siRNA target sequence for Zfp100 (NM_009541.1,1223-1241).
cgtgcaaggctcatgagaa

SEQ ID NO: 470452 - DNA, 19 bp, Mus musculus
  siRNA target sequence for Zfp100 (NM_009541.1,1304-1322).
gcctgctgaacctgcataa

SEQ ID NO: 470453 - DNA, 19 bp, Mus musculus
  siRNA target sequence for Zfp100 (NM_009541.1,1523-1541).
gtcctcactgcgacaaaaa

SEQ ID NO: 470454 - DNA, 19 bp, Mus musculus
  siRNA target sequence for Zfp100 (NM_009541.1,1525-1543).
cctcactgcgacaaaaagt

SEQ ID NO: 470455 - DNA, 19 bp, Mus musculus
  siRNA target sequence for Zfp100 (NM_009541.1,1526-1544).
ctcactgcgacaaaaagtt

SEQ ID NO: 470456 - DNA, 19 bp, Mus musculus
  siRNA target sequence for Zfp100 (NM_009541.1,1528-1546).
cactgcgacaaaaagttca

SEQ ID NO: 470457 - DNA, 19 bp, Mus musculus
  siRNA target sequence for Zfp100 (NM_009541.1,1588-1606).
gccgatggccctcttaagt

SEQ ID NO: 470458 - DNA, 19 bp, Mus musculus
  siRNA target sequence for Zfp100 (NM_009541.1,1764-1782).
gccgtgccagtgtgtgata

SEQ ID NO: 470459 - DNA, 19 bp, Mus musculus
  siRNA target sequence for Zfp100 (NM_009541.1,1765-1783).
ccgtgccagtgtgtgatat

SEQ ID NO: 470460 - DNA, 19 bp, Mus musculus
  siRNA target sequence for Zfp100 (NM_009541.1,2016-2034).
gccttatttgtgtgacaaa

SEQ ID NO: 470461 - DNA, 19 bp, Mus musculus
  siRNA target sequence for Zfp100 (NM_009541.1,2045-2063).
gtttcaaccgggtagacaa

SEQ ID NO: 470462 - DNA, 19 bp, Mus musculus
  siRNA target sequence for Zfp100 (NM_009541.1,2246-2264).
ctgacgagacggaagtact

SEQ ID NO: 470463 - DNA, 19 bp, Mus musculus
  siRNA target sequence for Zfp100 (NM_009541.1,2250-2268).
cgagacggaagtactcaaa

SEQ ID NO: 470464 - DNA, 19 bp, Mus musculus
  siRNA target sequence for Zfp100 (NM_009541.1,2322-2340).
catcctctacgcttgtgat

SEQ ID NO: 470465 - DNA, 19 bp, Mus musculus
  siRNA target sequence for Zfp113 (NM_019747.3,419-437).
ctggaaatgatcgagtaat

SEQ ID NO: 470466 - DNA, 19 bp, Mus musculus
  siRNA target sequence for Zfp113 (NM_019747.3,421-439).
ggaaatgatcgagtaatct

SEQ ID NO: 470467 - DNA, 19 bp, Mus musculus
  siRNA target sequence for Zfp113 (NM_019747.3,465-483).
gatactggggcgattccaa

SEQ ID NO: 470468 - DNA, 19 bp, Mus musculus
  siRNA target sequence for Zfp113 (NM_019747.3,475-493).
cgattccaaaaggatgttt

SEQ ID NO: 470469 - DNA, 19 bp, Mus musculus
  siRNA target sequence for Zfp113 (NM_019747.3,498-516).
gggtcttaagtttgaagaa

SEQ ID NO: 470470 - DNA, 19 bp, Mus musculus
  siRNA target sequence for Zfp113 (NM_019747.3,615-633).
ggaaaagctcacccatatt

SEQ ID NO: 470471 - DNA, 19 bp, Mus musculus
  siRNA target sequence for Zfp113 (NM_019747.3,753-771).
gagttttaatcgtacttca

SEQ ID NO: 470472 - DNA, 19 bp, Mus musculus
  siRNA target sequence for Zfp113 (NM_019747.3,1098-1116).
caggagctccacccttatt

SEQ ID NO: 470473 - DNA, 19 bp, Mus musculus
  siRNA target sequence for Zfp113 (NM_019747.3,1101-1119).
gagctccacccttattcat

SEQ ID NO: 470474 - DNA, 19 bp, Mus musculus
  siRNA target sequence for Zfp113 (NM_019747.3,1104-1122).
ctccacccttattcatcat

SEQ ID NO: 470475 - DNA, 19 bp, Mus musculus
  siRNA target sequence for Zfp113 (NM_019747.3,1106-1124).
ccacccttattcatcatca

SEQ ID NO: 470476 - DNA, 19 bp, Mus musculus
  siRNA target sequence for Zfp113 (NM_019747.3,1255-1273).
gggaagtttacctacagtt

SEQ ID NO: 470477 - DNA, 19 bp, Mus musculus
  siRNA target sequence for Zfp113 (NM_019747.3,1266-1284).
ctacagttccggccttatt

SEQ ID NO: 470478 - DNA, 19 bp, Mus musculus
  siRNA target sequence for Zfp113 (NM_019747.3,1269-1287).
cagttccggccttattcaa

SEQ ID NO: 470479 - DNA, 19 bp, Mus musculus
  siRNA target sequence for Zfp113 (NM_019747.3,1350-1368).
gtacagctcagcacttgtt

SEQ ID NO: 470480 - DNA, 19 bp, Mus musculus
  siRNA target sequence for Zfp113 (NM_019747.3,1408-1426).
gtaatgggtgtaaagcaaa

SEQ ID NO: 470481 - DNA, 19 bp, Mus musculus
  siRNA target sequence for Zfp148 (NM_011749.3,470-488).
gcggcatagacgaaatgca

SEQ ID NO: 470482 - DNA, 19 bp, Mus musculus
  siRNA target sequence for Zfp148 (NM_011749.3,489-507).
gtcttccagggcaatggtt

SEQ ID NO: 470483 - DNA, 19 bp, Mus musculus
  siRNA target sequence for Zfp148 (NM_011749.3,494-512).
ccagggcaatggttgtaat

SEQ ID NO: 470484 - DNA, 19 bp, Mus musculus
  siRNA target sequence for Zfp148 (NM_011749.3,552-570).
gcaggagtcagtacttcaa

SEQ ID NO: 470485 - DNA, 19 bp, Mus musculus
  siRNA target sequence for Zfp148 (NM_011749.3,555-573).
ggagtcagtacttcaagat

SEQ ID NO: 470486 - DNA, 19 bp, Mus musculus
  siRNA target sequence for Zfp148 (NM_011749.3,602-620).
ctgcagacgaagtgttaca

SEQ ID NO: 470487 - DNA, 19 bp, Mus musculus
  siRNA target sequence for Zfp148 (NM_011749.3,605-623).
cagacgaagtgttacaaga

SEQ ID NO: 470488 - DNA, 19 bp, Mus musculus
  siRNA target sequence for Zfp148 (NM_011749.3,633-651).
gagacaacaggatatgata

SEQ ID NO: 470489 - DNA, 19 bp, Mus musculus
  siRNA target sequence for Zfp148 (NM_011749.3,673-691).
cacgaggagacagtgaaaa

SEQ ID NO: 470490 - DNA, 19 bp, Mus musculus
  siRNA target sequence for Zfp148 (NM_011749.3,745-763).
gcactcaatgtccctataa

SEQ ID NO: 470491 - DNA, 19 bp, Mus musculus
  siRNA target sequence for Zfp148 (NM_011749.3,766-784).
gtaaagcaggaaattactt

SEQ ID NO: 470492 - DNA, 19 bp, Mus musculus
  siRNA target sequence for Zfp148 (NM_011749.3,771-789).
gcaggaaattacttttact

SEQ ID NO: 470493 - DNA, 19 bp, Mus musculus
  siRNA target sequence for Zfp148 (NM_011749.3,782-800).
cttttactgatgtatctga

SEQ ID NO: 470494 - DNA, 19 bp, Mus musculus
  siRNA target sequence for Zfp148 (NM_011749.3,830-848).
gagagccagtagacttaca

SEQ ID NO: 470495 - DNA, 19 bp, Mus musculus
  siRNA target sequence for Zfp148 (NM_011749.3,832-850).
gagccagtagacttacaga

SEQ ID NO: 470496 - DNA, 19 bp, Mus musculus
  siRNA target sequence for Zfp148 (NM_011749.3,834-852).
gccagtagacttacagaaa

SEQ ID NO: 470497 - DNA, 19 bp, Mus musculus
  siRNA target sequence for Zfp148 (NM_011749.3,835-853).
ccagtagacttacagaaaa

SEQ ID NO: 470498 - DNA, 19 bp, Mus musculus
  siRNA target sequence for Zfp148 (NM_011749.3,868-886).
caacgctctcctgcaaaaa

SEQ ID NO: 470499 - DNA, 19 bp, Mus musculus
  siRNA target sequence for Zfp148 (NM_011749.3,907-925).
ggatcacttggtttgaaaa

SEQ ID NO: 470500 - DNA, 19 bp, Mus musculus
  siRNA target sequence for Zfp148 (NM_011749.3,929-947).
ctaaatctcacgtttgtga

SEQ ID NO: 470501 - DNA, 19 bp, Mus musculus
  siRNA target sequence for Zfp148 (NM_011749.3,968-986).
gaacgaactatcacttaca

SEQ ID NO: 470502 - DNA, 19 bp, Mus musculus
  siRNA target sequence for Zfp148 (NM_011749.3,990-1008).
gcatgtcttcattcataca

SEQ ID NO: 470503 - DNA, 19 bp, Mus musculus
  siRNA target sequence for Zfp148 (NM_011749.3,1011-1029).
cgaaaaaccgtttcaatgt

SEQ ID NO: 470504 - DNA, 19 bp, Mus musculus
  siRNA target sequence for Zfp148 (NM_011749.3,1102-1120).
ccatttcgctgtgatgaat

SEQ ID NO: 470505 - DNA, 19 bp, Mus musculus
  siRNA target sequence for Zfp148 (NM_011749.3,1123-1141).
ggtatgagattcatacaga

SEQ ID NO: 470506 - DNA, 19 bp, Mus musculus
  siRNA target sequence for Zfp148 (NM_011749.3,1130-1148).
gattcatacagaaatatca

SEQ ID NO: 470507 - DNA, 19 bp, Mus musculus
  siRNA target sequence for Zfp148 (NM_011749.3,1149-1167).
catggaaaggcacaaaaga

SEQ ID NO: 470508 - DNA, 19 bp, Mus musculus
  siRNA target sequence for Zfp148 (NM_011749.3,1198-1216).
gaatactgcttacagtatt

SEQ ID NO: 470509 - DNA, 19 bp, Mus musculus
  siRNA target sequence for Zfp148 (NM_011749.3,1212-1230).
gtatttttccagaacagat

SEQ ID NO: 470510 - DNA, 19 bp, Mus musculus
  siRNA target sequence for Zfp148 (NM_011749.3,1223-1241).
gaacagatcgtgtattgaa

SEQ ID NO: 470511 - DNA, 19 bp, Mus musculus
  siRNA target sequence for Zfp148 (NM_011749.3,1226-1244).
cagatcgtgtattgaaaca

SEQ ID NO: 470512 - DNA, 19 bp, Mus musculus
  siRNA target sequence for Zfp148 (NM_011749.3,1270-1288).
gacaaaaaactaaacagat

SEQ ID NO: 470513 - DNA, 19 bp, Mus musculus
  siRNA target sequence for Zfp148 (NM_011749.3,1351-1369).
gataattcactgccaaaaa

SEQ ID NO: 470514 - DNA, 19 bp, Mus musculus
  siRNA target sequence for Zfp148 (NM_011749.3,1470-1488).
ctactcgtcgagcactaaa

SEQ ID NO: 470515 - DNA, 19 bp, Mus musculus
  siRNA target sequence for Zfp148 (NM_011749.3,1473-1491).
ctcgtcgagcactaaagta

SEQ ID NO: 470516 - DNA, 19 bp, Mus musculus
  siRNA target sequence for Zfp148 (NM_011749.3,1475-1493).
cgtcgagcactaaagtaaa

SEQ ID NO: 470517 - DNA, 19 bp, Mus musculus
  siRNA target sequence for Zfp148 (NM_011749.3,1479-1497).
gagcactaaagtaaaggat

SEQ ID NO: 470518 - DNA, 19 bp, Mus musculus
  siRNA target sequence for Zfp148 (NM_011749.3,1586-1604).
cacccaagttggttctcaa

SEQ ID NO: 470519 - DNA, 19 bp, Mus musculus
  siRNA target sequence for Zfp148 (NM_011749.3,1635-1653).
gcccttggagcaaagtcaa

SEQ ID NO: 470520 - DNA, 19 bp, Mus musculus
  siRNA target sequence for Zfp148 (NM_011749.3,1644-1662).
gcaaagtcaaaccatttca

SEQ ID NO: 470521 - DNA, 19 bp, Mus musculus
  siRNA target sequence for Zfp148 (NM_011749.3,1796-1814).
ctgtgcacagcagtactaa

SEQ ID NO: 470522 - DNA, 19 bp, Mus musculus
  siRNA target sequence for Zfp148 (NM_011749.3,1798-1816).
gtgcacagcagtactaatt

SEQ ID NO: 470523 - DNA, 19 bp, Mus musculus
  siRNA target sequence for Zfp148 (NM_011749.3,1839-1857).
gaagaagaagcggtatctt

SEQ ID NO: 470524 - DNA, 19 bp, Mus musculus
  siRNA target sequence for Zfp148 (NM_011749.3,1842-1860).
gaagaagcggtatcttcaa

SEQ ID NO: 470525 - DNA, 19 bp, Mus musculus
  siRNA target sequence for Zfp148 (NM_011749.3,1855-1873).
cttcaagctgcaagtaaca

SEQ ID NO: 470526 - DNA, 19 bp, Mus musculus
  siRNA target sequence for Zfp148 (NM_011749.3,1878-1896).
cagggagtacgcactgaat

SEQ ID NO: 470527 - DNA, 19 bp, Mus musculus
  siRNA target sequence for Zfp148 (NM_011749.3,1880-1898).
gggagtacgcactgaatgt

SEQ ID NO: 470528 - DNA, 19 bp, Mus musculus
  siRNA target sequence for Zfp148 (NM_011749.3,1990-2008).
gcactgaatgtggagatta

SEQ ID NO: 470529 - DNA, 19 bp, Mus musculus
  siRNA target sequence for Zfp148 (NM_011749.3,1991-2009).
cactgaatgtggagattaa

SEQ ID NO: 470530 - DNA, 19 bp, Mus musculus
  siRNA target sequence for Zfp148 (NM_011749.3,2001-2019).
ggagattaagagcaatcat

SEQ ID NO: 470531 - DNA, 19 bp, Mus musculus
  siRNA target sequence for Zfp148 (NM_011749.3,2065-2083).
cattattcccacaaaccta

SEQ ID NO: 470532 - DNA, 19 bp, Mus musculus
  siRNA target sequence for Zfp148 (NM_011749.3,2106-2124).
cagcgttgcagatactgaa

SEQ ID NO: 470533 - DNA, 19 bp, Mus musculus
  siRNA target sequence for Zfp148 (NM_011749.3,2125-2143).
gtgacttctagcatatcaa

SEQ ID NO: 470534 - DNA, 19 bp, Mus musculus
  siRNA target sequence for Zfp148 (NM_011749.3,2129-2147).
cttctagcatatcaatcaa

SEQ ID NO: 470535 - DNA, 19 bp, Mus musculus
  siRNA target sequence for Zfp148 (NM_011749.3,2169-2187).
cacccagtcagagaatgtt

SEQ ID NO: 470536 - DNA, 19 bp, Mus musculus
  siRNA target sequence for Zfp148 (NM_011749.3,2207-2225).
cctcatcagataaagctaa

SEQ ID NO: 470537 - DNA, 19 bp, Mus musculus
  siRNA target sequence for Zfp148 (NM_011749.3,2222-2240).
ctaacatgttgcaggaata

SEQ ID NO: 470538 - DNA, 19 bp, Mus musculus
  siRNA target sequence for Zfp148 (NM_011749.3,2276-2294).
gccaaaacgatgcctattt

SEQ ID NO: 470539 - DNA, 19 bp, Mus musculus
  siRNA target sequence for Zfp148 (NM_011749.3,2278-2296).
caaaacgatgcctatttga

SEQ ID NO: 470540 - DNA, 19 bp, Mus musculus
  siRNA target sequence for Zfp148 (NM_011749.3,2300-2318).
gcccgagccttaactttgt

SEQ ID NO: 470541 - DNA, 19 bp, Mus musculus
  siRNA target sequence for Zfp148 (NM_011749.3,2302-2320).
ccgagccttaactttgtga

SEQ ID NO: 470542 - DNA, 19 bp, Mus musculus
  siRNA target sequence for Zfp148 (NM_011749.3,2360-2378).
ccatagacaagcaagtcta

SEQ ID NO: 470543 - DNA, 19 bp, Mus musculus
  siRNA target sequence for Zfp148 (NM_011749.3,2380-2398).
gcagccatgcccatcaata

SEQ ID NO: 470544 - DNA, 19 bp, Mus musculus
  siRNA target sequence for Zfp148 (NM_011749.3,2383-2401).
gccatgcccatcaatagct

SEQ ID NO: 470545 - DNA, 19 bp, Mus musculus
  siRNA target sequence for Zfp148 (NM_011749.3,2384-2402).
ccatgcccatcaatagctt

SEQ ID NO: 470546 - DNA, 19 bp, Mus musculus
  siRNA target sequence for Zfp148 (NM_011749.3,2400-2418).
ctttcgatcaggaatgaat

SEQ ID NO: 470547 - DNA, 19 bp, Mus musculus
  siRNA target sequence for Zfp148 (NM_011749.3,2445-2463).
gtcccactttggactaata

SEQ ID NO: 470548 - DNA, 19 bp, Mus musculus
  siRNA target sequence for Zfp148 (NM_011749.3,2447-2465).
cccactttggactaatagt

SEQ ID NO: 470549 - DNA, 19 bp, Mus musculus
  siRNA target sequence for Zfp148 (NM_011749.3,2584-2602).
gtccaccaggcttaccaaa

SEQ ID NO: 470550 - DNA, 19 bp, Mus musculus
  siRNA target sequence for Zfp148 (NM_011749.3,2619-2637).
gcccttccgtgctccatat

SEQ ID NO: 470551 - DNA, 19 bp, Mus musculus
  siRNA target sequence for Zfp148 (NM_011749.3,2653-2671).
ggaatagcaactcagttta

SEQ ID NO: 470552 - DNA, 19 bp, Mus musculus
  siRNA target sequence for Zfp148 (NM_011749.3,2705-2723).
cagggacaagtgctgaatt

SEQ ID NO: 470553 - DNA, 19 bp, Mus musculus
  siRNA target sequence for Zfp148 (NM_011749.3,2709-2727).
gacaagtgctgaattttca

SEQ ID NO: 470554 - DNA, 19 bp, Mus musculus
  siRNA target sequence for Zfp148 (NM_011749.3,2739-2757).
ggtgaatgtaaatgataat

SEQ ID NO: 470555 - DNA, 19 bp, Mus musculus
  siRNA target sequence for Zfp161 (NM_009547.2,494-512).
cgcctgcagcacgtacttt

SEQ ID NO: 470556 - DNA, 19 bp, Mus musculus
  siRNA target sequence for Zfp161 (NM_009547.2,569-587).
cctccgctctgacatattt

SEQ ID NO: 470557 - DNA, 19 bp, Mus musculus
  siRNA target sequence for Zfp161 (NM_009547.2,605-623).
catgtacaccgccaagatt

SEQ ID NO: 470558 - DNA, 19 bp, Mus musculus
  siRNA target sequence for Zfp161 (NM_009547.2,1334-1352).
cgaggtgtgcggaaagtca

SEQ ID NO: 470559 - DNA, 19 bp, Mus musculus
  siRNA target sequence for Zfp161 (NM_009547.2,1335-1353).
gaggtgtgcggaaagtcat

SEQ ID NO: 470560 - DNA, 19 bp, Mus musculus
  siRNA target sequence for Zfp162 (NM_011750.1,26-44).
cgctggacttcccaagtaa

SEQ ID NO: 470561 - DNA, 19 bp, Mus musculus
  siRNA target sequence for Zfp162 (NM_011750.1,62-80).
gatggaaccaagacacaat

SEQ ID NO: 470562 - DNA, 19 bp, Mus musculus
  siRNA target sequence for Zfp162 (NM_011750.1,156-174).
catagtgcaactacagata

SEQ ID NO: 470563 - DNA, 19 bp, Mus musculus
  siRNA target sequence for Zfp162 (NM_011750.1,242-260).
cttcccctgaaccaatcta

SEQ ID NO: 470564 - DNA, 19 bp, Mus musculus
  siRNA target sequence for Zfp162 (NM_011750.1,245-263).
cccctgaaccaatctacaa

SEQ ID NO: 470565 - DNA, 19 bp, Mus musculus
  siRNA target sequence for Zfp162 (NM_011750.1,247-265).
cctgaaccaatctacaaca

SEQ ID NO: 470566 - DNA, 19 bp, Mus musculus
  siRNA target sequence for Zfp162 (NM_011750.1,270-288).
ggggaagcggcttaacact

SEQ ID NO: 470567 - DNA, 19 bp, Mus musculus
  siRNA target sequence for Zfp162 (NM_011750.1,297-315).
ccgtacccgcaaaaagctt

SEQ ID NO: 470568 - DNA, 19 bp, Mus musculus
  siRNA target sequence for Zfp162 (NM_011750.1,302-320).
cccgcaaaaagcttgaaga

SEQ ID NO: 470569 - DNA, 19 bp, Mus musculus
  siRNA target sequence for Zfp162 (NM_011750.1,321-339).
ggagcggcacacccttatt

SEQ ID NO: 470570 - DNA, 19 bp, Mus musculus
  siRNA target sequence for Zfp162 (NM_011750.1,322-340).
gagcggcacacccttatta

SEQ ID NO: 470571 - DNA, 19 bp, Mus musculus
  siRNA target sequence for Zfp162 (NM_011750.1,324-342).
gcggcacacccttattaca

SEQ ID NO: 470572 - DNA, 19 bp, Mus musculus
  siRNA target sequence for Zfp162 (NM_011750.1,326-344).
ggcacacccttattacaga

SEQ ID NO: 470573 - DNA, 19 bp, Mus musculus
  siRNA target sequence for Zfp162 (NM_011750.1,353-371).
ctctcaacccagactttaa

SEQ ID NO: 470574 - DNA, 19 bp, Mus musculus
  siRNA target sequence for Zfp162 (NM_011750.1,401-419).
cacgtgtgagcgataaagt

SEQ ID NO: 470575 - DNA, 19 bp, Mus musculus
  siRNA target sequence for Zfp162 (NM_011750.1,426-444).
cccccaagacgaatatcca

SEQ ID NO: 470576 - DNA, 19 bp, Mus musculus
  siRNA target sequence for Zfp162 (NM_011750.1,433-451).
gacgaatatccagaaatca

SEQ ID NO: 470577 - DNA, 19 bp, Mus musculus
  siRNA target sequence for Zfp162 (NM_011750.1,558-576).
gaaagttgggcgtaaagat

SEQ ID NO: 470578 - DNA, 19 bp, Mus musculus
  siRNA target sequence for Zfp162 (NM_011750.1,569-587).
gtaaagatggtcagatgtt

SEQ ID NO: 470579 - DNA, 19 bp, Mus musculus
  siRNA target sequence for Zfp162 (NM_011750.1,626-644).
ccaatacgatggagaatgt

SEQ ID NO: 470580 - DNA, 19 bp, Mus musculus
  siRNA target sequence for Zfp162 (NM_011750.1,632-650).
cgatggagaatgtcaaaaa

SEQ ID NO: 470581 - DNA, 19 bp, Mus musculus
  siRNA target sequence for Zfp162 (NM_011750.1,655-673).
gtagaacagatcagaaaca

SEQ ID NO: 470582 - DNA, 19 bp, Mus musculus
  siRNA target sequence for Zfp162 (NM_011750.1,676-694).
ctgaagcagggtattgaga

SEQ ID NO: 470583 - DNA, 19 bp, Mus musculus
  siRNA target sequence for Zfp162 (NM_011750.1,755-773).
gcactctacgggaagatga

SEQ ID NO: 470584 - DNA, 19 bp, Mus musculus
  siRNA target sequence for Zfp162 (NM_011750.1,756-774).
cactctacgggaagatgat

SEQ ID NO: 470585 - DNA, 19 bp, Mus musculus
  siRNA target sequence for Zfp162 (NM_011750.1,760-778).
ctacgggaagatgataata

SEQ ID NO: 470586 - DNA, 19 bp, Mus musculus
  siRNA target sequence for Zfp162 (NM_011750.1,763-781).
cgggaagatgataatagga

SEQ ID NO: 470587 - DNA, 19 bp, Mus musculus
  siRNA target sequence for Zfp162 (NM_011750.1,764-782).
gggaagatgataataggat

SEQ ID NO: 470588 - DNA, 19 bp, Mus musculus
  siRNA target sequence for Zfp162 (NM_011750.1,805-823).
gagacgcgcagcattacca

SEQ ID NO: 470589 - DNA, 19 bp, Mus musculus
  siRNA target sequence for Zfp162 (NM_011750.1,807-825).
gacgcgcagcattaccaat

SEQ ID NO: 470590 - DNA, 19 bp, Mus musculus
  siRNA target sequence for Zfp162 (NM_011750.1,810-828).
gcgcagcattaccaatact

SEQ ID NO: 470591 - DNA, 19 bp, Mus musculus
  siRNA target sequence for Zfp162 (NM_011750.1,811-829).
cgcagcattaccaatacta

SEQ ID NO: 470592 - DNA, 19 bp, Mus musculus
  siRNA target sequence for Zfp162 (NM_011750.1,813-831).
cagcattaccaatactact

SEQ ID NO: 470593 - DNA, 19 bp, Mus musculus
  siRNA target sequence for Zfp162 (NM_011750.1,919-937).
gcacggatggataaagaat

SEQ ID NO: 470594 - DNA, 19 bp, Mus musculus
  siRNA target sequence for Zfp162 (NM_011750.1,920-938).
cacggatggataaagaata

SEQ ID NO: 470595 - DNA, 19 bp, Mus musculus
  siRNA target sequence for Zfp162 (NM_011750.1,1063-1081).
ccaccgtctctcatgtcta

SEQ ID NO: 470596 - DNA, 19 bp, Mus musculus
  siRNA target sequence for Zfp162 (NM_011750.1,1066-1084).
ccgtctctcatgtctacaa

SEQ ID NO: 470597 - DNA, 19 bp, Mus musculus
  siRNA target sequence for Zfp162 (NM_011750.1,1068-1086).
gtctctcatgtctacaact

SEQ ID NO: 470598 - DNA, 19 bp, Mus musculus
  siRNA target sequence for Zfp162 (NM_011750.1,1239-1257).
gcagcacaacccaaatgga

SEQ ID NO: 470599 - DNA, 19 bp, Mus musculus
  siRNA target sequence for Zfp162 (NM_011750.1,1570-1588).
ccatggcagcaaaatacga

SEQ ID NO: 470600 - DNA, 19 bp, Mus musculus
  siRNA target sequence for Zfp162 (NM_011750.1,1764-1782).
catcgagtgtcttctttgt

SEQ ID NO: 470601 - DNA, 19 bp, Mus musculus
  siRNA target sequence for Zfp162 (NM_011750.1,1767-1785).
cgagtgtcttctttgtctt

SEQ ID NO: 470602 - DNA, 19 bp, Mus musculus
  siRNA target sequence for Zfp2 (NM_009550.1,477-495).
ggatcctacctgttggtta

SEQ ID NO: 470603 - DNA, 19 bp, Mus musculus
  siRNA target sequence for Zfp2 (NM_009550.1,478-496).
gatcctacctgttggttaa

SEQ ID NO: 470604 - DNA, 19 bp, Mus musculus
  siRNA target sequence for Zfp2 (NM_009550.1,535-553).
gcccaaaaggaaatctata

SEQ ID NO: 470605 - DNA, 19 bp, Mus musculus
  siRNA target sequence for Zfp2 (NM_009550.1,567-585).
gtgtggaggtaatacaact

SEQ ID NO: 470606 - DNA, 19 bp, Mus musculus
  siRNA target sequence for Zfp2 (NM_009550.1,593-611).
cttccactgagggatcaat

SEQ ID NO: 470607 - DNA, 19 bp, Mus musculus
  siRNA target sequence for Zfp2 (NM_009550.1,599-617).
ctgagggatcaatgcttaa

SEQ ID NO: 470608 - DNA, 19 bp, Mus musculus
  siRNA target sequence for Zfp2 (NM_009550.1,601-619).
gagggatcaatgcttaata

SEQ ID NO: 470609 - DNA, 19 bp, Mus musculus
  siRNA target sequence for Zfp2 (NM_009550.1,603-621).
gggatcaatgcttaataca

SEQ ID NO: 470610 - DNA, 19 bp, Mus musculus
  siRNA target sequence for Zfp2 (NM_009550.1,634-652).
cctgtgacaccttgtaatt

SEQ ID NO: 470611 - DNA, 19 bp, Mus musculus
  siRNA target sequence for Zfp2 (NM_009550.1,637-655).
gtgacaccttgtaattgga

SEQ ID NO: 470612 - DNA, 19 bp, Mus musculus
  siRNA target sequence for Zfp2 (NM_009550.1,639-657).
gacaccttgtaattggaat

SEQ ID NO: 470613 - DNA, 19 bp, Mus musculus
  siRNA target sequence for Zfp2 (NM_009550.1,659-677).
catatagaaaagattctaa

SEQ ID NO: 470614 - DNA, 19 bp, Mus musculus
  siRNA target sequence for Zfp2 (NM_009550.1,701-719).
cttcaagaatgtttgtaca

SEQ ID NO: 470615 - DNA, 19 bp, Mus musculus
  siRNA target sequence for Zfp2 (NM_009550.1,767-785).
gttcatccctgcttaagca

SEQ ID NO: 470616 - DNA, 19 bp, Mus musculus
  siRNA target sequence for Zfp2 (NM_009550.1,923-941).
cctttagtcagagtatgaa

SEQ ID NO: 470617 - DNA, 19 bp, Mus musculus
  siRNA target sequence for Zfp2 (NM_009550.1,1002-1020).
gaaagcattccgcaagaat

SEQ ID NO: 470618 - DNA, 19 bp, Mus musculus
  siRNA target sequence for Zfp2 (NM_009550.1,1006-1024).
gcattccgcaagaattcat

SEQ ID NO: 470619 - DNA, 19 bp, Mus musculus
  siRNA target sequence for Zfp2 (NM_009550.1,1017-1035).
gaattcatcccttattcaa

SEQ ID NO: 470620 - DNA, 19 bp, Mus musculus
  siRNA target sequence for Zfp2 (NM_009550.1,1147-1165).
ccttatgagtgtatgatct

SEQ ID NO: 470621 - DNA, 19 bp, Mus musculus
  siRNA target sequence for Zfp2 (NM_009550.1,1195-1213).
ctaactgtacaccaagtta

SEQ ID NO: 470622 - DNA, 19 bp, Mus musculus
  siRNA target sequence for Zfp2 (NM_009550.1,1265-1283).
gccaaagcgcctatctcat

SEQ ID NO: 470623 - DNA, 19 bp, Mus musculus
  siRNA target sequence for Zfp2 (NM_009550.1,1266-1284).
ccaaagcgcctatctcatt

SEQ ID NO: 470624 - DNA, 19 bp, Mus musculus
  siRNA target sequence for Zfp2 (NM_009550.1,1271-1289).
gcgcctatctcattgaaca

SEQ ID NO: 470625 - DNA, 19 bp, Mus musculus
  siRNA target sequence for Zfp2 (NM_009550.1,1427-1445).
ccttcagtaggagtacaaa

SEQ ID NO: 470626 - DNA, 19 bp, Mus musculus
  siRNA target sequence for Zfp2 (NM_178447.2,1376-1394).
gccaaagcatgcaccttat

SEQ ID NO: 470627 - DNA, 19 bp, Mus musculus
  siRNA target sequence for Zfp2 (NM_178447.2,1377-1395).
ccaaagcatgcaccttatt

SEQ ID NO: 470628 - DNA, 19 bp, Mus musculus
  siRNA target sequence for Zfp2 (NM_178447.2,1383-1401).
catgcaccttattgttcat

SEQ ID NO: 470629 - DNA, 19 bp, Mus musculus
  siRNA target sequence for Zfp2 (NM_178447.2,1536-1554).
gtcctttagtcaaagtaca

SEQ ID NO: 470630 - DNA, 19 bp, Mus musculus
  siRNA target sequence for Zfp2 (NM_178447.2,1581-1599).
ctccggagtgaaacctttt

SEQ ID NO: 470631 - DNA, 19 bp, Mus musculus
  siRNA target sequence for Zfp216 (NM_009551.2,505-523).
gcccatgctgtgtagtaca

SEQ ID NO: 470632 - DNA, 19 bp, Mus musculus
  siRNA target sequence for Zfp216 (NM_009551.2,530-548).
ggcttttatgggaatccta

SEQ ID NO: 470633 - DNA, 19 bp, Mus musculus
  siRNA target sequence for Zfp216 (NM_009551.2,599-617).
cagaatagtggcagaatga

SEQ ID NO: 470634 - DNA, 19 bp, Mus musculus
  siRNA target sequence for Zfp216 (NM_009551.2,646-664).
cagtcctacctcagattct

SEQ ID NO: 470635 - DNA, 19 bp, Mus musculus
  siRNA target sequence for Zfp216 (NM_009551.2,680-698).
gcagatgctggtttaaaca

SEQ ID NO: 470636 - DNA, 19 bp, Mus musculus
  siRNA target sequence for Zfp216 (NM_009551.2,681-699).
cagatgctggtttaaacaa

SEQ ID NO: 470637 - DNA, 19 bp, Mus musculus
  siRNA target sequence for Zfp216 (NM_009551.2,853-871).
gcccagtccatcagtttct

SEQ ID NO: 470638 - DNA, 19 bp, Mus musculus
  siRNA target sequence for Zfp216 (NM_009551.2,979-997).
ccgatgtggaaatttgttt

SEQ ID NO: 470639 - DNA, 19 bp, Mus musculus
  siRNA target sequence for Zfp216 (NM_009551.2,980-998).
cgatgtggaaatttgtttt

SEQ ID NO: 470640 - DNA, 19 bp, Mus musculus
  siRNA target sequence for Zfp216 (NM_009551.2,1021-1039).
caagcacaactgtccatat

SEQ ID NO: 470641 - DNA, 19 bp, Mus musculus
  siRNA target sequence for Zfp216 (NM_009551.2,1025-1043).
cacaactgtccatatgatt

SEQ ID NO: 470642 - DNA, 19 bp, Mus musculus
  siRNA target sequence for Zfp238 (NM_013915.1,1410-1428).
ggcttcatgcagcatgtat

SEQ ID NO: 470643 - DNA, 19 bp, Mus musculus
  siRNA target sequence for Zfp238 (NM_013915.1,1575-1593).
gctagcagctgccagttat

SEQ ID NO: 470644 - DNA, 19 bp, Mus musculus
  siRNA target sequence for Zfp238 (NM_013915.1,1658-1676).
cggacagcaccaaaaaaga

SEQ ID NO: 470645 - DNA, 19 bp, Mus musculus
  siRNA target sequence for Zfp238 (NM_013915.1,1659-1677).
ggacagcaccaaaaaagaa

SEQ ID NO: 470646 - DNA, 19 bp, Mus musculus
  siRNA target sequence for Zfp238 (NM_013915.1,1765-1783).
gaaggcgaagatgacaaat

SEQ ID NO: 470647 - DNA, 19 bp, Mus musculus
  siRNA target sequence for Zfp238 (NM_013915.1,1769-1787).
gcgaagatgacaaattgaa

SEQ ID NO: 470648 - DNA, 19 bp, Mus musculus
  siRNA target sequence for Zfp238 (NM_013915.1,1976-1994).
gggattcggcagatgttga

SEQ ID NO: 470649 - DNA, 19 bp, Mus musculus
  siRNA target sequence for Zfp238 (NM_013915.1,2025-2043).
cctttcaggagttgaaaat

SEQ ID NO: 470650 - DNA, 19 bp, Mus musculus
  siRNA target sequence for Zfp238 (NM_013915.1,2046-2064).
gaacagctcttatttctct

SEQ ID NO: 470651 - DNA, 19 bp, Mus musculus
  siRNA target sequence for Zfp238 (NM_013915.1,2130-2148).
gagtgatgttggcactaat

SEQ ID NO: 470652 - DNA, 19 bp, Mus musculus
  siRNA target sequence for Zfp238 (NM_013915.1,2132-2150).
gtgatgttggcactaatga

SEQ ID NO: 470653 - DNA, 19 bp, Mus musculus
  siRNA target sequence for Zfp238 (NM_013915.1,2140-2158).
ggcactaatgactatgaca

SEQ ID NO: 470654 - DNA, 19 bp, Mus musculus
  siRNA target sequence for Zfp238 (NM_013915.1,2141-2159).
gcactaatgactatgacat

SEQ ID NO: 470655 - DNA, 19 bp, Mus musculus
  siRNA target sequence for Zfp238 (NM_013915.1,2164-2182).
catagcactgtgaaagaga

SEQ ID NO: 470656 - DNA, 19 bp, Mus musculus
  siRNA target sequence for Zfp238 (NM_013915.1,2192-2210).
ctaacaacagggtacagta

SEQ ID NO: 470657 - DNA, 19 bp, Mus musculus
  siRNA target sequence for Zfp238 (NM_013915.1,2350-2368).
cttccctacgtctccaata

SEQ ID NO: 470658 - DNA, 19 bp, Mus musculus
  siRNA target sequence for Zfp238 (NM_013915.1,2354-2372).
cctacgtctccaatatcct

SEQ ID NO: 470659 - DNA, 19 bp, Mus musculus
  siRNA target sequence for Zfp238 (NM_013915.1,2399-2417).
gccccctgtgcaacaaagt

SEQ ID NO: 470660 - DNA, 19 bp, Mus musculus
  siRNA target sequence for Zfp238 (NM_013915.1,2766-2784).
ctccttgtcggtcaaaagt

SEQ ID NO: 470661 - DNA, 19 bp, Mus musculus
  siRNA target sequence for Zfp260 (NM_011981.2,858-876).
cagagaggaaacttccttt

SEQ ID NO: 470662 - DNA, 19 bp, Mus musculus
  siRNA target sequence for Zfp260 (NM_011981.2,940-958).
caaccaccgttagaaatca

SEQ ID NO: 470663 - DNA, 19 bp, Mus musculus
  siRNA target sequence for Zfp260 (NM_011981.2,946-964).
ccgttagaaatcagagaaa

SEQ ID NO: 470664 - DNA, 19 bp, Mus musculus
  siRNA target sequence for Zfp260 (NM_011981.2,1015-1033).
gcaagtcatatctcaaaga

SEQ ID NO: 470665 - DNA, 19 bp, Mus musculus
  siRNA target sequence for Zfp260 (NM_011981.2,1509-1527).
gccttttctcgaattacat

SEQ ID NO: 470666 - DNA, 19 bp, Mus musculus
  siRNA target sequence for Zfp260 (NM_011981.2,1519-1537).
gaattacatcgctcattgt

SEQ ID NO: 470667 - DNA, 19 bp, Mus musculus
  siRNA target sequence for Zfp27 (NM_011754.1,558-576).
gatgtgactatagatttca

SEQ ID NO: 470668 - DNA, 19 bp, Mus musculus
  siRNA target sequence for Zfp27 (NM_011754.1,656-674).
gcgctcagtggaagaacta

SEQ ID NO: 470669 - DNA, 19 bp, Mus musculus
  siRNA target sequence for Zfp27 (NM_011754.1,678-696).
cagattggtgaccagaaaa

SEQ ID NO: 470670 - DNA, 19 bp, Mus musculus
  siRNA target sequence for Zfp27 (NM_011754.1,698-716).
gacctaccagcaaatagga

SEQ ID NO: 470671 - DNA, 19 bp, Mus musculus
  siRNA target sequence for Zfp27 (NM_011754.1,704-722).
ccagcaaataggacataaa

SEQ ID NO: 470672 - DNA, 19 bp, Mus musculus
  siRNA target sequence for Zfp27 (NM_011754.1,705-723).
cagcaaataggacataaat

SEQ ID NO: 470673 - DNA, 19 bp, Mus musculus
  siRNA target sequence for Zfp27 (NM_011754.1,707-725).
gcaaataggacataaatca

SEQ ID NO: 470674 - DNA, 19 bp, Mus musculus
  siRNA target sequence for Zfp27 (NM_011754.1,717-735).
cataaatcagcgaatgata

SEQ ID NO: 470675 - DNA, 19 bp, Mus musculus
  siRNA target sequence for Zfp27 (NM_011754.1,724-742).
cagcgaatgatatggtttt

SEQ ID NO: 470676 - DNA, 19 bp, Mus musculus
  siRNA target sequence for Zfp27 (NM_011754.1,726-744).
gcgaatgatatggttttca

SEQ ID NO: 470677 - DNA, 19 bp, Mus musculus
  siRNA target sequence for Zfp27 (NM_011754.1,788-806).
cgttaggaaggtgattcat

SEQ ID NO: 470678 - DNA, 19 bp, Mus musculus
  siRNA target sequence for Zfp27 (NM_011754.1,798-816).
gtgattcatgtgaactcat

SEQ ID NO: 470679 - DNA, 19 bp, Mus musculus
  siRNA target sequence for Zfp27 (NM_011754.1,861-879).
gaggatgagccgaagcata

SEQ ID NO: 470680 - DNA, 19 bp, Mus musculus
  siRNA target sequence for Zfp27 (NM_011754.1,864-882).
gatgagccgaagcatagtt

SEQ ID NO: 470681 - DNA, 19 bp, Mus musculus
  siRNA target sequence for Zfp27 (NM_011754.1,869-887).
gccgaagcatagttcagat

SEQ ID NO: 470682 - DNA, 19 bp, Mus musculus
  siRNA target sequence for Zfp27 (NM_011754.1,870-888).
ccgaagcatagttcagatt

SEQ ID NO: 470683 - DNA, 19 bp, Mus musculus
  siRNA target sequence for Zfp27 (NM_011754.1,871-889).
cgaagcatagttcagattt

SEQ ID NO: 470684 - DNA, 19 bp, Mus musculus
  siRNA target sequence for Zfp27 (NM_011754.1,876-894).
catagttcagatttacaga

SEQ ID NO: 470685 - DNA, 19 bp, Mus musculus
  siRNA target sequence for Zfp27 (NM_011754.1,893-911).
gactcatgatgaaagtaat

SEQ ID NO: 470686 - DNA, 19 bp, Mus musculus
  siRNA target sequence for Zfp27 (NM_011754.1,912-930).
gggctgaagagaactaaaa

SEQ ID NO: 470687 - DNA, 19 bp, Mus musculus
  siRNA target sequence for Zfp27 (NM_011754.1,931-949).
ggattactgaatatggtaa

SEQ ID NO: 470688 - DNA, 19 bp, Mus musculus
  siRNA target sequence for Zfp27 (NM_011754.1,968-986).
cactgaacatattctaaca

SEQ ID NO: 470689 - DNA, 19 bp, Mus musculus
  siRNA target sequence for Zfp27 (NM_011754.1,992-1010).
gaaattaccggaccataat

SEQ ID NO: 470690 - DNA, 19 bp, Mus musculus
  siRNA target sequence for Zfp27 (NM_011754.1,1017-1035).
ggaaaagtcctcggttata

SEQ ID NO: 470691 - DNA, 19 bp, Mus musculus
  siRNA target sequence for Zfp27 (NM_011754.1,1018-1036).
gaaaagtcctcggttataa

SEQ ID NO: 470692 - DNA, 19 bp, Mus musculus
  siRNA target sequence for Zfp27 (NM_011754.1,1025-1043).
cctcggttataaacaaata

SEQ ID NO: 470693 - DNA, 19 bp, Mus musculus
  siRNA target sequence for Zfp27 (NM_011754.1,1028-1046).
cggttataaacaaatacct

SEQ ID NO: 470694 - DNA, 19 bp, Mus musculus
  siRNA target sequence for Zfp27 (NM_011754.1,1144-1162).
cgtctcctacaggagaaaa

SEQ ID NO: 470695 - DNA, 19 bp, Mus musculus
  siRNA target sequence for Zfp27 (NM_011754.1,2878-2896).
ccgataggtccaatttgaa

SEQ ID NO: 470696 - DNA, 19 bp, Mus musculus
  siRNA target sequence for Zfp27 (NM_011754.1,2879-2897).
cgataggtccaatttgaat

SEQ ID NO: 470697 - DNA, 19 bp, Mus musculus
  siRNA target sequence for Zfp27 (NM_011754.1,2880-2898).
gataggtccaatttgaata

SEQ ID NO: 470698 - DNA, 19 bp, Mus musculus
  siRNA target sequence for Zfp27 (NM_011754.1,2980-2998).
gcattcatgagaatgttca

SEQ ID NO: 470699 - DNA, 19 bp, Mus musculus
  siRNA target sequence for Zfp278 (NM_019574.1,480-498).
ccatcagttccaaagtgtt

SEQ ID NO: 470700 - DNA, 19 bp, Mus musculus
  siRNA target sequence for Zfp278 (NM_019574.1,509-527).
ctggacttcgcttatacgt

SEQ ID NO: 470701 - DNA, 19 bp, Mus musculus
  siRNA target sequence for Zfp278 (NM_019574.1,925-943).
cagtgcacctccactaact

SEQ ID NO: 470702 - DNA, 19 bp, Mus musculus
  siRNA target sequence for Zfp278 (NM_019574.1,1114-1132).
ccagttgggctatatcgat

SEQ ID NO: 470703 - DNA, 19 bp, Mus musculus
  siRNA target sequence for Zfp278 (NM_019574.1,1181-1199).
cccgatggccccagaaaaa

SEQ ID NO: 470704 - DNA, 19 bp, Mus musculus
  siRNA target sequence for Zfp278 (NM_019574.1,1246-1264).
ctttcgtgacgtataccat

SEQ ID NO: 470705 - DNA, 19 bp, Mus musculus
  siRNA target sequence for Zfp278 (NM_019574.1,1251-1269).
gtgacgtataccatctcaa

SEQ ID NO: 470706 - DNA, 19 bp, Mus musculus
  siRNA target sequence for Zfp278 (NM_019574.1,1265-1283).
ctcaaccggcataagcttt

SEQ ID NO: 470707 - DNA, 19 bp, Mus musculus
  siRNA target sequence for Zfp278 (NM_019574.1,1322-1340).
ggtctgcggttcaagagaa

SEQ ID NO: 470708 - DNA, 19 bp, Mus musculus
  siRNA target sequence for Zfp278 (NM_019574.1,1382-1400).
gtgggcaaaccgtacatct

SEQ ID NO: 470709 - DNA, 19 bp, Mus musculus
  siRNA target sequence for Zfp278 (NM_019574.1,1403-1421).
cagagctgtgggaaaggtt

SEQ ID NO: 470710 - DNA, 19 bp, Mus musculus
  siRNA target sequence for Zfp278 (NM_019574.1,1436-1454).
cacttgaatggacatatca

SEQ ID NO: 470711 - DNA, 19 bp, Mus musculus
  siRNA target sequence for Zfp278 (NM_019574.1,1534-1552).
ccacctggcctgtcatgaa

SEQ ID NO: 470712 - DNA, 19 bp, Mus musculus
  siRNA target sequence for Zfp278 (NM_019574.1,1661-1679).
cgagaaggccagaaatgct

SEQ ID NO: 470713 - DNA, 19 bp, Mus musculus
  siRNA target sequence for Zfp278 (NM_019574.1,1677-1695).
gctcacatcaggatctgat

SEQ ID NO: 470714 - DNA, 19 bp, Mus musculus
  siRNA target sequence for Zfp278 (NM_019574.1,1680-1698).
cacatcaggatctgattga

SEQ ID NO: 470715 - DNA, 19 bp, Mus musculus
  siRNA target sequence for Zfp278 (NM_019574.1,1784-1802).
gacgtggcagtccctaaaa

SEQ ID NO: 470716 - DNA, 19 bp, Mus musculus
  siRNA target sequence for Zfp278 (NM_019574.1,1862-1880).
cgttctaagtcctacttga

SEQ ID NO: 470717 - DNA, 19 bp, Mus musculus
  siRNA target sequence for Zfp278 (NM_019574.1,1863-1881).
gttctaagtcctacttgaa

SEQ ID NO: 470718 - DNA, 19 bp, Mus musculus
  siRNA target sequence for Zfp278 (NM_019574.1,1866-1884).
ctaagtcctacttgaacaa

SEQ ID NO: 470719 - DNA, 19 bp, Mus musculus
  siRNA target sequence for Zfp278 (NM_019574.1,1945-1963).
ccttggttcacctttctct

SEQ ID NO: 470720 - DNA, 19 bp, Mus musculus
  siRNA target sequence for Zfp278 (NM_019574.1,2009-2027).
gttcagtcagcgtttgcat

SEQ ID NO: 470721 - DNA, 19 bp, Mus musculus
  siRNA target sequence for Zfp278 (NM_019574.1,2014-2032).
gtcagcgtttgcatcatct

SEQ ID NO: 470722 - DNA, 19 bp, Mus musculus
  siRNA target sequence for Zfp278 (NM_019574.1,2016-2034).
cagcgtttgcatcatcttt

SEQ ID NO: 470723 - DNA, 19 bp, Mus musculus
  siRNA target sequence for Zfp288 (NM_019778.1,454-472).
ccttccctgcctgaacttt

SEQ ID NO: 470724 - DNA, 19 bp, Mus musculus
  siRNA target sequence for Zfp288 (NM_019778.1,502-520).
catccactcgacacattca

SEQ ID NO: 470725 - DNA, 19 bp, Mus musculus
  siRNA target sequence for Zfp288 (NM_019778.1,539-557).
cacaccgggtcatctgatt

SEQ ID NO: 470726 - DNA, 19 bp, Mus musculus
  siRNA target sequence for Zfp288 (NM_019778.1,541-559).
caccgggtcatctgattgt

SEQ ID NO: 470727 - DNA, 19 bp, Mus musculus
  siRNA target sequence for Zfp288 (NM_019778.1,543-561).
ccgggtcatctgattgtga

SEQ ID NO: 470728 - DNA, 19 bp, Mus musculus
  siRNA target sequence for Zfp288 (NM_019778.1,798-816).
ccgtacaatcggtgcaaaa

SEQ ID NO: 470729 - DNA, 19 bp, Mus musculus
  siRNA target sequence for Zfp288 (NM_019778.1,807-825).
cggtgcaaaagctcattga

SEQ ID NO: 470730 - DNA, 19 bp, Mus musculus
  siRNA target sequence for Zfp288 (NM_019778.1,898-916).
gcagatcaaaacagtcata

SEQ ID NO: 470731 - DNA, 19 bp, Mus musculus
  siRNA target sequence for Zfp288 (NM_019778.1,1216-1234).
ctggatcacacgcattcat

SEQ ID NO: 470732 - DNA, 19 bp, Mus musculus
  siRNA target sequence for Zfp288 (NM_019778.1,1218-1236).
ggatcacacgcattcatga

SEQ ID NO: 470733 - DNA, 19 bp, Mus musculus
  siRNA target sequence for Zfp288 (NM_019778.1,1396-1414).
gatcctagaacgcaatgaa

SEQ ID NO: 470734 - DNA, 19 bp, Mus musculus
  siRNA target sequence for Zfp288 (NM_019778.1,1465-1483).
gcccaaaggtgaaagcttt

SEQ ID NO: 470735 - DNA, 19 bp, Mus musculus
  siRNA target sequence for Zfp288 (NM_019778.1,1522-1540).
ctcagtggagcaacagttt

SEQ ID NO: 470736 - DNA, 19 bp, Mus musculus
  siRNA target sequence for Zfp288 (NM_019778.1,1769-1787).
ccaagtacccagctctatt

SEQ ID NO: 470737 - DNA, 19 bp, Mus musculus
  siRNA target sequence for Zfp288 (NM_019778.1,1880-1898).
ctgccagccctcttcacta

SEQ ID NO: 470738 - DNA, 19 bp, Mus musculus
  siRNA target sequence for Zfp288 (NM_019778.1,2067-2085).
gtgggcaaggcgacaaaaa

SEQ ID NO: 470739 - DNA, 19 bp, Mus musculus
  siRNA target sequence for Zfp288 (NM_019778.1,2100-2118).
ctctctgcaacaagacttt

SEQ ID NO: 470740 - DNA, 19 bp, Mus musculus
  siRNA target sequence for Zfp288 (NM_019778.1,2104-2122).
ctgcaacaagactttcaca

SEQ ID NO: 470741 - DNA, 19 bp, Mus musculus
  siRNA target sequence for Zfp288 (NM_019778.1,2199-2217).
ccttctccttgaaggatta

SEQ ID NO: 470742 - DNA, 19 bp, Mus musculus
  siRNA target sequence for Zfp288 (NM_019778.1,2203-2221).
ctccttgaaggattacctt

SEQ ID NO: 470743 - DNA, 19 bp, Mus musculus
  siRNA target sequence for Zfp288 (NM_019778.1,2205-2223).
ccttgaaggattaccttat

SEQ ID NO: 470744 - DNA, 19 bp, Mus musculus
  siRNA target sequence for Zfp288 (NM_019778.1,2511-2529).
ccgtctgcccagcaaagtt

SEQ ID NO: 470745 - DNA, 19 bp, Mus musculus
  siRNA target sequence for Zfp288 (NM_019778.1,2512-2530).
cgtctgcccagcaaagttt

SEQ ID NO: 470746 - DNA, 19 bp, Mus musculus
  siRNA target sequence for Zfp288 (NM_019778.1,2520-2538).
cagcaaagtttgaccaaat

SEQ ID NO: 470747 - DNA, 19 bp, Mus musculus
  siRNA target sequence for Zfp288 (NM_019778.1,2523-2541).
caaagtttgaccaaatcga

SEQ ID NO: 470748 - DNA, 19 bp, Mus musculus
  siRNA target sequence for Zfp289 (NM_023854.1,1483-1501).
gctgacattgcccagttta

SEQ ID NO: 470749 - DNA, 19 bp, Mus musculus
  siRNA target sequence for Zfp297 (NM_020625.2,360-378).
cgaccaggtcctactgaaa

SEQ ID NO: 470750 - DNA, 19 bp, Mus musculus
  siRNA target sequence for Zfp297 (NM_020625.2,370-388).
ctactgaaaggcatgactt

SEQ ID NO: 470751 - DNA, 19 bp, Mus musculus
  siRNA target sequence for Zfp297 (NM_020625.2,412-430).
gacccaggcgcttttgaga

SEQ ID NO: 470752 - DNA, 19 bp, Mus musculus
  siRNA target sequence for Zfp297 (NM_020625.2,473-491).
ctgcggacattgtcaactt

SEQ ID NO: 470753 - DNA, 19 bp, Mus musculus
  siRNA target sequence for Zfp297 (NM_020625.2,562-580).
cgatccgcagccactacaa

SEQ ID NO: 470754 - DNA, 19 bp, Mus musculus
  siRNA target sequence for Zfp297 (NM_020625.2,748-766).
cgggagtcgactgatttct

SEQ ID NO: 470755 - DNA, 19 bp, Mus musculus
  siRNA target sequence for Zfp297 (NM_020625.2,770-788).
ctacctcccaggatgcatt

SEQ ID NO: 470756 - DNA, 19 bp, Mus musculus
  siRNA target sequence for Zfp297 (NM_020625.2,773-791).
cctcccaggatgcatttgt

SEQ ID NO: 470757 - DNA, 19 bp, Mus musculus
  siRNA target sequence for Zfp297 (NM_020625.2,952-970).
gggctccggaggtctaact

SEQ ID NO: 470758 - DNA, 19 bp, Mus musculus
  siRNA target sequence for Zfp297 (NM_020625.2,1012-1030).
gtgaagcaagctagaaatt

SEQ ID NO: 470759 - DNA, 19 bp, Mus musculus
  siRNA target sequence for Zfp297 (NM_020625.2,1090-1108).
gaagatctggtgttgactt

SEQ ID NO: 470760 - DNA, 19 bp, Mus musculus
  siRNA target sequence for Zfp297 (NM_020625.2,1169-1187).
ccgaggctaccctcagtat

SEQ ID NO: 470761 - DNA, 19 bp, Mus musculus
  siRNA target sequence for Zfp297 (NM_020625.2,1173-1191).
ggctaccctcagtatcagt

SEQ ID NO: 470762 - DNA, 19 bp, Mus musculus
  siRNA target sequence for Zfp297 (NM_020625.2,1352-1370).
cacgacccctccttccatt

SEQ ID NO: 470763 - DNA, 19 bp, Mus musculus
  siRNA target sequence for Zfp297 (NM_020625.2,1486-1504).
gtggggctgggcataccaa

SEQ ID NO: 470764 - DNA, 19 bp, Mus musculus
  siRNA target sequence for Zfp297 (NM_020625.2,1535-1553).
gcaacagcgacgggaataa

SEQ ID NO: 470765 - DNA, 19 bp, Mus musculus
  siRNA target sequence for Zfp297 (NM_020625.2,1541-1559).
gcgacgggaataagatctt

SEQ ID NO: 470766 - DNA, 19 bp, Mus musculus
  siRNA target sequence for Zfp297 (NM_020625.2,1600-1618).
cgggaccggcacgtgaata

SEQ ID NO: 470767 - DNA, 19 bp, Mus musculus
  siRNA target sequence for Zfp297 (NM_020625.2,1601-1619).
gggaccggcacgtgaatat

SEQ ID NO: 470768 - DNA, 19 bp, Mus musculus
  siRNA target sequence for Zfp297 (NM_020625.2,1605-1623).
ccggcacgtgaatatgcat

SEQ ID NO: 470769 - DNA, 19 bp, Mus musculus
  siRNA target sequence for Zfp297 (NM_020625.2,1648-1666).
cccgtgtgcaacaaaaagt

SEQ ID NO: 470770 - DNA, 19 bp, Mus musculus
  siRNA target sequence for Zfp297 (NM_020625.2,1649-1667).
ccgtgtgcaacaaaaagtt

SEQ ID NO: 470771 - DNA, 19 bp, Mus musculus
  siRNA target sequence for Zfp297 (NM_020625.2,1651-1669).
gtgtgcaacaaaaagttca

SEQ ID NO: 470772 - DNA, 19 bp, Mus musculus
  siRNA target sequence for Zfp297 (NM_020625.2,1711-1729).
ggcctcaagccgtacgaat

SEQ ID NO: 470773 - DNA, 19 bp, Mus musculus
  siRNA target sequence for Zfp297 (NM_020625.2,1733-1751).
gtgtctgcgccaagaagtt

SEQ ID NO: 470774 - DNA, 19 bp, Mus musculus
  siRNA target sequence for Zfp297 (NM_020625.2,1981-1999).
cacaaagtggagatggatt

SEQ ID NO: 470775 - DNA, 19 bp, Mus musculus
  siRNA target sequence for Zfp297b (NM_027947.1,143-161).
cgaaaaaacgtttattcat

SEQ ID NO: 470776 - DNA, 19 bp, Mus musculus
  siRNA target sequence for Zfp297b (NM_027947.1,180-198).
gacagagcaaagtacgatt

SEQ ID NO: 470777 - DNA, 19 bp, Mus musculus
  siRNA target sequence for Zfp297b (NM_027947.1,184-202).
gagcaaagtacgattccat

SEQ ID NO: 470778 - DNA, 19 bp, Mus musculus
  siRNA target sequence for Zfp297b (NM_027947.1,191-209).
gtacgattccatcatcaaa

SEQ ID NO: 470779 - DNA, 19 bp, Mus musculus
  siRNA target sequence for Zfp297b (NM_027947.1,216-234).
cttgtcgaaccacactaaa

SEQ ID NO: 470780 - DNA, 19 bp, Mus musculus
  siRNA target sequence for Zfp297b (NM_027947.1,219-237).
gtcgaaccacactaaacaa

SEQ ID NO: 470781 - DNA, 19 bp, Mus musculus
  siRNA target sequence for Zfp297b (NM_027947.1,254-272).
gagcctggaacgaactctt

SEQ ID NO: 470782 - DNA, 19 bp, Mus musculus
  siRNA target sequence for Zfp297b (NM_027947.1,258-276).
ctggaacgaactcttttca

SEQ ID NO: 470783 - DNA, 19 bp, Mus musculus
  siRNA target sequence for Zfp297b (NM_027947.1,261-279).
gaacgaactcttttcaagt

SEQ ID NO: 470784 - DNA, 19 bp, Mus musculus
  siRNA target sequence for Zfp297b (NM_027947.1,264-282).
cgaactcttttcaagtaga

SEQ ID NO: 470785 - DNA, 19 bp, Mus musculus
  siRNA target sequence for Zfp297b (NM_027947.1,329-347).
cgccagcaaggacagttat

SEQ ID NO: 470786 - DNA, 19 bp, Mus musculus
  siRNA target sequence for Zfp297b (NM_027947.1,348-366).
gtgacgtctccattgttgt

SEQ ID NO: 470787 - DNA, 19 bp, Mus musculus
  siRNA target sequence for Zfp297b (NM_027947.1,362-380).
gttgtccaaggccacattt

SEQ ID NO: 470788 - DNA, 19 bp, Mus musculus
  siRNA target sequence for Zfp297b (NM_027947.1,406-424).
cgccagttctccctacttt

SEQ ID NO: 470789 - DNA, 19 bp, Mus musculus
  siRNA target sequence for Zfp297b (NM_027947.1,407-425).
gccagttctccctactttt

SEQ ID NO: 470790 - DNA, 19 bp, Mus musculus
  siRNA target sequence for Zfp297b (NM_027947.1,409-427).
cagttctccctacttttgt

SEQ ID NO: 470791 - DNA, 19 bp, Mus musculus
  siRNA target sequence for Zfp297b (NM_027947.1,428-446).
gaccaagtactcctgaaaa

SEQ ID NO: 470792 - DNA, 19 bp, Mus musculus
  siRNA target sequence for Zfp297b (NM_027947.1,434-452).
gtactcctgaaaaacagta

SEQ ID NO: 470793 - DNA, 19 bp, Mus musculus
  siRNA target sequence for Zfp297b (NM_027947.1,461-479).
gttttgcccgatgtaatga

SEQ ID NO: 470794 - DNA, 19 bp, Mus musculus
  siRNA target sequence for Zfp297b (NM_027947.1,543-561).
cagaaattgttagttactt

SEQ ID NO: 470795 - DNA, 19 bp, Mus musculus
  siRNA target sequence for Zfp297b (NM_027947.1,678-696).
ccagtagcagtaactacaa

SEQ ID NO: 470796 - DNA, 19 bp, Mus musculus
  siRNA target sequence for Zfp297b (NM_027947.1,815-833).
gtcaccgagcacgagtatt

SEQ ID NO: 470797 - DNA, 19 bp, Mus musculus
  siRNA target sequence for Zfp297b (NM_027947.1,896-914).
gaggaggggaccaatgaca

SEQ ID NO: 470798 - DNA, 19 bp, Mus musculus
  siRNA target sequence for Zfp297b (NM_027947.1,1055-1073).
gtcactgaatccgtcaata

SEQ ID NO: 470799 - DNA, 19 bp, Mus musculus
  siRNA target sequence for Zfp297b (NM_027947.1,1059-1077).
ctgaatccgtcaataccat

SEQ ID NO: 470800 - DNA, 19 bp, Mus musculus
  siRNA target sequence for Zfp297b (NM_027947.1,1240-1258).
gggtgggaatctaattgga

SEQ ID NO: 470801 - DNA, 19 bp, Mus musculus
  siRNA target sequence for Zfp297b (NM_027947.1,1246-1264).
gaatctaattggacacaaa

SEQ ID NO: 470802 - DNA, 19 bp, Mus musculus
  siRNA target sequence for Zfp297b (NM_027947.1,1283-1301).
gcaggctacagtgagaata

SEQ ID NO: 470803 - DNA, 19 bp, Mus musculus
  siRNA target sequence for Zfp297b (NM_027947.1,1328-1346).
gaggcgtcccacttaggat

SEQ ID NO: 470804 - DNA, 19 bp, Mus musculus
  siRNA target sequence for Zfp297b (NM_027947.1,1389-1407).
gtttcacgcacaaaagtca

SEQ ID NO: 470805 - DNA, 19 bp, Mus musculus
  siRNA target sequence for Zfp297b (NM_027947.1,1498-1516).
gggccacatgaaaattcat

SEQ ID NO: 470806 - DNA, 19 bp, Mus musculus
  siRNA target sequence for Zfp297b (NM_027947.1,1499-1517).
ggccacatgaaaattcata

SEQ ID NO: 470807 - DNA, 19 bp, Mus musculus
  siRNA target sequence for Zfp31 (NM_177758.2,1335-1353).
cccccttcgccgaaaagct

SEQ ID NO: 470808 - DNA, 19 bp, Mus musculus
  siRNA target sequence for Zfp31 (NM_177758.2,1336-1354).
ccccttcgccgaaaagctt

SEQ ID NO: 470809 - DNA, 19 bp, Mus musculus
  siRNA target sequence for Zfp31 (NM_177758.2,1355-1373).
cgcacctgtcaccaaaaca

SEQ ID NO: 470810 - DNA, 19 bp, Mus musculus
  siRNA target sequence for Zfp31 (NM_177758.2,1421-1439).
ctgcggacgctggaacaat

SEQ ID NO: 470811 - DNA, 19 bp, Mus musculus
  siRNA target sequence for Zfp31 (NM_177758.2,1440-1458).
gccgctaccgattcaagaa

SEQ ID NO: 470812 - DNA, 19 bp, Mus musculus
  siRNA target sequence for Zfp31 (NM_177758.2,1503-1521).
gaacctgcccgttctatga

SEQ ID NO: 470813 - DNA, 19 bp, Mus musculus
  siRNA target sequence for Zfp31 (NM_177758.2,1695-1713).
ctgcagatgcaggatttga

SEQ ID NO: 470814 - DNA, 19 bp, Mus musculus
  siRNA target sequence for Zfp31 (NM_177758.2,1697-1715).
gcagatgcaggatttgagt

SEQ ID NO: 470815 - DNA, 19 bp, Mus musculus
  siRNA target sequence for Zfp31 (NM_177758.2,1768-1786).
gcctggcgccttatcaaga

SEQ ID NO: 470816 - DNA, 19 bp, Mus musculus
  siRNA target sequence for Zfp31 (NM_177758.2,1769-1787).
cctggcgccttatcaagat

SEQ ID NO: 470817 - DNA, 19 bp, Mus musculus
  siRNA target sequence for Zfp31 (NM_177758.2,1770-1788).
ctggcgccttatcaagata

SEQ ID NO: 470818 - DNA, 19 bp, Mus musculus
  siRNA target sequence for Zfp31 (NM_177758.2,1772-1790).
ggcgccttatcaagatata

SEQ ID NO: 470819 - DNA, 19 bp, Mus musculus
  siRNA target sequence for Zfp31 (NM_177758.2,1889-1907).
gaggacttagaaaaactca

SEQ ID NO: 470820 - DNA, 19 bp, Mus musculus
  siRNA target sequence for Zfp31 (NM_177758.2,1997-2015).
ccgcagcggacccattcaa

SEQ ID NO: 470821 - DNA, 19 bp, Mus musculus
  siRNA target sequence for Zfp31 (NM_177758.2,1999-2017).
gcagcggacccattcaagt

SEQ ID NO: 470822 - DNA, 19 bp, Mus musculus
  siRNA target sequence for Zfp31 (NM_177758.2,2302-2320).
gaactttggccaaagtcta

SEQ ID NO: 470823 - DNA, 19 bp, Mus musculus
  siRNA target sequence for Zfp31 (NM_177758.2,2305-2323).
ctttggccaaagtctatca

SEQ ID NO: 470824 - DNA, 19 bp, Mus musculus
  siRNA target sequence for Zfp31 (NM_177758.2,2333-2351).
cactggagacgaaattcta

SEQ ID NO: 470825 - DNA, 19 bp, Mus musculus
  siRNA target sequence for Zfp31 (NM_177758.2,2335-2353).
ctggagacgaaattctaca

SEQ ID NO: 470826 - DNA, 19 bp, Mus musculus
  siRNA target sequence for Zfp31 (NM_177758.2,2352-2370).
cacaggagggacctaaaga

SEQ ID NO: 470827 - DNA, 19 bp, Mus musculus
  siRNA target sequence for Zfp31 (NM_177758.2,2364-2382).
ctaaagaacctcagaatat

SEQ ID NO: 470828 - DNA, 19 bp, Mus musculus
  siRNA target sequence for Zfp35 (NM_011755.1,223-241).
gatccaattcagttacgaa

SEQ ID NO: 470829 - DNA, 19 bp, Mus musculus
  siRNA target sequence for Zfp35 (NM_011755.1,245-263).
caagaccatcactttctgt

SEQ ID NO: 470830 - DNA, 19 bp, Mus musculus
  siRNA target sequence for Zfp35 (NM_011755.1,269-287).
ggtgagactaagatcaaga

SEQ ID NO: 470831 - DNA, 19 bp, Mus musculus
  siRNA target sequence for Zfp35 (NM_011755.1,270-288).
gtgagactaagatcaagat

SEQ ID NO: 470832 - DNA, 19 bp, Mus musculus
  siRNA target sequence for Zfp35 (NM_011755.1,398-416).
cgtgaatttggagaagaat

SEQ ID NO: 470833 - DNA, 19 bp, Mus musculus
  siRNA target sequence for Zfp35 (NM_011755.1,515-533).
cattggaaaccttacgaat

SEQ ID NO: 470834 - DNA, 19 bp, Mus musculus
  siRNA target sequence for Zfp35 (NM_011755.1,614-632).
ccttgtagttggtgtatta

SEQ ID NO: 470835 - DNA, 19 bp, Mus musculus
  siRNA target sequence for Zfp35 (NM_011755.1,615-633).
cttgtagttggtgtattaa

SEQ ID NO: 470836 - DNA, 19 bp, Mus musculus
  siRNA target sequence for Zfp35 (NM_011755.1,730-748).
gagctcagatcttatgata

SEQ ID NO: 470837 - DNA, 19 bp, Mus musculus
  siRNA target sequence for Zfp35 (NM_011755.1,733-751).
ctcagatcttatgatacat

SEQ ID NO: 470838 - DNA, 19 bp, Mus musculus
  siRNA target sequence for Zfp35 (NM_011755.1,781-799).
ccaatgtagtcattgtagt

SEQ ID NO: 470839 - DNA, 19 bp, Mus musculus
  siRNA target sequence for Zfp35 (NM_011755.1,819-837).
caggcatggttaaacatct

SEQ ID NO: 470840 - DNA, 19 bp, Mus musculus
  siRNA target sequence for Zfp35 (NM_011755.1,868-886).
gtgtaaccattgttacaaa

SEQ ID NO: 470841 - DNA, 19 bp, Mus musculus
  siRNA target sequence for Zfp35 (NM_011755.1,870-888).
gtaaccattgttacaaaca

SEQ ID NO: 470842 - DNA, 19 bp, Mus musculus
  siRNA target sequence for Zfp35 (NM_011755.1,900-918).
gctctgatcttataaaaca

SEQ ID NO: 470843 - DNA, 19 bp, Mus musculus
  siRNA target sequence for Zfp35 (NM_011755.1,1034-1052).
ccgtgtgctcagtgtaaca

SEQ ID NO: 470844 - DNA, 19 bp, Mus musculus
  siRNA target sequence for Zfp35 (NM_011755.1,1204-1222).
gtgtaaccagtgtaccaaa

SEQ ID NO: 470845 - DNA, 19 bp, Mus musculus
  siRNA target sequence for Zfp35 (NM_011755.1,1230-1248).
gtaggctttcagatcttat

SEQ ID NO: 470846 - DNA, 19 bp, Mus musculus
  siRNA target sequence for Zfp35 (NM_011755.1,1295-1313).
cagtgcagtaaaatgttta

SEQ ID NO: 470847 - DNA, 19 bp, Mus musculus
  siRNA target sequence for Zfp35 (NM_011755.1,1376-1394).
gataagtgtggcaaaactt

SEQ ID NO: 470848 - DNA, 19 bp, Mus musculus
  siRNA target sequence for Zfp35 (NM_011755.1,1455-1473).
cgtgcaacagctgttctaa

SEQ ID NO: 470849 - DNA, 19 bp, Mus musculus
  siRNA target sequence for Zfp35 (NM_011755.1,1456-1474).
gtgcaacagctgttctaaa

SEQ ID NO: 470850 - DNA, 19 bp, Mus musculus
  siRNA target sequence for Zfp35 (NM_011755.1,1910-1928).
gatctggttaaccatcaaa

SEQ ID NO: 470851 - DNA, 19 bp, Mus musculus
  siRNA target sequence for Zfp35 (NM_011755.1,1929-1947).
gagttcacgctgatcaaaa

SEQ ID NO: 470852 - DNA, 19 bp, Mus musculus
  siRNA target sequence for Zfp35 (NM_011755.1,1936-1954).
cgctgatcaaaaactacaa

SEQ ID NO: 470853 - DNA, 19 bp, Mus musculus
  siRNA target sequence for Zfp35 (NM_011755.1,1937-1955).
gctgatcaaaaactacaaa

SEQ ID NO: 470854 - DNA, 19 bp, Mus musculus
  siRNA target sequence for Zfp35 (NM_011755.1,1940-1958).
gatcaaaaactacaaatgt

SEQ ID NO: 470855 - DNA, 19 bp, Mus musculus
  siRNA target sequence for Zfp354a (NM_009329.2,363-381).
cgtttaccaaaccaaaagt

SEQ ID NO: 470856 - DNA, 19 bp, Mus musculus
  siRNA target sequence for Zfp354a (NM_009329.2,475-493).
cactaagtcaactcaaaca

SEQ ID NO: 470857 - DNA, 19 bp, Mus musculus
  siRNA target sequence for Zfp354a (NM_009329.2,504-522).
catttcgggaactgattat

SEQ ID NO: 470858 - DNA, 19 bp, Mus musculus
  siRNA target sequence for Zfp354a (NM_009329.2,509-527).
cgggaactgattatgagaa

SEQ ID NO: 470859 - DNA, 19 bp, Mus musculus
  siRNA target sequence for Zfp354a (NM_009329.2,510-528).
gggaactgattatgagaaa

SEQ ID NO: 470860 - DNA, 19 bp, Mus musculus
  siRNA target sequence for Zfp354a (NM_009329.2,542-560).
gaaccttggaacatgaagt

SEQ ID NO: 470861 - DNA, 19 bp, Mus musculus
  siRNA target sequence for Zfp354a (NM_009329.2,584-602).
ggcaaattagaggaaaagt

SEQ ID NO: 470862 - DNA, 19 bp, Mus musculus
  siRNA target sequence for Zfp354a (NM_009329.2,595-613).
ggaaaagtgggatgtgaat

SEQ ID NO: 470863 - DNA, 19 bp, Mus musculus
  siRNA target sequence for Zfp354a (NM_009329.2,610-628).
gaatgcctcgactatagaa

SEQ ID NO: 470864 - DNA, 19 bp, Mus musculus
  siRNA target sequence for Zfp354a (NM_009329.2,614-632).
gcctcgactatagaaagaa

SEQ ID NO: 470865 - DNA, 19 bp, Mus musculus
  siRNA target sequence for Zfp354a (NM_009329.2,619-637).
gactatagaaagaagctat

SEQ ID NO: 470866 - DNA, 19 bp, Mus musculus
  siRNA target sequence for Zfp354a (NM_009329.2,652-670).
gagcccaaagtcacataga

SEQ ID NO: 470867 - DNA, 19 bp, Mus musculus
  siRNA target sequence for Zfp354a (NM_009329.2,697-715).
gcaaatatcatatttatct

SEQ ID NO: 470868 - DNA, 19 bp, Mus musculus
  siRNA target sequence for Zfp354a (NM_009329.2,733-751).
cccagataaacgctataaa

SEQ ID NO: 470869 - DNA, 19 bp, Mus musculus
  siRNA target sequence for Zfp354a (NM_009329.2,775-793).
cattaacacctcatctctt

SEQ ID NO: 470870 - DNA, 19 bp, Mus musculus
  siRNA target sequence for Zfp354a (NM_009329.2,781-799).
cacctcatctcttcgtaaa

SEQ ID NO: 470871 - DNA, 19 bp, Mus musculus
  siRNA target sequence for Zfp354a (NM_009329.2,783-801).
cctcatctcttcgtaaaca

SEQ ID NO: 470872 - DNA, 19 bp, Mus musculus
  siRNA target sequence for Zfp354a (NM_009329.2,938-956).
gccttcactctcagtacat

SEQ ID NO: 470873 - DNA, 19 bp, Mus musculus
  siRNA target sequence for Zfp354a (NM_009329.2,947-965).
ctcagtacatccctgtata

SEQ ID NO: 470874 - DNA, 19 bp, Mus musculus
  siRNA target sequence for Zfp354a (NM_009329.2,951-969).
gtacatccctgtataaaca

SEQ ID NO: 470875 - DNA, 19 bp, Mus musculus
  siRNA target sequence for Zfp354a (NM_009329.2,1031-1049).
cgaaggtcaggtcttttta

SEQ ID NO: 470876 - DNA, 19 bp, Mus musculus
  siRNA target sequence for Zfp354a (NM_009329.2,1035-1053).
ggtcaggtctttttataca

SEQ ID NO: 470877 - DNA, 19 bp, Mus musculus
  siRNA target sequence for Zfp36 (NM_011756.3,116-134).
ggactttggaacataaact

SEQ ID NO: 470878 - DNA, 19 bp, Mus musculus
  siRNA target sequence for Zfp36 (NM_011756.3,440-458).
gaactctgccacaagttct

SEQ ID NO: 470879 - DNA, 19 bp, Mus musculus
  siRNA target sequence for Zfp36 (NM_011756.3,843-861).
gatccgatcctgatgacta

SEQ ID NO: 470880 - DNA, 19 bp, Mus musculus
  siRNA target sequence for Zfp36 (NM_011756.3,891-909).
cagactcacctgtctttga

SEQ ID NO: 470881 - DNA, 19 bp, Mus musculus
  siRNA target sequence for Zfp36l1 (NM_007564.2,152-170).
ctcgtgtccgccaccattt

SEQ ID NO: 470882 - DNA, 19 bp, Mus musculus
  siRNA target sequence for Zfp36l1 (NM_007564.2,154-172).
cgtgtccgccaccattttt

SEQ ID NO: 470883 - DNA, 19 bp, Mus musculus
  siRNA target sequence for Zfp36l1 (NM_007564.2,159-177).
ccgccaccatttttgactt

SEQ ID NO: 470884 - DNA, 19 bp, Mus musculus
  siRNA target sequence for Zfp36l1 (NM_007564.2,173-191).
gacttgagcgaagttttat

SEQ ID NO: 470885 - DNA, 19 bp, Mus musculus
  siRNA target sequence for Zfp36l1 (NM_007564.2,498-516).
gccgtcccttcgaagaaaa

SEQ ID NO: 470886 - DNA, 19 bp, Mus musculus
  siRNA target sequence for Zfp36l1 (NM_007564.2,512-530).
gaaaacggtgcctgtaagt

SEQ ID NO: 470887 - DNA, 19 bp, Mus musculus
  siRNA target sequence for Zfp36l1 (NM_007564.2,987-1005).
ccgaatcccctcacatgtt

SEQ ID NO: 470888 - DNA, 19 bp, Mus musculus
  siRNA target sequence for Zfp36l1 (NM_007564.2,988-1006).
cgaatcccctcacatgttt

SEQ ID NO: 470889 - DNA, 19 bp, Mus musculus
  siRNA target sequence for Zfp36l1 (NM_007564.2,1094-1112).
cctaccttggacaactcaa

SEQ ID NO: 470890 - DNA, 19 bp, Mus musculus
  siRNA target sequence for Zfp36l1 (NM_007564.2,1110-1128).
caagacgcctgcccatttt

SEQ ID NO: 470891 - DNA, 19 bp, Mus musculus
  siRNA target sequence for Zfp36l2 (NM_007565.1,705-723).
catcacagcctcagtttct

SEQ ID NO: 470892 - DNA, 19 bp, Mus musculus
  siRNA target sequence for Zfp37 (NM_009554.1,46-64).
cgacaagttacccaacaat

SEQ ID NO: 470893 - DNA, 19 bp, Mus musculus
  siRNA target sequence for Zfp37 (NM_009554.1,47-65).
gacaagttacccaacaata

SEQ ID NO: 470894 - DNA, 19 bp, Mus musculus
  siRNA target sequence for Zfp37 (NM_009554.1,61-79).
caataagttgtctgataaa

SEQ ID NO: 470895 - DNA, 19 bp, Mus musculus
  siRNA target sequence for Zfp37 (NM_009554.1,164-182).
cggggagaaacggaaatca

SEQ ID NO: 470896 - DNA, 19 bp, Mus musculus
  siRNA target sequence for Zfp37 (NM_009554.1,185-203).
ctgccgtactccatctaaa

SEQ ID NO: 470897 - DNA, 19 bp, Mus musculus
  siRNA target sequence for Zfp37 (NM_009554.1,188-206).
ccgtactccatctaaacct

SEQ ID NO: 470898 - DNA, 19 bp, Mus musculus
  siRNA target sequence for Zfp37 (NM_009554.1,254-272).
gaaggtcctcagccataaa

SEQ ID NO: 470899 - DNA, 19 bp, Mus musculus
  siRNA target sequence for Zfp37 (NM_009554.1,444-462).
gccctcactgaccatctaa

SEQ ID NO: 470900 - DNA, 19 bp, Mus musculus
  siRNA target sequence for Zfp37 (NM_009554.1,446-464).
cctcactgaccatctaaga

SEQ ID NO: 470901 - DNA, 19 bp, Mus musculus
  siRNA target sequence for Zfp37 (NM_009554.1,521-539).
cagctcaaaccttatgcaa

SEQ ID NO: 470902 - DNA, 19 bp, Mus musculus
  siRNA target sequence for Zfp37 (NM_009554.1,531-549).
cttatgcaacacctaagat

SEQ ID NO: 470903 - DNA, 19 bp, Mus musculus
  siRNA target sequence for Zfp37 (NM_009554.1,610-628).
catctcttactgaacatgt

SEQ ID NO: 470904 - DNA, 19 bp, Mus musculus
  siRNA target sequence for Zfp37 (NM_009554.1,780-798).
cacctagttatacatcaaa

SEQ ID NO: 470905 - DNA, 19 bp, Mus musculus
  siRNA target sequence for Zfp37 (NM_009554.1,872-890).
ctaccatatgagaactcat

SEQ ID NO: 470906 - DNA, 19 bp, Mus musculus
  siRNA target sequence for Zfp37 (NM_009554.1,897-915).
gactgcccctttgaatgta

SEQ ID NO: 470907 - DNA, 19 bp, Mus musculus
  siRNA target sequence for Zfp37 (NM_009554.1,1099-1117).
ccttcaatgcaaaatcaca

SEQ ID NO: 470908 - DNA, 19 bp, Mus musculus
  siRNA target sequence for Zfp37 (NM_009554.1,1107-1125).
gcaaaatcacaacttgtta

SEQ ID NO: 470909 - DNA, 19 bp, Mus musculus
  siRNA target sequence for Zfp37 (NM_009554.1,1108-1126).
caaaatcacaacttgttat

SEQ ID NO: 470910 - DNA, 19 bp, Mus musculus
  siRNA target sequence for Zfp37 (NM_009554.1,1197-1215).
gcctctcttaccaaacata

SEQ ID NO: 470911 - DNA, 19 bp, Mus musculus
  siRNA target sequence for Zfp39 (NM_011758.1,164-182).
cgatgtcttgaaactagaa

SEQ ID NO: 470912 - DNA, 19 bp, Mus musculus
  siRNA target sequence for Zfp39 (NM_011758.1,185-203).
cgtaagagaagctacaaga

SEQ ID NO: 470913 - DNA, 19 bp, Mus musculus
  siRNA target sequence for Zfp39 (NM_011758.1,207-225).
ggccagtcacctacagtta

SEQ ID NO: 470914 - DNA, 19 bp, Mus musculus
  siRNA target sequence for Zfp39 (NM_011758.1,403-421).
gggccactgcattaccaaa

SEQ ID NO: 470915 - DNA, 19 bp, Mus musculus
  siRNA target sequence for Zfp39 (NM_011758.1,489-507).
gccgagcagatgtacagaa

SEQ ID NO: 470916 - DNA, 19 bp, Mus musculus
  siRNA target sequence for Zfp39 (NM_011758.1,586-604).
gtcaaccgaggagaaagtt

SEQ ID NO: 470917 - DNA, 19 bp, Mus musculus
  siRNA target sequence for Zfp39 (NM_011758.1,588-606).
caaccgaggagaaagttaa

SEQ ID NO: 470918 - DNA, 19 bp, Mus musculus
  siRNA target sequence for Zfp39 (NM_011758.1,592-610).
cgaggagaaagttaaatta

SEQ ID NO: 470919 - DNA, 19 bp, Mus musculus
  siRNA target sequence for Zfp39 (NM_011758.1,595-613).
ggagaaagttaaattagga

SEQ ID NO: 470920 - DNA, 19 bp, Mus musculus
  siRNA target sequence for Zfp39 (NM_011758.1,711-729).
gtgtccttccccctaacaa

SEQ ID NO: 470921 - DNA, 19 bp, Mus musculus
  siRNA target sequence for Zfp39 (NM_011758.1,836-854).
cagcagtttcagtgttgta

SEQ ID NO: 470922 - DNA, 19 bp, Mus musculus
  siRNA target sequence for Zfp39 (NM_011758.1,860-878).
gaagtgacctgcaacacaa

SEQ ID NO: 470923 - DNA, 19 bp, Mus musculus
  siRNA target sequence for Zfp39 (NM_011758.1,888-906).
ggactaagaggtttcacat

SEQ ID NO: 470924 - DNA, 19 bp, Mus musculus
  siRNA target sequence for Zfp39 (NM_011758.1,889-907).
gactaagaggtttcacatt

SEQ ID NO: 470925 - DNA, 19 bp, Mus musculus
  siRNA target sequence for Zfp39 (NM_011758.1,908-926).
gcacatgggtccagtaagt

SEQ ID NO: 470926 - DNA, 19 bp, Mus musculus
  siRNA target sequence for Zfp39 (NM_011758.1,909-927).
cacatgggtccagtaagtt

SEQ ID NO: 470927 - DNA, 19 bp, Mus musculus
  siRNA target sequence for Zfp39 (NM_011758.1,985-1003).
ggtacgggcagaaactttt

SEQ ID NO: 470928 - DNA, 19 bp, Mus musculus
  siRNA target sequence for Zfp39 (NM_011758.1,989-1007).
cgggcagaaacttttgaat

SEQ ID NO: 470929 - DNA, 19 bp, Mus musculus
  siRNA target sequence for Zfp39 (NM_011758.1,1154-1172).
ggagtcgggtcccatagat

SEQ ID NO: 470930 - DNA, 19 bp, Mus musculus
  siRNA target sequence for Zfp39 (NM_011758.1,1157-1175).
gtcgggtcccatagatgta

SEQ ID NO: 470931 - DNA, 19 bp, Mus musculus
  siRNA target sequence for Zfp39 (NM_011758.1,1159-1177).
cgggtcccatagatgtaaa

SEQ ID NO: 470932 - DNA, 19 bp, Mus musculus
  siRNA target sequence for Zfp39 (NM_011758.1,1161-1179).
ggtcccatagatgtaaaca

SEQ ID NO: 470933 - DNA, 19 bp, Mus musculus
  siRNA target sequence for Zfp39 (NM_011758.1,1162-1180).
gtcccatagatgtaaacaa

SEQ ID NO: 470934 - DNA, 19 bp, Mus musculus
  siRNA target sequence for Zfp39 (NM_011758.1,1241-1259).
gcccgactctgggaagttt

SEQ ID NO: 470935 - DNA, 19 bp, Mus musculus
  siRNA target sequence for Zfp39 (NM_011758.1,1243-1261).
ccgactctgggaagtttat

SEQ ID NO: 470936 - DNA, 19 bp, Mus musculus
  siRNA target sequence for Zfp39 (NM_011758.1,1253-1271).
gaagtttatcagtctgaaa

SEQ ID NO: 470937 - DNA, 19 bp, Mus musculus
  siRNA target sequence for Zfp39 (NM_011758.1,1311-1329).
ggacccgtgccggttataa

SEQ ID NO: 470938 - DNA, 19 bp, Mus musculus
  siRNA target sequence for Zfp39 (NM_011758.1,1421-1439).
ggttgtgaagagtgtaaga

SEQ ID NO: 470939 - DNA, 19 bp, Mus musculus
  siRNA target sequence for Zfp39 (NM_011758.1,1458-1476).
cctccctcaccatacatca

SEQ ID NO: 470940 - DNA, 19 bp, Mus musculus
  siRNA target sequence for Zfp39 (NM_011758.1,1536-1554).
gtaagtcggacctgaatgt

SEQ ID NO: 470941 - DNA, 19 bp, Mus musculus
  siRNA target sequence for Zfp39 (NM_011758.1,1549-1567).
gaatgtccaccatagaact

SEQ ID NO: 470942 - DNA, 19 bp, Mus musculus
  siRNA target sequence for Zfp39 (NM_011758.1,1663-1681).
caagccatacgaatgtgaa

SEQ ID NO: 470943 - DNA, 19 bp, Mus musculus
  siRNA target sequence for Zfp39 (NM_011758.1,1699-1717).
cagccgtaagtcaaacctt

SEQ ID NO: 470944 - DNA, 19 bp, Mus musculus
  siRNA target sequence for Zfp39 (NM_011758.1,2023-2041).
caggaaaacgttttacagt

SEQ ID NO: 470945 - DNA, 19 bp, Mus musculus
  siRNA target sequence for Zfp39 (NM_011758.1,2115-2133).
cttttcaccagaagtcata

SEQ ID NO: 470946 - DNA, 19 bp, Mus musculus
  siRNA target sequence for Zfp39 (NM_011758.1,2120-2138).
caccagaagtcatacctta

SEQ ID NO: 470947 - DNA, 19 bp, Mus musculus
  siRNA target sequence for Zfp39 (NM_011758.1,2156-2174).
cacggaagtgagaaacgat

SEQ ID NO: 470948 - DNA, 19 bp, Mus musculus
  siRNA target sequence for Zfp39 (NM_011758.1,2160-2178).
gaagtgagaaacgatttga

SEQ ID NO: 470949 - DNA, 19 bp, Mus musculus
  siRNA target sequence for Zfp39 (NM_011758.1,2167-2185).
gaaacgatttgaatgtcaa

SEQ ID NO: 470950 - DNA, 19 bp, Mus musculus
  siRNA target sequence for Zfp39 (NM_011758.1,2193-2211).
ggaaaacgttttatcacaa

SEQ ID NO: 470951 - DNA, 19 bp, Mus musculus
  siRNA target sequence for Zfp41 (NM_011759.1,593-611).
ccgcagaccccgaaaagaa

SEQ ID NO: 470952 - DNA, 19 bp, Mus musculus
  siRNA target sequence for Zfp41 (NM_011759.1,625-643).
ccgaggacgaagcacatat

SEQ ID NO: 470953 - DNA, 19 bp, Mus musculus
  siRNA target sequence for Zfp41 (NM_011759.1,627-645).
gaggacgaagcacatatct

SEQ ID NO: 470954 - DNA, 19 bp, Mus musculus
  siRNA target sequence for Zfp41 (NM_011759.1,629-647).
ggacgaagcacatatcttt

SEQ ID NO: 470955 - DNA, 19 bp, Mus musculus
  siRNA target sequence for Zfp41 (NM_011759.1,632-650).
cgaagcacatatctttgat

SEQ ID NO: 470956 - DNA, 19 bp, Mus musculus
  siRNA target sequence for Zfp41 (NM_011759.1,651-669).
gccttcgatgcctcgttta

SEQ ID NO: 470957 - DNA, 19 bp, Mus musculus
  siRNA target sequence for Zfp41 (NM_011759.1,652-670).
ccttcgatgcctcgtttaa

SEQ ID NO: 470958 - DNA, 19 bp, Mus musculus
  siRNA target sequence for Zfp41 (NM_011759.1,653-671).
cttcgatgcctcgtttaaa

SEQ ID NO: 470959 - DNA, 19 bp, Mus musculus
  siRNA target sequence for Zfp41 (NM_011759.1,661-679).
cctcgtttaaagatgactt

SEQ ID NO: 470960 - DNA, 19 bp, Mus musculus
  siRNA target sequence for Zfp41 (NM_011759.1,662-680).
ctcgtttaaagatgacttt

SEQ ID NO: 470961 - DNA, 19 bp, Mus musculus
  siRNA target sequence for Zfp41 (NM_011759.1,691-709).
ccgtgtttgtcccttttca

SEQ ID NO: 470962 - DNA, 19 bp, Mus musculus
  siRNA target sequence for Zfp41 (NM_011759.1,742-760).
gacggatctttaaacacaa

SEQ ID NO: 470963 - DNA, 19 bp, Mus musculus
  siRNA target sequence for Zfp41 (NM_011759.1,916-934).
ccttcaactgtggttctaa

SEQ ID NO: 470964 - DNA, 19 bp, Mus musculus
  siRNA target sequence for Zfp41 (NM_011759.1,920-938).
caactgtggttctaacctt

SEQ ID NO: 470965 - DNA, 19 bp, Mus musculus
  siRNA target sequence for Zfp42 (NM_009556.2,517-535).
caccatccgggatgaaagt

SEQ ID NO: 470966 - DNA, 19 bp, Mus musculus
  siRNA target sequence for Zfp42 (NM_009556.2,589-607).
catcatacgaggtgagttt

SEQ ID NO: 470967 - DNA, 19 bp, Mus musculus
  siRNA target sequence for Zfp46 (NM_009557.1,256-274).
cggaagagcctcttgagaa

SEQ ID NO: 470968 - DNA, 19 bp, Mus musculus
  siRNA target sequence for Zfp46 (NM_009557.1,257-275).
ggaagagcctcttgagaat

SEQ ID NO: 470969 - DNA, 19 bp, Mus musculus
  siRNA target sequence for Zfp46 (NM_009557.1,420-438).
ggcatccgctaccacattt

SEQ ID NO: 470970 - DNA, 19 bp, Mus musculus
  siRNA target sequence for Zfp46 (NM_009557.1,425-443).
ccgctaccacatttgttct

SEQ ID NO: 470971 - DNA, 19 bp, Mus musculus
  siRNA target sequence for Zfp46 (NM_009557.1,1388-1406).
ccggagctcagcgcttatt

SEQ ID NO: 470972 - DNA, 19 bp, Mus musculus
  siRNA target sequence for Zfp60 (NM_009560.1,290-308).
gatctccaaagaatcatgt

SEQ ID NO: 470973 - DNA, 19 bp, Mus musculus
  siRNA target sequence for Zfp60 (NM_009560.1,367-385).
cagggcgtcagtgttagta

SEQ ID NO: 470974 - DNA, 19 bp, Mus musculus
  siRNA target sequence for Zfp60 (NM_009560.1,369-387).
gggcgtcagtgttagtaat

SEQ ID NO: 470975 - DNA, 19 bp, Mus musculus
  siRNA target sequence for Zfp60 (NM_009560.1,388-406).
ggccctggctatagtgtaa

SEQ ID NO: 470976 - DNA, 19 bp, Mus musculus
  siRNA target sequence for Zfp60 (NM_009560.1,389-407).
gccctggctatagtgtaat

SEQ ID NO: 470977 - DNA, 19 bp, Mus musculus
  siRNA target sequence for Zfp60 (NM_009560.1,433-451).
ggagatgctaatcgaaata

SEQ ID NO: 470978 - DNA, 19 bp, Mus musculus
  siRNA target sequence for Zfp60 (NM_009560.1,434-452).
gagatgctaatcgaaatat

SEQ ID NO: 470979 - DNA, 19 bp, Mus musculus
  siRNA target sequence for Zfp60 (NM_009560.1,436-454).
gatgctaatcgaaatatta

SEQ ID NO: 470980 - DNA, 19 bp, Mus musculus
  siRNA target sequence for Zfp60 (NM_009560.1,466-484).
gaaatgtctacttacacta

SEQ ID NO: 470981 - DNA, 19 bp, Mus musculus
  siRNA target sequence for Zfp60 (NM_009560.1,936-954).
ggacagaccttttcattgt

SEQ ID NO: 470982 - DNA, 19 bp, Mus musculus
  siRNA target sequence for Zfp60 (NM_009560.1,1014-1032).
cactgaagacaaatcgttt

SEQ ID NO: 470983 - DNA, 19 bp, Mus musculus
  siRNA target sequence for Zfp60 (NM_009560.1,1075-1093).
ctcttacgacactacgata

SEQ ID NO: 470984 - DNA, 19 bp, Mus musculus
  siRNA target sequence for Zfp60 (NM_009560.1,1090-1108).
gatactcacaccaatgaga

SEQ ID NO: 470985 - DNA, 19 bp, Mus musculus
  siRNA target sequence for Zfp60 (NM_009560.1,1903-1921).
cgtagtacaggccttagaa

SEQ ID NO: 470986 - DNA, 19 bp, Mus musculus
  siRNA target sequence for Zfp60 (NM_009560.1,1904-1922).
gtagtacaggccttagaat

SEQ ID NO: 470987 - DNA, 19 bp, Mus musculus
  siRNA target sequence for Zfp60 (NM_009560.1,1975-1993).
gaagcctttcagtatcatt

SEQ ID NO: 470988 - DNA, 19 bp, Mus musculus
  siRNA target sequence for Zfp60 (NM_009560.1,2058-2076).
gaagtactttacttatggt

SEQ ID NO: 470989 - DNA, 19 bp, Mus musculus
  siRNA target sequence for Zfp60 (NM_009560.1,2069-2087).
cttatggtcgagaccttaa

SEQ ID NO: 470990 - DNA, 19 bp, Mus musculus
  siRNA target sequence for Zfp60 (NM_009560.1,2099-2117).
gtattcacaatcttgagaa

SEQ ID NO: 470991 - DNA, 19 bp, Mus musculus
  siRNA target sequence for Zfp90 (NM_011764.2,393-411).
gtcggtgacattcaaagat

SEQ ID NO: 470992 - DNA, 19 bp, Mus musculus
  siRNA target sequence for Zfp90 (NM_011764.2,507-525).
ggtgtcgctcgggtatcaa

SEQ ID NO: 470993 - DNA, 19 bp, Mus musculus
  siRNA target sequence for Zfp90 (NM_011764.2,536-554).
cagaggtgatcttcaaatt

SEQ ID NO: 470994 - DNA, 19 bp, Mus musculus
  siRNA target sequence for Zfp90 (NM_011764.2,647-665).
ctcagcagggcgtatctga

SEQ ID NO: 470995 - DNA, 19 bp, Mus musculus
  siRNA target sequence for Zfp90 (NM_011764.2,651-669).
gcagggcgtatctgaagta

SEQ ID NO: 470996 - DNA, 19 bp, Mus musculus
  siRNA target sequence for Zfp90 (NM_011764.2,652-670).
cagggcgtatctgaagtat

SEQ ID NO: 470997 - DNA, 19 bp, Mus musculus
  siRNA target sequence for Zfp90 (NM_011764.2,656-674).
gcgtatctgaagtattcct

SEQ ID NO: 470998 - DNA, 19 bp, Mus musculus
  siRNA target sequence for Zfp90 (NM_011764.2,673-691).
ctcagaacaaatgttttat

SEQ ID NO: 470999 - DNA, 19 bp, Mus musculus
  siRNA target sequence for Zfp90 (NM_011764.2,826-844).
gttggtgaagactctagtt

SEQ ID NO: 471000 - DNA, 19 bp, Mus musculus
  siRNA target sequence for Zfp90 (NM_011764.2,892-910).
cccagtgactgtaaaacat

SEQ ID NO: 471001 - DNA, 19 bp, Mus musculus
  siRNA target sequence for Zfp90 (NM_011764.2,914-932).
gaaataatttggaacacaa

SEQ ID NO: 471002 - DNA, 19 bp, Mus musculus
  siRNA target sequence for Zfp90 (NM_011764.2,928-946).
cacaattcagaactagtta

SEQ ID NO: 471003 - DNA, 19 bp, Mus musculus
  siRNA target sequence for Zfp90 (NM_011764.2,930-948).
caattcagaactagttact

SEQ ID NO: 471004 - DNA, 19 bp, Mus musculus
  siRNA target sequence for Zfp90 (NM_011764.2,940-958).
ctagttactcagagtaata

SEQ ID NO: 471005 - DNA, 19 bp, Mus musculus
  siRNA target sequence for Zfp90 (NM_011764.2,988-1006).
gataaatgtaggaaatcat

SEQ ID NO: 471006 - DNA, 19 bp, Mus musculus
  siRNA target sequence for Zfp90 (NM_011764.2,999-1017).
gaaatcatttattcataga

SEQ ID NO: 471007 - DNA, 19 bp, Mus musculus
  siRNA target sequence for Zfp90 (NM_011764.2,1297-1315).
gccttccagcgcagttcat

SEQ ID NO: 471008 - DNA, 19 bp, Mus musculus
  siRNA target sequence for Zfp90 (NM_011764.2,1299-1317).
cttccagcgcagttcatct

SEQ ID NO: 471009 - DNA, 19 bp, Mus musculus
  siRNA target sequence for Zfp90 (NM_011764.2,1307-1325).
gcagttcatctcttgttca

SEQ ID NO: 471010 - DNA, 19 bp, Mus musculus
  siRNA target sequence for Zfp90 (NM_011764.2,1354-1372).
ccctatcgctgcaatctct

SEQ ID NO: 471011 - DNA, 19 bp, Mus musculus
  siRNA target sequence for Zfp90 (NM_011764.2,1560-1578).
gagcccatccctttataaa

SEQ ID NO: 471012 - DNA, 19 bp, Mus musculus
  siRNA target sequence for Zfp90 (NM_011764.2,1562-1580).
gcccatccctttataaaca

SEQ ID NO: 471013 - DNA, 19 bp, Mus musculus
  siRNA target sequence for Zfp90 (NM_011764.2,1591-1609).
cataaaagaagcaaacctt

SEQ ID NO: 471014 - DNA, 19 bp, Mus musculus
  siRNA target sequence for Zfp90 (NM_011764.2,1601-1619).
gcaaaccttaccaaagtaa

SEQ ID NO: 471015 - DNA, 19 bp, Mus musculus
  siRNA target sequence for Zfp90 (NM_011764.2,1607-1625).
cttaccaaagtaacaactt

SEQ ID NO: 471016 - DNA, 19 bp, Mus musculus
  siRNA target sequence for Zfp90 (NM_011764.2,1669-1687).
ggcctgcttactgaagtaa

SEQ ID NO: 471017 - DNA, 19 bp, Mus musculus
  siRNA target sequence for Zfp90 (NM_011764.2,1672-1690).
ctgcttactgaagtaaagt

SEQ ID NO: 471018 - DNA, 19 bp, Mus musculus
  siRNA target sequence for Zfp90 (NM_011764.2,1681-1699).
gaagtaaagtcgtaccatt

SEQ ID NO: 471019 - DNA, 19 bp, Mus musculus
  siRNA target sequence for Zfp90 (NM_011764.2,1684-1702).
gtaaagtcgtaccattgta

SEQ ID NO: 471020 - DNA, 19 bp, Mus musculus
  siRNA target sequence for Zfp90 (NM_011764.2,1756-1774).
ctccacgctggggagaatt

SEQ ID NO: 471021 - DNA, 19 bp, Mus musculus
  siRNA target sequence for Zfp90 (NM_011764.2,1871-1889).
ggagtacaagttttataga

SEQ ID NO: 471022 - DNA, 19 bp, Mus musculus
  siRNA target sequence for Zfp90 (NM_011764.2,2207-2225).
ggagctccgcccttactaa

SEQ ID NO: 471023 - DNA, 19 bp, Mus musculus
  siRNA target sequence for Zfp90 (NM_011764.2,2208-2226).
gagctccgcccttactaaa

SEQ ID NO: 471024 - DNA, 19 bp, Mus musculus
  siRNA target sequence for Zfp92 (NM_009566.1,294-312).
ccctctacaagcaagtgat

SEQ ID NO: 471025 - DNA, 19 bp, Mus musculus
  siRNA target sequence for Zfp92 (NM_009566.1,334-352).
ggtgtcagtaggatttgct

SEQ ID NO: 471026 - DNA, 19 bp, Mus musculus
  siRNA target sequence for Zfp92 (NM_009566.1,394-412).
gaagccctggattagagat

SEQ ID NO: 471027 - DNA, 19 bp, Mus musculus
  siRNA target sequence for Zfp92 (NM_009566.1,402-420).
ggattagagatgatggaat

SEQ ID NO: 471028 - DNA, 19 bp, Mus musculus
  siRNA target sequence for Zfp92 (NM_009566.1,438-456).
cctgtgctgggaataggat

SEQ ID NO: 471029 - DNA, 19 bp, Mus musculus
  siRNA target sequence for Zfp92 (NM_009566.1,439-457).
ctgtgctgggaataggata

SEQ ID NO: 471030 - DNA, 19 bp, Mus musculus
  siRNA target sequence for Zfp92 (NM_009566.1,558-576).
caaatcccattgtaaggta

SEQ ID NO: 471031 - DNA, 19 bp, Mus musculus
  siRNA target sequence for Zfp92 (NM_009566.1,592-610).
cgcggataagcgatatcta

SEQ ID NO: 471032 - DNA, 19 bp, Mus musculus
  siRNA target sequence for Zfp92 (NM_009566.1,593-611).
gcggataagcgatatctat

SEQ ID NO: 471033 - DNA, 19 bp, Mus musculus
  siRNA target sequence for Zfp92 (NM_009566.1,595-613).
ggataagcgatatctatgt

SEQ ID NO: 471034 - DNA, 19 bp, Mus musculus
  siRNA target sequence for Zfp92 (NM_009566.1,864-882).
gccgcatgtgtggtaaagt

SEQ ID NO: 471035 - DNA, 19 bp, Mus musculus
  siRNA target sequence for Zfp92 (NM_009566.1,866-884).
cgcatgtgtggtaaagtgt

SEQ ID NO: 471036 - DNA, 19 bp, Mus musculus
  siRNA target sequence for Zfp92 (NM_009566.1,973-991).
ccgaagctccaatctcata

SEQ ID NO: 471037 - DNA, 19 bp, Mus musculus
  siRNA target sequence for Zfp92 (NM_009566.1,975-993).
gaagctccaatctcataga

SEQ ID NO: 471038 - DNA, 19 bp, Mus musculus
  siRNA target sequence for Zfp92 (NM_009566.1,1107-1125).
ccttcacgtgccatgagta

SEQ ID NO: 471039 - DNA, 19 bp, Mus musculus
  siRNA target sequence for Zfp92 (NM_009566.1,1388-1406).
cccatcgacaccaatgaga

SEQ ID NO: 471040 - DNA, 19 bp, Mus musculus
  siRNA target sequence for Zfp92 (NM_009566.1,1389-1407).
ccatcgacaccaatgagaa

SEQ ID NO: 471041 - DNA, 19 bp, Mus musculus
  siRNA target sequence for Zfp92 (NM_009566.1,1483-1501).
cgacgaagatgacaagaaa

SEQ ID NO: 471042 - DNA, 19 bp, Mus musculus
  siRNA target sequence for Zfp92 (NM_009566.1,1502-1520).
cagaagcctgttatttcga

SEQ ID NO: 471043 - DNA, 19 bp, Mus musculus
  siRNA target sequence for Zfp92 (NM_009566.1,1524-1542).
cctcagttttggaggataa

SEQ ID NO: 471044 - DNA, 19 bp, Mus musculus
  siRNA target sequence for Zfp93 (NM_009567.2,693-711).
gtaaggcacactttagtga

SEQ ID NO: 471045 - DNA, 19 bp, Mus musculus
  siRNA target sequence for Zfp93 (NM_009567.2,805-823).
ccaccacgatcacaatata

SEQ ID NO: 471046 - DNA, 19 bp, Mus musculus
  siRNA target sequence for Zfp93 (NM_009567.2,1632-1650).
gctcacattttctagatca

SEQ ID NO: 471047 - DNA, 19 bp, Mus musculus
  siRNA target sequence for Zfp93 (NM_009567.2,2136-2154).
cctcatatttccatatgca

SEQ ID NO: 471048 - DNA, 19 bp, Mus musculus
  siRNA target sequence for Zfp93 (NM_009567.2,2156-2174).
cagagggtccacactatat

SEQ ID NO: 471049 - DNA, 19 bp, Mus musculus
  siRNA target sequence for Zfpm1 (NM_009569.1,844-862).
gccccaggtcctaactgaa

SEQ ID NO: 471050 - DNA, 19 bp, Mus musculus
  siRNA target sequence for Zfpm1 (NM_009569.1,847-865).
ccaggtcctaactgaagaa

SEQ ID NO: 471051 - DNA, 19 bp, Mus musculus
  siRNA target sequence for Zfpm1 (NM_009569.1,1082-1100).
gctaccgcagtcatcaaca

SEQ ID NO: 471052 - DNA, 19 bp, Mus musculus
  siRNA target sequence for Zfpm1 (NM_009569.1,1083-1101).
ctaccgcagtcatcaacaa

SEQ ID NO: 471053 - DNA, 19 bp, Mus musculus
  siRNA target sequence for Zfpm1 (NM_009569.1,1650-1668).
cctcaggactggacagtaa

SEQ ID NO: 471054 - DNA, 19 bp, Mus musculus
  siRNA target sequence for Zfpm1 (NM_009569.1,2146-2164).
caatatcaacaacttctat

SEQ ID NO: 471055 - DNA, 19 bp, Mus musculus
  siRNA target sequence for Zfpm1 (NM_009569.1,2862-2880).
ccgcatgtcgcgtaagctt

SEQ ID NO: 471056 - DNA, 19 bp, Mus musculus
  siRNA target sequence for Zfpm1 (NM_009569.1,2903-2921).
gctcacaagaagtactcat

SEQ ID NO: 471057 - DNA, 19 bp, Mus musculus
  siRNA target sequence for Zfpm1 (NM_009569.1,2988-3006).
gcgacctggttgagcattt

SEQ ID NO: 471058 - DNA, 19 bp, Mus musculus
  siRNA target sequence for Zfpm1 (NM_009569.1,3276-3294).
ctttcatcgcgcacaagaa

SEQ ID NO: 471059 - DNA, 19 bp, Mus musculus
  siRNA target sequence for Zfpm1 (NM_009569.1,3280-3298).
catcgcgcacaagaagtat

SEQ ID NO: 471060 - DNA, 19 bp, Mus musculus
  siRNA target sequence for Zfpm1 (NM_009569.1,3284-3302).
gcgcacaagaagtattact

SEQ ID NO: 471061 - DNA, 19 bp, Mus musculus
  siRNA target sequence for Zfx (NM_011768.1,589-607).
ccggaacatgtcttgacaa

SEQ ID NO: 471062 - DNA, 19 bp, Mus musculus
  siRNA target sequence for Zfx (NM_011768.1,816-834).
ccttatgatctctttggat

SEQ ID NO: 471063 - DNA, 19 bp, Mus musculus
  siRNA target sequence for Zfx (NM_011768.1,871-889).
ctgactatggacaacgaaa

SEQ ID NO: 471064 - DNA, 19 bp, Mus musculus
  siRNA target sequence for Zfx (NM_011768.1,875-893).
ctatggacaacgaaacaga

SEQ ID NO: 471065 - DNA, 19 bp, Mus musculus
  siRNA target sequence for Zfy1 (NM_009570.2,698-716).
gtcatcactgatcctataa

SEQ ID NO: 471066 - DNA, 19 bp, Mus musculus
  siRNA target sequence for Zfy1 (NM_009570.2,794-812).
cagcaagataatgacaaaa

SEQ ID NO: 471067 - DNA, 19 bp, Mus musculus
  siRNA target sequence for Zfy1 (NM_009570.2,1297-1315).
cagtgctctcttaaaccaa

SEQ ID NO: 471068 - DNA, 19 bp, Mus musculus
  siRNA target sequence for Zic2 (NM_009574.2,549-567).
gcacacgttggctcctatt

SEQ ID NO: 471069 - DNA, 19 bp, Mus musculus
  siRNA target sequence for Zic2 (NM_009574.2,881-899).
ccagtacggccctatgaat

SEQ ID NO: 471070 - DNA, 19 bp, Mus musculus
  siRNA target sequence for Zic2 (NM_009574.2,882-900).
cagtacggccctatgaata

SEQ ID NO: 471071 - DNA, 19 bp, Mus musculus
  siRNA target sequence for Zic2 (NM_009574.2,1028-1046).
cccggagcagctaagcaat

SEQ ID NO: 471072 - DNA, 19 bp, Mus musculus
  siRNA target sequence for Zic3 (NM_009575.1,633-651).
ctgcaggcatgggattgaa

SEQ ID NO: 471073 - DNA, 19 bp, Mus musculus
  siRNA target sequence for Zic3 (NM_009575.1,1173-1191).
gtgcgcagttccctaacta

SEQ ID NO: 471074 - DNA, 19 bp, Mus musculus
  siRNA target sequence for Zic3 (NM_009575.1,1175-1193).
gcgcagttccctaactata

SEQ ID NO: 471075 - DNA, 19 bp, Mus musculus
  siRNA target sequence for Zic3 (NM_009575.1,1280-1298).
caggagctgtcctgtaagt

SEQ ID NO: 471076 - DNA, 19 bp, Mus musculus
  siRNA target sequence for Zic3 (NM_009575.1,1364-1382).
gagttggttacgcatgtta

SEQ ID NO: 471077 - DNA, 19 bp, Mus musculus
  siRNA target sequence for Zic3 (NM_009575.1,1534-1552).
gggctgcgggaagattttt

SEQ ID NO: 471078 - DNA, 19 bp, Mus musculus
  siRNA target sequence for Zic3 (NM_009575.1,1683-1701).
cctcggacaagccctatat

SEQ ID NO: 471079 - DNA, 19 bp, Mus musculus
  siRNA target sequence for Zic3 (NM_009575.1,1756-1774).
gaaggttcatgaatctcaa

SEQ ID NO: 471080 - DNA, 19 bp, Mus musculus
  siRNA target sequence for Zic3 (NM_009575.1,1796-1814).
gccagttcaggctatgaat

SEQ ID NO: 471081 - DNA, 19 bp, Mus musculus
  siRNA target sequence for Zic3 (NM_009575.1,1819-1837).
cactccacccgctatagct

SEQ ID NO: 471082 - DNA, 19 bp, Mus musculus
  siRNA target sequence for Zic3 (NM_009575.1,1902-1920).
ctggacttcctcccaattt

SEQ ID NO: 471083 - DNA, 19 bp, Mus musculus
  siRNA target sequence for Zic4 (NM_009576.1,560-578).
cgcttctcatgcacgttat

SEQ ID NO: 471084 - DNA, 19 bp, Mus musculus
  siRNA target sequence for Zic4 (NM_009576.1,561-579).
gcttctcatgcacgttatt

SEQ ID NO: 471085 - DNA, 19 bp, Mus musculus
  siRNA target sequence for Zic4 (NM_009576.1,742-760).
gaggtcggaaccttttgca

SEQ ID NO: 471086 - DNA, 19 bp, Mus musculus
  siRNA target sequence for Zic4 (NM_009576.1,946-964).
gcgtccctgctccaaaact

SEQ ID NO: 471087 - DNA, 19 bp, Mus musculus
  siRNA target sequence for Zic4 (NM_009576.1,947-965).
cgtccctgctccaaaactt

SEQ ID NO: 471088 - DNA, 19 bp, Mus musculus
  siRNA target sequence for Zic4 (NM_009576.1,1022-1040).
gagcaggctaaccacattt

SEQ ID NO: 471089 - DNA, 19 bp, Mus musculus
  siRNA target sequence for Zic4 (NM_009576.1,1169-1187).
gctagatcagaaaatctca

SEQ ID NO: 471090 - DNA, 19 bp, Mus musculus
  siRNA target sequence for Zic4 (NM_009576.1,1299-1317).
cgagcgacaagccttatat

SEQ ID NO: 471091 - DNA, 19 bp, Mus musculus
  siRNA target sequence for Zic4 (NM_009576.1,1366-1384).
gcgaaagcacatgaaagtt

SEQ ID NO: 471092 - DNA, 19 bp, Mus musculus
  siRNA target sequence for Zic4 (NM_009576.1,1368-1386).
gaaagcacatgaaagttca

SEQ ID NO: 471093 - DNA, 19 bp, Mus musculus
  siRNA target sequence for Zic4 (NM_009576.1,1412-1430).
ggctacgactcggctataa

SEQ ID NO: 471094 - DNA, 19 bp, Mus musculus
  siRNA target sequence for Zic4 (NM_009576.1,1441-1459).
cgcgtcgccctcgttagaa

SEQ ID NO: 471095 - DNA, 19 bp, Mus musculus
  siRNA target sequence for Zic4 (NM_009576.1,1442-1460).
gcgtcgccctcgttagaaa

SEQ ID NO: 471096 - DNA, 19 bp, Mus musculus
  siRNA target sequence for Zic4 (NM_009576.1,1512-1530).
cagacgtgagcgaatggta

SEQ ID NO: 471097 - DNA, 19 bp, Mus musculus
  siRNA target sequence for Znf450 (NM_153398.2,239-257).
gccagtctggaggatcaaa

SEQ ID NO: 471098 - DNA, 19 bp, Mus musculus
  siRNA target sequence for Znf450 (NM_153398.2,262-280).
gaagggctttctttgtgat

SEQ ID NO: 471099 - DNA, 19 bp, Mus musculus
  siRNA target sequence for Znf450 (NM_153398.2,265-283).
gggctttctttgtgatatt

SEQ ID NO: 471100 - DNA, 19 bp, Mus musculus
  siRNA target sequence for Znf450 (NM_153398.2,276-294).
gtgatattactttaatcgt

SEQ ID NO: 471101 - DNA, 19 bp, Mus musculus
  siRNA target sequence for Znf450 (NM_153398.2,285-303).
ctttaatcgtggagaatgt

SEQ ID NO: 471102 - DNA, 19 bp, Mus musculus
  siRNA target sequence for Znf450 (NM_153398.2,335-353).
gccagtagcgagtatttct

SEQ ID NO: 471103 - DNA, 19 bp, Mus musculus
  siRNA target sequence for Znf450 (NM_153398.2,337-355).
cagtagcgagtatttctca

SEQ ID NO: 471104 - DNA, 19 bp, Mus musculus
  siRNA target sequence for Znf450 (NM_153398.2,339-357).
gtagcgagtatttctcaat

SEQ ID NO: 471105 - DNA, 19 bp, Mus musculus
  siRNA target sequence for Znf450 (NM_153398.2,342-360).
gcgagtatttctcaatgat

SEQ ID NO: 471106 - DNA, 19 bp, Mus musculus
  siRNA target sequence for Znf450 (NM_153398.2,377-395).
gagattggccagtctatct

SEQ ID NO: 471107 - DNA, 19 bp, Mus musculus
  siRNA target sequence for Znf450 (NM_153398.2,428-446).
ggcatcctgctggaattta

SEQ ID NO: 471108 - DNA, 19 bp, Mus musculus
  siRNA target sequence for Znf450 (NM_153398.2,429-447).
gcatcctgctggaatttat

SEQ ID NO: 471109 - DNA, 19 bp, Mus musculus
  siRNA target sequence for Znf450 (NM_153398.2,433-451).
cctgctggaatttatctat

SEQ ID NO: 471110 - DNA, 19 bp, Mus musculus
  siRNA target sequence for Znf450 (NM_153398.2,434-452).
ctgctggaatttatctata

SEQ ID NO: 471111 - DNA, 19 bp, Mus musculus
  siRNA target sequence for Znf450 (NM_153398.2,436-454).
gctggaatttatctataca

SEQ ID NO: 471112 - DNA, 19 bp, Mus musculus
  siRNA target sequence for Znf450 (NM_153398.2,501-519).
ctgctcagttcttaaaagt

SEQ ID NO: 471113 - DNA, 19 bp, Mus musculus
  siRNA target sequence for Znf450 (NM_153398.2,570-588).
caaagccaccagctttgaa

SEQ ID NO: 471114 - DNA, 19 bp, Mus musculus
  siRNA target sequence for Znf450 (NM_153398.2,598-616).
gacgccagtggtggttatt

SEQ ID NO: 471115 - DNA, 19 bp, Mus musculus
  siRNA target sequence for Znf450 (NM_153398.2,602-620).
ccagtggtggttatttcca

SEQ ID NO: 471116 - DNA, 19 bp, Mus musculus
  siRNA target sequence for Znf450 (NM_153398.2,605-623).
gtggtggttatttccaata

SEQ ID NO: 471117 - DNA, 19 bp, Mus musculus
  siRNA target sequence for Znf450 (NM_153398.2,608-626).
gtggttatttccaataaga

SEQ ID NO: 471118 - DNA, 19 bp, Mus musculus
  siRNA target sequence for Znf450 (NM_153398.2,718-736).
gcagctgagagtgaacaat

SEQ ID NO: 471119 - DNA, 19 bp, Mus musculus
  siRNA target sequence for Znf450 (NM_153398.2,721-739).
gctgagagtgaacaattca

SEQ ID NO: 471120 - DNA, 19 bp, Mus musculus
  siRNA target sequence for Znf450 (NM_153398.2,724-742).
gagagtgaacaattcagtt

SEQ ID NO: 471121 - DNA, 19 bp, Mus musculus
  siRNA target sequence for Znf450 (NM_153398.2,740-758).
gttcagaatagacaaaact

SEQ ID NO: 471122 - DNA, 19 bp, Mus musculus
  siRNA target sequence for Znf450 (NM_153398.2,945-963).
ctgtcaagctcaaagacta

SEQ ID NO: 471123 - DNA, 19 bp, Mus musculus
  siRNA target sequence for Znf450 (NM_153398.2,964-982).
caagcttcttggagatgaa

SEQ ID NO: 471124 - DNA, 19 bp, Mus musculus
  siRNA target sequence for Znf450 (NM_153398.2,1114-1132).
gggggaacgacccttcaaa

SEQ ID NO: 471125 - DNA, 19 bp, Mus musculus
  siRNA target sequence for Znf450 (NM_153398.2,1339-1357).
gctaaagagccattatcgt

SEQ ID NO: 471126 - DNA, 19 bp, Mus musculus
  siRNA target sequence for Znf450 (NM_153398.2,1390-1408).
ccactgccaccgaaagttt

SEQ ID NO: 471127 - DNA, 19 bp, Mus musculus
  siRNA target sequence for Znf450 (NM_153398.2,1391-1409).
cactgccaccgaaagttta

SEQ ID NO: 471128 - DNA, 19 bp, Mus musculus
  siRNA target sequence for Znf450 (NM_153398.2,1395-1413).
gccaccgaaagtttatgga

SEQ ID NO: 471129 - DNA, 19 bp, Mus musculus
  siRNA target sequence for Znf450 (NM_153398.2,1640-1658).
cccgagtgtggcttacagt

SEQ ID NO: 471130 - DNA, 19 bp, Mus musculus
  siRNA target sequence for Znf450 (NM_153398.2,1641-1659).
ccgagtgtggcttacagtt

SEQ ID NO: 471131 - DNA, 19 bp, Mus musculus
  siRNA target sequence for Znf450 (NM_153398.2,1657-1675).
gttcgctcgcctagacaat

SEQ ID NO: 471132 - DNA, 19 bp, Mus musculus
  siRNA target sequence for Znf450 (NM_153398.2,1661-1679).
gctcgcctagacaatttga

SEQ ID NO: 471133 - DNA, 19 bp, Mus musculus
  siRNA target sequence for Znf450 (NM_153398.2,1750-1768).
ggacgagggcaggaacatt

SEQ ID NO: 471134 - DNA, 19 bp, Mus musculus
  siRNA target sequence for Znf450 (NM_153398.2,1753-1771).
cgagggcaggaacattctt

SEQ ID NO: 471135 - DNA, 19 bp, Mus musculus
  siRNA target sequence for Znf450 (NM_153398.2,1831-1849).
cgactctgtgcataacatt

SEQ ID NO: 471136 - DNA, 19 bp, Mus musculus
  siRNA target sequence for Znf450 (NM_153398.2,1832-1850).
gactctgtgcataacatta

SEQ ID NO: 471137 - DNA, 19 bp, Mus musculus
  siRNA target sequence for Znf450 (NM_153398.2,1836-1854).
ctgtgcataacattaactt

SEQ ID NO: 471138 - DNA, 19 bp, Mus musculus
  siRNA target sequence for Znf450 (NM_153398.2,1919-1937).
gacccggctgccaacatca

SEQ ID NO: 471139 - DNA, 19 bp, Mus musculus
  siRNA target sequence for Znf450 (NM_153398.2,2063-2081).
gtgcatgtcatcacacttt

SEQ ID NO: 471140 - DNA, 19 bp, Mus musculus
  siRNA target sequence for Znf450 (NM_153398.2,2260-2278).
gccttttgggccatcatct

SEQ ID NO: 471141 - DNA, 19 bp, Mus musculus
  siRNA target sequence for Znf450 (NM_153398.2,2262-2280).
cttttgggccatcatctta

SEQ ID NO: 471142 - DNA, 19 bp, Mus musculus
  siRNA target sequence for Znf450 (NM_153398.2,2277-2295).
cttacagatccttaaagat

SEQ ID NO: 471143 - DNA, 19 bp, Mus musculus
  siRNA target sequence for 2210404M20Rik (NM_028185.1,589-607).
gtcgccttcgacaagttct

SEQ ID NO: 471144 - DNA, 19 bp, Mus musculus
  siRNA target sequence for 2210404M20Rik (NM_028185.1,639-657).
ctaccgtaaacctgtctta

SEQ ID NO: 471145 - DNA, 19 bp, Mus musculus
  siRNA target sequence for 2210404M20Rik (NM_028185.1,643-661).
cgtaaacctgtcttaggaa

SEQ ID NO: 471146 - DNA, 19 bp, Mus musculus
  siRNA target sequence for 2210404M20Rik (NM_028185.1,654-672).
cttaggaaaagcatacgaa

SEQ ID NO: 471147 - DNA, 19 bp, Mus musculus
  siRNA target sequence for 2210404M20Rik (NM_028185.1,664-682).
gcatacgaacgggattctt

SEQ ID NO: 471148 - DNA, 19 bp, Mus musculus
  siRNA target sequence for 2210404M20Rik (NM_028185.1,687-705).
gactctcactaggctattt

SEQ ID NO: 471149 - DNA, 19 bp, Mus musculus
  siRNA target sequence for 2210404M20Rik (NM_028185.1,689-707).
ctctcactaggctatttga

SEQ ID NO: 471150 - DNA, 19 bp, Mus musculus
  siRNA target sequence for 2210404M20Rik (NM_028185.1,709-727).
cggctgaaacttcaagatt

SEQ ID NO: 471151 - DNA, 19 bp, Mus musculus
  siRNA target sequence for 2210404M20Rik (NM_028185.1,738-756).
ggaagcggattccaaatct

SEQ ID NO: 471152 - DNA, 19 bp, Mus musculus
  siRNA target sequence for 2210404M20Rik (NM_028185.1,781-799).
cgatactcccaaacatcta

SEQ ID NO: 471153 - DNA, 19 bp, Mus musculus
  siRNA target sequence for 2210404M20Rik (NM_028185.1,1046-1064).
ctcggcacataaatcagat

SEQ ID NO: 471154 - DNA, 19 bp, Mus musculus
  siRNA target sequence for 2210404M20Rik (NM_028185.1,1048-1066).
cggcacataaatcagattt

SEQ ID NO: 471155 - DNA, 19 bp, Mus musculus
  siRNA target sequence for Brunol4 (NM_133195.1,624-642).
gggcatatgaacggattaa

SEQ ID NO: 471156 - DNA, 19 bp, Mus musculus
  siRNA target sequence for Brunol4 (NM_133195.1,965-983).
gcgccagcccccttcacat

SEQ ID NO: 471157 - DNA, 19 bp, Mus musculus
  siRNA target sequence for Brunol4 (NM_133195.1,966-984).
cgccagcccccttcacata

SEQ ID NO: 471158 - DNA, 19 bp, Mus musculus
  siRNA target sequence for Brunol4 (NM_133195.1,968-986).
ccagcccccttcacataga

SEQ ID NO: 471159 - DNA, 19 bp, Mus musculus
  siRNA target sequence for Brunol4 (NM_133195.1,975-993).
ccttcacatagaaaactct

SEQ ID NO: 471160 - DNA, 19 bp, Mus musculus
  siRNA target sequence for Brunol4 (NM_133195.1,1004-1022).
gctcaacaagcaacaatct

SEQ ID NO: 471161 - DNA, 19 bp, Mus musculus
  siRNA target sequence for Brunol4 (NM_133195.1,1151-1169).
cgccatcaacgctctacat

SEQ ID NO: 471162 - DNA, 19 bp, Mus musculus
  siRNA target sequence for Brunol4 (NM_133195.1,1267-1285).
gccagatgggcatgttcaa

SEQ ID NO: 471163 - DNA, 19 bp, Mus musculus
  siRNA target sequence for Brunol4 (NM_133195.1,1707-1725).
gctgcctatggtcagatta

SEQ ID NO: 471164 - DNA, 19 bp, Mus musculus
  siRNA target sequence for Brunol4 (NM_133195.1,1738-1756).
ctcagccaccgccaatgat

SEQ ID NO: 471165 - DNA, 19 bp, Mus musculus
  siRNA target sequence for Cugbp1 (NM_017368.2,296-314).
gaaatgatggtggatcatt

SEQ ID NO: 471166 - DNA, 19 bp, Mus musculus
  siRNA target sequence for Cugbp1 (NM_017368.2,307-325).
ggatcattgctctttgaat

SEQ ID NO: 471167 - DNA, 19 bp, Mus musculus
  siRNA target sequence for Cugbp1 (NM_017368.2,308-326).
gatcattgctctttgaatt

SEQ ID NO: 471168 - DNA, 19 bp, Mus musculus
  siRNA target sequence for Cugbp1 (NM_017368.2,311-329).
cattgctctttgaattcca

SEQ ID NO: 471169 - DNA, 19 bp, Mus musculus
  siRNA target sequence for Cugbp1 (NM_017368.2,378-396).
cagatcttgatgctatcaa

SEQ ID NO: 471170 - DNA, 19 bp, Mus musculus
  siRNA target sequence for Cugbp1 (NM_017368.2,457-475).
gcagtatggtgctgtctat

SEQ ID NO: 471171 - DNA, 19 bp, Mus musculus
  siRNA target sequence for Cugbp1 (NM_017368.2,464-482).
ggtgctgtctatgaaatca

SEQ ID NO: 471172 - DNA, 19 bp, Mus musculus
  siRNA target sequence for Cugbp1 (NM_017368.2,517-535).
gagcaaagggtgctgtttt

SEQ ID NO: 471173 - DNA, 19 bp, Mus musculus
  siRNA target sequence for Cugbp1 (NM_017368.2,547-565).
cacccgtaaagctgcatta

SEQ ID NO: 471174 - DNA, 19 bp, Mus musculus
  siRNA target sequence for Cugbp1 (NM_017368.2,669-687).
ggaagctctttattggtat

SEQ ID NO: 471175 - DNA, 19 bp, Mus musculus
  siRNA target sequence for Cugbp1 (NM_017368.2,673-691).
gctctttattggtatgatt

SEQ ID NO: 471176 - DNA, 19 bp, Mus musculus
  siRNA target sequence for Cugbp1 (NM_017368.2,683-701).
ggtatgatttccaagaagt

SEQ ID NO: 471177 - DNA, 19 bp, Mus musculus
  siRNA target sequence for Cugbp1 (NM_017368.2,694-712).
caagaagtgtactgaaaat

SEQ ID NO: 471178 - DNA, 19 bp, Mus musculus
  siRNA target sequence for Cugbp1 (NM_017368.2,713-731).
gacatccgagtcatgtttt

SEQ ID NO: 471179 - DNA, 19 bp, Mus musculus
  siRNA target sequence for Cugbp1 (NM_017368.2,715-733).
catccgagtcatgttttct

SEQ ID NO: 471180 - DNA, 19 bp, Mus musculus
  siRNA target sequence for Cugbp1 (NM_017368.2,732-750).
cttcgtttggacagattga

SEQ ID NO: 471181 - DNA, 19 bp, Mus musculus
  siRNA target sequence for Cugbp1 (NM_017368.2,735-753).
cgtttggacagattgaaga

SEQ ID NO: 471182 - DNA, 19 bp, Mus musculus
  siRNA target sequence for Cugbp1 (NM_017368.2,882-900).
ccccaatggtggtaaagtt

SEQ ID NO: 471183 - DNA, 19 bp, Mus musculus
  siRNA target sequence for Cugbp1 (NM_017368.2,883-901).
cccaatggtggtaaagttt

SEQ ID NO: 471184 - DNA, 19 bp, Mus musculus
  siRNA target sequence for Cugbp1 (NM_017368.2,1021-1039).
ccagtacttagcactttat

SEQ ID NO: 471185 - DNA, 19 bp, Mus musculus
  siRNA target sequence for Cugbp1 (NM_017368.2,1118-1136).
gcaatgcagctacagaatt

SEQ ID NO: 471186 - DNA, 19 bp, Mus musculus
  siRNA target sequence for Cugbp1 (NM_017368.2,1289-1307).
cttggagccctgcaaacat

SEQ ID NO: 471187 - DNA, 19 bp, Mus musculus
  siRNA target sequence for Cugbp1 (NM_017368.2,1377-1395).
gcagcagtggcctttccaa

SEQ ID NO: 471188 - DNA, 19 bp, Mus musculus
  siRNA target sequence for Cugbp1 (NM_017368.2,1378-1396).
cagcagtggcctttccaat

SEQ ID NO: 471189 - DNA, 19 bp, Mus musculus
  siRNA target sequence for Cugbp1 (NM_017368.2,1420-1438).
cctcacccaggcgtattct

SEQ ID NO: 471190 - DNA, 19 bp, Mus musculus
  siRNA target sequence for Cugbp1 (NM_017368.2,1473-1491).
ctctgtacaaccagaattt

SEQ ID NO: 471191 - DNA, 19 bp, Mus musculus
  siRNA target sequence for Cugbp1 (NM_017368.2,1475-1493).
ctgtacaaccagaatttat

SEQ ID NO: 471192 - DNA, 19 bp, Mus musculus
  siRNA target sequence for Cugbp1 (NM_017368.2,1480-1498).
caaccagaatttattgaca

SEQ ID NO: 471193 - DNA, 19 bp, Mus musculus
  siRNA target sequence for Cugbp1 (NM_017368.2,1545-1563).
gagccaacctgttcatcta

SEQ ID NO: 471194 - DNA, 19 bp, Mus musculus
  siRNA target sequence for Cugbp1 (NM_017368.2,1591-1609).
ggacttactgcagatgttt

SEQ ID NO: 471195 - DNA, 19 bp, Mus musculus
  siRNA target sequence for Cugbp1 (NM_017368.2,1625-1643).
gtcgtgtcggccaaggttt

SEQ ID NO: 471196 - DNA, 19 bp, Mus musculus
  siRNA target sequence for Cugbp1 (NM_017368.2,1630-1648).
gtcggccaaggttttcata

SEQ ID NO: 471197 - DNA, 19 bp, Mus musculus
  siRNA target sequence for Cugbp1 (NM_017368.2,1632-1650).
cggccaaggttttcataga

SEQ ID NO: 471198 - DNA, 19 bp, Mus musculus
  siRNA target sequence for Cugbp1 (NM_017368.2,1634-1652).
gccaaggttttcatagaca

SEQ ID NO: 471199 - DNA, 19 bp, Mus musculus
  siRNA target sequence for Cugbp1 (NM_017368.2,1635-1653).
ccaaggttttcatagacaa

SEQ ID NO: 471200 - DNA, 19 bp, Mus musculus
  siRNA target sequence for Cugbp1 (NM_017368.2,1732-1750).
gaacggctttcaaattgga

SEQ ID NO: 471201 - DNA, 19 bp, Mus musculus
  siRNA target sequence for Cugbp1 (NM_017368.2,1749-1767).
gaatgaagaggcttaaagt

SEQ ID NO: 471202 - DNA, 19 bp, Mus musculus
  siRNA target sequence for Cugbp1 (NM_017368.2,1771-1789).
gctcaaacgttcgaagaat

SEQ ID NO: 471203 - DNA, 19 bp, Mus musculus
  siRNA target sequence for Cugbp1 (NM_017368.2,1774-1792).
caaacgttcgaagaatgat

SEQ ID NO: 471204 - DNA, 19 bp, Mus musculus
  siRNA target sequence for Cugbp1 (NM_017368.2,1778-1796).
cgttcgaagaatgatagta

SEQ ID NO: 471205 - DNA, 19 bp, Mus musculus
  siRNA target sequence for Cugbp1 (NM_017368.2,1779-1797).
gttcgaagaatgatagtaa

SEQ ID NO: 471206 - DNA, 19 bp, Mus musculus
  siRNA target sequence for Cugbp2 (NM_010160.1,75-93).
cccaaatccgctgttacta

SEQ ID NO: 471207 - DNA, 19 bp, Mus musculus
  siRNA target sequence for Cugbp2 (NM_010160.1,76-94).
ccaaatccgctgttactat

SEQ ID NO: 471208 - DNA, 19 bp, Mus musculus
  siRNA target sequence for Cugbp2 (NM_010160.1,137-155).
gatgaacggagctttggat

SEQ ID NO: 471209 - DNA, 19 bp, Mus musculus
  siRNA target sequence for Cugbp2 (NM_010160.1,143-161).
cggagctttggatcattca

SEQ ID NO: 471210 - DNA, 19 bp, Mus musculus
  siRNA target sequence for Cugbp2 (NM_010160.1,211-229).
ggtcctggtcggaaaagga

SEQ ID NO: 471211 - DNA, 19 bp, Mus musculus
  siRNA target sequence for Cugbp2 (NM_010160.1,305-323).
ccagagtaaaggttgttgt

SEQ ID NO: 471212 - DNA, 19 bp, Mus musculus
  siRNA target sequence for Cugbp2 (NM_010160.1,315-333).
ggttgttgtttcgtaacat

SEQ ID NO: 471213 - DNA, 19 bp, Mus musculus
  siRNA target sequence for Cugbp2 (NM_010160.1,416-434).
gatgaaacctgcagatagt

SEQ ID NO: 471214 - DNA, 19 bp, Mus musculus
  siRNA target sequence for Cugbp2 (NM_010160.1,460-478).
gaaaattgttcataggaat

SEQ ID NO: 471215 - DNA, 19 bp, Mus musculus
  siRNA target sequence for Cugbp2 (NM_010160.1,523-541).
ctccattcggtcagataga

SEQ ID NO: 471216 - DNA, 19 bp, Mus musculus
  siRNA target sequence for Cugbp2 (NM_010160.1,526-544).
cattcggtcagatagaaga

SEQ ID NO: 471217 - DNA, 19 bp, Mus musculus
  siRNA target sequence for Cugbp2 (NM_010160.1,673-691).
caccaatcgtggtgaagtt

SEQ ID NO: 471218 - DNA, 19 bp, Mus musculus
  siRNA target sequence for Cugbp2 (NM_010160.1,768-786).
gccacttgggggaacctaa

SEQ ID NO: 471219 - DNA, 19 bp, Mus musculus
  siRNA target sequence for Cugbp2 (NM_010160.1,885-903).
ggcatgaatgctttacagt

SEQ ID NO: 471220 - DNA, 19 bp, Mus musculus
  siRNA target sequence for Cugbp2 (NM_010160.1,1046-1064).
cgctggtgcggccatgaat

SEQ ID NO: 471221 - DNA, 19 bp, Mus musculus
  siRNA target sequence for Cugbp2 (NM_010160.1,1047-1065).
gctggtgcggccatgaatt

SEQ ID NO: 471222 - DNA, 19 bp, Mus musculus
  siRNA target sequence for Cugbp2 (NM_010160.1,1050-1068).
ggtgcggccatgaattcct

SEQ ID NO: 471223 - DNA, 19 bp, Mus musculus
  siRNA target sequence for Cugbp2 (NM_010160.1,1051-1069).
gtgcggccatgaattcctt

SEQ ID NO: 471224 - DNA, 19 bp, Mus musculus
  siRNA target sequence for Cugbp2 (NM_010160.1,1073-1091).
ctctcttgggactctacaa

SEQ ID NO: 471225 - DNA, 19 bp, Mus musculus
  siRNA target sequence for Cugbp2 (NM_010160.1,1106-1124).
cactgtcggattgaataat

SEQ ID NO: 471226 - DNA, 19 bp, Mus musculus
  siRNA target sequence for Cugbp2 (NM_010160.1,1108-1126).
ctgtcggattgaataatat

SEQ ID NO: 471227 - DNA, 19 bp, Mus musculus
  siRNA target sequence for Cugbp2 (NM_010160.1,1110-1128).
gtcggattgaataatatta

SEQ ID NO: 471228 - DNA, 19 bp, Mus musculus
  siRNA target sequence for Cugbp2 (NM_010160.1,1217-1235).
ccaggcctactcaggaatt

SEQ ID NO: 471229 - DNA, 19 bp, Mus musculus
  siRNA target sequence for Cugbp2 (NM_010160.1,1326-1344).
gagggggcaaacctcttta

SEQ ID NO: 471230 - DNA, 19 bp, Mus musculus
  siRNA target sequence for Cugbp2 (NM_010160.1,1333-1351).
caaacctctttatttacca

SEQ ID NO: 471231 - DNA, 19 bp, Mus musculus
  siRNA target sequence for Cugbp2 (NM_010160.1,1398-1416).
ccctttggaaatgttatct

SEQ ID NO: 471232 - DNA, 19 bp, Mus musculus
  siRNA target sequence for Cugbp2 (NM_010160.1,1410-1428).
gttatctctgctaaagtct

SEQ ID NO: 471233 - DNA, 19 bp, Mus musculus
  siRNA target sequence for Cugbp2 (NM_010160.1,1419-1437).
gctaaagtcttcattgaca

SEQ ID NO: 471234 - DNA, 19 bp, Mus musculus
  siRNA target sequence for Lsm10 (NM_138721.1,99-117).
cggtgaaggagcgaactat

SEQ ID NO: 471235 - DNA, 19 bp, Mus musculus
  siRNA target sequence for Lsm10 (NM_138721.1,100-118).
ggtgaaggagcgaactatt

SEQ ID NO: 471236 - DNA, 19 bp, Mus musculus
  siRNA target sequence for Lsm10 (NM_138721.1,101-119).
gtgaaggagcgaactattt

SEQ ID NO: 471237 - DNA, 19 bp, Mus musculus
  siRNA target sequence for Lsm10 (NM_138721.1,103-121).
gaaggagcgaactatttct

SEQ ID NO: 471238 - DNA, 19 bp, Mus musculus
  siRNA target sequence for Lsm10 (NM_138721.1,148-166).
gggcctccaaggccaaata

SEQ ID NO: 471239 - DNA, 19 bp, Mus musculus
  siRNA target sequence for Lsm10 (NM_138721.1,152-170).
ctccaaggccaaataacca

SEQ ID NO: 471240 - DNA, 19 bp, Mus musculus
  siRNA target sequence for Lsm10 (NM_138721.1,197-215).
gcccgaggacgcattgaca

SEQ ID NO: 471241 - DNA, 19 bp, Mus musculus
  siRNA target sequence for Lsm10 (NM_138721.1,198-216).
cccgaggacgcattgacaa

SEQ ID NO: 471242 - DNA, 19 bp, Mus musculus
  siRNA target sequence for Lsm10 (NM_138721.1,217-235).
cgtggatgctttcatgaat

SEQ ID NO: 471243 - DNA, 19 bp, Mus musculus
  siRNA target sequence for Lsm10 (NM_138721.1,242-260).
ctggccaatgtcacctata

SEQ ID NO: 471244 - DNA, 19 bp, Mus musculus
  siRNA target sequence for Lsm10 (NM_138721.1,270-288).
ggggacatcaggttgagtt

SEQ ID NO: 471245 - DNA, 19 bp, Mus musculus
  siRNA target sequence for Lsm10 (NM_138721.1,346-364).
ggacatcactgctactatt

SEQ ID NO: 471246 - DNA, 19 bp, Mus musculus
  siRNA target sequence for Lsm10 (NM_138721.1,385-403).
ccaccgtgtgcgcaacttt

SEQ ID NO: 471247 - DNA, 19 bp, Mus musculus
  siRNA target sequence for Lsm2 (NM_030597.2,124-142).
gtgttttgggggaaacctt

SEQ ID NO: 471248 - DNA, 19 bp, Mus musculus
  siRNA target sequence for Lsm2 (NM_030597.2,211-229).
gttgacgaggactttgtga

SEQ ID NO: 471249 - DNA, 19 bp, Mus musculus
  siRNA target sequence for Lsm2 (NM_030597.2,230-248).
ggctcttctactccttttt

SEQ ID NO: 471250 - DNA, 19 bp, Mus musculus
  siRNA target sequence for Lsm2 (NM_030597.2,322-340).
gtggaccagtacctcaata

SEQ ID NO: 471251 - DNA, 19 bp, Mus musculus
  siRNA target sequence for Lsm2 (NM_030597.2,325-343).
gaccagtacctcaatatca

SEQ ID NO: 471252 - DNA, 19 bp, Mus musculus
  siRNA target sequence for Lsm2 (NM_030597.2,375-393).
gaaataccctcacatgtta

SEQ ID NO: 471253 - DNA, 19 bp, Mus musculus
  siRNA target sequence for Lsm3 (NM_026309.1,45-63).
cagcaacagaccaccaata

SEQ ID NO: 471254 - DNA, 19 bp, Mus musculus
  siRNA target sequence for Lsm3 (NM_026309.1,97-115).
gcctggatgagcgaattta

SEQ ID NO: 471255 - DNA, 19 bp, Mus musculus
  siRNA target sequence for Lsm3 (NM_026309.1,105-123).
gagcgaatttatgtgaaaa

SEQ ID NO: 471256 - DNA, 19 bp, Mus musculus
  siRNA target sequence for Lsm3 (NM_026309.1,108-126).
cgaatttatgtgaaaatga

SEQ ID NO: 471257 - DNA, 19 bp, Mus musculus
  siRNA target sequence for Lsm3 (NM_026309.1,148-166).
gcagactacacgcttatga

SEQ ID NO: 471258 - DNA, 19 bp, Mus musculus
  siRNA target sequence for Lsm3 (NM_026309.1,149-167).
cagactacacgcttatgat

SEQ ID NO: 471259 - DNA, 19 bp, Mus musculus
  siRNA target sequence for Lsm3 (NM_026309.1,151-169).
gactacacgcttatgatca

SEQ ID NO: 471260 - DNA, 19 bp, Mus musculus
  siRNA target sequence for Lsm3 (NM_026309.1,156-174).
cacgcttatgatcaacatt

SEQ ID NO: 471261 - DNA, 19 bp, Mus musculus
  siRNA target sequence for Lsm3 (NM_026309.1,158-176).
cgcttatgatcaacattta

SEQ ID NO: 471262 - DNA, 19 bp, Mus musculus
  siRNA target sequence for Lsm3 (NM_026309.1,159-177).
gcttatgatcaacatttaa

SEQ ID NO: 471263 - DNA, 19 bp, Mus musculus
  siRNA target sequence for Lsm3 (NM_026309.1,209-227).
gacaacgatagagattgat

SEQ ID NO: 471264 - DNA, 19 bp, Mus musculus
  siRNA target sequence for Lsm3 (NM_026309.1,211-229).
caacgatagagattgatga

SEQ ID NO: 471265 - DNA, 19 bp, Mus musculus
  siRNA target sequence for Lsm3 (NM_026309.1,221-239).
gattgatgaggagacatat

SEQ ID NO: 471266 - DNA, 19 bp, Mus musculus
  siRNA target sequence for Lsm3 (NM_026309.1,292-310).
gagatggcgtcgttctagt

SEQ ID NO: 471267 - DNA, 19 bp, Mus musculus
  siRNA target sequence for Lsm4 (NM_015816.1,204-222).
cgcgggatggtgacaagtt

SEQ ID NO: 471268 - DNA, 19 bp, Mus musculus
  siRNA target sequence for Lsm4 (NM_015816.1,249-267).
gtggcagcaccatcaagta

SEQ ID NO: 471269 - DNA, 19 bp, Mus musculus
  siRNA target sequence for Ptbp2 (NM_019550.1,145-163).
gagtggcatggtagttaca

SEQ ID NO: 471270 - DNA, 19 bp, Mus musculus
  siRNA target sequence for Ptbp2 (NM_019550.1,165-183).
ccaacggtaacgatagtaa

SEQ ID NO: 471271 - DNA, 19 bp, Mus musculus
  siRNA target sequence for Ptbp2 (NM_019550.1,169-187).
cggtaacgatagtaagaaa

SEQ ID NO: 471272 - DNA, 19 bp, Mus musculus
  siRNA target sequence for Ptbp2 (NM_019550.1,175-193).
cgatagtaagaaatttaaa

SEQ ID NO: 471273 - DNA, 19 bp, Mus musculus
  siRNA target sequence for Ptbp2 (NM_019550.1,214-232).
ggctccctctcgtgtactt

SEQ ID NO: 471274 - DNA, 19 bp, Mus musculus
  siRNA target sequence for Ptbp2 (NM_019550.1,216-234).
ctccctctcgtgtacttca

SEQ ID NO: 471275 - DNA, 19 bp, Mus musculus
  siRNA target sequence for Ptbp2 (NM_019550.1,224-242).
cgtgtacttcacattcgaa

SEQ ID NO: 471276 - DNA, 19 bp, Mus musculus
  siRNA target sequence for Ptbp2 (NM_019550.1,225-243).
gtgtacttcacattcgaaa

SEQ ID NO: 471277 - DNA, 19 bp, Mus musculus
  siRNA target sequence for Ptbp2 (NM_019550.1,252-270).
gtgaagtgactgaaacaga

SEQ ID NO: 471278 - DNA, 19 bp, Mus musculus
  siRNA target sequence for Ptbp2 (NM_019550.1,263-281).
gaaacagaagttattgctt

SEQ ID NO: 471279 - DNA, 19 bp, Mus musculus
  siRNA target sequence for Ptbp2 (NM_019550.1,269-287).
gaagttattgctttaggtt

SEQ ID NO: 471280 - DNA, 19 bp, Mus musculus
  siRNA target sequence for Ptbp2 (NM_019550.1,365-383).
gcagctattactatggtta

SEQ ID NO: 471281 - DNA, 19 bp, Mus musculus
  siRNA target sequence for Ptbp2 (NM_019550.1,410-428).
cttcgtaaccaaccaattt

SEQ ID NO: 471282 - DNA, 19 bp, Mus musculus
  siRNA target sequence for Ptbp2 (NM_019550.1,413-431).
cgtaaccaaccaatttaca

SEQ ID NO: 471283 - DNA, 19 bp, Mus musculus
  siRNA target sequence for Ptbp2 (NM_019550.1,414-432).
gtaaccaaccaatttacat

SEQ ID NO: 471284 - DNA, 19 bp, Mus musculus
  siRNA target sequence for Ptbp2 (NM_019550.1,436-454).
gtactccaatcacaaagaa

SEQ ID NO: 471285 - DNA, 19 bp, Mus musculus
  siRNA target sequence for Ptbp2 (NM_019550.1,439-457).
ctccaatcacaaagaacta

SEQ ID NO: 471286 - DNA, 19 bp, Mus musculus
  siRNA target sequence for Ptbp2 (NM_019550.1,462-480).
cagataatacattaaacca

SEQ ID NO: 471287 - DNA, 19 bp, Mus musculus
  siRNA target sequence for Ptbp2 (NM_019550.1,478-496).
ccaacgtgcgcaagtagtt

SEQ ID NO: 471288 - DNA, 19 bp, Mus musculus
  siRNA target sequence for Ptbp2 (NM_019550.1,483-501).
gtgcgcaagtagttcttca

SEQ ID NO: 471289 - DNA, 19 bp, Mus musculus
  siRNA target sequence for Ptbp2 (NM_019550.1,512-530).
gcggtccagacagcaaata

SEQ ID NO: 471290 - DNA, 19 bp, Mus musculus
  siRNA target sequence for Ptbp2 (NM_019550.1,575-593).
gcccagagtccagtactta

SEQ ID NO: 471291 - DNA, 19 bp, Mus musculus
  siRNA target sequence for Ptbp2 (NM_019550.1,580-598).
gagtccagtacttagaata

SEQ ID NO: 471292 - DNA, 19 bp, Mus musculus
  siRNA target sequence for Ptbp2 (NM_019550.1,582-600).
gtccagtacttagaataat

SEQ ID NO: 471293 - DNA, 19 bp, Mus musculus
  siRNA target sequence for Ptbp2 (NM_019550.1,585-603).
cagtacttagaataattat

SEQ ID NO: 471294 - DNA, 19 bp, Mus musculus
  siRNA target sequence for Ptbp2 (NM_019550.1,613-631).
gtactaccctgtaacactt

SEQ ID NO: 471295 - DNA, 19 bp, Mus musculus
  siRNA target sequence for Ptbp2 (NM_019550.1,662-680).
ggtgctgtattgaagataa

SEQ ID NO: 471296 - DNA, 19 bp, Mus musculus
  siRNA target sequence for Ptbp2 (NM_019550.1,758-776).
gccctagatggtcaaaata

SEQ ID NO: 471297 - DNA, 19 bp, Mus musculus
  siRNA target sequence for Ptbp2 (NM_019550.1,792-810).
gtaccctaaggattgattt

SEQ ID NO: 471298 - DNA, 19 bp, Mus musculus
  siRNA target sequence for Ptbp2 (NM_019550.1,797-815).
ctaaggattgatttttcca

SEQ ID NO: 471299 - DNA, 19 bp, Mus musculus
  siRNA target sequence for Ptbp2 (NM_019550.1,814-832).
caaacttgtgaatttgaat

SEQ ID NO: 471300 - DNA, 19 bp, Mus musculus
  siRNA target sequence for Ptbp2 (NM_019550.1,848-866).
gataaaagtagggattata

SEQ ID NO: 471301 - DNA, 19 bp, Mus musculus
  siRNA target sequence for Ptbp2 (NM_019550.1,1047-1065).
cagctggtggcaatacagt

SEQ ID NO: 471302 - DNA, 19 bp, Mus musculus
  siRNA target sequence for Ptbp2 (NM_019550.1,1064-1082).
gtcctgttggttagcaatt

SEQ ID NO: 471303 - DNA, 19 bp, Mus musculus
  siRNA target sequence for Ptbp2 (NM_019550.1,1120-1138).
cctcttcggtgtttatgga

SEQ ID NO: 471304 - DNA, 19 bp, Mus musculus
  siRNA target sequence for Ptbp2 (NM_019550.1,1150-1168).
cgtgaagattctgtacaat

SEQ ID NO: 471305 - DNA, 19 bp, Mus musculus
  siRNA target sequence for Ptbp2 (NM_019550.1,1212-1230).
cccagctcgccatgaatca

SEQ ID NO: 471306 - DNA, 19 bp, Mus musculus
  siRNA target sequence for Ptbp2 (NM_019550.1,1217-1235).
ctcgccatgaatcatctta

SEQ ID NO: 471307 - DNA, 19 bp, Mus musculus
  siRNA target sequence for Ptbp2 (NM_019550.1,1219-1237).
cgccatgaatcatcttaat

SEQ ID NO: 471308 - DNA, 19 bp, Mus musculus
  siRNA target sequence for Ptbp2 (NM_019550.1,1249-1267).
gtatggaaaaattattcgt

SEQ ID NO: 471309 - DNA, 19 bp, Mus musculus
  siRNA target sequence for Ptbp2 (NM_019550.1,1316-1334).
gatgatcaagggctaacaa

SEQ ID NO: 471310 - DNA, 19 bp, Mus musculus
  siRNA target sequence for Ptbp2 (NM_019550.1,1352-1370).
ccactgcaccgttttaaaa

SEQ ID NO: 471311 - DNA, 19 bp, Mus musculus
  siRNA target sequence for Ptbp2 (NM_019550.1,1353-1371).
cactgcaccgttttaaaaa

SEQ ID NO: 471312 - DNA, 19 bp, Mus musculus
  siRNA target sequence for Ptbp2 (NM_019550.1,1413-1431).
ctacccttcacctgtctaa

SEQ ID NO: 471313 - DNA, 19 bp, Mus musculus
  siRNA target sequence for Ptbp2 (NM_019550.1,1456-1474).
ggatctgcgaactctgttt

SEQ ID NO: 471314 - DNA, 19 bp, Mus musculus
  siRNA target sequence for Ptbp2 (NM_019550.1,1493-1511).
gtgaaagcatttaagtttt

SEQ ID NO: 471315 - DNA, 19 bp, Mus musculus
  siRNA target sequence for Ptbp2 (NM_019550.1,1572-1590).
ctttgattgatcttcataa

SEQ ID NO: 471316 - DNA, 19 bp, Mus musculus
  siRNA target sequence for Ptbp2 (NM_019550.1,1576-1594).
gattgatcttcataattat

SEQ ID NO: 471317 - DNA, 19 bp, Mus musculus
  siRNA target sequence for Sca2 (NM_009125.1,227-245).
cgcctcagactgttttggt

SEQ ID NO: 471318 - DNA, 19 bp, Mus musculus
  siRNA target sequence for Sca2 (NM_009125.1,228-246).
gcctcagactgttttggta

SEQ ID NO: 471319 - DNA, 19 bp, Mus musculus
  siRNA target sequence for Sca2 (NM_009125.1,690-708).
ctgcctcagcctacgattt

SEQ ID NO: 471320 - DNA, 19 bp, Mus musculus
  siRNA target sequence for Sca2 (NM_009125.1,692-710).
gcctcagcctacgatttct

SEQ ID NO: 471321 - DNA, 19 bp, Mus musculus
  siRNA target sequence for Sca2 (NM_009125.1,693-711).
cctcagcctacgatttctt

SEQ ID NO: 471322 - DNA, 19 bp, Mus musculus
  siRNA target sequence for Sca2 (NM_009125.1,698-716).
gcctacgatttcttttgat

SEQ ID NO: 471323 - DNA, 19 bp, Mus musculus
  siRNA target sequence for Sca2 (NM_009125.1,703-721).
cgatttcttttgatggaat

SEQ ID NO: 471324 - DNA, 19 bp, Mus musculus
  siRNA target sequence for Sca2 (NM_009125.1,734-752).
gaggatggttcatatactt

SEQ ID NO: 471325 - DNA, 19 bp, Mus musculus
  siRNA target sequence for Sca2 (NM_009125.1,755-773).
gtcagttgttggatcgaaa

SEQ ID NO: 471326 - DNA, 19 bp, Mus musculus
  siRNA target sequence for Sca2 (NM_009125.1,836-854).
gtgtgacttggtacttgat

SEQ ID NO: 471327 - DNA, 19 bp, Mus musculus
  siRNA target sequence for Sca2 (NM_009125.1,855-873).
gctgcacatgagaaaagta

SEQ ID NO: 471328 - DNA, 19 bp, Mus musculus
  siRNA target sequence for Sca2 (NM_009125.1,911-929).
ggagagtgttttgttcaaa

SEQ ID NO: 471329 - DNA, 19 bp, Mus musculus
  siRNA target sequence for Sca2 (NM_009125.1,941-959).
cgttgtggtacagtttaaa

SEQ ID NO: 471330 - DNA, 19 bp, Mus musculus
  siRNA target sequence for Sca2 (NM_009125.1,978-996).
gcacggagagatgctttta

SEQ ID NO: 471331 - DNA, 19 bp, Mus musculus
  siRNA target sequence for Sca2 (NM_009125.1,982-1000).
ggagagatgcttttactga

SEQ ID NO: 471332 - DNA, 19 bp, Mus musculus
  siRNA target sequence for Sca2 (NM_009125.1,1125-1143).
cccaatgacatgtttcgat

SEQ ID NO: 471333 - DNA, 19 bp, Mus musculus
  siRNA target sequence for Sca2 (NM_009125.1,1126-1144).
ccaatgacatgtttcgata

SEQ ID NO: 471334 - DNA, 19 bp, Mus musculus
  siRNA target sequence for Sca2 (NM_009125.1,1140-1158).
cgatataatgaagagaatt

SEQ ID NO: 471335 - DNA, 19 bp, Mus musculus
  siRNA target sequence for Sca2 (NM_009125.1,1162-1180).
gtgtggtgtccacatatga

SEQ ID NO: 471336 - DNA, 19 bp, Mus musculus
  siRNA target sequence for Sca2 (NM_009125.1,1164-1182).
gtggtgtccacatatgata

SEQ ID NO: 471337 - DNA, 19 bp, Mus musculus
  siRNA target sequence for Sca2 (NM_009125.1,1192-1210).
cttcatatacggttccttt

SEQ ID NO: 471338 - DNA, 19 bp, Mus musculus
  siRNA target sequence for Sca2 (NM_009125.1,1195-1213).
catatacggttcctttaga

SEQ ID NO: 471339 - DNA, 19 bp, Mus musculus
  siRNA target sequence for Sca2 (NM_009125.1,1300-1318).
ctcgtgtcgcccttgagaa

SEQ ID NO: 471340 - DNA, 19 bp, Mus musculus
  siRNA target sequence for Sca2 (NM_009125.1,1303-1321).
gtgtcgcccttgagaatga

SEQ ID NO: 471341 - DNA, 19 bp, Mus musculus
  siRNA target sequence for Sca2 (NM_009125.1,1380-1398).
gggcatggccccaacacta

SEQ ID NO: 471342 - DNA, 19 bp, Mus musculus
  siRNA target sequence for Sca2 (NM_009125.1,1389-1407).
cccaacactagggacaata

SEQ ID NO: 471343 - DNA, 19 bp, Mus musculus
  siRNA target sequence for Sca2 (NM_009125.1,1390-1408).
ccaacactagggacaataa

SEQ ID NO: 471344 - DNA, 19 bp, Mus musculus
  siRNA target sequence for Sca2 (NM_009125.1,1391-1409).
caacactagggacaataaa

SEQ ID NO: 471345 - DNA, 19 bp, Mus musculus
  siRNA target sequence for Sca2 (NM_009125.1,1394-1412).
cactagggacaataaatat

SEQ ID NO: 471346 - DNA, 19 bp, Mus musculus
  siRNA target sequence for Sca2 (NM_009125.1,1396-1414).
ctagggacaataaatatat

SEQ ID NO: 471347 - DNA, 19 bp, Mus musculus
  siRNA target sequence for Sca2 (NM_009125.1,1549-1567).
ctggctcagaccaaagagt

SEQ ID NO: 471348 - DNA, 19 bp, Mus musculus
  siRNA target sequence for Sca2 (NM_009125.1,1818-1836).
cgccaccctcggaatcaca

SEQ ID NO: 471349 - DNA, 19 bp, Mus musculus
  siRNA target sequence for Sca2 (NM_009125.1,1978-1996).
ggttatctcccaaaactca

SEQ ID NO: 471350 - DNA, 19 bp, Mus musculus
  siRNA target sequence for Sca2 (NM_009125.1,2229-2247).
gttaaagcaagtgaaacat

SEQ ID NO: 471351 - DNA, 19 bp, Mus musculus
  siRNA target sequence for Sca2 (NM_009125.1,2241-2259).
gaaacatcacctagctttt

SEQ ID NO: 471352 - DNA, 19 bp, Mus musculus
  siRNA target sequence for Sca2 (NM_009125.1,2277-2295).
ggtatgtcaccagttgttt

SEQ ID NO: 471353 - DNA, 19 bp, Mus musculus
  siRNA target sequence for Sca2 (NM_009125.1,2359-2377).
gctctacatctgaatctat

SEQ ID NO: 471354 - DNA, 19 bp, Mus musculus
  siRNA target sequence for Sca2 (NM_009125.1,2378-2396).
ggatcaactactaagcaaa

SEQ ID NO: 471355 - DNA, 19 bp, Mus musculus
  siRNA target sequence for Sca2 (NM_009125.1,2379-2397).
gatcaactactaagcaaaa

SEQ ID NO: 471356 - DNA, 19 bp, Mus musculus
  siRNA target sequence for Sca2 (NM_009125.1,2414-2432).
gtcacgagatttgattaaa

SEQ ID NO: 471357 - DNA, 19 bp, Mus musculus
  siRNA target sequence for Sca2 (NM_009125.1,2416-2434).
cacgagatttgattaaaga

SEQ ID NO: 471358 - DNA, 19 bp, Mus musculus
  siRNA target sequence for Sca2 (NM_009125.1,2441-2459).
ggaagcaagtgctaaggat

SEQ ID NO: 471359 - DNA, 19 bp, Mus musculus
  siRNA target sequence for Sca2 (NM_009125.1,2721-2739).
cagccaaagccttctacta

SEQ ID NO: 471360 - DNA, 19 bp, Mus musculus
  siRNA target sequence for Sca2 (NM_009125.1,2827-2845).
gcttcgcacccaatatgat

SEQ ID NO: 471361 - DNA, 19 bp, Mus musculus
  siRNA target sequence for Sca2 (NM_009125.1,2831-2849).
cgcacccaatatgatgtat

SEQ ID NO: 471362 - DNA, 19 bp, Mus musculus
  siRNA target sequence for Sca2 (NM_009125.1,2878-2896).
ctttatacccaatacctat

SEQ ID NO: 471363 - DNA, 19 bp, Mus musculus
  siRNA target sequence for Sca2 (NM_009125.1,2932-2950).
gagcaggtaaagtaccaaa

SEQ ID NO: 471364 - DNA, 19 bp, Mus musculus
  siRNA target sequence for Sca2 (NM_009125.1,3101-3119).
ccagcatgtgccgcattat

SEQ ID NO: 471365 - DNA, 19 bp, Mus musculus
  siRNA target sequence for Sca2 (NM_009125.1,3105-3123).
catgtgccgcattatcagt

SEQ ID NO: 471366 - DNA, 19 bp, Mus musculus
  siRNA target sequence for Sca2 (NM_009125.1,3140-3158).
gtacagtcctgtcatacaa

SEQ ID NO: 471367 - DNA, 19 bp, Mus musculus
  siRNA target sequence for Sca2 (NM_009125.1,3145-3163).
gtcctgtcatacaaggtaa

SEQ ID NO: 471368 - DNA, 19 bp, Mus musculus
  siRNA target sequence for Sca2 (NM_009125.1,3242-3260).
gcagacgcacgccatgtat

SEQ ID NO: 471369 - DNA, 19 bp, Mus musculus
  siRNA target sequence for Sca2 (NM_009125.1,3257-3275).
gtatgcatgtcccaaatta

SEQ ID NO: 471370 - DNA, 19 bp, Mus musculus
  siRNA target sequence for Sca2 (NM_009125.1,3262-3280).
catgtcccaaattaccata

SEQ ID NO: 471371 - DNA, 19 bp, Mus musculus
  siRNA target sequence for Sca2 (NM_009125.1,3265-3283).
gtcccaaattaccatacaa

SEQ ID NO: 471372 - DNA, 19 bp, Mus musculus
  siRNA target sequence for Sca2 (NM_009125.1,3267-3285).
cccaaattaccatacaaca

SEQ ID NO: 471373 - DNA, 19 bp, Mus musculus
  siRNA target sequence for Sca2 (NM_009125.1,3268-3286).
ccaaattaccatacaacaa

SEQ ID NO: 471374 - DNA, 19 bp, Mus musculus
  siRNA target sequence for Sca2 (NM_009125.1,3338-3356).
gcagtatgcacatcctaat

SEQ ID NO: 471375 - DNA, 19 bp, Mus musculus
  siRNA target sequence for Sca2 (NM_009125.1,3509-3527).
gcagcagtcggccatttat

SEQ ID NO: 471376 - DNA, 19 bp, Mus musculus
  siRNA target sequence for Sca2 (NM_009125.1,3562-3580).
cacctgcctctaatacaca

SEQ ID NO: 471377 - DNA, 19 bp, Mus musculus
  siRNA target sequence for Sca2 (NM_009125.1,3626-3644).
catccacccttctcatgtt

SEQ ID NO: 471378 - DNA, 19 bp, Mus musculus
  siRNA target sequence for Sca2 (NM_009125.1,3727-3745).
ctgcccatgcgccaatgat

SEQ ID NO: 471379 - DNA, 19 bp, Mus musculus
  siRNA target sequence for Sca2 (NM_009125.1,3732-3750).
catgcgccaatgatgctaa

SEQ ID NO: 471380 - DNA, 19 bp, Mus musculus
  siRNA target sequence for Sca2 (NM_009125.1,3735-3753).
gcgccaatgatgctaatga

SEQ ID NO: 471381 - DNA, 19 bp, Mus musculus
  siRNA target sequence for Sca2 (NM_009125.1,3842-3860).
gacgcacccttcagtacaa

SEQ ID NO: 471382 - DNA, 19 bp, Mus musculus
  siRNA target sequence for Snrpb (NM_009225.1,647-665).
caggacggccgtatcttca

SEQ ID NO: 471383 - DNA, 19 bp, Mus musculus
  siRNA target sequence for Snrpd3 (NM_026095.3,110-128).
ctattggtgtgccgattaa

SEQ ID NO: 471384 - DNA, 19 bp, Mus musculus
  siRNA target sequence for Snrpd3 (NM_026095.3,115-133).
ggtgtgccgattaaagtct

SEQ ID NO: 471385 - DNA, 19 bp, Mus musculus
  siRNA target sequence for Snrpd3 (NM_026095.3,116-134).
gtgtgccgattaaagtctt

SEQ ID NO: 471386 - DNA, 19 bp, Mus musculus
  siRNA target sequence for Snrpd3 (NM_026095.3,274-292).
cagctggaacaggtatata

SEQ ID NO: 471387 - DNA, 19 bp, Mus musculus
  siRNA target sequence for Snrpd3 (NM_026095.3,276-294).
gctggaacaggtatatata

SEQ ID NO: 471388 - DNA, 19 bp, Mus musculus
  siRNA target sequence for Snrpn (NM_013670.2,518-536).
ctgcaagatgggagaatct

SEQ ID NO: 471389 - DNA, 19 bp, Mus musculus
  siRNA target sequence for Snrpn (NM_013670.2,674-692).
cgtggggagaacttggttt

SEQ ID NO: 471390 - DNA, 19 bp, Mus musculus
  siRNA target sequence for Srrm1 (NM_016799.1,49-67).
caagtgcggagcaggataa

SEQ ID NO: 471391 - DNA, 19 bp, Mus musculus
  siRNA target sequence for Srrm1 (NM_016799.1,69-87).
cggttcagcaacaaacaga

SEQ ID NO: 471392 - DNA, 19 bp, Mus musculus
  siRNA target sequence for Srrm1 (NM_016799.1,162-180).
gttataaagccttggataa

SEQ ID NO: 471393 - DNA, 19 bp, Mus musculus
  siRNA target sequence for Srrm1 (NM_016799.1,200-218).
ccttggattcgaagatgat

SEQ ID NO: 471394 - DNA, 19 bp, Mus musculus
  siRNA target sequence for Srrm1 (NM_016799.1,205-223).
gattcgaagatgatgttgt

SEQ ID NO: 471395 - DNA, 19 bp, Mus musculus
  siRNA target sequence for Srrm1 (NM_016799.1,222-240).
gtcattgagtttatattca

SEQ ID NO: 471396 - DNA, 19 bp, Mus musculus
  siRNA target sequence for Srrm1 (NM_016799.1,264-282).
gattccaaaatgatgcaaa

SEQ ID NO: 471397 - DNA, 19 bp, Mus musculus
  siRNA target sequence for Srrm1 (NM_016799.1,350-368).
gttgagtgcacaagaaaat

SEQ ID NO: 471398 - DNA, 19 bp, Mus musculus
  siRNA target sequence for Srrm1 (NM_016799.1,385-403).
ctgctttcctagagttgaa

SEQ ID NO: 471399 - DNA, 19 bp, Mus musculus
  siRNA target sequence for Srrm1 (NM_016799.1,888-906).
cgatcaccttctcatacta

SEQ ID NO: 471400 - DNA, 19 bp, Mus musculus
  siRNA target sequence for Srrm1 (NM_016799.1,909-927).
ccaagacggagacatagat

SEQ ID NO: 471401 - DNA, 19 bp, Mus musculus
  siRNA target sequence for Srrm1 (NM_016799.1,921-939).
catagatcccgatcaagat

SEQ ID NO: 471402 - DNA, 19 bp, Mus musculus
  siRNA target sequence for Srrm1 (NM_016799.1,925-943).
gatcccgatcaagatcata

SEQ ID NO: 471403 - DNA, 19 bp, Mus musculus
  siRNA target sequence for Srrm1 (NM_016799.1,929-947).
ccgatcaagatcatactct

SEQ ID NO: 471404 - DNA, 19 bp, Mus musculus
  siRNA target sequence for Srrm1 (NM_016799.1,1117-1135).
cccggtcaccaccaaagaa

SEQ ID NO: 471405 - DNA, 19 bp, Mus musculus
  siRNA target sequence for Srrm1 (NM_016799.1,1164-1182).
cggaaaacgcgtaggttat

SEQ ID NO: 471406 - DNA, 19 bp, Mus musculus
  siRNA target sequence for Srrm1 (NM_016799.1,1166-1184).
gaaaacgcgtaggttatca

SEQ ID NO: 471407 - DNA, 19 bp, Mus musculus
  siRNA target sequence for Srrm1 (NM_016799.1,1271-1289).
gcagtcaaaccgtacaaga

SEQ ID NO: 471408 - DNA, 19 bp, Mus musculus
  siRNA target sequence for Srrm1 (NM_016799.1,1272-1290).
cagtcaaaccgtacaagaa

SEQ ID NO: 471409 - DNA, 19 bp, Mus musculus
  siRNA target sequence for Srrm1 (NM_016799.1,1315-1333).
gaagaacctccggtaaagt

SEQ ID NO: 471410 - DNA, 19 bp, Mus musculus
  siRNA target sequence for Srrm1 (NM_016799.1,1321-1339).
cctccggtaaagtgacaaa

SEQ ID NO: 471411 - DNA, 19 bp, Mus musculus
  siRNA target sequence for Srrm1 (NM_016799.1,1324-1342).
ccggtaaagtgacaaaaca

SEQ ID NO: 471412 - DNA, 19 bp, Mus musculus
  siRNA target sequence for Srrm1 (NM_016799.1,1325-1343).
cggtaaagtgacaaaacat

SEQ ID NO: 471413 - DNA, 19 bp, Mus musculus
  siRNA target sequence for Srrm1 (NM_016799.1,1378-1396).
cacccaagcctagaaaagt

SEQ ID NO: 471414 - DNA, 19 bp, Mus musculus
  siRNA target sequence for Srrm1 (NM_016799.1,1481-1499).
gaaccagcagtcttcatct

SEQ ID NO: 471415 - DNA, 19 bp, Mus musculus
  siRNA target sequence for Srrm1 (NM_016799.1,1615-1633).
ctcgaaagcgccagaaaga

SEQ ID NO: 471416 - DNA, 19 bp, Mus musculus
  siRNA target sequence for Srrm1 (NM_016799.1,1674-1692).
ccagtgactaaaagtagta

SEQ ID NO: 471417 - DNA, 19 bp, Mus musculus
  siRNA target sequence for Srrm1 (NM_016799.1,1677-1695).
gtgactaaaagtagtagaa

SEQ ID NO: 471418 - DNA, 19 bp, Mus musculus
  siRNA target sequence for Srrm1 (NM_016799.1,1875-1893).
cccattcagaggagatact

SEQ ID NO: 471419 - DNA, 19 bp, Mus musculus
  siRNA target sequence for Srrm1 (NM_016799.1,1877-1895).
cattcagaggagatactct

SEQ ID NO: 471420 - DNA, 19 bp, Mus musculus
  siRNA target sequence for Srrm1 (NM_016799.1,2039-2057).
gccctccttatcttcaaaa

SEQ ID NO: 471421 - DNA, 19 bp, Mus musculus
  siRNA target sequence for Srrm1 (NM_016799.1,2041-2059).
cctccttatcttcaaaaca

SEQ ID NO: 471422 - DNA, 19 bp, Mus musculus
  siRNA target sequence for Srrm1 (NM_016799.1,2042-2060).
ctccttatcttcaaaacat

SEQ ID NO: 471423 - DNA, 19 bp, Mus musculus
  siRNA target sequence for Srrm1 (NM_016799.1,2223-2241).
ccaagtactaggcctatta

SEQ ID NO: 471424 - DNA, 19 bp, Mus musculus
  siRNA target sequence for Srrm1 (NM_016799.1,2259-2277).
ccggagcccaaaaagataa

SEQ ID NO: 471425 - DNA, 19 bp, Mus musculus
  siRNA target sequence for Srrm1 (NM_016799.1,2306-2324).
cgtaagaagggtttcatct

SEQ ID NO: 471426 - DNA, 19 bp, Mus musculus
  siRNA target sequence for Srrm1 (NM_016799.1,2307-2325).
gtaagaagggtttcatctt

SEQ ID NO: 471427 - DNA, 19 bp, Mus musculus
  siRNA target sequence for Srrm1 (NM_016799.1,2346-2364).
cctgagccagcagctaaaa

SEQ ID NO: 471428 - DNA, 19 bp, Mus musculus
  siRNA target sequence for Srrm1 (NM_016799.1,2422-2440).
ctgcagtaccagccaaaaa

SEQ ID NO: 471429 - DNA, 19 bp, Mus musculus
  siRNA target sequence for Srrm1 (NM_016799.1,2473-2491).
cccggaattctgatcaaga

SEQ ID NO: 471430 - DNA, 19 bp, Mus musculus
  siRNA target sequence for Pabpc1 (NM_008774.2,579-597).
gggtctgcagggacatgat

SEQ ID NO: 471431 - DNA, 19 bp, Mus musculus
  siRNA target sequence for Pabpc1 (NM_008774.2,615-633).
gctacgcgtacgtgaactt

SEQ ID NO: 471432 - DNA, 19 bp, Mus musculus
  siRNA target sequence for Pabpc1 (NM_008774.2,874-892).
ctatggatttgtacacttt

SEQ ID NO: 471433 - DNA, 19 bp, Mus musculus
  siRNA target sequence for Pabpc2 (NM_011033.1,311-329).
cgttccctgggctatgctt

SEQ ID NO: 471434 - DNA, 19 bp, Mus musculus
  siRNA target sequence for Pabpc2 (NM_011033.1,321-339).
gctatgcttccgtgaactt

SEQ ID NO: 471435 - DNA, 19 bp, Mus musculus
  siRNA target sequence for Pabpc2 (NM_011033.1,322-340).
ctatgcttccgtgaacttt

SEQ ID NO: 471436 - DNA, 19 bp, Mus musculus
  siRNA target sequence for Pabpc2 (NM_011033.1,450-468).
gtggagtaggcaatgtgtt

SEQ ID NO: 471437 - DNA, 19 bp, Mus musculus
  siRNA target sequence for Pabpc2 (NM_011033.1,453-471).
gagtaggcaatgtgttcat

SEQ ID NO: 471438 - DNA, 19 bp, Mus musculus
  siRNA target sequence for Pabpc2 (NM_011033.1,481-499).
gaacaagaccattgataat

SEQ ID NO: 471439 - DNA, 19 bp, Mus musculus
  siRNA target sequence for Pabpc2 (NM_011033.1,487-505).
gaccattgataataaagca

SEQ ID NO: 471440 - DNA, 19 bp, Mus musculus
  siRNA target sequence for Pabpc2 (NM_011033.1,522-540).
ctgcttttggcaatatcct

SEQ ID NO: 471441 - DNA, 19 bp, Mus musculus
  siRNA target sequence for Pabpc2 (NM_011033.1,836-854).
gatgaaggtgggaaatcga

SEQ ID NO: 471442 - DNA, 19 bp, Mus musculus
  siRNA target sequence for Pabpc2 (NM_011033.1,842-860).
ggtgggaaatcgaaaggat

SEQ ID NO: 471443 - DNA, 19 bp, Mus musculus
  siRNA target sequence for Pabpc2 (NM_011033.1,954-972).
gtcgagcgcagaaaaaaga

SEQ ID NO: 471444 - DNA, 19 bp, Mus musculus
  siRNA target sequence for Pabpc2 (NM_011033.1,1004-1022).
gaacaggtgacacaagata

SEQ ID NO: 471445 - DNA, 19 bp, Mus musculus
  siRNA target sequence for Pabpc2 (NM_011033.1,1032-1050).
gatatcagggcattaacct

SEQ ID NO: 471446 - DNA, 19 bp, Mus musculus
  siRNA target sequence for Pabpc2 (NM_011033.1,1040-1058).
ggcattaacctttatgtga

SEQ ID NO: 471447 - DNA, 19 bp, Mus musculus
  siRNA target sequence for Pabpc2 (NM_011033.1,1041-1059).
gcattaacctttatgtgaa

SEQ ID NO: 471448 - DNA, 19 bp, Mus musculus
  siRNA target sequence for Pabpc2 (NM_011033.1,1042-1060).
cattaacctttatgtgaaa

SEQ ID NO: 471449 - DNA, 19 bp, Mus musculus
  siRNA target sequence for Pabpc2 (NM_011033.1,1126-1144).
cagtacaaaggttatgaca

SEQ ID NO: 471450 - DNA, 19 bp, Mus musculus
  siRNA target sequence for Pabpc2 (NM_011033.1,1147-1165).
gggtggtcgcagtaaagga

SEQ ID NO: 471451 - DNA, 19 bp, Mus musculus
  siRNA target sequence for Pabpc2 (NM_011033.1,1149-1167).
gtggtcgcagtaaaggatt

SEQ ID NO: 471452 - DNA, 19 bp, Mus musculus
  siRNA target sequence for Pabpc2 (NM_011033.1,1158-1176).
gtaaaggattcggttttgt

SEQ ID NO: 471453 - DNA, 19 bp, Mus musculus
  siRNA target sequence for Pabpc2 (NM_011033.1,1335-1353).
ctgggccgaaccctgttaa

SEQ ID NO: 471454 - DNA, 19 bp, Mus musculus
  siRNA target sequence for Pabpc2 (NM_011033.1,1423-1441).
ctgccctagccaaattgct

SEQ ID NO: 471455 - DNA, 19 bp, Mus musculus
  siRNA target sequence for Pabpc2 (NM_011033.1,1529-1547).
cctagatcgtcgttgacta

SEQ ID NO: 471456 - DNA, 19 bp, Mus musculus
  siRNA target sequence for Pabpc2 (NM_011033.1,1582-1600).
gacagcacatcgcattact

SEQ ID NO: 471457 - DNA, 19 bp, Mus musculus
  siRNA target sequence for Pabpc2 (NM_011033.1,1584-1602).
cagcacatcgcattactaa

SEQ ID NO: 471458 - DNA, 19 bp, Mus musculus
  siRNA target sequence for Pabpc2 (NM_011033.1,1586-1604).
gcacatcgcattactaaca

SEQ ID NO: 471459 - DNA, 19 bp, Mus musculus
  siRNA target sequence for Pabpc2 (NM_011033.1,1589-1607).
catcgcattactaacacat

SEQ ID NO: 471460 - DNA, 19 bp, Mus musculus
  siRNA target sequence for Pabpc2 (NM_011033.1,1671-1689).
cgattccacagtacaagta

SEQ ID NO: 471461 - DNA, 19 bp, Mus musculus
  siRNA target sequence for Pabpc2 (NM_011033.1,1672-1690).
gattccacagtacaagtat

SEQ ID NO: 471462 - DNA, 19 bp, Mus musculus
  siRNA target sequence for Pabpc2 (NM_011033.1,1777-1795).
gactgcttccatgttagta

SEQ ID NO: 471463 - DNA, 19 bp, Mus musculus
  siRNA target sequence for Pabpc2 (NM_011033.1,1912-1930).
ggaaccacttcgtatgctt

SEQ ID NO: 471464 - DNA, 19 bp, Mus musculus
  siRNA target sequence for Pabpc2 (NM_011033.1,1916-1934).
ccacttcgtatgcttgaat

SEQ ID NO: 471465 - DNA, 19 bp, Mus musculus
  siRNA target sequence for Syncrip (NM_019666.1,96-114).
gcttgatgctggtttacca

SEQ ID NO: 471466 - DNA, 19 bp, Mus musculus
  siRNA target sequence for Syncrip (NM_019666.1,155-173).
ggctagttgcacatagtga

SEQ ID NO: 471467 - DNA, 19 bp, Mus musculus
  siRNA target sequence for Syncrip (NM_019666.1,157-175).
ctagttgcacatagtgatt

SEQ ID NO: 471468 - DNA, 19 bp, Mus musculus
  siRNA target sequence for Syncrip (NM_019666.1,164-182).
cacatagtgatttagatga

SEQ ID NO: 471469 - DNA, 19 bp, Mus musculus
  siRNA target sequence for Syncrip (NM_019666.1,166-184).
catagtgatttagatgaaa

SEQ ID NO: 471470 - DNA, 19 bp, Mus musculus
  siRNA target sequence for Syncrip (NM_019666.1,185-203).
gagctatcgaagctttaaa

SEQ ID NO: 471471 - DNA, 19 bp, Mus musculus
  siRNA target sequence for Syncrip (NM_019666.1,188-206).
ctatcgaagctttaaaaga

SEQ ID NO: 471472 - DNA, 19 bp, Mus musculus
  siRNA target sequence for Syncrip (NM_019666.1,230-248).
cagtgcttcaacagtttaa

SEQ ID NO: 471473 - DNA, 19 bp, Mus musculus
  siRNA target sequence for Syncrip (NM_019666.1,254-272).
gtgatctctctcatgttca

SEQ ID NO: 471474 - DNA, 19 bp, Mus musculus
  siRNA target sequence for Syncrip (NM_019666.1,448-466).
cctccagattccgtttatt

SEQ ID NO: 471475 - DNA, 19 bp, Mus musculus
  siRNA target sequence for Syncrip (NM_019666.1,919-937).
gcaagacgtaggctaatga

SEQ ID NO: 471476 - DNA, 19 bp, Mus musculus
  siRNA target sequence for Syncrip (NM_019666.1,1108-1126).
gaacgagtaaagaagctaa

SEQ ID NO: 471477 - DNA, 19 bp, Mus musculus
  siRNA target sequence for Syncrip (NM_019666.1,1119-1137).
gaagctaaaagattatgct

SEQ ID NO: 471478 - DNA, 19 bp, Mus musculus
  siRNA target sequence for Syncrip (NM_019666.1,1275-1293).
gcaagcagcaaagaatcaa

SEQ ID NO: 471479 - DNA, 19 bp, Mus musculus
  siRNA target sequence for Syncrip (NM_019666.1,1287-1305).
gaatcaaatgtatgatgat

SEQ ID NO: 471480 - DNA, 19 bp, Mus musculus
  siRNA target sequence for Syncrip (NM_019666.1,1291-1309).
caaatgtatgatgattact

SEQ ID NO: 471481 - DNA, 19 bp, Mus musculus
  siRNA target sequence for Syncrip (NM_019666.1,1296-1314).
gtatgatgattactactat

SEQ ID NO: 471482 - DNA, 19 bp, Mus musculus
  siRNA target sequence for Syncrip (NM_019666.1,1364-1382).
gtagaggtggctatggata

SEQ ID NO: 471483 - DNA, 19 bp, Mus musculus
  siRNA target sequence for Syncrip (NM_019666.1,1404-1422).
cgaagattattatgattat

SEQ ID NO: 471484 - DNA, 19 bp, Mus musculus
  siRNA target sequence for Syncrip (NM_019666.1,1427-1445).
gttatgattaccataacta

SEQ ID NO: 471485 - DNA, 19 bp, Mus musculus
  siRNA target sequence for Syncrip (NM_019666.1,1451-1469).
gtggatatgaagatccata

SEQ ID NO: 471486 - DNA, 19 bp, Mus musculus
  siRNA target sequence for Syncrip (NM_019666.1,1459-1477).
gaagatccatactatggtt

SEQ ID NO: 471487 - DNA, 19 bp, Mus musculus
  siRNA target sequence for Syncrip (NM_019666.1,1797-1815).
ccaaggtggtgatcattct

SEQ ID NO: 471488 - DNA, 19 bp, Mus musculus
  siRNA target sequence for Syncrip (NM_019796.2,960-978).
gaggcttttgctttcttga

SEQ ID NO: 471489 - DNA, 19 bp, Mus musculus
  siRNA target sequence for Syncrip (NM_019796.2,964-982).
cttttgctttcttgaatat

SEQ ID NO: 471490 - DNA, 19 bp, Mus musculus
  siRNA target sequence for Syncrip (NM_019796.2,1770-1788).
ccggtcctgacctgttaca

SEQ ID NO: 471491 - DNA, 19 bp, Mus musculus
  siRNA target sequence for Syncrip (NM_019796.2,1771-1789).
cggtcctgacctgttacaa

SEQ ID NO: 471492 - DNA, 19 bp, Mus musculus
  siRNA target sequence for Dazl (NM_010021.2,242-260).
cagcactcagtcttcatca

SEQ ID NO: 471493 - DNA, 19 bp, Mus musculus
  siRNA target sequence for Dazl (NM_010021.2,302-320).
catgccaaacaccgttttt

SEQ ID NO: 471494 - DNA, 19 bp, Mus musculus
  siRNA target sequence for Dazl (NM_010021.2,314-332).
cgtttttgttggaggaatt

SEQ ID NO: 471495 - DNA, 19 bp, Mus musculus
  siRNA target sequence for Dazl (NM_010021.2,321-339).
gttggaggaattgatgtta

SEQ ID NO: 471496 - DNA, 19 bp, Mus musculus
  siRNA target sequence for Dazl (NM_010021.2,325-343).
gaggaattgatgttaggat

SEQ ID NO: 471497 - DNA, 19 bp, Mus musculus
  siRNA target sequence for Dazl (NM_010021.2,352-370).
ccgaaatcaggagtttctt

SEQ ID NO: 471498 - DNA, 19 bp, Mus musculus
  siRNA target sequence for Dazl (NM_010021.2,353-371).
cgaaatcaggagtttcttt

SEQ ID NO: 471499 - DNA, 19 bp, Mus musculus
  siRNA target sequence for Dazl (NM_010021.2,373-391).
ccagatatggctcagtaaa

SEQ ID NO: 471500 - DNA, 19 bp, Mus musculus
  siRNA target sequence for Dazl (NM_010021.2,434-452).
ctatggatttgtctcattt

SEQ ID NO: 471501 - DNA, 19 bp, Mus musculus
  siRNA target sequence for Dazl (NM_010021.2,468-486).
gtgcagaagatagtagaat

SEQ ID NO: 471502 - DNA, 19 bp, Mus musculus
  siRNA target sequence for Dazl (NM_010021.2,470-488).
gcagaagatagtagaatca

SEQ ID NO: 471503 - DNA, 19 bp, Mus musculus
  siRNA target sequence for Dazl (NM_010021.2,476-494).
gatagtagaatcacagata

SEQ ID NO: 471504 - DNA, 19 bp, Mus musculus
  siRNA target sequence for Dazl (NM_010021.2,480-498).
gtagaatcacagataaatt

SEQ ID NO: 471505 - DNA, 19 bp, Mus musculus
  siRNA target sequence for Dazl (NM_010021.2,625-643).
gtccaaatgctgagactta

SEQ ID NO: 471506 - DNA, 19 bp, Mus musculus
  siRNA target sequence for Dazl (NM_010021.2,650-668).
gcctccaaccatgatgaat

SEQ ID NO: 471507 - DNA, 19 bp, Mus musculus
  siRNA target sequence for Dazl (NM_010021.2,654-672).
ccaaccatgatgaatccta

SEQ ID NO: 471508 - DNA, 19 bp, Mus musculus
  siRNA target sequence for Dazl (NM_010021.2,665-683).
gaatcctatcactcagtat

SEQ ID NO: 471509 - DNA, 19 bp, Mus musculus
  siRNA target sequence for Dazl (NM_010021.2,670-688).
ctatcactcagtatgttca

SEQ ID NO: 471510 - DNA, 19 bp, Mus musculus
  siRNA target sequence for Dazl (NM_010021.2,738-756).
cagctgcctgtttataact

SEQ ID NO: 471511 - DNA, 19 bp, Mus musculus
  siRNA target sequence for Dazl (NM_010021.2,786-804).
gagcagaggagttatgtta

SEQ ID NO: 471512 - DNA, 19 bp, Mus musculus
  siRNA target sequence for Dazl (NM_010021.2,801-819).
gttatacctccggcttata

SEQ ID NO: 471513 - DNA, 19 bp, Mus musculus
  siRNA target sequence for Dazl (NM_010021.2,810-828).
ccggcttatacaactgtta

SEQ ID NO: 471514 - DNA, 19 bp, Mus musculus
  siRNA target sequence for Dazl (NM_010021.2,811-829).
cggcttatacaactgttaa

SEQ ID NO: 471515 - DNA, 19 bp, Mus musculus
  siRNA target sequence for Dazl (NM_010021.2,830-848).
ctaccactgcagtgaagtt

SEQ ID NO: 471516 - DNA, 19 bp, Mus musculus
  siRNA target sequence for Dazl (NM_010021.2,929-947).
gtctgtggaccgaagcata

SEQ ID NO: 471517 - DNA, 19 bp, Mus musculus
  siRNA target sequence for Dazl (NM_010021.2,933-951).
gtggaccgaagcatacaga

SEQ ID NO: 471518 - DNA, 19 bp, Mus musculus
  siRNA target sequence for Dazl (NM_010021.2,987-1005).
ctgagaaactctcttgtta

SEQ ID NO: 471519 - DNA, 19 bp, Mus musculus
  siRNA target sequence for Dazl (NM_010021.2,1019-1037).
cttcaaggataaaagagta

SEQ ID NO: 471520 - DNA, 19 bp, Mus musculus
  siRNA target sequence for Dazl (NM_010021.2,1051-1069).
gaagtcgggcagtgcttaa

SEQ ID NO: 471521 - DNA, 19 bp, Mus musculus
  siRNA target sequence for Dazl (NM_010021.2,1057-1075).
gggcagtgcttaaatctga

SEQ ID NO: 471522 - DNA, 19 bp, Mus musculus
  siRNA target sequence for Dazl (NM_010021.2,1058-1076).
ggcagtgcttaaatctgat

SEQ ID NO: 471523 - DNA, 19 bp, Mus musculus
  siRNA target sequence for Aco1 (NM_007386.1,123-141).
ccaggaaagaggttcttca

SEQ ID NO: 471524 - DNA, 19 bp, Mus musculus
  siRNA target sequence for Aco1 (NM_007386.1,131-149).
gaggttcttcaacttgaat

SEQ ID NO: 471525 - DNA, 19 bp, Mus musculus
  siRNA target sequence for Aco1 (NM_007386.1,166-184).
gatacggacgcttaccatt

SEQ ID NO: 471526 - DNA, 19 bp, Mus musculus
  siRNA target sequence for Aco1 (NM_007386.1,170-188).
cggacgcttaccattttct

SEQ ID NO: 471527 - DNA, 19 bp, Mus musculus
  siRNA target sequence for Aco1 (NM_007386.1,171-189).
ggacgcttaccattttcta

SEQ ID NO: 471528 - DNA, 19 bp, Mus musculus
  siRNA target sequence for Aco1 (NM_007386.1,172-190).
gacgcttaccattttctat

SEQ ID NO: 471529 - DNA, 19 bp, Mus musculus
  siRNA target sequence for Aco1 (NM_007386.1,174-192).
cgcttaccattttctatca

SEQ ID NO: 471530 - DNA, 19 bp, Mus musculus
  siRNA target sequence for Aco1 (NM_007386.1,176-194).
cttaccattttctatcaga

SEQ ID NO: 471531 - DNA, 19 bp, Mus musculus
  siRNA target sequence for Aco1 (NM_007386.1,255-273).
gagaatatcctgaattgga

SEQ ID NO: 471532 - DNA, 19 bp, Mus musculus
  siRNA target sequence for Aco1 (NM_007386.1,271-289).
ggaatgtcatgcaacataa

SEQ ID NO: 471533 - DNA, 19 bp, Mus musculus
  siRNA target sequence for Aco1 (NM_007386.1,399-417).
gggaatccggagaaaatta

SEQ ID NO: 471534 - DNA, 19 bp, Mus musculus
  siRNA target sequence for Aco1 (NM_007386.1,400-418).
ggaatccggagaaaattaa

SEQ ID NO: 471535 - DNA, 19 bp, Mus musculus
  siRNA target sequence for Aco1 (NM_007386.1,431-449).
cgctgaccttgtaattgat

SEQ ID NO: 471536 - DNA, 19 bp, Mus musculus
  siRNA target sequence for Aco1 (NM_007386.1,433-451).
ctgaccttgtaattgatca

SEQ ID NO: 471537 - DNA, 19 bp, Mus musculus
  siRNA target sequence for Aco1 (NM_007386.1,450-468).
cattccatccaggttgatt

SEQ ID NO: 471538 - DNA, 19 bp, Mus musculus
  siRNA target sequence for Aco1 (NM_007386.1,454-472).
ccatccaggttgatttcaa

SEQ ID NO: 471539 - DNA, 19 bp, Mus musculus
  siRNA target sequence for Aco1 (NM_007386.1,475-493).
gaagggcagacagtttaca

SEQ ID NO: 471540 - DNA, 19 bp, Mus musculus
  siRNA target sequence for Aco1 (NM_007386.1,485-503).
cagtttacagaagaatcaa

SEQ ID NO: 471541 - DNA, 19 bp, Mus musculus
  siRNA target sequence for Aco1 (NM_007386.1,528-546).
gaacgatttgaatttctaa

SEQ ID NO: 471542 - DNA, 19 bp, Mus musculus
  siRNA target sequence for Aco1 (NM_007386.1,631-649).
caagagtagtgtttgatca

SEQ ID NO: 471543 - DNA, 19 bp, Mus musculus
  siRNA target sequence for Aco1 (NM_007386.1,674-692).
cctcgtgggcacagattca

SEQ ID NO: 471544 - DNA, 19 bp, Mus musculus
  siRNA target sequence for Aco1 (NM_007386.1,691-709).
cacacacgaccatgattga

SEQ ID NO: 471545 - DNA, 19 bp, Mus musculus
  siRNA target sequence for Aco1 (NM_007386.1,849-867).
gacatcgtgctcaccatta

SEQ ID NO: 471546 - DNA, 19 bp, Mus musculus
  siRNA target sequence for Aco1 (NM_007386.1,887-905).
gggagttgtgggcaaattt

SEQ ID NO: 471547 - DNA, 19 bp, Mus musculus
  siRNA target sequence for Aco1 (NM_007386.1,889-907).
gagttgtgggcaaatttgt

SEQ ID NO: 471548 - DNA, 19 bp, Mus musculus
  siRNA target sequence for Aco1 (NM_007386.1,952-970).
gagctacgattgccaatat

SEQ ID NO: 471549 - DNA, 19 bp, Mus musculus
  siRNA target sequence for Aco1 (NM_007386.1,954-972).
gctacgattgccaatatgt

SEQ ID NO: 471550 - DNA, 19 bp, Mus musculus
  siRNA target sequence for Aco1 (NM_007386.1,997-1015).
ccttcttcccggttgatga

SEQ ID NO: 471551 - DNA, 19 bp, Mus musculus
  siRNA target sequence for Aco1 (NM_007386.1,998-1016).
cttcttcccggttgatgaa

SEQ ID NO: 471552 - DNA, 19 bp, Mus musculus
  siRNA target sequence for Aco1 (NM_007386.1,1001-1019).
cttcccggttgatgaagtt

SEQ ID NO: 471553 - DNA, 19 bp, Mus musculus
  siRNA target sequence for Aco1 (NM_007386.1,1006-1024).
cggttgatgaagttagcat

SEQ ID NO: 471554 - DNA, 19 bp, Mus musculus
  siRNA target sequence for Aco1 (NM_007386.1,1141-1159).
ctcaggttgtggagttaga

SEQ ID NO: 471555 - DNA, 19 bp, Mus musculus
  siRNA target sequence for Aco1 (NM_007386.1,1149-1167).
gtggagttagatctgaaaa

SEQ ID NO: 471556 - DNA, 19 bp, Mus musculus
  siRNA target sequence for Aco1 (NM_007386.1,1154-1172).
gttagatctgaaaacagtt

SEQ ID NO: 471557 - DNA, 19 bp, Mus musculus
  siRNA target sequence for Aco1 (NM_007386.1,1181-1199).
ctgcagtggacccaaaaga

SEQ ID NO: 471558 - DNA, 19 bp, Mus musculus
  siRNA target sequence for Aco1 (NM_007386.1,1214-1232).
cgcggtgtctgagatgaaa

SEQ ID NO: 471559 - DNA, 19 bp, Mus musculus
  siRNA target sequence for Aco1 (NM_007386.1,1215-1233).
gcggtgtctgagatgaaaa

SEQ ID NO: 471560 - DNA, 19 bp, Mus musculus
  siRNA target sequence for Aco1 (NM_007386.1,1288-1306).
ctccagaccgtcacaatga

SEQ ID NO: 471561 - DNA, 19 bp, Mus musculus
  siRNA target sequence for Aco1 (NM_007386.1,1308-1326).
cgcaagacgttcctctata

SEQ ID NO: 471562 - DNA, 19 bp, Mus musculus
  siRNA target sequence for Aco1 (NM_007386.1,1310-1328).
caagacgttcctctatagt

SEQ ID NO: 471563 - DNA, 19 bp, Mus musculus
  siRNA target sequence for Aco1 (NM_007386.1,1316-1334).
gttcctctatagtaacagt

SEQ ID NO: 471564 - DNA, 19 bp, Mus musculus
  siRNA target sequence for Aco1 (NM_007386.1,1397-1415).
caatccatccgtgatgtta

SEQ ID NO: 471565 - DNA, 19 bp, Mus musculus
  siRNA target sequence for Aco1 (NM_007386.1,1412-1430).
gttaggagcaggattgtta

SEQ ID NO: 471566 - DNA, 19 bp, Mus musculus
  siRNA target sequence for Aco1 (NM_007386.1,1416-1434).
ggagcaggattgttagcaa

SEQ ID NO: 471567 - DNA, 19 bp, Mus musculus
  siRNA target sequence for Aco1 (NM_007386.1,1417-1435).
gagcaggattgttagcaaa

SEQ ID NO: 471568 - DNA, 19 bp, Mus musculus
  siRNA target sequence for Aco1 (NM_007386.1,1459-1477).
gtgtgaagccttacatcaa

SEQ ID NO: 471569 - DNA, 19 bp, Mus musculus
  siRNA target sequence for Aco1 (NM_007386.1,1461-1479).
gtgaagccttacatcaaaa

SEQ ID NO: 471570 - DNA, 19 bp, Mus musculus
  siRNA target sequence for Aco1 (NM_007386.1,1547-1565).
gtcccagttagggtttgat

SEQ ID NO: 471571 - DNA, 19 bp, Mus musculus
  siRNA target sequence for Aco1 (NM_007386.1,1668-1686).
ctgtctgggaataggaatt

SEQ ID NO: 471572 - DNA, 19 bp, Mus musculus
  siRNA target sequence for Aco1 (NM_007386.1,1709-1727).
cacacgagccaactactta

SEQ ID NO: 471573 - DNA, 19 bp, Mus musculus
  siRNA target sequence for Aco1 (NM_007386.1,1736-1754).
ccctctggtaatagcatat

SEQ ID NO: 471574 - DNA, 19 bp, Mus musculus
  siRNA target sequence for Aco1 (NM_007386.1,1764-1782).
ggcaccgtcaggattgact

SEQ ID NO: 471575 - DNA, 19 bp, Mus musculus
  siRNA target sequence for Aco1 (NM_007386.1,1765-1783).
gcaccgtcaggattgactt

SEQ ID NO: 471576 - DNA, 19 bp, Mus musculus
  siRNA target sequence for Aco1 (NM_007386.1,1774-1792).
ggattgacttcgagaaaga

SEQ ID NO: 471577 - DNA, 19 bp, Mus musculus
  siRNA target sequence for Aco1 (NM_007386.1,1843-1861).
ggcccacgcgagatgagat

SEQ ID NO: 471578 - DNA, 19 bp, Mus musculus
  siRNA target sequence for Aco1 (NM_007386.1,1904-1922).
ggaggtctatcagaaaata

SEQ ID NO: 471579 - DNA, 19 bp, Mus musculus
  siRNA target sequence for Aco1 (NM_007386.1,1977-1995).
gcgtggaatcccaaatcta

SEQ ID NO: 471580 - DNA, 19 bp, Mus musculus
  siRNA target sequence for Aco1 (NM_007386.1,1981-1999).
ggaatcccaaatctactta

SEQ ID NO: 471581 - DNA, 19 bp, Mus musculus
  siRNA target sequence for Aco1 (NM_007386.1,2011-2029).
caccattctttgaaagctt

SEQ ID NO: 471582 - DNA, 19 bp, Mus musculus
  siRNA target sequence for Aco1 (NM_007386.1,2068-2086).
cctatgtgctactgaattt

SEQ ID NO: 471583 - DNA, 19 bp, Mus musculus
  siRNA target sequence for Aco1 (NM_007386.1,2095-2113).
cagtaacaacggaccatat

SEQ ID NO: 471584 - DNA, 19 bp, Mus musculus
  siRNA target sequence for Aco1 (NM_007386.1,2097-2115).
gtaacaacggaccatatct

SEQ ID NO: 471585 - DNA, 19 bp, Mus musculus
  siRNA target sequence for Aco1 (NM_007386.1,2124-2142).
ggcaatattgcaagaaaca

SEQ ID NO: 471586 - DNA, 19 bp, Mus musculus
  siRNA target sequence for Aco1 (NM_007386.1,2145-2163).
cctgcggctcgctacttga

SEQ ID NO: 471587 - DNA, 19 bp, Mus musculus
  siRNA target sequence for Aco1 (NM_007386.1,2237-2255).
ggggacatttgccaacatt

SEQ ID NO: 471588 - DNA, 19 bp, Mus musculus
  siRNA target sequence for Aco1 (NM_007386.1,2359-2377).
ctggacttcccctgattgt

SEQ ID NO: 471589 - DNA, 19 bp, Mus musculus
  siRNA target sequence for Aco1 (NM_007386.1,2509-2527).
gggtgatcccccttgagta

SEQ ID NO: 471590 - DNA, 19 bp, Mus musculus
  siRNA target sequence for Aco1 (NM_007386.1,2510-2528).
ggtgatcccccttgagtat

SEQ ID NO: 471591 - DNA, 19 bp, Mus musculus
  siRNA target sequence for Aco1 (NM_007386.1,2565-2583).
ggtcgggaaagatacacta

SEQ ID NO: 471592 - DNA, 19 bp, Mus musculus
  siRNA target sequence for Aco1 (NM_007386.1,2566-2584).
gtcgggaaagatacactat

SEQ ID NO: 471593 - DNA, 19 bp, Mus musculus
  siRNA target sequence for Aco1 (NM_007386.1,2611-2629).
gcatgacggtgcagatcaa

SEQ ID NO: 471594 - DNA, 19 bp, Mus musculus
  siRNA target sequence for 4921511I16Rik (NM_172407.1,206-224).
ggcgagacggacaaacact

SEQ ID NO: 471595 - DNA, 19 bp, Mus musculus
  siRNA target sequence for 4921511I16Rik (NM_172407.1,351-369).
cctgggcgaaccatgtctt

SEQ ID NO: 471596 - DNA, 19 bp, Mus musculus
  siRNA target sequence for 4921511I16Rik (NM_172407.1,376-394).
gtgccggtaccctcaaaaa

SEQ ID NO: 471597 - DNA, 19 bp, Mus musculus
  siRNA target sequence for 4921511I16Rik (NM_172407.1,378-396).
gccggtaccctcaaaaagt

SEQ ID NO: 471598 - DNA, 19 bp, Mus musculus
  siRNA target sequence for 4921511I16Rik (NM_172407.1,379-397).
ccggtaccctcaaaaagtt

SEQ ID NO: 471599 - DNA, 19 bp, Mus musculus
  siRNA target sequence for 4921511I16Rik (NM_172407.1,380-398).
cggtaccctcaaaaagtta

SEQ ID NO: 471600 - DNA, 19 bp, Mus musculus
  siRNA target sequence for 4921511I16Rik (NM_172407.1,395-413).
gttatggataaaattctta

SEQ ID NO: 471601 - DNA, 19 bp, Mus musculus
  siRNA target sequence for 4921511I16Rik (NM_172407.1,539-557).
cgagccgtagaaggaaaaa

SEQ ID NO: 471602 - DNA, 19 bp, Mus musculus
  siRNA target sequence for 4921511I16Rik (NM_172407.1,540-558).
gagccgtagaaggaaaaaa

SEQ ID NO: 471603 - DNA, 19 bp, Mus musculus
  siRNA target sequence for 4921511I16Rik (NM_172407.1,712-730).
ggatagcgccacaagtgaa

SEQ ID NO: 471604 - DNA, 19 bp, Mus musculus
  siRNA target sequence for 4921511I16Rik (NM_172407.1,827-845).
ggttcagcgtcatttgttt

SEQ ID NO: 471605 - DNA, 19 bp, Mus musculus
  siRNA target sequence for 4921511I16Rik (NM_172407.1,905-923).
cagagtgggtcacctaaaa

SEQ ID NO: 471606 - DNA, 19 bp, Mus musculus
  siRNA target sequence for 4921511I16Rik (NM_172407.1,997-1015).
ctctggaagtgcagaagta

SEQ ID NO: 471607 - DNA, 19 bp, Mus musculus
  siRNA target sequence for 4921511I16Rik (NM_172407.1,1013-1031).
gtagagttgccattactgt

SEQ ID NO: 471608 - DNA, 19 bp, Mus musculus
  siRNA target sequence for 4921511I16Rik (NM_172407.1,1028-1046).
ctgtcttgtaagtctagtt

SEQ ID NO: 471609 - DNA, 19 bp, Mus musculus
  siRNA target sequence for 4921511I16Rik (NM_172407.1,1030-1048).
gtcttgtaagtctagttca

SEQ ID NO: 471610 - DNA, 19 bp, Mus musculus
  siRNA target sequence for 4921511I16Rik (NM_172407.1,1055-1073).
gcttccagtgggttaacat

SEQ ID NO: 471611 - DNA, 19 bp, Mus musculus
  siRNA target sequence for 4921511I16Rik (NM_172407.1,1064-1082).
gggttaacatctaaatcta

SEQ ID NO: 471612 - DNA, 19 bp, Mus musculus
  siRNA target sequence for 4921511I16Rik (NM_172407.1,1066-1084).
gttaacatctaaatctagt

SEQ ID NO: 471613 - DNA, 19 bp, Mus musculus
  siRNA target sequence for 4921511I16Rik (NM_172407.1,1128-1146).
cgtcaggcagctctttact

SEQ ID NO: 471614 - DNA, 19 bp, Mus musculus
  siRNA target sequence for 4921511I16Rik (NM_172407.1,1129-1147).
gtcaggcagctctttacta

SEQ ID NO: 471615 - DNA, 19 bp, Mus musculus
  siRNA target sequence for 4921511I16Rik (NM_172407.1,1178-1196).
ctgctgacatccaaaagca

SEQ ID NO: 471616 - DNA, 19 bp, Mus musculus
  siRNA target sequence for 4921511I16Rik (NM_172407.1,1349-1367).
gcttgtcggaagttaacca

SEQ ID NO: 471617 - DNA, 19 bp, Mus musculus
  siRNA target sequence for 4921511I16Rik (NM_172407.1,1360-1378).
gttaaccaatgaagacata

SEQ ID NO: 471618 - DNA, 19 bp, Mus musculus
  siRNA target sequence for 4921511I16Rik (NM_172407.1,1414-1432).
gacggtggcgtggaagtta

SEQ ID NO: 471619 - DNA, 19 bp, Mus musculus
  siRNA target sequence for 4921511I16Rik (NM_172407.1,1417-1435).
ggtggcgtggaagttagta

SEQ ID NO: 471620 - DNA, 19 bp, Mus musculus
  siRNA target sequence for 4921511I16Rik (NM_172407.1,1505-1523).
gcaacactggatgtgtttt

SEQ ID NO: 471621 - DNA, 19 bp, Mus musculus
  siRNA target sequence for 4921511I16Rik (NM_172407.1,1519-1537).
gttttttgtcccactgaaa

SEQ ID NO: 471622 - DNA, 19 bp, Mus musculus
  siRNA target sequence for 4921511I16Rik (NM_172407.1,1543-1561).
ggcagatctgcctcaaaat

SEQ ID NO: 471623 - DNA, 19 bp, Mus musculus
  siRNA target sequence for 4921511I16Rik (NM_172407.1,1594-1612).
gaggtgtaagtcggtatat

SEQ ID NO: 471624 - DNA, 19 bp, Mus musculus
  siRNA target sequence for 4921511I16Rik (NM_172407.1,1663-1681).
gagagaagcactgaagtta

SEQ ID NO: 471625 - DNA, 19 bp, Mus musculus
  siRNA target sequence for 4921511I16Rik (NM_172407.1,1665-1683).
gagaagcactgaagttatt

SEQ ID NO: 471626 - DNA, 19 bp, Mus musculus
  siRNA target sequence for 4921511I16Rik (NM_172407.1,1734-1752).
gcgagatcgaggatctagt

SEQ ID NO: 471627 - DNA, 19 bp, Mus musculus
  siRNA target sequence for 4921511I16Rik (NM_172407.1,1735-1753).
cgagatcgaggatctagta

SEQ ID NO: 471628 - DNA, 19 bp, Mus musculus
  siRNA target sequence for 4921511I16Rik (NM_172407.1,1766-1784).
gaagcaagacccgtaaact

SEQ ID NO: 471629 - DNA, 19 bp, Mus musculus
  siRNA target sequence for 4921511I16Rik (NM_172407.1,1783-1801).
cttacctccagcactgaaa

SEQ ID NO: 471630 - DNA, 19 bp, Mus musculus
  siRNA target sequence for Adar (NM_019655.2,92-110).
ctagtcatgagcatagcaa

SEQ ID NO: 471631 - DNA, 19 bp, Mus musculus
  siRNA target sequence for Adar (NM_019655.2,205-223).
cccttgattggaatacaaa

SEQ ID NO: 471632 - DNA, 19 bp, Mus musculus
  siRNA target sequence for Adar (NM_019655.2,286-304).
gacaggcaactggaaatct

SEQ ID NO: 471633 - DNA, 19 bp, Mus musculus
  siRNA target sequence for Adar (NM_019655.2,448-466).
ccggagcagaaggttctaa

SEQ ID NO: 471634 - DNA, 19 bp, Mus musculus
  siRNA target sequence for Adar (NM_019655.2,449-467).
cggagcagaaggttctaaa

SEQ ID NO: 471635 - DNA, 19 bp, Mus musculus
  siRNA target sequence for Adar (NM_019655.2,542-560).
gggacatcaatcgtatttt

SEQ ID NO: 471636 - DNA, 19 bp, Mus musculus
  siRNA target sequence for Adar (NM_019655.2,651-669).
gccccctggagttgtgaat

SEQ ID NO: 471637 - DNA, 19 bp, Mus musculus
  siRNA target sequence for Adar (NM_019655.2,664-682).
gtgaatccagatagttgta

SEQ ID NO: 471638 - DNA, 19 bp, Mus musculus
  siRNA target sequence for Adar (NM_019655.2,797-815).
gtgactatctgttcaatgt

SEQ ID NO: 471639 - DNA, 19 bp, Mus musculus
  siRNA target sequence for Adar (NM_019655.2,805-823).
ctgttcaatgtgtcaaact

SEQ ID NO: 471640 - DNA, 19 bp, Mus musculus
  siRNA target sequence for Adar (NM_019655.2,934-952).
cctcccatctggtacttga

SEQ ID NO: 471641 - DNA, 19 bp, Mus musculus
  siRNA target sequence for Adar (NM_019655.2,944-962).
ggtacttgacggacaagaa

SEQ ID NO: 471642 - DNA, 19 bp, Mus musculus
  siRNA target sequence for Adar (NM_019655.2,1024-1042).
gtcccagaggccactagaa

SEQ ID NO: 471643 - DNA, 19 bp, Mus musculus
  siRNA target sequence for Adar (NM_019655.2,1121-1139).
ggcaggagcctgcgataaa

SEQ ID NO: 471644 - DNA, 19 bp, Mus musculus
  siRNA target sequence for Adar (NM_019655.2,1129-1147).
cctgcgataaagcatgaaa

SEQ ID NO: 471645 - DNA, 19 bp, Mus musculus
  siRNA target sequence for Adar (NM_019655.2,1132-1150).
gcgataaagcatgaaagta

SEQ ID NO: 471646 - DNA, 19 bp, Mus musculus
  siRNA target sequence for Adar (NM_019655.2,1183-1201).
cggcctcacgcttatcaca

SEQ ID NO: 471647 - DNA, 19 bp, Mus musculus
  siRNA target sequence for Adar (NM_019655.2,1184-1202).
ggcctcacgcttatcacaa

SEQ ID NO: 471648 - DNA, 19 bp, Mus musculus
  siRNA target sequence for Adar (NM_019655.2,1185-1203).
gcctcacgcttatcacaat

SEQ ID NO: 471649 - DNA, 19 bp, Mus musculus
  siRNA target sequence for Adar (NM_019655.2,1219-1237).
gggtatgtggcctctgaaa

SEQ ID NO: 471650 - DNA, 19 bp, Mus musculus
  siRNA target sequence for Adar (NM_019655.2,1220-1238).
ggtatgtggcctctgaaaa

SEQ ID NO: 471651 - DNA, 19 bp, Mus musculus
  siRNA target sequence for Adar (NM_019655.2,1221-1239).
gtatgtggcctctgaaaat

SEQ ID NO: 471652 - DNA, 19 bp, Mus musculus
  siRNA target sequence for Adar (NM_019655.2,1255-1273).
gatgacatcccagataact

SEQ ID NO: 471653 - DNA, 19 bp, Mus musculus
  siRNA target sequence for Adar (NM_019655.2,1263-1281).
cccagataacttgaatagt

SEQ ID NO: 471654 - DNA, 19 bp, Mus musculus
  siRNA target sequence for Adar (NM_019655.2,1287-1305).
cacagcaccaggtgagttt

SEQ ID NO: 471655 - DNA, 19 bp, Mus musculus
  siRNA target sequence for Adar (NM_019655.2,1352-1370).
ggtgttcaccctacaagaa

SEQ ID NO: 471656 - DNA, 19 bp, Mus musculus
  siRNA target sequence for Adar (NM_019655.2,1361-1379).
cctacaagaagctaactga

SEQ ID NO: 471657 - DNA, 19 bp, Mus musculus
  siRNA target sequence for Adar (NM_019655.2,1397-1415).
ctgtcagcgggttgttaga

SEQ ID NO: 471658 - DNA, 19 bp, Mus musculus
  siRNA target sequence for Adar (NM_019655.2,1399-1417).
gtcagcgggttgttagagt

SEQ ID NO: 471659 - DNA, 19 bp, Mus musculus
  siRNA target sequence for Adar (NM_019655.2,1401-1419).
cagcgggttgttagagtat

SEQ ID NO: 471660 - DNA, 19 bp, Mus musculus
  siRNA target sequence for Adar (NM_019655.2,1414-1432).
gagtatgctcagttcacta

SEQ ID NO: 471661 - DNA, 19 bp, Mus musculus
  siRNA target sequence for Adar (NM_019655.2,1433-1451).
gtcagacctgtgatttcaa

SEQ ID NO: 471662 - DNA, 19 bp, Mus musculus
  siRNA target sequence for Adar (NM_019655.2,1442-1460).
gtgatttcaacctgataga

SEQ ID NO: 471663 - DNA, 19 bp, Mus musculus
  siRNA target sequence for Adar (NM_019655.2,1473-1491).
gtcccatgaacctcgattt

SEQ ID NO: 471664 - DNA, 19 bp, Mus musculus
  siRNA target sequence for Adar (NM_019655.2,1619-1637).
gtggtcaaccagaagactt

SEQ ID NO: 471665 - DNA, 19 bp, Mus musculus
  siRNA target sequence for Adar (NM_019655.2,1720-1738).
gggaagagcccagttacta

SEQ ID NO: 471666 - DNA, 19 bp, Mus musculus
  siRNA target sequence for Adar (NM_019655.2,1762-1780).
ctagggaactcctgtgaat

SEQ ID NO: 471667 - DNA, 19 bp, Mus musculus
  siRNA target sequence for Adar (NM_019655.2,1782-1800).
ccgtctcctgtccaaagaa

SEQ ID NO: 471668 - DNA, 19 bp, Mus musculus
  siRNA target sequence for Adar (NM_019655.2,1971-1989).
gaacacagactcacttgat

SEQ ID NO: 471669 - DNA, 19 bp, Mus musculus
  siRNA target sequence for Adar (NM_019655.2,1994-2012).
ctatggctcccaacaagat

SEQ ID NO: 471670 - DNA, 19 bp, Mus musculus
  siRNA target sequence for Adar (NM_019655.2,2070-2088).
ggagtacgcccgatctcat

SEQ ID NO: 471671 - DNA, 19 bp, Mus musculus
  siRNA target sequence for Adar (NM_019655.2,2132-2150).
ctcacgaacccaagtttgt

SEQ ID NO: 471672 - DNA, 19 bp, Mus musculus
  siRNA target sequence for Adar (NM_019655.2,2403-2421).
ggctgccattattatgaaa

SEQ ID NO: 471673 - DNA, 19 bp, Mus musculus
  siRNA target sequence for Adar (NM_019655.2,2549-2567).
gcttcatcaggtttctcta

SEQ ID NO: 471674 - DNA, 19 bp, Mus musculus
  siRNA target sequence for Adar (NM_019655.2,2570-2588).
gtgaactgatgaagtacaa

SEQ ID NO: 471675 - DNA, 19 bp, Mus musculus
  siRNA target sequence for Adar (NM_019655.2,2754-2772).
ccgccattaccctgtcttt

SEQ ID NO: 471676 - DNA, 19 bp, Mus musculus
  siRNA target sequence for Adar (NM_019655.2,2756-2774).
gccattaccctgtctttga

SEQ ID NO: 471677 - DNA, 19 bp, Mus musculus
  siRNA target sequence for Adar (NM_019655.2,2757-2775).
ccattaccctgtctttgaa

SEQ ID NO: 471678 - DNA, 19 bp, Mus musculus
  siRNA target sequence for Adar (NM_019655.2,2835-2853).
ggagtccagtgatattgta

SEQ ID NO: 471679 - DNA, 19 bp, Mus musculus
  siRNA target sequence for Adar (NM_019655.2,2900-2918).
cctgtagtgacaaaatcct

SEQ ID NO: 471680 - DNA, 19 bp, Mus musculus
  siRNA target sequence for Adar (NM_019655.2,2938-2956).
ctgcaaggggcgttgttga

SEQ ID NO: 471681 - DNA, 19 bp, Mus musculus
  siRNA target sequence for Adar (NM_019655.2,2974-2992).
gtgtacctgaaatctgtaa

SEQ ID NO: 471682 - DNA, 19 bp, Mus musculus
  siRNA target sequence for Adar (NM_019655.2,2989-3007).
gtaaccttaggttaccttt

SEQ ID NO: 471683 - DNA, 19 bp, Mus musculus
  siRNA target sequence for Adar (NM_019655.2,3018-3036).
gcatctgacccgtgctatt

SEQ ID NO: 471684 - DNA, 19 bp, Mus musculus
  siRNA target sequence for Adar (NM_019655.2,3019-3037).
catctgacccgtgctattt

SEQ ID NO: 471685 - DNA, 19 bp, Mus musculus
  siRNA target sequence for Adar (NM_019655.2,3022-3040).
ctgacccgtgctatttgct

SEQ ID NO: 471686 - DNA, 19 bp, Mus musculus
  siRNA target sequence for Adar (NM_019655.2,3050-3068).
ccagagatgggaaagcatt

SEQ ID NO: 471687 - DNA, 19 bp, Mus musculus
  siRNA target sequence for Adar (NM_019655.2,3051-3069).
cagagatgggaaagcattt

SEQ ID NO: 471688 - DNA, 19 bp, Mus musculus
  siRNA target sequence for Adar (NM_019655.2,3082-3100).
cgctatccctttattgtca

SEQ ID NO: 471689 - DNA, 19 bp, Mus musculus
  siRNA target sequence for Adar (NM_019655.2,3083-3101).
gctatccctttattgtcaa

SEQ ID NO: 471690 - DNA, 19 bp, Mus musculus
  siRNA target sequence for Adar (NM_019655.2,3112-3130).
gtcggccgagtcagtgttt

SEQ ID NO: 471691 - DNA, 19 bp, Mus musculus
  siRNA target sequence for Adar (NM_019655.2,3114-3132).
cggccgagtcagtgtttat

SEQ ID NO: 471692 - DNA, 19 bp, Mus musculus
  siRNA target sequence for Adar (NM_019655.2,3117-3135).
ccgagtcagtgtttatgat

SEQ ID NO: 471693 - DNA, 19 bp, Mus musculus
  siRNA target sequence for Adar (NM_019655.2,3118-3136).
cgagtcagtgtttatgatt

SEQ ID NO: 471694 - DNA, 19 bp, Mus musculus
  siRNA target sequence for Adar (NM_019655.2,3257-3275).
ctcgggtgtccaagaagaa

SEQ ID NO: 471695 - DNA, 19 bp, Mus musculus
  siRNA target sequence for Adar (NM_019655.2,3309-3327).
ccgagcccgcagagattta

SEQ ID NO: 471696 - DNA, 19 bp, Mus musculus
  siRNA target sequence for Adar (NM_019655.2,3311-3329).
gagcccgcagagatttact

SEQ ID NO: 471697 - DNA, 19 bp, Mus musculus
  siRNA target sequence for Adar (NM_019655.2,3354-3372).
gaaagctgcccgtgactat

SEQ ID NO: 471698 - DNA, 19 bp, Mus musculus
  siRNA target sequence for Adarb1 (NM_130895.1,265-283).
gcagcactgatattaaaga

SEQ ID NO: 471699 - DNA, 19 bp, Mus musculus
  siRNA target sequence for Adarb1 (NM_130895.1,539-557).
cgtgcatgcacctctgttt

SEQ ID NO: 471700 - DNA, 19 bp, Mus musculus
  siRNA target sequence for Adarb1 (NM_130895.1,572-590).
ggtaaacgggcaggttttt

SEQ ID NO: 471701 - DNA, 19 bp, Mus musculus
  siRNA target sequence for Adarb1 (NM_130895.1,928-946).
ggaagaatcccgtgatgat

SEQ ID NO: 471702 - DNA, 19 bp, Mus musculus
  siRNA target sequence for Adarb1 (NM_130895.1,937-955).
ccgtgatgatcttgaatga

SEQ ID NO: 471703 - DNA, 19 bp, Mus musculus
  siRNA target sequence for Adarb1 (NM_130895.1,964-982).
cagggctgaagtatgactt

SEQ ID NO: 471704 - DNA, 19 bp, Mus musculus
  siRNA target sequence for Adarb1 (NM_130895.1,1034-1052).
ggtagatggccagttcttt

SEQ ID NO: 471705 - DNA, 19 bp, Mus musculus
  siRNA target sequence for Adarb1 (NM_130895.1,1106-1124).
cttggctactgtcttcaat

SEQ ID NO: 471706 - DNA, 19 bp, Mus musculus
  siRNA target sequence for Adarb1 (NM_130895.1,1167-1185).
gagggtcttcagttgcatt

SEQ ID NO: 471707 - DNA, 19 bp, Mus musculus
  siRNA target sequence for Adarb1 (NM_130895.1,1237-1255).
gtgacctgacagacaactt

SEQ ID NO: 471708 - DNA, 19 bp, Mus musculus
  siRNA target sequence for Adarb1 (NM_130895.1,1303-1321).
ccacaggtacagatgtcaa

SEQ ID NO: 471709 - DNA, 19 bp, Mus musculus
  siRNA target sequence for Adarb1 (NM_130895.1,1304-1322).
cacaggtacagatgtcaaa

SEQ ID NO: 471710 - DNA, 19 bp, Mus musculus
  siRNA target sequence for Adarb1 (NM_130895.1,1306-1324).
caggtacagatgtcaaaga

SEQ ID NO: 471711 - DNA, 19 bp, Mus musculus
  siRNA target sequence for Adarb1 (NM_130895.1,1326-1344).
gccaaggtgataagtgttt

SEQ ID NO: 471712 - DNA, 19 bp, Mus musculus
  siRNA target sequence for Adarb1 (NM_130895.1,1345-1363).
cgacagggacgaagtgtat

SEQ ID NO: 471713 - DNA, 19 bp, Mus musculus
  siRNA target sequence for Adarb1 (NM_130895.1,1348-1366).
cagggacgaagtgtatcaa

SEQ ID NO: 471714 - DNA, 19 bp, Mus musculus
  siRNA target sequence for Adarb1 (NM_130895.1,1385-1403).
ccgtggcctcgcactcaat

SEQ ID NO: 471715 - DNA, 19 bp, Mus musculus
  siRNA target sequence for Adarb1 (NM_130895.1,1387-1405).
gtggcctcgcactcaatga

SEQ ID NO: 471716 - DNA, 19 bp, Mus musculus
  siRNA target sequence for Adarb1 (NM_130895.1,1389-1407).
ggcctcgcactcaatgact

SEQ ID NO: 471717 - DNA, 19 bp, Mus musculus
  siRNA target sequence for Adarb1 (NM_130895.1,1404-1422).
gactgccacgcagagataa

SEQ ID NO: 471718 - DNA, 19 bp, Mus musculus
  siRNA target sequence for Adarb1 (NM_130895.1,1435-1453).
ccctgctcaggtttcttta

SEQ ID NO: 471719 - DNA, 19 bp, Mus musculus
  siRNA target sequence for Adarb1 (NM_130895.1,1439-1457).
gctcaggtttctttatgca

SEQ ID NO: 471720 - DNA, 19 bp, Mus musculus
  siRNA target sequence for Adarb1 (NM_130895.1,1455-1473).
gcacagctcgagctttatt

SEQ ID NO: 471721 - DNA, 19 bp, Mus musculus
  siRNA target sequence for Adarb1 (NM_130895.1,1456-1474).
cacagctcgagctttattt

SEQ ID NO: 471722 - DNA, 19 bp, Mus musculus
  siRNA target sequence for Adarb1 (NM_130895.1,1488-1506).
gaccagaaaaagtccatat

SEQ ID NO: 471723 - DNA, 19 bp, Mus musculus
  siRNA target sequence for Adarb1 (NM_130895.1,1490-1508).
ccagaaaaagtccatattt

SEQ ID NO: 471724 - DNA, 19 bp, Mus musculus
  siRNA target sequence for Adarb1 (NM_130895.1,1527-1545).
gggttccggctgaaggata

SEQ ID NO: 471725 - DNA, 19 bp, Mus musculus
  siRNA target sequence for Adarb1 (NM_130895.1,1551-1569).
cagttccacctgtacatca

SEQ ID NO: 471726 - DNA, 19 bp, Mus musculus
  siRNA target sequence for Adarb1 (NM_130895.1,1580-1598).
ctgcggagacgccagaata

SEQ ID NO: 471727 - DNA, 19 bp, Mus musculus
  siRNA target sequence for Adarb1 (NM_130895.1,1582-1600).
gcggagacgccagaatatt

SEQ ID NO: 471728 - DNA, 19 bp, Mus musculus
  siRNA target sequence for Adarb1 (NM_130895.1,1584-1602).
ggagacgccagaatattct

SEQ ID NO: 471729 - DNA, 19 bp, Mus musculus
  siRNA target sequence for Adarb1 (NM_130895.1,1641-1659).
catccgaatcgcaaagcaa

SEQ ID NO: 471730 - DNA, 19 bp, Mus musculus
  siRNA target sequence for Adarb1 (NM_130895.1,1662-1680).
ggacagctacggacgaaaa

SEQ ID NO: 471731 - DNA, 19 bp, Mus musculus
  siRNA target sequence for Adarb1 (NM_130895.1,1663-1681).
gacagctacggacgaaaat

SEQ ID NO: 471732 - DNA, 19 bp, Mus musculus
  siRNA target sequence for Adarb1 (NM_130895.1,1668-1686).
ctacggacgaaaatagagt

SEQ ID NO: 471733 - DNA, 19 bp, Mus musculus
  siRNA target sequence for Adarb1 (NM_130895.1,2098-2116).
gcccatcccgcctgtgtaa

SEQ ID NO: 471734 - DNA, 19 bp, Mus musculus
  siRNA target sequence for Adarb1 (NM_130895.1,2172-2190).
ctgcgcaccaagatcacta

SEQ ID NO: 471735 - DNA, 19 bp, Mus musculus
  siRNA target sequence for Adarb2 (NM_052977.2,333-351).
gctaagcagtcaactcaaa

SEQ ID NO: 471736 - DNA, 19 bp, Mus musculus
  siRNA target sequence for Adarb2 (NM_052977.2,334-352).
ctaagcagtcaactcaaat

SEQ ID NO: 471737 - DNA, 19 bp, Mus musculus
  siRNA target sequence for Adarb2 (NM_052977.2,338-356).
gcagtcaactcaaatgcaa

SEQ ID NO: 471738 - DNA, 19 bp, Mus musculus
  siRNA target sequence for Adarb2 (NM_052977.2,394-412).
gacaaagtcagcatactgt

SEQ ID NO: 471739 - DNA, 19 bp, Mus musculus
  siRNA target sequence for Adarb2 (NM_052977.2,424-442).
gctcctttcaagtacctaa

SEQ ID NO: 471740 - DNA, 19 bp, Mus musculus
  siRNA target sequence for Adarb2 (NM_052977.2,594-612).
gccgctggaggaaggaaat

SEQ ID NO: 471741 - DNA, 19 bp, Mus musculus
  siRNA target sequence for Adarb2 (NM_052977.2,780-798).
gaacggcctcacatttgaa

SEQ ID NO: 471742 - DNA, 19 bp, Mus musculus
  siRNA target sequence for Adarb2 (NM_052977.2,959-977).
cgttgttcaaggagtttga

SEQ ID NO: 471743 - DNA, 19 bp, Mus musculus
  siRNA target sequence for Adarb2 (NM_052977.2,1006-1024).
ggctgtcatcccgttgata

SEQ ID NO: 471744 - DNA, 19 bp, Mus musculus
  siRNA target sequence for Adarb2 (NM_052977.2,1008-1026).
ctgtcatcccgttgatact

SEQ ID NO: 471745 - DNA, 19 bp, Mus musculus
  siRNA target sequence for Adarb2 (NM_052977.2,1049-1067).
ggcgaggacggctactcta

SEQ ID NO: 471746 - DNA, 19 bp, Mus musculus
  siRNA target sequence for Adarb2 (NM_052977.2,1143-1161).
ccctgtagtggtactgaat

SEQ ID NO: 471747 - DNA, 19 bp, Mus musculus
  siRNA target sequence for Adarb2 (NM_052977.2,1145-1163).
ctgtagtggtactgaatga

SEQ ID NO: 471748 - DNA, 19 bp, Mus musculus
  siRNA target sequence for Adarb2 (NM_052977.2,1147-1165).
gtagtggtactgaatgagt

SEQ ID NO: 471749 - DNA, 19 bp, Mus musculus
  siRNA target sequence for Adarb2 (NM_052977.2,1216-1234).
cgagtcaagagctttgtca

SEQ ID NO: 471750 - DNA, 19 bp, Mus musculus
  siRNA target sequence for Adarb2 (NM_052977.2,1684-1702).
gaggaccccgagagatcaa

SEQ ID NO: 471751 - DNA, 19 bp, Mus musculus
  siRNA target sequence for Adarb2 (NM_052977.2,1686-1704).
ggaccccgagagatcaata

SEQ ID NO: 471752 - DNA, 19 bp, Mus musculus
  siRNA target sequence for Adarb2 (NM_052977.2,1687-1705).
gaccccgagagatcaatat

SEQ ID NO: 471753 - DNA, 19 bp, Mus musculus
  siRNA target sequence for Adarb2 (NM_052977.2,1690-1708).
cccgagagatcaatattca

SEQ ID NO: 471754 - DNA, 19 bp, Mus musculus
  siRNA target sequence for Adarb2 (NM_052977.2,1697-1715).
gatcaatattcatacgttt

SEQ ID NO: 471755 - DNA, 19 bp, Mus musculus
  siRNA target sequence for Adarb2 (NM_052977.2,1700-1718).
caatattcatacgtttaaa

SEQ ID NO: 471756 - DNA, 19 bp, Mus musculus
  siRNA target sequence for Adarb2 (NM_052977.2,1727-1745).
gttacaggctgcgagaaaa

SEQ ID NO: 471757 - DNA, 19 bp, Mus musculus
  siRNA target sequence for Adarb2 (NM_052977.2,1791-1809).
cagagtcaactctccatat

SEQ ID NO: 471758 - DNA, 19 bp, Mus musculus
  siRNA target sequence for Adarb2 (NM_052977.2,1793-1811).
gagtcaactctccatatga

SEQ ID NO: 471759 - DNA, 19 bp, Mus musculus
  siRNA target sequence for Adarb2 (NM_052977.2,1795-1813).
gtcaactctccatatgaaa

SEQ ID NO: 471760 - DNA, 19 bp, Mus musculus
  siRNA target sequence for Adarb2 (NM_052977.2,1863-1881).
gcacctgcgcaccaagatt

SEQ ID NO: 471761 - DNA, 19 bp, Mus musculus
  siRNA target sequence for Adarb2 (NM_052977.2,1867-1885).
ctgcgcaccaagattgagt

SEQ ID NO: 471762 - DNA, 19 bp, Mus musculus
  siRNA target sequence for Adarb2 (NM_052977.2,1931-1949).
cgtgggatggcatcctatt

SEQ ID NO: 471763 - DNA, 19 bp, Mus musculus
  siRNA target sequence for Adarb2 (NM_052977.2,2049-2067).
gtacctccacagcatcatt

SEQ ID NO: 471764 - DNA, 19 bp, Mus musculus
  siRNA target sequence for Adarb2 (NM_052977.2,2143-2161).
gcctcataccgacaaaaca

SEQ ID NO: 471765 - DNA, 19 bp, Mus musculus
  siRNA target sequence for Adarb2 (NM_052977.2,2246-2264).
gcgccgacctggagatcat

SEQ ID NO: 471766 - DNA, 19 bp, Mus musculus
  siRNA target sequence for Adarb2 (NM_052977.2,2247-2265).
cgccgacctggagatcatt

SEQ ID NO: 471767 - DNA, 19 bp, Mus musculus
  siRNA target sequence for Adarb2 (NM_052977.2,2248-2266).
gccgacctggagatcatta

SEQ ID NO: 471768 - DNA, 19 bp, Mus musculus
  siRNA target sequence for Adarb2 (NM_052977.2,2310-2328).
ctgcaaacacgtgttttct

SEQ ID NO: 471769 - DNA, 19 bp, Mus musculus
  siRNA target sequence for Adarb2 (NM_052977.2,2422-2440).
cacacctaccagtctgtta

SEQ ID NO: 471770 - DNA, 19 bp, Mus musculus
  siRNA target sequence for Adarb2 (NM_052977.2,2424-2442).
cacctaccagtctgttaaa

SEQ ID NO: 471771 - DNA, 19 bp, Mus musculus
  siRNA target sequence for Adarb2 (NM_052977.2,2426-2444).
cctaccagtctgttaaaca

SEQ ID NO: 471772 - DNA, 19 bp, Mus musculus
  siRNA target sequence for Adarb2 (NM_052977.2,2501-2519).
cggagcaagatcagtttct

SEQ ID NO: 471773 - DNA, 19 bp, Mus musculus
  siRNA target sequence for Dhx30 (NM_133347.1,367-385).
gagcttctagggacctatt

SEQ ID NO: 471774 - DNA, 19 bp, Mus musculus
  siRNA target sequence for Dhx30 (NM_133347.1,369-387).
gcttctagggacctattaa

SEQ ID NO: 471775 - DNA, 19 bp, Mus musculus
  siRNA target sequence for Dhx30 (NM_133347.1,370-388).
cttctagggacctattaaa

SEQ ID NO: 471776 - DNA, 19 bp, Mus musculus
  siRNA target sequence for Dhx30 (NM_133347.1,454-472).
caaaagacaagttagtcta

SEQ ID NO: 471777 - DNA, 19 bp, Mus musculus
  siRNA target sequence for Dhx30 (NM_133347.1,479-497).
cacgaatggaccgaagaaa

SEQ ID NO: 471778 - DNA, 19 bp, Mus musculus
  siRNA target sequence for Dhx30 (NM_133347.1,664-682).
gagtgctagctgatcgttt

SEQ ID NO: 471779 - DNA, 19 bp, Mus musculus
  siRNA target sequence for Dhx30 (NM_133347.1,1100-1118).
ctgtcccatgacctttgtt

SEQ ID NO: 471780 - DNA, 19 bp, Mus musculus
  siRNA target sequence for Dhx30 (NM_133347.1,1218-1236).
cttacccatgccatgtaca

SEQ ID NO: 471781 - DNA, 19 bp, Mus musculus
  siRNA target sequence for Dhx30 (NM_133347.1,1301-1319).
gcccatccttcgcaagata

SEQ ID NO: 471782 - DNA, 19 bp, Mus musculus
  siRNA target sequence for Dhx30 (NM_133347.1,1320-1338).
gaggccttcctgagtcatt

SEQ ID NO: 471783 - DNA, 19 bp, Mus musculus
  siRNA target sequence for Dhx30 (NM_133347.1,2055-2073).
gggggctgccctgttatca

SEQ ID NO: 471784 - DNA, 19 bp, Mus musculus
  siRNA target sequence for Dhx30 (NM_133347.1,2126-2144).
ggccaagctgggtaaacat

SEQ ID NO: 471785 - DNA, 19 bp, Mus musculus
  siRNA target sequence for Dhx30 (NM_133347.1,2128-2146).
ccaagctgggtaaacatca

SEQ ID NO: 471786 - DNA, 19 bp, Mus musculus
  siRNA target sequence for Dhx30 (NM_133347.1,2169-2187).
catgagtcggaagatgaat

SEQ ID NO: 471787 - DNA, 19 bp, Mus musculus
  siRNA target sequence for Dhx30 (NM_133347.1,2181-2199).
gatgaatgtgcacttgatt

SEQ ID NO: 471788 - DNA, 19 bp, Mus musculus
  siRNA target sequence for Dhx30 (NM_133347.1,2216-2234).
cctggttctgcatatcgat

SEQ ID NO: 471789 - DNA, 19 bp, Mus musculus
  siRNA target sequence for Dhx30 (NM_133347.1,2412-2430).
ggggtacgcaagattgtat

SEQ ID NO: 471790 - DNA, 19 bp, Mus musculus
  siRNA target sequence for Dhx30 (NM_133347.1,2413-2431).
gggtacgcaagattgtatt

SEQ ID NO: 471791 - DNA, 19 bp, Mus musculus
  siRNA target sequence for Dhx30 (NM_133347.1,2452-2470).
cctccatcacagttaacga

SEQ ID NO: 471792 - DNA, 19 bp, Mus musculus
  siRNA target sequence for Dhx30 (NM_133347.1,2459-2477).
cacagttaacgacattgta

SEQ ID NO: 471793 - DNA, 19 bp, Mus musculus
  siRNA target sequence for Dhx30 (NM_133347.1,2552-2570).
gtgggtgtcgagagcaaat

SEQ ID NO: 471794 - DNA, 19 bp, Mus musculus
  siRNA target sequence for Dhx30 (NM_133347.1,2554-2572).
gggtgtcgagagcaaatgt

SEQ ID NO: 471795 - DNA, 19 bp, Mus musculus
  siRNA target sequence for Dhx30 (NM_133347.1,2556-2574).
gtgtcgagagcaaatgtca

SEQ ID NO: 471796 - DNA, 19 bp, Mus musculus
  siRNA target sequence for Dhx30 (NM_133347.1,2560-2578).
cgagagcaaatgtcattca

SEQ ID NO: 471797 - DNA, 19 bp, Mus musculus
  siRNA target sequence for Dhx30 (NM_133347.1,2597-2615).
ccgctgccagtcaggtttt

SEQ ID NO: 471798 - DNA, 19 bp, Mus musculus
  siRNA target sequence for Dhx30 (NM_133347.1,2638-2656).
gccggctggagaaaatggt

SEQ ID NO: 471799 - DNA, 19 bp, Mus musculus
  siRNA target sequence for Dhx30 (NM_133347.1,2706-2724).
ctgcaagccaaaatccata

SEQ ID NO: 471800 - DNA, 19 bp, Mus musculus
  siRNA target sequence for Dhx30 (NM_133347.1,2760-2778).
gctgtggacagtccaaata

SEQ ID NO: 471801 - DNA, 19 bp, Mus musculus
  siRNA target sequence for Dhx30 (NM_133347.1,2829-2847).
gaccagcgggagtatctga

SEQ ID NO: 471802 - DNA, 19 bp, Mus musculus
  siRNA target sequence for Dhx30 (NM_133347.1,3109-3127).
gtacctccagggaaaacta

SEQ ID NO: 471803 - DNA, 19 bp, Mus musculus
  siRNA target sequence for Dhx30 (NM_133347.1,3332-3350).
ggtgagacaaggtaaggtt

SEQ ID NO: 471804 - DNA, 19 bp, Mus musculus
  siRNA target sequence for Dhx30 (NM_133347.1,3333-3351).
gtgagacaaggtaaggtta

SEQ ID NO: 471805 - DNA, 19 bp, Mus musculus
  siRNA target sequence for Dhx30 (NM_133347.1,3352-3370).
ctcggcaaggcaagttcaa

SEQ ID NO: 471806 - DNA, 19 bp, Mus musculus
  siRNA target sequence for Dhx30 (NM_133347.1,3394-3412).
ccaaatctggcaacatctt

SEQ ID NO: 471807 - DNA, 19 bp, Mus musculus
  siRNA target sequence for Dhx30 (NM_133347.1,3413-3431).
gctgcataagtcaaccatt

SEQ ID NO: 471808 - DNA, 19 bp, Mus musculus
  siRNA target sequence for Dhx30 (NM_133347.1,3414-3432).
ctgcataagtcaaccatta

SEQ ID NO: 471809 - DNA, 19 bp, Mus musculus
  siRNA target sequence for Dhx30 (NM_133347.1,3417-3435).
cataagtcaaccattaaca

SEQ ID NO: 471810 - DNA, 19 bp, Mus musculus
  siRNA target sequence for Dhx30 (NM_133347.1,3454-3472).
ggagccgatggctgacata

SEQ ID NO: 471811 - DNA, 19 bp, Mus musculus
  siRNA target sequence for Dhx30 (NM_133347.1,3455-3473).
gagccgatggctgacatat

SEQ ID NO: 471812 - DNA, 19 bp, Mus musculus
  siRNA target sequence for Dhx30 (NM_133347.1,3457-3475).
gccgatggctgacatattt

SEQ ID NO: 471813 - DNA, 19 bp, Mus musculus
  siRNA target sequence for Dhx30 (NM_133347.1,3480-3498).
gccgtcaagtccaatggta

SEQ ID NO: 471814 - DNA, 19 bp, Mus musculus
  siRNA target sequence for Dhx30 (NM_133347.1,3563-3581).
cgtgcacatccgagatgat

SEQ ID NO: 471815 - DNA, 19 bp, Mus musculus
  siRNA target sequence for Dhx30 (NM_133347.1,3588-3606).
cgggccaccatctcattga

SEQ ID NO: 471816 - DNA, 19 bp, Mus musculus
  siRNA target sequence for Dhx30 (NM_133347.1,3590-3608).
ggccaccatctcattgagt

SEQ ID NO: 471817 - DNA, 19 bp, Mus musculus
  siRNA target sequence for Dhx30 (NM_133347.1,3642-3660).
cgaactgtgcggttgctaa

SEQ ID NO: 471818 - DNA, 19 bp, Mus musculus
  siRNA target sequence for Dhx30 (NM_133347.1,3718-3736).
ctgcacttcctcttagtgt

SEQ ID NO: 471819 - DNA, 19 bp, Mus musculus
  siRNA target sequence for Dhx30 (NM_133347.1,3789-3807).
ccttgtggcagctttgata

SEQ ID NO: 471820 - DNA, 19 bp, Mus musculus
  siRNA target sequence for Dicer1 (NM_148948.1,343-361).
gactgccatggcaacaaga

SEQ ID NO: 471821 - DNA, 19 bp, Mus musculus
  siRNA target sequence for Dicer1 (NM_148948.1,360-378).
gaagcaattcatgataaca

SEQ ID NO: 471822 - DNA, 19 bp, Mus musculus
  siRNA target sequence for Dicer1 (NM_148948.1,420-438).
gctctggaccataacacaa

SEQ ID NO: 471823 - DNA, 19 bp, Mus musculus
  siRNA target sequence for Dicer1 (NM_148948.1,421-439).
ctctggaccataacacaat

SEQ ID NO: 471824 - DNA, 19 bp, Mus musculus
  siRNA target sequence for Dicer1 (NM_148948.1,426-444).
gaccataacacaattgtgt

SEQ ID NO: 471825 - DNA, 19 bp, Mus musculus
  siRNA target sequence for Dicer1 (NM_148948.1,522-540).
ctcaacccgcatgcaaaaa

SEQ ID NO: 471826 - DNA, 19 bp, Mus musculus
  siRNA target sequence for Dicer1 (NM_148948.1,598-616).
gaactcactcggatctcaa

SEQ ID NO: 471827 - DNA, 19 bp, Mus musculus
  siRNA target sequence for Dicer1 (NM_148948.1,633-651).
gacctagaagtaaatgcat

SEQ ID NO: 471828 - DNA, 19 bp, Mus musculus
  siRNA target sequence for Dicer1 (NM_148948.1,648-666).
gcatcttggacaaaagaga

SEQ ID NO: 471829 - DNA, 19 bp, Mus musculus
  siRNA target sequence for Dicer1 (NM_148948.1,670-688).
ggagccaagagtttactaa

SEQ ID NO: 471830 - DNA, 19 bp, Mus musculus
  siRNA target sequence for Dicer1 (NM_148948.1,690-708).
caccaggttctcattatga

SEQ ID NO: 471831 - DNA, 19 bp, Mus musculus
  siRNA target sequence for Dicer1 (NM_148948.1,719-737).
cgccttgactgttttgaaa

SEQ ID NO: 471832 - DNA, 19 bp, Mus musculus
  siRNA target sequence for Dicer1 (NM_148948.1,721-739).
ccttgactgttttgaaaaa

SEQ ID NO: 471833 - DNA, 19 bp, Mus musculus
  siRNA target sequence for Dicer1 (NM_148948.1,734-752).
gaaaaatggttacttatca

SEQ ID NO: 471834 - DNA, 19 bp, Mus musculus
  siRNA target sequence for Dicer1 (NM_148948.1,746-764).
cttatcactgtcagacatt

SEQ ID NO: 471835 - DNA, 19 bp, Mus musculus
  siRNA target sequence for Dicer1 (NM_148948.1,785-803).
gtgtcatcttgcgattcta

SEQ ID NO: 471836 - DNA, 19 bp, Mus musculus
  siRNA target sequence for Dicer1 (NM_148948.1,787-805).
gtcatcttgcgattctaga

SEQ ID NO: 471837 - DNA, 19 bp, Mus musculus
  siRNA target sequence for Dicer1 (NM_148948.1,807-825).
cacccctatcgtgaaatta

SEQ ID NO: 471838 - DNA, 19 bp, Mus musculus
  siRNA target sequence for Dicer1 (NM_148948.1,810-828).
ccctatcgtgaaattatga

SEQ ID NO: 471839 - DNA, 19 bp, Mus musculus
  siRNA target sequence for Dicer1 (NM_148948.1,846-864).
ccatcatgccctcgaattt

SEQ ID NO: 471840 - DNA, 19 bp, Mus musculus
  siRNA target sequence for Dicer1 (NM_148948.1,847-865).
catcatgccctcgaatttt

SEQ ID NO: 471841 - DNA, 19 bp, Mus musculus
  siRNA target sequence for Dicer1 (NM_148948.1,868-886).
gactaactgcttccatttt

SEQ ID NO: 471842 - DNA, 19 bp, Mus musculus
  siRNA target sequence for Dicer1 (NM_148948.1,898-916).
gtgatccagaggaattgga

SEQ ID NO: 471843 - DNA, 19 bp, Mus musculus
  siRNA target sequence for Dicer1 (NM_148948.1,978-996).
gtggtcctggacagataca

SEQ ID NO: 471844 - DNA, 19 bp, Mus musculus
  siRNA target sequence for Dicer1 (NM_148948.1,980-998).
ggtcctggacagatacact

SEQ ID NO: 471845 - DNA, 19 bp, Mus musculus
  siRNA target sequence for Dicer1 (NM_148948.1,1048-1066).
gtgggctgtatgagagatt

SEQ ID NO: 471846 - DNA, 19 bp, Mus musculus
  siRNA target sequence for Dicer1 (NM_148948.1,1063-1081).
gattgctgatggagttaga

SEQ ID NO: 471847 - DNA, 19 bp, Mus musculus
  siRNA target sequence for Dicer1 (NM_148948.1,1076-1094).
gttagaagcagcacttgat

SEQ ID NO: 471848 - DNA, 19 bp, Mus musculus
  siRNA target sequence for Dicer1 (NM_148948.1,1087-1105).
cacttgattttatcaatga

SEQ ID NO: 471849 - DNA, 19 bp, Mus musculus
  siRNA target sequence for Dicer1 (NM_148948.1,1092-1110).
gattttatcaatgattgta

SEQ ID NO: 471850 - DNA, 19 bp, Mus musculus
  siRNA target sequence for Dicer1 (NM_148948.1,1201-1219).
cctggtgtgcagataaagt

SEQ ID NO: 471851 - DNA, 19 bp, Mus musculus
  siRNA target sequence for Dicer1 (NM_148948.1,1222-1240).
ctgggatgatggtaagaga

SEQ ID NO: 471852 - DNA, 19 bp, Mus musculus
  siRNA target sequence for Dicer1 (NM_148948.1,1237-1255).
gagaacttcagaagtacat

SEQ ID NO: 471853 - DNA, 19 bp, Mus musculus
  siRNA target sequence for Dicer1 (NM_148948.1,1295-1313).
gtttacagacaccttgtta

SEQ ID NO: 471854 - DNA, 19 bp, Mus musculus
  siRNA target sequence for Dicer1 (NM_148948.1,1354-1372).
cctcacttgacctgaagta

SEQ ID NO: 471855 - DNA, 19 bp, Mus musculus
  siRNA target sequence for Dicer1 (NM_148948.1,1357-1375).
cacttgacctgaagtatgt

SEQ ID NO: 471856 - DNA, 19 bp, Mus musculus
  siRNA target sequence for Dicer1 (NM_148948.1,1468-1486).
ggaatcaggataattacgt

SEQ ID NO: 471857 - DNA, 19 bp, Mus musculus
  siRNA target sequence for Dicer1 (NM_148948.1,1544-1562).
gccagagacaaattttcct

SEQ ID NO: 471858 - DNA, 19 bp, Mus musculus
  siRNA target sequence for Dicer1 (NM_148948.1,1617-1635).
gcagttgtcctaaacagat

SEQ ID NO: 471859 - DNA, 19 bp, Mus musculus
  siRNA target sequence for Dicer1 (NM_148948.1,1618-1636).
cagttgtcctaaacagatt

SEQ ID NO: 471860 - DNA, 19 bp, Mus musculus
  siRNA target sequence for Dicer1 (NM_148948.1,1620-1638).
gttgtcctaaacagattga

SEQ ID NO: 471861 - DNA, 19 bp, Mus musculus
  siRNA target sequence for Dicer1 (NM_148948.1,1761-1779).
gaggaggtacttaggaaat

SEQ ID NO: 471862 - DNA, 19 bp, Mus musculus
  siRNA target sequence for Dicer1 (NM_148948.1,1763-1781).
ggaggtacttaggaaattt

SEQ ID NO: 471863 - DNA, 19 bp, Mus musculus
  siRNA target sequence for Dicer1 (NM_148948.1,1766-1784).
ggtacttaggaaatttcga

SEQ ID NO: 471864 - DNA, 19 bp, Mus musculus
  siRNA target sequence for Dicer1 (NM_148948.1,1799-1817).
cctgctcattgcaacaagt

SEQ ID NO: 471865 - DNA, 19 bp, Mus musculus
  siRNA target sequence for Dicer1 (NM_148948.1,1805-1823).
cattgcaacaagtgttgta

SEQ ID NO: 471866 - DNA, 19 bp, Mus musculus
  siRNA target sequence for Dicer1 (NM_148948.1,1879-1897).
cagagtatcgatcatatgt

SEQ ID NO: 471867 - DNA, 19 bp, Mus musculus
  siRNA target sequence for Dicer1 (NM_148948.1,1914-1932).
gcacgagcgccgatctcta

SEQ ID NO: 471868 - DNA, 19 bp, Mus musculus
  siRNA target sequence for Dicer1 (NM_148948.1,1915-1933).
cacgagcgccgatctctaa

SEQ ID NO: 471869 - DNA, 19 bp, Mus musculus
  siRNA target sequence for Dicer1 (NM_148948.1,1917-1935).
cgagcgccgatctctaatt

SEQ ID NO: 471870 - DNA, 19 bp, Mus musculus
  siRNA target sequence for Dicer1 (NM_148948.1,1918-1936).
gagcgccgatctctaatta

SEQ ID NO: 471871 - DNA, 19 bp, Mus musculus
  siRNA target sequence for Dicer1 (NM_148948.1,1921-1939).
cgccgatctctaattacgt

SEQ ID NO: 471872 - DNA, 19 bp, Mus musculus
  siRNA target sequence for Dicer1 (NM_148948.1,1924-1942).
cgatctctaattacgtaat

SEQ ID NO: 471873 - DNA, 19 bp, Mus musculus
  siRNA target sequence for Dicer1 (NM_148948.1,1928-1946).
ctctaattacgtaatgtta

SEQ ID NO: 471874 - DNA, 19 bp, Mus musculus
  siRNA target sequence for Dicer1 (NM_148948.1,1937-1955).
cgtaatgttagcagataca

SEQ ID NO: 471875 - DNA, 19 bp, Mus musculus
  siRNA target sequence for Dicer1 (NM_148948.1,2119-2137).
ggggtcctcgagtcacaat

SEQ ID NO: 471876 - DNA, 19 bp, Mus musculus
  siRNA target sequence for Dicer1 (NM_148948.1,2121-2139).
ggtcctcgagtcacaatca

SEQ ID NO: 471877 - DNA, 19 bp, Mus musculus
  siRNA target sequence for Dicer1 (NM_148948.1,2162-2180).
cagatattgtgctcgatta

SEQ ID NO: 471878 - DNA, 19 bp, Mus musculus
  siRNA target sequence for Dicer1 (NM_148948.1,2199-2217).
catctagctcccaaatgta

SEQ ID NO: 471879 - DNA, 19 bp, Mus musculus
  siRNA target sequence for Dicer1 (NM_148948.1,2231-2249).
gcctgatggtacattttat

SEQ ID NO: 471880 - DNA, 19 bp, Mus musculus
  siRNA target sequence for Dicer1 (NM_148948.1,2496-2514).
cagtgctaccccaaagcaa

SEQ ID NO: 471881 - DNA, 19 bp, Mus musculus
  siRNA target sequence for Dicer1 (NM_148948.1,2498-2516).
gtgctaccccaaagcaatt

SEQ ID NO: 471882 - DNA, 19 bp, Mus musculus
  siRNA target sequence for Dicer1 (NM_148948.1,2501-2519).
ctaccccaaagcaattcca

SEQ ID NO: 471883 - DNA, 19 bp, Mus musculus
  siRNA target sequence for Dicer1 (NM_148948.1,2557-2575).
cttgttacctgtatgtgat

SEQ ID NO: 471884 - DNA, 19 bp, Mus musculus
  siRNA target sequence for Dicer1 (NM_148948.1,2571-2589).
gtgataggaatggtcttaa

SEQ ID NO: 471885 - DNA, 19 bp, Mus musculus
  siRNA target sequence for Dicer1 (NM_148948.1,2573-2591).
gataggaatggtcttaact

SEQ ID NO: 471886 - DNA, 19 bp, Mus musculus
  siRNA target sequence for Dicer1 (NM_148948.1,2724-2742).
ggagaggtcaccatatcca

SEQ ID NO: 471887 - DNA, 19 bp, Mus musculus
  siRNA target sequence for Dicer1 (NM_148948.1,2778-2796).
caaatgctcgagctgatta

SEQ ID NO: 471888 - DNA, 19 bp, Mus musculus
  siRNA target sequence for Dicer1 (NM_148948.1,2800-2818).
gattgcaccagtacatatt

SEQ ID NO: 471889 - DNA, 19 bp, Mus musculus
  siRNA target sequence for Dicer1 (NM_148948.1,2804-2822).
gcaccagtacatattctca

SEQ ID NO: 471890 - DNA, 19 bp, Mus musculus
  siRNA target sequence for Dicer1 (NM_148948.1,2808-2826).
cagtacatattctcacata

SEQ ID NO: 471891 - DNA, 19 bp, Mus musculus
  siRNA target sequence for Dicer1 (NM_148948.1,2843-2861).
gcctgccctggagtttaaa

SEQ ID NO: 471892 - DNA, 19 bp, Mus musculus
  siRNA target sequence for Dicer1 (NM_148948.1,2876-2894).
gtcagcctactgtgttcta

SEQ ID NO: 471893 - DNA, 19 bp, Mus musculus
  siRNA target sequence for Dicer1 (NM_148948.1,2917-2935).
ccggcactttggacattga

SEQ ID NO: 471894 - DNA, 19 bp, Mus musculus
  siRNA target sequence for Dicer1 (NM_148948.1,2970-2988).
gctcggataggcattccta

SEQ ID NO: 471895 - DNA, 19 bp, Mus musculus
  siRNA target sequence for Dicer1 (NM_148948.1,2981-2999).
cattcctagcaccaagtat

SEQ ID NO: 471896 - DNA, 19 bp, Mus musculus
  siRNA target sequence for Dicer1 (NM_148948.1,3018-3036).
gtctttaagttagaagatt

SEQ ID NO: 471897 - DNA, 19 bp, Mus musculus
  siRNA target sequence for Dicer1 (NM_148948.1,3075-3093).
gatcagcctcatcgatttt

SEQ ID NO: 471898 - DNA, 19 bp, Mus musculus
  siRNA target sequence for Dicer1 (NM_148948.1,3080-3098).
gcctcatcgattttatgta

SEQ ID NO: 471899 - DNA, 19 bp, Mus musculus
  siRNA target sequence for Dicer1 (NM_148948.1,3117-3135).
cttaccccactcagtaaat

SEQ ID NO: 471900 - DNA, 19 bp, Mus musculus
  siRNA target sequence for Dicer1 (NM_148948.1,3123-3141).
ccactcagtaaatttcctt

SEQ ID NO: 471901 - DNA, 19 bp, Mus musculus
  siRNA target sequence for Dicer1 (NM_148948.1,3242-3260).
cagactgaaccttttgaca

SEQ ID NO: 471902 - DNA, 19 bp, Mus musculus
  siRNA target sequence for Dicer1 (NM_148948.1,3257-3275).
gacacctcggcatttgaat

SEQ ID NO: 471903 - DNA, 19 bp, Mus musculus
  siRNA target sequence for Dicer1 (NM_148948.1,3259-3277).
cacctcggcatttgaatca

SEQ ID NO: 471904 - DNA, 19 bp, Mus musculus
  siRNA target sequence for Dicer1 (NM_148948.1,3261-3279).
cctcggcatttgaatcaga

SEQ ID NO: 471905 - DNA, 19 bp, Mus musculus
  siRNA target sequence for Dicer1 (NM_148948.1,3262-3280).
ctcggcatttgaatcagaa

SEQ ID NO: 471906 - DNA, 19 bp, Mus musculus
  siRNA target sequence for Dicer1 (NM_148948.1,3361-3379).
cggaactctgtgctataca

SEQ ID NO: 471907 - DNA, 19 bp, Mus musculus
  siRNA target sequence for Dicer1 (NM_148948.1,3362-3380).
ggaactctgtgctatacat

SEQ ID NO: 471908 - DNA, 19 bp, Mus musculus
  siRNA target sequence for Dicer1 (NM_148948.1,3400-3418).
ggagaaaagcggtttgtct

SEQ ID NO: 471909 - DNA, 19 bp, Mus musculus
  siRNA target sequence for Dicer1 (NM_148948.1,3415-3433).
gtctccccagcatactgta

SEQ ID NO: 471910 - DNA, 19 bp, Mus musculus
  siRNA target sequence for Dicer1 (NM_148948.1,3526-3544).
gataccctaacttagactt

SEQ ID NO: 471911 - DNA, 19 bp, Mus musculus
  siRNA target sequence for Dicer1 (NM_148948.1,3540-3558).
gacttcgggtggaaaaaat

SEQ ID NO: 471912 - DNA, 19 bp, Mus musculus
  siRNA target sequence for Dicer1 (NM_148948.1,3542-3560).
cttcgggtggaaaaaatct

SEQ ID NO: 471913 - DNA, 19 bp, Mus musculus
  siRNA target sequence for Dicer1 (NM_148948.1,3545-3563).
cgggtggaaaaaatctatt

SEQ ID NO: 471914 - DNA, 19 bp, Mus musculus
  siRNA target sequence for Dicer1 (NM_148948.1,3598-3616).
cgttggctgagagtgataa

SEQ ID NO: 471915 - DNA, 19 bp, Mus musculus
  siRNA target sequence for Dicer1 (NM_148948.1,3599-3617).
gttggctgagagtgataat

SEQ ID NO: 471916 - DNA, 19 bp, Mus musculus
  siRNA target sequence for Dicer1 (NM_148948.1,3603-3621).
gctgagagtgataattact

SEQ ID NO: 471917 - DNA, 19 bp, Mus musculus
  siRNA target sequence for Dicer1 (NM_148948.1,3673-3691).
ctagaccctccttagaaaa

SEQ ID NO: 471918 - DNA, 19 bp, Mus musculus
  siRNA target sequence for Dicer1 (NM_148948.1,3676-3694).
gaccctccttagaaaacca

SEQ ID NO: 471919 - DNA, 19 bp, Mus musculus
  siRNA target sequence for Dicer1 (NM_148948.1,3756-3774).
gaggtttcaacggatctta

SEQ ID NO: 471920 - DNA, 19 bp, Mus musculus
  siRNA target sequence for Dicer1 (NM_148948.1,3758-3776).
ggtttcaacggatcttaca

SEQ ID NO: 471921 - DNA, 19 bp, Mus musculus
  siRNA target sequence for Dicer1 (NM_148948.1,3806-3824).
ccttgccaatggcagttat

SEQ ID NO: 471922 - DNA, 19 bp, Mus musculus
  siRNA target sequence for Dicer1 (NM_148948.1,3810-3828).
gccaatggcagttatgatt

SEQ ID NO: 471923 - DNA, 19 bp, Mus musculus
  siRNA target sequence for Dicer1 (NM_148948.1,3811-3829).
ccaatggcagttatgattt

SEQ ID NO: 471924 - DNA, 19 bp, Mus musculus
  siRNA target sequence for Dicer1 (NM_148948.1,3812-3830).
caatggcagttatgattta

SEQ ID NO: 471925 - DNA, 19 bp, Mus musculus
  siRNA target sequence for Dicer1 (NM_148948.1,3817-3835).
gcagttatgatttagttaa

SEQ ID NO: 471926 - DNA, 19 bp, Mus musculus
  siRNA target sequence for Dicer1 (NM_148948.1,3901-3919).
cctcatatcccattcagaa

SEQ ID NO: 471927 - DNA, 19 bp, Mus musculus
  siRNA target sequence for Dicer1 (NM_148948.1,3902-3920).
ctcatatcccattcagaat

SEQ ID NO: 471928 - DNA, 19 bp, Mus musculus
  siRNA target sequence for Dicer1 (NM_148948.1,3904-3922).
catatcccattcagaattt

SEQ ID NO: 471929 - DNA, 19 bp, Mus musculus
  siRNA target sequence for Dicer1 (NM_148948.1,3942-3960).
cccaagcccagcaatgaat

SEQ ID NO: 471930 - DNA, 19 bp, Mus musculus
  siRNA target sequence for Dicer1 (NM_148948.1,3944-3962).
caagcccagcaatgaatgt

SEQ ID NO: 471931 - DNA, 19 bp, Mus musculus
  siRNA target sequence for Dicer1 (NM_148948.1,3963-3981).
cctctactgagtaatacgt

SEQ ID NO: 471932 - DNA, 19 bp, Mus musculus
  siRNA target sequence for Dicer1 (NM_148948.1,3964-3982).
ctctactgagtaatacgta

SEQ ID NO: 471933 - DNA, 19 bp, Mus musculus
  siRNA target sequence for Dicer1 (NM_148948.1,4049-4067).
gatgaatgctgttaaagca

SEQ ID NO: 471934 - DNA, 19 bp, Mus musculus
  siRNA target sequence for Dicer1 (NM_148948.1,4130-4148).
ccccaatccgggactgatt

SEQ ID NO: 471935 - DNA, 19 bp, Mus musculus
  siRNA target sequence for Dicer1 (NM_148948.1,4145-4163).
gattctccaggctttgaca

SEQ ID NO: 471936 - DNA, 19 bp, Mus musculus
  siRNA target sequence for Dicer1 (NM_148948.1,4154-4172).
ggctttgacactgtcaaat

SEQ ID NO: 471937 - DNA, 19 bp, Mus musculus
  siRNA target sequence for Dicer1 (NM_148948.1,4174-4192).
ccagtgatgggtttaacct

SEQ ID NO: 471938 - DNA, 19 bp, Mus musculus
  siRNA target sequence for Dicer1 (NM_148948.1,4213-4231).
gcgactcctttttaaagca

SEQ ID NO: 471939 - DNA, 19 bp, Mus musculus
  siRNA target sequence for Dicer1 (NM_148948.1,4229-4247).
gcatgctatcaccacatat

SEQ ID NO: 471940 - DNA, 19 bp, Mus musculus
  siRNA target sequence for Dicer1 (NM_148948.1,4233-4251).
gctatcaccacatatctgt

SEQ ID NO: 471941 - DNA, 19 bp, Mus musculus
  siRNA target sequence for Dicer1 (NM_148948.1,4234-4252).
ctatcaccacatatctgtt

SEQ ID NO: 471942 - DNA, 19 bp, Mus musculus
  siRNA target sequence for Dicer1 (NM_148948.1,4359-4377).
cgcatggtggtgtcgatat

SEQ ID NO: 471943 - DNA, 19 bp, Mus musculus
  siRNA target sequence for Dicer1 (NM_148948.1,4364-4382).
ggtggtgtcgatattcgat

SEQ ID NO: 471944 - DNA, 19 bp, Mus musculus
  siRNA target sequence for Dicer1 (NM_148948.1,4405-4423).
ctggttatgtggtaaacca

SEQ ID NO: 471945 - DNA, 19 bp, Mus musculus
  siRNA target sequence for Dicer1 (NM_148948.1,4629-4647).
gccttcgtgaggaaaatct

SEQ ID NO: 471946 - DNA, 19 bp, Mus musculus
  siRNA target sequence for Dicer1 (NM_148948.1,4667-4685).
ctccgactctgcatacgaa

SEQ ID NO: 471947 - DNA, 19 bp, Mus musculus
  siRNA target sequence for Dicer1 (NM_148948.1,4734-4752).
ggccttgaggattttgatt

SEQ ID NO: 471948 - DNA, 19 bp, Mus musculus
  siRNA target sequence for Dicer1 (NM_148948.1,4735-4753).
gccttgaggattttgatta

SEQ ID NO: 471949 - DNA, 19 bp, Mus musculus
  siRNA target sequence for Dicer1 (NM_148948.1,4786-4804).
ctagcaaagccgttgaaga

SEQ ID NO: 471950 - DNA, 19 bp, Mus musculus
  siRNA target sequence for Dicer1 (NM_148948.1,4864-4882).
ggaagcagtccatttctta

SEQ ID NO: 471951 - DNA, 19 bp, Mus musculus
  siRNA target sequence for Dicer1 (NM_148948.1,5012-5030).
ggtgctcccagtaatcaaa

SEQ ID NO: 471952 - DNA, 19 bp, Mus musculus
  siRNA target sequence for Dicer1 (NM_148948.1,5013-5031).
gtgctcccagtaatcaaaa

SEQ ID NO: 471953 - DNA, 19 bp, Mus musculus
  siRNA target sequence for Dicer1 (NM_148948.1,5171-5189).
cccaccgaggtgcatgttt

SEQ ID NO: 471954 - DNA, 19 bp, Mus musculus
  siRNA target sequence for Dicer1 (NM_148948.1,5223-5241).
ctgatatctgggtttgaaa

SEQ ID NO: 471955 - DNA, 19 bp, Mus musculus
  siRNA target sequence for Dicer1 (NM_148948.1,5225-5243).
gatatctgggtttgaaact

SEQ ID NO: 471956 - DNA, 19 bp, Mus musculus
  siRNA target sequence for Dicer1 (NM_148948.1,5233-5251).
ggtttgaaacttttgagaa

SEQ ID NO: 471957 - DNA, 19 bp, Mus musculus
  siRNA target sequence for Dicer1 (NM_148948.1,5311-5329).
cctaccactacaacactat

SEQ ID NO: 471958 - DNA, 19 bp, Mus musculus
  siRNA target sequence for Dicer1 (NM_148948.1,5315-5333).
ccactacaacactatcact

SEQ ID NO: 471959 - DNA, 19 bp, Mus musculus
  siRNA target sequence for Dicer1 (NM_148948.1,5338-5356).
gttaccagcgcttagaatt

SEQ ID NO: 471960 - DNA, 19 bp, Mus musculus
  siRNA target sequence for Dicer1 (NM_148948.1,5384-5402).
cataaccaagcacctttat

SEQ ID NO: 471961 - DNA, 19 bp, Mus musculus
  siRNA target sequence for Dicer1 (NM_148948.1,5496-5514).
gactaccacaagtacttta

SEQ ID NO: 471962 - DNA, 19 bp, Mus musculus
  siRNA target sequence for Dicer1 (NM_148948.1,5526-5544).
cctgagctctttcatgtta

SEQ ID NO: 471963 - DNA, 19 bp, Mus musculus
  siRNA target sequence for Dicer1 (NM_148948.1,5531-5549).
gctctttcatgttattgat

SEQ ID NO: 471964 - DNA, 19 bp, Mus musculus
  siRNA target sequence for Dicer1 (NM_148948.1,5657-5675).
ggccatgggggacattttt

SEQ ID NO: 471965 - DNA, 19 bp, Mus musculus
  siRNA target sequence for Dicer1 (NM_148948.1,5682-5700).
cttgctggtgccatttata

SEQ ID NO: 471966 - DNA, 19 bp, Mus musculus
  siRNA target sequence for Dicer1 (NM_148948.1,5686-5704).
ctggtgccatttatatgga

SEQ ID NO: 471967 - DNA, 19 bp, Mus musculus
  siRNA target sequence for Dicer1 (NM_148948.1,5746-5764).
cgatgatgcagcctctaat

SEQ ID NO: 471968 - DNA, 19 bp, Mus musculus
  siRNA target sequence for Dicer1 (NM_148948.1,5754-5772).
cagcctctaatagaaaagt

SEQ ID NO: 471969 - DNA, 19 bp, Mus musculus
  siRNA target sequence for Dicer1 (NM_148948.1,5842-5860).
gcccagcggagagaactta

SEQ ID NO: 471970 - DNA, 19 bp, Mus musculus
  siRNA target sequence for Dicer1 (NM_148948.1,5843-5861).
cccagcggagagaacttat

SEQ ID NO: 471971 - DNA, 19 bp, Mus musculus
  siRNA target sequence for Dicer1 (NM_148948.1,5845-5863).
cagcggagagaacttatga

SEQ ID NO: 471972 - DNA, 19 bp, Mus musculus
  siRNA target sequence for Oas1c (NM_033541.2,403-421).
gacgagttcatatgtgatt

SEQ ID NO: 471973 - DNA, 19 bp, Mus musculus
  siRNA target sequence for Oas1c (NM_033541.2,860-878).
ctgaaccccaattctacaa

SEQ ID NO: 471974 - DNA, 19 bp, Mus musculus
  siRNA target sequence for Oas1c (NM_033541.2,862-880).
gaaccccaattctacaaca

SEQ ID NO: 471975 - DNA, 19 bp, Mus musculus
  siRNA target sequence for Oas1c (NM_033541.2,1100-1118).
gggaacattcgaataaaaa

SEQ ID NO: 471976 - DNA, 19 bp, Mus musculus
  siRNA target sequence for Oas1c (NM_033541.2,1162-1180).
gaactggtcgcctattaca

SEQ ID NO: 471977 - DNA, 19 bp, Mus musculus
  siRNA target sequence for Oas1c (NM_033541.2,1167-1185).
ggtcgcctattacaagaat

SEQ ID NO: 471978 - DNA, 19 bp, Mus musculus
  siRNA target sequence for Oas1c (NM_033541.2,1170-1188).
cgcctattacaagaatctt

SEQ ID NO: 471979 - DNA, 19 bp, Mus musculus
  siRNA target sequence for Prkr (NM_011163.2,197-215).
gtgataccccaggtttcta

SEQ ID NO: 471980 - DNA, 19 bp, Mus musculus
  siRNA target sequence for Prkr (NM_011163.2,209-227).
gtttctacatggacaaact

SEQ ID NO: 471981 - DNA, 19 bp, Mus musculus
  siRNA target sequence for Prkr (NM_011163.2,213-231).
ctacatggacaaacttaat

SEQ ID NO: 471982 - DNA, 19 bp, Mus musculus
  siRNA target sequence for Prkr (NM_011163.2,247-265).
cacggagtagccattacgt

SEQ ID NO: 471983 - DNA, 19 bp, Mus musculus
  siRNA target sequence for Prkr (NM_011163.2,249-267).
cggagtagccattacgtat

SEQ ID NO: 471984 - DNA, 19 bp, Mus musculus
  siRNA target sequence for Prkr (NM_011163.2,250-268).
ggagtagccattacgtata

SEQ ID NO: 471985 - DNA, 19 bp, Mus musculus
  siRNA target sequence for Prkr (NM_011163.2,251-269).
gagtagccattacgtataa

SEQ ID NO: 471986 - DNA, 19 bp, Mus musculus
  siRNA target sequence for Prkr (NM_011163.2,257-275).
ccattacgtataaagaact

SEQ ID NO: 471987 - DNA, 19 bp, Mus musculus
  siRNA target sequence for Prkr (NM_011163.2,258-276).
cattacgtataaagaactt

SEQ ID NO: 471988 - DNA, 19 bp, Mus musculus
  siRNA target sequence for Prkr (NM_011163.2,264-282).
gtataaagaacttagtact

SEQ ID NO: 471989 - DNA, 19 bp, Mus musculus
  siRNA target sequence for Prkr (NM_011163.2,292-310).
ccacatgacagaaggttta

SEQ ID NO: 471990 - DNA, 19 bp, Mus musculus
  siRNA target sequence for Prkr (NM_011163.2,346-364).
gaagccaaaggtagatcaa

SEQ ID NO: 471991 - DNA, 19 bp, Mus musculus
  siRNA target sequence for Prkr (NM_011163.2,377-395).
gaaacgctgcagccaaatt

SEQ ID NO: 471992 - DNA, 19 bp, Mus musculus
  siRNA target sequence for Prkr (NM_011163.2,381-399).
cgctgcagccaaattagct

SEQ ID NO: 471993 - DNA, 19 bp, Mus musculus
  siRNA target sequence for Prkr (NM_011163.2,388-406).
gccaaattagctgttgata

SEQ ID NO: 471994 - DNA, 19 bp, Mus musculus
  siRNA target sequence for Prkr (NM_011163.2,389-407).
ccaaattagctgttgatat

SEQ ID NO: 471995 - DNA, 19 bp, Mus musculus
  siRNA target sequence for Prkr (NM_011163.2,397-415).
gctgttgatatacttgata

SEQ ID NO: 471996 - DNA, 19 bp, Mus musculus
  siRNA target sequence for Prkr (NM_011163.2,398-416).
ctgttgatatacttgataa

SEQ ID NO: 471997 - DNA, 19 bp, Mus musculus
  siRNA target sequence for Prkr (NM_011163.2,462-480).
gttcgttggtaactacata

SEQ ID NO: 471998 - DNA, 19 bp, Mus musculus
  siRNA target sequence for Prkr (NM_011163.2,550-568).
gagttgcctcaaagattta

SEQ ID NO: 471999 - DNA, 19 bp, Mus musculus
  siRNA target sequence for Prkr (NM_011163.2,578-596).
gcaaaattgggcagacaat

SEQ ID NO: 472000 - DNA, 19 bp, Mus musculus
  siRNA target sequence for Prkr (NM_011163.2,586-604).
gggcagacaatgtatggta

SEQ ID NO: 472001 - DNA, 19 bp, Mus musculus
  siRNA target sequence for Prkr (NM_011163.2,707-725).
gcgttgtcacatctacatt

SEQ ID NO: 472002 - DNA, 19 bp, Mus musculus
  siRNA target sequence for Prkr (NM_011163.2,709-727).
gttgtcacatctacattca

SEQ ID NO: 472003 - DNA, 19 bp, Mus musculus
  siRNA target sequence for Prkr (NM_011163.2,738-756).
cagcagctcgtctatgaca

SEQ ID NO: 472004 - DNA, 19 bp, Mus musculus
  siRNA target sequence for Prkr (NM_011163.2,744-762).
ctcgtctatgacaagtaat

SEQ ID NO: 472005 - DNA, 19 bp, Mus musculus
  siRNA target sequence for Prkr (NM_011163.2,747-765).
gtctatgacaagtaatggt

SEQ ID NO: 472006 - DNA, 19 bp, Mus musculus
  siRNA target sequence for Prkr (NM_011163.2,797-815).
cagagaacgtgtttacgaa

SEQ ID NO: 472007 - DNA, 19 bp, Mus musculus
  siRNA target sequence for Prkr (NM_011163.2,812-830).
cgaacggtctcggagaaaa

SEQ ID NO: 472008 - DNA, 19 bp, Mus musculus
  siRNA target sequence for Prkr (NM_011163.2,813-831).
gaacggtctcggagaaaat

SEQ ID NO: 472009 - DNA, 19 bp, Mus musculus
  siRNA target sequence for Prkr (NM_011163.2,816-834).
cggtctcggagaaaataaa

SEQ ID NO: 472010 - DNA, 19 bp, Mus musculus
  siRNA target sequence for Prkr (NM_011163.2,817-835).
ggtctcggagaaaataaaa

SEQ ID NO: 472011 - DNA, 19 bp, Mus musculus
  siRNA target sequence for Prkr (NM_011163.2,897-915).
caggtttaacagcgatttt

SEQ ID NO: 472012 - DNA, 19 bp, Mus musculus
  siRNA target sequence for Prkr (NM_011163.2,899-917).
ggtttaacagcgattttga

SEQ ID NO: 472013 - DNA, 19 bp, Mus musculus
  siRNA target sequence for Prkr (NM_011163.2,900-918).
gtttaacagcgattttgaa

SEQ ID NO: 472014 - DNA, 19 bp, Mus musculus
  siRNA target sequence for Prkr (NM_011163.2,940-958).
ggtggatttggtcaagttt

SEQ ID NO: 472015 - DNA, 19 bp, Mus musculus
  siRNA target sequence for Prkr (NM_011163.2,943-961).
ggatttggtcaagttttca

SEQ ID NO: 472016 - DNA, 19 bp, Mus musculus
  siRNA target sequence for Prkr (NM_011163.2,955-973).
gttttcaaagcgaaacaca

SEQ ID NO: 472017 - DNA, 19 bp, Mus musculus
  siRNA target sequence for Prkr (NM_011163.2,983-1001).
gaaagagatacgctattaa

SEQ ID NO: 472018 - DNA, 19 bp, Mus musculus
  siRNA target sequence for Prkr (NM_011163.2,993-1011).
cgctattaagcgcgttaaa

SEQ ID NO: 472019 - DNA, 19 bp, Mus musculus
  siRNA target sequence for Prkr (NM_011163.2,994-1012).
gctattaagcgcgttaaat

SEQ ID NO: 472020 - DNA, 19 bp, Mus musculus
  siRNA target sequence for Prkr (NM_011163.2,1026-1044).
ggcggagcacgaagtacaa

SEQ ID NO: 472021 - DNA, 19 bp, Mus musculus
  siRNA target sequence for Prkr (NM_011163.2,1068-1086).
caacattgtccaataccat

SEQ ID NO: 472022 - DNA, 19 bp, Mus musculus
  siRNA target sequence for Prkr (NM_011163.2,1075-1093).
gtccaataccatagttgtt

SEQ ID NO: 472023 - DNA, 19 bp, Mus musculus
  siRNA target sequence for Prkr (NM_011163.2,1091-1109).
gttgggagggagttgacta

SEQ ID NO: 472024 - DNA, 19 bp, Mus musculus
  siRNA target sequence for Prkr (NM_011163.2,1122-1140).
cagcatgagtgatacaagt

SEQ ID NO: 472025 - DNA, 19 bp, Mus musculus
  siRNA target sequence for Prkr (NM_011163.2,1130-1148).
gtgatacaagtcgatacaa

SEQ ID NO: 472026 - DNA, 19 bp, Mus musculus
  siRNA target sequence for Prkr (NM_011163.2,1132-1150).
gatacaagtcgatacaaaa

SEQ ID NO: 472027 - DNA, 19 bp, Mus musculus
  siRNA target sequence for Prkr (NM_011163.2,1154-1172).
ggtgcctctttattcaaat

SEQ ID NO: 472028 - DNA, 19 bp, Mus musculus
  siRNA target sequence for Prkr (NM_011163.2,1157-1175).
gcctctttattcaaatgga

SEQ ID NO: 472029 - DNA, 19 bp, Mus musculus
  siRNA target sequence for Prkr (NM_011163.2,1158-1176).
cctctttattcaaatggaa

SEQ ID NO: 472030 - DNA, 19 bp, Mus musculus
  siRNA target sequence for Prkr (NM_011163.2,1173-1191).
ggaattctgtgataaagga

SEQ ID NO: 472031 - DNA, 19 bp, Mus musculus
  siRNA target sequence for Prkr (NM_011163.2,1270-1288).
gtgaccggagtggagtata

SEQ ID NO: 472032 - DNA, 19 bp, Mus musculus
  siRNA target sequence for Prkr (NM_011163.2,1272-1290).
gaccggagtggagtatata

SEQ ID NO: 472033 - DNA, 19 bp, Mus musculus
  siRNA target sequence for Prkr (NM_011163.2,1274-1292).
ccggagtggagtatataca

SEQ ID NO: 472034 - DNA, 19 bp, Mus musculus
  siRNA target sequence for Prkr (NM_011163.2,1276-1294).
ggagtggagtatatacact

SEQ ID NO: 472035 - DNA, 19 bp, Mus musculus
  siRNA target sequence for Prkr (NM_011163.2,1342-1360).
gtagatgaaagacacatta

SEQ ID NO: 472036 - DNA, 19 bp, Mus musculus
  siRNA target sequence for Prkr (NM_011163.2,1356-1374).
cattaagatcggagacttt

SEQ ID NO: 472037 - DNA, 19 bp, Mus musculus
  siRNA target sequence for Prkr (NM_011163.2,1480-1498).
gaagtggacatctttgctt

SEQ ID NO: 472038 - DNA, 19 bp, Mus musculus
  siRNA target sequence for Prkr (NM_011163.2,1503-1521).
ccttattctagctgaactt

SEQ ID NO: 472039 - DNA, 19 bp, Mus musculus
  siRNA target sequence for Prkr (NM_011163.2,1540-1558).
gagtcagagaaaataaagt

SEQ ID NO: 472040 - DNA, 19 bp, Mus musculus
  siRNA target sequence for Prkr (NM_011163.2,1579-1597).
ggcgacttctctaatgata

SEQ ID NO: 472041 - DNA, 19 bp, Mus musculus
  siRNA target sequence for Prkr (NM_011163.2,1580-1598).
gcgacttctctaatgatat

SEQ ID NO: 472042 - DNA, 19 bp, Mus musculus
  siRNA target sequence for Prkr (NM_011163.2,1581-1599).
cgacttctctaatgatata

SEQ ID NO: 472043 - DNA, 19 bp, Mus musculus
  siRNA target sequence for Prkra (NM_011871.1,239-257).
caccgattcaggtattgca

SEQ ID NO: 472044 - DNA, 19 bp, Mus musculus
  siRNA target sequence for Prkra (NM_011871.1,256-274).
cacgagtacggcatgaaga

SEQ ID NO: 472045 - DNA, 19 bp, Mus musculus
  siRNA target sequence for Prkra (NM_011871.1,276-294).
caagaacattccagtttat

SEQ ID NO: 472046 - DNA, 19 bp, Mus musculus
  siRNA target sequence for Prkra (NM_011871.1,279-297).
gaacattccagtttatgaa

SEQ ID NO: 472047 - DNA, 19 bp, Mus musculus
  siRNA target sequence for Prkra (NM_011871.1,282-300).
cattccagtttatgaatgt

SEQ ID NO: 472048 - DNA, 19 bp, Mus musculus
  siRNA target sequence for Prkra (NM_011871.1,305-323).
gatccgatgtgcaagtaca

SEQ ID NO: 472049 - DNA, 19 bp, Mus musculus
  siRNA target sequence for Prkra (NM_011871.1,513-531).
gaatccaattggctcatta

SEQ ID NO: 472050 - DNA, 19 bp, Mus musculus
  siRNA target sequence for Prkra (NM_011871.1,525-543).
ctcattacaggaattagca

SEQ ID NO: 472051 - DNA, 19 bp, Mus musculus
  siRNA target sequence for Prkra (NM_011871.1,527-545).
cattacaggaattagcaat

SEQ ID NO: 472052 - DNA, 19 bp, Mus musculus
  siRNA target sequence for Prkra (NM_011871.1,554-572).
gctggcgacttcctgaata

SEQ ID NO: 472053 - DNA, 19 bp, Mus musculus
  siRNA target sequence for Prkra (NM_011871.1,626-644).
gcaggcttgaatcattcat

SEQ ID NO: 472054 - DNA, 19 bp, Mus musculus
  siRNA target sequence for Prkra (NM_011871.1,696-714).
gaaatttctcgccaagttt

SEQ ID NO: 472055 - DNA, 19 bp, Mus musculus
  siRNA target sequence for Prkra (NM_011871.1,703-721).
ctcgccaagtttagtaata

SEQ ID NO: 472056 - DNA, 19 bp, Mus musculus
  siRNA target sequence for Prkra (NM_011871.1,705-723).
cgccaagtttagtaatatt

SEQ ID NO: 472057 - DNA, 19 bp, Mus musculus
  siRNA target sequence for Prkra (NM_011871.1,730-748).
gagaaccacatttctctaa

SEQ ID NO: 472058 - DNA, 19 bp, Mus musculus
  siRNA target sequence for Prkra (NM_011871.1,884-902).
ccagcgagcaaggctttaa

SEQ ID NO: 472059 - DNA, 19 bp, Mus musculus
  siRNA target sequence for Prkra (NM_011871.1,887-905).
gcgagcaaggctttaacat

SEQ ID NO: 472060 - DNA, 19 bp, Mus musculus
  siRNA target sequence for Prkra (NM_011871.1,888-906).
cgagcaaggctttaacata

SEQ ID NO: 472061 - DNA, 19 bp, Mus musculus
  siRNA target sequence for Prkra (NM_011871.1,889-907).
gagcaaggctttaacataa

SEQ ID NO: 472062 - DNA, 19 bp, Mus musculus
  siRNA target sequence for Prkra (NM_011871.1,892-910).
caaggctttaacataacgt

SEQ ID NO: 472063 - DNA, 19 bp, Mus musculus
  siRNA target sequence for Prkra (NM_011871.1,895-913).
ggctttaacataacgtatt

SEQ ID NO: 472064 - DNA, 19 bp, Mus musculus
  siRNA target sequence for Prkra (NM_011871.1,932-950).
gtgccaacggacagtatca

SEQ ID NO: 472065 - DNA, 19 bp, Mus musculus
  siRNA target sequence for Prkra (NM_011871.1,934-952).
gccaacggacagtatcagt

SEQ ID NO: 472066 - DNA, 19 bp, Mus musculus
  siRNA target sequence for Prkra (NM_011871.1,1038-1056).
caatgctctgcagtattta

SEQ ID NO: 472067 - DNA, 19 bp, Mus musculus
  siRNA target sequence for Slc4a1ap (NM_009206.1,527-545).
gcactcggctctttatcct

SEQ ID NO: 472068 - DNA, 19 bp, Mus musculus
  siRNA target sequence for Slc4a1ap (NM_009206.1,528-546).
cactcggctctttatcctt

SEQ ID NO: 472069 - DNA, 19 bp, Mus musculus
  siRNA target sequence for Slc4a1ap (NM_009206.1,565-583).
cgagaggcagaatctgaat

SEQ ID NO: 472070 - DNA, 19 bp, Mus musculus
  siRNA target sequence for Slc4a1ap (NM_009206.1,568-586).
gaggcagaatctgaattaa

SEQ ID NO: 472071 - DNA, 19 bp, Mus musculus
  siRNA target sequence for Slc4a1ap (NM_009206.1,570-588).
ggcagaatctgaattaaca

SEQ ID NO: 472072 - DNA, 19 bp, Mus musculus
  siRNA target sequence for Slc4a1ap (NM_009206.1,610-628).
cgtaaacagcagcagatat

SEQ ID NO: 472073 - DNA, 19 bp, Mus musculus
  siRNA target sequence for Slc4a1ap (NM_009206.1,704-722).
gaagtggtcaagatgatga

SEQ ID NO: 472074 - DNA, 19 bp, Mus musculus
  siRNA target sequence for Slc4a1ap (NM_009206.1,780-798).
ccccattgccttagatttt

SEQ ID NO: 472075 - DNA, 19 bp, Mus musculus
  siRNA target sequence for Slc4a1ap (NM_009206.1,804-822).
ggaccgggaagcgttttat

SEQ ID NO: 472076 - DNA, 19 bp, Mus musculus
  siRNA target sequence for Slc4a1ap (NM_009206.1,805-823).
gaccgggaagcgttttata

SEQ ID NO: 472077 - DNA, 19 bp, Mus musculus
  siRNA target sequence for Slc4a1ap (NM_009206.1,807-825).
ccgggaagcgttttatata

SEQ ID NO: 472078 - DNA, 19 bp, Mus musculus
  siRNA target sequence for Slc4a1ap (NM_009206.1,808-826).
cgggaagcgttttatataa

SEQ ID NO: 472079 - DNA, 19 bp, Mus musculus
  siRNA target sequence for Slc4a1ap (NM_009206.1,927-945).
gaggttacctgtagatgat

SEQ ID NO: 472080 - DNA, 19 bp, Mus musculus
  siRNA target sequence for Slc4a1ap (NM_009206.1,964-982).
gtggctgaggccattcact

SEQ ID NO: 472081 - DNA, 19 bp, Mus musculus
  siRNA target sequence for Slc4a1ap (NM_009206.1,1024-1042).
gcctgccgggtccttgata

SEQ ID NO: 472082 - DNA, 19 bp, Mus musculus
  siRNA target sequence for Slc4a1ap (NM_009206.1,1026-1044).
ctgccgggtccttgataca

SEQ ID NO: 472083 - DNA, 19 bp, Mus musculus
  siRNA target sequence for Slc4a1ap (NM_009206.1,1028-1046).
gccgggtccttgatacact

SEQ ID NO: 472084 - DNA, 19 bp, Mus musculus
  siRNA target sequence for Slc4a1ap (NM_009206.1,1117-1135).
gatagtgacgatgatacat

SEQ ID NO: 472085 - DNA, 19 bp, Mus musculus
  siRNA target sequence for Slc4a1ap (NM_009206.1,1168-1186).
cgcctgaaccggatgaaga

SEQ ID NO: 472086 - DNA, 19 bp, Mus musculus
  siRNA target sequence for Slc4a1ap (NM_009206.1,1224-1242).
gtcactggttgcaaagtta

SEQ ID NO: 472087 - DNA, 19 bp, Mus musculus
  siRNA target sequence for Slc4a1ap (NM_009206.1,1226-1244).
cactggttgcaaagttaaa

SEQ ID NO: 472088 - DNA, 19 bp, Mus musculus
  siRNA target sequence for Slc4a1ap (NM_009206.1,1230-1248).
ggttgcaaagttaaatgat

SEQ ID NO: 472089 - DNA, 19 bp, Mus musculus
  siRNA target sequence for Slc4a1ap (NM_009206.1,1257-1275).
ggaactcgccgaaatttct

SEQ ID NO: 472090 - DNA, 19 bp, Mus musculus
  siRNA target sequence for Slc4a1ap (NM_009206.1,1261-1279).
ctcgccgaaatttctgaaa

SEQ ID NO: 472091 - DNA, 19 bp, Mus musculus
  siRNA target sequence for Slc4a1ap (NM_009206.1,1284-1302).
caaggcttcaagcaaagtt

SEQ ID NO: 472092 - DNA, 19 bp, Mus musculus
  siRNA target sequence for Slc4a1ap (NM_009206.1,1473-1491).
cccagaactaaaaaagact

SEQ ID NO: 472093 - DNA, 19 bp, Mus musculus
  siRNA target sequence for Slc4a1ap (NM_009206.1,1626-1644).
ccctccagctttaatgcaa

SEQ ID NO: 472094 - DNA, 19 bp, Mus musculus
  siRNA target sequence for Slc4a1ap (NM_009206.1,1630-1648).
ccagctttaatgcaaatga

SEQ ID NO: 472095 - DNA, 19 bp, Mus musculus
  siRNA target sequence for Slc4a1ap (NM_009206.1,1817-1835).
cgtgctccaaggagactaa

SEQ ID NO: 472096 - DNA, 19 bp, Mus musculus
  siRNA target sequence for Slc4a1ap (NM_009206.1,1843-1861).
gcagcaccagcgaatgaat

SEQ ID NO: 472097 - DNA, 19 bp, Mus musculus
  siRNA target sequence for Slc4a1ap (NM_009206.1,1847-1865).
caccagcgaatgaatataa

SEQ ID NO: 472098 - DNA, 19 bp, Mus musculus
  siRNA target sequence for Slc4a1ap (NM_009206.1,1850-1868).
cagcgaatgaatataaaca

SEQ ID NO: 472099 - DNA, 19 bp, Mus musculus
  siRNA target sequence for Slc4a1ap (NM_009206.1,1948-1966).
gatgacccagactactgta

SEQ ID NO: 472100 - DNA, 19 bp, Mus musculus
  siRNA target sequence for Slc4a1ap (NM_009206.1,1951-1969).
gacccagactactgtatat

SEQ ID NO: 472101 - DNA, 19 bp, Mus musculus
  siRNA target sequence for Slc4a1ap (NM_009206.1,1996-2014).
gatggcagaacccatctta

SEQ ID NO: 472102 - DNA, 19 bp, Mus musculus
  siRNA target sequence for Spnr (NM_009261.1,107-125).
gagatctattagatctttt

SEQ ID NO: 472103 - DNA, 19 bp, Mus musculus
  siRNA target sequence for Spnr (NM_009261.1,156-174).
cattcaacaatctatccat

SEQ ID NO: 472104 - DNA, 19 bp, Mus musculus
  siRNA target sequence for Spnr (NM_009261.1,206-224).
ggtgtctactgttgaatgt

SEQ ID NO: 472105 - DNA, 19 bp, Mus musculus
  siRNA target sequence for Spnr (NM_009261.1,214-232).
ctgttgaatgtgctcttaa

SEQ ID NO: 472106 - DNA, 19 bp, Mus musculus
  siRNA target sequence for Spnr (NM_009261.1,243-261).
gattggctggacgaaacaa

SEQ ID NO: 472107 - DNA, 19 bp, Mus musculus
  siRNA target sequence for Spnr (NM_009261.1,310-328).
ctgtggaaaactattccaa

SEQ ID NO: 472108 - DNA, 19 bp, Mus musculus
  siRNA target sequence for Spnr (NM_009261.1,333-351).
caaggtggccggacattgt

SEQ ID NO: 472109 - DNA, 19 bp, Mus musculus
  siRNA target sequence for Spnr (NM_009261.1,364-382).
ggattggcttggttgcaaa

SEQ ID NO: 472110 - DNA, 19 bp, Mus musculus
  siRNA target sequence for Spnr (NM_009261.1,379-397).
caaaaggcttgctgattaa

SEQ ID NO: 472111 - DNA, 19 bp, Mus musculus
  siRNA target sequence for Spnr (NM_009261.1,441-459).
cccacggaaaccctgttaa

SEQ ID NO: 472112 - DNA, 19 bp, Mus musculus
  siRNA target sequence for Spnr (NM_009261.1,442-460).
ccacggaaaccctgttaaa

SEQ ID NO: 472113 - DNA, 19 bp, Mus musculus
  siRNA target sequence for Spnr (NM_009261.1,443-461).
cacggaaaccctgttaaat

SEQ ID NO: 472114 - DNA, 19 bp, Mus musculus
  siRNA target sequence for Spnr (NM_009261.1,446-464).
ggaaaccctgttaaataca

SEQ ID NO: 472115 - DNA, 19 bp, Mus musculus
  siRNA target sequence for Spnr (NM_009261.1,471-489).
gataaccttcctattcaga

SEQ ID NO: 472116 - DNA, 19 bp, Mus musculus
  siRNA target sequence for Spnr (NM_009261.1,516-534).
caagtggaacaatgtataa

SEQ ID NO: 472117 - DNA, 19 bp, Mus musculus
  siRNA target sequence for Spnr (NM_009261.1,521-539).
ggaacaatgtataaatgaa

SEQ ID NO: 472118 - DNA, 19 bp, Mus musculus
  siRNA target sequence for Spnr (NM_009261.1,567-585).
gagccaacactgactttga

SEQ ID NO: 472119 - DNA, 19 bp, Mus musculus
  siRNA target sequence for Spnr (NM_009261.1,604-622).
ctctaattagggacgaatt

SEQ ID NO: 472120 - DNA, 19 bp, Mus musculus
  siRNA target sequence for Spnr (NM_009261.1,613-631).
gggacgaattggagaagaa

SEQ ID NO: 472121 - DNA, 19 bp, Mus musculus
  siRNA target sequence for Spnr (NM_009261.1,728-746).
ccaggcaagggcaaatgga

SEQ ID NO: 472122 - DNA, 19 bp, Mus musculus
  siRNA target sequence for Spnr (NM_009261.1,803-821).
cacatgggcaccattgaaa

SEQ ID NO: 472123 - DNA, 19 bp, Mus musculus
  siRNA target sequence for Spnr (NM_009261.1,823-841).
gatggccactagagcttat

SEQ ID NO: 472124 - DNA, 19 bp, Mus musculus
  siRNA target sequence for Spnr (NM_009261.1,827-845).
gccactagagcttatatgt

SEQ ID NO: 472125 - DNA, 19 bp, Mus musculus
  siRNA target sequence for Spnr (NM_009261.1,829-847).
cactagagcttatatgtga

SEQ ID NO: 472126 - DNA, 19 bp, Mus musculus
  siRNA target sequence for Spnr (NM_009261.1,837-855).
cttatatgtgaaaagtcta

SEQ ID NO: 472127 - DNA, 19 bp, Mus musculus
  siRNA target sequence for Spnr (NM_009261.1,898-916).
gacgagtaatggagtgttt

SEQ ID NO: 472128 - DNA, 19 bp, Mus musculus
  siRNA target sequence for Spnr (NM_009261.1,913-931).
gtttggcatctggaatact

SEQ ID NO: 472129 - DNA, 19 bp, Mus musculus
  siRNA target sequence for Spnr (NM_009261.1,1033-1051).
cacagcatgcacttagact

SEQ ID NO: 472130 - DNA, 19 bp, Mus musculus
  siRNA target sequence for Spnr (NM_009261.1,1035-1053).
cagcatgcacttagactat

SEQ ID NO: 472131 - DNA, 19 bp, Mus musculus
  siRNA target sequence for Spnr (NM_009261.1,1037-1055).
gcatgcacttagactatca

SEQ ID NO: 472132 - DNA, 19 bp, Mus musculus
  siRNA target sequence for Spnr (NM_009261.1,1127-1145).
ctggtcagttactgataaa

SEQ ID NO: 472133 - DNA, 19 bp, Mus musculus
  siRNA target sequence for Spnr (NM_009261.1,1155-1173).
gggtcttcagctctaaaga

SEQ ID NO: 472134 - DNA, 19 bp, Mus musculus
  siRNA target sequence for Spnr (NM_009261.1,1200-1218).
gataaagatcccaacaaga

SEQ ID NO: 472135 - DNA, 19 bp, Mus musculus
  siRNA target sequence for Spnr (NM_009261.1,1223-1241).
gaaacgaaacttaaggaaa

SEQ ID NO: 472136 - DNA, 19 bp, Mus musculus
  siRNA target sequence for Spnr (NM_009261.1,1237-1255).
ggaaaattctagatagtaa

SEQ ID NO: 472137 - DNA, 19 bp, Mus musculus
  siRNA target sequence for Spnr (NM_009261.1,1271-1289).
gaatgcactaatgagatta

SEQ ID NO: 472138 - DNA, 19 bp, Mus musculus
  siRNA target sequence for Spnr (NM_009261.1,1347-1365).
gccccagtcttcacaatgt

SEQ ID NO: 472139 - DNA, 19 bp, Mus musculus
  siRNA target sequence for Spnr (NM_009261.1,1349-1367).
cccagtcttcacaatgtct

SEQ ID NO: 472140 - DNA, 19 bp, Mus musculus
  siRNA target sequence for Spnr (NM_009261.1,1355-1373).
cttcacaatgtctgtagat

SEQ ID NO: 472141 - DNA, 19 bp, Mus musculus
  siRNA target sequence for Spnr (NM_009261.1,1371-1389).
gatgtggatggcacaacat

SEQ ID NO: 472142 - DNA, 19 bp, Mus musculus
  siRNA target sequence for Spnr (NM_009261.1,1457-1475).
gggatacccaacaggtttt

SEQ ID NO: 472143 - DNA, 19 bp, Mus musculus
  siRNA target sequence for Spnr (NM_009261.1,1459-1477).
gatacccaacaggttttga

SEQ ID NO: 472144 - DNA, 19 bp, Mus musculus
  siRNA target sequence for Spnr (NM_009261.1,1492-1510).
gtatcagttccgatgaaaa

SEQ ID NO: 472145 - DNA, 19 bp, Mus musculus
  siRNA target sequence for Spnr (NM_009261.1,1496-1514).
cagttccgatgaaaaatca

SEQ ID NO: 472146 - DNA, 19 bp, Mus musculus
  siRNA target sequence for Spnr (NM_009261.1,1498-1516).
gttccgatgaaaaatcaga

SEQ ID NO: 472147 - DNA, 19 bp, Mus musculus
  siRNA target sequence for Spnr (NM_009261.1,1501-1519).
ccgatgaaaaatcagataa

SEQ ID NO: 472148 - DNA, 19 bp, Mus musculus
  siRNA target sequence for Spnr (NM_009261.1,1533-1551).
gatacagtatcttcaaact

SEQ ID NO: 472149 - DNA, 19 bp, Mus musculus
  siRNA target sequence for Spnr (NM_009261.1,1625-1643).
cacagcaagtggcaaaaat

SEQ ID NO: 472150 - DNA, 19 bp, Mus musculus
  siRNA target sequence for Spnr (NM_009261.1,1762-1780).
gaggtgcaggtccaaacaa

SEQ ID NO: 472151 - DNA, 19 bp, Mus musculus
  siRNA target sequence for Spnr (NM_009261.1,1833-1851).
ggacccaatgcggcaaata

SEQ ID NO: 472152 - DNA, 19 bp, Mus musculus
  siRNA target sequence for Spnr (NM_009261.1,1837-1855).
ccaatgcggcaaataataa

SEQ ID NO: 472153 - DNA, 19 bp, Mus musculus
  siRNA target sequence for Spnr (NM_009261.1,1842-1860).
gcggcaaataataagaaaa

SEQ ID NO: 472154 - DNA, 19 bp, Mus musculus
  siRNA target sequence for Spnr (NM_009261.1,1843-1861).
cggcaaataataagaaaaa

SEQ ID NO: 472155 - DNA, 19 bp, Mus musculus
  siRNA target sequence for Spnr (NM_009261.1,1868-1886).
cattcctcaggcaaaaggt

SEQ ID NO: 472156 - DNA, 19 bp, Mus musculus
  siRNA target sequence for Stau1 (NM_011490.1,392-410).
gcctatccccccagatact

SEQ ID NO: 472157 - DNA, 19 bp, Mus musculus
  siRNA target sequence for Stau1 (NM_011490.1,393-411).
cctatccccccagatactt

SEQ ID NO: 472158 - DNA, 19 bp, Mus musculus
  siRNA target sequence for Stau1 (NM_011490.1,394-412).
ctatccccccagatacttt

SEQ ID NO: 472159 - DNA, 19 bp, Mus musculus
  siRNA target sequence for Stau1 (NM_011490.1,458-476).
gtgggcggacagcagttta

SEQ ID NO: 472160 - DNA, 19 bp, Mus musculus
  siRNA target sequence for Stau1 (NM_011490.1,460-478).
gggcggacagcagtttaat

SEQ ID NO: 472161 - DNA, 19 bp, Mus musculus
  siRNA target sequence for Stau1 (NM_011490.1,601-619).
cctcaataaatcggaaata

SEQ ID NO: 472162 - DNA, 19 bp, Mus musculus
  siRNA target sequence for Stau1 (NM_011490.1,602-620).
ctcaataaatcggaaataa

SEQ ID NO: 472163 - DNA, 19 bp, Mus musculus
  siRNA target sequence for Stau1 (NM_011490.1,612-630).
cggaaataagccaagtgtt

SEQ ID NO: 472164 - DNA, 19 bp, Mus musculus
  siRNA target sequence for Stau1 (NM_011490.1,646-664).
gcggaatttgcctgtgaat

SEQ ID NO: 472165 - DNA, 19 bp, Mus musculus
  siRNA target sequence for Stau1 (NM_011490.1,647-665).
cggaatttgcctgtgaatt

SEQ ID NO: 472166 - DNA, 19 bp, Mus musculus
  siRNA target sequence for Stau1 (NM_011490.1,900-918).
gccaagggatgaatcctat

SEQ ID NO: 472167 - DNA, 19 bp, Mus musculus
  siRNA target sequence for Stau1 (NM_011490.1,901-919).
ccaagggatgaatcctatt

SEQ ID NO: 472168 - DNA, 19 bp, Mus musculus
  siRNA target sequence for Stau1 (NM_011490.1,902-920).
caagggatgaatcctatta

SEQ ID NO: 472169 - DNA, 19 bp, Mus musculus
  siRNA target sequence for Stau1 (NM_011490.1,905-923).
gggatgaatcctattagta

SEQ ID NO: 472170 - DNA, 19 bp, Mus musculus
  siRNA target sequence for Stau1 (NM_011490.1,907-925).
gatgaatcctattagtaga

SEQ ID NO: 472171 - DNA, 19 bp, Mus musculus
  siRNA target sequence for Stau1 (NM_011490.1,996-1014).
cacgtcgcagggagtttgt

SEQ ID NO: 472172 - DNA, 19 bp, Mus musculus
  siRNA target sequence for Stau1 (NM_011490.1,998-1016).
cgtcgcagggagtttgtga

SEQ ID NO: 472173 - DNA, 19 bp, Mus musculus
  siRNA target sequence for Stau1 (NM_011490.1,999-1017).
gtcgcagggagtttgtgat

SEQ ID NO: 472174 - DNA, 19 bp, Mus musculus
  siRNA target sequence for Stau1 (NM_011490.1,1049-1067).
ggagtgggtaccaataaga

SEQ ID NO: 472175 - DNA, 19 bp, Mus musculus
  siRNA target sequence for Stau1 (NM_011490.1,1050-1068).
gagtgggtaccaataagaa

SEQ ID NO: 472176 - DNA, 19 bp, Mus musculus
  siRNA target sequence for Stau1 (NM_011490.1,1102-1120).
ggagatcctggggttcaaa

SEQ ID NO: 472177 - DNA, 19 bp, Mus musculus
  siRNA target sequence for Stau1 (NM_011490.1,1192-1210).
cggaaggaaagtaacgttt

SEQ ID NO: 472178 - DNA, 19 bp, Mus musculus
  siRNA target sequence for Stau1 (NM_011490.1,1193-1211).
ggaaggaaagtaacgtttt

SEQ ID NO: 472179 - DNA, 19 bp, Mus musculus
  siRNA target sequence for Stau1 (NM_011490.1,1194-1212).
gaaggaaagtaacgttttt

SEQ ID NO: 472180 - DNA, 19 bp, Mus musculus
  siRNA target sequence for Stau1 (NM_011490.1,1198-1216).
gaaagtaacgttttttgaa

SEQ ID NO: 472181 - DNA, 19 bp, Mus musculus
  siRNA target sequence for Stau1 (NM_011490.1,1333-1351).
ggctgtcggggttagtcaa

SEQ ID NO: 472182 - DNA, 19 bp, Mus musculus
  siRNA target sequence for Stau1 (NM_011490.1,1353-1371).
gacaccacaccaaagattt

SEQ ID NO: 472183 - DNA, 19 bp, Mus musculus
  siRNA target sequence for Stau1 (NM_011490.1,1452-1470).
ccacagccgagaccatttt

SEQ ID NO: 472184 - DNA, 19 bp, Mus musculus
  siRNA target sequence for Stau1 (NM_011490.1,1453-1471).
cacagccgagaccatttta

SEQ ID NO: 472185 - DNA, 19 bp, Mus musculus
  siRNA target sequence for Stau1 (NM_011490.1,1455-1473).
cagccgagaccattttaaa

SEQ ID NO: 472186 - DNA, 19 bp, Mus musculus
  siRNA target sequence for Stau1 (NM_011490.1,1518-1536).
gaccctctgagcaactgta

SEQ ID NO: 472187 - DNA, 19 bp, Mus musculus
  siRNA target sequence for Stau1 (NM_011490.1,1667-1685).
gtggagtcctgtcatgata

SEQ ID NO: 472188 - DNA, 19 bp, Mus musculus
  siRNA target sequence for Stau1 (NM_011490.1,1687-1705).
ggctgcactgaacatttta

SEQ ID NO: 472189 - DNA, 19 bp, Mus musculus
  siRNA target sequence for Stau2 (NM_025303.1,124-142).
gaaaaggagcctgattaca

SEQ ID NO: 472190 - DNA, 19 bp, Mus musculus
  siRNA target sequence for Stau2 (NM_025303.1,169-187).
cgccgtcgagagttcgtaa

SEQ ID NO: 472191 - DNA, 19 bp, Mus musculus
  siRNA target sequence for Stau2 (NM_025303.1,170-188).
gccgtcgagagttcgtaat

SEQ ID NO: 472192 - DNA, 19 bp, Mus musculus
  siRNA target sequence for Stau2 (NM_025303.1,173-191).
gtcgagagttcgtaatgca

SEQ ID NO: 472193 - DNA, 19 bp, Mus musculus
  siRNA target sequence for Stau2 (NM_025303.1,218-236).
ctggaacaggacccaataa

SEQ ID NO: 472194 - DNA, 19 bp, Mus musculus
  siRNA target sequence for Stau2 (NM_025303.1,260-278).
ctgaagcaatgctgttaca

SEQ ID NO: 472195 - DNA, 19 bp, Mus musculus
  siRNA target sequence for Stau2 (NM_025303.1,362-380).
ggtttcctgaaccaacaaa

SEQ ID NO: 472196 - DNA, 19 bp, Mus musculus
  siRNA target sequence for Stau2 (NM_025303.1,367-385).
cctgaaccaacaaataaca

SEQ ID NO: 472197 - DNA, 19 bp, Mus musculus
  siRNA target sequence for Stau2 (NM_025303.1,413-431).
ctgatgtttatcaagagat

SEQ ID NO: 472198 - DNA, 19 bp, Mus musculus
  siRNA target sequence for Stau2 (NM_025303.1,453-471).
gacctctggcacaactcta

SEQ ID NO: 472199 - DNA, 19 bp, Mus musculus
  siRNA target sequence for Stau2 (NM_025303.1,458-476).
ctggcacaactctaagcta

SEQ ID NO: 472200 - DNA, 19 bp, Mus musculus
  siRNA target sequence for Stau2 (NM_025303.1,523-541).
gtgtctccctcatcaacta

SEQ ID NO: 472201 - DNA, 19 bp, Mus musculus
  siRNA target sequence for Stau2 (NM_025303.1,525-543).
gtctccctcatcaactagt

SEQ ID NO: 472202 - DNA, 19 bp, Mus musculus
  siRNA target sequence for Stau2 (NM_025303.1,556-574).
gccagggaactccttatga

SEQ ID NO: 472203 - DNA, 19 bp, Mus musculus
  siRNA target sequence for Stau2 (NM_025303.1,557-575).
ccagggaactccttatgaa

SEQ ID NO: 472204 - DNA, 19 bp, Mus musculus
  siRNA target sequence for Stau2 (NM_025303.1,558-576).
cagggaactccttatgaat

SEQ ID NO: 472205 - DNA, 19 bp, Mus musculus
  siRNA target sequence for Stau2 (NM_025303.1,592-610).
gctgaagccataggtttaa

SEQ ID NO: 472206 - DNA, 19 bp, Mus musculus
  siRNA target sequence for Stau2 (NM_025303.1,593-611).
ctgaagccataggtttaaa

SEQ ID NO: 472207 - DNA, 19 bp, Mus musculus
  siRNA target sequence for Stau2 (NM_025303.1,598-616).
gccataggtttaaaaggaa

SEQ ID NO: 472208 - DNA, 19 bp, Mus musculus
  siRNA target sequence for Stau2 (NM_025303.1,663-681).
ggaatatttagcaaggatt

SEQ ID NO: 472209 - DNA, 19 bp, Mus musculus
  siRNA target sequence for Tarbp2 (NM_009319.1,107-125).
cagggctccggcactacta

SEQ ID NO: 472210 - DNA, 19 bp, Mus musculus
  siRNA target sequence for Tarbp2 (NM_009319.1,180-198).
ccccgatcagccttcttca

SEQ ID NO: 472211 - DNA, 19 bp, Mus musculus
  siRNA target sequence for Tarbp2 (NM_009319.1,202-220).
gtatgggaccagaatagga

SEQ ID NO: 472212 - DNA, 19 bp, Mus musculus
  siRNA target sequence for Tarbp2 (NM_009319.1,228-246).
ccgtgtacgaccttctcaa

SEQ ID NO: 472213 - DNA, 19 bp, Mus musculus
  siRNA target sequence for Tarbp2 (NM_009319.1,229-247).
cgtgtacgaccttctcaaa

SEQ ID NO: 472214 - DNA, 19 bp, Mus musculus
  siRNA target sequence for Tarbp2 (NM_009319.1,260-278).
gcccatcaacctaatttca

SEQ ID NO: 472215 - DNA, 19 bp, Mus musculus
  siRNA target sequence for Tarbp2 (NM_009319.1,644-662).
cctgctcaccgcaaagagt

SEQ ID NO: 472216 - DNA, 19 bp, Mus musculus
  siRNA target sequence for Tarbp2 (NM_009319.1,645-663).
ctgctcaccgcaaagagtt

SEQ ID NO: 472217 - DNA, 19 bp, Mus musculus
  siRNA target sequence for Tarbp2 (NM_009319.1,675-693).
gccgggtggagcgtttcat

SEQ ID NO: 472218 - DNA, 19 bp, Mus musculus
  siRNA target sequence for Tarbp2 (NM_009319.1,682-700).
ggagcgtttcattgagatt

SEQ ID NO: 472219 - DNA, 19 bp, Mus musculus
  siRNA target sequence for Tarbp2 (NM_009319.1,806-824).
cctgatgacgatcattttt

SEQ ID NO: 472220 - DNA, 19 bp, Mus musculus
  siRNA target sequence for Tarbp2 (NM_009319.1,809-827).
gatgacgatcatttttcca

SEQ ID NO: 472221 - DNA, 19 bp, Mus musculus
  siRNA target sequence for Tarbp2 (NM_009319.1,883-901).
ggattccttgcggaattct

SEQ ID NO: 472222 - DNA, 19 bp, Mus musculus
  siRNA target sequence for Tenr (NM_009350.1,166-184).
cgtcgggggagagaaaact

SEQ ID NO: 472223 - DNA, 19 bp, Mus musculus
  siRNA target sequence for Tenr (NM_009350.1,167-185).
gtcgggggagagaaaactt

SEQ ID NO: 472224 - DNA, 19 bp, Mus musculus
  siRNA target sequence for Tenr (NM_009350.1,263-281).
ccatcagctcagacagtaa

SEQ ID NO: 472225 - DNA, 19 bp, Mus musculus
  siRNA target sequence for Tenr (NM_009350.1,309-327).
gttgtagtctgtcgaatat

SEQ ID NO: 472226 - DNA, 19 bp, Mus musculus
  siRNA target sequence for Tenr (NM_009350.1,378-396).
ccaaaggtctttcatctat

SEQ ID NO: 472227 - DNA, 19 bp, Mus musculus
  siRNA target sequence for Tenr (NM_009350.1,507-525).
gtgttcagcttgaccttaa

SEQ ID NO: 472228 - DNA, 19 bp, Mus musculus
  siRNA target sequence for Tenr (NM_009350.1,533-551).
gtaacaacaggaaatgtta

SEQ ID NO: 472229 - DNA, 19 bp, Mus musculus
  siRNA target sequence for Tenr (NM_009350.1,576-594).
ctgtggtggatggtattca

SEQ ID NO: 472230 - DNA, 19 bp, Mus musculus
  siRNA target sequence for Tenr (NM_009350.1,584-602).
gatggtattcagtacaaga

SEQ ID NO: 472231 - DNA, 19 bp, Mus musculus
  siRNA target sequence for Tenr (NM_009350.1,601-619).
gacaggactgggacagaat

SEQ ID NO: 472232 - DNA, 19 bp, Mus musculus
  siRNA target sequence for Tenr (NM_009350.1,633-651).
gatccaatgcagcaaagtt

SEQ ID NO: 472233 - DNA, 19 bp, Mus musculus
  siRNA target sequence for Tenr (NM_009350.1,654-672).
ctcttgacgagcttctaca

SEQ ID NO: 472234 - DNA, 19 bp, Mus musculus
  siRNA target sequence for Tenr (NM_009350.1,682-700).
gcctgaaccgagagtttta

SEQ ID NO: 472235 - DNA, 19 bp, Mus musculus
  siRNA target sequence for Tenr (NM_009350.1,746-764).
cctgaagcagcatatgttt

SEQ ID NO: 472236 - DNA, 19 bp, Mus musculus
  siRNA target sequence for Tenr (NM_009350.1,791-809).
gtccagtatgccaagattt

SEQ ID NO: 472237 - DNA, 19 bp, Mus musculus
  siRNA target sequence for Tenr (NM_009350.1,824-842).
gaaacatttggtcaactaa

SEQ ID NO: 472238 - DNA, 19 bp, Mus musculus
  siRNA target sequence for Tenr (NM_009350.1,846-864).
ctaatcactcacaatatct

SEQ ID NO: 472239 - DNA, 19 bp, Mus musculus
  siRNA target sequence for Tenr (NM_009350.1,879-897).
cattggctgctttcattat

SEQ ID NO: 472240 - DNA, 19 bp, Mus musculus
  siRNA target sequence for Tenr (NM_009350.1,978-996).
gggtgctgcacgatactca

SEQ ID NO: 472241 - DNA, 19 bp, Mus musculus
  siRNA target sequence for Tenr (NM_009350.1,979-997).
ggtgctgcacgatactcat

SEQ ID NO: 472242 - DNA, 19 bp, Mus musculus
  siRNA target sequence for Tenr (NM_009350.1,988-1006).
cgatactcatgcagttgtt

SEQ ID NO: 472243 - DNA, 19 bp, Mus musculus
  siRNA target sequence for Tenr (NM_009350.1,1014-1032).
gaaggtctctccttaggta

SEQ ID NO: 472244 - DNA, 19 bp, Mus musculus
  siRNA target sequence for Tenr (NM_009350.1,1070-1088).
cctgctatgatggaaaagt

SEQ ID NO: 472245 - DNA, 19 bp, Mus musculus
  siRNA target sequence for Tenr (NM_009350.1,1073-1091).
gctatgatggaaaagtcaa

SEQ ID NO: 472246 - DNA, 19 bp, Mus musculus
  siRNA target sequence for Tenr (NM_009350.1,1074-1092).
ctatgatggaaaagtcaat

SEQ ID NO: 472247 - DNA, 19 bp, Mus musculus
  siRNA target sequence for Tenr (NM_009350.1,1081-1099).
ggaaaagtcaatcttttgt

SEQ ID NO: 472248 - DNA, 19 bp, Mus musculus
  siRNA target sequence for Tenr (NM_009350.1,1106-1124).
ccagcttctaatctactta

SEQ ID NO: 472249 - DNA, 19 bp, Mus musculus
  siRNA target sequence for Tenr (NM_009350.1,1175-1193).
ggatcagcccagattaagt

SEQ ID NO: 472250 - DNA, 19 bp, Mus musculus
  siRNA target sequence for Tenr (NM_009350.1,1192-1210).
gtcacagttacgccttaat

SEQ ID NO: 472251 - DNA, 19 bp, Mus musculus
  siRNA target sequence for Tenr (NM_009350.1,1202-1220).
cgccttaatccacattcta

SEQ ID NO: 472252 - DNA, 19 bp, Mus musculus
  siRNA target sequence for Tenr (NM_009350.1,1203-1221).
gccttaatccacattctat

SEQ ID NO: 472253 - DNA, 19 bp, Mus musculus
  siRNA target sequence for Tenr (NM_009350.1,1204-1222).
ccttaatccacattctatt

SEQ ID NO: 472254 - DNA, 19 bp, Mus musculus
  siRNA target sequence for Tenr (NM_009350.1,1261-1279).
ggctgttgaaggcaaaatt

SEQ ID NO: 472255 - DNA, 19 bp, Mus musculus
  siRNA target sequence for Tenr (NM_009350.1,1302-1320).
cagacggggttaatagagt

SEQ ID NO: 472256 - DNA, 19 bp, Mus musculus
  siRNA target sequence for Tenr (NM_009350.1,1304-1322).
gacggggttaatagagtaa

SEQ ID NO: 472257 - DNA, 19 bp, Mus musculus
  siRNA target sequence for Tenr (NM_009350.1,1307-1325).
ggggttaatagagtaaaca

SEQ ID NO: 472258 - DNA, 19 bp, Mus musculus
  siRNA target sequence for Tenr (NM_009350.1,1309-1327).
ggttaatagagtaaacagt

SEQ ID NO: 472259 - DNA, 19 bp, Mus musculus
  siRNA target sequence for Tenr (NM_009350.1,1379-1397).
gccttgctgagtcacttta

SEQ ID NO: 472260 - DNA, 19 bp, Mus musculus
  siRNA target sequence for Tenr (NM_009350.1,1381-1399).
cttgctgagtcactttata

SEQ ID NO: 472261 - DNA, 19 bp, Mus musculus
  siRNA target sequence for Tenr (NM_009350.1,1393-1411).
ctttatacagccagtttat

SEQ ID NO: 472262 - DNA, 19 bp, Mus musculus
  siRNA target sequence for Tenr (NM_009350.1,1457-1475).
ggcttagaaatcgcaataa

SEQ ID NO: 472263 - DNA, 19 bp, Mus musculus
  siRNA target sequence for Tenr (NM_009350.1,1458-1476).
gcttagaaatcgcaataaa

SEQ ID NO: 472264 - DNA, 19 bp, Mus musculus
  siRNA target sequence for Tenr (NM_009350.1,1503-1521).
caaaactgcccatgtttta

SEQ ID NO: 472265 - DNA, 19 bp, Mus musculus
  siRNA target sequence for Tenr (NM_009350.1,1526-1544).
gtcaacagacctcatatta

SEQ ID NO: 472266 - DNA, 19 bp, Mus musculus
  siRNA target sequence for Tenr (NM_009350.1,1531-1549).
cagacctcatattagctta

SEQ ID NO: 472267 - DNA, 19 bp, Mus musculus
  siRNA target sequence for Tenr (NM_009350.1,1559-1577).
gcatatcctctgcagataa

SEQ ID NO: 472268 - DNA, 19 bp, Mus musculus
  siRNA target sequence for Tenr (NM_009350.1,1586-1604).
cataaatcactcagtttga

SEQ ID NO: 472269 - DNA, 19 bp, Mus musculus
  siRNA target sequence for Tenr (NM_009350.1,1609-1627).
ggcacaaggggacaattct

SEQ ID NO: 472270 - DNA, 19 bp, Mus musculus
  siRNA target sequence for Tenr (NM_009350.1,1610-1628).
gcacaaggggacaattctt

SEQ ID NO: 472271 - DNA, 19 bp, Mus musculus
  siRNA target sequence for Tenr (NM_009350.1,1633-1651).
gattgtggatggcctaaat

SEQ ID NO: 472272 - DNA, 19 bp, Mus musculus
  siRNA target sequence for Tenr (NM_009350.1,1643-1661).
ggcctaaatgggaagatta

SEQ ID NO: 472273 - DNA, 19 bp, Mus musculus
  siRNA target sequence for Tenr (NM_009350.1,1645-1663).
cctaaatgggaagattact

SEQ ID NO: 472274 - DNA, 19 bp, Mus musculus
  siRNA target sequence for Tenr (NM_009350.1,1652-1670).
gggaagattactgaaagtt

SEQ ID NO: 472275 - DNA, 19 bp, Mus musculus
  siRNA target sequence for Tenr (NM_009350.1,1790-1808).
cacgcggctaagtgtatgt

SEQ ID NO: 472276 - DNA, 19 bp, Mus musculus
  siRNA target sequence for Tenr (NM_009350.1,1792-1810).
cgcggctaagtgtatgtct

SEQ ID NO: 472277 - DNA, 19 bp, Mus musculus
  siRNA target sequence for Tenr (NM_009350.1,1807-1825).
gtctggaccctatcaagaa

SEQ ID NO: 472278 - DNA, 19 bp, Mus musculus
  siRNA target sequence for Tenr (NM_009350.1,1868-1886).
ggctcctggattgtgaaat

SEQ ID NO: 472279 - DNA, 19 bp, Mus musculus
  siRNA target sequence for Tenr (NM_009350.1,1887-1905).
ctccctgtatagagcaatt

SEQ ID NO: 472280 - DNA, 19 bp, Mus musculus
  siRNA target sequence for Tenr (NM_009350.1,1889-1907).
ccctgtatagagcaattta

SEQ ID NO: 472281 - DNA, 19 bp, Mus musculus
  siRNA target sequence for Tenr (NM_009350.1,1891-1909).
ctgtatagagcaatttagt

SEQ ID NO: 472282 - DNA, 19 bp, Mus musculus
  siRNA target sequence for Tlr3 (NM_126166.2,365-383).
gaaagggtgttcctcttat

SEQ ID NO: 472283 - DNA, 19 bp, Mus musculus
  siRNA target sequence for Tlr3 (NM_126166.2,369-387).
gggtgttcctcttatctaa

SEQ ID NO: 472284 - DNA, 19 bp, Mus musculus
  siRNA target sequence for Tlr3 (NM_126166.2,373-391).
gttcctcttatctaatgta

SEQ ID NO: 472285 - DNA, 19 bp, Mus musculus
  siRNA target sequence for Tlr3 (NM_126166.2,403-421).
gacttttgtccctatggat

SEQ ID NO: 472286 - DNA, 19 bp, Mus musculus
  siRNA target sequence for Tlr3 (NM_126166.2,468-486).
gctgactgcagccatttga

SEQ ID NO: 472287 - DNA, 19 bp, Mus musculus
  siRNA target sequence for Tlr3 (NM_126166.2,469-487).
ctgactgcagccatttgaa

SEQ ID NO: 472288 - DNA, 19 bp, Mus musculus
  siRNA target sequence for Tlr3 (NM_126166.2,504-522).
gatgatcttccctctaaca

SEQ ID NO: 472289 - DNA, 19 bp, Mus musculus
  siRNA target sequence for Tlr3 (NM_126166.2,507-525).
gatcttccctctaacataa

SEQ ID NO: 472290 - DNA, 19 bp, Mus musculus
  siRNA target sequence for Tlr3 (NM_126166.2,521-539).
cataacagtgttgaatctt

SEQ ID NO: 472291 - DNA, 19 bp, Mus musculus
  siRNA target sequence for Tlr3 (NM_126166.2,526-544).
cagtgttgaatcttactca

SEQ ID NO: 472292 - DNA, 19 bp, Mus musculus
  siRNA target sequence for Tlr3 (NM_126166.2,545-563).
caaccaactcagaagatta

SEQ ID NO: 472293 - DNA, 19 bp, Mus musculus
  siRNA target sequence for Tlr3 (NM_126166.2,564-582).
ccacctaccaactttacaa

SEQ ID NO: 472294 - DNA, 19 bp, Mus musculus
  siRNA target sequence for Tlr3 (NM_126166.2,583-601).
gatacagccaacttgctat

SEQ ID NO: 472295 - DNA, 19 bp, Mus musculus
  siRNA target sequence for Tlr3 (NM_126166.2,609-627).
gcaggatttaactccattt

SEQ ID NO: 472296 - DNA, 19 bp, Mus musculus
  siRNA target sequence for Tlr3 (NM_126166.2,649-667).
gccaaatactccctttgtt

SEQ ID NO: 472297 - DNA, 19 bp, Mus musculus
  siRNA target sequence for Tlr3 (NM_126166.2,651-669).
caaatactccctttgttga

SEQ ID NO: 472298 - DNA, 19 bp, Mus musculus
  siRNA target sequence for Tlr3 (NM_126166.2,661-679).
ctttgttgaaagtattgaa

SEQ ID NO: 472299 - DNA, 19 bp, Mus musculus
  siRNA target sequence for Tlr3 (NM_126166.2,672-690).
gtattgaacctgcaacata

SEQ ID NO: 472300 - DNA, 19 bp, Mus musculus
  siRNA target sequence for Tlr3 (NM_126166.2,704-722).
gatttctgatcaaaccttt

SEQ ID NO: 472301 - DNA, 19 bp, Mus musculus
  siRNA target sequence for Tlr3 (NM_126166.2,744-762).
gaactcgatctaatgtcta

SEQ ID NO: 472302 - DNA, 19 bp, Mus musculus
  siRNA target sequence for Tlr3 (NM_126166.2,747-765).
ctcgatctaatgtctaact

SEQ ID NO: 472303 - DNA, 19 bp, Mus musculus
  siRNA target sequence for Tlr3 (NM_126166.2,749-767).
cgatctaatgtctaactca

SEQ ID NO: 472304 - DNA, 19 bp, Mus musculus
  siRNA target sequence for Tlr3 (NM_126166.2,750-768).
gatctaatgtctaactcaa

SEQ ID NO: 472305 - DNA, 19 bp, Mus musculus
  siRNA target sequence for Tlr3 (NM_126166.2,801-819).
cagaagaatctaatcaaat

SEQ ID NO: 472306 - DNA, 19 bp, Mus musculus
  siRNA target sequence for Tlr3 (NM_126166.2,822-840).
gatttgtctcataatggtt

SEQ ID NO: 472307 - DNA, 19 bp, Mus musculus
  siRNA target sequence for Tlr3 (NM_126166.2,827-845).
gtctcataatggtttatca

SEQ ID NO: 472308 - DNA, 19 bp, Mus musculus
  siRNA target sequence for Tlr3 (NM_126166.2,837-855).
ggtttatcatctacaaagt

SEQ ID NO: 472309 - DNA, 19 bp, Mus musculus
  siRNA target sequence for Tlr3 (NM_126166.2,838-856).
gtttatcatctacaaagtt

SEQ ID NO: 472310 - DNA, 19 bp, Mus musculus
  siRNA target sequence for Tlr3 (NM_126166.2,914-932).
ccttgcgttgcgaagtgaa

SEQ ID NO: 472311 - DNA, 19 bp, Mus musculus
  siRNA target sequence for Tlr3 (NM_126166.2,919-937).
cgttgcgaagtgaagaact

SEQ ID NO: 472312 - DNA, 19 bp, Mus musculus
  siRNA target sequence for Tlr3 (NM_126166.2,948-966).
ggcaattcttctttacgaa

SEQ ID NO: 472313 - DNA, 19 bp, Mus musculus
  siRNA target sequence for Tlr3 (NM_126166.2,949-967).
gcaattcttctttacgaaa

SEQ ID NO: 472314 - DNA, 19 bp, Mus musculus
  siRNA target sequence for Tlr3 (NM_126166.2,963-981).
cgaaagttggacttgtcat

SEQ ID NO: 472315 - DNA, 19 bp, Mus musculus
  siRNA target sequence for Tlr3 (NM_126166.2,968-986).
gttggacttgtcatcaaat

SEQ ID NO: 472316 - DNA, 19 bp, Mus musculus
  siRNA target sequence for Tlr3 (NM_126166.2,971-989).
ggacttgtcatcaaatcca

SEQ ID NO: 472317 - DNA, 19 bp, Mus musculus
  siRNA target sequence for Tlr3 (NM_126166.2,977-995).
gtcatcaaatccacttaaa

SEQ ID NO: 472318 - DNA, 19 bp, Mus musculus
  siRNA target sequence for Tlr3 (NM_126166.2,1007-1025).
ggggtgtttccagacaatt

SEQ ID NO: 472319 - DNA, 19 bp, Mus musculus
  siRNA target sequence for Tlr3 (NM_126166.2,1085-1103).
gctttgctgggaactttca

SEQ ID NO: 472320 - DNA, 19 bp, Mus musculus
  siRNA target sequence for Tlr3 (NM_126166.2,1086-1104).
ctttgctgggaactttcaa

SEQ ID NO: 472321 - DNA, 19 bp, Mus musculus
  siRNA target sequence for Tlr3 (NM_126166.2,1191-1209).
ctcacccagctcgatcttt

SEQ ID NO: 472322 - DNA, 19 bp, Mus musculus
  siRNA target sequence for Tlr3 (NM_126166.2,1195-1213).
cccagctcgatctttccta

SEQ ID NO: 472323 - DNA, 19 bp, Mus musculus
  siRNA target sequence for Tlr3 (NM_126166.2,1274-1292).
gtctctggagtacaacaat

SEQ ID NO: 472324 - DNA, 19 bp, Mus musculus
  siRNA target sequence for Tlr3 (NM_126166.2,1276-1294).
ctctggagtacaacaatat

SEQ ID NO: 472325 - DNA, 19 bp, Mus musculus
  siRNA target sequence for Tlr3 (NM_126166.2,1307-1325).
ccctcgctctttttatgga

SEQ ID NO: 472326 - DNA, 19 bp, Mus musculus
  siRNA target sequence for Tlr3 (NM_126166.2,1355-1373).
gcgagcatttactaagcaa

SEQ ID NO: 472327 - DNA, 19 bp, Mus musculus
  siRNA target sequence for Tlr3 (NM_126166.2,1356-1374).
cgagcatttactaagcaaa

SEQ ID NO: 472328 - DNA, 19 bp, Mus musculus
  siRNA target sequence for Tlr3 (NM_126166.2,1360-1378).
catttactaagcaaagtgt

SEQ ID NO: 472329 - DNA, 19 bp, Mus musculus
  siRNA target sequence for Tlr3 (NM_126166.2,1404-1422).
gacgatttttcctttcaat

SEQ ID NO: 472330 - DNA, 19 bp, Mus musculus
  siRNA target sequence for Tlr3 (NM_126166.2,1414-1432).
cctttcaatggttaaaata

SEQ ID NO: 472331 - DNA, 19 bp, Mus musculus
  siRNA target sequence for Tlr3 (NM_126166.2,1423-1441).
ggttaaaatatttggaata

SEQ ID NO: 472332 - DNA, 19 bp, Mus musculus
  siRNA target sequence for Tlr3 (NM_126166.2,1495-1513).
gattggtgagtctgaagta

SEQ ID NO: 472333 - DNA, 19 bp, Mus musculus
  siRNA target sequence for Tlr3 (NM_126166.2,1521-1539).
ctttccaaaactttcacaa

SEQ ID NO: 472334 - DNA, 19 bp, Mus musculus
  siRNA target sequence for Tlr3 (NM_126166.2,1525-1543).
ccaaaactttcacaagttt

SEQ ID NO: 472335 - DNA, 19 bp, Mus musculus
  siRNA target sequence for Tlr3 (NM_126166.2,1545-1563).
caaactttaacaaatgaaa

SEQ ID NO: 472336 - DNA, 19 bp, Mus musculus
  siRNA target sequence for Tlr3 (NM_126166.2,1589-1607).
cttgctcactctcaactta

SEQ ID NO: 472337 - DNA, 19 bp, Mus musculus
  siRNA target sequence for Tlr3 (NM_126166.2,1593-1611).
ctcactctcaacttaacga

SEQ ID NO: 472338 - DNA, 19 bp, Mus musculus
  siRNA target sequence for Tlr3 (NM_126166.2,1595-1613).
cactctcaacttaacgaaa

SEQ ID NO: 472339 - DNA, 19 bp, Mus musculus
  siRNA target sequence for Tlr3 (NM_126166.2,1622-1640).
ctcaaaaatagcaaatggt

SEQ ID NO: 472340 - DNA, 19 bp, Mus musculus
  siRNA target sequence for Tlr3 (NM_126166.2,1657-1675).
gccaactcaggatacttga

SEQ ID NO: 472341 - DNA, 19 bp, Mus musculus
  siRNA target sequence for Tlr3 (NM_126166.2,1658-1676).
ccaactcaggatacttgat

SEQ ID NO: 472342 - DNA, 19 bp, Mus musculus
  siRNA target sequence for Tlr3 (NM_126166.2,1674-1692).
gatctcggccttaatgaaa

SEQ ID NO: 472343 - DNA, 19 bp, Mus musculus
  siRNA target sequence for Tlr3 (NM_126166.2,1679-1697).
cggccttaatgaaattgaa

SEQ ID NO: 472344 - DNA, 19 bp, Mus musculus
  siRNA target sequence for Tlr3 (NM_126166.2,1682-1700).
ccttaatgaaattgaacaa

SEQ ID NO: 472345 - DNA, 19 bp, Mus musculus
  siRNA target sequence for Tlr3 (NM_126166.2,1721-1739).
gagaggtctgagaaatata

SEQ ID NO: 472346 - DNA, 19 bp, Mus musculus
  siRNA target sequence for Tlr3 (NM_126166.2,1723-1741).
gaggtctgagaaatatatt

SEQ ID NO: 472347 - DNA, 19 bp, Mus musculus
  siRNA target sequence for Tlr3 (NM_126166.2,1743-1761).
gagatctacctatcctata

SEQ ID NO: 472348 - DNA, 19 bp, Mus musculus
  siRNA target sequence for Tlr3 (NM_126166.2,1799-1817).
ggtccccagccttcaaaga

SEQ ID NO: 472349 - DNA, 19 bp, Mus musculus
  siRNA target sequence for Tlr3 (NM_126166.2,1826-1844).
caggagggtggcccttaaa

SEQ ID NO: 472350 - DNA, 19 bp, Mus musculus
  siRNA target sequence for Tlr3 (NM_126166.2,1828-1846).
ggagggtggcccttaaaaa

SEQ ID NO: 472351 - DNA, 19 bp, Mus musculus
  siRNA target sequence for Tlr3 (NM_126166.2,1829-1847).
gagggtggcccttaaaaat

SEQ ID NO: 472352 - DNA, 19 bp, Mus musculus
  siRNA target sequence for Tlr3 (NM_126166.2,1831-1849).
gggtggcccttaaaaatgt

SEQ ID NO: 472353 - DNA, 19 bp, Mus musculus
  siRNA target sequence for Tlr3 (NM_126166.2,1837-1855).
cccttaaaaatgtggatat

SEQ ID NO: 472354 - DNA, 19 bp, Mus musculus
  siRNA target sequence for Tlr3 (NM_126166.2,1867-1885).
ctttccgccctcttcgtaa

SEQ ID NO: 472355 - DNA, 19 bp, Mus musculus
  siRNA target sequence for Tlr3 (NM_126166.2,1872-1890).
cgccctcttcgtaacttga

SEQ ID NO: 472356 - DNA, 19 bp, Mus musculus
  siRNA target sequence for Tlr3 (NM_126166.2,1891-1909).
ccattctggacttaagcaa

SEQ ID NO: 472357 - DNA, 19 bp, Mus musculus
  siRNA target sequence for Tlr3 (NM_126166.2,1946-1964).
gggtcttgagaatctagaa

SEQ ID NO: 472358 - DNA, 19 bp, Mus musculus
  siRNA target sequence for Tlr3 (NM_126166.2,1947-1965).
ggtcttgagaatctagaaa

SEQ ID NO: 472359 - DNA, 19 bp, Mus musculus
  siRNA target sequence for Tlr3 (NM_126166.2,1948-1966).
gtcttgagaatctagaaat

SEQ ID NO: 472360 - DNA, 19 bp, Mus musculus
  siRNA target sequence for Tlr3 (NM_126166.2,1971-1989).
gattttcagcacaataact

SEQ ID NO: 472361 - DNA, 19 bp, Mus musculus
  siRNA target sequence for Tlr3 (NM_126166.2,2015-2033).
ccccggtggtcccgttaat

SEQ ID NO: 472362 - DNA, 19 bp, Mus musculus
  siRNA target sequence for Tlr3 (NM_126166.2,2016-2034).
cccggtggtcccgttaatt

SEQ ID NO: 472363 - DNA, 19 bp, Mus musculus
  siRNA target sequence for Tlr3 (NM_126166.2,2017-2035).
ccggtggtcccgttaattt

SEQ ID NO: 472364 - DNA, 19 bp, Mus musculus
  siRNA target sequence for Tlr3 (NM_126166.2,2020-2038).
gtggtcccgttaatttcct

SEQ ID NO: 472365 - DNA, 19 bp, Mus musculus
  siRNA target sequence for Tlr3 (NM_126166.2,2052-2070).
cacctccacatcttgaatt

SEQ ID NO: 472366 - DNA, 19 bp, Mus musculus
  siRNA target sequence for Tlr3 (NM_126166.2,2075-2093).
gtccaacggcttagatgaa

SEQ ID NO: 472367 - DNA, 19 bp, Mus musculus
  siRNA target sequence for Tlr3 (NM_126166.2,2077-2095).
ccaacggcttagatgaaat

SEQ ID NO: 472368 - DNA, 19 bp, Mus musculus
  siRNA target sequence for Tlr3 (NM_126166.2,2097-2115).
ccagtcggggttttcaaga

SEQ ID NO: 472369 - DNA, 19 bp, Mus musculus
  siRNA target sequence for Tlr3 (NM_126166.2,2098-2116).
cagtcggggttttcaagaa

SEQ ID NO: 472370 - DNA, 19 bp, Mus musculus
  siRNA target sequence for Tlr3 (NM_126166.2,2100-2118).
gtcggggttttcaagaact

SEQ ID NO: 472371 - DNA, 19 bp, Mus musculus
  siRNA target sequence for Tlr3 (NM_126166.2,2102-2120).
cggggttttcaagaactta

SEQ ID NO: 472372 - DNA, 19 bp, Mus musculus
  siRNA target sequence for Tlr3 (NM_126166.2,2103-2121).
ggggttttcaagaacttat

SEQ ID NO: 472373 - DNA, 19 bp, Mus musculus
  siRNA target sequence for Tlr3 (NM_126166.2,2123-2141).
cgaactaaagagcatcaat

SEQ ID NO: 472374 - DNA, 19 bp, Mus musculus
  siRNA target sequence for Tlr3 (NM_126166.2,2162-2180).
caaacttgaaccattcatt

SEQ ID NO: 472375 - DNA, 19 bp, Mus musculus
  siRNA target sequence for Tlr3 (NM_126166.2,2216-2234).
ccagaagaacctcataaca

SEQ ID NO: 472376 - DNA, 19 bp, Mus musculus
  siRNA target sequence for Tlr3 (NM_126166.2,2219-2237).
gaagaacctcataacatct

SEQ ID NO: 472377 - DNA, 19 bp, Mus musculus
  siRNA target sequence for Tlr3 (NM_126166.2,2222-2240).
gaacctcataacatctgtt

SEQ ID NO: 472378 - DNA, 19 bp, Mus musculus
  siRNA target sequence for Tlr3 (NM_126166.2,2306-2324).
cgactgcacgtgtgaaagt

SEQ ID NO: 472379 - DNA, 19 bp, Mus musculus
  siRNA target sequence for Tlr3 (NM_126166.2,2393-2411).
ctgtaacactccacatcat

SEQ ID NO: 472380 - DNA, 19 bp, Mus musculus
  siRNA target sequence for Tlr3 (NM_126166.2,2395-2413).
gtaacactccacatcatta

SEQ ID NO: 472381 - DNA, 19 bp, Mus musculus
  siRNA target sequence for Tlr3 (NM_126166.2,2399-2417).
cactccacatcattattat

SEQ ID NO: 472382 - DNA, 19 bp, Mus musculus
  siRNA target sequence for Tlr3 (NM_126166.2,2424-2442).
cccctgaagcttttcgata

SEQ ID NO: 472383 - DNA, 19 bp, Mus musculus
  siRNA target sequence for Tlr3 (NM_126166.2,2427-2445).
ctgaagcttttcgatacat

SEQ ID NO: 472384 - DNA, 19 bp, Mus musculus
  siRNA target sequence for Tlr3 (NM_126166.2,2438-2456).
cgatacatcatcctgtaaa

SEQ ID NO: 472385 - DNA, 19 bp, Mus musculus
  siRNA target sequence for Tlr3 (NM_126166.2,2472-2490).
gaactcctcttcataatca

SEQ ID NO: 472386 - DNA, 19 bp, Mus musculus
  siRNA target sequence for Tlr3 (NM_126166.2,2541-2559).
gagggctggaggatctctt

SEQ ID NO: 472387 - DNA, 19 bp, Mus musculus
  siRNA target sequence for Tlr3 (NM_126166.2,2545-2563).
gctggaggatctcttttta

SEQ ID NO: 472388 - DNA, 19 bp, Mus musculus
  siRNA target sequence for Tlr3 (NM_126166.2,2628-2646).
gaatatacagcctacataa

SEQ ID NO: 472389 - DNA, 19 bp, Mus musculus
  siRNA target sequence for Tlr3 (NM_126166.2,2763-2781).
cttgaagcaattgttaata

SEQ ID NO: 472390 - DNA, 19 bp, Mus musculus
  siRNA target sequence for Tlr3 (NM_126166.2,2766-2784).
gaagcaattgttaatagca

SEQ ID NO: 472391 - DNA, 19 bp, Mus musculus
  siRNA target sequence for Tlr3 (NM_126166.2,2791-2809).
gaagccgaaaaatcatttt

SEQ ID NO: 472392 - DNA, 19 bp, Mus musculus
  siRNA target sequence for Tlr3 (NM_126166.2,2835-2853).
gaccctctgtgcagaagat

SEQ ID NO: 472393 - DNA, 19 bp, Mus musculus
  siRNA target sequence for Tlr3 (NM_126166.2,2848-2866).
gaagattcaaggtacatca

SEQ ID NO: 472394 - DNA, 19 bp, Mus musculus
  siRNA target sequence for Tlr3 (NM_126166.2,2867-2885).
cgcagttcagcaagctatt

SEQ ID NO: 472395 - DNA, 19 bp, Mus musculus
  siRNA target sequence for Tlr3 (NM_126166.2,2886-2904).
gagcaaaatctggattcaa

SEQ ID NO: 472396 - DNA, 19 bp, Mus musculus
  siRNA target sequence for Tlr3 (NM_126166.2,2963-2981).
gcgaagaggaatgtttaaa

SEQ ID NO: 472397 - DNA, 19 bp, Mus musculus
  siRNA target sequence for Tlr3 (NM_126166.2,2964-2982).
cgaagaggaatgtttaaat

SEQ ID NO: 472398 - DNA, 19 bp, Mus musculus
  siRNA target sequence for Tlr3 (NM_126166.2,2996-3014).
gaactggccagttcagaaa

SEQ ID NO: 472399 - DNA, 19 bp, Mus musculus
  siRNA target sequence for Tlr3 (NM_126166.2,2999-3017).
ctggccagttcagaaagaa

SEQ ID NO: 472400 - DNA, 19 bp, Mus musculus
  siRNA target sequence for Tlr3 (NM_126166.2,3019-3037).
ggataaatgcctttcatca

SEQ ID NO: 472401 - DNA, 19 bp, Mus musculus
  siRNA target sequence for Tlr3 (NM_126166.2,3028-3046).
cctttcatcataaattgca

SEQ ID NO: 472402 - DNA, 19 bp, Mus musculus
  siRNA target sequence for Tlr3 (NM_126166.2,3029-3047).
ctttcatcataaattgcaa

SEQ ID NO: 472403 - DNA, 19 bp, Mus musculus
  siRNA target sequence for Zfp346 (NM_012017.1,269-287).
gtgccatgctgatttctga

SEQ ID NO: 472404 - DNA, 19 bp, Mus musculus
  siRNA target sequence for Zfp346 (NM_012017.1,301-319).
gcgcattaccagagcaaaa

SEQ ID NO: 472405 - DNA, 19 bp, Mus musculus
  siRNA target sequence for Zfp346 (NM_012017.1,302-320).
cgcattaccagagcaaaaa

SEQ ID NO: 472406 - DNA, 19 bp, Mus musculus
  siRNA target sequence for Zfp346 (NM_012017.1,325-343).
gccaacaaagtgaagagat

SEQ ID NO: 472407 - DNA, 19 bp, Mus musculus
  siRNA target sequence for Zfp346 (NM_012017.1,330-348).
caaagtgaagagataccta

SEQ ID NO: 472408 - DNA, 19 bp, Mus musculus
  siRNA target sequence for Zfp346 (NM_012017.1,339-357).
gagatacctagcaatccat

SEQ ID NO: 472409 - DNA, 19 bp, Mus musculus
  siRNA target sequence for Zfp346 (NM_012017.1,354-372).
ccatggaatggagacaata

SEQ ID NO: 472410 - DNA, 19 bp, Mus musculus
  siRNA target sequence for Zfp346 (NM_012017.1,389-407).
ggctagactcagatcagaa

SEQ ID NO: 472411 - DNA, 19 bp, Mus musculus
  siRNA target sequence for Zfp346 (NM_012017.1,547-565).
gcagccttgcagcagaata

SEQ ID NO: 472412 - DNA, 19 bp, Mus musculus
  siRNA target sequence for Zfp346 (NM_012017.1,598-616).
ctctgccattcaacattca

SEQ ID NO: 472413 - DNA, 19 bp, Mus musculus
  siRNA target sequence for Zfp346 (NM_012017.1,750-768).
cccctgcaagacgtgtaaa

SEQ ID NO: 472414 - DNA, 19 bp, Mus musculus
  siRNA target sequence for Zfp346 (NM_012017.1,751-769).
ccctgcaagacgtgtaaaa

SEQ ID NO: 472415 - DNA, 19 bp, Mus musculus
  siRNA target sequence for Zfp346 (NM_012017.1,752-770).
cctgcaagacgtgtaaaat

SEQ ID NO: 472416 - DNA, 19 bp, Mus musculus
  siRNA target sequence for Zfp346 (NM_012017.1,755-773).
gcaagacgtgtaaaatagt

SEQ ID NO: 472417 - DNA, 19 bp, Mus musculus
  siRNA target sequence for Msi1h (NM_008629.1,112-130).
cacgacccctgcaagatgt

SEQ ID NO: 472418 - DNA, 19 bp, Mus musculus
  siRNA target sequence for Msi1h (NM_008629.1,115-133).
gacccctgcaagatgttca

SEQ ID NO: 472419 - DNA, 19 bp, Mus musculus
  siRNA target sequence for Msi1h (NM_008629.1,163-181).
gaagggctgcgcgaatact

SEQ ID NO: 472420 - DNA, 19 bp, Mus musculus
  siRNA target sequence for Msi1h (NM_008629.1,220-238).
cgggaccccctgaccaaaa

SEQ ID NO: 472421 - DNA, 19 bp, Mus musculus
  siRNA target sequence for Msi1h (NM_008629.1,222-240).
ggaccccctgaccaaaaga

SEQ ID NO: 472422 - DNA, 19 bp, Mus musculus
  siRNA target sequence for Msi1h (NM_008629.1,223-241).
gaccccctgaccaaaagat

SEQ ID NO: 472423 - DNA, 19 bp, Mus musculus
  siRNA target sequence for Msi1h (NM_008629.1,312-330).
cgagctcgactccaaaaca

SEQ ID NO: 472424 - DNA, 19 bp, Mus musculus
  siRNA target sequence for Msi1h (NM_008629.1,315-333).
gctcgactccaaaacaatt

SEQ ID NO: 472425 - DNA, 19 bp, Mus musculus
  siRNA target sequence for Msi1h (NM_008629.1,430-448).
gaagatgtgaaacactatt

SEQ ID NO: 472426 - DNA, 19 bp, Mus musculus
  siRNA target sequence for Msi1h (NM_008629.1,540-558).
cgaggacatcgtagagaaa

SEQ ID NO: 472427 - DNA, 19 bp, Mus musculus
  siRNA target sequence for Msi1h (NM_008629.1,543-561).
ggacatcgtagagaaagtt

SEQ ID NO: 472428 - DNA, 19 bp, Mus musculus
  siRNA target sequence for Msi1h (NM_008629.1,544-562).
gacatcgtagagaaagttt

SEQ ID NO: 472429 - DNA, 19 bp, Mus musculus
  siRNA target sequence for Msi1h (NM_008629.1,669-687).
catgccctacggaatggat

SEQ ID NO: 472430 - DNA, 19 bp, Mus musculus
  siRNA target sequence for Msi1h (NM_008629.1,1043-1061).
ccggggtcagcagttacat

SEQ ID NO: 472431 - DNA, 19 bp, Mus musculus
  siRNA target sequence for Msi2h (NM_054043.1,859-877).
cttcgtaggaggattgtct

SEQ ID NO: 472432 - DNA, 19 bp, Mus musculus
  siRNA target sequence for Msi2h (NM_054043.1,1072-1090).
gaaagctcagccgaaagaa

SEQ ID NO: 472433 - DNA, 19 bp, Mus musculus
  siRNA target sequence for Msi2h (NM_054043.1,1216-1234).
cggatttgctcctagctat

SEQ ID NO: 472434 - DNA, 19 bp, Mus musculus
  siRNA target sequence for Msi2h (NM_054043.1,1304-1322).
cgaggatcagtcctgaata

SEQ ID NO: 472435 - DNA, 19 bp, Mus musculus
  siRNA target sequence for Msi2h (NM_054043.1,1308-1326).
gatcagtcctgaatagcta

SEQ ID NO: 472436 - DNA, 19 bp, Mus musculus
  siRNA target sequence for Msi2h (NM_054043.1,1327-1345).
cagtgctcaaccgaatttt

SEQ ID NO: 472437 - DNA, 19 bp, Mus musculus
  siRNA target sequence for Msi2h (NM_054043.1,1416-1434).
gacctgtcgccgatctcta

SEQ ID NO: 472438 - DNA, 19 bp, Mus musculus
  siRNA target sequence for Msi2h (NM_054043.1,1455-1473).
ccggagtggggaattacat

SEQ ID NO: 472439 - DNA, 19 bp, Mus musculus
  siRNA target sequence for Msi2h (NM_054043.1,1456-1474).
cggagtggggaattacata

SEQ ID NO: 472440 - DNA, 19 bp, Mus musculus
  siRNA target sequence for Msi2h (NM_054043.1,1457-1475).
ggagtggggaattacataa

SEQ ID NO: 472441 - DNA, 19 bp, Mus musculus
  siRNA target sequence for Msi2h (NM_054043.1,1531-1549).
gattgcaacggcctttaca

SEQ ID NO: 472442 - DNA, 19 bp, Mus musculus
  siRNA target sequence for Msi2h (NM_054043.1,1539-1557).
cggcctttacaaatggata

SEQ ID NO: 472443 - DNA, 19 bp, Mus musculus
  siRNA target sequence for Piwil1 (NM_021311.2,369-387).
catccaagtcacaagaact

SEQ ID NO: 472444 - DNA, 19 bp, Mus musculus
  siRNA target sequence for Piwil1 (NM_021311.2,482-500).
cttgaccatgtcaaagagt

SEQ ID NO: 472445 - DNA, 19 bp, Mus musculus
  siRNA target sequence for Piwil1 (NM_021311.2,569-587).
cagtgggccctgtatcagt

SEQ ID NO: 472446 - DNA, 19 bp, Mus musculus
  siRNA target sequence for Piwil1 (NM_021311.2,586-604).
gtaccacatcgactacaat

SEQ ID NO: 472447 - DNA, 19 bp, Mus musculus
  siRNA target sequence for Piwil1 (NM_021311.2,677-695).
gctttcgatgggacaatat

SEQ ID NO: 472448 - DNA, 19 bp, Mus musculus
  siRNA target sequence for Piwil1 (NM_021311.2,678-696).
ctttcgatgggacaatatt

SEQ ID NO: 472449 - DNA, 19 bp, Mus musculus
  siRNA target sequence for Piwil1 (NM_021311.2,682-700).
cgatgggacaatattgttt

SEQ ID NO: 472450 - DNA, 19 bp, Mus musculus
  siRNA target sequence for Piwil1 (NM_021311.2,683-701).
gatgggacaatattgtttt

SEQ ID NO: 472451 - DNA, 19 bp, Mus musculus
  siRNA target sequence for Piwil1 (NM_021311.2,816-834).
gcctgcagttctataacat

SEQ ID NO: 472452 - DNA, 19 bp, Mus musculus
  siRNA target sequence for Piwil1 (NM_021311.2,818-836).
ctgcagttctataacatca

SEQ ID NO: 472453 - DNA, 19 bp, Mus musculus
  siRNA target sequence for Piwil1 (NM_021311.2,859-877).
catgaatttgcaacaaatt

SEQ ID NO: 472454 - DNA, 19 bp, Mus musculus
  siRNA target sequence for Piwil1 (NM_021311.2,881-899).
cggaattattacaatccaa

SEQ ID NO: 472455 - DNA, 19 bp, Mus musculus
  siRNA target sequence for Piwil1 (NM_021311.2,896-914).
ccaagtgacccgattgata

SEQ ID NO: 472456 - DNA, 19 bp, Mus musculus
  siRNA target sequence for Piwil1 (NM_021311.2,897-915).
caagtgacccgattgatat

SEQ ID NO: 472457 - DNA, 19 bp, Mus musculus
  siRNA target sequence for Piwil1 (NM_021311.2,902-920).
gacccgattgatattccaa

SEQ ID NO: 472458 - DNA, 19 bp, Mus musculus
  siRNA target sequence for Piwil1 (NM_021311.2,1020-1038).
gcgagactgtcctagactt

SEQ ID NO: 472459 - DNA, 19 bp, Mus musculus
  siRNA target sequence for Piwil1 (NM_021311.2,1034-1052).
gacttcatgttcaatctat

SEQ ID NO: 472460 - DNA, 19 bp, Mus musculus
  siRNA target sequence for Piwil1 (NM_021311.2,1114-1132).
cgttctcaccaagtacaat

SEQ ID NO: 472461 - DNA, 19 bp, Mus musculus
  siRNA target sequence for Piwil1 (NM_021311.2,1115-1133).
gttctcaccaagtacaata

SEQ ID NO: 472462 - DNA, 19 bp, Mus musculus
  siRNA target sequence for Piwil1 (NM_021311.2,1118-1136).
ctcaccaagtacaataaca

SEQ ID NO: 472463 - DNA, 19 bp, Mus musculus
  siRNA target sequence for Piwil1 (NM_021311.2,1145-1163).
cgggtggatgacattgact

SEQ ID NO: 472464 - DNA, 19 bp, Mus musculus
  siRNA target sequence for Piwil1 (NM_021311.2,1160-1178).
gactgggaccagaatccaa

SEQ ID NO: 472465 - DNA, 19 bp, Mus musculus
  siRNA target sequence for Piwil1 (NM_021311.2,1360-1378).
cacaggcctgactgataaa

SEQ ID NO: 472466 - DNA, 19 bp, Mus musculus
  siRNA target sequence for Piwil1 (NM_021311.2,1362-1380).
caggcctgactgataaaat

SEQ ID NO: 472467 - DNA, 19 bp, Mus musculus
  siRNA target sequence for Piwil1 (NM_021311.2,1382-1400).
cgcaatgatttcaatgtga

SEQ ID NO: 472468 - DNA, 19 bp, Mus musculus
  siRNA target sequence for Piwil1 (NM_021311.2,1383-1401).
gcaatgatttcaatgtgat

SEQ ID NO: 472469 - DNA, 19 bp, Mus musculus
  siRNA target sequence for Piwil1 (NM_021311.2,1518-1536).
gcctgagcttcgactcaaa

SEQ ID NO: 472470 - DNA, 19 bp, Mus musculus
  siRNA target sequence for Piwil1 (NM_021311.2,1549-1567).
ctctggaagaatcttacaa

SEQ ID NO: 472471 - DNA, 19 bp, Mus musculus
  siRNA target sequence for Piwil1 (NM_021311.2,1585-1603).
gggcggaaagacgtttgat

SEQ ID NO: 472472 - DNA, 19 bp, Mus musculus
  siRNA target sequence for Piwil1 (NM_021311.2,1586-1604).
ggcggaaagacgtttgatt

SEQ ID NO: 472473 - DNA, 19 bp, Mus musculus
  siRNA target sequence for Piwil1 (NM_021311.2,1587-1605).
gcggaaagacgtttgatta

SEQ ID NO: 472474 - DNA, 19 bp, Mus musculus
  siRNA target sequence for Piwil1 (NM_021311.2,1657-1675).
cagcgtgaagccattggat

SEQ ID NO: 472475 - DNA, 19 bp, Mus musculus
  siRNA target sequence for Piwil1 (NM_021311.2,1659-1677).
gcgtgaagccattggataa

SEQ ID NO: 472476 - DNA, 19 bp, Mus musculus
  siRNA target sequence for Piwil1 (NM_021311.2,1690-1708).
ctatacccgcaggaattat

SEQ ID NO: 472477 - DNA, 19 bp, Mus musculus
  siRNA target sequence for Piwil1 (NM_021311.2,1716-1734).
ccaactcactgatacagaa

SEQ ID NO: 472478 - DNA, 19 bp, Mus musculus
  siRNA target sequence for Piwil1 (NM_021311.2,1840-1858).
gacgtcagacactcagata

SEQ ID NO: 472479 - DNA, 19 bp, Mus musculus
  siRNA target sequence for Piwil1 (NM_021311.2,1842-1860).
cgtcagacactcagatagt

SEQ ID NO: 472480 - DNA, 19 bp, Mus musculus
  siRNA target sequence for Piwil1 (NM_021311.2,1878-1896).
gtaatcggaaggacaaata

SEQ ID NO: 472481 - DNA, 19 bp, Mus musculus
  siRNA target sequence for Piwil1 (NM_021311.2,2080-2098).
gggcatcgactgttaccat

SEQ ID NO: 472482 - DNA, 19 bp, Mus musculus
  siRNA target sequence for Piwil1 (NM_021311.2,2134-2152).
cgtcgccagcatcaatgaa

SEQ ID NO: 472483 - DNA, 19 bp, Mus musculus
  siRNA target sequence for Piwil1 (NM_021311.2,2320-2338).
gaagaccctggtcaattat

SEQ ID NO: 472484 - DNA, 19 bp, Mus musculus
  siRNA target sequence for Piwil1 (NM_021311.2,2370-2388).
cagtcgggagaggttacaa

SEQ ID NO: 472485 - DNA, 19 bp, Mus musculus
  siRNA target sequence for Piwil1 (NM_021311.2,2410-2428).
ggtgaagaagcgtgtcaat

SEQ ID NO: 472486 - DNA, 19 bp, Mus musculus
  siRNA target sequence for Piwil1 (NM_021311.2,2508-2526).
cagagtggtatgacttttt

SEQ ID NO: 472487 - DNA, 19 bp, Mus musculus
  siRNA target sequence for Piwil1 (NM_021311.2,2560-2578).
gtccccaacacactacaat

SEQ ID NO: 472488 - DNA, 19 bp, Mus musculus
  siRNA target sequence for Piwil1 (NM_021311.2,2635-2653).
gctctgccacgtgtactat

SEQ ID NO: 472489 - DNA, 19 bp, Mus musculus
  siRNA target sequence for Piwil1 (NM_021311.2,2636-2654).
ctctgccacgtgtactata

SEQ ID NO: 472490 - DNA, 19 bp, Mus musculus
  siRNA target sequence for Piwil1 (NM_021311.2,2638-2656).
ctgccacgtgtactataat

SEQ ID NO: 472491 - DNA, 19 bp, Mus musculus
  siRNA target sequence for Ptrf (NM_008986.1,228-246).
gctccgacgagctgatcaa

SEQ ID NO: 472492 - DNA, 19 bp, Mus musculus
  siRNA target sequence for Ptrf (NM_008986.1,794-812).
cgcgtggacgacttcaaga

SEQ ID NO: 472493 - DNA, 19 bp, Mus musculus
  siRNA target sequence for Ptrf (NM_008986.1,1077-1095).
ccttccacgtcaagaagat

SEQ ID NO: 472494 - DNA, 19 bp, Mus musculus
  siRNA target sequence for Rps18 (NM_138946.1,292-310).
gctgtgcacagtgtttgta

SEQ ID NO: 472495 - DNA, 19 bp, Mus musculus
  siRNA target sequence for Rps18 (NM_138946.1,317-335).
gggtactgagggttctgtt

SEQ ID NO: 472496 - DNA, 19 bp, Mus musculus
  siRNA target sequence for Rps18 (NM_138946.1,346-364).
gagagggtgaagaacacat

SEQ ID NO: 472497 - DNA, 19 bp, Mus musculus
  siRNA target sequence for Rps18 (NM_138946.1,352-370).
gtgaagaacacatctttaa

SEQ ID NO: 472498 - DNA, 19 bp, Mus musculus
  siRNA target sequence for Rps18 (NM_138946.1,418-436).
ccagcccgatcaataagtt

SEQ ID NO: 472499 - DNA, 19 bp, Mus musculus
  siRNA target sequence for Scye1 (NM_007926.1,115-133).
gcggatcagatcatcgaat

SEQ ID NO: 472500 - DNA, 19 bp, Mus musculus
  siRNA target sequence for Scye1 (NM_007926.1,116-134).
cggatcagatcatcgaata

SEQ ID NO: 472501 - DNA, 19 bp, Mus musculus
  siRNA target sequence for Scye1 (NM_007926.1,117-135).
ggatcagatcatcgaatat

SEQ ID NO: 472502 - DNA, 19 bp, Mus musculus
  siRNA target sequence for Scye1 (NM_007926.1,141-159).
gcagcaggttgctcttctt

SEQ ID NO: 472503 - DNA, 19 bp, Mus musculus
  siRNA target sequence for Scye1 (NM_007926.1,142-160).
cagcaggttgctcttctta

SEQ ID NO: 472504 - DNA, 19 bp, Mus musculus
  siRNA target sequence for Scye1 (NM_007926.1,261-279).
gattctggcagaaattcat

SEQ ID NO: 472505 - DNA, 19 bp, Mus musculus
  siRNA target sequence for Scye1 (NM_007926.1,295-313).
gtgcgtgttcgattgagta

SEQ ID NO: 472506 - DNA, 19 bp, Mus musculus
  siRNA target sequence for Scye1 (NM_007926.1,316-334).
ccactgcagacgaactgta

SEQ ID NO: 472507 - DNA, 19 bp, Mus musculus
  siRNA target sequence for Scye1 (NM_007926.1,558-576).
gcaccctgatgcagattca

SEQ ID NO: 472508 - DNA, 19 bp, Mus musculus
  siRNA target sequence for Scye1 (NM_007926.1,627-645).
cagcgggctggtgaatcat

SEQ ID NO: 472509 - DNA, 19 bp, Mus musculus
  siRNA target sequence for Scye1 (NM_007926.1,629-647).
gcgggctggtgaatcatgt

SEQ ID NO: 472510 - DNA, 19 bp, Mus musculus
  siRNA target sequence for Scye1 (NM_007926.1,630-648).
cgggctggtgaatcatgtt

SEQ ID NO: 472511 - DNA, 19 bp, Mus musculus
  siRNA target sequence for Scye1 (NM_007926.1,670-688).
cgtatggtggttttactct

SEQ ID NO: 472512 - DNA, 19 bp, Mus musculus
  siRNA target sequence for Scye1 (NM_007926.1,675-693).
ggtggttttactctgtaat

SEQ ID NO: 472513 - DNA, 19 bp, Mus musculus
  siRNA target sequence for Scye1 (NM_007926.1,746-764).
ccagttcaccagagaaagt

SEQ ID NO: 472514 - DNA, 19 bp, Mus musculus
  siRNA target sequence for Yars (NM_134151.2,162-180).
ggagcgggaacttaaagtt

SEQ ID NO: 472515 - DNA, 19 bp, Mus musculus
  siRNA target sequence for Yars (NM_134151.2,163-181).
gagcgggaacttaaagttt

SEQ ID NO: 472516 - DNA, 19 bp, Mus musculus
  siRNA target sequence for Yars (NM_134151.2,234-252).
gtccaagatcgctgacttt

SEQ ID NO: 472517 - DNA, 19 bp, Mus musculus
  siRNA target sequence for Yars (NM_134151.2,260-278).
cagggtgtgaggtaaccat

SEQ ID NO: 472518 - DNA, 19 bp, Mus musculus
  siRNA target sequence for Yars (NM_134151.2,324-342).
ctgggagcttctagaactt

SEQ ID NO: 472519 - DNA, 19 bp, Mus musculus
  siRNA target sequence for Yars (NM_134151.2,343-361).
cgaaccagttactatgaga

SEQ ID NO: 472520 - DNA, 19 bp, Mus musculus
  siRNA target sequence for Yars (NM_134151.2,372-390).
ggccatgctggagagtatt

SEQ ID NO: 472521 - DNA, 19 bp, Mus musculus
  siRNA target sequence for Yars (NM_134151.2,567-585).
cggtctgcaggctttggat

SEQ ID NO: 472522 - DNA, 19 bp, Mus musculus
  siRNA target sequence for Yars (NM_134151.2,609-627).
ccagttcggcggtgttgat

SEQ ID NO: 472523 - DNA, 19 bp, Mus musculus
  siRNA target sequence for Yars (NM_134151.2,622-640).
gttgatcagaggaagattt

SEQ ID NO: 472524 - DNA, 19 bp, Mus musculus
  siRNA target sequence for Yars (NM_134151.2,715-733).
gggttaactgggagcaaaa

SEQ ID NO: 472525 - DNA, 19 bp, Mus musculus
  siRNA target sequence for Yars (NM_134151.2,716-734).
ggttaactgggagcaaaat

SEQ ID NO: 472526 - DNA, 19 bp, Mus musculus
  siRNA target sequence for Yars (NM_134151.2,927-945).
gacctacaccgtttaccta

SEQ ID NO: 472527 - DNA, 19 bp, Mus musculus
  siRNA target sequence for Yars (NM_134151.2,1006-1024).
gaagtcgccctgaacaagt

SEQ ID NO: 472528 - DNA, 19 bp, Mus musculus
  siRNA target sequence for Yars (NM_134151.2,1034-1052).
ccattagagagaagtttaa

SEQ ID NO: 472529 - DNA, 19 bp, Mus musculus
  siRNA target sequence for Yars (NM_134151.2,1139-1157).
cagaaccagaggaagtcat

SEQ ID NO: 472530 - DNA, 19 bp, Mus musculus
  siRNA target sequence for Yars (NM_134151.2,1275-1293).
gagcggcctcgtacagttt

SEQ ID NO: 472531 - DNA, 19 bp, Mus musculus
  siRNA target sequence for Yars (NM_134151.2,1277-1295).
gcggcctcgtacagtttgt

SEQ ID NO: 472532 - DNA, 19 bp, Mus musculus
  siRNA target sequence for Yars (NM_134151.2,1327-1345).
gtggtgctgtgcaatctga

SEQ ID NO: 472533 - DNA, 19 bp, Mus musculus
  siRNA target sequence for Yars (NM_134151.2,1329-1347).
ggtgctgtgcaatctgaaa

SEQ ID NO: 472534 - DNA, 19 bp, Mus musculus
  siRNA target sequence for Yars (NM_134151.2,1512-1530).
gcccaagaagaaagtcttt

SEQ ID NO: 472535 - DNA, 19 bp, Mus musculus
  siRNA target sequence for Yars (NM_134151.2,1540-1558).
caggccgactttaaaattt

SEQ ID NO: 472536 - DNA, 19 bp, Mus musculus
  siRNA target sequence for Yars (NM_134151.2,1542-1560).
ggccgactttaaaatttct

SEQ ID NO: 472537 - DNA, 19 bp, Mus musculus
  siRNA target sequence for Yars (NM_134151.2,1609-1627).
ggattcgtctcctgtaaat

SEQ ID NO: 472538 - DNA, 19 bp, Mus musculus
  siRNA target sequence for Yars (NM_134151.2,1614-1632).
cgtctcctgtaaatcacta

SEQ ID NO: 472539 - DNA, 19 bp, Mus musculus
  siRNA target sequence for Yars (NM_134151.2,1615-1633).
gtctcctgtaaatcactaa

SEQ ID NO: 472540 - DNA, 19 bp, Mus musculus
  siRNA target sequence for Yars (NM_134151.2,1628-1646).
cactaaaagggggtaacat

SEQ ID NO: 472541 - DNA, 19 bp, Mus musculus
  siRNA target sequence for Nol5 (NM_018868.1,387-405).
gaatctcagctgtatccat

SEQ ID NO: 472542 - DNA, 19 bp, Mus musculus
  siRNA target sequence for Nol5 (NM_018868.1,409-427).
cctgttgttaatgaactta

SEQ ID NO: 472543 - DNA, 19 bp, Mus musculus
  siRNA target sequence for Nol5 (NM_018868.1,412-430).
gttgttaatgaacttatga

SEQ ID NO: 472544 - DNA, 19 bp, Mus musculus
  siRNA target sequence for Nol5 (NM_018868.1,434-452).
gaatccgatcacaaatgga

SEQ ID NO: 472545 - DNA, 19 bp, Mus musculus
  siRNA target sequence for Nol5 (NM_018868.1,513-531).
cagcctgtctcgatacaga

SEQ ID NO: 472546 - DNA, 19 bp, Mus musculus
  siRNA target sequence for Nol5 (NM_018868.1,515-533).
gcctgtctcgatacagatt

SEQ ID NO: 472547 - DNA, 19 bp, Mus musculus
  siRNA target sequence for Nol5 (NM_018868.1,517-535).
ctgtctcgatacagattga

SEQ ID NO: 472548 - DNA, 19 bp, Mus musculus
  siRNA target sequence for Nol5 (NM_018868.1,519-537).
gtctcgatacagattgaaa

SEQ ID NO: 472549 - DNA, 19 bp, Mus musculus
  siRNA target sequence for Nol5 (NM_018868.1,521-539).
ctcgatacagattgaaatt

SEQ ID NO: 472550 - DNA, 19 bp, Mus musculus
  siRNA target sequence for Nol5 (NM_018868.1,523-541).
cgatacagattgaaattca

SEQ ID NO: 472551 - DNA, 19 bp, Mus musculus
  siRNA target sequence for Nol5 (NM_018868.1,592-610).
gacttggataaagaactaa

SEQ ID NO: 472552 - DNA, 19 bp, Mus musculus
  siRNA target sequence for Nol5 (NM_018868.1,624-642).
gcggtgtagggaatggtat

SEQ ID NO: 472553 - DNA, 19 bp, Mus musculus
  siRNA target sequence for Nol5 (NM_018868.1,660-678).
gttagggaaaattatttca

SEQ ID NO: 472554 - DNA, 19 bp, Mus musculus
  siRNA target sequence for Nol5 (NM_018868.1,696-714).
caagtgtttacagaaagtt

SEQ ID NO: 472555 - DNA, 19 bp, Mus musculus
  siRNA target sequence for Nol5 (NM_018868.1,787-805).
gcagctgcagagatatcta

SEQ ID NO: 472556 - DNA, 19 bp, Mus musculus
  siRNA target sequence for Nol5 (NM_018868.1,814-832).
gaggtttctgaagaagata

SEQ ID NO: 472557 - DNA, 19 bp, Mus musculus
  siRNA target sequence for Nol5 (NM_018868.1,854-872).
gtacgcaggtaattgaaat

SEQ ID NO: 472558 - DNA, 19 bp, Mus musculus
  siRNA target sequence for Nol5 (NM_018868.1,858-876).
gcaggtaattgaaatttct

SEQ ID NO: 472559 - DNA, 19 bp, Mus musculus
  siRNA target sequence for Nol5 (NM_018868.1,885-903).
gactcagctctatgaatat

SEQ ID NO: 472560 - DNA, 19 bp, Mus musculus
  siRNA target sequence for Nol5 (NM_018868.1,898-916).
gaatatctgcaaaatcgaa

SEQ ID NO: 472561 - DNA, 19 bp, Mus musculus
  siRNA target sequence for Nol5 (NM_018868.1,921-939).
ggccattgcacctaacgtt

SEQ ID NO: 472562 - DNA, 19 bp, Mus musculus
  siRNA target sequence for Nol5 (NM_018868.1,922-940).
gccattgcacctaacgtta

SEQ ID NO: 472563 - DNA, 19 bp, Mus musculus
  siRNA target sequence for Nol5 (NM_018868.1,985-1003).
gcaggttctcttttgaatt

SEQ ID NO: 472564 - DNA, 19 bp, Mus musculus
  siRNA target sequence for Nol5 (NM_018868.1,1076-1094).
gacgagacacacctaaata

SEQ ID NO: 472565 - DNA, 19 bp, Mus musculus
  siRNA target sequence for Nol5 (NM_018868.1,1191-1209).
cagatacgacgcttttggt

SEQ ID NO: 472566 - DNA, 19 bp, Mus musculus
  siRNA target sequence for Nol5 (NM_018868.1,1197-1215).
cgacgcttttggtgaagat

SEQ ID NO: 472567 - DNA, 19 bp, Mus musculus
  siRNA target sequence for Nol5 (NM_018868.1,1397-1415).
gttctaaaaaacgcaaaat

SEQ ID NO: 472568 - DNA, 19 bp, Mus musculus
  siRNA target sequence for Nol5 (NM_018868.1,1400-1418).
ctaaaaaacgcaaaataga

SEQ ID NO: 472569 - DNA, 19 bp, Mus musculus
  siRNA target sequence for Nol5 (NM_018868.1,1540-1558).
gaggagccgactgtaaaga

SEQ ID NO: 472570 - DNA, 19 bp, Mus musculus
  siRNA target sequence for Srp19 (NM_025527.1,66-84).
gccgaccaggacaggttta

SEQ ID NO: 472571 - DNA, 19 bp, Mus musculus
  siRNA target sequence for Srp19 (NM_025527.1,67-85).
ccgaccaggacaggtttat

SEQ ID NO: 472572 - DNA, 19 bp, Mus musculus
  siRNA target sequence for Srp19 (NM_025527.1,69-87).
gaccaggacaggtttattt

SEQ ID NO: 472573 - DNA, 19 bp, Mus musculus
  siRNA target sequence for Srp19 (NM_025527.1,92-110).
ctaccccgcttatttaaat

SEQ ID NO: 472574 - DNA, 19 bp, Mus musculus
  siRNA target sequence for Srp19 (NM_025527.1,95-113).
ccccgcttatttaaataat

SEQ ID NO: 472575 - DNA, 19 bp, Mus musculus
  siRNA target sequence for Srp19 (NM_025527.1,132-150).
gggagacggatccctataa

SEQ ID NO: 472576 - DNA, 19 bp, Mus musculus
  siRNA target sequence for Srp19 (NM_025527.1,136-154).
gacggatccctataagtaa

SEQ ID NO: 472577 - DNA, 19 bp, Mus musculus
  siRNA target sequence for Srp19 (NM_025527.1,167-185).
ccctacagctactgagatt

SEQ ID NO: 472578 - DNA, 19 bp, Mus musculus
  siRNA target sequence for Srp19 (NM_025527.1,172-190).
cagctactgagattcaaga

SEQ ID NO: 472579 - DNA, 19 bp, Mus musculus
  siRNA target sequence for Srp19 (NM_025527.1,254-272).
gaaccgtgatgttcagttt

SEQ ID NO: 472580 - DNA, 19 bp, Mus musculus
  siRNA target sequence for Srp19 (NM_025527.1,313-331).
gcctctgtcttgtacagtt

SEQ ID NO: 472581 - DNA, 19 bp, Mus musculus
  siRNA target sequence for Srp19 (NM_025527.1,339-357).
cgtaagtcagtgatgctat

SEQ ID NO: 472582 - DNA, 19 bp, Mus musculus
  siRNA target sequence for Srp19 (NM_025527.1,340-358).
gtaagtcagtgatgctata

SEQ ID NO: 472583 - DNA, 19 bp, Mus musculus
  siRNA target sequence for 0610009D07Rik (NM_025323.2,196-214).
cggctaagagggcgaatat

SEQ ID NO: 472584 - DNA, 19 bp, Mus musculus
  siRNA target sequence for 0610009D07Rik (NM_025323.2,197-215).
ggctaagagggcgaatatt

SEQ ID NO: 472585 - DNA, 19 bp, Mus musculus
  siRNA target sequence for 0610009D07Rik (NM_025323.2,216-234).
cgcctcccacctgaagtaa

SEQ ID NO: 472586 - DNA, 19 bp, Mus musculus
  siRNA target sequence for 0610009D07Rik (NM_025323.2,218-236).
cctcccacctgaagtaaat

SEQ ID NO: 472587 - DNA, 19 bp, Mus musculus
  siRNA target sequence for 0610009D07Rik (NM_025323.2,228-246).
gaagtaaatcggattttgt

SEQ ID NO: 472588 - DNA, 19 bp, Mus musculus
  siRNA target sequence for 0610009D07Rik (NM_025323.2,237-255).
cggattttgtatataagga

SEQ ID NO: 472589 - DNA, 19 bp, Mus musculus
  siRNA target sequence for 0610009D07Rik (NM_025323.2,238-256).
ggattttgtatataaggaa

SEQ ID NO: 472590 - DNA, 19 bp, Mus musculus
  siRNA target sequence for 0610009D07Rik (NM_025323.2,253-271).
ggaatttgccatacaaaat

SEQ ID NO: 472591 - DNA, 19 bp, Mus musculus
  siRNA target sequence for 0610009D07Rik (NM_025323.2,302-320).
gaaatatggacctattcgt

SEQ ID NO: 472592 - DNA, 19 bp, Mus musculus
  siRNA target sequence for 0610009D07Rik (NM_025323.2,309-327).
ggacctattcgtcaaatca

SEQ ID NO: 472593 - DNA, 19 bp, Mus musculus
  siRNA target sequence for 0610009D07Rik (NM_025323.2,411-429).
ctatcaggattcaacgttt

SEQ ID NO: 472594 - DNA, 19 bp, Mus musculus
  siRNA target sequence for 0610009D07Rik (NM_025323.2,415-433).
caggattcaacgtttgtaa

SEQ ID NO: 472595 - DNA, 19 bp, Mus musculus
  siRNA target sequence for 0610009D07Rik (NM_025323.2,462-480).
gctaaccgggcatttcaga

SEQ ID NO: 472596 - DNA, 19 bp, Mus musculus
  siRNA target sequence for 1110017C15Rik (NM_025391.1,61-79).
gaggcccttgactgaagaa

SEQ ID NO: 472597 - DNA, 19 bp, Mus musculus
  siRNA target sequence for 1110017C15Rik (NM_025391.1,149-167).
cccgacggcacgtactgtt

SEQ ID NO: 472598 - DNA, 19 bp, Mus musculus
  siRNA target sequence for 1110017C15Rik (NM_025391.1,150-168).
ccgacggcacgtactgttt

SEQ ID NO: 472599 - DNA, 19 bp, Mus musculus
  siRNA target sequence for 1110017C15Rik (NM_025391.1,178-196).
caacgaccgagtgtactat

SEQ ID NO: 472600 - DNA, 19 bp, Mus musculus
  siRNA target sequence for 1110017C15Rik (NM_025391.1,182-200).
gaccgagtgtactatgtga

SEQ ID NO: 472601 - DNA, 19 bp, Mus musculus
  siRNA target sequence for 1110017C15Rik (NM_025391.1,250-268).
gtcgctggggacgtgtttt

SEQ ID NO: 472602 - DNA, 19 bp, Mus musculus
  siRNA target sequence for 1110017C15Rik (NM_025391.1,328-346).
cccctatgccaagtataaa

SEQ ID NO: 472603 - DNA, 19 bp, Mus musculus
  siRNA target sequence for 1110017C15Rik (NM_025391.1,330-348).
cctatgccaagtataaagt

SEQ ID NO: 472604 - DNA, 19 bp, Mus musculus
  siRNA target sequence for 1110017C15Rik (NM_025391.1,365-383).
gcagagcagtccttcttgt

SEQ ID NO: 472605 - DNA, 19 bp, Mus musculus
  siRNA target sequence for 1110017C15Rik (NM_025391.1,366-384).
cagagcagtccttcttgta

SEQ ID NO: 472606 - DNA, 19 bp, Mus musculus
  siRNA target sequence for 1110017C15Rik (NM_025391.1,371-389).
cagtccttcttgtatggaa

SEQ ID NO: 472607 - DNA, 19 bp, Mus musculus
  siRNA target sequence for 1110017C15Rik (NM_025391.1,376-394).
cttcttgtatggaaaccat

SEQ ID NO: 472608 - DNA, 19 bp, Mus musculus
  siRNA target sequence for 1110017C15Rik (NM_025391.1,406-424).
cggtctgggtcgaattact

SEQ ID NO: 472609 - DNA, 19 bp, Mus musculus
  siRNA target sequence for 1110017C15Rik (NM_025391.1,408-426).
gtctgggtcgaattactga

SEQ ID NO: 472610 - DNA, 19 bp, Mus musculus
  siRNA target sequence for 1110017C15Rik (NM_025391.1,416-434).
cgaattactgagaacacat

SEQ ID NO: 472611 - DNA, 19 bp, Mus musculus
  siRNA target sequence for 1110017C15Rik (NM_025391.1,442-460).
ccagggagtggttgtctat

SEQ ID NO: 472612 - DNA, 19 bp, Mus musculus
  siRNA target sequence for 1110017C15Rik (NM_025391.1,443-461).
cagggagtggttgtctatt

SEQ ID NO: 472613 - DNA, 19 bp, Mus musculus
  siRNA target sequence for 1110017C15Rik (NM_025391.1,446-464).
ggagtggttgtctattcca

SEQ ID NO: 472614 - DNA, 19 bp, Mus musculus
  siRNA target sequence for 1110017C15Rik (NM_025391.1,488-506).
ggggtggcagcaaagtcta

SEQ ID NO: 472615 - DNA, 19 bp, Mus musculus
  siRNA target sequence for 1110017C15Rik (NM_025391.1,507-525).
cccaagactgccgaaaagt

SEQ ID NO: 472616 - DNA, 19 bp, Mus musculus
  siRNA target sequence for 1110039I09Rik (NM_175399.2,201-219).
ccgatggctcggcttacat

SEQ ID NO: 472617 - DNA, 19 bp, Mus musculus
  siRNA target sequence for 1110039I09Rik (NM_175399.2,311-329).
gtgaactgtcagtacagtt

SEQ ID NO: 472618 - DNA, 19 bp, Mus musculus
  siRNA target sequence for 1110039I09Rik (NM_175399.2,450-468).
gctctcagatcgacatcta

SEQ ID NO: 472619 - DNA, 19 bp, Mus musculus
  siRNA target sequence for 1110039I09Rik (NM_175399.2,551-569).
cctatgcgggactttgtat

SEQ ID NO: 472620 - DNA, 19 bp, Mus musculus
  siRNA target sequence for 1110039I09Rik (NM_175399.2,562-580).
ctttgtatgcgcatgttca

SEQ ID NO: 472621 - DNA, 19 bp, Mus musculus
  siRNA target sequence for 1190002L16Rik (NM_133976.1,538-556).
gcgcgatgactttgatcta

SEQ ID NO: 472622 - DNA, 19 bp, Mus musculus
  siRNA target sequence for 1300018P11Rik (NM_025829.2,175-193).
gtgcctcgaatctgaagaa

SEQ ID NO: 472623 - DNA, 19 bp, Mus musculus
  siRNA target sequence for 1300018P11Rik (NM_025829.2,177-195).
gcctcgaatctgaagaaaa

SEQ ID NO: 472624 - DNA, 19 bp, Mus musculus
  siRNA target sequence for 1300018P11Rik (NM_025829.2,178-196).
cctcgaatctgaagaaaat

SEQ ID NO: 472625 - DNA, 19 bp, Mus musculus
  siRNA target sequence for 1300018P11Rik (NM_025829.2,204-222).
gtacaaacagtgcagatat

SEQ ID NO: 472626 - DNA, 19 bp, Mus musculus
  siRNA target sequence for 1300018P11Rik (NM_025829.2,226-244).
ggagtgtatacaataacat

SEQ ID NO: 472627 - DNA, 19 bp, Mus musculus
  siRNA target sequence for 1300018P11Rik (NM_025829.2,260-278).
cctgcctttgagatgtagt

SEQ ID NO: 472628 - DNA, 19 bp, Mus musculus
  siRNA target sequence for 1300018P11Rik (NM_025829.2,263-281).
gcctttgagatgtagttat

SEQ ID NO: 472629 - DNA, 19 bp, Mus musculus
  siRNA target sequence for 1300018P11Rik (NM_025829.2,269-287).
gagatgtagttatcactta

SEQ ID NO: 472630 - DNA, 19 bp, Mus musculus
  siRNA target sequence for 1300018P11Rik (NM_025829.2,340-358).
gcgtgtggaagatgaaagt

SEQ ID NO: 472631 - DNA, 19 bp, Mus musculus
  siRNA target sequence for 1300018P11Rik (NM_025829.2,366-384).
gacagcacgtccacagttt

SEQ ID NO: 472632 - DNA, 19 bp, Mus musculus
  siRNA target sequence for 1300018P11Rik (NM_025829.2,370-388).
gcacgtccacagtttggaa

SEQ ID NO: 472633 - DNA, 19 bp, Mus musculus
  siRNA target sequence for 1300018P11Rik (NM_025829.2,371-389).
cacgtccacagtttggaaa

SEQ ID NO: 472634 - DNA, 19 bp, Mus musculus
  siRNA target sequence for 1300018P11Rik (NM_025829.2,379-397).
cagtttggaaagaattgtt

SEQ ID NO: 472635 - DNA, 19 bp, Mus musculus
  siRNA target sequence for 1300018P11Rik (NM_025829.2,558-576).
ctcctgccccacatagctt

SEQ ID NO: 472636 - DNA, 19 bp, Mus musculus
  siRNA target sequence for 1300018P11Rik (NM_025829.2,561-579).
ctgccccacatagctttta

SEQ ID NO: 472637 - DNA, 19 bp, Mus musculus
  siRNA target sequence for 1300018P11Rik (NM_025829.2,563-581).
gccccacatagcttttaaa

SEQ ID NO: 472638 - DNA, 19 bp, Mus musculus
  siRNA target sequence for 2310032N20Rik (NM_027148.2,372-390).
ggcggctgggttcaaaact

SEQ ID NO: 472639 - DNA, 19 bp, Mus musculus
  siRNA target sequence for 2310032N20Rik (NM_027148.2,391-409).
gtggagccgctggagtatt

SEQ ID NO: 472640 - DNA, 19 bp, Mus musculus
  siRNA target sequence for 2310032N20Rik (NM_027148.2,394-412).
gagccgctggagtattaca

SEQ ID NO: 472641 - DNA, 19 bp, Mus musculus
  siRNA target sequence for 2310032N20Rik (NM_027148.2,402-420).
ggagtattacaggagattt

SEQ ID NO: 472642 - DNA, 19 bp, Mus musculus
  siRNA target sequence for 2310032N20Rik (NM_027148.2,467-485).
gagccacaactgtcaacat

SEQ ID NO: 472643 - DNA, 19 bp, Mus musculus
  siRNA target sequence for 2310032N20Rik (NM_027148.2,478-496).
gtcaacataggttcaatca

SEQ ID NO: 472644 - DNA, 19 bp, Mus musculus
  siRNA target sequence for 2310032N20Rik (NM_027148.2,480-498).
caacataggttcaatcagt

SEQ ID NO: 472645 - DNA, 19 bp, Mus musculus
  siRNA target sequence for 2310032N20Rik (NM_027148.2,529-547).
gggaataccacggtcattt

SEQ ID NO: 472646 - DNA, 19 bp, Mus musculus
  siRNA target sequence for 2310032N20Rik (NM_027148.2,531-549).
gaataccacggtcatttgt

SEQ ID NO: 472647 - DNA, 19 bp, Mus musculus
  siRNA target sequence for 2310032N20Rik (NM_027148.2,540-558).
ggtcatttgtggcgttaaa

SEQ ID NO: 472648 - DNA, 19 bp, Mus musculus
  siRNA target sequence for 2310032N20Rik (NM_027148.2,543-561).
catttgtggcgttaaagca

SEQ ID NO: 472649 - DNA, 19 bp, Mus musculus
  siRNA target sequence for 2310032N20Rik (NM_027148.2,548-566).
gtggcgttaaagcagaatt

SEQ ID NO: 472650 - DNA, 19 bp, Mus musculus
  siRNA target sequence for 2310032N20Rik (NM_027148.2,552-570).
cgttaaagcagaatttgca

SEQ ID NO: 472651 - DNA, 19 bp, Mus musculus
  siRNA target sequence for 2310032N20Rik (NM_027148.2,599-617).
gatatgtcgtccctaatgt

SEQ ID NO: 472652 - DNA, 19 bp, Mus musculus
  siRNA target sequence for 2310032N20Rik (NM_027148.2,622-640).
ctaccaccgctgtgttctt

SEQ ID NO: 472653 - DNA, 19 bp, Mus musculus
  siRNA target sequence for 2310032N20Rik (NM_027148.2,714-732).
ctcacaggtgattaagaaa

SEQ ID NO: 472654 - DNA, 19 bp, Mus musculus
  siRNA target sequence for 2310032N20Rik (NM_027148.2,729-747).
gaaagaggatttatgcatt

SEQ ID NO: 472655 - DNA, 19 bp, Mus musculus
  siRNA target sequence for 2310032N20Rik (NM_027148.2,777-795).
ctgtgacctcatttgtcta

SEQ ID NO: 472656 - DNA, 19 bp, Mus musculus
  siRNA target sequence for 2310032N20Rik (NM_027148.2,833-851).
ctttgttagcagctttaaa

SEQ ID NO: 472657 - DNA, 19 bp, Mus musculus
  siRNA target sequence for 2310032N20Rik (NM_027148.2,837-855).
gttagcagctttaaagaat

SEQ ID NO: 472658 - DNA, 19 bp, Mus musculus
  siRNA target sequence for 2310032N20Rik (NM_027148.2,856-874).
gtacagttgcctgaagtta

SEQ ID NO: 472659 - DNA, 19 bp, Mus musculus
  siRNA target sequence for 2310032N20Rik (NM_027148.2,859-877).
cagttgcctgaagttacta

SEQ ID NO: 472660 - DNA, 19 bp, Mus musculus
  siRNA target sequence for 2310032N20Rik (NM_027148.2,866-884).
ctgaagttactataaacga

SEQ ID NO: 472661 - DNA, 19 bp, Mus musculus
  siRNA target sequence for 2310032N20Rik (NM_027148.2,890-908).
ctgctttagccgaagtcaa

SEQ ID NO: 472662 - DNA, 19 bp, Mus musculus
  siRNA target sequence for 2310032N20Rik (NM_027148.2,892-910).
gctttagccgaagtcaatt

SEQ ID NO: 472663 - DNA, 19 bp, Mus musculus
  siRNA target sequence for 2310032N20Rik (NM_027148.2,893-911).
ctttagccgaagtcaattt

SEQ ID NO: 472664 - DNA, 19 bp, Mus musculus
  siRNA target sequence for 2310032N20Rik (NM_027148.2,1095-1113).
gctgactggagctaaactt

SEQ ID NO: 472665 - DNA, 19 bp, Mus musculus
  siRNA target sequence for 2310032N20Rik (NM_027148.2,1133-1151).
cggtaacgagacacaaaga

SEQ ID NO: 472666 - DNA, 19 bp, Mus musculus
  siRNA target sequence for 2310075G12Rik (NM_027162.3,529-547).
gccagtagagatgattata

SEQ ID NO: 472667 - DNA, 19 bp, Mus musculus
  siRNA target sequence for 2310075G12Rik (NM_027162.3,530-548).
ccagtagagatgattataa

SEQ ID NO: 472668 - DNA, 19 bp, Mus musculus
  siRNA target sequence for 2310075G12Rik (NM_027162.3,536-554).
gagatgattataaaatcca

SEQ ID NO: 472669 - DNA, 19 bp, Mus musculus
  siRNA target sequence for 2310075G12Rik (NM_027162.3,585-603).
gaagaccgcgctcaaagat

SEQ ID NO: 472670 - DNA, 19 bp, Mus musculus
  siRNA target sequence for 2310075G12Rik (NM_027162.3,626-644).
gagtagccaacgtgattgt

SEQ ID NO: 472671 - DNA, 19 bp, Mus musculus
  siRNA target sequence for 2310075G12Rik (NM_027162.3,653-671).
ctctgcaggactgtgtatt

SEQ ID NO: 472672 - DNA, 19 bp, Mus musculus
  siRNA target sequence for 2310075G12Rik (NM_027162.3,895-913).
gttaaccctgtctatgact

SEQ ID NO: 472673 - DNA, 19 bp, Mus musculus
  siRNA target sequence for 2310075G12Rik (NM_027162.3,1029-1047).
ggatgagctctttatccta

SEQ ID NO: 472674 - DNA, 19 bp, Mus musculus
  siRNA target sequence for 2310075G12Rik (NM_027162.3,1150-1168).
gctgcccacaagtattact

SEQ ID NO: 472675 - DNA, 19 bp, Mus musculus
  siRNA target sequence for 2310075G12Rik (NM_027162.3,1153-1171).
gcccacaagtattactaca

SEQ ID NO: 472676 - DNA, 19 bp, Mus musculus
  siRNA target sequence for 2610027L16Rik (NM_026403.2,235-253).
cccggaggctcttggatat

SEQ ID NO: 472677 - DNA, 19 bp, Mus musculus
  siRNA target sequence for 2610027L16Rik (NM_026403.2,264-282).
cgctgtcagcgctaaaagt

SEQ ID NO: 472678 - DNA, 19 bp, Mus musculus
  siRNA target sequence for 2610027L16Rik (NM_026403.2,297-315).
ccgaagaacgagagttgat

SEQ ID NO: 472679 - DNA, 19 bp, Mus musculus
  siRNA target sequence for 2610027L16Rik (NM_026403.2,372-390).
ggactggtagcgaaatgct

SEQ ID NO: 472680 - DNA, 19 bp, Mus musculus
  siRNA target sequence for 2610027L16Rik (NM_026403.2,403-421).
ggggttcagtcctttgaaa

SEQ ID NO: 472681 - DNA, 19 bp, Mus musculus
  siRNA target sequence for 2610027L16Rik (NM_026403.2,480-498).
ggtgtggggtccacgtatt

SEQ ID NO: 472682 - DNA, 19 bp, Mus musculus
  siRNA target sequence for 2610027L16Rik (NM_026403.2,481-499).
gtgtggggtccacgtatta

SEQ ID NO: 472683 - DNA, 19 bp, Mus musculus
  siRNA target sequence for 2610027L16Rik (NM_026403.2,483-501).
gtggggtccacgtattaca

SEQ ID NO: 472684 - DNA, 19 bp, Mus musculus
  siRNA target sequence for 2610027L16Rik (NM_026403.2,485-503).
ggggtccacgtattacaaa

SEQ ID NO: 472685 - DNA, 19 bp, Mus musculus
  siRNA target sequence for 2610027L16Rik (NM_026403.2,487-505).
ggtccacgtattacaaagt

SEQ ID NO: 472686 - DNA, 19 bp, Mus musculus
  siRNA target sequence for 2610027L16Rik (NM_026403.2,579-597).
gtggtccctcgcaaactct

SEQ ID NO: 472687 - DNA, 19 bp, Mus musculus
  siRNA target sequence for 2610027L16Rik (NM_026403.2,622-640).
cgctgaagtgtgtgatgat

SEQ ID NO: 472688 - DNA, 19 bp, Mus musculus
  siRNA target sequence for 2610027L16Rik (NM_026403.2,698-716).
gtcttgggaggtactcttt

SEQ ID NO: 472689 - DNA, 19 bp, Mus musculus
  siRNA target sequence for 2610027L16Rik (NM_026403.2,743-761).
ggctcccagtcgtctgaaa

SEQ ID NO: 472690 - DNA, 19 bp, Mus musculus
  siRNA target sequence for 2610027L16Rik (NM_026403.2,745-763).
ctcccagtcgtctgaaaca

SEQ ID NO: 472691 - DNA, 19 bp, Mus musculus
  siRNA target sequence for 2610027L16Rik (NM_026403.2,747-765).
cccagtcgtctgaaacaca

SEQ ID NO: 472692 - DNA, 19 bp, Mus musculus
  siRNA target sequence for 2610027L16Rik (NM_026403.2,771-789).
cttcagctcgggaatgtaa

SEQ ID NO: 472693 - DNA, 19 bp, Mus musculus
  siRNA target sequence for 2610027L16Rik (NM_026403.2,776-794).
gctcgggaatgtaaaccaa

SEQ ID NO: 472694 - DNA, 19 bp, Mus musculus
  siRNA target sequence for 2610027L16Rik (NM_026403.2,781-799).
ggaatgtaaaccaactgat

SEQ ID NO: 472695 - DNA, 19 bp, Mus musculus
  siRNA target sequence for 2610027L16Rik (NM_026403.2,782-800).
gaatgtaaaccaactgatt

SEQ ID NO: 472696 - DNA, 19 bp, Mus musculus
  siRNA target sequence for 2610027L16Rik (NM_026403.2,786-804).
gtaaaccaactgattttga

SEQ ID NO: 472697 - DNA, 19 bp, Mus musculus
  siRNA target sequence for 2610027L16Rik (NM_026403.2,881-899).
gacaagatctccagctttt

SEQ ID NO: 472698 - DNA, 19 bp, Mus musculus
  siRNA target sequence for 2610027L16Rik (NM_026403.2,917-935).
caagtcctccaccaaaaat

SEQ ID NO: 472699 - DNA, 19 bp, Mus musculus
  siRNA target sequence for 2610027L16Rik (NM_026403.2,960-978).
gcgatgcagtcattgatta

SEQ ID NO: 472700 - DNA, 19 bp, Mus musculus
  siRNA target sequence for 2610027L16Rik (NM_026403.2,979-997).
cctgagttctcggaattct

SEQ ID NO: 472701 - DNA, 19 bp, Mus musculus
  siRNA target sequence for 2610027L16Rik (NM_026403.2,980-998).
ctgagttctcggaattctt

SEQ ID NO: 472702 - DNA, 19 bp, Mus musculus
  siRNA target sequence for 2610027L16Rik (NM_026403.2,982-1000).
gagttctcggaattcttca

SEQ ID NO: 472703 - DNA, 19 bp, Mus musculus
  siRNA target sequence for 2610027L16Rik (NM_026403.2,1089-1107).
gactccagcgcctctataa

SEQ ID NO: 472704 - DNA, 19 bp, Mus musculus
  siRNA target sequence for 2610027L16Rik (NM_026403.2,1322-1340).
caggtcttgcagctgttat

SEQ ID NO: 472705 - DNA, 19 bp, Mus musculus
  siRNA target sequence for 2610027L16Rik (NM_026403.2,1336-1354).
gttatttgaggcatttcat

SEQ ID NO: 472706 - DNA, 19 bp, Mus musculus
  siRNA target sequence for 2610027L16Rik (NM_026403.2,1418-1436).
gaggtatactatgaactaa

SEQ ID NO: 472707 - DNA, 19 bp, Mus musculus
  siRNA target sequence for 2610027L16Rik (NM_026403.2,1529-1547).
ctccagcatttgctgtatt

SEQ ID NO: 472708 - DNA, 19 bp, Mus musculus
  siRNA target sequence for 2610027L16Rik (NM_026403.2,1699-1717).
gaccctaaagggacagtat

SEQ ID NO: 472709 - DNA, 19 bp, Mus musculus
  siRNA target sequence for 2610027L16Rik (NM_026403.2,1701-1719).
ccctaaagggacagtatgt

SEQ ID NO: 472710 - DNA, 19 bp, Mus musculus
  siRNA target sequence for 2610027L16Rik (NM_026403.2,1738-1756).
ccatggcagccgtgtatta

SEQ ID NO: 472711 - DNA, 19 bp, Mus musculus
  siRNA target sequence for 2610027L16Rik (NM_026403.2,1783-1801).
gggggctcggaaggaaatt

SEQ ID NO: 472712 - DNA, 19 bp, Mus musculus
  siRNA target sequence for 2610027L16Rik (NM_026403.2,1786-1804).
ggctcggaaggaaattgct

SEQ ID NO: 472713 - DNA, 19 bp, Mus musculus
  siRNA target sequence for 2610027L16Rik (NM_026403.2,1825-1843).
ccaggagttgattcaagat

SEQ ID NO: 472714 - DNA, 19 bp, Mus musculus
  siRNA target sequence for 2610027L16Rik (NM_026403.2,1831-1849).
gttgattcaagatcctttt

SEQ ID NO: 472715 - DNA, 19 bp, Mus musculus
  siRNA target sequence for 2610027L16Rik (NM_026403.2,1865-1883).
cgaaatgtggcccttacta

SEQ ID NO: 472716 - DNA, 19 bp, Mus musculus
  siRNA target sequence for 2610027L16Rik (NM_026403.2,1874-1892).
gcccttactaccttcttga

SEQ ID NO: 472717 - DNA, 19 bp, Mus musculus
  siRNA target sequence for 2610027L16Rik (NM_026403.2,1875-1893).
cccttactaccttcttgaa

SEQ ID NO: 472718 - DNA, 19 bp, Mus musculus
  siRNA target sequence for 2610027L16Rik (NM_026403.2,1944-1962).
gggcattgagctctatact

SEQ ID NO: 472719 - DNA, 19 bp, Mus musculus
  siRNA target sequence for 2610027L16Rik (NM_026403.2,1945-1963).
ggcattgagctctatactt

SEQ ID NO: 472720 - DNA, 19 bp, Mus musculus
  siRNA target sequence for 2610027L16Rik (NM_026403.2,1947-1965).
cattgagctctatacttga

SEQ ID NO: 472721 - DNA, 19 bp, Mus musculus
  siRNA target sequence for 2610104C07Rik (NM_025644.3,43-61).
ggcgaacgtctgtgtaact

SEQ ID NO: 472722 - DNA, 19 bp, Mus musculus
  siRNA target sequence for 2610104C07Rik (NM_025644.3,44-62).
gcgaacgtctgtgtaactt

SEQ ID NO: 472723 - DNA, 19 bp, Mus musculus
  siRNA target sequence for 2610104C07Rik (NM_025644.3,169-187).
gtgtcagtgatgagagaaa

SEQ ID NO: 472724 - DNA, 19 bp, Mus musculus
  siRNA target sequence for 2610104C07Rik (NM_025644.3,249-267).
ctcacggtttgccaaagta

SEQ ID NO: 472725 - DNA, 19 bp, Mus musculus
  siRNA target sequence for 2610104C07Rik (NM_025644.3,282-300).
gggatccacaccactcaaa

SEQ ID NO: 472726 - DNA, 19 bp, Mus musculus
  siRNA target sequence for 2610104C07Rik (NM_025644.3,283-301).
ggatccacaccactcaaaa

SEQ ID NO: 472727 - DNA, 19 bp, Mus musculus
  siRNA target sequence for 2610104C07Rik (NM_025644.3,284-302).
gatccacaccactcaaaaa

SEQ ID NO: 472728 - DNA, 19 bp, Mus musculus
  siRNA target sequence for 2610104C07Rik (NM_025644.3,288-306).
cacaccactcaaaaatgct

SEQ ID NO: 472729 - DNA, 19 bp, Mus musculus
  siRNA target sequence for 2610104C07Rik (NM_025644.3,314-332).
gaactatccgcaaagaaga

SEQ ID NO: 472730 - DNA, 19 bp, Mus musculus
  siRNA target sequence for 2610104C07Rik (NM_025644.3,317-335).
ctatccgcaaagaagatat

SEQ ID NO: 472731 - DNA, 19 bp, Mus musculus
  siRNA target sequence for 2610104C07Rik (NM_025644.3,331-349).
gatatccgagcaactgaaa

SEQ ID NO: 472732 - DNA, 19 bp, Mus musculus
  siRNA target sequence for 2610104C07Rik (NM_025644.3,379-397).
cggccaggtgacatagttt

SEQ ID NO: 472733 - DNA, 19 bp, Mus musculus
  siRNA target sequence for 2610104C07Rik (NM_025644.3,394-412).
gttttggccaaagttatct

SEQ ID NO: 472734 - DNA, 19 bp, Mus musculus
  siRNA target sequence for 2610104C07Rik (NM_025644.3,418-436).
ggcgatgcacagtccaatt

SEQ ID NO: 472735 - DNA, 19 bp, Mus musculus
  siRNA target sequence for 2610104C07Rik (NM_025644.3,419-437).
gcgatgcacagtccaatta

SEQ ID NO: 472736 - DNA, 19 bp, Mus musculus
  siRNA target sequence for 2610104C07Rik (NM_025644.3,548-566).
ctaaagaattccgaaaagt

SEQ ID NO: 472737 - DNA, 19 bp, Mus musculus
  siRNA target sequence for 2700016E08Rik (NM_025978.2,229-247).
gagagttgacaacattgaa

SEQ ID NO: 472738 - DNA, 19 bp, Mus musculus
  siRNA target sequence for 2700016E08Rik (NM_025978.2,231-249).
gagttgacaacattgaaat

SEQ ID NO: 472739 - DNA, 19 bp, Mus musculus
  siRNA target sequence for 2700016E08Rik (NM_025978.2,236-254).
gacaacattgaaatacaaa

SEQ ID NO: 472740 - DNA, 19 bp, Mus musculus
  siRNA target sequence for 2700016E08Rik (NM_025978.2,334-352).
cgacaatgacaatctttat

SEQ ID NO: 472741 - DNA, 19 bp, Mus musculus
  siRNA target sequence for 2700016E08Rik (NM_025978.2,412-430).
cttcttccgagatattgaa

SEQ ID NO: 472742 - DNA, 19 bp, Mus musculus
  siRNA target sequence for 2700016E08Rik (NM_025978.2,428-446).
gaacgtggtgatatagtga

SEQ ID NO: 472743 - DNA, 19 bp, Mus musculus
  siRNA target sequence for 2700016E08Rik (NM_025978.2,443-461).
gtgattggaagaattagct

SEQ ID NO: 472744 - DNA, 19 bp, Mus musculus
  siRNA target sequence for 2700016E08Rik (NM_025978.2,462-480).
ctattcgggagtttggttt

SEQ ID NO: 472745 - DNA, 19 bp, Mus musculus
  siRNA target sequence for 2700016E08Rik (NM_025978.2,477-495).
gttttttcatggtgttgat

SEQ ID NO: 472746 - DNA, 19 bp, Mus musculus
  siRNA target sequence for 2700016E08Rik (NM_025978.2,484-502).
catggtgttgatctgttta

SEQ ID NO: 472747 - DNA, 19 bp, Mus musculus
  siRNA target sequence for 2700016E08Rik (NM_025978.2,487-505).
ggtgttgatctgtttagga

SEQ ID NO: 472748 - DNA, 19 bp, Mus musculus
  siRNA target sequence for 2700016E08Rik (NM_025978.2,507-525).
gtggcatcgtgagagatat

SEQ ID NO: 472749 - DNA, 19 bp, Mus musculus
  siRNA target sequence for 2700016E08Rik (NM_025978.2,509-527).
ggcatcgtgagagatattt

SEQ ID NO: 472750 - DNA, 19 bp, Mus musculus
  siRNA target sequence for 2700016E08Rik (NM_025978.2,519-537).
gagatatttcgcacttaga

SEQ ID NO: 472751 - DNA, 19 bp, Mus musculus
  siRNA target sequence for 2700016E08Rik (NM_025978.2,583-601).
ccatggagatcctttatca

SEQ ID NO: 472752 - DNA, 19 bp, Mus musculus
  siRNA target sequence for 2700016E08Rik (NM_025978.2,626-644).
cgagctggaatcaaggata

SEQ ID NO: 472753 - DNA, 19 bp, Mus musculus
  siRNA target sequence for 2700016E08Rik (NM_025978.2,630-648).
ctggaatcaaggatattga

SEQ ID NO: 472754 - DNA, 19 bp, Mus musculus
  siRNA target sequence for 2700016E08Rik (NM_025978.2,632-650).
ggaatcaaggatattgaca

SEQ ID NO: 472755 - DNA, 19 bp, Mus musculus
  siRNA target sequence for 2700016E08Rik (NM_025978.2,640-658).
ggatattgacagataccat

SEQ ID NO: 472756 - DNA, 19 bp, Mus musculus
  siRNA target sequence for 2700016E08Rik (NM_025978.2,703-721).
catggctggcattaaacta

SEQ ID NO: 472757 - DNA, 19 bp, Mus musculus
  siRNA target sequence for 2700016E08Rik (NM_025978.2,754-772).
ctacaggaggagtgttgaa

SEQ ID NO: 472758 - DNA, 19 bp, Mus musculus
  siRNA target sequence for 2700016E08Rik (NM_025978.2,759-777).
ggaggagtgttgaactaaa

SEQ ID NO: 472759 - DNA, 19 bp, Mus musculus
  siRNA target sequence for 2700016E08Rik (NM_025978.2,763-781).
gagtgttgaactaaatagt

SEQ ID NO: 472760 - DNA, 19 bp, Mus musculus
  siRNA target sequence for 2700016E08Rik (NM_025978.2,765-783).
gtgttgaactaaatagtaa

SEQ ID NO: 472761 - DNA, 19 bp, Mus musculus
  siRNA target sequence for 2700016E08Rik (NM_025978.2,767-785).
gttgaactaaatagtaatt

SEQ ID NO: 472762 - DNA, 19 bp, Mus musculus
  siRNA target sequence for 2700016E08Rik (NM_025978.2,770-788).
gaactaaatagtaattctt

SEQ ID NO: 472763 - DNA, 19 bp, Mus musculus
  siRNA target sequence for 2700016E08Rik (NM_025978.2,791-809).
gagtcctatgaaaatatca

SEQ ID NO: 472764 - DNA, 19 bp, Mus musculus
  siRNA target sequence for 2700016E08Rik (NM_025978.2,816-834).
gttctctgggatttgttaa

SEQ ID NO: 472765 - DNA, 19 bp, Mus musculus
  siRNA target sequence for 2700016E08Rik (NM_025978.2,882-900).
ctcatccaccgtctttaat

SEQ ID NO: 472766 - DNA, 19 bp, Mus musculus
  siRNA target sequence for 2700016E08Rik (NM_025978.2,884-902).
catccaccgtctttaatga

SEQ ID NO: 472767 - DNA, 19 bp, Mus musculus
  siRNA target sequence for 2700016E08Rik (NM_025978.2,901-919).
gagaggcctacaaagcaaa

SEQ ID NO: 472768 - DNA, 19 bp, Mus musculus
  siRNA target sequence for 2700016E08Rik (NM_025978.2,906-924).
gcctacaaagcaaaaattt

SEQ ID NO: 472769 - DNA, 19 bp, Mus musculus
  siRNA target sequence for 2700016E08Rik (NM_025978.2,972-990).
cttgggctttaaaatgtgt

SEQ ID NO: 472770 - DNA, 19 bp, Mus musculus
  siRNA target sequence for 2700016E08Rik (NM_025978.2,991-1009).
gaagattggagtcgattat

SEQ ID NO: 472771 - DNA, 19 bp, Mus musculus
  siRNA target sequence for 2700016E08Rik (NM_025978.2,999-1017).
gagtcgattattttaaggt

SEQ ID NO: 472772 - DNA, 19 bp, Mus musculus
  siRNA target sequence for 2700016E08Rik (NM_025978.2,1020-1038).
ggcgacatgtggatgctat

SEQ ID NO: 472773 - DNA, 19 bp, Mus musculus
  siRNA target sequence for 2700016E08Rik (NM_025978.2,1031-1049).
gatgctatgaacgaataca

SEQ ID NO: 472774 - DNA, 19 bp, Mus musculus
  siRNA target sequence for 2700016E08Rik (NM_025978.2,1034-1052).
gctatgaacgaatacaata

SEQ ID NO: 472775 - DNA, 19 bp, Mus musculus
  siRNA target sequence for 2700016E08Rik (NM_025978.2,1048-1066).
caataaagctctggaaata

SEQ ID NO: 472776 - DNA, 19 bp, Mus musculus
  siRNA target sequence for 2700016E08Rik (NM_025978.2,1090-1108).
ggtagcgcgaggagcatta

SEQ ID NO: 472777 - DNA, 19 bp, Mus musculus
  siRNA target sequence for 2700016E08Rik (NM_025978.2,1091-1109).
gtagcgcgaggagcattat

SEQ ID NO: 472778 - DNA, 19 bp, Mus musculus
  siRNA target sequence for 2700016E08Rik (NM_025978.2,1096-1114).
gcgaggagcattatatgca

SEQ ID NO: 472779 - DNA, 19 bp, Mus musculus
  siRNA target sequence for 2700016E08Rik (NM_025978.2,1097-1115).
cgaggagcattatatgcaa

SEQ ID NO: 472780 - DNA, 19 bp, Mus musculus
  siRNA target sequence for 2700016E08Rik (NM_025978.2,1101-1119).
gagcattatatgcaacaaa

SEQ ID NO: 472781 - DNA, 19 bp, Mus musculus
  siRNA target sequence for 2700016E08Rik (NM_025978.2,1151-1169).
gagctcgcattagaaaact

SEQ ID NO: 472782 - DNA, 19 bp, Mus musculus
  siRNA target sequence for 2700016E08Rik (NM_025978.2,1172-1190).
ccaactcataggaatgcaa

SEQ ID NO: 472783 - DNA, 19 bp, Mus musculus
  siRNA target sequence for 2700016E08Rik (NM_025978.2,1222-1240).
gggagggcagttagaagaa

SEQ ID NO: 472784 - DNA, 19 bp, Mus musculus
  siRNA target sequence for 2700016E08Rik (NM_025978.2,1259-1277).
gctgaaagttactataaga

SEQ ID NO: 472785 - DNA, 19 bp, Mus musculus
  siRNA target sequence for 2700016E08Rik (NM_025978.2,1260-1278).
ctgaaagttactataagaa

SEQ ID NO: 472786 - DNA, 19 bp, Mus musculus
  siRNA target sequence for 2810055E05Rik (NM_153160.2,168-186).
gcctgcactgtatactatt

SEQ ID NO: 472787 - DNA, 19 bp, Mus musculus
  siRNA target sequence for 2810055E05Rik (NM_153160.2,212-230).
cagactatggagcttttat

SEQ ID NO: 472788 - DNA, 19 bp, Mus musculus
  siRNA target sequence for 2810055E05Rik (NM_153160.2,281-299).
cgtcctgtcgagtggataa

SEQ ID NO: 472789 - DNA, 19 bp, Mus musculus
  siRNA target sequence for 2810055E05Rik (NM_153160.2,294-312).
ggataagccttctgagata

SEQ ID NO: 472790 - DNA, 19 bp, Mus musculus
  siRNA target sequence for 2810055E05Rik (NM_153160.2,351-369).
ccgagagatgaaaaatgat

SEQ ID NO: 472791 - DNA, 19 bp, Mus musculus
  siRNA target sequence for 2810055E05Rik (NM_153160.2,352-370).
cgagagatgaaaaatgata

SEQ ID NO: 472792 - DNA, 19 bp, Mus musculus
  siRNA target sequence for 2810055E05Rik (NM_153160.2,431-449).
ccaacaacgttgtcattga

SEQ ID NO: 472793 - DNA, 19 bp, Mus musculus
  siRNA target sequence for 2810055E05Rik (NM_153160.2,467-485).
gacggtccttccaggatta

SEQ ID NO: 472794 - DNA, 19 bp, Mus musculus
  siRNA target sequence for 2810055E05Rik (NM_153160.2,469-487).
cggtccttccaggattaca

SEQ ID NO: 472795 - DNA, 19 bp, Mus musculus
  siRNA target sequence for 2810055E05Rik (NM_153160.2,471-489).
gtccttccaggattacact

SEQ ID NO: 472796 - DNA, 19 bp, Mus musculus
  siRNA target sequence for 2810055E05Rik (NM_153160.2,658-676).
cctgatcccacgaagaatt

SEQ ID NO: 472797 - DNA, 19 bp, Mus musculus
  siRNA target sequence for 2810055E05Rik (NM_153160.2,661-679).
gatcccacgaagaattctt

SEQ ID NO: 472798 - DNA, 19 bp, Mus musculus
  siRNA target sequence for 2810055E05Rik (NM_153160.2,779-797).
cgaggcattcatcaaaaga

SEQ ID NO: 472799 - DNA, 19 bp, Mus musculus
  siRNA target sequence for 4833420N02Rik (NM_183263.1,494-512).
gcctcattaaggtgaaatt

SEQ ID NO: 472800 - DNA, 19 bp, Mus musculus
  siRNA target sequence for 4833420N02Rik (NM_183263.1,495-513).
cctcattaaggtgaaattt

SEQ ID NO: 472801 - DNA, 19 bp, Mus musculus
  siRNA target sequence for 4833420N02Rik (NM_183263.1,541-559).
gtaacgccacaaggaataa

SEQ ID NO: 472802 - DNA, 19 bp, Mus musculus
  siRNA target sequence for 4833420N02Rik (NM_183263.1,580-598).
gaccctgttaagatgacat

SEQ ID NO: 472803 - DNA, 19 bp, Mus musculus
  siRNA target sequence for 4833420N02Rik (NM_183263.1,608-626).
ctccgcttcaccatacact

SEQ ID NO: 472804 - DNA, 19 bp, Mus musculus
  siRNA target sequence for 4833420N02Rik (NM_183263.1,623-641).
cactgcccctagtgttgat

SEQ ID NO: 472805 - DNA, 19 bp, Mus musculus
  siRNA target sequence for 4833420N02Rik (NM_183263.1,625-643).
ctgcccctagtgttgattt

SEQ ID NO: 472806 - DNA, 19 bp, Mus musculus
  siRNA target sequence for 4833420N02Rik (NM_183263.1,627-645).
gcccctagtgttgatttgt

SEQ ID NO: 472807 - DNA, 19 bp, Mus musculus
  siRNA target sequence for 4833420N02Rik (NM_183263.1,698-716).
gagcaggctgcagtaaagt

SEQ ID NO: 472808 - DNA, 19 bp, Mus musculus
  siRNA target sequence for 4833420N02Rik (NM_183263.1,704-722).
gctgcagtaaagtcttact

SEQ ID NO: 472809 - DNA, 19 bp, Mus musculus
  siRNA target sequence for 4833420N02Rik (NM_183263.1,770-788).
gcatgggggcacatttcca

SEQ ID NO: 472810 - DNA, 19 bp, Mus musculus
  siRNA target sequence for 4833420N02Rik (NM_183263.1,789-807).
ggtacccattgtgaacaat

SEQ ID NO: 472811 - DNA, 19 bp, Mus musculus
  siRNA target sequence for 4833420N02Rik (NM_183263.1,842-860).
ctgacactcgagtctatgt

SEQ ID NO: 472812 - DNA, 19 bp, Mus musculus
  siRNA target sequence for 4833420N02Rik (NM_183263.1,886-904).
caggttcagatgtctgata

SEQ ID NO: 472813 - DNA, 19 bp, Mus musculus
  siRNA target sequence for 4833420N02Rik (NM_183263.1,915-933).
ccgtgactgggcatgtgat

SEQ ID NO: 472814 - DNA, 19 bp, Mus musculus
  siRNA target sequence for 4833420N02Rik (NM_183263.1,926-944).
catgtgatcgccgattctt

SEQ ID NO: 472815 - DNA, 19 bp, Mus musculus
  siRNA target sequence for 4833420N02Rik (NM_183263.1,929-947).
gtgatcgccgattcttaaa

SEQ ID NO: 472816 - DNA, 19 bp, Mus musculus
  siRNA target sequence for 4833420N02Rik (NM_183263.1,931-949).
gatcgccgattcttaaagt

SEQ ID NO: 472817 - DNA, 19 bp, Mus musculus
  siRNA target sequence for 4833420N02Rik (NM_183263.1,935-953).
gccgattcttaaagtttca

SEQ ID NO: 472818 - DNA, 19 bp, Mus musculus
  siRNA target sequence for 4833420N02Rik (NM_183263.1,937-955).
cgattcttaaagtttcaca

SEQ ID NO: 472819 - DNA, 19 bp, Mus musculus
  siRNA target sequence for 4833420N02Rik (NM_183263.1,967-985).
gacctagacactaaaacca

SEQ ID NO: 472820 - DNA, 19 bp, Mus musculus
  siRNA target sequence for 4930429A22Rik (NM_153530.1,213-231).
gcttcgccaggtgacaaaa

SEQ ID NO: 472821 - DNA, 19 bp, Mus musculus
  siRNA target sequence for 4930429A22Rik (NM_153530.1,214-232).
cttcgccaggtgacaaaaa

SEQ ID NO: 472822 - DNA, 19 bp, Mus musculus
  siRNA target sequence for 4930429A22Rik (NM_153530.1,245-263).
gtccatgcgagggaagaaa

SEQ ID NO: 472823 - DNA, 19 bp, Mus musculus
  siRNA target sequence for 4930429A22Rik (NM_153530.1,311-329).
cttgaagagaggaacactt

SEQ ID NO: 472824 - DNA, 19 bp, Mus musculus
  siRNA target sequence for 4930429A22Rik (NM_153530.1,327-345).
cttatccagggtgtattga

SEQ ID NO: 472825 - DNA, 19 bp, Mus musculus
  siRNA target sequence for 4930429A22Rik (NM_153530.1,390-408).
gatggtgatcgggacattt

SEQ ID NO: 472826 - DNA, 19 bp, Mus musculus
  siRNA target sequence for 4930429A22Rik (NM_153530.1,417-435).
ggagttgttgctcgtaata

SEQ ID NO: 472827 - DNA, 19 bp, Mus musculus
  siRNA target sequence for 4930429A22Rik (NM_153530.1,427-445).
ctcgtaatagagccttaaa

SEQ ID NO: 472828 - DNA, 19 bp, Mus musculus
  siRNA target sequence for 4930429A22Rik (NM_153530.1,447-465).
ggggaccttgtggttgtaa

SEQ ID NO: 472829 - DNA, 19 bp, Mus musculus
  siRNA target sequence for 4930429A22Rik (NM_153530.1,448-466).
gggaccttgtggttgtaaa

SEQ ID NO: 472830 - DNA, 19 bp, Mus musculus
  siRNA target sequence for 4930429A22Rik (NM_153530.1,449-467).
ggaccttgtggttgtaaaa

SEQ ID NO: 472831 - DNA, 19 bp, Mus musculus
  siRNA target sequence for 4930429A22Rik (NM_153530.1,485-503).
gtggaaggcagttaaacca

SEQ ID NO: 472832 - DNA, 19 bp, Mus musculus
  siRNA target sequence for 4930429A22Rik (NM_153530.1,601-619).
gtggtcctgatgtcattat

SEQ ID NO: 472833 - DNA, 19 bp, Mus musculus
  siRNA target sequence for 4930429A22Rik (NM_153530.1,604-622).
gtcctgatgtcattataga

SEQ ID NO: 472834 - DNA, 19 bp, Mus musculus
  siRNA target sequence for 4930429A22Rik (NM_153530.1,673-691).
gcctggttgatggtgttaa

SEQ ID NO: 472835 - DNA, 19 bp, Mus musculus
  siRNA target sequence for 4930429A22Rik (NM_153530.1,677-695).
ggttgatggtgttaagaaa

SEQ ID NO: 472836 - DNA, 19 bp, Mus musculus
  siRNA target sequence for 4930429A22Rik (NM_153530.1,739-757).
ctccagttatgaaagatga

SEQ ID NO: 472837 - DNA, 19 bp, Mus musculus
  siRNA target sequence for 4930429A22Rik (NM_153530.1,859-877).
caactggcatcctgaaact

SEQ ID NO: 472838 - DNA, 19 bp, Mus musculus
  siRNA target sequence for 4930429A22Rik (NM_153530.1,876-894).
ctcttggctgataagaaca

SEQ ID NO: 472839 - DNA, 19 bp, Mus musculus
  siRNA target sequence for 4930429A22Rik (NM_153530.1,895-913).
gtgacctgtttaagaaata

SEQ ID NO: 472840 - DNA, 19 bp, Mus musculus
  siRNA target sequence for 4930429A22Rik (NM_153530.1,908-926).
gaaatacgccctgttttct

SEQ ID NO: 472841 - DNA, 19 bp, Mus musculus
  siRNA target sequence for 4930429A22Rik (NM_153530.1,935-953).
ccaccgagtacctagaatt

SEQ ID NO: 472842 - DNA, 19 bp, Mus musculus
  siRNA target sequence for 4930429A22Rik (NM_153530.1,936-954).
caccgagtacctagaattt

SEQ ID NO: 472843 - DNA, 19 bp, Mus musculus
  siRNA target sequence for 4930429A22Rik (NM_153530.1,989-1007).
gacccgacctaaagacttt

SEQ ID NO: 472844 - DNA, 19 bp, Mus musculus
  siRNA target sequence for 4930429A22Rik (NM_153530.1,1008-1026).
gccaacacgctgttcatct

SEQ ID NO: 472845 - DNA, 19 bp, Mus musculus
  siRNA target sequence for 4930429A22Rik (NM_153530.1,1019-1037).
gttcatctgccgcatcata

SEQ ID NO: 472846 - DNA, 19 bp, Mus musculus
  siRNA target sequence for 4930429A22Rik (NM_153530.1,1040-1058).
ctggaaggaggactgtaat

SEQ ID NO: 472847 - DNA, 19 bp, Mus musculus
  siRNA target sequence for 4930429A22Rik (NM_153530.1,1090-1108).
ggcaggctggtgaaatcga

SEQ ID NO: 472848 - DNA, 19 bp, Mus musculus
  siRNA target sequence for 4930429A22Rik (NM_153530.1,1259-1277).
caccattgatccatcaact

SEQ ID NO: 472849 - DNA, 19 bp, Mus musculus
  siRNA target sequence for 4930429A22Rik (NM_153530.1,1276-1294).
ctgctcgcgaccttgatga

SEQ ID NO: 472850 - DNA, 19 bp, Mus musculus
  siRNA target sequence for 4930429A22Rik (NM_153530.1,1349-1367).
cgccgatgtgagttacttt

SEQ ID NO: 472851 - DNA, 19 bp, Mus musculus
  siRNA target sequence for 4930429A22Rik (NM_153530.1,1376-1394).
gggatcctctttggataaa

SEQ ID NO: 472852 - DNA, 19 bp, Mus musculus
  siRNA target sequence for 4930429A22Rik (NM_153530.1,1378-1396).
gatcctctttggataaagt

SEQ ID NO: 472853 - DNA, 19 bp, Mus musculus
  siRNA target sequence for 4930429A22Rik (NM_153530.1,1408-1426).
gagccacaagtgtctactt

SEQ ID NO: 472854 - DNA, 19 bp, Mus musculus
  siRNA target sequence for 4930429A22Rik (NM_153530.1,1558-1576).
ggtttggccgcactatcat

SEQ ID NO: 472855 - DNA, 19 bp, Mus musculus
  siRNA target sequence for 4930429A22Rik (NM_153530.1,1578-1596).
cgttcttgcaccaaactga

SEQ ID NO: 472856 - DNA, 19 bp, Mus musculus
  siRNA target sequence for 4930429A22Rik (NM_153530.1,1608-1626).
gcccagagcatgatcgaaa

SEQ ID NO: 472857 - DNA, 19 bp, Mus musculus
  siRNA target sequence for 4930429A22Rik (NM_153530.1,1609-1627).
cccagagcatgatcgaaaa

SEQ ID NO: 472858 - DNA, 19 bp, Mus musculus
  siRNA target sequence for 4930429A22Rik (NM_153530.1,1610-1628).
ccagagcatgatcgaaaat

SEQ ID NO: 472859 - DNA, 19 bp, Mus musculus
  siRNA target sequence for 4930429A22Rik (NM_153530.1,1613-1631).
gagcatgatcgaaaatcca

SEQ ID NO: 472860 - DNA, 19 bp, Mus musculus
  siRNA target sequence for 4930429A22Rik (NM_153530.1,1650-1668).
gaagagcttcccccaattt

SEQ ID NO: 472861 - DNA, 19 bp, Mus musculus
  siRNA target sequence for 4930429A22Rik (NM_153530.1,1715-1733).
gcacagcattgcaaagcaa

SEQ ID NO: 472862 - DNA, 19 bp, Mus musculus
  siRNA target sequence for 4930429A22Rik (NM_153530.1,1759-1777).
gcgcactccgtttagatca

SEQ ID NO: 472863 - DNA, 19 bp, Mus musculus
  siRNA target sequence for 4930429A22Rik (NM_153530.1,1824-1842).
ggatgtcacatctatgagt

SEQ ID NO: 472864 - DNA, 19 bp, Mus musculus
  siRNA target sequence for 4930429A22Rik (NM_153530.1,1825-1843).
gatgtcacatctatgagta

SEQ ID NO: 472865 - DNA, 19 bp, Mus musculus
  siRNA target sequence for 4930429A22Rik (NM_153530.1,1893-1911).
gcggtggcccacaagatct

SEQ ID NO: 472866 - DNA, 19 bp, Mus musculus
  siRNA target sequence for 4930429A22Rik (NM_153530.1,2168-2186).
ggagcagttccggcattat

SEQ ID NO: 472867 - DNA, 19 bp, Mus musculus
  siRNA target sequence for 4930429A22Rik (NM_153530.1,2171-2189).
gcagttccggcattatgct

SEQ ID NO: 472868 - DNA, 19 bp, Mus musculus
  siRNA target sequence for 4930429A22Rik (NM_153530.1,2342-2360).
ccgtcgcatggcttccaaa

SEQ ID NO: 472869 - DNA, 19 bp, Mus musculus
  siRNA target sequence for 4930429A22Rik (NM_153530.1,2446-2464).
gtgtcctgaaccaagcttt

SEQ ID NO: 472870 - DNA, 19 bp, Mus musculus
  siRNA target sequence for 4933414E04Rik (NM_028950.3,313-331).
gacctgaagttgaaaacta

SEQ ID NO: 472871 - DNA, 19 bp, Mus musculus
  siRNA target sequence for 4933414E04Rik (NM_028950.3,426-444).
caccctccgtcgatgacaa

SEQ ID NO: 472872 - DNA, 19 bp, Mus musculus
  siRNA target sequence for 4933414E04Rik (NM_028950.3,449-467).
cagagtgaatacgcattta

SEQ ID NO: 472873 - DNA, 19 bp, Mus musculus
  siRNA target sequence for 4933414E04Rik (NM_028950.3,610-628).
gacaacagggtgaagtgat

SEQ ID NO: 472874 - DNA, 19 bp, Mus musculus
  siRNA target sequence for 4933414E04Rik (NM_028950.3,694-712).
cagcttcaaaatttatgaa

SEQ ID NO: 472875 - DNA, 19 bp, Mus musculus
  siRNA target sequence for 4933414E04Rik (NM_028950.3,710-728).
gaaagctggagatgttatt

SEQ ID NO: 472876 - DNA, 19 bp, Mus musculus
  siRNA target sequence for 4933414E04Rik (NM_028950.3,720-738).
gatgttatttccgtgtatt

SEQ ID NO: 472877 - DNA, 19 bp, Mus musculus
  siRNA target sequence for 4933414E04Rik (NM_028950.3,730-748).
ccgtgtattctgatattaa

SEQ ID NO: 472878 - DNA, 19 bp, Mus musculus
  siRNA target sequence for 4933414E04Rik (NM_028950.3,741-759).
gatattaacggcaaatgta

SEQ ID NO: 472879 - DNA, 19 bp, Mus musculus
  siRNA target sequence for 4933414E04Rik (NM_028950.3,819-837).
ctgagccgcaaagatatct

SEQ ID NO: 472880 - DNA, 19 bp, Mus musculus
  siRNA target sequence for 4933414E04Rik (NM_028950.3,824-842).
ccgcaaagatatcttcaat

SEQ ID NO: 472881 - DNA, 19 bp, Mus musculus
  siRNA target sequence for 4933414E04Rik (NM_028950.3,857-875).
gaaaggtataggcataaga

SEQ ID NO: 472882 - DNA, 19 bp, Mus musculus
  siRNA target sequence for 4933414E04Rik (NM_028950.3,861-879).
ggtataggcataagaatga

SEQ ID NO: 472883 - DNA, 19 bp, Mus musculus
  siRNA target sequence for 4933414E04Rik (NM_028950.3,874-892).
gaatgacagaacccatata

SEQ ID NO: 472884 - DNA, 19 bp, Mus musculus
  siRNA target sequence for 4933414E04Rik (NM_028950.3,894-912).
ctcagtccctcgtttgaca

SEQ ID NO: 472885 - DNA, 19 bp, Mus musculus
  siRNA target sequence for 4933414E04Rik (NM_028950.3,896-914).
cagtccctcgtttgacaat

SEQ ID NO: 472886 - DNA, 19 bp, Mus musculus
  siRNA target sequence for 4933414E04Rik (NM_028950.3,902-920).
ctcgtttgacaatgttcta

SEQ ID NO: 472887 - DNA, 19 bp, Mus musculus
  siRNA target sequence for 4933414E04Rik (NM_028950.3,915-933).
gttctacccagttatatat

SEQ ID NO: 472888 - DNA, 19 bp, Mus musculus
  siRNA target sequence for 4933414E04Rik (NM_028950.3,941-959).
gaatttaccatctacagtt

SEQ ID NO: 472889 - DNA, 19 bp, Mus musculus
  siRNA target sequence for 4933414E04Rik (NM_028950.3,955-973).
cagttgtagctcatgttct

SEQ ID NO: 472890 - DNA, 19 bp, Mus musculus
  siRNA target sequence for 4933414E04Rik (NM_028950.3,979-997).
ctcaacctggagagaagat

SEQ ID NO: 472891 - DNA, 19 bp, Mus musculus
  siRNA target sequence for 4933414E04Rik (NM_028950.3,1014-1032).
gcccctgggggcaaaacta

SEQ ID NO: 472892 - DNA, 19 bp, Mus musculus
  siRNA target sequence for 4933414E04Rik (NM_028950.3,1016-1034).
ccctgggggcaaaactaca

SEQ ID NO: 472893 - DNA, 19 bp, Mus musculus
  siRNA target sequence for 4933414E04Rik (NM_028950.3,1068-1086).
gtaatagcattggacaaaa

SEQ ID NO: 472894 - DNA, 19 bp, Mus musculus
  siRNA target sequence for 4933414E04Rik (NM_028950.3,1137-1155).
cattctatccgggcatttt

SEQ ID NO: 472895 - DNA, 19 bp, Mus musculus
  siRNA target sequence for 4933414E04Rik (NM_028950.3,1172-1190).
ggcacttaagcttgatact

SEQ ID NO: 472896 - DNA, 19 bp, Mus musculus
  siRNA target sequence for 4933414E04Rik (NM_028950.3,1173-1191).
gcacttaagcttgatacta

SEQ ID NO: 472897 - DNA, 19 bp, Mus musculus
  siRNA target sequence for 4933414E04Rik (NM_028950.3,1231-1249).
cttttgaccgaattatcct

SEQ ID NO: 472898 - DNA, 19 bp, Mus musculus
  siRNA target sequence for 4933414E04Rik (NM_028950.3,1280-1298).
gccaaatatggcttgtact

SEQ ID NO: 472899 - DNA, 19 bp, Mus musculus
  siRNA target sequence for 4933414E04Rik (NM_028950.3,1281-1299).
ccaaatatggcttgtactt

SEQ ID NO: 472900 - DNA, 19 bp, Mus musculus
  siRNA target sequence for 4933414E04Rik (NM_028950.3,1289-1307).
ggcttgtacttggacttta

SEQ ID NO: 472901 - DNA, 19 bp, Mus musculus
  siRNA target sequence for 4933414E04Rik (NM_028950.3,1294-1312).
gtacttggactttaaagga

SEQ ID NO: 472902 - DNA, 19 bp, Mus musculus
  siRNA target sequence for 4933414E04Rik (NM_028950.3,1578-1596).
cagaacatggacactgatt

SEQ ID NO: 472903 - DNA, 19 bp, Mus musculus
  siRNA target sequence for 4933414E04Rik (NM_028950.3,1580-1598).
gaacatggacactgattct

SEQ ID NO: 472904 - DNA, 19 bp, Mus musculus
  siRNA target sequence for 4933414E04Rik (NM_028950.3,1615-1633).
gggaagacatgatttggtt

SEQ ID NO: 472905 - DNA, 19 bp, Mus musculus
  siRNA target sequence for 4933414E04Rik (NM_028950.3,1644-1662).
gactgtataggcttcttta

SEQ ID NO: 472906 - DNA, 19 bp, Mus musculus
  siRNA target sequence for 4933414E04Rik (NM_028950.3,1646-1664).
ctgtataggcttctttatt

SEQ ID NO: 472907 - DNA, 19 bp, Mus musculus
  siRNA target sequence for 4933414E04Rik (NM_028950.3,1655-1673).
cttctttattgcaaagttt

SEQ ID NO: 472908 - DNA, 19 bp, Mus musculus
  siRNA target sequence for 4933414E04Rik (NM_028950.3,1690-1708).
caaaagcgaaggtttctca

SEQ ID NO: 472909 - DNA, 19 bp, Mus musculus
  siRNA target sequence for 4933414E04Rik (NM_028950.3,1695-1713).
gcgaaggtttctcagaaat

SEQ ID NO: 472910 - DNA, 19 bp, Mus musculus
  siRNA target sequence for 5430431G03Rik (NM_026235.2,531-549).
cagcacacgccttgaagta

SEQ ID NO: 472911 - DNA, 19 bp, Mus musculus
  siRNA target sequence for 5430431G03Rik (NM_026235.2,533-551).
gcacacgccttgaagtatt

SEQ ID NO: 472912 - DNA, 19 bp, Mus musculus
  siRNA target sequence for 5430431G03Rik (NM_026235.2,552-570).
cagtcaccctggagttgaa

SEQ ID NO: 472913 - DNA, 19 bp, Mus musculus
  siRNA target sequence for 5430431G03Rik (NM_026235.2,572-590).
gaggaccaccggaaggtta

SEQ ID NO: 472914 - DNA, 19 bp, Mus musculus
  siRNA target sequence for 5430431G03Rik (NM_026235.2,771-789).
catcggtgcggatcctaaa

SEQ ID NO: 472915 - DNA, 19 bp, Mus musculus
  siRNA target sequence for 5430431G03Rik (NM_026235.2,1056-1074).
gagtggaggaacttcagta

SEQ ID NO: 472916 - DNA, 19 bp, Mus musculus
  siRNA target sequence for 5430431G03Rik (NM_026235.2,1175-1193).
ccttcgggccaccagaata

SEQ ID NO: 472917 - DNA, 19 bp, Mus musculus
  siRNA target sequence for 5430431G03Rik (NM_026235.2,1176-1194).
cttcgggccaccagaatat

SEQ ID NO: 472918 - DNA, 19 bp, Mus musculus
  siRNA target sequence for 5430431G03Rik (NM_026235.2,1179-1197).
cgggccaccagaatatttt

SEQ ID NO: 472919 - DNA, 19 bp, Mus musculus
  siRNA target sequence for 5430431G03Rik (NM_026235.2,1182-1200).
gccaccagaatatttttct

SEQ ID NO: 472920 - DNA, 19 bp, Mus musculus
  siRNA target sequence for 5430431G03Rik (NM_026235.2,1289-1307).
gaaggtagactgaacttca

SEQ ID NO: 472921 - DNA, 19 bp, Mus musculus
  siRNA target sequence for 5430431G03Rik (NM_026235.2,1327-1345).
ccgaaagtgcatggattat

SEQ ID NO: 472922 - DNA, 19 bp, Mus musculus
  siRNA target sequence for 5430431G03Rik (NM_026235.2,1328-1346).
cgaaagtgcatggattatt

SEQ ID NO: 472923 - DNA, 19 bp, Mus musculus
  siRNA target sequence for 6330437E22Rik (NM_172276.1,562-580).
gtgccatagggttcactta

SEQ ID NO: 472924 - DNA, 19 bp, Mus musculus
  siRNA target sequence for 6330437E22Rik (NM_172276.1,577-595).
cttacggcagcgactatta

SEQ ID NO: 472925 - DNA, 19 bp, Mus musculus
  siRNA target sequence for 6330437E22Rik (NM_172276.1,686-704).
catcgcccctttaggatta

SEQ ID NO: 472926 - DNA, 19 bp, Mus musculus
  siRNA target sequence for 6330437E22Rik (NM_172276.1,762-780).
cgcacagccaacttcgtat

SEQ ID NO: 472927 - DNA, 19 bp, Mus musculus
  siRNA target sequence for 6330437E22Rik (NM_172276.1,766-784).
cagccaacttcgtatgcaa

SEQ ID NO: 472928 - DNA, 19 bp, Mus musculus
  siRNA target sequence for 6330437E22Rik (NM_172276.1,790-808).
gagcacagttcgagatcat

SEQ ID NO: 472929 - DNA, 19 bp, Mus musculus
  siRNA target sequence for 6330437E22Rik (NM_172276.1,842-860).
cgacttcctacggtttgat

SEQ ID NO: 472930 - DNA, 19 bp, Mus musculus
  siRNA target sequence for 6330437E22Rik (NM_172276.1,866-884).
cctcaacccctactataaa

SEQ ID NO: 472931 - DNA, 19 bp, Mus musculus
  siRNA target sequence for 6720477E09Rik (NM_178660.2,353-371).
gcctggatcagccacaaat

SEQ ID NO: 472932 - DNA, 19 bp, Mus musculus
  siRNA target sequence for 6720477E09Rik (NM_178660.2,488-506).
gcggggaacagttgagtaa

SEQ ID NO: 472933 - DNA, 19 bp, Mus musculus
  siRNA target sequence for 6720477E09Rik (NM_178660.2,555-573).
cctcatcaagctatgtcaa

SEQ ID NO: 472934 - DNA, 19 bp, Mus musculus
  siRNA target sequence for 6720477E09Rik (NM_178660.2,565-583).
ctatgtcaaccgtatggaa

SEQ ID NO: 472935 - DNA, 19 bp, Mus musculus
  siRNA target sequence for 6720477E09Rik (NM_178660.2,569-587).
gtcaaccgtatggaaaaat

SEQ ID NO: 472936 - DNA, 19 bp, Mus musculus
  siRNA target sequence for 6720477E09Rik (NM_178660.2,574-592).
ccgtatggaaaaatcgtat

SEQ ID NO: 472937 - DNA, 19 bp, Mus musculus
  siRNA target sequence for 6720477E09Rik (NM_178660.2,600-618).
ggcaattcttgacaagaat

SEQ ID NO: 472938 - DNA, 19 bp, Mus musculus
  siRNA target sequence for 6720477E09Rik (NM_178660.2,620-638).
cgaatcagtgcaaaggtta

SEQ ID NO: 472939 - DNA, 19 bp, Mus musculus
  siRNA target sequence for 6720477E09Rik (NM_178660.2,742-760).
cctacgaatctatacatct

SEQ ID NO: 472940 - DNA, 19 bp, Mus musculus
  siRNA target sequence for 6720477E09Rik (NM_178660.2,746-764).
cgaatctatacatctcaaa

SEQ ID NO: 472941 - DNA, 19 bp, Mus musculus
  siRNA target sequence for 6720477E09Rik (NM_178660.2,811-829).
ccctttggacacgtgatat

SEQ ID NO: 472942 - DNA, 19 bp, Mus musculus
  siRNA target sequence for 6720477E09Rik (NM_178660.2,836-854).
gaatcctgagggatgctaa

SEQ ID NO: 472943 - DNA, 19 bp, Mus musculus
  siRNA target sequence for 6720477E09Rik (NM_178660.2,888-906).
ggagtctacggaaaaatgt

SEQ ID NO: 472944 - DNA, 19 bp, Mus musculus
  siRNA target sequence for 6720477E09Rik (NM_178660.2,910-928).
gtggtgattcaacatttta

SEQ ID NO: 472945 - DNA, 19 bp, Mus musculus
  siRNA target sequence for 6720477E09Rik (NM_178660.2,1237-1255).
gtggaccaccccatgtcaa

SEQ ID NO: 472946 - DNA, 19 bp, Mus musculus
  siRNA target sequence for 6720477E09Rik (NM_178660.2,1253-1271).
caatgcagccaactaacat

SEQ ID NO: 472947 - DNA, 19 bp, Mus musculus
  siRNA target sequence for 6720477E09Rik (NM_178660.2,1330-1348).
caatcccaagacagaatta

SEQ ID NO: 472948 - DNA, 19 bp, Mus musculus
  siRNA target sequence for 6720477E09Rik (NM_178660.2,1334-1352).
cccaagacagaattatggt

SEQ ID NO: 472949 - DNA, 19 bp, Mus musculus
  siRNA target sequence for 6720477E09Rik (NM_178660.2,1335-1353).
ccaagacagaattatggta

SEQ ID NO: 472950 - DNA, 19 bp, Mus musculus
  siRNA target sequence for 6720477E09Rik (NM_178660.2,1351-1369).
gtacttcaccagctgttat

SEQ ID NO: 472951 - DNA, 19 bp, Mus musculus
  siRNA target sequence for 6720477E09Rik (NM_178660.2,1428-1446).
gcctccgacagctgtttct

SEQ ID NO: 472952 - DNA, 19 bp, Mus musculus
  siRNA target sequence for 6720477E09Rik (NM_178660.2,1429-1447).
cctccgacagctgtttcta

SEQ ID NO: 472953 - DNA, 19 bp, Mus musculus
  siRNA target sequence for 6720477E09Rik (NM_178660.2,1433-1451).
cgacagctgtttctattga

SEQ ID NO: 472954 - DNA, 19 bp, Mus musculus
  siRNA target sequence for 9630048M01Rik (NM_177086.1,116-134).
gaagtcctccgatatcgat

SEQ ID NO: 472955 - DNA, 19 bp, Mus musculus
  siRNA target sequence for 9630048M01Rik (NM_177086.1,124-142).
ccgatatcgatcaggattt

SEQ ID NO: 472956 - DNA, 19 bp, Mus musculus
  siRNA target sequence for 9630048M01Rik (NM_177086.1,125-143).
cgatatcgatcaggattta

SEQ ID NO: 472957 - DNA, 19 bp, Mus musculus
  siRNA target sequence for 9630048M01Rik (NM_177086.1,126-144).
gatatcgatcaggatttat

SEQ ID NO: 472958 - DNA, 19 bp, Mus musculus
  siRNA target sequence for 9630048M01Rik (NM_177086.1,131-149).
cgatcaggatttatttaca

SEQ ID NO: 472959 - DNA, 19 bp, Mus musculus
  siRNA target sequence for 9630048M01Rik (NM_177086.1,135-153).
caggatttatttacagata

SEQ ID NO: 472960 - DNA, 19 bp, Mus musculus
  siRNA target sequence for 9630048M01Rik (NM_177086.1,194-212).
ccagcgggtggcccattat

SEQ ID NO: 472961 - DNA, 19 bp, Mus musculus
  siRNA target sequence for 9630048M01Rik (NM_177086.1,198-216).
cgggtggcccattatgaga

SEQ ID NO: 472962 - DNA, 19 bp, Mus musculus
  siRNA target sequence for 9630048M01Rik (NM_177086.1,206-224).
ccattatgagagtcgaaaa

SEQ ID NO: 472963 - DNA, 19 bp, Mus musculus
  siRNA target sequence for 9630048M01Rik (NM_177086.1,232-250).
gcaaagtccggctgtatta

SEQ ID NO: 472964 - DNA, 19 bp, Mus musculus
  siRNA target sequence for 9630048M01Rik (NM_177086.1,340-358).
gctgtacactctgtaacat

SEQ ID NO: 472965 - DNA, 19 bp, Mus musculus
  siRNA target sequence for 9630048M01Rik (NM_177086.1,375-393).
gtggtggccgactcacatt

SEQ ID NO: 472966 - DNA, 19 bp, Mus musculus
  siRNA target sequence for 9630048M01Rik (NM_177086.1,380-398).
ggccgactcacattaccaa

SEQ ID NO: 472967 - DNA, 19 bp, Mus musculus
  siRNA target sequence for 9630048M01Rik (NM_177086.1,407-425).
ccacgccaaaaggttaaaa

SEQ ID NO: 472968 - DNA, 19 bp, Mus musculus
  siRNA target sequence for 9630048M01Rik (NM_177086.1,411-429).
gccaaaaggttaaaactgt

SEQ ID NO: 472969 - DNA, 19 bp, Mus musculus
  siRNA target sequence for 9630048M01Rik (NM_177086.1,465-483).
gctccgctgagctcactta

SEQ ID NO: 472970 - DNA, 19 bp, Mus musculus
  siRNA target sequence for 9630048M01Rik (NM_177086.1,466-484).
ctccgctgagctcacttaa

SEQ ID NO: 472971 - DNA, 19 bp, Mus musculus
  siRNA target sequence for 9630048M01Rik (NM_177086.1,512-530).
ggtcgcatctccctatcaa

SEQ ID NO: 472972 - DNA, 19 bp, Mus musculus
  siRNA target sequence for 9630048M01Rik (NM_177086.1,516-534).
gcatctccctatcaaagaa

SEQ ID NO: 472973 - DNA, 19 bp, Mus musculus
  siRNA target sequence for 9630048M01Rik (NM_177086.1,562-580).
gcgcagcctggtttaacaa

SEQ ID NO: 472974 - DNA, 19 bp, Mus musculus
  siRNA target sequence for 9630048M01Rik (NM_177086.1,563-581).
cgcagcctggtttaacaat

SEQ ID NO: 472975 - DNA, 19 bp, Mus musculus
  siRNA target sequence for 9630048M01Rik (NM_177086.1,590-608).
ggcccagcagcattacgaa

SEQ ID NO: 472976 - DNA, 19 bp, Mus musculus
  siRNA target sequence for 9630048M01Rik (NM_177086.1,599-617).
gcattacgaaggcaagaaa

SEQ ID NO: 472977 - DNA, 19 bp, Mus musculus
  siRNA target sequence for 9630048M01Rik (NM_177086.1,693-711).
ctgagacgtacttacagat

SEQ ID NO: 472978 - DNA, 19 bp, Mus musculus
  siRNA target sequence for 9630048M01Rik (NM_177086.1,728-746).
gtcgctcaactccatagaa

SEQ ID NO: 472979 - DNA, 19 bp, Mus musculus
  siRNA target sequence for 9630048M01Rik (NM_177086.1,730-748).
cgctcaactccatagaaca

SEQ ID NO: 472980 - DNA, 19 bp, Mus musculus
  siRNA target sequence for A2bp1 (NM_021477.2,1024-1042).
ccagacctccgacaaatgt

SEQ ID NO: 472981 - DNA, 19 bp, Mus musculus
  siRNA target sequence for A2bp1 (NM_021477.2,1025-1043).
cagacctccgacaaatgtt

SEQ ID NO: 472982 - DNA, 19 bp, Mus musculus
  siRNA target sequence for A2bp1 (NM_021477.2,1034-1052).
gacaaatgtttggtcaatt

SEQ ID NO: 472983 - DNA, 19 bp, Mus musculus
  siRNA target sequence for A2bp1 (NM_021477.2,1055-1073).
gtaaaatattagatgttga

SEQ ID NO: 472984 - DNA, 19 bp, Mus musculus
  siRNA target sequence for A2bp1 (NM_021477.2,1339-1357).
gagggatcttccatgtaca

SEQ ID NO: 472985 - DNA, 19 bp, Mus musculus
  siRNA target sequence for A2bp1 (NM_021477.2,1360-1378).
ggccccagttcacttgtat

SEQ ID NO: 472986 - DNA, 19 bp, Mus musculus
  siRNA target sequence for A2bp1 (NM_021477.2,1361-1379).
gccccagttcacttgtata

SEQ ID NO: 472987 - DNA, 19 bp, Mus musculus
  siRNA target sequence for A2bp1 (NM_021477.2,1459-1477).
ggtcgcaccgtgtacaaca

SEQ ID NO: 472988 - DNA, 19 bp, Mus musculus
  siRNA target sequence for A2bp1 (NM_021477.2,1512-1530).
ggcctatggcggtgttgtt

SEQ ID NO: 472989 - DNA, 19 bp, Mus musculus
  siRNA target sequence for A2bp1 (NM_021477.2,1513-1531).
gcctatggcggtgttgttt

SEQ ID NO: 472990 - DNA, 19 bp, Mus musculus
  siRNA target sequence for A2bp1 (NM_021477.2,1514-1532).
cctatggcggtgttgttta

SEQ ID NO: 472991 - DNA, 19 bp, Mus musculus
  siRNA target sequence for A2bp1 (NM_021477.2,1557-1575).
catttatggtggttatgct

SEQ ID NO: 472992 - DNA, 19 bp, Mus musculus
  siRNA target sequence for A2bp1 (NM_021477.2,1689-1707).
cggcgttggtgccatgaat

SEQ ID NO: 472993 - DNA, 19 bp, Mus musculus
  siRNA target sequence for A2bp1 (NM_021477.2,1753-1771).
gatgtgggtctcgttcttt

SEQ ID NO: 472994 - DNA, 19 bp, Mus musculus
  siRNA target sequence for A2bp1 (NM_021477.2,1758-1776).
gggtctcgttctttcttca

SEQ ID NO: 472995 - DNA, 19 bp, Mus musculus
  siRNA target sequence for A2bp1 (NM_021477.2,1772-1790).
cttcattgcaggctagtat

SEQ ID NO: 472996 - DNA, 19 bp, Mus musculus
  siRNA target sequence for A2bp1 (NM_021477.2,1775-1793).
cattgcaggctagtatata

SEQ ID NO: 472997 - DNA, 19 bp, Mus musculus
  siRNA target sequence for A2bp1 (NM_021477.2,1800-1818).
gggatacaaccgttttgct

SEQ ID NO: 472998 - DNA, 19 bp, Mus musculus
  siRNA target sequence for A2bp1 (NM_183188.1,242-260).
gactgatgcagggtaatca

SEQ ID NO: 472999 - DNA, 19 bp, Mus musculus
  siRNA target sequence for A2bp1 (NM_183188.1,397-415).
gtccctgaccacacattaa

SEQ ID NO: 473000 - DNA, 19 bp, Mus musculus
  siRNA target sequence for A2bp1 (NM_183188.1,401-419).
ctgaccacacattaaacct

SEQ ID NO: 473001 - DNA, 19 bp, Mus musculus
  siRNA target sequence for A2bp1 (NM_183188.1,1103-1121).
cctatggcggagtagtgta

SEQ ID NO: 473002 - DNA, 19 bp, Mus musculus
  siRNA target sequence for A2bp1 (NM_183188.1,1109-1127).
gcggagtagtgtatcaaga

SEQ ID NO: 473003 - DNA, 19 bp, Mus musculus
  siRNA target sequence for A2bp1 (NM_183188.1,1128-1146).
gccagtgtatggcaataaa

SEQ ID NO: 473004 - DNA, 19 bp, Mus musculus
  siRNA target sequence for A2bp1 (NM_183188.1,1134-1152).
gtatggcaataaattgcta

SEQ ID NO: 473005 - DNA, 19 bp, Mus musculus
  siRNA target sequence for A2bp1 (NM_183188.1,1149-1167).
gctacagggtggttatgct

SEQ ID NO: 473006 - DNA, 19 bp, Mus musculus
  siRNA target sequence for A2bp1 (NM_183188.1,1331-1349).
ggagccatgctgatgatgt

SEQ ID NO: 473007 - DNA, 19 bp, Mus musculus
  siRNA target sequence for A530065E19Rik (NM_145433.1,996-1014).
cttgagtccttgaatgtat

SEQ ID NO: 473008 - DNA, 19 bp, Mus musculus
  siRNA target sequence for A530065E19Rik (NM_145433.1,1015-1033).
ctgtggccacaggtattct

SEQ ID NO: 473009 - DNA, 19 bp, Mus musculus
  siRNA target sequence for A530065E19Rik (NM_145433.1,1019-1037).
ggccacaggtattcttcta

SEQ ID NO: 473010 - DNA, 19 bp, Mus musculus
  siRNA target sequence for A530065E19Rik (NM_145433.1,1021-1039).
ccacaggtattcttctaca

SEQ ID NO: 473011 - DNA, 19 bp, Mus musculus
  siRNA target sequence for A930006D11 (NM_177790.2,711-729).
cccgtccactccgaacttt

SEQ ID NO: 473012 - DNA, 19 bp, Mus musculus
  siRNA target sequence for A930006D11 (NM_177790.2,713-731).
cgtccactccgaactttgt

SEQ ID NO: 473013 - DNA, 19 bp, Mus musculus
  siRNA target sequence for A930006D11 (NM_177790.2,824-842).
cgtgggaagtggagtgaat

SEQ ID NO: 473014 - DNA, 19 bp, Mus musculus
  siRNA target sequence for A930006D11 (NM_177790.2,1022-1040).
caagaccaagagagtgata

SEQ ID NO: 473015 - DNA, 19 bp, Mus musculus
  siRNA target sequence for A930006D11 (NM_177790.2,1027-1045).
ccaagagagtgataggaaa

SEQ ID NO: 473016 - DNA, 19 bp, Mus musculus
  siRNA target sequence for A930006D11 (NM_177790.2,1031-1049).
gagagtgataggaaatcgt

SEQ ID NO: 473017 - DNA, 19 bp, Mus musculus
  siRNA target sequence for A930006D11 (NM_177790.2,1227-1245).
gtgagtgttctcaagtcta

SEQ ID NO: 473018 - DNA, 19 bp, Mus musculus
  siRNA target sequence for A930006D11 (NM_177790.2,1229-1247).
gagtgttctcaagtctaaa

SEQ ID NO: 473019 - DNA, 19 bp, Mus musculus
  siRNA target sequence for A930006D11 (NM_177790.2,1447-1465).
ctgcaggacccatcctttt

SEQ ID NO: 473020 - DNA, 19 bp, Mus musculus
  siRNA target sequence for AA409541 (NM_011816.2,206-224).
gtttgtgaggcaatattat

SEQ ID NO: 473021 - DNA, 19 bp, Mus musculus
  siRNA target sequence for AA409541 (NM_011816.2,210-228).
gtgaggcaatattatactt

SEQ ID NO: 473022 - DNA, 19 bp, Mus musculus
  siRNA target sequence for AA409541 (NM_011816.2,269-287).
caggaattcctcctatgtt

SEQ ID NO: 473023 - DNA, 19 bp, Mus musculus
  siRNA target sequence for AA409541 (NM_011816.2,325-343).
cagtttatggccaaaatga

SEQ ID NO: 473024 - DNA, 19 bp, Mus musculus
  siRNA target sequence for AA409541 (NM_011816.2,342-360).
gatatacaccacaaagtgt

SEQ ID NO: 473025 - DNA, 19 bp, Mus musculus
  siRNA target sequence for AA409541 (NM_011816.2,449-467).
gggcttgctgtctaacagt

SEQ ID NO: 473026 - DNA, 19 bp, Mus musculus
  siRNA target sequence for AA409541 (NM_011816.2,481-499).
ggaagtttatgcaaacctt

SEQ ID NO: 473027 - DNA, 19 bp, Mus musculus
  siRNA target sequence for AA409541 (NM_011816.2,695-713).
cgcacaccccgtgactaat

SEQ ID NO: 473028 - DNA, 19 bp, Mus musculus
  siRNA target sequence for AA409541 (NM_011816.2,716-734).
catagaggagcctttagaa

SEQ ID NO: 473029 - DNA, 19 bp, Mus musculus
  siRNA target sequence for AA409541 (NM_011816.2,720-738).
gaggagcctttagaagaat

SEQ ID NO: 473030 - DNA, 19 bp, Mus musculus
  siRNA target sequence for AA409541 (NM_011816.2,902-920).
ggcttcagtgaccagtaaa

SEQ ID NO: 473031 - DNA, 19 bp, Mus musculus
  siRNA target sequence for AA409541 (NM_011816.2,903-921).
gcttcagtgaccagtaaaa

SEQ ID NO: 473032 - DNA, 19 bp, Mus musculus
  siRNA target sequence for AA409541 (NM_011816.2,904-922).
cttcagtgaccagtaaaaa

SEQ ID NO: 473033 - DNA, 19 bp, Mus musculus
  siRNA target sequence for AA409541 (NM_011816.2,907-925).
cagtgaccagtaaaaacct

SEQ ID NO: 473034 - DNA, 19 bp, Mus musculus
  siRNA target sequence for AA409541 (NM_011816.2,926-944).
gcctcctagtggtactgtt

SEQ ID NO: 473035 - DNA, 19 bp, Mus musculus
  siRNA target sequence for AA409541 (NM_011816.2,954-972).
ggaattccaccccatgtta

SEQ ID NO: 473036 - DNA, 19 bp, Mus musculus
  siRNA target sequence for AA409541 (NM_011816.2,1087-1105).
ggccaggcagaggagatat

SEQ ID NO: 473037 - DNA, 19 bp, Mus musculus
  siRNA target sequence for AA409541 (NM_011816.2,1118-1136).
ctctgacaaccggagaata

SEQ ID NO: 473038 - DNA, 19 bp, Mus musculus
  siRNA target sequence for AA409541 (NM_011816.2,1147-1165).
cggacagtcatcagctttt

SEQ ID NO: 473039 - DNA, 19 bp, Mus musculus
  siRNA target sequence for AA409541 (NM_011816.2,1239-1257).
gaacttcgcatcaatacca

SEQ ID NO: 473040 - DNA, 19 bp, Mus musculus
  siRNA target sequence for AA409541 (NM_011816.2,1259-1277).
gggtgttgggggaaaactt

SEQ ID NO: 473041 - DNA, 19 bp, Mus musculus
  siRNA target sequence for AA409541 (NM_011816.2,1267-1285).
ggggaaaacttccaaattt

SEQ ID NO: 473042 - DNA, 19 bp, Mus musculus
  siRNA target sequence for AA409541 (NM_011816.2,1320-1338).
cagagaatcttaattgcaa

SEQ ID NO: 473043 - DNA, 19 bp, Mus musculus
  siRNA target sequence for AA409541 (NM_011816.2,1322-1340).
gagaatcttaattgcaaaa

SEQ ID NO: 473044 - DNA, 19 bp, Mus musculus
  siRNA target sequence for AA409541 (NM_011816.2,1353-1371).
cgaggagaagtacgtttaa

SEQ ID NO: 473045 - DNA, 19 bp, Mus musculus
  siRNA target sequence for AA409541 (NM_011816.2,1354-1372).
gaggagaagtacgtttaaa

SEQ ID NO: 473046 - DNA, 19 bp, Mus musculus
  siRNA target sequence for AA409541 (NM_011816.2,1439-1457).
ggatatcaggcgcaatgat

SEQ ID NO: 473047 - DNA, 19 bp, Mus musculus
  siRNA target sequence for AA409541 (NM_011816.2,1468-1486).
gtggtccacgtggaattgt

SEQ ID NO: 473048 - DNA, 19 bp, Mus musculus
  siRNA target sequence for AA409541 (NM_011816.2,1537-1555).
gtggcatgacacagaaact

SEQ ID NO: 473049 - DNA, 19 bp, Mus musculus
  siRNA target sequence for Adat1 (NM_013925.2,194-212).
gctatgcacactataacgt

SEQ ID NO: 473050 - DNA, 19 bp, Mus musculus
  siRNA target sequence for Adat1 (NM_013925.2,231-249).
gaagcctgagccaaatcgt

SEQ ID NO: 473051 - DNA, 19 bp, Mus musculus
  siRNA target sequence for Adat1 (NM_013925.2,398-416).
gcggggacatcctcaatga

SEQ ID NO: 473052 - DNA, 19 bp, Mus musculus
  siRNA target sequence for Adat1 (NM_013925.2,547-565).
cctgacctgtcgtttgtgt

SEQ ID NO: 473053 - DNA, 19 bp, Mus musculus
  siRNA target sequence for Adat1 (NM_013925.2,550-568).
gacctgtcgtttgtgtttt

SEQ ID NO: 473054 - DNA, 19 bp, Mus musculus
  siRNA target sequence for Adat1 (NM_013925.2,606-624).
cccgatgctcgagtttgaa

SEQ ID NO: 473055 - DNA, 19 bp, Mus musculus
  siRNA target sequence for Adat1 (NM_013925.2,608-626).
cgatgctcgagtttgaaga

SEQ ID NO: 473056 - DNA, 19 bp, Mus musculus
  siRNA target sequence for Adat1 (NM_013925.2,609-627).
gatgctcgagtttgaagaa

SEQ ID NO: 473057 - DNA, 19 bp, Mus musculus
  siRNA target sequence for Adat1 (NM_013925.2,660-678).
caacaactcacctgtacaa

SEQ ID NO: 473058 - DNA, 19 bp, Mus musculus
  siRNA target sequence for Adat1 (NM_013925.2,734-752).
gtcctgtagccaagaagat

SEQ ID NO: 473059 - DNA, 19 bp, Mus musculus
  siRNA target sequence for Adat1 (NM_013925.2,774-792).
gtcactctccaattgtgta

SEQ ID NO: 473060 - DNA, 19 bp, Mus musculus
  siRNA target sequence for Adat1 (NM_013925.2,871-889).
gctgccaatggaatagctt

SEQ ID NO: 473061 - DNA, 19 bp, Mus musculus
  siRNA target sequence for Adat1 (NM_013925.2,990-1008).
ggggctacttcgtgtaaaa

SEQ ID NO: 473062 - DNA, 19 bp, Mus musculus
  siRNA target sequence for Adat1 (NM_013925.2,993-1011).
gctacttcgtgtaaaacct

SEQ ID NO: 473063 - DNA, 19 bp, Mus musculus
  siRNA target sequence for Adat1 (NM_013925.2,1187-1205).
gcaggtgtgaggaaacctt

SEQ ID NO: 473064 - DNA, 19 bp, Mus musculus
  siRNA target sequence for Adat1 (NM_013925.2,1246-1264).
cagcagtcgggtttactgt

SEQ ID NO: 473065 - DNA, 19 bp, Mus musculus
  siRNA target sequence for Adat1 (NM_013925.2,1251-1269).
gtcgggtttactgtttgaa

SEQ ID NO: 473066 - DNA, 19 bp, Mus musculus
  siRNA target sequence for Adat1 (NM_013925.2,1253-1271).
cgggtttactgtttgaaca

SEQ ID NO: 473067 - DNA, 19 bp, Mus musculus
  siRNA target sequence for Adat1 (NM_013925.2,1452-1470).
ggtggaactctttagatca

SEQ ID NO: 473068 - DNA, 19 bp, Mus musculus
  siRNA target sequence for Adat1 (NM_013925.2,1453-1471).
gtggaactctttagatcat

SEQ ID NO: 473069 - DNA, 19 bp, Mus musculus
  siRNA target sequence for Adat1 (NM_013925.2,1637-1655).
cacccgactaccaccaatt

SEQ ID NO: 473070 - DNA, 19 bp, Mus musculus
  siRNA target sequence for Adat1 (NM_013925.2,1639-1657).
cccgactaccaccaattta

SEQ ID NO: 473071 - DNA, 19 bp, Mus musculus
  siRNA target sequence for Adat1 (NM_013925.2,1640-1658).
ccgactaccaccaatttaa

SEQ ID NO: 473072 - DNA, 19 bp, Mus musculus
  siRNA target sequence for Adat1 (NM_013925.2,1641-1659).
cgactaccaccaatttaaa

SEQ ID NO: 473073 - DNA, 19 bp, Mus musculus
  siRNA target sequence for Adat1 (NM_013925.2,1642-1660).
gactaccaccaatttaaat

SEQ ID NO: 473074 - DNA, 19 bp, Mus musculus
  siRNA target sequence for Akap1 (NM_009648.1,482-500).
ccaggttcgacgaagatca

SEQ ID NO: 473075 - DNA, 19 bp, Mus musculus
  siRNA target sequence for Akap1 (NM_009648.1,550-568).
gaccgtgcagagatgagat

SEQ ID NO: 473076 - DNA, 19 bp, Mus musculus
  siRNA target sequence for Akap1 (NM_009648.1,915-933).
ccacaggtagctgaacttt

SEQ ID NO: 473077 - DNA, 19 bp, Mus musculus
  siRNA target sequence for Akap1 (NM_009648.1,921-939).
gtagctgaacttttaaaga

SEQ ID NO: 473078 - DNA, 19 bp, Mus musculus
  siRNA target sequence for Akap1 (NM_009648.1,959-977).
gaagttgccgagtagcttt

SEQ ID NO: 473079 - DNA, 19 bp, Mus musculus
  siRNA target sequence for Akap1 (NM_009648.1,1032-1050).
gtcaaaggtagcagcaata

SEQ ID NO: 473080 - DNA, 19 bp, Mus musculus
  siRNA target sequence for Akap1 (NM_009648.1,1350-1368).
ccaccaaagacctatgtaa

SEQ ID NO: 473081 - DNA, 19 bp, Mus musculus
  siRNA target sequence for Akap1 (NM_009648.1,1480-1498).
ctctggagggggcaagtaa

SEQ ID NO: 473082 - DNA, 19 bp, Mus musculus
  siRNA target sequence for Akap1 (NM_009648.1,1504-1522).
gaggtgatgacaactttgt

SEQ ID NO: 473083 - DNA, 19 bp, Mus musculus
  siRNA target sequence for Akap1 (NM_009648.1,1594-1612).
gtacttcggggcttgaaga

SEQ ID NO: 473084 - DNA, 19 bp, Mus musculus
  siRNA target sequence for Akap1 (NM_009648.1,1631-1649).
ctcaagctccggagacaaa

SEQ ID NO: 473085 - DNA, 19 bp, Mus musculus
  siRNA target sequence for Akap1 (NM_009648.1,1636-1654).
gctccggagacaaagctat

SEQ ID NO: 473086 - DNA, 19 bp, Mus musculus
  siRNA target sequence for Akap1 (NM_009648.1,1773-1791).
ggttctgacgggaacagta

SEQ ID NO: 473087 - DNA, 19 bp, Mus musculus
  siRNA target sequence for Akap1 (NM_009648.1,1774-1792).
gttctgacgggaacagtat

SEQ ID NO: 473088 - DNA, 19 bp, Mus musculus
  siRNA target sequence for Akap1 (NM_009648.1,1779-1797).
gacgggaacagtatggatt

SEQ ID NO: 473089 - DNA, 19 bp, Mus musculus
  siRNA target sequence for Akap1 (NM_009648.1,1937-1955).
gggacggtacgtgagtttt

SEQ ID NO: 473090 - DNA, 19 bp, Mus musculus
  siRNA target sequence for Akap1 (NM_009648.1,1939-1957).
gacggtacgtgagttttct

SEQ ID NO: 473091 - DNA, 19 bp, Mus musculus
  siRNA target sequence for Akap1 (NM_009648.1,1941-1959).
cggtacgtgagttttctga

SEQ ID NO: 473092 - DNA, 19 bp, Mus musculus
  siRNA target sequence for Akap1 (NM_009648.1,1942-1960).
ggtacgtgagttttctgaa

SEQ ID NO: 473093 - DNA, 19 bp, Mus musculus
  siRNA target sequence for Akap1 (NM_009648.1,2054-2072).
caaagctctgaacttgatt

SEQ ID NO: 473094 - DNA, 19 bp, Mus musculus
  siRNA target sequence for Akap1 (NM_009648.1,2093-2111).
gaacctcaccaatatctat

SEQ ID NO: 473095 - DNA, 19 bp, Mus musculus
  siRNA target sequence for Akap1 (NM_009648.1,2334-2352).
gtggaaatcacggttatct

SEQ ID NO: 473096 - DNA, 19 bp, Mus musculus
  siRNA target sequence for Akap1 (NM_009648.1,2438-2456).
cgtggactatggtggatat

SEQ ID NO: 473097 - DNA, 19 bp, Mus musculus
  siRNA target sequence for Akap1 (NM_009648.1,2442-2460).
gactatggtggatataaga

SEQ ID NO: 473098 - DNA, 19 bp, Mus musculus
  siRNA target sequence for Akap1 (NM_009648.1,2471-2489).
cgacgtgctccggcaaatt

SEQ ID NO: 473099 - DNA, 19 bp, Mus musculus
  siRNA target sequence for Akap1 (NM_009648.1,2472-2490).
gacgtgctccggcaaatta

SEQ ID NO: 473100 - DNA, 19 bp, Mus musculus
  siRNA target sequence for Akap1 (NM_009648.1,2475-2493).
gtgctccggcaaattaggt

SEQ ID NO: 473101 - DNA, 19 bp, Mus musculus
  siRNA target sequence for Auh (NM_016709.1,270-288).
ggtgctcgggattaacaga

SEQ ID NO: 473102 - DNA, 19 bp, Mus musculus
  siRNA target sequence for Auh (NM_016709.1,276-294).
cgggattaacagagcttat

SEQ ID NO: 473103 - DNA, 19 bp, Mus musculus
  siRNA target sequence for Auh (NM_016709.1,296-314).
ggaaaaatgcactcagtaa

SEQ ID NO: 473104 - DNA, 19 bp, Mus musculus
  siRNA target sequence for Auh (NM_016709.1,335-353).
caaaagcggtggatgcatt

SEQ ID NO: 473105 - DNA, 19 bp, Mus musculus
  siRNA target sequence for Auh (NM_016709.1,342-360).
ggtggatgcattaaagtca

SEQ ID NO: 473106 - DNA, 19 bp, Mus musculus
  siRNA target sequence for Auh (NM_016709.1,346-364).
gatgcattaaagtcagata

SEQ ID NO: 473107 - DNA, 19 bp, Mus musculus
  siRNA target sequence for Auh (NM_016709.1,413-431).
gtgctggtgctgaccttaa

SEQ ID NO: 473108 - DNA, 19 bp, Mus musculus
  siRNA target sequence for Auh (NM_016709.1,433-451).
gaacgagccaagatgcatt

SEQ ID NO: 473109 - DNA, 19 bp, Mus musculus
  siRNA target sequence for Auh (NM_016709.1,480-498).
gatccgatcggtgatcaat

SEQ ID NO: 473110 - DNA, 19 bp, Mus musculus
  siRNA target sequence for Auh (NM_016709.1,484-502).
cgatcggtgatcaatgaca

SEQ ID NO: 473111 - DNA, 19 bp, Mus musculus
  siRNA target sequence for Auh (NM_016709.1,485-503).
gatcggtgatcaatgacat

SEQ ID NO: 473112 - DNA, 19 bp, Mus musculus
  siRNA target sequence for Auh (NM_016709.1,616-634).
ggcctggttgaaacaaagt

SEQ ID NO: 473113 - DNA, 19 bp, Mus musculus
  siRNA target sequence for Auh (NM_016709.1,617-635).
gcctggttgaaacaaagtt

SEQ ID NO: 473114 - DNA, 19 bp, Mus musculus
  siRNA target sequence for Auh (NM_016709.1,697-715).
gctaaggaactcatcttct

SEQ ID NO: 473115 - DNA, 19 bp, Mus musculus
  siRNA target sequence for Auh (NM_016709.1,756-774).
cttgatcagccatgtgtta

SEQ ID NO: 473116 - DNA, 19 bp, Mus musculus
  siRNA target sequence for Auh (NM_016709.1,819-837).
cctggcgagagagtttcta

SEQ ID NO: 473117 - DNA, 19 bp, Mus musculus
  siRNA target sequence for Auh (NM_016709.1,839-857).
ctcaggggcctgttgcaat

SEQ ID NO: 473118 - DNA, 19 bp, Mus musculus
  siRNA target sequence for Auh (NM_016709.1,843-861).
ggggcctgttgcaatgaga

SEQ ID NO: 473119 - DNA, 19 bp, Mus musculus
  siRNA target sequence for Auh (NM_016709.1,860-878).
gagtggccaaactagcaat

SEQ ID NO: 473120 - DNA, 19 bp, Mus musculus
  siRNA target sequence for Auh (NM_016709.1,866-884).
ccaaactagcaattaacca

SEQ ID NO: 473121 - DNA, 19 bp, Mus musculus
  siRNA target sequence for Auh (NM_016709.1,867-885).
caaactagcaattaaccaa

SEQ ID NO: 473122 - DNA, 19 bp, Mus musculus
  siRNA target sequence for Auh (NM_016709.1,887-905).
ggatggaggtcgacttagt

SEQ ID NO: 473123 - DNA, 19 bp, Mus musculus
  siRNA target sequence for Auh (NM_016709.1,888-906).
gatggaggtcgacttagta

SEQ ID NO: 473124 - DNA, 19 bp, Mus musculus
  siRNA target sequence for Auh (NM_016709.1,891-909).
ggaggtcgacttagtaaca

SEQ ID NO: 473125 - DNA, 19 bp, Mus musculus
  siRNA target sequence for Auh (NM_016709.1,908-926).
cagggttagccatagaaga

SEQ ID NO: 473126 - DNA, 19 bp, Mus musculus
  siRNA target sequence for Auh (NM_016709.1,937-955).
gctcagaccatctcaacaa

SEQ ID NO: 473127 - DNA, 19 bp, Mus musculus
  siRNA target sequence for Auh (NM_016709.1,938-956).
ctcagaccatctcaacaaa

SEQ ID NO: 473128 - DNA, 19 bp, Mus musculus
  siRNA target sequence for AV340375 (NM_172519.1,317-335).
ggccggagacagtataaca

SEQ ID NO: 473129 - DNA, 19 bp, Mus musculus
  siRNA target sequence for AV340375 (NM_172519.1,318-336).
gccggagacagtataacaa

SEQ ID NO: 473130 - DNA, 19 bp, Mus musculus
  siRNA target sequence for AV340375 (NM_172519.1,497-515).
gacaggatgcccatcgtta

SEQ ID NO: 473131 - DNA, 19 bp, Mus musculus
  siRNA target sequence for AV340375 (NM_172519.1,501-519).
ggatgcccatcgttatggt

SEQ ID NO: 473132 - DNA, 19 bp, Mus musculus
  siRNA target sequence for AV340375 (NM_172519.1,511-529).
cgttatggtgacagaagat

SEQ ID NO: 473133 - DNA, 19 bp, Mus musculus
  siRNA target sequence for AV340375 (NM_172519.1,697-715).
gaaagagtacccagaacat

SEQ ID NO: 473134 - DNA, 19 bp, Mus musculus
  siRNA target sequence for AV340375 (NM_172519.1,756-774).
gctacatccagggaattct

SEQ ID NO: 473135 - DNA, 19 bp, Mus musculus
  siRNA target sequence for AV340375 (NM_172519.1,1037-1055).
ggcatccttcagaagaact

SEQ ID NO: 473136 - DNA, 19 bp, Mus musculus
  siRNA target sequence for AV340375 (NM_172519.1,1059-1077).
gagattatgtggtgacatt

SEQ ID NO: 473137 - DNA, 19 bp, Mus musculus
  siRNA target sequence for AV340375 (NM_172519.1,1099-1117).
gtctcagggcaaaaatgct

SEQ ID NO: 473138 - DNA, 19 bp, Mus musculus
  siRNA target sequence for AV340375 (NM_172519.1,1130-1148).
gttacgccgtgggattaca

SEQ ID NO: 473139 - DNA, 19 bp, Mus musculus
  siRNA target sequence for AV340375 (NM_172519.1,1134-1152).
cgccgtgggattacagaat

SEQ ID NO: 473140 - DNA, 19 bp, Mus musculus
  siRNA target sequence for AV340375 (NM_172519.1,1313-1331).
ctggtagagaacagtatct

SEQ ID NO: 473141 - DNA, 19 bp, Mus musculus
  siRNA target sequence for AV340375 (NM_172519.1,1315-1333).
ggtagagaacagtatctct

SEQ ID NO: 473142 - DNA, 19 bp, Mus musculus
  siRNA target sequence for AV340375 (NM_172519.1,1498-1516).
ctcagtcagaaccttgaat

SEQ ID NO: 473143 - DNA, 19 bp, Mus musculus
  siRNA target sequence for AV340375 (NM_172519.1,1546-1564).
cgctgacgtcacacacttt

SEQ ID NO: 473144 - DNA, 19 bp, Mus musculus
  siRNA target sequence for AV340375 (NM_172519.1,1548-1566).
ctgacgtcacacactttgt

SEQ ID NO: 473145 - DNA, 19 bp, Mus musculus
  siRNA target sequence for AV340375 (NM_172519.1,1576-1594).
ctcttacatcgatgttgaa

SEQ ID NO: 473146 - DNA, 19 bp, Mus musculus
  siRNA target sequence for AV340375 (NM_172519.1,1602-1620).
cgagggccaccacttacta

SEQ ID NO: 473147 - DNA, 19 bp, Mus musculus
  siRNA target sequence for AV340375 (NM_172519.1,1625-1643).
gcggaccgtcgctatgaca

SEQ ID NO: 473148 - DNA, 19 bp, Mus musculus
  siRNA target sequence for AV340375 (NM_172519.1,1626-1644).
cggaccgtcgctatgacat

SEQ ID NO: 473149 - DNA, 19 bp, Mus musculus
  siRNA target sequence for AV340375 (NM_172519.1,1710-1728).
cagtcatgtgggaattaga

SEQ ID NO: 473150 - DNA, 19 bp, Mus musculus
  siRNA target sequence for AV340375 (NM_172519.1,1756-1774).
gtggtacggcagaaccatt

SEQ ID NO: 473151 - DNA, 19 bp, Mus musculus
  siRNA target sequence for AV340375 (NM_172519.1,1758-1776).
ggtacggcagaaccattat

SEQ ID NO: 473152 - DNA, 19 bp, Mus musculus
  siRNA target sequence for AV340375 (NM_172519.1,1778-1796).
cgatcagcttacaaactgt

SEQ ID NO: 473153 - DNA, 19 bp, Mus musculus
  siRNA target sequence for AV340375 (NM_172519.1,1782-1800).
cagcttacaaactgttcta

SEQ ID NO: 473154 - DNA, 19 bp, Mus musculus
  siRNA target sequence for AV340375 (NM_172519.1,1903-1921).
gttagtgtgggcaattgga

SEQ ID NO: 473155 - DNA, 19 bp, Mus musculus
  siRNA target sequence for AV340375 (NM_172519.1,1942-1960).
ccacatccgagcaaagaga

SEQ ID NO: 473156 - DNA, 19 bp, Mus musculus
  siRNA target sequence for AV340375 (NM_172519.1,2099-2117).
cactgggtggccaagaaga

SEQ ID NO: 473157 - DNA, 19 bp, Mus musculus
  siRNA target sequence for AV340375 (NM_172519.1,2165-2183).
ccacaccaggagtttttct

SEQ ID NO: 473158 - DNA, 19 bp, Mus musculus
  siRNA target sequence for AV340375 (NM_172519.1,2191-2209).
ccgggaatgtgctaaagca

SEQ ID NO: 473159 - DNA, 19 bp, Mus musculus
  siRNA target sequence for AV340375 (NM_172519.1,2192-2210).
cgggaatgtgctaaagcaa

SEQ ID NO: 473160 - DNA, 19 bp, Mus musculus
  siRNA target sequence for AV340375 (NM_172519.1,2193-2211).
gggaatgtgctaaagcaaa

SEQ ID NO: 473161 - DNA, 19 bp, Mus musculus
  siRNA target sequence for AV340375 (NM_172519.1,2225-2243).
gacacacggtccaataaaa

SEQ ID NO: 473162 - DNA, 19 bp, Mus musculus
  siRNA target sequence for AV340375 (NM_172519.1,2254-2272).
ctctctggatagtgcaaat

SEQ ID NO: 473163 - DNA, 19 bp, Mus musculus
  siRNA target sequence for AV340375 (NM_172519.1,2366-2384).
gaggaggagttccatcatt

SEQ ID NO: 473164 - DNA, 19 bp, Mus musculus
  siRNA target sequence for AV340375 (NM_172519.1,2386-2404).
cgggctggccttagataaa

SEQ ID NO: 473165 - DNA, 19 bp, Mus musculus
  siRNA target sequence for AV340375 (NM_172519.1,2387-2405).
gggctggccttagataaat

SEQ ID NO: 473166 - DNA, 19 bp, Mus musculus
  siRNA target sequence for AV340375 (NM_172519.1,2390-2408).
ctggccttagataaataca

SEQ ID NO: 473167 - DNA, 19 bp, Mus musculus
  siRNA target sequence for AV340375 (NM_172519.1,2399-2417).
gataaatacacccacttta

SEQ ID NO: 473168 - DNA, 19 bp, Mus musculus
  siRNA target sequence for AV340375 (NM_172519.1,2433-2451).
gatactcagatattgtagt

SEQ ID NO: 473169 - DNA, 19 bp, Mus musculus
  siRNA target sequence for AV340375 (NM_172519.1,2447-2465).
gtagtacatcggctattaa

SEQ ID NO: 473170 - DNA, 19 bp, Mus musculus
  siRNA target sequence for AV340375 (NM_172519.1,2512-2530).
gttcagcaacaaaaatctt

SEQ ID NO: 473171 - DNA, 19 bp, Mus musculus
  siRNA target sequence for AV340375 (NM_172519.1,2534-2552).
gaattatgcagacacatta

SEQ ID NO: 473172 - DNA, 19 bp, Mus musculus
  siRNA target sequence for AV340375 (NM_172519.1,2600-2618).
ctcttccagtgcatgtact

SEQ ID NO: 473173 - DNA, 19 bp, Mus musculus
  siRNA target sequence for AV340375 (NM_172519.1,2605-2623).
ccagtgcatgtactttaaa

SEQ ID NO: 473174 - DNA, 19 bp, Mus musculus
  siRNA target sequence for AV340375 (NM_172519.1,2653-2671).
catagctgatggagttatt

SEQ ID NO: 473175 - DNA, 19 bp, Mus musculus
  siRNA target sequence for AV340375 (NM_172519.1,2682-2700).
gaacaaatggtgtacttgt

SEQ ID NO: 473176 - DNA, 19 bp, Mus musculus
  siRNA target sequence for AV340375 (NM_172519.1,2797-2815).
gccaggatccctacaaaga

SEQ ID NO: 473177 - DNA, 19 bp, Mus musculus
  siRNA target sequence for AV340375 (NM_172519.1,2798-2816).
ccaggatccctacaaagat

SEQ ID NO: 473178 - DNA, 19 bp, Mus musculus
  siRNA target sequence for AV340375 (NM_172519.1,2814-2832).
gatctcaaaacaagatcat

SEQ ID NO: 473179 - DNA, 19 bp, Mus musculus
  siRNA target sequence for AV340375 (NM_172519.1,2876-2894).
gaccatgtgacggtaagaa

SEQ ID NO: 473180 - DNA, 19 bp, Mus musculus
  siRNA target sequence for AV340375 (NM_172519.1,2911-2929).
gcgctgccactctgataca

SEQ ID NO: 473181 - DNA, 19 bp, Mus musculus
  siRNA target sequence for AV340375 (NM_172519.1,2912-2930).
cgctgccactctgatacaa

SEQ ID NO: 473182 - DNA, 19 bp, Mus musculus
  siRNA target sequence for AV340375 (NM_172519.1,2924-2942).
gatacaatcaggcttgaaa

SEQ ID NO: 473183 - DNA, 19 bp, Mus musculus
  siRNA target sequence for AV340375 (NM_172519.1,2928-2946).
caatcaggcttgaaatagt

SEQ ID NO: 473184 - DNA, 19 bp, Mus musculus
  siRNA target sequence for B830010L13Rik (NM_178723.3,1430-1448).
catggttgaggctcgtaat

SEQ ID NO: 473185 - DNA, 19 bp, Mus musculus
  siRNA target sequence for B830010L13Rik (NM_178723.3,1433-1451).
ggttgaggctcgtaatgga

SEQ ID NO: 473186 - DNA, 19 bp, Mus musculus
  siRNA target sequence for B830010L13Rik (NM_178723.3,1449-1467).
ggagctggtccaattaagt

SEQ ID NO: 473187 - DNA, 19 bp, Mus musculus
  siRNA target sequence for B830010L13Rik (NM_178723.3,1458-1476).
ccaattaagtcctatccaa

SEQ ID NO: 473188 - DNA, 19 bp, Mus musculus
  siRNA target sequence for B830010L13Rik (NM_178723.3,1477-1495).
gacctgggtcaagattaaa

SEQ ID NO: 473189 - DNA, 19 bp, Mus musculus
  siRNA target sequence for B830010L13Rik (NM_178723.3,1480-1498).
ctgggtcaagattaaaggt

SEQ ID NO: 473190 - DNA, 19 bp, Mus musculus
  siRNA target sequence for B830010L13Rik (NM_178723.3,1516-1534).
gctcaggactacagaacaa

SEQ ID NO: 473191 - DNA, 19 bp, Mus musculus
  siRNA target sequence for B830010L13Rik (NM_178723.3,1522-1540).
gactacagaacaaaatgtt

SEQ ID NO: 473192 - DNA, 19 bp, Mus musculus
  siRNA target sequence for B830010L13Rik (NM_178723.3,1600-1618).
caagccgaaggcataaaga

SEQ ID NO: 473193 - DNA, 19 bp, Mus musculus
  siRNA target sequence for BC003993 (NM_030560.2,2345-2363).
gctcattcagctaaaggta

SEQ ID NO: 473194 - DNA, 19 bp, Mus musculus
  siRNA target sequence for BC028768 (NM_172252.2,145-163).
ctcgaaggttcaattcaca

SEQ ID NO: 473195 - DNA, 19 bp, Mus musculus
  siRNA target sequence for BC028768 (NM_172252.2,172-190).
catatccacaaggatatgt

SEQ ID NO: 473196 - DNA, 19 bp, Mus musculus
  siRNA target sequence for BC028768 (NM_172252.2,211-229).
caccaccctggcaagaagt

SEQ ID NO: 473197 - DNA, 19 bp, Mus musculus
  siRNA target sequence for BC028768 (NM_172252.2,364-382).
ccgcagaggacctgattct

SEQ ID NO: 473198 - DNA, 19 bp, Mus musculus
  siRNA target sequence for BC028768 (NM_172252.2,365-383).
cgcagaggacctgattcta

SEQ ID NO: 473199 - DNA, 19 bp, Mus musculus
  siRNA target sequence for BC028768 (NM_172252.2,372-390).
gacctgattctaattgaaa

SEQ ID NO: 473200 - DNA, 19 bp, Mus musculus
  siRNA target sequence for BC028768 (NM_172252.2,444-462).
gttggggcagacaacttca

SEQ ID NO: 473201 - DNA, 19 bp, Mus musculus
  siRNA target sequence for BC028768 (NM_172252.2,491-509).
ggagcttgtacgagttgaa

SEQ ID NO: 473202 - DNA, 19 bp, Mus musculus
  siRNA target sequence for BC028768 (NM_172252.2,510-528).
gccacagtcattgaaaaga

SEQ ID NO: 473203 - DNA, 19 bp, Mus musculus
  siRNA target sequence for BC028768 (NM_172252.2,529-547).
cagaatcatggcccaaaat

SEQ ID NO: 473204 - DNA, 19 bp, Mus musculus
  siRNA target sequence for BC028768 (NM_172252.2,539-557).
gcccaaaatcaacatgaaa

SEQ ID NO: 473205 - DNA, 19 bp, Mus musculus
  siRNA target sequence for BC028768 (NM_172252.2,595-613).
cagacccctctgggtattt

SEQ ID NO: 473206 - DNA, 19 bp, Mus musculus
  siRNA target sequence for BC028768 (NM_172252.2,625-643).
catgccaaagagagcaatt

SEQ ID NO: 473207 - DNA, 19 bp, Mus musculus
  siRNA target sequence for BC028768 (NM_172252.2,629-647).
ccaaagagagcaattctca

SEQ ID NO: 473208 - DNA, 19 bp, Mus musculus
  siRNA target sequence for BC028768 (NM_172252.2,646-664).
cagaagtcgggcctacttt

SEQ ID NO: 473209 - DNA, 19 bp, Mus musculus
  siRNA target sequence for Cherp (NM_138585.2,87-105).
cttcgaaatgtcatcgata

SEQ ID NO: 473210 - DNA, 19 bp, Mus musculus
  siRNA target sequence for Cherp (NM_138585.2,429-447).
ctgcgccaggagcaagtaa

SEQ ID NO: 473211 - DNA, 19 bp, Mus musculus
  siRNA target sequence for Cherp (NM_138585.2,687-705).
ctacacctcatctatctga

SEQ ID NO: 473212 - DNA, 19 bp, Mus musculus
  siRNA target sequence for Cherp (NM_138585.2,771-789).
gtggtagtacccatctatt

SEQ ID NO: 473213 - DNA, 19 bp, Mus musculus
  siRNA target sequence for Cherp (NM_138585.2,774-792).
gtagtacccatctattgca

SEQ ID NO: 473214 - DNA, 19 bp, Mus musculus
  siRNA target sequence for Cherp (NM_138585.2,908-926).
cctgggacttggtcagtat

SEQ ID NO: 473215 - DNA, 19 bp, Mus musculus
  siRNA target sequence for Cherp (NM_138585.2,930-948).
gcgactctcatcaatgagt

SEQ ID NO: 473216 - DNA, 19 bp, Mus musculus
  siRNA target sequence for Cherp (NM_138585.2,931-949).
cgactctcatcaatgagta

SEQ ID NO: 473217 - DNA, 19 bp, Mus musculus
  siRNA target sequence for Cherp (NM_138585.2,1198-1216).
ctacccagccagatgacaa

SEQ ID NO: 473218 - DNA, 19 bp, Mus musculus
  siRNA target sequence for Cherp (NM_138585.2,1331-1349).
caagcccccttggtttgat

SEQ ID NO: 473219 - DNA, 19 bp, Mus musculus
  siRNA target sequence for Cherp (NM_138585.2,1527-1545).
cagccagatcccaattgga

SEQ ID NO: 473220 - DNA, 19 bp, Mus musculus
  siRNA target sequence for Cherp (NM_138585.2,1529-1547).
gccagatcccaattggaat

SEQ ID NO: 473221 - DNA, 19 bp, Mus musculus
  siRNA target sequence for Cherp (NM_138585.2,1530-1548).
ccagatcccaattggaata

SEQ ID NO: 473222 - DNA, 19 bp, Mus musculus
  siRNA target sequence for Cherp (NM_138585.2,1531-1549).
cagatcccaattggaataa

SEQ ID NO: 473223 - DNA, 19 bp, Mus musculus
  siRNA target sequence for Cherp (NM_138585.2,1693-1711).
ctccacatccccacaactt

SEQ ID NO: 473224 - DNA, 19 bp, Mus musculus
  siRNA target sequence for Cherp (NM_138585.2,1750-1768).
cacctcgtcacccttttga

SEQ ID NO: 473225 - DNA, 19 bp, Mus musculus
  siRNA target sequence for Cherp (NM_138585.2,1781-1799).
ccctcaccgctttgactat

SEQ ID NO: 473226 - DNA, 19 bp, Mus musculus
  siRNA target sequence for Cherp (NM_138585.2,1861-1879).
cacaccctgggatcaatga

SEQ ID NO: 473227 - DNA, 19 bp, Mus musculus
  siRNA target sequence for Cherp (NM_138585.2,2677-2695).
gcattcaggatcccattaa

SEQ ID NO: 473228 - DNA, 19 bp, Mus musculus
  siRNA target sequence for Cherp (NM_138585.2,2700-2718).
ggtgacgtccgggataaat

SEQ ID NO: 473229 - DNA, 19 bp, Mus musculus
  siRNA target sequence for Cherp (NM_138585.2,2746-2764).
ccctggacgacccttatga

SEQ ID NO: 473230 - DNA, 19 bp, Mus musculus
  siRNA target sequence for Cherp (NM_138585.2,2828-2846).
cacatttgggactcgaaaa

SEQ ID NO: 473231 - DNA, 19 bp, Mus musculus
  siRNA target sequence for Cherp (NM_138585.2,2830-2848).
catttgggactcgaaaaga

SEQ ID NO: 473232 - DNA, 19 bp, Mus musculus
  siRNA target sequence for Cirbp (NM_007705.1,90-108).
cagatgaaggcaagctttt

SEQ ID NO: 473233 - DNA, 19 bp, Mus musculus
  siRNA target sequence for Ciz1 (NM_028412.1,434-452).
ctccgtgctttcaatgtga

SEQ ID NO: 473234 - DNA, 19 bp, Mus musculus
  siRNA target sequence for Ciz1 (NM_028412.1,560-578).
cctgttggggtcccaataa

SEQ ID NO: 473235 - DNA, 19 bp, Mus musculus
  siRNA target sequence for Ciz1 (NM_028412.1,561-579).
ctgttggggtcccaataaa

SEQ ID NO: 473236 - DNA, 19 bp, Mus musculus
  siRNA target sequence for Ciz1 (NM_028412.1,647-665).
cccaatcgcaaggattctt

SEQ ID NO: 473237 - DNA, 19 bp, Mus musculus
  siRNA target sequence for Ciz1 (NM_028412.1,649-667).
caatcgcaaggattcttct

SEQ ID NO: 473238 - DNA, 19 bp, Mus musculus
  siRNA target sequence for Ciz1 (NM_028412.1,1414-1432).
cttgccagaaccagtaagt

SEQ ID NO: 473239 - DNA, 19 bp, Mus musculus
  siRNA target sequence for Ciz1 (NM_028412.1,1481-1499).
gatttgggagaatgtgaaa

SEQ ID NO: 473240 - DNA, 19 bp, Mus musculus
  siRNA target sequence for Ciz1 (NM_028412.1,1928-1946).
cacaaggttgccaaacaat

SEQ ID NO: 473241 - DNA, 19 bp, Mus musculus
  siRNA target sequence for Ciz1 (NM_028412.1,1956-1974).
ccttctgcaccatatgcaa

SEQ ID NO: 473242 - DNA, 19 bp, Mus musculus
  siRNA target sequence for Ciz1 (NM_028412.1,1965-1983).
ccatatgcaaccgttactt

SEQ ID NO: 473243 - DNA, 19 bp, Mus musculus
  siRNA target sequence for Ciz1 (NM_028412.1,1984-2002).
caagacccctcgaaagttt

SEQ ID NO: 473244 - DNA, 19 bp, Mus musculus
  siRNA target sequence for Ciz1 (NM_028412.1,2108-2126).
gccgtcggttgctttgaga

SEQ ID NO: 473245 - DNA, 19 bp, Mus musculus
  siRNA target sequence for Ciz1 (NM_028412.1,2207-2225).
caggtgaagccgagagaaa

SEQ ID NO: 473246 - DNA, 19 bp, Mus musculus
  siRNA target sequence for Ciz1 (NM_028412.1,2274-2292).
cctatggtgaggatttcct

SEQ ID NO: 473247 - DNA, 19 bp, Mus musculus
  siRNA target sequence for Ciz1 (NM_028412.1,2306-2324).
ggctatgtctgtcaaatct

SEQ ID NO: 473248 - DNA, 19 bp, Mus musculus
  siRNA target sequence for Ciz1 (NM_028412.1,2349-2367).
cagaattgcggctttctca

SEQ ID NO: 473249 - DNA, 19 bp, Mus musculus
  siRNA target sequence for Ciz1 (NM_028412.1,2585-2603).
cgctcaacacgcctcaaaa

SEQ ID NO: 473250 - DNA, 19 bp, Mus musculus
  siRNA target sequence for Cpsf1 (NM_053193.1,115-133).
cccaccgggctggagttta

SEQ ID NO: 473251 - DNA, 19 bp, Mus musculus
  siRNA target sequence for Cpsf1 (NM_053193.1,185-203).
gcacctcgcagctctatgt

SEQ ID NO: 473252 - DNA, 19 bp, Mus musculus
  siRNA target sequence for Cpsf1 (NM_053193.1,188-206).
cctcgcagctctatgtgta

SEQ ID NO: 473253 - DNA, 19 bp, Mus musculus
  siRNA target sequence for Cpsf1 (NM_053193.1,264-282).
ggcccaccgagagaaacta

SEQ ID NO: 473254 - DNA, 19 bp, Mus musculus
  siRNA target sequence for Cpsf1 (NM_053193.1,266-284).
cccaccgagagaaactaga

SEQ ID NO: 473255 - DNA, 19 bp, Mus musculus
  siRNA target sequence for Cpsf1 (NM_053193.1,362-380).
ccttgcttctcagtttcaa

SEQ ID NO: 473256 - DNA, 19 bp, Mus musculus
  siRNA target sequence for Cpsf1 (NM_053193.1,676-694).
gagaaactactcaacatca

SEQ ID NO: 473257 - DNA, 19 bp, Mus musculus
  siRNA target sequence for Cpsf1 (NM_053193.1,705-723).
gttcctgcatggctactat

SEQ ID NO: 473258 - DNA, 19 bp, Mus musculus
  siRNA target sequence for Cpsf1 (NM_053193.1,808-826).
gctatctcgctgaacatca

SEQ ID NO: 473259 - DNA, 19 bp, Mus musculus
  siRNA target sequence for Cpsf1 (NM_053193.1,905-923).
ccataggtggggtagtgat

SEQ ID NO: 473260 - DNA, 19 bp, Mus musculus
  siRNA target sequence for Cpsf1 (NM_053193.1,957-975).
gagtgttcccccatatggt

SEQ ID NO: 473261 - DNA, 19 bp, Mus musculus
  siRNA target sequence for Cpsf1 (NM_053193.1,974-992).
gtgtggctctcaatagtct

SEQ ID NO: 473262 - DNA, 19 bp, Mus musculus
  siRNA target sequence for Cpsf1 (NM_053193.1,1098-1116).
cctcaagggtggtgagatt

SEQ ID NO: 473263 - DNA, 19 bp, Mus musculus
  siRNA target sequence for Cpsf1 (NM_053193.1,1151-1169).
gtgtccgagcgtttcactt

SEQ ID NO: 473264 - DNA, 19 bp, Mus musculus
  siRNA target sequence for Cpsf1 (NM_053193.1,1157-1175).
gagcgtttcactttgacaa

SEQ ID NO: 473265 - DNA, 19 bp, Mus musculus
  siRNA target sequence for Cpsf1 (NM_053193.1,1196-1214).
ccaccagtatggtcacaat

SEQ ID NO: 473266 - DNA, 19 bp, Mus musculus
  siRNA target sequence for Cpsf1 (NM_053193.1,1327-1345).
gaagagccaccctcaaaga

SEQ ID NO: 473267 - DNA, 19 bp, Mus musculus
  siRNA target sequence for Cpsf1 (NM_053193.1,1401-1419).
cgaggtggatgaaattgaa

SEQ ID NO: 473268 - DNA, 19 bp, Mus musculus
  siRNA target sequence for Cpsf1 (NM_053193.1,1404-1422).
ggtggatgaaattgaagtt

SEQ ID NO: 473269 - DNA, 19 bp, Mus musculus
  siRNA target sequence for Cpsf1 (NM_053193.1,1445-1463).
gcacacagctggctactta

SEQ ID NO: 473270 - DNA, 19 bp, Mus musculus
  siRNA target sequence for Cpsf1 (NM_053193.1,1450-1468).
cagctggctacttactctt

SEQ ID NO: 473271 - DNA, 19 bp, Mus musculus
  siRNA target sequence for Cpsf1 (NM_053193.1,1478-1496).
gtgacagcatgctcaacat

SEQ ID NO: 473272 - DNA, 19 bp, Mus musculus
  siRNA target sequence for Cpsf1 (NM_053193.1,1647-1665).
ggtggtgacaacctttgaa

SEQ ID NO: 473273 - DNA, 19 bp, Mus musculus
  siRNA target sequence for Cpsf1 (NM_053193.1,1786-1804).
cgaagacatggcttcctta

SEQ ID NO: 473274 - DNA, 19 bp, Mus musculus
  siRNA target sequence for Cpsf1 (NM_053193.1,1917-1935).
ggacaatcgttacattgtt

SEQ ID NO: 473275 - DNA, 19 bp, Mus musculus
  siRNA target sequence for Cpsf1 (NM_053193.1,1920-1938).
caatcgttacattgttcaa

SEQ ID NO: 473276 - DNA, 19 bp, Mus musculus
  siRNA target sequence for Cpsf1 (NM_053193.1,1962-1980).
gttggaaggcgtgaatcaa

SEQ ID NO: 473277 - DNA, 19 bp, Mus musculus
  siRNA target sequence for Cpsf1 (NM_053193.1,2060-2078).
ctgagggacacgttaccat

SEQ ID NO: 473278 - DNA, 19 bp, Mus musculus
  siRNA target sequence for Cpsf1 (NM_053193.1,2485-2503).
cggctggtattcctagtta

SEQ ID NO: 473279 - DNA, 19 bp, Mus musculus
  siRNA target sequence for Cpsf1 (NM_053193.1,2486-2504).
ggctggtattcctagttaa

SEQ ID NO: 473280 - DNA, 19 bp, Mus musculus
  siRNA target sequence for Cpsf1 (NM_053193.1,2527-2545).
gttctggtggacagttcat

SEQ ID NO: 473281 - DNA, 19 bp, Mus musculus
  siRNA target sequence for Cpsf1 (NM_053193.1,2598-2616).
gggggagctgcctttggtt

SEQ ID NO: 473282 - DNA, 19 bp, Mus musculus
  siRNA target sequence for Cpsf1 (NM_053193.1,2599-2617).
ggggagctgcctttggtta

SEQ ID NO: 473283 - DNA, 19 bp, Mus musculus
  siRNA target sequence for Cpsf1 (NM_053193.1,2600-2618).
gggagctgcctttggttaa

SEQ ID NO: 473284 - DNA, 19 bp, Mus musculus
  siRNA target sequence for Cpsf1 (NM_053193.1,2729-2747).
gccagggaaatcttaaagt

SEQ ID NO: 473285 - DNA, 19 bp, Mus musculus
  siRNA target sequence for Cpsf1 (NM_053193.1,2754-2772).
caaaaaggtccctcacaat

SEQ ID NO: 473286 - DNA, 19 bp, Mus musculus
  siRNA target sequence for Cpsf1 (NM_053193.1,2761-2779).
gtccctcacaatatcaact

SEQ ID NO: 473287 - DNA, 19 bp, Mus musculus
  siRNA target sequence for Cpsf1 (NM_053193.1,2862-2880).
ggcacgtttccgctacttt

SEQ ID NO: 473288 - DNA, 19 bp, Mus musculus
  siRNA target sequence for Cpsf1 (NM_053193.1,2864-2882).
cacgtttccgctactttga

SEQ ID NO: 473289 - DNA, 19 bp, Mus musculus
  siRNA target sequence for Cpsf1 (NM_053193.1,2871-2889).
ccgctactttgaggatatt

SEQ ID NO: 473290 - DNA, 19 bp, Mus musculus
  siRNA target sequence for Cpsf1 (NM_053193.1,2893-2911).
ggctattcgggggttttca

SEQ ID NO: 473291 - DNA, 19 bp, Mus musculus
  siRNA target sequence for Cpsf1 (NM_053193.1,2894-2912).
gctattcgggggttttcat

SEQ ID NO: 473292 - DNA, 19 bp, Mus musculus
  siRNA target sequence for Cpsf1 (NM_053193.1,2967-2985).
gcaccccatgggcattgat

SEQ ID NO: 473293 - DNA, 19 bp, Mus musculus
  siRNA target sequence for Cpsf1 (NM_053193.1,3004-3022).
gctccgttccacaatgtga

SEQ ID NO: 473294 - DNA, 19 bp, Mus musculus
  siRNA target sequence for Cpsf1 (NM_053193.1,3005-3023).
ctccgttccacaatgtgaa

SEQ ID NO: 473295 - DNA, 19 bp, Mus musculus
  siRNA target sequence for Cpsf1 (NM_053193.1,3034-3052).
ggtttcctgtacttcaaca

SEQ ID NO: 473296 - DNA, 19 bp, Mus musculus
  siRNA target sequence for Cpsf1 (NM_053193.1,3228-3246).
gactggcgaggaaaaagaa

SEQ ID NO: 473297 - DNA, 19 bp, Mus musculus
  siRNA target sequence for Cpsf1 (NM_053193.1,3230-3248).
ctggcgaggaaaaagaatt

SEQ ID NO: 473298 - DNA, 19 bp, Mus musculus
  siRNA target sequence for Cpsf1 (NM_053193.1,3233-3251).
gcgaggaaaaagaattcga

SEQ ID NO: 473299 - DNA, 19 bp, Mus musculus
  siRNA target sequence for Cpsf1 (NM_053193.1,3373-3391).
catgtcacgtgcatgaaga

SEQ ID NO: 473300 - DNA, 19 bp, Mus musculus
  siRNA target sequence for Cpsf1 (NM_053193.1,3485-3503).
gtgggcggatcctgatcat

SEQ ID NO: 473301 - DNA, 19 bp, Mus musculus
  siRNA target sequence for Cpsf1 (NM_053193.1,3627-3645).
gtcggccattggccaaaaa

SEQ ID NO: 473302 - DNA, 19 bp, Mus musculus
  siRNA target sequence for Cpsf1 (NM_053193.1,3632-3650).
ccattggccaaaaaatctt

SEQ ID NO: 473303 - DNA, 19 bp, Mus musculus
  siRNA target sequence for Cpsf1 (NM_053193.1,3827-3845).
ccaagcctttggaggtata

SEQ ID NO: 473304 - DNA, 19 bp, Mus musculus
  siRNA target sequence for Cpsf1 (NM_053193.1,3895-3913).
gaccgagaccgcaatctta

SEQ ID NO: 473305 - DNA, 19 bp, Mus musculus
  siRNA target sequence for Cpsf1 (NM_053193.1,3899-3917).
gagaccgcaatcttatggt

SEQ ID NO: 473306 - DNA, 19 bp, Mus musculus
  siRNA target sequence for Cpsf1 (NM_053193.1,3904-3922).
cgcaatcttatggtgtata

SEQ ID NO: 473307 - DNA, 19 bp, Mus musculus
  siRNA target sequence for Cpsf1 (NM_053193.1,3905-3923).
gcaatcttatggtgtatat

SEQ ID NO: 473308 - DNA, 19 bp, Mus musculus
  siRNA target sequence for Cpsf1 (NM_053193.1,3988-4006).
gtgggtgcccacgtgaata

SEQ ID NO: 473309 - DNA, 19 bp, Mus musculus
  siRNA target sequence for Cpsf1 (NM_053193.1,3991-4009).
ggtgcccacgtgaatacgt

SEQ ID NO: 473310 - DNA, 19 bp, Mus musculus
  siRNA target sequence for Cpsf1 (NM_053193.1,4074-4092).
caagcatatcacatggttt

SEQ ID NO: 473311 - DNA, 19 bp, Mus musculus
  siRNA target sequence for Cpsf1 (NM_053193.1,4285-4303).
ctgctaaaccgctacctat

SEQ ID NO: 473312 - DNA, 19 bp, Mus musculus
  siRNA target sequence for Cpsf1 (NM_053193.1,4345-4363).
ggtaccacgcctgacatta

SEQ ID NO: 473313 - DNA, 19 bp, Mus musculus
  siRNA target sequence for Cpsf1 (NM_053193.1,4346-4364).
gtaccacgcctgacattat

SEQ ID NO: 473314 - DNA, 19 bp, Mus musculus
  siRNA target sequence for Cpsf1 (NM_053193.1,4349-4367).
ccacgcctgacattatcct

SEQ ID NO: 473315 - DNA, 19 bp, Mus musculus
  siRNA target sequence for Cpsf2 (NM_016856.2,172-190).
gacatctatcatcaagtta

SEQ ID NO: 473316 - DNA, 19 bp, Mus musculus
  siRNA target sequence for Cpsf2 (NM_016856.2,217-235).
gtccgctctttgctatctt

SEQ ID NO: 473317 - DNA, 19 bp, Mus musculus
  siRNA target sequence for Cpsf2 (NM_016856.2,236-254).
ctccaggttgatgagttta

SEQ ID NO: 473318 - DNA, 19 bp, Mus musculus
  siRNA target sequence for Cpsf2 (NM_016856.2,309-327).
ccctgaggaagcatgttca

SEQ ID NO: 473319 - DNA, 19 bp, Mus musculus
  siRNA target sequence for Cpsf2 (NM_016856.2,414-432).
gtgccatctatgcaacaat

SEQ ID NO: 473320 - DNA, 19 bp, Mus musculus
  siRNA target sequence for Cpsf2 (NM_016856.2,418-436).
catctatgcaacaattcct

SEQ ID NO: 473321 - DNA, 19 bp, Mus musculus
  siRNA target sequence for Cpsf2 (NM_016856.2,472-490).
ctatcagtctcgacacaat

SEQ ID NO: 473322 - DNA, 19 bp, Mus musculus
  siRNA target sequence for Cpsf2 (NM_016856.2,478-496).
gtctcgacacaatacagaa

SEQ ID NO: 473323 - DNA, 19 bp, Mus musculus
  siRNA target sequence for Cpsf2 (NM_016856.2,482-500).
cgacacaatacagaagatt

SEQ ID NO: 473324 - DNA, 19 bp, Mus musculus
  siRNA target sequence for Cpsf2 (NM_016856.2,497-515).
gattttaccctctttacat

SEQ ID NO: 473325 - DNA, 19 bp, Mus musculus
  siRNA target sequence for Cpsf2 (NM_016856.2,531-549).
cagcctttgacaaaataca

SEQ ID NO: 473326 - DNA, 19 bp, Mus musculus
  siRNA target sequence for Cpsf2 (NM_016856.2,616-634).
gccagctggtcatatgata

SEQ ID NO: 473327 - DNA, 19 bp, Mus musculus
  siRNA target sequence for Cpsf2 (NM_016856.2,709-727).
ggagatccacttaaatgga

SEQ ID NO: 473328 - DNA, 19 bp, Mus musculus
  siRNA target sequence for Cpsf2 (NM_016856.2,710-728).
gagatccacttaaatggat

SEQ ID NO: 473329 - DNA, 19 bp, Mus musculus
  siRNA target sequence for Cpsf2 (NM_016856.2,747-765).
gcagaccctctctacttat

SEQ ID NO: 473330 - DNA, 19 bp, Mus musculus
  siRNA target sequence for Cpsf2 (NM_016856.2,761-779).
cttatcacagactcattta

SEQ ID NO: 473331 - DNA, 19 bp, Mus musculus
  siRNA target sequence for Cpsf2 (NM_016856.2,909-927).
ctcaactcctggatcagat

SEQ ID NO: 473332 - DNA, 19 bp, Mus musculus
  siRNA target sequence for Cpsf2 (NM_016856.2,911-929).
caactcctggatcagattt

SEQ ID NO: 473333 - DNA, 19 bp, Mus musculus
  siRNA target sequence for Cpsf2 (NM_016856.2,944-962).
gccgggttgggcgtttact

SEQ ID NO: 473334 - DNA, 19 bp, Mus musculus
  siRNA target sequence for Cpsf2 (NM_016856.2,963-981).
cgctggctctcctgaacaa

SEQ ID NO: 473335 - DNA, 19 bp, Mus musculus
  siRNA target sequence for Cpsf2 (NM_016856.2,974-992).
ctgaacaacgtcagttaca

SEQ ID NO: 473336 - DNA, 19 bp, Mus musculus
  siRNA target sequence for Cpsf2 (NM_016856.2,991-1009).
caacgtggtggagttttct

SEQ ID NO: 473337 - DNA, 19 bp, Mus musculus
  siRNA target sequence for Cpsf2 (NM_016856.2,1065-1083).
gaaataacccatttcagtt

SEQ ID NO: 473338 - DNA, 19 bp, Mus musculus
  siRNA target sequence for Cpsf2 (NM_016856.2,1131-1149).
caagccccaaagttgtact

SEQ ID NO: 473339 - DNA, 19 bp, Mus musculus
  siRNA target sequence for Cpsf2 (NM_016856.2,1166-1184).
ctggagtgtggattctcaa

SEQ ID NO: 473340 - DNA, 19 bp, Mus musculus
  siRNA target sequence for Cpsf2 (NM_016856.2,1182-1200).
caagggacctctttattca

SEQ ID NO: 473341 - DNA, 19 bp, Mus musculus
  siRNA target sequence for Cpsf2 (NM_016856.2,1211-1229).
gaccctaaaaactcaatca

SEQ ID NO: 473342 - DNA, 19 bp, Mus musculus
  siRNA target sequence for Cpsf2 (NM_016856.2,1215-1233).
ctaaaaactcaatcattct

SEQ ID NO: 473343 - DNA, 19 bp, Mus musculus
  siRNA target sequence for Cpsf2 (NM_016856.2,1222-1240).
ctcaatcattctaacttat

SEQ ID NO: 473344 - DNA, 19 bp, Mus musculus
  siRNA target sequence for Cpsf2 (NM_016856.2,1243-1261).
gacaactccggggacttta

SEQ ID NO: 473345 - DNA, 19 bp, Mus musculus
  siRNA target sequence for Cpsf2 (NM_016856.2,1262-1280).
gcacgtttcttaatcgata

SEQ ID NO: 473346 - DNA, 19 bp, Mus musculus
  siRNA target sequence for Cpsf2 (NM_016856.2,1263-1281).
cacgtttcttaatcgataa

SEQ ID NO: 473347 - DNA, 19 bp, Mus musculus
  siRNA target sequence for Cpsf2 (NM_016856.2,1276-1294).
cgataatcctactgagaaa

SEQ ID NO: 473348 - DNA, 19 bp, Mus musculus
  siRNA target sequence for Cpsf2 (NM_016856.2,1284-1302).
ctactgagaaagttacaga

SEQ ID NO: 473349 - DNA, 19 bp, Mus musculus
  siRNA target sequence for Cpsf2 (NM_016856.2,1464-1482).
catcggctcacaagacaaa

SEQ ID NO: 473350 - DNA, 19 bp, Mus musculus
  siRNA target sequence for Cpsf2 (NM_016856.2,1479-1497).
caaagcacgacctgatgat

SEQ ID NO: 473351 - DNA, 19 bp, Mus musculus
  siRNA target sequence for Cpsf2 (NM_016856.2,1746-1764).
cagagtctattgagataaa

SEQ ID NO: 473352 - DNA, 19 bp, Mus musculus
  siRNA target sequence for Cpsf2 (NM_016856.2,1800-1818).
ccgatggagactccattaa

SEQ ID NO: 473353 - DNA, 19 bp, Mus musculus
  siRNA target sequence for Cpsf2 (NM_016856.2,1802-1820).
gatggagactccattaaaa

SEQ ID NO: 473354 - DNA, 19 bp, Mus musculus
  siRNA target sequence for Cpsf2 (NM_016856.2,1968-1986).
ccagtgaaacgcatatcta

SEQ ID NO: 473355 - DNA, 19 bp, Mus musculus
  siRNA target sequence for Cpsf2 (NM_016856.2,1979-1997).
catatctaccaggtaagat

SEQ ID NO: 473356 - DNA, 19 bp, Mus musculus
  siRNA target sequence for Cpsf2 (NM_016856.2,1984-2002).
ctaccaggtaagattaaaa

SEQ ID NO: 473357 - DNA, 19 bp, Mus musculus
  siRNA target sequence for Cpsf2 (NM_016856.2,2021-2039).
cttcagttctgtaaagcta

SEQ ID NO: 473358 - DNA, 19 bp, Mus musculus
  siRNA target sequence for Cpsf2 (NM_016856.2,2047-2065).
cgagttagcttggatagat

SEQ ID NO: 473359 - DNA, 19 bp, Mus musculus
  siRNA target sequence for Cpsf2 (NM_016856.2,2058-2076).
ggatagatggcgtcttaga

SEQ ID NO: 473360 - DNA, 19 bp, Mus musculus
  siRNA target sequence for Cpsf2 (NM_016856.2,2069-2087).
gtcttagacatgagagttt

SEQ ID NO: 473361 - DNA, 19 bp, Mus musculus
  siRNA target sequence for Cpsf2 (NM_016856.2,2093-2111).
gtggacacgggagttattt

SEQ ID NO: 473362 - DNA, 19 bp, Mus musculus
  siRNA target sequence for Cpsf2 (NM_016856.2,2162-2180).
gatgctccatccgattcta

SEQ ID NO: 473363 - DNA, 19 bp, Mus musculus
  siRNA target sequence for Cpsf2 (NM_016856.2,2334-2352).
ctgacttcaagcaagttct

SEQ ID NO: 473364 - DNA, 19 bp, Mus musculus
  siRNA target sequence for Cpsf2 (NM_016856.2,2362-2380).
ggggattcaagcggaattt

SEQ ID NO: 473365 - DNA, 19 bp, Mus musculus
  siRNA target sequence for Cpsf2 (NM_016856.2,2365-2383).
gattcaagcggaatttgta

SEQ ID NO: 473366 - DNA, 19 bp, Mus musculus
  siRNA target sequence for Cpsf2 (NM_016856.2,2389-2407).
cgtacttgtctgcaacaat

SEQ ID NO: 473367 - DNA, 19 bp, Mus musculus
  siRNA target sequence for Cpsf2 (NM_016856.2,2414-2432).
gcagttcgcagaacagaaa

SEQ ID NO: 473368 - DNA, 19 bp, Mus musculus
  siRNA target sequence for Cpsf2 (NM_016856.2,2433-2451).
ctggacgcatcggattaga

SEQ ID NO: 473369 - DNA, 19 bp, Mus musculus
  siRNA target sequence for Cpsf2 (NM_016856.2,2458-2476).
cctttgtcaagacttttat

SEQ ID NO: 473370 - DNA, 19 bp, Mus musculus
  siRNA target sequence for Cpsf2 (NM_016856.2,2478-2496).
ggatacgagaccttttata

SEQ ID NO: 473371 - DNA, 19 bp, Mus musculus
  siRNA target sequence for Cpsf2 (NM_016856.2,2479-2497).
gatacgagaccttttatat

SEQ ID NO: 473372 - DNA, 19 bp, Mus musculus
  siRNA target sequence for Cpsf3 (NM_018813.2,164-182).
gtattattctggagttcaa

SEQ ID NO: 473373 - DNA, 19 bp, Mus musculus
  siRNA target sequence for Cpsf3 (NM_018813.2,245-263).
cttacattgaccttatcga

SEQ ID NO: 473374 - DNA, 19 bp, Mus musculus
  siRNA target sequence for Cpsf3 (NM_018813.2,280-298).
cttctgttgatcagtcatt

SEQ ID NO: 473375 - DNA, 19 bp, Mus musculus
  siRNA target sequence for Cpsf3 (NM_018813.2,371-389).
cccacgccacaaaagctat

SEQ ID NO: 473376 - DNA, 19 bp, Mus musculus
  siRNA target sequence for Cpsf3 (NM_018813.2,372-390).
ccacgccacaaaagctatt

SEQ ID NO: 473377 - DNA, 19 bp, Mus musculus
  siRNA target sequence for Cpsf3 (NM_018813.2,375-393).
cgccacaaaagctatttat

SEQ ID NO: 473378 - DNA, 19 bp, Mus musculus
  siRNA target sequence for Cpsf3 (NM_018813.2,376-394).
gccacaaaagctatttata

SEQ ID NO: 473379 - DNA, 19 bp, Mus musculus
  siRNA target sequence for Cpsf3 (NM_018813.2,520-538).
gttgcaggaatcaagttct

SEQ ID NO: 473380 - DNA, 19 bp, Mus musculus
  siRNA target sequence for Cpsf3 (NM_018813.2,566-584).
gagcagccatgtttatgat

SEQ ID NO: 473381 - DNA, 19 bp, Mus musculus
  siRNA target sequence for Cpsf3 (NM_018813.2,571-589).
gccatgtttatgatagaga

SEQ ID NO: 473382 - DNA, 19 bp, Mus musculus
  siRNA target sequence for Cpsf3 (NM_018813.2,609-627).
gtatacaggtgatttctca

SEQ ID NO: 473383 - DNA, 19 bp, Mus musculus
  siRNA target sequence for Cpsf3 (NM_018813.2,651-669).
ggctgctgagattcctaat

SEQ ID NO: 473384 - DNA, 19 bp, Mus musculus
  siRNA target sequence for Cpsf3 (NM_018813.2,653-671).
ctgctgagattcctaatat

SEQ ID NO: 473385 - DNA, 19 bp, Mus musculus
  siRNA target sequence for Cpsf3 (NM_018813.2,687-705).
gatcattgagtctacgtat

SEQ ID NO: 473386 - DNA, 19 bp, Mus musculus
  siRNA target sequence for Cpsf3 (NM_018813.2,701-719).
cgtatgggacccatatcca

SEQ ID NO: 473387 - DNA, 19 bp, Mus musculus
  siRNA target sequence for Cpsf3 (NM_018813.2,702-720).
gtatgggacccatatccat

SEQ ID NO: 473388 - DNA, 19 bp, Mus musculus
  siRNA target sequence for Cpsf3 (NM_018813.2,758-776).
ctgtgcacgacattgtcaa

SEQ ID NO: 473389 - DNA, 19 bp, Mus musculus
  siRNA target sequence for Cpsf3 (NM_018813.2,864-882).
cccggagctgcatgacata

SEQ ID NO: 473390 - DNA, 19 bp, Mus musculus
  siRNA target sequence for Cpsf3 (NM_018813.2,1067-1085).
caccaggcatgattcaaaa

SEQ ID NO: 473391 - DNA, 19 bp, Mus musculus
  siRNA target sequence for Cpsf3 (NM_018813.2,1244-1262).
cggttgattacatttcttt

SEQ ID NO: 473392 - DNA, 19 bp, Mus musculus
  siRNA target sequence for Cpsf3 (NM_018813.2,1314-1332).
gccacctcacgtgatttta

SEQ ID NO: 473393 - DNA, 19 bp, Mus musculus
  siRNA target sequence for Cpsf3 (NM_018813.2,1316-1334).
cacctcacgtgattttagt

SEQ ID NO: 473394 - DNA, 19 bp, Mus musculus
  siRNA target sequence for Cpsf3 (NM_018813.2,1370-1388).
cagcgctgatccgagaata

SEQ ID NO: 473395 - DNA, 19 bp, Mus musculus
  siRNA target sequence for Cpsf3 (NM_018813.2,1373-1391).
cgctgatccgagaatatga

SEQ ID NO: 473396 - DNA, 19 bp, Mus musculus
  siRNA target sequence for Cpsf3 (NM_018813.2,1374-1392).
gctgatccgagaatatgaa

SEQ ID NO: 473397 - DNA, 19 bp, Mus musculus
  siRNA target sequence for Cpsf3 (NM_018813.2,1377-1395).
gatccgagaatatgaagat

SEQ ID NO: 473398 - DNA, 19 bp, Mus musculus
  siRNA target sequence for Cpsf3 (NM_018813.2,1380-1398).
ccgagaatatgaagataat

SEQ ID NO: 473399 - DNA, 19 bp, Mus musculus
  siRNA target sequence for Cpsf3 (NM_018813.2,1436-1454).
cagaggccgtgaccttaaa

SEQ ID NO: 473400 - DNA, 19 bp, Mus musculus
  siRNA target sequence for Cpsf3 (NM_018813.2,1441-1459).
gccgtgaccttaaacttca

SEQ ID NO: 473401 - DNA, 19 bp, Mus musculus
  siRNA target sequence for Cpsf3 (NM_018813.2,1521-1539).
gcgggtctctggaattctt

SEQ ID NO: 473402 - DNA, 19 bp, Mus musculus
  siRNA target sequence for Cpsf3 (NM_018813.2,1573-1591).
ccctgtgacctctccaatt

SEQ ID NO: 473403 - DNA, 19 bp, Mus musculus
  siRNA target sequence for Cpsf3 (NM_018813.2,1677-1695).
gaaattgacgggtgatgta

SEQ ID NO: 473404 - DNA, 19 bp, Mus musculus
  siRNA target sequence for Cpsf3 (NM_018813.2,1683-1701).
gacgggtgatgtagaagaa

SEQ ID NO: 473405 - DNA, 19 bp, Mus musculus
  siRNA target sequence for Cpsf3 (NM_018813.2,1721-1739).
ctgctctgaaggtgttcaa

SEQ ID NO: 473406 - DNA, 19 bp, Mus musculus
  siRNA target sequence for Cpsf3 (NM_018813.2,1723-1741).
gctctgaaggtgttcaaaa

SEQ ID NO: 473407 - DNA, 19 bp, Mus musculus
  siRNA target sequence for Cpsf3 (NM_018813.2,1865-1883).
ggaaaggtgcagtacagaa

SEQ ID NO: 473408 - DNA, 19 bp, Mus musculus
  siRNA target sequence for Cstf2t (NM_031249.1,127-145).
ggtgttcgtggggaacatt

SEQ ID NO: 473409 - DNA, 19 bp, Mus musculus
  siRNA target sequence for Cstf2t (NM_031249.1,155-173).
gcgacggaggagcagttaa

SEQ ID NO: 473410 - DNA, 19 bp, Mus musculus
  siRNA target sequence for Cstf2t (NM_031249.1,156-174).
cgacggaggagcagttaaa

SEQ ID NO: 473411 - DNA, 19 bp, Mus musculus
  siRNA target sequence for Cstf2t (NM_031249.1,304-322).
cctcaatgggcgagagttt

SEQ ID NO: 473412 - DNA, 19 bp, Mus musculus
  siRNA target sequence for Cstf2t (NM_031249.1,305-323).
ctcaatgggcgagagttta

SEQ ID NO: 473413 - DNA, 19 bp, Mus musculus
  siRNA target sequence for Cstf2t (NM_031249.1,307-325).
caatgggcgagagtttagt

SEQ ID NO: 473414 - DNA, 19 bp, Mus musculus
  siRNA target sequence for Cstf2t (NM_031249.1,427-445).
ccctatcgacccagaagat

SEQ ID NO: 473415 - DNA, 19 bp, Mus musculus
  siRNA target sequence for Cstf2t (NM_031249.1,443-461).
gatgctccagaatcgatta

SEQ ID NO: 473416 - DNA, 19 bp, Mus musculus
  siRNA target sequence for Cstf2t (NM_031249.1,446-464).
gctccagaatcgattacta

SEQ ID NO: 473417 - DNA, 19 bp, Mus musculus
  siRNA target sequence for Cstf2t (NM_031249.1,771-789).
cgggacctaacgtcatgtt

SEQ ID NO: 473418 - DNA, 19 bp, Mus musculus
  siRNA target sequence for Cstf2t (NM_031249.1,773-791).
ggacctaacgtcatgttga

SEQ ID NO: 473419 - DNA, 19 bp, Mus musculus
  siRNA target sequence for Cstf2t (NM_031249.1,774-792).
gacctaacgtcatgttgaa

SEQ ID NO: 473420 - DNA, 19 bp, Mus musculus
  siRNA target sequence for Cstf2t (NM_031249.1,1007-1025).
cgaggacagatgcagatat

SEQ ID NO: 473421 - DNA, 19 bp, Mus musculus
  siRNA target sequence for Cstf2t (NM_031249.1,1412-1430).
gagacctgcgcgatggaaa

SEQ ID NO: 473422 - DNA, 19 bp, Mus musculus
  siRNA target sequence for Cstf2t (NM_031249.1,1510-1528).
gggtcctggccctattaat

SEQ ID NO: 473423 - DNA, 19 bp, Mus musculus
  siRNA target sequence for Cstf2t (NM_031249.1,1553-1571).
cctagacaggttccaaata

SEQ ID NO: 473424 - DNA, 19 bp, Mus musculus
  siRNA target sequence for Cstf2t (NM_031249.1,1554-1572).
ctagacaggttccaaatat

SEQ ID NO: 473425 - DNA, 19 bp, Mus musculus
  siRNA target sequence for Cstf2t (NM_031249.1,1600-1618).
catgcagggggcaggtata

SEQ ID NO: 473426 - DNA, 19 bp, Mus musculus
  siRNA target sequence for Cstf2t (NM_031249.1,1819-1837).
ccaggtaactccacaagat

SEQ ID NO: 473427 - DNA, 19 bp, Mus musculus
  siRNA target sequence for D15Ertd806e (NM_144523.2,400-418).
cggcgtgcggcaagaagtt

SEQ ID NO: 473428 - DNA, 19 bp, Mus musculus
  siRNA target sequence for D15Ertd806e (NM_144523.2,611-629).
ctccacgtcccccaagaaa

SEQ ID NO: 473429 - DNA, 19 bp, Mus musculus
  siRNA target sequence for D15Ertd806e (NM_144523.2,918-936).
ctaggtgccatcccaataa

SEQ ID NO: 473430 - DNA, 19 bp, Mus musculus
  siRNA target sequence for D15Ertd806e (NM_144523.2,947-965).
gttttgctcccatcattca

SEQ ID NO: 473431 - DNA, 19 bp, Mus musculus
  siRNA target sequence for D15Ertd806e (NM_144523.2,980-998).
gaatgtggctcatatgact

SEQ ID NO: 473432 - DNA, 19 bp, Mus musculus
  siRNA target sequence for D15Ertd806e (NM_144523.2,1029-1047).
gagtatctttcagatttga

SEQ ID NO: 473433 - DNA, 19 bp, Mus musculus
  siRNA target sequence for D15Ertd806e (NM_144523.2,1041-1059).
gatttgaaaggactaatta

SEQ ID NO: 473434 - DNA, 19 bp, Mus musculus
  siRNA target sequence for D15Ertd806e (NM_144523.2,1077-1095).
gttggtgttggcaaaattt

SEQ ID NO: 473435 - DNA, 19 bp, Mus musculus
  siRNA target sequence for D15Ertd806e (NM_144523.2,1116-1134).
gggaagtccttctattcca

SEQ ID NO: 473436 - DNA, 19 bp, Mus musculus
  siRNA target sequence for D15Ertd806e (NM_144523.2,1141-1159).
ctgtacaggcacacatgaa

SEQ ID NO: 473437 - DNA, 19 bp, Mus musculus
  siRNA target sequence for D15Ertd806e (NM_144523.2,1191-1209).
ggtgacgctgccttggaat

SEQ ID NO: 473438 - DNA, 19 bp, Mus musculus
  siRNA target sequence for D15Ertd806e (NM_144523.2,1215-1233).
gacttctatgattttagga

SEQ ID NO: 473439 - DNA, 19 bp, Mus musculus
  siRNA target sequence for D15Ertd806e (NM_144523.2,1234-1252).
gtagctacccagactacaa

SEQ ID NO: 473440 - DNA, 19 bp, Mus musculus
  siRNA target sequence for D15Ertd806e (NM_144523.2,1356-1374).
ggtcatcgctccttgatga

SEQ ID NO: 473441 - DNA, 19 bp, Mus musculus
  siRNA target sequence for D15Ertd806e (NM_144523.2,1359-1377).
catcgctccttgatgagat

SEQ ID NO: 473442 - DNA, 19 bp, Mus musculus
  siRNA target sequence for D15Ertd806e (NM_144523.2,1366-1384).
ccttgatgagatactacaa

SEQ ID NO: 473443 - DNA, 19 bp, Mus musculus
  siRNA target sequence for D15Ertd806e (NM_144523.2,1503-1521).
cgtgaacgggacatgcaat

SEQ ID NO: 473444 - DNA, 19 bp, Mus musculus
  siRNA target sequence for D15Ertd806e (NM_144523.2,1504-1522).
gtgaacgggacatgcaata

SEQ ID NO: 473445 - DNA, 19 bp, Mus musculus
  siRNA target sequence for D7Wsu180e (NM_138586.1,87-105).
gcgtgcagacgccaattta

SEQ ID NO: 473446 - DNA, 19 bp, Mus musculus
  siRNA target sequence for D7Wsu180e (NM_138586.1,89-107).
gtgcagacgccaatttact

SEQ ID NO: 473447 - DNA, 19 bp, Mus musculus
  siRNA target sequence for D7Wsu180e (NM_138586.1,194-212).
cggatggatctgcttcttt

SEQ ID NO: 473448 - DNA, 19 bp, Mus musculus
  siRNA target sequence for D7Wsu180e (NM_138586.1,195-213).
ggatggatctgcttctttt

SEQ ID NO: 473449 - DNA, 19 bp, Mus musculus
  siRNA target sequence for D7Wsu180e (NM_138586.1,355-373).
gagcggctggtcaggaata

SEQ ID NO: 473450 - DNA, 19 bp, Mus musculus
  siRNA target sequence for D7Wsu180e (NM_138586.1,660-678).
caccaaggggctctattct

SEQ ID NO: 473451 - DNA, 19 bp, Mus musculus
  siRNA target sequence for Ddx19 (NM_007916.1,194-212).
gacaccaatggtgttatca

SEQ ID NO: 473452 - DNA, 19 bp, Mus musculus
  siRNA target sequence for Ddx19 (NM_007916.1,196-214).
caccaatggtgttatcaaa

SEQ ID NO: 473453 - DNA, 19 bp, Mus musculus
  siRNA target sequence for Ddx19 (NM_007916.1,415-433).
ctacgccatgggcttcaat

SEQ ID NO: 473454 - DNA, 19 bp, Mus musculus
  siRNA target sequence for Ddx19 (NM_007916.1,594-612).
gcctgtccccaacatatga

SEQ ID NO: 473455 - DNA, 19 bp, Mus musculus
  siRNA target sequence for Ddx21 (NM_019553.1,411-429).
gatgtggatccccctaaat

SEQ ID NO: 473456 - DNA, 19 bp, Mus musculus
  siRNA target sequence for Ddx21 (NM_019553.1,414-432).
gtggatccccctaaatcca

SEQ ID NO: 473457 - DNA, 19 bp, Mus musculus
  siRNA target sequence for Ddx21 (NM_019553.1,532-550).
ctgaaaccaaagagataat

SEQ ID NO: 473458 - DNA, 19 bp, Mus musculus
  siRNA target sequence for Ddx21 (NM_019553.1,894-912).
ccttctgaaccgaaatcca

SEQ ID NO: 473459 - DNA, 19 bp, Mus musculus
  siRNA target sequence for Ddx21 (NM_019553.1,895-913).
cttctgaaccgaaatccaa

SEQ ID NO: 473460 - DNA, 19 bp, Mus musculus
  siRNA target sequence for Ddx21 (NM_019553.1,924-942).
gctcctggtgaggaaagta

SEQ ID NO: 473461 - DNA, 19 bp, Mus musculus
  siRNA target sequence for Ddx21 (NM_019553.1,943-961).
gtagcgagacagaaaagga

SEQ ID NO: 473462 - DNA, 19 bp, Mus musculus
  siRNA target sequence for Ddx21 (NM_019553.1,947-965).
cgagacagaaaaggaaata

SEQ ID NO: 473463 - DNA, 19 bp, Mus musculus
  siRNA target sequence for Ddx21 (NM_019553.1,977-995).
gaaagagggagctttctct

SEQ ID NO: 473464 - DNA, 19 bp, Mus musculus
  siRNA target sequence for Ddx21 (NM_019553.1,1046-1064).
gaacttcctgtttcctata

SEQ ID NO: 473465 - DNA, 19 bp, Mus musculus
  siRNA target sequence for Ddx21 (NM_019553.1,1069-1087).
ccaagacctttcatcatgt

SEQ ID NO: 473466 - DNA, 19 bp, Mus musculus
  siRNA target sequence for Ddx21 (NM_019553.1,1144-1162).
cttttgccatccctttaat

SEQ ID NO: 473467 - DNA, 19 bp, Mus musculus
  siRNA target sequence for Ddx21 (NM_019553.1,1149-1167).
gccatccctttaattgaga

SEQ ID NO: 473468 - DNA, 19 bp, Mus musculus
  siRNA target sequence for Ddx21 (NM_019553.1,1150-1168).
ccatccctttaattgagaa

SEQ ID NO: 473469 - DNA, 19 bp, Mus musculus
  siRNA target sequence for Ddx21 (NM_019553.1,1151-1169).
catccctttaattgagaaa

SEQ ID NO: 473470 - DNA, 19 bp, Mus musculus
  siRNA target sequence for Ddx21 (NM_019553.1,1224-1242).
cttgcacccacaagagaat

SEQ ID NO: 473471 - DNA, 19 bp, Mus musculus
  siRNA target sequence for Ddx21 (NM_019553.1,1270-1288).
gcgacatcaccaaaaagct

SEQ ID NO: 473472 - DNA, 19 bp, Mus musculus
  siRNA target sequence for Ddx21 (NM_019553.1,1289-1307).
ctctgtagcttgtttttat

SEQ ID NO: 473473 - DNA, 19 bp, Mus musculus
  siRNA target sequence for Ddx21 (NM_019553.1,1319-1337).
ctacggtggtcagattgaa

SEQ ID NO: 473474 - DNA, 19 bp, Mus musculus
  siRNA target sequence for Ddx21 (NM_019553.1,1324-1342).
gtggtcagattgaacgaat

SEQ ID NO: 473475 - DNA, 19 bp, Mus musculus
  siRNA target sequence for Ddx21 (NM_019553.1,1409-1427).
gctagatctcaccaaactt

SEQ ID NO: 473476 - DNA, 19 bp, Mus musculus
  siRNA target sequence for Ddx21 (NM_019553.1,1420-1438).
ccaaacttaaacatgttgt

SEQ ID NO: 473477 - DNA, 19 bp, Mus musculus
  siRNA target sequence for Ddx21 (NM_019553.1,1449-1467).
gtcgaccagatgttggata

SEQ ID NO: 473478 - DNA, 19 bp, Mus musculus
  siRNA target sequence for Ddx21 (NM_019553.1,1479-1497).
gatcaagtggaagaaattt

SEQ ID NO: 473479 - DNA, 19 bp, Mus musculus
  siRNA target sequence for Ddx21 (NM_019553.1,1501-1519).
gtgttgcatacaagaaaga

SEQ ID NO: 473480 - DNA, 19 bp, Mus musculus
  siRNA target sequence for Ddx21 (NM_019553.1,1503-1521).
gttgcatacaagaaagatt

SEQ ID NO: 473481 - DNA, 19 bp, Mus musculus
  siRNA target sequence for Ddx21 (NM_019553.1,1570-1588).
gggtgtttaatgttgctaa

SEQ ID NO: 473482 - DNA, 19 bp, Mus musculus
  siRNA target sequence for Ddx21 (NM_019553.1,1616-1634).
ggtggacctgattggtaaa

SEQ ID NO: 473483 - DNA, 19 bp, Mus musculus
  siRNA target sequence for Ddx21 (NM_019553.1,1617-1635).
gtggacctgattggtaaaa

SEQ ID NO: 473484 - DNA, 19 bp, Mus musculus
  siRNA target sequence for Ddx21 (NM_019553.1,1620-1638).
gacctgattggtaaaaaga

SEQ ID NO: 473485 - DNA, 19 bp, Mus musculus
  siRNA target sequence for Ddx21 (NM_019553.1,1622-1640).
cctgattggtaaaaagact

SEQ ID NO: 473486 - DNA, 19 bp, Mus musculus
  siRNA target sequence for Ddx21 (NM_019553.1,1662-1680).
gagcacctggcgattaagt

SEQ ID NO: 473487 - DNA, 19 bp, Mus musculus
  siRNA target sequence for Ddx21 (NM_019553.1,1664-1682).
gcacctggcgattaagtgt

SEQ ID NO: 473488 - DNA, 19 bp, Mus musculus
  siRNA target sequence for Ddx21 (NM_019553.1,1740-1758).
caagggcgcacgatcatct

SEQ ID NO: 473489 - DNA, 19 bp, Mus musculus
  siRNA target sequence for Ddx21 (NM_019553.1,1743-1761).
gggcgcacgatcatcttct

SEQ ID NO: 473490 - DNA, 19 bp, Mus musculus
  siRNA target sequence for Ddx21 (NM_019553.1,1814-1832).
ggatgcccagtccttacat

SEQ ID NO: 473491 - DNA, 19 bp, Mus musculus
  siRNA target sequence for Ddx21 (NM_019553.1,1857-1875).
gaaatcaccctgaaaggtt

SEQ ID NO: 473492 - DNA, 19 bp, Mus musculus
  siRNA target sequence for Ddx21 (NM_019553.1,1877-1895).
ccgaaatggcaattttgga

SEQ ID NO: 473493 - DNA, 19 bp, Mus musculus
  siRNA target sequence for Ddx21 (NM_019553.1,1917-1935).
gctgcccgtgggttagaca

SEQ ID NO: 473494 - DNA, 19 bp, Mus musculus
  siRNA target sequence for Ddx21 (NM_019553.1,1976-1994).
ggatgtggagtcttacatt

SEQ ID NO: 473495 - DNA, 19 bp, Mus musculus
  siRNA target sequence for Ddx21 (NM_019553.1,2124-2142).
ccttctgcaacggaaataa

SEQ ID NO: 473496 - DNA, 19 bp, Mus musculus
  siRNA target sequence for Ddx21 (NM_019553.1,2128-2146).
ctgcaacggaaataataaa

SEQ ID NO: 473497 - DNA, 19 bp, Mus musculus
  siRNA target sequence for Ddx21 (NM_019553.1,2194-2212).
ctgccattagccatttcaa

SEQ ID NO: 473498 - DNA, 19 bp, Mus musculus
  siRNA target sequence for Ddx21 (NM_019553.1,2349-2367).
ctgcggtgctccattgaga

SEQ ID NO: 473499 - DNA, 19 bp, Mus musculus
  siRNA target sequence for Ddx21 (NM_019553.1,2375-2393).
catcagttacgcttggaaa

SEQ ID NO: 473500 - DNA, 19 bp, Mus musculus
  siRNA target sequence for Ddx21 (NM_019553.1,2380-2398).
gttacgcttggaaagaact

SEQ ID NO: 473501 - DNA, 19 bp, Mus musculus
  siRNA target sequence for Ddx21 (NM_019553.1,2386-2404).
cttggaaagaacttaagga

SEQ ID NO: 473502 - DNA, 19 bp, Mus musculus
  siRNA target sequence for Ddx21 (NM_019553.1,2419-2437).
gcatcgatgccaaagtgaa

SEQ ID NO: 473503 - DNA, 19 bp, Mus musculus
  siRNA target sequence for Ddx21 (NM_019553.1,2508-2526).
caggagaagtggcatgatt

SEQ ID NO: 473504 - DNA, 19 bp, Mus musculus
  siRNA target sequence for Ddx24 (NM_020494.2,317-335).
gaggaagggcatcaagatt

SEQ ID NO: 473505 - DNA, 19 bp, Mus musculus
  siRNA target sequence for Ddx24 (NM_020494.2,358-376).
cgatcgacccgaatctgtt

SEQ ID NO: 473506 - DNA, 19 bp, Mus musculus
  siRNA target sequence for Ddx24 (NM_020494.2,359-377).
gatcgacccgaatctgttt

SEQ ID NO: 473507 - DNA, 19 bp, Mus musculus
  siRNA target sequence for Ddx24 (NM_020494.2,421-439).
cagattaccgtttagtcaa

SEQ ID NO: 473508 - DNA, 19 bp, Mus musculus
  siRNA target sequence for Ddx24 (NM_020494.2,592-610).
gcgctgctgcccagaatga

SEQ ID NO: 473509 - DNA, 19 bp, Mus musculus
  siRNA target sequence for Ddx24 (NM_020494.2,598-616).
ctgcccagaatgagtatga

SEQ ID NO: 473510 - DNA, 19 bp, Mus musculus
  siRNA target sequence for Ddx24 (NM_020494.2,674-692).
ggtcggaggagccaaatca

SEQ ID NO: 473511 - DNA, 19 bp, Mus musculus
  siRNA target sequence for Ddx24 (NM_020494.2,678-696).
ggaggagccaaatcagaaa

SEQ ID NO: 473512 - DNA, 19 bp, Mus musculus
  siRNA target sequence for Ddx24 (NM_020494.2,771-789).
cccaaattgcccaaaaaat

SEQ ID NO: 473513 - DNA, 19 bp, Mus musculus
  siRNA target sequence for Ddx24 (NM_020494.2,841-859).
cctggagggacctgtttgt

SEQ ID NO: 473514 - DNA, 19 bp, Mus musculus
  siRNA target sequence for Ddx24 (NM_020494.2,875-893).
gcgcgctctcagcttctta

SEQ ID NO: 473515 - DNA, 19 bp, Mus musculus
  siRNA target sequence for Ddx24 (NM_020494.2,913-931).
caatccaggctctgacttt

SEQ ID NO: 473516 - DNA, 19 bp, Mus musculus
  siRNA target sequence for Ddx24 (NM_020494.2,1029-1047).
ctgcagtggcataagatga

SEQ ID NO: 473517 - DNA, 19 bp, Mus musculus
  siRNA target sequence for Ddx24 (NM_020494.2,1253-1271).
gctcgtctgtgatgatgat

SEQ ID NO: 473518 - DNA, 19 bp, Mus musculus
  siRNA target sequence for Ddx24 (NM_020494.2,1328-1346).
cggagaagaaaagtttgat

SEQ ID NO: 473519 - DNA, 19 bp, Mus musculus
  siRNA target sequence for Ddx24 (NM_020494.2,1373-1391).
ggagttatgtgaccaaatt

SEQ ID NO: 473520 - DNA, 19 bp, Mus musculus
  siRNA target sequence for Ddx24 (NM_020494.2,1376-1394).
gttatgtgaccaaattgct

SEQ ID NO: 473521 - DNA, 19 bp, Mus musculus
  siRNA target sequence for Ddx24 (NM_020494.2,1385-1403).
ccaaattgctatttataaa

SEQ ID NO: 473522 - DNA, 19 bp, Mus musculus
  siRNA target sequence for Ddx24 (NM_020494.2,1482-1500).
gatgctgtggccaagttta

SEQ ID NO: 473523 - DNA, 19 bp, Mus musculus
  siRNA target sequence for Ddx24 (NM_020494.2,1562-1580).
gaaccgccatcctgagatt

SEQ ID NO: 473524 - DNA, 19 bp, Mus musculus
  siRNA target sequence for Ddx24 (NM_020494.2,1567-1585).
gccatcctgagattgtgat

SEQ ID NO: 473525 - DNA, 19 bp, Mus musculus
  siRNA target sequence for Ddx24 (NM_020494.2,1600-1618).
ggctctgggagttagttaa

SEQ ID NO: 473526 - DNA, 19 bp, Mus musculus
  siRNA target sequence for Ddx24 (NM_020494.2,1601-1619).
gctctgggagttagttaaa

SEQ ID NO: 473527 - DNA, 19 bp, Mus musculus
  siRNA target sequence for Ddx24 (NM_020494.2,1604-1622).
ctgggagttagttaaagaa

SEQ ID NO: 473528 - DNA, 19 bp, Mus musculus
  siRNA target sequence for Ddx24 (NM_020494.2,1620-1638).
gaaaaacaccctcatttga

SEQ ID NO: 473529 - DNA, 19 bp, Mus musculus
  siRNA target sequence for Ddx24 (NM_020494.2,1628-1646).
ccctcatttgagtaacctt

SEQ ID NO: 473530 - DNA, 19 bp, Mus musculus
  siRNA target sequence for Ddx24 (NM_020494.2,1657-1675).
ggtgcctggtcatagatga

SEQ ID NO: 473531 - DNA, 19 bp, Mus musculus
  siRNA target sequence for Ddx24 (NM_020494.2,1759-1777).
gtcggcagactcttgtttt

SEQ ID NO: 473532 - DNA, 19 bp, Mus musculus
  siRNA target sequence for Ddx24 (NM_020494.2,1809-1827).
cctgctcgaatccttcata

SEQ ID NO: 473533 - DNA, 19 bp, Mus musculus
  siRNA target sequence for Ddx24 (NM_020494.2,1812-1830).
gctcgaatccttcataaga

SEQ ID NO: 473534 - DNA, 19 bp, Mus musculus
  siRNA target sequence for Ddx24 (NM_020494.2,1894-1912).
ggggcaagccgaaagtcat

SEQ ID NO: 473535 - DNA, 19 bp, Mus musculus
  siRNA target sequence for Ddx24 (NM_020494.2,1895-1913).
gggcaagccgaaagtcatt

SEQ ID NO: 473536 - DNA, 19 bp, Mus musculus
  siRNA target sequence for Ddx24 (NM_020494.2,1897-1915).
gcaagccgaaagtcattga

SEQ ID NO: 473537 - DNA, 19 bp, Mus musculus
  siRNA target sequence for Ddx24 (NM_020494.2,2213-2231).
ggatattcctaaagttcaa

SEQ ID NO: 473538 - DNA, 19 bp, Mus musculus
  siRNA target sequence for Ddx24 (NM_020494.2,2221-2239).
ctaaagttcaacatgtcat

SEQ ID NO: 473539 - DNA, 19 bp, Mus musculus
  siRNA target sequence for Ddx24 (NM_020494.2,2447-2465).
ccgtctagcccgacagatt

SEQ ID NO: 473540 - DNA, 19 bp, Mus musculus
  siRNA target sequence for Ddx24 (NM_020494.2,2449-2467).
gtctagcccgacagattga

SEQ ID NO: 473541 - DNA, 19 bp, Mus musculus
  siRNA target sequence for Ddx24 (NM_020494.2,2451-2469).
ctagcccgacagattgaaa

SEQ ID NO: 473542 - DNA, 19 bp, Mus musculus
  siRNA target sequence for Ddx24 (NM_020494.2,2524-2542).
cggcagcagccctagagat

SEQ ID NO: 473543 - DNA, 19 bp, Mus musculus
  siRNA target sequence for Ddx24 (NM_020494.2,2547-2565).
ctagaagaagagatgtaca

SEQ ID NO: 473544 - DNA, 19 bp, Mus musculus
  siRNA target sequence for Ddx25 (NM_013932.2,422-440).
ccgaccatccaaaatccaa

SEQ ID NO: 473545 - DNA, 19 bp, Mus musculus
  siRNA target sequence for Ddx25 (NM_013932.2,497-515).
ccagtccggcacaggaaaa

SEQ ID NO: 473546 - DNA, 19 bp, Mus musculus
  siRNA target sequence for Ddx25 (NM_013932.2,498-516).
cagtccggcacaggaaaaa

SEQ ID NO: 473547 - DNA, 19 bp, Mus musculus
  siRNA target sequence for Ddx25 (NM_013932.2,551-569).
gaatgccttggaactgttt

SEQ ID NO: 473548 - DNA, 19 bp, Mus musculus
  siRNA target sequence for Ddx25 (NM_013932.2,581-599).
ctgcctggctcctacctat

SEQ ID NO: 473549 - DNA, 19 bp, Mus musculus
  siRNA target sequence for Ddx25 (NM_013932.2,619-637).
gtcgtgtggttgaaaggat

SEQ ID NO: 473550 - DNA, 19 bp, Mus musculus
  siRNA target sequence for Ddx25 (NM_013932.2,644-662).
gttctgcgtggatgttgaa

SEQ ID NO: 473551 - DNA, 19 bp, Mus musculus
  siRNA target sequence for Ddx25 (NM_013932.2,649-667).
gcgtggatgttgaagtgat

SEQ ID NO: 473552 - DNA, 19 bp, Mus musculus
  siRNA target sequence for Ddx25 (NM_013932.2,653-671).
ggatgttgaagtgatgtat

SEQ ID NO: 473553 - DNA, 19 bp, Mus musculus
  siRNA target sequence for Ddx25 (NM_013932.2,678-696).
cgaggaaaccgaattccaa

SEQ ID NO: 473554 - DNA, 19 bp, Mus musculus
  siRNA target sequence for Ddx25 (NM_013932.2,708-726).
gtcaccaaacagattatta

SEQ ID NO: 473555 - DNA, 19 bp, Mus musculus
  siRNA target sequence for Ddx25 (NM_013932.2,713-731).
caaacagattattattggt

SEQ ID NO: 473556 - DNA, 19 bp, Mus musculus
  siRNA target sequence for Ddx25 (NM_013932.2,735-753).
cctgggactgtcctagatt

SEQ ID NO: 473557 - DNA, 19 bp, Mus musculus
  siRNA target sequence for Ddx25 (NM_013932.2,744-762).
gtcctagattggtgtttca

SEQ ID NO: 473558 - DNA, 19 bp, Mus musculus
  siRNA target sequence for Ddx25 (NM_013932.2,754-772).
ggtgtttcaagcgaaaact

SEQ ID NO: 473559 - DNA, 19 bp, Mus musculus
  siRNA target sequence for Ddx25 (NM_013932.2,757-775).
gtttcaagcgaaaactgat

SEQ ID NO: 473560 - DNA, 19 bp, Mus musculus
  siRNA target sequence for Ddx25 (NM_013932.2,761-779).
caagcgaaaactgattgat

SEQ ID NO: 473561 - DNA, 19 bp, Mus musculus
  siRNA target sequence for Ddx25 (NM_013932.2,857-875).
ccgtatccaaagagcttta

SEQ ID NO: 473562 - DNA, 19 bp, Mus musculus
  siRNA target sequence for Ddx25 (NM_013932.2,928-946).
ggcagtttgctgaacgaat

SEQ ID NO: 473563 - DNA, 19 bp, Mus musculus
  siRNA target sequence for Ddx25 (NM_013932.2,1100-1118).
ctgccagacacgtcgaaat

SEQ ID NO: 473564 - DNA, 19 bp, Mus musculus
  siRNA target sequence for Ddx25 (NM_013932.2,1197-1215).
cgagcttccatcattcaga

SEQ ID NO: 473565 - DNA, 19 bp, Mus musculus
  siRNA target sequence for Ddx25 (NM_013932.2,1233-1251).
gagaaggttctcataacga

SEQ ID NO: 473566 - DNA, 19 bp, Mus musculus
  siRNA target sequence for Ddx25 (NM_013932.2,1242-1260).
ctcataacgaccaatgtct

SEQ ID NO: 473567 - DNA, 19 bp, Mus musculus
  siRNA target sequence for Ddx25 (NM_013932.2,1259-1277).
ctgtgctcgagggattgat

SEQ ID NO: 473568 - DNA, 19 bp, Mus musculus
  siRNA target sequence for Ddx25 (NM_013932.2,1308-1326).
gacctccctgtaaaccaat

SEQ ID NO: 473569 - DNA, 19 bp, Mus musculus
  siRNA target sequence for Ddx25 (NM_013932.2,1313-1331).
ccctgtaaaccaatcagaa

SEQ ID NO: 473570 - DNA, 19 bp, Mus musculus
  siRNA target sequence for Ddx25 (NM_013932.2,1392-1410).
ggtctcgccttcaacatga

SEQ ID NO: 473571 - DNA, 19 bp, Mus musculus
  siRNA target sequence for Ddx25 (NM_013932.2,1424-1442).
gctgcccctgcttatgaaa

SEQ ID NO: 473572 - DNA, 19 bp, Mus musculus
  siRNA target sequence for Ddx25 (NM_013932.2,1427-1445).
gcccctgcttatgaaaata

SEQ ID NO: 473573 - DNA, 19 bp, Mus musculus
  siRNA target sequence for Ddx25 (NM_013932.2,1446-1464).
caagaccacttcaatagca

SEQ ID NO: 473574 - DNA, 19 bp, Mus musculus
  siRNA target sequence for Ddx25 (NM_013932.2,1449-1467).
gaccacttcaatagcaata

SEQ ID NO: 473575 - DNA, 19 bp, Mus musculus
  siRNA target sequence for Ddx25 (NM_013932.2,1451-1469).
ccacttcaatagcaatatt

SEQ ID NO: 473576 - DNA, 19 bp, Mus musculus
  siRNA target sequence for Ddx25 (NM_013932.2,1497-1515).
gagattgagaagatcgaat

SEQ ID NO: 473577 - DNA, 19 bp, Mus musculus
  siRNA target sequence for Ddx25 (NM_013932.2,1499-1517).
gattgagaagatcgaatat

SEQ ID NO: 473578 - DNA, 19 bp, Mus musculus
  siRNA target sequence for Ddx56 (NM_026538.2,99-117).
ctacgttgatccaggaaaa

SEQ ID NO: 473579 - DNA, 19 bp, Mus musculus
  siRNA target sequence for Ddx56 (NM_026538.2,175-193).
cgggaagaccgcagcttat

SEQ ID NO: 473580 - DNA, 19 bp, Mus musculus
  siRNA target sequence for Ddx56 (NM_026538.2,181-199).
gaccgcagcttatgctatt

SEQ ID NO: 473581 - DNA, 19 bp, Mus musculus
  siRNA target sequence for Ddx56 (NM_026538.2,231-249).
cgacaggtcctgtaatgga

SEQ ID NO: 473582 - DNA, 19 bp, Mus musculus
  siRNA target sequence for Ddx56 (NM_026538.2,564-582).
gtcacttgcctcggattta

SEQ ID NO: 473583 - DNA, 19 bp, Mus musculus
  siRNA target sequence for Ddx56 (NM_026538.2,595-613).
catgtcggccactttcaat

SEQ ID NO: 473584 - DNA, 19 bp, Mus musculus
  siRNA target sequence for Ddx56 (NM_026538.2,654-672).
cggttaccctcaagttaca

SEQ ID NO: 473585 - DNA, 19 bp, Mus musculus
  siRNA target sequence for Ddx56 (NM_026538.2,693-711).
cagaccagctccagcaatt

SEQ ID NO: 473586 - DNA, 19 bp, Mus musculus
  siRNA target sequence for Ddx56 (NM_026538.2,786-804).
gcaaagccttgctctttgt

SEQ ID NO: 473587 - DNA, 19 bp, Mus musculus
  siRNA target sequence for Ddx56 (NM_026538.2,822-840).
gttaccggctccgtctttt

SEQ ID NO: 473588 - DNA, 19 bp, Mus musculus
  siRNA target sequence for Ddx56 (NM_026538.2,894-912).
gctccaggtgccacatcat

SEQ ID NO: 473589 - DNA, 19 bp, Mus musculus
  siRNA target sequence for Ddx56 (NM_026538.2,919-937).
gttcaaccaaggcttgtat

SEQ ID NO: 473590 - DNA, 19 bp, Mus musculus
  siRNA target sequence for Ddx56 (NM_026538.2,922-940).
caaccaaggcttgtatgat

SEQ ID NO: 473591 - DNA, 19 bp, Mus musculus
  siRNA target sequence for Ddx56 (NM_026538.2,951-969).
cgacagatgctgaaatctt

SEQ ID NO: 473592 - DNA, 19 bp, Mus musculus
  siRNA target sequence for Ddx56 (NM_026538.2,967-985).
cttgggaccccaagtcaaa

SEQ ID NO: 473593 - DNA, 19 bp, Mus musculus
  siRNA target sequence for Ddx56 (NM_026538.2,1072-1090).
gtctgcggtcctcaatttt

SEQ ID NO: 473594 - DNA, 19 bp, Mus musculus
  siRNA target sequence for Ddx56 (NM_026538.2,1074-1092).
ctgcggtcctcaattttga

SEQ ID NO: 473595 - DNA, 19 bp, Mus musculus
  siRNA target sequence for Ddx56 (NM_026538.2,1101-1119).
ccaccgcagaggcttatgt

SEQ ID NO: 473596 - DNA, 19 bp, Mus musculus
  siRNA target sequence for Ddx56 (NM_026538.2,1147-1165).
caacaacccaggcatagtt

SEQ ID NO: 473597 - DNA, 19 bp, Mus musculus
  siRNA target sequence for Ddx56 (NM_026538.2,1274-1292).
gagattgaaagctttcgtt

SEQ ID NO: 473598 - DNA, 19 bp, Mus musculus
  siRNA target sequence for Ddx56 (NM_026538.2,1276-1294).
gattgaaagctttcgttat

SEQ ID NO: 473599 - DNA, 19 bp, Mus musculus
  siRNA target sequence for Ddx56 (NM_026538.2,1344-1362).
cgagactgaaggagatcaa

SEQ ID NO: 473600 - DNA, 19 bp, Mus musculus
  siRNA target sequence for Ddx56 (NM_026538.2,1382-1400).
gagaagctcaagacatact

SEQ ID NO: 473601 - DNA, 19 bp, Mus musculus
  siRNA target sequence for Ddx56 (NM_026538.2,1384-1402).
gaagctcaagacatacttt

SEQ ID NO: 473602 - DNA, 19 bp, Mus musculus
  siRNA target sequence for Ddx56 (NM_026538.2,1479-1497).
gccatgtccctgactattt

SEQ ID NO: 473603 - DNA, 19 bp, Mus musculus
  siRNA target sequence for Ddx56 (NM_026538.2,1509-1527).
ctcttcgtggccttgtaca

SEQ ID NO: 473604 - DNA, 19 bp, Mus musculus
  siRNA target sequence for Ddx56 (NM_026538.2,1588-1606).
gaacccactgcgtgacttt

SEQ ID NO: 473605 - DNA, 19 bp, Mus musculus
  siRNA target sequence for Ddx56 (NM_026538.2,1593-1611).
cactgcgtgactttaagca

SEQ ID NO: 473606 - DNA, 19 bp, Mus musculus
  siRNA target sequence for Ddx6 (NM_007841.1,396-414).
gaacaccagcacaatcaat

SEQ ID NO: 473607 - DNA, 19 bp, Mus musculus
  siRNA target sequence for Ddx6 (NM_007841.1,492-510).
ccctccaaaggatctaaga

SEQ ID NO: 473608 - DNA, 19 bp, Mus musculus
  siRNA target sequence for Ddx6 (NM_007841.1,951-969).
gaaaggcgtggcaaaggtt

SEQ ID NO: 473609 - DNA, 19 bp, Mus musculus
  siRNA target sequence for Ddx6 (NM_007841.1,1302-1320).
gctactcgccaagaagatt

SEQ ID NO: 473610 - DNA, 19 bp, Mus musculus
  siRNA target sequence for Ddx6 (NM_007841.1,1463-1481).
ctgtgaatgtggtaataaa

SEQ ID NO: 473611 - DNA, 19 bp, Mus musculus
  siRNA target sequence for Ddx6 (NM_007841.1,1465-1483).
gtgaatgtggtaataaact

SEQ ID NO: 473612 - DNA, 19 bp, Mus musculus
  siRNA target sequence for Eif3s4 (NM_016876.2,31-49).
ccgactggcgactttgact

SEQ ID NO: 473613 - DNA, 19 bp, Mus musculus
  siRNA target sequence for Eif3s4 (NM_016876.2,86-104).
gagaggacgacaaatgtgt

SEQ ID NO: 473614 - DNA, 19 bp, Mus musculus
  siRNA target sequence for Eif3s4 (NM_016876.2,110-128).
gcgagctcctgaaaggaat

SEQ ID NO: 473615 - DNA, 19 bp, Mus musculus
  siRNA target sequence for Eif3s4 (NM_016876.2,152-170).
gtccagagcccgagttact

SEQ ID NO: 473616 - DNA, 19 bp, Mus musculus
  siRNA target sequence for Eif3s4 (NM_016876.2,397-415).
gatgacgtctctatgacat

SEQ ID NO: 473617 - DNA, 19 bp, Mus musculus
  siRNA target sequence for Eif3s4 (NM_016876.2,400-418).
gacgtctctatgacattca

SEQ ID NO: 473618 - DNA, 19 bp, Mus musculus
  siRNA target sequence for Eif3s4 (NM_016876.2,422-440).
ctagcaaagaggacctaaa

SEQ ID NO: 473619 - DNA, 19 bp, Mus musculus
  siRNA target sequence for Eif3s4 (NM_016876.2,426-444).
caaagaggacctaaactgt

SEQ ID NO: 473620 - DNA, 19 bp, Mus musculus
  siRNA target sequence for Eif3s4 (NM_016876.2,457-475).
gacccaatgaacaagctta

SEQ ID NO: 473621 - DNA, 19 bp, Mus musculus
  siRNA target sequence for Eif3s4 (NM_016876.2,471-489).
gcttaagggccagaagatt

SEQ ID NO: 473622 - DNA, 19 bp, Mus musculus
  siRNA target sequence for Eif3s4 (NM_016876.2,490-508).
gtgtcctgccgcatttgca

SEQ ID NO: 473623 - DNA, 19 bp, Mus musculus
  siRNA target sequence for Eif3s4 (NM_016876.2,815-833).
gctccatctcccgaatcta

SEQ ID NO: 473624 - DNA, 19 bp, Mus musculus
  siRNA target sequence for Eif3s4 (NM_016876.2,818-836).
ccatctcccgaatctactt

SEQ ID NO: 473625 - DNA, 19 bp, Mus musculus
  siRNA target sequence for Eif3s4 (NM_016876.2,938-956).
gctacgaccatcttatcct

SEQ ID NO: 473626 - DNA, 19 bp, Mus musculus
  siRNA target sequence for Eif3s4 (NM_016876.2,969-987).
ggccaagccatcaacgaat

SEQ ID NO: 473627 - DNA, 19 bp, Mus musculus
  siRNA target sequence for Eif3s4 (NM_016876.2,970-988).
gccaagccatcaacgaatt

SEQ ID NO: 473628 - DNA, 19 bp, Mus musculus
  siRNA target sequence for Eif4el3 (NM_023314.2,93-111).
caagttcgacgccttaaaa

SEQ ID NO: 473629 - DNA, 19 bp, Mus musculus
  siRNA target sequence for Eif4el3 (NM_023314.2,96-114).
gttcgacgccttaaaagat

SEQ ID NO: 473630 - DNA, 19 bp, Mus musculus
  siRNA target sequence for Eif4el3 (NM_023314.2,99-117).
cgacgccttaaaagatgat

SEQ ID NO: 473631 - DNA, 19 bp, Mus musculus
  siRNA target sequence for Eif4el3 (NM_023314.2,244-262).
catcccctgcagtacaact

SEQ ID NO: 473632 - DNA, 19 bp, Mus musculus
  siRNA target sequence for Eif4el3 (NM_023314.2,357-375).
ggagcagttctggaagttt

SEQ ID NO: 473633 - DNA, 19 bp, Mus musculus
  siRNA target sequence for Eif4el3 (NM_023314.2,410-428).
gccacagtgactttcatct

SEQ ID NO: 473634 - DNA, 19 bp, Mus musculus
  siRNA target sequence for Eif4el3 (NM_023314.2,432-450).
caaagaagggattaaacct

SEQ ID NO: 473635 - DNA, 19 bp, Mus musculus
  siRNA target sequence for Eif4el3 (NM_023314.2,453-471).
gtgggaggatgatgcaaat

SEQ ID NO: 473636 - DNA, 19 bp, Mus musculus
  siRNA target sequence for Eif4el3 (NM_023314.2,499-517).
ctccggaagggcttagctt

SEQ ID NO: 473637 - DNA, 19 bp, Mus musculus
  siRNA target sequence for Eif4el3 (NM_023314.2,545-563).
ctatgctcggggagcaatt

SEQ ID NO: 473638 - DNA, 19 bp, Mus musculus
  siRNA target sequence for Eif4el3 (NM_023314.2,665-683).
cccgaatccgggatactct

SEQ ID NO: 473639 - DNA, 19 bp, Mus musculus
  siRNA target sequence for Eif4el3 (NM_023314.2,666-684).
ccgaatccgggatactctt

SEQ ID NO: 473640 - DNA, 19 bp, Mus musculus
  siRNA target sequence for Eif4el3 (NM_023314.2,700-718).
ctacctcccaacaccatta

SEQ ID NO: 473641 - DNA, 19 bp, Mus musculus
  siRNA target sequence for Eif4el3 (NM_023314.2,761-779).
gctttcgaaatacaaaaat

SEQ ID NO: 473642 - DNA, 19 bp, Mus musculus
  siRNA target sequence for Eif4g3 (NM_172703.1,266-284).
cggcaacatcaagttcatt

SEQ ID NO: 473643 - DNA, 19 bp, Mus musculus
  siRNA target sequence for Eif4g3 (NM_172703.1,278-296).
gttcattggagaactcttt

SEQ ID NO: 473644 - DNA, 19 bp, Mus musculus
  siRNA target sequence for Eif4g3 (NM_172703.1,281-299).
cattggagaactctttaaa

SEQ ID NO: 473645 - DNA, 19 bp, Mus musculus
  siRNA target sequence for Eif4g3 (NM_172703.1,438-456).
cgcatggaccagtacttta

SEQ ID NO: 473646 - DNA, 19 bp, Mus musculus
  siRNA target sequence for Eif4g3 (NM_172703.1,439-457).
gcatggaccagtactttaa

SEQ ID NO: 473647 - DNA, 19 bp, Mus musculus
  siRNA target sequence for Eif4g3 (NM_172703.1,467-485).
gaaaatcgtcaaagaaaga

SEQ ID NO: 473648 - DNA, 19 bp, Mus musculus
  siRNA target sequence for Eif4g3 (NM_172703.1,527-545).
cgacctcagactgtgtaat

SEQ ID NO: 473649 - DNA, 19 bp, Mus musculus
  siRNA target sequence for Eif4g3 (NM_172703.1,528-546).
gacctcagactgtgtaatt

SEQ ID NO: 473650 - DNA, 19 bp, Mus musculus
  siRNA target sequence for Eif4g3 (NM_172703.1,561-579).
gcagatcaggggccaaaaa

SEQ ID NO: 473651 - DNA, 19 bp, Mus musculus
  siRNA target sequence for Eif4g3 (NM_172703.1,564-582).
gatcaggggccaaaaacta

SEQ ID NO: 473652 - DNA, 19 bp, Mus musculus
  siRNA target sequence for Eif4g3 (NM_172703.1,580-598).
ctatcgagcagattcacaa

SEQ ID NO: 473653 - DNA, 19 bp, Mus musculus
  siRNA target sequence for Eif4g3 (NM_172703.1,667-685).
gaccaggcgtccaaagagt

SEQ ID NO: 473654 - DNA, 19 bp, Mus musculus
  siRNA target sequence for Eif4g3 (NM_172703.1,732-750).
gtactggacccctccaaat

SEQ ID NO: 473655 - DNA, 19 bp, Mus musculus
  siRNA target sequence for Eif4g3 (NM_172703.1,735-753).
ctggacccctccaaatttt

SEQ ID NO: 473656 - DNA, 19 bp, Mus musculus
  siRNA target sequence for Eif4g3 (NM_172703.1,738-756).
gacccctccaaatttttga

SEQ ID NO: 473657 - DNA, 19 bp, Mus musculus
  siRNA target sequence for Eif4g3 (NM_172703.1,880-898).
cggccacacccttagagtt

SEQ ID NO: 473658 - DNA, 19 bp, Mus musculus
  siRNA target sequence for Eif4g3 (NM_172703.1,1110-1128).
gaggccgaccgaagcaaaa

SEQ ID NO: 473659 - DNA, 19 bp, Mus musculus
  siRNA target sequence for Eif4g3 (NM_172703.1,1113-1131).
gccgaccgaagcaaaacga

SEQ ID NO: 473660 - DNA, 19 bp, Mus musculus
  siRNA target sequence for Eif4g3 (NM_172703.1,1137-1155).
ctagcaaaatcggaaatgt

SEQ ID NO: 473661 - DNA, 19 bp, Mus musculus
  siRNA target sequence for Eif4g3 (NM_172703.1,1207-1225).
ggaagtccaagtctatcat

SEQ ID NO: 473662 - DNA, 19 bp, Mus musculus
  siRNA target sequence for Eif4g3 (NM_172703.1,1208-1226).
gaagtccaagtctatcatt

SEQ ID NO: 473663 - DNA, 19 bp, Mus musculus
  siRNA target sequence for Eif4g3 (NM_172703.1,1219-1237).
ctatcattgacgaattctt

SEQ ID NO: 473664 - DNA, 19 bp, Mus musculus
  siRNA target sequence for Eif4g3 (NM_172703.1,1408-1426).
gcaagcaggactttttcaa

SEQ ID NO: 473665 - DNA, 19 bp, Mus musculus
  siRNA target sequence for Eif4g3 (NM_172703.1,1413-1431).
caggactttttcaaaggtt

SEQ ID NO: 473666 - DNA, 19 bp, Mus musculus
  siRNA target sequence for Eif4g3 (NM_172703.1,1455-1473).
gatgacatggccattgata

SEQ ID NO: 473667 - DNA, 19 bp, Mus musculus
  siRNA target sequence for Eif4g3 (NM_172703.1,1466-1484).
cattgatattccccatatt

SEQ ID NO: 473668 - DNA, 19 bp, Mus musculus
  siRNA target sequence for Eif4g3 (NM_172703.1,1470-1488).
gatattccccatatttggt

SEQ ID NO: 473669 - DNA, 19 bp, Mus musculus
  siRNA target sequence for Eif4g3 (NM_172703.1,1508-1526).
cacccccatgttaaaagga

SEQ ID NO: 473670 - DNA, 19 bp, Mus musculus
  siRNA target sequence for Eif4g3 (NM_172703.1,1543-1561).
gagaacttattgtggaatt

SEQ ID NO: 473671 - DNA, 19 bp, Mus musculus
  siRNA target sequence for Eif4g3 (NM_172703.1,1594-1612).
gggtcctgctttctgaaat

SEQ ID NO: 473672 - DNA, 19 bp, Mus musculus
  siRNA target sequence for Eif4g3 (NM_172703.1,1608-1626).
gaaatcctacaccttctat

SEQ ID NO: 473673 - DNA, 19 bp, Mus musculus
  siRNA target sequence for Eif4g3 (NM_172703.1,1617-1635).
caccttctatgcagacaaa

SEQ ID NO: 473674 - DNA, 19 bp, Mus musculus
  siRNA target sequence for Eif4g3 (NM_172703.1,2114-2132).
cttgctccggatgtttttt

SEQ ID NO: 473675 - DNA, 19 bp, Mus musculus
  siRNA target sequence for Eif4g3 (NM_172703.1,2118-2136).
ctccggatgttttttgatt

SEQ ID NO: 473676 - DNA, 19 bp, Mus musculus
  siRNA target sequence for Elavl1 (NM_010485.2,278-296).
gaacgaatttaattgtcaa

SEQ ID NO: 473677 - DNA, 19 bp, Mus musculus
  siRNA target sequence for Elavl1 (NM_010485.2,348-366).
cattggcgaggttgaatct

SEQ ID NO: 473678 - DNA, 19 bp, Mus musculus
  siRNA target sequence for Elavl1 (NM_010485.2,408-426).
ctacggttttgtgaactat

SEQ ID NO: 473679 - DNA, 19 bp, Mus musculus
  siRNA target sequence for Elavl1 (NM_010485.2,420-438).
gaactatgtgactgcaaaa

SEQ ID NO: 473680 - DNA, 19 bp, Mus musculus
  siRNA target sequence for Elavl1 (NM_010485.2,492-510).
cattaaggtgtcatatgct

SEQ ID NO: 473681 - DNA, 19 bp, Mus musculus
  siRNA target sequence for Elavl1 (NM_010485.2,583-601).
gatgtggaagacatgtttt

SEQ ID NO: 473682 - DNA, 19 bp, Mus musculus
  siRNA target sequence for Elavl1 (NM_010485.2,602-620).
ctcggtttgggcgaatcat

SEQ ID NO: 473683 - DNA, 19 bp, Mus musculus
  siRNA target sequence for Elavl1 (NM_010485.2,604-622).
cggtttgggcgaatcatca

SEQ ID NO: 473684 - DNA, 19 bp, Mus musculus
  siRNA target sequence for Elavl1 (NM_010485.2,605-623).
ggtttgggcgaatcatcaa

SEQ ID NO: 473685 - DNA, 19 bp, Mus musculus
  siRNA target sequence for Elavl1 (NM_010485.2,659-677).
ccagaggggttgcctttat

SEQ ID NO: 473686 - DNA, 19 bp, Mus musculus
  siRNA target sequence for Elavl1 (NM_010485.2,670-688).
gcctttatccggtttgaca

SEQ ID NO: 473687 - DNA, 19 bp, Mus musculus
  siRNA target sequence for Elavl1 (NM_010485.2,671-689).
cctttatccggtttgacaa

SEQ ID NO: 473688 - DNA, 19 bp, Mus musculus
  siRNA target sequence for Elavl1 (NM_010485.2,672-690).
ctttatccggtttgacaaa

SEQ ID NO: 473689 - DNA, 19 bp, Mus musculus
  siRNA target sequence for Elavl1 (NM_010485.2,708-726).
ggcaattaccagtttcaat

SEQ ID NO: 473690 - DNA, 19 bp, Mus musculus
  siRNA target sequence for Elavl1 (NM_010485.2,716-734).
ccagtttcaatggtcataa

SEQ ID NO: 473691 - DNA, 19 bp, Mus musculus
  siRNA target sequence for Elavl1 (NM_010485.2,882-900).
ctcccctatgggtgtagat

SEQ ID NO: 473692 - DNA, 19 bp, Mus musculus
  siRNA target sequence for Elavl1 (NM_010485.2,884-902).
cccctatgggtgtagatca

SEQ ID NO: 473693 - DNA, 19 bp, Mus musculus
  siRNA target sequence for Elavl1 (NM_010485.2,911-929).
ggatttctggtgtcaatgt

SEQ ID NO: 473694 - DNA, 19 bp, Mus musculus
  siRNA target sequence for Elavl1 (NM_010485.2,995-1013).
ggatcctctggcagatgtt

SEQ ID NO: 473695 - DNA, 19 bp, Mus musculus
  siRNA target sequence for Elavl1 (NM_010485.2,996-1014).
gatcctctggcagatgttt

SEQ ID NO: 473696 - DNA, 19 bp, Mus musculus
  siRNA target sequence for Elavl1 (NM_010485.2,1019-1037).
cctttggtgcagttaccaa

SEQ ID NO: 473697 - DNA, 19 bp, Mus musculus
  siRNA target sequence for Elavl1 (NM_010485.2,1020-1038).
ctttggtgcagttaccaat

SEQ ID NO: 473698 - DNA, 19 bp, Mus musculus
  siRNA target sequence for Elavl1 (NM_010485.2,1024-1042).
ggtgcagttaccaatgtga

SEQ ID NO: 473699 - DNA, 19 bp, Mus musculus
  siRNA target sequence for Elavl1 (NM_010485.2,1025-1043).
gtgcagttaccaatgtgaa

SEQ ID NO: 473700 - DNA, 19 bp, Mus musculus
  siRNA target sequence for Elavl1 (NM_010485.2,1045-1063).
gtgattcgtgatttcaaca

SEQ ID NO: 473701 - DNA, 19 bp, Mus musculus
  siRNA target sequence for Elavl1 (NM_010485.2,1114-1132).
gctgcaatggccatagcaa

SEQ ID NO: 473702 - DNA, 19 bp, Mus musculus
  siRNA target sequence for Elavl1 (NM_010485.2,1147-1165).
cgcctgggggacaaaattt

SEQ ID NO: 473703 - DNA, 19 bp, Mus musculus
  siRNA target sequence for Elavl1 (NM_010485.2,1148-1166).
gcctgggggacaaaatttt

SEQ ID NO: 473704 - DNA, 19 bp, Mus musculus
  siRNA target sequence for Elavl1 (NM_010485.2,1149-1167).
cctgggggacaaaatttta

SEQ ID NO: 473705 - DNA, 19 bp, Mus musculus
  siRNA target sequence for Elavl2 (NM_010486.1,192-210).
gggccaacttgcaataaca

SEQ ID NO: 473706 - DNA, 19 bp, Mus musculus
  siRNA target sequence for Elavl2 (NM_010486.1,220-238).
gtccaaccactgtaaacaa

SEQ ID NO: 473707 - DNA, 19 bp, Mus musculus
  siRNA target sequence for Elavl2 (NM_010486.1,222-240).
ccaaccactgtaaacaaca

SEQ ID NO: 473708 - DNA, 19 bp, Mus musculus
  siRNA target sequence for Elavl2 (NM_010486.1,317-335).
catgacacaggaagaacta

SEQ ID NO: 473709 - DNA, 19 bp, Mus musculus
  siRNA target sequence for Elavl2 (NM_010486.1,366-384).
gagtcctgtaagcttgtaa

SEQ ID NO: 473710 - DNA, 19 bp, Mus musculus
  siRNA target sequence for Elavl2 (NM_010486.1,368-386).
gtcctgtaagcttgtaaga

SEQ ID NO: 473711 - DNA, 19 bp, Mus musculus
  siRNA target sequence for Elavl2 (NM_010486.1,416-434).
cggatttgtgaactacatt

SEQ ID NO: 473712 - DNA, 19 bp, Mus musculus
  siRNA target sequence for Elavl2 (NM_010486.1,464-482).
cactctgaatggattgaga

SEQ ID NO: 473713 - DNA, 19 bp, Mus musculus
  siRNA target sequence for Elavl2 (NM_010486.1,529-547).
cctcaatcagagatgcaaa

SEQ ID NO: 473714 - DNA, 19 bp, Mus musculus
  siRNA target sequence for Elavl2 (NM_010486.1,532-550).
caatcagagatgcaaactt

SEQ ID NO: 473715 - DNA, 19 bp, Mus musculus
  siRNA target sequence for Elavl2 (NM_010486.1,538-556).
gagatgcaaacttatacgt

SEQ ID NO: 473716 - DNA, 19 bp, Mus musculus
  siRNA target sequence for Elavl2 (NM_010486.1,554-572).
cgtcagcgggcttccaaaa

SEQ ID NO: 473717 - DNA, 19 bp, Mus musculus
  siRNA target sequence for Elavl2 (NM_010486.1,555-573).
gtcagcgggcttccaaaaa

SEQ ID NO: 473718 - DNA, 19 bp, Mus musculus
  siRNA target sequence for Elavl2 (NM_010486.1,559-577).
gcgggcttccaaaaaccat

SEQ ID NO: 473719 - DNA, 19 bp, Mus musculus
  siRNA target sequence for Elavl2 (NM_010486.1,609-627).
cagtatgggcgcatcatta

SEQ ID NO: 473720 - DNA, 19 bp, Mus musculus
  siRNA target sequence for Elavl2 (NM_010486.1,611-629).
gtatgggcgcatcattact

SEQ ID NO: 473721 - DNA, 19 bp, Mus musculus
  siRNA target sequence for Elavl2 (NM_010486.1,623-641).
cattacttctcggattctt

SEQ ID NO: 473722 - DNA, 19 bp, Mus musculus
  siRNA target sequence for Elavl2 (NM_010486.1,648-666).
caggtcactggcatatcaa

SEQ ID NO: 473723 - DNA, 19 bp, Mus musculus
  siRNA target sequence for Elavl2 (NM_010486.1,664-682).
caaggggtgtagggtttat

SEQ ID NO: 473724 - DNA, 19 bp, Mus musculus
  siRNA target sequence for Elavl2 (NM_010486.1,668-686).
gggtgtagggtttattcga

SEQ ID NO: 473725 - DNA, 19 bp, Mus musculus
  siRNA target sequence for Elavl2 (NM_010486.1,669-687).
ggtgtagggtttattcgat

SEQ ID NO: 473726 - DNA, 19 bp, Mus musculus
  siRNA target sequence for Elavl2 (NM_010486.1,670-688).
gtgtagggtttattcgatt

SEQ ID NO: 473727 - DNA, 19 bp, Mus musculus
  siRNA target sequence for Elavl2 (NM_010486.1,675-693).
gggtttattcgatttgaca

SEQ ID NO: 473728 - DNA, 19 bp, Mus musculus
  siRNA target sequence for Elavl2 (NM_010486.1,676-694).
ggtttattcgatttgacaa

SEQ ID NO: 473729 - DNA, 19 bp, Mus musculus
  siRNA target sequence for Elavl2 (NM_010486.1,754-772).
cagagccaatcactgtaaa

SEQ ID NO: 473730 - DNA, 19 bp, Mus musculus
  siRNA target sequence for Elavl2 (NM_010486.1,756-774).
gagccaatcactgtaaagt

SEQ ID NO: 473731 - DNA, 19 bp, Mus musculus
  siRNA target sequence for Elavl2 (NM_010486.1,758-776).
gccaatcactgtaaagttt

SEQ ID NO: 473732 - DNA, 19 bp, Mus musculus
  siRNA target sequence for Elavl2 (NM_010486.1,764-782).
cactgtaaagtttgctaat

SEQ ID NO: 473733 - DNA, 19 bp, Mus musculus
  siRNA target sequence for Elavl2 (NM_010486.1,864-882).
cagcaggcacagcgtttta

SEQ ID NO: 473734 - DNA, 19 bp, Mus musculus
  siRNA target sequence for Elavl2 (NM_010486.1,867-885).
caggcacagcgttttaggt

SEQ ID NO: 473735 - DNA, 19 bp, Mus musculus
  siRNA target sequence for Elavl2 (NM_010486.1,906-924).
gcttatggagtgaagagta

SEQ ID NO: 473736 - DNA, 19 bp, Mus musculus
  siRNA target sequence for Elavl2 (NM_010486.1,912-930).
ggagtgaagagtaggtttt

SEQ ID NO: 473737 - DNA, 19 bp, Mus musculus
  siRNA target sequence for Elavl2 (NM_010486.1,934-952).
caatgacgatcgatggaat

SEQ ID NO: 473738 - DNA, 19 bp, Mus musculus
  siRNA target sequence for Elavl2 (NM_010486.1,953-971).
gaccagtctggctggaatt

SEQ ID NO: 473739 - DNA, 19 bp, Mus musculus
  siRNA target sequence for Elavl2 (NM_010486.1,956-974).
cagtctggctggaattaat

SEQ ID NO: 473740 - DNA, 19 bp, Mus musculus
  siRNA target sequence for Elavl2 (NM_010486.1,962-980).
ggctggaattaatattcct

SEQ ID NO: 473741 - DNA, 19 bp, Mus musculus
  siRNA target sequence for Elavl2 (NM_010486.1,1023-1041).
gcgcctgatgcagatgaaa

SEQ ID NO: 473742 - DNA, 19 bp, Mus musculus
  siRNA target sequence for Elavl2 (NM_010486.1,1042-1060).
gtatcctgtggcaaatgtt

SEQ ID NO: 473743 - DNA, 19 bp, Mus musculus
  siRNA target sequence for Elavl3 (NM_010487.1,849-867).
cccagtacggccgaatcat

SEQ ID NO: 473744 - DNA, 19 bp, Mus musculus
  siRNA target sequence for Elavl3 (NM_010487.1,851-869).
cagtacggccgaatcatca

SEQ ID NO: 473745 - DNA, 19 bp, Mus musculus
  siRNA target sequence for Elavl3 (NM_010487.1,906-924).
ctcggggtgtgggattcat

SEQ ID NO: 473746 - DNA, 19 bp, Mus musculus
  siRNA target sequence for Elavl3 (NM_010487.1,1008-1026).
cggtcaagttcgcaaacaa

SEQ ID NO: 473747 - DNA, 19 bp, Mus musculus
  siRNA target sequence for Elavl3 (NM_010487.1,1118-1136).
cgcttccggctggacaatt

SEQ ID NO: 473748 - DNA, 19 bp, Mus musculus
  siRNA target sequence for Elavl3 (NM_010487.1,1305-1323).
gcgtgctgtggcagctttt

SEQ ID NO: 473749 - DNA, 19 bp, Mus musculus
  siRNA target sequence for Elavl4 (NM_010488.1,145-163).
gcctcaggtgtcaaatgga

SEQ ID NO: 473750 - DNA, 19 bp, Mus musculus
  siRNA target sequence for Elavl4 (NM_010488.1,161-179).
ggaccgacatccaatacaa

SEQ ID NO: 473751 - DNA, 19 bp, Mus musculus
  siRNA target sequence for Elavl4 (NM_010488.1,166-184).
gacatccaatacaagcaat

SEQ ID NO: 473752 - DNA, 19 bp, Mus musculus
  siRNA target sequence for Elavl4 (NM_010488.1,343-361).
caaactcgtgagagacaaa

SEQ ID NO: 473753 - DNA, 19 bp, Mus musculus
  siRNA target sequence for Elavl4 (NM_010488.1,349-367).
cgtgagagacaaaatcaca

SEQ ID NO: 473754 - DNA, 19 bp, Mus musculus
  siRNA target sequence for Elavl4 (NM_010488.1,371-389).
cagagtttagggtatggat

SEQ ID NO: 473755 - DNA, 19 bp, Mus musculus
  siRNA target sequence for Elavl4 (NM_010488.1,373-391).
gagtttagggtatggattt

SEQ ID NO: 473756 - DNA, 19 bp, Mus musculus
  siRNA target sequence for Elavl4 (NM_010488.1,381-399).
ggtatggatttgttaacta

SEQ ID NO: 473757 - DNA, 19 bp, Mus musculus
  siRNA target sequence for Elavl4 (NM_010488.1,397-415).
ctatattgatccaaaggat

SEQ ID NO: 473758 - DNA, 19 bp, Mus musculus
  siRNA target sequence for Elavl4 (NM_010488.1,578-596).
caatacggtcgcatcatca

SEQ ID NO: 473759 - DNA, 19 bp, Mus musculus
  siRNA target sequence for Elavl4 (NM_010488.1,600-618).
cacgcatcctggttgatca

SEQ ID NO: 473760 - DNA, 19 bp, Mus musculus
  siRNA target sequence for Elavl4 (NM_010488.1,603-621).
gcatcctggttgatcaagt

SEQ ID NO: 473761 - DNA, 19 bp, Mus musculus
  siRNA target sequence for Elavl4 (NM_010488.1,633-651).
ctagaggggtgggattcat

SEQ ID NO: 473762 - DNA, 19 bp, Mus musculus
  siRNA target sequence for Elavl4 (NM_010488.1,720-738).
ctacagaaccgattactgt

SEQ ID NO: 473763 - DNA, 19 bp, Mus musculus
  siRNA target sequence for Elavl4 (NM_010488.1,1130-1148).
gacagagtgttgcaagttt

SEQ ID NO: 473764 - DNA, 19 bp, Mus musculus
  siRNA target sequence for Elavl4 (NM_010488.1,1134-1152).
gagtgttgcaagtttcctt

SEQ ID NO: 473765 - DNA, 19 bp, Mus musculus
  siRNA target sequence for Ewsh (NM_007968.1,270-288).
cagcctcccactggttata

SEQ ID NO: 473766 - DNA, 19 bp, Mus musculus
  siRNA target sequence for Ewsh (NM_007968.1,514-532).
ctagcacagggggttataa

SEQ ID NO: 473767 - DNA, 19 bp, Mus musculus
  siRNA target sequence for Ewsh (NM_007968.1,517-535).
gcacagggggttataacca

SEQ ID NO: 473768 - DNA, 19 bp, Mus musculus
  siRNA target sequence for Ewsh (NM_007968.1,533-551).
ccaacccagcctaggatat

SEQ ID NO: 473769 - DNA, 19 bp, Mus musculus
  siRNA target sequence for Ewsh (NM_007968.1,546-564).
ggatatggacagagtaact

SEQ ID NO: 473770 - DNA, 19 bp, Mus musculus
  siRNA target sequence for Ewsh (NM_007968.1,547-565).
gatatggacagagtaacta

SEQ ID NO: 473771 - DNA, 19 bp, Mus musculus
  siRNA target sequence for Ewsh (NM_007968.1,608-626).
caccgcacctccatcttat

SEQ ID NO: 473772 - DNA, 19 bp, Mus musculus
  siRNA target sequence for Ewsh (NM_007968.1,646-664).
cttcacagccgactagtta

SEQ ID NO: 473773 - DNA, 19 bp, Mus musculus
  siRNA target sequence for Ewsh (NM_007968.1,725-743).
gagtagctatggtcaacaa

SEQ ID NO: 473774 - DNA, 19 bp, Mus musculus
  siRNA target sequence for Ewsh (NM_007968.1,755-773).
gcagcagcctcctactagt

SEQ ID NO: 473775 - DNA, 19 bp, Mus musculus
  siRNA target sequence for Ewsh (NM_007968.1,801-819).
caggctccaagtcaatata

SEQ ID NO: 473776 - DNA, 19 bp, Mus musculus
  siRNA target sequence for Ewsh (NM_007968.1,872-890).
cagtagcatgggtgtttat

SEQ ID NO: 473777 - DNA, 19 bp, Mus musculus
  siRNA target sequence for Ewsh (NM_007968.1,1233-1251).
ggacaacccatgatccata

SEQ ID NO: 473778 - DNA, 19 bp, Mus musculus
  siRNA target sequence for Ewsh (NM_007968.1,1234-1252).
gacaacccatgatccatat

SEQ ID NO: 473779 - DNA, 19 bp, Mus musculus
  siRNA target sequence for Fbl (NM_007991.2,678-696).
ctggccgtgacctcatcaa

SEQ ID NO: 473780 - DNA, 19 bp, Mus musculus
  siRNA target sequence for Fbl (NM_007991.2,1035-1053).
cacctcccaaggtgaagaa

SEQ ID NO: 473781 - DNA, 19 bp, Mus musculus
  siRNA target sequence for Fmr1 (NM_008031.1,270-288).
cccaccacctgtaggttat

SEQ ID NO: 473782 - DNA, 19 bp, Mus musculus
  siRNA target sequence for Fmr1 (NM_008031.1,271-289).
ccaccacctgtaggttata

SEQ ID NO: 473783 - DNA, 19 bp, Mus musculus
  siRNA target sequence for Fmr1 (NM_008031.1,272-290).
caccacctgtaggttataa

SEQ ID NO: 473784 - DNA, 19 bp, Mus musculus
  siRNA target sequence for Fmr1 (NM_008031.1,274-292).
ccacctgtaggttataata

SEQ ID NO: 473785 - DNA, 19 bp, Mus musculus
  siRNA target sequence for Fmr1 (NM_008031.1,275-293).
cacctgtaggttataataa

SEQ ID NO: 473786 - DNA, 19 bp, Mus musculus
  siRNA target sequence for Fmr1 (NM_008031.1,280-298).
gtaggttataataaagata

SEQ ID NO: 473787 - DNA, 19 bp, Mus musculus
  siRNA target sequence for Fmr1 (NM_008031.1,353-371).
gctgttggtggttagctaa

SEQ ID NO: 473788 - DNA, 19 bp, Mus musculus
  siRNA target sequence for Fmr1 (NM_008031.1,356-374).
gttggtggttagctaaagt

SEQ ID NO: 473789 - DNA, 19 bp, Mus musculus
  siRNA target sequence for Fmr1 (NM_008031.1,378-396).
gatgataaagggtgagttt

SEQ ID NO: 473790 - DNA, 19 bp, Mus musculus
  siRNA target sequence for Fmr1 (NM_008031.1,387-405).
gggtgagttttatgtgata

SEQ ID NO: 473791 - DNA, 19 bp, Mus musculus
  siRNA target sequence for Fmr1 (NM_008031.1,389-407).
gtgagttttatgtgataga

SEQ ID NO: 473792 - DNA, 19 bp, Mus musculus
  siRNA target sequence for Fmr1 (NM_008031.1,425-443).
ctacgtataatgaaattgt

SEQ ID NO: 473793 - DNA, 19 bp, Mus musculus
  siRNA target sequence for Fmr1 (NM_008031.1,451-469).
gagcgtctacgatctgtta

SEQ ID NO: 473794 - DNA, 19 bp, Mus musculus
  siRNA target sequence for Fmr1 (NM_008031.1,453-471).
gcgtctacgatctgttaat

SEQ ID NO: 473795 - DNA, 19 bp, Mus musculus
  siRNA target sequence for Fmr1 (NM_008031.1,473-491).
ccaacaaacctgctacaaa

SEQ ID NO: 473796 - DNA, 19 bp, Mus musculus
  siRNA target sequence for Fmr1 (NM_008031.1,474-492).
caacaaacctgctacaaaa

SEQ ID NO: 473797 - DNA, 19 bp, Mus musculus
  siRNA target sequence for Fmr1 (NM_008031.1,481-499).
cctgctacaaaagatactt

SEQ ID NO: 473798 - DNA, 19 bp, Mus musculus
  siRNA target sequence for Fmr1 (NM_008031.1,482-500).
ctgctacaaaagatacttt

SEQ ID NO: 473799 - DNA, 19 bp, Mus musculus
  siRNA target sequence for Fmr1 (NM_008031.1,493-511).
gatactttccataagatca

SEQ ID NO: 473800 - DNA, 19 bp, Mus musculus
  siRNA target sequence for Fmr1 (NM_008031.1,516-534).
ggaggtgccagaagattta

SEQ ID NO: 473801 - DNA, 19 bp, Mus musculus
  siRNA target sequence for Fmr1 (NM_008031.1,526-544).
gaagatttacgacaaatgt

SEQ ID NO: 473802 - DNA, 19 bp, Mus musculus
  siRNA target sequence for Fmr1 (NM_008031.1,548-566).
ccaaagaatcagcacataa

SEQ ID NO: 473803 - DNA, 19 bp, Mus musculus
  siRNA target sequence for Fmr1 (NM_008031.1,553-571).
gaatcagcacataaggatt

SEQ ID NO: 473804 - DNA, 19 bp, Mus musculus
  siRNA target sequence for Fmr1 (NM_008031.1,557-575).
cagcacataaggattttaa

SEQ ID NO: 473805 - DNA, 19 bp, Mus musculus
  siRNA target sequence for Fmr1 (NM_008031.1,590-608).
ccttctctgtaacttatga

SEQ ID NO: 473806 - DNA, 19 bp, Mus musculus
  siRNA target sequence for Fmr1 (NM_008031.1,656-674).
caaagcgagcccacatgtt

SEQ ID NO: 473807 - DNA, 19 bp, Mus musculus
  siRNA target sequence for Fmr1 (NM_008031.1,665-683).
cccacatgttgattgacat

SEQ ID NO: 473808 - DNA, 19 bp, Mus musculus
  siRNA target sequence for Fmr1 (NM_008031.1,700-718).
cgcaccaagttgtctctta

SEQ ID NO: 473809 - DNA, 19 bp, Mus musculus
  siRNA target sequence for Fmr1 (NM_008031.1,704-722).
ccaagttgtctcttatact

SEQ ID NO: 473810 - DNA, 19 bp, Mus musculus
  siRNA target sequence for Fmr1 (NM_008031.1,761-779).
ggcagcttgcctcaagatt

SEQ ID NO: 473811 - DNA, 19 bp, Mus musculus
  siRNA target sequence for Fmr1 (NM_008031.1,789-807).
gtttatcgtacgagaagat

SEQ ID NO: 473812 - DNA, 19 bp, Mus musculus
  siRNA target sequence for Fmr1 (NM_008031.1,805-823).
gatctgatgggtttagcta

SEQ ID NO: 473813 - DNA, 19 bp, Mus musculus
  siRNA target sequence for Fmr1 (NM_008031.1,810-828).
gatgggtttagctattggt

SEQ ID NO: 473814 - DNA, 19 bp, Mus musculus
  siRNA target sequence for Fmr1 (NM_008031.1,826-844).
ggtactcatggtgctaata

SEQ ID NO: 473815 - DNA, 19 bp, Mus musculus
  siRNA target sequence for Fmr1 (NM_008031.1,827-845).
gtactcatggtgctaatat

SEQ ID NO: 473816 - DNA, 19 bp, Mus musculus
  siRNA target sequence for Fmr1 (NM_008031.1,864-882).
gcctggcgtcactgctatt

SEQ ID NO: 473817 - DNA, 19 bp, Mus musculus
  siRNA target sequence for Fmr1 (NM_008031.1,868-886).
ggcgtcactgctattgatt

SEQ ID NO: 473818 - DNA, 19 bp, Mus musculus
  siRNA target sequence for Fmr1 (NM_008031.1,869-887).
gcgtcactgctattgattt

SEQ ID NO: 473819 - DNA, 19 bp, Mus musculus
  siRNA target sequence for Fmr1 (NM_008031.1,873-891).
cactgctattgatttagat

SEQ ID NO: 473820 - DNA, 19 bp, Mus musculus
  siRNA target sequence for Fmr1 (NM_008031.1,903-921).
cacatttcatatttatgga

SEQ ID NO: 473821 - DNA, 19 bp, Mus musculus
  siRNA target sequence for Fmr1 (NM_008031.1,996-1014).
cttagtaggcaaagtaata

SEQ ID NO: 473822 - DNA, 19 bp, Mus musculus
  siRNA target sequence for Fmr1 (NM_008031.1,1217-1235).
ctcaacctaacagtacaaa

SEQ ID NO: 473823 - DNA, 19 bp, Mus musculus
  siRNA target sequence for Fmr1 (NM_008031.1,1248-1266).
gttagtggtttcatcaatt

SEQ ID NO: 473824 - DNA, 19 bp, Mus musculus
  siRNA target sequence for Fmr1 (NM_008031.1,1299-1317).
ggcttggcagggtatggta

SEQ ID NO: 473825 - DNA, 19 bp, Mus musculus
  siRNA target sequence for Fmr1 (NM_008031.1,1304-1322).
ggcagggtatggtaccatt

SEQ ID NO: 473826 - DNA, 19 bp, Mus musculus
  siRNA target sequence for Fmr1 (NM_008031.1,1305-1323).
gcagggtatggtaccattt

SEQ ID NO: 473827 - DNA, 19 bp, Mus musculus
  siRNA target sequence for Fmr1 (NM_008031.1,1308-1326).
gggtatggtaccatttgtt

SEQ ID NO: 473828 - DNA, 19 bp, Mus musculus
  siRNA target sequence for Fmr1 (NM_008031.1,1309-1327).
ggtatggtaccatttgttt

SEQ ID NO: 473829 - DNA, 19 bp, Mus musculus
  siRNA target sequence for Fmr1 (NM_008031.1,1310-1328).
gtatggtaccatttgtttt

SEQ ID NO: 473830 - DNA, 19 bp, Mus musculus
  siRNA target sequence for Fmr1 (NM_008031.1,1350-1368).
cgctaatgccactgttctt

SEQ ID NO: 473831 - DNA, 19 bp, Mus musculus
  siRNA target sequence for Fmr1 (NM_008031.1,1410-1428).
gcgtttggagagattacaa

SEQ ID NO: 473832 - DNA, 19 bp, Mus musculus
  siRNA target sequence for Fmr1 (NM_008031.1,1411-1429).
cgtttggagagattacaaa

SEQ ID NO: 473833 - DNA, 19 bp, Mus musculus
  siRNA target sequence for Fmr1 (NM_008031.1,1416-1434).
ggagagattacaaattgat

SEQ ID NO: 473834 - DNA, 19 bp, Mus musculus
  siRNA target sequence for Fmr1 (NM_008031.1,1437-1455).
gcagttgcgacaaattgga

SEQ ID NO: 473835 - DNA, 19 bp, Mus musculus
  siRNA target sequence for Fmr1 (NM_008031.1,1447-1465).
caaattggagctagttcta

SEQ ID NO: 473836 - DNA, 19 bp, Mus musculus
  siRNA target sequence for Fmr1 (NM_008031.1,1471-1489).
ccaccaaatcgtacagata

SEQ ID NO: 473837 - DNA, 19 bp, Mus musculus
  siRNA target sequence for Fmr1 (NM_008031.1,1472-1490).
caccaaatcgtacagataa

SEQ ID NO: 473838 - DNA, 19 bp, Mus musculus
  siRNA target sequence for Fmr1 (NM_008031.1,1475-1493).
caaatcgtacagataagga

SEQ ID NO: 473839 - DNA, 19 bp, Mus musculus
  siRNA target sequence for Fmr1 (NM_008031.1,1566-1584).
cagacgcggtcctggatat

SEQ ID NO: 473840 - DNA, 19 bp, Mus musculus
  siRNA target sequence for Fmr1 (NM_008031.1,1570-1588).
cgcggtcctggatatactt

SEQ ID NO: 473841 - DNA, 19 bp, Mus musculus
  siRNA target sequence for Fmr1 (NM_008031.1,1572-1590).
cggtcctggatatacttca

SEQ ID NO: 473842 - DNA, 19 bp, Mus musculus
  siRNA target sequence for Fmr1 (NM_008031.1,1782-1800).
cgatcattcccgaacagat

SEQ ID NO: 473843 - DNA, 19 bp, Mus musculus
  siRNA target sequence for Fmr1 (NM_008031.1,1783-1801).
gatcattcccgaacagata

SEQ ID NO: 473844 - DNA, 19 bp, Mus musculus
  siRNA target sequence for Fmr1 (NM_008031.1,1880-1898).
ggctgcgcacgggtaaaga

SEQ ID NO: 473845 - DNA, 19 bp, Mus musculus
  siRNA target sequence for Fmr1 (NM_008031.1,1881-1899).
gctgcgcacgggtaaagat

SEQ ID NO: 473846 - DNA, 19 bp, Mus musculus
  siRNA target sequence for Fmr1 (NM_008031.1,1886-1904).
gcacgggtaaagatcgtaa

SEQ ID NO: 473847 - DNA, 19 bp, Mus musculus
  siRNA target sequence for Fxr1h (NM_008053.1,58-76).
ctacaagggatttatcaaa

SEQ ID NO: 473848 - DNA, 19 bp, Mus musculus
  siRNA target sequence for Fxr1h (NM_008053.1,61-79).
caagggatttatcaaagat

SEQ ID NO: 473849 - DNA, 19 bp, Mus musculus
  siRNA target sequence for Fxr1h (NM_008053.1,89-107).
gactccctcacagttgttt

SEQ ID NO: 473850 - DNA, 19 bp, Mus musculus
  siRNA target sequence for Fxr1h (NM_008053.1,165-183).
caccacctgatataaaaaa

SEQ ID NO: 473851 - DNA, 19 bp, Mus musculus
  siRNA target sequence for Fxr1h (NM_008053.1,258-276).
ctaaagttcggatgatgaa

SEQ ID NO: 473852 - DNA, 19 bp, Mus musculus
  siRNA target sequence for Fxr1h (NM_008053.1,280-298).
cgagttttatgtcattgaa

SEQ ID NO: 473853 - DNA, 19 bp, Mus musculus
  siRNA target sequence for Fxr1h (NM_008053.1,347-365).
cttcggcctgtcaatcaaa

SEQ ID NO: 473854 - DNA, 19 bp, Mus musculus
  siRNA target sequence for Fxr1h (NM_008053.1,350-368).
cggcctgtcaatcaaaata

SEQ ID NO: 473855 - DNA, 19 bp, Mus musculus
  siRNA target sequence for Fxr1h (NM_008053.1,424-442).
gagagaagcgtgtgctaat

SEQ ID NO: 473856 - DNA, 19 bp, Mus musculus
  siRNA target sequence for Fxr1h (NM_008053.1,426-444).
gagaagcgtgtgctaatga

SEQ ID NO: 473857 - DNA, 19 bp, Mus musculus
  siRNA target sequence for Fxr1h (NM_008053.1,443-461).
gaaaatgcccataaagatt

SEQ ID NO: 473858 - DNA, 19 bp, Mus musculus
  siRNA target sequence for Fxr1h (NM_008053.1,473-491).
gtaggagcatgcagaatct

SEQ ID NO: 473859 - DNA, 19 bp, Mus musculus
  siRNA target sequence for Fxr1h (NM_008053.1,477-495).
gagcatgcagaatctttta

SEQ ID NO: 473860 - DNA, 19 bp, Mus musculus
  siRNA target sequence for Fxr1h (NM_008053.1,480-498).
catgcagaatcttttatca

SEQ ID NO: 473861 - DNA, 19 bp, Mus musculus
  siRNA target sequence for Fxr1h (NM_008053.1,545-563).
gtgaagagagtaaatatct

SEQ ID NO: 473862 - DNA, 19 bp, Mus musculus
  siRNA target sequence for Fxr1h (NM_008053.1,585-603).
gtattcggacgaagttgat

SEQ ID NO: 473863 - DNA, 19 bp, Mus musculus
  siRNA target sequence for Fxr1h (NM_008053.1,590-608).
cggacgaagttgatgctta

SEQ ID NO: 473864 - DNA, 19 bp, Mus musculus
  siRNA target sequence for Fxr1h (NM_008053.1,683-701).
gttgtgagagaagatttaa

SEQ ID NO: 473865 - DNA, 19 bp, Mus musculus
  siRNA target sequence for Fxr1h (NM_008053.1,716-734).
ggaacgcatggcagtaaca

SEQ ID NO: 473866 - DNA, 19 bp, Mus musculus
  siRNA target sequence for Fxr1h (NM_008053.1,717-735).
gaacgcatggcagtaacat

SEQ ID NO: 473867 - DNA, 19 bp, Mus musculus
  siRNA target sequence for Fxr1h (NM_008053.1,720-738).
cgcatggcagtaacataca

SEQ ID NO: 473868 - DNA, 19 bp, Mus musculus
  siRNA target sequence for Fxr1h (NM_008053.1,748-766).
gaaggttcctggagttact

SEQ ID NO: 473869 - DNA, 19 bp, Mus musculus
  siRNA target sequence for Fxr1h (NM_008053.1,782-800).
gaagacaccggaacgttta

SEQ ID NO: 473870 - DNA, 19 bp, Mus musculus
  siRNA target sequence for Fxr1h (NM_008053.1,785-803).
gacaccggaacgtttagaa

SEQ ID NO: 473871 - DNA, 19 bp, Mus musculus
  siRNA target sequence for Fxr1h (NM_008053.1,789-807).
ccggaacgtttagaatcta

SEQ ID NO: 473872 - DNA, 19 bp, Mus musculus
  siRNA target sequence for Fxr1h (NM_008053.1,790-808).
cggaacgtttagaatctat

SEQ ID NO: 473873 - DNA, 19 bp, Mus musculus
  siRNA target sequence for Fxr1h (NM_008053.1,880-898).
caggaatcttgttggaaaa

SEQ ID NO: 473874 - DNA, 19 bp, Mus musculus
  siRNA target sequence for Fxr1h (NM_008053.1,947-965).
ggtgtggttcgagtaagaa

SEQ ID NO: 473875 - DNA, 19 bp, Mus musculus
  siRNA target sequence for Fxr1h (NM_008053.1,1054-1072).
gcaagttcttctagagtat

SEQ ID NO: 473876 - DNA, 19 bp, Mus musculus
  siRNA target sequence for Fxr1h (NM_008053.1,1058-1076).
gttcttctagagtatcaca

SEQ ID NO: 473877 - DNA, 19 bp, Mus musculus
  siRNA target sequence for Fxr1h (NM_008053.1,1069-1087).
gtatcacatcgcttactta

SEQ ID NO: 473878 - DNA, 19 bp, Mus musculus
  siRNA target sequence for Fxr1h (NM_008053.1,1075-1093).
catcgcttacttaaaggaa

SEQ ID NO: 473879 - DNA, 19 bp, Mus musculus
  siRNA target sequence for Fxr1h (NM_008053.1,1111-1129).
ggaacgtctgcagattgat

SEQ ID NO: 473880 - DNA, 19 bp, Mus musculus
  siRNA target sequence for Fxr1h (NM_008053.1,1133-1151).
cagctgcgacagattggtt

SEQ ID NO: 473881 - DNA, 19 bp, Mus musculus
  siRNA target sequence for Fxr1h (NM_008053.1,1200-1218).
cctccggttatggtacaaa

SEQ ID NO: 473882 - DNA, 19 bp, Mus musculus
  siRNA target sequence for Fxr1h (NM_008053.1,1201-1219).
ctccggttatggtacaaat

SEQ ID NO: 473883 - DNA, 19 bp, Mus musculus
  siRNA target sequence for Fxr1h (NM_008053.1,1204-1222).
cggttatggtacaaattct

SEQ ID NO: 473884 - DNA, 19 bp, Mus musculus
  siRNA target sequence for Fxr1h (NM_008053.1,1206-1224).
gttatggtacaaattctga

SEQ ID NO: 473885 - DNA, 19 bp, Mus musculus
  siRNA target sequence for Fxr1h (NM_008053.1,1215-1233).
caaattctgagctgtctaa

SEQ ID NO: 473886 - DNA, 19 bp, Mus musculus
  siRNA target sequence for Fxr1h (NM_008053.1,1230-1248).
ctaacccctccgaaacaga

SEQ ID NO: 473887 - DNA, 19 bp, Mus musculus
  siRNA target sequence for Fxr1h (NM_008053.1,1439-1457).
ccatacagcttacttgata

SEQ ID NO: 473888 - DNA, 19 bp, Mus musculus
  siRNA target sequence for Fxr1h (NM_008053.1,1446-1464).
gcttacttgataatacaga

SEQ ID NO: 473889 - DNA, 19 bp, Mus musculus
  siRNA target sequence for Fxr1h (NM_008053.1,1485-1503).
ctgacgccagcgaatctca

SEQ ID NO: 473890 - DNA, 19 bp, Mus musculus
  siRNA target sequence for Fxr1h (NM_008053.1,1496-1514).
gaatctcaccacagtacta

SEQ ID NO: 473891 - DNA, 19 bp, Mus musculus
  siRNA target sequence for Fxr2h (NM_011814.1,72-90).
cttctacaagggctttgta

SEQ ID NO: 473892 - DNA, 19 bp, Mus musculus
  siRNA target sequence for Fxr2h (NM_011814.1,179-197).
cgcctccagctgactacaa

SEQ ID NO: 473893 - DNA, 19 bp, Mus musculus
  siRNA target sequence for Fxr2h (NM_011814.1,181-199).
cctccagctgactacaata

SEQ ID NO: 473894 - DNA, 19 bp, Mus musculus
  siRNA target sequence for Fxr2h (NM_011814.1,190-208).
gactacaataaggaaatca

SEQ ID NO: 473895 - DNA, 19 bp, Mus musculus
  siRNA target sequence for Fxr2h (NM_011814.1,192-210).
ctacaataaggaaatcaca

SEQ ID NO: 473896 - DNA, 19 bp, Mus musculus
  siRNA target sequence for Fxr2h (NM_011814.1,231-249).
ctattcgagagccaatgaa

SEQ ID NO: 473897 - DNA, 19 bp, Mus musculus
  siRNA target sequence for Fxr2h (NM_011814.1,284-302).
ggatgatgaagggagattt

SEQ ID NO: 473898 - DNA, 19 bp, Mus musculus
  siRNA target sequence for Fxr2h (NM_011814.1,447-465).
ggcctgctccaatgaaaat

SEQ ID NO: 473899 - DNA, 19 bp, Mus musculus
  siRNA target sequence for Fxr2h (NM_011814.1,494-512).
gagccaactgcatctttct

SEQ ID NO: 473900 - DNA, 19 bp, Mus musculus
  siRNA target sequence for Fxr2h (NM_011814.1,575-593).
ctttgttgggtgatatgca

SEQ ID NO: 473901 - DNA, 19 bp, Mus musculus
  siRNA target sequence for Fxr2h (NM_011814.1,598-616).
cgaagccttcgcaccaaat

SEQ ID NO: 473902 - DNA, 19 bp, Mus musculus
  siRNA target sequence for Fxr2h (NM_011814.1,599-617).
gaagccttcgcaccaaatt

SEQ ID NO: 473903 - DNA, 19 bp, Mus musculus
  siRNA target sequence for Fxr2h (NM_011814.1,602-620).
gccttcgcaccaaattgct

SEQ ID NO: 473904 - DNA, 19 bp, Mus musculus
  siRNA target sequence for Fxr2h (NM_011814.1,853-871).
gctcgaagctaccttgaat

SEQ ID NO: 473905 - DNA, 19 bp, Mus musculus
  siRNA target sequence for Fxr2h (NM_011814.1,854-872).
ctcgaagctaccttgaatt

SEQ ID NO: 473906 - DNA, 19 bp, Mus musculus
  siRNA target sequence for Fxr2h (NM_011814.1,856-874).
cgaagctaccttgaatttt

SEQ ID NO: 473907 - DNA, 19 bp, Mus musculus
  siRNA target sequence for Fxr2h (NM_011814.1,1026-1044).
ggttcccttcatatttgtt

SEQ ID NO: 473908 - DNA, 19 bp, Mus musculus
  siRNA target sequence for Fxr2h (NM_011814.1,1071-1089).
ccaggcactgcttgagtat

SEQ ID NO: 473909 - DNA, 19 bp, Mus musculus
  siRNA target sequence for Fxr2h (NM_011814.1,1263-1281).
gcacacgaccagaacctat

SEQ ID NO: 473910 - DNA, 19 bp, Mus musculus
  siRNA target sequence for Fxr2h (NM_011814.1,1383-1401).
gagagaggagtctaatcga

SEQ ID NO: 473911 - DNA, 19 bp, Mus musculus
  siRNA target sequence for Fxr2h (NM_011814.1,1493-1511).
ggcctacctcaagatataa

SEQ ID NO: 473912 - DNA, 19 bp, Mus musculus
  siRNA target sequence for Fxr2h (NM_011814.1,1563-1581).
cctcttggacacatctgaa

SEQ ID NO: 473913 - DNA, 19 bp, Mus musculus
  siRNA target sequence for Hnrpa2b1 (NM_016806.1,117-135).
gttccgaaagctctttatt

SEQ ID NO: 473914 - DNA, 19 bp, Mus musculus
  siRNA target sequence for Hnrpa2b1 (NM_016806.1,568-586).
gtcttgcaaaaatatcaca

SEQ ID NO: 473915 - DNA, 19 bp, Mus musculus
  siRNA target sequence for Hnrpa2b1 (NM_016806.1,585-603).
caccataaatggtcacaat

SEQ ID NO: 473916 - DNA, 19 bp, Mus musculus
  siRNA target sequence for Hnrpc (NM_016884.1,508-526).
ctcagttcctcatttgact

SEQ ID NO: 473917 - DNA, 19 bp, Mus musculus
  siRNA target sequence for Hnrph2 (NM_019868.2,1003-1021).
gagacctaaactactgttt

SEQ ID NO: 473918 - DNA, 19 bp, Mus musculus
  siRNA target sequence for Hnrph2 (NM_019868.2,1076-1094).
cacggggcactgtgtacat

SEQ ID NO: 473919 - DNA, 19 bp, Mus musculus
  siRNA target sequence for Hnrph2 (NM_019868.2,1092-1110).
catatgagggggttaccat

SEQ ID NO: 473920 - DNA, 19 bp, Mus musculus
  siRNA target sequence for Hnrph2 (NM_019868.2,1116-1134).
gccaccgagaatgatattt

SEQ ID NO: 473921 - DNA, 19 bp, Mus musculus
  siRNA target sequence for Hnrph2 (NM_019868.2,1117-1135).
ccaccgagaatgatattta

SEQ ID NO: 473922 - DNA, 19 bp, Mus musculus
  siRNA target sequence for Hnrph2 (NM_019868.2,1121-1139).
cgagaatgatatttacaat

SEQ ID NO: 473923 - DNA, 19 bp, Mus musculus
  siRNA target sequence for Hnrph2 (NM_019868.2,1327-1345).
gagcttatgatcatagcta

SEQ ID NO: 473924 - DNA, 19 bp, Mus musculus
  siRNA target sequence for Hnrph2 (NM_019868.2,1475-1493).
ctatggagggggttatggt

SEQ ID NO: 473925 - DNA, 19 bp, Mus musculus
  siRNA target sequence for Ilf2 (NM_026374.2,121-139).
gccccatatcccatttgat

SEQ ID NO: 473926 - DNA, 19 bp, Mus musculus
  siRNA target sequence for Ilf2 (NM_026374.2,122-140).
ccccatatcccatttgatt

SEQ ID NO: 473927 - DNA, 19 bp, Mus musculus
  siRNA target sequence for Ilf2 (NM_026374.2,224-242).
caagaccttgcccctaatt

SEQ ID NO: 473928 - DNA, 19 bp, Mus musculus
  siRNA target sequence for Ilf2 (NM_026374.2,310-328).
ggccccaggaacatttgaa

SEQ ID NO: 473929 - DNA, 19 bp, Mus musculus
  siRNA target sequence for Ilf2 (NM_026374.2,346-364).
ccggcaggtaggatcatat

SEQ ID NO: 473930 - DNA, 19 bp, Mus musculus
  siRNA target sequence for Ilf2 (NM_026374.2,347-365).
cggcaggtaggatcatata

SEQ ID NO: 473931 - DNA, 19 bp, Mus musculus
  siRNA target sequence for Ilf2 (NM_026374.2,348-366).
ggcaggtaggatcatataa

SEQ ID NO: 473932 - DNA, 19 bp, Mus musculus
  siRNA target sequence for Ilf2 (NM_026374.2,349-367).
gcaggtaggatcatataaa

SEQ ID NO: 473933 - DNA, 19 bp, Mus musculus
  siRNA target sequence for Ilf2 (NM_026374.2,397-415).
ggctgacctggtggtaata

SEQ ID NO: 473934 - DNA, 19 bp, Mus musculus
  siRNA target sequence for Ilf2 (NM_026374.2,399-417).
ctgacctggtggtaatact

SEQ ID NO: 473935 - DNA, 19 bp, Mus musculus
  siRNA target sequence for Ilf2 (NM_026374.2,401-419).
gacctggtggtaatactaa

SEQ ID NO: 473936 - DNA, 19 bp, Mus musculus
  siRNA target sequence for Ilf2 (NM_026374.2,485-503).
caggatccctcagaagttt

SEQ ID NO: 473937 - DNA, 19 bp, Mus musculus
  siRNA target sequence for Ilf2 (NM_026374.2,508-526).
catgctgactaatgaaact

SEQ ID NO: 473938 - DNA, 19 bp, Mus musculus
  siRNA target sequence for Ilf2 (NM_026374.2,556-574).
ggtgaaaattctcattaca

SEQ ID NO: 473939 - DNA, 19 bp, Mus musculus
  siRNA target sequence for Ilf2 (NM_026374.2,557-575).
gtgaaaattctcattacaa

SEQ ID NO: 473940 - DNA, 19 bp, Mus musculus
  siRNA target sequence for Ilf2 (NM_026374.2,658-676).
gcatgcccgctggtttgaa

SEQ ID NO: 473941 - DNA, 19 bp, Mus musculus
  siRNA target sequence for Ilf2 (NM_026374.2,684-702).
cttctcagtccacagttaa

SEQ ID NO: 473942 - DNA, 19 bp, Mus musculus
  siRNA target sequence for Ilf2 (NM_026374.2,693-711).
ccacagttaaagttctcat

SEQ ID NO: 473943 - DNA, 19 bp, Mus musculus
  siRNA target sequence for Ilf2 (NM_026374.2,694-712).
cacagttaaagttctcata

SEQ ID NO: 473944 - DNA, 19 bp, Mus musculus
  siRNA target sequence for Ilf2 (NM_026374.2,704-722).
gttctcataagattgctaa

SEQ ID NO: 473945 - DNA, 19 bp, Mus musculus
  siRNA target sequence for Ilf2 (NM_026374.2,785-803).
gggcactatgctgtaatga

SEQ ID NO: 473946 - DNA, 19 bp, Mus musculus
  siRNA target sequence for Ilf2 (NM_026374.2,846-864).
ggcgctgcttgcagattct

SEQ ID NO: 473947 - DNA, 19 bp, Mus musculus
  siRNA target sequence for Ilf2 (NM_026374.2,1050-1068).
gctatcttgcttctgaaat

SEQ ID NO: 473948 - DNA, 19 bp, Mus musculus
  siRNA target sequence for Ilf2 (NM_026374.2,1074-1092).
cctgggatggagtgattgt

SEQ ID NO: 473949 - DNA, 19 bp, Mus musculus
  siRNA target sequence for Kist (NM_010633.3,413-431).
ggaacatcgtgactttata

SEQ ID NO: 473950 - DNA, 19 bp, Mus musculus
  siRNA target sequence for Kist (NM_010633.3,414-432).
gaacatcgtgactttatat

SEQ ID NO: 473951 - DNA, 19 bp, Mus musculus
  siRNA target sequence for Kist (NM_010633.3,417-435).
catcgtgactttatatgga

SEQ ID NO: 473952 - DNA, 19 bp, Mus musculus
  siRNA target sequence for Kist (NM_010633.3,561-579).
gcactgtgcccgagatgtt

SEQ ID NO: 473953 - DNA, 19 bp, Mus musculus
  siRNA target sequence for Kist (NM_010633.3,653-671).
gtgcggagaatgagtgttt

SEQ ID NO: 473954 - DNA, 19 bp, Mus musculus
  siRNA target sequence for Kist (NM_010633.3,660-678).
gaatgagtgttttaagctt

SEQ ID NO: 473955 - DNA, 19 bp, Mus musculus
  siRNA target sequence for Kist (NM_010633.3,706-724).
ggcaatcaggacgtaaagt

SEQ ID NO: 473956 - DNA, 19 bp, Mus musculus
  siRNA target sequence for Kist (NM_010633.3,707-725).
gcaatcaggacgtaaagta

SEQ ID NO: 473957 - DNA, 19 bp, Mus musculus
  siRNA target sequence for Kist (NM_010633.3,708-726).
caatcaggacgtaaagtat

SEQ ID NO: 473958 - DNA, 19 bp, Mus musculus
  siRNA target sequence for Kist (NM_010633.3,790-808).
ctgcagagtgatacagaat

SEQ ID NO: 473959 - DNA, 19 bp, Mus musculus
  siRNA target sequence for Kist (NM_010633.3,793-811).
cagagtgatacagaatgta

SEQ ID NO: 473960 - DNA, 19 bp, Mus musculus
  siRNA target sequence for Kist (NM_010633.3,833-851).
gcctcggaatcattttact

SEQ ID NO: 473961 - DNA, 19 bp, Mus musculus
  siRNA target sequence for Kist (NM_010633.3,865-883).
ggaatgaagctgaaacata

SEQ ID NO: 473962 - DNA, 19 bp, Mus musculus
  siRNA target sequence for Kist (NM_010633.3,897-915).
ggaatggaaggcaaacagt

SEQ ID NO: 473963 - DNA, 19 bp, Mus musculus
  siRNA target sequence for Kist (NM_010633.3,912-930).
cagttctgctattattgat

SEQ ID NO: 473964 - DNA, 19 bp, Mus musculus
  siRNA target sequence for Kist (NM_010633.3,914-932).
gttctgctattattgatca

SEQ ID NO: 473965 - DNA, 19 bp, Mus musculus
  siRNA target sequence for Kist (NM_010633.3,954-972).
ggtgaatgccgcaattcca

SEQ ID NO: 473966 - DNA, 19 bp, Mus musculus
  siRNA target sequence for Kist (NM_010633.3,979-997).
cacctcagagaccttatca

SEQ ID NO: 473967 - DNA, 19 bp, Mus musculus
  siRNA target sequence for Kist (NM_010633.3,996-1014).
caaaagcatgcttcatgat

SEQ ID NO: 473968 - DNA, 19 bp, Mus musculus
  siRNA target sequence for Kist (NM_010633.3,1046-1064).
cattgtgcagcccattctt

SEQ ID NO: 473969 - DNA, 19 bp, Mus musculus
  siRNA target sequence for Kist (NM_010633.3,1073-1091).
cttttgcccctcatattga

SEQ ID NO: 473970 - DNA, 19 bp, Mus musculus
  siRNA target sequence for Kist (NM_010633.3,1079-1097).
cccctcatattgaagatct

SEQ ID NO: 473971 - DNA, 19 bp, Mus musculus
  siRNA target sequence for Kist (NM_010633.3,1262-1280).
gacaagtcttcgttgagta

SEQ ID NO: 473972 - DNA, 19 bp, Mus musculus
  siRNA target sequence for Kist (NM_010633.3,1283-1301).
cgaacgctggtgattccaa

SEQ ID NO: 473973 - DNA, 19 bp, Mus musculus
  siRNA target sequence for Kist (NM_010633.3,1284-1302).
gaacgctggtgattccaaa

SEQ ID NO: 473974 - DNA, 19 bp, Mus musculus
  siRNA target sequence for Kist (NM_010633.3,1298-1316).
ccaaagctgctcagaagtt

SEQ ID NO: 473975 - DNA, 19 bp, Mus musculus
  siRNA target sequence for Kist (NM_010633.3,1329-1347).
gatgtttgacgggaagttt

SEQ ID NO: 473976 - DNA, 19 bp, Mus musculus
  siRNA target sequence for Kist (NM_010633.3,1332-1350).
gtttgacgggaagtttgtt

SEQ ID NO: 473977 - DNA, 19 bp, Mus musculus
  siRNA target sequence for Kist (NM_010633.3,1383-1401).
gaggggatatctttatcaa

SEQ ID NO: 473978 - DNA, 19 bp, Mus musculus
  siRNA target sequence for Kist (NM_010633.3,1388-1406).
gatatctttatcaaacctt

SEQ ID NO: 473979 - DNA, 19 bp, Mus musculus
  siRNA target sequence for Lgtn (NM_010709.1,334-352).
ggtggtaaccccatcctat

SEQ ID NO: 473980 - DNA, 19 bp, Mus musculus
  siRNA target sequence for Lgtn (NM_010709.1,335-353).
gtggtaaccccatcctatt

SEQ ID NO: 473981 - DNA, 19 bp, Mus musculus
  siRNA target sequence for Lgtn (NM_010709.1,338-356).
gtaaccccatcctatttga

SEQ ID NO: 473982 - DNA, 19 bp, Mus musculus
  siRNA target sequence for Lgtn (NM_010709.1,361-379).
gagaaaaatttgtatccaa

SEQ ID NO: 473983 - DNA, 19 bp, Mus musculus
  siRNA target sequence for Lgtn (NM_010709.1,393-411).
gtgggcctatccggatatt

SEQ ID NO: 473984 - DNA, 19 bp, Mus musculus
  siRNA target sequence for Lgtn (NM_010709.1,395-413).
gggcctatccggatattct

SEQ ID NO: 473985 - DNA, 19 bp, Mus musculus
  siRNA target sequence for Lgtn (NM_010709.1,396-414).
ggcctatccggatattcta

SEQ ID NO: 473986 - DNA, 19 bp, Mus musculus
  siRNA target sequence for Lgtn (NM_010709.1,404-422).
cggatattctaccaacttt

SEQ ID NO: 473987 - DNA, 19 bp, Mus musculus
  siRNA target sequence for Lgtn (NM_010709.1,431-449).
ggcctctggtattggaaaa

SEQ ID NO: 473988 - DNA, 19 bp, Mus musculus
  siRNA target sequence for Lgtn (NM_010709.1,454-472).
gtcgggggagcagatttga

SEQ ID NO: 473989 - DNA, 19 bp, Mus musculus
  siRNA target sequence for Lgtn (NM_010709.1,703-721).
ccactggaccccacagata

SEQ ID NO: 473990 - DNA, 19 bp, Mus musculus
  siRNA target sequence for Lgtn (NM_010709.1,1009-1027).
cagcaactggatataaaga

SEQ ID NO: 473991 - DNA, 19 bp, Mus musculus
  siRNA target sequence for Lgtn (NM_010709.1,1220-1238).
cctatctccctccagatat

SEQ ID NO: 473992 - DNA, 19 bp, Mus musculus
  siRNA target sequence for Lgtn (NM_010709.1,1322-1340).
gtgaggtccgaaagatcat

SEQ ID NO: 473993 - DNA, 19 bp, Mus musculus
  siRNA target sequence for Lgtn (NM_010709.1,1324-1342).
gaggtccgaaagatcatca

SEQ ID NO: 473994 - DNA, 19 bp, Mus musculus
  siRNA target sequence for Lgtn (NM_010709.1,1395-1413).
gaagttggatcctatctta

SEQ ID NO: 473995 - DNA, 19 bp, Mus musculus
  siRNA target sequence for Lgtn (NM_010709.1,1398-1416).
gttggatcctatcttatgt

SEQ ID NO: 473996 - DNA, 19 bp, Mus musculus
  siRNA target sequence for Lgtn (NM_010709.1,1503-1521).
gcctgcctaccaagtaaca

SEQ ID NO: 473997 - DNA, 19 bp, Mus musculus
  siRNA target sequence for Lgtn (NM_010709.1,1504-1522).
cctgcctaccaagtaacat

SEQ ID NO: 473998 - DNA, 19 bp, Mus musculus
  siRNA target sequence for Lgtn (NM_010709.1,1505-1523).
ctgcctaccaagtaacatt

SEQ ID NO: 473999 - DNA, 19 bp, Mus musculus
  siRNA target sequence for Lgtn (NM_010709.1,1509-1527).
ctaccaagtaacatttcct

SEQ ID NO: 474000 - DNA, 19 bp, Mus musculus
  siRNA target sequence for Lgtn (NM_010709.1,1582-1600).
gcactgaagacctataata

SEQ ID NO: 474001 - DNA, 19 bp, Mus musculus
  siRNA target sequence for Lgtn (NM_010709.1,1583-1601).
cactgaagacctataataa

SEQ ID NO: 474002 - DNA, 19 bp, Mus musculus
  siRNA target sequence for Lgtn (NM_010709.1,1765-1783).
ggccagctactgcttgaaa

SEQ ID NO: 474003 - DNA, 19 bp, Mus musculus
  siRNA target sequence for Matr3 (NM_010771.3,227-245).
ctctcggtagggattcaca

SEQ ID NO: 474004 - DNA, 19 bp, Mus musculus
  siRNA target sequence for Matr3 (NM_010771.3,296-314).
ctacccagtctttaagtat

SEQ ID NO: 474005 - DNA, 19 bp, Mus musculus
  siRNA target sequence for Matr3 (NM_010771.3,347-365).
ctgcacgccttgctagttt

SEQ ID NO: 474006 - DNA, 19 bp, Mus musculus
  siRNA target sequence for Matr3 (NM_010771.3,350-368).
cacgccttgctagtttaat

SEQ ID NO: 474007 - DNA, 19 bp, Mus musculus
  siRNA target sequence for Matr3 (NM_010771.3,352-370).
cgccttgctagtttaatga

SEQ ID NO: 474008 - DNA, 19 bp, Mus musculus
  siRNA target sequence for Matr3 (NM_010771.3,353-371).
gccttgctagtttaatgaa

SEQ ID NO: 474009 - DNA, 19 bp, Mus musculus
  siRNA target sequence for Matr3 (NM_010771.3,362-380).
gtttaatgaatcttggaat

SEQ ID NO: 474010 - DNA, 19 bp, Mus musculus
  siRNA target sequence for Matr3 (NM_010771.3,381-399).
gagttcttcattgaatcaa

SEQ ID NO: 474011 - DNA, 19 bp, Mus musculus
  siRNA target sequence for Matr3 (NM_010771.3,420-438).
gtcttctgctagtacttct

SEQ ID NO: 474012 - DNA, 19 bp, Mus musculus
  siRNA target sequence for Matr3 (NM_010771.3,431-449).
gtacttcttcccataattt

SEQ ID NO: 474013 - DNA, 19 bp, Mus musculus
  siRNA target sequence for Matr3 (NM_010771.3,440-458).
cccataatttgcagtctat

SEQ ID NO: 474014 - DNA, 19 bp, Mus musculus
  siRNA target sequence for Matr3 (NM_010771.3,442-460).
cataatttgcagtctatat

SEQ ID NO: 474015 - DNA, 19 bp, Mus musculus
  siRNA target sequence for Matr3 (NM_010771.3,515-533).
cagaccaggccagtaatat

SEQ ID NO: 474016 - DNA, 19 bp, Mus musculus
  siRNA target sequence for Matr3 (NM_010771.3,517-535).
gaccaggccagtaatattt

SEQ ID NO: 474017 - DNA, 19 bp, Mus musculus
  siRNA target sequence for Matr3 (NM_010771.3,552-570).
gtctgctagagacttagat

SEQ ID NO: 474018 - DNA, 19 bp, Mus musculus
  siRNA target sequence for Matr3 (NM_010771.3,557-575).
ctagagacttagatgaact

SEQ ID NO: 474019 - DNA, 19 bp, Mus musculus
  siRNA target sequence for Matr3 (NM_010771.3,612-630).
cttgccccaaattcttcta

SEQ ID NO: 474020 - DNA, 19 bp, Mus musculus
  siRNA target sequence for Matr3 (NM_010771.3,650-668).
ctgaagaaggccctacatt

SEQ ID NO: 474021 - DNA, 19 bp, Mus musculus
  siRNA target sequence for Matr3 (NM_010771.3,652-670).
gaagaaggccctacattga

SEQ ID NO: 474022 - DNA, 19 bp, Mus musculus
  siRNA target sequence for Matr3 (NM_010771.3,655-673).
gaaggccctacattgagtt

SEQ ID NO: 474023 - DNA, 19 bp, Mus musculus
  siRNA target sequence for Matr3 (NM_010771.3,660-678).
ccctacattgagttatggt

SEQ ID NO: 474024 - DNA, 19 bp, Mus musculus
  siRNA target sequence for Matr3 (NM_010771.3,661-679).
cctacattgagttatggta

SEQ ID NO: 474025 - DNA, 19 bp, Mus musculus
  siRNA target sequence for Matr3 (NM_010771.3,747-765).
gcactttagaagagatagt

SEQ ID NO: 474026 - DNA, 19 bp, Mus musculus
  siRNA target sequence for Matr3 (NM_010771.3,748-766).
cactttagaagagatagtt

SEQ ID NO: 474027 - DNA, 19 bp, Mus musculus
  siRNA target sequence for Matr3 (NM_010771.3,750-768).
ctttagaagagatagtttt

SEQ ID NO: 474028 - DNA, 19 bp, Mus musculus
  siRNA target sequence for Matr3 (NM_010771.3,814-832).
ggaagtcgttctcaagaat

SEQ ID NO: 474029 - DNA, 19 bp, Mus musculus
  siRNA target sequence for Matr3 (NM_010771.3,829-847).
gaatctggttattatgaca

SEQ ID NO: 474030 - DNA, 19 bp, Mus musculus
  siRNA target sequence for Matr3 (NM_010771.3,833-851).
ctggttattatgacagaat

SEQ ID NO: 474031 - DNA, 19 bp, Mus musculus
  siRNA target sequence for Matr3 (NM_010771.3,887-905).
ggtgtagggatgattcttt

SEQ ID NO: 474032 - DNA, 19 bp, Mus musculus
  siRNA target sequence for Matr3 (NM_010771.3,888-906).
gtgtagggatgattctttt

SEQ ID NO: 474033 - DNA, 19 bp, Mus musculus
  siRNA target sequence for Matr3 (NM_010771.3,910-928).
ggtgagacctcgcataact

SEQ ID NO: 474034 - DNA, 19 bp, Mus musculus
  siRNA target sequence for Matr3 (NM_010771.3,911-929).
gtgagacctcgcataacta

SEQ ID NO: 474035 - DNA, 19 bp, Mus musculus
  siRNA target sequence for Matr3 (NM_010771.3,915-933).
gacctcgcataactatcat

SEQ ID NO: 474036 - DNA, 19 bp, Mus musculus
  siRNA target sequence for Matr3 (NM_010771.3,917-935).
cctcgcataactatcataa

SEQ ID NO: 474037 - DNA, 19 bp, Mus musculus
  siRNA target sequence for Matr3 (NM_010771.3,918-936).
ctcgcataactatcataaa

SEQ ID NO: 474038 - DNA, 19 bp, Mus musculus
  siRNA target sequence for Matr3 (NM_010771.3,920-938).
cgcataactatcataaatt

SEQ ID NO: 474039 - DNA, 19 bp, Mus musculus
  siRNA target sequence for Matr3 (NM_010771.3,968-986).
gtcctggccccttacaaga

SEQ ID NO: 474040 - DNA, 19 bp, Mus musculus
  siRNA target sequence for Matr3 (NM_010771.3,1014-1032).
cgctcctccaagtagcaat

SEQ ID NO: 474041 - DNA, 19 bp, Mus musculus
  siRNA target sequence for Matr3 (NM_010771.3,1015-1033).
gctcctccaagtagcaata

SEQ ID NO: 474042 - DNA, 19 bp, Mus musculus
  siRNA target sequence for Matr3 (NM_010771.3,1016-1034).
ctcctccaagtagcaatat

SEQ ID NO: 474043 - DNA, 19 bp, Mus musculus
  siRNA target sequence for Matr3 (NM_010771.3,1114-1132).
gagtggagtcaacatatca

SEQ ID NO: 474044 - DNA, 19 bp, Mus musculus
  siRNA target sequence for Matr3 (NM_010771.3,1188-1206).
gaatcctgacaatgatact

SEQ ID NO: 474045 - DNA, 19 bp, Mus musculus
  siRNA target sequence for Matr3 (NM_010771.3,1277-1295).
cgcctccttcatttcatct

SEQ ID NO: 474046 - DNA, 19 bp, Mus musculus
  siRNA target sequence for Matr3 (NM_010771.3,1383-1401).
ggaaaccagccgagttgtt

SEQ ID NO: 474047 - DNA, 19 bp, Mus musculus
  siRNA target sequence for Matr3 (NM_010771.3,1389-1407).
cagccgagttgttcacatt

SEQ ID NO: 474048 - DNA, 19 bp, Mus musculus
  siRNA target sequence for Matr3 (NM_010771.3,1394-1412).
gagttgttcacattatgga

SEQ ID NO: 474049 - DNA, 19 bp, Mus musculus
  siRNA target sequence for Matr3 (NM_010771.3,1396-1414).
gttgttcacattatggatt

SEQ ID NO: 474050 - DNA, 19 bp, Mus musculus
  siRNA target sequence for Matr3 (NM_010771.3,1420-1438).
cgaggaaaaaacttgagat

SEQ ID NO: 474051 - DNA, 19 bp, Mus musculus
  siRNA target sequence for Matr3 (NM_010771.3,1434-1452).
gagataccagctgttacaa

SEQ ID NO: 474052 - DNA, 19 bp, Mus musculus
  siRNA target sequence for Matr3 (NM_010771.3,1549-1567).
gctgtggattattatacaa

SEQ ID NO: 474053 - DNA, 19 bp, Mus musculus
  siRNA target sequence for Matr3 (NM_010771.3,1565-1583).
caactacaccagcattagt

SEQ ID NO: 474054 - DNA, 19 bp, Mus musculus
  siRNA target sequence for Matr3 (NM_010771.3,1568-1586).
ctacaccagcattagtgtt

SEQ ID NO: 474055 - DNA, 19 bp, Mus musculus
  siRNA target sequence for Matr3 (NM_010771.3,1606-1624).
catttatcccagaagtata

SEQ ID NO: 474056 - DNA, 19 bp, Mus musculus
  siRNA target sequence for Matr3 (NM_010771.3,1613-1631).
cccagaagtataagagaat

SEQ ID NO: 474057 - DNA, 19 bp, Mus musculus
  siRNA target sequence for Matr3 (NM_010771.3,1690-1708).
gtgatacatctcagcaatt

SEQ ID NO: 474058 - DNA, 19 bp, Mus musculus
  siRNA target sequence for Matr3 (NM_010771.3,1692-1710).
gatacatctcagcaattta

SEQ ID NO: 474059 - DNA, 19 bp, Mus musculus
  siRNA target sequence for Matr3 (NM_010771.3,1701-1719).
cagcaatttacctcattct

SEQ ID NO: 474060 - DNA, 19 bp, Mus musculus
  siRNA target sequence for Matr3 (NM_010771.3,1753-1771).
gagccttatgggaaaataa

SEQ ID NO: 474061 - DNA, 19 bp, Mus musculus
  siRNA target sequence for Matr3 (NM_010771.3,1841-1859).
caatggttgaccactgttt

SEQ ID NO: 474062 - DNA, 19 bp, Mus musculus
  siRNA target sequence for Matr3 (NM_010771.3,1846-1864).
gttgaccactgtttaaaga

SEQ ID NO: 474063 - DNA, 19 bp, Mus musculus
  siRNA target sequence for Matr3 (NM_010771.3,1875-1893).
gtttcaggggagatgtgtt

SEQ ID NO: 474064 - DNA, 19 bp, Mus musculus
  siRNA target sequence for Matr3 (NM_010771.3,1897-1915).
gttgatctgtctgagaaat

SEQ ID NO: 474065 - DNA, 19 bp, Mus musculus
  siRNA target sequence for Matr3 (NM_010771.3,1929-1947).
gctgcggattcctaacaga

SEQ ID NO: 474066 - DNA, 19 bp, Mus musculus
  siRNA target sequence for Matr3 (NM_010771.3,1939-1957).
cctaacagaggcattgact

SEQ ID NO: 474067 - DNA, 19 bp, Mus musculus
  siRNA target sequence for Matr3 (NM_010771.3,1946-1964).
gaggcattgacttactgaa

SEQ ID NO: 474068 - DNA, 19 bp, Mus musculus
  siRNA target sequence for Matr3 (NM_010771.3,1954-1972).
gacttactgaaaaaagata

SEQ ID NO: 474069 - DNA, 19 bp, Mus musculus
  siRNA target sequence for Matr3 (NM_010771.3,1977-1995).
ccggaaaagatcctattct

SEQ ID NO: 474070 - DNA, 19 bp, Mus musculus
  siRNA target sequence for Matr3 (NM_010771.3,1988-2006).
cctattctccagatggaaa

SEQ ID NO: 474071 - DNA, 19 bp, Mus musculus
  siRNA target sequence for Matr3 (NM_010771.3,1989-2007).
ctattctccagatggaaaa

SEQ ID NO: 474072 - DNA, 19 bp, Mus musculus
  siRNA target sequence for Matr3 (NM_010771.3,2008-2026).
gaatctccaagtgataaga

SEQ ID NO: 474073 - DNA, 19 bp, Mus musculus
  siRNA target sequence for Matr3 (NM_010771.3,2140-2158).
cccagcatgcttcttgaat

SEQ ID NO: 474074 - DNA, 19 bp, Mus musculus
  siRNA target sequence for Matr3 (NM_010771.3,2145-2163).
catgcttcttgaatctgaa

SEQ ID NO: 474075 - DNA, 19 bp, Mus musculus
  siRNA target sequence for Matr3 (NM_010771.3,2230-2248).
gagaccgatcttgctaatt

SEQ ID NO: 474076 - DNA, 19 bp, Mus musculus
  siRNA target sequence for Matr3 (NM_010771.3,2242-2260).
gctaatttaggggatgtat

SEQ ID NO: 474077 - DNA, 19 bp, Mus musculus
  siRNA target sequence for Matr3 (NM_010771.3,2355-2373).
gattgaggaacttgatcaa

SEQ ID NO: 474078 - DNA, 19 bp, Mus musculus
  siRNA target sequence for Matr3 (NM_010771.3,2387-2405).
cattggaaaatgggattaa

SEQ ID NO: 474079 - DNA, 19 bp, Mus musculus
  siRNA target sequence for Matr3 (NM_010771.3,2502-2520).
gaataaggaggattataca

SEQ ID NO: 474080 - DNA, 19 bp, Mus musculus
  siRNA target sequence for Matr3 (NM_010771.3,2532-2550).
gtatagaatcggaccatat

SEQ ID NO: 474081 - DNA, 19 bp, Mus musculus
  siRNA target sequence for Matr3 (NM_010771.3,2560-2578).
gttcctgttggtatagact

SEQ ID NO: 474082 - DNA, 19 bp, Mus musculus
  siRNA target sequence for Matr3 (NM_010771.3,2564-2582).
ctgttggtatagactatgt

SEQ ID NO: 474083 - DNA, 19 bp, Mus musculus
  siRNA target sequence for Matr3 (NM_010771.3,2566-2584).
gttggtatagactatgtga

SEQ ID NO: 474084 - DNA, 19 bp, Mus musculus
  siRNA target sequence for Matr3 (NM_010771.3,2610-2628).
gctgtgttcactcttttat

SEQ ID NO: 474085 - DNA, 19 bp, Mus musculus
  siRNA target sequence for Matr3 (NM_010771.3,2661-2679).
cagcagccttcctcattat

SEQ ID NO: 474086 - DNA, 19 bp, Mus musculus
  siRNA target sequence for Mbnl1 (NM_020007.1,504-522).
caccaattcgggacacaaa

SEQ ID NO: 474087 - DNA, 19 bp, Mus musculus
  siRNA target sequence for Mbnl1 (NM_020007.1,506-524).
ccaattcgggacacaaaat

SEQ ID NO: 474088 - DNA, 19 bp, Mus musculus
  siRNA target sequence for Mbnl1 (NM_020007.1,526-544).
gctaacactggaagtatgt

SEQ ID NO: 474089 - DNA, 19 bp, Mus musculus
  siRNA target sequence for Mbnl1 (NM_020007.1,527-545).
ctaacactggaagtatgta

SEQ ID NO: 474090 - DNA, 19 bp, Mus musculus
  siRNA target sequence for Mbnl1 (NM_020007.1,539-557).
gtatgtagagagtttcaaa

SEQ ID NO: 474091 - DNA, 19 bp, Mus musculus
  siRNA target sequence for Mbnl1 (NM_020007.1,572-590).
cgaccagacacggaatgta

SEQ ID NO: 474092 - DNA, 19 bp, Mus musculus
  siRNA target sequence for Mbnl1 (NM_020007.1,580-598).
cacggaatgtaaatttgca

SEQ ID NO: 474093 - DNA, 19 bp, Mus musculus
  siRNA target sequence for Mbnl1 (NM_020007.1,596-614).
gcacatccttcgaaaagct

SEQ ID NO: 474094 - DNA, 19 bp, Mus musculus
  siRNA target sequence for Mbnl1 (NM_020007.1,606-624).
cgaaaagctgccaagttga

SEQ ID NO: 474095 - DNA, 19 bp, Mus musculus
  siRNA target sequence for Mbnl1 (NM_020007.1,607-625).
gaaaagctgccaagttgaa

SEQ ID NO: 474096 - DNA, 19 bp, Mus musculus
  siRNA target sequence for Mbnl1 (NM_020007.1,735-753).
ggcggaataacttgattca

SEQ ID NO: 474097 - DNA, 19 bp, Mus musculus
  siRNA target sequence for Mbnl1 (NM_020007.1,823-841).
gcagcccgtgccaatgttt

SEQ ID NO: 474098 - DNA, 19 bp, Mus musculus
  siRNA target sequence for Mbnl1 (NM_020007.1,826-844).
gcccgtgccaatgttttca

SEQ ID NO: 474099 - DNA, 19 bp, Mus musculus
  siRNA target sequence for Mbnl1 (NM_020007.1,828-846).
ccgtgccaatgttttcagt

SEQ ID NO: 474100 - DNA, 19 bp, Mus musculus
  siRNA target sequence for Mbnl1 (NM_020007.1,829-847).
cgtgccaatgttttcagtt

SEQ ID NO: 474101 - DNA, 19 bp, Mus musculus
  siRNA target sequence for Mbnl1 (NM_020007.1,867-885).
gtgcatcagcagcctttaa

SEQ ID NO: 474102 - DNA, 19 bp, Mus musculus
  siRNA target sequence for Mbnl1 (NM_020007.1,996-1014).
ctgctgcacagaagttaat

SEQ ID NO: 474103 - DNA, 19 bp, Mus musculus
  siRNA target sequence for Mbnl1 (NM_020007.1,1098-1116).
ctgctgacagcacaatgat

SEQ ID NO: 474104 - DNA, 19 bp, Mus musculus
  siRNA target sequence for Mbnl1 (NM_020007.1,1101-1119).
ctgacagcacaatgattga

SEQ ID NO: 474105 - DNA, 19 bp, Mus musculus
  siRNA target sequence for Mbnl1 (NM_020007.1,1103-1121).
gacagcacaatgattgata

SEQ ID NO: 474106 - DNA, 19 bp, Mus musculus
  siRNA target sequence for Mbnl1 (NM_020007.1,1107-1125).
gcacaatgattgataccaa

SEQ ID NO: 474107 - DNA, 19 bp, Mus musculus
  siRNA target sequence for Mbnl1 (NM_020007.1,1108-1126).
cacaatgattgataccaat

SEQ ID NO: 474108 - DNA, 19 bp, Mus musculus
  siRNA target sequence for Mbnl1 (NM_020007.1,1208-1226).
cacctgcaagccaagatca

SEQ ID NO: 474109 - DNA, 19 bp, Mus musculus
  siRNA target sequence for Mbnl1 (NM_020007.1,1327-1345).
gaggcctgctcttgaaaaa

SEQ ID NO: 474110 - DNA, 19 bp, Mus musculus
  siRNA target sequence for Mbnl1 (NM_020007.1,1351-1369).
cggtgccaccgcagtcttt

SEQ ID NO: 474111 - DNA, 19 bp, Mus musculus
  siRNA target sequence for Mbnl1 (NM_020007.1,1439-1457).
ccaccaggctcaatattgt

SEQ ID NO: 474112 - DNA, 19 bp, Mus musculus
  siRNA target sequence for Mbnl1 (NM_020007.1,1459-1477).
catgacacccgctacaagt

SEQ ID NO: 474113 - DNA, 19 bp, Mus musculus
  siRNA target sequence for Mbnl1 (NM_020007.1,1462-1480).
gacacccgctacaagtgtt

SEQ ID NO: 474114 - DNA, 19 bp, Mus musculus
  siRNA target sequence for Mbnl1 (NM_020007.1,1466-1484).
cccgctacaagtgttgata

SEQ ID NO: 474115 - DNA, 19 bp, Mus musculus
  siRNA target sequence for Mbnl1 (NM_020007.1,1476-1494).
gtgttgatacccataatat

SEQ ID NO: 474116 - DNA, 19 bp, Mus musculus
  siRNA target sequence for Mbnl1 (NM_020007.1,1478-1496).
gttgatacccataatatct

SEQ ID NO: 474117 - DNA, 19 bp, Mus musculus
  siRNA target sequence for Mcts1 (NM_026902.1,159-177).
gttgaaaacctcggttatt

SEQ ID NO: 474118 - DNA, 19 bp, Mus musculus
  siRNA target sequence for Mcts1 (NM_026902.1,204-222).
gcaatttccaggtattgaa

SEQ ID NO: 474119 - DNA, 19 bp, Mus musculus
  siRNA target sequence for Mcts1 (NM_026902.1,270-288).
ccgatgccatgaacacata

SEQ ID NO: 474120 - DNA, 19 bp, Mus musculus
  siRNA target sequence for Mcts1 (NM_026902.1,339-357).
gcctttttatccaacttta

SEQ ID NO: 474121 - DNA, 19 bp, Mus musculus
  siRNA target sequence for Mcts1 (NM_026902.1,353-371).
ctttaagattacttcataa

SEQ ID NO: 474122 - DNA, 19 bp, Mus musculus
  siRNA target sequence for Mcts1 (NM_026902.1,388-406).
ccacatcagcaggttgata

SEQ ID NO: 474123 - DNA, 19 bp, Mus musculus
  siRNA target sequence for Mcts1 (NM_026902.1,389-407).
cacatcagcaggttgataa

SEQ ID NO: 474124 - DNA, 19 bp, Mus musculus
  siRNA target sequence for Mcts1 (NM_026902.1,447-465).
gtgtcctggcttaacttct

SEQ ID NO: 474125 - DNA, 19 bp, Mus musculus
  siRNA target sequence for Mcts1 (NM_026902.1,464-482).
ctcccggagctaagcttta

SEQ ID NO: 474126 - DNA, 19 bp, Mus musculus
  siRNA target sequence for Mcts1 (NM_026902.1,523-541).
ggaaaacaacatgctttat

SEQ ID NO: 474127 - DNA, 19 bp, Mus musculus
  siRNA target sequence for Mcts1 (NM_026902.1,592-610).
ggaattggcattgaaaata

SEQ ID NO: 474128 - DNA, 19 bp, Mus musculus
  siRNA target sequence for Mettl3 (NM_019721.1,116-134).
ctatccaggcccataagaa

SEQ ID NO: 474129 - DNA, 19 bp, Mus musculus
  siRNA target sequence for Mettl3 (NM_019721.1,275-293).
gaggtctcctccaagatga

SEQ ID NO: 474130 - DNA, 19 bp, Mus musculus
  siRNA target sequence for Mettl3 (NM_019721.1,298-316).
catcctactcttgtaactt

SEQ ID NO: 474131 - DNA, 19 bp, Mus musculus
  siRNA target sequence for Mettl3 (NM_019721.1,412-430).
cgtgcagaacaggatttga

SEQ ID NO: 474132 - DNA, 19 bp, Mus musculus
  siRNA target sequence for Mettl3 (NM_019721.1,441-459).
cacctttgccagctcttta

SEQ ID NO: 474133 - DNA, 19 bp, Mus musculus
  siRNA target sequence for Mettl3 (NM_019721.1,499-517).
gagccggctaagaagtcaa

SEQ ID NO: 474134 - DNA, 19 bp, Mus musculus
  siRNA target sequence for Mettl3 (NM_019721.1,525-543).
cgctgcctccgatgttgat

SEQ ID NO: 474135 - DNA, 19 bp, Mus musculus
  siRNA target sequence for Mettl3 (NM_019721.1,527-545).
ctgcctccgatgttgatct

SEQ ID NO: 474136 - DNA, 19 bp, Mus musculus
  siRNA target sequence for Mettl3 (NM_019721.1,564-582).
gaaccaacagtcaacgaaa

SEQ ID NO: 474137 - DNA, 19 bp, Mus musculus
  siRNA target sequence for Mettl3 (NM_019721.1,588-606).
gcagagcaagagacgaatt

SEQ ID NO: 474138 - DNA, 19 bp, Mus musculus
  siRNA target sequence for Mettl3 (NM_019721.1,589-607).
cagagcaagagacgaatta

SEQ ID NO: 474139 - DNA, 19 bp, Mus musculus
  siRNA target sequence for Mettl3 (NM_019721.1,593-611).
gcaagagacgaattatcaa

SEQ ID NO: 474140 - DNA, 19 bp, Mus musculus
  siRNA target sequence for Mettl3 (NM_019721.1,594-612).
caagagacgaattatcaat

SEQ ID NO: 474141 - DNA, 19 bp, Mus musculus
  siRNA target sequence for Mettl3 (NM_019721.1,599-617).
gacgaattatcaataagca

SEQ ID NO: 474142 - DNA, 19 bp, Mus musculus
  siRNA target sequence for Mettl3 (NM_019721.1,644-662).
ctttccttaacacatgttt

SEQ ID NO: 474143 - DNA, 19 bp, Mus musculus
  siRNA target sequence for Mettl3 (NM_019721.1,750-768).
ccaggagcttgctcttaca

SEQ ID NO: 474144 - DNA, 19 bp, Mus musculus
  siRNA target sequence for Mettl3 (NM_019721.1,887-905).
caccttgggatattcacat

SEQ ID NO: 474145 - DNA, 19 bp, Mus musculus
  siRNA target sequence for Mettl3 (NM_019721.1,910-928).
ctaccgtatgggacattaa

SEQ ID NO: 474146 - DNA, 19 bp, Mus musculus
  siRNA target sequence for Mettl3 (NM_019721.1,914-932).
cgtatgggacattaacaga

SEQ ID NO: 474147 - DNA, 19 bp, Mus musculus
  siRNA target sequence for Mettl3 (NM_019721.1,915-933).
gtatgggacattaacagat

SEQ ID NO: 474148 - DNA, 19 bp, Mus musculus
  siRNA target sequence for Mettl3 (NM_019721.1,939-957).
gatgcgcaggctcaatata

SEQ ID NO: 474149 - DNA, 19 bp, Mus musculus
  siRNA target sequence for Mettl3 (NM_019721.1,942-960).
gcgcaggctcaatatacca

SEQ ID NO: 474150 - DNA, 19 bp, Mus musculus
  siRNA target sequence for Mettl3 (NM_019721.1,1011-1029).
ggaattgggcagagaatgt

SEQ ID NO: 474151 - DNA, 19 bp, Mus musculus
  siRNA target sequence for Mettl3 (NM_019721.1,1032-1050).
gaacctctggggttatgaa

SEQ ID NO: 474152 - DNA, 19 bp, Mus musculus
  siRNA target sequence for Mettl3 (NM_019721.1,1087-1105).
ctgcagcgcatcattagga

SEQ ID NO: 474153 - DNA, 19 bp, Mus musculus
  siRNA target sequence for Mettl3 (NM_019721.1,1111-1129).
cggacgggtcactggttaa

SEQ ID NO: 474154 - DNA, 19 bp, Mus musculus
  siRNA target sequence for Mettl3 (NM_019721.1,1115-1133).
cgggtcactggttaaacca

SEQ ID NO: 474155 - DNA, 19 bp, Mus musculus
  siRNA target sequence for Mettl3 (NM_019721.1,1194-1212).
ggactgcgatgtgattgta

SEQ ID NO: 474156 - DNA, 19 bp, Mus musculus
  siRNA target sequence for Mettl3 (NM_019721.1,1219-1237).
gttcgttccaccagtcata

SEQ ID NO: 474157 - DNA, 19 bp, Mus musculus
  siRNA target sequence for Mettl3 (NM_019721.1,1234-1252).
cataaaccagatgaaatat

SEQ ID NO: 474158 - DNA, 19 bp, Mus musculus
  siRNA target sequence for Mettl3 (NM_019721.1,1277-1295).
ctggcacccgcaagattga

SEQ ID NO: 474159 - DNA, 19 bp, Mus musculus
  siRNA target sequence for Mettl3 (NM_019721.1,1279-1297).
ggcacccgcaagattgagt

SEQ ID NO: 474160 - DNA, 19 bp, Mus musculus
  siRNA target sequence for Mettl3 (NM_019721.1,1280-1298).
gcacccgcaagattgagtt

SEQ ID NO: 474161 - DNA, 19 bp, Mus musculus
  siRNA target sequence for Mettl3 (NM_019721.1,1281-1299).
cacccgcaagattgagtta

SEQ ID NO: 474162 - DNA, 19 bp, Mus musculus
  siRNA target sequence for Mettl3 (NM_019721.1,1283-1301).
cccgcaagattgagttatt

SEQ ID NO: 474163 - DNA, 19 bp, Mus musculus
  siRNA target sequence for Mettl3 (NM_019721.1,1318-1336).
gtgcagcccaactggatta

SEQ ID NO: 474164 - DNA, 19 bp, Mus musculus
  siRNA target sequence for Mettl3 (NM_019721.1,1388-1406).
ccaggtttaagcaaaggta

SEQ ID NO: 474165 - DNA, 19 bp, Mus musculus
  siRNA target sequence for Mettl3 (NM_019721.1,1389-1407).
caggtttaagcaaaggtat

SEQ ID NO: 474166 - DNA, 19 bp, Mus musculus
  siRNA target sequence for Mettl3 (NM_019721.1,1408-1426).
ccggacggcatcatctcta

SEQ ID NO: 474167 - DNA, 19 bp, Mus musculus
  siRNA target sequence for Mov10l1 (NM_031260.1,23-41).
gacgacttgatctactttt

SEQ ID NO: 474168 - DNA, 19 bp, Mus musculus
  siRNA target sequence for Mov10l1 (NM_031260.1,28-46).
cttgatctacttttccaat

SEQ ID NO: 474169 - DNA, 19 bp, Mus musculus
  siRNA target sequence for Mov10l1 (NM_031260.1,248-266).
gaaggtgctggctatatca

SEQ ID NO: 474170 - DNA, 19 bp, Mus musculus
  siRNA target sequence for Mov10l1 (NM_031260.1,328-346).
ctgggtagaggctgagtat

SEQ ID NO: 474171 - DNA, 19 bp, Mus musculus
  siRNA target sequence for Mov10l1 (NM_031260.1,332-350).
gtagaggctgagtattgga

SEQ ID NO: 474172 - DNA, 19 bp, Mus musculus
  siRNA target sequence for Mov10l1 (NM_031260.1,410-428).
gtggacaaggtttgcattt

SEQ ID NO: 474173 - DNA, 19 bp, Mus musculus
  siRNA target sequence for Mov10l1 (NM_031260.1,413-431).
gacaaggtttgcatttcca

SEQ ID NO: 474174 - DNA, 19 bp, Mus musculus
  siRNA target sequence for Mov10l1 (NM_031260.1,441-459).
ggaggaacggggtgataga

SEQ ID NO: 474175 - DNA, 19 bp, Mus musculus
  siRNA target sequence for Mov10l1 (NM_031260.1,493-511).
gctgccggaagggtacata

SEQ ID NO: 474176 - DNA, 19 bp, Mus musculus
  siRNA target sequence for Mov10l1 (NM_031260.1,513-531).
cgaggagacacgacattgt

SEQ ID NO: 474177 - DNA, 19 bp, Mus musculus
  siRNA target sequence for Mov10l1 (NM_031260.1,634-652).
gccctatggagcactctta

SEQ ID NO: 474178 - DNA, 19 bp, Mus musculus
  siRNA target sequence for Mov10l1 (NM_031260.1,636-654).
cctatggagcactcttact

SEQ ID NO: 474179 - DNA, 19 bp, Mus musculus
  siRNA target sequence for Mov10l1 (NM_031260.1,641-659).
ggagcactcttactgaaaa

SEQ ID NO: 474180 - DNA, 19 bp, Mus musculus
  siRNA target sequence for Mov10l1 (NM_031260.1,644-662).
gcactcttactgaaaaaca

SEQ ID NO: 474181 - DNA, 19 bp, Mus musculus
  siRNA target sequence for Mov10l1 (NM_031260.1,665-683).
ggggacattgaagttacaa

SEQ ID NO: 474182 - DNA, 19 bp, Mus musculus
  siRNA target sequence for Mov10l1 (NM_031260.1,667-685).
ggacattgaagttacaaga

SEQ ID NO: 474183 - DNA, 19 bp, Mus musculus
  siRNA target sequence for Mov10l1 (NM_031260.1,730-748).
cgtgatctggatagagaat

SEQ ID NO: 474184 - DNA, 19 bp, Mus musculus
  siRNA target sequence for Mov10l1 (NM_031260.1,797-815).
gataaagcacaccagttta

SEQ ID NO: 474185 - DNA, 19 bp, Mus musculus
  siRNA target sequence for Mov10l1 (NM_031260.1,947-965).
gcgaacagcacagaaatct

SEQ ID NO: 474186 - DNA, 19 bp, Mus musculus
  siRNA target sequence for Mov10l1 (NM_031260.1,975-993).
gctgcgcttgtaaagaaga

SEQ ID NO: 474187 - DNA, 19 bp, Mus musculus
  siRNA target sequence for Mov10l1 (NM_031260.1,980-998).
gcttgtaaagaagaaagta

SEQ ID NO: 474188 - DNA, 19 bp, Mus musculus
  siRNA target sequence for Mov10l1 (NM_031260.1,1059-1077).
gggagaagactcacattgt

SEQ ID NO: 474189 - DNA, 19 bp, Mus musculus
  siRNA target sequence for Mov10l1 (NM_031260.1,1202-1220).
gtgcgtgagccgttttctt

SEQ ID NO: 474190 - DNA, 19 bp, Mus musculus
  siRNA target sequence for Mov10l1 (NM_031260.1,1229-1247).
cctaaaagctcccaaacat

SEQ ID NO: 474191 - DNA, 19 bp, Mus musculus
  siRNA target sequence for Mov10l1 (NM_031260.1,1230-1248).
ctaaaagctcccaaacatt

SEQ ID NO: 474192 - DNA, 19 bp, Mus musculus
  siRNA target sequence for Mov10l1 (NM_031260.1,1252-1270).
gtctgcaaagactacagtt

SEQ ID NO: 474193 - DNA, 19 bp, Mus musculus
  siRNA target sequence for Mov10l1 (NM_031260.1,1291-1309).
gaactcgaggcgacaactt

SEQ ID NO: 474194 - DNA, 19 bp, Mus musculus
  siRNA target sequence for Mov10l1 (NM_031260.1,1299-1317).
ggcgacaacttccaagttt

SEQ ID NO: 474195 - DNA, 19 bp, Mus musculus
  siRNA target sequence for Mov10l1 (NM_031260.1,1300-1318).
gcgacaacttccaagtttt

SEQ ID NO: 474196 - DNA, 19 bp, Mus musculus
  siRNA target sequence for Mov10l1 (NM_031260.1,1331-1349).
ccaataccagatagactta

SEQ ID NO: 474197 - DNA, 19 bp, Mus musculus
  siRNA target sequence for Mov10l1 (NM_031260.1,1397-1415).
cttgcagagctcttgaaca

SEQ ID NO: 474198 - DNA, 19 bp, Mus musculus
  siRNA target sequence for Mov10l1 (NM_031260.1,1400-1418).
gcagagctcttgaacatgt

SEQ ID NO: 474199 - DNA, 19 bp, Mus musculus
  siRNA target sequence for Mov10l1 (NM_031260.1,1403-1421).
gagctcttgaacatgtcaa

SEQ ID NO: 474200 - DNA, 19 bp, Mus musculus
  siRNA target sequence for Mov10l1 (NM_031260.1,1573-1591).
cctctatgcaggtgacaaa

SEQ ID NO: 474201 - DNA, 19 bp, Mus musculus
  siRNA target sequence for Mov10l1 (NM_031260.1,1580-1598).
gcaggtgacaaactgattt

SEQ ID NO: 474202 - DNA, 19 bp, Mus musculus
  siRNA target sequence for Mov10l1 (NM_031260.1,1581-1599).
caggtgacaaactgatttt

SEQ ID NO: 474203 - DNA, 19 bp, Mus musculus
  siRNA target sequence for Mov10l1 (NM_031260.1,1620-1638).
gacatgtcattgaatatat

SEQ ID NO: 474204 - DNA, 19 bp, Mus musculus
  siRNA target sequence for Mov10l1 (NM_031260.1,1631-1649).
gaatatatcggctatgtca

SEQ ID NO: 474205 - DNA, 19 bp, Mus musculus
  siRNA target sequence for Mov10l1 (NM_031260.1,1641-1659).
gctatgtcatggagattca

SEQ ID NO: 474206 - DNA, 19 bp, Mus musculus
  siRNA target sequence for Mov10l1 (NM_031260.1,1642-1660).
ctatgtcatggagattcat

SEQ ID NO: 474207 - DNA, 19 bp, Mus musculus
  siRNA target sequence for Mov10l1 (NM_031260.1,1648-1666).
catggagattcatgaagaa

SEQ ID NO: 474208 - DNA, 19 bp, Mus musculus
  siRNA target sequence for Mov10l1 (NM_031260.1,1661-1679).
gaagaagatgtaactctta

SEQ ID NO: 474209 - DNA, 19 bp, Mus musculus
  siRNA target sequence for Mov10l1 (NM_031260.1,1667-1685).
gatgtaactcttaaactta

SEQ ID NO: 474210 - DNA, 19 bp, Mus musculus
  siRNA target sequence for Mov10l1 (NM_031260.1,1718-1736).
cctatggatgtggagttta

SEQ ID NO: 474211 - DNA, 19 bp, Mus musculus
  siRNA target sequence for Mov10l1 (NM_031260.1,1724-1742).
gatgtggagtttacataca

SEQ ID NO: 474212 - DNA, 19 bp, Mus musculus
  siRNA target sequence for Mov10l1 (NM_031260.1,1789-1807).
ccatttgggtgtaaaagta

SEQ ID NO: 474213 - DNA, 19 bp, Mus musculus
  siRNA target sequence for Mov10l1 (NM_031260.1,1790-1808).
catttgggtgtaaaagtat

SEQ ID NO: 474214 - DNA, 19 bp, Mus musculus
  siRNA target sequence for Mov10l1 (NM_031260.1,1841-1859).
caggtgacagggaattgga

SEQ ID NO: 474215 - DNA, 19 bp, Mus musculus
  siRNA target sequence for Mov10l1 (NM_031260.1,2112-2130).
cagtgaaggaccaaactaa

SEQ ID NO: 474216 - DNA, 19 bp, Mus musculus
  siRNA target sequence for Mov10l1 (NM_031260.1,2184-2202).
cctccactgcagagactat

SEQ ID NO: 474217 - DNA, 19 bp, Mus musculus
  siRNA target sequence for Mov10l1 (NM_031260.1,2220-2238).
caaaagcacgagataagga

SEQ ID NO: 474218 - DNA, 19 bp, Mus musculus
  siRNA target sequence for Mov10l1 (NM_031260.1,2228-2246).
cgagataaggagttcttca

SEQ ID NO: 474219 - DNA, 19 bp, Mus musculus
  siRNA target sequence for Mov10l1 (NM_031260.1,2229-2247).
gagataaggagttcttcaa

SEQ ID NO: 474220 - DNA, 19 bp, Mus musculus
  siRNA target sequence for Mov10l1 (NM_031260.1,2250-2268).
cagtgctcaatgaaaacca

SEQ ID NO: 474221 - DNA, 19 bp, Mus musculus
  siRNA target sequence for Mov10l1 (NM_031260.1,2346-2364).
gaaagactgtgactataat

SEQ ID NO: 474222 - DNA, 19 bp, Mus musculus
  siRNA target sequence for Mov10l1 (NM_031260.1,2358-2376).
ctataatcgaggctgtttt

SEQ ID NO: 474223 - DNA, 19 bp, Mus musculus
  siRNA target sequence for Mov10l1 (NM_031260.1,2397-2415).
cggacagtcggattttggt

SEQ ID NO: 474224 - DNA, 19 bp, Mus musculus
  siRNA target sequence for Mov10l1 (NM_031260.1,2514-2532).
gcagatttgaagagactat

SEQ ID NO: 474225 - DNA, 19 bp, Mus musculus
  siRNA target sequence for Mov10l1 (NM_031260.1,2515-2533).
cagatttgaagagactatt

SEQ ID NO: 474226 - DNA, 19 bp, Mus musculus
  siRNA target sequence for Mov10l1 (NM_031260.1,2540-2558).
gccatcaaaccgtattgca

SEQ ID NO: 474227 - DNA, 19 bp, Mus musculus
  siRNA target sequence for Mov10l1 (NM_031260.1,2582-2600).
gcctcacgcttcaggataa

SEQ ID NO: 474228 - DNA, 19 bp, Mus musculus
  siRNA target sequence for Mov10l1 (NM_031260.1,2583-2601).
cctcacgcttcaggataat

SEQ ID NO: 474229 - DNA, 19 bp, Mus musculus
  siRNA target sequence for Mov10l1 (NM_031260.1,2584-2602).
ctcacgcttcaggataata

SEQ ID NO: 474230 - DNA, 19 bp, Mus musculus
  siRNA target sequence for Mov10l1 (NM_031260.1,2586-2604).
cacgcttcaggataataat

SEQ ID NO: 474231 - DNA, 19 bp, Mus musculus
  siRNA target sequence for Mov10l1 (NM_031260.1,2588-2606).
cgcttcaggataataatca

SEQ ID NO: 474232 - DNA, 19 bp, Mus musculus
  siRNA target sequence for Mov10l1 (NM_031260.1,2590-2608).
cttcaggataataatcact

SEQ ID NO: 474233 - DNA, 19 bp, Mus musculus
  siRNA target sequence for Mov10l1 (NM_031260.1,2616-2634).
gcagtgcaggactgtttta

SEQ ID NO: 474234 - DNA, 19 bp, Mus musculus
  siRNA target sequence for Mov10l1 (NM_031260.1,2619-2637).
gtgcaggactgttttacca

SEQ ID NO: 474235 - DNA, 19 bp, Mus musculus
  siRNA target sequence for Mov10l1 (NM_031260.1,2621-2639).
gcaggactgttttaccaaa

SEQ ID NO: 474236 - DNA, 19 bp, Mus musculus
  siRNA target sequence for Mov10l1 (NM_031260.1,2622-2640).
caggactgttttaccaaat

SEQ ID NO: 474237 - DNA, 19 bp, Mus musculus
  siRNA target sequence for Mov10l1 (NM_031260.1,2645-2663).
gtgagagttggatacttca

SEQ ID NO: 474238 - DNA, 19 bp, Mus musculus
  siRNA target sequence for Mov10l1 (NM_031260.1,2701-2719).
gccagaatgccttattcct

SEQ ID NO: 474239 - DNA, 19 bp, Mus musculus
  siRNA target sequence for Mov10l1 (NM_031260.1,2777-2795).
ctcggcccagtcatcaagt

SEQ ID NO: 474240 - DNA, 19 bp, Mus musculus
  siRNA target sequence for Mov10l1 (NM_031260.1,2810-2828).
gcctatgggttgaatgtgt

SEQ ID NO: 474241 - DNA, 19 bp, Mus musculus
  siRNA target sequence for Mov10l1 (NM_031260.1,2859-2877).
cgtacctgagagacgaaaa

SEQ ID NO: 474242 - DNA, 19 bp, Mus musculus
  siRNA target sequence for Mov10l1 (NM_031260.1,2885-2903).
ggcgcttgcggtgcatata

SEQ ID NO: 474243 - DNA, 19 bp, Mus musculus
  siRNA target sequence for Mov10l1 (NM_031260.1,2886-2904).
gcgcttgcggtgcatataa

SEQ ID NO: 474244 - DNA, 19 bp, Mus musculus
  siRNA target sequence for Mov10l1 (NM_031260.1,2895-2913).
gtgcatataacccattgtt

SEQ ID NO: 474245 - DNA, 19 bp, Mus musculus
  siRNA target sequence for Mov10l1 (NM_031260.1,3001-3019).
ctgtgctgatcccaaagta

SEQ ID NO: 474246 - DNA, 19 bp, Mus musculus
  siRNA target sequence for Mov10l1 (NM_031260.1,3003-3021).
gtgctgatcccaaagtagt

SEQ ID NO: 474247 - DNA, 19 bp, Mus musculus
  siRNA target sequence for Mov10l1 (NM_031260.1,3146-3164).
caggtcatgcgctactgtt

SEQ ID NO: 474248 - DNA, 19 bp, Mus musculus
  siRNA target sequence for Mov10l1 (NM_031260.1,3196-3214).
gtcttccaaggatataggt

SEQ ID NO: 474249 - DNA, 19 bp, Mus musculus
  siRNA target sequence for Mov10l1 (NM_031260.1,3262-3280).
gcgaaatgtggatttgact

SEQ ID NO: 474250 - DNA, 19 bp, Mus musculus
  siRNA target sequence for Mov10l1 (NM_031260.1,3340-3358).
ctccactgtgcggtcaaat

SEQ ID NO: 474251 - DNA, 19 bp, Mus musculus
  siRNA target sequence for Mov10l1 (NM_031260.1,3342-3360).
ccactgtgcggtcaaatga

SEQ ID NO: 474252 - DNA, 19 bp, Mus musculus
  siRNA target sequence for Mov10l1 (NM_031260.1,3343-3361).
cactgtgcggtcaaatgaa

SEQ ID NO: 474253 - DNA, 19 bp, Mus musculus
  siRNA target sequence for Mov10l1 (NM_031260.1,3345-3363).
ctgtgcggtcaaatgaaga

SEQ ID NO: 474254 - DNA, 19 bp, Mus musculus
  siRNA target sequence for Mov10l1 (NM_031260.1,3352-3370).
gtcaaatgaagatagattt

SEQ ID NO: 474255 - DNA, 19 bp, Mus musculus
  siRNA target sequence for Mov10l1 (NM_031260.1,3354-3372).
caaatgaagatagatttga

SEQ ID NO: 474256 - DNA, 19 bp, Mus musculus
  siRNA target sequence for Mov10l1 (NM_031260.1,3391-3409).
gggtttcttgtccaattca

SEQ ID NO: 474257 - DNA, 19 bp, Mus musculus
  siRNA target sequence for Mov10l1 (NM_031260.1,3392-3410).
ggtttcttgtccaattcaa

SEQ ID NO: 474258 - DNA, 19 bp, Mus musculus
  siRNA target sequence for Mov10l1 (NM_031260.1,3497-3515).
ggagcgctgctagaataca

SEQ ID NO: 474259 - DNA, 19 bp, Mus musculus
  siRNA target sequence for Mov10l1 (NM_031260.1,3503-3521).
ctgctagaatacagtgtta

SEQ ID NO: 474260 - DNA, 19 bp, Mus musculus
  siRNA target sequence for Mrpl1 (NM_053158.1,75-93).
cttcccaggcatctcttta

SEQ ID NO: 474261 - DNA, 19 bp, Mus musculus
  siRNA target sequence for Mrpl1 (NM_053158.1,113-131).
ctcttgcacaacagacatt

SEQ ID NO: 474262 - DNA, 19 bp, Mus musculus
  siRNA target sequence for Mrpl1 (NM_053158.1,115-133).
cttgcacaacagacatttt

SEQ ID NO: 474263 - DNA, 19 bp, Mus musculus
  siRNA target sequence for Mrpl1 (NM_053158.1,118-136).
gcacaacagacattttgct

SEQ ID NO: 474264 - DNA, 19 bp, Mus musculus
  siRNA target sequence for Mrpl1 (NM_053158.1,196-214).
gacatcagatgaaaaacca

SEQ ID NO: 474265 - DNA, 19 bp, Mus musculus
  siRNA target sequence for Mrpl1 (NM_053158.1,266-284).
gaagatgatgtctacttaa

SEQ ID NO: 474266 - DNA, 19 bp, Mus musculus
  siRNA target sequence for Mrpl1 (NM_053158.1,297-315).
cacggcggatctatgaagt

SEQ ID NO: 474267 - DNA, 19 bp, Mus musculus
  siRNA target sequence for Mrpl1 (NM_053158.1,300-318).
ggcggatctatgaagtaga

SEQ ID NO: 474268 - DNA, 19 bp, Mus musculus
  siRNA target sequence for Mrpl1 (NM_053158.1,314-332).
gtagagaaagctattcact

SEQ ID NO: 474269 - DNA, 19 bp, Mus musculus
  siRNA target sequence for Mrpl1 (NM_053158.1,323-341).
gctattcacttacttaaga

SEQ ID NO: 474270 - DNA, 19 bp, Mus musculus
  siRNA target sequence for Mrpl1 (NM_053158.1,324-342).
ctattcacttacttaagaa

SEQ ID NO: 474271 - DNA, 19 bp, Mus musculus
  siRNA target sequence for Mrpl1 (NM_053158.1,331-349).
cttacttaagaagtttcaa

SEQ ID NO: 474272 - DNA, 19 bp, Mus musculus
  siRNA target sequence for Mrpl1 (NM_053158.1,353-371).
ctggactttaccaatccaa

SEQ ID NO: 474273 - DNA, 19 bp, Mus musculus
  siRNA target sequence for Mrpl1 (NM_053158.1,377-395).
ggtgtttatcttgacttaa

SEQ ID NO: 474274 - DNA, 19 bp, Mus musculus
  siRNA target sequence for Mrpl1 (NM_053158.1,442-460).
cagtgttattgctttacca

SEQ ID NO: 474275 - DNA, 19 bp, Mus musculus
  siRNA target sequence for Mrpl1 (NM_053158.1,547-565).
gtttgcaggaggaacagat

SEQ ID NO: 474276 - DNA, 19 bp, Mus musculus
  siRNA target sequence for Mrpl1 (NM_053158.1,555-573).
gaggaacagatctggttaa

SEQ ID NO: 474277 - DNA, 19 bp, Mus musculus
  siRNA target sequence for Mrpl1 (NM_053158.1,674-692).
ccaaaggctactagaaatt

SEQ ID NO: 474278 - DNA, 19 bp, Mus musculus
  siRNA target sequence for Mrpl1 (NM_053158.1,780-798).
gcaccaaaatagcaacatt

SEQ ID NO: 474279 - DNA, 19 bp, Mus musculus
  siRNA target sequence for Mrpl1 (NM_053158.1,817-835).
gatagctgccaatcttcaa

SEQ ID NO: 474280 - DNA, 19 bp, Mus musculus
  siRNA target sequence for Mrpl1 (NM_053158.1,825-843).
ccaatcttcaagcagttat

SEQ ID NO: 474281 - DNA, 19 bp, Mus musculus
  siRNA target sequence for Mrpl1 (NM_053158.1,826-844).
caatcttcaagcagttata

SEQ ID NO: 474282 - DNA, 19 bp, Mus musculus
  siRNA target sequence for Mrpl1 (NM_053158.1,896-914).
gccttccttcgtagttcaa

SEQ ID NO: 474283 - DNA, 19 bp, Mus musculus
  siRNA target sequence for Mrpl1 (NM_053158.1,912-930).
caaccagtgaaggtttact

SEQ ID NO: 474284 - DNA, 19 bp, Mus musculus
  siRNA target sequence for Mrpl1 (NM_053158.1,915-933).
ccagtgaaggtttactact

SEQ ID NO: 474285 - DNA, 19 bp, Mus musculus
  siRNA target sequence for Mrpl1 (NM_053158.1,918-936).
gtgaaggtttactactgaa

SEQ ID NO: 474286 - DNA, 19 bp, Mus musculus
  siRNA target sequence for Mrpl1 (NM_053158.1,934-952).
gaagactgactcattgcta

SEQ ID NO: 474287 - DNA, 19 bp, Mus musculus
  siRNA target sequence for Mrpl1 (NM_053158.1,943-961).
ctcattgctacccaaagaa

SEQ ID NO: 474288 - DNA, 19 bp, Mus musculus
  siRNA target sequence for Mrpl1 (NM_053158.1,953-971).
cccaaagaagctaaaacta

SEQ ID NO: 474289 - DNA, 19 bp, Mus musculus
  siRNA target sequence for Mrpl20 (NM_025570.1,114-132).
gaaacacgctcagcatttt

SEQ ID NO: 474290 - DNA, 19 bp, Mus musculus
  siRNA target sequence for Mrpl20 (NM_025570.1,175-193).
gtgaccagagccttcgtta

SEQ ID NO: 474291 - DNA, 19 bp, Mus musculus
  siRNA target sequence for Mrpl20 (NM_025570.1,180-198).
cagagccttcgttaagtgt

SEQ ID NO: 474292 - DNA, 19 bp, Mus musculus
  siRNA target sequence for Mrpl20 (NM_025570.1,229-247).
ctgaggaccctctggatta

SEQ ID NO: 474293 - DNA, 19 bp, Mus musculus
  siRNA target sequence for Mrpl20 (NM_025570.1,231-249).
gaggaccctctggattaat

SEQ ID NO: 474294 - DNA, 19 bp, Mus musculus
  siRNA target sequence for Mrpl20 (NM_025570.1,234-252).
gaccctctggattaatcga

SEQ ID NO: 474295 - DNA, 19 bp, Mus musculus
  siRNA target sequence for Mrpl20 (NM_025570.1,236-254).
ccctctggattaatcgaat

SEQ ID NO: 474296 - DNA, 19 bp, Mus musculus
  siRNA target sequence for Mrpl20 (NM_025570.1,237-255).
cctctggattaatcgaatt

SEQ ID NO: 474297 - DNA, 19 bp, Mus musculus
  siRNA target sequence for Mrpl20 (NM_025570.1,238-256).
ctctggattaatcgaatta

SEQ ID NO: 474298 - DNA, 19 bp, Mus musculus
  siRNA target sequence for Mrpl20 (NM_025570.1,240-258).
ctggattaatcgaattaca

SEQ ID NO: 474299 - DNA, 19 bp, Mus musculus
  siRNA target sequence for Mrpl20 (NM_025570.1,364-382).
gaaccaaagacgtttaaat

SEQ ID NO: 474300 - DNA, 19 bp, Mus musculus
  siRNA target sequence for Mrpl20 (NM_025570.1,368-386).
caaagacgtttaaatcttt

SEQ ID NO: 474301 - DNA, 19 bp, Mus musculus
  siRNA target sequence for Mrpl20 (NM_025570.1,447-465).
ggagcctgaaggtatcttt

SEQ ID NO: 474302 - DNA, 19 bp, Mus musculus
  siRNA target sequence for Mrpl20 (NM_025570.1,451-469).
cctgaaggtatcttttcca

SEQ ID NO: 474303 - DNA, 19 bp, Mus musculus
  siRNA target sequence for Mrps28 (NM_025434.2,231-249).
ccgactggagtctccaaaa

SEQ ID NO: 474304 - DNA, 19 bp, Mus musculus
  siRNA target sequence for Mrps28 (NM_025434.2,348-366).
ggaggacgatctctacata

SEQ ID NO: 474305 - DNA, 19 bp, Mus musculus
  siRNA target sequence for Mrps28 (NM_025434.2,351-369).
ggacgatctctacatagat

SEQ ID NO: 474306 - DNA, 19 bp, Mus musculus
  siRNA target sequence for Mrps28 (NM_025434.2,352-370).
gacgatctctacatagatt

SEQ ID NO: 474307 - DNA, 19 bp, Mus musculus
  siRNA target sequence for Mrps28 (NM_025434.2,354-372).
cgatctctacatagatttt

SEQ ID NO: 474308 - DNA, 19 bp, Mus musculus
  siRNA target sequence for Mrps28 (NM_025434.2,492-510).
gaccacagatacaactata

SEQ ID NO: 474309 - DNA, 19 bp, Mus musculus
  siRNA target sequence for Mrps28 (NM_025434.2,516-534).
ggctgatgcagttctctta

SEQ ID NO: 474310 - DNA, 19 bp, Mus musculus
  siRNA target sequence for Mrps28 (NM_025434.2,544-562).
gagatcagggactcaaaat

SEQ ID NO: 474311 - DNA, 19 bp, Mus musculus
  siRNA target sequence for Mrps28 (NM_025434.2,546-564).
gatcagggactcaaaatca

SEQ ID NO: 474312 - DNA, 19 bp, Mus musculus
  siRNA target sequence for Np220 (NM_008717.1,373-391).
gccacgagcacctaatcct

SEQ ID NO: 474313 - DNA, 19 bp, Mus musculus
  siRNA target sequence for Np220 (NM_008717.1,463-481).
gagagcccgtggaattcca

SEQ ID NO: 474314 - DNA, 19 bp, Mus musculus
  siRNA target sequence for Np220 (NM_008717.1,492-510).
ctggccacggatcttatca

SEQ ID NO: 474315 - DNA, 19 bp, Mus musculus
  siRNA target sequence for Np220 (NM_008717.1,495-513).
gccacggatcttatcagaa

SEQ ID NO: 474316 - DNA, 19 bp, Mus musculus
  siRNA target sequence for Np220 (NM_008717.1,511-529).
gaacatgggaccacaaaga

SEQ ID NO: 474317 - DNA, 19 bp, Mus musculus
  siRNA target sequence for Np220 (NM_008717.1,519-537).
gaccacaaagaatgaatgt

SEQ ID NO: 474318 - DNA, 19 bp, Mus musculus
  siRNA target sequence for Np220 (NM_008717.1,532-550).
gaatgttcaggtaactcaa

SEQ ID NO: 474319 - DNA, 19 bp, Mus musculus
  siRNA target sequence for Np220 (NM_008717.1,553-571).
ccgaaccgatccaagatta

SEQ ID NO: 474320 - DNA, 19 bp, Mus musculus
  siRNA target sequence for Np220 (NM_008717.1,554-572).
cgaaccgatccaagattaa

SEQ ID NO: 474321 - DNA, 19 bp, Mus musculus
  siRNA target sequence for Np220 (NM_008717.1,559-577).
cgatccaagattaaccaaa

SEQ ID NO: 474322 - DNA, 19 bp, Mus musculus
  siRNA target sequence for Np220 (NM_008717.1,563-581).
ccaagattaaccaaagaaa

SEQ ID NO: 474323 - DNA, 19 bp, Mus musculus
  siRNA target sequence for Np220 (NM_008717.1,567-585).
gattaaccaaagaaaaatt

SEQ ID NO: 474324 - DNA, 19 bp, Mus musculus
  siRNA target sequence for Np220 (NM_008717.1,627-645).
gtagtcggtgggatgatga

SEQ ID NO: 474325 - DNA, 19 bp, Mus musculus
  siRNA target sequence for Np220 (NM_008717.1,636-654).
gggatgatgagtctcatat

SEQ ID NO: 474326 - DNA, 19 bp, Mus musculus
  siRNA target sequence for Np220 (NM_008717.1,637-655).
ggatgatgagtctcatata

SEQ ID NO: 474327 - DNA, 19 bp, Mus musculus
  siRNA target sequence for Np220 (NM_008717.1,638-656).
gatgatgagtctcatataa

SEQ ID NO: 474328 - DNA, 19 bp, Mus musculus
  siRNA target sequence for Np220 (NM_008717.1,657-675).
ctccaccggtagaagtgaa

SEQ ID NO: 474329 - DNA, 19 bp, Mus musculus
  siRNA target sequence for Np220 (NM_008717.1,662-680).
ccggtagaagtgaaacaga

SEQ ID NO: 474330 - DNA, 19 bp, Mus musculus
  siRNA target sequence for Np220 (NM_008717.1,699-717).
cagagcaaagtcctaaagt

SEQ ID NO: 474331 - DNA, 19 bp, Mus musculus
  siRNA target sequence for Np220 (NM_008717.1,716-734).
gtacagagccgctacacaa

SEQ ID NO: 474332 - DNA, 19 bp, Mus musculus
  siRNA target sequence for Np220 (NM_008717.1,743-761).
gcttcaagtattttagcaa

SEQ ID NO: 474333 - DNA, 19 bp, Mus musculus
  siRNA target sequence for Np220 (NM_008717.1,758-776).
gcaagttttggattatcaa

SEQ ID NO: 474334 - DNA, 19 bp, Mus musculus
  siRNA target sequence for Np220 (NM_008717.1,768-786).
gattatcaaatgaagatct

SEQ ID NO: 474335 - DNA, 19 bp, Mus musculus
  siRNA target sequence for Np220 (NM_008717.1,851-869).
gatataagaatgcgaaaaa

SEQ ID NO: 474336 - DNA, 19 bp, Mus musculus
  siRNA target sequence for Np220 (NM_008717.1,877-895).
ccgattacctaatttacct

SEQ ID NO: 474337 - DNA, 19 bp, Mus musculus
  siRNA target sequence for Np220 (NM_008717.1,878-896).
cgattacctaatttacctt

SEQ ID NO: 474338 - DNA, 19 bp, Mus musculus
  siRNA target sequence for Np220 (NM_008717.1,918-936).
cacttagtaatgaaacagt

SEQ ID NO: 474339 - DNA, 19 bp, Mus musculus
  siRNA target sequence for Np220 (NM_008717.1,962-980).
catgcaagcaaatatggtt

SEQ ID NO: 474340 - DNA, 19 bp, Mus musculus
  siRNA target sequence for Np220 (NM_008717.1,969-987).
gcaaatatggttatacaga

SEQ ID NO: 474341 - DNA, 19 bp, Mus musculus
  siRNA target sequence for Np220 (NM_008717.1,992-1010).
ccacttgaagtacgtattt

SEQ ID NO: 474342 - DNA, 19 bp, Mus musculus
  siRNA target sequence for Np220 (NM_008717.1,993-1011).
cacttgaagtacgtattta

SEQ ID NO: 474343 - DNA, 19 bp, Mus musculus
  siRNA target sequence for Np220 (NM_008717.1,1077-1095).
ctgtttcaactccaaatgt

SEQ ID NO: 474344 - DNA, 19 bp, Mus musculus
  siRNA target sequence for Np220 (NM_008717.1,1079-1097).
gtttcaactccaaatgtga

SEQ ID NO: 474345 - DNA, 19 bp, Mus musculus
  siRNA target sequence for Np220 (NM_008717.1,1088-1106).
ccaaatgtgatatgtaatt

SEQ ID NO: 474346 - DNA, 19 bp, Mus musculus
  siRNA target sequence for Np220 (NM_008717.1,1258-1276).
gtctattagccaaacagtt

SEQ ID NO: 474347 - DNA, 19 bp, Mus musculus
  siRNA target sequence for Np220 (NM_008717.1,1298-1316).
ctgaatcctccatctatga

SEQ ID NO: 474348 - DNA, 19 bp, Mus musculus
  siRNA target sequence for Np220 (NM_008717.1,1347-1365).
cagttttacgccaacaaga

SEQ ID NO: 474349 - DNA, 19 bp, Mus musculus
  siRNA target sequence for Np220 (NM_008717.1,1406-1424).
catggtggacctacagaaa

SEQ ID NO: 474350 - DNA, 19 bp, Mus musculus
  siRNA target sequence for Np220 (NM_008717.1,1488-1506).
cttcgtggctaccaaagtt

SEQ ID NO: 474351 - DNA, 19 bp, Mus musculus
  siRNA target sequence for Np220 (NM_008717.1,1514-1532).
gctggtgcccagaaaatga

SEQ ID NO: 474352 - DNA, 19 bp, Mus musculus
  siRNA target sequence for Np220 (NM_008717.1,1546-1564).
cccttctatgatgaatgat

SEQ ID NO: 474353 - DNA, 19 bp, Mus musculus
  siRNA target sequence for Np220 (NM_008717.1,1600-1618).
gtgttctctgtgtaacgta

SEQ ID NO: 474354 - DNA, 19 bp, Mus musculus
  siRNA target sequence for Np220 (NM_008717.1,1607-1625).
ctgtgtaacgtagaatgta

SEQ ID NO: 474355 - DNA, 19 bp, Mus musculus
  siRNA target sequence for Np220 (NM_008717.1,1609-1627).
gtgtaacgtagaatgtagt

SEQ ID NO: 474356 - DNA, 19 bp, Mus musculus
  siRNA target sequence for Np220 (NM_008717.1,1616-1634).
gtagaatgtagtcatttga

SEQ ID NO: 474357 - DNA, 19 bp, Mus musculus
  siRNA target sequence for Np220 (NM_008717.1,1682-1700).
cggcagttaaggcaacaat

SEQ ID NO: 474358 - DNA, 19 bp, Mus musculus
  siRNA target sequence for Np220 (NM_008717.1,1683-1701).
ggcagttaaggcaacaata

SEQ ID NO: 474359 - DNA, 19 bp, Mus musculus
  siRNA target sequence for Np220 (NM_008717.1,1769-1787).
ccaagaagacgttctcatt

SEQ ID NO: 474360 - DNA, 19 bp, Mus musculus
  siRNA target sequence for Np220 (NM_008717.1,1844-1862).
cgaagtccagtccgttata

SEQ ID NO: 474361 - DNA, 19 bp, Mus musculus
  siRNA target sequence for Np220 (NM_008717.1,1848-1866).
gtccagtccgttatatcta

SEQ ID NO: 474362 - DNA, 19 bp, Mus musculus
  siRNA target sequence for Np220 (NM_008717.1,1850-1868).
ccagtccgttatatctata

SEQ ID NO: 474363 - DNA, 19 bp, Mus musculus
  siRNA target sequence for Np220 (NM_008717.1,1875-1893).
ggagtcgaagtccaagaat

SEQ ID NO: 474364 - DNA, 19 bp, Mus musculus
  siRNA target sequence for Np220 (NM_008717.1,1876-1894).
gagtcgaagtccaagaatt

SEQ ID NO: 474365 - DNA, 19 bp, Mus musculus
  siRNA target sequence for Np220 (NM_008717.1,1897-1915).
ccaccgtttcatttctaaa

SEQ ID NO: 474366 - DNA, 19 bp, Mus musculus
  siRNA target sequence for Np220 (NM_008717.1,1900-1918).
ccgtttcatttctaaatat

SEQ ID NO: 474367 - DNA, 19 bp, Mus musculus
  siRNA target sequence for Np220 (NM_008717.1,1901-1919).
cgtttcatttctaaatata

SEQ ID NO: 474368 - DNA, 19 bp, Mus musculus
  siRNA target sequence for Np220 (NM_008717.1,1942-1960).
caggtcccgttctccatat

SEQ ID NO: 474369 - DNA, 19 bp, Mus musculus
  siRNA target sequence for Np220 (NM_008717.1,1967-1985).
cggaatctccttagaagaa

SEQ ID NO: 474370 - DNA, 19 bp, Mus musculus
  siRNA target sequence for Np220 (NM_008717.1,1969-1987).
gaatctccttagaagaagt

SEQ ID NO: 474371 - DNA, 19 bp, Mus musculus
  siRNA target sequence for Np220 (NM_008717.1,2084-2102).
gtgcatgggacagaagtta

SEQ ID NO: 474372 - DNA, 19 bp, Mus musculus
  siRNA target sequence for Np220 (NM_008717.1,2179-2197).
gccatcagcgaaatctcta

SEQ ID NO: 474373 - DNA, 19 bp, Mus musculus
  siRNA target sequence for Np220 (NM_008717.1,2180-2198).
ccatcagcgaaatctctaa

SEQ ID NO: 474374 - DNA, 19 bp, Mus musculus
  siRNA target sequence for Np220 (NM_008717.1,2202-2220).
ctgtaaagagtgattcaca

SEQ ID NO: 474375 - DNA, 19 bp, Mus musculus
  siRNA target sequence for Np220 (NM_008717.1,2326-2344).
gaaggatcagtctttgagt

SEQ ID NO: 474376 - DNA, 19 bp, Mus musculus
  siRNA target sequence for Np220 (NM_008717.1,2346-2364).
ccaactcaattcttcttgt

SEQ ID NO: 474377 - DNA, 19 bp, Mus musculus
  siRNA target sequence for Np220 (NM_008717.1,2347-2365).
caactcaattcttcttgta

SEQ ID NO: 474378 - DNA, 19 bp, Mus musculus
  siRNA target sequence for Np220 (NM_008717.1,2385-2403).
gctttactgaagaagatat

SEQ ID NO: 474379 - DNA, 19 bp, Mus musculus
  siRNA target sequence for Np220 (NM_008717.1,2457-2475).
gtagaaatgaggcttactt

SEQ ID NO: 474380 - DNA, 19 bp, Mus musculus
  siRNA target sequence for Np220 (NM_008717.1,2502-2520).
cttcaatcatgaagtacat

SEQ ID NO: 474381 - DNA, 19 bp, Mus musculus
  siRNA target sequence for Np220 (NM_008717.1,2702-2720).
gccaaatctggacaaataa

SEQ ID NO: 474382 - DNA, 19 bp, Mus musculus
  siRNA target sequence for Np220 (NM_008717.1,2755-2773).
gaaatcagcgggttctgta

SEQ ID NO: 474383 - DNA, 19 bp, Mus musculus
  siRNA target sequence for Np220 (NM_008717.1,2763-2781).
cgggttctgtaaaatctgt

SEQ ID NO: 474384 - DNA, 19 bp, Mus musculus
  siRNA target sequence for Np220 (NM_008717.1,2787-2805).
cggtagctgcgaaaggtaa

SEQ ID NO: 474385 - DNA, 19 bp, Mus musculus
  siRNA target sequence for Np220 (NM_008717.1,2788-2806).
ggtagctgcgaaaggtaaa

SEQ ID NO: 474386 - DNA, 19 bp, Mus musculus
  siRNA target sequence for Np220 (NM_008717.1,2796-2814).
cgaaaggtaaagcttctat

SEQ ID NO: 474387 - DNA, 19 bp, Mus musculus
  siRNA target sequence for Np220 (NM_008717.1,2850-2868).
ctaaaaagtctgggaatat

SEQ ID NO: 474388 - DNA, 19 bp, Mus musculus
  siRNA target sequence for Np220 (NM_008717.1,3013-3031).
ggaatcggaggaaatgagt

SEQ ID NO: 474389 - DNA, 19 bp, Mus musculus
  siRNA target sequence for Np220 (NM_008717.1,3020-3038).
gaggaaatgagtgtagtat

SEQ ID NO: 474390 - DNA, 19 bp, Mus musculus
  siRNA target sequence for Np220 (NM_008717.1,3052-3070).
gcctaacaaaggatattct

SEQ ID NO: 474391 - DNA, 19 bp, Mus musculus
  siRNA target sequence for Np220 (NM_008717.1,3053-3071).
cctaacaaaggatattcta

SEQ ID NO: 474392 - DNA, 19 bp, Mus musculus
  siRNA target sequence for Np220 (NM_008717.1,3088-3106).
cttagcaaaaccatttggt

SEQ ID NO: 474393 - DNA, 19 bp, Mus musculus
  siRNA target sequence for Np220 (NM_008717.1,3248-3266).
cctgagcatgtggacttaa

SEQ ID NO: 474394 - DNA, 19 bp, Mus musculus
  siRNA target sequence for Np220 (NM_008717.1,3249-3267).
ctgagcatgtggacttaaa

SEQ ID NO: 474395 - DNA, 19 bp, Mus musculus
  siRNA target sequence for Np220 (NM_008717.1,3274-3292).
ggaagctctctttacaact

SEQ ID NO: 474396 - DNA, 19 bp, Mus musculus
  siRNA target sequence for Np220 (NM_008717.1,3279-3297).
ctctctttacaactttgat

SEQ ID NO: 474397 - DNA, 19 bp, Mus musculus
  siRNA target sequence for Np220 (NM_008717.1,3283-3301).
ctttacaactttgattcaa

SEQ ID NO: 474398 - DNA, 19 bp, Mus musculus
  siRNA target sequence for Np220 (NM_008717.1,3316-3334).
ggcaaatattgataaaatt

SEQ ID NO: 474399 - DNA, 19 bp, Mus musculus
  siRNA target sequence for Np220 (NM_008717.1,3337-3355).
caaccgatttgtacatctt

SEQ ID NO: 474400 - DNA, 19 bp, Mus musculus
  siRNA target sequence for Np220 (NM_008717.1,3411-3429).
gaaaagtggatcgctatat

SEQ ID NO: 474401 - DNA, 19 bp, Mus musculus
  siRNA target sequence for Np220 (NM_008717.1,3419-3437).
gatcgctatatgttcatga

SEQ ID NO: 474402 - DNA, 19 bp, Mus musculus
  siRNA target sequence for Np220 (NM_008717.1,3422-3440).
cgctatatgttcatgagta

SEQ ID NO: 474403 - DNA, 19 bp, Mus musculus
  siRNA target sequence for Np220 (NM_008717.1,3423-3441).
gctatatgttcatgagtaa

SEQ ID NO: 474404 - DNA, 19 bp, Mus musculus
  siRNA target sequence for Np220 (NM_008717.1,3463-3481).
gttagaaagtcctgaatct

SEQ ID NO: 474405 - DNA, 19 bp, Mus musculus
  siRNA target sequence for Np220 (NM_008717.1,3535-3553).
cgtgttgacctgcacttta

SEQ ID NO: 474406 - DNA, 19 bp, Mus musculus
  siRNA target sequence for Np220 (NM_008717.1,3615-3633).
cttttagccctgacttgaa

SEQ ID NO: 474407 - DNA, 19 bp, Mus musculus
  siRNA target sequence for Np220 (NM_008717.1,3637-3655).
cagtcctgttgatgaaagt

SEQ ID NO: 474408 - DNA, 19 bp, Mus musculus
  siRNA target sequence for Np220 (NM_008717.1,3647-3665).
gatgaaagtgaggtacaaa

SEQ ID NO: 474409 - DNA, 19 bp, Mus musculus
  siRNA target sequence for Np220 (NM_008717.1,3671-3689).
gctgatagttcctctgtta

SEQ ID NO: 474410 - DNA, 19 bp, Mus musculus
  siRNA target sequence for Np220 (NM_008717.1,3672-3690).
ctgatagttcctctgttaa

SEQ ID NO: 474411 - DNA, 19 bp, Mus musculus
  siRNA target sequence for Np220 (NM_008717.1,3741-3759).
cagtgcatcaggaagaact

SEQ ID NO: 474412 - DNA, 19 bp, Mus musculus
  siRNA target sequence for Np220 (NM_008717.1,3793-3811).
gtctgactttgcaattcaa

SEQ ID NO: 474413 - DNA, 19 bp, Mus musculus
  siRNA target sequence for Np220 (NM_008717.1,3804-3822).
caattcaaacactagaact

SEQ ID NO: 474414 - DNA, 19 bp, Mus musculus
  siRNA target sequence for Np220 (NM_008717.1,3875-3893).
ccagccaatattgagttat

SEQ ID NO: 474415 - DNA, 19 bp, Mus musculus
  siRNA target sequence for Np220 (NM_008717.1,3878-3896).
gccaatattgagttattca

SEQ ID NO: 474416 - DNA, 19 bp, Mus musculus
  siRNA target sequence for Np220 (NM_008717.1,3880-3898).
caatattgagttattcagt

SEQ ID NO: 474417 - DNA, 19 bp, Mus musculus
  siRNA target sequence for Np220 (NM_008717.1,3887-3905).
gagttattcagtgaaaata

SEQ ID NO: 474418 - DNA, 19 bp, Mus musculus
  siRNA target sequence for Np220 (NM_008717.1,4033-4051).
gggaattatagaagattct

SEQ ID NO: 474419 - DNA, 19 bp, Mus musculus
  siRNA target sequence for Np220 (NM_008717.1,4117-4135).
ggataaacatgaaactgtt

SEQ ID NO: 474420 - DNA, 19 bp, Mus musculus
  siRNA target sequence for Np220 (NM_008717.1,4118-4136).
gataaacatgaaactgttt

SEQ ID NO: 474421 - DNA, 19 bp, Mus musculus
  siRNA target sequence for Np220 (NM_008717.1,4148-4166).
ccatctgcttgtaatgtga

SEQ ID NO: 474422 - DNA, 19 bp, Mus musculus
  siRNA target sequence for Np220 (NM_008717.1,4173-4191).
caccaggaagttacattga

SEQ ID NO: 474423 - DNA, 19 bp, Mus musculus
  siRNA target sequence for Np220 (NM_008717.1,4179-4197).
gaagttacattgaagatga

SEQ ID NO: 474424 - DNA, 19 bp, Mus musculus
  siRNA target sequence for Np220 (NM_008717.1,4279-4297).
cagaatggatttacaagta

SEQ ID NO: 474425 - DNA, 19 bp, Mus musculus
  siRNA target sequence for Np220 (NM_008717.1,4351-4369).
gaagattatagcagcaata

SEQ ID NO: 474426 - DNA, 19 bp, Mus musculus
  siRNA target sequence for Np220 (NM_008717.1,4378-4396).
gccaattgaaagttctgta

SEQ ID NO: 474427 - DNA, 19 bp, Mus musculus
  siRNA target sequence for Np220 (NM_008717.1,4379-4397).
ccaattgaaagttctgtaa

SEQ ID NO: 474428 - DNA, 19 bp, Mus musculus
  siRNA target sequence for Np220 (NM_008717.1,4380-4398).
caattgaaagttctgtaat

SEQ ID NO: 474429 - DNA, 19 bp, Mus musculus
  siRNA target sequence for Np220 (NM_008717.1,4429-4447).
gaccagtaagcctgatgaa

SEQ ID NO: 474430 - DNA, 19 bp, Mus musculus
  siRNA target sequence for Np220 (NM_008717.1,4438-4456).
gcctgatgaaactggtaaa

SEQ ID NO: 474431 - DNA, 19 bp, Mus musculus
  siRNA target sequence for Np220 (NM_008717.1,4439-4457).
cctgatgaaactggtaaaa

SEQ ID NO: 474432 - DNA, 19 bp, Mus musculus
  siRNA target sequence for Np220 (NM_008717.1,4465-4483).
gctgactgtatcaaatgta

SEQ ID NO: 474433 - DNA, 19 bp, Mus musculus
  siRNA target sequence for Np220 (NM_008717.1,4472-4490).
gtatcaaatgtatatagta

SEQ ID NO: 474434 - DNA, 19 bp, Mus musculus
  siRNA target sequence for Np220 (NM_008717.1,4516-4534).
ggtctcttctcctaaagca

SEQ ID NO: 474435 - DNA, 19 bp, Mus musculus
  siRNA target sequence for Np220 (NM_008717.1,4539-4557).
gtacaccttcaaaaactga

SEQ ID NO: 474436 - DNA, 19 bp, Mus musculus
  siRNA target sequence for Np220 (NM_008717.1,4628-4646).
gaatttggtctgcttaaaa

SEQ ID NO: 474437 - DNA, 19 bp, Mus musculus
  siRNA target sequence for Np220 (NM_008717.1,4634-4652).
ggtctgcttaaaaatacca

SEQ ID NO: 474438 - DNA, 19 bp, Mus musculus
  siRNA target sequence for Np220 (NM_008717.1,4733-4751).
gcccttcagtgcaaggatt

SEQ ID NO: 474439 - DNA, 19 bp, Mus musculus
  siRNA target sequence for Np220 (NM_008717.1,4736-4754).
cttcagtgcaaggattcta

SEQ ID NO: 474440 - DNA, 19 bp, Mus musculus
  siRNA target sequence for Np220 (NM_008717.1,4820-4838).
cgggatgacagcaacaata

SEQ ID NO: 474441 - DNA, 19 bp, Mus musculus
  siRNA target sequence for Np220 (NM_008717.1,4821-4839).
gggatgacagcaacaataa

SEQ ID NO: 474442 - DNA, 19 bp, Mus musculus
  siRNA target sequence for Np220 (NM_008717.1,4883-4901).
gatagaagttccaaatcga

SEQ ID NO: 474443 - DNA, 19 bp, Mus musculus
  siRNA target sequence for Np220 (NM_008717.1,4899-4917).
cgaaagaggaaccattatt

SEQ ID NO: 474444 - DNA, 19 bp, Mus musculus
  siRNA target sequence for Np220 (NM_008717.1,4907-4925).
gaaccattatttacattta

SEQ ID NO: 474445 - DNA, 19 bp, Mus musculus
  siRNA target sequence for Np220 (NM_008717.1,5031-5049).
ctccttcccctgaacttaa

SEQ ID NO: 474446 - DNA, 19 bp, Mus musculus
  siRNA target sequence for Np220 (NM_008717.1,5034-5052).
cttcccctgaacttaactt

SEQ ID NO: 474447 - DNA, 19 bp, Mus musculus
  siRNA target sequence for Np220 (NM_008717.1,5037-5055).
cccctgaacttaacttaaa

SEQ ID NO: 474448 - DNA, 19 bp, Mus musculus
  siRNA target sequence for Np220 (NM_008717.1,5038-5056).
ccctgaacttaacttaaaa

SEQ ID NO: 474449 - DNA, 19 bp, Mus musculus
  siRNA target sequence for Np220 (NM_008717.1,5104-5122).
gtcctttgtaacattagat

SEQ ID NO: 474450 - DNA, 19 bp, Mus musculus
  siRNA target sequence for Np220 (NM_008717.1,5106-5124).
cctttgtaacattagatga

SEQ ID NO: 474451 - DNA, 19 bp, Mus musculus
  siRNA target sequence for Np220 (NM_008717.1,5229-5247).
cccttcttaccttagatga

SEQ ID NO: 474452 - DNA, 19 bp, Mus musculus
  siRNA target sequence for Np220 (NM_008717.1,5230-5248).
ccttcttaccttagatgaa

SEQ ID NO: 474453 - DNA, 19 bp, Mus musculus
  siRNA target sequence for Np220 (NM_008717.1,5234-5252).
cttaccttagatgaactaa

SEQ ID NO: 474454 - DNA, 19 bp, Mus musculus
  siRNA target sequence for Np220 (NM_008717.1,5238-5256).
ccttagatgaactaattga

SEQ ID NO: 474455 - DNA, 19 bp, Mus musculus
  siRNA target sequence for Np220 (NM_008717.1,5249-5267).
ctaattgaccaagatgatt

SEQ ID NO: 474456 - DNA, 19 bp, Mus musculus
  siRNA target sequence for Np220 (NM_008717.1,5283-5301).
gacctaaagatgttactgt

SEQ ID NO: 474457 - DNA, 19 bp, Mus musculus
  siRNA target sequence for Np220 (NM_008717.1,5503-5521).
cagcagtgattttcactta

SEQ ID NO: 474458 - DNA, 19 bp, Mus musculus
  siRNA target sequence for Np220 (NM_008717.1,5524-5542).
gactttggatgaagtaact

SEQ ID NO: 474459 - DNA, 19 bp, Mus musculus
  siRNA target sequence for Np220 (NM_008717.1,5822-5840).
gttgatgacgctgaactaa

SEQ ID NO: 474460 - DNA, 19 bp, Mus musculus
  siRNA target sequence for Np220 (NM_008717.1,5881-5899).
ctcttctgtaggcaaatca

SEQ ID NO: 474461 - DNA, 19 bp, Mus musculus
  siRNA target sequence for Np220 (NM_008717.1,5888-5906).
gtaggcaaatcaatgacat

SEQ ID NO: 474462 - DNA, 19 bp, Mus musculus
  siRNA target sequence for Np220 (NM_008717.1,5936-5954).
gttccgaaggctggatttt

SEQ ID NO: 474463 - DNA, 19 bp, Mus musculus
  siRNA target sequence for Np220 (NM_008717.1,5961-5979).
caatttgctccctcttcta

SEQ ID NO: 474464 - DNA, 19 bp, Mus musculus
  siRNA target sequence for Np220 (NM_008717.1,5974-5992).
cttctactcaggtgaaaaa

SEQ ID NO: 474465 - DNA, 19 bp, Mus musculus
  siRNA target sequence for Np220 (NM_008717.1,6009-6027).
gcaagagcacacgtcataa

SEQ ID NO: 474466 - DNA, 19 bp, Mus musculus
  siRNA target sequence for Np220 (NM_008717.1,6013-6031).
gagcacacgtcataaacaa

SEQ ID NO: 474467 - DNA, 19 bp, Mus musculus
  siRNA target sequence for Np220 (NM_008717.1,6015-6033).
gcacacgtcataaacaaaa

SEQ ID NO: 474468 - DNA, 19 bp, Mus musculus
  siRNA target sequence for Nufip1 (NM_013745.2,261-279).
cgttcgatgctcagattct

SEQ ID NO: 474469 - DNA, 19 bp, Mus musculus
  siRNA target sequence for Nufip1 (NM_013745.2,262-280).
gttcgatgctcagattctt

SEQ ID NO: 474470 - DNA, 19 bp, Mus musculus
  siRNA target sequence for Nufip1 (NM_013745.2,382-400).
ctggggattgtctcctaat

SEQ ID NO: 474471 - DNA, 19 bp, Mus musculus
  siRNA target sequence for Nufip1 (NM_013745.2,385-403).
gggattgtctcctaatggt

SEQ ID NO: 474472 - DNA, 19 bp, Mus musculus
  siRNA target sequence for Nufip1 (NM_013745.2,386-404).
ggattgtctcctaatggtt

SEQ ID NO: 474473 - DNA, 19 bp, Mus musculus
  siRNA target sequence for Nufip1 (NM_013745.2,412-430).
gtaccacacgtcttaccaa

SEQ ID NO: 474474 - DNA, 19 bp, Mus musculus
  siRNA target sequence for Nufip1 (NM_013745.2,427-445).
ccaatctccggttacacat

SEQ ID NO: 474475 - DNA, 19 bp, Mus musculus
  siRNA target sequence for Nufip1 (NM_013745.2,428-446).
caatctccggttacacatt

SEQ ID NO: 474476 - DNA, 19 bp, Mus musculus
  siRNA target sequence for Nufip1 (NM_013745.2,432-450).
ctccggttacacattctta

SEQ ID NO: 474477 - DNA, 19 bp, Mus musculus
  siRNA target sequence for Nufip1 (NM_013745.2,434-452).
ccggttacacattcttatt

SEQ ID NO: 474478 - DNA, 19 bp, Mus musculus
  siRNA target sequence for Nufip1 (NM_013745.2,456-474).
cacgatcacatgatgcaaa

SEQ ID NO: 474479 - DNA, 19 bp, Mus musculus
  siRNA target sequence for Nufip1 (NM_013745.2,458-476).
cgatcacatgatgcaaaat

SEQ ID NO: 474480 - DNA, 19 bp, Mus musculus
  siRNA target sequence for Nufip1 (NM_013745.2,520-538).
ggaaccggttttccatttt

SEQ ID NO: 474481 - DNA, 19 bp, Mus musculus
  siRNA target sequence for Nufip1 (NM_013745.2,521-539).
gaaccggttttccattttt

SEQ ID NO: 474482 - DNA, 19 bp, Mus musculus
  siRNA target sequence for Nufip1 (NM_013745.2,524-542).
ccggttttccattttttct

SEQ ID NO: 474483 - DNA, 19 bp, Mus musculus
  siRNA target sequence for Nufip1 (NM_013745.2,549-567).
cctgtgatcgtggctttaa

SEQ ID NO: 474484 - DNA, 19 bp, Mus musculus
  siRNA target sequence for Nufip1 (NM_013745.2,617-635).
gaagtagattgctccttta

SEQ ID NO: 474485 - DNA, 19 bp, Mus musculus
  siRNA target sequence for Nufip1 (NM_013745.2,630-648).
cctttagtgcacatgagaa

SEQ ID NO: 474486 - DNA, 19 bp, Mus musculus
  siRNA target sequence for Nufip1 (NM_013745.2,677-695).
catgctcctggtatgaaga

SEQ ID NO: 474487 - DNA, 19 bp, Mus musculus
  siRNA target sequence for Nufip1 (NM_013745.2,737-755).
gaagagagacgaaaaaact

SEQ ID NO: 474488 - DNA, 19 bp, Mus musculus
  siRNA target sequence for Nufip1 (NM_013745.2,823-841).
gttgacaaccacacagtat

SEQ ID NO: 474489 - DNA, 19 bp, Mus musculus
  siRNA target sequence for Nufip1 (NM_013745.2,831-849).
ccacacagtatggcaaaat

SEQ ID NO: 474490 - DNA, 19 bp, Mus musculus
  siRNA target sequence for Nufip1 (NM_013745.2,943-961).
cgttggactaggaaatcat

SEQ ID NO: 474491 - DNA, 19 bp, Mus musculus
  siRNA target sequence for Nufip1 (NM_013745.2,1215-1233).
ctcccaagagtccaaaaca

SEQ ID NO: 474492 - DNA, 19 bp, Mus musculus
  siRNA target sequence for Nufip1 (NM_013745.2,1224-1242).
gtccaaaacaaaatgttca

SEQ ID NO: 474493 - DNA, 19 bp, Mus musculus
  siRNA target sequence for Nufip1 (NM_013745.2,1250-1268).
ggtagaacagtctcaagat

SEQ ID NO: 474494 - DNA, 19 bp, Mus musculus
  siRNA target sequence for Nufip1 (NM_013745.2,1326-1344).
gccactgtcacccattatt

SEQ ID NO: 474495 - DNA, 19 bp, Mus musculus
  siRNA target sequence for Nufip1 (NM_013745.2,1353-1371).
gaacacatcacccatatct

SEQ ID NO: 474496 - DNA, 19 bp, Mus musculus
  siRNA target sequence for Nufip1 (NM_013745.2,1381-1399).
gcttctagctccagatatt

SEQ ID NO: 474497 - DNA, 19 bp, Mus musculus
  siRNA target sequence for Nufip1 (NM_013745.2,1391-1409).
ccagatattcgacatgaaa

SEQ ID NO: 474498 - DNA, 19 bp, Mus musculus
  siRNA target sequence for Nufip1 (NM_013745.2,1428-1446).
gtgttcgatatatcatcaa

SEQ ID NO: 474499 - DNA, 19 bp, Mus musculus
  siRNA target sequence for Nufip1 (NM_013745.2,1430-1448).
gttcgatatatcatcaaaa

SEQ ID NO: 474500 - DNA, 19 bp, Mus musculus
  siRNA target sequence for Nufip1 (NM_013745.2,1434-1452).
gatatatcatcaaaaaaga

SEQ ID NO: 474501 - DNA, 19 bp, Mus musculus
  siRNA target sequence for Nufip1 (NM_013745.2,1451-1469).
gacttttttggacttaata

SEQ ID NO: 474502 - DNA, 19 bp, Mus musculus
  siRNA target sequence for Nufip1 (NM_013745.2,1453-1471).
cttttttggacttaatact

SEQ ID NO: 474503 - DNA, 19 bp, Mus musculus
  siRNA target sequence for Nxf1 (NM_016813.2,133-151).
gcggacgaagggaagtcat

SEQ ID NO: 474504 - DNA, 19 bp, Mus musculus
  siRNA target sequence for Nxf1 (NM_016813.2,134-152).
cggacgaagggaagtcata

SEQ ID NO: 474505 - DNA, 19 bp, Mus musculus
  siRNA target sequence for Nxf1 (NM_016813.2,149-167).
catacaacgagcatgatga

SEQ ID NO: 474506 - DNA, 19 bp, Mus musculus
  siRNA target sequence for Nxf1 (NM_016813.2,159-177).
gcatgatgaccgtgttagt

SEQ ID NO: 474507 - DNA, 19 bp, Mus musculus
  siRNA target sequence for Nxf1 (NM_016813.2,338-356).
gatacaatccctataccaa

SEQ ID NO: 474508 - DNA, 19 bp, Mus musculus
  siRNA target sequence for Nxf1 (NM_016813.2,383-401).
ggcatgatcgagatcgaat

SEQ ID NO: 474509 - DNA, 19 bp, Mus musculus
  siRNA target sequence for Nxf1 (NM_016813.2,384-402).
gcatgatcgagatcgaatt

SEQ ID NO: 474510 - DNA, 19 bp, Mus musculus
  siRNA target sequence for Nxf1 (NM_016813.2,388-406).
gatcgagatcgaattcata

SEQ ID NO: 474511 - DNA, 19 bp, Mus musculus
  siRNA target sequence for Nxf1 (NM_016813.2,391-409).
cgagatcgaattcatatta

SEQ ID NO: 474512 - DNA, 19 bp, Mus musculus
  siRNA target sequence for Nxf1 (NM_016813.2,483-501).
gttcaagattacaattcct

SEQ ID NO: 474513 - DNA, 19 bp, Mus musculus
  siRNA target sequence for Nxf1 (NM_016813.2,489-507).
gattacaattccttatggt

SEQ ID NO: 474514 - DNA, 19 bp, Mus musculus
  siRNA target sequence for Nxf1 (NM_016813.2,573-591).
catcgagtttcactatgaa

SEQ ID NO: 474515 - DNA, 19 bp, Mus musculus
  siRNA target sequence for Nxf1 (NM_016813.2,576-594).
cgagtttcactatgaaaat

SEQ ID NO: 474516 - DNA, 19 bp, Mus musculus
  siRNA target sequence for Nxf1 (NM_016813.2,624-642).
cactactgcttctgcatta

SEQ ID NO: 474517 - DNA, 19 bp, Mus musculus
  siRNA target sequence for Nxf1 (NM_016813.2,680-698).
gaaggatatctatcatcat

SEQ ID NO: 474518 - DNA, 19 bp, Mus musculus
  siRNA target sequence for Nxf1 (NM_016813.2,733-751).
gaactgaagcccgaacaaa

SEQ ID NO: 474519 - DNA, 19 bp, Mus musculus
  siRNA target sequence for Nxf1 (NM_016813.2,766-784).
ctgatcatgagcaaacgat

SEQ ID NO: 474520 - DNA, 19 bp, Mus musculus
  siRNA target sequence for Nxf1 (NM_016813.2,768-786).
gatcatgagcaaacgatat

SEQ ID NO: 474521 - DNA, 19 bp, Mus musculus
  siRNA target sequence for Nxf1 (NM_016813.2,845-863).
cccagaacatcgatgttgt

SEQ ID NO: 474522 - DNA, 19 bp, Mus musculus
  siRNA target sequence for Nxf1 (NM_016813.2,846-864).
ccagaacatcgatgttgtt

SEQ ID NO: 474523 - DNA, 19 bp, Mus musculus
  siRNA target sequence for Nxf1 (NM_016813.2,849-867).
gaacatcgatgttgttcta

SEQ ID NO: 474524 - DNA, 19 bp, Mus musculus
  siRNA target sequence for Nxf1 (NM_016813.2,890-908).
ccaccctgcggatcattga

SEQ ID NO: 474525 - DNA, 19 bp, Mus musculus
  siRNA target sequence for Nxf1 (NM_016813.2,891-909).
caccctgcggatcattgaa

SEQ ID NO: 474526 - DNA, 19 bp, Mus musculus
  siRNA target sequence for Nxf1 (NM_016813.2,893-911).
ccctgcggatcattgaaga

SEQ ID NO: 474527 - DNA, 19 bp, Mus musculus
  siRNA target sequence for Nxf1 (NM_016813.2,899-917).
ggatcattgaagagaacat

SEQ ID NO: 474528 - DNA, 19 bp, Mus musculus
  siRNA target sequence for Nxf1 (NM_016813.2,919-937).
cctgagctattgtctttga

SEQ ID NO: 474529 - DNA, 19 bp, Mus musculus
  siRNA target sequence for Nxf1 (NM_016813.2,955-973).
ctatacaagctggatgata

SEQ ID NO: 474530 - DNA, 19 bp, Mus musculus
  siRNA target sequence for Nxf1 (NM_016813.2,966-984).
ggatgatatgtctagcatt

SEQ ID NO: 474531 - DNA, 19 bp, Mus musculus
  siRNA target sequence for Nxf1 (NM_016813.2,1018-1036).
ctctccggaaacgaattga

SEQ ID NO: 474532 - DNA, 19 bp, Mus musculus
  siRNA target sequence for Nxf1 (NM_016813.2,1035-1053).
gaagactgagcgggaatta

SEQ ID NO: 474533 - DNA, 19 bp, Mus musculus
  siRNA target sequence for Nxf1 (NM_016813.2,1040-1058).
ctgagcgggaattagacaa

SEQ ID NO: 474534 - DNA, 19 bp, Mus musculus
  siRNA target sequence for Nxf1 (NM_016813.2,1045-1063).
cgggaattagacaagataa

SEQ ID NO: 474535 - DNA, 19 bp, Mus musculus
  siRNA target sequence for Nxf1 (NM_016813.2,1046-1064).
gggaattagacaagataaa

SEQ ID NO: 474536 - DNA, 19 bp, Mus musculus
  siRNA target sequence for Nxf1 (NM_016813.2,1120-1138).
ggagaccagtccagctata

SEQ ID NO: 474537 - DNA, 19 bp, Mus musculus
  siRNA target sequence for Nxf1 (NM_016813.2,1142-1160).
gcgccattcgcgaacgatt

SEQ ID NO: 474538 - DNA, 19 bp, Mus musculus
  siRNA target sequence for Nxf1 (NM_016813.2,1143-1161).
cgccattcgcgaacgattt

SEQ ID NO: 474539 - DNA, 19 bp, Mus musculus
  siRNA target sequence for Nxf1 (NM_016813.2,1152-1170).
cgaacgatttcccaagtta

SEQ ID NO: 474540 - DNA, 19 bp, Mus musculus
  siRNA target sequence for Nxf1 (NM_016813.2,1153-1171).
gaacgatttcccaagttat

SEQ ID NO: 474541 - DNA, 19 bp, Mus musculus
  siRNA target sequence for Nxf1 (NM_016813.2,1192-1210).
ctaccccctccaatttcct

SEQ ID NO: 474542 - DNA, 19 bp, Mus musculus
  siRNA target sequence for Nxf1 (NM_016813.2,1199-1217).
ctccaatttcctttgatgt

SEQ ID NO: 474543 - DNA, 19 bp, Mus musculus
  siRNA target sequence for Nxf1 (NM_016813.2,1216-1234).
gtcgaagcccctacaatgt

SEQ ID NO: 474544 - DNA, 19 bp, Mus musculus
  siRNA target sequence for Nxf1 (NM_016813.2,1293-1311).
cttcttgcagcagtactat

SEQ ID NO: 474545 - DNA, 19 bp, Mus musculus
  siRNA target sequence for Nxf1 (NM_016813.2,1367-1385).
cctgttgctcgctaagcat

SEQ ID NO: 474546 - DNA, 19 bp, Mus musculus
  siRNA target sequence for Nxf1 (NM_016813.2,1368-1386).
ctgttgctcgctaagcatt

SEQ ID NO: 474547 - DNA, 19 bp, Mus musculus
  siRNA target sequence for Nxf1 (NM_016813.2,1373-1391).
gctcgctaagcattcctta

SEQ ID NO: 474548 - DNA, 19 bp, Mus musculus
  siRNA target sequence for Nxf1 (NM_016813.2,1376-1394).
cgctaagcattccttacaa

SEQ ID NO: 474549 - DNA, 19 bp, Mus musculus
  siRNA target sequence for Nxf1 (NM_016813.2,1473-1491).
ccagcggttccgactctta

SEQ ID NO: 474550 - DNA, 19 bp, Mus musculus
  siRNA target sequence for Nxf1 (NM_016813.2,1474-1492).
cagcggttccgactcttaa

SEQ ID NO: 474551 - DNA, 19 bp, Mus musculus
  siRNA target sequence for Nxf1 (NM_016813.2,1557-1575).
cgccttcgtggtagatata

SEQ ID NO: 474552 - DNA, 19 bp, Mus musculus
  siRNA target sequence for Nxf1 (NM_016813.2,1558-1576).
gccttcgtggtagatataa

SEQ ID NO: 474553 - DNA, 19 bp, Mus musculus
  siRNA target sequence for Nxf1 (NM_016813.2,1560-1578).
cttcgtggtagatataagt

SEQ ID NO: 474554 - DNA, 19 bp, Mus musculus
  siRNA target sequence for Nxf1 (NM_016813.2,1570-1588).
gatataagtgcccaaacaa

SEQ ID NO: 474555 - DNA, 19 bp, Mus musculus
  siRNA target sequence for Nxf1 (NM_016813.2,1580-1598).
cccaaacaagcacattact

SEQ ID NO: 474556 - DNA, 19 bp, Mus musculus
  siRNA target sequence for Nxf1 (NM_016813.2,1636-1654).
gggaagtctcgagattctt

SEQ ID NO: 474557 - DNA, 19 bp, Mus musculus
  siRNA target sequence for Nxf1 (NM_016813.2,1637-1655).
ggaagtctcgagattcttt

SEQ ID NO: 474558 - DNA, 19 bp, Mus musculus
  siRNA target sequence for Nxf1 (NM_016813.2,1641-1659).
gtctcgagattctttacgt

SEQ ID NO: 474559 - DNA, 19 bp, Mus musculus
  siRNA target sequence for Nxf1 (NM_016813.2,1694-1712).
gcaattcagggctatgtat

SEQ ID NO: 474560 - DNA, 19 bp, Mus musculus
  siRNA target sequence for Nxf1 (NM_016813.2,1695-1713).
caattcagggctatgtatt

SEQ ID NO: 474561 - DNA, 19 bp, Mus musculus
  siRNA target sequence for Nxf1 (NM_016813.2,1703-1721).
ggctatgtattgtaaatga

SEQ ID NO: 474562 - DNA, 19 bp, Mus musculus
  siRNA target sequence for Nxf1 (NM_016813.2,1966-1984).
gaagtagcgtttatgaaat

SEQ ID NO: 474563 - DNA, 19 bp, Mus musculus
  siRNA target sequence for Oas1a (NM_145211.1,499-517).
cctgggtcatgttaatact

SEQ ID NO: 474564 - DNA, 19 bp, Mus musculus
  siRNA target sequence for Oas1a (NM_145211.1,500-518).
ctgggtcatgttaatactt

SEQ ID NO: 474565 - DNA, 19 bp, Mus musculus
  siRNA target sequence for Oas1b (NM_011853.1,94-112).
gcctcgaagcttgataagt

SEQ ID NO: 474566 - DNA, 19 bp, Mus musculus
  siRNA target sequence for Oas1b (NM_011853.1,95-113).
cctcgaagcttgataagtt

SEQ ID NO: 474567 - DNA, 19 bp, Mus musculus
  siRNA target sequence for Oas1b (NM_011853.1,98-116).
cgaagcttgataagttcat

SEQ ID NO: 474568 - DNA, 19 bp, Mus musculus
  siRNA target sequence for Oas1b (NM_011853.1,219-237).
ccgaatgagggcctctaaa

SEQ ID NO: 474569 - DNA, 19 bp, Mus musculus
  siRNA target sequence for Oas1b (NM_011853.1,333-351).
ccaacagggagtgttgatt

SEQ ID NO: 474570 - DNA, 19 bp, Mus musculus
  siRNA target sequence for Oas1b (NM_011853.1,341-359).
gagtgttgattaaggaaat

SEQ ID NO: 474571 - DNA, 19 bp, Mus musculus
  siRNA target sequence for Oas1b (NM_011853.1,343-361).
gtgttgattaaggaaatta

SEQ ID NO: 474572 - DNA, 19 bp, Mus musculus
  siRNA target sequence for Oas1b (NM_011853.1,392-410).
gacgttgtggagtgaagtt

SEQ ID NO: 474573 - DNA, 19 bp, Mus musculus
  siRNA target sequence for Oas1b (NM_011853.1,781-799).
gggagtcgagtaactaaat

SEQ ID NO: 474574 - DNA, 19 bp, Mus musculus
  siRNA target sequence for Oas1b (NM_011853.1,782-800).
ggagtcgagtaactaaatt

SEQ ID NO: 474575 - DNA, 19 bp, Mus musculus
  siRNA target sequence for Oas1d (NM_133893.1,24-42).
gcgagggaactcttcagaa

SEQ ID NO: 474576 - DNA, 19 bp, Mus musculus
  siRNA target sequence for Oas1d (NM_133893.1,302-320).
cggacaggtagtgttcatt

SEQ ID NO: 474577 - DNA, 19 bp, Mus musculus
  siRNA target sequence for Oas1d (NM_133893.1,357-375).
gagaaactatgtaaactca

SEQ ID NO: 474578 - DNA, 19 bp, Mus musculus
  siRNA target sequence for Oas1d (NM_133893.1,444-462).
cgccagcatgagttggaat

SEQ ID NO: 474579 - DNA, 19 bp, Mus musculus
  siRNA target sequence for Oas1d (NM_133893.1,445-463).
gccagcatgagttggaatt

SEQ ID NO: 474580 - DNA, 19 bp, Mus musculus
  siRNA target sequence for Oas1d (NM_133893.1,519-537).
gactccagtaactacaaca

SEQ ID NO: 474581 - DNA, 19 bp, Mus musculus
  siRNA target sequence for Oas1d (NM_133893.1,800-818).
gtgcttccgcactgtctta

SEQ ID NO: 474582 - DNA, 19 bp, Mus musculus
  siRNA target sequence for Oas1d (NM_133893.1,806-824).
ccgcactgtcttagaactt

SEQ ID NO: 474583 - DNA, 19 bp, Mus musculus
  siRNA target sequence for Oas1d (NM_133893.1,808-826).
gcactgtcttagaacttgt

SEQ ID NO: 474584 - DNA, 19 bp, Mus musculus
  siRNA target sequence for Oas1d (NM_133893.1,859-877).
catggtgttatgactttca

SEQ ID NO: 474585 - DNA, 19 bp, Mus musculus
  siRNA target sequence for Oas1d (NM_133893.1,1004-1022).
ggctcagatctggatagat

SEQ ID NO: 474586 - DNA, 19 bp, Mus musculus
  siRNA target sequence for Oas1d (NM_133893.1,1020-1038).
gattcgactttctttacga

SEQ ID NO: 474587 - DNA, 19 bp, Mus musculus
  siRNA target sequence for Oas1g (NM_011852.2,505-523).
ctgggtcatggtagtatca

SEQ ID NO: 474588 - DNA, 19 bp, Mus musculus
  siRNA target sequence for Oas1g (NM_011852.2,507-525).
gggtcatggtagtatcaat

SEQ ID NO: 474589 - DNA, 19 bp, Mus musculus
  siRNA target sequence for Oas1g (NM_011852.2,508-526).
ggtcatggtagtatcaata

SEQ ID NO: 474590 - DNA, 19 bp, Mus musculus
  siRNA target sequence for Oas1g (NM_011852.2,509-527).
gtcatggtagtatcaataa

SEQ ID NO: 474591 - DNA, 19 bp, Mus musculus
  siRNA target sequence for Oas1h (NM_145228.1,78-96).
ccggcttggaggttggata

SEQ ID NO: 474592 - DNA, 19 bp, Mus musculus
  siRNA target sequence for Oas1h (NM_145228.1,81-99).
gcttggaggttggataagt

SEQ ID NO: 474593 - DNA, 19 bp, Mus musculus
  siRNA target sequence for Oas1h (NM_145228.1,120-138).
ggtgacatcaccttcctta

SEQ ID NO: 474594 - DNA, 19 bp, Mus musculus
  siRNA target sequence for Oas1h (NM_145228.1,237-255).
ggtggttcctacaatcgat

SEQ ID NO: 474595 - DNA, 19 bp, Mus musculus
  siRNA target sequence for Oas1h (NM_145228.1,238-256).
gtggttcctacaatcgata

SEQ ID NO: 474596 - DNA, 19 bp, Mus musculus
  siRNA target sequence for Oas1h (NM_145228.1,274-292).
ggtcagaggtcgacctatt

SEQ ID NO: 474597 - DNA, 19 bp, Mus musculus
  siRNA target sequence for Oas1h (NM_145228.1,277-295).
cagaggtcgacctattggt

SEQ ID NO: 474598 - DNA, 19 bp, Mus musculus
  siRNA target sequence for Oas1h (NM_145228.1,279-297).
gaggtcgacctattggtat

SEQ ID NO: 474599 - DNA, 19 bp, Mus musculus
  siRNA target sequence for Oas1h (NM_145228.1,282-300).
gtcgacctattggtattct

SEQ ID NO: 474600 - DNA, 19 bp, Mus musculus
  siRNA target sequence for Oas1h (NM_145228.1,380-398).
gttccagcaagaaaaacga

SEQ ID NO: 474601 - DNA, 19 bp, Mus musculus
  siRNA target sequence for Oas1h (NM_145228.1,429-447).
gaccagcccaactttaggt

SEQ ID NO: 474602 - DNA, 19 bp, Mus musculus
  siRNA target sequence for Oas1h (NM_145228.1,549-567).
cataactgtgaaatctaca

SEQ ID NO: 474603 - DNA, 19 bp, Mus musculus
  siRNA target sequence for Oas1h (NM_145228.1,558-576).
gaaatctacaacaaagtat

SEQ ID NO: 474604 - DNA, 19 bp, Mus musculus
  siRNA target sequence for Oas1h (NM_145228.1,670-688).
gtccatgcgagctgaagaa

SEQ ID NO: 474605 - DNA, 19 bp, Mus musculus
  siRNA target sequence for Oas1h (NM_145228.1,801-819).
cttccagacaaacatgaaa

SEQ ID NO: 474606 - DNA, 19 bp, Mus musculus
  siRNA target sequence for Oas1h (NM_145228.1,846-864).
gtcttagaactgatcacta

SEQ ID NO: 474607 - DNA, 19 bp, Mus musculus
  siRNA target sequence for Oas1h (NM_145228.1,855-873).
ctgatcactaagtacctat

SEQ ID NO: 474608 - DNA, 19 bp, Mus musculus
  siRNA target sequence for Oas1h (NM_145228.1,860-878).
cactaagtacctatgtctt

SEQ ID NO: 474609 - DNA, 19 bp, Mus musculus
  siRNA target sequence for Oas1h (NM_145228.1,870-888).
ctatgtcttcgaatctact

SEQ ID NO: 474610 - DNA, 19 bp, Mus musculus
  siRNA target sequence for Oas1h (NM_145228.1,1103-1121).
ggatgtgccgccagacaaa

SEQ ID NO: 474611 - DNA, 19 bp, Mus musculus
  siRNA target sequence for Oas1h (NM_145228.1,1104-1122).
gatgtgccgccagacaaaa

SEQ ID NO: 474612 - DNA, 19 bp, Mus musculus
  siRNA target sequence for Oas1h (NM_145228.1,1112-1130).
gccagacaaaaaaggattt

SEQ ID NO: 474613 - DNA, 19 bp, Mus musculus
  siRNA target sequence for Oas1h (NM_145228.1,1114-1132).
cagacaaaaaaggatttgt

SEQ ID NO: 474614 - DNA, 19 bp, Mus musculus
  siRNA target sequence for Oas2 (NM_145227.1,54-72).
gtcatctggctattcatct

SEQ ID NO: 474615 - DNA, 19 bp, Mus musculus
  siRNA target sequence for Oas2 (NM_145227.1,110-128).
ggccagtgcacaagttaga

SEQ ID NO: 474616 - DNA, 19 bp, Mus musculus
  siRNA target sequence for Oas2 (NM_145227.1,148-166).
ctcacacccaacgaaaact

SEQ ID NO: 474617 - DNA, 19 bp, Mus musculus
  siRNA target sequence for Oas2 (NM_145227.1,150-168).
cacacccaacgaaaactgt

SEQ ID NO: 474618 - DNA, 19 bp, Mus musculus
  siRNA target sequence for Oas2 (NM_145227.1,215-233).
ggtatatccaggaaaacct

SEQ ID NO: 474619 - DNA, 19 bp, Mus musculus
  siRNA target sequence for Oas2 (NM_145227.1,223-241).
caggaaaacctcaaaccta

SEQ ID NO: 474620 - DNA, 19 bp, Mus musculus
  siRNA target sequence for Oas2 (NM_145227.1,232-250).
ctcaaacctaacagagaat

SEQ ID NO: 474621 - DNA, 19 bp, Mus musculus
  siRNA target sequence for Oas2 (NM_145227.1,417-435).
ggatcagataaaataccaa

SEQ ID NO: 474622 - DNA, 19 bp, Mus musculus
  siRNA target sequence for Oas2 (NM_145227.1,440-458).
cataccttgacgtcattga

SEQ ID NO: 474623 - DNA, 19 bp, Mus musculus
  siRNA target sequence for Oas2 (NM_145227.1,486-504).
gtcagtaaagcatgaacat

SEQ ID NO: 474624 - DNA, 19 bp, Mus musculus
  siRNA target sequence for Oas2 (NM_145227.1,604-622).
gtctatgtggatctcaaaa

SEQ ID NO: 474625 - DNA, 19 bp, Mus musculus
  siRNA target sequence for Oas2 (NM_145227.1,610-628).
gtggatctcaaaaaatcca

SEQ ID NO: 474626 - DNA, 19 bp, Mus musculus
  siRNA target sequence for Oas2 (NM_145227.1,684-702).
gcagcggtttttcaagaaa

SEQ ID NO: 474627 - DNA, 19 bp, Mus musculus
  siRNA target sequence for Oas2 (NM_145227.1,685-703).
cagcggtttttcaagaaat

SEQ ID NO: 474628 - DNA, 19 bp, Mus musculus
  siRNA target sequence for Oas2 (NM_145227.1,687-705).
gcggtttttcaagaaatat

SEQ ID NO: 474629 - DNA, 19 bp, Mus musculus
  siRNA target sequence for Oas2 (NM_145227.1,706-724).
ccccgaagactgaaggatt

SEQ ID NO: 474630 - DNA, 19 bp, Mus musculus
  siRNA target sequence for Oas2 (NM_145227.1,707-725).
cccgaagactgaaggattt

SEQ ID NO: 474631 - DNA, 19 bp, Mus musculus
  siRNA target sequence for Oas2 (NM_145227.1,709-727).
cgaagactgaaggatttga

SEQ ID NO: 474632 - DNA, 19 bp, Mus musculus
  siRNA target sequence for Oas2 (NM_145227.1,878-896).
ggaccgtgctgcgacttat

SEQ ID NO: 474633 - DNA, 19 bp, Mus musculus
  siRNA target sequence for Oas2 (NM_145227.1,1012-1030).
ccaactgacccaaccaata

SEQ ID NO: 474634 - DNA, 19 bp, Mus musculus
  siRNA target sequence for Oas2 (NM_145227.1,1016-1034).
ctgacccaaccaataatgt

SEQ ID NO: 474635 - DNA, 19 bp, Mus musculus
  siRNA target sequence for Oas2 (NM_145227.1,1121-1139).
caccatattgggatgttct

SEQ ID NO: 474636 - DNA, 19 bp, Mus musculus
  siRNA target sequence for Oas2 (NM_145227.1,1160-1178).
ctccaagccacttactgaa

SEQ ID NO: 474637 - DNA, 19 bp, Mus musculus
  siRNA target sequence for Oas2 (NM_145227.1,1168-1186).
cacttactgaacaagttca

SEQ ID NO: 474638 - DNA, 19 bp, Mus musculus
  siRNA target sequence for Oas2 (NM_145227.1,1390-1408).
gagagttacgactctctaa

SEQ ID NO: 474639 - DNA, 19 bp, Mus musculus
  siRNA target sequence for Oas2 (NM_145227.1,1392-1410).
gagttacgactctctaaaa

SEQ ID NO: 474640 - DNA, 19 bp, Mus musculus
  siRNA target sequence for Oas2 (NM_145227.1,1478-1496).
gggaggtgacgtttgagat

SEQ ID NO: 474641 - DNA, 19 bp, Mus musculus
  siRNA target sequence for Oas2 (NM_145227.1,1522-1540).
ctgagttttaccttgaaat

SEQ ID NO: 474642 - DNA, 19 bp, Mus musculus
  siRNA target sequence for Oas2 (NM_145227.1,1634-1652).
cctacaaggatctcattga

SEQ ID NO: 474643 - DNA, 19 bp, Mus musculus
  siRNA target sequence for Oas2 (NM_145227.1,1671-1689).
catcaaagaaggagagttt

SEQ ID NO: 474644 - DNA, 19 bp, Mus musculus
  siRNA target sequence for Oas2 (NM_145227.1,1751-1769).
gtctactccgcctgatcaa

SEQ ID NO: 474645 - DNA, 19 bp, Mus musculus
  siRNA target sequence for Oas2 (NM_145227.1,1770-1788).
gcactggtacaaacagtat

SEQ ID NO: 474646 - DNA, 19 bp, Mus musculus
  siRNA target sequence for Oas2 (NM_145227.1,1773-1791).
ctggtacaaacagtatgaa

SEQ ID NO: 474647 - DNA, 19 bp, Mus musculus
  siRNA target sequence for Oas2 (NM_145227.1,1911-1929).
cgtcctggacctggttata

SEQ ID NO: 474648 - DNA, 19 bp, Mus musculus
  siRNA target sequence for Oas2 (NM_145227.1,1912-1930).
gtcctggacctggttataa

SEQ ID NO: 474649 - DNA, 19 bp, Mus musculus
  siRNA target sequence for Oas2 (NM_145227.1,1947-1965).
catcttctggacagtcaat

SEQ ID NO: 474650 - DNA, 19 bp, Mus musculus
  siRNA target sequence for Oas2 (NM_145227.1,2079-2097).
ctggtgctggcatcttcta

SEQ ID NO: 474651 - DNA, 19 bp, Mus musculus
  siRNA target sequence for Oas2 (NM_145227.1,2132-2150).
gtttccaagtggagcaaaa

SEQ ID NO: 474652 - DNA, 19 bp, Mus musculus
  siRNA target sequence for Oas2 (NM_145227.1,2175-2193).
gccagtacctagagatcta

SEQ ID NO: 474653 - DNA, 19 bp, Mus musculus
  siRNA target sequence for Oas2 (NM_145227.1,2176-2194).
ccagtacctagagatctaa

SEQ ID NO: 474654 - DNA, 19 bp, Mus musculus
  siRNA target sequence for Oas2 (NM_145227.1,2177-2195).
cagtacctagagatctaaa

SEQ ID NO: 474655 - DNA, 19 bp, Mus musculus
  siRNA target sequence for Oas2 (NM_145227.1,2179-2197).
gtacctagagatctaaaga

SEQ ID NO: 474656 - DNA, 19 bp, Mus musculus
  siRNA target sequence for Oas2 (NM_145227.1,2240-2258).
ggcaggaccagggcttttt

SEQ ID NO: 474657 - DNA, 19 bp, Mus musculus
  siRNA target sequence for Oas2 (NM_145227.1,2245-2263).
gaccagggctttttgtcat

SEQ ID NO: 474658 - DNA, 19 bp, Mus musculus
  siRNA target sequence for Oas3 (NM_145226.1,55-73).
cagccggagctctggataa

SEQ ID NO: 474659 - DNA, 19 bp, Mus musculus
  siRNA target sequence for Oas3 (NM_145226.1,58-76).
ccggagctctggataagct

SEQ ID NO: 474660 - DNA, 19 bp, Mus musculus
  siRNA target sequence for Oas3 (NM_145226.1,129-147).
gctctggggtcgctaaaca

SEQ ID NO: 474661 - DNA, 19 bp, Mus musculus
  siRNA target sequence for Oas3 (NM_145226.1,132-150).
ctggggtcgctaaacatca

SEQ ID NO: 474662 - DNA, 19 bp, Mus musculus
  siRNA target sequence for Oas3 (NM_145226.1,184-202).
gaccaagagtgataaggat

SEQ ID NO: 474663 - DNA, 19 bp, Mus musculus
  siRNA target sequence for Oas3 (NM_145226.1,613-631).
ctcgcccagccaagcttaa

SEQ ID NO: 474664 - DNA, 19 bp, Mus musculus
  siRNA target sequence for Oas3 (NM_145226.1,622-640).
ccaagcttaagaacttaat

SEQ ID NO: 474665 - DNA, 19 bp, Mus musculus
  siRNA target sequence for Oas3 (NM_145226.1,712-730).
ccctagagctgcttaccat

SEQ ID NO: 474666 - DNA, 19 bp, Mus musculus
  siRNA target sequence for Oas3 (NM_145226.1,1088-1106).
gggccacccaatctatcaa

SEQ ID NO: 474667 - DNA, 19 bp, Mus musculus
  siRNA target sequence for Oas3 (NM_145226.1,1232-1250).
caacccaagtgccaataaa

SEQ ID NO: 474668 - DNA, 19 bp, Mus musculus
  siRNA target sequence for Oas3 (NM_145226.1,1253-1271).
ccgcaagatccgcaagaaa

SEQ ID NO: 474669 - DNA, 19 bp, Mus musculus
  siRNA target sequence for Oas3 (NM_145226.1,1293-1311).
caggaagcagcattggata

SEQ ID NO: 474670 - DNA, 19 bp, Mus musculus
  siRNA target sequence for Oas3 (NM_145226.1,1296-1314).
gaagcagcattggatagta

SEQ ID NO: 474671 - DNA, 19 bp, Mus musculus
  siRNA target sequence for Oas3 (NM_145226.1,1299-1317).
gcagcattggatagtatct

SEQ ID NO: 474672 - DNA, 19 bp, Mus musculus
  siRNA target sequence for Oas3 (NM_145226.1,1307-1325).
ggatagtatctcaagtcat

SEQ ID NO: 474673 - DNA, 19 bp, Mus musculus
  siRNA target sequence for Oas3 (NM_145226.1,1500-1518).
gccatcgacgccatcttgt

SEQ ID NO: 474674 - DNA, 19 bp, Mus musculus
  siRNA target sequence for Oas3 (NM_145226.1,1524-1542).
ctccgggagaagagtgtat

SEQ ID NO: 474675 - DNA, 19 bp, Mus musculus
  siRNA target sequence for Oas3 (NM_145226.1,1527-1545).
cgggagaagagtgtataca

SEQ ID NO: 474676 - DNA, 19 bp, Mus musculus
  siRNA target sequence for Oas3 (NM_145226.1,1528-1546).
gggagaagagtgtatacaa

SEQ ID NO: 474677 - DNA, 19 bp, Mus musculus
  siRNA target sequence for Oas3 (NM_145226.1,1603-1621).
gctgcgatgtggaacttgt

SEQ ID NO: 474678 - DNA, 19 bp, Mus musculus
  siRNA target sequence for Oas3 (NM_145226.1,1606-1624).
gcgatgtggaacttgtcat

SEQ ID NO: 474679 - DNA, 19 bp, Mus musculus
  siRNA target sequence for Oas3 (NM_145226.1,1731-1749).
ggactgagcctccagttta

SEQ ID NO: 474680 - DNA, 19 bp, Mus musculus
  siRNA target sequence for Oas3 (NM_145226.1,1732-1750).
gactgagcctccagtttat

SEQ ID NO: 474681 - DNA, 19 bp, Mus musculus
  siRNA target sequence for Oas3 (NM_145226.1,1736-1754).
gagcctccagtttattgaa

SEQ ID NO: 474682 - DNA, 19 bp, Mus musculus
  siRNA target sequence for Oas3 (NM_145226.1,1943-1961).
gcttcgaaggaacttcata

SEQ ID NO: 474683 - DNA, 19 bp, Mus musculus
  siRNA target sequence for Oas3 (NM_145226.1,1944-1962).
cttcgaaggaacttcataa

SEQ ID NO: 474684 - DNA, 19 bp, Mus musculus
  siRNA target sequence for Oas3 (NM_145226.1,2178-2196).
cagcaccagtcgctttgta

SEQ ID NO: 474685 - DNA, 19 bp, Mus musculus
  siRNA target sequence for Oas3 (NM_145226.1,2181-2199).
caccagtcgctttgtatct

SEQ ID NO: 474686 - DNA, 19 bp, Mus musculus
  siRNA target sequence for Oas3 (NM_145226.1,2233-2251).
ccatcagagcacatcttct

SEQ ID NO: 474687 - DNA, 19 bp, Mus musculus
  siRNA target sequence for Oas3 (NM_145226.1,2321-2339).
cgactggaagctattagct

SEQ ID NO: 474688 - DNA, 19 bp, Mus musculus
  siRNA target sequence for Oas3 (NM_145226.1,2514-2532).
gccgtggacaccatatgtt

SEQ ID NO: 474689 - DNA, 19 bp, Mus musculus
  siRNA target sequence for Oas3 (NM_145226.1,2689-2707).
gccatcgggcagagatcat

SEQ ID NO: 474690 - DNA, 19 bp, Mus musculus
  siRNA target sequence for Oas3 (NM_145226.1,2750-2768).
cagcttcgatgtcaagttt

SEQ ID NO: 474691 - DNA, 19 bp, Mus musculus
  siRNA target sequence for Oas3 (NM_145226.1,2979-2997).
cagagggacttcattacct

SEQ ID NO: 474692 - DNA, 19 bp, Mus musculus
  siRNA target sequence for Oas3 (NM_145226.1,3043-3061).
ggtaccaacagtgtaacaa

SEQ ID NO: 474693 - DNA, 19 bp, Mus musculus
  siRNA target sequence for Oas3 (NM_145226.1,3100-3118).
ggctggagctcctaactgt

SEQ ID NO: 474694 - DNA, 19 bp, Mus musculus
  siRNA target sequence for Oas3 (NM_145226.1,3141-3159).
cagaatccccagttcaaca

SEQ ID NO: 474695 - DNA, 19 bp, Mus musculus
  siRNA target sequence for Oas3 (NM_145226.1,3178-3196).
ctgttctggagctgattgt

SEQ ID NO: 474696 - DNA, 19 bp, Mus musculus
  siRNA target sequence for Oas3 (NM_145226.1,3204-3222).
cggcagctctgcgtctatt

SEQ ID NO: 474697 - DNA, 19 bp, Mus musculus
  siRNA target sequence for Oas3 (NM_145226.1,3207-3225).
cagctctgcgtctattgga

SEQ ID NO: 474698 - DNA, 19 bp, Mus musculus
  siRNA target sequence for Oas3 (NM_145226.1,3216-3234).
gtctattggaccatcaact

SEQ ID NO: 474699 - DNA, 19 bp, Mus musculus
  siRNA target sequence for Oasl1 (NM_145209.2,406-424).
gtcctgagactgatacaga

SEQ ID NO: 474700 - DNA, 19 bp, Mus musculus
  siRNA target sequence for Oasl1 (NM_145209.2,408-426).
cctgagactgatacagaaa

SEQ ID NO: 474701 - DNA, 19 bp, Mus musculus
  siRNA target sequence for Oasl1 (NM_145209.2,596-614).
ccgaggtctacgcaaatct

SEQ ID NO: 474702 - DNA, 19 bp, Mus musculus
  siRNA target sequence for Oasl1 (NM_145209.2,598-616).
gaggtctacgcaaatctga

SEQ ID NO: 474703 - DNA, 19 bp, Mus musculus
  siRNA target sequence for Oasl1 (NM_145209.2,630-648).
gtacccaggaaatttctct

SEQ ID NO: 474704 - DNA, 19 bp, Mus musculus
  siRNA target sequence for Oasl1 (NM_145209.2,659-677).
gcgagctgcagcgaaactt

SEQ ID NO: 474705 - DNA, 19 bp, Mus musculus
  siRNA target sequence for Oasl1 (NM_145209.2,892-910).
catgagctcctctgtatct

SEQ ID NO: 474706 - DNA, 19 bp, Mus musculus
  siRNA target sequence for Oasl1 (NM_145209.2,1164-1182).
gtgggggcactcggattta

SEQ ID NO: 474707 - DNA, 19 bp, Mus musculus
  siRNA target sequence for Oasl1 (NM_145209.2,1168-1186).
gggcactcggatttaacct

SEQ ID NO: 474708 - DNA, 19 bp, Mus musculus
  siRNA target sequence for Oasl1 (NM_145209.2,1169-1187).
ggcactcggatttaacctt

SEQ ID NO: 474709 - DNA, 19 bp, Mus musculus
  siRNA target sequence for Oasl1 (NM_145209.2,1198-1216).
ccttatgaacccataaaga

SEQ ID NO: 474710 - DNA, 19 bp, Mus musculus
  siRNA target sequence for Oasl1 (NM_145209.2,1199-1217).
cttatgaacccataaagaa

SEQ ID NO: 474711 - DNA, 19 bp, Mus musculus
  siRNA target sequence for Oasl1 (NM_145209.2,1324-1342).
gcctactacggaatcttct

SEQ ID NO: 474712 - DNA, 19 bp, Mus musculus
  siRNA target sequence for Oasl1 (NM_145209.2,1429-1447).
gcgatccacccgcttgatt

SEQ ID NO: 474713 - DNA, 19 bp, Mus musculus
  siRNA target sequence for Oasl1 (NM_145209.2,1430-1448).
cgatccacccgcttgatta

SEQ ID NO: 474714 - DNA, 19 bp, Mus musculus
  siRNA target sequence for Oasl1 (NM_145209.2,1533-1551).
ggaggactggtttgacttt

SEQ ID NO: 474715 - DNA, 19 bp, Mus musculus
  siRNA target sequence for Oasl1 (NM_145209.2,1534-1552).
gaggactggtttgacttta

SEQ ID NO: 474716 - DNA, 19 bp, Mus musculus
  siRNA target sequence for Oasl1 (NM_145209.2,1536-1554).
ggactggtttgactttaaa

SEQ ID NO: 474717 - DNA, 19 bp, Mus musculus
  siRNA target sequence for Oasl1 (NM_145209.2,1602-1620).
ggagggggcagctccattt

SEQ ID NO: 474718 - DNA, 19 bp, Mus musculus
  siRNA target sequence for Oasl2 (NM_011854.1,953-971).
gatctgaccaagacatgat

SEQ ID NO: 474719 - DNA, 19 bp, Mus musculus
  siRNA target sequence for Oasl2 (NM_011854.1,1024-1042).
gtcgtcatcagcttcatta

SEQ ID NO: 474720 - DNA, 19 bp, Mus musculus
  siRNA target sequence for Oasl2 (NM_011854.1,1148-1166).
cccggaagactgatgacat

SEQ ID NO: 474721 - DNA, 19 bp, Mus musculus
  siRNA target sequence for Oasl2 (NM_011854.1,1149-1167).
ccggaagactgatgacatt

SEQ ID NO: 474722 - DNA, 19 bp, Mus musculus
  siRNA target sequence for Oasl2 (NM_011854.1,1150-1168).
cggaagactgatgacatta

SEQ ID NO: 474723 - DNA, 19 bp, Mus musculus
  siRNA target sequence for Oasl2 (NM_011854.1,1151-1169).
ggaagactgatgacattat

SEQ ID NO: 474724 - DNA, 19 bp, Mus musculus
  siRNA target sequence for Oasl2 (NM_011854.1,1157-1175).
ctgatgacattatttggat

SEQ ID NO: 474725 - DNA, 19 bp, Mus musculus
  siRNA target sequence for Oasl2 (NM_011854.1,1162-1180).
gacattatttggatggata

SEQ ID NO: 474726 - DNA, 19 bp, Mus musculus
  siRNA target sequence for Oasl2 (NM_011854.1,1194-1212).
cgatgctttgggacctatt

SEQ ID NO: 474727 - DNA, 19 bp, Mus musculus
  siRNA target sequence for Oasl2 (NM_011854.1,1195-1213).
gatgctttgggacctattt

SEQ ID NO: 474728 - DNA, 19 bp, Mus musculus
  siRNA target sequence for Oasl2 (NM_011854.1,1198-1216).
gctttgggacctatttcca

SEQ ID NO: 474729 - DNA, 19 bp, Mus musculus
  siRNA target sequence for Oasl2 (NM_011854.1,1242-1260).
ctacgagactctgataaga

SEQ ID NO: 474730 - DNA, 19 bp, Mus musculus
  siRNA target sequence for Oasl2 (NM_011854.1,1245-1263).
cgagactctgataagaagt

SEQ ID NO: 474731 - DNA, 19 bp, Mus musculus
  siRNA target sequence for Oasl2 (NM_011854.1,1246-1264).
gagactctgataagaagta

SEQ ID NO: 474732 - DNA, 19 bp, Mus musculus
  siRNA target sequence for Oasl2 (NM_011854.1,1289-1307).
caagcttcacagagttaca

SEQ ID NO: 474733 - DNA, 19 bp, Mus musculus
  siRNA target sequence for Oasl2 (NM_011854.1,1298-1316).
cagagttacagagacattt

SEQ ID NO: 474734 - DNA, 19 bp, Mus musculus
  siRNA target sequence for Oasl2 (NM_011854.1,1325-1343).
ctcgcccagttaaactgaa

SEQ ID NO: 474735 - DNA, 19 bp, Mus musculus
  siRNA target sequence for Oasl2 (NM_011854.1,1328-1346).
gcccagttaaactgaagaa

SEQ ID NO: 474736 - DNA, 19 bp, Mus musculus
  siRNA target sequence for Oasl2 (NM_011854.1,1351-1369).
ctccggttggtgaagttct

SEQ ID NO: 474737 - DNA, 19 bp, Mus musculus
  siRNA target sequence for Oasl2 (NM_011854.1,1377-1395).
gcagtgcctgagacgtaaa

SEQ ID NO: 474738 - DNA, 19 bp, Mus musculus
  siRNA target sequence for Oasl2 (NM_011854.1,1380-1398).
gtgcctgagacgtaaatat

SEQ ID NO: 474739 - DNA, 19 bp, Mus musculus
  siRNA target sequence for Oasl2 (NM_011854.1,1384-1402).
ctgagacgtaaatatggaa

SEQ ID NO: 474740 - DNA, 19 bp, Mus musculus
  siRNA target sequence for Oasl2 (NM_011854.1,1413-1431).
gttgccctcaaaatatgct

SEQ ID NO: 474741 - DNA, 19 bp, Mus musculus
  siRNA target sequence for Oasl2 (NM_011854.1,1473-1491).
gagcagtgatagcttcaat

SEQ ID NO: 474742 - DNA, 19 bp, Mus musculus
  siRNA target sequence for Oasl2 (NM_011854.1,1537-1555).
cgcgacatctgcatctact

SEQ ID NO: 474743 - DNA, 19 bp, Mus musculus
  siRNA target sequence for Oasl2 (NM_011854.1,1746-1764).
cagcgagcgctggaatgta

SEQ ID NO: 474744 - DNA, 19 bp, Mus musculus
  siRNA target sequence for Oasl2 (NM_011854.1,1748-1766).
gcgagcgctggaatgtaca

SEQ ID NO: 474745 - DNA, 19 bp, Mus musculus
  siRNA target sequence for Oasl2 (NM_011854.1,1783-1801).
caggtgagagtgaaacaaa

SEQ ID NO: 474746 - DNA, 19 bp, Mus musculus
  siRNA target sequence for Oasl2 (NM_011854.1,1841-1859).
gccccatcagaaagatgaa

SEQ ID NO: 474747 - DNA, 19 bp, Mus musculus
  siRNA target sequence for Oasl2 (NM_011854.1,1960-1978).
gcagattatgggatattct

SEQ ID NO: 474748 - DNA, 19 bp, Mus musculus
  siRNA target sequence for Oasl2 (NM_011854.1,1963-1981).
gattatgggatattctcta

SEQ ID NO: 474749 - DNA, 19 bp, Mus musculus
  siRNA target sequence for Oasl2 (NM_011854.1,2064-2082).
caccatcgaccctgatgat

SEQ ID NO: 474750 - DNA, 19 bp, Mus musculus
  siRNA target sequence for Paip1 (NM_145457.2,208-226).
gggctccagaacaaacgaa

SEQ ID NO: 474751 - DNA, 19 bp, Mus musculus
  siRNA target sequence for Paip1 (NM_145457.2,309-327).
gtggctcctgtgttaatgt

SEQ ID NO: 474752 - DNA, 19 bp, Mus musculus
  siRNA target sequence for Paip1 (NM_145457.2,313-331).
ctcctgtgttaatgtctaa

SEQ ID NO: 474753 - DNA, 19 bp, Mus musculus
  siRNA target sequence for Paip1 (NM_145457.2,359-377).
cccatcaggttattcttct

SEQ ID NO: 474754 - DNA, 19 bp, Mus musculus
  siRNA target sequence for Paip1 (NM_145457.2,361-379).
catcaggttattcttctaa

SEQ ID NO: 474755 - DNA, 19 bp, Mus musculus
  siRNA target sequence for Paip1 (NM_145457.2,366-384).
ggttattcttctaattata

SEQ ID NO: 474756 - DNA, 19 bp, Mus musculus
  siRNA target sequence for Paip1 (NM_145457.2,376-394).
ctaattatacagaatccta

SEQ ID NO: 474757 - DNA, 19 bp, Mus musculus
  siRNA target sequence for Paip1 (NM_145457.2,418-436).
cgactctctcagaatacgt

SEQ ID NO: 474758 - DNA, 19 bp, Mus musculus
  siRNA target sequence for Paip1 (NM_145457.2,419-437).
gactctctcagaatacgtt

SEQ ID NO: 474759 - DNA, 19 bp, Mus musculus
  siRNA target sequence for Paip1 (NM_145457.2,427-445).
cagaatacgttcaggattt

SEQ ID NO: 474760 - DNA, 19 bp, Mus musculus
  siRNA target sequence for Paip1 (NM_145457.2,501-519).
gcagaaaccctgaatggat

SEQ ID NO: 474761 - DNA, 19 bp, Mus musculus
  siRNA target sequence for Paip1 (NM_145457.2,546-564).
gaacttgtggaacttatct

SEQ ID NO: 474762 - DNA, 19 bp, Mus musculus
  siRNA target sequence for Paip1 (NM_145457.2,573-591).
gccacgtctatcccaaatt

SEQ ID NO: 474763 - DNA, 19 bp, Mus musculus
  siRNA target sequence for Paip1 (NM_145457.2,574-592).
ccacgtctatcccaaattt

SEQ ID NO: 474764 - DNA, 19 bp, Mus musculus
  siRNA target sequence for Paip1 (NM_145457.2,602-620).
gggagctcgcctgtgtaat

SEQ ID NO: 474765 - DNA, 19 bp, Mus musculus
  siRNA target sequence for Paip1 (NM_145457.2,603-621).
ggagctcgcctgtgtaatt

SEQ ID NO: 474766 - DNA, 19 bp, Mus musculus
  siRNA target sequence for Paip1 (NM_145457.2,604-622).
gagctcgcctgtgtaatta

SEQ ID NO: 474767 - DNA, 19 bp, Mus musculus
  siRNA target sequence for Paip1 (NM_145457.2,626-644).
gtctcatcatctgacaatt

SEQ ID NO: 474768 - DNA, 19 bp, Mus musculus
  siRNA target sequence for Paip1 (NM_145457.2,658-676).
gcaacttccgccaattgct

SEQ ID NO: 474769 - DNA, 19 bp, Mus musculus
  siRNA target sequence for Paip1 (NM_145457.2,665-683).
ccgccaattgctacttcaa

SEQ ID NO: 474770 - DNA, 19 bp, Mus musculus
  siRNA target sequence for Paip1 (NM_145457.2,685-703).
ggtgcaggacggagtatga

SEQ ID NO: 474771 - DNA, 19 bp, Mus musculus
  siRNA target sequence for Paip1 (NM_145457.2,686-704).
gtgcaggacggagtatgaa

SEQ ID NO: 474772 - DNA, 19 bp, Mus musculus
  siRNA target sequence for Paip1 (NM_145457.2,691-709).
ggacggagtatgaagctaa

SEQ ID NO: 474773 - DNA, 19 bp, Mus musculus
  siRNA target sequence for Paip1 (NM_145457.2,692-710).
gacggagtatgaagctaaa

SEQ ID NO: 474774 - DNA, 19 bp, Mus musculus
  siRNA target sequence for Paip1 (NM_145457.2,694-712).
cggagtatgaagctaaaga

SEQ ID NO: 474775 - DNA, 19 bp, Mus musculus
  siRNA target sequence for Paip1 (NM_145457.2,728-746).
ggatgaagtgactcgaaaa

SEQ ID NO: 474776 - DNA, 19 bp, Mus musculus
  siRNA target sequence for Paip1 (NM_145457.2,732-750).
gaagtgactcgaaaacgat

SEQ ID NO: 474777 - DNA, 19 bp, Mus musculus
  siRNA target sequence for Paip1 (NM_145457.2,737-755).
gactcgaaaacgatttcat

SEQ ID NO: 474778 - DNA, 19 bp, Mus musculus
  siRNA target sequence for Paip1 (NM_145457.2,767-785).
gtttctgggagaactatat

SEQ ID NO: 474779 - DNA, 19 bp, Mus musculus
  siRNA target sequence for Paip1 (NM_145457.2,771-789).
ctgggagaactatatctta

SEQ ID NO: 474780 - DNA, 19 bp, Mus musculus
  siRNA target sequence for Paip1 (NM_145457.2,775-793).
gagaactatatcttaacct

SEQ ID NO: 474781 - DNA, 19 bp, Mus musculus
  siRNA target sequence for Paip1 (NM_145457.2,823-841).
caagagcagatattcttca

SEQ ID NO: 474782 - DNA, 19 bp, Mus musculus
  siRNA target sequence for Paip1 (NM_145457.2,867-885).
gctctgttttctaatccta

SEQ ID NO: 474783 - DNA, 19 bp, Mus musculus
  siRNA target sequence for Paip1 (NM_145457.2,868-886).
ctctgttttctaatcctat

SEQ ID NO: 474784 - DNA, 19 bp, Mus musculus
  siRNA target sequence for Paip1 (NM_145457.2,877-895).
ctaatcctatggatgacaa

SEQ ID NO: 474785 - DNA, 19 bp, Mus musculus
  siRNA target sequence for Paip1 (NM_145457.2,904-922).
gtgcagtaaaattgctaaa

SEQ ID NO: 474786 - DNA, 19 bp, Mus musculus
  siRNA target sequence for Paip1 (NM_145457.2,906-924).
gcagtaaaattgctaaagt

SEQ ID NO: 474787 - DNA, 19 bp, Mus musculus
  siRNA target sequence for Paip1 (NM_145457.2,1046-1064).
gctcttgaagcttgttgaa

SEQ ID NO: 474788 - DNA, 19 bp, Mus musculus
  siRNA target sequence for Paip1 (NM_145457.2,1059-1077).
gttgaacttcgatcaagta

SEQ ID NO: 474789 - DNA, 19 bp, Mus musculus
  siRNA target sequence for Paip1 (NM_145457.2,1062-1080).
gaacttcgatcaagtaact

SEQ ID NO: 474790 - DNA, 19 bp, Mus musculus
  siRNA target sequence for Paip1 (NM_145457.2,1088-1106).
ggtccatgcaacttcaaca

SEQ ID NO: 474791 - DNA, 19 bp, Mus musculus
  siRNA target sequence for Paip1 (NM_145457.2,1135-1153).
ctaactacttcatgaatga

SEQ ID NO: 474792 - DNA, 19 bp, Mus musculus
  siRNA target sequence for Paip1 (NM_145457.2,1197-1215).
gacccagattaccaagaaa

SEQ ID NO: 474793 - DNA, 19 bp, Mus musculus
  siRNA target sequence for Paip1 (NM_145457.2,1284-1302).
ggggctggtgacccatatt

SEQ ID NO: 474794 - DNA, 19 bp, Mus musculus
  siRNA target sequence for Paip1 (NM_145457.2,1288-1306).
ctggtgacccatatttgga

SEQ ID NO: 474795 - DNA, 19 bp, Mus musculus
  siRNA target sequence for Paip1 (NM_145457.2,1293-1311).
gacccatatttggatgata

SEQ ID NO: 474796 - DNA, 19 bp, Mus musculus
  siRNA target sequence for Paip1 (NM_145457.2,1297-1315).
catatttggatgatatcga

SEQ ID NO: 474797 - DNA, 19 bp, Mus musculus
  siRNA target sequence for Paip1 (NM_145457.2,1369-1387).
cagagcgcaagcgaaaaca

SEQ ID NO: 474798 - DNA, 19 bp, Mus musculus
  siRNA target sequence for Paip1 (NM_145457.2,1371-1389).
gagcgcaagcgaaaacagt

SEQ ID NO: 474799 - DNA, 19 bp, Mus musculus
  siRNA target sequence for Papola (NM_011112.1,255-273).
cccacaatctgtaattgaa

SEQ ID NO: 474800 - DNA, 19 bp, Mus musculus
  siRNA target sequence for Papola (NM_011112.1,454-472).
gcatttgtaccagttatca

SEQ ID NO: 474801 - DNA, 19 bp, Mus musculus
  siRNA target sequence for Papola (NM_011112.1,455-473).
catttgtaccagttatcaa

SEQ ID NO: 474802 - DNA, 19 bp, Mus musculus
  siRNA target sequence for Papola (NM_011112.1,568-586).
cttaaaaacctagatataa

SEQ ID NO: 474803 - DNA, 19 bp, Mus musculus
  siRNA target sequence for Papola (NM_011112.1,576-594).
cctagatataagatgcata

SEQ ID NO: 474804 - DNA, 19 bp, Mus musculus
  siRNA target sequence for Papola (NM_011112.1,611-629).
gcagggtaaccgatgaaat

SEQ ID NO: 474805 - DNA, 19 bp, Mus musculus
  siRNA target sequence for Papola (NM_011112.1,612-630).
cagggtaaccgatgaaatt

SEQ ID NO: 474806 - DNA, 19 bp, Mus musculus
  siRNA target sequence for Papola (NM_011112.1,793-811).
gcatcaactcttgtacata

SEQ ID NO: 474807 - DNA, 19 bp, Mus musculus
  siRNA target sequence for Papola (NM_011112.1,794-812).
catcaactcttgtacataa

SEQ ID NO: 474808 - DNA, 19 bp, Mus musculus
  siRNA target sequence for Papola (NM_011112.1,867-885).
gcctgaagaatgcaatctt

SEQ ID NO: 474809 - DNA, 19 bp, Mus musculus
  siRNA target sequence for Papola (NM_011112.1,869-887).
ctgaagaatgcaatcttaa

SEQ ID NO: 474810 - DNA, 19 bp, Mus musculus
  siRNA target sequence for Papola (NM_011112.1,1090-1108).
gctccaaacttctttcaga

SEQ ID NO: 474811 - DNA, 19 bp, Mus musculus
  siRNA target sequence for Papola (NM_011112.1,1094-1112).
caaacttctttcagaagta

SEQ ID NO: 474812 - DNA, 19 bp, Mus musculus
  siRNA target sequence for Papola (NM_011112.1,1139-1157).
gtgcgcccacggaaaagca

SEQ ID NO: 474813 - DNA, 19 bp, Mus musculus
  siRNA target sequence for Papola (NM_011112.1,1360-1378).
gtcgacctcacctatgata

SEQ ID NO: 474814 - DNA, 19 bp, Mus musculus
  siRNA target sequence for Papola (NM_011112.1,1493-1511).
ctagtcacgtgcttcagaa

SEQ ID NO: 474815 - DNA, 19 bp, Mus musculus
  siRNA target sequence for Papola (NM_011112.1,1526-1544).
caacagaaggagtcaagtt

SEQ ID NO: 474816 - DNA, 19 bp, Mus musculus
  siRNA target sequence for Papola (NM_011112.1,1626-1644).
gaagaccagtccattgaat

SEQ ID NO: 474817 - DNA, 19 bp, Mus musculus
  siRNA target sequence for Papola (NM_011112.1,1632-1650).
cagtccattgaatagttct

SEQ ID NO: 474818 - DNA, 19 bp, Mus musculus
  siRNA target sequence for Papola (NM_011112.1,1732-1750).
gtaccgcaagcaaattcca

SEQ ID NO: 474819 - DNA, 19 bp, Mus musculus
  siRNA target sequence for Papola (NM_011112.1,1766-1784).
gtccatcgagcgaaagcat

SEQ ID NO: 474820 - DNA, 19 bp, Mus musculus
  siRNA target sequence for Papola (NM_011112.1,1850-1868).
cctcaacacgactggtaaa

SEQ ID NO: 474821 - DNA, 19 bp, Mus musculus
  siRNA target sequence for Papola (NM_011112.1,1889-1907).
gaaacacagcaacaaaagt

SEQ ID NO: 474822 - DNA, 19 bp, Mus musculus
  siRNA target sequence for Papola (NM_011112.1,1934-1952).
gaacgtcctcacccaataa

SEQ ID NO: 474823 - DNA, 19 bp, Mus musculus
  siRNA target sequence for Papola (NM_011112.1,1937-1955).
cgtcctcacccaataaaga

SEQ ID NO: 474824 - DNA, 19 bp, Mus musculus
  siRNA target sequence for Papola (NM_011112.1,2022-2040).
gagtggacatgataaaaca

SEQ ID NO: 474825 - DNA, 19 bp, Mus musculus
  siRNA target sequence for Papola (NM_011112.1,2043-2061).
gacaaaggaacaagttgat

SEQ ID NO: 474826 - DNA, 19 bp, Mus musculus
  siRNA target sequence for Papola (NM_011112.1,2065-2083).
gagacaagtgcggttcaat

SEQ ID NO: 474827 - DNA, 19 bp, Mus musculus
  siRNA target sequence for Papola (NM_011112.1,2069-2087).
caagtgcggttcaatcaga

SEQ ID NO: 474828 - DNA, 19 bp, Mus musculus
  siRNA target sequence for Papola (NM_011112.1,2075-2093).
cggttcaatcagaaactgt

SEQ ID NO: 474829 - DNA, 19 bp, Mus musculus
  siRNA target sequence for Papola (NM_011112.1,2158-2176).
gctctccctgcaaatccta

SEQ ID NO: 474830 - DNA, 19 bp, Mus musculus
  siRNA target sequence for Papola (NM_011112.1,2173-2191).
cctattcctgttatcaaga

SEQ ID NO: 474831 - DNA, 19 bp, Mus musculus
  siRNA target sequence for Papola (NM_011112.1,2180-2198).
ctgttatcaagaattcaat

SEQ ID NO: 474832 - DNA, 19 bp, Mus musculus
  siRNA target sequence for Pmscl1 (NM_019393.1,149-167).
gcgcaattgaggagaagaa

SEQ ID NO: 474833 - DNA, 19 bp, Mus musculus
  siRNA target sequence for Pmscl1 (NM_019393.1,213-231).
ctcattcggaacggattat

SEQ ID NO: 474834 - DNA, 19 bp, Mus musculus
  siRNA target sequence for Pmscl1 (NM_019393.1,318-336).
ggaaggtatcctctttttt

SEQ ID NO: 474835 - DNA, 19 bp, Mus musculus
  siRNA target sequence for Pmscl1 (NM_019393.1,319-337).
gaaggtatcctctttttta

SEQ ID NO: 474836 - DNA, 19 bp, Mus musculus
  siRNA target sequence for Pmscl1 (NM_019393.1,425-443).
ggtgtctacgaaattcaaa

SEQ ID NO: 474837 - DNA, 19 bp, Mus musculus
  siRNA target sequence for Pmscl1 (NM_019393.1,430-448).
ctacgaaattcaaagtgta

SEQ ID NO: 474838 - DNA, 19 bp, Mus musculus
  siRNA target sequence for Pmscl1 (NM_019393.1,444-462).
gtgtatagacactgaatct

SEQ ID NO: 474839 - DNA, 19 bp, Mus musculus
  siRNA target sequence for Pmscl1 (NM_019393.1,446-464).
gtatagacactgaatctct

SEQ ID NO: 474840 - DNA, 19 bp, Mus musculus
  siRNA target sequence for Pmscl1 (NM_019393.1,467-485).
gtgttgtcgctggtgaaaa

SEQ ID NO: 474841 - DNA, 19 bp, Mus musculus
  siRNA target sequence for Pmscl1 (NM_019393.1,472-490).
gtcgctggtgaaaaggttt

SEQ ID NO: 474842 - DNA, 19 bp, Mus musculus
  siRNA target sequence for Pmscl1 (NM_019393.1,498-516).
ccgtgtagacctacattta

SEQ ID NO: 474843 - DNA, 19 bp, Mus musculus
  siRNA target sequence for Pmscl1 (NM_019393.1,499-517).
cgtgtagacctacatttat

SEQ ID NO: 474844 - DNA, 19 bp, Mus musculus
  siRNA target sequence for Pmscl1 (NM_019393.1,507-525).
cctacatttattaaatcat

SEQ ID NO: 474845 - DNA, 19 bp, Mus musculus
  siRNA target sequence for Pmscl1 (NM_019393.1,548-566).
ctagcattgctgcaattgt

SEQ ID NO: 474846 - DNA, 19 bp, Mus musculus
  siRNA target sequence for Pmscl1 (NM_019393.1,653-671).
cattgagcatccaccatat

SEQ ID NO: 474847 - DNA, 19 bp, Mus musculus
  siRNA target sequence for Pmscl1 (NM_019393.1,663-681).
ccaccatatgcccatttgt

SEQ ID NO: 474848 - DNA, 19 bp, Mus musculus
  siRNA target sequence for Pmscl1 (NM_019393.1,737-755).
gtgaagaacgagtaatgga

SEQ ID NO: 474849 - DNA, 19 bp, Mus musculus
  siRNA target sequence for Pmscl1 (NM_019393.1,763-781).
ctggtgattgccatgaata

SEQ ID NO: 474850 - DNA, 19 bp, Mus musculus
  siRNA target sequence for Pmscl1 (NM_019393.1,768-786).
gattgccatgaataagcat

SEQ ID NO: 474851 - DNA, 19 bp, Mus musculus
  siRNA target sequence for Pmscl1 (NM_019393.1,777-795).
gaataagcatcgagaaatt

SEQ ID NO: 474852 - DNA, 19 bp, Mus musculus
  siRNA target sequence for Pmscl1 (NM_019393.1,783-801).
gcatcgagaaatttgtact

SEQ ID NO: 474853 - DNA, 19 bp, Mus musculus
  siRNA target sequence for Pmscl1 (NM_019393.1,840-858).
ggttttcagatgcagtaaa

SEQ ID NO: 474854 - DNA, 19 bp, Mus musculus
  siRNA target sequence for Pmscl1 (NM_019393.1,846-864).
cagatgcagtaaaatagct

SEQ ID NO: 474855 - DNA, 19 bp, Mus musculus
  siRNA target sequence for Pmscl1 (NM_019393.1,958-976).
gagtctatagcaaaccaaa

SEQ ID NO: 474856 - DNA, 19 bp, Mus musculus
  siRNA target sequence for Pmscl1 (NM_019393.1,962-980).
ctatagcaaaccaaagaat

SEQ ID NO: 474857 - DNA, 19 bp, Mus musculus
  siRNA target sequence for Pmscl1 (NM_019393.1,1116-1134).
gattggagacggaatagaa

SEQ ID NO: 474858 - DNA, 19 bp, Mus musculus
  siRNA target sequence for Pmscl1 (NM_019393.1,1256-1274).
gtcaaggtgcccctatagt

SEQ ID NO: 474859 - DNA, 19 bp, Mus musculus
  siRNA target sequence for Pmscl1 (NM_019393.1,1265-1283).
cccctatagtgctatcaga

SEQ ID NO: 474860 - DNA, 19 bp, Mus musculus
  siRNA target sequence for Pmscl1 (NM_019393.1,1266-1284).
ccctatagtgctatcagat

SEQ ID NO: 474861 - DNA, 19 bp, Mus musculus
  siRNA target sequence for Pmscl1 (NM_019393.1,1275-1293).
gctatcagatagtgaagaa

SEQ ID NO: 474862 - DNA, 19 bp, Mus musculus
  siRNA target sequence for Pnpt1 (NM_027869.1,90-108).
gggcactcagctatttgca

SEQ ID NO: 474863 - DNA, 19 bp, Mus musculus
  siRNA target sequence for Pnpt1 (NM_027869.1,155-173).
gacctgggacacagaaaat

SEQ ID NO: 474864 - DNA, 19 bp, Mus musculus
  siRNA target sequence for Pnpt1 (NM_027869.1,231-249).
caggcgatactgcagtaat

SEQ ID NO: 474865 - DNA, 19 bp, Mus musculus
  siRNA target sequence for Pnpt1 (NM_027869.1,234-252).
gcgatactgcagtaatggt

SEQ ID NO: 474866 - DNA, 19 bp, Mus musculus
  siRNA target sequence for Pnpt1 (NM_027869.1,251-269).
gtcacggcagtcagcaaaa

SEQ ID NO: 474867 - DNA, 19 bp, Mus musculus
  siRNA target sequence for Pnpt1 (NM_027869.1,253-271).
cacggcagtcagcaaaaca

SEQ ID NO: 474868 - DNA, 19 bp, Mus musculus
  siRNA target sequence for Pnpt1 (NM_027869.1,402-420).
gagtaatagatcgttcaat

SEQ ID NO: 474869 - DNA, 19 bp, Mus musculus
  siRNA target sequence for Pnpt1 (NM_027869.1,430-448).
ctttccagccggctatttt

SEQ ID NO: 474870 - DNA, 19 bp, Mus musculus
  siRNA target sequence for Pnpt1 (NM_027869.1,435-453).
cagccggctatttttatga

SEQ ID NO: 474871 - DNA, 19 bp, Mus musculus
  siRNA target sequence for Pnpt1 (NM_027869.1,439-457).
cggctatttttatgatact

SEQ ID NO: 474872 - DNA, 19 bp, Mus musculus
  siRNA target sequence for Pnpt1 (NM_027869.1,501-519).
ctgatatcctagcagttaa

SEQ ID NO: 474873 - DNA, 19 bp, Mus musculus
  siRNA target sequence for Pnpt1 (NM_027869.1,572-590).
ggggcagtacgaataggaa

SEQ ID NO: 474874 - DNA, 19 bp, Mus musculus
  siRNA target sequence for Pnpt1 (NM_027869.1,573-591).
gggcagtacgaataggaat

SEQ ID NO: 474875 - DNA, 19 bp, Mus musculus
  siRNA target sequence for Pnpt1 (NM_027869.1,576-594).
cagtacgaataggaatgat

SEQ ID NO: 474876 - DNA, 19 bp, Mus musculus
  siRNA target sequence for Pnpt1 (NM_027869.1,659-677).
gttgccggagcacctaaaa

SEQ ID NO: 474877 - DNA, 19 bp, Mus musculus
  siRNA target sequence for Pnpt1 (NM_027869.1,671-689).
cctaaaagccaaattgtta

SEQ ID NO: 474878 - DNA, 19 bp, Mus musculus
  siRNA target sequence for Pnpt1 (NM_027869.1,672-690).
ctaaaagccaaattgttat

SEQ ID NO: 474879 - DNA, 19 bp, Mus musculus
  siRNA target sequence for Pnpt1 (NM_027869.1,694-712).
ggaagcctctgcagaaaat

SEQ ID NO: 474880 - DNA, 19 bp, Mus musculus
  siRNA target sequence for Pnpt1 (NM_027869.1,700-718).
ctctgcagaaaatattcta

SEQ ID NO: 474881 - DNA, 19 bp, Mus musculus
  siRNA target sequence for Pnpt1 (NM_027869.1,742-760).
caaagttggggtgaagtat

SEQ ID NO: 474882 - DNA, 19 bp, Mus musculus
  siRNA target sequence for Pnpt1 (NM_027869.1,817-835).
gaggacaccgcagaagata

SEQ ID NO: 474883 - DNA, 19 bp, Mus musculus
  siRNA target sequence for Pnpt1 (NM_027869.1,819-837).
ggacaccgcagaagatatt

SEQ ID NO: 474884 - DNA, 19 bp, Mus musculus
  siRNA target sequence for Pnpt1 (NM_027869.1,820-838).
gacaccgcagaagatattt

SEQ ID NO: 474885 - DNA, 19 bp, Mus musculus
  siRNA target sequence for Pnpt1 (NM_027869.1,857-875).
gtgaagtacacgaagataa

SEQ ID NO: 474886 - DNA, 19 bp, Mus musculus
  siRNA target sequence for Pnpt1 (NM_027869.1,886-904).
gaaactctatgcggttttt

SEQ ID NO: 474887 - DNA, 19 bp, Mus musculus
  siRNA target sequence for Pnpt1 (NM_027869.1,897-915).
cggtttttacagattatga

SEQ ID NO: 474888 - DNA, 19 bp, Mus musculus
  siRNA target sequence for Pnpt1 (NM_027869.1,942-960).
ctgttaacaagataagatt

SEQ ID NO: 474889 - DNA, 19 bp, Mus musculus
  siRNA target sequence for Pnpt1 (NM_027869.1,949-967).
caagataagattagataca

SEQ ID NO: 474890 - DNA, 19 bp, Mus musculus
  siRNA target sequence for Pnpt1 (NM_027869.1,997-1015).
ggttgaccaatttgaaata

SEQ ID NO: 474891 - DNA, 19 bp, Mus musculus
  siRNA target sequence for Pnpt1 (NM_027869.1,998-1016).
gttgaccaatttgaaataa

SEQ ID NO: 474892 - DNA, 19 bp, Mus musculus
  siRNA target sequence for Pnpt1 (NM_027869.1,1042-1060).
ggaggttttccgaagtatt

SEQ ID NO: 474893 - DNA, 19 bp, Mus musculus
  siRNA target sequence for Pnpt1 (NM_027869.1,1043-1061).
gaggttttccgaagtatta

SEQ ID NO: 474894 - DNA, 19 bp, Mus musculus
  siRNA target sequence for Pnpt1 (NM_027869.1,1045-1063).
ggttttccgaagtattatt

SEQ ID NO: 474895 - DNA, 19 bp, Mus musculus
  siRNA target sequence for Pnpt1 (NM_027869.1,1046-1064).
gttttccgaagtattattt

SEQ ID NO: 474896 - DNA, 19 bp, Mus musculus
  siRNA target sequence for Pnpt1 (NM_027869.1,1051-1069).
ccgaagtattattttgaat

SEQ ID NO: 474897 - DNA, 19 bp, Mus musculus
  siRNA target sequence for Pnpt1 (NM_027869.1,1097-1115).
ctgacttcacttaggaata

SEQ ID NO: 474898 - DNA, 19 bp, Mus musculus
  siRNA target sequence for Pnpt1 (NM_027869.1,1099-1117).
gacttcacttaggaatata

SEQ ID NO: 474899 - DNA, 19 bp, Mus musculus
  siRNA target sequence for Pnpt1 (NM_027869.1,1119-1137).
gttgtgaggtcgatatgtt

SEQ ID NO: 474900 - DNA, 19 bp, Mus musculus
  siRNA target sequence for Pnpt1 (NM_027869.1,1122-1140).
gtgaggtcgatatgtttaa

SEQ ID NO: 474901 - DNA, 19 bp, Mus musculus
  siRNA target sequence for Pnpt1 (NM_027869.1,1129-1147).
cgatatgtttaaaacactt

SEQ ID NO: 474902 - DNA, 19 bp, Mus musculus
  siRNA target sequence for Pnpt1 (NM_027869.1,1151-1169).
ggatcagcattatttcaga

SEQ ID NO: 474903 - DNA, 19 bp, Mus musculus
  siRNA target sequence for Pnpt1 (NM_027869.1,1228-1246).
gtcagatcaaattataaca

SEQ ID NO: 474904 - DNA, 19 bp, Mus musculus
  siRNA target sequence for Pnpt1 (NM_027869.1,1289-1307).
gagttccctccttatgcaa

SEQ ID NO: 474905 - DNA, 19 bp, Mus musculus
  siRNA target sequence for Pnpt1 (NM_027869.1,1309-1327).
caatgaaaccggcaaagtt

SEQ ID NO: 474906 - DNA, 19 bp, Mus musculus
  siRNA target sequence for Pnpt1 (NM_027869.1,1406-1424).
ccttttaccataagagtta

SEQ ID NO: 474907 - DNA, 19 bp, Mus musculus
  siRNA target sequence for Pnpt1 (NM_027869.1,1414-1432).
cataagagttacatctgaa

SEQ ID NO: 474908 - DNA, 19 bp, Mus musculus
  siRNA target sequence for Pnpt1 (NM_027869.1,1439-1457).
gaatcaaatgggtcatctt

SEQ ID NO: 474909 - DNA, 19 bp, Mus musculus
  siRNA target sequence for Pnpt1 (NM_027869.1,1499-1517).
gcaggggtcccaatttcat

SEQ ID NO: 474910 - DNA, 19 bp, Mus musculus
  siRNA target sequence for Pnpt1 (NM_027869.1,1538-1556).
gtgggattggttaccaaaa

SEQ ID NO: 474911 - DNA, 19 bp, Mus musculus
  siRNA target sequence for Pnpt1 (NM_027869.1,1541-1559).
ggattggttaccaaaacca

SEQ ID NO: 474912 - DNA, 19 bp, Mus musculus
  siRNA target sequence for Pnpt1 (NM_027869.1,1542-1560).
gattggttaccaaaaccaa

SEQ ID NO: 474913 - DNA, 19 bp, Mus musculus
  siRNA target sequence for Pnpt1 (NM_027869.1,1580-1598).
gaagactaccgtttgctaa

SEQ ID NO: 474914 - DNA, 19 bp, Mus musculus
  siRNA target sequence for Pnpt1 (NM_027869.1,1585-1603).
ctaccgtttgctaacagat

SEQ ID NO: 474915 - DNA, 19 bp, Mus musculus
  siRNA target sequence for Pnpt1 (NM_027869.1,1588-1606).
ccgtttgctaacagatatt

SEQ ID NO: 474916 - DNA, 19 bp, Mus musculus
  siRNA target sequence for Pnpt1 (NM_027869.1,1609-1627).
gggaattgaagattataat

SEQ ID NO: 474917 - DNA, 19 bp, Mus musculus
  siRNA target sequence for Pnpt1 (NM_027869.1,1649-1667).
gccggtacaaataaaggaa

SEQ ID NO: 474918 - DNA, 19 bp, Mus musculus
  siRNA target sequence for Pnpt1 (NM_027869.1,1650-1668).
ccggtacaaataaaggaat

SEQ ID NO: 474919 - DNA, 19 bp, Mus musculus
  siRNA target sequence for Pnpt1 (NM_027869.1,1651-1669).
cggtacaaataaaggaata

SEQ ID NO: 474920 - DNA, 19 bp, Mus musculus
  siRNA target sequence for Pnpt1 (NM_027869.1,1693-1711).
gttacctggagtaccaatt

SEQ ID NO: 474921 - DNA, 19 bp, Mus musculus
  siRNA target sequence for Pnpt1 (NM_027869.1,1700-1718).
ggagtaccaattaaaatta

SEQ ID NO: 474922 - DNA, 19 bp, Mus musculus
  siRNA target sequence for Pnpt1 (NM_027869.1,1757-1775).
gagatactgcagataatga

SEQ ID NO: 474923 - DNA, 19 bp, Mus musculus
  siRNA target sequence for Pnpt1 (NM_027869.1,1777-1795).
caaaacgatttcaaaacct

SEQ ID NO: 474924 - DNA, 19 bp, Mus musculus
  siRNA target sequence for Pnpt1 (NM_027869.1,1794-1812).
ctcgagcatcaagaaaaga

SEQ ID NO: 474925 - DNA, 19 bp, Mus musculus
  siRNA target sequence for Pnpt1 (NM_027869.1,1796-1814).
cgagcatcaagaaaagaaa

SEQ ID NO: 474926 - DNA, 19 bp, Mus musculus
  siRNA target sequence for Pnpt1 (NM_027869.1,1818-1836).
gaccagttgtagaaacagt

SEQ ID NO: 474927 - DNA, 19 bp, Mus musculus
  siRNA target sequence for Pnpt1 (NM_027869.1,1820-1838).
ccagttgtagaaacagtaa

SEQ ID NO: 474928 - DNA, 19 bp, Mus musculus
  siRNA target sequence for Pnpt1 (NM_027869.1,1840-1858).
ggttccattatcaaaacga

SEQ ID NO: 474929 - DNA, 19 bp, Mus musculus
  siRNA target sequence for Pnpt1 (NM_027869.1,1867-1885).
cgttgggcctggtggatat

SEQ ID NO: 474930 - DNA, 19 bp, Mus musculus
  siRNA target sequence for Pnpt1 (NM_027869.1,1871-1889).
gggcctggtggatatcact

SEQ ID NO: 474931 - DNA, 19 bp, Mus musculus
  siRNA target sequence for Pnpt1 (NM_027869.1,1872-1890).
ggcctggtggatatcactt

SEQ ID NO: 474932 - DNA, 19 bp, Mus musculus
  siRNA target sequence for Pnpt1 (NM_027869.1,1873-1891).
gcctggtggatatcactta

SEQ ID NO: 474933 - DNA, 19 bp, Mus musculus
  siRNA target sequence for Pnpt1 (NM_027869.1,1874-1892).
cctggtggatatcacttaa

SEQ ID NO: 474934 - DNA, 19 bp, Mus musculus
  siRNA target sequence for Pnpt1 (NM_027869.1,1875-1893).
ctggtggatatcacttaaa

SEQ ID NO: 474935 - DNA, 19 bp, Mus musculus
  siRNA target sequence for Pnpt1 (NM_027869.1,1877-1895).
ggtggatatcacttaaaaa

SEQ ID NO: 474936 - DNA, 19 bp, Mus musculus
  siRNA target sequence for Pnpt1 (NM_027869.1,1881-1899).
gatatcacttaaaaaaact

SEQ ID NO: 474937 - DNA, 19 bp, Mus musculus
  siRNA target sequence for Pnpt1 (NM_027869.1,1903-1921).
ggctgagacaggtgtaaca

SEQ ID NO: 474938 - DNA, 19 bp, Mus musculus
  siRNA target sequence for Pnpt1 (NM_027869.1,1904-1922).
gctgagacaggtgtaacaa

SEQ ID NO: 474939 - DNA, 19 bp, Mus musculus
  siRNA target sequence for Pnpt1 (NM_027869.1,1905-1923).
ctgagacaggtgtaacaat

SEQ ID NO: 474940 - DNA, 19 bp, Mus musculus
  siRNA target sequence for Pnpt1 (NM_027869.1,1937-1955).
gaagaaaccttctccatat

SEQ ID NO: 474941 - DNA, 19 bp, Mus musculus
  siRNA target sequence for Pnpt1 (NM_027869.1,1979-1997).
catgaagcaagagatttca

SEQ ID NO: 474942 - DNA, 19 bp, Mus musculus
  siRNA target sequence for Pnpt1 (NM_027869.1,2015-2033).
gatgatcaagagcaacaat

SEQ ID NO: 474943 - DNA, 19 bp, Mus musculus
  siRNA target sequence for Pnpt1 (NM_027869.1,2048-2066).
gtttataccgcgacaataa

SEQ ID NO: 474944 - DNA, 19 bp, Mus musculus
  siRNA target sequence for Pnpt1 (NM_027869.1,2055-2073).
ccgcgacaataactgaaat

SEQ ID NO: 474945 - DNA, 19 bp, Mus musculus
  siRNA target sequence for Pnpt1 (NM_027869.1,2057-2075).
gcgacaataactgaaatca

SEQ ID NO: 474946 - DNA, 19 bp, Mus musculus
  siRNA target sequence for Pnpt1 (NM_027869.1,2084-2102).
ggagtgatggtaaaactgt

SEQ ID NO: 474947 - DNA, 19 bp, Mus musculus
  siRNA target sequence for Pnpt1 (NM_027869.1,2085-2103).
gagtgatggtaaaactgta

SEQ ID NO: 474948 - DNA, 19 bp, Mus musculus
  siRNA target sequence for Pnpt1 (NM_027869.1,2141-2159).
cttgaccaacgaaagatta

SEQ ID NO: 474949 - DNA, 19 bp, Mus musculus
  siRNA target sequence for Pnpt1 (NM_027869.1,2195-2213).
gaaattcaggtcaaatact

SEQ ID NO: 474950 - DNA, 19 bp, Mus musculus
  siRNA target sequence for Pnpt1 (NM_027869.1,2244-2262).
ggctttctcgtaaagtact

SEQ ID NO: 474951 - DNA, 19 bp, Mus musculus
  siRNA target sequence for Pnpt1 (NM_027869.1,2273-2291).
gctacaactgctctcaaaa

SEQ ID NO: 474952 - DNA, 19 bp, Mus musculus
  siRNA target sequence for Pnpt1 (NM_027869.1,2283-2301).
ctctcaaaactctaaatga

SEQ ID NO: 474953 - DNA, 19 bp, Mus musculus
  siRNA target sequence for Pnpt1 (NM_027869.1,2285-2303).
ctcaaaactctaaatgata

SEQ ID NO: 474954 - DNA, 19 bp, Mus musculus
  siRNA target sequence for Pnpt1 (NM_027869.1,2287-2305).
caaaactctaaatgataga

SEQ ID NO: 474955 - DNA, 19 bp, Mus musculus
  siRNA target sequence for Pnpt1 (NM_027869.1,2330-2348).
gtctcacagtcatctaact

SEQ ID NO: 474956 - DNA, 19 bp, Mus musculus
  siRNA target sequence for Polr2g (NM_026329.1,196-214).
gacctgcactgggaaatat

SEQ ID NO: 474957 - DNA, 19 bp, Mus musculus
  siRNA target sequence for Polr2g (NM_026329.1,232-250).
caccaccatcgacaatatt

SEQ ID NO: 474958 - DNA, 19 bp, Mus musculus
  siRNA target sequence for Polr2g (NM_026329.1,273-291).
gccgaggttttgttcttta

SEQ ID NO: 474959 - DNA, 19 bp, Mus musculus
  siRNA target sequence for Polr2g (NM_026329.1,274-292).
ccgaggttttgttctttat

SEQ ID NO: 474960 - DNA, 19 bp, Mus musculus
  siRNA target sequence for Polr2g (NM_026329.1,371-389).
gttggacttttcacagaaa

SEQ ID NO: 474961 - DNA, 19 bp, Mus musculus
  siRNA target sequence for Polr2g (NM_026329.1,386-404).
gaaattgggcctatgtctt

SEQ ID NO: 474962 - DNA, 19 bp, Mus musculus
  siRNA target sequence for Polr2g (NM_026329.1,429-447).
cttcagagatggagtttga

SEQ ID NO: 474963 - DNA, 19 bp, Mus musculus
  siRNA target sequence for Polr2g (NM_026329.1,456-474).
caaaccccccttgctataa

SEQ ID NO: 474964 - DNA, 19 bp, Mus musculus
  siRNA target sequence for Polr2g (NM_026329.1,509-527).
gatgagatacgcttgaaga

SEQ ID NO: 474965 - DNA, 19 bp, Mus musculus
  siRNA target sequence for Polr2g (NM_026329.1,514-532).
gatacgcttgaagattgta

SEQ ID NO: 474966 - DNA, 19 bp, Mus musculus
  siRNA target sequence for Polr2g (NM_026329.1,534-552).
gcacgcgtgtagacaagaa

SEQ ID NO: 474967 - DNA, 19 bp, Mus musculus
  siRNA target sequence for Polr2g (NM_026329.1,535-553).
cacgcgtgtagacaagaat

SEQ ID NO: 474968 - DNA, 19 bp, Mus musculus
  siRNA target sequence for Polr2g (NM_026329.1,537-555).
cgcgtgtagacaagaatga

SEQ ID NO: 474969 - DNA, 19 bp, Mus musculus
  siRNA target sequence for Polr2g (NM_026329.1,539-557).
cgtgtagacaagaatgaca

SEQ ID NO: 474970 - DNA, 19 bp, Mus musculus
  siRNA target sequence for Polr2g (NM_026329.1,573-591).
ctctgatggacgactactt

SEQ ID NO: 474971 - DNA, 19 bp, Mus musculus
  siRNA target sequence for Ppie (NM_019489.2,61-79).
ggacgacaaggttcttcat

SEQ ID NO: 474972 - DNA, 19 bp, Mus musculus
  siRNA target sequence for Ppie (NM_019489.2,195-213).
cagctatcgacaacatgaa

SEQ ID NO: 474973 - DNA, 19 bp, Mus musculus
  siRNA target sequence for Ppie (NM_019489.2,198-216).
ctatcgacaacatgaatga

SEQ ID NO: 474974 - DNA, 19 bp, Mus musculus
  siRNA target sequence for Ppie (NM_019489.2,202-220).
cgacaacatgaatgaatct

SEQ ID NO: 474975 - DNA, 19 bp, Mus musculus
  siRNA target sequence for Ppie (NM_019489.2,233-251).
cggacgattcgtgtcaatt

SEQ ID NO: 474976 - DNA, 19 bp, Mus musculus
  siRNA target sequence for Ppie (NM_019489.2,234-252).
ggacgattcgtgtcaattt

SEQ ID NO: 474977 - DNA, 19 bp, Mus musculus
  siRNA target sequence for Ppie (NM_019489.2,289-307).
gccagtctggtcagatgat

SEQ ID NO: 474978 - DNA, 19 bp, Mus musculus
  siRNA target sequence for Ppie (NM_019489.2,305-323).
gatgactggttgaagaagt

SEQ ID NO: 474979 - DNA, 19 bp, Mus musculus
  siRNA target sequence for Ppie (NM_019489.2,308-326).
gactggttgaagaagtttt

SEQ ID NO: 474980 - DNA, 19 bp, Mus musculus
  siRNA target sequence for Ppie (NM_019489.2,394-412).
gggagagcccactgcaaaa

SEQ ID NO: 474981 - DNA, 19 bp, Mus musculus
  siRNA target sequence for Ppie (NM_019489.2,395-413).
ggagagcccactgcaaaaa

SEQ ID NO: 474982 - DNA, 19 bp, Mus musculus
  siRNA target sequence for Ppie (NM_019489.2,423-441).
caaatcctcaggtgtacat

SEQ ID NO: 474983 - DNA, 19 bp, Mus musculus
  siRNA target sequence for Ppie (NM_019489.2,531-549).
gcctgtgcacccatgaaaa

SEQ ID NO: 474984 - DNA, 19 bp, Mus musculus
  siRNA target sequence for Ppie (NM_019489.2,757-775).
cctgacctgtgataagaca

SEQ ID NO: 474985 - DNA, 19 bp, Mus musculus
  siRNA target sequence for Pum1 (NM_030722.1,184-202).
cccaacatgcctgttgttt

SEQ ID NO: 474986 - DNA, 19 bp, Mus musculus
  siRNA target sequence for Pum1 (NM_030722.1,325-343).
gctatggtggactacttct

SEQ ID NO: 474987 - DNA, 19 bp, Mus musculus
  siRNA target sequence for Pum1 (NM_030722.1,326-344).
ctatggtggactacttctt

SEQ ID NO: 474988 - DNA, 19 bp, Mus musculus
  siRNA target sequence for Pum1 (NM_030722.1,331-349).
gtggactacttctttcaga

SEQ ID NO: 474989 - DNA, 19 bp, Mus musculus
  siRNA target sequence for Pum1 (NM_030722.1,385-403).
ggtggaggcggctataata

SEQ ID NO: 474990 - DNA, 19 bp, Mus musculus
  siRNA target sequence for Pum1 (NM_030722.1,388-406).
ggaggcggctataatacta

SEQ ID NO: 474991 - DNA, 19 bp, Mus musculus
  siRNA target sequence for Pum1 (NM_030722.1,393-411).
cggctataatactagcaaa

SEQ ID NO: 474992 - DNA, 19 bp, Mus musculus
  siRNA target sequence for Pum1 (NM_030722.1,454-472).
gtacgctctatggatgaat

SEQ ID NO: 474993 - DNA, 19 bp, Mus musculus
  siRNA target sequence for Pum1 (NM_030722.1,457-475).
cgctctatggatgaattga

SEQ ID NO: 474994 - DNA, 19 bp, Mus musculus
  siRNA target sequence for Pum1 (NM_030722.1,458-476).
gctctatggatgaattgaa

SEQ ID NO: 474995 - DNA, 19 bp, Mus musculus
  siRNA target sequence for Pum1 (NM_030722.1,459-477).
ctctatggatgaattgaat

SEQ ID NO: 474996 - DNA, 19 bp, Mus musculus
  siRNA target sequence for Pum1 (NM_030722.1,526-544).
ctcttgccaggtaaaaagt

SEQ ID NO: 474997 - DNA, 19 bp, Mus musculus
  siRNA target sequence for Pum1 (NM_030722.1,575-593).
gaccaaaaggaatattcct

SEQ ID NO: 474998 - DNA, 19 bp, Mus musculus
  siRNA target sequence for Pum1 (NM_030722.1,674-692).
gtcagagtttccatgtgaa

SEQ ID NO: 474999 - DNA, 19 bp, Mus musculus
  siRNA target sequence for Pum1 (NM_030722.1,688-706).
gtgaacagtgaggtcaatt

SEQ ID NO: 475000 - DNA, 19 bp, Mus musculus
  siRNA target sequence for Pum1 (NM_030722.1,690-708).
gaacagtgaggtcaattct

SEQ ID NO: 475001 - DNA, 19 bp, Mus musculus
  siRNA target sequence for Pum1 (NM_030722.1,693-711).
cagtgaggtcaattctgta

SEQ ID NO: 475002 - DNA, 19 bp, Mus musculus
  siRNA target sequence for Pum1 (NM_030722.1,734-752).
ggggactaggcgttagcat

SEQ ID NO: 475003 - DNA, 19 bp, Mus musculus
  siRNA target sequence for Pum1 (NM_030722.1,782-800).
gcgactcctgtctaagaaa

SEQ ID NO: 475004 - DNA, 19 bp, Mus musculus
  siRNA target sequence for Pum1 (NM_030722.1,783-801).
cgactcctgtctaagaaaa

SEQ ID NO: 475005 - DNA, 19 bp, Mus musculus
  siRNA target sequence for Pum1 (NM_030722.1,855-873).
gaagaacaagggtacgttt

SEQ ID NO: 475006 - DNA, 19 bp, Mus musculus
  siRNA target sequence for Pum1 (NM_030722.1,858-876).
gaacaagggtacgtttgat

SEQ ID NO: 475007 - DNA, 19 bp, Mus musculus
  siRNA target sequence for Pum1 (NM_030722.1,866-884).
gtacgtttgatggagataa

SEQ ID NO: 475008 - DNA, 19 bp, Mus musculus
  siRNA target sequence for Pum1 (NM_030722.1,869-887).
cgtttgatggagataagct

SEQ ID NO: 475009 - DNA, 19 bp, Mus musculus
  siRNA target sequence for Pum1 (NM_030722.1,878-896).
gagataagctaggagattt

SEQ ID NO: 475010 - DNA, 19 bp, Mus musculus
  siRNA target sequence for Pum1 (NM_030722.1,955-973).
gatgcagacgtcaaagatt

SEQ ID NO: 475011 - DNA, 19 bp, Mus musculus
  siRNA target sequence for Pum1 (NM_030722.1,996-1014).
ccagaactctgctaatgaa

SEQ ID NO: 475012 - DNA, 19 bp, Mus musculus
  siRNA target sequence for Pum1 (NM_030722.1,1027-1045).
ggtccaaaccagaatggtt

SEQ ID NO: 475013 - DNA, 19 bp, Mus musculus
  siRNA target sequence for Pum1 (NM_030722.1,1156-1174).
gagcctctgcagtttgatt

SEQ ID NO: 475014 - DNA, 19 bp, Mus musculus
  siRNA target sequence for Pum1 (NM_030722.1,1158-1176).
gcctctgcagtttgattat

SEQ ID NO: 475015 - DNA, 19 bp, Mus musculus
  siRNA target sequence for Pum1 (NM_030722.1,1208-1226).
cagcaactgtgggactttt

SEQ ID NO: 475016 - DNA, 19 bp, Mus musculus
  siRNA target sequence for Pum1 (NM_030722.1,1332-1350).
gcctcacatcgcaggttta

SEQ ID NO: 475017 - DNA, 19 bp, Mus musculus
  siRNA target sequence for Pum1 (NM_030722.1,1369-1387).
cccaacccatacatcatca

SEQ ID NO: 475018 - DNA, 19 bp, Mus musculus
  siRNA target sequence for Pum1 (NM_030722.1,1454-1472).
ctgtggtccctcaccaata

SEQ ID NO: 475019 - DNA, 19 bp, Mus musculus
  siRNA target sequence for Pum1 (NM_030722.1,1456-1474).
gtggtccctcaccaatatt

SEQ ID NO: 475020 - DNA, 19 bp, Mus musculus
  siRNA target sequence for Pum1 (NM_030722.1,1846-1864).
gccccagtcatcattagct

SEQ ID NO: 475021 - DNA, 19 bp, Mus musculus
  siRNA target sequence for Pum1 (NM_030722.1,2227-2245).
ggcagcagtgacctttata

SEQ ID NO: 475022 - DNA, 19 bp, Mus musculus
  siRNA target sequence for Pum1 (NM_030722.1,2228-2246).
gcagcagtgacctttataa

SEQ ID NO: 475023 - DNA, 19 bp, Mus musculus
  siRNA target sequence for Pum1 (NM_030722.1,2269-2287).
cccattggacacagttttt

SEQ ID NO: 475024 - DNA, 19 bp, Mus musculus
  siRNA target sequence for Pum1 (NM_030722.1,2270-2288).
ccattggacacagttttta

SEQ ID NO: 475025 - DNA, 19 bp, Mus musculus
  siRNA target sequence for Pum1 (NM_030722.1,2393-2411).
gatcctcttcaagcttaaa

SEQ ID NO: 475026 - DNA, 19 bp, Mus musculus
  siRNA target sequence for Pum1 (NM_030722.1,2431-2449).
ggcagtggaagatacatct

SEQ ID NO: 475027 - DNA, 19 bp, Mus musculus
  siRNA target sequence for Pum1 (NM_030722.1,2535-2553).
ctctcgtttgcgatatgga

SEQ ID NO: 475028 - DNA, 19 bp, Mus musculus
  siRNA target sequence for Pum1 (NM_030722.1,2537-2555).
ctcgtttgcgatatggaat

SEQ ID NO: 475029 - DNA, 19 bp, Mus musculus
  siRNA target sequence for Pum1 (NM_030722.1,2582-2600).
gcagacttctggaagattt

SEQ ID NO: 475030 - DNA, 19 bp, Mus musculus
  siRNA target sequence for Pum1 (NM_030722.1,2607-2625).
caaccggtaccctaattta

SEQ ID NO: 475031 - DNA, 19 bp, Mus musculus
  siRNA target sequence for Pum1 (NM_030722.1,2610-2628).
ccggtaccctaatttacaa

SEQ ID NO: 475032 - DNA, 19 bp, Mus musculus
  siRNA target sequence for Pum1 (NM_030722.1,2634-2652).
ggagattgctgggcatata

SEQ ID NO: 475033 - DNA, 19 bp, Mus musculus
  siRNA target sequence for Pum1 (NM_030722.1,2641-2659).
gctgggcatataatggaat

SEQ ID NO: 475034 - DNA, 19 bp, Mus musculus
  siRNA target sequence for Pum1 (NM_030722.1,2642-2660).
ctgggcatataatggaatt

SEQ ID NO: 475035 - DNA, 19 bp, Mus musculus
  siRNA target sequence for Pum1 (NM_030722.1,2673-2691).
gcatggctctagattcatt

SEQ ID NO: 475036 - DNA, 19 bp, Mus musculus
  siRNA target sequence for Pum1 (NM_030722.1,2724-2742).
gcgccagcttgtcttcaat

SEQ ID NO: 475037 - DNA, 19 bp, Mus musculus
  siRNA target sequence for Pum1 (NM_030722.1,2752-2770).
caggctgcgtaccaactta

SEQ ID NO: 475038 - DNA, 19 bp, Mus musculus
  siRNA target sequence for Pum1 (NM_030722.1,2786-2804).
gaaattacgtcattcagaa

SEQ ID NO: 475039 - DNA, 19 bp, Mus musculus
  siRNA target sequence for Pum1 (NM_030722.1,2793-2811).
cgtcattcagaagtttttt

SEQ ID NO: 475040 - DNA, 19 bp, Mus musculus
  siRNA target sequence for Pum1 (NM_030722.1,2857-2875).
cgaggccatgtcctatcat

SEQ ID NO: 475041 - DNA, 19 bp, Mus musculus
  siRNA target sequence for Pum1 (NM_030722.1,2931-2949).
ctcagaccagcaggtaatt

SEQ ID NO: 475042 - DNA, 19 bp, Mus musculus
  siRNA target sequence for Pum1 (NM_030722.1,2933-2951).
cagaccagcaggtaattaa

SEQ ID NO: 475043 - DNA, 19 bp, Mus musculus
  siRNA target sequence for Pum1 (NM_030722.1,3038-3056).
gtgtacagccccagtcttt

SEQ ID NO: 475044 - DNA, 19 bp, Mus musculus
  siRNA target sequence for Pum1 (NM_030722.1,3204-3222).
gcttgtgcaggatcagtat

SEQ ID NO: 475045 - DNA, 19 bp, Mus musculus
  siRNA target sequence for Pum1 (NM_030722.1,3291-3309).
gatccgaggcaatgtactt

SEQ ID NO: 475046 - DNA, 19 bp, Mus musculus
  siRNA target sequence for Pum1 (NM_030722.1,3321-3339).
gcacaagtttgcaagcaat

SEQ ID NO: 475047 - DNA, 19 bp, Mus musculus
  siRNA target sequence for Pum1 (NM_030722.1,3324-3342).
caagtttgcaagcaatgtt

SEQ ID NO: 475048 - DNA, 19 bp, Mus musculus
  siRNA target sequence for Pum1 (NM_030722.1,3498-3516).
gccgggtcagcggaagatt

SEQ ID NO: 475049 - DNA, 19 bp, Mus musculus
  siRNA target sequence for Pum1 (NM_030722.1,3500-3518).
cgggtcagcggaagattgt

SEQ ID NO: 475050 - DNA, 19 bp, Mus musculus
  siRNA target sequence for Pum1 (NM_030722.1,3502-3520).
ggtcagcggaagattgtca

SEQ ID NO: 475051 - DNA, 19 bp, Mus musculus
  siRNA target sequence for Pum1 (NM_030722.1,3503-3521).
gtcagcggaagattgtcat

SEQ ID NO: 475052 - DNA, 19 bp, Mus musculus
  siRNA target sequence for Pum1 (NM_030722.1,3544-3562).
gcgacgcttcgaaagtaca

SEQ ID NO: 475053 - DNA, 19 bp, Mus musculus
  siRNA target sequence for Pum1 (NM_030722.1,3583-3601).
gccaagctcgagaagtact

SEQ ID NO: 475054 - DNA, 19 bp, Mus musculus
  siRNA target sequence for Pum1 (NM_030722.1,3584-3602).
ccaagctcgagaagtacta

SEQ ID NO: 475055 - DNA, 19 bp, Mus musculus
  siRNA target sequence for Pum1 (NM_030722.1,3589-3607).
ctcgagaagtactacatga

SEQ ID NO: 475056 - DNA, 19 bp, Mus musculus
  siRNA target sequence for Pum1 (NM_030722.1,3635-3653).
gtggtccccctaatggtat

SEQ ID NO: 475057 - DNA, 19 bp, Mus musculus
  siRNA target sequence for Pum2 (NM_030723.1,196-214).
caagctcttgcattagaat

SEQ ID NO: 475058 - DNA, 19 bp, Mus musculus
  siRNA target sequence for Pum2 (NM_030723.1,229-247).
gagcttttgcctaccaaaa

SEQ ID NO: 475059 - DNA, 19 bp, Mus musculus
  siRNA target sequence for Pum2 (NM_030723.1,232-250).
cttttgcctaccaaaaagt

SEQ ID NO: 475060 - DNA, 19 bp, Mus musculus
  siRNA target sequence for Pum2 (NM_030723.1,255-273).
ggaacctgatgattcaaca

SEQ ID NO: 475061 - DNA, 19 bp, Mus musculus
  siRNA target sequence for Pum2 (NM_030723.1,256-274).
gaacctgatgattcaacaa

SEQ ID NO: 475062 - DNA, 19 bp, Mus musculus
  siRNA target sequence for Pum2 (NM_030723.1,269-287).
caacaaaagatggacaaaa

SEQ ID NO: 475063 - DNA, 19 bp, Mus musculus
  siRNA target sequence for Pum2 (NM_030723.1,330-348).
gggaacttctcatcattca

SEQ ID NO: 475064 - DNA, 19 bp, Mus musculus
  siRNA target sequence for Pum2 (NM_030723.1,331-349).
ggaacttctcatcattcaa

SEQ ID NO: 475065 - DNA, 19 bp, Mus musculus
  siRNA target sequence for Pum2 (NM_030723.1,332-350).
gaacttctcatcattcaat

SEQ ID NO: 475066 - DNA, 19 bp, Mus musculus
  siRNA target sequence for Pum2 (NM_030723.1,456-474).
gagcatggtagaatatgta

SEQ ID NO: 475067 - DNA, 19 bp, Mus musculus
  siRNA target sequence for Pum2 (NM_030723.1,462-480).
ggtagaatatgtattaagt

SEQ ID NO: 475068 - DNA, 19 bp, Mus musculus
  siRNA target sequence for Pum2 (NM_030723.1,463-481).
gtagaatatgtattaagtt

SEQ ID NO: 475069 - DNA, 19 bp, Mus musculus
  siRNA target sequence for Pum2 (NM_030723.1,482-500).
cctctcctgctgataaatt

SEQ ID NO: 475070 - DNA, 19 bp, Mus musculus
  siRNA target sequence for Pum2 (NM_030723.1,485-503).
ctcctgctgataaattgga

SEQ ID NO: 475071 - DNA, 19 bp, Mus musculus
  siRNA target sequence for Pum2 (NM_030723.1,601-619).
gaccaaaacagagatctta

SEQ ID NO: 475072 - DNA, 19 bp, Mus musculus
  siRNA target sequence for Pum2 (NM_030723.1,628-646).
gatgaggactctaaaataa

SEQ ID NO: 475073 - DNA, 19 bp, Mus musculus
  siRNA target sequence for Pum2 (NM_030723.1,653-671).
gaggtttgccaaatggaat

SEQ ID NO: 475074 - DNA, 19 bp, Mus musculus
  siRNA target sequence for Pum2 (NM_030723.1,672-690).
ggatgccgattgcaaagat

SEQ ID NO: 475075 - DNA, 19 bp, Mus musculus
  siRNA target sequence for Pum2 (NM_030723.1,673-691).
gatgccgattgcaaagatt

SEQ ID NO: 475076 - DNA, 19 bp, Mus musculus
  siRNA target sequence for Pum2 (NM_030723.1,676-694).
gccgattgcaaagatttta

SEQ ID NO: 475077 - DNA, 19 bp, Mus musculus
  siRNA target sequence for Pum2 (NM_030723.1,677-695).
ccgattgcaaagattttaa

SEQ ID NO: 475078 - DNA, 19 bp, Mus musculus
  siRNA target sequence for Pum2 (NM_030723.1,678-696).
cgattgcaaagattttaat

SEQ ID NO: 475079 - DNA, 19 bp, Mus musculus
  siRNA target sequence for Pum2 (NM_030723.1,719-737).
cctctccaactgaagtagt

SEQ ID NO: 475080 - DNA, 19 bp, Mus musculus
  siRNA target sequence for Pum2 (NM_030723.1,720-738).
ctctccaactgaagtagtt

SEQ ID NO: 475081 - DNA, 19 bp, Mus musculus
  siRNA target sequence for Pum2 (NM_030723.1,741-759).
gcgccttggccctagtact

SEQ ID NO: 475082 - DNA, 19 bp, Mus musculus
  siRNA target sequence for Pum2 (NM_030723.1,742-760).
cgccttggccctagtacta

SEQ ID NO: 475083 - DNA, 19 bp, Mus musculus
  siRNA target sequence for Pum2 (NM_030723.1,744-762).
ccttggccctagtactaat

SEQ ID NO: 475084 - DNA, 19 bp, Mus musculus
  siRNA target sequence for Pum2 (NM_030723.1,773-791).
gattgggccctcttcctaa

SEQ ID NO: 475085 - DNA, 19 bp, Mus musculus
  siRNA target sequence for Pum2 (NM_030723.1,788-806).
ctaatccgacagcgaataa

SEQ ID NO: 475086 - DNA, 19 bp, Mus musculus
  siRNA target sequence for Pum2 (NM_030723.1,800-818).
cgaataaaccacttgttga

SEQ ID NO: 475087 - DNA, 19 bp, Mus musculus
  siRNA target sequence for Pum2 (NM_030723.1,808-826).
ccacttgttgaagaatttt

SEQ ID NO: 475088 - DNA, 19 bp, Mus musculus
  siRNA target sequence for Pum2 (NM_030723.1,839-857).
ctcagaatctggatgcaat

SEQ ID NO: 475089 - DNA, 19 bp, Mus musculus
  siRNA target sequence for Pum2 (NM_030723.1,885-903).
gtttgactatcctggtaat

SEQ ID NO: 475090 - DNA, 19 bp, Mus musculus
  siRNA target sequence for Pum2 (NM_030723.1,904-922).
caggtacccatggattctt

SEQ ID NO: 475091 - DNA, 19 bp, Mus musculus
  siRNA target sequence for Pum2 (NM_030723.1,906-924).
ggtacccatggattcttca

SEQ ID NO: 475092 - DNA, 19 bp, Mus musculus
  siRNA target sequence for Pum2 (NM_030723.1,929-947).
ctactgtaggcctttttga

SEQ ID NO: 475093 - DNA, 19 bp, Mus musculus
  siRNA target sequence for Pum2 (NM_030723.1,1040-1058).
cagctcagcagccacatat

SEQ ID NO: 475094 - DNA, 19 bp, Mus musculus
  siRNA target sequence for Pum2 (NM_030723.1,1102-1120).
ccaaatccatatattatta

SEQ ID NO: 475095 - DNA, 19 bp, Mus musculus
  siRNA target sequence for Pum2 (NM_030723.1,1229-1247).
gagtgtatccagccaattt

SEQ ID NO: 475096 - DNA, 19 bp, Mus musculus
  siRNA target sequence for Pum2 (NM_030723.1,1231-1249).
gtgtatccagccaatttat

SEQ ID NO: 475097 - DNA, 19 bp, Mus musculus
  siRNA target sequence for Pum2 (NM_030723.1,1345-1363).
gcaggtcagcgtcctatta

SEQ ID NO: 475098 - DNA, 19 bp, Mus musculus
  siRNA target sequence for Pum2 (NM_030723.1,1409-1427).
cagctgcaaacccaacttt

SEQ ID NO: 475099 - DNA, 19 bp, Mus musculus
  siRNA target sequence for Pum2 (NM_030723.1,1478-1496).
ctccaactgcctattatga

SEQ ID NO: 475100 - DNA, 19 bp, Mus musculus
  siRNA target sequence for Pum2 (NM_030723.1,1481-1499).
caactgcctattatgatca

SEQ ID NO: 475101 - DNA, 19 bp, Mus musculus
  siRNA target sequence for Pum2 (NM_030723.1,1543-1561).
ggagctccagtacgattaa

SEQ ID NO: 475102 - DNA, 19 bp, Mus musculus
  siRNA target sequence for Pum2 (NM_030723.1,1544-1562).
gagctccagtacgattaat

SEQ ID NO: 475103 - DNA, 19 bp, Mus musculus
  siRNA target sequence for Pum2 (NM_030723.1,1564-1582).
gctccaacacctgtcttaa

SEQ ID NO: 475104 - DNA, 19 bp, Mus musculus
  siRNA target sequence for Pum2 (NM_030723.1,1630-1648).
ggaactgcaaatagtctta

SEQ ID NO: 475105 - DNA, 19 bp, Mus musculus
  siRNA target sequence for Pum2 (NM_030723.1,1724-1742).
gcactaacctgcagtctaa

SEQ ID NO: 475106 - DNA, 19 bp, Mus musculus
  siRNA target sequence for Pum2 (NM_030723.1,1725-1743).
cactaacctgcagtctaat

SEQ ID NO: 475107 - DNA, 19 bp, Mus musculus
  siRNA target sequence for Pum2 (NM_030723.1,1732-1750).
ctgcagtctaattcatttt

SEQ ID NO: 475108 - DNA, 19 bp, Mus musculus
  siRNA target sequence for Pum2 (NM_030723.1,1782-1800).
gagcagctctttattctct

SEQ ID NO: 475109 - DNA, 19 bp, Mus musculus
  siRNA target sequence for Pum2 (NM_030723.1,1903-1921).
ggcagttctgcaagtagta

SEQ ID NO: 475110 - DNA, 19 bp, Mus musculus
  siRNA target sequence for Pum2 (NM_030723.1,1932-1950).
gagagagtctctatctact

SEQ ID NO: 475111 - DNA, 19 bp, Mus musculus
  siRNA target sequence for Pum2 (NM_030723.1,1957-1975).
gacttgtacaaaagatcta

SEQ ID NO: 475112 - DNA, 19 bp, Mus musculus
  siRNA target sequence for Pum2 (NM_030723.1,1988-2006).
cacccatagggcaaccatt

SEQ ID NO: 475113 - DNA, 19 bp, Mus musculus
  siRNA target sequence for Pum2 (NM_030723.1,1991-2009).
ccatagggcaaccatttta

SEQ ID NO: 475114 - DNA, 19 bp, Mus musculus
  siRNA target sequence for Pum2 (NM_030723.1,1996-2014).
gggcaaccattttacaata

SEQ ID NO: 475115 - DNA, 19 bp, Mus musculus
  siRNA target sequence for Pum2 (NM_030723.1,2028-2046).
ctcctctccaagtccaata

SEQ ID NO: 475116 - DNA, 19 bp, Mus musculus
  siRNA target sequence for Pum2 (NM_030723.1,2089-2107).
ccaccgccatcactttcat

SEQ ID NO: 475117 - DNA, 19 bp, Mus musculus
  siRNA target sequence for Pum2 (NM_030723.1,2118-2136).
ctcatccagtttgcattta

SEQ ID NO: 475118 - DNA, 19 bp, Mus musculus
  siRNA target sequence for Pum2 (NM_030723.1,2152-2170).
ggtagtggtcggtatatct

SEQ ID NO: 475119 - DNA, 19 bp, Mus musculus
  siRNA target sequence for Pum2 (NM_030723.1,2255-2273).
cttctcggctccgctataa

SEQ ID NO: 475120 - DNA, 19 bp, Mus musculus
  siRNA target sequence for Pum2 (NM_030723.1,2260-2278).
cggctccgctataatagat

SEQ ID NO: 475121 - DNA, 19 bp, Mus musculus
  siRNA target sequence for Pum2 (NM_030723.1,2298-2316).
ccgcagtaggttattggaa

SEQ ID NO: 475122 - DNA, 19 bp, Mus musculus
  siRNA target sequence for Pum2 (NM_030723.1,2303-2321).
gtaggttattggaagattt

SEQ ID NO: 475123 - DNA, 19 bp, Mus musculus
  siRNA target sequence for Pum2 (NM_030723.1,2365-2383).
ggacatatagtcgagtttt

SEQ ID NO: 475124 - DNA, 19 bp, Mus musculus
  siRNA target sequence for Pum2 (NM_030723.1,2394-2412).
gcatggttccagattcata

SEQ ID NO: 475125 - DNA, 19 bp, Mus musculus
  siRNA target sequence for Pum2 (NM_030723.1,2405-2423).
gattcatacagcaaaagct

SEQ ID NO: 475126 - DNA, 19 bp, Mus musculus
  siRNA target sequence for Pum2 (NM_030723.1,2435-2453).
ctccagctgagcgacaaat

SEQ ID NO: 475127 - DNA, 19 bp, Mus musculus
  siRNA target sequence for Pum2 (NM_030723.1,2445-2463).
gcgacaaatagtatttaat

SEQ ID NO: 475128 - DNA, 19 bp, Mus musculus
  siRNA target sequence for Pum2 (NM_030723.1,2473-2491).
caggcagcctatcaattaa

SEQ ID NO: 475129 - DNA, 19 bp, Mus musculus
  siRNA target sequence for Pum2 (NM_030723.1,2476-2494).
gcagcctatcaattaatga

SEQ ID NO: 475130 - DNA, 19 bp, Mus musculus
  siRNA target sequence for Pum2 (NM_030723.1,2500-2518).
gtttttggaaactatgtta

SEQ ID NO: 475131 - DNA, 19 bp, Mus musculus
  siRNA target sequence for Pum2 (NM_030723.1,2562-2580).
cctggctactcgtattcgt

SEQ ID NO: 475132 - DNA, 19 bp, Mus musculus
  siRNA target sequence for Pum2 (NM_030723.1,2579-2597).
gtggtcatgttctaccatt

SEQ ID NO: 475133 - DNA, 19 bp, Mus musculus
  siRNA target sequence for Pum2 (NM_030723.1,2610-2628).
gtatggctgccgtgttatt

SEQ ID NO: 475134 - DNA, 19 bp, Mus musculus
  siRNA target sequence for Pum2 (NM_030723.1,2615-2633).
gctgccgtgttattcaaaa

SEQ ID NO: 475135 - DNA, 19 bp, Mus musculus
  siRNA target sequence for Pum2 (NM_030723.1,2634-2652).
ggcgttagaatctatttct

SEQ ID NO: 475136 - DNA, 19 bp, Mus musculus
  siRNA target sequence for Pum2 (NM_030723.1,2635-2653).
gcgttagaatctatttctt

SEQ ID NO: 475137 - DNA, 19 bp, Mus musculus
  siRNA target sequence for Pum2 (NM_030723.1,2659-2677).
cagcaggtaattagtgaaa

SEQ ID NO: 475138 - DNA, 19 bp, Mus musculus
  siRNA target sequence for Pum2 (NM_030723.1,2664-2682).
ggtaattagtgaaatggtt

SEQ ID NO: 475139 - DNA, 19 bp, Mus musculus
  siRNA target sequence for Pum2 (NM_030723.1,2665-2683).
gtaattagtgaaatggtta

SEQ ID NO: 475140 - DNA, 19 bp, Mus musculus
  siRNA target sequence for Pum2 (NM_030723.1,2692-2710).
gatggccatgtacttaaat

SEQ ID NO: 475141 - DNA, 19 bp, Mus musculus
  siRNA target sequence for Pum2 (NM_030723.1,2696-2714).
gccatgtacttaaatgtgt

SEQ ID NO: 475142 - DNA, 19 bp, Mus musculus
  siRNA target sequence for Pum2 (NM_030723.1,2745-2763).
gaaatgcattgaatgtgtt

SEQ ID NO: 475143 - DNA, 19 bp, Mus musculus
  siRNA target sequence for Pum2 (NM_030723.1,2770-2788).
cagtcactgcagttcatca

SEQ ID NO: 475144 - DNA, 19 bp, Mus musculus
  siRNA target sequence for Pum2 (NM_030723.1,2795-2813).
ctttcaaaggacaagtatt

SEQ ID NO: 475145 - DNA, 19 bp, Mus musculus
  siRNA target sequence for Pum2 (NM_030723.1,2883-2901).
gaccttacccatcttagaa

SEQ ID NO: 475146 - DNA, 19 bp, Mus musculus
  siRNA target sequence for Pum2 (NM_030723.1,2940-2958).
gtatggcaattatgttatt

SEQ ID NO: 475147 - DNA, 19 bp, Mus musculus
  siRNA target sequence for Pum2 (NM_030723.1,3032-3050).
ccctgagtcaacacaaatt

SEQ ID NO: 475148 - DNA, 19 bp, Mus musculus
  siRNA target sequence for Pum2 (NM_030723.1,3033-3051).
cctgagtcaacacaaattt

SEQ ID NO: 475149 - DNA, 19 bp, Mus musculus
  siRNA target sequence for Pum2 (NM_030723.1,3052-3070).
gccagcaatgtagtagaaa

SEQ ID NO: 475150 - DNA, 19 bp, Mus musculus
  siRNA target sequence for Pum2 (NM_030723.1,3057-3075).
caatgtagtagaaaagtgt

SEQ ID NO: 475151 - DNA, 19 bp, Mus musculus
  siRNA target sequence for Pum2 (NM_030723.1,3061-3079).
gtagtagaaaagtgtgtta

SEQ ID NO: 475152 - DNA, 19 bp, Mus musculus
  siRNA target sequence for Pum2 (NM_030723.1,3092-3110).
gtgctgagagagctttact

SEQ ID NO: 475153 - DNA, 19 bp, Mus musculus
  siRNA target sequence for Pum2 (NM_030723.1,3095-3113).
ctgagagagctttactgat

SEQ ID NO: 475154 - DNA, 19 bp, Mus musculus
  siRNA target sequence for Pum2 (NM_030723.1,3101-3119).
gagctttactgattgatga

SEQ ID NO: 475155 - DNA, 19 bp, Mus musculus
  siRNA target sequence for Pum2 (NM_030723.1,3120-3138).
ggtctgctgtcagaatgat

SEQ ID NO: 475156 - DNA, 19 bp, Mus musculus
  siRNA target sequence for Pum2 (NM_030723.1,3215-3233).
ctgagcctgcgcagagaaa

SEQ ID NO: 475157 - DNA, 19 bp, Mus musculus
  siRNA target sequence for Pum2 (NM_030723.1,3220-3238).
cctgcgcagagaaagataa

SEQ ID NO: 475158 - DNA, 19 bp, Mus musculus
  siRNA target sequence for Pum2 (NM_030723.1,3221-3239).
ctgcgcagagaaagataat

SEQ ID NO: 475159 - DNA, 19 bp, Mus musculus
  siRNA target sequence for Pum2 (NM_030723.1,3223-3241).
gcgcagagaaagataatca

SEQ ID NO: 475160 - DNA, 19 bp, Mus musculus
  siRNA target sequence for Pum2 (NM_030723.1,3249-3267).
gattcgacctcatattact

SEQ ID NO: 475161 - DNA, 19 bp, Mus musculus
  siRNA target sequence for Pum2 (NM_030723.1,3269-3287).
ctcttcgcaaatacacata

SEQ ID NO: 475162 - DNA, 19 bp, Mus musculus
  siRNA target sequence for Raly (NM_023130.1,506-524).
caatgtaaccaacaagaat

SEQ ID NO: 475163 - DNA, 19 bp, Mus musculus
  siRNA target sequence for Raly (NM_023130.1,554-572).
catcggaaatctaaacaca

SEQ ID NO: 475164 - DNA, 19 bp, Mus musculus
  siRNA target sequence for Raly (NM_023130.1,753-771).
ggagagcccaagcctaata

SEQ ID NO: 475165 - DNA, 19 bp, Mus musculus
  siRNA target sequence for Raly (NM_023130.1,809-827).
caggctgtttgattatcga

SEQ ID NO: 475166 - DNA, 19 bp, Mus musculus
  siRNA target sequence for Raly (NM_023130.1,869-887).
gaagcgaccccgtgttaca

SEQ ID NO: 475167 - DNA, 19 bp, Mus musculus
  siRNA target sequence for Raly (NM_023130.1,896-914).
ggttcgccgtgtcaaaact

SEQ ID NO: 475168 - DNA, 19 bp, Mus musculus
  siRNA target sequence for Raly (NM_023130.1,897-915).
gttcgccgtgtcaaaacta

SEQ ID NO: 475169 - DNA, 19 bp, Mus musculus
  siRNA target sequence for Raly (NM_023130.1,902-920).
ccgtgtcaaaactacgata

SEQ ID NO: 475170 - DNA, 19 bp, Mus musculus
  siRNA target sequence for Raly (NM_023130.1,960-978).
ggctcagccaaaatcaagt

SEQ ID NO: 475171 - DNA, 19 bp, Mus musculus
  siRNA target sequence for Raly (NM_023130.1,961-979).
gctcagccaaaatcaagtt

SEQ ID NO: 475172 - DNA, 19 bp, Mus musculus
  siRNA target sequence for Raly (NM_023130.1,964-982).
cagccaaaatcaagttaaa

SEQ ID NO: 475173 - DNA, 19 bp, Mus musculus
  siRNA target sequence for Raly (NM_023130.1,966-984).
gccaaaatcaagttaaaga

SEQ ID NO: 475174 - DNA, 19 bp, Mus musculus
  siRNA target sequence for Raly (NM_023130.1,1296-1314).
gagggactgctaacacata

SEQ ID NO: 475175 - DNA, 19 bp, Mus musculus
  siRNA target sequence for Rbm9 (NM_053104.3,744-762).
ggccagaccagtgaacata

SEQ ID NO: 475176 - DNA, 19 bp, Mus musculus
  siRNA target sequence for Rbm9 (NM_053104.3,884-902).
gacacaaagtagtgaaaat

SEQ ID NO: 475177 - DNA, 19 bp, Mus musculus
  siRNA target sequence for Rbm9 (NM_053104.3,919-937).
cgcccaagcgactacatgt

SEQ ID NO: 475178 - DNA, 19 bp, Mus musculus
  siRNA target sequence for Rbm9 (NM_053104.3,926-944).
gcgactacatgtctctaat

SEQ ID NO: 475179 - DNA, 19 bp, Mus musculus
  siRNA target sequence for Rbm9 (NM_053104.3,927-945).
cgactacatgtctctaata

SEQ ID NO: 475180 - DNA, 19 bp, Mus musculus
  siRNA target sequence for Rbm9 (NM_053104.3,1155-1173).
cgggtcatgaccaacaaga

SEQ ID NO: 475181 - DNA, 19 bp, Mus musculus
  siRNA target sequence for Rbm9 (NM_053104.3,1156-1174).
gggtcatgaccaacaagaa

SEQ ID NO: 475182 - DNA, 19 bp, Mus musculus
  siRNA target sequence for Rbm9 (NM_053104.3,1175-1193).
gatggtcacgccatatgca

SEQ ID NO: 475183 - DNA, 19 bp, Mus musculus
  siRNA target sequence for Rbm9 (NM_053104.3,1178-1196).
ggtcacgccatatgcaaat

SEQ ID NO: 475184 - DNA, 19 bp, Mus musculus
  siRNA target sequence for Rbm9 (NM_053104.3,1227-1245).
gtgtatggtcctgagttat

SEQ ID NO: 475185 - DNA, 19 bp, Mus musculus
  siRNA target sequence for Rbm9 (NM_053104.3,1229-1247).
gtatggtcctgagttatat

SEQ ID NO: 475186 - DNA, 19 bp, Mus musculus
  siRNA target sequence for Rbm9 (NM_053104.3,1480-1498).
cctatccaggtgtggttta

SEQ ID NO: 475187 - DNA, 19 bp, Mus musculus
  siRNA target sequence for Rbm9 (NM_053104.3,1523-1541).
cctctatggtggatatgca

SEQ ID NO: 475188 - DNA, 19 bp, Mus musculus
  siRNA target sequence for Rbm9 (NM_053104.3,1683-1701).
ggcgctgtggcgagtttgt

SEQ ID NO: 475189 - DNA, 19 bp, Mus musculus
  siRNA target sequence for Rbm9 (NM_053104.3,1684-1702).
gcgctgtggcgagtttgta

SEQ ID NO: 475190 - DNA, 19 bp, Mus musculus
  siRNA target sequence for Rbms1 (NM_020296.1,281-299).
gcaccaccagcagtaataa

SEQ ID NO: 475191 - DNA, 19 bp, Mus musculus
  siRNA target sequence for Rbms1 (NM_020296.1,374-392).
ccaataccactgatcaaga

SEQ ID NO: 475192 - DNA, 19 bp, Mus musculus
  siRNA target sequence for Rbms1 (NM_020296.1,431-449).
ccacaaaggcgattttgga

SEQ ID NO: 475193 - DNA, 19 bp, Mus musculus
  siRNA target sequence for Rbms1 (NM_020296.1,432-450).
cacaaaggcgattttggat

SEQ ID NO: 475194 - DNA, 19 bp, Mus musculus
  siRNA target sequence for Rbms1 (NM_020296.1,645-663).
caaaccctttggacaagtt

SEQ ID NO: 475195 - DNA, 19 bp, Mus musculus
  siRNA target sequence for Rbms1 (NM_020296.1,655-673).
ggacaagttatttctacaa

SEQ ID NO: 475196 - DNA, 19 bp, Mus musculus
  siRNA target sequence for Rbms1 (NM_020296.1,800-818).
ctgctcctacagaaccttt

SEQ ID NO: 475197 - DNA, 19 bp, Mus musculus
  siRNA target sequence for Rbms1 (NM_020296.1,833-851).
cggatggaggacagaaaaa

SEQ ID NO: 475198 - DNA, 19 bp, Mus musculus
  siRNA target sequence for Rbms1 (NM_020296.1,938-956).
ctacagctgctctacacaa

SEQ ID NO: 475199 - DNA, 19 bp, Mus musculus
  siRNA target sequence for Rbms1 (NM_020296.1,985-1003).
gccacaaaccgaatgatca

SEQ ID NO: 475200 - DNA, 19 bp, Mus musculus
  siRNA target sequence for Rbms1 (NM_020296.1,993-1011).
ccgaatgatcactcaaact

SEQ ID NO: 475201 - DNA, 19 bp, Mus musculus
  siRNA target sequence for Rbms1 (NM_020296.1,994-1012).
cgaatgatcactcaaactt

SEQ ID NO: 475202 - DNA, 19 bp, Mus musculus
  siRNA target sequence for Rbms1 (NM_020296.1,1010-1028).
cttctcttacaccctatat

SEQ ID NO: 475203 - DNA, 19 bp, Mus musculus
  siRNA target sequence for Rbms1 (NM_020296.1,1015-1033).
cttacaccctatattgcat

SEQ ID NO: 475204 - DNA, 19 bp, Mus musculus
  siRNA target sequence for Rbms1 (NM_020296.1,1074-1092).
gcagcctcagccgtacatt

SEQ ID NO: 475205 - DNA, 19 bp, Mus musculus
  siRNA target sequence for Rbms1 (NM_020296.1,1099-1117).
catcctggtgccgtgttaa

SEQ ID NO: 475206 - DNA, 19 bp, Mus musculus
  siRNA target sequence for Rbms1 (NM_020296.1,1121-1139).
cctcaatggaacataccat

SEQ ID NO: 475207 - DNA, 19 bp, Mus musculus
  siRNA target sequence for Rbms1 (NM_020296.1,1147-1165).
caacctgcttccatgatca

SEQ ID NO: 475208 - DNA, 19 bp, Mus musculus
  siRNA target sequence for Rbms1 (NM_020296.1,1202-1220).
gcagcaccggaacatacat

SEQ ID NO: 475209 - DNA, 19 bp, Mus musculus
  siRNA target sequence for Rbms1 (NM_020296.1,1248-1266).
ctacttgccacagtataca

SEQ ID NO: 475210 - DNA, 19 bp, Mus musculus
  siRNA target sequence for Rbms1 (NM_020296.1,1339-1357).
gaccattctccatatacct

SEQ ID NO: 475211 - DNA, 19 bp, Mus musculus
  siRNA target sequence for Rbms2 (NM_019711.1,69-87).
cgacttttggctataacaa

SEQ ID NO: 475212 - DNA, 19 bp, Mus musculus
  siRNA target sequence for Rbms2 (NM_019711.1,272-290).
ccgtatggcaagattgtct

SEQ ID NO: 475213 - DNA, 19 bp, Mus musculus
  siRNA target sequence for Rbms2 (NM_019711.1,437-455).
gaccctacaaacttataca

SEQ ID NO: 475214 - DNA, 19 bp, Mus musculus
  siRNA target sequence for Rbms2 (NM_019711.1,618-636).
cccactttaatggaaagta

SEQ ID NO: 475215 - DNA, 19 bp, Mus musculus
  siRNA target sequence for Rbms2 (NM_019711.1,693-711).
ctgacggtgggccaaagaa

SEQ ID NO: 475216 - DNA, 19 bp, Mus musculus
  siRNA target sequence for RbmY1a1 (NM_011253.1,273-291).
cagacaaaagactcttcaa

SEQ ID NO: 475217 - DNA, 19 bp, Mus musculus
  siRNA target sequence for RbmY1a1 (NM_011253.1,311-329).
gaccagtagcacgtgttat

SEQ ID NO: 475218 - DNA, 19 bp, Mus musculus
  siRNA target sequence for RbmY1a1 (NM_011253.1,314-332).
cagtagcacgtgttatttt

SEQ ID NO: 475219 - DNA, 19 bp, Mus musculus
  siRNA target sequence for RbmY1a1 (NM_011253.1,316-334).
gtagcacgtgttattttga

SEQ ID NO: 475220 - DNA, 19 bp, Mus musculus
  siRNA target sequence for RbmY1a1 (NM_011253.1,319-337).
gcacgtgttattttgatga

SEQ ID NO: 475221 - DNA, 19 bp, Mus musculus
  siRNA target sequence for RbmY1a1 (NM_011253.1,340-358).
gatcgtgaaactaagaagt

SEQ ID NO: 475222 - DNA, 19 bp, Mus musculus
  siRNA target sequence for RbmY1a1 (NM_011253.1,343-361).
cgtgaaactaagaagtcta

SEQ ID NO: 475223 - DNA, 19 bp, Mus musculus
  siRNA target sequence for RbmY1a1 (NM_011253.1,527-545).
ccagaggtgcttcaagaat

SEQ ID NO: 475224 - DNA, 19 bp, Mus musculus
  siRNA target sequence for RbmY1a1 (NM_011253.1,528-546).
cagaggtgcttcaagaatt

SEQ ID NO: 475225 - DNA, 19 bp, Mus musculus
  siRNA target sequence for RbmY1a1 (NM_011253.1,606-624).
cttgggtggtgatagatat

SEQ ID NO: 475226 - DNA, 19 bp, Mus musculus
  siRNA target sequence for RbmY1a1 (NM_011253.1,609-627).
gggtggtgatagatatact

SEQ ID NO: 475227 - DNA, 19 bp, Mus musculus
  siRNA target sequence for RbmY1a1 (NM_011253.1,616-634).
gatagatatactcctaatt

SEQ ID NO: 475228 - DNA, 19 bp, Mus musculus
  siRNA target sequence for RbmY1a1 (NM_011253.1,620-638).
gatatactcctaatttcaa

SEQ ID NO: 475229 - DNA, 19 bp, Mus musculus
  siRNA target sequence for RbmY1a1 (NM_011253.1,653-671).
ggagacactttgcagttaa

SEQ ID NO: 475230 - DNA, 19 bp, Mus musculus
  siRNA target sequence for RbmY1a1 (NM_011253.1,692-710).
gggatgatcccccttctaa

SEQ ID NO: 475231 - DNA, 19 bp, Mus musculus
  siRNA target sequence for RbmY1a1 (NM_011253.1,693-711).
ggatgatcccccttctaaa

SEQ ID NO: 475232 - DNA, 19 bp, Mus musculus
  siRNA target sequence for RbmY1a1 (NM_011253.1,694-712).
gatgatcccccttctaaaa

SEQ ID NO: 475233 - DNA, 19 bp, Mus musculus
  siRNA target sequence for RbmY1a1 (NM_011253.1,727-745).
gctcagacaagaagcaata

SEQ ID NO: 475234 - DNA, 19 bp, Mus musculus
  siRNA target sequence for RbmY1a1 (NM_011253.1,766-784).
ccacatcgaagagagattt

SEQ ID NO: 475235 - DNA, 19 bp, Mus musculus
  siRNA target sequence for RbmY1a1 (NM_011253.1,769-787).
catcgaagagagatttcta

SEQ ID NO: 475236 - DNA, 19 bp, Mus musculus
  siRNA target sequence for RbmY1a1 (NM_011253.1,810-828).
ggcgtcttccagaagagat

SEQ ID NO: 475237 - DNA, 19 bp, Mus musculus
  siRNA target sequence for RbmY1a1 (NM_011253.1,815-833).
cttccagaagagatgagta

SEQ ID NO: 475238 - DNA, 19 bp, Mus musculus
  siRNA target sequence for RbmY1a1 (NM_011253.1,826-844).
gatgagtatccattaccaa

SEQ ID NO: 475239 - DNA, 19 bp, Mus musculus
  siRNA target sequence for RbmY1a1 (NM_011253.1,853-871).
ggccagtcttctaatgata

SEQ ID NO: 475240 - DNA, 19 bp, Mus musculus
  siRNA target sequence for RbmY1a1 (NM_011253.1,918-936).
ccactctcgggaagaaagt

SEQ ID NO: 475241 - DNA, 19 bp, Mus musculus
  siRNA target sequence for RbmY1a1 (NM_011253.1,931-949).
gaaagtgcatctaaagtct

SEQ ID NO: 475242 - DNA, 19 bp, Mus musculus
  siRNA target sequence for RbmY1a1 (NM_011253.1,973-991).
ggaggacgtgatagagatt

SEQ ID NO: 475243 - DNA, 19 bp, Mus musculus
  siRNA target sequence for RbmY1a1 (NM_011253.1,976-994).
ggacgtgatagagatttct

SEQ ID NO: 475244 - DNA, 19 bp, Mus musculus
  siRNA target sequence for RbmY1a1 (NM_011253.1,1076-1094).
gaaacaaccgctatgatga

SEQ ID NO: 475245 - DNA, 19 bp, Mus musculus
  siRNA target sequence for RbmY1a1 (NM_011253.1,1080-1098).
caaccgctatgatgactat

SEQ ID NO: 475246 - DNA, 19 bp, Mus musculus
  siRNA target sequence for RbmY1a1 (NM_011253.1,1084-1102).
cgctatgatgactatagta

SEQ ID NO: 475247 - DNA, 19 bp, Mus musculus
  siRNA target sequence for RbmY1a1 (NM_011253.1,1085-1103).
gctatgatgactatagtaa

SEQ ID NO: 475248 - DNA, 19 bp, Mus musculus
  siRNA target sequence for RbmY1a1 (NM_011253.1,1100-1118).
gtaactcacaagatggata

SEQ ID NO: 475249 - DNA, 19 bp, Mus musculus
  siRNA target sequence for RbmY1a1 (NM_011253.1,1104-1122).
ctcacaagatggatatggt

SEQ ID NO: 475250 - DNA, 19 bp, Mus musculus
  siRNA target sequence for RbmY1a1 (NM_011253.1,1124-1142).
gaagaggagaaccatacat

SEQ ID NO: 475251 - DNA, 19 bp, Mus musculus
  siRNA target sequence for RbmY1a1 (NM_011253.1,1130-1148).
gagaaccatacataagcaa

SEQ ID NO: 475252 - DNA, 19 bp, Mus musculus
  siRNA target sequence for RbmY1a1 (NM_011253.1,1145-1163).
gcaaccgaagtaacatata

SEQ ID NO: 475253 - DNA, 19 bp, Mus musculus
  siRNA target sequence for RbmY1a1 (NM_011253.1,1149-1167).
ccgaagtaacatatactca

SEQ ID NO: 475254 - DNA, 19 bp, Mus musculus
  siRNA target sequence for RbmY1a1 (NM_011253.1,1181-1199).
gtagtggtagacaagaagt

SEQ ID NO: 475255 - DNA, 19 bp, Mus musculus
  siRNA target sequence for RbmY1a1 (NM_011253.1,1200-1218).
gcttccaccacctattgat

SEQ ID NO: 475256 - DNA, 19 bp, Mus musculus
  siRNA target sequence for RbmY1a1 (NM_011253.1,1285-1303).
gcatctcgtgaatcataca

SEQ ID NO: 475257 - DNA, 19 bp, Mus musculus
  siRNA target sequence for RbmY1a1 (NM_011253.1,1291-1309).
cgtgaatcatacagtagta

SEQ ID NO: 475258 - DNA, 19 bp, Mus musculus
  siRNA target sequence for RbmY1a1 (NM_011253.1,1292-1310).
gtgaatcatacagtagtaa

SEQ ID NO: 475259 - DNA, 19 bp, Mus musculus
  siRNA target sequence for RbmY1a1 (NM_011253.1,1294-1312).
gaatcatacagtagtaata

SEQ ID NO: 475260 - DNA, 19 bp, Mus musculus
  siRNA target sequence for RbmY1a1 (NM_011253.1,1298-1316).
catacagtagtaataccaa

SEQ ID NO: 475261 - DNA, 19 bp, Mus musculus
  siRNA target sequence for Rbpms (NM_019733.1,346-364).
ggaggtccggaccctattt

SEQ ID NO: 475262 - DNA, 19 bp, Mus musculus
  siRNA target sequence for Rbpms (NM_019733.1,350-368).
gtccggaccctatttgtca

SEQ ID NO: 475263 - DNA, 19 bp, Mus musculus
  siRNA target sequence for Rbpms (NM_019733.1,443-461).
ctcataaagctcacatcta

SEQ ID NO: 475264 - DNA, 19 bp, Mus musculus
  siRNA target sequence for Rbpms (NM_019733.1,445-463).
cataaagctcacatctaaa

SEQ ID NO: 475265 - DNA, 19 bp, Mus musculus
  siRNA target sequence for Rbpms (NM_019733.1,464-482).
cagcccgtaggctttgtca

SEQ ID NO: 475266 - DNA, 19 bp, Mus musculus
  siRNA target sequence for Rbpms (NM_019733.1,468-486).
ccgtaggctttgtcagttt

SEQ ID NO: 475267 - DNA, 19 bp, Mus musculus
  siRNA target sequence for Rbpms (NM_019733.1,706-724).
ccccagtagccctgaagtt

SEQ ID NO: 475268 - DNA, 19 bp, Mus musculus
  siRNA target sequence for Rdbp (NM_138580.1,123-141).
gagccagggcggtgtcaaa

SEQ ID NO: 475269 - DNA, 19 bp, Mus musculus
  siRNA target sequence for Rdbp (NM_138580.1,226-244).
gccatcaaggctgaaacta

SEQ ID NO: 475270 - DNA, 19 bp, Mus musculus
  siRNA target sequence for Rdbp (NM_138580.1,227-245).
ccatcaaggctgaaactaa

SEQ ID NO: 475271 - DNA, 19 bp, Mus musculus
  siRNA target sequence for Rdbp (NM_138580.1,484-502).
ccacctcgaggctttgact

SEQ ID NO: 475272 - DNA, 19 bp, Mus musculus
  siRNA target sequence for Rdbp (NM_138580.1,558-576).
cagcagggaccgaagtcat

SEQ ID NO: 475273 - DNA, 19 bp, Mus musculus
  siRNA target sequence for Rdbp (NM_138580.1,854-872).
ctccctttggaaatatcat

SEQ ID NO: 475274 - DNA, 19 bp, Mus musculus
  siRNA target sequence for Rdbp (NM_138580.1,1023-1041).
cgctgctactggcaaatct

SEQ ID NO: 475275 - DNA, 19 bp, Mus musculus
  siRNA target sequence for Rdbp (NM_138580.1,1025-1043).
ctgctactggcaaatctgt

SEQ ID NO: 475276 - DNA, 19 bp, Mus musculus
  siRNA target sequence for Rdbp (NM_138580.1,1108-1126).
gtgtacagtgacgatctat

SEQ ID NO: 475277 - DNA, 19 bp, Mus musculus
  siRNA target sequence for Rnasel (NM_011882.1,169-187).
gaccccggattataacaca

SEQ ID NO: 475278 - DNA, 19 bp, Mus musculus
  siRNA target sequence for Rnasel (NM_011882.1,223-241).
gaccgttgtcgaagatgat

SEQ ID NO: 475279 - DNA, 19 bp, Mus musculus
  siRNA target sequence for Rnasel (NM_011882.1,226-244).
cgttgtcgaagatgattct

SEQ ID NO: 475280 - DNA, 19 bp, Mus musculus
  siRNA target sequence for Rnasel (NM_011882.1,227-245).
gttgtcgaagatgattctt

SEQ ID NO: 475281 - DNA, 19 bp, Mus musculus
  siRNA target sequence for Rnasel (NM_011882.1,278-296).
gtcagggtccagcaattgt

SEQ ID NO: 475282 - DNA, 19 bp, Mus musculus
  siRNA target sequence for Rnasel (NM_011882.1,280-298).
cagggtccagcaattgtta

SEQ ID NO: 475283 - DNA, 19 bp, Mus musculus
  siRNA target sequence for Rnasel (NM_011882.1,282-300).
gggtccagcaattgttaga

SEQ ID NO: 475284 - DNA, 19 bp, Mus musculus
  siRNA target sequence for Rnasel (NM_011882.1,283-301).
ggtccagcaattgttagaa

SEQ ID NO: 475285 - DNA, 19 bp, Mus musculus
  siRNA target sequence for Rnasel (NM_011882.1,284-302).
gtccagcaattgttagaaa

SEQ ID NO: 475286 - DNA, 19 bp, Mus musculus
  siRNA target sequence for Rnasel (NM_011882.1,369-387).
ctggcagggtagacattgt

SEQ ID NO: 475287 - DNA, 19 bp, Mus musculus
  siRNA target sequence for Rnasel (NM_011882.1,372-390).
gcagggtagacattgtgaa

SEQ ID NO: 475288 - DNA, 19 bp, Mus musculus
  siRNA target sequence for Rnasel (NM_011882.1,388-406).
gaacctcctgcttagtcat

SEQ ID NO: 475289 - DNA, 19 bp, Mus musculus
  siRNA target sequence for Rnasel (NM_011882.1,437-455).
ggggccacccccttcatca

SEQ ID NO: 475290 - DNA, 19 bp, Mus musculus
  siRNA target sequence for Rnasel (NM_011882.1,504-522).
gtggtgcagacgtcaatga

SEQ ID NO: 475291 - DNA, 19 bp, Mus musculus
  siRNA target sequence for Rnasel (NM_011882.1,506-524).
ggtgcagacgtcaatgagt

SEQ ID NO: 475292 - DNA, 19 bp, Mus musculus
  siRNA target sequence for Rnasel (NM_011882.1,600-618).
ctaagggagccaatgtgaa

SEQ ID NO: 475293 - DNA, 19 bp, Mus musculus
  siRNA target sequence for Rnasel (NM_011882.1,717-735).
gaattctcctcaatgacat

SEQ ID NO: 475294 - DNA, 19 bp, Mus musculus
  siRNA target sequence for Rnasel (NM_011882.1,793-811).
gctgaactgggattgtgaa

SEQ ID NO: 475295 - DNA, 19 bp, Mus musculus
  siRNA target sequence for Rnasel (NM_011882.1,815-833).
gtggaggagattacttcaa

SEQ ID NO: 475296 - DNA, 19 bp, Mus musculus
  siRNA target sequence for Rnasel (NM_011882.1,942-960).
gtcgggaaggcataaacat

SEQ ID NO: 475297 - DNA, 19 bp, Mus musculus
  siRNA target sequence for Rnasel (NM_011882.1,945-963).
gggaaggcataaacataga

SEQ ID NO: 475298 - DNA, 19 bp, Mus musculus
  siRNA target sequence for Rnasel (NM_011882.1,946-964).
ggaaggcataaacatagat

SEQ ID NO: 475299 - DNA, 19 bp, Mus musculus
  siRNA target sequence for Rnasel (NM_011882.1,985-1003).
gacagctctgctaattgct

SEQ ID NO: 475300 - DNA, 19 bp, Mus musculus
  siRNA target sequence for Rnasel (NM_011882.1,1083-1101).
ccaggaggaatcatgacta

SEQ ID NO: 475301 - DNA, 19 bp, Mus musculus
  siRNA target sequence for Rnasel (NM_011882.1,1084-1102).
caggaggaatcatgactat

SEQ ID NO: 475302 - DNA, 19 bp, Mus musculus
  siRNA target sequence for Rnasel (NM_011882.1,1086-1104).
ggaggaatcatgactatca

SEQ ID NO: 475303 - DNA, 19 bp, Mus musculus
  siRNA target sequence for Rnasel (NM_011882.1,1114-1132).
gcttctcctcccttatgta

SEQ ID NO: 475304 - DNA, 19 bp, Mus musculus
  siRNA target sequence for Rnasel (NM_011882.1,1120-1138).
cctcccttatgtagctaat

SEQ ID NO: 475305 - DNA, 19 bp, Mus musculus
  siRNA target sequence for Rnasel (NM_011882.1,1123-1141).
cccttatgtagctaatcct

SEQ ID NO: 475306 - DNA, 19 bp, Mus musculus
  siRNA target sequence for Rnasel (NM_011882.1,1226-1244).
cccatgattggcaaactca

SEQ ID NO: 475307 - DNA, 19 bp, Mus musculus
  siRNA target sequence for Rnasel (NM_011882.1,1227-1245).
ccatgattggcaaactcaa

SEQ ID NO: 475308 - DNA, 19 bp, Mus musculus
  siRNA target sequence for Rnasel (NM_011882.1,1300-1318).
cctagggatctatgacaat

SEQ ID NO: 475309 - DNA, 19 bp, Mus musculus
  siRNA target sequence for Rnasel (NM_011882.1,1354-1372).
cccacgtggatgtaaggaa

SEQ ID NO: 475310 - DNA, 19 bp, Mus musculus
  siRNA target sequence for Rnasel (NM_011882.1,1392-1410).
gcggtgaccacagtaactt

SEQ ID NO: 475311 - DNA, 19 bp, Mus musculus
  siRNA target sequence for Rnasel (NM_011882.1,1393-1411).
cggtgaccacagtaactta

SEQ ID NO: 475312 - DNA, 19 bp, Mus musculus
  siRNA target sequence for Rnasel (NM_011882.1,1395-1413).
gtgaccacagtaacttagt

SEQ ID NO: 475313 - DNA, 19 bp, Mus musculus
  siRNA target sequence for Rnasel (NM_011882.1,1432-1450).
ggacgataagggctgttta

SEQ ID NO: 475314 - DNA, 19 bp, Mus musculus
  siRNA target sequence for Rnasel (NM_011882.1,1433-1451).
gacgataagggctgtttat

SEQ ID NO: 475315 - DNA, 19 bp, Mus musculus
  siRNA target sequence for Rnasel (NM_011882.1,1435-1453).
cgataagggctgtttatat

SEQ ID NO: 475316 - DNA, 19 bp, Mus musculus
  siRNA target sequence for Rnasel (NM_011882.1,1522-1540).
gaacggggaagataagttt

SEQ ID NO: 475317 - DNA, 19 bp, Mus musculus
  siRNA target sequence for Rnasel (NM_011882.1,1544-1562).
cacagcatcctattatcta

SEQ ID NO: 475318 - DNA, 19 bp, Mus musculus
  siRNA target sequence for Rnasel (NM_011882.1,1546-1564).
cagcatcctattatctata

SEQ ID NO: 475319 - DNA, 19 bp, Mus musculus
  siRNA target sequence for Rnasel (NM_011882.1,1548-1566).
gcatcctattatctatatt

SEQ ID NO: 475320 - DNA, 19 bp, Mus musculus
  siRNA target sequence for Rnasel (NM_011882.1,1583-1601).
ctacacttgcatggatatt

SEQ ID NO: 475321 - DNA, 19 bp, Mus musculus
  siRNA target sequence for Rnasel (NM_011882.1,1739-1757).
gttctctacgtggtaatga

SEQ ID NO: 475322 - DNA, 19 bp, Mus musculus
  siRNA target sequence for Rnasel (NM_011882.1,1771-1789).
ctttgagacactaaagact

SEQ ID NO: 475323 - DNA, 19 bp, Mus musculus
  siRNA target sequence for Rnasel (NM_011882.1,1777-1795).
gacactaaagactcagaat

SEQ ID NO: 475324 - DNA, 19 bp, Mus musculus
  siRNA target sequence for Rnasel (NM_011882.1,1779-1797).
cactaaagactcagaatga

SEQ ID NO: 475325 - DNA, 19 bp, Mus musculus
  siRNA target sequence for Rnasel (NM_011882.1,1901-1919).
ggccatcctttcttttgga

SEQ ID NO: 475326 - DNA, 19 bp, Mus musculus
  siRNA target sequence for Rnasel (NM_011882.1,1945-1963).
ccggaatgtgggaaatgaa

SEQ ID NO: 475327 - DNA, 19 bp, Mus musculus
  siRNA target sequence for Rnasel (NM_011882.1,2045-2063).
gaccagtggacatctaaga

SEQ ID NO: 475328 - DNA, 19 bp, Mus musculus
  siRNA target sequence for Rnasel (NM_011882.1,2055-2073).
catctaagatcgacaaaaa

SEQ ID NO: 475329 - DNA, 19 bp, Mus musculus
  siRNA target sequence for Rnasel (NM_011882.1,2119-2137).
cccttatcaggatactgta

SEQ ID NO: 475330 - DNA, 19 bp, Mus musculus
  siRNA target sequence for Rnasel (NM_011882.1,2160-2178).
ggaatataggcgaacacat

SEQ ID NO: 475331 - DNA, 19 bp, Mus musculus
  siRNA target sequence for Rnasel (NM_011882.1,2216-2234).
ggagatccttctcgttatt

SEQ ID NO: 475332 - DNA, 19 bp, Mus musculus
  siRNA target sequence for Rnasel (NM_011882.1,2244-2262).
catttccagatcttgtaat

SEQ ID NO: 475333 - DNA, 19 bp, Mus musculus
  siRNA target sequence for Rnasel (NM_011882.1,2252-2270).
gatcttgtaatctatatct

SEQ ID NO: 475334 - DNA, 19 bp, Mus musculus
  siRNA target sequence for Rnasel (NM_011882.1,2255-2273).
cttgtaatctatatctaca

SEQ ID NO: 475335 - DNA, 19 bp, Mus musculus
  siRNA target sequence for Rnasel (NM_011882.1,2258-2276).
gtaatctatatctacaaga

SEQ ID NO: 475336 - DNA, 19 bp, Mus musculus
  siRNA target sequence for Rnasel (NM_011882.1,2348-2366).
ggaccagggggcatacaga

SEQ ID NO: 475337 - DNA, 19 bp, Mus musculus
  siRNA target sequence for Rnaset2 (NM_026611.1,203-221).
catgagtggaaaaaactaa

SEQ ID NO: 475338 - DNA, 19 bp, Mus musculus
  siRNA target sequence for Rnaset2 (NM_026611.1,246-264).
cagtatgcaaggaggttaa

SEQ ID NO: 475339 - DNA, 19 bp, Mus musculus
  siRNA target sequence for Rnaset2 (NM_026611.1,248-266).
gtatgcaaggaggttaaca

SEQ ID NO: 475340 - DNA, 19 bp, Mus musculus
  siRNA target sequence for Rnaset2 (NM_026611.1,270-288).
gccaagactctctggatta

SEQ ID NO: 475341 - DNA, 19 bp, Mus musculus
  siRNA target sequence for Rnaset2 (NM_026611.1,310-328).
gcccgatagagcagaagat

SEQ ID NO: 475342 - DNA, 19 bp, Mus musculus
  siRNA target sequence for Rnaset2 (NM_026611.1,311-329).
cccgatagagcagaagatt

SEQ ID NO: 475343 - DNA, 19 bp, Mus musculus
  siRNA target sequence for Rnaset2 (NM_026611.1,313-331).
cgatagagcagaagattgt

SEQ ID NO: 475344 - DNA, 19 bp, Mus musculus
  siRNA target sequence for Rnaset2 (NM_026611.1,314-332).
gatagagcagaagattgta

SEQ ID NO: 475345 - DNA, 19 bp, Mus musculus
  siRNA target sequence for Rnaset2 (NM_026611.1,339-357).
cctggcactttaacttaga

SEQ ID NO: 475346 - DNA, 19 bp, Mus musculus
  siRNA target sequence for Rnaset2 (NM_026611.1,342-360).
ggcactttaacttagatga

SEQ ID NO: 475347 - DNA, 19 bp, Mus musculus
  siRNA target sequence for Rnaset2 (NM_026611.1,371-389).
cttttgcgagacatgaaga

SEQ ID NO: 475348 - DNA, 19 bp, Mus musculus
  siRNA target sequence for Rnaset2 (NM_026611.1,391-409).
ctactggcccgatgtgatt

SEQ ID NO: 475349 - DNA, 19 bp, Mus musculus
  siRNA target sequence for Rnaset2 (NM_026611.1,404-422).
gtgattcaccggtcttcta

SEQ ID NO: 475350 - DNA, 19 bp, Mus musculus
  siRNA target sequence for Rnaset2 (NM_026611.1,406-424).
gattcaccggtcttctaat

SEQ ID NO: 475351 - DNA, 19 bp, Mus musculus
  siRNA target sequence for Rnaset2 (NM_026611.1,439-457).
gaaacatgagtgggttaaa

SEQ ID NO: 475352 - DNA, 19 bp, Mus musculus
  siRNA target sequence for Rnaset2 (NM_026611.1,476-494).
caggtagacgccctcaatt

SEQ ID NO: 475353 - DNA, 19 bp, Mus musculus
  siRNA target sequence for Rnaset2 (NM_026611.1,486-504).
ccctcaattccgagaagaa

SEQ ID NO: 475354 - DNA, 19 bp, Mus musculus
  siRNA target sequence for Rnaset2 (NM_026611.1,545-563).
ctcaacagtgtgctacaaa

SEQ ID NO: 475355 - DNA, 19 bp, Mus musculus
  siRNA target sequence for Rnaset2 (NM_026611.1,598-616).
gcttgcagatttcaaagat

SEQ ID NO: 475356 - DNA, 19 bp, Mus musculus
  siRNA target sequence for Rnaset2 (NM_026611.1,614-632).
gatgcacttaccagaatct

SEQ ID NO: 475357 - DNA, 19 bp, Mus musculus
  siRNA target sequence for Rnaset2 (NM_026611.1,827-845).
gaagacggtccaatcttct

SEQ ID NO: 475358 - DNA, 19 bp, Mus musculus
  siRNA target sequence for Rnaset2 (NM_026611.1,854-872).
cctacaaagacccaacatt

SEQ ID NO: 475359 - DNA, 19 bp, Mus musculus
  siRNA target sequence for Rnpc1 (NM_019547.1,366-384).
ccgacgcatcgctcagaaa

SEQ ID NO: 475360 - DNA, 19 bp, Mus musculus
  siRNA target sequence for Rnpc1 (NM_019547.1,368-386).
gacgcatcgctcagaaagt

SEQ ID NO: 475361 - DNA, 19 bp, Mus musculus
  siRNA target sequence for Rnpc1 (NM_019547.1,371-389).
gcatcgctcagaaagtact

SEQ ID NO: 475362 - DNA, 19 bp, Mus musculus
  siRNA target sequence for Rnpc1 (NM_019547.1,647-665).
ctgactcctcactacatct

SEQ ID NO: 475363 - DNA, 19 bp, Mus musculus
  siRNA target sequence for Rnpc1 (NM_019547.1,726-744).
cctcgccctaccttgagta

SEQ ID NO: 475364 - DNA, 19 bp, Mus musculus
  siRNA target sequence for Rnpc1 (NM_019547.1,727-745).
ctcgccctaccttgagtat

SEQ ID NO: 475365 - DNA, 19 bp, Mus musculus
  siRNA target sequence for Rnpc1 (NM_019547.1,730-748).
gccctaccttgagtataca

SEQ ID NO: 475366 - DNA, 19 bp, Mus musculus
  siRNA target sequence for Rnpc2 (NM_133242.1,297-315).
cttgaggccccttacaaga

SEQ ID NO: 475367 - DNA, 19 bp, Mus musculus
  siRNA target sequence for Rnpc2 (NM_133242.1,608-626).
gcctcatagcatcaaatta

SEQ ID NO: 475368 - DNA, 19 bp, Mus musculus
  siRNA target sequence for Rnpc2 (NM_133242.1,609-627).
cctcatagcatcaaattaa

SEQ ID NO: 475369 - DNA, 19 bp, Mus musculus
  siRNA target sequence for Rnpc2 (NM_133242.1,641-659).
ccgaagcaaaagtccattt

SEQ ID NO: 475370 - DNA, 19 bp, Mus musculus
  siRNA target sequence for Rnpc2 (NM_133242.1,642-660).
cgaagcaaaagtccattta

SEQ ID NO: 475371 - DNA, 19 bp, Mus musculus
  siRNA target sequence for Rnpc2 (NM_133242.1,652-670).
gtccatttaggaaagacaa

SEQ ID NO: 475372 - DNA, 19 bp, Mus musculus
  siRNA target sequence for Rnpc2 (NM_133242.1,740-758).
gcaactggcagcaagaatt

SEQ ID NO: 475373 - DNA, 19 bp, Mus musculus
  siRNA target sequence for Rnpc2 (NM_133242.1,754-772).
gaattcgaccgagagattt

SEQ ID NO: 475374 - DNA, 19 bp, Mus musculus
  siRNA target sequence for Rnpc2 (NM_133242.1,763-781).
cgagagatttggaagagtt

SEQ ID NO: 475375 - DNA, 19 bp, Mus musculus
  siRNA target sequence for Rnpc2 (NM_133242.1,804-822).
cgagatgtgagaatgattt

SEQ ID NO: 475376 - DNA, 19 bp, Mus musculus
  siRNA target sequence for Rnpc2 (NM_133242.1,812-830).
gagaatgatttctgataga

SEQ ID NO: 475377 - DNA, 19 bp, Mus musculus
  siRNA target sequence for Rnpc2 (NM_133242.1,885-903).
gtgcgtctagcaattggat

SEQ ID NO: 475378 - DNA, 19 bp, Mus musculus
  siRNA target sequence for Rnpc2 (NM_133242.1,887-905).
gcgtctagcaattggatta

SEQ ID NO: 475379 - DNA, 19 bp, Mus musculus
  siRNA target sequence for Rnpc2 (NM_133242.1,925-943).
gagtgccaatcatagttca

SEQ ID NO: 475380 - DNA, 19 bp, Mus musculus
  siRNA target sequence for Rnpc2 (NM_133242.1,1019-1037).
gctctatgtaggctcatta

SEQ ID NO: 475381 - DNA, 19 bp, Mus musculus
  siRNA target sequence for Rnpc2 (NM_133242.1,1026-1044).
gtaggctcattacacttta

SEQ ID NO: 475382 - DNA, 19 bp, Mus musculus
  siRNA target sequence for Rnpc2 (NM_133242.1,1029-1047).
ggctcattacactttaaca

SEQ ID NO: 475383 - DNA, 19 bp, Mus musculus
  siRNA target sequence for Rnpc2 (NM_133242.1,1058-1076).
catgcttcgggggatcttt

SEQ ID NO: 475384 - DNA, 19 bp, Mus musculus
  siRNA target sequence for Rnpc2 (NM_133242.1,1061-1079).
gcttcgggggatctttgaa

SEQ ID NO: 475385 - DNA, 19 bp, Mus musculus
  siRNA target sequence for Rnpc2 (NM_133242.1,1087-1105).
gaaggattgaaagtattca

SEQ ID NO: 475386 - DNA, 19 bp, Mus musculus
  siRNA target sequence for Rnpc2 (NM_133242.1,1120-1138).
gtgaaactggccgatctaa

SEQ ID NO: 475387 - DNA, 19 bp, Mus musculus
  siRNA target sequence for Rnpc2 (NM_133242.1,1131-1149).
cgatctaagggatatggat

SEQ ID NO: 475388 - DNA, 19 bp, Mus musculus
  siRNA target sequence for Rnpc2 (NM_133242.1,1132-1150).
gatctaagggatatggatt

SEQ ID NO: 475389 - DNA, 19 bp, Mus musculus
  siRNA target sequence for Rnpc2 (NM_133242.1,1139-1157).
gggatatggatttattaca

SEQ ID NO: 475390 - DNA, 19 bp, Mus musculus
  siRNA target sequence for Rnpc2 (NM_133242.1,1216-1234).
ctgggagaccaatgaaagt

SEQ ID NO: 475391 - DNA, 19 bp, Mus musculus
  siRNA target sequence for Rnpc2 (NM_133242.1,1241-1259).
cgttactgaacgaactgat

SEQ ID NO: 475392 - DNA, 19 bp, Mus musculus
  siRNA target sequence for Rnpc2 (NM_133242.1,1261-1279).
cttcgagtgctagttcatt

SEQ ID NO: 475393 - DNA, 19 bp, Mus musculus
  siRNA target sequence for Rnpc2 (NM_133242.1,1264-1282).
cgagtgctagttcattttt

SEQ ID NO: 475394 - DNA, 19 bp, Mus musculus
  siRNA target sequence for Rnpc2 (NM_133242.1,1267-1285).
gtgctagttcatttttgga

SEQ ID NO: 475395 - DNA, 19 bp, Mus musculus
  siRNA target sequence for Rnpc2 (NM_133242.1,1299-1317).
gaaaggactggaattgact

SEQ ID NO: 475396 - DNA, 19 bp, Mus musculus
  siRNA target sequence for Rnpc2 (NM_133242.1,1327-1345).
ctggacgtcttcagttaat

SEQ ID NO: 475397 - DNA, 19 bp, Mus musculus
  siRNA target sequence for Rnpc2 (NM_133242.1,1384-1402).
ctgccgcacaacaagcatt

SEQ ID NO: 475398 - DNA, 19 bp, Mus musculus
  siRNA target sequence for Rnpc2 (NM_133242.1,1388-1406).
cgcacaacaagcattacaa

SEQ ID NO: 475399 - DNA, 19 bp, Mus musculus
  siRNA target sequence for Rnpc2 (NM_133242.1,1392-1410).
caacaagcattacaaatga

SEQ ID NO: 475400 - DNA, 19 bp, Mus musculus
  siRNA target sequence for Rnpc2 (NM_133242.1,1436-1454).
ggcagaattctcttttgtt

SEQ ID NO: 475401 - DNA, 19 bp, Mus musculus
  siRNA target sequence for Rnpc2 (NM_133242.1,1447-1465).
cttttgttatagatttgca

SEQ ID NO: 475402 - DNA, 19 bp, Mus musculus
  siRNA target sequence for Rnpc2 (NM_133242.1,1525-1543).
ctcttgcaacacagtgttt

SEQ ID NO: 475403 - DNA, 19 bp, Mus musculus
  siRNA target sequence for Rnpc2 (NM_133242.1,1559-1577).
gtttaatcctcaaacagaa

SEQ ID NO: 475404 - DNA, 19 bp, Mus musculus
  siRNA target sequence for Rnpc2 (NM_133242.1,1614-1632).
gtcattgaagaatgtaata

SEQ ID NO: 475405 - DNA, 19 bp, Mus musculus
  siRNA target sequence for Rnpc2 (NM_133242.1,1694-1712).
gaagtgcccatctattgct

SEQ ID NO: 475406 - DNA, 19 bp, Mus musculus
  siRNA target sequence for Rnpc2 (NM_133242.1,1747-1765).
gatggtttgctggtaaaat

SEQ ID NO: 475407 - DNA, 19 bp, Mus musculus
  siRNA target sequence for Rnpc2 (NM_133242.1,1750-1768).
ggtttgctggtaaaatgat

SEQ ID NO: 475408 - DNA, 19 bp, Mus musculus
  siRNA target sequence for Rpl39 (NM_026055.1,111-129).
gcaaaatcgccctattcct

SEQ ID NO: 475409 - DNA, 19 bp, Mus musculus
  siRNA target sequence for Rpl39 (NM_026055.1,130-148).
cagtggatccggatgaaaa

SEQ ID NO: 475410 - DNA, 19 bp, Mus musculus
  siRNA target sequence for Rpl8 (NM_012053.1,129-147).
gcgacacggctacattaaa

SEQ ID NO: 475411 - DNA, 19 bp, Mus musculus
  siRNA target sequence for Rpl8 (NM_012053.1,153-171).
cgtaaaggacatcattcat

SEQ ID NO: 475412 - DNA, 19 bp, Mus musculus
  siRNA target sequence for Rpl8 (NM_012053.1,212-230).
gggatccctaccgattcaa

SEQ ID NO: 475413 - DNA, 19 bp, Mus musculus
  siRNA target sequence for Rpl8 (NM_012053.1,214-232).
gatccctaccgattcaaga

SEQ ID NO: 475414 - DNA, 19 bp, Mus musculus
  siRNA target sequence for Rpl8 (NM_012053.1,306-324).
gctgaatatcggcaatgtt

SEQ ID NO: 475415 - DNA, 19 bp, Mus musculus
  siRNA target sequence for Rpl8 (NM_012053.1,533-551).
gtgggggcagaattgacaa

SEQ ID NO: 475416 - DNA, 19 bp, Mus musculus
  siRNA target sequence for Rpl8 (NM_012053.1,569-587).
gccgtgcctaccacaagta

SEQ ID NO: 475417 - DNA, 19 bp, Mus musculus
  siRNA target sequence for Rpl8 (NM_012053.1,571-589).
cgtgcctaccacaagtaca

SEQ ID NO: 475418 - DNA, 19 bp, Mus musculus
  siRNA target sequence for Rpl8 (NM_012053.1,572-590).
gtgcctaccacaagtacaa

SEQ ID NO: 475419 - DNA, 19 bp, Mus musculus
  siRNA target sequence for Rpl8 (NM_012053.1,754-772).
cggctgcgtggaaccaaaa

SEQ ID NO: 475420 - DNA, 19 bp, Mus musculus
  siRNA target sequence for Rpl8 (NM_012053.1,756-774).
gctgcgtggaaccaaaact

SEQ ID NO: 475421 - DNA, 19 bp, Mus musculus
  siRNA target sequence for Rpl8 (NM_012053.1,759-777).
gcgtggaaccaaaactgta

SEQ ID NO: 475422 - DNA, 19 bp, Mus musculus
  siRNA target sequence for Rrp4 (NM_144886.1,39-57).
gatgaggctccctaaagct

SEQ ID NO: 475423 - DNA, 19 bp, Mus musculus
  siRNA target sequence for Rrp4 (NM_144886.1,85-103).
cgcgactctaagaaacact

SEQ ID NO: 475424 - DNA, 19 bp, Mus musculus
  siRNA target sequence for Rrp4 (NM_144886.1,239-257).
ccttgaaaaccagatacaa

SEQ ID NO: 475425 - DNA, 19 bp, Mus musculus
  siRNA target sequence for Rrp4 (NM_144886.1,240-258).
cttgaaaaccagatacaat

SEQ ID NO: 475426 - DNA, 19 bp, Mus musculus
  siRNA target sequence for Rrp4 (NM_144886.1,260-278).
gagaggtcggagacattgt

SEQ ID NO: 475427 - DNA, 19 bp, Mus musculus
  siRNA target sequence for Rrp4 (NM_144886.1,552-570).
gccttccctggtgaaaaga

SEQ ID NO: 475428 - DNA, 19 bp, Mus musculus
  siRNA target sequence for Rrp4 (NM_144886.1,599-617).
gtggtgcctcagtgattct

SEQ ID NO: 475429 - DNA, 19 bp, Mus musculus
  siRNA target sequence for Rrp4 (NM_144886.1,608-626).
cagtgattctgggtaacaa

SEQ ID NO: 475430 - DNA, 19 bp, Mus musculus
  siRNA target sequence for Rrp4 (NM_144886.1,619-637).
ggtaacaacggtttcatct

SEQ ID NO: 475431 - DNA, 19 bp, Mus musculus
  siRNA target sequence for Rrp4 (NM_144886.1,674-692).
ctgggggcttcattgctaa

SEQ ID NO: 475432 - DNA, 19 bp, Mus musculus
  siRNA target sequence for Rrp4 (NM_144886.1,699-717).
gcccgtagctcttagtgat

SEQ ID NO: 475433 - DNA, 19 bp, Mus musculus
  siRNA target sequence for Rrp4 (NM_144886.1,815-833).
cccttgcgcatcagatcaa

SEQ ID NO: 475434 - DNA, 19 bp, Mus musculus
  siRNA target sequence for Rrp4 (NM_144886.1,820-838).
gcgcatcagatcaaggata

SEQ ID NO: 475435 - DNA, 19 bp, Mus musculus
  siRNA target sequence for Rrp4 (NM_144886.1,821-839).
cgcatcagatcaaggatat

SEQ ID NO: 475436 - DNA, 19 bp, Mus musculus
  siRNA target sequence for Rrp4 (NM_144886.1,823-841).
catcagatcaaggatatct

SEQ ID NO: 475437 - DNA, 19 bp, Mus musculus
  siRNA target sequence for Rrp4 (NM_144886.1,826-844).
cagatcaaggatatcttaa

SEQ ID NO: 475438 - DNA, 19 bp, Mus musculus
  siRNA target sequence for Rrp4 (NM_144886.1,878-896).
cacgccagaggcttttgga

SEQ ID NO: 475439 - DNA, 19 bp, Mus musculus
  siRNA target sequence for Sca1 (NM_009124.2,908-926).
caagagcggagcaacgaat

SEQ ID NO: 475440 - DNA, 19 bp, Mus musculus
  siRNA target sequence for Sca1 (NM_009124.2,1092-1110).
ccggggagcatggtttaca

SEQ ID NO: 475441 - DNA, 19 bp, Mus musculus
  siRNA target sequence for Sca1 (NM_009124.2,1254-1272).
cccacctttcgcatacctt

SEQ ID NO: 475442 - DNA, 19 bp, Mus musculus
  siRNA target sequence for Sca1 (NM_009124.2,1263-1281).
cgcataccttccagttcat

SEQ ID NO: 475443 - DNA, 19 bp, Mus musculus
  siRNA target sequence for Sca1 (NM_009124.2,1264-1282).
gcataccttccagttcatt

SEQ ID NO: 475444 - DNA, 19 bp, Mus musculus
  siRNA target sequence for Sca1 (NM_009124.2,1455-1473).
gccaggcaccaggacataa

SEQ ID NO: 475445 - DNA, 19 bp, Mus musculus
  siRNA target sequence for Sca1 (NM_009124.2,1501-1519).
cagcagggctgcaggatta

SEQ ID NO: 475446 - DNA, 19 bp, Mus musculus
  siRNA target sequence for Sca1 (NM_009124.2,1503-1521).
gcagggctgcaggattagt

SEQ ID NO: 475447 - DNA, 19 bp, Mus musculus
  siRNA target sequence for Sca1 (NM_009124.2,1559-1577).
cagtacatccatatttcca

SEQ ID NO: 475448 - DNA, 19 bp, Mus musculus
  siRNA target sequence for Sca1 (NM_009124.2,1690-1708).
ggttgtgcaatatagtgat

SEQ ID NO: 475449 - DNA, 19 bp, Mus musculus
  siRNA target sequence for Sca1 (NM_009124.2,1727-1745).
cctcgagagtccaccaaaa

SEQ ID NO: 475450 - DNA, 19 bp, Mus musculus
  siRNA target sequence for Sca1 (NM_009124.2,1728-1746).
ctcgagagtccaccaaaaa

SEQ ID NO: 475451 - DNA, 19 bp, Mus musculus
  siRNA target sequence for Sca1 (NM_009124.2,1822-1840).
gtatggggcatcatcttct

SEQ ID NO: 475452 - DNA, 19 bp, Mus musculus
  siRNA target sequence for Sca1 (NM_009124.2,1967-1985).
gtgatggttctgcctaata

SEQ ID NO: 475453 - DNA, 19 bp, Mus musculus
  siRNA target sequence for Sca1 (NM_009124.2,2109-2127).
ccccccacacggtcattca

SEQ ID NO: 475454 - DNA, 19 bp, Mus musculus
  siRNA target sequence for Sca1 (NM_009124.2,2220-2238).
gcggccagcagcaagcaat

SEQ ID NO: 475455 - DNA, 19 bp, Mus musculus
  siRNA target sequence for Sca1 (NM_009124.2,2375-2393).
gtacctcacacgtttgtca

SEQ ID NO: 475456 - DNA, 19 bp, Mus musculus
  siRNA target sequence for Sca1 (NM_009124.2,2405-2423).
cccaagagcgagaacttca

SEQ ID NO: 475457 - DNA, 19 bp, Mus musculus
  siRNA target sequence for Sca1 (NM_009124.2,2406-2424).
ccaagagcgagaacttcaa

SEQ ID NO: 475458 - DNA, 19 bp, Mus musculus
  siRNA target sequence for Sca1 (NM_009124.2,2525-2543).
cccacgctgccgccatatt

SEQ ID NO: 475459 - DNA, 19 bp, Mus musculus
  siRNA target sequence for Sca1 (NM_009124.2,2533-2551).
gccgccatatttcatgaaa

SEQ ID NO: 475460 - DNA, 19 bp, Mus musculus
  siRNA target sequence for Sca1 (NM_009124.2,2623-2641).
gagtgcagagattagcaat

SEQ ID NO: 475461 - DNA, 19 bp, Mus musculus
  siRNA target sequence for Sca1 (NM_009124.2,2658-2676).
ccagtactgtggagagaat

SEQ ID NO: 475462 - DNA, 19 bp, Mus musculus
  siRNA target sequence for Sca1 (NM_009124.2,2749-2767).
cgaagtcttggtagagtat

SEQ ID NO: 475463 - DNA, 19 bp, Mus musculus
  siRNA target sequence for Sca1 (NM_009124.2,2753-2771).
gtcttggtagagtatcctt

SEQ ID NO: 475464 - DNA, 19 bp, Mus musculus
  siRNA target sequence for Sca1 (NM_009124.2,2834-2852).
ctgccgtgttccaaactct

SEQ ID NO: 475465 - DNA, 19 bp, Mus musculus
  siRNA target sequence for Sca1 (NM_009124.2,2988-3006).
gatacgcggagcaggaaaa

SEQ ID NO: 475466 - DNA, 19 bp, Mus musculus
  siRNA target sequence for Sca1 (NM_009124.2,3090-3108).
ccttcctcagcaaaataga

SEQ ID NO: 475467 - DNA, 19 bp, Mus musculus
  siRNA target sequence for Sca1 (NM_009124.2,3181-3199).
ggacgagccacctttgact

SEQ ID NO: 475468 - DNA, 19 bp, Mus musculus
  siRNA target sequence for Sca1 (NM_009124.2,3221-3239).
cctcaggaggttaagatct

SEQ ID NO: 475469 - DNA, 19 bp, Mus musculus
  siRNA target sequence for Sca1 (NM_009124.2,3240-3258).
gcatcgaaggccgatctaa

SEQ ID NO: 475470 - DNA, 19 bp, Mus musculus
  siRNA target sequence for Sf3a1 (NM_026175.3,175-193).
gtccaaacagccaattgaa

SEQ ID NO: 475471 - DNA, 19 bp, Mus musculus
  siRNA target sequence for Sf3a1 (NM_026175.3,232-250).
gccagtggtcggcattatt

SEQ ID NO: 475472 - DNA, 19 bp, Mus musculus
  siRNA target sequence for Sf3a1 (NM_026175.3,233-251).
ccagtggtcggcattattt

SEQ ID NO: 475473 - DNA, 19 bp, Mus musculus
  siRNA target sequence for Sf3a1 (NM_026175.3,234-252).
cagtggtcggcattattta

SEQ ID NO: 475474 - DNA, 19 bp, Mus musculus
  siRNA target sequence for Sf3a1 (NM_026175.3,292-310).
cagttttgtggccagaaat

SEQ ID NO: 475475 - DNA, 19 bp, Mus musculus
  siRNA target sequence for Sf3a1 (NM_026175.3,303-321).
ccagaaatgggcctgaatt

SEQ ID NO: 475476 - DNA, 19 bp, Mus musculus
  siRNA target sequence for Sf3a1 (NM_026175.3,306-324).
gaaatgggcctgaatttga

SEQ ID NO: 475477 - DNA, 19 bp, Mus musculus
  siRNA target sequence for Sf3a1 (NM_026175.3,327-345).
ctaggattcgacagaatga

SEQ ID NO: 475478 - DNA, 19 bp, Mus musculus
  siRNA target sequence for Sf3a1 (NM_026175.3,330-348).
ggattcgacagaatgagat

SEQ ID NO: 475479 - DNA, 19 bp, Mus musculus
  siRNA target sequence for Sf3a1 (NM_026175.3,355-373).
ccccaagttcaatttctta

SEQ ID NO: 475480 - DNA, 19 bp, Mus musculus
  siRNA target sequence for Sf3a1 (NM_026175.3,357-375).
ccaagttcaatttcttaaa

SEQ ID NO: 475481 - DNA, 19 bp, Mus musculus
  siRNA target sequence for Sf3a1 (NM_026175.3,603-621).
ccttcgacctggatgtagt

SEQ ID NO: 475482 - DNA, 19 bp, Mus musculus
  siRNA target sequence for Sf3a1 (NM_026175.3,692-710).
cgcaactaccagtttgact

SEQ ID NO: 475483 - DNA, 19 bp, Mus musculus
  siRNA target sequence for Sf3a1 (NM_026175.3,786-804).
ccaaaggcttattttcaaa

SEQ ID NO: 475484 - DNA, 19 bp, Mus musculus
  siRNA target sequence for Sf3a1 (NM_026175.3,858-876).
gagtagaatgggccaaatt

SEQ ID NO: 475485 - DNA, 19 bp, Mus musculus
  siRNA target sequence for Sf3a1 (NM_026175.3,916-934).
gaaggagcgagtagcttat

SEQ ID NO: 475486 - DNA, 19 bp, Mus musculus
  siRNA target sequence for Sf3a1 (NM_026175.3,964-982).
ggtggagacagtggatttt

SEQ ID NO: 475487 - DNA, 19 bp, Mus musculus
  siRNA target sequence for Sf3a1 (NM_026175.3,967-985).
ggagacagtggattttcaa

SEQ ID NO: 475488 - DNA, 19 bp, Mus musculus
  siRNA target sequence for Sf3a1 (NM_026175.3,1150-1168).
gctggaccaggatactcaa

SEQ ID NO: 475489 - DNA, 19 bp, Mus musculus
  siRNA target sequence for Sf3a1 (NM_026175.3,1153-1171).
ggaccaggatactcaagta

SEQ ID NO: 475490 - DNA, 19 bp, Mus musculus
  siRNA target sequence for Sf3a1 (NM_026175.3,1180-1198).
ggatgagggttcagatgat

SEQ ID NO: 475491 - DNA, 19 bp, Mus musculus
  siRNA target sequence for Sf3a1 (NM_026175.3,1263-1281).
caccagaccaagtcattgt

SEQ ID NO: 475492 - DNA, 19 bp, Mus musculus
  siRNA target sequence for Sf3a1 (NM_026175.3,1289-1307).
gactatgatcccaaagctt

SEQ ID NO: 475493 - DNA, 19 bp, Mus musculus
  siRNA target sequence for Sf3a1 (NM_026175.3,1326-1344).
cccctgctcccgatgagta

SEQ ID NO: 475494 - DNA, 19 bp, Mus musculus
  siRNA target sequence for Sf3a1 (NM_026175.3,1327-1345).
ccctgctcccgatgagtat

SEQ ID NO: 475495 - DNA, 19 bp, Mus musculus
  siRNA target sequence for Sf3a1 (NM_026175.3,1329-1347).
ctgctcccgatgagtatct

SEQ ID NO: 475496 - DNA, 19 bp, Mus musculus
  siRNA target sequence for Sf3a1 (NM_026175.3,1332-1350).
ctcccgatgagtatcttgt

SEQ ID NO: 475497 - DNA, 19 bp, Mus musculus
  siRNA target sequence for Sf3a1 (NM_026175.3,1334-1352).
cccgatgagtatcttgtat

SEQ ID NO: 475498 - DNA, 19 bp, Mus musculus
  siRNA target sequence for Sf3a1 (NM_026175.3,1465-1483).
gagtgatgatgaggtttat

SEQ ID NO: 475499 - DNA, 19 bp, Mus musculus
  siRNA target sequence for Sf3a1 (NM_026175.3,1528-1546).
gcgacgtactgacatcttt

SEQ ID NO: 475500 - DNA, 19 bp, Mus musculus
  siRNA target sequence for Sf3a1 (NM_026175.3,1688-1706).
cagattgaggccatccata

SEQ ID NO: 475501 - DNA, 19 bp, Mus musculus
  siRNA target sequence for Sf3a1 (NM_026175.3,1819-1837).
ctcagcaccccccattaca

SEQ ID NO: 475502 - DNA, 19 bp, Mus musculus
  siRNA target sequence for Sf3a1 (NM_026175.3,1871-1889).
gtccgcaccactgttgtat

SEQ ID NO: 475503 - DNA, 19 bp, Mus musculus
  siRNA target sequence for Sf3a1 (NM_026175.3,1873-1891).
ccgcaccactgttgtatct

SEQ ID NO: 475504 - DNA, 19 bp, Mus musculus
  siRNA target sequence for Sf3a1 (NM_026175.3,1978-1996).
ccacgcacccaggatcaat

SEQ ID NO: 475505 - DNA, 19 bp, Mus musculus
  siRNA target sequence for Sf3a1 (NM_026175.3,1989-2007).
ggatcaatgtggtacctat

SEQ ID NO: 475506 - DNA, 19 bp, Mus musculus
  siRNA target sequence for Sf3a1 (NM_026175.3,2221-2239).
gggtccagtatccatcaaa

SEQ ID NO: 475507 - DNA, 19 bp, Mus musculus
  siRNA target sequence for Sf3a1 (NM_026175.3,2373-2391).
ggaaacagaaactacagta

SEQ ID NO: 475508 - DNA, 19 bp, Mus musculus
  siRNA target sequence for Sf3a1 (NM_026175.3,2374-2392).
gaaacagaaactacagtat

SEQ ID NO: 475509 - DNA, 19 bp, Mus musculus
  siRNA target sequence for Sf3a2 (NM_013651.3,361-379).
ccctggaaaccattgacat

SEQ ID NO: 475510 - DNA, 19 bp, Mus musculus
  siRNA target sequence for Sf3a2 (NM_013651.3,380-398).
caacaaggacccgtatttt

SEQ ID NO: 475511 - DNA, 19 bp, Mus musculus
  siRNA target sequence for Sf3a2 (NM_013651.3,404-422).
gaaccacttgggatcctat

SEQ ID NO: 475512 - DNA, 19 bp, Mus musculus
  siRNA target sequence for Sf3a2 (NM_013651.3,437-455).
cctgactctgcataacaat

SEQ ID NO: 475513 - DNA, 19 bp, Mus musculus
  siRNA target sequence for Sf3a2 (NM_013651.3,478-496).
cccaagggaagaaacatca

SEQ ID NO: 475514 - DNA, 19 bp, Mus musculus
  siRNA target sequence for Sf3a2 (NM_013651.3,484-502).
ggaagaaacatcagactaa

SEQ ID NO: 475515 - DNA, 19 bp, Mus musculus
  siRNA target sequence for Sf3a2 (NM_013651.3,699-717).
ccacgccaccgtttcatgt

SEQ ID NO: 475516 - DNA, 19 bp, Mus musculus
  siRNA target sequence for Sf3a2 (NM_013651.3,707-725).
ccgtttcatgtctgcttat

SEQ ID NO: 475517 - DNA, 19 bp, Mus musculus
  siRNA target sequence for Sf3a2 (NM_013651.3,709-727).
gtttcatgtctgcttatga

SEQ ID NO: 475518 - DNA, 19 bp, Mus musculus
  siRNA target sequence for Sf3a2 (NM_013651.3,783-801).
ccctatgagaccattgctt

SEQ ID NO: 475519 - DNA, 19 bp, Mus musculus
  siRNA target sequence for Sf3a2 (NM_013651.3,811-829).
caagccgggagattgacaa

SEQ ID NO: 475520 - DNA, 19 bp, Mus musculus
  siRNA target sequence for Sf3a2 (NM_013651.3,830-848).
ggctgagggcaagtttttt

SEQ ID NO: 475521 - DNA, 19 bp, Mus musculus
  siRNA target sequence for Sf3a2 (NM_013651.3,831-849).
gctgagggcaagttttttt

SEQ ID NO: 475522 - DNA, 19 bp, Mus musculus
  siRNA target sequence for Sf3a2 (NM_013651.3,852-870).
cttcagttccactttaaga

SEQ ID NO: 475523 - DNA, 19 bp, Mus musculus
  siRNA target sequence for Sf3a2 (NM_013651.3,1577-1595).
ggttcacccctcaaatcct

SEQ ID NO: 475524 - DNA, 19 bp, Mus musculus
  siRNA target sequence for Sf4 (NM_027481.1,301-319).
cccaagtctggaaagatga

SEQ ID NO: 475525 - DNA, 19 bp, Mus musculus
  siRNA target sequence for Sf4 (NM_027481.1,333-351).
ccaccaggaagagcttatt

SEQ ID NO: 475526 - DNA, 19 bp, Mus musculus
  siRNA target sequence for Sf4 (NM_027481.1,336-354).
ccaggaagagcttattgct

SEQ ID NO: 475527 - DNA, 19 bp, Mus musculus
  siRNA target sequence for Sf4 (NM_027481.1,462-480).
ctgcatctccaacaagttt

SEQ ID NO: 475528 - DNA, 19 bp, Mus musculus
  siRNA target sequence for Sf4 (NM_027481.1,641-659).
cgggtcctgtgaagaacta

SEQ ID NO: 475529 - DNA, 19 bp, Mus musculus
  siRNA target sequence for Sf4 (NM_027481.1,741-759).
gcagtggctggaaatcaaa

SEQ ID NO: 475530 - DNA, 19 bp, Mus musculus
  siRNA target sequence for Sf4 (NM_027481.1,780-798).
cgagactcggagagtgata

SEQ ID NO: 475531 - DNA, 19 bp, Mus musculus
  siRNA target sequence for Sf4 (NM_027481.1,905-923).
gcagggaattcctgtacta

SEQ ID NO: 475532 - DNA, 19 bp, Mus musculus
  siRNA target sequence for Sf4 (NM_027481.1,910-928).
gaattcctgtactacagaa

SEQ ID NO: 475533 - DNA, 19 bp, Mus musculus
  siRNA target sequence for Sf4 (NM_027481.1,1130-1148).
gccaagggtacagatacta

SEQ ID NO: 475534 - DNA, 19 bp, Mus musculus
  siRNA target sequence for Sf4 (NM_027481.1,1132-1150).
caagggtacagatactaca

SEQ ID NO: 475535 - DNA, 19 bp, Mus musculus
  siRNA target sequence for Sf4 (NM_027481.1,1224-1242).
cagcctgcggcgaaagtct

SEQ ID NO: 475536 - DNA, 19 bp, Mus musculus
  siRNA target sequence for Sf4 (NM_027481.1,1584-1602).
gcagatgtatgacatgatt

SEQ ID NO: 475537 - DNA, 19 bp, Mus musculus
  siRNA target sequence for Sf4 (NM_027481.1,1784-1802).
gtcggggcaagcacttcat

SEQ ID NO: 475538 - DNA, 19 bp, Mus musculus
  siRNA target sequence for Sf4 (NM_027481.1,1794-1812).
gcacttcatcggtgacttt

SEQ ID NO: 475539 - DNA, 19 bp, Mus musculus
  siRNA target sequence for Sf4 (NM_027481.1,1875-1893).
gccagactactcagaatat

SEQ ID NO: 475540 - DNA, 19 bp, Mus musculus
  siRNA target sequence for Sf4 (NM_027481.1,1886-1904).
cagaatataaggagtttaa

SEQ ID NO: 475541 - DNA, 19 bp, Mus musculus
  siRNA target sequence for Sf4 (NM_027481.1,1905-1923).
gctgacggtggaaaacatt

SEQ ID NO: 475542 - DNA, 19 bp, Mus musculus
  siRNA target sequence for Sf4 (NM_027481.1,2007-2025).
caagggtgccaccacaata

SEQ ID NO: 475543 - DNA, 19 bp, Mus musculus
  siRNA target sequence for Sf4 (NM_027481.1,2010-2028).
gggtgccaccacaatagat

SEQ ID NO: 475544 - DNA, 19 bp, Mus musculus
  siRNA target sequence for Sfrs14 (NM_172755.2,448-466).
cggatggcgcaggaatctt

SEQ ID NO: 475545 - DNA, 19 bp, Mus musculus
  siRNA target sequence for Sfrs14 (NM_172755.2,449-467).
ggatggcgcaggaatcttt

SEQ ID NO: 475546 - DNA, 19 bp, Mus musculus
  siRNA target sequence for Sfrs14 (NM_172755.2,460-478).
gaatctttggacagtgtat

SEQ ID NO: 475547 - DNA, 19 bp, Mus musculus
  siRNA target sequence for Sfrs14 (NM_172755.2,464-482).
ctttggacagtgtattaca

SEQ ID NO: 475548 - DNA, 19 bp, Mus musculus
  siRNA target sequence for Sfrs14 (NM_172755.2,531-549).
ccatcttaaagctcaagat

SEQ ID NO: 475549 - DNA, 19 bp, Mus musculus
  siRNA target sequence for Sfrs14 (NM_172755.2,626-644).
gatctggagtgtattcact

SEQ ID NO: 475550 - DNA, 19 bp, Mus musculus
  siRNA target sequence for Sfrs14 (NM_172755.2,729-747).
ctatcttcgcaaagaatgt

SEQ ID NO: 475551 - DNA, 19 bp, Mus musculus
  siRNA target sequence for Sfrs14 (NM_172755.2,867-885).
cttgggccactcagtttct

SEQ ID NO: 475552 - DNA, 19 bp, Mus musculus
  siRNA target sequence for Sfrs14 (NM_172755.2,870-888).
gggccactcagtttctcaa

SEQ ID NO: 475553 - DNA, 19 bp, Mus musculus
  siRNA target sequence for Sfrs14 (NM_172755.2,894-912).
ctcctggtcacaggaatat

SEQ ID NO: 475554 - DNA, 19 bp, Mus musculus
  siRNA target sequence for Sfrs14 (NM_172755.2,913-931).
ggttttgggccctcattgt

SEQ ID NO: 475555 - DNA, 19 bp, Mus musculus
  siRNA target sequence for Sfrs14 (NM_172755.2,914-932).
gttttgggccctcattgtt

SEQ ID NO: 475556 - DNA, 19 bp, Mus musculus
  siRNA target sequence for Sfrs14 (NM_172755.2,963-981).
gaaggaaagtcgggattat

SEQ ID NO: 475557 - DNA, 19 bp, Mus musculus
  siRNA target sequence for Sfrs14 (NM_172755.2,1644-1662).
gaccaaaaactgctttttt

SEQ ID NO: 475558 - DNA, 19 bp, Mus musculus
  siRNA target sequence for Sfrs14 (NM_172755.2,1742-1760).
cctgtaatgcctatgaact

SEQ ID NO: 475559 - DNA, 19 bp, Mus musculus
  siRNA target sequence for Sfrs14 (NM_172755.2,1813-1831).
gagaccaccaactctcttt

SEQ ID NO: 475560 - DNA, 19 bp, Mus musculus
  siRNA target sequence for Sfrs14 (NM_172755.2,1907-1925).
ctgtgggcctccaagacat

SEQ ID NO: 475561 - DNA, 19 bp, Mus musculus
  siRNA target sequence for Sfrs14 (NM_172755.2,1971-1989).
gttcggaagggagtacata

SEQ ID NO: 475562 - DNA, 19 bp, Mus musculus
  siRNA target sequence for Sfrs14 (NM_172755.2,2056-2074).
gagtcccgagaacagaaaa

SEQ ID NO: 475563 - DNA, 19 bp, Mus musculus
  siRNA target sequence for Sfrs4 (NM_020587.1,56-74).
gtcaacggcagaaaaatca

SEQ ID NO: 475564 - DNA, 19 bp, Mus musculus
  siRNA target sequence for Sfrs4 (NM_020587.1,58-76).
caacggcagaaaaatcaga

SEQ ID NO: 475565 - DNA, 19 bp, Mus musculus
  siRNA target sequence for Sfrs4 (NM_020587.1,181-199).
ccggagtggtagcagtaaa

SEQ ID NO: 475566 - DNA, 19 bp, Mus musculus
  siRNA target sequence for Sfrs4 (NM_020587.1,182-200).
cggagtggtagcagtaaaa

SEQ ID NO: 475567 - DNA, 19 bp, Mus musculus
  siRNA target sequence for Sfrs4 (NM_020587.1,195-213).
gtaaaagcagccattcgaa

SEQ ID NO: 475568 - DNA, 19 bp, Mus musculus
  siRNA target sequence for Sfrs4 (NM_020587.1,284-302).
cgcagtaagaaggagaaaa

SEQ ID NO: 475569 - DNA, 19 bp, Mus musculus
  siRNA target sequence for Sfrs4 (NM_020587.1,360-378).
gccgcagtaagagtaaaga

SEQ ID NO: 475570 - DNA, 19 bp, Mus musculus
  siRNA target sequence for Sfrs4 (NM_020587.1,438-456).
ccagccgccatgacagtaa

SEQ ID NO: 475571 - DNA, 19 bp, Mus musculus
  siRNA target sequence for Sfrs4 (NM_020587.1,681-699).
gcgagcgcagccgaaaaca

SEQ ID NO: 475572 - DNA, 19 bp, Mus musculus
  siRNA target sequence for Sfrs4 (NM_020587.1,683-701).
gagcgcagccgaaaacaca

SEQ ID NO: 475573 - DNA, 19 bp, Mus musculus
  siRNA target sequence for Sfrs4 (NM_020587.1,774-792).
cgtcccgctcggtgtcaaa

SEQ ID NO: 475574 - DNA, 19 bp, Mus musculus
  siRNA target sequence for Sfrs4 (NM_020587.1,888-906).
gatccacctccaaatccaa

SEQ ID NO: 475575 - DNA, 19 bp, Mus musculus
  siRNA target sequence for Sfrs4 (NM_020587.1,925-943).
gtcgcgctccaggtcaaaa

SEQ ID NO: 475576 - DNA, 19 bp, Mus musculus
  siRNA target sequence for Sfrs4 (NM_020587.1,936-954).
ggtcaaaatcggcttcaaa

SEQ ID NO: 475577 - DNA, 19 bp, Mus musculus
  siRNA target sequence for Sfrs4 (NM_020587.1,937-955).
gtcaaaatcggcttcaaaa

SEQ ID NO: 475578 - DNA, 19 bp, Mus musculus
  siRNA target sequence for Sfrs5 (NM_009159.1,430-448).
ggatgcacatcgacctaaa

SEQ ID NO: 475579 - DNA, 19 bp, Mus musculus
  siRNA target sequence for Sfrs5 (NM_009159.1,434-452).
gcacatcgacctaaactaa

SEQ ID NO: 475580 - DNA, 19 bp, Mus musculus
  siRNA target sequence for Sfrs5 (NM_009159.1,482-500).
ggtgacttaaagaatgcta

SEQ ID NO: 475581 - DNA, 19 bp, Mus musculus
  siRNA target sequence for Sfrs5 (NM_009159.1,483-501).
gtgacttaaagaatgctat

SEQ ID NO: 475582 - DNA, 19 bp, Mus musculus
  siRNA target sequence for Sfrs5 (NM_009159.1,522-540).
ggaaattaacgggagaaaa

SEQ ID NO: 475583 - DNA, 19 bp, Mus musculus
  siRNA target sequence for Sfrs5 (NM_009159.1,590-608).
cgatctcggaccagaagtt

SEQ ID NO: 475584 - DNA, 19 bp, Mus musculus
  siRNA target sequence for Sfrs5 (NM_009159.1,636-654).
cacgaaggagcaagtctta

SEQ ID NO: 475585 - DNA, 19 bp, Mus musculus
  siRNA target sequence for Sfrs5 (NM_009159.1,638-656).
cgaaggagcaagtcttaca

SEQ ID NO: 475586 - DNA, 19 bp, Mus musculus
  siRNA target sequence for Sfrs5 (NM_009159.1,737-755).
cgtggttcttcgagtagat

SEQ ID NO: 475587 - DNA, 19 bp, Mus musculus
  siRNA target sequence for Sfrs5 (NM_009159.1,740-758).
ggttcttcgagtagatcta

SEQ ID NO: 475588 - DNA, 19 bp, Mus musculus
  siRNA target sequence for Sfrs5 (NM_009159.1,741-759).
gttcttcgagtagatctaa

SEQ ID NO: 475589 - DNA, 19 bp, Mus musculus
  siRNA target sequence for Sfrs5 (NM_009159.1,799-817).
gtccaggtccagatcagtt

SEQ ID NO: 475590 - DNA, 19 bp, Mus musculus
  siRNA target sequence for Smn (NM_011420.1,63-81).
caccggccagagtgatgat

SEQ ID NO: 475591 - DNA, 19 bp, Mus musculus
  siRNA target sequence for Smn (NM_011420.1,66-84).
cggccagagtgatgattct

SEQ ID NO: 475592 - DNA, 19 bp, Mus musculus
  siRNA target sequence for Smn (NM_011420.1,93-111).
ggatgatacagcattgata

SEQ ID NO: 475593 - DNA, 19 bp, Mus musculus
  siRNA target sequence for Smn (NM_011420.1,101-119).
cagcattgataaaagctta

SEQ ID NO: 475594 - DNA, 19 bp, Mus musculus
  siRNA target sequence for Smn (NM_011420.1,159-177).
cggtgacatttgtgaaact

SEQ ID NO: 475595 - DNA, 19 bp, Mus musculus
  siRNA target sequence for Smn (NM_011420.1,299-317).
cagaagacggctgcattta

SEQ ID NO: 475596 - DNA, 19 bp, Mus musculus
  siRNA target sequence for Smn (NM_011420.1,326-344).
ctattacgtccattgactt

SEQ ID NO: 475597 - DNA, 19 bp, Mus musculus
  siRNA target sequence for Smn (NM_011420.1,366-384).
ggtttatactggatatgga

SEQ ID NO: 475598 - DNA, 19 bp, Mus musculus
  siRNA target sequence for Smn (NM_011420.1,422-440).
cgacctgtgaagtagctaa

SEQ ID NO: 475599 - DNA, 19 bp, Mus musculus
  siRNA target sequence for Smn (NM_011420.1,423-441).
gacctgtgaagtagctaat

SEQ ID NO: 475600 - DNA, 19 bp, Mus musculus
  siRNA target sequence for Smn (NM_011420.1,426-444).
ctgtgaagtagctaatagt

SEQ ID NO: 475601 - DNA, 19 bp, Mus musculus
  siRNA target sequence for Smn (NM_011420.1,506-524).
ccagatcgctcagaagtaa

SEQ ID NO: 475602 - DNA, 19 bp, Mus musculus
  siRNA target sequence for Smn (NM_011420.1,507-525).
cagatcgctcagaagtaaa

SEQ ID NO: 475603 - DNA, 19 bp, Mus musculus
  siRNA target sequence for Smn (NM_011420.1,693-711).
cccttcaggaccaccaata

SEQ ID NO: 475604 - DNA, 19 bp, Mus musculus
  siRNA target sequence for Smn (NM_011420.1,694-712).
ccttcaggaccaccaataa

SEQ ID NO: 475605 - DNA, 19 bp, Mus musculus
  siRNA target sequence for Smn (NM_011420.1,761-779).
ccctgggcagtatgctaat

SEQ ID NO: 475606 - DNA, 19 bp, Mus musculus
  siRNA target sequence for Smn (NM_011420.1,763-781).
ctgggcagtatgctaatct

SEQ ID NO: 475607 - DNA, 19 bp, Mus musculus
  siRNA target sequence for Smn (NM_011420.1,765-783).
gggcagtatgctaatctct

SEQ ID NO: 475608 - DNA, 19 bp, Mus musculus
  siRNA target sequence for Smn (NM_011420.1,798-816).
ctaccacactggctactat

SEQ ID NO: 475609 - DNA, 19 bp, Mus musculus
  siRNA target sequence for Snrpa1 (NM_021336.3,112-130).
ctggacctccggggatata

SEQ ID NO: 475610 - DNA, 19 bp, Mus musculus
  siRNA target sequence for Snrpa1 (NM_021336.3,114-132).
ggacctccggggatataaa

SEQ ID NO: 475611 - DNA, 19 bp, Mus musculus
  siRNA target sequence for Snrpa1 (NM_021336.3,115-133).
gacctccggggatataaaa

SEQ ID NO: 475612 - DNA, 19 bp, Mus musculus
  siRNA target sequence for Snrpa1 (NM_021336.3,117-135).
cctccggggatataaaatt

SEQ ID NO: 475613 - DNA, 19 bp, Mus musculus
  siRNA target sequence for Snrpa1 (NM_021336.3,159-177).
caccttagaccagtttgat

SEQ ID NO: 475614 - DNA, 19 bp, Mus musculus
  siRNA target sequence for Snrpa1 (NM_021336.3,168-186).
ccagtttgatgctattgat

SEQ ID NO: 475615 - DNA, 19 bp, Mus musculus
  siRNA target sequence for Snrpa1 (NM_021336.3,238-256).
ctgaaaacattattagtga

SEQ ID NO: 475616 - DNA, 19 bp, Mus musculus
  siRNA target sequence for Snrpa1 (NM_021336.3,245-263).
cattattagtgaacaacaa

SEQ ID NO: 475617 - DNA, 19 bp, Mus musculus
  siRNA target sequence for Snrpa1 (NM_021336.3,264-282).
cagaatttgccgtataggt

SEQ ID NO: 475618 - DNA, 19 bp, Mus musculus
  siRNA target sequence for Snrpa1 (NM_021336.3,374-392).
ctctcaaatcactgacata

SEQ ID NO: 475619 - DNA, 19 bp, Mus musculus
  siRNA target sequence for Snrpa1 (NM_021336.3,378-396).
caaatcactgacatatcta

SEQ ID NO: 475620 - DNA, 19 bp, Mus musculus
  siRNA target sequence for Snrpa1 (NM_021336.3,407-425).
gaaaccctgtaaccaataa

SEQ ID NO: 475621 - DNA, 19 bp, Mus musculus
  siRNA target sequence for Snrpa1 (NM_021336.3,420-438).
caataagaagcattatcga

SEQ ID NO: 475622 - DNA, 19 bp, Mus musculus
  siRNA target sequence for Snrpa1 (NM_021336.3,430-448).
cattatcgactttatgtga

SEQ ID NO: 475623 - DNA, 19 bp, Mus musculus
  siRNA target sequence for Snrpa1 (NM_021336.3,436-454).
cgactttatgtgatttata

SEQ ID NO: 475624 - DNA, 19 bp, Mus musculus
  siRNA target sequence for Snrpa1 (NM_021336.3,539-557).
ggggtgcacagcttgcaaa

SEQ ID NO: 475625 - DNA, 19 bp, Mus musculus
  siRNA target sequence for Snrpa1 (NM_021336.3,598-616).
ggtttgccaactgacaaaa

SEQ ID NO: 475626 - DNA, 19 bp, Mus musculus
  siRNA target sequence for Snrpa1 (NM_021336.3,599-617).
gtttgccaactgacaaaaa

SEQ ID NO: 475627 - DNA, 19 bp, Mus musculus
  siRNA target sequence for Snrpa1 (NM_021336.3,640-658).
gatgtggaagcaatcaaga

SEQ ID NO: 475628 - DNA, 19 bp, Mus musculus
  siRNA target sequence for Srp14 (NM_009273.2,123-141).
cgtcgggcagcgtgttcat

SEQ ID NO: 475629 - DNA, 19 bp, Mus musculus
  siRNA target sequence for Srp14 (NM_009273.2,136-154).
gttcatcaccctcaagaaa

SEQ ID NO: 475630 - DNA, 19 bp, Mus musculus
  siRNA target sequence for Srp14 (NM_009273.2,158-176).
gacggtcgcaccaaaccta

SEQ ID NO: 475631 - DNA, 19 bp, Mus musculus
  siRNA target sequence for Srp14 (NM_009273.2,265-283).
cgtggtgagctccaaagaa

SEQ ID NO: 475632 - DNA, 19 bp, Mus musculus
  siRNA target sequence for Srp14 (NM_009273.2,281-299).
gaagtgaacaagtttcaga

SEQ ID NO: 475633 - DNA, 19 bp, Mus musculus
  siRNA target sequence for Srp14 (NM_009273.2,292-310).
gtttcagatggcctattca

SEQ ID NO: 475634 - DNA, 19 bp, Mus musculus
  siRNA target sequence for Srp9 (NM_012058.2,282-300).
cggatgatctagtttgttt

SEQ ID NO: 475635 - DNA, 19 bp, Mus musculus
  siRNA target sequence for Ssa2 (NM_013835.1,112-130).
gagtgagactcaagtagtt

SEQ ID NO: 475636 - DNA, 19 bp, Mus musculus
  siRNA target sequence for Ssa2 (NM_013835.1,116-134).
gagactcaagtagttaact

SEQ ID NO: 475637 - DNA, 19 bp, Mus musculus
  siRNA target sequence for Ssa2 (NM_013835.1,118-136).
gactcaagtagttaactca

SEQ ID NO: 475638 - DNA, 19 bp, Mus musculus
  siRNA target sequence for Ssa2 (NM_013835.1,153-171).
ggcaggtcaccgacatgaa

SEQ ID NO: 475639 - DNA, 19 bp, Mus musculus
  siRNA target sequence for Ssa2 (NM_013835.1,203-221).
gaaggtggcacgtactata

SEQ ID NO: 475640 - DNA, 19 bp, Mus musculus
  siRNA target sequence for Ssa2 (NM_013835.1,206-224).
ggtggcacgtactatatca

SEQ ID NO: 475641 - DNA, 19 bp, Mus musculus
  siRNA target sequence for Ssa2 (NM_013835.1,213-231).
cgtactatatcaaagaaca

SEQ ID NO: 475642 - DNA, 19 bp, Mus musculus
  siRNA target sequence for Ssa2 (NM_013835.1,258-276).
ccttaattagactgattga

SEQ ID NO: 475643 - DNA, 19 bp, Mus musculus
  siRNA target sequence for Ssa2 (NM_013835.1,282-300).
gcagaggatgtgaagtgat

SEQ ID NO: 475644 - DNA, 19 bp, Mus musculus
  siRNA target sequence for Ssa2 (NM_013835.1,291-309).
gtgaagtgatccaggaaat

SEQ ID NO: 475645 - DNA, 19 bp, Mus musculus
  siRNA target sequence for Ssa2 (NM_013835.1,380-398).
cagtgtgcggacataaaca

SEQ ID NO: 475646 - DNA, 19 bp, Mus musculus
  siRNA target sequence for Ssa2 (NM_013835.1,403-421).
gcaagcagcctttaaagct

SEQ ID NO: 475647 - DNA, 19 bp, Mus musculus
  siRNA target sequence for Ssa2 (NM_013835.1,535-553).
ggcagactggtacaatgaa

SEQ ID NO: 475648 - DNA, 19 bp, Mus musculus
  siRNA target sequence for Ssa2 (NM_013835.1,569-587).
gtggcgctggtggttacaa

SEQ ID NO: 475649 - DNA, 19 bp, Mus musculus
  siRNA target sequence for Ssa2 (NM_013835.1,572-590).
gcgctggtggttacaaagt

SEQ ID NO: 475650 - DNA, 19 bp, Mus musculus
  siRNA target sequence for Ssa2 (NM_013835.1,573-591).
cgctggtggttacaaagta

SEQ ID NO: 475651 - DNA, 19 bp, Mus musculus
  siRNA target sequence for Ssa2 (NM_013835.1,574-592).
gctggtggttacaaagtat

SEQ ID NO: 475652 - DNA, 19 bp, Mus musculus
  siRNA target sequence for Ssa2 (NM_013835.1,575-593).
ctggtggttacaaagtata

SEQ ID NO: 475653 - DNA, 19 bp, Mus musculus
  siRNA target sequence for Ssa2 (NM_013835.1,604-622).
cggctggtctcacaaagat

SEQ ID NO: 475654 - DNA, 19 bp, Mus musculus
  siRNA target sequence for Ssa2 (NM_013835.1,654-672).
gtgaaggacttgctattgt

SEQ ID NO: 475655 - DNA, 19 bp, Mus musculus
  siRNA target sequence for Ssa2 (NM_013835.1,656-674).
gaaggacttgctattgtga

SEQ ID NO: 475656 - DNA, 19 bp, Mus musculus
  siRNA target sequence for Ssa2 (NM_013835.1,671-689).
gtgaccaagtatatcacaa

SEQ ID NO: 475657 - DNA, 19 bp, Mus musculus
  siRNA target sequence for Ssa2 (NM_013835.1,685-703).
cacaaagggctggaaagaa

SEQ ID NO: 475658 - DNA, 19 bp, Mus musculus
  siRNA target sequence for Ssa2 (NM_013835.1,799-817).
cgacctggaagtcattcat

SEQ ID NO: 475659 - DNA, 19 bp, Mus musculus
  siRNA target sequence for Ssa2 (NM_013835.1,844-862).
ggaacacctgctgacaaat

SEQ ID NO: 475660 - DNA, 19 bp, Mus musculus
  siRNA target sequence for Ssa2 (NM_013835.1,848-866).
cacctgctgacaaatcact

SEQ ID NO: 475661 - DNA, 19 bp, Mus musculus
  siRNA target sequence for Ssa2 (NM_013835.1,934-952).
gggaaagatgactgctaat

SEQ ID NO: 475662 - DNA, 19 bp, Mus musculus
  siRNA target sequence for Ssa2 (NM_013835.1,958-976).
gcttgaaccaggaaactct

SEQ ID NO: 475663 - DNA, 19 bp, Mus musculus
  siRNA target sequence for Ssa2 (NM_013835.1,1018-1036).
gctcaaaaaggctcgtata

SEQ ID NO: 475664 - DNA, 19 bp, Mus musculus
  siRNA target sequence for Ssa2 (NM_013835.1,1021-1039).
caaaaaggctcgtatacat

SEQ ID NO: 475665 - DNA, 19 bp, Mus musculus
  siRNA target sequence for Ssa2 (NM_013835.1,1027-1045).
ggctcgtatacatccattt

SEQ ID NO: 475666 - DNA, 19 bp, Mus musculus
  siRNA target sequence for Ssa2 (NM_013835.1,1029-1047).
ctcgtatacatccatttca

SEQ ID NO: 475667 - DNA, 19 bp, Mus musculus
  siRNA target sequence for Ssa2 (NM_013835.1,1032-1050).
gtatacatccatttcatgt

SEQ ID NO: 475668 - DNA, 19 bp, Mus musculus
  siRNA target sequence for Ssa2 (NM_013835.1,1049-1067).
gttttaattgcattagaga

SEQ ID NO: 475669 - DNA, 19 bp, Mus musculus
  siRNA target sequence for Ssa2 (NM_013835.1,1139-1157).
gatgctgctttttatacaa

SEQ ID NO: 475670 - DNA, 19 bp, Mus musculus
  siRNA target sequence for Ssa2 (NM_013835.1,1142-1160).
gctgctttttatacaacat

SEQ ID NO: 475671 - DNA, 19 bp, Mus musculus
  siRNA target sequence for Ssa2 (NM_013835.1,1238-1256).
ggtagtgtactcaatgcta

SEQ ID NO: 475672 - DNA, 19 bp, Mus musculus
  siRNA target sequence for Ssa2 (NM_013835.1,1283-1301).
gtggttacacggacagaaa

SEQ ID NO: 475673 - DNA, 19 bp, Mus musculus
  siRNA target sequence for Ssa2 (NM_013835.1,1285-1303).
ggttacacggacagaaaaa

SEQ ID NO: 475674 - DNA, 19 bp, Mus musculus
  siRNA target sequence for Ssa2 (NM_013835.1,1306-1324).
gtcttcggtggttgctttt

SEQ ID NO: 475675 - DNA, 19 bp, Mus musculus
  siRNA target sequence for Ssa2 (NM_013835.1,1353-1371).
ctacagacatgacattaca

SEQ ID NO: 475676 - DNA, 19 bp, Mus musculus
  siRNA target sequence for Ssa2 (NM_013835.1,1376-1394).
gttttaacggctatgaata

SEQ ID NO: 475677 - DNA, 19 bp, Mus musculus
  siRNA target sequence for Ssa2 (NM_013835.1,1432-1450).
gatctgggcccagaaaaca

SEQ ID NO: 475678 - DNA, 19 bp, Mus musculus
  siRNA target sequence for Ssa2 (NM_013835.1,1471-1489).
cgttgtgtttactgataat

SEQ ID NO: 475679 - DNA, 19 bp, Mus musculus
  siRNA target sequence for Ssa2 (NM_013835.1,1475-1493).
gtgtttactgataatgaga

SEQ ID NO: 475680 - DNA, 19 bp, Mus musculus
  siRNA target sequence for Ssa2 (NM_013835.1,1537-1555).
ccgaaagaaaatggatatt

SEQ ID NO: 475681 - DNA, 19 bp, Mus musculus
  siRNA target sequence for Ssa2 (NM_013835.1,1571-1589).
gtttgtgggatgacatcaa

SEQ ID NO: 475682 - DNA, 19 bp, Mus musculus
  siRNA target sequence for Ssa2 (NM_013835.1,1630-1648).
ggatatgtgcggctttgat

SEQ ID NO: 475683 - DNA, 19 bp, Mus musculus
  siRNA target sequence for Ssa2 (NM_013835.1,1631-1649).
gatatgtgcggctttgata

SEQ ID NO: 475684 - DNA, 19 bp, Mus musculus
  siRNA target sequence for Ssa2 (NM_013835.1,1661-1679).
gatgtaattcggaatttca

SEQ ID NO: 475685 - DNA, 19 bp, Mus musculus
  siRNA target sequence for Ssa2 (NM_013835.1,1664-1682).
gtaattcggaatttcacat

SEQ ID NO: 475686 - DNA, 19 bp, Mus musculus
  siRNA target sequence for Ssb (NM_009278.1,184-202).
ccaaaatctgtcatcaaat

SEQ ID NO: 475687 - DNA, 19 bp, Mus musculus
  siRNA target sequence for Ssb (NM_009278.1,191-209).
ctgtcatcaaattgagtat

SEQ ID NO: 475688 - DNA, 19 bp, Mus musculus
  siRNA target sequence for Ssb (NM_009278.1,193-211).
gtcatcaaattgagtatta

SEQ ID NO: 475689 - DNA, 19 bp, Mus musculus
  siRNA target sequence for Ssb (NM_009278.1,195-213).
catcaaattgagtattatt

SEQ ID NO: 475690 - DNA, 19 bp, Mus musculus
  siRNA target sequence for Ssb (NM_009278.1,279-297).
gtacctttggaaacaatga

SEQ ID NO: 475691 - DNA, 19 bp, Mus musculus
  siRNA target sequence for Ssb (NM_009278.1,358-376).
gcaaatctaaggcaaaact

SEQ ID NO: 475692 - DNA, 19 bp, Mus musculus
  siRNA target sequence for Ssb (NM_009278.1,380-398).
ggaagtcagtgcagacaaa

SEQ ID NO: 475693 - DNA, 19 bp, Mus musculus
  siRNA target sequence for Ssb (NM_009278.1,384-402).
gtcagtgcagacaaaacta

SEQ ID NO: 475694 - DNA, 19 bp, Mus musculus
  siRNA target sequence for Ssb (NM_009278.1,435-453).
gaagtgacggatgagtata

SEQ ID NO: 475695 - DNA, 19 bp, Mus musculus
  siRNA target sequence for Ssb (NM_009278.1,442-460).
cggatgagtataagaatga

SEQ ID NO: 475696 - DNA, 19 bp, Mus musculus
  siRNA target sequence for Ssb (NM_009278.1,443-461).
ggatgagtataagaatgat

SEQ ID NO: 475697 - DNA, 19 bp, Mus musculus
  siRNA target sequence for Ssb (NM_009278.1,499-517).
ctgacgccacccttgatga

SEQ ID NO: 475698 - DNA, 19 bp, Mus musculus
  siRNA target sequence for Ssb (NM_009278.1,503-521).
cgccacccttgatgatata

SEQ ID NO: 475699 - DNA, 19 bp, Mus musculus
  siRNA target sequence for Ssb (NM_009278.1,504-522).
gccacccttgatgatataa

SEQ ID NO: 475700 - DNA, 19 bp, Mus musculus
  siRNA target sequence for Ssb (NM_009278.1,505-523).
ccacccttgatgatataaa

SEQ ID NO: 475701 - DNA, 19 bp, Mus musculus
  siRNA target sequence for Ssb (NM_009278.1,506-524).
cacccttgatgatataaaa

SEQ ID NO: 475702 - DNA, 19 bp, Mus musculus
  siRNA target sequence for Ssb (NM_009278.1,546-564).
caaatactgaatattcaaa

SEQ ID NO: 475703 - DNA, 19 bp, Mus musculus
  siRNA target sequence for Ssb (NM_009278.1,619-637).
gtattcagtctgcaaagaa

SEQ ID NO: 475704 - DNA, 19 bp, Mus musculus
  siRNA target sequence for Ssb (NM_009278.1,680-698).
gctaatactctttaaggaa

SEQ ID NO: 475705 - DNA, 19 bp, Mus musculus
  siRNA target sequence for Ssb (NM_009278.1,827-845).
gggatgcttactgaagttt

SEQ ID NO: 475706 - DNA, 19 bp, Mus musculus
  siRNA target sequence for Ssb (NM_009278.1,828-846).
ggatgcttactgaagtttt

SEQ ID NO: 475707 - DNA, 19 bp, Mus musculus
  siRNA target sequence for Ssb (NM_009278.1,863-881).
ccagacctgtagagaagat

SEQ ID NO: 475708 - DNA, 19 bp, Mus musculus
  siRNA target sequence for Ssb (NM_009278.1,866-884).
gacctgtagagaagattta

SEQ ID NO: 475709 - DNA, 19 bp, Mus musculus
  siRNA target sequence for Ssb (NM_009278.1,937-955).
gagcaaaagagggaataat

SEQ ID NO: 475710 - DNA, 19 bp, Mus musculus
  siRNA target sequence for Ssb (NM_009278.1,997-1015).
gaaatgcaaataatggtaa

SEQ ID NO: 475711 - DNA, 19 bp, Mus musculus
  siRNA target sequence for Ssb (NM_009278.1,1011-1029).
ggtaacctactgttaagga

SEQ ID NO: 475712 - DNA, 19 bp, Mus musculus
  siRNA target sequence for Ssb (NM_009278.1,1037-1055).
ggtgacttggaaagtacta

SEQ ID NO: 475713 - DNA, 19 bp, Mus musculus
  siRNA target sequence for Ssb (NM_009278.1,1107-1125).
gaatccctaaacaaatgga

SEQ ID NO: 475714 - DNA, 19 bp, Mus musculus
  siRNA target sequence for Ssb (NM_009278.1,1177-1195).
cagcagcccgcagatttaa

SEQ ID NO: 475715 - DNA, 19 bp, Mus musculus
  siRNA target sequence for Ssb (NM_009278.1,1208-1226).
gggtaataggcctggttat

SEQ ID NO: 475716 - DNA, 19 bp, Mus musculus
  siRNA target sequence for Ssb (NM_009278.1,1264-1282).
ggaggacaagatttgatga

SEQ ID NO: 475717 - DNA, 19 bp, Mus musculus
  siRNA target sequence for Ssb (NM_009278.1,1291-1309).
gtcgtcgtggaccaatgaa

SEQ ID NO: 475718 - DNA, 19 bp, Mus musculus
  siRNA target sequence for Ssb (NM_009278.1,1293-1311).
cgtcgtggaccaatgaaaa

SEQ ID NO: 475719 - DNA, 19 bp, Mus musculus
  siRNA target sequence for Ssb (NM_009278.1,1333-1351).
gagaagaacccgcatcaaa

SEQ ID NO: 475720 - DNA, 19 bp, Mus musculus
  siRNA target sequence for Ssb (NM_009278.1,1338-1356).
gaacccgcatcaaagcata

SEQ ID NO: 475721 - DNA, 19 bp, Mus musculus
  siRNA target sequence for Ssb (NM_009278.1,1342-1360).
ccgcatcaaagcataagaa

SEQ ID NO: 475722 - DNA, 19 bp, Mus musculus
  siRNA target sequence for Supt6h (NM_009297.1,254-272).
cctagagtcaccaagaagt

SEQ ID NO: 475723 - DNA, 19 bp, Mus musculus
  siRNA target sequence for Supt6h (NM_009297.1,258-276).
gagtcaccaagaagtttgt

SEQ ID NO: 475724 - DNA, 19 bp, Mus musculus
  siRNA target sequence for Supt6h (NM_009297.1,313-331).
gaatctagatgatcaagat

SEQ ID NO: 475725 - DNA, 19 bp, Mus musculus
  siRNA target sequence for Supt6h (NM_009297.1,335-353).
cgaggcaacctcaaagact

SEQ ID NO: 475726 - DNA, 19 bp, Mus musculus
  siRNA target sequence for Supt6h (NM_009297.1,442-460).
gagaaaacgcccatctttt

SEQ ID NO: 475727 - DNA, 19 bp, Mus musculus
  siRNA target sequence for Supt6h (NM_009297.1,467-485).
cgcctggaagatgatgatt

SEQ ID NO: 475728 - DNA, 19 bp, Mus musculus
  siRNA target sequence for Supt6h (NM_009297.1,518-536).
gtcaaacgaggacaaaaat

SEQ ID NO: 475729 - DNA, 19 bp, Mus musculus
  siRNA target sequence for Supt6h (NM_009297.1,539-557).
cgacgtgtcaaaaaaatgt

SEQ ID NO: 475730 - DNA, 19 bp, Mus musculus
  siRNA target sequence for Supt6h (NM_009297.1,614-632).
gccattgcaggggaaatct

SEQ ID NO: 475731 - DNA, 19 bp, Mus musculus
  siRNA target sequence for Supt6h (NM_009297.1,615-633).
ccattgcaggggaaatctt

SEQ ID NO: 475732 - DNA, 19 bp, Mus musculus
  siRNA target sequence for Supt6h (NM_009297.1,787-805).
gctccctggatatacagat

SEQ ID NO: 475733 - DNA, 19 bp, Mus musculus
  siRNA target sequence for Supt6h (NM_009297.1,835-853).
cggtgtggactttgactat

SEQ ID NO: 475734 - DNA, 19 bp, Mus musculus
  siRNA target sequence for Supt6h (NM_009297.1,865-883).
gaaatacaatgaatacgat

SEQ ID NO: 475735 - DNA, 19 bp, Mus musculus
  siRNA target sequence for Supt6h (NM_009297.1,973-991).
gagtcgcaggagcatcttt

SEQ ID NO: 475736 - DNA, 19 bp, Mus musculus
  siRNA target sequence for Supt6h (NM_009297.1,1134-1152).
ctgactggatctatagaaa

SEQ ID NO: 475737 - DNA, 19 bp, Mus musculus
  siRNA target sequence for Supt6h (NM_009297.1,1183-1201).
ggacagctgtgattaccta

SEQ ID NO: 475738 - DNA, 19 bp, Mus musculus
  siRNA target sequence for Supt6h (NM_009297.1,1204-1222).
ccgtgggcagccaactagt

SEQ ID NO: 475739 - DNA, 19 bp, Mus musculus
  siRNA target sequence for Supt6h (NM_009297.1,1245-1263).
gcacagttcagaagatcaa

SEQ ID NO: 475740 - DNA, 19 bp, Mus musculus
  siRNA target sequence for Supt6h (NM_009297.1,1279-1297).
catgcggaatcagcatttt

SEQ ID NO: 475741 - DNA, 19 bp, Mus musculus
  siRNA target sequence for Supt6h (NM_009297.1,1400-1418).
ctgagaatccgcaaagaga

SEQ ID NO: 475742 - DNA, 19 bp, Mus musculus
  siRNA target sequence for Supt6h (NM_009297.1,1421-1439).
ctaacacggctgtttgaga

SEQ ID NO: 475743 - DNA, 19 bp, Mus musculus
  siRNA target sequence for Supt6h (NM_009297.1,1425-1443).
cacggctgtttgagaagat

SEQ ID NO: 475744 - DNA, 19 bp, Mus musculus
  siRNA target sequence for Supt6h (NM_009297.1,1498-1516).
cggcatccgggctctagat

SEQ ID NO: 475745 - DNA, 19 bp, Mus musculus
  siRNA target sequence for Supt6h (NM_009297.1,1504-1522).
ccgggctctagatactact

SEQ ID NO: 475746 - DNA, 19 bp, Mus musculus
  siRNA target sequence for Supt6h (NM_009297.1,1568-1586).
gacgtctacaaccatttct

SEQ ID NO: 475747 - DNA, 19 bp, Mus musculus
  siRNA target sequence for Supt6h (NM_009297.1,1743-1761).
gccgagacatgtataccat

SEQ ID NO: 475748 - DNA, 19 bp, Mus musculus
  siRNA target sequence for Supt6h (NM_009297.1,2020-2038).
gagagccaagctaaacata

SEQ ID NO: 475749 - DNA, 19 bp, Mus musculus
  siRNA target sequence for Supt6h (NM_009297.1,2043-2061).
caaccaagaaaggtagaaa

SEQ ID NO: 475750 - DNA, 19 bp, Mus musculus
  siRNA target sequence for Supt6h (NM_009297.1,2074-2092).
ggcccactacgcttactct

SEQ ID NO: 475751 - DNA, 19 bp, Mus musculus
  siRNA target sequence for Supt6h (NM_009297.1,2075-2093).
gcccactacgcttactctt

SEQ ID NO: 475752 - DNA, 19 bp, Mus musculus
  siRNA target sequence for Supt6h (NM_009297.1,2084-2102).
gcttactcttttaagtact

SEQ ID NO: 475753 - DNA, 19 bp, Mus musculus
  siRNA target sequence for Supt6h (NM_009297.1,2085-2103).
cttactcttttaagtactt

SEQ ID NO: 475754 - DNA, 19 bp, Mus musculus
  siRNA target sequence for Supt6h (NM_009297.1,2222-2240).
ggtaatgaccagacatatt

SEQ ID NO: 475755 - DNA, 19 bp, Mus musculus
  siRNA target sequence for Supt6h (NM_009297.1,2522-2540).
cgagtcctaggcattgctt

SEQ ID NO: 475756 - DNA, 19 bp, Mus musculus
  siRNA target sequence for Supt6h (NM_009297.1,2523-2541).
gagtcctaggcattgcttt

SEQ ID NO: 475757 - DNA, 19 bp, Mus musculus
  siRNA target sequence for Supt6h (NM_009297.1,2612-2630).
cgcctgccccattttacca

SEQ ID NO: 475758 - DNA, 19 bp, Mus musculus
  siRNA target sequence for Supt6h (NM_009297.1,2613-2631).
gcctgccccattttaccaa

SEQ ID NO: 475759 - DNA, 19 bp, Mus musculus
  siRNA target sequence for Supt6h (NM_009297.1,2663-2681).
gaaaagaaggctcaagata

SEQ ID NO: 475760 - DNA, 19 bp, Mus musculus
  siRNA target sequence for Supt6h (NM_009297.1,2826-2844).
gggtggagctggttgacaa

SEQ ID NO: 475761 - DNA, 19 bp, Mus musculus
  siRNA target sequence for Supt6h (NM_009297.1,2849-2867).
ctggccattctgtacatga

SEQ ID NO: 475762 - DNA, 19 bp, Mus musculus
  siRNA target sequence for Supt6h (NM_009297.1,2944-2962).
ccaagaccctctgatagaa

SEQ ID NO: 475763 - DNA, 19 bp, Mus musculus
  siRNA target sequence for Supt6h (NM_009297.1,3044-3062).
ctgcttaacgccttgtact

SEQ ID NO: 475764 - DNA, 19 bp, Mus musculus
  siRNA target sequence for Supt6h (NM_009297.1,3054-3072).
ccttgtactgtgaattcat

SEQ ID NO: 475765 - DNA, 19 bp, Mus musculus
  siRNA target sequence for Supt6h (NM_009297.1,3108-3126).
gtgccattgcccatcctta

SEQ ID NO: 475766 - DNA, 19 bp, Mus musculus
  siRNA target sequence for Supt6h (NM_009297.1,3174-3192).
ggacccacctgctgaagat

SEQ ID NO: 475767 - DNA, 19 bp, Mus musculus
  siRNA target sequence for Supt6h (NM_009297.1,3175-3193).
gacccacctgctgaagatt

SEQ ID NO: 475768 - DNA, 19 bp, Mus musculus
  siRNA target sequence for Supt6h (NM_009297.1,3233-3251).
ctggtcaccatgtgtcata

SEQ ID NO: 475769 - DNA, 19 bp, Mus musculus
  siRNA target sequence for Supt6h (NM_009297.1,3254-3272).
ggtcccaaagtcttcatga

SEQ ID NO: 475770 - DNA, 19 bp, Mus musculus
  siRNA target sequence for Supt6h (NM_009297.1,3255-3273).
gtcccaaagtcttcatgaa

SEQ ID NO: 475771 - DNA, 19 bp, Mus musculus
  siRNA target sequence for Supt6h (NM_009297.1,3257-3275).
cccaaagtcttcatgaatt

SEQ ID NO: 475772 - DNA, 19 bp, Mus musculus
  siRNA target sequence for Supt6h (NM_009297.1,3321-3339).
ctgactcatacattgaagt

SEQ ID NO: 475773 - DNA, 19 bp, Mus musculus
  siRNA target sequence for Supt6h (NM_009297.1,3354-3372).
gagtccaccctgaaacgta

SEQ ID NO: 475774 - DNA, 19 bp, Mus musculus
  siRNA target sequence for Supt6h (NM_009297.1,3397-3415).
ggatgccttagaatacgat

SEQ ID NO: 475775 - DNA, 19 bp, Mus musculus
  siRNA target sequence for Supt6h (NM_009297.1,3412-3430).
cgatgagtctgcagaagat

SEQ ID NO: 475776 - DNA, 19 bp, Mus musculus
  siRNA target sequence for Supt6h (NM_009297.1,3441-3459).
ctggagcccttgaggaaat

SEQ ID NO: 475777 - DNA, 19 bp, Mus musculus
  siRNA target sequence for Supt6h (NM_009297.1,3444-3462).
gagcccttgaggaaatctt

SEQ ID NO: 475778 - DNA, 19 bp, Mus musculus
  siRNA target sequence for Supt6h (NM_009297.1,3470-3488).
ccagagcggctgaaggatt

SEQ ID NO: 475779 - DNA, 19 bp, Mus musculus
  siRNA target sequence for Supt6h (NM_009297.1,3471-3489).
cagagcggctgaaggattt

SEQ ID NO: 475780 - DNA, 19 bp, Mus musculus
  siRNA target sequence for Supt6h (NM_009297.1,3475-3493).
gcggctgaaggatttagat

SEQ ID NO: 475781 - DNA, 19 bp, Mus musculus
  siRNA target sequence for Supt6h (NM_009297.1,3477-3495).
ggctgaaggatttagatct

SEQ ID NO: 475782 - DNA, 19 bp, Mus musculus
  siRNA target sequence for Supt6h (NM_009297.1,3542-3560).
cacatcacactgtatgaca

SEQ ID NO: 475783 - DNA, 19 bp, Mus musculus
  siRNA target sequence for Supt6h (NM_009297.1,3563-3581).
cgagcagagctcagttgta

SEQ ID NO: 475784 - DNA, 19 bp, Mus musculus
  siRNA target sequence for Supt6h (NM_009297.1,3604-3622).
ctaccgctctcctaacaca

SEQ ID NO: 475785 - DNA, 19 bp, Mus musculus
  siRNA target sequence for Supt6h (NM_009297.1,3654-3672).
cgccagagaccttctacat

SEQ ID NO: 475786 - DNA, 19 bp, Mus musculus
  siRNA target sequence for Supt6h (NM_009297.1,3659-3677).
gagaccttctacattggaa

SEQ ID NO: 475787 - DNA, 19 bp, Mus musculus
  siRNA target sequence for Supt6h (NM_009297.1,3664-3682).
cttctacattggaaagctt

SEQ ID NO: 475788 - DNA, 19 bp, Mus musculus
  siRNA target sequence for Supt6h (NM_009297.1,3739-3757).
ccaggccatccgaaatgat

SEQ ID NO: 475789 - DNA, 19 bp, Mus musculus
  siRNA target sequence for Supt6h (NM_009297.1,3856-3874).
ggccattggtgtgaaaaca

SEQ ID NO: 475790 - DNA, 19 bp, Mus musculus
  siRNA target sequence for Supt6h (NM_009297.1,3868-3886).
gaaaacacggctagacaat

SEQ ID NO: 475791 - DNA, 19 bp, Mus musculus
  siRNA target sequence for Supt6h (NM_009297.1,3897-3915).
gcttcatccctaccaaatt

SEQ ID NO: 475792 - DNA, 19 bp, Mus musculus
  siRNA target sequence for Supt6h (NM_009297.1,3971-3989).
gttcactgccggatcatga

SEQ ID NO: 475793 - DNA, 19 bp, Mus musculus
  siRNA target sequence for Supt6h (NM_009297.1,3974-3992).
cactgccggatcatgaaga

SEQ ID NO: 475794 - DNA, 19 bp, Mus musculus
  siRNA target sequence for Supt6h (NM_009297.1,3980-3998).
cggatcatgaagatcgata

SEQ ID NO: 475795 - DNA, 19 bp, Mus musculus
  siRNA target sequence for Supt6h (NM_009297.1,3981-3999).
ggatcatgaagatcgatat

SEQ ID NO: 475796 - DNA, 19 bp, Mus musculus
  siRNA target sequence for Supt6h (NM_009297.1,3982-4000).
gatcatgaagatcgatatt

SEQ ID NO: 475797 - DNA, 19 bp, Mus musculus
  siRNA target sequence for Supt6h (NM_009297.1,3985-4003).
catgaagatcgatattgaa

SEQ ID NO: 475798 - DNA, 19 bp, Mus musculus
  siRNA target sequence for Supt6h (NM_009297.1,4075-4093).
ggacacctactatgacttt

SEQ ID NO: 475799 - DNA, 19 bp, Mus musculus
  siRNA target sequence for Supt6h (NM_009297.1,4142-4160).
cagcagcggaccacataca

SEQ ID NO: 475800 - DNA, 19 bp, Mus musculus
  siRNA target sequence for Supt6h (NM_009297.1,4145-4163).
cagcggaccacatacatca

SEQ ID NO: 475801 - DNA, 19 bp, Mus musculus
  siRNA target sequence for Supt6h (NM_009297.1,4175-4193).
gcacacccgtccttccata

SEQ ID NO: 475802 - DNA, 19 bp, Mus musculus
  siRNA target sequence for Supt6h (NM_009297.1,4176-4194).
cacacccgtccttccataa

SEQ ID NO: 475803 - DNA, 19 bp, Mus musculus
  siRNA target sequence for Supt6h (NM_009297.1,4178-4196).
cacccgtccttccataaca

SEQ ID NO: 475804 - DNA, 19 bp, Mus musculus
  siRNA target sequence for Supt6h (NM_009297.1,4180-4198).
cccgtccttccataacata

SEQ ID NO: 475805 - DNA, 19 bp, Mus musculus
  siRNA target sequence for Supt6h (NM_009297.1,4181-4199).
ccgtccttccataacataa

SEQ ID NO: 475806 - DNA, 19 bp, Mus musculus
  siRNA target sequence for Supt6h (NM_009297.1,4182-4200).
cgtccttccataacataaa

SEQ ID NO: 475807 - DNA, 19 bp, Mus musculus
  siRNA target sequence for Supt6h (NM_009297.1,4183-4201).
gtccttccataacataaat

SEQ ID NO: 475808 - DNA, 19 bp, Mus musculus
  siRNA target sequence for Supt6h (NM_009297.1,4235-4253).
gaccaaggggatgttatca

SEQ ID NO: 475809 - DNA, 19 bp, Mus musculus
  siRNA target sequence for Supt6h (NM_009297.1,4252-4270).
cattcggcccagcagtaaa

SEQ ID NO: 475810 - DNA, 19 bp, Mus musculus
  siRNA target sequence for Supt6h (NM_009297.1,4260-4278).
ccagcagtaaaggtgaaaa

SEQ ID NO: 475811 - DNA, 19 bp, Mus musculus
  siRNA target sequence for Supt6h (NM_009297.1,4380-4398).
ggatcaacagtgaggaatt

SEQ ID NO: 475812 - DNA, 19 bp, Mus musculus
  siRNA target sequence for Supt6h (NM_009297.1,4381-4399).
gatcaacagtgaggaattt

SEQ ID NO: 475813 - DNA, 19 bp, Mus musculus
  siRNA target sequence for Supt6h (NM_009297.1,4493-4511).
ggtggggaccgaaagaaat

SEQ ID NO: 475814 - DNA, 19 bp, Mus musculus
  siRNA target sequence for Supt6h (NM_009297.1,4494-4512).
gtggggaccgaaagaaatt

SEQ ID NO: 475815 - DNA, 19 bp, Mus musculus
  siRNA target sequence for Supt6h (NM_009297.1,4497-4515).
gggaccgaaagaaattaga

SEQ ID NO: 475816 - DNA, 19 bp, Mus musculus
  siRNA target sequence for Supt6h (NM_009297.1,4516-4534).
ggagctgctcatcaaaact

SEQ ID NO: 475817 - DNA, 19 bp, Mus musculus
  siRNA target sequence for Supt6h (NM_009297.1,4517-4535).
gagctgctcatcaaaacta

SEQ ID NO: 475818 - DNA, 19 bp, Mus musculus
  siRNA target sequence for Supt6h (NM_009297.1,4548-4566).
ccaccttcatcccttactt

SEQ ID NO: 475819 - DNA, 19 bp, Mus musculus
  siRNA target sequence for Supt6h (NM_009297.1,4623-4641).
gtaaacccaggatagaata

SEQ ID NO: 475820 - DNA, 19 bp, Mus musculus
  siRNA target sequence for Supt6h (NM_009297.1,4628-4646).
cccaggatagaatatgtaa

SEQ ID NO: 475821 - DNA, 19 bp, Mus musculus
  siRNA target sequence for Supt6h (NM_009297.1,4632-4650).
ggatagaatatgtaacagt

SEQ ID NO: 475822 - DNA, 19 bp, Mus musculus
  siRNA target sequence for Supt6h (NM_009297.1,4713-4731).
ggtttaaggatcactatca

SEQ ID NO: 475823 - DNA, 19 bp, Mus musculus
  siRNA target sequence for Supt6h (NM_009297.1,4773-4791).
cacggacccctgcttctat

SEQ ID NO: 475824 - DNA, 19 bp, Mus musculus
  siRNA target sequence for Supt6h (NM_009297.1,4777-4795).
gacccctgcttctatcaat

SEQ ID NO: 475825 - DNA, 19 bp, Mus musculus
  siRNA target sequence for Supt6h (NM_009297.1,4781-4799).
cctgcttctatcaatgcta

SEQ ID NO: 475826 - DNA, 19 bp, Mus musculus
  siRNA target sequence for Supt6h (NM_009297.1,4797-4815).
ctaccccagccaacatcaa

SEQ ID NO: 475827 - DNA, 19 bp, Mus musculus
  siRNA target sequence for Supt6h (NM_009297.1,5016-5034).
cagtggccacaccactaat

SEQ ID NO: 475828 - DNA, 19 bp, Mus musculus
  siRNA target sequence for Supt6h (NM_009297.1,5038-5056).
cccaagctactcctatact

SEQ ID NO: 475829 - DNA, 19 bp, Mus musculus
  siRNA target sequence for Supt6h (NM_009297.1,5039-5057).
ccaagctactcctatacta

SEQ ID NO: 475830 - DNA, 19 bp, Mus musculus
  siRNA target sequence for Supt6h (NM_009297.1,5243-5261).
gcagaacgacggaaacaga

SEQ ID NO: 475831 - DNA, 19 bp, Mus musculus
  siRNA target sequence for Tia1 (NM_011585.2,302-320).
gccagattggaccttgtaa

SEQ ID NO: 475832 - DNA, 19 bp, Mus musculus
  siRNA target sequence for Tia1 (NM_011585.2,303-321).
ccagattggaccttgtaaa

SEQ ID NO: 475833 - DNA, 19 bp, Mus musculus
  siRNA target sequence for Tia1 (NM_011585.2,349-367).
ggaaatgacccatactgtt

SEQ ID NO: 475834 - DNA, 19 bp, Mus musculus
  siRNA target sequence for Tia1 (NM_011585.2,350-368).
gaaatgacccatactgttt

SEQ ID NO: 475835 - DNA, 19 bp, Mus musculus
  siRNA target sequence for Tia1 (NM_011585.2,436-454).
ggtaaggaagtgaaagtga

SEQ ID NO: 475836 - DNA, 19 bp, Mus musculus
  siRNA target sequence for Tia1 (NM_011585.2,437-455).
gtaaggaagtgaaagtgaa

SEQ ID NO: 475837 - DNA, 19 bp, Mus musculus
  siRNA target sequence for Tia1 (NM_011585.2,467-485).
cccctagcagtcaaaagaa

SEQ ID NO: 475838 - DNA, 19 bp, Mus musculus
  siRNA target sequence for Tia1 (NM_011585.2,510-528).
cagcacacagcgttcacaa

SEQ ID NO: 475839 - DNA, 19 bp, Mus musculus
  siRNA target sequence for Tia1 (NM_011585.2,513-531).
cacacagcgttcacaagat

SEQ ID NO: 475840 - DNA, 19 bp, Mus musculus
  siRNA target sequence for Tia1 (NM_011585.2,515-533).
cacagcgttcacaagatca

SEQ ID NO: 475841 - DNA, 19 bp, Mus musculus
  siRNA target sequence for Tia1 (NM_011585.2,617-635).
cagatgcccgtgtggtaaa

SEQ ID NO: 475842 - DNA, 19 bp, Mus musculus
  siRNA target sequence for Tia1 (NM_011585.2,622-640).
gcccgtgtggtaaaagaca

SEQ ID NO: 475843 - DNA, 19 bp, Mus musculus
  siRNA target sequence for Tia1 (NM_011585.2,623-641).
cccgtgtggtaaaagacat

SEQ ID NO: 475844 - DNA, 19 bp, Mus musculus
  siRNA target sequence for Tia1 (NM_011585.2,673-691).
gtctcctttttcaacaaat

SEQ ID NO: 475845 - DNA, 19 bp, Mus musculus
  siRNA target sequence for Tia1 (NM_011585.2,733-751).
cttggtggaagacaaatca

SEQ ID NO: 475846 - DNA, 19 bp, Mus musculus
  siRNA target sequence for Tia1 (NM_011585.2,779-797).
cagctccaaagagtacata

SEQ ID NO: 475847 - DNA, 19 bp, Mus musculus
  siRNA target sequence for Tia1 (NM_011585.2,784-802).
ccaaagagtacatatgagt

SEQ ID NO: 475848 - DNA, 19 bp, Mus musculus
  siRNA target sequence for Tia1 (NM_011585.2,807-825).
caccaaacagctgtcatat

SEQ ID NO: 475849 - DNA, 19 bp, Mus musculus
  siRNA target sequence for Tia1 (NM_011585.2,809-827).
ccaaacagctgtcatatga

SEQ ID NO: 475850 - DNA, 19 bp, Mus musculus
  siRNA target sequence for Tia1 (NM_011585.2,885-903).
gtcaggactgacagaacaa

SEQ ID NO: 475851 - DNA, 19 bp, Mus musculus
  siRNA target sequence for Tia1 (NM_011585.2,889-907).
ggactgacagaacaactaa

SEQ ID NO: 475852 - DNA, 19 bp, Mus musculus
  siRNA target sequence for Tia1 (NM_011585.2,890-908).
gactgacagaacaactaat

SEQ ID NO: 475853 - DNA, 19 bp, Mus musculus
  siRNA target sequence for Tia1 (NM_011585.2,904-922).
ctaatgcgtcagacttttt

SEQ ID NO: 475854 - DNA, 19 bp, Mus musculus
  siRNA target sequence for Tia1 (NM_011585.2,959-977).
cagataaaggatactcatt

SEQ ID NO: 475855 - DNA, 19 bp, Mus musculus
  siRNA target sequence for Tia1 (NM_011585.2,1003-1021).
gcagcacatgcgattgttt

SEQ ID NO: 475856 - DNA, 19 bp, Mus musculus
  siRNA target sequence for Tia1 (NM_011585.2,1009-1027).
catgcgattgtttctgtta

SEQ ID NO: 475857 - DNA, 19 bp, Mus musculus
  siRNA target sequence for Tia1 (NM_011585.2,1014-1032).
gattgtttctgttaatggt

SEQ ID NO: 475858 - DNA, 19 bp, Mus musculus
  siRNA target sequence for Tia1 (NM_011585.2,1068-1086).
gggcaaagagactcttgat

SEQ ID NO: 475859 - DNA, 19 bp, Mus musculus
  siRNA target sequence for Tia1 (NM_011585.2,1097-1115).
ctgtgcaacagcaaaatca

SEQ ID NO: 475860 - DNA, 19 bp, Mus musculus
  siRNA target sequence for Tia1 (NM_011585.2,1145-1163).
ggggccagtggtatggaaa

SEQ ID NO: 475861 - DNA, 19 bp, Mus musculus
  siRNA target sequence for Tia1 (NM_011585.2,1238-1256).
gccagcaggggttcaatca

SEQ ID NO: 475862 - DNA, 19 bp, Mus musculus
  siRNA target sequence for Tia1 (NM_011585.2,1240-1258).
cagcaggggttcaatcaga

SEQ ID NO: 475863 - DNA, 19 bp, Mus musculus
  siRNA target sequence for Tia1 (NM_011585.2,1274-1292).
cgtggatgggacccaatta

SEQ ID NO: 475864 - DNA, 19 bp, Mus musculus
  siRNA target sequence for Tia1 (NM_011585.2,1278-1296).
gatgggacccaattacagt

SEQ ID NO: 475865 - DNA, 19 bp, Mus musculus
  siRNA target sequence for Tial1 (NM_009383.1,195-213).
cagaagtccttattcttca

SEQ ID NO: 475866 - DNA, 19 bp, Mus musculus
  siRNA target sequence for Tial1 (NM_009383.1,321-339).
gcaatgacccatattgctt

SEQ ID NO: 475867 - DNA, 19 bp, Mus musculus
  siRNA target sequence for Tial1 (NM_009383.1,322-340).
caatgacccatattgcttt

SEQ ID NO: 475868 - DNA, 19 bp, Mus musculus
  siRNA target sequence for Tial1 (NM_009383.1,406-424).
gggaaaggaggtcaaagta

SEQ ID NO: 475869 - DNA, 19 bp, Mus musculus
  siRNA target sequence for Tial1 (NM_009383.1,479-497).
gtgtttgttggggatttga

SEQ ID NO: 475870 - DNA, 19 bp, Mus musculus
  siRNA target sequence for Tial1 (NM_009383.1,503-521).
gaaattacaacagaagata

SEQ ID NO: 475871 - DNA, 19 bp, Mus musculus
  siRNA target sequence for Tial1 (NM_009383.1,531-549).
catttgccccctttggtaa

SEQ ID NO: 475872 - DNA, 19 bp, Mus musculus
  siRNA target sequence for Tial1 (NM_009383.1,536-554).
gccccctttggtaaaatat

SEQ ID NO: 475873 - DNA, 19 bp, Mus musculus
  siRNA target sequence for Tial1 (NM_009383.1,669-687).
ggttgggaggtcgacaaat

SEQ ID NO: 475874 - DNA, 19 bp, Mus musculus
  siRNA target sequence for Tial1 (NM_009383.1,680-698).
cgacaaatcagaaccaatt

SEQ ID NO: 475875 - DNA, 19 bp, Mus musculus
  siRNA target sequence for Tial1 (NM_009383.1,694-712).
caattgggccacacgtaaa

SEQ ID NO: 475876 - DNA, 19 bp, Mus musculus
  siRNA target sequence for Tial1 (NM_009383.1,721-739).
ccctaaaagtacacaagaa

SEQ ID NO: 475877 - DNA, 19 bp, Mus musculus
  siRNA target sequence for Tial1 (NM_009383.1,745-763).
cactaagcagttgagattt

SEQ ID NO: 475878 - DNA, 19 bp, Mus musculus
  siRNA target sequence for Tial1 (NM_009383.1,747-765).
ctaagcagttgagatttga

SEQ ID NO: 475879 - DNA, 19 bp, Mus musculus
  siRNA target sequence for Tial1 (NM_009383.1,781-799).
gtcaagtccaaaaaactgt

SEQ ID NO: 475880 - DNA, 19 bp, Mus musculus
  siRNA target sequence for Tial1 (NM_009383.1,830-848).
ctgacagatcaacttatga

SEQ ID NO: 475881 - DNA, 19 bp, Mus musculus
  siRNA target sequence for Tial1 (NM_009383.1,839-857).
caacttatgagacaaacat

SEQ ID NO: 475882 - DNA, 19 bp, Mus musculus
  siRNA target sequence for Tial1 (NM_009383.1,897-915).
cagagaagggctattcgtt

SEQ ID NO: 475883 - DNA, 19 bp, Mus musculus
  siRNA target sequence for Tial1 (NM_009383.1,906-924).
gctattcgtttgtcagatt

SEQ ID NO: 475884 - DNA, 19 bp, Mus musculus
  siRNA target sequence for Tial1 (NM_009383.1,907-925).
ctattcgtttgtcagattt

SEQ ID NO: 475885 - DNA, 19 bp, Mus musculus
  siRNA target sequence for Tial1 (NM_009383.1,960-978).
ctgtgaacggcactacaat

SEQ ID NO: 475886 - DNA, 19 bp, Mus musculus
  siRNA target sequence for Tial1 (NM_009383.1,964-982).
gaacggcactacaatcgaa

SEQ ID NO: 475887 - DNA, 19 bp, Mus musculus
  siRNA target sequence for Tial1 (NM_009383.1,1008-1026).
gtaaagaatctcctgatat

SEQ ID NO: 475888 - DNA, 19 bp, Mus musculus
  siRNA target sequence for Tial1 (NM_009383.1,1013-1031).
gaatctcctgatatgacta

SEQ ID NO: 475889 - DNA, 19 bp, Mus musculus
  siRNA target sequence for Tial1 (NM_009383.1,1017-1035).
ctcctgatatgactaaaaa

SEQ ID NO: 475890 - DNA, 19 bp, Mus musculus
  siRNA target sequence for Tial1 (NM_009383.1,1019-1037).
cctgatatgactaaaaact

SEQ ID NO: 475891 - DNA, 19 bp, Mus musculus
  siRNA target sequence for Tial1 (NM_009383.1,1065-1083).
gccagtggagccaagtgta

SEQ ID NO: 475892 - DNA, 19 bp, Mus musculus
  siRNA target sequence for Tial1 (NM_009383.1,1094-1112).
caacagtatggacagtata

SEQ ID NO: 475893 - DNA, 19 bp, Mus musculus
  siRNA target sequence for Tial1 (NM_009383.1,1158-1176).
cgtggaaccaacaaggatt

SEQ ID NO: 475894 - DNA, 19 bp, Mus musculus
  siRNA target sequence for Tial1 (NM_009383.1,1159-1177).
gtggaaccaacaaggattt

SEQ ID NO: 475895 - DNA, 19 bp, Mus musculus
  siRNA target sequence for Trnt1 (NM_027296.1,77-95).
caggtcctgaggtgtagtt

SEQ ID NO: 475896 - DNA, 19 bp, Mus musculus
  siRNA target sequence for Trnt1 (NM_027296.1,87-105).
ggtgtagttggagtagatt

SEQ ID NO: 475897 - DNA, 19 bp, Mus musculus
  siRNA target sequence for Trnt1 (NM_027296.1,113-131).
ctgaagcgatacctgttta

SEQ ID NO: 475898 - DNA, 19 bp, Mus musculus
  siRNA target sequence for Trnt1 (NM_027296.1,115-133).
gaagcgatacctgtttaca

SEQ ID NO: 475899 - DNA, 19 bp, Mus musculus
  siRNA target sequence for Trnt1 (NM_027296.1,184-202).
gagcctgacagaattattt

SEQ ID NO: 475900 - DNA, 19 bp, Mus musculus
  siRNA target sequence for Trnt1 (NM_027296.1,203-221).
gccaaagagaatcatgaat

SEQ ID NO: 475901 - DNA, 19 bp, Mus musculus
  siRNA target sequence for Trnt1 (NM_027296.1,332-350).
gctggcattcgcatgatca

SEQ ID NO: 475902 - DNA, 19 bp, Mus musculus
  siRNA target sequence for Trnt1 (NM_027296.1,333-351).
ctggcattcgcatgatcaa

SEQ ID NO: 475903 - DNA, 19 bp, Mus musculus
  siRNA target sequence for Trnt1 (NM_027296.1,335-353).
ggcattcgcatgatcaaca

SEQ ID NO: 475904 - DNA, 19 bp, Mus musculus
  siRNA target sequence for Trnt1 (NM_027296.1,336-354).
gcattcgcatgatcaacaa

SEQ ID NO: 475905 - DNA, 19 bp, Mus musculus
  siRNA target sequence for Trnt1 (NM_027296.1,364-382).
gaaacatgggactatcact

SEQ ID NO: 475906 - DNA, 19 bp, Mus musculus
  siRNA target sequence for Trnt1 (NM_027296.1,494-512).
cgaagagatctcactataa

SEQ ID NO: 475907 - DNA, 19 bp, Mus musculus
  siRNA target sequence for Trnt1 (NM_027296.1,500-518).
gatctcactataaattcta

SEQ ID NO: 475908 - DNA, 19 bp, Mus musculus
  siRNA target sequence for Trnt1 (NM_027296.1,503-521).
ctcactataaattctatgt

SEQ ID NO: 475909 - DNA, 19 bp, Mus musculus
  siRNA target sequence for Trnt1 (NM_027296.1,505-523).
cactataaattctatgttt

SEQ ID NO: 475910 - DNA, 19 bp, Mus musculus
  siRNA target sequence for Trnt1 (NM_027296.1,536-554).
ggtacactgtttgattact

SEQ ID NO: 475911 - DNA, 19 bp, Mus musculus
  siRNA target sequence for Trnt1 (NM_027296.1,537-555).
gtacactgtttgattactt

SEQ ID NO: 475912 - DNA, 19 bp, Mus musculus
  siRNA target sequence for Trnt1 (NM_027296.1,591-609).
gatttgttggacatgcaaa

SEQ ID NO: 475913 - DNA, 19 bp, Mus musculus
  siRNA target sequence for Trnt1 (NM_027296.1,632-650).
cttcgaattttaaggtatt

SEQ ID NO: 475914 - DNA, 19 bp, Mus musculus
  siRNA target sequence for Trnt1 (NM_027296.1,654-672).
ggttttatggcagaattgt

SEQ ID NO: 475915 - DNA, 19 bp, Mus musculus
  siRNA target sequence for Trnt1 (NM_027296.1,782-800).
cttactggtgaccatgtaa

SEQ ID NO: 475916 - DNA, 19 bp, Mus musculus
  siRNA target sequence for Trnt1 (NM_027296.1,811-829).
ccacctgatctatgatctt

SEQ ID NO: 475917 - DNA, 19 bp, Mus musculus
  siRNA target sequence for Trnt1 (NM_027296.1,833-851).
gtggctcctcacataggtt

SEQ ID NO: 475918 - DNA, 19 bp, Mus musculus
  siRNA target sequence for Trnt1 (NM_027296.1,844-862).
cataggtttacctgctaat

SEQ ID NO: 475919 - DNA, 19 bp, Mus musculus
  siRNA target sequence for Trnt1 (NM_027296.1,848-866).
ggtttacctgctaatgcaa

SEQ ID NO: 475920 - DNA, 19 bp, Mus musculus
  siRNA target sequence for Trnt1 (NM_027296.1,953-971).
caagatgatgtcacaaaat

SEQ ID NO: 475921 - DNA, 19 bp, Mus musculus
  siRNA target sequence for Trnt1 (NM_027296.1,1065-1083).
cagaaccattgaaaccata

SEQ ID NO: 475922 - DNA, 19 bp, Mus musculus
  siRNA target sequence for Trnt1 (NM_027296.1,1079-1097).
ccataccaagactttgtga

SEQ ID NO: 475923 - DNA, 19 bp, Mus musculus
  siRNA target sequence for Trnt1 (NM_027296.1,1085-1103).
caagactttgtgatagact

SEQ ID NO: 475924 - DNA, 19 bp, Mus musculus
  siRNA target sequence for Trnt1 (NM_027296.1,1119-1137).
caactgcccgtgtttgtga

SEQ ID NO: 475925 - DNA, 19 bp, Mus musculus
  siRNA target sequence for Trnt1 (NM_027296.1,1155-1173).
gagagcatggtcttctcaa

SEQ ID NO: 475926 - DNA, 19 bp, Mus musculus
  siRNA target sequence for Trnt1 (NM_027296.1,1279-1297).
gcgtgaacagtggaagaaa

SEQ ID NO: 475927 - DNA, 19 bp, Mus musculus
  siRNA target sequence for Trnt1 (NM_027296.1,1302-1320).
gttaccggatggaaaaaga

SEQ ID NO: 475928 - DNA, 19 bp, Mus musculus
  siRNA target sequence for Trnt1 (NM_027296.1,1312-1330).
ggaaaaagatgaactacta

SEQ ID NO: 475929 - DNA, 19 bp, Mus musculus
  siRNA target sequence for Trnt1 (NM_027296.1,1313-1331).
gaaaaagatgaactactaa

SEQ ID NO: 475930 - DNA, 19 bp, Mus musculus
  siRNA target sequence for Trnt1 (NM_027296.1,1325-1343).
ctactaagttacataaaga

SEQ ID NO: 475931 - DNA, 19 bp, Mus musculus
  siRNA target sequence for U2af1-rs2 (NM_009453.1,744-762).
gaaccgcccatggatataa

SEQ ID NO: 475932 - DNA, 19 bp, Mus musculus
  siRNA target sequence for U2af1-rs2 (NM_009453.1,832-850).
ggtgttcacgtaaacacaa

SEQ ID NO: 475933 - DNA, 19 bp, Mus musculus
  siRNA target sequence for U2af1-rs2 (NM_009453.1,848-866).
caacttccccacatcaagt

SEQ ID NO: 475934 - DNA, 19 bp, Mus musculus
  siRNA target sequence for U2af1-rs2 (NM_009453.1,876-894).
ctgattaagggcatgttta

SEQ ID NO: 475935 - DNA, 19 bp, Mus musculus
  siRNA target sequence for U2af1-rs2 (NM_009453.1,878-896).
gattaagggcatgtttaca

SEQ ID NO: 475936 - DNA, 19 bp, Mus musculus
  siRNA target sequence for U2af1-rs2 (NM_009453.1,980-998).
gttcctagacttctattat

SEQ ID NO: 475937 - DNA, 19 bp, Mus musculus
  siRNA target sequence for U2af1-rs2 (NM_009453.1,983-1001).
cctagacttctattatgat

SEQ ID NO: 475938 - DNA, 19 bp, Mus musculus
  siRNA target sequence for U2af1-rs2 (NM_009453.1,1021-1039).
gtgtgggaaaagtgattca

SEQ ID NO: 475939 - DNA, 19 bp, Mus musculus
  siRNA target sequence for U2af1-rs2 (NM_009453.1,1287-1305).
gaatatagggacgctaata

SEQ ID NO: 475940 - DNA, 19 bp, Mus musculus
  siRNA target sequence for U2af1-rs2 (NM_009453.1,1336-1354).
gctcctccttcggtaagaa

SEQ ID NO: 475941 - DNA, 19 bp, Mus musculus
  siRNA target sequence for U2af1-rs2 (NM_009453.1,1367-1385).
ggaaagggccagtcactat

SEQ ID NO: 475942 - DNA, 19 bp, Mus musculus
  siRNA target sequence for U2af1-rs2 (NM_009453.1,1423-1441).
gcccgagtcccgacttcta

SEQ ID NO: 475943 - DNA, 19 bp, Mus musculus
  siRNA target sequence for U2af1-rs2 (NM_009453.1,1425-1443).
ccgagtcccgacttctaca

SEQ ID NO: 475944 - DNA, 19 bp, Mus musculus
  siRNA target sequence for U2af1-rs2 (NM_009453.1,1426-1444).
cgagtcccgacttctacaa

SEQ ID NO: 475945 - DNA, 19 bp, Mus musculus
  siRNA target sequence for U2af1-rs2 (NM_009453.1,1493-1511).
gaaatctcacagatatgga

SEQ ID NO: 475946 - DNA, 19 bp, Mus musculus
  siRNA target sequence for U2af1-rs2 (NM_178794.2,707-725).
gaaccctgcgtatcttctt

SEQ ID NO: 475947 - DNA, 19 bp, Mus musculus
  siRNA target sequence for U2af1-rs2 (NM_178794.2,731-749).
gcacgtgtgcatgtaaaga

SEQ ID NO: 475948 - DNA, 19 bp, Mus musculus
  siRNA target sequence for U2af1-rs2 (NM_178794.2,843-861).
gaaacactactagttattt

SEQ ID NO: 475949 - DNA, 19 bp, Mus musculus
  siRNA target sequence for U2af1-rs2 (NM_178794.2,847-865).
cactactagttatttggaa

SEQ ID NO: 475950 - DNA, 19 bp, Mus musculus
  siRNA target sequence for U2af1-rs2 (NM_178794.2,911-929).
gatacctttaccctaagta

SEQ ID NO: 475951 - DNA, 19 bp, Mus musculus
  siRNA target sequence for U2af1-rs2 (NM_178794.2,915-933).
cctttaccctaagtaagtt

SEQ ID NO: 475952 - DNA, 19 bp, Mus musculus
  siRNA target sequence for U2af1-rs2 (NM_178794.2,921-939).
ccctaagtaagttatctta

SEQ ID NO: 475953 - DNA, 19 bp, Mus musculus
  siRNA target sequence for U2af1-rs2 (NM_178794.2,923-941).
ctaagtaagttatcttact

SEQ ID NO: 475954 - DNA, 19 bp, Mus musculus
  siRNA target sequence for Wbp4 (NM_018765.1,259-277).
ggcctagtgttgagtttca

SEQ ID NO: 475955 - DNA, 19 bp, Mus musculus
  siRNA target sequence for Wbp4 (NM_018765.1,260-278).
gcctagtgttgagtttcat

SEQ ID NO: 475956 - DNA, 19 bp, Mus musculus
  siRNA target sequence for Wbp4 (NM_018765.1,313-331).
ggaggatcagtgagattaa

SEQ ID NO: 475957 - DNA, 19 bp, Mus musculus
  siRNA target sequence for Wbp4 (NM_018765.1,314-332).
gaggatcagtgagattaaa

SEQ ID NO: 475958 - DNA, 19 bp, Mus musculus
  siRNA target sequence for Wbp4 (NM_018765.1,316-334).
ggatcagtgagattaaaca

SEQ ID NO: 475959 - DNA, 19 bp, Mus musculus
  siRNA target sequence for Wbp4 (NM_018765.1,341-359).
cttggataaggcaaaggaa

SEQ ID NO: 475960 - DNA, 19 bp, Mus musculus
  siRNA target sequence for Wbp4 (NM_018765.1,502-520).
ccacccctacgtcaaatca

SEQ ID NO: 475961 - DNA, 19 bp, Mus musculus
  siRNA target sequence for Wbp4 (NM_018765.1,503-521).
cacccctacgtcaaatcaa

SEQ ID NO: 475962 - DNA, 19 bp, Mus musculus
  siRNA target sequence for Wbp4 (NM_018765.1,505-523).
cccctacgtcaaatcaaca

SEQ ID NO: 475963 - DNA, 19 bp, Mus musculus
  siRNA target sequence for Wbp4 (NM_018765.1,508-526).
ctacgtcaaatcaacagaa

SEQ ID NO: 475964 - DNA, 19 bp, Mus musculus
  siRNA target sequence for Wbp4 (NM_018765.1,604-622).
gctactattatgatctcat

SEQ ID NO: 475965 - DNA, 19 bp, Mus musculus
  siRNA target sequence for Wbp4 (NM_018765.1,714-732).
gaagacggctacacctatt

SEQ ID NO: 475966 - DNA, 19 bp, Mus musculus
  siRNA target sequence for Wbp4 (NM_018765.1,717-735).
gacggctacacctattatt

SEQ ID NO: 475967 - DNA, 19 bp, Mus musculus
  siRNA target sequence for Wbp4 (NM_018765.1,719-737).
cggctacacctattattat

SEQ ID NO: 475968 - DNA, 19 bp, Mus musculus
  siRNA target sequence for Wbp4 (NM_018765.1,720-738).
ggctacacctattattata

SEQ ID NO: 475969 - DNA, 19 bp, Mus musculus
  siRNA target sequence for Wbp4 (NM_018765.1,722-740).
ctacacctattattataat

SEQ ID NO: 475970 - DNA, 19 bp, Mus musculus
  siRNA target sequence for Wbp4 (NM_018765.1,725-743).
cacctattattataataca

SEQ ID NO: 475971 - DNA, 19 bp, Mus musculus
  siRNA target sequence for Wbp4 (NM_018765.1,795-813).
ggggatgtgctttctagta

SEQ ID NO: 475972 - DNA, 19 bp, Mus musculus
  siRNA target sequence for Wbp4 (NM_018765.1,796-814).
gggatgtgctttctagtaa

SEQ ID NO: 475973 - DNA, 19 bp, Mus musculus
  siRNA target sequence for Wbp4 (NM_018765.1,923-941).
gaagctaatcataaagttt

SEQ ID NO: 475974 - DNA, 19 bp, Mus musculus
  siRNA target sequence for Wbp4 (NM_018765.1,1011-1029).
cagaatccatcaaatacaa

SEQ ID NO: 475975 - DNA, 19 bp, Mus musculus
  siRNA target sequence for Wbp4 (NM_018765.1,1074-1092).
ggggaatggcaagaaatta

SEQ ID NO: 475976 - DNA, 19 bp, Mus musculus
  siRNA target sequence for Wbp4 (NM_018765.1,1143-1161).
gaaggggaatgtctatcaa

SEQ ID NO: 475977 - DNA, 19 bp, Mus musculus
  siRNA target sequence for Wbp4 (NM_018765.1,1146-1164).
ggggaatgtctatcaactt

SEQ ID NO: 475978 - DNA, 19 bp, Mus musculus
  siRNA target sequence for Wbp4 (NM_018765.1,1148-1166).
ggaatgtctatcaacttca

SEQ ID NO: 475979 - DNA, 19 bp, Mus musculus
  siRNA target sequence for Wbp4 (NM_018765.1,1170-1188).
gctggcgttggggaaatca

SEQ ID NO: 475980 - DNA, 19 bp, Mus musculus
  siRNA target sequence for Wbp4 (NM_018765.1,1171-1189).
ctggcgttggggaaatcaa

SEQ ID NO: 475981 - DNA, 19 bp, Mus musculus
  siRNA target sequence for Wbp4 (NM_018765.1,1174-1192).
gcgttggggaaatcaaagt

SEQ ID NO: 475982 - DNA, 19 bp, Mus musculus
  siRNA target sequence for Wbscr1 (NM_033561.1,149-167).
cccctacacagcttacgta

SEQ ID NO: 475983 - DNA, 19 bp, Mus musculus
  siRNA target sequence for Wbscr1 (NM_033561.1,155-173).
cacagcttacgtaggaaat

SEQ ID NO: 475984 - DNA, 19 bp, Mus musculus
  siRNA target sequence for Wbscr1 (NM_033561.1,165-183).
gtaggaaatctccctttta

SEQ ID NO: 475985 - DNA, 19 bp, Mus musculus
  siRNA target sequence for Wbscr1 (NM_033561.1,185-203).
cacagttcagggtgacata

SEQ ID NO: 475986 - DNA, 19 bp, Mus musculus
  siRNA target sequence for Wbscr1 (NM_033561.1,187-205).
cagttcagggtgacataga

SEQ ID NO: 475987 - DNA, 19 bp, Mus musculus
  siRNA target sequence for Wbscr1 (NM_033561.1,198-216).
gacatagatgctatcttta

SEQ ID NO: 475988 - DNA, 19 bp, Mus musculus
  siRNA target sequence for Wbscr1 (NM_033561.1,239-257).
gcggctagtcagagacaaa

SEQ ID NO: 475989 - DNA, 19 bp, Mus musculus
  siRNA target sequence for Wbscr1 (NM_033561.1,393-411).
gataaaggtggctttggat

SEQ ID NO: 475990 - DNA, 19 bp, Mus musculus
  siRNA target sequence for Wbscr1 (NM_033561.1,443-461).
gggtggctctcgagaatct

SEQ ID NO: 475991 - DNA, 19 bp, Mus musculus
  siRNA target sequence for Wbscr1 (NM_033561.1,444-462).
ggtggctctcgagaatcta

SEQ ID NO: 475992 - DNA, 19 bp, Mus musculus
  siRNA target sequence for Wbscr1 (NM_033561.1,500-518).
ctacagggatgacttctta

SEQ ID NO: 475993 - DNA, 19 bp, Mus musculus
  siRNA target sequence for Wbscr1 (NM_033561.1,652-670).
gacctcggctgcagcttaa

SEQ ID NO: 475994 - DNA, 19 bp, Mus musculus
  siRNA target sequence for Wbscr1 (NM_033561.1,683-701).
ggcaacgcccctcaatcaa

SEQ ID NO: 475995 - DNA, 19 bp, Mus musculus
  siRNA target sequence for Wbscr1 (NM_033561.1,685-703).
caacgcccctcaatcaagt

SEQ ID NO: 475996 - DNA, 19 bp, Mus musculus
  siRNA target sequence for Wbscr1 (NM_033561.1,710-728).
ccccaactcagccatcttt

SEQ ID NO: 475997 - DNA, 19 bp, Mus musculus
  siRNA target sequence for Wig1 (NM_009517.1,192-210).
gtctggcttcctttaccta

SEQ ID NO: 475998 - DNA, 19 bp, Mus musculus
  siRNA target sequence for Wig1 (NM_009517.1,194-212).
ctggcttcctttacctaat

SEQ ID NO: 475999 - DNA, 19 bp, Mus musculus
  siRNA target sequence for Wig1 (NM_009517.1,318-336).
ggggaagaggatttagcta

SEQ ID NO: 476000 - DNA, 19 bp, Mus musculus
  siRNA target sequence for Wig1 (NM_009517.1,422-440).
gcaagcccaggcacactat

SEQ ID NO: 476001 - DNA, 19 bp, Mus musculus
  siRNA target sequence for Wig1 (NM_009517.1,432-450).
gcacactatcagggtaaaa

SEQ ID NO: 476002 - DNA, 19 bp, Mus musculus
  siRNA target sequence for Wig1 (NM_009517.1,456-474).
ggcaagaaactacgaaatt

SEQ ID NO: 476003 - DNA, 19 bp, Mus musculus
  siRNA target sequence for Wig1 (NM_009517.1,457-475).
gcaagaaactacgaaatta

SEQ ID NO: 476004 - DNA, 19 bp, Mus musculus
  siRNA target sequence for Wig1 (NM_009517.1,458-476).
caagaaactacgaaattat

SEQ ID NO: 476005 - DNA, 19 bp, Mus musculus
  siRNA target sequence for Wig1 (NM_009517.1,607-625).
cagagaatgactactgtaa

SEQ ID NO: 476006 - DNA, 19 bp, Mus musculus
  siRNA target sequence for Wig1 (NM_009517.1,714-732).
gctcagagtcactcattct

SEQ ID NO: 476007 - DNA, 19 bp, Mus musculus
  siRNA target sequence for Wig1 (NM_009517.1,765-783).
cggaaagaagggagtgaat

SEQ ID NO: 476008 - DNA, 19 bp, Mus musculus
  siRNA target sequence for Wig1 (NM_009517.1,897-915).
ccaagtggccagttttact

SEQ ID NO: 476009 - DNA, 19 bp, Mus musculus
  siRNA target sequence for Wig1 (NM_009517.1,914-932).
ctgctccatgtgtaacgtt

SEQ ID NO: 476010 - DNA, 19 bp, Mus musculus
  siRNA target sequence for Zfp318 (NM_021346.1,169-187).
gtgttctcggggtcttgaa

SEQ ID NO: 476011 - DNA, 19 bp, Mus musculus
  siRNA target sequence for Zfp318 (NM_021346.1,174-192).
ctcggggtcttgaacgata

SEQ ID NO: 476012 - DNA, 19 bp, Mus musculus
  siRNA target sequence for Zfp318 (NM_021346.1,177-195).
ggggtcttgaacgatacat

SEQ ID NO: 476013 - DNA, 19 bp, Mus musculus
  siRNA target sequence for Zfp318 (NM_021346.1,178-196).
gggtcttgaacgatacatt

SEQ ID NO: 476014 - DNA, 19 bp, Mus musculus
  siRNA target sequence for Zfp318 (NM_021346.1,179-197).
ggtcttgaacgatacattt

SEQ ID NO: 476015 - DNA, 19 bp, Mus musculus
  siRNA target sequence for Zfp318 (NM_021346.1,223-241).
cttcttgggacaacttgat

SEQ ID NO: 476016 - DNA, 19 bp, Mus musculus
  siRNA target sequence for Zfp318 (NM_021346.1,244-262).
ggactaccgaacaagagaa

SEQ ID NO: 476017 - DNA, 19 bp, Mus musculus
  siRNA target sequence for Zfp318 (NM_021346.1,245-263).
gactaccgaacaagagaaa

SEQ ID NO: 476018 - DNA, 19 bp, Mus musculus
  siRNA target sequence for Zfp318 (NM_021346.1,247-265).
ctaccgaacaagagaaact

SEQ ID NO: 476019 - DNA, 19 bp, Mus musculus
  siRNA target sequence for Zfp318 (NM_021346.1,269-287).
ctgcatcgacctgagttta

SEQ ID NO: 476020 - DNA, 19 bp, Mus musculus
  siRNA target sequence for Zfp318 (NM_021346.1,297-315).
gcagttgtcatgatgaatt

SEQ ID NO: 476021 - DNA, 19 bp, Mus musculus
  siRNA target sequence for Zfp318 (NM_021346.1,300-318).
gttgtcatgatgaattgtt

SEQ ID NO: 476022 - DNA, 19 bp, Mus musculus
  siRNA target sequence for Zfp318 (NM_021346.1,331-349).
gcggaatagagacaaactt

SEQ ID NO: 476023 - DNA, 19 bp, Mus musculus
  siRNA target sequence for Zfp318 (NM_021346.1,332-350).
cggaatagagacaaactta

SEQ ID NO: 476024 - DNA, 19 bp, Mus musculus
  siRNA target sequence for Zfp318 (NM_021346.1,441-459).
gaggggatcactcaagttt

SEQ ID NO: 476025 - DNA, 19 bp, Mus musculus
  siRNA target sequence for Zfp318 (NM_021346.1,443-461).
ggggatcactcaagtttta

SEQ ID NO: 476026 - DNA, 19 bp, Mus musculus
  siRNA target sequence for Zfp318 (NM_021346.1,445-463).
ggatcactcaagttttaca

SEQ ID NO: 476027 - DNA, 19 bp, Mus musculus
  siRNA target sequence for Zfp318 (NM_021346.1,462-480).
catctgggactcgaaacta

SEQ ID NO: 476028 - DNA, 19 bp, Mus musculus
  siRNA target sequence for Zfp318 (NM_021346.1,499-517).
cccaagccctaggtttcta

SEQ ID NO: 476029 - DNA, 19 bp, Mus musculus
  siRNA target sequence for Zfp318 (NM_021346.1,501-519).
caagccctaggtttctaga

SEQ ID NO: 476030 - DNA, 19 bp, Mus musculus
  siRNA target sequence for Zfp318 (NM_021346.1,690-708).
ggcctgaggaagtacctat

SEQ ID NO: 476031 - DNA, 19 bp, Mus musculus
  siRNA target sequence for Zfp318 (NM_021346.1,693-711).
ctgaggaagtacctatgat

SEQ ID NO: 476032 - DNA, 19 bp, Mus musculus
  siRNA target sequence for Zfp318 (NM_021346.1,704-722).
cctatgatgcccaagaagt

SEQ ID NO: 476033 - DNA, 19 bp, Mus musculus
  siRNA target sequence for Zfp318 (NM_021346.1,723-741).
ccattctgaagaaacgaat

SEQ ID NO: 476034 - DNA, 19 bp, Mus musculus
  siRNA target sequence for Zfp318 (NM_021346.1,738-756).
gaattgaagcggacatgaa

SEQ ID NO: 476035 - DNA, 19 bp, Mus musculus
  siRNA target sequence for Zfp318 (NM_021346.1,801-819).
gtgaagatcaccctcttta

SEQ ID NO: 476036 - DNA, 19 bp, Mus musculus
  siRNA target sequence for Zfp318 (NM_021346.1,803-821).
gaagatcaccctctttatt

SEQ ID NO: 476037 - DNA, 19 bp, Mus musculus
  siRNA target sequence for Zfp318 (NM_021346.1,851-869).
gctattgctgcttttactt

SEQ ID NO: 476038 - DNA, 19 bp, Mus musculus
  siRNA target sequence for Zfp318 (NM_021346.1,914-932).
gagcctcagagtaacctat

SEQ ID NO: 476039 - DNA, 19 bp, Mus musculus
  siRNA target sequence for Zfp318 (NM_021346.1,918-936).
ctcagagtaacctatacca

SEQ ID NO: 476040 - DNA, 19 bp, Mus musculus
  siRNA target sequence for Zfp318 (NM_021346.1,944-962).
cccctccgtgagataccta

SEQ ID NO: 476041 - DNA, 19 bp, Mus musculus
  siRNA target sequence for Zfp318 (NM_021346.1,945-963).
ccctccgtgagatacctaa

SEQ ID NO: 476042 - DNA, 19 bp, Mus musculus
  siRNA target sequence for Zfp318 (NM_021346.1,950-968).
cgtgagatacctaaagaca

SEQ ID NO: 476043 - DNA, 19 bp, Mus musculus
  siRNA target sequence for Zfp318 (NM_021346.1,951-969).
gtgagatacctaaagacaa

SEQ ID NO: 476044 - DNA, 19 bp, Mus musculus
  siRNA target sequence for Zfp318 (NM_021346.1,987-1005).
gttttctaggctttaagga

SEQ ID NO: 476045 - DNA, 19 bp, Mus musculus
  siRNA target sequence for Zfp318 (NM_021346.1,1111-1129).
gttggctgatcctaccatt

SEQ ID NO: 476046 - DNA, 19 bp, Mus musculus
  siRNA target sequence for Zfp318 (NM_021346.1,1116-1134).
ctgatcctaccattacaca

SEQ ID NO: 476047 - DNA, 19 bp, Mus musculus
  siRNA target sequence for Zfp318 (NM_021346.1,1146-1164).
gacgtagcttccctgatat

SEQ ID NO: 476048 - DNA, 19 bp, Mus musculus
  siRNA target sequence for Zfp318 (NM_021346.1,1149-1167).
gtagcttccctgatattga

SEQ ID NO: 476049 - DNA, 19 bp, Mus musculus
  siRNA target sequence for Zfp318 (NM_021346.1,1287-1305).
caactccagctgtaaagct

SEQ ID NO: 476050 - DNA, 19 bp, Mus musculus
  siRNA target sequence for Zfp318 (NM_021346.1,1296-1314).
ctgtaaagctagaatcact

SEQ ID NO: 476051 - DNA, 19 bp, Mus musculus
  siRNA target sequence for Zfp318 (NM_021346.1,1303-1321).
gctagaatcactagaagaa

SEQ ID NO: 476052 - DNA, 19 bp, Mus musculus
  siRNA target sequence for Zfp318 (NM_021346.1,1329-1347).
cagaatatgccaagattca

SEQ ID NO: 476053 - DNA, 19 bp, Mus musculus
  siRNA target sequence for Zfp318 (NM_021346.1,1363-1381).
catagggctggatattgga

SEQ ID NO: 476054 - DNA, 19 bp, Mus musculus
  siRNA target sequence for Zfp318 (NM_021346.1,1489-1507).
gtctggtgaccgacacttt

SEQ ID NO: 476055 - DNA, 19 bp, Mus musculus
  siRNA target sequence for Zfp318 (NM_021346.1,1587-1605).
gggagacacatcatagcaa

SEQ ID NO: 476056 - DNA, 19 bp, Mus musculus
  siRNA target sequence for Zfp318 (NM_021346.1,1589-1607).
gagacacatcatagcaata

SEQ ID NO: 476057 - DNA, 19 bp, Mus musculus
  siRNA target sequence for Zfp318 (NM_021346.1,1641-1659).
cttccccggtggatcctta

SEQ ID NO: 476058 - DNA, 19 bp, Mus musculus
  siRNA target sequence for Zfp318 (NM_021346.1,1644-1662).
ccccggtggatccttactt

SEQ ID NO: 476059 - DNA, 19 bp, Mus musculus
  siRNA target sequence for Zfp318 (NM_021346.1,1655-1673).
ccttacttgcgcaccaaaa

SEQ ID NO: 476060 - DNA, 19 bp, Mus musculus
  siRNA target sequence for Zfp318 (NM_021346.1,1733-1751).
gttggcagtgggtttcaat

SEQ ID NO: 476061 - DNA, 19 bp, Mus musculus
  siRNA target sequence for Zfp318 (NM_021346.1,1784-1802).
gccccatctaccccaatta

SEQ ID NO: 476062 - DNA, 19 bp, Mus musculus
  siRNA target sequence for Zfp318 (NM_021346.1,1786-1804).
cccatctaccccaattaga

SEQ ID NO: 476063 - DNA, 19 bp, Mus musculus
  siRNA target sequence for Zfp318 (NM_021346.1,1788-1806).
catctaccccaattagact

SEQ ID NO: 476064 - DNA, 19 bp, Mus musculus
  siRNA target sequence for Zfp318 (NM_021346.1,1818-1836).
ctgcgttgtctcagtttca

SEQ ID NO: 476065 - DNA, 19 bp, Mus musculus
  siRNA target sequence for Zfp318 (NM_021346.1,1820-1838).
gcgttgtctcagtttcata

SEQ ID NO: 476066 - DNA, 19 bp, Mus musculus
  siRNA target sequence for Zfp318 (NM_021346.1,1825-1843).
gtctcagtttcatatacca

SEQ ID NO: 476067 - DNA, 19 bp, Mus musculus
  siRNA target sequence for Zfp318 (NM_021346.1,1927-1945).
gcactacatggcatatgca

SEQ ID NO: 476068 - DNA, 19 bp, Mus musculus
  siRNA target sequence for Zfp318 (NM_021346.1,1947-1965).
cctcaaggtggcctatgta

SEQ ID NO: 476069 - DNA, 19 bp, Mus musculus
  siRNA target sequence for Zfp318 (NM_021346.1,1948-1966).
ctcaaggtggcctatgtat

SEQ ID NO: 476070 - DNA, 19 bp, Mus musculus
  siRNA target sequence for Zfp318 (NM_021346.1,1979-1997).
ccaccaagccaccctttat

SEQ ID NO: 476071 - DNA, 19 bp, Mus musculus
  siRNA target sequence for Zfp318 (NM_021346.1,2002-2020).
ccctcataggctattacca

SEQ ID NO: 476072 - DNA, 19 bp, Mus musculus
  siRNA target sequence for Zfp318 (NM_021346.1,2010-2028).
ggctattaccagtaaccaa

SEQ ID NO: 476073 - DNA, 19 bp, Mus musculus
  siRNA target sequence for Zfp318 (NM_021346.1,2011-2029).
gctattaccagtaaccaaa

SEQ ID NO: 476074 - DNA, 19 bp, Mus musculus
  siRNA target sequence for Zfp318 (NM_021346.1,2108-2126).
ctaggctcaatttctgtaa

SEQ ID NO: 476075 - DNA, 19 bp, Mus musculus
  siRNA target sequence for Zfp318 (NM_021346.1,2138-2156).
gttcgggtgtccattccat

SEQ ID NO: 476076 - DNA, 19 bp, Mus musculus
  siRNA target sequence for Zfp318 (NM_021346.1,2153-2171).
ccatcactcataaaatata

SEQ ID NO: 476077 - DNA, 19 bp, Mus musculus
  siRNA target sequence for Zfp318 (NM_021346.1,2347-2365).
ggagaaggatggtcacaaa

SEQ ID NO: 476078 - DNA, 19 bp, Mus musculus
  siRNA target sequence for Zfp318 (NM_021346.1,2388-2406).
gtcgacttcaggatagtat

SEQ ID NO: 476079 - DNA, 19 bp, Mus musculus
  siRNA target sequence for Zfp318 (NM_021346.1,2390-2408).
cgacttcaggatagtatta

SEQ ID NO: 476080 - DNA, 19 bp, Mus musculus
  siRNA target sequence for Zfp318 (NM_021346.1,2391-2409).
gacttcaggatagtattat

SEQ ID NO: 476081 - DNA, 19 bp, Mus musculus
  siRNA target sequence for Zfp318 (NM_021346.1,2414-2432).
gacattgccgagctacata

SEQ ID NO: 476082 - DNA, 19 bp, Mus musculus
  siRNA target sequence for Zfp318 (NM_021346.1,2483-2501).
cagatcttgggaattgata

SEQ ID NO: 476083 - DNA, 19 bp, Mus musculus
  siRNA target sequence for Zfp318 (NM_021346.1,2507-2525).
gataaatccctgaaatctt

SEQ ID NO: 476084 - DNA, 19 bp, Mus musculus
  siRNA target sequence for Zfp318 (NM_021346.1,2523-2541).
cttcaaatgacagtaaaga

SEQ ID NO: 476085 - DNA, 19 bp, Mus musculus
  siRNA target sequence for Zfp318 (NM_021346.1,2613-2631).
ctagcaacaaggaatcaaa

SEQ ID NO: 476086 - DNA, 19 bp, Mus musculus
  siRNA target sequence for Zfp318 (NM_021346.1,2639-2657).
gaaaagtcctgtattaaga

SEQ ID NO: 476087 - DNA, 19 bp, Mus musculus
  siRNA target sequence for Zfp318 (NM_021346.1,2656-2674).
gagccctagttctactgaa

SEQ ID NO: 476088 - DNA, 19 bp, Mus musculus
  siRNA target sequence for Zfp318 (NM_021346.1,2676-2694).
gcctccaaccaactgttaa

SEQ ID NO: 476089 - DNA, 19 bp, Mus musculus
  siRNA target sequence for Zfp318 (NM_021346.1,2711-2729).
gttgctgcttatgagtatt

SEQ ID NO: 476090 - DNA, 19 bp, Mus musculus
  siRNA target sequence for Zfp318 (NM_021346.1,2715-2733).
ctgcttatgagtattatga

SEQ ID NO: 476091 - DNA, 19 bp, Mus musculus
  siRNA target sequence for Zfp318 (NM_021346.1,2836-2854).
gaagtcttcacattttcaa

SEQ ID NO: 476092 - DNA, 19 bp, Mus musculus
  siRNA target sequence for Zfp318 (NM_021346.1,2906-2924).
cacagagattatggaaata

SEQ ID NO: 476093 - DNA, 19 bp, Mus musculus
  siRNA target sequence for Zfp318 (NM_021346.1,2910-2928).
gagattatggaaataatgt

SEQ ID NO: 476094 - DNA, 19 bp, Mus musculus
  siRNA target sequence for Zfp385 (NM_013866.1,152-170).
ggcctcttcagcaactaca

SEQ ID NO: 476095 - DNA, 19 bp, Mus musculus
  siRNA target sequence for Zfp385 (NM_013866.1,199-217).
gctctcccacacttttgga

SEQ ID NO: 476096 - DNA, 19 bp, Mus musculus
  siRNA target sequence for Zfp385 (NM_013866.1,232-250).
gaccaagcggccagtcatt

SEQ ID NO: 476097 - DNA, 19 bp, Mus musculus
  siRNA target sequence for Zfp385 (NM_013866.1,262-280).
ctgtcagatccgcttcaat

SEQ ID NO: 476098 - DNA, 19 bp, Mus musculus
  siRNA target sequence for Zfp385 (NM_013866.1,319-337).
ccatgcccgaagagtcaaa

SEQ ID NO: 476099 - DNA, 19 bp, Mus musculus
  siRNA target sequence for Zfp385 (NM_013866.1,438-456).
cccctcgtccagtttccat

SEQ ID NO: 476100 - DNA, 19 bp, Mus musculus
  siRNA target sequence for Zfp385 (NM_013866.1,671-689).
cagcttgaggcacataaca

SEQ ID NO: 476101 - DNA, 19 bp, Mus musculus
  siRNA target sequence for Zfp385 (NM_013866.1,673-691).
gcttgaggcacataacaaa

SEQ ID NO: 476102 - DNA, 19 bp, Mus musculus
  siRNA target sequence for Zfp385 (NM_013866.1,677-695).
gaggcacataacaaaggta

SEQ ID NO: 476103 - DNA, 19 bp, Mus musculus
  siRNA target sequence for Zfp385 (NM_013866.1,692-710).
ggtactaagcacaagacaa

SEQ ID NO: 476104 - DNA, 19 bp, Mus musculus
  siRNA target sequence for Zfp385 (NM_013866.1,693-711).
gtactaagcacaagacaat

SEQ ID NO: 476105 - DNA, 19 bp, Mus musculus
  siRNA target sequence for Zfr (NM_011767.1,132-150).
ccggcaactactttggatt

SEQ ID NO: 476106 - DNA, 19 bp, Mus musculus
  siRNA target sequence for Zfr (NM_011767.1,269-287).
gtagctgctcacacagtta

SEQ ID NO: 476107 - DNA, 19 bp, Mus musculus
  siRNA target sequence for Zfr (NM_011767.1,399-417).
cagcaaccgactatggtta

SEQ ID NO: 476108 - DNA, 19 bp, Mus musculus
  siRNA target sequence for Zfr (NM_011767.1,456-474).
cagctactacacagaacta

SEQ ID NO: 476109 - DNA, 19 bp, Mus musculus
  siRNA target sequence for Zfr (NM_011767.1,469-487).
gaactaccaggactcatat

SEQ ID NO: 476110 - DNA, 19 bp, Mus musculus
  siRNA target sequence for Zfr (NM_011767.1,475-493).
ccaggactcatattcgtat

SEQ ID NO: 476111 - DNA, 19 bp, Mus musculus
  siRNA target sequence for Zfr (NM_011767.1,481-499).
ctcatattcgtatgtaaga

SEQ ID NO: 476112 - DNA, 19 bp, Mus musculus
  siRNA target sequence for Zfr (NM_011767.1,512-530).
gctgtagcttatgatagta

SEQ ID NO: 476113 - DNA, 19 bp, Mus musculus
  siRNA target sequence for Zfr (NM_011767.1,513-531).
ctgtagcttatgatagtaa

SEQ ID NO: 476114 - DNA, 19 bp, Mus musculus
  siRNA target sequence for Zfr (NM_011767.1,723-741).
ccactactttctccattta

SEQ ID NO: 476115 - DNA, 19 bp, Mus musculus
  siRNA target sequence for Zfr (NM_011767.1,724-742).
cactactttctccatttat

SEQ ID NO: 476116 - DNA, 19 bp, Mus musculus
  siRNA target sequence for Zfr (NM_011767.1,803-821).
cagagtgctacttacagta

SEQ ID NO: 476117 - DNA, 19 bp, Mus musculus
  siRNA target sequence for Zfr (NM_011767.1,819-837).
gtaccacagcagttactta

SEQ ID NO: 476118 - DNA, 19 bp, Mus musculus
  siRNA target sequence for Zfr (NM_011767.1,823-841).
cacagcagttacttattct

SEQ ID NO: 476119 - DNA, 19 bp, Mus musculus
  siRNA target sequence for Zfr (NM_011767.1,834-852).
cttattctggtacatctta

SEQ ID NO: 476120 - DNA, 19 bp, Mus musculus
  siRNA target sequence for Zfr (NM_011767.1,1041-1059).
cccagattcattattgtga

SEQ ID NO: 476121 - DNA, 19 bp, Mus musculus
  siRNA target sequence for Zfr (NM_011767.1,1042-1060).
ccagattcattattgtgat

SEQ ID NO: 476122 - DNA, 19 bp, Mus musculus
  siRNA target sequence for Zfr (NM_011767.1,1077-1095).
gtgctggaccacagactta

SEQ ID NO: 476123 - DNA, 19 bp, Mus musculus
  siRNA target sequence for Zfr (NM_011767.1,1083-1101).
gaccacagacttataaaga

SEQ ID NO: 476124 - DNA, 19 bp, Mus musculus
  siRNA target sequence for Zfr (NM_011767.1,1092-1110).
cttataaagagcacttaga

SEQ ID NO: 476125 - DNA, 19 bp, Mus musculus
  siRNA target sequence for Zfr (NM_011767.1,1139-1157).
gcattgaaagcctctcaaa

SEQ ID NO: 476126 - DNA, 19 bp, Mus musculus
  siRNA target sequence for Zfr (NM_011767.1,1140-1158).
cattgaaagcctctcaaaa

SEQ ID NO: 476127 - DNA, 19 bp, Mus musculus
  siRNA target sequence for Zfr (NM_011767.1,1214-1232).
ctctgtgatgtgtcttgta

SEQ ID NO: 476128 - DNA, 19 bp, Mus musculus
  siRNA target sequence for Zfr (NM_011767.1,1266-1284).
gtgctaagcatcagaaagt

SEQ ID NO: 476129 - DNA, 19 bp, Mus musculus
  siRNA target sequence for Zfr (NM_011767.1,1273-1291).
gcatcagaaagtggttaaa

SEQ ID NO: 476130 - DNA, 19 bp, Mus musculus
  siRNA target sequence for Zfr (NM_011767.1,1304-1322).
cttggtaaacctattcctt

SEQ ID NO: 476131 - DNA, 19 bp, Mus musculus
  siRNA target sequence for Zfr (NM_011767.1,1340-1358).
gttagccaagctacttctt

SEQ ID NO: 476132 - DNA, 19 bp, Mus musculus
  siRNA target sequence for Zfr (NM_011767.1,1422-1440).
ctctgaacacgtcatcaat

SEQ ID NO: 476133 - DNA, 19 bp, Mus musculus
  siRNA target sequence for Zfr (NM_011767.1,1426-1444).
gaacacgtcatcaattgca

SEQ ID NO: 476134 - DNA, 19 bp, Mus musculus
  siRNA target sequence for Zfr (NM_011767.1,1473-1491).
caggaaactcgtctcttaa

SEQ ID NO: 476135 - DNA, 19 bp, Mus musculus
  siRNA target sequence for Zfr (NM_011767.1,1480-1498).
ctcgtctcttaatagtaca

SEQ ID NO: 476136 - DNA, 19 bp, Mus musculus
  siRNA target sequence for Zfr (NM_011767.1,1494-1512).
gtacatccaacactaaagt

SEQ ID NO: 476137 - DNA, 19 bp, Mus musculus
  siRNA target sequence for Zfr (NM_011767.1,1515-1533).
cagcgatacctaccaatat

SEQ ID NO: 476138 - DNA, 19 bp, Mus musculus
  siRNA target sequence for Zfr (NM_011767.1,1551-1569).
ctacacccaaaataaactt

SEQ ID NO: 476139 - DNA, 19 bp, Mus musculus
  siRNA target sequence for Zfr (NM_011767.1,1585-1603).
gctacagtcaacaggaaat

SEQ ID NO: 476140 - DNA, 19 bp, Mus musculus
  siRNA target sequence for Zfr (NM_011767.1,1608-1626).
cggaagacttaaaaggaat

SEQ ID NO: 476141 - DNA, 19 bp, Mus musculus
  siRNA target sequence for Zfr (NM_011767.1,1622-1640).
ggaattgactgtgttaaga

SEQ ID NO: 476142 - DNA, 19 bp, Mus musculus
  siRNA target sequence for Zfr (NM_011767.1,1725-1743).
ctctgcagagtgatgtaca

SEQ ID NO: 476143 - DNA, 19 bp, Mus musculus
  siRNA target sequence for Zfr (NM_011767.1,1742-1760).
caaccagtgggacatgatt

SEQ ID NO: 476144 - DNA, 19 bp, Mus musculus
  siRNA target sequence for Zfr (NM_011767.1,1750-1768).
gggacatgattatgttgaa

SEQ ID NO: 476145 - DNA, 19 bp, Mus musculus
  siRNA target sequence for Zfr (NM_011767.1,1793-1811).
gtcattcgcttccattgta

SEQ ID NO: 476146 - DNA, 19 bp, Mus musculus
  siRNA target sequence for Zfr (NM_011767.1,1795-1813).
cattcgcttccattgtaaa

SEQ ID NO: 476147 - DNA, 19 bp, Mus musculus
  siRNA target sequence for Zfr (NM_011767.1,1799-1817).
cgcttccattgtaaattat

SEQ ID NO: 476148 - DNA, 19 bp, Mus musculus
  siRNA target sequence for Zfr (NM_011767.1,1905-1923).
cagatttgcaagtagaagt

SEQ ID NO: 476149 - DNA, 19 bp, Mus musculus
  siRNA target sequence for Zfr (NM_011767.1,1930-1948).
cagtattcgtgccagaaaa

SEQ ID NO: 476150 - DNA, 19 bp, Mus musculus
  siRNA target sequence for Zfr (NM_011767.1,1932-1950).
gtattcgtgccagaaaaat

SEQ ID NO: 476151 - DNA, 19 bp, Mus musculus
  siRNA target sequence for Zfr (NM_011767.1,2029-2047).
ggagataagacgttatgaa

SEQ ID NO: 476152 - DNA, 19 bp, Mus musculus
  siRNA target sequence for Zfr (NM_011767.1,2032-2050).
gataagacgttatgaagaa

SEQ ID NO: 476153 - DNA, 19 bp, Mus musculus
  siRNA target sequence for Zfr (NM_011767.1,2037-2055).
gacgttatgaagaagacat

SEQ ID NO: 476154 - DNA, 19 bp, Mus musculus
  siRNA target sequence for Zfr (NM_011767.1,2209-2227).
gcgtcctgactcatctgat

SEQ ID NO: 476155 - DNA, 19 bp, Mus musculus
  siRNA target sequence for Zfr (NM_011767.1,2218-2236).
ctcatctgatgatcgttat

SEQ ID NO: 476156 - DNA, 19 bp, Mus musculus
  siRNA target sequence for Zfr (NM_011767.1,2220-2238).
catctgatgatcgttatgt

SEQ ID NO: 476157 - DNA, 19 bp, Mus musculus
  siRNA target sequence for Zfr (NM_011767.1,2223-2241).
ctgatgatcgttatgtaat

SEQ ID NO: 476158 - DNA, 19 bp, Mus musculus
  siRNA target sequence for Zfr (NM_011767.1,2225-2243).
gatgatcgttatgtaatga

SEQ ID NO: 476159 - DNA, 19 bp, Mus musculus
  siRNA target sequence for Zfr (NM_011767.1,2228-2246).
gatcgttatgtaatgacaa

SEQ ID NO: 476160 - DNA, 19 bp, Mus musculus
  siRNA target sequence for Zfr (NM_011767.1,2340-2358).
gtttgtcggaacatgagaa

SEQ ID NO: 476161 - DNA, 19 bp, Mus musculus
  siRNA target sequence for Zfr (NM_011767.1,2432-2450).
ggcgtgctggcaaaaggat

SEQ ID NO: 476162 - DNA, 19 bp, Mus musculus
  siRNA target sequence for Zfr (NM_011767.1,2433-2451).
gcgtgctggcaaaaggatt

SEQ ID NO: 476163 - DNA, 19 bp, Mus musculus
  siRNA target sequence for Zfr (NM_011767.1,2469-2487).
ggaatgtcaaccttgtttt

SEQ ID NO: 476164 - DNA, 19 bp, Mus musculus
  siRNA target sequence for Zfr (NM_011767.1,2515-2533).
gttattaagccgtattgca

SEQ ID NO: 476165 - DNA, 19 bp, Mus musculus
  siRNA target sequence for Zfr (NM_011767.1,2523-2541).
gccgtattgcagaaaacct

SEQ ID NO: 476166 - DNA, 19 bp, Mus musculus
  siRNA target sequence for Zfr (NM_011767.1,2524-2542).
ccgtattgcagaaaaccta

SEQ ID NO: 476167 - DNA, 19 bp, Mus musculus
  siRNA target sequence for Zfr (NM_011767.1,2544-2562).
ccaaacagcttgctgttat

SEQ ID NO: 476168 - DNA, 19 bp, Mus musculus
  siRNA target sequence for Zfr (NM_011767.1,2545-2563).
caaacagcttgctgttata

SEQ ID NO: 476169 - DNA, 19 bp, Mus musculus
  siRNA target sequence for Zfr (NM_011767.1,2596-2614).
gtctgaggcagcgataatt

SEQ ID NO: 476170 - DNA, 19 bp, Mus musculus
  siRNA target sequence for Zfr (NM_011767.1,2598-2616).
ctgaggcagcgataatttt

SEQ ID NO: 476171 - DNA, 19 bp, Mus musculus
  siRNA target sequence for Zfr (NM_011767.1,2603-2621).
gcagcgataattttgaact

SEQ ID NO: 476172 - DNA, 19 bp, Mus musculus
  siRNA target sequence for Zfr (NM_011767.1,2622-2640).
cgtgtgtggagcccaaaat

SEQ ID NO: 476173 - DNA, 19 bp, Mus musculus
  siRNA target sequence for Zfr (NM_011767.1,2655-2673).
ccctgacatctccaattat

SEQ ID NO: 476174 - DNA, 19 bp, Mus musculus
  siRNA target sequence for Zfr (NM_011767.1,2659-2677).
gacatctccaattattcga

SEQ ID NO: 476175 - DNA, 19 bp, Mus musculus
  siRNA target sequence for Zfr (NM_011767.1,2813-2831).
ctacagtcgtgtgtgatta

SEQ ID NO: 476176 - DNA, 19 bp, Mus musculus
  siRNA target sequence for Zfr (NM_011767.1,2816-2834).
cagtcgtgtgtgattatca

SEQ ID NO: 476177 - DNA, 19 bp, Mus musculus
  siRNA target sequence for Zfr (NM_011767.1,2818-2836).
gtcgtgtgtgattatcata

SEQ ID NO: 476178 - DNA, 19 bp, Mus musculus
  siRNA target sequence for Zfr (NM_011767.1,2823-2841).
gtgtgattatcatacgtat

SEQ ID NO: 476179 - DNA, 19 bp, Mus musculus
  siRNA target sequence for Zfr (NM_011767.1,2864-2882).
gttccaacgtggtctgatt

SEQ ID NO: 476180 - DNA, 19 bp, Mus musculus
  siRNA target sequence for Zfr (NM_011767.1,3032-3050).
gaaaaggatccctttgaca

SEQ ID NO: 476181 - DNA, 19 bp, Mus musculus
  siRNA target sequence for Zfr (NM_011767.1,3047-3065).
gacactttggcaacaatga

SEQ ID NO: 476182 - DNA, 19 bp, Mus musculus
  siRNA target sequence for Zfr (NM_011767.1,3049-3067).
cactttggcaacaatgact

SEQ ID NO: 476183 - DNA, 19 bp, Mus musculus
  siRNA target sequence for Zfr (NM_011767.1,3071-3089).
caacagcgtgaagacatta

SEQ ID NO: 476184 - DNA, 19 bp, Mus musculus
  siRNA target sequence for Zfr (NM_011767.1,3129-3147).
gtcagatacacaaagttct

SEQ ID NO: 476185 - DNA, 19 bp, Mus musculus
  siRNA target sequence for Zfr (NM_011767.1,3155-3173).
gatccattaccacaaatga

SEQ ID NO: 476186 - DNA, 19 bp, Mus musculus
  siRNA target sequence for Zfr (NM_011767.1,3159-3177).
cattaccacaaatgaatca

SEQ ID NO: 476187 - DNA, 19 bp, Mus musculus
  siRNA target sequence for Zfr (NM_011767.1,3257-3275).
gacaaaaaggattatgata

SEQ ID NO: 476188 - DNA, 19 bp, Mus musculus
  siRNA target sequence for 1500010B24Rik (NM_025437.2,294-312).
gttgggaaacggacgatta

SEQ ID NO: 476189 - DNA, 19 bp, Mus musculus
  siRNA target sequence for 1500010B24Rik (NM_025437.2,297-315).
gggaaacggacgattagaa

SEQ ID NO: 476190 - DNA, 19 bp, Mus musculus
  siRNA target sequence for 1500010B24Rik (NM_025437.2,307-325).
cgattagaagccatgtgtt

SEQ ID NO: 476191 - DNA, 19 bp, Mus musculus
  siRNA target sequence for 1500010M16Rik (NM_026892.1,316-334).
gggcattgcggacgattat

SEQ ID NO: 476192 - DNA, 19 bp, Mus musculus
  siRNA target sequence for 1500010M16Rik (NM_026892.1,318-336).
gcattgcggacgattatga

SEQ ID NO: 476193 - DNA, 19 bp, Mus musculus
  siRNA target sequence for 1500032A09Rik (NM_172673.1,254-272).
gcttccgcgtgaagtttta

SEQ ID NO: 476194 - DNA, 19 bp, Mus musculus
  siRNA target sequence for 1500032A09Rik (NM_172673.1,300-318).
ggaaataaccaggtactta

SEQ ID NO: 476195 - DNA, 19 bp, Mus musculus
  siRNA target sequence for 1500032A09Rik (NM_172673.1,351-369).
cggccgtcttctctgtaaa

SEQ ID NO: 476196 - DNA, 19 bp, Mus musculus
  siRNA target sequence for 1500032A09Rik (NM_172673.1,352-370).
ggccgtcttctctgtaaaa

SEQ ID NO: 476197 - DNA, 19 bp, Mus musculus
  siRNA target sequence for 1500032A09Rik (NM_172673.1,354-372).
ccgtcttctctgtaaaaca

SEQ ID NO: 476198 - DNA, 19 bp, Mus musculus
  siRNA target sequence for 1500032A09Rik (NM_172673.1,383-401).
ccttgttagcggcctatat

SEQ ID NO: 476199 - DNA, 19 bp, Mus musculus
  siRNA target sequence for 1500032A09Rik (NM_172673.1,387-405).
gttagcggcctatatcctt

SEQ ID NO: 476200 - DNA, 19 bp, Mus musculus
  siRNA target sequence for 1500032A09Rik (NM_172673.1,410-428).
cggagattggggattatga

SEQ ID NO: 476201 - DNA, 19 bp, Mus musculus
  siRNA target sequence for 1500032A09Rik (NM_172673.1,474-492).
cccgaaacattcagagaaa

SEQ ID NO: 476202 - DNA, 19 bp, Mus musculus
  siRNA target sequence for 1500032A09Rik (NM_172673.1,476-494).
cgaaacattcagagaaact

SEQ ID NO: 476203 - DNA, 19 bp, Mus musculus
  siRNA target sequence for 1500032A09Rik (NM_172673.1,525-543).
cgaactcagtggtcaaaca

SEQ ID NO: 476204 - DNA, 19 bp, Mus musculus
  siRNA target sequence for 1500032A09Rik (NM_172673.1,621-639).
ggatgtgtcgggaaatgct

SEQ ID NO: 476205 - DNA, 19 bp, Mus musculus
  siRNA target sequence for 1500032A09Rik (NM_172673.1,654-672).
cactcctttcgggtttgtt

SEQ ID NO: 476206 - DNA, 19 bp, Mus musculus
  siRNA target sequence for 1500032A09Rik (NM_172673.1,690-708).
gagggtccacttcattaaa

SEQ ID NO: 476207 - DNA, 19 bp, Mus musculus
  siRNA target sequence for 1500032A09Rik (NM_172673.1,696-714).
ccacttcattaaatggaat

SEQ ID NO: 476208 - DNA, 19 bp, Mus musculus
  siRNA target sequence for 1500032A09Rik (NM_172673.1,717-735).
ggtgaccaagctgaaattt

SEQ ID NO: 476209 - DNA, 19 bp, Mus musculus
  siRNA target sequence for 1500032A09Rik (NM_172673.1,833-851).
ggaaatgtggaattgagaa

SEQ ID NO: 476210 - DNA, 19 bp, Mus musculus
  siRNA target sequence for 1500032A09Rik (NM_172673.1,924-942).
gagccggttccgatacagt

SEQ ID NO: 476211 - DNA, 19 bp, Mus musculus
  siRNA target sequence for 1500032A09Rik (NM_172673.1,946-964).
cgggtcgcaaaggaagtaa

SEQ ID NO: 476212 - DNA, 19 bp, Mus musculus
  siRNA target sequence for 1500032A09Rik (NM_172673.1,947-965).
gggtcgcaaaggaagtaat

SEQ ID NO: 476213 - DNA, 19 bp, Mus musculus
  siRNA target sequence for 1500032A09Rik (NM_172673.1,991-1009).
gagccgccagaaatacaca

SEQ ID NO: 476214 - DNA, 19 bp, Mus musculus
  siRNA target sequence for 1500032A09Rik (NM_172673.1,1029-1047).
ccgcagctgtccttctata

SEQ ID NO: 476215 - DNA, 19 bp, Mus musculus
  siRNA target sequence for 1500032A09Rik (NM_172673.1,1030-1048).
cgcagctgtccttctataa

SEQ ID NO: 476216 - DNA, 19 bp, Mus musculus
  siRNA target sequence for 1500032A09Rik (NM_172673.1,1461-1479).
ggtgaataagtttgtttta

SEQ ID NO: 476217 - DNA, 19 bp, Mus musculus
  siRNA target sequence for 1500032A09Rik (NM_172673.1,1462-1480).
gtgaataagtttgttttaa

SEQ ID NO: 476218 - DNA, 19 bp, Mus musculus
  siRNA target sequence for 1500032A09Rik (NM_172673.1,1558-1576).
gaccttgacgttgcttttt

SEQ ID NO: 476219 - DNA, 19 bp, Mus musculus
  siRNA target sequence for 1500032A09Rik (NM_172673.1,1593-1611).
gacccccgagtttgaacaa

SEQ ID NO: 476220 - DNA, 19 bp, Mus musculus
  siRNA target sequence for 1500032A09Rik (NM_172673.1,1595-1613).
cccccgagtttgaacaatt

SEQ ID NO: 476221 - DNA, 19 bp, Mus musculus
  siRNA target sequence for 1500032A09Rik (NM_172673.1,1598-1616).
ccgagtttgaacaattcca

SEQ ID NO: 476222 - DNA, 19 bp, Mus musculus
  siRNA target sequence for 1500032A09Rik (NM_172673.1,1606-1624).
gaacaattccactatcaat

SEQ ID NO: 476223 - DNA, 19 bp, Mus musculus
  siRNA target sequence for 1500032A09Rik (NM_172673.1,1609-1627).
caattccactatcaatact

SEQ ID NO: 476224 - DNA, 19 bp, Mus musculus
  siRNA target sequence for 1500032A09Rik (NM_172673.1,1642-1660).
cgatggtttgcctgcaaaa

SEQ ID NO: 476225 - DNA, 19 bp, Mus musculus
  siRNA target sequence for 1500032A09Rik (NM_172673.1,1643-1661).
gatggtttgcctgcaaaat

SEQ ID NO: 476226 - DNA, 19 bp, Mus musculus
  siRNA target sequence for 2410018C20Rik (NM_026423.2,132-150).
cagagcactgccactatga

SEQ ID NO: 476227 - DNA, 19 bp, Mus musculus
  siRNA target sequence for 2410018C20Rik (NM_026423.2,163-181).
cgtgcagcaggctagtgaa

SEQ ID NO: 476228 - DNA, 19 bp, Mus musculus
  siRNA target sequence for 2410018C20Rik (NM_026423.2,446-464).
cgcttcgccgaggatatgt

SEQ ID NO: 476229 - DNA, 19 bp, Mus musculus
  siRNA target sequence for 2410018C20Rik (NM_026423.2,447-465).
gcttcgccgaggatatgtt

SEQ ID NO: 476230 - DNA, 19 bp, Mus musculus
  siRNA target sequence for 2410018C20Rik (NM_026423.2,1145-1163).
gagggacagaccctagata

SEQ ID NO: 476231 - DNA, 19 bp, Mus musculus
  siRNA target sequence for 2410018C20Rik (NM_026423.2,1147-1165).
gggacagaccctagatagt

SEQ ID NO: 476232 - DNA, 19 bp, Mus musculus
  siRNA target sequence for 2700079K05Rik (NM_144545.1,123-141).
gaacccatcttcaagagat

SEQ ID NO: 476233 - DNA, 19 bp, Mus musculus
  siRNA target sequence for 2700079K05Rik (NM_144545.1,184-202).
caatatgaaaaatcactat

SEQ ID NO: 476234 - DNA, 19 bp, Mus musculus
  siRNA target sequence for 2700079K05Rik (NM_144545.1,199-217).
ctatattatgccagttttt

SEQ ID NO: 476235 - DNA, 19 bp, Mus musculus
  siRNA target sequence for 2700079K05Rik (NM_144545.1,229-247).
gttcgggatgtctgtattt

SEQ ID NO: 476236 - DNA, 19 bp, Mus musculus
  siRNA target sequence for 2700079K05Rik (NM_144545.1,232-250).
cgggatgtctgtatttcat

SEQ ID NO: 476237 - DNA, 19 bp, Mus musculus
  siRNA target sequence for 2700079K05Rik (NM_144545.1,273-291).
gattaccaactcattgact

SEQ ID NO: 476238 - DNA, 19 bp, Mus musculus
  siRNA target sequence for 2700079K05Rik (NM_144545.1,393-411).
cgacctggcagattatggt

SEQ ID NO: 476239 - DNA, 19 bp, Mus musculus
  siRNA target sequence for 2700079K05Rik (NM_144545.1,399-417).
ggcagattatggtggatat

SEQ ID NO: 476240 - DNA, 19 bp, Mus musculus
  siRNA target sequence for 2700079K05Rik (NM_144545.1,422-440).
gaggctatgtacaagacta

SEQ ID NO: 476241 - DNA, 19 bp, Mus musculus
  siRNA target sequence for 2810012L14Rik (NM_029581.1,249-267).
ctacaaagcttgaccataa

SEQ ID NO: 476242 - DNA, 19 bp, Mus musculus
  siRNA target sequence for 2810012L14Rik (NM_029581.1,252-270).
caaagcttgaccataactt

SEQ ID NO: 476243 - DNA, 19 bp, Mus musculus
  siRNA target sequence for 2810012L14Rik (NM_029581.1,256-274).
gcttgaccataacttaatt

SEQ ID NO: 476244 - DNA, 19 bp, Mus musculus
  siRNA target sequence for 2810012L14Rik (NM_029581.1,260-278).
gaccataacttaattggaa

SEQ ID NO: 476245 - DNA, 19 bp, Mus musculus
  siRNA target sequence for 2810012L14Rik (NM_029581.1,579-597).
caccggagtaccagcttat

SEQ ID NO: 476246 - DNA, 19 bp, Mus musculus
  siRNA target sequence for 2810012L14Rik (NM_029581.1,581-599).
ccggagtaccagcttatga

SEQ ID NO: 476247 - DNA, 19 bp, Mus musculus
  siRNA target sequence for 2810012L14Rik (NM_029581.1,683-701).
gagctcgttttctcttcaa

SEQ ID NO: 476248 - DNA, 19 bp, Mus musculus
  siRNA target sequence for 2810012L14Rik (NM_029581.1,707-725).
ggacagcacgatttagaca

SEQ ID NO: 476249 - DNA, 19 bp, Mus musculus
  siRNA target sequence for 2810012L14Rik (NM_029581.1,716-734).
gatttagacaccaagagta

SEQ ID NO: 476250 - DNA, 19 bp, Mus musculus
  siRNA target sequence for 2810012L14Rik (NM_029581.1,770-788).
gttcaagtcacgataaaga

SEQ ID NO: 476251 - DNA, 19 bp, Mus musculus
  siRNA target sequence for 2810012L14Rik (NM_029581.1,822-840).
cggaggagatatttaacca

SEQ ID NO: 476252 - DNA, 19 bp, Mus musculus
  siRNA target sequence for 2810012L14Rik (NM_029581.1,871-889).
cttctcaagcagaccaaaa

SEQ ID NO: 476253 - DNA, 19 bp, Mus musculus
  siRNA target sequence for 2810012L14Rik (NM_029581.1,927-945).
gtcacttgagcaagaaaga

SEQ ID NO: 476254 - DNA, 19 bp, Mus musculus
  siRNA target sequence for 2810012L14Rik (NM_029581.1,947-965).
gaaaaggcgtacagagaat

SEQ ID NO: 476255 - DNA, 19 bp, Mus musculus
  siRNA target sequence for 2810012L14Rik (NM_029581.1,975-993).
gccagagaagagacacttt

SEQ ID NO: 476256 - DNA, 19 bp, Mus musculus
  siRNA target sequence for 2810012L14Rik (NM_029581.1,1017-1035).
gcaaagagtcggatgttgt

SEQ ID NO: 476257 - DNA, 19 bp, Mus musculus
  siRNA target sequence for 3230401O13Rik (NM_146200.1,152-170).
cggcaaacagcctttgtta

SEQ ID NO: 476258 - DNA, 19 bp, Mus musculus
  siRNA target sequence for 3230401O13Rik (NM_146200.1,260-278).
ccgtaatgccatgaagatt

SEQ ID NO: 476259 - DNA, 19 bp, Mus musculus
  siRNA target sequence for 3230401O13Rik (NM_146200.1,337-355).
ccaagagtattgtggataa

SEQ ID NO: 476260 - DNA, 19 bp, Mus musculus
  siRNA target sequence for 3230401O13Rik (NM_146200.1,360-378).
ggtgtcccccgattctaca

SEQ ID NO: 476261 - DNA, 19 bp, Mus musculus
  siRNA target sequence for 3230401O13Rik (NM_146200.1,361-379).
gtgtcccccgattctacat

SEQ ID NO: 476262 - DNA, 19 bp, Mus musculus
  siRNA target sequence for 3230401O13Rik (NM_146200.1,370-388).
gattctacatccgaatact

SEQ ID NO: 476263 - DNA, 19 bp, Mus musculus
  siRNA target sequence for 3230401O13Rik (NM_146200.1,391-409).
ctgacctggaggactatct

SEQ ID NO: 476264 - DNA, 19 bp, Mus musculus
  siRNA target sequence for 3230401O13Rik (NM_146200.1,395-413).
cctggaggactatcttaat

SEQ ID NO: 476265 - DNA, 19 bp, Mus musculus
  siRNA target sequence for 3230401O13Rik (NM_146200.1,475-493).
gtaccttgcgccagaagat

SEQ ID NO: 476266 - DNA, 19 bp, Mus musculus
  siRNA target sequence for 3230401O13Rik (NM_146200.1,621-639).
gaggacggagtcggtaata

SEQ ID NO: 476267 - DNA, 19 bp, Mus musculus
  siRNA target sequence for 3230401O13Rik (NM_146200.1,624-642).
gacggagtcggtaatacga

SEQ ID NO: 476268 - DNA, 19 bp, Mus musculus
  siRNA target sequence for 3230401O13Rik (NM_146200.1,633-651).
ggtaatacgactttcttga

SEQ ID NO: 476269 - DNA, 19 bp, Mus musculus
  siRNA target sequence for 3230401O13Rik (NM_146200.1,634-652).
gtaatacgactttcttgaa

SEQ ID NO: 476270 - DNA, 19 bp, Mus musculus
  siRNA target sequence for 3230401O13Rik (NM_146200.1,682-700).
ggaagttccacaaaaagat

SEQ ID NO: 476271 - DNA, 19 bp, Mus musculus
  siRNA target sequence for 3230401O13Rik (NM_146200.1,969-987).
ggtggcgtaccacttgtta

SEQ ID NO: 476272 - DNA, 19 bp, Mus musculus
  siRNA target sequence for 3230401O13Rik (NM_146200.1,970-988).
gtggcgtaccacttgttaa

SEQ ID NO: 476273 - DNA, 19 bp, Mus musculus
  siRNA target sequence for 3230401O13Rik (NM_146200.1,973-991).
gcgtaccacttgttaagga

SEQ ID NO: 476274 - DNA, 19 bp, Mus musculus
  siRNA target sequence for 3230401O13Rik (NM_146200.1,974-992).
cgtaccacttgttaaggaa

SEQ ID NO: 476275 - DNA, 19 bp, Mus musculus
  siRNA target sequence for 3230401O13Rik (NM_146200.1,1091-1109).
ccgtgccactcagattgaa

SEQ ID NO: 476276 - DNA, 19 bp, Mus musculus
  siRNA target sequence for 3230401O13Rik (NM_146200.1,1092-1110).
cgtgccactcagattgaat

SEQ ID NO: 476277 - DNA, 19 bp, Mus musculus
  siRNA target sequence for 3230401O13Rik (NM_146200.1,1093-1111).
gtgccactcagattgaatt

SEQ ID NO: 476278 - DNA, 19 bp, Mus musculus
  siRNA target sequence for 3230401O13Rik (NM_146200.1,1172-1190).
gatcaagttcaatatcatt

SEQ ID NO: 476279 - DNA, 19 bp, Mus musculus
  siRNA target sequence for 3230401O13Rik (NM_146200.1,1191-1209).
gcctctctctacgattaca

SEQ ID NO: 476280 - DNA, 19 bp, Mus musculus
  siRNA target sequence for 3230401O13Rik (NM_146200.1,1192-1210).
cctctctctacgattacaa

SEQ ID NO: 476281 - DNA, 19 bp, Mus musculus
  siRNA target sequence for 3230401O13Rik (NM_146200.1,1253-1271).
gtgcctagactgcatcaat

SEQ ID NO: 476282 - DNA, 19 bp, Mus musculus
  siRNA target sequence for 3230401O13Rik (NM_146200.1,1290-1308).
gttgcacattccaacatct

SEQ ID NO: 476283 - DNA, 19 bp, Mus musculus
  siRNA target sequence for 3230401O13Rik (NM_146200.1,1371-1389).
gtacgaggctgcatcctaa

SEQ ID NO: 476284 - DNA, 19 bp, Mus musculus
  siRNA target sequence for 3230401O13Rik (NM_146200.1,1374-1392).
cgaggctgcatcctaactt

SEQ ID NO: 476285 - DNA, 19 bp, Mus musculus
  siRNA target sequence for 3230401O13Rik (NM_146200.1,1375-1393).
gaggctgcatcctaacttt

SEQ ID NO: 476286 - DNA, 19 bp, Mus musculus
  siRNA target sequence for 3230401O13Rik (NM_146200.1,1401-1419).
cgaatggatgaagaattta

SEQ ID NO: 476287 - DNA, 19 bp, Mus musculus
  siRNA target sequence for 3230401O13Rik (NM_146200.1,1547-1565).
gatctgccagatctactta

SEQ ID NO: 476288 - DNA, 19 bp, Mus musculus
  siRNA target sequence for 3230401O13Rik (NM_146200.1,1577-1595).
gcacacgtactacaagttt

SEQ ID NO: 476289 - DNA, 19 bp, Mus musculus
  siRNA target sequence for 3230401O13Rik (NM_146200.1,1582-1600).
cgtactacaagtttgacta

SEQ ID NO: 476290 - DNA, 19 bp, Mus musculus
  siRNA target sequence for 3230401O13Rik (NM_146200.1,1629-1647).
cctgaaggatcctcaaagt

SEQ ID NO: 476291 - DNA, 19 bp, Mus musculus
  siRNA target sequence for 3300001M20Rik (NM_175113.1,831-849).
cgtgccggcaataaaatga

SEQ ID NO: 476292 - DNA, 19 bp, Mus musculus
  siRNA target sequence for 3300001M20Rik (NM_175113.1,832-850).
gtgccggcaataaaatgat

SEQ ID NO: 476293 - DNA, 19 bp, Mus musculus
  siRNA target sequence for 3300001M20Rik (NM_175113.1,838-856).
gcaataaaatgattgtcat

SEQ ID NO: 476294 - DNA, 19 bp, Mus musculus
  siRNA target sequence for 3300001M20Rik (NM_175113.1,883-901).
gtgccatgatggaacgaat

SEQ ID NO: 476295 - DNA, 19 bp, Mus musculus
  siRNA target sequence for 3300001M20Rik (NM_175113.1,907-925).
gctttggctccattattca

SEQ ID NO: 476296 - DNA, 19 bp, Mus musculus
  siRNA target sequence for 3300001M20Rik (NM_175113.1,957-975).
gcaacagcatgttttggat

SEQ ID NO: 476297 - DNA, 19 bp, Mus musculus
  siRNA target sequence for 3300001M20Rik (NM_175113.1,1085-1103).
cactccagttgaagaaagt

SEQ ID NO: 476298 - DNA, 19 bp, Mus musculus
  siRNA target sequence for 3300001M20Rik (NM_175113.1,1158-1176).
gtggatgccgcagaaaaca

SEQ ID NO: 476299 - DNA, 19 bp, Mus musculus
  siRNA target sequence for 3300001M20Rik (NM_175113.1,1161-1179).
gatgccgcagaaaacaact

SEQ ID NO: 476300 - DNA, 19 bp, Mus musculus
  siRNA target sequence for 3300001M20Rik (NM_175113.1,1336-1354).
gaaatgcagatggtttgat

SEQ ID NO: 476301 - DNA, 19 bp, Mus musculus
  siRNA target sequence for 3300001M20Rik (NM_175113.1,1391-1409).
gtctttgctggactttgta

SEQ ID NO: 476302 - DNA, 19 bp, Mus musculus
  siRNA target sequence for 3300001M20Rik (NM_175113.1,1428-1446).
gtggtctactgtcagtata

SEQ ID NO: 476303 - DNA, 19 bp, Mus musculus
  siRNA target sequence for 3300001M20Rik (NM_175113.1,1430-1448).
ggtctactgtcagtataaa

SEQ ID NO: 476304 - DNA, 19 bp, Mus musculus
  siRNA target sequence for 3300001M20Rik (NM_175113.1,1457-1475).
gttggaatgctacacaaaa

SEQ ID NO: 476305 - DNA, 19 bp, Mus musculus
  siRNA target sequence for 3300001M20Rik (NM_175113.1,1551-1569).
cggagtcatcccaaattat

SEQ ID NO: 476306 - DNA, 19 bp, Mus musculus
  siRNA target sequence for 3300001M20Rik (NM_175113.1,1552-1570).
ggagtcatcccaaattatt

SEQ ID NO: 476307 - DNA, 19 bp, Mus musculus
  siRNA target sequence for 3300001M20Rik (NM_175113.1,1555-1573).
gtcatcccaaattattgat

SEQ ID NO: 476308 - DNA, 19 bp, Mus musculus
  siRNA target sequence for 3300001M20Rik (NM_175113.1,1651-1669).
cctgcacaggcgctttaga

SEQ ID NO: 476309 - DNA, 19 bp, Mus musculus
  siRNA target sequence for 3300001M20Rik (NM_175113.1,1689-1707).
ccagcagctaaaaaacaga

SEQ ID NO: 476310 - DNA, 19 bp, Mus musculus
  siRNA target sequence for 3300001M20Rik (NM_175113.1,1690-1708).
cagcagctaaaaaacagaa

SEQ ID NO: 476311 - DNA, 19 bp, Mus musculus
  siRNA target sequence for Arhgap4 (NM_138630.1,35-53).
ggctacaacctgagtatga

SEQ ID NO: 476312 - DNA, 19 bp, Mus musculus
  siRNA target sequence for Arhgap4 (NM_138630.1,172-190).
gaggtagaactggagtatt

SEQ ID NO: 476313 - DNA, 19 bp, Mus musculus
  siRNA target sequence for Arhgap4 (NM_138630.1,401-419).
gtcacatcagcgaagatgt

SEQ ID NO: 476314 - DNA, 19 bp, Mus musculus
  siRNA target sequence for Arhgap4 (NM_138630.1,411-429).
cgaagatgtgggacgtatt

SEQ ID NO: 476315 - DNA, 19 bp, Mus musculus
  siRNA target sequence for Arhgap4 (NM_138630.1,415-433).
gatgtgggacgtattgtca

SEQ ID NO: 476316 - DNA, 19 bp, Mus musculus
  siRNA target sequence for Arhgap4 (NM_138630.1,418-436).
gtgggacgtattgtcaaaa

SEQ ID NO: 476317 - DNA, 19 bp, Mus musculus
  siRNA target sequence for Arhgap4 (NM_138630.1,421-439).
ggacgtattgtcaaaaaga

SEQ ID NO: 476318 - DNA, 19 bp, Mus musculus
  siRNA target sequence for Arhgap4 (NM_138630.1,540-558).
gaatgctgagactaaactt

SEQ ID NO: 476319 - DNA, 19 bp, Mus musculus
  siRNA target sequence for Arhgap4 (NM_138630.1,1020-1038).
ctgtccccctctacgtttt

SEQ ID NO: 476320 - DNA, 19 bp, Mus musculus
  siRNA target sequence for Arhgap4 (NM_138630.1,1022-1040).
gtccccctctacgttttga

SEQ ID NO: 476321 - DNA, 19 bp, Mus musculus
  siRNA target sequence for Arhgap4 (NM_138630.1,1025-1043).
cccctctacgttttgaata

SEQ ID NO: 476322 - DNA, 19 bp, Mus musculus
  siRNA target sequence for Arhgap4 (NM_138630.1,1028-1046).
ctctacgttttgaatacca

SEQ ID NO: 476323 - DNA, 19 bp, Mus musculus
  siRNA target sequence for Arhgap4 (NM_138630.1,1069-1087).
gccgaggtcctgattgaga

SEQ ID NO: 476324 - DNA, 19 bp, Mus musculus
  siRNA target sequence for Arhgap4 (NM_138630.1,1090-1108).
gaactgtgggatgagattt

SEQ ID NO: 476325 - DNA, 19 bp, Mus musculus
  siRNA target sequence for Arhgap4 (NM_138630.1,1220-1238).
cagaggatggggacatact

SEQ ID NO: 476326 - DNA, 19 bp, Mus musculus
  siRNA target sequence for Arhgap4 (NM_138630.1,1229-1247).
gggacatactggactcttt

SEQ ID NO: 476327 - DNA, 19 bp, Mus musculus
  siRNA target sequence for Arhgap4 (NM_138630.1,1267-1285).
gagtccctcaagtctacaa

SEQ ID NO: 476328 - DNA, 19 bp, Mus musculus
  siRNA target sequence for Arhgap4 (NM_138630.1,1338-1356).
gacagaaaccttctatatt

SEQ ID NO: 476329 - DNA, 19 bp, Mus musculus
  siRNA target sequence for Arhgap4 (NM_138630.1,1342-1360).
gaaaccttctatattacga

SEQ ID NO: 476330 - DNA, 19 bp, Mus musculus
  siRNA target sequence for Arhgap4 (NM_138630.1,1382-1400).
gccggagcatcctttccaa

SEQ ID NO: 476331 - DNA, 19 bp, Mus musculus
  siRNA target sequence for Arhgap4 (NM_138630.1,1404-1422).
gcaggccaagcatgaaaaa

SEQ ID NO: 476332 - DNA, 19 bp, Mus musculus
  siRNA target sequence for Arhgap4 (NM_138630.1,1613-1631).
gtattcgcttcattaatct

SEQ ID NO: 476333 - DNA, 19 bp, Mus musculus
  siRNA target sequence for Arhgap4 (NM_138630.1,1692-1710).
gatccgagatgcctttgaa

SEQ ID NO: 476334 - DNA, 19 bp, Mus musculus
  siRNA target sequence for Arhgap4 (NM_138630.1,1769-1787).
gggtactaaagctgtactt

SEQ ID NO: 476335 - DNA, 19 bp, Mus musculus
  siRNA target sequence for Arhgap4 (NM_138630.1,1770-1788).
ggtactaaagctgtacttt

SEQ ID NO: 476336 - DNA, 19 bp, Mus musculus
  siRNA target sequence for Arhgap4 (NM_138630.1,1812-1830).
ccccttggacatgtttaat

SEQ ID NO: 476337 - DNA, 19 bp, Mus musculus
  siRNA target sequence for Arhgap4 (NM_138630.1,1886-1904).
gccatctgctattcaaact

SEQ ID NO: 476338 - DNA, 19 bp, Mus musculus
  siRNA target sequence for Arhgap4 (NM_138630.1,1887-1905).
ccatctgctattcaaacta

SEQ ID NO: 476339 - DNA, 19 bp, Mus musculus
  siRNA target sequence for Arhgap4 (NM_138630.1,1921-1939).
gtggtcctacgctatctct

SEQ ID NO: 476340 - DNA, 19 bp, Mus musculus
  siRNA target sequence for Arhgap4 (NM_138630.1,2343-2361).
ggatgtgctgcgattgtat

SEQ ID NO: 476341 - DNA, 19 bp, Mus musculus
  siRNA target sequence for Arhgap4 (NM_138630.1,2358-2376).
gtatgctcgggcatcaagt

SEQ ID NO: 476342 - DNA, 19 bp, Mus musculus
  siRNA target sequence for Arhgap4 (NM_138630.1,2410-2428).
gggctcattccccataagt

SEQ ID NO: 476343 - DNA, 19 bp, Mus musculus
  siRNA target sequence for Arhgap4 (NM_138630.1,2411-2429).
ggctcattccccataagta

SEQ ID NO: 476344 - DNA, 19 bp, Mus musculus
  siRNA target sequence for Arhgap4 (NM_138630.1,2583-2601).
gcacagacgaccctgttta

SEQ ID NO: 476345 - DNA, 19 bp, Mus musculus
  siRNA target sequence for Arhgap4 (NM_138630.1,2701-2719).
cagggccatgggttagcat

SEQ ID NO: 476346 - DNA, 19 bp, Mus musculus
  siRNA target sequence for Arhgap4 (NM_138630.1,2706-2724).
ccatgggttagcatctaca

SEQ ID NO: 476347 - DNA, 19 bp, Mus musculus
  siRNA target sequence for Arhgap4 (NM_138630.1,2835-2853).
ccagggtccagattcaact

SEQ ID NO: 476348 - DNA, 19 bp, Mus musculus
  siRNA target sequence for BC013529 (NM_145418.1,76-94).
ccggttgttgctgttcata

SEQ ID NO: 476349 - DNA, 19 bp, Mus musculus
  siRNA target sequence for BC013529 (NM_145418.1,161-179).
ggcatccaaatcaatgtaa

SEQ ID NO: 476350 - DNA, 19 bp, Mus musculus
  siRNA target sequence for BC013529 (NM_145418.1,163-181).
catccaaatcaatgtaact

SEQ ID NO: 476351 - DNA, 19 bp, Mus musculus
  siRNA target sequence for BC013529 (NM_145418.1,241-259).
gcgtggacaggtatatgta

SEQ ID NO: 476352 - DNA, 19 bp, Mus musculus
  siRNA target sequence for BC013529 (NM_145418.1,242-260).
cgtggacaggtatatgtaa

SEQ ID NO: 476353 - DNA, 19 bp, Mus musculus
  siRNA target sequence for BC013529 (NM_145418.1,246-264).
gacaggtatatgtaaatga

SEQ ID NO: 476354 - DNA, 19 bp, Mus musculus
  siRNA target sequence for BC013529 (NM_145418.1,281-299).
ggtgtaacccgaataagct

SEQ ID NO: 476355 - DNA, 19 bp, Mus musculus
  siRNA target sequence for BC013529 (NM_145418.1,291-309).
gaataagctgtcagacttt

SEQ ID NO: 476356 - DNA, 19 bp, Mus musculus
  siRNA target sequence for BC013529 (NM_145418.1,346-364).
gaaacactattttggaatt

SEQ ID NO: 476357 - DNA, 19 bp, Mus musculus
  siRNA target sequence for BC013529 (NM_145418.1,457-475).
cgggagacaagctcaacaa

SEQ ID NO: 476358 - DNA, 19 bp, Mus musculus
  siRNA target sequence for BC013529 (NM_145418.1,467-485).
gctcaacaaaagaatgtta

SEQ ID NO: 476359 - DNA, 19 bp, Mus musculus
  siRNA target sequence for BC013529 (NM_145418.1,486-504).
ctgaaattgacattttagt

SEQ ID NO: 476360 - DNA, 19 bp, Mus musculus
  siRNA target sequence for BC013529 (NM_145418.1,488-506).
gaaattgacattttagtta

SEQ ID NO: 476361 - DNA, 19 bp, Mus musculus
  siRNA target sequence for BC013529 (NM_145418.1,521-539).
ctcagatattcaagctatt

SEQ ID NO: 476362 - DNA, 19 bp, Mus musculus
  siRNA target sequence for BC013529 (NM_145418.1,525-543).
gatattcaagctatttcct

SEQ ID NO: 476363 - DNA, 19 bp, Mus musculus
  siRNA target sequence for BC013529 (NM_145418.1,734-752).
gagcctccatcttcataca

SEQ ID NO: 476364 - DNA, 19 bp, Mus musculus
  siRNA target sequence for BC013529 (NM_145418.1,741-759).
catcttcatacaaggtaat

SEQ ID NO: 476365 - DNA, 19 bp, Mus musculus
  siRNA target sequence for BC013529 (NM_145418.1,872-890).
ggagtcatagcagtgttaa

SEQ ID NO: 476366 - DNA, 19 bp, Mus musculus
  siRNA target sequence for BC013529 (NM_145418.1,873-891).
gagtcatagcagtgttaaa

SEQ ID NO: 476367 - DNA, 19 bp, Mus musculus
  siRNA target sequence for BC013529 (NM_145418.1,907-925).
gtgtgagaacaaaggaatt

SEQ ID NO: 476368 - DNA, 19 bp, Mus musculus
  siRNA target sequence for BC013529 (NM_145418.1,909-927).
gtgagaacaaaggaattct

SEQ ID NO: 476369 - DNA, 19 bp, Mus musculus
  siRNA target sequence for BC013529 (NM_145418.1,948-966).
ggatctcggtacctatcat

SEQ ID NO: 476370 - DNA, 19 bp, Mus musculus
  siRNA target sequence for BC013529 (NM_145418.1,952-970).
ctcggtacctatcatctta

SEQ ID NO: 476371 - DNA, 19 bp, Mus musculus
  siRNA target sequence for BC013529 (NM_145418.1,954-972).
cggtacctatcatcttata

SEQ ID NO: 476372 - DNA, 19 bp, Mus musculus
  siRNA target sequence for Bzw1 (NM_025824.2,122-140).
ctatcaggccagcgtttta

SEQ ID NO: 476373 - DNA, 19 bp, Mus musculus
  siRNA target sequence for Bzw2 (NM_025840.2,184-202).
cagttttcagggatacact

SEQ ID NO: 476374 - DNA, 19 bp, Mus musculus
  siRNA target sequence for Bzw2 (NM_025840.2,262-280).
ctactggctcacgattaga

SEQ ID NO: 476375 - DNA, 19 bp, Mus musculus
  siRNA target sequence for Bzw2 (NM_025840.2,317-335).
ggtggctggcagtatgctt

SEQ ID NO: 476376 - DNA, 19 bp, Mus musculus
  siRNA target sequence for Bzw2 (NM_025840.2,431-449).
ctatgctcaggtcttcaat

SEQ ID NO: 476377 - DNA, 19 bp, Mus musculus
  siRNA target sequence for Bzw2 (NM_025840.2,460-478).
ggagatacaagtatttgga

SEQ ID NO: 476378 - DNA, 19 bp, Mus musculus
  siRNA target sequence for Bzw2 (NM_025840.2,461-479).
gagatacaagtatttggaa

SEQ ID NO: 476379 - DNA, 19 bp, Mus musculus
  siRNA target sequence for Bzw2 (NM_025840.2,655-673).
cattcgctgtcaagctttt

SEQ ID NO: 476380 - DNA, 19 bp, Mus musculus
  siRNA target sequence for Bzw2 (NM_025840.2,692-710).
gaaagatgccaattctgtt

SEQ ID NO: 476381 - DNA, 19 bp, Mus musculus
  siRNA target sequence for Bzw2 (NM_025840.2,783-801).
gatcatttcgctaagtact

SEQ ID NO: 476382 - DNA, 19 bp, Mus musculus
  siRNA target sequence for Bzw2 (NM_025840.2,990-1008).
ctgtggacctgcatcatga

SEQ ID NO: 476383 - DNA, 19 bp, Mus musculus
  siRNA target sequence for Bzw2 (NM_025840.2,992-1010).
gtggacctgcatcatgaat

SEQ ID NO: 476384 - DNA, 19 bp, Mus musculus
  siRNA target sequence for Bzw2 (NM_025840.2,1011-1029).
gcggtggaatggaacaaga

SEQ ID NO: 476385 - DNA, 19 bp, Mus musculus
  siRNA target sequence for Bzw2 (NM_025840.2,1012-1030).
cggtggaatggaacaagaa

SEQ ID NO: 476386 - DNA, 19 bp, Mus musculus
  siRNA target sequence for Bzw2 (NM_025840.2,1184-1202).
gaagatcgtggttctcttt

SEQ ID NO: 476387 - DNA, 19 bp, Mus musculus
  siRNA target sequence for Bzw2 (NM_025840.2,1222-1240).
gcgaagaggcgatactgaa

SEQ ID NO: 476388 - DNA, 19 bp, Mus musculus
  siRNA target sequence for Bzw2 (NM_025840.2,1230-1248).
gcgatactgaagtggtata

SEQ ID NO: 476389 - DNA, 19 bp, Mus musculus
  siRNA target sequence for Bzw2 (NM_025840.2,1270-1288).
gcaagagcgtctttcttga

SEQ ID NO: 476390 - DNA, 19 bp, Mus musculus
  siRNA target sequence for C85417 (NM_145445.2,214-232).
gggaccttatggatttgat

SEQ ID NO: 476391 - DNA, 19 bp, Mus musculus
  siRNA target sequence for C85417 (NM_145445.2,369-387).
gagtccctgcacaaactct

SEQ ID NO: 476392 - DNA, 19 bp, Mus musculus
  siRNA target sequence for C85417 (NM_145445.2,375-393).
ctgcacaaactcttgacat

SEQ ID NO: 476393 - DNA, 19 bp, Mus musculus
  siRNA target sequence for C85417 (NM_145445.2,399-417).
ggcctgagcgaggatttca

SEQ ID NO: 476394 - DNA, 19 bp, Mus musculus
  siRNA target sequence for C85417 (NM_145445.2,433-451).
cacttaaggccaacatcat

SEQ ID NO: 476395 - DNA, 19 bp, Mus musculus
  siRNA target sequence for C85417 (NM_145445.2,446-464).
catcattgaggcgattaat

SEQ ID NO: 476396 - DNA, 19 bp, Mus musculus
  siRNA target sequence for C85417 (NM_145445.2,568-586).
cagttgaggccttccttaa

SEQ ID NO: 476397 - DNA, 19 bp, Mus musculus
  siRNA target sequence for C85417 (NM_145445.2,602-620).
gaggaagttccacgttatt

SEQ ID NO: 476398 - DNA, 19 bp, Mus musculus
  siRNA target sequence for C85417 (NM_145445.2,604-622).
ggaagttccacgttattgt

SEQ ID NO: 476399 - DNA, 19 bp, Mus musculus
  siRNA target sequence for C85417 (NM_145445.2,605-623).
gaagttccacgttattgtt

SEQ ID NO: 476400 - DNA, 19 bp, Mus musculus
  siRNA target sequence for C85417 (NM_145445.2,971-989).
cgtccactgtcctgtgttt

SEQ ID NO: 476401 - DNA, 19 bp, Mus musculus
  siRNA target sequence for C85417 (NM_145445.2,1067-1085).
gatgagcgagctctatcat

SEQ ID NO: 476402 - DNA, 19 bp, Mus musculus
  siRNA target sequence for Cops6 (NM_012002.1,239-257).
ggcgaaatatcgaagtgat

SEQ ID NO: 476403 - DNA, 19 bp, Mus musculus
  siRNA target sequence for Cops6 (NM_012002.1,242-260).
gaaatatcgaagtgatgaa

SEQ ID NO: 476404 - DNA, 19 bp, Mus musculus
  siRNA target sequence for Cops6 (NM_012002.1,284-302).
ccgtggaagagaagattat

SEQ ID NO: 476405 - DNA, 19 bp, Mus musculus
  siRNA target sequence for Cops6 (NM_012002.1,292-310).
gagaagattatcattgaca

SEQ ID NO: 476406 - DNA, 19 bp, Mus musculus
  siRNA target sequence for Cops6 (NM_012002.1,297-315).
gattatcattgacaaagaa

SEQ ID NO: 476407 - DNA, 19 bp, Mus musculus
  siRNA target sequence for Cops6 (NM_012002.1,363-381).
ggagtttctgggttggtat

SEQ ID NO: 476408 - DNA, 19 bp, Mus musculus
  siRNA target sequence for Cops6 (NM_012002.1,364-382).
gagtttctgggttggtata

SEQ ID NO: 476409 - DNA, 19 bp, Mus musculus
  siRNA target sequence for Cops6 (NM_012002.1,407-425).
cagacatccacgtccataa

SEQ ID NO: 476410 - DNA, 19 bp, Mus musculus
  siRNA target sequence for Cops6 (NM_012002.1,430-448).
gtgtgtgagataattgaga

SEQ ID NO: 476411 - DNA, 19 bp, Mus musculus
  siRNA target sequence for Cops6 (NM_012002.1,449-467).
gtccgctctttctgaagtt

SEQ ID NO: 476412 - DNA, 19 bp, Mus musculus
  siRNA target sequence for Cops6 (NM_012002.1,451-469).
ccgctctttctgaagttga

SEQ ID NO: 476413 - DNA, 19 bp, Mus musculus
  siRNA target sequence for Cops6 (NM_012002.1,496-514).
cctgtcagcgtttttgagt

SEQ ID NO: 476414 - DNA, 19 bp, Mus musculus
  siRNA target sequence for Cops6 (NM_012002.1,515-533).
ctgtcatcgatataatcaa

SEQ ID NO: 476415 - DNA, 19 bp, Mus musculus
  siRNA target sequence for Cops6 (NM_012002.1,676-694).
cagcatagtgccatcaaga

SEQ ID NO: 476416 - DNA, 19 bp, Mus musculus
  siRNA target sequence for Cops6 (NM_012002.1,704-722).
gccgtgtgaagctcatttt

SEQ ID NO: 476417 - DNA, 19 bp, Mus musculus
  siRNA target sequence for Cops6 (NM_012002.1,707-725).
gtgtgaagctcattttaga

SEQ ID NO: 476418 - DNA, 19 bp, Mus musculus
  siRNA target sequence for Cops6 (NM_012002.1,825-843).
caagttcaagacagacttt

SEQ ID NO: 476419 - DNA, 19 bp, Mus musculus
  siRNA target sequence for Cops6 (NM_012002.1,831-849).
caagacagacttttatgat

SEQ ID NO: 476420 - DNA, 19 bp, Mus musculus
  siRNA target sequence for Cops6 (NM_012002.1,834-852).
gacagacttttatgatcaa

SEQ ID NO: 476421 - DNA, 19 bp, Mus musculus
  siRNA target sequence for Cops6 (NM_012002.1,880-898).
ctcggcaccatcaccaaaa

SEQ ID NO: 476422 - DNA, 19 bp, Mus musculus
  siRNA target sequence for Cops6 (NM_012002.1,893-911).
ccaaaacgtgcaacacaat

SEQ ID NO: 476423 - DNA, 19 bp, Mus musculus
  siRNA target sequence for Cops6 (NM_012002.1,967-985).
cgaatgcggggactgtttt

SEQ ID NO: 476424 - DNA, 19 bp, Mus musculus
  siRNA target sequence for Denr (NM_026603.1,156-174).
gaacagtgccaagttagat

SEQ ID NO: 476425 - DNA, 19 bp, Mus musculus
  siRNA target sequence for Denr (NM_026603.1,243-261).
gccggatgttgctaaatgt

SEQ ID NO: 476426 - DNA, 19 bp, Mus musculus
  siRNA target sequence for Denr (NM_026603.1,244-262).
ccggatgttgctaaatgta

SEQ ID NO: 476427 - DNA, 19 bp, Mus musculus
  siRNA target sequence for Denr (NM_026603.1,250-268).
gttgctaaatgtagacaat

SEQ ID NO: 476428 - DNA, 19 bp, Mus musculus
  siRNA target sequence for Denr (NM_026603.1,260-278).
gtagacaatggctagagaa

SEQ ID NO: 476429 - DNA, 19 bp, Mus musculus
  siRNA target sequence for Denr (NM_026603.1,263-281).
gacaatggctagagaagaa

SEQ ID NO: 476430 - DNA, 19 bp, Mus musculus
  siRNA target sequence for Denr (NM_026603.1,401-419).
gaagaggtcaaataaaaca

SEQ ID NO: 476431 - DNA, 19 bp, Mus musculus
  siRNA target sequence for Denr (NM_026603.1,444-462).
ggtcacgatagccaaaatt

SEQ ID NO: 476432 - DNA, 19 bp, Mus musculus
  siRNA target sequence for Denr (NM_026603.1,497-515).
gtggccttgcaacttttga

SEQ ID NO: 476433 - DNA, 19 bp, Mus musculus
  siRNA target sequence for Denr (NM_026603.1,605-623).
gagacttcacagatgacat

SEQ ID NO: 476434 - DNA, 19 bp, Mus musculus
  siRNA target sequence for Denr (NM_026603.1,657-675).
ggatgacgacagcattgaa

SEQ ID NO: 476435 - DNA, 19 bp, Mus musculus
  siRNA target sequence for Eif2b1 (NM_145371.1,50-68).
ggacggtgagttaattgaa

SEQ ID NO: 476436 - DNA, 19 bp, Mus musculus
  siRNA target sequence for Eif2b1 (NM_145371.1,51-69).
gacggtgagttaattgaat

SEQ ID NO: 476437 - DNA, 19 bp, Mus musculus
  siRNA target sequence for Eif2b1 (NM_145371.1,55-73).
gtgagttaattgaatactt

SEQ ID NO: 476438 - DNA, 19 bp, Mus musculus
  siRNA target sequence for Eif2b1 (NM_145371.1,117-135).
gctgccatccagactttgt

SEQ ID NO: 476439 - DNA, 19 bp, Mus musculus
  siRNA target sequence for Eif2b1 (NM_145371.1,274-292).
gcctcacctccctggaata

SEQ ID NO: 476440 - DNA, 19 bp, Mus musculus
  siRNA target sequence for Eif2b1 (NM_145371.1,276-294).
ctcacctccctggaatact

SEQ ID NO: 476441 - DNA, 19 bp, Mus musculus
  siRNA target sequence for Eif2b1 (NM_145371.1,278-296).
cacctccctggaatactct

SEQ ID NO: 476442 - DNA, 19 bp, Mus musculus
  siRNA target sequence for Eif2b1 (NM_145371.1,310-328).
gtaagaagatcatgattga

SEQ ID NO: 476443 - DNA, 19 bp, Mus musculus
  siRNA target sequence for Eif2b1 (NM_145371.1,358-376).
ccctgtcgagaaataagat

SEQ ID NO: 476444 - DNA, 19 bp, Mus musculus
  siRNA target sequence for Eif2b1 (NM_145371.1,378-396).
gccaatctgtgtcatacat

SEQ ID NO: 476445 - DNA, 19 bp, Mus musculus
  siRNA target sequence for Eif2b1 (NM_145371.1,379-397).
ccaatctgtgtcatacatt

SEQ ID NO: 476446 - DNA, 19 bp, Mus musculus
  siRNA target sequence for Eif2b1 (NM_145371.1,434-452).
ctccagagttgtcttaaga

SEQ ID NO: 476447 - DNA, 19 bp, Mus musculus
  siRNA target sequence for Eif2b1 (NM_145371.1,479-497).
gaaacggttcagtgtgtat

SEQ ID NO: 476448 - DNA, 19 bp, Mus musculus
  siRNA target sequence for Eif2b1 (NM_145371.1,502-520).
cggagtcgcagcctgattt

SEQ ID NO: 476449 - DNA, 19 bp, Mus musculus
  siRNA target sequence for Eif2b1 (NM_145371.1,504-522).
gagtcgcagcctgatttat

SEQ ID NO: 476450 - DNA, 19 bp, Mus musculus
  siRNA target sequence for Eif2b1 (NM_145371.1,586-604).
ctgctgtcggctatatcat

SEQ ID NO: 476451 - DNA, 19 bp, Mus musculus
  siRNA target sequence for Eif2b1 (NM_145371.1,634-652).
ctgaaggagtggtagagaa

SEQ ID NO: 476452 - DNA, 19 bp, Mus musculus
  siRNA target sequence for Eif2b1 (NM_145371.1,654-672).
ggaggcattattaacaaga

SEQ ID NO: 476453 - DNA, 19 bp, Mus musculus
  siRNA target sequence for Eif2b1 (NM_145371.1,655-673).
gaggcattattaacaagat

SEQ ID NO: 476454 - DNA, 19 bp, Mus musculus
  siRNA target sequence for Eif2b1 (NM_145371.1,707-725).
ccagaataagcccttctat

SEQ ID NO: 476455 - DNA, 19 bp, Mus musculus
  siRNA target sequence for Eif2b1 (NM_145371.1,774-792).
gaggacgtcccagataagt

SEQ ID NO: 476456 - DNA, 19 bp, Mus musculus
  siRNA target sequence for Eif2b1 (NM_145371.1,776-794).
ggacgtcccagataagttt

SEQ ID NO: 476457 - DNA, 19 bp, Mus musculus
  siRNA target sequence for Eif2b1 (NM_145371.1,777-795).
gacgtcccagataagttta

SEQ ID NO: 476458 - DNA, 19 bp, Mus musculus
  siRNA target sequence for Eif2b1 (NM_145371.1,780-798).
gtcccagataagtttaagt

SEQ ID NO: 476459 - DNA, 19 bp, Mus musculus
  siRNA target sequence for Eif2b4 (NM_010122.1,85-103).
gtggctgttcgcgaagaat

SEQ ID NO: 476460 - DNA, 19 bp, Mus musculus
  siRNA target sequence for Eif2b4 (NM_010122.1,174-192).
gaagcttcagcttcgaaaa

SEQ ID NO: 476461 - DNA, 19 bp, Mus musculus
  siRNA target sequence for Eif2b4 (NM_010122.1,177-195).
gcttcagcttcgaaaagaa

SEQ ID NO: 476462 - DNA, 19 bp, Mus musculus
  siRNA target sequence for Eif2b4 (NM_010122.1,351-369).
ccggagtaaggcagaactt

SEQ ID NO: 476463 - DNA, 19 bp, Mus musculus
  siRNA target sequence for Eif2b4 (NM_010122.1,571-589).
gttcctacacgaaaggatt

SEQ ID NO: 476464 - DNA, 19 bp, Mus musculus
  siRNA target sequence for Eif2b4 (NM_010122.1,777-795).
ggtgattcaggattacaca

SEQ ID NO: 476465 - DNA, 19 bp, Mus musculus
  siRNA target sequence for Eif2b4 (NM_010122.1,823-841).
gatcttgtaaataaactaa

SEQ ID NO: 476466 - DNA, 19 bp, Mus musculus
  siRNA target sequence for Eif2b4 (NM_010122.1,874-892).
cccatgtcggcaagtatgt

SEQ ID NO: 476467 - DNA, 19 bp, Mus musculus
  siRNA target sequence for Eif2b4 (NM_010122.1,989-1007).
ggtacgtgcaagagaagat

SEQ ID NO: 476468 - DNA, 19 bp, Mus musculus
  siRNA target sequence for Eif2b4 (NM_010122.1,1061-1079).
gggacgtgatcctggtata

SEQ ID NO: 476469 - DNA, 19 bp, Mus musculus
  siRNA target sequence for Eif2b4 (NM_010122.1,1062-1080).
ggacgtgatcctggtatat

SEQ ID NO: 476470 - DNA, 19 bp, Mus musculus
  siRNA target sequence for Eif2b4 (NM_010122.1,1065-1083).
cgtgatcctggtatatgga

SEQ ID NO: 476471 - DNA, 19 bp, Mus musculus
  siRNA target sequence for Eif2b4 (NM_010122.1,1066-1084).
gtgatcctggtatatggat

SEQ ID NO: 476472 - DNA, 19 bp, Mus musculus
  siRNA target sequence for Eif2b4 (NM_010122.1,1075-1093).
gtatatggatgctcatctt

SEQ ID NO: 476473 - DNA, 19 bp, Mus musculus
  siRNA target sequence for Eif2b4 (NM_010122.1,1350-1368).
ggctcgagctcataacgtt

SEQ ID NO: 476474 - DNA, 19 bp, Mus musculus
  siRNA target sequence for Eif2b4 (NM_010122.1,1372-1390).
gtactggtctgctgtgaaa

SEQ ID NO: 476475 - DNA, 19 bp, Mus musculus
  siRNA target sequence for Eif2b4 (NM_010122.1,1382-1400).
gctgtgaaacgtacaagtt

SEQ ID NO: 476476 - DNA, 19 bp, Mus musculus
  siRNA target sequence for Eif2b4 (NM_010122.1,1451-1469).
ccgatgatctgcagtgtaa

SEQ ID NO: 476477 - DNA, 19 bp, Mus musculus
  siRNA target sequence for Eif2b4 (NM_010122.1,1510-1528).
ccgtccctccggttgttga

SEQ ID NO: 476478 - DNA, 19 bp, Mus musculus
  siRNA target sequence for Eif2b4 (NM_010122.1,1511-1529).
cgtccctccggttgttgaa

SEQ ID NO: 476479 - DNA, 19 bp, Mus musculus
  siRNA target sequence for Eif2b4 (NM_010122.1,1512-1530).
gtccctccggttgttgaat

SEQ ID NO: 476480 - DNA, 19 bp, Mus musculus
  siRNA target sequence for Eif2b4 (NM_010122.1,1514-1532).
ccctccggttgttgaatct

SEQ ID NO: 476481 - DNA, 19 bp, Mus musculus
  siRNA target sequence for Eif2b5 (NM_172265.1,295-313).
ggccaacgttgcgctaatt

SEQ ID NO: 476482 - DNA, 19 bp, Mus musculus
  siRNA target sequence for Eif2b5 (NM_172265.1,297-315).
ccaacgttgcgctaattga

SEQ ID NO: 476483 - DNA, 19 bp, Mus musculus
  siRNA target sequence for Eif2b5 (NM_172265.1,301-319).
cgttgcgctaattgactat

SEQ ID NO: 476484 - DNA, 19 bp, Mus musculus
  siRNA target sequence for Eif2b5 (NM_172265.1,302-320).
gttgcgctaattgactata

SEQ ID NO: 476485 - DNA, 19 bp, Mus musculus
  siRNA target sequence for Eif2b5 (NM_172265.1,306-324).
cgctaattgactatactct

SEQ ID NO: 476486 - DNA, 19 bp, Mus musculus
  siRNA target sequence for Eif2b5 (NM_172265.1,347-365).
gtacaggaaacatttgtct

SEQ ID NO: 476487 - DNA, 19 bp, Mus musculus
  siRNA target sequence for Eif2b5 (NM_172265.1,435-453).
ccaacgttgttcggataat

SEQ ID NO: 476488 - DNA, 19 bp, Mus musculus
  siRNA target sequence for Eif2b5 (NM_172265.1,439-457).
cgttgttcggataatcaca

SEQ ID NO: 476489 - DNA, 19 bp, Mus musculus
  siRNA target sequence for Eif2b5 (NM_172265.1,515-533).
gtgcgctctgactttctct

SEQ ID NO: 476490 - DNA, 19 bp, Mus musculus
  siRNA target sequence for Eif2b5 (NM_172265.1,520-538).
ctctgactttctcttgata

SEQ ID NO: 476491 - DNA, 19 bp, Mus musculus
  siRNA target sequence for Eif2b5 (NM_172265.1,543-561).
gagatgtcatctcaaatat

SEQ ID NO: 476492 - DNA, 19 bp, Mus musculus
  siRNA target sequence for Eif2b5 (NM_172265.1,625-643).
gatgacaatggtcttcaaa

SEQ ID NO: 476493 - DNA, 19 bp, Mus musculus
  siRNA target sequence for Eif2b5 (NM_172265.1,791-809).
gacggagtggagattcgat

SEQ ID NO: 476494 - DNA, 19 bp, Mus musculus
  siRNA target sequence for Eif2b5 (NM_172265.1,793-811).
cggagtggagattcgatat

SEQ ID NO: 476495 - DNA, 19 bp, Mus musculus
  siRNA target sequence for Eif2b5 (NM_172265.1,797-815).
gtggagattcgatatgatt

SEQ ID NO: 476496 - DNA, 19 bp, Mus musculus
  siRNA target sequence for Eif2b5 (NM_172265.1,800-818).
gagattcgatatgatttgt

SEQ ID NO: 476497 - DNA, 19 bp, Mus musculus
  siRNA target sequence for Eif2b5 (NM_172265.1,857-875).
cagctcttcacagacaatt

SEQ ID NO: 476498 - DNA, 19 bp, Mus musculus
  siRNA target sequence for Eif2b5 (NM_172265.1,902-920).
gtacgaggcatattaatga

SEQ ID NO: 476499 - DNA, 19 bp, Mus musculus
  siRNA target sequence for Eif2b5 (NM_172265.1,906-924).
gaggcatattaatgaatga

SEQ ID NO: 476500 - DNA, 19 bp, Mus musculus
  siRNA target sequence for Eif2b5 (NM_172265.1,932-950).
ctaggaaaccagattcact

SEQ ID NO: 476501 - DNA, 19 bp, Mus musculus
  siRNA target sequence for Eif2b5 (NM_172265.1,947-965).
cacttgcatgtgacaacta

SEQ ID NO: 476502 - DNA, 19 bp, Mus musculus
  siRNA target sequence for Eif2b5 (NM_172265.1,997-1015).
catgtactcagctgtttgt

SEQ ID NO: 476503 - DNA, 19 bp, Mus musculus
  siRNA target sequence for Eif2b5 (NM_172265.1,1046-1064).
ctcactccagaagtaaact

SEQ ID NO: 476504 - DNA, 19 bp, Mus musculus
  siRNA target sequence for Eif2b5 (NM_172265.1,1094-1112).
cattcccgacacaacatct

SEQ ID NO: 476505 - DNA, 19 bp, Mus musculus
  siRNA target sequence for Eif2b5 (NM_172265.1,1225-1243).
ccctaactgccatattggt

SEQ ID NO: 476506 - DNA, 19 bp, Mus musculus
  siRNA target sequence for Eif2b5 (NM_172265.1,1339-1357).
ggtcaaggagcgagtcaaa

SEQ ID NO: 476507 - DNA, 19 bp, Mus musculus
  siRNA target sequence for Eif2b5 (NM_172265.1,1354-1372).
caaactgaagccatactgt

SEQ ID NO: 476508 - DNA, 19 bp, Mus musculus
  siRNA target sequence for Eif2b5 (NM_172265.1,1423-1441).
ctcggtgatctctttgcat

SEQ ID NO: 476509 - DNA, 19 bp, Mus musculus
  siRNA target sequence for Eif2b5 (NM_172265.1,1585-1603).
gggtgtgaactcgaaagaa

SEQ ID NO: 476510 - DNA, 19 bp, Mus musculus
  siRNA target sequence for Eif2b5 (NM_172265.1,1968-1986).
ggagccctgttttaaggaa

SEQ ID NO: 476511 - DNA, 19 bp, Mus musculus
  siRNA target sequence for Eif2c2 (NM_153178.2,128-146).
ccaccgggagaacaatcaa

SEQ ID NO: 476512 - DNA, 19 bp, Mus musculus
  siRNA target sequence for Eif2c2 (NM_153178.2,129-147).
caccgggagaacaatcaaa

SEQ ID NO: 476513 - DNA, 19 bp, Mus musculus
  siRNA target sequence for Eif2c2 (NM_153178.2,294-312).
ggaccggaagccagtgttt

SEQ ID NO: 476514 - DNA, 19 bp, Mus musculus
  siRNA target sequence for Eif2c2 (NM_153178.2,689-707).
cggcaacagcgttttacaa

SEQ ID NO: 476515 - DNA, 19 bp, Mus musculus
  siRNA target sequence for Eif2c2 (NM_153178.2,790-808).
caaagggtaaagtttacca

SEQ ID NO: 476516 - DNA, 19 bp, Mus musculus
  siRNA target sequence for Eif2c2 (NM_153178.2,1179-1197).
gcgaagtgcaagtttcaat

SEQ ID NO: 476517 - DNA, 19 bp, Mus musculus
  siRNA target sequence for Eif2c2 (NM_153178.2,1180-1198).
cgaagtgcaagtttcaata

SEQ ID NO: 476518 - DNA, 19 bp, Mus musculus
  siRNA target sequence for Eif2c2 (NM_153178.2,1194-1212).
caatacagacccatatgtt

SEQ ID NO: 476519 - DNA, 19 bp, Mus musculus
  siRNA target sequence for Eif2c2 (NM_153178.2,1702-1720).
cagaccctatccaatctct

SEQ ID NO: 476520 - DNA, 19 bp, Mus musculus
  siRNA target sequence for Eif2c2 (NM_153178.2,1708-1726).
ctatccaatctctgcttaa

SEQ ID NO: 476521 - DNA, 19 bp, Mus musculus
  siRNA target sequence for Eif2s2 (NM_026030.1,81-99).
gtccggggacgagatgatt

SEQ ID NO: 476522 - DNA, 19 bp, Mus musculus
  siRNA target sequence for Eif2s2 (NM_026030.1,83-101).
ccggggacgagatgatttt

SEQ ID NO: 476523 - DNA, 19 bp, Mus musculus
  siRNA target sequence for Eif2s2 (NM_026030.1,84-102).
cggggacgagatgattttt

SEQ ID NO: 476524 - DNA, 19 bp, Mus musculus
  siRNA target sequence for Eif2s2 (NM_026030.1,86-104).
gggacgagatgatttttga

SEQ ID NO: 476525 - DNA, 19 bp, Mus musculus
  siRNA target sequence for Eif2s2 (NM_026030.1,107-125).
ctactatgagcaaaaagaa

SEQ ID NO: 476526 - DNA, 19 bp, Mus musculus
  siRNA target sequence for Eif2s2 (NM_026030.1,275-293).
cttctgatgacttagatga

SEQ ID NO: 476527 - DNA, 19 bp, Mus musculus
  siRNA target sequence for Eif2s2 (NM_026030.1,359-377).
ctgaagaagctataaagga

SEQ ID NO: 476528 - DNA, 19 bp, Mus musculus
  siRNA target sequence for Eif2s2 (NM_026030.1,367-385).
gctataaaggatgttaaga

SEQ ID NO: 476529 - DNA, 19 bp, Mus musculus
  siRNA target sequence for Eif2s2 (NM_026030.1,418-436).
gaggatgaccttgacatta

SEQ ID NO: 476530 - DNA, 19 bp, Mus musculus
  siRNA target sequence for Eif2s2 (NM_026030.1,432-450).
cattatgcttggcaacaaa

SEQ ID NO: 476531 - DNA, 19 bp, Mus musculus
  siRNA target sequence for Eif2s2 (NM_026030.1,507-525).
cgaagctttagaagatgaa

SEQ ID NO: 476532 - DNA, 19 bp, Mus musculus
  siRNA target sequence for Eif2s2 (NM_026030.1,541-559).
gatggcatttcattcagta

SEQ ID NO: 476533 - DNA, 19 bp, Mus musculus
  siRNA target sequence for Eif2s2 (NM_026030.1,572-590).
gggcaggctcagaaagaga

SEQ ID NO: 476534 - DNA, 19 bp, Mus musculus
  siRNA target sequence for Eif2s2 (NM_026030.1,581-599).
cagaaagagactacacata

SEQ ID NO: 476535 - DNA, 19 bp, Mus musculus
  siRNA target sequence for Eif2s2 (NM_026030.1,616-634).
cgagtgttcaacatcatga

SEQ ID NO: 476536 - DNA, 19 bp, Mus musculus
  siRNA target sequence for Eif2s2 (NM_026030.1,702-720).
ccgagtaggaaccaagaaa

SEQ ID NO: 476537 - DNA, 19 bp, Mus musculus
  siRNA target sequence for Eif2s2 (NM_026030.1,706-724).
gtaggaaccaagaaaactt

SEQ ID NO: 476538 - DNA, 19 bp, Mus musculus
  siRNA target sequence for Eif2s2 (NM_026030.1,732-750).
caattttacagatatctgt

SEQ ID NO: 476539 - DNA, 19 bp, Mus musculus
  siRNA target sequence for Eif2s2 (NM_026030.1,804-822).
gggtacaagtggttctata

SEQ ID NO: 476540 - DNA, 19 bp, Mus musculus
  siRNA target sequence for Eif2s2 (NM_026030.1,806-824).
gtacaagtggttctataga

SEQ ID NO: 476541 - DNA, 19 bp, Mus musculus
  siRNA target sequence for Eif2s2 (NM_026030.1,814-832).
ggttctatagatggtaata

SEQ ID NO: 476542 - DNA, 19 bp, Mus musculus
  siRNA target sequence for Eif2s2 (NM_026030.1,818-836).
ctatagatggtaataacca

SEQ ID NO: 476543 - DNA, 19 bp, Mus musculus
  siRNA target sequence for Eif2s2 (NM_026030.1,826-844).
ggtaataaccaacttgtaa

SEQ ID NO: 476544 - DNA, 19 bp, Mus musculus
  siRNA target sequence for Eif2s2 (NM_026030.1,827-845).
gtaataaccaacttgtaat

SEQ ID NO: 476545 - DNA, 19 bp, Mus musculus
  siRNA target sequence for Eif2s2 (NM_026030.1,880-898).
gtcttgagaagatatatca

SEQ ID NO: 476546 - DNA, 19 bp, Mus musculus
  siRNA target sequence for Eif2s2 (NM_026030.1,923-941).
gccggtcaccggacacaat

SEQ ID NO: 476547 - DNA, 19 bp, Mus musculus
  siRNA target sequence for Eif2s2 (NM_026030.1,927-945).
gtcaccggacacaatccta

SEQ ID NO: 476548 - DNA, 19 bp, Mus musculus
  siRNA target sequence for Eif2s2 (NM_026030.1,932-950).
cggacacaatcctacagaa

SEQ ID NO: 476549 - DNA, 19 bp, Mus musculus
  siRNA target sequence for Eif2s2 (NM_026030.1,952-970).
gacacccgactctatttct

SEQ ID NO: 476550 - DNA, 19 bp, Mus musculus
  siRNA target sequence for Eif2s2 (NM_026030.1,956-974).
cccgactctatttcttaca

SEQ ID NO: 476551 - DNA, 19 bp, Mus musculus
  siRNA target sequence for Eif2s2 (NM_026030.1,999-1017).
ctctgttgccagtatcaaa

SEQ ID NO: 476552 - DNA, 19 bp, Mus musculus
  siRNA target sequence for Eif2s3y (NM_012011.1,35-53).
cgggcagccgcatctttct

SEQ ID NO: 476553 - DNA, 19 bp, Mus musculus
  siRNA target sequence for Eif2s3y (NM_012011.1,153-171).
gttgctcatggaaaatcta

SEQ ID NO: 476554 - DNA, 19 bp, Mus musculus
  siRNA target sequence for Eif2s3y (NM_012011.1,229-247).
ggaatattaccataaaact

SEQ ID NO: 476555 - DNA, 19 bp, Mus musculus
  siRNA target sequence for Eif2s3y (NM_012011.1,341-359).
gtttccttcagatattcca

SEQ ID NO: 476556 - DNA, 19 bp, Mus musculus
  siRNA target sequence for Eif2s3y (NM_012011.1,651-669).
gccgaaggagctcctatta

SEQ ID NO: 476557 - DNA, 19 bp, Mus musculus
  siRNA target sequence for Eif2s3y (NM_012011.1,652-670).
ccgaaggagctcctattat

SEQ ID NO: 476558 - DNA, 19 bp, Mus musculus
  siRNA target sequence for Eif2s3y (NM_012011.1,653-671).
cgaaggagctcctattatt

SEQ ID NO: 476559 - DNA, 19 bp, Mus musculus
  siRNA target sequence for Eif2s3y (NM_012011.1,658-676).
gagctcctattattccaat

SEQ ID NO: 476560 - DNA, 19 bp, Mus musculus
  siRNA target sequence for Eif2s3y (NM_012011.1,738-756).
gtacctctaagagacttta

SEQ ID NO: 476561 - DNA, 19 bp, Mus musculus
  siRNA target sequence for Eif2s3y (NM_012011.1,757-775).
cttcagaaccccgacttat

SEQ ID NO: 476562 - DNA, 19 bp, Mus musculus
  siRNA target sequence for Eif2s3y (NM_012011.1,760-778).
cagaaccccgacttattgt

SEQ ID NO: 476563 - DNA, 19 bp, Mus musculus
  siRNA target sequence for Eif2s3y (NM_012011.1,783-801).
cggtcttttgatgttaaca

SEQ ID NO: 476564 - DNA, 19 bp, Mus musculus
  siRNA target sequence for Eif2s3y (NM_012011.1,915-933).
gacggagaagggaagctta

SEQ ID NO: 476565 - DNA, 19 bp, Mus musculus
  siRNA target sequence for Eif2s3y (NM_012011.1,918-936).
ggagaagggaagcttatgt

SEQ ID NO: 476566 - DNA, 19 bp, Mus musculus
  siRNA target sequence for Eif2s3y (NM_012011.1,1049-1067).
ccgagcagatagaatggtt

SEQ ID NO: 476567 - DNA, 19 bp, Mus musculus
  siRNA target sequence for Eif2s3y (NM_012011.1,1103-1121).
gatattcacagagttagaa

SEQ ID NO: 476568 - DNA, 19 bp, Mus musculus
  siRNA target sequence for Eif2s3y (NM_012011.1,1111-1129).
cagagttagaaatttccta

SEQ ID NO: 476569 - DNA, 19 bp, Mus musculus
  siRNA target sequence for Eif2s3y (NM_012011.1,1148-1166).
cctaggtgtacgtacagaa

SEQ ID NO: 476570 - DNA, 19 bp, Mus musculus
  siRNA target sequence for Eif2s3y (NM_012011.1,1279-1297).
gtaaaattgttctaaccaa

SEQ ID NO: 476571 - DNA, 19 bp, Mus musculus
  siRNA target sequence for Eif2s3y (NM_012011.1,1384-1402).
gaagaggcgtgactatcaa

SEQ ID NO: 476572 - DNA, 19 bp, Mus musculus
  siRNA target sequence for Eif2s3y (NM_012011.1,1394-1412).
gactatcaagccaacaata

SEQ ID NO: 476573 - DNA, 19 bp, Mus musculus
  siRNA target sequence for Eif2s3y (NM_012011.1,1396-1414).
ctatcaagccaacaataga

SEQ ID NO: 476574 - DNA, 19 bp, Mus musculus
  siRNA target sequence for Eif2s3y (NM_012011.1,1400-1418).
caagccaacaatagatgat

SEQ ID NO: 476575 - DNA, 19 bp, Mus musculus
  siRNA target sequence for Eif3s10 (NM_010123.1,455-473).
ggcagttaatgcatatctt

SEQ ID NO: 476576 - DNA, 19 bp, Mus musculus
  siRNA target sequence for Eif3s10 (NM_010123.1,457-475).
cagttaatgcatatcttaa

SEQ ID NO: 476577 - DNA, 19 bp, Mus musculus
  siRNA target sequence for Eif3s10 (NM_010123.1,508-526).
ctcggagacagacaattga

SEQ ID NO: 476578 - DNA, 19 bp, Mus musculus
  siRNA target sequence for Eif3s10 (NM_010123.1,539-557).
gcgtcttgagagtctgaat

SEQ ID NO: 476579 - DNA, 19 bp, Mus musculus
  siRNA target sequence for Eif3s10 (NM_010123.1,541-559).
gtcttgagagtctgaatat

SEQ ID NO: 476580 - DNA, 19 bp, Mus musculus
  siRNA target sequence for Eif3s10 (NM_010123.1,673-691).
caagaacacgagcaaatca

SEQ ID NO: 476581 - DNA, 19 bp, Mus musculus
  siRNA target sequence for Eif3s10 (NM_010123.1,676-694).
gaacacgagcaaatcaaga

SEQ ID NO: 476582 - DNA, 19 bp, Mus musculus
  siRNA target sequence for Eif3s10 (NM_010123.1,712-730).
cggttagagcagatcaaga

SEQ ID NO: 476583 - DNA, 19 bp, Mus musculus
  siRNA target sequence for Eif3s10 (NM_010123.1,713-731).
ggttagagcagatcaagaa

SEQ ID NO: 476584 - DNA, 19 bp, Mus musculus
  siRNA target sequence for Eif3s10 (NM_010123.1,1004-1022).
gcagctagaacgagaaaaa

SEQ ID NO: 476585 - DNA, 19 bp, Mus musculus
  siRNA target sequence for Eif3s10 (NM_010123.1,1007-1025).
gctagaacgagaaaaagct

SEQ ID NO: 476586 - DNA, 19 bp, Mus musculus
  siRNA target sequence for Eif3s10 (NM_010123.1,1062-1080).
gacagagatctatttgtga

SEQ ID NO: 476587 - DNA, 19 bp, Mus musculus
  siRNA target sequence for Eif3s10 (NM_010123.1,1105-1123).
ctgtctacgaggaaaaact

SEQ ID NO: 476588 - DNA, 19 bp, Mus musculus
  siRNA target sequence for Eif3s10 (NM_010123.1,1107-1125).
gtctacgaggaaaaactga

SEQ ID NO: 476589 - DNA, 19 bp, Mus musculus
  siRNA target sequence for Eif3s10 (NM_010123.1,1109-1127).
ctacgaggaaaaactgaaa

SEQ ID NO: 476590 - DNA, 19 bp, Mus musculus
  siRNA target sequence for Eif3s10 (NM_010123.1,1137-1155).
gagcgcttagcagaagaaa

SEQ ID NO: 476591 - DNA, 19 bp, Mus musculus
  siRNA target sequence for Eif3s10 (NM_010123.1,1156-1174).
ggcatagtcgcctagaaga

SEQ ID NO: 476592 - DNA, 19 bp, Mus musculus
  siRNA target sequence for Eif3s10 (NM_010123.1,1197-1215).
gaacgcaaaataacttatt

SEQ ID NO: 476593 - DNA, 19 bp, Mus musculus
  siRNA target sequence for Eif3s10 (NM_010123.1,1200-1218).
cgcaaaataacttattaca

SEQ ID NO: 476594 - DNA, 19 bp, Mus musculus
  siRNA target sequence for Eif3s10 (NM_010123.1,1262-1280).
gctcaaagagcgagaagaa

SEQ ID NO: 476595 - DNA, 19 bp, Mus musculus
  siRNA target sequence for Eif3s10 (NM_010123.1,1306-1324).
gggaggaagaacttagaga

SEQ ID NO: 476596 - DNA, 19 bp, Mus musculus
  siRNA target sequence for Eif3s10 (NM_010123.1,1334-1352).
gcgagtcaagaaactagaa

SEQ ID NO: 476597 - DNA, 19 bp, Mus musculus
  siRNA target sequence for Eif3s10 (NM_010123.1,1431-1449).
ggtgatgatccactttcta

SEQ ID NO: 476598 - DNA, 19 bp, Mus musculus
  siRNA target sequence for Eif3s10 (NM_010123.1,1457-1475).
ctctcggtggggagataga

SEQ ID NO: 476599 - DNA, 19 bp, Mus musculus
  siRNA target sequence for Eif3s10 (NM_010123.1,1459-1477).
ctcggtggggagatagaga

SEQ ID NO: 476600 - DNA, 19 bp, Mus musculus
  siRNA target sequence for Eif3s10 (NM_010123.1,1461-1479).
cggtggggagatagagatt

SEQ ID NO: 476601 - DNA, 19 bp, Mus musculus
  siRNA target sequence for Eif3s10 (NM_010123.1,1463-1481).
gtggggagatagagattca

SEQ ID NO: 476602 - DNA, 19 bp, Mus musculus
  siRNA target sequence for Eif3s10 (NM_010123.1,1465-1483).
ggggagatagagattcaga

SEQ ID NO: 476603 - DNA, 19 bp, Mus musculus
  siRNA target sequence for Eif3s10 (NM_010123.1,1544-1562).
ggagtggagacgagaaact

SEQ ID NO: 476604 - DNA, 19 bp, Mus musculus
  siRNA target sequence for Eif3s10 (NM_010123.1,1629-1647).
gagagagagtcttctctta

SEQ ID NO: 476605 - DNA, 19 bp, Mus musculus
  siRNA target sequence for Eif3s2 (NM_018799.1,605-623).
ctcggcagatcaatgacat

SEQ ID NO: 476606 - DNA, 19 bp, Mus musculus
  siRNA target sequence for Eif3s3 (NM_080635.1,318-336).
gcagccttcgccatgtcaa

SEQ ID NO: 476607 - DNA, 19 bp, Mus musculus
  siRNA target sequence for Eif3s3 (NM_080635.1,669-687).
cagctgtggcggataagca

SEQ ID NO: 476608 - DNA, 19 bp, Mus musculus
  siRNA target sequence for Eif3s3 (NM_080635.1,678-696).
cggataagcacgaattgct

SEQ ID NO: 476609 - DNA, 19 bp, Mus musculus
  siRNA target sequence for Eif3s3 (NM_080635.1,746-764).
gaccgggtggacgaaatga

SEQ ID NO: 476610 - DNA, 19 bp, Mus musculus
  siRNA target sequence for Eif3s5 (NM_025344.1,306-324).
ggctacaccccgtcatttt

SEQ ID NO: 476611 - DNA, 19 bp, Mus musculus
  siRNA target sequence for Eif3s5 (NM_025344.1,430-448).
cttttcggtgccacacaat

SEQ ID NO: 476612 - DNA, 19 bp, Mus musculus
  siRNA target sequence for Eif3s5 (NM_025344.1,485-503).
gctaagaatatgtatgaat

SEQ ID NO: 476613 - DNA, 19 bp, Mus musculus
  siRNA target sequence for Eif3s5 (NM_025344.1,576-594).
cagtgctgatccatgagta

SEQ ID NO: 476614 - DNA, 19 bp, Mus musculus
  siRNA target sequence for Eif3s5 (NM_025344.1,670-688).
ggcctatgtcagcacttta

SEQ ID NO: 476615 - DNA, 19 bp, Mus musculus
  siRNA target sequence for Eif3s5 (NM_025344.1,671-689).
gcctatgtcagcactttaa

SEQ ID NO: 476616 - DNA, 19 bp, Mus musculus
  siRNA target sequence for Eif3s5 (NM_025344.1,705-723).
ggaccatgggagtgatgtt

SEQ ID NO: 476617 - DNA, 19 bp, Mus musculus
  siRNA target sequence for Eif3s5 (NM_025344.1,735-753).
cagtgaagtacgcgtatta

SEQ ID NO: 476618 - DNA, 19 bp, Mus musculus
  siRNA target sequence for Eif3s5 (NM_025344.1,819-837).
gactctcaagtgacttaca

SEQ ID NO: 476619 - DNA, 19 bp, Mus musculus
  siRNA target sequence for Eif3s5 (NM_025344.1,869-887).
gatgctctaagcactgtat

SEQ ID NO: 476620 - DNA, 19 bp, Mus musculus
  siRNA target sequence for Eif3s5 (NM_025344.1,964-982).
caaccaagtacccaagata

SEQ ID NO: 476621 - DNA, 19 bp, Mus musculus
  siRNA target sequence for Eif3s5 (NM_025344.1,967-985).
ccaagtacccaagatagtt

SEQ ID NO: 476622 - DNA, 19 bp, Mus musculus
  siRNA target sequence for Eif3s5 (NM_025344.1,1074-1092).
ccctcaacgagaaacttgt

SEQ ID NO: 476623 - DNA, 19 bp, Mus musculus
  siRNA target sequence for Eif3s5 (NM_025344.1,1075-1093).
cctcaacgagaaacttgta

SEQ ID NO: 476624 - DNA, 19 bp, Mus musculus
  siRNA target sequence for Eif3s5 (NM_025344.1,1076-1094).
ctcaacgagaaacttgtaa

SEQ ID NO: 476625 - DNA, 19 bp, Mus musculus
  siRNA target sequence for Eif3s7 (NM_018749.1,247-265).
caggacaagaggtacacaa

SEQ ID NO: 476626 - DNA, 19 bp, Mus musculus
  siRNA target sequence for Eif3s7 (NM_018749.1,255-273).
gaggtacacaaacaagtat

SEQ ID NO: 476627 - DNA, 19 bp, Mus musculus
  siRNA target sequence for Eif3s7 (NM_018749.1,285-303).
cggtgggggaagtcagtat

SEQ ID NO: 476628 - DNA, 19 bp, Mus musculus
  siRNA target sequence for Eif3s7 (NM_018749.1,289-307).
gggggaagtcagtatgcat

SEQ ID NO: 476629 - DNA, 19 bp, Mus musculus
  siRNA target sequence for Eif3s7 (NM_018749.1,290-308).
ggggaagtcagtatgcata

SEQ ID NO: 476630 - DNA, 19 bp, Mus musculus
  siRNA target sequence for Eif3s7 (NM_018749.1,291-309).
gggaagtcagtatgcatat

SEQ ID NO: 476631 - DNA, 19 bp, Mus musculus
  siRNA target sequence for Eif3s7 (NM_018749.1,376-394).
cagcggaaccggatgagat

SEQ ID NO: 476632 - DNA, 19 bp, Mus musculus
  siRNA target sequence for Eif3s7 (NM_018749.1,493-511).
cgaattcgcttgcagaaaa

SEQ ID NO: 476633 - DNA, 19 bp, Mus musculus
  siRNA target sequence for Eif3s7 (NM_018749.1,494-512).
gaattcgcttgcagaaaaa

SEQ ID NO: 476634 - DNA, 19 bp, Mus musculus
  siRNA target sequence for Eif3s7 (NM_018749.1,900-918).
ccagagagtcggctctaaa

SEQ ID NO: 476635 - DNA, 19 bp, Mus musculus
  siRNA target sequence for Eif3s7 (NM_018749.1,905-923).
gagtcggctctaaactctt

SEQ ID NO: 476636 - DNA, 19 bp, Mus musculus
  siRNA target sequence for Eif3s7 (NM_018749.1,911-929).
gctctaaactcttctttga

SEQ ID NO: 476637 - DNA, 19 bp, Mus musculus
  siRNA target sequence for Eif3s7 (NM_018749.1,933-951).
gagggacaactctgacttt

SEQ ID NO: 476638 - DNA, 19 bp, Mus musculus
  siRNA target sequence for Eif3s7 (NM_018749.1,935-953).
gggacaactctgactttga

SEQ ID NO: 476639 - DNA, 19 bp, Mus musculus
  siRNA target sequence for Eif3s7 (NM_018749.1,1043-1061).
cctacatcaaccacaactt

SEQ ID NO: 476640 - DNA, 19 bp, Mus musculus
  siRNA target sequence for Eif3s7 (NM_018749.1,1128-1146).
ggacgacatggataagaat

SEQ ID NO: 476641 - DNA, 19 bp, Mus musculus
  siRNA target sequence for Eif3s7 (NM_018749.1,1269-1287).
catcaagacgctcaatgaa

SEQ ID NO: 476642 - DNA, 19 bp, Mus musculus
  siRNA target sequence for Eif3s7 (NM_018749.1,1348-1366).
gctgtcatcgccactgaat

SEQ ID NO: 476643 - DNA, 19 bp, Mus musculus
  siRNA target sequence for Eif3s7 (NM_018749.1,1432-1450).
ctgaagctcgggtatgtgt

SEQ ID NO: 476644 - DNA, 19 bp, Mus musculus
  siRNA target sequence for Eif3s7 (NM_018749.1,1451-1469).
cccggtaccacgtaaagga

SEQ ID NO: 476645 - DNA, 19 bp, Mus musculus
  siRNA target sequence for Eif3s7 (NM_018749.1,1501-1519).
cagtttaagcccaatgagt

SEQ ID NO: 476646 - DNA, 19 bp, Mus musculus
  siRNA target sequence for Eif3s7 (NM_018749.1,1503-1521).
gtttaagcccaatgagttt

SEQ ID NO: 476647 - DNA, 19 bp, Mus musculus
  siRNA target sequence for Eif3s9 (NM_133916.1,484-502).
gcgaccccgaggatttcgt

SEQ ID NO: 476648 - DNA, 19 bp, Mus musculus
  siRNA target sequence for Eif3s9 (NM_133916.1,485-503).
cgaccccgaggatttcgta

SEQ ID NO: 476649 - DNA, 19 bp, Mus musculus
  siRNA target sequence for Eif3s9 (NM_133916.1,509-527).
cgtgagcgaggaagaacta

SEQ ID NO: 476650 - DNA, 19 bp, Mus musculus
  siRNA target sequence for Eif3s9 (NM_133916.1,558-576).
gaagcggacgggattgact

SEQ ID NO: 476651 - DNA, 19 bp, Mus musculus
  siRNA target sequence for Eif3s9 (NM_133916.1,577-595).
cggtgattgttgtagacaa

SEQ ID NO: 476652 - DNA, 19 bp, Mus musculus
  siRNA target sequence for Eif3s9 (NM_133916.1,611-629).
gccagaccgacttgagaaa

SEQ ID NO: 476653 - DNA, 19 bp, Mus musculus
  siRNA target sequence for Eif3s9 (NM_133916.1,613-631).
cagaccgacttgagaaact

SEQ ID NO: 476654 - DNA, 19 bp, Mus musculus
  siRNA target sequence for Eif3s9 (NM_133916.1,617-635).
ccgacttgagaaactcaaa

SEQ ID NO: 476655 - DNA, 19 bp, Mus musculus
  siRNA target sequence for Eif3s9 (NM_133916.1,618-636).
cgacttgagaaactcaaaa

SEQ ID NO: 476656 - DNA, 19 bp, Mus musculus
  siRNA target sequence for Eif3s9 (NM_133916.1,666-684).
gggaaaatcataaatgact

SEQ ID NO: 476657 - DNA, 19 bp, Mus musculus
  siRNA target sequence for Eif3s9 (NM_133916.1,707-725).
gacgaaagggtacatcttt

SEQ ID NO: 476658 - DNA, 19 bp, Mus musculus
  siRNA target sequence for Eif3s9 (NM_133916.1,709-727).
cgaaagggtacatctttct

SEQ ID NO: 476659 - DNA, 19 bp, Mus musculus
  siRNA target sequence for Eif3s9 (NM_133916.1,933-951).
gatcagtacagtgtgattt

SEQ ID NO: 476660 - DNA, 19 bp, Mus musculus
  siRNA target sequence for Eif3s9 (NM_133916.1,963-981).
gaccggacgtccatcttct

SEQ ID NO: 476661 - DNA, 19 bp, Mus musculus
  siRNA target sequence for Eif3s9 (NM_133916.1,1161-1179).
gacttctctccgtgtgaaa

SEQ ID NO: 476662 - DNA, 19 bp, Mus musculus
  siRNA target sequence for Eif3s9 (NM_133916.1,1163-1181).
cttctctccgtgtgaaaga

SEQ ID NO: 476663 - DNA, 19 bp, Mus musculus
  siRNA target sequence for Eif3s9 (NM_133916.1,1168-1186).
ctccgtgtgaaagatactt

SEQ ID NO: 476664 - DNA, 19 bp, Mus musculus
  siRNA target sequence for Eif3s9 (NM_133916.1,1251-1269).
ctcacgggccataagaaga

SEQ ID NO: 476665 - DNA, 19 bp, Mus musculus
  siRNA target sequence for Eif3s9 (NM_133916.1,1259-1277).
ccataagaagagaggtttt

SEQ ID NO: 476666 - DNA, 19 bp, Mus musculus
  siRNA target sequence for Eif3s9 (NM_133916.1,1342-1360).
gaatgaccctggatactct

SEQ ID NO: 476667 - DNA, 19 bp, Mus musculus
  siRNA target sequence for Eif3s9 (NM_133916.1,1352-1370).
ggatactcttagcatctat

SEQ ID NO: 476668 - DNA, 19 bp, Mus musculus
  siRNA target sequence for Eif3s9 (NM_133916.1,1412-1430).
gatctctggaattaaagat

SEQ ID NO: 476669 - DNA, 19 bp, Mus musculus
  siRNA target sequence for Eif3s9 (NM_133916.1,1438-1456).
ggtctccgggtggtaacat

SEQ ID NO: 476670 - DNA, 19 bp, Mus musculus
  siRNA target sequence for Eif3s9 (NM_133916.1,1441-1459).
ctccgggtggtaacatcat

SEQ ID NO: 476671 - DNA, 19 bp, Mus musculus
  siRNA target sequence for Eif3s9 (NM_133916.1,1472-1490).
gcctgaagacaaagatatt

SEQ ID NO: 476672 - DNA, 19 bp, Mus musculus
  siRNA target sequence for Eif3s9 (NM_133916.1,1530-1548).
gagatccgagtgaggaatt

SEQ ID NO: 476673 - DNA, 19 bp, Mus musculus
  siRNA target sequence for Eif3s9 (NM_133916.1,1536-1554).
cgagtgaggaatttgttca

SEQ ID NO: 476674 - DNA, 19 bp, Mus musculus
  siRNA target sequence for Eif3s9 (NM_133916.1,1579-1597).
ggcagaaaaatggagatta

SEQ ID NO: 476675 - DNA, 19 bp, Mus musculus
  siRNA target sequence for Eif3s9 (NM_133916.1,1635-1653).
cagggagttgtcacaaatt

SEQ ID NO: 476676 - DNA, 19 bp, Mus musculus
  siRNA target sequence for Eif3s9 (NM_133916.1,1637-1655).
gggagttgtcacaaatttt

SEQ ID NO: 476677 - DNA, 19 bp, Mus musculus
  siRNA target sequence for Eif3s9 (NM_133916.1,1639-1657).
gagttgtcacaaattttga

SEQ ID NO: 476678 - DNA, 19 bp, Mus musculus
  siRNA target sequence for Eif3s9 (NM_133916.1,1644-1662).
gtcacaaattttgaaatat

SEQ ID NO: 476679 - DNA, 19 bp, Mus musculus
  siRNA target sequence for Eif3s9 (NM_133916.1,1682-1700).
ggtacctgttgatgttgtt

SEQ ID NO: 476680 - DNA, 19 bp, Mus musculus
  siRNA target sequence for Eif3s9 (NM_133916.1,1687-1705).
ctgttgatgttgttgagat

SEQ ID NO: 476681 - DNA, 19 bp, Mus musculus
  siRNA target sequence for Eif3s9 (NM_133916.1,1734-1752).
gaacccaatggcagtaagt

SEQ ID NO: 476682 - DNA, 19 bp, Mus musculus
  siRNA target sequence for Eif3s9 (NM_133916.1,1808-1826).
gagcaacgggaagattgaa

SEQ ID NO: 476683 - DNA, 19 bp, Mus musculus
  siRNA target sequence for Eif3s9 (NM_133916.1,1810-1828).
gcaacgggaagattgaact

SEQ ID NO: 476684 - DNA, 19 bp, Mus musculus
  siRNA target sequence for Eif3s9 (NM_133916.1,1816-1834).
ggaagattgaactcatcaa

SEQ ID NO: 476685 - DNA, 19 bp, Mus musculus
  siRNA target sequence for Eif3s9 (NM_133916.1,1947-1965).
gactgcaccgtcatgaaca

SEQ ID NO: 476686 - DNA, 19 bp, Mus musculus
  siRNA target sequence for Eif3s9 (NM_133916.1,1949-1967).
ctgcaccgtcatgaacatt

SEQ ID NO: 476687 - DNA, 19 bp, Mus musculus
  siRNA target sequence for Eif3s9 (NM_133916.1,2046-2064).
cacaaggtggacaatgctt

SEQ ID NO: 476688 - DNA, 19 bp, Mus musculus
  siRNA target sequence for Eif3s9 (NM_133916.1,2086-2104).
gtcgccttctgcagaagaa

SEQ ID NO: 476689 - DNA, 19 bp, Mus musculus
  siRNA target sequence for Eif4ebp1 (NM_007918.2,197-215).
ctcacctgtggccaaaaca

SEQ ID NO: 476690 - DNA, 19 bp, Mus musculus
  siRNA target sequence for Eif4ebp1 (NM_007918.2,300-318).
cccagcagcccggaagata

SEQ ID NO: 476691 - DNA, 19 bp, Mus musculus
  siRNA target sequence for Eif4ebp1 (NM_007918.2,327-345).
ggcggtgaagagtcacaat

SEQ ID NO: 476692 - DNA, 19 bp, Mus musculus
  siRNA target sequence for Eif4ebp1 (NM_007918.2,328-346).
gcggtgaagagtcacaatt

SEQ ID NO: 476693 - DNA, 19 bp, Mus musculus
  siRNA target sequence for Eif4ebp1 (NM_007918.2,329-347).
cggtgaagagtcacaattt

SEQ ID NO: 476694 - DNA, 19 bp, Mus musculus
  siRNA target sequence for Eif4ebp1 (NM_007918.2,333-351).
gaagagtcacaatttgaga

SEQ ID NO: 476695 - DNA, 19 bp, Mus musculus
  siRNA target sequence for Eif4ebp2 (NM_010124.1,260-278).
cgggaggaacacgaatcat

SEQ ID NO: 476696 - DNA, 19 bp, Mus musculus
  siRNA target sequence for Eif4ebp2 (NM_010124.1,261-279).
gggaggaacacgaatcatt

SEQ ID NO: 476697 - DNA, 19 bp, Mus musculus
  siRNA target sequence for Eif4ebp2 (NM_010124.1,262-280).
ggaggaacacgaatcattt

SEQ ID NO: 476698 - DNA, 19 bp, Mus musculus
  siRNA target sequence for Eif4ebp2 (NM_010124.1,263-281).
gaggaacacgaatcattta

SEQ ID NO: 476699 - DNA, 19 bp, Mus musculus
  siRNA target sequence for Eif4ebp2 (NM_010124.1,276-294).
catttatgaccgaaagttt

SEQ ID NO: 476700 - DNA, 19 bp, Mus musculus
  siRNA target sequence for Eif4ebp2 (NM_010124.1,297-315).
gttggaccgtcgcaattct

SEQ ID NO: 476701 - DNA, 19 bp, Mus musculus
  siRNA target sequence for Eif4ebp2 (NM_010124.1,335-353).
cttgccatctgcccaatat

SEQ ID NO: 476702 - DNA, 19 bp, Mus musculus
  siRNA target sequence for Eif4ebp2 (NM_010124.1,366-384).
cagtcctggcgccttaatt

SEQ ID NO: 476703 - DNA, 19 bp, Mus musculus
  siRNA target sequence for Eif4ebp2 (NM_010124.1,368-386).
gtcctggcgccttaattga

SEQ ID NO: 476704 - DNA, 19 bp, Mus musculus
  siRNA target sequence for Eif4ebp2 (NM_010124.1,371-389).
ctggcgccttaattgaaga

SEQ ID NO: 476705 - DNA, 19 bp, Mus musculus
  siRNA target sequence for Eif4ebp2 (NM_010124.1,392-410).
ccaaagtagaagtgaacaa

SEQ ID NO: 476706 - DNA, 19 bp, Mus musculus
  siRNA target sequence for Eif4ebp2 (NM_010124.1,400-418).
gaagtgaacaacttaaaca

SEQ ID NO: 476707 - DNA, 19 bp, Mus musculus
  siRNA target sequence for Eif4enif1 (NM_023743.1,138-156).
ccccccatcgctatacgaa

SEQ ID NO: 476708 - DNA, 19 bp, Mus musculus
  siRNA target sequence for Eif4enif1 (NM_023743.1,139-157).
cccccatcgctatacgaaa

SEQ ID NO: 476709 - DNA, 19 bp, Mus musculus
  siRNA target sequence for Eif4enif1 (NM_023743.1,207-225).
catgcctctctgaaaaata

SEQ ID NO: 476710 - DNA, 19 bp, Mus musculus
  siRNA target sequence for Eif4enif1 (NM_023743.1,363-381).
cacgagagcgagtgaaaga

SEQ ID NO: 476711 - DNA, 19 bp, Mus musculus
  siRNA target sequence for Eif4enif1 (NM_023743.1,406-424).
cccacagagacgaagcttt

SEQ ID NO: 476712 - DNA, 19 bp, Mus musculus
  siRNA target sequence for Eif4enif1 (NM_023743.1,471-489).
gcagtccattggagaaaga

SEQ ID NO: 476713 - DNA, 19 bp, Mus musculus
  siRNA target sequence for Eif4enif1 (NM_023743.1,508-526).
gcttggtggacgaagaatt

SEQ ID NO: 476714 - DNA, 19 bp, Mus musculus
  siRNA target sequence for Eif4enif1 (NM_023743.1,527-545).
ggcagtggaaggataattt

SEQ ID NO: 476715 - DNA, 19 bp, Mus musculus
  siRNA target sequence for Eif4enif1 (NM_023743.1,566-584).
gatcaccgtctcagtgata

SEQ ID NO: 476716 - DNA, 19 bp, Mus musculus
  siRNA target sequence for Eif4enif1 (NM_023743.1,673-691).
ctttggtgagcgtagaaga

SEQ ID NO: 476717 - DNA, 19 bp, Mus musculus
  siRNA target sequence for Eif4enif1 (NM_023743.1,683-701).
cgtagaagaaacgattcat

SEQ ID NO: 476718 - DNA, 19 bp, Mus musculus
  siRNA target sequence for Eif4enif1 (NM_023743.1,958-976).
gcagtccccaggagaattt

SEQ ID NO: 476719 - DNA, 19 bp, Mus musculus
  siRNA target sequence for Eif4enif1 (NM_023743.1,965-983).
ccaggagaatttgacttta

SEQ ID NO: 476720 - DNA, 19 bp, Mus musculus
  siRNA target sequence for Eif4enif1 (NM_023743.1,1014-1032).
gcttggcttcgatgataga

SEQ ID NO: 476721 - DNA, 19 bp, Mus musculus
  siRNA target sequence for Eif4enif1 (NM_023743.1,1015-1033).
cttggcttcgatgatagaa

SEQ ID NO: 476722 - DNA, 19 bp, Mus musculus
  siRNA target sequence for Eif4enif1 (NM_023743.1,1018-1036).
ggcttcgatgatagaagat

SEQ ID NO: 476723 - DNA, 19 bp, Mus musculus
  siRNA target sequence for Eif4enif1 (NM_023743.1,1020-1038).
cttcgatgatagaagatgt

SEQ ID NO: 476724 - DNA, 19 bp, Mus musculus
  siRNA target sequence for Eif4enif1 (NM_023743.1,1023-1041).
cgatgatagaagatgttct

SEQ ID NO: 476725 - DNA, 19 bp, Mus musculus
  siRNA target sequence for Eif4enif1 (NM_023743.1,1125-1143).
gatccacaccccatgaaga

SEQ ID NO: 476726 - DNA, 19 bp, Mus musculus
  siRNA target sequence for Eif4enif1 (NM_023743.1,1188-1206).
gacagaactcggggaatta

SEQ ID NO: 476727 - DNA, 19 bp, Mus musculus
  siRNA target sequence for Eif4enif1 (NM_023743.1,1192-1210).
gaactcggggaattatttt

SEQ ID NO: 476728 - DNA, 19 bp, Mus musculus
  siRNA target sequence for Eif4enif1 (NM_023743.1,1226-1244).
gaagaccatgctgaaaata

SEQ ID NO: 476729 - DNA, 19 bp, Mus musculus
  siRNA target sequence for Eif4enif1 (NM_023743.1,1305-1323).
gcctttctgcaaataaaga

SEQ ID NO: 476730 - DNA, 19 bp, Mus musculus
  siRNA target sequence for Eif4enif1 (NM_023743.1,1347-1365).
caggggttgtactttcagt

SEQ ID NO: 476731 - DNA, 19 bp, Mus musculus
  siRNA target sequence for Eif4enif1 (NM_023743.1,1427-1445).
cccttcatggcagaacatt

SEQ ID NO: 476732 - DNA, 19 bp, Mus musculus
  siRNA target sequence for Eif4enif1 (NM_023743.1,1428-1446).
ccttcatggcagaacattt

SEQ ID NO: 476733 - DNA, 19 bp, Mus musculus
  siRNA target sequence for Eif4enif1 (NM_023743.1,1464-1482).
ctgcgagtagcaatagaca

SEQ ID NO: 476734 - DNA, 19 bp, Mus musculus
  siRNA target sequence for Eif4enif1 (NM_023743.1,1473-1491).
gcaatagacagctcaagaa

SEQ ID NO: 476735 - DNA, 19 bp, Mus musculus
  siRNA target sequence for Eif4enif1 (NM_023743.1,1497-1515).
gagatatgactgcattcaa

SEQ ID NO: 476736 - DNA, 19 bp, Mus musculus
  siRNA target sequence for Eif4enif1 (NM_023743.1,1564-1582).
caaagtcagtcgaaacgtt

SEQ ID NO: 476737 - DNA, 19 bp, Mus musculus
  siRNA target sequence for Eif4enif1 (NM_023743.1,1568-1586).
gtcagtcgaaacgttgaaa

SEQ ID NO: 476738 - DNA, 19 bp, Mus musculus
  siRNA target sequence for Eif4enif1 (NM_023743.1,1570-1588).
cagtcgaaacgttgaaagt

SEQ ID NO: 476739 - DNA, 19 bp, Mus musculus
  siRNA target sequence for Eif4enif1 (NM_023743.1,1674-1692).
ccgcttcttccaatcttct

SEQ ID NO: 476740 - DNA, 19 bp, Mus musculus
  siRNA target sequence for Eif4enif1 (NM_023743.1,1813-1831).
gataccatcaccaataggt

SEQ ID NO: 476741 - DNA, 19 bp, Mus musculus
  siRNA target sequence for Eif4enif1 (NM_023743.1,1907-1925).
cagatgagccagctagaat

SEQ ID NO: 476742 - DNA, 19 bp, Mus musculus
  siRNA target sequence for Eif4enif1 (NM_023743.1,1987-2005).
cttctaccagcctggtttt

SEQ ID NO: 476743 - DNA, 19 bp, Mus musculus
  siRNA target sequence for Eif4enif1 (NM_023743.1,2047-2065).
caggcaacagcgaatgtca

SEQ ID NO: 476744 - DNA, 19 bp, Mus musculus
  siRNA target sequence for Eif4enif1 (NM_023743.1,2051-2069).
caacagcgaatgtcaaagt

SEQ ID NO: 476745 - DNA, 19 bp, Mus musculus
  siRNA target sequence for Eif4enif1 (NM_023743.1,2269-2287).
gaacctgctgtcatccaat

SEQ ID NO: 476746 - DNA, 19 bp, Mus musculus
  siRNA target sequence for Eif4enif1 (NM_023743.1,2284-2302).
caatcccatacccaatact

SEQ ID NO: 476747 - DNA, 19 bp, Mus musculus
  siRNA target sequence for Eif4enif1 (NM_023743.1,2313-2331).
cttctacgacaaatcctaa

SEQ ID NO: 476748 - DNA, 19 bp, Mus musculus
  siRNA target sequence for Eif4enif1 (NM_023743.1,2626-2644).
gatagacatggctccttta

SEQ ID NO: 476749 - DNA, 19 bp, Mus musculus
  siRNA target sequence for Eif4enif1 (NM_023743.1,2700-2718).
ctagtcaccctctcctaaa

SEQ ID NO: 476750 - DNA, 19 bp, Mus musculus
  siRNA target sequence for Eif4enif1 (NM_023743.1,2915-2933).
gtgggccttgccaaatggt

SEQ ID NO: 476751 - DNA, 19 bp, Mus musculus
  siRNA target sequence for Eif4enif1 (NM_023743.1,2977-2995).
caaagtcatcagtgtagat

SEQ ID NO: 476752 - DNA, 19 bp, Mus musculus
  siRNA target sequence for Eif4enif1 (NM_023743.1,2988-3006).
gtgtagatgaactggaata

SEQ ID NO: 476753 - DNA, 19 bp, Mus musculus
  siRNA target sequence for Eif4enif1 (NM_023743.1,2990-3008).
gtagatgaactggaatata

SEQ ID NO: 476754 - DNA, 19 bp, Mus musculus
  siRNA target sequence for Eif5 (NM_173363.2,23-41).
gcgtgtcagaccagttcta

SEQ ID NO: 476755 - DNA, 19 bp, Mus musculus
  siRNA target sequence for Eif5 (NM_173363.2,24-42).
cgtgtcagaccagttctat

SEQ ID NO: 476756 - DNA, 19 bp, Mus musculus
  siRNA target sequence for Eif5 (NM_173363.2,92-110).
gaatcaagacagttatagt

SEQ ID NO: 476757 - DNA, 19 bp, Mus musculus
  siRNA target sequence for Eif5 (NM_173363.2,123-141).
cgttgcaaaggcgcttaat

SEQ ID NO: 476758 - DNA, 19 bp, Mus musculus
  siRNA target sequence for Eif5 (NM_173363.2,148-166).
ccaacgtatcccaccaaat

SEQ ID NO: 476759 - DNA, 19 bp, Mus musculus
  siRNA target sequence for Eif5 (NM_173363.2,149-167).
caacgtatcccaccaaata

SEQ ID NO: 476760 - DNA, 19 bp, Mus musculus
  siRNA target sequence for Eif5 (NM_173363.2,152-170).
cgtatcccaccaaatattt

SEQ ID NO: 476761 - DNA, 19 bp, Mus musculus
  siRNA target sequence for Eif5 (NM_173363.2,185-203).
gagcacagacccagtttga

SEQ ID NO: 476762 - DNA, 19 bp, Mus musculus
  siRNA target sequence for Eif5 (NM_173363.2,190-208).
cagacccagtttgatgtta

SEQ ID NO: 476763 - DNA, 19 bp, Mus musculus
  siRNA target sequence for Eif5 (NM_173363.2,233-251).
gatctcatgaggcgaataa

SEQ ID NO: 476764 - DNA, 19 bp, Mus musculus
  siRNA target sequence for Eif5 (NM_173363.2,236-254).
ctcatgaggcgaataagct

SEQ ID NO: 476765 - DNA, 19 bp, Mus musculus
  siRNA target sequence for Eif5 (NM_173363.2,245-263).
cgaataagctgcaagacat

SEQ ID NO: 476766 - DNA, 19 bp, Mus musculus
  siRNA target sequence for Eif5 (NM_173363.2,264-282).
gttggatggattcattaaa

SEQ ID NO: 476767 - DNA, 19 bp, Mus musculus
  siRNA target sequence for Eif5 (NM_173363.2,439-457).
gagaatagtgacattggta

SEQ ID NO: 476768 - DNA, 19 bp, Mus musculus
  siRNA target sequence for Eif5 (NM_173363.2,505-523).
gaaaatggctctgtatcta

SEQ ID NO: 476769 - DNA, 19 bp, Mus musculus
  siRNA target sequence for Eif5 (NM_173363.2,632-650).
ggcgcagaatggatgaaat

SEQ ID NO: 476770 - DNA, 19 bp, Mus musculus
  siRNA target sequence for Eif5 (NM_173363.2,636-654).
cagaatggatgaaatcagt

SEQ ID NO: 476771 - DNA, 19 bp, Mus musculus
  siRNA target sequence for Eif5 (NM_173363.2,661-679).
gcaaaaggtctgacactta

SEQ ID NO: 476772 - DNA, 19 bp, Mus musculus
  siRNA target sequence for Eif5 (NM_173363.2,670-688).
ctgacacttagtgatgatt

SEQ ID NO: 476773 - DNA, 19 bp, Mus musculus
  siRNA target sequence for Eif5 (NM_173363.2,698-716).
ctgtagaagagcgtgttaa

SEQ ID NO: 476774 - DNA, 19 bp, Mus musculus
  siRNA target sequence for Eif5 (NM_173363.2,710-728).
gtgttaacatcctgtttga

SEQ ID NO: 476775 - DNA, 19 bp, Mus musculus
  siRNA target sequence for Eif5 (NM_173363.2,712-730).
gttaacatcctgtttgatt

SEQ ID NO: 476776 - DNA, 19 bp, Mus musculus
  siRNA target sequence for Eif5 (NM_173363.2,1198-1216).
gaggtcgtatattcgaaaa

SEQ ID NO: 476777 - DNA, 19 bp, Mus musculus
  siRNA target sequence for Eif5 (NM_173363.2,1200-1218).
ggtcgtatattcgaaaact

SEQ ID NO: 476778 - DNA, 19 bp, Mus musculus
  siRNA target sequence for Eif5a2 (NM_177586.4,143-161).
gcagacgaaattgatttca

SEQ ID NO: 476779 - DNA, 19 bp, Mus musculus
  siRNA target sequence for Eif5a2 (NM_177586.4,179-197).
gcttccagcacttatccta

SEQ ID NO: 476780 - DNA, 19 bp, Mus musculus
  siRNA target sequence for Eif5a2 (NM_177586.4,180-198).
cttccagcacttatcctat

SEQ ID NO: 476781 - DNA, 19 bp, Mus musculus
  siRNA target sequence for Eif5a2 (NM_177586.4,238-256).
caaagggcgaccatgcaaa

SEQ ID NO: 476782 - DNA, 19 bp, Mus musculus
  siRNA target sequence for Eif5a2 (NM_177586.4,243-261).
ggcgaccatgcaaaatcgt

SEQ ID NO: 476783 - DNA, 19 bp, Mus musculus
  siRNA target sequence for Eif5a2 (NM_177586.4,304-322).
ggtacaccttgttggaatt

SEQ ID NO: 476784 - DNA, 19 bp, Mus musculus
  siRNA target sequence for Eif5a2 (NM_177586.4,308-326).
caccttgttggaattgaca

SEQ ID NO: 476785 - DNA, 19 bp, Mus musculus
  siRNA target sequence for Eif5a2 (NM_177586.4,373-391).
catggatgttccaaatatt

SEQ ID NO: 476786 - DNA, 19 bp, Mus musculus
  siRNA target sequence for Eif5a2 (NM_177586.4,418-436).
cattcaggatggttacctt

SEQ ID NO: 476787 - DNA, 19 bp, Mus musculus
  siRNA target sequence for Eif5a2 (NM_177586.4,456-474).
gcgaagtccgtgaagatct

SEQ ID NO: 476788 - DNA, 19 bp, Mus musculus
  siRNA target sequence for Eif5a2 (NM_177586.4,457-475).
cgaagtccgtgaagatctt

SEQ ID NO: 476789 - DNA, 19 bp, Mus musculus
  siRNA target sequence for Eif5a2 (NM_177586.4,458-476).
gaagtccgtgaagatctta

SEQ ID NO: 476790 - DNA, 19 bp, Mus musculus
  siRNA target sequence for Eif5a2 (NM_177586.4,581-599).
gccataaagccctgcaaat

SEQ ID NO: 476791 - DNA, 19 bp, Mus musculus
  siRNA target sequence for Itgb4bp (NM_010579.1,503-521).
gagcgtcgttcgagaacaa

SEQ ID NO: 476792 - DNA, 19 bp, Mus musculus
  siRNA target sequence for Itgb4bp (NM_010579.1,505-523).
gcgtcgttcgagaacaact

SEQ ID NO: 476793 - DNA, 19 bp, Mus musculus
  siRNA target sequence for Itgb4bp (NM_010579.1,941-959).
gctactgtgtcttcagtaa

SEQ ID NO: 476794 - DNA, 19 bp, Mus musculus
  siRNA target sequence for Itgb4bp (NM_010579.1,942-960).
ctactgtgtcttcagtaat

SEQ ID NO: 476795 - DNA, 19 bp, Mus musculus
  siRNA target sequence for Itgb4bp (NM_010579.1,969-987).
gctggtgcaccctaaaact

SEQ ID NO: 476796 - DNA, 19 bp, Mus musculus
  siRNA target sequence for Itgb4bp (NM_010579.1,970-988).
ctggtgcaccctaaaactt

SEQ ID NO: 476797 - DNA, 19 bp, Mus musculus
  siRNA target sequence for Itgb4bp (NM_010579.1,972-990).
ggtgcaccctaaaacttct

SEQ ID NO: 476798 - DNA, 19 bp, Mus musculus
  siRNA target sequence for Itgb4bp (NM_010579.1,973-991).
gtgcaccctaaaacttcta

SEQ ID NO: 476799 - DNA, 19 bp, Mus musculus
  siRNA target sequence for Itgb4bp (NM_010579.1,1092-1110).
cgattggtgtgctttctgt

SEQ ID NO: 476800 - DNA, 19 bp, Mus musculus
  siRNA target sequence for Itgb4bp (NM_010579.1,1151-1169).
gcgtcttcaagctgaatga

SEQ ID NO: 476801 - DNA, 19 bp, Mus musculus
  siRNA target sequence for Mrpl49 (NM_026246.1,136-154).
gtctgtggatgaataccaa

SEQ ID NO: 476802 - DNA, 19 bp, Mus musculus
  siRNA target sequence for Mrpl49 (NM_026246.1,195-213).
caccaaaacataaacatta

SEQ ID NO: 476803 - DNA, 19 bp, Mus musculus
  siRNA target sequence for Mrpl49 (NM_026246.1,256-274).
cagcttgccctactttgtt

SEQ ID NO: 476804 - DNA, 19 bp, Mus musculus
  siRNA target sequence for Mrpl49 (NM_026246.1,279-297).
gctctcggatgcacaatat

SEQ ID NO: 476805 - DNA, 19 bp, Mus musculus
  siRNA target sequence for Mrpl49 (NM_026246.1,280-298).
ctctcggatgcacaatatt

SEQ ID NO: 476806 - DNA, 19 bp, Mus musculus
  siRNA target sequence for Mrpl49 (NM_026246.1,423-441).
ctatcacccaggttaatga

SEQ ID NO: 476807 - DNA, 19 bp, Mus musculus
  siRNA target sequence for Mtif2 (NM_133767.1,60-78).
cttgctacgatttcatact

SEQ ID NO: 476808 - DNA, 19 bp, Mus musculus
  siRNA target sequence for Mtif2 (NM_133767.1,63-81).
gctacgatttcatactatt

SEQ ID NO: 476809 - DNA, 19 bp, Mus musculus
  siRNA target sequence for Mtif2 (NM_133767.1,90-108).
ggtgcacagcccaagtcaa

SEQ ID NO: 476810 - DNA, 19 bp, Mus musculus
  siRNA target sequence for Mtif2 (NM_133767.1,106-124).
caaagaagactcttagcat

SEQ ID NO: 476811 - DNA, 19 bp, Mus musculus
  siRNA target sequence for Mtif2 (NM_133767.1,117-135).
cttagcatggtgtagacat

SEQ ID NO: 476812 - DNA, 19 bp, Mus musculus
  siRNA target sequence for Mtif2 (NM_133767.1,204-222).
cattggttcagctttgcat

SEQ ID NO: 476813 - DNA, 19 bp, Mus musculus
  siRNA target sequence for Mtif2 (NM_133767.1,317-335).
gaatgactgttgaagatct

SEQ ID NO: 476814 - DNA, 19 bp, Mus musculus
  siRNA target sequence for Mtif2 (NM_133767.1,341-359).
gtgccatggcaaaagatat

SEQ ID NO: 476815 - DNA, 19 bp, Mus musculus
  siRNA target sequence for Mtif2 (NM_133767.1,348-366).
ggcaaaagatatagattgt

SEQ ID NO: 476816 - DNA, 19 bp, Mus musculus
  siRNA target sequence for Mtif2 (NM_133767.1,365-383).
gtgtatacgaagctttatt

SEQ ID NO: 476817 - DNA, 19 bp, Mus musculus
  siRNA target sequence for Mtif2 (NM_133767.1,391-409).
gccattgacgtagattcat

SEQ ID NO: 476818 - DNA, 19 bp, Mus musculus
  siRNA target sequence for Mtif2 (NM_133767.1,392-410).
ccattgacgtagattcatt

SEQ ID NO: 476819 - DNA, 19 bp, Mus musculus
  siRNA target sequence for Mtif2 (NM_133767.1,393-411).
cattgacgtagattcatta

SEQ ID NO: 476820 - DNA, 19 bp, Mus musculus
  siRNA target sequence for Mtif2 (NM_133767.1,416-434).
caaactcacatttagatga

SEQ ID NO: 476821 - DNA, 19 bp, Mus musculus
  siRNA target sequence for Mtif2 (NM_133767.1,440-458).
ggatcaaagaagttataaa

SEQ ID NO: 476822 - DNA, 19 bp, Mus musculus
  siRNA target sequence for Mtif2 (NM_133767.1,475-493).
ctgaaatggagcaaattaa

SEQ ID NO: 476823 - DNA, 19 bp, Mus musculus
  siRNA target sequence for Mtif2 (NM_133767.1,539-557).
ggacagatccagctttatt

SEQ ID NO: 476824 - DNA, 19 bp, Mus musculus
  siRNA target sequence for Mtif2 (NM_133767.1,567-585).
gtccccagttgttactgta

SEQ ID NO: 476825 - DNA, 19 bp, Mus musculus
  siRNA target sequence for Mtif2 (NM_133767.1,581-599).
ctgtaatgggccatgttga

SEQ ID NO: 476826 - DNA, 19 bp, Mus musculus
  siRNA target sequence for Mtif2 (NM_133767.1,595-613).
gttgatcatgggaaaacga

SEQ ID NO: 476827 - DNA, 19 bp, Mus musculus
  siRNA target sequence for Mtif2 (NM_133767.1,605-623).
ggaaaacgaccttacttga

SEQ ID NO: 476828 - DNA, 19 bp, Mus musculus
  siRNA target sequence for Mtif2 (NM_133767.1,611-629).
cgaccttacttgacaaact

SEQ ID NO: 476829 - DNA, 19 bp, Mus musculus
  siRNA target sequence for Mtif2 (NM_133767.1,612-630).
gaccttacttgacaaactt

SEQ ID NO: 476830 - DNA, 19 bp, Mus musculus
  siRNA target sequence for Mtif2 (NM_133767.1,801-819).
ggttgtagctgcagatgat

SEQ ID NO: 476831 - DNA, 19 bp, Mus musculus
  siRNA target sequence for Mtif2 (NM_133767.1,811-829).
gcagatgatggggtaatga

SEQ ID NO: 476832 - DNA, 19 bp, Mus musculus
  siRNA target sequence for Mtif2 (NM_133767.1,875-893).
ctattatccttgcaatcaa

SEQ ID NO: 476833 - DNA, 19 bp, Mus musculus
  siRNA target sequence for Mtif2 (NM_133767.1,916-934).
gatcctgaaaaggtgaaaa

SEQ ID NO: 476834 - DNA, 19 bp, Mus musculus
  siRNA target sequence for Mtif2 (NM_133767.1,969-987).
gtatggtggtgatgttcaa

SEQ ID NO: 476835 - DNA, 19 bp, Mus musculus
  siRNA target sequence for Mtif2 (NM_133767.1,1004-1022).
cacttacgggcgataacct

SEQ ID NO: 476836 - DNA, 19 bp, Mus musculus
  siRNA target sequence for Mtif2 (NM_133767.1,1129-1147).
ggaagaggtcctgttacaa

SEQ ID NO: 476837 - DNA, 19 bp, Mus musculus
  siRNA target sequence for Mtif2 (NM_133767.1,1189-1207).
ctagttgctgggaagagtt

SEQ ID NO: 476838 - DNA, 19 bp, Mus musculus
  siRNA target sequence for Mtif2 (NM_133767.1,1208-1226).
gggcaaaagttcgactaat

SEQ ID NO: 476839 - DNA, 19 bp, Mus musculus
  siRNA target sequence for Mtif2 (NM_133767.1,1209-1227).
ggcaaaagttcgactaata

SEQ ID NO: 476840 - DNA, 19 bp, Mus musculus
  siRNA target sequence for Mtif2 (NM_133767.1,1210-1228).
gcaaaagttcgactaatat

SEQ ID NO: 476841 - DNA, 19 bp, Mus musculus
  siRNA target sequence for Mtif2 (NM_133767.1,1211-1229).
caaaagttcgactaatatt

SEQ ID NO: 476842 - DNA, 19 bp, Mus musculus
  siRNA target sequence for Mtif2 (NM_133767.1,1268-1286).
gcatgccagtgggaatcat

SEQ ID NO: 476843 - DNA, 19 bp, Mus musculus
  siRNA target sequence for Mtif2 (NM_133767.1,1269-1287).
catgccagtgggaatcata

SEQ ID NO: 476844 - DNA, 19 bp, Mus musculus
  siRNA target sequence for Mtif2 (NM_133767.1,1455-1473).
gaaagcccgtgagaagtat

SEQ ID NO: 476845 - DNA, 19 bp, Mus musculus
  siRNA target sequence for Mtif2 (NM_133767.1,1485-1503).
ctggaaagagagatcatat

SEQ ID NO: 476846 - DNA, 19 bp, Mus musculus
  siRNA target sequence for Mtif2 (NM_133767.1,1487-1505).
ggaaagagagatcatatat

SEQ ID NO: 476847 - DNA, 19 bp, Mus musculus
  siRNA target sequence for Mtif2 (NM_133767.1,1573-1591).
gtacttcctataattatta

SEQ ID NO: 476848 - DNA, 19 bp, Mus musculus
  siRNA target sequence for Mtif2 (NM_133767.1,1656-1674).
cgaatgtgaactcgaatta

SEQ ID NO: 476849 - DNA, 19 bp, Mus musculus
  siRNA target sequence for Mtif2 (NM_133767.1,1661-1679).
gtgaactcgaattagtaca

SEQ ID NO: 476850 - DNA, 19 bp, Mus musculus
  siRNA target sequence for Mtif2 (NM_133767.1,1725-1743).
gacatttgatggtgttatt

SEQ ID NO: 476851 - DNA, 19 bp, Mus musculus
  siRNA target sequence for Mtif2 (NM_133767.1,1790-1808).
cacaaaagggagttaagat

SEQ ID NO: 476852 - DNA, 19 bp, Mus musculus
  siRNA target sequence for Mtif2 (NM_133767.1,1797-1815).
gggagttaagattaaactt

SEQ ID NO: 476853 - DNA, 19 bp, Mus musculus
  siRNA target sequence for Mtif2 (NM_133767.1,1799-1817).
gagttaagattaaacttca

SEQ ID NO: 476854 - DNA, 19 bp, Mus musculus
  siRNA target sequence for Mtif2 (NM_133767.1,1824-1842).
catctaccatcttattgaa

SEQ ID NO: 476855 - DNA, 19 bp, Mus musculus
  siRNA target sequence for Mtif2 (NM_133767.1,1884-1902).
ggaggagtacccaataggt

SEQ ID NO: 476856 - DNA, 19 bp, Mus musculus
  siRNA target sequence for Mtif2 (NM_133767.1,1984-2002).
caattagaaagacataaga

SEQ ID NO: 476857 - DNA, 19 bp, Mus musculus
  siRNA target sequence for Mtif2 (NM_133767.1,2016-2034).
ccgaaacggccaagttatt

SEQ ID NO: 476858 - DNA, 19 bp, Mus musculus
  siRNA target sequence for Mtif2 (NM_133767.1,2017-2035).
cgaaacggccaagttattt

SEQ ID NO: 476859 - DNA, 19 bp, Mus musculus
  siRNA target sequence for Mtif2 (NM_133767.1,2045-2063).
cattaacctctctgaaaca

SEQ ID NO: 476860 - DNA, 19 bp, Mus musculus
  siRNA target sequence for Mtif2 (NM_133767.1,2051-2069).
cctctctgaaacaccataa

SEQ ID NO: 476861 - DNA, 19 bp, Mus musculus
  siRNA target sequence for Mtif2 (NM_133767.1,2103-2121).
ctgtggtcttagtttagat

SEQ ID NO: 476862 - DNA, 19 bp, Mus musculus
  siRNA target sequence for Mtif2 (NM_133767.1,2146-2164).
ggagatcaagtcatttgtt

SEQ ID NO: 476863 - DNA, 19 bp, Mus musculus
  siRNA target sequence for Mtif2 (NM_133767.1,2147-2165).
gagatcaagtcatttgtta

SEQ ID NO: 476864 - DNA, 19 bp, Mus musculus
  siRNA target sequence for Pkhd1 (NM_153179.2,248-266).
gctgagtatggaagtacta

SEQ ID NO: 476865 - DNA, 19 bp, Mus musculus
  siRNA target sequence for Pkhd1 (NM_153179.2,253-271).
gtatggaagtactactgtt

SEQ ID NO: 476866 - DNA, 19 bp, Mus musculus
  siRNA target sequence for Pkhd1 (NM_153179.2,258-276).
gaagtactactgttagcaa

SEQ ID NO: 476867 - DNA, 19 bp, Mus musculus
  siRNA target sequence for Pkhd1 (NM_153179.2,334-352).
ggatcacagttgtatttga

SEQ ID NO: 476868 - DNA, 19 bp, Mus musculus
  siRNA target sequence for Pkhd1 (NM_153179.2,345-363).
gtatttgacggtttggata

SEQ ID NO: 476869 - DNA, 19 bp, Mus musculus
  siRNA target sequence for Pkhd1 (NM_153179.2,351-369).
gacggtttggatagaagta

SEQ ID NO: 476870 - DNA, 19 bp, Mus musculus
  siRNA target sequence for Pkhd1 (NM_153179.2,353-371).
cggtttggatagaagtatt

SEQ ID NO: 476871 - DNA, 19 bp, Mus musculus
  siRNA target sequence for Pkhd1 (NM_153179.2,355-373).
gtttggatagaagtattct

SEQ ID NO: 476872 - DNA, 19 bp, Mus musculus
  siRNA target sequence for Pkhd1 (NM_153179.2,388-406).
gctctcagctgcagataga

SEQ ID NO: 476873 - DNA, 19 bp, Mus musculus
  siRNA target sequence for Pkhd1 (NM_153179.2,454-472).
ctccggccttcgtggattt

SEQ ID NO: 476874 - DNA, 19 bp, Mus musculus
  siRNA target sequence for Pkhd1 (NM_153179.2,588-606).
gatagctgtactttcaagt

SEQ ID NO: 476875 - DNA, 19 bp, Mus musculus
  siRNA target sequence for Pkhd1 (NM_153179.2,614-632).
ggatcagacacctgtttta

SEQ ID NO: 476876 - DNA, 19 bp, Mus musculus
  siRNA target sequence for Pkhd1 (NM_153179.2,749-767).
gatcctagaagctagagaa

SEQ ID NO: 476877 - DNA, 19 bp, Mus musculus
  siRNA target sequence for Pkhd1 (NM_153179.2,783-801).
ccctgttcccttataaaca

SEQ ID NO: 476878 - DNA, 19 bp, Mus musculus
  siRNA target sequence for Pkhd1 (NM_153179.2,861-879).
cgtgtggaaggcgattata

SEQ ID NO: 476879 - DNA, 19 bp, Mus musculus
  siRNA target sequence for Pkhd1 (NM_153179.2,866-884).
ggaaggcgattatattggt

SEQ ID NO: 476880 - DNA, 19 bp, Mus musculus
  siRNA target sequence for Pkhd1 (NM_153179.2,867-885).
gaaggcgattatattggtt

SEQ ID NO: 476881 - DNA, 19 bp, Mus musculus
  siRNA target sequence for Pkhd1 (NM_153179.2,890-908).
gaatgttagtttttcagta

SEQ ID NO: 476882 - DNA, 19 bp, Mus musculus
  siRNA target sequence for Pkhd1 (NM_153179.2,922-940).
ggtcgatggtgcataagga

SEQ ID NO: 476883 - DNA, 19 bp, Mus musculus
  siRNA target sequence for Pkhd1 (NM_153179.2,923-941).
gtcgatggtgcataaggaa

SEQ ID NO: 476884 - DNA, 19 bp, Mus musculus
  siRNA target sequence for Pkhd1 (NM_153179.2,946-964).
ggctcatcagtgctaaaca

SEQ ID NO: 476885 - DNA, 19 bp, Mus musculus
  siRNA target sequence for Pkhd1 (NM_153179.2,1095-1113).
ggcatcccatgtgatatta

SEQ ID NO: 476886 - DNA, 19 bp, Mus musculus
  siRNA target sequence for Pkhd1 (NM_153179.2,1097-1115).
catcccatgtgatattaga

SEQ ID NO: 476887 - DNA, 19 bp, Mus musculus
  siRNA target sequence for Pkhd1 (NM_153179.2,1100-1118).
cccatgtgatattagatat

SEQ ID NO: 476888 - DNA, 19 bp, Mus musculus
  siRNA target sequence for Pkhd1 (NM_153179.2,1261-1279).
ggtacaggtggcagatagt

SEQ ID NO: 476889 - DNA, 19 bp, Mus musculus
  siRNA target sequence for Pkhd1 (NM_153179.2,1262-1280).
gtacaggtggcagatagtt

SEQ ID NO: 476890 - DNA, 19 bp, Mus musculus
  siRNA target sequence for Pkhd1 (NM_153179.2,1267-1285).
ggtggcagatagttcctaa

SEQ ID NO: 476891 - DNA, 19 bp, Mus musculus
  siRNA target sequence for Pkhd1 (NM_153179.2,1356-1374).
gtggcgccacagacaaaca

SEQ ID NO: 476892 - DNA, 19 bp, Mus musculus
  siRNA target sequence for Pkhd1 (NM_153179.2,1359-1377).
gcgccacagacaaacaatt

SEQ ID NO: 476893 - DNA, 19 bp, Mus musculus
  siRNA target sequence for Pkhd1 (NM_153179.2,1360-1378).
cgccacagacaaacaatta

SEQ ID NO: 476894 - DNA, 19 bp, Mus musculus
  siRNA target sequence for Pkhd1 (NM_153179.2,1438-1456).
caaggaccaaggtagaagt

SEQ ID NO: 476895 - DNA, 19 bp, Mus musculus
  siRNA target sequence for Pkhd1 (NM_153179.2,1557-1575).
ggcggagccaagtactact

SEQ ID NO: 476896 - DNA, 19 bp, Mus musculus
  siRNA target sequence for Pkhd1 (NM_153179.2,1558-1576).
gcggagccaagtactactt

SEQ ID NO: 476897 - DNA, 19 bp, Mus musculus
  siRNA target sequence for Pkhd1 (NM_153179.2,1604-1622).
cagcagagggatgagaatt

SEQ ID NO: 476898 - DNA, 19 bp, Mus musculus
  siRNA target sequence for Pkhd1 (NM_153179.2,1634-1652).
ccacaacacctggttgaat

SEQ ID NO: 476899 - DNA, 19 bp, Mus musculus
  siRNA target sequence for Pkhd1 (NM_153179.2,1706-1724).
ccagagacttccagaaata

SEQ ID NO: 476900 - DNA, 19 bp, Mus musculus
  siRNA target sequence for Pkhd1 (NM_153179.2,1730-1748).
gttgcatgtgtcaggtaaa

SEQ ID NO: 476901 - DNA, 19 bp, Mus musculus
  siRNA target sequence for Pkhd1 (NM_153179.2,1741-1759).
caggtaaaggaaacttttt

SEQ ID NO: 476902 - DNA, 19 bp, Mus musculus
  siRNA target sequence for Pkhd1 (NM_153179.2,1817-1835).
gatccaaaccaccattgaa

SEQ ID NO: 476903 - DNA, 19 bp, Mus musculus
  siRNA target sequence for Pkhd1 (NM_153179.2,1956-1974).
cccttctgtggcagattca

SEQ ID NO: 476904 - DNA, 19 bp, Mus musculus
  siRNA target sequence for Pkhd1 (NM_153179.2,1981-1999).
gtcaacttggacatcttat

SEQ ID NO: 476905 - DNA, 19 bp, Mus musculus
  siRNA target sequence for Pkhd1 (NM_153179.2,2037-2055).
gatcgatacccgtatctgt

SEQ ID NO: 476906 - DNA, 19 bp, Mus musculus
  siRNA target sequence for Pkhd1 (NM_153179.2,2180-2198).
ctggcagttcacttgcatt

SEQ ID NO: 476907 - DNA, 19 bp, Mus musculus
  siRNA target sequence for Pkhd1 (NM_153179.2,2182-2200).
ggcagttcacttgcattaa

SEQ ID NO: 476908 - DNA, 19 bp, Mus musculus
  siRNA target sequence for Pkhd1 (NM_153179.2,2312-2330).
gctctatgtggatgaaatt

SEQ ID NO: 476909 - DNA, 19 bp, Mus musculus
  siRNA target sequence for Pkhd1 (NM_153179.2,2334-2352).
cttgcagataccaacgtaa

SEQ ID NO: 476910 - DNA, 19 bp, Mus musculus
  siRNA target sequence for Pkhd1 (NM_153179.2,2338-2356).
cagataccaacgtaacagt

SEQ ID NO: 476911 - DNA, 19 bp, Mus musculus
  siRNA target sequence for Pkhd1 (NM_153179.2,2340-2358).
gataccaacgtaacagttt

SEQ ID NO: 476912 - DNA, 19 bp, Mus musculus
  siRNA target sequence for Pkhd1 (NM_153179.2,2344-2362).
ccaacgtaacagtttctca

SEQ ID NO: 476913 - DNA, 19 bp, Mus musculus
  siRNA target sequence for Pkhd1 (NM_153179.2,2345-2363).
caacgtaacagtttctcaa

SEQ ID NO: 476914 - DNA, 19 bp, Mus musculus
  siRNA target sequence for Pkhd1 (NM_153179.2,2575-2593).
ctttgggaggacacttctt

SEQ ID NO: 476915 - DNA, 19 bp, Mus musculus
  siRNA target sequence for Pkhd1 (NM_153179.2,2641-2659).
ctgcccgacagctgcataa

SEQ ID NO: 476916 - DNA, 19 bp, Mus musculus
  siRNA target sequence for Pkhd1 (NM_153179.2,2644-2662).
cccgacagctgcataagct

SEQ ID NO: 476917 - DNA, 19 bp, Mus musculus
  siRNA target sequence for Pkhd1 (NM_153179.2,2645-2663).
ccgacagctgcataagcta

SEQ ID NO: 476918 - DNA, 19 bp, Mus musculus
  siRNA target sequence for Pkhd1 (NM_153179.2,2829-2847).
ggggtgaatcccactgtaa

SEQ ID NO: 476919 - DNA, 19 bp, Mus musculus
  siRNA target sequence for Pkhd1 (NM_153179.2,2848-2866).
ctgctcgcgtggtatatga

SEQ ID NO: 476920 - DNA, 19 bp, Mus musculus
  siRNA target sequence for Pkhd1 (NM_153179.2,2911-2929).
ctgccaaccagcaaactca

SEQ ID NO: 476921 - DNA, 19 bp, Mus musculus
  siRNA target sequence for Pkhd1 (NM_153179.2,2934-2952).
gctgtacaggtgaatgaca

SEQ ID NO: 476922 - DNA, 19 bp, Mus musculus
  siRNA target sequence for Pkhd1 (NM_153179.2,2935-2953).
ctgtacaggtgaatgacat

SEQ ID NO: 476923 - DNA, 19 bp, Mus musculus
  siRNA target sequence for Pkhd1 (NM_153179.2,2949-2967).
gacataccagcctattgtt

SEQ ID NO: 476924 - DNA, 19 bp, Mus musculus
  siRNA target sequence for Pkhd1 (NM_153179.2,2971-2989).
gctcctgttctttccaata

SEQ ID NO: 476925 - DNA, 19 bp, Mus musculus
  siRNA target sequence for Pkhd1 (NM_153179.2,3031-3049).
cccttggaagcgatgtcaa

SEQ ID NO: 476926 - DNA, 19 bp, Mus musculus
  siRNA target sequence for Pkhd1 (NM_153179.2,3045-3063).
gtcaacttgctggttcatt

SEQ ID NO: 476927 - DNA, 19 bp, Mus musculus
  siRNA target sequence for Pkhd1 (NM_153179.2,3047-3065).
caacttgctggttcatttt

SEQ ID NO: 476928 - DNA, 19 bp, Mus musculus
  siRNA target sequence for Pkhd1 (NM_153179.2,3102-3120).
caggtcacggtgaacaaaa

SEQ ID NO: 476929 - DNA, 19 bp, Mus musculus
  siRNA target sequence for Pkhd1 (NM_153179.2,3104-3122).
ggtcacggtgaacaaaact

SEQ ID NO: 476930 - DNA, 19 bp, Mus musculus
  siRNA target sequence for Pkhd1 (NM_153179.2,3121-3139).
ctagctgtgaagttctttt

SEQ ID NO: 476931 - DNA, 19 bp, Mus musculus
  siRNA target sequence for Pkhd1 (NM_153179.2,3186-3204).
ggagtgcaccagattttta

SEQ ID NO: 476932 - DNA, 19 bp, Mus musculus
  siRNA target sequence for Pkhd1 (NM_153179.2,3187-3205).
gagtgcaccagatttttat

SEQ ID NO: 476933 - DNA, 19 bp, Mus musculus
  siRNA target sequence for Pkhd1 (NM_153179.2,3313-3331).
gaggacggtgggttactct

SEQ ID NO: 476934 - DNA, 19 bp, Mus musculus
  siRNA target sequence for Pkhd1 (NM_153179.2,3376-3394).
ctcagtcatgtgtcattga

SEQ ID NO: 476935 - DNA, 19 bp, Mus musculus
  siRNA target sequence for Pkhd1 (NM_153179.2,3387-3405).
gtcattgatgccattagaa

SEQ ID NO: 476936 - DNA, 19 bp, Mus musculus
  siRNA target sequence for Pkhd1 (NM_153179.2,3393-3411).
gatgccattagaagcaatt

SEQ ID NO: 476937 - DNA, 19 bp, Mus musculus
  siRNA target sequence for Pkhd1 (NM_153179.2,3397-3415).
ccattagaagcaattcaca

SEQ ID NO: 476938 - DNA, 19 bp, Mus musculus
  siRNA target sequence for Pkhd1 (NM_153179.2,3403-3421).
gaagcaattcacaacaaat

SEQ ID NO: 476939 - DNA, 19 bp, Mus musculus
  siRNA target sequence for Pkhd1 (NM_153179.2,3453-3471).
ggatacactgtgaatgtga

SEQ ID NO: 476940 - DNA, 19 bp, Mus musculus
  siRNA target sequence for Pkhd1 (NM_153179.2,3485-3503).
cgaccactctacagttctt

SEQ ID NO: 476941 - DNA, 19 bp, Mus musculus
  siRNA target sequence for Pkhd1 (NM_153179.2,3537-3555).
ccagtgattgtgtcattga

SEQ ID NO: 476942 - DNA, 19 bp, Mus musculus
  siRNA target sequence for Pkhd1 (NM_153179.2,3548-3566).
gtcattgagcagaaacaga

SEQ ID NO: 476943 - DNA, 19 bp, Mus musculus
  siRNA target sequence for Pkhd1 (NM_153179.2,3625-3643).
cagatctggatgtgcaaat

SEQ ID NO: 476944 - DNA, 19 bp, Mus musculus
  siRNA target sequence for Pkhd1 (NM_153179.2,3771-3789).
caaggggttgatctctata

SEQ ID NO: 476945 - DNA, 19 bp, Mus musculus
  siRNA target sequence for Pkhd1 (NM_153179.2,3775-3793).
gggttgatctctatatcca

SEQ ID NO: 476946 - DNA, 19 bp, Mus musculus
  siRNA target sequence for Pkhd1 (NM_153179.2,3791-3809).
ccagtacctcactgaagtt

SEQ ID NO: 476947 - DNA, 19 bp, Mus musculus
  siRNA target sequence for Pkhd1 (NM_153179.2,3902-3920).
ggtgcttgtggacaatcat

SEQ ID NO: 476948 - DNA, 19 bp, Mus musculus
  siRNA target sequence for Pkhd1 (NM_153179.2,3914-3932).
caatcatccttgtgatatt

SEQ ID NO: 476949 - DNA, 19 bp, Mus musculus
  siRNA target sequence for Pkhd1 (NM_153179.2,3938-3956).
cttaacggaagtgaacatt

SEQ ID NO: 476950 - DNA, 19 bp, Mus musculus
  siRNA target sequence for Pkhd1 (NM_153179.2,3965-3983).
gactcctccagctgtacta

SEQ ID NO: 476951 - DNA, 19 bp, Mus musculus
  siRNA target sequence for Pkhd1 (NM_153179.2,4211-4229).
gaaatgtgaacttgaagta

SEQ ID NO: 476952 - DNA, 19 bp, Mus musculus
  siRNA target sequence for Pkhd1 (NM_153179.2,4324-4342).
ggatggggtttgccaatat

SEQ ID NO: 476953 - DNA, 19 bp, Mus musculus
  siRNA target sequence for Pkhd1 (NM_153179.2,4328-4346).
ggggtttgccaatatgtct

SEQ ID NO: 476954 - DNA, 19 bp, Mus musculus
  siRNA target sequence for Pkhd1 (NM_153179.2,4350-4368).
gtgcctcagaaatttgagt

SEQ ID NO: 476955 - DNA, 19 bp, Mus musculus
  siRNA target sequence for Pkhd1 (NM_153179.2,4365-4383).
gagttgtcacctcagatta

SEQ ID NO: 476956 - DNA, 19 bp, Mus musculus
  siRNA target sequence for Pkhd1 (NM_153179.2,4394-4412).
cccaacacatgggtctaaa

SEQ ID NO: 476957 - DNA, 19 bp, Mus musculus
  siRNA target sequence for Pkhd1 (NM_153179.2,4395-4413).
ccaacacatgggtctaaat

SEQ ID NO: 476958 - DNA, 19 bp, Mus musculus
  siRNA target sequence for Pkhd1 (NM_153179.2,4459-4477).
gaaagaggtcagttcatgt

SEQ ID NO: 476959 - DNA, 19 bp, Mus musculus
  siRNA target sequence for Pkhd1 (NM_153179.2,4466-4484).
gtcagttcatgttgacatt

SEQ ID NO: 476960 - DNA, 19 bp, Mus musculus
  siRNA target sequence for Pkhd1 (NM_153179.2,4481-4499).
catttcaggcccttttgct

SEQ ID NO: 476961 - DNA, 19 bp, Mus musculus
  siRNA target sequence for Pkhd1 (NM_153179.2,4490-4508).
cccttttgcttgcatgatt

SEQ ID NO: 476962 - DNA, 19 bp, Mus musculus
  siRNA target sequence for Pkhd1 (NM_153179.2,4491-4509).
ccttttgcttgcatgattt

SEQ ID NO: 476963 - DNA, 19 bp, Mus musculus
  siRNA target sequence for Pkhd1 (NM_153179.2,4546-4564).
gatttgtgggtgaccaatt

SEQ ID NO: 476964 - DNA, 19 bp, Mus musculus
  siRNA target sequence for Pkhd1 (NM_153179.2,4553-4571).
gggtgaccaattttctgaa

SEQ ID NO: 476965 - DNA, 19 bp, Mus musculus
  siRNA target sequence for Pkhd1 (NM_153179.2,4630-4648).
ggaactgtacactcttcat

SEQ ID NO: 476966 - DNA, 19 bp, Mus musculus
  siRNA target sequence for Pkhd1 (NM_153179.2,4671-4689).
gtggatgctttgactataa

SEQ ID NO: 476967 - DNA, 19 bp, Mus musculus
  siRNA target sequence for Pkhd1 (NM_153179.2,4746-4764).
gctgatgagccaatagcat

SEQ ID NO: 476968 - DNA, 19 bp, Mus musculus
  siRNA target sequence for Pkhd1 (NM_153179.2,4747-4765).
ctgatgagccaatagcatt

SEQ ID NO: 476969 - DNA, 19 bp, Mus musculus
  siRNA target sequence for Pkhd1 (NM_153179.2,4818-4836).
gcatgccagataagagatt

SEQ ID NO: 476970 - DNA, 19 bp, Mus musculus
  siRNA target sequence for Pkhd1 (NM_153179.2,4842-4860).
ccaggcttccactatctgt

SEQ ID NO: 476971 - DNA, 19 bp, Mus musculus
  siRNA target sequence for Pkhd1 (NM_153179.2,4859-4877).
gtcagctgttcatacaagt

SEQ ID NO: 476972 - DNA, 19 bp, Mus musculus
  siRNA target sequence for Pkhd1 (NM_153179.2,4881-4899).
ggatatgcttgcctcaata

SEQ ID NO: 476973 - DNA, 19 bp, Mus musculus
  siRNA target sequence for Pkhd1 (NM_153179.2,4887-4905).
gcttgcctcaatagtgttt

SEQ ID NO: 476974 - DNA, 19 bp, Mus musculus
  siRNA target sequence for Pkhd1 (NM_153179.2,4892-4910).
cctcaatagtgtttctaga

SEQ ID NO: 476975 - DNA, 19 bp, Mus musculus
  siRNA target sequence for Pkhd1 (NM_153179.2,4927-4945).
ctcaggtgcttgattattt

SEQ ID NO: 476976 - DNA, 19 bp, Mus musculus
  siRNA target sequence for Pkhd1 (NM_153179.2,5038-5056).
ggcaggcttgtctaacagt

SEQ ID NO: 476977 - DNA, 19 bp, Mus musculus
  siRNA target sequence for Pkhd1 (NM_153179.2,5200-5218).
cacggagccaagacatctt

SEQ ID NO: 476978 - DNA, 19 bp, Mus musculus
  siRNA target sequence for Pkhd1 (NM_153179.2,5208-5226).
caagacatcttaaccttta

SEQ ID NO: 476979 - DNA, 19 bp, Mus musculus
  siRNA target sequence for Pkhd1 (NM_153179.2,5237-5255).
gatctcaggggctgcaaat

SEQ ID NO: 476980 - DNA, 19 bp, Mus musculus
  siRNA target sequence for Pkhd1 (NM_153179.2,5242-5260).
caggggctgcaaatgttga

SEQ ID NO: 476981 - DNA, 19 bp, Mus musculus
  siRNA target sequence for Pkhd1 (NM_153179.2,5245-5263).
gggctgcaaatgttgacat

SEQ ID NO: 476982 - DNA, 19 bp, Mus musculus
  siRNA target sequence for Pkhd1 (NM_153179.2,5246-5264).
ggctgcaaatgttgacatt

SEQ ID NO: 476983 - DNA, 19 bp, Mus musculus
  siRNA target sequence for Pkhd1 (NM_153179.2,5247-5265).
gctgcaaatgttgacattt

SEQ ID NO: 476984 - DNA, 19 bp, Mus musculus
  siRNA target sequence for Pkhd1 (NM_153179.2,5338-5356).
ctgctggggagtatcttgt

SEQ ID NO: 476985 - DNA, 19 bp, Mus musculus
  siRNA target sequence for Pkhd1 (NM_153179.2,5430-5448).
gtgaccaagaactatggtt

SEQ ID NO: 476986 - DNA, 19 bp, Mus musculus
  siRNA target sequence for Pkhd1 (NM_153179.2,5521-5539).
gtgctccatgccaagtctt

SEQ ID NO: 476987 - DNA, 19 bp, Mus musculus
  siRNA target sequence for Pkhd1 (NM_153179.2,5701-5719).
ctggatcctggccttatgt

SEQ ID NO: 476988 - DNA, 19 bp, Mus musculus
  siRNA target sequence for Pkhd1 (NM_153179.2,5704-5722).
gatcctggccttatgtcta

SEQ ID NO: 476989 - DNA, 19 bp, Mus musculus
  siRNA target sequence for Pkhd1 (NM_153179.2,5810-5828).
ccctaaagtggaaagagat

SEQ ID NO: 476990 - DNA, 19 bp, Mus musculus
  siRNA target sequence for Pkhd1 (NM_153179.2,5848-5866).
gctcctgtaacattaccat

SEQ ID NO: 476991 - DNA, 19 bp, Mus musculus
  siRNA target sequence for Pkhd1 (NM_153179.2,5906-5924).
gccaattaccgccaagatt

SEQ ID NO: 476992 - DNA, 19 bp, Mus musculus
  siRNA target sequence for Pkhd1 (NM_153179.2,5907-5925).
ccaattaccgccaagatta

SEQ ID NO: 476993 - DNA, 19 bp, Mus musculus
  siRNA target sequence for Pkhd1 (NM_153179.2,5914-5932).
ccgccaagattactgaaat

SEQ ID NO: 476994 - DNA, 19 bp, Mus musculus
  siRNA target sequence for Pkhd1 (NM_153179.2,5915-5933).
cgccaagattactgaaata

SEQ ID NO: 476995 - DNA, 19 bp, Mus musculus
  siRNA target sequence for Pkhd1 (NM_153179.2,5917-5935).
ccaagattactgaaataca

SEQ ID NO: 476996 - DNA, 19 bp, Mus musculus
  siRNA target sequence for Pkhd1 (NM_153179.2,5921-5939).
gattactgaaatacagaaa

SEQ ID NO: 476997 - DNA, 19 bp, Mus musculus
  siRNA target sequence for Pkhd1 (NM_153179.2,5956-5974).
ctcagggcaacttttcctt

SEQ ID NO: 476998 - DNA, 19 bp, Mus musculus
  siRNA target sequence for Pkhd1 (NM_153179.2,5962-5980).
gcaacttttccttccaatt

SEQ ID NO: 476999 - DNA, 19 bp, Mus musculus
  siRNA target sequence for Pkhd1 (NM_153179.2,5996-6014).
caggcctcacagttggttt

SEQ ID NO: 477000 - DNA, 19 bp, Mus musculus
  siRNA target sequence for Pkhd1 (NM_153179.2,6072-6090).
ctgcttgatgcgaacacta

SEQ ID NO: 477001 - DNA, 19 bp, Mus musculus
  siRNA target sequence for Pkhd1 (NM_153179.2,6098-6116).
gaactccctgcacattaaa

SEQ ID NO: 477002 - DNA, 19 bp, Mus musculus
  siRNA target sequence for Pkhd1 (NM_153179.2,6101-6119).
ctccctgcacattaaaggt

SEQ ID NO: 477003 - DNA, 19 bp, Mus musculus
  siRNA target sequence for Pkhd1 (NM_153179.2,6160-6178).
gagcccactccatccttat

SEQ ID NO: 477004 - DNA, 19 bp, Mus musculus
  siRNA target sequence for Pkhd1 (NM_153179.2,6162-6180).
gcccactccatccttatta

SEQ ID NO: 477005 - DNA, 19 bp, Mus musculus
  siRNA target sequence for Pkhd1 (NM_153179.2,6164-6182).
ccactccatccttattaca

SEQ ID NO: 477006 - DNA, 19 bp, Mus musculus
  siRNA target sequence for Pkhd1 (NM_153179.2,6189-6207).
ggagagctccatattggat

SEQ ID NO: 477007 - DNA, 19 bp, Mus musculus
  siRNA target sequence for Pkhd1 (NM_153179.2,6228-6246).
ggcaaagctcggatcaaaa

SEQ ID NO: 477008 - DNA, 19 bp, Mus musculus
  siRNA target sequence for Pkhd1 (NM_153179.2,6229-6247).
gcaaagctcggatcaaaat

SEQ ID NO: 477009 - DNA, 19 bp, Mus musculus
  siRNA target sequence for Pkhd1 (NM_153179.2,6237-6255).
cggatcaaaatctatggaa

SEQ ID NO: 477010 - DNA, 19 bp, Mus musculus
  siRNA target sequence for Pkhd1 (NM_153179.2,6303-6321).
gtgaggaatggaactcttt

SEQ ID NO: 477011 - DNA, 19 bp, Mus musculus
  siRNA target sequence for Pkhd1 (NM_153179.2,6530-6548).
ccccctgagatattcctat

SEQ ID NO: 477012 - DNA, 19 bp, Mus musculus
  siRNA target sequence for Pkhd1 (NM_153179.2,6606-6624).
ctcctcagcaggaacatta

SEQ ID NO: 477013 - DNA, 19 bp, Mus musculus
  siRNA target sequence for Pkhd1 (NM_153179.2,6609-6627).
ctcagcaggaacattatca

SEQ ID NO: 477014 - DNA, 19 bp, Mus musculus
  siRNA target sequence for Pkhd1 (NM_153179.2,6650-6668).
gagggtaaagcttctcaat

SEQ ID NO: 477015 - DNA, 19 bp, Mus musculus
  siRNA target sequence for Pkhd1 (NM_153179.2,6653-6671).
ggtaaagcttctcaattca

SEQ ID NO: 477016 - DNA, 19 bp, Mus musculus
  siRNA target sequence for Pkhd1 (NM_153179.2,6654-6672).
gtaaagcttctcaattcat

SEQ ID NO: 477017 - DNA, 19 bp, Mus musculus
  siRNA target sequence for Pkhd1 (NM_153179.2,6966-6984).
gtggacagcaatgtattct

SEQ ID NO: 477018 - DNA, 19 bp, Mus musculus
  siRNA target sequence for Pkhd1 (NM_153179.2,6968-6986).
ggacagcaatgtattctat

SEQ ID NO: 477019 - DNA, 19 bp, Mus musculus
  siRNA target sequence for Pkhd1 (NM_153179.2,6973-6991).
gcaatgtattctataagat

SEQ ID NO: 477020 - DNA, 19 bp, Mus musculus
  siRNA target sequence for Pkhd1 (NM_153179.2,7019-7037).
ctacctggacggaaggttt

SEQ ID NO: 477021 - DNA, 19 bp, Mus musculus
  siRNA target sequence for Pkhd1 (NM_153179.2,7023-7041).
ctggacggaaggtttagca

SEQ ID NO: 477022 - DNA, 19 bp, Mus musculus
  siRNA target sequence for Pkhd1 (NM_153179.2,7079-7097).
ggaacagggaagtacaata

SEQ ID NO: 477023 - DNA, 19 bp, Mus musculus
  siRNA target sequence for Pkhd1 (NM_153179.2,7080-7098).
gaacagggaagtacaataa

SEQ ID NO: 477024 - DNA, 19 bp, Mus musculus
  siRNA target sequence for Pkhd1 (NM_153179.2,7083-7101).
cagggaagtacaataagaa

SEQ ID NO: 477025 - DNA, 19 bp, Mus musculus
  siRNA target sequence for Pkhd1 (NM_153179.2,7134-7152).
ggactgtccggttctgaaa

SEQ ID NO: 477026 - DNA, 19 bp, Mus musculus
  siRNA target sequence for Pkhd1 (NM_153179.2,7135-7153).
gactgtccggttctgaaat

SEQ ID NO: 477027 - DNA, 19 bp, Mus musculus
  siRNA target sequence for Pkhd1 (NM_153179.2,7162-7180).
cagctggcatctacacttt

SEQ ID NO: 477028 - DNA, 19 bp, Mus musculus
  siRNA target sequence for Pkhd1 (NM_153179.2,7292-7310).
gaatactgctcattcttgt

SEQ ID NO: 477029 - DNA, 19 bp, Mus musculus
  siRNA target sequence for Pkhd1 (NM_153179.2,7323-7341).
ctccttgtatatcctaaat

SEQ ID NO: 477030 - DNA, 19 bp, Mus musculus
  siRNA target sequence for Pkhd1 (NM_153179.2,7325-7343).
ccttgtatatcctaaattt

SEQ ID NO: 477031 - DNA, 19 bp, Mus musculus
  siRNA target sequence for Pkhd1 (NM_153179.2,7347-7365).
ccaccttggaataatgaca

SEQ ID NO: 477032 - DNA, 19 bp, Mus musculus
  siRNA target sequence for Pkhd1 (NM_153179.2,7368-7386).
ggcttcactctgttccaaa

SEQ ID NO: 477033 - DNA, 19 bp, Mus musculus
  siRNA target sequence for Pkhd1 (NM_153179.2,7369-7387).
gcttcactctgttccaaaa

SEQ ID NO: 477034 - DNA, 19 bp, Mus musculus
  siRNA target sequence for Pkhd1 (NM_153179.2,7497-7515).
gaaagtgatgcgaacactt

SEQ ID NO: 477035 - DNA, 19 bp, Mus musculus
  siRNA target sequence for Pkhd1 (NM_153179.2,7503-7521).
gatgcgaacactttgatta

SEQ ID NO: 477036 - DNA, 19 bp, Mus musculus
  siRNA target sequence for Pkhd1 (NM_153179.2,7517-7535).
gattaccgacagcttttta

SEQ ID NO: 477037 - DNA, 19 bp, Mus musculus
  siRNA target sequence for Pkhd1 (NM_153179.2,7550-7568).
ccacaagggaagtctatgt

SEQ ID NO: 477038 - DNA, 19 bp, Mus musculus
  siRNA target sequence for Pkhd1 (NM_153179.2,7551-7569).
cacaagggaagtctatgta

SEQ ID NO: 477039 - DNA, 19 bp, Mus musculus
  siRNA target sequence for Pkhd1 (NM_153179.2,7600-7618).
gggaactgaccatttcgaa

SEQ ID NO: 477040 - DNA, 19 bp, Mus musculus
  siRNA target sequence for Pkhd1 (NM_153179.2,7609-7627).
ccatttcgaacacaacttt

SEQ ID NO: 477041 - DNA, 19 bp, Mus musculus
  siRNA target sequence for Pkhd1 (NM_153179.2,7615-7633).
cgaacacaacttttgttaa

SEQ ID NO: 477042 - DNA, 19 bp, Mus musculus
  siRNA target sequence for Pkhd1 (NM_153179.2,7706-7724).
gaccaggcaattgaagttt

SEQ ID NO: 477043 - DNA, 19 bp, Mus musculus
  siRNA target sequence for Pkhd1 (NM_153179.2,7732-7750).
cttcaaatttagtagcatt

SEQ ID NO: 477044 - DNA, 19 bp, Mus musculus
  siRNA target sequence for Pkhd1 (NM_153179.2,7765-7783).
cagcagttctggaagactt

SEQ ID NO: 477045 - DNA, 19 bp, Mus musculus
  siRNA target sequence for Pkhd1 (NM_153179.2,7802-7820).
gaaaaatgggtctcatgtt

SEQ ID NO: 477046 - DNA, 19 bp, Mus musculus
  siRNA target sequence for Pkhd1 (NM_153179.2,7911-7929).
ctcttccatcgtatgtcta

SEQ ID NO: 477047 - DNA, 19 bp, Mus musculus
  siRNA target sequence for Pkhd1 (NM_153179.2,7913-7931).
cttccatcgtatgtctatt

SEQ ID NO: 477048 - DNA, 19 bp, Mus musculus
  siRNA target sequence for Pkhd1 (NM_153179.2,7916-7934).
ccatcgtatgtctattgct

SEQ ID NO: 477049 - DNA, 19 bp, Mus musculus
  siRNA target sequence for Pkhd1 (NM_153179.2,7953-7971).
gttcctaagaatttaacca

SEQ ID NO: 477050 - DNA, 19 bp, Mus musculus
  siRNA target sequence for Pkhd1 (NM_153179.2,7977-7995).
gacatcagtaataagacaa

SEQ ID NO: 477051 - DNA, 19 bp, Mus musculus
  siRNA target sequence for Pkhd1 (NM_153179.2,7991-8009).
gacaatcactgtcaattat

SEQ ID NO: 477052 - DNA, 19 bp, Mus musculus
  siRNA target sequence for Pkhd1 (NM_153179.2,8013-8031).
gaagacaccctgtctaact

SEQ ID NO: 477053 - DNA, 19 bp, Mus musculus
  siRNA target sequence for Pkhd1 (NM_153179.2,8068-8086).
cctactcgctgcagtttga

SEQ ID NO: 477054 - DNA, 19 bp, Mus musculus
  siRNA target sequence for Pkhd1 (NM_153179.2,8111-8129).
gcagtactcagcaacgttt

SEQ ID NO: 477055 - DNA, 19 bp, Mus musculus
  siRNA target sequence for Pkhd1 (NM_153179.2,8168-8186).
cagggacctaccaccttat

SEQ ID NO: 477056 - DNA, 19 bp, Mus musculus
  siRNA target sequence for Pkhd1 (NM_153179.2,8212-8230).
gtcaggtgggccattcact

SEQ ID NO: 477057 - DNA, 19 bp, Mus musculus
  siRNA target sequence for Pkhd1 (NM_153179.2,8219-8237).
gggccattcacttccattt

SEQ ID NO: 477058 - DNA, 19 bp, Mus musculus
  siRNA target sequence for Pkhd1 (NM_153179.2,8314-8332).
caggtgaaggtcaagttaa

SEQ ID NO: 477059 - DNA, 19 bp, Mus musculus
  siRNA target sequence for Pkhd1 (NM_153179.2,8317-8335).
gtgaaggtcaagttaaggt

SEQ ID NO: 477060 - DNA, 19 bp, Mus musculus
  siRNA target sequence for Pkhd1 (NM_153179.2,8319-8337).
gaaggtcaagttaaggtat

SEQ ID NO: 477061 - DNA, 19 bp, Mus musculus
  siRNA target sequence for Pkhd1 (NM_153179.2,8323-8341).
gtcaagttaaggtatttct

SEQ ID NO: 477062 - DNA, 19 bp, Mus musculus
  siRNA target sequence for Pkhd1 (NM_153179.2,8419-8437).
ctgaaacatggcaagatgt

SEQ ID NO: 477063 - DNA, 19 bp, Mus musculus
  siRNA target sequence for Pkhd1 (NM_153179.2,8480-8498).
cggtgatgatgtcttgatt

SEQ ID NO: 477064 - DNA, 19 bp, Mus musculus
  siRNA target sequence for Pkhd1 (NM_153179.2,8503-8521).
ccaacaagactgttcttgt

SEQ ID NO: 477065 - DNA, 19 bp, Mus musculus
  siRNA target sequence for Pkhd1 (NM_153179.2,8556-8574).
gtgatgggtaccttagaat

SEQ ID NO: 477066 - DNA, 19 bp, Mus musculus
  siRNA target sequence for Pkhd1 (NM_153179.2,8669-8687).
ggaccaaagacttctgata

SEQ ID NO: 477067 - DNA, 19 bp, Mus musculus
  siRNA target sequence for Pkhd1 (NM_153179.2,8778-8796).
cttcacagtgcttatccta

SEQ ID NO: 477068 - DNA, 19 bp, Mus musculus
  siRNA target sequence for Pkhd1 (NM_153179.2,8832-8850).
ccgggaaatgagaggatta

SEQ ID NO: 477069 - DNA, 19 bp, Mus musculus
  siRNA target sequence for Pkhd1 (NM_153179.2,8833-8851).
cgggaaatgagaggattat

SEQ ID NO: 477070 - DNA, 19 bp, Mus musculus
  siRNA target sequence for Pkhd1 (NM_153179.2,8834-8852).
gggaaatgagaggattatt

SEQ ID NO: 477071 - DNA, 19 bp, Mus musculus
  siRNA target sequence for Pkhd1 (NM_153179.2,8836-8854).
gaaatgagaggattattgt

SEQ ID NO: 477072 - DNA, 19 bp, Mus musculus
  siRNA target sequence for Pkhd1 (NM_153179.2,8843-8861).
gaggattattgtacacaat

SEQ ID NO: 477073 - DNA, 19 bp, Mus musculus
  siRNA target sequence for Pkhd1 (NM_153179.2,8957-8975).
ccatcacatcaggatctat

SEQ ID NO: 477074 - DNA, 19 bp, Mus musculus
  siRNA target sequence for Pkhd1 (NM_153179.2,8968-8986).
ggatctatgaacgtctaaa

SEQ ID NO: 477075 - DNA, 19 bp, Mus musculus
  siRNA target sequence for Pkhd1 (NM_153179.2,9054-9072).
gggctgttgaccagaaaca

SEQ ID NO: 477076 - DNA, 19 bp, Mus musculus
  siRNA target sequence for Pkhd1 (NM_153179.2,9055-9073).
ggctgttgaccagaaacat

SEQ ID NO: 477077 - DNA, 19 bp, Mus musculus
  siRNA target sequence for Pkhd1 (NM_153179.2,9056-9074).
gctgttgaccagaaacatt

SEQ ID NO: 477078 - DNA, 19 bp, Mus musculus
  siRNA target sequence for Pkhd1 (NM_153179.2,9059-9077).
gttgaccagaaacattaga

SEQ ID NO: 477079 - DNA, 19 bp, Mus musculus
  siRNA target sequence for Pkhd1 (NM_153179.2,9117-9135).
gggtccttcaggaagtcta

SEQ ID NO: 477080 - DNA, 19 bp, Mus musculus
  siRNA target sequence for Pkhd1 (NM_153179.2,9131-9149).
gtctagcggagaagacttt

SEQ ID NO: 477081 - DNA, 19 bp, Mus musculus
  siRNA target sequence for Pkhd1 (NM_153179.2,9188-9206).
catggggttgccattgtat

SEQ ID NO: 477082 - DNA, 19 bp, Mus musculus
  siRNA target sequence for Pkhd1 (NM_153179.2,9197-9215).
gccattgtattcatctatt

SEQ ID NO: 477083 - DNA, 19 bp, Mus musculus
  siRNA target sequence for Pkhd1 (NM_153179.2,9234-9252).
gctggatcctgggtaatat

SEQ ID NO: 477084 - DNA, 19 bp, Mus musculus
  siRNA target sequence for Pkhd1 (NM_153179.2,9242-9260).
ctgggtaatatcttctact

SEQ ID NO: 477085 - DNA, 19 bp, Mus musculus
  siRNA target sequence for Pkhd1 (NM_153179.2,9306-9324).
ggcgtgattttaactgata

SEQ ID NO: 477086 - DNA, 19 bp, Mus musculus
  siRNA target sequence for Pkhd1 (NM_153179.2,9360-9378).
gtggagggtcagaactatt

SEQ ID NO: 477087 - DNA, 19 bp, Mus musculus
  siRNA target sequence for Pkhd1 (NM_153179.2,9439-9457).
caggaatcaaagtgaacta

SEQ ID NO: 477088 - DNA, 19 bp, Mus musculus
  siRNA target sequence for Pkhd1 (NM_153179.2,9543-9561).
gaagtgctttggtctgata

SEQ ID NO: 477089 - DNA, 19 bp, Mus musculus
  siRNA target sequence for Pkhd1 (NM_153179.2,9695-9713).
ggacatacagaatatcact

SEQ ID NO: 477090 - DNA, 19 bp, Mus musculus
  siRNA target sequence for Pkhd1 (NM_153179.2,9710-9728).
cactctggtagacaatact

SEQ ID NO: 477091 - DNA, 19 bp, Mus musculus
  siRNA target sequence for Pkhd1 (NM_153179.2,9732-9750).
ggtcttttggctatcacat

SEQ ID NO: 477092 - DNA, 19 bp, Mus musculus
  siRNA target sequence for Pkhd1 (NM_153179.2,9733-9751).
gtcttttggctatcacata

SEQ ID NO: 477093 - DNA, 19 bp, Mus musculus
  siRNA target sequence for Pkhd1 (NM_153179.2,9740-9758).
ggctatcacatatgtatct

SEQ ID NO: 477094 - DNA, 19 bp, Mus musculus
  siRNA target sequence for Pkhd1 (NM_153179.2,9741-9759).
gctatcacatatgtatctt

SEQ ID NO: 477095 - DNA, 19 bp, Mus musculus
  siRNA target sequence for Pkhd1 (NM_153179.2,9775-9793).
ctgtcagtactgtacagat

SEQ ID NO: 477096 - DNA, 19 bp, Mus musculus
  siRNA target sequence for Pkhd1 (NM_153179.2,9781-9799).
gtactgtacagattacact

SEQ ID NO: 477097 - DNA, 19 bp, Mus musculus
  siRNA target sequence for Pkhd1 (NM_153179.2,9791-9809).
gattacacttaggaattca

SEQ ID NO: 477098 - DNA, 19 bp, Mus musculus
  siRNA target sequence for Pkhd1 (NM_153179.2,9820-9838).
ccactagctcctcttttga

SEQ ID NO: 477099 - DNA, 19 bp, Mus musculus
  siRNA target sequence for Pkhd1 (NM_153179.2,9875-9893).
ctggacatcaacagataga

SEQ ID NO: 477100 - DNA, 19 bp, Mus musculus
  siRNA target sequence for Pkhd1 (NM_153179.2,9913-9931).
gaggccgaatcggtattct

SEQ ID NO: 477101 - DNA, 19 bp, Mus musculus
  siRNA target sequence for Pkhd1 (NM_153179.2,9915-9933).
ggccgaatcggtattctgt

SEQ ID NO: 477102 - DNA, 19 bp, Mus musculus
  siRNA target sequence for Pkhd1 (NM_153179.2,10003-10021).
cagtcccaggaattatgaa

SEQ ID NO: 477103 - DNA, 19 bp, Mus musculus
  siRNA target sequence for Pkhd1 (NM_153179.2,10029-10047).
gatgtcaccttttctagtt

SEQ ID NO: 477104 - DNA, 19 bp, Mus musculus
  siRNA target sequence for Pkhd1 (NM_153179.2,10172-10190).
gttctactttcctgtatta

SEQ ID NO: 477105 - DNA, 19 bp, Mus musculus
  siRNA target sequence for Pkhd1 (NM_153179.2,10203-10221).
gacttagtgggaaccattt

SEQ ID NO: 477106 - DNA, 19 bp, Mus musculus
  siRNA target sequence for Pkhd1 (NM_153179.2,10256-10274).
cctcttcacagatcttgat

SEQ ID NO: 477107 - DNA, 19 bp, Mus musculus
  siRNA target sequence for Pkhd1 (NM_153179.2,10423-10441).
ctgagcatgcggtcctaat

SEQ ID NO: 477108 - DNA, 19 bp, Mus musculus
  siRNA target sequence for Pkhd1 (NM_153179.2,10436-10454).
cctaattctcgataatgtt

SEQ ID NO: 477109 - DNA, 19 bp, Mus musculus
  siRNA target sequence for Pkhd1 (NM_153179.2,10465-10483).
ggacaatccccaaatcaca

SEQ ID NO: 477110 - DNA, 19 bp, Mus musculus
  siRNA target sequence for Pkhd1 (NM_153179.2,10482-10500).
cacccacttgtatctgtta

SEQ ID NO: 477111 - DNA, 19 bp, Mus musculus
  siRNA target sequence for Pkhd1 (NM_153179.2,10484-10502).
cccacttgtatctgttact

SEQ ID NO: 477112 - DNA, 19 bp, Mus musculus
  siRNA target sequence for Pkhd1 (NM_153179.2,10485-10503).
ccacttgtatctgttacta

SEQ ID NO: 477113 - DNA, 19 bp, Mus musculus
  siRNA target sequence for Pkhd1 (NM_153179.2,10515-10533).
gacacatttagcattgtga

SEQ ID NO: 477114 - DNA, 19 bp, Mus musculus
  siRNA target sequence for Pkhd1 (NM_153179.2,10566-10584).
ctgtctactttttattcca

SEQ ID NO: 477115 - DNA, 19 bp, Mus musculus
  siRNA target sequence for Pkhd1 (NM_153179.2,10636-10654).
cattcctgcgttttcttct

SEQ ID NO: 477116 - DNA, 19 bp, Mus musculus
  siRNA target sequence for Pkhd1 (NM_153179.2,10680-10698).
ctcatcttggctgtattct

SEQ ID NO: 477117 - DNA, 19 bp, Mus musculus
  siRNA target sequence for Pkhd1 (NM_153179.2,10689-10707).
gctgtattctacaatgaga

SEQ ID NO: 477118 - DNA, 19 bp, Mus musculus
  siRNA target sequence for Pkhd1 (NM_153179.2,10706-10724).
gattcagagccctcatgtt

SEQ ID NO: 477119 - DNA, 19 bp, Mus musculus
  siRNA target sequence for Pkhd1 (NM_153179.2,10727-10745).
cttagacaagagctttatt

SEQ ID NO: 477120 - DNA, 19 bp, Mus musculus
  siRNA target sequence for Pkhd1 (NM_153179.2,10746-10764).
ccacctactccattagagt

SEQ ID NO: 477121 - DNA, 19 bp, Mus musculus
  siRNA target sequence for Pkhd1 (NM_153179.2,10794-10812).
ggtgccaactattttgaca

SEQ ID NO: 477122 - DNA, 19 bp, Mus musculus
  siRNA target sequence for Pkhd1 (NM_153179.2,10795-10813).
gtgccaactattttgacat

SEQ ID NO: 477123 - DNA, 19 bp, Mus musculus
  siRNA target sequence for Pkhd1 (NM_153179.2,10814-10832).
catgaataacctcttgtat

SEQ ID NO: 477124 - DNA, 19 bp, Mus musculus
  siRNA target sequence for Pkhd1 (NM_153179.2,10870-10888).
caagtgtttccattcattt

SEQ ID NO: 477125 - DNA, 19 bp, Mus musculus
  siRNA target sequence for Pkhd1 (NM_153179.2,10948-10966).
gcctaagtgacttctttca

SEQ ID NO: 477126 - DNA, 19 bp, Mus musculus
  siRNA target sequence for Pkhd1 (NM_153179.2,11020-11038).
ccttagaggccattgcaaa

SEQ ID NO: 477127 - DNA, 19 bp, Mus musculus
  siRNA target sequence for Pkhd1 (NM_153179.2,11057-11075).
gcgcaattgcccatctgta

SEQ ID NO: 477128 - DNA, 19 bp, Mus musculus
  siRNA target sequence for Pkhd1 (NM_153179.2,11058-11076).
cgcaattgcccatctgtaa

SEQ ID NO: 477129 - DNA, 19 bp, Mus musculus
  siRNA target sequence for Pkhd1 (NM_153179.2,11060-11078).
caattgcccatctgtaact

SEQ ID NO: 477130 - DNA, 19 bp, Mus musculus
  siRNA target sequence for Pkhd1 (NM_153179.2,11082-11100).
ggtggcccttctatcagat

SEQ ID NO: 477131 - DNA, 19 bp, Mus musculus
  siRNA target sequence for Pkhd1 (NM_153179.2,11083-11101).
gtggcccttctatcagata

SEQ ID NO: 477132 - DNA, 19 bp, Mus musculus
  siRNA target sequence for Pkhd1 (NM_153179.2,11087-11105).
cccttctatcagatatggt

SEQ ID NO: 477133 - DNA, 19 bp, Mus musculus
  siRNA target sequence for Pkhd1 (NM_153179.2,11113-11131).
gacctctcatggcagaaat

SEQ ID NO: 477134 - DNA, 19 bp, Mus musculus
  siRNA target sequence for Pkhd1 (NM_153179.2,11124-11142).
gcagaaatgacatcactta

SEQ ID NO: 477135 - DNA, 19 bp, Mus musculus
  siRNA target sequence for Pkhd1 (NM_153179.2,11125-11143).
cagaaatgacatcacttaa

SEQ ID NO: 477136 - DNA, 19 bp, Mus musculus
  siRNA target sequence for Pkhd1 (NM_153179.2,11144-11162).
gatcacaccagcaacaact

SEQ ID NO: 477137 - DNA, 19 bp, Mus musculus
  siRNA target sequence for Pkhd1 (NM_153179.2,11199-11217).
ggtgacctgccaaacataa

SEQ ID NO: 477138 - DNA, 19 bp, Mus musculus
  siRNA target sequence for Pkhd1 (NM_153179.2,11235-11253).
cagtccttaccaagtaaca

SEQ ID NO: 477139 - DNA, 19 bp, Mus musculus
  siRNA target sequence for Pkhd1 (NM_153179.2,11240-11258).
cttaccaagtaacagatta

SEQ ID NO: 477140 - DNA, 19 bp, Mus musculus
  siRNA target sequence for Pkhd1 (NM_153179.2,11248-11266).
gtaacagattacagagatt

SEQ ID NO: 477141 - DNA, 19 bp, Mus musculus
  siRNA target sequence for Pkhd1 (NM_153179.2,11263-11281).
gattggtgaaccaggttat

SEQ ID NO: 477142 - DNA, 19 bp, Mus musculus
  siRNA target sequence for Pkhd1 (NM_153179.2,11267-11285).
ggtgaaccaggttatcact

SEQ ID NO: 477143 - DNA, 19 bp, Mus musculus
  siRNA target sequence for Pkhd1 (NM_153179.2,11292-11310).
cagactggagctctagaaa

SEQ ID NO: 477144 - DNA, 19 bp, Mus musculus
  siRNA target sequence for Pkhd1 (NM_153179.2,11357-11375).
gggagtcacaggatataga

SEQ ID NO: 477145 - DNA, 19 bp, Mus musculus
  siRNA target sequence for Pkhd1 (NM_153179.2,11539-11557).
cctcagaaccctggattat

SEQ ID NO: 477146 - DNA, 19 bp, Mus musculus
  siRNA target sequence for Pkhd1 (NM_153179.2,11549-11567).
ctggattatttcagtttct

SEQ ID NO: 477147 - DNA, 19 bp, Mus musculus
  siRNA target sequence for Pkhd1 (NM_153179.2,11578-11596).
catctgaatcagtgcttaa

SEQ ID NO: 477148 - DNA, 19 bp, Mus musculus
  siRNA target sequence for Pkhd1 (NM_153179.2,11600-11618).
gtgtaccctggcagaaaca

SEQ ID NO: 477149 - DNA, 19 bp, Mus musculus
  siRNA target sequence for Pkhd1 (NM_153179.2,11625-11643).
ggctatgtgaccttttcta

SEQ ID NO: 477150 - DNA, 19 bp, Mus musculus
  siRNA target sequence for Pkhd1 (NM_153179.2,11665-11683).
ggtcaaactggcacttgtt

SEQ ID NO: 477151 - DNA, 19 bp, Mus musculus
  siRNA target sequence for Pkhd1 (NM_153179.2,11666-11684).
gtcaaactggcacttgttt

SEQ ID NO: 477152 - DNA, 19 bp, Mus musculus
  siRNA target sequence for Pkhd1 (NM_153179.2,11668-11686).
caaactggcacttgttttt

SEQ ID NO: 477153 - DNA, 19 bp, Mus musculus
  siRNA target sequence for Pkhd1 (NM_153179.2,11672-11690).
ctggcacttgttttttact

SEQ ID NO: 477154 - DNA, 19 bp, Mus musculus
  siRNA target sequence for Pkhd1 (NM_153179.2,11698-11716).
cccctccaggtactaattt

SEQ ID NO: 477155 - DNA, 19 bp, Mus musculus
  siRNA target sequence for Pkhd1 (NM_153179.2,11699-11717).
ccctccaggtactaatttt

SEQ ID NO: 477156 - DNA, 19 bp, Mus musculus
  siRNA target sequence for Pkhd1 (NM_153179.2,11700-11718).
cctccaggtactaatttta

SEQ ID NO: 477157 - DNA, 19 bp, Mus musculus
  siRNA target sequence for Pkhd1 (NM_153179.2,11728-11746).
caaggaccttcgttgtctt

SEQ ID NO: 477158 - DNA, 19 bp, Mus musculus
  siRNA target sequence for Pkhd1 (NM_153179.2,11754-11772).
gctagcaaggagagatcaa

SEQ ID NO: 477159 - DNA, 19 bp, Mus musculus
  siRNA target sequence for Pkhd1 (NM_153179.2,11758-11776).
gcaaggagagatcaactat

SEQ ID NO: 477160 - DNA, 19 bp, Mus musculus
  siRNA target sequence for Pkhd1 (NM_153179.2,11829-11847).
ctcgtttgctgctggttta

SEQ ID NO: 477161 - DNA, 19 bp, Mus musculus
  siRNA target sequence for Pkhd1 (NM_153179.2,11832-11850).
gtttgctgctggtttaaga

SEQ ID NO: 477162 - DNA, 19 bp, Mus musculus
  siRNA target sequence for Pkhd1 (NM_153179.2,11874-11892).
ccagaagacatatctgaat

SEQ ID NO: 477163 - DNA, 19 bp, Mus musculus
  siRNA target sequence for Pkhd1 (NM_153179.2,11961-11979).
gcaaaagagaacactttga

SEQ ID NO: 477164 - DNA, 19 bp, Mus musculus
  siRNA target sequence for Pkhd1 (NM_153179.2,11982-12000).
ggagaagatatgagaatga

SEQ ID NO: 477165 - DNA, 19 bp, Mus musculus
  siRNA target sequence for Pkhd1 (NM_153179.2,12045-12063).
gatggagtgtccaaaagga

SEQ ID NO: 477166 - DNA, 19 bp, Mus musculus
  siRNA target sequence for Pkhd1 (NM_153179.2,12051-12069).
gtgtccaaaaggaaagtta

SEQ ID NO: 477167 - DNA, 19 bp, Mus musculus
  siRNA target sequence for Pkhd1 (NM_153179.2,12100-12118).
ctacacctgccccaaagat

SEQ ID NO: 477168 - DNA, 19 bp, Mus musculus
  siRNA target sequence for Pkhd1 (NM_153179.2,12319-12337).
ctggactgtctcaagagaa

SEQ ID NO: 477169 - DNA, 19 bp, Mus musculus
  siRNA target sequence for Psmd7 (NM_010817.1,272-290).
cttgatgtatccaacagtt

SEQ ID NO: 477170 - DNA, 19 bp, Mus musculus
  siRNA target sequence for Psmd7 (NM_010817.1,286-304).
cagttttgcagtacctttt

SEQ ID NO: 477171 - DNA, 19 bp, Mus musculus
  siRNA target sequence for Psmd7 (NM_010817.1,333-351).
ggtttttagaccatgatta

SEQ ID NO: 477172 - DNA, 19 bp, Mus musculus
  siRNA target sequence for Psmd7 (NM_010817.1,334-352).
gtttttagaccatgattat

SEQ ID NO: 477173 - DNA, 19 bp, Mus musculus
  siRNA target sequence for Psmd7 (NM_010817.1,439-457).
gaatgatatcgccatcaat

SEQ ID NO: 477174 - DNA, 19 bp, Mus musculus
  siRNA target sequence for Psmd7 (NM_010817.1,486-504).
cagtattggtcattatcga

SEQ ID NO: 477175 - DNA, 19 bp, Mus musculus
  siRNA target sequence for Psmd7 (NM_010817.1,530-548).
cccaccgaagcctacatct

SEQ ID NO: 477176 - DNA, 19 bp, Mus musculus
  siRNA target sequence for Psmd7 (NM_010817.1,572-590).
gggacgccaacgtcaaaaa

SEQ ID NO: 477177 - DNA, 19 bp, Mus musculus
  siRNA target sequence for Psmd7 (NM_010817.1,574-592).
gacgccaacgtcaaaaact

SEQ ID NO: 477178 - DNA, 19 bp, Mus musculus
  siRNA target sequence for Psmd7 (NM_010817.1,576-594).
cgccaacgtcaaaaacttt

SEQ ID NO: 477179 - DNA, 19 bp, Mus musculus
  siRNA target sequence for Psmd7 (NM_010817.1,577-595).
gccaacgtcaaaaactttt

SEQ ID NO: 477180 - DNA, 19 bp, Mus musculus
  siRNA target sequence for Psmd7 (NM_010817.1,579-597).
caacgtcaaaaacttttga

SEQ ID NO: 477181 - DNA, 19 bp, Mus musculus
  siRNA target sequence for Psmd7 (NM_010817.1,640-658).
cggagtggagcacttacta

SEQ ID NO: 477182 - DNA, 19 bp, Mus musculus
  siRNA target sequence for Psmd7 (NM_010817.1,689-707).
ctctcccagcggatcacaa

SEQ ID NO: 477183 - DNA, 19 bp, Mus musculus
  siRNA target sequence for Psmd7 (NM_010817.1,933-951).
ctgtggtcgccttgcataa

SEQ ID NO: 477184 - DNA, 19 bp, Mus musculus
  siRNA target sequence for Psmd7 (NM_010817.1,952-970).
cctcatcaacaacaagatt

SEQ ID NO: 477185 - DNA, 19 bp, Mus musculus
  siRNA target sequence for Psmd7 (NM_010817.1,1054-1072).
gagcgacgcagcgaagaaa

SEQ ID NO: 477186 - DNA, 19 bp, Mus musculus
  siRNA target sequence for Psmd7 (NM_010817.1,1056-1074).
gcgacgcagcgaagaaaga

SEQ ID NO: 477187 - DNA, 19 bp, Mus musculus
  siRNA target sequence for 2300002G02Rik (NM_172745.1,117-135).
cccgcatcacccttcttgt

SEQ ID NO: 477188 - DNA, 19 bp, Mus musculus
  siRNA target sequence for 2300002G02Rik (NM_172745.1,175-193).
gcgacaagccccatgtgaa

SEQ ID NO: 477189 - DNA, 19 bp, Mus musculus
  siRNA target sequence for 2300002G02Rik (NM_172745.1,270-288).
ggtggagctaagttcaaga

SEQ ID NO: 477190 - DNA, 19 bp, Mus musculus
  siRNA target sequence for 2300002G02Rik (NM_172745.1,271-289).
gtggagctaagttcaagaa

SEQ ID NO: 477191 - DNA, 19 bp, Mus musculus
  siRNA target sequence for 2300002G02Rik (NM_172745.1,290-308).
gtacgaggagatagacaat

SEQ ID NO: 477192 - DNA, 19 bp, Mus musculus
  siRNA target sequence for 2300002G02Rik (NM_172745.1,345-363).
gcagcccatgtggagtata

SEQ ID NO: 477193 - DNA, 19 bp, Mus musculus
  siRNA target sequence for 2300002G02Rik (NM_172745.1,397-415).
gtcctggtcatgcagatta

SEQ ID NO: 477194 - DNA, 19 bp, Mus musculus
  siRNA target sequence for 2300002G02Rik (NM_172745.1,400-418).
ctggtcatgcagattatgt

SEQ ID NO: 477195 - DNA, 19 bp, Mus musculus
  siRNA target sequence for 2300002G02Rik (NM_172745.1,402-420).
ggtcatgcagattatgtta

SEQ ID NO: 477196 - DNA, 19 bp, Mus musculus
  siRNA target sequence for 2300002G02Rik (NM_172745.1,403-421).
gtcatgcagattatgttaa

SEQ ID NO: 477197 - DNA, 19 bp, Mus musculus
  siRNA target sequence for 2300002G02Rik (NM_172745.1,411-429).
gattatgttaagaatatga

SEQ ID NO: 477198 - DNA, 19 bp, Mus musculus
  siRNA target sequence for 2300002G02Rik (NM_172745.1,527-545).
gattggggtagaacatgtt

SEQ ID NO: 477199 - DNA, 19 bp, Mus musculus
  siRNA target sequence for 2300002G02Rik (NM_172745.1,626-644).
caccgagtttggctataaa

SEQ ID NO: 477200 - DNA, 19 bp, Mus musculus
  siRNA target sequence for 2300002G02Rik (NM_172745.1,806-824).
gtcagtctactctattcct

SEQ ID NO: 477201 - DNA, 19 bp, Mus musculus
  siRNA target sequence for 2300002G02Rik (NM_172745.1,855-873).
gagcgtggcattttgaaga

SEQ ID NO: 477202 - DNA, 19 bp, Mus musculus
  siRNA target sequence for 2300002G02Rik (NM_172745.1,888-906).
gagttgctgggacataaca

SEQ ID NO: 477203 - DNA, 19 bp, Mus musculus
  siRNA target sequence for 2300002G02Rik (NM_172745.1,988-1006).
ctctggtccgaggcttaaa

SEQ ID NO: 477204 - DNA, 19 bp, Mus musculus
  siRNA target sequence for 2300002G02Rik (NM_172745.1,999-1017).
ggcttaaagcgcgaagatt

SEQ ID NO: 477205 - DNA, 19 bp, Mus musculus
  siRNA target sequence for 2300002G02Rik (NM_172745.1,1000-1018).
gcttaaagcgcgaagattt

SEQ ID NO: 477206 - DNA, 19 bp, Mus musculus
  siRNA target sequence for 2300002G02Rik (NM_172745.1,1113-1131).
cgccacaaaccctttgtat

SEQ ID NO: 477207 - DNA, 19 bp, Mus musculus
  siRNA target sequence for 2300002G02Rik (NM_172745.1,1218-1236).
ggagaggacttgaagctta

SEQ ID NO: 477208 - DNA, 19 bp, Mus musculus
  siRNA target sequence for 2300002G02Rik (NM_172745.1,1247-1265).
gcggcagcccatgatctta

SEQ ID NO: 477209 - DNA, 19 bp, Mus musculus
  siRNA target sequence for 2300002G02Rik (NM_172745.1,1249-1267).
ggcagcccatgatcttaga

SEQ ID NO: 477210 - DNA, 19 bp, Mus musculus
  siRNA target sequence for 2300002G02Rik (NM_172745.1,1251-1269).
cagcccatgatcttagaga

SEQ ID NO: 477211 - DNA, 19 bp, Mus musculus
  siRNA target sequence for 2300002G02Rik (NM_172745.1,1253-1271).
gcccatgatcttagagaaa

SEQ ID NO: 477212 - DNA, 19 bp, Mus musculus
  siRNA target sequence for 2310050B20Rik (NM_025537.1,139-157).
ccagcaaggagctccttat

SEQ ID NO: 477213 - DNA, 19 bp, Mus musculus
  siRNA target sequence for 2310050B20Rik (NM_025537.1,143-161).
caaggagctccttatgaaa

SEQ ID NO: 477214 - DNA, 19 bp, Mus musculus
  siRNA target sequence for 2310050B20Rik (NM_025537.1,175-193).
ccggctactcctttgtcaa

SEQ ID NO: 477215 - DNA, 19 bp, Mus musculus
  siRNA target sequence for 2310050B20Rik (NM_025537.1,296-314).
ccacgggaggaagactaaa

SEQ ID NO: 477216 - DNA, 19 bp, Mus musculus
  siRNA target sequence for 2310050B20Rik (NM_025537.1,308-326).
gactaaagaaggcttgatt

SEQ ID NO: 477217 - DNA, 19 bp, Mus musculus
  siRNA target sequence for 2310050B20Rik (NM_025537.1,354-372).
gttttagtagaggtaaact

SEQ ID NO: 477218 - DNA, 19 bp, Mus musculus
  siRNA target sequence for 2310050B20Rik (NM_025537.1,468-486).
cggctctccacgtacagta

SEQ ID NO: 477219 - DNA, 19 bp, Mus musculus
  siRNA target sequence for 2310050B20Rik (NM_025537.1,469-487).
ggctctccacgtacagtaa

SEQ ID NO: 477220 - DNA, 19 bp, Mus musculus
  siRNA target sequence for 2310050B20Rik (NM_025537.1,544-562).
gctctctcaaggatcagtt

SEQ ID NO: 477221 - DNA, 19 bp, Mus musculus
  siRNA target sequence for 2310050B20Rik (NM_025537.1,563-581).
ggccctagcgattggtaaa

SEQ ID NO: 477222 - DNA, 19 bp, Mus musculus
  siRNA target sequence for 2310050B20Rik (NM_025537.1,565-583).
ccctagcgattggtaaact

SEQ ID NO: 477223 - DNA, 19 bp, Mus musculus
  siRNA target sequence for 2310050B20Rik (NM_025537.1,584-602).
gggagagaacatgattctt

SEQ ID NO: 477224 - DNA, 19 bp, Mus musculus
  siRNA target sequence for 2310050B20Rik (NM_025537.1,635-653).
gttctatgtcggctcttat

SEQ ID NO: 477225 - DNA, 19 bp, Mus musculus
  siRNA target sequence for 2310050B20Rik (NM_025537.1,930-948).
gacttcgtgcgcttcgaat

SEQ ID NO: 477226 - DNA, 19 bp, Mus musculus
  siRNA target sequence for 2610301D06Rik (NM_026007.2,454-472).
gaagactcgaacttttcta

SEQ ID NO: 477227 - DNA, 19 bp, Mus musculus
  siRNA target sequence for 6030468D11Rik (NM_175317.2,57-75).
gtgctcagtggtgttgata

SEQ ID NO: 477228 - DNA, 19 bp, Mus musculus
  siRNA target sequence for 6030468D11Rik (NM_175317.2,98-116).
cactgccaacattaggaat

SEQ ID NO: 477229 - DNA, 19 bp, Mus musculus
  siRNA target sequence for 6030468D11Rik (NM_175317.2,100-118).
ctgccaacattaggaatat

SEQ ID NO: 477230 - DNA, 19 bp, Mus musculus
  siRNA target sequence for 6030468D11Rik (NM_175317.2,102-120).
gccaacattaggaatatct

SEQ ID NO: 477231 - DNA, 19 bp, Mus musculus
  siRNA target sequence for 6030468D11Rik (NM_175317.2,119-137).
ctgtgttctggctcatgtt

SEQ ID NO: 477232 - DNA, 19 bp, Mus musculus
  siRNA target sequence for 6030468D11Rik (NM_175317.2,121-139).
gtgttctggctcatgttga

SEQ ID NO: 477233 - DNA, 19 bp, Mus musculus
  siRNA target sequence for 6030468D11Rik (NM_175317.2,132-150).
catgttgaccacggaaaaa

SEQ ID NO: 477234 - DNA, 19 bp, Mus musculus
  siRNA target sequence for 6030468D11Rik (NM_175317.2,140-158).
ccacggaaaaactactctt

SEQ ID NO: 477235 - DNA, 19 bp, Mus musculus
  siRNA target sequence for 6030468D11Rik (NM_175317.2,151-169).
ctactcttgctgattgtct

SEQ ID NO: 477236 - DNA, 19 bp, Mus musculus
  siRNA target sequence for 6030468D11Rik (NM_175317.2,156-174).
cttgctgattgtcttatat

SEQ ID NO: 477237 - DNA, 19 bp, Mus musculus
  siRNA target sequence for 6030468D11Rik (NM_175317.2,198-216).
cgcctggcaggcaagttaa

SEQ ID NO: 477238 - DNA, 19 bp, Mus musculus
  siRNA target sequence for 6030468D11Rik (NM_175317.2,205-223).
caggcaagttaaggtatat

SEQ ID NO: 477239 - DNA, 19 bp, Mus musculus
  siRNA target sequence for 6030468D11Rik (NM_175317.2,269-287).
cagcgccatctcactacat

SEQ ID NO: 477240 - DNA, 19 bp, Mus musculus
  siRNA target sequence for 6030468D11Rik (NM_175317.2,271-289).
gcgccatctcactacatta

SEQ ID NO: 477241 - DNA, 19 bp, Mus musculus
  siRNA target sequence for 6030468D11Rik (NM_175317.2,272-290).
cgccatctcactacattat

SEQ ID NO: 477242 - DNA, 19 bp, Mus musculus
  siRNA target sequence for 6030468D11Rik (NM_175317.2,300-318).
catgaggagtacctgatta

SEQ ID NO: 477243 - DNA, 19 bp, Mus musculus
  siRNA target sequence for 6030468D11Rik (NM_175317.2,306-324).
gagtacctgattaatctga

SEQ ID NO: 477244 - DNA, 19 bp, Mus musculus
  siRNA target sequence for 6030468D11Rik (NM_175317.2,308-326).
gtacctgattaatctgata

SEQ ID NO: 477245 - DNA, 19 bp, Mus musculus
  siRNA target sequence for 6030468D11Rik (NM_175317.2,344-362).
ggacttctcctcagaagta

SEQ ID NO: 477246 - DNA, 19 bp, Mus musculus
  siRNA target sequence for 6030468D11Rik (NM_175317.2,345-363).
gacttctcctcagaagtat

SEQ ID NO: 477247 - DNA, 19 bp, Mus musculus
  siRNA target sequence for 6030468D11Rik (NM_175317.2,347-365).
cttctcctcagaagtatca

SEQ ID NO: 477248 - DNA, 19 bp, Mus musculus
  siRNA target sequence for 6030468D11Rik (NM_175317.2,367-385).
cagcggttcgcatttgtga

SEQ ID NO: 477249 - DNA, 19 bp, Mus musculus
  siRNA target sequence for 6030468D11Rik (NM_175317.2,382-400).
gtgatggatgcatcattgt

SEQ ID NO: 477250 - DNA, 19 bp, Mus musculus
  siRNA target sequence for 6030468D11Rik (NM_175317.2,447-465).
cgacaagcctggcttgaaa

SEQ ID NO: 477251 - DNA, 19 bp, Mus musculus
  siRNA target sequence for 6030468D11Rik (NM_175317.2,472-490).
gccctgttttagtgatcaa

SEQ ID NO: 477252 - DNA, 19 bp, Mus musculus
  siRNA target sequence for 6030468D11Rik (NM_175317.2,473-491).
ccctgttttagtgatcaat

SEQ ID NO: 477253 - DNA, 19 bp, Mus musculus
  siRNA target sequence for 6030468D11Rik (NM_175317.2,474-492).
cctgttttagtgatcaata

SEQ ID NO: 477254 - DNA, 19 bp, Mus musculus
  siRNA target sequence for 6030468D11Rik (NM_175317.2,477-495).
gttttagtgatcaataaga

SEQ ID NO: 477255 - DNA, 19 bp, Mus musculus
  siRNA target sequence for 6030468D11Rik (NM_175317.2,501-519).
cgcctgatagtggaactaa

SEQ ID NO: 477256 - DNA, 19 bp, Mus musculus
  siRNA target sequence for 6030468D11Rik (NM_175317.2,502-520).
gcctgatagtggaactaaa

SEQ ID NO: 477257 - DNA, 19 bp, Mus musculus
  siRNA target sequence for 6030468D11Rik (NM_175317.2,503-521).
cctgatagtggaactaaaa

SEQ ID NO: 477258 - DNA, 19 bp, Mus musculus
  siRNA target sequence for 6030468D11Rik (NM_175317.2,504-522).
ctgatagtggaactaaaat

SEQ ID NO: 477259 - DNA, 19 bp, Mus musculus
  siRNA target sequence for 6030468D11Rik (NM_175317.2,598-616).
cttctaaagtcctagaaga

SEQ ID NO: 477260 - DNA, 19 bp, Mus musculus
  siRNA target sequence for 6030468D11Rik (NM_175317.2,752-770).
gtttaccagtgcgatagat

SEQ ID NO: 477261 - DNA, 19 bp, Mus musculus
  siRNA target sequence for 6030468D11Rik (NM_175317.2,789-807).
gagcactttgccagaatct

SEQ ID NO: 477262 - DNA, 19 bp, Mus musculus
  siRNA target sequence for 6030468D11Rik (NM_175317.2,791-809).
gcactttgccagaatctat

SEQ ID NO: 477263 - DNA, 19 bp, Mus musculus
  siRNA target sequence for 6030468D11Rik (NM_175317.2,792-810).
cactttgccagaatctata

SEQ ID NO: 477264 - DNA, 19 bp, Mus musculus
  siRNA target sequence for 6030468D11Rik (NM_175317.2,794-812).
ctttgccagaatctatagt

SEQ ID NO: 477265 - DNA, 19 bp, Mus musculus
  siRNA target sequence for 6030468D11Rik (NM_175317.2,798-816).
gccagaatctatagtcaaa

SEQ ID NO: 477266 - DNA, 19 bp, Mus musculus
  siRNA target sequence for 6030468D11Rik (NM_175317.2,854-872).
gtggggagattattatata

SEQ ID NO: 477267 - DNA, 19 bp, Mus musculus
  siRNA target sequence for 6030468D11Rik (NM_175317.2,925-943).
ctttatttgtacagttgat

SEQ ID NO: 477268 - DNA, 19 bp, Mus musculus
  siRNA target sequence for 6030468D11Rik (NM_175317.2,1013-1031).
gacttctttaggattaaaa

SEQ ID NO: 477269 - DNA, 19 bp, Mus musculus
  siRNA target sequence for 6030468D11Rik (NM_175317.2,1042-1060).
gggaggcacgacattcaga

SEQ ID NO: 477270 - DNA, 19 bp, Mus musculus
  siRNA target sequence for 6030468D11Rik (NM_175317.2,1061-1079).
ccctaaagtccagatcaat

SEQ ID NO: 477271 - DNA, 19 bp, Mus musculus
  siRNA target sequence for 6030468D11Rik (NM_175317.2,1121-1139).
cgctatggtgtgtcacaaa

SEQ ID NO: 477272 - DNA, 19 bp, Mus musculus
  siRNA target sequence for 6030468D11Rik (NM_175317.2,1162-1180).
cgtcggagcgagtagagaa

SEQ ID NO: 477273 - DNA, 19 bp, Mus musculus
  siRNA target sequence for 6030468D11Rik (NM_175317.2,1163-1181).
gtcggagcgagtagagaaa

SEQ ID NO: 477274 - DNA, 19 bp, Mus musculus
  siRNA target sequence for 6030468D11Rik (NM_175317.2,1165-1183).
cggagcgagtagagaaact

SEQ ID NO: 477275 - DNA, 19 bp, Mus musculus
  siRNA target sequence for 6030468D11Rik (NM_175317.2,1194-1212).
ggatcccagacgtttgagt

SEQ ID NO: 477276 - DNA, 19 bp, Mus musculus
  siRNA target sequence for 6030468D11Rik (NM_175317.2,1233-1251).
gccctgaaagcagctttta

SEQ ID NO: 477277 - DNA, 19 bp, Mus musculus
  siRNA target sequence for 6030468D11Rik (NM_175317.2,1269-1287).
gatactgctccagttatta

SEQ ID NO: 477278 - DNA, 19 bp, Mus musculus
  siRNA target sequence for 6030468D11Rik (NM_175317.2,1471-1489).
caagtccccatgaagatga

SEQ ID NO: 477279 - DNA, 19 bp, Mus musculus
  siRNA target sequence for 6030468D11Rik (NM_175317.2,1562-1580).
ggccttcatcgcatttgct

SEQ ID NO: 477280 - DNA, 19 bp, Mus musculus
  siRNA target sequence for 6030468D11Rik (NM_175317.2,1606-1624).
gaggaaagaaaattttcgt

SEQ ID NO: 477281 - DNA, 19 bp, Mus musculus
  siRNA target sequence for 6030468D11Rik (NM_175317.2,1642-1660).
gccctgttgattttttaca

SEQ ID NO: 477282 - DNA, 19 bp, Mus musculus
  siRNA target sequence for 6030468D11Rik (NM_175317.2,1830-1848).
ctaaaatctgcaactttgt

SEQ ID NO: 477283 - DNA, 19 bp, Mus musculus
  siRNA target sequence for 6030468D11Rik (NM_175317.2,1870-1888).
cgtttattcccctcaactt

SEQ ID NO: 477284 - DNA, 19 bp, Mus musculus
  siRNA target sequence for 6030468D11Rik (NM_175317.2,1890-1908).
gaagccaccccgattgtga

SEQ ID NO: 477285 - DNA, 19 bp, Mus musculus
  siRNA target sequence for 6030468D11Rik (NM_175317.2,1945-1963).
ctcagcttgtgaaaggaat

SEQ ID NO: 477286 - DNA, 19 bp, Mus musculus
  siRNA target sequence for 6030468D11Rik (NM_175317.2,2051-2069).
ccttcagcgatgtttggat

SEQ ID NO: 477287 - DNA, 19 bp, Mus musculus
  siRNA target sequence for 6030468D11Rik (NM_175317.2,2057-2075).
gcgatgtttggatgactta

SEQ ID NO: 477288 - DNA, 19 bp, Mus musculus
  siRNA target sequence for 6030468D11Rik (NM_175317.2,2093-2111).
gatccacatcagtgtatct

SEQ ID NO: 477289 - DNA, 19 bp, Mus musculus
  siRNA target sequence for 6030468D11Rik (NM_175317.2,2189-2207).
gcaaaaagttgctgtcata

SEQ ID NO: 477290 - DNA, 19 bp, Mus musculus
  siRNA target sequence for 6030468D11Rik (NM_175317.2,2276-2294).
cataccgactcccaacaaa

SEQ ID NO: 477291 - DNA, 19 bp, Mus musculus
  siRNA target sequence for 6030468D11Rik (NM_175317.2,2398-2416).
ccttgaacgagggtagaaa

SEQ ID NO: 477292 - DNA, 19 bp, Mus musculus
  siRNA target sequence for 6030468D11Rik (NM_175317.2,2399-2417).
cttgaacgagggtagaaat

SEQ ID NO: 477293 - DNA, 19 bp, Mus musculus
  siRNA target sequence for 6030468D11Rik (NM_175317.2,2419-2437).
cccaagccattcatcagaa

SEQ ID NO: 477294 - DNA, 19 bp, Mus musculus
  siRNA target sequence for 6030468D11Rik (NM_175317.2,2456-2474).
ggaattcaaaggaaagcta

SEQ ID NO: 477295 - DNA, 19 bp, Mus musculus
  siRNA target sequence for 6030468D11Rik (NM_175317.2,2525-2543).
gtcatttggcccaaggaaa

SEQ ID NO: 477296 - DNA, 19 bp, Mus musculus
  siRNA target sequence for 6030468D11Rik (NM_175317.2,2630-2648).
cagcagattccgagacttt

SEQ ID NO: 477297 - DNA, 19 bp, Mus musculus
  siRNA target sequence for 6030468D11Rik (NM_175317.2,2640-2658).
cgagactttggcaatagca

SEQ ID NO: 477298 - DNA, 19 bp, Mus musculus
  siRNA target sequence for 6030468D11Rik (NM_175317.2,2820-2838).
caggggggaggtaaaacct

SEQ ID NO: 477299 - DNA, 19 bp, Mus musculus
  siRNA target sequence for 6030468D11Rik (NM_175317.2,2837-2855).
ctgtcacgttggagatgaa

SEQ ID NO: 477300 - DNA, 19 bp, Mus musculus
  siRNA target sequence for 6030468D11Rik (NM_175317.2,2843-2861).
cgttggagatgaaaaccaa

SEQ ID NO: 477301 - DNA, 19 bp, Mus musculus
  siRNA target sequence for 6030468D11Rik (NM_175317.2,2876-2894).
ctgctcggagccctttgaa

SEQ ID NO: 477302 - DNA, 19 bp, Mus musculus
  siRNA target sequence for 6030468D11Rik (NM_175317.2,2878-2896).
gctcggagccctttgaaga

SEQ ID NO: 477303 - DNA, 19 bp, Mus musculus
  siRNA target sequence for 6030468D11Rik (NM_175317.2,2911-2929).
gagactctccggttattga

SEQ ID NO: 477304 - DNA, 19 bp, Mus musculus
  siRNA target sequence for 6030468D11Rik (NM_175317.2,2941-2959).
ccttctccgggcagctaat

SEQ ID NO: 477305 - DNA, 19 bp, Mus musculus
  siRNA target sequence for 6030468D11Rik (NM_175317.2,2942-2960).
cttctccgggcagctaatt

SEQ ID NO: 477306 - DNA, 19 bp, Mus musculus
  siRNA target sequence for 6030468D11Rik (NM_175317.2,2945-2963).
ctccgggcagctaattgct

SEQ ID NO: 477307 - DNA, 19 bp, Mus musculus
  siRNA target sequence for 6030468D11Rik (NM_175317.2,3010-3028).
gcctgatggcagctatgta

SEQ ID NO: 477308 - DNA, 19 bp, Mus musculus
  siRNA target sequence for 6030468D11Rik (NM_175317.2,3126-3144).
gggacggacatgttcatca

SEQ ID NO: 477309 - DNA, 19 bp, Mus musculus
  siRNA target sequence for 6030468D11Rik (NM_175317.2,3370-3388).
gcctctatgtggaagaaaa

SEQ ID NO: 477310 - DNA, 19 bp, Mus musculus
  siRNA target sequence for A930009M04Rik (NM_177266.3,145-163).
ctttcagtgtgcaccttaa

SEQ ID NO: 477311 - DNA, 19 bp, Mus musculus
  siRNA target sequence for A930009M04Rik (NM_177266.3,151-169).
gtgtgcaccttaataccat

SEQ ID NO: 477312 - DNA, 19 bp, Mus musculus
  siRNA target sequence for A930009M04Rik (NM_177266.3,166-184).
ccatgtgttactgcaaaat

SEQ ID NO: 477313 - DNA, 19 bp, Mus musculus
  siRNA target sequence for A930009M04Rik (NM_177266.3,291-309).
cctgtggccaaaattcgta

SEQ ID NO: 477314 - DNA, 19 bp, Mus musculus
  siRNA target sequence for A930009M04Rik (NM_177266.3,292-310).
ctgtggccaaaattcgtaa

SEQ ID NO: 477315 - DNA, 19 bp, Mus musculus
  siRNA target sequence for A930009M04Rik (NM_177266.3,294-312).
gtggccaaaattcgtaata

SEQ ID NO: 477316 - DNA, 19 bp, Mus musculus
  siRNA target sequence for A930009M04Rik (NM_177266.3,296-314).
ggccaaaattcgtaatatt

SEQ ID NO: 477317 - DNA, 19 bp, Mus musculus
  siRNA target sequence for A930009M04Rik (NM_177266.3,299-317).
caaaattcgtaatattgga

SEQ ID NO: 477318 - DNA, 19 bp, Mus musculus
  siRNA target sequence for A930009M04Rik (NM_177266.3,316-334).
gaattatggcacatattga

SEQ ID NO: 477319 - DNA, 19 bp, Mus musculus
  siRNA target sequence for A930009M04Rik (NM_177266.3,368-386).
gtactattctggatacaca

SEQ ID NO: 477320 - DNA, 19 bp, Mus musculus
  siRNA target sequence for A930009M04Rik (NM_177266.3,376-394).
ctggatacacaagatcatt

SEQ ID NO: 477321 - DNA, 19 bp, Mus musculus
  siRNA target sequence for A930009M04Rik (NM_177266.3,414-432).
gacacagtgacggatttca

SEQ ID NO: 477322 - DNA, 19 bp, Mus musculus
  siRNA target sequence for A930009M04Rik (NM_177266.3,491-509).
gaaagggtatagagtcaat

SEQ ID NO: 477323 - DNA, 19 bp, Mus musculus
  siRNA target sequence for A930009M04Rik (NM_177266.3,496-514).
ggtatagagtcaatctgat

SEQ ID NO: 477324 - DNA, 19 bp, Mus musculus
  siRNA target sequence for A930009M04Rik (NM_177266.3,520-538).
ctccaggtcacgtagactt

SEQ ID NO: 477325 - DNA, 19 bp, Mus musculus
  siRNA target sequence for A930009M04Rik (NM_177266.3,577-595).
gtgcggtggccgtgtttga

SEQ ID NO: 477326 - DNA, 19 bp, Mus musculus
  siRNA target sequence for A930009M04Rik (NM_177266.3,798-816).
gtggtggatgtcgtaaaca

SEQ ID NO: 477327 - DNA, 19 bp, Mus musculus
  siRNA target sequence for A930009M04Rik (NM_177266.3,800-818).
ggtggatgtcgtaaacaaa

SEQ ID NO: 477328 - DNA, 19 bp, Mus musculus
  siRNA target sequence for A930009M04Rik (NM_177266.3,844-862).
ctgacgatggaaaagactt

SEQ ID NO: 477329 - DNA, 19 bp, Mus musculus
  siRNA target sequence for A930009M04Rik (NM_177266.3,922-940).
caaggaactccttaattga

SEQ ID NO: 477330 - DNA, 19 bp, Mus musculus
  siRNA target sequence for A930009M04Rik (NM_177266.3,925-943).
ggaactccttaattgaaca

SEQ ID NO: 477331 - DNA, 19 bp, Mus musculus
  siRNA target sequence for A930009M04Rik (NM_177266.3,929-947).
ctccttaattgaacaagtt

SEQ ID NO: 477332 - DNA, 19 bp, Mus musculus
  siRNA target sequence for A930009M04Rik (NM_177266.3,1245-1263).
gttttcctgcgcatttact

SEQ ID NO: 477333 - DNA, 19 bp, Mus musculus
  siRNA target sequence for A930009M04Rik (NM_177266.3,1290-1308).
gtccacaacattaatagaa

SEQ ID NO: 477334 - DNA, 19 bp, Mus musculus
  siRNA target sequence for A930009M04Rik (NM_177266.3,1306-1324).
gaaactgcacggaaagaat

SEQ ID NO: 477335 - DNA, 19 bp, Mus musculus
  siRNA target sequence for A930009M04Rik (NM_177266.3,1310-1328).
ctgcacggaaagaatgagt

SEQ ID NO: 477336 - DNA, 19 bp, Mus musculus
  siRNA target sequence for A930009M04Rik (NM_177266.3,1348-1366).
ctgaccaacatgtagaaat

SEQ ID NO: 477337 - DNA, 19 bp, Mus musculus
  siRNA target sequence for A930009M04Rik (NM_177266.3,1397-1415).
gacagttgggcttaaacaa

SEQ ID NO: 477338 - DNA, 19 bp, Mus musculus
  siRNA target sequence for A930009M04Rik (NM_177266.3,1445-1463).
caagtccagcgcattagct

SEQ ID NO: 477339 - DNA, 19 bp, Mus musculus
  siRNA target sequence for A930009M04Rik (NM_177266.3,1632-1650).
cgcgaagatcccagtttga

SEQ ID NO: 477340 - DNA, 19 bp, Mus musculus
  siRNA target sequence for A930009M04Rik (NM_177266.3,1633-1651).
gcgaagatcccagtttgaa

SEQ ID NO: 477341 - DNA, 19 bp, Mus musculus
  siRNA target sequence for A930009M04Rik (NM_177266.3,1634-1652).
cgaagatcccagtttgaaa

SEQ ID NO: 477342 - DNA, 19 bp, Mus musculus
  siRNA target sequence for A930009M04Rik (NM_177266.3,1638-1656).
gatcccagtttgaaagtga

SEQ ID NO: 477343 - DNA, 19 bp, Mus musculus
  siRNA target sequence for A930009M04Rik (NM_177266.3,1692-1710).
ggaatgggggagttgcata

SEQ ID NO: 477344 - DNA, 19 bp, Mus musculus
  siRNA target sequence for A930009M04Rik (NM_177266.3,1693-1711).
gaatgggggagttgcatat

SEQ ID NO: 477345 - DNA, 19 bp, Mus musculus
  siRNA target sequence for A930009M04Rik (NM_177266.3,1698-1716).
ggggagttgcatattgaga

SEQ ID NO: 477346 - DNA, 19 bp, Mus musculus
  siRNA target sequence for A930009M04Rik (NM_177266.3,1700-1718).
ggagttgcatattgagatt

SEQ ID NO: 477347 - DNA, 19 bp, Mus musculus
  siRNA target sequence for A930009M04Rik (NM_177266.3,1701-1719).
gagttgcatattgagatta

SEQ ID NO: 477348 - DNA, 19 bp, Mus musculus
  siRNA target sequence for A930009M04Rik (NM_177266.3,1703-1721).
gttgcatattgagattatt

SEQ ID NO: 477349 - DNA, 19 bp, Mus musculus
  siRNA target sequence for A930009M04Rik (NM_177266.3,1785-1803).
cgggaaaccatcttaaact

SEQ ID NO: 477350 - DNA, 19 bp, Mus musculus
  siRNA target sequence for A930009M04Rik (NM_177266.3,1952-1970).
ctctcgggaggccattgaa

SEQ ID NO: 477351 - DNA, 19 bp, Mus musculus
  siRNA target sequence for A930009M04Rik (NM_177266.3,2201-2219).
ggcagacttggcacaaaga

SEQ ID NO: 477352 - DNA, 19 bp, Mus musculus
  siRNA target sequence for A930009M04Rik (NM_177266.3,2202-2220).
gcagacttggcacaaagaa

SEQ ID NO: 477353 - DNA, 19 bp, Mus musculus
  siRNA target sequence for A930009M04Rik (NM_177266.3,2276-2294).
cgttcctctagcagagatt

SEQ ID NO: 477354 - DNA, 19 bp, Mus musculus
  siRNA target sequence for A930009M04Rik (NM_177266.3,2286-2304).
gcagagattatgggatatt

SEQ ID NO: 477355 - DNA, 19 bp, Mus musculus
  siRNA target sequence for A930009M04Rik (NM_177266.3,2289-2307).
gagattatgggatattcaa

SEQ ID NO: 477356 - DNA, 19 bp, Mus musculus
  siRNA target sequence for A930009M04Rik (NM_177266.3,2346-2364).
gccttagaactgtctactt

SEQ ID NO: 477357 - DNA, 19 bp, Mus musculus
  siRNA target sequence for A930009M04Rik (NM_177266.3,2347-2365).
ccttagaactgtctactta

SEQ ID NO: 477358 - DNA, 19 bp, Mus musculus
  siRNA target sequence for A930009M04Rik (NM_177266.3,2348-2366).
cttagaactgtctacttat

SEQ ID NO: 477359 - DNA, 19 bp, Mus musculus
  siRNA target sequence for AA407526 (NM_172711.1,206-224).
gagaaacctgacatgtcta

SEQ ID NO: 477360 - DNA, 19 bp, Mus musculus
  siRNA target sequence for AA407526 (NM_172711.1,307-325).
ggagctaacaggaacaatt

SEQ ID NO: 477361 - DNA, 19 bp, Mus musculus
  siRNA target sequence for AA407526 (NM_172711.1,310-328).
gctaacaggaacaattgat

SEQ ID NO: 477362 - DNA, 19 bp, Mus musculus
  siRNA target sequence for AA407526 (NM_172711.1,311-329).
ctaacaggaacaattgata

SEQ ID NO: 477363 - DNA, 19 bp, Mus musculus
  siRNA target sequence for AA407526 (NM_172711.1,326-344).
gataagacgaagaaaaaca

SEQ ID NO: 477364 - DNA, 19 bp, Mus musculus
  siRNA target sequence for AA407526 (NM_172711.1,349-367).
ggttcttgataaattacaa

SEQ ID NO: 477365 - DNA, 19 bp, Mus musculus
  siRNA target sequence for AA407526 (NM_172711.1,472-490).
cgttgattttagttatgaa

SEQ ID NO: 477366 - DNA, 19 bp, Mus musculus
  siRNA target sequence for AA407526 (NM_172711.1,510-528).
catgccaaggtgttttact

SEQ ID NO: 477367 - DNA, 19 bp, Mus musculus
  siRNA target sequence for AA407526 (NM_172711.1,547-565).
gggtattcaagctcaaact

SEQ ID NO: 477368 - DNA, 19 bp, Mus musculus
  siRNA target sequence for AA407526 (NM_172711.1,605-623).
gtaattccagttatcaata

SEQ ID NO: 477369 - DNA, 19 bp, Mus musculus
  siRNA target sequence for AA407526 (NM_172711.1,654-672).
gggtgggaaagcagattga

SEQ ID NO: 477370 - DNA, 19 bp, Mus musculus
  siRNA target sequence for AA407526 (NM_172711.1,655-673).
ggtgggaaagcagattgaa

SEQ ID NO: 477371 - DNA, 19 bp, Mus musculus
  siRNA target sequence for AA407526 (NM_172711.1,688-706).
ccctagtgaggagtgtatt

SEQ ID NO: 477372 - DNA, 19 bp, Mus musculus
  siRNA target sequence for AA407526 (NM_172711.1,689-707).
cctagtgaggagtgtatta

SEQ ID NO: 477373 - DNA, 19 bp, Mus musculus
  siRNA target sequence for AA407526 (NM_172711.1,690-708).
ctagtgaggagtgtattaa

SEQ ID NO: 477374 - DNA, 19 bp, Mus musculus
  siRNA target sequence for AA407526 (NM_172711.1,695-713).
gaggagtgtattaagattt

SEQ ID NO: 477375 - DNA, 19 bp, Mus musculus
  siRNA target sequence for AA407526 (NM_172711.1,745-763).
gcttcaggcagtcattgaa

SEQ ID NO: 477376 - DNA, 19 bp, Mus musculus
  siRNA target sequence for AA407526 (NM_172711.1,751-769).
ggcagtcattgaacgaata

SEQ ID NO: 477377 - DNA, 19 bp, Mus musculus
  siRNA target sequence for AA407526 (NM_172711.1,840-858).
gaggggtgatagccaatat

SEQ ID NO: 477378 - DNA, 19 bp, Mus musculus
  siRNA target sequence for AA407526 (NM_172711.1,844-862).
ggtgatagccaatatagca

SEQ ID NO: 477379 - DNA, 19 bp, Mus musculus
  siRNA target sequence for AA407526 (NM_172711.1,852-870).
ccaatatagcactgtttga

SEQ ID NO: 477380 - DNA, 19 bp, Mus musculus
  siRNA target sequence for AA407526 (NM_172711.1,853-871).
caatatagcactgtttgat

SEQ ID NO: 477381 - DNA, 19 bp, Mus musculus
  siRNA target sequence for AA407526 (NM_172711.1,877-895).
ggtttccaagggagataaa

SEQ ID NO: 477382 - DNA, 19 bp, Mus musculus
  siRNA target sequence for AA407526 (NM_172711.1,882-900).
ccaagggagataaaattgt

SEQ ID NO: 477383 - DNA, 19 bp, Mus musculus
  siRNA target sequence for AA407526 (NM_172711.1,886-904).
gggagataaaattgtatct

SEQ ID NO: 477384 - DNA, 19 bp, Mus musculus
  siRNA target sequence for AA407526 (NM_172711.1,899-917).
gtatctgcacatactaaaa

SEQ ID NO: 477385 - DNA, 19 bp, Mus musculus
  siRNA target sequence for AA407526 (NM_172711.1,905-923).
gcacatactaaaaaagcat

SEQ ID NO: 477386 - DNA, 19 bp, Mus musculus
  siRNA target sequence for AA407526 (NM_172711.1,906-924).
cacatactaaaaaagcata

SEQ ID NO: 477387 - DNA, 19 bp, Mus musculus
  siRNA target sequence for AA407526 (NM_172711.1,921-939).
catatgaagtcaatgaagt

SEQ ID NO: 477388 - DNA, 19 bp, Mus musculus
  siRNA target sequence for AA407526 (NM_172711.1,964-982).
gccaactcataaattatat

SEQ ID NO: 477389 - DNA, 19 bp, Mus musculus
  siRNA target sequence for AA407526 (NM_172711.1,1024-1042).
cactgaagcacaaatagga

SEQ ID NO: 477390 - DNA, 19 bp, Mus musculus
  siRNA target sequence for AA407526 (NM_172711.1,1041-1059).
gagacacattatatttaca

SEQ ID NO: 477391 - DNA, 19 bp, Mus musculus
  siRNA target sequence for AA407526 (NM_172711.1,1076-1094).
cccttgcctgggtttaaat

SEQ ID NO: 477392 - DNA, 19 bp, Mus musculus
  siRNA target sequence for AA407526 (NM_172711.1,1116-1134).
caggagtgtaccctataga

SEQ ID NO: 477393 - DNA, 19 bp, Mus musculus
  siRNA target sequence for AA407526 (NM_172711.1,1133-1151).
gaccaatctgagtacaata

SEQ ID NO: 477394 - DNA, 19 bp, Mus musculus
  siRNA target sequence for AA407526 (NM_172711.1,1180-1198).
cttaaatgactcaagtgta

SEQ ID NO: 477395 - DNA, 19 bp, Mus musculus
  siRNA target sequence for AA407526 (NM_172711.1,1283-1301).
cagcgattagagcaagaat

SEQ ID NO: 477396 - DNA, 19 bp, Mus musculus
  siRNA target sequence for AA407526 (NM_172711.1,1285-1303).
gcgattagagcaagaatat

SEQ ID NO: 477397 - DNA, 19 bp, Mus musculus
  siRNA target sequence for AA407526 (NM_172711.1,1286-1304).
cgattagagcaagaatata

SEQ ID NO: 477398 - DNA, 19 bp, Mus musculus
  siRNA target sequence for AA407526 (NM_172711.1,1306-1324).
cgcttctgtcattttgaca

SEQ ID NO: 477399 - DNA, 19 bp, Mus musculus
  siRNA target sequence for AA407526 (NM_172711.1,1326-1344).
ccccaactgttccatacaa

SEQ ID NO: 477400 - DNA, 19 bp, Mus musculus
  siRNA target sequence for AA407526 (NM_172711.1,1327-1345).
cccaactgttccatacaaa

SEQ ID NO: 477401 - DNA, 19 bp, Mus musculus
  siRNA target sequence for AA407526 (NM_172711.1,1421-1439).
cctgagaagtcccaagtaa

SEQ ID NO: 477402 - DNA, 19 bp, Mus musculus
  siRNA target sequence for AA407526 (NM_172711.1,1426-1444).
gaagtcccaagtaacagaa

SEQ ID NO: 477403 - DNA, 19 bp, Mus musculus
  siRNA target sequence for AA407526 (NM_172711.1,1429-1447).
gtcccaagtaacagaatat

SEQ ID NO: 477404 - DNA, 19 bp, Mus musculus
  siRNA target sequence for AA407526 (NM_172711.1,1457-1475).
gttgttttgggcactgtta

SEQ ID NO: 477405 - DNA, 19 bp, Mus musculus
  siRNA target sequence for AA407526 (NM_172711.1,1559-1577).
gaaaatagagttatgctta

SEQ ID NO: 477406 - DNA, 19 bp, Mus musculus
  siRNA target sequence for AA407526 (NM_172711.1,1643-1661).
ggatatgcaagttttgatt

SEQ ID NO: 477407 - DNA, 19 bp, Mus musculus
  siRNA target sequence for AA407526 (NM_172711.1,1686-1704).
cagaactcgttaaaatgga

SEQ ID NO: 477408 - DNA, 19 bp, Mus musculus
  siRNA target sequence for AA407526 (NM_172711.1,1703-1721).
gatattctgctgaatggaa

SEQ ID NO: 477409 - DNA, 19 bp, Mus musculus
  siRNA target sequence for AA407526 (NM_172711.1,1726-1744).
ggtggaagagcttgtaact

SEQ ID NO: 477410 - DNA, 19 bp, Mus musculus
  siRNA target sequence for AA407526 (NM_172711.1,1768-1786).
cactgttggcaaaagcata

SEQ ID NO: 477411 - DNA, 19 bp, Mus musculus
  siRNA target sequence for AA407526 (NM_172711.1,1811-1829).
cccagacaactgtatgaga

SEQ ID NO: 477412 - DNA, 19 bp, Mus musculus
  siRNA target sequence for AA407526 (NM_172711.1,1844-1862).
gctgttgggagcaaagtta

SEQ ID NO: 477413 - DNA, 19 bp, Mus musculus
  siRNA target sequence for AA407526 (NM_172711.1,1850-1868).
gggagcaaagttattgcaa

SEQ ID NO: 477414 - DNA, 19 bp, Mus musculus
  siRNA target sequence for AA407526 (NM_172711.1,1875-1893).
cagtgaaagcctacagaaa

SEQ ID NO: 477415 - DNA, 19 bp, Mus musculus
  siRNA target sequence for AA407526 (NM_172711.1,1883-1901).
gcctacagaaaaaatgttt

SEQ ID NO: 477416 - DNA, 19 bp, Mus musculus
  siRNA target sequence for AA407526 (NM_172711.1,1978-1996).
gaggaagattggcaacatt

SEQ ID NO: 477417 - DNA, 19 bp, Mus musculus
  siRNA target sequence for AA407526 (NM_172711.1,1984-2002).
gattggcaacattgagatt

SEQ ID NO: 477418 - DNA, 19 bp, Mus musculus
  siRNA target sequence for AA407526 (NM_172711.1,1988-2006).
ggcaacattgagattccaa

SEQ ID NO: 477419 - DNA, 19 bp, Mus musculus
  siRNA target sequence for AA407526 (NM_172711.1,1989-2007).
gcaacattgagattccaaa

SEQ ID NO: 477420 - DNA, 19 bp, Mus musculus
  siRNA target sequence for AA407526 (NM_172711.1,2003-2021).
ccaaaagacgctttcataa

SEQ ID NO: 477421 - DNA, 19 bp, Mus musculus
  siRNA target sequence for AA407526 (NM_172711.1,2027-2045).
ctgaaaacccagcctaata

SEQ ID NO: 477422 - DNA, 19 bp, Mus musculus
  siRNA target sequence for AA407526 (NM_172711.1,2029-2047).
gaaaacccagcctaataaa

SEQ ID NO: 477423 - DNA, 19 bp, Mus musculus
  siRNA target sequence for AA407526 (NM_182768.1,684-702).
cccactgaaagctttggta

SEQ ID NO: 477424 - DNA, 19 bp, Mus musculus
  siRNA target sequence for AA407526 (NM_182768.1,852-870).
gccaactcataaattgagt

SEQ ID NO: 477425 - DNA, 19 bp, Mus musculus
  siRNA target sequence for Eef1a2 (NM_007906.2,435-453).
cgacaggccacctcatcta

SEQ ID NO: 477426 - DNA, 19 bp, Mus musculus
  siRNA target sequence for Eef1a2 (NM_007906.2,652-670).
ccgagacttcatcaagaat

SEQ ID NO: 477427 - DNA, 19 bp, Mus musculus
  siRNA target sequence for Eef1a2 (NM_007906.2,653-671).
cgagacttcatcaagaata

SEQ ID NO: 477428 - DNA, 19 bp, Mus musculus
  siRNA target sequence for Eef1a2 (NM_007906.2,720-738).
ccggtgtgggcgagtttga

SEQ ID NO: 477429 - DNA, 19 bp, Mus musculus
  siRNA target sequence for Eef1a2 (NM_007906.2,859-877).
gaagcgctatgatgagatt

SEQ ID NO: 477430 - DNA, 19 bp, Mus musculus
  siRNA target sequence for Eef1a2 (NM_007906.2,862-880).
gcgctatgatgagattgtt

SEQ ID NO: 477431 - DNA, 19 bp, Mus musculus
  siRNA target sequence for Eef1a2 (NM_007906.2,863-881).
cgctatgatgagattgtta

SEQ ID NO: 477432 - DNA, 19 bp, Mus musculus
  siRNA target sequence for Eef1a2 (NM_007906.2,884-902).
gaggtcagcgcctacatca

SEQ ID NO: 477433 - DNA, 19 bp, Mus musculus
  siRNA target sequence for Eef1a2 (NM_007906.2,891-909).
gcgcctacatcaagaagat

SEQ ID NO: 477434 - DNA, 19 bp, Mus musculus
  siRNA target sequence for Eef1a2 (NM_007906.2,970-988).
gctggagccttcacctaat

SEQ ID NO: 477435 - DNA, 19 bp, Mus musculus
  siRNA target sequence for Eef1a2 (NM_007906.2,971-989).
ctggagccttcacctaata

SEQ ID NO: 477436 - DNA, 19 bp, Mus musculus
  siRNA target sequence for Eef1a2 (NM_007906.2,1667-1685).
gccgtgggcgtcatcaaga

SEQ ID NO: 477437 - DNA, 19 bp, Mus musculus
  siRNA target sequence for Eef1a2 (NM_007906.2,1668-1686).
ccgtgggcgtcatcaagaa

SEQ ID NO: 477438 - DNA, 19 bp, Mus musculus
  siRNA target sequence for Eef1b2 (NM_018796.2,127-145).
ctccaggtgctcaacgatt

SEQ ID NO: 477439 - DNA, 19 bp, Mus musculus
  siRNA target sequence for Eef1b2 (NM_018796.2,191-209).
cagacgtggcagtatttga

SEQ ID NO: 477440 - DNA, 19 bp, Mus musculus
  siRNA target sequence for Eef1b2 (NM_018796.2,244-262).
catgccctacgttggtata

SEQ ID NO: 477441 - DNA, 19 bp, Mus musculus
  siRNA target sequence for Eef1b2 (NM_018796.2,248-266).
ccctacgttggtataatca

SEQ ID NO: 477442 - DNA, 19 bp, Mus musculus
  siRNA target sequence for Eef1b2 (NM_018796.2,250-268).
ctacgttggtataatcaca

SEQ ID NO: 477443 - DNA, 19 bp, Mus musculus
  siRNA target sequence for Eef1b2 (NM_018796.2,254-272).
gttggtataatcacatcaa

SEQ ID NO: 477444 - DNA, 19 bp, Mus musculus
  siRNA target sequence for Eef1b2 (NM_018796.2,265-283).
cacatcaagtcgtatgaaa

SEQ ID NO: 477445 - DNA, 19 bp, Mus musculus
  siRNA target sequence for Eef1b2 (NM_018796.2,296-314).
gcctgccgggagtgaagaa

SEQ ID NO: 477446 - DNA, 19 bp, Mus musculus
  siRNA target sequence for Eef1b2 (NM_018796.2,298-316).
ctgccgggagtgaagaaat

SEQ ID NO: 477447 - DNA, 19 bp, Mus musculus
  siRNA target sequence for Eef1b2 (NM_018796.2,301-319).
ccgggagtgaagaaatctt

SEQ ID NO: 477448 - DNA, 19 bp, Mus musculus
  siRNA target sequence for Eef1b2 (NM_018796.2,302-320).
cgggagtgaagaaatcttt

SEQ ID NO: 477449 - DNA, 19 bp, Mus musculus
  siRNA target sequence for Eef1b2 (NM_018796.2,312-330).
gaaatctttgggcaagtat

SEQ ID NO: 477450 - DNA, 19 bp, Mus musculus
  siRNA target sequence for Eef1b2 (NM_018796.2,457-475).
cgccttgcacagtatgagt

SEQ ID NO: 477451 - DNA, 19 bp, Mus musculus
  siRNA target sequence for Eef1b2 (NM_018796.2,496-514).
gcagttgttgcgaagtctt

SEQ ID NO: 477452 - DNA, 19 bp, Mus musculus
  siRNA target sequence for Eef1b2 (NM_018796.2,544-562).
gatgagacggacatgacaa

SEQ ID NO: 477453 - DNA, 19 bp, Mus musculus
  siRNA target sequence for Eef1b2 (NM_018796.2,549-567).
gacggacatgacaaaacta

SEQ ID NO: 477454 - DNA, 19 bp, Mus musculus
  siRNA target sequence for Eef1b2 (NM_018796.2,551-569).
cggacatgacaaaactaga

SEQ ID NO: 477455 - DNA, 19 bp, Mus musculus
  siRNA target sequence for Eef1b2 (NM_018796.2,570-588).
ggagtgtgtccgaagcatt

SEQ ID NO: 477456 - DNA, 19 bp, Mus musculus
  siRNA target sequence for Eef1b2 (NM_018796.2,573-591).
gtgtgtccgaagcattcaa

SEQ ID NO: 477457 - DNA, 19 bp, Mus musculus
  siRNA target sequence for Eef1b2 (NM_018796.2,603-621).
ggtgtggggctcctctaaa

SEQ ID NO: 477458 - DNA, 19 bp, Mus musculus
  siRNA target sequence for Eef1b2 (NM_018796.2,604-622).
gtgtggggctcctctaaat

SEQ ID NO: 477459 - DNA, 19 bp, Mus musculus
  siRNA target sequence for Eef1b2 (NM_018796.2,608-626).
ggggctcctctaaattggt

SEQ ID NO: 477460 - DNA, 19 bp, Mus musculus
  siRNA target sequence for Eef1b2 (NM_018796.2,628-646).
ccagtgggatatggaatta

SEQ ID NO: 477461 - DNA, 19 bp, Mus musculus
  siRNA target sequence for Eef1b2 (NM_018796.2,635-653).
gatatggaattaaaaagct

SEQ ID NO: 477462 - DNA, 19 bp, Mus musculus
  siRNA target sequence for Eef1b2 (NM_018796.2,640-658).
ggaattaaaaagcttcaaa

SEQ ID NO: 477463 - DNA, 19 bp, Mus musculus
  siRNA target sequence for Eef1b2 (NM_018796.2,641-659).
gaattaaaaagcttcaaat

SEQ ID NO: 477464 - DNA, 19 bp, Mus musculus
  siRNA target sequence for Eef1d (NM_023240.1,202-220).
cgtgatcctccgagacatt

SEQ ID NO: 477465 - DNA, 19 bp, Mus musculus
  siRNA target sequence for Eef1e1 (NM_025380.1,99-117).
gcggcagattccagttcta

SEQ ID NO: 477466 - DNA, 19 bp, Mus musculus
  siRNA target sequence for Eef1e1 (NM_025380.1,155-173).
ccatcgccacccatctagt

SEQ ID NO: 477467 - DNA, 19 bp, Mus musculus
  siRNA target sequence for Eef1e1 (NM_025380.1,249-267).
cagggtcactcgagtagat

SEQ ID NO: 477468 - DNA, 19 bp, Mus musculus
  siRNA target sequence for Eef1e1 (NM_025380.1,298-316).
ctgctgaaggatcttaatt

SEQ ID NO: 477469 - DNA, 19 bp, Mus musculus
  siRNA target sequence for Eef1e1 (NM_025380.1,303-321).
gaaggatcttaattcctat

SEQ ID NO: 477470 - DNA, 19 bp, Mus musculus
  siRNA target sequence for Eef1e1 (NM_025380.1,306-324).
ggatcttaattcctatctt

SEQ ID NO: 477471 - DNA, 19 bp, Mus musculus
  siRNA target sequence for Eef1e1 (NM_025380.1,317-335).
cctatcttgaagataaagt

SEQ ID NO: 477472 - DNA, 19 bp, Mus musculus
  siRNA target sequence for Eef1e1 (NM_025380.1,365-383).
cggacatcctgctgtacta

SEQ ID NO: 477473 - DNA, 19 bp, Mus musculus
  siRNA target sequence for Eef1e1 (NM_025380.1,384-402).
cggcctccaccgctttata

SEQ ID NO: 477474 - DNA, 19 bp, Mus musculus
  siRNA target sequence for Eef1e1 (NM_025380.1,386-404).
gcctccaccgctttatagt

SEQ ID NO: 477475 - DNA, 19 bp, Mus musculus
  siRNA target sequence for Eef1e1 (NM_025380.1,387-405).
cctccaccgctttatagtt

SEQ ID NO: 477476 - DNA, 19 bp, Mus musculus
  siRNA target sequence for Eef1e1 (NM_025380.1,449-467).
gctggttttgtcacattca

SEQ ID NO: 477477 - DNA, 19 bp, Mus musculus
  siRNA target sequence for Eef1e1 (NM_025380.1,450-468).
ctggttttgtcacattcaa

SEQ ID NO: 477478 - DNA, 19 bp, Mus musculus
  siRNA target sequence for Eef1e1 (NM_025380.1,452-470).
ggttttgtcacattcaaca

SEQ ID NO: 477479 - DNA, 19 bp, Mus musculus
  siRNA target sequence for Eef1e1 (NM_025380.1,453-471).
gttttgtcacattcaacat

SEQ ID NO: 477480 - DNA, 19 bp, Mus musculus
  siRNA target sequence for Eef1e1 (NM_025380.1,486-504).
gcaacatctgtccagtatt

SEQ ID NO: 477481 - DNA, 19 bp, Mus musculus
  siRNA target sequence for Eef2 (NM_007907.1,885-903).
gccaatggcaagttcagta

SEQ ID NO: 477482 - DNA, 19 bp, Mus musculus
  siRNA target sequence for Eef2 (NM_007907.1,886-904).
ccaatggcaagttcagtaa

SEQ ID NO: 477483 - DNA, 19 bp, Mus musculus
  siRNA target sequence for Eef2 (NM_007907.1,978-996).
gtgttcgacgccatcatga

SEQ ID NO: 477484 - DNA, 19 bp, Mus musculus
  siRNA target sequence for Eef2 (NM_007907.1,984-1002).
gacgccatcatgaacttca

SEQ ID NO: 477485 - DNA, 19 bp, Mus musculus
  siRNA target sequence for Eef2 (NM_007907.1,1248-1266).
cccaaaggcccacttatga

SEQ ID NO: 477486 - DNA, 19 bp, Mus musculus
  siRNA target sequence for Eef2 (NM_007907.1,1249-1267).
ccaaaggcccacttatgat

SEQ ID NO: 477487 - DNA, 19 bp, Mus musculus
  siRNA target sequence for Eef2 (NM_007907.1,1254-1272).
ggcccacttatgatgtaca

SEQ ID NO: 477488 - DNA, 19 bp, Mus musculus
  siRNA target sequence for Eef2 (NM_007907.1,1255-1273).
gcccacttatgatgtacat

SEQ ID NO: 477489 - DNA, 19 bp, Mus musculus
  siRNA target sequence for Eef2 (NM_007907.1,1256-1274).
cccacttatgatgtacatt

SEQ ID NO: 477490 - DNA, 19 bp, Mus musculus
  siRNA target sequence for Eef2 (NM_007907.1,1257-1275).
ccacttatgatgtacattt

SEQ ID NO: 477491 - DNA, 19 bp, Mus musculus
  siRNA target sequence for Eef2 (NM_007907.1,1260-1278).
cttatgatgtacatttcca

SEQ ID NO: 477492 - DNA, 19 bp, Mus musculus
  siRNA target sequence for Eefsec (NM_023060.2,467-485).
gacaggcagcgattgacaa

SEQ ID NO: 477493 - DNA, 19 bp, Mus musculus
  siRNA target sequence for Eefsec (NM_023060.2,469-487).
caggcagcgattgacaaaa

SEQ ID NO: 477494 - DNA, 19 bp, Mus musculus
  siRNA target sequence for Eefsec (NM_023060.2,472-490).
gcagcgattgacaaaatga

SEQ ID NO: 477495 - DNA, 19 bp, Mus musculus
  siRNA target sequence for Eefsec (NM_023060.2,509-527).
ctcttgagaacaccaaatt

SEQ ID NO: 477496 - DNA, 19 bp, Mus musculus
  siRNA target sequence for Eefsec (NM_023060.2,528-546).
ccggggtgcaccgattatt

SEQ ID NO: 477497 - DNA, 19 bp, Mus musculus
  siRNA target sequence for Eefsec (NM_023060.2,657-675).
cccctctggaccattcctt

SEQ ID NO: 477498 - DNA, 19 bp, Mus musculus
  siRNA target sequence for Eefsec (NM_023060.2,1036-1054).
ggtcgcacgctgttcttca

SEQ ID NO: 477499 - DNA, 19 bp, Mus musculus
  siRNA target sequence for Eefsec (NM_023060.2,1132-1150).
cagtacctgtgcaaggatt

SEQ ID NO: 477500 - DNA, 19 bp, Mus musculus
  siRNA target sequence for Eefsec (NM_023060.2,1298-1316).
gactagatgccgacattca

SEQ ID NO: 477501 - DNA, 19 bp, Mus musculus
  siRNA target sequence for Eefsec (NM_023060.2,1300-1318).
ctagatgccgacattcaca

SEQ ID NO: 477502 - DNA, 19 bp, Mus musculus
  siRNA target sequence for Eefsec (NM_023060.2,1397-1415).
cagcactgagggtttacaa

SEQ ID NO: 477503 - DNA, 19 bp, Mus musculus
  siRNA target sequence for Eefsec (NM_023060.2,1471-1489).
ggacgttccctgttcaaaa

SEQ ID NO: 477504 - DNA, 19 bp, Mus musculus
  siRNA target sequence for Eefsec (NM_023060.2,1613-1631).
gccctgagtccaagaagat

SEQ ID NO: 477505 - DNA, 19 bp, Mus musculus
  siRNA target sequence for Gfm (NM_138591.1,246-264).
ggccagttcccaatgaaaa

SEQ ID NO: 477506 - DNA, 19 bp, Mus musculus
  siRNA target sequence for Gfm (NM_138591.1,249-267).
cagttcccaatgaaaaaat

SEQ ID NO: 477507 - DNA, 19 bp, Mus musculus
  siRNA target sequence for Gfm (NM_138591.1,280-298).
gatctcagctcacattgat

SEQ ID NO: 477508 - DNA, 19 bp, Mus musculus
  siRNA target sequence for Gfm (NM_138591.1,283-301).
ctcagctcacattgattct

SEQ ID NO: 477509 - DNA, 19 bp, Mus musculus
  siRNA target sequence for Gfm (NM_138591.1,318-336).
cagaacgggtgctatacta

SEQ ID NO: 477510 - DNA, 19 bp, Mus musculus
  siRNA target sequence for Gfm (NM_138591.1,320-338).
gaacgggtgctatactaca

SEQ ID NO: 477511 - DNA, 19 bp, Mus musculus
  siRNA target sequence for Gfm (NM_138591.1,387-405).
gcgctgtcatggattccat

SEQ ID NO: 477512 - DNA, 19 bp, Mus musculus
  siRNA target sequence for Gfm (NM_138591.1,436-454).
ccagtcagcagctacgtat

SEQ ID NO: 477513 - DNA, 19 bp, Mus musculus
  siRNA target sequence for Gfm (NM_138591.1,437-455).
cagtcagcagctacgtata

SEQ ID NO: 477514 - DNA, 19 bp, Mus musculus
  siRNA target sequence for Gfm (NM_138591.1,441-459).
cagcagctacgtataccat

SEQ ID NO: 477515 - DNA, 19 bp, Mus musculus
  siRNA target sequence for Gfm (NM_138591.1,498-516).
gccacgtggactttaccat

SEQ ID NO: 477516 - DNA, 19 bp, Mus musculus
  siRNA target sequence for Gfm (NM_138591.1,499-517).
ccacgtggactttaccata

SEQ ID NO: 477517 - DNA, 19 bp, Mus musculus
  siRNA target sequence for Gfm (NM_138591.1,502-520).
cgtggactttaccatagaa

SEQ ID NO: 477518 - DNA, 19 bp, Mus musculus
  siRNA target sequence for Gfm (NM_138591.1,600-618).
cagtcagtcgtcagatgaa

SEQ ID NO: 477519 - DNA, 19 bp, Mus musculus
  siRNA target sequence for Gfm (NM_138591.1,621-639).
gctacaacgttcccttttt

SEQ ID NO: 477520 - DNA, 19 bp, Mus musculus
  siRNA target sequence for Gfm (NM_138591.1,622-640).
ctacaacgttcccttttta

SEQ ID NO: 477521 - DNA, 19 bp, Mus musculus
  siRNA target sequence for Gfm (NM_138591.1,685-703).
ggccctccaacaaatgaga

SEQ ID NO: 477522 - DNA, 19 bp, Mus musculus
  siRNA target sequence for Gfm (NM_138591.1,695-713).
caaatgagatctaaactaa

SEQ ID NO: 477523 - DNA, 19 bp, Mus musculus
  siRNA target sequence for Gfm (NM_138591.1,785-803).
gaagaacgagctatttact

SEQ ID NO: 477524 - DNA, 19 bp, Mus musculus
  siRNA target sequence for Gfm (NM_138591.1,810-828).
gagactttggtcagattgt

SEQ ID NO: 477525 - DNA, 19 bp, Mus musculus
  siRNA target sequence for Gfm (NM_138591.1,819-837).
gtcagattgtccgatatga

SEQ ID NO: 477526 - DNA, 19 bp, Mus musculus
  siRNA target sequence for Gfm (NM_138591.1,950-968).
ccctcagtttccgacttaa

SEQ ID NO: 477527 - DNA, 19 bp, Mus musculus
  siRNA target sequence for Gfm (NM_138591.1,999-1017).
gatccttcactcctgtatt

SEQ ID NO: 477528 - DNA, 19 bp, Mus musculus
  siRNA target sequence for Gfm (NM_138591.1,1073-1091).
gaatacctgcccaatccat

SEQ ID NO: 477529 - DNA, 19 bp, Mus musculus
  siRNA target sequence for Gfm (NM_138591.1,1100-1118).
cagaattacgctatactca

SEQ ID NO: 477530 - DNA, 19 bp, Mus musculus
  siRNA target sequence for Gfm (NM_138591.1,1102-1120).
gaattacgctatactcaat

SEQ ID NO: 477531 - DNA, 19 bp, Mus musculus
  siRNA target sequence for Gfm (NM_138591.1,1218-1236).
gttttggacagctgactta

SEQ ID NO: 477532 - DNA, 19 bp, Mus musculus
  siRNA target sequence for Gfm (NM_138591.1,1229-1247).
ctgacttatgtccgaaatt

SEQ ID NO: 477533 - DNA, 19 bp, Mus musculus
  siRNA target sequence for Gfm (NM_138591.1,1231-1249).
gacttatgtccgaaattat

SEQ ID NO: 477534 - DNA, 19 bp, Mus musculus
  siRNA target sequence for Gfm (NM_138591.1,1233-1251).
cttatgtccgaaattatca

SEQ ID NO: 477535 - DNA, 19 bp, Mus musculus
  siRNA target sequence for Gfm (NM_138591.1,1285-1303).
cacgaggaccgggaagaaa

SEQ ID NO: 477536 - DNA, 19 bp, Mus musculus
  siRNA target sequence for Gfm (NM_138591.1,1287-1305).
cgaggaccgggaagaaagt

SEQ ID NO: 477537 - DNA, 19 bp, Mus musculus
  siRNA target sequence for Gfm (NM_138591.1,1401-1419).
gtgcaagtggagatacatt

SEQ ID NO: 477538 - DNA, 19 bp, Mus musculus
  siRNA target sequence for Gfm (NM_138591.1,1446-1464).
ctatggaatcgattcatgt

SEQ ID NO: 477539 - DNA, 19 bp, Mus musculus
  siRNA target sequence for Gfm (NM_138591.1,1473-1491).
ctgtcatttcaatagcaat

SEQ ID NO: 477540 - DNA, 19 bp, Mus musculus
  siRNA target sequence for Gfm (NM_138591.1,1487-1505).
gcaatgaggccttctaaca

SEQ ID NO: 477541 - DNA, 19 bp, Mus musculus
  siRNA target sequence for Gfm (NM_138591.1,1494-1512).
ggccttctaacaagaatga

SEQ ID NO: 477542 - DNA, 19 bp, Mus musculus
  siRNA target sequence for Gfm (NM_138591.1,1550-1568).
cgggaagaccccacattta

SEQ ID NO: 477543 - DNA, 19 bp, Mus musculus
  siRNA target sequence for Gfm (NM_138591.1,1718-1736).
gccccagtgccgtttgatt

SEQ ID NO: 477544 - DNA, 19 bp, Mus musculus
  siRNA target sequence for Gfm (NM_138591.1,1726-1744).
gccgtttgattttacacat

SEQ ID NO: 477545 - DNA, 19 bp, Mus musculus
  siRNA target sequence for Gfm (NM_138591.1,1727-1745).
ccgtttgattttacacata

SEQ ID NO: 477546 - DNA, 19 bp, Mus musculus
  siRNA target sequence for Gfm (NM_138591.1,1728-1746).
cgtttgattttacacataa

SEQ ID NO: 477547 - DNA, 19 bp, Mus musculus
  siRNA target sequence for Gfm (NM_138591.1,1729-1747).
gtttgattttacacataaa

SEQ ID NO: 477548 - DNA, 19 bp, Mus musculus
  siRNA target sequence for Gfm (NM_138591.1,1768-1786).
ccagtttggaaaagtaata

SEQ ID NO: 477549 - DNA, 19 bp, Mus musculus
  siRNA target sequence for Gfm (NM_138591.1,1843-1861).
gacatttgggtccaatgtt

SEQ ID NO: 477550 - DNA, 19 bp, Mus musculus
  siRNA target sequence for Gfm (NM_138591.1,1870-1888).
gtttgtccccgctgttgaa

SEQ ID NO: 477551 - DNA, 19 bp, Mus musculus
  siRNA target sequence for Gfm (NM_138591.1,1909-1927).
cgaaaaaggccctctttct

SEQ ID NO: 477552 - DNA, 19 bp, Mus musculus
  siRNA target sequence for Gfm (NM_138591.1,1941-1959).
ctgggctacggtttgttct

SEQ ID NO: 477553 - DNA, 19 bp, Mus musculus
  siRNA target sequence for Gfm (NM_138591.1,1975-1993).
ccacatggttgattcgaat

SEQ ID NO: 477554 - DNA, 19 bp, Mus musculus
  siRNA target sequence for Gfm (NM_138591.1,1982-2000).
gttgattcgaatgaaatct

SEQ ID NO: 477555 - DNA, 19 bp, Mus musculus
  siRNA target sequence for Gfm (NM_138591.1,1989-2007).
cgaatgaaatctctttcat

SEQ ID NO: 477556 - DNA, 19 bp, Mus musculus
  siRNA target sequence for Gfm (NM_138591.1,2042-2060).
gcaaatggcacactatgta

SEQ ID NO: 477557 - DNA, 19 bp, Mus musculus
  siRNA target sequence for Gfm (NM_138591.1,2043-2061).
caaatggcacactatgtat

SEQ ID NO: 477558 - DNA, 19 bp, Mus musculus
  siRNA target sequence for Gfm (NM_138591.1,2049-2067).
gcacactatgtattattga

SEQ ID NO: 477559 - DNA, 19 bp, Mus musculus
  siRNA target sequence for Gfm (NM_138591.1,2058-2076).
gtattattgagcctattat

SEQ ID NO: 477560 - DNA, 19 bp, Mus musculus
  siRNA target sequence for Gfm (NM_138591.1,2087-2105).
gttatagcccccaatgaat

SEQ ID NO: 477561 - DNA, 19 bp, Mus musculus
  siRNA target sequence for Gfm (NM_138591.1,2115-2133).
cagtgttcgcagggattaa

SEQ ID NO: 477562 - DNA, 19 bp, Mus musculus
  siRNA target sequence for Gfm (NM_138591.1,2165-2183).
ggcattgaggactacttca

SEQ ID NO: 477563 - DNA, 19 bp, Mus musculus
  siRNA target sequence for Gfm (NM_138591.1,2173-2191).
ggactacttcacactgtat

SEQ ID NO: 477564 - DNA, 19 bp, Mus musculus
  siRNA target sequence for Gfm (NM_138591.1,2192-2210).
gcagatgttcccctaaata

SEQ ID NO: 477565 - DNA, 19 bp, Mus musculus
  siRNA target sequence for Gfm (NM_138591.1,2195-2213).
gatgttcccctaaataata

SEQ ID NO: 477566 - DNA, 19 bp, Mus musculus
  siRNA target sequence for Gfm (NM_138591.1,2198-2216).
gttcccctaaataatatgt

SEQ ID NO: 477567 - DNA, 19 bp, Mus musculus
  siRNA target sequence for Gfm (NM_138591.1,2345-2363).
ggtcagcttcccgtaaaaa

SEQ ID NO: 477568 - DNA, 19 bp, Mus musculus
  siRNA target sequence for Gspt1 (NM_146066.1,190-208).
ctttcagccggcaactcaa

SEQ ID NO: 477569 - DNA, 19 bp, Mus musculus
  siRNA target sequence for Gspt1 (NM_146066.1,380-398).
gtcgtgtgaaggttcaaat

SEQ ID NO: 477570 - DNA, 19 bp, Mus musculus
  siRNA target sequence for Gspt1 (NM_146066.1,390-408).
ggttcaaattctactgtta

SEQ ID NO: 477571 - DNA, 19 bp, Mus musculus
  siRNA target sequence for Gspt1 (NM_146066.1,394-412).
caaattctactgttagcat

SEQ ID NO: 477572 - DNA, 19 bp, Mus musculus
  siRNA target sequence for Gspt1 (NM_146066.1,644-662).
gttcatcggacatgttgat

SEQ ID NO: 477573 - DNA, 19 bp, Mus musculus
  siRNA target sequence for Gspt1 (NM_146066.1,1200-1218).
ctgacaggagcgaatctta

SEQ ID NO: 477574 - DNA, 19 bp, Mus musculus
  siRNA target sequence for Gspt1 (NM_146066.1,1202-1220).
gacaggagcgaatcttaaa

SEQ ID NO: 477575 - DNA, 19 bp, Mus musculus
  siRNA target sequence for Gspt1 (NM_146066.1,1209-1227).
gcgaatcttaaagaacaat

SEQ ID NO: 477576 - DNA, 19 bp, Mus musculus
  siRNA target sequence for Gspt1 (NM_146066.1,1312-1330).
caatcaggctgccaattgt

SEQ ID NO: 477577 - DNA, 19 bp, Mus musculus
  siRNA target sequence for Gspt1 (NM_146066.1,1318-1336).
ggctgccaattgtcgataa

SEQ ID NO: 477578 - DNA, 19 bp, Mus musculus
  siRNA target sequence for Gspt1 (NM_146066.1,1533-1551).
cttccaggattcatccttt

SEQ ID NO: 477579 - DNA, 19 bp, Mus musculus
  siRNA target sequence for Gspt1 (NM_146066.1,1666-1684).
gtatcgaagaagtcgaaat

SEQ ID NO: 477580 - DNA, 19 bp, Mus musculus
  siRNA target sequence for Gspt1 (NM_146066.1,1670-1688).
cgaagaagtcgaaataaca

SEQ ID NO: 477581 - DNA, 19 bp, Mus musculus
  siRNA target sequence for Gspt1 (NM_146066.1,1733-1751).
gactcgaccccgttttgta

SEQ ID NO: 477582 - DNA, 19 bp, Mus musculus
  siRNA target sequence for Gspt1 (NM_146066.1,1735-1753).
ctcgaccccgttttgtaaa

SEQ ID NO: 477583 - DNA, 19 bp, Mus musculus
  siRNA target sequence for Gspt1 (NM_146066.1,1823-1841).
ccctcagatgggacgtttt

SEQ ID NO: 477584 - DNA, 19 bp, Mus musculus
  siRNA target sequence for Gspt1 (NM_146066.1,1824-1842).
cctcagatgggacgtttta

SEQ ID NO: 477585 - DNA, 19 bp, Mus musculus
  siRNA target sequence for Gspt1 (NM_146066.1,1827-1845).
cagatgggacgttttacct

SEQ ID NO: 477586 - DNA, 19 bp, Mus musculus
  siRNA target sequence for Gspt1 (NM_146066.1,1829-1847).
gatgggacgttttacctta

SEQ ID NO: 477587 - DNA, 19 bp, Mus musculus
  siRNA target sequence for Gspt1 (NM_146066.1,1832-1850).
gggacgttttaccttaaga

SEQ ID NO: 477588 - DNA, 19 bp, Mus musculus
  siRNA target sequence for Gspt1 (NM_146066.1,1834-1852).
gacgttttaccttaagaga

SEQ ID NO: 477589 - DNA, 19 bp, Mus musculus
  siRNA target sequence for Gspt1 (NM_146066.1,1854-1872).
gagggtaagaccattgcaa

SEQ ID NO: 477590 - DNA, 19 bp, Mus musculus
  siRNA target sequence for Gspt1 (NM_146066.1,1856-1874).
gggtaagaccattgcaatt

SEQ ID NO: 477591 - DNA, 19 bp, Mus musculus
  siRNA target sequence for Gspt1 (NM_146066.1,1862-1880).
gaccattgcaattggaaaa

SEQ ID NO: 477592 - DNA, 19 bp, Mus musculus
  siRNA target sequence for Gspt2 (NM_008179.1,1423-1441).
cctcaaaatcagactgaaa

SEQ ID NO: 477593 - DNA, 19 bp, Mus musculus
  siRNA target sequence for Gtpbp1 (NM_013818.1,163-181).
ggatgcggagagaccatat

SEQ ID NO: 477594 - DNA, 19 bp, Mus musculus
  siRNA target sequence for Gtpbp1 (NM_013818.1,164-182).
gatgcggagagaccatata

SEQ ID NO: 477595 - DNA, 19 bp, Mus musculus
  siRNA target sequence for Gtpbp1 (NM_013818.1,167-185).
gcggagagaccatatatgt

SEQ ID NO: 477596 - DNA, 19 bp, Mus musculus
  siRNA target sequence for Gtpbp1 (NM_013818.1,169-187).
ggagagaccatatatgtca

SEQ ID NO: 477597 - DNA, 19 bp, Mus musculus
  siRNA target sequence for Gtpbp1 (NM_013818.1,323-341).
gccgtgtgcgtgattacct

SEQ ID NO: 477598 - DNA, 19 bp, Mus musculus
  siRNA target sequence for Gtpbp1 (NM_013818.1,324-342).
ccgtgtgcgtgattaccta

SEQ ID NO: 477599 - DNA, 19 bp, Mus musculus
  siRNA target sequence for Gtpbp1 (NM_013818.1,348-366).
gaaacgagttggagacaat

SEQ ID NO: 477600 - DNA, 19 bp, Mus musculus
  siRNA target sequence for Gtpbp1 (NM_013818.1,557-575).
gcgaaggcaatgtagtgaa

SEQ ID NO: 477601 - DNA, 19 bp, Mus musculus
  siRNA target sequence for Gtpbp1 (NM_013818.1,618-636).
ctgtgagaagtcctctaaa

SEQ ID NO: 477602 - DNA, 19 bp, Mus musculus
  siRNA target sequence for Gtpbp1 (NM_013818.1,622-640).
gagaagtcctctaaagtga

SEQ ID NO: 477603 - DNA, 19 bp, Mus musculus
  siRNA target sequence for Gtpbp1 (NM_013818.1,664-682).
cacgagaagtaccttaaga

SEQ ID NO: 477604 - DNA, 19 bp, Mus musculus
  siRNA target sequence for Gtpbp1 (NM_013818.1,675-693).
ccttaagaccactgttttt

SEQ ID NO: 477605 - DNA, 19 bp, Mus musculus
  siRNA target sequence for Gtpbp1 (NM_013818.1,783-801).
ggcattggcactcaatgta

SEQ ID NO: 477606 - DNA, 19 bp, Mus musculus
  siRNA target sequence for Gtpbp1 (NM_013818.1,918-936).
ggtgcagagcaaagatgat

SEQ ID NO: 477607 - DNA, 19 bp, Mus musculus
  siRNA target sequence for Gtpbp1 (NM_013818.1,971-989).
ggatgtgcccgatattcca

SEQ ID NO: 477608 - DNA, 19 bp, Mus musculus
  siRNA target sequence for Gtpbp1 (NM_013818.1,1015-1033).
cttgacctgctcaagatgt

SEQ ID NO: 477609 - DNA, 19 bp, Mus musculus
  siRNA target sequence for Gtpbp1 (NM_013818.1,1214-1232).
ccattgctgtcaagtcaat

SEQ ID NO: 477610 - DNA, 19 bp, Mus musculus
  siRNA target sequence for Gtpbp1 (NM_013818.1,1229-1247).
caatccatcgcaaacgtat

SEQ ID NO: 477611 - DNA, 19 bp, Mus musculus
  siRNA target sequence for Gtpbp1 (NM_013818.1,1398-1416).
ccaccccaccacaattagt

SEQ ID NO: 477612 - DNA, 19 bp, Mus musculus
  siRNA target sequence for Gtpbp1 (NM_013818.1,1452-1470).
ccggcaaacagctacaatt

SEQ ID NO: 477613 - DNA, 19 bp, Mus musculus
  siRNA target sequence for Gtpbp1 (NM_013818.1,1466-1484).
caattctgagcatggataa

SEQ ID NO: 477614 - DNA, 19 bp, Mus musculus
  siRNA target sequence for Gtpbp1 (NM_013818.1,1516-1534).
gtccacttccgcttcatca

SEQ ID NO: 477615 - DNA, 19 bp, Mus musculus
  siRNA target sequence for Gtpbp1 (NM_013818.1,1541-1559).
cagagtatctgcacataga

SEQ ID NO: 477616 - DNA, 19 bp, Mus musculus
  siRNA target sequence for Gtpbp2 (NM_019581.2,263-281).
gatggaaacatcgaatata

SEQ ID NO: 477617 - DNA, 19 bp, Mus musculus
  siRNA target sequence for Gtpbp2 (NM_019581.2,317-335).
gagcacttggtgacacaaa

SEQ ID NO: 477618 - DNA, 19 bp, Mus musculus
  siRNA target sequence for Gtpbp2 (NM_019581.2,495-513).
gggagcgagaggtggatta

SEQ ID NO: 477619 - DNA, 19 bp, Mus musculus
  siRNA target sequence for Gtpbp2 (NM_019581.2,496-514).
ggagcgagaggtggattat

SEQ ID NO: 477620 - DNA, 19 bp, Mus musculus
  siRNA target sequence for Gtpbp2 (NM_019581.2,540-558).
ctgaggtgctagtacgaaa

SEQ ID NO: 477621 - DNA, 19 bp, Mus musculus
  siRNA target sequence for Gtpbp2 (NM_019581.2,699-717).
gccacctgcatgagattca

SEQ ID NO: 477622 - DNA, 19 bp, Mus musculus
  siRNA target sequence for Gtpbp2 (NM_019581.2,1157-1175).
gcccagtcacccaatgtca

SEQ ID NO: 477623 - DNA, 19 bp, Mus musculus
  siRNA target sequence for Gtpbp2 (NM_019581.2,1168-1186).
caatgtcacccctatattt

SEQ ID NO: 477624 - DNA, 19 bp, Mus musculus
  siRNA target sequence for Gtpbp2 (NM_019581.2,1210-1228).
gagcctggaccttcttaaa

SEQ ID NO: 477625 - DNA, 19 bp, Mus musculus
  siRNA target sequence for Gtpbp2 (NM_019581.2,1212-1230).
gcctggaccttcttaaagt

SEQ ID NO: 477626 - DNA, 19 bp, Mus musculus
  siRNA target sequence for Gtpbp2 (NM_019581.2,1304-1322).
caggtggatgaaatctaca

SEQ ID NO: 477627 - DNA, 19 bp, Mus musculus
  siRNA target sequence for Gtpbp2 (NM_019581.2,1343-1361).
gtggttggaggaacactat

SEQ ID NO: 477628 - DNA, 19 bp, Mus musculus
  siRNA target sequence for Gtpbp2 (NM_019581.2,1396-1414).
ggtaggcccgacagatgat

SEQ ID NO: 477629 - DNA, 19 bp, Mus musculus
  siRNA target sequence for Gtpbp2 (NM_019581.2,1513-1531).
ctttgaccgtgcattgctt

SEQ ID NO: 477630 - DNA, 19 bp, Mus musculus
  siRNA target sequence for Gtpbp2 (NM_019581.2,1549-1567).
ggtgagtcccgagatgaat

SEQ ID NO: 477631 - DNA, 19 bp, Mus musculus
  siRNA target sequence for Gtpbp2 (NM_019581.2,1570-1588).
caccatctgctcagtgttt

SEQ ID NO: 477632 - DNA, 19 bp, Mus musculus
  siRNA target sequence for Gtpbp2 (NM_019581.2,1572-1590).
ccatctgctcagtgtttga

SEQ ID NO: 477633 - DNA, 19 bp, Mus musculus
  siRNA target sequence for Gtpbp2 (NM_019581.2,1657-1675).
gggcaacgtacgtcaaaca

SEQ ID NO: 477634 - DNA, 19 bp, Mus musculus
  siRNA target sequence for Gtpbp2 (NM_019581.2,1674-1692).
cagcagtggtggaaaagat

SEQ ID NO: 477635 - DNA, 19 bp, Mus musculus
  siRNA target sequence for Gtpbp2 (NM_019581.2,1818-1836).
gtcatgtcacggatgtaca

SEQ ID NO: 477636 - DNA, 19 bp, Mus musculus
  siRNA target sequence for Hbs1l (NM_019702.1,451-469).
gtcatcccagagtgaatct

SEQ ID NO: 477637 - DNA, 19 bp, Mus musculus
  siRNA target sequence for Hbs1l (NM_019702.1,456-474).
cccagagtgaatctgaaat

SEQ ID NO: 477638 - DNA, 19 bp, Mus musculus
  siRNA target sequence for Hbs1l (NM_019702.1,476-494).
gtgccaaaagttgctaaaa

SEQ ID NO: 477639 - DNA, 19 bp, Mus musculus
  siRNA target sequence for Hbs1l (NM_019702.1,530-548).
gaagtgcctggcttaactt

SEQ ID NO: 477640 - DNA, 19 bp, Mus musculus
  siRNA target sequence for Hbs1l (NM_019702.1,632-650).
gagaccggcactccaaaat

SEQ ID NO: 477641 - DNA, 19 bp, Mus musculus
  siRNA target sequence for Hbs1l (NM_019702.1,634-652).
gaccggcactccaaaatct

SEQ ID NO: 477642 - DNA, 19 bp, Mus musculus
  siRNA target sequence for Hbs1l (NM_019702.1,745-763).
cgtgaaagcggaattggaa

SEQ ID NO: 477643 - DNA, 19 bp, Mus musculus
  siRNA target sequence for Hbs1l (NM_019702.1,746-764).
gtgaaagcggaattggaaa

SEQ ID NO: 477644 - DNA, 19 bp, Mus musculus
  siRNA target sequence for Hbs1l (NM_019702.1,781-799).
gaagcagctcctcaactta

SEQ ID NO: 477645 - DNA, 19 bp, Mus musculus
  siRNA target sequence for Hbs1l (NM_019702.1,802-820).
ggtcattggtcatgttgat

SEQ ID NO: 477646 - DNA, 19 bp, Mus musculus
  siRNA target sequence for Hbs1l (NM_019702.1,834-852).
ctctgatgggccatatgct

SEQ ID NO: 477647 - DNA, 19 bp, Mus musculus
  siRNA target sequence for Hbs1l (NM_019702.1,913-931).
ggctggcaaggcttcattt

SEQ ID NO: 477648 - DNA, 19 bp, Mus musculus
  siRNA target sequence for Hbs1l (NM_019702.1,938-956).
gcgtgggtcttggatgaaa

SEQ ID NO: 477649 - DNA, 19 bp, Mus musculus
  siRNA target sequence for Hbs1l (NM_019702.1,991-1009).
cgtcggaatgacgaagttt

SEQ ID NO: 477650 - DNA, 19 bp, Mus musculus
  siRNA target sequence for Hbs1l (NM_019702.1,994-1012).
cggaatgacgaagtttgaa

SEQ ID NO: 477651 - DNA, 19 bp, Mus musculus
  siRNA target sequence for Hbs1l (NM_019702.1,995-1013).
ggaatgacgaagtttgaaa

SEQ ID NO: 477652 - DNA, 19 bp, Mus musculus
  siRNA target sequence for Hbs1l (NM_019702.1,1017-1035).
caaccaaagttattacctt

SEQ ID NO: 477653 - DNA, 19 bp, Mus musculus
  siRNA target sequence for Hbs1l (NM_019702.1,1043-1061).
gctccaggccataaggatt

SEQ ID NO: 477654 - DNA, 19 bp, Mus musculus
  siRNA target sequence for Hbs1l (NM_019702.1,1046-1064).
ccaggccataaggatttca

SEQ ID NO: 477655 - DNA, 19 bp, Mus musculus
  siRNA target sequence for Hbs1l (NM_019702.1,1047-1065).
caggccataaggatttcat

SEQ ID NO: 477656 - DNA, 19 bp, Mus musculus
  siRNA target sequence for Hbs1l (NM_019702.1,1052-1070).
cataaggatttcattccaa

SEQ ID NO: 477657 - DNA, 19 bp, Mus musculus
  siRNA target sequence for Hbs1l (NM_019702.1,1180-1198).
ccttttggtccgatctctt

SEQ ID NO: 477658 - DNA, 19 bp, Mus musculus
  siRNA target sequence for Hbs1l (NM_019702.1,1215-1233).
ctgtggctgtcaataagat

SEQ ID NO: 477659 - DNA, 19 bp, Mus musculus
  siRNA target sequence for Hbs1l (NM_019702.1,1278-1296).
gaaaactcgggcactttct

SEQ ID NO: 477660 - DNA, 19 bp, Mus musculus
  siRNA target sequence for Hbs1l (NM_019702.1,1285-1303).
cgggcactttcttaagcaa

SEQ ID NO: 477661 - DNA, 19 bp, Mus musculus
  siRNA target sequence for Hbs1l (NM_019702.1,1295-1313).
cttaagcaagcaggtttta

SEQ ID NO: 477662 - DNA, 19 bp, Mus musculus
  siRNA target sequence for Hbs1l (NM_019702.1,1345-1363).
cggtctgagtggtgagaat

SEQ ID NO: 477663 - DNA, 19 bp, Mus musculus
  siRNA target sequence for Hbs1l (NM_019702.1,1349-1367).
ctgagtggtgagaatttaa

SEQ ID NO: 477664 - DNA, 19 bp, Mus musculus
  siRNA target sequence for Hbs1l (NM_019702.1,1416-1434).
gcttattggagcagattga

SEQ ID NO: 477665 - DNA, 19 bp, Mus musculus
  siRNA target sequence for Hbs1l (NM_019702.1,1417-1435).
cttattggagcagattgat

SEQ ID NO: 477666 - DNA, 19 bp, Mus musculus
  siRNA target sequence for Hbs1l (NM_019702.1,1449-1467).
ctcagcgctcgattgacaa

SEQ ID NO: 477667 - DNA, 19 bp, Mus musculus
  siRNA target sequence for Hbs1l (NM_019702.1,1454-1472).
cgctcgattgacaaacctt

SEQ ID NO: 477668 - DNA, 19 bp, Mus musculus
  siRNA target sequence for Hbs1l (NM_019702.1,1455-1473).
gctcgattgacaaaccttt

SEQ ID NO: 477669 - DNA, 19 bp, Mus musculus
  siRNA target sequence for Hbs1l (NM_019702.1,1456-1474).
ctcgattgacaaacctttt

SEQ ID NO: 477670 - DNA, 19 bp, Mus musculus
  siRNA target sequence for Hbs1l (NM_019702.1,1459-1477).
gattgacaaaccttttaga

SEQ ID NO: 477671 - DNA, 19 bp, Mus musculus
  siRNA target sequence for Hbs1l (NM_019702.1,1465-1483).
caaaccttttagattatgt

SEQ ID NO: 477672 - DNA, 19 bp, Mus musculus
  siRNA target sequence for Hbs1l (NM_019702.1,1488-1506).
ctgatgtcttcaaagatca

SEQ ID NO: 477673 - DNA, 19 bp, Mus musculus
  siRNA target sequence for Hbs1l (NM_019702.1,1521-1539).
gtgtgactggtaaaattga

SEQ ID NO: 477674 - DNA, 19 bp, Mus musculus
  siRNA target sequence for Hbs1l (NM_019702.1,1555-1573).
gactggtgaccgactgtta

SEQ ID NO: 477675 - DNA, 19 bp, Mus musculus
  siRNA target sequence for Hbs1l (NM_019702.1,1574-1592).
gccatgccacccaatgaaa

SEQ ID NO: 477676 - DNA, 19 bp, Mus musculus
  siRNA target sequence for Hbs1l (NM_019702.1,1644-1662).
cagcaggcgatcacgtaaa

SEQ ID NO: 477677 - DNA, 19 bp, Mus musculus
  siRNA target sequence for Hbs1l (NM_019702.1,1647-1665).
caggcgatcacgtaaatct

SEQ ID NO: 477678 - DNA, 19 bp, Mus musculus
  siRNA target sequence for Hbs1l (NM_019702.1,1649-1667).
ggcgatcacgtaaatctta

SEQ ID NO: 477679 - DNA, 19 bp, Mus musculus
  siRNA target sequence for Hbs1l (NM_019702.1,1719-1737).
gccccaaagaacccattaa

SEQ ID NO: 477680 - DNA, 19 bp, Mus musculus
  siRNA target sequence for Hbs1l (NM_019702.1,1758-1776).
cccgaatcctcgtcttcaa

SEQ ID NO: 477681 - DNA, 19 bp, Mus musculus
  siRNA target sequence for Hbs1l (NM_019702.1,1759-1777).
ccgaatcctcgtcttcaat

SEQ ID NO: 477682 - DNA, 19 bp, Mus musculus
  siRNA target sequence for Hbs1l (NM_019702.1,1760-1778).
cgaatcctcgtcttcaata

SEQ ID NO: 477683 - DNA, 19 bp, Mus musculus
  siRNA target sequence for Hbs1l (NM_019702.1,1761-1779).
gaatcctcgtcttcaatat

SEQ ID NO: 477684 - DNA, 19 bp, Mus musculus
  siRNA target sequence for Hbs1l (NM_019702.1,1765-1783).
cctcgtcttcaatattgaa

SEQ ID NO: 477685 - DNA, 19 bp, Mus musculus
  siRNA target sequence for Hbs1l (NM_019702.1,1768-1786).
cgtcttcaatattgaagtt

SEQ ID NO: 477686 - DNA, 19 bp, Mus musculus
  siRNA target sequence for Hbs1l (NM_019702.1,1833-1851).
gtgagcctgctgttattaa

SEQ ID NO: 477687 - DNA, 19 bp, Mus musculus
  siRNA target sequence for Hbs1l (NM_019702.1,1842-1860).
ctgttattaagcgattgat

SEQ ID NO: 477688 - DNA, 19 bp, Mus musculus
  siRNA target sequence for Hbs1l (NM_019702.1,1844-1862).
gttattaagcgattgatta

SEQ ID NO: 477689 - DNA, 19 bp, Mus musculus
  siRNA target sequence for Hbs1l (NM_019702.1,1858-1876).
gattagtgtcctaaacaaa

SEQ ID NO: 477690 - DNA, 19 bp, Mus musculus
  siRNA target sequence for Hbs1l (NM_019702.1,1878-1896).
gtactggtgaagtcacaaa

SEQ ID NO: 477691 - DNA, 19 bp, Mus musculus
  siRNA target sequence for Hbs1l (NM_019702.1,1963-1981).
ggctcttgagctctacaaa

SEQ ID NO: 477692 - DNA, 19 bp, Mus musculus
  siRNA target sequence for Hbs1l (NM_019702.1,2002-2020).
gtttatgctgcgttatggt

SEQ ID NO: 477693 - DNA, 19 bp, Mus musculus
  siRNA target sequence for Hbs1l (NM_019702.1,2038-2056).
cggtgttgtcactgagata

SEQ ID NO: 477694 - DNA, 19 bp, Mus musculus
  siRNA target sequence for L3mbtl2 (NM_145993.2,206-224).
cttggaggagtcaagtgaa

SEQ ID NO: 477695 - DNA, 19 bp, Mus musculus
  siRNA target sequence for L3mbtl2 (NM_145993.2,440-458).
cagtatcctggctagacta

SEQ ID NO: 477696 - DNA, 19 bp, Mus musculus
  siRNA target sequence for L3mbtl2 (NM_145993.2,502-520).
cagcctggtctgccaaaat

SEQ ID NO: 477697 - DNA, 19 bp, Mus musculus
  siRNA target sequence for L3mbtl2 (NM_145993.2,506-524).
ctggtctgccaaaattgga

SEQ ID NO: 477698 - DNA, 19 bp, Mus musculus
  siRNA target sequence for L3mbtl2 (NM_145993.2,539-557).
ccagggaacaggacaacta

SEQ ID NO: 477699 - DNA, 19 bp, Mus musculus
  siRNA target sequence for L3mbtl2 (NM_145993.2,614-632).
gttcctgaaggatcatagt

SEQ ID NO: 477700 - DNA, 19 bp, Mus musculus
  siRNA target sequence for L3mbtl2 (NM_145993.2,618-636).
ctgaaggatcatagttaca

SEQ ID NO: 477701 - DNA, 19 bp, Mus musculus
  siRNA target sequence for L3mbtl2 (NM_145993.2,646-664).
ctgtcagctgctttaaaca

SEQ ID NO: 477702 - DNA, 19 bp, Mus musculus
  siRNA target sequence for L3mbtl2 (NM_145993.2,800-818).
ccgatatgaaggctttgaa

SEQ ID NO: 477703 - DNA, 19 bp, Mus musculus
  siRNA target sequence for L3mbtl2 (NM_145993.2,876-894).
gggtggtgtgccatcaaca

SEQ ID NO: 477704 - DNA, 19 bp, Mus musculus
  siRNA target sequence for L3mbtl2 (NM_145993.2,917-935).
gaccatccatgccaagttt

SEQ ID NO: 477705 - DNA, 19 bp, Mus musculus
  siRNA target sequence for L3mbtl2 (NM_145993.2,920-938).
catccatgccaagtttact

SEQ ID NO: 477706 - DNA, 19 bp, Mus musculus
  siRNA target sequence for L3mbtl2 (NM_145993.2,990-1008).
gcagacttccatatcaaga

SEQ ID NO: 477707 - DNA, 19 bp, Mus musculus
  siRNA target sequence for L3mbtl2 (NM_145993.2,1092-1110).
gccgtggtggacacagtaa

SEQ ID NO: 477708 - DNA, 19 bp, Mus musculus
  siRNA target sequence for L3mbtl2 (NM_145993.2,1093-1111).
ccgtggtggacacagtaat

SEQ ID NO: 477709 - DNA, 19 bp, Mus musculus
  siRNA target sequence for L3mbtl2 (NM_145993.2,1267-1285).
ccaccttccggaaaatcta

SEQ ID NO: 477710 - DNA, 19 bp, Mus musculus
  siRNA target sequence for L3mbtl2 (NM_145993.2,1471-1489).
cggatggctccgattggtt

SEQ ID NO: 477711 - DNA, 19 bp, Mus musculus
  siRNA target sequence for L3mbtl2 (NM_145993.2,1776-1794).
gacggctgggacaatgagt

SEQ ID NO: 477712 - DNA, 19 bp, Mus musculus
  siRNA target sequence for L3mbtl2 (NM_145993.2,1778-1796).
cggctgggacaatgagtat

SEQ ID NO: 477713 - DNA, 19 bp, Mus musculus
  siRNA target sequence for L3mbtl2 (NM_145993.2,1783-1801).
gggacaatgagtatgatca

SEQ ID NO: 477714 - DNA, 19 bp, Mus musculus
  siRNA target sequence for L3mbtl2 (NM_145993.2,1813-1831).
gcgaatccccggacatcta

SEQ ID NO: 477715 - DNA, 19 bp, Mus musculus
  siRNA target sequence for L3mbtl2 (NM_145993.2,2049-2067).
ccagttcctgatgacatta

SEQ ID NO: 477716 - DNA, 19 bp, Mus musculus
  siRNA target sequence for L3mbtl2 (NM_145993.2,2050-2068).
cagttcctgatgacattat

SEQ ID NO: 477717 - DNA, 19 bp, Mus musculus
  siRNA target sequence for Skp1a (NM_011543.2,146-164).
gatatttgaagttgatgta

SEQ ID NO: 477718 - DNA, 19 bp, Mus musculus
  siRNA target sequence for Skp1a (NM_011543.2,172-190).
ccaaacaatctgtgactat

SEQ ID NO: 477719 - DNA, 19 bp, Mus musculus
  siRNA target sequence for Skp1a (NM_011543.2,177-195).
caatctgtgactatcaaga

SEQ ID NO: 477720 - DNA, 19 bp, Mus musculus
  siRNA target sequence for Skp1a (NM_011543.2,258-276).
gttaatgcagcaattctaa

SEQ ID NO: 477721 - DNA, 19 bp, Mus musculus
  siRNA target sequence for Skp1a (NM_011543.2,273-291).
ctaaagaaggtcattcagt

SEQ ID NO: 477722 - DNA, 19 bp, Mus musculus
  siRNA target sequence for Skp1a (NM_011543.2,295-313).
gcacccaccacaaagatga

SEQ ID NO: 477723 - DNA, 19 bp, Mus musculus
  siRNA target sequence for Skp1a (NM_011543.2,350-368).
gcggacagatgatattcct

SEQ ID NO: 477724 - DNA, 19 bp, Mus musculus
  siRNA target sequence for Skp1a (NM_011543.2,402-420).
ggaacactttttgaactta

SEQ ID NO: 477725 - DNA, 19 bp, Mus musculus
  siRNA target sequence for Skp1a (NM_011543.2,403-421).
gaacactttttgaacttat

SEQ ID NO: 477726 - DNA, 19 bp, Mus musculus
  siRNA target sequence for Skp1a (NM_011543.2,426-444).
gctgcaaactacttagaca

SEQ ID NO: 477727 - DNA, 19 bp, Mus musculus
  siRNA target sequence for Skp1a (NM_011543.2,473-491).
gactgtggccaatatgatt

SEQ ID NO: 477728 - DNA, 19 bp, Mus musculus
  siRNA target sequence for Skp1a (NM_011543.2,502-520).
ctcctgaggagattcgtaa

SEQ ID NO: 477729 - DNA, 19 bp, Mus musculus
  siRNA target sequence for Skp1a (NM_011543.2,504-522).
cctgaggagattcgtaaaa

SEQ ID NO: 477730 - DNA, 19 bp, Mus musculus
  siRNA target sequence for Skp1a (NM_011543.2,507-525).
gaggagattcgtaaaacct

SEQ ID NO: 477731 - DNA, 19 bp, Mus musculus
  siRNA target sequence for Skp1a (NM_011543.2,512-530).
gattcgtaaaaccttcaat

SEQ ID NO: 477732 - DNA, 19 bp, Mus musculus
  siRNA target sequence for Skp1a (NM_011543.2,567-585).
gtacgcaaagagaaccaat

SEQ ID NO: 477733 - DNA, 19 bp, Mus musculus
  siRNA target sequence for Snrp116 (NM_011431.2,30-48).
ggatactgacttgtatgat

SEQ ID NO: 477734 - DNA, 19 bp, Mus musculus
  siRNA target sequence for Snrp116 (NM_011431.2,75-93).
gcttgattctgatgaagat

SEQ ID NO: 477735 - DNA, 19 bp, Mus musculus
  siRNA target sequence for Snrp116 (NM_011431.2,352-370).
cccgtcacggtgtatgaga

SEQ ID NO: 477736 - DNA, 19 bp, Mus musculus
  siRNA target sequence for Snrp116 (NM_011431.2,353-371).
ccgtcacggtgtatgagat

SEQ ID NO: 477737 - DNA, 19 bp, Mus musculus
  siRNA target sequence for Snrp116 (NM_011431.2,359-377).
cggtgtatgagatggattt

SEQ ID NO: 477738 - DNA, 19 bp, Mus musculus
  siRNA target sequence for Snrp116 (NM_011431.2,403-421).
gagctcatcagaaacgtaa

SEQ ID NO: 477739 - DNA, 19 bp, Mus musculus
  siRNA target sequence for Snrp116 (NM_011431.2,444-462).
cggcaagacctgtttcgta

SEQ ID NO: 477740 - DNA, 19 bp, Mus musculus
  siRNA target sequence for Snrp116 (NM_011431.2,450-468).
gacctgtttcgtagattgt

SEQ ID NO: 477741 - DNA, 19 bp, Mus musculus
  siRNA target sequence for Snrp116 (NM_011431.2,453-471).
ctgtttcgtagattgttta

SEQ ID NO: 477742 - DNA, 19 bp, Mus musculus
  siRNA target sequence for Snrp116 (NM_011431.2,455-473).
gtttcgtagattgtttaat

SEQ ID NO: 477743 - DNA, 19 bp, Mus musculus
  siRNA target sequence for Snrp116 (NM_011431.2,478-496).
cagacgcatccggaaatca

SEQ ID NO: 477744 - DNA, 19 bp, Mus musculus
  siRNA target sequence for Snrp116 (NM_011431.2,480-498).
gacgcatccggaaatcaga

SEQ ID NO: 477745 - DNA, 19 bp, Mus musculus
  siRNA target sequence for Snrp116 (NM_011431.2,482-500).
cgcatccggaaatcagaaa

SEQ ID NO: 477746 - DNA, 19 bp, Mus musculus
  siRNA target sequence for Snrp116 (NM_011431.2,531-549).
catcctcttcacagaacaa

SEQ ID NO: 477747 - DNA, 19 bp, Mus musculus
  siRNA target sequence for Snrp116 (NM_011431.2,636-654).
cacgccaggtcatgtgaat

SEQ ID NO: 477748 - DNA, 19 bp, Mus musculus
  siRNA target sequence for Snrp116 (NM_011431.2,638-656).
cgccaggtcatgtgaattt

SEQ ID NO: 477749 - DNA, 19 bp, Mus musculus
  siRNA target sequence for Snrp116 (NM_011431.2,640-658).
ccaggtcatgtgaattttt

SEQ ID NO: 477750 - DNA, 19 bp, Mus musculus
  siRNA target sequence for Snrp116 (NM_011431.2,695-713).
gagtggtccttttcattga

SEQ ID NO: 477751 - DNA, 19 bp, Mus musculus
  siRNA target sequence for Snrp116 (NM_011431.2,759-777).
cgcagtgcaggaaaggtta

SEQ ID NO: 477752 - DNA, 19 bp, Mus musculus
  siRNA target sequence for Snrp116 (NM_011431.2,778-796).
gcagtcaccgtgtgtatca

SEQ ID NO: 477753 - DNA, 19 bp, Mus musculus
  siRNA target sequence for Snrp116 (NM_011431.2,779-797).
cagtcaccgtgtgtatcaa

SEQ ID NO: 477754 - DNA, 19 bp, Mus musculus
  siRNA target sequence for Snrp116 (NM_011431.2,783-801).
caccgtgtgtatcaacaaa

SEQ ID NO: 477755 - DNA, 19 bp, Mus musculus
  siRNA target sequence for Snrp116 (NM_011431.2,785-803).
ccgtgtgtatcaacaaaat

SEQ ID NO: 477756 - DNA, 19 bp, Mus musculus
  siRNA target sequence for Snrp116 (NM_011431.2,831-849).
gcctccaacagatgcttat

SEQ ID NO: 477757 - DNA, 19 bp, Mus musculus
  siRNA target sequence for Snrp116 (NM_011431.2,833-851).
ctccaacagatgcttatta

SEQ ID NO: 477758 - DNA, 19 bp, Mus musculus
  siRNA target sequence for Snrp116 (NM_011431.2,835-853).
ccaacagatgcttattaca

SEQ ID NO: 477759 - DNA, 19 bp, Mus musculus
  siRNA target sequence for Snrp116 (NM_011431.2,870-888).
ggatgaggtcaatggatta

SEQ ID NO: 477760 - DNA, 19 bp, Mus musculus
  siRNA target sequence for Snrp116 (NM_011431.2,871-889).
gatgaggtcaatggattaa

SEQ ID NO: 477761 - DNA, 19 bp, Mus musculus
  siRNA target sequence for Snrp116 (NM_011431.2,883-901).
ggattaataagcatgtatt

SEQ ID NO: 477762 - DNA, 19 bp, Mus musculus
  siRNA target sequence for Snrp116 (NM_011431.2,907-925).
gacgagaacctgatccttt

SEQ ID NO: 477763 - DNA, 19 bp, Mus musculus
  siRNA target sequence for Snrp116 (NM_011431.2,975-993).
cttcacactgggttccttt

SEQ ID NO: 477764 - DNA, 19 bp, Mus musculus
  siRNA target sequence for Snrp116 (NM_011431.2,1023-1041).
cattaattaccaggaattt

SEQ ID NO: 477765 - DNA, 19 bp, Mus musculus
  siRNA target sequence for Snrp116 (NM_011431.2,1032-1050).
ccaggaatttgctaaaaga

SEQ ID NO: 477766 - DNA, 19 bp, Mus musculus
  siRNA target sequence for Snrp116 (NM_011431.2,1075-1093).
cctaagacgagaaagttca

SEQ ID NO: 477767 - DNA, 19 bp, Mus musculus
  siRNA target sequence for Snrp116 (NM_011431.2,1082-1100).
cgagaaagttcaccaaaaa

SEQ ID NO: 477768 - DNA, 19 bp, Mus musculus
  siRNA target sequence for Snrp116 (NM_011431.2,1270-1288).
ctcaggctggtctgcaaaa

SEQ ID NO: 477769 - DNA, 19 bp, Mus musculus
  siRNA target sequence for Snrp116 (NM_011431.2,1364-1382).
ccaagatcgagcataccta

SEQ ID NO: 477770 - DNA, 19 bp, Mus musculus
  siRNA target sequence for Snrp116 (NM_011431.2,1464-1482).
gatgtacagcacagatgat

SEQ ID NO: 477771 - DNA, 19 bp, Mus musculus
  siRNA target sequence for Snrp116 (NM_011431.2,1701-1719).
cgtgaagacagcaaccata

SEQ ID NO: 477772 - DNA, 19 bp, Mus musculus
  siRNA target sequence for Snrp116 (NM_011431.2,1759-1777).
cccttgaaattcaatacca

SEQ ID NO: 477773 - DNA, 19 bp, Mus musculus
  siRNA target sequence for Snrp116 (NM_011431.2,1776-1794).
cacatctgttatcaagatt

SEQ ID NO: 477774 - DNA, 19 bp, Mus musculus
  siRNA target sequence for Snrp116 (NM_011431.2,1814-1832).
cctcagagctgcccaaaat

SEQ ID NO: 477775 - DNA, 19 bp, Mus musculus
  siRNA target sequence for Snrp116 (NM_011431.2,1948-1966).
cacgacctgcggaagatgt

SEQ ID NO: 477776 - DNA, 19 bp, Mus musculus
  siRNA target sequence for Snrp116 (NM_011431.2,1991-2009).
ctgacccagttgtgacatt

SEQ ID NO: 477777 - DNA, 19 bp, Mus musculus
  siRNA target sequence for Snrp116 (NM_011431.2,2026-2044).
gaaacgtcctccctcaaat

SEQ ID NO: 477778 - DNA, 19 bp, Mus musculus
  siRNA target sequence for Snrp116 (NM_011431.2,2030-2048).
cgtcctccctcaaatgctt

SEQ ID NO: 477779 - DNA, 19 bp, Mus musculus
  siRNA target sequence for Snrp116 (NM_011431.2,2031-2049).
gtcctccctcaaatgcttt

SEQ ID NO: 477780 - DNA, 19 bp, Mus musculus
  siRNA target sequence for Snrp116 (NM_011431.2,2050-2068).
gctgagacacccaataaga

SEQ ID NO: 477781 - DNA, 19 bp, Mus musculus
  siRNA target sequence for Snrp116 (NM_011431.2,2070-2088).
gaacaagatcaccatgatt

SEQ ID NO: 477782 - DNA, 19 bp, Mus musculus
  siRNA target sequence for Snrp116 (NM_011431.2,2163-2181).
gctgggagagtttttccaa

SEQ ID NO: 477783 - DNA, 19 bp, Mus musculus
  siRNA target sequence for Snrp116 (NM_011431.2,2164-2182).
ctgggagagtttttccaaa

SEQ ID NO: 477784 - DNA, 19 bp, Mus musculus
  siRNA target sequence for Snrp116 (NM_011431.2,2167-2185).
ggagagtttttccaaacaa

SEQ ID NO: 477785 - DNA, 19 bp, Mus musculus
  siRNA target sequence for Snrp116 (NM_011431.2,2246-2264).
gccccaacatcctagtaga

SEQ ID NO: 477786 - DNA, 19 bp, Mus musculus
  siRNA target sequence for Snrp116 (NM_011431.2,2250-2268).
caacatcctagtagatgat

SEQ ID NO: 477787 - DNA, 19 bp, Mus musculus
  siRNA target sequence for Snrp116 (NM_011431.2,2253-2271).
catcctagtagatgataca

SEQ ID NO: 477788 - DNA, 19 bp, Mus musculus
  siRNA target sequence for Snrp116 (NM_011431.2,2353-2371).
ggacccctctgcgatgaat

SEQ ID NO: 477789 - DNA, 19 bp, Mus musculus
  siRNA target sequence for Snrp116 (NM_011431.2,2354-2372).
gacccctctgcgatgaatt

SEQ ID NO: 477790 - DNA, 19 bp, Mus musculus
  siRNA target sequence for Snrp116 (NM_011431.2,2356-2374).
cccctctgcgatgaattga

SEQ ID NO: 477791 - DNA, 19 bp, Mus musculus
  siRNA target sequence for Snrp116 (NM_011431.2,2357-2375).
ccctctgcgatgaattgat

SEQ ID NO: 477792 - DNA, 19 bp, Mus musculus
  siRNA target sequence for Snrp116 (NM_011431.2,2358-2376).
cctctgcgatgaattgatt

SEQ ID NO: 477793 - DNA, 19 bp, Mus musculus
  siRNA target sequence for Snrp116 (NM_011431.2,2373-2391).
gattcggaatgtcaagttt

SEQ ID NO: 477794 - DNA, 19 bp, Mus musculus
  siRNA target sequence for Snrp116 (NM_011431.2,2432-2450).
ggggtggaggtcagatcat

SEQ ID NO: 477795 - DNA, 19 bp, Mus musculus
  siRNA target sequence for Snrp116 (NM_011431.2,2433-2451).
gggtggaggtcagatcatt

SEQ ID NO: 477796 - DNA, 19 bp, Mus musculus
  siRNA target sequence for Snrp116 (NM_011431.2,2456-2474).
cagccaggagggtagtgta

SEQ ID NO: 477797 - DNA, 19 bp, Mus musculus
  siRNA target sequence for Snrp116 (NM_011431.2,2501-2519).
gtctgatggagccttacta

SEQ ID NO: 477798 - DNA, 19 bp, Mus musculus
  siRNA target sequence for Snrp116 (NM_011431.2,2503-2521).
ctgatggagccttactact

SEQ ID NO: 477799 - DNA, 19 bp, Mus musculus
  siRNA target sequence for Snrp116 (NM_011431.2,2618-2636).
gctcccctctctataccat

SEQ ID NO: 477800 - DNA, 19 bp, Mus musculus
  siRNA target sequence for Snrp116 (NM_011431.2,2760-2778).
ggacaagagcattgtcatt

SEQ ID NO: 477801 - DNA, 19 bp, Mus musculus
  siRNA target sequence for Snrp116 (NM_011431.2,2815-2833).
cgggagttcatgatcaaaa

SEQ ID NO: 477802 - DNA, 19 bp, Mus musculus
  siRNA target sequence for Snrp116 (NM_011431.2,2914-2932).
caggatgttgtgctcaatt

SEQ ID NO: 477803 - DNA, 19 bp, Mus musculus
  siRNA target sequence for Supt16h (NM_033618.1,85-103).
cggcgagtgaagagattgt

SEQ ID NO: 477804 - DNA, 19 bp, Mus musculus
  siRNA target sequence for Supt16h (NM_033618.1,86-104).
ggcgagtgaagagattgta

SEQ ID NO: 477805 - DNA, 19 bp, Mus musculus
  siRNA target sequence for Supt16h (NM_033618.1,161-179).
cggtgggtgttgatgaaga

SEQ ID NO: 477806 - DNA, 19 bp, Mus musculus
  siRNA target sequence for Supt16h (NM_033618.1,165-183).
gggtgttgatgaagaaatt

SEQ ID NO: 477807 - DNA, 19 bp, Mus musculus
  siRNA target sequence for Supt16h (NM_033618.1,210-228).
gacgtggctctttggttat

SEQ ID NO: 477808 - DNA, 19 bp, Mus musculus
  siRNA target sequence for Supt16h (NM_033618.1,216-234).
gctctttggttatgaacta

SEQ ID NO: 477809 - DNA, 19 bp, Mus musculus
  siRNA target sequence for Supt16h (NM_033618.1,306-324).
gaaacagattgccaatact

SEQ ID NO: 477810 - DNA, 19 bp, Mus musculus
  siRNA target sequence for Supt16h (NM_033618.1,330-348).
caatgagaatgctaatgga

SEQ ID NO: 477811 - DNA, 19 bp, Mus musculus
  siRNA target sequence for Supt16h (NM_033618.1,681-699).
gaaagttcggcatagcaaa

SEQ ID NO: 477812 - DNA, 19 bp, Mus musculus
  siRNA target sequence for Supt16h (NM_033618.1,793-811).
cagagtggtggcaactata

SEQ ID NO: 477813 - DNA, 19 bp, Mus musculus
  siRNA target sequence for Supt16h (NM_033618.1,795-813).
gagtggtggcaactataat

SEQ ID NO: 477814 - DNA, 19 bp, Mus musculus
  siRNA target sequence for Supt16h (NM_033618.1,797-815).
gtggtggcaactataatct

SEQ ID NO: 477815 - DNA, 19 bp, Mus musculus
  siRNA target sequence for Supt16h (NM_033618.1,803-821).
gcaactataatctcaagtt

SEQ ID NO: 477816 - DNA, 19 bp, Mus musculus
  siRNA target sequence for Supt16h (NM_033618.1,828-846).
ggtgagtgataagaatcat

SEQ ID NO: 477817 - DNA, 19 bp, Mus musculus
  siRNA target sequence for Supt16h (NM_033618.1,833-851).
gtgataagaatcatatgca

SEQ ID NO: 477818 - DNA, 19 bp, Mus musculus
  siRNA target sequence for Supt16h (NM_033618.1,850-868).
cattttggggccattacgt

SEQ ID NO: 477819 - DNA, 19 bp, Mus musculus
  siRNA target sequence for Supt16h (NM_033618.1,872-890).
ccatgggcattcgctttaa

SEQ ID NO: 477820 - DNA, 19 bp, Mus musculus
  siRNA target sequence for Supt16h (NM_033618.1,873-891).
catgggcattcgctttaaa

SEQ ID NO: 477821 - DNA, 19 bp, Mus musculus
  siRNA target sequence for Supt16h (NM_033618.1,876-894).
gggcattcgctttaaatct

SEQ ID NO: 477822 - DNA, 19 bp, Mus musculus
  siRNA target sequence for Supt16h (NM_033618.1,877-895).
ggcattcgctttaaatctt

SEQ ID NO: 477823 - DNA, 19 bp, Mus musculus
  siRNA target sequence for Supt16h (NM_033618.1,878-896).
gcattcgctttaaatctta

SEQ ID NO: 477824 - DNA, 19 bp, Mus musculus
  siRNA target sequence for Supt16h (NM_033618.1,984-1002).
gttgctaaaggaattaaga

SEQ ID NO: 477825 - DNA, 19 bp, Mus musculus
  siRNA target sequence for Supt16h (NM_033618.1,1034-1052).
ctgtcatggatgtggttaa

SEQ ID NO: 477826 - DNA, 19 bp, Mus musculus
  siRNA target sequence for Supt16h (NM_033618.1,1119-1137).
ccgtgaaggctctctagta

SEQ ID NO: 477827 - DNA, 19 bp, Mus musculus
  siRNA target sequence for Supt16h (NM_033618.1,1123-1141).
gaaggctctctagtaatca

SEQ ID NO: 477828 - DNA, 19 bp, Mus musculus
  siRNA target sequence for Supt16h (NM_033618.1,1126-1144).
ggctctctagtaatcaata

SEQ ID NO: 477829 - DNA, 19 bp, Mus musculus
  siRNA target sequence for Supt16h (NM_033618.1,1162-1180).
ctaaagaaagggatggttt

SEQ ID NO: 477830 - DNA, 19 bp, Mus musculus
  siRNA target sequence for Supt16h (NM_033618.1,1185-1203).
catcaatctaggattttca

SEQ ID NO: 477831 - DNA, 19 bp, Mus musculus
  siRNA target sequence for Supt16h (NM_033618.1,1284-1302).
ggatggtccagccactatt

SEQ ID NO: 477832 - DNA, 19 bp, Mus musculus
  siRNA target sequence for Supt16h (NM_033618.1,1288-1306).
ggtccagccactattctta

SEQ ID NO: 477833 - DNA, 19 bp, Mus musculus
  siRNA target sequence for Supt16h (NM_033618.1,1560-1578).
gaaagctcgaaaatctaat

SEQ ID NO: 477834 - DNA, 19 bp, Mus musculus
  siRNA target sequence for Supt16h (NM_033618.1,1564-1582).
gctcgaaaatctaatgtgt

SEQ ID NO: 477835 - DNA, 19 bp, Mus musculus
  siRNA target sequence for Supt16h (NM_033618.1,1616-1634).
cacatattcgggagatgaa

SEQ ID NO: 477836 - DNA, 19 bp, Mus musculus
  siRNA target sequence for Supt16h (NM_033618.1,1624-1642).
cgggagatgaagatctata

SEQ ID NO: 477837 - DNA, 19 bp, Mus musculus
  siRNA target sequence for Supt16h (NM_033618.1,1650-1668).
gaaatatgagactgtgata

SEQ ID NO: 477838 - DNA, 19 bp, Mus musculus
  siRNA target sequence for Supt16h (NM_033618.1,1728-1746).
gtctgtcgaaggagactat

SEQ ID NO: 477839 - DNA, 19 bp, Mus musculus
  siRNA target sequence for Supt16h (NM_033618.1,1748-1766).
cttacttgcgaatcaactt

SEQ ID NO: 477840 - DNA, 19 bp, Mus musculus
  siRNA target sequence for Supt16h (NM_033618.1,1752-1770).
cttgcgaatcaacttctat

SEQ ID NO: 477841 - DNA, 19 bp, Mus musculus
  siRNA target sequence for Supt16h (NM_033618.1,1755-1773).
gcgaatcaacttctattgt

SEQ ID NO: 477842 - DNA, 19 bp, Mus musculus
  siRNA target sequence for Supt16h (NM_033618.1,1798-1816).
gagggcaacatctttccta

SEQ ID NO: 477843 - DNA, 19 bp, Mus musculus
  siRNA target sequence for Supt16h (NM_033618.1,1819-1837).
cctgaagccacttttgtca

SEQ ID NO: 477844 - DNA, 19 bp, Mus musculus
  siRNA target sequence for Supt16h (NM_033618.1,1884-1902).
gactgtacccgccttaaat

SEQ ID NO: 477845 - DNA, 19 bp, Mus musculus
  siRNA target sequence for Supt16h (NM_033618.1,1886-1904).
ctgtacccgccttaaatct

SEQ ID NO: 477846 - DNA, 19 bp, Mus musculus
  siRNA target sequence for Supt16h (NM_033618.1,1892-1910).
ccgccttaaatcttcagaa

SEQ ID NO: 477847 - DNA, 19 bp, Mus musculus
  siRNA target sequence for Supt16h (NM_033618.1,1893-1911).
cgccttaaatcttcagaat

SEQ ID NO: 477848 - DNA, 19 bp, Mus musculus
  siRNA target sequence for Supt16h (NM_033618.1,1906-1924).
cagaatgcgttccgaatta

SEQ ID NO: 477849 - DNA, 19 bp, Mus musculus
  siRNA target sequence for Supt16h (NM_033618.1,1908-1926).
gaatgcgttccgaattata

SEQ ID NO: 477850 - DNA, 19 bp, Mus musculus
  siRNA target sequence for Supt16h (NM_033618.1,1913-1931).
cgttccgaattataaaaga

SEQ ID NO: 477851 - DNA, 19 bp, Mus musculus
  siRNA target sequence for Supt16h (NM_033618.1,1914-1932).
gttccgaattataaaagaa

SEQ ID NO: 477852 - DNA, 19 bp, Mus musculus
  siRNA target sequence for Supt16h (NM_033618.1,1917-1935).
ccgaattataaaagaagta

SEQ ID NO: 477853 - DNA, 19 bp, Mus musculus
  siRNA target sequence for Supt16h (NM_033618.1,1972-1990).
gaaaaagagggcattgtaa

SEQ ID NO: 477854 - DNA, 19 bp, Mus musculus
  siRNA target sequence for Supt16h (NM_033618.1,2000-2018).
cgctggtgatcaacctaaa

SEQ ID NO: 477855 - DNA, 19 bp, Mus musculus
  siRNA target sequence for Supt16h (NM_033618.1,2010-2028).
caacctaaaccggagtaat

SEQ ID NO: 477856 - DNA, 19 bp, Mus musculus
  siRNA target sequence for Supt16h (NM_033618.1,2013-2031).
cctaaaccggagtaatcca

SEQ ID NO: 477857 - DNA, 19 bp, Mus musculus
  siRNA target sequence for Supt16h (NM_033618.1,2014-2032).
ctaaaccggagtaatccaa

SEQ ID NO: 477858 - DNA, 19 bp, Mus musculus
  siRNA target sequence for Supt16h (NM_033618.1,2022-2040).
gagtaatccaaaactgaaa

SEQ ID NO: 477859 - DNA, 19 bp, Mus musculus
  siRNA target sequence for Supt16h (NM_033618.1,2046-2064).
gtacattcgtccaaacatt

SEQ ID NO: 477860 - DNA, 19 bp, Mus musculus
  siRNA target sequence for Supt16h (NM_033618.1,2092-2110).
gaggctcatgtcaatggtt

SEQ ID NO: 477861 - DNA, 19 bp, Mus musculus
  siRNA target sequence for Supt16h (NM_033618.1,2103-2121).
caatggtttccgattcaca

SEQ ID NO: 477862 - DNA, 19 bp, Mus musculus
  siRNA target sequence for Supt16h (NM_033618.1,2139-2157).
ggtggatattctgtacaat

SEQ ID NO: 477863 - DNA, 19 bp, Mus musculus
  siRNA target sequence for Supt16h (NM_033618.1,2183-2201).
cctgtgatggcgagatgat

SEQ ID NO: 477864 - DNA, 19 bp, Mus musculus
  siRNA target sequence for Supt16h (NM_033618.1,2284-2302).
ggagagatcactacagatt

SEQ ID NO: 477865 - DNA, 19 bp, Mus musculus
  siRNA target sequence for Supt16h (NM_033618.1,2497-2515).
ctccttcagcccactagta

SEQ ID NO: 477866 - DNA, 19 bp, Mus musculus
  siRNA target sequence for Supt16h (NM_033618.1,2499-2517).
ccttcagcccactagtagt

SEQ ID NO: 477867 - DNA, 19 bp, Mus musculus
  siRNA target sequence for Supt16h (NM_033618.1,2510-2528).
ctagtagtgccctggtaaa

SEQ ID NO: 477868 - DNA, 19 bp, Mus musculus
  siRNA target sequence for Supt16h (NM_033618.1,2745-2763).
gtctctcaactggactaaa

SEQ ID NO: 477869 - DNA, 19 bp, Mus musculus
  siRNA target sequence for Supt16h (NM_033618.1,2747-2765).
ctctcaactggactaaaat

SEQ ID NO: 477870 - DNA, 19 bp, Mus musculus
  siRNA target sequence for Supt16h (NM_033618.1,2749-2767).
ctcaactggactaaaatca

SEQ ID NO: 477871 - DNA, 19 bp, Mus musculus
  siRNA target sequence for Supt16h (NM_033618.1,2766-2784).
catgaagaccattgttgat

SEQ ID NO: 477872 - DNA, 19 bp, Mus musculus
  siRNA target sequence for Supt16h (NM_033618.1,2789-2807).
ccgagggcttctttgaaca

SEQ ID NO: 477873 - DNA, 19 bp, Mus musculus
  siRNA target sequence for Supt16h (NM_033618.1,2790-2808).
cgagggcttctttgaacaa

SEQ ID NO: 477874 - DNA, 19 bp, Mus musculus
  siRNA target sequence for Supt16h (NM_033618.1,2865-2883).
ctcggagtctgaaattgaa

SEQ ID NO: 477875 - DNA, 19 bp, Mus musculus
  siRNA target sequence for Supt16h (NM_033618.1,2884-2902).
gatgagactttcaatcctt

SEQ ID NO: 477876 - DNA, 19 bp, Mus musculus
  siRNA target sequence for Supt16h (NM_033618.1,2932-2950).
gacagcgatgaagattact

SEQ ID NO: 477877 - DNA, 19 bp, Mus musculus
  siRNA target sequence for Supt16h (NM_033618.1,2934-2952).
cagcgatgaagattactca

SEQ ID NO: 477878 - DNA, 19 bp, Mus musculus
  siRNA target sequence for Supt16h (NM_033618.1,3082-3100).
gaacagagccgaagtatga

SEQ ID NO: 477879 - DNA, 19 bp, Mus musculus
  siRNA target sequence for Supt16h (NM_033618.1,3108-3126).
gaggaaggcatctgtacat

SEQ ID NO: 477880 - DNA, 19 bp, Mus musculus
  siRNA target sequence for Supt16h (NM_033618.1,3114-3132).
ggcatctgtacatagttca

SEQ ID NO: 477881 - DNA, 19 bp, Mus musculus
  siRNA target sequence for Supt16h (NM_033618.1,3167-3185).
ctgcacccccgaagaaaaa

SEQ ID NO: 477882 - DNA, 19 bp, Mus musculus
  siRNA target sequence for Etf1 (NM_144866.2,153-171).
ccagtgctgccgataggaa

SEQ ID NO: 477883 - DNA, 19 bp, Mus musculus
  siRNA target sequence for Etf1 (NM_144866.2,226-244).
caatggcacgagcatgata

SEQ ID NO: 477884 - DNA, 19 bp, Mus musculus
  siRNA target sequence for Etf1 (NM_144866.2,237-255).
gcatgatatcgctgatcat

SEQ ID NO: 477885 - DNA, 19 bp, Mus musculus
  siRNA target sequence for Etf1 (NM_144866.2,238-256).
catgatatcgctgatcatt

SEQ ID NO: 477886 - DNA, 19 bp, Mus musculus
  siRNA target sequence for Etf1 (NM_144866.2,276-294).
cacgagtggcaaaaatgtt

SEQ ID NO: 477887 - DNA, 19 bp, Mus musculus
  siRNA target sequence for Etf1 (NM_144866.2,308-326).
ggaactgcatctaacatta

SEQ ID NO: 477888 - DNA, 19 bp, Mus musculus
  siRNA target sequence for Etf1 (NM_144866.2,309-327).
gaactgcatctaacattaa

SEQ ID NO: 477889 - DNA, 19 bp, Mus musculus
  siRNA target sequence for Etf1 (NM_144866.2,333-351).
gagtaaaccgcctttcagt

SEQ ID NO: 477890 - DNA, 19 bp, Mus musculus
  siRNA target sequence for Etf1 (NM_144866.2,374-392).
caacagagactcaaacttt

SEQ ID NO: 477891 - DNA, 19 bp, Mus musculus
  siRNA target sequence for Etf1 (NM_144866.2,381-399).
gactcaaactttataacaa

SEQ ID NO: 477892 - DNA, 19 bp, Mus musculus
  siRNA target sequence for Etf1 (NM_144866.2,397-415).
caaagtacctccaaatggt

SEQ ID NO: 477893 - DNA, 19 bp, Mus musculus
  siRNA target sequence for Etf1 (NM_144866.2,494-512).
ccaattaatacatcattgt

SEQ ID NO: 477894 - DNA, 19 bp, Mus musculus
  siRNA target sequence for Etf1 (NM_144866.2,495-513).
caattaatacatcattgta

SEQ ID NO: 477895 - DNA, 19 bp, Mus musculus
  siRNA target sequence for Etf1 (NM_144866.2,517-535).
gtgcgacaataagtttcat

SEQ ID NO: 477896 - DNA, 19 bp, Mus musculus
  siRNA target sequence for Etf1 (NM_144866.2,541-559).
ggctcttacagcgttactt

SEQ ID NO: 477897 - DNA, 19 bp, Mus musculus
  siRNA target sequence for Etf1 (NM_144866.2,542-560).
gctcttacagcgttacttt

SEQ ID NO: 477898 - DNA, 19 bp, Mus musculus
  siRNA target sequence for Etf1 (NM_144866.2,563-581).
gatgacagcaagtttggtt

SEQ ID NO: 477899 - DNA, 19 bp, Mus musculus
  siRNA target sequence for Etf1 (NM_144866.2,566-584).
gacagcaagtttggtttta

SEQ ID NO: 477900 - DNA, 19 bp, Mus musculus
  siRNA target sequence for Etf1 (NM_144866.2,568-586).
cagcaagtttggttttatt

SEQ ID NO: 477901 - DNA, 19 bp, Mus musculus
  siRNA target sequence for Etf1 (NM_144866.2,595-613).
cggaagtggtgctcttttt

SEQ ID NO: 477902 - DNA, 19 bp, Mus musculus
  siRNA target sequence for Etf1 (NM_144866.2,636-654).
gagaagtcctgcacaaatt

SEQ ID NO: 477903 - DNA, 19 bp, Mus musculus
  siRNA target sequence for Etf1 (NM_144866.2,679-697).
cggcagaggaggtcaatca

SEQ ID NO: 477904 - DNA, 19 bp, Mus musculus
  siRNA target sequence for Etf1 (NM_144866.2,703-721).
gcgttttgcccgtttaaga

SEQ ID NO: 477905 - DNA, 19 bp, Mus musculus
  siRNA target sequence for Etf1 (NM_144866.2,704-722).
cgttttgcccgtttaagaa

SEQ ID NO: 477906 - DNA, 19 bp, Mus musculus
  siRNA target sequence for Etf1 (NM_144866.2,705-723).
gttttgcccgtttaagaat

SEQ ID NO: 477907 - DNA, 19 bp, Mus musculus
  siRNA target sequence for Etf1 (NM_144866.2,762-780).
ctgctgtgcagctgtttat

SEQ ID NO: 477908 - DNA, 19 bp, Mus musculus
  siRNA target sequence for Etf1 (NM_144866.2,764-782).
gctgtgcagctgtttattt

SEQ ID NO: 477909 - DNA, 19 bp, Mus musculus
  siRNA target sequence for Etf1 (NM_144866.2,821-839).
ggatcagctgactttaaaa

SEQ ID NO: 477910 - DNA, 19 bp, Mus musculus
  siRNA target sequence for Etf1 (NM_144866.2,927-945).
gattcaaccaagctattga

SEQ ID NO: 477911 - DNA, 19 bp, Mus musculus
  siRNA target sequence for Etf1 (NM_144866.2,931-949).
caaccaagctattgaatta

SEQ ID NO: 477912 - DNA, 19 bp, Mus musculus
  siRNA target sequence for Etf1 (NM_144866.2,966-984).
ccaacgtgaagttcattca

SEQ ID NO: 477913 - DNA, 19 bp, Mus musculus
  siRNA target sequence for Etf1 (NM_144866.2,967-985).
caacgtgaagttcattcaa

SEQ ID NO: 477914 - DNA, 19 bp, Mus musculus
  siRNA target sequence for Etf1 (NM_144866.2,1028-1046).
gacacaggcaagtactgtt

SEQ ID NO: 477915 - DNA, 19 bp, Mus musculus
  siRNA target sequence for Etf1 (NM_144866.2,1049-1067).
ggagttgaagatacactaa

SEQ ID NO: 477916 - DNA, 19 bp, Mus musculus
  siRNA target sequence for Etf1 (NM_144866.2,1050-1068).
gagttgaagatacactaaa

SEQ ID NO: 477917 - DNA, 19 bp, Mus musculus
  siRNA target sequence for Etf1 (NM_144866.2,1062-1080).
cactaaaggctttggaaat

SEQ ID NO: 477918 - DNA, 19 bp, Mus musculus
  siRNA target sequence for Etf1 (NM_144866.2,1086-1104).
ctgtagaaattctaatagt

SEQ ID NO: 477919 - DNA, 19 bp, Mus musculus
  siRNA target sequence for Etf1 (NM_144866.2,1088-1106).
gtagaaattctaatagtct

SEQ ID NO: 477920 - DNA, 19 bp, Mus musculus
  siRNA target sequence for Etf1 (NM_144866.2,1109-1127).
gaaaatctggatataatga

SEQ ID NO: 477921 - DNA, 19 bp, Mus musculus
  siRNA target sequence for Etf1 (NM_144866.2,1171-1189).
ctatttaactccagaacaa

SEQ ID NO: 477922 - DNA, 19 bp, Mus musculus
  siRNA target sequence for Etf1 (NM_144866.2,1231-1249).
ggaacacgaactgatagaa

SEQ ID NO: 477923 - DNA, 19 bp, Mus musculus
  siRNA target sequence for Etf1 (NM_144866.2,1232-1250).
gaacacgaactgatagaaa

SEQ ID NO: 477924 - DNA, 19 bp, Mus musculus
  siRNA target sequence for Etf1 (NM_144866.2,1279-1297).
caactataaaaaatttgga

SEQ ID NO: 477925 - DNA, 19 bp, Mus musculus
  siRNA target sequence for Etf1 (NM_144866.2,1296-1314).
gagctacactagaaattgt

SEQ ID NO: 477926 - DNA, 19 bp, Mus musculus
  siRNA target sequence for Etf1 (NM_144866.2,1307-1325).
gaaattgtcacagataagt

SEQ ID NO: 477927 - DNA, 19 bp, Mus musculus
  siRNA target sequence for Etf1 (NM_144866.2,1375-1393).
cttgcggtaccgagtagat

SEQ ID NO: 477928 - DNA, 19 bp, Mus musculus
  siRNA target sequence for Etf1 (NM_144866.2,1380-1398).
ggtaccgagtagatttcca

SEQ ID NO: 477929 - DNA, 19 bp, Mus musculus
  siRNA target sequence for 9130004K12Rik (NM_175374.2,413-431).
gcggagagtgaaatagctt

SEQ ID NO: 477930 - DNA, 19 bp, Mus musculus
  siRNA target sequence for 9130004K12Rik (NM_175374.2,414-432).
cggagagtgaaatagcttt

SEQ ID NO: 477931 - DNA, 19 bp, Mus musculus
  siRNA target sequence for 9130004K12Rik (NM_175374.2,457-475).
gaagcatcagattatctca

SEQ ID NO: 477932 - DNA, 19 bp, Mus musculus
  siRNA target sequence for 9130004K12Rik (NM_175374.2,543-561).
gtcaggaagccatgctttt

SEQ ID NO: 477933 - DNA, 19 bp, Mus musculus
  siRNA target sequence for 9130004K12Rik (NM_175374.2,547-565).
ggaagccatgcttttcact

SEQ ID NO: 477934 - DNA, 19 bp, Mus musculus
  siRNA target sequence for 9130004K12Rik (NM_175374.2,587-605).
cagcagtacgctgcattta

SEQ ID NO: 477935 - DNA, 19 bp, Mus musculus
  siRNA target sequence for 9130004K12Rik (NM_175374.2,800-818).
ccccagcctactgagatta

SEQ ID NO: 477936 - DNA, 19 bp, Mus musculus
  siRNA target sequence for 9130004K12Rik (NM_175374.2,802-820).
ccagcctactgagattaaa

SEQ ID NO: 477937 - DNA, 19 bp, Mus musculus
  siRNA target sequence for 9130004K12Rik (NM_175374.2,823-841).
ggtgatcaatcctaaagat

SEQ ID NO: 477938 - DNA, 19 bp, Mus musculus
  siRNA target sequence for 9130004K12Rik (NM_175374.2,824-842).
gtgatcaatcctaaagatt

SEQ ID NO: 477939 - DNA, 19 bp, Mus musculus
  siRNA target sequence for 9130004K12Rik (NM_175374.2,829-847).
caatcctaaagatttgaga

SEQ ID NO: 477940 - DNA, 19 bp, Mus musculus
  siRNA target sequence for 9130004K12Rik (NM_175374.2,873-891).
ctggcggtcagcacgtaaa

SEQ ID NO: 477941 - DNA, 19 bp, Mus musculus
  siRNA target sequence for 9130004K12Rik (NM_175374.2,875-893).
ggcggtcagcacgtaaaca

SEQ ID NO: 477942 - DNA, 19 bp, Mus musculus
  siRNA target sequence for 9130004K12Rik (NM_175374.2,920-938).
catctgcctacaggtatta

SEQ ID NO: 477943 - DNA, 19 bp, Mus musculus
  siRNA target sequence for 9130004K12Rik (NM_175374.2,923-941).
ctgcctacaggtattattt

SEQ ID NO: 477944 - DNA, 19 bp, Mus musculus
  siRNA target sequence for 9130004K12Rik (NM_175374.2,927-945).
ctacaggtattatttctga

SEQ ID NO: 477945 - DNA, 19 bp, Mus musculus
  siRNA target sequence for 9130004K12Rik (NM_175374.2,976-994).
cagggagctggctatgaaa

SEQ ID NO: 477946 - DNA, 19 bp, Mus musculus
  siRNA target sequence for 9130004K12Rik (NM_175374.2,980-998).
gagctggctatgaaaaagt

SEQ ID NO: 477947 - DNA, 19 bp, Mus musculus
  siRNA target sequence for 9130004K12Rik (NM_175374.2,982-1000).
gctggctatgaaaaagtta

SEQ ID NO: 477948 - DNA, 19 bp, Mus musculus
  siRNA target sequence for 9130004K12Rik (NM_175374.2,997-1015).
gttacgtgcaaggctatat

SEQ ID NO: 477949 - DNA, 19 bp, Mus musculus
  siRNA target sequence for 9130004K12Rik (NM_175374.2,1001-1019).
cgtgcaaggctatatagca

SEQ ID NO: 477950 - DNA, 19 bp, Mus musculus
  siRNA target sequence for 9130004K12Rik (NM_175374.2,1002-1020).
gtgcaaggctatatagcat

SEQ ID NO: 477951 - DNA, 19 bp, Mus musculus
  siRNA target sequence for 9130004K12Rik (NM_175374.2,1034-1052).
gaaactgctaaaagataca

SEQ ID NO: 477952 - DNA, 19 bp, Mus musculus
  siRNA target sequence for 9130004K12Rik (NM_175374.2,1066-1084).
ccaggttggaactaaagga

SEQ ID NO: 477953 - DNA, 19 bp, Mus musculus
  siRNA target sequence for 9130004K12Rik (NM_175374.2,1067-1085).
caggttggaactaaaggaa

SEQ ID NO: 477954 - DNA, 19 bp, Mus musculus
  siRNA target sequence for 9130004K12Rik (NM_175374.2,1125-1143).
gggtcacagatcacagaat

SEQ ID NO: 477955 - DNA, 19 bp, Mus musculus
  siRNA target sequence for 9130004K12Rik (NM_175374.2,1131-1149).
cagatcacagaataaacaa

SEQ ID NO: 477956 - DNA, 19 bp, Mus musculus
  siRNA target sequence for 9130004K12Rik (NM_175374.2,1157-1175).
cacgaccttgagagcttta

SEQ ID NO: 477957 - DNA, 19 bp, Mus musculus
  siRNA target sequence for 9130004K12Rik (NM_175374.2,1162-1180).
ccttgagagctttatgcaa

SEQ ID NO: 477958 - DNA, 19 bp, Mus musculus
  siRNA target sequence for 9130004K12Rik (NM_175374.2,1188-1206).
gtcttctggatgacatgat

SEQ ID NO: 477959 - DNA, 19 bp, Mus musculus
  siRNA target sequence for 9130004K12Rik (NM_175374.2,1216-1234).
gaaggactgttcggattat

SEQ ID NO: 477960 - DNA, 19 bp, Mus musculus
  siRNA target sequence for 9130004K12Rik (NM_175374.2,1228-1246).
ggattatgaggctctagta

SEQ ID NO: 477961 - DNA, 19 bp, Mus musculus
  siRNA target sequence for 9130004K12Rik (NM_175374.2,1237-1255).
ggctctagtagaaatgatt

SEQ ID NO: 477962 - DNA, 19 bp, Mus musculus
  siRNA target sequence for Ict1 (NM_026729.1,140-158).
ctctggatcggttaagcat

SEQ ID NO: 477963 - DNA, 19 bp, Mus musculus
  siRNA target sequence for Ict1 (NM_026729.1,142-160).
ctggatcggttaagcatat

SEQ ID NO: 477964 - DNA, 19 bp, Mus musculus
  siRNA target sequence for Ict1 (NM_026729.1,144-162).
ggatcggttaagcatatct

SEQ ID NO: 477965 - DNA, 19 bp, Mus musculus
  siRNA target sequence for Ict1 (NM_026729.1,145-163).
gatcggttaagcatatctt

SEQ ID NO: 477966 - DNA, 19 bp, Mus musculus
  siRNA target sequence for Ict1 (NM_026729.1,148-166).
cggttaagcatatcttact

SEQ ID NO: 477967 - DNA, 19 bp, Mus musculus
  siRNA target sequence for Ict1 (NM_026729.1,179-197).
gtcctggtgggcagaatgt

SEQ ID NO: 477968 - DNA, 19 bp, Mus musculus
  siRNA target sequence for Ict1 (NM_026729.1,185-203).
gtgggcagaatgtgaacaa

SEQ ID NO: 477969 - DNA, 19 bp, Mus musculus
  siRNA target sequence for Ict1 (NM_026729.1,212-230).
ccaaggctgaagtaaggtt

SEQ ID NO: 477970 - DNA, 19 bp, Mus musculus
  siRNA target sequence for Ict1 (NM_026729.1,217-235).
gctgaagtaaggtttcact

SEQ ID NO: 477971 - DNA, 19 bp, Mus musculus
  siRNA target sequence for Ict1 (NM_026729.1,218-236).
ctgaagtaaggtttcactt

SEQ ID NO: 477972 - DNA, 19 bp, Mus musculus
  siRNA target sequence for Ict1 (NM_026729.1,261-279).
gcccgtgcgccagaagatt

SEQ ID NO: 477973 - DNA, 19 bp, Mus musculus
  siRNA target sequence for Ict1 (NM_026729.1,276-294).
gattgccctcacgcataaa

SEQ ID NO: 477974 - DNA, 19 bp, Mus musculus
  siRNA target sequence for Ict1 (NM_026729.1,280-298).
gccctcacgcataaaaata

SEQ ID NO: 477975 - DNA, 19 bp, Mus musculus
  siRNA target sequence for Ict1 (NM_026729.1,283-301).
ctcacgcataaaaataaga

SEQ ID NO: 477976 - DNA, 19 bp, Mus musculus
  siRNA target sequence for Ict1 (NM_026729.1,334-352).
gagagcagccggtatcagt

SEQ ID NO: 477977 - DNA, 19 bp, Mus musculus
  siRNA target sequence for Ict1 (NM_026729.1,378-396).
gaaaattcgagacatgatt

SEQ ID NO: 477978 - DNA, 19 bp, Mus musculus
  siRNA target sequence for Ict1 (NM_026729.1,487-505).
cgacagaaaagactaaact

SEQ ID NO: 477979 - DNA, 19 bp, Mus musculus
  siRNA target sequence for Mtrf1 (NM_145960.2,385-403).
gagtcatcacctgtgtatt

SEQ ID NO: 477980 - DNA, 19 bp, Mus musculus
  siRNA target sequence for Mtrf1 (NM_145960.2,405-423).
ggctttttcggaatccatt

SEQ ID NO: 477981 - DNA, 19 bp, Mus musculus
  siRNA target sequence for Mtrf1 (NM_145960.2,435-453).
gcccccagagacatgtctt

SEQ ID NO: 477982 - DNA, 19 bp, Mus musculus
  siRNA target sequence for Mtrf1 (NM_145960.2,473-491).
cgacagataagccttgata

SEQ ID NO: 477983 - DNA, 19 bp, Mus musculus
  siRNA target sequence for Mtrf1 (NM_145960.2,476-494).
cagataagccttgatacaa

SEQ ID NO: 477984 - DNA, 19 bp, Mus musculus
  siRNA target sequence for Mtrf1 (NM_145960.2,488-506).
gatacaaggccgtggaatt

SEQ ID NO: 477985 - DNA, 19 bp, Mus musculus
  siRNA target sequence for Mtrf1 (NM_145960.2,495-513).
ggccgtggaattttagaca

SEQ ID NO: 477986 - DNA, 19 bp, Mus musculus
  siRNA target sequence for Mtrf1 (NM_145960.2,496-514).
gccgtggaattttagacaa

SEQ ID NO: 477987 - DNA, 19 bp, Mus musculus
  siRNA target sequence for Mtrf1 (NM_145960.2,623-641).
gaagacctgaataaagagt

SEQ ID NO: 477988 - DNA, 19 bp, Mus musculus
  siRNA target sequence for Mtrf1 (NM_145960.2,629-647).
ctgaataaagagtaccaaa

SEQ ID NO: 477989 - DNA, 19 bp, Mus musculus
  siRNA target sequence for Mtrf1 (NM_145960.2,667-685).
gggtatctctgagaatgaa

SEQ ID NO: 477990 - DNA, 19 bp, Mus musculus
  siRNA target sequence for Mtrf1 (NM_145960.2,689-707).
gaccgaagggccttacaca

SEQ ID NO: 477991 - DNA, 19 bp, Mus musculus
  siRNA target sequence for Mtrf1 (NM_145960.2,734-752).
gcggctgtttaccaagaaa

SEQ ID NO: 477992 - DNA, 19 bp, Mus musculus
  siRNA target sequence for Mtrf1 (NM_145960.2,735-753).
cggctgtttaccaagaaat

SEQ ID NO: 477993 - DNA, 19 bp, Mus musculus
  siRNA target sequence for Mtrf1 (NM_145960.2,760-778).
ggccgaacaagccattgaa

SEQ ID NO: 477994 - DNA, 19 bp, Mus musculus
  siRNA target sequence for Mtrf1 (NM_145960.2,787-805).
gtcattgtgtaaaagtcta

SEQ ID NO: 477995 - DNA, 19 bp, Mus musculus
  siRNA target sequence for Mtrf1 (NM_145960.2,868-886).
gaagatccacagactgtat

SEQ ID NO: 477996 - DNA, 19 bp, Mus musculus
  siRNA target sequence for Mtrf1 (NM_145960.2,879-897).
gactgtatagtgagctttt

SEQ ID NO: 477997 - DNA, 19 bp, Mus musculus
  siRNA target sequence for Mtrf1 (NM_145960.2,910-928).
gcctaaggagaagtatgat

SEQ ID NO: 477998 - DNA, 19 bp, Mus musculus
  siRNA target sequence for Mtrf1 (NM_145960.2,931-949).
gagtgacgttattctagaa

SEQ ID NO: 477999 - DNA, 19 bp, Mus musculus
  siRNA target sequence for Mtrf1 (NM_145960.2,933-951).
gtgacgttattctagaagt

SEQ ID NO: 478000 - DNA, 19 bp, Mus musculus
  siRNA target sequence for Mtrf1 (NM_145960.2,977-995).
gatatctgccaacagttta

SEQ ID NO: 478001 - DNA, 19 bp, Mus musculus
  siRNA target sequence for Mtrf1 (NM_145960.2,989-1007).
cagtttacccgggaaatat

SEQ ID NO: 478002 - DNA, 19 bp, Mus musculus
  siRNA target sequence for Mtrf1 (NM_145960.2,991-1009).
gtttacccgggaaatattt

SEQ ID NO: 478003 - DNA, 19 bp, Mus musculus
  siRNA target sequence for Mtrf1 (NM_145960.2,1075-1093).
cgattatggtggactacat

SEQ ID NO: 478004 - DNA, 19 bp, Mus musculus
  siRNA target sequence for Mtrf1 (NM_145960.2,1141-1159).
gtatgaaggcggaatccat

SEQ ID NO: 478005 - DNA, 19 bp, Mus musculus
  siRNA target sequence for Mtrf1 (NM_145960.2,1196-1214).
cggatgcagcgcattcaca

SEQ ID NO: 478006 - DNA, 19 bp, Mus musculus
  siRNA target sequence for Mtrf1 (NM_145960.2,1285-1303).
gcgagtagacacatttcga

SEQ ID NO: 478007 - DNA, 19 bp, Mus musculus
  siRNA target sequence for Mtrf1 (NM_145960.2,1368-1386).
ccacgggactggtagtaga

SEQ ID NO: 478008 - DNA, 19 bp, Mus musculus
  siRNA target sequence for Mtrf1 (NM_145960.2,1397-1415).
gaacgatcacagctgaaaa

SEQ ID NO: 478009 - DNA, 19 bp, Mus musculus
  siRNA target sequence for Mtrf1 (NM_145960.2,1446-1464).
ccagactctaccaacagat

SEQ ID NO: 478010 - DNA, 19 bp, Mus musculus
  siRNA target sequence for Mtrf1 (NM_145960.2,1447-1465).
cagactctaccaacagata

SEQ ID NO: 478011 - DNA, 19 bp, Mus musculus
  siRNA target sequence for Mtrf1 (NM_145960.2,1449-1467).
gactctaccaacagataat

SEQ ID NO: 478012 - DNA, 19 bp, Mus musculus
  siRNA target sequence for Mtrf1 (NM_145960.2,1486-1504).
gcagcagaatgctagaaaa

SEQ ID NO: 478013 - DNA, 19 bp, Mus musculus
  siRNA target sequence for Mtrf1 (NM_145960.2,1521-1539).
gagcccagtcggagagaat

SEQ ID NO: 478014 - DNA, 19 bp, Mus musculus
  siRNA target sequence for Mtrf1 (NM_145960.2,1534-1552).
gagaattcggacatataat

SEQ ID NO: 478015 - DNA, 19 bp, Mus musculus
  siRNA target sequence for Mtrf1 (NM_145960.2,1536-1554).
gaattcggacatataattt

SEQ ID NO: 478016 - DNA, 19 bp, Mus musculus
  siRNA target sequence for Mtrf1 (NM_145960.2,1579-1597).
caggatagcgtatgaagtt

SEQ ID NO: 478017 - DNA, 19 bp, Mus musculus
  siRNA target sequence for Mtrf1 (NM_145960.2,1595-1613).
gttcgtgacattaaggaat

SEQ ID NO: 478018 - DNA, 19 bp, Mus musculus
  siRNA target sequence for Mtrf1 (NM_145960.2,1632-1650).
gcctggatcagctaattga

SEQ ID NO: 478019 - DNA, 19 bp, Mus musculus
  siRNA target sequence for Mtrf1 (NM_145960.2,1676-1694).
gaggccatttccgaatttt

SEQ ID NO: 478020 - DNA, 19 bp, Mus musculus
  siRNA target sequence for Mtrf1 (NM_145960.2,1696-1714).
ggatgaaagccttcaatca

SEQ ID NO: 478021 - DNA, 19 bp, Mus musculus
  siRNA target sequence for 0610027A18Rik (NM_026157.1,121-139).
cagttgtccagggactatt

SEQ ID NO: 478022 - DNA, 19 bp, Mus musculus
  siRNA target sequence for 0610027A18Rik (NM_026157.1,147-165).
gcatcgggagcgaagaaca

SEQ ID NO: 478023 - DNA, 19 bp, Mus musculus
  siRNA target sequence for 0610027A18Rik (NM_026157.1,180-198).
cggaaacaggcattgaaga

SEQ ID NO: 478024 - DNA, 19 bp, Mus musculus
  siRNA target sequence for 0610027A18Rik (NM_026157.1,205-223).
cctccaaaagaaattctct

SEQ ID NO: 478025 - DNA, 19 bp, Mus musculus
  siRNA target sequence for 0610027A18Rik (NM_026157.1,251-269).
gcccagcggactgttttga

SEQ ID NO: 478026 - DNA, 19 bp, Mus musculus
  siRNA target sequence for 0610027A18Rik (NM_026157.1,252-270).
cccagcggactgttttgat

SEQ ID NO: 478027 - DNA, 19 bp, Mus musculus
  siRNA target sequence for 0610027A18Rik (NM_026157.1,253-271).
ccagcggactgttttgata

SEQ ID NO: 478028 - DNA, 19 bp, Mus musculus
  siRNA target sequence for 0610027A18Rik (NM_026157.1,256-274).
gcggactgttttgatacat

SEQ ID NO: 478029 - DNA, 19 bp, Mus musculus
  siRNA target sequence for 0610027A18Rik (NM_026157.1,257-275).
cggactgttttgatacatt

SEQ ID NO: 478030 - DNA, 19 bp, Mus musculus
  siRNA target sequence for 0610027A18Rik (NM_026157.1,268-286).
gatacattgtccaaataat

SEQ ID NO: 478031 - DNA, 19 bp, Mus musculus
  siRNA target sequence for 0610027A18Rik (NM_026157.1,276-294).
gtccaaataatatcaatga

SEQ ID NO: 478032 - DNA, 19 bp, Mus musculus
  siRNA target sequence for 0610027A18Rik (NM_026157.1,278-296).
ccaaataatatcaatgaga

SEQ ID NO: 478033 - DNA, 19 bp, Mus musculus
  siRNA target sequence for 0610027A18Rik (NM_026157.1,319-337).
ccagcatggaccagtcaat

SEQ ID NO: 478034 - DNA, 19 bp, Mus musculus
  siRNA target sequence for 0610027A18Rik (NM_026157.1,322-340).
gcatggaccagtcaataat

SEQ ID NO: 478035 - DNA, 19 bp, Mus musculus
  siRNA target sequence for 0610027A18Rik (NM_026157.1,326-344).
ggaccagtcaataatcatt

SEQ ID NO: 478036 - DNA, 19 bp, Mus musculus
  siRNA target sequence for 0610027A18Rik (NM_026157.1,327-345).
gaccagtcaataatcattt

SEQ ID NO: 478037 - DNA, 19 bp, Mus musculus
  siRNA target sequence for 0610027A18Rik (NM_026157.1,439-457).
gagcacagaggctgcaatt

SEQ ID NO: 478038 - DNA, 19 bp, Mus musculus
  siRNA target sequence for 0610027A18Rik (NM_026157.1,444-462).
cagaggctgcaattccatt

SEQ ID NO: 478039 - DNA, 19 bp, Mus musculus
  siRNA target sequence for 0610027A18Rik (NM_026157.1,446-464).
gaggctgcaattccattta

SEQ ID NO: 478040 - DNA, 19 bp, Mus musculus
  siRNA target sequence for 0610027A18Rik (NM_026157.1,449-467).
gctgcaattccatttaagt

SEQ ID NO: 478041 - DNA, 19 bp, Mus musculus
  siRNA target sequence for 0610027A18Rik (NM_026157.1,466-484).
gtcacggttcttgaactta

SEQ ID NO: 478042 - DNA, 19 bp, Mus musculus
  siRNA target sequence for 0610027A18Rik (NM_026157.1,478-496).
gaacttaaggctgaagaat

SEQ ID NO: 478043 - DNA, 19 bp, Mus musculus
  siRNA target sequence for 0610027A18Rik (NM_026157.1,546-564).
cacctccttcaagcaaaaa

SEQ ID NO: 478044 - DNA, 19 bp, Mus musculus
  siRNA target sequence for 0610027A18Rik (NM_026157.1,549-567).
ctccttcaagcaaaaagct

SEQ ID NO: 478045 - DNA, 19 bp, Mus musculus
  siRNA target sequence for 0610027A18Rik (NM_026157.1,558-576).
gcaaaaagctctttgaatt

SEQ ID NO: 478046 - DNA, 19 bp, Mus musculus
  siRNA target sequence for 0610027A18Rik (NM_026157.1,745-763).
cacatttggcaaattagga

SEQ ID NO: 478047 - DNA, 19 bp, Mus musculus
  siRNA target sequence for 0610027A18Rik (NM_026157.1,752-770).
ggcaaattaggatgtgatt

SEQ ID NO: 478048 - DNA, 19 bp, Mus musculus
  siRNA target sequence for 0610027A18Rik (NM_026157.1,778-796).
gtttttagatctagatgaa

SEQ ID NO: 478049 - DNA, 19 bp, Mus musculus
  siRNA target sequence for 0610027A18Rik (NM_026157.1,806-824).
cttgatgttcacaagaata

SEQ ID NO: 478050 - DNA, 19 bp, Mus musculus
  siRNA target sequence for 0610027A18Rik (NM_026157.1,873-891).
gaattgcaacccagaagat

SEQ ID NO: 478051 - DNA, 19 bp, Mus musculus
  siRNA target sequence for 0610027A18Rik (NM_026157.1,882-900).
cccagaagatcctatctgt

SEQ ID NO: 478052 - DNA, 19 bp, Mus musculus
  siRNA target sequence for 0610027A18Rik (NM_026157.1,883-901).
ccagaagatcctatctgta

SEQ ID NO: 478053 - DNA, 19 bp, Mus musculus
  siRNA target sequence for 0610027A18Rik (NM_026157.1,889-907).
gatcctatctgtaatagga

SEQ ID NO: 478054 - DNA, 19 bp, Mus musculus
  siRNA target sequence for 0610027A18Rik (NM_026157.1,906-924).
gagagtgccttgacaattt

SEQ ID NO: 478055 - DNA, 19 bp, Mus musculus
  siRNA target sequence for 0610027A18Rik (NM_026157.1,933-951).
gctgtgtgggtgttcagaa

SEQ ID NO: 478056 - DNA, 19 bp, Mus musculus
  siRNA target sequence for 0610027A18Rik (NM_026157.1,941-959).
ggtgttcagaagatactca

SEQ ID NO: 478057 - DNA, 19 bp, Mus musculus
  siRNA target sequence for 0610027A18Rik (NM_026157.1,1016-1034).
ctgactgctaacaatagta

SEQ ID NO: 478058 - DNA, 19 bp, Mus musculus
  siRNA target sequence for 0610027A18Rik (NM_026157.1,1022-1040).
gctaacaatagtattgctt

SEQ ID NO: 478059 - DNA, 19 bp, Mus musculus
  siRNA target sequence for 0610027A18Rik (NM_026157.1,1023-1041).
ctaacaatagtattgcttt

SEQ ID NO: 478060 - DNA, 19 bp, Mus musculus
  siRNA target sequence for 0610027A18Rik (NM_026157.1,1047-1065).
gttccgaactcctttatat

SEQ ID NO: 478061 - DNA, 19 bp, Mus musculus
  siRNA target sequence for 0610027A18Rik (NM_026157.1,1050-1068).
ccgaactcctttatatata

SEQ ID NO: 478062 - DNA, 19 bp, Mus musculus
  siRNA target sequence for 0610027A18Rik (NM_026157.1,1117-1135).
ctgggctcgggcacattca

SEQ ID NO: 478063 - DNA, 19 bp, Mus musculus
  siRNA target sequence for 0610027A18Rik (NM_026157.1,1119-1137).
gggctcgggcacattcatt

SEQ ID NO: 478064 - DNA, 19 bp, Mus musculus
  siRNA target sequence for 0610027A18Rik (NM_026157.1,1120-1138).
ggctcgggcacattcatta

SEQ ID NO: 478065 - DNA, 19 bp, Mus musculus
  siRNA target sequence for 0610027A18Rik (NM_026157.1,1124-1142).
cgggcacattcattaacaa

SEQ ID NO: 478066 - DNA, 19 bp, Mus musculus
  siRNA target sequence for 0610027A18Rik (NM_026157.1,1280-1298).
ctagaggggaacaattgta

SEQ ID NO: 478067 - DNA, 19 bp, Mus musculus
  siRNA target sequence for 0610027A18Rik (NM_026157.1,1283-1301).
gaggggaacaattgtacat

SEQ ID NO: 478068 - DNA, 19 bp, Mus musculus
  siRNA target sequence for 0610027A18Rik (NM_026157.1,1303-1321).
cgtccaggatgtgaataaa

SEQ ID NO: 478069 - DNA, 19 bp, Mus musculus
  siRNA target sequence for 0610027A18Rik (NM_026157.1,1309-1327).
ggatgtgaataaaattcaa

SEQ ID NO: 478070 - DNA, 19 bp, Mus musculus
  siRNA target sequence for 0610027A18Rik (NM_026157.1,1352-1370).
gaattactaataaaggaat

SEQ ID NO: 478071 - DNA, 19 bp, Mus musculus
  siRNA target sequence for 0610027A18Rik (NM_026157.1,1385-1403).
ggcaatttcgctttcaata

SEQ ID NO: 478072 - DNA, 19 bp, Mus musculus
  siRNA target sequence for 0610027A18Rik (NM_026157.1,1465-1483).
catccagaatccttttgaa

SEQ ID NO: 478073 - DNA, 19 bp, Mus musculus
  siRNA target sequence for 0610027A18Rik (NM_026157.1,1516-1534).
gagccagctacaaaaattt

SEQ ID NO: 478074 - DNA, 19 bp, Mus musculus
  siRNA target sequence for 0610027A18Rik (NM_026157.1,1577-1595).
gataagaatcagccttttt

SEQ ID NO: 478075 - DNA, 19 bp, Mus musculus
  siRNA target sequence for 0610027A18Rik (NM_026157.1,1706-1724).
ggcttgttagcatccataa

SEQ ID NO: 478076 - DNA, 19 bp, Mus musculus
  siRNA target sequence for 0610027A18Rik (NM_026157.1,1707-1725).
gcttgttagcatccataaa

SEQ ID NO: 478077 - DNA, 19 bp, Mus musculus
  siRNA target sequence for 0610027A18Rik (NM_026157.1,1760-1778).
ggaaagagaacaattagta

SEQ ID NO: 478078 - DNA, 19 bp, Mus musculus
  siRNA target sequence for 0610033I05Rik (NM_030243.2,354-372).
cagcgtggaaggtcaaaga

SEQ ID NO: 478079 - DNA, 19 bp, Mus musculus
  siRNA target sequence for 0610033I05Rik (NM_030243.2,364-382).
ggtcaaagatcctacagtt

SEQ ID NO: 478080 - DNA, 19 bp, Mus musculus
  siRNA target sequence for 0610033I05Rik (NM_030243.2,470-488).
catgtggaagaggtgatat

SEQ ID NO: 478081 - DNA, 19 bp, Mus musculus
  siRNA target sequence for 0610033I05Rik (NM_030243.2,475-493).
ggaagaggtgatatatcca

SEQ ID NO: 478082 - DNA, 19 bp, Mus musculus
  siRNA target sequence for 0610033I05Rik (NM_030243.2,481-499).
ggtgatatatccatcaaaa

SEQ ID NO: 478083 - DNA, 19 bp, Mus musculus
  siRNA target sequence for 0610033I05Rik (NM_030243.2,482-500).
gtgatatatccatcaaaat

SEQ ID NO: 478084 - DNA, 19 bp, Mus musculus
  siRNA target sequence for 0610033I05Rik (NM_030243.2,501-519).
ccaaaggagttgcgtatat

SEQ ID NO: 478085 - DNA, 19 bp, Mus musculus
  siRNA target sequence for 0610033I05Rik (NM_030243.2,506-524).
ggagttgcgtatatcatct

SEQ ID NO: 478086 - DNA, 19 bp, Mus musculus
  siRNA target sequence for 0610033I05Rik (NM_030243.2,507-525).
gagttgcgtatatcatctt

SEQ ID NO: 478087 - DNA, 19 bp, Mus musculus
  siRNA target sequence for 0610033I05Rik (NM_030243.2,509-527).
gttgcgtatatcatcttca

SEQ ID NO: 478088 - DNA, 19 bp, Mus musculus
  siRNA target sequence for 0610033I05Rik (NM_030243.2,539-557).
gttgcacaagacttcatca

SEQ ID NO: 478089 - DNA, 19 bp, Mus musculus
  siRNA target sequence for 0610033I05Rik (NM_030243.2,545-563).
caagacttcatcagacaaa

SEQ ID NO: 478090 - DNA, 19 bp, Mus musculus
  siRNA target sequence for 0610033I05Rik (NM_030243.2,612-630).
gtgaaaaggtcttcaacta

SEQ ID NO: 478091 - DNA, 19 bp, Mus musculus
  siRNA target sequence for 0610033I05Rik (NM_030243.2,686-704).
ctagtagtggacctgaaaa

SEQ ID NO: 478092 - DNA, 19 bp, Mus musculus
  siRNA target sequence for 0610033I05Rik (NM_030243.2,768-786).
catttctggccatcatgaa

SEQ ID NO: 478093 - DNA, 19 bp, Mus musculus
  siRNA target sequence for 0610033I05Rik (NM_030243.2,787-805).
gctcaaacaggctttgata

SEQ ID NO: 478094 - DNA, 19 bp, Mus musculus
  siRNA target sequence for 0610033I05Rik (NM_030243.2,904-922).
gaactcggcgtcgatactt

SEQ ID NO: 478095 - DNA, 19 bp, Mus musculus
  siRNA target sequence for 0610033I05Rik (NM_030243.2,916-934).
gatacttgggacctttgta

SEQ ID NO: 478096 - DNA, 19 bp, Mus musculus
  siRNA target sequence for 0610033I05Rik (NM_030243.2,946-964).
cggcagcccagaaacactt

SEQ ID NO: 478097 - DNA, 19 bp, Mus musculus
  siRNA target sequence for 0610033I05Rik (NM_030243.2,975-993).
cagacattttcctttatct

SEQ ID NO: 478098 - DNA, 19 bp, Mus musculus
  siRNA target sequence for 0610033I05Rik (NM_030243.2,1016-1034).
catctaacactgagcaaat

SEQ ID NO: 478099 - DNA, 19 bp, Mus musculus
  siRNA target sequence for 0610033I05Rik (NM_030243.2,1069-1087).
cgtcactaccatttgtcta

SEQ ID NO: 478100 - DNA, 19 bp, Mus musculus
  siRNA target sequence for 0610033I05Rik (NM_030243.2,1074-1092).
ctaccatttgtctacaaga

SEQ ID NO: 478101 - DNA, 19 bp, Mus musculus
  siRNA target sequence for 0610033I05Rik (NM_030243.2,1116-1134).
gcagcgtcagacatgtgaa

SEQ ID NO: 478102 - DNA, 19 bp, Mus musculus
  siRNA target sequence for 0610033I05Rik (NM_030243.2,1120-1138).
cgtcagacatgtgaaagaa

SEQ ID NO: 478103 - DNA, 19 bp, Mus musculus
  siRNA target sequence for 0610033I05Rik (NM_030243.2,1165-1183).
ccaccttgagctcagaaaa

SEQ ID NO: 478104 - DNA, 19 bp, Mus musculus
  siRNA target sequence for 0610033I05Rik (NM_030243.2,1288-1306).
cagcacacatattgatctt

SEQ ID NO: 478105 - DNA, 19 bp, Mus musculus
  siRNA target sequence for 0610033I05Rik (NM_030243.2,1290-1308).
gcacacatattgatcttat

SEQ ID NO: 478106 - DNA, 19 bp, Mus musculus
  siRNA target sequence for 0610033I05Rik (NM_030243.2,1291-1309).
cacacatattgatcttata

SEQ ID NO: 478107 - DNA, 19 bp, Mus musculus
  siRNA target sequence for 0610033I05Rik (NM_030243.2,1311-1329).
gacctccttccgacacata

SEQ ID NO: 478108 - DNA, 19 bp, Mus musculus
  siRNA target sequence for 0610033I05Rik (NM_030243.2,1316-1334).
ccttccgacacatacctat

SEQ ID NO: 478109 - DNA, 19 bp, Mus musculus
  siRNA target sequence for 0610033I05Rik (NM_030243.2,1317-1335).
cttccgacacatacctatt

SEQ ID NO: 478110 - DNA, 19 bp, Mus musculus
  siRNA target sequence for 0610033I05Rik (NM_030243.2,1324-1342).
cacatacctatttaagaca

SEQ ID NO: 478111 - DNA, 19 bp, Mus musculus
  siRNA target sequence for 0710005M24Rik (NM_178631.2,1379-1397).
gccagcctcttgatatcaa

SEQ ID NO: 478112 - DNA, 19 bp, Mus musculus
  siRNA target sequence for 0710005M24Rik (NM_178631.2,1456-1474).
gccctgtacaggcttgaat

SEQ ID NO: 478113 - DNA, 19 bp, Mus musculus
  siRNA target sequence for 0710005M24Rik (NM_178631.2,1493-1511).
ctgttggtggttacgtatt

SEQ ID NO: 478114 - DNA, 19 bp, Mus musculus
  siRNA target sequence for 0710005M24Rik (NM_178631.2,1498-1516).
ggtggttacgtatttgact

SEQ ID NO: 478115 - DNA, 19 bp, Mus musculus
  siRNA target sequence for 0710005M24Rik (NM_178631.2,1499-1517).
gtggttacgtatttgacta

SEQ ID NO: 478116 - DNA, 19 bp, Mus musculus
  siRNA target sequence for 0710005M24Rik (NM_178631.2,1507-1525).
gtatttgactacgattact

SEQ ID NO: 478117 - DNA, 19 bp, Mus musculus
  siRNA target sequence for 0710005M24Rik (NM_178631.2,1539-1557).
ctacaatcggctgtttgat

SEQ ID NO: 478118 - DNA, 19 bp, Mus musculus
  siRNA target sequence for 0710005M24Rik (NM_178631.2,1665-1683).
gggatccagatctactgtt

SEQ ID NO: 478119 - DNA, 19 bp, Mus musculus
  siRNA target sequence for 0710005M24Rik (NM_178631.2,1681-1699).
gttggtgggtcatcttcat

SEQ ID NO: 478120 - DNA, 19 bp, Mus musculus
  siRNA target sequence for 0710005M24Rik (NM_178631.2,1703-1721).
gctctaagttgaaatcaga

SEQ ID NO: 478121 - DNA, 19 bp, Mus musculus
  siRNA target sequence for 0710005M24Rik (NM_178631.2,1704-1722).
ctctaagttgaaatcagat

SEQ ID NO: 478122 - DNA, 19 bp, Mus musculus
  siRNA target sequence for 0710005M24Rik (NM_178631.2,1710-1728).
gttgaaatcagatgagtta

SEQ ID NO: 478123 - DNA, 19 bp, Mus musculus
  siRNA target sequence for 0710005M24Rik (NM_178631.2,1839-1857).
gcaattggaggagagtata

SEQ ID NO: 478124 - DNA, 19 bp, Mus musculus
  siRNA target sequence for 0710005M24Rik (NM_178631.2,1872-1890).
cgaatgtgtgtcagagaat

SEQ ID NO: 478125 - DNA, 19 bp, Mus musculus
  siRNA target sequence for 0710005M24Rik (NM_178631.2,1985-2003).
ggggtcacgagctgtttct

SEQ ID NO: 478126 - DNA, 19 bp, Mus musculus
  siRNA target sequence for 0710005M24Rik (NM_178631.2,1986-2004).
gggtcacgagctgtttcta

SEQ ID NO: 478127 - DNA, 19 bp, Mus musculus
  siRNA target sequence for 0710005M24Rik (NM_178631.2,1992-2010).
cgagctgtttctacagata

SEQ ID NO: 478128 - DNA, 19 bp, Mus musculus
  siRNA target sequence for 1110014H17Rik (NM_181405.2,450-468).
gtgcagcagagcgattata

SEQ ID NO: 478129 - DNA, 19 bp, Mus musculus
  siRNA target sequence for 1110014H17Rik (NM_181405.2,462-480).
gattatatggaccatacat

SEQ ID NO: 478130 - DNA, 19 bp, Mus musculus
  siRNA target sequence for 1110014H17Rik (NM_181405.2,583-601).
cgagttcctggtgattgat

SEQ ID NO: 478131 - DNA, 19 bp, Mus musculus
  siRNA target sequence for 1110014H17Rik (NM_181405.2,885-903).
gctactgcttcgtgtacta

SEQ ID NO: 478132 - DNA, 19 bp, Mus musculus
  siRNA target sequence for 1110014H17Rik (NM_181405.2,951-969).
gagcctatgtggagaaata

SEQ ID NO: 478133 - DNA, 19 bp, Mus musculus
  siRNA target sequence for 1110014H17Rik (NM_181405.2,1203-1221).
cagccagtgccattgacat

SEQ ID NO: 478134 - DNA, 19 bp, Mus musculus
  siRNA target sequence for 1110014H17Rik (NM_181405.2,1307-1325).
ctgtccaagtgctactcat

SEQ ID NO: 478135 - DNA, 19 bp, Mus musculus
  siRNA target sequence for 1110014H17Rik (NM_181405.2,1433-1451).
cagatgtcgcgcatgtaca

SEQ ID NO: 478136 - DNA, 19 bp, Mus musculus
  siRNA target sequence for 1110014H17Rik (NM_181405.2,1502-1520).
ctagaggtcttctaccaaa

SEQ ID NO: 478137 - DNA, 19 bp, Mus musculus
  siRNA target sequence for 1110014H17Rik (NM_181405.2,1703-1721).
ctcagggacgtcaatgtgt

SEQ ID NO: 478138 - DNA, 19 bp, Mus musculus
  siRNA target sequence for 1200003I07Rik (NM_181274.2,613-631).
cttcactgccgtaggatat

SEQ ID NO: 478139 - DNA, 19 bp, Mus musculus
  siRNA target sequence for 1200003I07Rik (NM_181274.2,616-634).
cactgccgtaggatatgaa

SEQ ID NO: 478140 - DNA, 19 bp, Mus musculus
  siRNA target sequence for 1200003I07Rik (NM_181274.2,637-655).
ggaagatgaggcaattgaa

SEQ ID NO: 478141 - DNA, 19 bp, Mus musculus
  siRNA target sequence for 1200003I07Rik (NM_181274.2,776-794).
gaaggccttgaggaaacta

SEQ ID NO: 478142 - DNA, 19 bp, Mus musculus
  siRNA target sequence for 1200003I07Rik (NM_181274.2,779-797).
ggccttgaggaaactaaga

SEQ ID NO: 478143 - DNA, 19 bp, Mus musculus
  siRNA target sequence for 1200003I07Rik (NM_181274.2,781-799).
ccttgaggaaactaagact

SEQ ID NO: 478144 - DNA, 19 bp, Mus musculus
  siRNA target sequence for 1200003I07Rik (NM_181274.2,1290-1308).
gggccctcaaattacatga

SEQ ID NO: 478145 - DNA, 19 bp, Mus musculus
  siRNA target sequence for 1200003I07Rik (NM_181274.2,1291-1309).
ggccctcaaattacatgaa

SEQ ID NO: 478146 - DNA, 19 bp, Mus musculus
  siRNA target sequence for 1200003I07Rik (NM_181274.2,1368-1386).
gtcacaggacccttaagtt

SEQ ID NO: 478147 - DNA, 19 bp, Mus musculus
  siRNA target sequence for 1200003I07Rik (NM_181274.2,1375-1393).
gacccttaagttacataaa

SEQ ID NO: 478148 - DNA, 19 bp, Mus musculus
  siRNA target sequence for 1200003I07Rik (NM_181274.2,1534-1552).
gtgtcaggcgtcctatcat

SEQ ID NO: 478149 - DNA, 19 bp, Mus musculus
  siRNA target sequence for 1200003I07Rik (NM_181274.2,1779-1797).
ccttttcaagttacaatta

SEQ ID NO: 478150 - DNA, 19 bp, Mus musculus
  siRNA target sequence for 1200003I07Rik (NM_181274.2,1876-1894).
ctcttaccttcgatcacat

SEQ ID NO: 478151 - DNA, 19 bp, Mus musculus
  siRNA target sequence for 1200003I07Rik (NM_181274.2,1998-2016).
gcccatatgaacagtatct

SEQ ID NO: 478152 - DNA, 19 bp, Mus musculus
  siRNA target sequence for 1200003I07Rik (NM_181274.2,1999-2017).
cccatatgaacagtatcta

SEQ ID NO: 478153 - DNA, 19 bp, Mus musculus
  siRNA target sequence for 1200009A02Rik (NM_028762.1,106-124).
cgcgtctgatcgtgaagaa

SEQ ID NO: 478154 - DNA, 19 bp, Mus musculus
  siRNA target sequence for 1200009A02Rik (NM_028762.1,224-242).
ccgaaagttcggcttcata

SEQ ID NO: 478155 - DNA, 19 bp, Mus musculus
  siRNA target sequence for 1200009A02Rik (NM_028762.1,288-306).
caccggagctttattgaca

SEQ ID NO: 478156 - DNA, 19 bp, Mus musculus
  siRNA target sequence for 1200009A02Rik (NM_028762.1,310-328).
cccggatcaccgtcgaatt

SEQ ID NO: 478157 - DNA, 19 bp, Mus musculus
  siRNA target sequence for 1200009A02Rik (NM_028762.1,312-330).
cggatcaccgtcgaattct

SEQ ID NO: 478158 - DNA, 19 bp, Mus musculus
  siRNA target sequence for 1200009A02Rik (NM_028762.1,418-436).
ccgttccctcagacactaa

SEQ ID NO: 478159 - DNA, 19 bp, Mus musculus
  siRNA target sequence for 1200009A02Rik (NM_028762.1,419-437).
cgttccctcagacactaaa

SEQ ID NO: 478160 - DNA, 19 bp, Mus musculus
  siRNA target sequence for 1200009A02Rik (NM_028762.1,992-1010).
ccggggagccccgttcaat

SEQ ID NO: 478161 - DNA, 19 bp, Mus musculus
  siRNA target sequence for 1200009A02Rik (NM_028762.1,994-1012).
ggggagccccgttcaatgt

SEQ ID NO: 478162 - DNA, 19 bp, Mus musculus
  siRNA target sequence for 1200009A02Rik (NM_028762.1,996-1014).
ggagccccgttcaatgtca

SEQ ID NO: 478163 - DNA, 19 bp, Mus musculus
  siRNA target sequence for 1200009A02Rik (NM_028762.1,1054-1072).
cagtggccatccgaatagt

SEQ ID NO: 478164 - DNA, 19 bp, Mus musculus
  siRNA target sequence for 1200009A02Rik (NM_028762.1,1061-1079).
catccgaatagtgagaaat

SEQ ID NO: 478165 - DNA, 19 bp, Mus musculus
  siRNA target sequence for 1200009A02Rik (NM_028762.1,1064-1082).
ccgaatagtgagaaatgct

SEQ ID NO: 478166 - DNA, 19 bp, Mus musculus
  siRNA target sequence for 1200009A02Rik (NM_028762.1,1255-1273).
gaacgctcggggagaatga

SEQ ID NO: 478167 - DNA, 19 bp, Mus musculus
  siRNA target sequence for 1200009A02Rik (NM_028762.1,1432-1450).
ccttcgtcaccttcatgtt

SEQ ID NO: 478168 - DNA, 19 bp, Mus musculus
  siRNA target sequence for 1200009A02Rik (NM_028762.1,1521-1539).
ctaccttctaccatcaaga

SEQ ID NO: 478169 - DNA, 19 bp, Mus musculus
  siRNA target sequence for 1200009A02Rik (NM_028762.1,1562-1580).
cgccccagggtcctcttat

SEQ ID NO: 478170 - DNA, 19 bp, Mus musculus
  siRNA target sequence for 1200009A02Rik (NM_028762.1,1567-1585).
cagggtcctcttataagaa

SEQ ID NO: 478171 - DNA, 19 bp, Mus musculus
  siRNA target sequence for 1200009A02Rik (NM_028762.1,1569-1587).
gggtcctcttataagaaga

SEQ ID NO: 478172 - DNA, 19 bp, Mus musculus
  siRNA target sequence for 1200009A02Rik (NM_028762.1,1640-1658).
gctgtttatgggaccaaat

SEQ ID NO: 478173 - DNA, 19 bp, Mus musculus
  siRNA target sequence for 1200009A02Rik (NM_028762.1,1696-1714).
ccaagagccaagtgtttga

SEQ ID NO: 478174 - DNA, 19 bp, Mus musculus
  siRNA target sequence for 1200009A02Rik (NM_028762.1,1833-1851).
gcagcggagcgaagtaaga

SEQ ID NO: 478175 - DNA, 19 bp, Mus musculus
  siRNA target sequence for 1200009A02Rik (NM_028762.1,2009-2027).
caggcacctggcctattct

SEQ ID NO: 478176 - DNA, 19 bp, Mus musculus
  siRNA target sequence for 1200009A02Rik (NM_028762.1,2011-2029).
ggcacctggcctattctaa

SEQ ID NO: 478177 - DNA, 19 bp, Mus musculus
  siRNA target sequence for 1200009A02Rik (NM_028762.1,2054-2072).
ggagtgggctccaattggt

SEQ ID NO: 478178 - DNA, 19 bp, Mus musculus
  siRNA target sequence for 1200009A02Rik (NM_028762.1,2060-2078).
ggctccaattggtgtcttt

SEQ ID NO: 478179 - DNA, 19 bp, Mus musculus
  siRNA target sequence for 1200009A02Rik (NM_028762.1,2262-2280).
ggatgcactttgttcatta

SEQ ID NO: 478180 - DNA, 19 bp, Mus musculus
  siRNA target sequence for 1200009A02Rik (NM_028762.1,2309-2327).
gacactgaagggagtgttt

SEQ ID NO: 478181 - DNA, 19 bp, Mus musculus
  siRNA target sequence for 1200009A02Rik (NM_028762.1,2470-2488).
ctgtggacggccataagct

SEQ ID NO: 478182 - DNA, 19 bp, Mus musculus
  siRNA target sequence for 1200009A02Rik (NM_028762.1,2519-2537).
gcctgccttgacatcaact

SEQ ID NO: 478183 - DNA, 19 bp, Mus musculus
  siRNA target sequence for 1200009A02Rik (NM_028762.1,2658-2676).
gtgcgcctgccgaagaaga

SEQ ID NO: 478184 - DNA, 19 bp, Mus musculus
  siRNA target sequence for 1210002B07Rik (NM_026500.1,192-210).
caagaggagttctaatgat

SEQ ID NO: 478185 - DNA, 19 bp, Mus musculus
  siRNA target sequence for 1210002B07Rik (NM_026500.1,223-241).
ggtgaagctaaaaaaagca

SEQ ID NO: 478186 - DNA, 19 bp, Mus musculus
  siRNA target sequence for 1210002B07Rik (NM_026500.1,367-385).
cagttggctgaggtttctt

SEQ ID NO: 478187 - DNA, 19 bp, Mus musculus
  siRNA target sequence for 1210002B07Rik (NM_026500.1,433-451).
cctgtaaagtcgttttcta

SEQ ID NO: 478188 - DNA, 19 bp, Mus musculus
  siRNA target sequence for 1210002B07Rik (NM_026500.1,434-452).
ctgtaaagtcgttttctaa

SEQ ID NO: 478189 - DNA, 19 bp, Mus musculus
  siRNA target sequence for 1210002B07Rik (NM_026500.1,492-510).
cgtctgcggtcgttatgga

SEQ ID NO: 478190 - DNA, 19 bp, Mus musculus
  siRNA target sequence for 1210002B07Rik (NM_026500.1,498-516).
cggtcgttatggagagtat

SEQ ID NO: 478191 - DNA, 19 bp, Mus musculus
  siRNA target sequence for 1210002B07Rik (NM_026500.1,499-517).
ggtcgttatggagagtata

SEQ ID NO: 478192 - DNA, 19 bp, Mus musculus
  siRNA target sequence for 1210002B07Rik (NM_026500.1,500-518).
gtcgttatggagagtatat

SEQ ID NO: 478193 - DNA, 19 bp, Mus musculus
  siRNA target sequence for 1210002B07Rik (NM_026500.1,502-520).
cgttatggagagtatatct

SEQ ID NO: 478194 - DNA, 19 bp, Mus musculus
  siRNA target sequence for 1210002B07Rik (NM_026500.1,673-691).
gagcacccctttattgtga

SEQ ID NO: 478195 - DNA, 19 bp, Mus musculus
  siRNA target sequence for 1210002B07Rik (NM_026500.1,1054-1072).
ggtctgcctcgcatgaaga

SEQ ID NO: 478196 - DNA, 19 bp, Mus musculus
  siRNA target sequence for 1210002B07Rik (NM_026500.1,1117-1135).
cgcttacggcagcatgtta

SEQ ID NO: 478197 - DNA, 19 bp, Mus musculus
  siRNA target sequence for 1210002B07Rik (NM_026500.1,1118-1136).
gcttacggcagcatgttaa

SEQ ID NO: 478198 - DNA, 19 bp, Mus musculus
  siRNA target sequence for 1210002B07Rik (NM_026500.1,1123-1141).
cggcagcatgttaaggtta

SEQ ID NO: 478199 - DNA, 19 bp, Mus musculus
  siRNA target sequence for 1210002B07Rik (NM_026500.1,1124-1142).
ggcagcatgttaaggttat

SEQ ID NO: 478200 - DNA, 19 bp, Mus musculus
  siRNA target sequence for 1210002B07Rik (NM_026500.1,1132-1150).
gttaaggttatcatagcaa

SEQ ID NO: 478201 - DNA, 19 bp, Mus musculus
  siRNA target sequence for 1210002B07Rik (NM_026500.1,1156-1174).
ggacgacttctggatataa

SEQ ID NO: 478202 - DNA, 19 bp, Mus musculus
  siRNA target sequence for 1210002B07Rik (NM_026500.1,1157-1175).
gacgacttctggatataat

SEQ ID NO: 478203 - DNA, 19 bp, Mus musculus
  siRNA target sequence for 1210002B07Rik (NM_026500.1,1320-1338).
caccattccagatagcata

SEQ ID NO: 478204 - DNA, 19 bp, Mus musculus
  siRNA target sequence for 1210002B07Rik (NM_026500.1,1409-1427).
ccagtgtgcggcagatcat

SEQ ID NO: 478205 - DNA, 19 bp, Mus musculus
  siRNA target sequence for 1210002B07Rik (NM_026500.1,1434-1452).
ggtagaagacccagctaaa

SEQ ID NO: 478206 - DNA, 19 bp, Mus musculus
  siRNA target sequence for 1210002B07Rik (NM_026500.1,1435-1453).
gtagaagacccagctaaaa

SEQ ID NO: 478207 - DNA, 19 bp, Mus musculus
  siRNA target sequence for 1210002B07Rik (NM_026500.1,1491-1509).
ctttaagcctccagtgtta

SEQ ID NO: 478208 - DNA, 19 bp, Mus musculus
  siRNA target sequence for 1210002B07Rik (NM_026500.1,1499-1517).
ctccagtgttagtattcgt

SEQ ID NO: 478209 - DNA, 19 bp, Mus musculus
  siRNA target sequence for 1210002B07Rik (NM_026500.1,1704-1722).
cgtcaagctggttgtgaat

SEQ ID NO: 478210 - DNA, 19 bp, Mus musculus
  siRNA target sequence for 1210002B07Rik (NM_026500.1,1705-1723).
gtcaagctggttgtgaatt

SEQ ID NO: 478211 - DNA, 19 bp, Mus musculus
  siRNA target sequence for 1210002B07Rik (NM_026500.1,1710-1728).
gctggttgtgaattttgat

SEQ ID NO: 478212 - DNA, 19 bp, Mus musculus
  siRNA target sequence for 1210002B07Rik (NM_026500.1,1733-1751).
cttcaagcatggatgagta

SEQ ID NO: 478213 - DNA, 19 bp, Mus musculus
  siRNA target sequence for 1210002B07Rik (NM_026500.1,1776-1794).
gagactcggtcaaaatgga

SEQ ID NO: 478214 - DNA, 19 bp, Mus musculus
  siRNA target sequence for 1210002B07Rik (NM_026500.1,1792-1810).
ggaactgcaatcacattca

SEQ ID NO: 478215 - DNA, 19 bp, Mus musculus
  siRNA target sequence for 1210002B07Rik (NM_026500.1,1793-1811).
gaactgcaatcacattcat

SEQ ID NO: 478216 - DNA, 19 bp, Mus musculus
  siRNA target sequence for 1210002B07Rik (NM_026500.1,1798-1816).
gcaatcacattcatcaata

SEQ ID NO: 478217 - DNA, 19 bp, Mus musculus
  siRNA target sequence for 1210002B07Rik (NM_026500.1,1799-1817).
caatcacattcatcaataa

SEQ ID NO: 478218 - DNA, 19 bp, Mus musculus
  siRNA target sequence for 1210002B07Rik (NM_026500.1,1838-1856).
gggatgttgccaaaagagt

SEQ ID NO: 478219 - DNA, 19 bp, Mus musculus
  siRNA target sequence for 1210002B07Rik (NM_026500.1,1857-1875).
gaagcccacgggatccatt

SEQ ID NO: 478220 - DNA, 19 bp, Mus musculus
  siRNA target sequence for 1210002B07Rik (NM_026500.1,1876-1894).
ctcccgccacagctattaa

SEQ ID NO: 478221 - DNA, 19 bp, Mus musculus
  siRNA target sequence for 1210002B07Rik (NM_026500.1,1973-1991).
ccaacctcatggacattat

SEQ ID NO: 478222 - DNA, 19 bp, Mus musculus
  siRNA target sequence for 1210002B07Rik (NM_026500.1,1974-1992).
caacctcatggacattatt

SEQ ID NO: 478223 - DNA, 19 bp, Mus musculus
  siRNA target sequence for 1210002B07Rik (NM_026500.1,1980-1998).
catggacattattaggaaa

SEQ ID NO: 478224 - DNA, 19 bp, Mus musculus
  siRNA target sequence for 1210002B07Rik (NM_178052.2,956-974).
gaaacagacgcgggattta

SEQ ID NO: 478225 - DNA, 19 bp, Mus musculus
  siRNA target sequence for 1210002B07Rik (NM_178052.2,966-984).
cgggatttaccgagtttca

SEQ ID NO: 478226 - DNA, 19 bp, Mus musculus
  siRNA target sequence for 1210002B07Rik (NM_178052.2,967-985).
gggatttaccgagtttcat

SEQ ID NO: 478227 - DNA, 19 bp, Mus musculus
  siRNA target sequence for 1210002B07Rik (NM_178052.2,968-986).
ggatttaccgagtttcatt

SEQ ID NO: 478228 - DNA, 19 bp, Mus musculus
  siRNA target sequence for 1300003K24Rik (NM_027900.2,597-615).
ctggtggaagaatctgtaa

SEQ ID NO: 478229 - DNA, 19 bp, Mus musculus
  siRNA target sequence for 1300003K24Rik (NM_027900.2,736-754).
gagccaagtctaattccaa

SEQ ID NO: 478230 - DNA, 19 bp, Mus musculus
  siRNA target sequence for 1300003K24Rik (NM_027900.2,817-835).
cactagacacccaggatat

SEQ ID NO: 478231 - DNA, 19 bp, Mus musculus
  siRNA target sequence for 1300003K24Rik (NM_027900.2,826-844).
cccaggatataattcaact

SEQ ID NO: 478232 - DNA, 19 bp, Mus musculus
  siRNA target sequence for 1300003K24Rik (NM_027900.2,976-994).
ccgactccactggaataga

SEQ ID NO: 478233 - DNA, 19 bp, Mus musculus
  siRNA target sequence for 1300003K24Rik (NM_027900.2,977-995).
cgactccactggaatagat

SEQ ID NO: 478234 - DNA, 19 bp, Mus musculus
  siRNA target sequence for 1300003K24Rik (NM_027900.2,980-998).
ctccactggaatagatcta

SEQ ID NO: 478235 - DNA, 19 bp, Mus musculus
  siRNA target sequence for 1300003K24Rik (NM_027900.2,1129-1147).
catatcaccggatgctatt

SEQ ID NO: 478236 - DNA, 19 bp, Mus musculus
  siRNA target sequence for 1300003K24Rik (NM_027900.2,1322-1340).
cagtatggaccgagatgat

SEQ ID NO: 478237 - DNA, 19 bp, Mus musculus
  siRNA target sequence for 1300003K24Rik (NM_027900.2,1324-1342).
gtatggaccgagatgataa

SEQ ID NO: 478238 - DNA, 19 bp, Mus musculus
  siRNA target sequence for 1300003K24Rik (NM_027900.2,1344-1362).
cagaccggccagaatggat

SEQ ID NO: 478239 - DNA, 19 bp, Mus musculus
  siRNA target sequence for 1300003K24Rik (NM_027900.2,1348-1366).
ccggccagaatggatatct

SEQ ID NO: 478240 - DNA, 19 bp, Mus musculus
  siRNA target sequence for 1300003K24Rik (NM_027900.2,1351-1369).
gccagaatggatatctgaa

SEQ ID NO: 478241 - DNA, 19 bp, Mus musculus
  siRNA target sequence for 1300003K24Rik (NM_027900.2,1809-1827).
caccagccacccttgaata

SEQ ID NO: 478242 - DNA, 19 bp, Mus musculus
  siRNA target sequence for 1300003K24Rik (NM_027900.2,1816-1834).
cacccttgaataatcacat

SEQ ID NO: 478243 - DNA, 19 bp, Mus musculus
  siRNA target sequence for 1300003K24Rik (NM_027900.2,1867-1885).
ctccacagccggttcagtt

SEQ ID NO: 478244 - DNA, 19 bp, Mus musculus
  siRNA target sequence for 1300003K24Rik (NM_027900.2,1869-1887).
ccacagccggttcagtttt

SEQ ID NO: 478245 - DNA, 19 bp, Mus musculus
  siRNA target sequence for 1300003K24Rik (NM_027900.2,1949-1967).
ccgccaaggttctactgaa

SEQ ID NO: 478246 - DNA, 19 bp, Mus musculus
  siRNA target sequence for 1300003K24Rik (NM_027900.2,2019-2037).
cctcagcaagctagtttca

SEQ ID NO: 478247 - DNA, 19 bp, Mus musculus
  siRNA target sequence for 1300003K24Rik (NM_027900.2,2020-2038).
ctcagcaagctagtttcat

SEQ ID NO: 478248 - DNA, 19 bp, Mus musculus
  siRNA target sequence for 1300003K24Rik (NM_027900.2,2064-2082).
cccacttccaattattcca

SEQ ID NO: 478249 - DNA, 19 bp, Mus musculus
  siRNA target sequence for 1300003K24Rik (NM_027900.2,2303-2321).
gcagcagacggcttaccaa

SEQ ID NO: 478250 - DNA, 19 bp, Mus musculus
  siRNA target sequence for 1300003K24Rik (NM_027900.2,2449-2467).
gcagtgactcacaaaacgt

SEQ ID NO: 478251 - DNA, 19 bp, Mus musculus
  siRNA target sequence for 1300003K24Rik (NM_027900.2,2785-2803).
ggagtcactgcaaatacta

SEQ ID NO: 478252 - DNA, 19 bp, Mus musculus
  siRNA target sequence for 1300003K24Rik (NM_027900.2,2860-2878).
cccaggccaacgcacaaat

SEQ ID NO: 478253 - DNA, 19 bp, Mus musculus
  siRNA target sequence for 1300003K24Rik (NM_027900.2,3033-3051).
ctgggtcagccattacagt

SEQ ID NO: 478254 - DNA, 19 bp, Mus musculus
  siRNA target sequence for 1300003K24Rik (NM_027900.2,3037-3055).
gtcagccattacagtacaa

SEQ ID NO: 478255 - DNA, 19 bp, Mus musculus
  siRNA target sequence for 1300003K24Rik (NM_027900.2,3042-3060).
ccattacagtacaatctgt

SEQ ID NO: 478256 - DNA, 19 bp, Mus musculus
  siRNA target sequence for 1300003K24Rik (NM_027900.2,3081-3099).
catggccagtcaacttaca

SEQ ID NO: 478257 - DNA, 19 bp, Mus musculus
  siRNA target sequence for 1300003K24Rik (NM_027900.2,3242-3260).
ccgtacggaggctgacaaa

SEQ ID NO: 478258 - DNA, 19 bp, Mus musculus
  siRNA target sequence for 1300003K24Rik (NM_027900.2,3244-3262).
gtacggaggctgacaaact

SEQ ID NO: 478259 - DNA, 19 bp, Mus musculus
  siRNA target sequence for 1300003K24Rik (NM_027900.2,3247-3265).
cggaggctgacaaactctt

SEQ ID NO: 478260 - DNA, 19 bp, Mus musculus
  siRNA target sequence for 1300003K24Rik (NM_027900.2,3293-3311).
gatccagtggcttaaggat

SEQ ID NO: 478261 - DNA, 19 bp, Mus musculus
  siRNA target sequence for 1300006N24Rik (NM_027911.1,524-542).
gcgcactggccactctaaa

SEQ ID NO: 478262 - DNA, 19 bp, Mus musculus
  siRNA target sequence for 1300006N24Rik (NM_027911.1,617-635).
gggcccacgcacactgtat

SEQ ID NO: 478263 - DNA, 19 bp, Mus musculus
  siRNA target sequence for 1300006N24Rik (NM_027911.1,619-637).
gcccacgcacactgtatgt

SEQ ID NO: 478264 - DNA, 19 bp, Mus musculus
  siRNA target sequence for 1300006N24Rik (NM_027911.1,961-979).
cccaggccacggctcttaa

SEQ ID NO: 478265 - DNA, 19 bp, Mus musculus
  siRNA target sequence for 1300006N24Rik (NM_027911.1,965-983).
ggccacggctcttaatcga

SEQ ID NO: 478266 - DNA, 19 bp, Mus musculus
  siRNA target sequence for 1300006N24Rik (NM_027911.1,1340-1358).
gaagccacaacccttacta

SEQ ID NO: 478267 - DNA, 19 bp, Mus musculus
  siRNA target sequence for 1300006N24Rik (NM_027911.1,1713-1731).
ggcaacaaagccttccaaa

SEQ ID NO: 478268 - DNA, 19 bp, Mus musculus
  siRNA target sequence for 1300006N24Rik (NM_027911.1,1796-1814).
cagctatggctttgattat

SEQ ID NO: 478269 - DNA, 19 bp, Mus musculus
  siRNA target sequence for 1300006N24Rik (NM_027911.1,1850-1868).
ccctcgggaaccaacctta

SEQ ID NO: 478270 - DNA, 19 bp, Mus musculus
  siRNA target sequence for 1300006N24Rik (NM_027911.1,1881-1899).
cccagccgacacaagatgt

SEQ ID NO: 478271 - DNA, 19 bp, Mus musculus
  siRNA target sequence for 1300006N24Rik (NM_027911.1,1904-1922).
cccacctagcagcttcaat

SEQ ID NO: 478272 - DNA, 19 bp, Mus musculus
  siRNA target sequence for 1300006N24Rik (NM_027911.1,1947-1965).
gggggacccctctctcatt

SEQ ID NO: 478273 - DNA, 19 bp, Mus musculus
  siRNA target sequence for 1300006N24Rik (NM_027911.1,1948-1966).
ggggacccctctctcattt

SEQ ID NO: 478274 - DNA, 19 bp, Mus musculus
  siRNA target sequence for 1300006N24Rik (NM_027911.1,1951-1969).
gacccctctctcattttta

SEQ ID NO: 478275 - DNA, 19 bp, Mus musculus
  siRNA target sequence for 1300018I05Rik (NM_028791.3,355-373).
cagccctgctctgatgatt

SEQ ID NO: 478276 - DNA, 19 bp, Mus musculus
  siRNA target sequence for 1300018I05Rik (NM_028791.3,409-427).
ggaacatcgtcccgatatt

SEQ ID NO: 478277 - DNA, 19 bp, Mus musculus
  siRNA target sequence for 1300018I05Rik (NM_028791.3,413-431).
catcgtcccgatattccat

SEQ ID NO: 478278 - DNA, 19 bp, Mus musculus
  siRNA target sequence for 1300018I05Rik (NM_028791.3,419-437).
cccgatattccatgtataa

SEQ ID NO: 478279 - DNA, 19 bp, Mus musculus
  siRNA target sequence for 1300018I05Rik (NM_028791.3,481-499).
ggcgagggattgggtaaat

SEQ ID NO: 478280 - DNA, 19 bp, Mus musculus
  siRNA target sequence for 1300018I05Rik (NM_028791.3,639-657).
gtcgtggtttccagaatgt

SEQ ID NO: 478281 - DNA, 19 bp, Mus musculus
  siRNA target sequence for 1300018I05Rik (NM_028791.3,696-714).
gatggtcgtaggaaagaga

SEQ ID NO: 478282 - DNA, 19 bp, Mus musculus
  siRNA target sequence for 1300018I05Rik (NM_028791.3,711-729).
gagaaagatggttattgaa

SEQ ID NO: 478283 - DNA, 19 bp, Mus musculus
  siRNA target sequence for 1300018I05Rik (NM_028791.3,717-735).
gatggttattgaagatgaa

SEQ ID NO: 478284 - DNA, 19 bp, Mus musculus
  siRNA target sequence for 1300018I05Rik (NM_028791.3,774-792).
caagtgtaagagtgtgttt

SEQ ID NO: 478285 - DNA, 19 bp, Mus musculus
  siRNA target sequence for 1300018I05Rik (NM_028791.3,833-851).
gagccaatccctatgagat

SEQ ID NO: 478286 - DNA, 19 bp, Mus musculus
  siRNA target sequence for 1300018I05Rik (NM_028791.3,836-854).
ccaatccctatgagatgat

SEQ ID NO: 478287 - DNA, 19 bp, Mus musculus
  siRNA target sequence for 1300018I05Rik (NM_028791.3,856-874).
cgaggcgtcttcttcctaa

SEQ ID NO: 478288 - DNA, 19 bp, Mus musculus
  siRNA target sequence for 1300018I05Rik (NM_028791.3,857-875).
gaggcgtcttcttcctaaa

SEQ ID NO: 478289 - DNA, 19 bp, Mus musculus
  siRNA target sequence for 1300018I05Rik (NM_028791.3,896-914).
ctaacatggattttgtgtt

SEQ ID NO: 478290 - DNA, 19 bp, Mus musculus
  siRNA target sequence for 1300018I05Rik (NM_028791.3,910-928).
gtgtttgatcgtatgttca

SEQ ID NO: 478291 - DNA, 19 bp, Mus musculus
  siRNA target sequence for 1300018I05Rik (NM_028791.3,971-989).
cggacattgaccttctcta

SEQ ID NO: 478292 - DNA, 19 bp, Mus musculus
  siRNA target sequence for 1300018I05Rik (NM_028791.3,1200-1218).
caatgcatttcggaatttt

SEQ ID NO: 478293 - DNA, 19 bp, Mus musculus
  siRNA target sequence for 1300018I05Rik (NM_028791.3,1238-1256).
gcaagggcgtccactttgt

SEQ ID NO: 478294 - DNA, 19 bp, Mus musculus
  siRNA target sequence for 1300018I05Rik (NM_028791.3,1382-1400).
gcaaaacctttgacctttt

SEQ ID NO: 478295 - DNA, 19 bp, Mus musculus
  siRNA target sequence for 1300018I05Rik (NM_028791.3,1478-1496).
gcaggcctgccaattcaga

SEQ ID NO: 478296 - DNA, 19 bp, Mus musculus
  siRNA target sequence for 1300018I05Rik (NM_028791.3,1518-1536).
gctgaaggtgggcatagat

SEQ ID NO: 478297 - DNA, 19 bp, Mus musculus
  siRNA target sequence for 1300018I05Rik (NM_028791.3,1521-1539).
gaaggtgggcatagatgat

SEQ ID NO: 478298 - DNA, 19 bp, Mus musculus
  siRNA target sequence for 1300018I05Rik (NM_028791.3,1551-1569).
cctcttctccgtgaatatt

SEQ ID NO: 478299 - DNA, 19 bp, Mus musculus
  siRNA target sequence for 1300018I05Rik (NM_028791.3,1552-1570).
ctcttctccgtgaatatta

SEQ ID NO: 478300 - DNA, 19 bp, Mus musculus
  siRNA target sequence for 1300018I05Rik (NM_028791.3,1559-1577).
ccgtgaatattaaactcaa

SEQ ID NO: 478301 - DNA, 19 bp, Mus musculus
  siRNA target sequence for 1300018I05Rik (NM_028791.3,1637-1655).
gagaccatgaatttaatga

SEQ ID NO: 478302 - DNA, 19 bp, Mus musculus
  siRNA target sequence for 1300018I05Rik (NM_028791.3,1639-1657).
gaccatgaatttaatgact

SEQ ID NO: 478303 - DNA, 19 bp, Mus musculus
  siRNA target sequence for 1300018I05Rik (NM_028791.3,1645-1663).
gaatttaatgactacatga

SEQ ID NO: 478304 - DNA, 19 bp, Mus musculus
  siRNA target sequence for 1300018I05Rik (NM_028791.3,1656-1674).
ctacatgatacgctctaat

SEQ ID NO: 478305 - DNA, 19 bp, Mus musculus
  siRNA target sequence for 1300018I05Rik (NM_028791.3,1933-1951).
cctgtgttggagtatcgtt

SEQ ID NO: 478306 - DNA, 19 bp, Mus musculus
  siRNA target sequence for 1300018I05Rik (NM_028791.3,1993-2011).
gggaagtcccagatctaca

SEQ ID NO: 478307 - DNA, 19 bp, Mus musculus
  siRNA target sequence for 1300018I05Rik (NM_028791.3,2041-2059).
gtgaagctggacctaaaga

SEQ ID NO: 478308 - DNA, 19 bp, Mus musculus
  siRNA target sequence for 1300018I05Rik (NM_028791.3,2387-2405).
gcgacgaccggcactttgt

SEQ ID NO: 478309 - DNA, 19 bp, Mus musculus
  siRNA target sequence for 1300018I05Rik (NM_028791.3,2406-2424).
gcccacaggtgtctacatt

SEQ ID NO: 478310 - DNA, 19 bp, Mus musculus
  siRNA target sequence for 1300018I05Rik (NM_028791.3,2447-2465).
ggaccatgggatttagcaa

SEQ ID NO: 478311 - DNA, 19 bp, Mus musculus
  siRNA target sequence for 1300018I05Rik (NM_028791.3,2455-2473).
ggatttagcaagagcaata

SEQ ID NO: 478312 - DNA, 19 bp, Mus musculus
  siRNA target sequence for 1300018I05Rik (NM_028791.3,2456-2474).
gatttagcaagagcaataa

SEQ ID NO: 478313 - DNA, 19 bp, Mus musculus
  siRNA target sequence for 1300018I05Rik (NM_028791.3,2658-2676).
cttcatccagagtcacaat

SEQ ID NO: 478314 - DNA, 19 bp, Mus musculus
  siRNA target sequence for 1500011D06Rik (NM_144948.2,159-177).
ccggtaataaaagtgaaaa

SEQ ID NO: 478315 - DNA, 19 bp, Mus musculus
  siRNA target sequence for 1500011D06Rik (NM_144948.2,171-189).
gtgaaaatcccgaaagata

SEQ ID NO: 478316 - DNA, 19 bp, Mus musculus
  siRNA target sequence for 1500011D06Rik (NM_144948.2,263-281).
gctcaacggaatcaaactt

SEQ ID NO: 478317 - DNA, 19 bp, Mus musculus
  siRNA target sequence for 1500011D06Rik (NM_144948.2,284-302).
cgggaggcctatcaaaatt

SEQ ID NO: 478318 - DNA, 19 bp, Mus musculus
  siRNA target sequence for 1500011D06Rik (NM_144948.2,286-304).
ggaggcctatcaaaattca

SEQ ID NO: 478319 - DNA, 19 bp, Mus musculus
  siRNA target sequence for 1500011D06Rik (NM_144948.2,291-309).
cctatcaaaattcagttta

SEQ ID NO: 478320 - DNA, 19 bp, Mus musculus
  siRNA target sequence for 1500011D06Rik (NM_144948.2,492-510).
gtgatgaacagtgttttca

SEQ ID NO: 478321 - DNA, 19 bp, Mus musculus
  siRNA target sequence for 1500011D06Rik (NM_144948.2,518-536).
gtcatatgctgggaaattt

SEQ ID NO: 478322 - DNA, 19 bp, Mus musculus
  siRNA target sequence for 1500011D06Rik (NM_144948.2,541-559).
ctccacatgcggatcagtt

SEQ ID NO: 478323 - DNA, 19 bp, Mus musculus
  siRNA target sequence for 1500011D06Rik (NM_144948.2,549-567).
gcggatcagttgggatttt

SEQ ID NO: 478324 - DNA, 19 bp, Mus musculus
  siRNA target sequence for 1500011D06Rik (NM_144948.2,551-569).
ggatcagttgggattttca

SEQ ID NO: 478325 - DNA, 19 bp, Mus musculus
  siRNA target sequence for 1500011D06Rik (NM_144948.2,582-600).
ccacatggccataccttta

SEQ ID NO: 478326 - DNA, 19 bp, Mus musculus
  siRNA target sequence for 1500011D06Rik (NM_144948.2,636-654).
ctgtcatcacagcgtaaaa

SEQ ID NO: 478327 - DNA, 19 bp, Mus musculus
  siRNA target sequence for 1500011D06Rik (NM_144948.2,640-658).
catcacagcgtaaaagaca

SEQ ID NO: 478328 - DNA, 19 bp, Mus musculus
  siRNA target sequence for 1500011D06Rik (NM_144948.2,645-663).
cagcgtaaaagacagaatt

SEQ ID NO: 478329 - DNA, 19 bp, Mus musculus
  siRNA target sequence for 1500011D06Rik (NM_144948.2,647-665).
gcgtaaaagacagaattct

SEQ ID NO: 478330 - DNA, 19 bp, Mus musculus
  siRNA target sequence for 1500011D06Rik (NM_144948.2,649-667).
gtaaaagacagaattctca

SEQ ID NO: 478331 - DNA, 19 bp, Mus musculus
  siRNA target sequence for 1500011D06Rik (NM_144948.2,668-686).
cccctacctagcagataga

SEQ ID NO: 478332 - DNA, 19 bp, Mus musculus
  siRNA target sequence for 1500011D06Rik (NM_144948.2,670-688).
cctacctagcagatagaca

SEQ ID NO: 478333 - DNA, 19 bp, Mus musculus
  siRNA target sequence for 1500011D06Rik (NM_144948.2,674-692).
cctagcagatagacactat

SEQ ID NO: 478334 - DNA, 19 bp, Mus musculus
  siRNA target sequence for 1500011D06Rik (NM_144948.2,675-693).
ctagcagatagacactata

SEQ ID NO: 478335 - DNA, 19 bp, Mus musculus
  siRNA target sequence for 1500011D06Rik (NM_144948.2,720-738).
gggtctgactatcattaca

SEQ ID NO: 478336 - DNA, 19 bp, Mus musculus
  siRNA target sequence for 1500011D06Rik (NM_144948.2,722-740).
gtctgactatcattacaga

SEQ ID NO: 478337 - DNA, 19 bp, Mus musculus
  siRNA target sequence for 1500011D06Rik (NM_144948.2,741-759).
ggcagccgagaggatttct

SEQ ID NO: 478338 - DNA, 19 bp, Mus musculus
  siRNA target sequence for 1500011D06Rik (NM_144948.2,742-760).
gcagccgagaggatttcta

SEQ ID NO: 478339 - DNA, 19 bp, Mus musculus
  siRNA target sequence for 1500011D06Rik (NM_144948.2,761-779).
ctatgacgacaggaatcat

SEQ ID NO: 478340 - DNA, 19 bp, Mus musculus
  siRNA target sequence for 1500011D06Rik (NM_144948.2,785-803).
ctggagccatgactatgat

SEQ ID NO: 478341 - DNA, 19 bp, Mus musculus
  siRNA target sequence for 1500031H04Rik (NM_025893.1,533-551).
cggcagaatgcagctttta

SEQ ID NO: 478342 - DNA, 19 bp, Mus musculus
  siRNA target sequence for 1500031H04Rik (NM_025893.1,588-606).
ggagccttggtcctttgat

SEQ ID NO: 478343 - DNA, 19 bp, Mus musculus
  siRNA target sequence for 1500031H04Rik (NM_025893.1,712-730).
gccagattggcctatgtct

SEQ ID NO: 478344 - DNA, 19 bp, Mus musculus
  siRNA target sequence for 1500031H04Rik (NM_025893.1,802-820).
ggctgacaatcccaatcta

SEQ ID NO: 478345 - DNA, 19 bp, Mus musculus
  siRNA target sequence for 1500031H04Rik (NM_025893.1,803-821).
gctgacaatcccaatctaa

SEQ ID NO: 478346 - DNA, 19 bp, Mus musculus
  siRNA target sequence for 1500031H04Rik (NM_025893.1,863-881).
gcgtctgagagcagtataa

SEQ ID NO: 478347 - DNA, 19 bp, Mus musculus
  siRNA target sequence for 1500031H04Rik (NM_025893.1,882-900).
cagcgcatggcaaattttt

SEQ ID NO: 478348 - DNA, 19 bp, Mus musculus
  siRNA target sequence for 1500031H04Rik (NM_025893.1,1075-1093).
ggggcttctccaaatgcat

SEQ ID NO: 478349 - DNA, 19 bp, Mus musculus
  siRNA target sequence for 1500031H04Rik (NM_025893.1,1084-1102).
ccaaatgcatgcgcataat

SEQ ID NO: 478350 - DNA, 19 bp, Mus musculus
  siRNA target sequence for 1500031H04Rik (NM_025893.1,1095-1113).
cgcataatgagcaggaaaa

SEQ ID NO: 478351 - DNA, 19 bp, Mus musculus
  siRNA target sequence for 1500031H04Rik (NM_025893.1,1169-1187).
gagacattccttagaaata

SEQ ID NO: 478352 - DNA, 19 bp, Mus musculus
  siRNA target sequence for 1500031H04Rik (NM_025893.1,1275-1293).
ccgactgtaatgtgataga

SEQ ID NO: 478353 - DNA, 19 bp, Mus musculus
  siRNA target sequence for 1700009P03Rik (NM_134077.2,1301-1319).
caacttgataggactaaca

SEQ ID NO: 478354 - DNA, 19 bp, Mus musculus
  siRNA target sequence for 1700009P03Rik (NM_134077.2,1304-1322).
cttgataggactaacatca

SEQ ID NO: 478355 - DNA, 19 bp, Mus musculus
  siRNA target sequence for 1700009P03Rik (NM_134077.2,1318-1336).
catcaggtgacatggattt

SEQ ID NO: 478356 - DNA, 19 bp, Mus musculus
  siRNA target sequence for 1700009P03Rik (NM_134077.2,1375-1393).
ggatagtagtggattcaga

SEQ ID NO: 478357 - DNA, 19 bp, Mus musculus
  siRNA target sequence for 1700009P03Rik (NM_134077.2,1425-1443).
cctggagtttctacaaaga

SEQ ID NO: 478358 - DNA, 19 bp, Mus musculus
  siRNA target sequence for 1700009P03Rik (NM_134077.2,1445-1463).
gacatggtttgataaacca

SEQ ID NO: 478359 - DNA, 19 bp, Mus musculus
  siRNA target sequence for 1700009P03Rik (NM_134077.2,1450-1468).
ggtttgataaaccaaattt

SEQ ID NO: 478360 - DNA, 19 bp, Mus musculus
  siRNA target sequence for 1700009P03Rik (NM_134077.2,1545-1563).
gttcctccagaattaaata

SEQ ID NO: 478361 - DNA, 19 bp, Mus musculus
  siRNA target sequence for 1700009P03Rik (NM_134077.2,1548-1566).
cctccagaattaaataaca

SEQ ID NO: 478362 - DNA, 19 bp, Mus musculus
  siRNA target sequence for 1700009P03Rik (NM_134077.2,1593-1611).
cgatttggaacattggtta

SEQ ID NO: 478363 - DNA, 19 bp, Mus musculus
  siRNA target sequence for 1700009P03Rik (NM_134077.2,1696-1714).
gtacagaagcagtgttaaa

SEQ ID NO: 478364 - DNA, 19 bp, Mus musculus
  siRNA target sequence for 1700009P03Rik (NM_134077.2,1704-1722).
gcagtgttaaataatcgtt

SEQ ID NO: 478365 - DNA, 19 bp, Mus musculus
  siRNA target sequence for 1700009P03Rik (NM_134077.2,1707-1725).
gtgttaaataatcgtttta

SEQ ID NO: 478366 - DNA, 19 bp, Mus musculus
  siRNA target sequence for 1700009P03Rik (NM_134077.2,1709-1727).
gttaaataatcgttttatt

SEQ ID NO: 478367 - DNA, 19 bp, Mus musculus
  siRNA target sequence for 1700009P03Rik (NM_134077.2,1760-1778).
gcagttacaaactacttca

SEQ ID NO: 478368 - DNA, 19 bp, Mus musculus
  siRNA target sequence for 1700009P03Rik (NM_134077.2,1774-1792).
cttcaccaaaggtaataca

SEQ ID NO: 478369 - DNA, 19 bp, Mus musculus
  siRNA target sequence for 1700009P03Rik (NM_134077.2,1802-1820).
ccagcagcccattttacct

SEQ ID NO: 478370 - DNA, 19 bp, Mus musculus
  siRNA target sequence for 1700009P03Rik (NM_134077.2,1810-1828).
ccattttacctgttgtgaa

SEQ ID NO: 478371 - DNA, 19 bp, Mus musculus
  siRNA target sequence for 1700009P03Rik (NM_134077.2,1892-1910).
gagtgctacttcagaactt

SEQ ID NO: 478372 - DNA, 19 bp, Mus musculus
  siRNA target sequence for 1700009P03Rik (NM_134077.2,1905-1923).
gaacttccccagaatgtaa

SEQ ID NO: 478373 - DNA, 19 bp, Mus musculus
  siRNA target sequence for 1700009P03Rik (NM_134077.2,1908-1926).
cttccccagaatgtaacta

SEQ ID NO: 478374 - DNA, 19 bp, Mus musculus
  siRNA target sequence for 1700009P03Rik (NM_134077.2,1940-1958).
ggacaggttgggttttgta

SEQ ID NO: 478375 - DNA, 19 bp, Mus musculus
  siRNA target sequence for 1700009P03Rik (NM_134077.2,1983-2001).
gaaaaggtgttgtctacat

SEQ ID NO: 478376 - DNA, 19 bp, Mus musculus
  siRNA target sequence for 1700009P03Rik (NM_134077.2,2075-2093).
ccctgcagttgataataat

SEQ ID NO: 478377 - DNA, 19 bp, Mus musculus
  siRNA target sequence for 1700009P03Rik (NM_134077.2,2373-2391).
cttgacacagaattggatt

SEQ ID NO: 478378 - DNA, 19 bp, Mus musculus
  siRNA target sequence for 1700009P03Rik (NM_134077.2,2376-2394).
gacacagaattggatttat

SEQ ID NO: 478379 - DNA, 19 bp, Mus musculus
  siRNA target sequence for 1700009P03Rik (NM_134077.2,2380-2398).
cagaattggatttatataa

SEQ ID NO: 478380 - DNA, 19 bp, Mus musculus
  siRNA target sequence for 1700009P03Rik (NM_134077.2,2427-2445).
gaacttaggagaaaatata

SEQ ID NO: 478381 - DNA, 19 bp, Mus musculus
  siRNA target sequence for 1700009P03Rik (NM_134077.2,2435-2453).
gagaaaatatacagaatta

SEQ ID NO: 478382 - DNA, 19 bp, Mus musculus
  siRNA target sequence for 1700009P03Rik (NM_134077.2,2464-2482).
ctgctaaaagaggaattct

SEQ ID NO: 478383 - DNA, 19 bp, Mus musculus
  siRNA target sequence for 1700009P03Rik (NM_134077.2,2493-2511).
cgaggtagaggaattcata

SEQ ID NO: 478384 - DNA, 19 bp, Mus musculus
  siRNA target sequence for 1700009P03Rik (NM_134077.2,2619-2637).
gcatttacagagagtgata

SEQ ID NO: 478385 - DNA, 19 bp, Mus musculus
  siRNA target sequence for 1700009P03Rik (NM_134077.2,2662-2680).
cgcaatatggggaaattga

SEQ ID NO: 478386 - DNA, 19 bp, Mus musculus
  siRNA target sequence for 1700009P03Rik (NM_134077.2,2699-2717).
cgcttcactccatgcaata

SEQ ID NO: 478387 - DNA, 19 bp, Mus musculus
  siRNA target sequence for 1700009P03Rik (NM_134077.2,2700-2718).
gcttcactccatgcaataa

SEQ ID NO: 478388 - DNA, 19 bp, Mus musculus
  siRNA target sequence for 1700009P03Rik (NM_134077.2,2701-2719).
cttcactccatgcaataat

SEQ ID NO: 478389 - DNA, 19 bp, Mus musculus
  siRNA target sequence for 1700009P03Rik (NM_134077.2,2709-2727).
catgcaataatcacattca

SEQ ID NO: 478390 - DNA, 19 bp, Mus musculus
  siRNA target sequence for 1700009P03Rik (NM_134077.2,2770-2788).
gcttcaaagggcaggattt

SEQ ID NO: 478391 - DNA, 19 bp, Mus musculus
  siRNA target sequence for 1700009P03Rik (NM_134077.2,2886-2904).
cttgttttcccatcattat

SEQ ID NO: 478392 - DNA, 19 bp, Mus musculus
  siRNA target sequence for 1700020N01Rik (NM_183266.1,288-306).
ctgggacttccgatttcca

SEQ ID NO: 478393 - DNA, 19 bp, Mus musculus
  siRNA target sequence for 1700020N01Rik (NM_183266.1,290-308).
gggacttccgatttccaaa

SEQ ID NO: 478394 - DNA, 19 bp, Mus musculus
  siRNA target sequence for 1700020N01Rik (NM_183266.1,291-309).
ggacttccgatttccaaat

SEQ ID NO: 478395 - DNA, 19 bp, Mus musculus
  siRNA target sequence for 1700020N01Rik (NM_183266.1,294-312).
cttccgatttccaaatcct

SEQ ID NO: 478396 - DNA, 19 bp, Mus musculus
  siRNA target sequence for 1700020N01Rik (NM_183266.1,314-332).
cccaggaactcgagtttat

SEQ ID NO: 478397 - DNA, 19 bp, Mus musculus
  siRNA target sequence for 1700025B16Rik (NM_139139.1,18-36).
gaccaaagagctcttacaa

SEQ ID NO: 478398 - DNA, 19 bp, Mus musculus
  siRNA target sequence for 1700025B16Rik (NM_139139.1,20-38).
ccaaagagctcttacaaat

SEQ ID NO: 478399 - DNA, 19 bp, Mus musculus
  siRNA target sequence for 1700025B16Rik (NM_139139.1,217-235).
gctgcatatgacaaggtta

SEQ ID NO: 478400 - DNA, 19 bp, Mus musculus
  siRNA target sequence for 1700025B16Rik (NM_139139.1,221-239).
catatgacaaggttaggaa

SEQ ID NO: 478401 - DNA, 19 bp, Mus musculus
  siRNA target sequence for 1810003N24Rik (NM_025443.1,271-289).
ccgtcccaggtaacagata

SEQ ID NO: 478402 - DNA, 19 bp, Mus musculus
  siRNA target sequence for 1810003N24Rik (NM_025443.1,273-291).
gtcccaggtaacagataca

SEQ ID NO: 478403 - DNA, 19 bp, Mus musculus
  siRNA target sequence for 1810003N24Rik (NM_025443.1,317-335).
gatatttactccgattgta

SEQ ID NO: 478404 - DNA, 19 bp, Mus musculus
  siRNA target sequence for 1810003N24Rik (NM_025443.1,346-364).
gacttcagatacgctttaa

SEQ ID NO: 478405 - DNA, 19 bp, Mus musculus
  siRNA target sequence for 1810003N24Rik (NM_025443.1,357-375).
cgctttaacctgaaatcaa

SEQ ID NO: 478406 - DNA, 19 bp, Mus musculus
  siRNA target sequence for 1810003N24Rik (NM_025443.1,440-458).
ctttgtgaaagcctttgtt

SEQ ID NO: 478407 - DNA, 19 bp, Mus musculus
  siRNA target sequence for 1810003N24Rik (NM_025443.1,487-505).
cccttatccgactagatga

SEQ ID NO: 478408 - DNA, 19 bp, Mus musculus
  siRNA target sequence for 1810003N24Rik (NM_025443.1,509-527).
cttcctagagtcttttgaa

SEQ ID NO: 478409 - DNA, 19 bp, Mus musculus
  siRNA target sequence for 1810003N24Rik (NM_025443.1,560-578).
cctgtcaagggcaatagga

SEQ ID NO: 478410 - DNA, 19 bp, Mus musculus
  siRNA target sequence for 1810003N24Rik (NM_025443.1,561-579).
ctgtcaagggcaataggaa

SEQ ID NO: 478411 - DNA, 19 bp, Mus musculus
  siRNA target sequence for 1810003N24Rik (NM_025443.1,594-612).
ggaggaaaaaccaaattta

SEQ ID NO: 478412 - DNA, 19 bp, Mus musculus
  siRNA target sequence for 1810003N24Rik (NM_025443.1,597-615).
ggaaaaaccaaatttacca

SEQ ID NO: 478413 - DNA, 19 bp, Mus musculus
  siRNA target sequence for 1810003N24Rik (NM_025443.1,598-616).
gaaaaaccaaatttaccat

SEQ ID NO: 478414 - DNA, 19 bp, Mus musculus
  siRNA target sequence for 1810003N24Rik (NM_025443.1,604-622).
ccaaatttaccatagagaa

SEQ ID NO: 478415 - DNA, 19 bp, Mus musculus
  siRNA target sequence for 1810003N24Rik (NM_025443.1,672-690).
ggctctttccaaaatatca

SEQ ID NO: 478416 - DNA, 19 bp, Mus musculus
  siRNA target sequence for 1810003N24Rik (NM_025443.1,712-730).
gcaacctcatcctaggaaa

SEQ ID NO: 478417 - DNA, 19 bp, Mus musculus
  siRNA target sequence for 1810017N16Rik (NM_175402.3,232-250).
cctggaccacagtgtttct

SEQ ID NO: 478418 - DNA, 19 bp, Mus musculus
  siRNA target sequence for 1810017N16Rik (NM_175402.3,264-282).
gacgggccttcgagaagta

SEQ ID NO: 478419 - DNA, 19 bp, Mus musculus
  siRNA target sequence for 1810017N16Rik (NM_175402.3,410-428).
ggcagaaaccccataaaga

SEQ ID NO: 478420 - DNA, 19 bp, Mus musculus
  siRNA target sequence for 1810017N16Rik (NM_175402.3,502-520).
cctggccagggaattcgat

SEQ ID NO: 478421 - DNA, 19 bp, Mus musculus
  siRNA target sequence for 1810017N16Rik (NM_175402.3,605-623).
gctgcctgtgctaaaatga

SEQ ID NO: 478422 - DNA, 19 bp, Mus musculus
  siRNA target sequence for 1810017N16Rik (NM_175402.3,737-755).
ctgctcactgacggatata

SEQ ID NO: 478423 - DNA, 19 bp, Mus musculus
  siRNA target sequence for 1810017N16Rik (NM_175402.3,824-842).
gaccgagaccggacctttt

SEQ ID NO: 478424 - DNA, 19 bp, Mus musculus
  siRNA target sequence for 1810017N16Rik (NM_175402.3,828-846).
gagaccggacctttttgga

SEQ ID NO: 478425 - DNA, 19 bp, Mus musculus
  siRNA target sequence for 1810017N16Rik (NM_175402.3,856-874).
gaccagcctcagtaaaagt

SEQ ID NO: 478426 - DNA, 19 bp, Mus musculus
  siRNA target sequence for 1810017N16Rik (NM_175402.3,859-877).
cagcctcagtaaaagttca

SEQ ID NO: 478427 - DNA, 19 bp, Mus musculus
  siRNA target sequence for 1810017N16Rik (NM_175402.3,1377-1395).
ggcttctggtgttgaaaaa

SEQ ID NO: 478428 - DNA, 19 bp, Mus musculus
  siRNA target sequence for 1810017N16Rik (NM_175402.3,1432-1450).
ggaccagggagttatcagt

SEQ ID NO: 478429 - DNA, 19 bp, Mus musculus
  siRNA target sequence for 1810017N16Rik (NM_175402.3,1483-1501).
gctgacccagctaaagatt

SEQ ID NO: 478430 - DNA, 19 bp, Mus musculus
  siRNA target sequence for 1810017N16Rik (NM_175402.3,1816-1834).
gcggacattgggcaagtta

SEQ ID NO: 478431 - DNA, 19 bp, Mus musculus
  siRNA target sequence for 1810017N16Rik (NM_175402.3,1818-1836).
ggacattgggcaagttaga

SEQ ID NO: 478432 - DNA, 19 bp, Mus musculus
  siRNA target sequence for 1810017N16Rik (NM_175402.3,1841-1859).
gaacacatggtgatagtta

SEQ ID NO: 478433 - DNA, 19 bp, Mus musculus
  siRNA target sequence for 1810017N16Rik (NM_175402.3,1846-1864).
catggtgatagttatagta

SEQ ID NO: 478434 - DNA, 19 bp, Mus musculus
  siRNA target sequence for 1810019C21Rik (NM_145453.1,31-49).
gaccaggtgggctagagtt

SEQ ID NO: 478435 - DNA, 19 bp, Mus musculus
  siRNA target sequence for 1810019C21Rik (NM_145453.1,34-52).
caggtgggctagagttact

SEQ ID NO: 478436 - DNA, 19 bp, Mus musculus
  siRNA target sequence for 1810019C21Rik (NM_145453.1,37-55).
gtgggctagagttactact

SEQ ID NO: 478437 - DNA, 19 bp, Mus musculus
  siRNA target sequence for 1810019C21Rik (NM_145453.1,41-59).
gctagagttactacttcaa

SEQ ID NO: 478438 - DNA, 19 bp, Mus musculus
  siRNA target sequence for 1810019C21Rik (NM_145453.1,127-145).
ccaaagccttccaaatcgt

SEQ ID NO: 478439 - DNA, 19 bp, Mus musculus
  siRNA target sequence for 1810019C21Rik (NM_145453.1,128-146).
caaagccttccaaatcgta

SEQ ID NO: 478440 - DNA, 19 bp, Mus musculus
  siRNA target sequence for 1810019C21Rik (NM_145453.1,162-180).
gtaggctgccccttagaaa

SEQ ID NO: 478441 - DNA, 19 bp, Mus musculus
  siRNA target sequence for 1810019C21Rik (NM_145453.1,165-183).
ggctgccccttagaaatga

SEQ ID NO: 478442 - DNA, 19 bp, Mus musculus
  siRNA target sequence for 1810019C21Rik (NM_145453.1,167-185).
ctgccccttagaaatgact

SEQ ID NO: 478443 - DNA, 19 bp, Mus musculus
  siRNA target sequence for 1810019C21Rik (NM_145453.1,217-235).
gaaaaaagagtacttgaat

SEQ ID NO: 478444 - DNA, 19 bp, Mus musculus
  siRNA target sequence for 1810019C21Rik (NM_145453.1,392-410).
gcggcaaagaagaatgcaa

SEQ ID NO: 478445 - DNA, 19 bp, Mus musculus
  siRNA target sequence for 1810019C21Rik (NM_145453.1,532-550).
caagtgcagagctaacgta

SEQ ID NO: 478446 - DNA, 19 bp, Mus musculus
  siRNA target sequence for 1810019C21Rik (NM_145453.1,557-575).
gcgcttggtgaatttcctt

SEQ ID NO: 478447 - DNA, 19 bp, Mus musculus
  siRNA target sequence for 1810019C21Rik (NM_145453.1,558-576).
cgcttggtgaatttccttt

SEQ ID NO: 478448 - DNA, 19 bp, Mus musculus
  siRNA target sequence for 1810019C21Rik (NM_145453.1,675-693).
gtggctccgtggaacattt

SEQ ID NO: 478449 - DNA, 19 bp, Mus musculus
  siRNA target sequence for 1810019C21Rik (NM_145453.1,677-695).
ggctccgtggaacatttta

SEQ ID NO: 478450 - DNA, 19 bp, Mus musculus
  siRNA target sequence for 1810019C21Rik (NM_145453.1,678-696).
gctccgtggaacattttaa

SEQ ID NO: 478451 - DNA, 19 bp, Mus musculus
  siRNA target sequence for 1810019C21Rik (NM_145453.1,681-699).
ccgtggaacattttaagaa

SEQ ID NO: 478452 - DNA, 19 bp, Mus musculus
  siRNA target sequence for 1810019C21Rik (NM_145453.1,701-719).
gattgccgagaaaatcaga

SEQ ID NO: 478453 - DNA, 19 bp, Mus musculus
  siRNA target sequence for 1810019C21Rik (NM_145453.1,748-766).
ctgggcaaagggtatgagt

SEQ ID NO: 478454 - DNA, 19 bp, Mus musculus
  siRNA target sequence for 1810019C21Rik (NM_145453.1,757-775).
gggtatgagtgcagactat

SEQ ID NO: 478455 - DNA, 19 bp, Mus musculus
  siRNA target sequence for 1810019C21Rik (NM_145453.1,759-777).
gtatgagtgcagactatga

SEQ ID NO: 478456 - DNA, 19 bp, Mus musculus
  siRNA target sequence for 1810019C21Rik (NM_145453.1,805-823).
gaaacctaaaaccaaagta

SEQ ID NO: 478457 - DNA, 19 bp, Mus musculus
  siRNA target sequence for 1810019C21Rik (NM_145453.1,855-873).
gtacaattgttaattacca

SEQ ID NO: 478458 - DNA, 19 bp, Mus musculus
  siRNA target sequence for 1810019C21Rik (NM_145453.1,965-983).
gtagcttgcctacaatcaa

SEQ ID NO: 478459 - DNA, 19 bp, Mus musculus
  siRNA target sequence for 1810019C21Rik (NM_145453.1,968-986).
gcttgcctacaatcaatct

SEQ ID NO: 478460 - DNA, 19 bp, Mus musculus
  siRNA target sequence for 1810019C21Rik (NM_145453.1,969-987).
cttgcctacaatcaatcta

SEQ ID NO: 478461 - DNA, 19 bp, Mus musculus
  siRNA target sequence for 1810019C21Rik (NM_145453.1,972-990).
gcctacaatcaatctatca

SEQ ID NO: 478462 - DNA, 19 bp, Mus musculus
  siRNA target sequence for 1810019C21Rik (NM_145453.1,989-1007).
caaggcgtacaggttgatt

SEQ ID NO: 478463 - DNA, 19 bp, Mus musculus
  siRNA target sequence for 1810061H24Rik (NM_133953.1,271-289).
gtttcccgtgggaagattt

SEQ ID NO: 478464 - DNA, 19 bp, Mus musculus
  siRNA target sequence for 1810061H24Rik (NM_133953.1,309-327).
ccctaacactggcaaagta

SEQ ID NO: 478465 - DNA, 19 bp, Mus musculus
  siRNA target sequence for 1810061H24Rik (NM_133953.1,355-373).
ggtgttatccggtcactta

SEQ ID NO: 478466 - DNA, 19 bp, Mus musculus
  siRNA target sequence for 1810061H24Rik (NM_133953.1,356-374).
gtgttatccggtcacttat

SEQ ID NO: 478467 - DNA, 19 bp, Mus musculus
  siRNA target sequence for 1810061H24Rik (NM_133953.1,395-413).
gcaccaaagactacattgt

SEQ ID NO: 478468 - DNA, 19 bp, Mus musculus
  siRNA target sequence for 1810061H24Rik (NM_133953.1,398-416).
ccaaagactacattgtagt

SEQ ID NO: 478469 - DNA, 19 bp, Mus musculus
  siRNA target sequence for 1810061H24Rik (NM_133953.1,399-417).
caaagactacattgtagtt

SEQ ID NO: 478470 - DNA, 19 bp, Mus musculus
  siRNA target sequence for 1810061H24Rik (NM_133953.1,424-442).
gactcaggccggattgtta

SEQ ID NO: 478471 - DNA, 19 bp, Mus musculus
  siRNA target sequence for 1810061H24Rik (NM_133953.1,428-446).
caggccggattgttatctt

SEQ ID NO: 478472 - DNA, 19 bp, Mus musculus
  siRNA target sequence for 1810061H24Rik (NM_133953.1,433-451).
cggattgttatcttggaat

SEQ ID NO: 478473 - DNA, 19 bp, Mus musculus
  siRNA target sequence for 1810061H24Rik (NM_133953.1,456-474).
gccatcaaagaatatgttt

SEQ ID NO: 478474 - DNA, 19 bp, Mus musculus
  siRNA target sequence for 1810061H24Rik (NM_133953.1,506-524).
gcggatgtcgccgtattgt

SEQ ID NO: 478475 - DNA, 19 bp, Mus musculus
  siRNA target sequence for 1810061H24Rik (NM_133953.1,507-525).
cggatgtcgccgtattgtt

SEQ ID NO: 478476 - DNA, 19 bp, Mus musculus
  siRNA target sequence for 1810061H24Rik (NM_133953.1,551-569).
ccaaaggaagagctgttat

SEQ ID NO: 478477 - DNA, 19 bp, Mus musculus
  siRNA target sequence for 1810061H24Rik (NM_133953.1,556-574).
ggaagagctgttatgatta

SEQ ID NO: 478478 - DNA, 19 bp, Mus musculus
  siRNA target sequence for 1810061H24Rik (NM_133953.1,589-607).
cagaaattggtatatatct

SEQ ID NO: 478479 - DNA, 19 bp, Mus musculus
  siRNA target sequence for 1810061H24Rik (NM_133953.1,620-638).
ctgcagcccgacttaccat

SEQ ID NO: 478480 - DNA, 19 bp, Mus musculus
  siRNA target sequence for 1810061H24Rik (NM_133953.1,622-640).
gcagcccgacttaccattt

SEQ ID NO: 478481 - DNA, 19 bp, Mus musculus
  siRNA target sequence for 1810061H24Rik (NM_133953.1,625-643).
gcccgacttaccatttcct

SEQ ID NO: 478482 - DNA, 19 bp, Mus musculus
  siRNA target sequence for 1810061H24Rik (NM_133953.1,665-683).
cgaacactctggtgtatca

SEQ ID NO: 478483 - DNA, 19 bp, Mus musculus
  siRNA target sequence for 1810061H24Rik (NM_133953.1,692-710).
gcgtagacgtgggatttga

SEQ ID NO: 478484 - DNA, 19 bp, Mus musculus
  siRNA target sequence for 1810061H24Rik (NM_133953.1,700-718).
gtgggatttgagaatccta

SEQ ID NO: 478485 - DNA, 19 bp, Mus musculus
  siRNA target sequence for 1810061H24Rik (NM_133953.1,704-722).
gatttgagaatcctatgtt

SEQ ID NO: 478486 - DNA, 19 bp, Mus musculus
  siRNA target sequence for 1810061H24Rik (NM_133953.1,709-727).
gagaatcctatgtttgctt

SEQ ID NO: 478487 - DNA, 19 bp, Mus musculus
  siRNA target sequence for 1810061H24Rik (NM_133953.1,788-806).
cccagcagacacttacttt

SEQ ID NO: 478488 - DNA, 19 bp, Mus musculus
  siRNA target sequence for 1810061H24Rik (NM_133953.1,816-834).
ggaccttggcttaaatcat

SEQ ID NO: 478489 - DNA, 19 bp, Mus musculus
  siRNA target sequence for 1810061H24Rik (NM_133953.1,868-886).
catggcaacttccttatta

SEQ ID NO: 478490 - DNA, 19 bp, Mus musculus
  siRNA target sequence for 1810061H24Rik (NM_133953.1,908-926).
gtccaagtggagtgctaat

SEQ ID NO: 478491 - DNA, 19 bp, Mus musculus
  siRNA target sequence for 1810061H24Rik (NM_133953.1,910-928).
ccaagtggagtgctaatct

SEQ ID NO: 478492 - DNA, 19 bp, Mus musculus
  siRNA target sequence for 1810061H24Rik (NM_133953.1,1018-1036).
cctgaacgaggaatgattt

SEQ ID NO: 478493 - DNA, 19 bp, Mus musculus
  siRNA target sequence for 1810061H24Rik (NM_133953.1,1099-1117).
ggagatatctttaagatca

SEQ ID NO: 478494 - DNA, 19 bp, Mus musculus
  siRNA target sequence for 1810061H24Rik (NM_133953.1,1102-1120).
gatatctttaagatcactt

SEQ ID NO: 478495 - DNA, 19 bp, Mus musculus
  siRNA target sequence for 1810061H24Rik (NM_133953.1,1145-1163).
ccgagatccgcctcaagta

SEQ ID NO: 478496 - DNA, 19 bp, Mus musculus
  siRNA target sequence for 1810061H24Rik (NM_133953.1,1146-1164).
cgagatccgcctcaagtat

SEQ ID NO: 478497 - DNA, 19 bp, Mus musculus
  siRNA target sequence for 1810061H24Rik (NM_133953.1,1147-1165).
gagatccgcctcaagtatt

SEQ ID NO: 478498 - DNA, 19 bp, Mus musculus
  siRNA target sequence for 1810061H24Rik (NM_133953.1,1149-1167).
gatccgcctcaagtatttt

SEQ ID NO: 478499 - DNA, 19 bp, Mus musculus
  siRNA target sequence for 1810061H24Rik (NM_133953.1,1152-1170).
ccgcctcaagtattttgat

SEQ ID NO: 478500 - DNA, 19 bp, Mus musculus
  siRNA target sequence for 1810061H24Rik (NM_133953.1,1153-1171).
cgcctcaagtattttgata

SEQ ID NO: 478501 - DNA, 19 bp, Mus musculus
  siRNA target sequence for 1810061H24Rik (NM_133953.1,1155-1173).
cctcaagtattttgatact

SEQ ID NO: 478502 - DNA, 19 bp, Mus musculus
  siRNA target sequence for 1810061H24Rik (NM_133953.1,1216-1234).
ctttttgtggcgtcagaat

SEQ ID NO: 478503 - DNA, 19 bp, Mus musculus
  siRNA target sequence for 1810061H24Rik (NM_133953.1,1224-1242).
ggcgtcagaatttggaaat

SEQ ID NO: 478504 - DNA, 19 bp, Mus musculus
  siRNA target sequence for 1810061H24Rik (NM_133953.1,1226-1244).
cgtcagaatttggaaatca

SEQ ID NO: 478505 - DNA, 19 bp, Mus musculus
  siRNA target sequence for 1810061H24Rik (NM_133953.1,1262-1280).
cccatctcggagatgatga

SEQ ID NO: 478506 - DNA, 19 bp, Mus musculus
  siRNA target sequence for 1810061H24Rik (NM_133953.1,1263-1281).
ccatctcggagatgatgat

SEQ ID NO: 478507 - DNA, 19 bp, Mus musculus
  siRNA target sequence for 1810061H24Rik (NM_133953.1,1299-1317).
gtctgccatgcctctagaa

SEQ ID NO: 478508 - DNA, 19 bp, Mus musculus
  siRNA target sequence for 1810061H24Rik (NM_133953.1,1339-1357).
cagccgagaccactcaaaa

SEQ ID NO: 478509 - DNA, 19 bp, Mus musculus
  siRNA target sequence for 1810061H24Rik (NM_133953.1,1343-1361).
cgagaccactcaaaaatct

SEQ ID NO: 478510 - DNA, 19 bp, Mus musculus
  siRNA target sequence for 1810061H24Rik (NM_133953.1,1509-1527).
gtcggaaatggctgtttct

SEQ ID NO: 478511 - DNA, 19 bp, Mus musculus
  siRNA target sequence for 1810061H24Rik (NM_133953.1,1511-1529).
cggaaatggctgtttctga

SEQ ID NO: 478512 - DNA, 19 bp, Mus musculus
  siRNA target sequence for 1810061H24Rik (NM_133953.1,1559-1577).
cagtccgtcggcacattga

SEQ ID NO: 478513 - DNA, 19 bp, Mus musculus
  siRNA target sequence for 1810061H24Rik (NM_133953.1,1563-1581).
ccgtcggcacattgaagat

SEQ ID NO: 478514 - DNA, 19 bp, Mus musculus
  siRNA target sequence for 1810061H24Rik (NM_133953.1,1618-1636).
gccacacttgtgctatcta

SEQ ID NO: 478515 - DNA, 19 bp, Mus musculus
  siRNA target sequence for 1810061H24Rik (NM_133953.1,1619-1637).
ccacacttgtgctatctat

SEQ ID NO: 478516 - DNA, 19 bp, Mus musculus
  siRNA target sequence for 1810061H24Rik (NM_133953.1,1701-1719).
ctccttgttaggagatgat

SEQ ID NO: 478517 - DNA, 19 bp, Mus musculus
  siRNA target sequence for 1810061H24Rik (NM_133953.1,1785-1803).
gaagactcccggcaagaaa

SEQ ID NO: 478518 - DNA, 19 bp, Mus musculus
  siRNA target sequence for 1810061H24Rik (NM_133953.1,1855-1873).
gggggagagctggtctatt

SEQ ID NO: 478519 - DNA, 19 bp, Mus musculus
  siRNA target sequence for 1810061H24Rik (NM_133953.1,1859-1877).
gagagctggtctatttcga

SEQ ID NO: 478520 - DNA, 19 bp, Mus musculus
  siRNA target sequence for 1810061H24Rik (NM_133953.1,2008-2026).
gacaacactgtcagaatca

SEQ ID NO: 478521 - DNA, 19 bp, Mus musculus
  siRNA target sequence for 1810061H24Rik (NM_133953.1,2080-2098).
gcccagcctgagtctctat

SEQ ID NO: 478522 - DNA, 19 bp, Mus musculus
  siRNA target sequence for 1810061H24Rik (NM_133953.1,2139-2157).
gggtgagagaggctctatt

SEQ ID NO: 478523 - DNA, 19 bp, Mus musculus
  siRNA target sequence for 1810061H24Rik (NM_133953.1,2333-2351).
catggctgagctactctta

SEQ ID NO: 478524 - DNA, 19 bp, Mus musculus
  siRNA target sequence for 1810061H24Rik (NM_133953.1,2489-2507).
gtgctgtcttcaatcaagt

SEQ ID NO: 478525 - DNA, 19 bp, Mus musculus
  siRNA target sequence for 1810061H24Rik (NM_133953.1,2551-2569).
cctgagagtaacaacctta

SEQ ID NO: 478526 - DNA, 19 bp, Mus musculus
  siRNA target sequence for 1810061H24Rik (NM_133953.1,2552-2570).
ctgagagtaacaaccttat

SEQ ID NO: 478527 - DNA, 19 bp, Mus musculus
  siRNA target sequence for 1810061H24Rik (NM_133953.1,2554-2572).
gagagtaacaaccttatca

SEQ ID NO: 478528 - DNA, 19 bp, Mus musculus
  siRNA target sequence for 1810061H24Rik (NM_133953.1,2598-2616).
cactgaggccacaaaagct

SEQ ID NO: 478529 - DNA, 19 bp, Mus musculus
  siRNA target sequence for 1810061H24Rik (NM_133953.1,2768-2786).
ctgtgattcgggtgatgaa

SEQ ID NO: 478530 - DNA, 19 bp, Mus musculus
  siRNA target sequence for 1810061H24Rik (NM_133953.1,2787-2805).
ccctatccaggggaataca

SEQ ID NO: 478531 - DNA, 19 bp, Mus musculus
  siRNA target sequence for 1810061H24Rik (NM_133953.1,2789-2807).
ctatccaggggaatacact

SEQ ID NO: 478532 - DNA, 19 bp, Mus musculus
  siRNA target sequence for 1810061H24Rik (NM_133953.1,2871-2889).
cactggtgaagattggtat

SEQ ID NO: 478533 - DNA, 19 bp, Mus musculus
  siRNA target sequence for 1810061H24Rik (NM_133953.1,2941-2959).
gggggctttgtgtatacgt

SEQ ID NO: 478534 - DNA, 19 bp, Mus musculus
  siRNA target sequence for 1810061H24Rik (NM_133953.1,2942-2960).
ggggctttgtgtatacgta

SEQ ID NO: 478535 - DNA, 19 bp, Mus musculus
  siRNA target sequence for 1810061H24Rik (NM_133953.1,3042-3060).
ccaggggagggtactgatt

SEQ ID NO: 478536 - DNA, 19 bp, Mus musculus
  siRNA target sequence for 1810061H24Rik (NM_133953.1,3068-3086).
ggaagcttttacgagttta

SEQ ID NO: 478537 - DNA, 19 bp, Mus musculus
  siRNA target sequence for 1810061H24Rik (NM_133953.1,3069-3087).
gaagcttttacgagtttat

SEQ ID NO: 478538 - DNA, 19 bp, Mus musculus
  siRNA target sequence for 1810061H24Rik (NM_133953.1,3117-3135).
gtgtgagaataagcatatt

SEQ ID NO: 478539 - DNA, 19 bp, Mus musculus
  siRNA target sequence for 1810061H24Rik (NM_133953.1,3166-3184).
ggtcacagggtaattgtgt

SEQ ID NO: 478540 - DNA, 19 bp, Mus musculus
  siRNA target sequence for 1810061H24Rik (NM_133953.1,3229-3247).
gagaaccagctcattatct

SEQ ID NO: 478541 - DNA, 19 bp, Mus musculus
  siRNA target sequence for 1810061H24Rik (NM_133953.1,3231-3249).
gaaccagctcattatcttt

SEQ ID NO: 478542 - DNA, 19 bp, Mus musculus
  siRNA target sequence for 1810061H24Rik (NM_133953.1,3319-3337).
gacaagtttggcaacattt

SEQ ID NO: 478543 - DNA, 19 bp, Mus musculus
  siRNA target sequence for 1810061H24Rik (NM_133953.1,3476-3494).
ccgtgctgtcgctacagaa

SEQ ID NO: 478544 - DNA, 19 bp, Mus musculus
  siRNA target sequence for 1810061H24Rik (NM_133953.1,3526-3544).
cttgtctataccactttat

SEQ ID NO: 478545 - DNA, 19 bp, Mus musculus
  siRNA target sequence for 1810061H24Rik (NM_133953.1,3652-3670).
gaccacctgagctttcgtt

SEQ ID NO: 478546 - DNA, 19 bp, Mus musculus
  siRNA target sequence for 1810061H24Rik (NM_133953.1,3658-3676).
ctgagctttcgttcttact

SEQ ID NO: 478547 - DNA, 19 bp, Mus musculus
  siRNA target sequence for 1810061H24Rik (NM_133953.1,3660-3678).
gagctttcgttcttactat

SEQ ID NO: 478548 - DNA, 19 bp, Mus musculus
  siRNA target sequence for 1810061H24Rik (NM_133953.1,3675-3693).
ctatttccctgttaagaat

SEQ ID NO: 478549 - DNA, 19 bp, Mus musculus
  siRNA target sequence for 1810061H24Rik (NM_133953.1,3709-3727).
ctttgtgagcagttcaact

SEQ ID NO: 478550 - DNA, 19 bp, Mus musculus
  siRNA target sequence for 2010004P11Rik (NM_026434.2,178-196).
gagaatgcatccatccttt

SEQ ID NO: 478551 - DNA, 19 bp, Mus musculus
  siRNA target sequence for 2010004P11Rik (NM_026434.2,214-232).
gaaggacaccgattatgga

SEQ ID NO: 478552 - DNA, 19 bp, Mus musculus
  siRNA target sequence for 2010004P11Rik (NM_026434.2,236-254).
gcaacctggatcccaaaat

SEQ ID NO: 478553 - DNA, 19 bp, Mus musculus
  siRNA target sequence for 2010004P11Rik (NM_026434.2,244-262).
gatcccaaaatcacagaat

SEQ ID NO: 478554 - DNA, 19 bp, Mus musculus
  siRNA target sequence for 2010004P11Rik (NM_026434.2,293-311).
gcaaggtgaagcagtttga

SEQ ID NO: 478555 - DNA, 19 bp, Mus musculus
  siRNA target sequence for 2010004P11Rik (NM_026434.2,310-328).
gacttcctcttccataagt

SEQ ID NO: 478556 - DNA, 19 bp, Mus musculus
  siRNA target sequence for 2010004P11Rik (NM_026434.2,348-366).
gccccgagggtactgtttt

SEQ ID NO: 478557 - DNA, 19 bp, Mus musculus
  siRNA target sequence for 2010004P11Rik (NM_026434.2,352-370).
cgagggtactgttttgtta

SEQ ID NO: 478558 - DNA, 19 bp, Mus musculus
  siRNA target sequence for 2010004P11Rik (NM_026434.2,419-437).
gcaagctggcgctgtctaa

SEQ ID NO: 478559 - DNA, 19 bp, Mus musculus
  siRNA target sequence for 2010004P11Rik (NM_026434.2,455-473).
gggcccacgctcaagtcaa

SEQ ID NO: 478560 - DNA, 19 bp, Mus musculus
  siRNA target sequence for 2010004P11Rik (NM_026434.2,460-478).
cacgctcaagtcaagagat

SEQ ID NO: 478561 - DNA, 19 bp, Mus musculus
  siRNA target sequence for 2010004P11Rik (NM_026434.2,462-480).
cgctcaagtcaagagatat

SEQ ID NO: 478562 - DNA, 19 bp, Mus musculus
  siRNA target sequence for 2010004P11Rik (NM_026434.2,469-487).
gtcaagagatatgatcata

SEQ ID NO: 478563 - DNA, 19 bp, Mus musculus
  siRNA target sequence for 2010004P11Rik (NM_026434.2,476-494).
gatatgatcataacaagaa

SEQ ID NO: 478564 - DNA, 19 bp, Mus musculus
  siRNA target sequence for 2010004P11Rik (NM_026434.2,560-578).
gtgtcactgcaaagataaa

SEQ ID NO: 478565 - DNA, 19 bp, Mus musculus
  siRNA target sequence for 2010004P11Rik (NM_026434.2,635-653).
cagcgcctgtttattccta

SEQ ID NO: 478566 - DNA, 19 bp, Mus musculus
  siRNA target sequence for 2010004P11Rik (NM_026434.2,654-672).
ctttaaaccacctgataaa

SEQ ID NO: 478567 - DNA, 19 bp, Mus musculus
  siRNA target sequence for 2010009L17Rik (NM_025630.2,480-498).
ccgcacgcaggtagaagaa

SEQ ID NO: 478568 - DNA, 19 bp, Mus musculus
  siRNA target sequence for 2010009L17Rik (NM_025630.2,482-500).
gcacgcaggtagaagaact

SEQ ID NO: 478569 - DNA, 19 bp, Mus musculus
  siRNA target sequence for 2010009L17Rik (NM_025630.2,486-504).
gcaggtagaagaacttagt

SEQ ID NO: 478570 - DNA, 19 bp, Mus musculus
  siRNA target sequence for 2010009L17Rik (NM_025630.2,539-557).
cgaagtctgatgtagaagt

SEQ ID NO: 478571 - DNA, 19 bp, Mus musculus
  siRNA target sequence for 2010009L17Rik (NM_025630.2,540-558).
gaagtctgatgtagaagta

SEQ ID NO: 478572 - DNA, 19 bp, Mus musculus
  siRNA target sequence for 2010009L17Rik (NM_025630.2,577-595).
ccttgggcgatttcagatt

SEQ ID NO: 478573 - DNA, 19 bp, Mus musculus
  siRNA target sequence for 2010009L17Rik (NM_025630.2,578-596).
cttgggcgatttcagatta

SEQ ID NO: 478574 - DNA, 19 bp, Mus musculus
  siRNA target sequence for 2010009L17Rik (NM_025630.2,583-601).
gcgatttcagattattact

SEQ ID NO: 478575 - DNA, 19 bp, Mus musculus
  siRNA target sequence for 2010009L17Rik (NM_025630.2,584-602).
cgatttcagattattacta

SEQ ID NO: 478576 - DNA, 19 bp, Mus musculus
  siRNA target sequence for 2010009L17Rik (NM_025630.2,621-639).
cgacagtcttcccagtaaa

SEQ ID NO: 478577 - DNA, 19 bp, Mus musculus
  siRNA target sequence for 2010009L17Rik (NM_025630.2,711-729).
catagacagcgggagttat

SEQ ID NO: 478578 - DNA, 19 bp, Mus musculus
  siRNA target sequence for 2010009L17Rik (NM_025630.2,911-929).
gcacgggcttatattttga

SEQ ID NO: 478579 - DNA, 19 bp, Mus musculus
  siRNA target sequence for 2010009L17Rik (NM_025630.2,956-974).
ctgaaaaccagctgtatta

SEQ ID NO: 478580 - DNA, 19 bp, Mus musculus
  siRNA target sequence for 2010009L17Rik (NM_025630.2,983-1001).
ccacggggatttattacta

SEQ ID NO: 478581 - DNA, 19 bp, Mus musculus
  siRNA target sequence for 2010009L17Rik (NM_025630.2,1016-1034).
gtggtcggtaccagtttca

SEQ ID NO: 478582 - DNA, 19 bp, Mus musculus
  siRNA target sequence for 2010009L17Rik (NM_025630.2,1018-1036).
ggtcggtaccagtttcact

SEQ ID NO: 478583 - DNA, 19 bp, Mus musculus
  siRNA target sequence for 2010009L17Rik (NM_025630.2,1059-1077).
ccagacctctagcacaaaa

SEQ ID NO: 478584 - DNA, 19 bp, Mus musculus
  siRNA target sequence for 2010009L17Rik (NM_025630.2,1062-1080).
gacctctagcacaaaacca

SEQ ID NO: 478585 - DNA, 19 bp, Mus musculus
  siRNA target sequence for 2010009L17Rik (NM_025630.2,1109-1127).
gaaaggagccaggttttta

SEQ ID NO: 478586 - DNA, 19 bp, Mus musculus
  siRNA target sequence for 2010009L17Rik (NM_025630.2,1175-1193).
gcagtgtagaatatataaa

SEQ ID NO: 478587 - DNA, 19 bp, Mus musculus
  siRNA target sequence for 2010009L17Rik (NM_025630.2,1272-1290).
gctcacggtggcagttagt

SEQ ID NO: 478588 - DNA, 19 bp, Mus musculus
  siRNA target sequence for 2010009L17Rik (NM_025630.2,1318-1336).
gataactcagcgtcatcta

SEQ ID NO: 478589 - DNA, 19 bp, Mus musculus
  siRNA target sequence for 2010009L17Rik (NM_025630.2,1331-1349).
catctaaggatgagagaat

SEQ ID NO: 478590 - DNA, 19 bp, Mus musculus
  siRNA target sequence for 2010009L17Rik (NM_025630.2,1490-1508).
cctgtattcgcgtgattgt

SEQ ID NO: 478591 - DNA, 19 bp, Mus musculus
  siRNA target sequence for 2010009L17Rik (NM_025630.2,1493-1511).
gtattcgcgtgattgtcat

SEQ ID NO: 478592 - DNA, 19 bp, Mus musculus
  siRNA target sequence for 2010009L17Rik (NM_025630.2,1498-1516).
cgcgtgattgtcattaggt

SEQ ID NO: 478593 - DNA, 19 bp, Mus musculus
  siRNA target sequence for 2010009L17Rik (NM_025630.2,1612-1630).
cctgaagtcgctgttagta

SEQ ID NO: 478594 - DNA, 19 bp, Mus musculus
  siRNA target sequence for 2010009L17Rik (NM_025630.2,1613-1631).
ctgaagtcgctgttagtaa

SEQ ID NO: 478595 - DNA, 19 bp, Mus musculus
  siRNA target sequence for 2010009L17Rik (NM_025630.2,1615-1633).
gaagtcgctgttagtaagt

SEQ ID NO: 478596 - DNA, 19 bp, Mus musculus
  siRNA target sequence for 2010009L17Rik (NM_025630.2,1687-1705).
cagggcagccagaatggta

SEQ ID NO: 478597 - DNA, 19 bp, Mus musculus
  siRNA target sequence for 2010009L17Rik (NM_025630.2,1692-1710).
cagccagaatggtaccatt

SEQ ID NO: 478598 - DNA, 19 bp, Mus musculus
  siRNA target sequence for 2010009L17Rik (NM_025630.2,1696-1714).
cagaatggtaccattgtca

SEQ ID NO: 478599 - DNA, 19 bp, Mus musculus
  siRNA target sequence for 2010009L17Rik (NM_025630.2,1729-1747).
cttcagccaaaaactaaat

SEQ ID NO: 478600 - DNA, 19 bp, Mus musculus
  siRNA target sequence for 2010009L17Rik (NM_025630.2,1768-1786).
cacggcgacgaagtgaaaa

SEQ ID NO: 478601 - DNA, 19 bp, Mus musculus
  siRNA target sequence for 2010009L17Rik (NM_025630.2,1770-1788).
cggcgacgaagtgaaaatt

SEQ ID NO: 478602 - DNA, 19 bp, Mus musculus
  siRNA target sequence for 2010009L17Rik (NM_025630.2,1867-1885).
cacctccgcctcgatagaa

SEQ ID NO: 478603 - DNA, 19 bp, Mus musculus
  siRNA target sequence for 2010009L17Rik (NM_025630.2,1900-1918).
gtcggtccagcactaagta

SEQ ID NO: 478604 - DNA, 19 bp, Mus musculus
  siRNA target sequence for 2010009L17Rik (NM_025630.2,1916-1934).
gtaaggaggaaaaagagtt

SEQ ID NO: 478605 - DNA, 19 bp, Mus musculus
  siRNA target sequence for 2010009L17Rik (NM_025630.2,1999-2017).
gctgaaaaagcgttgaaga

SEQ ID NO: 478606 - DNA, 19 bp, Mus musculus
  siRNA target sequence for 2010009L17Rik (NM_025630.2,2009-2027).
cgttgaagaatcctaagta

SEQ ID NO: 478607 - DNA, 19 bp, Mus musculus
  siRNA target sequence for 2010009L17Rik (NM_025630.2,2013-2031).
gaagaatcctaagtataaa

SEQ ID NO: 478608 - DNA, 19 bp, Mus musculus
  siRNA target sequence for 2010009L17Rik (NM_025630.2,2099-2117).
cgtctgttcactctgaaat

SEQ ID NO: 478609 - DNA, 19 bp, Mus musculus
  siRNA target sequence for 2010009L17Rik (NM_025630.2,2126-2144).
gcaacaaaggccgaaagat

SEQ ID NO: 478610 - DNA, 19 bp, Mus musculus
  siRNA target sequence for 2010009L17Rik (NM_025630.2,2188-2206).
gacggtggagggatgaaaa

SEQ ID NO: 478611 - DNA, 19 bp, Mus musculus
  siRNA target sequence for 2010009L17Rik (NM_025630.2,2281-2299).
cacctcatccagaataaga

SEQ ID NO: 478612 - DNA, 19 bp, Mus musculus
  siRNA target sequence for 2310001H12Rik (NM_145563.1,856-874).
gccagtctccgtacacata

SEQ ID NO: 478613 - DNA, 19 bp, Mus musculus
  siRNA target sequence for 2310001H12Rik (NM_145563.1,857-875).
ccagtctccgtacacataa

SEQ ID NO: 478614 - DNA, 19 bp, Mus musculus
  siRNA target sequence for 2310001H12Rik (NM_145563.1,858-876).
cagtctccgtacacataaa

SEQ ID NO: 478615 - DNA, 19 bp, Mus musculus
  siRNA target sequence for 2310002B06Rik (NM_181649.1,44-62).
ccttcattaatgttcaaga

SEQ ID NO: 478616 - DNA, 19 bp, Mus musculus
  siRNA target sequence for 2310002B06Rik (NM_181649.1,106-124).
gcccgtcggaaagaagaaa

SEQ ID NO: 478617 - DNA, 19 bp, Mus musculus
  siRNA target sequence for 2310002B06Rik (NM_181649.1,150-168).
caggcagaagagcgtaaaa

SEQ ID NO: 478618 - DNA, 19 bp, Mus musculus
  siRNA target sequence for 2310002B06Rik (NM_181649.1,187-205).
cgtgacatcgggttgaaga

SEQ ID NO: 478619 - DNA, 19 bp, Mus musculus
  siRNA target sequence for 2310002B06Rik (NM_181649.1,209-227).
cactcggctgtgaaaacaa

SEQ ID NO: 478620 - DNA, 19 bp, Mus musculus
  siRNA target sequence for 2310002B06Rik (NM_181649.1,230-248).
ggttcgctctgctccaaaa

SEQ ID NO: 478621 - DNA, 19 bp, Mus musculus
  siRNA target sequence for 2310002B06Rik (NM_181649.1,279-297).
caagagcggagatggtatt

SEQ ID NO: 478622 - DNA, 19 bp, Mus musculus
  siRNA target sequence for 2310002B06Rik (NM_181649.1,284-302).
gcggagatggtattgttga

SEQ ID NO: 478623 - DNA, 19 bp, Mus musculus
  siRNA target sequence for 2310002B06Rik (NM_181649.1,305-323).
caattcctctcaatgtcaa

SEQ ID NO: 478624 - DNA, 19 bp, Mus musculus
  siRNA target sequence for 2310002B06Rik (NM_181649.1,315-333).
caatgtcaaaacaggaaaa

SEQ ID NO: 478625 - DNA, 19 bp, Mus musculus
  siRNA target sequence for 2310020H19Rik (NM_025525.1,516-534).
cgagttggacactgagaaa

SEQ ID NO: 478626 - DNA, 19 bp, Mus musculus
  siRNA target sequence for 2310020H19Rik (NM_025525.1,1060-1078).
cagacccatggggttttca

SEQ ID NO: 478627 - DNA, 19 bp, Mus musculus
  siRNA target sequence for 2310020H19Rik (NM_025525.1,1152-1170).
gacgccgatgggatctaat

SEQ ID NO: 478628 - DNA, 19 bp, Mus musculus
  siRNA target sequence for 2310046H11Rik (NM_145625.1,920-938).
gactactctcgggatgatt

SEQ ID NO: 478629 - DNA, 19 bp, Mus musculus
  siRNA target sequence for 2310046H11Rik (NM_145625.1,922-940).
ctactctcgggatgattat

SEQ ID NO: 478630 - DNA, 19 bp, Mus musculus
  siRNA target sequence for 2310061O04Rik (NM_027156.2,776-794).
ccgtgcactggttgtactt

SEQ ID NO: 478631 - DNA, 19 bp, Mus musculus
  siRNA target sequence for 2310061O04Rik (NM_027156.2,813-831).
caacaggtgagcaaagtat

SEQ ID NO: 478632 - DNA, 19 bp, Mus musculus
  siRNA target sequence for 2310061O04Rik (NM_027156.2,819-837).
gtgagcaaagtattcaaca

SEQ ID NO: 478633 - DNA, 19 bp, Mus musculus
  siRNA target sequence for 2310061O04Rik (NM_027156.2,940-958).
gttgcctggccgacattgt

SEQ ID NO: 478634 - DNA, 19 bp, Mus musculus
  siRNA target sequence for 2310061O04Rik (NM_027156.2,1022-1040).
gctccgcttcctgatcatt

SEQ ID NO: 478635 - DNA, 19 bp, Mus musculus
  siRNA target sequence for 2310061O04Rik (NM_027156.2,1027-1045).
gcttcctgatcattgatga

SEQ ID NO: 478636 - DNA, 19 bp, Mus musculus
  siRNA target sequence for 2310061O04Rik (NM_027156.2,1323-1341).
gctgaggtggatgaaaact

SEQ ID NO: 478637 - DNA, 19 bp, Mus musculus
  siRNA target sequence for 2310061O04Rik (NM_027156.2,1335-1353).
gaaaactcggggaagtaca

SEQ ID NO: 478638 - DNA, 19 bp, Mus musculus
  siRNA target sequence for 2310061O04Rik (NM_027156.2,1364-1382).
ggggctcacgcatcactat

SEQ ID NO: 478639 - DNA, 19 bp, Mus musculus
  siRNA target sequence for 2310061O04Rik (NM_027156.2,1399-1417).
gctcgaagccactcattgt

SEQ ID NO: 478640 - DNA, 19 bp, Mus musculus
  siRNA target sequence for 2310061O04Rik (NM_027156.2,1403-1421).
gaagccactcattgtctta

SEQ ID NO: 478641 - DNA, 19 bp, Mus musculus
  siRNA target sequence for 2310061O04Rik (NM_027156.2,1444-1462).
gctcaagggctctttgctt

SEQ ID NO: 478642 - DNA, 19 bp, Mus musculus
  siRNA target sequence for 2310061O04Rik (NM_027156.2,1483-1501).
cccacaggctgtacctatt

SEQ ID NO: 478643 - DNA, 19 bp, Mus musculus
  siRNA target sequence for 2310061O04Rik (NM_027156.2,1487-1505).
caggctgtacctattagca

SEQ ID NO: 478644 - DNA, 19 bp, Mus musculus
  siRNA target sequence for 2310061O04Rik (NM_027156.2,1496-1514).
cctattagcacaagctttt

SEQ ID NO: 478645 - DNA, 19 bp, Mus musculus
  siRNA target sequence for 2310061O04Rik (NM_027156.2,1670-1688).
ctacgatgccccacaatat

SEQ ID NO: 478646 - DNA, 19 bp, Mus musculus
  siRNA target sequence for 2310061O04Rik (NM_027156.2,1674-1692).
gatgccccacaatatctga

SEQ ID NO: 478647 - DNA, 19 bp, Mus musculus
  siRNA target sequence for 2310061O04Rik (NM_027156.2,1747-1765).
cattcacacttctcttgaa

SEQ ID NO: 478648 - DNA, 19 bp, Mus musculus
  siRNA target sequence for 2310061O04Rik (NM_027156.2,1853-1871).
gccgctggttgctcgttat

SEQ ID NO: 478649 - DNA, 19 bp, Mus musculus
  siRNA target sequence for 2310061O04Rik (NM_027156.2,1855-1873).
cgctggttgctcgttatga

SEQ ID NO: 478650 - DNA, 19 bp, Mus musculus
  siRNA target sequence for 2310067E08Rik (NM_028013.1,118-136).
gcgaatgcgaccgtttctt

SEQ ID NO: 478651 - DNA, 19 bp, Mus musculus
  siRNA target sequence for 2310067E08Rik (NM_028013.1,490-508).
ccacattcccgctcacaaa

SEQ ID NO: 478652 - DNA, 19 bp, Mus musculus
  siRNA target sequence for 2310067E08Rik (NM_028013.1,491-509).
cacattcccgctcacaaat

SEQ ID NO: 478653 - DNA, 19 bp, Mus musculus
  siRNA target sequence for 2310067E08Rik (NM_028013.1,497-515).
cccgctcacaaattcagtt

SEQ ID NO: 478654 - DNA, 19 bp, Mus musculus
  siRNA target sequence for 2310067E08Rik (NM_028013.1,535-553).
gggaacgatggcacatgaa

SEQ ID NO: 478655 - DNA, 19 bp, Mus musculus
  siRNA target sequence for 2310067E08Rik (NM_028013.1,540-558).
cgatggcacatgaatctca

SEQ ID NO: 478656 - DNA, 19 bp, Mus musculus
  siRNA target sequence for 2310067E08Rik (NM_028013.1,541-559).
gatggcacatgaatctcaa

SEQ ID NO: 478657 - DNA, 19 bp, Mus musculus
  siRNA target sequence for 2310067E08Rik (NM_028013.1,746-764).
ggacattgatgtcatagaa

SEQ ID NO: 478658 - DNA, 19 bp, Mus musculus
  siRNA target sequence for 2310067E08Rik (NM_028013.1,749-767).
cattgatgtcatagaagat

SEQ ID NO: 478659 - DNA, 19 bp, Mus musculus
  siRNA target sequence for 2310067E08Rik (NM_028013.1,1028-1046).
ccttgctaccccattcatt

SEQ ID NO: 478660 - DNA, 19 bp, Mus musculus
  siRNA target sequence for 2310067E08Rik (NM_028013.1,1029-1047).
cttgctaccccattcatta

SEQ ID NO: 478661 - DNA, 19 bp, Mus musculus
  siRNA target sequence for 2310067E08Rik (NM_028013.1,1036-1054).
ccccattcattaagctttt

SEQ ID NO: 478662 - DNA, 19 bp, Mus musculus
  siRNA target sequence for 2310067E08Rik (NM_028013.1,1071-1089).
cttgttacagcggtcttaa

SEQ ID NO: 478663 - DNA, 19 bp, Mus musculus
  siRNA target sequence for 2310067E08Rik (NM_028013.1,1074-1092).
gttacagcggtcttaagga

SEQ ID NO: 478664 - DNA, 19 bp, Mus musculus
  siRNA target sequence for 2310067E08Rik (NM_028013.1,1078-1096).
cagcggtcttaaggaatat

SEQ ID NO: 478665 - DNA, 19 bp, Mus musculus
  siRNA target sequence for 2310067E08Rik (NM_028013.1,1081-1099).
cggtcttaaggaatatagt

SEQ ID NO: 478666 - DNA, 19 bp, Mus musculus
  siRNA target sequence for 2310067E08Rik (NM_028013.1,1116-1134).
gttgccaagcaggcaataa

SEQ ID NO: 478667 - DNA, 19 bp, Mus musculus
  siRNA target sequence for 2310067E08Rik (NM_028013.1,1444-1462).
ccgtaggtggcttgtttca

SEQ ID NO: 478668 - DNA, 19 bp, Mus musculus
  siRNA target sequence for 2310067E08Rik (NM_028013.1,1450-1468).
gtggcttgtttcagattgt

SEQ ID NO: 478669 - DNA, 19 bp, Mus musculus
  siRNA target sequence for 2310067E08Rik (NM_028013.1,1457-1475).
gtttcagattgtttttagt

SEQ ID NO: 478670 - DNA, 19 bp, Mus musculus
  siRNA target sequence for 2310067E08Rik (NM_028013.1,1496-1514).
caaggttactttagacaat

SEQ ID NO: 478671 - DNA, 19 bp, Mus musculus
  siRNA target sequence for 2400008B06Rik (NM_028030.2,311-329).
ggaggtccgcacactgttt

SEQ ID NO: 478672 - DNA, 19 bp, Mus musculus
  siRNA target sequence for 2400008B06Rik (NM_028030.2,315-333).
gtccgcacactgtttgtca

SEQ ID NO: 478673 - DNA, 19 bp, Mus musculus
  siRNA target sequence for 2400008B06Rik (NM_028030.2,336-354).
ggcctccctgtggatatta

SEQ ID NO: 478674 - DNA, 19 bp, Mus musculus
  siRNA target sequence for 2400008B06Rik (NM_028030.2,337-355).
gcctccctgtggatattaa

SEQ ID NO: 478675 - DNA, 19 bp, Mus musculus
  siRNA target sequence for 2400008B06Rik (NM_028030.2,429-447).
cagcctgttggttttgtga

SEQ ID NO: 478676 - DNA, 19 bp, Mus musculus
  siRNA target sequence for 2400008B06Rik (NM_028030.2,491-509).
gaatggtattcgctttgat

SEQ ID NO: 478677 - DNA, 19 bp, Mus musculus
  siRNA target sequence for 2400008B06Rik (NM_028030.2,563-581).
ggccaagagcaaactaata

SEQ ID NO: 478678 - DNA, 19 bp, Mus musculus
  siRNA target sequence for 2400008B06Rik (NM_028030.2,613-631).
ctctaggagcacacttgat

SEQ ID NO: 478679 - DNA, 19 bp, Mus musculus
  siRNA target sequence for 2410004J23Rik (NM_172429.1,734-752).
ccaggtaaagaggagtatt

SEQ ID NO: 478680 - DNA, 19 bp, Mus musculus
  siRNA target sequence for 2410004J23Rik (NM_172429.1,735-753).
caggtaaagaggagtattt

SEQ ID NO: 478681 - DNA, 19 bp, Mus musculus
  siRNA target sequence for 2410004J23Rik (NM_172429.1,812-830).
caagcccatgacacagtat

SEQ ID NO: 478682 - DNA, 19 bp, Mus musculus
  siRNA target sequence for 2410004J23Rik (NM_172429.1,815-833).
gcccatgacacagtatcaa

SEQ ID NO: 478683 - DNA, 19 bp, Mus musculus
  siRNA target sequence for 2410004J23Rik (NM_172429.1,831-849).
caagatacatccaagtaca

SEQ ID NO: 478684 - DNA, 19 bp, Mus musculus
  siRNA target sequence for 2410008M22Rik (NM_025654.1,27-45).
ggagttgatctctttcgta

SEQ ID NO: 478685 - DNA, 19 bp, Mus musculus
  siRNA target sequence for 2410008M22Rik (NM_025654.1,51-69).
cacccagagcgacaaagtt

SEQ ID NO: 478686 - DNA, 19 bp, Mus musculus
  siRNA target sequence for 2410008M22Rik (NM_025654.1,103-121).
gccgaagccttaagtcatt

SEQ ID NO: 478687 - DNA, 19 bp, Mus musculus
  siRNA target sequence for 2410008M22Rik (NM_025654.1,105-123).
cgaagccttaagtcattct

SEQ ID NO: 478688 - DNA, 19 bp, Mus musculus
  siRNA target sequence for 2410008M22Rik (NM_025654.1,200-218).
gtttctacgccatcatcaa

SEQ ID NO: 478689 - DNA, 19 bp, Mus musculus
  siRNA target sequence for 2410008M22Rik (NM_025654.1,261-279).
cgatgggaaaccccttttt

SEQ ID NO: 478690 - DNA, 19 bp, Mus musculus
  siRNA target sequence for 2410008M22Rik (NM_025654.1,362-380).
gccaggaactggccaatta

SEQ ID NO: 478691 - DNA, 19 bp, Mus musculus
  siRNA target sequence for 2410008M22Rik (NM_025654.1,401-419).
ggtcgaaaaggatcatcaa

SEQ ID NO: 478692 - DNA, 19 bp, Mus musculus
  siRNA target sequence for 2410008M22Rik (NM_025654.1,581-599).
ggcagtcctcgtttcttat

SEQ ID NO: 478693 - DNA, 19 bp, Mus musculus
  siRNA target sequence for 2410008M22Rik (NM_025654.1,710-728).
ccacggcggaggatctaga

SEQ ID NO: 478694 - DNA, 19 bp, Mus musculus
  siRNA target sequence for 2410008M22Rik (NM_025654.1,711-729).
cacggcggaggatctagat

SEQ ID NO: 478695 - DNA, 19 bp, Mus musculus
  siRNA target sequence for 2410022M24Rik (NM_026112.2,551-569).
gaggaaccagtgactttca

SEQ ID NO: 478696 - DNA, 19 bp, Mus musculus
  siRNA target sequence for 2410022M24Rik (NM_026112.2,606-624).
gacagctagaccttgttca

SEQ ID NO: 478697 - DNA, 19 bp, Mus musculus
  siRNA target sequence for 2410022M24Rik (NM_026112.2,739-757).
gtcagtggagcaaggatat

SEQ ID NO: 478698 - DNA, 19 bp, Mus musculus
  siRNA target sequence for 2410022M24Rik (NM_026112.2,743-761).
gtggagcaaggatatccta

SEQ ID NO: 478699 - DNA, 19 bp, Mus musculus
  siRNA target sequence for 2410022M24Rik (NM_026112.2,745-763).
ggagcaaggatatcctaaa

SEQ ID NO: 478700 - DNA, 19 bp, Mus musculus
  siRNA target sequence for 2410022M24Rik (NM_026112.2,784-802).
gaggaatactgaaagcaaa

SEQ ID NO: 478701 - DNA, 19 bp, Mus musculus
  siRNA target sequence for 2410022M24Rik (NM_026112.2,856-874).
gatgttagaaagatacata

SEQ ID NO: 478702 - DNA, 19 bp, Mus musculus
  siRNA target sequence for 2410022M24Rik (NM_026112.2,917-935).
ggcgaccagttagaaatgt

SEQ ID NO: 478703 - DNA, 19 bp, Mus musculus
  siRNA target sequence for 2410022M24Rik (NM_026112.2,918-936).
gcgaccagttagaaatgta

SEQ ID NO: 478704 - DNA, 19 bp, Mus musculus
  siRNA target sequence for 2410022M24Rik (NM_026112.2,919-937).
cgaccagttagaaatgtat

SEQ ID NO: 478705 - DNA, 19 bp, Mus musculus
  siRNA target sequence for 2410022M24Rik (NM_026112.2,923-941).
cagttagaaatgtatcaca

SEQ ID NO: 478706 - DNA, 19 bp, Mus musculus
  siRNA target sequence for 2410022M24Rik (NM_026112.2,963-981).
ggcaaatggtctttatgca

SEQ ID NO: 478707 - DNA, 19 bp, Mus musculus
  siRNA target sequence for 2410022M24Rik (NM_026112.2,979-997).
gcaaaaacaagtactttct

SEQ ID NO: 478708 - DNA, 19 bp, Mus musculus
  siRNA target sequence for 2410022M24Rik (NM_026112.2,996-1014).
ctcaacgagggtctgaatt

SEQ ID NO: 478709 - DNA, 19 bp, Mus musculus
  siRNA target sequence for 2410022M24Rik (NM_026112.2,998-1016).
caacgagggtctgaattct

SEQ ID NO: 478710 - DNA, 19 bp, Mus musculus
  siRNA target sequence for 2410022M24Rik (NM_026112.2,1036-1054).
cagccaaagcttaaactta

SEQ ID NO: 478711 - DNA, 19 bp, Mus musculus
  siRNA target sequence for 2410022M24Rik (NM_026112.2,1074-1092).
cacaattagaacgtttcta

SEQ ID NO: 478712 - DNA, 19 bp, Mus musculus
  siRNA target sequence for 2410022M24Rik (NM_026112.2,1093-1111).
caaacctgatacacatctt

SEQ ID NO: 478713 - DNA, 19 bp, Mus musculus
  siRNA target sequence for 2410022M24Rik (NM_026112.2,1122-1140).
gctgtaattcagccataat

SEQ ID NO: 478714 - DNA, 19 bp, Mus musculus
  siRNA target sequence for 2410022M24Rik (NM_026112.2,1148-1166).
gataaggttacctgtgaaa

SEQ ID NO: 478715 - DNA, 19 bp, Mus musculus
  siRNA target sequence for 2410022M24Rik (NM_026112.2,1153-1171).
ggttacctgtgaaaatagt

SEQ ID NO: 478716 - DNA, 19 bp, Mus musculus
  siRNA target sequence for 2410022M24Rik (NM_026112.2,1226-1244).
caaactggagataatctgt

SEQ ID NO: 478717 - DNA, 19 bp, Mus musculus
  siRNA target sequence for 2410022M24Rik (NM_026112.2,1235-1253).
gataatctgttcaaatgta

SEQ ID NO: 478718 - DNA, 19 bp, Mus musculus
  siRNA target sequence for 2410022M24Rik (NM_026112.2,1256-1274).
gatgctgtgaagtctttca

SEQ ID NO: 478719 - DNA, 19 bp, Mus musculus
  siRNA target sequence for 2410022M24Rik (NM_026112.2,1267-1285).
gtctttcaatcatattata

SEQ ID NO: 478720 - DNA, 19 bp, Mus musculus
  siRNA target sequence for 2410022M24Rik (NM_026112.2,1340-1358).
gaataccatcaaatcttta

SEQ ID NO: 478721 - DNA, 19 bp, Mus musculus
  siRNA target sequence for 2410022M24Rik (NM_026112.2,1363-1381).
gagcccatcacttattgaa

SEQ ID NO: 478722 - DNA, 19 bp, Mus musculus
  siRNA target sequence for 2410022M24Rik (NM_026112.2,1365-1383).
gcccatcacttattgaata

SEQ ID NO: 478723 - DNA, 19 bp, Mus musculus
  siRNA target sequence for 2410022M24Rik (NM_026112.2,1379-1397).
gaataccccaaacttcaaa

SEQ ID NO: 478724 - DNA, 19 bp, Mus musculus
  siRNA target sequence for 2410022M24Rik (NM_026112.2,1479-1497).
gcagtgtagaaaaaacata

SEQ ID NO: 478725 - DNA, 19 bp, Mus musculus
  siRNA target sequence for 2410022M24Rik (NM_026112.2,1522-1540).
ctttggttacgactcatta

SEQ ID NO: 478726 - DNA, 19 bp, Mus musculus
  siRNA target sequence for 2410022M24Rik (NM_026112.2,1526-1544).
ggttacgactcattactta

SEQ ID NO: 478727 - DNA, 19 bp, Mus musculus
  siRNA target sequence for 2410022M24Rik (NM_026112.2,1531-1549).
cgactcattacttactcaa

SEQ ID NO: 478728 - DNA, 19 bp, Mus musculus
  siRNA target sequence for 2410022M24Rik (NM_026112.2,1680-1698).
gtggaaaagtttttaggaa

SEQ ID NO: 478729 - DNA, 19 bp, Mus musculus
  siRNA target sequence for 2410022M24Rik (NM_026112.2,1867-1885).
gaactcccatcttattgga

SEQ ID NO: 478730 - DNA, 19 bp, Mus musculus
  siRNA target sequence for 2410022M24Rik (NM_026112.2,2201-2219).
gagcgttcagcccttacaa

SEQ ID NO: 478731 - DNA, 19 bp, Mus musculus
  siRNA target sequence for 2410022M24Rik (NM_026112.2,2203-2221).
gcgttcagcccttacaaaa

SEQ ID NO: 478732 - DNA, 19 bp, Mus musculus
  siRNA target sequence for 2410022M24Rik (NM_026112.2,2294-2312).
catcttgttaggcatcaaa

SEQ ID NO: 478733 - DNA, 19 bp, Mus musculus
  siRNA target sequence for 2410022M24Rik (NM_026112.2,2432-2450).
caatgtgaacgatccttta

SEQ ID NO: 478734 - DNA, 19 bp, Mus musculus
  siRNA target sequence for 2410022M24Rik (NM_026112.2,2438-2456).
gaacgatcctttaattgta

SEQ ID NO: 478735 - DNA, 19 bp, Mus musculus
  siRNA target sequence for 2410022M24Rik (NM_026112.2,2544-2562).
cttcccttattgtacactt

SEQ ID NO: 478736 - DNA, 19 bp, Mus musculus
  siRNA target sequence for 2410022M24Rik (NM_026112.2,2658-2676).
gtggcgagaaacgctttat

SEQ ID NO: 478737 - DNA, 19 bp, Mus musculus
  siRNA target sequence for 2410022M24Rik (NM_026112.2,2665-2683).
gaaacgctttatatgcaat

SEQ ID NO: 478738 - DNA, 19 bp, Mus musculus
  siRNA target sequence for 2410104I19Rik (NM_133691.1,374-392).
cgggcactggctatcatgt

SEQ ID NO: 478739 - DNA, 19 bp, Mus musculus
  siRNA target sequence for 2410104I19Rik (NM_133691.1,466-484).
ccccatcaagagcattgat

SEQ ID NO: 478740 - DNA, 19 bp, Mus musculus
  siRNA target sequence for 2410104I19Rik (NM_133691.1,467-485).
cccatcaagagcattgata

SEQ ID NO: 478741 - DNA, 19 bp, Mus musculus
  siRNA target sequence for 2410104I19Rik (NM_133691.1,498-516).
ccgttaccatgaagcataa

SEQ ID NO: 478742 - DNA, 19 bp, Mus musculus
  siRNA target sequence for 2410104I19Rik (NM_133691.1,563-581).
gctttggagcagatgaact

SEQ ID NO: 478743 - DNA, 19 bp, Mus musculus
  siRNA target sequence for 2410104I19Rik (NM_133691.1,639-657).
cccaacccatcatagatca

SEQ ID NO: 478744 - DNA, 19 bp, Mus musculus
  siRNA target sequence for 2410104I19Rik (NM_133691.1,675-693).
gggctttcaaccgaatata

SEQ ID NO: 478745 - DNA, 19 bp, Mus musculus
  siRNA target sequence for 2410104I19Rik (NM_133691.1,676-694).
ggctttcaaccgaatatat

SEQ ID NO: 478746 - DNA, 19 bp, Mus musculus
  siRNA target sequence for 2410104I19Rik (NM_133691.1,755-773).
ggcaagatcaagtcttgta

SEQ ID NO: 478747 - DNA, 19 bp, Mus musculus
  siRNA target sequence for 2410104I19Rik (NM_133691.1,808-826).
gggctatggttttatcgaa

SEQ ID NO: 478748 - DNA, 19 bp, Mus musculus
  siRNA target sequence for 2410104I19Rik (NM_133691.1,809-827).
ggctatggttttatcgaat

SEQ ID NO: 478749 - DNA, 19 bp, Mus musculus
  siRNA target sequence for 2410104I19Rik (NM_133691.1,810-828).
gctatggttttatcgaata

SEQ ID NO: 478750 - DNA, 19 bp, Mus musculus
  siRNA target sequence for 2410104I19Rik (NM_133691.1,811-829).
ctatggttttatcgaatat

SEQ ID NO: 478751 - DNA, 19 bp, Mus musculus
  siRNA target sequence for 2410104I19Rik (NM_133691.1,815-833).
ggttttatcgaatatgaga

SEQ ID NO: 478752 - DNA, 19 bp, Mus musculus
  siRNA target sequence for 2410104I19Rik (NM_133691.1,989-1007).
gcagccacggccaagatta

SEQ ID NO: 478753 - DNA, 19 bp, Mus musculus
  siRNA target sequence for 2410104I19Rik (NM_133691.1,1191-1209).
cctctgtgggagtagtgaa

SEQ ID NO: 478754 - DNA, 19 bp, Mus musculus
  siRNA target sequence for 2410104I19Rik (NM_133691.1,1290-1308).
cagaacggccagagatgtt

SEQ ID NO: 478755 - DNA, 19 bp, Mus musculus
  siRNA target sequence for 2410104I19Rik (NM_133691.1,1349-1367).
cgccacatggtcatgcaaa

SEQ ID NO: 478756 - DNA, 19 bp, Mus musculus
  siRNA target sequence for 2410104I19Rik (NM_133691.1,1350-1368).
gccacatggtcatgcaaaa

SEQ ID NO: 478757 - DNA, 19 bp, Mus musculus
  siRNA target sequence for 2410104I19Rik (NM_133691.1,1354-1372).
catggtcatgcaaaagcta

SEQ ID NO: 478758 - DNA, 19 bp, Mus musculus
  siRNA target sequence for 2410104I19Rik (NM_133691.1,1481-1499).
gctgtgaaccgggtcatta

SEQ ID NO: 478759 - DNA, 19 bp, Mus musculus
  siRNA target sequence for 2410104I19Rik (NM_133691.1,1482-1500).
ctgtgaaccgggtcattat

SEQ ID NO: 478760 - DNA, 19 bp, Mus musculus
  siRNA target sequence for 2410104I19Rik (NM_133691.1,1484-1502).
gtgaaccgggtcattatct

SEQ ID NO: 478761 - DNA, 19 bp, Mus musculus
  siRNA target sequence for 2410104I19Rik (NM_133691.1,1486-1504).
gaaccgggtcattatctat

SEQ ID NO: 478762 - DNA, 19 bp, Mus musculus
  siRNA target sequence for 2410104I19Rik (NM_133691.1,1649-1667).
gaccaggagcgttttgata

SEQ ID NO: 478763 - DNA, 19 bp, Mus musculus
  siRNA target sequence for 2410104I19Rik (NM_133691.1,1652-1670).
caggagcgttttgataaca

SEQ ID NO: 478764 - DNA, 19 bp, Mus musculus
  siRNA target sequence for 2410141K03Rik (NM_026479.2,59-77).
gccaataagcaacatgtaa

SEQ ID NO: 478765 - DNA, 19 bp, Mus musculus
  siRNA target sequence for 2410141K03Rik (NM_026479.2,198-216).
gattattgctgcaaagcat

SEQ ID NO: 478766 - DNA, 19 bp, Mus musculus
  siRNA target sequence for 2410141K03Rik (NM_026479.2,225-243).
ccaacatagagaaaaagat

SEQ ID NO: 478767 - DNA, 19 bp, Mus musculus
  siRNA target sequence for 2600016B03Rik (NM_026453.1,50-68).
cagtcggacgacgtaatct

SEQ ID NO: 478768 - DNA, 19 bp, Mus musculus
  siRNA target sequence for 2600016B03Rik (NM_026453.1,56-74).
gacgacgtaatctggaata

SEQ ID NO: 478769 - DNA, 19 bp, Mus musculus
  siRNA target sequence for 2600016B03Rik (NM_026453.1,58-76).
cgacgtaatctggaataca

SEQ ID NO: 478770 - DNA, 19 bp, Mus musculus
  siRNA target sequence for 2600016B03Rik (NM_026453.1,61-79).
cgtaatctggaatacacta

SEQ ID NO: 478771 - DNA, 19 bp, Mus musculus
  siRNA target sequence for 2600016B03Rik (NM_026453.1,69-87).
ggaatacactaggaaacaa

SEQ ID NO: 478772 - DNA, 19 bp, Mus musculus
  siRNA target sequence for 2600016B03Rik (NM_026453.1,88-106).
gcagttttgttctttcaaa

SEQ ID NO: 478773 - DNA, 19 bp, Mus musculus
  siRNA target sequence for 2600016B03Rik (NM_026453.1,177-195).
gtcctctggcaaatagtca

SEQ ID NO: 478774 - DNA, 19 bp, Mus musculus
  siRNA target sequence for 2600016B03Rik (NM_026453.1,185-203).
gcaaatagtcagtatgcta

SEQ ID NO: 478775 - DNA, 19 bp, Mus musculus
  siRNA target sequence for 2600016B03Rik (NM_026453.1,192-210).
gtcagtatgctaccattaa

SEQ ID NO: 478776 - DNA, 19 bp, Mus musculus
  siRNA target sequence for 2600016B03Rik (NM_026453.1,201-219).
ctaccattaaagaagagaa

SEQ ID NO: 478777 - DNA, 19 bp, Mus musculus
  siRNA target sequence for 2600016B03Rik (NM_026453.1,232-250).
cctgtacatgaaggttata

SEQ ID NO: 478778 - DNA, 19 bp, Mus musculus
  siRNA target sequence for 2600016B03Rik (NM_026453.1,281-299).
gaacgggtccggcttagta

SEQ ID NO: 478779 - DNA, 19 bp, Mus musculus
  siRNA target sequence for 2600016B03Rik (NM_026453.1,284-302).
cgggtccggcttagtaaaa

SEQ ID NO: 478780 - DNA, 19 bp, Mus musculus
  siRNA target sequence for 2600016B03Rik (NM_026453.1,285-303).
gggtccggcttagtaaaaa

SEQ ID NO: 478781 - DNA, 19 bp, Mus musculus
  siRNA target sequence for 2600016B03Rik (NM_026453.1,287-305).
gtccggcttagtaaaaact

SEQ ID NO: 478782 - DNA, 19 bp, Mus musculus
  siRNA target sequence for 2600016B03Rik (NM_026453.1,289-307).
ccggcttagtaaaaactat

SEQ ID NO: 478783 - DNA, 19 bp, Mus musculus
  siRNA target sequence for 2600016B03Rik (NM_026453.1,291-309).
ggcttagtaaaaactatga

SEQ ID NO: 478784 - DNA, 19 bp, Mus musculus
  siRNA target sequence for 2600016B03Rik (NM_026453.1,292-310).
gcttagtaaaaactatgaa

SEQ ID NO: 478785 - DNA, 19 bp, Mus musculus
  siRNA target sequence for 2600016B03Rik (NM_026453.1,352-370).
ccgctttatcagacacaaa

SEQ ID NO: 478786 - DNA, 19 bp, Mus musculus
  siRNA target sequence for 2600016B03Rik (NM_026453.1,372-390).
gtaagcagaggtttaccaa

SEQ ID NO: 478787 - DNA, 19 bp, Mus musculus
  siRNA target sequence for 2600016B03Rik (NM_026453.1,396-414).
cccagtacctgattcgaat

SEQ ID NO: 478788 - DNA, 19 bp, Mus musculus
  siRNA target sequence for 2600016B03Rik (NM_026453.1,400-418).
gtacctgattcgaatcaga

SEQ ID NO: 478789 - DNA, 19 bp, Mus musculus
  siRNA target sequence for 2600016B03Rik (NM_026453.1,466-484).
ggttgaacgaagggaaaaa

SEQ ID NO: 478790 - DNA, 19 bp, Mus musculus
  siRNA target sequence for 2600016B03Rik (NM_026453.1,470-488).
gaacgaagggaaaaacgaa

SEQ ID NO: 478791 - DNA, 19 bp, Mus musculus
  siRNA target sequence for 2600016B03Rik (NM_026453.1,493-511).
ggaaaaagcattaatagct

SEQ ID NO: 478792 - DNA, 19 bp, Mus musculus
  siRNA target sequence for 2600016B03Rik (NM_026453.1,567-585).
cgtatggcgacatctacaa

SEQ ID NO: 478793 - DNA, 19 bp, Mus musculus
  siRNA target sequence for 2600016B03Rik (NM_026453.1,604-622).
cgacaaggccctagagaaa

SEQ ID NO: 478794 - DNA, 19 bp, Mus musculus
  siRNA target sequence for 2600016B03Rik (NM_026453.1,875-893).
gcctatgtggaaatagagt

SEQ ID NO: 478795 - DNA, 19 bp, Mus musculus
  siRNA target sequence for 2600016B03Rik (NM_026453.1,876-894).
cctatgtggaaatagagta

SEQ ID NO: 478796 - DNA, 19 bp, Mus musculus
  siRNA target sequence for 2600016B03Rik (NM_026453.1,908-926).
gagcccatggccaaagtca

SEQ ID NO: 478797 - DNA, 19 bp, Mus musculus
  siRNA target sequence for 2600017A12Rik (NM_028242.1,237-255).
gcgggaacgatgagtttga

SEQ ID NO: 478798 - DNA, 19 bp, Mus musculus
  siRNA target sequence for 2600017A12Rik (NM_028242.1,260-278).
caattgcgaatgcaagaat

SEQ ID NO: 478799 - DNA, 19 bp, Mus musculus
  siRNA target sequence for 2600017A12Rik (NM_028242.1,324-342).
ctggagaagcccattcttt

SEQ ID NO: 478800 - DNA, 19 bp, Mus musculus
  siRNA target sequence for 2600017A12Rik (NM_028242.1,392-410).
gcttggttccctaagatca

SEQ ID NO: 478801 - DNA, 19 bp, Mus musculus
  siRNA target sequence for 2600017A12Rik (NM_028242.1,401-419).
cctaagatcaccgaagatt

SEQ ID NO: 478802 - DNA, 19 bp, Mus musculus
  siRNA target sequence for 2600017A12Rik (NM_028242.1,406-424).
gatcaccgaagatttcatt

SEQ ID NO: 478803 - DNA, 19 bp, Mus musculus
  siRNA target sequence for 2600017A12Rik (NM_028242.1,426-444).
ctacgtatcaggctaacta

SEQ ID NO: 478804 - DNA, 19 bp, Mus musculus
  siRNA target sequence for 2600017A12Rik (NM_028242.1,436-454).
ggctaactacggcttttct

SEQ ID NO: 478805 - DNA, 19 bp, Mus musculus
  siRNA target sequence for 2600017A12Rik (NM_028242.1,442-460).
ctacggcttttctagtgat

SEQ ID NO: 478806 - DNA, 19 bp, Mus musculus
  siRNA target sequence for 2600017A12Rik (NM_028242.1,496-514).
caacactaaggctgtagaa

SEQ ID NO: 478807 - DNA, 19 bp, Mus musculus
  siRNA target sequence for 2600017A12Rik (NM_028242.1,585-603).
ctggatggttccatgttga

SEQ ID NO: 478808 - DNA, 19 bp, Mus musculus
  siRNA target sequence for 2600017A12Rik (NM_028242.1,719-737).
gagtttaaagttaaactgt

SEQ ID NO: 478809 - DNA, 19 bp, Mus musculus
  siRNA target sequence for 2600017A12Rik (NM_028242.1,833-851).
gaaattagaggctacaaat

SEQ ID NO: 478810 - DNA, 19 bp, Mus musculus
  siRNA target sequence for 2600017A12Rik (NM_028242.1,877-895).
gctcaagggtgaatacgat

SEQ ID NO: 478811 - DNA, 19 bp, Mus musculus
  siRNA target sequence for 2600017A12Rik (NM_028242.1,1007-1025).
gagcgagttgtcattctca

SEQ ID NO: 478812 - DNA, 19 bp, Mus musculus
  siRNA target sequence for 2600017A12Rik (NM_028242.1,1009-1027).
gcgagttgtcattctcaaa

SEQ ID NO: 478813 - DNA, 19 bp, Mus musculus
  siRNA target sequence for 2600017A12Rik (NM_028242.1,1013-1031).
gttgtcattctcaaaaata

SEQ ID NO: 478814 - DNA, 19 bp, Mus musculus
  siRNA target sequence for 2600017A12Rik (NM_028242.1,1088-1106).
gatctgcgagtagaatgtt

SEQ ID NO: 478815 - DNA, 19 bp, Mus musculus
  siRNA target sequence for 2600017A12Rik (NM_028242.1,1260-1278).
gggatgggactacagatta

SEQ ID NO: 478816 - DNA, 19 bp, Mus musculus
  siRNA target sequence for 2600017A12Rik (NM_028242.1,1430-1448).
gagcacccaagtatgtcta

SEQ ID NO: 478817 - DNA, 19 bp, Mus musculus
  siRNA target sequence for 2600017A12Rik (NM_028242.1,1432-1450).
gcacccaagtatgtctaat

SEQ ID NO: 478818 - DNA, 19 bp, Mus musculus
  siRNA target sequence for 2600017A12Rik (NM_028242.1,1433-1451).
cacccaagtatgtctaata

SEQ ID NO: 478819 - DNA, 19 bp, Mus musculus
  siRNA target sequence for 2600017A12Rik (NM_028242.1,1436-1454).
ccaagtatgtctaatatga

SEQ ID NO: 478820 - DNA, 19 bp, Mus musculus
  siRNA target sequence for 2600017A12Rik (NM_028242.1,1487-1505).
gaagaaactatcgatgaaa

SEQ ID NO: 478821 - DNA, 19 bp, Mus musculus
  siRNA target sequence for 2600017A12Rik (NM_028242.1,1490-1508).
gaaactatcgatgaaaata

SEQ ID NO: 478822 - DNA, 19 bp, Mus musculus
  siRNA target sequence for 2600017A12Rik (NM_028242.1,1494-1512).
ctatcgatgaaaataagtt

SEQ ID NO: 478823 - DNA, 19 bp, Mus musculus
  siRNA target sequence for 2600017A12Rik (NM_028242.1,1541-1559).
gaaggagatgcttctgaaa

SEQ ID NO: 478824 - DNA, 19 bp, Mus musculus
  siRNA target sequence for 2600017A12Rik (NM_028242.1,1620-1638).
gctccaagaaagagaatga

SEQ ID NO: 478825 - DNA, 19 bp, Mus musculus
  siRNA target sequence for 2600017A12Rik (NM_028242.1,1666-1684).
gcctgaggagggtaatcct

SEQ ID NO: 478826 - DNA, 19 bp, Mus musculus
  siRNA target sequence for 2600017A12Rik (NM_028242.1,1954-1972).
caaggagttcccagaagat

SEQ ID NO: 478827 - DNA, 19 bp, Mus musculus
  siRNA target sequence for 2600017A12Rik (NM_028242.1,2122-2140).
cgtatatgaaagggttttt

SEQ ID NO: 478828 - DNA, 19 bp, Mus musculus
  siRNA target sequence for 2600017A12Rik (NM_028242.1,2219-2237).
gacaatgatatagatgaaa

SEQ ID NO: 478829 - DNA, 19 bp, Mus musculus
  siRNA target sequence for 2600017A12Rik (NM_028242.1,2305-2323).
cagtgacaaggtattcgaa

SEQ ID NO: 478830 - DNA, 19 bp, Mus musculus
  siRNA target sequence for 2600017A12Rik (NM_028242.1,2315-2333).
gtattcgaagacaattcca

SEQ ID NO: 478831 - DNA, 19 bp, Mus musculus
  siRNA target sequence for 2600017A12Rik (NM_028242.1,2321-2339).
gaagacaattccaatgaga

SEQ ID NO: 478832 - DNA, 19 bp, Mus musculus
  siRNA target sequence for 2600017A12Rik (NM_028242.1,2449-2467).
ctttgccctcagtagtagt

SEQ ID NO: 478833 - DNA, 19 bp, Mus musculus
  siRNA target sequence for 2610015J01Rik (NM_027349.1,195-213).
ggccctactactacagttt

SEQ ID NO: 478834 - DNA, 19 bp, Mus musculus
  siRNA target sequence for 2610015J01Rik (NM_027349.1,196-214).
gccctactactacagtttt

SEQ ID NO: 478835 - DNA, 19 bp, Mus musculus
  siRNA target sequence for 2610015J01Rik (NM_027349.1,197-215).
ccctactactacagttttt

SEQ ID NO: 478836 - DNA, 19 bp, Mus musculus
  siRNA target sequence for 2610015J01Rik (NM_027349.1,255-273).
cgacagctcttagctaaat

SEQ ID NO: 478837 - DNA, 19 bp, Mus musculus
  siRNA target sequence for 2610015J01Rik (NM_027349.1,313-331).
ctgggaaacttcaagcttt

SEQ ID NO: 478838 - DNA, 19 bp, Mus musculus
  siRNA target sequence for 2610015J01Rik (NM_027349.1,321-339).
cttcaagcttttggatttt

SEQ ID NO: 478839 - DNA, 19 bp, Mus musculus
  siRNA target sequence for 2610015J01Rik (NM_027349.1,344-362).
gtataaagagcctgaatct

SEQ ID NO: 478840 - DNA, 19 bp, Mus musculus
  siRNA target sequence for 2610015J01Rik (NM_027349.1,364-382).
ccctccgtgctctcagatt

SEQ ID NO: 478841 - DNA, 19 bp, Mus musculus
  siRNA target sequence for 2610015J01Rik (NM_027349.1,365-383).
cctccgtgctctcagatta

SEQ ID NO: 478842 - DNA, 19 bp, Mus musculus
  siRNA target sequence for 2610015J01Rik (NM_027349.1,366-384).
ctccgtgctctcagattat

SEQ ID NO: 478843 - DNA, 19 bp, Mus musculus
  siRNA target sequence for 2610015J01Rik (NM_027349.1,370-388).
gtgctctcagattattgca

SEQ ID NO: 478844 - DNA, 19 bp, Mus musculus
  siRNA target sequence for 2610015J01Rik (NM_027349.1,410-428).
gaagctacttgttaaagtt

SEQ ID NO: 478845 - DNA, 19 bp, Mus musculus
  siRNA target sequence for 2610015J01Rik (NM_027349.1,445-463).
cacagttggatgaatggaa

SEQ ID NO: 478846 - DNA, 19 bp, Mus musculus
  siRNA target sequence for 2610015J01Rik (NM_027349.1,485-503).
gaacgccagaccagaaact

SEQ ID NO: 478847 - DNA, 19 bp, Mus musculus
  siRNA target sequence for 2610015J01Rik (NM_027349.1,493-511).
gaccagaaactgtcactaa

SEQ ID NO: 478848 - DNA, 19 bp, Mus musculus
  siRNA target sequence for 2610015J01Rik (NM_027349.1,546-564).
cgaagagaccagatgatta

SEQ ID NO: 478849 - DNA, 19 bp, Mus musculus
  siRNA target sequence for 2610015J01Rik (NM_027349.1,560-578).
gattaaaggggccattgaa

SEQ ID NO: 478850 - DNA, 19 bp, Mus musculus
  siRNA target sequence for 2610015J01Rik (NM_027349.1,567-585).
ggggccattgaagttttaa

SEQ ID NO: 478851 - DNA, 19 bp, Mus musculus
  siRNA target sequence for 2610015J01Rik (NM_027349.1,568-586).
gggccattgaagttttaat

SEQ ID NO: 478852 - DNA, 19 bp, Mus musculus
  siRNA target sequence for 2610015J01Rik (NM_027349.1,668-686).
ggacattttccgtagattt

SEQ ID NO: 478853 - DNA, 19 bp, Mus musculus
  siRNA target sequence for 2610015J01Rik (NM_027349.1,671-689).
cattttccgtagatttcca

SEQ ID NO: 478854 - DNA, 19 bp, Mus musculus
  siRNA target sequence for 2610015J01Rik (NM_027349.1,725-743).
ggaggatataaatgctatt

SEQ ID NO: 478855 - DNA, 19 bp, Mus musculus
  siRNA target sequence for 2610015J01Rik (NM_027349.1,728-746).
ggatataaatgctattgaa

SEQ ID NO: 478856 - DNA, 19 bp, Mus musculus
  siRNA target sequence for 2610015J01Rik (NM_027349.1,777-795).
cgagagatcagcaaattca

SEQ ID NO: 478857 - DNA, 19 bp, Mus musculus
  siRNA target sequence for 2610015J01Rik (NM_027349.1,798-816).
gatacacacaaggtagtat

SEQ ID NO: 478858 - DNA, 19 bp, Mus musculus
  siRNA target sequence for 2610015J01Rik (NM_027349.1,804-822).
cacaaggtagtattcttga

SEQ ID NO: 478859 - DNA, 19 bp, Mus musculus
  siRNA target sequence for 2610019N13Rik (NM_026989.1,143-161).
gcgaacataagtactttca

SEQ ID NO: 478860 - DNA, 19 bp, Mus musculus
  siRNA target sequence for 2610019N13Rik (NM_026989.1,144-162).
cgaacataagtactttcaa

SEQ ID NO: 478861 - DNA, 19 bp, Mus musculus
  siRNA target sequence for 2610019N13Rik (NM_026989.1,238-256).
ctcatgcaaggatgtttct

SEQ ID NO: 478862 - DNA, 19 bp, Mus musculus
  siRNA target sequence for 2610019N13Rik (NM_026989.1,240-258).
catgcaaggatgtttctct

SEQ ID NO: 478863 - DNA, 19 bp, Mus musculus
  siRNA target sequence for 2610019N13Rik (NM_026989.1,399-417).
gggagctccagctcttgat

SEQ ID NO: 478864 - DNA, 19 bp, Mus musculus
  siRNA target sequence for 2610019N13Rik (NM_026989.1,473-491).
ctgcagaccagctattgaa

SEQ ID NO: 478865 - DNA, 19 bp, Mus musculus
  siRNA target sequence for 2610019N13Rik (NM_026989.1,481-499).
cagctattgaaacttatga

SEQ ID NO: 478866 - DNA, 19 bp, Mus musculus
  siRNA target sequence for 2610019N13Rik (NM_026989.1,560-578).
cagacacctctagtaaaga

SEQ ID NO: 478867 - DNA, 19 bp, Mus musculus
  siRNA target sequence for 2610019N13Rik (NM_026989.1,632-650).
ctattgagccagacaagaa

SEQ ID NO: 478868 - DNA, 19 bp, Mus musculus
  siRNA target sequence for 2610019N13Rik (NM_026989.1,751-769).
cggtcacactccaaatcca

SEQ ID NO: 478869 - DNA, 19 bp, Mus musculus
  siRNA target sequence for 2610019N13Rik (NM_026989.1,977-995).
gtacaagatcccctaaaaa

SEQ ID NO: 478870 - DNA, 19 bp, Mus musculus
  siRNA target sequence for 2610019N13Rik (NM_026989.1,1034-1052).
ccccaaggagacataaaaa

SEQ ID NO: 478871 - DNA, 19 bp, Mus musculus
  siRNA target sequence for 2610019N13Rik (NM_026989.1,1093-1111).
gaaagggaacgatcaacaa

SEQ ID NO: 478872 - DNA, 19 bp, Mus musculus
  siRNA target sequence for 2610019N13Rik (NM_026989.1,1102-1120).
cgatcaacaagtaaaaaga

SEQ ID NO: 478873 - DNA, 19 bp, Mus musculus
  siRNA target sequence for 2610019N13Rik (NM_026989.1,1103-1121).
gatcaacaagtaaaaagaa

SEQ ID NO: 478874 - DNA, 19 bp, Mus musculus
  siRNA target sequence for 2610019N13Rik (NM_026989.1,1185-1203).
ggtgactcgggattatgat

SEQ ID NO: 478875 - DNA, 19 bp, Mus musculus
  siRNA target sequence for 2610019N13Rik (NM_026989.1,1188-1206).
gactcgggattatgatgaa

SEQ ID NO: 478876 - DNA, 19 bp, Mus musculus
  siRNA target sequence for 2610019N13Rik (NM_026989.1,1190-1208).
ctcgggattatgatgaaga

SEQ ID NO: 478877 - DNA, 19 bp, Mus musculus
  siRNA target sequence for 2610019N13Rik (NM_026989.1,1207-1225).
gaggagcaaggctatgaca

SEQ ID NO: 478878 - DNA, 19 bp, Mus musculus
  siRNA target sequence for 2610019N13Rik (NM_026989.1,1261-1279).
gaagcagtgtcccctaaaa

SEQ ID NO: 478879 - DNA, 19 bp, Mus musculus
  siRNA target sequence for 2610019N13Rik (NM_026989.1,1264-1282).
gcagtgtcccctaaaacaa

SEQ ID NO: 478880 - DNA, 19 bp, Mus musculus
  siRNA target sequence for 2610019N13Rik (NM_026989.1,1315-1333).
cttcgagagtccaaagtga

SEQ ID NO: 478881 - DNA, 19 bp, Mus musculus
  siRNA target sequence for 2610019N13Rik (NM_026989.1,1348-1366).
cacgaagaagacatggata

SEQ ID NO: 478882 - DNA, 19 bp, Mus musculus
  siRNA target sequence for 2610020C11Rik (NM_028130.2,255-273).
gcactgcgtgactaaacct

SEQ ID NO: 478883 - DNA, 19 bp, Mus musculus
  siRNA target sequence for 2610020C11Rik (NM_028130.2,336-354).
gcgtctcccaggtgttctt

SEQ ID NO: 478884 - DNA, 19 bp, Mus musculus
  siRNA target sequence for 2610020C11Rik (NM_028130.2,375-393).
gagttgcctggaaaatgca

SEQ ID NO: 478885 - DNA, 19 bp, Mus musculus
  siRNA target sequence for 2610020C11Rik (NM_028130.2,412-430).
gtgggaagcatcaacagaa

SEQ ID NO: 478886 - DNA, 19 bp, Mus musculus
  siRNA target sequence for 2610020C11Rik (NM_028130.2,490-508).
ggtacaaaaccctatgagt

SEQ ID NO: 478887 - DNA, 19 bp, Mus musculus
  siRNA target sequence for 2610020C11Rik (NM_028130.2,505-523).
gagtgtaaaccgtgtatga

SEQ ID NO: 478888 - DNA, 19 bp, Mus musculus
  siRNA target sequence for 2610020C11Rik (NM_028130.2,509-527).
gtaaaccgtgtatgaaaat

SEQ ID NO: 478889 - DNA, 19 bp, Mus musculus
  siRNA target sequence for 2610020C11Rik (NM_028130.2,552-570).
caagcagcatgcatactat

SEQ ID NO: 478890 - DNA, 19 bp, Mus musculus
  siRNA target sequence for 2610020C11Rik (NM_028130.2,556-574).
cagcatgcatactatccaa

SEQ ID NO: 478891 - DNA, 19 bp, Mus musculus
  siRNA target sequence for 2610020C11Rik (NM_028130.2,642-660).
ccagagagctcgtacaaga

SEQ ID NO: 478892 - DNA, 19 bp, Mus musculus
  siRNA target sequence for 2610020C11Rik (NM_028130.2,647-665).
gagctcgtacaagattgaa

SEQ ID NO: 478893 - DNA, 19 bp, Mus musculus
  siRNA target sequence for 2610020C11Rik (NM_028130.2,650-668).
ctcgtacaagattgaagat

SEQ ID NO: 478894 - DNA, 19 bp, Mus musculus
  siRNA target sequence for 2610020C11Rik (NM_028130.2,652-670).
cgtacaagattgaagatct

SEQ ID NO: 478895 - DNA, 19 bp, Mus musculus
  siRNA target sequence for 2610020C11Rik (NM_028130.2,653-671).
gtacaagattgaagatcta

SEQ ID NO: 478896 - DNA, 19 bp, Mus musculus
  siRNA target sequence for 2610020C11Rik (NM_028130.2,656-674).
caagattgaagatctatca

SEQ ID NO: 478897 - DNA, 19 bp, Mus musculus
  siRNA target sequence for 2610020C11Rik (NM_028130.2,666-684).
gatctatcagtgtacagaa

SEQ ID NO: 478898 - DNA, 19 bp, Mus musculus
  siRNA target sequence for 2610020C11Rik (NM_028130.2,1130-1148).
caacccttcgtgtacatca

SEQ ID NO: 478899 - DNA, 19 bp, Mus musculus
  siRNA target sequence for 2610020C11Rik (NM_028130.2,1133-1151).
cccttcgtgtacatcaaaa

SEQ ID NO: 478900 - DNA, 19 bp, Mus musculus
  siRNA target sequence for 2610020C11Rik (NM_028130.2,1350-1368).
cgaagagtgcagaaaagct

SEQ ID NO: 478901 - DNA, 19 bp, Mus musculus
  siRNA target sequence for 2610020C11Rik (NM_028130.2,1455-1473).
ctatcgcaagtcacactta

SEQ ID NO: 478902 - DNA, 19 bp, Mus musculus
  siRNA target sequence for 2610020C11Rik (NM_028130.2,1460-1478).
gcaagtcacacttaactct

SEQ ID NO: 478903 - DNA, 19 bp, Mus musculus
  siRNA target sequence for 2610020C11Rik (NM_028130.2,1461-1479).
caagtcacacttaactctt

SEQ ID NO: 478904 - DNA, 19 bp, Mus musculus
  siRNA target sequence for 2610020C11Rik (NM_028130.2,1632-1650).
ctcagtcaatatcagaaat

SEQ ID NO: 478905 - DNA, 19 bp, Mus musculus
  siRNA target sequence for 2610020C11Rik (NM_028130.2,1636-1654).
gtcaatatcagaaatgata

SEQ ID NO: 478906 - DNA, 19 bp, Mus musculus
  siRNA target sequence for 2610020C11Rik (NM_028130.2,1668-1686).
ccctgtggctctaaataat

SEQ ID NO: 478907 - DNA, 19 bp, Mus musculus
  siRNA target sequence for 2610020C11Rik (NM_028130.2,1696-1714).
ctctctactataaatcact

SEQ ID NO: 478908 - DNA, 19 bp, Mus musculus
  siRNA target sequence for 2610020C11Rik (NM_028130.2,1711-1729).
cactcctcagttcatatga

SEQ ID NO: 478909 - DNA, 19 bp, Mus musculus
  siRNA target sequence for 2610020C11Rik (NM_028130.2,1751-1769).
gtcctatagatgtacataa

SEQ ID NO: 478910 - DNA, 19 bp, Mus musculus
  siRNA target sequence for 2610020C11Rik (NM_028130.2,1802-1820).
cattcaatgtgaatgaact

SEQ ID NO: 478911 - DNA, 19 bp, Mus musculus
  siRNA target sequence for 2610028A01Rik (NM_028228.1,122-140).
caccgcgtggagtaacgat

SEQ ID NO: 478912 - DNA, 19 bp, Mus musculus
  siRNA target sequence for 2610028A01Rik (NM_028228.1,126-144).
gcgtggagtaacgatgatt

SEQ ID NO: 478913 - DNA, 19 bp, Mus musculus
  siRNA target sequence for 2610028A01Rik (NM_028228.1,130-148).
ggagtaacgatgattccaa

SEQ ID NO: 478914 - DNA, 19 bp, Mus musculus
  siRNA target sequence for 2610028A01Rik (NM_028228.1,173-191).
gatggggtggtctaaagga

SEQ ID NO: 478915 - DNA, 19 bp, Mus musculus
  siRNA target sequence for 2610028A01Rik (NM_028228.1,221-239).
cacagaacatattaaagtt

SEQ ID NO: 478916 - DNA, 19 bp, Mus musculus
  siRNA target sequence for 2610028A01Rik (NM_028228.1,223-241).
cagaacatattaaagttaa

SEQ ID NO: 478917 - DNA, 19 bp, Mus musculus
  siRNA target sequence for 2610028A01Rik (NM_028228.1,264-282).
cttggagctacaaacaata

SEQ ID NO: 478918 - DNA, 19 bp, Mus musculus
  siRNA target sequence for 2610028A01Rik (NM_028228.1,271-289).
ctacaaacaataatgaaga

SEQ ID NO: 478919 - DNA, 19 bp, Mus musculus
  siRNA target sequence for 2610028A01Rik (NM_028228.1,424-442).
ccaaaaaccgggttcatta

SEQ ID NO: 478920 - DNA, 19 bp, Mus musculus
  siRNA target sequence for 2610028A01Rik (NM_028228.1,432-450).
cgggttcattatatgaaat

SEQ ID NO: 478921 - DNA, 19 bp, Mus musculus
  siRNA target sequence for 2610028A01Rik (NM_028228.1,468-486).
ctgtcctctcggagtgaaa

SEQ ID NO: 478922 - DNA, 19 bp, Mus musculus
  siRNA target sequence for 2610028A01Rik (NM_028228.1,487-505).
ccgacctggactgcatttt

SEQ ID NO: 478923 - DNA, 19 bp, Mus musculus
  siRNA target sequence for 2610028A01Rik (NM_028228.1,494-512).
ggactgcatttttggaaaa

SEQ ID NO: 478924 - DNA, 19 bp, Mus musculus
  siRNA target sequence for 2610028A01Rik (NM_028228.1,611-629).
caccatccaggaatatttt

SEQ ID NO: 478925 - DNA, 19 bp, Mus musculus
  siRNA target sequence for 2610028A01Rik (NM_028228.1,676-694).
cagggtctgacctttcaga

SEQ ID NO: 478926 - DNA, 19 bp, Mus musculus
  siRNA target sequence for 2610028A01Rik (NM_028228.1,1020-1038).
gacagagcaccggtgaaaa

SEQ ID NO: 478927 - DNA, 19 bp, Mus musculus
  siRNA target sequence for 2610029K21Rik (NM_025663.2,264-282).
gagccgtgggatgaagttt

SEQ ID NO: 478928 - DNA, 19 bp, Mus musculus
  siRNA target sequence for 2610029K21Rik (NM_025663.2,486-504).
ggatggagtgcagataaga

SEQ ID NO: 478929 - DNA, 19 bp, Mus musculus
  siRNA target sequence for 2610029K21Rik (NM_025663.2,618-636).
ggggaactgcagtgatgtt

SEQ ID NO: 478930 - DNA, 19 bp, Mus musculus
  siRNA target sequence for 2610041B18Rik (NM_027264.1,170-188).
gactcttgagggatttgga

SEQ ID NO: 478931 - DNA, 19 bp, Mus musculus
  siRNA target sequence for 2610041B18Rik (NM_027264.1,229-247).
ccatggctgcagatccaaa

SEQ ID NO: 478932 - DNA, 19 bp, Mus musculus
  siRNA target sequence for 2610041B18Rik (NM_027264.1,235-253).
ctgcagatccaaatttcca

SEQ ID NO: 478933 - DNA, 19 bp, Mus musculus
  siRNA target sequence for 2610041B18Rik (NM_027264.1,522-540).
caaggggagagaccttata

SEQ ID NO: 478934 - DNA, 19 bp, Mus musculus
  siRNA target sequence for 2610041B18Rik (NM_027264.1,655-673).
gcagcatgtgtgataatat

SEQ ID NO: 478935 - DNA, 19 bp, Mus musculus
  siRNA target sequence for 2610041B18Rik (NM_027264.1,656-674).
cagcatgtgtgataatatt

SEQ ID NO: 478936 - DNA, 19 bp, Mus musculus
  siRNA target sequence for 2610041B18Rik (NM_027264.1,679-697).
ccaacaattcggtcatatt

SEQ ID NO: 478937 - DNA, 19 bp, Mus musculus
  siRNA target sequence for 2610041B18Rik (NM_027264.1,680-698).
caacaattcggtcatattt

SEQ ID NO: 478938 - DNA, 19 bp, Mus musculus
  siRNA target sequence for 2610041B18Rik (NM_027264.1,683-701).
caattcggtcatattttta

SEQ ID NO: 478939 - DNA, 19 bp, Mus musculus
  siRNA target sequence for 2610510L01Rik (NM_026015.1,209-227).
ccatcttgctggatgaaca

SEQ ID NO: 478940 - DNA, 19 bp, Mus musculus
  siRNA target sequence for 2610510L01Rik (NM_026015.1,277-295).
ggctccaactgcaggtttt

SEQ ID NO: 478941 - DNA, 19 bp, Mus musculus
  siRNA target sequence for 2610528A15Rik (NM_028151.1,157-175).
gactggataccaaattaca

SEQ ID NO: 478942 - DNA, 19 bp, Mus musculus
  siRNA target sequence for 2610528A15Rik (NM_028151.1,187-205).
ccagtggggggaaaaacaa

SEQ ID NO: 478943 - DNA, 19 bp, Mus musculus
  siRNA target sequence for 2610528A15Rik (NM_028151.1,203-221).
caaaagagatctagatgtt

SEQ ID NO: 478944 - DNA, 19 bp, Mus musculus
  siRNA target sequence for 2610528A15Rik (NM_028151.1,247-265).
gcaagaagccgagaataga

SEQ ID NO: 478945 - DNA, 19 bp, Mus musculus
  siRNA target sequence for 2610528A15Rik (NM_028151.1,256-274).
cgagaatagaagactcaat

SEQ ID NO: 478946 - DNA, 19 bp, Mus musculus
  siRNA target sequence for 2610528A15Rik (NM_028151.1,269-287).
ctcaattaatgaagattta

SEQ ID NO: 478947 - DNA, 19 bp, Mus musculus
  siRNA target sequence for 2610528A15Rik (NM_028151.1,366-384).
cctgcagatgaggattata

SEQ ID NO: 478948 - DNA, 19 bp, Mus musculus
  siRNA target sequence for 2610528A15Rik (NM_028151.1,367-385).
ctgcagatgaggattatat

SEQ ID NO: 478949 - DNA, 19 bp, Mus musculus
  siRNA target sequence for 2610528A15Rik (NM_028151.1,377-395).
ggattatataccacttaaa

SEQ ID NO: 478950 - DNA, 19 bp, Mus musculus
  siRNA target sequence for 2610528A15Rik (NM_028151.1,415-433).
caaaggaatacccattcat

SEQ ID NO: 478951 - DNA, 19 bp, Mus musculus
  siRNA target sequence for 2610528A15Rik (NM_028151.1,419-437).
ggaatacccattcattctt

SEQ ID NO: 478952 - DNA, 19 bp, Mus musculus
  siRNA target sequence for 2610528A15Rik (NM_028151.1,456-474).
gccattcagtgtgttgata

SEQ ID NO: 478953 - DNA, 19 bp, Mus musculus
  siRNA target sequence for 2610528A15Rik (NM_028151.1,479-497).
ccagtctgtgctagtatct

SEQ ID NO: 478954 - DNA, 19 bp, Mus musculus
  siRNA target sequence for 2610528A15Rik (NM_028151.1,522-540).
gtgtgtgccgagtatgcta

SEQ ID NO: 478955 - DNA, 19 bp, Mus musculus
  siRNA target sequence for 2610528A15Rik (NM_028151.1,524-542).
gtgtgccgagtatgctatt

SEQ ID NO: 478956 - DNA, 19 bp, Mus musculus
  siRNA target sequence for 2610528A15Rik (NM_028151.1,528-546).
gccgagtatgctattgcat

SEQ ID NO: 478957 - DNA, 19 bp, Mus musculus
  siRNA target sequence for 2610528A15Rik (NM_028151.1,529-547).
ccgagtatgctattgcatt

SEQ ID NO: 478958 - DNA, 19 bp, Mus musculus
  siRNA target sequence for 2610528A15Rik (NM_028151.1,558-576).
gaaaaacagcgtgtaatat

SEQ ID NO: 478959 - DNA, 19 bp, Mus musculus
  siRNA target sequence for 2610528A15Rik (NM_028151.1,586-604).
ctattaaggctctaagtaa

SEQ ID NO: 478960 - DNA, 19 bp, Mus musculus
  siRNA target sequence for 2610528A15Rik (NM_028151.1,593-611).
ggctctaagtaatcagaaa

SEQ ID NO: 478961 - DNA, 19 bp, Mus musculus
  siRNA target sequence for 2610528A15Rik (NM_028151.1,594-612).
gctctaagtaatcagaaat

SEQ ID NO: 478962 - DNA, 19 bp, Mus musculus
  siRNA target sequence for 2610528A15Rik (NM_028151.1,606-624).
cagaaataccgtgaaatgt

SEQ ID NO: 478963 - DNA, 19 bp, Mus musculus
  siRNA target sequence for 2610528A15Rik (NM_028151.1,608-626).
gaaataccgtgaaatgtat

SEQ ID NO: 478964 - DNA, 19 bp, Mus musculus
  siRNA target sequence for 2610528A15Rik (NM_028151.1,615-633).
cgtgaaatgtatgaagaat

SEQ ID NO: 478965 - DNA, 19 bp, Mus musculus
  siRNA target sequence for 2610528A15Rik (NM_028151.1,647-665).
gctgatgacgggagatgtt

SEQ ID NO: 478966 - DNA, 19 bp, Mus musculus
  siRNA target sequence for 2610528A15Rik (NM_028151.1,648-666).
ctgatgacgggagatgtta

SEQ ID NO: 478967 - DNA, 19 bp, Mus musculus
  siRNA target sequence for 2610528A15Rik (NM_028151.1,653-671).
gacgggagatgttactatt

SEQ ID NO: 478968 - DNA, 19 bp, Mus musculus
  siRNA target sequence for 2610528A15Rik (NM_028151.1,655-673).
cgggagatgttactattaa

SEQ ID NO: 478969 - DNA, 19 bp, Mus musculus
  siRNA target sequence for 2610528A15Rik (NM_028151.1,656-674).
gggagatgttactattaat

SEQ ID NO: 478970 - DNA, 19 bp, Mus musculus
  siRNA target sequence for 2610528A15Rik (NM_028151.1,681-699).
gcatcttgtctcgttatga

SEQ ID NO: 478971 - DNA, 19 bp, Mus musculus
  siRNA target sequence for 2610528A15Rik (NM_028151.1,692-710).
cgttatgactacagagatt

SEQ ID NO: 478972 - DNA, 19 bp, Mus musculus
  siRNA target sequence for 2610528A15Rik (NM_028151.1,713-731).
gagaagtatgctgtataga

SEQ ID NO: 478973 - DNA, 19 bp, Mus musculus
  siRNA target sequence for 2610528A15Rik (NM_028151.1,838-856).
cagataatgttcactatgt

SEQ ID NO: 478974 - DNA, 19 bp, Mus musculus
  siRNA target sequence for 2610528A15Rik (NM_028151.1,857-875).
ctttctttcggctactatt

SEQ ID NO: 478975 - DNA, 19 bp, Mus musculus
  siRNA target sequence for 2610528A15Rik (NM_028151.1,861-879).
ctttcggctactattccaa

SEQ ID NO: 478976 - DNA, 19 bp, Mus musculus
  siRNA target sequence for 2610528A15Rik (NM_028151.1,866-884).
ggctactattccaaatgct

SEQ ID NO: 478977 - DNA, 19 bp, Mus musculus
  siRNA target sequence for 2610528A15Rik (NM_028151.1,901-919).
ggatttgtcacctacataa

SEQ ID NO: 478978 - DNA, 19 bp, Mus musculus
  siRNA target sequence for 2610528A15Rik (NM_028151.1,924-942).
ccctgtcatgttatttaca

SEQ ID NO: 478979 - DNA, 19 bp, Mus musculus
  siRNA target sequence for 2610528A15Rik (NM_028151.1,958-976).
ctccactgcaacactacat

SEQ ID NO: 478980 - DNA, 19 bp, Mus musculus
  siRNA target sequence for 2610528A15Rik (NM_028151.1,960-978).
ccactgcaacactacatat

SEQ ID NO: 478981 - DNA, 19 bp, Mus musculus
  siRNA target sequence for 2610528A15Rik (NM_028151.1,1120-1138).
caaaaggtccatcaaatgt

SEQ ID NO: 478982 - DNA, 19 bp, Mus musculus
  siRNA target sequence for 2610528A15Rik (NM_028151.1,1126-1144).
gtccatcaaatgtgttcaa

SEQ ID NO: 478983 - DNA, 19 bp, Mus musculus
  siRNA target sequence for 2610528A15Rik (NM_028151.1,1132-1150).
caaatgtgttcaagattgt

SEQ ID NO: 478984 - DNA, 19 bp, Mus musculus
  siRNA target sequence for 2610528A15Rik (NM_028151.1,1208-1226).
ggactgtgaagcatatgct

SEQ ID NO: 478985 - DNA, 19 bp, Mus musculus
  siRNA target sequence for 2610528A15Rik (NM_028151.1,1328-1346).
gctccctcaggttgaacat

SEQ ID NO: 478986 - DNA, 19 bp, Mus musculus
  siRNA target sequence for 2610528A15Rik (NM_028151.1,1344-1362).
catgtgcttccacttttga

SEQ ID NO: 478987 - DNA, 19 bp, Mus musculus
  siRNA target sequence for 2610528A15Rik (NM_028151.1,1389-1407).
ggcttacttcctattttga

SEQ ID NO: 478988 - DNA, 19 bp, Mus musculus
  siRNA target sequence for 2610528A15Rik (NM_028151.1,1398-1416).
cctattttgaaagaaacta

SEQ ID NO: 478989 - DNA, 19 bp, Mus musculus
  siRNA target sequence for 2610528A15Rik (NM_028151.1,1468-1486).
cttttgctatgggaattaa

SEQ ID NO: 478990 - DNA, 19 bp, Mus musculus
  siRNA target sequence for 2610528A15Rik (NM_028151.1,1490-1508).
gccagctagaactgtttta

SEQ ID NO: 478991 - DNA, 19 bp, Mus musculus
  siRNA target sequence for 2610528A15Rik (NM_028151.1,1513-1531).
caaatgcccgtaaatatga

SEQ ID NO: 478992 - DNA, 19 bp, Mus musculus
  siRNA target sequence for 2610528A15Rik (NM_028151.1,1612-1630).
gagggattgtgattcttat

SEQ ID NO: 478993 - DNA, 19 bp, Mus musculus
  siRNA target sequence for 2610528A15Rik (NM_028151.1,1615-1633).
ggattgtgattcttatggt

SEQ ID NO: 478994 - DNA, 19 bp, Mus musculus
  siRNA target sequence for 2610528A15Rik (NM_028151.1,1616-1634).
gattgtgattcttatggta

SEQ ID NO: 478995 - DNA, 19 bp, Mus musculus
  siRNA target sequence for 2610528A15Rik (NM_028151.1,1643-1661).
gatgagcccaactattgga

SEQ ID NO: 478996 - DNA, 19 bp, Mus musculus
  siRNA target sequence for 2610528A15Rik (NM_028151.1,1701-1719).
gctttccatctgacctata

SEQ ID NO: 478997 - DNA, 19 bp, Mus musculus
  siRNA target sequence for 2610528A15Rik (NM_028151.1,1710-1728).
ctgacctataacatggttt

SEQ ID NO: 478998 - DNA, 19 bp, Mus musculus
  siRNA target sequence for 2610528A15Rik (NM_028151.1,1714-1732).
cctataacatggttttgaa

SEQ ID NO: 478999 - DNA, 19 bp, Mus musculus
  siRNA target sequence for 2610528A15Rik (NM_028151.1,1733-1751).
cttactaagagtagaagaa

SEQ ID NO: 479000 - DNA, 19 bp, Mus musculus
  siRNA target sequence for 2610528A15Rik (NM_028151.1,1758-1776).
cccgagtacatgcttgaaa

SEQ ID NO: 479001 - DNA, 19 bp, Mus musculus
  siRNA target sequence for 2610528A15Rik (NM_028151.1,1759-1777).
ccgagtacatgcttgaaaa

SEQ ID NO: 479002 - DNA, 19 bp, Mus musculus
  siRNA target sequence for 2610528A15Rik (NM_028151.1,1760-1778).
cgagtacatgcttgaaaaa

SEQ ID NO: 479003 - DNA, 19 bp, Mus musculus
  siRNA target sequence for 2610528A15Rik (NM_028151.1,1784-1802).
ctaccagtttcagcattat

SEQ ID NO: 479004 - DNA, 19 bp, Mus musculus
  siRNA target sequence for 2610528A15Rik (NM_028151.1,1796-1814).
gcattatagagcaattcca

SEQ ID NO: 479005 - DNA, 19 bp, Mus musculus
  siRNA target sequence for 2610528A15Rik (NM_028151.1,1813-1831).
caggggtcgtagaaaaggt

SEQ ID NO: 479006 - DNA, 19 bp, Mus musculus
  siRNA target sequence for 2610528A15Rik (NM_028151.1,1815-1833).
ggggtcgtagaaaaggtaa

SEQ ID NO: 479007 - DNA, 19 bp, Mus musculus
  siRNA target sequence for 2610528A15Rik (NM_028151.1,1816-1834).
gggtcgtagaaaaggtaaa

SEQ ID NO: 479008 - DNA, 19 bp, Mus musculus
  siRNA target sequence for 2610528A15Rik (NM_028151.1,1818-1836).
gtcgtagaaaaggtaaaga

SEQ ID NO: 479009 - DNA, 19 bp, Mus musculus
  siRNA target sequence for 2610528A15Rik (NM_028151.1,1848-1866).
cagtataataaaatagtca

SEQ ID NO: 479010 - DNA, 19 bp, Mus musculus
  siRNA target sequence for 2610528A15Rik (NM_028151.1,1878-1896).
gaaaatgtggtcatctatt

SEQ ID NO: 479011 - DNA, 19 bp, Mus musculus
  siRNA target sequence for 2610528A15Rik (NM_028151.1,1887-1905).
gtcatctattacaagatta

SEQ ID NO: 479012 - DNA, 19 bp, Mus musculus
  siRNA target sequence for 2610528A15Rik (NM_028151.1,1984-2002).
caggccgtttggtaaaggt

SEQ ID NO: 479013 - DNA, 19 bp, Mus musculus
  siRNA target sequence for 2610528A15Rik (NM_028151.1,2029-2047).
ggggagtagtagtgaactt

SEQ ID NO: 479014 - DNA, 19 bp, Mus musculus
  siRNA target sequence for 2610528A15Rik (NM_028151.1,2031-2049).
ggagtagtagtgaacttct

SEQ ID NO: 479015 - DNA, 19 bp, Mus musculus
  siRNA target sequence for 2610528A15Rik (NM_028151.1,2045-2063).
cttctcaaaaaagtcaaat

SEQ ID NO: 479016 - DNA, 19 bp, Mus musculus
  siRNA target sequence for 2610528A15Rik (NM_028151.1,2236-2254).
gcactgtcaggctctatat

SEQ ID NO: 479017 - DNA, 19 bp, Mus musculus
  siRNA target sequence for 2610528A15Rik (NM_028151.1,2241-2259).
gtcaggctctatattccaa

SEQ ID NO: 479018 - DNA, 19 bp, Mus musculus
  siRNA target sequence for 2610528A15Rik (NM_028151.1,2243-2261).
caggctctatattccaaaa

SEQ ID NO: 479019 - DNA, 19 bp, Mus musculus
  siRNA target sequence for 2610528A15Rik (NM_028151.1,2245-2263).
ggctctatattccaaaaga

SEQ ID NO: 479020 - DNA, 19 bp, Mus musculus
  siRNA target sequence for 2610528A15Rik (NM_028151.1,2330-2348).
cgacggcgttcctctgtta

SEQ ID NO: 479021 - DNA, 19 bp, Mus musculus
  siRNA target sequence for 2610528A15Rik (NM_028151.1,2333-2351).
cggcgttcctctgttagat

SEQ ID NO: 479022 - DNA, 19 bp, Mus musculus
  siRNA target sequence for 2610528A15Rik (NM_028151.1,2440-2458).
cactccacaatgatcctaa

SEQ ID NO: 479023 - DNA, 19 bp, Mus musculus
  siRNA target sequence for 2610528A15Rik (NM_028151.1,2492-2510).
ggcccagattgcactagat

SEQ ID NO: 479024 - DNA, 19 bp, Mus musculus
  siRNA target sequence for 2610528A15Rik (NM_028151.1,2494-2512).
cccagattgcactagatat

SEQ ID NO: 479025 - DNA, 19 bp, Mus musculus
  siRNA target sequence for 2610528A15Rik (NM_028151.1,2496-2514).
cagattgcactagatatca

SEQ ID NO: 479026 - DNA, 19 bp, Mus musculus
  siRNA target sequence for 2610528A15Rik (NM_028151.1,2556-2574).
caaatggacgagctcaaat

SEQ ID NO: 479027 - DNA, 19 bp, Mus musculus
  siRNA target sequence for 2610528A15Rik (NM_028151.1,2608-2626).
cgacatcgtcggatgtcat

SEQ ID NO: 479028 - DNA, 19 bp, Mus musculus
  siRNA target sequence for 2610528A15Rik (NM_028151.1,2609-2627).
gacatcgtcggatgtcata

SEQ ID NO: 479029 - DNA, 19 bp, Mus musculus
  siRNA target sequence for 2610528A15Rik (NM_028151.1,2611-2629).
catcgtcggatgtcataga

SEQ ID NO: 479030 - DNA, 19 bp, Mus musculus
  siRNA target sequence for 2610528A15Rik (NM_028151.1,2614-2632).
cgtcggatgtcatagagat

SEQ ID NO: 479031 - DNA, 19 bp, Mus musculus
  siRNA target sequence for 2610528A15Rik (NM_028151.1,2617-2635).
cggatgtcatagagatgaa

SEQ ID NO: 479032 - DNA, 19 bp, Mus musculus
  siRNA target sequence for 2610528A15Rik (NM_028151.1,2637-2655).
ggacgggtggcttgtgaaa

SEQ ID NO: 479033 - DNA, 19 bp, Mus musculus
  siRNA target sequence for 2610528A15Rik (NM_028151.1,2638-2656).
gacgggtggcttgtgaaat

SEQ ID NO: 479034 - DNA, 19 bp, Mus musculus
  siRNA target sequence for 2610528A15Rik (NM_028151.1,2643-2661).
gtggcttgtgaaataagca

SEQ ID NO: 479035 - DNA, 19 bp, Mus musculus
  siRNA target sequence for 2610528A15Rik (NM_028151.1,2664-2682).
gcggacgagctccttctaa

SEQ ID NO: 479036 - DNA, 19 bp, Mus musculus
  siRNA target sequence for 2610528A15Rik (NM_028151.1,2676-2694).
cttctaacggagatgatgt

SEQ ID NO: 479037 - DNA, 19 bp, Mus musculus
  siRNA target sequence for 2610528A15Rik (NM_028151.1,2726-2744).
gcaggcaaccgcactgtta

SEQ ID NO: 479038 - DNA, 19 bp, Mus musculus
  siRNA target sequence for 2610528A15Rik (NM_028151.1,2727-2745).
caggcaaccgcactgttaa

SEQ ID NO: 479039 - DNA, 19 bp, Mus musculus
  siRNA target sequence for 2610528A15Rik (NM_028151.1,2730-2748).
gcaaccgcactgttaagct

SEQ ID NO: 479040 - DNA, 19 bp, Mus musculus
  siRNA target sequence for 2610528A15Rik (NM_028151.1,2739-2757).
ctgttaagctgttttgtgt

SEQ ID NO: 479041 - DNA, 19 bp, Mus musculus
  siRNA target sequence for 2610528A15Rik (NM_028151.1,2803-2821).
ctggaccactccgacaaat

SEQ ID NO: 479042 - DNA, 19 bp, Mus musculus
  siRNA target sequence for 2610528A15Rik (NM_028151.1,2823-2841).
caggaatgtgctaaaagga

SEQ ID NO: 479043 - DNA, 19 bp, Mus musculus
  siRNA target sequence for 2610528A15Rik (NM_028151.1,2825-2843).
ggaatgtgctaaaaggatt

SEQ ID NO: 479044 - DNA, 19 bp, Mus musculus
  siRNA target sequence for 2610528A15Rik (NM_028151.1,2830-2848).
gtgctaaaaggattgcaaa

SEQ ID NO: 479045 - DNA, 19 bp, Mus musculus
  siRNA target sequence for 2610528A15Rik (NM_028151.1,2887-2905).
cttacctaagctcattcaa

SEQ ID NO: 479046 - DNA, 19 bp, Mus musculus
  siRNA target sequence for 2610528A15Rik (NM_028151.1,2946-2964).
gccacatttgcccatatct

SEQ ID NO: 479047 - DNA, 19 bp, Mus musculus
  siRNA target sequence for 2610528A15Rik (NM_028151.1,2979-2997).
gttttcgaaggcagtataa

SEQ ID NO: 479048 - DNA, 19 bp, Mus musculus
  siRNA target sequence for 2610528A15Rik (NM_028151.1,2984-3002).
cgaaggcagtataattcgt

SEQ ID NO: 479049 - DNA, 19 bp, Mus musculus
  siRNA target sequence for 2610528A15Rik (NM_028151.1,2985-3003).
gaaggcagtataattcgtt

SEQ ID NO: 479050 - DNA, 19 bp, Mus musculus
  siRNA target sequence for 2610528A15Rik (NM_028151.1,2989-3007).
gcagtataattcgttgtat

SEQ ID NO: 479051 - DNA, 19 bp, Mus musculus
  siRNA target sequence for 2610528A15Rik (NM_028151.1,3035-3053).
gatgtgtcaagcagcaaaa

SEQ ID NO: 479052 - DNA, 19 bp, Mus musculus
  siRNA target sequence for 2610528A15Rik (NM_028151.1,3093-3111).
ggaattaccaaaatcaaga

SEQ ID NO: 479053 - DNA, 19 bp, Mus musculus
  siRNA target sequence for 2700043M03Rik (NM_152814.1,182-200).
gttccacgatgtgtacata

SEQ ID NO: 479054 - DNA, 19 bp, Mus musculus
  siRNA target sequence for 2700043M03Rik (NM_152814.1,186-204).
cacgatgtgtacatagact

SEQ ID NO: 479055 - DNA, 19 bp, Mus musculus
  siRNA target sequence for 2700043M03Rik (NM_152814.1,296-314).
ggtcctggagtcaagatgt

SEQ ID NO: 479056 - DNA, 19 bp, Mus musculus
  siRNA target sequence for 2700043M03Rik (NM_152814.1,313-331).
gtgaggcccagaagttatt

SEQ ID NO: 479057 - DNA, 19 bp, Mus musculus
  siRNA target sequence for 2700043M03Rik (NM_152814.1,342-360).
gagctgtatgagatagaga

SEQ ID NO: 479058 - DNA, 19 bp, Mus musculus
  siRNA target sequence for 2700043M03Rik (NM_152814.1,361-379).
cagcgcagtgggagataat

SEQ ID NO: 479059 - DNA, 19 bp, Mus musculus
  siRNA target sequence for 2700043M03Rik (NM_152814.1,548-566).
gcagattatcaagaataaa

SEQ ID NO: 479060 - DNA, 19 bp, Mus musculus
  siRNA target sequence for 2700043M03Rik (NM_152814.1,609-627).
catggctcccggtttgcta

SEQ ID NO: 479061 - DNA, 19 bp, Mus musculus
  siRNA target sequence for 2700043M03Rik (NM_152814.1,791-809).
gacacggcatcacagaatt

SEQ ID NO: 479062 - DNA, 19 bp, Mus musculus
  siRNA target sequence for 2700043M03Rik (NM_152814.1,793-811).
cacggcatcacagaattca

SEQ ID NO: 479063 - DNA, 19 bp, Mus musculus
  siRNA target sequence for 2700043M03Rik (NM_152814.1,937-955).
cttttagtagcggttcaaa

SEQ ID NO: 479064 - DNA, 19 bp, Mus musculus
  siRNA target sequence for 2700043M03Rik (NM_152814.1,1029-1047).
cagagttcccaacttatta

SEQ ID NO: 479065 - DNA, 19 bp, Mus musculus
  siRNA target sequence for 2700043M03Rik (NM_152814.1,1031-1049).
gagttcccaacttattaaa

SEQ ID NO: 479066 - DNA, 19 bp, Mus musculus
  siRNA target sequence for 2700043M03Rik (NM_152814.1,1266-1284).
gggaagaactttatctata

SEQ ID NO: 479067 - DNA, 19 bp, Mus musculus
  siRNA target sequence for 2700043M03Rik (NM_152814.1,1267-1285).
ggaagaactttatctataa

SEQ ID NO: 479068 - DNA, 19 bp, Mus musculus
  siRNA target sequence for 2700043M03Rik (NM_152814.1,1271-1289).
gaactttatctataactca

SEQ ID NO: 479069 - DNA, 19 bp, Mus musculus
  siRNA target sequence for 2700043M03Rik (NM_152814.1,1302-1320).
catcagaacttatattggt

SEQ ID NO: 479070 - DNA, 19 bp, Mus musculus
  siRNA target sequence for 2700088M22Rik (NM_026025.1,231-249).
ggcaaagttgtaaaggtta

SEQ ID NO: 479071 - DNA, 19 bp, Mus musculus
  siRNA target sequence for 2700088M22Rik (NM_026025.1,356-374).
gttatttggtagagtgata

SEQ ID NO: 479072 - DNA, 19 bp, Mus musculus
  siRNA target sequence for 2700088M22Rik (NM_026025.1,380-398).
gagcatcgctattgacaat

SEQ ID NO: 479073 - DNA, 19 bp, Mus musculus
  siRNA target sequence for 2700088M22Rik (NM_026025.1,419-437).
ccggagacgaaactacttt

SEQ ID NO: 479074 - DNA, 19 bp, Mus musculus
  siRNA target sequence for 2700088M22Rik (NM_026025.1,421-439).
ggagacgaaactactttga

SEQ ID NO: 479075 - DNA, 19 bp, Mus musculus
  siRNA target sequence for 2700088M22Rik (NM_026025.1,422-440).
gagacgaaactactttgat

SEQ ID NO: 479076 - DNA, 19 bp, Mus musculus
  siRNA target sequence for 2700088M22Rik (NM_026025.1,426-444).
cgaaactactttgataaat

SEQ ID NO: 479077 - DNA, 19 bp, Mus musculus
  siRNA target sequence for 2810021J22Rik (NM_172403.2,594-612).
gggaaatacttagtatgaa

SEQ ID NO: 479078 - DNA, 19 bp, Mus musculus
  siRNA target sequence for 2810021J22Rik (NM_172403.2,596-614).
gaaatacttagtatgaatt

SEQ ID NO: 479079 - DNA, 19 bp, Mus musculus
  siRNA target sequence for 2810021J22Rik (NM_172403.2,645-663).
ctaggagcacttctagaat

SEQ ID NO: 479080 - DNA, 19 bp, Mus musculus
  siRNA target sequence for 2810021J22Rik (NM_172403.2,649-667).
gagcacttctagaatgaga

SEQ ID NO: 479081 - DNA, 19 bp, Mus musculus
  siRNA target sequence for 2810021J22Rik (NM_172403.2,704-722).
cctggtgggcccattgaga

SEQ ID NO: 479082 - DNA, 19 bp, Mus musculus
  siRNA target sequence for 2810021J22Rik (NM_172403.2,736-754).
ggaacttgatcatcttaat

SEQ ID NO: 479083 - DNA, 19 bp, Mus musculus
  siRNA target sequence for 2810021J22Rik (NM_172403.2,876-894).
cgcgtacagtgtttccttt

SEQ ID NO: 479084 - DNA, 19 bp, Mus musculus
  siRNA target sequence for 2810021J22Rik (NM_172403.2,904-922).
ctcgacgaatgcctttgat

SEQ ID NO: 479085 - DNA, 19 bp, Mus musculus
  siRNA target sequence for 2810021J22Rik (NM_172403.2,909-927).
cgaatgcctttgataagtt

SEQ ID NO: 479086 - DNA, 19 bp, Mus musculus
  siRNA target sequence for 2810021J22Rik (NM_172403.2,941-959).
caagaggggactcacataa

SEQ ID NO: 479087 - DNA, 19 bp, Mus musculus
  siRNA target sequence for 2810021J22Rik (NM_172403.2,962-980).
gaggaaacttttgattgta

SEQ ID NO: 479088 - DNA, 19 bp, Mus musculus
  siRNA target sequence for 2810021J22Rik (NM_172403.2,1134-1152).
gtgggtgtaacgacaacaa

SEQ ID NO: 479089 - DNA, 19 bp, Mus musculus
  siRNA target sequence for 2810021J22Rik (NM_172403.2,1136-1154).
gggtgtaacgacaacaaga

SEQ ID NO: 479090 - DNA, 19 bp, Mus musculus
  siRNA target sequence for 2810021J22Rik (NM_172403.2,1137-1155).
ggtgtaacgacaacaagaa

SEQ ID NO: 479091 - DNA, 19 bp, Mus musculus
  siRNA target sequence for 2810021J22Rik (NM_172403.2,1196-1214).
gtcttctccagtaaagaga

SEQ ID NO: 479092 - DNA, 19 bp, Mus musculus
  siRNA target sequence for 2810021J22Rik (NM_172403.2,1211-1229).
gagagtaattgtgtgaaaa

SEQ ID NO: 479093 - DNA, 19 bp, Mus musculus
  siRNA target sequence for 2810021J22Rik (NM_172403.2,1213-1231).
gagtaattgtgtgaaaaca

SEQ ID NO: 479094 - DNA, 19 bp, Mus musculus
  siRNA target sequence for 2810021J22Rik (NM_172403.2,1266-1284).
ggccacatacaggtaaaaa

SEQ ID NO: 479095 - DNA, 19 bp, Mus musculus
  siRNA target sequence for 2810021J22Rik (NM_172403.2,1351-1369).
gacctatcagtgtaaagta

SEQ ID NO: 479096 - DNA, 19 bp, Mus musculus
  siRNA target sequence for 2810021J22Rik (NM_172403.2,1381-1399).
ctttaaacacacgcaaaat

SEQ ID NO: 479097 - DNA, 19 bp, Mus musculus
  siRNA target sequence for 2810021J22Rik (NM_172403.2,1388-1406).
cacacgcaaaatctctatt

SEQ ID NO: 479098 - DNA, 19 bp, Mus musculus
  siRNA target sequence for 2810021J22Rik (NM_172403.2,1390-1408).
cacgcaaaatctctattta

SEQ ID NO: 479099 - DNA, 19 bp, Mus musculus
  siRNA target sequence for 2810021J22Rik (NM_172403.2,1446-1464).
gtaaagagtgtaagaaact

SEQ ID NO: 479100 - DNA, 19 bp, Mus musculus
  siRNA target sequence for 2810021J22Rik (NM_172403.2,1557-1575).
ggaggtgtgacctaactat

SEQ ID NO: 479101 - DNA, 19 bp, Mus musculus
  siRNA target sequence for 2810028A01Rik (NM_028325.1,435-453).
caccttgggctcattccat

SEQ ID NO: 479102 - DNA, 19 bp, Mus musculus
  siRNA target sequence for 2810028A01Rik (NM_028325.1,471-489).
ggagtcttggccctttaat

SEQ ID NO: 479103 - DNA, 19 bp, Mus musculus
  siRNA target sequence for 2810028A01Rik (NM_028325.1,568-586).
ctggctgagccaagtaact

SEQ ID NO: 479104 - DNA, 19 bp, Mus musculus
  siRNA target sequence for 2810028A01Rik (NM_028325.1,625-643).
ggtcagacgtctaatgaga

SEQ ID NO: 479105 - DNA, 19 bp, Mus musculus
  siRNA target sequence for 2810028A01Rik (NM_028325.1,691-709).
caatcctggcctagatgta

SEQ ID NO: 479106 - DNA, 19 bp, Mus musculus
  siRNA target sequence for 2810028A01Rik (NM_028325.1,699-717).
gcctagatgtagaggattt

SEQ ID NO: 479107 - DNA, 19 bp, Mus musculus
  siRNA target sequence for 2810028A01Rik (NM_028325.1,700-718).
cctagatgtagaggatttt

SEQ ID NO: 479108 - DNA, 19 bp, Mus musculus
  siRNA target sequence for 2810028A01Rik (NM_028325.1,767-785).
gcccatagtaaatttgtta

SEQ ID NO: 479109 - DNA, 19 bp, Mus musculus
  siRNA target sequence for 2810028A01Rik (NM_028325.1,770-788).
catagtaaatttgttaaca

SEQ ID NO: 479110 - DNA, 19 bp, Mus musculus
  siRNA target sequence for 2810028A01Rik (NM_028325.1,941-959).
cttcgattcaggcttaaga

SEQ ID NO: 479111 - DNA, 19 bp, Mus musculus
  siRNA target sequence for 2810028A01Rik (NM_028325.1,945-963).
gattcaggcttaagaatct

SEQ ID NO: 479112 - DNA, 19 bp, Mus musculus
  siRNA target sequence for 2810028A01Rik (NM_028325.1,958-976).
gaatcttctccgggtatat

SEQ ID NO: 479113 - DNA, 19 bp, Mus musculus
  siRNA target sequence for 2810028A01Rik (NM_028325.1,962-980).
cttctccgggtatatgcaa

SEQ ID NO: 479114 - DNA, 19 bp, Mus musculus
  siRNA target sequence for 2810028A01Rik (NM_028325.1,987-1005).
cagagcgccttcccaattt

SEQ ID NO: 479115 - DNA, 19 bp, Mus musculus
  siRNA target sequence for 2810028A01Rik (NM_028325.1,999-1017).
ccaatttcctagagttaat

SEQ ID NO: 479116 - DNA, 19 bp, Mus musculus
  siRNA target sequence for 2810028A01Rik (NM_028325.1,1044-1062).
gggaggagacttttattaa

SEQ ID NO: 479117 - DNA, 19 bp, Mus musculus
  siRNA target sequence for 2810028A01Rik (NM_028325.1,1048-1066).
ggagacttttattaatcca

SEQ ID NO: 479118 - DNA, 19 bp, Mus musculus
  siRNA target sequence for 2810028A01Rik (NM_028325.1,1124-1142).
cagagctccccaccaataa

SEQ ID NO: 479119 - DNA, 19 bp, Mus musculus
  siRNA target sequence for 2810028A01Rik (NM_028325.1,1152-1170).
gtatcgactgcaatgtgat

SEQ ID NO: 479120 - DNA, 19 bp, Mus musculus
  siRNA target sequence for 2810028A01Rik (NM_028325.1,1178-1196).
gatgactctcctgatgatt

SEQ ID NO: 479121 - DNA, 19 bp, Mus musculus
  siRNA target sequence for 2810028A01Rik (NM_028325.1,1264-1282).
cctaggcagggctgtatct

SEQ ID NO: 479122 - DNA, 19 bp, Mus musculus
  siRNA target sequence for 2810028A01Rik (NM_028325.1,1347-1365).
gtggtgctgggagaaagaa

SEQ ID NO: 479123 - DNA, 19 bp, Mus musculus
  siRNA target sequence for 2810028A01Rik (NM_028325.1,1394-1412).
gccaggaagcgcaaacata

SEQ ID NO: 479124 - DNA, 19 bp, Mus musculus
  siRNA target sequence for 2810028A01Rik (NM_028325.1,1398-1416).
ggaagcgcaaacatacgat

SEQ ID NO: 479125 - DNA, 19 bp, Mus musculus
  siRNA target sequence for 2810028A01Rik (NM_028325.1,1403-1421).
cgcaaacatacgatccatt

SEQ ID NO: 479126 - DNA, 19 bp, Mus musculus
  siRNA target sequence for 2810028A01Rik (NM_028325.1,1434-1452).
gtgaggagggccactcaaa

SEQ ID NO: 479127 - DNA, 19 bp, Mus musculus
  siRNA target sequence for 2810036L13Rik (NM_144802.2,562-580).
ggaggtggaagtcatcata

SEQ ID NO: 479128 - DNA, 19 bp, Mus musculus
  siRNA target sequence for 2810036L13Rik (NM_144802.2,566-584).
gtggaagtcatcataaagt

SEQ ID NO: 479129 - DNA, 19 bp, Mus musculus
  siRNA target sequence for 2810036L13Rik (NM_144802.2,607-625).
gttcgagggctctgtgaat

SEQ ID NO: 479130 - DNA, 19 bp, Mus musculus
  siRNA target sequence for 2810036L13Rik (NM_144802.2,657-675).
ggagaaatttgggacaata

SEQ ID NO: 479131 - DNA, 19 bp, Mus musculus
  siRNA target sequence for 2810036L13Rik (NM_144802.2,658-676).
gagaaatttgggacaatat

SEQ ID NO: 479132 - DNA, 19 bp, Mus musculus
  siRNA target sequence for 2810036L13Rik (NM_144802.2,667-685).
gggacaatatgctatgtga

SEQ ID NO: 479133 - DNA, 19 bp, Mus musculus
  siRNA target sequence for 2810036L13Rik (NM_144802.2,668-686).
ggacaatatgctatgtgat

SEQ ID NO: 479134 - DNA, 19 bp, Mus musculus
  siRNA target sequence for 2810036L13Rik (NM_144802.2,682-700).
gtgatgatgatgccattta

SEQ ID NO: 479135 - DNA, 19 bp, Mus musculus
  siRNA target sequence for 2810036L13Rik (NM_144802.2,687-705).
gatgatgccatttaaacga

SEQ ID NO: 479136 - DNA, 19 bp, Mus musculus
  siRNA target sequence for 2810036L13Rik (NM_144802.2,710-728).
ctctcgtggagtttgaaaa

SEQ ID NO: 479137 - DNA, 19 bp, Mus musculus
  siRNA target sequence for 2810036L13Rik (NM_144802.2,720-738).
gtttgaaaatatagatagt

SEQ ID NO: 479138 - DNA, 19 bp, Mus musculus
  siRNA target sequence for 2810036L13Rik (NM_144802.2,792-810).
gcaggctttcttcaactat

SEQ ID NO: 479139 - DNA, 19 bp, Mus musculus
  siRNA target sequence for 2810036L13Rik (NM_144802.2,793-811).
caggctttcttcaactatt

SEQ ID NO: 479140 - DNA, 19 bp, Mus musculus
  siRNA target sequence for 2810036L13Rik (NM_144802.2,804-822).
caactattctacaagtaaa

SEQ ID NO: 479141 - DNA, 19 bp, Mus musculus
  siRNA target sequence for 2810036L13Rik (NM_144802.2,807-825).
ctattctacaagtaaaaga

SEQ ID NO: 479142 - DNA, 19 bp, Mus musculus
  siRNA target sequence for 2810036L13Rik (NM_144802.2,854-872).
catcagggggcaacaaagt

SEQ ID NO: 479143 - DNA, 19 bp, Mus musculus
  siRNA target sequence for 2810036L13Rik (NM_144802.2,912-930).
ggtggatgttctgtatact

SEQ ID NO: 479144 - DNA, 19 bp, Mus musculus
  siRNA target sequence for 2810036L13Rik (NM_144802.2,935-953).
gcaaccctgttggaaaagt

SEQ ID NO: 479145 - DNA, 19 bp, Mus musculus
  siRNA target sequence for 2810036L13Rik (NM_144802.2,947-965).
gaaaagtacagcgtattgt

SEQ ID NO: 479146 - DNA, 19 bp, Mus musculus
  siRNA target sequence for 2810036L13Rik (NM_144802.2,952-970).
gtacagcgtattgttatct

SEQ ID NO: 479147 - DNA, 19 bp, Mus musculus
  siRNA target sequence for 2810036L13Rik (NM_144802.2,955-973).
cagcgtattgttatcttca

SEQ ID NO: 479148 - DNA, 19 bp, Mus musculus
  siRNA target sequence for 2810036L13Rik (NM_144802.2,958-976).
cgtattgttatcttcaaga

SEQ ID NO: 479149 - DNA, 19 bp, Mus musculus
  siRNA target sequence for 2810036L13Rik (NM_144802.2,991-1009).
gcaatggttgagtttgagt

SEQ ID NO: 479150 - DNA, 19 bp, Mus musculus
  siRNA target sequence for 2810036L13Rik (NM_144802.2,1066-1084).
ggatgttgcacactaaaaa

SEQ ID NO: 479151 - DNA, 19 bp, Mus musculus
  siRNA target sequence for 2810036L13Rik (NM_144802.2,1097-1115).
ggccaactcgtctaaatgt

SEQ ID NO: 479152 - DNA, 19 bp, Mus musculus
  siRNA target sequence for 2810036L13Rik (NM_144802.2,1099-1117).
ccaactcgtctaaatgtta

SEQ ID NO: 479153 - DNA, 19 bp, Mus musculus
  siRNA target sequence for 2810036L13Rik (NM_144802.2,1100-1118).
caactcgtctaaatgttat

SEQ ID NO: 479154 - DNA, 19 bp, Mus musculus
  siRNA target sequence for 2810036L13Rik (NM_144802.2,1105-1123).
cgtctaaatgttattagga

SEQ ID NO: 479155 - DNA, 19 bp, Mus musculus
  siRNA target sequence for 2810036L13Rik (NM_144802.2,1106-1124).
gtctaaatgttattaggaa

SEQ ID NO: 479156 - DNA, 19 bp, Mus musculus
  siRNA target sequence for 2810036L13Rik (NM_144802.2,1210-1228).
gaccatccttcttcgttta

SEQ ID NO: 479157 - DNA, 19 bp, Mus musculus
  siRNA target sequence for 2810036L13Rik (NM_144802.2,1255-1273).
ccgctactgcctttaccaa

SEQ ID NO: 479158 - DNA, 19 bp, Mus musculus
  siRNA target sequence for 2810036L13Rik (NM_144802.2,1263-1281).
gcctttaccaagtcgttat

SEQ ID NO: 479159 - DNA, 19 bp, Mus musculus
  siRNA target sequence for 2810036L13Rik (NM_144802.2,1264-1282).
cctttaccaagtcgttata

SEQ ID NO: 479160 - DNA, 19 bp, Mus musculus
  siRNA target sequence for 2810036L13Rik (NM_144802.2,1330-1348).
caagcgtcttcctcttaca

SEQ ID NO: 479161 - DNA, 19 bp, Mus musculus
  siRNA target sequence for 2810036L13Rik (NM_144802.2,1363-1381).
ccgtctggctccgttgtaa

SEQ ID NO: 479162 - DNA, 19 bp, Mus musculus
  siRNA target sequence for 2810036L13Rik (NM_144802.2,1364-1382).
cgtctggctccgttgtaat

SEQ ID NO: 479163 - DNA, 19 bp, Mus musculus
  siRNA target sequence for 2810036L13Rik (NM_144802.2,1367-1385).
ctggctccgttgtaatggt

SEQ ID NO: 479164 - DNA, 19 bp, Mus musculus
  siRNA target sequence for 2810036L13Rik (NM_144802.2,1390-1408).
ggattacatcagctcaaaa

SEQ ID NO: 479165 - DNA, 19 bp, Mus musculus
  siRNA target sequence for 2810036L13Rik (NM_144802.2,1396-1414).
catcagctcaaaatgaatt

SEQ ID NO: 479166 - DNA, 19 bp, Mus musculus
  siRNA target sequence for 2810036L13Rik (NM_144802.2,1401-1419).
gctcaaaatgaattgttca

SEQ ID NO: 479167 - DNA, 19 bp, Mus musculus
  siRNA target sequence for 2810036L13Rik (NM_144802.2,1529-1547).
gagctgtcacccaccttaa

SEQ ID NO: 479168 - DNA, 19 bp, Mus musculus
  siRNA target sequence for 2810036L13Rik (NM_144802.2,1532-1550).
ctgtcacccaccttaataa

SEQ ID NO: 479169 - DNA, 19 bp, Mus musculus
  siRNA target sequence for 2810036L13Rik (NM_144802.2,1538-1556).
cccaccttaataatgtcaa

SEQ ID NO: 479170 - DNA, 19 bp, Mus musculus
  siRNA target sequence for 2810036L13Rik (NM_144802.2,1539-1557).
ccaccttaataatgtcaaa

SEQ ID NO: 479171 - DNA, 19 bp, Mus musculus
  siRNA target sequence for 2810036L13Rik (NM_144802.2,1543-1561).
cttaataatgtcaaactct

SEQ ID NO: 479172 - DNA, 19 bp, Mus musculus
  siRNA target sequence for 2810036L13Rik (NM_144802.2,1601-1619).
cagttgttcccagtcaaat

SEQ ID NO: 479173 - DNA, 19 bp, Mus musculus
  siRNA target sequence for 2810036L13Rik (NM_144802.2,1603-1621).
gttgttcccagtcaaatat

SEQ ID NO: 479174 - DNA, 19 bp, Mus musculus
  siRNA target sequence for 2810036L13Rik (NM_144802.2,1637-1655).
gtacgagcagctacaaaga

SEQ ID NO: 479175 - DNA, 19 bp, Mus musculus
  siRNA target sequence for 2810036L13Rik (NM_144802.2,1640-1658).
cgagcagctacaaagattt

SEQ ID NO: 479176 - DNA, 19 bp, Mus musculus
  siRNA target sequence for 2810036L13Rik (NM_144802.2,1646-1664).
gctacaaagattttgcaat

SEQ ID NO: 479177 - DNA, 19 bp, Mus musculus
  siRNA target sequence for 2810036L13Rik (NM_144802.2,1691-1709).
ctggacaagcatctaagaa

SEQ ID NO: 479178 - DNA, 19 bp, Mus musculus
  siRNA target sequence for 2810036L13Rik (NM_144802.2,1693-1711).
ggacaagcatctaagaata

SEQ ID NO: 479179 - DNA, 19 bp, Mus musculus
  siRNA target sequence for 2810036L13Rik (NM_144802.2,1724-1742).
cgtcatgtgtgctgcatta

SEQ ID NO: 479180 - DNA, 19 bp, Mus musculus
  siRNA target sequence for 2810036L13Rik (NM_144802.2,1807-1825).
cttccgttcatcaaatata

SEQ ID NO: 479181 - DNA, 19 bp, Mus musculus
  siRNA target sequence for 2810036L13Rik (NM_144802.2,1828-1846).
gtgtttgacgcgaaagctt

SEQ ID NO: 479182 - DNA, 19 bp, Mus musculus
  siRNA target sequence for 2810036L13Rik (NM_144802.2,1872-1890).
ggagtggaagtgcaaaact

SEQ ID NO: 479183 - DNA, 19 bp, Mus musculus
  siRNA target sequence for 2810036L13Rik (NM_144802.2,1875-1893).
gtggaagtgcaaaactgat

SEQ ID NO: 479184 - DNA, 19 bp, Mus musculus
  siRNA target sequence for 2810036L13Rik (NM_144802.2,1904-1922).
ctctcactgcgctcaatca

SEQ ID NO: 479185 - DNA, 19 bp, Mus musculus
  siRNA target sequence for 2810036L13Rik (NM_144802.2,1906-1924).
ctcactgcgctcaatcact

SEQ ID NO: 479186 - DNA, 19 bp, Mus musculus
  siRNA target sequence for 2810036L13Rik (NM_144802.2,1954-1972).
ccctatacgttgaagcttt

SEQ ID NO: 479187 - DNA, 19 bp, Mus musculus
  siRNA target sequence for 2810054M15Rik (NM_178384.2,239-257).
gggactagtgacgttcaaa

SEQ ID NO: 479188 - DNA, 19 bp, Mus musculus
  siRNA target sequence for 2810054M15Rik (NM_178384.2,241-259).
gactagtgacgttcaaaga

SEQ ID NO: 479189 - DNA, 19 bp, Mus musculus
  siRNA target sequence for 2810054M15Rik (NM_178384.2,303-321).
cctactcagcggaacctat

SEQ ID NO: 479190 - DNA, 19 bp, Mus musculus
  siRNA target sequence for 2810054M15Rik (NM_178384.2,304-322).
ctactcagcggaacctata

SEQ ID NO: 479191 - DNA, 19 bp, Mus musculus
  siRNA target sequence for 2810054M15Rik (NM_178384.2,309-327).
cagcggaacctatatagga

SEQ ID NO: 479192 - DNA, 19 bp, Mus musculus
  siRNA target sequence for 2810054M15Rik (NM_178384.2,311-329).
gcggaacctatataggaat

SEQ ID NO: 479193 - DNA, 19 bp, Mus musculus
  siRNA target sequence for 2810054M15Rik (NM_178384.2,377-395).
caccaaacctgaagtgatt

SEQ ID NO: 479194 - DNA, 19 bp, Mus musculus
  siRNA target sequence for 2810054M15Rik (NM_178384.2,454-472).
cctgtccaggggagatttt

SEQ ID NO: 479195 - DNA, 19 bp, Mus musculus
  siRNA target sequence for 2810054M15Rik (NM_178384.2,544-562).
gcgaatgtccggaggaatt

SEQ ID NO: 479196 - DNA, 19 bp, Mus musculus
  siRNA target sequence for 2810054M15Rik (NM_178384.2,545-563).
cgaatgtccggaggaattt

SEQ ID NO: 479197 - DNA, 19 bp, Mus musculus
  siRNA target sequence for 2810054M15Rik (NM_178384.2,557-575).
ggaatttgcaagtacgttt

SEQ ID NO: 479198 - DNA, 19 bp, Mus musculus
  siRNA target sequence for 2810054M15Rik (NM_178384.2,558-576).
gaatttgcaagtacgtttt

SEQ ID NO: 479199 - DNA, 19 bp, Mus musculus
  siRNA target sequence for 2810054M15Rik (NM_178384.2,628-646).
gtgttggagagtgtttaga

SEQ ID NO: 479200 - DNA, 19 bp, Mus musculus
  siRNA target sequence for 2810054M15Rik (NM_178384.2,638-656).
gtgtttagagcccaatttt

SEQ ID NO: 479201 - DNA, 19 bp, Mus musculus
  siRNA target sequence for 2810054M15Rik (NM_178384.2,647-665).
gcccaattttggtgatgat

SEQ ID NO: 479202 - DNA, 19 bp, Mus musculus
  siRNA target sequence for 2810054M15Rik (NM_178384.2,657-675).
ggtgatgatgatgtacaat

SEQ ID NO: 479203 - DNA, 19 bp, Mus musculus
  siRNA target sequence for 2810054M15Rik (NM_178384.2,679-697).
cgttgccagaggaacagtt

SEQ ID NO: 479204 - DNA, 19 bp, Mus musculus
  siRNA target sequence for 2810054M15Rik (NM_178384.2,728-746).
caccagctcgccccatttt

SEQ ID NO: 479205 - DNA, 19 bp, Mus musculus
  siRNA target sequence for 2810054M15Rik (NM_178384.2,747-765).
gtgctgaccccctttaagt

SEQ ID NO: 479206 - DNA, 19 bp, Mus musculus
  siRNA target sequence for 2810054M15Rik (NM_178384.2,1388-1406).
ggcactgacagtacacatt

SEQ ID NO: 479207 - DNA, 19 bp, Mus musculus
  siRNA target sequence for 2810054M15Rik (NM_178384.2,1389-1407).
gcactgacagtacacatta

SEQ ID NO: 479208 - DNA, 19 bp, Mus musculus
  siRNA target sequence for 2810054M15Rik (NM_178384.2,1730-1748).
catcacccatcagaaagtt

SEQ ID NO: 479209 - DNA, 19 bp, Mus musculus
  siRNA target sequence for 2810054M15Rik (NM_178384.2,1882-1900).
cccagtgctcactactcaa

SEQ ID NO: 479210 - DNA, 19 bp, Mus musculus
  siRNA target sequence for 2810054M15Rik (NM_178384.2,1891-1909).
cactactcaacttacacat

SEQ ID NO: 479211 - DNA, 19 bp, Mus musculus
  siRNA target sequence for 2810054M15Rik (NM_178384.2,1975-1993).
cgtccctcatcgtgcatat

SEQ ID NO: 479212 - DNA, 19 bp, Mus musculus
  siRNA target sequence for 2810054M15Rik (NM_178384.2,2143-2161).
cttctcttacgcttcacat

SEQ ID NO: 479213 - DNA, 19 bp, Mus musculus
  siRNA target sequence for 2810405K07Rik (NM_028141.2,340-358).
ggcattggtgacatttgaa

SEQ ID NO: 479214 - DNA, 19 bp, Mus musculus
  siRNA target sequence for 2810405K07Rik (NM_028141.2,601-619).
gaccctagatgcttcaaga

SEQ ID NO: 479215 - DNA, 19 bp, Mus musculus
  siRNA target sequence for 2810405K07Rik (NM_028141.2,626-644).
ctgagagaaatccatagaa

SEQ ID NO: 479216 - DNA, 19 bp, Mus musculus
  siRNA target sequence for 2810405K07Rik (NM_028141.2,660-678).
gccctaaacgagaaatcca

SEQ ID NO: 479217 - DNA, 19 bp, Mus musculus
  siRNA target sequence for 2810405K07Rik (NM_028141.2,661-679).
ccctaaacgagaaatccaa

SEQ ID NO: 479218 - DNA, 19 bp, Mus musculus
  siRNA target sequence for 2810405K07Rik (NM_028141.2,805-823).
ccaagaccaggaatgtagt

SEQ ID NO: 479219 - DNA, 19 bp, Mus musculus
  siRNA target sequence for 2810405K07Rik (NM_028141.2,939-957).
gtctcagtagacatctgat

SEQ ID NO: 479220 - DNA, 19 bp, Mus musculus
  siRNA target sequence for 2810405K07Rik (NM_028141.2,1061-1079).
ccgtttaaatgcaatgact

SEQ ID NO: 479221 - DNA, 19 bp, Mus musculus
  siRNA target sequence for 2810405K07Rik (NM_028141.2,1172-1190).
gccttcagccagaaaagca

SEQ ID NO: 479222 - DNA, 19 bp, Mus musculus
  siRNA target sequence for 2810405K07Rik (NM_028141.2,1265-1283).
ggcgtcacctccctaaaca

SEQ ID NO: 479223 - DNA, 19 bp, Mus musculus
  siRNA target sequence for 2810405K07Rik (NM_028141.2,1267-1285).
cgtcacctccctaaacaga

SEQ ID NO: 479224 - DNA, 19 bp, Mus musculus
  siRNA target sequence for 2810405K07Rik (NM_028141.2,1543-1561).
gagacgttacgccaaacaa

SEQ ID NO: 479225 - DNA, 19 bp, Mus musculus
  siRNA target sequence for 2810406K24Rik (NM_175126.3,564-582).
cagacgcttacaggaaaaa

SEQ ID NO: 479226 - DNA, 19 bp, Mus musculus
  siRNA target sequence for 2810406K24Rik (NM_175126.3,566-584).
gacgcttacaggaaaaaga

SEQ ID NO: 479227 - DNA, 19 bp, Mus musculus
  siRNA target sequence for 2810406K24Rik (NM_175126.3,870-888).
gcgagttcgacgtgagttt

SEQ ID NO: 479228 - DNA, 19 bp, Mus musculus
  siRNA target sequence for 2810406K24Rik (NM_175126.3,889-907).
ccgatccgccgaaaagcta

SEQ ID NO: 479229 - DNA, 19 bp, Mus musculus
  siRNA target sequence for 2810406K24Rik (NM_175126.3,1237-1255).
caagacgtgctttaagtgt

SEQ ID NO: 479230 - DNA, 19 bp, Mus musculus
  siRNA target sequence for 2810411A03Rik (NM_173376.1,212-230).
gcacagcgcctggatcttt

SEQ ID NO: 479231 - DNA, 19 bp, Mus musculus
  siRNA target sequence for 2810411A03Rik (NM_173376.1,283-301).
cacaatatggggagattgt

SEQ ID NO: 479232 - DNA, 19 bp, Mus musculus
  siRNA target sequence for 2810411A03Rik (NM_173376.1,285-303).
caatatggggagattgtca

SEQ ID NO: 479233 - DNA, 19 bp, Mus musculus
  siRNA target sequence for 2810411A03Rik (NM_173376.1,335-353).
gaaatccaaaggattctgt

SEQ ID NO: 479234 - DNA, 19 bp, Mus musculus
  siRNA target sequence for 2810411A03Rik (NM_173376.1,382-400).
cagttctggctgttgacaa

SEQ ID NO: 479235 - DNA, 19 bp, Mus musculus
  siRNA target sequence for 2810411A03Rik (NM_173376.1,389-407).
ggctgttgacaatttcaat

SEQ ID NO: 479236 - DNA, 19 bp, Mus musculus
  siRNA target sequence for 2810411A03Rik (NM_173376.1,436-454).
gtgtggaccatgtgtcaaa

SEQ ID NO: 479237 - DNA, 19 bp, Mus musculus
  siRNA target sequence for 2810411A03Rik (NM_173376.1,574-592).
ccaagctcacaaaaaagca

SEQ ID NO: 479238 - DNA, 19 bp, Mus musculus
  siRNA target sequence for 2810411A03Rik (NM_173376.1,975-993).
gggcggagccatagaagta

SEQ ID NO: 479239 - DNA, 19 bp, Mus musculus
  siRNA target sequence for 2810411A03Rik (NM_173376.1,977-995).
gcggagccatagaagtaga

SEQ ID NO: 479240 - DNA, 19 bp, Mus musculus
  siRNA target sequence for 2810411A03Rik (NM_173376.1,978-996).
cggagccatagaagtagaa

SEQ ID NO: 479241 - DNA, 19 bp, Mus musculus
  siRNA target sequence for 2810411A03Rik (NM_173376.1,1000-1018).
ggagtaggagtccagataa

SEQ ID NO: 479242 - DNA, 19 bp, Mus musculus
  siRNA target sequence for 2810428C21Rik (NM_153503.1,496-514).
gatctatcggggaatcaat

SEQ ID NO: 479243 - DNA, 19 bp, Mus musculus
  siRNA target sequence for 2810428C21Rik (NM_153503.1,504-522).
ggggaatcaataattatca

SEQ ID NO: 479244 - DNA, 19 bp, Mus musculus
  siRNA target sequence for 2810428C21Rik (NM_153503.1,757-775).
gggtcgctatggtgtctat

SEQ ID NO: 479245 - DNA, 19 bp, Mus musculus
  siRNA target sequence for 2810428C21Rik (NM_153503.1,759-777).
gtcgctatggtgtctatga

SEQ ID NO: 479246 - DNA, 19 bp, Mus musculus
  siRNA target sequence for 2810428C21Rik (NM_153503.1,841-859).
ccagaccttccaaaatcca

SEQ ID NO: 479247 - DNA, 19 bp, Mus musculus
  siRNA target sequence for 2810428C21Rik (NM_153503.1,947-965).
cagaccaatggcgtcttta

SEQ ID NO: 479248 - DNA, 19 bp, Mus musculus
  siRNA target sequence for 2810428C21Rik (NM_153503.1,949-967).
gaccaatggcgtctttaat

SEQ ID NO: 479249 - DNA, 19 bp, Mus musculus
  siRNA target sequence for 2810428C21Rik (NM_153503.1,1051-1069).
ggagagtccagtttccatt

SEQ ID NO: 479250 - DNA, 19 bp, Mus musculus
  siRNA target sequence for 2810428C21Rik (NM_153503.1,1052-1070).
gagagtccagtttccatta

SEQ ID NO: 479251 - DNA, 19 bp, Mus musculus
  siRNA target sequence for 2810441O16Rik (NM_026043.2,188-206).
gagaaggaggacttactga

SEQ ID NO: 479252 - DNA, 19 bp, Mus musculus
  siRNA target sequence for 2810441O16Rik (NM_026043.2,227-245).
gtgcgcgtcctgtcagata

SEQ ID NO: 479253 - DNA, 19 bp, Mus musculus
  siRNA target sequence for 2810441O16Rik (NM_026043.2,319-337).
ccatcagctgaaacttcta

SEQ ID NO: 479254 - DNA, 19 bp, Mus musculus
  siRNA target sequence for 2810441O16Rik (NM_026043.2,328-346).
gaaacttctaggtcatact

SEQ ID NO: 479255 - DNA, 19 bp, Mus musculus
  siRNA target sequence for 2810441O16Rik (NM_026043.2,393-411).
gttccacctcaaatacaga

SEQ ID NO: 479256 - DNA, 19 bp, Mus musculus
  siRNA target sequence for 2810441O16Rik (NM_026043.2,523-541).
gaattcatgccttaaatat

SEQ ID NO: 479257 - DNA, 19 bp, Mus musculus
  siRNA target sequence for 2810441O16Rik (NM_026043.2,561-579).
gcacaatcctcgcaaatat

SEQ ID NO: 479258 - DNA, 19 bp, Mus musculus
  siRNA target sequence for 2810441O16Rik (NM_026043.2,562-580).
cacaatcctcgcaaatata

SEQ ID NO: 479259 - DNA, 19 bp, Mus musculus
  siRNA target sequence for 2810441O16Rik (NM_026043.2,564-582).
caatcctcgcaaatatagt

SEQ ID NO: 479260 - DNA, 19 bp, Mus musculus
  siRNA target sequence for 2810441O16Rik (NM_026043.2,568-586).
cctcgcaaatatagtaaat

SEQ ID NO: 479261 - DNA, 19 bp, Mus musculus
  siRNA target sequence for 2810441O16Rik (NM_026043.2,571-589).
cgcaaatatagtaaatgct

SEQ ID NO: 479262 - DNA, 19 bp, Mus musculus
  siRNA target sequence for 2810441O16Rik (NM_026043.2,614-632).
gtacaggtgcttcatctta

SEQ ID NO: 479263 - DNA, 19 bp, Mus musculus
  siRNA target sequence for 2810441O16Rik (NM_026043.2,617-635).
caggtgcttcatcttatga

SEQ ID NO: 479264 - DNA, 19 bp, Mus musculus
  siRNA target sequence for 2810441O16Rik (NM_026043.2,619-637).
ggtgcttcatcttatgaat

SEQ ID NO: 479265 - DNA, 19 bp, Mus musculus
  siRNA target sequence for 2810441O16Rik (NM_026043.2,620-638).
gtgcttcatcttatgaata

SEQ ID NO: 479266 - DNA, 19 bp, Mus musculus
  siRNA target sequence for 2810441O16Rik (NM_026043.2,643-661).
gaatttgcccacaccattt

SEQ ID NO: 479267 - DNA, 19 bp, Mus musculus
  siRNA target sequence for 2810441O16Rik (NM_026043.2,672-690).
ctgcacgacctcctatgta

SEQ ID NO: 479268 - DNA, 19 bp, Mus musculus
  siRNA target sequence for 2810441O16Rik (NM_026043.2,675-693).
cacgacctcctatgtatga

SEQ ID NO: 479269 - DNA, 19 bp, Mus musculus
  siRNA target sequence for 2810441O16Rik (NM_026043.2,694-712).
ggactatatgccattgcat

SEQ ID NO: 479270 - DNA, 19 bp, Mus musculus
  siRNA target sequence for 2810441O16Rik (NM_026043.2,775-793).
ggatttatctagcaaagaa

SEQ ID NO: 479271 - DNA, 19 bp, Mus musculus
  siRNA target sequence for 2810441O16Rik (NM_026043.2,818-836).
gaggaccgacagagaatga

SEQ ID NO: 479272 - DNA, 19 bp, Mus musculus
  siRNA target sequence for 2810441O16Rik (NM_026043.2,889-907).
gccacgccacgtgagaaaa

SEQ ID NO: 479273 - DNA, 19 bp, Mus musculus
  siRNA target sequence for 2810441O16Rik (NM_026043.2,973-991).
gttaccttcggatgtattt

SEQ ID NO: 479274 - DNA, 19 bp, Mus musculus
  siRNA target sequence for 2810441O16Rik (NM_026043.2,997-1015).
gccacaatctgtaggtaat

SEQ ID NO: 479275 - DNA, 19 bp, Mus musculus
  siRNA target sequence for 2810441O16Rik (NM_026043.2,998-1016).
ccacaatctgtaggtaata

SEQ ID NO: 479276 - DNA, 19 bp, Mus musculus
  siRNA target sequence for 2810441O16Rik (NM_026043.2,999-1017).
cacaatctgtaggtaataa

SEQ ID NO: 479277 - DNA, 19 bp, Mus musculus
  siRNA target sequence for 2810441O16Rik (NM_026043.2,1157-1175).
cctaaacctaatttgaaca

SEQ ID NO: 479278 - DNA, 19 bp, Mus musculus
  siRNA target sequence for 2810441O16Rik (NM_026043.2,1158-1176).
ctaaacctaatttgaacat

SEQ ID NO: 479279 - DNA, 19 bp, Mus musculus
  siRNA target sequence for 2810441O16Rik (NM_026043.2,1202-1220).
gatgaaataccttcacaat

SEQ ID NO: 479280 - DNA, 19 bp, Mus musculus
  siRNA target sequence for 2810441O16Rik (NM_026043.2,1215-1233).
cacaatttatttctagaaa

SEQ ID NO: 479281 - DNA, 19 bp, Mus musculus
  siRNA target sequence for 2810441O16Rik (NM_026043.2,1237-1255).
gttggaaaagggtcgtatt

SEQ ID NO: 479282 - DNA, 19 bp, Mus musculus
  siRNA target sequence for 2810441O16Rik (NM_026043.2,1240-1258).
ggaaaagggtcgtatttct

SEQ ID NO: 479283 - DNA, 19 bp, Mus musculus
  siRNA target sequence for 2810441O16Rik (NM_026043.2,1241-1259).
gaaaagggtcgtatttcta

SEQ ID NO: 479284 - DNA, 19 bp, Mus musculus
  siRNA target sequence for 2810441O16Rik (NM_026043.2,1246-1264).
gggtcgtatttctagagaa

SEQ ID NO: 479285 - DNA, 19 bp, Mus musculus
  siRNA target sequence for 2810441O16Rik (NM_026043.2,1250-1268).
cgtatttctagagaagaaa

SEQ ID NO: 479286 - DNA, 19 bp, Mus musculus
  siRNA target sequence for 2810441O16Rik (NM_026043.2,1307-1325).
gaaccaaactgcagaattt

SEQ ID NO: 479287 - DNA, 19 bp, Mus musculus
  siRNA target sequence for 2810441O16Rik (NM_026043.2,1318-1336).
cagaatttatgtaaagaat

SEQ ID NO: 479288 - DNA, 19 bp, Mus musculus
  siRNA target sequence for 2810441O16Rik (NM_026043.2,1333-1351).
gaatttagctagacatgtt

SEQ ID NO: 479289 - DNA, 19 bp, Mus musculus
  siRNA target sequence for 2810441O16Rik (NM_026043.2,1341-1359).
ctagacatgttcaggaaaa

SEQ ID NO: 479290 - DNA, 19 bp, Mus musculus
  siRNA target sequence for 2810441O16Rik (NM_026043.2,1360-1378).
ggaccttaaatttatattt

SEQ ID NO: 479291 - DNA, 19 bp, Mus musculus
  siRNA target sequence for 2810441O16Rik (NM_026043.2,1403-1421).
gaaacacagcggatcatgt

SEQ ID NO: 479292 - DNA, 19 bp, Mus musculus
  siRNA target sequence for 2810441O16Rik (NM_026043.2,1409-1427).
cagcggatcatgtttgata

SEQ ID NO: 479293 - DNA, 19 bp, Mus musculus
  siRNA target sequence for 2810441O16Rik (NM_026043.2,1453-1471).
gaaaggacaagcttttgtt

SEQ ID NO: 479294 - DNA, 19 bp, Mus musculus
  siRNA target sequence for 2810441O16Rik (NM_026043.2,1494-1512).
ccgctaaagcgttgaaaga

SEQ ID NO: 479295 - DNA, 19 bp, Mus musculus
  siRNA target sequence for 2810441O16Rik (NM_026043.2,1495-1513).
cgctaaagcgttgaaagaa

SEQ ID NO: 479296 - DNA, 19 bp, Mus musculus
  siRNA target sequence for 2810441O16Rik (NM_026043.2,1563-1581).
gatctgctagaccaaaaca

SEQ ID NO: 479297 - DNA, 19 bp, Mus musculus
  siRNA target sequence for 2810441O16Rik (NM_026043.2,1575-1593).
caaaacaggattctaaaga

SEQ ID NO: 479298 - DNA, 19 bp, Mus musculus
  siRNA target sequence for 2810457M08Rik (NM_172284.1,119-137).
gccgcagctgagtctttga

SEQ ID NO: 479299 - DNA, 19 bp, Mus musculus
  siRNA target sequence for 2810457M08Rik (NM_172284.1,176-194).
gccaatggtgctgttgtta

SEQ ID NO: 479300 - DNA, 19 bp, Mus musculus
  siRNA target sequence for 2810457M08Rik (NM_172284.1,177-195).
ccaatggtgctgttgttaa

SEQ ID NO: 479301 - DNA, 19 bp, Mus musculus
  siRNA target sequence for 2810457M08Rik (NM_172284.1,188-206).
gttgttaagaccaatgcaa

SEQ ID NO: 479302 - DNA, 19 bp, Mus musculus
  siRNA target sequence for 2810457M08Rik (NM_172284.1,386-404).
ctccagggagtctatgcta

SEQ ID NO: 479303 - DNA, 19 bp, Mus musculus
  siRNA target sequence for 2810457M08Rik (NM_172284.1,412-430).
caaccgcccttccaaaata

SEQ ID NO: 479304 - DNA, 19 bp, Mus musculus
  siRNA target sequence for 2810457M08Rik (NM_172284.1,542-560).
gtagagcctgcaaacaagt

SEQ ID NO: 479305 - DNA, 19 bp, Mus musculus
  siRNA target sequence for 2810480G15Rik (NM_026650.1,447-465).
gcgaggtcctccaacagtt

SEQ ID NO: 479306 - DNA, 19 bp, Mus musculus
  siRNA target sequence for 2810480G15Rik (NM_026650.1,448-466).
cgaggtcctccaacagttt

SEQ ID NO: 479307 - DNA, 19 bp, Mus musculus
  siRNA target sequence for 2810480G15Rik (NM_026650.1,505-523).
cacagagcattctaaaggt

SEQ ID NO: 479308 - DNA, 19 bp, Mus musculus
  siRNA target sequence for 2810480G15Rik (NM_026650.1,522-540).
gttgtgcattcgcacaatt

SEQ ID NO: 479309 - DNA, 19 bp, Mus musculus
  siRNA target sequence for 2810480G15Rik (NM_026650.1,525-543).
gtgcattcgcacaattcat

SEQ ID NO: 479310 - DNA, 19 bp, Mus musculus
  siRNA target sequence for 2810480G15Rik (NM_026650.1,699-717).
gaacccggaacctctatct

SEQ ID NO: 479311 - DNA, 19 bp, Mus musculus
  siRNA target sequence for 2810480G15Rik (NM_026650.1,762-780).
gtgtgagtgccgcagatat

SEQ ID NO: 479312 - DNA, 19 bp, Mus musculus
  siRNA target sequence for 2810480G15Rik (NM_026650.1,793-811).
gcggtttgagctactgaaa

SEQ ID NO: 479313 - DNA, 19 bp, Mus musculus
  siRNA target sequence for 2810480G15Rik (NM_026650.1,1056-1074).
gagccctccgccacttcaa

SEQ ID NO: 479314 - DNA, 19 bp, Mus musculus
  siRNA target sequence for 2810480G15Rik (NM_026650.1,1061-1079).
ctccgccacttcaacaaca

SEQ ID NO: 479315 - DNA, 19 bp, Mus musculus
  siRNA target sequence for 2810480G15Rik (NM_026650.1,1130-1148).
gaagaccgaaggaaactta

SEQ ID NO: 479316 - DNA, 19 bp, Mus musculus
  siRNA target sequence for 2810480G15Rik (NM_026650.1,1168-1186).
ccaacgcagcctgcaaaaa

SEQ ID NO: 479317 - DNA, 19 bp, Mus musculus
  siRNA target sequence for 2810480G15Rik (NM_026650.1,1373-1391).
ctgcctgacgggaagaaga

SEQ ID NO: 479318 - DNA, 19 bp, Mus musculus
  siRNA target sequence for 2810480G15Rik (NM_026650.1,1416-1434).
cacaccgaggccccaaaat

SEQ ID NO: 479319 - DNA, 19 bp, Mus musculus
  siRNA target sequence for 2810480G15Rik (NM_026650.1,1418-1436).
caccgaggccccaaaatta

SEQ ID NO: 479320 - DNA, 19 bp, Mus musculus
  siRNA target sequence for 2810480G15Rik (NM_026650.1,1534-1552).
cgtgcaggcgcctaaaaga

SEQ ID NO: 479321 - DNA, 19 bp, Mus musculus
  siRNA target sequence for 2810480G15Rik (NM_026650.1,1551-1569).
gaaaggctaaggagaataa

SEQ ID NO: 479322 - DNA, 19 bp, Mus musculus
  siRNA target sequence for 2810480G15Rik (NM_026650.1,1615-1633).
gttgctgggcccttctaaa

SEQ ID NO: 479323 - DNA, 19 bp, Mus musculus
  siRNA target sequence for 2810480G15Rik (NM_026650.1,1618-1636).
gctgggcccttctaaagga

SEQ ID NO: 479324 - DNA, 19 bp, Mus musculus
  siRNA target sequence for 2810480G15Rik (NM_026650.1,1648-1666).
gaagagaagcaaatggttt

SEQ ID NO: 479325 - DNA, 19 bp, Mus musculus
  siRNA target sequence for 2810480G15Rik (NM_133925.1,58-76).
gtggcaaaggacaaataca

SEQ ID NO: 479326 - DNA, 19 bp, Mus musculus
  siRNA target sequence for 2810480G15Rik (NM_133925.1,60-78).
ggcaaaggacaaatacaaa

SEQ ID NO: 479327 - DNA, 19 bp, Mus musculus
  siRNA target sequence for 2810480G15Rik (NM_133925.1,95-113).
ctgccccaggtgtaaagaa

SEQ ID NO: 479328 - DNA, 19 bp, Mus musculus
  siRNA target sequence for 2810480G15Rik (NM_133925.1,136-154).
gaatcaggtaagaagaact

SEQ ID NO: 479329 - DNA, 19 bp, Mus musculus
  siRNA target sequence for 2810480G15Rik (NM_133925.1,874-892).
ctgaaacatcagaaactca

SEQ ID NO: 479330 - DNA, 19 bp, Mus musculus
  siRNA target sequence for 2900057C04Rik (NM_146221.2,506-524).
gccttcaggaacgaaaaat

SEQ ID NO: 479331 - DNA, 19 bp, Mus musculus
  siRNA target sequence for 2900057C04Rik (NM_146221.2,725-743).
cttggttggaacaagaaga

SEQ ID NO: 479332 - DNA, 19 bp, Mus musculus
  siRNA target sequence for 2900057C04Rik (NM_146221.2,806-824).
cagcgttccagcaggaatt

SEQ ID NO: 479333 - DNA, 19 bp, Mus musculus
  siRNA target sequence for 2900057C04Rik (NM_146221.2,826-844).
ctgaggggtaacatatcca

SEQ ID NO: 479334 - DNA, 19 bp, Mus musculus
  siRNA target sequence for 2900057C04Rik (NM_146221.2,833-851).
gtaacatatccagtagaat

SEQ ID NO: 479335 - DNA, 19 bp, Mus musculus
  siRNA target sequence for 2900057C04Rik (NM_146221.2,899-917).
cgcaatatggagacttctt

SEQ ID NO: 479336 - DNA, 19 bp, Mus musculus
  siRNA target sequence for 2900057C04Rik (NM_146221.2,931-949).
cccctcaggacagatatga

SEQ ID NO: 479337 - DNA, 19 bp, Mus musculus
  siRNA target sequence for 2900057C04Rik (NM_146221.2,938-956).
ggacagatatgaaaactca

SEQ ID NO: 479338 - DNA, 19 bp, Mus musculus
  siRNA target sequence for 2900057C04Rik (NM_146221.2,953-971).
ctcaacctgcacaggataa

SEQ ID NO: 479339 - DNA, 19 bp, Mus musculus
  siRNA target sequence for 2900057C04Rik (NM_146221.2,961-979).
gcacaggataattatggtt

SEQ ID NO: 479340 - DNA, 19 bp, Mus musculus
  siRNA target sequence for 2900057C04Rik (NM_146221.2,966-984).
ggataattatggttgtagt

SEQ ID NO: 479341 - DNA, 19 bp, Mus musculus
  siRNA target sequence for 2900057C04Rik (NM_146221.2,976-994).
ggttgtagtcagtacagaa

SEQ ID NO: 479342 - DNA, 19 bp, Mus musculus
  siRNA target sequence for 2900057C04Rik (NM_146221.2,977-995).
gttgtagtcagtacagaaa

SEQ ID NO: 479343 - DNA, 19 bp, Mus musculus
  siRNA target sequence for 2900057C04Rik (NM_146221.2,1067-1085).
ccggcatgaccccagttaa

SEQ ID NO: 479344 - DNA, 19 bp, Mus musculus
  siRNA target sequence for 2900057C04Rik (NM_146221.2,1068-1086).
cggcatgaccccagttaaa

SEQ ID NO: 479345 - DNA, 19 bp, Mus musculus
  siRNA target sequence for 2900057C04Rik (NM_146221.2,1070-1088).
gcatgaccccagttaaaga

SEQ ID NO: 479346 - DNA, 19 bp, Mus musculus
  siRNA target sequence for 2900057C04Rik (NM_146221.2,1212-1230).
gtgtgggagaagttttata

SEQ ID NO: 479347 - DNA, 19 bp, Mus musculus
  siRNA target sequence for 2900057C04Rik (NM_146221.2,1248-1266).
gcttatagaaactctcaat

SEQ ID NO: 479348 - DNA, 19 bp, Mus musculus
  siRNA target sequence for 2900057C04Rik (NM_146221.2,1295-1313).
gtgggaaaggctatcgata

SEQ ID NO: 479349 - DNA, 19 bp, Mus musculus
  siRNA target sequence for 2900057C04Rik (NM_146221.2,1299-1317).
gaaaggctatcgatatcct

SEQ ID NO: 479350 - DNA, 19 bp, Mus musculus
  siRNA target sequence for 2900057C04Rik (NM_146221.2,1305-1323).
ctatcgatatcctgcatat

SEQ ID NO: 479351 - DNA, 19 bp, Mus musculus
  siRNA target sequence for 2900057C04Rik (NM_146221.2,1316-1334).
ctgcatatctaaatattca

SEQ ID NO: 479352 - DNA, 19 bp, Mus musculus
  siRNA target sequence for 2900057C04Rik (NM_146221.2,1318-1336).
gcatatctaaatattcaca

SEQ ID NO: 479353 - DNA, 19 bp, Mus musculus
  siRNA target sequence for 2900057C04Rik (NM_146221.2,1387-1405).
gccttcaattattccaatt

SEQ ID NO: 479354 - DNA, 19 bp, Mus musculus
  siRNA target sequence for 2900057C04Rik (NM_146221.2,1389-1407).
cttcaattattccaattca

SEQ ID NO: 479355 - DNA, 19 bp, Mus musculus
  siRNA target sequence for 2900057C04Rik (NM_146221.2,1489-1507).
ggtcttagtatccatgtaa

SEQ ID NO: 479356 - DNA, 19 bp, Mus musculus
  siRNA target sequence for 2900057C04Rik (NM_146221.2,1571-1589).
ctcgactgatccaacatat

SEQ ID NO: 479357 - DNA, 19 bp, Mus musculus
  siRNA target sequence for 2900057C04Rik (NM_146221.2,1573-1591).
cgactgatccaacatataa

SEQ ID NO: 479358 - DNA, 19 bp, Mus musculus
  siRNA target sequence for 2900057C04Rik (NM_146221.2,1578-1596).
gatccaacatataagaact

SEQ ID NO: 479359 - DNA, 19 bp, Mus musculus
  siRNA target sequence for 2900057C04Rik (NM_146221.2,1719-1737).
gaaagcatttggatatctt

SEQ ID NO: 479360 - DNA, 19 bp, Mus musculus
  siRNA target sequence for 2900057C04Rik (NM_146221.2,1729-1747).
ggatatctttcatgtctta

SEQ ID NO: 479361 - DNA, 19 bp, Mus musculus
  siRNA target sequence for 2900057C04Rik (NM_146221.2,1758-1776).
gagaactcacaatgctaaa

SEQ ID NO: 479362 - DNA, 19 bp, Mus musculus
  siRNA target sequence for 2900057C04Rik (NM_146221.2,1900-1918).
cactccacttcatttcaga

SEQ ID NO: 479363 - DNA, 19 bp, Mus musculus
  siRNA target sequence for 2900057C04Rik (NM_146221.2,2070-2088).
cagtcatcctcgttcactt

SEQ ID NO: 479364 - DNA, 19 bp, Mus musculus
  siRNA target sequence for 3000004N20Rik (NM_028226.1,2121-2139).
cctctggaggattggaaat

SEQ ID NO: 479365 - DNA, 19 bp, Mus musculus
  siRNA target sequence for 3000004N20Rik (NM_028226.1,2573-2591).
gtataaatttggaagtttt

SEQ ID NO: 479366 - DNA, 19 bp, Mus musculus
  siRNA target sequence for 3000004N20Rik (NM_028226.1,2587-2605).
gttttcctgatgcaaaagt

SEQ ID NO: 479367 - DNA, 19 bp, Mus musculus
  siRNA target sequence for 3000004N20Rik (NM_028226.1,2604-2622).
gttacctctgatctaaatt

SEQ ID NO: 479368 - DNA, 19 bp, Mus musculus
  siRNA target sequence for 3000004N20Rik (NM_028226.1,2629-2647).
gtgtttcagataaaataat

SEQ ID NO: 479369 - DNA, 19 bp, Mus musculus
  siRNA target sequence for 3000004N20Rik (NM_028226.1,2756-2774).
gcaaggattacctatagga

SEQ ID NO: 479370 - DNA, 19 bp, Mus musculus
  siRNA target sequence for 3100004P22Rik (NM_133693.1,187-205).
cggcgaggaacgcttgaaa

SEQ ID NO: 479371 - DNA, 19 bp, Mus musculus
  siRNA target sequence for 3100004P22Rik (NM_133693.1,189-207).
gcgaggaacgcttgaaaga

SEQ ID NO: 479372 - DNA, 19 bp, Mus musculus
  siRNA target sequence for 3100004P22Rik (NM_133693.1,190-208).
cgaggaacgcttgaaagaa

SEQ ID NO: 479373 - DNA, 19 bp, Mus musculus
  siRNA target sequence for 3100004P22Rik (NM_133693.1,726-744).
gaccacccctgggttctat

SEQ ID NO: 479374 - DNA, 19 bp, Mus musculus
  siRNA target sequence for 3100004P22Rik (NM_133693.1,1009-1027).
gcctccgctgagaattcct

SEQ ID NO: 479375 - DNA, 19 bp, Mus musculus
  siRNA target sequence for 3100004P22Rik (NM_133693.1,1217-1235).
gatgacttccggatcttct

SEQ ID NO: 479376 - DNA, 19 bp, Mus musculus
  siRNA target sequence for 3100004P22Rik (NM_133693.1,1393-1411).
cgccatgcgagagatgaat

SEQ ID NO: 479377 - DNA, 19 bp, Mus musculus
  siRNA target sequence for 3110031B13Rik (NM_026075.1,205-223).
ctttcgagtgccgcaattt

SEQ ID NO: 479378 - DNA, 19 bp, Mus musculus
  siRNA target sequence for 3110031B13Rik (NM_026075.1,371-389).
gagcagggagaaaattaaa

SEQ ID NO: 479379 - DNA, 19 bp, Mus musculus
  siRNA target sequence for 3110031B13Rik (NM_026075.1,432-450).
gaggactccgcaaaacaaa

SEQ ID NO: 479380 - DNA, 19 bp, Mus musculus
  siRNA target sequence for 3110031B13Rik (NM_026075.1,435-453).
gactccgcaaaacaaaaga

SEQ ID NO: 479381 - DNA, 19 bp, Mus musculus
  siRNA target sequence for 3110031B13Rik (NM_026075.1,554-572).
gcgttcttccccttaccat

SEQ ID NO: 479382 - DNA, 19 bp, Mus musculus
  siRNA target sequence for 3110050K21Rik (NM_026083.1,142-160).
ccgaagacctagcgtattt

SEQ ID NO: 479383 - DNA, 19 bp, Mus musculus
  siRNA target sequence for 3110050K21Rik (NM_026083.1,144-162).
gaagacctagcgtatttga

SEQ ID NO: 479384 - DNA, 19 bp, Mus musculus
  siRNA target sequence for 3110050K21Rik (NM_026083.1,233-251).
ctctatggaaacacatgta

SEQ ID NO: 479385 - DNA, 19 bp, Mus musculus
  siRNA target sequence for 3110050K21Rik (NM_026083.1,402-420).
catcctcacctgttaggaa

SEQ ID NO: 479386 - DNA, 19 bp, Mus musculus
  siRNA target sequence for 3110050K21Rik (NM_026083.1,406-424).
ctcacctgttaggaaagaa

SEQ ID NO: 479387 - DNA, 19 bp, Mus musculus
  siRNA target sequence for 3110050K21Rik (NM_026083.1,451-469).
ggaagacataaaaattgtt

SEQ ID NO: 479388 - DNA, 19 bp, Mus musculus
  siRNA target sequence for 3110050K21Rik (NM_026083.1,531-549).
ctgacaatggagatattaa

SEQ ID NO: 479389 - DNA, 19 bp, Mus musculus
  siRNA target sequence for 3110050K21Rik (NM_026083.1,533-551).
gacaatggagatattaatt

SEQ ID NO: 479390 - DNA, 19 bp, Mus musculus
  siRNA target sequence for 3110050K21Rik (NM_026083.1,677-695).
gaagtggttagatcaaaat

SEQ ID NO: 479391 - DNA, 19 bp, Mus musculus
  siRNA target sequence for 3110050K21Rik (NM_026083.1,682-700).
ggttagatcaaaattgtct

SEQ ID NO: 479392 - DNA, 19 bp, Mus musculus
  siRNA target sequence for 3110050K21Rik (NM_026083.1,713-731).
ctgagaaagtccagtaaat

SEQ ID NO: 479393 - DNA, 19 bp, Mus musculus
  siRNA target sequence for 3110050K21Rik (NM_026083.1,831-849).
caaagggcaaccaaagtaa

SEQ ID NO: 479394 - DNA, 19 bp, Mus musculus
  siRNA target sequence for 3110050K21Rik (NM_026083.1,836-854).
ggcaaccaaagtaaaaaga

SEQ ID NO: 479395 - DNA, 19 bp, Mus musculus
  siRNA target sequence for 3110050K21Rik (NM_026083.1,837-855).
gcaaccaaagtaaaaagaa

SEQ ID NO: 479396 - DNA, 19 bp, Mus musculus
  siRNA target sequence for 3110050K21Rik (NM_026083.1,873-891).
gtccacctcctcctatact

SEQ ID NO: 479397 - DNA, 19 bp, Mus musculus
  siRNA target sequence for 3110050K21Rik (NM_026083.1,879-897).
ctcctcctatactagaaga

SEQ ID NO: 479398 - DNA, 19 bp, Mus musculus
  siRNA target sequence for 3110050K21Rik (NM_026083.1,884-902).
cctatactagaagatatca

SEQ ID NO: 479399 - DNA, 19 bp, Mus musculus
  siRNA target sequence for 3110050K21Rik (NM_026083.1,1252-1270).
ctctccaatgcgagagaaa

SEQ ID NO: 479400 - DNA, 19 bp, Mus musculus
  siRNA target sequence for 3300002I08Rik (NM_027017.1,442-460).
gctaccttgttgcaacttt

SEQ ID NO: 479401 - DNA, 19 bp, Mus musculus
  siRNA target sequence for 3300002I08Rik (NM_027017.1,513-531).
cctcaatcaaggtccataa

SEQ ID NO: 479402 - DNA, 19 bp, Mus musculus
  siRNA target sequence for 3300002I08Rik (NM_027017.1,516-534).
caatcaaggtccataactt

SEQ ID NO: 479403 - DNA, 19 bp, Mus musculus
  siRNA target sequence for 4631426G04Rik (NM_178404.2,128-146).
gttatgactcaggagttta

SEQ ID NO: 479404 - DNA, 19 bp, Mus musculus
  siRNA target sequence for 4631426G04Rik (NM_178404.2,197-215).
ctggaagggagatgtatta

SEQ ID NO: 479405 - DNA, 19 bp, Mus musculus
  siRNA target sequence for 4631426G04Rik (NM_178404.2,265-283).
ggaggtctgcaaatattat

SEQ ID NO: 479406 - DNA, 19 bp, Mus musculus
  siRNA target sequence for 4631426G04Rik (NM_178404.2,305-323).
ggagagaactgcatttaca

SEQ ID NO: 479407 - DNA, 19 bp, Mus musculus
  siRNA target sequence for 4631426G04Rik (NM_178404.2,306-324).
gagagaactgcatttacat

SEQ ID NO: 479408 - DNA, 19 bp, Mus musculus
  siRNA target sequence for 4631426G04Rik (NM_178404.2,322-340).
catgcatagtgaatttcct

SEQ ID NO: 479409 - DNA, 19 bp, Mus musculus
  siRNA target sequence for 4631426G04Rik (NM_178404.2,396-414).
cccatgatgatctgactaa

SEQ ID NO: 479410 - DNA, 19 bp, Mus musculus
  siRNA target sequence for 4631426G04Rik (NM_178404.2,445-463).
gaatgcggatgaagaactt

SEQ ID NO: 479411 - DNA, 19 bp, Mus musculus
  siRNA target sequence for 4631426G04Rik (NM_178404.2,450-468).
cggatgaagaacttgtaaa

SEQ ID NO: 479412 - DNA, 19 bp, Mus musculus
  siRNA target sequence for 4631426G04Rik (NM_178404.2,552-570).
cgaccccatcagagcattt

SEQ ID NO: 479413 - DNA, 19 bp, Mus musculus
  siRNA target sequence for 4631426G04Rik (NM_178404.2,553-571).
gaccccatcagagcatttt

SEQ ID NO: 479414 - DNA, 19 bp, Mus musculus
  siRNA target sequence for 4631426G04Rik (NM_178404.2,593-611).
gattttgagacggatcttt

SEQ ID NO: 479415 - DNA, 19 bp, Mus musculus
  siRNA target sequence for 4631426G04Rik (NM_178404.2,603-621).
cggatctttctgatgatat

SEQ ID NO: 479416 - DNA, 19 bp, Mus musculus
  siRNA target sequence for 4631426G04Rik (NM_178404.2,605-623).
gatctttctgatgatatga

SEQ ID NO: 479417 - DNA, 19 bp, Mus musculus
  siRNA target sequence for 4631426G04Rik (NM_178404.2,617-635).
gatatgaagaaaattccat

SEQ ID NO: 479418 - DNA, 19 bp, Mus musculus
  siRNA target sequence for 4631426G04Rik (NM_178404.2,907-925).
gctacccagttcatctgaa

SEQ ID NO: 479419 - DNA, 19 bp, Mus musculus
  siRNA target sequence for 4631426G04Rik (NM_178404.2,908-926).
ctacccagttcatctgaaa

SEQ ID NO: 479420 - DNA, 19 bp, Mus musculus
  siRNA target sequence for 4631426G04Rik (NM_178404.2,913-931).
cagttcatctgaaattgta

SEQ ID NO: 479421 - DNA, 19 bp, Mus musculus
  siRNA target sequence for 4631426G04Rik (NM_178404.2,982-1000).
catgggtggagcttaccat

SEQ ID NO: 479422 - DNA, 19 bp, Mus musculus
  siRNA target sequence for 4631426G04Rik (NM_178404.2,1332-1350).
cagtgcagagagctctttt

SEQ ID NO: 479423 - DNA, 19 bp, Mus musculus
  siRNA target sequence for 4631426G04Rik (NM_178404.2,1357-1375).
gttgactcagagataccaa

SEQ ID NO: 479424 - DNA, 19 bp, Mus musculus
  siRNA target sequence for 4631426G04Rik (NM_178404.2,1420-1438).
caaggaagaagatgataca

SEQ ID NO: 479425 - DNA, 19 bp, Mus musculus
  siRNA target sequence for 4631426G04Rik (NM_178404.2,1473-1491).
gaagtggtgtcaagtcaat

SEQ ID NO: 479426 - DNA, 19 bp, Mus musculus
  siRNA target sequence for 4631426G04Rik (NM_178404.2,1486-1504).
gtcaatactgaggacatta

SEQ ID NO: 479427 - DNA, 19 bp, Mus musculus
  siRNA target sequence for 4631426G04Rik (NM_178404.2,1571-1589).
ccaagactcgctaaagaga

SEQ ID NO: 479428 - DNA, 19 bp, Mus musculus
  siRNA target sequence for 4631426G04Rik (NM_178404.2,1572-1590).
caagactcgctaaagagaa

SEQ ID NO: 479429 - DNA, 19 bp, Mus musculus
  siRNA target sequence for 4631426G04Rik (NM_178404.2,1690-1708).
gtgggaccccaagaaatta

SEQ ID NO: 479430 - DNA, 19 bp, Mus musculus
  siRNA target sequence for 4631426G04Rik (NM_178404.2,1743-1761).
ctaggggagcagagtttga

SEQ ID NO: 479431 - DNA, 19 bp, Mus musculus
  siRNA target sequence for 4631426G04Rik (NM_178404.2,1756-1774).
gtttgacttacgtcataca

SEQ ID NO: 479432 - DNA, 19 bp, Mus musculus
  siRNA target sequence for 4631426G04Rik (NM_178404.2,1778-1796).
gctggtgcaaatcacaaat

SEQ ID NO: 479433 - DNA, 19 bp, Mus musculus
  siRNA target sequence for 4631426G04Rik (NM_178404.2,1781-1799).
ggtgcaaatcacaaatcca

SEQ ID NO: 479434 - DNA, 19 bp, Mus musculus
  siRNA target sequence for 4631426G04Rik (NM_178404.2,1782-1800).
gtgcaaatcacaaatccaa

SEQ ID NO: 479435 - DNA, 19 bp, Mus musculus
  siRNA target sequence for 4631426G04Rik (NM_178404.2,1842-1860).
gagaaaaggccttcttaat

SEQ ID NO: 479436 - DNA, 19 bp, Mus musculus
  siRNA target sequence for 4631426G04Rik (NM_178404.2,1894-1912).
ggatccaaggtcacagtta

SEQ ID NO: 479437 - DNA, 19 bp, Mus musculus
  siRNA target sequence for 4631426G04Rik (NM_178404.2,1916-1934).
caattcagtcatattaaaa

SEQ ID NO: 479438 - DNA, 19 bp, Mus musculus
  siRNA target sequence for 4631426G04Rik (NM_178404.2,1978-1996).
gtgggctccagaagactta

SEQ ID NO: 479439 - DNA, 19 bp, Mus musculus
  siRNA target sequence for 4631426G04Rik (NM_178404.2,1997-2015).
cttccagtacctttaccta

SEQ ID NO: 479440 - DNA, 19 bp, Mus musculus
  siRNA target sequence for 4631426G04Rik (NM_178404.2,2021-2039).
gatccagtatcttcaatca

SEQ ID NO: 479441 - DNA, 19 bp, Mus musculus
  siRNA target sequence for 4631426G04Rik (NM_178404.2,2024-2042).
ccagtatcttcaatcaact

SEQ ID NO: 479442 - DNA, 19 bp, Mus musculus
  siRNA target sequence for 4631426G04Rik (NM_178404.2,2073-2091).
ggctcaatagattatggaa

SEQ ID NO: 479443 - DNA, 19 bp, Mus musculus
  siRNA target sequence for 4631426G04Rik (NM_178404.2,2077-2095).
caatagattatggaataca

SEQ ID NO: 479444 - DNA, 19 bp, Mus musculus
  siRNA target sequence for 4631426G04Rik (NM_178404.2,2089-2107).
gaatacaaagagtgatcat

SEQ ID NO: 479445 - DNA, 19 bp, Mus musculus
  siRNA target sequence for 4631426G04Rik (NM_178404.2,2119-2137).
gagccttgatccaacatca

SEQ ID NO: 479446 - DNA, 19 bp, Mus musculus
  siRNA target sequence for 4631426G04Rik (NM_178404.2,2148-2166).
ccaaactgagtctaacaca

SEQ ID NO: 479447 - DNA, 19 bp, Mus musculus
  siRNA target sequence for 4631426G04Rik (NM_178404.2,2228-2246).
cctaggctgcaaaagaatt

SEQ ID NO: 479448 - DNA, 19 bp, Mus musculus
  siRNA target sequence for 4631426G04Rik (NM_178404.2,2229-2247).
ctaggctgcaaaagaattt

SEQ ID NO: 479449 - DNA, 19 bp, Mus musculus
  siRNA target sequence for 4631426G04Rik (NM_178404.2,2370-2388).
cagcagcacctattaatgt

SEQ ID NO: 479450 - DNA, 19 bp, Mus musculus
  siRNA target sequence for 4631426G04Rik (NM_178404.2,2438-2456).
ctcccaccgggaacttcaa

SEQ ID NO: 479451 - DNA, 19 bp, Mus musculus
  siRNA target sequence for 4631426G04Rik (NM_178404.2,2482-2500).
gtatgatcctagggataaa

SEQ ID NO: 479452 - DNA, 19 bp, Mus musculus
  siRNA target sequence for 4631426G04Rik (NM_178404.2,2486-2504).
gatcctagggataaaggtt

SEQ ID NO: 479453 - DNA, 19 bp, Mus musculus
  siRNA target sequence for 4631426G04Rik (NM_178404.2,2689-2707).
caggagtgctgataaggtt

SEQ ID NO: 479454 - DNA, 19 bp, Mus musculus
  siRNA target sequence for 4633401C23Rik (NM_023750.1,171-189).
gagcagaggtcgctataca

SEQ ID NO: 479455 - DNA, 19 bp, Mus musculus
  siRNA target sequence for 4633401C23Rik (NM_023750.1,173-191).
gcagaggtcgctatacaga

SEQ ID NO: 479456 - DNA, 19 bp, Mus musculus
  siRNA target sequence for 4633401C23Rik (NM_023750.1,227-245).
gctgggacttgccatttct

SEQ ID NO: 479457 - DNA, 19 bp, Mus musculus
  siRNA target sequence for 4633401C23Rik (NM_023750.1,339-357).
gctaagagtttgtctctaa

SEQ ID NO: 479458 - DNA, 19 bp, Mus musculus
  siRNA target sequence for 4633401C23Rik (NM_023750.1,340-358).
ctaagagtttgtctctaaa

SEQ ID NO: 479459 - DNA, 19 bp, Mus musculus
  siRNA target sequence for 4633401C23Rik (NM_023750.1,368-386).
ctttggaaaggaatcgtta

SEQ ID NO: 479460 - DNA, 19 bp, Mus musculus
  siRNA target sequence for 4633401C23Rik (NM_023750.1,422-440).
ccttgaggaatcttgtttt

SEQ ID NO: 479461 - DNA, 19 bp, Mus musculus
  siRNA target sequence for 4633401C23Rik (NM_023750.1,471-489).
gagacaaaacgggaatcta

SEQ ID NO: 479462 - DNA, 19 bp, Mus musculus
  siRNA target sequence for 4633401C23Rik (NM_023750.1,473-491).
gacaaaacgggaatctaca

SEQ ID NO: 479463 - DNA, 19 bp, Mus musculus
  siRNA target sequence for 4633401C23Rik (NM_023750.1,530-548).
gacgtcagccagattcgtt

SEQ ID NO: 479464 - DNA, 19 bp, Mus musculus
  siRNA target sequence for 4633401C23Rik (NM_023750.1,578-596).
gacgcattccgaaacgaaa

SEQ ID NO: 479465 - DNA, 19 bp, Mus musculus
  siRNA target sequence for 4633401C23Rik (NM_023750.1,582-600).
cattccgaaacgaaactct

SEQ ID NO: 479466 - DNA, 19 bp, Mus musculus
  siRNA target sequence for 4633401C23Rik (NM_023750.1,646-664).
ctaccagtgacaaacttaa

SEQ ID NO: 479467 - DNA, 19 bp, Mus musculus
  siRNA target sequence for 4633401C23Rik (NM_023750.1,674-692).
cgagaatgcctttatctat

SEQ ID NO: 479468 - DNA, 19 bp, Mus musculus
  siRNA target sequence for 4633401C23Rik (NM_023750.1,675-693).
gagaatgcctttatctatt

SEQ ID NO: 479469 - DNA, 19 bp, Mus musculus
  siRNA target sequence for 4633401C23Rik (NM_023750.1,763-781).
gaggattcgcctatgactt

SEQ ID NO: 479470 - DNA, 19 bp, Mus musculus
  siRNA target sequence for 4633401C23Rik (NM_023750.1,766-784).
gattcgcctatgactttca

SEQ ID NO: 479471 - DNA, 19 bp, Mus musculus
  siRNA target sequence for 4633401C23Rik (NM_023750.1,793-811).
cgtatcagatcaacaagaa

SEQ ID NO: 479472 - DNA, 19 bp, Mus musculus
  siRNA target sequence for 4633401C23Rik (NM_023750.1,1055-1073).
caacgagaagccatacgaa

SEQ ID NO: 479473 - DNA, 19 bp, Mus musculus
  siRNA target sequence for 4633401C23Rik (NM_023750.1,1109-1127).
caacctcactagacatcaa

SEQ ID NO: 479474 - DNA, 19 bp, Mus musculus
  siRNA target sequence for 4633401C23Rik (NM_023750.1,1186-1204).
gggcttccaacctgaatga

SEQ ID NO: 479475 - DNA, 19 bp, Mus musculus
  siRNA target sequence for 4633401C23Rik (NM_023750.1,1187-1205).
ggcttccaacctgaatgat

SEQ ID NO: 479476 - DNA, 19 bp, Mus musculus
  siRNA target sequence for 4633401C23Rik (NM_023750.1,1199-1217).
gaatgatcaccaaaagatt

SEQ ID NO: 479477 - DNA, 19 bp, Mus musculus
  siRNA target sequence for 4633401C23Rik (NM_023750.1,1270-1288).
gccattcggccttcatgaa

SEQ ID NO: 479478 - DNA, 19 bp, Mus musculus
  siRNA target sequence for 4633401C23Rik (NM_023750.1,1271-1289).
ccattcggccttcatgaaa

SEQ ID NO: 479479 - DNA, 19 bp, Mus musculus
  siRNA target sequence for 4633401C23Rik (NM_023750.1,1276-1294).
cggccttcatgaaacacta

SEQ ID NO: 479480 - DNA, 19 bp, Mus musculus
  siRNA target sequence for 4633401C23Rik (NM_023750.1,1277-1295).
ggccttcatgaaacactat

SEQ ID NO: 479481 - DNA, 19 bp, Mus musculus
  siRNA target sequence for 4633401C23Rik (NM_023750.1,1278-1296).
gccttcatgaaacactata

SEQ ID NO: 479482 - DNA, 19 bp, Mus musculus
  siRNA target sequence for 4633401C23Rik (NM_023750.1,1433-1451).
cgcgtgtccttcctacttt

SEQ ID NO: 479483 - DNA, 19 bp, Mus musculus
  siRNA target sequence for 4633401C23Rik (NM_023750.1,1434-1452).
gcgtgtccttcctacttta

SEQ ID NO: 479484 - DNA, 19 bp, Mus musculus
  siRNA target sequence for 4633401C23Rik (NM_023750.1,1435-1453).
cgtgtccttcctactttaa

SEQ ID NO: 479485 - DNA, 19 bp, Mus musculus
  siRNA target sequence for 4633401C23Rik (NM_023750.1,1511-1529).
ggctttcattgattgtaaa

SEQ ID NO: 479486 - DNA, 19 bp, Mus musculus
  siRNA target sequence for 4633401C23Rik (NM_023750.1,1681-1699).
ccttcactcggctcttaca

SEQ ID NO: 479487 - DNA, 19 bp, Mus musculus
  siRNA target sequence for 4732429I09Rik (NM_178733.3,219-237).
ctggctcagggtttagtga

SEQ ID NO: 479488 - DNA, 19 bp, Mus musculus
  siRNA target sequence for 4732429I09Rik (NM_178733.3,323-341).
gtgggagacctatagcaat

SEQ ID NO: 479489 - DNA, 19 bp, Mus musculus
  siRNA target sequence for 4732429I09Rik (NM_178733.3,325-343).
gggagacctatagcaattt

SEQ ID NO: 479490 - DNA, 19 bp, Mus musculus
  siRNA target sequence for 4732429I09Rik (NM_178733.3,327-345).
gagacctatagcaatttta

SEQ ID NO: 479491 - DNA, 19 bp, Mus musculus
  siRNA target sequence for 4732429I09Rik (NM_178733.3,395-413).
caagggcatttgtgaagta

SEQ ID NO: 479492 - DNA, 19 bp, Mus musculus
  siRNA target sequence for 4732429I09Rik (NM_178733.3,408-426).
gaagtatattcgttacagt

SEQ ID NO: 479493 - DNA, 19 bp, Mus musculus
  siRNA target sequence for 4732429I09Rik (NM_178733.3,427-445).
gggagttgattgagaaaat

SEQ ID NO: 479494 - DNA, 19 bp, Mus musculus
  siRNA target sequence for 4732429I09Rik (NM_178733.3,464-482).
gggttctggtcttagtgat

SEQ ID NO: 479495 - DNA, 19 bp, Mus musculus
  siRNA target sequence for 4732429I09Rik (NM_178733.3,469-487).
ctggtcttagtgatgatca

SEQ ID NO: 479496 - DNA, 19 bp, Mus musculus
  siRNA target sequence for 4732429I09Rik (NM_178733.3,498-516).
cacaagactgggctacaaa

SEQ ID NO: 479497 - DNA, 19 bp, Mus musculus
  siRNA target sequence for 4732429I09Rik (NM_178733.3,519-537).
gaaccgcaggagggttatt

SEQ ID NO: 479498 - DNA, 19 bp, Mus musculus
  siRNA target sequence for 4732429I09Rik (NM_178733.3,758-776).
ccttatccgacatcacaaa

SEQ ID NO: 479499 - DNA, 19 bp, Mus musculus
  siRNA target sequence for 4732429I09Rik (NM_178733.3,1152-1170).
ggtaagtccttcagaatat

SEQ ID NO: 479500 - DNA, 19 bp, Mus musculus
  siRNA target sequence for 4732429I09Rik (NM_178733.3,1181-1199).
gaccgtccaccagagtatt

SEQ ID NO: 479501 - DNA, 19 bp, Mus musculus
  siRNA target sequence for 4921506I22Rik (NM_025717.2,478-496).
catgtacagttgtcaacta

SEQ ID NO: 479502 - DNA, 19 bp, Mus musculus
  siRNA target sequence for 4921506I22Rik (NM_025717.2,540-558).
ctatcggtgtggtaaagaa

SEQ ID NO: 479503 - DNA, 19 bp, Mus musculus
  siRNA target sequence for 4921506I22Rik (NM_025717.2,616-634).
gagcagtacaatgaacaat

SEQ ID NO: 479504 - DNA, 19 bp, Mus musculus
  siRNA target sequence for 4921506I22Rik (NM_025717.2,640-658).
gcagtgcgcacaccttata

SEQ ID NO: 479505 - DNA, 19 bp, Mus musculus
  siRNA target sequence for 4921506I22Rik (NM_025717.2,670-688).
ggggagtccatgtattaca

SEQ ID NO: 479506 - DNA, 19 bp, Mus musculus
  siRNA target sequence for 4921506I22Rik (NM_025717.2,695-713).
cctatggagcacttgacta

SEQ ID NO: 479507 - DNA, 19 bp, Mus musculus
  siRNA target sequence for 4921506I22Rik (NM_025717.2,700-718).
ggagcacttgactactata

SEQ ID NO: 479508 - DNA, 19 bp, Mus musculus
  siRNA target sequence for 4921506I22Rik (NM_025717.2,722-740).
gctaccgcgtccgatctta

SEQ ID NO: 479509 - DNA, 19 bp, Mus musculus
  siRNA target sequence for 4921506I22Rik (NM_025717.2,726-744).
ccgcgtccgatcttacgaa

SEQ ID NO: 479510 - DNA, 19 bp, Mus musculus
  siRNA target sequence for 4921506I22Rik (NM_025717.2,761-779).
ctgcagcttccgcatacaa

SEQ ID NO: 479511 - DNA, 19 bp, Mus musculus
  siRNA target sequence for 4921506I22Rik (NM_025717.2,763-781).
gcagcttccgcatacaatt

SEQ ID NO: 479512 - DNA, 19 bp, Mus musculus
  siRNA target sequence for 4921506I22Rik (NM_025717.2,764-782).
cagcttccgcatacaatta

SEQ ID NO: 479513 - DNA, 19 bp, Mus musculus
  siRNA target sequence for 4921506I22Rik (NM_025717.2,849-867).
cacttctgttgatccttat

SEQ ID NO: 479514 - DNA, 19 bp, Mus musculus
  siRNA target sequence for 4921506I22Rik (NM_025717.2,863-881).
cttatgacagacacctatt

SEQ ID NO: 479515 - DNA, 19 bp, Mus musculus
  siRNA target sequence for 4921506I22Rik (NM_025717.2,926-944).
ccgcttcctcttcctatta

SEQ ID NO: 479516 - DNA, 19 bp, Mus musculus
  siRNA target sequence for 4921506I22Rik (NM_025717.2,927-945).
cgcttcctcttcctattat

SEQ ID NO: 479517 - DNA, 19 bp, Mus musculus
  siRNA target sequence for 4922503N01Rik (NM_153392.1,300-318).
ctgcttgctggcaacatga

SEQ ID NO: 479518 - DNA, 19 bp, Mus musculus
  siRNA target sequence for 4922503N01Rik (NM_153392.1,348-366).
catcgaaggaagtcttcta

SEQ ID NO: 479519 - DNA, 19 bp, Mus musculus
  siRNA target sequence for 4922503N01Rik (NM_153392.1,361-379).
cttctatgacggactcatt

SEQ ID NO: 479520 - DNA, 19 bp, Mus musculus
  siRNA target sequence for 4922503N01Rik (NM_153392.1,389-407).
ggtgcaccgtcctaccatt

SEQ ID NO: 479521 - DNA, 19 bp, Mus musculus
  siRNA target sequence for 4922503N01Rik (NM_153392.1,535-553).
ggaacagctaccagactta

SEQ ID NO: 479522 - DNA, 19 bp, Mus musculus
  siRNA target sequence for 4922503N01Rik (NM_153392.1,573-591).
gtccagtcctcgcaatact

SEQ ID NO: 479523 - DNA, 19 bp, Mus musculus
  siRNA target sequence for 4922503N01Rik (NM_153392.1,575-593).
ccagtcctcgcaatactct

SEQ ID NO: 479524 - DNA, 19 bp, Mus musculus
  siRNA target sequence for 4922503N01Rik (NM_153392.1,576-594).
cagtcctcgcaatactcta

SEQ ID NO: 479525 - DNA, 19 bp, Mus musculus
  siRNA target sequence for 4922503N01Rik (NM_153392.1,917-935).
ctttgctgggcggattgaa

SEQ ID NO: 479526 - DNA, 19 bp, Mus musculus
  siRNA target sequence for 4922503N01Rik (NM_153392.1,922-940).
ctgggcggattgaagctat

SEQ ID NO: 479527 - DNA, 19 bp, Mus musculus
  siRNA target sequence for 4922503N01Rik (NM_153392.1,925-943).
ggcggattgaagctatcaa

SEQ ID NO: 479528 - DNA, 19 bp, Mus musculus
  siRNA target sequence for 4922503N01Rik (NM_153392.1,1117-1135).
ccaaggccacctacatcta

SEQ ID NO: 479529 - DNA, 19 bp, Mus musculus
  siRNA target sequence for 4922503N01Rik (NM_153392.1,1433-1451).
ggcaatgggcccagagaat

SEQ ID NO: 479530 - DNA, 19 bp, Mus musculus
  siRNA target sequence for 4922503N01Rik (NM_153392.1,1467-1485).
gacgactgcttggttaaat

SEQ ID NO: 479531 - DNA, 19 bp, Mus musculus
  siRNA target sequence for 4922503N01Rik (NM_153392.1,1547-1565).
gagcatttctgccaatgaa

SEQ ID NO: 479532 - DNA, 19 bp, Mus musculus
  siRNA target sequence for 4922503N01Rik (NM_153392.1,1583-1601).
ccattacttgattccaaat

SEQ ID NO: 479533 - DNA, 19 bp, Mus musculus
  siRNA target sequence for 4922503N01Rik (NM_153392.1,1649-1667).
ggaggccatcaaactctta

SEQ ID NO: 479534 - DNA, 19 bp, Mus musculus
  siRNA target sequence for 4922503N01Rik (NM_153392.1,1653-1671).
gccatcaaactcttagagt

SEQ ID NO: 479535 - DNA, 19 bp, Mus musculus
  siRNA target sequence for 4922503N01Rik (NM_153392.1,1672-1690).
ctgcaaagcaaaactacaa

SEQ ID NO: 479536 - DNA, 19 bp, Mus musculus
  siRNA target sequence for 4930540G07Rik (NM_145487.2,1316-1334).
caatgccgaacctcctttt

SEQ ID NO: 479537 - DNA, 19 bp, Mus musculus
  siRNA target sequence for 4930540G07Rik (NM_145487.2,1354-1372).
gtccctctagggaaagctt

SEQ ID NO: 479538 - DNA, 19 bp, Mus musculus
  siRNA target sequence for 4930540G07Rik (NM_145487.2,1356-1374).
ccctctagggaaagctttt

SEQ ID NO: 479539 - DNA, 19 bp, Mus musculus
  siRNA target sequence for 4930540G07Rik (NM_145487.2,1405-1423).
gaagctggtctcttgtcaa

SEQ ID NO: 479540 - DNA, 19 bp, Mus musculus
  siRNA target sequence for 4930540G07Rik (NM_145487.2,1408-1426).
gctggtctcttgtcaagaa

SEQ ID NO: 479541 - DNA, 19 bp, Mus musculus
  siRNA target sequence for 4930540G07Rik (NM_145487.2,1414-1432).
ctcttgtcaagaataccta

SEQ ID NO: 479542 - DNA, 19 bp, Mus musculus
  siRNA target sequence for 4930540G07Rik (NM_145487.2,1486-1504).
gccgacacttttctaagaa

SEQ ID NO: 479543 - DNA, 19 bp, Mus musculus
  siRNA target sequence for 4930540G07Rik (NM_145487.2,1505-1523).
gggccactgtcgatatgaa

SEQ ID NO: 479544 - DNA, 19 bp, Mus musculus
  siRNA target sequence for 4930565A21Rik (NM_176954.2,348-366).
gtttgccgacacggataaa

SEQ ID NO: 479545 - DNA, 19 bp, Mus musculus
  siRNA target sequence for 4930572I07Rik (NM_177027.2,79-97).
gtggctatgagactataga

SEQ ID NO: 479546 - DNA, 19 bp, Mus musculus
  siRNA target sequence for 4930572I07Rik (NM_177027.2,111-129).
gatctttatcgtgatgatt

SEQ ID NO: 479547 - DNA, 19 bp, Mus musculus
  siRNA target sequence for 4930572I07Rik (NM_177027.2,114-132).
ctttatcgtgatgattcat

SEQ ID NO: 479548 - DNA, 19 bp, Mus musculus
  siRNA target sequence for 4930572I07Rik (NM_177027.2,259-277).
cagtgagtagtcaaccaaa

SEQ ID NO: 479549 - DNA, 19 bp, Mus musculus
  siRNA target sequence for 4930572I07Rik (NM_177027.2,287-305).
cttaatcgtcctttcagat

SEQ ID NO: 479550 - DNA, 19 bp, Mus musculus
  siRNA target sequence for 4930572I07Rik (NM_177027.2,312-330).
gtcatccagctatctgata

SEQ ID NO: 479551 - DNA, 19 bp, Mus musculus
  siRNA target sequence for 4930572I07Rik (NM_177027.2,331-349).
catcagaggtcatcacatt

SEQ ID NO: 479552 - DNA, 19 bp, Mus musculus
  siRNA target sequence for 4930572I07Rik (NM_177027.2,341-359).
catcacattatctgatgaa

SEQ ID NO: 479553 - DNA, 19 bp, Mus musculus
  siRNA target sequence for 4930572I07Rik (NM_177027.2,344-362).
cacattatctgatgaagat

SEQ ID NO: 479554 - DNA, 19 bp, Mus musculus
  siRNA target sequence for 4930572I07Rik (NM_177027.2,416-434).
ccagagccctgctacttct

SEQ ID NO: 479555 - DNA, 19 bp, Mus musculus
  siRNA target sequence for 4930572I07Rik (NM_177027.2,426-444).
gctacttctcattctaata

SEQ ID NO: 479556 - DNA, 19 bp, Mus musculus
  siRNA target sequence for 4930572I07Rik (NM_177027.2,427-445).
ctacttctcattctaataa

SEQ ID NO: 479557 - DNA, 19 bp, Mus musculus
  siRNA target sequence for 4930572I07Rik (NM_177027.2,509-527).
ccgagaggtcatgatcata

SEQ ID NO: 479558 - DNA, 19 bp, Mus musculus
  siRNA target sequence for 4930572I07Rik (NM_177027.2,511-529).
gagaggtcatgatcataga

SEQ ID NO: 479559 - DNA, 19 bp, Mus musculus
  siRNA target sequence for 4930572I07Rik (NM_177027.2,612-630).
gatggtaaagacaatgaca

SEQ ID NO: 479560 - DNA, 19 bp, Mus musculus
  siRNA target sequence for 4930572I07Rik (NM_177027.2,656-674).
gaccgctggtgctgaagat

SEQ ID NO: 479561 - DNA, 19 bp, Mus musculus
  siRNA target sequence for 4930572I07Rik (NM_177027.2,675-693).
gatgtaaattggttcatca

SEQ ID NO: 479562 - DNA, 19 bp, Mus musculus
  siRNA target sequence for 4930572I07Rik (NM_177027.2,713-731).
caagatagataataacaga

SEQ ID NO: 479563 - DNA, 19 bp, Mus musculus
  siRNA target sequence for 4930572I07Rik (NM_177027.2,742-760).
ggtggaacaaccgatacta

SEQ ID NO: 479564 - DNA, 19 bp, Mus musculus
  siRNA target sequence for 4930572I07Rik (NM_177027.2,743-761).
gtggaacaaccgatactat

SEQ ID NO: 479565 - DNA, 19 bp, Mus musculus
  siRNA target sequence for 4930572I07Rik (NM_177027.2,746-764).
gaacaaccgatactattca

SEQ ID NO: 479566 - DNA, 19 bp, Mus musculus
  siRNA target sequence for 4930572I07Rik (NM_177027.2,795-813).
gataaacgtggccatttgt

SEQ ID NO: 479567 - DNA, 19 bp, Mus musculus
  siRNA target sequence for 4930572I07Rik (NM_177027.2,801-819).
cgtggccatttgtcaaaaa

SEQ ID NO: 479568 - DNA, 19 bp, Mus musculus
  siRNA target sequence for 4930572I07Rik (NM_177027.2,823-841).
gccccttaccacaaaaagt

SEQ ID NO: 479569 - DNA, 19 bp, Mus musculus
  siRNA target sequence for 4930572I07Rik (NM_177027.2,894-912).
gcccgttactgcttagact

SEQ ID NO: 479570 - DNA, 19 bp, Mus musculus
  siRNA target sequence for 4930572I07Rik (NM_177027.2,931-949).
ccaaccacagatgttttga

SEQ ID NO: 479571 - DNA, 19 bp, Mus musculus
  siRNA target sequence for 4930572I07Rik (NM_177027.2,970-988).
gatgtgaccgatgtgatat

SEQ ID NO: 479572 - DNA, 19 bp, Mus musculus
  siRNA target sequence for 4930572I07Rik (NM_177027.2,973-991).
gtgaccgatgtgatatgat

SEQ ID NO: 479573 - DNA, 19 bp, Mus musculus
  siRNA target sequence for 4930572I07Rik (NM_177027.2,1035-1053).
cacctaacggtgagtaaaa

SEQ ID NO: 479574 - DNA, 19 bp, Mus musculus
  siRNA target sequence for 4930572I07Rik (NM_177027.2,1071-1089).
ccaagacccagcctattta

SEQ ID NO: 479575 - DNA, 19 bp, Mus musculus
  siRNA target sequence for 4930584N22Rik (NM_026654.1,202-220).
cttaaagacagctagcttt

SEQ ID NO: 479576 - DNA, 19 bp, Mus musculus
  siRNA target sequence for 4930584N22Rik (NM_026654.1,248-266).
ctcggggataggaagagtt

SEQ ID NO: 479577 - DNA, 19 bp, Mus musculus
  siRNA target sequence for 4930584N22Rik (NM_026654.1,500-518).
cagggtatcccctaccata

SEQ ID NO: 479578 - DNA, 19 bp, Mus musculus
  siRNA target sequence for 4930584N22Rik (NM_026654.1,561-579).
ggacgctgttccttgaact

SEQ ID NO: 479579 - DNA, 19 bp, Mus musculus
  siRNA target sequence for 4930584N22Rik (NM_026654.1,564-582).
cgctgttccttgaactgat

SEQ ID NO: 479580 - DNA, 19 bp, Mus musculus
  siRNA target sequence for 4930584N22Rik (NM_026654.1,604-622).
gctacataatggccttata

SEQ ID NO: 479581 - DNA, 19 bp, Mus musculus
  siRNA target sequence for 4930584N22Rik (NM_026654.1,608-626).
cataatggccttatagact

SEQ ID NO: 479582 - DNA, 19 bp, Mus musculus
  siRNA target sequence for 4930584N22Rik (NM_026654.1,707-725).
ccagcaggcatctatgaca

SEQ ID NO: 479583 - DNA, 19 bp, Mus musculus
  siRNA target sequence for 4930584N22Rik (NM_026654.1,742-760).
gttccatgcccgatttgta

SEQ ID NO: 479584 - DNA, 19 bp, Mus musculus
  siRNA target sequence for 4930584N22Rik (NM_026654.1,758-776).
gtagcttcctacttagaat

SEQ ID NO: 479585 - DNA, 19 bp, Mus musculus
  siRNA target sequence for 4930584N22Rik (NM_026654.1,884-902).
gactaccgctgctgtatgt

SEQ ID NO: 479586 - DNA, 19 bp, Mus musculus
  siRNA target sequence for 4930584N22Rik (NM_026654.1,987-1005).
gtcctcagtcacacgatat

SEQ ID NO: 479587 - DNA, 19 bp, Mus musculus
  siRNA target sequence for 4930584N22Rik (NM_026654.1,990-1008).
ctcagtcacacgatattga

SEQ ID NO: 479588 - DNA, 19 bp, Mus musculus
  siRNA target sequence for 4930584N22Rik (NM_026654.1,996-1014).
cacacgatattgaccttat

SEQ ID NO: 479589 - DNA, 19 bp, Mus musculus
  siRNA target sequence for 4930584N22Rik (NM_026654.1,998-1016).
cacgatattgaccttataa

SEQ ID NO: 479590 - DNA, 19 bp, Mus musculus
  siRNA target sequence for 4930584N22Rik (NM_026654.1,1000-1018).
cgatattgaccttataatt

SEQ ID NO: 479591 - DNA, 19 bp, Mus musculus
  siRNA target sequence for 4930584N22Rik (NM_026654.1,1072-1090).
caaacggaagaggtcttta

SEQ ID NO: 479592 - DNA, 19 bp, Mus musculus
  siRNA target sequence for 4930584N22Rik (NM_026654.1,1076-1094).
cggaagaggtctttacaga

SEQ ID NO: 479593 - DNA, 19 bp, Mus musculus
  siRNA target sequence for 4930584N22Rik (NM_026654.1,1164-1182).
gcctcgagactgagaaaat

SEQ ID NO: 479594 - DNA, 19 bp, Mus musculus
  siRNA target sequence for 4930584N22Rik (NM_026654.1,1267-1285).
gaggacaagtgctgaaaca

SEQ ID NO: 479595 - DNA, 19 bp, Mus musculus
  siRNA target sequence for 4930584N22Rik (NM_026654.1,1364-1382).
ggttttgacgcctttatga

SEQ ID NO: 479596 - DNA, 19 bp, Mus musculus
  siRNA target sequence for 4930584N22Rik (NM_026654.1,1516-1534).
gttttcccgtccatccaaa

SEQ ID NO: 479597 - DNA, 19 bp, Mus musculus
  siRNA target sequence for 4930584N22Rik (NM_026654.1,1535-1553).
gcccacaaccagaaaatga

SEQ ID NO: 479598 - DNA, 19 bp, Mus musculus
  siRNA target sequence for 4930595M18 (NM_173435.1,184-202).
ggcacaccacacttcatct

SEQ ID NO: 479599 - DNA, 19 bp, Mus musculus
  siRNA target sequence for 4930595M18 (NM_173435.1,190-208).
ccacacttcatcttatact

SEQ ID NO: 479600 - DNA, 19 bp, Mus musculus
  siRNA target sequence for 4930595M18 (NM_173435.1,217-235).
cgtctttgaggattatgga

SEQ ID NO: 479601 - DNA, 19 bp, Mus musculus
  siRNA target sequence for 4930595M18 (NM_173435.1,253-271).
cataccccgaaatcactta

SEQ ID NO: 479602 - DNA, 19 bp, Mus musculus
  siRNA target sequence for 4930595M18 (NM_173435.1,258-276).
cccgaaatcacttaactga

SEQ ID NO: 479603 - DNA, 19 bp, Mus musculus
  siRNA target sequence for 4930595M18 (NM_173435.1,259-277).
ccgaaatcacttaactgaa

SEQ ID NO: 479604 - DNA, 19 bp, Mus musculus
  siRNA target sequence for 4930595M18 (NM_173435.1,293-311).
gccttcatccatttctaca

SEQ ID NO: 479605 - DNA, 19 bp, Mus musculus
  siRNA target sequence for 4930595M18 (NM_173435.1,294-312).
ccttcatccatttctacaa

SEQ ID NO: 479606 - DNA, 19 bp, Mus musculus
  siRNA target sequence for 4930595M18 (NM_173435.1,313-331).
caaatgtgatgccaatgat

SEQ ID NO: 479607 - DNA, 19 bp, Mus musculus
  siRNA target sequence for 4930595M18 (NM_173435.1,323-341).
gccaatgatgccttacatt

SEQ ID NO: 479608 - DNA, 19 bp, Mus musculus
  siRNA target sequence for 4930595M18 (NM_173435.1,379-397).
ggtacagatggtgtacaat

SEQ ID NO: 479609 - DNA, 19 bp, Mus musculus
  siRNA target sequence for 4930595M18 (NM_173435.1,394-412).
caatgatgatccacattat

SEQ ID NO: 479610 - DNA, 19 bp, Mus musculus
  siRNA target sequence for 4930595M18 (NM_173435.1,429-447).
gctcgggaaggcaatacca

SEQ ID NO: 479611 - DNA, 19 bp, Mus musculus
  siRNA target sequence for 4930595M18 (NM_173435.1,542-560).
ggagacgactcagaattca

SEQ ID NO: 479612 - DNA, 19 bp, Mus musculus
  siRNA target sequence for 4930595M18 (NM_173435.1,545-563).
gacgactcagaattcaaat

SEQ ID NO: 479613 - DNA, 19 bp, Mus musculus
  siRNA target sequence for 4930595M18 (NM_173435.1,547-565).
cgactcagaattcaaatct

SEQ ID NO: 479614 - DNA, 19 bp, Mus musculus
  siRNA target sequence for 4930595M18 (NM_173435.1,564-582).
ctcaatcttctaatcactt

SEQ ID NO: 479615 - DNA, 19 bp, Mus musculus
  siRNA target sequence for 4930595M18 (NM_173435.1,578-596).
cacttgcatagaagatcat

SEQ ID NO: 479616 - DNA, 19 bp, Mus musculus
  siRNA target sequence for 4930595M18 (NM_173435.1,580-598).
cttgcatagaagatcatca

SEQ ID NO: 479617 - DNA, 19 bp, Mus musculus
  siRNA target sequence for 4930595M18 (NM_173435.1,653-671).
gcctgtccaaagtccaaaa

SEQ ID NO: 479618 - DNA, 19 bp, Mus musculus
  siRNA target sequence for 4930595M18 (NM_173435.1,701-719).
cctaaatcttcatataaga

SEQ ID NO: 479619 - DNA, 19 bp, Mus musculus
  siRNA target sequence for 4930595M18 (NM_173435.1,797-815).
ggacaatccaattctatgt

SEQ ID NO: 479620 - DNA, 19 bp, Mus musculus
  siRNA target sequence for 4930595M18 (NM_173435.1,804-822).
ccaattctatgtttgaaaa

SEQ ID NO: 479621 - DNA, 19 bp, Mus musculus
  siRNA target sequence for 4930595M18 (NM_173435.1,814-832).
gtttgaaaaaccatgtaga

SEQ ID NO: 479622 - DNA, 19 bp, Mus musculus
  siRNA target sequence for 4930595M18 (NM_173435.1,845-863).
gcaactcacacattgataa

SEQ ID NO: 479623 - DNA, 19 bp, Mus musculus
  siRNA target sequence for 4930595M18 (NM_173435.1,907-925).
cccacaaaattcaagtgaa

SEQ ID NO: 479624 - DNA, 19 bp, Mus musculus
  siRNA target sequence for 4930595M18 (NM_173435.1,1145-1163).
catagtgttgactctgaaa

SEQ ID NO: 479625 - DNA, 19 bp, Mus musculus
  siRNA target sequence for 4930595M18 (NM_173435.1,1158-1176).
ctgaaagcggccaacttaa

SEQ ID NO: 479626 - DNA, 19 bp, Mus musculus
  siRNA target sequence for 4930595M18 (NM_173435.1,1160-1178).
gaaagcggccaacttaact

SEQ ID NO: 479627 - DNA, 19 bp, Mus musculus
  siRNA target sequence for 4930595M18 (NM_173435.1,1179-1197).
ccctacaacaatctgaaaa

SEQ ID NO: 479628 - DNA, 19 bp, Mus musculus
  siRNA target sequence for 4930595M18 (NM_173435.1,1217-1235).
gaggagtgtgggttttgga

SEQ ID NO: 479629 - DNA, 19 bp, Mus musculus
  siRNA target sequence for 4930595M18 (NM_173435.1,1249-1267).
gggtaactcaagcaatgat

SEQ ID NO: 479630 - DNA, 19 bp, Mus musculus
  siRNA target sequence for 4930595M18 (NM_173435.1,1251-1269).
gtaactcaagcaatgatat

SEQ ID NO: 479631 - DNA, 19 bp, Mus musculus
  siRNA target sequence for 4930595M18 (NM_173435.1,1282-1300).
gagatttacctgtaataaa

SEQ ID NO: 479632 - DNA, 19 bp, Mus musculus
  siRNA target sequence for 4930595M18 (NM_173435.1,1356-1374).
ggaaaatccataagcaatt

SEQ ID NO: 479633 - DNA, 19 bp, Mus musculus
  siRNA target sequence for 4930595M18 (NM_173435.1,1363-1381).
ccataagcaattagactat

SEQ ID NO: 479634 - DNA, 19 bp, Mus musculus
  siRNA target sequence for 4930595M18 (NM_173435.1,1399-1417).
gcatgtaactccatttaca

SEQ ID NO: 479635 - DNA, 19 bp, Mus musculus
  siRNA target sequence for 4930595M18 (NM_173435.1,1424-1442).
ggaaatataactgaagttt

SEQ ID NO: 479636 - DNA, 19 bp, Mus musculus
  siRNA target sequence for 4930595M18 (NM_173435.1,1527-1545).
ggttacatccagataccaa

SEQ ID NO: 479637 - DNA, 19 bp, Mus musculus
  siRNA target sequence for 4930595M18 (NM_173435.1,1556-1574).
ctggggggacctcattatt

SEQ ID NO: 479638 - DNA, 19 bp, Mus musculus
  siRNA target sequence for 4930595M18 (NM_173435.1,1566-1584).
ctcattattgtttatcact

SEQ ID NO: 479639 - DNA, 19 bp, Mus musculus
  siRNA target sequence for 4930595M18 (NM_173435.1,1605-1623).
ggaaggataaggcttacat

SEQ ID NO: 479640 - DNA, 19 bp, Mus musculus
  siRNA target sequence for 4930595M18 (NM_173435.1,1606-1624).
gaaggataaggcttacatt

SEQ ID NO: 479641 - DNA, 19 bp, Mus musculus
  siRNA target sequence for 4930595M18 (NM_173435.1,1616-1634).
gcttacattttttctaata

SEQ ID NO: 479642 - DNA, 19 bp, Mus musculus
  siRNA target sequence for 4930595M18 (NM_173435.1,1667-1685).
gccatatctgagttgcaaa

SEQ ID NO: 479643 - DNA, 19 bp, Mus musculus
  siRNA target sequence for 4930595M18 (NM_173435.1,1668-1686).
ccatatctgagttgcaaaa

SEQ ID NO: 479644 - DNA, 19 bp, Mus musculus
  siRNA target sequence for 4930595M18 (NM_173435.1,1669-1687).
catatctgagttgcaaaaa

SEQ ID NO: 479645 - DNA, 19 bp, Mus musculus
  siRNA target sequence for 4930595M18 (NM_173435.1,1676-1694).
gagttgcaaaaactatatt

SEQ ID NO: 479646 - DNA, 19 bp, Mus musculus
  siRNA target sequence for 4930595M18 (NM_173435.1,1733-1751).
gagagcactgctcatagaa

SEQ ID NO: 479647 - DNA, 19 bp, Mus musculus
  siRNA target sequence for 4930595M18 (NM_173435.1,1735-1753).
gagcactgctcatagaagt

SEQ ID NO: 479648 - DNA, 19 bp, Mus musculus
  siRNA target sequence for 4930595M18 (NM_173435.1,1764-1782).
ctgtaacaccaactaagtt

SEQ ID NO: 479649 - DNA, 19 bp, Mus musculus
  siRNA target sequence for 4930595M18 (NM_173435.1,1766-1784).
gtaacaccaactaagttta

SEQ ID NO: 479650 - DNA, 19 bp, Mus musculus
  siRNA target sequence for 4930595M18 (NM_173435.1,1788-1806).
ctgtggaaattgatcaaaa

SEQ ID NO: 479651 - DNA, 19 bp, Mus musculus
  siRNA target sequence for 4930595M18 (NM_173435.1,1861-1879).
cgtaatttctgatgatgaa

SEQ ID NO: 479652 - DNA, 19 bp, Mus musculus
  siRNA target sequence for 4930595M18 (NM_173435.1,1890-1908).
ctaatttagaatgtacaat

SEQ ID NO: 479653 - DNA, 19 bp, Mus musculus
  siRNA target sequence for 4930595M18 (NM_173435.1,1958-1976).
gaggtagatgataatttca

SEQ ID NO: 479654 - DNA, 19 bp, Mus musculus
  siRNA target sequence for 4930595M18 (NM_173435.1,1979-1997).
gagtttgacttacaatctt

SEQ ID NO: 479655 - DNA, 19 bp, Mus musculus
  siRNA target sequence for 4930595M18 (NM_173435.1,1981-1999).
gtttgacttacaatcttgt

SEQ ID NO: 479656 - DNA, 19 bp, Mus musculus
  siRNA target sequence for 4930595M18 (NM_173435.1,2058-2076).
gatctgtttccagcttaaa

SEQ ID NO: 479657 - DNA, 19 bp, Mus musculus
  siRNA target sequence for 4930595M18 (NM_173435.1,2068-2086).
cagcttaaattcaaattct

SEQ ID NO: 479658 - DNA, 19 bp, Mus musculus
  siRNA target sequence for 4930595M18 (NM_173435.1,2088-2106).
ccactagttctagtacaaa

SEQ ID NO: 479659 - DNA, 19 bp, Mus musculus
  siRNA target sequence for 4930595M18 (NM_173435.1,2091-2109).
ctagttctagtacaaatca

SEQ ID NO: 479660 - DNA, 19 bp, Mus musculus
  siRNA target sequence for 4930595M18 (NM_173435.1,2134-2152).
cagtcaacagtttttacct

SEQ ID NO: 479661 - DNA, 19 bp, Mus musculus
  siRNA target sequence for 4930595M18 (NM_173435.1,2157-2175).
ctagtacgagtgacaatat

SEQ ID NO: 479662 - DNA, 19 bp, Mus musculus
  siRNA target sequence for 4930595M18 (NM_173435.1,2263-2281).
ggccaggcaacaaatgcat

SEQ ID NO: 479663 - DNA, 19 bp, Mus musculus
  siRNA target sequence for 4930595M18 (NM_173435.1,2270-2288).
caacaaatgcatgttacaa

SEQ ID NO: 479664 - DNA, 19 bp, Mus musculus
  siRNA target sequence for 4930595M18 (NM_173435.1,2282-2300).
gttacaagcccagaaacat

SEQ ID NO: 479665 - DNA, 19 bp, Mus musculus
  siRNA target sequence for 4930595M18 (NM_173435.1,2290-2308).
cccagaaacatctaatgat

SEQ ID NO: 479666 - DNA, 19 bp, Mus musculus
  siRNA target sequence for 4930595M18 (NM_173435.1,2310-2328).
gtgattattggccagtttt

SEQ ID NO: 479667 - DNA, 19 bp, Mus musculus
  siRNA target sequence for 4930595M18 (NM_173435.1,2376-2394).
gacttaccgaagaacagat

SEQ ID NO: 479668 - DNA, 19 bp, Mus musculus
  siRNA target sequence for 4930595M18 (NM_173435.1,2440-2458).
ccactgcagtatttgtctt

SEQ ID NO: 479669 - DNA, 19 bp, Mus musculus
  siRNA target sequence for 4930595M18 (NM_173435.1,2441-2459).
cactgcagtatttgtctta

SEQ ID NO: 479670 - DNA, 19 bp, Mus musculus
  siRNA target sequence for 4930595M18 (NM_173435.1,2454-2472).
gtcttacacaatacataaa

SEQ ID NO: 479671 - DNA, 19 bp, Mus musculus
  siRNA target sequence for 4930595M18 (NM_173435.1,2462-2480).
caatacataaaaaacagta

SEQ ID NO: 479672 - DNA, 19 bp, Mus musculus
  siRNA target sequence for 4930595M18 (NM_173435.1,2476-2494).
cagtaagatccgtgtacta

SEQ ID NO: 479673 - DNA, 19 bp, Mus musculus
  siRNA target sequence for 4930595M18 (NM_173435.1,2507-2525).
gaatatcatgataaatgta

SEQ ID NO: 479674 - DNA, 19 bp, Mus musculus
  siRNA target sequence for 4930595M18 (NM_173435.1,2558-2576).
cctatttgtcgcaaacata

SEQ ID NO: 479675 - DNA, 19 bp, Mus musculus
  siRNA target sequence for 4930595M18 (NM_173435.1,2559-2577).
ctatttgtcgcaaacatat

SEQ ID NO: 479676 - DNA, 19 bp, Mus musculus
  siRNA target sequence for 4930595M18 (NM_173435.1,2565-2583).
gtcgcaaacatataataaa

SEQ ID NO: 479677 - DNA, 19 bp, Mus musculus
  siRNA target sequence for 4930595M18 (NM_173435.1,2567-2585).
cgcaaacatataataaatt

SEQ ID NO: 479678 - DNA, 19 bp, Mus musculus
  siRNA target sequence for 4930595M18 (NM_173435.1,2569-2587).
caaacatataataaattct

SEQ ID NO: 479679 - DNA, 19 bp, Mus musculus
  siRNA target sequence for 4930595M18 (NM_173435.1,2586-2604).
ctgatgacacagaatttct

SEQ ID NO: 479680 - DNA, 19 bp, Mus musculus
  siRNA target sequence for 4930597B14Rik (NM_029267.1,170-188).
gcgcagtcaacaaatcaga

SEQ ID NO: 479681 - DNA, 19 bp, Mus musculus
  siRNA target sequence for 4930597B14Rik (NM_029267.1,299-317).
ggaggaattgactttaaga

SEQ ID NO: 479682 - DNA, 19 bp, Mus musculus
  siRNA target sequence for 4930597B14Rik (NM_029267.1,348-366).
cccaatatgggtctgtaaa

SEQ ID NO: 479683 - DNA, 19 bp, Mus musculus
  siRNA target sequence for 4930597B14Rik (NM_029267.1,349-367).
ccaatatgggtctgtaaaa

SEQ ID NO: 479684 - DNA, 19 bp, Mus musculus
  siRNA target sequence for 4930597B14Rik (NM_029267.1,402-420).
ccaaagggtatggtttcat

SEQ ID NO: 479685 - DNA, 19 bp, Mus musculus
  siRNA target sequence for 4930597B14Rik (NM_029267.1,408-426).
ggtatggtttcatcacttt

SEQ ID NO: 479686 - DNA, 19 bp, Mus musculus
  siRNA target sequence for 4930597B14Rik (NM_029267.1,434-452).
caagaagatgcacaaaaaa

SEQ ID NO: 479687 - DNA, 19 bp, Mus musculus
  siRNA target sequence for 4930597B14Rik (NM_029267.1,444-462).
cacaaaaaatcttacaaga

SEQ ID NO: 479688 - DNA, 19 bp, Mus musculus
  siRNA target sequence for 4930597B14Rik (NM_029267.1,496-514).
caacattggtccagcaata

SEQ ID NO: 479689 - DNA, 19 bp, Mus musculus
  siRNA target sequence for 4930597B14Rik (NM_029267.1,499-517).
cattggtccagcaataaga

SEQ ID NO: 479690 - DNA, 19 bp, Mus musculus
  siRNA target sequence for 4930597B14Rik (NM_029267.1,504-522).
gtccagcaataagaaaaca

SEQ ID NO: 479691 - DNA, 19 bp, Mus musculus
  siRNA target sequence for 4930597B14Rik (NM_029267.1,530-548).
gggattcctcgtatgtatt

SEQ ID NO: 479692 - DNA, 19 bp, Mus musculus
  siRNA target sequence for 4932422E22Rik (NM_176980.2,204-222).
gaaaccttccgggaaaatt

SEQ ID NO: 479693 - DNA, 19 bp, Mus musculus
  siRNA target sequence for 4932422E22Rik (NM_176980.2,209-227).
cttccgggaaaatttagca

SEQ ID NO: 479694 - DNA, 19 bp, Mus musculus
  siRNA target sequence for 4932422E22Rik (NM_176980.2,273-291).
gaagtgcaagaattattaa

SEQ ID NO: 479695 - DNA, 19 bp, Mus musculus
  siRNA target sequence for 4932422E22Rik (NM_176980.2,276-294).
gtgcaagaattattaacaa

SEQ ID NO: 479696 - DNA, 19 bp, Mus musculus
  siRNA target sequence for 4932422E22Rik (NM_176980.2,279-297).
caagaattattaacaacaa

SEQ ID NO: 479697 - DNA, 19 bp, Mus musculus
  siRNA target sequence for 4932422E22Rik (NM_176980.2,330-348).
gctcgttctcagctagaaa

SEQ ID NO: 479698 - DNA, 19 bp, Mus musculus
  siRNA target sequence for 4932422E22Rik (NM_176980.2,355-373).
gtggactcatgagtcaaat

SEQ ID NO: 479699 - DNA, 19 bp, Mus musculus
  siRNA target sequence for 4932422E22Rik (NM_176980.2,362-380).
catgagtcaaatgaataat

SEQ ID NO: 479700 - DNA, 19 bp, Mus musculus
  siRNA target sequence for 4932422E22Rik (NM_176980.2,365-383).
gagtcaaatgaataatgca

SEQ ID NO: 479701 - DNA, 19 bp, Mus musculus
  siRNA target sequence for 4932422E22Rik (NM_176980.2,420-438).
cctactgccctcttagact

SEQ ID NO: 479702 - DNA, 19 bp, Mus musculus
  siRNA target sequence for 4932422E22Rik (NM_176980.2,421-439).
ctactgccctcttagacta

SEQ ID NO: 479703 - DNA, 19 bp, Mus musculus
  siRNA target sequence for 4932422E22Rik (NM_176980.2,444-462).
gaagtccatcagatcttaa

SEQ ID NO: 479704 - DNA, 19 bp, Mus musculus
  siRNA target sequence for 4932422E22Rik (NM_176980.2,465-483).
gagttggccattggaattt

SEQ ID NO: 479705 - DNA, 19 bp, Mus musculus
  siRNA target sequence for 4932422E22Rik (NM_176980.2,472-490).
ccattggaatttattgctt

SEQ ID NO: 479706 - DNA, 19 bp, Mus musculus
  siRNA target sequence for 4932422E22Rik (NM_176980.2,505-523).
caatcagtttagaagctaa

SEQ ID NO: 479707 - DNA, 19 bp, Mus musculus
  siRNA target sequence for 4932422E22Rik (NM_176980.2,509-527).
cagtttagaagctaatttt

SEQ ID NO: 479708 - DNA, 19 bp, Mus musculus
  siRNA target sequence for 4932422E22Rik (NM_176980.2,533-551).
gagtagttcttgtcaatta

SEQ ID NO: 479709 - DNA, 19 bp, Mus musculus
  siRNA target sequence for 4932422E22Rik (NM_176980.2,571-589).
ccagggttggacaaatttt

SEQ ID NO: 479710 - DNA, 19 bp, Mus musculus
  siRNA target sequence for 4932422E22Rik (NM_176980.2,594-612).
cagattgactacatgctaa

SEQ ID NO: 479711 - DNA, 19 bp, Mus musculus
  siRNA target sequence for 4932422E22Rik (NM_176980.2,615-633).
gcactgtggcatggaatat

SEQ ID NO: 479712 - DNA, 19 bp, Mus musculus
  siRNA target sequence for 4932422E22Rik (NM_176980.2,616-634).
cactgtggcatggaatata

SEQ ID NO: 479713 - DNA, 19 bp, Mus musculus
  siRNA target sequence for 4932422E22Rik (NM_176980.2,651-669).
cgagccagattctctgaat

SEQ ID NO: 479714 - DNA, 19 bp, Mus musculus
  siRNA target sequence for 4932422E22Rik (NM_176980.2,676-694).
gcacaatcatggacattga

SEQ ID NO: 479715 - DNA, 19 bp, Mus musculus
  siRNA target sequence for 4932422E22Rik (NM_176980.2,745-763).
cggcaggtttggttgatat

SEQ ID NO: 479716 - DNA, 19 bp, Mus musculus
  siRNA target sequence for 4932422E22Rik (NM_176980.2,746-764).
ggcaggtttggttgatatt

SEQ ID NO: 479717 - DNA, 19 bp, Mus musculus
  siRNA target sequence for 4932422E22Rik (NM_176980.2,747-765).
gcaggtttggttgatatta

SEQ ID NO: 479718 - DNA, 19 bp, Mus musculus
  siRNA target sequence for 4932422E22Rik (NM_176980.2,896-914).
cagcaccgtccaaattcaa

SEQ ID NO: 479719 - DNA, 19 bp, Mus musculus
  siRNA target sequence for 4932422E22Rik (NM_176980.2,898-916).
gcaccgtccaaattcaaca

SEQ ID NO: 479720 - DNA, 19 bp, Mus musculus
  siRNA target sequence for 4932422E22Rik (NM_176980.2,915-933).
cagcacgaaaacatcttta

SEQ ID NO: 479721 - DNA, 19 bp, Mus musculus
  siRNA target sequence for 4932422E22Rik (NM_176980.2,917-935).
gcacgaaaacatctttata

SEQ ID NO: 479722 - DNA, 19 bp, Mus musculus
  siRNA target sequence for 4932422E22Rik (NM_176980.2,954-972).
ctttccaatgctataaagt

SEQ ID NO: 479723 - DNA, 19 bp, Mus musculus
  siRNA target sequence for 4932422E22Rik (NM_176980.2,971-989).
gtacaaccaggattatcta

SEQ ID NO: 479724 - DNA, 19 bp, Mus musculus
  siRNA target sequence for 4932422E22Rik (NM_176980.2,980-998).
ggattatctagacatttgt

SEQ ID NO: 479725 - DNA, 19 bp, Mus musculus
  siRNA target sequence for 4932422E22Rik (NM_176980.2,981-999).
gattatctagacatttgta

SEQ ID NO: 479726 - DNA, 19 bp, Mus musculus
  siRNA target sequence for 4932422E22Rik (NM_176980.2,1000-1018).
cttaccagagactacaaaa

SEQ ID NO: 479727 - DNA, 19 bp, Mus musculus
  siRNA target sequence for 4932422E22Rik (NM_176980.2,1088-1106).
gggctatctgaagttaata

SEQ ID NO: 479728 - DNA, 19 bp, Mus musculus
  siRNA target sequence for 4932422E22Rik (NM_176980.2,1089-1107).
ggctatctgaagttaatat

SEQ ID NO: 479729 - DNA, 19 bp, Mus musculus
  siRNA target sequence for 4932422E22Rik (NM_176980.2,1091-1109).
ctatctgaagttaatatgt

SEQ ID NO: 479730 - DNA, 19 bp, Mus musculus
  siRNA target sequence for 4932422E22Rik (NM_176980.2,1100-1118).
gttaatatgttttctgatt

SEQ ID NO: 479731 - DNA, 19 bp, Mus musculus
  siRNA target sequence for 4932422E22Rik (NM_176980.2,1113-1131).
ctgattccatttttactca

SEQ ID NO: 479732 - DNA, 19 bp, Mus musculus
  siRNA target sequence for 4932422E22Rik (NM_176980.2,1119-1137).
ccatttttactcagtttaa

SEQ ID NO: 479733 - DNA, 19 bp, Mus musculus
  siRNA target sequence for 4932422E22Rik (NM_176980.2,1120-1138).
catttttactcagtttaaa

SEQ ID NO: 479734 - DNA, 19 bp, Mus musculus
  siRNA target sequence for 4932422E22Rik (NM_176980.2,1145-1163).
gatgaaagttccatatcta

SEQ ID NO: 479735 - DNA, 19 bp, Mus musculus
  siRNA target sequence for 4932422E22Rik (NM_176980.2,1283-1301).
ccacgttcacggaggaatt

SEQ ID NO: 479736 - DNA, 19 bp, Mus musculus
  siRNA target sequence for 4932422E22Rik (NM_176980.2,1286-1304).
cgttcacggaggaattgaa

SEQ ID NO: 479737 - DNA, 19 bp, Mus musculus
  siRNA target sequence for 4932422E22Rik (NM_176980.2,1287-1305).
gttcacggaggaattgaat

SEQ ID NO: 479738 - DNA, 19 bp, Mus musculus
  siRNA target sequence for 4932422E22Rik (NM_176980.2,1396-1414).
cagaagatgcgggatacaa

SEQ ID NO: 479739 - DNA, 19 bp, Mus musculus
  siRNA target sequence for 4932422E22Rik (NM_176980.2,1404-1422).
gcgggatacaaagaagttt

SEQ ID NO: 479740 - DNA, 19 bp, Mus musculus
  siRNA target sequence for 4932422E22Rik (NM_176980.2,1405-1423).
cgggatacaaagaagttta

SEQ ID NO: 479741 - DNA, 19 bp, Mus musculus
  siRNA target sequence for 4932422E22Rik (NM_176980.2,1539-1557).
gtgaataatctgaaagtga

SEQ ID NO: 479742 - DNA, 19 bp, Mus musculus
  siRNA target sequence for 4932422E22Rik (NM_176980.2,1567-1585).
cactgactgaagatcaact

SEQ ID NO: 479743 - DNA, 19 bp, Mus musculus
  siRNA target sequence for 4932422E22Rik (NM_176980.2,1581-1599).
caactacatgagcaattta

SEQ ID NO: 479744 - DNA, 19 bp, Mus musculus
  siRNA target sequence for 4932422E22Rik (NM_176980.2,1778-1796).
caaccgggtctctgtcata

SEQ ID NO: 479745 - DNA, 19 bp, Mus musculus
  siRNA target sequence for 4932422E22Rik (NM_176980.2,1783-1801).
gggtctctgtcatatgtca

SEQ ID NO: 479746 - DNA, 19 bp, Mus musculus
  siRNA target sequence for 4932422E22Rik (NM_176980.2,1803-1821).
ctgtggagcgccaacttca

SEQ ID NO: 479747 - DNA, 19 bp, Mus musculus
  siRNA target sequence for 4932422E22Rik (NM_176980.2,1853-1871).
ccaagcagactcatccaaa

SEQ ID NO: 479748 - DNA, 19 bp, Mus musculus
  siRNA target sequence for 4932422E22Rik (NM_176980.2,1897-1915).
gtccaacacctctacatct

SEQ ID NO: 479749 - DNA, 19 bp, Mus musculus
  siRNA target sequence for 4932422E22Rik (NM_176980.2,1916-1934).
ggctgcacaagcttgttca

SEQ ID NO: 479750 - DNA, 19 bp, Mus musculus
  siRNA target sequence for 4932422E22Rik (NM_176980.2,2019-2037).
gccttctatgataacatct

SEQ ID NO: 479751 - DNA, 19 bp, Mus musculus
  siRNA target sequence for 4932422E22Rik (NM_176980.2,2056-2074).
gtaggaaggatcctagttt

SEQ ID NO: 479752 - DNA, 19 bp, Mus musculus
  siRNA target sequence for 4932422E22Rik (NM_176980.2,2060-2078).
gaaggatcctagtttgcta

SEQ ID NO: 479753 - DNA, 19 bp, Mus musculus
  siRNA target sequence for 4932422E22Rik (NM_176980.2,2134-2152).
cgggagccctagacactat

SEQ ID NO: 479754 - DNA, 19 bp, Mus musculus
  siRNA target sequence for 4932422E22Rik (NM_176980.2,2135-2153).
gggagccctagacactatt

SEQ ID NO: 479755 - DNA, 19 bp, Mus musculus
  siRNA target sequence for 4932422E22Rik (NM_176980.2,2140-2158).
ccctagacactattcagta

SEQ ID NO: 479756 - DNA, 19 bp, Mus musculus
  siRNA target sequence for 4932422E22Rik (NM_176980.2,2197-2215).
caaagggaaacaacattat

SEQ ID NO: 479757 - DNA, 19 bp, Mus musculus
  siRNA target sequence for 4932422E22Rik (NM_176980.2,2244-2262).
gaggtgctcaagtacataa

SEQ ID NO: 479758 - DNA, 19 bp, Mus musculus
  siRNA target sequence for 4932422E22Rik (NM_176980.2,2246-2264).
ggtgctcaagtacataata

SEQ ID NO: 479759 - DNA, 19 bp, Mus musculus
  siRNA target sequence for 4932422E22Rik (NM_176980.2,2345-2363).
ggctgtcatgtctttagaa

SEQ ID NO: 479760 - DNA, 19 bp, Mus musculus
  siRNA target sequence for 4932422E22Rik (NM_176980.2,2371-2389).
gcttagcaaatgatcgata

SEQ ID NO: 479761 - DNA, 19 bp, Mus musculus
  siRNA target sequence for 4932422E22Rik (NM_176980.2,2405-2423).
ggatgcaggcactattcct

SEQ ID NO: 479762 - DNA, 19 bp, Mus musculus
  siRNA target sequence for 4932422E22Rik (NM_176980.2,2422-2440).
ctgccttagtcaatctatt

SEQ ID NO: 479763 - DNA, 19 bp, Mus musculus
  siRNA target sequence for 4932422E22Rik (NM_176980.2,2473-2491).
ccgttgggttgctgagtaa

SEQ ID NO: 479764 - DNA, 19 bp, Mus musculus
  siRNA target sequence for 4932422E22Rik (NM_176980.2,2474-2492).
cgttgggttgctgagtaat

SEQ ID NO: 479765 - DNA, 19 bp, Mus musculus
  siRNA target sequence for 4932422E22Rik (NM_176980.2,2475-2493).
gttgggttgctgagtaata

SEQ ID NO: 479766 - DNA, 19 bp, Mus musculus
  siRNA target sequence for 4932422E22Rik (NM_176980.2,2497-2515).
caactcatgtaagtatagt

SEQ ID NO: 479767 - DNA, 19 bp, Mus musculus
  siRNA target sequence for 4932422E22Rik (NM_176980.2,2509-2527).
gtatagtgcatgctatagt

SEQ ID NO: 479768 - DNA, 19 bp, Mus musculus
  siRNA target sequence for 4932422E22Rik (NM_176980.2,2585-2603).
ccattctcgctgtgctatt

SEQ ID NO: 479769 - DNA, 19 bp, Mus musculus
  siRNA target sequence for 4932422E22Rik (NM_176980.2,2586-2604).
cattctcgctgtgctatta

SEQ ID NO: 479770 - DNA, 19 bp, Mus musculus
  siRNA target sequence for 4932422E22Rik (NM_176980.2,2596-2614).
gtgctattattctgtatga

SEQ ID NO: 479771 - DNA, 19 bp, Mus musculus
  siRNA target sequence for 4932422E22Rik (NM_176980.2,2599-2617).
ctattattctgtatgatgt

SEQ ID NO: 479772 - DNA, 19 bp, Mus musculus
  siRNA target sequence for 4932422E22Rik (NM_176980.2,2609-2627).
gtatgatgttgctaagtgt

SEQ ID NO: 479773 - DNA, 19 bp, Mus musculus
  siRNA target sequence for 4932422E22Rik (NM_176980.2,2636-2654).
ggatgttattgccaaatat

SEQ ID NO: 479774 - DNA, 19 bp, Mus musculus
  siRNA target sequence for 4932422E22Rik (NM_176980.2,2658-2676).
ggaattccagctctgataa

SEQ ID NO: 479775 - DNA, 19 bp, Mus musculus
  siRNA target sequence for 4932422E22Rik (NM_176980.2,2665-2683).
cagctctgataaatctctt

SEQ ID NO: 479776 - DNA, 19 bp, Mus musculus
  siRNA target sequence for 4932422E22Rik (NM_176980.2,2701-2719).
gtgtgctagtgaacgtaat

SEQ ID NO: 479777 - DNA, 19 bp, Mus musculus
  siRNA target sequence for 4932422E22Rik (NM_176980.2,2703-2721).
gtgctagtgaacgtaatga

SEQ ID NO: 479778 - DNA, 19 bp, Mus musculus
  siRNA target sequence for 4932422E22Rik (NM_176980.2,2723-2741).
ctgtatccgggtgttatgt

SEQ ID NO: 479779 - DNA, 19 bp, Mus musculus
  siRNA target sequence for 4932422E22Rik (NM_176980.2,2725-2743).
gtatccgggtgttatgtat

SEQ ID NO: 479780 - DNA, 19 bp, Mus musculus
  siRNA target sequence for 4932422E22Rik (NM_176980.2,2751-2769).
gaaagcaaccaacaatcaa

SEQ ID NO: 479781 - DNA, 19 bp, Mus musculus
  siRNA target sequence for 4932422E22Rik (NM_176980.2,2755-2773).
gcaaccaacaatcaatgaa

SEQ ID NO: 479782 - DNA, 19 bp, Mus musculus
  siRNA target sequence for 4932422E22Rik (NM_176980.2,2760-2778).
caacaatcaatgaaagaca

SEQ ID NO: 479783 - DNA, 19 bp, Mus musculus
  siRNA target sequence for 4932422E22Rik (NM_176980.2,2763-2781).
caatcaatgaaagacaata

SEQ ID NO: 479784 - DNA, 19 bp, Mus musculus
  siRNA target sequence for 4932422E22Rik (NM_176980.2,2888-2906).
ggatgctatcgcaaaggaa

SEQ ID NO: 479785 - DNA, 19 bp, Mus musculus
  siRNA target sequence for 4932422E22Rik (NM_176980.2,2915-2933).
ccctcccctggtaactctt

SEQ ID NO: 479786 - DNA, 19 bp, Mus musculus
  siRNA target sequence for 4932422E22Rik (NM_176980.2,2917-2935).
ctcccctggtaactctttt

SEQ ID NO: 479787 - DNA, 19 bp, Mus musculus
  siRNA target sequence for 4932422E22Rik (NM_176980.2,2991-3009).
gcaaactgcaaccctttaa

SEQ ID NO: 479788 - DNA, 19 bp, Mus musculus
  siRNA target sequence for 4932422E22Rik (NM_176980.2,3110-3128).
ggccttggcaggacaaaca

SEQ ID NO: 479789 - DNA, 19 bp, Mus musculus
  siRNA target sequence for 4932422E22Rik (NM_176980.2,3111-3129).
gccttggcaggacaaacat

SEQ ID NO: 479790 - DNA, 19 bp, Mus musculus
  siRNA target sequence for 4932422E22Rik (NM_176980.2,3251-3269).
cagtcggatgcatcagaat

SEQ ID NO: 479791 - DNA, 19 bp, Mus musculus
  siRNA target sequence for 4932422E22Rik (NM_176980.2,3253-3271).
gtcggatgcatcagaatca

SEQ ID NO: 479792 - DNA, 19 bp, Mus musculus
  siRNA target sequence for 4932422E22Rik (NM_176980.2,3255-3273).
cggatgcatcagaatcaga

SEQ ID NO: 479793 - DNA, 19 bp, Mus musculus
  siRNA target sequence for 4932422E22Rik (NM_176980.2,3256-3274).
ggatgcatcagaatcagat

SEQ ID NO: 479794 - DNA, 19 bp, Mus musculus
  siRNA target sequence for 4932422E22Rik (NM_176980.2,3260-3278).
gcatcagaatcagatatgt

SEQ ID NO: 479795 - DNA, 19 bp, Mus musculus
  siRNA target sequence for 4932422E22Rik (NM_176980.2,3303-3321).
gttcgcctgctgaggatta

SEQ ID NO: 479796 - DNA, 19 bp, Mus musculus
  siRNA target sequence for 4932422E22Rik (NM_176980.2,3306-3324).
cgcctgctgaggattaata

SEQ ID NO: 479797 - DNA, 19 bp, Mus musculus
  siRNA target sequence for 4932422E22Rik (NM_176980.2,3307-3325).
gcctgctgaggattaataa

SEQ ID NO: 479798 - DNA, 19 bp, Mus musculus
  siRNA target sequence for 4932422E22Rik (NM_176980.2,3309-3327).
ctgctgaggattaataaga

SEQ ID NO: 479799 - DNA, 19 bp, Mus musculus
  siRNA target sequence for 4932422E22Rik (NM_176980.2,3365-3383).
ggggtccatttgtattggt

SEQ ID NO: 479800 - DNA, 19 bp, Mus musculus
  siRNA target sequence for 4932422E22Rik (NM_176980.2,3407-3425).
gagtcaacaatttgttgta

SEQ ID NO: 479801 - DNA, 19 bp, Mus musculus
  siRNA target sequence for 4932422E22Rik (NM_176980.2,3514-3532).
gcatcgtcctagggaataa

SEQ ID NO: 479802 - DNA, 19 bp, Mus musculus
  siRNA target sequence for 4932422E22Rik (NM_176980.2,3515-3533).
catcgtcctagggaataat

SEQ ID NO: 479803 - DNA, 19 bp, Mus musculus
  siRNA target sequence for 4932422E22Rik (NM_176980.2,3525-3543).
gggaataattcgctaaaaa

SEQ ID NO: 479804 - DNA, 19 bp, Mus musculus
  siRNA target sequence for 4932422E22Rik (NM_176980.2,3526-3544).
ggaataattcgctaaaaaa

SEQ ID NO: 479805 - DNA, 19 bp, Mus musculus
  siRNA target sequence for 4932422E22Rik (NM_176980.2,3617-3635).
ctgcctgaaagcaggttat

SEQ ID NO: 479806 - DNA, 19 bp, Mus musculus
  siRNA target sequence for 4932422E22Rik (NM_176980.2,3620-3638).
cctgaaagcaggttatgca

SEQ ID NO: 479807 - DNA, 19 bp, Mus musculus
  siRNA target sequence for 4932422E22Rik (NM_176980.2,3693-3711).
ggattgataactgtatcta

SEQ ID NO: 479808 - DNA, 19 bp, Mus musculus
  siRNA target sequence for 4932422E22Rik (NM_176980.2,3694-3712).
gattgataactgtatctat

SEQ ID NO: 479809 - DNA, 19 bp, Mus musculus
  siRNA target sequence for 4932422E22Rik (NM_176980.2,3726-3744).
cttcaatctagcgttgaaa

SEQ ID NO: 479810 - DNA, 19 bp, Mus musculus
  siRNA target sequence for 4932422E22Rik (NM_176980.2,3751-3769).
gggcaatggcagcatttca

SEQ ID NO: 479811 - DNA, 19 bp, Mus musculus
  siRNA target sequence for 4932422E22Rik (NM_176980.2,3801-3819).
gtggaacatgttactttgt

SEQ ID NO: 479812 - DNA, 19 bp, Mus musculus
  siRNA target sequence for 4932422E22Rik (NM_176980.2,3807-3825).
catgttactttgtatggaa

SEQ ID NO: 479813 - DNA, 19 bp, Mus musculus
  siRNA target sequence for 4932422E22Rik (NM_176980.2,3859-3877).
cagtccatgctcctactat

SEQ ID NO: 479814 - DNA, 19 bp, Mus musculus
  siRNA target sequence for 4932422E22Rik (NM_176980.2,3881-3899).
cttgacaggtaatataata

SEQ ID NO: 479815 - DNA, 19 bp, Mus musculus
  siRNA target sequence for 4932422E22Rik (NM_176980.2,4473-4491).
gaccctccagcatttttga

SEQ ID NO: 479816 - DNA, 19 bp, Mus musculus
  siRNA target sequence for 4932702D22 (NM_172857.1,792-810).
catttcctcaaccagattt

SEQ ID NO: 479817 - DNA, 19 bp, Mus musculus
  siRNA target sequence for 4932702D22 (NM_172857.1,867-885).
cacgtggatcctaacaaga

SEQ ID NO: 479818 - DNA, 19 bp, Mus musculus
  siRNA target sequence for 4932702D22 (NM_172857.1,869-887).
cgtggatcctaacaagatt

SEQ ID NO: 479819 - DNA, 19 bp, Mus musculus
  siRNA target sequence for 4932702D22 (NM_172857.1,872-890).
ggatcctaacaagattgtt

SEQ ID NO: 479820 - DNA, 19 bp, Mus musculus
  siRNA target sequence for 4932702D22 (NM_172857.1,930-948).
gtcccaggggtgaaagtgt

SEQ ID NO: 479821 - DNA, 19 bp, Mus musculus
  siRNA target sequence for 4932702D22 (NM_172857.1,953-971).
cgggcacgagatcttgaat

SEQ ID NO: 479822 - DNA, 19 bp, Mus musculus
  siRNA target sequence for 4932702D22 (NM_172857.1,955-973).
ggcacgagatcttgaatgt

SEQ ID NO: 479823 - DNA, 19 bp, Mus musculus
  siRNA target sequence for 4932702D22 (NM_172857.1,1013-1031).
ggcatccgctgttagcata

SEQ ID NO: 479824 - DNA, 19 bp, Mus musculus
  siRNA target sequence for 4932702D22 (NM_172857.1,1014-1032).
gcatccgctgttagcataa

SEQ ID NO: 479825 - DNA, 19 bp, Mus musculus
  siRNA target sequence for 4932702D22 (NM_172857.1,1015-1033).
catccgctgttagcataaa

SEQ ID NO: 479826 - DNA, 19 bp, Mus musculus
  siRNA target sequence for 4932702D22 (NM_172857.1,1019-1037).
cgctgttagcataaataca

SEQ ID NO: 479827 - DNA, 19 bp, Mus musculus
  siRNA target sequence for 4932702D22 (NM_172857.1,1042-1060).
gagctggaatggagaaagt

SEQ ID NO: 479828 - DNA, 19 bp, Mus musculus
  siRNA target sequence for 4932702D22 (NM_172857.1,1171-1189).
catacacagtcattgatca

SEQ ID NO: 479829 - DNA, 19 bp, Mus musculus
  siRNA target sequence for 4932702D22 (NM_172857.1,1212-1230).
gcaatgctccacatcaaga

SEQ ID NO: 479830 - DNA, 19 bp, Mus musculus
  siRNA target sequence for 4932702D22 (NM_172857.1,1213-1231).
caatgctccacatcaagaa

SEQ ID NO: 479831 - DNA, 19 bp, Mus musculus
  siRNA target sequence for 4932702D22 (NM_172857.1,1254-1272).
gccgaaggcgccaatgtgt

SEQ ID NO: 479832 - DNA, 19 bp, Mus musculus
  siRNA target sequence for 4932702D22 (NM_172857.1,1296-1314).
cttcaggtggccacaaaca

SEQ ID NO: 479833 - DNA, 19 bp, Mus musculus
  siRNA target sequence for 4932702D22 (NM_172857.1,1306-1324).
ccacaaacagccgagttta

SEQ ID NO: 479834 - DNA, 19 bp, Mus musculus
  siRNA target sequence for 4932702D22 (NM_172857.1,1313-1331).
cagccgagtttacttgttt

SEQ ID NO: 479835 - DNA, 19 bp, Mus musculus
  siRNA target sequence for 4932702D22 (NM_172857.1,1315-1333).
gccgagtttacttgtttga

SEQ ID NO: 479836 - DNA, 19 bp, Mus musculus
  siRNA target sequence for 4932702D22 (NM_172857.1,1346-1364).
gggaagtcgtgctttcaat

SEQ ID NO: 479837 - DNA, 19 bp, Mus musculus
  siRNA target sequence for 4932702D22 (NM_172857.1,1347-1365).
ggaagtcgtgctttcaata

SEQ ID NO: 479838 - DNA, 19 bp, Mus musculus
  siRNA target sequence for 4932702D22 (NM_172857.1,1436-1454).
ctgcctgtctcatcagtat

SEQ ID NO: 479839 - DNA, 19 bp, Mus musculus
  siRNA target sequence for 4932702D22 (NM_172857.1,1444-1462).
ctcatcagtatggaatcat
